United States Patent Application Publication US 2007/0042381 A1 - sequence listing, part 57

SEQ ID NO: 2581148 - RNA, 22 nt, Human
gaacugcuagucaagugcgucc

SEQ ID NO: 2581149 - RNA, 21 nt, Human
gaacugccuuuggcagaguuc

SEQ ID NO: 2581150 - RNA, 12 nt, Human
gaacucugaaau

SEQ ID NO: 2581151 - RNA, 20 nt, Human
gaacugaaccggcuuuacca

SEQ ID NO: 2581152 - RNA, 17 nt, Human
gaacugcugggcuuggc

SEQ ID NO: 2581153 - RNA, 20 nt, Human
gaacugcugggcuuggcagc

SEQ ID NO: 2581154 - RNA, 20 nt, Human
gaacuggacccuguugcuaa

SEQ ID NO: 2581155 - RNA, 18 nt, Human
gaacuggacccuguugcu

SEQ ID NO: 2581156 - RNA, 16 nt, Human
gaacugcuuucuuucg

SEQ ID NO: 2581157 - RNA, 23 nt, Human
gaacuggacccuguugcuaagcc

SEQ ID NO: 2581158 - RNA, 22 nt, Human
gaacuggacccuguugcuaagc

SEQ ID NO: 2581159 - RNA, 14 nt, Human
gaacuggacucagg

SEQ ID NO: 2581160 - RNA, 15 nt, Human
gaacuggacucagga

SEQ ID NO: 2581161 - RNA, 21 nt, Human
gaacuggacucaggaugccca

SEQ ID NO: 2581162 - RNA, 23 nt, Human
gaacuggacucaggaugcccagg

SEQ ID NO: 2581163 - RNA, 20 nt, Human
gaauauugcugauggugcaa

SEQ ID NO: 2581164 - RNA, 19 nt, Human
gaauauugcugauggugca

SEQ ID NO: 2581165 - RNA, 13 nt, Human
gaauauuguccau

SEQ ID NO: 2581166 - RNA, 11 nt, Human
gaauauucagg

SEQ ID NO: 2581167 - RNA, 12 nt, Human
gaauauuuauua

SEQ ID NO: 2581168 - RNA, 19 nt, Human
gaauauuuauauuucacua

SEQ ID NO: 2581169 - RNA, 10 nt, Human
gaauauuuau

SEQ ID NO: 2581170 - RNA, 18 nt, Human
gaauauuuauauuucacu

SEQ ID NO: 2581171 - RNA, 18 nt, Human
gaauauuuauuaccucug

SEQ ID NO: 2581172 - RNA, 17 nt, Human
gaauauuuauuaccucu

SEQ ID NO: 2581173 - RNA, 15 nt, Human
gaauauuuauuaccu

SEQ ID NO: 2581174 - RNA, 13 nt, Human
gaauauuuauuac

SEQ ID NO: 2581175 - RNA, 21 nt, Human
gaauauuuauuaccucugaua

SEQ ID NO: 2581176 - RNA, 19 nt, Human
gaauauuuauuaccucuga

SEQ ID NO: 2581177 - RNA, 10 nt, Human
gaauauuuga

SEQ ID NO: 2581178 - RNA, 19 nt, Human
gaauauuuccauauggauu

SEQ ID NO: 2581179 - RNA, 20 nt, Human
gaauauuuauauuucacuau

SEQ ID NO: 2581180 - RNA, 12 nt, Human
gaauauuugaau

SEQ ID NO: 2581181 - RNA, 11 nt, Human
gaauauuugaa

SEQ ID NO: 2581182 - RNA, 15 nt, Human
gaauauugcugaugg

SEQ ID NO: 2581183 - RNA, 14 nt, Human
gaauauugcugaug

SEQ ID NO: 2581184 - RNA, 20 nt, Human
gaauauuagugaccucagcu

SEQ ID NO: 2581185 - RNA, 21 nt, Human
gaauauuagcuuuacuguuug

SEQ ID NO: 2581186 - RNA, 12 nt, Human
gaauauuagcuu

SEQ ID NO: 2581187 - RNA, 21 nt, Human
gaauaugggagaaauagugug

SEQ ID NO: 2581188 - RNA, 13 nt, Human
gaauauaauuauc

SEQ ID NO: 2581189 - RNA, 12 nt, Human
gaauauaauuau

SEQ ID NO: 2581190 - RNA, 20 nt, Human
gaauauaauauauuugugua

SEQ ID NO: 2581191 - RNA, 19 nt, Human
gaauauaauauauuugugu

SEQ ID NO: 2581192 - RNA, 16 nt, Human
gaauauaauacuguau

SEQ ID NO: 2581193 - RNA, 23 nt, Human
gaauagucuagauggcuccucuc

SEQ ID NO: 2581194 - RNA, 14 nt, Human
gaauauaaacacua

SEQ ID NO: 2581195 - RNA, 21 nt, Human
gaauauaaacacuauauggca

SEQ ID NO: 2581196 - RNA, 21 nt, Human
gaaguuguuacuaacuaaacu

SEQ ID NO: 2581197 - RNA, 20 nt, Human
gaaguugugccuuuuauagc

SEQ ID NO: 2581198 - RNA, 21 nt, Human
gaaguugauauagaacagugc

SEQ ID NO: 2581199 - RNA, 18 nt, Human
gaaguugauauagaacag

SEQ ID NO: 2581200 - RNA, 17 nt, Human
gaaguugcagugagcug

SEQ ID NO: 2581201 - RNA, 22 nt, Human
gaaguuggagugaguguggcuc

SEQ ID NO: 2581202 - RNA, 17 nt, Human
gaauaguauccuccagg

SEQ ID NO: 2581203 - RNA, 16 nt, Human
gaauaguauccuccag

SEQ ID NO: 2581204 - RNA, 14 nt, Human
gaaguuguuuguca

SEQ ID NO: 2581205 - RNA, 22 nt, Human
gaaguuguuacuaacuaaacuc

SEQ ID NO: 2581206 - RNA, 21 nt, Human
gaauaguauccuccagguuuu

SEQ ID NO: 2581207 - RNA, 20 nt, Human
gaauaguauccuccagguuu

SEQ ID NO: 2581208 - RNA, 19 nt, Human
gaauaguauccuccagguu

SEQ ID NO: 2581209 - RNA, 18 nt, Human
gaauaguauccuccaggu

SEQ ID NO: 2581210 - RNA, 13 nt, Human
gaauauaaacacu

SEQ ID NO: 2581211 - RNA, 16 nt, Human
gaauaguugagcccca

SEQ ID NO: 2581212 - RNA, 15 nt, Human
gaaguugaaugggca

SEQ ID NO: 2581213 - RNA, 22 nt, Human
gaaguucaccauuaaaagggau

SEQ ID NO: 2581214 - RNA, 20 nt, Human
gaaguucaccauuaaaaggg

SEQ ID NO: 2581215 - RNA, 19 nt, Human
gaaguucaccauuaaaagg

SEQ ID NO: 2581216 - RNA, 15 nt, Human
gaaguucaccauuaa

SEQ ID NO: 2581217 - RNA, 21 nt, Human
gaaguuauuuucuacaguggu

SEQ ID NO: 2581218 - RNA, 21 nt, Human
gaaguuagaauuccuucaggg

SEQ ID NO: 2581219 - RNA, 20 nt, Human
gaaguuagaauuccuucagg

SEQ ID NO: 2581220 - RNA, 14 nt, Human
gaaguuagaauucc

SEQ ID NO: 2581221 - RNA, 13 nt, Human
gaaguuagaauuc

SEQ ID NO: 2581222 - RNA, 16 nt, Human
gaaguuacugaaugca

SEQ ID NO: 2581223 - RNA, 15 nt, Human
gaaguuacugaaugc

SEQ ID NO: 2581224 - RNA, 15 nt, Human
gaaguuaacagagac

SEQ ID NO: 2581225 - RNA, 18 nt, Human
gaaguuacuguuauagag

SEQ ID NO: 2581226 - RNA, 14 nt, Human
gaaguuacugaaug

SEQ ID NO: 2581227 - RNA, 22 nt, Human
gaaguguuucacgagagcccgg

SEQ ID NO: 2581228 - RNA, 21 nt, Human
gaaguguuucacgagagcccg

SEQ ID NO: 2581229 - RNA, 22 nt, Human
gaaguguugcauggauguuuua

SEQ ID NO: 2581230 - RNA, 21 nt, Human
gaaguguugcauggauguuuu

SEQ ID NO: 2581231 - RNA, 18 nt, Human
gaaguguugcauggaugu

SEQ ID NO: 2581232 - RNA, 15 nt, Human
gaaguguugcaugga

SEQ ID NO: 2581233 - RNA, 13 nt, Human
gaaguguugcaug

SEQ ID NO: 2581234 - RNA, 17 nt, Human
gaaguguuaauacuagu

SEQ ID NO: 2581235 - RNA, 15 nt, Human
gaaguguguuuccuu

SEQ ID NO: 2581236 - RNA, 21 nt, Human
gaagugugggucugugugugu

SEQ ID NO: 2581237 - RNA, 24 nt, Human
gaagugugggucugugugugugua

SEQ ID NO: 2581238 - RNA, 17 nt, Human
gaaggggaggagggcgg

SEQ ID NO: 2581239 - RNA, 15 nt, Human
gaaggggaggagggc

SEQ ID NO: 2581240 - RNA, 22 nt, Human
gaaggggagauaaggguaucug

SEQ ID NO: 2581241 - RNA, 21 nt, Human
gaaggggacccccgcccccug

SEQ ID NO: 2581242 - RNA, 20 nt, Human
gaaggggacccccgcccccu

SEQ ID NO: 2581243 - RNA, 18 nt, Human
gaaggggacccccgcccc

SEQ ID NO: 2581244 - RNA, 12 nt, Human
gaagcuagcucc

SEQ ID NO: 2581245 - RNA, 19 nt, Human
gaagcuagcuccccuccuc

SEQ ID NO: 2581246 - RNA, 17 nt, Human
gaagcuagcuccccucc

SEQ ID NO: 2581247 - RNA, 22 nt, Human
gaagcuagcuccccuccucucc

SEQ ID NO: 2581248 - RNA, 16 nt, Human
gaagcuagcuccccuc

SEQ ID NO: 2581249 - RNA, 15 nt, Human
gaagcuagcuccccu

SEQ ID NO: 2581250 - RNA, 14 nt, Human
gaagcuagcucccc

SEQ ID NO: 2581251 - RNA, 20 nt, Human
gaagcuaucguaaaauuaag

SEQ ID NO: 2581252 - RNA, 19 nt, Human
gaagcuccgcuuucuaccc

SEQ ID NO: 2581253 - RNA, 20 nt, Human
gaagcucaccuguugcuuac

SEQ ID NO: 2581254 - RNA, 19 nt, Human
gaagcuauaaauuccucuu

SEQ ID NO: 2581255 - RNA, 22 nt, Human
gaagcucaccuguugcuuacaa

SEQ ID NO: 2581256 - RNA, 14 nt, Human
gaagcucagacugg

SEQ ID NO: 2581257 - RNA, 12 nt, Human
gaagcucagccc

SEQ ID NO: 2581258 - RNA, 13 nt, Human
gaagcucagccca

SEQ ID NO: 2581259 - RNA, 23 nt, Human
gaagcucuggcugaacccugugc

SEQ ID NO: 2581260 - RNA, 20 nt, Human
gaagcucuggcugaacccug

SEQ ID NO: 2581261 - RNA, 19 nt, Human
gaagcucuggcugaacccu

SEQ ID NO: 2581262 - RNA, 12 nt, Human
gaagcucuggcu

SEQ ID NO: 2581263 - RNA, 16 nt, Human
gaagcucugaagucac

SEQ ID NO: 2581264 - RNA, 20 nt, Human
gaagcucugaagucacauca

SEQ ID NO: 2581265 - RNA, 23 nt, Human
gaagcugaagugcauccaaaggu

SEQ ID NO: 2581266 - RNA, 22 nt, Human
gaagcugaagugcauccaaagg

SEQ ID NO: 2581267 - RNA, 18 nt, Human
gaagcugacgaacuucca

SEQ ID NO: 2581268 - RNA, 19 nt, Human
gaagcugacgaacuuccau

SEQ ID NO: 2581269 - RNA, 22 nt, Human
gaagcugaaaaccuaaguccuu

SEQ ID NO: 2581270 - RNA, 18 nt, Human
gaagcucuugaagacacu

SEQ ID NO: 2581271 - RNA, 17 nt, Human
gaaggccccgcccaggc

SEQ ID NO: 2581272 - RNA, 21 nt, Human
gaagcugaugcuuugcuucaa

SEQ ID NO: 2581273 - RNA, 17 nt, Human
gaagcugaugcuuugcu

SEQ ID NO: 2581274 - RNA, 19 nt, Human
gaagcugagcaccagggga

SEQ ID NO: 2581275 - RNA, 14 nt, Human
gaagcugagcacca

SEQ ID NO: 2581276 - RNA, 17 nt, Human
gaagcugagcaccaggg

SEQ ID NO: 2581277 - RNA, 18 nt, Human
gaagcugaggcgggagaa

SEQ ID NO: 2581278 - RNA, 22 nt, Human
gaagcuccgcuuucuacccagc

SEQ ID NO: 2581279 - RNA, 17 nt, Human
gaagcuccucuccccag

SEQ ID NO: 2581280 - RNA, 19 nt, Human
gaagcuccucuccccagcc

SEQ ID NO: 2581281 - RNA, 14 nt, Human
gaagcucagcccac

SEQ ID NO: 2581282 - RNA, 15 nt, Human
gaagcucagcccacc

SEQ ID NO: 2581283 - RNA, 17 nt, Human
gaagcucagcccacccc

SEQ ID NO: 2581284 - RNA, 18 nt, Human
gaagcucagcccaccccc

SEQ ID NO: 2581285 - RNA, 20 nt, Human
gaagcuccucuccccagccc

SEQ ID NO: 2581286 - RNA, 21 nt, Human
gaagcuccucuccccagccca

SEQ ID NO: 2581287 - RNA, 22 nt, Human
gaagcuccucuccccagcccag

SEQ ID NO: 2581288 - RNA, 23 nt, Human
gaagcuccucuccccagcccaga

SEQ ID NO: 2581289 - RNA, 13 nt, Human
gaagcucugaagu

SEQ ID NO: 2581290 - RNA, 15 nt, Human
gaagcucugaaguca

SEQ ID NO: 2581291 - RNA, 19 nt, Human
gaagcucagcccacccccc

SEQ ID NO: 2581292 - RNA, 22 nt, Human
gaaggcuggguucugauccuag

SEQ ID NO: 2581293 - RNA, 20 nt, Human
gaaggcuggguucugauccu

SEQ ID NO: 2581294 - RNA, 15 nt, Human
gaagggccagagcca

SEQ ID NO: 2581295 - RNA, 16 nt, Human
gaagggccagagccag

SEQ ID NO: 2581296 - RNA, 17 nt, Human
gaagggccagagccagg

SEQ ID NO: 2581297 - RNA, 18 nt, Human
gaagggccagagccaggg

SEQ ID NO: 2581298 - RNA, 16 nt, Human
gaaggcuucucucugu

SEQ ID NO: 2581299 - RNA, 14 nt, Human
gaagggccagagcc

SEQ ID NO: 2581300 - RNA, 21 nt, Human
gaaggcucuucuccccagagu

SEQ ID NO: 2581301 - RNA, 12 nt, Human
gaaggcuguccu

SEQ ID NO: 2581302 - RNA, 17 nt, Human
gaaggcuguccuuaccc

SEQ ID NO: 2581303 - RNA, 11 nt, Human
gaagggccagu

SEQ ID NO: 2581304 - RNA, 13 nt, Human
gaagggccagagc

SEQ ID NO: 2581305 - RNA, 14 nt, Human
gaagggccaguccu

SEQ ID NO: 2581306 - RNA, 16 nt, Human
gaagggccaguccugc

SEQ ID NO: 2581307 - RNA, 18 nt, Human
gaagggccaguccugccu

SEQ ID NO: 2581308 - RNA, 19 nt, Human
gaagggccaguccugccug

SEQ ID NO: 2581309 - RNA, 20 nt, Human
gaagggccaguccugccugg

SEQ ID NO: 2581310 - RNA, 18 nt, Human
gaagggccagucugggcu

SEQ ID NO: 2581311 - RNA, 14 nt, Human
gaagggccagucug

SEQ ID NO: 2581312 - RNA, 22 nt, Human
gaagggccaguccugccuggcc

SEQ ID NO: 2581313 - RNA, 20 nt, Human
gaagggcuagaaccuggagg

SEQ ID NO: 2581314 - RNA, 22 nt, Human
gaagggcuagaaccuggagagc

SEQ ID NO: 2581315 - RNA, 20 nt, Human
gaagggcuagaaccuggaga

SEQ ID NO: 2581316 - RNA, 19 nt, Human
gaagggcuagaaccuggag

SEQ ID NO: 2581317 - RNA, 20 nt, Human
gaagggccagucugggcugc

SEQ ID NO: 2581318 - RNA, 19 nt, Human
gaagggccagucugggcug

SEQ ID NO: 2581319 - RNA, 21 nt, Human
gaagggcccuucacugccuuu

SEQ ID NO: 2581320 - RNA, 21 nt, Human
gaagggcuuggacucaagcaa

SEQ ID NO: 2581321 - RNA, 16 nt, Human
gaaggggacccccgcc

SEQ ID NO: 2581322 - RNA, 19 nt, Human
gaaggccccgcccaggcuu

SEQ ID NO: 2581323 - RNA, 18 nt, Human
gaaggccccgcccaggcu

SEQ ID NO: 2581324 - RNA, 21 nt, Human
gaaggcucgagcaugccugga

SEQ ID NO: 2581325 - RNA, 17 nt, Human
gaaggccgagaagcaag

SEQ ID NO: 2581326 - RNA, 18 nt, Human
gaaggccgagaagcaaga

SEQ ID NO: 2581327 - RNA, 20 nt, Human
gaaggccucccuagccagca

SEQ ID NO: 2581328 - RNA, 22 nt, Human
gaaggccgagaagcaagaaaga

SEQ ID NO: 2581329 - RNA, 19 nt, Human
gaaggcuggguucugaucc

SEQ ID NO: 2581330 - RNA, 15 nt, Human
gaaggcuggguucug

SEQ ID NO: 2581331 - RNA, 13 nt, Human
gaaggcuggcugg

SEQ ID NO: 2581332 - RNA, 16 nt, Human
gaaggcuggcugggca

SEQ ID NO: 2581333 - RNA, 23 nt, Human
gaaggcucuucuccccagaguuc

SEQ ID NO: 2581334 - RNA, 18 nt, Human
gaaggcucuucuccccag

SEQ ID NO: 2581335 - RNA, 19 nt, Human
gaaggcucgagcaugccug

SEQ ID NO: 2581336 - RNA, 20 nt, Human
gacagaaccccuacaugaaa

SEQ ID NO: 2581337 - RNA, 15 nt, Human
gacagaagcagcucu

SEQ ID NO: 2581338 - RNA, 17 nt, Human
gacagcccgggcucugc

SEQ ID NO: 2581339 - RNA, 21 nt, Human
gacagaaagcagaacagugau

SEQ ID NO: 2581340 - RNA, 15 nt, Human
gacagaacacugucu

SEQ ID NO: 2581341 - RNA, 14 nt, Human
gacagaacacuguc

SEQ ID NO: 2581342 - RNA, 13 nt, Human
gacagaacacugu

SEQ ID NO: 2581343 - RNA, 20 nt, Human
gacacaggaugaaggcaaug

SEQ ID NO: 2581344 - RNA, 17 nt, Human
gacacaggaugaaggca

SEQ ID NO: 2581345 - RNA, 22 nt, Human
gacacagcuuuaucaccagaga

SEQ ID NO: 2581346 - RNA, 23 nt, Human
gacacagcuuuaucaccagagag

SEQ ID NO: 2581347 - RNA, 12 nt, Human
gacacaggcccg

SEQ ID NO: 2581348 - RNA, 23 nt, Human
gacacagcucuucuccaggcugu

SEQ ID NO: 2581349 - RNA, 22 nt, Human
gacacagcucuucuccaggcug

SEQ ID NO: 2581350 - RNA, 17 nt, Human
gacacagcucuucucca

SEQ ID NO: 2581351 - RNA, 11 nt, Human
gacacagaaaa

SEQ ID NO: 2581352 - RNA, 16 nt, Human
gacacagaaaauguug

SEQ ID NO: 2581353 - RNA, 18 nt, Human
gacacagaaaauguugag

SEQ ID NO: 2581354 - RNA, 13 nt, Human
gacacagcucuuc

SEQ ID NO: 2581355 - RNA, 16 nt, Human
gacacagcucuucucc

SEQ ID NO: 2581356 - RNA, 14 nt, Human
gacacagcucuucu

SEQ ID NO: 2581357 - RNA, 16 nt, Human
gacacacugaagaagc

SEQ ID NO: 2581358 - RNA, 15 nt, Human
gacacacugaagaag

SEQ ID NO: 2581359 - RNA, 17 nt, Human
gacauuugcucauggaa

SEQ ID NO: 2581360 - RNA, 16 nt, Human
gacauuugcucaugga

SEQ ID NO: 2581361 - RNA, 15 nt, Human
gacauuugccuugcu

SEQ ID NO: 2581362 - RNA, 21 nt, Human
gacauuucucuuacugcaaau

SEQ ID NO: 2581363 - RNA, 20 nt, Human
gacauuucucuuacugcaaa

SEQ ID NO: 2581364 - RNA, 19 nt, Human
gacauuucucuuacugcaa

SEQ ID NO: 2581365 - RNA, 16 nt, Human
gacauuucuuugugcu

SEQ ID NO: 2581366 - RNA, 13 nt, Human
gacauuucucuaa

SEQ ID NO: 2581367 - RNA, 16 nt, Human
gacauuucucuaagag

SEQ ID NO: 2581368 - RNA, 18 nt, Human
gacauuuauacucuuuuu

SEQ ID NO: 2581369 - RNA, 21 nt, Human
gacauuguuuugccaacauug

SEQ ID NO: 2581370 - RNA, 11 nt, Human
gacauuuccca

SEQ ID NO: 2581371 - RNA, 19 nt, Human
gacauuguuggccaaagcc

SEQ ID NO: 2581372 - RNA, 20 nt, Human
gacauuguuuugccaacauu

SEQ ID NO: 2581373 - RNA, 14 nt, Human
gacauuguuuugcc

SEQ ID NO: 2581374 - RNA, 13 nt, Human
gacauuguuuugc

SEQ ID NO: 2581375 - RNA, 22 nt, Human
gacauuguuggcagcauaaagg

SEQ ID NO: 2581376 - RNA, 22 nt, Human
gacauuguuuugccaacauugc

SEQ ID NO: 2581377 - RNA, 23 nt, Human
gacauuccugggcacaguuuggu

SEQ ID NO: 2581378 - RNA, 17 nt, Human
gacauuccugggcacag

SEQ ID NO: 2581379 - RNA, 16 nt, Human
gacauuccugggcaca

SEQ ID NO: 2581380 - RNA, 22 nt, Human
gacauuccuaaacuaucuuuuu

SEQ ID NO: 2581381 - RNA, 20 nt, Human
gacauuccuaaacuaucuuu

SEQ ID NO: 2581382 - RNA, 18 nt, Human
gacauucaugccuggcuu

SEQ ID NO: 2581383 - RNA, 16 nt, Human
gacauucaugccuggc

SEQ ID NO: 2581384 - RNA, 23 nt, Human
gacauucugucgccuuagcaugu

SEQ ID NO: 2581385 - RNA, 17 nt, Human
gacauucugccaggccc

SEQ ID NO: 2581386 - RNA, 11 nt, Human
gacauucuguc

SEQ ID NO: 2581387 - RNA, 22 nt, Human
gacauucugccaggcccccaag

SEQ ID NO: 2581388 - RNA, 14 nt, Human
gacauucugccagg

SEQ ID NO: 2581389 - RNA, 15 nt, Human
gacauugcggacagc

SEQ ID NO: 2581390 - RNA, 14 nt, Human
gacauugcggacag

SEQ ID NO: 2581391 - RNA, 12 nt, Human
gacauugucaau

SEQ ID NO: 2581392 - RNA, 19 nt, Human
gacauuguagagcuucugg

SEQ ID NO: 2581393 - RNA, 17 nt, Human
gacauugucagcaaauu

SEQ ID NO: 2581394 - RNA, 13 nt, Human
gacauugucaaua

SEQ ID NO: 2581395 - RNA, 14 nt, Human
gacauugucaauaa

SEQ ID NO: 2581396 - RNA, 18 nt, Human
gacauuguggcacauucu

SEQ ID NO: 2581397 - RNA, 15 nt, Human
gacauugucaauaaa

SEQ ID NO: 2581398 - RNA, 17 nt, Human
gacauuguuggcagcau

SEQ ID NO: 2581399 - RNA, 19 nt, Human
gacagcccgggcucugccu

SEQ ID NO: 2581400 - RNA, 18 nt, Human
gacagcccgggcucugcc

SEQ ID NO: 2581401 - RNA, 16 nt, Human
gacagaagcagcucuu

SEQ ID NO: 2581402 - RNA, 20 nt, Human
gacagcccgggcucugccuc

SEQ ID NO: 2581403 - RNA, 13 nt, Human
gacagaagaaggc

SEQ ID NO: 2581404 - RNA, 21 nt, Human
gacagugagacucugucucag

SEQ ID NO: 2581405 - RNA, 15 nt, Human
gacagugaucuccau

SEQ ID NO: 2581406 - RNA, 21 nt, Human
gacagugaucuccauauguua

SEQ ID NO: 2581407 - RNA, 13 nt, Human
gacagugccuggg

SEQ ID NO: 2581408 - RNA, 18 nt, Human
gacauucaccugccccaa

SEQ ID NO: 2581409 - RNA, 16 nt, Human
gacagugcuucagccu

SEQ ID NO: 2581410 - RNA, 16 nt, Human
gacagugaucuccaua

SEQ ID NO: 2581411 - RNA, 17 nt, Human
gacagugccugggaaug

SEQ ID NO: 2581412 - RNA, 21 nt, Human
gacagugccugggaauguauu

SEQ ID NO: 2581413 - RNA, 22 nt, Human
gacagugccugggaauguauua

SEQ ID NO: 2581414 - RNA, 16 nt, Human
gacauuccaagacagu

SEQ ID NO: 2581415 - RNA, 21 nt, Human
gacauucaccugccccaacuc

SEQ ID NO: 2581416 - RNA, 13 nt, Human
gacauucaugccu

SEQ ID NO: 2581417 - RNA, 19 nt, Human
gaccaucccugaaggcccc

SEQ ID NO: 2581418 - RNA, 18 nt, Human
gaccaucccugaaggccc

SEQ ID NO: 2581419 - RNA, 13 nt, Human
gaccaucccugaa

SEQ ID NO: 2581420 - RNA, 12 nt, Human
gaccaucccuga

SEQ ID NO: 2581421 - RNA, 14 nt, Human
gaccagggagccuu

SEQ ID NO: 2581422 - RNA, 15 nt, Human
gaccagggagccuuu

SEQ ID NO: 2581423 - RNA, 22 nt, Human
gaccagggagccuuugguucug

SEQ ID NO: 2581424 - RNA, 14 nt, Human
gaccagggcagggc

SEQ ID NO: 2581425 - RNA, 20 nt, Human
gaccagggauuuccaugaug

SEQ ID NO: 2581426 - RNA, 15 nt, Human
gaccagggcagggcc

SEQ ID NO: 2581427 - RNA, 16 nt, Human
gaccagggcagggcca

SEQ ID NO: 2581428 - RNA, 20 nt, Human
gaccauaauguuacauuauu

SEQ ID NO: 2581429 - RNA, 13 nt, Human
gaccauacuaauu

SEQ ID NO: 2581430 - RNA, 15 nt, Human
gaccauaauguuaca

SEQ ID NO: 2581431 - RNA, 19 nt, Human
gaccauccacucuacccuc

SEQ ID NO: 2581432 - RNA, 13 nt, Human
gaccagcucagga

SEQ ID NO: 2581433 - RNA, 14 nt, Human
gaccagcucaggac

SEQ ID NO: 2581434 - RNA, 22 nt, Human
gaccagcucaggacagaugcca

SEQ ID NO: 2581435 - RNA, 18 nt, Human
gaccagggauuuccauga

SEQ ID NO: 2581436 - RNA, 13 nt, Human
gaccagcuggggc

SEQ ID NO: 2581437 - RNA, 12 nt, Human
gaccagcugggg

SEQ ID NO: 2581438 - RNA, 11 nt, Human
gaccagcuggg

SEQ ID NO: 2581439 - RNA, 23 nt, Human
gaccagcuggggcguggggaggg

SEQ ID NO: 2581440 - RNA, 23 nt, Human
gaccagccuguuggacccgcucu

SEQ ID NO: 2581441 - RNA, 12 nt, Human
gaccagcucagg

SEQ ID NO: 2581442 - RNA, 12 nt, Human
gaccagccuggg

SEQ ID NO: 2581443 - RNA, 17 nt, Human
gaccagccugggcagca

SEQ ID NO: 2581444 - RNA, 22 nt, Human
gaccagccuggccaacauggua

SEQ ID NO: 2581445 - RNA, 15 nt, Human
gacgcucucuggccu

SEQ ID NO: 2581446 - RNA, 19 nt, Human
gacgcuacccgggaagggg

SEQ ID NO: 2581447 - RNA, 18 nt, Human
gacgcuacccgggaaggg

SEQ ID NO: 2581448 - RNA, 16 nt, Human
gacgcuacccgggaag

SEQ ID NO: 2581449 - RNA, 18 nt, Human
gacgccaucccagcccca

SEQ ID NO: 2581450 - RNA, 17 nt, Human
gacgccaucccagcccc

SEQ ID NO: 2581451 - RNA, 21 nt, Human
gacgccugggggugccaggac

SEQ ID NO: 2581452 - RNA, 14 nt, Human
gacgcgucuccugu

SEQ ID NO: 2581453 - RNA, 12 nt, Human
gacgccuggggg

SEQ ID NO: 2581454 - RNA, 19 nt, Human
gacgccugggggugccagg

SEQ ID NO: 2581455 - RNA, 16 nt, Human
gacgcucucuggccuu

SEQ ID NO: 2581456 - RNA, 17 nt, Human
gacgcucucuggccuuc

SEQ ID NO: 2581457 - RNA, 15 nt, Human
gacgcgucuccuguu

SEQ ID NO: 2581458 - RNA, 16 nt, Human
gacgccaucccagccc

SEQ ID NO: 2581459 - RNA, 14 nt, Human
gaccugaggcccuu

SEQ ID NO: 2581460 - RNA, 13 nt, Human
gaccugaggcccu

SEQ ID NO: 2581461 - RNA, 11 nt, Human
gaccugaggcc

SEQ ID NO: 2581462 - RNA, 14 nt, Human
gaccucuguugucc

SEQ ID NO: 2581463 - RNA, 12 nt, Human
gaccucuguugu

SEQ ID NO: 2581464 - RNA, 12 nt, Human
gaccugaagaau

SEQ ID NO: 2581465 - RNA, 16 nt, Human
gaccugaagagugguc

SEQ ID NO: 2581466 - RNA, 13 nt, Human
gaccugaaguuca

SEQ ID NO: 2581467 - RNA, 22 nt, Human
gaccugaaguucaccauuaaaa

SEQ ID NO: 2581468 - RNA, 15 nt, Human
gaccugacuauugaa

SEQ ID NO: 2581469 - RNA, 16 nt, Human
gaccugagcuccccac

SEQ ID NO: 2581470 - RNA, 18 nt, Human
gaccugagcuccccacca

SEQ ID NO: 2581471 - RNA, 22 nt, Human
gaccugagcuccccaccacccc

SEQ ID NO: 2581472 - RNA, 13 nt, Human
gaccugaggaagc

SEQ ID NO: 2581473 - RNA, 14 nt, Human
gaccugaggaagcg

SEQ ID NO: 2581474 - RNA, 19 nt, Human
gaccucuccaucuucagcu

SEQ ID NO: 2581475 - RNA, 16 nt, Human
gaccucuguuguccuc

SEQ ID NO: 2581476 - RNA, 15 nt, Human
gaccucugcucugag

SEQ ID NO: 2581477 - RNA, 16 nt, Human
gaccucugcucugagg

SEQ ID NO: 2581478 - RNA, 14 nt, Human
gaccucugcagcaa

SEQ ID NO: 2581479 - RNA, 22 nt, Human
gaccucguccucccccugccag

SEQ ID NO: 2581480 - RNA, 12 nt, Human
gaccucucccag

SEQ ID NO: 2581481 - RNA, 22 nt, Human
gaccucuccccuggaacugucu

SEQ ID NO: 2581482 - RNA, 14 nt, Human
gaccucucccaggg

SEQ ID NO: 2581483 - RNA, 20 nt, Human
gaccaucccugaaggccccg

SEQ ID NO: 2581484 - RNA, 13 nt, Human
gaccauccuauuu

SEQ ID NO: 2581485 - RNA, 21 nt, Human
gaccauccacucuacccuccc

SEQ ID NO: 2581486 - RNA, 23 nt, Human
gaccauccacucuacccucccac

SEQ ID NO: 2581487 - RNA, 17 nt, Human
gaccucguccucccccu

SEQ ID NO: 2581488 - RNA, 18 nt, Human
gaccucguccucccccug

SEQ ID NO: 2581489 - RNA, 19 nt, Human
gaccucguccucccccugc

SEQ ID NO: 2581490 - RNA, 21 nt, Human
gaccucguccucccccugcca

SEQ ID NO: 2581491 - RNA, 15 nt, Human
gaccucguccucccc

SEQ ID NO: 2581492 - RNA, 16 nt, Human
gaccucguccuccccc

SEQ ID NO: 2581493 - RNA, 13 nt, Human
gacuuuagggacu

SEQ ID NO: 2581494 - RNA, 22 nt, Human
gacuuuaucuaauaccucugug

SEQ ID NO: 2581495 - RNA, 21 nt, Human
gacuuuaucuaauaccucugu

SEQ ID NO: 2581496 - RNA, 17 nt, Human
gacuuuagucugcaaaa

SEQ ID NO: 2581497 - RNA, 19 nt, Human
gacuuuauuuucugguaga

SEQ ID NO: 2581498 - RNA, 12 nt, Human
gacuuucaggua

SEQ ID NO: 2581499 - RNA, 14 nt, Human
gacuuucagguacu

SEQ ID NO: 2581500 - RNA, 17 nt, Human
gacucuucugagcaccu

SEQ ID NO: 2581501 - RNA, 12 nt, Human
gacucuugcucu

SEQ ID NO: 2581502 - RNA, 14 nt, Human
gacucuuguuuuca

SEQ ID NO: 2581503 - RNA, 16 nt, Human
gacucuugcucuuucu

SEQ ID NO: 2581504 - RNA, 15 nt, Human
gacucuugcucuuuc

SEQ ID NO: 2581505 - RNA, 9 nt, Human
gacucuugu

SEQ ID NO: 2581506 - RNA, 21 nt, Human
gacucuuaagaagacugcauu

SEQ ID NO: 2581507 - RNA, 15 nt, Human
gacucuuacuuuuua

SEQ ID NO: 2581508 - RNA, 17 nt, Human
gacucuguggggccuug

SEQ ID NO: 2581509 - RNA, 18 nt, Human
gacucuguggggccuugg

SEQ ID NO: 2581510 - RNA, 15 nt, Human
gacucuuaagaagac

SEQ ID NO: 2581511 - RNA, 14 nt, Human
gacucuuaagaaga

SEQ ID NO: 2581512 - RNA, 21 nt, Human
gacucugcccccugcuggcuc

SEQ ID NO: 2581513 - RNA, 19 nt, Human
gacucugcccccugcuggc

SEQ ID NO: 2581514 - RNA, 22 nt, Human
gacucugcccccugcuggcucu

SEQ ID NO: 2581515 - RNA, 19 nt, Human
gacucugucucaaaaaaac

SEQ ID NO: 2581516 - RNA, 13 nt, Human
gacucagaagccu

SEQ ID NO: 2581517 - RNA, 15 nt, Human
gacucagaagccucu

SEQ ID NO: 2581518 - RNA, 16 nt, Human
gacucagaagccucug

SEQ ID NO: 2581519 - RNA, 17 nt, Human
gacucagaagccucugg

SEQ ID NO: 2581520 - RNA, 20 nt, Human
gacucugcacaugucuugua

SEQ ID NO: 2581521 - RNA, 18 nt, Human
gacucugcccccugcugg

SEQ ID NO: 2581522 - RNA, 17 nt, Human
gacucugcccccugcug

SEQ ID NO: 2581523 - RNA, 16 nt, Human
gacucugcccccugcu

SEQ ID NO: 2581524 - RNA, 15 nt, Human
gacucugcccccugc

SEQ ID NO: 2581525 - RNA, 14 nt, Human
gacucugcccccug

SEQ ID NO: 2581526 - RNA, 13 nt, Human
gacucugcccccu

SEQ ID NO: 2581527 - RNA, 12 nt, Human
gacucugccccc

SEQ ID NO: 2581528 - RNA, 10 nt, Human
gacucugccc

SEQ ID NO: 2581529 - RNA, 16 nt, Human
gacucugccuccucuu

SEQ ID NO: 2581530 - RNA, 12 nt, Human
gacucugccucc

SEQ ID NO: 2581531 - RNA, 12 nt, Human
gacucacccaag

SEQ ID NO: 2581532 - RNA, 12 nt, Human
gacucaccucug

SEQ ID NO: 2581533 - RNA, 13 nt, Human
gacucaccucugc

SEQ ID NO: 2581534 - RNA, 14 nt, Human
gacucaccucugcc

SEQ ID NO: 2581535 - RNA, 15 nt, Human
gacucaccucugccu

SEQ ID NO: 2581536 - RNA, 17 nt, Human
gacucaccucugccuca

SEQ ID NO: 2581537 - RNA, 17 nt, Human
gacucaccuguuacuug

SEQ ID NO: 2581538 - RNA, 18 nt, Human
gacucaccucugccucaa

SEQ ID NO: 2581539 - RNA, 23 nt, Human
gacucacuuaucccaagagaaug

SEQ ID NO: 2581540 - RNA, 15 nt, Human
gacucaccuccccca

SEQ ID NO: 2581541 - RNA, 22 nt, Human
gacucaccucccccaucucuuc

SEQ ID NO: 2581542 - RNA, 23 nt, Human
gacuguacuccucccaggcgccc

SEQ ID NO: 2581543 - RNA, 18 nt, Human
gacuguacuccucccagg

SEQ ID NO: 2581544 - RNA, 14 nt, Human
gacugaauuucuuu

SEQ ID NO: 2581545 - RNA, 16 nt, Human
gacugaagccugcagg

SEQ ID NO: 2581546 - RNA, 18 nt, Human
gacugaagaugcagcuca

SEQ ID NO: 2581547 - RNA, 19 nt, Human
gacugugacaggcagcaga

SEQ ID NO: 2581548 - RNA, 18 nt, Human
gacugugacaggcagcag

SEQ ID NO: 2581549 - RNA, 17 nt, Human
gacugugacaggcagca

SEQ ID NO: 2581550 - RNA, 16 nt, Human
gacuguauuugugacu

SEQ ID NO: 2581551 - RNA, 13 nt, Human
gacugucuuucag

SEQ ID NO: 2581552 - RNA, 14 nt, Human
gacuguauuuguga

SEQ ID NO: 2581553 - RNA, 15 nt, Human
gacuguauuugugac

SEQ ID NO: 2581554 - RNA, 19 nt, Human
gacuguauauaaaggaaaa

SEQ ID NO: 2581555 - RNA, 14 nt, Human
gacuguauauaaag

SEQ ID NO: 2581556 - RNA, 23 nt, Human
gacuguagggagggcggcagggg

SEQ ID NO: 2581557 - RNA, 22 nt, Human
gacuguagggagggcggcaggg

SEQ ID NO: 2581558 - RNA, 13 nt, Human
gacuguagggagg

SEQ ID NO: 2581559 - RNA, 18 nt, Human
gacugaauuguccccagu

SEQ ID NO: 2581560 - RNA, 11 nt, Human
gacuguagaaa

SEQ ID NO: 2581561 - RNA, 22 nt, Human
gacugugugcucaggagcccug

SEQ ID NO: 2581562 - RNA, 19 nt, Human
gacugugaugccacacaga

SEQ ID NO: 2581563 - RNA, 20 nt, Human
gacugugacaggcagcagag

SEQ ID NO: 2581564 - RNA, 13 nt, Human
gacugugaugcca

SEQ ID NO: 2581565 - RNA, 12 nt, Human
gacuguggcugc

SEQ ID NO: 2581566 - RNA, 14 nt, Human
gacuguggcugcua

SEQ ID NO: 2581567 - RNA, 15 nt, Human
gacuguggcugcuag

SEQ ID NO: 2581568 - RNA, 19 nt, Human
gacuguucaagagcacacu

SEQ ID NO: 2581569 - RNA, 18 nt, Human
gacuguucaagagcacac

SEQ ID NO: 2581570 - RNA, 14 nt, Human
gacuguucaagagc

SEQ ID NO: 2581571 - RNA, 22 nt, Human
gacuguuagaaaauggacacug

SEQ ID NO: 2581572 - RNA, 14 nt, Human
gacuguuccugucu

SEQ ID NO: 2581573 - RNA, 21 nt, Human
gacuguugggguggguauaaa

SEQ ID NO: 2581574 - RNA, 21 nt, Human
gacuguguguugccacaggac

SEQ ID NO: 2581575 - RNA, 22 nt, Human
gacuguguguugccacaggaca

SEQ ID NO: 2581576 - RNA, 18 nt, Human
gacuuguuuuugcacaug

SEQ ID NO: 2581577 - RNA, 23 nt, Human
gacuguucaagagcacacuuggc

SEQ ID NO: 2581578 - RNA, 13 nt, Human
ggcaggcucacug

SEQ ID NO: 2581579 - RNA, 19 nt, Human
ggcaggcuagaaccuggca

SEQ ID NO: 2581580 - RNA, 18 nt, Human
ggcaggcuagaaccuggc

SEQ ID NO: 2581581 - RNA, 22 nt, Human
ggcaggcuaaggcguggagcug

SEQ ID NO: 2581582 - RNA, 21 nt, Human
ggcaggcuaaggcguggagcu

SEQ ID NO: 2581583 - RNA, 17 nt, Human
ggcaggcuaaggcgugg

SEQ ID NO: 2581584 - RNA, 22 nt, Human
ggcaggcccugcacuguccugc

SEQ ID NO: 2581585 - RNA, 22 nt, Human
ggcaggcucacugccaggccag

SEQ ID NO: 2581586 - RNA, 19 nt, Human
ggcaggcucacugccaggc

SEQ ID NO: 2581587 - RNA, 16 nt, Human
ggcaggcucacugcca

SEQ ID NO: 2581588 - RNA, 15 nt, Human
ggcaggcucacugcc

SEQ ID NO: 2581589 - RNA, 18 nt, Human
ggcaggcugacaucugug

SEQ ID NO: 2581590 - RNA, 16 nt, Human
ggcaggcugacaucug

SEQ ID NO: 2581591 - RNA, 10 nt, Human
ggcaggcagu

SEQ ID NO: 2581592 - RNA, 21 nt, Human
ggcaggcccugcacuguccug

SEQ ID NO: 2581593 - RNA, 19 nt, Human
ggcaggcccugcacugucc

SEQ ID NO: 2581594 - RNA, 16 nt, Human
ggcaggcccugcacug

SEQ ID NO: 2581595 - RNA, 15 nt, Human
ggcaggcccugcacu

SEQ ID NO: 2581596 - RNA, 14 nt, Human
ggcaggcccugcac

SEQ ID NO: 2581597 - RNA, 13 nt, Human
ggcaggcccugca

SEQ ID NO: 2581598 - RNA, 17 nt, Human
ggcaggcuggccagucc

SEQ ID NO: 2581599 - RNA, 13 nt, Human
ggcaggcuggcca

SEQ ID NO: 2581600 - RNA, 12 nt, Human
ggcaggcuggcc

SEQ ID NO: 2581601 - RNA, 11 nt, Human
ggcaggcuggc

SEQ ID NO: 2581602 - RNA, 20 nt, Human
ggcaggcuggccaguccagg

SEQ ID NO: 2581603 - RNA, 16 nt, Human
ggcaggcuggcuggcc

SEQ ID NO: 2581604 - RNA, 17 nt, Human
ggcagaaaauugcacaa

SEQ ID NO: 2581605 - RNA, 11 nt, Human
ggcagaaaauu

SEQ ID NO: 2581606 - RNA, 17 nt, Human
ggcagaaagcaaaauua

SEQ ID NO: 2581607 - RNA, 22 nt, Human
ggcagaaagcaaaugugaccug

SEQ ID NO: 2581608 - RNA, 22 nt, Human
ggcacuuugaaggggccucacc

SEQ ID NO: 2581609 - RNA, 14 nt, Human
ggcacuuuuuaauu

SEQ ID NO: 2581610 - RNA, 19 nt, Human
ggcagaagacaccagagca

SEQ ID NO: 2581611 - RNA, 18 nt, Human
ggcagaagacaccagagc

SEQ ID NO: 2581612 - RNA, 17 nt, Human
ggcagaagacaccagag

SEQ ID NO: 2581613 - RNA, 16 nt, Human
ggcagaagacaccaga

SEQ ID NO: 2581614 - RNA, 21 nt, Human
ggcagaagacaccagagcaga

SEQ ID NO: 2581615 - RNA, 20 nt, Human
ggcagaagacaccagagcag

SEQ ID NO: 2581616 - RNA, 17 nt, Human
ggcagaaggcaaaccca

SEQ ID NO: 2581617 - RNA, 19 nt, Human
ggcagaauaaucuuugggu

SEQ ID NO: 2581618 - RNA, 15 nt, Human
ggcagaagggagaag

SEQ ID NO: 2581619 - RNA, 22 nt, Human
ggcagaagacaccagagcagau

SEQ ID NO: 2581620 - RNA, 16 nt, Human
ggcagaaggccaagag

SEQ ID NO: 2581621 - RNA, 21 nt, Human
ggcagagaaagaagagacagg

SEQ ID NO: 2581622 - RNA, 18 nt, Human
ggcagagaaagaagagac

SEQ ID NO: 2581623 - RNA, 17 nt, Human
ggcagagaaagaagaga

SEQ ID NO: 2581624 - RNA, 14 nt, Human
ggcagagaaagaag

SEQ ID NO: 2581625 - RNA, 14 nt, Human
ggcagacuggguuu

SEQ ID NO: 2581626 - RNA, 19 nt, Human
ggcagagagcggucucagg

SEQ ID NO: 2581627 - RNA, 10 nt, Human
ggcagagagc

SEQ ID NO: 2581628 - RNA, 9 nt, Human
ggcagagag

SEQ ID NO: 2581629 - RNA, 14 nt, Human
ggcagagaaucaua

SEQ ID NO: 2581630 - RNA, 12 nt, Human
ggcagaaggaag

SEQ ID NO: 2581631 - RNA, 14 nt, Human
ggcagaacugagcu

SEQ ID NO: 2581632 - RNA, 15 nt, Human
ggcagaacugagcuc

SEQ ID NO: 2581633 - RNA, 21 nt, Human
ggcagaacugagcuccucugg

SEQ ID NO: 2581634 - RNA, 17 nt, Human
ggcagaagaauugaacc

SEQ ID NO: 2581635 - RNA, 15 nt, Human
ggcagaagacaccag

SEQ ID NO: 2581636 - RNA, 12 nt, Human
ggcagaagacac

SEQ ID NO: 2581637 - RNA, 22 nt, Human
ggcagaagaauugaacccagga

SEQ ID NO: 2581638 - RNA, 23 nt, Human
ggcagaagaauugaacccaggag

SEQ ID NO: 2581639 - RNA, 21 nt, Human
ggcagaacacuaaccugaccg

SEQ ID NO: 2581640 - RNA, 20 nt, Human
ggcagaacacuaaccugacc

SEQ ID NO: 2581641 - RNA, 15 nt, Human
ggcagaacacuaacc

SEQ ID NO: 2581642 - RNA, 14 nt, Human
ggcagaacacuaac

SEQ ID NO: 2581643 - RNA, 22 nt, Human
ggcagaaagguucugcccggga

SEQ ID NO: 2581644 - RNA, 20 nt, Human
ggcagaaagguucugcccgg

SEQ ID NO: 2581645 - RNA, 14 nt, Human
ggcagaaaguggcc

SEQ ID NO: 2581646 - RNA, 16 nt, Human
ggcagaaaguggccau

SEQ ID NO: 2581647 - RNA, 14 nt, Human
ggcagaacagccgc

SEQ ID NO: 2581648 - RNA, 18 nt, Human
ggcagaacagccgcuccu

SEQ ID NO: 2581649 - RNA, 20 nt, Human
ggcagaacagccgcuccugu

SEQ ID NO: 2581650 - RNA, 13 nt, Human
ggcagaacugagc

SEQ ID NO: 2581651 - RNA, 17 nt, Human
ggcagccaggccacaag

SEQ ID NO: 2581652 - RNA, 15 nt, Human
ggcagccaggccaca

SEQ ID NO: 2581653 - RNA, 10 nt, Human
ggcagagcag

SEQ ID NO: 2581654 - RNA, 14 nt, Human
ggcagccaggccac

SEQ ID NO: 2581655 - RNA, 23 nt, Human
ggcagagauuggaaugggcagcu

SEQ ID NO: 2581656 - RNA, 12 nt, Human
ggcagccaggcu

SEQ ID NO: 2581657 - RNA, 19 nt, Human
ggcagccaggcugccaagg

SEQ ID NO: 2581658 - RNA, 13 nt, Human
ggcagccaggcug

SEQ ID NO: 2581659 - RNA, 15 nt, Human
ggcagccaggcugcc

SEQ ID NO: 2581660 - RNA, 18 nt, Human
ggcagccgugccuucagc

SEQ ID NO: 2581661 - RNA, 21 nt, Human
ggcagccgugccuucagcucu

SEQ ID NO: 2581662 - RNA, 19 nt, Human
ggcagccgugccuucagcu

SEQ ID NO: 2581663 - RNA, 22 nt, Human
ggcagccgugccuucagcucua

SEQ ID NO: 2581664 - RNA, 14 nt, Human
ggcagccucccauc

SEQ ID NO: 2581665 - RNA, 21 nt, Human
ggcagccucccauccagggcc

SEQ ID NO: 2581666 - RNA, 22 nt, Human
ggcagccucccauccagggccc

SEQ ID NO: 2581667 - RNA, 19 nt, Human
ggcaggacaacgaggaagc

SEQ ID NO: 2581668 - RNA, 18 nt, Human
ggcaggacaacgaggaag

SEQ ID NO: 2581669 - RNA, 15 nt, Human
ggcaggaccaggacu

SEQ ID NO: 2581670 - RNA, 14 nt, Human
ggcaggaccaggac

SEQ ID NO: 2581671 - RNA, 15 nt, Human
ggcaggaccucagag

SEQ ID NO: 2581672 - RNA, 21 nt, Human
ggcaggaccucagaguccagg

SEQ ID NO: 2581673 - RNA, 20 nt, Human
ggcaggacaacgaggaagcc

SEQ ID NO: 2581674 - RNA, 21 nt, Human
ggcaggacaacgaggaagccc

SEQ ID NO: 2581675 - RNA, 23 nt, Human
ggcaggacaugcugaagccaaag

SEQ ID NO: 2581676 - RNA, 14 nt, Human
ggcaggcagcgcca

SEQ ID NO: 2581677 - RNA, 13 nt, Human
ggcaggcagcgcc

SEQ ID NO: 2581678 - RNA, 15 nt, Human
ggcaggcagcgccaa

SEQ ID NO: 2581679 - RNA, 21 nt, Human
ggcaggaccuucgggcugugc

SEQ ID NO: 2581680 - RNA, 23 nt, Human
ggcaggaccuucgggcugugccc

SEQ ID NO: 2581681 - RNA, 18 nt, Human
ggcaggcacagcacaggg

SEQ ID NO: 2581682 - RNA, 23 nt, Human
ggcaggacucagcuccccagagu

SEQ ID NO: 2581683 - RNA, 21 nt, Human
ggcaggacucagcuccccaga

SEQ ID NO: 2581684 - RNA, 16 nt, Human
ggcaggacucagcucc

SEQ ID NO: 2581685 - RNA, 21 nt, Human
ggcaaccccaguucugcuccu

SEQ ID NO: 2581686 - RNA, 20 nt, Human
ggcaaccccaguucugcucc

SEQ ID NO: 2581687 - RNA, 16 nt, Human
ggcaaccacuaagaau

SEQ ID NO: 2581688 - RNA, 19 nt, Human
ggcaaccacuaagaauuca

SEQ ID NO: 2581689 - RNA, 18 nt, Human
ggcaaccccaguucugcu

SEQ ID NO: 2581690 - RNA, 17 nt, Human
ggcaaccccaguucugc

SEQ ID NO: 2581691 - RNA, 16 nt, Human
ggcaaccccaguucug

SEQ ID NO: 2581692 - RNA, 21 nt, Human
ggcaaccacaggcagcauuua

SEQ ID NO: 2581693 - RNA, 14 nt, Human
ggcaacagaucugg

SEQ ID NO: 2581694 - RNA, 15 nt, Human
ggcaacagaucugga

SEQ ID NO: 2581695 - RNA, 19 nt, Human
ggcaacagagcaagauccu

SEQ ID NO: 2581696 - RNA, 14 nt, Human
ggcaacaucuuuau

SEQ ID NO: 2581697 - RNA, 19 nt, Human
ggcaacagaucuggaaccu

SEQ ID NO: 2581698 - RNA, 19 nt, Human
ggcaacauugcuggcugga

SEQ ID NO: 2581699 - RNA, 20 nt, Human
ggcaaccacaggcagcauuu

SEQ ID NO: 2581700 - RNA, 22 nt, Human
ggaugugaauugccugcagaga

SEQ ID NO: 2581701 - RNA, 18 nt, Human
ggaugugauuguggaaug

SEQ ID NO: 2581702 - RNA, 23 nt, Human
ggauguggcugcagcagcggugg

SEQ ID NO: 2581703 - RNA, 17 nt, Human
ggauguggcugcagcag

SEQ ID NO: 2581704 - RNA, 22 nt, Human
ggaugugggguccccaucaucc

SEQ ID NO: 2581705 - RNA, 15 nt, Human
ggaugugggagggag

SEQ ID NO: 2581706 - RNA, 23 nt, Human
ggaugugggagggagcagacagg

SEQ ID NO: 2581707 - RNA, 16 nt, Human
ggaugugguggcagug

SEQ ID NO: 2581708 - RNA, 20 nt, Human
ggauguucagcacugucccu

SEQ ID NO: 2581709 - RNA, 13 nt, Human
ggaugugugcaug

SEQ ID NO: 2581710 - RNA, 23 nt, Human
ggauguucagcacugucccuugc

SEQ ID NO: 2581711 - RNA, 15 nt, Human
ggauguucuggcccu

SEQ ID NO: 2581712 - RNA, 23 nt, Human
ggaugguucccuugaugaagaag

SEQ ID NO: 2581713 - RNA, 22 nt, Human
ggaugguucccuugaugaagaa

SEQ ID NO: 2581714 - RNA, 15 nt, Human
ggaugguguucaaaa

SEQ ID NO: 2581715 - RNA, 23 nt, Human
ggaugagagcccagagguaacag

SEQ ID NO: 2581716 - RNA, 20 nt, Human
ggaugagagcccagagguaa

SEQ ID NO: 2581717 - RNA, 16 nt, Human
ggauguaaacagugcc

SEQ ID NO: 2581718 - RNA, 17 nt, Human
ggauguaaacagugccu

SEQ ID NO: 2581719 - RNA, 18 nt, Human
ggauguaaacagugccug

SEQ ID NO: 2581720 - RNA, 19 nt, Human
ggauguaaacagugccugc

SEQ ID NO: 2581721 - RNA, 17 nt, Human
ggaugucuuccuuggag

SEQ ID NO: 2581722 - RNA, 14 nt, Human
ggaugucuuccuug

SEQ ID NO: 2581723 - RNA, 13 nt, Human
ggaugucuuccuu

SEQ ID NO: 2581724 - RNA, 20 nt, Human
ggauguaaacagugccugcu

SEQ ID NO: 2581725 - RNA, 22 nt, Human
ggaugagaaagguugaagcacc

SEQ ID NO: 2581726 - RNA, 12 nt, Human
ggaugagaaagg

SEQ ID NO: 2581727 - RNA, 19 nt, Human
ggaugagagcccagaggua

SEQ ID NO: 2581728 - RNA, 18 nt, Human
ggaugagagcccagaggu

SEQ ID NO: 2581729 - RNA, 16 nt, Human
ggaugagagcccagag

SEQ ID NO: 2581730 - RNA, 15 nt, Human
ggaugagagcccaga

SEQ ID NO: 2581731 - RNA, 23 nt, Human
ggaugagaauuugagugcucuga

SEQ ID NO: 2581732 - RNA, 14 nt, Human
ggaugagagcccag

SEQ ID NO: 2581733 - RNA, 19 nt, Human
ggaugacuagaggcaggga

SEQ ID NO: 2581734 - RNA, 22 nt, Human
ggaugacgguauuaugcuucuu

SEQ ID NO: 2581735 - RNA, 14 nt, Human
ggaugaccagaaca

SEQ ID NO: 2581736 - RNA, 16 nt, Human
ggaugacaugugacuc

SEQ ID NO: 2581737 - RNA, 21 nt, Human
ggaugagaauuugagugcucu

SEQ ID NO: 2581738 - RNA, 23 nt, Human
ggaugacgguauuaugcuucuug

SEQ ID NO: 2581739 - RNA, 18 nt, Human
ggaugacuagaggcaggg

SEQ ID NO: 2581740 - RNA, 23 nt, Human
ggaugaauguaugugcacuguca

SEQ ID NO: 2581741 - RNA, 22 nt, Human
ggaugaaugaggucccaggcag

SEQ ID NO: 2581742 - RNA, 14 nt, Human
ggaugaaugagguc

SEQ ID NO: 2581743 - RNA, 18 nt, Human
ggaugaaugaggucccag

SEQ ID NO: 2581744 - RNA, 21 nt, Human
ggaugaauuccaaauucugcu

SEQ ID NO: 2581745 - RNA, 16 nt, Human
ggaugacaugucccua

SEQ ID NO: 2581746 - RNA, 20 nt, Human
ggaugacaugucccuacacc

SEQ ID NO: 2581747 - RNA, 15 nt, Human
ggaugacaugucccu

SEQ ID NO: 2581748 - RNA, 21 nt, Human
ggaugacaugcacucagcucu

SEQ ID NO: 2581749 - RNA, 22 nt, Human
ggauuuuaacaaaagcaagacu

SEQ ID NO: 2581750 - RNA, 19 nt, Human
ggauuuggguuggaaguga

SEQ ID NO: 2581751 - RNA, 22 nt, Human
ggauuuucuauuguuacucugg

SEQ ID NO: 2581752 - RNA, 16 nt, Human
ggauuuucaucagggg

SEQ ID NO: 2581753 - RNA, 16 nt, Human
ggauuuugucaagcag

SEQ ID NO: 2581754 - RNA, 12 nt, Human
ggauuuugagua

SEQ ID NO: 2581755 - RNA, 16 nt, Human
ggcaaaauccuugcuu

SEQ ID NO: 2581756 - RNA, 13 nt, Human
ggcaaaauugcaa

SEQ ID NO: 2581757 - RNA, 21 nt, Human
ggauuuugauccaagcugguc

SEQ ID NO: 2581758 - RNA, 18 nt, Human
ggauuaaccucugcacua

SEQ ID NO: 2581759 - RNA, 17 nt, Human
ggauuaaccucugcacu

SEQ ID NO: 2581760 - RNA, 16 nt, Human
ggauuaaccucugcac

SEQ ID NO: 2581761 - RNA, 15 nt, Human
ggauuaaccucugca

SEQ ID NO: 2581762 - RNA, 22 nt, Human
ggauuugccccuucccaucucu

SEQ ID NO: 2581763 - RNA, 14 nt, Human
ggauuugccccuuc

SEQ ID NO: 2581764 - RNA, 18 nt, Human
ggauuugaugcuguuuga

SEQ ID NO: 2581765 - RNA, 14 nt, Human
ggauuaauaugaaa

SEQ ID NO: 2581766 - RNA, 15 nt, Human
ggauuaauaugaaaa

SEQ ID NO: 2581767 - RNA, 16 nt, Human
ggauuaauaugaaaac

SEQ ID NO: 2581768 - RNA, 21 nt, Human
ggauuugaggagcagcuucag

SEQ ID NO: 2581769 - RNA, 23 nt, Human
ggauuaaacuuaaucuaaaugga

SEQ ID NO: 2581770 - RNA, 18 nt, Human
ggauguuuuucaugaaaa

SEQ ID NO: 2581771 - RNA, 23 nt, Human
ggauguuuuaauuccaugaaucg

SEQ ID NO: 2581772 - RNA, 23 nt, Human
ggauguuucugucacaucagcuc

SEQ ID NO: 2581773 - RNA, 21 nt, Human
ggcaaagggagcagaacugaa

SEQ ID NO: 2581774 - RNA, 20 nt, Human
ggcaaagggagcagaacuga

SEQ ID NO: 2581775 - RNA, 19 nt, Human
ggcaaaggaagguggaugg

SEQ ID NO: 2581776 - RNA, 17 nt, Human
ggcaaaggaagguggau

SEQ ID NO: 2581777 - RNA, 16 nt, Human
ggcaaaggaaggugga

SEQ ID NO: 2581778 - RNA, 18 nt, Human
ggcaaagcuuuuagaaau

SEQ ID NO: 2581779 - RNA, 22 nt, Human
ggcaaagcacgaaauguuauuu

SEQ ID NO: 2581780 - RNA, 13 nt, Human
ggcaaacccauca

SEQ ID NO: 2581781 - RNA, 17 nt, Human
ggcaaacuucagacuga

SEQ ID NO: 2581782 - RNA, 16 nt, Human
ggcaaagacagaagcc

SEQ ID NO: 2581783 - RNA, 23 nt, Human
ggcaaacaggcaguuggccagag

SEQ ID NO: 2581784 - RNA, 23 nt, Human
ggcaaaaugagagggcaguguuu

SEQ ID NO: 2581785 - RNA, 13 nt, Human
ggcaaacaggcag

SEQ ID NO: 2581786 - RNA, 16 nt, Human
ggcaaauuaacuugag

SEQ ID NO: 2581787 - RNA, 13 nt, Human
ggcaaaugcccaa

SEQ ID NO: 2581788 - RNA, 16 nt, Human
ggcaaaugcccaaggg

SEQ ID NO: 2581789 - RNA, 20 nt, Human
ggcaaauuaacuugaguuuu

SEQ ID NO: 2581790 - RNA, 20 nt, Human
ggcaacacagcgagacuccg

SEQ ID NO: 2581791 - RNA, 12 nt, Human
ggcaacagagca

SEQ ID NO: 2581792 - RNA, 21 nt, Human
ggcaacacagcgagacuccgu

SEQ ID NO: 2581793 - RNA, 13 nt, Human
ggcaaaugacuuu

SEQ ID NO: 2581794 - RNA, 16 nt, Human
ggcaaauaucuugaaa

SEQ ID NO: 2581795 - RNA, 16 nt, Human
ggcaaaucaguuacua

SEQ ID NO: 2581796 - RNA, 12 nt, Human
ggcaaauaaaag

SEQ ID NO: 2581797 - RNA, 20 nt, Human
ggcaaagguggcucuccagu

SEQ ID NO: 2581798 - RNA, 23 nt, Human
ggccuccggcgucagccuccagc

SEQ ID NO: 2581799 - RNA, 22 nt, Human
ggccuccggcgucagccuccag

SEQ ID NO: 2581800 - RNA, 21 nt, Human
ggccuccggcgucagccucca

SEQ ID NO: 2581801 - RNA, 20 nt, Human
ggccuccggcgucagccucc

SEQ ID NO: 2581802 - RNA, 19 nt, Human
ggccuccccugccaccagg

SEQ ID NO: 2581803 - RNA, 17 nt, Human
ggccuccccugccacca

SEQ ID NO: 2581804 - RNA, 15 nt, Human
ggccuccccugccac

SEQ ID NO: 2581805 - RNA, 23 nt, Human
ggccucccacccgaugcugcuuu

SEQ ID NO: 2581806 - RNA, 21 nt, Human
ggccucccacccgaugcugcu

SEQ ID NO: 2581807 - RNA, 20 nt, Human
ggccucccacccgaugcugc

SEQ ID NO: 2581808 - RNA, 14 nt, Human
ggccucccacccga

SEQ ID NO: 2581809 - RNA, 13 nt, Human
ggccucccacccg

SEQ ID NO: 2581810 - RNA, 15 nt, Human
ggccuccccugcuga

SEQ ID NO: 2581811 - RNA, 19 nt, Human
ggccuccggcgucagccuc

SEQ ID NO: 2581812 - RNA, 16 nt, Human
ggccuccggccucccc

SEQ ID NO: 2581813 - RNA, 14 nt, Human
ggccuccggccucc

SEQ ID NO: 2581814 - RNA, 14 nt, Human
ggccuccccugcug

SEQ ID NO: 2581815 - RNA, 22 nt, Human
ggccuccccugccaccaggcca

SEQ ID NO: 2581816 - RNA, 15 nt, Human
ggccucccucucucu

SEQ ID NO: 2581817 - RNA, 23 nt, Human
ggccucccucucucuucugcucc

SEQ ID NO: 2581818 - RNA, 15 nt, Human
ggcccuccgacagcc

SEQ ID NO: 2581819 - RNA, 23 nt, Human
ggcccuuccucuccacugccuuc

SEQ ID NO: 2581820 - RNA, 22 nt, Human
ggcccuuccucuccacugccuu

SEQ ID NO: 2581821 - RNA, 19 nt, Human
ggcccuuccucuccacugc

SEQ ID NO: 2581822 - RNA, 13 nt, Human
ggcccucccuugg

SEQ ID NO: 2581823 - RNA, 14 nt, Human
ggcccucccaguac

SEQ ID NO: 2581824 - RNA, 23 nt, Human
ggcccucccuguuccccagagaa

SEQ ID NO: 2581825 - RNA, 23 nt, Human
ggcccucccuuggaaaccugccc

SEQ ID NO: 2581826 - RNA, 15 nt, Human
ggcccucccuuggaa

SEQ ID NO: 2581827 - RNA, 18 nt, Human
ggcccuuccucuccacug

SEQ ID NO: 2581828 - RNA, 14 nt, Human
ggccucccaacuca

SEQ ID NO: 2581829 - RNA, 13 nt, Human
ggccucccaacuc

SEQ ID NO: 2581830 - RNA, 16 nt, Human
ggccucccaaagugcu

SEQ ID NO: 2581831 - RNA, 13 nt, Human
ggccucccaaagu

SEQ ID NO: 2581832 - RNA, 19 nt, Human
ggcccagcccccacagugc

SEQ ID NO: 2581833 - RNA, 17 nt, Human
ggcccagcccccacagu

SEQ ID NO: 2581834 - RNA, 16 nt, Human
ggcccagcccccacag

SEQ ID NO: 2581835 - RNA, 13 nt, Human
ggcccagccccca

SEQ ID NO: 2581836 - RNA, 13 nt, Human
ggcccaggccauc

SEQ ID NO: 2581837 - RNA, 15 nt, Human
ggcccaggcaggcca

SEQ ID NO: 2581838 - RNA, 14 nt, Human
ggcccagggcccag

SEQ ID NO: 2581839 - RNA, 17 nt, Human
ggcccagggacaccagc

SEQ ID NO: 2581840 - RNA, 10 nt, Human
ggcccaggga

SEQ ID NO: 2581841 - RNA, 20 nt, Human
ggcccagggacaccagccag

SEQ ID NO: 2581842 - RNA, 19 nt, Human
ggcccagggacaccagcca

SEQ ID NO: 2581843 - RNA, 23 nt, Human
ggcccagggacaccagccaggcu

SEQ ID NO: 2581844 - RNA, 20 nt, Human
ggcccagggagaggccauga

SEQ ID NO: 2581845 - RNA, 19 nt, Human
ggcccagcccggcucccac

SEQ ID NO: 2581846 - RNA, 16 nt, Human
ggcccagcccggcucc

SEQ ID NO: 2581847 - RNA, 15 nt, Human
ggcccagcccggcuc

SEQ ID NO: 2581848 - RNA, 14 nt, Human
ggcccagcccggcu

SEQ ID NO: 2581849 - RNA, 12 nt, Human
ggcccagcccgg

SEQ ID NO: 2581850 - RNA, 11 nt, Human
ggcccagcccg

SEQ ID NO: 2581851 - RNA, 21 nt, Human
ggcccagcccccacagugcug

SEQ ID NO: 2581852 - RNA, 15 nt, Human
ggcccagcccugcug

SEQ ID NO: 2581853 - RNA, 14 nt, Human
ggcccagcccugcu

SEQ ID NO: 2581854 - RNA, 13 nt, Human
ggcccagcccugc

SEQ ID NO: 2581855 - RNA, 12 nt, Human
ggcccagcccug

SEQ ID NO: 2581856 - RNA, 22 nt, Human
ggcccagcccugcuggccgccu

SEQ ID NO: 2581857 - RNA, 16 nt, Human
ggcccagcccugcugg

SEQ ID NO: 2581858 - RNA, 22 nt, Human
ggcccagccggccucucuggcc

SEQ ID NO: 2581859 - RNA, 21 nt, Human
ggcccagccggccucucuggc

SEQ ID NO: 2581860 - RNA, 20 nt, Human
ggcccagccggccucucugg

SEQ ID NO: 2581861 - RNA, 19 nt, Human
ggcccagccggccucucug

SEQ ID NO: 2581862 - RNA, 17 nt, Human
ggcccagccggccucuc

SEQ ID NO: 2581863 - RNA, 16 nt, Human
ggcccagccggccucu

SEQ ID NO: 2581864 - RNA, 12 nt, Human
ggcccagccggc

SEQ ID NO: 2581865 - RNA, 16 nt, Human
ggcccagcggccccuc

SEQ ID NO: 2581866 - RNA, 16 nt, Human
ggcccagcgaccucgg

SEQ ID NO: 2581867 - RNA, 20 nt, Human
ggcccucagcauauuuguau

SEQ ID NO: 2581868 - RNA, 20 nt, Human
ggcccucauuaaugacacuu

SEQ ID NO: 2581869 - RNA, 12 nt, Human
ggcccucagcau

SEQ ID NO: 2581870 - RNA, 22 nt, Human
ggcccucaccccugcccuggga

SEQ ID NO: 2581871 - RNA, 19 nt, Human
ggcccgcuugccucggcuc

SEQ ID NO: 2581872 - RNA, 17 nt, Human
ggcccgcuugccucggc

SEQ ID NO: 2581873 - RNA, 14 nt, Human
ggcccgcuugccuc

SEQ ID NO: 2581874 - RNA, 13 nt, Human
ggcccgcuugccu

SEQ ID NO: 2581875 - RNA, 12 nt, Human
ggcccucccagu

SEQ ID NO: 2581876 - RNA, 19 nt, Human
ggcccucccuguuccccag

SEQ ID NO: 2581877 - RNA, 20 nt, Human
ggcccucccuguuccccaga

SEQ ID NO: 2581878 - RNA, 21 nt, Human
ggcccucccuguuccccagag

SEQ ID NO: 2581879 - RNA, 22 nt, Human
ggcccucccuguuccccagaga

SEQ ID NO: 2581880 - RNA, 23 nt, Human
ggccccagucagccucucuccca

SEQ ID NO: 2581881 - RNA, 21 nt, Human
ggccccagucagccucucucc

SEQ ID NO: 2581882 - RNA, 17 nt, Human
ggccccagucagccucu

SEQ ID NO: 2581883 - RNA, 16 nt, Human
ggccccagucagccuc

SEQ ID NO: 2581884 - RNA, 17 nt, Human
ggcccgacagccuggca

SEQ ID NO: 2581885 - RNA, 16 nt, Human
ggcccgacagccuggc

SEQ ID NO: 2581886 - RNA, 15 nt, Human
ggcccgacagccugg

SEQ ID NO: 2581887 - RNA, 19 nt, Human
ggcccgccuggcagaacug

SEQ ID NO: 2581888 - RNA, 23 nt, Human
ggcccgccuggcagaacugagcu

SEQ ID NO: 2581889 - RNA, 16 nt, Human
ggcccgcacagagcug

SEQ ID NO: 2581890 - RNA, 15 nt, Human
ggcccgccuggcaga

SEQ ID NO: 2581891 - RNA, 16 nt, Human
ggccccaggaccuggc

SEQ ID NO: 2581892 - RNA, 21 nt, Human
ggccccaggaccuggcugcca

SEQ ID NO: 2581893 - RNA, 13 nt, Human
ggccccaggaagc

SEQ ID NO: 2581894 - RNA, 14 nt, Human
ggccccaggaagcc

SEQ ID NO: 2581895 - RNA, 15 nt, Human
ggccccaggaagccg

SEQ ID NO: 2581896 - RNA, 22 nt, Human
ggccccaggcauugccaagggc

SEQ ID NO: 2581897 - RNA, 17 nt, Human
ggccccagggcuacccu

SEQ ID NO: 2581898 - RNA, 15 nt, Human
ggccccagucagccu

SEQ ID NO: 2581899 - RNA, 13 nt, Human
ggccccagucagc

SEQ ID NO: 2581900 - RNA, 18 nt, Human
ggccccagggcuacccuc

SEQ ID NO: 2581901 - RNA, 23 nt, Human
ggccccagccuggcccagcuccc

SEQ ID NO: 2581902 - RNA, 22 nt, Human
ggccccagccuggcccagcucc

SEQ ID NO: 2581903 - RNA, 21 nt, Human
ggccccagccuggcccagcuc

SEQ ID NO: 2581904 - RNA, 20 nt, Human
ggccccagccuggcccagcu

SEQ ID NO: 2581905 - RNA, 18 nt, Human
ggccccaggaaaggccca

SEQ ID NO: 2581906 - RNA, 15 nt, Human
ggccccaccaccuag

SEQ ID NO: 2581907 - RNA, 19 nt, Human
ggccccagccuggcccagc

SEQ ID NO: 2581908 - RNA, 18 nt, Human
ggccccagccuggcccag

SEQ ID NO: 2581909 - RNA, 14 nt, Human
ggccccaccaccua

SEQ ID NO: 2581910 - RNA, 18 nt, Human
ggcccauccccccucacc

SEQ ID NO: 2581911 - RNA, 16 nt, Human
ggcccauccccccuca

SEQ ID NO: 2581912 - RNA, 19 nt, Human
ggcccauccccccucacca

SEQ ID NO: 2581913 - RNA, 13 nt, Human
ggcccaucccccc

SEQ ID NO: 2581914 - RNA, 22 nt, Human
ggcccaucaguguacccccgcc

SEQ ID NO: 2581915 - RNA, 16 nt, Human
ggcccaucaguguacc

SEQ ID NO: 2581916 - RNA, 24 nt, Human
ggcccauaucugugaaaugcuggc

SEQ ID NO: 2581917 - RNA, 20 nt, Human
ggccccaaaaccacagcccu

SEQ ID NO: 2581918 - RNA, 21 nt, Human
ggccccaaaaccacagcccug

SEQ ID NO: 2581919 - RNA, 16 nt, Human
ggccccaaaaccacag

SEQ ID NO: 2581920 - RNA, 21 nt, Human
ggccaguccaggcugccgugg

SEQ ID NO: 2581921 - RNA, 21 nt, Human
ggccaguaucuauauaugugu

SEQ ID NO: 2581922 - RNA, 16 nt, Human
ggccaguccaggcugc

SEQ ID NO: 2581923 - RNA, 15 nt, Human
ggccaguccaggcug

SEQ ID NO: 2581924 - RNA, 18 nt, Human
ggccaguaccuuuccauu

SEQ ID NO: 2581925 - RNA, 16 nt, Human
ggccaguaccuuucca

SEQ ID NO: 2581926 - RNA, 14 nt, Human
ggccaguccaggcu

SEQ ID NO: 2581927 - RNA, 19 nt, Human
ggccagguggccacuccag

SEQ ID NO: 2581928 - RNA, 20 nt, Human
ggccaguaagggaaauagaa

SEQ ID NO: 2581929 - RNA, 23 nt, Human
ggccaggugggcgggcagcacag

SEQ ID NO: 2581930 - RNA, 17 nt, Human
ggccagguuucugccca

SEQ ID NO: 2581931 - RNA, 17 nt, Human
ggccaggggucucccug

SEQ ID NO: 2581932 - RNA, 20 nt, Human
ggccagccuccgagagggag

SEQ ID NO: 2581933 - RNA, 19 nt, Human
ggccagccuccgagaggga

SEQ ID NO: 2581934 - RNA, 16 nt, Human
ggccagccuccgagag

SEQ ID NO: 2581935 - RNA, 19 nt, Human
ggccagcccggcugguuuu

SEQ ID NO: 2581936 - RNA, 21 nt, Human
ggccaggucccagcuugagcu

SEQ ID NO: 2581937 - RNA, 16 nt, Human
ggccagggugagagcu

SEQ ID NO: 2581938 - RNA, 23 nt, Human
ggccagggucacugaaggccugg

SEQ ID NO: 2581939 - RNA, 14 nt, Human
ggccaggugcagug

SEQ ID NO: 2581940 - RNA, 14 nt, Human
ggccaggugcacag

SEQ ID NO: 2581941 - RNA, 12 nt, Human
ggcauucucuga

SEQ ID NO: 2581942 - RNA, 12 nt, Human
ggcauuccuucu

SEQ ID NO: 2581943 - RNA, 15 nt, Human
ggcauuccugcuuau

SEQ ID NO: 2581944 - RNA, 23 nt, Human
ggcauugauggggaaggaggcug

SEQ ID NO: 2581945 - RNA, 13 nt, Human
ggcauuccugcuu

SEQ ID NO: 2581946 - RNA, 12 nt, Human
ggccaaaggaag

SEQ ID NO: 2581947 - RNA, 15 nt, Human
ggccaaagccaaagc

SEQ ID NO: 2581948 - RNA, 21 nt, Human
ggccaaaggaagcacaugccu

SEQ ID NO: 2581949 - RNA, 21 nt, Human
ggccaaaggagggucaggaag

SEQ ID NO: 2581950 - RNA, 22 nt, Human
ggccaaaggagggucaggaagg

SEQ ID NO: 2581951 - RNA, 12 nt, Human
ggcauuguggga

SEQ ID NO: 2581952 - RNA, 21 nt, Human
ggcauuggcagcaggugcugc

SEQ ID NO: 2581953 - RNA, 19 nt, Human
ggcauuggcagcaggugcu

SEQ ID NO: 2581954 - RNA, 19 nt, Human
ggcauugucccugugccua

SEQ ID NO: 2581955 - RNA, 16 nt, Human
ggcauugauggggaag

SEQ ID NO: 2581956 - RNA, 12 nt, Human
ggcauugcuuuc

SEQ ID NO: 2581957 - RNA, 18 nt, Human
ggcauuggcagcaggugc

SEQ ID NO: 2581958 - RNA, 13 nt, Human
ggcauugcuuucc

SEQ ID NO: 2581959 - RNA, 20 nt, Human
ggccagaugcaccagcccuu

SEQ ID NO: 2581960 - RNA, 19 nt, Human
ggccagaugcaccagcccu

SEQ ID NO: 2581961 - RNA, 13 nt, Human
ggccagauccagc

SEQ ID NO: 2581962 - RNA, 16 nt, Human
ggccagauccagccug

SEQ ID NO: 2581963 - RNA, 17 nt, Human
ggccagaugcaccagcc

SEQ ID NO: 2581964 - RNA, 12 nt, Human
ggccagauccag

SEQ ID NO: 2581965 - RNA, 20 nt, Human
ggccagaguggccuggccag

SEQ ID NO: 2581966 - RNA, 18 nt, Human
ggccagaguggccuggcc

SEQ ID NO: 2581967 - RNA, 19 nt, Human
ggccagaguggccuggcca

SEQ ID NO: 2581968 - RNA, 18 nt, Human
ggccagcaccaucucuuu

SEQ ID NO: 2581969 - RNA, 19 nt, Human
ggccagaguauuggucucc

SEQ ID NO: 2581970 - RNA, 19 nt, Human
ggccagccccggcccuggg

SEQ ID NO: 2581971 - RNA, 17 nt, Human
ggccagccccggcccug

SEQ ID NO: 2581972 - RNA, 12 nt, Human
ggccagccccuc

SEQ ID NO: 2581973 - RNA, 20 nt, Human
ggccagccccggcccugggc

SEQ ID NO: 2581974 - RNA, 14 nt, Human
ggccagccccuccc

SEQ ID NO: 2581975 - RNA, 15 nt, Human
ggccagccccuccca

SEQ ID NO: 2581976 - RNA, 16 nt, Human
ggccagccccucccac

SEQ ID NO: 2581977 - RNA, 18 nt, Human
ggccagcccggcugguuu

SEQ ID NO: 2581978 - RNA, 16 nt, Human
ggccagcccggcuggu

SEQ ID NO: 2581979 - RNA, 15 nt, Human
ggccagcccggcugg

SEQ ID NO: 2581980 - RNA, 14 nt, Human
ggccagcccggcug

SEQ ID NO: 2581981 - RNA, 23 nt, Human
ggccagccccucccaccacagca

SEQ ID NO: 2581982 - RNA, 18 nt, Human
ggccagccccucccacca

SEQ ID NO: 2581983 - RNA, 21 nt, Human
ggccagccccucccaccacag

SEQ ID NO: 2581984 - RNA, 19 nt, Human
ggccaacaucgugaaaccc

SEQ ID NO: 2581985 - RNA, 13 nt, Human
ggccaaggagcug

SEQ ID NO: 2581986 - RNA, 14 nt, Human
ggccaaggagcugc

SEQ ID NO: 2581987 - RNA, 15 nt, Human
ggccaaggagcugcu

SEQ ID NO: 2581988 - RNA, 21 nt, Human
ggccaaggaugccccgucccc

SEQ ID NO: 2581989 - RNA, 13 nt, Human
ggccaagguggga

SEQ ID NO: 2581990 - RNA, 14 nt, Human
ggccaacaaagaac

SEQ ID NO: 2581991 - RNA, 21 nt, Human
ggccaaauuauuuguguaaua

SEQ ID NO: 2581992 - RNA, 13 nt, Human
ggccaaaguguua

SEQ ID NO: 2581993 - RNA, 16 nt, Human
ggccaacaaagcuguu

SEQ ID NO: 2581994 - RNA, 15 nt, Human
ggccaacaaagcugu

SEQ ID NO: 2581995 - RNA, 12 nt, Human
ggccaacaaagc

SEQ ID NO: 2581996 - RNA, 15 nt, Human
ggccaacaccaggga

SEQ ID NO: 2581997 - RNA, 18 nt, Human
ggccaacaccagggaugg

SEQ ID NO: 2581998 - RNA, 13 nt, Human
ggccaacauggua

SEQ ID NO: 2581999 - RNA, 20 nt, Human
ggccaacccuucuccucuug

SEQ ID NO: 2582000 - RNA, 16 nt, Human
ggccaacccuucuccu

SEQ ID NO: 2582001 - RNA, 23 nt, Human
ggccagagggagugacagaggca

SEQ ID NO: 2582002 - RNA, 16 nt, Human
ggccaagugcaggcug

SEQ ID NO: 2582003 - RNA, 18 nt, Human
ggccaagugcaggcuggc

SEQ ID NO: 2582004 - RNA, 14 nt, Human
ggccagaguggccu

SEQ ID NO: 2582005 - RNA, 15 nt, Human
ggccagaguggccug

SEQ ID NO: 2582006 - RNA, 16 nt, Human
ggccagaguggccugg

SEQ ID NO: 2582007 - RNA, 19 nt, Human
ggccaaggccuucuccucc

SEQ ID NO: 2582008 - RNA, 18 nt, Human
ggccaaggccuucuccuc

SEQ ID NO: 2582009 - RNA, 16 nt, Human
ggccaaggccuucucc

SEQ ID NO: 2582010 - RNA, 16 nt, Human
ggccaaggagcugcua

SEQ ID NO: 2582011 - RNA, 16 nt, Human
ggccaaggagggugag

SEQ ID NO: 2582012 - RNA, 22 nt, Human
ggccagagggagugacagaggc

SEQ ID NO: 2582013 - RNA, 19 nt, Human
gcuuguacauaaugcgugc

SEQ ID NO: 2582014 - RNA, 22 nt, Human
gcuugguggaugaaaugucagu

SEQ ID NO: 2582015 - RNA, 22 nt, Human
gcuuggguguaacaggucuccu

SEQ ID NO: 2582016 - RNA, 23 nt, Human
gcuuggguguaacaggucuccuc

SEQ ID NO: 2582017 - RNA, 21 nt, Human
ggaccccagcugggaggcaag

SEQ ID NO: 2582018 - RNA, 20 nt, Human
ggaccccagcugggaggcaa

SEQ ID NO: 2582019 - RNA, 18 nt, Human
ggaccccagcugggaggc

SEQ ID NO: 2582020 - RNA, 14 nt, Human
ggaccccagcuggg

SEQ ID NO: 2582021 - RNA, 13 nt, Human
ggaccccagcugg

SEQ ID NO: 2582022 - RNA, 11 nt, Human
ggaccccagcu

SEQ ID NO: 2582023 - RNA, 12 nt, Human
ggaccccagcug

SEQ ID NO: 2582024 - RNA, 18 nt, Human
ggaccccgagccuggcuc

SEQ ID NO: 2582025 - RNA, 13 nt, Human
ggacccccagcuu

SEQ ID NO: 2582026 - RNA, 18 nt, Human
ggaccccagcugugagcc

SEQ ID NO: 2582027 - RNA, 20 nt, Human
ggaccccaucugugaauaag

SEQ ID NO: 2582028 - RNA, 21 nt, Human
ggaccccagcugugagccuug

SEQ ID NO: 2582029 - RNA, 14 nt, Human
ggaccccaucugug

SEQ ID NO: 2582030 - RNA, 17 nt, Human
ggaccccaucugugaau

SEQ ID NO: 2582031 - RNA, 18 nt, Human
ggaccccaucugugaaua

SEQ ID NO: 2582032 - RNA, 18 nt, Human
ggaccccuggugguucac

SEQ ID NO: 2582033 - RNA, 14 nt, Human
ggacccgcucugga

SEQ ID NO: 2582034 - RNA, 13 nt, Human
ggaccccugcccu

SEQ ID NO: 2582035 - RNA, 21 nt, Human
ggaccccgagccuggcuccaa

SEQ ID NO: 2582036 - RNA, 16 nt, Human
ggaccccuccucccuu

SEQ ID NO: 2582037 - RNA, 13 nt, Human
ggaccccucaccu

SEQ ID NO: 2582038 - RNA, 18 nt, Human
ggacccugaggcccagag

SEQ ID NO: 2582039 - RNA, 15 nt, Human
ggacccugaggccca

SEQ ID NO: 2582040 - RNA, 14 nt, Human
ggacccugaggccc

SEQ ID NO: 2582041 - RNA, 21 nt, Human
ggacccggaggggccuggcag

SEQ ID NO: 2582042 - RNA, 20 nt, Human
ggacccggaggggccuggca

SEQ ID NO: 2582043 - RNA, 19 nt, Human
ggacccugaggcccagagg

SEQ ID NO: 2582044 - RNA, 17 nt, Human
ggacccgcucuggacca

SEQ ID NO: 2582045 - RNA, 15 nt, Human
ggacccgcucuggac

SEQ ID NO: 2582046 - RNA, 19 nt, Human
ggacccgcucuggaccaac

SEQ ID NO: 2582047 - RNA, 23 nt, Human
ggaccgggccgcuagaugggcau

SEQ ID NO: 2582048 - RNA, 23 nt, Human
ggaccgccagauggggccucugu

SEQ ID NO: 2582049 - RNA, 22 nt, Human
ggaccuaaauggccucaugugg

SEQ ID NO: 2582050 - RNA, 17 nt, Human
ggaccuaaauggccuca

SEQ ID NO: 2582051 - RNA, 17 nt, Human
ggaccgguacagaaagg

SEQ ID NO: 2582052 - RNA, 21 nt, Human
ggagagcuagaaccuggaggg

SEQ ID NO: 2582053 - RNA, 20 nt, Human
ggagagcuagaaccuggagg

SEQ ID NO: 2582054 - RNA, 22 nt, Human
ggagagcuagaaccuggagagc

SEQ ID NO: 2582055 - RNA, 20 nt, Human
ggagagcuagaaccuggaga

SEQ ID NO: 2582056 - RNA, 22 nt, Human
ggagagcuagaaccuggagggc

SEQ ID NO: 2582057 - RNA, 15 nt, Human
ggagagcuagcagca

SEQ ID NO: 2582058 - RNA, 19 nt, Human
ggagagcuagaaccuggag

SEQ ID NO: 2582059 - RNA, 18 nt, Human
ggagagcuagaaccugga

SEQ ID NO: 2582060 - RNA, 16 nt, Human
ggagagcuagaaccug

SEQ ID NO: 2582061 - RNA, 22 nt, Human
ggagagcuagaacccggcaggc

SEQ ID NO: 2582062 - RNA, 18 nt, Human
ggagagcgccugccccuc

SEQ ID NO: 2582063 - RNA, 20 nt, Human
ggagagcgccugccccuccc

SEQ ID NO: 2582064 - RNA, 20 nt, Human
ggagagcuagaacccggcag

SEQ ID NO: 2582065 - RNA, 22 nt, Human
ggagagcgccugccccucccag

SEQ ID NO: 2582066 - RNA, 22 nt, Human
ggagacuuagggcaccaggggu

SEQ ID NO: 2582067 - RNA, 12 nt, Human
ggagagagaaag

SEQ ID NO: 2582068 - RNA, 11 nt, Human
ggagagagaaa

SEQ ID NO: 2582069 - RNA, 10 nt, Human
ggagagagaa

SEQ ID NO: 2582070 - RNA, 18 nt, Human
ggagagaggcagagagcg

SEQ ID NO: 2582071 - RNA, 16 nt, Human
ggagagaggcagagag

SEQ ID NO: 2582072 - RNA, 13 nt, Human
ggagagaggcaga

SEQ ID NO: 2582073 - RNA, 10 nt, Human
ggagagaggc

SEQ ID NO: 2582074 - RNA, 22 nt, Human
ggagagagcagcuucugccacu

SEQ ID NO: 2582075 - RNA, 19 nt, Human
ggagagagagagagagagg

SEQ ID NO: 2582076 - RNA, 19 nt, Human
ggagagagacguguacaua

SEQ ID NO: 2582077 - RNA, 21 nt, Human
ggagagagaaagccaggcagg

SEQ ID NO: 2582078 - RNA, 20 nt, Human
ggagagagaaagccaggcag

SEQ ID NO: 2582079 - RNA, 18 nt, Human
ggagagagaaagccaggc

SEQ ID NO: 2582080 - RNA, 17 nt, Human
ggagagagaaagccagg

SEQ ID NO: 2582081 - RNA, 14 nt, Human
ggagagagaaagcc

SEQ ID NO: 2582082 - RNA, 14 nt, Human
ggagagagacucca

SEQ ID NO: 2582083 - RNA, 13 nt, Human
ggagagccagaga

SEQ ID NO: 2582084 - RNA, 21 nt, Human
ggagagccagaaccuggaggg

SEQ ID NO: 2582085 - RNA, 20 nt, Human
ggagagccagaaccuggagg

SEQ ID NO: 2582086 - RNA, 19 nt, Human
ggagagccagaaccuggag

SEQ ID NO: 2582087 - RNA, 22 nt, Human
ggagagccaccaagagggacgc

SEQ ID NO: 2582088 - RNA, 16 nt, Human
ggagagccagaaccug

SEQ ID NO: 2582089 - RNA, 21 nt, Human
ggagagccagagaagugacag

SEQ ID NO: 2582090 - RNA, 16 nt, Human
ggagagccagagaagu

SEQ ID NO: 2582091 - RNA, 15 nt, Human
ggagagccagagaag

SEQ ID NO: 2582092 - RNA, 14 nt, Human
ggagagccagagaa

SEQ ID NO: 2582093 - RNA, 11 nt, Human
ggagagccagc

SEQ ID NO: 2582094 - RNA, 12 nt, Human
ggagagccagcc

SEQ ID NO: 2582095 - RNA, 14 nt, Human
ggagagccagcccu

SEQ ID NO: 2582096 - RNA, 15 nt, Human
ggagagccagcccuc

SEQ ID NO: 2582097 - RNA, 16 nt, Human
ggagagcaggcuggca

SEQ ID NO: 2582098 - RNA, 14 nt, Human
ggagagcaggcugg

SEQ ID NO: 2582099 - RNA, 23 nt, Human
ggagagcaggcuggcagcucucc

SEQ ID NO: 2582100 - RNA, 13 nt, Human
ggagagcaggcug

SEQ ID NO: 2582101 - RNA, 12 nt, Human
ggagagcaggcu

SEQ ID NO: 2582102 - RNA, 11 nt, Human
ggagagcagcg

SEQ ID NO: 2582103 - RNA, 21 nt, Human
ggagagaggggaauaauagaa

SEQ ID NO: 2582104 - RNA, 20 nt, Human
ggagagaguugaaccuaaac

SEQ ID NO: 2582105 - RNA, 17 nt, Human
ggagagaguugaaccua

SEQ ID NO: 2582106 - RNA, 12 nt, Human
ggagagagggga

SEQ ID NO: 2582107 - RNA, 14 nt, Human
ggagagaggggaau

SEQ ID NO: 2582108 - RNA, 16 nt, Human
ggagagccuuccaggg

SEQ ID NO: 2582109 - RNA, 13 nt, Human
ggagagccuucca

SEQ ID NO: 2582110 - RNA, 23 nt, Human
ggagagccagcccucccuguccu

SEQ ID NO: 2582111 - RNA, 18 nt, Human
ggagagccagcccucccu

SEQ ID NO: 2582112 - RNA, 21 nt, Human
ggagagccagcccucccuguc

SEQ ID NO: 2582113 - RNA, 11 nt, Human
ggagagcccag

SEQ ID NO: 2582114 - RNA, 12 nt, Human
ggagagcccagc

SEQ ID NO: 2582115 - RNA, 18 nt, Human
ggagagccuuccaggggu

SEQ ID NO: 2582116 - RNA, 17 nt, Human
ggagagccuuccagggg

SEQ ID NO: 2582117 - RNA, 22 nt, Human
ggagagccuuccagggguggga

SEQ ID NO: 2582118 - RNA, 12 nt, Human
ggagagccugcu

SEQ ID NO: 2582119 - RNA, 11 nt, Human
ggagagccugc

SEQ ID NO: 2582120 - RNA, 14 nt, Human
ggagagccugcugg

SEQ ID NO: 2582121 - RNA, 13 nt, Human
ggagagccugcug

SEQ ID NO: 2582122 - RNA, 16 nt, Human
ggagagccugcuggca

SEQ ID NO: 2582123 - RNA, 16 nt, Human
ggagagcgccugcccc

SEQ ID NO: 2582124 - RNA, 20 nt, Human
ggacuuguauauuuguacaa

SEQ ID NO: 2582125 - RNA, 19 nt, Human
ggacuuguauauuuguaca

SEQ ID NO: 2582126 - RNA, 15 nt, Human
ggacuuguauauuug

SEQ ID NO: 2582127 - RNA, 9 nt, Human
ggacuuugu

SEQ ID NO: 2582128 - RNA, 16 nt, Human
ggacuugugucucugu

SEQ ID NO: 2582129 - RNA, 18 nt, Human
ggacuuuuauuuccagug

SEQ ID NO: 2582130 - RNA, 19 nt, Human
ggagaaaauggacguguua

SEQ ID NO: 2582131 - RNA, 13 nt, Human
ggacuuuucugca

SEQ ID NO: 2582132 - RNA, 12 nt, Human
ggagaaaaacaa

SEQ ID NO: 2582133 - RNA, 13 nt, Human
ggagaaaacacuu

SEQ ID NO: 2582134 - RNA, 17 nt, Human
ggacuuggaagcuccgc

SEQ ID NO: 2582135 - RNA, 16 nt, Human
ggacuuggagguagcu

SEQ ID NO: 2582136 - RNA, 14 nt, Human
ggacuuguauauuu

SEQ ID NO: 2582137 - RNA, 18 nt, Human
ggacuuccuugcucuccc

SEQ ID NO: 2582138 - RNA, 23 nt, Human
ggacuuccuguccagcuccaacc

SEQ ID NO: 2582139 - RNA, 15 nt, Human
ggacuuccuugcucu

SEQ ID NO: 2582140 - RNA, 15 nt, Human
ggacuuggaagcucc

SEQ ID NO: 2582141 - RNA, 20 nt, Human
ggagacugguccugugugca

SEQ ID NO: 2582142 - RNA, 18 nt, Human
ggagacuggggggcuuga

SEQ ID NO: 2582143 - RNA, 15 nt, Human
ggagacuggggggcu

SEQ ID NO: 2582144 - RNA, 23 nt, Human
ggagacugcuucccauccuaccc

SEQ ID NO: 2582145 - RNA, 23 nt, Human
ggagacugggcugagggagccug

SEQ ID NO: 2582146 - RNA, 16 nt, Human
ggagacugucucaaga

SEQ ID NO: 2582147 - RNA, 19 nt, Human
ggagacugcuucccauccu

SEQ ID NO: 2582148 - RNA, 18 nt, Human
ggagacugcuucccaucc

SEQ ID NO: 2582149 - RNA, 13 nt, Human
ggagacugggcug

SEQ ID NO: 2582150 - RNA, 17 nt, Human
ggagacugggcugaggg

SEQ ID NO: 2582151 - RNA, 20 nt, Human
ggagacugggcugagggagc

SEQ ID NO: 2582152 - RNA, 15 nt, Human
ggagacugcuuccca

SEQ ID NO: 2582153 - RNA, 14 nt, Human
ggagacugcuuccc

SEQ ID NO: 2582154 - RNA, 22 nt, Human
ggagacugcugagucaacccaa

SEQ ID NO: 2582155 - RNA, 18 nt, Human
ggagaaaugaaaaaauau

SEQ ID NO: 2582156 - RNA, 20 nt, Human
ggagaaaauucaauuguaaa

SEQ ID NO: 2582157 - RNA, 11 nt, Human
ggagaaacaca

SEQ ID NO: 2582158 - RNA, 13 nt, Human
ggagaaacagaga

SEQ ID NO: 2582159 - RNA, 14 nt, Human
ggagaaauugacag

SEQ ID NO: 2582160 - RNA, 15 nt, Human
ggagaaauugacaga

SEQ ID NO: 2582161 - RNA, 14 nt, Human
ggagaaacagagac

SEQ ID NO: 2582162 - RNA, 20 nt, Human
ggagaaaugcauccauuccu

SEQ ID NO: 2582163 - RNA, 17 nt, Human
ggagaaauguuguucau

SEQ ID NO: 2582164 - RNA, 23 nt, Human
ggagaaaugcauccauuccucag

SEQ ID NO: 2582165 - RNA, 22 nt, Human
ggagaaccaaaaagaggcuaug

SEQ ID NO: 2582166 - RNA, 22 nt, Human
ggagaacuagaaccuggagggc

SEQ ID NO: 2582167 - RNA, 18 nt, Human
ggagaacuagaaccugga

SEQ ID NO: 2582168 - RNA, 18 nt, Human
ggagaaccuugugccugg

SEQ ID NO: 2582169 - RNA, 17 nt, Human
ggagaaccuugugccug

SEQ ID NO: 2582170 - RNA, 20 nt, Human
ggagaaccaaaucuggaagc

SEQ ID NO: 2582171 - RNA, 15 nt, Human
ggagaaccucaggcu

SEQ ID NO: 2582172 - RNA, 18 nt, Human
ggacuuccuguccagcuc

SEQ ID NO: 2582173 - RNA, 19 nt, Human
ggacuuccuguccagcucc

SEQ ID NO: 2582174 - RNA, 20 nt, Human
ggacuuccuguccagcucca

SEQ ID NO: 2582175 - RNA, 21 nt, Human
ggacuuccuguccagcuccaa

SEQ ID NO: 2582176 - RNA, 11 nt, Human
ggacuuccugu

SEQ ID NO: 2582177 - RNA, 21 nt, Human
ggacuucacgaaguguugcau

SEQ ID NO: 2582178 - RNA, 20 nt, Human
ggacuuagaaagcaggggcu

SEQ ID NO: 2582179 - RNA, 20 nt, Human
ggacuuaacggcuccaggau

SEQ ID NO: 2582180 - RNA, 19 nt, Human
ggacuuaacggcuccagga

SEQ ID NO: 2582181 - RNA, 17 nt, Human
ggacuuaacggcuccag

SEQ ID NO: 2582182 - RNA, 15 nt, Human
ggacuuaacggcucc

SEQ ID NO: 2582183 - RNA, 18 nt, Human
ggacuuagaaagcagggg

SEQ ID NO: 2582184 - RNA, 17 nt, Human
ggacuuagaaagcaggg

SEQ ID NO: 2582185 - RNA, 15 nt, Human
ggacuuagaaagcag

SEQ ID NO: 2582186 - RNA, 17 nt, Human
ggacuuagcugggagaa

SEQ ID NO: 2582187 - RNA, 22 nt, Human
ggacugugugcucaggagcccu

SEQ ID NO: 2582188 - RNA, 14 nt, Human
ggacucagcccuga

SEQ ID NO: 2582189 - RNA, 15 nt, Human
ggacucagcccugag

SEQ ID NO: 2582190 - RNA, 16 nt, Human
ggacucagcccugagg

SEQ ID NO: 2582191 - RNA, 17 nt, Human
ggacucagcccugaggu

SEQ ID NO: 2582192 - RNA, 23 nt, Human
ggacugugugcucaggagcccug

SEQ ID NO: 2582193 - RNA, 20 nt, Human
ggacuguuuuuuccugagcu

SEQ ID NO: 2582194 - RNA, 21 nt, Human
ggacuguuuuuuccugagcuu

SEQ ID NO: 2582195 - RNA, 23 nt, Human
ggacuguuuuuuccugagcuugg

SEQ ID NO: 2582196 - RNA, 23 nt, Human
ggacuguugacauccaagcuucc

SEQ ID NO: 2582197 - RNA, 20 nt, Human
ggacuacaggugugagucac

SEQ ID NO: 2582198 - RNA, 17 nt, Human
ggaccuauguccuaagg

SEQ ID NO: 2582199 - RNA, 19 nt, Human
ggaccucagaguccaggcc

SEQ ID NO: 2582200 - RNA, 20 nt, Human
ggaccuaggauaucuucucc

SEQ ID NO: 2582201 - RNA, 12 nt, Human
ggaccucaggcc

SEQ ID NO: 2582202 - RNA, 21 nt, Human
ggacuacguuaagggaaggaa

SEQ ID NO: 2582203 - RNA, 16 nt, Human
ggaccucagcugcuuc

SEQ ID NO: 2582204 - RNA, 21 nt, Human
ggaccuauguccuaaggacac

SEQ ID NO: 2582205 - RNA, 21 nt, Human
ggaccucagaguccaggcccc

SEQ ID NO: 2582206 - RNA, 17 nt, Human
ggacuagaaccuggagg

SEQ ID NO: 2582207 - RNA, 14 nt, Human
ggacuagaaccugg

SEQ ID NO: 2582208 - RNA, 18 nt, Human
ggacuagagggaccucuc

SEQ ID NO: 2582209 - RNA, 19 nt, Human
ggacuagagggaccucucc

SEQ ID NO: 2582210 - RNA, 21 nt, Human
ggacuagagggaccucuccca

SEQ ID NO: 2582211 - RNA, 17 nt, Human
ggacucagaagccucug

SEQ ID NO: 2582212 - RNA, 18 nt, Human
ggacucaauuucucccca

SEQ ID NO: 2582213 - RNA, 18 nt, Human
ggacucagaagccucugg

SEQ ID NO: 2582214 - RNA, 13 nt, Human
ggacucagcccug

SEQ ID NO: 2582215 - RNA, 20 nt, Human
ggacuauauuugggccugcu

SEQ ID NO: 2582216 - RNA, 19 nt, Human
ggacucaauuucuccccag

SEQ ID NO: 2582217 - RNA, 15 nt, Human
ggacucacuugccca

SEQ ID NO: 2582218 - RNA, 22 nt, Human
ggacucaaugcacugacauugu

SEQ ID NO: 2582219 - RNA, 16 nt, Human
ggacuaggguccuggg

SEQ ID NO: 2582220 - RNA, 15 nt, Human
ggacuauagcccagg

SEQ ID NO: 2582221 - RNA, 22 nt, Human
ggacuagccccuguggagacug

SEQ ID NO: 2582222 - RNA, 14 nt, Human
ggacuagccccugu

SEQ ID NO: 2582223 - RNA, 15 nt, Human
ggaggcugagauggg

SEQ ID NO: 2582224 - RNA, 19 nt, Human
ggaggcugagaugggagaa

SEQ ID NO: 2582225 - RNA, 14 nt, Human
ggaggcugagacag

SEQ ID NO: 2582226 - RNA, 15 nt, Human
ggaggcucuggagcc

SEQ ID NO: 2582227 - RNA, 15 nt, Human
ggaggccccaaagga

SEQ ID NO: 2582228 - RNA, 19 nt, Human
ggaggcccaguucacccug

SEQ ID NO: 2582229 - RNA, 21 nt, Human
ggaggcucuggagcccacugu

SEQ ID NO: 2582230 - RNA, 15 nt, Human
ggaggucgaggcagg

SEQ ID NO: 2582231 - RNA, 16 nt, Human
ggaggucgaggcagga

SEQ ID NO: 2582232 - RNA, 18 nt, Human
ggaggcugagacaggaga

SEQ ID NO: 2582233 - RNA, 15 nt, Human
ggaggcugagacagg

SEQ ID NO: 2582234 - RNA, 12 nt, Human
ggaggcugaggc

SEQ ID NO: 2582235 - RNA, 14 nt, Human
ggaggcugaggcag

SEQ ID NO: 2582236 - RNA, 19 nt, Human
ggaggcugagacaggagaa

SEQ ID NO: 2582237 - RNA, 15 nt, Human
ggaggcugaggcaga

SEQ ID NO: 2582238 - RNA, 16 nt, Human
ggaggcugaggcagaa

SEQ ID NO: 2582239 - RNA, 18 nt, Human
ggaggcugaggcagaaga

SEQ ID NO: 2582240 - RNA, 17 nt, Human
ggaggcugaggcaggag

SEQ ID NO: 2582241 - RNA, 14 nt, Human
ggaggucgaggcag

SEQ ID NO: 2582242 - RNA, 17 nt, Human
ggagguugcagggagcc

SEQ ID NO: 2582243 - RNA, 20 nt, Human
ggagguugcagugagcugag

SEQ ID NO: 2582244 - RNA, 16 nt, Human
ggagguugaagccaag

SEQ ID NO: 2582245 - RNA, 14 nt, Human
ggagguugaagcca

SEQ ID NO: 2582246 - RNA, 12 nt, Human
ggagguugauaa

SEQ ID NO: 2582247 - RNA, 19 nt, Human
ggagguugaucagaucuga

SEQ ID NO: 2582248 - RNA, 12 nt, Human
ggagguugcagg

SEQ ID NO: 2582249 - RNA, 14 nt, Human
ggagguugcaggga

SEQ ID NO: 2582250 - RNA, 18 nt, Human
ggaggucgaggcaggagg

SEQ ID NO: 2582251 - RNA, 19 nt, Human
ggaggugucaggcugcugg

SEQ ID NO: 2582252 - RNA, 13 nt, Human
ggaggcugaggcg

SEQ ID NO: 2582253 - RNA, 16 nt, Human
ggaggugucaggcugc

SEQ ID NO: 2582254 - RNA, 19 nt, Human
ggaggcugaggcaggagga

SEQ ID NO: 2582255 - RNA, 16 nt, Human
ggagguucucucggag

SEQ ID NO: 2582256 - RNA, 21 nt, Human
ggagguguuuaaagagagguu

SEQ ID NO: 2582257 - RNA, 17 nt, Human
ggagguuaaggcugagg

SEQ ID NO: 2582258 - RNA, 19 nt, Human
ggagguuaaggcugaggaa

SEQ ID NO: 2582259 - RNA, 21 nt, Human
ggagguuaaggcugaggaaag

SEQ ID NO: 2582260 - RNA, 18 nt, Human
ggagguguggagccgagg

SEQ ID NO: 2582261 - RNA, 12 nt, Human
ggaggaagagaa

SEQ ID NO: 2582262 - RNA, 23 nt, Human
ggaggaaauuugaauggguccau

SEQ ID NO: 2582263 - RNA, 18 nt, Human
ggaggaacacugcacucu

SEQ ID NO: 2582264 - RNA, 22 nt, Human
ggaggaaaaccaagccguggcu

SEQ ID NO: 2582265 - RNA, 21 nt, Human
ggaggaaaaccaagccguggc

SEQ ID NO: 2582266 - RNA, 21 nt, Human
ggagcuuuuuuccuuaaucca

SEQ ID NO: 2582267 - RNA, 20 nt, Human
ggaggaaaaccaagccgugg

SEQ ID NO: 2582268 - RNA, 21 nt, Human
ggaggcaugugaugagaggaa

SEQ ID NO: 2582269 - RNA, 23 nt, Human
ggaggaagcagaauaaagcaauu

SEQ ID NO: 2582270 - RNA, 16 nt, Human
ggaggcauggcccugg

SEQ ID NO: 2582271 - RNA, 15 nt, Human
ggaggcauggcccug

SEQ ID NO: 2582272 - RNA, 14 nt, Human
ggaggcaucugcac

SEQ ID NO: 2582273 - RNA, 15 nt, Human
ggaggaagcagaaua

SEQ ID NO: 2582274 - RNA, 14 nt, Human
ggaggaagcagaau

SEQ ID NO: 2582275 - RNA, 13 nt, Human
ggaggaagcagaa

SEQ ID NO: 2582276 - RNA, 12 nt, Human
ggaggaagcaga

SEQ ID NO: 2582277 - RNA, 11 nt, Human
ggaggaagcag

SEQ ID NO: 2582278 - RNA, 21 nt, Human
ggaggaagaagcuuaggcagg

SEQ ID NO: 2582279 - RNA, 12 nt, Human
ggaggaaagcaa

SEQ ID NO: 2582280 - RNA, 22 nt, Human
ggaggaagcagaauaaagcaau

SEQ ID NO: 2582281 - RNA, 20 nt, Human
ggaggaagcagaauaaagca

SEQ ID NO: 2582282 - RNA, 19 nt, Human
ggaggaagcagaauaaagc

SEQ ID NO: 2582283 - RNA, 17 nt, Human
ggaggaagcagaauaaa

SEQ ID NO: 2582284 - RNA, 11 nt, Human
ggaggaagccc

SEQ ID NO: 2582285 - RNA, 19 nt, Human
ggaggaagcagguugaggg

SEQ ID NO: 2582286 - RNA, 13 nt, Human
ggaggccagccuu

SEQ ID NO: 2582287 - RNA, 14 nt, Human
ggaggccaggccgg

SEQ ID NO: 2582288 - RNA, 23 nt, Human
ggaggccaggccggcgagcccug

SEQ ID NO: 2582289 - RNA, 17 nt, Human
ggaggcauggcccuggg

SEQ ID NO: 2582290 - RNA, 18 nt, Human
ggaggccaaggugggagg

SEQ ID NO: 2582291 - RNA, 20 nt, Human
ggaggcucuggagcccacug

SEQ ID NO: 2582292 - RNA, 17 nt, Human
ggaggcucuggagccca

SEQ ID NO: 2582293 - RNA, 13 nt, Human
ggaggcccaguuc

SEQ ID NO: 2582294 - RNA, 17 nt, Human
ggaggccauugugugag

SEQ ID NO: 2582295 - RNA, 18 nt, Human
ggagccaguaaacagagg

SEQ ID NO: 2582296 - RNA, 18 nt, Human
ggagcccacuguacuugc

SEQ ID NO: 2582297 - RNA, 18 nt, Human
ggagccccagcuacccuu

SEQ ID NO: 2582298 - RNA, 17 nt, Human
ggagccccagcuacccu

SEQ ID NO: 2582299 - RNA, 20 nt, Human
ggagccccagcccccuuugg

SEQ ID NO: 2582300 - RNA, 16 nt, Human
ggagccccagcccccu

SEQ ID NO: 2582301 - RNA, 15 nt, Human
ggagccccagccccc

SEQ ID NO: 2582302 - RNA, 12 nt, Human
ggagcccacugu

SEQ ID NO: 2582303 - RNA, 13 nt, Human
ggagccccagccc

SEQ ID NO: 2582304 - RNA, 20 nt, Human
ggagcuccacucugcuucuc

SEQ ID NO: 2582305 - RNA, 23 nt, Human
ggagccccaggccucuguguccu

SEQ ID NO: 2582306 - RNA, 17 nt, Human
ggagccccauuccuggg

SEQ ID NO: 2582307 - RNA, 16 nt, Human
ggagccccauuccugg

SEQ ID NO: 2582308 - RNA, 14 nt, Human
ggagccccagugcc

SEQ ID NO: 2582309 - RNA, 14 nt, Human
ggagccccaggguc

SEQ ID NO: 2582310 - RNA, 20 nt, Human
ggagccccagggucuucccu

SEQ ID NO: 2582311 - RNA, 22 nt, Human
ggagccccaggccucugugucc

SEQ ID NO: 2582312 - RNA, 20 nt, Human
ggagccccaggccucugugu

SEQ ID NO: 2582313 - RNA, 14 nt, Human
ggagccccaggccu

SEQ ID NO: 2582314 - RNA, 13 nt, Human
ggagccccaggcc

SEQ ID NO: 2582315 - RNA, 12 nt, Human
ggagccccaggg

SEQ ID NO: 2582316 - RNA, 13 nt, Human
ggagccccagggu

SEQ ID NO: 2582317 - RNA, 22 nt, Human
ggagcugccuguucagcuccag

SEQ ID NO: 2582318 - RNA, 15 nt, Human
ggagcugaaaaauca

SEQ ID NO: 2582319 - RNA, 21 nt, Human
ggagcuccucuccuggaggau

SEQ ID NO: 2582320 - RNA, 17 nt, Human
ggagcugccuuggcuca

SEQ ID NO: 2582321 - RNA, 18 nt, Human
ggagcucuucaggccucc

SEQ ID NO: 2582322 - RNA, 20 nt, Human
ggagcucuucaggccucccu

SEQ ID NO: 2582323 - RNA, 16 nt, Human
ggagcugaguggggga

SEQ ID NO: 2582324 - RNA, 18 nt, Human
ggagcuccucuccuggag

SEQ ID NO: 2582325 - RNA, 17 nt, Human
ggagcuccucuccugga

SEQ ID NO: 2582326 - RNA, 13 nt, Human
ggagcuccucucc

SEQ ID NO: 2582327 - RNA, 20 nt, Human
ggagcuccucuccuggagga

SEQ ID NO: 2582328 - RNA, 19 nt, Human
ggagcuccucuccuggagg

SEQ ID NO: 2582329 - RNA, 17 nt, Human
ggagcucuucaggccuc

SEQ ID NO: 2582330 - RNA, 18 nt, Human
ggagcugccuuggcucag

SEQ ID NO: 2582331 - RNA, 21 nt, Human
ggagcugccuuggcucagaca

SEQ ID NO: 2582332 - RNA, 24 nt, Human
ggagcugcucacuaccuccucagg

SEQ ID NO: 2582333 - RNA, 19 nt, Human
ggagcugcuauagccuggg

SEQ ID NO: 2582334 - RNA, 18 nt, Human
ggagcugcuauagccugg

SEQ ID NO: 2582335 - RNA, 13 nt, Human
ggagcugcuggcu

SEQ ID NO: 2582336 - RNA, 15 nt, Human
ggagcugcuggcuug

SEQ ID NO: 2582337 - RNA, 23 nt, Human
ggagcugcuggcuugcagugcgc

SEQ ID NO: 2582338 - RNA, 12 nt, Human
ggagcuggcccc

SEQ ID NO: 2582339 - RNA, 20 nt, Human
ggagcuuucaaagaaggaau

SEQ ID NO: 2582340 - RNA, 15 nt, Human
ggagcuugggaaugg

SEQ ID NO: 2582341 - RNA, 21 nt, Human
ggagcuucucugaugugauau

SEQ ID NO: 2582342 - RNA, 16 nt, Human
ggagcuggccccgccg

SEQ ID NO: 2582343 - RNA, 15 nt, Human
ggagcuggccccgcc

SEQ ID NO: 2582344 - RNA, 23 nt, Human
ggagcagaaucaguauugggagc

SEQ ID NO: 2582345 - RNA, 16 nt, Human
ggagcagaacugaacc

SEQ ID NO: 2582346 - RNA, 13 nt, Human
ggagcagaaucag

SEQ ID NO: 2582347 - RNA, 12 nt, Human
ggagcagaacug

SEQ ID NO: 2582348 - RNA, 17 nt, Human
ggagcagagcucugccg

SEQ ID NO: 2582349 - RNA, 20 nt, Human
ggagcagacaggaggaauca

SEQ ID NO: 2582350 - RNA, 15 nt, Human
ggagcagaccacccc

SEQ ID NO: 2582351 - RNA, 19 nt, Human
ggagcagagcaagucugca

SEQ ID NO: 2582352 - RNA, 23 nt, Human
ggagcaggagauugagaaggaga

SEQ ID NO: 2582353 - RNA, 22 nt, Human
ggagcaggagauugagaaggag

SEQ ID NO: 2582354 - RNA, 21 nt, Human
ggagcaggagauugagaagga

SEQ ID NO: 2582355 - RNA, 16 nt, Human
ggagcaggagauugag

SEQ ID NO: 2582356 - RNA, 13 nt, Human
ggagcagccucag

SEQ ID NO: 2582357 - RNA, 15 nt, Human
ggagcaggagauuga

SEQ ID NO: 2582358 - RNA, 21 nt, Human
ggagcagccacauuccugaug

SEQ ID NO: 2582359 - RNA, 12 nt, Human
ggagcagagggg

SEQ ID NO: 2582360 - RNA, 13 nt, Human
ggagcagccacau

SEQ ID NO: 2582361 - RNA, 15 nt, Human
ggagcccacuguacu

SEQ ID NO: 2582362 - RNA, 23 nt, Human
ggagccaugcgcccccuccgccc

SEQ ID NO: 2582363 - RNA, 22 nt, Human
ggagccaugcgcccccuccgcc

SEQ ID NO: 2582364 - RNA, 13 nt, Human
ggagccagggcug

SEQ ID NO: 2582365 - RNA, 12 nt, Human
ggagcagugucu

SEQ ID NO: 2582366 - RNA, 18 nt, Human
ggagcaguaucaugaagc

SEQ ID NO: 2582367 - RNA, 18 nt, Human
ggagcagugcaggcacag

SEQ ID NO: 2582368 - RNA, 14 nt, Human
ggagcagugcaggc

SEQ ID NO: 2582369 - RNA, 15 nt, Human
ggagcaggggcgugg

SEQ ID NO: 2582370 - RNA, 21 nt, Human
ggagcaggcggugggcaccca

SEQ ID NO: 2582371 - RNA, 18 nt, Human
ggcucccuucccaccucu

SEQ ID NO: 2582372 - RNA, 17 nt, Human
ggcucccuucccaccuc

SEQ ID NO: 2582373 - RNA, 16 nt, Human
ggcucccuucccaccu

SEQ ID NO: 2582374 - RNA, 22 nt, Human
ggcucccuucccaccucucuca

SEQ ID NO: 2582375 - RNA, 20 nt, Human
ggcucccuucccaccucucu

SEQ ID NO: 2582376 - RNA, 20 nt, Human
ggcuccuaucuguguuuuga

SEQ ID NO: 2582377 - RNA, 24 nt, Human
ggcuccgucaguaucaggccugcc

SEQ ID NO: 2582378 - RNA, 15 nt, Human
ggcuccgaacacccu

SEQ ID NO: 2582379 - RNA, 18 nt, Human
ggcuccgucaguaucagg

SEQ ID NO: 2582380 - RNA, 22 nt, Human
ggcuccgucaguaucaggccug

SEQ ID NO: 2582381 - RNA, 17 nt, Human
ggcuccucccggugccc

SEQ ID NO: 2582382 - RNA, 12 nt, Human
ggcuccucucag

SEQ ID NO: 2582383 - RNA, 12 nt, Human
ggcuccugaggg

SEQ ID NO: 2582384 - RNA, 13 nt, Human
ggcuccugccacc

SEQ ID NO: 2582385 - RNA, 12 nt, Human
ggcuccugccag

SEQ ID NO: 2582386 - RNA, 12 nt, Human
ggcuccugccac

SEQ ID NO: 2582387 - RNA, 9 nt, Human
ggcuccugc

SEQ ID NO: 2582388 - RNA, 22 nt, Human
ggcugcaugcgggcuuccuccu

SEQ ID NO: 2582389 - RNA, 15 nt, Human
ggcugcagugagcca

SEQ ID NO: 2582390 - RNA, 23 nt, Human
ggcugcaucugggauucccacca

SEQ ID NO: 2582391 - RNA, 13 nt, Human
ggcugccaccaag

SEQ ID NO: 2582392 - RNA, 20 nt, Human
ggcugcaugcgggcuuccuc

SEQ ID NO: 2582393 - RNA, 22 nt, Human
ggcugaacccugugcugguguc

SEQ ID NO: 2582394 - RNA, 21 nt, Human
ggcugaacccugugcuggugu

SEQ ID NO: 2582395 - RNA, 23 nt, Human
ggcugaacccugugcuggugucc

SEQ ID NO: 2582396 - RNA, 15 nt, Human
ggcugaacggggaga

SEQ ID NO: 2582397 - RNA, 17 nt, Human
ggcugaacggggagaaa

SEQ ID NO: 2582398 - RNA, 22 nt, Human
ggcugcagugacgugcaccugu

SEQ ID NO: 2582399 - RNA, 22 nt, Human
ggcugaaauucuccuggagguc

SEQ ID NO: 2582400 - RNA, 21 nt, Human
ggcugaaauucuccuggaggu

SEQ ID NO: 2582401 - RNA, 19 nt, Human
ggcugaaauucuccuggag

SEQ ID NO: 2582402 - RNA, 18 nt, Human
ggcugaaauucuccugga

SEQ ID NO: 2582403 - RNA, 17 nt, Human
ggcugaaauucuccugg

SEQ ID NO: 2582404 - RNA, 16 nt, Human
ggcugaaauucuccug

SEQ ID NO: 2582405 - RNA, 14 nt, Human
ggcugaaauucucc

SEQ ID NO: 2582406 - RNA, 11 nt, Human
ggcugaaagcc

SEQ ID NO: 2582407 - RNA, 20 nt, Human
ggcugaacccugugcuggug

SEQ ID NO: 2582408 - RNA, 19 nt, Human
ggcugaacccugugcuggu

SEQ ID NO: 2582409 - RNA, 17 nt, Human
ggcugaacccugugcug

SEQ ID NO: 2582410 - RNA, 16 nt, Human
ggcugaacccugugcu

SEQ ID NO: 2582411 - RNA, 15 nt, Human
ggcugaacccugugc

SEQ ID NO: 2582412 - RNA, 14 nt, Human
ggcugaacccugug

SEQ ID NO: 2582413 - RNA, 21 nt, Human
ggcugaacacuccaauuaagg

SEQ ID NO: 2582414 - RNA, 17 nt, Human
ggcugcagggaguccga

SEQ ID NO: 2582415 - RNA, 17 nt, Human
ggcucgaaucucugugc

SEQ ID NO: 2582416 - RNA, 15 nt, Human
ggcucgaaucucugu

SEQ ID NO: 2582417 - RNA, 21 nt, Human
ggcuccuuucuccagccagca

SEQ ID NO: 2582418 - RNA, 20 nt, Human
ggcuccuuucuccagccagc

SEQ ID NO: 2582419 - RNA, 13 nt, Human
ggcucgaaucucu

SEQ ID NO: 2582420 - RNA, 19 nt, Human
ggcuccuuucuccagccag

SEQ ID NO: 2582421 - RNA, 17 nt, Human
ggcuccuuucuccagcc

SEQ ID NO: 2582422 - RNA, 13 nt, Human
ggcuccuuucucc

SEQ ID NO: 2582423 - RNA, 12 nt, Human
ggcuccuuucuc

SEQ ID NO: 2582424 - RNA, 17 nt, Human
ggcuccugccuucuguc

SEQ ID NO: 2582425 - RNA, 18 nt, Human
ggcucgagcaugccugga

SEQ ID NO: 2582426 - RNA, 19 nt, Human
ggcucgaaucucugugccu

SEQ ID NO: 2582427 - RNA, 18 nt, Human
ggcucgaaucucugugcc

SEQ ID NO: 2582428 - RNA, 20 nt, Human
ggcucgaaucucugugccuu

SEQ ID NO: 2582429 - RNA, 21 nt, Human
ggcucgagcaguccugccuca

SEQ ID NO: 2582430 - RNA, 24 nt, Human
ggcucuuccaggcugggagagccu

SEQ ID NO: 2582431 - RNA, 23 nt, Human
ggcucuuccaggcugggagagcc

SEQ ID NO: 2582432 - RNA, 19 nt, Human
ggcucgauuuuguaucugc

SEQ ID NO: 2582433 - RNA, 20 nt, Human
ggcuccuuuuucucccucug

SEQ ID NO: 2582434 - RNA, 12 nt, Human
ggcucuucucau

SEQ ID NO: 2582435 - RNA, 20 nt, Human
ggcucuuccaggcugggaga

SEQ ID NO: 2582436 - RNA, 20 nt, Human
ggcucuucucauuucacccc

SEQ ID NO: 2582437 - RNA, 13 nt, Human
ggcucuucucauu

SEQ ID NO: 2582438 - RNA, 22 nt, Human
ggcucuucucauuucaccccuc

SEQ ID NO: 2582439 - RNA, 16 nt, Human
ggcucuucuccccaga

SEQ ID NO: 2582440 - RNA, 20 nt, Human
ggcugaaagaggccaaugcc

SEQ ID NO: 2582441 - RNA, 22 nt, Human
ggcuggccuggccccucagggu

SEQ ID NO: 2582442 - RNA, 17 nt, Human
ggcuggccuggccccuc

SEQ ID NO: 2582443 - RNA, 22 nt, Human
ggcuggcccagcccugcuggcc

SEQ ID NO: 2582444 - RNA, 20 nt, Human
ggcuggcccagcccugcugg

SEQ ID NO: 2582445 - RNA, 19 nt, Human
ggcuggcccagcccugcug

SEQ ID NO: 2582446 - RNA, 13 nt, Human
ggcuggcccugcc

SEQ ID NO: 2582447 - RNA, 14 nt, Human
ggcuggcccugccc

SEQ ID NO: 2582448 - RNA, 15 nt, Human
ggcuggcccugcccu

SEQ ID NO: 2582449 - RNA, 20 nt, Human
ggcuggcgugcaguggugcg

SEQ ID NO: 2582450 - RNA, 16 nt, Human
ggcuggcgugcagugg

SEQ ID NO: 2582451 - RNA, 13 nt, Human
ggcuggccuuccu

SEQ ID NO: 2582452 - RNA, 21 nt, Human
ggcuggcccagcccugcuggc

SEQ ID NO: 2582453 - RNA, 16 nt, Human
ggcuggcccugcccug

SEQ ID NO: 2582454 - RNA, 14 nt, Human
ggcuggcgugcagu

SEQ ID NO: 2582455 - RNA, 18 nt, Human
ggcuggcccagcccugcu

SEQ ID NO: 2582456 - RNA, 17 nt, Human
ggcuggcccagcccugc

SEQ ID NO: 2582457 - RNA, 16 nt, Human
ggcuggcccagcccug

SEQ ID NO: 2582458 - RNA, 15 nt, Human
ggcuggcccagcccu

SEQ ID NO: 2582459 - RNA, 14 nt, Human
ggcuggcccagccc

SEQ ID NO: 2582460 - RNA, 13 nt, Human
ggcuggcccagcc

SEQ ID NO: 2582461 - RNA, 20 nt, Human
ggcuggcagcucuccaguca

SEQ ID NO: 2582462 - RNA, 12 nt, Human
ggcuggcccagc

SEQ ID NO: 2582463 - RNA, 18 nt, Human
ggcuggcagcucuccagu

SEQ ID NO: 2582464 - RNA, 14 nt, Human
ggcuggcacaggac

SEQ ID NO: 2582465 - RNA, 15 nt, Human
ggcuggcacaggaca

SEQ ID NO: 2582466 - RNA, 16 nt, Human
ggcuggcagcucucca

SEQ ID NO: 2582467 - RNA, 15 nt, Human
ggcuggcagcucucc

SEQ ID NO: 2582468 - RNA, 14 nt, Human
ggcuggcagcucuc

SEQ ID NO: 2582469 - RNA, 19 nt, Human
ggcuggcaccgccuucucu

SEQ ID NO: 2582470 - RNA, 13 nt, Human
ggcuggcacagga

SEQ ID NO: 2582471 - RNA, 21 nt, Human
ggcuggauuuugaauuuucuu

SEQ ID NO: 2582472 - RNA, 18 nt, Human
ggcuggaugugguggcau

SEQ ID NO: 2582473 - RNA, 19 nt, Human
ggcuggaugugguggcaua

SEQ ID NO: 2582474 - RNA, 15 nt, Human
ggcuggaugaaauuu

SEQ ID NO: 2582475 - RNA, 15 nt, Human
ggcuggauguggugg

SEQ ID NO: 2582476 - RNA, 18 nt, Human
ggcugccaugugaagagg

SEQ ID NO: 2582477 - RNA, 19 nt, Human
ggcugcccacacaccccaa

SEQ ID NO: 2582478 - RNA, 17 nt, Human
ggcugcccacacacccc

SEQ ID NO: 2582479 - RNA, 17 nt, Human
ggcuggaucugugaggg

SEQ ID NO: 2582480 - RNA, 21 nt, Human
ggcugcccccggcccccuggu

SEQ ID NO: 2582481 - RNA, 20 nt, Human
ggcugcccccggcccccugg

SEQ ID NO: 2582482 - RNA, 19 nt, Human
ggcugcccccggcccccug

SEQ ID NO: 2582483 - RNA, 19 nt, Human
ggcugccccaaccugcuga

SEQ ID NO: 2582484 - RNA, 18 nt, Human
ggcugcccacuaugguca

SEQ ID NO: 2582485 - RNA, 20 nt, Human
ggcugcccacacaccccaau

SEQ ID NO: 2582486 - RNA, 16 nt, Human
ggcuggcuucaggagg

SEQ ID NO: 2582487 - RNA, 13 nt, Human
ggcuggcuucagg

SEQ ID NO: 2582488 - RNA, 13 nt, Human
ggcuggcuggggc

SEQ ID NO: 2582489 - RNA, 12 nt, Human
ggcuggcugggg

SEQ ID NO: 2582490 - RNA, 13 nt, Human
ggcuggcugggca

SEQ ID NO: 2582491 - RNA, 14 nt, Human
ggcuggcugcagug

SEQ ID NO: 2582492 - RNA, 15 nt, Human
ggcuggcugcaguga

SEQ ID NO: 2582493 - RNA, 24 nt, Human
ggcuggcuccagaugcagggcagu

SEQ ID NO: 2582494 - RNA, 16 nt, Human
ggcuggcucccucuug

SEQ ID NO: 2582495 - RNA, 22 nt, Human
ggcuggcuccagaugcagggca

SEQ ID NO: 2582496 - RNA, 17 nt, Human
ggcuggcgcagccaagg

SEQ ID NO: 2582497 - RNA, 16 nt, Human
ggcuggcgcagccaag

SEQ ID NO: 2582498 - RNA, 14 nt, Human
ggcuggcgcagcca

SEQ ID NO: 2582499 - RNA, 14 nt, Human
ggcuggccuuccug

SEQ ID NO: 2582500 - RNA, 21 nt, Human
ggcuggcgcagccaaggccga

SEQ ID NO: 2582501 - RNA, 19 nt, Human
ggcuggcgcagccaaggcc

SEQ ID NO: 2582502 - RNA, 20 nt, Human
ggcuggcggcuacucagcag

SEQ ID NO: 2582503 - RNA, 17 nt, Human
ggcuggcuaacuggaag

SEQ ID NO: 2582504 - RNA, 23 nt, Human
ggcugggaacugcagaccugucc

SEQ ID NO: 2582505 - RNA, 21 nt, Human
ggcugggaacugcagaccugu

SEQ ID NO: 2582506 - RNA, 19 nt, Human
ggcugggaacucaccuggg

SEQ ID NO: 2582507 - RNA, 18 nt, Human
ggcugggacguggcucag

SEQ ID NO: 2582508 - RNA, 19 nt, Human
ggcugggacguggcucagc

SEQ ID NO: 2582509 - RNA, 23 nt, Human
ggcugggacguggcucagccagc

SEQ ID NO: 2582510 - RNA, 13 nt, Human
aaaaaaaaagaaa

SEQ ID NO: 2582511 - RNA, 10 nt, Human
aaaaaaaaga

SEQ ID NO: 2582512 - RNA, 13 nt, Human
aaaaaaaaaguuc

SEQ ID NO: 2582513 - RNA, 12 nt, Human
aaaaaaaaaguu

SEQ ID NO: 2582514 - RNA, 20 nt, Human
aaaaagucagacugcuggga

SEQ ID NO: 2582515 - RNA, 13 nt, Human
aaaaagugacaca

SEQ ID NO: 2582516 - RNA, 22 nt, Human
aaaaagucuacgcucuccuuuc

SEQ ID NO: 2582517 - RNA, 15 nt, Human
aaaaaguauuauuuu

SEQ ID NO: 2582518 - RNA, 19 nt, Human
aaaaaguauuauuuuccaa

SEQ ID NO: 2582519 - RNA, 13 nt, Human
aaaaaguauuauu

SEQ ID NO: 2582520 - RNA, 14 nt, Human
aaaaaguauuauuu

SEQ ID NO: 2582521 - RNA, 19 nt, Human
aaaaaguaggaaaugaaug

SEQ ID NO: 2582522 - RNA, 21 nt, Human
aaaaaguaaguaccacucagg

SEQ ID NO: 2582523 - RNA, 21 nt, Human
aaaaagggauccguacauuca

SEQ ID NO: 2582524 - RNA, 22 nt, Human
aaaaagggcagggcaucuccug

SEQ ID NO: 2582525 - RNA, 20 nt, Human
aaaaagcuccaaaugcagcu

SEQ ID NO: 2582526 - RNA, 19 nt, Human
aaaaagcucauauuuugua

SEQ ID NO: 2582527 - RNA, 20 nt, Human
aaaaagcuccuguccuccca

SEQ ID NO: 2582528 - RNA, 18 nt, Human
aaaaagcucauauuuugu

SEQ ID NO: 2582529 - RNA, 19 nt, Human
aaaaaggaaaaaauuaaua

SEQ ID NO: 2582530 - RNA, 19 nt, Human
aaaaagcuuccaugauucu

SEQ ID NO: 2582531 - RNA, 13 nt, Human
aaaaagcuucccc

SEQ ID NO: 2582532 - RNA, 13 nt, Human
aaaaaauacuugu

SEQ ID NO: 2582533 - RNA, 20 nt, Human
aaaaaauacugccagaugcu

SEQ ID NO: 2582534 - RNA, 16 nt, Human
aaaaaauacugccaga

SEQ ID NO: 2582535 - RNA, 11 nt, Human
aaaaaauacuu

SEQ ID NO: 2582536 - RNA, 16 nt, Human
aaaaaauaaaacauuu

SEQ ID NO: 2582537 - RNA, 12 nt, Human
aaaaaaguuuua

SEQ ID NO: 2582538 - RNA, 20 nt, Human
aaaaaaguuuacaaguguau

SEQ ID NO: 2582539 - RNA, 14 nt, Human
aaaaaauacugcca

SEQ ID NO: 2582540 - RNA, 11 nt, Human
aaaaaauacug

SEQ ID NO: 2582541 - RNA, 20 nt, Human
aaaaaauaaucuauuucuau

SEQ ID NO: 2582542 - RNA, 16 nt, Human
aaaaaaggcauuguuu

SEQ ID NO: 2582543 - RNA, 19 nt, Human
aaaaaaggacaauuucaaa

SEQ ID NO: 2582544 - RNA, 13 nt, Human
aaaaaagauauau

SEQ ID NO: 2582545 - RNA, 21 nt, Human
aaaaaagaggaaagaaugaaa

SEQ ID NO: 2582546 - RNA, 18 nt, Human
aaaaaaguuauauagguu

SEQ ID NO: 2582547 - RNA, 15 nt, Human
aaaaaaguuauauag

SEQ ID NO: 2582548 - RNA, 13 nt, Human
aaaaaaguuauau

SEQ ID NO: 2582549 - RNA, 12 nt, Human
aaaaaaguuaua

SEQ ID NO: 2582550 - RNA, 12 nt, Human
aaaaaaaaguua

SEQ ID NO: 2582551 - RNA, 11 nt, Human
aaaaaaaaguu

SEQ ID NO: 2582552 - RNA, 13 nt, Human
aaaaaaaauacuu

SEQ ID NO: 2582553 - RNA, 11 nt, Human
aaaaaaaagaa

SEQ ID NO: 2582554 - RNA, 13 nt, Human
aaaaaaacacaaa

SEQ ID NO: 2582555 - RNA, 15 nt, Human
ggcugucaauuacag

SEQ ID NO: 2582556 - RNA, 23 nt, Human
ggcuguaucccaugagccucagc

SEQ ID NO: 2582557 - RNA, 22 nt, Human
ggcuguaucccaugagccucag

SEQ ID NO: 2582558 - RNA, 20 nt, Human
ggcuguaucccaugagccuc

SEQ ID NO: 2582559 - RNA, 15 nt, Human
ggcuucaguggcagc

SEQ ID NO: 2582560 - RNA, 19 nt, Human
ggcuguccagugcccauuc

SEQ ID NO: 2582561 - RNA, 17 nt, Human
ggcuucagcauauuuau

SEQ ID NO: 2582562 - RNA, 16 nt, Human
ggcuguccagugccca

SEQ ID NO: 2582563 - RNA, 20 nt, Human
ggcuucagcauauuuauagc

SEQ ID NO: 2582564 - RNA, 14 nt, Human
ggcugucaucugug

SEQ ID NO: 2582565 - RNA, 17 nt, Human
ggcugucaucugugcac

SEQ ID NO: 2582566 - RNA, 15 nt, Human
ggcuguccagugccc

SEQ ID NO: 2582567 - RNA, 11 nt, Human
ggcuguccagu

SEQ ID NO: 2582568 - RNA, 15 nt, Human
ggcugucagcaggaa

SEQ ID NO: 2582569 - RNA, 16 nt, Human
ggcugucagcaggaag

SEQ ID NO: 2582570 - RNA, 17 nt, Human
ggcugucagcaggaagc

SEQ ID NO: 2582571 - RNA, 18 nt, Human
ggcugucagcaggaagca

SEQ ID NO: 2582572 - RNA, 18 nt, Human
ggcugucaguaugacauu

SEQ ID NO: 2582573 - RNA, 17 nt, Human
ggcuggugggaggggcg

SEQ ID NO: 2582574 - RNA, 13 nt, Human
ggcuggugggagg

SEQ ID NO: 2582575 - RNA, 21 nt, Human
ggcugguggcucccggagggc

SEQ ID NO: 2582576 - RNA, 16 nt, Human
ggcugguggcccagga

SEQ ID NO: 2582577 - RNA, 16 nt, Human
ggcuggugucaccuga

SEQ ID NO: 2582578 - RNA, 19 nt, Human
ggcuguaucccaugagccu

SEQ ID NO: 2582579 - RNA, 23 nt, Human
aaaaagugacacagcagcuucac

SEQ ID NO: 2582580 - RNA, 20 nt, Human
aaaaagugacacagcagcuu

SEQ ID NO: 2582581 - RNA, 19 nt, Human
aaaaagugacacagcagcu

SEQ ID NO: 2582582 - RNA, 17 nt, Human
aaaaagugacacagcag

SEQ ID NO: 2582583 - RNA, 16 nt, Human
aaaaagugacacagca

SEQ ID NO: 2582584 - RNA, 15 nt, Human
aaaaagugacacagc

SEQ ID NO: 2582585 - RNA, 14 nt, Human
aaaaagugacacag

SEQ ID NO: 2582586 - RNA, 12 nt, Human
aaaaaguguuua

SEQ ID NO: 2582587 - RNA, 13 nt, Human
aaaaaguguuuau

SEQ ID NO: 2582588 - RNA, 19 nt, Human
ggcuggugcuguggccagg

SEQ ID NO: 2582589 - RNA, 13 nt, Human
ggcugguggccca

SEQ ID NO: 2582590 - RNA, 14 nt, Human
ggcugguggcccag

SEQ ID NO: 2582591 - RNA, 18 nt, Human
ggcuggugccagccuucc

SEQ ID NO: 2582592 - RNA, 15 nt, Human
ggcuggugccagccu

SEQ ID NO: 2582593 - RNA, 10 nt, Human
ggcuggugcc

SEQ ID NO: 2582594 - RNA, 17 nt, Human
aaaaaguuauauagguu

SEQ ID NO: 2582595 - RNA, 12 nt, Human
aaaaaguuauau

SEQ ID NO: 2582596 - RNA, 23 nt, Human
aaaaaguguuuauuuuucauauu

SEQ ID NO: 2582597 - RNA, 12 nt, Human
ggcuuccuuucu

SEQ ID NO: 2582598 - RNA, 20 nt, Human
ggcuuccugcguccuccuca

SEQ ID NO: 2582599 - RNA, 19 nt, Human
ggcuuccugcguccuccuc

SEQ ID NO: 2582600 - RNA, 22 nt, Human
ggcuucccaguggcugcugccc

SEQ ID NO: 2582601 - RNA, 21 nt, Human
ggcuucccaguggcugcugcc

SEQ ID NO: 2582602 - RNA, 20 nt, Human
ggcuucccaguggcugcugc

SEQ ID NO: 2582603 - RNA, 19 nt, Human
ggcuucccaguggcugcug

SEQ ID NO: 2582604 - RNA, 21 nt, Human
ggcuuccucuagaagccaagg

SEQ ID NO: 2582605 - RNA, 17 nt, Human
ggcuucccaguggcugc

SEQ ID NO: 2582606 - RNA, 21 nt, Human
ggcuuccagguaucuccagga

SEQ ID NO: 2582607 - RNA, 17 nt, Human
ggcuuccauuugugugu

SEQ ID NO: 2582608 - RNA, 18 nt, Human
ggcuuccauuugugugug

SEQ ID NO: 2582609 - RNA, 22 nt, Human
ggcuuccauuugugugugugca

SEQ ID NO: 2582610 - RNA, 15 nt, Human
ggcuucaugccagcu

SEQ ID NO: 2582611 - RNA, 18 nt, Human
ggcuucaggggagucccg

SEQ ID NO: 2582612 - RNA, 16 nt, Human
ggcuucaguggcagcu

SEQ ID NO: 2582613 - RNA, 19 nt, Human
ggcuuccaagguggucugc

SEQ ID NO: 2582614 - RNA, 14 nt, Human
ggcuuccaaggugg

SEQ ID NO: 2582615 - RNA, 17 nt, Human
ggcuucauucaagucua

SEQ ID NO: 2582616 - RNA, 14 nt, Human
ggcuucauucaagu

SEQ ID NO: 2582617 - RNA, 16 nt, Human
ggcuucaugccagcua

SEQ ID NO: 2582618 - RNA, 18 nt, Human
ggcuucauuagagcaggc

SEQ ID NO: 2582619 - RNA, 12 nt, Human
ggcuuccaggua

SEQ ID NO: 2582620 - RNA, 22 nt, Human
ggcuuccagagaguccucugga

SEQ ID NO: 2582621 - RNA, 20 nt, Human
ggcuuccagagaguccucug

SEQ ID NO: 2582622 - RNA, 14 nt, Human
ggcuuccagagagu

SEQ ID NO: 2582623 - RNA, 13 nt, Human
ggcuuccagagag

SEQ ID NO: 2582624 - RNA, 22 nt, Human
ggcuuccaagguggucugcucg

SEQ ID NO: 2582625 - RNA, 21 nt, Human
ggcuuccagaaaaccccagca

SEQ ID NO: 2582626 - RNA, 13 nt, Human
ggcuucucucuca

SEQ ID NO: 2582627 - RNA, 12 nt, Human
ggcuucucucuc

SEQ ID NO: 2582628 - RNA, 11 nt, Human
ggcuucucucu

SEQ ID NO: 2582629 - RNA, 16 nt, Human
ggcuucuccugaccca

SEQ ID NO: 2582630 - RNA, 15 nt, Human
ggcuucuccugaccc

SEQ ID NO: 2582631 - RNA, 13 nt, Human
ggcuucuccugac

SEQ ID NO: 2582632 - RNA, 12 nt, Human
ggcuucuccuga

SEQ ID NO: 2582633 - RNA, 23 nt, Human
ggcuucuccgccagccuccucug

SEQ ID NO: 2582634 - RNA, 21 nt, Human
ggcuucuccgccagccuccuc

SEQ ID NO: 2582635 - RNA, 18 nt, Human
ggcuucuccgccagccuc

SEQ ID NO: 2582636 - RNA, 17 nt, Human
ggcuucuccgccagccu

SEQ ID NO: 2582637 - RNA, 16 nt, Human
ggcuucuccgccagcc

SEQ ID NO: 2582638 - RNA, 21 nt, Human
ggcuucucauacguccaccau

SEQ ID NO: 2582639 - RNA, 20 nt, Human
ggcuucucauacguccacca

SEQ ID NO: 2582640 - RNA, 17 nt, Human
ggcuuuuuuuuucucuu

SEQ ID NO: 2582641 - RNA, 23 nt, Human
gggaaaaagaggaucuggagaac

SEQ ID NO: 2582642 - RNA, 16 nt, Human
ggcuucucucucacca

SEQ ID NO: 2582643 - RNA, 15 nt, Human
ggcuucucucucacc

SEQ ID NO: 2582644 - RNA, 13 nt, Human
gggaaaaucagcc

SEQ ID NO: 2582645 - RNA, 21 nt, Human
gggaaagacauccauaaagaa

SEQ ID NO: 2582646 - RNA, 14 nt, Human
gggaaacuuggcuc

SEQ ID NO: 2582647 - RNA, 17 nt, Human
gggaaaauuauuugcau

SEQ ID NO: 2582648 - RNA, 18 nt, Human
gggaaaauuauuugcaua

SEQ ID NO: 2582649 - RNA, 23 nt, Human
gggaaaaucagccugcuccagcu

SEQ ID NO: 2582650 - RNA, 16 nt, Human
ggcuuuuuuuuucucu

SEQ ID NO: 2582651 - RNA, 13 nt, Human
gggaaaagcagcu

SEQ ID NO: 2582652 - RNA, 17 nt, Human
gggcagcugggcccaac

SEQ ID NO: 2582653 - RNA, 16 nt, Human
gggcagcugggcccaa

SEQ ID NO: 2582654 - RNA, 14 nt, Human
gggcagcugggccc

SEQ ID NO: 2582655 - RNA, 13 nt, Human
gggcagcugggcc

SEQ ID NO: 2582656 - RNA, 14 nt, Human
gggcagcagggcua

SEQ ID NO: 2582657 - RNA, 20 nt, Human
gggcagcauagcaagacaca

SEQ ID NO: 2582658 - RNA, 13 nt, Human
gggcagccaggcu

SEQ ID NO: 2582659 - RNA, 17 nt, Human
gggcagccaaacccaug

SEQ ID NO: 2582660 - RNA, 14 nt, Human
gggcagccaggcug

SEQ ID NO: 2582661 - RNA, 16 nt, Human
gggcagccaggcugcc

SEQ ID NO: 2582662 - RNA, 14 nt, Human
gggcagcacagcaa

SEQ ID NO: 2582663 - RNA, 13 nt, Human
gggcagcacagca

SEQ ID NO: 2582664 - RNA, 20 nt, Human
gggcagcagaaggggguggu

SEQ ID NO: 2582665 - RNA, 12 nt, Human
gggcagcacagc

SEQ ID NO: 2582666 - RNA, 16 nt, Human
gggcagcacagagagg

SEQ ID NO: 2582667 - RNA, 22 nt, Human
gggcaggacucagcuccccaga

SEQ ID NO: 2582668 - RNA, 18 nt, Human
gggcaggagggcccuacc

SEQ ID NO: 2582669 - RNA, 23 nt, Human
gggcaggacucagcuccccagag

SEQ ID NO: 2582670 - RNA, 19 nt, Human
gggcagcuugccccggccc

SEQ ID NO: 2582671 - RNA, 19 nt, Human
gggcaggaaggagagccug

SEQ ID NO: 2582672 - RNA, 21 nt, Human
gggcaggaaggagagccugcu

SEQ ID NO: 2582673 - RNA, 16 nt, Human
gggcaggaaggagagc

SEQ ID NO: 2582674 - RNA, 18 nt, Human
gggcaggaaggagagccu

SEQ ID NO: 2582675 - RNA, 19 nt, Human
gggcagcugggcccaaccc

SEQ ID NO: 2582676 - RNA, 18 nt, Human
gggcagcugggcccaacc

SEQ ID NO: 2582677 - RNA, 19 nt, Human
gggcagcuguuagagucca

SEQ ID NO: 2582678 - RNA, 16 nt, Human
aaaagggacugagaaa

SEQ ID NO: 2582679 - RNA, 20 nt, Human
aaaaggcuagguacacagcu

SEQ ID NO: 2582680 - RNA, 20 nt, Human
aaaagggaaguugugccuuu

SEQ ID NO: 2582681 - RNA, 19 nt, Human
aaaagggaaguugugccuu

SEQ ID NO: 2582682 - RNA, 14 nt, Human
aaaagggaagucua

SEQ ID NO: 2582683 - RNA, 18 nt, Human
aaaagggaacugaacauu

SEQ ID NO: 2582684 - RNA, 14 nt, Human
gggaggggcaggcu

SEQ ID NO: 2582685 - RNA, 13 nt, Human
gggaggggcaggc

SEQ ID NO: 2582686 - RNA, 12 nt, Human
gggaggggcagg

SEQ ID NO: 2582687 - RNA, 15 nt, Human
gggagggcccacuuc

SEQ ID NO: 2582688 - RNA, 18 nt, Human
gggaggggcgcuggccca

SEQ ID NO: 2582689 - RNA, 16 nt, Human
gggaggggcgcuggcc

SEQ ID NO: 2582690 - RNA, 18 nt, Human
gggaggggcgcccaccuc

SEQ ID NO: 2582691 - RNA, 10 nt, Human
gggaggggcg

SEQ ID NO: 2582692 - RNA, 17 nt, Human
gggaggggcaggcugac

SEQ ID NO: 2582693 - RNA, 16 nt, Human
gggaggggcaggcuga

SEQ ID NO: 2582694 - RNA, 13 nt, Human
gggaggggcccgc

SEQ ID NO: 2582695 - RNA, 14 nt, Human
gggaggggccuagg

SEQ ID NO: 2582696 - RNA, 20 nt, Human
gggaggggcgcuggcccagc

SEQ ID NO: 2582697 - RNA, 19 nt, Human
gggaggggcgcuggcccag

SEQ ID NO: 2582698 - RNA, 21 nt, Human
gggaggggcgcuggcccagcc

SEQ ID NO: 2582699 - RNA, 21 nt, Human
gggauuccugacccaggccgc

SEQ ID NO: 2582700 - RNA, 19 nt, Human
gggauuccugacccaggcc

SEQ ID NO: 2582701 - RNA, 17 nt, Human
gggauuccugacccagg

SEQ ID NO: 2582702 - RNA, 16 nt, Human
gggauuccugacccag

SEQ ID NO: 2582703 - RNA, 14 nt, Human
gggauucaggcugc

SEQ ID NO: 2582704 - RNA, 14 nt, Human
gggauuccugaccc

SEQ ID NO: 2582705 - RNA, 13 nt, Human
gggauuccugacc

SEQ ID NO: 2582706 - RNA, 15 nt, Human
gggauucccaccaag

SEQ ID NO: 2582707 - RNA, 15 nt, Human
gggauucaggcugcu

SEQ ID NO: 2582708 - RNA, 16 nt, Human
gggauucaggcugcuu

SEQ ID NO: 2582709 - RNA, 15 nt, Human
gggcaaacaggcagu

SEQ ID NO: 2582710 - RNA, 12 nt, Human
gggcagagccca

SEQ ID NO: 2582711 - RNA, 14 nt, Human
gggcagagcccaag

SEQ ID NO: 2582712 - RNA, 13 nt, Human
gggcagagccggg

SEQ ID NO: 2582713 - RNA, 14 nt, Human
gggcagagccggga

SEQ ID NO: 2582714 - RNA, 19 nt, Human
gggcagagcuggcucugag

SEQ ID NO: 2582715 - RNA, 16 nt, Human
gggcagauuuucagca

SEQ ID NO: 2582716 - RNA, 17 nt, Human
gggcagagcuggcucug

SEQ ID NO: 2582717 - RNA, 16 nt, Human
gggcagagcuggcucu

SEQ ID NO: 2582718 - RNA, 11 nt, Human
gggcagagcug

SEQ ID NO: 2582719 - RNA, 17 nt, Human
gggcagagccgggaagc

SEQ ID NO: 2582720 - RNA, 21 nt, Human
gggcaaaaaacucgaggacug

SEQ ID NO: 2582721 - RNA, 15 nt, Human
gggauuucucccagc

SEQ ID NO: 2582722 - RNA, 23 nt, Human
gggcagagcagagaccaucccug

SEQ ID NO: 2582723 - RNA, 18 nt, Human
gggcaaaauucccaggga

SEQ ID NO: 2582724 - RNA, 16 nt, Human
gggcaaaacugaauua

SEQ ID NO: 2582725 - RNA, 14 nt, Human
gggcaaacaggcag

SEQ ID NO: 2582726 - RNA, 15 nt, Human
gggauuuccaugaug

SEQ ID NO: 2582727 - RNA, 21 nt, Human
gggauucuacuuuaagcacua

SEQ ID NO: 2582728 - RNA, 19 nt, Human
gggauucugguuccagggu

SEQ ID NO: 2582729 - RNA, 17 nt, Human
gggauuucucccagcuc

SEQ ID NO: 2582730 - RNA, 20 nt, Human
gggauuuccagccagggcug

SEQ ID NO: 2582731 - RNA, 16 nt, Human
aaaauauacuguaaag

SEQ ID NO: 2582732 - RNA, 17 nt, Human
aaaauauacuguaaaga

SEQ ID NO: 2582733 - RNA, 18 nt, Human
aaaauauacuguaaagaa

SEQ ID NO: 2582734 - RNA, 20 nt, Human
aaaauauacuguaaagaaag

SEQ ID NO: 2582735 - RNA, 22 nt, Human
aaaauauacuguaaagaaagag

SEQ ID NO: 2582736 - RNA, 23 nt, Human
aaaauauacuguaaagaaagaga

SEQ ID NO: 2582737 - RNA, 20 nt, Human
aaaauauagcuguacaaaua

SEQ ID NO: 2582738 - RNA, 16 nt, Human
aaaauauagcuguaca

SEQ ID NO: 2582739 - RNA, 12 nt, Human
aaaauauacugu

SEQ ID NO: 2582740 - RNA, 13 nt, Human
aaaauauacugua

SEQ ID NO: 2582741 - RNA, 14 nt, Human
aaaauauacuguaa

SEQ ID NO: 2582742 - RNA, 15 nt, Human
aaaauauacuguaaa

SEQ ID NO: 2582743 - RNA, 11 nt, Human
aaaauauacug

SEQ ID NO: 2582744 - RNA, 24 nt, Human
aaaauauaauuuuuuagagagcug

SEQ ID NO: 2582745 - RNA, 21 nt, Human
aaaauauagcuguacaaauau

SEQ ID NO: 2582746 - RNA, 18 nt, Human
aaaauauauaucaaauau

SEQ ID NO: 2582747 - RNA, 14 nt, Human
aaaauauauuuaau

SEQ ID NO: 2582748 - RNA, 21 nt, Human
aaaauauggaacuucuaauau

SEQ ID NO: 2582749 - RNA, 20 nt, Human
aaaauauggguugcauuugg

SEQ ID NO: 2582750 - RNA, 20 nt, Human
aaaauauggaacuucuaaua

SEQ ID NO: 2582751 - RNA, 20 nt, Human
aaaauaguugagccagcaga

SEQ ID NO: 2582752 - RNA, 18 nt, Human
aaaauaguugagccagca

SEQ ID NO: 2582753 - RNA, 23 nt, Human
aaaauaguuaagacaugauuucc

SEQ ID NO: 2582754 - RNA, 21 nt, Human
aaaauaguugagccagcagac

SEQ ID NO: 2582755 - RNA, 18 nt, Human
aaaauaguggugugauuu

SEQ ID NO: 2582756 - RNA, 17 nt, Human
aaaauauaaaacugcgu

SEQ ID NO: 2582757 - RNA, 14 nt, Human
aaaauauaaaacug

SEQ ID NO: 2582758 - RNA, 10 nt, Human
aaaauauaaa

SEQ ID NO: 2582759 - RNA, 22 nt, Human
aaaauauaaaacugcguuaaag

SEQ ID NO: 2582760 - RNA, 13 nt, Human
aaaauauaaaaua

SEQ ID NO: 2582761 - RNA, 10 nt, Human
aaaauauaac

SEQ ID NO: 2582762 - RNA, 12 nt, Human
aaaauagccugc

SEQ ID NO: 2582763 - RNA, 23 nt, Human
aaaauagcaaccuuuuuaucucc

SEQ ID NO: 2582764 - RNA, 17 nt, Human
aaaauagcaauccuaaa

SEQ ID NO: 2582765 - RNA, 10 nt, Human
aaaauagcca

SEQ ID NO: 2582766 - RNA, 19 nt, Human
aaaauagcuuguauagugu

SEQ ID NO: 2582767 - RNA, 13 nt, Human
aaaauagcuugua

SEQ ID NO: 2582768 - RNA, 21 nt, Human
aaaauagcuuguauaguguaa

SEQ ID NO: 2582769 - RNA, 12 nt, Human
aaaauagcuugu

SEQ ID NO: 2582770 - RNA, 19 nt, Human
aaaauaguaaaugcuuugu

SEQ ID NO: 2582771 - RNA, 18 nt, Human
aaaauaguaaaugcuuug

SEQ ID NO: 2582772 - RNA, 18 nt, Human
aaaauagguauacagugg

SEQ ID NO: 2582773 - RNA, 17 nt, Human
aaaaguacauuuaauac

SEQ ID NO: 2582774 - RNA, 13 nt, Human
aaaaguacauuua

SEQ ID NO: 2582775 - RNA, 21 nt, Human
aaaaguacauuuaauacagca

SEQ ID NO: 2582776 - RNA, 15 nt, Human
aaaaguacaauuuac

SEQ ID NO: 2582777 - RNA, 23 nt, Human
aaaaguaaguaccacucaggcca

SEQ ID NO: 2582778 - RNA, 17 nt, Human
aaaagguuuuauuuugu

SEQ ID NO: 2582779 - RNA, 16 nt, Human
aaaagguuuuauuuug

SEQ ID NO: 2582780 - RNA, 15 nt, Human
aaaagguuuuauuuu

SEQ ID NO: 2582781 - RNA, 11 nt, Human
aaaaguaaaca

SEQ ID NO: 2582782 - RNA, 19 nt, Human
aaaagguuuuauuuuguaa

SEQ ID NO: 2582783 - RNA, 23 nt, Human
aaaagguuuuauuuuguaauuau

SEQ ID NO: 2582784 - RNA, 22 nt, Human
aaaaguaaguaccacucaggcc

SEQ ID NO: 2582785 - RNA, 12 nt, Human
aaaaguaacuug

SEQ ID NO: 2582786 - RNA, 12 nt, Human
aaaauaaauuau

SEQ ID NO: 2582787 - RNA, 14 nt, Human
aaaauaacacacau

SEQ ID NO: 2582788 - RNA, 20 nt, Human
aaaauaauuuuuauauuuga

SEQ ID NO: 2582789 - RNA, 12 nt, Human
aaaauaaauaaa

SEQ ID NO: 2582790 - RNA, 11 nt, Human
aaaauaaauau

SEQ ID NO: 2582791 - RNA, 14 nt, Human
aaaauaaauauaua

SEQ ID NO: 2582792 - RNA, 12 nt, Human
aaaauaaauaua

SEQ ID NO: 2582793 - RNA, 15 nt, Human
aaaauaaauauauau

SEQ ID NO: 2582794 - RNA, 14 nt, Human
aaaauaccaaggaa

SEQ ID NO: 2582795 - RNA, 15 nt, Human
aaaauaccagccagu

SEQ ID NO: 2582796 - RNA, 22 nt, Human
aaaauagauaagaguagaaacu

SEQ ID NO: 2582797 - RNA, 22 nt, Human
aaaauacuauuuuuacugccac

SEQ ID NO: 2582798 - RNA, 21 nt, Human
aaaauagcaacacucuauauu

SEQ ID NO: 2582799 - RNA, 22 nt, Human
aaaauagcaacacucuauauuu

SEQ ID NO: 2582800 - RNA, 15 nt, Human
aaaauacuauucuga

SEQ ID NO: 2582801 - RNA, 23 nt, Human
aaaauaauuuuuauauuugaaau

SEQ ID NO: 2582802 - RNA, 21 nt, Human
aaaauaauuuuuauauuugaa

SEQ ID NO: 2582803 - RNA, 14 nt, Human
aaaauaccagccag

SEQ ID NO: 2582804 - RNA, 14 nt, Human
aaaauacaaaauua

SEQ ID NO: 2582805 - RNA, 22 nt, Human
aaaacugauuuuuuuuuccuuc

SEQ ID NO: 2582806 - RNA, 18 nt, Human
aaaacugauuuuuuuuuc

SEQ ID NO: 2582807 - RNA, 19 nt, Human
aaaacugcucauaugaugu

SEQ ID NO: 2582808 - RNA, 19 nt, Human
aaaacugcguuaaaggcuc

SEQ ID NO: 2582809 - RNA, 21 nt, Human
aaaacguggcugcuucaagga

SEQ ID NO: 2582810 - RNA, 19 nt, Human
aaaaccaagccguggcuuc

SEQ ID NO: 2582811 - RNA, 15 nt, Human
aaaacguuuuauugu

SEQ ID NO: 2582812 - RNA, 16 nt, Human
aaaacguuuuauugug

SEQ ID NO: 2582813 - RNA, 17 nt, Human
aaaacguuuuauugugu

SEQ ID NO: 2582814 - RNA, 19 nt, Human
aaaacguuuuauuguguuu

SEQ ID NO: 2582815 - RNA, 19 nt, Human
aaaacuaaaucucuaauau

SEQ ID NO: 2582816 - RNA, 18 nt, Human
aaaacuaaaucucuaaua

SEQ ID NO: 2582817 - RNA, 22 nt, Human
aaaacuaaauagcauguauugu

SEQ ID NO: 2582818 - RNA, 19 nt, Human
aaaacuaaauagcauguau

SEQ ID NO: 2582819 - RNA, 18 nt, Human
aaaacuaaauagcaugua

SEQ ID NO: 2582820 - RNA, 21 nt, Human
aaaacuacaaaucaaguauuu

SEQ ID NO: 2582821 - RNA, 18 nt, Human
aaaacguggcugcuucaa

SEQ ID NO: 2582822 - RNA, 17 nt, Human
aaaacguggcugcuuca

SEQ ID NO: 2582823 - RNA, 16 nt, Human
aaaacguggcugcuuc

SEQ ID NO: 2582824 - RNA, 14 nt, Human
aaaacguggcugcu

SEQ ID NO: 2582825 - RNA, 19 nt, Human
aaaacauuuuaaauggaca

SEQ ID NO: 2582826 - RNA, 22 nt, Human
aaaaccaaagagggcuuccucu

SEQ ID NO: 2582827 - RNA, 13 nt, Human
aaaaccaaagagg

SEQ ID NO: 2582828 - RNA, 14 nt, Human
aaaaccaagaagau

SEQ ID NO: 2582829 - RNA, 15 nt, Human
aaaaccaauguucuc

SEQ ID NO: 2582830 - RNA, 22 nt, Human
aaaaauguuggauuuauaaaug

SEQ ID NO: 2582831 - RNA, 13 nt, Human
aaaaauuagcuga

SEQ ID NO: 2582832 - RNA, 17 nt, Human
aaaacauuuuaaaugga

SEQ ID NO: 2582833 - RNA, 16 nt, Human
aaaacauuuuaaaugg

SEQ ID NO: 2582834 - RNA, 21 nt, Human
aaaacauuuuuuaauagaaua

SEQ ID NO: 2582835 - RNA, 19 nt, Human
aaaacauuuucacacaaua

SEQ ID NO: 2582836 - RNA, 19 nt, Human
aaaaaucucaaauuucuaa

SEQ ID NO: 2582837 - RNA, 20 nt, Human
aaaaaucucaaauuucuaaa

SEQ ID NO: 2582838 - RNA, 22 nt, Human
gggaacagacuggaagcacagc

SEQ ID NO: 2582839 - RNA, 17 nt, Human
aaaaaucucaaauuucu

SEQ ID NO: 2582840 - RNA, 14 nt, Human
gggaacagacagga

SEQ ID NO: 2582841 - RNA, 15 nt, Human
gggaacagacaggag

SEQ ID NO: 2582842 - RNA, 16 nt, Human
gggaacagacaggaga

SEQ ID NO: 2582843 - RNA, 22 nt, Human
gggaaagccagugacuccagga

SEQ ID NO: 2582844 - RNA, 19 nt, Human
gggaaagccagugacucca

SEQ ID NO: 2582845 - RNA, 15 nt, Human
gggaaagccaccucu

SEQ ID NO: 2582846 - RNA, 15 nt, Human
gggaaaggauauuuu

SEQ ID NO: 2582847 - RNA, 22 nt, Human
gggaaaggcucugaaagccagc

SEQ ID NO: 2582848 - RNA, 13 nt, Human
gggaaaggggugc

SEQ ID NO: 2582849 - RNA, 17 nt, Human
gggaaauacuacuccug

SEQ ID NO: 2582850 - RNA, 14 nt, Human
gggaaauaagagag

SEQ ID NO: 2582851 - RNA, 14 nt, Human
gggaaauggugccu

SEQ ID NO: 2582852 - RNA, 19 nt, Human
gggaacaaggguggcaucc

SEQ ID NO: 2582853 - RNA, 19 nt, Human
gggaacagacaacagaagu

SEQ ID NO: 2582854 - RNA, 14 nt, Human
gggaacagacugga

SEQ ID NO: 2582855 - RNA, 20 nt, Human
aaaaauguuggauuuauaaa

SEQ ID NO: 2582856 - RNA, 16 nt, Human
aaaaauguuggauuua

SEQ ID NO: 2582857 - RNA, 12 nt, Human
aaaaauuaaaau

SEQ ID NO: 2582858 - RNA, 20 nt, Human
aaaaauguuaaaauguauuc

SEQ ID NO: 2582859 - RNA, 12 nt, Human
aaaaauguguaa

SEQ ID NO: 2582860 - RNA, 18 nt, Human
aaaaaugugcaaaacagc

SEQ ID NO: 2582861 - RNA, 13 nt, Human
aaaaaugccuuug

SEQ ID NO: 2582862 - RNA, 12 nt, Human
aaaaaugccuuu

SEQ ID NO: 2582863 - RNA, 22 nt, Human
aaaaaugucuuggguaggcggg

SEQ ID NO: 2582864 - RNA, 21 nt, Human
aaaaaugcacguagcugaggc

SEQ ID NO: 2582865 - RNA, 22 nt, Human
aaaaaugcaaauccuaugugau

SEQ ID NO: 2582866 - RNA, 23 nt, Human
aaaaaugcaaauccuaugugauu

SEQ ID NO: 2582867 - RNA, 18 nt, Human
aaaaaugcccuuaaauca

SEQ ID NO: 2582868 - RNA, 12 nt, Human
aaaaaugaaagc

SEQ ID NO: 2582869 - RNA, 14 nt, Human
aaaaaugaaauuau

SEQ ID NO: 2582870 - RNA, 17 nt, Human
aaaaaugacagauguug

SEQ ID NO: 2582871 - RNA, 20 nt, Human
aaaaaugacuaaaaauauua

SEQ ID NO: 2582872 - RNA, 20 nt, Human
aaaaaugcaaauccuaugug

SEQ ID NO: 2582873 - RNA, 18 nt, Human
aaaaaugcaaauccuaug

SEQ ID NO: 2582874 - RNA, 15 nt, Human
aaaaaugauguucau

SEQ ID NO: 2582875 - RNA, 22 nt, Human
aaaaaucugaccaaaacaaaca

SEQ ID NO: 2582876 - RNA, 18 nt, Human
gggaacagacaggagaaa

SEQ ID NO: 2582877 - RNA, 18 nt, Human
aaaaaucugcagaaggaa

SEQ ID NO: 2582878 - RNA, 20 nt, Human
aaaaaucugcagaaggaaaa

SEQ ID NO: 2582879 - RNA, 18 nt, Human
aaaagccuguuuaagaga

SEQ ID NO: 2582880 - RNA, 16 nt, Human
aaaagccuguuuaaga

SEQ ID NO: 2582881 - RNA, 19 nt, Human
aaaagccugcaauuucaua

SEQ ID NO: 2582882 - RNA, 20 nt, Human
aaaacuuuacuaagaugaca

SEQ ID NO: 2582883 - RNA, 21 nt, Human
aaaacuuuaugcuaagugaaa

SEQ ID NO: 2582884 - RNA, 22 nt, Human
aaaacuugauguguuaucucuu

SEQ ID NO: 2582885 - RNA, 14 nt, Human
aaaagccucugugu

SEQ ID NO: 2582886 - RNA, 16 nt, Human
aaaacuuuccucgccu

SEQ ID NO: 2582887 - RNA, 14 nt, Human
aaaacuuuccucgc

SEQ ID NO: 2582888 - RNA, 19 nt, Human
aaaacuuuacuaagaugac

SEQ ID NO: 2582889 - RNA, 17 nt, Human
aaaacuuguaaaugcug

SEQ ID NO: 2582890 - RNA, 14 nt, Human
aaaagcugggcagg

SEQ ID NO: 2582891 - RNA, 14 nt, Human
aaaagcuuccauga

SEQ ID NO: 2582892 - RNA, 23 nt, Human
gggacugccagucccccugcccc

SEQ ID NO: 2582893 - RNA, 12 nt, Human
aaaagcuccugu

SEQ ID NO: 2582894 - RNA, 18 nt, Human
aaaagcucauauuuugua

SEQ ID NO: 2582895 - RNA, 20 nt, Human
aaaagcucuuacacuacauu

SEQ ID NO: 2582896 - RNA, 13 nt, Human
aaaagcuccuguc

SEQ ID NO: 2582897 - RNA, 10 nt, Human
aaaagcugau

SEQ ID NO: 2582898 - RNA, 13 nt, Human
aaaagcugcucag

SEQ ID NO: 2582899 - RNA, 22 nt, Human
aaaagcuccauuuuuagugaaa

SEQ ID NO: 2582900 - RNA, 21 nt, Human
aaaagcuauuagccaggauca

SEQ ID NO: 2582901 - RNA, 20 nt, Human
aaaagcuauuagccaggauc

SEQ ID NO: 2582902 - RNA, 14 nt, Human
aaaagcucauauuu

SEQ ID NO: 2582903 - RNA, 17 nt, Human
aaaagcuauuagccagg

SEQ ID NO: 2582904 - RNA, 15 nt, Human
aaaagcuauuagcca

SEQ ID NO: 2582905 - RNA, 20 nt, Human
aaaagcuauggugagaugca

SEQ ID NO: 2582906 - RNA, 13 nt, Human
gggagggcuccag

SEQ ID NO: 2582907 - RNA, 11 nt, Human
gggagggcucc

SEQ ID NO: 2582908 - RNA, 22 nt, Human
gggagggcggcaggggccugga

SEQ ID NO: 2582909 - RNA, 21 nt, Human
gggagggcggcaggggccugg

SEQ ID NO: 2582910 - RNA, 13 nt, Human
gggagggccuggg

SEQ ID NO: 2582911 - RNA, 11 nt, Human
gggagggcagc

SEQ ID NO: 2582912 - RNA, 13 nt, Human
gggagggcagcag

SEQ ID NO: 2582913 - RNA, 13 nt, Human
gggaggccaagga

SEQ ID NO: 2582914 - RNA, 17 nt, Human
gggaggcauggcccugg

SEQ ID NO: 2582915 - RNA, 14 nt, Human
gggagagccagcuc

SEQ ID NO: 2582916 - RNA, 15 nt, Human
gggagagccagcucc

SEQ ID NO: 2582917 - RNA, 12 nt, Human
gggagagcccag

SEQ ID NO: 2582918 - RNA, 16 nt, Human
gggaggcauggcccug

SEQ ID NO: 2582919 - RNA, 13 nt, Human
gggaggcagccgg

SEQ ID NO: 2582920 - RNA, 20 nt, Human
gggaggcagagguugcagug

SEQ ID NO: 2582921 - RNA, 14 nt, Human
gggagacugggcug

SEQ ID NO: 2582922 - RNA, 16 nt, Human
gggagacugggcugag

SEQ ID NO: 2582923 - RNA, 19 nt, Human
gggagacugggcugaggga

SEQ ID NO: 2582924 - RNA, 20 nt, Human
gggagacugggcugagggag

SEQ ID NO: 2582925 - RNA, 22 nt, Human
gggagagaccucaucaggauga

SEQ ID NO: 2582926 - RNA, 12 nt, Human
gggagagaccuc

SEQ ID NO: 2582927 - RNA, 13 nt, Human
gggagagacccuu

SEQ ID NO: 2582928 - RNA, 22 nt, Human
gggagagagagagagagaggac

SEQ ID NO: 2582929 - RNA, 14 nt, Human
gggagagagagaga

SEQ ID NO: 2582930 - RNA, 18 nt, Human
gggagagagacguguaca

SEQ ID NO: 2582931 - RNA, 12 nt, Human
gggagagagaga

SEQ ID NO: 2582932 - RNA, 11 nt, Human
gggaggcagag

SEQ ID NO: 2582933 - RNA, 14 nt, Human
gggagagcaggcug

SEQ ID NO: 2582934 - RNA, 13 nt, Human
gggagagcaggcu

SEQ ID NO: 2582935 - RNA, 12 nt, Human
gggagagcaggc

SEQ ID NO: 2582936 - RNA, 23 nt, Human
gggagagagagagagagaggaca

SEQ ID NO: 2582937 - RNA, 16 nt, Human
gggagagcaggcuggc

SEQ ID NO: 2582938 - RNA, 15 nt, Human
gggagagcaggcugg

SEQ ID NO: 2582939 - RNA, 23 nt, Human
gggagagcaggcuggcagcucuc

SEQ ID NO: 2582940 - RNA, 12 nt, Human
gggagagccagc

SEQ ID NO: 2582941 - RNA, 16 nt, Human
gggacugcuaaauaaa

SEQ ID NO: 2582942 - RNA, 20 nt, Human
gggacugggagccgcagcag

SEQ ID NO: 2582943 - RNA, 19 nt, Human
gggacuggaaccagggaga

SEQ ID NO: 2582944 - RNA, 15 nt, Human
gggacugcuaaauaa

SEQ ID NO: 2582945 - RNA, 13 nt, Human
gggacugggaggg

SEQ ID NO: 2582946 - RNA, 14 nt, Human
gggacugggagggc

SEQ ID NO: 2582947 - RNA, 15 nt, Human
gggacugggagggcc

SEQ ID NO: 2582948 - RNA, 17 nt, Human
gggacugggagggccca

SEQ ID NO: 2582949 - RNA, 21 nt, Human
gggacuggguuuggaccccag

SEQ ID NO: 2582950 - RNA, 20 nt, Human
gggacuggguuuggacccca

SEQ ID NO: 2582951 - RNA, 12 nt, Human
gggacuggguuu

SEQ ID NO: 2582952 - RNA, 20 nt, Human
gggacuggggaugugggagg

SEQ ID NO: 2582953 - RNA, 21 nt, Human
gggacugucuuucagauacau

SEQ ID NO: 2582954 - RNA, 20 nt, Human
gggacuuccuugcucucccu

SEQ ID NO: 2582955 - RNA, 19 nt, Human
gggacuuccuugcucuccc

SEQ ID NO: 2582956 - RNA, 15 nt, Human
gggacuuccuugcuc

SEQ ID NO: 2582957 - RNA, 12 nt, Human
gggacugugugu

SEQ ID NO: 2582958 - RNA, 13 nt, Human
gggacuugaaguu

SEQ ID NO: 2582959 - RNA, 14 nt, Human
gggacuucuuuuca

SEQ ID NO: 2582960 - RNA, 16 nt, Human
aaacuggauuaaacuu

SEQ ID NO: 2582961 - RNA, 13 nt, Human
aaacugcccccuc

SEQ ID NO: 2582962 - RNA, 17 nt, Human
aaacugcccccucugcc

SEQ ID NO: 2582963 - RNA, 19 nt, Human
aaacugcccccucugcccu

SEQ ID NO: 2582964 - RNA, 20 nt, Human
aaacugcccccucugcccug

SEQ ID NO: 2582965 - RNA, 17 nt, Human
aaacuggggccuccaga

SEQ ID NO: 2582966 - RNA, 18 nt, Human
aaacuggggccuccagaa

SEQ ID NO: 2582967 - RNA, 14 nt, Human
aaacuggcuuuggc

SEQ ID NO: 2582968 - RNA, 13 nt, Human
aaacuggcuuugg

SEQ ID NO: 2582969 - RNA, 20 nt, Human
aaacuggcaaacuucagacu

SEQ ID NO: 2582970 - RNA, 15 nt, Human
aaacuggguuccugc

SEQ ID NO: 2582971 - RNA, 20 nt, Human
aaacuggggccuccagaacu

SEQ ID NO: 2582972 - RNA, 16 nt, Human
aaacuggguuccugca

SEQ ID NO: 2582973 - RNA, 16 nt, Human
aaacugguauuuuauc

SEQ ID NO: 2582974 - RNA, 16 nt, Human
aaacuggggccucccu

SEQ ID NO: 2582975 - RNA, 22 nt, Human
aaacugguauuuuaucuuugau

SEQ ID NO: 2582976 - RNA, 22 nt, Human
aaacugguuuguugcagccaaa

SEQ ID NO: 2582977 - RNA, 22 nt, Human
aaacuagcauaucugccuuuau

SEQ ID NO: 2582978 - RNA, 21 nt, Human
aaacuagcauaucugccuuua

SEQ ID NO: 2582979 - RNA, 20 nt, Human
aaacuagcauaucugccuuu

SEQ ID NO: 2582980 - RNA, 19 nt, Human
aaacuagcauaucugccuu

SEQ ID NO: 2582981 - RNA, 15 nt, Human
aaacuagcucgugau

SEQ ID NO: 2582982 - RNA, 14 nt, Human
aaacuagcauaucu

SEQ ID NO: 2582983 - RNA, 18 nt, Human
aaacuccacaucugccuu

SEQ ID NO: 2582984 - RNA, 17 nt, Human
aaacuccacaucugccu

SEQ ID NO: 2582985 - RNA, 19 nt, Human
aaacuccacaucugccuua

SEQ ID NO: 2582986 - RNA, 23 nt, Human
aaacuagcucgugauuggcauau

SEQ ID NO: 2582987 - RNA, 22 nt, Human
aaacucauuuccuauguaacug

SEQ ID NO: 2582988 - RNA, 16 nt, Human
aaacuccacaucugcc

SEQ ID NO: 2582989 - RNA, 23 nt, Human
aaacucccacuugucaugugaca

SEQ ID NO: 2582990 - RNA, 19 nt, Human
aaacuccgucuuagaagug

SEQ ID NO: 2582991 - RNA, 12 nt, Human
aaacugcccccu

SEQ ID NO: 2582992 - RNA, 11 nt, Human
aaacugccccc

SEQ ID NO: 2582993 - RNA, 22 nt, Human
aaacuccugccccuguucucuu

SEQ ID NO: 2582994 - RNA, 14 nt, Human
aaacuccugccccu

SEQ ID NO: 2582995 - RNA, 11 nt, Human
aaacuccugac

SEQ ID NO: 2582996 - RNA, 16 nt, Human
aaacguggcugcuuca

SEQ ID NO: 2582997 - RNA, 12 nt, Human
aaacgugaaaau

SEQ ID NO: 2582998 - RNA, 17 nt, Human
aaacguggcugcuucaa

SEQ ID NO: 2582999 - RNA, 20 nt, Human
aaacguggcugcuucaagga

SEQ ID NO: 2583000 - RNA, 15 nt, Human
aaacuaaauuguaaa

SEQ ID NO: 2583001 - RNA, 13 nt, Human
aaacuaaauugua

SEQ ID NO: 2583002 - RNA, 18 nt, Human
aaacgucuuauuguggua

SEQ ID NO: 2583003 - RNA, 11 nt, Human
aaacuaaucca

SEQ ID NO: 2583004 - RNA, 16 nt, Human
aaacuaauauuuuaug

SEQ ID NO: 2583005 - RNA, 20 nt, Human
aaacuaacagauaagcaaga

SEQ ID NO: 2583006 - RNA, 20 nt, Human
aaacuaaauuguaaacuccu

SEQ ID NO: 2583007 - RNA, 15 nt, Human
aaacuaacagauaag

SEQ ID NO: 2583008 - RNA, 18 nt, Human
aaacuaaggcccucuuga

SEQ ID NO: 2583009 - RNA, 20 nt, Human
aaacuaccuaacauuauuua

SEQ ID NO: 2583010 - RNA, 22 nt, Human
aaacuacacaucccuaaugugu

SEQ ID NO: 2583011 - RNA, 16 nt, Human
aaaccacagcaguuga

SEQ ID NO: 2583012 - RNA, 15 nt, Human
aaaccacagcaguug

SEQ ID NO: 2583013 - RNA, 21 nt, Human
aaaccacauuggagauguuua

SEQ ID NO: 2583014 - RNA, 14 nt, Human
aaaccaccagaagc

SEQ ID NO: 2583015 - RNA, 14 nt, Human
aaaccacagcugcu

SEQ ID NO: 2583016 - RNA, 18 nt, Human
aaaccacagcccugucag

SEQ ID NO: 2583017 - RNA, 15 nt, Human
aaaccaagcaaagga

SEQ ID NO: 2583018 - RNA, 15 nt, Human
aaaccacagcccugu

SEQ ID NO: 2583019 - RNA, 16 nt, Human
aaaccacagcccuguc

SEQ ID NO: 2583020 - RNA, 17 nt, Human
aaaccacagcccuguca

SEQ ID NO: 2583021 - RNA, 13 nt, Human
aaacggcccucuu

SEQ ID NO: 2583022 - RNA, 23 nt, Human
aaacggauuauuuuuucagaccg

SEQ ID NO: 2583023 - RNA, 22 nt, Human
aaacggauuauuuuuucagacc

SEQ ID NO: 2583024 - RNA, 21 nt, Human
aaacggauuauuuuuucagac

SEQ ID NO: 2583025 - RNA, 23 nt, Human
aaacggccucacuaggcuucugg

SEQ ID NO: 2583026 - RNA, 20 nt, Human
aaacggauuauuuuuucaga

SEQ ID NO: 2583027 - RNA, 18 nt, Human
aaacggauuauuuuuuca

SEQ ID NO: 2583028 - RNA, 16 nt, Human
aaacggauuauuuuuu

SEQ ID NO: 2583029 - RNA, 14 nt, Human
aaacggauuauuuu

SEQ ID NO: 2583030 - RNA, 12 nt, Human
aaacggauuauu

SEQ ID NO: 2583031 - RNA, 23 nt, Human
aaacggauuagggcauuugagaa

SEQ ID NO: 2583032 - RNA, 14 nt, Human
aaacgcugccugcc

SEQ ID NO: 2583033 - RNA, 16 nt, Human
aaacgcugccugccca

SEQ ID NO: 2583034 - RNA, 12 nt, Human
aaacgcugccug

SEQ ID NO: 2583035 - RNA, 20 nt, Human
ggguaucaggugcugccauc

SEQ ID NO: 2583036 - RNA, 16 nt, Human
ggguaggcgggaagga

SEQ ID NO: 2583037 - RNA, 23 nt, Human
ggggucuguguguuuaugugugu

SEQ ID NO: 2583038 - RNA, 15 nt, Human
ggggucuguaaaauc

SEQ ID NO: 2583039 - RNA, 23 nt, Human
ggguagcuguaaggcaugaagga

SEQ ID NO: 2583040 - RNA, 12 nt, Human
ggguaggcggga

SEQ ID NO: 2583041 - RNA, 18 nt, Human
ggguaggaggaugggcuc

SEQ ID NO: 2583042 - RNA, 21 nt, Human
gggucaggccacggcagccua

SEQ ID NO: 2583043 - RNA, 17 nt, Human
gggucaggccacggcag

SEQ ID NO: 2583044 - RNA, 14 nt, Human
gggucaggagaggg

SEQ ID NO: 2583045 - RNA, 15 nt, Human
gggucaggccacggc

SEQ ID NO: 2583046 - RNA, 17 nt, Human
gggucagccagggccag

SEQ ID NO: 2583047 - RNA, 13 nt, Human
gggucagccaggg

SEQ ID NO: 2583048 - RNA, 12 nt, Human
gggucagccagg

SEQ ID NO: 2583049 - RNA, 13 nt, Human
gggucaggaagga

SEQ ID NO: 2583050 - RNA, 19 nt, Human
gggucagccagggccaggg

SEQ ID NO: 2583051 - RNA, 23 nt, Human
ggguauaaaacuuuccucgccug

SEQ ID NO: 2583052 - RNA, 13 nt, Human
ggguauauucauu

SEQ ID NO: 2583053 - RNA, 19 nt, Human
gggucagacgccugaggaa

SEQ ID NO: 2583054 - RNA, 17 nt, Human
ggggcgaggcagaggac

SEQ ID NO: 2583055 - RNA, 21 nt, Human
ggggccuugcgguauccgccc

SEQ ID NO: 2583056 - RNA, 12 nt, Human
ggggcccugguc

SEQ ID NO: 2583057 - RNA, 22 nt, Human
ggggccuggcgggaugggccac

SEQ ID NO: 2583058 - RNA, 23 nt, Human
ggggucugggaggaauggacaga

SEQ ID NO: 2583059 - RNA, 20 nt, Human
ggggucuggaguugaucugg

SEQ ID NO: 2583060 - RNA, 21 nt, Human
ggggucuggaguugaucugga

SEQ ID NO: 2583061 - RNA, 22 nt, Human
ggggucucccucuccugccuac

SEQ ID NO: 2583062 - RNA, 15 nt, Human
ggggucuccaggagg

SEQ ID NO: 2583063 - RNA, 19 nt, Human
ggggucucccucuccugcc

SEQ ID NO: 2583064 - RNA, 20 nt, Human
ggggucucccucuccugccu

SEQ ID NO: 2583065 - RNA, 19 nt, Human
ggggcgcccaccuccccac

SEQ ID NO: 2583066 - RNA, 22 nt, Human
gggguccuucaaguuagcucag

SEQ ID NO: 2583067 - RNA, 22 nt, Human
ggggcgccgcaaaccacacugg

SEQ ID NO: 2583068 - RNA, 14 nt, Human
ggggcgcccaccuc

SEQ ID NO: 2583069 - RNA, 13 nt, Human
ggggcgaggcaga

SEQ ID NO: 2583070 - RNA, 21 nt, Human
ggggcgaucgcggcggagcug

SEQ ID NO: 2583071 - RNA, 23 nt, Human
aaacauguuucuuuguaaugaaa

SEQ ID NO: 2583072 - RNA, 22 nt, Human
aaacauguuucuuuguaaugaa

SEQ ID NO: 2583073 - RNA, 19 nt, Human
aaacauguuucuuuguaau

SEQ ID NO: 2583074 - RNA, 12 nt, Human
aaacauguuucc

SEQ ID NO: 2583075 - RNA, 23 nt, Human
gggucucacuauguugcccaggc

SEQ ID NO: 2583076 - RNA, 12 nt, Human
gggucucacucu

SEQ ID NO: 2583077 - RNA, 14 nt, Human
gggucuagggagag

SEQ ID NO: 2583078 - RNA, 19 nt, Human
gggucaggaaggaugagca

SEQ ID NO: 2583079 - RNA, 20 nt, Human
gggucgucaccaccucuccu

SEQ ID NO: 2583080 - RNA, 22 nt, Human
gggucucacuauguugcccagg

SEQ ID NO: 2583081 - RNA, 15 nt, Human
aaaccaaaaacugaa

SEQ ID NO: 2583082 - RNA, 14 nt, Human
aaaccaaagaagaa

SEQ ID NO: 2583083 - RNA, 20 nt, Human
aaaccaaagagggcuuccuc

SEQ ID NO: 2583084 - RNA, 19 nt, Human
aaaccaaagagggcuuccu

SEQ ID NO: 2583085 - RNA, 17 nt, Human
aaaccaaagagggcuuc

SEQ ID NO: 2583086 - RNA, 15 nt, Human
aaaccaaagaagaaa

SEQ ID NO: 2583087 - RNA, 21 nt, Human
aaaccaaagagggcuuccucu

SEQ ID NO: 2583088 - RNA, 14 nt, Human
aaaccaagccgugg

SEQ ID NO: 2583089 - RNA, 18 nt, Human
aaaccaaaucacugaacu

SEQ ID NO: 2583090 - RNA, 12 nt, Human
aaaccaagaaga

SEQ ID NO: 2583091 - RNA, 17 nt, Human
aaacauugguucuugua

SEQ ID NO: 2583092 - RNA, 20 nt, Human
aaacauugaaguaaugaauu

SEQ ID NO: 2583093 - RNA, 18 nt, Human
aaacauugguucuuguau

SEQ ID NO: 2583094 - RNA, 20 nt, Human
aaacauugguucuuguauua

SEQ ID NO: 2583095 - RNA, 21 nt, Human
aaacauugguucuuguauuaa

SEQ ID NO: 2583096 - RNA, 23 nt, Human
aaacauuuaacuuguuuccaaug

SEQ ID NO: 2583097 - RNA, 17 nt, Human
aaacaaggaugaauuaa

SEQ ID NO: 2583098 - RNA, 19 nt, Human
aaacaacuucaauauccaa

SEQ ID NO: 2583099 - RNA, 17 nt, Human
aaacaacucuuugagaa

SEQ ID NO: 2583100 - RNA, 15 nt, Human
aaacaaaauuucuau

SEQ ID NO: 2583101 - RNA, 14 nt, Human
aaacaaaauuucua

SEQ ID NO: 2583102 - RNA, 13 nt, Human
aaacaaagaaauu

SEQ ID NO: 2583103 - RNA, 11 nt, Human
aaacaaagaag

SEQ ID NO: 2583104 - RNA, 20 nt, Human
aaacaaaauuuguuugaaau

SEQ ID NO: 2583105 - RNA, 12 nt, Human
aaacaaagccag

SEQ ID NO: 2583106 - RNA, 22 nt, Human
aaacaacaauuucuacuuugaa

SEQ ID NO: 2583107 - RNA, 16 nt, Human
aaaauuuuuaaucuuu

SEQ ID NO: 2583108 - RNA, 15 nt, Human
aaaauuuuuaaucuu

SEQ ID NO: 2583109 - RNA, 20 nt, Human
aaaauuguuaauuuuuccua

SEQ ID NO: 2583110 - RNA, 21 nt, Human
aaaauuguuuugagcuuucca

SEQ ID NO: 2583111 - RNA, 16 nt, Human
aaaauuguauagagau

SEQ ID NO: 2583112 - RNA, 15 nt, Human
aaaauuguauagaga

SEQ ID NO: 2583113 - RNA, 13 nt, Human
aaaauuguauaga

SEQ ID NO: 2583114 - RNA, 15 nt, Human
aaaauuguaaaauug

SEQ ID NO: 2583115 - RNA, 17 nt, Human
aaaauguauaugcacuu

SEQ ID NO: 2583116 - RNA, 16 nt, Human
aaaauugguuggagaa

SEQ ID NO: 2583117 - RNA, 17 nt, Human
aaaauugguuggagaau

SEQ ID NO: 2583118 - RNA, 21 nt, Human
aaaauuguauguuaaguuacu

SEQ ID NO: 2583119 - RNA, 21 nt, Human
aaaauuguauagagauaugca

SEQ ID NO: 2583120 - RNA, 13 nt, Human
aaaauugugauca

SEQ ID NO: 2583121 - RNA, 16 nt, Human
aaaauugugauguguc

SEQ ID NO: 2583122 - RNA, 19 nt, Human
aaaauuuuuucucuaggaa

SEQ ID NO: 2583123 - RNA, 19 nt, Human
aaaauuuuuaaucuuuaau

SEQ ID NO: 2583124 - RNA, 12 nt, Human
aaacaaaauaga

SEQ ID NO: 2583125 - RNA, 22 nt, Human
aaaauuuaaaggguguacuuau

SEQ ID NO: 2583126 - RNA, 18 nt, Human
aaaauguacugagauuuu

SEQ ID NO: 2583127 - RNA, 10 nt, Human
aaaauguacu

SEQ ID NO: 2583128 - RNA, 21 nt, Human
aaaauguaggguuauaauaau

SEQ ID NO: 2583129 - RNA, 21 nt, Human
aaaauguaggcuuaguuugug

SEQ ID NO: 2583130 - RNA, 14 nt, Human
aaaauguauaugca

SEQ ID NO: 2583131 - RNA, 21 nt, Human
aaaauggacguguuaugacuc

SEQ ID NO: 2583132 - RNA, 22 nt, Human
aaaauggaggccauugugugag

SEQ ID NO: 2583133 - RNA, 21 nt, Human
aaaauguaagcuguuuauuuu

SEQ ID NO: 2583134 - RNA, 15 nt, Human
aaaauauuauguguu

SEQ ID NO: 2583135 - RNA, 14 nt, Human
aaaauauuaugugu

SEQ ID NO: 2583136 - RNA, 14 nt, Human
aaaauauguucuuu

SEQ ID NO: 2583137 - RNA, 23 nt, Human
gggcuggaacagauucacacugu

SEQ ID NO: 2583138 - RNA, 11 nt, Human
gggcuggaaca

SEQ ID NO: 2583139 - RNA, 20 nt, Human
gggcugcuuccuccuggaaa

SEQ ID NO: 2583140 - RNA, 19 nt, Human
gggcugcuuccuccuggaa

SEQ ID NO: 2583141 - RNA, 18 nt, Human
gggcugcuuccuccugga

SEQ ID NO: 2583142 - RNA, 21 nt, Human
aaaauauuauguguuuccaua

SEQ ID NO: 2583143 - RNA, 16 nt, Human
aaaauauuauaacuua

SEQ ID NO: 2583144 - RNA, 19 nt, Human
aaaauauuauaacuuaaaa

SEQ ID NO: 2583145 - RNA, 19 nt, Human
gggcuggacugaggccuga

SEQ ID NO: 2583146 - RNA, 15 nt, Human
gggcuggacugaggc

SEQ ID NO: 2583147 - RNA, 21 nt, Human
gggcuggaaucuggagagcua

SEQ ID NO: 2583148 - RNA, 18 nt, Human
gggcuggaaucuggagag

SEQ ID NO: 2583149 - RNA, 14 nt, Human
gggcuggacugagg

SEQ ID NO: 2583150 - RNA, 14 nt, Human
gggcuggcccagcc

SEQ ID NO: 2583151 - RNA, 13 nt, Human
gggcuggcccagc

SEQ ID NO: 2583152 - RNA, 12 nt, Human
gggcuggcccag

SEQ ID NO: 2583153 - RNA, 23 nt, Human
ggggcccugccuccuuugugagg

SEQ ID NO: 2583154 - RNA, 19 nt, Human
ggggcccugccuccuuugu

SEQ ID NO: 2583155 - RNA, 16 nt, Human
ggggcccugccuccuu

SEQ ID NO: 2583156 - RNA, 17 nt, Human
ggggccaguuggucccc

SEQ ID NO: 2583157 - RNA, 16 nt, Human
ggggccaggcuggguc

SEQ ID NO: 2583158 - RNA, 14 nt, Human
ggggccaggcuggg

SEQ ID NO: 2583159 - RNA, 13 nt, Human
ggggccaggcugg

SEQ ID NO: 2583160 - RNA, 17 nt, Human
ggggaccucaggccugg

SEQ ID NO: 2583161 - RNA, 16 nt, Human
ggggaccucaggccug

SEQ ID NO: 2583162 - RNA, 15 nt, Human
ggggaccucaggccu

SEQ ID NO: 2583163 - RNA, 13 nt, Human
ggggaccucaggc

SEQ ID NO: 2583164 - RNA, 17 nt, Human
ggggaaaggcaaggucc

SEQ ID NO: 2583165 - RNA, 22 nt, Human
ggggaaaggcaagguccggccc

SEQ ID NO: 2583166 - RNA, 18 nt, Human
ggggaacucagauccagg

SEQ ID NO: 2583167 - RNA, 21 nt, Human
ggggaacucagauccagggac

SEQ ID NO: 2583168 - RNA, 13 nt, Human
ggggaacuccugg

SEQ ID NO: 2583169 - RNA, 13 nt, Human
ggggaaagcacag

SEQ ID NO: 2583170 - RNA, 24 nt, Human
ggggaaaaucagccugcuccagcu

SEQ ID NO: 2583171 - RNA, 21 nt, Human
aaacauauauaacaaugcugu

SEQ ID NO: 2583172 - RNA, 16 nt, Human
aaacaugcuacacacu

SEQ ID NO: 2583173 - RNA, 22 nt, Human
aaacaugcuacacacugcaugu

SEQ ID NO: 2583174 - RNA, 19 nt, Human
aaacauauauaacaaugcu

SEQ ID NO: 2583175 - RNA, 16 nt, Human
aaacauauauaacaau

SEQ ID NO: 2583176 - RNA, 13 nt, Human
aaacauauauaac

SEQ ID NO: 2583177 - RNA, 13 nt, Human
aaacauaauucuu

SEQ ID NO: 2583178 - RNA, 20 nt, Human
aaacauaaucuucugccuuc

SEQ ID NO: 2583179 - RNA, 21 nt, Human
aaacauaauucuuguauauua

SEQ ID NO: 2583180 - RNA, 14 nt, Human
aaacacaacuauau

SEQ ID NO: 2583181 - RNA, 15 nt, Human
aaacaauaaagagau

SEQ ID NO: 2583182 - RNA, 14 nt, Human
aaacaauaaagaga

SEQ ID NO: 2583183 - RNA, 15 nt, Human
aaacaagugcuggca

SEQ ID NO: 2583184 - RNA, 19 nt, Human
aaacacaaaugcagggauu

SEQ ID NO: 2583185 - RNA, 14 nt, Human
aaacacaaaugcag

SEQ ID NO: 2583186 - RNA, 13 nt, Human
aaacacaaaugca

SEQ ID NO: 2583187 - RNA, 14 nt, Human
aaacacaauauuuu

SEQ ID NO: 2583188 - RNA, 16 nt, Human
aaacacaccaggcugu

SEQ ID NO: 2583189 - RNA, 17 nt, Human
aaacacaccaggcugug

SEQ ID NO: 2583190 - RNA, 18 nt, Human
aaacacaccaggcugugg

SEQ ID NO: 2583191 - RNA, 23 nt, Human
aaacacaccaggcugugggccuc

SEQ ID NO: 2583192 - RNA, 15 nt, Human
aaacacacugaggca

SEQ ID NO: 2583193 - RNA, 16 nt, Human
aaacacacugaggcag

SEQ ID NO: 2583194 - RNA, 19 nt, Human
aaacacacugaggcaggga

SEQ ID NO: 2583195 - RNA, 17 nt, Human
aaacacacugaggcagg

SEQ ID NO: 2583196 - RNA, 13 nt, Human
aaacauaaauaaa

SEQ ID NO: 2583197 - RNA, 17 nt, Human
aaacauaaauaaaauga

SEQ ID NO: 2583198 - RNA, 14 nt, Human
aaacauaaauaaaa

SEQ ID NO: 2583199 - RNA, 17 nt, Human
aaagcuaaaaugauuuu

SEQ ID NO: 2583200 - RNA, 18 nt, Human
aaagcuaaaguaucugua

SEQ ID NO: 2583201 - RNA, 18 nt, Human
aaagcuaggccuggccag

SEQ ID NO: 2583202 - RNA, 17 nt, Human
aaagcuaggccuggcca

SEQ ID NO: 2583203 - RNA, 22 nt, Human
aaagcagugcaugcugucccuu

SEQ ID NO: 2583204 - RNA, 21 nt, Human
aaagcagugcaugcugucccu

SEQ ID NO: 2583205 - RNA, 23 nt, Human
aaagcaguuaacuuuaagacuga

SEQ ID NO: 2583206 - RNA, 16 nt, Human
aaagcagugcaugcug

SEQ ID NO: 2583207 - RNA, 22 nt, Human
aaagcaccaaaauaagaaaaga

SEQ ID NO: 2583208 - RNA, 19 nt, Human
aaagcggacaucagcuggu

SEQ ID NO: 2583209 - RNA, 17 nt, Human
aaagcagugcaugcugu

SEQ ID NO: 2583210 - RNA, 18 nt, Human
aaagcaccaaaauaagaa

SEQ ID NO: 2583211 - RNA, 19 nt, Human
aaagcaccaaaauaagaaa

SEQ ID NO: 2583212 - RNA, 20 nt, Human
aaagcaccaaaauaagaaaa

SEQ ID NO: 2583213 - RNA, 21 nt, Human
aaagcaccaaaauaagaaaag

SEQ ID NO: 2583214 - RNA, 15 nt, Human
aaagcacaguuugaa

SEQ ID NO: 2583215 - RNA, 21 nt, Human
aaagcacaguguuaaaugaaa

SEQ ID NO: 2583216 - RNA, 20 nt, Human
aaagcacaguguuaaaugaa

SEQ ID NO: 2583217 - RNA, 14 nt, Human
aaagcacaguguua

SEQ ID NO: 2583218 - RNA, 22 nt, Human
aaagcacaggugggcuucccag

SEQ ID NO: 2583219 - RNA, 16 nt, Human
aaagcacaagaagcgu

SEQ ID NO: 2583220 - RNA, 13 nt, Human
aaagcacaagaag

SEQ ID NO: 2583221 - RNA, 16 nt, Human
aaagcaccaaaauaag

SEQ ID NO: 2583222 - RNA, 17 nt, Human
aaagcaccaaaauaaga

SEQ ID NO: 2583223 - RNA, 17 nt, Human
aaagcacaguuugaaca

SEQ ID NO: 2583224 - RNA, 16 nt, Human
aaagcacaguuugaac

SEQ ID NO: 2583225 - RNA, 16 nt, Human
aaagcacauugaaaga

SEQ ID NO: 2583226 - RNA, 22 nt, Human
ggugcccaagccagaggcuggg

SEQ ID NO: 2583227 - RNA, 21 nt, Human
ggugcccaagccagaggcugg

SEQ ID NO: 2583228 - RNA, 23 nt, Human
ggugcccaagccagaggcugggu

SEQ ID NO: 2583229 - RNA, 22 nt, Human
ggugcccaagcucagaaggcuc

SEQ ID NO: 2583230 - RNA, 18 nt, Human
ggugcccaagccagaggc

SEQ ID NO: 2583231 - RNA, 17 nt, Human
ggugcccaagccagagg

SEQ ID NO: 2583232 - RNA, 14 nt, Human
ggugcccaagccag

SEQ ID NO: 2583233 - RNA, 13 nt, Human
ggugcccacaggc

SEQ ID NO: 2583234 - RNA, 14 nt, Human
ggugcccacaggcc

SEQ ID NO: 2583235 - RNA, 23 nt, Human
ggugcccagaauaaguuauugca

SEQ ID NO: 2583236 - RNA, 20 nt, Human
ggugcccagaaugaggcugc

SEQ ID NO: 2583237 - RNA, 23 nt, Human
aaagcaauuuuccuugaagccga

SEQ ID NO: 2583238 - RNA, 22 nt, Human
aaagcaauuuuccuugaagccg

SEQ ID NO: 2583239 - RNA, 21 nt, Human
aaagcaauuuuccuugaagcc

SEQ ID NO: 2583240 - RNA, 20 nt, Human
aaagcacacucauccccuca

SEQ ID NO: 2583241 - RNA, 13 nt, Human
aaaggaauuuaaa

SEQ ID NO: 2583242 - RNA, 19 nt, Human
aaaggacagaguaugaaca

SEQ ID NO: 2583243 - RNA, 22 nt, Human
aaaggacaccuuuuaacucacc

SEQ ID NO: 2583244 - RNA, 16 nt, Human
aaaggacaauuucaaa

SEQ ID NO: 2583245 - RNA, 15 nt, Human
aaaggacaauuucaa

SEQ ID NO: 2583246 - RNA, 23 nt, Human
aaaggaauuggcauguguauguu

SEQ ID NO: 2583247 - RNA, 11 nt, Human
aaaggaaagag

SEQ ID NO: 2583248 - RNA, 18 nt, Human
aaaggaaaauaguaaugu

SEQ ID NO: 2583249 - RNA, 21 nt, Human
aaaggaauccacucccaggca

SEQ ID NO: 2583250 - RNA, 17 nt, Human
aaaggaaucauuucuau

SEQ ID NO: 2583251 - RNA, 20 nt, Human
aaaggaagguucugguguga

SEQ ID NO: 2583252 - RNA, 23 nt, Human
aaaggaagguucuggugugaacu

SEQ ID NO: 2583253 - RNA, 14 nt, Human
aaaggaagucuagg

SEQ ID NO: 2583254 - RNA, 23 nt, Human
aaagcuauuagccaggaucaugg

SEQ ID NO: 2583255 - RNA, 22 nt, Human
aaagcuauuagccaggaucaug

SEQ ID NO: 2583256 - RNA, 20 nt, Human
aaagcuauuagccaggauca

SEQ ID NO: 2583257 - RNA, 19 nt, Human
aaagcuauuagccaggauc

SEQ ID NO: 2583258 - RNA, 18 nt, Human
aaagcuauuagccaggau

SEQ ID NO: 2583259 - RNA, 17 nt, Human
aaagcuauuagccagga

SEQ ID NO: 2583260 - RNA, 15 nt, Human
aaagcuauuagccag

SEQ ID NO: 2583261 - RNA, 22 nt, Human
aaagcuauggugagaugcagcu

SEQ ID NO: 2583262 - RNA, 15 nt, Human
aaagcuauggugaga

SEQ ID NO: 2583263 - RNA, 23 nt, Human
aaagcuaaaaugauuuuaucugu

SEQ ID NO: 2583264 - RNA, 17 nt, Human
aaagcuuccaugauucu

SEQ ID NO: 2583265 - RNA, 18 nt, Human
aaagcuuccaugauucua

SEQ ID NO: 2583266 - RNA, 20 nt, Human
aaagcuuccaugauucuauu

SEQ ID NO: 2583267 - RNA, 11 nt, Human
aaagcuucccc

SEQ ID NO: 2583268 - RNA, 19 nt, Human
aaagcuuuuuauuccuccu

SEQ ID NO: 2583269 - RNA, 19 nt, Human
aaaggaaaaagcacaagaa

SEQ ID NO: 2583270 - RNA, 16 nt, Human
aaaggaaaaagcacaa

SEQ ID NO: 2583271 - RNA, 19 nt, Human
aaagcuucuaucccaggag

SEQ ID NO: 2583272 - RNA, 21 nt, Human
aaagcuucuaucccaggaggu

SEQ ID NO: 2583273 - RNA, 19 nt, Human
aaagcuugcaacaaaauuc

SEQ ID NO: 2583274 - RNA, 20 nt, Human
aaagcuugaagaucguuagu

SEQ ID NO: 2583275 - RNA, 20 nt, Human
ggucuuuguaagaguguaga

SEQ ID NO: 2583276 - RNA, 15 nt, Human
ggucuuuguaagagu

SEQ ID NO: 2583277 - RNA, 14 nt, Human
ggucuuuguaagag

SEQ ID NO: 2583278 - RNA, 13 nt, Human
ggucuuuguaaga

SEQ ID NO: 2583279 - RNA, 12 nt, Human
ggucuuuguaag

SEQ ID NO: 2583280 - RNA, 19 nt, Human
ggucuuuucaucugggaaa

SEQ ID NO: 2583281 - RNA, 19 nt, Human
ggucuuuguaagaguguag

SEQ ID NO: 2583282 - RNA, 16 nt, Human
ggucuuuucaucuggg

SEQ ID NO: 2583283 - RNA, 20 nt, Human
ggucuuuucaucugggaaag

SEQ ID NO: 2583284 - RNA, 21 nt, Human
ggucuuuugacauguggaaag

SEQ ID NO: 2583285 - RNA, 21 nt, Human
ggugauccacucgccuucauc

SEQ ID NO: 2583286 - RNA, 17 nt, Human
ggucuuuuuaugcauuu

SEQ ID NO: 2583287 - RNA, 17 nt, Human
ggucuuuugacaugugg

SEQ ID NO: 2583288 - RNA, 18 nt, Human
ggucuguuggcaggcugg

SEQ ID NO: 2583289 - RNA, 16 nt, Human
ggucuguuggcaggcu

SEQ ID NO: 2583290 - RNA, 18 nt, Human
ggucuguucuugaagcag

SEQ ID NO: 2583291 - RNA, 13 nt, Human
ggucuugaucucc

SEQ ID NO: 2583292 - RNA, 20 nt, Human
ggucuugggaaauaugaaug

SEQ ID NO: 2583293 - RNA, 13 nt, Human
ggucuugggaaau

SEQ ID NO: 2583294 - RNA, 23 nt, Human
ggucuuggagcugagccucucac

SEQ ID NO: 2583295 - RNA, 18 nt, Human
ggucuuggagcugagccu

SEQ ID NO: 2583296 - RNA, 20 nt, Human
ggucuugguuccagccugcc

SEQ ID NO: 2583297 - RNA, 21 nt, Human
ggucuugguuccagccugcca

SEQ ID NO: 2583298 - RNA, 18 nt, Human
ggucuuuccuaaggcugc

SEQ ID NO: 2583299 - RNA, 19 nt, Human
ggucuuuccuaaggcugca

SEQ ID NO: 2583300 - RNA, 19 nt, Human
ggucuuuccuaucauggag

SEQ ID NO: 2583301 - RNA, 21 nt, Human
ggucuuucauggggugaugcu

SEQ ID NO: 2583302 - RNA, 16 nt, Human
ggucuuucauggggug

SEQ ID NO: 2583303 - RNA, 22 nt, Human
ggugcacaagcuccaagcuccc

SEQ ID NO: 2583304 - RNA, 16 nt, Human
ggugcacaagcuccaa

SEQ ID NO: 2583305 - RNA, 15 nt, Human
ggugaugcugggcug

SEQ ID NO: 2583306 - RNA, 13 nt, Human
ggugaugccaggu

SEQ ID NO: 2583307 - RNA, 16 nt, Human
ggugaugcugggcugg

SEQ ID NO: 2583308 - RNA, 22 nt, Human
ggugauuacauaaucuguacaa

SEQ ID NO: 2583309 - RNA, 15 nt, Human
ggugccaguuauggc

SEQ ID NO: 2583310 - RNA, 16 nt, Human
ggugcagagcugaaga

SEQ ID NO: 2583311 - RNA, 15 nt, Human
ggugcacagugauuu

SEQ ID NO: 2583312 - RNA, 16 nt, Human
ggugcacagugauuuu

SEQ ID NO: 2583313 - RNA, 15 nt, Human
ggugauuucagagag

SEQ ID NO: 2583314 - RNA, 20 nt, Human
ggugcacagacgucccucca

SEQ ID NO: 2583315 - RNA, 17 nt, Human
ggucuguucuuuccaaa

SEQ ID NO: 2583316 - RNA, 19 nt, Human
ggucuguucuuuccaaagu

SEQ ID NO: 2583317 - RNA, 22 nt, Human
ggucuugaacuccuggccucaa

SEQ ID NO: 2583318 - RNA, 21 nt, Human
ggucuugaacuccuggccuca

SEQ ID NO: 2583319 - RNA, 14 nt, Human
ggucugugagaugc

SEQ ID NO: 2583320 - RNA, 24 nt, Human
ggucugugagaugcuagaacuccc

SEQ ID NO: 2583321 - RNA, 12 nt, Human
ggucuguucuuu

SEQ ID NO: 2583322 - RNA, 13 nt, Human
ggucuguucuuga

SEQ ID NO: 2583323 - RNA, 15 nt, Human
ggucugucccaccag

SEQ ID NO: 2583324 - RNA, 15 nt, Human
ggucuggcugagcug

SEQ ID NO: 2583325 - RNA, 14 nt, Human
ggucuggccucagg

SEQ ID NO: 2583326 - RNA, 13 nt, Human
ggucuggcugcuu

SEQ ID NO: 2583327 - RNA, 21 nt, Human
ggucugggaggaauggacaga

SEQ ID NO: 2583328 - RNA, 16 nt, Human
ggucugggacuuccuu

SEQ ID NO: 2583329 - RNA, 17 nt, Human
ggucugggacuuccuug

SEQ ID NO: 2583330 - RNA, 14 nt, Human
ggucuguaaaaucu

SEQ ID NO: 2583331 - RNA, 12 nt, Human
ggucuguaaaau

SEQ ID NO: 2583332 - RNA, 18 nt, Human
ggucuguacguuaccucu

SEQ ID NO: 2583333 - RNA, 14 nt, Human
ggucuguagggauu

SEQ ID NO: 2583334 - RNA, 14 nt, Human
ggucugucccacca

SEQ ID NO: 2583335 - RNA, 21 nt, Human
aaagauuuucagaaaauauua

SEQ ID NO: 2583336 - RNA, 15 nt, Human
ggucuggcagccucc

SEQ ID NO: 2583337 - RNA, 22 nt, Human
ggucuggcagccucccauccag

SEQ ID NO: 2583338 - RNA, 23 nt, Human
ggucuggagaagcucccaggaac

SEQ ID NO: 2583339 - RNA, 22 nt, Human
ggucuggagaagcagugagccg

SEQ ID NO: 2583340 - RNA, 22 nt, Human
ggucugcucuuucucugccagu

SEQ ID NO: 2583341 - RNA, 22 nt, Human
aaagacuauucaaacagucuca

SEQ ID NO: 2583342 - RNA, 23 nt, Human
aaagaaugggcaguuacaugcau

SEQ ID NO: 2583343 - RNA, 18 nt, Human
aaagaaugggcaguuaca

SEQ ID NO: 2583344 - RNA, 12 nt, Human
aaagaaugggca

SEQ ID NO: 2583345 - RNA, 17 nt, Human
aaagaauggaaggugga

SEQ ID NO: 2583346 - RNA, 13 nt, Human
aaagacuccaaag

SEQ ID NO: 2583347 - RNA, 23 nt, Human
aaagacuauucaaacagucucag

SEQ ID NO: 2583348 - RNA, 15 nt, Human
aaagacucaguguuc

SEQ ID NO: 2583349 - RNA, 15 nt, Human
aaagacuguacaaag

SEQ ID NO: 2583350 - RNA, 21 nt, Human
aaagagaccuaccucagguug

SEQ ID NO: 2583351 - RNA, 20 nt, Human
aaagagaccuaccucagguu

SEQ ID NO: 2583352 - RNA, 18 nt, Human
aaagagaccuaccucagg

SEQ ID NO: 2583353 - RNA, 17 nt, Human
aaagagaccuaccucag

SEQ ID NO: 2583354 - RNA, 18 nt, Human
aaagagagaaaaacaaau

SEQ ID NO: 2583355 - RNA, 15 nt, Human
aaagagacuggagca

SEQ ID NO: 2583356 - RNA, 12 nt, Human
aaagagagaaaa

SEQ ID NO: 2583357 - RNA, 21 nt, Human
aaagagaauugggggcuuagg

SEQ ID NO: 2583358 - RNA, 18 nt, Human
aaagagaacuuccagauc

SEQ ID NO: 2583359 - RNA, 15 nt, Human
aaagagaaguauuau

SEQ ID NO: 2583360 - RNA, 14 nt, Human
aaagagaaggagcc

SEQ ID NO: 2583361 - RNA, 19 nt, Human
aaagacuuuuccaacccuc

SEQ ID NO: 2583362 - RNA, 18 nt, Human
aaagacuuaguauauuuu

SEQ ID NO: 2583363 - RNA, 20 nt, Human
aaagacuuaguauauuuucu

SEQ ID NO: 2583364 - RNA, 14 nt, Human
aaagagaaaagaaa

SEQ ID NO: 2583365 - RNA, 12 nt, Human
aaagagaaaaga

SEQ ID NO: 2583366 - RNA, 13 nt, Human
aaagagaaaagaa

SEQ ID NO: 2583367 - RNA, 18 nt, Human
aaagagaaaaaaaguuug

SEQ ID NO: 2583368 - RNA, 18 nt, Human
aaagaggcuaugugagca

SEQ ID NO: 2583369 - RNA, 13 nt, Human
aaagaggcuaugu

SEQ ID NO: 2583370 - RNA, 15 nt, Human
aaagaugagugagca

SEQ ID NO: 2583371 - RNA, 18 nt, Human
aaagaggcgucuguauau

SEQ ID NO: 2583372 - RNA, 20 nt, Human
aaagaggcgucuguauauuu

SEQ ID NO: 2583373 - RNA, 16 nt, Human
aaagaggcugaaagag

SEQ ID NO: 2583374 - RNA, 13 nt, Human
aaagagagaaugu

SEQ ID NO: 2583375 - RNA, 18 nt, Human
aaagagagaaaacuuauu

SEQ ID NO: 2583376 - RNA, 13 nt, Human
aaagagagaaaac

SEQ ID NO: 2583377 - RNA, 13 nt, Human
aaagagagaaaau

SEQ ID NO: 2583378 - RNA, 14 nt, Human
aaagagagaaaaua

SEQ ID NO: 2583379 - RNA, 15 nt, Human
aaagagagaaaauaa

SEQ ID NO: 2583380 - RNA, 16 nt, Human
aaagagagaaaauaaa

SEQ ID NO: 2583381 - RNA, 17 nt, Human
aaagagagaaaauaaaa

SEQ ID NO: 2583382 - RNA, 18 nt, Human
aaagagagaaaauaaaaa

SEQ ID NO: 2583383 - RNA, 19 nt, Human
aaagagagaaaauaaaaag

SEQ ID NO: 2583384 - RNA, 20 nt, Human
aaagaggcagcuugaaacug

SEQ ID NO: 2583385 - RNA, 21 nt, Human
aaagagagaaaauaaaaaguu

SEQ ID NO: 2583386 - RNA, 22 nt, Human
aaagagagaaaauaaaaaguua

SEQ ID NO: 2583387 - RNA, 22 nt, Human
aaagagagaaaacuuauuugag

SEQ ID NO: 2583388 - RNA, 18 nt, Human
aaagagagaauguagaua

SEQ ID NO: 2583389 - RNA, 19 nt, Human
aaagauucauuuuuaauca

SEQ ID NO: 2583390 - RNA, 15 nt, Human
aaagauucauuuuua

SEQ ID NO: 2583391 - RNA, 13 nt, Human
aaagauucauuuu

SEQ ID NO: 2583392 - RNA, 20 nt, Human
aaagauucauuuuuaaucau

SEQ ID NO: 2583393 - RNA, 15 nt, Human
aaagauuuucagaaa

SEQ ID NO: 2583394 - RNA, 14 nt, Human
aaagauuuucagaa

SEQ ID NO: 2583395 - RNA, 20 nt, Human
aaagauguuugucagauaug

SEQ ID NO: 2583396 - RNA, 19 nt, Human
aaagauucagguauguugc

SEQ ID NO: 2583397 - RNA, 19 nt, Human
aaagauuacuuagaggaaa

SEQ ID NO: 2583398 - RNA, 21 nt, Human
aaagauguuugucagauauga

SEQ ID NO: 2583399 - RNA, 22 nt, Human
aaagauuacuuuuucuuuaugu

SEQ ID NO: 2583400 - RNA, 21 nt, Human
aaagaugauuuaaaagggaag

SEQ ID NO: 2583401 - RNA, 20 nt, Human
aaagaggcugaaagaggcca

SEQ ID NO: 2583402 - RNA, 14 nt, Human
aaagaugcaaugua

SEQ ID NO: 2583403 - RNA, 20 nt, Human
aaagaugcaaggaccaggac

SEQ ID NO: 2583404 - RNA, 22 nt, Human
aaagaugcaucuaccgcucuug

SEQ ID NO: 2583405 - RNA, 22 nt, Human
aaagaugccggguuuuauauuu

SEQ ID NO: 2583406 - RNA, 23 nt, Human
aaagauggggucuguaaaaucuu

SEQ ID NO: 2583407 - RNA, 17 nt, Human
aaagaugcucuucugug

SEQ ID NO: 2583408 - RNA, 15 nt, Human
aaacuguagaaauga

SEQ ID NO: 2583409 - RNA, 16 nt, Human
aaacuguagaaaugau

SEQ ID NO: 2583410 - RNA, 18 nt, Human
aaacuguagaaaugauga

SEQ ID NO: 2583411 - RNA, 15 nt, Human
aaacuguagucucag

SEQ ID NO: 2583412 - RNA, 16 nt, Human
aaacuguagucucagg

SEQ ID NO: 2583413 - RNA, 22 nt, Human
aaacuguauugaugacaguagu

SEQ ID NO: 2583414 - RNA, 14 nt, Human
aaacuguauugaug

SEQ ID NO: 2583415 - RNA, 23 nt, Human
gguaguacuccugcaaaauuuua

SEQ ID NO: 2583416 - RNA, 22 nt, Human
gguaguacuccugcaaaauuuu

SEQ ID NO: 2583417 - RNA, 16 nt, Human
gguaguuaguagcaug

SEQ ID NO: 2583418 - RNA, 19 nt, Human
gguaguuaguagcauguug

SEQ ID NO: 2583419 - RNA, 22 nt, Human
gguauaaaacuuuccucgccug

SEQ ID NO: 2583420 - RNA, 21 nt, Human
gguauaaaacuuuccucgccu

SEQ ID NO: 2583421 - RNA, 13 nt, Human
gguauaaaagaug

SEQ ID NO: 2583422 - RNA, 12 nt, Human
gguauaaaagau

SEQ ID NO: 2583423 - RNA, 18 nt, Human
gguaguugcaauugaauu

SEQ ID NO: 2583424 - RNA, 18 nt, Human
gguauaaguggugugugu

SEQ ID NO: 2583425 - RNA, 16 nt, Human
gguauaaaagaugggg

SEQ ID NO: 2583426 - RNA, 17 nt, Human
gguauaaugguugacug

SEQ ID NO: 2583427 - RNA, 14 nt, Human
gguaugugugugua

SEQ ID NO: 2583428 - RNA, 21 nt, Human
gguauggaaggguuuguggcu

SEQ ID NO: 2583429 - RNA, 16 nt, Human
ggucaugcccuccucu

SEQ ID NO: 2583430 - RNA, 17 nt, Human
ggucaugcccuccucuc

SEQ ID NO: 2583431 - RNA, 15 nt, Human
ggucaugcccuccuc

SEQ ID NO: 2583432 - RNA, 15 nt, Human
ggucaugguggugca

SEQ ID NO: 2583433 - RNA, 20 nt, Human
ggucaugcccuccucuccca

SEQ ID NO: 2583434 - RNA, 15 nt, Human
ggucauuuaugaaaa

SEQ ID NO: 2583435 - RNA, 17 nt, Human
gguccaaauaaaaacua

SEQ ID NO: 2583436 - RNA, 11 nt, Human
gguccaaauaa

SEQ ID NO: 2583437 - RNA, 15 nt, Human
gguccaaauaaaaac

SEQ ID NO: 2583438 - RNA, 19 nt, Human
gguccacccaggagccccg

SEQ ID NO: 2583439 - RNA, 23 nt, Human
gguauuggcuagagguucaaaga

SEQ ID NO: 2583440 - RNA, 20 nt, Human
gguauuacacuguauuugua

SEQ ID NO: 2583441 - RNA, 18 nt, Human
gguauuaugcuucuugga

SEQ ID NO: 2583442 - RNA, 14 nt, Human
gguauuagaaagug

SEQ ID NO: 2583443 - RNA, 14 nt, Human
gguauuccugccuc

SEQ ID NO: 2583444 - RNA, 18 nt, Human
gguauuccuuuuguguac

SEQ ID NO: 2583445 - RNA, 17 nt, Human
gguauuguauuuauuca

SEQ ID NO: 2583446 - RNA, 12 nt, Human
gguauuguauuu

SEQ ID NO: 2583447 - RNA, 19 nt, Human
gguauuccuuuuguguaca

SEQ ID NO: 2583448 - RNA, 13 nt, Human
aaacuuuaauaua

SEQ ID NO: 2583449 - RNA, 14 nt, Human
aaacuuuaccuuuu

SEQ ID NO: 2583450 - RNA, 20 nt, Human
aaacuuuacccaaaaacuaa

SEQ ID NO: 2583451 - RNA, 16 nt, Human
aaagaaugauuaugaa

SEQ ID NO: 2583452 - RNA, 24 nt, Human
aaacuuuuuugaaauaauaaaucu

SEQ ID NO: 2583453 - RNA, 18 nt, Human
aaacuuguuacuaaagaa

SEQ ID NO: 2583454 - RNA, 12 nt, Human
ggucccacccca

SEQ ID NO: 2583455 - RNA, 21 nt, Human
ggucccaagcugggccccagc

SEQ ID NO: 2583456 - RNA, 20 nt, Human
ggucccaagcugggccccag

SEQ ID NO: 2583457 - RNA, 19 nt, Human
ggucccaagcugggcccca

SEQ ID NO: 2583458 - RNA, 16 nt, Human
ggucccaagcugggcc

SEQ ID NO: 2583459 - RNA, 13 nt, Human
ggucccacacugg

SEQ ID NO: 2583460 - RNA, 23 nt, Human
ggucccaagcugggccccagccc

SEQ ID NO: 2583461 - RNA, 22 nt, Human
gguccacccaggagccccgagg

SEQ ID NO: 2583462 - RNA, 20 nt, Human
gguccacccaggagccccga

SEQ ID NO: 2583463 - RNA, 15 nt, Human
ggucccaagcugggc

SEQ ID NO: 2583464 - RNA, 23 nt, Human
ggucccaacaggaggacaauuca

SEQ ID NO: 2583465 - RNA, 22 nt, Human
ggucccaacaggaggacaauuc

SEQ ID NO: 2583466 - RNA, 16 nt, Human
gguccaugggcagagc

SEQ ID NO: 2583467 - RNA, 18 nt, Human
gguccaugggcagagccc

SEQ ID NO: 2583468 - RNA, 12 nt, Human
ggucccaacagg

SEQ ID NO: 2583469 - RNA, 14 nt, Human
gguccaccccaugu

SEQ ID NO: 2583470 - RNA, 17 nt, Human
gguccaugggcagagcc

SEQ ID NO: 2583471 - RNA, 20 nt, Human
gcuucacggaagagccuugc

SEQ ID NO: 2583472 - RNA, 16 nt, Human
gcuucacuguauaaau

SEQ ID NO: 2583473 - RNA, 15 nt, Human
gcuucacuguauaaa

SEQ ID NO: 2583474 - RNA, 14 nt, Human
gcuucacuguauaa

SEQ ID NO: 2583475 - RNA, 22 nt, Human
gcuucagccacaguuuccucau

SEQ ID NO: 2583476 - RNA, 14 nt, Human
gcuucagccaggag

SEQ ID NO: 2583477 - RNA, 17 nt, Human
gcuucagcauauuuaua

SEQ ID NO: 2583478 - RNA, 16 nt, Human
gcuucagccacaguuu

SEQ ID NO: 2583479 - RNA, 19 nt, Human
gcuucagcauauuuauagc

SEQ ID NO: 2583480 - RNA, 17 nt, Human
gcuucacuguauaaaua

SEQ ID NO: 2583481 - RNA, 15 nt, Human
gcuucaauuaauaaa

SEQ ID NO: 2583482 - RNA, 22 nt, Human
gcuucaauacccaaauccucuc

SEQ ID NO: 2583483 - RNA, 14 nt, Human
gcuuaacuucacau

SEQ ID NO: 2583484 - RNA, 22 nt, Human
gcuucacccugaaugguuccau

SEQ ID NO: 2583485 - RNA, 20 nt, Human
gcuucaccccaaucccagcu

SEQ ID NO: 2583486 - RNA, 15 nt, Human
gcuucaccagagcau

SEQ ID NO: 2583487 - RNA, 14 nt, Human
gcuucaccagagca

SEQ ID NO: 2583488 - RNA, 19 nt, Human
gcuucaccccaaucccagc

SEQ ID NO: 2583489 - RNA, 22 nt, Human
gcuucaaggauccugagccaga

SEQ ID NO: 2583490 - RNA, 23 nt, Human
gcuuaaaggugucuuccucccaa

SEQ ID NO: 2583491 - RNA, 22 nt, Human
gcuuaaaggugucuuccuccca

SEQ ID NO: 2583492 - RNA, 20 nt, Human
gcuuaaaggugucuuccucc

SEQ ID NO: 2583493 - RNA, 17 nt, Human
gcuuaaaggugucuucc

SEQ ID NO: 2583494 - RNA, 16 nt, Human
gcuuaaaggugucuuc

SEQ ID NO: 2583495 - RNA, 12 nt, Human
gcuuaaagaugu

SEQ ID NO: 2583496 - RNA, 15 nt, Human
gcugugagccccugg

SEQ ID NO: 2583497 - RNA, 12 nt, Human
gcugugagcccc

SEQ ID NO: 2583498 - RNA, 23 nt, Human
gcugugagacagugggaaauauu

SEQ ID NO: 2583499 - RNA, 20 nt, Human
gcugugagacagugggaaau

SEQ ID NO: 2583500 - RNA, 18 nt, Human
gcugugagacagugggaa

SEQ ID NO: 2583501 - RNA, 15 nt, Human
gcugugagacagugg

SEQ ID NO: 2583502 - RNA, 17 nt, Human
gcugugacuucuccagg

SEQ ID NO: 2583503 - RNA, 16 nt, Human
gcugugacuucuccag

SEQ ID NO: 2583504 - RNA, 13 nt, Human
gcugugaaaaaaa

SEQ ID NO: 2583505 - RNA, 18 nt, Human
gcugugaacauggacucu

SEQ ID NO: 2583506 - RNA, 22 nt, Human
gcugugacaauggcaacaauuu

SEQ ID NO: 2583507 - RNA, 20 nt, Human
gcugugaauuuguguaagga

SEQ ID NO: 2583508 - RNA, 13 nt, Human
gcugugagccuug

SEQ ID NO: 2583509 - RNA, 13 nt, Human
gcugugcugcccu

SEQ ID NO: 2583510 - RNA, 12 nt, Human
gcugugcugccc

SEQ ID NO: 2583511 - RNA, 21 nt, Human
gcugugcucuggacaggcaug

SEQ ID NO: 2583512 - RNA, 22 nt, Human
gcugugcugcccugcccaccug

SEQ ID NO: 2583513 - RNA, 19 nt, Human
gcugugcugcccugcccac

SEQ ID NO: 2583514 - RNA, 15 nt, Human
gcuguggaagcaaca

SEQ ID NO: 2583515 - RNA, 20 nt, Human
gcugugagccccugguccug

SEQ ID NO: 2583516 - RNA, 16 nt, Human
gcugugagccccuggu

SEQ ID NO: 2583517 - RNA, 18 nt, Human
gcuguugucccucugcua

SEQ ID NO: 2583518 - RNA, 17 nt, Human
gcuguugucccucugcu

SEQ ID NO: 2583519 - RNA, 14 nt, Human
gcuguuguacauuu

SEQ ID NO: 2583520 - RNA, 13 nt, Human
gcuguuguacauu

SEQ ID NO: 2583521 - RNA, 12 nt, Human
gcuguuguacau

SEQ ID NO: 2583522 - RNA, 16 nt, Human
gcuguuguacauuuau

SEQ ID NO: 2583523 - RNA, 15 nt, Human
gcuguuguacauuua

SEQ ID NO: 2583524 - RNA, 16 nt, Human
gcuguugucccucugc

SEQ ID NO: 2583525 - RNA, 22 nt, Human
gcuguuggcugggggccucagu

SEQ ID NO: 2583526 - RNA, 21 nt, Human
gcuguuggcugggggccucag

SEQ ID NO: 2583527 - RNA, 15 nt, Human
gcuggguucugaucc

SEQ ID NO: 2583528 - RNA, 15 nt, Human
gcuggguucuaccca

SEQ ID NO: 2583529 - RNA, 21 nt, Human
gcuggguuggaggguguccca

SEQ ID NO: 2583530 - RNA, 14 nt, Human
gcuggguuggaggg

SEQ ID NO: 2583531 - RNA, 22 nt, Human
gcuggguuggcgcacccucccc

SEQ ID NO: 2583532 - RNA, 21 nt, Human
gcuggguuggcgcacccuccc

SEQ ID NO: 2583533 - RNA, 17 nt, Human
gcuggguuggcgcaccc

SEQ ID NO: 2583534 - RNA, 14 nt, Human
gcuggguucugcac

SEQ ID NO: 2583535 - RNA, 22 nt, Human
gcugguuuuguaagaugcuggg

SEQ ID NO: 2583536 - RNA, 21 nt, Human
gcugguuuuguaagaugcugg

SEQ ID NO: 2583537 - RNA, 15 nt, Human
gcugguuuuucaguu

SEQ ID NO: 2583538 - RNA, 14 nt, Human
gcugguuuuucagu

SEQ ID NO: 2583539 - RNA, 16 nt, Human
gcuguaagaagagacu

SEQ ID NO: 2583540 - RNA, 20 nt, Human
gcuguaaaaugcaugauuuu

SEQ ID NO: 2583541 - RNA, 14 nt, Human
gcuguaaauaaaug

SEQ ID NO: 2583542 - RNA, 16 nt, Human
gcuguaaaaugcauga

SEQ ID NO: 2583543 - RNA, 14 nt, Human
gcuguaaaaucuug

SEQ ID NO: 2583544 - RNA, 15 nt, Human
gcuguaaauaaaugc

SEQ ID NO: 2583545 - RNA, 21 nt, Human
gcuguaaugaaacaccuucuc

SEQ ID NO: 2583546 - RNA, 16 nt, Human
gcuguacaaauauaag

SEQ ID NO: 2583547 - RNA, 16 nt, Human
gcuguacacugcacga

SEQ ID NO: 2583548 - RNA, 12 nt, Human
gcuguacacugc

SEQ ID NO: 2583549 - RNA, 22 nt, Human
gcuguaaucuaugaauucuaag

SEQ ID NO: 2583550 - RNA, 18 nt, Human
gcuguaaggcaugaagga

SEQ ID NO: 2583551 - RNA, 19 nt, Human
gcuguaaggcaugaaggau

SEQ ID NO: 2583552 - RNA, 17 nt, Human
gcuguaaggcaugaagg

SEQ ID NO: 2583553 - RNA, 24 nt, Human
gcuguaagaagagacugggaagau

SEQ ID NO: 2583554 - RNA, 23 nt, Human
gcuguaucccaugagccucagca

SEQ ID NO: 2583555 - RNA, 20 nt, Human
gcuguaucccaugagccuca

SEQ ID NO: 2583556 - RNA, 21 nt, Human
gcuguacaaauauaagaauaa

SEQ ID NO: 2583557 - RNA, 17 nt, Human
gcuguauuaagccacuu

SEQ ID NO: 2583558 - RNA, 16 nt, Human
gcuguaucuuguuuuu

SEQ ID NO: 2583559 - RNA, 18 nt, Human
gcuguaucuuguuuuucc

SEQ ID NO: 2583560 - RNA, 14 nt, Human
gcuguaucuuguuu

SEQ ID NO: 2583561 - RNA, 22 nt, Human
gcuuccuacccacaccucugcc

SEQ ID NO: 2583562 - RNA, 16 nt, Human
gcuuccggcuccugug

SEQ ID NO: 2583563 - RNA, 18 nt, Human
gcuuccggcuccugugcu

SEQ ID NO: 2583564 - RNA, 18 nt, Human
gcuuccuagaaguuacug

SEQ ID NO: 2583565 - RNA, 23 nt, Human
gcuuccuacccacaccucugcca

SEQ ID NO: 2583566 - RNA, 21 nt, Human
gcuuccuagaaguuacugaau

SEQ ID NO: 2583567 - RNA, 13 nt, Human
gcuuccuucauuu

SEQ ID NO: 2583568 - RNA, 14 nt, Human
gcuuccuucauuuc

SEQ ID NO: 2583569 - RNA, 17 nt, Human
gcuuccuucauuuccuc

SEQ ID NO: 2583570 - RNA, 22 nt, Human
gcuuccuucugugaaaguacau

SEQ ID NO: 2583571 - RNA, 14 nt, Human
gcuucccugacuca

SEQ ID NO: 2583572 - RNA, 18 nt, Human
gcuucccugacucauucu

SEQ ID NO: 2583573 - RNA, 14 nt, Human
gcuuccgcauccua

SEQ ID NO: 2583574 - RNA, 17 nt, Human
gcuucccucugccuguc

SEQ ID NO: 2583575 - RNA, 19 nt, Human
gcuucccucugccuguccc

SEQ ID NO: 2583576 - RNA, 20 nt, Human
gcuucccucugccugucccu

SEQ ID NO: 2583577 - RNA, 23 nt, Human
gcuucccucugccugucccucuc

SEQ ID NO: 2583578 - RNA, 18 nt, Human
gcuucccgcucagcccuc

SEQ ID NO: 2583579 - RNA, 17 nt, Human
gcuucccgcucagcccu

SEQ ID NO: 2583580 - RNA, 16 nt, Human
gcuucccgcucagccc

SEQ ID NO: 2583581 - RNA, 15 nt, Human
gcuucccgcucagcc

SEQ ID NO: 2583582 - RNA, 14 nt, Human
gcuucccuaaucua

SEQ ID NO: 2583583 - RNA, 12 nt, Human
gcuucccucugc

SEQ ID NO: 2583584 - RNA, 13 nt, Human
gcuucccucugcc

SEQ ID NO: 2583585 - RNA, 15 nt, Human
gcuucccucugccug

SEQ ID NO: 2583586 - RNA, 23 nt, Human
gcuucccgcucagcccucccugc

SEQ ID NO: 2583587 - RNA, 13 nt, Human
gcuucccuaaucu

SEQ ID NO: 2583588 - RNA, 18 nt, Human
gcuuccccucucuccucc

SEQ ID NO: 2583589 - RNA, 13 nt, Human
gcuucccauccua

SEQ ID NO: 2583590 - RNA, 12 nt, Human
gcuucccauccu

SEQ ID NO: 2583591 - RNA, 22 nt, Human
gcuucccaguggcugcugccca

SEQ ID NO: 2583592 - RNA, 21 nt, Human
gcuucccaguggcugcugccc

SEQ ID NO: 2583593 - RNA, 20 nt, Human
gcuucccaguggcugcugcc

SEQ ID NO: 2583594 - RNA, 19 nt, Human
gcuucccaguggcugcugc

SEQ ID NO: 2583595 - RNA, 18 nt, Human
gcuucccaguggcugcug

SEQ ID NO: 2583596 - RNA, 14 nt, Human
gcuuccccucucuc

SEQ ID NO: 2583597 - RNA, 16 nt, Human
gcuuccccucucuccu

SEQ ID NO: 2583598 - RNA, 16 nt, Human
gcuucccccauagcca

SEQ ID NO: 2583599 - RNA, 18 nt, Human
gcuucccccauagccacc

SEQ ID NO: 2583600 - RNA, 22 nt, Human
gcuucccauccuacccucgggc

SEQ ID NO: 2583601 - RNA, 17 nt, Human
gcuucccauccuacccu

SEQ ID NO: 2583602 - RNA, 19 nt, Human
gcuucccauuguggcuccu

SEQ ID NO: 2583603 - RNA, 14 nt, Human
gcuucccccauagc

SEQ ID NO: 2583604 - RNA, 15 nt, Human
gcuucccccauagcc

SEQ ID NO: 2583605 - RNA, 20 nt, Human
gcuuccauuugugugugugc

SEQ ID NO: 2583606 - RNA, 20 nt, Human
gcuuggggcucacacaccug

SEQ ID NO: 2583607 - RNA, 16 nt, Human
gcuuggggcucacaca

SEQ ID NO: 2583608 - RNA, 19 nt, Human
gcuugggcuucauccuccu

SEQ ID NO: 2583609 - RNA, 20 nt, Human
gcuugggcccagcugggcuc

SEQ ID NO: 2583610 - RNA, 19 nt, Human
gcuugggcccagcugggcu

SEQ ID NO: 2583611 - RNA, 18 nt, Human
gcuugggcccagcugggc

SEQ ID NO: 2583612 - RNA, 17 nt, Human
gcuugggcccagcuggg

SEQ ID NO: 2583613 - RNA, 15 nt, Human
gcuugggcccagcug

SEQ ID NO: 2583614 - RNA, 14 nt, Human
gcuugggcccagcu

SEQ ID NO: 2583615 - RNA, 19 nt, Human
gcuugggaccgccagaugg

SEQ ID NO: 2583616 - RNA, 14 nt, Human
gcuugggacaaauc

SEQ ID NO: 2583617 - RNA, 14 nt, Human
gcuuguacauaaug

SEQ ID NO: 2583618 - RNA, 16 nt, Human
gcuuguacauaaugcg

SEQ ID NO: 2583619 - RNA, 14 nt, Human
gcuuggguggagaa

SEQ ID NO: 2583620 - RNA, 13 nt, Human
gcuuggguggaga

SEQ ID NO: 2583621 - RNA, 16 nt, Human
gcuuggggcuuccuaa

SEQ ID NO: 2583622 - RNA, 24 nt, Human
gcuugggggaugacuagaggcagg

SEQ ID NO: 2583623 - RNA, 19 nt, Human
gcuuggguggagaagccau

SEQ ID NO: 2583624 - RNA, 18 nt, Human
gcuuggguggagaagcca

SEQ ID NO: 2583625 - RNA, 17 nt, Human
gcuuggguggagaagcc

SEQ ID NO: 2583626 - RNA, 16 nt, Human
gcuuggguggagaagc

SEQ ID NO: 2583627 - RNA, 21 nt, Human
gcuuggguggagaagccauug

SEQ ID NO: 2583628 - RNA, 20 nt, Human
gcuuggguggagaagccauu

SEQ ID NO: 2583629 - RNA, 19 nt, Human
gcuuggguguaacaggucu

SEQ ID NO: 2583630 - RNA, 21 nt, Human
gcuuggguguaacaggucucc

SEQ ID NO: 2583631 - RNA, 21 nt, Human
gcuucuugccucugugcugug

SEQ ID NO: 2583632 - RNA, 20 nt, Human
gcuucuugccucugugcugu

SEQ ID NO: 2583633 - RNA, 18 nt, Human
gcuucgggcccuucccac

SEQ ID NO: 2583634 - RNA, 20 nt, Human
gcuucgggcccuucccacag

SEQ ID NO: 2583635 - RNA, 19 nt, Human
gcuucuugccucugugcug

SEQ ID NO: 2583636 - RNA, 19 nt, Human
gcuucgaggcccagcgacc

SEQ ID NO: 2583637 - RNA, 21 nt, Human
gcuucgaggcccagcgaccuc

SEQ ID NO: 2583638 - RNA, 12 nt, Human
gcuuccuuucuu

SEQ ID NO: 2583639 - RNA, 23 nt, Human
gcuuccuuuguuuuuuuuuccug

SEQ ID NO: 2583640 - RNA, 22 nt, Human
gcuuccuuggcaucacagggca

SEQ ID NO: 2583641 - RNA, 22 nt, Human
gcuuccuuuguuuuuuuuuccu

SEQ ID NO: 2583642 - RNA, 16 nt, Human
gcuuggccugcuguga

SEQ ID NO: 2583643 - RNA, 15 nt, Human
gcuuggccugcugug

SEQ ID NO: 2583644 - RNA, 14 nt, Human
gcuuggcugcuugg

SEQ ID NO: 2583645 - RNA, 19 nt, Human
gcuugaaacccguggcgcu

SEQ ID NO: 2583646 - RNA, 14 nt, Human
gcuuggccugcugu

SEQ ID NO: 2583647 - RNA, 17 nt, Human
gcuugaaaaaugugcaa

SEQ ID NO: 2583648 - RNA, 23 nt, Human
gcuucuuuuaguuguaucucuuu

SEQ ID NO: 2583649 - RNA, 18 nt, Human
gcuucuuucuuugggaau

SEQ ID NO: 2583650 - RNA, 12 nt, Human
gcuucuuucuuu

SEQ ID NO: 2583651 - RNA, 23 nt, Human
gcuucuuucuuugggaauauuug

SEQ ID NO: 2583652 - RNA, 16 nt, Human
gcuucuuucauuuucu

SEQ ID NO: 2583653 - RNA, 17 nt, Human
gcugcugcccccacccc

SEQ ID NO: 2583654 - RNA, 15 nt, Human
gcugcugcccaggcc

SEQ ID NO: 2583655 - RNA, 13 nt, Human
gcugcugcccagg

SEQ ID NO: 2583656 - RNA, 12 nt, Human
gcugcugcccag

SEQ ID NO: 2583657 - RNA, 21 nt, Human
gcugcugcguggcauagccca

SEQ ID NO: 2583658 - RNA, 12 nt, Human
gcugcugcugcu

SEQ ID NO: 2583659 - RNA, 15 nt, Human
gcugcugcugcgccc

SEQ ID NO: 2583660 - RNA, 20 nt, Human
gcugcugcuaaucuucaggg

SEQ ID NO: 2583661 - RNA, 17 nt, Human
gcugcugcgcccugggc

SEQ ID NO: 2583662 - RNA, 12 nt, Human
gcugcugcgccc

SEQ ID NO: 2583663 - RNA, 13 nt, Human
gcugcugcccugc

SEQ ID NO: 2583664 - RNA, 23 nt, Human
gcugcugccuuuagucgcugagg

SEQ ID NO: 2583665 - RNA, 23 nt, Human
gcugcucuauuguagcauuucuu

SEQ ID NO: 2583666 - RNA, 22 nt, Human
gcugcucugaauuaguccuugc

SEQ ID NO: 2583667 - RNA, 17 nt, Human
gcugcuccuuccuucac

SEQ ID NO: 2583668 - RNA, 13 nt, Human
gcugcuccucaug

SEQ ID NO: 2583669 - RNA, 11 nt, Human
gcugcuccucc

SEQ ID NO: 2583670 - RNA, 12 nt, Human
gcugcuccucca

SEQ ID NO: 2583671 - RNA, 14 nt, Human
gcugcuccuccagg

SEQ ID NO: 2583672 - RNA, 15 nt, Human
gcugcuccuccaggg

SEQ ID NO: 2583673 - RNA, 18 nt, Human
gcugcuccuccagggcca

SEQ ID NO: 2583674 - RNA, 23 nt, Human
gcugcuccuccagggccacgugc

SEQ ID NO: 2583675 - RNA, 18 nt, Human
gcugccugggaucccuca

SEQ ID NO: 2583676 - RNA, 16 nt, Human
gcugccugggaucccu

SEQ ID NO: 2583677 - RNA, 19 nt, Human
gcugccugggaucccucau

SEQ ID NO: 2583678 - RNA, 23 nt, Human
gcugcuccuagagggaggggccu

SEQ ID NO: 2583679 - RNA, 21 nt, Human
gcugcuccuagagggaggggc

SEQ ID NO: 2583680 - RNA, 22 nt, Human
gcugccuggcccccagcugugg

SEQ ID NO: 2583681 - RNA, 19 nt, Human
gcugcuccuagagggaggg

SEQ ID NO: 2583682 - RNA, 21 nt, Human
gcugccuggcccccagcugug

SEQ ID NO: 2583683 - RNA, 14 nt, Human
gcugccugcccaca

SEQ ID NO: 2583684 - RNA, 15 nt, Human
gcugccugcccacac

SEQ ID NO: 2583685 - RNA, 18 nt, Human
gcugccugcccacacagg

SEQ ID NO: 2583686 - RNA, 13 nt, Human
gcugccugggauc

SEQ ID NO: 2583687 - RNA, 21 nt, Human
gcugccugcuuuucacugcug

SEQ ID NO: 2583688 - RNA, 19 nt, Human
gcugccuggcccccagcug

SEQ ID NO: 2583689 - RNA, 17 nt, Human
gcugccugcccacacag

SEQ ID NO: 2583690 - RNA, 13 nt, Human
gcugccugcccgu

SEQ ID NO: 2583691 - RNA, 22 nt, Human
gcugccugcccguaaacacgcc

SEQ ID NO: 2583692 - RNA, 22 nt, Human
gcugccugccgguaaacacgcc

SEQ ID NO: 2583693 - RNA, 22 nt, Human
gcugccugcgcccaccccgcuc

SEQ ID NO: 2583694 - RNA, 21 nt, Human
gcugccugcgcccaccccgcu

SEQ ID NO: 2583695 - RNA, 16 nt, Human
gcugccugccugucug

SEQ ID NO: 2583696 - RNA, 15 nt, Human
gcugccugccugucu

SEQ ID NO: 2583697 - RNA, 14 nt, Human
gcugccugccuguc

SEQ ID NO: 2583698 - RNA, 13 nt, Human
gcugccugccugu

SEQ ID NO: 2583699 - RNA, 11 nt, Human
gcugccugccu

SEQ ID NO: 2583700 - RNA, 18 nt, Human
gcugccuaaguggcugcu

SEQ ID NO: 2583701 - RNA, 17 nt, Human
gcugccgccccacccag

SEQ ID NO: 2583702 - RNA, 22 nt, Human
gcugccguggggccgccgccuc

SEQ ID NO: 2583703 - RNA, 13 nt, Human
gcugccguggggc

SEQ ID NO: 2583704 - RNA, 17 nt, Human
gcugccuaaguggcugc

SEQ ID NO: 2583705 - RNA, 16 nt, Human
gcugccuaaguggcug

SEQ ID NO: 2583706 - RNA, 15 nt, Human
gcugccgcaccccag

SEQ ID NO: 2583707 - RNA, 18 nt, Human
gcugccgcaccccagagu

SEQ ID NO: 2583708 - RNA, 22 nt, Human
gcugccgcaccccagagugugg

SEQ ID NO: 2583709 - RNA, 13 nt, Human
gcugccgccuccc

SEQ ID NO: 2583710 - RNA, 15 nt, Human
gcugccgccucccag

SEQ ID NO: 2583711 - RNA, 16 nt, Human
gcugccgccucccagc

SEQ ID NO: 2583712 - RNA, 18 nt, Human
gcugccgccucccagccu

SEQ ID NO: 2583713 - RNA, 19 nt, Human
gcugccgccucccagccug

SEQ ID NO: 2583714 - RNA, 20 nt, Human
gcugccgccucccagccugg

SEQ ID NO: 2583715 - RNA, 12 nt, Human
gcugccccagcc

SEQ ID NO: 2583716 - RNA, 19 nt, Human
gcugccccacagguguguu

SEQ ID NO: 2583717 - RNA, 20 nt, Human
gcugccccaaccugcugaag

SEQ ID NO: 2583718 - RNA, 18 nt, Human
gcugccccaaccugcuga

SEQ ID NO: 2583719 - RNA, 17 nt, Human
gcugccccaaccugcug

SEQ ID NO: 2583720 - RNA, 16 nt, Human
gcugccccaaccugcu

SEQ ID NO: 2583721 - RNA, 14 nt, Human
gcugccccaaccug

SEQ ID NO: 2583722 - RNA, 18 nt, Human
gcugcccaggggagcccu

SEQ ID NO: 2583723 - RNA, 16 nt, Human
gcugccccagccagau

SEQ ID NO: 2583724 - RNA, 14 nt, Human
gcugccccagccag

SEQ ID NO: 2583725 - RNA, 18 nt, Human
gcugccccaucagugcuc

SEQ ID NO: 2583726 - RNA, 23 nt, Human
gcugccccauuuauccaccucca

SEQ ID NO: 2583727 - RNA, 14 nt, Human
gcugccgcacccca

SEQ ID NO: 2583728 - RNA, 19 nt, Human
gcugcccaggggagcccuc

SEQ ID NO: 2583729 - RNA, 14 nt, Human
gcugcccaggccca

SEQ ID NO: 2583730 - RNA, 12 nt, Human
gcugcccaggcc

SEQ ID NO: 2583731 - RNA, 17 nt, Human
gcugcccagaguugcug

SEQ ID NO: 2583732 - RNA, 14 nt, Human
gcugcccagaguug

SEQ ID NO: 2583733 - RNA, 13 nt, Human
gcugccaugugaa

SEQ ID NO: 2583734 - RNA, 21 nt, Human
gcugccaugugaagagggaga

SEQ ID NO: 2583735 - RNA, 17 nt, Human
gcugccaugugaagagg

SEQ ID NO: 2583736 - RNA, 17 nt, Human
gcugcccacacacccca

SEQ ID NO: 2583737 - RNA, 23 nt, Human
gcugccauccagguucagcuugu

SEQ ID NO: 2583738 - RNA, 23 nt, Human
gcugccauggcgugucccucucg

SEQ ID NO: 2583739 - RNA, 22 nt, Human
gcugccauggcgugucccucuc

SEQ ID NO: 2583740 - RNA, 17 nt, Human
gcugccagcucuguauc

SEQ ID NO: 2583741 - RNA, 18 nt, Human
gcugccagcucuguauca

SEQ ID NO: 2583742 - RNA, 21 nt, Human
gcugccauccagguucagcuu

SEQ ID NO: 2583743 - RNA, 21 nt, Human
gcugccagccgagauagccaa

SEQ ID NO: 2583744 - RNA, 19 nt, Human
gcugccagccgagauagcc

SEQ ID NO: 2583745 - RNA, 19 nt, Human
gcugcacucugugcccaug

SEQ ID NO: 2583746 - RNA, 18 nt, Human
gcugcacucugugcccau

SEQ ID NO: 2583747 - RNA, 14 nt, Human
gcugccacuuuuua

SEQ ID NO: 2583748 - RNA, 12 nt, Human
gcugccagagaa

SEQ ID NO: 2583749 - RNA, 17 nt, Human
gcugcacucugugccca

SEQ ID NO: 2583750 - RNA, 16 nt, Human
gcugcacucugugccc

SEQ ID NO: 2583751 - RNA, 15 nt, Human
gcugcacucugugcc

SEQ ID NO: 2583752 - RNA, 14 nt, Human
gcugcacucugugc

SEQ ID NO: 2583753 - RNA, 21 nt, Human
gcugcaccugccagccuggcu

SEQ ID NO: 2583754 - RNA, 22 nt, Human
gcugcaccugccagccuggcuu

SEQ ID NO: 2583755 - RNA, 19 nt, Human
gcugcaccggcuggccugg

SEQ ID NO: 2583756 - RNA, 18 nt, Human
gcugcaccggcuggccug

SEQ ID NO: 2583757 - RNA, 22 nt, Human
gcugcaccggcuggccuggccc

SEQ ID NO: 2583758 - RNA, 17 nt, Human
gcugcaccugccagccu

SEQ ID NO: 2583759 - RNA, 18 nt, Human
gcugcaccugccagccug

SEQ ID NO: 2583760 - RNA, 19 nt, Human
gcugcaccugccagccugg

SEQ ID NO: 2583761 - RNA, 20 nt, Human
gcugcaccugccagccuggc

SEQ ID NO: 2583762 - RNA, 17 nt, Human
gcugcaccggcuggccu

SEQ ID NO: 2583763 - RNA, 16 nt, Human
gcugcaccggcuggcc

SEQ ID NO: 2583764 - RNA, 14 nt, Human
gcugcaccggcugg

SEQ ID NO: 2583765 - RNA, 15 nt, Human
gcugaggcuggcaca

SEQ ID NO: 2583766 - RNA, 16 nt, Human
gcugaggcuggcacag

SEQ ID NO: 2583767 - RNA, 18 nt, Human
gcugaggcuggcacagga

SEQ ID NO: 2583768 - RNA, 15 nt, Human
gcugagggaccagcc

SEQ ID NO: 2583769 - RNA, 23 nt, Human
gcugagggauggacugaugcuuu

SEQ ID NO: 2583770 - RNA, 22 nt, Human
gcugagggauggacugaugcuu

SEQ ID NO: 2583771 - RNA, 21 nt, Human
gcugagggauggacugaugcu

SEQ ID NO: 2583772 - RNA, 14 nt, Human
gcugagggagccug

SEQ ID NO: 2583773 - RNA, 16 nt, Human
gcugaggaggccucca

SEQ ID NO: 2583774 - RNA, 13 nt, Human
gcugaggcuggca

SEQ ID NO: 2583775 - RNA, 16 nt, Human
gcugagggaccagcca

SEQ ID NO: 2583776 - RNA, 12 nt, Human
gcugaggaaagg

SEQ ID NO: 2583777 - RNA, 15 nt, Human
gcugaggaaaggcca

SEQ ID NO: 2583778 - RNA, 16 nt, Human
gcugaggaaaggccag

SEQ ID NO: 2583779 - RNA, 14 nt, Human
gcugaggaggccuc

SEQ ID NO: 2583780 - RNA, 17 nt, Human
gcugaggaaaggccagc

SEQ ID NO: 2583781 - RNA, 21 nt, Human
gcugaggaaaggccagcuggc

SEQ ID NO: 2583782 - RNA, 22 nt, Human
gcugaggaaaggccagcuggca

SEQ ID NO: 2583783 - RNA, 23 nt, Human
gcugaggaaaggccagcuggcag

SEQ ID NO: 2583784 - RNA, 23 nt, Human
gcugaggggggccgugcccaggg

SEQ ID NO: 2583785 - RNA, 22 nt, Human
gcugaggggaggaucacuggag

SEQ ID NO: 2583786 - RNA, 21 nt, Human
gcugaggggggccgugcccag

SEQ ID NO: 2583787 - RNA, 12 nt, Human
gcuggagugcag

SEQ ID NO: 2583788 - RNA, 12 nt, Human
gcuggagugagg

SEQ ID NO: 2583789 - RNA, 17 nt, Human
gcuggagcucugcccau

SEQ ID NO: 2583790 - RNA, 23 nt, Human
gcuggaggacuagaaccuggagg

SEQ ID NO: 2583791 - RNA, 21 nt, Human
gcuggaggacuagaaccugga

SEQ ID NO: 2583792 - RNA, 12 nt, Human
gcuggagcuggc

SEQ ID NO: 2583793 - RNA, 22 nt, Human
gcuggagcuggcgucugucuuc

SEQ ID NO: 2583794 - RNA, 19 nt, Human
gcuggacugaggccugagc

SEQ ID NO: 2583795 - RNA, 18 nt, Human
gcuggacugaggccugag

SEQ ID NO: 2583796 - RNA, 17 nt, Human
gcuggacugaggccuga

SEQ ID NO: 2583797 - RNA, 16 nt, Human
gcuggacugaggccug

SEQ ID NO: 2583798 - RNA, 14 nt, Human
gcuggagcucugcc

SEQ ID NO: 2583799 - RNA, 21 nt, Human
gcuggacucucagucucugag

SEQ ID NO: 2583800 - RNA, 22 nt, Human
gcuggacucucagucucugagc

SEQ ID NO: 2583801 - RNA, 14 nt, Human
gcuggacugaggcc

SEQ ID NO: 2583802 - RNA, 13 nt, Human
gcuggacugaggc

SEQ ID NO: 2583803 - RNA, 21 nt, Human
gcuggacggggacuggggaug

SEQ ID NO: 2583804 - RNA, 19 nt, Human
gcuggacggggacugggga

SEQ ID NO: 2583805 - RNA, 14 nt, Human
gcuggacuacccac

SEQ ID NO: 2583806 - RNA, 16 nt, Human
gcuggacggcauuccu

SEQ ID NO: 2583807 - RNA, 20 nt, Human
gcugggcucccuucccaccu

SEQ ID NO: 2583808 - RNA, 17 nt, Human
gcugggcucccuuccca

SEQ ID NO: 2583809 - RNA, 16 nt, Human
gcugggcucccuuccc

SEQ ID NO: 2583810 - RNA, 12 nt, Human
gcugggcucccu

SEQ ID NO: 2583811 - RNA, 17 nt, Human
gcugggcagaggaaagc

SEQ ID NO: 2583812 - RNA, 16 nt, Human
gcugggcagaggaaag

SEQ ID NO: 2583813 - RNA, 19 nt, Human
gcugggcagaggaaagcaa

SEQ ID NO: 2583814 - RNA, 13 nt, Human
gcugggcagcuac

SEQ ID NO: 2583815 - RNA, 12 nt, Human
gcugggcagcua

SEQ ID NO: 2583816 - RNA, 13 nt, Human
gcugggcagcugu

SEQ ID NO: 2583817 - RNA, 12 nt, Human
gcugggcagcug

SEQ ID NO: 2583818 - RNA, 22 nt, Human
gcuggguggcccauccccccuc

SEQ ID NO: 2583819 - RNA, 21 nt, Human
gcuggguggcccauccccccu

SEQ ID NO: 2583820 - RNA, 20 nt, Human
gcuggguggcccaucccccc

SEQ ID NO: 2583821 - RNA, 16 nt, Human
gcuggguggcccaucc

SEQ ID NO: 2583822 - RNA, 16 nt, Human
gcuggguucauuugug

SEQ ID NO: 2583823 - RNA, 17 nt, Human
gcugggugguacccucu

SEQ ID NO: 2583824 - RNA, 15 nt, Human
gcuggguguggcgca

SEQ ID NO: 2583825 - RNA, 19 nt, Human
gcugggucgcccuggacug

SEQ ID NO: 2583826 - RNA, 14 nt, Human
gcuggguggcccau

SEQ ID NO: 2583827 - RNA, 13 nt, Human
gcuggguggccca

SEQ ID NO: 2583828 - RNA, 17 nt, Human
gcuggguggcacugcca

SEQ ID NO: 2583829 - RNA, 15 nt, Human
gcuggguggcacugc

SEQ ID NO: 2583830 - RNA, 14 nt, Human
gcuggguggcacug

SEQ ID NO: 2583831 - RNA, 18 nt, Human
gcugggucgcccuggacu

SEQ ID NO: 2583832 - RNA, 17 nt, Human
gcugggucgcccuggac

SEQ ID NO: 2583833 - RNA, 16 nt, Human
gcugggucgcccugga

SEQ ID NO: 2583834 - RNA, 14 nt, Human
gcugggcagcuguu

SEQ ID NO: 2583835 - RNA, 19 nt, Human
gcuggccuggccccucagg

SEQ ID NO: 2583836 - RNA, 18 nt, Human
gcuggccuggccccucag

SEQ ID NO: 2583837 - RNA, 22 nt, Human
gcugggauuacaggcuccugcc

SEQ ID NO: 2583838 - RNA, 23 nt, Human
gcugggauuacaggcuccugcca

SEQ ID NO: 2583839 - RNA, 16 nt, Human
gcugggauuacaggug

SEQ ID NO: 2583840 - RNA, 17 nt, Human
gcuggccuggccccuca

SEQ ID NO: 2583841 - RNA, 16 nt, Human
gcuggccuggccccuc

SEQ ID NO: 2583842 - RNA, 15 nt, Human
gcuggagugcaguga

SEQ ID NO: 2583843 - RNA, 14 nt, Human
gcuggagugcagug

SEQ ID NO: 2583844 - RNA, 15 nt, Human
gcugggcagaggaaa

SEQ ID NO: 2583845 - RNA, 14 nt, Human
gcugggcagaggaa

SEQ ID NO: 2583846 - RNA, 13 nt, Human
gcugggcagagga

SEQ ID NO: 2583847 - RNA, 19 nt, Human
gcugggcagaaggccaaga

SEQ ID NO: 2583848 - RNA, 13 nt, Human
gcugggcagaagg

SEQ ID NO: 2583849 - RNA, 18 nt, Human
gcugggauuacaggugug

SEQ ID NO: 2583850 - RNA, 17 nt, Human
gcugggauuacaggugu

SEQ ID NO: 2583851 - RNA, 17 nt, Human
gcugggauuacagggau

SEQ ID NO: 2583852 - RNA, 19 nt, Human
gcugggauuacagguguga

SEQ ID NO: 2583853 - RNA, 22 nt, Human
gcugggcacacgccucccacug

SEQ ID NO: 2583854 - RNA, 20 nt, Human
gcugggcacacgccucccac

SEQ ID NO: 2583855 - RNA, 21 nt, Human
gcugggauuacaggcuccugc

SEQ ID NO: 2583856 - RNA, 22 nt, Human
gcucagguggggucacucuggc

SEQ ID NO: 2583857 - RNA, 21 nt, Human
gcucagguggggucacucugg

SEQ ID NO: 2583858 - RNA, 19 nt, Human
gcucaggucccuggggcua

SEQ ID NO: 2583859 - RNA, 18 nt, Human
gcucaggagcccugggag

SEQ ID NO: 2583860 - RNA, 15 nt, Human
gcucaggagcccugg

SEQ ID NO: 2583861 - RNA, 12 nt, Human
gcucagggccug

SEQ ID NO: 2583862 - RNA, 17 nt, Human
gcucaggacucagaagc

SEQ ID NO: 2583863 - RNA, 18 nt, Human
gcucaggacucagaagcc

SEQ ID NO: 2583864 - RNA, 21 nt, Human
gcucaggagcccugggaggcu

SEQ ID NO: 2583865 - RNA, 16 nt, Human
gcucagggccuggcuc

SEQ ID NO: 2583866 - RNA, 13 nt, Human
gcucagggccugg

SEQ ID NO: 2583867 - RNA, 23 nt, Human
gcucagggccaugcugaggccug

SEQ ID NO: 2583868 - RNA, 19 nt, Human
gcucaggacucagaagccu

SEQ ID NO: 2583869 - RNA, 17 nt, Human
gcucagggccuggcuca

SEQ ID NO: 2583870 - RNA, 15 nt, Human
gcucaggucccuggg

SEQ ID NO: 2583871 - RNA, 20 nt, Human
gcucaggggcguguggcuca

SEQ ID NO: 2583872 - RNA, 18 nt, Human
gcucaggggcguguggcu

SEQ ID NO: 2583873 - RNA, 20 nt, Human
gcucagagagggugggagug

SEQ ID NO: 2583874 - RNA, 18 nt, Human
gcucagagagggugggag

SEQ ID NO: 2583875 - RNA, 22 nt, Human
gcucagagagggugggaguggg

SEQ ID NO: 2583876 - RNA, 14 nt, Human
gcucaggagcccug

SEQ ID NO: 2583877 - RNA, 15 nt, Human
gcucagagagggugg

SEQ ID NO: 2583878 - RNA, 16 nt, Human
gcucacuaugaaucua

SEQ ID NO: 2583879 - RNA, 14 nt, Human
gcucacuaugaauc

SEQ ID NO: 2583880 - RNA, 21 nt, Human
gcucacuaccuccucagggau

SEQ ID NO: 2583881 - RNA, 18 nt, Human
gcucacuaccuccucagg

SEQ ID NO: 2583882 - RNA, 13 nt, Human
gcucacgugugug

SEQ ID NO: 2583883 - RNA, 15 nt, Human
gcucacgugugugac

SEQ ID NO: 2583884 - RNA, 16 nt, Human
gcucacuaccuccuca

SEQ ID NO: 2583885 - RNA, 17 nt, Human
gcucacgugugugacuc

SEQ ID NO: 2583886 - RNA, 22 nt, Human
gcucacgugagagugucuucac

SEQ ID NO: 2583887 - RNA, 14 nt, Human
gcucacgucacacu

SEQ ID NO: 2583888 - RNA, 15 nt, Human
gcucacgucacacuu

SEQ ID NO: 2583889 - RNA, 23 nt, Human
gcucaccuguugcuuacaauuuu

SEQ ID NO: 2583890 - RNA, 21 nt, Human
gcucacgccuguaaucccagc

SEQ ID NO: 2583891 - RNA, 23 nt, Human
gcucacgccuguaaucccagcac

SEQ ID NO: 2583892 - RNA, 22 nt, Human
gcucacgccuguaaucccagca

SEQ ID NO: 2583893 - RNA, 21 nt, Human
gcucacgccuaugaucccagc

SEQ ID NO: 2583894 - RNA, 22 nt, Human
gcucacgccuaugaucccagca

SEQ ID NO: 2583895 - RNA, 22 nt, Human
gcucaccuguugcuuacaauuu

SEQ ID NO: 2583896 - RNA, 21 nt, Human
gcucaccuguugcuuacaauu

SEQ ID NO: 2583897 - RNA, 22 nt, Human
gccuguucaguuacagaaagug

SEQ ID NO: 2583898 - RNA, 21 nt, Human
gccuguucaguuacagaaagu

SEQ ID NO: 2583899 - RNA, 20 nt, Human
gccuguucaguuacagaaag

SEQ ID NO: 2583900 - RNA, 19 nt, Human
gccuguucaguuacagaaa

SEQ ID NO: 2583901 - RNA, 16 nt, Human
gccuguucaguuacag

SEQ ID NO: 2583902 - RNA, 15 nt, Human
gccuguucaguuaca

SEQ ID NO: 2583903 - RNA, 13 nt, Human
gccuguucaguua

SEQ ID NO: 2583904 - RNA, 12 nt, Human
gccuguucaguu

SEQ ID NO: 2583905 - RNA, 24 nt, Human
gccuguucaguuacagaaaguggu

SEQ ID NO: 2583906 - RNA, 19 nt, Human
gccuguucagcuccagcuc

SEQ ID NO: 2583907 - RNA, 22 nt, Human
gccuguuagacucuuacuuuuu

SEQ ID NO: 2583908 - RNA, 22 nt, Human
gccugugugacaucaguggcau

SEQ ID NO: 2583909 - RNA, 20 nt, Human
gccuguucagcuccagcuca

SEQ ID NO: 2583910 - RNA, 11 nt, Human
gccuguucagu

SEQ ID NO: 2583911 - RNA, 19 nt, Human
gccuguuauaacucugcac

SEQ ID NO: 2583912 - RNA, 18 nt, Human
gcuaggaacacuccuuca

SEQ ID NO: 2583913 - RNA, 21 nt, Human
gcuaggaacacuccuucacag

SEQ ID NO: 2583914 - RNA, 19 nt, Human
gcuaggaacacuccuucac

SEQ ID NO: 2583915 - RNA, 20 nt, Human
gcuauugucaccagggcugg

SEQ ID NO: 2583916 - RNA, 21 nt, Human
gcuauugucaccagggcugga

SEQ ID NO: 2583917 - RNA, 14 nt, Human
gcuauuuaaaacuu

SEQ ID NO: 2583918 - RNA, 22 nt, Human
gcuauuuaaaaaaaaaagagga

SEQ ID NO: 2583919 - RNA, 22 nt, Human
gcuauuguuucuuuaagaaagu

SEQ ID NO: 2583920 - RNA, 16 nt, Human
gcuauuguaaauaugu

SEQ ID NO: 2583921 - RNA, 13 nt, Human
gcuauuguaaaua

SEQ ID NO: 2583922 - RNA, 13 nt, Human
gcuauuuaaaacu

SEQ ID NO: 2583923 - RNA, 14 nt, Human
gcuauuucaucuau

SEQ ID NO: 2583924 - RNA, 15 nt, Human
gcuauuucaucuauu

SEQ ID NO: 2583925 - RNA, 17 nt, Human
gcuauuuccauuccaga

SEQ ID NO: 2583926 - RNA, 11 nt, Human
gcucaccuggg

SEQ ID NO: 2583927 - RNA, 12 nt, Human
gcucaccugggg

SEQ ID NO: 2583928 - RNA, 13 nt, Human
gcucaccuggggu

SEQ ID NO: 2583929 - RNA, 20 nt, Human
gcucaccuguugcuuacaau

SEQ ID NO: 2583930 - RNA, 19 nt, Human
gcucaccuguugcuuacaa

SEQ ID NO: 2583931 - RNA, 15 nt, Human
gcucaccuguugcuu

SEQ ID NO: 2583932 - RNA, 22 nt, Human
gcucaccuggggugugggaggc

SEQ ID NO: 2583933 - RNA, 16 nt, Human
gcuauugucaccaggg

SEQ ID NO: 2583934 - RNA, 11 nt, Human
gcuaugugacu

SEQ ID NO: 2583935 - RNA, 22 nt, Human
gcuauggugagaugcagcugga

SEQ ID NO: 2583936 - RNA, 22 nt, Human
gcuauguauggaauacaguguu

SEQ ID NO: 2583937 - RNA, 21 nt, Human
gcuauggggauagaugugugg

SEQ ID NO: 2583938 - RNA, 16 nt, Human
gcuauggugagaugca

SEQ ID NO: 2583939 - RNA, 15 nt, Human
gcuauggugagaugc

SEQ ID NO: 2583940 - RNA, 14 nt, Human
gcuauggugagaug

SEQ ID NO: 2583941 - RNA, 18 nt, Human
gcuauggggagaaaagac

SEQ ID NO: 2583942 - RNA, 19 nt, Human
gcuauggggauagaugugu

SEQ ID NO: 2583943 - RNA, 19 nt, Human
gcuaugggagccccagggu

SEQ ID NO: 2583944 - RNA, 21 nt, Human
gcuaugggagccccagggucu

SEQ ID NO: 2583945 - RNA, 15 nt, Human
gcuaggccuggccag

SEQ ID NO: 2583946 - RNA, 14 nt, Human
gcuaggccuggcca

SEQ ID NO: 2583947 - RNA, 21 nt, Human
gcuaguaauuggaaaggcagc

SEQ ID NO: 2583948 - RNA, 16 nt, Human
gcuaguaucaaaagaa

SEQ ID NO: 2583949 - RNA, 18 nt, Human
gcuaggcauacaaguagg

SEQ ID NO: 2583950 - RNA, 18 nt, Human
gcuagucaagcuccuccu

SEQ ID NO: 2583951 - RNA, 19 nt, Human
gcuagucaagcuccuccuc

SEQ ID NO: 2583952 - RNA, 16 nt, Human
gcuagucaagcuccuc

SEQ ID NO: 2583953 - RNA, 21 nt, Human
gcuagucaagcuccuccuccc

SEQ ID NO: 2583954 - RNA, 18 nt, Human
gcuaugggagccccaggg

SEQ ID NO: 2583955 - RNA, 17 nt, Human
gcucuacaucuucugcc

SEQ ID NO: 2583956 - RNA, 18 nt, Human
gcucucagcucagcgcca

SEQ ID NO: 2583957 - RNA, 16 nt, Human
gcucuacaucuucugc

SEQ ID NO: 2583958 - RNA, 16 nt, Human
gcucucaggccagcug

SEQ ID NO: 2583959 - RNA, 15 nt, Human
gcucucaggccagcu

SEQ ID NO: 2583960 - RNA, 14 nt, Human
gcucucaggccagc

SEQ ID NO: 2583961 - RNA, 13 nt, Human
gcucucaggccag

SEQ ID NO: 2583962 - RNA, 22 nt, Human
gcucuacagcuaaucagcauuc

SEQ ID NO: 2583963 - RNA, 20 nt, Human
gcucuacagcuaaucagcau

SEQ ID NO: 2583964 - RNA, 21 nt, Human
gcucccaggcauuccccagga

SEQ ID NO: 2583965 - RNA, 20 nt, Human
gcucccaggcauuccccagg

SEQ ID NO: 2583966 - RNA, 22 nt, Human
gcuccccgccuguucccccgcc

SEQ ID NO: 2583967 - RNA, 12 nt, Human
gcuccccuccaa

SEQ ID NO: 2583968 - RNA, 20 nt, Human
gcuccccgccuguucccccg

SEQ ID NO: 2583969 - RNA, 17 nt, Human
gcuccccgccuguuccc

SEQ ID NO: 2583970 - RNA, 14 nt, Human
gcucccccuguccc

SEQ ID NO: 2583971 - RNA, 13 nt, Human
gcucccccugucc

SEQ ID NO: 2583972 - RNA, 12 nt, Human
gcucccccuguc

SEQ ID NO: 2583973 - RNA, 19 nt, Human
gcuccccagcccuggcucu

SEQ ID NO: 2583974 - RNA, 18 nt, Human
gcucccccuguccccuca

SEQ ID NO: 2583975 - RNA, 16 nt, Human
gcuccccgccuguucc

SEQ ID NO: 2583976 - RNA, 14 nt, Human
gcuccccagcccca

SEQ ID NO: 2583977 - RNA, 20 nt, Human
gcuccccagcccuggcucug

SEQ ID NO: 2583978 - RNA, 18 nt, Human
gcuccccagcccuggcuc

SEQ ID NO: 2583979 - RNA, 16 nt, Human
gcuccccagcccuggc

SEQ ID NO: 2583980 - RNA, 15 nt, Human
gcuccccagcccugg

SEQ ID NO: 2583981 - RNA, 14 nt, Human
gcuccccagcccug

SEQ ID NO: 2583982 - RNA, 15 nt, Human
gcuccccagcccagg

SEQ ID NO: 2583983 - RNA, 16 nt, Human
gcuccccagcccaggg

SEQ ID NO: 2583984 - RNA, 18 nt, Human
gcucccauuucuacucuc

SEQ ID NO: 2583985 - RNA, 17 nt, Human
gcucccauuucuacucu

SEQ ID NO: 2583986 - RNA, 19 nt, Human
gcuccccacugccuacugc

SEQ ID NO: 2583987 - RNA, 20 nt, Human
gcuccccacugccuacugca

SEQ ID NO: 2583988 - RNA, 13 nt, Human
gcuccccagccca

SEQ ID NO: 2583989 - RNA, 14 nt, Human
gcuccccagcccag

SEQ ID NO: 2583990 - RNA, 22 nt, Human
gcucccaggcauuccccaggag

SEQ ID NO: 2583991 - RNA, 15 nt, Human
gcucccauuucuacu

SEQ ID NO: 2583992 - RNA, 15 nt, Human
gcucgggcccaggcc

SEQ ID NO: 2583993 - RNA, 14 nt, Human
gcucgggcccaggc

SEQ ID NO: 2583994 - RNA, 13 nt, Human
gcucgggcccagg

SEQ ID NO: 2583995 - RNA, 12 nt, Human
gcucgggcccag

SEQ ID NO: 2583996 - RNA, 16 nt, Human
gcucggaggcugcccc

SEQ ID NO: 2583997 - RNA, 15 nt, Human
gcucggaggcugccc

SEQ ID NO: 2583998 - RNA, 14 nt, Human
gcucggaggcugcc

SEQ ID NO: 2583999 - RNA, 21 nt, Human
gcucggaggccccaaaggaaa

SEQ ID NO: 2584000 - RNA, 19 nt, Human
gcucggaggccccaaagga

SEQ ID NO: 2584001 - RNA, 18 nt, Human
gcucggaggccccaaagg

SEQ ID NO: 2584002 - RNA, 14 nt, Human
gcucggaggcccca

SEQ ID NO: 2584003 - RNA, 14 nt, Human
gcuccugcugcacc

SEQ ID NO: 2584004 - RNA, 18 nt, Human
gcucggaggcugcccccg

SEQ ID NO: 2584005 - RNA, 17 nt, Human
gcucggaggcugccccc

SEQ ID NO: 2584006 - RNA, 23 nt, Human
gcucggaggcugcccccggcccc

SEQ ID NO: 2584007 - RNA, 15 nt, Human
gcuccugcugcacca

SEQ ID NO: 2584008 - RNA, 12 nt, Human
gcuccugcugca

SEQ ID NO: 2584009 - RNA, 11 nt, Human
gcuccugcugc

SEQ ID NO: 2584010 - RNA, 22 nt, Human
gcucgcugcugcgcccugggcu

SEQ ID NO: 2584011 - RNA, 13 nt, Human
gcucgcuguugcu

SEQ ID NO: 2584012 - RNA, 16 nt, Human
gcucgcuguugcugaa

SEQ ID NO: 2584013 - RNA, 14 nt, Human
gcucgcuguugcug

SEQ ID NO: 2584014 - RNA, 21 nt, Human
gcucgcuguugcugaauaggc

SEQ ID NO: 2584015 - RNA, 15 nt, Human
gcucggaggaagccc

SEQ ID NO: 2584016 - RNA, 20 nt, Human
gcuccugcuccacagccauc

SEQ ID NO: 2584017 - RNA, 17 nt, Human
gcuccugcuccacagcc

SEQ ID NO: 2584018 - RNA, 14 nt, Human
gcuccugcuccaca

SEQ ID NO: 2584019 - RNA, 18 nt, Human
gcuccugccuucuguccu

SEQ ID NO: 2584020 - RNA, 17 nt, Human
gcuccugccuucugucc

SEQ ID NO: 2584021 - RNA, 19 nt, Human
gcuccugccuucuguccug

SEQ ID NO: 2584022 - RNA, 19 nt, Human
gcuccugccgcagagcugg

SEQ ID NO: 2584023 - RNA, 18 nt, Human
gcuccugccgcagagcug

SEQ ID NO: 2584024 - RNA, 22 nt, Human
gcuccugccgcagagcuggccg

SEQ ID NO: 2584025 - RNA, 15 nt, Human
gcuccugccuucugu

SEQ ID NO: 2584026 - RNA, 17 nt, Human
gcuccugccgcagagcu

SEQ ID NO: 2584027 - RNA, 15 nt, Human
gcuccugccgcagag

SEQ ID NO: 2584028 - RNA, 12 nt, Human
gcuccugcccac

SEQ ID NO: 2584029 - RNA, 19 nt, Human
gcuccugccaguguggaac

SEQ ID NO: 2584030 - RNA, 21 nt, Human
gcuccugccaccacgcccggc

SEQ ID NO: 2584031 - RNA, 22 nt, Human
gcuccugccaccacgcccggcu

SEQ ID NO: 2584032 - RNA, 15 nt, Human
gcuccccucggagaa

SEQ ID NO: 2584033 - RNA, 18 nt, Human
gcuccccucggagaagag

SEQ ID NO: 2584034 - RNA, 18 nt, Human
gcuccccuccucuccccu

SEQ ID NO: 2584035 - RNA, 13 nt, Human
gcuccccuccucu

SEQ ID NO: 2584036 - RNA, 15 nt, Human
gcuccccucccuccu

SEQ ID NO: 2584037 - RNA, 17 nt, Human
gcuccucuccuggagga

SEQ ID NO: 2584038 - RNA, 16 nt, Human
gcuccucuccuggagg

SEQ ID NO: 2584039 - RNA, 15 nt, Human
gcuccucuccuggag

SEQ ID NO: 2584040 - RNA, 14 nt, Human
gcuccucuccugga

SEQ ID NO: 2584041 - RNA, 12 nt, Human
gcuccucugcuu

SEQ ID NO: 2584042 - RNA, 18 nt, Human
gcuccucuccuggaggau

SEQ ID NO: 2584043 - RNA, 11 nt, Human
gcuccucuggg

SEQ ID NO: 2584044 - RNA, 19 nt, Human
gcuccucugggcaggaccu

SEQ ID NO: 2584045 - RNA, 12 nt, Human
gcuccucugggc

SEQ ID NO: 2584046 - RNA, 13 nt, Human
gcuccucugggca

SEQ ID NO: 2584047 - RNA, 14 nt, Human
gcuccucugggcag

SEQ ID NO: 2584048 - RNA, 16 nt, Human
gcuccucugggcagga

SEQ ID NO: 2584049 - RNA, 15 nt, Human
gcucugcauuugucu

SEQ ID NO: 2584050 - RNA, 22 nt, Human
gcucugcaugcggcccagcccg

SEQ ID NO: 2584051 - RNA, 21 nt, Human
gcucugcaugcggcccagccc

SEQ ID NO: 2584052 - RNA, 20 nt, Human
gcucugcaugcggcccagcc

SEQ ID NO: 2584053 - RNA, 19 nt, Human
gcucugcaugcggcccagc

SEQ ID NO: 2584054 - RNA, 18 nt, Human
gcucugcaugcggcccag

SEQ ID NO: 2584055 - RNA, 17 nt, Human
gcucugcaugcggccca

SEQ ID NO: 2584056 - RNA, 16 nt, Human
gcucugcaugcggccc

SEQ ID NO: 2584057 - RNA, 15 nt, Human
gcucugcaugcggcc

SEQ ID NO: 2584058 - RNA, 11 nt, Human
gcucugcaugc

SEQ ID NO: 2584059 - RNA, 18 nt, Human
gcucugcaggcaccuuag

SEQ ID NO: 2584060 - RNA, 16 nt, Human
gcucugcaggcaccuu

SEQ ID NO: 2584061 - RNA, 15 nt, Human
gcucugcaggcaccu

SEQ ID NO: 2584062 - RNA, 14 nt, Human
gcucugcaggcacc

SEQ ID NO: 2584063 - RNA, 19 nt, Human
gcucugcagcccagggacc

SEQ ID NO: 2584064 - RNA, 16 nt, Human
gcucuggaggggaggg

SEQ ID NO: 2584065 - RNA, 15 nt, Human
gcucuggaggggagg

SEQ ID NO: 2584066 - RNA, 23 nt, Human
gcucugccaacuucuucagagcu

SEQ ID NO: 2584067 - RNA, 13 nt, Human
gcucuggagggga

SEQ ID NO: 2584068 - RNA, 23 nt, Human
gcucuggagcccacuguacuugc

SEQ ID NO: 2584069 - RNA, 21 nt, Human
gcucugagcaaauguggcucc

SEQ ID NO: 2584070 - RNA, 20 nt, Human
gcucugagcaaauguggcuc

SEQ ID NO: 2584071 - RNA, 18 nt, Human
gcucugcaauuccccucu

SEQ ID NO: 2584072 - RNA, 23 nt, Human
gcucugcaauuccccucugcugc

SEQ ID NO: 2584073 - RNA, 11 nt, Human
gcucugcacag

SEQ ID NO: 2584074 - RNA, 12 nt, Human
gcucugcacaga

SEQ ID NO: 2584075 - RNA, 13 nt, Human
gcucugcacagau

SEQ ID NO: 2584076 - RNA, 14 nt, Human
gcucugcacagaug

SEQ ID NO: 2584077 - RNA, 18 nt, Human
gcucugcacagauggauu

SEQ ID NO: 2584078 - RNA, 18 nt, Human
gcucugcagcccagggac

SEQ ID NO: 2584079 - RNA, 15 nt, Human
gcucugcagcccagg

SEQ ID NO: 2584080 - RNA, 13 nt, Human
gcucugcagccca

SEQ ID NO: 2584081 - RNA, 15 nt, Human
gcucugcacagaugg

SEQ ID NO: 2584082 - RNA, 21 nt, Human
gcucugaccgaaacagcgcug

SEQ ID NO: 2584083 - RNA, 17 nt, Human
gcucugacccagugaga

SEQ ID NO: 2584084 - RNA, 15 nt, Human
gcucugacccaguga

SEQ ID NO: 2584085 - RNA, 20 nt, Human
gcucugacagaaagcagaua

SEQ ID NO: 2584086 - RNA, 15 nt, Human
gcugaaauuuuauau

SEQ ID NO: 2584087 - RNA, 17 nt, Human
gcugaaauuuuauaugc

SEQ ID NO: 2584088 - RNA, 18 nt, Human
gcugaaauucuccuggag

SEQ ID NO: 2584089 - RNA, 17 nt, Human
gcugaaauucuccugga

SEQ ID NO: 2584090 - RNA, 16 nt, Human
gcugaaaugcugcauu

SEQ ID NO: 2584091 - RNA, 17 nt, Human
gcugaagcugccugcuu

SEQ ID NO: 2584092 - RNA, 16 nt, Human
gcugaagcugccugcu

SEQ ID NO: 2584093 - RNA, 19 nt, Human
gcugaaggaaaccagugca

SEQ ID NO: 2584094 - RNA, 14 nt, Human
gcugaaggacugug

SEQ ID NO: 2584095 - RNA, 13 nt, Human
gcugaaggacugu

SEQ ID NO: 2584096 - RNA, 12 nt, Human
gcugaaggacug

SEQ ID NO: 2584097 - RNA, 20 nt, Human
gcugaacacuccaauuaagg

SEQ ID NO: 2584098 - RNA, 21 nt, Human
gcugaacacuccaauuaagga

SEQ ID NO: 2584099 - RNA, 18 nt, Human
gcugaagauggcauccug

SEQ ID NO: 2584100 - RNA, 15 nt, Human
gcugaagcugccugc

SEQ ID NO: 2584101 - RNA, 13 nt, Human
gcugaagcugccu

SEQ ID NO: 2584102 - RNA, 20 nt, Human
gcugaaggcucgagcaugcc

SEQ ID NO: 2584103 - RNA, 12 nt, Human
gcugaaggcucg

SEQ ID NO: 2584104 - RNA, 17 nt, Human
gcugaaugguuuucaaa

SEQ ID NO: 2584105 - RNA, 22 nt, Human
gcugaauacagaggcaacugca

SEQ ID NO: 2584106 - RNA, 15 nt, Human
gcugaauccagauca

SEQ ID NO: 2584107 - RNA, 17 nt, Human
gcugaauguugggacug

SEQ ID NO: 2584108 - RNA, 22 nt, Human
gcugaaggacugugacaggcag

SEQ ID NO: 2584109 - RNA, 21 nt, Human
gcugaaggacugugacaggca

SEQ ID NO: 2584110 - RNA, 19 nt, Human
gcugaauaggcgaucacaa

SEQ ID NO: 2584111 - RNA, 23 nt, Human
gcugaauguugggacugcuaaau

SEQ ID NO: 2584112 - RNA, 20 nt, Human
gcugaauguugggacugcua

SEQ ID NO: 2584113 - RNA, 23 nt, Human
gcugaaggacugugacaggcagc

SEQ ID NO: 2584114 - RNA, 14 nt, Human
gcugaauuaucuau

SEQ ID NO: 2584115 - RNA, 15 nt, Human
gcugacagacacagg

SEQ ID NO: 2584116 - RNA, 14 nt, Human
gcugacagacacag

SEQ ID NO: 2584117 - RNA, 14 nt, Human
gcugagcucucugu

SEQ ID NO: 2584118 - RNA, 14 nt, Human
gcugagcgccagga

SEQ ID NO: 2584119 - RNA, 23 nt, Human
gcugagcgaggagaugcuccuug

SEQ ID NO: 2584120 - RNA, 16 nt, Human
gcugacagacacaggc

SEQ ID NO: 2584121 - RNA, 18 nt, Human
gcucuuagcagcuuccag

SEQ ID NO: 2584122 - RNA, 17 nt, Human
gcucuuagcagcuucca

SEQ ID NO: 2584123 - RNA, 19 nt, Human
gcucuuagcagcuuccaga

SEQ ID NO: 2584124 - RNA, 19 nt, Human
gcucuuaauuguucauuuu

SEQ ID NO: 2584125 - RNA, 16 nt, Human
gcucuuagcagcuucc

SEQ ID NO: 2584126 - RNA, 12 nt, Human
gcucuuccaggc

SEQ ID NO: 2584127 - RNA, 12 nt, Human
gcucuucaggcc

SEQ ID NO: 2584128 - RNA, 15 nt, Human
gcucuucaggccucc

SEQ ID NO: 2584129 - RNA, 18 nt, Human
gcucuucaggccucccuc

SEQ ID NO: 2584130 - RNA, 16 nt, Human
gcucuuccaggcuggg

SEQ ID NO: 2584131 - RNA, 15 nt, Human
gcucuuccaggcugg

SEQ ID NO: 2584132 - RNA, 14 nt, Human
gcucuucauguuuc

SEQ ID NO: 2584133 - RNA, 12 nt, Human
gcugaaauacug

SEQ ID NO: 2584134 - RNA, 19 nt, Human
gcucuucauaauucuaaga

SEQ ID NO: 2584135 - RNA, 17 nt, Human
gcucuucauaauucuaa

SEQ ID NO: 2584136 - RNA, 19 nt, Human
gcucuucagugggagaaaa

SEQ ID NO: 2584137 - RNA, 16 nt, Human
gcugaaauucuccugg

SEQ ID NO: 2584138 - RNA, 15 nt, Human
gcugaaauucuccug

SEQ ID NO: 2584139 - RNA, 14 nt, Human
gcugaaauucuccu

SEQ ID NO: 2584140 - RNA, 15 nt, Human
gcugaaaugcugcau

SEQ ID NO: 2584141 - RNA, 20 nt, Human
gcugaaauacugaggggucu

SEQ ID NO: 2584142 - RNA, 15 nt, Human
gcucugggagaggau

SEQ ID NO: 2584143 - RNA, 22 nt, Human
gcucuggcugaacccugugcug

SEQ ID NO: 2584144 - RNA, 19 nt, Human
gcucugucgcccaggcugg

SEQ ID NO: 2584145 - RNA, 16 nt, Human
gcucuguccugggagu

SEQ ID NO: 2584146 - RNA, 17 nt, Human
gcucuguguugccaugu

SEQ ID NO: 2584147 - RNA, 14 nt, Human
gcucuguccuggga

SEQ ID NO: 2584148 - RNA, 15 nt, Human
gcucuguccugggag

SEQ ID NO: 2584149 - RNA, 21 nt, Human
gcucuggcugaacccugugcu

SEQ ID NO: 2584150 - RNA, 20 nt, Human
gcucuggcugaacccugugc

SEQ ID NO: 2584151 - RNA, 19 nt, Human
gcucuggcugaacccugug

SEQ ID NO: 2584152 - RNA, 16 nt, Human
gcucuggcugaacccu

SEQ ID NO: 2584153 - RNA, 15 nt, Human
gcucuggcugaaccc

SEQ ID NO: 2584154 - RNA, 22 nt, Human
gcucugccaacuucuucagagc

SEQ ID NO: 2584155 - RNA, 11 nt, Human
gcucuggcuga

SEQ ID NO: 2584156 - RNA, 21 nt, Human
gccaugguacccccuucuggg

SEQ ID NO: 2584157 - RNA, 20 nt, Human
gccaugguacccccuucugg

SEQ ID NO: 2584158 - RNA, 22 nt, Human
gccauauugcacaugucuuaau

SEQ ID NO: 2584159 - RNA, 21 nt, Human
gccauauugcacaugucuuaa

SEQ ID NO: 2584160 - RNA, 18 nt, Human
gccauguagaagcugcau

SEQ ID NO: 2584161 - RNA, 16 nt, Human
gccauguagaagcugc

SEQ ID NO: 2584162 - RNA, 15 nt, Human
gccauguagaagcug

SEQ ID NO: 2584163 - RNA, 20 nt, Human
gccauauucuguuggccagu

SEQ ID NO: 2584164 - RNA, 19 nt, Human
gccauauucuguuggccag

SEQ ID NO: 2584165 - RNA, 22 nt, Human
gccaugucugggaacagggacg

SEQ ID NO: 2584166 - RNA, 14 nt, Human
gccauguuggccag

SEQ ID NO: 2584167 - RNA, 15 nt, Human
gccaugugaagaggg

SEQ ID NO: 2584168 - RNA, 17 nt, Human
gccaugugaagagggag

SEQ ID NO: 2584169 - RNA, 18 nt, Human
gccauguuggccaggcug

SEQ ID NO: 2584170 - RNA, 17 nt, Human
gccauguuggccaggcu

SEQ ID NO: 2584171 - RNA, 16 nt, Human
gccauguuggccaggc

SEQ ID NO: 2584172 - RNA, 15 nt, Human
gccauguuggccagg

SEQ ID NO: 2584173 - RNA, 17 nt, Human
gcccacgcuggagugca

SEQ ID NO: 2584174 - RNA, 16 nt, Human
gcccacgcuggagugc

SEQ ID NO: 2584175 - RNA, 17 nt, Human
gccauucugacucauau

SEQ ID NO: 2584176 - RNA, 15 nt, Human
gcccacgcuggagug

SEQ ID NO: 2584177 - RNA, 14 nt, Human
gcccacgcccccac

SEQ ID NO: 2584178 - RNA, 13 nt, Human
gcccacgccccca

SEQ ID NO: 2584179 - RNA, 17 nt, Human
gccauucuccacagcaa

SEQ ID NO: 2584180 - RNA, 18 nt, Human
gcccaccuuggcucaagu

SEQ ID NO: 2584181 - RNA, 24 nt, Human
gccauguuggccaggcuggucuca

SEQ ID NO: 2584182 - RNA, 22 nt, Human
gccauguuggccaggcuggucu

SEQ ID NO: 2584183 - RNA, 20 nt, Human
gccauguuggccaggcuggu

SEQ ID NO: 2584184 - RNA, 19 nt, Human
gccauguuggccaggcugg

SEQ ID NO: 2584185 - RNA, 17 nt, Human
gccauuccccgucucug

SEQ ID NO: 2584186 - RNA, 18 nt, Human
gccauuccccgucucugg

SEQ ID NO: 2584187 - RNA, 18 nt, Human
gccauucucaagcccugc

SEQ ID NO: 2584188 - RNA, 16 nt, Human
gccauucucaagcccu

SEQ ID NO: 2584189 - RNA, 22 nt, Human
gccauuccugguacccagccau

SEQ ID NO: 2584190 - RNA, 20 nt, Human
gccauuccugguacccagcc

SEQ ID NO: 2584191 - RNA, 18 nt, Human
gccauucacugcccccag

SEQ ID NO: 2584192 - RNA, 14 nt, Human
gccauuccaacagc

SEQ ID NO: 2584193 - RNA, 21 nt, Human
gccauucacuucauaauccag

SEQ ID NO: 2584194 - RNA, 22 nt, Human
gccauucacuucauaauccagu

SEQ ID NO: 2584195 - RNA, 19 nt, Human
gccauguuccaauaaacag

SEQ ID NO: 2584196 - RNA, 20 nt, Human
gccauguuccaauaaacagg

SEQ ID NO: 2584197 - RNA, 14 nt, Human
gccaggccuggguc

SEQ ID NO: 2584198 - RNA, 21 nt, Human
gccaggccucuuggcagucac

SEQ ID NO: 2584199 - RNA, 17 nt, Human
gccaggccucuuggcag

SEQ ID NO: 2584200 - RNA, 13 nt, Human
gccaggccgggcc

SEQ ID NO: 2584201 - RNA, 20 nt, Human
gccaggcccucugcccacuc

SEQ ID NO: 2584202 - RNA, 19 nt, Human
gccaggcccucugcccacu

SEQ ID NO: 2584203 - RNA, 20 nt, Human
gccaggccaccuccagaaac

SEQ ID NO: 2584204 - RNA, 19 nt, Human
gccaggccggcgagcccug

SEQ ID NO: 2584205 - RNA, 20 nt, Human
gccaggccggcgagcccugu

SEQ ID NO: 2584206 - RNA, 23 nt, Human
gccaggccggcgagcccugugga

SEQ ID NO: 2584207 - RNA, 21 nt, Human
gccaggcccucugcccacucc

SEQ ID NO: 2584208 - RNA, 17 nt, Human
gccaggcccucugccca

SEQ ID NO: 2584209 - RNA, 16 nt, Human
gccaggcccucugccc

SEQ ID NO: 2584210 - RNA, 19 nt, Human
gccaggccacuggccccug

SEQ ID NO: 2584211 - RNA, 15 nt, Human
gccaggcccucugcc

SEQ ID NO: 2584212 - RNA, 13 nt, Human
gccaggccagagg

SEQ ID NO: 2584213 - RNA, 24 nt, Human
gccaggaucaugguguaauaagac

SEQ ID NO: 2584214 - RNA, 22 nt, Human
gccaggaucaugguguaauaag

SEQ ID NO: 2584215 - RNA, 20 nt, Human
gccaggauggaacacggcca

SEQ ID NO: 2584216 - RNA, 19 nt, Human
gccaggccaccaggauggc

SEQ ID NO: 2584217 - RNA, 16 nt, Human
gccaggccaccaggau

SEQ ID NO: 2584218 - RNA, 15 nt, Human
gccaggccaccagga

SEQ ID NO: 2584219 - RNA, 12 nt, Human
gccaggccagag

SEQ ID NO: 2584220 - RNA, 23 nt, Human
gccaggccacaagacccuugugg

SEQ ID NO: 2584221 - RNA, 19 nt, Human
gccaggaucaugguguaau

SEQ ID NO: 2584222 - RNA, 17 nt, Human
gccaggaucauggugua

SEQ ID NO: 2584223 - RNA, 19 nt, Human
gccaggaguuugagaccag

SEQ ID NO: 2584224 - RNA, 12 nt, Human
gccagccagcag

SEQ ID NO: 2584225 - RNA, 13 nt, Human
gccagccagcagc

SEQ ID NO: 2584226 - RNA, 14 nt, Human
gccagccagcagcc

SEQ ID NO: 2584227 - RNA, 20 nt, Human
gccaggagcucuucaggccu

SEQ ID NO: 2584228 - RNA, 16 nt, Human
gccaggaggccaggcu

SEQ ID NO: 2584229 - RNA, 23 nt, Human
gccaggagcugggcagaaggcca

SEQ ID NO: 2584230 - RNA, 22 nt, Human
gccaggagcugggcagaaggcc

SEQ ID NO: 2584231 - RNA, 13 nt, Human
gccaggagcuggg

SEQ ID NO: 2584232 - RNA, 22 nt, Human
gccaggagcucuucaggccucc

SEQ ID NO: 2584233 - RNA, 23 nt, Human
gccagcaggcucucaggccagcu

SEQ ID NO: 2584234 - RNA, 21 nt, Human
gccagcaggcucucaggccag

SEQ ID NO: 2584235 - RNA, 20 nt, Human
gccagcaggcucucaggcca

SEQ ID NO: 2584236 - RNA, 19 nt, Human
gccagcaggcucucaggcc

SEQ ID NO: 2584237 - RNA, 18 nt, Human
gccagcaggcucucaggc

SEQ ID NO: 2584238 - RNA, 17 nt, Human
gccagcaggcucucagg

SEQ ID NO: 2584239 - RNA, 16 nt, Human
gccagcaggcucucag

SEQ ID NO: 2584240 - RNA, 13 nt, Human
gccagcaggcucu

SEQ ID NO: 2584241 - RNA, 16 nt, Human
gccagcagccagcucu

SEQ ID NO: 2584242 - RNA, 17 nt, Human
gccagcagccagcucuc

SEQ ID NO: 2584243 - RNA, 18 nt, Human
gccagcagccagcucuca

SEQ ID NO: 2584244 - RNA, 19 nt, Human
gccagcagccagcucucag

SEQ ID NO: 2584245 - RNA, 20 nt, Human
gccagcagccagcucucagc

SEQ ID NO: 2584246 - RNA, 21 nt, Human
gccagcagccagcucucagcc

SEQ ID NO: 2584247 - RNA, 22 nt, Human
gccagcagccagcucucagcca

SEQ ID NO: 2584248 - RNA, 23 nt, Human
gccagcagccagcucucagccaa

SEQ ID NO: 2584249 - RNA, 16 nt, Human
gccagcacuuguauau

SEQ ID NO: 2584250 - RNA, 15 nt, Human
gccagcacuuguaua

SEQ ID NO: 2584251 - RNA, 14 nt, Human
gccagcaccuggca

SEQ ID NO: 2584252 - RNA, 14 nt, Human
gccagcacuugucc

SEQ ID NO: 2584253 - RNA, 19 nt, Human
gccagcacuuguccagcug

SEQ ID NO: 2584254 - RNA, 14 nt, Human
gccagcagacauug

SEQ ID NO: 2584255 - RNA, 13 nt, Human
gccagcagacauu

SEQ ID NO: 2584256 - RNA, 20 nt, Human
gccagcacuuguccagcuga

SEQ ID NO: 2584257 - RNA, 16 nt, Human
gccagcagacauuguc

SEQ ID NO: 2584258 - RNA, 15 nt, Human
gccagcagacauugu

SEQ ID NO: 2584259 - RNA, 17 nt, Human
gccagcagacauuguca

SEQ ID NO: 2584260 - RNA, 12 nt, Human
gccagcagccag

SEQ ID NO: 2584261 - RNA, 13 nt, Human
gccagcagccagc

SEQ ID NO: 2584262 - RNA, 15 nt, Human
gccagcagccagcuc

SEQ ID NO: 2584263 - RNA, 15 nt, Human
gccagcacacagggc

SEQ ID NO: 2584264 - RNA, 16 nt, Human
gccagcacacagggca

SEQ ID NO: 2584265 - RNA, 17 nt, Human
gccagcacacagggcag

SEQ ID NO: 2584266 - RNA, 18 nt, Human
gccagcacacagggcagu

SEQ ID NO: 2584267 - RNA, 22 nt, Human
gccagcacagaaacagaggaga

SEQ ID NO: 2584268 - RNA, 20 nt, Human
gccagcacagaaacagagga

SEQ ID NO: 2584269 - RNA, 22 nt, Human
gccagcacacagggcagugagg

SEQ ID NO: 2584270 - RNA, 22 nt, Human
gccagcaaugauguccagaaga

SEQ ID NO: 2584271 - RNA, 21 nt, Human
gccagcaaugauguccagaag

SEQ ID NO: 2584272 - RNA, 23 nt, Human
gccagcaaugacaucucaggggc

SEQ ID NO: 2584273 - RNA, 20 nt, Human
gccagcaaugacaucucagg

SEQ ID NO: 2584274 - RNA, 12 nt, Human
gccagcacacag

SEQ ID NO: 2584275 - RNA, 13 nt, Human
gccagcacacagg

SEQ ID NO: 2584276 - RNA, 13 nt, Human
gccagcaacugaa

SEQ ID NO: 2584277 - RNA, 22 nt, Human
gccagcaaagccccaugcugga

SEQ ID NO: 2584278 - RNA, 16 nt, Human
gccagcaacugaauaa

SEQ ID NO: 2584279 - RNA, 14 nt, Human
gccagcaacugaau

SEQ ID NO: 2584280 - RNA, 13 nt, Human
gccagcaaugaca

SEQ ID NO: 2584281 - RNA, 23 nt, Human
gccagcaaagccccaugcuggag

SEQ ID NO: 2584282 - RNA, 16 nt, Human
gccagcaaagccccau

SEQ ID NO: 2584283 - RNA, 14 nt, Human
gccagcaaagcccc

SEQ ID NO: 2584284 - RNA, 22 nt, Human
gccagacggcacccacccagca

SEQ ID NO: 2584285 - RNA, 19 nt, Human
gccagacacucugcucugc

SEQ ID NO: 2584286 - RNA, 17 nt, Human
gccagacccccuggaga

SEQ ID NO: 2584287 - RNA, 16 nt, Human
gccagacacaggcccu

SEQ ID NO: 2584288 - RNA, 17 nt, Human
gccagacacaggcccuc

SEQ ID NO: 2584289 - RNA, 15 nt, Human
gccagaauuucaaac

SEQ ID NO: 2584290 - RNA, 21 nt, Human
gccagaaguuugucaagucaa

SEQ ID NO: 2584291 - RNA, 22 nt, Human
gccagacaucaacagauaaaua

SEQ ID NO: 2584292 - RNA, 15 nt, Human
gccagacacucugcu

SEQ ID NO: 2584293 - RNA, 13 nt, Human
gccagacacucug

SEQ ID NO: 2584294 - RNA, 18 nt, Human
gccagacaugccacaagg

SEQ ID NO: 2584295 - RNA, 14 nt, Human
gccagacauguggu

SEQ ID NO: 2584296 - RNA, 18 nt, Human
gccagaagauccccucag

SEQ ID NO: 2584297 - RNA, 17 nt, Human
gccagaagauccccuca

SEQ ID NO: 2584298 - RNA, 22 nt, Human
gccagaacguggcucugcuggc

SEQ ID NO: 2584299 - RNA, 20 nt, Human
gccagaacguggcucugcug

SEQ ID NO: 2584300 - RNA, 18 nt, Human
gccagaacguggcucugc

SEQ ID NO: 2584301 - RNA, 17 nt, Human
gccagaaccuggagggc

SEQ ID NO: 2584302 - RNA, 12 nt, Human
gccagaagcuga

SEQ ID NO: 2584303 - RNA, 19 nt, Human
gccagaagauccccucagg

SEQ ID NO: 2584304 - RNA, 18 nt, Human
gccagaagggggccauga

SEQ ID NO: 2584305 - RNA, 21 nt, Human
gccagaagcugagcaccaggg

SEQ ID NO: 2584306 - RNA, 22 nt, Human
gccacauuuggaauacuuuuug

SEQ ID NO: 2584307 - RNA, 16 nt, Human
gccacauugggcagcg

SEQ ID NO: 2584308 - RNA, 19 nt, Human
gccacauuuggaauacuuu

SEQ ID NO: 2584309 - RNA, 20 nt, Human
gccacauggggcugggcagc

SEQ ID NO: 2584310 - RNA, 15 nt, Human
gccacaugggaggcu

SEQ ID NO: 2584311 - RNA, 14 nt, Human
gccacauuuggaau

SEQ ID NO: 2584312 - RNA, 17 nt, Human
gccacauggggcugggc

SEQ ID NO: 2584313 - RNA, 20 nt, Human
gccacauuccugaugcuucu

SEQ ID NO: 2584314 - RNA, 16 nt, Human
gccacauuccugaugc

SEQ ID NO: 2584315 - RNA, 22 nt, Human
gccacauggcuuccuccugcgc

SEQ ID NO: 2584316 - RNA, 21 nt, Human
gccacauggcuuccuccugcg

SEQ ID NO: 2584317 - RNA, 20 nt, Human
gccacaugagucccaguggg

SEQ ID NO: 2584318 - RNA, 17 nt, Human
gccaccaggcuggcgca

SEQ ID NO: 2584319 - RNA, 16 nt, Human
gccaccaggcuggcgc

SEQ ID NO: 2584320 - RNA, 14 nt, Human
gccaccaggcuggc

SEQ ID NO: 2584321 - RNA, 13 nt, Human
gccaccaggcugg

SEQ ID NO: 2584322 - RNA, 12 nt, Human
gccaccaggcug

SEQ ID NO: 2584323 - RNA, 17 nt, Human
gccaccaggauggcccu

SEQ ID NO: 2584324 - RNA, 20 nt, Human
gccaccaggccaccucccca

SEQ ID NO: 2584325 - RNA, 18 nt, Human
gccaccaggccaccuccc

SEQ ID NO: 2584326 - RNA, 15 nt, Human
gccaccaggccaccu

SEQ ID NO: 2584327 - RNA, 12 nt, Human
gccaccaggaug

SEQ ID NO: 2584328 - RNA, 12 nt, Human
gccaccaggcca

SEQ ID NO: 2584329 - RNA, 23 nt, Human
gccaccagagaccguccucaccc

SEQ ID NO: 2584330 - RNA, 22 nt, Human
gccaccagagaccguccucacc

SEQ ID NO: 2584331 - RNA, 21 nt, Human
gccaccagagaccguccucac

SEQ ID NO: 2584332 - RNA, 19 nt, Human
gccaccagagaccguccuc

SEQ ID NO: 2584333 - RNA, 10 nt, Human
gccaccagcg

SEQ ID NO: 2584334 - RNA, 12 nt, Human
gccaccagagac

SEQ ID NO: 2584335 - RNA, 16 nt, Human
gccaccacguccagcu

SEQ ID NO: 2584336 - RNA, 14 nt, Human
gccaccacguccag

SEQ ID NO: 2584337 - RNA, 15 nt, Human
gccaccacguccagc

SEQ ID NO: 2584338 - RNA, 15 nt, Human
gccaccauccugcug

SEQ ID NO: 2584339 - RNA, 14 nt, Human
gccaccauccugcu

SEQ ID NO: 2584340 - RNA, 17 nt, Human
gccaccauccugcagcc

SEQ ID NO: 2584341 - RNA, 12 nt, Human
gccaccauccug

SEQ ID NO: 2584342 - RNA, 16 nt, Human
gccaccaugcccagcu

SEQ ID NO: 2584343 - RNA, 22 nt, Human
gccaccaugcccagcucagagg

SEQ ID NO: 2584344 - RNA, 14 nt, Human
gccaccauggccag

SEQ ID NO: 2584345 - RNA, 16 nt, Human
gccaccauggccagcc

SEQ ID NO: 2584346 - RNA, 17 nt, Human
gccaccauggccagcca

SEQ ID NO: 2584347 - RNA, 18 nt, Human
gccaccauggccagccaa

SEQ ID NO: 2584348 - RNA, 19 nt, Human
gccaccaggcuggcgcagc

SEQ ID NO: 2584349 - RNA, 18 nt, Human
gccaccaggcuggcgcag

SEQ ID NO: 2584350 - RNA, 20 nt, Human
gccaccaggcuggcgcagcc

SEQ ID NO: 2584351 - RNA, 22 nt, Human
gccaccauauucagugcugugg

SEQ ID NO: 2584352 - RNA, 18 nt, Human
gccaccauccuauugcaa

SEQ ID NO: 2584353 - RNA, 16 nt, Human
gccaccagucacuguc

SEQ ID NO: 2584354 - RNA, 23 nt, Human
gccaccauauucagugcuguggc

SEQ ID NO: 2584355 - RNA, 21 nt, Human
gccaccaacauacucccaucu

SEQ ID NO: 2584356 - RNA, 20 nt, Human
gccaccaacauacucccauc

SEQ ID NO: 2584357 - RNA, 19 nt, Human
gccaccaacauacucccau

SEQ ID NO: 2584358 - RNA, 16 nt, Human
gccaccaaaggccagg

SEQ ID NO: 2584359 - RNA, 17 nt, Human
gccaccaaaggccaggg

SEQ ID NO: 2584360 - RNA, 13 nt, Human
gccaccacgcccg

SEQ ID NO: 2584361 - RNA, 22 nt, Human
gccaccaagagggacgccuggg

SEQ ID NO: 2584362 - RNA, 13 nt, Human
gccaccacccccc

SEQ ID NO: 2584363 - RNA, 14 nt, Human
gccaccacgcccgg

SEQ ID NO: 2584364 - RNA, 22 nt, Human
gccaccaccccccacucugugc

SEQ ID NO: 2584365 - RNA, 16 nt, Human
gccaccaccccccacu

SEQ ID NO: 2584366 - RNA, 22 nt, Human
gccaccaacauacucccaucug

SEQ ID NO: 2584367 - RNA, 14 nt, Human
gccaccaagaggga

SEQ ID NO: 2584368 - RNA, 19 nt, Human
gccaccaagagggacgccu

SEQ ID NO: 2584369 - RNA, 22 nt, Human
gccaccaacucuugcaggucuc

SEQ ID NO: 2584370 - RNA, 12 nt, Human
gccaccaacucu

SEQ ID NO: 2584371 - RNA, 17 nt, Human
gccacugccucuuccuc

SEQ ID NO: 2584372 - RNA, 16 nt, Human
gccacugccucuuccu

SEQ ID NO: 2584373 - RNA, 13 nt, Human
gccacugccucuu

SEQ ID NO: 2584374 - RNA, 12 nt, Human
gccacugccucu

SEQ ID NO: 2584375 - RNA, 13 nt, Human
gccacugcugcuu

SEQ ID NO: 2584376 - RNA, 22 nt, Human
gccacugccuucgcuucuugcc

SEQ ID NO: 2584377 - RNA, 16 nt, Human
gccacuggccaucucc

SEQ ID NO: 2584378 - RNA, 12 nt, Human
gccacuggccau

SEQ ID NO: 2584379 - RNA, 23 nt, Human
gccacugccuucgcuucuugccu

SEQ ID NO: 2584380 - RNA, 18 nt, Human
gccacugccuucgcuucu

SEQ ID NO: 2584381 - RNA, 19 nt, Human
gccacugcccgagcuggug

SEQ ID NO: 2584382 - RNA, 21 nt, Human
gccacugcccgagcuggugca

SEQ ID NO: 2584383 - RNA, 17 nt, Human
gccacuggccaucucca

SEQ ID NO: 2584384 - RNA, 18 nt, Human
gccacugugaagagaacc

SEQ ID NO: 2584385 - RNA, 19 nt, Human
gccacugugaagagaacca

SEQ ID NO: 2584386 - RNA, 23 nt, Human
gccacuucuggguggggcagugg

SEQ ID NO: 2584387 - RNA, 21 nt, Human
gccacuugaugacccccaacc

SEQ ID NO: 2584388 - RNA, 20 nt, Human
gccacuucuggguggggcag

SEQ ID NO: 2584389 - RNA, 14 nt, Human
gccacuucugggug

SEQ ID NO: 2584390 - RNA, 15 nt, Human
gccacuucccaggua

SEQ ID NO: 2584391 - RNA, 22 nt, Human
gccacuuaccuucaauaaagua

SEQ ID NO: 2584392 - RNA, 23 nt, Human
gccacuuaccuucaauaaaguau

SEQ ID NO: 2584393 - RNA, 18 nt, Human
gccacuuaaaauguucac

SEQ ID NO: 2584394 - RNA, 14 nt, Human
gccacuuaccuuca

SEQ ID NO: 2584395 - RNA, 19 nt, Human
gccacuuaccuucaauaaa

SEQ ID NO: 2584396 - RNA, 21 nt, Human
gccacuuaccuucaauaaagu

SEQ ID NO: 2584397 - RNA, 13 nt, Human
gccacuucccagg

SEQ ID NO: 2584398 - RNA, 19 nt, Human
gccacuuugcaaaggagcu

SEQ ID NO: 2584399 - RNA, 21 nt, Human
gccacuuugguacauggccag

SEQ ID NO: 2584400 - RNA, 22 nt, Human
gccacuuugguacauggccagu

SEQ ID NO: 2584401 - RNA, 23 nt, Human
gccacuuugguacauggccagug

SEQ ID NO: 2584402 - RNA, 23 nt, Human
gccacuuuugacuagggauucag

SEQ ID NO: 2584403 - RNA, 12 nt, Human
gccagaaauaaa

SEQ ID NO: 2584404 - RNA, 16 nt, Human
gccagaacaguuugua

SEQ ID NO: 2584405 - RNA, 18 nt, Human
gccagaacaguuuguaca

SEQ ID NO: 2584406 - RNA, 20 nt, Human
gccagaaaaacguguugccu

SEQ ID NO: 2584407 - RNA, 10 nt, Human
gccagaaaaa

SEQ ID NO: 2584408 - RNA, 21 nt, Human
gccacccugggcucugugggc

SEQ ID NO: 2584409 - RNA, 19 nt, Human
gccacccugggcucugugg

SEQ ID NO: 2584410 - RNA, 18 nt, Human
gccacccugggcucugug

SEQ ID NO: 2584411 - RNA, 17 nt, Human
gccacccugggcucugu

SEQ ID NO: 2584412 - RNA, 16 nt, Human
gccaccgccuccuaca

SEQ ID NO: 2584413 - RNA, 23 nt, Human
gccacugcaccgggccacagaga

SEQ ID NO: 2584414 - RNA, 19 nt, Human
gccacccuggggagaaagu

SEQ ID NO: 2584415 - RNA, 13 nt, Human
gccacccugggga

SEQ ID NO: 2584416 - RNA, 18 nt, Human
gccacugcacuccagccu

SEQ ID NO: 2584417 - RNA, 21 nt, Human
gccacugcacuauagccuagg

SEQ ID NO: 2584418 - RNA, 19 nt, Human
gccacugcacuccagccug

SEQ ID NO: 2584419 - RNA, 20 nt, Human
gccacugcacuccagccugg

SEQ ID NO: 2584420 - RNA, 21 nt, Human
gccacugcacuccagccuggg

SEQ ID NO: 2584421 - RNA, 22 nt, Human
gccacugcacuccagccugggc

SEQ ID NO: 2584422 - RNA, 16 nt, Human
gccacugcccgagcug

SEQ ID NO: 2584423 - RNA, 17 nt, Human
gccacugcccgagcugg

SEQ ID NO: 2584424 - RNA, 18 nt, Human
gccacugcccgagcuggu

SEQ ID NO: 2584425 - RNA, 15 nt, Human
gccacugcacuccgg

SEQ ID NO: 2584426 - RNA, 22 nt, Human
gccaccgccgacuuuguacccc

SEQ ID NO: 2584427 - RNA, 19 nt, Human
gccacugcauaccaaccug

SEQ ID NO: 2584428 - RNA, 18 nt, Human
gccaccccacccucccug

SEQ ID NO: 2584429 - RNA, 15 nt, Human
gccaccccacccucc

SEQ ID NO: 2584430 - RNA, 16 nt, Human
gccacccaccucccug

SEQ ID NO: 2584431 - RNA, 17 nt, Human
gccacccaccucccugc

SEQ ID NO: 2584432 - RNA, 18 nt, Human
gccacccaccucccugcc

SEQ ID NO: 2584433 - RNA, 21 nt, Human
gccacccaccucccugccucc

SEQ ID NO: 2584434 - RNA, 16 nt, Human
gccaccauuccuggaa

SEQ ID NO: 2584435 - RNA, 14 nt, Human
gccaccauuccugg

SEQ ID NO: 2584436 - RNA, 22 nt, Human
gccaccauuccuggaaaccaca

SEQ ID NO: 2584437 - RNA, 22 nt, Human
gccaccccacccucccuggagu

SEQ ID NO: 2584438 - RNA, 21 nt, Human
gccaccccacccucccuggag

SEQ ID NO: 2584439 - RNA, 20 nt, Human
gccaccccacccucccugga

SEQ ID NO: 2584440 - RNA, 18 nt, Human
gccaccccgggcucucug

SEQ ID NO: 2584441 - RNA, 19 nt, Human
gccaccccgggcucucugc

SEQ ID NO: 2584442 - RNA, 19 nt, Human
gccacccuaccuguucagu

SEQ ID NO: 2584443 - RNA, 13 nt, Human
gccacccuaccug

SEQ ID NO: 2584444 - RNA, 23 nt, Human
gccacccguucugcuggccugga

SEQ ID NO: 2584445 - RNA, 18 nt, Human
gccacccuaccuguucag

SEQ ID NO: 2584446 - RNA, 13 nt, Human
gccacccucaugc

SEQ ID NO: 2584447 - RNA, 15 nt, Human
gccaccccuccuucc

SEQ ID NO: 2584448 - RNA, 21 nt, Human
gccaccccgggcucucugcug

SEQ ID NO: 2584449 - RNA, 22 nt, Human
gccacccguucugcuggccugg

SEQ ID NO: 2584450 - RNA, 21 nt, Human
gccacccguucugcuggccug

SEQ ID NO: 2584451 - RNA, 18 nt, Human
gccacccguucugcuggc

SEQ ID NO: 2584452 - RNA, 16 nt, Human
gccaccccuccuuccu

SEQ ID NO: 2584453 - RNA, 15 nt, Human
gccacccucaugcug

SEQ ID NO: 2584454 - RNA, 16 nt, Human
gccacccucaugcugu

SEQ ID NO: 2584455 - RNA, 14 nt, Human
gccacccugggcuc

SEQ ID NO: 2584456 - RNA, 13 nt, Human
gccacccugggcu

SEQ ID NO: 2584457 - RNA, 12 nt, Human
gccacccugggc

SEQ ID NO: 2584458 - RNA, 18 nt, Human
gcacuuggagacuuguau

SEQ ID NO: 2584459 - RNA, 13 nt, Human
gcacuuggagcca

SEQ ID NO: 2584460 - RNA, 16 nt, Human
gcacuuggagccaagg

SEQ ID NO: 2584461 - RNA, 15 nt, Human
gcacuuggcugcaua

SEQ ID NO: 2584462 - RNA, 14 nt, Human
gcacuuggccucug

SEQ ID NO: 2584463 - RNA, 16 nt, Human
gcacuuggagaggcug

SEQ ID NO: 2584464 - RNA, 22 nt, Human
gcacuuggagccaaggguucag

SEQ ID NO: 2584465 - RNA, 16 nt, Human
gcccugccugagggcc

SEQ ID NO: 2584466 - RNA, 15 nt, Human
gcccugccugagggc

SEQ ID NO: 2584467 - RNA, 23 nt, Human
gcccugcugagucccaggcugag

SEQ ID NO: 2584468 - RNA, 21 nt, Human
gcccugcugagucccaggcug

SEQ ID NO: 2584469 - RNA, 22 nt, Human
gcccugcugagucccaggcuga

SEQ ID NO: 2584470 - RNA, 13 nt, Human
gcccuguuaaaag

SEQ ID NO: 2584471 - RNA, 21 nt, Human
gcccugcugccgccucccagc

SEQ ID NO: 2584472 - RNA, 22 nt, Human
gcccugcugccgccucccagcc

SEQ ID NO: 2584473 - RNA, 23 nt, Human
gcccugcugccgccucccagccu

SEQ ID NO: 2584474 - RNA, 14 nt, Human
gcccuguuaaaaga

SEQ ID NO: 2584475 - RNA, 17 nt, Human
gcccuguuaaaagauga

SEQ ID NO: 2584476 - RNA, 17 nt, Human
gcccuguucagcuacuc

SEQ ID NO: 2584477 - RNA, 22 nt, Human
gcccugcugcugacccagccug

SEQ ID NO: 2584478 - RNA, 21 nt, Human
gcccugugggcccccaaaugg

SEQ ID NO: 2584479 - RNA, 22 nt, Human
gcccuguucucuaccaagcuau

SEQ ID NO: 2584480 - RNA, 20 nt, Human
gcccuguucagcuacuccca

SEQ ID NO: 2584481 - RNA, 16 nt, Human
gcccuguugacacagg

SEQ ID NO: 2584482 - RNA, 21 nt, Human
gcccuguugacacaggucuuu

SEQ ID NO: 2584483 - RNA, 19 nt, Human
gcccuguugacacaggucu

SEQ ID NO: 2584484 - RNA, 22 nt, Human
gcccugccuccuuugugaggaa

SEQ ID NO: 2584485 - RNA, 16 nt, Human
gcccugccuccuuugu

SEQ ID NO: 2584486 - RNA, 14 nt, Human
gcccugccugaggg

SEQ ID NO: 2584487 - RNA, 13 nt, Human
gcccugccugagg

SEQ ID NO: 2584488 - RNA, 12 nt, Human
gcccugccugag

SEQ ID NO: 2584489 - RNA, 11 nt, Human
gcccugccuga

SEQ ID NO: 2584490 - RNA, 16 nt, Human
gcccugcugaguccca

SEQ ID NO: 2584491 - RNA, 15 nt, Human
gcccugccucuguuu

SEQ ID NO: 2584492 - RNA, 13 nt, Human
gcccugccucugu

SEQ ID NO: 2584493 - RNA, 14 nt, Human
gcccugccuccuuu

SEQ ID NO: 2584494 - RNA, 15 nt, Human
gccgcugagcgagga

SEQ ID NO: 2584495 - RNA, 17 nt, Human
gccgcugagcgaggaga

SEQ ID NO: 2584496 - RNA, 16 nt, Human
gccgcugaguggcagg

SEQ ID NO: 2584497 - RNA, 12 nt, Human
gccgcugccacc

SEQ ID NO: 2584498 - RNA, 14 nt, Human
gccgcugccaccca

SEQ ID NO: 2584499 - RNA, 12 nt, Human
gccgcugccacg

SEQ ID NO: 2584500 - RNA, 19 nt, Human
gccgcugcccggcgcccuc

SEQ ID NO: 2584501 - RNA, 17 nt, Human
gccgcugccacccaccu

SEQ ID NO: 2584502 - RNA, 17 nt, Human
gccgcugugagccccug

SEQ ID NO: 2584503 - RNA, 12 nt, Human
gccgcugugagc

SEQ ID NO: 2584504 - RNA, 23 nt, Human
gccgcugugagccccugguccug

SEQ ID NO: 2584505 - RNA, 15 nt, Human
gccgcuguucaccca

SEQ ID NO: 2584506 - RNA, 15 nt, Human
gccggcauggcuggg

SEQ ID NO: 2584507 - RNA, 12 nt, Human
gccggccagccc

SEQ ID NO: 2584508 - RNA, 14 nt, Human
gccggccagccccu

SEQ ID NO: 2584509 - RNA, 16 nt, Human
gccgcuuuucuccucu

SEQ ID NO: 2584510 - RNA, 16 nt, Human
gccgcuguucacccac

SEQ ID NO: 2584511 - RNA, 17 nt, Human
gccgcuguucacccaca

SEQ ID NO: 2584512 - RNA, 17 nt, Human
gccgccucgcccaccgc

SEQ ID NO: 2584513 - RNA, 16 nt, Human
gccgccucgcccaccg

SEQ ID NO: 2584514 - RNA, 15 nt, Human
gccgccucgcccacc

SEQ ID NO: 2584515 - RNA, 13 nt, Human
gccgccucgccca

SEQ ID NO: 2584516 - RNA, 19 nt, Human
gccgccucccagccugggg

SEQ ID NO: 2584517 - RNA, 23 nt, Human
gccgccugcccgucucucuccca

SEQ ID NO: 2584518 - RNA, 15 nt, Human
gccgccugguacuca

SEQ ID NO: 2584519 - RNA, 13 nt, Human
gccgccugguacu

SEQ ID NO: 2584520 - RNA, 22 nt, Human
gccgcucggaggccccaaagga

SEQ ID NO: 2584521 - RNA, 21 nt, Human
gccgcucggaggccccaaagg

SEQ ID NO: 2584522 - RNA, 20 nt, Human
gccgcucggaggccccaaag

SEQ ID NO: 2584523 - RNA, 18 nt, Human
gccgcucggaggccccaa

SEQ ID NO: 2584524 - RNA, 17 nt, Human
gccgcucggaggcccca

SEQ ID NO: 2584525 - RNA, 16 nt, Human
gccgcucggaggcccc

SEQ ID NO: 2584526 - RNA, 15 nt, Human
gccgcucggaggccc

SEQ ID NO: 2584527 - RNA, 23 nt, Human
gccgcuccugucugccagccagc

SEQ ID NO: 2584528 - RNA, 18 nt, Human
gccgccugguacucaagc

SEQ ID NO: 2584529 - RNA, 20 nt, Human
gcccuuaccugccaggaagc

SEQ ID NO: 2584530 - RNA, 16 nt, Human
gcccuuaccugccagg

SEQ ID NO: 2584531 - RNA, 15 nt, Human
gccgccaugcuccug

SEQ ID NO: 2584532 - RNA, 20 nt, Human
gcccuuacacuuacuguugu

SEQ ID NO: 2584533 - RNA, 16 nt, Human
gcccuuacacuuacug

SEQ ID NO: 2584534 - RNA, 17 nt, Human
gcccuguuguguauaga

SEQ ID NO: 2584535 - RNA, 20 nt, Human
gcccuguugacacaggucuu

SEQ ID NO: 2584536 - RNA, 16 nt, Human
gccgcauucccugagu

SEQ ID NO: 2584537 - RNA, 18 nt, Human
gccgcauucccugaguca

SEQ ID NO: 2584538 - RNA, 15 nt, Human
gccgcauucccugag

SEQ ID NO: 2584539 - RNA, 16 nt, Human
gccgccaugcuccugg

SEQ ID NO: 2584540 - RNA, 16 nt, Human
gccgccauugccacca

SEQ ID NO: 2584541 - RNA, 17 nt, Human
gccgccauugccaccag

SEQ ID NO: 2584542 - RNA, 18 nt, Human
gccgccauugccaccagg

SEQ ID NO: 2584543 - RNA, 14 nt, Human
gccgccucccagcc

SEQ ID NO: 2584544 - RNA, 15 nt, Human
gccgccucccagccu

SEQ ID NO: 2584545 - RNA, 16 nt, Human
gccgccucccagccug

SEQ ID NO: 2584546 - RNA, 17 nt, Human
gccgccucccagccugg

SEQ ID NO: 2584547 - RNA, 12 nt, Human
gccgccucccag

SEQ ID NO: 2584548 - RNA, 13 nt, Human
gccgccucccagc

SEQ ID NO: 2584549 - RNA, 21 nt, Human
gccgccauugccaccaggaga

SEQ ID NO: 2584550 - RNA, 16 nt, Human
gccgccucacccccuc

SEQ ID NO: 2584551 - RNA, 21 nt, Human
gcccaugucgcgcucagcaug

SEQ ID NO: 2584552 - RNA, 20 nt, Human
gcccaugucgcgcucagcau

SEQ ID NO: 2584553 - RNA, 19 nt, Human
gcccaugucgcgcucagca

SEQ ID NO: 2584554 - RNA, 21 nt, Human
gcccaugggcacugcugggug

SEQ ID NO: 2584555 - RNA, 20 nt, Human
gcccaugggcacugcugggu

SEQ ID NO: 2584556 - RNA, 19 nt, Human
gcccaugggcacugcuggg

SEQ ID NO: 2584557 - RNA, 18 nt, Human
gcccaugggcacugcugg

SEQ ID NO: 2584558 - RNA, 23 nt, Human
gcccaugggcacugcuggguggc

SEQ ID NO: 2584559 - RNA, 22 nt, Human
gcccaugggcacugcugggugg

SEQ ID NO: 2584560 - RNA, 21 nt, Human
gcccaugguugagaaaugaau

SEQ ID NO: 2584561 - RNA, 20 nt, Human
gcccaugggagcugguuaga

SEQ ID NO: 2584562 - RNA, 17 nt, Human
gcccaugggcacugcug

SEQ ID NO: 2584563 - RNA, 16 nt, Human
gcccaugggcacugcu

SEQ ID NO: 2584564 - RNA, 15 nt, Human
gcccaugggcacugc

SEQ ID NO: 2584565 - RNA, 22 nt, Human
gcccauggcccucccaguaccu

SEQ ID NO: 2584566 - RNA, 18 nt, Human
gcccacugcccacccccu

SEQ ID NO: 2584567 - RNA, 16 nt, Human
gcccacugcccacccc

SEQ ID NO: 2584568 - RNA, 15 nt, Human
gcccacucccugcaa

SEQ ID NO: 2584569 - RNA, 14 nt, Human
gcccacucccugca

SEQ ID NO: 2584570 - RNA, 19 nt, Human
gcccacucccugcaaccug

SEQ ID NO: 2584571 - RNA, 17 nt, Human
gcccacucugcucgccu

SEQ ID NO: 2584572 - RNA, 14 nt, Human
gcccacguccuguc

SEQ ID NO: 2584573 - RNA, 13 nt, Human
gcccacguccugu

SEQ ID NO: 2584574 - RNA, 17 nt, Human
gcccacguagggcggca

SEQ ID NO: 2584575 - RNA, 16 nt, Human
gcccacguagggcggc

SEQ ID NO: 2584576 - RNA, 15 nt, Human
gcccacguagggcgg

SEQ ID NO: 2584577 - RNA, 17 nt, Human
gcccacuagacccacug

SEQ ID NO: 2584578 - RNA, 16 nt, Human
gcccacguccugucag

SEQ ID NO: 2584579 - RNA, 15 nt, Human
gcccacguccuguca

SEQ ID NO: 2584580 - RNA, 23 nt, Human
gcccacguccugucagugccgcc

SEQ ID NO: 2584581 - RNA, 13 nt, Human
gcccacucccugc

SEQ ID NO: 2584582 - RNA, 23 nt, Human
gcccacuagacccacuggacuca

SEQ ID NO: 2584583 - RNA, 18 nt, Human
gcccacuauggucaucuu

SEQ ID NO: 2584584 - RNA, 17 nt, Human
gcccauguguucccucu

SEQ ID NO: 2584585 - RNA, 20 nt, Human
gcccaugugugagugugugc

SEQ ID NO: 2584586 - RNA, 13 nt, Human
gcccaugugugag

SEQ ID NO: 2584587 - RNA, 14 nt, Human
gcccaugugugagu

SEQ ID NO: 2584588 - RNA, 15 nt, Human
gcccaugugugagug

SEQ ID NO: 2584589 - RNA, 18 nt, Human
gccccaaaacucuccucu

SEQ ID NO: 2584590 - RNA, 15 nt, Human
gccccaaaaccacag

SEQ ID NO: 2584591 - RNA, 16 nt, Human
gccccaaaaccacagc

SEQ ID NO: 2584592 - RNA, 19 nt, Human
gccccaaaaccacagcccu

SEQ ID NO: 2584593 - RNA, 20 nt, Human
gccccaaaaccacagcccug

SEQ ID NO: 2584594 - RNA, 21 nt, Human
gccccaaaaccacagcccugu

SEQ ID NO: 2584595 - RNA, 22 nt, Human
gccccaaaaccacagcccuguc

SEQ ID NO: 2584596 - RNA, 20 nt, Human
gcccccaguccccaccccug

SEQ ID NO: 2584597 - RNA, 18 nt, Human
gcccccaguccccacccc

SEQ ID NO: 2584598 - RNA, 17 nt, Human
gcccccaguccccaccc

SEQ ID NO: 2584599 - RNA, 15 nt, Human
gcccccaguccccac

SEQ ID NO: 2584600 - RNA, 16 nt, Human
gcccccaggugccagu

SEQ ID NO: 2584601 - RNA, 19 nt, Human
gccccaaaacucuccucug

SEQ ID NO: 2584602 - RNA, 18 nt, Human
gcccccaggacugggcca

SEQ ID NO: 2584603 - RNA, 17 nt, Human
gcccccaggacugggcc

SEQ ID NO: 2584604 - RNA, 23 nt, Human
gccccaaaaccacagcccuguca

SEQ ID NO: 2584605 - RNA, 22 nt, Human
gcccccagggcacuucacagag

SEQ ID NO: 2584606 - RNA, 20 nt, Human
gcccccagggcacuucacag

SEQ ID NO: 2584607 - RNA, 16 nt, Human
gcccccaggcugcugg

SEQ ID NO: 2584608 - RNA, 17 nt, Human
gcccccaggcugcugga

SEQ ID NO: 2584609 - RNA, 19 nt, Human
gcccccuccucucccaucc

SEQ ID NO: 2584610 - RNA, 21 nt, Human
gcccccuccucucccaucccc

SEQ ID NO: 2584611 - RNA, 17 nt, Human
gcccccuccucucccau

SEQ ID NO: 2584612 - RNA, 16 nt, Human
gcccccuccucuccca

SEQ ID NO: 2584613 - RNA, 15 nt, Human
gcccccuccucuccc

SEQ ID NO: 2584614 - RNA, 21 nt, Human
gcccccuccucuagcuguggg

SEQ ID NO: 2584615 - RNA, 20 nt, Human
gcccccuccucuagcugugg

SEQ ID NO: 2584616 - RNA, 19 nt, Human
gcccccuccucuagcugug

SEQ ID NO: 2584617 - RNA, 16 nt, Human
gcccccuccucuagcu

SEQ ID NO: 2584618 - RNA, 22 nt, Human
gcccccuccgcccugccacuca

SEQ ID NO: 2584619 - RNA, 20 nt, Human
gcccccuccgcccugccacu

SEQ ID NO: 2584620 - RNA, 18 nt, Human
gcccccuccgcccugcca

SEQ ID NO: 2584621 - RNA, 22 nt, Human
gcccccaguccccaccccugcc

SEQ ID NO: 2584622 - RNA, 21 nt, Human
gcccccaguccccaccccugc

SEQ ID NO: 2584623 - RNA, 13 nt, Human
gcccccaucucau

SEQ ID NO: 2584624 - RNA, 16 nt, Human
gcccccuccgcccugc

SEQ ID NO: 2584625 - RNA, 16 nt, Human
gcccccucgugccagu

SEQ ID NO: 2584626 - RNA, 14 nt, Human
gcccccucgugcca

SEQ ID NO: 2584627 - RNA, 12 nt, Human
gcccccucgugc

SEQ ID NO: 2584628 - RNA, 14 nt, Human
gcccccucugcccu

SEQ ID NO: 2584629 - RNA, 12 nt, Human
gccccugccccg

SEQ ID NO: 2584630 - RNA, 17 nt, Human
gcccccucgugccaguc

SEQ ID NO: 2584631 - RNA, 14 nt, Human
gccccugccccguc

SEQ ID NO: 2584632 - RNA, 15 nt, Human
gccccugccccguca

SEQ ID NO: 2584633 - RNA, 16 nt, Human
gccccugccccgucac

SEQ ID NO: 2584634 - RNA, 20 nt, Human
gccccugccccgucaccauc

SEQ ID NO: 2584635 - RNA, 22 nt, Human
gccccugccccgucaccaucuc

SEQ ID NO: 2584636 - RNA, 14 nt, Human
gccccugcccggcu

SEQ ID NO: 2584637 - RNA, 13 nt, Human
gccccugcccggc

SEQ ID NO: 2584638 - RNA, 22 nt, Human
gccccuggaugcagccucacag

SEQ ID NO: 2584639 - RNA, 18 nt, Human
gccccuggaugcagccuc

SEQ ID NO: 2584640 - RNA, 16 nt, Human
gccccuggaugcagcc

SEQ ID NO: 2584641 - RNA, 22 nt, Human
gcccguugucucccuggcccuc

SEQ ID NO: 2584642 - RNA, 21 nt, Human
gcccguugucucccuggcccu

SEQ ID NO: 2584643 - RNA, 20 nt, Human
gcccguugucucccuggccc

SEQ ID NO: 2584644 - RNA, 19 nt, Human
gcccguugucucccuggcc

SEQ ID NO: 2584645 - RNA, 18 nt, Human
gcccguugucucccuggc

SEQ ID NO: 2584646 - RNA, 17 nt, Human
gcccguugucucccugg

SEQ ID NO: 2584647 - RNA, 16 nt, Human
gcccguugucucccug

SEQ ID NO: 2584648 - RNA, 17 nt, Human
gcccguugaggaugagg

SEQ ID NO: 2584649 - RNA, 22 nt, Human
gcccuaaaguguauuuuuuuac

SEQ ID NO: 2584650 - RNA, 20 nt, Human
gcccgugacauccccacccu

SEQ ID NO: 2584651 - RNA, 13 nt, Human
gcccguguggccc

SEQ ID NO: 2584652 - RNA, 19 nt, Human
gcccgugacagacuccuga

SEQ ID NO: 2584653 - RNA, 15 nt, Human
gcccguguggccccu

SEQ ID NO: 2584654 - RNA, 16 nt, Human
gcccguguggccccuu

SEQ ID NO: 2584655 - RNA, 17 nt, Human
gcccguguggccccuuc

SEQ ID NO: 2584656 - RNA, 18 nt, Human
gcccguguggccccuuca

SEQ ID NO: 2584657 - RNA, 19 nt, Human
gcccuagagcacacuguag

SEQ ID NO: 2584658 - RNA, 13 nt, Human
gcccuagagcaca

SEQ ID NO: 2584659 - RNA, 17 nt, Human
gcccuagagcacacugu

SEQ ID NO: 2584660 - RNA, 21 nt, Human
gcccuacuucuuugcuuugcc

SEQ ID NO: 2584661 - RNA, 23 nt, Human
gcccuaccagcgcccgcugggcu

SEQ ID NO: 2584662 - RNA, 22 nt, Human
gcccuaccagcgcccgcugggc

SEQ ID NO: 2584663 - RNA, 21 nt, Human
gcccuaccagcgcccgcuggg

SEQ ID NO: 2584664 - RNA, 20 nt, Human
gcccuaccagcgcccgcugg

SEQ ID NO: 2584665 - RNA, 14 nt, Human
gcccuacuauucag

SEQ ID NO: 2584666 - RNA, 21 nt, Human
gcccuacagaggucucugccg

SEQ ID NO: 2584667 - RNA, 20 nt, Human
gcccuacagaggucucugcc

SEQ ID NO: 2584668 - RNA, 13 nt, Human
gcccuaccagcgc

SEQ ID NO: 2584669 - RNA, 15 nt, Human
gcccuacaccuugag

SEQ ID NO: 2584670 - RNA, 16 nt, Human
gcccuacagaggucuc

SEQ ID NO: 2584671 - RNA, 19 nt, Human
gcccuaaaauuccacugcg

SEQ ID NO: 2584672 - RNA, 23 nt, Human
gcccguugucucccuggcccuca

SEQ ID NO: 2584673 - RNA, 15 nt, Human
gcccuaaaagcacac

SEQ ID NO: 2584674 - RNA, 23 nt, Human
gcccuaaugcgcaggcuggcccu

SEQ ID NO: 2584675 - RNA, 16 nt, Human
gccuacccacccccag

SEQ ID NO: 2584676 - RNA, 17 nt, Human
gccuacccacccccagg

SEQ ID NO: 2584677 - RNA, 18 nt, Human
gccggccucucuggccuc

SEQ ID NO: 2584678 - RNA, 16 nt, Human
gccggccucucuggcc

SEQ ID NO: 2584679 - RNA, 15 nt, Human
gccggccucucuggc

SEQ ID NO: 2584680 - RNA, 14 nt, Human
gccggccucucugg

SEQ ID NO: 2584681 - RNA, 19 nt, Human
gccuacaugcuuugugaac

SEQ ID NO: 2584682 - RNA, 18 nt, Human
gccggccaggugggcggg

SEQ ID NO: 2584683 - RNA, 13 nt, Human
gccggccaggugg

SEQ ID NO: 2584684 - RNA, 12 nt, Human
gccggcccuggg

SEQ ID NO: 2584685 - RNA, 20 nt, Human
gccggcccuggggcuaggcu

SEQ ID NO: 2584686 - RNA, 13 nt, Human
gccggccucucug

SEQ ID NO: 2584687 - RNA, 12 nt, Human
gccggccucucu

SEQ ID NO: 2584688 - RNA, 13 nt, Human
gccggcccugggg

SEQ ID NO: 2584689 - RNA, 14 nt, Human
gccggcccuggggc

SEQ ID NO: 2584690 - RNA, 14 nt, Human
gccuaccugcucuc

SEQ ID NO: 2584691 - RNA, 13 nt, Human
gccuaccugcucu

SEQ ID NO: 2584692 - RNA, 19 nt, Human
gccggccucucuggccucc

SEQ ID NO: 2584693 - RNA, 17 nt, Human
gccuacuccaaaauguu

SEQ ID NO: 2584694 - RNA, 12 nt, Human
gccuacucacga

SEQ ID NO: 2584695 - RNA, 17 nt, Human
gccuaccccgcagacac

SEQ ID NO: 2584696 - RNA, 14 nt, Human
gccuaccccgcaga

SEQ ID NO: 2584697 - RNA, 21 nt, Human
gccuaccccgcagacaccuug

SEQ ID NO: 2584698 - RNA, 22 nt, Human
gccuaccggcaauuuccggcca

SEQ ID NO: 2584699 - RNA, 19 nt, Human
gccucuuggaccucugcuc

SEQ ID NO: 2584700 - RNA, 18 nt, Human
gccucuuggaccucugcu

SEQ ID NO: 2584701 - RNA, 17 nt, Human
gccucuuggaccucugc

SEQ ID NO: 2584702 - RNA, 18 nt, Human
gccucuuggaaaaaguga

SEQ ID NO: 2584703 - RNA, 20 nt, Human
gccugcccaggccccugcca

SEQ ID NO: 2584704 - RNA, 19 nt, Human
gccugcccaggccccugcc

SEQ ID NO: 2584705 - RNA, 20 nt, Human
gccucuuggaccucugcucu

SEQ ID NO: 2584706 - RNA, 16 nt, Human
gccugccgguaaacac

SEQ ID NO: 2584707 - RNA, 16 nt, Human
gccugccuccagggcu

SEQ ID NO: 2584708 - RNA, 11 nt, Human
gccugccucca

SEQ ID NO: 2584709 - RNA, 21 nt, Human
gccugccgguaaacacgccug

SEQ ID NO: 2584710 - RNA, 18 nt, Human
gccugcccaggccccugc

SEQ ID NO: 2584711 - RNA, 17 nt, Human
gccugcccaggccccug

SEQ ID NO: 2584712 - RNA, 18 nt, Human
gccucuugagcaguggcu

SEQ ID NO: 2584713 - RNA, 20 nt, Human
gccucuugagcaguggcugg

SEQ ID NO: 2584714 - RNA, 19 nt, Human
gccucuugagcaguggcug

SEQ ID NO: 2584715 - RNA, 21 nt, Human
gccucuugagcaguggcuggu

SEQ ID NO: 2584716 - RNA, 20 nt, Human
gccucuugcggucccuucuu

SEQ ID NO: 2584717 - RNA, 17 nt, Human
gccucugugcugugugu

SEQ ID NO: 2584718 - RNA, 14 nt, Human
gccucugugcugug

SEQ ID NO: 2584719 - RNA, 12 nt, Human
gccucugugcug

SEQ ID NO: 2584720 - RNA, 11 nt, Human
gccucugugcu

SEQ ID NO: 2584721 - RNA, 19 nt, Human
gccucugugucacuggcug

SEQ ID NO: 2584722 - RNA, 16 nt, Human
gccucugugucacugg

SEQ ID NO: 2584723 - RNA, 15 nt, Human
gccucugugucacug

SEQ ID NO: 2584724 - RNA, 12 nt, Human
gccucuguguca

SEQ ID NO: 2584725 - RNA, 18 nt, Human
gccucugugcugugugug

SEQ ID NO: 2584726 - RNA, 21 nt, Human
gccucuguggagccccagcau

SEQ ID NO: 2584727 - RNA, 12 nt, Human
gccucuuccucc

SEQ ID NO: 2584728 - RNA, 22 nt, Human
gccucuuccucccucauuccac

SEQ ID NO: 2584729 - RNA, 15 nt, Human
gccucuguguccuuc

SEQ ID NO: 2584730 - RNA, 14 nt, Human
gccucuguguccuu

SEQ ID NO: 2584731 - RNA, 22 nt, Human
gccucugugucacuggcugccu

SEQ ID NO: 2584732 - RNA, 20 nt, Human
gccucugugucacuggcugc

SEQ ID NO: 2584733 - RNA, 21 nt, Human
gccucuguguccuucccugca

SEQ ID NO: 2584734 - RNA, 18 nt, Human
gccucuguguccuucccu

SEQ ID NO: 2584735 - RNA, 18 nt, Human
gccucuuaaagcugccug

SEQ ID NO: 2584736 - RNA, 16 nt, Human
gccucuucuucuucag

SEQ ID NO: 2584737 - RNA, 20 nt, Human
gccucuucuucuucagaaga

SEQ ID NO: 2584738 - RNA, 21 nt, Human
gccucuucuucuucagaagac

SEQ ID NO: 2584739 - RNA, 18 nt, Human
gccucuucugggagggca

SEQ ID NO: 2584740 - RNA, 15 nt, Human
gccucuucuucuuca

SEQ ID NO: 2584741 - RNA, 14 nt, Human
gccucuucugggag

SEQ ID NO: 2584742 - RNA, 15 nt, Human
gccucuucugggagg

SEQ ID NO: 2584743 - RNA, 17 nt, Human
gccucuguuugacaaac

SEQ ID NO: 2584744 - RNA, 19 nt, Human
gccucuuaaagcugccugu

SEQ ID NO: 2584745 - RNA, 17 nt, Human
gccucuucuagagccgu

SEQ ID NO: 2584746 - RNA, 12 nt, Human
gccucuucucua

SEQ ID NO: 2584747 - RNA, 23 nt, Human
gccucuucucuacucuagggaaa

SEQ ID NO: 2584748 - RNA, 16 nt, Human
gccuccucccuuagcu

SEQ ID NO: 2584749 - RNA, 23 nt, Human
gccuccucaucugggggagugga

SEQ ID NO: 2584750 - RNA, 14 nt, Human
gccuccucaucugg

SEQ ID NO: 2584751 - RNA, 22 nt, Human
gccuccucaucccguguucucc

SEQ ID NO: 2584752 - RNA, 17 nt, Human
gccuccucaucccgugu

SEQ ID NO: 2584753 - RNA, 16 nt, Human
gccuccuccuucccaa

SEQ ID NO: 2584754 - RNA, 13 nt, Human
gccuccuccugac

SEQ ID NO: 2584755 - RNA, 17 nt, Human
gccuccucccuuagcuc

SEQ ID NO: 2584756 - RNA, 18 nt, Human
gccuccugcccuuaccug

SEQ ID NO: 2584757 - RNA, 14 nt, Human
gccuccugccugcc

SEQ ID NO: 2584758 - RNA, 15 nt, Human
gccuccuccugacca

SEQ ID NO: 2584759 - RNA, 13 nt, Human
gccuccuccagcc

SEQ ID NO: 2584760 - RNA, 15 nt, Human
gccuccucaucccgu

SEQ ID NO: 2584761 - RNA, 12 nt, Human
gccuccucaucc

SEQ ID NO: 2584762 - RNA, 12 nt, Human
gccucugggacu

SEQ ID NO: 2584763 - RNA, 13 nt, Human
gccucuggcuaga

SEQ ID NO: 2584764 - RNA, 18 nt, Human
gccucuggcuagaggcca

SEQ ID NO: 2584765 - RNA, 19 nt, Human
gccucuggcuagaggccag

SEQ ID NO: 2584766 - RNA, 21 nt, Human
gccucuggcuagaggccagcc

SEQ ID NO: 2584767 - RNA, 22 nt, Human
gccucuggcuagaggccagccc

SEQ ID NO: 2584768 - RNA, 23 nt, Human
gccucuggcuagaggccagcccc

SEQ ID NO: 2584769 - RNA, 12 nt, Human
gccucugugccu

SEQ ID NO: 2584770 - RNA, 13 nt, Human
gccuccugugugu

SEQ ID NO: 2584771 - RNA, 17 nt, Human
gccucuggauuguggga

SEQ ID NO: 2584772 - RNA, 12 nt, Human
gccucuggcuag

SEQ ID NO: 2584773 - RNA, 15 nt, Human
gccucugcugccaug

SEQ ID NO: 2584774 - RNA, 12 nt, Human
gccucugcuggc

SEQ ID NO: 2584775 - RNA, 18 nt, Human
gccuccuguguagcuggg

SEQ ID NO: 2584776 - RNA, 13 nt, Human
gccuccuguguaa

SEQ ID NO: 2584777 - RNA, 23 nt, Human
gccuccugccugccccucucccg

SEQ ID NO: 2584778 - RNA, 17 nt, Human
gccuccugccugccccu

SEQ ID NO: 2584779 - RNA, 21 nt, Human
gccugcgccaccgcccagaga

SEQ ID NO: 2584780 - RNA, 16 nt, Human
gccugccuugaagcca

SEQ ID NO: 2584781 - RNA, 23 nt, Human
gccugccuugaagccacugaagc

SEQ ID NO: 2584782 - RNA, 17 nt, Human
gccugccuggcaggcug

SEQ ID NO: 2584783 - RNA, 16 nt, Human
gccugccuggcaggcu

SEQ ID NO: 2584784 - RNA, 15 nt, Human
gccugccuggcaggc

SEQ ID NO: 2584785 - RNA, 13 nt, Human
gccugccuggcag

SEQ ID NO: 2584786 - RNA, 14 nt, Human
gccugccuggagcg

SEQ ID NO: 2584787 - RNA, 13 nt, Human
gccugccuggagc

SEQ ID NO: 2584788 - RNA, 12 nt, Human
gccugccuggag

SEQ ID NO: 2584789 - RNA, 22 nt, Human
gccugccugucugucucuccau

SEQ ID NO: 2584790 - RNA, 16 nt, Human
gccugccugucugucu

SEQ ID NO: 2584791 - RNA, 14 nt, Human
gccugccugucugu

SEQ ID NO: 2584792 - RNA, 13 nt, Human
gccugccugucug

SEQ ID NO: 2584793 - RNA, 17 nt, Human
gccugccuguucccauu

SEQ ID NO: 2584794 - RNA, 18 nt, Human
gccugccuccagggcugg

SEQ ID NO: 2584795 - RNA, 17 nt, Human
gccugccuccagggcug

SEQ ID NO: 2584796 - RNA, 22 nt, Human
gccugccuccagggcuggacug

SEQ ID NO: 2584797 - RNA, 16 nt, Human
gccugccucuucucua

SEQ ID NO: 2584798 - RNA, 22 nt, Human
gccuggccccucagggucccug

SEQ ID NO: 2584799 - RNA, 20 nt, Human
gccuggccccucaggguccc

SEQ ID NO: 2584800 - RNA, 18 nt, Human
gccuggccggcaacccca

SEQ ID NO: 2584801 - RNA, 15 nt, Human
gccuggccggcaacc

SEQ ID NO: 2584802 - RNA, 13 nt, Human
gccuggcuucugg

SEQ ID NO: 2584803 - RNA, 10 nt, Human
gccuggccug

SEQ ID NO: 2584804 - RNA, 23 nt, Human
gccuggcuucuggagcccuuggg

SEQ ID NO: 2584805 - RNA, 18 nt, Human
gccuggcuucuggagccc

SEQ ID NO: 2584806 - RNA, 22 nt, Human
gccuggcuucuggagcccuugg

SEQ ID NO: 2584807 - RNA, 14 nt, Human
gccuggcuucugga

SEQ ID NO: 2584808 - RNA, 15 nt, Human
gccuggcuucuggag

SEQ ID NO: 2584809 - RNA, 16 nt, Human
gccuggcuucuggagc

SEQ ID NO: 2584810 - RNA, 17 nt, Human
gccuggcuucuggagcc

SEQ ID NO: 2584811 - RNA, 21 nt, Human
gccugggaggucaaggcugca

SEQ ID NO: 2584812 - RNA, 23 nt, Human
gccugggaauguauuauucugca

SEQ ID NO: 2584813 - RNA, 15 nt, Human
gccugggaauguauu

SEQ ID NO: 2584814 - RNA, 14 nt, Human
gccugggaucccuc

SEQ ID NO: 2584815 - RNA, 22 nt, Human
gccugggaggucaaggcugcag

SEQ ID NO: 2584816 - RNA, 18 nt, Human
gccugggaucccucaucc

SEQ ID NO: 2584817 - RNA, 21 nt, Human
gccugggaucccucauccuca

SEQ ID NO: 2584818 - RNA, 20 nt, Human
gccuguguccaugcgcucag

SEQ ID NO: 2584819 - RNA, 19 nt, Human
gccuguguccaugcgcuca

SEQ ID NO: 2584820 - RNA, 21 nt, Human
gccugugucccaugacccacc

SEQ ID NO: 2584821 - RNA, 20 nt, Human
gccugugucccaugacccac

SEQ ID NO: 2584822 - RNA, 19 nt, Human
gccugugucccaugaccca

SEQ ID NO: 2584823 - RNA, 15 nt, Human
gccugugucccauga

SEQ ID NO: 2584824 - RNA, 23 nt, Human
gccuguguccaugcgcucagggc

SEQ ID NO: 2584825 - RNA, 21 nt, Human
gccuguguccaugcgcucagg

SEQ ID NO: 2584826 - RNA, 23 nt, Human
gccugugucccaugacccacccc

SEQ ID NO: 2584827 - RNA, 22 nt, Human
gccugugucccaugacccaccc

SEQ ID NO: 2584828 - RNA, 21 nt, Human
gccugugugacaucaguggca

SEQ ID NO: 2584829 - RNA, 17 nt, Human
gccuggccccucagggu

SEQ ID NO: 2584830 - RNA, 16 nt, Human
gccuggccccucaggg

SEQ ID NO: 2584831 - RNA, 15 nt, Human
gccuggccccucagg

SEQ ID NO: 2584832 - RNA, 17 nt, Human
caaucagccuaguugau

SEQ ID NO: 2584833 - RNA, 15 nt, Human
caaucagcuccuucc

SEQ ID NO: 2584834 - RNA, 16 nt, Human
caaucagcuccuuccu

SEQ ID NO: 2584835 - RNA, 18 nt, Human
caaucagcuccuuccugg

SEQ ID NO: 2584836 - RNA, 13 nt, Human
caaugccaucauc

SEQ ID NO: 2584837 - RNA, 18 nt, Human
caaugccauccucaaaca

SEQ ID NO: 2584838 - RNA, 16 nt, Human
caaugccauccucaaa

SEQ ID NO: 2584839 - RNA, 14 nt, Human
caaugccaucaucu

SEQ ID NO: 2584840 - RNA, 20 nt, Human
caaugcccguaaugcuuaga

SEQ ID NO: 2584841 - RNA, 20 nt, Human
caaugccauccucaaacacu

SEQ ID NO: 2584842 - RNA, 15 nt, Human
caaucaacucuaaua

SEQ ID NO: 2584843 - RNA, 14 nt, Human
caaucaaaucugcu

SEQ ID NO: 2584844 - RNA, 17 nt, Human
caaucaaagcacuugga

SEQ ID NO: 2584845 - RNA, 12 nt, Human
caauauuuuucu

SEQ ID NO: 2584846 - RNA, 18 nt, Human
caaucaaaggaaaauagu

SEQ ID NO: 2584847 - RNA, 15 nt, Human
caauggcagccuugg

SEQ ID NO: 2584848 - RNA, 14 nt, Human
caauggcagccuug

SEQ ID NO: 2584849 - RNA, 20 nt, Human
caaugcugauguccucacca

SEQ ID NO: 2584850 - RNA, 13 nt, Human
caaugcugauguc

SEQ ID NO: 2584851 - RNA, 14 nt, Human
caaugcugauuugg

SEQ ID NO: 2584852 - RNA, 16 nt, Human
caaugcugauuuggug

SEQ ID NO: 2584853 - RNA, 21 nt, Human
caaugcugauuuggugaccaa

SEQ ID NO: 2584854 - RNA, 13 nt, Human
caauggcagccuu

SEQ ID NO: 2584855 - RNA, 13 nt, Human
caauugucuuuuu

SEQ ID NO: 2584856 - RNA, 14 nt, Human
caauuguaaauuga

SEQ ID NO: 2584857 - RNA, 14 nt, Human
caauugucauuuau

SEQ ID NO: 2584858 - RNA, 19 nt, Human
caauuguaaaacugaggca

SEQ ID NO: 2584859 - RNA, 16 nt, Human
caauugguuaaucuuu

SEQ ID NO: 2584860 - RNA, 22 nt, Human
caauugggauggcgcuaggcau

SEQ ID NO: 2584861 - RNA, 12 nt, Human
caauuggaggaa

SEQ ID NO: 2584862 - RNA, 12 nt, Human
caaugcuggcug

SEQ ID NO: 2584863 - RNA, 16 nt, Human
caauauuguacaguuu

SEQ ID NO: 2584864 - RNA, 15 nt, Human
caauauuguacaguu

SEQ ID NO: 2584865 - RNA, 17 nt, Human
caauauuuccucaugug

SEQ ID NO: 2584866 - RNA, 19 nt, Human
caauauuuccucaugugau

SEQ ID NO: 2584867 - RNA, 14 nt, Human
caauauuuccucau

SEQ ID NO: 2584868 - RNA, 13 nt, Human
caauauuuauuau

SEQ ID NO: 2584869 - RNA, 14 nt, Human
caauauuuauuauu

SEQ ID NO: 2584870 - RNA, 14 nt, Human
caauauuuaaacau

SEQ ID NO: 2584871 - RNA, 13 nt, Human
caauauuuaaaca

SEQ ID NO: 2584872 - RNA, 12 nt, Human
caauauuuauua

SEQ ID NO: 2584873 - RNA, 16 nt, Human
caauauugucauuccu

SEQ ID NO: 2584874 - RNA, 14 nt, Human
caauauuguuucua

SEQ ID NO: 2584875 - RNA, 18 nt, Human
caauauuguacaguuuuu

SEQ ID NO: 2584876 - RNA, 17 nt, Human
caauauuguacaguuuu

SEQ ID NO: 2584877 - RNA, 14 nt, Human
caauauuuuuagau

SEQ ID NO: 2584878 - RNA, 19 nt, Human
caauauuuucuuuaaugcu

SEQ ID NO: 2584879 - RNA, 20 nt, Human
caauauuuucuuuaaugcuu

SEQ ID NO: 2584880 - RNA, 16 nt, Human
caauauuuucuuuaau

SEQ ID NO: 2584881 - RNA, 22 nt, Human
caauauuuuccaugaaaaugca

SEQ ID NO: 2584882 - RNA, 20 nt, Human
caauauuuuccaugaaaaug

SEQ ID NO: 2584883 - RNA, 19 nt, Human
caauauuuuccaugaaaau

SEQ ID NO: 2584884 - RNA, 16 nt, Human
caauauuuuccaugaa

SEQ ID NO: 2584885 - RNA, 13 nt, Human
caauauuuguaga

SEQ ID NO: 2584886 - RNA, 14 nt, Human
caauauuuguagaa

SEQ ID NO: 2584887 - RNA, 15 nt, Human
caauauuuguagaag

SEQ ID NO: 2584888 - RNA, 15 nt, Human
caauauuuuccauga

SEQ ID NO: 2584889 - RNA, 13 nt, Human
caauauuuuccau

SEQ ID NO: 2584890 - RNA, 11 nt, Human
caauauuuucc

SEQ ID NO: 2584891 - RNA, 12 nt, Human
cacaaggacuuc

SEQ ID NO: 2584892 - RNA, 14 nt, Human
cacaaggacuuccu

SEQ ID NO: 2584893 - RNA, 16 nt, Human
cacaaggacuuccugu

SEQ ID NO: 2584894 - RNA, 22 nt, Human
cacaaggacuuccuguccagcu

SEQ ID NO: 2584895 - RNA, 17 nt, Human
cacaaggauagaugcug

SEQ ID NO: 2584896 - RNA, 18 nt, Human
cacaaggauagaugcugg

SEQ ID NO: 2584897 - RNA, 21 nt, Human
cacaaggauagaugcuggccc

SEQ ID NO: 2584898 - RNA, 22 nt, Human
cacaaggauagaugcuggccca

SEQ ID NO: 2584899 - RNA, 14 nt, Human
caauuucagacucc

SEQ ID NO: 2584900 - RNA, 12 nt, Human
cacaagcuggaa

SEQ ID NO: 2584901 - RNA, 11 nt, Human
caauuucaagu

SEQ ID NO: 2584902 - RNA, 16 nt, Human
cacaagcuggaagcac

SEQ ID NO: 2584903 - RNA, 14 nt, Human
cacaagcuggaagc

SEQ ID NO: 2584904 - RNA, 13 nt, Human
cacaagcuggaag

SEQ ID NO: 2584905 - RNA, 15 nt, Human
cacaagcuggaagca

SEQ ID NO: 2584906 - RNA, 20 nt, Human
caauuuauuauggcacauca

SEQ ID NO: 2584907 - RNA, 16 nt, Human
caauugucauuuauaa

SEQ ID NO: 2584908 - RNA, 15 nt, Human
caauugucauuuaua

SEQ ID NO: 2584909 - RNA, 18 nt, Human
caauugugagccaccacg

SEQ ID NO: 2584910 - RNA, 21 nt, Human
caauugugagccaccacgucc

SEQ ID NO: 2584911 - RNA, 13 nt, Human
caauuuauuaugg

SEQ ID NO: 2584912 - RNA, 17 nt, Human
caauugucauuuauaaa

SEQ ID NO: 2584913 - RNA, 14 nt, Human
caauuuauucaaga

SEQ ID NO: 2584914 - RNA, 17 nt, Human
caauuuauucaagaaaa

SEQ ID NO: 2584915 - RNA, 20 nt, Human
caauuucaaaaaaauaaaau

SEQ ID NO: 2584916 - RNA, 21 nt, Human
caauuucaaaaaaauaaaaua

SEQ ID NO: 2584917 - RNA, 18 nt, Human
caaguuccaaguugcuaa

SEQ ID NO: 2584918 - RNA, 21 nt, Human
caaguuccucuagugcccucc

SEQ ID NO: 2584919 - RNA, 17 nt, Human
caaguucaaucuguuuu

SEQ ID NO: 2584920 - RNA, 12 nt, Human
caaguucaaucu

SEQ ID NO: 2584921 - RNA, 19 nt, Human
caaguauuugggaagugaa

SEQ ID NO: 2584922 - RNA, 22 nt, Human
caaguauuugggaagugaagac

SEQ ID NO: 2584923 - RNA, 20 nt, Human
caaguuauuguacagcuguu

SEQ ID NO: 2584924 - RNA, 12 nt, Human
caaguuauugua

SEQ ID NO: 2584925 - RNA, 19 nt, Human
caaguuauugacaaacucu

SEQ ID NO: 2584926 - RNA, 17 nt, Human
caagcucccaggcauuc

SEQ ID NO: 2584927 - RNA, 15 nt, Human
caagcucccaggcau

SEQ ID NO: 2584928 - RNA, 14 nt, Human
caagcucccaggca

SEQ ID NO: 2584929 - RNA, 12 nt, Human
caagcucccagg

SEQ ID NO: 2584930 - RNA, 23 nt, Human
caagcuccuccucccugcaucug

SEQ ID NO: 2584931 - RNA, 14 nt, Human
caagcuccuccucc

SEQ ID NO: 2584932 - RNA, 15 nt, Human
caagcuccuccuccc

SEQ ID NO: 2584933 - RNA, 16 nt, Human
caagcuccuccucccu

SEQ ID NO: 2584934 - RNA, 17 nt, Human
caagcuccuccucccug

SEQ ID NO: 2584935 - RNA, 16 nt, Human
caagcucugcuccucu

SEQ ID NO: 2584936 - RNA, 14 nt, Human
caagcucccaggcc

SEQ ID NO: 2584937 - RNA, 20 nt, Human
caagcuccgccucccggguu

SEQ ID NO: 2584938 - RNA, 15 nt, Human
caagcucugcuccuc

SEQ ID NO: 2584939 - RNA, 18 nt, Human
caagcuccaagcucccag

SEQ ID NO: 2584940 - RNA, 17 nt, Human
caagcuccaagcuccca

SEQ ID NO: 2584941 - RNA, 21 nt, Human
caagcuccaagcucccaggca

SEQ ID NO: 2584942 - RNA, 19 nt, Human
caagcuccaagcucccagg

SEQ ID NO: 2584943 - RNA, 17 nt, Human
caagcuccaucuccacu

SEQ ID NO: 2584944 - RNA, 22 nt, Human
caagcucccaagggauggugcc

SEQ ID NO: 2584945 - RNA, 18 nt, Human
caagcucccaagggaugg

SEQ ID NO: 2584946 - RNA, 13 nt, Human
caagcucccaagg

SEQ ID NO: 2584947 - RNA, 21 nt, Human
caagcuccaucuccacuccag

SEQ ID NO: 2584948 - RNA, 17 nt, Human
caaguauuauaccuuuu

SEQ ID NO: 2584949 - RNA, 22 nt, Human
caaguauuauaccuuuuuuaga

SEQ ID NO: 2584950 - RNA, 13 nt, Human
caaguauuauacc

SEQ ID NO: 2584951 - RNA, 18 nt, Human
caaguaagaagacaugaa

SEQ ID NO: 2584952 - RNA, 14 nt, Human
caaguaagaagaca

SEQ ID NO: 2584953 - RNA, 16 nt, Human
caaguaagaagacaug

SEQ ID NO: 2584954 - RNA, 13 nt, Human
caaguaaacauuc

SEQ ID NO: 2584955 - RNA, 13 nt, Human
caaguaagaagac

SEQ ID NO: 2584956 - RNA, 22 nt, Human
caaguaagaagacaugaaccaa

SEQ ID NO: 2584957 - RNA, 19 nt, Human
caagguuuuauaaggcuga

SEQ ID NO: 2584958 - RNA, 24 nt, Human
caagguuuaggcugguggcccagg

SEQ ID NO: 2584959 - RNA, 22 nt, Human
caagguuuaggcugguggccca

SEQ ID NO: 2584960 - RNA, 23 nt, Human
caagguuuaggcugguggcccag

SEQ ID NO: 2584961 - RNA, 21 nt, Human
caagguuuaggcugguggccc

SEQ ID NO: 2584962 - RNA, 20 nt, Human
caagguuuaggcugguggcc

SEQ ID NO: 2584963 - RNA, 16 nt, Human
caaggccccagagacu

SEQ ID NO: 2584964 - RNA, 17 nt, Human
caaggccccagagacuc

SEQ ID NO: 2584965 - RNA, 22 nt, Human
caaggcccccgggccgacggag

SEQ ID NO: 2584966 - RNA, 21 nt, Human
caaggccccagagacucagag

SEQ ID NO: 2584967 - RNA, 14 nt, Human
caaggccccagaga

SEQ ID NO: 2584968 - RNA, 15 nt, Human
caaggccccagagac

SEQ ID NO: 2584969 - RNA, 12 nt, Human
caaggccccaga

SEQ ID NO: 2584970 - RNA, 14 nt, Human
caaggccaucuggg

SEQ ID NO: 2584971 - RNA, 17 nt, Human
caaggccaucugggcuc

SEQ ID NO: 2584972 - RNA, 23 nt, Human
caaggccauccuucccugucugc

SEQ ID NO: 2584973 - RNA, 17 nt, Human
caaggccauccuucccu

SEQ ID NO: 2584974 - RNA, 20 nt, Human
caaggauugcuacuguccua

SEQ ID NO: 2584975 - RNA, 22 nt, Human
caagcuccuccucccugcaucu

SEQ ID NO: 2584976 - RNA, 19 nt, Human
caaggauugcuacuguccu

SEQ ID NO: 2584977 - RNA, 14 nt, Human
caaggcaaggcugu

SEQ ID NO: 2584978 - RNA, 15 nt, Human
caaggcaaggcaggu

SEQ ID NO: 2584979 - RNA, 14 nt, Human
caaggcaaggcagg

SEQ ID NO: 2584980 - RNA, 17 nt, Human
caaggccagaguggccu

SEQ ID NO: 2584981 - RNA, 18 nt, Human
caaggcaaggcaggugcc

SEQ ID NO: 2584982 - RNA, 16 nt, Human
caaggcaaggcaggug

SEQ ID NO: 2584983 - RNA, 18 nt, Human
caaggccagaguggccug

SEQ ID NO: 2584984 - RNA, 19 nt, Human
caaggccagaguggccugg

SEQ ID NO: 2584985 - RNA, 20 nt, Human
caaggccagaguggccuggc

SEQ ID NO: 2584986 - RNA, 21 nt, Human
caaggccagaguggccuggcc

SEQ ID NO: 2584987 - RNA, 22 nt, Human
caaggccagaguggccuggcca

SEQ ID NO: 2584988 - RNA, 15 nt, Human
caaggccauccuucc

SEQ ID NO: 2584989 - RNA, 16 nt, Human
caaccccuucgcuccu

SEQ ID NO: 2584990 - RNA, 14 nt, Human
caaccccuucgcuc

SEQ ID NO: 2584991 - RNA, 17 nt, Human
caaccccuucgcuccug

SEQ ID NO: 2584992 - RNA, 21 nt, Human
caaccccuguggagcccgcac

SEQ ID NO: 2584993 - RNA, 17 nt, Human
caacuaggcuucagcau

SEQ ID NO: 2584994 - RNA, 16 nt, Human
caaccccuguggagcc

SEQ ID NO: 2584995 - RNA, 20 nt, Human
caacccccagcacccgggcu

SEQ ID NO: 2584996 - RNA, 22 nt, Human
caaccccuguggagcccgcacc

SEQ ID NO: 2584997 - RNA, 19 nt, Human
caacuaucucauuuccaag

SEQ ID NO: 2584998 - RNA, 19 nt, Human
caacuauauuguuugcuaa

SEQ ID NO: 2584999 - RNA, 13 nt, Human
caacuauggccug

SEQ ID NO: 2585000 - RNA, 19 nt, Human
caacuauaagcccacuguu

SEQ ID NO: 2585001 - RNA, 18 nt, Human
caacuauauuaucaugca

SEQ ID NO: 2585002 - RNA, 19 nt, Human
caacuauauuaucaugcaa

SEQ ID NO: 2585003 - RNA, 23 nt, Human
caaccccagccgcucggaggccc

SEQ ID NO: 2585004 - RNA, 15 nt, Human
caaccccagccgcuc

SEQ ID NO: 2585005 - RNA, 14 nt, Human
caaccccagccgcu

SEQ ID NO: 2585006 - RNA, 14 nt, Human
caacccccagccug

SEQ ID NO: 2585007 - RNA, 17 nt, Human
caacccccaccccacac

SEQ ID NO: 2585008 - RNA, 18 nt, Human
caacccccaccccacacu

SEQ ID NO: 2585009 - RNA, 15 nt, Human
caacccccagcaccc

SEQ ID NO: 2585010 - RNA, 13 nt, Human
caacccccagcac

SEQ ID NO: 2585011 - RNA, 23 nt, Human
caacccccaccccacacuuguuc

SEQ ID NO: 2585012 - RNA, 22 nt, Human
caaccccaguucugcuccucuc

SEQ ID NO: 2585013 - RNA, 20 nt, Human
caaccccaguucugcuccuc

SEQ ID NO: 2585014 - RNA, 19 nt, Human
caaccccaguucugcuccu

SEQ ID NO: 2585015 - RNA, 17 nt, Human
caaccccaguucugcuc

SEQ ID NO: 2585016 - RNA, 14 nt, Human
caaccccaguucug

SEQ ID NO: 2585017 - RNA, 13 nt, Human
caaccccaguucu

SEQ ID NO: 2585018 - RNA, 13 nt, Human
caaccccaggcug

SEQ ID NO: 2585019 - RNA, 11 nt, Human
caacccccacc

SEQ ID NO: 2585020 - RNA, 12 nt, Human
caacccccaccc

SEQ ID NO: 2585021 - RNA, 13 nt, Human
caacccccacccc

SEQ ID NO: 2585022 - RNA, 14 nt, Human
caacccccacccca

SEQ ID NO: 2585023 - RNA, 15 nt, Human
caacuauuuuuccaa

SEQ ID NO: 2585024 - RNA, 12 nt, Human
caacuccagaaa

SEQ ID NO: 2585025 - RNA, 16 nt, Human
caacuauggaucagaa

SEQ ID NO: 2585026 - RNA, 17 nt, Human
caacuauggaucagaau

SEQ ID NO: 2585027 - RNA, 14 nt, Human
caacuauggccugu

SEQ ID NO: 2585028 - RNA, 15 nt, Human
caagaagcccaggaa

SEQ ID NO: 2585029 - RNA, 19 nt, Human
caacuccuagggccacuga

SEQ ID NO: 2585030 - RNA, 21 nt, Human
caacucccugccccccagccc

SEQ ID NO: 2585031 - RNA, 19 nt, Human
caacucccugccccccagc

SEQ ID NO: 2585032 - RNA, 20 nt, Human
caacucccugccccccagcc

SEQ ID NO: 2585033 - RNA, 17 nt, Human
caacuccaguagcuugg

SEQ ID NO: 2585034 - RNA, 14 nt, Human
caagacaugucugu

SEQ ID NO: 2585035 - RNA, 15 nt, Human
caagacaugucuguu

SEQ ID NO: 2585036 - RNA, 17 nt, Human
caagacaugucuguucu

SEQ ID NO: 2585037 - RNA, 15 nt, Human
caagacauuaaaucu

SEQ ID NO: 2585038 - RNA, 11 nt, Human
caagacauugu

SEQ ID NO: 2585039 - RNA, 13 nt, Human
caagacauuguca

SEQ ID NO: 2585040 - RNA, 14 nt, Human
caagacauugucaa

SEQ ID NO: 2585041 - RNA, 17 nt, Human
caagacauugucaauaa

SEQ ID NO: 2585042 - RNA, 18 nt, Human
caagacauugucaauaaa

SEQ ID NO: 2585043 - RNA, 23 nt, Human
caagaaucagucuauccacagag

SEQ ID NO: 2585044 - RNA, 18 nt, Human
caagaaucagugcaaaga

SEQ ID NO: 2585045 - RNA, 19 nt, Human
caagaaucagugcaaagau

SEQ ID NO: 2585046 - RNA, 17 nt, Human
caagaaggaugauucaa

SEQ ID NO: 2585047 - RNA, 18 nt, Human
caagaagcccaggaaagg

SEQ ID NO: 2585048 - RNA, 21 nt, Human
caagaagcgugagacgccacc

SEQ ID NO: 2585049 - RNA, 15 nt, Human
caagaagccuuuccu

SEQ ID NO: 2585050 - RNA, 22 nt, Human
caagaagcuuuaauauuuaaau

SEQ ID NO: 2585051 - RNA, 20 nt, Human
caagaauaaucacgcuuucc

SEQ ID NO: 2585052 - RNA, 21 nt, Human
caagaauaaucacgcuuuccu

SEQ ID NO: 2585053 - RNA, 22 nt, Human
caagaauaaucacgcuuuccug

SEQ ID NO: 2585054 - RNA, 23 nt, Human
caagaauaaucacgcuuuccuga

SEQ ID NO: 2585055 - RNA, 18 nt, Human
caagaauagaugcugacu

SEQ ID NO: 2585056 - RNA, 13 nt, Human
caagcaccuccug

SEQ ID NO: 2585057 - RNA, 21 nt, Human
caagcacagugguggcagggc

SEQ ID NO: 2585058 - RNA, 20 nt, Human
caagcacagugguggcaggg

SEQ ID NO: 2585059 - RNA, 19 nt, Human
caagcacagugguggcagg

SEQ ID NO: 2585060 - RNA, 16 nt, Human
caagcacagugguggc

SEQ ID NO: 2585061 - RNA, 17 nt, Human
caagcacaucugcauuu

SEQ ID NO: 2585062 - RNA, 20 nt, Human
caagcacaucugcauuuuca

SEQ ID NO: 2585063 - RNA, 12 nt, Human
caagcacagcag

SEQ ID NO: 2585064 - RNA, 13 nt, Human
caagcacagcagc

SEQ ID NO: 2585065 - RNA, 14 nt, Human
caagcacagcagcc

SEQ ID NO: 2585066 - RNA, 17 nt, Human
caagcacagcagccugg

SEQ ID NO: 2585067 - RNA, 15 nt, Human
caagcacaguggugg

SEQ ID NO: 2585068 - RNA, 13 nt, Human
caagcacaguggu

SEQ ID NO: 2585069 - RNA, 17 nt, Human
caagcacagugccugca

SEQ ID NO: 2585070 - RNA, 18 nt, Human
caagcaccuagccucgcu

SEQ ID NO: 2585071 - RNA, 14 nt, Human
caagcaccuccugc

SEQ ID NO: 2585072 - RNA, 14 nt, Human
caagaccacguuuc

SEQ ID NO: 2585073 - RNA, 16 nt, Human
caagaccacguuucua

SEQ ID NO: 2585074 - RNA, 16 nt, Human
caagauauuuauauau

SEQ ID NO: 2585075 - RNA, 18 nt, Human
caagaucauguaccccaa

SEQ ID NO: 2585076 - RNA, 19 nt, Human
caagauccugucuuuaagg

SEQ ID NO: 2585077 - RNA, 21 nt, Human
caagauauuuuaaaaucuguc

SEQ ID NO: 2585078 - RNA, 23 nt, Human
caagauauuuuaaaaucugucac

SEQ ID NO: 2585079 - RNA, 19 nt, Human
caagaccaccacuucgaaa

SEQ ID NO: 2585080 - RNA, 18 nt, Human
caagaugaaggagaggca

SEQ ID NO: 2585081 - RNA, 15 nt, Human
caagaucuuucagga

SEQ ID NO: 2585082 - RNA, 19 nt, Human
caagaugagagaacuggag

SEQ ID NO: 2585083 - RNA, 15 nt, Human
caagaucugugcagc

SEQ ID NO: 2585084 - RNA, 16 nt, Human
caagaucgcgccacug

SEQ ID NO: 2585085 - RNA, 22 nt, Human
caagauccugucuuuaaggaaa

SEQ ID NO: 2585086 - RNA, 20 nt, Human
caagaucugugcagccccgc

SEQ ID NO: 2585087 - RNA, 12 nt, Human
caagaucuuuca

SEQ ID NO: 2585088 - RNA, 13 nt, Human
caagaucuuucag

SEQ ID NO: 2585089 - RNA, 14 nt, Human
caagaucuuucagg

SEQ ID NO: 2585090 - RNA, 19 nt, Human
caagauuuuccuuuuuuau

SEQ ID NO: 2585091 - RNA, 17 nt, Human
caagauuuuccuuuuuu

SEQ ID NO: 2585092 - RNA, 16 nt, Human
caagauuuuccuuuuu

SEQ ID NO: 2585093 - RNA, 15 nt, Human
caagauuuuccuuuu

SEQ ID NO: 2585094 - RNA, 12 nt, Human
caagauuuuccu

SEQ ID NO: 2585095 - RNA, 18 nt, Human
caagauuuuccacaagau

SEQ ID NO: 2585096 - RNA, 22 nt, Human
caagauuuuccuuuuuuauaca

SEQ ID NO: 2585097 - RNA, 21 nt, Human
caagauuuuccuuuuuuauac

SEQ ID NO: 2585098 - RNA, 22 nt, Human
caagauuuugaaugcuuccuga

SEQ ID NO: 2585099 - RNA, 16 nt, Human
caagcaaaaggagaga

SEQ ID NO: 2585100 - RNA, 14 nt, Human
caagcaaguauuag

SEQ ID NO: 2585101 - RNA, 23 nt, Human
caagcaagcucccaagggauggu

SEQ ID NO: 2585102 - RNA, 12 nt, Human
caagcaagcucc

SEQ ID NO: 2585103 - RNA, 13 nt, Human
caagcaagaaaca

SEQ ID NO: 2585104 - RNA, 17 nt, Human
caagcaaccugggucca

SEQ ID NO: 2585105 - RNA, 16 nt, Human
caagcaaccugggucc

SEQ ID NO: 2585106 - RNA, 19 nt, Human
caagcaaaggugaagagac

SEQ ID NO: 2585107 - RNA, 18 nt, Human
caagcaagaaacacuggg

SEQ ID NO: 2585108 - RNA, 22 nt, Human
caagcaaccuggguccaaauaa

SEQ ID NO: 2585109 - RNA, 19 nt, Human
caagcaaccuggguccaaa

SEQ ID NO: 2585110 - RNA, 19 nt, Human
caagcaaaugugaaucauu

SEQ ID NO: 2585111 - RNA, 17 nt, Human
caagcaaaugugaauca

SEQ ID NO: 2585112 - RNA, 15 nt, Human
caagcaaaugugaau

SEQ ID NO: 2585113 - RNA, 23 nt, Human
caagcaaaaucauggaaugguua

SEQ ID NO: 2585114 - RNA, 22 nt, Human
caagcaaaaucauggaaugguu

SEQ ID NO: 2585115 - RNA, 14 nt, Human
caagcaaaaucaug

SEQ ID NO: 2585116 - RNA, 17 nt, Human
caagauuuucuacuuuu

SEQ ID NO: 2585117 - RNA, 13 nt, Human
cacaucagcuugc

SEQ ID NO: 2585118 - RNA, 23 nt, Human
cacaucagcuugcccuguuaaaa

SEQ ID NO: 2585119 - RNA, 17 nt, Human
cacaucagucacaaguu

SEQ ID NO: 2585120 - RNA, 22 nt, Human
cacaucuugcucugcugacaga

SEQ ID NO: 2585121 - RNA, 21 nt, Human
cacaucuugcucugcugacag

SEQ ID NO: 2585122 - RNA, 20 nt, Human
cacaucuugcucugcugaca

SEQ ID NO: 2585123 - RNA, 15 nt, Human
cacaucuugcucugc

SEQ ID NO: 2585124 - RNA, 20 nt, Human
cacaucuugaucugcucagc

SEQ ID NO: 2585125 - RNA, 22 nt, Human
cacaucuucccuagaggguucc

SEQ ID NO: 2585126 - RNA, 23 nt, Human
cacauccauuucaucuauuucug

SEQ ID NO: 2585127 - RNA, 21 nt, Human
cacauccauuucaucuauuuc

SEQ ID NO: 2585128 - RNA, 21 nt, Human
cacauccacacacgcaggaac

SEQ ID NO: 2585129 - RNA, 14 nt, Human
cacaucuugcucug

SEQ ID NO: 2585130 - RNA, 13 nt, Human
cacaucuugcucu

SEQ ID NO: 2585131 - RNA, 23 nt, Human
cacccagugagcacucccaaguc

SEQ ID NO: 2585132 - RNA, 20 nt, Human
cacccagugagcacucccaa

SEQ ID NO: 2585133 - RNA, 17 nt, Human
cacccagugagcacucc

SEQ ID NO: 2585134 - RNA, 17 nt, Human
cacccagucuguucccc

SEQ ID NO: 2585135 - RNA, 13 nt, Human
cacccaucuguuu

SEQ ID NO: 2585136 - RNA, 18 nt, Human
cacccaucuguuuuuugu

SEQ ID NO: 2585137 - RNA, 23 nt, Human
cacccauccuaccaaugcaugca

SEQ ID NO: 2585138 - RNA, 22 nt, Human
cacccauccuaccaaugcaugc

SEQ ID NO: 2585139 - RNA, 23 nt, Human
cacccauccuaucagccugucuc

SEQ ID NO: 2585140 - RNA, 15 nt, Human
cacccaugaagacag

SEQ ID NO: 2585141 - RNA, 14 nt, Human
cacccaugaagaca

SEQ ID NO: 2585142 - RNA, 21 nt, Human
cacccagaugggggaaagcac

SEQ ID NO: 2585143 - RNA, 21 nt, Human
cacccacucuccucugccuca

SEQ ID NO: 2585144 - RNA, 14 nt, Human
cacccagacagcuc

SEQ ID NO: 2585145 - RNA, 16 nt, Human
cacccagacagcuccc

SEQ ID NO: 2585146 - RNA, 22 nt, Human
cacccagacagcucccucugcc

SEQ ID NO: 2585147 - RNA, 23 nt, Human
caccaggcacgaacccaccugcu

SEQ ID NO: 2585148 - RNA, 24 nt, Human
caccaggcacgaacccaccugcug

SEQ ID NO: 2585149 - RNA, 15 nt, Human
cacccacucagcucc

SEQ ID NO: 2585150 - RNA, 19 nt, Human
caccaggcacgaacccacc

SEQ ID NO: 2585151 - RNA, 20 nt, Human
caccaggcacgaacccaccu

SEQ ID NO: 2585152 - RNA, 21 nt, Human
caccaggcacgaacccaccug

SEQ ID NO: 2585153 - RNA, 22 nt, Human
caccaggcacgaacccaccugc

SEQ ID NO: 2585154 - RNA, 23 nt, Human
caccaggcaccucacagaaauga

SEQ ID NO: 2585155 - RNA, 22 nt, Human
caccaggcaccucacagaaaug

SEQ ID NO: 2585156 - RNA, 20 nt, Human
caccaggcaccucacagaaa

SEQ ID NO: 2585157 - RNA, 21 nt, Human
caccaggauggcccuucccac

SEQ ID NO: 2585158 - RNA, 13 nt, Human
caccaggauggcc

SEQ ID NO: 2585159 - RNA, 15 nt, Human
caccaggauggcccu

SEQ ID NO: 2585160 - RNA, 23 nt, Human
caccaggaauguuaaagucagug

SEQ ID NO: 2585161 - RNA, 20 nt, Human
cacccaggcuggaguacagu

SEQ ID NO: 2585162 - RNA, 20 nt, Human
cacccaggcuggagugcaau

SEQ ID NO: 2585163 - RNA, 12 nt, Human
cacccagcccac

SEQ ID NO: 2585164 - RNA, 18 nt, Human
cacccagcaacuccaacu

SEQ ID NO: 2585165 - RNA, 11 nt, Human
cacccagccca

SEQ ID NO: 2585166 - RNA, 10 nt, Human
cacccagccc

SEQ ID NO: 2585167 - RNA, 16 nt, Human
cacauuuaagagacag

SEQ ID NO: 2585168 - RNA, 15 nt, Human
caccagccccugccc

SEQ ID NO: 2585169 - RNA, 14 nt, Human
caccagccccugcc

SEQ ID NO: 2585170 - RNA, 13 nt, Human
caccagccccugc

SEQ ID NO: 2585171 - RNA, 22 nt, Human
caccagccccagugcccacagg

SEQ ID NO: 2585172 - RNA, 21 nt, Human
caccagccccagugcccacag

SEQ ID NO: 2585173 - RNA, 18 nt, Human
caccagccccagugccca

SEQ ID NO: 2585174 - RNA, 18 nt, Human
caccagcccggccugcuc

SEQ ID NO: 2585175 - RNA, 17 nt, Human
caccagcccggccugcu

SEQ ID NO: 2585176 - RNA, 16 nt, Human
caccagcccggccugc

SEQ ID NO: 2585177 - RNA, 15 nt, Human
caccagcccggccug

SEQ ID NO: 2585178 - RNA, 21 nt, Human
caccagccccugccccagccc

SEQ ID NO: 2585179 - RNA, 19 nt, Human
caccagccccugccccagc

SEQ ID NO: 2585180 - RNA, 17 nt, Human
caccagccccugcccca

SEQ ID NO: 2585181 - RNA, 16 nt, Human
caccagccccugcccc

SEQ ID NO: 2585182 - RNA, 19 nt, Human
caccagcccuuagcaggga

SEQ ID NO: 2585183 - RNA, 19 nt, Human
caccagcccggccugcucc

SEQ ID NO: 2585184 - RNA, 17 nt, Human
caccaggaaccucuuca

SEQ ID NO: 2585185 - RNA, 11 nt, Human
caccaggaagg

SEQ ID NO: 2585186 - RNA, 12 nt, Human
caccaggaaugu

SEQ ID NO: 2585187 - RNA, 17 nt, Human
caccaggaauguuaaag

SEQ ID NO: 2585188 - RNA, 21 nt, Human
caccaggaauguuaaagucag

SEQ ID NO: 2585189 - RNA, 16 nt, Human
caccaggagaaccacu

SEQ ID NO: 2585190 - RNA, 17 nt, Human
caccaggagaaccacua

SEQ ID NO: 2585191 - RNA, 19 nt, Human
caccaggagaaccacuaca

SEQ ID NO: 2585192 - RNA, 17 nt, Human
caccaggagucccuggu

SEQ ID NO: 2585193 - RNA, 17 nt, Human
caccagccccagugccc

SEQ ID NO: 2585194 - RNA, 18 nt, Human
cacauuuauucugcucac

SEQ ID NO: 2585195 - RNA, 19 nt, Human
cacauuuaagagacaguca

SEQ ID NO: 2585196 - RNA, 23 nt, Human
cacauuguuuuaaaaagaaacaa

SEQ ID NO: 2585197 - RNA, 18 nt, Human
cacauuguuuuaaaaaga

SEQ ID NO: 2585198 - RNA, 16 nt, Human
cacauuguuuuaaaaa

SEQ ID NO: 2585199 - RNA, 15 nt, Human
cacauuguuuuaaaa

SEQ ID NO: 2585200 - RNA, 17 nt, Human
cacauuuauucugcuca

SEQ ID NO: 2585201 - RNA, 12 nt, Human
cacauuguuuua

SEQ ID NO: 2585202 - RNA, 15 nt, Human
cacaucuuuccuguc

SEQ ID NO: 2585203 - RNA, 14 nt, Human
cacaucuuuccugu

SEQ ID NO: 2585204 - RNA, 18 nt, Human
cacaugaaaccuuauuuu

SEQ ID NO: 2585205 - RNA, 12 nt, Human
cacaucuuucac

SEQ ID NO: 2585206 - RNA, 18 nt, Human
cacaucuuucacacuucc

SEQ ID NO: 2585207 - RNA, 19 nt, Human
cacaucuuucacacuucca

SEQ ID NO: 2585208 - RNA, 21 nt, Human
cacaucuuucacacuuccacc

SEQ ID NO: 2585209 - RNA, 22 nt, Human
cacaucuuuaucuguucuugcu

SEQ ID NO: 2585210 - RNA, 15 nt, Human
cacaucuuuaucugu

SEQ ID NO: 2585211 - RNA, 13 nt, Human
cacaucuuggcac

SEQ ID NO: 2585212 - RNA, 23 nt, Human
cacaucuugcucugcugacagac

SEQ ID NO: 2585213 - RNA, 21 nt, Human
caccugccccucaacucuccu

SEQ ID NO: 2585214 - RNA, 18 nt, Human
caccugccccucaacucu

SEQ ID NO: 2585215 - RNA, 12 nt, Human
caccugcccugc

SEQ ID NO: 2585216 - RNA, 13 nt, Human
caccugcccugcc

SEQ ID NO: 2585217 - RNA, 22 nt, Human
caccugccagccuggcuucugg

SEQ ID NO: 2585218 - RNA, 12 nt, Human
caccugccaggg

SEQ ID NO: 2585219 - RNA, 11 nt, Human
caccugccagg

SEQ ID NO: 2585220 - RNA, 20 nt, Human
caccuaucucgugggagagc

SEQ ID NO: 2585221 - RNA, 18 nt, Human
caccuaucucgugggaga

SEQ ID NO: 2585222 - RNA, 16 nt, Human
caccuauagucccagc

SEQ ID NO: 2585223 - RNA, 13 nt, Human
caccugccagccu

SEQ ID NO: 2585224 - RNA, 14 nt, Human
caccugccagccug

SEQ ID NO: 2585225 - RNA, 15 nt, Human
caccugccagccugg

SEQ ID NO: 2585226 - RNA, 16 nt, Human
caccugccagccuggc

SEQ ID NO: 2585227 - RNA, 17 nt, Human
caccugccagccuggcu

SEQ ID NO: 2585228 - RNA, 20 nt, Human
caccugccagccuggcuucu

SEQ ID NO: 2585229 - RNA, 20 nt, Human
cacccuggggccuggaccug

SEQ ID NO: 2585230 - RNA, 19 nt, Human
cacccuggggccuggaccu

SEQ ID NO: 2585231 - RNA, 15 nt, Human
cacccuggggccugg

SEQ ID NO: 2585232 - RNA, 14 nt, Human
cacccuggggccug

SEQ ID NO: 2585233 - RNA, 22 nt, Human
cacccuggggccuggaccugcc

SEQ ID NO: 2585234 - RNA, 21 nt, Human
cacccuggggccuggaccugc

SEQ ID NO: 2585235 - RNA, 15 nt, Human
cacccuggugggcca

SEQ ID NO: 2585236 - RNA, 21 nt, Human
cacccuguacuguucuguguc

SEQ ID NO: 2585237 - RNA, 17 nt, Human
cacccuguacuguucug

SEQ ID NO: 2585238 - RNA, 16 nt, Human
cacccuguacuguucu

SEQ ID NO: 2585239 - RNA, 16 nt, Human
cacccuggugggccaa

SEQ ID NO: 2585240 - RNA, 21 nt, Human
cacccugggcccugggcugga

SEQ ID NO: 2585241 - RNA, 17 nt, Human
cacccugggcccugggc

SEQ ID NO: 2585242 - RNA, 14 nt, Human
cacccugggcccug

SEQ ID NO: 2585243 - RNA, 12 nt, Human
cacccugggccc

SEQ ID NO: 2585244 - RNA, 13 nt, Human
cacccuggggccu

SEQ ID NO: 2585245 - RNA, 22 nt, Human
cacccugggcccugggcuggaa

SEQ ID NO: 2585246 - RNA, 17 nt, Human
cacccuggggagaaagu

SEQ ID NO: 2585247 - RNA, 23 nt, Human
cacccuguacuguucugugucuu

SEQ ID NO: 2585248 - RNA, 20 nt, Human
cacccuguccaaacugccua

SEQ ID NO: 2585249 - RNA, 17 nt, Human
caccuaguggcugucca

SEQ ID NO: 2585250 - RNA, 16 nt, Human
caccuaguggcugucc

SEQ ID NO: 2585251 - RNA, 15 nt, Human
caccuaguggcuguc

SEQ ID NO: 2585252 - RNA, 14 nt, Human
caccuaguggcugu

SEQ ID NO: 2585253 - RNA, 15 nt, Human
caccuaguccaguga

SEQ ID NO: 2585254 - RNA, 23 nt, Human
cacccuguccaaacugccuaagc

SEQ ID NO: 2585255 - RNA, 22 nt, Human
caccuaguggcuguccagugcc

SEQ ID NO: 2585256 - RNA, 21 nt, Human
caccuaguggcuguccagugc

SEQ ID NO: 2585257 - RNA, 19 nt, Human
caccuaguggcuguccagu

SEQ ID NO: 2585258 - RNA, 18 nt, Human
caccuaguggcuguccag

SEQ ID NO: 2585259 - RNA, 23 nt, Human
caccuaguggcuguccagugccc

SEQ ID NO: 2585260 - RNA, 14 nt, Human
caccuauaaaacag

SEQ ID NO: 2585261 - RNA, 16 nt, Human
caccuauaaaacaggu

SEQ ID NO: 2585262 - RNA, 19 nt, Human
caccuauaaaacaggucaa

SEQ ID NO: 2585263 - RNA, 22 nt, Human
cacccuccugucuucccagggu

SEQ ID NO: 2585264 - RNA, 16 nt, Human
cacccucgaagcgcgc

SEQ ID NO: 2585265 - RNA, 24 nt, Human
cacccucgaagcgcgccacucgcu

SEQ ID NO: 2585266 - RNA, 19 nt, Human
cacccucgaagcgcgccac

SEQ ID NO: 2585267 - RNA, 23 nt, Human
cacccucgaagcgcgccacucgc

SEQ ID NO: 2585268 - RNA, 21 nt, Human
cacccuccugucuucccaggg

SEQ ID NO: 2585269 - RNA, 20 nt, Human
cacccuccugucuucccagg

SEQ ID NO: 2585270 - RNA, 19 nt, Human
cacccuccugucuucccag

SEQ ID NO: 2585271 - RNA, 12 nt, Human
cacccuccuuuc

SEQ ID NO: 2585272 - RNA, 19 nt, Human
cacccugccuuaucuugca

SEQ ID NO: 2585273 - RNA, 18 nt, Human
cacccugccuuaucuugc

SEQ ID NO: 2585274 - RNA, 12 nt, Human
cacccugcuaca

SEQ ID NO: 2585275 - RNA, 12 nt, Human
cacccugcucuc

SEQ ID NO: 2585276 - RNA, 21 nt, Human
cacccuggccgaguccaagcu

SEQ ID NO: 2585277 - RNA, 22 nt, Human
cacccuggccgaguccaagcug

SEQ ID NO: 2585278 - RNA, 11 nt, Human
cacccuggaau

SEQ ID NO: 2585279 - RNA, 21 nt, Human
cacccuggauugaucggagcc

SEQ ID NO: 2585280 - RNA, 21 nt, Human
cacccuggaggauuucaucuc

SEQ ID NO: 2585281 - RNA, 18 nt, Human
cacccugagccccuuccu

SEQ ID NO: 2585282 - RNA, 17 nt, Human
cacccugagccccuucc

SEQ ID NO: 2585283 - RNA, 12 nt, Human
cacccugagccc

SEQ ID NO: 2585284 - RNA, 23 nt, Human
cacccugaaugguuccaugccug

SEQ ID NO: 2585285 - RNA, 13 nt, Human
cacccugccuuau

SEQ ID NO: 2585286 - RNA, 12 nt, Human
cacccugccuua

SEQ ID NO: 2585287 - RNA, 22 nt, Human
cacccugauuuaggagaagcca

SEQ ID NO: 2585288 - RNA, 19 nt, Human
caccugcggugcuaucucc

SEQ ID NO: 2585289 - RNA, 17 nt, Human
caccugcggugcuaucu

SEQ ID NO: 2585290 - RNA, 14 nt, Human
caccugcccugccc

SEQ ID NO: 2585291 - RNA, 16 nt, Human
caccugcggugcuauc

SEQ ID NO: 2585292 - RNA, 20 nt, Human
caccugcggugcuaucuccc

SEQ ID NO: 2585293 - RNA, 19 nt, Human
cacugaaguuaacagagac

SEQ ID NO: 2585294 - RNA, 23 nt, Human
cacugaagaagcaccaaucauga

SEQ ID NO: 2585295 - RNA, 11 nt, Human
cacugaagaag

SEQ ID NO: 2585296 - RNA, 19 nt, Human
cacugaaguagugugcagu

SEQ ID NO: 2585297 - RNA, 18 nt, Human
cacugaaggccuggccca

SEQ ID NO: 2585298 - RNA, 17 nt, Human
cacugaagcugggauuc

SEQ ID NO: 2585299 - RNA, 12 nt, Human
cacucccaagcc

SEQ ID NO: 2585300 - RNA, 13 nt, Human
cacugaagcuggg

SEQ ID NO: 2585301 - RNA, 16 nt, Human
cacuccagugagacag

SEQ ID NO: 2585302 - RNA, 21 nt, Human
cacuccagugagacagcucug

SEQ ID NO: 2585303 - RNA, 22 nt, Human
cacuccaugcuuagucacugcc

SEQ ID NO: 2585304 - RNA, 21 nt, Human
cacuccaugcuuagucacugc

SEQ ID NO: 2585305 - RNA, 17 nt, Human
cacuccagugccagcaa

SEQ ID NO: 2585306 - RNA, 16 nt, Human
cacuccagugccagca

SEQ ID NO: 2585307 - RNA, 23 nt, Human
cacuccaugcuuagucacugccu

SEQ ID NO: 2585308 - RNA, 13 nt, Human
cacucccaagucu

SEQ ID NO: 2585309 - RNA, 17 nt, Human
cacuccagaccccuggc

SEQ ID NO: 2585310 - RNA, 14 nt, Human
cacuccaccaccca

SEQ ID NO: 2585311 - RNA, 15 nt, Human
cacuccaccacccaa

SEQ ID NO: 2585312 - RNA, 13 nt, Human
cacuccagugcca

SEQ ID NO: 2585313 - RNA, 18 nt, Human
cacuccaccacccaaaag

SEQ ID NO: 2585314 - RNA, 16 nt, Human
cacggagccacuccuc

SEQ ID NO: 2585315 - RNA, 17 nt, Human
cacggagccacuccucu

SEQ ID NO: 2585316 - RNA, 18 nt, Human
cacggagccacuccucug

SEQ ID NO: 2585317 - RNA, 19 nt, Human
cacggagccacuccucuga

SEQ ID NO: 2585318 - RNA, 21 nt, Human
cacuacauuauaaaugucucu

SEQ ID NO: 2585319 - RNA, 21 nt, Human
cacggagccacuccucugacu

SEQ ID NO: 2585320 - RNA, 23 nt, Human
cacggagccacuccucugacuca

SEQ ID NO: 2585321 - RNA, 13 nt, Human
cacuacauucugu

SEQ ID NO: 2585322 - RNA, 14 nt, Human
cacuacauucuguu

SEQ ID NO: 2585323 - RNA, 16 nt, Human
cacggaagagccuugc

SEQ ID NO: 2585324 - RNA, 22 nt, Human
cacggaagagccuugcggaagg

SEQ ID NO: 2585325 - RNA, 17 nt, Human
cacggacguuuccauca

SEQ ID NO: 2585326 - RNA, 15 nt, Human
cacggagccacuccu

SEQ ID NO: 2585327 - RNA, 18 nt, Human
cacggacguuuccaucag

SEQ ID NO: 2585328 - RNA, 15 nt, Human
cacggaaguuuucaa

SEQ ID NO: 2585329 - RNA, 17 nt, Human
cacgcuuucuagcuguu

SEQ ID NO: 2585330 - RNA, 14 nt, Human
cacggaaguuuuca

SEQ ID NO: 2585331 - RNA, 16 nt, Human
cacuagccagacacuc

SEQ ID NO: 2585332 - RNA, 20 nt, Human
cacuagccagacacucugcu

SEQ ID NO: 2585333 - RNA, 16 nt, Human
cacuagcccaaugaaa

SEQ ID NO: 2585334 - RNA, 21 nt, Human
cacuccaauuaaggauuuuau

SEQ ID NO: 2585335 - RNA, 22 nt, Human
cacuccaauuaaggauuuuaug

SEQ ID NO: 2585336 - RNA, 16 nt, Human
cacuccagaccccugg

SEQ ID NO: 2585337 - RNA, 14 nt, Human
cacuccagaccccu

SEQ ID NO: 2585338 - RNA, 19 nt, Human
cacuagcccaaugaaauga

SEQ ID NO: 2585339 - RNA, 10 nt, Human
cacuccacca

SEQ ID NO: 2585340 - RNA, 11 nt, Human
cacuccaccac

SEQ ID NO: 2585341 - RNA, 19 nt, Human
cacuccaccacccaaaagu

SEQ ID NO: 2585342 - RNA, 16 nt, Human
cacuagacccacugga

SEQ ID NO: 2585343 - RNA, 15 nt, Human
cacuagaacucucca

SEQ ID NO: 2585344 - RNA, 17 nt, Human
cacuagaacucuccauc

SEQ ID NO: 2585345 - RNA, 12 nt, Human
cacuacugcagu

SEQ ID NO: 2585346 - RNA, 15 nt, Human
cacuacauucuguua

SEQ ID NO: 2585347 - RNA, 15 nt, Human
cacuacauucauuua

SEQ ID NO: 2585348 - RNA, 21 nt, Human
cacuacugcuaccacaacuau

SEQ ID NO: 2585349 - RNA, 15 nt, Human
cacgcuggagugcag

SEQ ID NO: 2585350 - RNA, 20 nt, Human
cacgcuggagugcagugagc

SEQ ID NO: 2585351 - RNA, 18 nt, Human
cacgcuggagugcaguga

SEQ ID NO: 2585352 - RNA, 17 nt, Human
cacgcuggagugcagug

SEQ ID NO: 2585353 - RNA, 16 nt, Human
cacgcuggagugcagu

SEQ ID NO: 2585354 - RNA, 13 nt, Human
cacgcugucucca

SEQ ID NO: 2585355 - RNA, 14 nt, Human
cacgcugucuccag

SEQ ID NO: 2585356 - RNA, 15 nt, Human
cacgcugucuccaga

SEQ ID NO: 2585357 - RNA, 16 nt, Human
cacgcugucuccagac

SEQ ID NO: 2585358 - RNA, 17 nt, Human
cacgcugucuccagacc

SEQ ID NO: 2585359 - RNA, 21 nt, Human
cacgcuggagugcagugagcc

SEQ ID NO: 2585360 - RNA, 18 nt, Human
cacgcugucuccagaccc

SEQ ID NO: 2585361 - RNA, 19 nt, Human
cacgcugucuccagacccc

SEQ ID NO: 2585362 - RNA, 20 nt, Human
cacgcugucuccagaccccc

SEQ ID NO: 2585363 - RNA, 23 nt, Human
cacgcugucuccagacccccacc

SEQ ID NO: 2585364 - RNA, 16 nt, Human
cacgcugugggcaggu

SEQ ID NO: 2585365 - RNA, 18 nt, Human
cacgcugugggcaggugg

SEQ ID NO: 2585366 - RNA, 22 nt, Human
cacgcugugggcaggugggagc

SEQ ID NO: 2585367 - RNA, 14 nt, Human
cacgcuuuccugaa

SEQ ID NO: 2585368 - RNA, 14 nt, Human
cacgcuuucuagcu

SEQ ID NO: 2585369 - RNA, 19 nt, Human
cacgcuugcguaugucugu

SEQ ID NO: 2585370 - RNA, 20 nt, Human
cacgcuucuucuuuugagca

SEQ ID NO: 2585371 - RNA, 23 nt, Human
auugauaagagggcacacacugu

SEQ ID NO: 2585372 - RNA, 22 nt, Human
auugauaagagggcacacacug

SEQ ID NO: 2585373 - RNA, 17 nt, Human
auugaggggauuaauau

SEQ ID NO: 2585374 - RNA, 22 nt, Human
auugaggggauuaauaugaaaa

SEQ ID NO: 2585375 - RNA, 16 nt, Human
auugauaagagggcac

SEQ ID NO: 2585376 - RNA, 22 nt, Human
auuuaacuugaggguaauaaac

SEQ ID NO: 2585377 - RNA, 21 nt, Human
auuuaacuugaggguaauaaa

SEQ ID NO: 2585378 - RNA, 20 nt, Human
auuuaacuugaggguaauaa

SEQ ID NO: 2585379 - RNA, 18 nt, Human
auuuaacuugaggguaau

SEQ ID NO: 2585380 - RNA, 17 nt, Human
auuuaacuuguuuccaa

SEQ ID NO: 2585381 - RNA, 23 nt, Human
auuuaacuugaggguaauaaacu

SEQ ID NO: 2585382 - RNA, 20 nt, Human
auuuaacuuguuuccaaugu

SEQ ID NO: 2585383 - RNA, 16 nt, Human
auuuaagagacaguca

SEQ ID NO: 2585384 - RNA, 16 nt, Human
auuuaagacacugaaa

SEQ ID NO: 2585385 - RNA, 15 nt, Human
auuuaagacacugaa

SEQ ID NO: 2585386 - RNA, 19 nt, Human
auuuaacuugagcuuuaaa

SEQ ID NO: 2585387 - RNA, 21 nt, Human
auuuaauaguguuaaucaauu

SEQ ID NO: 2585388 - RNA, 20 nt, Human
auuuaauaguguuaaucaau

SEQ ID NO: 2585389 - RNA, 19 nt, Human
auuuaauaguguuaaucaa

SEQ ID NO: 2585390 - RNA, 18 nt, Human
auuuaauaguguuaauca

SEQ ID NO: 2585391 - RNA, 17 nt, Human
auuuaauaguguuaauc

SEQ ID NO: 2585392 - RNA, 15 nt, Human
auuuaauaguguuaa

SEQ ID NO: 2585393 - RNA, 14 nt, Human
auuuaauaguguua

SEQ ID NO: 2585394 - RNA, 22 nt, Human
auuuaauuagugcuaaguguga

SEQ ID NO: 2585395 - RNA, 21 nt, Human
auuuaauuagugcuaagugug

SEQ ID NO: 2585396 - RNA, 23 nt, Human
auuuaauaguguuaaucaauuua

SEQ ID NO: 2585397 - RNA, 22 nt, Human
auuuaauaguguuaaucaauuu

SEQ ID NO: 2585398 - RNA, 20 nt, Human
auuuaauuagugcuaagugu

SEQ ID NO: 2585399 - RNA, 23 nt, Human
auuuaauuagugcuaagugugaa

SEQ ID NO: 2585400 - RNA, 15 nt, Human
auuuaauucauguuu

SEQ ID NO: 2585401 - RNA, 17 nt, Human
auuuaauucauguuucu

SEQ ID NO: 2585402 - RNA, 16 nt, Human
auuuaauucucuugaa

SEQ ID NO: 2585403 - RNA, 13 nt, Human
auuuaauucucuu

SEQ ID NO: 2585404 - RNA, 18 nt, Human
auuuaauuagugcuaagu

SEQ ID NO: 2585405 - RNA, 15 nt, Human
auuuauauauguauu

SEQ ID NO: 2585406 - RNA, 14 nt, Human
auuuauauauguau

SEQ ID NO: 2585407 - RNA, 14 nt, Human
auuuauauauugaa

SEQ ID NO: 2585408 - RNA, 14 nt, Human
auuuauauauuuau

SEQ ID NO: 2585409 - RNA, 15 nt, Human
auuuauauagauuau

SEQ ID NO: 2585410 - RNA, 19 nt, Human
auuuauauacaaccugcuu

SEQ ID NO: 2585411 - RNA, 22 nt, Human
auuuauaguuuguacaugcauu

SEQ ID NO: 2585412 - RNA, 15 nt, Human
auuuaauucucuuga

SEQ ID NO: 2585413 - RNA, 16 nt, Human
auuuauaguuuguaca

SEQ ID NO: 2585414 - RNA, 15 nt, Human
auuuauauaaauuuu

SEQ ID NO: 2585415 - RNA, 15 nt, Human
auuuaauacagcagu

SEQ ID NO: 2585416 - RNA, 13 nt, Human
auuuaauacagca

SEQ ID NO: 2585417 - RNA, 22 nt, Human
auuuaauaaaauaauucuaaag

SEQ ID NO: 2585418 - RNA, 21 nt, Human
auuuaauaaaauaauucuaaa

SEQ ID NO: 2585419 - RNA, 19 nt, Human
auuuaauaaaauaauucua

SEQ ID NO: 2585420 - RNA, 16 nt, Human
auuuaauaaaaaaaca

SEQ ID NO: 2585421 - RNA, 22 nt, Human
auuuaagugcguguguagaguu

SEQ ID NO: 2585422 - RNA, 21 nt, Human
auuuaagugcguguguagagu

SEQ ID NO: 2585423 - RNA, 20 nt, Human
auuuaagugcguguguagag

SEQ ID NO: 2585424 - RNA, 19 nt, Human
auuuaaguucauauuccau

SEQ ID NO: 2585425 - RNA, 12 nt, Human
auuuaagcauug

SEQ ID NO: 2585426 - RNA, 13 nt, Human
auuuaagcauugu

SEQ ID NO: 2585427 - RNA, 14 nt, Human
auuuaagcauuguu

SEQ ID NO: 2585428 - RNA, 15 nt, Human
auuuaagcauuguuu

SEQ ID NO: 2585429 - RNA, 15 nt, Human
auuuaagauaauuau

SEQ ID NO: 2585430 - RNA, 11 nt, Human
auuuaagcauu

SEQ ID NO: 2585431 - RNA, 15 nt, Human
auuuaagauaguuuu

SEQ ID NO: 2585432 - RNA, 19 nt, Human
auuuaagccucauauuuaa

SEQ ID NO: 2585433 - RNA, 17 nt, Human
auuuaagccucauauuu

SEQ ID NO: 2585434 - RNA, 18 nt, Human
auuuaagcuuaugucaga

SEQ ID NO: 2585435 - RNA, 21 nt, Human
auuuaagccucauauuuaaag

SEQ ID NO: 2585436 - RNA, 14 nt, Human
auuuaagugcgugu

SEQ ID NO: 2585437 - RNA, 19 nt, Human
auuuaagugcguguguaga

SEQ ID NO: 2585438 - RNA, 21 nt, Human
auuuauccugaaauuucagau

SEQ ID NO: 2585439 - RNA, 19 nt, Human
auuuauccugaaauuucag

SEQ ID NO: 2585440 - RNA, 20 nt, Human
auuuauccugaaauuucaga

SEQ ID NO: 2585441 - RNA, 18 nt, Human
auuuauccugaaauuuca

SEQ ID NO: 2585442 - RNA, 15 nt, Human
auuuauauauuggua

SEQ ID NO: 2585443 - RNA, 18 nt, Human
auuuaucagugacagagu

SEQ ID NO: 2585444 - RNA, 15 nt, Human
auuuauauauuuaua

SEQ ID NO: 2585445 - RNA, 16 nt, Human
auuuauauauuuauaa

SEQ ID NO: 2585446 - RNA, 17 nt, Human
auuuauauauuuauaac

SEQ ID NO: 2585447 - RNA, 18 nt, Human
auuuauauauuuauaacu

SEQ ID NO: 2585448 - RNA, 23 nt, Human
auuuaucagugacagaguucacu

SEQ ID NO: 2585449 - RNA, 20 nt, Human
auuucacaacagaucaauuu

SEQ ID NO: 2585450 - RNA, 15 nt, Human
auuucacaacagauc

SEQ ID NO: 2585451 - RNA, 13 nt, Human
auuucacaacaga

SEQ ID NO: 2585452 - RNA, 23 nt, Human
auuucacaguguguuugugauug

SEQ ID NO: 2585453 - RNA, 13 nt, Human
auuucacauuaau

SEQ ID NO: 2585454 - RNA, 14 nt, Human
auuuaucucuauuu

SEQ ID NO: 2585455 - RNA, 21 nt, Human
auuucaauuuccaagagcuga

SEQ ID NO: 2585456 - RNA, 14 nt, Human
auuucacucuccuu

SEQ ID NO: 2585457 - RNA, 16 nt, Human
auuucagcagcugcag

SEQ ID NO: 2585458 - RNA, 20 nt, Human
auuucacgucgucuucugua

SEQ ID NO: 2585459 - RNA, 14 nt, Human
auuucacuauuuuu

SEQ ID NO: 2585460 - RNA, 15 nt, Human
auuucaggagcagcc

SEQ ID NO: 2585461 - RNA, 22 nt, Human
auuucacuauuuuuauuuauau

SEQ ID NO: 2585462 - RNA, 15 nt, Human
auuucaggagggauu

SEQ ID NO: 2585463 - RNA, 19 nt, Human
auuucaggauacucuguca

SEQ ID NO: 2585464 - RNA, 22 nt, Human
auuucaggauacucugucagau

SEQ ID NO: 2585465 - RNA, 15 nt, Human
auuucaccuguaaac

SEQ ID NO: 2585466 - RNA, 16 nt, Human
auuucaccuguaaacc

SEQ ID NO: 2585467 - RNA, 18 nt, Human
auuucaccuguaaaccug

SEQ ID NO: 2585468 - RNA, 19 nt, Human
auuucaccuguaaaccuga

SEQ ID NO: 2585469 - RNA, 12 nt, Human
auuucacucucc

SEQ ID NO: 2585470 - RNA, 20 nt, Human
auuucaccccucccuuucuc

SEQ ID NO: 2585471 - RNA, 15 nt, Human
auuucaccccucccu

SEQ ID NO: 2585472 - RNA, 14 nt, Human
auuucaccuguaaa

SEQ ID NO: 2585473 - RNA, 21 nt, Human
auuucaccccucccuuucucc

SEQ ID NO: 2585474 - RNA, 22 nt, Human
auuucacauuaauauuugcuga

SEQ ID NO: 2585475 - RNA, 21 nt, Human
auuucacauuaauauuugcug

SEQ ID NO: 2585476 - RNA, 15 nt, Human
auuugcacaaguuuu

SEQ ID NO: 2585477 - RNA, 18 nt, Human
auuucucuuacugcaaau

SEQ ID NO: 2585478 - RNA, 19 nt, Human
auuucucugauuugcaaaa

SEQ ID NO: 2585479 - RNA, 21 nt, Human
auuucuccuuugauaaaauaa

SEQ ID NO: 2585480 - RNA, 20 nt, Human
auuucuccuuugauaaaaua

SEQ ID NO: 2585481 - RNA, 14 nt, Human
auuucagugccaau

SEQ ID NO: 2585482 - RNA, 19 nt, Human
auuucaggggucgucacca

SEQ ID NO: 2585483 - RNA, 22 nt, Human
auuucaggggucgucaccaccu

SEQ ID NO: 2585484 - RNA, 20 nt, Human
auuucagguuuuguaaagau

SEQ ID NO: 2585485 - RNA, 21 nt, Human
auuucagguuuuguaaagaug

SEQ ID NO: 2585486 - RNA, 20 nt, Human
auuucuguuuagauaauaca

SEQ ID NO: 2585487 - RNA, 19 nt, Human
auuucuguuuagauaauac

SEQ ID NO: 2585488 - RNA, 23 nt, Human
auuucugaguuucauucuccugc

SEQ ID NO: 2585489 - RNA, 11 nt, Human
auuucugagaa

SEQ ID NO: 2585490 - RNA, 17 nt, Human
auuucugagaagguccu

SEQ ID NO: 2585491 - RNA, 18 nt, Human
auuucugaaguggacucu

SEQ ID NO: 2585492 - RNA, 20 nt, Human
auuucugaaaugaccucaag

SEQ ID NO: 2585493 - RNA, 20 nt, Human
auuucucuuacugcaaaugu

SEQ ID NO: 2585494 - RNA, 21 nt, Human
auuucuguuuagauaauacac

SEQ ID NO: 2585495 - RNA, 13 nt, Human
auuucugcauaug

SEQ ID NO: 2585496 - RNA, 16 nt, Human
auuucugcagguucuu

SEQ ID NO: 2585497 - RNA, 23 nt, Human
auuucugagaagguccuuaauga

SEQ ID NO: 2585498 - RNA, 21 nt, Human
auuucuuaaacaaauguauga

SEQ ID NO: 2585499 - RNA, 13 nt, Human
auuucuuaaacaa

SEQ ID NO: 2585500 - RNA, 20 nt, Human
caaaagguuaauaaaguaau

SEQ ID NO: 2585501 - RNA, 19 nt, Human
caaaagguucacuaaagca

SEQ ID NO: 2585502 - RNA, 13 nt, Human
caaaaggugccug

SEQ ID NO: 2585503 - RNA, 15 nt, Human
caaaaggugccugug

SEQ ID NO: 2585504 - RNA, 18 nt, Human
caaaaggugccugugagg

SEQ ID NO: 2585505 - RNA, 22 nt, Human
caaaaggugccugugaggcagg

SEQ ID NO: 2585506 - RNA, 21 nt, Human
caaacaucacucugcugcuua

SEQ ID NO: 2585507 - RNA, 18 nt, Human
caaacaucacucugcugc

SEQ ID NO: 2585508 - RNA, 18 nt, Human
caaacauccuaucaacaa

SEQ ID NO: 2585509 - RNA, 17 nt, Human
caaacaucacucugcug

SEQ ID NO: 2585510 - RNA, 23 nt, Human
caaaaggugccugugaggcaggg

SEQ ID NO: 2585511 - RNA, 12 nt, Human
caaacaugaagu

SEQ ID NO: 2585512 - RNA, 14 nt, Human
caaacaugaagugu

SEQ ID NO: 2585513 - RNA, 21 nt, Human
caaacaugaaguguguuuccu

SEQ ID NO: 2585514 - RNA, 19 nt, Human
caaaagcaucuaugugaga

SEQ ID NO: 2585515 - RNA, 13 nt, Human
caaaagcauguga

SEQ ID NO: 2585516 - RNA, 21 nt, Human
caaaagguauuuuaaucacca

SEQ ID NO: 2585517 - RNA, 15 nt, Human
caaaagcccauucau

SEQ ID NO: 2585518 - RNA, 19 nt, Human
caaaagcccauucauucca

SEQ ID NO: 2585519 - RNA, 20 nt, Human
caaaaggguuuaaacugauu

SEQ ID NO: 2585520 - RNA, 22 nt, Human
caaaaggguuuaaacugauuca

SEQ ID NO: 2585521 - RNA, 20 nt, Human
caaaagggugucugagcccu

SEQ ID NO: 2585522 - RNA, 19 nt, Human
auuuuuuuuucauacacuu

SEQ ID NO: 2585523 - RNA, 20 nt, Human
auuuuuuuuucauacacuua

SEQ ID NO: 2585524 - RNA, 21 nt, Human
auuuuuuuuucauacacuuau

SEQ ID NO: 2585525 - RNA, 20 nt, Human
caaaagauugcugaaauuuu

SEQ ID NO: 2585526 - RNA, 22 nt, Human
caaaagauugcugaaauuuuau

SEQ ID NO: 2585527 - RNA, 14 nt, Human
caaaagcaagacug

SEQ ID NO: 2585528 - RNA, 15 nt, Human
caaaagcaaaugaga

SEQ ID NO: 2585529 - RNA, 23 nt, Human
caaaagcaagacuguugcucaaa

SEQ ID NO: 2585530 - RNA, 16 nt, Human
caaaagcaagacuguu

SEQ ID NO: 2585531 - RNA, 14 nt, Human
caaaagcacccuug

SEQ ID NO: 2585532 - RNA, 14 nt, Human
auuuuuuuuucaua

SEQ ID NO: 2585533 - RNA, 16 nt, Human
auuuuuuuuucauaca

SEQ ID NO: 2585534 - RNA, 15 nt, Human
auuuuuuuuguuuca

SEQ ID NO: 2585535 - RNA, 15 nt, Human
auuuuuuuucuguua

SEQ ID NO: 2585536 - RNA, 17 nt, Human
auuuuuuuucuguuaua

SEQ ID NO: 2585537 - RNA, 14 nt, Human
auuuuuuuucaugu

SEQ ID NO: 2585538 - RNA, 15 nt, Human
auuuuuuuucauguu

SEQ ID NO: 2585539 - RNA, 16 nt, Human
auuuuuuuucauguuu

SEQ ID NO: 2585540 - RNA, 20 nt, Human
auuuuuuuucauguuuuaac

SEQ ID NO: 2585541 - RNA, 18 nt, Human
auuuuuuuucuguuauau

SEQ ID NO: 2585542 - RNA, 19 nt, Human
auuuuuuuucuguuauaua

SEQ ID NO: 2585543 - RNA, 20 nt, Human
auuuuuuuucuguuauauaa

SEQ ID NO: 2585544 - RNA, 18 nt, Human
auuuuuuuuaaguauuua

SEQ ID NO: 2585545 - RNA, 12 nt, Human
auuuuuauucau

SEQ ID NO: 2585546 - RNA, 15 nt, Human
auuuuuauuauuugu

SEQ ID NO: 2585547 - RNA, 16 nt, Human
auuuuuauuaaauuau

SEQ ID NO: 2585548 - RNA, 16 nt, Human
auuuuuauuuuucuaa

SEQ ID NO: 2585549 - RNA, 15 nt, Human
auuuuuauucauaag

SEQ ID NO: 2585550 - RNA, 22 nt, Human
auuuuuuucacuggaguuacau

SEQ ID NO: 2585551 - RNA, 14 nt, Human
auuuuuauucauaa

SEQ ID NO: 2585552 - RNA, 13 nt, Human
auuuuuauucaua

SEQ ID NO: 2585553 - RNA, 14 nt, Human
auuuuuauuuauau

SEQ ID NO: 2585554 - RNA, 14 nt, Human
auuuuuauuucaaa

SEQ ID NO: 2585555 - RNA, 15 nt, Human
auuuuuuucugaauu

SEQ ID NO: 2585556 - RNA, 15 nt, Human
auuuuuuucugauug

SEQ ID NO: 2585557 - RNA, 14 nt, Human
auuuuuuucugauu

SEQ ID NO: 2585558 - RNA, 20 nt, Human
auuuuuuucuaccuugaggu

SEQ ID NO: 2585559 - RNA, 13 nt, Human
auuuuuuucuacc

SEQ ID NO: 2585560 - RNA, 17 nt, Human
auuuuuaaaauauuuau

SEQ ID NO: 2585561 - RNA, 16 nt, Human
auuuuuaaaauauuua

SEQ ID NO: 2585562 - RNA, 22 nt, Human
auuuuuaaaaugcaacaugugu

SEQ ID NO: 2585563 - RNA, 16 nt, Human
auuuuuaaaacccauu

SEQ ID NO: 2585564 - RNA, 17 nt, Human
auuuuuaaaacccauuu

SEQ ID NO: 2585565 - RNA, 16 nt, Human
auuuuuauauuugaaa

SEQ ID NO: 2585566 - RNA, 22 nt, Human
auuuuguuuuugucuuaaaaag

SEQ ID NO: 2585567 - RNA, 19 nt, Human
auuuuuauauuugaaauau

SEQ ID NO: 2585568 - RNA, 19 nt, Human
auuuuuaaaauuuuaauau

SEQ ID NO: 2585569 - RNA, 15 nt, Human
auuuuuauggaauuu

SEQ ID NO: 2585570 - RNA, 12 nt, Human
auuuuuauggaa

SEQ ID NO: 2585571 - RNA, 14 nt, Human
auuuuuauggaauu

SEQ ID NO: 2585572 - RNA, 19 nt, Human
auuuuuaucuuucgugaua

SEQ ID NO: 2585573 - RNA, 15 nt, Human
auuuuuaucuuucgu

SEQ ID NO: 2585574 - RNA, 12 nt, Human
auuuuuaucuuu

SEQ ID NO: 2585575 - RNA, 15 nt, Human
caaaccauaaacuuc

SEQ ID NO: 2585576 - RNA, 17 nt, Human
caaaccaguaucgcuca

SEQ ID NO: 2585577 - RNA, 17 nt, Human
caaaccaucauugaaau

SEQ ID NO: 2585578 - RNA, 16 nt, Human
caaaccaucauugaaa

SEQ ID NO: 2585579 - RNA, 14 nt, Human
caaaccaucauuga

SEQ ID NO: 2585580 - RNA, 21 nt, Human
caaacaugacccuaaaucuug

SEQ ID NO: 2585581 - RNA, 22 nt, Human
caaacaugaaguguguuuccuu

SEQ ID NO: 2585582 - RNA, 23 nt, Human
caaacaugggguuggcugggccc

SEQ ID NO: 2585583 - RNA, 20 nt, Human
caaacaugggguuggcuggg

SEQ ID NO: 2585584 - RNA, 13 nt, Human
caaaccagaagca

SEQ ID NO: 2585585 - RNA, 18 nt, Human
caaacaugugguuaaugc

SEQ ID NO: 2585586 - RNA, 20 nt, Human
auuuugaaaucaugaagaua

SEQ ID NO: 2585587 - RNA, 19 nt, Human
auuuugaaaaauuccuauu

SEQ ID NO: 2585588 - RNA, 18 nt, Human
auuuugaaaaauuccuau

SEQ ID NO: 2585589 - RNA, 22 nt, Human
auuuugaaaaauuccuauugug

SEQ ID NO: 2585590 - RNA, 20 nt, Human
auuuguguuuuaauuuaaac

SEQ ID NO: 2585591 - RNA, 13 nt, Human
auuuguguuuuaa

SEQ ID NO: 2585592 - RNA, 14 nt, Human
auuuguuauaauga

SEQ ID NO: 2585593 - RNA, 21 nt, Human
auuuguguuuuaauuuaaaca

SEQ ID NO: 2585594 - RNA, 15 nt, Human
auuuguuaaauauuu

SEQ ID NO: 2585595 - RNA, 16 nt, Human
auuuguuaaauauuua

SEQ ID NO: 2585596 - RNA, 17 nt, Human
auuuguuaaauauuuac

SEQ ID NO: 2585597 - RNA, 18 nt, Human
auuuguuaaauauuuaca

SEQ ID NO: 2585598 - RNA, 21 nt, Human
auuugcacuggaguucuaugc

SEQ ID NO: 2585599 - RNA, 19 nt, Human
auuugcagagacaggaccu

SEQ ID NO: 2585600 - RNA, 22 nt, Human
auuugcagagacaggaccugac

SEQ ID NO: 2585601 - RNA, 16 nt, Human
auuugcacccuccgcc

SEQ ID NO: 2585602 - RNA, 15 nt, Human
auuugcagagacagg

SEQ ID NO: 2585603 - RNA, 15 nt, Human
auuugugugugugca

SEQ ID NO: 2585604 - RNA, 20 nt, Human
auuugugugugugcaagugu

SEQ ID NO: 2585605 - RNA, 12 nt, Human
auuugugugugu

SEQ ID NO: 2585606 - RNA, 14 nt, Human
auuugugugugugc

SEQ ID NO: 2585607 - RNA, 15 nt, Human
auuuuagucacuuuu

SEQ ID NO: 2585608 - RNA, 14 nt, Human
auuuuagucacuuu

SEQ ID NO: 2585609 - RNA, 23 nt, Human
auuuuagucacacguggucuuuc

SEQ ID NO: 2585610 - RNA, 23 nt, Human
auuuuagugacagcucugccugu

SEQ ID NO: 2585611 - RNA, 21 nt, Human
auuuuaguuucuguucugugg

SEQ ID NO: 2585612 - RNA, 19 nt, Human
auuuuaguuucuguucugu

SEQ ID NO: 2585613 - RNA, 18 nt, Human
auuuuaguuucuguucug

SEQ ID NO: 2585614 - RNA, 16 nt, Human
auuuuaguuucuguuc

SEQ ID NO: 2585615 - RNA, 15 nt, Human
auuuuaguuucuguu

SEQ ID NO: 2585616 - RNA, 14 nt, Human
auuuuaguuucugu

SEQ ID NO: 2585617 - RNA, 18 nt, Human
auuuuaguuacagcugug

SEQ ID NO: 2585618 - RNA, 14 nt, Human
auuuguugaaauua

SEQ ID NO: 2585619 - RNA, 22 nt, Human
auuuguucauagacccucucaa

SEQ ID NO: 2585620 - RNA, 23 nt, Human
auuuuagguguugauuuucuguu

SEQ ID NO: 2585621 - RNA, 21 nt, Human
auuuuagguguugauuuucug

SEQ ID NO: 2585622 - RNA, 16 nt, Human
auuuguugaaauuaug

SEQ ID NO: 2585623 - RNA, 21 nt, Human
auuuguucauagacccucuca

SEQ ID NO: 2585624 - RNA, 17 nt, Human
auuuguuauuuucagua

SEQ ID NO: 2585625 - RNA, 16 nt, Human
auuuguuauuuugcaa

SEQ ID NO: 2585626 - RNA, 19 nt, Human
auuuguucuauagcuuuuc

SEQ ID NO: 2585627 - RNA, 17 nt, Human
auuuguuauuuugcaac

SEQ ID NO: 2585628 - RNA, 19 nt, Human
auuuguuauuuguacaguu

SEQ ID NO: 2585629 - RNA, 18 nt, Human
auuuguuauuuguacagu

SEQ ID NO: 2585630 - RNA, 17 nt, Human
auuuguuauuuguacag

SEQ ID NO: 2585631 - RNA, 12 nt, Human
auuuguuaaugg

SEQ ID NO: 2585632 - RNA, 17 nt, Human
auuuucucccaggaagc

SEQ ID NO: 2585633 - RNA, 15 nt, Human
auuuucucccaggaa

SEQ ID NO: 2585634 - RNA, 23 nt, Human
auuuucucccaggaagcuuugau

SEQ ID NO: 2585635 - RNA, 16 nt, Human
auuuucuauuguuacu

SEQ ID NO: 2585636 - RNA, 16 nt, Human
auuuucugcaagccug

SEQ ID NO: 2585637 - RNA, 12 nt, Human
auuuucugcaag

SEQ ID NO: 2585638 - RNA, 18 nt, Human
auuuucucuguguuuguu

SEQ ID NO: 2585639 - RNA, 22 nt, Human
auuuucucuguguuuguuccua

SEQ ID NO: 2585640 - RNA, 18 nt, Human
auuuucuggaauacauga

SEQ ID NO: 2585641 - RNA, 19 nt, Human
auuuucuggaauacaugaa

SEQ ID NO: 2585642 - RNA, 22 nt, Human
auuuucuggaauacaugaaaua

SEQ ID NO: 2585643 - RNA, 13 nt, Human
auuuugaaaaacu

SEQ ID NO: 2585644 - RNA, 15 nt, Human
auuuugaaaaacugc

SEQ ID NO: 2585645 - RNA, 18 nt, Human
auuuucugguagauagaa

SEQ ID NO: 2585646 - RNA, 17 nt, Human
auuuucugguagauaga

SEQ ID NO: 2585647 - RNA, 20 nt, Human
auuuucugguagauagaaau

SEQ ID NO: 2585648 - RNA, 20 nt, Human
auuuucuuuuuaauaaaaag

SEQ ID NO: 2585649 - RNA, 17 nt, Human
auuuugaaaaauuccua

SEQ ID NO: 2585650 - RNA, 17 nt, Human
auuuucuauaauuuaaa

SEQ ID NO: 2585651 - RNA, 18 nt, Human
auuuucuauaauuuaaau

SEQ ID NO: 2585652 - RNA, 19 nt, Human
auuuucuauaauuuaaaua

SEQ ID NO: 2585653 - RNA, 23 nt, Human
auuuuaguuucuguucuguggaa

SEQ ID NO: 2585654 - RNA, 20 nt, Human
auuuucuauuguuacucugg

SEQ ID NO: 2585655 - RNA, 22 nt, Human
auugaggacacugauauggguc

SEQ ID NO: 2585656 - RNA, 21 nt, Human
auugaggccugcccucaggga

SEQ ID NO: 2585657 - RNA, 12 nt, Human
auugaggccugc

SEQ ID NO: 2585658 - RNA, 17 nt, Human
auucuuuaucuugacau

SEQ ID NO: 2585659 - RNA, 21 nt, Human
auucuuuauacaacagugcua

SEQ ID NO: 2585660 - RNA, 19 nt, Human
auucuuuauacaacagugc

SEQ ID NO: 2585661 - RNA, 18 nt, Human
auucuuuauacaacagug

SEQ ID NO: 2585662 - RNA, 13 nt, Human
auucuuuauacaa

SEQ ID NO: 2585663 - RNA, 17 nt, Human
auucuuuaaauuucauc

SEQ ID NO: 2585664 - RNA, 15 nt, Human
auucucuuauccaac

SEQ ID NO: 2585665 - RNA, 23 nt, Human
auucuuuauacaacagugcuaaa

SEQ ID NO: 2585666 - RNA, 19 nt, Human
auucuuucaagugaaucua

SEQ ID NO: 2585667 - RNA, 16 nt, Human
auucuuuccauuauga

SEQ ID NO: 2585668 - RNA, 17 nt, Human
auucuuuccauuaugau

SEQ ID NO: 2585669 - RNA, 21 nt, Human
auucuuuccauuaugauucuu

SEQ ID NO: 2585670 - RNA, 22 nt, Human
auucuuuccauuaugauucuuu

SEQ ID NO: 2585671 - RNA, 13 nt, Human
auucguucugugg

SEQ ID NO: 2585672 - RNA, 19 nt, Human
auucucuaguuugauuaaa

SEQ ID NO: 2585673 - RNA, 20 nt, Human
auucucuaguuugauuaaau

SEQ ID NO: 2585674 - RNA, 21 nt, Human
auucgguauccccccaucuug

SEQ ID NO: 2585675 - RNA, 21 nt, Human
auucggugugcaccaggguug

SEQ ID NO: 2585676 - RNA, 23 nt, Human
auucgguguggugcagugugaaa

SEQ ID NO: 2585677 - RNA, 21 nt, Human
auucgugcagcauaugaggau

SEQ ID NO: 2585678 - RNA, 23 nt, Human
auucguggugaucaauuaaaugu

SEQ ID NO: 2585679 - RNA, 23 nt, Human
auucucuaguuugauuaaauucu

SEQ ID NO: 2585680 - RNA, 14 nt, Human
auucucuccaaaaa

SEQ ID NO: 2585681 - RNA, 15 nt, Human
auucucuccaaaaau

SEQ ID NO: 2585682 - RNA, 19 nt, Human
auucucuccaaaaaugcac

SEQ ID NO: 2585683 - RNA, 12 nt, Human
auucucuuaucc

SEQ ID NO: 2585684 - RNA, 14 nt, Human
auucucuuauccaa

SEQ ID NO: 2585685 - RNA, 19 nt, Human
auucauucuuagcucuuaa

SEQ ID NO: 2585686 - RNA, 14 nt, Human
auucauucuuagcu

SEQ ID NO: 2585687 - RNA, 10 nt, Human
auucauuuaa

SEQ ID NO: 2585688 - RNA, 16 nt, Human
auucauuguauaaaaa

SEQ ID NO: 2585689 - RNA, 20 nt, Human
auucauugaagucagaugug

SEQ ID NO: 2585690 - RNA, 15 nt, Human
auucauugaagucag

SEQ ID NO: 2585691 - RNA, 19 nt, Human
auucauuguauaaaaauag

SEQ ID NO: 2585692 - RNA, 16 nt, Human
auucauuuaaaaugau

SEQ ID NO: 2585693 - RNA, 15 nt, Human
auucauuuaaaauga

SEQ ID NO: 2585694 - RNA, 14 nt, Human
auucauuuaaaaug

SEQ ID NO: 2585695 - RNA, 13 nt, Human
auucauuuaaaau

SEQ ID NO: 2585696 - RNA, 17 nt, Human
auucauuuaaaaugauu

SEQ ID NO: 2585697 - RNA, 18 nt, Human
auuccuuugaagaggaaa

SEQ ID NO: 2585698 - RNA, 16 nt, Human
auuccuuugaagagga

SEQ ID NO: 2585699 - RNA, 17 nt, Human
auuccuuucucauccca

SEQ ID NO: 2585700 - RNA, 15 nt, Human
auuccuuucucaucc

SEQ ID NO: 2585701 - RNA, 16 nt, Human
auuccuuucuaucauu

SEQ ID NO: 2585702 - RNA, 17 nt, Human
auuccuuucuaucauuu

SEQ ID NO: 2585703 - RNA, 11 nt, Human
auucauuucaa

SEQ ID NO: 2585704 - RNA, 21 nt, Human
auucgaccugauuuacaguuu

SEQ ID NO: 2585705 - RNA, 20 nt, Human
auucgaccugauuuacaguu

SEQ ID NO: 2585706 - RNA, 18 nt, Human
auucgaccugauuuacag

SEQ ID NO: 2585707 - RNA, 15 nt, Human
auucgaaccaggaaa

SEQ ID NO: 2585708 - RNA, 16 nt, Human
auucgaccugauuuac

SEQ ID NO: 2585709 - RNA, 18 nt, Human
auuccuuuguguuucuau

SEQ ID NO: 2585710 - RNA, 20 nt, Human
auuccuuugaagaggaaaau

SEQ ID NO: 2585711 - RNA, 18 nt, Human
auuccuuuuguguacagu

SEQ ID NO: 2585712 - RNA, 16 nt, Human
auucgagacagaaccu

SEQ ID NO: 2585713 - RNA, 17 nt, Human
auucgagacagaaccuu

SEQ ID NO: 2585714 - RNA, 19 nt, Human
auucgcccaaagccagaca

SEQ ID NO: 2585715 - RNA, 21 nt, Human
auucgcccaaagccagacagc

SEQ ID NO: 2585716 - RNA, 20 nt, Human
auucgcccaaagccagacag

SEQ ID NO: 2585717 - RNA, 16 nt, Human
auuagauguucucuau

SEQ ID NO: 2585718 - RNA, 14 nt, Human
auuagauguucucu

SEQ ID NO: 2585719 - RNA, 13 nt, Human
auuagauguucuc

SEQ ID NO: 2585720 - RNA, 22 nt, Human
auuagagggagguguuuaaaga

SEQ ID NO: 2585721 - RNA, 13 nt, Human
auuagagggaggu

SEQ ID NO: 2585722 - RNA, 21 nt, Human
auuagagggaggagaaugagc

SEQ ID NO: 2585723 - RNA, 19 nt, Human
auuagagggaggagaauga

SEQ ID NO: 2585724 - RNA, 17 nt, Human
auuagagugucuuucca

SEQ ID NO: 2585725 - RNA, 23 nt, Human
auuagagugucuuuccacggagc

SEQ ID NO: 2585726 - RNA, 16 nt, Human
auuagagugucuuucc

SEQ ID NO: 2585727 - RNA, 15 nt, Human
auuagagucagccuu

SEQ ID NO: 2585728 - RNA, 22 nt, Human
auuagaugugauuuaauagugu

SEQ ID NO: 2585729 - RNA, 21 nt, Human
auuagaugugauuuaauagug

SEQ ID NO: 2585730 - RNA, 15 nt, Human
auuagaugugauuua

SEQ ID NO: 2585731 - RNA, 14 nt, Human
auuagaugugauuu

SEQ ID NO: 2585732 - RNA, 13 nt, Human
auuagaugugauu

SEQ ID NO: 2585733 - RNA, 16 nt, Human
auuauguauguuuaca

SEQ ID NO: 2585734 - RNA, 15 nt, Human
auuauguauguuuac

SEQ ID NO: 2585735 - RNA, 19 nt, Human
auuauguccacuguguaua

SEQ ID NO: 2585736 - RNA, 17 nt, Human
auuauguccacugugua

SEQ ID NO: 2585737 - RNA, 17 nt, Human
auuauguauguuuacau

SEQ ID NO: 2585738 - RNA, 21 nt, Human
auuaugugccagauuuaugca

SEQ ID NO: 2585739 - RNA, 13 nt, Human
auuaugugccaga

SEQ ID NO: 2585740 - RNA, 20 nt, Human
auucaaguauuagggguaau

SEQ ID NO: 2585741 - RNA, 12 nt, Human
auucaaguauua

SEQ ID NO: 2585742 - RNA, 21 nt, Human
auucaaggcauuucuaucaca

SEQ ID NO: 2585743 - RNA, 15 nt, Human
auucaagguggccaa

SEQ ID NO: 2585744 - RNA, 21 nt, Human
auucaaguguaaaauauuuug

SEQ ID NO: 2585745 - RNA, 20 nt, Human
auucaaguguaaaauauuuu

SEQ ID NO: 2585746 - RNA, 15 nt, Human
auucaaguuauugua

SEQ ID NO: 2585747 - RNA, 14 nt, Human
auucaaguuauugu

SEQ ID NO: 2585748 - RNA, 21 nt, Human
auucaagucuaugaugcuguu

SEQ ID NO: 2585749 - RNA, 16 nt, Human
auucaaguguacagug

SEQ ID NO: 2585750 - RNA, 16 nt, Human
auucaaguuauuguac

SEQ ID NO: 2585751 - RNA, 17 nt, Human
auucaauaaaguauuua

SEQ ID NO: 2585752 - RNA, 14 nt, Human
auucaauaaaguau

SEQ ID NO: 2585753 - RNA, 13 nt, Human
auucaauaaagua

SEQ ID NO: 2585754 - RNA, 12 nt, Human
auucaauaaagu

SEQ ID NO: 2585755 - RNA, 19 nt, Human
auucauaguaacuucuuau

SEQ ID NO: 2585756 - RNA, 14 nt, Human
auucauuacagcuu

SEQ ID NO: 2585757 - RNA, 12 nt, Human
auucauguaaac

SEQ ID NO: 2585758 - RNA, 12 nt, Human
auucauguuucu

SEQ ID NO: 2585759 - RNA, 13 nt, Human
auucauguuucuu

SEQ ID NO: 2585760 - RNA, 15 nt, Human
auucauguuucuuaa

SEQ ID NO: 2585761 - RNA, 12 nt, Human
auucauuccauu

SEQ ID NO: 2585762 - RNA, 17 nt, Human
auucauuccauucugga

SEQ ID NO: 2585763 - RNA, 20 nt, Human
auucauuauuuuuccacuuu

SEQ ID NO: 2585764 - RNA, 19 nt, Human
auucauuauuuuuccacuu

SEQ ID NO: 2585765 - RNA, 19 nt, Human
auucauuccauucuggaag

SEQ ID NO: 2585766 - RNA, 18 nt, Human
auucauuccauucuggaa

SEQ ID NO: 2585767 - RNA, 14 nt, Human
auucauauuuacuu

SEQ ID NO: 2585768 - RNA, 17 nt, Human
auucauggccuggggga

SEQ ID NO: 2585769 - RNA, 17 nt, Human
auucauauugaauauaa

SEQ ID NO: 2585770 - RNA, 14 nt, Human
auucauauugaaua

SEQ ID NO: 2585771 - RNA, 13 nt, Human
auucauauugaau

SEQ ID NO: 2585772 - RNA, 14 nt, Human
auuaacaaauuaug

SEQ ID NO: 2585773 - RNA, 21 nt, Human
auuaacaugaauauuuagugu

SEQ ID NO: 2585774 - RNA, 23 nt, Human
auuaacaguuuuccaugaaaacg

SEQ ID NO: 2585775 - RNA, 18 nt, Human
auuaacauaggugaaagu

SEQ ID NO: 2585776 - RNA, 12 nt, Human
auuaacaguuuu

SEQ ID NO: 2585777 - RNA, 14 nt, Human
auuaacaguuuucc

SEQ ID NO: 2585778 - RNA, 16 nt, Human
auuaacaguuuuccau

SEQ ID NO: 2585779 - RNA, 18 nt, Human
auuaacaguuuuccauga

SEQ ID NO: 2585780 - RNA, 19 nt, Human
auuaacaguuuuccaugaa

SEQ ID NO: 2585781 - RNA, 21 nt, Human
auuaacaguuuuccaugaaaa

SEQ ID NO: 2585782 - RNA, 22 nt, Human
auuaacaguuuuccaugaaaac

SEQ ID NO: 2585783 - RNA, 18 nt, Human
auuaacaacaauaacacu

SEQ ID NO: 2585784 - RNA, 20 nt, Human
auuaacaaauuauguuacau

SEQ ID NO: 2585785 - RNA, 11 nt, Human
auuaacacugc

SEQ ID NO: 2585786 - RNA, 20 nt, Human
auuaauuguuuugcacuuuu

SEQ ID NO: 2585787 - RNA, 19 nt, Human
auuaauuguuuugcacuuu

SEQ ID NO: 2585788 - RNA, 18 nt, Human
auuaauuguuuugcacuu

SEQ ID NO: 2585789 - RNA, 21 nt, Human
auuaauuggcagcagauuuua

SEQ ID NO: 2585790 - RNA, 20 nt, Human
auuaauuggcagcagauuuu

SEQ ID NO: 2585791 - RNA, 12 nt, Human
auuaaugcacuu

SEQ ID NO: 2585792 - RNA, 16 nt, Human
auuaaugcacuuucua

SEQ ID NO: 2585793 - RNA, 15 nt, Human
auuaaugcacuuucu

SEQ ID NO: 2585794 - RNA, 14 nt, Human
auuaaugcacuuuc

SEQ ID NO: 2585795 - RNA, 13 nt, Human
auuaaugcacuuu

SEQ ID NO: 2585796 - RNA, 17 nt, Human
auuaaugccuuuaaagu

SEQ ID NO: 2585797 - RNA, 16 nt, Human
auuaaugccuuuaaag

SEQ ID NO: 2585798 - RNA, 15 nt, Human
auuaaugccuuuaaa

SEQ ID NO: 2585799 - RNA, 20 nt, Human
auuaaugccauuaucccuga

SEQ ID NO: 2585800 - RNA, 15 nt, Human
auuaauggaaauguu

SEQ ID NO: 2585801 - RNA, 21 nt, Human
auuaaugccuuuaaaguauga

SEQ ID NO: 2585802 - RNA, 18 nt, Human
auuaaugccuuuaaagua

SEQ ID NO: 2585803 - RNA, 14 nt, Human
auuacacaaaacaa

SEQ ID NO: 2585804 - RNA, 13 nt, Human
auuacacaaaaca

SEQ ID NO: 2585805 - RNA, 19 nt, Human
auuacacuguauuuguauc

SEQ ID NO: 2585806 - RNA, 18 nt, Human
auuacacuguauuuguau

SEQ ID NO: 2585807 - RNA, 14 nt, Human
auuacacccaaaga

SEQ ID NO: 2585808 - RNA, 18 nt, Human
auuacacaaaacaaaugc

SEQ ID NO: 2585809 - RNA, 17 nt, Human
auuacacaaaacaaaug

SEQ ID NO: 2585810 - RNA, 21 nt, Human
auuacaccagccucgucuuca

SEQ ID NO: 2585811 - RNA, 17 nt, Human
auuaauuuuuuuauugu

SEQ ID NO: 2585812 - RNA, 19 nt, Human
auuaauuggcagcagauuu

SEQ ID NO: 2585813 - RNA, 16 nt, Human
auuaauuuuuuuauug

SEQ ID NO: 2585814 - RNA, 19 nt, Human
auuaauuuuuuuauuguuu

SEQ ID NO: 2585815 - RNA, 18 nt, Human
auuaauuuuuuuauuguu

SEQ ID NO: 2585816 - RNA, 22 nt, Human
auuacaagcgugagccacugca

SEQ ID NO: 2585817 - RNA, 15 nt, Human
auuacaggcuccugc

SEQ ID NO: 2585818 - RNA, 16 nt, Human
auuacaggcuccugcc

SEQ ID NO: 2585819 - RNA, 15 nt, Human
auuacagagaggaga

SEQ ID NO: 2585820 - RNA, 17 nt, Human
auuacagagaggagaaa

SEQ ID NO: 2585821 - RNA, 20 nt, Human
auuacacuguauuuguaucu

SEQ ID NO: 2585822 - RNA, 12 nt, Human
auuacagagagg

SEQ ID NO: 2585823 - RNA, 17 nt, Human
auuacaggcuccugcca

SEQ ID NO: 2585824 - RNA, 19 nt, Human
auuacaggcuccugccacc

SEQ ID NO: 2585825 - RNA, 13 nt, Human
auuacagguguga

SEQ ID NO: 2585826 - RNA, 15 nt, Human
auuacaggcuugagc

SEQ ID NO: 2585827 - RNA, 23 nt, Human
cagagcuucccugacucauucug

SEQ ID NO: 2585828 - RNA, 19 nt, Human
cagagcugacacaggauga

SEQ ID NO: 2585829 - RNA, 19 nt, Human
cagagcuuggacuggaugc

SEQ ID NO: 2585830 - RNA, 16 nt, Human
cagagcuuggacugga

SEQ ID NO: 2585831 - RNA, 15 nt, Human
cagagcuuggacugg

SEQ ID NO: 2585832 - RNA, 20 nt, Human
cagagcuucuuccaggugcc

SEQ ID NO: 2585833 - RNA, 23 nt, Human
cagagcuucuuccaggugcccag

SEQ ID NO: 2585834 - RNA, 19 nt, Human
cagaggaaagcaaaggaga

SEQ ID NO: 2585835 - RNA, 17 nt, Human
cagaggaaagcaaagga

SEQ ID NO: 2585836 - RNA, 13 nt, Human
cagaggggguggc

SEQ ID NO: 2585837 - RNA, 18 nt, Human
cagaggggcuuucuggag

SEQ ID NO: 2585838 - RNA, 23 nt, Human
cagagaggguggugaccucugcc

SEQ ID NO: 2585839 - RNA, 23 nt, Human
cagagagggugggagugggccca

SEQ ID NO: 2585840 - RNA, 17 nt, Human
cagagagggugacaaga

SEQ ID NO: 2585841 - RNA, 21 nt, Human
cagagagggcaggcaugaagu

SEQ ID NO: 2585842 - RNA, 18 nt, Human
cagagagggugacaagau

SEQ ID NO: 2585843 - RNA, 19 nt, Human
cagagaggucaagcccagg

SEQ ID NO: 2585844 - RNA, 20 nt, Human
cagagagguuaaggugggua

SEQ ID NO: 2585845 - RNA, 20 nt, Human
cagagagucccacugccuca

SEQ ID NO: 2585846 - RNA, 18 nt, Human
cagagagucccacugccu

SEQ ID NO: 2585847 - RNA, 14 nt, Human
cagagagucccacu

SEQ ID NO: 2585848 - RNA, 12 nt, Human
cagagaguccca

SEQ ID NO: 2585849 - RNA, 21 nt, Human
cagagaggucaagcccaggag

SEQ ID NO: 2585850 - RNA, 13 nt, Human
cagagcugccacc

SEQ ID NO: 2585851 - RNA, 15 nt, Human
cagagcugacacagg

SEQ ID NO: 2585852 - RNA, 14 nt, Human
cagagcugacacag

SEQ ID NO: 2585853 - RNA, 17 nt, Human
cagagcucuccagcucc

SEQ ID NO: 2585854 - RNA, 20 nt, Human
cagagcucuccagcuccaag

SEQ ID NO: 2585855 - RNA, 15 nt, Human
cagagcucuccagcu

SEQ ID NO: 2585856 - RNA, 14 nt, Human
cagagcucuccagc

SEQ ID NO: 2585857 - RNA, 17 nt, Human
cagagcuacuugggcca

SEQ ID NO: 2585858 - RNA, 22 nt, Human
cagagagucccacugccucagg

SEQ ID NO: 2585859 - RNA, 12 nt, Human
cagagcucacaa

SEQ ID NO: 2585860 - RNA, 23 nt, Human
cagagacuccugcaggcagccag

SEQ ID NO: 2585861 - RNA, 14 nt, Human
cagagacugcugug

SEQ ID NO: 2585862 - RNA, 20 nt, Human
cagagacuugggacauugcc

SEQ ID NO: 2585863 - RNA, 18 nt, Human
cagagacuugggacauug

SEQ ID NO: 2585864 - RNA, 15 nt, Human
cagagacuugggaca

SEQ ID NO: 2585865 - RNA, 14 nt, Human
cagagagaagccug

SEQ ID NO: 2585866 - RNA, 12 nt, Human
cagagagaagcc

SEQ ID NO: 2585867 - RNA, 22 nt, Human
cagagagagaagugccccugcu

SEQ ID NO: 2585868 - RNA, 23 nt, Human
cagagagagaagugccccugcug

SEQ ID NO: 2585869 - RNA, 19 nt, Human
cagagagagaagugccccu

SEQ ID NO: 2585870 - RNA, 20 nt, Human
cagagagagaagugccccug

SEQ ID NO: 2585871 - RNA, 21 nt, Human
cagagagagaagugccccugc

SEQ ID NO: 2585872 - RNA, 12 nt, Human
cagagagggugg

SEQ ID NO: 2585873 - RNA, 15 nt, Human
cagagagggcaggca

SEQ ID NO: 2585874 - RNA, 14 nt, Human
cagagagggcaggc

SEQ ID NO: 2585875 - RNA, 13 nt, Human
cagagagggcagg

SEQ ID NO: 2585876 - RNA, 12 nt, Human
cagagagggcag

SEQ ID NO: 2585877 - RNA, 18 nt, Human
cagagagggcaggcauga

SEQ ID NO: 2585878 - RNA, 16 nt, Human
cagagagggcaggcau

SEQ ID NO: 2585879 - RNA, 15 nt, Human
cagagagggggccac

SEQ ID NO: 2585880 - RNA, 22 nt, Human
cagagaggguggugaccucugc

SEQ ID NO: 2585881 - RNA, 20 nt, Human
cagagaggguggugaccucu

SEQ ID NO: 2585882 - RNA, 17 nt, Human
cagagaggguggugacc

SEQ ID NO: 2585883 - RNA, 22 nt, Human
cagagagggggccaccucccca

SEQ ID NO: 2585884 - RNA, 20 nt, Human
cagagagggggccaccuccc

SEQ ID NO: 2585885 - RNA, 14 nt, Human
cagauccccaagcc

SEQ ID NO: 2585886 - RNA, 15 nt, Human
cagaucccagcucac

SEQ ID NO: 2585887 - RNA, 12 nt, Human
cagaucccagcu

SEQ ID NO: 2585888 - RNA, 14 nt, Human
cagaucccagcuca

SEQ ID NO: 2585889 - RNA, 15 nt, Human
cagauccagggacug

SEQ ID NO: 2585890 - RNA, 22 nt, Human
cagaucccagaaggaccuccug

SEQ ID NO: 2585891 - RNA, 12 nt, Human
cagauccaggac

SEQ ID NO: 2585892 - RNA, 13 nt, Human
cagauccaggacu

SEQ ID NO: 2585893 - RNA, 13 nt, Human
cagauccagggac

SEQ ID NO: 2585894 - RNA, 14 nt, Human
cagauccagggaca

SEQ ID NO: 2585895 - RNA, 15 nt, Human
cagauccagggacag

SEQ ID NO: 2585896 - RNA, 23 nt, Human
cagauccagggacagaggcccca

SEQ ID NO: 2585897 - RNA, 19 nt, Human
cagauauauuuuucacagu

SEQ ID NO: 2585898 - RNA, 18 nt, Human
cagauaugauauguaaac

SEQ ID NO: 2585899 - RNA, 18 nt, Human
cagauccagccugggguc

SEQ ID NO: 2585900 - RNA, 13 nt, Human
cagauauauuuuu

SEQ ID NO: 2585901 - RNA, 14 nt, Human
cagauauauuuuuc

SEQ ID NO: 2585902 - RNA, 15 nt, Human
cagauauauuuuuca

SEQ ID NO: 2585903 - RNA, 15 nt, Human
cagauaugauaugua

SEQ ID NO: 2585904 - RNA, 16 nt, Human
cagauauauuuuucac

SEQ ID NO: 2585905 - RNA, 18 nt, Human
cagauauauuuuucacag

SEQ ID NO: 2585906 - RNA, 16 nt, Human
cagaggggguggccuc

SEQ ID NO: 2585907 - RNA, 14 nt, Human
cagaggggguggcc

SEQ ID NO: 2585908 - RNA, 19 nt, Human
cagauacuuggggggcuga

SEQ ID NO: 2585909 - RNA, 19 nt, Human
cagauagauauaugcucug

SEQ ID NO: 2585910 - RNA, 19 nt, Human
cagaggggcuuucuggaga

SEQ ID NO: 2585911 - RNA, 23 nt, Human
cagauauaaauggcugguuuuua

SEQ ID NO: 2585912 - RNA, 20 nt, Human
cagauauaaauggcugguuu

SEQ ID NO: 2585913 - RNA, 18 nt, Human
cagauauaaauggcuggu

SEQ ID NO: 2585914 - RNA, 20 nt, Human
cagauauauaucauauuggu

SEQ ID NO: 2585915 - RNA, 22 nt, Human
cagauauaaauggcugguuuuu

SEQ ID NO: 2585916 - RNA, 19 nt, Human
cagauauauuaagugacug

SEQ ID NO: 2585917 - RNA, 22 nt, Human
cagauauaaaagacugaccaau

SEQ ID NO: 2585918 - RNA, 18 nt, Human
cagauugcaacaggcugg

SEQ ID NO: 2585919 - RNA, 14 nt, Human
cagauuguuaucua

SEQ ID NO: 2585920 - RNA, 22 nt, Human
cagauuggcucacacugagaau

SEQ ID NO: 2585921 - RNA, 21 nt, Human
cagauuggcucacacugagaa

SEQ ID NO: 2585922 - RNA, 20 nt, Human
cagauuggcucacacugaga

SEQ ID NO: 2585923 - RNA, 20 nt, Human
cagauugcaacaggcugggc

SEQ ID NO: 2585924 - RNA, 19 nt, Human
cagauugcaacaggcuggg

SEQ ID NO: 2585925 - RNA, 13 nt, Human
cagauuuaugcau

SEQ ID NO: 2585926 - RNA, 18 nt, Human
cagauuuacacugggaga

SEQ ID NO: 2585927 - RNA, 17 nt, Human
cagauuuacacugggag

SEQ ID NO: 2585928 - RNA, 14 nt, Human
cagauuuacacugg

SEQ ID NO: 2585929 - RNA, 13 nt, Human
cagauuuacacug

SEQ ID NO: 2585930 - RNA, 20 nt, Human
cagauuucacucuccuuggu

SEQ ID NO: 2585931 - RNA, 22 nt, Human
cagauuuagugaaagcuagaga

SEQ ID NO: 2585932 - RNA, 17 nt, Human
cagauuuagugaaagcu

SEQ ID NO: 2585933 - RNA, 20 nt, Human
cagauuuagugaaagcuaga

SEQ ID NO: 2585934 - RNA, 17 nt, Human
cagcaccaucucuccuc

SEQ ID NO: 2585935 - RNA, 22 nt, Human
cagcaccacccuagucccuucc

SEQ ID NO: 2585936 - RNA, 21 nt, Human
cagcaccacccuagucccuuc

SEQ ID NO: 2585937 - RNA, 16 nt, Human
cagauuuccagucucc

SEQ ID NO: 2585938 - RNA, 19 nt, Human
cagauuucacucuccuugg

SEQ ID NO: 2585939 - RNA, 24 nt, Human
cagauuuccagucuccaccaggaa

SEQ ID NO: 2585940 - RNA, 19 nt, Human
cagcaccaucucuccuccu

SEQ ID NO: 2585941 - RNA, 20 nt, Human
cagcaccauccgccagggcc

SEQ ID NO: 2585942 - RNA, 21 nt, Human
cagcaccauccgccagggccc

SEQ ID NO: 2585943 - RNA, 18 nt, Human
cagcacccagcaacucca

SEQ ID NO: 2585944 - RNA, 15 nt, Human
cagcaccccuuccau

SEQ ID NO: 2585945 - RNA, 14 nt, Human
cagcaccccuucca

SEQ ID NO: 2585946 - RNA, 13 nt, Human
cagcaccccuucc

SEQ ID NO: 2585947 - RNA, 16 nt, Human
cagcaccccugucucu

SEQ ID NO: 2585948 - RNA, 22 nt, Human
cagccaggcugccaaggccaga

SEQ ID NO: 2585949 - RNA, 13 nt, Human
cagccaggcugcc

SEQ ID NO: 2585950 - RNA, 16 nt, Human
cagccaggcugccaag

SEQ ID NO: 2585951 - RNA, 18 nt, Human
cagccaggcgggcucaag

SEQ ID NO: 2585952 - RNA, 16 nt, Human
cagccaggcgggcuca

SEQ ID NO: 2585953 - RNA, 15 nt, Human
cagccaggcgggcuc

SEQ ID NO: 2585954 - RNA, 14 nt, Human
cagccaggcgggcu

SEQ ID NO: 2585955 - RNA, 20 nt, Human
cagccaggcgggcucaagga

SEQ ID NO: 2585956 - RNA, 19 nt, Human
cagccaggcgggcucaagg

SEQ ID NO: 2585957 - RNA, 14 nt, Human
cagccaggcucugu

SEQ ID NO: 2585958 - RNA, 18 nt, Human
cagccaggcucugugcug

SEQ ID NO: 2585959 - RNA, 17 nt, Human
cagccaggcucugugcu

SEQ ID NO: 2585960 - RNA, 16 nt, Human
cagccaggcucugugc

SEQ ID NO: 2585961 - RNA, 15 nt, Human
cagccaggcucugug

SEQ ID NO: 2585962 - RNA, 23 nt, Human
cagccaggcucugugcugacccu

SEQ ID NO: 2585963 - RNA, 22 nt, Human
cagccaggcucugugcugaccc

SEQ ID NO: 2585964 - RNA, 12 nt, Human
cagccaggcugc

SEQ ID NO: 2585965 - RNA, 14 nt, Human
cagcacgauuucug

SEQ ID NO: 2585966 - RNA, 15 nt, Human
cagcacgauuucugu

SEQ ID NO: 2585967 - RNA, 12 nt, Human
cagcaccuggca

SEQ ID NO: 2585968 - RNA, 13 nt, Human
cagcaccugucuc

SEQ ID NO: 2585969 - RNA, 17 nt, Human
cagcacguguggccugu

SEQ ID NO: 2585970 - RNA, 18 nt, Human
cagcacgggggccaagga

SEQ ID NO: 2585971 - RNA, 14 nt, Human
cagccagacuggca

SEQ ID NO: 2585972 - RNA, 22 nt, Human
cagccagaccuauuccuccugg

SEQ ID NO: 2585973 - RNA, 20 nt, Human
cagccagaccuauuccuccu

SEQ ID NO: 2585974 - RNA, 14 nt, Human
cagcacuacucugu

SEQ ID NO: 2585975 - RNA, 11 nt, Human
cagcacuacuc

SEQ ID NO: 2585976 - RNA, 20 nt, Human
cagcacuaaagcaguggaca

SEQ ID NO: 2585977 - RNA, 10 nt, Human
cagcacuaac

SEQ ID NO: 2585978 - RNA, 14 nt, Human
cagcacuaaagcag

SEQ ID NO: 2585979 - RNA, 17 nt, Human
cagcacuaaagcagugg

SEQ ID NO: 2585980 - RNA, 19 nt, Human
cagcacuaaagcaguggac

SEQ ID NO: 2585981 - RNA, 15 nt, Human
cagccagacuggcac

SEQ ID NO: 2585982 - RNA, 18 nt, Human
cagccagacuggcacagu

SEQ ID NO: 2585983 - RNA, 20 nt, Human
cagccagacuggcacaguuu

SEQ ID NO: 2585984 - RNA, 11 nt, Human
cagccagccca

SEQ ID NO: 2585985 - RNA, 12 nt, Human
cagccagcccag

SEQ ID NO: 2585986 - RNA, 20 nt, Human
cagccagcccagcccagcug

SEQ ID NO: 2585987 - RNA, 17 nt, Human
cagccagcccagcccag

SEQ ID NO: 2585988 - RNA, 19 nt, Human
cagccagcccagcccagcu

SEQ ID NO: 2585989 - RNA, 13 nt, Human
cagccagcccagc

SEQ ID NO: 2585990 - RNA, 14 nt, Human
cagccagcccagcc

SEQ ID NO: 2585991 - RNA, 15 nt, Human
cagccagcccagccc

SEQ ID NO: 2585992 - RNA, 16 nt, Human
cagccagcccagccca

SEQ ID NO: 2585993 - RNA, 18 nt, Human
cagccaggccacuggccc

SEQ ID NO: 2585994 - RNA, 13 nt, Human
cagccaggcgggc

SEQ ID NO: 2585995 - RNA, 12 nt, Human
cagccaggcggg

SEQ ID NO: 2585996 - RNA, 15 nt, Human
cagccaggccccagg

SEQ ID NO: 2585997 - RNA, 23 nt, Human
cagacuguguauucauugaaguc

SEQ ID NO: 2585998 - RNA, 14 nt, Human
cagacuguguauuc

SEQ ID NO: 2585999 - RNA, 12 nt, Human
cagacuguguau

SEQ ID NO: 2586000 - RNA, 22 nt, Human
cagacuguguaaaaagagagcu

SEQ ID NO: 2586001 - RNA, 23 nt, Human
cagacugguugaguucagguagc

SEQ ID NO: 2586002 - RNA, 21 nt, Human
cagacuguguaaaaagagagc

SEQ ID NO: 2586003 - RNA, 20 nt, Human
cagacuggugagcagacugg

SEQ ID NO: 2586004 - RNA, 18 nt, Human
cagacuuaccaggaagca

SEQ ID NO: 2586005 - RNA, 24 nt, Human
cagacuguuagaaaauggacacug

SEQ ID NO: 2586006 - RNA, 23 nt, Human
cagacuguuagaaaauggacacu

SEQ ID NO: 2586007 - RNA, 14 nt, Human
cagacuuaccagga

SEQ ID NO: 2586008 - RNA, 21 nt, Human
cagacaggcaagcaccuccug

SEQ ID NO: 2586009 - RNA, 20 nt, Human
cagacaggcaagcaccuccu

SEQ ID NO: 2586010 - RNA, 18 nt, Human
cagacaggcaagcaccuc

SEQ ID NO: 2586011 - RNA, 13 nt, Human
cagacaggcaagc

SEQ ID NO: 2586012 - RNA, 24 nt, Human
cagacaggaccagggauuuccaug

SEQ ID NO: 2586013 - RNA, 17 nt, Human
cagacaggaccagggau

SEQ ID NO: 2586014 - RNA, 13 nt, Human
cagacaggagaaa

SEQ ID NO: 2586015 - RNA, 12 nt, Human
cagacaggagga

SEQ ID NO: 2586016 - RNA, 21 nt, Human
cagacaggagaaaugcaucca

SEQ ID NO: 2586017 - RNA, 23 nt, Human
cagacaggaaagggaaggcccca

SEQ ID NO: 2586018 - RNA, 11 nt, Human
cagacaggcaa

SEQ ID NO: 2586019 - RNA, 18 nt, Human
cagacagcugccugggau

SEQ ID NO: 2586020 - RNA, 17 nt, Human
cagacagcugccuggga

SEQ ID NO: 2586021 - RNA, 16 nt, Human
cagacagcugccuggg

SEQ ID NO: 2586022 - RNA, 15 nt, Human
cagacagcugccugg

SEQ ID NO: 2586023 - RNA, 16 nt, Human
cagacaggaccaggga

SEQ ID NO: 2586024 - RNA, 15 nt, Human
cagacaggaccaggg

SEQ ID NO: 2586025 - RNA, 13 nt, Human
cagacaggaccag

SEQ ID NO: 2586026 - RNA, 21 nt, Human
cagacagcuccacccuggccg

SEQ ID NO: 2586027 - RNA, 11 nt, Human
cagacagcucc

SEQ ID NO: 2586028 - RNA, 12 nt, Human
cagacagcuccc

SEQ ID NO: 2586029 - RNA, 17 nt, Human
cagacagcucccucugc

SEQ ID NO: 2586030 - RNA, 19 nt, Human
cagacagcucccucugccu

SEQ ID NO: 2586031 - RNA, 15 nt, Human
cagacaggaaaggga

SEQ ID NO: 2586032 - RNA, 20 nt, Human
cagacaggaaagggaaggcc

SEQ ID NO: 2586033 - RNA, 14 nt, Human
cagacagcugccug

SEQ ID NO: 2586034 - RNA, 13 nt, Human
cagacagcugccu

SEQ ID NO: 2586035 - RNA, 16 nt, Human
cagacagccuguaucu

SEQ ID NO: 2586036 - RNA, 14 nt, Human
cagacagccuguau

SEQ ID NO: 2586037 - RNA, 13 nt, Human
cagacagccugua

SEQ ID NO: 2586038 - RNA, 12 nt, Human
cagacagccugu

SEQ ID NO: 2586039 - RNA, 14 nt, Human
cagacagcccucca

SEQ ID NO: 2586040 - RNA, 17 nt, Human
cagacagcagcucaggc

SEQ ID NO: 2586041 - RNA, 18 nt, Human
cagacagcagcucaggca

SEQ ID NO: 2586042 - RNA, 19 nt, Human
cagacagcagcucaggcac

SEQ ID NO: 2586043 - RNA, 12 nt, Human
cagacagaggau

SEQ ID NO: 2586044 - RNA, 14 nt, Human
cagacagaggauga

SEQ ID NO: 2586045 - RNA, 19 nt, Human
cagacagacaucucugcac

SEQ ID NO: 2586046 - RNA, 16 nt, Human
cagacagacacacaca

SEQ ID NO: 2586047 - RNA, 19 nt, Human
cagacagaggaugagcucu

SEQ ID NO: 2586048 - RNA, 21 nt, Human
cagacagauggaaaagggaga

SEQ ID NO: 2586049 - RNA, 21 nt, Human
cagacagcaacggggaggcca

SEQ ID NO: 2586050 - RNA, 13 nt, Human
cagacagcagcuc

SEQ ID NO: 2586051 - RNA, 15 nt, Human
cagacagcagcucag

SEQ ID NO: 2586052 - RNA, 16 nt, Human
cagacagcagcucagg

SEQ ID NO: 2586053 - RNA, 15 nt, Human
cagacagacacacac

SEQ ID NO: 2586054 - RNA, 14 nt, Human
cagacagacacaca

SEQ ID NO: 2586055 - RNA, 17 nt, Human
cagacuggcacaguuuu

SEQ ID NO: 2586056 - RNA, 18 nt, Human
cagacuggcacaguuuuc

SEQ ID NO: 2586057 - RNA, 21 nt, Human
cagacuggaagcacagcuuca

SEQ ID NO: 2586058 - RNA, 20 nt, Human
cagacuggaagcacagcuuc

SEQ ID NO: 2586059 - RNA, 22 nt, Human
cagacuggcacaguuuucugag

SEQ ID NO: 2586060 - RNA, 23 nt, Human
cagacuggcacaguuuucugaga

SEQ ID NO: 2586061 - RNA, 18 nt, Human
cagacugcauguaguugg

SEQ ID NO: 2586062 - RNA, 11 nt, Human
cagacuggagg

SEQ ID NO: 2586063 - RNA, 16 nt, Human
cagacuggcuggcugc

SEQ ID NO: 2586064 - RNA, 15 nt, Human
cagacuggguuucua

SEQ ID NO: 2586065 - RNA, 12 nt, Human
cagacuggaggg

SEQ ID NO: 2586066 - RNA, 20 nt, Human
cagacuggguuucuagccca

SEQ ID NO: 2586067 - RNA, 18 nt, Human
cagacuggguuucuagcc

SEQ ID NO: 2586068 - RNA, 15 nt, Human
cagacuggugagcag

SEQ ID NO: 2586069 - RNA, 17 nt, Human
cagacuggugagcagac

SEQ ID NO: 2586070 - RNA, 18 nt, Human
cagacuggaagcacagcu

SEQ ID NO: 2586071 - RNA, 17 nt, Human
cagacuggaagcacagc

SEQ ID NO: 2586072 - RNA, 16 nt, Human
cagacuggaagcacag

SEQ ID NO: 2586073 - RNA, 14 nt, Human
cagacuggaagcac

SEQ ID NO: 2586074 - RNA, 13 nt, Human
cagacuggaagca

SEQ ID NO: 2586075 - RNA, 14 nt, Human
cagacugcuuccaa

SEQ ID NO: 2586076 - RNA, 20 nt, Human
cagacugcuuccaauuuucu

SEQ ID NO: 2586077 - RNA, 20 nt, Human
cagacugcugggacuggcca

SEQ ID NO: 2586078 - RNA, 23 nt, Human
cagacugcugggacuggccaggu

SEQ ID NO: 2586079 - RNA, 15 nt, Human
cagacugcugggacu

SEQ ID NO: 2586080 - RNA, 16 nt, Human
cagacugcugggacug

SEQ ID NO: 2586081 - RNA, 13 nt, Human
cagacugcuggga

SEQ ID NO: 2586082 - RNA, 18 nt, Human
cagacugcgauuuguccc

SEQ ID NO: 2586083 - RNA, 21 nt, Human
cagacucuacagaggccaugg

SEQ ID NO: 2586084 - RNA, 20 nt, Human
cagacucuacagaggccaug

SEQ ID NO: 2586085 - RNA, 19 nt, Human
cagacucuacagaggccau

SEQ ID NO: 2586086 - RNA, 18 nt, Human
cagacucuacagaggcca

SEQ ID NO: 2586087 - RNA, 21 nt, Human
cagacuccugaggacagcugu

SEQ ID NO: 2586088 - RNA, 23 nt, Human
cagacucuacagaggccaugggc

SEQ ID NO: 2586089 - RNA, 17 nt, Human
cagacucucugugaacc

SEQ ID NO: 2586090 - RNA, 12 nt, Human
cagacucucugu

SEQ ID NO: 2586091 - RNA, 14 nt, Human
cagacucuggucuu

SEQ ID NO: 2586092 - RNA, 23 nt, Human
cagacucuuuuuguaccugguga

SEQ ID NO: 2586093 - RNA, 20 nt, Human
cagacugacaaauguguauc

SEQ ID NO: 2586094 - RNA, 20 nt, Human
cagacugaacuuaccgugag

SEQ ID NO: 2586095 - RNA, 18 nt, Human
cagacaggcaaauaaaag

SEQ ID NO: 2586096 - RNA, 15 nt, Human
cagacaggccccgug

SEQ ID NO: 2586097 - RNA, 14 nt, Human
cagacaggcucuua

SEQ ID NO: 2586098 - RNA, 20 nt, Human
cagacaggccccgugaggca

SEQ ID NO: 2586099 - RNA, 20 nt, Human
cagacaggcucuuagcagcu

SEQ ID NO: 2586100 - RNA, 18 nt, Human
cagacaggcucuuagcag

SEQ ID NO: 2586101 - RNA, 22 nt, Human
cagacaggcucuuagcagcuuc

SEQ ID NO: 2586102 - RNA, 23 nt, Human
cagacaggcaagcaccuccugcc

SEQ ID NO: 2586103 - RNA, 22 nt, Human
cagacaggcaagcaccuccugc

SEQ ID NO: 2586104 - RNA, 17 nt, Human
cagacucuacagaggcc

SEQ ID NO: 2586105 - RNA, 20 nt, Human
cagacuccugaggacagcug

SEQ ID NO: 2586106 - RNA, 16 nt, Human
cagacuccugaggaca

SEQ ID NO: 2586107 - RNA, 21 nt, Human
cagacuccugugcaacuuucc

SEQ ID NO: 2586108 - RNA, 22 nt, Human
cagacucgauucauauugaaua

SEQ ID NO: 2586109 - RNA, 19 nt, Human
cagacaguguuuucuggga

SEQ ID NO: 2586110 - RNA, 18 nt, Human
cagacaggguucauugaa

SEQ ID NO: 2586111 - RNA, 19 nt, Human
cagacucccauuccugaag

SEQ ID NO: 2586112 - RNA, 20 nt, Human
cagacucccauuccugaaga

SEQ ID NO: 2586113 - RNA, 14 nt, Human
cagacuccugagga

SEQ ID NO: 2586114 - RNA, 13 nt, Human
cagacuccugagg

SEQ ID NO: 2586115 - RNA, 20 nt, Human
caggaaagagaacuuccaga

SEQ ID NO: 2586116 - RNA, 16 nt, Human
caggaaagagaacuuc

SEQ ID NO: 2586117 - RNA, 17 nt, Human
caggaaaggcuccagga

SEQ ID NO: 2586118 - RNA, 16 nt, Human
caggaaaggcuccagg

SEQ ID NO: 2586119 - RNA, 20 nt, Human
caggaaaggcuccaggagca

SEQ ID NO: 2586120 - RNA, 19 nt, Human
caggaaaggcuccaggagc

SEQ ID NO: 2586121 - RNA, 19 nt, Human
caggaaacuccacaucugc

SEQ ID NO: 2586122 - RNA, 16 nt, Human
cagcuucaccagagca

SEQ ID NO: 2586123 - RNA, 23 nt, Human
caggaaacuccacaucugccuua

SEQ ID NO: 2586124 - RNA, 22 nt, Human
caggaaacuccacaucugccuu

SEQ ID NO: 2586125 - RNA, 21 nt, Human
caggaaacuccacaucugccu

SEQ ID NO: 2586126 - RNA, 20 nt, Human
caggaaacuccacaucugcc

SEQ ID NO: 2586127 - RNA, 20 nt, Human
cagcuuauugucuagugaaa

SEQ ID NO: 2586128 - RNA, 14 nt, Human
cagcuucaccagag

SEQ ID NO: 2586129 - RNA, 13 nt, Human
cagcuucaccaga

SEQ ID NO: 2586130 - RNA, 18 nt, Human
cagcugucccugucacca

SEQ ID NO: 2586131 - RNA, 20 nt, Human
cagcuguaugauucccagcc

SEQ ID NO: 2586132 - RNA, 17 nt, Human
cagcugccucacuuccu

SEQ ID NO: 2586133 - RNA, 14 nt, Human
cagcuuauugucua

SEQ ID NO: 2586134 - RNA, 12 nt, Human
cagcugucccug

SEQ ID NO: 2586135 - RNA, 13 nt, Human
cagcugucccugu

SEQ ID NO: 2586136 - RNA, 14 nt, Human
cagcugucccuguc

SEQ ID NO: 2586137 - RNA, 15 nt, Human
cagcugucccuguca

SEQ ID NO: 2586138 - RNA, 16 nt, Human
cagcugucccugucac

SEQ ID NO: 2586139 - RNA, 17 nt, Human
cagcugucccugucacc

SEQ ID NO: 2586140 - RNA, 22 nt, Human
cagcugagcacauucuggcuca

SEQ ID NO: 2586141 - RNA, 17 nt, Human
cagcugagagaaaauaa

SEQ ID NO: 2586142 - RNA, 21 nt, Human
cagcugagagacuuuuaauca

SEQ ID NO: 2586143 - RNA, 21 nt, Human
cagcugacuuuucuguccgag

SEQ ID NO: 2586144 - RNA, 14 nt, Human
cagcugagcgccag

SEQ ID NO: 2586145 - RNA, 16 nt, Human
cagcugagcgccagga

SEQ ID NO: 2586146 - RNA, 18 nt, Human
cagcugagcgccaggaug

SEQ ID NO: 2586147 - RNA, 19 nt, Human
cagcugccgaccagagccc

SEQ ID NO: 2586148 - RNA, 14 nt, Human
cagcugccucacuu

SEQ ID NO: 2586149 - RNA, 17 nt, Human
cagccugcuccagcugu

SEQ ID NO: 2586150 - RNA, 19 nt, Human
cagccugcuccagcuguuc

SEQ ID NO: 2586151 - RNA, 14 nt, Human
cagcgccuuuccca

SEQ ID NO: 2586152 - RNA, 22 nt, Human
cagcgccuuucccaacucuagc

SEQ ID NO: 2586153 - RNA, 15 nt, Human
cagccugcuccagcu

SEQ ID NO: 2586154 - RNA, 16 nt, Human
cagccugcuccagcug

SEQ ID NO: 2586155 - RNA, 20 nt, Human
cagcuaacacacagcuccca

SEQ ID NO: 2586156 - RNA, 18 nt, Human
cagcuaacacacagcucc

SEQ ID NO: 2586157 - RNA, 17 nt, Human
cagcuaacacacagcuc

SEQ ID NO: 2586158 - RNA, 16 nt, Human
cagcuaacacacagcu

SEQ ID NO: 2586159 - RNA, 13 nt, Human
cagcgccuuuccc

SEQ ID NO: 2586160 - RNA, 15 nt, Human
cagcuaacauggaag

SEQ ID NO: 2586161 - RNA, 19 nt, Human
cagcuaaagcaauaugcau

SEQ ID NO: 2586162 - RNA, 18 nt, Human
cagcuaaagcccaaccuc

SEQ ID NO: 2586163 - RNA, 15 nt, Human
cagcuaacacacagc

SEQ ID NO: 2586164 - RNA, 17 nt, Human
cagcuaacaauugugaa

SEQ ID NO: 2586165 - RNA, 22 nt, Human
cagcuaaagcccaaccuccuga

SEQ ID NO: 2586166 - RNA, 14 nt, Human
cagcggccccugca

SEQ ID NO: 2586167 - RNA, 19 nt, Human
cagcggccccucccacaca

SEQ ID NO: 2586168 - RNA, 18 nt, Human
cagcggccccucccacac

SEQ ID NO: 2586169 - RNA, 17 nt, Human
cagcggccccucccaca

SEQ ID NO: 2586170 - RNA, 19 nt, Human
cagcguuucuaugacacau

SEQ ID NO: 2586171 - RNA, 22 nt, Human
cagcguuugaggggcuggccuu

SEQ ID NO: 2586172 - RNA, 20 nt, Human
cagcguuugaggggcuggcc

SEQ ID NO: 2586173 - RNA, 16 nt, Human
cagcggccccugcauc

SEQ ID NO: 2586174 - RNA, 15 nt, Human
cagcggccccugcau

SEQ ID NO: 2586175 - RNA, 12 nt, Human
cagcuaaagcaa

SEQ ID NO: 2586176 - RNA, 16 nt, Human
cagcggccccucccac

SEQ ID NO: 2586177 - RNA, 15 nt, Human
cagcggccccuccca

SEQ ID NO: 2586178 - RNA, 13 nt, Human
cagcggccccucc

SEQ ID NO: 2586179 - RNA, 22 nt, Human
cagcggagguguggagccgagg

SEQ ID NO: 2586180 - RNA, 20 nt, Human
cagcgcuggccgggaccccg

SEQ ID NO: 2586181 - RNA, 19 nt, Human
cagcgcuggguccacccca

SEQ ID NO: 2586182 - RNA, 20 nt, Human
caggccggcgagcccugugg

SEQ ID NO: 2586183 - RNA, 14 nt, Human
caggccuccuacag

SEQ ID NO: 2586184 - RNA, 17 nt, Human
caggccucuguguccuu

SEQ ID NO: 2586185 - RNA, 15 nt, Human
caggccucugugucc

SEQ ID NO: 2586186 - RNA, 14 nt, Human
caggccucuguguc

SEQ ID NO: 2586187 - RNA, 13 nt, Human
caggccucugugu

SEQ ID NO: 2586188 - RNA, 12 nt, Human
caggccucugug

SEQ ID NO: 2586189 - RNA, 18 nt, Human
caggccucuuggcaguca

SEQ ID NO: 2586190 - RNA, 15 nt, Human
caggccucuuggcag

SEQ ID NO: 2586191 - RNA, 12 nt, Human
caggccucuugg

SEQ ID NO: 2586192 - RNA, 22 nt, Human
caggccucuguguccuucccug

SEQ ID NO: 2586193 - RNA, 20 nt, Human
caggccugaaagaggcugag

SEQ ID NO: 2586194 - RNA, 15 nt, Human
caggccugaaagagg

SEQ ID NO: 2586195 - RNA, 19 nt, Human
caggccugggucugugucu

SEQ ID NO: 2586196 - RNA, 20 nt, Human
caggccugggucugugucuc

SEQ ID NO: 2586197 - RNA, 19 nt, Human
caggccucuuggcagucac

SEQ ID NO: 2586198 - RNA, 14 nt, Human
caggccugggucug

SEQ ID NO: 2586199 - RNA, 16 nt, Human
caggccugggucugug

SEQ ID NO: 2586200 - RNA, 18 nt, Human
caggccugggucuguguc

SEQ ID NO: 2586201 - RNA, 12 nt, Human
caggccuccuac

SEQ ID NO: 2586202 - RNA, 19 nt, Human
caggccguggcugcccaca

SEQ ID NO: 2586203 - RNA, 17 nt, Human
caggccguggcugccca

SEQ ID NO: 2586204 - RNA, 19 nt, Human
caggccgggguggagcaug

SEQ ID NO: 2586205 - RNA, 19 nt, Human
caggccggugugggcugug

SEQ ID NO: 2586206 - RNA, 18 nt, Human
caggccguccucccgggc

SEQ ID NO: 2586207 - RNA, 20 nt, Human
caggccgggguggagcaugg

SEQ ID NO: 2586208 - RNA, 22 nt, Human
caggccggugugggcugugucg

SEQ ID NO: 2586209 - RNA, 22 nt, Human
caggccguccucccgggcccuc

SEQ ID NO: 2586210 - RNA, 15 nt, Human
caggccguggcugcc

SEQ ID NO: 2586211 - RNA, 11 nt, Human
caggcuacugu

SEQ ID NO: 2586212 - RNA, 19 nt, Human
caggcguucagcucacugu

SEQ ID NO: 2586213 - RNA, 22 nt, Human
caggcguagaucaccagaauaa

SEQ ID NO: 2586214 - RNA, 22 nt, Human
caggcguucagcucacuguucu

SEQ ID NO: 2586215 - RNA, 23 nt, Human
caggcuaaacauccaauauuuuc

SEQ ID NO: 2586216 - RNA, 13 nt, Human
caggcuacacuga

SEQ ID NO: 2586217 - RNA, 19 nt, Human
caggcuaaggcguggagcu

SEQ ID NO: 2586218 - RNA, 20 nt, Human
caggcuacacugacacuggu

SEQ ID NO: 2586219 - RNA, 14 nt, Human
caggcuacucuccu

SEQ ID NO: 2586220 - RNA, 21 nt, Human
caggcugggagagccuuccag

SEQ ID NO: 2586221 - RNA, 21 nt, Human
caggcgugagccaccgugccu

SEQ ID NO: 2586222 - RNA, 13 nt, Human
caggcguucagcu

SEQ ID NO: 2586223 - RNA, 19 nt, Human
caggcgauccaccugucuc

SEQ ID NO: 2586224 - RNA, 11 nt, Human
caggccuugcg

SEQ ID NO: 2586225 - RNA, 15 nt, Human
caggcgaggccugga

SEQ ID NO: 2586226 - RNA, 16 nt, Human
caggcgauccaccugu

SEQ ID NO: 2586227 - RNA, 12 nt, Human
caggccugugug

SEQ ID NO: 2586228 - RNA, 16 nt, Human
caggccuuaucuccaa

SEQ ID NO: 2586229 - RNA, 17 nt, Human
caggccuuaucuccaag

SEQ ID NO: 2586230 - RNA, 22 nt, Human
caggccuuaucuccaagaccag

SEQ ID NO: 2586231 - RNA, 16 nt, Human
caggggaaaagaggag

SEQ ID NO: 2586232 - RNA, 14 nt, Human
caggggaaaagagg

SEQ ID NO: 2586233 - RNA, 17 nt, Human
caggggaaaaucagccu

SEQ ID NO: 2586234 - RNA, 19 nt, Human
cagggcuauagcucaggac

SEQ ID NO: 2586235 - RNA, 19 nt, Human
cagggagcauggcugugag

SEQ ID NO: 2586236 - RNA, 18 nt, Human
cagggcuagugacuugug

SEQ ID NO: 2586237 - RNA, 15 nt, Human
cagggcuagugacuu

SEQ ID NO: 2586238 - RNA, 14 nt, Human
cagggcuagugacu

SEQ ID NO: 2586239 - RNA, 19 nt, Human
cagggcuacccugagcuga

SEQ ID NO: 2586240 - RNA, 22 nt, Human
cagggcuacccugagcugaggc

SEQ ID NO: 2586241 - RNA, 23 nt, Human
cagggcuacccugagcugaggca

SEQ ID NO: 2586242 - RNA, 24 nt, Human
cagggcuacccugagcugaggcag

SEQ ID NO: 2586243 - RNA, 13 nt, Human
cagggcuccugcc

SEQ ID NO: 2586244 - RNA, 19 nt, Human
cagggcucacgugggaacc

SEQ ID NO: 2586245 - RNA, 14 nt, Human
cagggcuccugcac

SEQ ID NO: 2586246 - RNA, 12 nt, Human
cagggcuccugc

SEQ ID NO: 2586247 - RNA, 11 nt, Human
cagggcuccug

SEQ ID NO: 2586248 - RNA, 12 nt, Human
cagggcucagcc

SEQ ID NO: 2586249 - RNA, 13 nt, Human
cagggcucagccu

SEQ ID NO: 2586250 - RNA, 14 nt, Human
cagggcucagccug

SEQ ID NO: 2586251 - RNA, 20 nt, Human
cagggcucucuuuccuucuu

SEQ ID NO: 2586252 - RNA, 22 nt, Human
cagggcuccugccuucuguccu

SEQ ID NO: 2586253 - RNA, 20 nt, Human
cagggcuccugccuucuguc

SEQ ID NO: 2586254 - RNA, 12 nt, Human
cagggcuccugg

SEQ ID NO: 2586255 - RNA, 23 nt, Human
cagggcuccugccuucuguccug

SEQ ID NO: 2586256 - RNA, 13 nt, Human
cagggcuccuggg

SEQ ID NO: 2586257 - RNA, 15 nt, Human
cagggcucugcccca

SEQ ID NO: 2586258 - RNA, 15 nt, Human
cagggcucugaccag

SEQ ID NO: 2586259 - RNA, 12 nt, Human
cagggcucugac

SEQ ID NO: 2586260 - RNA, 24 nt, Human
cagggcucucuuuccuucuugccu

SEQ ID NO: 2586261 - RNA, 22 nt, Human
cagggcucucuuuccuucuugc

SEQ ID NO: 2586262 - RNA, 21 nt, Human
cagggcucucuuuccuucuug

SEQ ID NO: 2586263 - RNA, 19 nt, Human
cagggcucugccccagagg

SEQ ID NO: 2586264 - RNA, 13 nt, Human
cagggcucugccc

SEQ ID NO: 2586265 - RNA, 16 nt, Human
cagggcuacccugagc

SEQ ID NO: 2586266 - RNA, 18 nt, Human
cagggcuacccugagcug

SEQ ID NO: 2586267 - RNA, 14 nt, Human
cagggcuacccuga

SEQ ID NO: 2586268 - RNA, 17 nt, Human
cagggcuacccuccccc

SEQ ID NO: 2586269 - RNA, 17 nt, Human
cagggcuaagagcuagc

SEQ ID NO: 2586270 - RNA, 15 nt, Human
cagggcuacccuccc

SEQ ID NO: 2586271 - RNA, 15 nt, Human
cagggagcauggcug

SEQ ID NO: 2586272 - RNA, 19 nt, Human
cagggagcauuuuccucca

SEQ ID NO: 2586273 - RNA, 23 nt, Human
cagggagaggagugacugagcuu

SEQ ID NO: 2586274 - RNA, 16 nt, Human
cagggagaggccauga

SEQ ID NO: 2586275 - RNA, 17 nt, Human
cagggagaggccaugau

SEQ ID NO: 2586276 - RNA, 21 nt, Human
cagggagcaggcggugggcac

SEQ ID NO: 2586277 - RNA, 23 nt, Human
caggcugggagagccuuccaggg

SEQ ID NO: 2586278 - RNA, 22 nt, Human
caggcugggagagccuuccagg

SEQ ID NO: 2586279 - RNA, 16 nt, Human
caggcuacucuccucg

SEQ ID NO: 2586280 - RNA, 15 nt, Human
caggcuacucuccuc

SEQ ID NO: 2586281 - RNA, 13 nt, Human
cagggagaagcuc

SEQ ID NO: 2586282 - RNA, 18 nt, Human
caggcuacucuccucggc

SEQ ID NO: 2586283 - RNA, 12 nt, Human
cagggagacaga

SEQ ID NO: 2586284 - RNA, 19 nt, Human
cagggagacccguccauuu

SEQ ID NO: 2586285 - RNA, 22 nt, Human
cagggagaccgagcgcuuucug

SEQ ID NO: 2586286 - RNA, 19 nt, Human
cagggagaccgagcgcuuu

SEQ ID NO: 2586287 - RNA, 21 nt, Human
caggcacccccuggagagaag

SEQ ID NO: 2586288 - RNA, 18 nt, Human
caggcacccccuggagag

SEQ ID NO: 2586289 - RNA, 21 nt, Human
caggaggcuuggaaagcauca

SEQ ID NO: 2586290 - RNA, 23 nt, Human
caggcacccuucuuuccucuucc

SEQ ID NO: 2586291 - RNA, 21 nt, Human
caggcacccuucuuuccucuu

SEQ ID NO: 2586292 - RNA, 16 nt, Human
caggcacccuucuuuc

SEQ ID NO: 2586293 - RNA, 13 nt, Human
caggcacccuucu

SEQ ID NO: 2586294 - RNA, 13 nt, Human
caggcaccgagaa

SEQ ID NO: 2586295 - RNA, 16 nt, Human
caggcaccgagaaugu

SEQ ID NO: 2586296 - RNA, 17 nt, Human
caggcaccgagaauguu

SEQ ID NO: 2586297 - RNA, 20 nt, Human
caggcaccucacagaaauga

SEQ ID NO: 2586298 - RNA, 16 nt, Human
caggcaccucacagaa

SEQ ID NO: 2586299 - RNA, 15 nt, Human
caggcaccucacaga

SEQ ID NO: 2586300 - RNA, 19 nt, Human
caggcaccuuaguggcuuu

SEQ ID NO: 2586301 - RNA, 16 nt, Human
caggcacgaacccacc

SEQ ID NO: 2586302 - RNA, 17 nt, Human
caggcacgaacccaccu

SEQ ID NO: 2586303 - RNA, 19 nt, Human
caggcacgaacccaccugc

SEQ ID NO: 2586304 - RNA, 22 nt, Human
caggcacgaacccaccugcuga

SEQ ID NO: 2586305 - RNA, 22 nt, Human
caggcacuagccuuuggcucug

SEQ ID NO: 2586306 - RNA, 16 nt, Human
caggcacuagccuuug

SEQ ID NO: 2586307 - RNA, 20 nt, Human
caggcacgaacccaccugcu

SEQ ID NO: 2586308 - RNA, 21 nt, Human
caggcacgaacccaccugcug

SEQ ID NO: 2586309 - RNA, 12 nt, Human
caggccaggccc

SEQ ID NO: 2586310 - RNA, 11 nt, Human
caggccaggcc

SEQ ID NO: 2586311 - RNA, 20 nt, Human
caggcacucaaugcagccag

SEQ ID NO: 2586312 - RNA, 23 nt, Human
caggcacuagccuuuggcucugg

SEQ ID NO: 2586313 - RNA, 18 nt, Human
caggccaggccaccagga

SEQ ID NO: 2586314 - RNA, 16 nt, Human
caggccaggccaccag

SEQ ID NO: 2586315 - RNA, 14 nt, Human
caggccaggccacc

SEQ ID NO: 2586316 - RNA, 14 nt, Human
caggccaggccagc

SEQ ID NO: 2586317 - RNA, 19 nt, Human
caggaggccagccuugacc

SEQ ID NO: 2586318 - RNA, 18 nt, Human
caggaggccagccuugac

SEQ ID NO: 2586319 - RNA, 22 nt, Human
caggaggccagccuugaccauu

SEQ ID NO: 2586320 - RNA, 19 nt, Human
caggaggccccuggcccag

SEQ ID NO: 2586321 - RNA, 18 nt, Human
caggaggccccuggccca

SEQ ID NO: 2586322 - RNA, 17 nt, Human
caggaggccccuggccc

SEQ ID NO: 2586323 - RNA, 16 nt, Human
caggaggccccuggcc

SEQ ID NO: 2586324 - RNA, 18 nt, Human
caggaggccaggccggcg

SEQ ID NO: 2586325 - RNA, 14 nt, Human
caggaggccccugg

SEQ ID NO: 2586326 - RNA, 19 nt, Human
caggaggaucacuugaguc

SEQ ID NO: 2586327 - RNA, 21 nt, Human
caggaggacugccccgugcag

SEQ ID NO: 2586328 - RNA, 23 nt, Human
caggaggacugccccgugcagac

SEQ ID NO: 2586329 - RNA, 23 nt, Human
caggaggagacuagauuuaugaa

SEQ ID NO: 2586330 - RNA, 19 nt, Human
caggaggaggugccaacag

SEQ ID NO: 2586331 - RNA, 15 nt, Human
caggaggaggugcca

SEQ ID NO: 2586332 - RNA, 22 nt, Human
caggaggauugcuugagcccag

SEQ ID NO: 2586333 - RNA, 16 nt, Human
caggaggacaauucau

SEQ ID NO: 2586334 - RNA, 15 nt, Human
caggaggacaauuca

SEQ ID NO: 2586335 - RNA, 13 nt, Human
caggaggacaauu

SEQ ID NO: 2586336 - RNA, 23 nt, Human
caggaggaaucaugucaggccug

SEQ ID NO: 2586337 - RNA, 22 nt, Human
caggaggacaauucaugaacuu

SEQ ID NO: 2586338 - RNA, 19 nt, Human
caggaggacaauucaugaa

SEQ ID NO: 2586339 - RNA, 19 nt, Human
caggaggacugccccgugc

SEQ ID NO: 2586340 - RNA, 17 nt, Human
caggcaaugcuggcugu

SEQ ID NO: 2586341 - RNA, 16 nt, Human
caggcaaugcuggcug

SEQ ID NO: 2586342 - RNA, 15 nt, Human
caggcaaugcuggcu

SEQ ID NO: 2586343 - RNA, 14 nt, Human
caggcaaugcuggc

SEQ ID NO: 2586344 - RNA, 19 nt, Human
caggaggccggggccgggu

SEQ ID NO: 2586345 - RNA, 20 nt, Human
caggaggccccuggcccagc

SEQ ID NO: 2586346 - RNA, 12 nt, Human
caggaggcugag

SEQ ID NO: 2586347 - RNA, 13 nt, Human
caggaggcugagg

SEQ ID NO: 2586348 - RNA, 15 nt, Human
caggaggcugaggca

SEQ ID NO: 2586349 - RNA, 16 nt, Human
caggaggcugaggcag

SEQ ID NO: 2586350 - RNA, 17 nt, Human
caggaggcugaggcaga

SEQ ID NO: 2586351 - RNA, 18 nt, Human
caggaggcugaggcagaa

SEQ ID NO: 2586352 - RNA, 20 nt, Human
caggaggcugaggcagaaga

SEQ ID NO: 2586353 - RNA, 21 nt, Human
caggaggcugaggcagaagaa

SEQ ID NO: 2586354 - RNA, 17 nt, Human
caggaggcugaggcagg

SEQ ID NO: 2586355 - RNA, 18 nt, Human
caggaggcugaggcagga

SEQ ID NO: 2586356 - RNA, 19 nt, Human
caggaggcugaggcaggag

SEQ ID NO: 2586357 - RNA, 20 nt, Human
caggaggcugaggcaggagg

SEQ ID NO: 2586358 - RNA, 21 nt, Human
caggaggcugaggcaggagga

SEQ ID NO: 2586359 - RNA, 15 nt, Human
caggaggcugagggg

SEQ ID NO: 2586360 - RNA, 16 nt, Human
caggaccacaaaaaug

SEQ ID NO: 2586361 - RNA, 16 nt, Human
caggacaugcugaagc

SEQ ID NO: 2586362 - RNA, 13 nt, Human
caggacaugcuga

SEQ ID NO: 2586363 - RNA, 23 nt, Human
caggacaugcgguagccagcaca

SEQ ID NO: 2586364 - RNA, 12 nt, Human
caggacauuucu

SEQ ID NO: 2586365 - RNA, 14 nt, Human
caggacauuucucu

SEQ ID NO: 2586366 - RNA, 18 nt, Human
caggacauuucucuaaga

SEQ ID NO: 2586367 - RNA, 17 nt, Human
caggacaugcugaagcc

SEQ ID NO: 2586368 - RNA, 12 nt, Human
caggaccacaaa

SEQ ID NO: 2586369 - RNA, 21 nt, Human
caggaccagggauuuccauga

SEQ ID NO: 2586370 - RNA, 12 nt, Human
caggaccagcuc

SEQ ID NO: 2586371 - RNA, 13 nt, Human
caggaccagcuca

SEQ ID NO: 2586372 - RNA, 21 nt, Human
caggaccagucaaccugggca

SEQ ID NO: 2586373 - RNA, 22 nt, Human
caggaccaugggaccaggucuu

SEQ ID NO: 2586374 - RNA, 16 nt, Human
caggaccaugggacca

SEQ ID NO: 2586375 - RNA, 13 nt, Human
caggacccagagg

SEQ ID NO: 2586376 - RNA, 14 nt, Human
caggacccagagga

SEQ ID NO: 2586377 - RNA, 15 nt, Human
caggacccagaggaa

SEQ ID NO: 2586378 - RNA, 16 nt, Human
caggacccagaggaag

SEQ ID NO: 2586379 - RNA, 20 nt, Human
caggacccaccaugucugcc

SEQ ID NO: 2586380 - RNA, 21 nt, Human
caggacccaucacgccugugc

SEQ ID NO: 2586381 - RNA, 16 nt, Human
caggaccucaggugag

SEQ ID NO: 2586382 - RNA, 23 nt, Human
caggaccucaggugagaagcaga

SEQ ID NO: 2586383 - RNA, 15 nt, Human
cauauguaccaugua

SEQ ID NO: 2586384 - RNA, 22 nt, Human
cauagguucacaccauuuuguu

SEQ ID NO: 2586385 - RNA, 17 nt, Human
cauauguauuccugauc

SEQ ID NO: 2586386 - RNA, 21 nt, Human
cauauguaccauguacaugaa

SEQ ID NO: 2586387 - RNA, 14 nt, Human
cauauguaaaauaa

SEQ ID NO: 2586388 - RNA, 18 nt, Human
cauauguugaauacuuuu

SEQ ID NO: 2586389 - RNA, 22 nt, Human
cauauuaccacagacauacuaa

SEQ ID NO: 2586390 - RNA, 16 nt, Human
cauauguugaauacuu

SEQ ID NO: 2586391 - RNA, 17 nt, Human
cauauguugaauacuuu

SEQ ID NO: 2586392 - RNA, 17 nt, Human
cauaugugaauauggac

SEQ ID NO: 2586393 - RNA, 15 nt, Human
cauauguuacacuaa

SEQ ID NO: 2586394 - RNA, 20 nt, Human
cauauuaggaaaauaugggu

SEQ ID NO: 2586395 - RNA, 14 nt, Human
cauauuaggaaaau

SEQ ID NO: 2586396 - RNA, 21 nt, Human
cauauuauuuuauguugcaua

SEQ ID NO: 2586397 - RNA, 13 nt, Human
cauauuaugucuu

SEQ ID NO: 2586398 - RNA, 16 nt, Human
cauagguuuaauaauu

SEQ ID NO: 2586399 - RNA, 19 nt, Human
cauaggucacuggcucucc

SEQ ID NO: 2586400 - RNA, 18 nt, Human
cauaggucacuggcucuc

SEQ ID NO: 2586401 - RNA, 17 nt, Human
cauaggucacuggcucu

SEQ ID NO: 2586402 - RNA, 16 nt, Human
cauaggucacuggcuc

SEQ ID NO: 2586403 - RNA, 21 nt, Human
cauaggucacuggcucuccaa

SEQ ID NO: 2586404 - RNA, 16 nt, Human
cauaggugaucucauu

SEQ ID NO: 2586405 - RNA, 13 nt, Human
cauauguaaaaua

SEQ ID NO: 2586406 - RNA, 19 nt, Human
cauagcagcuuauucacaa

SEQ ID NO: 2586407 - RNA, 23 nt, Human
cauagcagagaaugaaagggccc

SEQ ID NO: 2586408 - RNA, 17 nt, Human
cauagcagauuuuaauu

SEQ ID NO: 2586409 - RNA, 16 nt, Human
cauagcagauuuuaau

SEQ ID NO: 2586410 - RNA, 15 nt, Human
cauaggucacuggcu

SEQ ID NO: 2586411 - RNA, 14 nt, Human
cauaggucacuggc

SEQ ID NO: 2586412 - RNA, 16 nt, Human
cauagguauuucaaaa

SEQ ID NO: 2586413 - RNA, 18 nt, Human
cauagcagauuuuaauuu

SEQ ID NO: 2586414 - RNA, 14 nt, Human
cauaauuaaagugu

SEQ ID NO: 2586415 - RNA, 18 nt, Human
cauaauguuacauuauua

SEQ ID NO: 2586416 - RNA, 18 nt, Human
cauaauuaaaguguccau

SEQ ID NO: 2586417 - RNA, 17 nt, Human
cauaauuaaagugucca

SEQ ID NO: 2586418 - RNA, 16 nt, Human
cauaauuaaagugucc

SEQ ID NO: 2586419 - RNA, 15 nt, Human
cauaauuaaaguguc

SEQ ID NO: 2586420 - RNA, 14 nt, Human
cauaauuaugacag

SEQ ID NO: 2586421 - RNA, 18 nt, Human
cauaauuauuauuuggcc

SEQ ID NO: 2586422 - RNA, 19 nt, Human
cauaauuaugacaguuaua

SEQ ID NO: 2586423 - RNA, 15 nt, Human
cauaauuaugacagu

SEQ ID NO: 2586424 - RNA, 17 nt, Human
cauaauuaugacaguua

SEQ ID NO: 2586425 - RNA, 19 nt, Human
cauacagggaugguguuca

SEQ ID NO: 2586426 - RNA, 16 nt, Human
cauacaguuugcacuu

SEQ ID NO: 2586427 - RNA, 21 nt, Human
cauacaggauuugaacucaga

SEQ ID NO: 2586428 - RNA, 12 nt, Human
cauacagcucua

SEQ ID NO: 2586429 - RNA, 18 nt, Human
cauacagcauuacaaauu

SEQ ID NO: 2586430 - RNA, 16 nt, Human
cauacagggauggugu

SEQ ID NO: 2586431 - RNA, 23 nt, Human
cauacaggaagguagaaauaucu

SEQ ID NO: 2586432 - RNA, 23 nt, Human
cauaaugcgugcauaccacuuuu

SEQ ID NO: 2586433 - RNA, 16 nt, Human
cauaaugcuacugucu

SEQ ID NO: 2586434 - RNA, 19 nt, Human
caguuuuccaugaaaacgu

SEQ ID NO: 2586435 - RNA, 13 nt, Human
caguuuuccuucu

SEQ ID NO: 2586436 - RNA, 16 nt, Human
cauaaugugaaguguu

SEQ ID NO: 2586437 - RNA, 15 nt, Human
cauaaugugaagugu

SEQ ID NO: 2586438 - RNA, 13 nt, Human
cauaaugugaagu

SEQ ID NO: 2586439 - RNA, 12 nt, Human
cauaaugugaag

SEQ ID NO: 2586440 - RNA, 19 nt, Human
cauaaugugaaguguuaau

SEQ ID NO: 2586441 - RNA, 17 nt, Human
cauaaugugaaguguua

SEQ ID NO: 2586442 - RNA, 17 nt, Human
cauaauguuacauuauu

SEQ ID NO: 2586443 - RNA, 15 nt, Human
cauaaugcuacuguc

SEQ ID NO: 2586444 - RNA, 14 nt, Human
cauaaugcuacugu

SEQ ID NO: 2586445 - RNA, 22 nt, Human
cauaaugggguccuggccaucc

SEQ ID NO: 2586446 - RNA, 11 nt, Human
cauaaugugaa

SEQ ID NO: 2586447 - RNA, 14 nt, Human
cauaauguauuguu

SEQ ID NO: 2586448 - RNA, 14 nt, Human
cauaaugggguccu

SEQ ID NO: 2586449 - RNA, 15 nt, Human
cauaauguauaaaga

SEQ ID NO: 2586450 - RNA, 18 nt, Human
caguuuuauccacagaaa

SEQ ID NO: 2586451 - RNA, 23 nt, Human
caguuuucaagucaaauuaauaa

SEQ ID NO: 2586452 - RNA, 15 nt, Human
caguuuuaucauuuu

SEQ ID NO: 2586453 - RNA, 15 nt, Human
caguuuuacucugcu

SEQ ID NO: 2586454 - RNA, 12 nt, Human
caguuuucauaa

SEQ ID NO: 2586455 - RNA, 22 nt, Human
caguuuucaagucaaauuaaua

SEQ ID NO: 2586456 - RNA, 12 nt, Human
caguuuuccaug

SEQ ID NO: 2586457 - RNA, 13 nt, Human
caguuuuccauga

SEQ ID NO: 2586458 - RNA, 14 nt, Human
caguuuuccaugaa

SEQ ID NO: 2586459 - RNA, 15 nt, Human
caguuuuccaugaaa

SEQ ID NO: 2586460 - RNA, 16 nt, Human
caguuuuccaugaaaa

SEQ ID NO: 2586461 - RNA, 17 nt, Human
caguuuuccaugaaaac

SEQ ID NO: 2586462 - RNA, 18 nt, Human
caguuuuccaugaaaacg

SEQ ID NO: 2586463 - RNA, 13 nt, Human
caguuuuccauug

SEQ ID NO: 2586464 - RNA, 11 nt, Human
caguuuuccuu

SEQ ID NO: 2586465 - RNA, 22 nt, Human
caguuguuagugugucuuagug

SEQ ID NO: 2586466 - RNA, 18 nt, Human
caguuguuagugugucuu

SEQ ID NO: 2586467 - RNA, 18 nt, Human
caguuuaucauucaagug

SEQ ID NO: 2586468 - RNA, 16 nt, Human
caguuuaucauucaag

SEQ ID NO: 2586469 - RNA, 15 nt, Human
caguuuaucauucaa

SEQ ID NO: 2586470 - RNA, 14 nt, Human
caguuuaucauuca

SEQ ID NO: 2586471 - RNA, 23 nt, Human
caguuguucaauaauaaauauuu

SEQ ID NO: 2586472 - RNA, 19 nt, Human
caguuuaucauucaagugu

SEQ ID NO: 2586473 - RNA, 19 nt, Human
caguuucuguccugcuggu

SEQ ID NO: 2586474 - RNA, 15 nt, Human
caguuucuguccugc

SEQ ID NO: 2586475 - RNA, 14 nt, Human
caguuucugccucu

SEQ ID NO: 2586476 - RNA, 18 nt, Human
caguuucuuagcuuuuua

SEQ ID NO: 2586477 - RNA, 15 nt, Human
caguuucuuagcuuu

SEQ ID NO: 2586478 - RNA, 13 nt, Human
caguuugaacaaa

SEQ ID NO: 2586479 - RNA, 18 nt, Human
caguuucaauucagugcu

SEQ ID NO: 2586480 - RNA, 23 nt, Human
caguuucacuuucacauagaugu

SEQ ID NO: 2586481 - RNA, 17 nt, Human
caguuuccucaucuguc

SEQ ID NO: 2586482 - RNA, 15 nt, Human
caguuucagguguuu

SEQ ID NO: 2586483 - RNA, 22 nt, Human
caguuucagguguuuaguugca

SEQ ID NO: 2586484 - RNA, 21 nt, Human
caguuuguuaguaugaggcau

SEQ ID NO: 2586485 - RNA, 13 nt, Human
caguuuguuuaca

SEQ ID NO: 2586486 - RNA, 16 nt, Human
caguuuuaacuagaau

SEQ ID NO: 2586487 - RNA, 16 nt, Human
caguuuguuuacacac

SEQ ID NO: 2586488 - RNA, 14 nt, Human
caguuuguuuacac

SEQ ID NO: 2586489 - RNA, 18 nt, Human
caguuuguuuacacacgu

SEQ ID NO: 2586490 - RNA, 23 nt, Human
caguuuguuaguaugaggcauuu

SEQ ID NO: 2586491 - RNA, 16 nt, Human
caguuugagacaggag

SEQ ID NO: 2586492 - RNA, 18 nt, Human
caguuugagacaggagac

SEQ ID NO: 2586493 - RNA, 15 nt, Human
caguuugagacagga

SEQ ID NO: 2586494 - RNA, 16 nt, Human
caucacuuuucaguga

SEQ ID NO: 2586495 - RNA, 15 nt, Human
caucacuuuucagug

SEQ ID NO: 2586496 - RNA, 19 nt, Human
caucacuuguacaaaauaa

SEQ ID NO: 2586497 - RNA, 14 nt, Human
caucagaaaggaau

SEQ ID NO: 2586498 - RNA, 19 nt, Human
caucagaaacacccucaca

SEQ ID NO: 2586499 - RNA, 11 nt, Human
caucagaaagg

SEQ ID NO: 2586500 - RNA, 17 nt, Human
caucacuuuucagugau

SEQ ID NO: 2586501 - RNA, 17 nt, Human
caucagaaacacccuca

SEQ ID NO: 2586502 - RNA, 18 nt, Human
cauccucuucugcuuagg

SEQ ID NO: 2586503 - RNA, 15 nt, Human
cauccucuucugcuu

SEQ ID NO: 2586504 - RNA, 16 nt, Human
cauccugacucugccc

SEQ ID NO: 2586505 - RNA, 19 nt, Human
caucccacgcacuccauga

SEQ ID NO: 2586506 - RNA, 11 nt, Human
caucccagagg

SEQ ID NO: 2586507 - RNA, 14 nt, Human
cauccucuucugcu

SEQ ID NO: 2586508 - RNA, 22 nt, Human
cauccucuguacagagcccacg

SEQ ID NO: 2586509 - RNA, 12 nt, Human
caucccagcccc

SEQ ID NO: 2586510 - RNA, 20 nt, Human
caucccaaacccuucagugc

SEQ ID NO: 2586511 - RNA, 13 nt, Human
caucccaacuguc

SEQ ID NO: 2586512 - RNA, 15 nt, Human
caucccacaaguggu

SEQ ID NO: 2586513 - RNA, 23 nt, Human
caucccaaaaucauaagauauuu

SEQ ID NO: 2586514 - RNA, 20 nt, Human
cauccauuucaucuauuucu

SEQ ID NO: 2586515 - RNA, 23 nt, Human
cauccauuucaucuauuucugag

SEQ ID NO: 2586516 - RNA, 11 nt, Human
caucccagccc

SEQ ID NO: 2586517 - RNA, 14 nt, Human
caucccacacccug

SEQ ID NO: 2586518 - RNA, 13 nt, Human
caucccacugcuc

SEQ ID NO: 2586519 - RNA, 21 nt, Human
caucagcacgauuucuguuua

SEQ ID NO: 2586520 - RNA, 18 nt, Human
caucagcauaccuuuauu

SEQ ID NO: 2586521 - RNA, 17 nt, Human
caucagcauaccuuuau

SEQ ID NO: 2586522 - RNA, 13 nt, Human
caucagcauaccu

SEQ ID NO: 2586523 - RNA, 13 nt, Human
caucagaagauaa

SEQ ID NO: 2586524 - RNA, 20 nt, Human
caucagcauaccuuuauugu

SEQ ID NO: 2586525 - RNA, 11 nt, Human
caucagaagga

SEQ ID NO: 2586526 - RNA, 19 nt, Human
caucagcacgauuucuguu

SEQ ID NO: 2586527 - RNA, 19 nt, Human
caucccaaacccuucagug

SEQ ID NO: 2586528 - RNA, 22 nt, Human
cauccauuuauuuggcaucugu

SEQ ID NO: 2586529 - RNA, 19 nt, Human
cauccauuucaucuauuuc

SEQ ID NO: 2586530 - RNA, 16 nt, Human
cauccauuccucaggg

SEQ ID NO: 2586531 - RNA, 17 nt, Human
cauccauuccucaggga

SEQ ID NO: 2586532 - RNA, 18 nt, Human
cauccauuccucagggac

SEQ ID NO: 2586533 - RNA, 19 nt, Human
cauccauuccucagggaca

SEQ ID NO: 2586534 - RNA, 13 nt, Human
caucagcugcuga

SEQ ID NO: 2586535 - RNA, 15 nt, Human
cauccauuccucagg

SEQ ID NO: 2586536 - RNA, 14 nt, Human
caucagcuccagcu

SEQ ID NO: 2586537 - RNA, 18 nt, Human
cauccugaggcuccacuu

SEQ ID NO: 2586538 - RNA, 19 nt, Human
cauccugaggcuccacuug

SEQ ID NO: 2586539 - RNA, 12 nt, Human
cauccugcagcc

SEQ ID NO: 2586540 - RNA, 20 nt, Human
cauccugacucugcccccug

SEQ ID NO: 2586541 - RNA, 19 nt, Human
cauccugacucugcccccu

SEQ ID NO: 2586542 - RNA, 17 nt, Human
cauccugacucugcccc

SEQ ID NO: 2586543 - RNA, 22 nt, Human
cauccugacucugcccccugcu

SEQ ID NO: 2586544 - RNA, 12 nt, Human
cauccugcaggc

SEQ ID NO: 2586545 - RNA, 15 nt, Human
caucuaaacugcccc

SEQ ID NO: 2586546 - RNA, 21 nt, Human
caucuaaacugcccccucugc

SEQ ID NO: 2586547 - RNA, 18 nt, Human
caucuaaauaccugcccu

SEQ ID NO: 2586548 - RNA, 15 nt, Human
caucuaaccucaucu

SEQ ID NO: 2586549 - RNA, 15 nt, Human
caucuaaauaccugc

SEQ ID NO: 2586550 - RNA, 20 nt, Human
cauccugccuuagagccagg

SEQ ID NO: 2586551 - RNA, 20 nt, Human
cauccugcagccuccuccug

SEQ ID NO: 2586552 - RNA, 23 nt, Human
caucuaaaaauagacuuaaaucu

SEQ ID NO: 2586553 - RNA, 22 nt, Human
caucguuuucuucacuguccuc

SEQ ID NO: 2586554 - RNA, 22 nt, Human
caucuggauaggagccugcugg

SEQ ID NO: 2586555 - RNA, 21 nt, Human
caucuggauaggagccugcug

SEQ ID NO: 2586556 - RNA, 20 nt, Human
caucuggauaggagccugcu

SEQ ID NO: 2586557 - RNA, 18 nt, Human
caucuggauaggagccug

SEQ ID NO: 2586558 - RNA, 20 nt, Human
caucuggcaacaucuuuauc

SEQ ID NO: 2586559 - RNA, 18 nt, Human
caucuaaccucaucuucu

SEQ ID NO: 2586560 - RNA, 19 nt, Human
caucuaaccucaucuucuu

SEQ ID NO: 2586561 - RNA, 16 nt, Human
caucuggauaggagcc

SEQ ID NO: 2586562 - RNA, 23 nt, Human
caucuggccguugauguuggcug

SEQ ID NO: 2586563 - RNA, 23 nt, Human
caucuggauaggagccugcuggu

SEQ ID NO: 2586564 - RNA, 21 nt, Human
caucuguauacccucuguuuc

SEQ ID NO: 2586565 - RNA, 20 nt, Human
caucuguauacccucuguuu

SEQ ID NO: 2586566 - RNA, 19 nt, Human
caucuguauacccucuguu

SEQ ID NO: 2586567 - RNA, 18 nt, Human
caucuguauacccucugu

SEQ ID NO: 2586568 - RNA, 19 nt, Human
caucuguaacucuaaaaga

SEQ ID NO: 2586569 - RNA, 22 nt, Human
caucuguauaaguaagaaaaua

SEQ ID NO: 2586570 - RNA, 21 nt, Human
caucuguauaaguaagaaaau

SEQ ID NO: 2586571 - RNA, 20 nt, Human
caucuguauaaguaagaaaa

SEQ ID NO: 2586572 - RNA, 17 nt, Human
caucuguaccucugccu

SEQ ID NO: 2586573 - RNA, 16 nt, Human
caucuguaacucuaaa

SEQ ID NO: 2586574 - RNA, 15 nt, Human
cagucgugccugugu

SEQ ID NO: 2586575 - RNA, 17 nt, Human
cagucgugccugugucc

SEQ ID NO: 2586576 - RNA, 14 nt, Human
cagucgugccugug

SEQ ID NO: 2586577 - RNA, 17 nt, Human
cagucuaauuuuuauuc

SEQ ID NO: 2586578 - RNA, 13 nt, Human
cagucuaauuuuu

SEQ ID NO: 2586579 - RNA, 18 nt, Human
cagucuaauuuuuauuca

SEQ ID NO: 2586580 - RNA, 21 nt, Human
cagucuacccaccucagccuc

SEQ ID NO: 2586581 - RNA, 19 nt, Human
cagucuacccagagaagcc

SEQ ID NO: 2586582 - RNA, 15 nt, Human
cagucuacccagaga

SEQ ID NO: 2586583 - RNA, 14 nt, Human
cagucuacccagag

SEQ ID NO: 2586584 - RNA, 23 nt, Human
cagucuacccaccucagccuccu

SEQ ID NO: 2586585 - RNA, 21 nt, Human
cagucucucucucucucuccc

SEQ ID NO: 2586586 - RNA, 22 nt, Human
cagucugauucccaagcucugc

SEQ ID NO: 2586587 - RNA, 21 nt, Human
cagucugauucccaagcucug

SEQ ID NO: 2586588 - RNA, 22 nt, Human
cagucucccuuucccuucuugg

SEQ ID NO: 2586589 - RNA, 22 nt, Human
cagucucccuucucccaugagg

SEQ ID NO: 2586590 - RNA, 18 nt, Human
cagucucccuucucccau

SEQ ID NO: 2586591 - RNA, 18 nt, Human
cagucucccuuucccuuc

SEQ ID NO: 2586592 - RNA, 15 nt, Human
cagucucggguggcu

SEQ ID NO: 2586593 - RNA, 22 nt, Human
cagucucggguggcuagucaga

SEQ ID NO: 2586594 - RNA, 22 nt, Human
cagucuauccacagagaguccc

SEQ ID NO: 2586595 - RNA, 17 nt, Human
cagucuauccacagaga

SEQ ID NO: 2586596 - RNA, 16 nt, Human
cagucuauccacagag

SEQ ID NO: 2586597 - RNA, 15 nt, Human
cagucuauccacaga

SEQ ID NO: 2586598 - RNA, 13 nt, Human
cagucuauccaca

SEQ ID NO: 2586599 - RNA, 22 nt, Human
cagucuacccagagaagccccu

SEQ ID NO: 2586600 - RNA, 23 nt, Human
cagucuauccacagagaguccca

SEQ ID NO: 2586601 - RNA, 21 nt, Human
caguuauaaguagcaggccaa

SEQ ID NO: 2586602 - RNA, 13 nt, Human
caguuauggcuau

SEQ ID NO: 2586603 - RNA, 19 nt, Human
caguuauggcuauaggugc

SEQ ID NO: 2586604 - RNA, 20 nt, Human
caguuauggcuauaggugcu

SEQ ID NO: 2586605 - RNA, 17 nt, Human
caguuauuauauuuaca

SEQ ID NO: 2586606 - RNA, 21 nt, Human
caguuauuauauuuacaaaug

SEQ ID NO: 2586607 - RNA, 19 nt, Human
caguggugcgaucuggguu

SEQ ID NO: 2586608 - RNA, 17 nt, Human
caguggugaagaaaacu

SEQ ID NO: 2586609 - RNA, 14 nt, Human
caguggugaagaaa

SEQ ID NO: 2586610 - RNA, 23 nt, Human
caguggugaagaaaacuccuuua

SEQ ID NO: 2586611 - RNA, 20 nt, Human
cagugguaagcucuggcuuu

SEQ ID NO: 2586612 - RNA, 17 nt, Human
cagugguaagcucuggc

SEQ ID NO: 2586613 - RNA, 20 nt, Human
cagugguccacaucccggga

SEQ ID NO: 2586614 - RNA, 19 nt, Human
cagugguccauggaaugcu

SEQ ID NO: 2586615 - RNA, 18 nt, Human
caguggucaaaccgcacu

SEQ ID NO: 2586616 - RNA, 13 nt, Human
caguggucucaca

SEQ ID NO: 2586617 - RNA, 21 nt, Human
cagugguaugaucacggcuca

SEQ ID NO: 2586618 - RNA, 15 nt, Human
caguuagcaaacuuu

SEQ ID NO: 2586619 - RNA, 16 nt, Human
caguuagcaaacuuug

SEQ ID NO: 2586620 - RNA, 19 nt, Human
caguuaggguugaguuacu

SEQ ID NO: 2586621 - RNA, 19 nt, Human
caguuacucagcccugggc

SEQ ID NO: 2586622 - RNA, 15 nt, Human
caguuacucugaagg

SEQ ID NO: 2586623 - RNA, 16 nt, Human
caguuacucugaaggg

SEQ ID NO: 2586624 - RNA, 20 nt, Human
caguuacucagaauucucua

SEQ ID NO: 2586625 - RNA, 13 nt, Human
caguuacucagcc

SEQ ID NO: 2586626 - RNA, 14 nt, Human
caguuacucagccc

SEQ ID NO: 2586627 - RNA, 15 nt, Human
caguuacucagcccu

SEQ ID NO: 2586628 - RNA, 16 nt, Human
caguuacucagcccug

SEQ ID NO: 2586629 - RNA, 17 nt, Human
caguuacucagcccugg

SEQ ID NO: 2586630 - RNA, 18 nt, Human
caguuacucagcccuggg

SEQ ID NO: 2586631 - RNA, 13 nt, Human
caguuacucugaa

SEQ ID NO: 2586632 - RNA, 18 nt, Human
cagugggagcugccuguu

SEQ ID NO: 2586633 - RNA, 17 nt, Human
cagugggagcugccugu

SEQ ID NO: 2586634 - RNA, 21 nt, Human
cagugcccaccaacaucccau

SEQ ID NO: 2586635 - RNA, 16 nt, Human
cagugggagcugccug

SEQ ID NO: 2586636 - RNA, 22 nt, Human
cagugggucccacuuccccucc

SEQ ID NO: 2586637 - RNA, 20 nt, Human
cagugggucccacuuccccu

SEQ ID NO: 2586638 - RNA, 18 nt, Human
cagugggucccacuuccc

SEQ ID NO: 2586639 - RNA, 17 nt, Human
cagugggucccacuucc

SEQ ID NO: 2586640 - RNA, 15 nt, Human
cagugggucccacuu

SEQ ID NO: 2586641 - RNA, 14 nt, Human
cagugggucccacu

SEQ ID NO: 2586642 - RNA, 20 nt, Human
cagugguaugaucacggcuc

SEQ ID NO: 2586643 - RNA, 15 nt, Human
cagugguaagcucug

SEQ ID NO: 2586644 - RNA, 23 nt, Human
cagugggucccacuuccccuccu

SEQ ID NO: 2586645 - RNA, 13 nt, Human
cagugggugcccc

SEQ ID NO: 2586646 - RNA, 22 nt, Human
cagugauuaccagggacugagg

SEQ ID NO: 2586647 - RNA, 23 nt, Human
cagucugauucccaagcucugcu

SEQ ID NO: 2586648 - RNA, 19 nt, Human
cagugauuuuuuucuugua

SEQ ID NO: 2586649 - RNA, 15 nt, Human
cagugcaaaugucag

SEQ ID NO: 2586650 - RNA, 22 nt, Human
cagugauuuuuuucuuguaauu

SEQ ID NO: 2586651 - RNA, 12 nt, Human
cagucugcugcc

SEQ ID NO: 2586652 - RNA, 22 nt, Human
cagugcccacaggaucagucug

SEQ ID NO: 2586653 - RNA, 18 nt, Human
cagugcccacaggaucag

SEQ ID NO: 2586654 - RNA, 18 nt, Human
cagugcaagagacucugg

SEQ ID NO: 2586655 - RNA, 11 nt, Human
cagugcaagag

SEQ ID NO: 2586656 - RNA, 19 nt, Human
cagugcaagagacucuggc

SEQ ID NO: 2586657 - RNA, 16 nt, Human
cagugcccaccaacau

SEQ ID NO: 2586658 - RNA, 21 nt, Human
cagugcccacaggaucagucu

SEQ ID NO: 2586659 - RNA, 17 nt, Human
cagugcaacagcacugg

SEQ ID NO: 2586660 - RNA, 20 nt, Human
cagugcaaaugucagauaca

SEQ ID NO: 2586661 - RNA, 15 nt, Human
cagugcaacacugaa

SEQ ID NO: 2586662 - RNA, 16 nt, Human
caguucccagaaucaa

SEQ ID NO: 2586663 - RNA, 15 nt, Human
caguucccagaauca

SEQ ID NO: 2586664 - RNA, 18 nt, Human
caguucauugcacuuuga

SEQ ID NO: 2586665 - RNA, 18 nt, Human
caguucauguuugcuuca

SEQ ID NO: 2586666 - RNA, 23 nt, Human
caguucaguggcagggcucagga

SEQ ID NO: 2586667 - RNA, 14 nt, Human
caguucccagaauc

SEQ ID NO: 2586668 - RNA, 13 nt, Human
caguucccagaau

SEQ ID NO: 2586669 - RNA, 21 nt, Human
caguucccagaaggcauauca

SEQ ID NO: 2586670 - RNA, 15 nt, Human
caguucauugcacuu

SEQ ID NO: 2586671 - RNA, 22 nt, Human
caguuauuauauuuacaaaugg

SEQ ID NO: 2586672 - RNA, 22 nt, Human
caguuaugauuuuuuuuucaua

SEQ ID NO: 2586673 - RNA, 18 nt, Human
caguuaugugaaugaucu

SEQ ID NO: 2586674 - RNA, 20 nt, Human
caguuaugugaaugaucucu

SEQ ID NO: 2586675 - RNA, 23 nt, Human
caguucaaucucccgcugcugcu

SEQ ID NO: 2586676 - RNA, 22 nt, Human
caguucaaucucccgcugcugc

SEQ ID NO: 2586677 - RNA, 19 nt, Human
caguucaaucucccgcugc

SEQ ID NO: 2586678 - RNA, 13 nt, Human
caguucacccuga

SEQ ID NO: 2586679 - RNA, 14 nt, Human
caguucaagaaagc

SEQ ID NO: 2586680 - RNA, 16 nt, Human
caguucaccugcacuu

SEQ ID NO: 2586681 - RNA, 23 nt, Human
caguucagaaucacuucugagaa

SEQ ID NO: 2586682 - RNA, 14 nt, Human
caguucagcuuggg

SEQ ID NO: 2586683 - RNA, 13 nt, Human
caguucagcacca

SEQ ID NO: 2586684 - RNA, 16 nt, Human
caguucagcaccaccc

SEQ ID NO: 2586685 - RNA, 15 nt, Human
caguucagcuugggg

SEQ ID NO: 2586686 - RNA, 17 nt, Human
caguucagcaccacccu

SEQ ID NO: 2586687 - RNA, 17 nt, Human
caguucaggagucccaa

SEQ ID NO: 2586688 - RNA, 20 nt, Human
caguucaggagucccaagga

SEQ ID NO: 2586689 - RNA, 23 nt, Human
caguucaggagucccaaggaaag

SEQ ID NO: 2586690 - RNA, 16 nt, Human
caguucaguaccugga

SEQ ID NO: 2586691 - RNA, 15 nt, Human
caguucaguaccugg

SEQ ID NO: 2586692 - RNA, 23 nt, Human
caguucaguaauaaacuguguuu

SEQ ID NO: 2586693 - RNA, 20 nt, Human
caguucaguggcagggcuca

SEQ ID NO: 2586694 - RNA, 19 nt, Human
caguucaguggcagggcuc

SEQ ID NO: 2586695 - RNA, 18 nt, Human
caguucaguggcagggcu

SEQ ID NO: 2586696 - RNA, 22 nt, Human
caguucaguaccuggaggagga

SEQ ID NO: 2586697 - RNA, 21 nt, Human
caguucaguaccuggaggagg

SEQ ID NO: 2586698 - RNA, 20 nt, Human
caguucaguaccuggaggag

SEQ ID NO: 2586699 - RNA, 19 nt, Human
caguucaguaccuggagga

SEQ ID NO: 2586700 - RNA, 18 nt, Human
caguucaguaccuggagg

SEQ ID NO: 2586701 - RNA, 23 nt, Human
caguucauauguaccauguacau

SEQ ID NO: 2586702 - RNA, 22 nt, Human
caguucaguggcagggcucagg

SEQ ID NO: 2586703 - RNA, 21 nt, Human
caguucaguggcagggcucag

SEQ ID NO: 2586704 - RNA, 16 nt, Human
caguucauguuugcuu

SEQ ID NO: 2586705 - RNA, 17 nt, Human
cauuggaagaccccacc

SEQ ID NO: 2586706 - RNA, 20 nt, Human
cauuggaagaccccacccaa

SEQ ID NO: 2586707 - RNA, 18 nt, Human
cauuggaagaccccaccc

SEQ ID NO: 2586708 - RNA, 17 nt, Human
cauuggacccuuccaug

SEQ ID NO: 2586709 - RNA, 15 nt, Human
cauuggauucugaga

SEQ ID NO: 2586710 - RNA, 20 nt, Human
cauuggauucugagagcugu

SEQ ID NO: 2586711 - RNA, 16 nt, Human
cauuggagauguuuag

SEQ ID NO: 2586712 - RNA, 16 nt, Human
cauuggacccuuccau

SEQ ID NO: 2586713 - RNA, 18 nt, Human
cauuggacccacaugagg

SEQ ID NO: 2586714 - RNA, 15 nt, Human
cauuuagucauguga

SEQ ID NO: 2586715 - RNA, 15 nt, Human
cauuuagguuucuga

SEQ ID NO: 2586716 - RNA, 14 nt, Human
cauugguucuugua

SEQ ID NO: 2586717 - RNA, 18 nt, Human
cauuuaggugaggaagca

SEQ ID NO: 2586718 - RNA, 17 nt, Human
cauuuaguuugauuauu

SEQ ID NO: 2586719 - RNA, 20 nt, Human
cauuuaguucuuuguuauuu

SEQ ID NO: 2586720 - RNA, 17 nt, Human
cauuuagucaugugacc

SEQ ID NO: 2586721 - RNA, 14 nt, Human
cauuuaguucuuug

SEQ ID NO: 2586722 - RNA, 20 nt, Human
cauuuaguccaaugucuuuu

SEQ ID NO: 2586723 - RNA, 14 nt, Human
cauugguggacuac

SEQ ID NO: 2586724 - RNA, 16 nt, Human
cauuuaggugaggaag

SEQ ID NO: 2586725 - RNA, 20 nt, Human
cauuggguccugggucuuuc

SEQ ID NO: 2586726 - RNA, 21 nt, Human
cauuggguccugggucuuuca

SEQ ID NO: 2586727 - RNA, 23 nt, Human
cauuggguuguagccaaagguuc

SEQ ID NO: 2586728 - RNA, 19 nt, Human
cauuggguggguaaauuca

SEQ ID NO: 2586729 - RNA, 18 nt, Human
cauuggguggguaaauuc

SEQ ID NO: 2586730 - RNA, 20 nt, Human
cauuuaugagcucuucaugu

SEQ ID NO: 2586731 - RNA, 23 nt, Human
cauuuaugagcucuucauguuuc

SEQ ID NO: 2586732 - RNA, 20 nt, Human
cauuuggcaaugccaucauc

SEQ ID NO: 2586733 - RNA, 15 nt, Human
cauuuaugauuuaau

SEQ ID NO: 2586734 - RNA, 19 nt, Human
cauuuggcagagcuucuuc

SEQ ID NO: 2586735 - RNA, 16 nt, Human
cauuuaugaagcaagc

SEQ ID NO: 2586736 - RNA, 17 nt, Human
cauuuaugagcucuuca

SEQ ID NO: 2586737 - RNA, 17 nt, Human
cauuuaucuuucuacag

SEQ ID NO: 2586738 - RNA, 20 nt, Human
cauuuauccaccuccaucuu

SEQ ID NO: 2586739 - RNA, 18 nt, Human
cauuuaucaaucaguaua

SEQ ID NO: 2586740 - RNA, 20 nt, Human
cauuuaucaaucaguauaau

SEQ ID NO: 2586741 - RNA, 20 nt, Human
cauuuggucaagauuuugaa

SEQ ID NO: 2586742 - RNA, 21 nt, Human
cauuuggugguuucagaaaug

SEQ ID NO: 2586743 - RNA, 20 nt, Human
cauuugggagacaugugaca

SEQ ID NO: 2586744 - RNA, 18 nt, Human
cauuugggagacauguga

SEQ ID NO: 2586745 - RNA, 18 nt, Human
cauuuggcauuuauuugu

SEQ ID NO: 2586746 - RNA, 21 nt, Human
cauuuggcagggguggcugcc

SEQ ID NO: 2586747 - RNA, 17 nt, Human
cauuugggguagcuaga

SEQ ID NO: 2586748 - RNA, 22 nt, Human
cauuugggguagcuagaggaac

SEQ ID NO: 2586749 - RNA, 16 nt, Human
cauuuguauaaaauaa

SEQ ID NO: 2586750 - RNA, 14 nt, Human
cauuuguauaaaau

SEQ ID NO: 2586751 - RNA, 16 nt, Human
cauuuguuggaaugaa

SEQ ID NO: 2586752 - RNA, 23 nt, Human
cauuuuuuuuaagaaaaaggaug

SEQ ID NO: 2586753 - RNA, 21 nt, Human
cauuuuuuuucagcagacuau

SEQ ID NO: 2586754 - RNA, 18 nt, Human
ccaaaaguggccucuuug

SEQ ID NO: 2586755 - RNA, 21 nt, Human
ccaaaaguggccucuuugucu

SEQ ID NO: 2586756 - RNA, 15 nt, Human
ccaaaaguggccucu

SEQ ID NO: 2586757 - RNA, 22 nt, Human
ccaaaagucaaaaggugccugu

SEQ ID NO: 2586758 - RNA, 15 nt, Human
ccaaaagcuuuuuau

SEQ ID NO: 2586759 - RNA, 23 nt, Human
ccaaaagauugcugaaauuuuau

SEQ ID NO: 2586760 - RNA, 21 nt, Human
ccaaaagucaaaaggugccug

SEQ ID NO: 2586761 - RNA, 13 nt, Human
ccaaaaaaauacu

SEQ ID NO: 2586762 - RNA, 14 nt, Human
ccaaaaggcagaag

SEQ ID NO: 2586763 - RNA, 14 nt, Human
ccaaaagcacuuac

SEQ ID NO: 2586764 - RNA, 14 nt, Human
ccaaaagcugcuca

SEQ ID NO: 2586765 - RNA, 22 nt, Human
ccaaaguacacuguuucaaacu

SEQ ID NO: 2586766 - RNA, 13 nt, Human
ccaaaguauuuuu

SEQ ID NO: 2586767 - RNA, 16 nt, Human
ccaaagucuuaaaaua

SEQ ID NO: 2586768 - RNA, 14 nt, Human
ccaaagugcuggga

SEQ ID NO: 2586769 - RNA, 13 nt, Human
ccaaggaccaggu

SEQ ID NO: 2586770 - RNA, 14 nt, Human
ccaaggaccagguu

SEQ ID NO: 2586771 - RNA, 14 nt, Human
ccaaggaccccuca

SEQ ID NO: 2586772 - RNA, 15 nt, Human
ccaaggaccccucac

SEQ ID NO: 2586773 - RNA, 16 nt, Human
ccaaggaccccucacc

SEQ ID NO: 2586774 - RNA, 23 nt, Human
ccaaggaaaccacagcugcugga

SEQ ID NO: 2586775 - RNA, 22 nt, Human
ccaaggaaaccacagcugcugg

SEQ ID NO: 2586776 - RNA, 21 nt, Human
ccaaggaaaccacagcugcug

SEQ ID NO: 2586777 - RNA, 20 nt, Human
ccaaggaaaccacagcugcu

SEQ ID NO: 2586778 - RNA, 19 nt, Human
ccaaggaaaccacagcugc

SEQ ID NO: 2586779 - RNA, 18 nt, Human
ccaaggaaaccacagcug

SEQ ID NO: 2586780 - RNA, 15 nt, Human
ccaaggacugaggga

SEQ ID NO: 2586781 - RNA, 22 nt, Human
ccaaggaccccucaccuugcaa

SEQ ID NO: 2586782 - RNA, 23 nt, Human
ccaaggacugagggacucugaag

SEQ ID NO: 2586783 - RNA, 18 nt, Human
ccaaggaccccucaccuu

SEQ ID NO: 2586784 - RNA, 11 nt, Human
ccaaggacugc

SEQ ID NO: 2586785 - RNA, 13 nt, Human
ccaaggacugccg

SEQ ID NO: 2586786 - RNA, 15 nt, Human
ccaaggacugccgac

SEQ ID NO: 2586787 - RNA, 14 nt, Human
ccaaggagaaacag

SEQ ID NO: 2586788 - RNA, 15 nt, Human
ccaaggagaaacaga

SEQ ID NO: 2586789 - RNA, 18 nt, Human
ccaaggagaaacagagac

SEQ ID NO: 2586790 - RNA, 21 nt, Human
ccaaggagaaacagagacagg

SEQ ID NO: 2586791 - RNA, 14 nt, Human
ccaaggagacacaa

SEQ ID NO: 2586792 - RNA, 19 nt, Human
ccaaggagaaacagagaca

SEQ ID NO: 2586793 - RNA, 12 nt, Human
ccaaggagcugc

SEQ ID NO: 2586794 - RNA, 13 nt, Human
ccaaggagcugcu

SEQ ID NO: 2586795 - RNA, 14 nt, Human
ccaaggagcugcua

SEQ ID NO: 2586796 - RNA, 15 nt, Human
ccaaggagcugcuau

SEQ ID NO: 2586797 - RNA, 16 nt, Human
ccaaggagcugcuaua

SEQ ID NO: 2586798 - RNA, 22 nt, Human
ccaaggagcugcuauagccugg

SEQ ID NO: 2586799 - RNA, 13 nt, Human
ccaaggaggaaaa

SEQ ID NO: 2586800 - RNA, 21 nt, Human
ccaaggaggaaaaacagacaa

SEQ ID NO: 2586801 - RNA, 23 nt, Human
ccaaggagaugaagcaaacacau

SEQ ID NO: 2586802 - RNA, 14 nt, Human
ccaaggagaugaag

SEQ ID NO: 2586803 - RNA, 19 nt, Human
ccaauggaaccuccuuucu

SEQ ID NO: 2586804 - RNA, 18 nt, Human
ccaauggaaccuccuuuc

SEQ ID NO: 2586805 - RNA, 17 nt, Human
ccaauggaaccuccuuu

SEQ ID NO: 2586806 - RNA, 17 nt, Human
ccaaugcugauguccuc

SEQ ID NO: 2586807 - RNA, 18 nt, Human
ccaaugcuuuuaucaaac

SEQ ID NO: 2586808 - RNA, 14 nt, Human
ccaaugcugauguc

SEQ ID NO: 2586809 - RNA, 18 nt, Human
ccaaugccccacuggcag

SEQ ID NO: 2586810 - RNA, 12 nt, Human
ccaaggaggauu

SEQ ID NO: 2586811 - RNA, 20 nt, Human
ccaaggagggugagugcaag

SEQ ID NO: 2586812 - RNA, 14 nt, Human
ccaaugggagcuca

SEQ ID NO: 2586813 - RNA, 22 nt, Human
ccaauuauaugagacguuuuug

SEQ ID NO: 2586814 - RNA, 23 nt, Human
ccaauggacuaacuugucuuugg

SEQ ID NO: 2586815 - RNA, 14 nt, Human
ccaauuauguuaaa

SEQ ID NO: 2586816 - RNA, 21 nt, Human
ccaauggagacugucucaaga

SEQ ID NO: 2586817 - RNA, 17 nt, Human
ccaauuauguuaaacua

SEQ ID NO: 2586818 - RNA, 15 nt, Human
ccaauuauguuaaac

SEQ ID NO: 2586819 - RNA, 21 nt, Human
ccaauucaacccuuugcccca

SEQ ID NO: 2586820 - RNA, 19 nt, Human
ccaauucgaacuuuuucca

SEQ ID NO: 2586821 - RNA, 14 nt, Human
ccaauucagacagg

SEQ ID NO: 2586822 - RNA, 16 nt, Human
ccaauucagacaggca

SEQ ID NO: 2586823 - RNA, 14 nt, Human
ccaauuccuuguag

SEQ ID NO: 2586824 - RNA, 12 nt, Human
ccaauuccuugu

SEQ ID NO: 2586825 - RNA, 20 nt, Human
ccaauuccuugcacauagua

SEQ ID NO: 2586826 - RNA, 11 nt, Human
ccaauucuuac

SEQ ID NO: 2586827 - RNA, 13 nt, Human
ccaacucacccca

SEQ ID NO: 2586828 - RNA, 16 nt, Human
ccaacuauggccugug

SEQ ID NO: 2586829 - RNA, 15 nt, Human
ccaacuauggccugu

SEQ ID NO: 2586830 - RNA, 14 nt, Human
ccaacuauggccug

SEQ ID NO: 2586831 - RNA, 16 nt, Human
ccaaaucauaguggcu

SEQ ID NO: 2586832 - RNA, 23 nt, Human
ccaaaucagcugcuacuacuccu

SEQ ID NO: 2586833 - RNA, 15 nt, Human
ccaaaucagcugcua

SEQ ID NO: 2586834 - RNA, 23 nt, Human
ccaaagugccacucauuccugua

SEQ ID NO: 2586835 - RNA, 15 nt, Human
ccaaaucaaaauaug

SEQ ID NO: 2586836 - RNA, 15 nt, Human
ccaagcucugcuccu

SEQ ID NO: 2586837 - RNA, 14 nt, Human
ccaagcucugcucc

SEQ ID NO: 2586838 - RNA, 12 nt, Human
ccaacuccagga

SEQ ID NO: 2586839 - RNA, 16 nt, Human
ccaagcucugcuccuc

SEQ ID NO: 2586840 - RNA, 14 nt, Human
ccaacucaccugag

SEQ ID NO: 2586841 - RNA, 20 nt, Human
ccaaaucacugaacuuugcu

SEQ ID NO: 2586842 - RNA, 21 nt, Human
ccaacucaccccagccccaaa

SEQ ID NO: 2586843 - RNA, 21 nt, Human
ccaacuccagaaagugacaag

SEQ ID NO: 2586844 - RNA, 21 nt, Human
cauucuccaccugccagggac

SEQ ID NO: 2586845 - RNA, 19 nt, Human
cauucuccaccugccaggg

SEQ ID NO: 2586846 - RNA, 18 nt, Human
cauucuccaccugccagg

SEQ ID NO: 2586847 - RNA, 17 nt, Human
cauucuccaccugccag

SEQ ID NO: 2586848 - RNA, 19 nt, Human
cauuauuaguacugcucuu

SEQ ID NO: 2586849 - RNA, 13 nt, Human
cauuauuaucaac

SEQ ID NO: 2586850 - RNA, 16 nt, Human
cauuaucgggagcagu

SEQ ID NO: 2586851 - RNA, 14 nt, Human
cauuaucccugaau

SEQ ID NO: 2586852 - RNA, 17 nt, Human
cauuaucgggagcagug

SEQ ID NO: 2586853 - RNA, 18 nt, Human
cauuaucgggagcagugu

SEQ ID NO: 2586854 - RNA, 20 nt, Human
cauuaucgggagcagugucu

SEQ ID NO: 2586855 - RNA, 21 nt, Human
cauuaucgggagcagugucuu

SEQ ID NO: 2586856 - RNA, 23 nt, Human
cauuaucgggagcagugucuucc

SEQ ID NO: 2586857 - RNA, 14 nt, Human
cauucucugucuca

SEQ ID NO: 2586858 - RNA, 19 nt, Human
cauucucugucucauccau

SEQ ID NO: 2586859 - RNA, 23 nt, Human
cauucucugucucauccaucauc

SEQ ID NO: 2586860 - RNA, 16 nt, Human
cauucugaaggagccc

SEQ ID NO: 2586861 - RNA, 12 nt, Human
cauucucucucc

SEQ ID NO: 2586862 - RNA, 16 nt, Human
cauucucucuccugua

SEQ ID NO: 2586863 - RNA, 15 nt, Human
cauucucucuccugu

SEQ ID NO: 2586864 - RNA, 16 nt, Human
cauucucucuccuguc

SEQ ID NO: 2586865 - RNA, 18 nt, Human
cauucucucuccugucca

SEQ ID NO: 2586866 - RNA, 20 nt, Human
cauucucucuccuguccaac

SEQ ID NO: 2586867 - RNA, 12 nt, Human
cauucucugaag

SEQ ID NO: 2586868 - RNA, 13 nt, Human
cauucucugaaga

SEQ ID NO: 2586869 - RNA, 20 nt, Human
cauucuccuuguguuacuaa

SEQ ID NO: 2586870 - RNA, 18 nt, Human
cauguauuggccuggagg

SEQ ID NO: 2586871 - RNA, 17 nt, Human
cauguauuggccuggag

SEQ ID NO: 2586872 - RNA, 16 nt, Human
cauguauuggccugga

SEQ ID NO: 2586873 - RNA, 15 nt, Human
cauguauuggccugg

SEQ ID NO: 2586874 - RNA, 14 nt, Human
cauguauuggccug

SEQ ID NO: 2586875 - RNA, 15 nt, Human
cauguauuauuucau

SEQ ID NO: 2586876 - RNA, 21 nt, Human
cauguauugcacauuguaaaa

SEQ ID NO: 2586877 - RNA, 18 nt, Human
cauguauugcacauugua

SEQ ID NO: 2586878 - RNA, 17 nt, Human
cauguauugcacauugu

SEQ ID NO: 2586879 - RNA, 13 nt, Human
cauguaugucuug

SEQ ID NO: 2586880 - RNA, 23 nt, Human
cauguaucuaugcauuuucugga

SEQ ID NO: 2586881 - RNA, 22 nt, Human
cauguaugucuuggacacugua

SEQ ID NO: 2586882 - RNA, 21 nt, Human
cauguaugucuuggacacugu

SEQ ID NO: 2586883 - RNA, 18 nt, Human
cauguaugucuuggacac

SEQ ID NO: 2586884 - RNA, 17 nt, Human
cauguaugucuuggaca

SEQ ID NO: 2586885 - RNA, 21 nt, Human
cauguauguuuugguaucugu

SEQ ID NO: 2586886 - RNA, 12 nt, Human
cauguauguuuu

SEQ ID NO: 2586887 - RNA, 22 nt, Human
cauguauguuuugguaucuguu

SEQ ID NO: 2586888 - RNA, 13 nt, Human
cauguucuuaauu

SEQ ID NO: 2586889 - RNA, 16 nt, Human
cauguucuuaauucuu

SEQ ID NO: 2586890 - RNA, 17 nt, Human
cauguuaccuccuauaa

SEQ ID NO: 2586891 - RNA, 21 nt, Human
cauguuacauaagauaaaugu

SEQ ID NO: 2586892 - RNA, 16 nt, Human
cauguccaagaagccc

SEQ ID NO: 2586893 - RNA, 15 nt, Human
cauguccaagaagcc

SEQ ID NO: 2586894 - RNA, 16 nt, Human
cauguuacauaagaua

SEQ ID NO: 2586895 - RNA, 17 nt, Human
cauguuacauaagauaa

SEQ ID NO: 2586896 - RNA, 13 nt, Human
cauuaucccugaa

SEQ ID NO: 2586897 - RNA, 22 nt, Human
cauuaucauguguaaucaauaa

SEQ ID NO: 2586898 - RNA, 18 nt, Human
cauuaucauguguaauca

SEQ ID NO: 2586899 - RNA, 16 nt, Human
cauuaucauguguaau

SEQ ID NO: 2586900 - RNA, 15 nt, Human
cauuaucauguguaa

SEQ ID NO: 2586901 - RNA, 14 nt, Human
cauuaucaugugua

SEQ ID NO: 2586902 - RNA, 13 nt, Human
cauuaucaugugu

SEQ ID NO: 2586903 - RNA, 12 nt, Human
cauuaucaugug

SEQ ID NO: 2586904 - RNA, 20 nt, Human
cauguuggccaggcugcucu

SEQ ID NO: 2586905 - RNA, 19 nt, Human
cauuaucacuuuaaagccc

SEQ ID NO: 2586906 - RNA, 19 nt, Human
cauuauauuuauuacugua

SEQ ID NO: 2586907 - RNA, 19 nt, Human
cauguuggccaggcugguc

SEQ ID NO: 2586908 - RNA, 17 nt, Human
cauguuggccaggcugg

SEQ ID NO: 2586909 - RNA, 18 nt, Human
cauguuggccaggcuggu

SEQ ID NO: 2586910 - RNA, 18 nt, Human
cauguucuuaauucuuag

SEQ ID NO: 2586911 - RNA, 13 nt, Human
cauguuaauuuca

SEQ ID NO: 2586912 - RNA, 14 nt, Human
cauguucugcuuuc

SEQ ID NO: 2586913 - RNA, 16 nt, Human
caugaauccaguccag

SEQ ID NO: 2586914 - RNA, 23 nt, Human
caugaaguuuccuuggcuggugc

SEQ ID NO: 2586915 - RNA, 22 nt, Human
caugaaguuuccuuggcuggug

SEQ ID NO: 2586916 - RNA, 20 nt, Human
caucugucaccaauugguua

SEQ ID NO: 2586917 - RNA, 21 nt, Human
caugaauauuuaguguucaua

SEQ ID NO: 2586918 - RNA, 15 nt, Human
caugaaucugcaaug

SEQ ID NO: 2586919 - RNA, 20 nt, Human
caugaaucgcuucucuuuug

SEQ ID NO: 2586920 - RNA, 18 nt, Human
caugaaucgcuucucuuu

SEQ ID NO: 2586921 - RNA, 17 nt, Human
caugaaucgcuucucuu

SEQ ID NO: 2586922 - RNA, 16 nt, Human
caugaaucgcuucucu

SEQ ID NO: 2586923 - RNA, 15 nt, Human
caugaaucgcuucuc

SEQ ID NO: 2586924 - RNA, 21 nt, Human
caugaaucccacccacaugug

SEQ ID NO: 2586925 - RNA, 22 nt, Human
caugaaugguauggaacucucu

SEQ ID NO: 2586926 - RNA, 16 nt, Human
caugaaugcacacuag

SEQ ID NO: 2586927 - RNA, 16 nt, Human
caugaauuugugaagg

SEQ ID NO: 2586928 - RNA, 13 nt, Human
caugacaaagacu

SEQ ID NO: 2586929 - RNA, 21 nt, Human
caugaauuuuuuucaucuucu

SEQ ID NO: 2586930 - RNA, 19 nt, Human
caugacaacuuugccagcu

SEQ ID NO: 2586931 - RNA, 21 nt, Human
caugacaacuuugccagcuuu

SEQ ID NO: 2586932 - RNA, 14 nt, Human
caugacaagcccca

SEQ ID NO: 2586933 - RNA, 15 nt, Human
caugacaagccccag

SEQ ID NO: 2586934 - RNA, 16 nt, Human
caugaugcugggauuu

SEQ ID NO: 2586935 - RNA, 18 nt, Human
caugauggagcgcaccug

SEQ ID NO: 2586936 - RNA, 19 nt, Human
caugauggagcgcaccugc

SEQ ID NO: 2586937 - RNA, 15 nt, Human
caugauggcaacaga

SEQ ID NO: 2586938 - RNA, 19 nt, Human
caugauggcaacagaucug

SEQ ID NO: 2586939 - RNA, 15 nt, Human
caugaugcugggauu

SEQ ID NO: 2586940 - RNA, 12 nt, Human
caugauggaguc

SEQ ID NO: 2586941 - RNA, 19 nt, Human
caugauggagucagguuug

SEQ ID NO: 2586942 - RNA, 23 nt, Human
caugauggagucagguuuggggu

SEQ ID NO: 2586943 - RNA, 18 nt, Human
caugacaagccccaggca

SEQ ID NO: 2586944 - RNA, 16 nt, Human
caugacaagccccagg

SEQ ID NO: 2586945 - RNA, 17 nt, Human
caugacaagccccaggc

SEQ ID NO: 2586946 - RNA, 12 nt, Human
caugcaagguca

SEQ ID NO: 2586947 - RNA, 15 nt, Human
caugcaaggucauuu

SEQ ID NO: 2586948 - RNA, 15 nt, Human
caugcaaaggcuggg

SEQ ID NO: 2586949 - RNA, 14 nt, Human
caugcaaaggcugg

SEQ ID NO: 2586950 - RNA, 16 nt, Human
caugcaaaggcuggga

SEQ ID NO: 2586951 - RNA, 14 nt, Human
caugcaaaugcugu

SEQ ID NO: 2586952 - RNA, 16 nt, Human
caugcaaaugcuguau

SEQ ID NO: 2586953 - RNA, 22 nt, Human
caugcaaaugcuguauucuucu

SEQ ID NO: 2586954 - RNA, 14 nt, Human
caugcaaggggaaa

SEQ ID NO: 2586955 - RNA, 22 nt, Human
cauggcccucccaguaccuccu

SEQ ID NO: 2586956 - RNA, 14 nt, Human
cauggcccucccag

SEQ ID NO: 2586957 - RNA, 23 nt, Human
cauggcccucccaguaccuccug

SEQ ID NO: 2586958 - RNA, 12 nt, Human
cauggcccuggg

SEQ ID NO: 2586959 - RNA, 14 nt, Human
cauggcccuggggu

SEQ ID NO: 2586960 - RNA, 18 nt, Human
cauggccccucugaccug

SEQ ID NO: 2586961 - RNA, 17 nt, Human
cauggccccucugaccu

SEQ ID NO: 2586962 - RNA, 16 nt, Human
cauggccccugugagu

SEQ ID NO: 2586963 - RNA, 15 nt, Human
cauggccccugugag

SEQ ID NO: 2586964 - RNA, 15 nt, Human
cauggcccucauuaa

SEQ ID NO: 2586965 - RNA, 22 nt, Human
cauggcccucauuaaugacacu

SEQ ID NO: 2586966 - RNA, 16 nt, Human
cauggccccucugacc

SEQ ID NO: 2586967 - RNA, 13 nt, Human
cauggccccucug

SEQ ID NO: 2586968 - RNA, 12 nt, Human
cauggccccucu

SEQ ID NO: 2586969 - RNA, 19 nt, Human
caugcaaggggaaaaucuc

SEQ ID NO: 2586970 - RNA, 20 nt, Human
caugcaaggggaaaaucuca

SEQ ID NO: 2586971 - RNA, 15 nt, Human
cauggccagguggcc

SEQ ID NO: 2586972 - RNA, 17 nt, Human
caugcuccuggcccacu

SEQ ID NO: 2586973 - RNA, 14 nt, Human
caugcuccuggccc

SEQ ID NO: 2586974 - RNA, 16 nt, Human
caugcuccuggcccac

SEQ ID NO: 2586975 - RNA, 19 nt, Human
cauggccuaugcacauaug

SEQ ID NO: 2586976 - RNA, 17 nt, Human
cauggccuaugcacaua

SEQ ID NO: 2586977 - RNA, 15 nt, Human
cauggcuuccuccuc

SEQ ID NO: 2586978 - RNA, 18 nt, Human
cauggcuuccuccucccu

SEQ ID NO: 2586979 - RNA, 16 nt, Human
cauggcuuccuccucc

SEQ ID NO: 2586980 - RNA, 21 nt, Human
cauggccuauuauauuaaaau

SEQ ID NO: 2586981 - RNA, 20 nt, Human
cauggccuauuauauuaaaa

SEQ ID NO: 2586982 - RNA, 17 nt, Human
cauggcuuccuccugcg

SEQ ID NO: 2586983 - RNA, 15 nt, Human
cauggcuuccuccug

SEQ ID NO: 2586984 - RNA, 21 nt, Human
cauggccucuucagaucucua

SEQ ID NO: 2586985 - RNA, 16 nt, Human
cauggccuaugcacau

SEQ ID NO: 2586986 - RNA, 14 nt, Human
cauggccgugaacu

SEQ ID NO: 2586987 - RNA, 18 nt, Human
caugggaaaggggaaguu

SEQ ID NO: 2586988 - RNA, 18 nt, Human
caugggaaagccaccucu

SEQ ID NO: 2586989 - RNA, 18 nt, Human
cauggcuugccacagcuc

SEQ ID NO: 2586990 - RNA, 15 nt, Human
cauggcuugccacag

SEQ ID NO: 2586991 - RNA, 19 nt, Human
cauggcuugccacagcucu

SEQ ID NO: 2586992 - RNA, 20 nt, Human
caugggaagacgaggcccuc

SEQ ID NO: 2586993 - RNA, 19 nt, Human
caugggaagacgaggcccu

SEQ ID NO: 2586994 - RNA, 20 nt, Human
caugggaaaugucaacaagu

SEQ ID NO: 2586995 - RNA, 21 nt, Human
ccugaggcugggcucccuucc

SEQ ID NO: 2586996 - RNA, 19 nt, Human
ccugaggcugggcucccuu

SEQ ID NO: 2586997 - RNA, 17 nt, Human
ccugaggcugggcuccc

SEQ ID NO: 2586998 - RNA, 16 nt, Human
ccugaggcugggcucc

SEQ ID NO: 2586999 - RNA, 15 nt, Human
ccugacuccucuaag

SEQ ID NO: 2587000 - RNA, 13 nt, Human
ccugacuccucua

SEQ ID NO: 2587001 - RNA, 22 nt, Human
ccugaccugugagcccagcugg

SEQ ID NO: 2587002 - RNA, 21 nt, Human
ccugaccuugaggagucuugu

SEQ ID NO: 2587003 - RNA, 21 nt, Human
ccucuuugcuuugcuuucugc

SEQ ID NO: 2587004 - RNA, 23 nt, Human
ccugaccuugaggagucuugugu

SEQ ID NO: 2587005 - RNA, 22 nt, Human
ccugaccuugaggagucuugug

SEQ ID NO: 2587006 - RNA, 13 nt, Human
ccugacucauucu

SEQ ID NO: 2587007 - RNA, 10 nt, Human
ccugacucaa

SEQ ID NO: 2587008 - RNA, 18 nt, Human
ccugaccugugagcccag

SEQ ID NO: 2587009 - RNA, 19 nt, Human
ccugaccugugagcccagc

SEQ ID NO: 2587010 - RNA, 20 nt, Human
ccugaccugugagcccagcu

SEQ ID NO: 2587011 - RNA, 21 nt, Human
ccugaccugugagcccagcug

SEQ ID NO: 2587012 - RNA, 20 nt, Human
ccucuuuggcuccccuguac

SEQ ID NO: 2587013 - RNA, 19 nt, Human
ccucuuuggcuccccugua

SEQ ID NO: 2587014 - RNA, 14 nt, Human
ccugaccugugagc

SEQ ID NO: 2587015 - RNA, 16 nt, Human
ccugaccugucucacc

SEQ ID NO: 2587016 - RNA, 14 nt, Human
ccugaggcuguggu

SEQ ID NO: 2587017 - RNA, 23 nt, Human
ccugagggccccucugcccagcu

SEQ ID NO: 2587018 - RNA, 20 nt, Human
ccugacuccucuaagccacu

SEQ ID NO: 2587019 - RNA, 18 nt, Human
ccugaggggcaucugccc

SEQ ID NO: 2587020 - RNA, 12 nt, Human
ccugaggggccu

SEQ ID NO: 2587021 - RNA, 19 nt, Human
ccugaggggcaucugcccc

SEQ ID NO: 2587022 - RNA, 20 nt, Human
ccugaggggcaucugccccu

SEQ ID NO: 2587023 - RNA, 22 nt, Human
ccugaggggcaucugccccucc

SEQ ID NO: 2587024 - RNA, 23 nt, Human
ccugaggggcaucugccccuccc

SEQ ID NO: 2587025 - RNA, 16 nt, Human
ccugaggggccucuua

SEQ ID NO: 2587026 - RNA, 23 nt, Human
ccugagucugcuauauuuucaug

SEQ ID NO: 2587027 - RNA, 18 nt, Human
ccugagucuccugugccc

SEQ ID NO: 2587028 - RNA, 16 nt, Human
ccugagucuccugugc

SEQ ID NO: 2587029 - RNA, 20 nt, Human
ccugaguggaucuccaagga

SEQ ID NO: 2587030 - RNA, 19 nt, Human
ccugaguggaucuccaagg

SEQ ID NO: 2587031 - RNA, 14 nt, Human
ccugaguggugcca

SEQ ID NO: 2587032 - RNA, 18 nt, Human
ccugaguggaucuccaag

SEQ ID NO: 2587033 - RNA, 14 nt, Human
ccugaguggaucuc

SEQ ID NO: 2587034 - RNA, 13 nt, Human
ccugaguggaucu

SEQ ID NO: 2587035 - RNA, 15 nt, Human
ccugagugccuggcc

SEQ ID NO: 2587036 - RNA, 14 nt, Human
ccugagugccuggc

SEQ ID NO: 2587037 - RNA, 12 nt, Human
ccugcagagcug

SEQ ID NO: 2587038 - RNA, 13 nt, Human
ccugcagagcugc

SEQ ID NO: 2587039 - RNA, 14 nt, Human
ccugcagagcugcg

SEQ ID NO: 2587040 - RNA, 17 nt, Human
ccugcagagcugcgggc

SEQ ID NO: 2587041 - RNA, 14 nt, Human
ccugaguuccuagc

SEQ ID NO: 2587042 - RNA, 16 nt, Human
ccugaguggugccaaa

SEQ ID NO: 2587043 - RNA, 23 nt, Human
ccugaguggaucuccaaggacca

SEQ ID NO: 2587044 - RNA, 11 nt, Human
ccugcagagag

SEQ ID NO: 2587045 - RNA, 16 nt, Human
ccugcagacucacugu

SEQ ID NO: 2587046 - RNA, 18 nt, Human
ccugaguuccuagccacc

SEQ ID NO: 2587047 - RNA, 17 nt, Human
ccugcaggcagccaggc

SEQ ID NO: 2587048 - RNA, 16 nt, Human
ccugcaggcagccagg

SEQ ID NO: 2587049 - RNA, 12 nt, Human
ccugcagagggc

SEQ ID NO: 2587050 - RNA, 15 nt, Human
ccugcaggcagccag

SEQ ID NO: 2587051 - RNA, 21 nt, Human
ccugcaggcagccaggccaca

SEQ ID NO: 2587052 - RNA, 20 nt, Human
ccugcaggcagccaggccac

SEQ ID NO: 2587053 - RNA, 19 nt, Human
ccugcaggcagccaggcca

SEQ ID NO: 2587054 - RNA, 18 nt, Human
ccugcaggcagccaggcc

SEQ ID NO: 2587055 - RNA, 23 nt, Human
ccugcaggcagccaggccacaag

SEQ ID NO: 2587056 - RNA, 14 nt, Human
ccugcagagggcac

SEQ ID NO: 2587057 - RNA, 15 nt, Human
ccugcagagagaagc

SEQ ID NO: 2587058 - RNA, 13 nt, Human
ccugcagagagaa

SEQ ID NO: 2587059 - RNA, 16 nt, Human
ccugcagagagaagcc

SEQ ID NO: 2587060 - RNA, 21 nt, Human
ccucugcuacguuccuauugu

SEQ ID NO: 2587061 - RNA, 11 nt, Human
ccucugcuacg

SEQ ID NO: 2587062 - RNA, 20 nt, Human
ccucugcggaccccagcugu

SEQ ID NO: 2587063 - RNA, 18 nt, Human
ccucugcggaccccagcu

SEQ ID NO: 2587064 - RNA, 17 nt, Human
ccucugcggaccccagc

SEQ ID NO: 2587065 - RNA, 16 nt, Human
ccucugcggaccccag

SEQ ID NO: 2587066 - RNA, 19 nt, Human
ccucugccugucuccccca

SEQ ID NO: 2587067 - RNA, 13 nt, Human
ccucugcggaccc

SEQ ID NO: 2587068 - RNA, 18 nt, Human
ccucugccugucccucuc

SEQ ID NO: 2587069 - RNA, 22 nt, Human
ccucugccugucccucucaggc

SEQ ID NO: 2587070 - RNA, 15 nt, Human
ccucugccugucucc

SEQ ID NO: 2587071 - RNA, 14 nt, Human
ccucugccucaaug

SEQ ID NO: 2587072 - RNA, 19 nt, Human
ccucugccugaaccuucca

SEQ ID NO: 2587073 - RNA, 21 nt, Human
ccucugccugaaccuuccauc

SEQ ID NO: 2587074 - RNA, 19 nt, Human
ccucugccugucccucuca

SEQ ID NO: 2587075 - RNA, 21 nt, Human
ccucugccugaagucacacag

SEQ ID NO: 2587076 - RNA, 17 nt, Human
ccucuucucuuccugua

SEQ ID NO: 2587077 - RNA, 16 nt, Human
ccucuucucuuccugu

SEQ ID NO: 2587078 - RNA, 14 nt, Human
ccucuucucuuccu

SEQ ID NO: 2587079 - RNA, 12 nt, Human
ccucuucucuuc

SEQ ID NO: 2587080 - RNA, 13 nt, Human
ccucuucugggag

SEQ ID NO: 2587081 - RNA, 17 nt, Human
ccucuucugggagggca

SEQ ID NO: 2587082 - RNA, 18 nt, Human
ccucuucugggagggcag

SEQ ID NO: 2587083 - RNA, 21 nt, Human
ccucuucugggagggcagcag

SEQ ID NO: 2587084 - RNA, 20 nt, Human
ccucuucugcuuaggagaga

SEQ ID NO: 2587085 - RNA, 14 nt, Human
ccucuucugcaucu

SEQ ID NO: 2587086 - RNA, 15 nt, Human
ccucuucuggcucaa

SEQ ID NO: 2587087 - RNA, 18 nt, Human
ccucuucugacgugccuu

SEQ ID NO: 2587088 - RNA, 17 nt, Human
ccucuucugacgugccu

SEQ ID NO: 2587089 - RNA, 20 nt, Human
ccucuucugacgugccuuuu

SEQ ID NO: 2587090 - RNA, 18 nt, Human
ccucuuuggcuccccugu

SEQ ID NO: 2587091 - RNA, 14 nt, Human
ccucuuuggcuccc

SEQ ID NO: 2587092 - RNA, 13 nt, Human
ccucuuugcuuug

SEQ ID NO: 2587093 - RNA, 14 nt, Human
ccucuuugcuuugc

SEQ ID NO: 2587094 - RNA, 15 nt, Human
ccucuuugcuuugcu

SEQ ID NO: 2587095 - RNA, 17 nt, Human
ccucuuugcuuugcuuu

SEQ ID NO: 2587096 - RNA, 19 nt, Human
ccucuuuggucuacacugu

SEQ ID NO: 2587097 - RNA, 15 nt, Human
ccucuuugcauggaa

SEQ ID NO: 2587098 - RNA, 15 nt, Human
ccucuuggcagucac

SEQ ID NO: 2587099 - RNA, 11 nt, Human
ccucuuugcuu

SEQ ID NO: 2587100 - RNA, 16 nt, Human
ccucuuugagugaagc

SEQ ID NO: 2587101 - RNA, 13 nt, Human
ccucuuggccuga

SEQ ID NO: 2587102 - RNA, 15 nt, Human
ccucuuggcugccuu

SEQ ID NO: 2587103 - RNA, 21 nt, Human
ccucuuggaccucugcucuga

SEQ ID NO: 2587104 - RNA, 19 nt, Human
ccucuuggaccucugcucu

SEQ ID NO: 2587105 - RNA, 18 nt, Human
ccucuuggaccucugcuc

SEQ ID NO: 2587106 - RNA, 17 nt, Human
ccucuuggaccucugcu

SEQ ID NO: 2587107 - RNA, 15 nt, Human
ccucuuggaccucug

SEQ ID NO: 2587108 - RNA, 15 nt, Human
ccucuucuucuucag

SEQ ID NO: 2587109 - RNA, 16 nt, Human
ccucuucuucuucaga

SEQ ID NO: 2587110 - RNA, 17 nt, Human
ccucuucuucuucagaa

SEQ ID NO: 2587111 - RNA, 20 nt, Human
ccugccuccuuugugaggaa

SEQ ID NO: 2587112 - RNA, 19 nt, Human
ccugccuccuuugugagga

SEQ ID NO: 2587113 - RNA, 15 nt, Human
ccugccuccuuugug

SEQ ID NO: 2587114 - RNA, 13 nt, Human
ccugccuccuuug

SEQ ID NO: 2587115 - RNA, 22 nt, Human
ccugccuccuuugugaggaagc

SEQ ID NO: 2587116 - RNA, 21 nt, Human
ccugccuccuuugugaggaag

SEQ ID NO: 2587117 - RNA, 23 nt, Human
ccugccuccuuugugaggaagcc

SEQ ID NO: 2587118 - RNA, 17 nt, Human
ccugccucucugcaggu

SEQ ID NO: 2587119 - RNA, 16 nt, Human
ccugcugcaguugcca

SEQ ID NO: 2587120 - RNA, 12 nt, Human
ccugcugcaguu

SEQ ID NO: 2587121 - RNA, 23 nt, Human
ccugcugcaggggcucuggagag

SEQ ID NO: 2587122 - RNA, 22 nt, Human
ccugcugcaggggcucuggaga

SEQ ID NO: 2587123 - RNA, 21 nt, Human
ccugcugcaggggcucuggag

SEQ ID NO: 2587124 - RNA, 20 nt, Human
ccugcugcaggggcucugga

SEQ ID NO: 2587125 - RNA, 17 nt, Human
ccugcugcaggggcucu

SEQ ID NO: 2587126 - RNA, 15 nt, Human
ccugcugcaggggcu

SEQ ID NO: 2587127 - RNA, 13 nt, Human
ccugccuggagcg

SEQ ID NO: 2587128 - RNA, 14 nt, Human
ccugcugcaggggc

SEQ ID NO: 2587129 - RNA, 11 nt, Human
ccugcugcagu

SEQ ID NO: 2587130 - RNA, 14 nt, Human
ccugcugccgccuc

SEQ ID NO: 2587131 - RNA, 15 nt, Human
ccugcugccgccucc

SEQ ID NO: 2587132 - RNA, 18 nt, Human
ccugcugccgccucccag

SEQ ID NO: 2587133 - RNA, 21 nt, Human
ccugcugccgccucccagccu

SEQ ID NO: 2587134 - RNA, 22 nt, Human
ccugcugcaguugccagucacc

SEQ ID NO: 2587135 - RNA, 10 nt, Human
ccugcugcau

SEQ ID NO: 2587136 - RNA, 12 nt, Human
ccugccuggagc

SEQ ID NO: 2587137 - RNA, 22 nt, Human
ccugccugagggccccucugcc

SEQ ID NO: 2587138 - RNA, 21 nt, Human
ccugccugagggccccucugc

SEQ ID NO: 2587139 - RNA, 20 nt, Human
ccugccugagggccccucug

SEQ ID NO: 2587140 - RNA, 19 nt, Human
ccugccugagggccccucu

SEQ ID NO: 2587141 - RNA, 18 nt, Human
ccugccugagggccccuc

SEQ ID NO: 2587142 - RNA, 14 nt, Human
ccugccugagggcc

SEQ ID NO: 2587143 - RNA, 15 nt, Human
ccugccucuguuuga

SEQ ID NO: 2587144 - RNA, 21 nt, Human
ccugccucucugcaggucccu

SEQ ID NO: 2587145 - RNA, 20 nt, Human
ccugccucucugcagguccc

SEQ ID NO: 2587146 - RNA, 20 nt, Human
ccugccuccugccugccccu

SEQ ID NO: 2587147 - RNA, 14 nt, Human
ccugccucuguuug

SEQ ID NO: 2587148 - RNA, 13 nt, Human
ccugccucugccc

SEQ ID NO: 2587149 - RNA, 13 nt, Human
ccugccuccugcc

SEQ ID NO: 2587150 - RNA, 15 nt, Human
ccugccucuucucua

SEQ ID NO: 2587151 - RNA, 20 nt, Human
ccucugccugaagucacaca

SEQ ID NO: 2587152 - RNA, 11 nt, Human
ccucugccuga

SEQ ID NO: 2587153 - RNA, 23 nt, Human
ccucugccucugacacacagcuc

SEQ ID NO: 2587154 - RNA, 21 nt, Human
ccucugccucugacacacagc

SEQ ID NO: 2587155 - RNA, 11 nt, Human
ccucugcccug

SEQ ID NO: 2587156 - RNA, 12 nt, Human
ccucugcccugc

SEQ ID NO: 2587157 - RNA, 13 nt, Human
ccucugcccugcg

SEQ ID NO: 2587158 - RNA, 14 nt, Human
ccucugcccugcgg

SEQ ID NO: 2587159 - RNA, 20 nt, Human
ccucugccucugacacacag

SEQ ID NO: 2587160 - RNA, 11 nt, Human
ccucugccuca

SEQ ID NO: 2587161 - RNA, 12 nt, Human
ccucugccucaa

SEQ ID NO: 2587162 - RNA, 13 nt, Human
ccucugccucaau

SEQ ID NO: 2587163 - RNA, 12 nt, Human
ccucucucacuc

SEQ ID NO: 2587164 - RNA, 19 nt, Human
ccucucugcaggucccuaa

SEQ ID NO: 2587165 - RNA, 18 nt, Human
ccucucugcaggucccua

SEQ ID NO: 2587166 - RNA, 17 nt, Human
ccucucugcaggucccu

SEQ ID NO: 2587167 - RNA, 16 nt, Human
ccucucugcagguccc

SEQ ID NO: 2587168 - RNA, 21 nt, Human
ccucucggaaggcuggcuggg

SEQ ID NO: 2587169 - RNA, 19 nt, Human
ccucucgguggccagcagg

SEQ ID NO: 2587170 - RNA, 17 nt, Human
ccucgagggcagggacu

SEQ ID NO: 2587171 - RNA, 13 nt, Human
ccucgccugacaa

SEQ ID NO: 2587172 - RNA, 18 nt, Human
ccucgccuggccugaggu

SEQ ID NO: 2587173 - RNA, 16 nt, Human
ccucgccuggccugag

SEQ ID NO: 2587174 - RNA, 15 nt, Human
ccucgccuggccuga

SEQ ID NO: 2587175 - RNA, 14 nt, Human
ccucgccuggccug

SEQ ID NO: 2587176 - RNA, 13 nt, Human
ccucgccuggccu

SEQ ID NO: 2587177 - RNA, 12 nt, Human
ccucgccuggcc

SEQ ID NO: 2587178 - RNA, 13 nt, Human
ccucgcugccagc

SEQ ID NO: 2587179 - RNA, 14 nt, Human
ccucgcugccagcu

SEQ ID NO: 2587180 - RNA, 19 nt, Human
ccucgcugccagcucugua

SEQ ID NO: 2587181 - RNA, 20 nt, Human
ccucgcugccagcucuguau

SEQ ID NO: 2587182 - RNA, 15 nt, Human
ccucgggcccagccc

SEQ ID NO: 2587183 - RNA, 14 nt, Human
ccucgggcccagcc

SEQ ID NO: 2587184 - RNA, 13 nt, Human
ccucgggcccagc

SEQ ID NO: 2587185 - RNA, 22 nt, Human
ccucgggcccaccuggccaccu

SEQ ID NO: 2587186 - RNA, 21 nt, Human
ccucgggcccaccuggccacc

SEQ ID NO: 2587187 - RNA, 20 nt, Human
ccucgggcccaccuggccac

SEQ ID NO: 2587188 - RNA, 19 nt, Human
ccucgggcccaccuggcca

SEQ ID NO: 2587189 - RNA, 17 nt, Human
ccucgggcccaccuggc

SEQ ID NO: 2587190 - RNA, 16 nt, Human
ccucgggcccaccugg

SEQ ID NO: 2587191 - RNA, 15 nt, Human
ccucgggcccaccug

SEQ ID NO: 2587192 - RNA, 14 nt, Human
ccucgggcccaccu

SEQ ID NO: 2587193 - RNA, 13 nt, Human
ccucgggcccacc

SEQ ID NO: 2587194 - RNA, 23 nt, Human
ccucgggaaccucacucuugcca

SEQ ID NO: 2587195 - RNA, 21 nt, Human
ccucgggaaccucacucuugc

SEQ ID NO: 2587196 - RNA, 17 nt, Human
ccucgggaaccucacuc

SEQ ID NO: 2587197 - RNA, 22 nt, Human
ccucggcuccugcugcaccaac

SEQ ID NO: 2587198 - RNA, 20 nt, Human
ccucggcuccugcugcacca

SEQ ID NO: 2587199 - RNA, 19 nt, Human
ccucggcuccugcugcacc

SEQ ID NO: 2587200 - RNA, 18 nt, Human
ccucggcuccugcugcac

SEQ ID NO: 2587201 - RNA, 17 nt, Human
ccucggcuccugcugca

SEQ ID NO: 2587202 - RNA, 16 nt, Human
ccucggcuccugcugc

SEQ ID NO: 2587203 - RNA, 15 nt, Human
ccucggcuccugcug

SEQ ID NO: 2587204 - RNA, 12 nt, Human
ccucgcugcuuc

SEQ ID NO: 2587205 - RNA, 19 nt, Human
ccucggcuuuucucagcug

SEQ ID NO: 2587206 - RNA, 20 nt, Human
ccucggcuuuucucagcugg

SEQ ID NO: 2587207 - RNA, 13 nt, Human
ccucuccuuccug

SEQ ID NO: 2587208 - RNA, 15 nt, Human
ccucuccuuccugug

SEQ ID NO: 2587209 - RNA, 18 nt, Human
ccucuccuuuguauauua

SEQ ID NO: 2587210 - RNA, 16 nt, Human
ccucuccuuuguauau

SEQ ID NO: 2587211 - RNA, 15 nt, Human
ccucuccuuuguaua

SEQ ID NO: 2587212 - RNA, 14 nt, Human
ccucuccuuuguau

SEQ ID NO: 2587213 - RNA, 21 nt, Human
ccucuccuuguggccugggcc

SEQ ID NO: 2587214 - RNA, 16 nt, Human
ccucucgagggcaggg

SEQ ID NO: 2587215 - RNA, 22 nt, Human
ccucuccuuuguauauuauuuc

SEQ ID NO: 2587216 - RNA, 17 nt, Human
ccucucggaaggcuggc

SEQ ID NO: 2587217 - RNA, 17 nt, Human
ccucgggcccagccccc

SEQ ID NO: 2587218 - RNA, 16 nt, Human
ccucgggcccagcccc

SEQ ID NO: 2587219 - RNA, 18 nt, Human
ccucgggcccagccccca

SEQ ID NO: 2587220 - RNA, 20 nt, Human
ccuccuuugugaggaagccg

SEQ ID NO: 2587221 - RNA, 19 nt, Human
ccuccuuugugaggaagcc

SEQ ID NO: 2587222 - RNA, 18 nt, Human
ccuccuuugugaggaagc

SEQ ID NO: 2587223 - RNA, 16 nt, Human
ccuccuuucucuucuc

SEQ ID NO: 2587224 - RNA, 15 nt, Human
ccuccuuucucuucu

SEQ ID NO: 2587225 - RNA, 15 nt, Human
ccucgaacuggcugc

SEQ ID NO: 2587226 - RNA, 16 nt, Human
ccucgaacuggcugca

SEQ ID NO: 2587227 - RNA, 16 nt, Human
ccucgagggcagggac

SEQ ID NO: 2587228 - RNA, 14 nt, Human
ccucgagggcaggg

SEQ ID NO: 2587229 - RNA, 16 nt, Human
ccucgagcagaugaug

SEQ ID NO: 2587230 - RNA, 14 nt, Human
ccucgcccuggguc

SEQ ID NO: 2587231 - RNA, 21 nt, Human
ccuccuuucucuucucuguuc

SEQ ID NO: 2587232 - RNA, 20 nt, Human
ccuccuuucucuucucuguu

SEQ ID NO: 2587233 - RNA, 18 nt, Human
ccucgaagcgcgccacuc

SEQ ID NO: 2587234 - RNA, 19 nt, Human
ccucgaagcgcgccacucg

SEQ ID NO: 2587235 - RNA, 23 nt, Human
ccuccggcgucagccuccagccu

SEQ ID NO: 2587236 - RNA, 18 nt, Human
ccuccgggaccuggugcu

SEQ ID NO: 2587237 - RNA, 13 nt, Human
ccuccgccucccg

SEQ ID NO: 2587238 - RNA, 16 nt, Human
ccuccgccucccgggu

SEQ ID NO: 2587239 - RNA, 18 nt, Human
ccuccgcccugccacuca

SEQ ID NO: 2587240 - RNA, 16 nt, Human
ccuccgcccugccacu

SEQ ID NO: 2587241 - RNA, 15 nt, Human
ccuccgcccugccac

SEQ ID NO: 2587242 - RNA, 14 nt, Human
ccuccgcccugcca

SEQ ID NO: 2587243 - RNA, 13 nt, Human
ccuccgcccugcc

SEQ ID NO: 2587244 - RNA, 12 nt, Human
ccuccgcccugc

SEQ ID NO: 2587245 - RNA, 23 nt, Human
ccuccgccauucucaagcccugc

SEQ ID NO: 2587246 - RNA, 14 nt, Human
ccuccgccaggcga

SEQ ID NO: 2587247 - RNA, 16 nt, Human
ccuccgccaggcgaga

SEQ ID NO: 2587248 - RNA, 16 nt, Human
ccuccguugggcccca

SEQ ID NO: 2587249 - RNA, 14 nt, Human
ccuccgugcuuccu

SEQ ID NO: 2587250 - RNA, 18 nt, Human
ccuccguccaggagccug

SEQ ID NO: 2587251 - RNA, 16 nt, Human
ccuccguauuucagac

SEQ ID NO: 2587252 - RNA, 15 nt, Human
ccuccguauuucaga

SEQ ID NO: 2587253 - RNA, 15 nt, Human
ccuccuaccccuccc

SEQ ID NO: 2587254 - RNA, 15 nt, Human
ccuccuaagagagag

SEQ ID NO: 2587255 - RNA, 19 nt, Human
ccuccuaccccucccagcu

SEQ ID NO: 2587256 - RNA, 18 nt, Human
ccuccuaccccucccagc

SEQ ID NO: 2587257 - RNA, 17 nt, Human
ccuccuaccccucccag

SEQ ID NO: 2587258 - RNA, 16 nt, Human
ccuccuaccccuccca

SEQ ID NO: 2587259 - RNA, 21 nt, Human
ccuccuaccccucccagcuga

SEQ ID NO: 2587260 - RNA, 20 nt, Human
ccuccuaccccucccagcug

SEQ ID NO: 2587261 - RNA, 16 nt, Human
ccuccuacccugcgcc

SEQ ID NO: 2587262 - RNA, 20 nt, Human
ccucccugcuguccccucuu

SEQ ID NO: 2587263 - RNA, 19 nt, Human
ccucccugcuguccccucu

SEQ ID NO: 2587264 - RNA, 15 nt, Human
ccucccugcuguccc

SEQ ID NO: 2587265 - RNA, 14 nt, Human
ccucccugcugucc

SEQ ID NO: 2587266 - RNA, 13 nt, Human
ccucccuggagug

SEQ ID NO: 2587267 - RNA, 12 nt, Human
ccucccuggagu

SEQ ID NO: 2587268 - RNA, 14 nt, Human
ccucccuggccugu

SEQ ID NO: 2587269 - RNA, 22 nt, Human
ccucccugcuguccccucuugc

SEQ ID NO: 2587270 - RNA, 21 nt, Human
ccucccugcuguccccucuug

SEQ ID NO: 2587271 - RNA, 23 nt, Human
ccucccugcuguccccucuugcc

SEQ ID NO: 2587272 - RNA, 23 nt, Human
ccucccuggaguguggcugagga

SEQ ID NO: 2587273 - RNA, 15 nt, Human
ccucccuggccuguu

SEQ ID NO: 2587274 - RNA, 12 nt, Human
ccucccuggcuc

SEQ ID NO: 2587275 - RNA, 13 nt, Human
ccucccuggcucc

SEQ ID NO: 2587276 - RNA, 14 nt, Human
ccucccuggcuccc

SEQ ID NO: 2587277 - RNA, 21 nt, Human
ccucccuggcugcccuggccc

SEQ ID NO: 2587278 - RNA, 20 nt, Human
ccucccuggcugcccuggcc

SEQ ID NO: 2587279 - RNA, 18 nt, Human
ccucccuggcugcccugg

SEQ ID NO: 2587280 - RNA, 17 nt, Human
ccucccuggcugcccug

SEQ ID NO: 2587281 - RNA, 16 nt, Human
ccucccuggcugcccu

SEQ ID NO: 2587282 - RNA, 15 nt, Human
ccucccuggcugccc

SEQ ID NO: 2587283 - RNA, 14 nt, Human
ccucccuggcugcc

SEQ ID NO: 2587284 - RNA, 12 nt, Human
ccucccuggcug

SEQ ID NO: 2587285 - RNA, 15 nt, Human
ccucccuggcuccca

SEQ ID NO: 2587286 - RNA, 16 nt, Human
ccucccuggcucccau

SEQ ID NO: 2587287 - RNA, 18 nt, Human
ccucccuggcucccauga

SEQ ID NO: 2587288 - RNA, 20 nt, Human
ccucccuggcucccaugacc

SEQ ID NO: 2587289 - RNA, 19 nt, Human
ccucccuguuccccagaga

SEQ ID NO: 2587290 - RNA, 20 nt, Human
ccucccuguuccccagagaa

SEQ ID NO: 2587291 - RNA, 18 nt, Human
ccucccuguuccccagag

SEQ ID NO: 2587292 - RNA, 16 nt, Human
ccucccuguccuccuc

SEQ ID NO: 2587293 - RNA, 19 nt, Human
ccuccgauccuuccuccca

SEQ ID NO: 2587294 - RNA, 13 nt, Human
ccucccuuagcuc

SEQ ID NO: 2587295 - RNA, 14 nt, Human
ccucccuguuugaa

SEQ ID NO: 2587296 - RNA, 23 nt, Human
ccucccuguugacgaagucucuu

SEQ ID NO: 2587297 - RNA, 22 nt, Human
ccucccuguugacgaagucucu

SEQ ID NO: 2587298 - RNA, 15 nt, Human
ccucccuguccuccu

SEQ ID NO: 2587299 - RNA, 21 nt, Human
ccucccuguugaagcucuggu

SEQ ID NO: 2587300 - RNA, 23 nt, Human
ccucccugucaaagcugucacuu

SEQ ID NO: 2587301 - RNA, 12 nt, Human
ccucccugucaa

SEQ ID NO: 2587302 - RNA, 12 nt, Human
ccucccuguccu

SEQ ID NO: 2587303 - RNA, 11 nt, Human
ccucccugucc

SEQ ID NO: 2587304 - RNA, 14 nt, Human
ccucccuguccucc

SEQ ID NO: 2587305 - RNA, 12 nt, Human
ccucccuggguu

SEQ ID NO: 2587306 - RNA, 10 nt, Human
ccucccuggg

SEQ ID NO: 2587307 - RNA, 23 nt, Human
ccucccuggcugcccuggcccug

SEQ ID NO: 2587308 - RNA, 22 nt, Human
ccucccuggcugcccuggcccu

SEQ ID NO: 2587309 - RNA, 14 nt, Human
ccucccuggguuca

SEQ ID NO: 2587310 - RNA, 13 nt, Human
ccucccuggguuc

SEQ ID NO: 2587311 - RNA, 15 nt, Human
ccucccuggguucag

SEQ ID NO: 2587312 - RNA, 12 nt, Human
ccuccccagggg

SEQ ID NO: 2587313 - RNA, 14 nt, Human
ccuccccaggggag

SEQ ID NO: 2587314 - RNA, 13 nt, Human
ccuccccaggccg

SEQ ID NO: 2587315 - RNA, 21 nt, Human
ccuagcugugaccucuccccu

SEQ ID NO: 2587316 - RNA, 22 nt, Human
ccuagcuuuagacccugggugg

SEQ ID NO: 2587317 - RNA, 21 nt, Human
ccuagcuuuagacccugggug

SEQ ID NO: 2587318 - RNA, 20 nt, Human
ccuagcuuuagacccugggu

SEQ ID NO: 2587319 - RNA, 18 nt, Human
ccuagcuuuagacccugg

SEQ ID NO: 2587320 - RNA, 23 nt, Human
ccuagcuuuagacccuggguggg

SEQ ID NO: 2587321 - RNA, 17 nt, Human
ccuagcuuuagacccug

SEQ ID NO: 2587322 - RNA, 21 nt, Human
ccuagcuugggaggcuucccc

SEQ ID NO: 2587323 - RNA, 15 nt, Human
ccuagcuuagagccu

SEQ ID NO: 2587324 - RNA, 20 nt, Human
ccuagcuugggaggcuuccc

SEQ ID NO: 2587325 - RNA, 22 nt, Human
ccuagcugcacagggcagcugg

SEQ ID NO: 2587326 - RNA, 21 nt, Human
ccuagcugcacagggcagcug

SEQ ID NO: 2587327 - RNA, 19 nt, Human
ccuagcugcacagggcagc

SEQ ID NO: 2587328 - RNA, 17 nt, Human
ccuagcugcuacaaaga

SEQ ID NO: 2587329 - RNA, 15 nt, Human
ccuagcugcuacaaa

SEQ ID NO: 2587330 - RNA, 14 nt, Human
ccuagcugcuacaa

SEQ ID NO: 2587331 - RNA, 23 nt, Human
ccuagcugcacagggcagcuggg

SEQ ID NO: 2587332 - RNA, 18 nt, Human
ccuagcugcuacaaagaa

SEQ ID NO: 2587333 - RNA, 22 nt, Human
ccuagccuuauccucugaucuc

SEQ ID NO: 2587334 - RNA, 19 nt, Human
ccuagccuuauccucugau

SEQ ID NO: 2587335 - RNA, 15 nt, Human
ccucaggcagcucaa

SEQ ID NO: 2587336 - RNA, 14 nt, Human
ccucaggcagcuca

SEQ ID NO: 2587337 - RNA, 22 nt, Human
ccucaggcacuagccuuuggcu

SEQ ID NO: 2587338 - RNA, 19 nt, Human
ccucaggcacuagccuuug

SEQ ID NO: 2587339 - RNA, 13 nt, Human
ccucaggcagcuc

SEQ ID NO: 2587340 - RNA, 18 nt, Human
ccucaggcacuagccuuu

SEQ ID NO: 2587341 - RNA, 17 nt, Human
ccucaggcacuagccuu

SEQ ID NO: 2587342 - RNA, 16 nt, Human
ccucaggcacuagccu

SEQ ID NO: 2587343 - RNA, 15 nt, Human
ccucaggcacuagcc

SEQ ID NO: 2587344 - RNA, 15 nt, Human
ccucagccuggccag

SEQ ID NO: 2587345 - RNA, 16 nt, Human
ccucagccuggccaga

SEQ ID NO: 2587346 - RNA, 17 nt, Human
ccucagccuggccagac

SEQ ID NO: 2587347 - RNA, 18 nt, Human
ccucagccuggccagaca

SEQ ID NO: 2587348 - RNA, 19 nt, Human
ccucaggaggcaggaccuu

SEQ ID NO: 2587349 - RNA, 20 nt, Human
ccucaggcaaggucuggccu

SEQ ID NO: 2587350 - RNA, 11 nt, Human
ccucagccugg

SEQ ID NO: 2587351 - RNA, 12 nt, Human
ccucagccuggc

SEQ ID NO: 2587352 - RNA, 13 nt, Human
ccucagccuggcc

SEQ ID NO: 2587353 - RNA, 14 nt, Human
ccucagccuggcca

SEQ ID NO: 2587354 - RNA, 16 nt, Human
ccuaggaauucccagc

SEQ ID NO: 2587355 - RNA, 17 nt, Human
ccuaggaauucccagcc

SEQ ID NO: 2587356 - RNA, 18 nt, Human
ccucagccuccugaguag

SEQ ID NO: 2587357 - RNA, 15 nt, Human
ccucagccuccugag

SEQ ID NO: 2587358 - RNA, 23 nt, Human
ccucccaacucaccccagcccca

SEQ ID NO: 2587359 - RNA, 21 nt, Human
ccucccaacucaccccagccc

SEQ ID NO: 2587360 - RNA, 20 nt, Human
ccucccaacucaccccagcc

SEQ ID NO: 2587361 - RNA, 17 nt, Human
ccucccaacucacccca

SEQ ID NO: 2587362 - RNA, 11 nt, Human
ccucaggcagg

SEQ ID NO: 2587363 - RNA, 13 nt, Human
ccucaugcaucuc

SEQ ID NO: 2587364 - RNA, 24 nt, Human
ccucaugcccacccccugcccugc

SEQ ID NO: 2587365 - RNA, 20 nt, Human
ccucaugcccacccccugcc

SEQ ID NO: 2587366 - RNA, 15 nt, Human
ccucaugcccacccc

SEQ ID NO: 2587367 - RNA, 14 nt, Human
ccucaugcccaccc

SEQ ID NO: 2587368 - RNA, 18 nt, Human
ccucaugcaucuccaccu

SEQ ID NO: 2587369 - RNA, 15 nt, Human
ccucaugcaucucca

SEQ ID NO: 2587370 - RNA, 13 nt, Human
ccucaugcccacc

SEQ ID NO: 2587371 - RNA, 22 nt, Human
ccuccccagccccuagcccagg

SEQ ID NO: 2587372 - RNA, 17 nt, Human
ccuccccagccccuagc

SEQ ID NO: 2587373 - RNA, 16 nt, Human
ccuccccagccccuag

SEQ ID NO: 2587374 - RNA, 15 nt, Human
ccuccccagccccua

SEQ ID NO: 2587375 - RNA, 14 nt, Human
ccuccccagccccu

SEQ ID NO: 2587376 - RNA, 12 nt, Human
ccuccccagccc

SEQ ID NO: 2587377 - RNA, 22 nt, Human
ccuccccagcauuccagccccu

SEQ ID NO: 2587378 - RNA, 12 nt, Human
ccuccccagcuc

SEQ ID NO: 2587379 - RNA, 22 nt, Human
ccuccccacggccgcuccaggg

SEQ ID NO: 2587380 - RNA, 17 nt, Human
ccuccccacgcccuccc

SEQ ID NO: 2587381 - RNA, 15 nt, Human
ccuccccacgcccuc

SEQ ID NO: 2587382 - RNA, 13 nt, Human
ccuccccacgccc

SEQ ID NO: 2587383 - RNA, 12 nt, Human
ccuccccagcag

SEQ ID NO: 2587384 - RNA, 16 nt, Human
ccuccccagcaggugg

SEQ ID NO: 2587385 - RNA, 17 nt, Human
ccuccccagcagguggg

SEQ ID NO: 2587386 - RNA, 20 nt, Human
ccuccccagcagguggggag

SEQ ID NO: 2587387 - RNA, 23 nt, Human
ccucaugcccacccccugcccug

SEQ ID NO: 2587388 - RNA, 22 nt, Human
ccucaugcccacccccugcccu

SEQ ID NO: 2587389 - RNA, 21 nt, Human
ccucaugcccacccccugccc

SEQ ID NO: 2587390 - RNA, 15 nt, Human
ccucccaccucugug

SEQ ID NO: 2587391 - RNA, 14 nt, Human
ccucccaccucugu

SEQ ID NO: 2587392 - RNA, 13 nt, Human
ccucccaccucug

SEQ ID NO: 2587393 - RNA, 12 nt, Human
ccucccaccucu

SEQ ID NO: 2587394 - RNA, 19 nt, Human
ccucccaccucugugaccu

SEQ ID NO: 2587395 - RNA, 17 nt, Human
ccucccagaacacacuc

SEQ ID NO: 2587396 - RNA, 21 nt, Human
ccucccagaccugccucuucc

SEQ ID NO: 2587397 - RNA, 18 nt, Human
ccucccagaacacacucc

SEQ ID NO: 2587398 - RNA, 13 nt, Human
ccucccacugggg

SEQ ID NO: 2587399 - RNA, 15 nt, Human
ccucccacugggguc

SEQ ID NO: 2587400 - RNA, 22 nt, Human
cccugugauggggcccugccuc

SEQ ID NO: 2587401 - RNA, 21 nt, Human
cccugugauggggcccugccu

SEQ ID NO: 2587402 - RNA, 23 nt, Human
cccugugauggggcccugccucc

SEQ ID NO: 2587403 - RNA, 22 nt, Human
cccugugcaaccucuuggccug

SEQ ID NO: 2587404 - RNA, 14 nt, Human
cccugucuaaaaaa

SEQ ID NO: 2587405 - RNA, 21 nt, Human
cccuuccucuccacugccuuc

SEQ ID NO: 2587406 - RNA, 23 nt, Human
cccuguccugauggucagcuccc

SEQ ID NO: 2587407 - RNA, 22 nt, Human
cccuguccugauggucagcucc

SEQ ID NO: 2587408 - RNA, 20 nt, Human
cccuguccucucuggcuggg

SEQ ID NO: 2587409 - RNA, 15 nt, Human
cccugucgagacacu

SEQ ID NO: 2587410 - RNA, 20 nt, Human
cccugucgagacacuugccu

SEQ ID NO: 2587411 - RNA, 16 nt, Human
cccugucgagacacuu

SEQ ID NO: 2587412 - RNA, 24 nt, Human
cccugucccucccaccucugugac

SEQ ID NO: 2587413 - RNA, 23 nt, Human
cccugucccucccaccucuguga

SEQ ID NO: 2587414 - RNA, 13 nt, Human
cccugucccucua

SEQ ID NO: 2587415 - RNA, 13 nt, Human
cccuguccucacu

SEQ ID NO: 2587416 - RNA, 17 nt, Human
cccuguccucacugcuc

SEQ ID NO: 2587417 - RNA, 16 nt, Human
cccuguccucacugcu

SEQ ID NO: 2587418 - RNA, 15 nt, Human
cccuguccucacugc

SEQ ID NO: 2587419 - RNA, 14 nt, Human
cccuguccucacug

SEQ ID NO: 2587420 - RNA, 18 nt, Human
cccuguccucacugcucc

SEQ ID NO: 2587421 - RNA, 14 nt, Human
cccuguccuccucg

SEQ ID NO: 2587422 - RNA, 15 nt, Human
cccuguccuccucgg

SEQ ID NO: 2587423 - RNA, 16 nt, Human
cccuguccuccucgga

SEQ ID NO: 2587424 - RNA, 17 nt, Human
ccgcagacaggaccagg

SEQ ID NO: 2587425 - RNA, 16 nt, Human
ccgcagacaggaccag

SEQ ID NO: 2587426 - RNA, 19 nt, Human
ccgcagaccuccccagccc

SEQ ID NO: 2587427 - RNA, 18 nt, Human
ccgcagaccuccccagcc

SEQ ID NO: 2587428 - RNA, 17 nt, Human
ccgcagaccuccccagc

SEQ ID NO: 2587429 - RNA, 16 nt, Human
ccgcagaccuccccag

SEQ ID NO: 2587430 - RNA, 15 nt, Human
ccgcagaccucccca

SEQ ID NO: 2587431 - RNA, 13 nt, Human
ccgcagaccuccc

SEQ ID NO: 2587432 - RNA, 16 nt, Human
ccgaccacaccagagc

SEQ ID NO: 2587433 - RNA, 21 nt, Human
ccgcagaccuccccagccccu

SEQ ID NO: 2587434 - RNA, 20 nt, Human
ccgcagaccuccccagcccc

SEQ ID NO: 2587435 - RNA, 18 nt, Human
ccgcccaggcuggccagc

SEQ ID NO: 2587436 - RNA, 17 nt, Human
ccgcccaggcuggccag

SEQ ID NO: 2587437 - RNA, 16 nt, Human
ccgcccaggcuggcca

SEQ ID NO: 2587438 - RNA, 14 nt, Human
ccgcccaggcuggc

SEQ ID NO: 2587439 - RNA, 22 nt, Human
ccgcccaggcuggccagcccca

SEQ ID NO: 2587440 - RNA, 20 nt, Human
ccgcccaggcuggccagccc

SEQ ID NO: 2587441 - RNA, 12 nt, Human
ccgcccaggcuu

SEQ ID NO: 2587442 - RNA, 15 nt, Human
ccgcccacuguccug

SEQ ID NO: 2587443 - RNA, 13 nt, Human
ccgcccacugucc

SEQ ID NO: 2587444 - RNA, 23 nt, Human
ccgcccacaggaagccugcaguc

SEQ ID NO: 2587445 - RNA, 22 nt, Human
ccgcccagagacccaagcugcc

SEQ ID NO: 2587446 - RNA, 18 nt, Human
ccgcccacuguccugggc

SEQ ID NO: 2587447 - RNA, 16 nt, Human
ccgcccacuguccugg

SEQ ID NO: 2587448 - RNA, 19 nt, Human
ccgcccacuguccugggcg

SEQ ID NO: 2587449 - RNA, 17 nt, Human
ccgcccagcugcaccug

SEQ ID NO: 2587450 - RNA, 22 nt, Human
ccgcccagcugcaccugccagc

SEQ ID NO: 2587451 - RNA, 15 nt, Human
cccuuccucuuucca

SEQ ID NO: 2587452 - RNA, 17 nt, Human
ccgaaaacguggcugcu

SEQ ID NO: 2587453 - RNA, 16 nt, Human
ccgaaaacguggcugc

SEQ ID NO: 2587454 - RNA, 18 nt, Human
cccuuccuuuucccugcu

SEQ ID NO: 2587455 - RNA, 17 nt, Human
ccgaaaccaaagaagaa

SEQ ID NO: 2587456 - RNA, 17 nt, Human
cccuuccuuuucccugc

SEQ ID NO: 2587457 - RNA, 14 nt, Human
cccuuccuugcucu

SEQ ID NO: 2587458 - RNA, 24 nt, Human
ccgaaacaggcuacucuccucggc

SEQ ID NO: 2587459 - RNA, 19 nt, Human
ccgaaagggacuuggaagc

SEQ ID NO: 2587460 - RNA, 17 nt, Human
ccgaccagacaccuuga

SEQ ID NO: 2587461 - RNA, 13 nt, Human
ccgaccagacacc

SEQ ID NO: 2587462 - RNA, 15 nt, Human
ccgcagacaggacca

SEQ ID NO: 2587463 - RNA, 15 nt, Human
ccgaccaccugccca

SEQ ID NO: 2587464 - RNA, 18 nt, Human
ccgaccagacaccuugac

SEQ ID NO: 2587465 - RNA, 17 nt, Human
ccgaauagcugggacua

SEQ ID NO: 2587466 - RNA, 16 nt, Human
ccgaauagcugggacu

SEQ ID NO: 2587467 - RNA, 23 nt, Human
ccgaaggugaggagcuugaaacc

SEQ ID NO: 2587468 - RNA, 21 nt, Human
ccgaaguggacuggccccugg

SEQ ID NO: 2587469 - RNA, 22 nt, Human
ccgaaaaauccucuuccucuga

SEQ ID NO: 2587470 - RNA, 13 nt, Human
ccgaagucuuuug

SEQ ID NO: 2587471 - RNA, 23 nt, Human
ccgaaggugcuggaggugggagc

SEQ ID NO: 2587472 - RNA, 15 nt, Human
ccgaaggugcuggag

SEQ ID NO: 2587473 - RNA, 15 nt, Human
ccuaaggacacacua

SEQ ID NO: 2587474 - RNA, 14 nt, Human
ccuaaggacacacu

SEQ ID NO: 2587475 - RNA, 14 nt, Human
ccuaaucuucugaa

SEQ ID NO: 2587476 - RNA, 20 nt, Human
ccuaaucuauggucgggaga

SEQ ID NO: 2587477 - RNA, 22 nt, Human
ccuaaucccugggcauugcuuu

SEQ ID NO: 2587478 - RNA, 19 nt, Human
ccuaaggaucucucaggag

SEQ ID NO: 2587479 - RNA, 17 nt, Human
ccuaaggaucucucagg

SEQ ID NO: 2587480 - RNA, 16 nt, Human
ccuaaggaucucucag

SEQ ID NO: 2587481 - RNA, 17 nt, Human
ccuaaggacacacuaau

SEQ ID NO: 2587482 - RNA, 23 nt, Human
ccuaaggaucucucaggagcaca

SEQ ID NO: 2587483 - RNA, 22 nt, Human
ccuaaggaucucucaggagcac

SEQ ID NO: 2587484 - RNA, 18 nt, Human
ccuaauccaggcagaucc

SEQ ID NO: 2587485 - RNA, 19 nt, Human
ccuaauccaggcagaucca

SEQ ID NO: 2587486 - RNA, 20 nt, Human
ccuaauccaggcagauccag

SEQ ID NO: 2587487 - RNA, 21 nt, Human
ccuaauccaggcagauccagg

SEQ ID NO: 2587488 - RNA, 21 nt, Human
ccuaaucccugggcauugcuu

SEQ ID NO: 2587489 - RNA, 20 nt, Human
ccuagccugugccucuggga

SEQ ID NO: 2587490 - RNA, 12 nt, Human
ccuagcagagag

SEQ ID NO: 2587491 - RNA, 20 nt, Human
ccuagccgaccucagccuuc

SEQ ID NO: 2587492 - RNA, 18 nt, Human
ccuagccgaccucagccu

SEQ ID NO: 2587493 - RNA, 19 nt, Human
ccuagccgaccucagccuu

SEQ ID NO: 2587494 - RNA, 20 nt, Human
ccuagcccucucacauuuau

SEQ ID NO: 2587495 - RNA, 13 nt, Human
ccuagcccucuca

SEQ ID NO: 2587496 - RNA, 14 nt, Human
ccuagccgaccuca

SEQ ID NO: 2587497 - RNA, 15 nt, Human
ccuagccgaccucag

SEQ ID NO: 2587498 - RNA, 16 nt, Human
ccuagccgaccucagc

SEQ ID NO: 2587499 - RNA, 17 nt, Human
ccuagccgaccucagcc

SEQ ID NO: 2587500 - RNA, 20 nt, Human
ccuagcagcaccguucugug

SEQ ID NO: 2587501 - RNA, 21 nt, Human
ccuagcagcaccguucugugc

SEQ ID NO: 2587502 - RNA, 23 nt, Human
ccuagcagcaccguucugugcac

SEQ ID NO: 2587503 - RNA, 19 nt, Human
ccuagcauacguacacauu

SEQ ID NO: 2587504 - RNA, 22 nt, Human
ccuaaugacaucaccacaguuu

SEQ ID NO: 2587505 - RNA, 12 nt, Human
ccuagcagcacc

SEQ ID NO: 2587506 - RNA, 17 nt, Human
ccuagcacuuugggagg

SEQ ID NO: 2587507 - RNA, 20 nt, Human
ccuaagaccggcggccauga

SEQ ID NO: 2587508 - RNA, 17 nt, Human
ccuaagaaucuuuagag

SEQ ID NO: 2587509 - RNA, 13 nt, Human
ccuaacucauacu

SEQ ID NO: 2587510 - RNA, 14 nt, Human
ccgugaggauguca

SEQ ID NO: 2587511 - RNA, 18 nt, Human
ccuaacucauacugugcu

SEQ ID NO: 2587512 - RNA, 15 nt, Human
ccuaacucauacugu

SEQ ID NO: 2587513 - RNA, 20 nt, Human
ccuaacgaaguauccuucag

SEQ ID NO: 2587514 - RNA, 16 nt, Human
ccgugaggccagagac

SEQ ID NO: 2587515 - RNA, 14 nt, Human
ccgugaggccagag

SEQ ID NO: 2587516 - RNA, 13 nt, Human
ccgugaggccaga

SEQ ID NO: 2587517 - RNA, 12 nt, Human
ccgugaggccag

SEQ ID NO: 2587518 - RNA, 17 nt, Human
ccgucuaccugaggggc

SEQ ID NO: 2587519 - RNA, 14 nt, Human
ccggcuccaggcuc

SEQ ID NO: 2587520 - RNA, 13 nt, Human
ccggcuccaggcu

SEQ ID NO: 2587521 - RNA, 16 nt, Human
ccggccucucuggccu

SEQ ID NO: 2587522 - RNA, 15 nt, Human
ccggccucucuggcc

SEQ ID NO: 2587523 - RNA, 13 nt, Human
ccggccucucugg

SEQ ID NO: 2587524 - RNA, 12 nt, Human
ccggccucucug

SEQ ID NO: 2587525 - RNA, 23 nt, Human
ccggccucagcaccccugucucu

SEQ ID NO: 2587526 - RNA, 12 nt, Human
ccggcuccaggc

SEQ ID NO: 2587527 - RNA, 15 nt, Human
ccgucuaccugaggg

SEQ ID NO: 2587528 - RNA, 14 nt, Human
ccgucuaccugagg

SEQ ID NO: 2587529 - RNA, 21 nt, Human
ccgucgaggggcucucagcuc

SEQ ID NO: 2587530 - RNA, 16 nt, Human
ccguccugccuguggc

SEQ ID NO: 2587531 - RNA, 22 nt, Human
ccgucgaggggcucucagcuca

SEQ ID NO: 2587532 - RNA, 15 nt, Human
ccggcuccaggcucc

SEQ ID NO: 2587533 - RNA, 18 nt, Human
ccggcaggguccuagaaa

SEQ ID NO: 2587534 - RNA, 15 nt, Human
ccggccaccucugcg

SEQ ID NO: 2587535 - RNA, 14 nt, Human
ccggccaccucugc

SEQ ID NO: 2587536 - RNA, 13 nt, Human
ccggccaccucug

SEQ ID NO: 2587537 - RNA, 12 nt, Human
ccggccaccucu

SEQ ID NO: 2587538 - RNA, 14 nt, Human
ccggcaugggaaag

SEQ ID NO: 2587539 - RNA, 14 nt, Human
ccggcauggcuggg

SEQ ID NO: 2587540 - RNA, 17 nt, Human
ccggcaguucugggugc

SEQ ID NO: 2587541 - RNA, 22 nt, Human
ccggcaguucugggugcucccu

SEQ ID NO: 2587542 - RNA, 16 nt, Human
ccggccaccugcggug

SEQ ID NO: 2587543 - RNA, 15 nt, Human
ccggccccugcuggu

SEQ ID NO: 2587544 - RNA, 13 nt, Human
ccggcccuggggc

SEQ ID NO: 2587545 - RNA, 24 nt, Human
ccggcccugggcucggaggcugcc

SEQ ID NO: 2587546 - RNA, 22 nt, Human
ccggcccugggcucggaggcug

SEQ ID NO: 2587547 - RNA, 12 nt, Human
ccggcccugggg

SEQ ID NO: 2587548 - RNA, 19 nt, Human
ccggcccugggcucggagg

SEQ ID NO: 2587549 - RNA, 21 nt, Human
ccggcccuccuacccugcgcc

SEQ ID NO: 2587550 - RNA, 20 nt, Human
cccuggccuccccugccacc

SEQ ID NO: 2587551 - RNA, 19 nt, Human
cccuggccuccccugccac

SEQ ID NO: 2587552 - RNA, 20 nt, Human
cccuggccuccggcgucagc

SEQ ID NO: 2587553 - RNA, 13 nt, Human
cccuggccucugu

SEQ ID NO: 2587554 - RNA, 15 nt, Human
cccuggccucugugc

SEQ ID NO: 2587555 - RNA, 18 nt, Human
cccuggccucugugccuu

SEQ ID NO: 2587556 - RNA, 19 nt, Human
cccuggccucugugccuuc

SEQ ID NO: 2587557 - RNA, 19 nt, Human
cccuggcucccacaggccc

SEQ ID NO: 2587558 - RNA, 20 nt, Human
cccuggcucccacaggcccu

SEQ ID NO: 2587559 - RNA, 13 nt, Human
cccuggcucccau

SEQ ID NO: 2587560 - RNA, 14 nt, Human
cccuggcucccaug

SEQ ID NO: 2587561 - RNA, 21 nt, Human
cccuggccuccggcgucagcc

SEQ ID NO: 2587562 - RNA, 15 nt, Human
cccuggcucccauga

SEQ ID NO: 2587563 - RNA, 23 nt, Human
cccuggcucccaugaccauacug

SEQ ID NO: 2587564 - RNA, 18 nt, Human
cccuggcugcccuggccc

SEQ ID NO: 2587565 - RNA, 17 nt, Human
cccuggcugcccuggcc

SEQ ID NO: 2587566 - RNA, 16 nt, Human
cccuggcugcccuggc

SEQ ID NO: 2587567 - RNA, 15 nt, Human
cccuggcugcccugg

SEQ ID NO: 2587568 - RNA, 14 nt, Human
cccuggcugcccug

SEQ ID NO: 2587569 - RNA, 13 nt, Human
cccuggcugcccu

SEQ ID NO: 2587570 - RNA, 23 nt, Human
cccuggcugaccccaaagagccu

SEQ ID NO: 2587571 - RNA, 19 nt, Human
cccuggcugaccccaaaga

SEQ ID NO: 2587572 - RNA, 19 nt, Human
cccuggcugaaggacugug

SEQ ID NO: 2587573 - RNA, 18 nt, Human
cccuggcugaaggacugu

SEQ ID NO: 2587574 - RNA, 15 nt, Human
cccuggcugaaggac

SEQ ID NO: 2587575 - RNA, 14 nt, Human
cccuggcugaagga

SEQ ID NO: 2587576 - RNA, 13 nt, Human
cccuggcucugca

SEQ ID NO: 2587577 - RNA, 19 nt, Human
cccuggcucucagaaggua

SEQ ID NO: 2587578 - RNA, 21 nt, Human
cccuggaugcagccucacagu

SEQ ID NO: 2587579 - RNA, 17 nt, Human
cccuggaugcagccuca

SEQ ID NO: 2587580 - RNA, 13 nt, Human
cccuggaugcagc

SEQ ID NO: 2587581 - RNA, 23 nt, Human
cccuggaguguggcugaggaggc

SEQ ID NO: 2587582 - RNA, 23 nt, Human
cccuggaucaguccuuugaucag

SEQ ID NO: 2587583 - RNA, 14 nt, Human
cccuggccuccccu

SEQ ID NO: 2587584 - RNA, 13 nt, Human
cccuggccucccc

SEQ ID NO: 2587585 - RNA, 11 nt, Human
cccuggccucc

SEQ ID NO: 2587586 - RNA, 17 nt, Human
cccuggcccugaggugu

SEQ ID NO: 2587587 - RNA, 16 nt, Human
cccuggcccugaggug

SEQ ID NO: 2587588 - RNA, 14 nt, Human
cccuggcccugagg

SEQ ID NO: 2587589 - RNA, 23 nt, Human
cccuggcccucaaggccucccac

SEQ ID NO: 2587590 - RNA, 22 nt, Human
cccuggcccucaaggccuccca

SEQ ID NO: 2587591 - RNA, 15 nt, Human
cccuggccgcccccu

SEQ ID NO: 2587592 - RNA, 20 nt, Human
cccuggccgaguccaagcug

SEQ ID NO: 2587593 - RNA, 19 nt, Human
cccuggauccaucaggcca

SEQ ID NO: 2587594 - RNA, 20 nt, Human
cccuggcccucaaggccucc

SEQ ID NO: 2587595 - RNA, 23 nt, Human
cccugcccugguuuccugcccug

SEQ ID NO: 2587596 - RNA, 18 nt, Human
cccugcccugguccaggg

SEQ ID NO: 2587597 - RNA, 13 nt, Human
cccuggaggugcc

SEQ ID NO: 2587598 - RNA, 22 nt, Human
cccugcccugguuuccugcccu

SEQ ID NO: 2587599 - RNA, 14 nt, Human
cccugcccuggucc

SEQ ID NO: 2587600 - RNA, 15 nt, Human
cccugcccuggucca

SEQ ID NO: 2587601 - RNA, 21 nt, Human
cccuggaguguggcugaggag

SEQ ID NO: 2587602 - RNA, 20 nt, Human
cccuggaguguggcugagga

SEQ ID NO: 2587603 - RNA, 15 nt, Human
cccuggagugcaguu

SEQ ID NO: 2587604 - RNA, 18 nt, Human
cccuggagucaugccaag

SEQ ID NO: 2587605 - RNA, 23 nt, Human
cccuggaggugccagcaaagccc

SEQ ID NO: 2587606 - RNA, 13 nt, Human
cccuggagguggc

SEQ ID NO: 2587607 - RNA, 22 nt, Human
cccuggaggugccagcaaagcc

SEQ ID NO: 2587608 - RNA, 20 nt, Human
cccuggaggugccagcaaag

SEQ ID NO: 2587609 - RNA, 18 nt, Human
cccuggaggugccagcaa

SEQ ID NO: 2587610 - RNA, 17 nt, Human
cccuggaggugccagca

SEQ ID NO: 2587611 - RNA, 16 nt, Human
cccuggaggugccagc

SEQ ID NO: 2587612 - RNA, 15 nt, Human
cccuggaggugccag

SEQ ID NO: 2587613 - RNA, 14 nt, Human
cccuggaggugcca

SEQ ID NO: 2587614 - RNA, 13 nt, Human
cccugcccuggga

SEQ ID NO: 2587615 - RNA, 11 nt, Human
cccugcccugg

SEQ ID NO: 2587616 - RNA, 12 nt, Human
cccugcccuggu

SEQ ID NO: 2587617 - RNA, 13 nt, Human
cccugcccugcug

SEQ ID NO: 2587618 - RNA, 22 nt, Human
cccugcccucguggccagcccg

SEQ ID NO: 2587619 - RNA, 21 nt, Human
cccugcccucguggccagccc

SEQ ID NO: 2587620 - RNA, 20 nt, Human
cccugcccucguggccagcc

SEQ ID NO: 2587621 - RNA, 13 nt, Human
cccugcccugcac

SEQ ID NO: 2587622 - RNA, 12 nt, Human
cccugcccugca

SEQ ID NO: 2587623 - RNA, 11 nt, Human
cccugcccugc

SEQ ID NO: 2587624 - RNA, 19 nt, Human
cccugcccucguggccagc

SEQ ID NO: 2587625 - RNA, 18 nt, Human
cccugcccucguggccag

SEQ ID NO: 2587626 - RNA, 17 nt, Human
cccugcccucguggcca

SEQ ID NO: 2587627 - RNA, 16 nt, Human
cccugcccucguggcc

SEQ ID NO: 2587628 - RNA, 14 nt, Human
cccugcccucgugg

SEQ ID NO: 2587629 - RNA, 13 nt, Human
cccugcccucgug

SEQ ID NO: 2587630 - RNA, 15 nt, Human
cccugcccuccccuc

SEQ ID NO: 2587631 - RNA, 22 nt, Human
cccugcccccaggacugggcca

SEQ ID NO: 2587632 - RNA, 20 nt, Human
cccugcccccaggacugggc

SEQ ID NO: 2587633 - RNA, 18 nt, Human
cccugcccccaggacugg

SEQ ID NO: 2587634 - RNA, 17 nt, Human
cccugcccccaggacug

SEQ ID NO: 2587635 - RNA, 16 nt, Human
cccugcccccaggacu

SEQ ID NO: 2587636 - RNA, 14 nt, Human
cccugcccccagga

SEQ ID NO: 2587637 - RNA, 18 nt, Human
cccugcccccagccccgg

SEQ ID NO: 2587638 - RNA, 20 nt, Human
cccugcccccacuuccuguu

SEQ ID NO: 2587639 - RNA, 13 nt, Human
cccugcccccagg

SEQ ID NO: 2587640 - RNA, 12 nt, Human
cccugcccccca

SEQ ID NO: 2587641 - RNA, 23 nt, Human
cccugcccccaggacugggccac

SEQ ID NO: 2587642 - RNA, 14 nt, Human
cccugccccccagc

SEQ ID NO: 2587643 - RNA, 20 nt, Human
cccugccccccagcccuccu

SEQ ID NO: 2587644 - RNA, 15 nt, Human
cccugccccccagcc

SEQ ID NO: 2587645 - RNA, 22 nt, Human
cccugcccaccuggccucugca

SEQ ID NO: 2587646 - RNA, 14 nt, Human
cccugagcugaggg

SEQ ID NO: 2587647 - RNA, 14 nt, Human
cccugaggagccag

SEQ ID NO: 2587648 - RNA, 18 nt, Human
cccugcccccacuuccug

SEQ ID NO: 2587649 - RNA, 17 nt, Human
cccugcccccacuuccu

SEQ ID NO: 2587650 - RNA, 16 nt, Human
cccugcccccacuucc

SEQ ID NO: 2587651 - RNA, 14 nt, Human
cccugcccccacca

SEQ ID NO: 2587652 - RNA, 20 nt, Human
cccugcccccaaauaagaag

SEQ ID NO: 2587653 - RNA, 20 nt, Human
cccugccccagcccaagucc

SEQ ID NO: 2587654 - RNA, 19 nt, Human
cccugccccagcccaaguc

SEQ ID NO: 2587655 - RNA, 17 nt, Human
cccugccccagcccaag

SEQ ID NO: 2587656 - RNA, 12 nt, Human
cccugcccaugu

SEQ ID NO: 2587657 - RNA, 15 nt, Human
cccugccccagccca

SEQ ID NO: 2587658 - RNA, 13 nt, Human
cccugccccagcc

SEQ ID NO: 2587659 - RNA, 16 nt, Human
cccugccccagcaaga

SEQ ID NO: 2587660 - RNA, 21 nt, Human
cccugccccccagccucuggc

SEQ ID NO: 2587661 - RNA, 19 nt, Human
cccugccccccagccucug

SEQ ID NO: 2587662 - RNA, 16 nt, Human
cccugccccccagccu

SEQ ID NO: 2587663 - RNA, 17 nt, Human
cccugccccucccuuca

SEQ ID NO: 2587664 - RNA, 15 nt, Human
cccugccccgucacc

SEQ ID NO: 2587665 - RNA, 23 nt, Human
cccugccccucccuucaaccauu

SEQ ID NO: 2587666 - RNA, 21 nt, Human
cccugccccgucaccaucuca

SEQ ID NO: 2587667 - RNA, 12 nt, Human
cccugccccugc

SEQ ID NO: 2587668 - RNA, 19 nt, Human
cccugccccucccuucaac

SEQ ID NO: 2587669 - RNA, 18 nt, Human
cccugccccucccuucaa

SEQ ID NO: 2587670 - RNA, 17 nt, Human
cccugcccggcugcgga

SEQ ID NO: 2587671 - RNA, 14 nt, Human
cccugcccggcugc

SEQ ID NO: 2587672 - RNA, 13 nt, Human
cccugccccugcc

SEQ ID NO: 2587673 - RNA, 17 nt, Human
cccugccccugccccgu

SEQ ID NO: 2587674 - RNA, 18 nt, Human
cccugccccugccccguc

SEQ ID NO: 2587675 - RNA, 19 nt, Human
cccugccccugccccguca

SEQ ID NO: 2587676 - RNA, 14 nt, Human
cccugcccuagcuc

SEQ ID NO: 2587677 - RNA, 16 nt, Human
cccugcccuagcucca

SEQ ID NO: 2587678 - RNA, 10 nt, Human
cccugcccuc

SEQ ID NO: 2587679 - RNA, 17 nt, Human
cccugcccuagcuccac

SEQ ID NO: 2587680 - RNA, 18 nt, Human
cccugcccucaucucucu

SEQ ID NO: 2587681 - RNA, 13 nt, Human
cccugcccucauc

SEQ ID NO: 2587682 - RNA, 14 nt, Human
cccugcccuccccu

SEQ ID NO: 2587683 - RNA, 12 nt, Human
cccugagccccu

SEQ ID NO: 2587684 - RNA, 17 nt, Human
cccugagccccuuccuu

SEQ ID NO: 2587685 - RNA, 15 nt, Human
cccugagccccuucc

SEQ ID NO: 2587686 - RNA, 21 nt, Human
cccugagccccuuccuugcuc

SEQ ID NO: 2587687 - RNA, 12 nt, Human
cccugagcucgg

SEQ ID NO: 2587688 - RNA, 14 nt, Human
cccugagcaggauu

SEQ ID NO: 2587689 - RNA, 21 nt, Human
cccugagcaaugucugugcua

SEQ ID NO: 2587690 - RNA, 20 nt, Human
cccugagcaaugucugugcu

SEQ ID NO: 2587691 - RNA, 18 nt, Human
cccugagcaaugucugug

SEQ ID NO: 2587692 - RNA, 16 nt, Human
cccugagcaaugucug

SEQ ID NO: 2587693 - RNA, 20 nt, Human
cccugcccaccuggccucug

SEQ ID NO: 2587694 - RNA, 16 nt, Human
cccugagcuuucugcu

SEQ ID NO: 2587695 - RNA, 16 nt, Human
cccugagcugaggcag

SEQ ID NO: 2587696 - RNA, 17 nt, Human
cccugagcugaggcagc

SEQ ID NO: 2587697 - RNA, 19 nt, Human
cccugagcugaggcagcag

SEQ ID NO: 2587698 - RNA, 21 nt, Human
cccugagcugaggcagcagug

SEQ ID NO: 2587699 - RNA, 13 nt, Human
cccugagcugagg

SEQ ID NO: 2587700 - RNA, 14 nt, Human
cccugagcugaggc

SEQ ID NO: 2587701 - RNA, 22 nt, Human
cccugagcucgguggacccagg

SEQ ID NO: 2587702 - RNA, 14 nt, Human
cccugacuggugcu

SEQ ID NO: 2587703 - RNA, 17 nt, Human
cccugagacaaauggag

SEQ ID NO: 2587704 - RNA, 16 nt, Human
cccugagacaaaugga

SEQ ID NO: 2587705 - RNA, 18 nt, Human
cccugagaucucugcagg

SEQ ID NO: 2587706 - RNA, 23 nt, Human
cccugagacaaauggaggccugu

SEQ ID NO: 2587707 - RNA, 20 nt, Human
cccugagacaaauggaggcc

SEQ ID NO: 2587708 - RNA, 19 nt, Human
cccugacucauucugaagg

SEQ ID NO: 2587709 - RNA, 21 nt, Human
cccugacucauucugaaggag

SEQ ID NO: 2587710 - RNA, 15 nt, Human
cccugacucauucug

SEQ ID NO: 2587711 - RNA, 20 nt, Human
cccugaccugugagcccagc

SEQ ID NO: 2587712 - RNA, 13 nt, Human
cccugacugggag

SEQ ID NO: 2587713 - RNA, 18 nt, Human
cccugacucucugugacc

SEQ ID NO: 2587714 - RNA, 13 nt, Human
cccugacucucug

SEQ ID NO: 2587715 - RNA, 17 nt, Human
cccugacucucugugac

SEQ ID NO: 2587716 - RNA, 20 nt, Human
cccugaccucccagcccuau

SEQ ID NO: 2587717 - RNA, 19 nt, Human
cccugaccucccagcccua

SEQ ID NO: 2587718 - RNA, 18 nt, Human
cccugaccucccagcccu

SEQ ID NO: 2587719 - RNA, 17 nt, Human
cccugaccucccagccc

SEQ ID NO: 2587720 - RNA, 16 nt, Human
cccugaccucccagcc

SEQ ID NO: 2587721 - RNA, 15 nt, Human
cccugaccucccagc

SEQ ID NO: 2587722 - RNA, 14 nt, Human
cccugaccucccag

SEQ ID NO: 2587723 - RNA, 11 nt, Human
cccugaccucc

SEQ ID NO: 2587724 - RNA, 16 nt, Human
cccugaccugugagcc

SEQ ID NO: 2587725 - RNA, 22 nt, Human
cccugaccucccagcccuaugg

SEQ ID NO: 2587726 - RNA, 21 nt, Human
cccugaccucccagcccuaug

SEQ ID NO: 2587727 - RNA, 17 nt, Human
cccugaccucccucuaa

SEQ ID NO: 2587728 - RNA, 12 nt, Human
cccugacccugu

SEQ ID NO: 2587729 - RNA, 19 nt, Human
cccugacccuguggaagca

SEQ ID NO: 2587730 - RNA, 15 nt, Human
cccugacccugugga

SEQ ID NO: 2587731 - RNA, 16 nt, Human
cccugacccuguauau

SEQ ID NO: 2587732 - RNA, 13 nt, Human
ccccggcccuacc

SEQ ID NO: 2587733 - RNA, 18 nt, Human
ccccggccccggccccag

SEQ ID NO: 2587734 - RNA, 13 nt, Human
ccccggcccccug

SEQ ID NO: 2587735 - RNA, 12 nt, Human
ccccggcccccu

SEQ ID NO: 2587736 - RNA, 19 nt, Human
ccccggccccagccagagu

SEQ ID NO: 2587737 - RNA, 18 nt, Human
ccccggccccagccagag

SEQ ID NO: 2587738 - RNA, 17 nt, Human
ccccggccccagccaga

SEQ ID NO: 2587739 - RNA, 16 nt, Human
ccccggccccagccag

SEQ ID NO: 2587740 - RNA, 18 nt, Human
ccccggcccuaccagcgc

SEQ ID NO: 2587741 - RNA, 19 nt, Human
cccuccgcccugccacuca

SEQ ID NO: 2587742 - RNA, 16 nt, Human
cccuccgcccugccac

SEQ ID NO: 2587743 - RNA, 15 nt, Human
cccuccgcccugcca

SEQ ID NO: 2587744 - RNA, 14 nt, Human
cccuccgcccugcc

SEQ ID NO: 2587745 - RNA, 20 nt, Human
cccugacacugcggggcuug

SEQ ID NO: 2587746 - RNA, 20 nt, Human
cccugaaugguuccaugccu

SEQ ID NO: 2587747 - RNA, 23 nt, Human
cccugaaucccccuugccacccc

SEQ ID NO: 2587748 - RNA, 21 nt, Human
cccugaaucccccuugccacc

SEQ ID NO: 2587749 - RNA, 22 nt, Human
cccugacaacacucauugaccu

SEQ ID NO: 2587750 - RNA, 16 nt, Human
cccugacaacacucau

SEQ ID NO: 2587751 - RNA, 22 nt, Human
cccugaaggccccgcccaggcu

SEQ ID NO: 2587752 - RNA, 20 nt, Human
cccugaaggccccgcccagg

SEQ ID NO: 2587753 - RNA, 20 nt, Human
cccugaaucccccuugccac

SEQ ID NO: 2587754 - RNA, 15 nt, Human
cccugaaucccccuu

SEQ ID NO: 2587755 - RNA, 20 nt, Human
cccugaagugagcacagccu

SEQ ID NO: 2587756 - RNA, 23 nt, Human
cccugaaggaacauuccuuaguc

SEQ ID NO: 2587757 - RNA, 17 nt, Human
cccugaaggggccauga

SEQ ID NO: 2587758 - RNA, 14 nt, Human
cccugacaacacuc

SEQ ID NO: 2587759 - RNA, 19 nt, Human
cccugaaggccccgcccag

SEQ ID NO: 2587760 - RNA, 16 nt, Human
cccugaaggccccgcc

SEQ ID NO: 2587761 - RNA, 14 nt, Human
cccugaaggccccg

SEQ ID NO: 2587762 - RNA, 13 nt, Human
cccugaaggcccc

SEQ ID NO: 2587763 - RNA, 12 nt, Human
cccugaaggccc

SEQ ID NO: 2587764 - RNA, 17 nt, Human
cccugaagccagccuuc

SEQ ID NO: 2587765 - RNA, 16 nt, Human
cccugaagccagccuu

SEQ ID NO: 2587766 - RNA, 18 nt, Human
cccugaagccagccuucu

SEQ ID NO: 2587767 - RNA, 14 nt, Human
cccugaaggaacca

SEQ ID NO: 2587768 - RNA, 14 nt, Human
cccugaacaagaau

SEQ ID NO: 2587769 - RNA, 13 nt, Human
cccugaaccaucc

SEQ ID NO: 2587770 - RNA, 15 nt, Human
cccugaagccagccu

SEQ ID NO: 2587771 - RNA, 14 nt, Human
cccugaagccagcc

SEQ ID NO: 2587772 - RNA, 11 nt, Human
cccugaagcca

SEQ ID NO: 2587773 - RNA, 18 nt, Human
cccugaaccaucccugau

SEQ ID NO: 2587774 - RNA, 16 nt, Human
cccuccucucccaucc

SEQ ID NO: 2587775 - RNA, 15 nt, Human
cccuccucucccauc

SEQ ID NO: 2587776 - RNA, 23 nt, Human
cccuccucccuuuuuccuugucc

SEQ ID NO: 2587777 - RNA, 14 nt, Human
cccuccucucccau

SEQ ID NO: 2587778 - RNA, 14 nt, Human
cccuccucucugcc

SEQ ID NO: 2587779 - RNA, 19 nt, Human
cccuccucuagcugugggg

SEQ ID NO: 2587780 - RNA, 13 nt, Human
cccuccucuccca

SEQ ID NO: 2587781 - RNA, 18 nt, Human
cccuccucuagcuguggg

SEQ ID NO: 2587782 - RNA, 20 nt, Human
cccuccuaucaccuccccuc

SEQ ID NO: 2587783 - RNA, 20 nt, Human
cccuccucccuuuuuccuug

SEQ ID NO: 2587784 - RNA, 22 nt, Human
cccucgaggcggaucuuuggac

SEQ ID NO: 2587785 - RNA, 23 nt, Human
cccucgaggcggaucuuuggaca

SEQ ID NO: 2587786 - RNA, 15 nt, Human
cccuccuuuuuaugu

SEQ ID NO: 2587787 - RNA, 15 nt, Human
cccucgaagcgcgcc

SEQ ID NO: 2587788 - RNA, 19 nt, Human
cccucgaagcgcgccacuc

SEQ ID NO: 2587789 - RNA, 21 nt, Human
cccucgaagcgcgccacucgc

SEQ ID NO: 2587790 - RNA, 22 nt, Human
cccuccgccuucacuccggugu

SEQ ID NO: 2587791 - RNA, 13 nt, Human
cccuccgccuuca

SEQ ID NO: 2587792 - RNA, 21 nt, Human
cccuccgccuucacuccggug

SEQ ID NO: 2587793 - RNA, 22 nt, Human
cccuccuaccccucccagcuga

SEQ ID NO: 2587794 - RNA, 21 nt, Human
cccuccuaccccucccagcug

SEQ ID NO: 2587795 - RNA, 20 nt, Human
cccuccuaccccucccagcu

SEQ ID NO: 2587796 - RNA, 18 nt, Human
cccuccuaccccucccag

SEQ ID NO: 2587797 - RNA, 15 nt, Human
cccuccuaccccucc

SEQ ID NO: 2587798 - RNA, 18 nt, Human
cccuccguggcaucaccu

SEQ ID NO: 2587799 - RNA, 23 nt, Human
cccuccguggcaucaccuuaggc

SEQ ID NO: 2587800 - RNA, 16 nt, Human
cccuccuccuggacuc

SEQ ID NO: 2587801 - RNA, 18 nt, Human
cccuccuccuggacuccu

SEQ ID NO: 2587802 - RNA, 11 nt, Human
cccuccuccug

SEQ ID NO: 2587803 - RNA, 18 nt, Human
cccuccuacccugcgccc

SEQ ID NO: 2587804 - RNA, 17 nt, Human
cccuccuacccugcgcc

SEQ ID NO: 2587805 - RNA, 19 nt, Human
cccucgggcccaccuggcc

SEQ ID NO: 2587806 - RNA, 18 nt, Human
cccucgggcccaccuggc

SEQ ID NO: 2587807 - RNA, 16 nt, Human
cccucgggcccaccug

SEQ ID NO: 2587808 - RNA, 15 nt, Human
cccucgggcccaccu

SEQ ID NO: 2587809 - RNA, 17 nt, Human
cccucgcugcuucugug

SEQ ID NO: 2587810 - RNA, 14 nt, Human
cccucgggcccacc

SEQ ID NO: 2587811 - RNA, 14 nt, Human
cccucgggcccagc

SEQ ID NO: 2587812 - RNA, 13 nt, Human
cccucgggcccag

SEQ ID NO: 2587813 - RNA, 21 nt, Human
cccucgggcccaccuggccac

SEQ ID NO: 2587814 - RNA, 20 nt, Human
cccucgggcccaccuggcca

SEQ ID NO: 2587815 - RNA, 19 nt, Human
cccucgggcccagccccca

SEQ ID NO: 2587816 - RNA, 15 nt, Human
cccucgggcccagcc

SEQ ID NO: 2587817 - RNA, 22 nt, Human
cccucgggcccagcccccacag

SEQ ID NO: 2587818 - RNA, 17 nt, Human
cccucgggcgagucacu

SEQ ID NO: 2587819 - RNA, 18 nt, Human
cccucgggucuccucacu

SEQ ID NO: 2587820 - RNA, 21 nt, Human
cccucgggucuccucacuccc

SEQ ID NO: 2587821 - RNA, 19 nt, Human
cccucgggucuccucacuc

SEQ ID NO: 2587822 - RNA, 18 nt, Human
cccugaaagcccugagcu

SEQ ID NO: 2587823 - RNA, 15 nt, Human
cccucgcugcuucug

SEQ ID NO: 2587824 - RNA, 14 nt, Human
cccucgcugcuucu

SEQ ID NO: 2587825 - RNA, 14 nt, Human
cccucgcugccagc

SEQ ID NO: 2587826 - RNA, 13 nt, Human
cccucgcccccgc

SEQ ID NO: 2587827 - RNA, 17 nt, Human
cccuccucucccauccc

SEQ ID NO: 2587828 - RNA, 22 nt, Human
cccucgaagcgcgccacucgcu

SEQ ID NO: 2587829 - RNA, 13 nt, Human
cccucggagaaga

SEQ ID NO: 2587830 - RNA, 23 nt, Human
cccucgcuuggacggcugggcac

SEQ ID NO: 2587831 - RNA, 21 nt, Human
cccucgcuuggacggcugggc

SEQ ID NO: 2587832 - RNA, 11 nt, Human
ccacucugugc

SEQ ID NO: 2587833 - RNA, 22 nt, Human
ccacucugugccugaccuugag

SEQ ID NO: 2587834 - RNA, 14 nt, Human
ccacugaagcuggg

SEQ ID NO: 2587835 - RNA, 15 nt, Human
ccacugaagcuggga

SEQ ID NO: 2587836 - RNA, 16 nt, Human
ccacugaagcugggau

SEQ ID NO: 2587837 - RNA, 21 nt, Human
ccacugaaguagugugcaguu

SEQ ID NO: 2587838 - RNA, 15 nt, Human
ccacugacagccucc

SEQ ID NO: 2587839 - RNA, 16 nt, Human
ccacugacagccuccc

SEQ ID NO: 2587840 - RNA, 17 nt, Human
ccacugacagccuccca

SEQ ID NO: 2587841 - RNA, 19 nt, Human
ccacugacagccucccacc

SEQ ID NO: 2587842 - RNA, 18 nt, Human
ccacugcaccccgucuca

SEQ ID NO: 2587843 - RNA, 23 nt, Human
ccacugcacccccuccugcugca

SEQ ID NO: 2587844 - RNA, 22 nt, Human
ccacugcacccccuccugcugc

SEQ ID NO: 2587845 - RNA, 21 nt, Human
ccacugcacccccuccugcug

SEQ ID NO: 2587846 - RNA, 20 nt, Human
ccacugcacccccuccugcu

SEQ ID NO: 2587847 - RNA, 19 nt, Human
ccacugcacccccuccugc

SEQ ID NO: 2587848 - RNA, 18 nt, Human
ccacugcacccccuccug

SEQ ID NO: 2587849 - RNA, 17 nt, Human
ccacugcacccccuccu

SEQ ID NO: 2587850 - RNA, 14 nt, Human
ccacugcacccccu

SEQ ID NO: 2587851 - RNA, 13 nt, Human
ccacugcaccccc

SEQ ID NO: 2587852 - RNA, 11 nt, Human
ccacugcaccc

SEQ ID NO: 2587853 - RNA, 23 nt, Human
ccacugcacagagcucuccagcu

SEQ ID NO: 2587854 - RNA, 20 nt, Human
ccacugcacagagcucucca

SEQ ID NO: 2587855 - RNA, 16 nt, Human
ccacugcacagagcuc

SEQ ID NO: 2587856 - RNA, 14 nt, Human
ccacugcacagagc

SEQ ID NO: 2587857 - RNA, 18 nt, Human
ccacugcacacaccucag

SEQ ID NO: 2587858 - RNA, 13 nt, Human
ccacugaccagaa

SEQ ID NO: 2587859 - RNA, 11 nt, Human
ccacugagcuc

SEQ ID NO: 2587860 - RNA, 22 nt, Human
ccacugauagaugucuauucuu

SEQ ID NO: 2587861 - RNA, 13 nt, Human
ccacugagggcag

SEQ ID NO: 2587862 - RNA, 13 nt, Human
ccacugcacacac

SEQ ID NO: 2587863 - RNA, 12 nt, Human
ccacugagcucc

SEQ ID NO: 2587864 - RNA, 19 nt, Human
ccacugcaccgggccacag

SEQ ID NO: 2587865 - RNA, 17 nt, Human
ccacugcaccgggccac

SEQ ID NO: 2587866 - RNA, 14 nt, Human
ccacugcaccgggc

SEQ ID NO: 2587867 - RNA, 13 nt, Human
ccacugcaccggg

SEQ ID NO: 2587868 - RNA, 20 nt, Human
ccacugcacuauagccuagg

SEQ ID NO: 2587869 - RNA, 19 nt, Human
ccacugcacuauagccuag

SEQ ID NO: 2587870 - RNA, 14 nt, Human
ccacuucccaggua

SEQ ID NO: 2587871 - RNA, 23 nt, Human
ccacuucauucuugaaagcugug

SEQ ID NO: 2587872 - RNA, 21 nt, Human
ccacuucauucuugaaagcug

SEQ ID NO: 2587873 - RNA, 14 nt, Human
ccacugcacuccag

SEQ ID NO: 2587874 - RNA, 17 nt, Human
ccacugcacuccagccu

SEQ ID NO: 2587875 - RNA, 12 nt, Human
ccacuuggucug

SEQ ID NO: 2587876 - RNA, 17 nt, Human
ccacuuggccaagcagg

SEQ ID NO: 2587877 - RNA, 18 nt, Human
ccacuuggcaucagcugg

SEQ ID NO: 2587878 - RNA, 21 nt, Human
ccacuuggcuacacagggaug

SEQ ID NO: 2587879 - RNA, 16 nt, Human
ccacuugggucuuccc

SEQ ID NO: 2587880 - RNA, 12 nt, Human
ccacuuggccaa

SEQ ID NO: 2587881 - RNA, 21 nt, Human
ccacuuggaggccuuucaucc

SEQ ID NO: 2587882 - RNA, 22 nt, Human
ccacuugccucuuccuugaaga

SEQ ID NO: 2587883 - RNA, 19 nt, Human
ccacuugccucuuccuuga

SEQ ID NO: 2587884 - RNA, 17 nt, Human
ccacuugccucuuccuu

SEQ ID NO: 2587885 - RNA, 16 nt, Human
ccacuugccucuuccu

SEQ ID NO: 2587886 - RNA, 13 nt, Human
ccacuugccucuu

SEQ ID NO: 2587887 - RNA, 12 nt, Human
ccacuugccucu

SEQ ID NO: 2587888 - RNA, 14 nt, Human
ccacuucccugggc

SEQ ID NO: 2587889 - RNA, 19 nt, Human
ccacuuccccuccuacccc

SEQ ID NO: 2587890 - RNA, 14 nt, Human
ccacuuccccuccu

SEQ ID NO: 2587891 - RNA, 13 nt, Human
ccacuuccccucc

SEQ ID NO: 2587892 - RNA, 23 nt, Human
ccacuucccagguaagcaggagg

SEQ ID NO: 2587893 - RNA, 15 nt, Human
ccacuucccugacac

SEQ ID NO: 2587894 - RNA, 12 nt, Human
ccacuucccuca

SEQ ID NO: 2587895 - RNA, 17 nt, Human
ccacuucccugacacug

SEQ ID NO: 2587896 - RNA, 15 nt, Human
ccacuucuggguggg

SEQ ID NO: 2587897 - RNA, 19 nt, Human
ccacuucuuguuccccacu

SEQ ID NO: 2587898 - RNA, 20 nt, Human
ccacuucuuguuccccacug

SEQ ID NO: 2587899 - RNA, 16 nt, Human
ccacuucuuuuauaac

SEQ ID NO: 2587900 - RNA, 20 nt, Human
ccacuuggucugugagaugc

SEQ ID NO: 2587901 - RNA, 22 nt, Human
ccacuuggucugugagaugcua

SEQ ID NO: 2587902 - RNA, 20 nt, Human
ccacuugucccacuaucugg

SEQ ID NO: 2587903 - RNA, 21 nt, Human
ccacuuguccgcuggguggua

SEQ ID NO: 2587904 - RNA, 15 nt, Human
ccacuuguccgcugg

SEQ ID NO: 2587905 - RNA, 17 nt, Human
ccacuugggucuucccu

SEQ ID NO: 2587906 - RNA, 19 nt, Human
ccacuugucccacuaucug

SEQ ID NO: 2587907 - RNA, 15 nt, Human
ccacuuggucuguga

SEQ ID NO: 2587908 - RNA, 16 nt, Human
ccacuuggucugugag

SEQ ID NO: 2587909 - RNA, 17 nt, Human
ccacuuggucugugaga

SEQ ID NO: 2587910 - RNA, 19 nt, Human
ccacuuggucugugagaug

SEQ ID NO: 2587911 - RNA, 13 nt, Human
ccacuuucuagcc

SEQ ID NO: 2587912 - RNA, 19 nt, Human
ccacuuucuagccagagga

SEQ ID NO: 2587913 - RNA, 18 nt, Human
ccacuuucuagccagagg

SEQ ID NO: 2587914 - RNA, 20 nt, Human
ccacuuucuagccagaggag

SEQ ID NO: 2587915 - RNA, 20 nt, Human
ccacuuugcacagcucuccg

SEQ ID NO: 2587916 - RNA, 22 nt, Human
ccacuuuguuucguggggaggu

SEQ ID NO: 2587917 - RNA, 16 nt, Human
ccacuuuuauucauuu

SEQ ID NO: 2587918 - RNA, 14 nt, Human
ccacuuuguuggaa

SEQ ID NO: 2587919 - RNA, 20 nt, Human
ccacuuuguucuuuaggaga

SEQ ID NO: 2587920 - RNA, 15 nt, Human
ccacuuuguucuuua

SEQ ID NO: 2587921 - RNA, 17 nt, Human
ccacuuuggccuccguu

SEQ ID NO: 2587922 - RNA, 21 nt, Human
ccacuuuggucccgugcagcu

SEQ ID NO: 2587923 - RNA, 18 nt, Human
ccacuuuggucccgugca

SEQ ID NO: 2587924 - RNA, 21 nt, Human
ccacuuugguacauggccagu

SEQ ID NO: 2587925 - RNA, 14 nt, Human
ccacuuuuguucuu

SEQ ID NO: 2587926 - RNA, 15 nt, Human
ccacuuuuguucuug

SEQ ID NO: 2587927 - RNA, 21 nt, Human
ccacuuuuguucuugguuugu

SEQ ID NO: 2587928 - RNA, 22 nt, Human
ccacuuuuguucuugguuugua

SEQ ID NO: 2587929 - RNA, 15 nt, Human
ccagaccugauccug

SEQ ID NO: 2587930 - RNA, 16 nt, Human
ccagaccugauccugg

SEQ ID NO: 2587931 - RNA, 17 nt, Human
ccagaccugauccugga

SEQ ID NO: 2587932 - RNA, 18 nt, Human
ccagaccugauccuggag

SEQ ID NO: 2587933 - RNA, 19 nt, Human
ccagaccugauccuggagg

SEQ ID NO: 2587934 - RNA, 20 nt, Human
ccagaccugauccuggaggc

SEQ ID NO: 2587935 - RNA, 21 nt, Human
ccagaccugauccuggaggcc

SEQ ID NO: 2587936 - RNA, 23 nt, Human
ccagaccugauccuggaggccca

SEQ ID NO: 2587937 - RNA, 13 nt, Human
ccagaccugagcu

SEQ ID NO: 2587938 - RNA, 15 nt, Human
ccagaccugagcucc

SEQ ID NO: 2587939 - RNA, 16 nt, Human
ccagacccggcugcgu

SEQ ID NO: 2587940 - RNA, 17 nt, Human
ccagacccggcugcgug

SEQ ID NO: 2587941 - RNA, 13 nt, Human
ccagacgaugucu

SEQ ID NO: 2587942 - RNA, 20 nt, Human
ccagacgaugucuucauacc

SEQ ID NO: 2587943 - RNA, 19 nt, Human
ccagaccuuguucacacuc

SEQ ID NO: 2587944 - RNA, 15 nt, Human
ccagaccuucuagga

SEQ ID NO: 2587945 - RNA, 14 nt, Human
ccagaccuuuuauc

SEQ ID NO: 2587946 - RNA, 18 nt, Human
ccagaccuuugaggauau

SEQ ID NO: 2587947 - RNA, 23 nt, Human
ccagacgcacgugggucuucagg

SEQ ID NO: 2587948 - RNA, 18 nt, Human
ccagacgcacgugggucu

SEQ ID NO: 2587949 - RNA, 21 nt, Human
ccagaccugccucuucccccu

SEQ ID NO: 2587950 - RNA, 20 nt, Human
ccagaccuguuagcagacag

SEQ ID NO: 2587951 - RNA, 21 nt, Human
ccagaccuguuagcagacagg

SEQ ID NO: 2587952 - RNA, 23 nt, Human
ccagaccuguuagcagacaggcc

SEQ ID NO: 2587953 - RNA, 14 nt, Human
ccagaccugccucu

SEQ ID NO: 2587954 - RNA, 24 nt, Human
ccagaccugauccuggaggcccag

SEQ ID NO: 2587955 - RNA, 14 nt, Human
ccagacuccaccaa

SEQ ID NO: 2587956 - RNA, 18 nt, Human
ccagacuccaccaagccu

SEQ ID NO: 2587957 - RNA, 17 nt, Human
ccagacguaggggaggg

SEQ ID NO: 2587958 - RNA, 20 nt, Human
ccagacgguucaccagccuc

SEQ ID NO: 2587959 - RNA, 16 nt, Human
ccagacgguucaccag

SEQ ID NO: 2587960 - RNA, 16 nt, Human
ccagacggcacccacc

SEQ ID NO: 2587961 - RNA, 17 nt, Human
ccagacgguucaccagc

SEQ ID NO: 2587962 - RNA, 18 nt, Human
ccagacgguucaccagcc

SEQ ID NO: 2587963 - RNA, 19 nt, Human
ccagacgguucaccagccu

SEQ ID NO: 2587964 - RNA, 15 nt, Human
ccagacggcacccac

SEQ ID NO: 2587965 - RNA, 18 nt, Human
ccagagacacaagccuuc

SEQ ID NO: 2587966 - RNA, 16 nt, Human
ccagagacacaagccu

SEQ ID NO: 2587967 - RNA, 17 nt, Human
ccagagacauacuugaa

SEQ ID NO: 2587968 - RNA, 18 nt, Human
ccagagacauacuugaag

SEQ ID NO: 2587969 - RNA, 13 nt, Human
ccagagacaggaa

SEQ ID NO: 2587970 - RNA, 14 nt, Human
ccagagacaggaaa

SEQ ID NO: 2587971 - RNA, 15 nt, Human
ccagagacaggaaaa

SEQ ID NO: 2587972 - RNA, 20 nt, Human
ccagagaagugacagggaag

SEQ ID NO: 2587973 - RNA, 19 nt, Human
ccagagaagugacagggaa

SEQ ID NO: 2587974 - RNA, 18 nt, Human
ccagagaagugacaggga

SEQ ID NO: 2587975 - RNA, 17 nt, Human
ccagagaagugacaggg

SEQ ID NO: 2587976 - RNA, 16 nt, Human
ccagagaauucuuaga

SEQ ID NO: 2587977 - RNA, 22 nt, Human
ccagagaagugacagggaagcu

SEQ ID NO: 2587978 - RNA, 12 nt, Human
ccagagacagga

SEQ ID NO: 2587979 - RNA, 14 nt, Human
ccagagagagaagu

SEQ ID NO: 2587980 - RNA, 18 nt, Human
ccagagagagaagugccc

SEQ ID NO: 2587981 - RNA, 19 nt, Human
ccagagagagaagugcccc

SEQ ID NO: 2587982 - RNA, 20 nt, Human
ccagagagagaagugccccu

SEQ ID NO: 2587983 - RNA, 15 nt, Human
ccagagacucagagg

SEQ ID NO: 2587984 - RNA, 19 nt, Human
ccagagacggaagccuuuu

SEQ ID NO: 2587985 - RNA, 21 nt, Human
ccagagaccguccucaccccu

SEQ ID NO: 2587986 - RNA, 19 nt, Human
ccagagaccguccucaccc

SEQ ID NO: 2587987 - RNA, 18 nt, Human
ccagagaccguccucacc

SEQ ID NO: 2587988 - RNA, 20 nt, Human
ccagagacauacuugaaggg

SEQ ID NO: 2587989 - RNA, 22 nt, Human
ccagagacauacuugaagggcc

SEQ ID NO: 2587990 - RNA, 23 nt, Human
ccagagacauacuugaagggcca

SEQ ID NO: 2587991 - RNA, 23 nt, Human
ccagagacaggaaaauccucugg

SEQ ID NO: 2587992 - RNA, 16 nt, Human
ccagagaagugacagg

SEQ ID NO: 2587993 - RNA, 15 nt, Human
ccagagaagugacag

SEQ ID NO: 2587994 - RNA, 14 nt, Human
ccagagaagugaca

SEQ ID NO: 2587995 - RNA, 20 nt, Human
ccagagaagccccuucccca

SEQ ID NO: 2587996 - RNA, 18 nt, Human
ccagagaagccccuuccc

SEQ ID NO: 2587997 - RNA, 14 nt, Human
ccagagaagccccu

SEQ ID NO: 2587998 - RNA, 12 nt, Human
ccagagaagcua

SEQ ID NO: 2587999 - RNA, 23 nt, Human
ccagagaaaggggagcccacugu

SEQ ID NO: 2588000 - RNA, 23 nt, Human
ccagagaagcaucggagggaauu

SEQ ID NO: 2588001 - RNA, 20 nt, Human
ccagacuuuacaugacacag

SEQ ID NO: 2588002 - RNA, 21 nt, Human
ccagacuuuacaugacacagc

SEQ ID NO: 2588003 - RNA, 19 nt, Human
ccagagaaaggggagccca

SEQ ID NO: 2588004 - RNA, 20 nt, Human
ccagagaaaggggagcccac

SEQ ID NO: 2588005 - RNA, 16 nt, Human
ccagagaaaggggagc

SEQ ID NO: 2588006 - RNA, 22 nt, Human
ccagacuuuacaugacacagcu

SEQ ID NO: 2588007 - RNA, 15 nt, Human
ccagacuguuagaaa

SEQ ID NO: 2588008 - RNA, 17 nt, Human
ccagacuguguauucau

SEQ ID NO: 2588009 - RNA, 13 nt, Human
ccagacuguguau

SEQ ID NO: 2588010 - RNA, 18 nt, Human
ccagacuguggagaaaua

SEQ ID NO: 2588011 - RNA, 15 nt, Human
ccagacuuccuugag

SEQ ID NO: 2588012 - RNA, 13 nt, Human
ccagacuuccuug

SEQ ID NO: 2588013 - RNA, 14 nt, Human
ccagacuuccuuga

SEQ ID NO: 2588014 - RNA, 16 nt, Human
ccagacuguggagaaa

SEQ ID NO: 2588015 - RNA, 13 nt, Human
ccagacuguggag

SEQ ID NO: 2588016 - RNA, 12 nt, Human
ccagacugugga

SEQ ID NO: 2588017 - RNA, 22 nt, Human
ccagacugcuuccaauuuucug

SEQ ID NO: 2588018 - RNA, 14 nt, Human
ccagacucucugug

SEQ ID NO: 2588019 - RNA, 22 nt, Human
ccagaggugggcaggugguggc

SEQ ID NO: 2588020 - RNA, 18 nt, Human
ccagaggugggcaggugg

SEQ ID NO: 2588021 - RNA, 17 nt, Human
ccagaggugggcaggug

SEQ ID NO: 2588022 - RNA, 16 nt, Human
ccagaggugggcaggu

SEQ ID NO: 2588023 - RNA, 15 nt, Human
ccagaggugggcagg

SEQ ID NO: 2588024 - RNA, 14 nt, Human
ccagaggugggcag

SEQ ID NO: 2588025 - RNA, 22 nt, Human
ccagagguaacagaacagcuuc

SEQ ID NO: 2588026 - RNA, 21 nt, Human
ccagaguugcugggagcugaa

SEQ ID NO: 2588027 - RNA, 15 nt, Human
ccagaguugcuggga

SEQ ID NO: 2588028 - RNA, 12 nt, Human
ccagaguugcug

SEQ ID NO: 2588029 - RNA, 11 nt, Human
ccagaguugcu

SEQ ID NO: 2588030 - RNA, 17 nt, Human
ccagaguuccugcggag

SEQ ID NO: 2588031 - RNA, 13 nt, Human
ccagaguuccugc

SEQ ID NO: 2588032 - RNA, 19 nt, Human
ccagaggugggcagguggu

SEQ ID NO: 2588033 - RNA, 23 nt, Human
ccagagguaacagaacagcuuca

SEQ ID NO: 2588034 - RNA, 21 nt, Human
ccagagguaacagaacagcuu

SEQ ID NO: 2588035 - RNA, 19 nt, Human
ccagagguaacagaacagc

SEQ ID NO: 2588036 - RNA, 18 nt, Human
ccagagguaacagaacag

SEQ ID NO: 2588037 - RNA, 17 nt, Human
ccagagguaacagaaca

SEQ ID NO: 2588038 - RNA, 16 nt, Human
ccagagggugggcuuc

SEQ ID NO: 2588039 - RNA, 23 nt, Human
ccagagggguggguuccucuucc

SEQ ID NO: 2588040 - RNA, 13 nt, Human
ccagagagggugg

SEQ ID NO: 2588041 - RNA, 23 nt, Human
ccagagagggacugacacccaug

SEQ ID NO: 2588042 - RNA, 19 nt, Human
ccagagagggacugacacc

SEQ ID NO: 2588043 - RNA, 16 nt, Human
ccagagaggaaucaga

SEQ ID NO: 2588044 - RNA, 21 nt, Human
ccagagagccuggugcugcug

SEQ ID NO: 2588045 - RNA, 22 nt, Human
ccagagagccuggugcugcugc

SEQ ID NO: 2588046 - RNA, 21 nt, Human
ccagagagcaacucugagauc

SEQ ID NO: 2588047 - RNA, 20 nt, Human
ccagagagcaacucugagau

SEQ ID NO: 2588048 - RNA, 21 nt, Human
ccagagagagaagugccccug

SEQ ID NO: 2588049 - RNA, 22 nt, Human
ccagagagagaagugccccugc

SEQ ID NO: 2588050 - RNA, 18 nt, Human
ccagagagcaacucugag

SEQ ID NO: 2588051 - RNA, 23 nt, Human
ccagagagagaagugccccugcu

SEQ ID NO: 2588052 - RNA, 21 nt, Human
ccagaucaccagcccggccug

SEQ ID NO: 2588053 - RNA, 18 nt, Human
ccagaucaccagcccggc

SEQ ID NO: 2588054 - RNA, 22 nt, Human
ccagaucggaucuguugcaaac

SEQ ID NO: 2588055 - RNA, 19 nt, Human
ccagaucggaucuguugca

SEQ ID NO: 2588056 - RNA, 13 nt, Human
ccagaucuggucc

SEQ ID NO: 2588057 - RNA, 19 nt, Human
ccagauaaaauuauagaug

SEQ ID NO: 2588058 - RNA, 20 nt, Human
ccagaguuuuuauguagcag

SEQ ID NO: 2588059 - RNA, 22 nt, Human
ccagauaaaauuauagauggga

SEQ ID NO: 2588060 - RNA, 14 nt, Human
ccagauaagaaugc

SEQ ID NO: 2588061 - RNA, 21 nt, Human
ccagauacacccaaaguauca

SEQ ID NO: 2588062 - RNA, 16 nt, Human
ccagauaccagccccu

SEQ ID NO: 2588063 - RNA, 13 nt, Human
ccagauaccagcc

SEQ ID NO: 2588064 - RNA, 21 nt, Human
ccagauacuucccauuuugga

SEQ ID NO: 2588065 - RNA, 20 nt, Human
ccagauaccagccccuguau

SEQ ID NO: 2588066 - RNA, 19 nt, Human
ccagauauucaagucaccu

SEQ ID NO: 2588067 - RNA, 19 nt, Human
ccagaugaugggggagggg

SEQ ID NO: 2588068 - RNA, 14 nt, Human
ccagaugcaccagc

SEQ ID NO: 2588069 - RNA, 13 nt, Human
ccagaugcaccag

SEQ ID NO: 2588070 - RNA, 19 nt, Human
ccagaugaggcuggccaag

SEQ ID NO: 2588071 - RNA, 19 nt, Human
ccagaucuggucccuugca

SEQ ID NO: 2588072 - RNA, 17 nt, Human
ccagccccuucugaccc

SEQ ID NO: 2588073 - RNA, 16 nt, Human
ccagccccuucugacc

SEQ ID NO: 2588074 - RNA, 15 nt, Human
ccagccccuucugac

SEQ ID NO: 2588075 - RNA, 18 nt, Human
ccagccccuggaugcagc

SEQ ID NO: 2588076 - RNA, 14 nt, Human
ccagcgcccgcugg

SEQ ID NO: 2588077 - RNA, 17 nt, Human
ccagccccggcccuggg

SEQ ID NO: 2588078 - RNA, 16 nt, Human
ccagcgaggaggcucc

SEQ ID NO: 2588079 - RNA, 18 nt, Human
ccagccccuucugaccca

SEQ ID NO: 2588080 - RNA, 21 nt, Human
ccagcgagcccugguggcagu

SEQ ID NO: 2588081 - RNA, 15 nt, Human
ccagccccuggaugc

SEQ ID NO: 2588082 - RNA, 14 nt, Human
ccagccccuggaug

SEQ ID NO: 2588083 - RNA, 23 nt, Human
ccagcccccuuugggcccaggga

SEQ ID NO: 2588084 - RNA, 22 nt, Human
ccagcccccuuugggcccaggg

SEQ ID NO: 2588085 - RNA, 21 nt, Human
ccagcccccuuugggcccagg

SEQ ID NO: 2588086 - RNA, 20 nt, Human
ccagcccccuuugggcccag

SEQ ID NO: 2588087 - RNA, 13 nt, Human
ccagccccuggau

SEQ ID NO: 2588088 - RNA, 15 nt, Human
ccagcccccuuuggg

SEQ ID NO: 2588089 - RNA, 21 nt, Human
ccagcccccacagugcugucu

SEQ ID NO: 2588090 - RNA, 18 nt, Human
ccagcccccacagugcug

SEQ ID NO: 2588091 - RNA, 16 nt, Human
ccagcccccacagugc

SEQ ID NO: 2588092 - RNA, 13 nt, Human
ccagcccccacag

SEQ ID NO: 2588093 - RNA, 23 nt, Human
ccagccccauccucuguacagag

SEQ ID NO: 2588094 - RNA, 13 nt, Human
ccagcagccugga

SEQ ID NO: 2588095 - RNA, 16 nt, Human
ccagcagaaaugccuu

SEQ ID NO: 2588096 - RNA, 17 nt, Human
ccagcagaaaugccuua

SEQ ID NO: 2588097 - RNA, 22 nt, Human
ccagcagaaaugccuuacccuc

SEQ ID NO: 2588098 - RNA, 21 nt, Human
ccagcagcccuaaggaucucu

SEQ ID NO: 2588099 - RNA, 12 nt, Human
ccagcagcccua

SEQ ID NO: 2588100 - RNA, 21 nt, Human
ccagcagccagcucucagcca

SEQ ID NO: 2588101 - RNA, 12 nt, Human
ccagcagaaaug

SEQ ID NO: 2588102 - RNA, 11 nt, Human
ccagcagccug

SEQ ID NO: 2588103 - RNA, 12 nt, Human
ccagcagccugg

SEQ ID NO: 2588104 - RNA, 19 nt, Human
ccaggaaaggcuccaggag

SEQ ID NO: 2588105 - RNA, 18 nt, Human
ccaggaaaggcuccagga

SEQ ID NO: 2588106 - RNA, 23 nt, Human
ccagcuuguggagccccacacug

SEQ ID NO: 2588107 - RNA, 22 nt, Human
ccagcuuguggagccccacacu

SEQ ID NO: 2588108 - RNA, 19 nt, Human
ccagcuuguggagccccac

SEQ ID NO: 2588109 - RNA, 18 nt, Human
ccagcuuguggagcccca

SEQ ID NO: 2588110 - RNA, 17 nt, Human
ccagcuuguggagcccc

SEQ ID NO: 2588111 - RNA, 17 nt, Human
ccaggaaaggcuccagg

SEQ ID NO: 2588112 - RNA, 20 nt, Human
ccaggaaaggcuccaggagc

SEQ ID NO: 2588113 - RNA, 16 nt, Human
ccagcuuguuauuuau

SEQ ID NO: 2588114 - RNA, 15 nt, Human
ccagcuuguuauuua

SEQ ID NO: 2588115 - RNA, 17 nt, Human
ccagcuuguuauuuaua

SEQ ID NO: 2588116 - RNA, 23 nt, Human
ccagcuugggcccagcugggcuc

SEQ ID NO: 2588117 - RNA, 24 nt, Human
ccagcuugggcccagcugggcucu

SEQ ID NO: 2588118 - RNA, 22 nt, Human
ccagcuugggcccagcugggcu

SEQ ID NO: 2588119 - RNA, 21 nt, Human
ccagcuugggcccagcugggc

SEQ ID NO: 2588120 - RNA, 19 nt, Human
ccagcuugggcccagcugg

SEQ ID NO: 2588121 - RNA, 18 nt, Human
ccagcuugggcccagcug

SEQ ID NO: 2588122 - RNA, 22 nt, Human
ccagcgucccagucucuggcag

SEQ ID NO: 2588123 - RNA, 14 nt, Human
ccagcuugcucuuc

SEQ ID NO: 2588124 - RNA, 16 nt, Human
ccagcuugcucuucag

SEQ ID NO: 2588125 - RNA, 23 nt, Human
ccagcuugcucuucagugggaga

SEQ ID NO: 2588126 - RNA, 17 nt, Human
ccagcguccuccucugu

SEQ ID NO: 2588127 - RNA, 20 nt, Human
ccagcuugaaaccuucacuu

SEQ ID NO: 2588128 - RNA, 21 nt, Human
ccagcgucccagucucuggca

SEQ ID NO: 2588129 - RNA, 15 nt, Human
ccagcgucccagucu

SEQ ID NO: 2588130 - RNA, 13 nt, Human
ccagcguccuccu

SEQ ID NO: 2588131 - RNA, 22 nt, Human
ccagcgcccgcugggcugagcc

SEQ ID NO: 2588132 - RNA, 19 nt, Human
ccagcgcccgcugggcuga

SEQ ID NO: 2588133 - RNA, 18 nt, Human
ccagcgcccgcugggcug

SEQ ID NO: 2588134 - RNA, 17 nt, Human
ccagcgcccgcugggcu

SEQ ID NO: 2588135 - RNA, 16 nt, Human
ccagcgcccgcugggc

SEQ ID NO: 2588136 - RNA, 22 nt, Human
ccagcgccuaguggggucuccc

SEQ ID NO: 2588137 - RNA, 15 nt, Human
ccagcggccccuccc

SEQ ID NO: 2588138 - RNA, 14 nt, Human
ccagcggccccucc

SEQ ID NO: 2588139 - RNA, 13 nt, Human
ccagcggcugagu

SEQ ID NO: 2588140 - RNA, 17 nt, Human
ccagcgggaauggcagc

SEQ ID NO: 2588141 - RNA, 23 nt, Human
ccagcgggaauggcagcugccac

SEQ ID NO: 2588142 - RNA, 13 nt, Human
ccagcggccccuc

SEQ ID NO: 2588143 - RNA, 17 nt, Human
ccaggaguuugaggcug

SEQ ID NO: 2588144 - RNA, 20 nt, Human
ccaggaguuugaggcugcag

SEQ ID NO: 2588145 - RNA, 21 nt, Human
ccaggaguuugaggcugcagc

SEQ ID NO: 2588146 - RNA, 22 nt, Human
ccaggaguuugaggcugcagcg

SEQ ID NO: 2588147 - RNA, 17 nt, Human
ccaggaguuugagacca

SEQ ID NO: 2588148 - RNA, 18 nt, Human
ccaggaguuugagaccag

SEQ ID NO: 2588149 - RNA, 22 nt, Human
ccaggcagggguggggguggag

SEQ ID NO: 2588150 - RNA, 21 nt, Human
ccaggcaggggugggggugga

SEQ ID NO: 2588151 - RNA, 15 nt, Human
ccaggcagggguggg

SEQ ID NO: 2588152 - RNA, 21 nt, Human
ccaggcaggcuaaggcgugga

SEQ ID NO: 2588153 - RNA, 18 nt, Human
ccaggcagguagccaggg

SEQ ID NO: 2588154 - RNA, 14 nt, Human
ccaggcagguagcc

SEQ ID NO: 2588155 - RNA, 13 nt, Human
ccaggcucugugc

SEQ ID NO: 2588156 - RNA, 22 nt, Human
ccaggcucuuuggggucagcca

SEQ ID NO: 2588157 - RNA, 23 nt, Human
ccaggcucugugcugacccuccu

SEQ ID NO: 2588158 - RNA, 22 nt, Human
ccaggcucugugcugacccucc

SEQ ID NO: 2588159 - RNA, 20 nt, Human
ccaggcucugugcugacccu

SEQ ID NO: 2588160 - RNA, 19 nt, Human
ccaggcucugugcugaccc

SEQ ID NO: 2588161 - RNA, 15 nt, Human
ccaggcucugugcug

SEQ ID NO: 2588162 - RNA, 14 nt, Human
ccaggcucugugcu

SEQ ID NO: 2588163 - RNA, 13 nt, Human
ccaggcugaagca

SEQ ID NO: 2588164 - RNA, 20 nt, Human
ccaggcugaagcagguuccc

SEQ ID NO: 2588165 - RNA, 15 nt, Human
ccaggcugaccacag

SEQ ID NO: 2588166 - RNA, 16 nt, Human
ccaggcugaccacagc

SEQ ID NO: 2588167 - RNA, 17 nt, Human
ccaggcugaccacagca

SEQ ID NO: 2588168 - RNA, 18 nt, Human
ccaggcugaccacagcac

SEQ ID NO: 2588169 - RNA, 19 nt, Human
ccaggcugaccacagcaca

SEQ ID NO: 2588170 - RNA, 20 nt, Human
ccaggcugaccacagcacag

SEQ ID NO: 2588171 - RNA, 23 nt, Human
ccaggcagaucugugccccaugc

SEQ ID NO: 2588172 - RNA, 20 nt, Human
ccaggcagaucugugcccca

SEQ ID NO: 2588173 - RNA, 21 nt, Human
ccaggcagaucugugccccau

SEQ ID NO: 2588174 - RNA, 18 nt, Human
ccaggcaggcuaaggcgu

SEQ ID NO: 2588175 - RNA, 20 nt, Human
ccaggcaggcuaaggcgugg

SEQ ID NO: 2588176 - RNA, 14 nt, Human
ccaggcaggcugug

SEQ ID NO: 2588177 - RNA, 23 nt, Human
ccaggcagggccaacccuucucc

SEQ ID NO: 2588178 - RNA, 19 nt, Human
ccaggcagggccaacccuu

SEQ ID NO: 2588179 - RNA, 15 nt, Human
ccaguaugagcccua

SEQ ID NO: 2588180 - RNA, 20 nt, Human
ccaggggccccuccagcuug

SEQ ID NO: 2588181 - RNA, 19 nt, Human
ccaggggccccuccagcuu

SEQ ID NO: 2588182 - RNA, 18 nt, Human
ccaggggccccuccagcu

SEQ ID NO: 2588183 - RNA, 16 nt, Human
ccagucaccccggcca

SEQ ID NO: 2588184 - RNA, 22 nt, Human
ccaguaucuugaagacuuuucu

SEQ ID NO: 2588185 - RNA, 19 nt, Human
ccaguaucuugaagacuuu

SEQ ID NO: 2588186 - RNA, 13 nt, Human
ccaguaucuugaa

SEQ ID NO: 2588187 - RNA, 22 nt, Human
ccaggggugggacacccuguga

SEQ ID NO: 2588188 - RNA, 21 nt, Human
ccaggggugggacacccugug

SEQ ID NO: 2588189 - RNA, 20 nt, Human
ccaggggugggacacccugu

SEQ ID NO: 2588190 - RNA, 21 nt, Human
ccaggcugaccacagcacagc

SEQ ID NO: 2588191 - RNA, 23 nt, Human
ccaggcugaccacagcacagcca

SEQ ID NO: 2588192 - RNA, 13 nt, Human
ccaggcugagccu

SEQ ID NO: 2588193 - RNA, 14 nt, Human
ccaggcugagccuc

SEQ ID NO: 2588194 - RNA, 16 nt, Human
ccaggcugagccucag

SEQ ID NO: 2588195 - RNA, 17 nt, Human
ccaggcugagccucagu

SEQ ID NO: 2588196 - RNA, 19 nt, Human
ccaggcugagccucagucu

SEQ ID NO: 2588197 - RNA, 22 nt, Human
ccaggcugagccucagucuccc

SEQ ID NO: 2588198 - RNA, 13 nt, Human
ccaggcugccaag

SEQ ID NO: 2588199 - RNA, 18 nt, Human
ccaggggaugaguggagg

SEQ ID NO: 2588200 - RNA, 17 nt, Human
ccaggggccccuccagc

SEQ ID NO: 2588201 - RNA, 14 nt, Human
ccaggggccccucc

SEQ ID NO: 2588202 - RNA, 12 nt, Human
ccaggggccccu

SEQ ID NO: 2588203 - RNA, 19 nt, Human
ccaggggcccacagggaac

SEQ ID NO: 2588204 - RNA, 18 nt, Human
ccaggggcccacagggaa

SEQ ID NO: 2588205 - RNA, 22 nt, Human
ccaggggcccaaggcggccccu

SEQ ID NO: 2588206 - RNA, 19 nt, Human
ccaggggcccaaggcggcc

SEQ ID NO: 2588207 - RNA, 23 nt, Human
ccaggggcauguauuggccugga

SEQ ID NO: 2588208 - RNA, 22 nt, Human
ccaggggcauguauuggccugg

SEQ ID NO: 2588209 - RNA, 21 nt, Human
ccaggggcauguauuggccug

SEQ ID NO: 2588210 - RNA, 19 nt, Human
ccaggggcaggcacagcac

SEQ ID NO: 2588211 - RNA, 18 nt, Human
ccaggggcaggcacagca

SEQ ID NO: 2588212 - RNA, 15 nt, Human
ccaggggccaugaau

SEQ ID NO: 2588213 - RNA, 17 nt, Human
ccaggggcaggcacagc

SEQ ID NO: 2588214 - RNA, 16 nt, Human
ccaggggcaggcacag

SEQ ID NO: 2588215 - RNA, 15 nt, Human
ccaggggcaggcaca

SEQ ID NO: 2588216 - RNA, 23 nt, Human
ccaggcucuuuggggucagccag

SEQ ID NO: 2588217 - RNA, 16 nt, Human
ccaggggaugggaggu

SEQ ID NO: 2588218 - RNA, 18 nt, Human
ccagucaccccggccacc

SEQ ID NO: 2588219 - RNA, 17 nt, Human
ccagucaccccggccac

SEQ ID NO: 2588220 - RNA, 19 nt, Human
ccagucaccccggccaccu

SEQ ID NO: 2588221 - RNA, 12 nt, Human
ccaguauucuug

SEQ ID NO: 2588222 - RNA, 22 nt, Human
ccaguauucuagguagugcccu

SEQ ID NO: 2588223 - RNA, 14 nt, Human
ccaguccugccugg

SEQ ID NO: 2588224 - RNA, 15 nt, Human
ccaguccugccuggc

SEQ ID NO: 2588225 - RNA, 16 nt, Human
ccaguccugccuggcc

SEQ ID NO: 2588226 - RNA, 17 nt, Human
ccaguccugccuggcca

SEQ ID NO: 2588227 - RNA, 20 nt, Human
ccaguccuggccuggcuucu

SEQ ID NO: 2588228 - RNA, 15 nt, Human
ccaguccuggccugg

SEQ ID NO: 2588229 - RNA, 13 nt, Human
ccaguccuggccu

SEQ ID NO: 2588230 - RNA, 14 nt, Human
ccaguauucuuguc

SEQ ID NO: 2588231 - RNA, 12 nt, Human
ccaguccuggcc

SEQ ID NO: 2588232 - RNA, 18 nt, Human
ccaguccugccuggccag

SEQ ID NO: 2588233 - RNA, 19 nt, Human
ccaguccugccuggccagg

SEQ ID NO: 2588234 - RNA, 21 nt, Human
ccaguccugccuggccaggca

SEQ ID NO: 2588235 - RNA, 22 nt, Human
ccaguccugccuggccaggcag

SEQ ID NO: 2588236 - RNA, 18 nt, Human
ccagucgcgcugccugug

SEQ ID NO: 2588237 - RNA, 17 nt, Human
ccagucgcgcugccugu

SEQ ID NO: 2588238 - RNA, 16 nt, Human
ccagucgcgcugccug

SEQ ID NO: 2588239 - RNA, 15 nt, Human
ccagucgcgcugccu

SEQ ID NO: 2588240 - RNA, 14 nt, Human
ccagucgcgcugcc

SEQ ID NO: 2588241 - RNA, 18 nt, Human
ccagucgauaucucacuu

SEQ ID NO: 2588242 - RNA, 17 nt, Human
ccaguccuuccaccucg

SEQ ID NO: 2588243 - RNA, 13 nt, Human
ccaguccuuccac

SEQ ID NO: 2588244 - RNA, 14 nt, Human
ccaugguacccccu

SEQ ID NO: 2588245 - RNA, 23 nt, Human
ccaugggguaggaggaugggcuc

SEQ ID NO: 2588246 - RNA, 18 nt, Human
ccaugguacccccuucug

SEQ ID NO: 2588247 - RNA, 16 nt, Human
ccaugguacccccuuc

SEQ ID NO: 2588248 - RNA, 15 nt, Human
ccaugguacccccuu

SEQ ID NO: 2588249 - RNA, 18 nt, Human
ccauggggagggauucug

SEQ ID NO: 2588250 - RNA, 12 nt, Human
ccauggggaggg

SEQ ID NO: 2588251 - RNA, 20 nt, Human
ccauggggagggauucuggu

SEQ ID NO: 2588252 - RNA, 13 nt, Human
ccaugggggcagg

SEQ ID NO: 2588253 - RNA, 14 nt, Human
ccaugggggcaggg

SEQ ID NO: 2588254 - RNA, 11 nt, Human
ccauggggaag

SEQ ID NO: 2588255 - RNA, 21 nt, Human
ccaugggcuucacuguauaaa

SEQ ID NO: 2588256 - RNA, 20 nt, Human
ccaugggcuucacuguauaa

SEQ ID NO: 2588257 - RNA, 19 nt, Human
ccaugggcuucacuguaua

SEQ ID NO: 2588258 - RNA, 16 nt, Human
ccaugggcuucacugu

SEQ ID NO: 2588259 - RNA, 13 nt, Human
ccaugggcuucac

SEQ ID NO: 2588260 - RNA, 13 nt, Human
ccaugggcucuga

SEQ ID NO: 2588261 - RNA, 17 nt, Human
ccaugggcagagcccaa

SEQ ID NO: 2588262 - RNA, 17 nt, Human
ccaugggccuccugugu

SEQ ID NO: 2588263 - RNA, 18 nt, Human
ccaugucgcgcucagcau

SEQ ID NO: 2588264 - RNA, 19 nt, Human
ccaugguacccccuucugg

SEQ ID NO: 2588265 - RNA, 19 nt, Human
ccaugucgccucugcauuc

SEQ ID NO: 2588266 - RNA, 14 nt, Human
ccaugucucgacuc

SEQ ID NO: 2588267 - RNA, 15 nt, Human
ccaugucucgacuca

SEQ ID NO: 2588268 - RNA, 14 nt, Human
ccaugucggccucu

SEQ ID NO: 2588269 - RNA, 13 nt, Human
ccaugucggccuc

SEQ ID NO: 2588270 - RNA, 15 nt, Human
ccaugucggccucua

SEQ ID NO: 2588271 - RNA, 16 nt, Human
ccaugucucucagaau

SEQ ID NO: 2588272 - RNA, 20 nt, Human
ccaugucucugagcauuaga

SEQ ID NO: 2588273 - RNA, 13 nt, Human
ccaugucugcauu

SEQ ID NO: 2588274 - RNA, 17 nt, Human
ccaugucugccccauca

SEQ ID NO: 2588275 - RNA, 16 nt, Human
ccaugaccuuacauuu

SEQ ID NO: 2588276 - RNA, 21 nt, Human
ccaugagaagagggccugugg

SEQ ID NO: 2588277 - RNA, 19 nt, Human
ccaugagaagagggccugu

SEQ ID NO: 2588278 - RNA, 18 nt, Human
ccaugagaagagggccug

SEQ ID NO: 2588279 - RNA, 17 nt, Human
ccaugagaagagggccu

SEQ ID NO: 2588280 - RNA, 13 nt, Human
ccaugagaagagg

SEQ ID NO: 2588281 - RNA, 18 nt, Human
ccaugacuugagaaacaa

SEQ ID NO: 2588282 - RNA, 22 nt, Human
ccaugagaauaagagaaagaaa

SEQ ID NO: 2588283 - RNA, 23 nt, Human
ccaugagaugauacauccaaagc

SEQ ID NO: 2588284 - RNA, 18 nt, Human
ccaugaggaacaaggcaa

SEQ ID NO: 2588285 - RNA, 17 nt, Human
ccaugaggaacaaggca

SEQ ID NO: 2588286 - RNA, 16 nt, Human
ccaugaggaacaaggc

SEQ ID NO: 2588287 - RNA, 13 nt, Human
ccaugagccucag

SEQ ID NO: 2588288 - RNA, 18 nt, Human
ccaugggcacugugggua

SEQ ID NO: 2588289 - RNA, 22 nt, Human
ccaugggcacugcuggguggcc

SEQ ID NO: 2588290 - RNA, 20 nt, Human
ccaugggcacugcugggugg

SEQ ID NO: 2588291 - RNA, 17 nt, Human
ccaugggcacugcuggg

SEQ ID NO: 2588292 - RNA, 16 nt, Human
ccaugggcacugcugg

SEQ ID NO: 2588293 - RNA, 14 nt, Human
ccaugggcagagcc

SEQ ID NO: 2588294 - RNA, 16 nt, Human
ccaugggcagagccca

SEQ ID NO: 2588295 - RNA, 22 nt, Human
ccaugagcaccccaaggcugcg

SEQ ID NO: 2588296 - RNA, 21 nt, Human
ccaugagcaccccaaggcugc

SEQ ID NO: 2588297 - RNA, 15 nt, Human
ccaugggcacugcug

SEQ ID NO: 2588298 - RNA, 14 nt, Human
ccaugggcacugcu

SEQ ID NO: 2588299 - RNA, 15 nt, Human
cccacuguccugggc

SEQ ID NO: 2588300 - RNA, 16 nt, Human
cccacuguccugggcc

SEQ ID NO: 2588301 - RNA, 22 nt, Human
cccacuguccugggccugcaga

SEQ ID NO: 2588302 - RNA, 16 nt, Human
cccacuguccugggcg

SEQ ID NO: 2588303 - RNA, 14 nt, Human
cccacuguccuggg

SEQ ID NO: 2588304 - RNA, 13 nt, Human
cccacuguccugg

SEQ ID NO: 2588305 - RNA, 23 nt, Human
cccacuguacuugcucuugaugc

SEQ ID NO: 2588306 - RNA, 19 nt, Human
cccacuguacuugcucuug

SEQ ID NO: 2588307 - RNA, 18 nt, Human
cccacuguacuugcucuu

SEQ ID NO: 2588308 - RNA, 18 nt, Human
cccaccgcagacaggacc

SEQ ID NO: 2588309 - RNA, 15 nt, Human
cccaccgcagacagg

SEQ ID NO: 2588310 - RNA, 15 nt, Human
cccacccugggcucu

SEQ ID NO: 2588311 - RNA, 18 nt, Human
cccacccuggugggccaa

SEQ ID NO: 2588312 - RNA, 14 nt, Human
cccacccugggccc

SEQ ID NO: 2588313 - RNA, 13 nt, Human
cccacccugggcc

SEQ ID NO: 2588314 - RNA, 21 nt, Human
cccaccccggggacccuguga

SEQ ID NO: 2588315 - RNA, 20 nt, Human
cccaccccggggacccugug

SEQ ID NO: 2588316 - RNA, 14 nt, Human
cccacccugggacc

SEQ ID NO: 2588317 - RNA, 13 nt, Human
ccauugguguuga

SEQ ID NO: 2588318 - RNA, 20 nt, Human
ccauuguggcuccuaucugu

SEQ ID NO: 2588319 - RNA, 20 nt, Human
ccauugucuuguucugugau

SEQ ID NO: 2588320 - RNA, 22 nt, Human
ccauuguggucacaggaaguag

SEQ ID NO: 2588321 - RNA, 23 nt, Human
ccauuguaacuuggauguagcca

SEQ ID NO: 2588322 - RNA, 19 nt, Human
ccauuguccaauccuaugu

SEQ ID NO: 2588323 - RNA, 15 nt, Human
ccauugucccucugc

SEQ ID NO: 2588324 - RNA, 17 nt, Human
ccauugucccucugccc

SEQ ID NO: 2588325 - RNA, 19 nt, Human
ccauugucccucugcccca

SEQ ID NO: 2588326 - RNA, 15 nt, Human
ccauugucuuguucu

SEQ ID NO: 2588327 - RNA, 22 nt, Human
ccauugucccucugccccaucc

SEQ ID NO: 2588328 - RNA, 10 nt, Human
ccauugucuu

SEQ ID NO: 2588329 - RNA, 17 nt, Human
ccauugucuuguucugu

SEQ ID NO: 2588330 - RNA, 16 nt, Human
ccauugucuuguucug

SEQ ID NO: 2588331 - RNA, 14 nt, Human
cccaaccugcugaa

SEQ ID NO: 2588332 - RNA, 23 nt, Human
cccaaccugcucuccucuugcca

SEQ ID NO: 2588333 - RNA, 20 nt, Human
cccaacucuccccugaccug

SEQ ID NO: 2588334 - RNA, 15 nt, Human
cccaacucuccccug

SEQ ID NO: 2588335 - RNA, 13 nt, Human
cccaacugucuuu

SEQ ID NO: 2588336 - RNA, 15 nt, Human
cccaacugucuuuuu

SEQ ID NO: 2588337 - RNA, 12 nt, Human
cccaacuguuau

SEQ ID NO: 2588338 - RNA, 15 nt, Human
cccaacucuccugga

SEQ ID NO: 2588339 - RNA, 12 nt, Human
cccaacucuccu

SEQ ID NO: 2588340 - RNA, 11 nt, Human
cccaacugucu

SEQ ID NO: 2588341 - RNA, 21 nt, Human
cccaaccugcucuccucuugc

SEQ ID NO: 2588342 - RNA, 14 nt, Human
cccaaccugcucuc

SEQ ID NO: 2588343 - RNA, 13 nt, Human
cccaaccugcucu

SEQ ID NO: 2588344 - RNA, 13 nt, Human
ccauuuaaagcuu

SEQ ID NO: 2588345 - RNA, 15 nt, Human
ccauuguuugaaaca

SEQ ID NO: 2588346 - RNA, 12 nt, Human
ccauugugugag

SEQ ID NO: 2588347 - RNA, 21 nt, Human
ccauuguuugaaacaaagaag

SEQ ID NO: 2588348 - RNA, 22 nt, Human
ccauuguuugaaacaaagaagg

SEQ ID NO: 2588349 - RNA, 22 nt, Human
cccacccaagcuuggcagccga

SEQ ID NO: 2588350 - RNA, 18 nt, Human
cccacccaagcuuggcag

SEQ ID NO: 2588351 - RNA, 16 nt, Human
cccacccaagcuuggc

SEQ ID NO: 2588352 - RNA, 13 nt, Human
cccacccccucaa

SEQ ID NO: 2588353 - RNA, 17 nt, Human
cccacccccugcccugc

SEQ ID NO: 2588354 - RNA, 16 nt, Human
cccacccccugcccug

SEQ ID NO: 2588355 - RNA, 15 nt, Human
cccacccccugcccu

SEQ ID NO: 2588356 - RNA, 14 nt, Human
cccacccccugccc

SEQ ID NO: 2588357 - RNA, 15 nt, Human
cccacccccucaagc

SEQ ID NO: 2588358 - RNA, 17 nt, Human
cccacccccuccccagg

SEQ ID NO: 2588359 - RNA, 13 nt, Human
cccacccccugcc

SEQ ID NO: 2588360 - RNA, 19 nt, Human
cccacccccuccccagggg

SEQ ID NO: 2588361 - RNA, 19 nt, Human
cccacccccugcccugcac

SEQ ID NO: 2588362 - RNA, 18 nt, Human
cccacccccugcccugca

SEQ ID NO: 2588363 - RNA, 19 nt, Human
cccacccccuucagugccc

SEQ ID NO: 2588364 - RNA, 23 nt, Human
cccacccccuucagugcccacca

SEQ ID NO: 2588365 - RNA, 16 nt, Human
cccacccccuucucug

SEQ ID NO: 2588366 - RNA, 19 nt, Human
cccacccccuucucugcuc

SEQ ID NO: 2588367 - RNA, 18 nt, Human
cccaccccggggacccug

SEQ ID NO: 2588368 - RNA, 17 nt, Human
cccaccccggggacccu

SEQ ID NO: 2588369 - RNA, 14 nt, Human
cccaccccggggac

SEQ ID NO: 2588370 - RNA, 13 nt, Human
cccaccccgggga

SEQ ID NO: 2588371 - RNA, 16 nt, Human
cccaccccgcucugca

SEQ ID NO: 2588372 - RNA, 15 nt, Human
cccaccccgcucugc

SEQ ID NO: 2588373 - RNA, 22 nt, Human
cccacccccuucucugcuccac

SEQ ID NO: 2588374 - RNA, 18 nt, Human
cccaccaucaugucuggc

SEQ ID NO: 2588375 - RNA, 22 nt, Human
cccaagcuuggcagccgagcuc

SEQ ID NO: 2588376 - RNA, 20 nt, Human
cccaagcuuggcagccgagc

SEQ ID NO: 2588377 - RNA, 18 nt, Human
cccaagcuuggcagccga

SEQ ID NO: 2588378 - RNA, 14 nt, Human
cccaagcuuggcag

SEQ ID NO: 2588379 - RNA, 14 nt, Human
cccaaggaaagccc

SEQ ID NO: 2588380 - RNA, 19 nt, Human
cccaaggaaagccccagca

SEQ ID NO: 2588381 - RNA, 15 nt, Human
cccacccaagggccu

SEQ ID NO: 2588382 - RNA, 15 nt, Human
cccacccaagcuugg

SEQ ID NO: 2588383 - RNA, 18 nt, Human
cccaccaugucugcccca

SEQ ID NO: 2588384 - RNA, 12 nt, Human
cccaagcucaga

SEQ ID NO: 2588385 - RNA, 17 nt, Human
cccaagcucugcuccuc

SEQ ID NO: 2588386 - RNA, 22 nt, Human
cccaagcugggccccagcccac

SEQ ID NO: 2588387 - RNA, 21 nt, Human
cccaagcugggccccagccca

SEQ ID NO: 2588388 - RNA, 18 nt, Human
cccaagcugggccccagc

SEQ ID NO: 2588389 - RNA, 14 nt, Human
cccaagcugggccc

SEQ ID NO: 2588390 - RNA, 19 nt, Human
cccaagcuguuuucuucua

SEQ ID NO: 2588391 - RNA, 14 nt, Human
cccaagcuuagaac

SEQ ID NO: 2588392 - RNA, 13 nt, Human
cccaagcugggcc

SEQ ID NO: 2588393 - RNA, 17 nt, Human
cccaagcucuuguggua

SEQ ID NO: 2588394 - RNA, 16 nt, Human
cccaagccuggcaagg

SEQ ID NO: 2588395 - RNA, 23 nt, Human
cccaagcccgacuugcuguuuug

SEQ ID NO: 2588396 - RNA, 18 nt, Human
cccaagcccgacuugcug

SEQ ID NO: 2588397 - RNA, 20 nt, Human
cccaagcccccuccuugucu

SEQ ID NO: 2588398 - RNA, 16 nt, Human
cccaagccagaggcug

SEQ ID NO: 2588399 - RNA, 23 nt, Human
cccaagccuacuuuugccauuga

SEQ ID NO: 2588400 - RNA, 21 nt, Human
cccaagaauagaugcugacug

SEQ ID NO: 2588401 - RNA, 20 nt, Human
cccaagaauagaugcugacu

SEQ ID NO: 2588402 - RNA, 15 nt, Human
cccaagccagaggcu

SEQ ID NO: 2588403 - RNA, 14 nt, Human
cccaagccagaggc

SEQ ID NO: 2588404 - RNA, 20 nt, Human
cccaacuuuguggaugucuu

SEQ ID NO: 2588405 - RNA, 19 nt, Human
cccauccucuguacagagc

SEQ ID NO: 2588406 - RNA, 15 nt, Human
cccauccucuguaca

SEQ ID NO: 2588407 - RNA, 19 nt, Human
cccauccccauccuccagc

SEQ ID NO: 2588408 - RNA, 20 nt, Human
cccauccucuguacagagcc

SEQ ID NO: 2588409 - RNA, 22 nt, Human
cccagggcacuucacagagugu

SEQ ID NO: 2588410 - RNA, 20 nt, Human
cccagggcacuucacagagu

SEQ ID NO: 2588411 - RNA, 18 nt, Human
cccagggcacuucacaga

SEQ ID NO: 2588412 - RNA, 18 nt, Human
cccagggccacucugccu

SEQ ID NO: 2588413 - RNA, 15 nt, Human
cccagggccagggcc

SEQ ID NO: 2588414 - RNA, 17 nt, Human
cccagggccagggcccu

SEQ ID NO: 2588415 - RNA, 14 nt, Human
cccaucaucccagc

SEQ ID NO: 2588416 - RNA, 12 nt, Human
cccaucauccca

SEQ ID NO: 2588417 - RNA, 18 nt, Human
cccagggccagggcccug

SEQ ID NO: 2588418 - RNA, 23 nt, Human
cccagggccacucugccucugcc

SEQ ID NO: 2588419 - RNA, 17 nt, Human
cccaucauacacuuccu

SEQ ID NO: 2588420 - RNA, 15 nt, Human
cccaucauucaugcu

SEQ ID NO: 2588421 - RNA, 12 nt, Human
cccaucauucau

SEQ ID NO: 2588422 - RNA, 20 nt, Human
cccaucauucaugcuacugc

SEQ ID NO: 2588423 - RNA, 13 nt, Human
cccauccaggcag

SEQ ID NO: 2588424 - RNA, 14 nt, Human
cccauccaguucau

SEQ ID NO: 2588425 - RNA, 21 nt, Human
cccauccaguucaugagaauc

SEQ ID NO: 2588426 - RNA, 13 nt, Human
cccauccagggcc

SEQ ID NO: 2588427 - RNA, 20 nt, Human
cccauccagucucccaacuu

SEQ ID NO: 2588428 - RNA, 14 nt, Human
cccauccucuguac

SEQ ID NO: 2588429 - RNA, 14 nt, Human
cccauccaggcagu

SEQ ID NO: 2588430 - RNA, 13 nt, Human
cccaucccacacc

SEQ ID NO: 2588431 - RNA, 15 nt, Human
cccaucccacacccu

SEQ ID NO: 2588432 - RNA, 20 nt, Human
cccaggcuggcgugcagugg

SEQ ID NO: 2588433 - RNA, 19 nt, Human
cccaggcuggcgugcagug

SEQ ID NO: 2588434 - RNA, 21 nt, Human
cccagggagcggaaagcagcu

SEQ ID NO: 2588435 - RNA, 22 nt, Human
cccagggagcggaaagcagcuc

SEQ ID NO: 2588436 - RNA, 20 nt, Human
cccagggagcggaaagcagc

SEQ ID NO: 2588437 - RNA, 17 nt, Human
cccagcugugagccuug

SEQ ID NO: 2588438 - RNA, 16 nt, Human
cccagcugugagccuu

SEQ ID NO: 2588439 - RNA, 15 nt, Human
cccagcugugagccu

SEQ ID NO: 2588440 - RNA, 23 nt, Human
cccagcuggggccaggcuggguc

SEQ ID NO: 2588441 - RNA, 22 nt, Human
cccagcuggggccaggcugggu

SEQ ID NO: 2588442 - RNA, 18 nt, Human
cccaggcuggcgugcagu

SEQ ID NO: 2588443 - RNA, 17 nt, Human
cccagcugggucaggca

SEQ ID NO: 2588444 - RNA, 19 nt, Human
cccagcugggucaggcagg

SEQ ID NO: 2588445 - RNA, 22 nt, Human
cccagcccauucucucuccugu

SEQ ID NO: 2588446 - RNA, 16 nt, Human
cccagcuggugggaag

SEQ ID NO: 2588447 - RNA, 19 nt, Human
cccagcuggugggaagcgu

SEQ ID NO: 2588448 - RNA, 22 nt, Human
cccagcuggugggaagcgucug

SEQ ID NO: 2588449 - RNA, 18 nt, Human
cccagcauuccagccccu

SEQ ID NO: 2588450 - RNA, 16 nt, Human
cccagcaguuugggag

SEQ ID NO: 2588451 - RNA, 19 nt, Human
cccagcagguggggagggg

SEQ ID NO: 2588452 - RNA, 17 nt, Human
cccagcauaugggggcc

SEQ ID NO: 2588453 - RNA, 21 nt, Human
cccagcauccuuuucugcaga

SEQ ID NO: 2588454 - RNA, 20 nt, Human
cccagcauuccagccccucu

SEQ ID NO: 2588455 - RNA, 19 nt, Human
cccagcauuccagccccuc

SEQ ID NO: 2588456 - RNA, 22 nt, Human
cccagcauuccagccccucugg

SEQ ID NO: 2588457 - RNA, 18 nt, Human
cccagcauugcugguucu

SEQ ID NO: 2588458 - RNA, 15 nt, Human
cccagcauugcuggu

SEQ ID NO: 2588459 - RNA, 17 nt, Human
cccagccaaacccuguc

SEQ ID NO: 2588460 - RNA, 19 nt, Human
cccagcccacuucugccau

SEQ ID NO: 2588461 - RNA, 11 nt, Human
cccagcccaga

SEQ ID NO: 2588462 - RNA, 20 nt, Human
cccagcauuuuacugauuca

SEQ ID NO: 2588463 - RNA, 12 nt, Human
cccagccacccc

SEQ ID NO: 2588464 - RNA, 17 nt, Human
cccagcccacuucugcc

SEQ ID NO: 2588465 - RNA, 12 nt, Human
cccagcccagag

SEQ ID NO: 2588466 - RNA, 13 nt, Human
cccagcccagaga

SEQ ID NO: 2588467 - RNA, 14 nt, Human
cccagcccagagac

SEQ ID NO: 2588468 - RNA, 15 nt, Human
cccagcccagagaca

SEQ ID NO: 2588469 - RNA, 13 nt, Human
cccagcccagcug

SEQ ID NO: 2588470 - RNA, 16 nt, Human
cccagcccagcuggug

SEQ ID NO: 2588471 - RNA, 21 nt, Human
cccagccccaaaacucuccuc

SEQ ID NO: 2588472 - RNA, 11 nt, Human
cccagcccagg

SEQ ID NO: 2588473 - RNA, 16 nt, Human
cccagcccagagacau

SEQ ID NO: 2588474 - RNA, 18 nt, Human
cccagcccagggcuccug

SEQ ID NO: 2588475 - RNA, 21 nt, Human
cccagcccaggguucccccag

SEQ ID NO: 2588476 - RNA, 23 nt, Human
cccagccccaaaacucuccucug

SEQ ID NO: 2588477 - RNA, 20 nt, Human
cccagcuggggccaggcugg

SEQ ID NO: 2588478 - RNA, 21 nt, Human
cccagcccauucucucuccug

SEQ ID NO: 2588479 - RNA, 18 nt, Human
cccagcccagcugguggg

SEQ ID NO: 2588480 - RNA, 21 nt, Human
cccauucuuccuaguuuucuc

SEQ ID NO: 2588481 - RNA, 12 nt, Human
cccauucuuccu

SEQ ID NO: 2588482 - RNA, 23 nt, Human
cccauucugccugcccaggcccc

SEQ ID NO: 2588483 - RNA, 15 nt, Human
ccccauuguggucac

SEQ ID NO: 2588484 - RNA, 17 nt, Human
ccccauugccuccuccu

SEQ ID NO: 2588485 - RNA, 15 nt, Human
ccccauucuuuugua

SEQ ID NO: 2588486 - RNA, 14 nt, Human
cccccuuccaugga

SEQ ID NO: 2588487 - RNA, 14 nt, Human
cccccuucagugcc

SEQ ID NO: 2588488 - RNA, 15 nt, Human
cccccuucagugccc

SEQ ID NO: 2588489 - RNA, 23 nt, Human
cccccuucagugcccaccaacau

SEQ ID NO: 2588490 - RNA, 11 nt, Human
cccccuuccac

SEQ ID NO: 2588491 - RNA, 13 nt, Human
cccccuucuccca

SEQ ID NO: 2588492 - RNA, 14 nt, Human
cccccuucucccac

SEQ ID NO: 2588493 - RNA, 15 nt, Human
cccccuucucccaca

SEQ ID NO: 2588494 - RNA, 17 nt, Human
cccccuucucccacacu

SEQ ID NO: 2588495 - RNA, 15 nt, Human
cccccuucucugcuc

SEQ ID NO: 2588496 - RNA, 16 nt, Human
cccccuucucugcucc

SEQ ID NO: 2588497 - RNA, 23 nt, Human
ccccgcagaccuccccagccccu

SEQ ID NO: 2588498 - RNA, 21 nt, Human
ccccgcagaccuccccagccc

SEQ ID NO: 2588499 - RNA, 20 nt, Human
ccccgcagaccuccccagcc

SEQ ID NO: 2588500 - RNA, 17 nt, Human
cccccuucucugcucca

SEQ ID NO: 2588501 - RNA, 22 nt, Human
cccccuucucugcuccaccaca

SEQ ID NO: 2588502 - RNA, 19 nt, Human
ccccgcagaccuccccagc

SEQ ID NO: 2588503 - RNA, 12 nt, Human
ccccgcccaggc

SEQ ID NO: 2588504 - RNA, 17 nt, Human
ccccgcccagcugcacc

SEQ ID NO: 2588505 - RNA, 23 nt, Human
ccccgcccagcugcaccugccag

SEQ ID NO: 2588506 - RNA, 18 nt, Human
ccccggccaccugcggug

SEQ ID NO: 2588507 - RNA, 14 nt, Human
ccccggccaccugc

SEQ ID NO: 2588508 - RNA, 13 nt, Human
ccccggccaccug

SEQ ID NO: 2588509 - RNA, 14 nt, Human
ccccgccuguuccc

SEQ ID NO: 2588510 - RNA, 13 nt, Human
ccccgccccgccc

SEQ ID NO: 2588511 - RNA, 14 nt, Human
ccccgcccaggcuu

SEQ ID NO: 2588512 - RNA, 19 nt, Human
ccccgcccaggcuggccag

SEQ ID NO: 2588513 - RNA, 16 nt, Human
ccccgcccaggcuggc

SEQ ID NO: 2588514 - RNA, 15 nt, Human
ccccgcccaggcugg

SEQ ID NO: 2588515 - RNA, 14 nt, Human
ccccgcccaggcug

SEQ ID NO: 2588516 - RNA, 13 nt, Human
ccccgccccacau

SEQ ID NO: 2588517 - RNA, 16 nt, Human
ccccgccccacauucc

SEQ ID NO: 2588518 - RNA, 17 nt, Human
ccccgccccacauuccg

SEQ ID NO: 2588519 - RNA, 20 nt, Human
ccccgccccacauuccgaca

SEQ ID NO: 2588520 - RNA, 18 nt, Human
ccccgccugcccucaugg

SEQ ID NO: 2588521 - RNA, 16 nt, Human
ccccgccccgccccac

SEQ ID NO: 2588522 - RNA, 21 nt, Human
ccccgcccccugcccuccccu

SEQ ID NO: 2588523 - RNA, 18 nt, Human
ccccgcccccugcccucc

SEQ ID NO: 2588524 - RNA, 17 nt, Human
ccccgcccccugcccuc

SEQ ID NO: 2588525 - RNA, 16 nt, Human
ccccgcccccaguccc

SEQ ID NO: 2588526 - RNA, 12 nt, Human
ccccgcccccag

SEQ ID NO: 2588527 - RNA, 13 nt, Human
ccccgcccccugc

SEQ ID NO: 2588528 - RNA, 12 nt, Human
ccccagccccaa

SEQ ID NO: 2588529 - RNA, 10 nt, Human
ccccagcccc

SEQ ID NO: 2588530 - RNA, 16 nt, Human
ccccagcccaagucca

SEQ ID NO: 2588531 - RNA, 15 nt, Human
ccccagcccaagucc

SEQ ID NO: 2588532 - RNA, 14 nt, Human
ccccagcccaaguc

SEQ ID NO: 2588533 - RNA, 13 nt, Human
ccccagcccaagu

SEQ ID NO: 2588534 - RNA, 23 nt, Human
ccccagccagauggacuccagcc

SEQ ID NO: 2588535 - RNA, 11 nt, Human
ccccagccaga

SEQ ID NO: 2588536 - RNA, 14 nt, Human
ccccagccccaaaa

SEQ ID NO: 2588537 - RNA, 14 nt, Human
ccccagccccaucc

SEQ ID NO: 2588538 - RNA, 21 nt, Human
ccccauucugccugcccaggc

SEQ ID NO: 2588539 - RNA, 21 nt, Human
ccccauucuuccuaguuuucu

SEQ ID NO: 2588540 - RNA, 23 nt, Human
ccccauucuuccuaguuuucucc

SEQ ID NO: 2588541 - RNA, 16 nt, Human
ccccauucuuccuagu

SEQ ID NO: 2588542 - RNA, 12 nt, Human
ccccagcccacc

SEQ ID NO: 2588543 - RNA, 20 nt, Human
ccccaaaacucuccucugcu

SEQ ID NO: 2588544 - RNA, 16 nt, Human
ccccagcacugaggaa

SEQ ID NO: 2588545 - RNA, 23 nt, Human
ccccaaaaccacagcccugucag

SEQ ID NO: 2588546 - RNA, 20 nt, Human
ccccaaaaccacagcccugu

SEQ ID NO: 2588547 - RNA, 22 nt, Human
ccccaaaaccacagcccuguca

SEQ ID NO: 2588548 - RNA, 9 nt, Human
ccccagcca

SEQ ID NO: 2588549 - RNA, 12 nt, Human
ccccagcaggug

SEQ ID NO: 2588550 - RNA, 23 nt, Human
ccccagcaguugaaugacaacag

SEQ ID NO: 2588551 - RNA, 19 nt, Human
ccccagcauuccagccccu

SEQ ID NO: 2588552 - RNA, 18 nt, Human
ccccagcaggugcugacu

SEQ ID NO: 2588553 - RNA, 11 nt, Human
ccccagcaggu

SEQ ID NO: 2588554 - RNA, 18 nt, Human
ccccaaaacucuccucug

SEQ ID NO: 2588555 - RNA, 15 nt, Human
ccccaaaaccacagc

SEQ ID NO: 2588556 - RNA, 16 nt, Human
ccccaaaaccacagcc

SEQ ID NO: 2588557 - RNA, 19 nt, Human
ccccaaaaccacagcccug

SEQ ID NO: 2588558 - RNA, 20 nt, Human
ccccaaaaaccucacccgag

SEQ ID NO: 2588559 - RNA, 17 nt, Human
cccauugccuccuccuu

SEQ ID NO: 2588560 - RNA, 14 nt, Human
cccauugccuccuc

SEQ ID NO: 2588561 - RNA, 14 nt, Human
cccauugcccuggu

SEQ ID NO: 2588562 - RNA, 22 nt, Human
cccauucuuuuguaauuuaaau

SEQ ID NO: 2588563 - RNA, 21 nt, Human
cccauucuuuuguaauuuaaa

SEQ ID NO: 2588564 - RNA, 20 nt, Human
cccauucuuuuguaauuuaa

SEQ ID NO: 2588565 - RNA, 17 nt, Human
cccauucuuuuguaauu

SEQ ID NO: 2588566 - RNA, 20 nt, Human
cccauucuuccuaguuuucu

SEQ ID NO: 2588567 - RNA, 14 nt, Human
cccauucuuuugua

SEQ ID NO: 2588568 - RNA, 16 nt, Human
cgagucucuucuccac

SEQ ID NO: 2588569 - RNA, 16 nt, Human
cgaggguccuggcucc

SEQ ID NO: 2588570 - RNA, 23 nt, Human
cgaggguccuggcuccugagggg

SEQ ID NO: 2588571 - RNA, 18 nt, Human
cgagucucuucuccacug

SEQ ID NO: 2588572 - RNA, 17 nt, Human
cgagucucuucuccacu

SEQ ID NO: 2588573 - RNA, 20 nt, Human
cgaggggcucucagcucagc

SEQ ID NO: 2588574 - RNA, 17 nt, Human
cgaggggcucaggaaaa

SEQ ID NO: 2588575 - RNA, 16 nt, Human
cgaggggcucaggaaa

SEQ ID NO: 2588576 - RNA, 21 nt, Human
cgaggggcgggacccaggcac

SEQ ID NO: 2588577 - RNA, 17 nt, Human
cgaggggcgggacccag

SEQ ID NO: 2588578 - RNA, 19 nt, Human
cgaggggugucuugggcag

SEQ ID NO: 2588579 - RNA, 18 nt, Human
cgaggggugucuugggca

SEQ ID NO: 2588580 - RNA, 14 nt, Human
cgaggguccuggcu

SEQ ID NO: 2588581 - RNA, 15 nt, Human
cgaggguccuggcuc

SEQ ID NO: 2588582 - RNA, 12 nt, Human
cgagggcaggga

SEQ ID NO: 2588583 - RNA, 21 nt, Human
cgagggcagggaccacacccu

SEQ ID NO: 2588584 - RNA, 18 nt, Human
cgaggggaggguggcagg

SEQ ID NO: 2588585 - RNA, 19 nt, Human
cgaggggaggguggcaggu

SEQ ID NO: 2588586 - RNA, 17 nt, Human
cgcagucaggggcagcu

SEQ ID NO: 2588587 - RNA, 13 nt, Human
cgcaggggaaacg

SEQ ID NO: 2588588 - RNA, 16 nt, Human
cgcagggguugcagug

SEQ ID NO: 2588589 - RNA, 15 nt, Human
cgcagucgucgcaca

SEQ ID NO: 2588590 - RNA, 21 nt, Human
cgcaggcuggcccugcccugg

SEQ ID NO: 2588591 - RNA, 22 nt, Human
cgcaggcuggcccugcccuggu

SEQ ID NO: 2588592 - RNA, 14 nt, Human
cgagguagaguuug

SEQ ID NO: 2588593 - RNA, 14 nt, Human
cgagugccaggacu

SEQ ID NO: 2588594 - RNA, 11 nt, Human
cgagugccagg

SEQ ID NO: 2588595 - RNA, 21 nt, Human
cgagucucuucuccacuggau

SEQ ID NO: 2588596 - RNA, 20 nt, Human
cgagucucuucuccacugga

SEQ ID NO: 2588597 - RNA, 22 nt, Human
cgccaagguagccaucccauga

SEQ ID NO: 2588598 - RNA, 21 nt, Human
cgccaagguagccaucccaug

SEQ ID NO: 2588599 - RNA, 23 nt, Human
cgccaaggcugggggaagaagcu

SEQ ID NO: 2588600 - RNA, 17 nt, Human
cgcagugugcacuaagg

SEQ ID NO: 2588601 - RNA, 22 nt, Human
cgcagugugcacuaaggggccc

SEQ ID NO: 2588602 - RNA, 23 nt, Human
cgcagugugcacuaaggggcccg

SEQ ID NO: 2588603 - RNA, 19 nt, Human
cgcagucgucgcacagucu

SEQ ID NO: 2588604 - RNA, 17 nt, Human
cgcagucgucgcacagu

SEQ ID NO: 2588605 - RNA, 16 nt, Human
cgcagucgucgcacag

SEQ ID NO: 2588606 - RNA, 22 nt, Human
cgcagucgucgcacagucucuc

SEQ ID NO: 2588607 - RNA, 21 nt, Human
cgcagucgucgcacagucucu

SEQ ID NO: 2588608 - RNA, 15 nt, Human
cgcagugccucuggu

SEQ ID NO: 2588609 - RNA, 19 nt, Human
cgcagugcuucucuacaga

SEQ ID NO: 2588610 - RNA, 19 nt, Human
ccuuuucccugcuuccagg

SEQ ID NO: 2588611 - RNA, 16 nt, Human
ccuuuucccggggagg

SEQ ID NO: 2588612 - RNA, 21 nt, Human
ccuuuuccauuugaaagaaag

SEQ ID NO: 2588613 - RNA, 18 nt, Human
ccuuuuccauuugaaaga

SEQ ID NO: 2588614 - RNA, 15 nt, Human
ccuuuucccugcuuc

SEQ ID NO: 2588615 - RNA, 14 nt, Human
ccuuuucccugcuu

SEQ ID NO: 2588616 - RNA, 13 nt, Human
ccuuuucccugcu

SEQ ID NO: 2588617 - RNA, 21 nt, Human
ccuuuucccggggaggagaga

SEQ ID NO: 2588618 - RNA, 20 nt, Human
ccuuuucgcaggauucuucc

SEQ ID NO: 2588619 - RNA, 22 nt, Human
ccuuuccuggacacucagaccu

SEQ ID NO: 2588620 - RNA, 16 nt, Human
ccuuuccucaggcaag

SEQ ID NO: 2588621 - RNA, 16 nt, Human
ccuuuccuuccauccc

SEQ ID NO: 2588622 - RNA, 18 nt, Human
ccuuuccuuccaucccua

SEQ ID NO: 2588623 - RNA, 12 nt, Human
ccuuuccuuccu

SEQ ID NO: 2588624 - RNA, 12 nt, Human
ccuuuucccaac

SEQ ID NO: 2588625 - RNA, 21 nt, Human
ccuuuccuuccuucccuggcu

SEQ ID NO: 2588626 - RNA, 13 nt, Human
ccuuuccuguagc

SEQ ID NO: 2588627 - RNA, 13 nt, Human
ccuuuccuuccuu

SEQ ID NO: 2588628 - RNA, 18 nt, Human
cgcuggagugcagugagc

SEQ ID NO: 2588629 - RNA, 17 nt, Human
cgcuggagugcagugag

SEQ ID NO: 2588630 - RNA, 13 nt, Human
cgcugccugugug

SEQ ID NO: 2588631 - RNA, 15 nt, Human
cgcugccugcccaca

SEQ ID NO: 2588632 - RNA, 20 nt, Human
cgcugccgcaccccagagug

SEQ ID NO: 2588633 - RNA, 21 nt, Human
cgcugccgcaccccagagugu

SEQ ID NO: 2588634 - RNA, 17 nt, Human
cgcugccuaaguggcug

SEQ ID NO: 2588635 - RNA, 20 nt, Human
cgcugccuaaguggcugcug

SEQ ID NO: 2588636 - RNA, 20 nt, Human
cgcugcccggcgcccucugu

SEQ ID NO: 2588637 - RNA, 19 nt, Human
cgcugcccggcgcccucug

SEQ ID NO: 2588638 - RNA, 20 nt, Human
cgcugaguggcaggggacag

SEQ ID NO: 2588639 - RNA, 22 nt, Human
cgcugcccggcgcccucugucc

SEQ ID NO: 2588640 - RNA, 21 nt, Human
cgcugcccggcgcccucuguc

SEQ ID NO: 2588641 - RNA, 13 nt, Human
cgcugccgcaccc

SEQ ID NO: 2588642 - RNA, 18 nt, Human
cgcugccgcaccccagag

SEQ ID NO: 2588643 - RNA, 16 nt, Human
cgcuggcccagccggc

SEQ ID NO: 2588644 - RNA, 15 nt, Human
cgcuggcccagccgg

SEQ ID NO: 2588645 - RNA, 14 nt, Human
cgcuggcccagccg

SEQ ID NO: 2588646 - RNA, 13 nt, Human
cgcuggcccagcc

SEQ ID NO: 2588647 - RNA, 12 nt, Human
cgcuggcccagc

SEQ ID NO: 2588648 - RNA, 11 nt, Human
cgcuggcccag

SEQ ID NO: 2588649 - RNA, 10 nt, Human
cgcuggccca

SEQ ID NO: 2588650 - RNA, 18 nt, Human
cgcuggagguggggccug

SEQ ID NO: 2588651 - RNA, 24 nt, Human
cgcuggcccagccggccucucugg

SEQ ID NO: 2588652 - RNA, 23 nt, Human
cgcuggcccagccggccucucug

SEQ ID NO: 2588653 - RNA, 23 nt, Human
cgcucugcaugcggcccagcccg

SEQ ID NO: 2588654 - RNA, 22 nt, Human
cgcucugcaugcggcccagccc

SEQ ID NO: 2588655 - RNA, 21 nt, Human
cgcucugcaugcggcccagcc

SEQ ID NO: 2588656 - RNA, 20 nt, Human
cgcucugcaugcggcccagc

SEQ ID NO: 2588657 - RNA, 19 nt, Human
cgcucugcaugcggcccag

SEQ ID NO: 2588658 - RNA, 12 nt, Human
cgcucugcaugc

SEQ ID NO: 2588659 - RNA, 19 nt, Human
cgccugccuccccugugca

SEQ ID NO: 2588660 - RNA, 20 nt, Human
cgccugcccuccccagagca

SEQ ID NO: 2588661 - RNA, 17 nt, Human
cgccugcccuccccaga

SEQ ID NO: 2588662 - RNA, 13 nt, Human
cgccugcccuccc

SEQ ID NO: 2588663 - RNA, 22 nt, Human
cgccugcccucauggccccucu

SEQ ID NO: 2588664 - RNA, 20 nt, Human
cgccugcccucauggccccu

SEQ ID NO: 2588665 - RNA, 23 nt, Human
cgccugcccgucucucucccaug

SEQ ID NO: 2588666 - RNA, 20 nt, Human
cgccugcccgucucucuccc

SEQ ID NO: 2588667 - RNA, 17 nt, Human
cgccugcccucauggcc

SEQ ID NO: 2588668 - RNA, 15 nt, Human
cgccugccaguccua

SEQ ID NO: 2588669 - RNA, 14 nt, Human
cgccugccaguccu

SEQ ID NO: 2588670 - RNA, 15 nt, Human
cgccugccccuccca

SEQ ID NO: 2588671 - RNA, 16 nt, Human
cgccugccccucccag

SEQ ID NO: 2588672 - RNA, 11 nt, Human
cgccaccauuc

SEQ ID NO: 2588673 - RNA, 23 nt, Human
cgccaccauccugcagccuccuc

SEQ ID NO: 2588674 - RNA, 13 nt, Human
cgccaccauccug

SEQ ID NO: 2588675 - RNA, 16 nt, Human
cgccaccauuccugga

SEQ ID NO: 2588676 - RNA, 15 nt, Human
cgccaccauuccugg

SEQ ID NO: 2588677 - RNA, 17 nt, Human
cgccaccccuccuuccu

SEQ ID NO: 2588678 - RNA, 23 nt, Human
cgccacauggcuuccuccugcgc

SEQ ID NO: 2588679 - RNA, 22 nt, Human
cgccacauggcuuccuccugcg

SEQ ID NO: 2588680 - RNA, 18 nt, Human
cgccacauggcuuccucc

SEQ ID NO: 2588681 - RNA, 17 nt, Human
cgccacauggcuuccuc

SEQ ID NO: 2588682 - RNA, 16 nt, Human
cgccacauggcuuccu

SEQ ID NO: 2588683 - RNA, 15 nt, Human
cgccacauggcuucc

SEQ ID NO: 2588684 - RNA, 22 nt, Human
cgccugcaaacgcugccugccc

SEQ ID NO: 2588685 - RNA, 22 nt, Human
cgccugcaaacgcugccugccg

SEQ ID NO: 2588686 - RNA, 17 nt, Human
cgccugcauguaaacac

SEQ ID NO: 2588687 - RNA, 22 nt, Human
cgccugcauguaaacacgccug

SEQ ID NO: 2588688 - RNA, 20 nt, Human
cgccugcaaacgcugccugc

SEQ ID NO: 2588689 - RNA, 21 nt, Human
cgccugcaaacgcugccugcc

SEQ ID NO: 2588690 - RNA, 20 nt, Human
cgccaccuggcauuccuucu

SEQ ID NO: 2588691 - RNA, 21 nt, Human
cgccaccuggcauuccuucug

SEQ ID NO: 2588692 - RNA, 19 nt, Human
cgccugcaaacgcugccug

SEQ ID NO: 2588693 - RNA, 20 nt, Human
cgcugccccuggcagccccu

SEQ ID NO: 2588694 - RNA, 19 nt, Human
cgcugccccuggcagcccc

SEQ ID NO: 2588695 - RNA, 16 nt, Human
cgcugaguggcagggg

SEQ ID NO: 2588696 - RNA, 14 nt, Human
cgcugaguggcagg

SEQ ID NO: 2588697 - RNA, 17 nt, Human
cgcugaguggacuggag

SEQ ID NO: 2588698 - RNA, 13 nt, Human
cgcugaguggcag

SEQ ID NO: 2588699 - RNA, 15 nt, Human
cgcugaauaaauguc

SEQ ID NO: 2588700 - RNA, 14 nt, Human
cgcugaauaaaugu

SEQ ID NO: 2588701 - RNA, 23 nt, Human
cgcugacaaccaccgcuccccag

SEQ ID NO: 2588702 - RNA, 13 nt, Human
cgcugaauaaaug

SEQ ID NO: 2588703 - RNA, 21 nt, Human
cgcucuuggcagguacucagc

SEQ ID NO: 2588704 - RNA, 22 nt, Human
cgcucuguugcccaggcuggag

SEQ ID NO: 2588705 - RNA, 18 nt, Human
cgcucugcuggccuggcc

SEQ ID NO: 2588706 - RNA, 17 nt, Human
cgcucugcuggccuggc

SEQ ID NO: 2588707 - RNA, 16 nt, Human
cgcucugcuggccugg

SEQ ID NO: 2588708 - RNA, 15 nt, Human
cgcucugcuggccug

SEQ ID NO: 2588709 - RNA, 21 nt, Human
cgcucugcuggccuggccggc

SEQ ID NO: 2588710 - RNA, 20 nt, Human
cgcucugcuggccuggccgg

SEQ ID NO: 2588711 - RNA, 15 nt, Human
cgcucugucacccag

SEQ ID NO: 2588712 - RNA, 20 nt, Human
cgcucugucgcccaggcugg

SEQ ID NO: 2588713 - RNA, 19 nt, Human
cgcucuguugcccaggcug

SEQ ID NO: 2588714 - RNA, 19 nt, Human
cggcgucagccuccagccu

SEQ ID NO: 2588715 - RNA, 18 nt, Human
cggcgucagccuccagcc

SEQ ID NO: 2588716 - RNA, 17 nt, Human
cggcgucagccuccagc

SEQ ID NO: 2588717 - RNA, 16 nt, Human
cggcgucagccuccag

SEQ ID NO: 2588718 - RNA, 15 nt, Human
cggcgucagccucca

SEQ ID NO: 2588719 - RNA, 14 nt, Human
cggcgucagccucc

SEQ ID NO: 2588720 - RNA, 18 nt, Human
cggcuaauuuuuguauuu

SEQ ID NO: 2588721 - RNA, 23 nt, Human
cggcgucagccuccagccucugu

SEQ ID NO: 2588722 - RNA, 20 nt, Human
cggcgucagccuccagccuc

SEQ ID NO: 2588723 - RNA, 15 nt, Human
cggagucguggggug

SEQ ID NO: 2588724 - RNA, 15 nt, Human
cggaggggccuggca

SEQ ID NO: 2588725 - RNA, 23 nt, Human
cggagucccaccuuggcugcagg

SEQ ID NO: 2588726 - RNA, 22 nt, Human
cggagucccaccuuggcugcag

SEQ ID NO: 2588727 - RNA, 21 nt, Human
cggagucccaccuuggcugca

SEQ ID NO: 2588728 - RNA, 17 nt, Human
cggagggauuccccuaa

SEQ ID NO: 2588729 - RNA, 19 nt, Human
cggagggaauugaggucug

SEQ ID NO: 2588730 - RNA, 19 nt, Human
cggaggcuugucagagcug

SEQ ID NO: 2588731 - RNA, 20 nt, Human
cggaggcuugucagagcugg

SEQ ID NO: 2588732 - RNA, 21 nt, Human
cggaggcuugucagagcuggg

SEQ ID NO: 2588733 - RNA, 23 nt, Human
cggaggcuugucagagcugggag

SEQ ID NO: 2588734 - RNA, 22 nt, Human
cggaggcugcccccggcccccu

SEQ ID NO: 2588735 - RNA, 19 nt, Human
cggaggcugcccccggccc

SEQ ID NO: 2588736 - RNA, 16 nt, Human
cggaggcugcccccgg

SEQ ID NO: 2588737 - RNA, 16 nt, Human
cggaggcuugggaccg

SEQ ID NO: 2588738 - RNA, 15 nt, Human
cggaggcuugggacc

SEQ ID NO: 2588739 - RNA, 17 nt, Human
cggaggcuugggaccgc

SEQ ID NO: 2588740 - RNA, 18 nt, Human
cggaggcuugucagagcu

SEQ ID NO: 2588741 - RNA, 17 nt, Human
cggagacggagucccac

SEQ ID NO: 2588742 - RNA, 20 nt, Human
cggagacggagucccaccuu

SEQ ID NO: 2588743 - RNA, 15 nt, Human
cggagacgggaccgg

SEQ ID NO: 2588744 - RNA, 14 nt, Human
cggagacgggaccg

SEQ ID NO: 2588745 - RNA, 21 nt, Human
cggagaguacagugagccaag

SEQ ID NO: 2588746 - RNA, 19 nt, Human
cggagaguacagugagcca

SEQ ID NO: 2588747 - RNA, 18 nt, Human
cggagaguacagugagcc

SEQ ID NO: 2588748 - RNA, 17 nt, Human
cggagaguacagugagc

SEQ ID NO: 2588749 - RNA, 23 nt, Human
cggagagcgccugccccucccag

SEQ ID NO: 2588750 - RNA, 18 nt, Human
cggaggccccaaaggaaa

SEQ ID NO: 2588751 - RNA, 13 nt, Human
cggaggcugcccc

SEQ ID NO: 2588752 - RNA, 15 nt, Human
cggaggccccaaagg

SEQ ID NO: 2588753 - RNA, 13 nt, Human
cgggcccaggcca

SEQ ID NO: 2588754 - RNA, 23 nt, Human
cgggcccagcccccacagugcug

SEQ ID NO: 2588755 - RNA, 18 nt, Human
cgggcccagcccccacag

SEQ ID NO: 2588756 - RNA, 15 nt, Human
cgggcccagccccca

SEQ ID NO: 2588757 - RNA, 12 nt, Human
cgggcccagccc

SEQ ID NO: 2588758 - RNA, 20 nt, Human
cgggcccaccuggccaccug

SEQ ID NO: 2588759 - RNA, 19 nt, Human
cgggcccaccuggccaccu

SEQ ID NO: 2588760 - RNA, 18 nt, Human
cgggcccaccuggccacc

SEQ ID NO: 2588761 - RNA, 17 nt, Human
cgggcccaccuggccac

SEQ ID NO: 2588762 - RNA, 16 nt, Human
cgggcccaccuggcca

SEQ ID NO: 2588763 - RNA, 15 nt, Human
cgggcccaccuggcc

SEQ ID NO: 2588764 - RNA, 13 nt, Human
cgggcccaccugg

SEQ ID NO: 2588765 - RNA, 11 nt, Human
cgggcccaccu

SEQ ID NO: 2588766 - RNA, 17 nt, Human
cgggcccucccuuggaa

SEQ ID NO: 2588767 - RNA, 11 nt, Human
cgggcccuccc

SEQ ID NO: 2588768 - RNA, 22 nt, Human
cgggcccguugaggaugaggcc

SEQ ID NO: 2588769 - RNA, 18 nt, Human
cgggcccguugaggauga

SEQ ID NO: 2588770 - RNA, 21 nt, Human
cgggcccuucccacaggacau

SEQ ID NO: 2588771 - RNA, 15 nt, Human
cgggcccaggccauc

SEQ ID NO: 2588772 - RNA, 23 nt, Human
cgggccccugggcuuggccugcu

SEQ ID NO: 2588773 - RNA, 15 nt, Human
cgggccccugggcuu

SEQ ID NO: 2588774 - RNA, 12 nt, Human
cgggccccucau

SEQ ID NO: 2588775 - RNA, 16 nt, Human
cgggccagccaggcgg

SEQ ID NO: 2588776 - RNA, 15 nt, Human
cgggccagccaggcg

SEQ ID NO: 2588777 - RNA, 14 nt, Human
cgggccagccaggc

SEQ ID NO: 2588778 - RNA, 13 nt, Human
cgggccagccagg

SEQ ID NO: 2588779 - RNA, 21 nt, Human
cgggccagccaggcgggcuca

SEQ ID NO: 2588780 - RNA, 20 nt, Human
cgggccagccaggcgggcuc

SEQ ID NO: 2588781 - RNA, 18 nt, Human
cgggccagccaggcgggc

SEQ ID NO: 2588782 - RNA, 17 nt, Human
cgggccagccaggcggg

SEQ ID NO: 2588783 - RNA, 23 nt, Human
cgggccagccaggcgggcucaag

SEQ ID NO: 2588784 - RNA, 21 nt, Human
cggcuacucagcagcccuccu

SEQ ID NO: 2588785 - RNA, 12 nt, Human
cggcuacucagc

SEQ ID NO: 2588786 - RNA, 13 nt, Human
cggcuacucagca

SEQ ID NO: 2588787 - RNA, 14 nt, Human
cggcuacucagcag

SEQ ID NO: 2588788 - RNA, 16 nt, Human
cggcuacucagcagcc

SEQ ID NO: 2588789 - RNA, 18 nt, Human
cggcuacucagcagcccu

SEQ ID NO: 2588790 - RNA, 19 nt, Human
cggcuacucagcagcccuc

SEQ ID NO: 2588791 - RNA, 20 nt, Human
cggcuacucagcagcccucc

SEQ ID NO: 2588792 - RNA, 19 nt, Human
cgggccgacggagccggga

SEQ ID NO: 2588793 - RNA, 18 nt, Human
cgggcucagggaccacag

SEQ ID NO: 2588794 - RNA, 16 nt, Human
cgggcuccugugcccu

SEQ ID NO: 2588795 - RNA, 15 nt, Human
cgggcuccugugccc

SEQ ID NO: 2588796 - RNA, 14 nt, Human
cgggcuccugugcc

SEQ ID NO: 2588797 - RNA, 20 nt, Human
cgggcucagggaccacagca

SEQ ID NO: 2588798 - RNA, 14 nt, Human
cgggcucucugcug

SEQ ID NO: 2588799 - RNA, 15 nt, Human
cgggcucucugcugu

SEQ ID NO: 2588800 - RNA, 20 nt, Human
cgggccuggagaacuagaga

SEQ ID NO: 2588801 - RNA, 16 nt, Human
cgggccuggagaacua

SEQ ID NO: 2588802 - RNA, 19 nt, Human
cgggcucagcaaaagaugc

SEQ ID NO: 2588803 - RNA, 16 nt, Human
cgggcugccugggcug

SEQ ID NO: 2588804 - RNA, 15 nt, Human
cgggcugccugggcu

SEQ ID NO: 2588805 - RNA, 14 nt, Human
cgggcugccugggc

SEQ ID NO: 2588806 - RNA, 17 nt, Human
cgggcuccugugcccuu

SEQ ID NO: 2588807 - RNA, 13 nt, Human
cgggcugccuggg

SEQ ID NO: 2588808 - RNA, 12 nt, Human
cgggcucugccu

SEQ ID NO: 2588809 - RNA, 20 nt, Human
cgggcugggagcucugcaga

SEQ ID NO: 2588810 - RNA, 16 nt, Human
cgggcugggagcucug

SEQ ID NO: 2588811 - RNA, 17 nt, Human
cgggcugggcagcuguu

SEQ ID NO: 2588812 - RNA, 16 nt, Human
cgggcugggcagcugu

SEQ ID NO: 2588813 - RNA, 15 nt, Human
cgggcugggcagcug

SEQ ID NO: 2588814 - RNA, 14 nt, Human
cgggcugggcagcu

SEQ ID NO: 2588815 - RNA, 23 nt, Human
cguagaaguuuuuguacuguaaa

SEQ ID NO: 2588816 - RNA, 19 nt, Human
cguagaaguuuuuguacug

SEQ ID NO: 2588817 - RNA, 18 nt, Human
cguagaaguuuuuguacu

SEQ ID NO: 2588818 - RNA, 22 nt, Human
cguacuuagcagcuaucucuca

SEQ ID NO: 2588819 - RNA, 16 nt, Human
cguaaguuuaaaggau

SEQ ID NO: 2588820 - RNA, 22 nt, Human
cguacacauuuuauuuuauuau

SEQ ID NO: 2588821 - RNA, 22 nt, Human
cguacaguucuucgggaagaga

SEQ ID NO: 2588822 - RNA, 13 nt, Human
cguacaguucuuc

SEQ ID NO: 2588823 - RNA, 14 nt, Human
cguacaugugaggc

SEQ ID NO: 2588824 - RNA, 15 nt, Human
cguaccccacccuca

SEQ ID NO: 2588825 - RNA, 14 nt, Human
cguaccccacccuc

SEQ ID NO: 2588826 - RNA, 13 nt, Human
cguaccccacccu

SEQ ID NO: 2588827 - RNA, 17 nt, Human
cguacauucaauguuua

SEQ ID NO: 2588828 - RNA, 19 nt, Human
cguaacccaacucuccugg

SEQ ID NO: 2588829 - RNA, 14 nt, Human
cguaacccaacucu

SEQ ID NO: 2588830 - RNA, 12 nt, Human
cguaacccaacu

SEQ ID NO: 2588831 - RNA, 23 nt, Human
cguaaccagccagauccucuugg

SEQ ID NO: 2588832 - RNA, 14 nt, Human
cguaaccagccaga

SEQ ID NO: 2588833 - RNA, 13 nt, Human
cguaaccagccag

SEQ ID NO: 2588834 - RNA, 12 nt, Human
cguaaccagcca

SEQ ID NO: 2588835 - RNA, 15 nt, Human
cguaacuggcugugu

SEQ ID NO: 2588836 - RNA, 20 nt, Human
cguaaauacacaacacacac

SEQ ID NO: 2588837 - RNA, 15 nt, Human
cguaaccacggaaaa

SEQ ID NO: 2588838 - RNA, 20 nt, Human
cgguggcugacaccuguaau

SEQ ID NO: 2588839 - RNA, 16 nt, Human
cguaaagcuagaaaug

SEQ ID NO: 2588840 - RNA, 17 nt, Human
cguaaagcuagaaauga

SEQ ID NO: 2588841 - RNA, 23 nt, Human
cggugggcacccacccugggacc

SEQ ID NO: 2588842 - RNA, 19 nt, Human
cggugggcacccacccugg

SEQ ID NO: 2588843 - RNA, 12 nt, Human
cgggcugugccc

SEQ ID NO: 2588844 - RNA, 15 nt, Human
cgggcuuuuccccgg

SEQ ID NO: 2588845 - RNA, 14 nt, Human
cggggaacuccugg

SEQ ID NO: 2588846 - RNA, 15 nt, Human
cggggaacuccugga

SEQ ID NO: 2588847 - RNA, 20 nt, Human
cgguggcuagucaagcuccu

SEQ ID NO: 2588848 - RNA, 21 nt, Human
cgguggcuagucaagcuccuc

SEQ ID NO: 2588849 - RNA, 11 nt, Human
cgguggcucac

SEQ ID NO: 2588850 - RNA, 22 nt, Human
cgguggcuagucaagcuccucc

SEQ ID NO: 2588851 - RNA, 20 nt, Human
cgguggcucaggccuauaac

SEQ ID NO: 2588852 - RNA, 18 nt, Human
cggugggcacccacccug

SEQ ID NO: 2588853 - RNA, 15 nt, Human
cggugggcacccacc

SEQ ID NO: 2588854 - RNA, 20 nt, Human
cgguggcucacgccuguaau

SEQ ID NO: 2588855 - RNA, 23 nt, Human
cuaagacuccucggccuggcucc

SEQ ID NO: 2588856 - RNA, 22 nt, Human
cuaagacuccucggccuggcuc

SEQ ID NO: 2588857 - RNA, 11 nt, Human
cuaagagaagu

SEQ ID NO: 2588858 - RNA, 16 nt, Human
cuaagagaaguuauuu

SEQ ID NO: 2588859 - RNA, 17 nt, Human
cuaagaauucaaacugg

SEQ ID NO: 2588860 - RNA, 14 nt, Human
cuaagacuacagca

SEQ ID NO: 2588861 - RNA, 18 nt, Human
cuaauuucuccucccuuc

SEQ ID NO: 2588862 - RNA, 20 nt, Human
cuaauuucuccucccuuccu

SEQ ID NO: 2588863 - RNA, 15 nt, Human
cuaauuugauguuua

SEQ ID NO: 2588864 - RNA, 13 nt, Human
cuaauuugcauua

SEQ ID NO: 2588865 - RNA, 14 nt, Human
cuaauuugcauuaa

SEQ ID NO: 2588866 - RNA, 12 nt, Human
cuaauuugcauu

SEQ ID NO: 2588867 - RNA, 16 nt, Human
cuaauuugauguuuac

SEQ ID NO: 2588868 - RNA, 13 nt, Human
cuaauaaaagcau

SEQ ID NO: 2588869 - RNA, 20 nt, Human
cuacaaaaacacagcaaggg

SEQ ID NO: 2588870 - RNA, 19 nt, Human
cuacaaaaagcauaaaaau

SEQ ID NO: 2588871 - RNA, 19 nt, Human
cuaauuugcauuaaauuca

SEQ ID NO: 2588872 - RNA, 21 nt, Human
cuaauuugcauuaaauucaca

SEQ ID NO: 2588873 - RNA, 19 nt, Human
cuaauuucuccucccuucc

SEQ ID NO: 2588874 - RNA, 22 nt, Human
cuaauuugcauuaaauucacaa

SEQ ID NO: 2588875 - RNA, 12 nt, Human
cuaauuuuuaag

SEQ ID NO: 2588876 - RNA, 13 nt, Human
cuaaguuucaguu

SEQ ID NO: 2588877 - RNA, 20 nt, Human
cuaaguuccacugagcucca

SEQ ID NO: 2588878 - RNA, 18 nt, Human
cuaaguuccacugagcuc

SEQ ID NO: 2588879 - RNA, 13 nt, Human
cuaaguauuuccc

SEQ ID NO: 2588880 - RNA, 16 nt, Human
cuaaguauuucccagc

SEQ ID NO: 2588881 - RNA, 14 nt, Human
cuaaguauuuccca

SEQ ID NO: 2588882 - RNA, 17 nt, Human
cuaaguauuucccagca

SEQ ID NO: 2588883 - RNA, 15 nt, Human
cuaaguccuuuaugu

SEQ ID NO: 2588884 - RNA, 10 nt, Human
cuaauaaaac

SEQ ID NO: 2588885 - RNA, 14 nt, Human
cuaaguuuuuaugg

SEQ ID NO: 2588886 - RNA, 19 nt, Human
cuaaguuucaguugauuuu

SEQ ID NO: 2588887 - RNA, 15 nt, Human
cgugacaacacuugu

SEQ ID NO: 2588888 - RNA, 14 nt, Human
cgugacaacacuug

SEQ ID NO: 2588889 - RNA, 20 nt, Human
cgugagccacugcaccgggc

SEQ ID NO: 2588890 - RNA, 15 nt, Human
cgugagccacugcac

SEQ ID NO: 2588891 - RNA, 19 nt, Human
cgugacaauaaaacauuaa

SEQ ID NO: 2588892 - RNA, 17 nt, Human
cgugacaauaaaacauu

SEQ ID NO: 2588893 - RNA, 14 nt, Human
cgugagccacugca

SEQ ID NO: 2588894 - RNA, 14 nt, Human
cgugaggccagaga

SEQ ID NO: 2588895 - RNA, 19 nt, Human
cgugagcgacaaagaugau

SEQ ID NO: 2588896 - RNA, 15 nt, Human
cgugagcucuuguga

SEQ ID NO: 2588897 - RNA, 19 nt, Human
cgugaggaugucacucaga

SEQ ID NO: 2588898 - RNA, 21 nt, Human
cgugagccagguaaugaggga

SEQ ID NO: 2588899 - RNA, 13 nt, Human
cgugagccaggua

SEQ ID NO: 2588900 - RNA, 12 nt, Human
cgugagccaggu

SEQ ID NO: 2588901 - RNA, 16 nt, Human
cgugacagacuccuga

SEQ ID NO: 2588902 - RNA, 15 nt, Human
cgugacagacuccug

SEQ ID NO: 2588903 - RNA, 22 nt, Human
cgugagccacugcaccgggcca

SEQ ID NO: 2588904 - RNA, 20 nt, Human
cuaacgaaguauccuucagc

SEQ ID NO: 2588905 - RNA, 19 nt, Human
cuaaaguguauuuuuuuac

SEQ ID NO: 2588906 - RNA, 15 nt, Human
cuaaagugagcucua

SEQ ID NO: 2588907 - RNA, 20 nt, Human
cuaacgacuucagggcaggg

SEQ ID NO: 2588908 - RNA, 17 nt, Human
cuaacguugagccccug

SEQ ID NO: 2588909 - RNA, 15 nt, Human
cuaacguaaauacac

SEQ ID NO: 2588910 - RNA, 23 nt, Human
cuaaaguaaaaacaaagaaauua

SEQ ID NO: 2588911 - RNA, 17 nt, Human
cuaaagcccaaccuccu

SEQ ID NO: 2588912 - RNA, 19 nt, Human
cuaaagguguugucccuuc

SEQ ID NO: 2588913 - RNA, 20 nt, Human
cuaaagguguugucccuucu

SEQ ID NO: 2588914 - RNA, 20 nt, Human
cuaaaguauguaaaguaugu

SEQ ID NO: 2588915 - RNA, 16 nt, Human
cuaaaguauguaaagu

SEQ ID NO: 2588916 - RNA, 15 nt, Human
cuaaaguaugaagca

SEQ ID NO: 2588917 - RNA, 17 nt, Human
cuaaaguagacuucauu

SEQ ID NO: 2588918 - RNA, 22 nt, Human
cuaacuugucuuuggacccuga

SEQ ID NO: 2588919 - RNA, 14 nt, Human
cuaacuugucuuug

SEQ ID NO: 2588920 - RNA, 22 nt, Human
cuaacguugagccccuggaggc

SEQ ID NO: 2588921 - RNA, 19 nt, Human
cuaacuaaacucucuuugg

SEQ ID NO: 2588922 - RNA, 13 nt, Human
cuaacuaaacucu

SEQ ID NO: 2588923 - RNA, 12 nt, Human
cuaacuaaacuc

SEQ ID NO: 2588924 - RNA, 17 nt, Human
cuaacuuggagccccag

SEQ ID NO: 2588925 - RNA, 20 nt, Human
cuaacuuggagccccagugc

SEQ ID NO: 2588926 - RNA, 21 nt, Human
cuaacuuggagccccagugcc

SEQ ID NO: 2588927 - RNA, 23 nt, Human
cuaagaagaaaauugcugugccu

SEQ ID NO: 2588928 - RNA, 15 nt, Human
cuaagaaccuggaac

SEQ ID NO: 2588929 - RNA, 16 nt, Human
cuaagaaccuggaacu

SEQ ID NO: 2588930 - RNA, 20 nt, Human
cuaagaaauaaaacuguuaa

SEQ ID NO: 2588931 - RNA, 21 nt, Human
cuaagaaagaggagugcuugu

SEQ ID NO: 2588932 - RNA, 14 nt, Human
cuaagaaccuggaa

SEQ ID NO: 2588933 - RNA, 20 nt, Human
cuaagaaagaggagugcuug

SEQ ID NO: 2588934 - RNA, 14 nt, Human
cuaacuuggagccg

SEQ ID NO: 2588935 - RNA, 22 nt, Human
cuaacuuggagccccagugcca

SEQ ID NO: 2588936 - RNA, 19 nt, Human
cuaagaaagaggagugcuu

SEQ ID NO: 2588937 - RNA, 20 nt, Human
cuaagaaauaugcacaauag

SEQ ID NO: 2588938 - RNA, 22 nt, Human
cuaagaaagcccuuaggaagaa

SEQ ID NO: 2588939 - RNA, 11 nt, Human
cuaaagcugcc

SEQ ID NO: 2588940 - RNA, 18 nt, Human
cuaaagcaguggacacca

SEQ ID NO: 2588941 - RNA, 20 nt, Human
cuaaagcaauaaugguccca

SEQ ID NO: 2588942 - RNA, 11 nt, Human
cuaaagcagug

SEQ ID NO: 2588943 - RNA, 20 nt, Human
cguucaccccuccacccuug

SEQ ID NO: 2588944 - RNA, 17 nt, Human
cguuagcuccuguggcc

SEQ ID NO: 2588945 - RNA, 16 nt, Human
cguuagcuccuguggc

SEQ ID NO: 2588946 - RNA, 15 nt, Human
cguuagcuccugugg

SEQ ID NO: 2588947 - RNA, 14 nt, Human
cguuagcuccugug

SEQ ID NO: 2588948 - RNA, 14 nt, Human
cguguuucugacuc

SEQ ID NO: 2588949 - RNA, 15 nt, Human
cguguuucugacucu

SEQ ID NO: 2588950 - RNA, 13 nt, Human
cguuagcuccugu

SEQ ID NO: 2588951 - RNA, 16 nt, Human
cguuaugguguuucuc

SEQ ID NO: 2588952 - RNA, 20 nt, Human
cguuagucgugagcucuugu

SEQ ID NO: 2588953 - RNA, 15 nt, Human
cguuauuguugacuu

SEQ ID NO: 2588954 - RNA, 16 nt, Human
cguuauuauaauugua

SEQ ID NO: 2588955 - RNA, 14 nt, Human
cguuauuauaauug

SEQ ID NO: 2588956 - RNA, 22 nt, Human
cguuauguguguauauguaugu

SEQ ID NO: 2588957 - RNA, 19 nt, Human
cguucaacuuuuccuuuga

SEQ ID NO: 2588958 - RNA, 15 nt, Human
cguucaccccuccac

SEQ ID NO: 2588959 - RNA, 18 nt, Human
cgugaguccuggcauggg

SEQ ID NO: 2588960 - RNA, 19 nt, Human
cgugaguccuggcauggga

SEQ ID NO: 2588961 - RNA, 14 nt, Human
cgugaguucucagg

SEQ ID NO: 2588962 - RNA, 19 nt, Human
cgugagugaaccaucauua

SEQ ID NO: 2588963 - RNA, 19 nt, Human
cgugaguucucagggcucc

SEQ ID NO: 2588964 - RNA, 18 nt, Human
cgugaguucucagggcuc

SEQ ID NO: 2588965 - RNA, 16 nt, Human
cgugaguucucagggc

SEQ ID NO: 2588966 - RNA, 15 nt, Human
cgugaguucucaggg

SEQ ID NO: 2588967 - RNA, 21 nt, Human
cgugaguucucagggcuccug

SEQ ID NO: 2588968 - RNA, 20 nt, Human
cgugaguucucagggcuccu

SEQ ID NO: 2588969 - RNA, 14 nt, Human
cgugaucaaagcca

SEQ ID NO: 2588970 - RNA, 19 nt, Human
cguguuaugacuccagaau

SEQ ID NO: 2588971 - RNA, 22 nt, Human
cguguugccuugaaccacuucc

SEQ ID NO: 2588972 - RNA, 15 nt, Human
cguguugccuugaac

SEQ ID NO: 2588973 - RNA, 16 nt, Human
cguguucuccuuuucc

SEQ ID NO: 2588974 - RNA, 15 nt, Human
cguguuaugacucca

SEQ ID NO: 2588975 - RNA, 18 nt, Human
cgugaucaaagccacacu

SEQ ID NO: 2588976 - RNA, 21 nt, Human
cgugaucaaagccacacucug

SEQ ID NO: 2588977 - RNA, 9 nt, Human
ccugcuggc

SEQ ID NO: 2588978 - RNA, 12 nt, Human
ccugcuggcccc

SEQ ID NO: 2588979 - RNA, 13 nt, Human
ccugcuggccccu

SEQ ID NO: 2588980 - RNA, 15 nt, Human
ccugcuggcacccac

SEQ ID NO: 2588981 - RNA, 19 nt, Human
ccugcuggcacccaccgug

SEQ ID NO: 2588982 - RNA, 11 nt, Human
ccugcuggccc

SEQ ID NO: 2588983 - RNA, 20 nt, Human
ccugcugcuguguuuuugcu

SEQ ID NO: 2588984 - RNA, 17 nt, Human
ccuguuaccuacuuuga

SEQ ID NO: 2588985 - RNA, 18 nt, Human
ccuguuaccuacuuugac

SEQ ID NO: 2588986 - RNA, 22 nt, Human
ccuguuacuugaaauaccagug

SEQ ID NO: 2588987 - RNA, 14 nt, Human
ccuguuacuuaccu

SEQ ID NO: 2588988 - RNA, 19 nt, Human
ccuguuaccuacuuugacu

SEQ ID NO: 2588989 - RNA, 23 nt, Human
ccuguuacuugaaauaccaguga

SEQ ID NO: 2588990 - RNA, 15 nt, Human
ccuguuagcagacag

SEQ ID NO: 2588991 - RNA, 16 nt, Human
ccuguuagcagacagg

SEQ ID NO: 2588992 - RNA, 21 nt, Human
ccuguucacucuacuuagcau

SEQ ID NO: 2588993 - RNA, 18 nt, Human
ccuguuagcuguuauuuc

SEQ ID NO: 2588994 - RNA, 13 nt, Human
ccuguucagcucc

SEQ ID NO: 2588995 - RNA, 23 nt, Human
ccuguuaccuaauuagagcagau

SEQ ID NO: 2588996 - RNA, 22 nt, Human
ccuguuaccuaauuagagcaga

SEQ ID NO: 2588997 - RNA, 21 nt, Human
ccuguuaccuaauuagagcag

SEQ ID NO: 2588998 - RNA, 19 nt, Human
ccuguucagcuccagcuca

SEQ ID NO: 2588999 - RNA, 16 nt, Human
ccuguucagcuccagc

SEQ ID NO: 2589000 - RNA, 15 nt, Human
ccuguucagcuccag

SEQ ID NO: 2589001 - RNA, 14 nt, Human
ccuguucagcucca

SEQ ID NO: 2589002 - RNA, 21 nt, Human
ccuguucagcuccagcucacc

SEQ ID NO: 2589003 - RNA, 20 nt, Human
ccuguucagcuccagcucac

SEQ ID NO: 2589004 - RNA, 23 nt, Human
ccuguucagcuccagcucaccag

SEQ ID NO: 2589005 - RNA, 20 nt, Human
ccuguucaguuacagaaagu

SEQ ID NO: 2589006 - RNA, 19 nt, Human
ccuguucaguuacagaaag

SEQ ID NO: 2589007 - RNA, 17 nt, Human
ccuguucaguuacagaa

SEQ ID NO: 2589008 - RNA, 15 nt, Human
ccuguucaguuacag

SEQ ID NO: 2589009 - RNA, 11 nt, Human
ccuguucaguu

SEQ ID NO: 2589010 - RNA, 19 nt, Human
ccuguucagugucccgggc

SEQ ID NO: 2589011 - RNA, 17 nt, Human
ccuguucuggcagaguu

SEQ ID NO: 2589012 - RNA, 12 nt, Human
ccuguucuggca

SEQ ID NO: 2589013 - RNA, 16 nt, Human
ccuguucugcuuuccu

SEQ ID NO: 2589014 - RNA, 17 nt, Human
ccuguugacacaggucu

SEQ ID NO: 2589015 - RNA, 19 nt, Human
ccuguugacacaggucuuu

SEQ ID NO: 2589016 - RNA, 22 nt, Human
ccuguugacacaggucuuuccu

SEQ ID NO: 2589017 - RNA, 13 nt, Human
ccuguucugaacu

SEQ ID NO: 2589018 - RNA, 14 nt, Human
ccuguucugaacug

SEQ ID NO: 2589019 - RNA, 21 nt, Human
ccuguucugaacuguggggug

SEQ ID NO: 2589020 - RNA, 22 nt, Human
ccuguuccccucacuggaugaa

SEQ ID NO: 2589021 - RNA, 18 nt, Human
ccuguuccccucacugga

SEQ ID NO: 2589022 - RNA, 15 nt, Human
ccuguuccccagaga

SEQ ID NO: 2589023 - RNA, 16 nt, Human
ccuguuccccagagaa

SEQ ID NO: 2589024 - RNA, 17 nt, Human
ccuguuccccucacugg

SEQ ID NO: 2589025 - RNA, 22 nt, Human
ccuguucccccgccgcuuuucu

SEQ ID NO: 2589026 - RNA, 23 nt, Human
ccuguuccccagagaaaggggag

SEQ ID NO: 2589027 - RNA, 18 nt, Human
ccuguucccaugagauga

SEQ ID NO: 2589028 - RNA, 12 nt, Human
ccuguucccauu

SEQ ID NO: 2589029 - RNA, 13 nt, Human
ccuguuccccaga

SEQ ID NO: 2589030 - RNA, 20 nt, Human
ccuguugggccaggagccuc

SEQ ID NO: 2589031 - RNA, 19 nt, Human
ccuguugggccaggagccu

SEQ ID NO: 2589032 - RNA, 18 nt, Human
ccuguugggccaggagcc

SEQ ID NO: 2589033 - RNA, 17 nt, Human
ccuguugggccaggagc

SEQ ID NO: 2589034 - RNA, 17 nt, Human
ccuguugcacccagccc

SEQ ID NO: 2589035 - RNA, 16 nt, Human
ccuguugcacccagcc

SEQ ID NO: 2589036 - RNA, 15 nt, Human
ccuguugcacccagc

SEQ ID NO: 2589037 - RNA, 14 nt, Human
ccuguugcacccag

SEQ ID NO: 2589038 - RNA, 23 nt, Human
ccuguugacgaagucucuuuucu

SEQ ID NO: 2589039 - RNA, 20 nt, Human
ccuguugacgaagucucuuu

SEQ ID NO: 2589040 - RNA, 21 nt, Human
ccuguugcacccagcccuggu

SEQ ID NO: 2589041 - RNA, 20 nt, Human
ccuguugcacccagcccugg

SEQ ID NO: 2589042 - RNA, 19 nt, Human
ccuguugcacccagcccug

SEQ ID NO: 2589043 - RNA, 18 nt, Human
ccuguugcacccagcccu

SEQ ID NO: 2589044 - RNA, 23 nt, Human
ccuguugcacccagcccuggucu

SEQ ID NO: 2589045 - RNA, 22 nt, Human
ccuguugcacccagcccugguc

SEQ ID NO: 2589046 - RNA, 12 nt, Human
ccuguugcuaag

SEQ ID NO: 2589047 - RNA, 16 nt, Human
ccuguugggccaggag

SEQ ID NO: 2589048 - RNA, 14 nt, Human
ccuguugcuaagcc

SEQ ID NO: 2589049 - RNA, 13 nt, Human
ccuguugcuaagc

SEQ ID NO: 2589050 - RNA, 22 nt, Human
ccuguugcuaagccccagcaag

SEQ ID NO: 2589051 - RNA, 16 nt, Human
ccuguugcuuacaauu

SEQ ID NO: 2589052 - RNA, 20 nt, Human
ccuuagcagggaaacagcua

SEQ ID NO: 2589053 - RNA, 19 nt, Human
ccuuagcagggaaacagcu

SEQ ID NO: 2589054 - RNA, 16 nt, Human
ccuuagcaaauucugu

SEQ ID NO: 2589055 - RNA, 24 nt, Human
ccuguuggauuuguuuaaaaggau

SEQ ID NO: 2589056 - RNA, 17 nt, Human
ccuguuggauuuguuua

SEQ ID NO: 2589057 - RNA, 23 nt, Human
ccuguuggacccgcucuggacca

SEQ ID NO: 2589058 - RNA, 20 nt, Human
ccuguuggacccgcucugga

SEQ ID NO: 2589059 - RNA, 17 nt, Human
ccuguugcuuacaauuu

SEQ ID NO: 2589060 - RNA, 19 nt, Human
ccuguuggacccgcucugg

SEQ ID NO: 2589061 - RNA, 20 nt, Human
ccuuagcacuaccacuccug

SEQ ID NO: 2589062 - RNA, 22 nt, Human
ccuuagcacaggggggccgccg

SEQ ID NO: 2589063 - RNA, 19 nt, Human
ccuuagcauguuugcugaa

SEQ ID NO: 2589064 - RNA, 16 nt, Human
ccuuagcauguuugcu

SEQ ID NO: 2589065 - RNA, 10 nt, Human
ccuuagccag

SEQ ID NO: 2589066 - RNA, 15 nt, Human
ccuuagcccccaccc

SEQ ID NO: 2589067 - RNA, 21 nt, Human
ccuuagcccccacccacuucc

SEQ ID NO: 2589068 - RNA, 18 nt, Human
ccuuagcccccacccacu

SEQ ID NO: 2589069 - RNA, 14 nt, Human
ccuuagccucccug

SEQ ID NO: 2589070 - RNA, 15 nt, Human
ccuuagccucccuga

SEQ ID NO: 2589071 - RNA, 16 nt, Human
ccuuagccucccugaa

SEQ ID NO: 2589072 - RNA, 19 nt, Human
ccuuagcuggcauuacagc

SEQ ID NO: 2589073 - RNA, 22 nt, Human
ccuuagcuggcauuacagcugg

SEQ ID NO: 2589074 - RNA, 17 nt, Human
ccuuagcuuagaccuca

SEQ ID NO: 2589075 - RNA, 18 nt, Human
ccuuagcuuagaccucag

SEQ ID NO: 2589076 - RNA, 19 nt, Human
ccuucccaccucucucacu

SEQ ID NO: 2589077 - RNA, 14 nt, Human
ccuucccaccucuc

SEQ ID NO: 2589078 - RNA, 22 nt, Human
ccuucccacccaucgcugugug

SEQ ID NO: 2589079 - RNA, 15 nt, Human
ccuuauucaggaaaa

SEQ ID NO: 2589080 - RNA, 12 nt, Human
ccuucccaccuc

SEQ ID NO: 2589081 - RNA, 17 nt, Human
ccuucccacucaccccg

SEQ ID NO: 2589082 - RNA, 15 nt, Human
ccuucccacucaccc

SEQ ID NO: 2589083 - RNA, 18 nt, Human
ccuucccacucaccccgg

SEQ ID NO: 2589084 - RNA, 12 nt, Human
ccuucccagcuc

SEQ ID NO: 2589085 - RNA, 13 nt, Human
ccuucccagcucu

SEQ ID NO: 2589086 - RNA, 14 nt, Human
ccuucccagcucuc

SEQ ID NO: 2589087 - RNA, 17 nt, Human
ccuucccagcucucccu

SEQ ID NO: 2589088 - RNA, 18 nt, Human
ccuucccagcucucccuc

SEQ ID NO: 2589089 - RNA, 15 nt, Human
ccuucccaugcccug

SEQ ID NO: 2589090 - RNA, 21 nt, Human
ccuucccaugacccaggcugg

SEQ ID NO: 2589091 - RNA, 18 nt, Human
ccuucccaugacccaggc

SEQ ID NO: 2589092 - RNA, 15 nt, Human
ccuucccaucucuuc

SEQ ID NO: 2589093 - RNA, 22 nt, Human
ccuucccagcucucccucuggc

SEQ ID NO: 2589094 - RNA, 15 nt, Human
ccuucccaucgcugu

SEQ ID NO: 2589095 - RNA, 14 nt, Human
ccuucccaucgcug

SEQ ID NO: 2589096 - RNA, 19 nt, Human
ccuucccagcucucccucu

SEQ ID NO: 2589097 - RNA, 21 nt, Human
ccuucccagcucucccucugg

SEQ ID NO: 2589098 - RNA, 19 nt, Human
ccuucccaggaguggagga

SEQ ID NO: 2589099 - RNA, 18 nt, Human
ccuuauggaacacucuga

SEQ ID NO: 2589100 - RNA, 17 nt, Human
ccuuauggaacacucug

SEQ ID NO: 2589101 - RNA, 16 nt, Human
ccuuauggaacacucu

SEQ ID NO: 2589102 - RNA, 14 nt, Human
ccuuauggaacacu

SEQ ID NO: 2589103 - RNA, 20 nt, Human
ccuuauggaacacucugaga

SEQ ID NO: 2589104 - RNA, 19 nt, Human
ccuuauggaacacucugag

SEQ ID NO: 2589105 - RNA, 22 nt, Human
ccuuauggaacacucugagacu

SEQ ID NO: 2589106 - RNA, 16 nt, Human
ccuuauuagagugucu

SEQ ID NO: 2589107 - RNA, 21 nt, Human
ccuuauuagagugucuuucca

SEQ ID NO: 2589108 - RNA, 22 nt, Human
ccuuauuacacggaaaacggug

SEQ ID NO: 2589109 - RNA, 21 nt, Human
ccuuaucugugcgugaaacac

SEQ ID NO: 2589110 - RNA, 19 nt, Human
ccuuaguguuucugugcau

SEQ ID NO: 2589111 - RNA, 16 nt, Human
ccuuaguguuucugug

SEQ ID NO: 2589112 - RNA, 14 nt, Human
ccuuaguguuucug

SEQ ID NO: 2589113 - RNA, 12 nt, Human
ccuuaguguuuc

SEQ ID NO: 2589114 - RNA, 20 nt, Human
ccuuaguguuucugugcaug

SEQ ID NO: 2589115 - RNA, 13 nt, Human
ccuuaucaaagga

SEQ ID NO: 2589116 - RNA, 20 nt, Human
ccuuagucucaguuugugug

SEQ ID NO: 2589117 - RNA, 14 nt, Human
ccuuagucucaguu

SEQ ID NO: 2589118 - RNA, 20 nt, Human
ccuuagguuuuuuuccuucu

SEQ ID NO: 2589119 - RNA, 20 nt, Human
ccuuaguggcuuuuuuccuc

SEQ ID NO: 2589120 - RNA, 16 nt, Human
ccuuaguggcuuuuuu

SEQ ID NO: 2589121 - RNA, 14 nt, Human
ccuuagucuucuca

SEQ ID NO: 2589122 - RNA, 14 nt, Human
ccuuaguacugagu

SEQ ID NO: 2589123 - RNA, 13 nt, Human
ccuuagucuucuc

SEQ ID NO: 2589124 - RNA, 23 nt, Human
ccuuagcuuagaccucagccugu

SEQ ID NO: 2589125 - RNA, 13 nt, Human
ccuuaggcaggga

SEQ ID NO: 2589126 - RNA, 15 nt, Human
ccuuaggcagggaag

SEQ ID NO: 2589127 - RNA, 19 nt, Human
ccuuagcuuagaccucagc

SEQ ID NO: 2589128 - RNA, 20 nt, Human
ccuuagcuuagaccucagcc

SEQ ID NO: 2589129 - RNA, 21 nt, Human
ccuuagcuuagaccucagccu

SEQ ID NO: 2589130 - RNA, 22 nt, Human
ccuuagcuuagaccucagccug

SEQ ID NO: 2589131 - RNA, 23 nt, Human
ccuuaggccuuccucucuccaga

SEQ ID NO: 2589132 - RNA, 20 nt, Human
ccuuaggugauccacucgcc

SEQ ID NO: 2589133 - RNA, 14 nt, Human
ccuuaggccuuccu

SEQ ID NO: 2589134 - RNA, 15 nt, Human
ccuuaggccuuccuc

SEQ ID NO: 2589135 - RNA, 13 nt, Human
ccuuaggccuucc

SEQ ID NO: 2589136 - RNA, 16 nt, Human
ccuuaggcagggaagu

SEQ ID NO: 2589137 - RNA, 20 nt, Human
ccuuaucaccagcugccucu

SEQ ID NO: 2589138 - RNA, 13 nt, Human
ccuuaucaccagc

SEQ ID NO: 2589139 - RNA, 16 nt, Human
ccuuaucaagugucuu

SEQ ID NO: 2589140 - RNA, 15 nt, Human
ccuuaucaagugucu

SEQ ID NO: 2589141 - RNA, 14 nt, Human
ccuuaucaaguguc

SEQ ID NO: 2589142 - RNA, 13 nt, Human
ccuuaucaagugu

SEQ ID NO: 2589143 - RNA, 12 nt, Human
ccuuaucaagug

SEQ ID NO: 2589144 - RNA, 14 nt, Human
ccuuaucaaaggac

SEQ ID NO: 2589145 - RNA, 18 nt, Human
ccuuaucaaaggacacca

SEQ ID NO: 2589146 - RNA, 13 nt, Human
ccuuauccucuga

SEQ ID NO: 2589147 - RNA, 17 nt, Human
ccuuauccaggacucug

SEQ ID NO: 2589148 - RNA, 15 nt, Human
ccuuauccaggacuc

SEQ ID NO: 2589149 - RNA, 14 nt, Human
ccuuauccaggacu

SEQ ID NO: 2589150 - RNA, 13 nt, Human
ccuuauccaggac

SEQ ID NO: 2589151 - RNA, 17 nt, Human
ccuuaucauucauucuu

SEQ ID NO: 2589152 - RNA, 16 nt, Human
ccuuaucauucauucu

SEQ ID NO: 2589153 - RNA, 17 nt, Human
ccuuaucaccagcugcc

SEQ ID NO: 2589154 - RNA, 15 nt, Human
ccuuaucauucauuc

SEQ ID NO: 2589155 - RNA, 13 nt, Human
ccuuaucuugcac

SEQ ID NO: 2589156 - RNA, 15 nt, Human
ccuuaucugugcuca

SEQ ID NO: 2589157 - RNA, 17 nt, Human
ccuuaucugugcucagg

SEQ ID NO: 2589158 - RNA, 12 nt, Human
ccuuauggaaca

SEQ ID NO: 2589159 - RNA, 18 nt, Human
ccuuauccucugaucucc

SEQ ID NO: 2589160 - RNA, 15 nt, Human
ccuuauccucugauc

SEQ ID NO: 2589161 - RNA, 16 nt, Human
ccuuauccucugaucu

SEQ ID NO: 2589162 - RNA, 13 nt, Human
ccuuaucugugcg

SEQ ID NO: 2589163 - RNA, 20 nt, Human
ccuuaucugugcgugaaaca

SEQ ID NO: 2589164 - RNA, 16 nt, Human
ccuuaucuccaagacc

SEQ ID NO: 2589165 - RNA, 22 nt, Human
ccuuaucuccaagaccagagau

SEQ ID NO: 2589166 - RNA, 18 nt, Human
ccuugcacacucagaagc

SEQ ID NO: 2589167 - RNA, 19 nt, Human
ccuugcacacuccccugca

SEQ ID NO: 2589168 - RNA, 22 nt, Human
ccuugcacacuccccugcacug

SEQ ID NO: 2589169 - RNA, 15 nt, Human
ccuugcaagaaucag

SEQ ID NO: 2589170 - RNA, 17 nt, Human
ccuugcaccccucacuc

SEQ ID NO: 2589171 - RNA, 14 nt, Human
ccuugcaccccuca

SEQ ID NO: 2589172 - RNA, 13 nt, Human
ccuugcaccccuc

SEQ ID NO: 2589173 - RNA, 14 nt, Human
ccuugcacauagua

SEQ ID NO: 2589174 - RNA, 18 nt, Human
ccuugcaccccucacucu

SEQ ID NO: 2589175 - RNA, 12 nt, Human
ccuugcaccugc

SEQ ID NO: 2589176 - RNA, 13 nt, Human
ccuugcaccugca

SEQ ID NO: 2589177 - RNA, 14 nt, Human
ccuugcaccugcau

SEQ ID NO: 2589178 - RNA, 16 nt, Human
ccuugcaccugcaucc

SEQ ID NO: 2589179 - RNA, 21 nt, Human
ccuugcagcacucacacagga

SEQ ID NO: 2589180 - RNA, 20 nt, Human
ccuugcagcacucacacagg

SEQ ID NO: 2589181 - RNA, 15 nt, Human
ccuugcagcuaguuu

SEQ ID NO: 2589182 - RNA, 17 nt, Human
ccuugcaguucagcacc

SEQ ID NO: 2589183 - RNA, 19 nt, Human
ccuugcaguucagcaccac

SEQ ID NO: 2589184 - RNA, 20 nt, Human
ccuugcaguucagcaccacc

SEQ ID NO: 2589185 - RNA, 22 nt, Human
ccuugcaguucagcaccacccu

SEQ ID NO: 2589186 - RNA, 14 nt, Human
ccuugcauaauggu

SEQ ID NO: 2589187 - RNA, 19 nt, Human
ccuugccaccccacccucc

SEQ ID NO: 2589188 - RNA, 17 nt, Human
ccuugccaccccacccu

SEQ ID NO: 2589189 - RNA, 13 nt, Human
ccuugccacccca

SEQ ID NO: 2589190 - RNA, 23 nt, Human
ccuugcaguucagcaccacccua

SEQ ID NO: 2589191 - RNA, 23 nt, Human
ccuuuauguggaaaacagaacau

SEQ ID NO: 2589192 - RNA, 19 nt, Human
ccuuuauguggaaaacaga

SEQ ID NO: 2589193 - RNA, 22 nt, Human
ccuuuauaaugaggaugauuau

SEQ ID NO: 2589194 - RNA, 19 nt, Human
ccuuuauauuuagugaacu

SEQ ID NO: 2589195 - RNA, 23 nt, Human
ccuugcucaaccauggcugaagg

SEQ ID NO: 2589196 - RNA, 18 nt, Human
ccuuuaguaccugaaaag

SEQ ID NO: 2589197 - RNA, 19 nt, Human
ccuuuaguaccugaaaagu

SEQ ID NO: 2589198 - RNA, 18 nt, Human
ccuuuagugguggccauu

SEQ ID NO: 2589199 - RNA, 18 nt, Human
ccuugcucgcuguaaaau

SEQ ID NO: 2589200 - RNA, 21 nt, Human
ccuugcggggauaaagagaga

SEQ ID NO: 2589201 - RNA, 20 nt, Human
ccuugcgguauccgccccca

SEQ ID NO: 2589202 - RNA, 14 nt, Human
ccuugcuacccaga

SEQ ID NO: 2589203 - RNA, 11 nt, Human
ccuugcuaccu

SEQ ID NO: 2589204 - RNA, 12 nt, Human
ccuugcuaccuc

SEQ ID NO: 2589205 - RNA, 14 nt, Human
ccuugcuaccucaa

SEQ ID NO: 2589206 - RNA, 17 nt, Human
ccuugcuaccucaaggg

SEQ ID NO: 2589207 - RNA, 16 nt, Human
ccuugccagagaucca

SEQ ID NO: 2589208 - RNA, 23 nt, Human
ccuugccaccccacccucccugg

SEQ ID NO: 2589209 - RNA, 12 nt, Human
ccuugccagaga

SEQ ID NO: 2589210 - RNA, 13 nt, Human
ccuugccagagau

SEQ ID NO: 2589211 - RNA, 24 nt, Human
ccuugccaccccacccucccugga

SEQ ID NO: 2589212 - RNA, 13 nt, Human
ccuugccagacau

SEQ ID NO: 2589213 - RNA, 21 nt, Human
ccuugccaggguuucgagaag

SEQ ID NO: 2589214 - RNA, 21 nt, Human
ccuugccugaacauccuuccu

SEQ ID NO: 2589215 - RNA, 16 nt, Human
ccuugccuccugugua

SEQ ID NO: 2589216 - RNA, 15 nt, Human
ccuugccuccugugu

SEQ ID NO: 2589217 - RNA, 23 nt, Human
ccuugccugaacauccuuccuuc

SEQ ID NO: 2589218 - RNA, 15 nt, Human
ccuugcgcuguugcg

SEQ ID NO: 2589219 - RNA, 21 nt, Human
ccuugcgcuuuugcuggucac

SEQ ID NO: 2589220 - RNA, 17 nt, Human
ccuuucaauaggaaaaa

SEQ ID NO: 2589221 - RNA, 18 nt, Human
ccuuucaauaggaaaaac

SEQ ID NO: 2589222 - RNA, 15 nt, Human
ccuuucaaauuucac

SEQ ID NO: 2589223 - RNA, 16 nt, Human
ccuuucaaauuucaca

SEQ ID NO: 2589224 - RNA, 20 nt, Human
ccuuucccuccacuccuucc

SEQ ID NO: 2589225 - RNA, 15 nt, Human
ccuuucccuucuugg

SEQ ID NO: 2589226 - RNA, 12 nt, Human
ccuuucccuucu

SEQ ID NO: 2589227 - RNA, 12 nt, Human
ccuuucccucca

SEQ ID NO: 2589228 - RNA, 20 nt, Human
ccuuuauuguguuugucauu

SEQ ID NO: 2589229 - RNA, 15 nt, Human
ccuuuauuguguuug

SEQ ID NO: 2589230 - RNA, 13 nt, Human
ccuuuauugugau

SEQ ID NO: 2589231 - RNA, 12 nt, Human
ccuuuauugugu

SEQ ID NO: 2589232 - RNA, 14 nt, Human
ccuuuauucuggca

SEQ ID NO: 2589233 - RNA, 23 nt, Human
ccuuuauuacccccuccuucaga

SEQ ID NO: 2589234 - RNA, 14 nt, Human
ccuuuauuaaaauc

SEQ ID NO: 2589235 - RNA, 16 nt, Human
ccuuuauuaaaaucuu

SEQ ID NO: 2589236 - RNA, 15 nt, Human
ccuuucaauaggaaa

SEQ ID NO: 2589237 - RNA, 21 nt, Human
ccuuuauuguguuugucauua

SEQ ID NO: 2589238 - RNA, 13 nt, Human
ccuuuauuuuaga

SEQ ID NO: 2589239 - RNA, 19 nt, Human
ccuucucugucucaugugu

SEQ ID NO: 2589240 - RNA, 13 nt, Human
ccuucucuguuca

SEQ ID NO: 2589241 - RNA, 17 nt, Human
ccuucucuguucauuuc

SEQ ID NO: 2589242 - RNA, 18 nt, Human
ccuucucuguucauuucc

SEQ ID NO: 2589243 - RNA, 17 nt, Human
ccuucucuucacaguca

SEQ ID NO: 2589244 - RNA, 21 nt, Human
ccuucuguccuacucuguguc

SEQ ID NO: 2589245 - RNA, 20 nt, Human
ccuucuguccuacucugugu

SEQ ID NO: 2589246 - RNA, 17 nt, Human
ccuucuguccugguguc

SEQ ID NO: 2589247 - RNA, 16 nt, Human
ccuucuguccuggugu

SEQ ID NO: 2589248 - RNA, 19 nt, Human
ccuucucuguucauuuccu

SEQ ID NO: 2589249 - RNA, 21 nt, Human
ccuucucuguucauuuccuca

SEQ ID NO: 2589250 - RNA, 15 nt, Human
ccuucuguccuggug

SEQ ID NO: 2589251 - RNA, 14 nt, Human
ccuucucuuaauuu

SEQ ID NO: 2589252 - RNA, 22 nt, Human
ccuucuguccuacucuguguca

SEQ ID NO: 2589253 - RNA, 16 nt, Human
ccuucucugaaggaca

SEQ ID NO: 2589254 - RNA, 14 nt, Human
ccuucucugaagga

SEQ ID NO: 2589255 - RNA, 13 nt, Human
ccuucucugcucc

SEQ ID NO: 2589256 - RNA, 14 nt, Human
ccuucucugcucca

SEQ ID NO: 2589257 - RNA, 16 nt, Human
ccuucucugcuccacc

SEQ ID NO: 2589258 - RNA, 17 nt, Human
ccuucucugcuccacca

SEQ ID NO: 2589259 - RNA, 20 nt, Human
ccuucucugcuccaccacau

SEQ ID NO: 2589260 - RNA, 17 nt, Human
ccuucucugucucaugu

SEQ ID NO: 2589261 - RNA, 21 nt, Human
ccuucucuguagggaacucug

SEQ ID NO: 2589262 - RNA, 22 nt, Human
ccuucucugcuccaccacaucc

SEQ ID NO: 2589263 - RNA, 23 nt, Human
ccuucucuccagccccuggaugc

SEQ ID NO: 2589264 - RNA, 21 nt, Human
ccuucucuccagccccuggau

SEQ ID NO: 2589265 - RNA, 20 nt, Human
ccuucucuccuccccaaauc

SEQ ID NO: 2589266 - RNA, 17 nt, Human
ccuucucuccuccccaa

SEQ ID NO: 2589267 - RNA, 20 nt, Human
ccuucucucucaauuuuugg

SEQ ID NO: 2589268 - RNA, 16 nt, Human
ccuucucuccucccca

SEQ ID NO: 2589269 - RNA, 15 nt, Human
ccuucucuccucccc

SEQ ID NO: 2589270 - RNA, 22 nt, Human
ccuuccucuccacccucccaga

SEQ ID NO: 2589271 - RNA, 20 nt, Human
ccuuccucuccacugccuuc

SEQ ID NO: 2589272 - RNA, 16 nt, Human
ccuuccuacagauagu

SEQ ID NO: 2589273 - RNA, 20 nt, Human
ccuuccuacacccuuggacu

SEQ ID NO: 2589274 - RNA, 21 nt, Human
ccuuccuaauuccacagcugc

SEQ ID NO: 2589275 - RNA, 22 nt, Human
ccuuccucaguuuaauccuucu

SEQ ID NO: 2589276 - RNA, 15 nt, Human
ccuuccucacuucca

SEQ ID NO: 2589277 - RNA, 14 nt, Human
ccuuccucacugcc

SEQ ID NO: 2589278 - RNA, 19 nt, Human
ccuuccucauccaccccau

SEQ ID NO: 2589279 - RNA, 18 nt, Human
ccuuccucauccacccca

SEQ ID NO: 2589280 - RNA, 17 nt, Human
ccuuccucauccacccc

SEQ ID NO: 2589281 - RNA, 16 nt, Human
ccuuccucauccaccc

SEQ ID NO: 2589282 - RNA, 21 nt, Human
ccuuccucauccaccccaucc

SEQ ID NO: 2589283 - RNA, 20 nt, Human
ccuuccucauccaccccauc

SEQ ID NO: 2589284 - RNA, 22 nt, Human
ccuuccucccaccucccccucc

SEQ ID NO: 2589285 - RNA, 15 nt, Human
ccuuccucuccacug

SEQ ID NO: 2589286 - RNA, 14 nt, Human
ccuuccucuccacu

SEQ ID NO: 2589287 - RNA, 12 nt, Human
ccuuccuccugg

SEQ ID NO: 2589288 - RNA, 13 nt, Human
ccuuccuccuggg

SEQ ID NO: 2589289 - RNA, 17 nt, Human
ccuuccucgcagagagg

SEQ ID NO: 2589290 - RNA, 15 nt, Human
ccuuccucgcagaga

SEQ ID NO: 2589291 - RNA, 19 nt, Human
ccuuccucgcagagaggcc

SEQ ID NO: 2589292 - RNA, 21 nt, Human
ccuuccucuccacccucccag

SEQ ID NO: 2589293 - RNA, 20 nt, Human
ccuucucuccagccccugga

SEQ ID NO: 2589294 - RNA, 17 nt, Human
ccuuccucuccacugcc

SEQ ID NO: 2589295 - RNA, 16 nt, Human
ccuuccucuccacugc

SEQ ID NO: 2589296 - RNA, 20 nt, Human
ccuucccccucccagggcca

SEQ ID NO: 2589297 - RNA, 16 nt, Human
ccuucccccucccagg

SEQ ID NO: 2589298 - RNA, 17 nt, Human
ccuucccccucccaggg

SEQ ID NO: 2589299 - RNA, 15 nt, Human
ccuuccccagcgucc

SEQ ID NO: 2589300 - RNA, 13 nt, Human
ccuuccccauggg

SEQ ID NO: 2589301 - RNA, 19 nt, Human
ccuucccccuccaauccca

SEQ ID NO: 2589302 - RNA, 19 nt, Human
ccuuccccacugcacacac

SEQ ID NO: 2589303 - RNA, 20 nt, Human
ccuuccccacugccugccca

SEQ ID NO: 2589304 - RNA, 23 nt, Human
ccuucccaugacccaggcugggc

SEQ ID NO: 2589305 - RNA, 12 nt, Human
ccuuccccacug

SEQ ID NO: 2589306 - RNA, 13 nt, Human
ccuuccccagccu

SEQ ID NO: 2589307 - RNA, 22 nt, Human
ccuuccccacugccugcccacc

SEQ ID NO: 2589308 - RNA, 15 nt, Human
ccuuccccagccucu

SEQ ID NO: 2589309 - RNA, 16 nt, Human
ccuuccccuccuucuc

SEQ ID NO: 2589310 - RNA, 19 nt, Human
ccuuccccucccuggcucc

SEQ ID NO: 2589311 - RNA, 22 nt, Human
ccuuccccucccuggcucccau

SEQ ID NO: 2589312 - RNA, 23 nt, Human
ccuuccccgagggaugaugccac

SEQ ID NO: 2589313 - RNA, 13 nt, Human
ccuuccccgaggg

SEQ ID NO: 2589314 - RNA, 15 nt, Human
ccuuccccucccugg

SEQ ID NO: 2589315 - RNA, 17 nt, Human
ccuuccccucccuggcu

SEQ ID NO: 2589316 - RNA, 18 nt, Human
ccuuccccucccuggcuc

SEQ ID NO: 2589317 - RNA, 18 nt, Human
ccuuccccuugcccaggg

SEQ ID NO: 2589318 - RNA, 20 nt, Human
ccuuccccuugcccagggcu

SEQ ID NO: 2589319 - RNA, 15 nt, Human
ccuucccuagcuuua

SEQ ID NO: 2589320 - RNA, 12 nt, Human
ccuucccuagcu

SEQ ID NO: 2589321 - RNA, 23 nt, Human
ccuucccucaccuuggcaccaga

SEQ ID NO: 2589322 - RNA, 22 nt, Human
ccuuccccuugcccagggcuca

SEQ ID NO: 2589323 - RNA, 19 nt, Human
ccuuccuaauuccacagcu

SEQ ID NO: 2589324 - RNA, 20 nt, Human
ccuuccuaauuccacagcug

SEQ ID NO: 2589325 - RNA, 19 nt, Human
ccuuccguaacccaacucu

SEQ ID NO: 2589326 - RNA, 18 nt, Human
ccuuccuaauuccacagc

SEQ ID NO: 2589327 - RNA, 17 nt, Human
ccuucccuucuccaucu

SEQ ID NO: 2589328 - RNA, 16 nt, Human
ccuucccuugagcccu

SEQ ID NO: 2589329 - RNA, 24 nt, Human
ccuucccucaccuuggcaccagac

SEQ ID NO: 2589330 - RNA, 12 nt, Human
ccuucccucucc

SEQ ID NO: 2589331 - RNA, 11 nt, Human
ccuucccuggc

SEQ ID NO: 2589332 - RNA, 14 nt, Human
ccuucccugggcug

SEQ ID NO: 2589333 - RNA, 12 nt, Human
ccuucccugcaa

SEQ ID NO: 2589334 - RNA, 16 nt, Human
ccuucccugucccucu

SEQ ID NO: 2589335 - RNA, 15 nt, Human
ccuucccugucccuc

SEQ ID NO: 2589336 - RNA, 14 nt, Human
ccuucccugucccu

SEQ ID NO: 2589337 - RNA, 13 nt, Human
ccuucccuguccc

SEQ ID NO: 2589338 - RNA, 12 nt, Human
ccuucccugucc

SEQ ID NO: 2589339 - RNA, 19 nt, Human
ccuucccugggcugugcua

SEQ ID NO: 2589340 - RNA, 18 nt, Human
ccuucccugggcugugcu

SEQ ID NO: 2589341 - RNA, 15 nt, Human
ccuucccugggcugu

SEQ ID NO: 2589342 - RNA, 17 nt, Human
ccuucccugucccucua

SEQ ID NO: 2589343 - RNA, 18 nt, Human
ccuucccugucugccagg

SEQ ID NO: 2589344 - RNA, 16 nt, Human
cucccugacccgucua

SEQ ID NO: 2589345 - RNA, 19 nt, Human
cucccugaagccagccuuc

SEQ ID NO: 2589346 - RNA, 18 nt, Human
cucccugaagccuuugca

SEQ ID NO: 2589347 - RNA, 17 nt, Human
cucccuccugccgacuc

SEQ ID NO: 2589348 - RNA, 18 nt, Human
cucccugaagccagccuu

SEQ ID NO: 2589349 - RNA, 17 nt, Human
cucccugaagccagccu

SEQ ID NO: 2589350 - RNA, 16 nt, Human
cucccugaagccagcc

SEQ ID NO: 2589351 - RNA, 15 nt, Human
cucccugaagccagc

SEQ ID NO: 2589352 - RNA, 20 nt, Human
cucccugaaguaagcaaaga

SEQ ID NO: 2589353 - RNA, 14 nt, Human
cucccugaagccag

SEQ ID NO: 2589354 - RNA, 13 nt, Human
cucccugaagcca

SEQ ID NO: 2589355 - RNA, 19 nt, Human
cucccugaaccaucccuga

SEQ ID NO: 2589356 - RNA, 21 nt, Human
cucccugaaaauguuuuucug

SEQ ID NO: 2589357 - RNA, 23 nt, Human
cucccugaaaauguuuuucugcc

SEQ ID NO: 2589358 - RNA, 16 nt, Human
cucccucucacugucu

SEQ ID NO: 2589359 - RNA, 15 nt, Human
cucccucucacuguc

SEQ ID NO: 2589360 - RNA, 14 nt, Human
cucccucucacugu

SEQ ID NO: 2589361 - RNA, 10 nt, Human
cucccucuca

SEQ ID NO: 2589362 - RNA, 14 nt, Human
cucccucuauuuau

SEQ ID NO: 2589363 - RNA, 20 nt, Human
cucccucuacugggagccua

SEQ ID NO: 2589364 - RNA, 19 nt, Human
cucccuccugccgacuccu

SEQ ID NO: 2589365 - RNA, 22 nt, Human
cucccucucacugucugagagu

SEQ ID NO: 2589366 - RNA, 21 nt, Human
cucccucucacugucugagag

SEQ ID NO: 2589367 - RNA, 20 nt, Human
cucccucuuucccucccuuc

SEQ ID NO: 2589368 - RNA, 12 nt, Human
cucccucccaca

SEQ ID NO: 2589369 - RNA, 13 nt, Human
cucccucuacugg

SEQ ID NO: 2589370 - RNA, 19 nt, Human
cucccucuacugggagccu

SEQ ID NO: 2589371 - RNA, 17 nt, Human
cucccucgucgagcugg

SEQ ID NO: 2589372 - RNA, 18 nt, Human
cuccccucacagccucug

SEQ ID NO: 2589373 - RNA, 17 nt, Human
cuccccucacagccucu

SEQ ID NO: 2589374 - RNA, 16 nt, Human
cuccccucacagccuc

SEQ ID NO: 2589375 - RNA, 15 nt, Human
cuccccucacagccu

SEQ ID NO: 2589376 - RNA, 18 nt, Human
cuccccucaaagucugca

SEQ ID NO: 2589377 - RNA, 10 nt, Human
cuccccucaa

SEQ ID NO: 2589378 - RNA, 21 nt, Human
cuccccuauccacccagccca

SEQ ID NO: 2589379 - RNA, 23 nt, Human
cuccccuauccacccagcccauu

SEQ ID NO: 2589380 - RNA, 14 nt, Human
cuccccucacagcc

SEQ ID NO: 2589381 - RNA, 20 nt, Human
cuccccucaaagucugcaac

SEQ ID NO: 2589382 - RNA, 13 nt, Human
cuccccucacagc

SEQ ID NO: 2589383 - RNA, 16 nt, Human
cuccccggcccuacca

SEQ ID NO: 2589384 - RNA, 14 nt, Human
cuccccggcccuac

SEQ ID NO: 2589385 - RNA, 14 nt, Human
cuccccggcucgag

SEQ ID NO: 2589386 - RNA, 15 nt, Human
cuccccuaccacugu

SEQ ID NO: 2589387 - RNA, 17 nt, Human
cuccccuauccacccag

SEQ ID NO: 2589388 - RNA, 18 nt, Human
cuccccuauccacccagc

SEQ ID NO: 2589389 - RNA, 19 nt, Human
cuccccuauccacccagcc

SEQ ID NO: 2589390 - RNA, 16 nt, Human
cuccccuaaugccugc

SEQ ID NO: 2589391 - RNA, 15 nt, Human
cuccccuaaugccug

SEQ ID NO: 2589392 - RNA, 23 nt, Human
cucccagcugacaguccucucca

SEQ ID NO: 2589393 - RNA, 20 nt, Human
cucccagcugacaguccucu

SEQ ID NO: 2589394 - RNA, 18 nt, Human
cucccagcugacaguccu

SEQ ID NO: 2589395 - RNA, 11 nt, Human
cucccaggaac

SEQ ID NO: 2589396 - RNA, 21 nt, Human
cucccagcugacaguccucuc

SEQ ID NO: 2589397 - RNA, 18 nt, Human
cucccaggaacugggcca

SEQ ID NO: 2589398 - RNA, 16 nt, Human
cucccaggagacaguu

SEQ ID NO: 2589399 - RNA, 11 nt, Human
cucccaggaag

SEQ ID NO: 2589400 - RNA, 18 nt, Human
cucccccccaugcacugu

SEQ ID NO: 2589401 - RNA, 15 nt, Human
cucccccccaugcac

SEQ ID NO: 2589402 - RNA, 19 nt, Human
cucccaggagacaguucaa

SEQ ID NO: 2589403 - RNA, 19 nt, Human
cucccccccggggcugggu

SEQ ID NO: 2589404 - RNA, 18 nt, Human
cucccccccggggcuggg

SEQ ID NO: 2589405 - RNA, 15 nt, Human
cucccccccggggcu

SEQ ID NO: 2589406 - RNA, 14 nt, Human
cucccccccggggc

SEQ ID NO: 2589407 - RNA, 14 nt, Human
cucccccgccacuc

SEQ ID NO: 2589408 - RNA, 21 nt, Human
cucccccccggggcuggguug

SEQ ID NO: 2589409 - RNA, 12 nt, Human
cucccccgccac

SEQ ID NO: 2589410 - RNA, 13 nt, Human
cucccccccgggg

SEQ ID NO: 2589411 - RNA, 17 nt, Human
cuccccccccccuccaa

SEQ ID NO: 2589412 - RNA, 16 nt, Human
cuccccccccccucca

SEQ ID NO: 2589413 - RNA, 20 nt, Human
cucccccccaugcacuguga

SEQ ID NO: 2589414 - RNA, 21 nt, Human
cucccccccaugcacugugaa

SEQ ID NO: 2589415 - RNA, 17 nt, Human
cucccccgggaggggcc

SEQ ID NO: 2589416 - RNA, 13 nt, Human
cucccccgggagg

SEQ ID NO: 2589417 - RNA, 15 nt, Human
cucccccgccacucc

SEQ ID NO: 2589418 - RNA, 21 nt, Human
cucccccgggaggggcccgcu

SEQ ID NO: 2589419 - RNA, 18 nt, Human
cucccccgggaggggccc

SEQ ID NO: 2589420 - RNA, 22 nt, Human
cucccccgggaggggcccgcuu

SEQ ID NO: 2589421 - RNA, 13 nt, Human
cuccccggcccua

SEQ ID NO: 2589422 - RNA, 17 nt, Human
cucccccucccccuucu

SEQ ID NO: 2589423 - RNA, 11 nt, Human
cucccccugcc

SEQ ID NO: 2589424 - RNA, 17 nt, Human
cucauguaucaucugga

SEQ ID NO: 2589425 - RNA, 20 nt, Human
cucaugcaucuccaccugcu

SEQ ID NO: 2589426 - RNA, 19 nt, Human
cucauguaucaucuggaua

SEQ ID NO: 2589427 - RNA, 16 nt, Human
cucauguacauacccu

SEQ ID NO: 2589428 - RNA, 16 nt, Human
cucauguaucaucugg

SEQ ID NO: 2589429 - RNA, 20 nt, Human
cucauggccccucugaccug

SEQ ID NO: 2589430 - RNA, 16 nt, Human
cucaugggguccaagu

SEQ ID NO: 2589431 - RNA, 15 nt, Human
cucaugguggguuca

SEQ ID NO: 2589432 - RNA, 20 nt, Human
cuccaggcuguaucccauga

SEQ ID NO: 2589433 - RNA, 23 nt, Human
cuccaggcuccuuuagcgcccag

SEQ ID NO: 2589434 - RNA, 15 nt, Human
cuccaggcuccuuua

SEQ ID NO: 2589435 - RNA, 17 nt, Human
cuccagguggcucugag

SEQ ID NO: 2589436 - RNA, 14 nt, Human
cuccagguggcucu

SEQ ID NO: 2589437 - RNA, 23 nt, Human
cuccaggugcacaagcuccaagc

SEQ ID NO: 2589438 - RNA, 17 nt, Human
cuccagguuuuucaauu

SEQ ID NO: 2589439 - RNA, 16 nt, Human
cuccagguuuuucaau

SEQ ID NO: 2589440 - RNA, 15 nt, Human
cuccagguuuuucaa

SEQ ID NO: 2589441 - RNA, 14 nt, Human
cuccagguuuuuca

SEQ ID NO: 2589442 - RNA, 13 nt, Human
cuccagguuuuuc

SEQ ID NO: 2589443 - RNA, 12 nt, Human
cuccagguuuuu

SEQ ID NO: 2589444 - RNA, 14 nt, Human
cuccaggugugcac

SEQ ID NO: 2589445 - RNA, 21 nt, Human
cuccagguuuuucaauuaaac

SEQ ID NO: 2589446 - RNA, 20 nt, Human
cuccagguuuuucaauuaaa

SEQ ID NO: 2589447 - RNA, 19 nt, Human
cuccagguuuuucaauuaa

SEQ ID NO: 2589448 - RNA, 18 nt, Human
cuccagguuuuucaauua

SEQ ID NO: 2589449 - RNA, 23 nt, Human
cuccagguuuuucaauuaaacgg

SEQ ID NO: 2589450 - RNA, 22 nt, Human
cuccagguuuuucaauuaaacg

SEQ ID NO: 2589451 - RNA, 14 nt, Human
cuccaguauucuug

SEQ ID NO: 2589452 - RNA, 21 nt, Human
cucccacgugggagacaagaa

SEQ ID NO: 2589453 - RNA, 20 nt, Human
cucccacagugacucgggcu

SEQ ID NO: 2589454 - RNA, 14 nt, Human
cucccacagugacu

SEQ ID NO: 2589455 - RNA, 14 nt, Human
cucccacugaguuu

SEQ ID NO: 2589456 - RNA, 12 nt, Human
cucccacaguga

SEQ ID NO: 2589457 - RNA, 11 nt, Human
cucccacagug

SEQ ID NO: 2589458 - RNA, 21 nt, Human
cucccacaggcccuuccucuc

SEQ ID NO: 2589459 - RNA, 20 nt, Human
cucccacaggcccuuccucu

SEQ ID NO: 2589460 - RNA, 16 nt, Human
cucccacaggcccuuc

SEQ ID NO: 2589461 - RNA, 14 nt, Human
cucccacaggcccu

SEQ ID NO: 2589462 - RNA, 15 nt, Human
cucccacaggcccuu

SEQ ID NO: 2589463 - RNA, 23 nt, Human
cucccagcucuagacaacccugc

SEQ ID NO: 2589464 - RNA, 11 nt, Human
cucccagcuga

SEQ ID NO: 2589465 - RNA, 20 nt, Human
cucccagaccugccucuucc

SEQ ID NO: 2589466 - RNA, 17 nt, Human
cucccagaccugccucu

SEQ ID NO: 2589467 - RNA, 22 nt, Human
cucccacuuggccaagcaggga

SEQ ID NO: 2589468 - RNA, 15 nt, Human
cucccagaccugccu

SEQ ID NO: 2589469 - RNA, 16 nt, Human
cucccagaacacacuc

SEQ ID NO: 2589470 - RNA, 15 nt, Human
cucccacuuggccaa

SEQ ID NO: 2589471 - RNA, 13 nt, Human
cucccacuuggcc

SEQ ID NO: 2589472 - RNA, 24 nt, Human
cucccagaacacacuccaucagcu

SEQ ID NO: 2589473 - RNA, 18 nt, Human
cucccacuucccugacac

SEQ ID NO: 2589474 - RNA, 19 nt, Human
cucccacuucccugacacu

SEQ ID NO: 2589475 - RNA, 23 nt, Human
cucccacugggguccagggagca

SEQ ID NO: 2589476 - RNA, 23 nt, Human
cuccgcuuucuacccagcgagcc

SEQ ID NO: 2589477 - RNA, 22 nt, Human
cuccggcgucagccuccagccu

SEQ ID NO: 2589478 - RNA, 21 nt, Human
cuccggcgucagccuccagcc

SEQ ID NO: 2589479 - RNA, 20 nt, Human
cuccggcgucagccuccagc

SEQ ID NO: 2589480 - RNA, 18 nt, Human
cuccggcgucagccucca

SEQ ID NO: 2589481 - RNA, 17 nt, Human
cuccggcgucagccucc

SEQ ID NO: 2589482 - RNA, 16 nt, Human
cuccggcgucagccuc

SEQ ID NO: 2589483 - RNA, 14 nt, Human
cuccggcgucagcc

SEQ ID NO: 2589484 - RNA, 22 nt, Human
cuccggccugaugacagagcga

SEQ ID NO: 2589485 - RNA, 23 nt, Human
cuccggcgucagccuccagccuc

SEQ ID NO: 2589486 - RNA, 17 nt, Human
cuccuaccccucccagc

SEQ ID NO: 2589487 - RNA, 16 nt, Human
cuccuaccccucccag

SEQ ID NO: 2589488 - RNA, 14 nt, Human
cuccuaccccuccc

SEQ ID NO: 2589489 - RNA, 13 nt, Human
cuccggagacagg

SEQ ID NO: 2589490 - RNA, 16 nt, Human
cuccggaucgaggccu

SEQ ID NO: 2589491 - RNA, 22 nt, Human
cuccggagugagaagcuuugcc

SEQ ID NO: 2589492 - RNA, 20 nt, Human
cuccggccugaugacagagc

SEQ ID NO: 2589493 - RNA, 14 nt, Human
cuccggccuccccu

SEQ ID NO: 2589494 - RNA, 15 nt, Human
cuccggccuccccuc

SEQ ID NO: 2589495 - RNA, 21 nt, Human
cuccggcccuccuacccugcg

SEQ ID NO: 2589496 - RNA, 13 nt, Human
cuccucugacuca

SEQ ID NO: 2589497 - RNA, 18 nt, Human
cuccucugacucagggcu

SEQ ID NO: 2589498 - RNA, 19 nt, Human
cuccucugacucagggcuc

SEQ ID NO: 2589499 - RNA, 20 nt, Human
cuccucugacucagggcucc

SEQ ID NO: 2589500 - RNA, 22 nt, Human
cuccucugacucagggcuccug

SEQ ID NO: 2589501 - RNA, 16 nt, Human
cuccucugcagugccu

SEQ ID NO: 2589502 - RNA, 18 nt, Human
cuccucugcagugccuug

SEQ ID NO: 2589503 - RNA, 17 nt, Human
cuccucugcagugccuu

SEQ ID NO: 2589504 - RNA, 11 nt, Human
cuccucugcca

SEQ ID NO: 2589505 - RNA, 12 nt, Human
cuccucugccac

SEQ ID NO: 2589506 - RNA, 14 nt, Human
cuccucugccaccu

SEQ ID NO: 2589507 - RNA, 15 nt, Human
cuccucugccaccuc

SEQ ID NO: 2589508 - RNA, 16 nt, Human
cuccucugccaccucc

SEQ ID NO: 2589509 - RNA, 17 nt, Human
cuccucugccaccuccc

SEQ ID NO: 2589510 - RNA, 12 nt, Human
cuccuagacuga

SEQ ID NO: 2589511 - RNA, 22 nt, Human
cuccuaccgaaaccuugccuuu

SEQ ID NO: 2589512 - RNA, 13 nt, Human
cuccuaccuggua

SEQ ID NO: 2589513 - RNA, 16 nt, Human
cuccuaccucagccua

SEQ ID NO: 2589514 - RNA, 18 nt, Human
cuccuaccucagccuaga

SEQ ID NO: 2589515 - RNA, 12 nt, Human
cuccuaccucag

SEQ ID NO: 2589516 - RNA, 13 nt, Human
cuccuaccucagc

SEQ ID NO: 2589517 - RNA, 14 nt, Human
cuccuaccucagcc

SEQ ID NO: 2589518 - RNA, 15 nt, Human
cuccuaccucagccu

SEQ ID NO: 2589519 - RNA, 21 nt, Human
cuccuaccgaaaccuugccuu

SEQ ID NO: 2589520 - RNA, 23 nt, Human
cuccuaccccucccagcugacag

SEQ ID NO: 2589521 - RNA, 18 nt, Human
cuccuacccugcgcccag

SEQ ID NO: 2589522 - RNA, 19 nt, Human
cuccuaccccucccagcug

SEQ ID NO: 2589523 - RNA, 18 nt, Human
cuccuaccccucccagcu

SEQ ID NO: 2589524 - RNA, 15 nt, Human
cuccuacccugcgcc

SEQ ID NO: 2589525 - RNA, 23 nt, Human
cuccuguaacauacuggccugga

SEQ ID NO: 2589526 - RNA, 22 nt, Human
cuccuguaacauacuggccugg

SEQ ID NO: 2589527 - RNA, 21 nt, Human
cuccuguaaaugguguacaua

SEQ ID NO: 2589528 - RNA, 17 nt, Human
cuccugguggguccagg

SEQ ID NO: 2589529 - RNA, 20 nt, Human
cuccuguaacauacuggccu

SEQ ID NO: 2589530 - RNA, 16 nt, Human
cuccuguaccucuuga

SEQ ID NO: 2589531 - RNA, 20 nt, Human
cuccuguccucccauccccu

SEQ ID NO: 2589532 - RNA, 15 nt, Human
cuccuguccucccau

SEQ ID NO: 2589533 - RNA, 13 nt, Human
cuccuguccuccc

SEQ ID NO: 2589534 - RNA, 12 nt, Human
cuccuguccucc

SEQ ID NO: 2589535 - RNA, 18 nt, Human
cuccuguaauuccuaccu

SEQ ID NO: 2589536 - RNA, 14 nt, Human
cuccuguccaaccu

SEQ ID NO: 2589537 - RNA, 16 nt, Human
cuccuguaauuccuac

SEQ ID NO: 2589538 - RNA, 14 nt, Human
cuccuguaauuccu

SEQ ID NO: 2589539 - RNA, 17 nt, Human
cuccuguacuuuuucca

SEQ ID NO: 2589540 - RNA, 21 nt, Human
cuccugggcccucucugcucu

SEQ ID NO: 2589541 - RNA, 22 nt, Human
cuccugggcccucucugcucug

SEQ ID NO: 2589542 - RNA, 13 nt, Human
cuccugggcucag

SEQ ID NO: 2589543 - RNA, 23 nt, Human
cuccuggguuuuguauucucuga

SEQ ID NO: 2589544 - RNA, 22 nt, Human
cuccuggguuuuguauucucug

SEQ ID NO: 2589545 - RNA, 20 nt, Human
cuccugguggguccaggggc

SEQ ID NO: 2589546 - RNA, 14 nt, Human
cuccuggugggucc

SEQ ID NO: 2589547 - RNA, 15 nt, Human
cuccuggucuugaga

SEQ ID NO: 2589548 - RNA, 23 nt, Human
cuccuggucuugagaugucuucu

SEQ ID NO: 2589549 - RNA, 17 nt, Human
cuccuuucacaaccuuc

SEQ ID NO: 2589550 - RNA, 16 nt, Human
cuccuuucacaaccuu

SEQ ID NO: 2589551 - RNA, 15 nt, Human
cuccuuucaccacau

SEQ ID NO: 2589552 - RNA, 17 nt, Human
cuccuugugguuuaugu

SEQ ID NO: 2589553 - RNA, 18 nt, Human
cuccuugugguuuauguc

SEQ ID NO: 2589554 - RNA, 12 nt, Human
cuccuuguuccu

SEQ ID NO: 2589555 - RNA, 13 nt, Human
cuccuuguuccua

SEQ ID NO: 2589556 - RNA, 14 nt, Human
cuccuuguuccuag

SEQ ID NO: 2589557 - RNA, 15 nt, Human
cuccuuguuccuaga

SEQ ID NO: 2589558 - RNA, 13 nt, Human
cuccuuucacaac

SEQ ID NO: 2589559 - RNA, 18 nt, Human
cuccuuguggccugggcc

SEQ ID NO: 2589560 - RNA, 16 nt, Human
cuccuuguccacccac

SEQ ID NO: 2589561 - RNA, 20 nt, Human
cuccuuguggccugggccuc

SEQ ID NO: 2589562 - RNA, 15 nt, Human
cuccuuguccaccca

SEQ ID NO: 2589563 - RNA, 17 nt, Human
cuccugucuaacugcug

SEQ ID NO: 2589564 - RNA, 16 nt, Human
cuccuuguggccuggg

SEQ ID NO: 2589565 - RNA, 14 nt, Human
cuccuuguguuacu

SEQ ID NO: 2589566 - RNA, 21 nt, Human
cuccuguccucccauccccug

SEQ ID NO: 2589567 - RNA, 13 nt, Human
cuccuguccuuua

SEQ ID NO: 2589568 - RNA, 13 nt, Human
cuccugucugcca

SEQ ID NO: 2589569 - RNA, 16 nt, Human
cuccuuguaaagacug

SEQ ID NO: 2589570 - RNA, 16 nt, Human
cuccugucugccagcc

SEQ ID NO: 2589571 - RNA, 14 nt, Human
cuccugucugccag

SEQ ID NO: 2589572 - RNA, 15 nt, Human
cuccugucugccagc

SEQ ID NO: 2589573 - RNA, 15 nt, Human
cuccucuguccaggc

SEQ ID NO: 2589574 - RNA, 15 nt, Human
cuccucuguccaggg

SEQ ID NO: 2589575 - RNA, 16 nt, Human
cuccucuguccagggc

SEQ ID NO: 2589576 - RNA, 12 nt, Human
cuccucugucca

SEQ ID NO: 2589577 - RNA, 15 nt, Human
cuccucugggcagga

SEQ ID NO: 2589578 - RNA, 23 nt, Human
cuccucugggcaggaccucagag

SEQ ID NO: 2589579 - RNA, 14 nt, Human
cuccucuguccagg

SEQ ID NO: 2589580 - RNA, 17 nt, Human
cuccucuguccagggcc

SEQ ID NO: 2589581 - RNA, 18 nt, Human
cuccucuguccagggccc

SEQ ID NO: 2589582 - RNA, 14 nt, Human
cuccucuuccaggc

SEQ ID NO: 2589583 - RNA, 13 nt, Human
cuccucugucccu

SEQ ID NO: 2589584 - RNA, 14 nt, Human
cuccucugcugcug

SEQ ID NO: 2589585 - RNA, 13 nt, Human
cuccucugcugcu

SEQ ID NO: 2589586 - RNA, 15 nt, Human
cuccucugcugcugg

SEQ ID NO: 2589587 - RNA, 21 nt, Human
cuccucuggacggcaggcuca

SEQ ID NO: 2589588 - RNA, 12 nt, Human
cuccucugggca

SEQ ID NO: 2589589 - RNA, 13 nt, Human
cuccucugggcag

SEQ ID NO: 2589590 - RNA, 15 nt, Human
cuccugggcccucuc

SEQ ID NO: 2589591 - RNA, 17 nt, Human
cuccugggcccucucug

SEQ ID NO: 2589592 - RNA, 19 nt, Human
cuccugggcccucucugcu

SEQ ID NO: 2589593 - RNA, 20 nt, Human
cuccugggcccucucugcuc

SEQ ID NO: 2589594 - RNA, 18 nt, Human
cuccugggcuaagugauc

SEQ ID NO: 2589595 - RNA, 19 nt, Human
cuccuggccucaagugauu

SEQ ID NO: 2589596 - RNA, 22 nt, Human
cuccuggcucuugauacccccc

SEQ ID NO: 2589597 - RNA, 16 nt, Human
cuccucuugccacugc

SEQ ID NO: 2589598 - RNA, 15 nt, Human
cuccucuugccacug

SEQ ID NO: 2589599 - RNA, 12 nt, Human
cuccucuugcca

SEQ ID NO: 2589600 - RNA, 19 nt, Human
cuccucuucugacgugccu

SEQ ID NO: 2589601 - RNA, 23 nt, Human
cuccucuucuuuuuuuucauuau

SEQ ID NO: 2589602 - RNA, 19 nt, Human
cuccuggcccacugcaucg

SEQ ID NO: 2589603 - RNA, 20 nt, Human
cucugcacaagcugcacccu

SEQ ID NO: 2589604 - RNA, 21 nt, Human
cucugcacaagcugcacccuc

SEQ ID NO: 2589605 - RNA, 16 nt, Human
cucugcacuccccugc

SEQ ID NO: 2589606 - RNA, 15 nt, Human
cucugcacuccccug

SEQ ID NO: 2589607 - RNA, 14 nt, Human
cucugcacuccccu

SEQ ID NO: 2589608 - RNA, 14 nt, Human
cucugcacaugucu

SEQ ID NO: 2589609 - RNA, 13 nt, Human
cucugcacauguc

SEQ ID NO: 2589610 - RNA, 10 nt, Human
cucugcacag

SEQ ID NO: 2589611 - RNA, 14 nt, Human
cucugcacagaugg

SEQ ID NO: 2589612 - RNA, 15 nt, Human
cucugcacagaugga

SEQ ID NO: 2589613 - RNA, 21 nt, Human
cucuguccccuucucucaucu

SEQ ID NO: 2589614 - RNA, 18 nt, Human
cucuguccccuucucuca

SEQ ID NO: 2589615 - RNA, 17 nt, Human
cucuguccccuucucuc

SEQ ID NO: 2589616 - RNA, 15 nt, Human
cucuguccccuucuc

SEQ ID NO: 2589617 - RNA, 14 nt, Human
cucugcuggccgga

SEQ ID NO: 2589618 - RNA, 14 nt, Human
cucuguccccuucu

SEQ ID NO: 2589619 - RNA, 16 nt, Human
cucuguacagagccca

SEQ ID NO: 2589620 - RNA, 22 nt, Human
cucugucccacuuggcaucagc

SEQ ID NO: 2589621 - RNA, 22 nt, Human
cucuguccagggcccugagcuc

SEQ ID NO: 2589622 - RNA, 18 nt, Human
cucuguccugacuucagg

SEQ ID NO: 2589623 - RNA, 12 nt, Human
cucuuagcugag

SEQ ID NO: 2589624 - RNA, 19 nt, Human
cucuuagcuccccuccaac

SEQ ID NO: 2589625 - RNA, 13 nt, Human
cucuguccugacu

SEQ ID NO: 2589626 - RNA, 11 nt, Human
cucuguccuga

SEQ ID NO: 2589627 - RNA, 23 nt, Human
cucuguccccuucucucaucucu

SEQ ID NO: 2589628 - RNA, 21 nt, Human
cucuuauagaauauuuauuac

SEQ ID NO: 2589629 - RNA, 20 nt, Human
cucuuauagaauauuuauua

SEQ ID NO: 2589630 - RNA, 18 nt, Human
cucuuauagaauauuuau

SEQ ID NO: 2589631 - RNA, 17 nt, Human
cucuuauagaauauuua

SEQ ID NO: 2589632 - RNA, 13 nt, Human
cucuuagcugagu

SEQ ID NO: 2589633 - RNA, 16 nt, Human
cucuuauagaauauuu

SEQ ID NO: 2589634 - RNA, 13 nt, Human
cucuuagcugucu

SEQ ID NO: 2589635 - RNA, 19 nt, Human
cucuuaggaagagaaacca

SEQ ID NO: 2589636 - RNA, 15 nt, Human
cucugcugcuggcug

SEQ ID NO: 2589637 - RNA, 14 nt, Human
cucugcugcuggcu

SEQ ID NO: 2589638 - RNA, 22 nt, Human
cucugcugcugucccucccccu

SEQ ID NO: 2589639 - RNA, 21 nt, Human
cucugcugcugucccuccccc

SEQ ID NO: 2589640 - RNA, 21 nt, Human
cucugcugccgccccacccag

SEQ ID NO: 2589641 - RNA, 16 nt, Human
cucugcugcugucccu

SEQ ID NO: 2589642 - RNA, 16 nt, Human
cucugcugcuggcugg

SEQ ID NO: 2589643 - RNA, 15 nt, Human
cucuguacagagccc

SEQ ID NO: 2589644 - RNA, 14 nt, Human
cucuguacagagcc

SEQ ID NO: 2589645 - RNA, 13 nt, Human
cucuguacagagc

SEQ ID NO: 2589646 - RNA, 11 nt, Human
cucugcugcuu

SEQ ID NO: 2589647 - RNA, 13 nt, Human
cucugcugccgcc

SEQ ID NO: 2589648 - RNA, 13 nt, Human
cucugcugcuuag

SEQ ID NO: 2589649 - RNA, 14 nt, Human
cucugcuggcccag

SEQ ID NO: 2589650 - RNA, 18 nt, Human
cucugcuggcccagccaa

SEQ ID NO: 2589651 - RNA, 14 nt, Human
cucugcucugcccu

SEQ ID NO: 2589652 - RNA, 13 nt, Human
cucugcucugccc

SEQ ID NO: 2589653 - RNA, 15 nt, Human
cucugcucugcccuu

SEQ ID NO: 2589654 - RNA, 12 nt, Human
cucugcucugcc

SEQ ID NO: 2589655 - RNA, 11 nt, Human
cucugcucugc

SEQ ID NO: 2589656 - RNA, 23 nt, Human
cucugcugacagacacaggcccg

SEQ ID NO: 2589657 - RNA, 13 nt, Human
cucugcugcuggc

SEQ ID NO: 2589658 - RNA, 13 nt, Human
cucugcugccaug

SEQ ID NO: 2589659 - RNA, 15 nt, Human
cucugcugccauggc

SEQ ID NO: 2589660 - RNA, 16 nt, Human
cucugcucgccuuagc

SEQ ID NO: 2589661 - RNA, 17 nt, Human
cucugcucgccuuagca

SEQ ID NO: 2589662 - RNA, 15 nt, Human
cucugcucugaggcu

SEQ ID NO: 2589663 - RNA, 17 nt, Human
cucugcuccuggagccu

SEQ ID NO: 2589664 - RNA, 20 nt, Human
cucugcugacagacacaggc

SEQ ID NO: 2589665 - RNA, 22 nt, Human
cucugcugacagacacaggccc

SEQ ID NO: 2589666 - RNA, 21 nt, Human
cucugcugacagacacaggcc

SEQ ID NO: 2589667 - RNA, 16 nt, Human
cucugcagcccaggga

SEQ ID NO: 2589668 - RNA, 14 nt, Human
cucugcagcccagg

SEQ ID NO: 2589669 - RNA, 16 nt, Human
cucugcagcugaccuc

SEQ ID NO: 2589670 - RNA, 15 nt, Human
cucugcagcugaccu

SEQ ID NO: 2589671 - RNA, 14 nt, Human
cucugcagcugacc

SEQ ID NO: 2589672 - RNA, 12 nt, Human
cucugcagcuga

SEQ ID NO: 2589673 - RNA, 20 nt, Human
cucugcaggaaauggcugug

SEQ ID NO: 2589674 - RNA, 17 nt, Human
cucugcacuccccugcu

SEQ ID NO: 2589675 - RNA, 15 nt, Human
cucugcagccagccc

SEQ ID NO: 2589676 - RNA, 16 nt, Human
cucugcagccagccca

SEQ ID NO: 2589677 - RNA, 17 nt, Human
cucugcagccagcccag

SEQ ID NO: 2589678 - RNA, 18 nt, Human
cucugcagccagcccagc

SEQ ID NO: 2589679 - RNA, 19 nt, Human
cucugcagccagcccagcc

SEQ ID NO: 2589680 - RNA, 22 nt, Human
cucugcuccuggagccuuugaa

SEQ ID NO: 2589681 - RNA, 14 nt, Human
cucugcuccuggag

SEQ ID NO: 2589682 - RNA, 14 nt, Human
cucugcaggcaccu

SEQ ID NO: 2589683 - RNA, 13 nt, Human
cucugcucgccuu

SEQ ID NO: 2589684 - RNA, 15 nt, Human
cucugcucgccuuag

SEQ ID NO: 2589685 - RNA, 21 nt, Human
cucugcuccucuccccagcaa

SEQ ID NO: 2589686 - RNA, 15 nt, Human
cucugcaggcaccuu

SEQ ID NO: 2589687 - RNA, 18 nt, Human
cucugcagcugaccucug

SEQ ID NO: 2589688 - RNA, 21 nt, Human
cucgugccagucgcgcugccu

SEQ ID NO: 2589689 - RNA, 18 nt, Human
cucgugauuggcauauaa

SEQ ID NO: 2589690 - RNA, 22 nt, Human
cucgugccagucgcgcugccug

SEQ ID NO: 2589691 - RNA, 24 nt, Human
cucgugccagucgcgcugccugug

SEQ ID NO: 2589692 - RNA, 18 nt, Human
cucuaucuugcucuguaa

SEQ ID NO: 2589693 - RNA, 16 nt, Human
cucuaucuugcucugu

SEQ ID NO: 2589694 - RNA, 20 nt, Human
cucuaugaacucuguuuucu

SEQ ID NO: 2589695 - RNA, 15 nt, Human
cucuaucuugcucug

SEQ ID NO: 2589696 - RNA, 17 nt, Human
cucuaugccagcucagu

SEQ ID NO: 2589697 - RNA, 16 nt, Human
cucguccucccccugc

SEQ ID NO: 2589698 - RNA, 17 nt, Human
cucguccucccccugcc

SEQ ID NO: 2589699 - RNA, 18 nt, Human
cucguccucccccugcca

SEQ ID NO: 2589700 - RNA, 20 nt, Human
cucguccucccccugccagu

SEQ ID NO: 2589701 - RNA, 22 nt, Human
cucguccucccccugccagugc

SEQ ID NO: 2589702 - RNA, 14 nt, Human
cucgucuucauuaa

SEQ ID NO: 2589703 - RNA, 17 nt, Human
cucgucugacugugugu

SEQ ID NO: 2589704 - RNA, 24 nt, Human
cucguccucccccugccagugccu

SEQ ID NO: 2589705 - RNA, 20 nt, Human
cucgucggggggacagcucc

SEQ ID NO: 2589706 - RNA, 17 nt, Human
cucgguguggagaagcg

SEQ ID NO: 2589707 - RNA, 15 nt, Human
cucguccucccccug

SEQ ID NO: 2589708 - RNA, 16 nt, Human
cucgguguggagaagc

SEQ ID NO: 2589709 - RNA, 19 nt, Human
cucggugguaccaggucuc

SEQ ID NO: 2589710 - RNA, 11 nt, Human
cucggugguac

SEQ ID NO: 2589711 - RNA, 18 nt, Human
cucgguggacccagggau

SEQ ID NO: 2589712 - RNA, 13 nt, Human
cuccuuuguauau

SEQ ID NO: 2589713 - RNA, 12 nt, Human
cuccuuuguaua

SEQ ID NO: 2589714 - RNA, 17 nt, Human
cuccuuuggccauucca

SEQ ID NO: 2589715 - RNA, 18 nt, Human
cuccuuugugaggaagcc

SEQ ID NO: 2589716 - RNA, 17 nt, Human
cuccuuugugaggaagc

SEQ ID NO: 2589717 - RNA, 20 nt, Human
cuccuuucacaaccuucugu

SEQ ID NO: 2589718 - RNA, 20 nt, Human
cuccuuuguacuuugugcuu

SEQ ID NO: 2589719 - RNA, 17 nt, Human
cuccuuuguacuuugug

SEQ ID NO: 2589720 - RNA, 14 nt, Human
cuccuuuguacuuu

SEQ ID NO: 2589721 - RNA, 13 nt, Human
cuccuuuguacuu

SEQ ID NO: 2589722 - RNA, 11 nt, Human
cucuccucccc

SEQ ID NO: 2589723 - RNA, 13 nt, Human
cucucuggcuggg

SEQ ID NO: 2589724 - RNA, 19 nt, Human
cucucuggccuuuuccuau

SEQ ID NO: 2589725 - RNA, 17 nt, Human
cucucuggccuuuuccu

SEQ ID NO: 2589726 - RNA, 15 nt, Human
cucuccuccccaaau

SEQ ID NO: 2589727 - RNA, 15 nt, Human
cucucuggcugggga

SEQ ID NO: 2589728 - RNA, 20 nt, Human
cucucuggggccacacagaa

SEQ ID NO: 2589729 - RNA, 19 nt, Human
cucucuggggccacacaga

SEQ ID NO: 2589730 - RNA, 18 nt, Human
cucucuggggccacacag

SEQ ID NO: 2589731 - RNA, 23 nt, Human
cucucuggggcaggguuauuccu

SEQ ID NO: 2589732 - RNA, 23 nt, Human
cucucuuauagaauauuuauuac

SEQ ID NO: 2589733 - RNA, 12 nt, Human
cucucuucugcu

SEQ ID NO: 2589734 - RNA, 14 nt, Human
cucucuucugcucc

SEQ ID NO: 2589735 - RNA, 15 nt, Human
cucucuucugcucca

SEQ ID NO: 2589736 - RNA, 16 nt, Human
cucucuucugcuccac

SEQ ID NO: 2589737 - RNA, 21 nt, Human
cucucuuauagaauauuuauu

SEQ ID NO: 2589738 - RNA, 19 nt, Human
cucucuuauagaauauuua

SEQ ID NO: 2589739 - RNA, 19 nt, Human
cucucugugggcuggcagu

SEQ ID NO: 2589740 - RNA, 16 nt, Human
cucucugugcugugga

SEQ ID NO: 2589741 - RNA, 18 nt, Human
cucucuuauagaauauuu

SEQ ID NO: 2589742 - RNA, 20 nt, Human
cucucuuaggagcagagcuc

SEQ ID NO: 2589743 - RNA, 15 nt, Human
cucuccccaugaugu

SEQ ID NO: 2589744 - RNA, 16 nt, Human
cucuccccaugauguu

SEQ ID NO: 2589745 - RNA, 19 nt, Human
cucuauguucuaagaagug

SEQ ID NO: 2589746 - RNA, 22 nt, Human
cucuaugggcagaucuaccccu

SEQ ID NO: 2589747 - RNA, 21 nt, Human
cucuaugccagcucaguccca

SEQ ID NO: 2589748 - RNA, 21 nt, Human
cucucccgucagggcccaagu

SEQ ID NO: 2589749 - RNA, 17 nt, Human
cucucccgucagggccc

SEQ ID NO: 2589750 - RNA, 16 nt, Human
cucucccgucagggcc

SEQ ID NO: 2589751 - RNA, 15 nt, Human
cucucccgucagggc

SEQ ID NO: 2589752 - RNA, 13 nt, Human
cucucccuccccu

SEQ ID NO: 2589753 - RNA, 17 nt, Human
cucucccuccccugcca

SEQ ID NO: 2589754 - RNA, 23 nt, Human
cucucccucaacaagggagagac

SEQ ID NO: 2589755 - RNA, 12 nt, Human
cucucccucugg

SEQ ID NO: 2589756 - RNA, 13 nt, Human
cucucccucuggc

SEQ ID NO: 2589757 - RNA, 18 nt, Human
cucucccucuggcccugc

SEQ ID NO: 2589758 - RNA, 19 nt, Human
cucucccucuggcccugcc

SEQ ID NO: 2589759 - RNA, 21 nt, Human
cucucccucuggcccugccuu

SEQ ID NO: 2589760 - RNA, 22 nt, Human
cucucccucuggcccugccuuc

SEQ ID NO: 2589761 - RNA, 23 nt, Human
cucuccccccccccuccaauccu

SEQ ID NO: 2589762 - RNA, 21 nt, Human
cucuccccccccccuccaauc

SEQ ID NO: 2589763 - RNA, 19 nt, Human
cucuccccccccccuccaa

SEQ ID NO: 2589764 - RNA, 17 nt, Human
cucuccccccccccucc

SEQ ID NO: 2589765 - RNA, 16 nt, Human
cucucccccacccccu

SEQ ID NO: 2589766 - RNA, 13 nt, Human
cucucccccaccc

SEQ ID NO: 2589767 - RNA, 14 nt, Human
cucuccccucaaag

SEQ ID NO: 2589768 - RNA, 12 nt, Human
cucuccccucaa

SEQ ID NO: 2589769 - RNA, 21 nt, Human
cucuccccucaaagucugcaa

SEQ ID NO: 2589770 - RNA, 18 nt, Human
cucuccccucaaagucug

SEQ ID NO: 2589771 - RNA, 19 nt, Human
cucucccgguucuuccagu

SEQ ID NO: 2589772 - RNA, 14 nt, Human
cucucuggccuucg

SEQ ID NO: 2589773 - RNA, 16 nt, Human
cucucuggccuucggc

SEQ ID NO: 2589774 - RNA, 13 nt, Human
cucucuggccuuc

SEQ ID NO: 2589775 - RNA, 16 nt, Human
cucuccuccagaguca

SEQ ID NO: 2589776 - RNA, 15 nt, Human
cucuccuccagaguc

SEQ ID NO: 2589777 - RNA, 13 nt, Human
cucuccuccagag

SEQ ID NO: 2589778 - RNA, 16 nt, Human
cucucccucuucucaa

SEQ ID NO: 2589779 - RNA, 12 nt, Human
cucuccuccaga

SEQ ID NO: 2589780 - RNA, 20 nt, Human
cucucccugacccuguauau

SEQ ID NO: 2589781 - RNA, 14 nt, Human
cucucccugacccu

SEQ ID NO: 2589782 - RNA, 13 nt, Human
cucucccugaccc

SEQ ID NO: 2589783 - RNA, 12 nt, Human
cucucccugacc

SEQ ID NO: 2589784 - RNA, 17 nt, Human
cucaguccauagcagag

SEQ ID NO: 2589785 - RNA, 15 nt, Human
cucaguccauagcag

SEQ ID NO: 2589786 - RNA, 18 nt, Human
cucagucaugcauaaaua

SEQ ID NO: 2589787 - RNA, 16 nt, Human
cucagucaugcauaaa

SEQ ID NO: 2589788 - RNA, 15 nt, Human
cucagucaugcauaa

SEQ ID NO: 2589789 - RNA, 14 nt, Human
cucagucaugcaua

SEQ ID NO: 2589790 - RNA, 13 nt, Human
cucagucaguauu

SEQ ID NO: 2589791 - RNA, 13 nt, Human
cucagucauaauc

SEQ ID NO: 2589792 - RNA, 14 nt, Human
cucagguugucuga

SEQ ID NO: 2589793 - RNA, 19 nt, Human
cucagguuguaguaaagaa

SEQ ID NO: 2589794 - RNA, 22 nt, Human
cucagguuguaguaaagaaauu

SEQ ID NO: 2589795 - RNA, 16 nt, Human
cucaguccaugaagau

SEQ ID NO: 2589796 - RNA, 23 nt, Human
cucagucaugcauaaauaugcag

SEQ ID NO: 2589797 - RNA, 22 nt, Human
cucagucaugcauaaauaugca

SEQ ID NO: 2589798 - RNA, 18 nt, Human
cucagucauuagacuccu

SEQ ID NO: 2589799 - RNA, 16 nt, Human
cucaguccaccugagc

SEQ ID NO: 2589800 - RNA, 17 nt, Human
cucaguccaccugagcu

SEQ ID NO: 2589801 - RNA, 18 nt, Human
cucaguccaccugagcug

SEQ ID NO: 2589802 - RNA, 20 nt, Human
cucaguccuccccucacagc

SEQ ID NO: 2589803 - RNA, 19 nt, Human
cucaguccuccccucacag

SEQ ID NO: 2589804 - RNA, 18 nt, Human
cucaguccuccccucaca

SEQ ID NO: 2589805 - RNA, 17 nt, Human
cucaguccuccccucac

SEQ ID NO: 2589806 - RNA, 16 nt, Human
cucaguccuccccuca

SEQ ID NO: 2589807 - RNA, 14 nt, Human
cucaguccuccccu

SEQ ID NO: 2589808 - RNA, 17 nt, Human
cucagucccccaacaga

SEQ ID NO: 2589809 - RNA, 20 nt, Human
cucagucuggcccuuccuuu

SEQ ID NO: 2589810 - RNA, 22 nt, Human
cucagucuggcccuuccuuuuc

SEQ ID NO: 2589811 - RNA, 23 nt, Human
cucaugauagaaggcuaugggga

SEQ ID NO: 2589812 - RNA, 22 nt, Human
cucaugaggggcccgagcagaa

SEQ ID NO: 2589813 - RNA, 19 nt, Human
cucaugcaaaucaauuacu

SEQ ID NO: 2589814 - RNA, 20 nt, Human
cucaugcaaaucaauuacug

SEQ ID NO: 2589815 - RNA, 16 nt, Human
cucaugcaaaucaauu

SEQ ID NO: 2589816 - RNA, 19 nt, Human
cucaugaucuugugacaua

SEQ ID NO: 2589817 - RNA, 20 nt, Human
cucaugaucuugugacauau

SEQ ID NO: 2589818 - RNA, 19 nt, Human
cucauggccccucugaccu

SEQ ID NO: 2589819 - RNA, 17 nt, Human
cucauggccccucugac

SEQ ID NO: 2589820 - RNA, 15 nt, Human
cucauggccccucug

SEQ ID NO: 2589821 - RNA, 14 nt, Human
cucauggccccucu

SEQ ID NO: 2589822 - RNA, 18 nt, Human
cucaugcaucuccaccug

SEQ ID NO: 2589823 - RNA, 17 nt, Human
cucaugcaucuccaccu

SEQ ID NO: 2589824 - RNA, 16 nt, Human
cucaugcaucuccacc

SEQ ID NO: 2589825 - RNA, 14 nt, Human
cucaugcaucucca

SEQ ID NO: 2589826 - RNA, 15 nt, Human
cucaugcagccguga

SEQ ID NO: 2589827 - RNA, 14 nt, Human
cucaugcagccgug

SEQ ID NO: 2589828 - RNA, 12 nt, Human
cucaugcaucuc

SEQ ID NO: 2589829 - RNA, 23 nt, Human
cucagguugcugguugcugugug

SEQ ID NO: 2589830 - RNA, 22 nt, Human
cucagguugcugguugcugugu

SEQ ID NO: 2589831 - RNA, 21 nt, Human
cucagguugcugguugcugug

SEQ ID NO: 2589832 - RNA, 20 nt, Human
cucagguugcugguugcugu

SEQ ID NO: 2589833 - RNA, 20 nt, Human
cucagguuccuauggcuggc

SEQ ID NO: 2589834 - RNA, 12 nt, Human
cucagguuccua

SEQ ID NO: 2589835 - RNA, 15 nt, Human
cucagguguugccaa

SEQ ID NO: 2589836 - RNA, 14 nt, Human
cucagguguugcca

SEQ ID NO: 2589837 - RNA, 23 nt, Human
cucaggugucccugcacuugcag

SEQ ID NO: 2589838 - RNA, 20 nt, Human
cucaggcgauccaccugucu

SEQ ID NO: 2589839 - RNA, 13 nt, Human
cucaggcucugcc

SEQ ID NO: 2589840 - RNA, 21 nt, Human
cucaggcgauccaccugucuc

SEQ ID NO: 2589841 - RNA, 14 nt, Human
cucaggcucugccc

SEQ ID NO: 2589842 - RNA, 15 nt, Human
cucaggcucugcccu

SEQ ID NO: 2589843 - RNA, 16 nt, Human
cucaggcucugcccug

SEQ ID NO: 2589844 - RNA, 17 nt, Human
cucaggcucugcccugc

SEQ ID NO: 2589845 - RNA, 19 nt, Human
cucaggcucugcccugccc

SEQ ID NO: 2589846 - RNA, 22 nt, Human
cucaggcucugcccugcccuag

SEQ ID NO: 2589847 - RNA, 11 nt, Human
cucaggcugcu

SEQ ID NO: 2589848 - RNA, 12 nt, Human
cucaggcugcug

SEQ ID NO: 2589849 - RNA, 13 nt, Human
cucaggcugcugg

SEQ ID NO: 2589850 - RNA, 14 nt, Human
cucaggcugcugga

SEQ ID NO: 2589851 - RNA, 15 nt, Human
cucaggcugcuggag

SEQ ID NO: 2589852 - RNA, 16 nt, Human
cucaggcugcuggagg

SEQ ID NO: 2589853 - RNA, 17 nt, Human
cucaggcugcuggagga

SEQ ID NO: 2589854 - RNA, 14 nt, Human
cucagggacagaga

SEQ ID NO: 2589855 - RNA, 20 nt, Human
cucagggaaaagcagcucuc

SEQ ID NO: 2589856 - RNA, 22 nt, Human
cucagggaaaagcagcucuccc

SEQ ID NO: 2589857 - RNA, 15 nt, Human
cucaggcuugaaaug

SEQ ID NO: 2589858 - RNA, 17 nt, Human
cucaggcuggugggagg

SEQ ID NO: 2589859 - RNA, 17 nt, Human
cucaggcuuccuuggca

SEQ ID NO: 2589860 - RNA, 22 nt, Human
cucaggcuuucacuauuuccuu

SEQ ID NO: 2589861 - RNA, 21 nt, Human
cucaggcuuucacuauuuccu

SEQ ID NO: 2589862 - RNA, 17 nt, Human
cucagggaaaagcagcu

SEQ ID NO: 2589863 - RNA, 20 nt, Human
cucagggacagagacaccug

SEQ ID NO: 2589864 - RNA, 17 nt, Human
cucagggaaaggccagu

SEQ ID NO: 2589865 - RNA, 19 nt, Human
cucagggacagagacaccu

SEQ ID NO: 2589866 - RNA, 23 nt, Human
cucagggaaaagcagcucucccc

SEQ ID NO: 2589867 - RNA, 20 nt, Human
cucaggccaaacucaccugc

SEQ ID NO: 2589868 - RNA, 19 nt, Human
cucaggccaaacucaccug

SEQ ID NO: 2589869 - RNA, 21 nt, Human
cucaggccaaacucaccugcc

SEQ ID NO: 2589870 - RNA, 20 nt, Human
cucaggccaagaaacgucuu

SEQ ID NO: 2589871 - RNA, 19 nt, Human
cucaggccaacaagccaac

SEQ ID NO: 2589872 - RNA, 15 nt, Human
cucaggccagcugcu

SEQ ID NO: 2589873 - RNA, 16 nt, Human
cucagccuggccagac

SEQ ID NO: 2589874 - RNA, 17 nt, Human
cucagccuggccagaca

SEQ ID NO: 2589875 - RNA, 19 nt, Human
cucagccuggccagacaca

SEQ ID NO: 2589876 - RNA, 20 nt, Human
cucagccuggccagacacag

SEQ ID NO: 2589877 - RNA, 13 nt, Human
cucagccuggcca

SEQ ID NO: 2589878 - RNA, 14 nt, Human
cucagccuggccag

SEQ ID NO: 2589879 - RNA, 15 nt, Human
cucagccuggccaga

SEQ ID NO: 2589880 - RNA, 23 nt, Human
cucagccuccuguguagcuggga

SEQ ID NO: 2589881 - RNA, 17 nt, Human
cucagccucugaauaug

SEQ ID NO: 2589882 - RNA, 23 nt, Human
cucaggccgaaggaggagucagg

SEQ ID NO: 2589883 - RNA, 18 nt, Human
cucaggccagcugcuugg

SEQ ID NO: 2589884 - RNA, 17 nt, Human
cucaggccagcugcuug

SEQ ID NO: 2589885 - RNA, 16 nt, Human
cucaggccagcugcuu

SEQ ID NO: 2589886 - RNA, 11 nt, Human
cucaggccugg

SEQ ID NO: 2589887 - RNA, 22 nt, Human
cucaggccugggggcugggcag

SEQ ID NO: 2589888 - RNA, 15 nt, Human
cucaggccacaccgg

SEQ ID NO: 2589889 - RNA, 20 nt, Human
cucaggccugacucucagca

SEQ ID NO: 2589890 - RNA, 23 nt, Human
cucaggccuauaaccccagcucc

SEQ ID NO: 2589891 - RNA, 22 nt, Human
cucagaagacacugaugggcaa

SEQ ID NO: 2589892 - RNA, 20 nt, Human
cucagaagacacugaugggc

SEQ ID NO: 2589893 - RNA, 17 nt, Human
cucagaagacacugaug

SEQ ID NO: 2589894 - RNA, 15 nt, Human
cucagaagacacuga

SEQ ID NO: 2589895 - RNA, 21 nt, Human
cucagaaauuuuuauuuuucu

SEQ ID NO: 2589896 - RNA, 17 nt, Human
cucagaaauuuuuauuu

SEQ ID NO: 2589897 - RNA, 20 nt, Human
cucacuaccuccucagggau

SEQ ID NO: 2589898 - RNA, 22 nt, Human
cucacuaggcccccacuugccu

SEQ ID NO: 2589899 - RNA, 18 nt, Human
cucacuaggcccccacuu

SEQ ID NO: 2589900 - RNA, 16 nt, Human
cucacuaccuccucag

SEQ ID NO: 2589901 - RNA, 15 nt, Human
cucacuaccuccuca

SEQ ID NO: 2589902 - RNA, 12 nt, Human
cucacuaccucc

SEQ ID NO: 2589903 - RNA, 20 nt, Human
cucacuacccuauucucucu

SEQ ID NO: 2589904 - RNA, 18 nt, Human
cucacuaccuccucaggg

SEQ ID NO: 2589905 - RNA, 17 nt, Human
cucacuaccuccucagg

SEQ ID NO: 2589906 - RNA, 15 nt, Human
cucacuaggccccca

SEQ ID NO: 2589907 - RNA, 14 nt, Human
cucagaacccuugg

SEQ ID NO: 2589908 - RNA, 21 nt, Human
cucagaacccuuggcuugccc

SEQ ID NO: 2589909 - RNA, 13 nt, Human
cucagaagacacu

SEQ ID NO: 2589910 - RNA, 13 nt, Human
cucacgccuguaa

SEQ ID NO: 2589911 - RNA, 18 nt, Human
cucacgccuguaauccca

SEQ ID NO: 2589912 - RNA, 19 nt, Human
cucacgccuguaaucccag

SEQ ID NO: 2589913 - RNA, 20 nt, Human
cucacgccuguaaucccagc

SEQ ID NO: 2589914 - RNA, 21 nt, Human
cucacgccuguaaucccagca

SEQ ID NO: 2589915 - RNA, 22 nt, Human
cucacgccuguaaucccagcau

SEQ ID NO: 2589916 - RNA, 22 nt, Human
cucacgccuguaaucccagcag

SEQ ID NO: 2589917 - RNA, 23 nt, Human
cucacgccuguaaucccagcagu

SEQ ID NO: 2589918 - RNA, 17 nt, Human
cucacgggcaugggcac

SEQ ID NO: 2589919 - RNA, 19 nt, Human
cucacgggcaguagcugug

SEQ ID NO: 2589920 - RNA, 13 nt, Human
cucacguguguga

SEQ ID NO: 2589921 - RNA, 21 nt, Human
cucacgggcaugggcacuccc

SEQ ID NO: 2589922 - RNA, 16 nt, Human
cucacgugagaguguc

SEQ ID NO: 2589923 - RNA, 16 nt, Human
cucaccuuuucccggg

SEQ ID NO: 2589924 - RNA, 20 nt, Human
cucacgaauauuaugcccag

SEQ ID NO: 2589925 - RNA, 15 nt, Human
cucacgcaccuccca

SEQ ID NO: 2589926 - RNA, 16 nt, Human
cucacgcaccucccau

SEQ ID NO: 2589927 - RNA, 19 nt, Human
cucacgcaccucccauccu

SEQ ID NO: 2589928 - RNA, 20 nt, Human
cucacgccuaugaucccagc

SEQ ID NO: 2589929 - RNA, 17 nt, Human
cucaccuuucccaucuu

SEQ ID NO: 2589930 - RNA, 18 nt, Human
cucagcccugacuggugc

SEQ ID NO: 2589931 - RNA, 13 nt, Human
cucagcccugacu

SEQ ID NO: 2589932 - RNA, 16 nt, Human
cucagacuuaccagga

SEQ ID NO: 2589933 - RNA, 19 nt, Human
cucagcccugacuggugcu

SEQ ID NO: 2589934 - RNA, 13 nt, Human
cucagcccugagg

SEQ ID NO: 2589935 - RNA, 14 nt, Human
cucagcccugaggu

SEQ ID NO: 2589936 - RNA, 15 nt, Human
cucagcccugaggug

SEQ ID NO: 2589937 - RNA, 14 nt, Human
cucagcccuggagg

SEQ ID NO: 2589938 - RNA, 13 nt, Human
cucagcccuggag

SEQ ID NO: 2589939 - RNA, 12 nt, Human
cucagcccugga

SEQ ID NO: 2589940 - RNA, 11 nt, Human
cucagcccugg

SEQ ID NO: 2589941 - RNA, 20 nt, Human
cucagcccuggaggugccag

SEQ ID NO: 2589942 - RNA, 19 nt, Human
cucagcccuggaggugcca

SEQ ID NO: 2589943 - RNA, 18 nt, Human
cucagcccuggaggugcc

SEQ ID NO: 2589944 - RNA, 15 nt, Human
cucagcccuggaggu

SEQ ID NO: 2589945 - RNA, 22 nt, Human
cucagcccuggaggugccagca

SEQ ID NO: 2589946 - RNA, 12 nt, Human
cucagcccuggg

SEQ ID NO: 2589947 - RNA, 13 nt, Human
cucagcccugggc

SEQ ID NO: 2589948 - RNA, 14 nt, Human
cucagcccugggcc

SEQ ID NO: 2589949 - RNA, 22 nt, Human
cucagccucccgaauagcuggg

SEQ ID NO: 2589950 - RNA, 20 nt, Human
cucagccucaauaagccuug

SEQ ID NO: 2589951 - RNA, 22 nt, Human
cucagccuccuguguagcuggg

SEQ ID NO: 2589952 - RNA, 15 nt, Human
cucagcccugggccc

SEQ ID NO: 2589953 - RNA, 19 nt, Human
cucagcccugggccccacc

SEQ ID NO: 2589954 - RNA, 11 nt, Human
cucagcccugu

SEQ ID NO: 2589955 - RNA, 21 nt, Human
cucagcccugggccccaccac

SEQ ID NO: 2589956 - RNA, 21 nt, Human
cucagccucccgaauagcugg

SEQ ID NO: 2589957 - RNA, 19 nt, Human
cucagccucccgaauagcu

SEQ ID NO: 2589958 - RNA, 23 nt, Human
cucagaagacacugaugggcaac

SEQ ID NO: 2589959 - RNA, 13 nt, Human
cucagaagaaaga

SEQ ID NO: 2589960 - RNA, 15 nt, Human
cucagaagccucugg

SEQ ID NO: 2589961 - RNA, 11 nt, Human
cucagaagccu

SEQ ID NO: 2589962 - RNA, 17 nt, Human
cucagaagccucugggu

SEQ ID NO: 2589963 - RNA, 13 nt, Human
cucagaagccuga

SEQ ID NO: 2589964 - RNA, 14 nt, Human
cucagaagccugag

SEQ ID NO: 2589965 - RNA, 15 nt, Human
cucagaagccugagg

SEQ ID NO: 2589966 - RNA, 18 nt, Human
cucagaagccugaggcug

SEQ ID NO: 2589967 - RNA, 16 nt, Human
cucagaagccugaggc

SEQ ID NO: 2589968 - RNA, 17 nt, Human
cucagaagccugaggcu

SEQ ID NO: 2589969 - RNA, 22 nt, Human
cucagacucuuuuuguaccugg

SEQ ID NO: 2589970 - RNA, 23 nt, Human
cucagacccccacucucauuccc

SEQ ID NO: 2589971 - RNA, 14 nt, Human
cucagacuccauuu

SEQ ID NO: 2589972 - RNA, 14 nt, Human
cucagacccccacu

SEQ ID NO: 2589973 - RNA, 15 nt, Human
cucagacccccacuc

SEQ ID NO: 2589974 - RNA, 16 nt, Human
cucagacccccacucu

SEQ ID NO: 2589975 - RNA, 22 nt, Human
cucagacccccacucucauucc

SEQ ID NO: 2589976 - RNA, 13 nt, Human
cucagacccccac

SEQ ID NO: 2589977 - RNA, 16 nt, Human
cucagaccagcucuuc

SEQ ID NO: 2589978 - RNA, 14 nt, Human
cucagaccagcucu

SEQ ID NO: 2589979 - RNA, 15 nt, Human
cucagaccagcucuu

SEQ ID NO: 2589980 - RNA, 20 nt, Human
cuacaaacaaaauuucuauu

SEQ ID NO: 2589981 - RNA, 17 nt, Human
cuacaaacaaaauuucu

SEQ ID NO: 2589982 - RNA, 15 nt, Human
cuacaaacaaaauuu

SEQ ID NO: 2589983 - RNA, 13 nt, Human
cuacaaacaaaau

SEQ ID NO: 2589984 - RNA, 21 nt, Human
cuacaaaaccugauguuaaaa

SEQ ID NO: 2589985 - RNA, 17 nt, Human
cuacaaaauuugaaauu

SEQ ID NO: 2589986 - RNA, 18 nt, Human
cuacaaaauuugaaauuu

SEQ ID NO: 2589987 - RNA, 20 nt, Human
cuacaaaaccugauguuaaa

SEQ ID NO: 2589988 - RNA, 15 nt, Human
cuaauuuuggaugga

SEQ ID NO: 2589989 - RNA, 19 nt, Human
cuauccugaaaauucugua

SEQ ID NO: 2589990 - RNA, 13 nt, Human
cuauccucuguaa

SEQ ID NO: 2589991 - RNA, 12 nt, Human
cuauccucugua

SEQ ID NO: 2589992 - RNA, 17 nt, Human
cuauccuacuuccccuu

SEQ ID NO: 2589993 - RNA, 23 nt, Human
cuaucagugugccccccauccug

SEQ ID NO: 2589994 - RNA, 21 nt, Human
cuaucagugugccccccaucc

SEQ ID NO: 2589995 - RNA, 18 nt, Human
cuaucagugugcccccca

SEQ ID NO: 2589996 - RNA, 17 nt, Human
cuaucagugugcccccc

SEQ ID NO: 2589997 - RNA, 14 nt, Human
cuaucauggaguga

SEQ ID NO: 2589998 - RNA, 13 nt, Human
cuauccuacccca

SEQ ID NO: 2589999 - RNA, 16 nt, Human
cuaucaccuauuucca

SEQ ID NO: 2590000 - RNA, 17 nt, Human
cuaucaccuauuuccau

SEQ ID NO: 2590001 - RNA, 14 nt, Human
cuaucaccuccccu

SEQ ID NO: 2590002 - RNA, 15 nt, Human
cuaucaccuccccuc

SEQ ID NO: 2590003 - RNA, 16 nt, Human
cuaucagugugccccc

SEQ ID NO: 2590004 - RNA, 12 nt, Human
cuaucagugugc

SEQ ID NO: 2590005 - RNA, 20 nt, Human
cuaucagccugucucuucca

SEQ ID NO: 2590006 - RNA, 15 nt, Human
cuaucagccugucuc

SEQ ID NO: 2590007 - RNA, 19 nt, Human
cuaucagaguugcugcaaa

SEQ ID NO: 2590008 - RNA, 13 nt, Human
cuaucagaagacc

SEQ ID NO: 2590009 - RNA, 21 nt, Human
cuaucagaggugaaagcuaua

SEQ ID NO: 2590010 - RNA, 16 nt, Human
cuaucaccuccccucc

SEQ ID NO: 2590011 - RNA, 17 nt, Human
cuaucaccuccccuccu

SEQ ID NO: 2590012 - RNA, 19 nt, Human
cuaucaccuccccuccuug

SEQ ID NO: 2590013 - RNA, 18 nt, Human
cuauguucuaagaaguga

SEQ ID NO: 2590014 - RNA, 12 nt, Human
cuaugugacaau

SEQ ID NO: 2590015 - RNA, 22 nt, Human
cuauguugcccaggcaggucuu

SEQ ID NO: 2590016 - RNA, 21 nt, Human
cuauguugcccaggcaggucu

SEQ ID NO: 2590017 - RNA, 19 nt, Human
cuauguugcccaggcaggu

SEQ ID NO: 2590018 - RNA, 18 nt, Human
cuauguugcccaggcagg

SEQ ID NO: 2590019 - RNA, 14 nt, Human
cuaucucccccagc

SEQ ID NO: 2590020 - RNA, 13 nt, Human
cuaucucccccag

SEQ ID NO: 2590021 - RNA, 18 nt, Human
cuaucucauuuccaagca

SEQ ID NO: 2590022 - RNA, 18 nt, Human
cuaucucaauccuaauuu

SEQ ID NO: 2590023 - RNA, 19 nt, Human
cuauccuggcucuuuggag

SEQ ID NO: 2590024 - RNA, 13 nt, Human
cuauccuggcucu

SEQ ID NO: 2590025 - RNA, 12 nt, Human
cuaucucaucua

SEQ ID NO: 2590026 - RNA, 21 nt, Human
cuaucucaucuaucucaaucc

SEQ ID NO: 2590027 - RNA, 13 nt, Human
cuaugucccuugc

SEQ ID NO: 2590028 - RNA, 14 nt, Human
cuauguccuaagga

SEQ ID NO: 2590029 - RNA, 16 nt, Human
cuaugucccuugcugu

SEQ ID NO: 2590030 - RNA, 14 nt, Human
cuaugugagaccau

SEQ ID NO: 2590031 - RNA, 21 nt, Human
cuauguccuaaggacacacua

SEQ ID NO: 2590032 - RNA, 20 nt, Human
cuauguccuaaggacacacu

SEQ ID NO: 2590033 - RNA, 18 nt, Human
cuauguccuaaggacaca

SEQ ID NO: 2590034 - RNA, 15 nt, Human
cuauguccuaaggac

SEQ ID NO: 2590035 - RNA, 23 nt, Human
cuauguccuaaggacacacuaau

SEQ ID NO: 2590036 - RNA, 22 nt, Human
cuauguccuaaggacacacuaa

SEQ ID NO: 2590037 - RNA, 22 nt, Human
cuauguuuuuguucaaagccag

SEQ ID NO: 2590038 - RNA, 21 nt, Human
cucaagugauucuccugccuc

SEQ ID NO: 2590039 - RNA, 19 nt, Human
cuauguuuugacauuuuua

SEQ ID NO: 2590040 - RNA, 18 nt, Human
cuauguuuugacauuuuu

SEQ ID NO: 2590041 - RNA, 20 nt, Human
cuaugugacuugcaucgugg

SEQ ID NO: 2590042 - RNA, 20 nt, Human
cuauguuuacaaauggacau

SEQ ID NO: 2590043 - RNA, 20 nt, Human
cuauguuuuuguucaaagcc

SEQ ID NO: 2590044 - RNA, 15 nt, Human
cucaagugcccucuc

SEQ ID NO: 2590045 - RNA, 9 nt, Human
cucaagugc

SEQ ID NO: 2590046 - RNA, 22 nt, Human
cucaagugggaacgacugggca

SEQ ID NO: 2590047 - RNA, 22 nt, Human
cucaagugcccucuccgagcug

SEQ ID NO: 2590048 - RNA, 22 nt, Human
cucaagugucucaguccaccug

SEQ ID NO: 2590049 - RNA, 14 nt, Human
cucaaguugaaaga

SEQ ID NO: 2590050 - RNA, 19 nt, Human
cucaaguuuuucagaaagc

SEQ ID NO: 2590051 - RNA, 18 nt, Human
cucaaguuuuucagaaag

SEQ ID NO: 2590052 - RNA, 20 nt, Human
cucaaguuuuucagaaagca

SEQ ID NO: 2590053 - RNA, 13 nt, Human
cucaauaaaauca

SEQ ID NO: 2590054 - RNA, 22 nt, Human
cucaauaaaaucauguacauuu

SEQ ID NO: 2590055 - RNA, 23 nt, Human
cucaauaaaaucauguacauuuc

SEQ ID NO: 2590056 - RNA, 13 nt, Human
cucaauauuuucc

SEQ ID NO: 2590057 - RNA, 19 nt, Human
cucaauauuuuccaugaaa

SEQ ID NO: 2590058 - RNA, 18 nt, Human
cucaauauuuuccaugaa

SEQ ID NO: 2590059 - RNA, 23 nt, Human
cucaauuauuuugcauuuuuucu

SEQ ID NO: 2590060 - RNA, 16 nt, Human
cucaaugugaccaggg

SEQ ID NO: 2590061 - RNA, 15 nt, Human
cucaaugugaccagg

SEQ ID NO: 2590062 - RNA, 18 nt, Human
cucaaugugaccaggggu

SEQ ID NO: 2590063 - RNA, 20 nt, Human
cucaaugugaaucagacccu

SEQ ID NO: 2590064 - RNA, 14 nt, Human
cucaaugugaccag

SEQ ID NO: 2590065 - RNA, 21 nt, Human
cucaaugugaaucagacccua

SEQ ID NO: 2590066 - RNA, 19 nt, Human
cucaauucccccuggccac

SEQ ID NO: 2590067 - RNA, 18 nt, Human
cucaauucccccuggcca

SEQ ID NO: 2590068 - RNA, 19 nt, Human
cucaauguuacuaucugcu

SEQ ID NO: 2590069 - RNA, 20 nt, Human
cucaauggacuggaagggga

SEQ ID NO: 2590070 - RNA, 17 nt, Human
cucaauggacuggaagg

SEQ ID NO: 2590071 - RNA, 14 nt, Human
cucaauggacugga

SEQ ID NO: 2590072 - RNA, 20 nt, Human
cucaauccuaauuucuccuc

SEQ ID NO: 2590073 - RNA, 19 nt, Human
cucaauccuaauuucuccu

SEQ ID NO: 2590074 - RNA, 14 nt, Human
cucaauccuaauuu

SEQ ID NO: 2590075 - RNA, 23 nt, Human
cucaauccuaauuucuccucccu

SEQ ID NO: 2590076 - RNA, 22 nt, Human
cucaauccuaauuucuccuccc

SEQ ID NO: 2590077 - RNA, 14 nt, Human
cucaauccucuaag

SEQ ID NO: 2590078 - RNA, 14 nt, Human
cucaauccauguuc

SEQ ID NO: 2590079 - RNA, 15 nt, Human
cucaauccauguucu

SEQ ID NO: 2590080 - RNA, 18 nt, Human
cucaaucccagcuacuca

SEQ ID NO: 2590081 - RNA, 15 nt, Human
cucaaucaagaaaau

SEQ ID NO: 2590082 - RNA, 22 nt, Human
cucaauauuuuccaugaaaaug

SEQ ID NO: 2590083 - RNA, 17 nt, Human
aaauuucagcagcugca

SEQ ID NO: 2590084 - RNA, 18 nt, Human
aaauuucagcagcugcag

SEQ ID NO: 2590085 - RNA, 23 nt, Human
aaauuccuauugugauuugacug

SEQ ID NO: 2590086 - RNA, 14 nt, Human
aaauuccucuuugc

SEQ ID NO: 2590087 - RNA, 18 nt, Human
aaauuccucuuugcuuug

SEQ ID NO: 2590088 - RNA, 19 nt, Human
aaauuccucuuugcuuugc

SEQ ID NO: 2590089 - RNA, 17 nt, Human
aaauuuaauucauguuu

SEQ ID NO: 2590090 - RNA, 18 nt, Human
aaauuuaauucauguuuc

SEQ ID NO: 2590091 - RNA, 22 nt, Human
aaauuccuauugugauuugacu

SEQ ID NO: 2590092 - RNA, 18 nt, Human
aaauuccuauugugauuu

SEQ ID NO: 2590093 - RNA, 17 nt, Human
aaauuccuauugugauu

SEQ ID NO: 2590094 - RNA, 16 nt, Human
aaauuccuauugugau

SEQ ID NO: 2590095 - RNA, 18 nt, Human
aaauucccuucaucugga

SEQ ID NO: 2590096 - RNA, 15 nt, Human
aaauuccuauuguga

SEQ ID NO: 2590097 - RNA, 14 nt, Human
guauuuuuuuacua

SEQ ID NO: 2590098 - RNA, 15 nt, Human
guauuuuuuuacuaa

SEQ ID NO: 2590099 - RNA, 15 nt, Human
aaauuuaguuuuugu

SEQ ID NO: 2590100 - RNA, 20 nt, Human
aaauuuauacaccaauugau

SEQ ID NO: 2590101 - RNA, 18 nt, Human
aaauuuaguuuuuguucu

SEQ ID NO: 2590102 - RNA, 20 nt, Human
aaauuuccccaacaguguga

SEQ ID NO: 2590103 - RNA, 19 nt, Human
aaauuuccccaacagugug

SEQ ID NO: 2590104 - RNA, 18 nt, Human
aaauuuccccaacagugu

SEQ ID NO: 2590105 - RNA, 17 nt, Human
aaauuuccccaacagug

SEQ ID NO: 2590106 - RNA, 22 nt, Human
aaauuuccaguaccuuugucac

SEQ ID NO: 2590107 - RNA, 23 nt, Human
aaauuuccaguaccuuugucaca

SEQ ID NO: 2590108 - RNA, 16 nt, Human
aaauuuccccaacagu

SEQ ID NO: 2590109 - RNA, 19 nt, Human
aaauuuccagugagcuuau

SEQ ID NO: 2590110 - RNA, 12 nt, Human
aaauuucagauu

SEQ ID NO: 2590111 - RNA, 16 nt, Human
aaauuuccaguaccuu

SEQ ID NO: 2590112 - RNA, 20 nt, Human
gucacacaguauuacuucug

SEQ ID NO: 2590113 - RNA, 16 nt, Human
gucacacacuuuggcu

SEQ ID NO: 2590114 - RNA, 21 nt, Human
gucacaaauccuaaaagaagc

SEQ ID NO: 2590115 - RNA, 16 nt, Human
gucaaccuccuggaca

SEQ ID NO: 2590116 - RNA, 17 nt, Human
gucaacuucaacauuua

SEQ ID NO: 2590117 - RNA, 13 nt, Human
gucacacacugau

SEQ ID NO: 2590118 - RNA, 17 nt, Human
gucacaagagcccagca

SEQ ID NO: 2590119 - RNA, 15 nt, Human
gucaaccuccuggac

SEQ ID NO: 2590120 - RNA, 14 nt, Human
gucaaccuccugga

SEQ ID NO: 2590121 - RNA, 14 nt, Human
gucaaccugggcaa

SEQ ID NO: 2590122 - RNA, 19 nt, Human
gucaaccugggcaaagccu

SEQ ID NO: 2590123 - RNA, 13 nt, Human
gucaaccuccugg

SEQ ID NO: 2590124 - RNA, 22 nt, Human
gucaaaugguaggcauuuccua

SEQ ID NO: 2590125 - RNA, 15 nt, Human
gucaaauuauguauu

SEQ ID NO: 2590126 - RNA, 23 nt, Human
gucaaaaaguuugguucuguguc

SEQ ID NO: 2590127 - RNA, 18 nt, Human
gucaaaguggugagaggc

SEQ ID NO: 2590128 - RNA, 17 nt, Human
gucaaauaaacacugug

SEQ ID NO: 2590129 - RNA, 15 nt, Human
gucaaauaaacacug

SEQ ID NO: 2590130 - RNA, 14 nt, Human
gucaaauaaacacu

SEQ ID NO: 2590131 - RNA, 13 nt, Human
gucaaauaaacac

SEQ ID NO: 2590132 - RNA, 12 nt, Human
gucaaauaaaca

SEQ ID NO: 2590133 - RNA, 19 nt, Human
gucaaaguggugagaggca

SEQ ID NO: 2590134 - RNA, 17 nt, Human
guauuuuuuuacuaaua

SEQ ID NO: 2590135 - RNA, 21 nt, Human
guauuuuuuuacuaauagaca

SEQ ID NO: 2590136 - RNA, 16 nt, Human
guauuuuuuuuucuaa

SEQ ID NO: 2590137 - RNA, 17 nt, Human
guauuuuuuugcaagug

SEQ ID NO: 2590138 - RNA, 16 nt, Human
guauuuuuuugcaagu

SEQ ID NO: 2590139 - RNA, 14 nt, Human
guauuuuuuugcaa

SEQ ID NO: 2590140 - RNA, 22 nt, Human
guauuuuuuuuucuaagagaag

SEQ ID NO: 2590141 - RNA, 18 nt, Human
guauuuuuuuuucuaaga

SEQ ID NO: 2590142 - RNA, 20 nt, Human
gucaaaaaguuugguucugu

SEQ ID NO: 2590143 - RNA, 23 nt, Human
guauuuuuuuaucuugggacugg

SEQ ID NO: 2590144 - RNA, 23 nt, Human
aaauuuccccaacagugugaagu

SEQ ID NO: 2590145 - RNA, 22 nt, Human
aaauuuccccaacagugugaag

SEQ ID NO: 2590146 - RNA, 20 nt, Human
aaauuauagaugggaaugaa

SEQ ID NO: 2590147 - RNA, 14 nt, Human
aaauuagaugaacu

SEQ ID NO: 2590148 - RNA, 17 nt, Human
aaauuacuuugugaaua

SEQ ID NO: 2590149 - RNA, 14 nt, Human
aaauuacuuuguga

SEQ ID NO: 2590150 - RNA, 12 nt, Human
aaauuagaaaau

SEQ ID NO: 2590151 - RNA, 23 nt, Human
aaauuagaaaccuuaauaugugg

SEQ ID NO: 2590152 - RNA, 11 nt, Human
aaauuagaaaa

SEQ ID NO: 2590153 - RNA, 20 nt, Human
aaauuagaaaauguuauuua

SEQ ID NO: 2590154 - RNA, 15 nt, Human
aaauuauaucaauuu

SEQ ID NO: 2590155 - RNA, 23 nt, Human
aaauuauuuguguaauagaaaac

SEQ ID NO: 2590156 - RNA, 22 nt, Human
aaauuauuuguguaauagaaaa

SEQ ID NO: 2590157 - RNA, 16 nt, Human
aaauuauuuuaaacaa

SEQ ID NO: 2590158 - RNA, 15 nt, Human
aaauuauuuuaaaca

SEQ ID NO: 2590159 - RNA, 16 nt, Human
aaauuauuuuggauuu

SEQ ID NO: 2590160 - RNA, 12 nt, Human
aaauucauuuua

SEQ ID NO: 2590161 - RNA, 13 nt, Human
aaauucauuuuuu

SEQ ID NO: 2590162 - RNA, 21 nt, Human
aaauucaucaaauggaagaca

SEQ ID NO: 2590163 - RNA, 16 nt, Human
aaauucauauucuguc

SEQ ID NO: 2590164 - RNA, 17 nt, Human
aaauucaguccuaagaa

SEQ ID NO: 2590165 - RNA, 19 nt, Human
aaauucccuucaucuggaa

SEQ ID NO: 2590166 - RNA, 16 nt, Human
aaauucccuucaucug

SEQ ID NO: 2590167 - RNA, 18 nt, Human
aaauucccuggccuuuca

SEQ ID NO: 2590168 - RNA, 22 nt, Human
aaauucauuuuuuucacuggag

SEQ ID NO: 2590169 - RNA, 15 nt, Human
aaauucccuggccuu

SEQ ID NO: 2590170 - RNA, 14 nt, Human
aaauucaaaaagug

SEQ ID NO: 2590171 - RNA, 17 nt, Human
aaauuauuuuaaacaaa

SEQ ID NO: 2590172 - RNA, 22 nt, Human
aaauucacccccuuuccuggac

SEQ ID NO: 2590173 - RNA, 14 nt, Human
aaauucaugcugcu

SEQ ID NO: 2590174 - RNA, 18 nt, Human
aaauucacuauuggcugg

SEQ ID NO: 2590175 - RNA, 16 nt, Human
aaauucacuauuggcu

SEQ ID NO: 2590176 - RNA, 20 nt, Human
aaauucagauauauuuuuca

SEQ ID NO: 2590177 - RNA, 22 nt, Human
guauuggcuagagguucaaaga

SEQ ID NO: 2590178 - RNA, 14 nt, Human
guauuggccuggag

SEQ ID NO: 2590179 - RNA, 12 nt, Human
guauuggccugg

SEQ ID NO: 2590180 - RNA, 12 nt, Human
guauuuaauuag

SEQ ID NO: 2590181 - RNA, 15 nt, Human
guauuggccuggagg

SEQ ID NO: 2590182 - RNA, 21 nt, Human
guauuuaauuagugcuaagug

SEQ ID NO: 2590183 - RNA, 20 nt, Human
guauuuaauuagugcuaagu

SEQ ID NO: 2590184 - RNA, 19 nt, Human
guauuuaauuagugcuaag

SEQ ID NO: 2590185 - RNA, 18 nt, Human
guauuuaauuagugcuaa

SEQ ID NO: 2590186 - RNA, 16 nt, Human
guauuuaauucauguu

SEQ ID NO: 2590187 - RNA, 16 nt, Human
aaauguuaaaauguau

SEQ ID NO: 2590188 - RNA, 13 nt, Human
guauuuaauuuug

SEQ ID NO: 2590189 - RNA, 21 nt, Human
aaauuaacuuuuauaaacuuu

SEQ ID NO: 2590190 - RNA, 15 nt, Human
aaauguuauuuaaca

SEQ ID NO: 2590191 - RNA, 19 nt, Human
aaauuaacuuuuauaaacu

SEQ ID NO: 2590192 - RNA, 20 nt, Human
aaauguuaaguugaugguga

SEQ ID NO: 2590193 - RNA, 22 nt, Human
aaauuaacuuuuauaaacuuua

SEQ ID NO: 2590194 - RNA, 23 nt, Human
aaauuaacuuuuauaaacuuuac

SEQ ID NO: 2590195 - RNA, 19 nt, Human
aaauuaccagaguuguucu

SEQ ID NO: 2590196 - RNA, 15 nt, Human
aaauuacuacaaaau

SEQ ID NO: 2590197 - RNA, 21 nt, Human
aaauuacuuaucauccacauu

SEQ ID NO: 2590198 - RNA, 20 nt, Human
aaauuacucaggaagaacac

SEQ ID NO: 2590199 - RNA, 21 nt, Human
guauguguacgugugugugcg

SEQ ID NO: 2590200 - RNA, 11 nt, Human
guauucucuga

SEQ ID NO: 2590201 - RNA, 12 nt, Human
guauucucugag

SEQ ID NO: 2590202 - RNA, 13 nt, Human
guauucucugagc

SEQ ID NO: 2590203 - RNA, 19 nt, Human
guauucucugagcugugca

SEQ ID NO: 2590204 - RNA, 21 nt, Human
guauucucuccuguaccucuu

SEQ ID NO: 2590205 - RNA, 16 nt, Human
guauugcacauuguaa

SEQ ID NO: 2590206 - RNA, 14 nt, Human
guauugcacauugu

SEQ ID NO: 2590207 - RNA, 13 nt, Human
guauugcacauug

SEQ ID NO: 2590208 - RNA, 15 nt, Human
guauucuucaaccuc

SEQ ID NO: 2590209 - RNA, 21 nt, Human
guauugcacauuguaaaaagu

SEQ ID NO: 2590210 - RNA, 18 nt, Human
guauugcacauuguaaaa

SEQ ID NO: 2590211 - RNA, 23 nt, Human
guauugcaucuguauaaguaaga

SEQ ID NO: 2590212 - RNA, 15 nt, Human
guauugcaucuguau

SEQ ID NO: 2590213 - RNA, 22 nt, Human
guauucuucucuuccuuuuauc

SEQ ID NO: 2590214 - RNA, 16 nt, Human
guauucuucucuuccu

SEQ ID NO: 2590215 - RNA, 15 nt, Human
guauucuuauuuaau

SEQ ID NO: 2590216 - RNA, 13 nt, Human
guaugguggcugg

SEQ ID NO: 2590217 - RNA, 13 nt, Human
guaugucuccagu

SEQ ID NO: 2590218 - RNA, 14 nt, Human
guaugggcaaaaaa

SEQ ID NO: 2590219 - RNA, 15 nt, Human
guaugggagagaaga

SEQ ID NO: 2590220 - RNA, 16 nt, Human
guaugggacuggccuc

SEQ ID NO: 2590221 - RNA, 21 nt, Human
guauggguuagggaaaacauu

SEQ ID NO: 2590222 - RNA, 15 nt, Human
guauggguguguguu

SEQ ID NO: 2590223 - RNA, 18 nt, Human
guauguggaagugugggu

SEQ ID NO: 2590224 - RNA, 21 nt, Human
guauguggaagugugggucug

SEQ ID NO: 2590225 - RNA, 19 nt, Human
guaugugggggucugugug

SEQ ID NO: 2590226 - RNA, 20 nt, Human
guaugugggggucugugugu

SEQ ID NO: 2590227 - RNA, 16 nt, Human
guauguggaagugugg

SEQ ID NO: 2590228 - RNA, 17 nt, Human
guauguggaaguguggg

SEQ ID NO: 2590229 - RNA, 15 nt, Human
guauguggaagugug

SEQ ID NO: 2590230 - RNA, 16 nt, Human
guaugugcacugucac

SEQ ID NO: 2590231 - RNA, 16 nt, Human
guaugcuuugaaugua

SEQ ID NO: 2590232 - RNA, 15 nt, Human
guaugcaugugaaga

SEQ ID NO: 2590233 - RNA, 12 nt, Human
guaugcauguga

SEQ ID NO: 2590234 - RNA, 13 nt, Human
guauggaaauaaa

SEQ ID NO: 2590235 - RNA, 14 nt, Human
guaugauucccagc

SEQ ID NO: 2590236 - RNA, 17 nt, Human
guaugauguguugugau

SEQ ID NO: 2590237 - RNA, 16 nt, Human
guaugauguguuguga

SEQ ID NO: 2590238 - RNA, 13 nt, Human
guaugauguguug

SEQ ID NO: 2590239 - RNA, 20 nt, Human
guauccuccagguuuuucaa

SEQ ID NO: 2590240 - RNA, 14 nt, Human
guaugggagagaag

SEQ ID NO: 2590241 - RNA, 22 nt, Human
guauggcacuggcauugucccu

SEQ ID NO: 2590242 - RNA, 15 nt, Human
guauggagcucagag

SEQ ID NO: 2590243 - RNA, 18 nt, Human
guauggagcucagagagg

SEQ ID NO: 2590244 - RNA, 18 nt, Human
guauggagagaaaacaga

SEQ ID NO: 2590245 - RNA, 13 nt, Human
guauggagcucag

SEQ ID NO: 2590246 - RNA, 18 nt, Human
guauggaauacaguguua

SEQ ID NO: 2590247 - RNA, 18 nt, Human
guauggacuaucugucug

SEQ ID NO: 2590248 - RNA, 19 nt, Human
guauggaauacaauguaau

SEQ ID NO: 2590249 - RNA, 17 nt, Human
guauggaauacaguguu

SEQ ID NO: 2590250 - RNA, 18 nt, Human
guaucccuguuacugaua

SEQ ID NO: 2590251 - RNA, 18 nt, Human
guauccccccaucuugcu

SEQ ID NO: 2590252 - RNA, 17 nt, Human
guauccccccaucuugc

SEQ ID NO: 2590253 - RNA, 15 nt, Human
guaucccuacuguaa

SEQ ID NO: 2590254 - RNA, 22 nt, Human
guaugaucacggcucacugcag

SEQ ID NO: 2590255 - RNA, 19 nt, Human
guauccuccagguuuuuca

SEQ ID NO: 2590256 - RNA, 17 nt, Human
guauccuccagguuuuu

SEQ ID NO: 2590257 - RNA, 16 nt, Human
guauccuccagguuuu

SEQ ID NO: 2590258 - RNA, 15 nt, Human
guauccuccagguuu

SEQ ID NO: 2590259 - RNA, 14 nt, Human
guauccuccagguu

SEQ ID NO: 2590260 - RNA, 13 nt, Human
guauccuccaggu

SEQ ID NO: 2590261 - RNA, 20 nt, Human
guauccccccccuguauagu

SEQ ID NO: 2590262 - RNA, 22 nt, Human
guauccucauuugggguagcua

SEQ ID NO: 2590263 - RNA, 14 nt, Human
guauccccccaucu

SEQ ID NO: 2590264 - RNA, 22 nt, Human
guaucaggacccagaggaaggg

SEQ ID NO: 2590265 - RNA, 18 nt, Human
guaucaggacccagagga

SEQ ID NO: 2590266 - RNA, 21 nt, Human
guaucaggacccagaggaagg

SEQ ID NO: 2590267 - RNA, 14 nt, Human
guaucaggacccag

SEQ ID NO: 2590268 - RNA, 17 nt, Human
guaucagaggccuauaa

SEQ ID NO: 2590269 - RNA, 21 nt, Human
guaucaggaaauauauaugug

SEQ ID NO: 2590270 - RNA, 16 nt, Human
guaucagaggccuaua

SEQ ID NO: 2590271 - RNA, 15 nt, Human
guaucagaggccuau

SEQ ID NO: 2590272 - RNA, 14 nt, Human
guaucagaggccua

SEQ ID NO: 2590273 - RNA, 12 nt, Human
guaucagaggcc

SEQ ID NO: 2590274 - RNA, 17 nt, Human
guaucacugucuuuccu

SEQ ID NO: 2590275 - RNA, 18 nt, Human
guaucacugucuuuccua

SEQ ID NO: 2590276 - RNA, 20 nt, Human
guaucacugucuuuccuaga

SEQ ID NO: 2590277 - RNA, 18 nt, Human
guaucaauccuuguucag

SEQ ID NO: 2590278 - RNA, 16 nt, Human
guauaaguaagaaaau

SEQ ID NO: 2590279 - RNA, 15 nt, Human
guauaaguaagaaaa

SEQ ID NO: 2590280 - RNA, 20 nt, Human
guauaacuucuuaaaaguug

SEQ ID NO: 2590281 - RNA, 12 nt, Human
guauaaauuuau

SEQ ID NO: 2590282 - RNA, 13 nt, Human
guauaaauuuauu

SEQ ID NO: 2590283 - RNA, 14 nt, Human
guauaaauuuauuu

SEQ ID NO: 2590284 - RNA, 23 nt, Human
guauaaauuuauuuacugcuagu

SEQ ID NO: 2590285 - RNA, 22 nt, Human
guauaacagguuauuuuaguuu

SEQ ID NO: 2590286 - RNA, 20 nt, Human
guauaacagguuauuuuagu

SEQ ID NO: 2590287 - RNA, 15 nt, Human
guauaacagguuauu

SEQ ID NO: 2590288 - RNA, 13 nt, Human
guauaacagguua

SEQ ID NO: 2590289 - RNA, 20 nt, Human
guauaacacaauaugaauac

SEQ ID NO: 2590290 - RNA, 22 nt, Human
guauauuauuucuaggaagaau

SEQ ID NO: 2590291 - RNA, 11 nt, Human
guauauuauuu

SEQ ID NO: 2590292 - RNA, 23 nt, Human
guauauuauguauuuauauuuug

SEQ ID NO: 2590293 - RNA, 21 nt, Human
guauauuauguauuuauauuu

SEQ ID NO: 2590294 - RNA, 16 nt, Human
guauauuauguauuua

SEQ ID NO: 2590295 - RNA, 15 nt, Human
guauauuauuucuag

SEQ ID NO: 2590296 - RNA, 12 nt, Human
guauauucacuu

SEQ ID NO: 2590297 - RNA, 15 nt, Human
guauauucauauauu

SEQ ID NO: 2590298 - RNA, 14 nt, Human
guauauucauuuca

SEQ ID NO: 2590299 - RNA, 22 nt, Human
guauauugauccagaaagaaaa

SEQ ID NO: 2590300 - RNA, 24 nt, Human
guaucaaauauuagaugugauuua

SEQ ID NO: 2590301 - RNA, 21 nt, Human
guaucaaauauuagaugugau

SEQ ID NO: 2590302 - RNA, 20 nt, Human
guaucaaauauuagauguga

SEQ ID NO: 2590303 - RNA, 19 nt, Human
guaucaaauauuagaugug

SEQ ID NO: 2590304 - RNA, 16 nt, Human
guauauucauuucaaa

SEQ ID NO: 2590305 - RNA, 18 nt, Human
guauaaagcaacuguuau

SEQ ID NO: 2590306 - RNA, 20 nt, Human
guauaaagcaacuguuauga

SEQ ID NO: 2590307 - RNA, 23 nt, Human
guauaaagcaacuguuaugaaau

SEQ ID NO: 2590308 - RNA, 21 nt, Human
guauaaagcaacuguuaugaa

SEQ ID NO: 2590309 - RNA, 13 nt, Human
guauaaauaggag

SEQ ID NO: 2590310 - RNA, 17 nt, Human
guauaaaugguugucug

SEQ ID NO: 2590311 - RNA, 12 nt, Human
guauaaaugguu

SEQ ID NO: 2590312 - RNA, 18 nt, Human
guauaaauaggagaggau

SEQ ID NO: 2590313 - RNA, 17 nt, Human
guauaaacuaucaguuu

SEQ ID NO: 2590314 - RNA, 13 nt, Human
guauaaacuauca

SEQ ID NO: 2590315 - RNA, 12 nt, Human
guauaaagaaca

SEQ ID NO: 2590316 - RNA, 14 nt, Human
guauaaagaaaagu

SEQ ID NO: 2590317 - RNA, 13 nt, Human
guauaaagaaaag

SEQ ID NO: 2590318 - RNA, 21 nt, Human
guauaaaagccuguuuaagag

SEQ ID NO: 2590319 - RNA, 18 nt, Human
guauaaaagccuguuuaa

SEQ ID NO: 2590320 - RNA, 23 nt, Human
guauaaaagauggggucuguaaa

SEQ ID NO: 2590321 - RNA, 13 nt, Human
guauaaaagaugg

SEQ ID NO: 2590322 - RNA, 17 nt, Human
guauaaaaucagccaau

SEQ ID NO: 2590323 - RNA, 15 nt, Human
guauaaaaucagcca

SEQ ID NO: 2590324 - RNA, 23 nt, Human
guauaaaaucagccaauuauguu

SEQ ID NO: 2590325 - RNA, 14 nt, Human
guauaaacaaaguu

SEQ ID NO: 2590326 - RNA, 22 nt, Human
aaaugggacuucuuuucacauu

SEQ ID NO: 2590327 - RNA, 21 nt, Human
aaaugggacuucuuuucacau

SEQ ID NO: 2590328 - RNA, 20 nt, Human
aaaugggacuucuuuucaca

SEQ ID NO: 2590329 - RNA, 16 nt, Human
aaaugggacuucuuuu

SEQ ID NO: 2590330 - RNA, 13 nt, Human
aaauggggccaga

SEQ ID NO: 2590331 - RNA, 16 nt, Human
aaauggggccagaucc

SEQ ID NO: 2590332 - RNA, 17 nt, Human
aaauggggccagaucca

SEQ ID NO: 2590333 - RNA, 21 nt, Human
aaauggggccagauccagccu

SEQ ID NO: 2590334 - RNA, 22 nt, Human
aaauggggccagauccagccug

SEQ ID NO: 2590335 - RNA, 15 nt, Human
aaaugggggugcauu

SEQ ID NO: 2590336 - RNA, 16 nt, Human
aaaugggggugcauuu

SEQ ID NO: 2590337 - RNA, 17 nt, Human
aaaugggggugcauuug

SEQ ID NO: 2590338 - RNA, 18 nt, Human
aaaugggggugcauuuga

SEQ ID NO: 2590339 - RNA, 22 nt, Human
aaauguaagggaaacugccagc

SEQ ID NO: 2590340 - RNA, 12 nt, Human
aaauguaauuga

SEQ ID NO: 2590341 - RNA, 17 nt, Human
guauaaaagccuguuua

SEQ ID NO: 2590342 - RNA, 12 nt, Human
guauaaaagaug

SEQ ID NO: 2590343 - RNA, 11 nt, Human
guauaaaagau

SEQ ID NO: 2590344 - RNA, 13 nt, Human
guaguucccugaa

SEQ ID NO: 2590345 - RNA, 17 nt, Human
guaguucccugaaaacc

SEQ ID NO: 2590346 - RNA, 20 nt, Human
guaguucccugaaaacccag

SEQ ID NO: 2590347 - RNA, 15 nt, Human
guaguuccugcuaca

SEQ ID NO: 2590348 - RNA, 23 nt, Human
guaguucccugaaaacccagaga

SEQ ID NO: 2590349 - RNA, 16 nt, Human
guaguuaguagcaugu

SEQ ID NO: 2590350 - RNA, 13 nt, Human
guaguuaguagca

SEQ ID NO: 2590351 - RNA, 20 nt, Human
aaauguaggcuuaguuugug

SEQ ID NO: 2590352 - RNA, 16 nt, Human
aaauguagguaugaau

SEQ ID NO: 2590353 - RNA, 15 nt, Human
aaauguacugagauu

SEQ ID NO: 2590354 - RNA, 16 nt, Human
aaaggacucugggguu

SEQ ID NO: 2590355 - RNA, 15 nt, Human
aaaggacucuggggu

SEQ ID NO: 2590356 - RNA, 12 nt, Human
aaaggacucugg

SEQ ID NO: 2590357 - RNA, 20 nt, Human
aaaggacuguuuuuuccuga

SEQ ID NO: 2590358 - RNA, 22 nt, Human
aaaggacuguuuuuuccugagc

SEQ ID NO: 2590359 - RNA, 19 nt, Human
aaaggagagaagagagaaa

SEQ ID NO: 2590360 - RNA, 13 nt, Human
aaaggaggcuggc

SEQ ID NO: 2590361 - RNA, 14 nt, Human
aaaggaggcuggca

SEQ ID NO: 2590362 - RNA, 16 nt, Human
aaaggagucaaaacua

SEQ ID NO: 2590363 - RNA, 17 nt, Human
guagcugcaaaggacag

SEQ ID NO: 2590364 - RNA, 19 nt, Human
aaaggaucuuuguggccaa

SEQ ID NO: 2590365 - RNA, 18 nt, Human
aaaggauacuguaacacu

SEQ ID NO: 2590366 - RNA, 16 nt, Human
aaaggauacuguaaca

SEQ ID NO: 2590367 - RNA, 18 nt, Human
aaaggaucuuuguggcca

SEQ ID NO: 2590368 - RNA, 15 nt, Human
aaaggauauuuucuu

SEQ ID NO: 2590369 - RNA, 12 nt, Human
aaaggauauuuu

SEQ ID NO: 2590370 - RNA, 20 nt, Human
guagcuguaaggcaugaagg

SEQ ID NO: 2590371 - RNA, 22 nt, Human
guagcuuaccagaagcuuccau

SEQ ID NO: 2590372 - RNA, 18 nt, Human
guagcuguggugaggugg

SEQ ID NO: 2590373 - RNA, 18 nt, Human
guagcugggauuacaggc

SEQ ID NO: 2590374 - RNA, 21 nt, Human
guagcugggacuacaggcacc

SEQ ID NO: 2590375 - RNA, 19 nt, Human
guagcugggacuacaggca

SEQ ID NO: 2590376 - RNA, 18 nt, Human
guagcugggacuacaggc

SEQ ID NO: 2590377 - RNA, 12 nt, Human
guagcugggacu

SEQ ID NO: 2590378 - RNA, 16 nt, Human
guagcugccccuggcu

SEQ ID NO: 2590379 - RNA, 12 nt, Human
guagcugccccu

SEQ ID NO: 2590380 - RNA, 15 nt, Human
guagcugccccuggc

SEQ ID NO: 2590381 - RNA, 17 nt, Human
guagcuggauuacaggc

SEQ ID NO: 2590382 - RNA, 13 nt, Human
guaggauuacuag

SEQ ID NO: 2590383 - RNA, 13 nt, Human
guaggcagagccu

SEQ ID NO: 2590384 - RNA, 23 nt, Human
guaggcagacacagggacuugaa

SEQ ID NO: 2590385 - RNA, 22 nt, Human
guaggcagacacagggacuuga

SEQ ID NO: 2590386 - RNA, 13 nt, Human
guaggcagacaca

SEQ ID NO: 2590387 - RNA, 12 nt, Human
guaggcagacac

SEQ ID NO: 2590388 - RNA, 11 nt, Human
guaggcagaca

SEQ ID NO: 2590389 - RNA, 18 nt, Human
guaggagcccagcucuga

SEQ ID NO: 2590390 - RNA, 14 nt, Human
guaggagcugccuu

SEQ ID NO: 2590391 - RNA, 22 nt, Human
guaggagcugccuuggcucaga

SEQ ID NO: 2590392 - RNA, 17 nt, Human
guaggaggaugggcucg

SEQ ID NO: 2590393 - RNA, 23 nt, Human
guaggagcugccuuggcucagac

SEQ ID NO: 2590394 - RNA, 14 nt, Human
guaggagguuugga

SEQ ID NO: 2590395 - RNA, 15 nt, Human
guaggcagagccuuu

SEQ ID NO: 2590396 - RNA, 14 nt, Human
guaggcagagccuu

SEQ ID NO: 2590397 - RNA, 17 nt, Human
guaggcaugagggauca

SEQ ID NO: 2590398 - RNA, 20 nt, Human
guaggcaugagggaucacag

SEQ ID NO: 2590399 - RNA, 22 nt, Human
guaggcaugagggaucacaggg

SEQ ID NO: 2590400 - RNA, 14 nt, Human
guaggcauuuccua

SEQ ID NO: 2590401 - RNA, 23 nt, Human
guaggcaugagggaucacagggc

SEQ ID NO: 2590402 - RNA, 17 nt, Human
guagcuuucccaaauaa

SEQ ID NO: 2590403 - RNA, 17 nt, Human
guagcuuaccagaagcu

SEQ ID NO: 2590404 - RNA, 12 nt, Human
guagcuuugcuc

SEQ ID NO: 2590405 - RNA, 18 nt, Human
guaggaacgguaaauuuc

SEQ ID NO: 2590406 - RNA, 15 nt, Human
guaggaagacuuugg

SEQ ID NO: 2590407 - RNA, 16 nt, Human
guaggaacugcugggc

SEQ ID NO: 2590408 - RNA, 21 nt, Human
guaggaacgguaaauuucugu

SEQ ID NO: 2590409 - RNA, 17 nt, Human
guaggaagaguagcauu

SEQ ID NO: 2590410 - RNA, 19 nt, Human
guaggaaaaauaaaaacag

SEQ ID NO: 2590411 - RNA, 15 nt, Human
guaggaaguaggaag

SEQ ID NO: 2590412 - RNA, 18 nt, Human
guaggaagguuaauguuc

SEQ ID NO: 2590413 - RNA, 19 nt, Human
guaggaccaagcaucuugg

SEQ ID NO: 2590414 - RNA, 15 nt, Human
guaggacuguagaaa

SEQ ID NO: 2590415 - RNA, 19 nt, Human
guaggacuuuccuaaaugu

SEQ ID NO: 2590416 - RNA, 13 nt, Human
aaaucgaugcagu

SEQ ID NO: 2590417 - RNA, 15 nt, Human
aaaucgauuggcuuu

SEQ ID NO: 2590418 - RNA, 14 nt, Human
aaaucgauuggcuu

SEQ ID NO: 2590419 - RNA, 17 nt, Human
aaauccuuuuucuuuau

SEQ ID NO: 2590420 - RNA, 18 nt, Human
aaauccuuuuucuuuaua

SEQ ID NO: 2590421 - RNA, 19 nt, Human
aaauccuuuuucuuuauaa

SEQ ID NO: 2590422 - RNA, 14 nt, Human
aaauccuugaagau

SEQ ID NO: 2590423 - RNA, 16 nt, Human
aaauccuuuacuguua

SEQ ID NO: 2590424 - RNA, 16 nt, Human
aaauccuuccaugaaa

SEQ ID NO: 2590425 - RNA, 14 nt, Human
aaauccuaugugau

SEQ ID NO: 2590426 - RNA, 16 nt, Human
aaauccuaugugauuu

SEQ ID NO: 2590427 - RNA, 21 nt, Human
aaauccuaugugauuuuaacu

SEQ ID NO: 2590428 - RNA, 21 nt, Human
aaauccgaaccuccucuguga

SEQ ID NO: 2590429 - RNA, 15 nt, Human
aaauccuacugaaug

SEQ ID NO: 2590430 - RNA, 17 nt, Human
aaaucccuguuuaauau

SEQ ID NO: 2590431 - RNA, 15 nt, Human
aaauccgaaccuccu

SEQ ID NO: 2590432 - RNA, 19 nt, Human
aaauccgaaccuccucugu

SEQ ID NO: 2590433 - RNA, 20 nt, Human
aaauccgaaccuccucugug

SEQ ID NO: 2590434 - RNA, 13 nt, Human
aaauccccuucuc

SEQ ID NO: 2590435 - RNA, 21 nt, Human
aaaucccauucauaacuuuca

SEQ ID NO: 2590436 - RNA, 18 nt, Human
aaauccucuuccucugag

SEQ ID NO: 2590437 - RNA, 17 nt, Human
aaauccucuuccucuga

SEQ ID NO: 2590438 - RNA, 15 nt, Human
aaauccucuuccucu

SEQ ID NO: 2590439 - RNA, 14 nt, Human
aaauccucuuccuc

SEQ ID NO: 2590440 - RNA, 23 nt, Human
aaauccuaugugauuuuaacucu

SEQ ID NO: 2590441 - RNA, 11 nt, Human
aaauccucugg

SEQ ID NO: 2590442 - RNA, 13 nt, Human
aaauccucuuccu

SEQ ID NO: 2590443 - RNA, 12 nt, Human
aaauccucuggc

SEQ ID NO: 2590444 - RNA, 21 nt, Human
aaauccucuuccucugaggcu

SEQ ID NO: 2590445 - RNA, 15 nt, Human
aaaucccauuuaaaa

SEQ ID NO: 2590446 - RNA, 18 nt, Human
aaaucccuuaccucggug

SEQ ID NO: 2590447 - RNA, 15 nt, Human
aaaucucaaauuucu

SEQ ID NO: 2590448 - RNA, 16 nt, Human
aaaucucaaauuucua

SEQ ID NO: 2590449 - RNA, 17 nt, Human
aaaucucaaauuucuaa

SEQ ID NO: 2590450 - RNA, 19 nt, Human
aaaucucaaauuucuaaau

SEQ ID NO: 2590451 - RNA, 11 nt, Human
aaaugaaaauu

SEQ ID NO: 2590452 - RNA, 12 nt, Human
aaaugaaagaaa

SEQ ID NO: 2590453 - RNA, 16 nt, Human
aaaugaaaaugucuug

SEQ ID NO: 2590454 - RNA, 17 nt, Human
aaaugaaaaugucuugu

SEQ ID NO: 2590455 - RNA, 15 nt, Human
aaaugaaaaugucuu

SEQ ID NO: 2590456 - RNA, 18 nt, Human
aaaugaaaacauguaaua

SEQ ID NO: 2590457 - RNA, 17 nt, Human
aaaugaaaaucgugaca

SEQ ID NO: 2590458 - RNA, 14 nt, Human
aaaugaaaaaauau

SEQ ID NO: 2590459 - RNA, 23 nt, Human
aaaucggaucuggggcucuggga

SEQ ID NO: 2590460 - RNA, 17 nt, Human
aaaucuaauauuaaaaa

SEQ ID NO: 2590461 - RNA, 13 nt, Human
aaaucgcuuuuga

SEQ ID NO: 2590462 - RNA, 14 nt, Human
aaaucgcuuuugau

SEQ ID NO: 2590463 - RNA, 15 nt, Human
aaaucgcuuuugaua

SEQ ID NO: 2590464 - RNA, 22 nt, Human
aaaucggaucuggggcucuggg

SEQ ID NO: 2590465 - RNA, 19 nt, Human
aaaucuacacuccagugag

SEQ ID NO: 2590466 - RNA, 18 nt, Human
aaaucuaauauuaaaaau

SEQ ID NO: 2590467 - RNA, 19 nt, Human
aaaucuaauauuaaaaaua

SEQ ID NO: 2590468 - RNA, 15 nt, Human
aaaucuaccuucugu

SEQ ID NO: 2590469 - RNA, 14 nt, Human
aaaucuacaguaca

SEQ ID NO: 2590470 - RNA, 22 nt, Human
aaaucuaguauuucaugcuggg

SEQ ID NO: 2590471 - RNA, 18 nt, Human
aaaucuaccuucuguagu

SEQ ID NO: 2590472 - RNA, 17 nt, Human
aaaucuaccuucuguag

SEQ ID NO: 2590473 - RNA, 16 nt, Human
aaaucuaccuucugua

SEQ ID NO: 2590474 - RNA, 22 nt, Human
aaaucuagacucaagguuccca

SEQ ID NO: 2590475 - RNA, 14 nt, Human
aaaucuaugauucc

SEQ ID NO: 2590476 - RNA, 16 nt, Human
aaaucuaugauuccag

SEQ ID NO: 2590477 - RNA, 19 nt, Human
aaaucuauucagacaagca

SEQ ID NO: 2590478 - RNA, 13 nt, Human
aaaucuauucaga

SEQ ID NO: 2590479 - RNA, 20 nt, Human
aaaucuaugccacucagaau

SEQ ID NO: 2590480 - RNA, 14 nt, Human
aaaucuaugccacu

SEQ ID NO: 2590481 - RNA, 13 nt, Human
aaaucuaugccac

SEQ ID NO: 2590482 - RNA, 11 nt, Human
aaaugagaaau

SEQ ID NO: 2590483 - RNA, 17 nt, Human
aaaugacuaaaaauauu

SEQ ID NO: 2590484 - RNA, 20 nt, Human
aaaugacuaaaaauauuaua

SEQ ID NO: 2590485 - RNA, 19 nt, Human
aaaugaccaguaauuguga

SEQ ID NO: 2590486 - RNA, 15 nt, Human
aaaugaccaauauua

SEQ ID NO: 2590487 - RNA, 14 nt, Human
aaaugacagauguu

SEQ ID NO: 2590488 - RNA, 17 nt, Human
aaaugacccaaagacca

SEQ ID NO: 2590489 - RNA, 16 nt, Human
aaaugacccaaagacc

SEQ ID NO: 2590490 - RNA, 14 nt, Human
aaaugacccaaaga

SEQ ID NO: 2590491 - RNA, 21 nt, Human
aaaugaccaguaauugugaaa

SEQ ID NO: 2590492 - RNA, 19 nt, Human
aaaugacuaaaaaacaaag

SEQ ID NO: 2590493 - RNA, 22 nt, Human
aaaugacuaaaaaacaaagaag

SEQ ID NO: 2590494 - RNA, 16 nt, Human
aaaugaauggcucacu

SEQ ID NO: 2590495 - RNA, 20 nt, Human
aaaugaagugcaaauuugau

SEQ ID NO: 2590496 - RNA, 22 nt, Human
aaaugaagguuaggauuuaaca

SEQ ID NO: 2590497 - RNA, 15 nt, Human
aaaugaauaauuucc

SEQ ID NO: 2590498 - RNA, 17 nt, Human
aaaugaauaauuuccca

SEQ ID NO: 2590499 - RNA, 18 nt, Human
aaaugaauaauuucccaa

SEQ ID NO: 2590500 - RNA, 19 nt, Human
aaaugaaugugugugguuu

SEQ ID NO: 2590501 - RNA, 17 nt, Human
aaaugaauguguguggu

SEQ ID NO: 2590502 - RNA, 15 nt, Human
aaaugaaugugugug

SEQ ID NO: 2590503 - RNA, 14 nt, Human
aaaugaaugugugu

SEQ ID NO: 2590504 - RNA, 12 nt, Human
aaaugaaugugu

SEQ ID NO: 2590505 - RNA, 11 nt, Human
aaaugaaugug

SEQ ID NO: 2590506 - RNA, 15 nt, Human
aaaugaauguugucu

SEQ ID NO: 2590507 - RNA, 22 nt, Human
aaaugaaugugugugguuuuuu

SEQ ID NO: 2590508 - RNA, 11 nt, Human
aaaugaauuuu

SEQ ID NO: 2590509 - RNA, 21 nt, Human
aaaugaaagcagggacuugaa

SEQ ID NO: 2590510 - RNA, 22 nt, Human
aaaugaaagcagggacuugaac

SEQ ID NO: 2590511 - RNA, 20 nt, Human
aaaugaaaguauaacugagu

SEQ ID NO: 2590512 - RNA, 22 nt, Human
aaaugaaauuacuacaaaauuu

SEQ ID NO: 2590513 - RNA, 18 nt, Human
aaaugaaagcaugucuca

SEQ ID NO: 2590514 - RNA, 15 nt, Human
aaaugaaagcaugug

SEQ ID NO: 2590515 - RNA, 15 nt, Human
aaaugaaauuguaaa

SEQ ID NO: 2590516 - RNA, 14 nt, Human
aaaugaaauuguaa

SEQ ID NO: 2590517 - RNA, 12 nt, Human
aaaugaaauugu

SEQ ID NO: 2590518 - RNA, 18 nt, Human
aaaugaagcagcuuuaaa

SEQ ID NO: 2590519 - RNA, 19 nt, Human
aaaugaagguuaggauuua

SEQ ID NO: 2590520 - RNA, 11 nt, Human
aaaugaagugc

SEQ ID NO: 2590521 - RNA, 11 nt, Human
aaaugaagaaa

SEQ ID NO: 2590522 - RNA, 21 nt, Human
aaaugaacugaaguuucacau

SEQ ID NO: 2590523 - RNA, 14 nt, Human
aaaugaacugaagu

SEQ ID NO: 2590524 - RNA, 14 nt, Human
aaaugagaaaucua

SEQ ID NO: 2590525 - RNA, 13 nt, Human
aaaugagaaaucu

SEQ ID NO: 2590526 - RNA, 16 nt, Human
aaaugagaaaucuaaa

SEQ ID NO: 2590527 - RNA, 13 nt, Human
aaaugagaaggaa

SEQ ID NO: 2590528 - RNA, 15 nt, Human
aaaugagaucaggcu

SEQ ID NO: 2590529 - RNA, 20 nt, Human
aaaugagagggcaguguuuc

SEQ ID NO: 2590530 - RNA, 21 nt, Human
aaaugagaaggcagccaccag

SEQ ID NO: 2590531 - RNA, 20 nt, Human
aaaugagacccucguggccu

SEQ ID NO: 2590532 - RNA, 13 nt, Human
aaaugagccuggc

SEQ ID NO: 2590533 - RNA, 19 nt, Human
aaaugagccuggcaagaau

SEQ ID NO: 2590534 - RNA, 22 nt, Human
aaaugagaucaggcucugccuc

SEQ ID NO: 2590535 - RNA, 17 nt, Human
aaaugagaucaggcucu

SEQ ID NO: 2590536 - RNA, 13 nt, Human
aaaugagccauga

SEQ ID NO: 2590537 - RNA, 23 nt, Human
aaaugagcucgcauuugucaaug

SEQ ID NO: 2590538 - RNA, 16 nt, Human
aaaugaggacauguuu

SEQ ID NO: 2590539 - RNA, 14 nt, Human
aaaugaggacaugu

SEQ ID NO: 2590540 - RNA, 19 nt, Human
aaaugaggaauguauaugu

SEQ ID NO: 2590541 - RNA, 18 nt, Human
aaaugaggaauguauaug

SEQ ID NO: 2590542 - RNA, 17 nt, Human
aaaugaggaauguauau

SEQ ID NO: 2590543 - RNA, 14 nt, Human
aaaugaggaaugua

SEQ ID NO: 2590544 - RNA, 13 nt, Human
aaaugaggaaacu

SEQ ID NO: 2590545 - RNA, 19 nt, Human
aaaugaggucagagccugc

SEQ ID NO: 2590546 - RNA, 17 nt, Human
aaaugaggucagagccu

SEQ ID NO: 2590547 - RNA, 16 nt, Human
aaaugagguacucucc

SEQ ID NO: 2590548 - RNA, 23 nt, Human
aaaugagguacucuccuggaaau

SEQ ID NO: 2590549 - RNA, 9 nt, Human
aaaugaggg

SEQ ID NO: 2590550 - RNA, 12 nt, Human
aaaugagugugu

SEQ ID NO: 2590551 - RNA, 18 nt, Human
aaaugaguguguuuguca

SEQ ID NO: 2590552 - RNA, 15 nt, Human
aaaugaucaguuuuu

SEQ ID NO: 2590553 - RNA, 23 nt, Human
aaaugauccccagcuguuuaugc

SEQ ID NO: 2590554 - RNA, 22 nt, Human
aaaugaguuuuuauggggcuga

SEQ ID NO: 2590555 - RNA, 21 nt, Human
aaaugaguuaccuacauuuua

SEQ ID NO: 2590556 - RNA, 14 nt, Human
aaaugcauuucuaa

SEQ ID NO: 2590557 - RNA, 13 nt, Human
aaaugcccagccc

SEQ ID NO: 2590558 - RNA, 13 nt, Human
aaaugcauuguau

SEQ ID NO: 2590559 - RNA, 20 nt, Human
aaaugcauuguaucgauguu

SEQ ID NO: 2590560 - RNA, 12 nt, Human
aaaugcauugua

SEQ ID NO: 2590561 - RNA, 13 nt, Human
aaaugcauggagg

SEQ ID NO: 2590562 - RNA, 15 nt, Human
aaaugcccagccccu

SEQ ID NO: 2590563 - RNA, 14 nt, Human
aaaugcccagcccc

SEQ ID NO: 2590564 - RNA, 18 nt, Human
aaaugcccagccccuucu

SEQ ID NO: 2590565 - RNA, 13 nt, Human
aaaugcccagcuu

SEQ ID NO: 2590566 - RNA, 20 nt, Human
aaaugggcagagcagagacc

SEQ ID NO: 2590567 - RNA, 18 nt, Human
aaaugggcagagcagaga

SEQ ID NO: 2590568 - RNA, 15 nt, Human
aaaugggcagagcag

SEQ ID NO: 2590569 - RNA, 23 nt, Human
aaaugccucaguguauuuguauu

SEQ ID NO: 2590570 - RNA, 22 nt, Human
aaaugccucaguguauuuguau

SEQ ID NO: 2590571 - RNA, 15 nt, Human
aaaugggacuucuuu

SEQ ID NO: 2590572 - RNA, 16 nt, Human
aaaugggacuuaacuc

SEQ ID NO: 2590573 - RNA, 19 nt, Human
aaauggcuuccuggcaaua

SEQ ID NO: 2590574 - RNA, 21 nt, Human
aaaugccucaguguauuugua

SEQ ID NO: 2590575 - RNA, 19 nt, Human
aaaugccucaguguauuug

SEQ ID NO: 2590576 - RNA, 18 nt, Human
aaaugccucaguguauuu

SEQ ID NO: 2590577 - RNA, 17 nt, Human
aaaugccucaguguauu

SEQ ID NO: 2590578 - RNA, 16 nt, Human
aaaugccucaguguau

SEQ ID NO: 2590579 - RNA, 22 nt, Human
aaaugcccuuacacuuacuguu

SEQ ID NO: 2590580 - RNA, 18 nt, Human
aaaugcaccuggaauaua

SEQ ID NO: 2590581 - RNA, 22 nt, Human
aaaugcaccuggaauauauaac

SEQ ID NO: 2590582 - RNA, 15 nt, Human
aaaugcauaaaugca

SEQ ID NO: 2590583 - RNA, 12 nt, Human
aaaugcagugaa

SEQ ID NO: 2590584 - RNA, 22 nt, Human
aaaugcagggauugcugccacu

SEQ ID NO: 2590585 - RNA, 21 nt, Human
aaaugcagcgaaccaauauuu

SEQ ID NO: 2590586 - RNA, 23 nt, Human
aaaugcagcgaaccaauauuugu

SEQ ID NO: 2590587 - RNA, 20 nt, Human
aaaugcacccaacuagcucu

SEQ ID NO: 2590588 - RNA, 19 nt, Human
aaaugcacauagcuaucaa

SEQ ID NO: 2590589 - RNA, 20 nt, Human
aaaugcauuauaggaucauu

SEQ ID NO: 2590590 - RNA, 20 nt, Human
aaaugcaugauuuuguaacc

SEQ ID NO: 2590591 - RNA, 21 nt, Human
aaaugcaugauuuuguaaccc

SEQ ID NO: 2590592 - RNA, 14 nt, Human
aaaugcaugauuuu

SEQ ID NO: 2590593 - RNA, 18 nt, Human
aaaugcaugauuuuguaa

SEQ ID NO: 2590594 - RNA, 13 nt, Human
aaaugcauguugc

SEQ ID NO: 2590595 - RNA, 23 nt, Human
aaaugcauccauuccucagggac

SEQ ID NO: 2590596 - RNA, 15 nt, Human
aaaugcauauuguau

SEQ ID NO: 2590597 - RNA, 11 nt, Human
aaaugcauauu

SEQ ID NO: 2590598 - RNA, 19 nt, Human
aaaugcauauccugagcca

SEQ ID NO: 2590599 - RNA, 20 nt, Human
aaaugcauauccugagccau

SEQ ID NO: 2590600 - RNA, 16 nt, Human
aaaugcauccauuccu

SEQ ID NO: 2590601 - RNA, 20 nt, Human
aaaugcauccauuccucagg

SEQ ID NO: 2590602 - RNA, 22 nt, Human
aaaugcauccauuccucaggga

SEQ ID NO: 2590603 - RNA, 23 nt, Human
aaaugauuuuuacaaguuuuaaa

SEQ ID NO: 2590604 - RNA, 21 nt, Human
aaaugauuuuaucugugaauu

SEQ ID NO: 2590605 - RNA, 22 nt, Human
aaaugauuguaaaauagcuugu

SEQ ID NO: 2590606 - RNA, 15 nt, Human
aaaugauuguaaaau

SEQ ID NO: 2590607 - RNA, 15 nt, Human
aaaugauucuuagug

SEQ ID NO: 2590608 - RNA, 23 nt, Human
aaaugauguucauuuagauugaa

SEQ ID NO: 2590609 - RNA, 18 nt, Human
aaaugauguguacccaaa

SEQ ID NO: 2590610 - RNA, 20 nt, Human
aaaugaucugagucccagga

SEQ ID NO: 2590611 - RNA, 22 nt, Human
aaaugaugauguggaagaacuu

SEQ ID NO: 2590612 - RNA, 22 nt, Human
aaaugauccccaagugugaaca

SEQ ID NO: 2590613 - RNA, 16 nt, Human
aaaugaucaguuuuuu

SEQ ID NO: 2590614 - RNA, 19 nt, Human
aaaugaucugagucccagg

SEQ ID NO: 2590615 - RNA, 19 nt, Human
aaaugaugauguggaagaa

SEQ ID NO: 2590616 - RNA, 16 nt, Human
aaaugaucuuuucaag

SEQ ID NO: 2590617 - RNA, 14 nt, Human
aaaugcaccuggaa

SEQ ID NO: 2590618 - RNA, 21 nt, Human
aaaugcaaauccuaugugauu

SEQ ID NO: 2590619 - RNA, 13 nt, Human
aaaugcaauaugu

SEQ ID NO: 2590620 - RNA, 14 nt, Human
aaaugcaagauuuu

SEQ ID NO: 2590621 - RNA, 17 nt, Human
aaaugcaauauuaaugc

SEQ ID NO: 2590622 - RNA, 14 nt, Human
aaaugcaauauuaa

SEQ ID NO: 2590623 - RNA, 15 nt, Human
aaaugcaauauguau

SEQ ID NO: 2590624 - RNA, 16 nt, Human
aaaugcaauauguauu

SEQ ID NO: 2590625 - RNA, 17 nt, Human
aaaugcaaacacacaaa

SEQ ID NO: 2590626 - RNA, 13 nt, Human
aaaugcaaauccu

SEQ ID NO: 2590627 - RNA, 21 nt, Human
aaaugcaaacacacaaaggua

SEQ ID NO: 2590628 - RNA, 14 nt, Human
aaaugcaaauccua

SEQ ID NO: 2590629 - RNA, 16 nt, Human
aaaugcaacaacaugu

SEQ ID NO: 2590630 - RNA, 15 nt, Human
aacauacucccaucu

SEQ ID NO: 2590631 - RNA, 14 nt, Human
aacauacucccauc

SEQ ID NO: 2590632 - RNA, 17 nt, Human
aacauaauucuuguaua

SEQ ID NO: 2590633 - RNA, 19 nt, Human
aacaguuuuccaugaaaac

SEQ ID NO: 2590634 - RNA, 18 nt, Human
aacauaauucuuguauau

SEQ ID NO: 2590635 - RNA, 15 nt, Human
aacaguuuuccauga

SEQ ID NO: 2590636 - RNA, 16 nt, Human
aacaguuuuccaugaa

SEQ ID NO: 2590637 - RNA, 17 nt, Human
aacaguuuuccaugaaa

SEQ ID NO: 2590638 - RNA, 18 nt, Human
aacaguuuuccaugaaaa

SEQ ID NO: 2590639 - RNA, 16 nt, Human
aacauucugauuugga

SEQ ID NO: 2590640 - RNA, 18 nt, Human
aacauucugauuuggaaa

SEQ ID NO: 2590641 - RNA, 16 nt, Human
aacauugaaguaauga

SEQ ID NO: 2590642 - RNA, 18 nt, Human
aacauugaaguaaugaau

SEQ ID NO: 2590643 - RNA, 19 nt, Human
aacauugaaguaaugaauu

SEQ ID NO: 2590644 - RNA, 18 nt, Human
aacauuugguaaggggaa

SEQ ID NO: 2590645 - RNA, 20 nt, Human
aacauuuguucuauagcuuu

SEQ ID NO: 2590646 - RNA, 16 nt, Human
aacauuucucaauaau

SEQ ID NO: 2590647 - RNA, 22 nt, Human
aacauuucaagggcaauaccgu

SEQ ID NO: 2590648 - RNA, 19 nt, Human
aacauuguuccagauucaa

SEQ ID NO: 2590649 - RNA, 18 nt, Human
aacauuguuccagauuca

SEQ ID NO: 2590650 - RNA, 17 nt, Human
aacauuguuccagauuc

SEQ ID NO: 2590651 - RNA, 15 nt, Human
aacauuguuccagau

SEQ ID NO: 2590652 - RNA, 23 nt, Human
aacauuguguucccauuucagcu

SEQ ID NO: 2590653 - RNA, 14 nt, Human
aacauuuacaugua

SEQ ID NO: 2590654 - RNA, 17 nt, Human
aacauucugauuuggaa

SEQ ID NO: 2590655 - RNA, 13 nt, Human
aacauuguguucc

SEQ ID NO: 2590656 - RNA, 20 nt, Human
aacauugcauauaacuuaua

SEQ ID NO: 2590657 - RNA, 21 nt, Human
aacauugcauauaacuuauau

SEQ ID NO: 2590658 - RNA, 14 nt, Human
guccucuugccucc

SEQ ID NO: 2590659 - RNA, 13 nt, Human
guccucuucugca

SEQ ID NO: 2590660 - RNA, 21 nt, Human
guccugaccacccuccccucu

SEQ ID NO: 2590661 - RNA, 19 nt, Human
guccugaccacccuccccu

SEQ ID NO: 2590662 - RNA, 17 nt, Human
guccugaccacccuccc

SEQ ID NO: 2590663 - RNA, 17 nt, Human
guccucuugccuccugg

SEQ ID NO: 2590664 - RNA, 16 nt, Human
guccugaccacccucc

SEQ ID NO: 2590665 - RNA, 16 nt, Human
guccugaccugucuca

SEQ ID NO: 2590666 - RNA, 15 nt, Human
guccugaccugucuc

SEQ ID NO: 2590667 - RNA, 23 nt, Human
guccugacuucaggggcugcccg

SEQ ID NO: 2590668 - RNA, 21 nt, Human
guccugacuucaggggcugcc

SEQ ID NO: 2590669 - RNA, 20 nt, Human
guccugacuucaggggcugc

SEQ ID NO: 2590670 - RNA, 13 nt, Human
guccugagaccug

SEQ ID NO: 2590671 - RNA, 17 nt, Human
guccugacuucaggggc

SEQ ID NO: 2590672 - RNA, 23 nt, Human
guccugaccacccuccccucucu

SEQ ID NO: 2590673 - RNA, 13 nt, Human
guccugacucaac

SEQ ID NO: 2590674 - RNA, 21 nt, Human
guccucuggauggcaccagag

SEQ ID NO: 2590675 - RNA, 18 nt, Human
guccucuggauggcacca

SEQ ID NO: 2590676 - RNA, 11 nt, Human
guccucuggau

SEQ ID NO: 2590677 - RNA, 19 nt, Human
guccucugauacccagagc

SEQ ID NO: 2590678 - RNA, 18 nt, Human
guccucucuggcugggga

SEQ ID NO: 2590679 - RNA, 18 nt, Human
guccucugucagucacag

SEQ ID NO: 2590680 - RNA, 19 nt, Human
guccucugucagucacagc

SEQ ID NO: 2590681 - RNA, 20 nt, Human
guccucugucagucacagcc

SEQ ID NO: 2590682 - RNA, 23 nt, Human
guccucugucagucacagccacc

SEQ ID NO: 2590683 - RNA, 17 nt, Human
guccucucuggcugggg

SEQ ID NO: 2590684 - RNA, 16 nt, Human
guccucucuggcuggg

SEQ ID NO: 2590685 - RNA, 13 nt, Human
guccucugaauga

SEQ ID NO: 2590686 - RNA, 17 nt, Human
guccucugaaugaaccu

SEQ ID NO: 2590687 - RNA, 21 nt, Human
guccugaggguccccaccugg

SEQ ID NO: 2590688 - RNA, 18 nt, Human
guccugaggguccccacc

SEQ ID NO: 2590689 - RNA, 19 nt, Human
guccugcagucuggcugag

SEQ ID NO: 2590690 - RNA, 15 nt, Human
guccugaucagagcc

SEQ ID NO: 2590691 - RNA, 14 nt, Human
guccugccaccugg

SEQ ID NO: 2590692 - RNA, 16 nt, Human
guccugccaccugggg

SEQ ID NO: 2590693 - RNA, 17 nt, Human
guccugccaccuggggc

SEQ ID NO: 2590694 - RNA, 18 nt, Human
guccugccaccuggggca

SEQ ID NO: 2590695 - RNA, 15 nt, Human
guccugccucagccu

SEQ ID NO: 2590696 - RNA, 17 nt, Human
guccugccucagccucc

SEQ ID NO: 2590697 - RNA, 13 nt, Human
guccugccuggcc

SEQ ID NO: 2590698 - RNA, 14 nt, Human
guccugccuggcca

SEQ ID NO: 2590699 - RNA, 15 nt, Human
guccugccuggccag

SEQ ID NO: 2590700 - RNA, 14 nt, Human
guccugccuguggc

SEQ ID NO: 2590701 - RNA, 13 nt, Human
guccugccugugg

SEQ ID NO: 2590702 - RNA, 11 nt, Human
guccugccugu

SEQ ID NO: 2590703 - RNA, 23 nt, Human
guccugccugucugaagccaaug

SEQ ID NO: 2590704 - RNA, 19 nt, Human
guccugccuggccaggcag

SEQ ID NO: 2590705 - RNA, 20 nt, Human
guccugccuggccaggcaga

SEQ ID NO: 2590706 - RNA, 15 nt, Human
guccuucaccucacu

SEQ ID NO: 2590707 - RNA, 15 nt, Human
guccuucagauggaa

SEQ ID NO: 2590708 - RNA, 21 nt, Human
guccuucaccucacugaaaac

SEQ ID NO: 2590709 - RNA, 14 nt, Human
guccuuccaccucg

SEQ ID NO: 2590710 - RNA, 13 nt, Human
guccgagcuuuga

SEQ ID NO: 2590711 - RNA, 15 nt, Human
guccgaucuuugacu

SEQ ID NO: 2590712 - RNA, 23 nt, Human
gucccaagcugggccccagccca

SEQ ID NO: 2590713 - RNA, 20 nt, Human
guccgcccugcuccucccug

SEQ ID NO: 2590714 - RNA, 18 nt, Human
guccgcccugcuccuccc

SEQ ID NO: 2590715 - RNA, 12 nt, Human
guccgcccugcu

SEQ ID NO: 2590716 - RNA, 21 nt, Human
gucccaacaggaggacaauuc

SEQ ID NO: 2590717 - RNA, 20 nt, Human
gucccaacaggaggacaauu

SEQ ID NO: 2590718 - RNA, 15 nt, Human
gucccaacuuguaaa

SEQ ID NO: 2590719 - RNA, 16 nt, Human
gucccaagcugggccc

SEQ ID NO: 2590720 - RNA, 15 nt, Human
gucccaagcugggcc

SEQ ID NO: 2590721 - RNA, 13 nt, Human
gucccaagcuggg

SEQ ID NO: 2590722 - RNA, 23 nt, Human
gucccaacaggaggacaauucau

SEQ ID NO: 2590723 - RNA, 22 nt, Human
gucccaagcugggccccagccc

SEQ ID NO: 2590724 - RNA, 21 nt, Human
gucccaagcugggccccagcc

SEQ ID NO: 2590725 - RNA, 16 nt, Human
gucccaaggaaagccc

SEQ ID NO: 2590726 - RNA, 17 nt, Human
guccggacacuccuaga

SEQ ID NO: 2590727 - RNA, 18 nt, Human
aacacuuuacaauguuca

SEQ ID NO: 2590728 - RNA, 13 nt, Human
aacagaaacaaaa

SEQ ID NO: 2590729 - RNA, 19 nt, Human
aacagaaaacauucugauu

SEQ ID NO: 2590730 - RNA, 14 nt, Human
aacagaaaacauuc

SEQ ID NO: 2590731 - RNA, 23 nt, Human
guccgcccugcuccucccuggcu

SEQ ID NO: 2590732 - RNA, 21 nt, Human
guccgcccugcuccucccugg

SEQ ID NO: 2590733 - RNA, 22 nt, Human
guccgcugggugguacccucug

SEQ ID NO: 2590734 - RNA, 18 nt, Human
guccggacacuccuagag

SEQ ID NO: 2590735 - RNA, 23 nt, Human
guccgcgcgccagcacagaaaca

SEQ ID NO: 2590736 - RNA, 21 nt, Human
guccggucccugucccagugc

SEQ ID NO: 2590737 - RNA, 10 nt, Human
aacagaaaug

SEQ ID NO: 2590738 - RNA, 11 nt, Human
aacagaaaugu

SEQ ID NO: 2590739 - RNA, 21 nt, Human
aacagaaauguacagcaagga

SEQ ID NO: 2590740 - RNA, 22 nt, Human
aacagaaagccugggugacauu

SEQ ID NO: 2590741 - RNA, 16 nt, Human
aacagaaacaaaaaca

SEQ ID NO: 2590742 - RNA, 18 nt, Human
aacagaaagggcaacaau

SEQ ID NO: 2590743 - RNA, 16 nt, Human
aacagaacagcuucag

SEQ ID NO: 2590744 - RNA, 15 nt, Human
aacagaacagcuuca

SEQ ID NO: 2590745 - RNA, 14 nt, Human
aacagaacagcuuc

SEQ ID NO: 2590746 - RNA, 13 nt, Human
aacagaacagcuu

SEQ ID NO: 2590747 - RNA, 18 nt, Human
aacagacauuguuuugcc

SEQ ID NO: 2590748 - RNA, 15 nt, Human
aacagacauuguuuu

SEQ ID NO: 2590749 - RNA, 14 nt, Human
aacagacauuguuu

SEQ ID NO: 2590750 - RNA, 13 nt, Human
aacagacauuguu

SEQ ID NO: 2590751 - RNA, 18 nt, Human
aacagaccuaaugcuccu

SEQ ID NO: 2590752 - RNA, 19 nt, Human
aacagacccccucuagaaa

SEQ ID NO: 2590753 - RNA, 22 nt, Human
aacagacauuguuuugccaaca

SEQ ID NO: 2590754 - RNA, 18 nt, Human
aacagacccccucuagaa

SEQ ID NO: 2590755 - RNA, 20 nt, Human
aacagaacaucauuagaaca

SEQ ID NO: 2590756 - RNA, 11 nt, Human
aacagacagga

SEQ ID NO: 2590757 - RNA, 19 nt, Human
aacagacaccaucuuuugu

SEQ ID NO: 2590758 - RNA, 12 nt, Human
aacagacauugu

SEQ ID NO: 2590759 - RNA, 11 nt, Human
aacagacauug

SEQ ID NO: 2590760 - RNA, 14 nt, Human
aacagacaggagaa

SEQ ID NO: 2590761 - RNA, 15 nt, Human
aacagacaggagaaa

SEQ ID NO: 2590762 - RNA, 16 nt, Human
aacagugcuaaaaaug

SEQ ID NO: 2590763 - RNA, 15 nt, Human
aacagugcuaaaaau

SEQ ID NO: 2590764 - RNA, 23 nt, Human
aacagugcuaaaaaugggacuuc

SEQ ID NO: 2590765 - RNA, 20 nt, Human
aacagugcuugccacagagc

SEQ ID NO: 2590766 - RNA, 15 nt, Human
aacaguggaauauaa

SEQ ID NO: 2590767 - RNA, 12 nt, Human
aacaguagcaua

SEQ ID NO: 2590768 - RNA, 20 nt, Human
aacagugugaaguuagaauu

SEQ ID NO: 2590769 - RNA, 18 nt, Human
aacagugugaaguuagaa

SEQ ID NO: 2590770 - RNA, 17 nt, Human
aacagugugaaguuaga

SEQ ID NO: 2590771 - RNA, 16 nt, Human
aacagugugaaguuag

SEQ ID NO: 2590772 - RNA, 15 nt, Human
aacagugugaaguua

SEQ ID NO: 2590773 - RNA, 14 nt, Human
aacagugugaaguu

SEQ ID NO: 2590774 - RNA, 13 nt, Human
aacagugugaagu

SEQ ID NO: 2590775 - RNA, 22 nt, Human
aacagugugaaguuagaauucc

SEQ ID NO: 2590776 - RNA, 20 nt, Human
aacaguguuaggccuggcac

SEQ ID NO: 2590777 - RNA, 13 nt, Human
aacaguuuguaca

SEQ ID NO: 2590778 - RNA, 15 nt, Human
aacagugccugcuga

SEQ ID NO: 2590779 - RNA, 14 nt, Human
aacaguuuguacag

SEQ ID NO: 2590780 - RNA, 11 nt, Human
aacaguuuucc

SEQ ID NO: 2590781 - RNA, 13 nt, Human
aacaguuuuccau

SEQ ID NO: 2590782 - RNA, 14 nt, Human
aacaguuuuccaug

SEQ ID NO: 2590783 - RNA, 15 nt, Human
aacaguguuucccau

SEQ ID NO: 2590784 - RNA, 23 nt, Human
aacaguguuaggccuggcacagu

SEQ ID NO: 2590785 - RNA, 22 nt, Human
aacaguguuaggccuggcacag

SEQ ID NO: 2590786 - RNA, 13 nt, Human
aacaguguuuccc

SEQ ID NO: 2590787 - RNA, 18 nt, Human
aacaguguuucccauaau

SEQ ID NO: 2590788 - RNA, 22 nt, Human
aacaguagugauaguuguaccg

SEQ ID NO: 2590789 - RNA, 14 nt, Human
aacaguaaaugugc

SEQ ID NO: 2590790 - RNA, 23 nt, Human
aacaggcugggcuucaguggcag

SEQ ID NO: 2590791 - RNA, 13 nt, Human
aacaggcugggcu

SEQ ID NO: 2590792 - RNA, 22 nt, Human
aacaggcugggcuucaguggca

SEQ ID NO: 2590793 - RNA, 19 nt, Human
aacagacuggaagcacagc

SEQ ID NO: 2590794 - RNA, 17 nt, Human
aacagacuauuuaacuu

SEQ ID NO: 2590795 - RNA, 13 nt, Human
aacagacuauuua

SEQ ID NO: 2590796 - RNA, 20 nt, Human
aacagacuauuuaacuugag

SEQ ID NO: 2590797 - RNA, 13 nt, Human
aacagacucaggu

SEQ ID NO: 2590798 - RNA, 19 nt, Human
aacagacucgauucauauu

SEQ ID NO: 2590799 - RNA, 16 nt, Human
aacaagaccacguuuc

SEQ ID NO: 2590800 - RNA, 17 nt, Human
aacaagaccacguuucu

SEQ ID NO: 2590801 - RNA, 19 nt, Human
aacaagaccacguuucuaa

SEQ ID NO: 2590802 - RNA, 20 nt, Human
aacaagaccacguuucuaaa

SEQ ID NO: 2590803 - RNA, 22 nt, Human
aacaagaccaccacuucgaaac

SEQ ID NO: 2590804 - RNA, 21 nt, Human
aacaagccuccuuuuaaagua

SEQ ID NO: 2590805 - RNA, 15 nt, Human
aacaaggaugaauua

SEQ ID NO: 2590806 - RNA, 14 nt, Human
aacaaggaagucaa

SEQ ID NO: 2590807 - RNA, 15 nt, Human
gucacaggcaggucc

SEQ ID NO: 2590808 - RNA, 13 nt, Human
gucacaggcaggu

SEQ ID NO: 2590809 - RNA, 14 nt, Human
gucacacagggcag

SEQ ID NO: 2590810 - RNA, 16 nt, Human
gucacaggcaggucca

SEQ ID NO: 2590811 - RNA, 21 nt, Human
aaauuuuucagaugcuucugg

SEQ ID NO: 2590812 - RNA, 17 nt, Human
aaauuuuucagaugcuu

SEQ ID NO: 2590813 - RNA, 18 nt, Human
aaauuuuucagaugcuuc

SEQ ID NO: 2590814 - RNA, 20 nt, Human
aaauuuuucagaugcuucug

SEQ ID NO: 2590815 - RNA, 23 nt, Human
aaauuuuuaaucuuuaauuuuac

SEQ ID NO: 2590816 - RNA, 15 nt, Human
aaauuuuuauuuuuc

SEQ ID NO: 2590817 - RNA, 21 nt, Human
aaauuuugugauauggagccc

SEQ ID NO: 2590818 - RNA, 23 nt, Human
aacaaggcaaggcugucaauuac

SEQ ID NO: 2590819 - RNA, 20 nt, Human
aacaagggagagaccucauc

SEQ ID NO: 2590820 - RNA, 21 nt, Human
aacaagggagagaccucauca

SEQ ID NO: 2590821 - RNA, 19 nt, Human
aacaaggguggcaucccag

SEQ ID NO: 2590822 - RNA, 16 nt, Human
aacaagguaguuuuua

SEQ ID NO: 2590823 - RNA, 16 nt, Human
aacaagucccuguaau

SEQ ID NO: 2590824 - RNA, 15 nt, Human
aacaauaaaugugca

SEQ ID NO: 2590825 - RNA, 19 nt, Human
aacaauacucauaauguga

SEQ ID NO: 2590826 - RNA, 19 nt, Human
aacaauaaauguuggcuug

SEQ ID NO: 2590827 - RNA, 15 nt, Human
aacaauaacuacugu

SEQ ID NO: 2590828 - RNA, 17 nt, Human
aacaauaacuacugugu

SEQ ID NO: 2590829 - RNA, 18 nt, Human
aacaauaacuacuguguu

SEQ ID NO: 2590830 - RNA, 19 nt, Human
aacaauaacuacuguguuc

SEQ ID NO: 2590831 - RNA, 20 nt, Human
aacaauaacuacuguguucc

SEQ ID NO: 2590832 - RNA, 21 nt, Human
aacaauaacuacuguguuccu

SEQ ID NO: 2590833 - RNA, 18 nt, Human
aacaauaguaauucucag

SEQ ID NO: 2590834 - RNA, 18 nt, Human
aacaauaggcuguuccca

SEQ ID NO: 2590835 - RNA, 20 nt, Human
aacaauacucauaaugugaa

SEQ ID NO: 2590836 - RNA, 21 nt, Human
aacaauacucauaaugugaag

SEQ ID NO: 2590837 - RNA, 16 nt, Human
aacaauauuguuucua

SEQ ID NO: 2590838 - RNA, 22 nt, Human
aacaauccuagugcuuuccuuu

SEQ ID NO: 2590839 - RNA, 23 nt, Human
aacaaucaaagcacuuggacucu

SEQ ID NO: 2590840 - RNA, 20 nt, Human
aacaauuugagauguauuuc

SEQ ID NO: 2590841 - RNA, 23 nt, Human
aacaauuuuaggaggaccagagc

SEQ ID NO: 2590842 - RNA, 13 nt, Human
aacaauuuuaaug

SEQ ID NO: 2590843 - RNA, 13 nt, Human
aacaauuucuguc

SEQ ID NO: 2590844 - RNA, 22 nt, Human
aacaauuuccuuuauauuuagu

SEQ ID NO: 2590845 - RNA, 21 nt, Human
aacaauuuccuuuauauuuag

SEQ ID NO: 2590846 - RNA, 16 nt, Human
aacaauuuaugaauug

SEQ ID NO: 2590847 - RNA, 20 nt, Human
aacaauuuccuuuauauuua

SEQ ID NO: 2590848 - RNA, 13 nt, Human
aacaauuuaugaa

SEQ ID NO: 2590849 - RNA, 14 nt, Human
aacaauugugaagu

SEQ ID NO: 2590850 - RNA, 14 nt, Human
aacaaugaagauaa

SEQ ID NO: 2590851 - RNA, 18 nt, Human
aacaaugaagauaaaaag

SEQ ID NO: 2590852 - RNA, 17 nt, Human
aacaauccuagugcuuu

SEQ ID NO: 2590853 - RNA, 15 nt, Human
aacaaugacauuuau

SEQ ID NO: 2590854 - RNA, 15 nt, Human
aacaaugauauaugg

SEQ ID NO: 2590855 - RNA, 14 nt, Human
aacaaugauauaug

SEQ ID NO: 2590856 - RNA, 24 nt, Human
guccaagcauaccaacacgagcag

SEQ ID NO: 2590857 - RNA, 22 nt, Human
gucauuugcugagcauguacug

SEQ ID NO: 2590858 - RNA, 21 nt, Human
gucauuuuaacuuuaucacau

SEQ ID NO: 2590859 - RNA, 21 nt, Human
gucauuugcugagcauguacu

SEQ ID NO: 2590860 - RNA, 22 nt, Human
gucauuugagcagggcucagcg

SEQ ID NO: 2590861 - RNA, 11 nt, Human
aacacuuccau

SEQ ID NO: 2590862 - RNA, 21 nt, Human
gucauuugagcagggcucagc

SEQ ID NO: 2590863 - RNA, 21 nt, Human
aacacuguucucugcccucca

SEQ ID NO: 2590864 - RNA, 22 nt, Human
aacacuuaaggguuuuagaaaa

SEQ ID NO: 2590865 - RNA, 15 nt, Human
guccacaacacacag

SEQ ID NO: 2590866 - RNA, 15 nt, Human
guccacagaugccuc

SEQ ID NO: 2590867 - RNA, 17 nt, Human
guccacagaugccucca

SEQ ID NO: 2590868 - RNA, 12 nt, Human
guccaauguggc

SEQ ID NO: 2590869 - RNA, 20 nt, Human
guccacaaaauaaccaaucc

SEQ ID NO: 2590870 - RNA, 19 nt, Human
guccaauuuguaaaaacag

SEQ ID NO: 2590871 - RNA, 22 nt, Human
guccauuuggcagggguggcug

SEQ ID NO: 2590872 - RNA, 21 nt, Human
guccauuguccaauccuaugu

SEQ ID NO: 2590873 - RNA, 16 nt, Human
guccauuguccaaucc

SEQ ID NO: 2590874 - RNA, 22 nt, Human
guccauugacauguacagagaa

SEQ ID NO: 2590875 - RNA, 16 nt, Human
guccacagaugccucc

SEQ ID NO: 2590876 - RNA, 21 nt, Human
guccaagcauuuagauguaua

SEQ ID NO: 2590877 - RNA, 22 nt, Human
guccaaggaaaccacagcugcu

SEQ ID NO: 2590878 - RNA, 17 nt, Human
guccaaggaaaccacag

SEQ ID NO: 2590879 - RNA, 15 nt, Human
guccaagcugggaga

SEQ ID NO: 2590880 - RNA, 22 nt, Human
guccaaggaaacuugaaucaaa

SEQ ID NO: 2590881 - RNA, 17 nt, Human
guccaauccuauguuuu

SEQ ID NO: 2590882 - RNA, 12 nt, Human
guccaauccuau

SEQ ID NO: 2590883 - RNA, 19 nt, Human
guccaagugugugugcgug

SEQ ID NO: 2590884 - RNA, 15 nt, Human
guccaagugugugug

SEQ ID NO: 2590885 - RNA, 16 nt, Human
guccaagugugugugc

SEQ ID NO: 2590886 - RNA, 17 nt, Human
guccaagugugugugcg

SEQ ID NO: 2590887 - RNA, 17 nt, Human
aacacucauugaccuga

SEQ ID NO: 2590888 - RNA, 17 nt, Human
aacacuccaauuaagga

SEQ ID NO: 2590889 - RNA, 21 nt, Human
aacacucauugaccugaggcc

SEQ ID NO: 2590890 - RNA, 11 nt, Human
aacacucugag

SEQ ID NO: 2590891 - RNA, 12 nt, Human
aacacuccuuca

SEQ ID NO: 2590892 - RNA, 13 nt, Human
aacacucugagac

SEQ ID NO: 2590893 - RNA, 12 nt, Human
aacacucugaga

SEQ ID NO: 2590894 - RNA, 14 nt, Human
aacacucugagacu

SEQ ID NO: 2590895 - RNA, 12 nt, Human
aacacucuuuug

SEQ ID NO: 2590896 - RNA, 13 nt, Human
aacacucuauauu

SEQ ID NO: 2590897 - RNA, 14 nt, Human
aacacugcuugugu

SEQ ID NO: 2590898 - RNA, 22 nt, Human
aacacugccaucuuaguuugga

SEQ ID NO: 2590899 - RNA, 14 nt, Human
aacacugcaggcau

SEQ ID NO: 2590900 - RNA, 17 nt, Human
aacacugcuuguguuuu

SEQ ID NO: 2590901 - RNA, 16 nt, Human
aacacucuuuugcuuu

SEQ ID NO: 2590902 - RNA, 19 nt, Human
aacacucuuuugcuuuauu

SEQ ID NO: 2590903 - RNA, 15 nt, Human
aacacugagcuguca

SEQ ID NO: 2590904 - RNA, 20 nt, Human
aacacuguucucugcccucc

SEQ ID NO: 2590905 - RNA, 15 nt, Human
aacacuguucucugc

SEQ ID NO: 2590906 - RNA, 16 nt, Human
aacacugugcccuggu

SEQ ID NO: 2590907 - RNA, 15 nt, Human
aacacugugcccugg

SEQ ID NO: 2590908 - RNA, 13 nt, Human
aacacugugcccu

SEQ ID NO: 2590909 - RNA, 12 nt, Human
aacacugugaaa

SEQ ID NO: 2590910 - RNA, 21 nt, Human
aacacugugcccugguggaga

SEQ ID NO: 2590911 - RNA, 18 nt, Human
aacacugugcccuggugg

SEQ ID NO: 2590912 - RNA, 20 nt, Human
aacacugugcacaucugugu

SEQ ID NO: 2590913 - RNA, 22 nt, Human
aacacugugcacaucugugucu

SEQ ID NO: 2590914 - RNA, 16 nt, Human
aacacugucuugaaga

SEQ ID NO: 2590915 - RNA, 12 nt, Human
gucucccaaggc

SEQ ID NO: 2590916 - RNA, 17 nt, Human
gucucccacgugggaga

SEQ ID NO: 2590917 - RNA, 15 nt, Human
gucucauccaucauc

SEQ ID NO: 2590918 - RNA, 16 nt, Human
gucucauccaucauca

SEQ ID NO: 2590919 - RNA, 12 nt, Human
gucucaucccau

SEQ ID NO: 2590920 - RNA, 11 nt, Human
gucucauccca

SEQ ID NO: 2590921 - RNA, 13 nt, Human
gucucauccccag

SEQ ID NO: 2590922 - RNA, 16 nt, Human
gucucauccccagggg

SEQ ID NO: 2590923 - RNA, 14 nt, Human
gucucauccccagg

SEQ ID NO: 2590924 - RNA, 15 nt, Human
gucucauccccaggg

SEQ ID NO: 2590925 - RNA, 19 nt, Human
gucucaguuugugugucuu

SEQ ID NO: 2590926 - RNA, 18 nt, Human
gucucaguuugugugucu

SEQ ID NO: 2590927 - RNA, 21 nt, Human
gucucaguuugugugucuuaa

SEQ ID NO: 2590928 - RNA, 11 nt, Human
guccuugaaaa

SEQ ID NO: 2590929 - RNA, 18 nt, Human
gucucaguggcuucaucu

SEQ ID NO: 2590930 - RNA, 22 nt, Human
gucucaguggcuucaucuguca

SEQ ID NO: 2590931 - RNA, 15 nt, Human
gucucaguuucacuu

SEQ ID NO: 2590932 - RNA, 14 nt, Human
guccuugaaaauau

SEQ ID NO: 2590933 - RNA, 19 nt, Human
guccuucucucaccuccua

SEQ ID NO: 2590934 - RNA, 18 nt, Human
guccuucucucaccuccu

SEQ ID NO: 2590935 - RNA, 17 nt, Human
guccuucucucaccucc

SEQ ID NO: 2590936 - RNA, 14 nt, Human
guccuuccaggccc

SEQ ID NO: 2590937 - RNA, 22 nt, Human
guccuuccaggcccccaccacu

SEQ ID NO: 2590938 - RNA, 12 nt, Human
guccuucccucu

SEQ ID NO: 2590939 - RNA, 21 nt, Human
guccuucccucuccccaagac

SEQ ID NO: 2590940 - RNA, 13 nt, Human
gucuccucagccu

SEQ ID NO: 2590941 - RNA, 21 nt, Human
gucuccucacucccuucuacc

SEQ ID NO: 2590942 - RNA, 15 nt, Human
gucuccucacucccu

SEQ ID NO: 2590943 - RNA, 14 nt, Human
gucuccucacuccc

SEQ ID NO: 2590944 - RNA, 18 nt, Human
gucuccuauccugguuuu

SEQ ID NO: 2590945 - RNA, 14 nt, Human
gucuccuauccugg

SEQ ID NO: 2590946 - RNA, 16 nt, Human
gucucccucccuuggg

SEQ ID NO: 2590947 - RNA, 17 nt, Human
gucuccucagccuccuc

SEQ ID NO: 2590948 - RNA, 14 nt, Human
gucuccucagccuc

SEQ ID NO: 2590949 - RNA, 23 nt, Human
gucuccucagccuccucaucugg

SEQ ID NO: 2590950 - RNA, 21 nt, Human
gucuccuccaccgccauggcu

SEQ ID NO: 2590951 - RNA, 12 nt, Human
gucuccuccacc

SEQ ID NO: 2590952 - RNA, 14 nt, Human
gucuccuccaccgc

SEQ ID NO: 2590953 - RNA, 15 nt, Human
gucuccucucagccc

SEQ ID NO: 2590954 - RNA, 14 nt, Human
gucuccucuuaaaa

SEQ ID NO: 2590955 - RNA, 22 nt, Human
gucuccucuuaaaaaauaaaaa

SEQ ID NO: 2590956 - RNA, 23 nt, Human
gucuccucuuaaaaaauaaaaac

SEQ ID NO: 2590957 - RNA, 22 nt, Human
aacauuuuguggucauuaagca

SEQ ID NO: 2590958 - RNA, 18 nt, Human
aaccaaaaagaccagacu

SEQ ID NO: 2590959 - RNA, 21 nt, Human
aaccaucauugaaaucuuuuu

SEQ ID NO: 2590960 - RNA, 23 nt, Human
aaccaucauugaaaucuuuuugc

SEQ ID NO: 2590961 - RNA, 20 nt, Human
aaccaucauugaaaucuuuu

SEQ ID NO: 2590962 - RNA, 19 nt, Human
aaccaucauugaaaucuuu

SEQ ID NO: 2590963 - RNA, 22 nt, Human
aaccacaucuugcucugcugac

SEQ ID NO: 2590964 - RNA, 20 nt, Human
aaccacaucuugcucugcug

SEQ ID NO: 2590965 - RNA, 12 nt, Human
aaccacagcagu

SEQ ID NO: 2590966 - RNA, 18 nt, Human
aaccacaucuugcucugc

SEQ ID NO: 2590967 - RNA, 21 nt, Human
aaccacaccacaucuaagccu

SEQ ID NO: 2590968 - RNA, 23 nt, Human
aaccacaccacaucuaagccuga

SEQ ID NO: 2590969 - RNA, 13 nt, Human
aaccacaccacau

SEQ ID NO: 2590970 - RNA, 16 nt, Human
aaccaaagagacugga

SEQ ID NO: 2590971 - RNA, 19 nt, Human
aaccaaagagggcuuccuc

SEQ ID NO: 2590972 - RNA, 23 nt, Human
aaccaaagagacuggagcaucug

SEQ ID NO: 2590973 - RNA, 19 nt, Human
aaccaaagagacuggagca

SEQ ID NO: 2590974 - RNA, 13 nt, Human
aaccaaagaagaa

SEQ ID NO: 2590975 - RNA, 20 nt, Human
aaccaaaaagaccagacuaa

SEQ ID NO: 2590976 - RNA, 19 nt, Human
aaccaaaaagaccagacua

SEQ ID NO: 2590977 - RNA, 21 nt, Human
aaccaaaagaacaagaauuuc

SEQ ID NO: 2590978 - RNA, 19 nt, Human
aaccaaagcgaauuuuaaa

SEQ ID NO: 2590979 - RNA, 15 nt, Human
aaccaauauuuguag

SEQ ID NO: 2590980 - RNA, 13 nt, Human
aaccaauccugga

SEQ ID NO: 2590981 - RNA, 13 nt, Human
aaccuccuggaca

SEQ ID NO: 2590982 - RNA, 14 nt, Human
aaccuccucuguga

SEQ ID NO: 2590983 - RNA, 15 nt, Human
aaccuccucugugaa

SEQ ID NO: 2590984 - RNA, 19 nt, Human
aaccucuaauuuauuuugu

SEQ ID NO: 2590985 - RNA, 14 nt, Human
aaccuccugggcua

SEQ ID NO: 2590986 - RNA, 19 nt, Human
aaccuccgccucccggguu

SEQ ID NO: 2590987 - RNA, 12 nt, Human
aaccuccucugu

SEQ ID NO: 2590988 - RNA, 13 nt, Human
aaccuccucugug

SEQ ID NO: 2590989 - RNA, 17 nt, Human
aaccuccgccucuuggg

SEQ ID NO: 2590990 - RNA, 22 nt, Human
aaccucagacuuaccaggaagc

SEQ ID NO: 2590991 - RNA, 13 nt, Human
aaccucagccugg

SEQ ID NO: 2590992 - RNA, 14 nt, Human
aaccucagccuggc

SEQ ID NO: 2590993 - RNA, 19 nt, Human
aaccucagacuuaccagga

SEQ ID NO: 2590994 - RNA, 17 nt, Human
aaccucacucuugccaa

SEQ ID NO: 2590995 - RNA, 16 nt, Human
aaccucacucuugcca

SEQ ID NO: 2590996 - RNA, 15 nt, Human
aaccucacucuugcc

SEQ ID NO: 2590997 - RNA, 11 nt, Human
aaccucagccu

SEQ ID NO: 2590998 - RNA, 12 nt, Human
aaccucagccug

SEQ ID NO: 2590999 - RNA, 17 nt, Human
aaccucaacugccuacu

SEQ ID NO: 2591000 - RNA, 18 nt, Human
aaccucaacugccuacuc

SEQ ID NO: 2591001 - RNA, 16 nt, Human
aaccucaacugccuac

SEQ ID NO: 2591002 - RNA, 15 nt, Human
aaccucaaagugacu

SEQ ID NO: 2591003 - RNA, 21 nt, Human
aaccucacccgaggcugccca

SEQ ID NO: 2591004 - RNA, 13 nt, Human
aaccucacucuug

SEQ ID NO: 2591005 - RNA, 12 nt, Human
aaccucacucuu

SEQ ID NO: 2591006 - RNA, 19 nt, Human
aaccucacgcaccucccau

SEQ ID NO: 2591007 - RNA, 22 nt, Human
aaccucacgcaccucccauccu

SEQ ID NO: 2591008 - RNA, 15 nt, Human
aacccccagccugcu

SEQ ID NO: 2591009 - RNA, 14 nt, Human
aacccccagccugc

SEQ ID NO: 2591010 - RNA, 13 nt, Human
aacccccagccug

SEQ ID NO: 2591011 - RNA, 14 nt, Human
aaccccagcauccu

SEQ ID NO: 2591012 - RNA, 12 nt, Human
aaccccagcucc

SEQ ID NO: 2591013 - RNA, 13 nt, Human
aaccccaggcccc

SEQ ID NO: 2591014 - RNA, 11 nt, Human
aaccccagccg

SEQ ID NO: 2591015 - RNA, 19 nt, Human
aacccccagcacccgggcu

SEQ ID NO: 2591016 - RNA, 20 nt, Human
aaccuagggugauauuaacc

SEQ ID NO: 2591017 - RNA, 16 nt, Human
aaccuauaugauuuau

SEQ ID NO: 2591018 - RNA, 22 nt, Human
aaccuaugauauuuucugugcc

SEQ ID NO: 2591019 - RNA, 16 nt, Human
aaccuauuuugaaaaa

SEQ ID NO: 2591020 - RNA, 17 nt, Human
aaccucaaaaugucuaa

SEQ ID NO: 2591021 - RNA, 22 nt, Human
aaccuauuuugaaaaauuccua

SEQ ID NO: 2591022 - RNA, 21 nt, Human
aaccuauuuugaaaaauuccu

SEQ ID NO: 2591023 - RNA, 23 nt, Human
aaccuauuuugaaaaauuccuau

SEQ ID NO: 2591024 - RNA, 18 nt, Human
aacccaaauguucaucaa

SEQ ID NO: 2591025 - RNA, 11 nt, Human
aacccagcucu

SEQ ID NO: 2591026 - RNA, 14 nt, Human
aacccagcucuggu

SEQ ID NO: 2591027 - RNA, 13 nt, Human
aacccagcucugg

SEQ ID NO: 2591028 - RNA, 13 nt, Human
aacccaaauguuc

SEQ ID NO: 2591029 - RNA, 23 nt, Human
aaccauuuugcugucccuuuucc

SEQ ID NO: 2591030 - RNA, 20 nt, Human
aaccauuuuuuuucagcaga

SEQ ID NO: 2591031 - RNA, 21 nt, Human
aaccaugucagcaaaaagcaa

SEQ ID NO: 2591032 - RNA, 17 nt, Human
aaccaugucagcaaaaa

SEQ ID NO: 2591033 - RNA, 23 nt, Human
aaccaugucagcaaaaagcaaaa

SEQ ID NO: 2591034 - RNA, 20 nt, Human
aaccauguaaagaacauaaa

SEQ ID NO: 2591035 - RNA, 17 nt, Human
aaccauguagaaaauuu

SEQ ID NO: 2591036 - RNA, 16 nt, Human
aaccauggcugaagga

SEQ ID NO: 2591037 - RNA, 22 nt, Human
aaccauggcugaaggaaaccag

SEQ ID NO: 2591038 - RNA, 20 nt, Human
aaccccacccuugcccaccc

SEQ ID NO: 2591039 - RNA, 13 nt, Human
aacccauuuuagu

SEQ ID NO: 2591040 - RNA, 16 nt, Human
aaccccaacuccagua

SEQ ID NO: 2591041 - RNA, 15 nt, Human
aacccaugagauuca

SEQ ID NO: 2591042 - RNA, 11 nt, Human
aacccaggagg

SEQ ID NO: 2591043 - RNA, 15 nt, Human
aacccaucagaagga

SEQ ID NO: 2591044 - RNA, 17 nt, Human
aacccaucagaaggaga

SEQ ID NO: 2591045 - RNA, 19 nt, Human
aacccaucagaaggagaag

SEQ ID NO: 2591046 - RNA, 20 nt, Human
aacccauauuuguacaccaa

SEQ ID NO: 2591047 - RNA, 22 nt, Human
aacccaggagcauccaccuccu

SEQ ID NO: 2591048 - RNA, 20 nt, Human
aacccaggagcauccaccuc

SEQ ID NO: 2591049 - RNA, 20 nt, Human
aacccaucaacaaaaauugu

SEQ ID NO: 2591050 - RNA, 17 nt, Human
aacccagcucuggucca

SEQ ID NO: 2591051 - RNA, 16 nt, Human
aacccaggacgcuucu

SEQ ID NO: 2591052 - RNA, 13 nt, Human
aacccaggagcau

SEQ ID NO: 2591053 - RNA, 19 nt, Human
aacccaggacgcuucugaa

SEQ ID NO: 2591054 - RNA, 18 nt, Human
aacccaggacgcuucuga

SEQ ID NO: 2591055 - RNA, 17 nt, Human
aacccaggacgcuucug

SEQ ID NO: 2591056 - RNA, 12 nt, Human
aacccaggaggu

SEQ ID NO: 2591057 - RNA, 15 nt, Human
aacccaguugccauc

SEQ ID NO: 2591058 - RNA, 19 nt, Human
aacucuaaaagauccuuuu

SEQ ID NO: 2591059 - RNA, 23 nt, Human
aacuccccuuccucacugcccaa

SEQ ID NO: 2591060 - RNA, 14 nt, Human
aacucuaaaagauc

SEQ ID NO: 2591061 - RNA, 18 nt, Human
aacucguuaauuuguagu

SEQ ID NO: 2591062 - RNA, 13 nt, Human
aacucccuuucaa

SEQ ID NO: 2591063 - RNA, 14 nt, Human
aacucccuuucaac

SEQ ID NO: 2591064 - RNA, 12 nt, Human
gugaaccaaaga

SEQ ID NO: 2591065 - RNA, 24 nt, Human
gugaacauuuaucaaucaguauaa

SEQ ID NO: 2591066 - RNA, 21 nt, Human
gugaacacuagccagacacuc

SEQ ID NO: 2591067 - RNA, 23 nt, Human
aacucuagcugggggugggccag

SEQ ID NO: 2591068 - RNA, 19 nt, Human
gugaaccaccacacccagc

SEQ ID NO: 2591069 - RNA, 15 nt, Human
gugaacacaucagcu

SEQ ID NO: 2591070 - RNA, 15 nt, Human
aacucuaauagugcu

SEQ ID NO: 2591071 - RNA, 21 nt, Human
aacucuaauucccauuuugca

SEQ ID NO: 2591072 - RNA, 12 nt, Human
aacucuagcugg

SEQ ID NO: 2591073 - RNA, 19 nt, Human
aacucuagcuggggguggg

SEQ ID NO: 2591074 - RNA, 13 nt, Human
aacucuaauucua

SEQ ID NO: 2591075 - RNA, 22 nt, Human
aacucuaauucccauuuugcaa

SEQ ID NO: 2591076 - RNA, 21 nt, Human
aacuccagaaagugacaagcu

SEQ ID NO: 2591077 - RNA, 13 nt, Human
aacuccaguagcu

SEQ ID NO: 2591078 - RNA, 13 nt, Human
aacucccugcccc

SEQ ID NO: 2591079 - RNA, 19 nt, Human
aacucccugccccccagcc

SEQ ID NO: 2591080 - RNA, 19 nt, Human
aacuccccuuccucacugc

SEQ ID NO: 2591081 - RNA, 22 nt, Human
aacucccagcaacacaagcugg

SEQ ID NO: 2591082 - RNA, 18 nt, Human
aacuagccaccaacucuu

SEQ ID NO: 2591083 - RNA, 15 nt, Human
aacuagccaccaacu

SEQ ID NO: 2591084 - RNA, 14 nt, Human
aacuagcaccaggg

SEQ ID NO: 2591085 - RNA, 19 nt, Human
aacuagcauaucugccuuu

SEQ ID NO: 2591086 - RNA, 18 nt, Human
aacuagcauaucugccuu

SEQ ID NO: 2591087 - RNA, 17 nt, Human
aacuagcauaucugccu

SEQ ID NO: 2591088 - RNA, 14 nt, Human
aacuagcauaucug

SEQ ID NO: 2591089 - RNA, 20 nt, Human
aacuagauuacauucaguug

SEQ ID NO: 2591090 - RNA, 14 nt, Human
aacuccagaaagug

SEQ ID NO: 2591091 - RNA, 20 nt, Human
aacuagcucuauguuuacaa

SEQ ID NO: 2591092 - RNA, 18 nt, Human
aacuagcuuggaaacugg

SEQ ID NO: 2591093 - RNA, 15 nt, Human
aaccugcucuccucu

SEQ ID NO: 2591094 - RNA, 19 nt, Human
aaccugcccugccugaggg

SEQ ID NO: 2591095 - RNA, 17 nt, Human
aaccugcccugccugag

SEQ ID NO: 2591096 - RNA, 19 nt, Human
aaccugccugacauuugga

SEQ ID NO: 2591097 - RNA, 11 nt, Human
aaccugcucuc

SEQ ID NO: 2591098 - RNA, 15 nt, Human
aacguggcugcuuca

SEQ ID NO: 2591099 - RNA, 20 nt, Human
aaccugcucuccucuugcca

SEQ ID NO: 2591100 - RNA, 23 nt, Human
aaccugcuuggguggagaagcca

SEQ ID NO: 2591101 - RNA, 22 nt, Human
aaccugcuuggguggagaagcc

SEQ ID NO: 2591102 - RNA, 19 nt, Human
aacguggcugcuucaagga

SEQ ID NO: 2591103 - RNA, 16 nt, Human
aacguggcugcuucaa

SEQ ID NO: 2591104 - RNA, 22 nt, Human
aacguggcugcuucaaggaucc

SEQ ID NO: 2591105 - RNA, 15 nt, Human
aacuaaacucauuua

SEQ ID NO: 2591106 - RNA, 16 nt, Human
aacuaaacucauuuau

SEQ ID NO: 2591107 - RNA, 10 nt, Human
aaccuggaga

SEQ ID NO: 2591108 - RNA, 19 nt, Human
aaccuggagagcuagaacc

SEQ ID NO: 2591109 - RNA, 13 nt, Human
aacuaaacuuuca

SEQ ID NO: 2591110 - RNA, 16 nt, Human
aacuaaacucucuuug

SEQ ID NO: 2591111 - RNA, 17 nt, Human
aacuaaacucauuuaua

SEQ ID NO: 2591112 - RNA, 18 nt, Human
aacuaaacucauuuauaa

SEQ ID NO: 2591113 - RNA, 17 nt, Human
aacuaaacuuucacacc

SEQ ID NO: 2591114 - RNA, 15 nt, Human
aacuaaacuuucaca

SEQ ID NO: 2591115 - RNA, 16 nt, Human
aacuaaauuguaaacu

SEQ ID NO: 2591116 - RNA, 20 nt, Human
aacuaaauagcauguauugu

SEQ ID NO: 2591117 - RNA, 22 nt, Human
aacuaauaugggcauuguaguu

SEQ ID NO: 2591118 - RNA, 17 nt, Human
aacuaaauagcauguau

SEQ ID NO: 2591119 - RNA, 15 nt, Human
aacuaaauagcaugu

SEQ ID NO: 2591120 - RNA, 19 nt, Human
aacuacaaacaaaauuucu

SEQ ID NO: 2591121 - RNA, 15 nt, Human
aacuacaaacaaaau

SEQ ID NO: 2591122 - RNA, 12 nt, Human
aacuaaugccuu

SEQ ID NO: 2591123 - RNA, 15 nt, Human
aacuaaugccuuacu

SEQ ID NO: 2591124 - RNA, 19 nt, Human
aacuaaucuauuggguuca

SEQ ID NO: 2591125 - RNA, 20 nt, Human
aacuaaucuauuggguucau

SEQ ID NO: 2591126 - RNA, 22 nt, Human
aacuaaucuauuggguucauua

SEQ ID NO: 2591127 - RNA, 13 nt, Human
aacuacaugagaa

SEQ ID NO: 2591128 - RNA, 14 nt, Human
aacuagauggugcu

SEQ ID NO: 2591129 - RNA, 17 nt, Human
aacuagauggugcugag

SEQ ID NO: 2591130 - RNA, 20 nt, Human
aacuagauggugcugagaag

SEQ ID NO: 2591131 - RNA, 13 nt, Human
aacuacaaaucaa

SEQ ID NO: 2591132 - RNA, 22 nt, Human
aacuacaaccaagcucucugca

SEQ ID NO: 2591133 - RNA, 18 nt, Human
gucuucccuaccucaggc

SEQ ID NO: 2591134 - RNA, 21 nt, Human
gucuucccuaccucaggcagg

SEQ ID NO: 2591135 - RNA, 14 nt, Human
gucuuccugacacu

SEQ ID NO: 2591136 - RNA, 18 nt, Human
gucuuccugacacuuuaa

SEQ ID NO: 2591137 - RNA, 12 nt, Human
gucuuccugagu

SEQ ID NO: 2591138 - RNA, 19 nt, Human
gucuuccugacacuuuaau

SEQ ID NO: 2591139 - RNA, 23 nt, Human
gucuuccucccaaguggugccua

SEQ ID NO: 2591140 - RNA, 14 nt, Human
gucuuccucccaag

SEQ ID NO: 2591141 - RNA, 13 nt, Human
gucuuccucccaa

SEQ ID NO: 2591142 - RNA, 18 nt, Human
gucuuccugaaaugcagu

SEQ ID NO: 2591143 - RNA, 24 nt, Human
gucuuagacuugaaauacuacuua

SEQ ID NO: 2591144 - RNA, 18 nt, Human
gucuuagacuugaaauac

SEQ ID NO: 2591145 - RNA, 23 nt, Human
gucuuagacuugaaauacuacuu

SEQ ID NO: 2591146 - RNA, 15 nt, Human
gucuuaguuguacaa

SEQ ID NO: 2591147 - RNA, 16 nt, Human
gucuucccuaccucag

SEQ ID NO: 2591148 - RNA, 15 nt, Human
gucuucccuaccuca

SEQ ID NO: 2591149 - RNA, 15 nt, Human
gucuuagauguauau

SEQ ID NO: 2591150 - RNA, 19 nt, Human
gucuuaauuauuauuugug

SEQ ID NO: 2591151 - RNA, 19 nt, Human
gucuuagaaguggaccagg

SEQ ID NO: 2591152 - RNA, 20 nt, Human
gucuuagaaguggaccagga

SEQ ID NO: 2591153 - RNA, 22 nt, Human
gucuuagaaguggaccaggaca

SEQ ID NO: 2591154 - RNA, 23 nt, Human
gucuuagaaguggaccaggacag

SEQ ID NO: 2591155 - RNA, 19 nt, Human
gucuuuucuugcaugaggc

SEQ ID NO: 2591156 - RNA, 14 nt, Human
gucuuuucuugcau

SEQ ID NO: 2591157 - RNA, 24 nt, Human
gucuuuucuugcaugaggcuagug

SEQ ID NO: 2591158 - RNA, 19 nt, Human
gucuuuugaauauucccaa

SEQ ID NO: 2591159 - RNA, 16 nt, Human
aaccugcccugccuga

SEQ ID NO: 2591160 - RNA, 14 nt, Human
gucuuuugaauauu

SEQ ID NO: 2591161 - RNA, 15 nt, Human
gucuuuggacccuga

SEQ ID NO: 2591162 - RNA, 14 nt, Human
gucuuuggacccug

SEQ ID NO: 2591163 - RNA, 17 nt, Human
gucuuuggacccugagg

SEQ ID NO: 2591164 - RNA, 14 nt, Human
gucuuuucaucugg

SEQ ID NO: 2591165 - RNA, 21 nt, Human
gucuuaauuauuauuuguguu

SEQ ID NO: 2591166 - RNA, 18 nt, Human
gucuuaauuauuauuugu

SEQ ID NO: 2591167 - RNA, 13 nt, Human
gucuuaauuauua

SEQ ID NO: 2591168 - RNA, 22 nt, Human
gucuuaauuaaaagaauauuuu

SEQ ID NO: 2591169 - RNA, 19 nt, Human
gucuuaauuaaaagaauau

SEQ ID NO: 2591170 - RNA, 21 nt, Human
gucuuaauuaaaagaauauuu

SEQ ID NO: 2591171 - RNA, 12 nt, Human
gucuggcugcag

SEQ ID NO: 2591172 - RNA, 13 nt, Human
gucuggcugcaga

SEQ ID NO: 2591173 - RNA, 14 nt, Human
gucuggcugcagag

SEQ ID NO: 2591174 - RNA, 20 nt, Human
gucugggacuuccuugcucu

SEQ ID NO: 2591175 - RNA, 18 nt, Human
gucugggacuuccuugcu

SEQ ID NO: 2591176 - RNA, 15 nt, Human
gucuggcuucacaga

SEQ ID NO: 2591177 - RNA, 21 nt, Human
gucugggagaaauugacagau

SEQ ID NO: 2591178 - RNA, 16 nt, Human
gucugggagaaauuga

SEQ ID NO: 2591179 - RNA, 24 nt, Human
gucugggacuuccuugcucucccu

SEQ ID NO: 2591180 - RNA, 21 nt, Human
gucugggacuuccuugcucuc

SEQ ID NO: 2591181 - RNA, 20 nt, Human
gucugggaggaauggacaga

SEQ ID NO: 2591182 - RNA, 22 nt, Human
gucugcucuuucucugccagug

SEQ ID NO: 2591183 - RNA, 20 nt, Human
gucugcucuuucucugccag

SEQ ID NO: 2591184 - RNA, 19 nt, Human
gucugcucuuucucugcca

SEQ ID NO: 2591185 - RNA, 17 nt, Human
gucugcucuuucucugc

SEQ ID NO: 2591186 - RNA, 22 nt, Human
gucugcucgggcccaggccauc

SEQ ID NO: 2591187 - RNA, 21 nt, Human
gucugcucgggcccaggccau

SEQ ID NO: 2591188 - RNA, 15 nt, Human
gucugcucuuucucu

SEQ ID NO: 2591189 - RNA, 19 nt, Human
gucugcucgggcccaggcc

SEQ ID NO: 2591190 - RNA, 17 nt, Human
gucugcucgggcccagg

SEQ ID NO: 2591191 - RNA, 15 nt, Human
gucuggcugagcuga

SEQ ID NO: 2591192 - RNA, 16 nt, Human
gucuggcugagcccug

SEQ ID NO: 2591193 - RNA, 19 nt, Human
gucugcugaauaauaaacu

SEQ ID NO: 2591194 - RNA, 17 nt, Human
gucugcugaauaauaaa

SEQ ID NO: 2591195 - RNA, 13 nt, Human
gucugcugcccuc

SEQ ID NO: 2591196 - RNA, 15 nt, Human
gucugcugcccucca

SEQ ID NO: 2591197 - RNA, 16 nt, Human
gucugcugcccuccau

SEQ ID NO: 2591198 - RNA, 18 nt, Human
gucugcugcccuccaucc

SEQ ID NO: 2591199 - RNA, 19 nt, Human
gucugcugcccuccauccc

SEQ ID NO: 2591200 - RNA, 23 nt, Human
gucugcucagacagaaccccuac

SEQ ID NO: 2591201 - RNA, 17 nt, Human
aaccucuucuggcucaa

SEQ ID NO: 2591202 - RNA, 18 nt, Human
aaccucuguucaguguaa

SEQ ID NO: 2591203 - RNA, 14 nt, Human
aaccucuuccccag

SEQ ID NO: 2591204 - RNA, 11 nt, Human
aaccucuuccc

SEQ ID NO: 2591205 - RNA, 12 nt, Human
aaccucuucccc

SEQ ID NO: 2591206 - RNA, 18 nt, Human
aaccucuucagaggcccu

SEQ ID NO: 2591207 - RNA, 15 nt, Human
aaccucuguucagug

SEQ ID NO: 2591208 - RNA, 16 nt, Human
aaccucuguucagugu

SEQ ID NO: 2591209 - RNA, 12 nt, Human
aaccucuguuca

SEQ ID NO: 2591210 - RNA, 13 nt, Human
aaccucuguucag

SEQ ID NO: 2591211 - RNA, 21 nt, Human
aaccucuaauuuauuuugucg

SEQ ID NO: 2591212 - RNA, 20 nt, Human
aaccucuaauuuauuuuguc

SEQ ID NO: 2591213 - RNA, 23 nt, Human
aaccucuacuaaaaagaaggaaa

SEQ ID NO: 2591214 - RNA, 18 nt, Human
aaccucucacuucacccu

SEQ ID NO: 2591215 - RNA, 21 nt, Human
aaccucuccucauguucugcu

SEQ ID NO: 2591216 - RNA, 18 nt, Human
guugacaugggacauuug

SEQ ID NO: 2591217 - RNA, 14 nt, Human
guugacaugggaca

SEQ ID NO: 2591218 - RNA, 15 nt, Human
guucuuuaggagauu

SEQ ID NO: 2591219 - RNA, 14 nt, Human
guucuuuaauuuau

SEQ ID NO: 2591220 - RNA, 16 nt, Human
guucuuuaggagauuu

SEQ ID NO: 2591221 - RNA, 21 nt, Human
guugagcuucauauaccagca

SEQ ID NO: 2591222 - RNA, 17 nt, Human
guugagggaacagacag

SEQ ID NO: 2591223 - RNA, 22 nt, Human
guugaugaucuuugcagacagg

SEQ ID NO: 2591224 - RNA, 16 nt, Human
guugagguggucugaa

SEQ ID NO: 2591225 - RNA, 21 nt, Human
guugaguucagguagcugccc

SEQ ID NO: 2591226 - RNA, 22 nt, Human
guugaguucagguagcugcccc

SEQ ID NO: 2591227 - RNA, 18 nt, Human
guugauaaauuccacugg

SEQ ID NO: 2591228 - RNA, 21 nt, Human
guugauaaauuccacuggacu

SEQ ID NO: 2591229 - RNA, 19 nt, Human
guugagggaacagacagga

SEQ ID NO: 2591230 - RNA, 22 nt, Human
guugagggaacagacaggagaa

SEQ ID NO: 2591231 - RNA, 23 nt, Human
guugagggaacagacaggagaaa

SEQ ID NO: 2591232 - RNA, 16 nt, Human
guugaggggcuccugg

SEQ ID NO: 2591233 - RNA, 17 nt, Human
guugaggggcuccugga

SEQ ID NO: 2591234 - RNA, 22 nt, Human
guugagguccagcccuggcuga

SEQ ID NO: 2591235 - RNA, 21 nt, Human
guugagguccagcccuggcug

SEQ ID NO: 2591236 - RNA, 18 nt, Human
guugaggggcuccuggaa

SEQ ID NO: 2591237 - RNA, 20 nt, Human
guugagguggaagcccuccu

SEQ ID NO: 2591238 - RNA, 23 nt, Human
guugagguggaagcccuccuucc

SEQ ID NO: 2591239 - RNA, 23 nt, Human
guugagguggucugaauguucug

SEQ ID NO: 2591240 - RNA, 13 nt, Human
guugacaugggac

SEQ ID NO: 2591241 - RNA, 18 nt, Human
guucuuguauuaagaaug

SEQ ID NO: 2591242 - RNA, 21 nt, Human
guucuuguauuaagaaugaaa

SEQ ID NO: 2591243 - RNA, 12 nt, Human
guucuugucuga

SEQ ID NO: 2591244 - RNA, 17 nt, Human
guucuuguauuaagaau

SEQ ID NO: 2591245 - RNA, 17 nt, Human
guucuuaguuugcaguu

SEQ ID NO: 2591246 - RNA, 17 nt, Human
guucuuaauugcacucu

SEQ ID NO: 2591247 - RNA, 21 nt, Human
guucuugguuuguaaauuaac

SEQ ID NO: 2591248 - RNA, 17 nt, Human
guucuuaguucucacug

SEQ ID NO: 2591249 - RNA, 19 nt, Human
guucuuaguugcuguaugu

SEQ ID NO: 2591250 - RNA, 16 nt, Human
guucuacccaggugcu

SEQ ID NO: 2591251 - RNA, 22 nt, Human
guucccuuugacgccaucccag

SEQ ID NO: 2591252 - RNA, 21 nt, Human
guucccuuugacgccauccca

SEQ ID NO: 2591253 - RNA, 20 nt, Human
guucccuuugacgccauccc

SEQ ID NO: 2591254 - RNA, 23 nt, Human
guucuccguuagcuccuguggcc

SEQ ID NO: 2591255 - RNA, 22 nt, Human
guucuccguuagcuccuguggc

SEQ ID NO: 2591256 - RNA, 23 nt, Human
guucuagagaagaggcuggugcu

SEQ ID NO: 2591257 - RNA, 15 nt, Human
guucuagagaagagg

SEQ ID NO: 2591258 - RNA, 21 nt, Human
guucuccguuagcuccugugg

SEQ ID NO: 2591259 - RNA, 21 nt, Human
guucuaccucaggcagcucaa

SEQ ID NO: 2591260 - RNA, 20 nt, Human
guucuaccucaggcagcuca

SEQ ID NO: 2591261 - RNA, 16 nt, Human
guucccuuggccucag

SEQ ID NO: 2591262 - RNA, 22 nt, Human
guucccuuuccuuccaucccua

SEQ ID NO: 2591263 - RNA, 16 nt, Human
guucuacacucaucuu

SEQ ID NO: 2591264 - RNA, 19 nt, Human
guucuuaauugcacucuaa

SEQ ID NO: 2591265 - RNA, 22 nt, Human
guucuuaccuguaugucuccag

SEQ ID NO: 2591266 - RNA, 22 nt, Human
guucuguagaaaugguuguauu

SEQ ID NO: 2591267 - RNA, 18 nt, Human
guucuggugugaacuaaa

SEQ ID NO: 2591268 - RNA, 20 nt, Human
guucuggugaggccuugcuc

SEQ ID NO: 2591269 - RNA, 14 nt, Human
guucuguagaaaug

SEQ ID NO: 2591270 - RNA, 22 nt, Human
guucugguuuuuaaccauuguc

SEQ ID NO: 2591271 - RNA, 19 nt, Human
guucuggugaggccuugcu

SEQ ID NO: 2591272 - RNA, 16 nt, Human
guucuggugaggccuu

SEQ ID NO: 2591273 - RNA, 15 nt, Human
guucuggugugaacu

SEQ ID NO: 2591274 - RNA, 14 nt, Human
guucuggugaggcc

SEQ ID NO: 2591275 - RNA, 15 nt, Human
guucuggugaggccu

SEQ ID NO: 2591276 - RNA, 14 nt, Human
guucuggggccccu

SEQ ID NO: 2591277 - RNA, 15 nt, Human
guucuggggccccuu

SEQ ID NO: 2591278 - RNA, 16 nt, Human
guucucuccuccccaa

SEQ ID NO: 2591279 - RNA, 21 nt, Human
guucucucccaggggcuggcu

SEQ ID NO: 2591280 - RNA, 22 nt, Human
guucucuaucauuuaauaauau

SEQ ID NO: 2591281 - RNA, 18 nt, Human
guucucuaucauuuaaua

SEQ ID NO: 2591282 - RNA, 17 nt, Human
guucucuaucauuuaau

SEQ ID NO: 2591283 - RNA, 13 nt, Human
guucuccuuuucc

SEQ ID NO: 2591284 - RNA, 17 nt, Human
guucuccucuccccucu

SEQ ID NO: 2591285 - RNA, 18 nt, Human
guucuccucuccccucua

SEQ ID NO: 2591286 - RNA, 22 nt, Human
guucuccuuuuccucucucccg

SEQ ID NO: 2591287 - RNA, 18 nt, Human
guucuccuuuuccucucu

SEQ ID NO: 2591288 - RNA, 22 nt, Human
guucucuaaguuccacugagcu

SEQ ID NO: 2591289 - RNA, 18 nt, Human
aagcuucaaacugcauga

SEQ ID NO: 2591290 - RNA, 14 nt, Human
aagcuuauuuaauu

SEQ ID NO: 2591291 - RNA, 20 nt, Human
aagcuuccaugauucuauuu

SEQ ID NO: 2591292 - RNA, 23 nt, Human
aagcuuguauuccuuuuucucuc

SEQ ID NO: 2591293 - RNA, 21 nt, Human
aagcuuccaguccaaucucau

SEQ ID NO: 2591294 - RNA, 15 nt, Human
aagcuuccaugauuc

SEQ ID NO: 2591295 - RNA, 15 nt, Human
aagcuucaguuuccu

SEQ ID NO: 2591296 - RNA, 19 nt, Human
aagcuuccaguccaaucuc

SEQ ID NO: 2591297 - RNA, 17 nt, Human
aagcugaggcgggagaa

SEQ ID NO: 2591298 - RNA, 14 nt, Human
aagcugaggcggga

SEQ ID NO: 2591299 - RNA, 22 nt, Human
aagcugacgaacuuccauggcc

SEQ ID NO: 2591300 - RNA, 19 nt, Human
aagcugacgaacuuccaug

SEQ ID NO: 2591301 - RNA, 20 nt, Human
aagcugacgaacuuccaugg

SEQ ID NO: 2591302 - RNA, 22 nt, Human
aagcugaaguuucacuccggag

SEQ ID NO: 2591303 - RNA, 17 nt, Human
aagcugaccacaggcag

SEQ ID NO: 2591304 - RNA, 17 nt, Human
aagcugacgaacuucca

SEQ ID NO: 2591305 - RNA, 21 nt, Human
aagcugaagugcauccaaagg

SEQ ID NO: 2591306 - RNA, 19 nt, Human
aagcugaagugcauccaaa

SEQ ID NO: 2591307 - RNA, 17 nt, Human
aagcugaagugcaucca

SEQ ID NO: 2591308 - RNA, 14 nt, Human
aagcugaagugcau

SEQ ID NO: 2591309 - RNA, 13 nt, Human
aagcugaauacau

SEQ ID NO: 2591310 - RNA, 23 nt, Human
aagcugaauacauucugcuuuca

SEQ ID NO: 2591311 - RNA, 21 nt, Human
aagcuauggugagaugcagcu

SEQ ID NO: 2591312 - RNA, 18 nt, Human
aagcuauggugagaugca

SEQ ID NO: 2591313 - RNA, 15 nt, Human
aagcuauggugagau

SEQ ID NO: 2591314 - RNA, 12 nt, Human
aagcuaugguga

SEQ ID NO: 2591315 - RNA, 17 nt, Human
aagcuauccuggcucuu

SEQ ID NO: 2591316 - RNA, 17 nt, Human
aagcuauccaaauaacu

SEQ ID NO: 2591317 - RNA, 22 nt, Human
aagcuauaucaaucucucuuag

SEQ ID NO: 2591318 - RNA, 17 nt, Human
aagcuaucguaaaauua

SEQ ID NO: 2591319 - RNA, 19 nt, Human
aagcuauuagccaggauca

SEQ ID NO: 2591320 - RNA, 16 nt, Human
aagcuauuagccagga

SEQ ID NO: 2591321 - RNA, 23 nt, Human
aagcuauggugagaugcagcugg

SEQ ID NO: 2591322 - RNA, 22 nt, Human
aagcuauggugagaugcagcug

SEQ ID NO: 2591323 - RNA, 21 nt, Human
aagcuauuagccaggaucaug

SEQ ID NO: 2591324 - RNA, 18 nt, Human
aagcuauaaauuccucuu

SEQ ID NO: 2591325 - RNA, 18 nt, Human
aagcuccucuccccagcc

SEQ ID NO: 2591326 - RNA, 22 nt, Human
aagcuauucaguaauaacucua

SEQ ID NO: 2591327 - RNA, 18 nt, Human
aagcucgaaaacaauugu

SEQ ID NO: 2591328 - RNA, 22 nt, Human
aagcuccuguccucccaucccc

SEQ ID NO: 2591329 - RNA, 20 nt, Human
aagcuccuguccucccaucc

SEQ ID NO: 2591330 - RNA, 17 nt, Human
aagcuccuguccuccca

SEQ ID NO: 2591331 - RNA, 21 nt, Human
aagcucuacugaggugcuaug

SEQ ID NO: 2591332 - RNA, 19 nt, Human
aagcuccucuccccagccc

SEQ ID NO: 2591333 - RNA, 20 nt, Human
aagcuccucuccccagccca

SEQ ID NO: 2591334 - RNA, 21 nt, Human
aagcuccucuccccagcccag

SEQ ID NO: 2591335 - RNA, 22 nt, Human
aagcuccucuccccagcccaga

SEQ ID NO: 2591336 - RNA, 15 nt, Human
aagcuccuguccucc

SEQ ID NO: 2591337 - RNA, 14 nt, Human
aagcuccuguccuc

SEQ ID NO: 2591338 - RNA, 13 nt, Human
aagcuccuguccu

SEQ ID NO: 2591339 - RNA, 16 nt, Human
aagcuccucuccccag

SEQ ID NO: 2591340 - RNA, 23 nt, Human
aagcuccucuccccagcccagag

SEQ ID NO: 2591341 - RNA, 19 nt, Human
aagcuccuggucuugagau

SEQ ID NO: 2591342 - RNA, 18 nt, Human
guucccguuucuccaccu

SEQ ID NO: 2591343 - RNA, 16 nt, Human
guucccguuucuccac

SEQ ID NO: 2591344 - RNA, 14 nt, Human
guucccguuucucc

SEQ ID NO: 2591345 - RNA, 19 nt, Human
guucccguuucuccaccua

SEQ ID NO: 2591346 - RNA, 21 nt, Human
guucccuaggggacacuuccc

SEQ ID NO: 2591347 - RNA, 20 nt, Human
guucccuacuuccugugacu

SEQ ID NO: 2591348 - RNA, 15 nt, Human
guucccucucccugu

SEQ ID NO: 2591349 - RNA, 14 nt, Human
guucccucugagaa

SEQ ID NO: 2591350 - RNA, 12 nt, Human
guucccucugag

SEQ ID NO: 2591351 - RNA, 17 nt, Human
guucccucucccuguug

SEQ ID NO: 2591352 - RNA, 22 nt, Human
guucccucugagaauuccaagg

SEQ ID NO: 2591353 - RNA, 18 nt, Human
guucccuuggccucagaa

SEQ ID NO: 2591354 - RNA, 19 nt, Human
guucccuuggccucagaau

SEQ ID NO: 2591355 - RNA, 19 nt, Human
guucccuuuccuuccaucc

SEQ ID NO: 2591356 - RNA, 20 nt, Human
guucccauuugcuccuuucu

SEQ ID NO: 2591357 - RNA, 15 nt, Human
guuccccuuccacug

SEQ ID NO: 2591358 - RNA, 22 nt, Human
guuccccuuccacugagggcag

SEQ ID NO: 2591359 - RNA, 16 nt, Human
guucccauuugcuccu

SEQ ID NO: 2591360 - RNA, 18 nt, Human
guucccauguagcccccu

SEQ ID NO: 2591361 - RNA, 19 nt, Human
guucccauguagcccccug

SEQ ID NO: 2591362 - RNA, 16 nt, Human
guucccauuucagcug

SEQ ID NO: 2591363 - RNA, 14 nt, Human
guucccauguuaaa

SEQ ID NO: 2591364 - RNA, 19 nt, Human
guuccauuguuuggagaca

SEQ ID NO: 2591365 - RNA, 21 nt, Human
guuccauuguuuggagacauu

SEQ ID NO: 2591366 - RNA, 20 nt, Human
guuccaugccugagggugga

SEQ ID NO: 2591367 - RNA, 17 nt, Human
guuccaugccugagggu

SEQ ID NO: 2591368 - RNA, 20 nt, Human
guuccauggccucuucagau

SEQ ID NO: 2591369 - RNA, 19 nt, Human
guucccaagcucagaggcg

SEQ ID NO: 2591370 - RNA, 19 nt, Human
guucccaccaggcugcuca

SEQ ID NO: 2591371 - RNA, 14 nt, Human
guucccacuuggag

SEQ ID NO: 2591372 - RNA, 15 nt, Human
guucccagaaucaaa

SEQ ID NO: 2591373 - RNA, 21 nt, Human
guucccagugacacuucagag

SEQ ID NO: 2591374 - RNA, 22 nt, Human
guucccagugacacuucagaga

SEQ ID NO: 2591375 - RNA, 17 nt, Human
guucccauguagccccc

SEQ ID NO: 2591376 - RNA, 15 nt, Human
guuccaugccugagg

SEQ ID NO: 2591377 - RNA, 14 nt, Human
guuccaugccugag

SEQ ID NO: 2591378 - RNA, 16 nt, Human
guuccaugaugcuggg

SEQ ID NO: 2591379 - RNA, 23 nt, Human
guuccaugaagaccacauccaca

SEQ ID NO: 2591380 - RNA, 12 nt, Human
aagcuuuccugc

SEQ ID NO: 2591381 - RNA, 22 nt, Human
aagcuuuauacguguagcuaua

SEQ ID NO: 2591382 - RNA, 20 nt, Human
aagcuuuauacguguagcua

SEQ ID NO: 2591383 - RNA, 21 nt, Human
aagcuuucaguauuagugaug

SEQ ID NO: 2591384 - RNA, 22 nt, Human
aagcuuucauguaaacugugca

SEQ ID NO: 2591385 - RNA, 23 nt, Human
aagcuuucauguaaacugugcac

SEQ ID NO: 2591386 - RNA, 23 nt, Human
aagcuuguguauccauuaucaug

SEQ ID NO: 2591387 - RNA, 22 nt, Human
aagcuuguguauccauuaucau

SEQ ID NO: 2591388 - RNA, 21 nt, Human
aagcuuguguauccauuauca

SEQ ID NO: 2591389 - RNA, 16 nt, Human
aagcuuguguauccau

SEQ ID NO: 2591390 - RNA, 13 nt, Human
aagcuuguguauc

SEQ ID NO: 2591391 - RNA, 12 nt, Human
aagcuuguguau

SEQ ID NO: 2591392 - RNA, 16 nt, Human
aagcuuccaugauucu

SEQ ID NO: 2591393 - RNA, 19 nt, Human
aagcuuuauacguguagcu

SEQ ID NO: 2591394 - RNA, 15 nt, Human
aagccucgacacaga

SEQ ID NO: 2591395 - RNA, 11 nt, Human
aagccucugcu

SEQ ID NO: 2591396 - RNA, 14 nt, Human
aagccucugcugcc

SEQ ID NO: 2591397 - RNA, 12 nt, Human
aagccucuggcu

SEQ ID NO: 2591398 - RNA, 14 nt, Human
aagccucuggcuag

SEQ ID NO: 2591399 - RNA, 24 nt, Human
aagccucugugucacuggcugccu

SEQ ID NO: 2591400 - RNA, 23 nt, Human
aagccucugugucacuggcugcc

SEQ ID NO: 2591401 - RNA, 22 nt, Human
aagccucugugucacuggcugc

SEQ ID NO: 2591402 - RNA, 21 nt, Human
aagccucugugucacuggcug

SEQ ID NO: 2591403 - RNA, 22 nt, Human
aagccugcacaauaaaaauguu

SEQ ID NO: 2591404 - RNA, 10 nt, Human
aagccugccc

SEQ ID NO: 2591405 - RNA, 14 nt, Human
aagccugcaggagu

SEQ ID NO: 2591406 - RNA, 20 nt, Human
aagccucugugucacuggcu

SEQ ID NO: 2591407 - RNA, 18 nt, Human
aagccucugugucacugg

SEQ ID NO: 2591408 - RNA, 17 nt, Human
aagccucugugucacug

SEQ ID NO: 2591409 - RNA, 13 nt, Human
aagccucuguguc

SEQ ID NO: 2591410 - RNA, 12 nt, Human
aagccucuggga

SEQ ID NO: 2591411 - RNA, 20 nt, Human
guucauaggucacuggcucu

SEQ ID NO: 2591412 - RNA, 23 nt, Human
aagccucuggcuagaggccagcc

SEQ ID NO: 2591413 - RNA, 16 nt, Human
guucauacauuugagg

SEQ ID NO: 2591414 - RNA, 17 nt, Human
guucauagacccucuca

SEQ ID NO: 2591415 - RNA, 14 nt, Human
guucauacauuuga

SEQ ID NO: 2591416 - RNA, 13 nt, Human
guucauagcccag

SEQ ID NO: 2591417 - RNA, 19 nt, Human
aagccuccuccagccgcca

SEQ ID NO: 2591418 - RNA, 19 nt, Human
guucauauguaccauguac

SEQ ID NO: 2591419 - RNA, 20 nt, Human
guucauagggucucuucagg

SEQ ID NO: 2591420 - RNA, 22 nt, Human
guucauagggucucuucagguu

SEQ ID NO: 2591421 - RNA, 14 nt, Human
guucauagcccagu

SEQ ID NO: 2591422 - RNA, 17 nt, Human
guucauagggucucuuc

SEQ ID NO: 2591423 - RNA, 18 nt, Human
guucauagggucucuuca

SEQ ID NO: 2591424 - RNA, 15 nt, Human
aagccuggucagccc

SEQ ID NO: 2591425 - RNA, 17 nt, Human
aagccugggauugacag

SEQ ID NO: 2591426 - RNA, 21 nt, Human
aagccuggccuacaugguuga

SEQ ID NO: 2591427 - RNA, 19 nt, Human
aagccugcuuuuuaagugu

SEQ ID NO: 2591428 - RNA, 18 nt, Human
aagccugcccuugucuga

SEQ ID NO: 2591429 - RNA, 17 nt, Human
aagccugcccuugucug

SEQ ID NO: 2591430 - RNA, 15 nt, Human
aagccugcccuuguc

SEQ ID NO: 2591431 - RNA, 11 nt, Human
aagccugcccu

SEQ ID NO: 2591432 - RNA, 20 nt, Human
aagccugcccuugucugaga

SEQ ID NO: 2591433 - RNA, 21 nt, Human
aagccugccuaggaauuccca

SEQ ID NO: 2591434 - RNA, 23 nt, Human
aagccugccuaggaauucccagc

SEQ ID NO: 2591435 - RNA, 22 nt, Human
aagcuaggccuggccagaugca

SEQ ID NO: 2591436 - RNA, 16 nt, Human
aagcuaggccuggcca

SEQ ID NO: 2591437 - RNA, 17 nt, Human
aagccuggucagcccaa

SEQ ID NO: 2591438 - RNA, 21 nt, Human
aagcuauaaauuccucuuugc

SEQ ID NO: 2591439 - RNA, 20 nt, Human
aagcuauagacccgaggaaa

SEQ ID NO: 2591440 - RNA, 18 nt, Human
aagcuaggccuggccaga

SEQ ID NO: 2591441 - RNA, 17 nt, Human
aagcuaggccuggccag

SEQ ID NO: 2591442 - RNA, 17 nt, Human
guucagcuccagcucac

SEQ ID NO: 2591443 - RNA, 16 nt, Human
guucagcuccagcuca

SEQ ID NO: 2591444 - RNA, 18 nt, Human
guucagcuccagcucacc

SEQ ID NO: 2591445 - RNA, 15 nt, Human
guucagcuccagcuc

SEQ ID NO: 2591446 - RNA, 14 nt, Human
guuauuuguacagu

SEQ ID NO: 2591447 - RNA, 20 nt, Human
guucaggggacucagcccug

SEQ ID NO: 2591448 - RNA, 14 nt, Human
guuauuuauauauu

SEQ ID NO: 2591449 - RNA, 12 nt, Human
guuauuuagacu

SEQ ID NO: 2591450 - RNA, 14 nt, Human
guuauuuauaauca

SEQ ID NO: 2591451 - RNA, 17 nt, Human
guuauuuauuuaaaugu

SEQ ID NO: 2591452 - RNA, 19 nt, Human
guuauuucuuacaggcaca

SEQ ID NO: 2591453 - RNA, 14 nt, Human
guuauuucuuacag

SEQ ID NO: 2591454 - RNA, 13 nt, Human
guuauuuguacag

SEQ ID NO: 2591455 - RNA, 20 nt, Human
guuauuuauaaucacuuuuu

SEQ ID NO: 2591456 - RNA, 19 nt, Human
guuaguuauagaugucuag

SEQ ID NO: 2591457 - RNA, 15 nt, Human
guuauuuaaagaaga

SEQ ID NO: 2591458 - RNA, 23 nt, Human
guuauuuaacagcugaauuaucu

SEQ ID NO: 2591459 - RNA, 15 nt, Human
guuauuuaaaugagu

SEQ ID NO: 2591460 - RNA, 11 nt, Human
guuauuuaaau

SEQ ID NO: 2591461 - RNA, 17 nt, Human
guuaguuauagaugucu

SEQ ID NO: 2591462 - RNA, 23 nt, Human
guuagucuacucuuaagccaucu

SEQ ID NO: 2591463 - RNA, 13 nt, Human
guuauuuaaauga

SEQ ID NO: 2591464 - RNA, 19 nt, Human
guucaguguaauuucuuug

SEQ ID NO: 2591465 - RNA, 20 nt, Human
guuauuuguacaguucaguu

SEQ ID NO: 2591466 - RNA, 16 nt, Human
guucaguguaauuucu

SEQ ID NO: 2591467 - RNA, 16 nt, Human
guucagugucccgggc

SEQ ID NO: 2591468 - RNA, 11 nt, Human
guucaguuaca

SEQ ID NO: 2591469 - RNA, 19 nt, Human
guucaggguuggccccugc

SEQ ID NO: 2591470 - RNA, 18 nt, Human
guucaggguuggccccug

SEQ ID NO: 2591471 - RNA, 17 nt, Human
guucaggguuggccccu

SEQ ID NO: 2591472 - RNA, 12 nt, Human
guucauaaauga

SEQ ID NO: 2591473 - RNA, 20 nt, Human
guucaguuccucuuugcaug

SEQ ID NO: 2591474 - RNA, 17 nt, Human
guucaguuacagaaagu

SEQ ID NO: 2591475 - RNA, 16 nt, Human
guucaguuacagaaag

SEQ ID NO: 2591476 - RNA, 15 nt, Human
guucaguuacagaaa

SEQ ID NO: 2591477 - RNA, 14 nt, Human
guucaguuacagaa

SEQ ID NO: 2591478 - RNA, 13 nt, Human
guucaguuacaga

SEQ ID NO: 2591479 - RNA, 12 nt, Human
guucaguuacag

SEQ ID NO: 2591480 - RNA, 13 nt, Human
guucauaaaugaa

SEQ ID NO: 2591481 - RNA, 22 nt, Human
guuagucuacucuuaagccauc

SEQ ID NO: 2591482 - RNA, 21 nt, Human
guuagucuacucuuaagccau

SEQ ID NO: 2591483 - RNA, 16 nt, Human
guuagucuacucuuaa

SEQ ID NO: 2591484 - RNA, 22 nt, Human
guuagucgugagcucuugugag

SEQ ID NO: 2591485 - RNA, 20 nt, Human
guuagucgugagcucuugug

SEQ ID NO: 2591486 - RNA, 22 nt, Human
guuagucucuuguauuaaacuc

SEQ ID NO: 2591487 - RNA, 12 nt, Human
guuagucauuug

SEQ ID NO: 2591488 - RNA, 18 nt, Human
guuagucgugagcucuug

SEQ ID NO: 2591489 - RNA, 22 nt, Human
guuagucauuugcugagcaugu

SEQ ID NO: 2591490 - RNA, 20 nt, Human
guuaguaugaggcauuuguu

SEQ ID NO: 2591491 - RNA, 17 nt, Human
guuaguaugaggcauuu

SEQ ID NO: 2591492 - RNA, 23 nt, Human
guuaguaacaugaggggacauuu

SEQ ID NO: 2591493 - RNA, 21 nt, Human
guuaguagcauguugagccag

SEQ ID NO: 2591494 - RNA, 16 nt, Human
guuaguaucuaacaug

SEQ ID NO: 2591495 - RNA, 17 nt, Human
guuaguaucuaacaugu

SEQ ID NO: 2591496 - RNA, 16 nt, Human
guuaguagcauguuga

SEQ ID NO: 2591497 - RNA, 15 nt, Human
guuagcuccuguggc

SEQ ID NO: 2591498 - RNA, 14 nt, Human
guuagcuccugugg

SEQ ID NO: 2591499 - RNA, 11 nt, Human
guuagggaggg

SEQ ID NO: 2591500 - RNA, 13 nt, Human
guuagggaggggu

SEQ ID NO: 2591501 - RNA, 21 nt, Human
guuagguagagggaguuguca

SEQ ID NO: 2591502 - RNA, 23 nt, Human
guuagggugcucuggaagagagg

SEQ ID NO: 2591503 - RNA, 18 nt, Human
guuagguagagggaguug

SEQ ID NO: 2591504 - RNA, 17 nt, Human
guuacacaaaggaccuc

SEQ ID NO: 2591505 - RNA, 23 nt, Human
guuacaacagauuugugaacuca

SEQ ID NO: 2591506 - RNA, 22 nt, Human
guuacaacagauuugugaacuc

SEQ ID NO: 2591507 - RNA, 18 nt, Human
guuacaaucauugcugaa

SEQ ID NO: 2591508 - RNA, 21 nt, Human
guuacaacagauuugugaacu

SEQ ID NO: 2591509 - RNA, 20 nt, Human
guuacaacagauuugugaac

SEQ ID NO: 2591510 - RNA, 19 nt, Human
guuacaacagauuugugaa

SEQ ID NO: 2591511 - RNA, 18 nt, Human
guuacaacagauuuguga

SEQ ID NO: 2591512 - RNA, 14 nt, Human
guuacaacagauuu

SEQ ID NO: 2591513 - RNA, 13 nt, Human
guuacaacagauu

SEQ ID NO: 2591514 - RNA, 17 nt, Human
guuagccaauauuuuuc

SEQ ID NO: 2591515 - RNA, 18 nt, Human
guuagcagacaggccccg

SEQ ID NO: 2591516 - RNA, 15 nt, Human
guuagcaaacuuugu

SEQ ID NO: 2591517 - RNA, 13 nt, Human
guuagcagacagg

SEQ ID NO: 2591518 - RNA, 12 nt, Human
guuagcuccugu

SEQ ID NO: 2591519 - RNA, 21 nt, Human
guuagauuuuguauucagggg

SEQ ID NO: 2591520 - RNA, 20 nt, Human
guuagcucaggaggcuugga

SEQ ID NO: 2591521 - RNA, 22 nt, Human
guuagaguccaacguggggcag

SEQ ID NO: 2591522 - RNA, 21 nt, Human
guuacacaaaggaccucagcu

SEQ ID NO: 2591523 - RNA, 21 nt, Human
guuacacacuuuuuaagaaau

SEQ ID NO: 2591524 - RNA, 22 nt, Human
guuaaguuacuucacuuuaauu

SEQ ID NO: 2591525 - RNA, 12 nt, Human
guuaaucuuagg

SEQ ID NO: 2591526 - RNA, 16 nt, Human
guuaaugaaaauguca

SEQ ID NO: 2591527 - RNA, 18 nt, Human
guuaaugauagcuacugu

SEQ ID NO: 2591528 - RNA, 23 nt, Human
guuaaugaugguugauggguucu

SEQ ID NO: 2591529 - RNA, 22 nt, Human
guuaaugaugguugauggguuc

SEQ ID NO: 2591530 - RNA, 17 nt, Human
guuaaugaaaaugucag

SEQ ID NO: 2591531 - RNA, 20 nt, Human
guuaauguaaucugauggcu

SEQ ID NO: 2591532 - RNA, 15 nt, Human
guuaagucuguuuua

SEQ ID NO: 2591533 - RNA, 22 nt, Human
guuaagucuguuuuaugacuuc

SEQ ID NO: 2591534 - RNA, 22 nt, Human
guuaaguugauggugaugaaau

SEQ ID NO: 2591535 - RNA, 14 nt, Human
guuaaguaugugua

SEQ ID NO: 2591536 - RNA, 13 nt, Human
guuaagucuguuu

SEQ ID NO: 2591537 - RNA, 22 nt, Human
guuaagucuaaauauuuccuua

SEQ ID NO: 2591538 - RNA, 14 nt, Human
guuaagggaaggaa

SEQ ID NO: 2591539 - RNA, 13 nt, Human
guuaagggaagga

SEQ ID NO: 2591540 - RNA, 22 nt, Human
guuaagggaaggaacucuggcu

SEQ ID NO: 2591541 - RNA, 17 nt, Human
guuaaggcugaggaaag

SEQ ID NO: 2591542 - RNA, 16 nt, Human
guuaaggcugaggaaa

SEQ ID NO: 2591543 - RNA, 19 nt, Human
guuaaggaaacucuuaucu

SEQ ID NO: 2591544 - RNA, 16 nt, Human
guuaaggaaacucuua

SEQ ID NO: 2591545 - RNA, 21 nt, Human
guuaaggaaacucuuaucuca

SEQ ID NO: 2591546 - RNA, 14 nt, Human
guuaaggaaacucu

SEQ ID NO: 2591547 - RNA, 12 nt, Human
guuaaggaaacu

SEQ ID NO: 2591548 - RNA, 15 nt, Human
guguuucccauaauu

SEQ ID NO: 2591549 - RNA, 16 nt, Human
guguuucuagcacugg

SEQ ID NO: 2591550 - RNA, 18 nt, Human
guguuuccacagccugca

SEQ ID NO: 2591551 - RNA, 12 nt, Human
guguuucccaua

SEQ ID NO: 2591552 - RNA, 21 nt, Human
guguuugggucaccccuccag

SEQ ID NO: 2591553 - RNA, 22 nt, Human
guguuucuagcacuggccugca

SEQ ID NO: 2591554 - RNA, 19 nt, Human
guguuucuagcacuggccu

SEQ ID NO: 2591555 - RNA, 11 nt, Human
guguuucuagg

SEQ ID NO: 2591556 - RNA, 18 nt, Human
guguuuuaaaaugagaaa

SEQ ID NO: 2591557 - RNA, 15 nt, Human
guguuugucauuagc

SEQ ID NO: 2591558 - RNA, 13 nt, Human
guguuugucauua

SEQ ID NO: 2591559 - RNA, 12 nt, Human
guguuugucauu

SEQ ID NO: 2591560 - RNA, 20 nt, Human
guuaagcauuaccacucagg

SEQ ID NO: 2591561 - RNA, 13 nt, Human
guguuuuaauuua

SEQ ID NO: 2591562 - RNA, 15 nt, Human
guguuuuaauuccaa

SEQ ID NO: 2591563 - RNA, 12 nt, Human
guguuuguuccu

SEQ ID NO: 2591564 - RNA, 22 nt, Human
guguuuuaauuccaauaugaug

SEQ ID NO: 2591565 - RNA, 12 nt, Human
guguuuguguga

SEQ ID NO: 2591566 - RNA, 11 nt, Human
guguuuguguu

SEQ ID NO: 2591567 - RNA, 12 nt, Human
guuaagccuuug

SEQ ID NO: 2591568 - RNA, 13 nt, Human
guuaagccuuugg

SEQ ID NO: 2591569 - RNA, 16 nt, Human
guuaagccuuuggaaa

SEQ ID NO: 2591570 - RNA, 21 nt, Human
guuaagcauuaccacucaggc

SEQ ID NO: 2591571 - RNA, 23 nt, Human
aaggaugaucuaggaagacuuug

SEQ ID NO: 2591572 - RNA, 18 nt, Human
aaggaugaucuaggaaga

SEQ ID NO: 2591573 - RNA, 17 nt, Human
aaggauccugagccaga

SEQ ID NO: 2591574 - RNA, 15 nt, Human
aaggauccugagcca

SEQ ID NO: 2591575 - RNA, 13 nt, Human
aaggauccugagc

SEQ ID NO: 2591576 - RNA, 14 nt, Human
aaggauccugagcc

SEQ ID NO: 2591577 - RNA, 16 nt, Human
guugaugaggccucuu

SEQ ID NO: 2591578 - RNA, 15 nt, Human
guugaugaggccucu

SEQ ID NO: 2591579 - RNA, 13 nt, Human
guugauaacuuug

SEQ ID NO: 2591580 - RNA, 22 nt, Human
guugaucuggaacccagacuca

SEQ ID NO: 2591581 - RNA, 21 nt, Human
guugaugccugugaacugaac

SEQ ID NO: 2591582 - RNA, 23 nt, Human
guugaugaucuuugcagacaggc

SEQ ID NO: 2591583 - RNA, 17 nt, Human
aaggaugcuuguacaua

SEQ ID NO: 2591584 - RNA, 19 nt, Human
aaggaugcuuguacauaau

SEQ ID NO: 2591585 - RNA, 19 nt, Human
aaggaugccccgucccccu

SEQ ID NO: 2591586 - RNA, 17 nt, Human
aaggauguaaacagugc

SEQ ID NO: 2591587 - RNA, 19 nt, Human
aaggauguaaacagugccu

SEQ ID NO: 2591588 - RNA, 20 nt, Human
aaggauguaaacagugccug

SEQ ID NO: 2591589 - RNA, 23 nt, Human
aaggauguaaacagugccugcug

SEQ ID NO: 2591590 - RNA, 15 nt, Human
aaggauguacauuuc

SEQ ID NO: 2591591 - RNA, 14 nt, Human
aaggaugucacagg

SEQ ID NO: 2591592 - RNA, 16 nt, Human
aaggauguacauuucc

SEQ ID NO: 2591593 - RNA, 15 nt, Human
aaggaugcuuguaca

SEQ ID NO: 2591594 - RNA, 16 nt, Human
aaggaugcuuguacau

SEQ ID NO: 2591595 - RNA, 18 nt, Human
aaggaugcacagaguugu

SEQ ID NO: 2591596 - RNA, 23 nt, Human
aaggaugaaugaggucccaggca

SEQ ID NO: 2591597 - RNA, 17 nt, Human
guugcccaggcuggcgu

SEQ ID NO: 2591598 - RNA, 15 nt, Human
guugcccaggcaggu

SEQ ID NO: 2591599 - RNA, 21 nt, Human
guugcccaggcuggcgugcag

SEQ ID NO: 2591600 - RNA, 19 nt, Human
guugcccaggcaggucuug

SEQ ID NO: 2591601 - RNA, 18 nt, Human
guugcccaggcaggucuu

SEQ ID NO: 2591602 - RNA, 14 nt, Human
aaggcuccaggagc

SEQ ID NO: 2591603 - RNA, 17 nt, Human
guugcccaggcaggucu

SEQ ID NO: 2591604 - RNA, 19 nt, Human
aaggcuaccuuuguauucu

SEQ ID NO: 2591605 - RNA, 17 nt, Human
aaggccagaguggccug

SEQ ID NO: 2591606 - RNA, 19 nt, Human
aaggccagaguggccuggc

SEQ ID NO: 2591607 - RNA, 20 nt, Human
aaggccagaguggccuggcc

SEQ ID NO: 2591608 - RNA, 21 nt, Human
aaggccagaguggccuggcca

SEQ ID NO: 2591609 - RNA, 23 nt, Human
aaggcuauggggauagaugugug

SEQ ID NO: 2591610 - RNA, 22 nt, Human
aaggccagaguggccuggccag

SEQ ID NO: 2591611 - RNA, 23 nt, Human
aaggccagaguggccuggccagg

SEQ ID NO: 2591612 - RNA, 15 nt, Human
aaggcuauacuuguc

SEQ ID NO: 2591613 - RNA, 16 nt, Human
aaggcucagucucagg

SEQ ID NO: 2591614 - RNA, 17 nt, Human
aaggcucagucucagga

SEQ ID NO: 2591615 - RNA, 16 nt, Human
aaggaugucacagggc

SEQ ID NO: 2591616 - RNA, 15 nt, Human
aaggaugucacaggg

SEQ ID NO: 2591617 - RNA, 15 nt, Human
aaggaugugauugug

SEQ ID NO: 2591618 - RNA, 17 nt, Human
aaggaugugauugugga

SEQ ID NO: 2591619 - RNA, 22 nt, Human
aaggaugugauuguggaaugga

SEQ ID NO: 2591620 - RNA, 18 nt, Human
aaggccaaaggaagcaca

SEQ ID NO: 2591621 - RNA, 21 nt, Human
aaggccaauaaagaguuagaa

SEQ ID NO: 2591622 - RNA, 17 nt, Human
aaggaugucacagggcc

SEQ ID NO: 2591623 - RNA, 21 nt, Human
aaggccaauuccuauacgcag

SEQ ID NO: 2591624 - RNA, 19 nt, Human
aaggccaagaggcuguucc

SEQ ID NO: 2591625 - RNA, 23 nt, Human
guuuaaggaauaugggagaaaua

SEQ ID NO: 2591626 - RNA, 20 nt, Human
guuuaagacauuuuuggaag

SEQ ID NO: 2591627 - RNA, 22 nt, Human
guuuaacuuaaucaauuaauuu

SEQ ID NO: 2591628 - RNA, 23 nt, Human
guuuaacucagaucacuacugca

SEQ ID NO: 2591629 - RNA, 20 nt, Human
guuuaagacuguaaugaauc

SEQ ID NO: 2591630 - RNA, 22 nt, Human
guuuaacucagaucacuacugc

SEQ ID NO: 2591631 - RNA, 19 nt, Human
guuuaacucagaucacuac

SEQ ID NO: 2591632 - RNA, 17 nt, Human
guuuaacucagaucacu

SEQ ID NO: 2591633 - RNA, 16 nt, Human
guuuaacucagaucac

SEQ ID NO: 2591634 - RNA, 23 nt, Human
guuuaagaaaaaauaacacacau

SEQ ID NO: 2591635 - RNA, 22 nt, Human
guuuaaccaaaaagaccagacu

SEQ ID NO: 2591636 - RNA, 15 nt, Human
guuuaacucagauca

SEQ ID NO: 2591637 - RNA, 14 nt, Human
guuuaacucagauc

SEQ ID NO: 2591638 - RNA, 23 nt, Human
guuuaaccaaaaagaccagacua

SEQ ID NO: 2591639 - RNA, 12 nt, Human
guuuaacucaga

SEQ ID NO: 2591640 - RNA, 10 nt, Human
guuuaaaauc

SEQ ID NO: 2591641 - RNA, 16 nt, Human
guuuaaaaucauuucu

SEQ ID NO: 2591642 - RNA, 23 nt, Human
guuguauuuuaacucauaccuuu

SEQ ID NO: 2591643 - RNA, 23 nt, Human
guuuaaacuucucugaagggagg

SEQ ID NO: 2591644 - RNA, 18 nt, Human
guuuaaacuucucugaag

SEQ ID NO: 2591645 - RNA, 12 nt, Human
guuuaaacugau

SEQ ID NO: 2591646 - RNA, 16 nt, Human
guuuaaacugauucau

SEQ ID NO: 2591647 - RNA, 17 nt, Human
guuuaaacuucucugaa

SEQ ID NO: 2591648 - RNA, 21 nt, Human
guuuaaacugauucauaauaa

SEQ ID NO: 2591649 - RNA, 13 nt, Human
guuuaugugugug

SEQ ID NO: 2591650 - RNA, 16 nt, Human
guuuaugugugugugu

SEQ ID NO: 2591651 - RNA, 15 nt, Human
guuuaugucuaaaga

SEQ ID NO: 2591652 - RNA, 13 nt, Human
guuuaugucuaaa

SEQ ID NO: 2591653 - RNA, 13 nt, Human
guuuauuaacaaa

SEQ ID NO: 2591654 - RNA, 18 nt, Human
guuuauuaacaaauuaug

SEQ ID NO: 2591655 - RNA, 23 nt, Human
guuuauuaacaaauuauguuaca

SEQ ID NO: 2591656 - RNA, 14 nt, Human
guuuauuuuucaua

SEQ ID NO: 2591657 - RNA, 20 nt, Human
guuuacaaauggacauagga

SEQ ID NO: 2591658 - RNA, 19 nt, Human
guuuacaagcccccccuuc

SEQ ID NO: 2591659 - RNA, 18 nt, Human
guuuacaagcccccccuu

SEQ ID NO: 2591660 - RNA, 23 nt, Human
guuuacaauuuacaaagugugua

SEQ ID NO: 2591661 - RNA, 19 nt, Human
guuuacaauuuacaaagug

SEQ ID NO: 2591662 - RNA, 18 nt, Human
guuuacaauuuacaaagu

SEQ ID NO: 2591663 - RNA, 16 nt, Human
guuuacaauuuacaaa

SEQ ID NO: 2591664 - RNA, 19 nt, Human
guuuaugucccuucacaua

SEQ ID NO: 2591665 - RNA, 21 nt, Human
guuuacacacgugcaauuugu

SEQ ID NO: 2591666 - RNA, 15 nt, Human
guuuacaauuuacaa

SEQ ID NO: 2591667 - RNA, 23 nt, Human
guuuacaaguguauaucagaaaa

SEQ ID NO: 2591668 - RNA, 19 nt, Human
guuuacaaguguauaucag

SEQ ID NO: 2591669 - RNA, 18 nt, Human
guuuacaaguguauauca

SEQ ID NO: 2591670 - RNA, 16 nt, Human
guuuacaaguguauau

SEQ ID NO: 2591671 - RNA, 22 nt, Human
guuuacaagcccccccuuccac

SEQ ID NO: 2591672 - RNA, 13 nt, Human
guuggguggaugc

SEQ ID NO: 2591673 - RNA, 14 nt, Human
guugcuuacaauuu

SEQ ID NO: 2591674 - RNA, 21 nt, Human
guugcuguuuuccucccuucu

SEQ ID NO: 2591675 - RNA, 23 nt, Human
guugcuguuuuccucccuucugc

SEQ ID NO: 2591676 - RNA, 15 nt, Human
guuggguucaucuga

SEQ ID NO: 2591677 - RNA, 13 nt, Human
guugguaguuucu

SEQ ID NO: 2591678 - RNA, 18 nt, Human
guuggucccccuuccaug

SEQ ID NO: 2591679 - RNA, 16 nt, Human
guuggucgguggguug

SEQ ID NO: 2591680 - RNA, 22 nt, Human
guugcugggagcugaaaaauca

SEQ ID NO: 2591681 - RNA, 16 nt, Human
guugcugggagcugaa

SEQ ID NO: 2591682 - RNA, 12 nt, Human
guugcugccuca

SEQ ID NO: 2591683 - RNA, 16 nt, Human
guugcugguugcugug

SEQ ID NO: 2591684 - RNA, 15 nt, Human
guugcugguugcugu

SEQ ID NO: 2591685 - RNA, 18 nt, Human
guugcugguugcugugug

SEQ ID NO: 2591686 - RNA, 17 nt, Human
guugcugguugcugugu

SEQ ID NO: 2591687 - RNA, 19 nt, Human
guugcugguugcugugugg

SEQ ID NO: 2591688 - RNA, 22 nt, Human
guugcugugggaacgagagggg

SEQ ID NO: 2591689 - RNA, 17 nt, Human
guugcuguuuuccuccc

SEQ ID NO: 2591690 - RNA, 18 nt, Human
guugcuguuuuccucccu

SEQ ID NO: 2591691 - RNA, 19 nt, Human
guugcuguuuuccucccuu

SEQ ID NO: 2591692 - RNA, 16 nt, Human
guugcugugugguuug

SEQ ID NO: 2591693 - RNA, 14 nt, Human
guugcugugggaac

SEQ ID NO: 2591694 - RNA, 19 nt, Human
guugcugucauaagaauga

SEQ ID NO: 2591695 - RNA, 18 nt, Human
guuguaccgcaaugugac

SEQ ID NO: 2591696 - RNA, 23 nt, Human
guuguacaaauaaagucccaggu

SEQ ID NO: 2591697 - RNA, 18 nt, Human
guugguguuccacguguu

SEQ ID NO: 2591698 - RNA, 15 nt, Human
guugguguugcagaa

SEQ ID NO: 2591699 - RNA, 23 nt, Human
guuguacauuuaugauuuaauaa

SEQ ID NO: 2591700 - RNA, 20 nt, Human
guuguacauuuaugauuuaa

SEQ ID NO: 2591701 - RNA, 18 nt, Human
guuguacauuuaugauuu

SEQ ID NO: 2591702 - RNA, 16 nt, Human
guuguacauuuaugau

SEQ ID NO: 2591703 - RNA, 14 nt, Human
guuguaguaaagaa

SEQ ID NO: 2591704 - RNA, 13 nt, Human
guuguagaaugua

SEQ ID NO: 2591705 - RNA, 20 nt, Human
guuguauucuuugauguuaa

SEQ ID NO: 2591706 - RNA, 14 nt, Human
guuguauucuuuga

SEQ ID NO: 2591707 - RNA, 13 nt, Human
guuguauucuuug

SEQ ID NO: 2591708 - RNA, 14 nt, Human
guuguaugccuuua

SEQ ID NO: 2591709 - RNA, 16 nt, Human
guugucaaagagaggg

SEQ ID NO: 2591710 - RNA, 22 nt, Human
guuguauucuuugauguuaaca

SEQ ID NO: 2591711 - RNA, 23 nt, Human
guuguaugccuuuaaaucuguga

SEQ ID NO: 2591712 - RNA, 14 nt, Human
guuguauuagaugu

SEQ ID NO: 2591713 - RNA, 15 nt, Human
guuguauuagauguu

SEQ ID NO: 2591714 - RNA, 16 nt, Human
guuguauaaauuuauu

SEQ ID NO: 2591715 - RNA, 17 nt, Human
guuguauaaauuuauuu

SEQ ID NO: 2591716 - RNA, 19 nt, Human
guuguauaaauuuauuuac

SEQ ID NO: 2591717 - RNA, 21 nt, Human
guuguauaaauuuauuuacug

SEQ ID NO: 2591718 - RNA, 18 nt, Human
guuguaucagcacgugug

SEQ ID NO: 2591719 - RNA, 20 nt, Human
guuguagaauguauuguacc

SEQ ID NO: 2591720 - RNA, 15 nt, Human
aaguaauaugcacac

SEQ ID NO: 2591721 - RNA, 16 nt, Human
aaguaauaugcacaca

SEQ ID NO: 2591722 - RNA, 19 nt, Human
guuucuaaaggcuaccuuu

SEQ ID NO: 2591723 - RNA, 12 nt, Human
aaguaauaugca

SEQ ID NO: 2591724 - RNA, 20 nt, Human
aaguaaaaacaaagaaauua

SEQ ID NO: 2591725 - RNA, 13 nt, Human
aaguaaaaacaaa

SEQ ID NO: 2591726 - RNA, 12 nt, Human
aagguaaaauug

SEQ ID NO: 2591727 - RNA, 19 nt, Human
aaggguuuuccacccugga

SEQ ID NO: 2591728 - RNA, 13 nt, Human
aaggguaaagaag

SEQ ID NO: 2591729 - RNA, 21 nt, Human
aaggguuuuccacccuggaau

SEQ ID NO: 2591730 - RNA, 20 nt, Human
aagggguugguugaggugga

SEQ ID NO: 2591731 - RNA, 16 nt, Human
aaggguaucaggugcu

SEQ ID NO: 2591732 - RNA, 15 nt, Human
aagguuuuauuuugu

SEQ ID NO: 2591733 - RNA, 13 nt, Human
aagguuuucucca

SEQ ID NO: 2591734 - RNA, 16 nt, Human
aagguuuuauuuugua

SEQ ID NO: 2591735 - RNA, 20 nt, Human
aagguuuuccucuucuauuu

SEQ ID NO: 2591736 - RNA, 14 nt, Human
aagguuuucuccac

SEQ ID NO: 2591737 - RNA, 13 nt, Human
aagguacuucaaa

SEQ ID NO: 2591738 - RNA, 17 nt, Human
aagguaauuucuugugc

SEQ ID NO: 2591739 - RNA, 16 nt, Human
aagguaaaauugaaag

SEQ ID NO: 2591740 - RNA, 17 nt, Human
guuucaaaaacuguauu

SEQ ID NO: 2591741 - RNA, 20 nt, Human
guuucaaaaacacaguguuu

SEQ ID NO: 2591742 - RNA, 19 nt, Human
guuucaaaaacacaguguu

SEQ ID NO: 2591743 - RNA, 17 nt, Human
guuuauuuuucauauug

SEQ ID NO: 2591744 - RNA, 18 nt, Human
guuuauuuuucauauugu

SEQ ID NO: 2591745 - RNA, 16 nt, Human
guuuauuuuucauauu

SEQ ID NO: 2591746 - RNA, 19 nt, Human
guuucaaaaacuguauuga

SEQ ID NO: 2591747 - RNA, 15 nt, Human
guuucaaaauaaaaa

SEQ ID NO: 2591748 - RNA, 16 nt, Human
guuucaaaauaaaaac

SEQ ID NO: 2591749 - RNA, 19 nt, Human
guuucaaaauaaaaaccaa

SEQ ID NO: 2591750 - RNA, 21 nt, Human
guuucaaacauauauaacaau

SEQ ID NO: 2591751 - RNA, 19 nt, Human
guuucaaacacaaaugcag

SEQ ID NO: 2591752 - RNA, 18 nt, Human
guuucaaacacaaaugca

SEQ ID NO: 2591753 - RNA, 23 nt, Human
guuucaaaauaaaaaccaagaag

SEQ ID NO: 2591754 - RNA, 17 nt, Human
aaggcuucucucucacc

SEQ ID NO: 2591755 - RNA, 18 nt, Human
aaggcuucucucuguggg

SEQ ID NO: 2591756 - RNA, 16 nt, Human
aaggcuucucucucac

SEQ ID NO: 2591757 - RNA, 15 nt, Human
aaggcuucucucuca

SEQ ID NO: 2591758 - RNA, 17 nt, Human
aaggcuucucucugugg

SEQ ID NO: 2591759 - RNA, 14 nt, Human
aaggcuucucucuc

SEQ ID NO: 2591760 - RNA, 12 nt, Human
aaggcuucucuc

SEQ ID NO: 2591761 - RNA, 13 nt, Human
aagggccuggccu

SEQ ID NO: 2591762 - RNA, 17 nt, Human
aagggccuggccugagc

SEQ ID NO: 2591763 - RNA, 14 nt, Human
aagggccuggccug

SEQ ID NO: 2591764 - RNA, 19 nt, Human
aagggccuggccugagcug

SEQ ID NO: 2591765 - RNA, 18 nt, Human
aagggcuuuguuuugcac

SEQ ID NO: 2591766 - RNA, 23 nt, Human
aagggcuucugcacccuccaccc

SEQ ID NO: 2591767 - RNA, 22 nt, Human
aagggcuucugcacccuccacc

SEQ ID NO: 2591768 - RNA, 19 nt, Human
aagggcuucugcacccucc

SEQ ID NO: 2591769 - RNA, 17 nt, Human
aagggcuagaaccugga

SEQ ID NO: 2591770 - RNA, 21 nt, Human
aagggguaggauuacuaggug

SEQ ID NO: 2591771 - RNA, 17 nt, Human
aaggggugcuuuuauag

SEQ ID NO: 2591772 - RNA, 14 nt, Human
aaggggugcuuuua

SEQ ID NO: 2591773 - RNA, 23 nt, Human
aaggggaauguuugccucugccu

SEQ ID NO: 2591774 - RNA, 22 nt, Human
aaggggaauguuugccucugcc

SEQ ID NO: 2591775 - RNA, 16 nt, Human
guuuucugggugucca

SEQ ID NO: 2591776 - RNA, 18 nt, Human
guuuucuggcuggagccu

SEQ ID NO: 2591777 - RNA, 17 nt, Human
guuuucuggcuggagcc

SEQ ID NO: 2591778 - RNA, 19 nt, Human
guuuucugagcccgggcug

SEQ ID NO: 2591779 - RNA, 12 nt, Human
guuuucuguucu

SEQ ID NO: 2591780 - RNA, 20 nt, Human
guuuucuuaaccagaucauu

SEQ ID NO: 2591781 - RNA, 19 nt, Human
guuuucuguucuuucuggc

SEQ ID NO: 2591782 - RNA, 17 nt, Human
guuuucuggguguccaa

SEQ ID NO: 2591783 - RNA, 16 nt, Human
guuuucuuaaccaucu

SEQ ID NO: 2591784 - RNA, 16 nt, Human
guuuucuuaacuuaaa

SEQ ID NO: 2591785 - RNA, 17 nt, Human
guuuucuuaaccaucuu

SEQ ID NO: 2591786 - RNA, 12 nt, Human
guuuucuuccca

SEQ ID NO: 2591787 - RNA, 15 nt, Human
guuuucuucccauca

SEQ ID NO: 2591788 - RNA, 20 nt, Human
guuuucuucccaucacugga

SEQ ID NO: 2591789 - RNA, 11 nt, Human
guuuucuguuc

SEQ ID NO: 2591790 - RNA, 17 nt, Human
guuuucugagcccgggc

SEQ ID NO: 2591791 - RNA, 15 nt, Human
guuuucugagcccgg

SEQ ID NO: 2591792 - RNA, 14 nt, Human
guuuucugagcccg

SEQ ID NO: 2591793 - RNA, 13 nt, Human
guuuucugagccc

SEQ ID NO: 2591794 - RNA, 14 nt, Human
guuuuaguugcaga

SEQ ID NO: 2591795 - RNA, 23 nt, Human
guuuucugagaaagacuauucaa

SEQ ID NO: 2591796 - RNA, 15 nt, Human
guuuuaguuaaauuu

SEQ ID NO: 2591797 - RNA, 21 nt, Human
guuuuaguugcagaaacauuu

SEQ ID NO: 2591798 - RNA, 12 nt, Human
guuuuacauugu

SEQ ID NO: 2591799 - RNA, 21 nt, Human
guuuuacauuguugagcuauu

SEQ ID NO: 2591800 - RNA, 13 nt, Human
guuuuagaaaaca

SEQ ID NO: 2591801 - RNA, 14 nt, Human
guuuuacuaaagaa

SEQ ID NO: 2591802 - RNA, 23 nt, Human
guuuuagacaaauacucaugugu

SEQ ID NO: 2591803 - RNA, 22 nt, Human
guuuuagacaaauacucaugug

SEQ ID NO: 2591804 - RNA, 19 nt, Human
guuuuagaguuaacaauga

SEQ ID NO: 2591805 - RNA, 18 nt, Human
guuuuagacaaauacuca

SEQ ID NO: 2591806 - RNA, 16 nt, Human
guuuuagaagguucuc

SEQ ID NO: 2591807 - RNA, 17 nt, Human
guuuuagacaaauacuc

SEQ ID NO: 2591808 - RNA, 21 nt, Human
guuuuagcuccuugacuccuu

SEQ ID NO: 2591809 - RNA, 20 nt, Human
guuuuagcuccuugacuccu

SEQ ID NO: 2591810 - RNA, 20 nt, Human
guuuuagccauuguuggcuu

SEQ ID NO: 2591811 - RNA, 21 nt, Human
guuuuaggacaaacagcucag

SEQ ID NO: 2591812 - RNA, 20 nt, Human
guuugggccccagaggcugg

SEQ ID NO: 2591813 - RNA, 16 nt, Human
guuugggccccucucc

SEQ ID NO: 2591814 - RNA, 22 nt, Human
guuuggggaaugcggccgcauu

SEQ ID NO: 2591815 - RNA, 15 nt, Human
guuuggggagcagag

SEQ ID NO: 2591816 - RNA, 18 nt, Human
guuuggggaugagaaagg

SEQ ID NO: 2591817 - RNA, 23 nt, Human
guuuuacaauaaaaucuugaaaa

SEQ ID NO: 2591818 - RNA, 20 nt, Human
guuuggggagcagagacacu

SEQ ID NO: 2591819 - RNA, 22 nt, Human
guuuggcugugucuaaacugca

SEQ ID NO: 2591820 - RNA, 22 nt, Human
guuucuaaaggcuaccuuugua

SEQ ID NO: 2591821 - RNA, 23 nt, Human
guuucuaaaggcuaccuuuguau

SEQ ID NO: 2591822 - RNA, 21 nt, Human
guuucugucaggagagcagcg

SEQ ID NO: 2591823 - RNA, 17 nt, Human
guuucugucaggagagc

SEQ ID NO: 2591824 - RNA, 17 nt, Human
guuucuguccugcuggu

SEQ ID NO: 2591825 - RNA, 22 nt, Human
guuugauucagacagcugccug

SEQ ID NO: 2591826 - RNA, 22 nt, Human
guuucuguucuguggaaagugu

SEQ ID NO: 2591827 - RNA, 18 nt, Human
guuucuguucuguggaaa

SEQ ID NO: 2591828 - RNA, 17 nt, Human
guuucuguucuguggaa

SEQ ID NO: 2591829 - RNA, 15 nt, Human
guuugauuucauuaa

SEQ ID NO: 2591830 - RNA, 20 nt, Human
guuucuguucuguggaaagu

SEQ ID NO: 2591831 - RNA, 15 nt, Human
guuucuguucugugg

SEQ ID NO: 2591832 - RNA, 14 nt, Human
guuucuguucugug

SEQ ID NO: 2591833 - RNA, 14 nt, Human
guuucuguuauuaa

SEQ ID NO: 2591834 - RNA, 16 nt, Human
guuucuguccugcugg

SEQ ID NO: 2591835 - RNA, 17 nt, Human
guuucugugcauggugg

SEQ ID NO: 2591836 - RNA, 13 nt, Human
guuucugugcaug

SEQ ID NO: 2591837 - RNA, 15 nt, Human
guuugcaaggaagcc

SEQ ID NO: 2591838 - RNA, 14 nt, Human
guuugcaaggaagc

SEQ ID NO: 2591839 - RNA, 13 nt, Human
guuugcaaggaag

SEQ ID NO: 2591840 - RNA, 22 nt, Human
guuugcacguuaugguguuucu

SEQ ID NO: 2591841 - RNA, 19 nt, Human
guuugcaucugaaaauuga

SEQ ID NO: 2591842 - RNA, 22 nt, Human
guuugcaaggaagccacagcug

SEQ ID NO: 2591843 - RNA, 17 nt, Human
guuugcaaggaagccac

SEQ ID NO: 2591844 - RNA, 20 nt, Human
guuugccacuuugcaaagga

SEQ ID NO: 2591845 - RNA, 15 nt, Human
guuugcacacuugug

SEQ ID NO: 2591846 - RNA, 12 nt, Human
guuugcauuccu

SEQ ID NO: 2591847 - RNA, 21 nt, Human
guuugauuuuagcugcagaac

SEQ ID NO: 2591848 - RNA, 15 nt, Human
guuugccauacuuug

SEQ ID NO: 2591849 - RNA, 14 nt, Human
guuugccauacuuu

SEQ ID NO: 2591850 - RNA, 22 nt, Human
guuugccauacuuugucugaaa

SEQ ID NO: 2591851 - RNA, 16 nt, Human
guuugccucugccucu

SEQ ID NO: 2591852 - RNA, 13 nt, Human
guuugccucugcc

SEQ ID NO: 2591853 - RNA, 16 nt, Human
guuugggaccccuggu

SEQ ID NO: 2591854 - RNA, 23 nt, Human
guuuggcugugucuaaacugcau

SEQ ID NO: 2591855 - RNA, 22 nt, Human
guuugggaccccuggugguuca

SEQ ID NO: 2591856 - RNA, 21 nt, Human
guuugggcagaagggagaagg

SEQ ID NO: 2591857 - RNA, 18 nt, Human
guguguaugcgugugugu

SEQ ID NO: 2591858 - RNA, 20 nt, Human
guguguagaguuaagaagcu

SEQ ID NO: 2591859 - RNA, 21 nt, Human
guguguaugacuaaagagaga

SEQ ID NO: 2591860 - RNA, 12 nt, Human
guguguaugugg

SEQ ID NO: 2591861 - RNA, 19 nt, Human
guguguccaaaacugccuc

SEQ ID NO: 2591862 - RNA, 18 nt, Human
guguguaugggugugugu

SEQ ID NO: 2591863 - RNA, 20 nt, Human
guguguaugugcgugugugc

SEQ ID NO: 2591864 - RNA, 19 nt, Human
guguguccacgacugucuc

SEQ ID NO: 2591865 - RNA, 20 nt, Human
guguguccacgacugucucc

SEQ ID NO: 2591866 - RNA, 16 nt, Human
gugugucccccucugu

SEQ ID NO: 2591867 - RNA, 17 nt, Human
gugugucccccucuguc

SEQ ID NO: 2591868 - RNA, 11 nt, Human
guguguccuug

SEQ ID NO: 2591869 - RNA, 10 nt, Human
guguguccuu

SEQ ID NO: 2591870 - RNA, 18 nt, Human
gugugucccccucugucc

SEQ ID NO: 2591871 - RNA, 18 nt, Human
guguguccuugugcauga

SEQ ID NO: 2591872 - RNA, 12 nt, Human
guguguccuugu

SEQ ID NO: 2591873 - RNA, 20 nt, Human
guguguccuugugcaugagc

SEQ ID NO: 2591874 - RNA, 21 nt, Human
gugugucuuaauuauuauuug

SEQ ID NO: 2591875 - RNA, 14 nt, Human
gugugucuuaauua

SEQ ID NO: 2591876 - RNA, 15 nt, Human
gugugucugcucagu

SEQ ID NO: 2591877 - RNA, 16 nt, Human
gugugucugcucagua

SEQ ID NO: 2591878 - RNA, 15 nt, Human
gugugucuguucacu

SEQ ID NO: 2591879 - RNA, 22 nt, Human
gugugucuguucacuuuuccuc

SEQ ID NO: 2591880 - RNA, 18 nt, Human
guguugccaagcuccaag

SEQ ID NO: 2591881 - RNA, 14 nt, Human
guguugccaagcuc

SEQ ID NO: 2591882 - RNA, 20 nt, Human
guguugccaaauauguccug

SEQ ID NO: 2591883 - RNA, 19 nt, Human
guguugccaaauauguccu

SEQ ID NO: 2591884 - RNA, 15 nt, Human
guguugaucccaaga

SEQ ID NO: 2591885 - RNA, 17 nt, Human
guguugccaaauauguc

SEQ ID NO: 2591886 - RNA, 19 nt, Human
guguugauuuucuguugua

SEQ ID NO: 2591887 - RNA, 13 nt, Human
guguugcagaagg

SEQ ID NO: 2591888 - RNA, 16 nt, Human
guguugucuugaaaga

SEQ ID NO: 2591889 - RNA, 14 nt, Human
guguugggauacug

SEQ ID NO: 2591890 - RNA, 15 nt, Human
guguugucucuugag

SEQ ID NO: 2591891 - RNA, 12 nt, Human
guguugucucua

SEQ ID NO: 2591892 - RNA, 14 nt, Human
guguugucccuucu

SEQ ID NO: 2591893 - RNA, 16 nt, Human
guguuuauuuuucaua

SEQ ID NO: 2591894 - RNA, 18 nt, Human
guguugucuugaaagauu

SEQ ID NO: 2591895 - RNA, 20 nt, Human
guguugugauagcuaacauu

SEQ ID NO: 2591896 - RNA, 15 nt, Human
guguuguguguggga

SEQ ID NO: 2591897 - RNA, 18 nt, Human
guguuucacuuuuaggga

SEQ ID NO: 2591898 - RNA, 20 nt, Human
guguuuauuuuucauauugu

SEQ ID NO: 2591899 - RNA, 18 nt, Human
guguuuccauauuuuaua

SEQ ID NO: 2591900 - RNA, 23 nt, Human
guguuuccuggcacugcuuccag

SEQ ID NO: 2591901 - RNA, 18 nt, Human
guguuggcccaagcucuu

SEQ ID NO: 2591902 - RNA, 17 nt, Human
guguuggcccaagcucu

SEQ ID NO: 2591903 - RNA, 16 nt, Human
guguuggcccaagcuc

SEQ ID NO: 2591904 - RNA, 18 nt, Human
guguugcgugucgugggu

SEQ ID NO: 2591905 - RNA, 15 nt, Human
guguugccacaggac

SEQ ID NO: 2591906 - RNA, 17 nt, Human
guguugccacaggacac

SEQ ID NO: 2591907 - RNA, 18 nt, Human
guguugccacaggacaca

SEQ ID NO: 2591908 - RNA, 21 nt, Human
guguugccuugaaccacuucc

SEQ ID NO: 2591909 - RNA, 20 nt, Human
guguugcccaggcuggucuc

SEQ ID NO: 2591910 - RNA, 22 nt, Human
guguugguuuugacuggauauu

SEQ ID NO: 2591911 - RNA, 21 nt, Human
guguugggauacugcagggcc

SEQ ID NO: 2591912 - RNA, 21 nt, Human
guguuggcuaaugaagggaaa

SEQ ID NO: 2591913 - RNA, 14 nt, Human
guguuguaugccuu

SEQ ID NO: 2591914 - RNA, 16 nt, Human
gugucuuuugcaugau

SEQ ID NO: 2591915 - RNA, 15 nt, Human
gugucuuuugcauga

SEQ ID NO: 2591916 - RNA, 13 nt, Human
gugugaaaauggg

SEQ ID NO: 2591917 - RNA, 17 nt, Human
gugugaaaaugugugug

SEQ ID NO: 2591918 - RNA, 18 nt, Human
gugucuuuuuucacuaca

SEQ ID NO: 2591919 - RNA, 17 nt, Human
gugugacuacuccccca

SEQ ID NO: 2591920 - RNA, 14 nt, Human
guguguaauuuaaa

SEQ ID NO: 2591921 - RNA, 17 nt, Human
guguguagacaaauauu

SEQ ID NO: 2591922 - RNA, 15 nt, Human
gugugaccugagggc

SEQ ID NO: 2591923 - RNA, 17 nt, Human
guguguagaguuaagaa

SEQ ID NO: 2591924 - RNA, 16 nt, Human
guguguagaguuaaga

SEQ ID NO: 2591925 - RNA, 13 nt, Human
guguguagaguua

SEQ ID NO: 2591926 - RNA, 19 nt, Human
guguguagacaaauauuug

SEQ ID NO: 2591927 - RNA, 21 nt, Human
guguguagaguuaagaagcug

SEQ ID NO: 2591928 - RNA, 14 nt, Human
guguguagccaagg

SEQ ID NO: 2591929 - RNA, 13 nt, Human
gugugaccugagg

SEQ ID NO: 2591930 - RNA, 22 nt, Human
gugugagaagugaaugcuggga

SEQ ID NO: 2591931 - RNA, 21 nt, Human
gugugagaagugaaugcuggg

SEQ ID NO: 2591932 - RNA, 13 nt, Human
gugugagcaguga

SEQ ID NO: 2591933 - RNA, 16 nt, Human
gugugaggagcugcug

SEQ ID NO: 2591934 - RNA, 18 nt, Human
gugugaggagcugcuggc

SEQ ID NO: 2591935 - RNA, 19 nt, Human
gugugaggagcugcuggcu

SEQ ID NO: 2591936 - RNA, 13 nt, Human
aagcaauaugcau

SEQ ID NO: 2591937 - RNA, 19 nt, Human
aagcaauaugcauuuaaau

SEQ ID NO: 2591938 - RNA, 15 nt, Human
aagcaauccuaggua

SEQ ID NO: 2591939 - RNA, 15 nt, Human
aagcaauuccaaccu

SEQ ID NO: 2591940 - RNA, 15 nt, Human
aagcaauuagacaag

SEQ ID NO: 2591941 - RNA, 16 nt, Human
aagcaaugcauuuugg

SEQ ID NO: 2591942 - RNA, 13 nt, Human
aagcaaugcauuu

SEQ ID NO: 2591943 - RNA, 11 nt, Human
aagcaaugcau

SEQ ID NO: 2591944 - RNA, 14 nt, Human
aagcaauuuuccuu

SEQ ID NO: 2591945 - RNA, 13 nt, Human
aagcaauuuuccu

SEQ ID NO: 2591946 - RNA, 16 nt, Human
aagcaauuccaaccuu

SEQ ID NO: 2591947 - RNA, 17 nt, Human
aagcaauuuuccuugaa

SEQ ID NO: 2591948 - RNA, 16 nt, Human
aagcaauuuuccuuga

SEQ ID NO: 2591949 - RNA, 12 nt, Human
gugucuuccaua

SEQ ID NO: 2591950 - RNA, 14 nt, Human
gugucuuccugugg

SEQ ID NO: 2591951 - RNA, 13 nt, Human
gugucuuccugug

SEQ ID NO: 2591952 - RNA, 12 nt, Human
gugucuuccugu

SEQ ID NO: 2591953 - RNA, 19 nt, Human
gugucuuccucccaagugg

SEQ ID NO: 2591954 - RNA, 15 nt, Human
gugucuuccucccaa

SEQ ID NO: 2591955 - RNA, 14 nt, Human
gugucuuccuccca

SEQ ID NO: 2591956 - RNA, 13 nt, Human
gugucuuccauaa

SEQ ID NO: 2591957 - RNA, 15 nt, Human
gugucuuccauaaug

SEQ ID NO: 2591958 - RNA, 18 nt, Human
gugucuugcaauggcagc

SEQ ID NO: 2591959 - RNA, 17 nt, Human
gugucuugcaauggcag

SEQ ID NO: 2591960 - RNA, 20 nt, Human
gugucuucuccaccacgcug

SEQ ID NO: 2591961 - RNA, 17 nt, Human
gugucuuuccacuccuc

SEQ ID NO: 2591962 - RNA, 18 nt, Human
gugucuuucacagcuccu

SEQ ID NO: 2591963 - RNA, 21 nt, Human
gugucuuuucuguagagcaua

SEQ ID NO: 2591964 - RNA, 18 nt, Human
aagaguaaaggaaaugau

SEQ ID NO: 2591965 - RNA, 17 nt, Human
aagaguaaaggaaauga

SEQ ID NO: 2591966 - RNA, 16 nt, Human
aagagguuuuucuuaa

SEQ ID NO: 2591967 - RNA, 13 nt, Human
aagaguagaaacu

SEQ ID NO: 2591968 - RNA, 19 nt, Human
aagauauaagugcuguaua

SEQ ID NO: 2591969 - RNA, 21 nt, Human
aagauauaagugcuguauaaa

SEQ ID NO: 2591970 - RNA, 20 nt, Human
aagauauaagugcuguauaa

SEQ ID NO: 2591971 - RNA, 18 nt, Human
aagagguuuuaaaaaaau

SEQ ID NO: 2591972 - RNA, 17 nt, Human
gugguuuucuguucuuu

SEQ ID NO: 2591973 - RNA, 24 nt, Human
gugguuuuccccucccuggguuca

SEQ ID NO: 2591974 - RNA, 21 nt, Human
gugguuuuccccucccugggu

SEQ ID NO: 2591975 - RNA, 20 nt, Human
gugguuuuccccucccuggg

SEQ ID NO: 2591976 - RNA, 17 nt, Human
aagagguguuuuuucua

SEQ ID NO: 2591977 - RNA, 19 nt, Human
gugguuuuccccucccugg

SEQ ID NO: 2591978 - RNA, 18 nt, Human
gugguuuuccccucccug

SEQ ID NO: 2591979 - RNA, 16 nt, Human
gugguuuuccccuccc

SEQ ID NO: 2591980 - RNA, 20 nt, Human
gugguuuuauacugaaggaa

SEQ ID NO: 2591981 - RNA, 16 nt, Human
gugguuugguguguuc

SEQ ID NO: 2591982 - RNA, 20 nt, Human
guggugguuuucuguucuuu

SEQ ID NO: 2591983 - RNA, 16 nt, Human
gugguuugagacacug

SEQ ID NO: 2591984 - RNA, 15 nt, Human
aagaucuuaaauuuu

SEQ ID NO: 2591985 - RNA, 14 nt, Human
aagaucuuaaauuu

SEQ ID NO: 2591986 - RNA, 17 nt, Human
aagaucuuaaauuuugu

SEQ ID NO: 2591987 - RNA, 19 nt, Human
aagaucugugcagccccgc

SEQ ID NO: 2591988 - RNA, 17 nt, Human
aagaucugugcagcccc

SEQ ID NO: 2591989 - RNA, 20 nt, Human
aagaucuguuuugaaggcaa

SEQ ID NO: 2591990 - RNA, 21 nt, Human
aagaucuguuuugaaggcaaa

SEQ ID NO: 2591991 - RNA, 22 nt, Human
aagaucuguuuugaaggcaaaa

SEQ ID NO: 2591992 - RNA, 12 nt, Human
aagaugcagccg

SEQ ID NO: 2591993 - RNA, 13 nt, Human
aagaucuuucagg

SEQ ID NO: 2591994 - RNA, 19 nt, Human
aagaucuguccucagccuu

SEQ ID NO: 2591995 - RNA, 20 nt, Human
aagaucuguccucagccuug

SEQ ID NO: 2591996 - RNA, 18 nt, Human
aagaucuguccucagccu

SEQ ID NO: 2591997 - RNA, 15 nt, Human
aagauauuuauauau

SEQ ID NO: 2591998 - RNA, 18 nt, Human
aagauauuuauauauauu

SEQ ID NO: 2591999 - RNA, 19 nt, Human
aagauauuuuaaaaucugu

SEQ ID NO: 2592000 - RNA, 13 nt, Human
aagauauuuauau

SEQ ID NO: 2592001 - RNA, 21 nt, Human
aagauauauuaaaaauauaaa

SEQ ID NO: 2592002 - RNA, 19 nt, Human
aagauauauuaaaaauaua

SEQ ID NO: 2592003 - RNA, 15 nt, Human
aagauauauuaaaaa

SEQ ID NO: 2592004 - RNA, 14 nt, Human
aagauauauuaaaa

SEQ ID NO: 2592005 - RNA, 11 nt, Human
aagauauauua

SEQ ID NO: 2592006 - RNA, 21 nt, Human
aagauauauacacaggauccu

SEQ ID NO: 2592007 - RNA, 12 nt, Human
aagauauggaca

SEQ ID NO: 2592008 - RNA, 16 nt, Human
aagauaugggacauuu

SEQ ID NO: 2592009 - RNA, 19 nt, Human
aagauaugggacauuuuug

SEQ ID NO: 2592010 - RNA, 20 nt, Human
aagauauauuaaaaauauaa

SEQ ID NO: 2592011 - RNA, 18 nt, Human
aagaugugacauguuuua

SEQ ID NO: 2592012 - RNA, 14 nt, Human
aagaugugacaugu

SEQ ID NO: 2592013 - RNA, 17 nt, Human
aagcaaagcaccagcuu

SEQ ID NO: 2592014 - RNA, 22 nt, Human
aagcaaagacuuuccucuuagu

SEQ ID NO: 2592015 - RNA, 21 nt, Human
aagaugcucuaucuugcucug

SEQ ID NO: 2592016 - RNA, 15 nt, Human
aagaugcucuaucuu

SEQ ID NO: 2592017 - RNA, 24 nt, Human
aagaugcccacugaggaaugauga

SEQ ID NO: 2592018 - RNA, 15 nt, Human
aagaugcucuucugu

SEQ ID NO: 2592019 - RNA, 22 nt, Human
aagaugcucuaucuugcucugu

SEQ ID NO: 2592020 - RNA, 15 nt, Human
aagaugcucuuuuaa

SEQ ID NO: 2592021 - RNA, 20 nt, Human
aagauguccuccuuguucua

SEQ ID NO: 2592022 - RNA, 16 nt, Human
aagaugucagacuggc

SEQ ID NO: 2592023 - RNA, 20 nt, Human
aagaugcuggguuggugcac

SEQ ID NO: 2592024 - RNA, 16 nt, Human
aagaugcuggguuggu

SEQ ID NO: 2592025 - RNA, 14 nt, Human
aagaugcuggguug

SEQ ID NO: 2592026 - RNA, 11 nt, Human
aagaugcuggg

SEQ ID NO: 2592027 - RNA, 22 nt, Human
aagaugcuggaugucugccaau

SEQ ID NO: 2592028 - RNA, 10 nt, Human
aagaugcugg

SEQ ID NO: 2592029 - RNA, 17 nt, Human
aagaugcucuucugugg

SEQ ID NO: 2592030 - RNA, 21 nt, Human
aagaugcugaaacaggagaga

SEQ ID NO: 2592031 - RNA, 22 nt, Human
aagcaauaauggucccauccag

SEQ ID NO: 2592032 - RNA, 21 nt, Human
aagcaauaauggucccaucca

SEQ ID NO: 2592033 - RNA, 20 nt, Human
aagcaauaauggucccaucc

SEQ ID NO: 2592034 - RNA, 14 nt, Human
aagcaauaaaugaa

SEQ ID NO: 2592035 - RNA, 16 nt, Human
aagcaauaaaugaaug

SEQ ID NO: 2592036 - RNA, 17 nt, Human
aagcaauaaagaagagu

SEQ ID NO: 2592037 - RNA, 17 nt, Human
aagcaagagagauguuu

SEQ ID NO: 2592038 - RNA, 22 nt, Human
aagcaagugauugggacagagg

SEQ ID NO: 2592039 - RNA, 23 nt, Human
aagcaacugucuauuucugcuga

SEQ ID NO: 2592040 - RNA, 22 nt, Human
aagcaacugucuauuucugcug

SEQ ID NO: 2592041 - RNA, 21 nt, Human
aagcaacugucuauuucugcu

SEQ ID NO: 2592042 - RNA, 18 nt, Human
aagcaacugucuauuucu

SEQ ID NO: 2592043 - RNA, 17 nt, Human
aagcaacugucuauuuc

SEQ ID NO: 2592044 - RNA, 23 nt, Human
aagcaaccuggguccaaauaaaa

SEQ ID NO: 2592045 - RNA, 16 nt, Human
aagcaacugucuauuu

SEQ ID NO: 2592046 - RNA, 15 nt, Human
aagcaagagagaugu

SEQ ID NO: 2592047 - RNA, 18 nt, Human
aagcaagagagauguuuu

SEQ ID NO: 2592048 - RNA, 14 nt, Human
aagcaacuguuaug

SEQ ID NO: 2592049 - RNA, 15 nt, Human
aagcaagaaagaaac

SEQ ID NO: 2592050 - RNA, 13 nt, Human
aagcaaaggagau

SEQ ID NO: 2592051 - RNA, 12 nt, Human
aagcaaaggaga

SEQ ID NO: 2592052 - RNA, 22 nt, Human
aagcaaccuggguccaaauaaa

SEQ ID NO: 2592053 - RNA, 21 nt, Human
aagcaaccuggguccaaauaa

SEQ ID NO: 2592054 - RNA, 20 nt, Human
aagcaaccuggguccaaaua

SEQ ID NO: 2592055 - RNA, 18 nt, Human
aagcaaccuggguccaaa

SEQ ID NO: 2592056 - RNA, 17 nt, Human
aagcaaaggugaagaga

SEQ ID NO: 2592057 - RNA, 11 nt, Human
aagcaaaggug

SEQ ID NO: 2592058 - RNA, 19 nt, Human
guggggugugcugggagcu

SEQ ID NO: 2592059 - RNA, 16 nt, Human
guggggugugcuggga

SEQ ID NO: 2592060 - RNA, 13 nt, Human
guggggugugcug

SEQ ID NO: 2592061 - RNA, 12 nt, Human
gugggggcugca

SEQ ID NO: 2592062 - RNA, 17 nt, Human
guggggugaggaccacu

SEQ ID NO: 2592063 - RNA, 14 nt, Human
guggguacgggagg

SEQ ID NO: 2592064 - RNA, 22 nt, Human
gugggguguguuccaacugccc

SEQ ID NO: 2592065 - RNA, 15 nt, Human
guggguacagagagg

SEQ ID NO: 2592066 - RNA, 15 nt, Human
gugggagucaucuca

SEQ ID NO: 2592067 - RNA, 17 nt, Human
gugggauaucccuaugc

SEQ ID NO: 2592068 - RNA, 14 nt, Human
gugggggcagaggg

SEQ ID NO: 2592069 - RNA, 17 nt, Human
gugggggcagagggcag

SEQ ID NO: 2592070 - RNA, 18 nt, Human
gugggggcagagggcaga

SEQ ID NO: 2592071 - RNA, 20 nt, Human
gugggggaucacagccucug

SEQ ID NO: 2592072 - RNA, 16 nt, Human
guggggggcuucauac

SEQ ID NO: 2592073 - RNA, 15 nt, Human
guggggggcuucaua

SEQ ID NO: 2592074 - RNA, 22 nt, Human
gugggggcagagggcagaggcu

SEQ ID NO: 2592075 - RNA, 16 nt, Human
gugguuucagaaaugu

SEQ ID NO: 2592076 - RNA, 14 nt, Human
guggugguuuucug

SEQ ID NO: 2592077 - RNA, 19 nt, Human
guggugguaacccuggugg

SEQ ID NO: 2592078 - RNA, 20 nt, Human
guggugguaacccugguggu

SEQ ID NO: 2592079 - RNA, 22 nt, Human
gugguggggaggggcgcuggcc

SEQ ID NO: 2592080 - RNA, 20 nt, Human
gugguggggaggggcgcugg

SEQ ID NO: 2592081 - RNA, 22 nt, Human
gugguggguucuuuggaaggag

SEQ ID NO: 2592082 - RNA, 16 nt, Human
guggugguaacccugg

SEQ ID NO: 2592083 - RNA, 12 nt, Human
gugguggggagg

SEQ ID NO: 2592084 - RNA, 18 nt, Human
guggugggacagggaccc

SEQ ID NO: 2592085 - RNA, 21 nt, Human
guggguggauauaaauauaua

SEQ ID NO: 2592086 - RNA, 20 nt, Human
guggguggauauaaauauau

SEQ ID NO: 2592087 - RNA, 18 nt, Human
guggguggauauaaauau

SEQ ID NO: 2592088 - RNA, 23 nt, Human
gugggugagaugcuggagaagag

SEQ ID NO: 2592089 - RNA, 19 nt, Human
guggguggaaccaggaacc

SEQ ID NO: 2592090 - RNA, 20 nt, Human
gugggugagaugcuggagaa

SEQ ID NO: 2592091 - RNA, 15 nt, Human
gugggugagaugcug

SEQ ID NO: 2592092 - RNA, 21 nt, Human
gugggucuucagggggccagg

SEQ ID NO: 2592093 - RNA, 17 nt, Human
gugggucuucagggggc

SEQ ID NO: 2592094 - RNA, 13 nt, Human
gugggucugugug

SEQ ID NO: 2592095 - RNA, 16 nt, Human
gugggucugugugugu

SEQ ID NO: 2592096 - RNA, 17 nt, Human
guggguacuauucugau

SEQ ID NO: 2592097 - RNA, 13 nt, Human
gugggucuucagg

SEQ ID NO: 2592098 - RNA, 21 nt, Human
guggcgccgucuccaggggcu

SEQ ID NO: 2592099 - RNA, 17 nt, Human
guggcgccgucuccagg

SEQ ID NO: 2592100 - RNA, 22 nt, Human
guggcgccgucuccaggggcug

SEQ ID NO: 2592101 - RNA, 23 nt, Human
guggcgcagcauauucaggaagc

SEQ ID NO: 2592102 - RNA, 22 nt, Human
guggcccugccaucuucccagc

SEQ ID NO: 2592103 - RNA, 17 nt, Human
guggcccugccaucuuc

SEQ ID NO: 2592104 - RNA, 13 nt, Human
guggcccugccau

SEQ ID NO: 2592105 - RNA, 21 nt, Human
guggcccugccaucuucccag

SEQ ID NO: 2592106 - RNA, 13 nt, Human
guggcccuggccu

SEQ ID NO: 2592107 - RNA, 16 nt, Human
guggcccuggccugcu

SEQ ID NO: 2592108 - RNA, 17 nt, Human
guggcccuggccugcug

SEQ ID NO: 2592109 - RNA, 21 nt, Human
guggcccugucccucccaccu

SEQ ID NO: 2592110 - RNA, 17 nt, Human
guggcccugucccuccc

SEQ ID NO: 2592111 - RNA, 16 nt, Human
guggcccugucccucc

SEQ ID NO: 2592112 - RNA, 18 nt, Human
guggcccuggccugcugg

SEQ ID NO: 2592113 - RNA, 19 nt, Human
guggcccuggccugcuggg

SEQ ID NO: 2592114 - RNA, 22 nt, Human
gugggacacccugugauggggc

SEQ ID NO: 2592115 - RNA, 15 nt, Human
guggcgggcgccugu

SEQ ID NO: 2592116 - RNA, 13 nt, Human
guggcggugccug

SEQ ID NO: 2592117 - RNA, 14 nt, Human
guggcggugccugg

SEQ ID NO: 2592118 - RNA, 17 nt, Human
guggcggugccugggug

SEQ ID NO: 2592119 - RNA, 21 nt, Human
gugggacagucaccucaugga

SEQ ID NO: 2592120 - RNA, 15 nt, Human
gugggacagagucug

SEQ ID NO: 2592121 - RNA, 13 nt, Human
gugggagugugua

SEQ ID NO: 2592122 - RNA, 14 nt, Human
gugggaguguguaa

SEQ ID NO: 2592123 - RNA, 13 nt, Human
gugggauccucca

SEQ ID NO: 2592124 - RNA, 14 nt, Human
gugggagugggccc

SEQ ID NO: 2592125 - RNA, 13 nt, Human
gugggagugggcc

SEQ ID NO: 2592126 - RNA, 20 nt, Human
gugggacggugcccaagcca

SEQ ID NO: 2592127 - RNA, 19 nt, Human
gugggacggugcccaagcc

SEQ ID NO: 2592128 - RNA, 23 nt, Human
gugggaggaucucuugagccugg

SEQ ID NO: 2592129 - RNA, 19 nt, Human
gugggagggagcagacagg

SEQ ID NO: 2592130 - RNA, 15 nt, Human
gugggagggagcaga

SEQ ID NO: 2592131 - RNA, 14 nt, Human
gugggagggagcag

SEQ ID NO: 2592132 - RNA, 13 nt, Human
gugggagggagca

SEQ ID NO: 2592133 - RNA, 17 nt, Human
gugggagguggaagaag

SEQ ID NO: 2592134 - RNA, 15 nt, Human
gugggaggggcaggc

SEQ ID NO: 2592135 - RNA, 14 nt, Human
gugggaggggcagg

SEQ ID NO: 2592136 - RNA, 13 nt, Human
gugggaggggcag

SEQ ID NO: 2592137 - RNA, 12 nt, Human
gugggaggggca

SEQ ID NO: 2592138 - RNA, 17 nt, Human
gugggaggggcaggcug

SEQ ID NO: 2592139 - RNA, 16 nt, Human
gugggaggggcaggcu

SEQ ID NO: 2592140 - RNA, 21 nt, Human
gugggaggggcgcccaccucc

SEQ ID NO: 2592141 - RNA, 16 nt, Human
aagagccuggagaagc

SEQ ID NO: 2592142 - RNA, 14 nt, Human
aagagccuggagaa

SEQ ID NO: 2592143 - RNA, 13 nt, Human
aagagccuggaga

SEQ ID NO: 2592144 - RNA, 11 nt, Human
aagagccugga

SEQ ID NO: 2592145 - RNA, 22 nt, Human
aagagccugcaggugcugcugc

SEQ ID NO: 2592146 - RNA, 20 nt, Human
aagagccugcaggugcugcu

SEQ ID NO: 2592147 - RNA, 16 nt, Human
aagagccugcaggugc

SEQ ID NO: 2592148 - RNA, 12 nt, Human
aagagccugcag

SEQ ID NO: 2592149 - RNA, 19 nt, Human
aagagccggagccuccagc

SEQ ID NO: 2592150 - RNA, 14 nt, Human
aagagccggagccu

SEQ ID NO: 2592151 - RNA, 18 nt, Human
aagagcccuugccucccc

SEQ ID NO: 2592152 - RNA, 16 nt, Human
aagagcccuugccucc

SEQ ID NO: 2592153 - RNA, 14 nt, Human
aagagcccuugccu

SEQ ID NO: 2592154 - RNA, 13 nt, Human
aagagcccuugcc

SEQ ID NO: 2592155 - RNA, 21 nt, Human
aagagcacuuaagagaauauu

SEQ ID NO: 2592156 - RNA, 17 nt, Human
aagagcacuuaagagaa

SEQ ID NO: 2592157 - RNA, 16 nt, Human
aagagcacuuaagaga

SEQ ID NO: 2592158 - RNA, 19 nt, Human
aagagcaccuuccucacuu

SEQ ID NO: 2592159 - RNA, 19 nt, Human
aagagcacagcccucccgc

SEQ ID NO: 2592160 - RNA, 15 nt, Human
aagagcacagcccuc

SEQ ID NO: 2592161 - RNA, 14 nt, Human
aagagcacagcccu

SEQ ID NO: 2592162 - RNA, 13 nt, Human
aagagcacagccc

SEQ ID NO: 2592163 - RNA, 12 nt, Human
aagagcacagcc

SEQ ID NO: 2592164 - RNA, 13 nt, Human
aagagcacacuug

SEQ ID NO: 2592165 - RNA, 15 nt, Human
aagagcaagucugga

SEQ ID NO: 2592166 - RNA, 16 nt, Human
aagacuccucggccug

SEQ ID NO: 2592167 - RNA, 15 nt, Human
aagagauuucaagag

SEQ ID NO: 2592168 - RNA, 17 nt, Human
aagagauuuuucaugau

SEQ ID NO: 2592169 - RNA, 15 nt, Human
aagagauuuuucaug

SEQ ID NO: 2592170 - RNA, 14 nt, Human
aagagauuuuucau

SEQ ID NO: 2592171 - RNA, 14 nt, Human
aagagauuucaaga

SEQ ID NO: 2592172 - RNA, 13 nt, Human
aagagauuucaag

SEQ ID NO: 2592173 - RNA, 13 nt, Human
aagagauuuuuca

SEQ ID NO: 2592174 - RNA, 16 nt, Human
aagagauuuaauuaau

SEQ ID NO: 2592175 - RNA, 14 nt, Human
aagagauuuaauua

SEQ ID NO: 2592176 - RNA, 17 nt, Human
aagagauuguuguuugc

SEQ ID NO: 2592177 - RNA, 18 nt, Human
aagacuucaguauguugu

SEQ ID NO: 2592178 - RNA, 17 nt, Human
aagacuguugcucaaau

SEQ ID NO: 2592179 - RNA, 24 nt, Human
aagacuguugcucaaaucuauuca

SEQ ID NO: 2592180 - RNA, 16 nt, Human
aagacuguugcucaaa

SEQ ID NO: 2592181 - RNA, 18 nt, Human
aagacuguggcugcuagc

SEQ ID NO: 2592182 - RNA, 21 nt, Human
aagagccuggagaagcugaug

SEQ ID NO: 2592183 - RNA, 17 nt, Human
aagagccuggagaagcu

SEQ ID NO: 2592184 - RNA, 20 nt, Human
aagagccuugguguccaccu

SEQ ID NO: 2592185 - RNA, 21 nt, Human
aagagccuugguguccaccug

SEQ ID NO: 2592186 - RNA, 22 nt, Human
aagagccuugguguccaccugg

SEQ ID NO: 2592187 - RNA, 16 nt, Human
aagagcuuaacagugu

SEQ ID NO: 2592188 - RNA, 15 nt, Human
aagaggaaagaauga

SEQ ID NO: 2592189 - RNA, 14 nt, Human
aagaggaaagaaug

SEQ ID NO: 2592190 - RNA, 21 nt, Human
aagaggaaaaugaauaauaca

SEQ ID NO: 2592191 - RNA, 14 nt, Human
aagaggaaaaugaa

SEQ ID NO: 2592192 - RNA, 13 nt, Human
aagaggaaaauga

SEQ ID NO: 2592193 - RNA, 19 nt, Human
guggcccgacagccuggca

SEQ ID NO: 2592194 - RNA, 18 nt, Human
guggcccgacagccuggc

SEQ ID NO: 2592195 - RNA, 21 nt, Human
aagacugaguacguugugcau

SEQ ID NO: 2592196 - RNA, 17 nt, Human
aagacuguacaaaguag

SEQ ID NO: 2592197 - RNA, 19 nt, Human
aagacugagcaccugcuuc

SEQ ID NO: 2592198 - RNA, 15 nt, Human
aagacugagcaccug

SEQ ID NO: 2592199 - RNA, 12 nt, Human
aagacuguggcu

SEQ ID NO: 2592200 - RNA, 15 nt, Human
aagacuguggcugcu

SEQ ID NO: 2592201 - RNA, 22 nt, Human
aagacucuaccagacuguguau

SEQ ID NO: 2592202 - RNA, 17 nt, Human
aagacugaguacguugu

SEQ ID NO: 2592203 - RNA, 18 nt, Human
aagacuaucuaaauguug

SEQ ID NO: 2592204 - RNA, 13 nt, Human
aagacuauucaaa

SEQ ID NO: 2592205 - RNA, 19 nt, Human
aagaccuguugguuccaag

SEQ ID NO: 2592206 - RNA, 21 nt, Human
aagaccuucuccaaaugagau

SEQ ID NO: 2592207 - RNA, 21 nt, Human
aagacccuuguggucccaccc

SEQ ID NO: 2592208 - RNA, 18 nt, Human
aagacccuugugguccca

SEQ ID NO: 2592209 - RNA, 22 nt, Human
aagacccuuguggucccacccc

SEQ ID NO: 2592210 - RNA, 16 nt, Human
aagacuaucuaaaugu

SEQ ID NO: 2592211 - RNA, 17 nt, Human
aagacuaucuaaauguu

SEQ ID NO: 2592212 - RNA, 21 nt, Human
aagaccuggcaaggacacaga

SEQ ID NO: 2592213 - RNA, 12 nt, Human
aagaccuggcaa

SEQ ID NO: 2592214 - RNA, 17 nt, Human
aagaccuggcagcucug

SEQ ID NO: 2592215 - RNA, 17 nt, Human
aagaccuguugguucca

SEQ ID NO: 2592216 - RNA, 16 nt, Human
aagaccucaccuagaa

SEQ ID NO: 2592217 - RNA, 17 nt, Human
aagaccucaccuagaaa

SEQ ID NO: 2592218 - RNA, 18 nt, Human
guggauuuaacagaaaug

SEQ ID NO: 2592219 - RNA, 19 nt, Human
guggauuuaacagaaaugu

SEQ ID NO: 2592220 - RNA, 19 nt, Human
guggcaccagcagccugga

SEQ ID NO: 2592221 - RNA, 16 nt, Human
guggcacucaacauga

SEQ ID NO: 2592222 - RNA, 19 nt, Human
guggcacgucaucuaguuu

SEQ ID NO: 2592223 - RNA, 20 nt, Human
guggcaccagcgaagggagu

SEQ ID NO: 2592224 - RNA, 13 nt, Human
guggauugagggu

SEQ ID NO: 2592225 - RNA, 19 nt, Human
guggauugcacguggccuc

SEQ ID NO: 2592226 - RNA, 18 nt, Human
guggcaccagcagccugg

SEQ ID NO: 2592227 - RNA, 12 nt, Human
guggcacugcca

SEQ ID NO: 2592228 - RNA, 16 nt, Human
guggcacugagccccc

SEQ ID NO: 2592229 - RNA, 15 nt, Human
guggcacugagcccc

SEQ ID NO: 2592230 - RNA, 14 nt, Human
guggcacugagccc

SEQ ID NO: 2592231 - RNA, 12 nt, Human
guggcagcccug

SEQ ID NO: 2592232 - RNA, 13 nt, Human
guggcagcccugu

SEQ ID NO: 2592233 - RNA, 16 nt, Human
aagaaugauuaugaau

SEQ ID NO: 2592234 - RNA, 19 nt, Human
aagaaugaacaaauugaac

SEQ ID NO: 2592235 - RNA, 22 nt, Human
aagaaugagccuacgcugaaga

SEQ ID NO: 2592236 - RNA, 21 nt, Human
aagaaugagaaggagucagaa

SEQ ID NO: 2592237 - RNA, 14 nt, Human
aagaaugaaagagu

SEQ ID NO: 2592238 - RNA, 15 nt, Human
aagaaucuuuagaga

SEQ ID NO: 2592239 - RNA, 19 nt, Human
aagaaucuaucugcuuaug

SEQ ID NO: 2592240 - RNA, 17 nt, Human
aagaaucuaucugcuua

SEQ ID NO: 2592241 - RNA, 16 nt, Human
aagaaucuaucugcuu

SEQ ID NO: 2592242 - RNA, 16 nt, Human
guggcagcucaccucu

SEQ ID NO: 2592243 - RNA, 14 nt, Human
guggcagcucaccu

SEQ ID NO: 2592244 - RNA, 20 nt, Human
guggcagcucaccucucccu

SEQ ID NO: 2592245 - RNA, 23 nt, Human
aagaaucagucuauccacagaga

SEQ ID NO: 2592246 - RNA, 14 nt, Human
guggcagcccugua

SEQ ID NO: 2592247 - RNA, 18 nt, Human
aagaaugauuaugaauua

SEQ ID NO: 2592248 - RNA, 14 nt, Human
aagaaugcugaaac

SEQ ID NO: 2592249 - RNA, 13 nt, Human
aagaaugcugaaa

SEQ ID NO: 2592250 - RNA, 12 nt, Human
aagaaugcugaa

SEQ ID NO: 2592251 - RNA, 9 nt, Human
aagaaugcu

SEQ ID NO: 2592252 - RNA, 16 nt, Human
aagaaugcugaaacca

SEQ ID NO: 2592253 - RNA, 15 nt, Human
aagaaugcugguuuu

SEQ ID NO: 2592254 - RNA, 18 nt, Human
aagaaugcugguuuuccu

SEQ ID NO: 2592255 - RNA, 19 nt, Human
aagaaugcugguuuuccua

SEQ ID NO: 2592256 - RNA, 20 nt, Human
aagaauggggaucacagaga

SEQ ID NO: 2592257 - RNA, 21 nt, Human
aagaaugggcaguuacaugca

SEQ ID NO: 2592258 - RNA, 20 nt, Human
aagaaugggcaguuacaugc

SEQ ID NO: 2592259 - RNA, 16 nt, Human
aagaauugaagcagga

SEQ ID NO: 2592260 - RNA, 17 nt, Human
aagaaugggcaguuaca

SEQ ID NO: 2592261 - RNA, 18 nt, Human
aagaaugggcaguuacau

SEQ ID NO: 2592262 - RNA, 22 nt, Human
aagaaugcugguuuuccuaaau

SEQ ID NO: 2592263 - RNA, 16 nt, Human
aagacaaauucuguuu

SEQ ID NO: 2592264 - RNA, 18 nt, Human
aagacaaauucuguuucu

SEQ ID NO: 2592265 - RNA, 13 nt, Human
aagacccuccccg

SEQ ID NO: 2592266 - RNA, 13 nt, Human
aagacccuucucg

SEQ ID NO: 2592267 - RNA, 17 nt, Human
aagacaaagguuuuccu

SEQ ID NO: 2592268 - RNA, 17 nt, Human
aagacaaaucaaagcag

SEQ ID NO: 2592269 - RNA, 14 nt, Human
aagacaaacugcau

SEQ ID NO: 2592270 - RNA, 15 nt, Human
aagaauuuagggaga

SEQ ID NO: 2592271 - RNA, 20 nt, Human
aagaauugucuuucugucuc

SEQ ID NO: 2592272 - RNA, 19 nt, Human
aagaauugaacccaggagg

SEQ ID NO: 2592273 - RNA, 20 nt, Human
aagaauugaacccaggaggu

SEQ ID NO: 2592274 - RNA, 15 nt, Human
gugcucaggagcccu

SEQ ID NO: 2592275 - RNA, 21 nt, Human
gugcuauuuuguuuguuuugu

SEQ ID NO: 2592276 - RNA, 18 nt, Human
gugcucaggacucagaag

SEQ ID NO: 2592277 - RNA, 22 nt, Human
gugcucaggacucagaagccuc

SEQ ID NO: 2592278 - RNA, 20 nt, Human
gugcugggacugagccaguc

SEQ ID NO: 2592279 - RNA, 19 nt, Human
gugcugggacugagccagu

SEQ ID NO: 2592280 - RNA, 18 nt, Human
gugcugggacugagccag

SEQ ID NO: 2592281 - RNA, 17 nt, Human
gugcugggacugagcca

SEQ ID NO: 2592282 - RNA, 18 nt, Human
gugcuggcugcccagacc

SEQ ID NO: 2592283 - RNA, 13 nt, Human
gugcugggacuga

SEQ ID NO: 2592284 - RNA, 15 nt, Human
gugcuggcugcccag

SEQ ID NO: 2592285 - RNA, 23 nt, Human
gugcuauuguagagccagagguc

SEQ ID NO: 2592286 - RNA, 12 nt, Human
gugcuauguucu

SEQ ID NO: 2592287 - RNA, 22 nt, Human
gugcuaucucccccagccccau

SEQ ID NO: 2592288 - RNA, 19 nt, Human
gugcuauggauggcuucua

SEQ ID NO: 2592289 - RNA, 13 nt, Human
gugcuaugaauuu

SEQ ID NO: 2592290 - RNA, 19 nt, Human
gugcuaucucccccagccc

SEQ ID NO: 2592291 - RNA, 22 nt, Human
gugcugggauuacaagcgugag

SEQ ID NO: 2592292 - RNA, 21 nt, Human
gugcugggauuacaagcguga

SEQ ID NO: 2592293 - RNA, 22 nt, Human
gugcugggagcuccacucugcu

SEQ ID NO: 2592294 - RNA, 16 nt, Human
gugcugggagcuccac

SEQ ID NO: 2592295 - RNA, 22 nt, Human
gugcugggacugagccaguccc

SEQ ID NO: 2592296 - RNA, 17 nt, Human
gugcugggaggagggag

SEQ ID NO: 2592297 - RNA, 15 nt, Human
gugcugggaggaggg

SEQ ID NO: 2592298 - RNA, 23 nt, Human
gugcugggagcuccacucugcuu

SEQ ID NO: 2592299 - RNA, 19 nt, Human
gugcugggaggagggagag

SEQ ID NO: 2592300 - RNA, 18 nt, Human
gugcugggaggagggaga

SEQ ID NO: 2592301 - RNA, 23 nt, Human
gugcugggaggagggagagggag

SEQ ID NO: 2592302 - RNA, 15 nt, Human
gugcugggagggaua

SEQ ID NO: 2592303 - RNA, 14 nt, Human
guggaagugugggu

SEQ ID NO: 2592304 - RNA, 15 nt, Human
guggaaguguggguc

SEQ ID NO: 2592305 - RNA, 19 nt, Human
guggaagugugggucugug

SEQ ID NO: 2592306 - RNA, 20 nt, Human
guggaagugugggucugugu

SEQ ID NO: 2592307 - RNA, 20 nt, Human
gugcugggauuacaggugug

SEQ ID NO: 2592308 - RNA, 20 nt, Human
gugcugggauuacaggcgug

SEQ ID NO: 2592309 - RNA, 22 nt, Human
guggacacagcucuucuccagg

SEQ ID NO: 2592310 - RNA, 18 nt, Human
guggacacagcucuucuc

SEQ ID NO: 2592311 - RNA, 23 nt, Human
guggacacagcucuucuccaggc

SEQ ID NO: 2592312 - RNA, 19 nt, Human
guggaauuauuuuaaaaga

SEQ ID NO: 2592313 - RNA, 13 nt, Human
guggacaguccug

SEQ ID NO: 2592314 - RNA, 23 nt, Human
guggaauaguauccuccagguuu

SEQ ID NO: 2592315 - RNA, 22 nt, Human
guggaauaguauccuccagguu

SEQ ID NO: 2592316 - RNA, 21 nt, Human
guggaauaguauccuccaggu

SEQ ID NO: 2592317 - RNA, 20 nt, Human
guggaauaguauccuccagg

SEQ ID NO: 2592318 - RNA, 19 nt, Human
guggaauaguauccuccag

SEQ ID NO: 2592319 - RNA, 18 nt, Human
guggaauaguauccucca

SEQ ID NO: 2592320 - RNA, 14 nt, Human
guggaauaaaauac

SEQ ID NO: 2592321 - RNA, 21 nt, Human
guggaagugugggucugugug

SEQ ID NO: 2592322 - RNA, 22 nt, Human
guggaagugugggucugugugu

SEQ ID NO: 2592323 - RNA, 16 nt, Human
guggaauuauuuuaaa

SEQ ID NO: 2592324 - RNA, 18 nt, Human
guggaauuauuuuaaaag

SEQ ID NO: 2592325 - RNA, 15 nt, Human
guggaauuauuuuaa

SEQ ID NO: 2592326 - RNA, 13 nt, Human
guggaauauaaag

SEQ ID NO: 2592327 - RNA, 18 nt, Human
guggaauauaaggaaagc

SEQ ID NO: 2592328 - RNA, 17 nt, Human
guggaccuuaggccuuc

SEQ ID NO: 2592329 - RNA, 18 nt, Human
guggaccuuaggccuucc

SEQ ID NO: 2592330 - RNA, 15 nt, Human
guggaccuuccugcc

SEQ ID NO: 2592331 - RNA, 21 nt, Human
guggaccuuaggccuuccucu

SEQ ID NO: 2592332 - RNA, 13 nt, Human
guggaccuuccug

SEQ ID NO: 2592333 - RNA, 16 nt, Human
guggacaguccuggga

SEQ ID NO: 2592334 - RNA, 14 nt, Human
guggacaguccugg

SEQ ID NO: 2592335 - RNA, 15 nt, Human
guggacaguccuggg

SEQ ID NO: 2592336 - RNA, 13 nt, Human
guggaccaggaca

SEQ ID NO: 2592337 - RNA, 14 nt, Human
guggaccaggacag

SEQ ID NO: 2592338 - RNA, 18 nt, Human
guggaccaggacaggacc

SEQ ID NO: 2592339 - RNA, 22 nt, Human
guggacccagggaugacauguc

SEQ ID NO: 2592340 - RNA, 14 nt, Human
guggaccuuccugc

SEQ ID NO: 2592341 - RNA, 13 nt, Human
guggauggcccca

SEQ ID NO: 2592342 - RNA, 21 nt, Human
guggauggaaggggcugacag

SEQ ID NO: 2592343 - RNA, 21 nt, Human
guggaugccugguggcagcug

SEQ ID NO: 2592344 - RNA, 22 nt, Human
guggauggccccagcacagcuu

SEQ ID NO: 2592345 - RNA, 19 nt, Human
guggauggccccagcacag

SEQ ID NO: 2592346 - RNA, 16 nt, Human
guggauggccccagca

SEQ ID NO: 2592347 - RNA, 15 nt, Human
guggauggccccagc

SEQ ID NO: 2592348 - RNA, 16 nt, Human
guggaugucuuccuug

SEQ ID NO: 2592349 - RNA, 15 nt, Human
guggaugucuuccuu

SEQ ID NO: 2592350 - RNA, 13 nt, Human
guggaugucuucc

SEQ ID NO: 2592351 - RNA, 19 nt, Human
guggaugucuuccuuggag

SEQ ID NO: 2592352 - RNA, 21 nt, Human
aagaaacugaggaauuuucuu

SEQ ID NO: 2592353 - RNA, 19 nt, Human
aagaaacugaggaauuuuc

SEQ ID NO: 2592354 - RNA, 20 nt, Human
aagaaacugaggaauuuucu

SEQ ID NO: 2592355 - RNA, 16 nt, Human
aagaaacugaggaauu

SEQ ID NO: 2592356 - RNA, 18 nt, Human
aagaaaaaggaugcacag

SEQ ID NO: 2592357 - RNA, 21 nt, Human
aagaaacgucuauguguacag

SEQ ID NO: 2592358 - RNA, 17 nt, Human
aagaaacuauacaucau

SEQ ID NO: 2592359 - RNA, 16 nt, Human
aagaaacucaccccca

SEQ ID NO: 2592360 - RNA, 15 nt, Human
aagaaaaaggaugca

SEQ ID NO: 2592361 - RNA, 17 nt, Human
aagaaaaaggaugcaca

SEQ ID NO: 2592362 - RNA, 15 nt, Human
aagaaaaagaagaac

SEQ ID NO: 2592363 - RNA, 11 nt, Human
aagaaaaaagu

SEQ ID NO: 2592364 - RNA, 18 nt, Human
aagaaaaaagagaaaaga

SEQ ID NO: 2592365 - RNA, 20 nt, Human
aagaaaaaagagaaaagaaa

SEQ ID NO: 2592366 - RNA, 13 nt, Human
aagaaagaaggaa

SEQ ID NO: 2592367 - RNA, 14 nt, Human
aagaaagaaggaag

SEQ ID NO: 2592368 - RNA, 20 nt, Human
aagaaagacuaucuaaaugu

SEQ ID NO: 2592369 - RNA, 22 nt, Human
aagaaagacuaucuaaauguug

SEQ ID NO: 2592370 - RNA, 15 nt, Human
aagaaauacuguaca

SEQ ID NO: 2592371 - RNA, 13 nt, Human
aagaaauacugua

SEQ ID NO: 2592372 - RNA, 17 nt, Human
aagaaagagaaggagcc

SEQ ID NO: 2592373 - RNA, 15 nt, Human
aagaaagaaggaagu

SEQ ID NO: 2592374 - RNA, 13 nt, Human
aagaaauauaccu

SEQ ID NO: 2592375 - RNA, 18 nt, Human
gugcuaguaauuggaaag

SEQ ID NO: 2592376 - RNA, 21 nt, Human
gugcuaucucccccagcccca

SEQ ID NO: 2592377 - RNA, 20 nt, Human
gugcuagggaaacuucccgu

SEQ ID NO: 2592378 - RNA, 17 nt, Human
gugcuaggaacacuccu

SEQ ID NO: 2592379 - RNA, 22 nt, Human
gugcuaggaacacuccuucaca

SEQ ID NO: 2592380 - RNA, 18 nt, Human
gugcuaggaacacuccuu

SEQ ID NO: 2592381 - RNA, 13 nt, Human
aagaauacagaaa

SEQ ID NO: 2592382 - RNA, 16 nt, Human
aagaagugaaaaucua

SEQ ID NO: 2592383 - RNA, 22 nt, Human
aagaagugaaaaucuacacucc

SEQ ID NO: 2592384 - RNA, 16 nt, Human
aagaauacaaacauau

SEQ ID NO: 2592385 - RNA, 18 nt, Human
aagaauacaaacauauuu

SEQ ID NO: 2592386 - RNA, 22 nt, Human
aagaauacaaacauauuuguua

SEQ ID NO: 2592387 - RNA, 14 nt, Human
aagaauacagaaag

SEQ ID NO: 2592388 - RNA, 16 nt, Human
aagaaggcaaaaaugu

SEQ ID NO: 2592389 - RNA, 23 nt, Human
aagaagcuguuguacauuuauga

SEQ ID NO: 2592390 - RNA, 22 nt, Human
aagaagcuguuguacauuuaug

SEQ ID NO: 2592391 - RNA, 21 nt, Human
aagaagcuguuguacauuuau

SEQ ID NO: 2592392 - RNA, 19 nt, Human
aagaagcuguuguacauuu

SEQ ID NO: 2592393 - RNA, 18 nt, Human
aagaagcuguuguacauu

SEQ ID NO: 2592394 - RNA, 17 nt, Human
aagaagcuguuguacau

SEQ ID NO: 2592395 - RNA, 16 nt, Human
aagaagcuguuguaca

SEQ ID NO: 2592396 - RNA, 18 nt, Human
aagaaaucacagaaucau

SEQ ID NO: 2592397 - RNA, 14 nt, Human
aagaaaucacagaa

SEQ ID NO: 2592398 - RNA, 13 nt, Human
aagaaaucccugu

SEQ ID NO: 2592399 - RNA, 14 nt, Human
aagaaaucccuguu

SEQ ID NO: 2592400 - RNA, 14 nt, Human
aagaaggcaaaaau

SEQ ID NO: 2592401 - RNA, 16 nt, Human
aagaaggaaaaugauc

SEQ ID NO: 2592402 - RNA, 11 nt, Human
aagaaggaagu

SEQ ID NO: 2592403 - RNA, 21 nt, Human
aagaagcuuuaauauuuaaau

SEQ ID NO: 2592404 - RNA, 16 nt, Human
aagaagcuuaggcagg

SEQ ID NO: 2592405 - RNA, 23 nt, Human
aagaaggaaaaugaucugagucc

SEQ ID NO: 2592406 - RNA, 17 nt, Human
aagaaggaaaaggcagg

SEQ ID NO: 2592407 - RNA, 17 nt, Human
gugccuccaccaccacu

SEQ ID NO: 2592408 - RNA, 15 nt, Human
gugccuccaccacca

SEQ ID NO: 2592409 - RNA, 14 nt, Human
gugccucauugcuu

SEQ ID NO: 2592410 - RNA, 22 nt, Human
gugccuccaccaccacuggcca

SEQ ID NO: 2592411 - RNA, 21 nt, Human
gugccuccaccaccacuggcc

SEQ ID NO: 2592412 - RNA, 20 nt, Human
gugccuccaccaccacuggc

SEQ ID NO: 2592413 - RNA, 13 nt, Human
gugccucugccug

SEQ ID NO: 2592414 - RNA, 12 nt, Human
gugccucuggga

SEQ ID NO: 2592415 - RNA, 13 nt, Human
gugccucugggac

SEQ ID NO: 2592416 - RNA, 23 nt, Human
gugccuuauggaacacucugaga

SEQ ID NO: 2592417 - RNA, 21 nt, Human
gugccuuauggaacacucuga

SEQ ID NO: 2592418 - RNA, 14 nt, Human
gugccuuauggaac

SEQ ID NO: 2592419 - RNA, 15 nt, Human
gugccucugccuguc

SEQ ID NO: 2592420 - RNA, 21 nt, Human
gugccuaggauugugccugua

SEQ ID NO: 2592421 - RNA, 22 nt, Human
gugccguuacucuccaaccugg

SEQ ID NO: 2592422 - RNA, 15 nt, Human
gugccguuacucucc

SEQ ID NO: 2592423 - RNA, 18 nt, Human
gugccguuacucuccaac

SEQ ID NO: 2592424 - RNA, 21 nt, Human
gugccguuacucuccaaccug

SEQ ID NO: 2592425 - RNA, 15 nt, Human
gugccucaagagaag

SEQ ID NO: 2592426 - RNA, 14 nt, Human
gugccgccugcccg

SEQ ID NO: 2592427 - RNA, 13 nt, Human
gugccgccugccc

SEQ ID NO: 2592428 - RNA, 23 nt, Human
gugccgccgccucgcccaccgca

SEQ ID NO: 2592429 - RNA, 22 nt, Human
gugccgccgccucgcccaccgc

SEQ ID NO: 2592430 - RNA, 20 nt, Human
gugccgccgccucgcccacc

SEQ ID NO: 2592431 - RNA, 18 nt, Human
gugccgccgccucgccca

SEQ ID NO: 2592432 - RNA, 17 nt, Human
gugccgccgccucgccc

SEQ ID NO: 2592433 - RNA, 23 nt, Human
gugccgccugcccgucucucucc

SEQ ID NO: 2592434 - RNA, 23 nt, Human
gugaaccaaagagacuggagcau

SEQ ID NO: 2592435 - RNA, 22 nt, Human
gugaaccaaagagacuggagca

SEQ ID NO: 2592436 - RNA, 21 nt, Human
gugaaccaccacacccagccc

SEQ ID NO: 2592437 - RNA, 12 nt, Human
aacuugggaacu

SEQ ID NO: 2592438 - RNA, 21 nt, Human
aacuuggggaguuaagaccug

SEQ ID NO: 2592439 - RNA, 22 nt, Human
aacuuggggaguuaagaccugg

SEQ ID NO: 2592440 - RNA, 13 nt, Human
aacuuggggaaca

SEQ ID NO: 2592441 - RNA, 17 nt, Human
aacuuggcgcugccccu

SEQ ID NO: 2592442 - RNA, 11 nt, Human
gugccuuaugg

SEQ ID NO: 2592443 - RNA, 23 nt, Human
aacuuggcucgaaucucugugcc

SEQ ID NO: 2592444 - RNA, 22 nt, Human
aacuuggcucgaaucucugugc

SEQ ID NO: 2592445 - RNA, 21 nt, Human
aacuuggcucgaaucucugug

SEQ ID NO: 2592446 - RNA, 16 nt, Human
aacuuguauuaugugu

SEQ ID NO: 2592447 - RNA, 23 nt, Human
aacuuggggaguuaagaccuggc

SEQ ID NO: 2592448 - RNA, 15 nt, Human
aacuuguauuaugug

SEQ ID NO: 2592449 - RNA, 18 nt, Human
aacuugucuuuggacccu

SEQ ID NO: 2592450 - RNA, 22 nt, Human
aacuugucuuuggacccugagg

SEQ ID NO: 2592451 - RNA, 19 nt, Human
aacuugucuaaauaaguuu

SEQ ID NO: 2592452 - RNA, 17 nt, Human
aagaaaaaaaagaaagc

SEQ ID NO: 2592453 - RNA, 20 nt, Human
aacuuuacccaaaaacuaaa

SEQ ID NO: 2592454 - RNA, 14 nt, Human
aagaaaaaaaaaga

SEQ ID NO: 2592455 - RNA, 15 nt, Human
aagaaaaaaaaagaa

SEQ ID NO: 2592456 - RNA, 18 nt, Human
aagaaaaaaaaagaaaaa

SEQ ID NO: 2592457 - RNA, 19 nt, Human
aagaaaaaaaaagaaaaaa

SEQ ID NO: 2592458 - RNA, 16 nt, Human
aagaaaaaaaaaauau

SEQ ID NO: 2592459 - RNA, 13 nt, Human
aacuuuaccuuuu

SEQ ID NO: 2592460 - RNA, 21 nt, Human
aacuuuaauucucuuucaaag

SEQ ID NO: 2592461 - RNA, 20 nt, Human
aacuuuaauucucuuucaaa

SEQ ID NO: 2592462 - RNA, 21 nt, Human
aacuuuaaguuucaggauaca

SEQ ID NO: 2592463 - RNA, 18 nt, Human
aacuuuaaguuucaggau

SEQ ID NO: 2592464 - RNA, 18 nt, Human
aacuuuaagcagcucuug

SEQ ID NO: 2592465 - RNA, 16 nt, Human
aacuuuaagcagcucu

SEQ ID NO: 2592466 - RNA, 13 nt, Human
aacuuuaagagga

SEQ ID NO: 2592467 - RNA, 15 nt, Human
aacuuuaagaggaca

SEQ ID NO: 2592468 - RNA, 19 nt, Human
aacuuggggaacaagggug

SEQ ID NO: 2592469 - RNA, 13 nt, Human
aacuuguuuucug

SEQ ID NO: 2592470 - RNA, 20 nt, Human
uacaguaggagcccagcucu

SEQ ID NO: 2592471 - RNA, 22 nt, Human
uacaguaggagcccagcucuga

SEQ ID NO: 2592472 - RNA, 21 nt, Human
uacaguaagcugcucuauugu

SEQ ID NO: 2592473 - RNA, 18 nt, Human
uacaguaagcugcucuau

SEQ ID NO: 2592474 - RNA, 14 nt, Human
uacaguaagcugcu

SEQ ID NO: 2592475 - RNA, 21 nt, Human
uacaguagauuuuccaaaugu

SEQ ID NO: 2592476 - RNA, 17 nt, Human
uacaguagauuuuccaa

SEQ ID NO: 2592477 - RNA, 13 nt, Human
uacaguaggagcc

SEQ ID NO: 2592478 - RNA, 14 nt, Human
uacaguaggagccc

SEQ ID NO: 2592479 - RNA, 15 nt, Human
uacaguaggagccca

SEQ ID NO: 2592480 - RNA, 18 nt, Human
uacaguaggagcccagcu

SEQ ID NO: 2592481 - RNA, 23 nt, Human
uacaguaacuuuauguguaaaua

SEQ ID NO: 2592482 - RNA, 20 nt, Human
uacaguaacuuuauguguaa

SEQ ID NO: 2592483 - RNA, 18 nt, Human
uacaguaacuuuaugugu

SEQ ID NO: 2592484 - RNA, 17 nt, Human
uacaguaacuuuaugug

SEQ ID NO: 2592485 - RNA, 16 nt, Human
uacaguaacuuuaugu

SEQ ID NO: 2592486 - RNA, 20 nt, Human
uacagggaaugccugagugc

SEQ ID NO: 2592487 - RNA, 16 nt, Human
uacagggaaugccuga

SEQ ID NO: 2592488 - RNA, 17 nt, Human
uacaggcuccugccacc

SEQ ID NO: 2592489 - RNA, 14 nt, Human
uacaggcuccugcc

SEQ ID NO: 2592490 - RNA, 15 nt, Human
uacaggcuccugcca

SEQ ID NO: 2592491 - RNA, 22 nt, Human
uacaggcgugagccaccgugcc

SEQ ID NO: 2592492 - RNA, 16 nt, Human
uacagagcuucccuga

SEQ ID NO: 2592493 - RNA, 14 nt, Human
uacagaggacagua

SEQ ID NO: 2592494 - RNA, 23 nt, Human
uacagagcccacgcccccacugg

SEQ ID NO: 2592495 - RNA, 15 nt, Human
uacagagcuucccug

SEQ ID NO: 2592496 - RNA, 18 nt, Human
uacagaggccaugggccu

SEQ ID NO: 2592497 - RNA, 18 nt, Human
uacagaggacaguauuug

SEQ ID NO: 2592498 - RNA, 15 nt, Human
uacaggcauagaguu

SEQ ID NO: 2592499 - RNA, 17 nt, Human
uacacuccagccugagc

SEQ ID NO: 2592500 - RNA, 18 nt, Human
uacacuccagccugagca

SEQ ID NO: 2592501 - RNA, 18 nt, Human
uacacucaggcuuucacu

SEQ ID NO: 2592502 - RNA, 16 nt, Human
uacacucaggcuuuca

SEQ ID NO: 2592503 - RNA, 13 nt, Human
uacacuaucuuaa

SEQ ID NO: 2592504 - RNA, 15 nt, Human
uacacuccagccuga

SEQ ID NO: 2592505 - RNA, 16 nt, Human
uacacuccagccugag

SEQ ID NO: 2592506 - RNA, 19 nt, Human
uacacuaagagagaaugag

SEQ ID NO: 2592507 - RNA, 24 nt, Human
uacaccauguuugagcucagaccc

SEQ ID NO: 2592508 - RNA, 19 nt, Human
uacaccauuaucuuggaaa

SEQ ID NO: 2592509 - RNA, 14 nt, Human
uacacuaguuguuu

SEQ ID NO: 2592510 - RNA, 20 nt, Human
uacacuaaggguguaaguaa

SEQ ID NO: 2592511 - RNA, 15 nt, Human
uacaccacuacauuc

SEQ ID NO: 2592512 - RNA, 16 nt, Human
uacaccacuacauucu

SEQ ID NO: 2592513 - RNA, 17 nt, Human
uacaccacuacauucug

SEQ ID NO: 2592514 - RNA, 18 nt, Human
uacaccacuacauucugu

SEQ ID NO: 2592515 - RNA, 19 nt, Human
uacaccacuacauucuguu

SEQ ID NO: 2592516 - RNA, 20 nt, Human
uacaccacuacauucuguua

SEQ ID NO: 2592517 - RNA, 20 nt, Human
uacaccagcauuccuuuuga

SEQ ID NO: 2592518 - RNA, 18 nt, Human
uacaccagcauuccuuuu

SEQ ID NO: 2592519 - RNA, 19 nt, Human
uacaccauguuugagcuca

SEQ ID NO: 2592520 - RNA, 17 nt, Human
uacaccagcauuccuuu

SEQ ID NO: 2592521 - RNA, 20 nt, Human
uacaccagagauaauaugag

SEQ ID NO: 2592522 - RNA, 19 nt, Human
uacaccaccucacuccugu

SEQ ID NO: 2592523 - RNA, 19 nt, Human
uacaccagagauaauauga

SEQ ID NO: 2592524 - RNA, 19 nt, Human
aauggacuuuuguacauag

SEQ ID NO: 2592525 - RNA, 18 nt, Human
uacaccaccucacuccug

SEQ ID NO: 2592526 - RNA, 19 nt, Human
uacacauuuuucagauaua

SEQ ID NO: 2592527 - RNA, 21 nt, Human
uacacauuuuucagauauaaa

SEQ ID NO: 2592528 - RNA, 20 nt, Human
aauggagauuugaaggucug

SEQ ID NO: 2592529 - RNA, 20 nt, Human
aauggagauucaguuuucau

SEQ ID NO: 2592530 - RNA, 15 nt, Human
aauggaggaauauga

SEQ ID NO: 2592531 - RNA, 17 nt, Human
uacacauuuuucagaua

SEQ ID NO: 2592532 - RNA, 15 nt, Human
uacacauuuuucaga

SEQ ID NO: 2592533 - RNA, 15 nt, Human
aauguacugagauuu

SEQ ID NO: 2592534 - RNA, 17 nt, Human
aauguaugcuucauaca

SEQ ID NO: 2592535 - RNA, 18 nt, Human
aauguaugcuucauacag

SEQ ID NO: 2592536 - RNA, 18 nt, Human
aauguaugugcacuguca

SEQ ID NO: 2592537 - RNA, 13 nt, Human
aauguaugugcac

SEQ ID NO: 2592538 - RNA, 21 nt, Human
aauguaugcuucauacaggga

SEQ ID NO: 2592539 - RNA, 14 nt, Human
aauguacugcauau

SEQ ID NO: 2592540 - RNA, 18 nt, Human
aauguacugcauaugaaa

SEQ ID NO: 2592541 - RNA, 18 nt, Human
aauguauugaacuuggaa

SEQ ID NO: 2592542 - RNA, 14 nt, Human
aauguauuguaccu

SEQ ID NO: 2592543 - RNA, 13 nt, Human
aauguauuguacc

SEQ ID NO: 2592544 - RNA, 19 nt, Human
aauguauugaacuuggaaa

SEQ ID NO: 2592545 - RNA, 22 nt, Human
aauguauuauucugcagcauga

SEQ ID NO: 2592546 - RNA, 21 nt, Human
aauguaugugcacugucacuu

SEQ ID NO: 2592547 - RNA, 20 nt, Human
aauguaugugcacugucacu

SEQ ID NO: 2592548 - RNA, 18 nt, Human
aauguauuauucugcagc

SEQ ID NO: 2592549 - RNA, 17 nt, Human
aauguauuauucugcag

SEQ ID NO: 2592550 - RNA, 12 nt, Human
aauguaugugua

SEQ ID NO: 2592551 - RNA, 14 nt, Human
aauguauguguaag

SEQ ID NO: 2592552 - RNA, 16 nt, Human
aaugugauauuauaca

SEQ ID NO: 2592553 - RNA, 12 nt, Human
aaugugaugaau

SEQ ID NO: 2592554 - RNA, 20 nt, Human
aaugugaugaauacuguauu

SEQ ID NO: 2592555 - RNA, 11 nt, Human
aaugugauaug

SEQ ID NO: 2592556 - RNA, 16 nt, Human
aaugugaugaauacug

SEQ ID NO: 2592557 - RNA, 14 nt, Human
aauguggcuccugg

SEQ ID NO: 2592558 - RNA, 12 nt, Human
aauguggcuuga

SEQ ID NO: 2592559 - RNA, 16 nt, Human
aauguggcuugagaaa

SEQ ID NO: 2592560 - RNA, 21 nt, Human
aauguggcuugagaaauaugg

SEQ ID NO: 2592561 - RNA, 18 nt, Human
aaugugggagcagcgguu

SEQ ID NO: 2592562 - RNA, 21 nt, Human
aauguauuuauuuaaaagauu

SEQ ID NO: 2592563 - RNA, 23 nt, Human
aauguauuguaccuuuuaacacc

SEQ ID NO: 2592564 - RNA, 22 nt, Human
aauguauuguaccuuuuaacac

SEQ ID NO: 2592565 - RNA, 16 nt, Human
aauguauuguaccuuu

SEQ ID NO: 2592566 - RNA, 15 nt, Human
aauguauuguaccuu

SEQ ID NO: 2592567 - RNA, 16 nt, Human
aauguauuuuauugua

SEQ ID NO: 2592568 - RNA, 15 nt, Human
aauguauuuuauugu

SEQ ID NO: 2592569 - RNA, 19 nt, Human
aauguauuguugguaauua

SEQ ID NO: 2592570 - RNA, 21 nt, Human
aauguauuuuauuguaacaga

SEQ ID NO: 2592571 - RNA, 17 nt, Human
aauguauuuuauuguaa

SEQ ID NO: 2592572 - RNA, 23 nt, Human
aauguauuuuauuguaacagaca

SEQ ID NO: 2592573 - RNA, 17 nt, Human
uacauagaugcuuaguc

SEQ ID NO: 2592574 - RNA, 14 nt, Human
uacauagaugcuua

SEQ ID NO: 2592575 - RNA, 21 nt, Human
uacauagccuauauuuacagu

SEQ ID NO: 2592576 - RNA, 20 nt, Human
uacauagccuauauuuacag

SEQ ID NO: 2592577 - RNA, 15 nt, Human
uacauagccuauauu

SEQ ID NO: 2592578 - RNA, 13 nt, Human
uacauagccuaua

SEQ ID NO: 2592579 - RNA, 23 nt, Human
uacauagcaugacauuucuuugu

SEQ ID NO: 2592580 - RNA, 19 nt, Human
uacauaaugcgugcauacc

SEQ ID NO: 2592581 - RNA, 20 nt, Human
uacauaaugcgugcauacca

SEQ ID NO: 2592582 - RNA, 17 nt, Human
uacauaaugcgugcaua

SEQ ID NO: 2592583 - RNA, 15 nt, Human
uacaguaucucaggg

SEQ ID NO: 2592584 - RNA, 15 nt, Human
uacaguacaggcagc

SEQ ID NO: 2592585 - RNA, 21 nt, Human
uacauaugugcuggaauucua

SEQ ID NO: 2592586 - RNA, 18 nt, Human
uacauauuaggaaaauau

SEQ ID NO: 2592587 - RNA, 19 nt, Human
uacauauuaggaaaauaug

SEQ ID NO: 2592588 - RNA, 14 nt, Human
uacauauucuuuaa

SEQ ID NO: 2592589 - RNA, 19 nt, Human
uacauauaagugauugcug

SEQ ID NO: 2592590 - RNA, 23 nt, Human
uacauauuaggaaaauauggguu

SEQ ID NO: 2592591 - RNA, 15 nt, Human
uacauauucuuuaaa

SEQ ID NO: 2592592 - RNA, 17 nt, Human
uacauauuugagacuag

SEQ ID NO: 2592593 - RNA, 13 nt, Human
uacauauuuccaa

SEQ ID NO: 2592594 - RNA, 19 nt, Human
uacauauuugcauauguau

SEQ ID NO: 2592595 - RNA, 12 nt, Human
aauguacugcau

SEQ ID NO: 2592596 - RNA, 17 nt, Human
uacauauuuguggaaua

SEQ ID NO: 2592597 - RNA, 16 nt, Human
uacauauuuguggaau

SEQ ID NO: 2592598 - RNA, 21 nt, Human
uacauauuugcauauguauga

SEQ ID NO: 2592599 - RNA, 12 nt, Human
aauguacugaga

SEQ ID NO: 2592600 - RNA, 14 nt, Human
aauguacccaguau

SEQ ID NO: 2592601 - RNA, 19 nt, Human
uacaaaaccugauguuaaa

SEQ ID NO: 2592602 - RNA, 20 nt, Human
uacaaaaauauaaaauauga

SEQ ID NO: 2592603 - RNA, 20 nt, Human
uacaaaaaaaaaguuuuauu

SEQ ID NO: 2592604 - RNA, 15 nt, Human
uacaaaagcauguga

SEQ ID NO: 2592605 - RNA, 12 nt, Human
uacaaaacuucc

SEQ ID NO: 2592606 - RNA, 19 nt, Human
uacaaaauaaacaaauaac

SEQ ID NO: 2592607 - RNA, 18 nt, Human
uacaaaaauauaaaauau

SEQ ID NO: 2592608 - RNA, 17 nt, Human
uacaaaaauauaaaaua

SEQ ID NO: 2592609 - RNA, 14 nt, Human
uacaaaaauauaaa

SEQ ID NO: 2592610 - RNA, 20 nt, Human
uacaaaaagcauaaaaauua

SEQ ID NO: 2592611 - RNA, 15 nt, Human
uacaaaaacacagca

SEQ ID NO: 2592612 - RNA, 16 nt, Human
uacaaaaacacagcaa

SEQ ID NO: 2592613 - RNA, 15 nt, Human
uacaaaaagcauaaa

SEQ ID NO: 2592614 - RNA, 19 nt, Human
uaauuucaaaaauauaacu

SEQ ID NO: 2592615 - RNA, 18 nt, Human
uaauuucaaaaauauaac

SEQ ID NO: 2592616 - RNA, 17 nt, Human
uaauuucaaaaauauaa

SEQ ID NO: 2592617 - RNA, 18 nt, Human
uaauuuauuuuugcaugg

SEQ ID NO: 2592618 - RNA, 21 nt, Human
uaauuucaaaaauauaacuua

SEQ ID NO: 2592619 - RNA, 20 nt, Human
uaauuucaaaaauauaacuu

SEQ ID NO: 2592620 - RNA, 12 nt, Human
uaauuucaaaau

SEQ ID NO: 2592621 - RNA, 12 nt, Human
uaauuuauuuau

SEQ ID NO: 2592622 - RNA, 14 nt, Human
uaauuuauuuauua

SEQ ID NO: 2592623 - RNA, 17 nt, Human
uaauuuauuuauuaaga

SEQ ID NO: 2592624 - RNA, 19 nt, Human
uaauuuauuuauuaagaug

SEQ ID NO: 2592625 - RNA, 14 nt, Human
uaauuuauuuuguc

SEQ ID NO: 2592626 - RNA, 18 nt, Human
uaauuuauuuauuaagau

SEQ ID NO: 2592627 - RNA, 14 nt, Human
uaauuuauuauuga

SEQ ID NO: 2592628 - RNA, 17 nt, Human
uaauuuauuauugaaau

SEQ ID NO: 2592629 - RNA, 20 nt, Human
uaauuuauuaauugcuuuga

SEQ ID NO: 2592630 - RNA, 20 nt, Human
uaauuuauuauugaaauugu

SEQ ID NO: 2592631 - RNA, 18 nt, Human
uaauuuauuauugaaauu

SEQ ID NO: 2592632 - RNA, 20 nt, Human
uaauuuauuguuuuuccuug

SEQ ID NO: 2592633 - RNA, 20 nt, Human
uaauuuaugaguuuuugaua

SEQ ID NO: 2592634 - RNA, 18 nt, Human
uaauuuauuaauugcuuu

SEQ ID NO: 2592635 - RNA, 19 nt, Human
uaauuuauuaauugcuuug

SEQ ID NO: 2592636 - RNA, 17 nt, Human
uaauuuauuaauugcuu

SEQ ID NO: 2592637 - RNA, 13 nt, Human
uacaaaaacacag

SEQ ID NO: 2592638 - RNA, 14 nt, Human
uacaaaaacacagc

SEQ ID NO: 2592639 - RNA, 15 nt, Human
uaauuucaaaaugcu

SEQ ID NO: 2592640 - RNA, 16 nt, Human
uaauuucaaaaugcuu

SEQ ID NO: 2592641 - RNA, 20 nt, Human
uaauuucaaaaugcuuuuua

SEQ ID NO: 2592642 - RNA, 19 nt, Human
uacaaaaaaaaaguuuuau

SEQ ID NO: 2592643 - RNA, 14 nt, Human
aaugaggacauguu

SEQ ID NO: 2592644 - RNA, 13 nt, Human
aaugaggaaugua

SEQ ID NO: 2592645 - RNA, 16 nt, Human
aaugaggacauguuuu

SEQ ID NO: 2592646 - RNA, 16 nt, Human
aaugagcuauguauua

SEQ ID NO: 2592647 - RNA, 23 nt, Human
aaugagagaauaagucauguucc

SEQ ID NO: 2592648 - RNA, 18 nt, Human
aaugagagaauaagucau

SEQ ID NO: 2592649 - RNA, 22 nt, Human
aaugagcucgcauuugucaaug

SEQ ID NO: 2592650 - RNA, 12 nt, Human
uaauucaaagca

SEQ ID NO: 2592651 - RNA, 19 nt, Human
uaauucaaagcaccaaaau

SEQ ID NO: 2592652 - RNA, 22 nt, Human
uaauucaaagcucuauuaagau

SEQ ID NO: 2592653 - RNA, 21 nt, Human
uaauuauuuugguacuuuuau

SEQ ID NO: 2592654 - RNA, 21 nt, Human
uaauucaaagcaccaaaauaa

SEQ ID NO: 2592655 - RNA, 20 nt, Human
uaauuauuuugguacuuuua

SEQ ID NO: 2592656 - RNA, 16 nt, Human
uaauuauuuugguacu

SEQ ID NO: 2592657 - RNA, 13 nt, Human
uaauuauuuuggu

SEQ ID NO: 2592658 - RNA, 13 nt, Human
uaauucaagaaaa

SEQ ID NO: 2592659 - RNA, 18 nt, Human
uaauuccaauaugaugac

SEQ ID NO: 2592660 - RNA, 16 nt, Human
uaauuccaauaugaug

SEQ ID NO: 2592661 - RNA, 15 nt, Human
uaauuccaauaugau

SEQ ID NO: 2592662 - RNA, 15 nt, Human
uaauucauguuucuu

SEQ ID NO: 2592663 - RNA, 20 nt, Human
uaauuccaauaugaugacuc

SEQ ID NO: 2592664 - RNA, 19 nt, Human
uaauuccaauaugaugacu

SEQ ID NO: 2592665 - RNA, 15 nt, Human
uaauuccacaccuuu

SEQ ID NO: 2592666 - RNA, 13 nt, Human
uaauuccacagcu

SEQ ID NO: 2592667 - RNA, 14 nt, Human
uaauuccacagcug

SEQ ID NO: 2592668 - RNA, 17 nt, Human
uaauuccacagcugcuc

SEQ ID NO: 2592669 - RNA, 22 nt, Human
uaauuguuguuucuuucuagug

SEQ ID NO: 2592670 - RNA, 19 nt, Human
uaauuguuguuucuuucua

SEQ ID NO: 2592671 - RNA, 15 nt, Human
uaauuguuguuugua

SEQ ID NO: 2592672 - RNA, 18 nt, Human
uaauuguuguuuguaugu

SEQ ID NO: 2592673 - RNA, 19 nt, Human
uaauuguuguuuguaugua

SEQ ID NO: 2592674 - RNA, 16 nt, Human
uaauuguuguuucuuu

SEQ ID NO: 2592675 - RNA, 16 nt, Human
uaauucccauuuugca

SEQ ID NO: 2592676 - RNA, 15 nt, Human
uaauuguuguuucuu

SEQ ID NO: 2592677 - RNA, 17 nt, Human
uaauuccacaccuuuua

SEQ ID NO: 2592678 - RNA, 11 nt, Human
uaauuccauga

SEQ ID NO: 2592679 - RNA, 10 nt, Human
uaauuccaug

SEQ ID NO: 2592680 - RNA, 18 nt, Human
uaauuguuuugcacuuuu

SEQ ID NO: 2592681 - RNA, 16 nt, Human
uaauuguuuugcacuu

SEQ ID NO: 2592682 - RNA, 17 nt, Human
uaauuguuugucuuuaa

SEQ ID NO: 2592683 - RNA, 22 nt, Human
uaauuguuguuuguauguauaa

SEQ ID NO: 2592684 - RNA, 23 nt, Human
uaauuguuguuuguauguauaau

SEQ ID NO: 2592685 - RNA, 15 nt, Human
uaauuuaaaauugug

SEQ ID NO: 2592686 - RNA, 16 nt, Human
uaauuuaaaauuguga

SEQ ID NO: 2592687 - RNA, 23 nt, Human
uaauuuaucuugucucugggcuu

SEQ ID NO: 2592688 - RNA, 14 nt, Human
uaauuuaugaguuu

SEQ ID NO: 2592689 - RNA, 15 nt, Human
uaauuuaaaaaauaa

SEQ ID NO: 2592690 - RNA, 24 nt, Human
aaugcccagccccuucugacccau

SEQ ID NO: 2592691 - RNA, 23 nt, Human
aaugcccagccccuucugaccca

SEQ ID NO: 2592692 - RNA, 22 nt, Human
aaugcccagccccuucugaccc

SEQ ID NO: 2592693 - RNA, 20 nt, Human
aaugcccagccccuucugac

SEQ ID NO: 2592694 - RNA, 20 nt, Human
aaugcugugcccuaaagugu

SEQ ID NO: 2592695 - RNA, 21 nt, Human
aaugcugugcccuaaagugua

SEQ ID NO: 2592696 - RNA, 18 nt, Human
aaugcccccagcuggccc

SEQ ID NO: 2592697 - RNA, 17 nt, Human
aaugcugucaacuauga

SEQ ID NO: 2592698 - RNA, 17 nt, Human
aaugcccccagcuggcc

SEQ ID NO: 2592699 - RNA, 15 nt, Human
aaugcccccagcugg

SEQ ID NO: 2592700 - RNA, 13 nt, Human
aaugcugugcccu

SEQ ID NO: 2592701 - RNA, 18 nt, Human
aauggaagguuuguauau

SEQ ID NO: 2592702 - RNA, 20 nt, Human
aauggaagguuuguauauug

SEQ ID NO: 2592703 - RNA, 13 nt, Human
aauggaaacugaa

SEQ ID NO: 2592704 - RNA, 19 nt, Human
aauggaaaacagacucagg

SEQ ID NO: 2592705 - RNA, 16 nt, Human
aauggacguguuauga

SEQ ID NO: 2592706 - RNA, 19 nt, Human
aauggacauaggacucaaa

SEQ ID NO: 2592707 - RNA, 14 nt, Human
aauggaauacugaa

SEQ ID NO: 2592708 - RNA, 12 nt, Human
aauggaaacuga

SEQ ID NO: 2592709 - RNA, 12 nt, Human
aaugcuguguua

SEQ ID NO: 2592710 - RNA, 12 nt, Human
aaugcuuucgau

SEQ ID NO: 2592711 - RNA, 15 nt, Human
aaugcuuuccaaaac

SEQ ID NO: 2592712 - RNA, 17 nt, Human
aaugcuuuuugaauguu

SEQ ID NO: 2592713 - RNA, 14 nt, Human
aaugcuuuuugaau

SEQ ID NO: 2592714 - RNA, 11 nt, Human
aaugcuuuuug

SEQ ID NO: 2592715 - RNA, 19 nt, Human
aaugcuuuuuauuucugca

SEQ ID NO: 2592716 - RNA, 20 nt, Human
aaugcuuuuuauuucugcau

SEQ ID NO: 2592717 - RNA, 13 nt, Human
aaugcuuuuaaaa

SEQ ID NO: 2592718 - RNA, 19 nt, Human
aaugcuuugugugauugaa

SEQ ID NO: 2592719 - RNA, 21 nt, Human
aaugcauuuuguuugguauug

SEQ ID NO: 2592720 - RNA, 20 nt, Human
aaugcauuuuguuugguauu

SEQ ID NO: 2592721 - RNA, 18 nt, Human
aaugcauuuuguuuggua

SEQ ID NO: 2592722 - RNA, 12 nt, Human
aaugcauuuugu

SEQ ID NO: 2592723 - RNA, 12 nt, Human
aaugcauuguau

SEQ ID NO: 2592724 - RNA, 18 nt, Human
aaugcauuguaucgaugu

SEQ ID NO: 2592725 - RNA, 21 nt, Human
aaugcauuguaucgauguuau

SEQ ID NO: 2592726 - RNA, 14 nt, Human
aaugcauaaaugca

SEQ ID NO: 2592727 - RNA, 16 nt, Human
aaugcauaaaauguua

SEQ ID NO: 2592728 - RNA, 22 nt, Human
aaugcauuauaggaucauuugu

SEQ ID NO: 2592729 - RNA, 23 nt, Human
aaugcauuauaggaucauuuguu

SEQ ID NO: 2592730 - RNA, 17 nt, Human
aaugcauuauuuugaau

SEQ ID NO: 2592731 - RNA, 18 nt, Human
aaugcauauccugagcca

SEQ ID NO: 2592732 - RNA, 15 nt, Human
aaugcccagccccuu

SEQ ID NO: 2592733 - RNA, 14 nt, Human
aaugcccagccccu

SEQ ID NO: 2592734 - RNA, 23 nt, Human
aaugcauuuuguuugguauugua

SEQ ID NO: 2592735 - RNA, 22 nt, Human
aaugcauuguaucgauguuaug

SEQ ID NO: 2592736 - RNA, 23 nt, Human
aaugccaacuuguccuuuuguac

SEQ ID NO: 2592737 - RNA, 13 nt, Human
aaugcccagcccc

SEQ ID NO: 2592738 - RNA, 14 nt, Human
uacaaggacagccc

SEQ ID NO: 2592739 - RNA, 14 nt, Human
uacaaggcaacaua

SEQ ID NO: 2592740 - RNA, 17 nt, Human
uacaaggaagguggugg

SEQ ID NO: 2592741 - RNA, 18 nt, Human
uacaagggucuagggaga

SEQ ID NO: 2592742 - RNA, 20 nt, Human
uacaaaauaaacaaauaaca

SEQ ID NO: 2592743 - RNA, 16 nt, Human
uacaaacaaaauuucu

SEQ ID NO: 2592744 - RNA, 19 nt, Human
uacaaaauuugaaauuuag

SEQ ID NO: 2592745 - RNA, 20 nt, Human
uacaaguagggguugugggu

SEQ ID NO: 2592746 - RNA, 13 nt, Human
aaugcauaaaaug

SEQ ID NO: 2592747 - RNA, 17 nt, Human
aaugcagugaauuguga

SEQ ID NO: 2592748 - RNA, 22 nt, Human
uaaucauauaauaaauguacau

SEQ ID NO: 2592749 - RNA, 20 nt, Human
uaaucauauaauaaauguac

SEQ ID NO: 2592750 - RNA, 15 nt, Human
uaaucauauaauaaa

SEQ ID NO: 2592751 - RNA, 16 nt, Human
uaaucaugaaauuacu

SEQ ID NO: 2592752 - RNA, 13 nt, Human
uaaucaugaaauu

SEQ ID NO: 2592753 - RNA, 20 nt, Human
uaaugaaacaccuucucugg

SEQ ID NO: 2592754 - RNA, 14 nt, Human
uaaugaaacuugga

SEQ ID NO: 2592755 - RNA, 17 nt, Human
uaaucaucuauaaagaa

SEQ ID NO: 2592756 - RNA, 16 nt, Human
uaaucaucuauaaaga

SEQ ID NO: 2592757 - RNA, 17 nt, Human
uaaucauccaaugcuca

SEQ ID NO: 2592758 - RNA, 14 nt, Human
uaaugaaagacugu

SEQ ID NO: 2592759 - RNA, 17 nt, Human
uaaugaaagacuguaca

SEQ ID NO: 2592760 - RNA, 18 nt, Human
uaaugaaagacuguacaa

SEQ ID NO: 2592761 - RNA, 19 nt, Human
uaaugaaagacuguacaaa

SEQ ID NO: 2592762 - RNA, 21 nt, Human
uaaugacuuaagcacacuuga

SEQ ID NO: 2592763 - RNA, 15 nt, Human
uaaugacuuaagcac

SEQ ID NO: 2592764 - RNA, 20 nt, Human
uaaugacaucaccacaguuu

SEQ ID NO: 2592765 - RNA, 15 nt, Human
uaaugacagagccag

SEQ ID NO: 2592766 - RNA, 22 nt, Human
uaaugaaagacuguacaaagua

SEQ ID NO: 2592767 - RNA, 23 nt, Human
uaaugaaagacuguacaaaguag

SEQ ID NO: 2592768 - RNA, 15 nt, Human
uaaugaauggacuca

SEQ ID NO: 2592769 - RNA, 15 nt, Human
uaaugacacuugucc

SEQ ID NO: 2592770 - RNA, 21 nt, Human
uaaugaauuuuuaugauauuc

SEQ ID NO: 2592771 - RNA, 15 nt, Human
uaaugaaacuuggau

SEQ ID NO: 2592772 - RNA, 16 nt, Human
uaaugaauuuuuauga

SEQ ID NO: 2592773 - RNA, 20 nt, Human
uaaucaauuuaaacccauuu

SEQ ID NO: 2592774 - RNA, 13 nt, Human
uaaucaauuuaaa

SEQ ID NO: 2592775 - RNA, 23 nt, Human
uaaucaauuaauuuuuuuauugu

SEQ ID NO: 2592776 - RNA, 22 nt, Human
uaaucaauuaauuuuuuuauug

SEQ ID NO: 2592777 - RNA, 18 nt, Human
uaaucaauguuucuucua

SEQ ID NO: 2592778 - RNA, 23 nt, Human
uaaucagugugucuaaauuugaa

SEQ ID NO: 2592779 - RNA, 15 nt, Human
uaaucacgcuuuccu

SEQ ID NO: 2592780 - RNA, 17 nt, Human
uaaucaaucaucugugu

SEQ ID NO: 2592781 - RNA, 22 nt, Human
uaaucaauaaacgauuuaauuc

SEQ ID NO: 2592782 - RNA, 16 nt, Human
uaaucaauaaacgauu

SEQ ID NO: 2592783 - RNA, 14 nt, Human
uaaucaaguugaau

SEQ ID NO: 2592784 - RNA, 14 nt, Human
uaaucaagccucug

SEQ ID NO: 2592785 - RNA, 21 nt, Human
uaaucaacugggcugaacacu

SEQ ID NO: 2592786 - RNA, 15 nt, Human
uaauaguguuaauca

SEQ ID NO: 2592787 - RNA, 13 nt, Human
uaauaguguuaau

SEQ ID NO: 2592788 - RNA, 21 nt, Human
uaauagugcuuaaaaaucauu

SEQ ID NO: 2592789 - RNA, 20 nt, Human
uaauaguguuaaucaauuua

SEQ ID NO: 2592790 - RNA, 17 nt, Human
uaauaguguuaaucaau

SEQ ID NO: 2592791 - RNA, 21 nt, Human
uaauaguguuaaucaauuuaa

SEQ ID NO: 2592792 - RNA, 21 nt, Human
uaauagcuuuuauuguauaaa

SEQ ID NO: 2592793 - RNA, 18 nt, Human
uaauagcuuuuauuguau

SEQ ID NO: 2592794 - RNA, 20 nt, Human
aaucuucugaacuuggcgcu

SEQ ID NO: 2592795 - RNA, 13 nt, Human
aaucuucugaacu

SEQ ID NO: 2592796 - RNA, 20 nt, Human
aaucuuauuagggagaaaau

SEQ ID NO: 2592797 - RNA, 20 nt, Human
aaucuucaguuuuaucuuua

SEQ ID NO: 2592798 - RNA, 22 nt, Human
aaucuucaguuuuaucuuuaau

SEQ ID NO: 2592799 - RNA, 12 nt, Human
uaauacuguauu

SEQ ID NO: 2592800 - RNA, 14 nt, Human
uaauacuaccuuga

SEQ ID NO: 2592801 - RNA, 15 nt, Human
uaauacuaccuugaa

SEQ ID NO: 2592802 - RNA, 22 nt, Human
uaauacuaguugugaccuuagu

SEQ ID NO: 2592803 - RNA, 18 nt, Human
uaauacuaguugugaccu

SEQ ID NO: 2592804 - RNA, 15 nt, Human
uaauacuaguuguga

SEQ ID NO: 2592805 - RNA, 23 nt, Human
uaauacuaguugugaccuuagug

SEQ ID NO: 2592806 - RNA, 12 nt, Human
uaauacuauauu

SEQ ID NO: 2592807 - RNA, 22 nt, Human
aaucuuucuuuaccugagacca

SEQ ID NO: 2592808 - RNA, 21 nt, Human
aaucuuucuuuaccugagacc

SEQ ID NO: 2592809 - RNA, 19 nt, Human
aaucuuucuuuaccugaga

SEQ ID NO: 2592810 - RNA, 17 nt, Human
aaucuuucuuuaccuga

SEQ ID NO: 2592811 - RNA, 15 nt, Human
aaucuuucuuuaccu

SEQ ID NO: 2592812 - RNA, 13 nt, Human
aaucuuucugcag

SEQ ID NO: 2592813 - RNA, 20 nt, Human
aaucuugucucaaugcucau

SEQ ID NO: 2592814 - RNA, 18 nt, Human
aaucuugucucaaugcuc

SEQ ID NO: 2592815 - RNA, 21 nt, Human
aaucuugucucaaugcucaua

SEQ ID NO: 2592816 - RNA, 22 nt, Human
aaucuuucuuucuuagaaauuu

SEQ ID NO: 2592817 - RNA, 21 nt, Human
aaucuuucuuucuuagaaauu

SEQ ID NO: 2592818 - RNA, 20 nt, Human
aaucuuucuuucuuagaaau

SEQ ID NO: 2592819 - RNA, 19 nt, Human
aaucuuucuuucuuagaaa

SEQ ID NO: 2592820 - RNA, 18 nt, Human
aaucuuucuuucuuagaa

SEQ ID NO: 2592821 - RNA, 17 nt, Human
aaucuuucuuucuuaga

SEQ ID NO: 2592822 - RNA, 16 nt, Human
aaucuuucuuucuuag

SEQ ID NO: 2592823 - RNA, 14 nt, Human
aaucuuucuuucuu

SEQ ID NO: 2592824 - RNA, 22 nt, Human
aaucuuucuuuugauucuuccu

SEQ ID NO: 2592825 - RNA, 21 nt, Human
aaucuuuuaaaaauucaaaug

SEQ ID NO: 2592826 - RNA, 12 nt, Human
aaucuuuuacaa

SEQ ID NO: 2592827 - RNA, 21 nt, Human
aaucuuuuacaacugccucga

SEQ ID NO: 2592828 - RNA, 19 nt, Human
aaugaaaaauuuaagcauu

SEQ ID NO: 2592829 - RNA, 22 nt, Human
aaugaaaaauuuaagcauuguu

SEQ ID NO: 2592830 - RNA, 21 nt, Human
aaugaaaaauuuaagcauugu

SEQ ID NO: 2592831 - RNA, 16 nt, Human
uaaugauaacuggaaa

SEQ ID NO: 2592832 - RNA, 13 nt, Human
uaaugaggaaacu

SEQ ID NO: 2592833 - RNA, 18 nt, Human
uaauggucccauccaggc

SEQ ID NO: 2592834 - RNA, 16 nt, Human
uaauggucccauccag

SEQ ID NO: 2592835 - RNA, 15 nt, Human
uaauggucccaucca

SEQ ID NO: 2592836 - RNA, 14 nt, Human
uaauggucccaucc

SEQ ID NO: 2592837 - RNA, 21 nt, Human
uaauggucccauccaggcagu

SEQ ID NO: 2592838 - RNA, 20 nt, Human
uaauggucccauccaggcag

SEQ ID NO: 2592839 - RNA, 16 nt, Human
uaaugaggaugauuau

SEQ ID NO: 2592840 - RNA, 15 nt, Human
uaaugagggacugga

SEQ ID NO: 2592841 - RNA, 13 nt, Human
aaucuugucucaa

SEQ ID NO: 2592842 - RNA, 17 nt, Human
aaucuugucucaaugcu

SEQ ID NO: 2592843 - RNA, 15 nt, Human
aaucuugucucaaug

SEQ ID NO: 2592844 - RNA, 17 nt, Human
uaauguaaaauguugaa

SEQ ID NO: 2592845 - RNA, 14 nt, Human
uaauguaaaauguu

SEQ ID NO: 2592846 - RNA, 15 nt, Human
uaaugguuucaaaga

SEQ ID NO: 2592847 - RNA, 14 nt, Human
uaaugguguuuuaa

SEQ ID NO: 2592848 - RNA, 16 nt, Human
uaauggugccuucauu

SEQ ID NO: 2592849 - RNA, 18 nt, Human
uaauggugccuucauuug

SEQ ID NO: 2592850 - RNA, 15 nt, Human
uaaugguuugaauau

SEQ ID NO: 2592851 - RNA, 14 nt, Human
aaugacuuacugua

SEQ ID NO: 2592852 - RNA, 17 nt, Human
aaugacuuacuguacau

SEQ ID NO: 2592853 - RNA, 18 nt, Human
aaugacuuacuguacaug

SEQ ID NO: 2592854 - RNA, 13 nt, Human
aaugagaaucuac

SEQ ID NO: 2592855 - RNA, 17 nt, Human
aaugagaaggcagccac

SEQ ID NO: 2592856 - RNA, 15 nt, Human
aaugagaaggcagcc

SEQ ID NO: 2592857 - RNA, 14 nt, Human
aaugaccaauauua

SEQ ID NO: 2592858 - RNA, 16 nt, Human
aaugagacuugcucuc

SEQ ID NO: 2592859 - RNA, 15 nt, Human
aaugagacuugcucu

SEQ ID NO: 2592860 - RNA, 14 nt, Human
aaugagacuaugcg

SEQ ID NO: 2592861 - RNA, 19 nt, Human
aaugagacccucguggccu

SEQ ID NO: 2592862 - RNA, 21 nt, Human
aaugagagacacacugaagaa

SEQ ID NO: 2592863 - RNA, 15 nt, Human
aaugagccuggcaag

SEQ ID NO: 2592864 - RNA, 17 nt, Human
aaugaaaagcugaaucc

SEQ ID NO: 2592865 - RNA, 15 nt, Human
aaugaaaaccacauu

SEQ ID NO: 2592866 - RNA, 17 nt, Human
aaugacacuugucccca

SEQ ID NO: 2592867 - RNA, 13 nt, Human
aaugacacagucu

SEQ ID NO: 2592868 - RNA, 23 nt, Human
aaugaaaaugucagaaaccaguu

SEQ ID NO: 2592869 - RNA, 14 nt, Human
aaugaaaauaagaa

SEQ ID NO: 2592870 - RNA, 12 nt, Human
aaugaaaauguc

SEQ ID NO: 2592871 - RNA, 13 nt, Human
aaugaaaauguca

SEQ ID NO: 2592872 - RNA, 14 nt, Human
aaugaaaaugucag

SEQ ID NO: 2592873 - RNA, 20 nt, Human
aaugaaaaugucagaaacca

SEQ ID NO: 2592874 - RNA, 22 nt, Human
aaugacagguuugggaccccug

SEQ ID NO: 2592875 - RNA, 11 nt, Human
aaugacagagc

SEQ ID NO: 2592876 - RNA, 18 nt, Human
aaugacaucaccacaguu

SEQ ID NO: 2592877 - RNA, 18 nt, Human
aaugacaucuucaaagcu

SEQ ID NO: 2592878 - RNA, 18 nt, Human
aaugacauuuauaucaca

SEQ ID NO: 2592879 - RNA, 13 nt, Human
aaugacaucuuca

SEQ ID NO: 2592880 - RNA, 22 nt, Human
aaugacaucucaggggccagag

SEQ ID NO: 2592881 - RNA, 16 nt, Human
aaugacagagccagug

SEQ ID NO: 2592882 - RNA, 15 nt, Human
aaugacauuuugcca

SEQ ID NO: 2592883 - RNA, 20 nt, Human
aaugacucaggacauccccc

SEQ ID NO: 2592884 - RNA, 18 nt, Human
uaaguuucucagcuccca

SEQ ID NO: 2592885 - RNA, 12 nt, Human
uaaguuugaagg

SEQ ID NO: 2592886 - RNA, 16 nt, Human
uaaguuugauuucauu

SEQ ID NO: 2592887 - RNA, 23 nt, Human
uaaguuucucagcucccauuucu

SEQ ID NO: 2592888 - RNA, 19 nt, Human
uaaguuucucagcucccau

SEQ ID NO: 2592889 - RNA, 14 nt, Human
uaaguuucugggac

SEQ ID NO: 2592890 - RNA, 18 nt, Human
uaaguuuuuuuuuaaaaa

SEQ ID NO: 2592891 - RNA, 20 nt, Human
uaaguuuuuauggcuuuugu

SEQ ID NO: 2592892 - RNA, 20 nt, Human
uaaguucaaauucuucugaa

SEQ ID NO: 2592893 - RNA, 19 nt, Human
uaaguucaaauucuucuga

SEQ ID NO: 2592894 - RNA, 20 nt, Human
uaaguuauuuuuacauucug

SEQ ID NO: 2592895 - RNA, 20 nt, Human
uaaguuauugcaguuuauca

SEQ ID NO: 2592896 - RNA, 16 nt, Human
uaaguuauugcaguuu

SEQ ID NO: 2592897 - RNA, 15 nt, Human
uaaguuauugcaguu

SEQ ID NO: 2592898 - RNA, 14 nt, Human
uaaguuauugcagu

SEQ ID NO: 2592899 - RNA, 12 nt, Human
uaaguuauugca

SEQ ID NO: 2592900 - RNA, 17 nt, Human
uaaguaucuucauguau

SEQ ID NO: 2592901 - RNA, 14 nt, Human
uaaguauguuauuu

SEQ ID NO: 2592902 - RNA, 17 nt, Human
aaucagacuaugaaguu

SEQ ID NO: 2592903 - RNA, 14 nt, Human
aaucagacuaugaa

SEQ ID NO: 2592904 - RNA, 15 nt, Human
aaucagaucuuuauu

SEQ ID NO: 2592905 - RNA, 15 nt, Human
aaucagaucauuuca

SEQ ID NO: 2592906 - RNA, 14 nt, Human
aaucagaucauuuc

SEQ ID NO: 2592907 - RNA, 13 nt, Human
aaucagacaaagu

SEQ ID NO: 2592908 - RNA, 20 nt, Human
aaucagacccuaccccacca

SEQ ID NO: 2592909 - RNA, 20 nt, Human
uaaguauguguaaaauguga

SEQ ID NO: 2592910 - RNA, 15 nt, Human
uaaguaucugacauc

SEQ ID NO: 2592911 - RNA, 16 nt, Human
uaaguaucugacaucu

SEQ ID NO: 2592912 - RNA, 14 nt, Human
aaucagcaagaaga

SEQ ID NO: 2592913 - RNA, 14 nt, Human
uaaguacuguguac

SEQ ID NO: 2592914 - RNA, 19 nt, Human
uaaguacuauguaucaaug

SEQ ID NO: 2592915 - RNA, 16 nt, Human
aaucaugucaggccug

SEQ ID NO: 2592916 - RNA, 23 nt, Human
aaucauguaguaucaaauauuag

SEQ ID NO: 2592917 - RNA, 22 nt, Human
aaucauguaguaucaaauauua

SEQ ID NO: 2592918 - RNA, 18 nt, Human
aaucauguaguaucaaau

SEQ ID NO: 2592919 - RNA, 13 nt, Human
aaucauguaguau

SEQ ID NO: 2592920 - RNA, 16 nt, Human
aaucaugugaacccgg

SEQ ID NO: 2592921 - RNA, 15 nt, Human
aaucaugugaacccg

SEQ ID NO: 2592922 - RNA, 17 nt, Human
aaucauggugcucagag

SEQ ID NO: 2592923 - RNA, 18 nt, Human
aaucauggaaugguuaua

SEQ ID NO: 2592924 - RNA, 15 nt, Human
aaucaucugugugaa

SEQ ID NO: 2592925 - RNA, 21 nt, Human
aaucauggaaugguuauaaaa

SEQ ID NO: 2592926 - RNA, 15 nt, Human
aaucaugguuuuucu

SEQ ID NO: 2592927 - RNA, 14 nt, Human
aaucauguacauuu

SEQ ID NO: 2592928 - RNA, 16 nt, Human
aaucauguacauuucu

SEQ ID NO: 2592929 - RNA, 19 nt, Human
aaucauguacauuucugaa

SEQ ID NO: 2592930 - RNA, 17 nt, Human
aaucaugaauuaguuuu

SEQ ID NO: 2592931 - RNA, 19 nt, Human
aaucaugaauuaguuuuau

SEQ ID NO: 2592932 - RNA, 23 nt, Human
aaucaugaauuaguuuuauaugc

SEQ ID NO: 2592933 - RNA, 18 nt, Human
aaucaucuauaaagaaga

SEQ ID NO: 2592934 - RNA, 15 nt, Human
aaucaucuauaaaga

SEQ ID NO: 2592935 - RNA, 15 nt, Human
aaucauccaaugcuc

SEQ ID NO: 2592936 - RNA, 15 nt, Human
aaucaucaagucuuu

SEQ ID NO: 2592937 - RNA, 18 nt, Human
uaaguuugaaggaaacag

SEQ ID NO: 2592938 - RNA, 13 nt, Human
uaauaaaaggaaa

SEQ ID NO: 2592939 - RNA, 18 nt, Human
uaauaaaauaauucuaaa

SEQ ID NO: 2592940 - RNA, 16 nt, Human
uaauaaaauaauucua

SEQ ID NO: 2592941 - RNA, 19 nt, Human
uaauaaaauaauucuaaag

SEQ ID NO: 2592942 - RNA, 13 nt, Human
uaauaaaauaauu

SEQ ID NO: 2592943 - RNA, 20 nt, Human
uaauaaaaggaaaagcaaau

SEQ ID NO: 2592944 - RNA, 14 nt, Human
uaauaaaaggaaaa

SEQ ID NO: 2592945 - RNA, 17 nt, Human
uaauaaaaguacauguu

SEQ ID NO: 2592946 - RNA, 13 nt, Human
aaucuaaauggaa

SEQ ID NO: 2592947 - RNA, 15 nt, Human
aaucuaaauggaacc

SEQ ID NO: 2592948 - RNA, 18 nt, Human
aaucuaaauggaaccacu

SEQ ID NO: 2592949 - RNA, 15 nt, Human
aaucuacuaauucca

SEQ ID NO: 2592950 - RNA, 16 nt, Human
aaucuacuaauuccac

SEQ ID NO: 2592951 - RNA, 22 nt, Human
aaucuaccuucuguaguuuuau

SEQ ID NO: 2592952 - RNA, 21 nt, Human
aauccuucuaguuucccacaa

SEQ ID NO: 2592953 - RNA, 13 nt, Human
aauccuugcuuau

SEQ ID NO: 2592954 - RNA, 17 nt, Human
aauccuugcuuaugaca

SEQ ID NO: 2592955 - RNA, 18 nt, Human
aauccuugcuuaugacau

SEQ ID NO: 2592956 - RNA, 12 nt, Human
aaucuaaaugga

SEQ ID NO: 2592957 - RNA, 13 nt, Human
aauccuugaagau

SEQ ID NO: 2592958 - RNA, 20 nt, Human
aauccuucuaguuucccaca

SEQ ID NO: 2592959 - RNA, 16 nt, Human
aauccuucuaguuucc

SEQ ID NO: 2592960 - RNA, 14 nt, Human
aauccuucuaguuu

SEQ ID NO: 2592961 - RNA, 13 nt, Human
aauccuucuaguu

SEQ ID NO: 2592962 - RNA, 20 nt, Human
aaucauuucuauuucuccuc

SEQ ID NO: 2592963 - RNA, 12 nt, Human
aaucauuucuau

SEQ ID NO: 2592964 - RNA, 19 nt, Human
aaucauuucuauuucuccu

SEQ ID NO: 2592965 - RNA, 22 nt, Human
aaucauuguacaguuuguuuac

SEQ ID NO: 2592966 - RNA, 20 nt, Human
aaucauugcugaaaauggua

SEQ ID NO: 2592967 - RNA, 15 nt, Human
aaucauucucgauuu

SEQ ID NO: 2592968 - RNA, 17 nt, Human
aaucauucucgauuuaa

SEQ ID NO: 2592969 - RNA, 21 nt, Human
aaucauugcuuugaagcaguu

SEQ ID NO: 2592970 - RNA, 19 nt, Human
aaucauugcuuugaagcag

SEQ ID NO: 2592971 - RNA, 14 nt, Human
aaucauugcuuuga

SEQ ID NO: 2592972 - RNA, 20 nt, Human
aaucauuguacaguuuguuu

SEQ ID NO: 2592973 - RNA, 18 nt, Human
aaucauuguacaguuugu

SEQ ID NO: 2592974 - RNA, 17 nt, Human
aaucauuguacaguuug

SEQ ID NO: 2592975 - RNA, 16 nt, Human
aaucauuguacaguuu

SEQ ID NO: 2592976 - RNA, 15 nt, Human
aaucauuguacaguu

SEQ ID NO: 2592977 - RNA, 13 nt, Human
aaucauuguacag

SEQ ID NO: 2592978 - RNA, 22 nt, Human
aaucauugcuuugaagcaguug

SEQ ID NO: 2592979 - RNA, 12 nt, Human
aaucauuguaca

SEQ ID NO: 2592980 - RNA, 15 nt, Human
aauccuaccuguuuu

SEQ ID NO: 2592981 - RNA, 17 nt, Human
aauccuaccuguuuugu

SEQ ID NO: 2592982 - RNA, 16 nt, Human
aauccuaacacauuau

SEQ ID NO: 2592983 - RNA, 16 nt, Human
aauccuaauuucuccu

SEQ ID NO: 2592984 - RNA, 21 nt, Human
aauccuaauuucuccucccuu

SEQ ID NO: 2592985 - RNA, 19 nt, Human
aauccuaauuucuccuccc

SEQ ID NO: 2592986 - RNA, 24 nt, Human
aauccuaauuucuccucccuuccu

SEQ ID NO: 2592987 - RNA, 14 nt, Human
aauccuaugugauu

SEQ ID NO: 2592988 - RNA, 20 nt, Human
aauccuaugugauuuuaacu

SEQ ID NO: 2592989 - RNA, 20 nt, Human
aauccuauucucgggcugag

SEQ ID NO: 2592990 - RNA, 21 nt, Human
aauccuaugugauuuuaacuc

SEQ ID NO: 2592991 - RNA, 15 nt, Human
aauccucacugggug

SEQ ID NO: 2592992 - RNA, 16 nt, Human
aauccucacugggugg

SEQ ID NO: 2592993 - RNA, 14 nt, Human
aaucuuauaauuua

SEQ ID NO: 2592994 - RNA, 16 nt, Human
aaucuuauaauuuaaa

SEQ ID NO: 2592995 - RNA, 20 nt, Human
aaucucaaauucucaaccua

SEQ ID NO: 2592996 - RNA, 20 nt, Human
aaucuguccaaaggaggcug

SEQ ID NO: 2592997 - RNA, 21 nt, Human
aaucuguccaaaggaggcugg

SEQ ID NO: 2592998 - RNA, 14 nt, Human
aaucucaaauuucu

SEQ ID NO: 2592999 - RNA, 22 nt, Human
aaucugucacguagaacuugga

SEQ ID NO: 2593000 - RNA, 12 nt, Human
aaucucaaauuu

SEQ ID NO: 2593001 - RNA, 15 nt, Human
aaucucaaauaacua

SEQ ID NO: 2593002 - RNA, 22 nt, Human
aaucuagauaucgacuuguuuu

SEQ ID NO: 2593003 - RNA, 17 nt, Human
aaucuacuaauuccaca

SEQ ID NO: 2593004 - RNA, 19 nt, Human
aaucuaguauuucaugcug

SEQ ID NO: 2593005 - RNA, 16 nt, Human
aaucuagcuuauuuug

SEQ ID NO: 2593006 - RNA, 22 nt, Human
aauauugcugauggugcaauga

SEQ ID NO: 2593007 - RNA, 21 nt, Human
aauauugcugauggugcaaug

SEQ ID NO: 2593008 - RNA, 18 nt, Human
aauauugcugauggugca

SEQ ID NO: 2593009 - RNA, 15 nt, Human
aauauugcugauggu

SEQ ID NO: 2593010 - RNA, 13 nt, Human
aauauugcugaug

SEQ ID NO: 2593011 - RNA, 12 nt, Human
aauauugcugau

SEQ ID NO: 2593012 - RNA, 20 nt, Human
aauauugauuucugccuucc

SEQ ID NO: 2593013 - RNA, 17 nt, Human
aauaugcaaugugaagc

SEQ ID NO: 2593014 - RNA, 11 nt, Human
aauauugcuga

SEQ ID NO: 2593015 - RNA, 15 nt, Human
aauaugcaaagcacu

SEQ ID NO: 2593016 - RNA, 17 nt, Human
aauaugcaaagcacuga

SEQ ID NO: 2593017 - RNA, 18 nt, Human
aauaugauuaguaaagaa

SEQ ID NO: 2593018 - RNA, 19 nt, Human
aauaugauuaguaaagaaa

SEQ ID NO: 2593019 - RNA, 12 nt, Human
aauaugauuuua

SEQ ID NO: 2593020 - RNA, 20 nt, Human
aauaugauuaguaaagaaau

SEQ ID NO: 2593021 - RNA, 22 nt, Human
aauaugauuaguaaagaaauga

SEQ ID NO: 2593022 - RNA, 11 nt, Human
aauaugaugac

SEQ ID NO: 2593023 - RNA, 19 nt, Human
aauaugacggaagaacaua

SEQ ID NO: 2593024 - RNA, 17 nt, Human
aauaugauauugcauau

SEQ ID NO: 2593025 - RNA, 24 nt, Human
aauaugcaaagcacugacuucuaa

SEQ ID NO: 2593026 - RNA, 15 nt, Human
aauaugcacacauuu

SEQ ID NO: 2593027 - RNA, 18 nt, Human
aauauugauaugcuuaua

SEQ ID NO: 2593028 - RNA, 17 nt, Human
aauauugauaugcuuau

SEQ ID NO: 2593029 - RNA, 18 nt, Human
aauaugcacacagugcuu

SEQ ID NO: 2593030 - RNA, 16 nt, Human
aauauuuccauaugga

SEQ ID NO: 2593031 - RNA, 13 nt, Human
aauauuuccauau

SEQ ID NO: 2593032 - RNA, 16 nt, Human
aauauuuaaacagcag

SEQ ID NO: 2593033 - RNA, 17 nt, Human
aauauuuaaacagcagu

SEQ ID NO: 2593034 - RNA, 11 nt, Human
aauauuugaau

SEQ ID NO: 2593035 - RNA, 23 nt, Human
aauauuuccauauggauuuucua

SEQ ID NO: 2593036 - RNA, 19 nt, Human
aauauuuccuuaaacugug

SEQ ID NO: 2593037 - RNA, 15 nt, Human
aauauuucagauaau

SEQ ID NO: 2593038 - RNA, 14 nt, Human
aauauuuaaacagc

SEQ ID NO: 2593039 - RNA, 12 nt, Human
aauauuuaaaca

SEQ ID NO: 2593040 - RNA, 20 nt, Human
aauauuuaaaauuuauugcu

SEQ ID NO: 2593041 - RNA, 13 nt, Human
aauauuguuucua

SEQ ID NO: 2593042 - RNA, 20 nt, Human
aauauugcuuuggucauaug

SEQ ID NO: 2593043 - RNA, 18 nt, Human
aauauuguguugugaaug

SEQ ID NO: 2593044 - RNA, 13 nt, Human
aauauuguacagu

SEQ ID NO: 2593045 - RNA, 18 nt, Human
aauauuuuaaguauugca

SEQ ID NO: 2593046 - RNA, 17 nt, Human
aauauuuuaaguauugc

SEQ ID NO: 2593047 - RNA, 14 nt, Human
aauauuugaaucuu

SEQ ID NO: 2593048 - RNA, 15 nt, Human
aauauuuuaaguauu

SEQ ID NO: 2593049 - RNA, 21 nt, Human
aauauuuccuuaaacugugug

SEQ ID NO: 2593050 - RNA, 13 nt, Human
aauauuugaaucu

SEQ ID NO: 2593051 - RNA, 12 nt, Human
aauauuugaauc

SEQ ID NO: 2593052 - RNA, 13 nt, Human
aauauuuuaagua

SEQ ID NO: 2593053 - RNA, 12 nt, Human
aaucagaacuca

SEQ ID NO: 2593054 - RNA, 23 nt, Human
aaucagaacucaaauggggccag

SEQ ID NO: 2593055 - RNA, 11 nt, Human
aaucagaacuc

SEQ ID NO: 2593056 - RNA, 16 nt, Human
aaucacuuaggaaaug

SEQ ID NO: 2593057 - RNA, 18 nt, Human
aauauuuucauacagcau

SEQ ID NO: 2593058 - RNA, 11 nt, Human
aauauuuucau

SEQ ID NO: 2593059 - RNA, 17 nt, Human
aauauuuuauuauauau

SEQ ID NO: 2593060 - RNA, 21 nt, Human
aauauuuuccaugaaaaugca

SEQ ID NO: 2593061 - RNA, 20 nt, Human
uaagacaugauuuccuugaa

SEQ ID NO: 2593062 - RNA, 21 nt, Human
uaagacaugauuuccuugaau

SEQ ID NO: 2593063 - RNA, 17 nt, Human
uaagacauuuuuggaag

SEQ ID NO: 2593064 - RNA, 21 nt, Human
uaagaaugcugguuuuccuaa

SEQ ID NO: 2593065 - RNA, 23 nt, Human
uaagaaugcugguuuuccuaaau

SEQ ID NO: 2593066 - RNA, 17 nt, Human
uaagaaugguugccuua

SEQ ID NO: 2593067 - RNA, 22 nt, Human
uaagaaugcugguuuuccuaaa

SEQ ID NO: 2593068 - RNA, 18 nt, Human
uaagaccaccaccucaga

SEQ ID NO: 2593069 - RNA, 17 nt, Human
uaagaccaccaccucag

SEQ ID NO: 2593070 - RNA, 21 nt, Human
uaagacaugcacuaugaggaa

SEQ ID NO: 2593071 - RNA, 19 nt, Human
uaagaccauaacagccaac

SEQ ID NO: 2593072 - RNA, 15 nt, Human
uaagaauauuugaau

SEQ ID NO: 2593073 - RNA, 18 nt, Human
uaagaauauuugaaugua

SEQ ID NO: 2593074 - RNA, 15 nt, Human
uaagaaugaaauacu

SEQ ID NO: 2593075 - RNA, 21 nt, Human
uaagaaugaaauacuguuuga

SEQ ID NO: 2593076 - RNA, 15 nt, Human
uaagaaugcugguuu

SEQ ID NO: 2593077 - RNA, 14 nt, Human
uaagaaucuuuaga

SEQ ID NO: 2593078 - RNA, 13 nt, Human
uaagaaugaaaua

SEQ ID NO: 2593079 - RNA, 23 nt, Human
uaacuaauaugggcauuguaguu

SEQ ID NO: 2593080 - RNA, 23 nt, Human
uaacuaaucuauuggguucauua

SEQ ID NO: 2593081 - RNA, 19 nt, Human
uaacuaaucuauuggguuc

SEQ ID NO: 2593082 - RNA, 22 nt, Human
uaacuaaucuauuggguucauu

SEQ ID NO: 2593083 - RNA, 17 nt, Human
uaacuaaacucucuuug

SEQ ID NO: 2593084 - RNA, 14 nt, Human
uaacuaaacucucu

SEQ ID NO: 2593085 - RNA, 14 nt, Human
uaacuaaauuaaca

SEQ ID NO: 2593086 - RNA, 16 nt, Human
uaacuaaauuaacauu

SEQ ID NO: 2593087 - RNA, 17 nt, Human
uaacuuuuauaaacuuu

SEQ ID NO: 2593088 - RNA, 18 nt, Human
uaacuuuuauaaacuuua

SEQ ID NO: 2593089 - RNA, 15 nt, Human
uaacuuuuauaaacu

SEQ ID NO: 2593090 - RNA, 17 nt, Human
uaacuacuccggagaca

SEQ ID NO: 2593091 - RNA, 21 nt, Human
uaacuacuccggagacagggu

SEQ ID NO: 2593092 - RNA, 12 nt, Human
uaacuacugugu

SEQ ID NO: 2593093 - RNA, 14 nt, Human
uaacuacuguguuc

SEQ ID NO: 2593094 - RNA, 15 nt, Human
uaacuacuguguucc

SEQ ID NO: 2593095 - RNA, 16 nt, Human
uaacuacuguguuccu

SEQ ID NO: 2593096 - RNA, 17 nt, Human
uaacuacuguguuccug

SEQ ID NO: 2593097 - RNA, 23 nt, Human
aauaucuguauuuaauuuugaca

SEQ ID NO: 2593098 - RNA, 22 nt, Human
aauaucuguauuuaauuuugac

SEQ ID NO: 2593099 - RNA, 21 nt, Human
aauaucuguauuuaauuuuga

SEQ ID NO: 2593100 - RNA, 20 nt, Human
aauaucuguauuuaauuuug

SEQ ID NO: 2593101 - RNA, 14 nt, Human
aauaucuguauuua

SEQ ID NO: 2593102 - RNA, 13 nt, Human
aauaucuguauuu

SEQ ID NO: 2593103 - RNA, 20 nt, Human
aauaucugaaaauguaugug

SEQ ID NO: 2593104 - RNA, 13 nt, Human
aauaucugaaaug

SEQ ID NO: 2593105 - RNA, 21 nt, Human
aauaucugggauucuacuuua

SEQ ID NO: 2593106 - RNA, 13 nt, Human
aauaucugggauu

SEQ ID NO: 2593107 - RNA, 19 nt, Human
aauaucuuuuuuuuaauaa

SEQ ID NO: 2593108 - RNA, 15 nt, Human
aauaucuuuugaccu

SEQ ID NO: 2593109 - RNA, 13 nt, Human
aauaugaaaacuu

SEQ ID NO: 2593110 - RNA, 14 nt, Human
aauaugaaaacuua

SEQ ID NO: 2593111 - RNA, 19 nt, Human
aauaugaacggugagcauu

SEQ ID NO: 2593112 - RNA, 18 nt, Human
aauaugaagcucaccugu

SEQ ID NO: 2593113 - RNA, 18 nt, Human
aauaugaauacagggcau

SEQ ID NO: 2593114 - RNA, 12 nt, Human
aauaugaaugcc

SEQ ID NO: 2593115 - RNA, 12 nt, Human
aauaugaagcuc

SEQ ID NO: 2593116 - RNA, 22 nt, Human
aauaugaaugcccccagcuggc

SEQ ID NO: 2593117 - RNA, 16 nt, Human
aauaugacagcugucc

SEQ ID NO: 2593118 - RNA, 22 nt, Human
aauaugacagcugucccuguca

SEQ ID NO: 2593119 - RNA, 17 nt, Human
aauaugacggaagaaca

SEQ ID NO: 2593120 - RNA, 21 nt, Human
aauaugacggaagaacauaga

SEQ ID NO: 2593121 - RNA, 19 nt, Human
aauaugaggcauuuggcau

SEQ ID NO: 2593122 - RNA, 16 nt, Human
aauaugagaaucagau

SEQ ID NO: 2593123 - RNA, 16 nt, Human
aauaucugaaaaugua

SEQ ID NO: 2593124 - RNA, 17 nt, Human
aauaucugaaaauguau

SEQ ID NO: 2593125 - RNA, 18 nt, Human
aauaucugaaaauguaug

SEQ ID NO: 2593126 - RNA, 19 nt, Human
aauaucugaaaauguaugu

SEQ ID NO: 2593127 - RNA, 18 nt, Human
aauaucuaauaaaaaguc

SEQ ID NO: 2593128 - RNA, 11 nt, Human
uaagaccuggc

SEQ ID NO: 2593129 - RNA, 12 nt, Human
aauauccuuugc

SEQ ID NO: 2593130 - RNA, 23 nt, Human
aauauauggcagaguuguaaaua

SEQ ID NO: 2593131 - RNA, 15 nt, Human
aauaguauuugagag

SEQ ID NO: 2593132 - RNA, 22 nt, Human
aauauauggcagaguuguaaau

SEQ ID NO: 2593133 - RNA, 21 nt, Human
aauauauggcagaguuguaaa

SEQ ID NO: 2593134 - RNA, 18 nt, Human
aauaguauuuaugaaaug

SEQ ID NO: 2593135 - RNA, 20 nt, Human
aauaguauccuccagguuuu

SEQ ID NO: 2593136 - RNA, 18 nt, Human
aauaguauccuccagguu

SEQ ID NO: 2593137 - RNA, 17 nt, Human
aauaguauccuccaggu

SEQ ID NO: 2593138 - RNA, 15 nt, Human
aauaguauccuccag

SEQ ID NO: 2593139 - RNA, 23 nt, Human
aauaguauccuccagguuuuuca

SEQ ID NO: 2593140 - RNA, 21 nt, Human
aauaguauccuccagguuuuu

SEQ ID NO: 2593141 - RNA, 13 nt, Human
aauaguauuuaug

SEQ ID NO: 2593142 - RNA, 12 nt, Human
aauaucacuugu

SEQ ID NO: 2593143 - RNA, 23 nt, Human
aauauauguuuaccuuuuaauua

SEQ ID NO: 2593144 - RNA, 13 nt, Human
aauauauuauaau

SEQ ID NO: 2593145 - RNA, 16 nt, Human
aauauauuauaaucuu

SEQ ID NO: 2593146 - RNA, 12 nt, Human
aauauauguuua

SEQ ID NO: 2593147 - RNA, 20 nt, Human
aauauauguuuaccuuuuaa

SEQ ID NO: 2593148 - RNA, 13 nt, Human
aauauauguuuac

SEQ ID NO: 2593149 - RNA, 19 nt, Human
aauaucccuacauguauug

SEQ ID NO: 2593150 - RNA, 18 nt, Human
aauaucccuacauguauu

SEQ ID NO: 2593151 - RNA, 17 nt, Human
aauaucccuacauguau

SEQ ID NO: 2593152 - RNA, 16 nt, Human
aauaucccuacaugua

SEQ ID NO: 2593153 - RNA, 16 nt, Human
aauauccccucccagu

SEQ ID NO: 2593154 - RNA, 20 nt, Human
aauauauggcagaguuguaa

SEQ ID NO: 2593155 - RNA, 13 nt, Human
aauaucauuuauu

SEQ ID NO: 2593156 - RNA, 23 nt, Human
aauaucauuuauuuuuuacauua

SEQ ID NO: 2593157 - RNA, 15 nt, Human
aauaucacuugucaa

SEQ ID NO: 2593158 - RNA, 18 nt, Human
aauaucaucaguauugaa

SEQ ID NO: 2593159 - RNA, 16 nt, Human
aauaucaucaguauug

SEQ ID NO: 2593160 - RNA, 14 nt, Human
uaacuaaaagguau

SEQ ID NO: 2593161 - RNA, 12 nt, Human
uaaccuggugcu

SEQ ID NO: 2593162 - RNA, 15 nt, Human
uaaccuggugcugga

SEQ ID NO: 2593163 - RNA, 18 nt, Human
uaaccuggugcuggauau

SEQ ID NO: 2593164 - RNA, 19 nt, Human
uaaccuggugcuggauauu

SEQ ID NO: 2593165 - RNA, 22 nt, Human
uaaccuggugcuggauauuuuc

SEQ ID NO: 2593166 - RNA, 23 nt, Human
uaaccuggugcuggauauuuuca

SEQ ID NO: 2593167 - RNA, 19 nt, Human
uaaccuguacuucaaguua

SEQ ID NO: 2593168 - RNA, 15 nt, Human
uaacuaaaagguaug

SEQ ID NO: 2593169 - RNA, 15 nt, Human
uaacauggaaguacu

SEQ ID NO: 2593170 - RNA, 16 nt, Human
uaacauggaaguacua

SEQ ID NO: 2593171 - RNA, 18 nt, Human
uaaccucaucuucuucac

SEQ ID NO: 2593172 - RNA, 14 nt, Human
uaaccucugcacua

SEQ ID NO: 2593173 - RNA, 17 nt, Human
uaaccucuucagaggcc

SEQ ID NO: 2593174 - RNA, 20 nt, Human
uaaccugaccgugggcgggg

SEQ ID NO: 2593175 - RNA, 19 nt, Human
uaaccugccagggagacag

SEQ ID NO: 2593176 - RNA, 14 nt, Human
uaacauggaaguac

SEQ ID NO: 2593177 - RNA, 19 nt, Human
uaacauaauuuguacauau

SEQ ID NO: 2593178 - RNA, 14 nt, Human
uaacaugauuuggg

SEQ ID NO: 2593179 - RNA, 16 nt, Human
uaacauaauuuguaca

SEQ ID NO: 2593180 - RNA, 15 nt, Human
aauagauuauaguug

SEQ ID NO: 2593181 - RNA, 16 nt, Human
aauagaugcugacugu

SEQ ID NO: 2593182 - RNA, 21 nt, Human
aauagccaacacccaucuguu

SEQ ID NO: 2593183 - RNA, 20 nt, Human
aauagccacauuuggaauac

SEQ ID NO: 2593184 - RNA, 22 nt, Human
aauagccacauuuggaauacuu

SEQ ID NO: 2593185 - RNA, 23 nt, Human
aauagccacauuuggaauacuuu

SEQ ID NO: 2593186 - RNA, 14 nt, Human
aauagcugggacua

SEQ ID NO: 2593187 - RNA, 13 nt, Human
aauagcugggacu

SEQ ID NO: 2593188 - RNA, 20 nt, Human
aauagccugccucuucucua

SEQ ID NO: 2593189 - RNA, 22 nt, Human
aauagccacuuaccuucaauaa

SEQ ID NO: 2593190 - RNA, 22 nt, Human
aauagccaacacccaucuguuu

SEQ ID NO: 2593191 - RNA, 20 nt, Human
aauagccacuuaccuucaau

SEQ ID NO: 2593192 - RNA, 23 nt, Human
aauagccacugcauaccaaccug

SEQ ID NO: 2593193 - RNA, 18 nt, Human
aauagacaauuuauuaug

SEQ ID NO: 2593194 - RNA, 13 nt, Human
uaaauuuugugau

SEQ ID NO: 2593195 - RNA, 17 nt, Human
uaaauuuuguaugaaaa

SEQ ID NO: 2593196 - RNA, 15 nt, Human
uaaauuuugugucuc

SEQ ID NO: 2593197 - RNA, 19 nt, Human
uaaauuuugaguucuacau

SEQ ID NO: 2593198 - RNA, 18 nt, Human
uaaauuuugaguucuaca

SEQ ID NO: 2593199 - RNA, 20 nt, Human
uaaauuuugucuuuaacuca

SEQ ID NO: 2593200 - RNA, 18 nt, Human
uaaauuaaaacugaauug

SEQ ID NO: 2593201 - RNA, 14 nt, Human
uaaauuuuuuuccu

SEQ ID NO: 2593202 - RNA, 22 nt, Human
aauagacacuccccgaagucuu

SEQ ID NO: 2593203 - RNA, 23 nt, Human
aauagacacuccccgaagucuuu

SEQ ID NO: 2593204 - RNA, 23 nt, Human
aauagacaauuuauuauggcaca

SEQ ID NO: 2593205 - RNA, 15 nt, Human
aauagacaguauauu

SEQ ID NO: 2593206 - RNA, 20 nt, Human
aauagacaguauauuuauag

SEQ ID NO: 2593207 - RNA, 20 nt, Human
aauagauaagaguagaaacu

SEQ ID NO: 2593208 - RNA, 22 nt, Human
aauagaguuugcuauuagagca

SEQ ID NO: 2593209 - RNA, 21 nt, Human
aauagauauccacuugagaca

SEQ ID NO: 2593210 - RNA, 21 nt, Human
aauagggcugagcucucugug

SEQ ID NO: 2593211 - RNA, 22 nt, Human
aauaggcgaucacaacgugcau

SEQ ID NO: 2593212 - RNA, 22 nt, Human
aauaguaaaagauaacaagauc

SEQ ID NO: 2593213 - RNA, 14 nt, Human
aauaguauccucca

SEQ ID NO: 2593214 - RNA, 13 nt, Human
aauaguaauguuu

SEQ ID NO: 2593215 - RNA, 18 nt, Human
aauaggcguaacuaauuu

SEQ ID NO: 2593216 - RNA, 15 nt, Human
aauaggagaggauga

SEQ ID NO: 2593217 - RNA, 13 nt, Human
aauaggagaggau

SEQ ID NO: 2593218 - RNA, 20 nt, Human
aauaggagaggaugagagcc

SEQ ID NO: 2593219 - RNA, 21 nt, Human
aauagcuauauccauguacug

SEQ ID NO: 2593220 - RNA, 23 nt, Human
aauaggagaggaugagagcccag

SEQ ID NO: 2593221 - RNA, 13 nt, Human
aauaggcaaaggg

SEQ ID NO: 2593222 - RNA, 16 nt, Human
aauaggaaaaacugau

SEQ ID NO: 2593223 - RNA, 15 nt, Human
aauaggaaaaacuga

SEQ ID NO: 2593224 - RNA, 19 nt, Human
aauagcuuguauaguguaa

SEQ ID NO: 2593225 - RNA, 14 nt, Human
aauagcuuguauag

SEQ ID NO: 2593226 - RNA, 22 nt, Human
aauagcuauauccauguacugu

SEQ ID NO: 2593227 - RNA, 19 nt, Human
aauagcucuuucagggggg

SEQ ID NO: 2593228 - RNA, 23 nt, Human
aauagcuauauccauguacugua

SEQ ID NO: 2593229 - RNA, 18 nt, Human
aauaggaaaaacugauuu

SEQ ID NO: 2593230 - RNA, 17 nt, Human
aauaggaaaaacugauu

SEQ ID NO: 2593231 - RNA, 19 nt, Human
aauaggaaaaacugauuuu

SEQ ID NO: 2593232 - RNA, 17 nt, Human
aauagcuuuuauuguau

SEQ ID NO: 2593233 - RNA, 21 nt, Human
aauagcuuuacccucaggcau

SEQ ID NO: 2593234 - RNA, 21 nt, Human
uaaaucuaugaaguauauaau

SEQ ID NO: 2593235 - RNA, 19 nt, Human
uaaaucuaugaaguauaua

SEQ ID NO: 2593236 - RNA, 15 nt, Human
uaaauagcauucucu

SEQ ID NO: 2593237 - RNA, 21 nt, Human
uaaauagcauguauugugucu

SEQ ID NO: 2593238 - RNA, 19 nt, Human
uaaauagcauguauugugu

SEQ ID NO: 2593239 - RNA, 21 nt, Human
uaaaucuaguauacauugucu

SEQ ID NO: 2593240 - RNA, 14 nt, Human
uaaaucuccaaaau

SEQ ID NO: 2593241 - RNA, 15 nt, Human
uaaaucuccaaaaua

SEQ ID NO: 2593242 - RNA, 18 nt, Human
uaaaucuccaaaauaaaa

SEQ ID NO: 2593243 - RNA, 18 nt, Human
uaaauagcauguauugug

SEQ ID NO: 2593244 - RNA, 15 nt, Human
uaaauagcauguauu

SEQ ID NO: 2593245 - RNA, 14 nt, Human
uaaauagcauguau

SEQ ID NO: 2593246 - RNA, 13 nt, Human
uaaauagcaugua

SEQ ID NO: 2593247 - RNA, 12 nt, Human
uaaauagcaugu

SEQ ID NO: 2593248 - RNA, 18 nt, Human
uaaauagaguauaugcac

SEQ ID NO: 2593249 - RNA, 18 nt, Human
uaaauagaguuugcuauu

SEQ ID NO: 2593250 - RNA, 12 nt, Human
uaaaucugugau

SEQ ID NO: 2593251 - RNA, 20 nt, Human
uaaaucuguugccaagcugg

SEQ ID NO: 2593252 - RNA, 18 nt, Human
uaaaucuguugccaagcu

SEQ ID NO: 2593253 - RNA, 14 nt, Human
uaaaucugugauga

SEQ ID NO: 2593254 - RNA, 13 nt, Human
uaaaucugugaug

SEQ ID NO: 2593255 - RNA, 15 nt, Human
uaaaucugugaugau

SEQ ID NO: 2593256 - RNA, 15 nt, Human
uaaaucugacccagu

SEQ ID NO: 2593257 - RNA, 16 nt, Human
uaaaucugacccagug

SEQ ID NO: 2593258 - RNA, 17 nt, Human
uaaaucugacccagugc

SEQ ID NO: 2593259 - RNA, 20 nt, Human
uaaaucugcuggaguuucau

SEQ ID NO: 2593260 - RNA, 22 nt, Human
uaaaucuccaaaauaaaacuuu

SEQ ID NO: 2593261 - RNA, 20 nt, Human
uaaaucuaugaaguauauaa

SEQ ID NO: 2593262 - RNA, 14 nt, Human
uaaaucugacccag

SEQ ID NO: 2593263 - RNA, 18 nt, Human
uaaaucucuaauauggca

SEQ ID NO: 2593264 - RNA, 15 nt, Human
uaaaucucuaauaug

SEQ ID NO: 2593265 - RNA, 14 nt, Human
uaaaucucuaauau

SEQ ID NO: 2593266 - RNA, 10 nt, Human
uaaaugcaua

SEQ ID NO: 2593267 - RNA, 22 nt, Human
uaaaugcagcgaaccaauauuu

SEQ ID NO: 2593268 - RNA, 14 nt, Human
uaaaugcauuauag

SEQ ID NO: 2593269 - RNA, 16 nt, Human
uaaaugcauaaaugca

SEQ ID NO: 2593270 - RNA, 20 nt, Human
uaaaugcauauccugagcca

SEQ ID NO: 2593271 - RNA, 21 nt, Human
uaaaugcauauccugagccau

SEQ ID NO: 2593272 - RNA, 23 nt, Human
uaaaugcaccuggaauauauaac

SEQ ID NO: 2593273 - RNA, 14 nt, Human
uaaaucuuuuacaa

SEQ ID NO: 2593274 - RNA, 14 nt, Human
uaaaugcaauaugu

SEQ ID NO: 2593275 - RNA, 15 nt, Human
uaaaugcaauaugua

SEQ ID NO: 2593276 - RNA, 19 nt, Human
uaaaugcaauauuaaugcc

SEQ ID NO: 2593277 - RNA, 18 nt, Human
uaaaugcaauauguauua

SEQ ID NO: 2593278 - RNA, 15 nt, Human
uaaauguugaaagau

SEQ ID NO: 2593279 - RNA, 23 nt, Human
uaaauguuuuuuuuuaaagacuu

SEQ ID NO: 2593280 - RNA, 20 nt, Human
uaaauguugaaagaucaaaa

SEQ ID NO: 2593281 - RNA, 17 nt, Human
uaaauuuugaguucuac

SEQ ID NO: 2593282 - RNA, 18 nt, Human
uaaauuaacuuuuauaaa

SEQ ID NO: 2593283 - RNA, 17 nt, Human
uaaauuaacuuuuauaa

SEQ ID NO: 2593284 - RNA, 15 nt, Human
uaaauuaacuuuuau

SEQ ID NO: 2593285 - RNA, 16 nt, Human
uaaauuaacuuuuaua

SEQ ID NO: 2593286 - RNA, 12 nt, Human
uaaauuaacuuu

SEQ ID NO: 2593287 - RNA, 14 nt, Human
uaaauuaacuuuua

SEQ ID NO: 2593288 - RNA, 24 nt, Human
uaaauguuuuuuuuuaaagacuuu

SEQ ID NO: 2593289 - RNA, 20 nt, Human
uaaauaaaguaucaugcauu

SEQ ID NO: 2593290 - RNA, 15 nt, Human
uaaauaaaguaucau

SEQ ID NO: 2593291 - RNA, 14 nt, Human
uaaauaaaguauca

SEQ ID NO: 2593292 - RNA, 22 nt, Human
aauacaacauguagcugaguuu

SEQ ID NO: 2593293 - RNA, 14 nt, Human
uaaauaaauauaua

SEQ ID NO: 2593294 - RNA, 13 nt, Human
uaaauaaauauau

SEQ ID NO: 2593295 - RNA, 12 nt, Human
uaaauaaauaua

SEQ ID NO: 2593296 - RNA, 21 nt, Human
uaaauaaaguaucaugcauuc

SEQ ID NO: 2593297 - RNA, 21 nt, Human
uaaauaaaguuuguugaaaca

SEQ ID NO: 2593298 - RNA, 12 nt, Human
uaaauaaaguuu

SEQ ID NO: 2593299 - RNA, 20 nt, Human
aauaauuuuuauauuugaaa

SEQ ID NO: 2593300 - RNA, 12 nt, Human
aauacaaaacuu

SEQ ID NO: 2593301 - RNA, 20 nt, Human
aauacaaaaauuagccgggc

SEQ ID NO: 2593302 - RNA, 21 nt, Human
aauacaaaaaauuagccgggc

SEQ ID NO: 2593303 - RNA, 13 nt, Human
aauacaaaacuuc

SEQ ID NO: 2593304 - RNA, 17 nt, Human
aauacaaacaccuggac

SEQ ID NO: 2593305 - RNA, 13 nt, Human
aauacaaacaaug

SEQ ID NO: 2593306 - RNA, 21 nt, Human
aauacaaacauauuuguuaaa

SEQ ID NO: 2593307 - RNA, 17 nt, Human
aauacaaacauauuugu

SEQ ID NO: 2593308 - RNA, 20 nt, Human
aauacaaacauauuuguuaa

SEQ ID NO: 2593309 - RNA, 18 nt, Human
aauacaacuuaaauaaua

SEQ ID NO: 2593310 - RNA, 13 nt, Human
uaaauacagucuu

SEQ ID NO: 2593311 - RNA, 17 nt, Human
uaaauacagucuuccau

SEQ ID NO: 2593312 - RNA, 22 nt, Human
uaaauacagacacuaaguuaua

SEQ ID NO: 2593313 - RNA, 19 nt, Human
uaaauacagacacuaaguu

SEQ ID NO: 2593314 - RNA, 18 nt, Human
uaaauacagacacuaagu

SEQ ID NO: 2593315 - RNA, 17 nt, Human
uaaauacagacacuaag

SEQ ID NO: 2593316 - RNA, 20 nt, Human
uaaauacagucuuccauuug

SEQ ID NO: 2593317 - RNA, 22 nt, Human
uaaauacagucuuccauuugca

SEQ ID NO: 2593318 - RNA, 23 nt, Human
uaaauacagucuuccauuugcaa

SEQ ID NO: 2593319 - RNA, 17 nt, Human
uaaauaccagacacgua

SEQ ID NO: 2593320 - RNA, 23 nt, Human
uaaauaccucuuagcugagugga

SEQ ID NO: 2593321 - RNA, 13 nt, Human
uaaauaccucuua

SEQ ID NO: 2593322 - RNA, 22 nt, Human
uaaauaccucaaccuaugguau

SEQ ID NO: 2593323 - RNA, 19 nt, Human
uaaauaaugugaaacugga

SEQ ID NO: 2593324 - RNA, 20 nt, Human
uaaauaaguuugcaauuugg

SEQ ID NO: 2593325 - RNA, 21 nt, Human
uaaauaagaaacaacucuuug

SEQ ID NO: 2593326 - RNA, 22 nt, Human
uaaauaagaaacaacucuuuga

SEQ ID NO: 2593327 - RNA, 16 nt, Human
uaaauaaaucauuaau

SEQ ID NO: 2593328 - RNA, 15 nt, Human
uaaauaaauauauau

SEQ ID NO: 2593329 - RNA, 13 nt, Human
uaaauaacuuuuu

SEQ ID NO: 2593330 - RNA, 21 nt, Human
aauaauuuuaagaaaucaaag

SEQ ID NO: 2593331 - RNA, 16 nt, Human
aauaauuuuaaacaaa

SEQ ID NO: 2593332 - RNA, 14 nt, Human
aauaacuccuucuu

SEQ ID NO: 2593333 - RNA, 21 nt, Human
aauaauuuccuggugugaagg

SEQ ID NO: 2593334 - RNA, 20 nt, Human
aauaauuuccuggugugaag

SEQ ID NO: 2593335 - RNA, 22 nt, Human
aauaauuucccaauuaggaagu

SEQ ID NO: 2593336 - RNA, 19 nt, Human
aauaauuuuuauauuugaa

SEQ ID NO: 2593337 - RNA, 17 nt, Human
aauaauuuuuauauuug

SEQ ID NO: 2593338 - RNA, 16 nt, Human
aauaauuuuuauauuu

SEQ ID NO: 2593339 - RNA, 14 nt, Human
aauaagaauuuagg

SEQ ID NO: 2593340 - RNA, 14 nt, Human
aauaagaaugauuu

SEQ ID NO: 2593341 - RNA, 18 nt, Human
aauaagaauagaaauaaa

SEQ ID NO: 2593342 - RNA, 14 nt, Human
aauaagagaaagaa

SEQ ID NO: 2593343 - RNA, 17 nt, Human
aauaagacauaacguuu

SEQ ID NO: 2593344 - RNA, 15 nt, Human
aauaagagaaagaaa

SEQ ID NO: 2593345 - RNA, 20 nt, Human
aauaagagagucauaaaccu

SEQ ID NO: 2593346 - RNA, 18 nt, Human
aauaauuauuuauuuaau

SEQ ID NO: 2593347 - RNA, 21 nt, Human
aauaauugaucaaauucauuu

SEQ ID NO: 2593348 - RNA, 14 nt, Human
aauaauugguucuu

SEQ ID NO: 2593349 - RNA, 21 nt, Human
aauaauugcagaacuaaacuc

SEQ ID NO: 2593350 - RNA, 16 nt, Human
aauaauugcagaacua

SEQ ID NO: 2593351 - RNA, 20 nt, Human
aauaauugauuucaagaccu

SEQ ID NO: 2593352 - RNA, 16 nt, Human
aauaacugugaaguuu

SEQ ID NO: 2593353 - RNA, 14 nt, Human
aauaacugugaagu

SEQ ID NO: 2593354 - RNA, 20 nt, Human
aauaacugugaaguuuacau

SEQ ID NO: 2593355 - RNA, 15 nt, Human
aauaagaaaguuuca

SEQ ID NO: 2593356 - RNA, 22 nt, Human
aauaagaaacaacucuuugaga

SEQ ID NO: 2593357 - RNA, 13 nt, Human
aauaagaauagaa

SEQ ID NO: 2593358 - RNA, 12 nt, Human
aauaagaaaaga

SEQ ID NO: 2593359 - RNA, 12 nt, Human
aauaacuuuuuu

SEQ ID NO: 2593360 - RNA, 22 nt, Human
uaaaguaaaaacaaagaaauua

SEQ ID NO: 2593361 - RNA, 21 nt, Human
uaaaguaaaaacaaagaaauu

SEQ ID NO: 2593362 - RNA, 19 nt, Human
uaaaguaaaaacaaagaaa

SEQ ID NO: 2593363 - RNA, 22 nt, Human
uaaagguucaugcaaacuuuau

SEQ ID NO: 2593364 - RNA, 17 nt, Human
uaaaguaaagcuaaaau

SEQ ID NO: 2593365 - RNA, 15 nt, Human
uaaaguaaagcuaaa

SEQ ID NO: 2593366 - RNA, 14 nt, Human
uaaaguaaagcuaa

SEQ ID NO: 2593367 - RNA, 13 nt, Human
uaaaguaaagcua

SEQ ID NO: 2593368 - RNA, 20 nt, Human
uaaagguugacaauaaaugu

SEQ ID NO: 2593369 - RNA, 17 nt, Human
uaaaguaguccugugaa

SEQ ID NO: 2593370 - RNA, 19 nt, Human
uaaaguaguaaaaauuaaa

SEQ ID NO: 2593371 - RNA, 21 nt, Human
uaaaguagauuagaucuuuua

SEQ ID NO: 2593372 - RNA, 20 nt, Human
uaaaguaucaggauacuaua

SEQ ID NO: 2593373 - RNA, 14 nt, Human
uaaaguaucaugca

SEQ ID NO: 2593374 - RNA, 17 nt, Human
uaaaguauauauuuauu

SEQ ID NO: 2593375 - RNA, 19 nt, Human
uaaaguauauauagaaucu

SEQ ID NO: 2593376 - RNA, 14 nt, Human
uaaaguauauauuu

SEQ ID NO: 2593377 - RNA, 14 nt, Human
guuuucuuugaaug

SEQ ID NO: 2593378 - RNA, 18 nt, Human
guuuugaagcuacugugu

SEQ ID NO: 2593379 - RNA, 21 nt, Human
guuuugaaaagcuauuagcca

SEQ ID NO: 2593380 - RNA, 15 nt, Human
guuuugaaaagcuau

SEQ ID NO: 2593381 - RNA, 14 nt, Human
guuuugaaaagcua

SEQ ID NO: 2593382 - RNA, 13 nt, Human
guuuugaaaagcu

SEQ ID NO: 2593383 - RNA, 13 nt, Human
guuuugaaaugcu

SEQ ID NO: 2593384 - RNA, 17 nt, Human
guuuugaacuaauaaaa

SEQ ID NO: 2593385 - RNA, 22 nt, Human
guuuugaacuaauaaaagcaua

SEQ ID NO: 2593386 - RNA, 22 nt, Human
uaaagguuacaagccugcacaa

SEQ ID NO: 2593387 - RNA, 20 nt, Human
uaaaggugucuuccucccaa

SEQ ID NO: 2593388 - RNA, 19 nt, Human
uaaaggugucuuccuccca

SEQ ID NO: 2593389 - RNA, 17 nt, Human
uaaaggugucuuccucc

SEQ ID NO: 2593390 - RNA, 21 nt, Human
uaaagguggugaggcaauaaa

SEQ ID NO: 2593391 - RNA, 17 nt, Human
uaaaggugguaugugug

SEQ ID NO: 2593392 - RNA, 21 nt, Human
uaaaggugguaugugugugua

SEQ ID NO: 2593393 - RNA, 22 nt, Human
uaaaggugguauguguguguau

SEQ ID NO: 2593394 - RNA, 23 nt, Human
uaaaggugguauguguguguaug

SEQ ID NO: 2593395 - RNA, 20 nt, Human
uaaagguggugaggcaauaa

SEQ ID NO: 2593396 - RNA, 18 nt, Human
uaaaggguguacuuauau

SEQ ID NO: 2593397 - RNA, 19 nt, Human
guuuugaagcuacugugug

SEQ ID NO: 2593398 - RNA, 23 nt, Human
guuuugaacuaauaaaagcauaa

SEQ ID NO: 2593399 - RNA, 19 nt, Human
uaaaguaugguauugaaac

SEQ ID NO: 2593400 - RNA, 19 nt, Human
uaaaguaugaaucuaugcc

SEQ ID NO: 2593401 - RNA, 16 nt, Human
uaaaguaugaaucuau

SEQ ID NO: 2593402 - RNA, 15 nt, Human
uaaaguaugaaucua

SEQ ID NO: 2593403 - RNA, 14 nt, Human
uaaaguaugaaucu

SEQ ID NO: 2593404 - RNA, 17 nt, Human
uaaaguaucaugcauuc

SEQ ID NO: 2593405 - RNA, 16 nt, Human
uaaaguaucaugcauu

SEQ ID NO: 2593406 - RNA, 15 nt, Human
uaaaguaucaugcau

SEQ ID NO: 2593407 - RNA, 22 nt, Human
uaaaguauguaaacaggagaca

SEQ ID NO: 2593408 - RNA, 16 nt, Human
uaaaguauguaaacag

SEQ ID NO: 2593409 - RNA, 15 nt, Human
uaaaguauguaaaca

SEQ ID NO: 2593410 - RNA, 13 nt, Human
uaaaguauguaaa

SEQ ID NO: 2593411 - RNA, 22 nt, Human
uaaaguauguaaaguauguaaa

SEQ ID NO: 2593412 - RNA, 21 nt, Human
uaaaguauguaaaguauguaa

SEQ ID NO: 2593413 - RNA, 17 nt, Human
uaaaguauuuaauuagu

SEQ ID NO: 2593414 - RNA, 16 nt, Human
uaaaguauuuaauuag

SEQ ID NO: 2593415 - RNA, 14 nt, Human
uaaaguauuuaauu

SEQ ID NO: 2593416 - RNA, 12 nt, Human
uaaaguauuuaa

SEQ ID NO: 2593417 - RNA, 18 nt, Human
uaaaguauucuucucuuc

SEQ ID NO: 2593418 - RNA, 14 nt, Human
uaaaguauucuucu

SEQ ID NO: 2593419 - RNA, 13 nt, Human
uaaaguauucuuc

SEQ ID NO: 2593420 - RNA, 20 nt, Human
aaguuuuuauggcuuuugug

SEQ ID NO: 2593421 - RNA, 22 nt, Human
uaaaguauuuaauuagugcuaa

SEQ ID NO: 2593422 - RNA, 21 nt, Human
uaaaguauuuaauuagugcua

SEQ ID NO: 2593423 - RNA, 19 nt, Human
uaaaguauuuaauuagugc

SEQ ID NO: 2593424 - RNA, 14 nt, Human
aaguuuuguacaga

SEQ ID NO: 2593425 - RNA, 13 nt, Human
aaguuuuguacag

SEQ ID NO: 2593426 - RNA, 17 nt, Human
aauaaaaagaucacuuu

SEQ ID NO: 2593427 - RNA, 19 nt, Human
aauaaaaagaucacuuucu

SEQ ID NO: 2593428 - RNA, 13 nt, Human
aauaaaaaaaaga

SEQ ID NO: 2593429 - RNA, 14 nt, Human
aauaaaaaaaagaa

SEQ ID NO: 2593430 - RNA, 17 nt, Human
aaguuuuuguacuguaa

SEQ ID NO: 2593431 - RNA, 14 nt, Human
aaguuuuuguacug

SEQ ID NO: 2593432 - RNA, 13 nt, Human
aaguuuuuguacu

SEQ ID NO: 2593433 - RNA, 12 nt, Human
aaguuuuuguac

SEQ ID NO: 2593434 - RNA, 23 nt, Human
aauaaaaagaucacuuucucagu

SEQ ID NO: 2593435 - RNA, 11 nt, Human
aauaaaaaggc

SEQ ID NO: 2593436 - RNA, 13 nt, Human
aauaaaaaggcac

SEQ ID NO: 2593437 - RNA, 18 nt, Human
aauaaaaaggcaccuaua

SEQ ID NO: 2593438 - RNA, 19 nt, Human
aauaaaaagugacacagca

SEQ ID NO: 2593439 - RNA, 13 nt, Human
aauaaaaagugac

SEQ ID NO: 2593440 - RNA, 12 nt, Human
aauaaaaaguua

SEQ ID NO: 2593441 - RNA, 13 nt, Human
aauaaaaaguuaa

SEQ ID NO: 2593442 - RNA, 14 nt, Human
aauaaaaaguuaaa

SEQ ID NO: 2593443 - RNA, 20 nt, Human
aauaaaaagugacacagcag

SEQ ID NO: 2593444 - RNA, 15 nt, Human
aauaaaaaguuaaaa

SEQ ID NO: 2593445 - RNA, 13 nt, Human
aauaaaaccagcu

SEQ ID NO: 2593446 - RNA, 12 nt, Human
aauaaaaccuuu

SEQ ID NO: 2593447 - RNA, 13 nt, Human
aauaaaaccuuuc

SEQ ID NO: 2593448 - RNA, 14 nt, Human
aauaaaaccuuuca

SEQ ID NO: 2593449 - RNA, 23 nt, Human
aauaaaacauuuuaaauggacag

SEQ ID NO: 2593450 - RNA, 13 nt, Human
aauaaaacauuuu

SEQ ID NO: 2593451 - RNA, 12 nt, Human
aauaaaacauuu

SEQ ID NO: 2593452 - RNA, 11 nt, Human
aauaaaacauu

SEQ ID NO: 2593453 - RNA, 17 nt, Human
aauaaaacauuuucaca

SEQ ID NO: 2593454 - RNA, 19 nt, Human
aauaaaacauuuucacaca

SEQ ID NO: 2593455 - RNA, 18 nt, Human
aauaaaacuuuuuaaaau

SEQ ID NO: 2593456 - RNA, 15 nt, Human
aauaaaacuggcuuu

SEQ ID NO: 2593457 - RNA, 23 nt, Human
aauaaaaccuuucaaauuucaca

SEQ ID NO: 2593458 - RNA, 19 nt, Human
aauaaaguauuuaauuagu

SEQ ID NO: 2593459 - RNA, 16 nt, Human
aauaaaguauuuaauu

SEQ ID NO: 2593460 - RNA, 15 nt, Human
aauaaaguauuuaau

SEQ ID NO: 2593461 - RNA, 14 nt, Human
aauaaaguauuuaa

SEQ ID NO: 2593462 - RNA, 13 nt, Human
aauaaaguauuua

SEQ ID NO: 2593463 - RNA, 14 nt, Human
aauaaaguaucuac

SEQ ID NO: 2593464 - RNA, 19 nt, Human
aauaaaguaucaugcauuc

SEQ ID NO: 2593465 - RNA, 15 nt, Human
aauaaaguaucuaca

SEQ ID NO: 2593466 - RNA, 16 nt, Human
aauaaaguaucuacau

SEQ ID NO: 2593467 - RNA, 14 nt, Human
aauaaaacuuuuua

SEQ ID NO: 2593468 - RNA, 15 nt, Human
aauaaaacuuuuuaa

SEQ ID NO: 2593469 - RNA, 12 nt, Human
aauaaaacuuuu

SEQ ID NO: 2593470 - RNA, 15 nt, Human
aauaaaaccuuucaa

SEQ ID NO: 2593471 - RNA, 16 nt, Human
aauaaaaccuuucaaa

SEQ ID NO: 2593472 - RNA, 21 nt, Human
aauaaaaccuuucaaauuuca

SEQ ID NO: 2593473 - RNA, 22 nt, Human
aauaaaaccuuucaaauuucac

SEQ ID NO: 2593474 - RNA, 23 nt, Human
aauaaaguauuuaauuagugcua

SEQ ID NO: 2593475 - RNA, 22 nt, Human
aauaaaguauuuaauuagugcu

SEQ ID NO: 2593476 - RNA, 21 nt, Human
aauaaaguauuuaauuagugc

SEQ ID NO: 2593477 - RNA, 20 nt, Human
aauaaaguauuuaauuagug

SEQ ID NO: 2593478 - RNA, 11 nt, Human
aauaaauauga

SEQ ID NO: 2593479 - RNA, 10 nt, Human
aauaaauaug

SEQ ID NO: 2593480 - RNA, 15 nt, Human
aauaaauaucuguac

SEQ ID NO: 2593481 - RNA, 19 nt, Human
aauaaaguucugaguguuu

SEQ ID NO: 2593482 - RNA, 16 nt, Human
aauaaauaugccucuc

SEQ ID NO: 2593483 - RNA, 13 nt, Human
aauaaauaugccu

SEQ ID NO: 2593484 - RNA, 11 nt, Human
aauaaauaugc

SEQ ID NO: 2593485 - RNA, 13 nt, Human
aauaaauaugagu

SEQ ID NO: 2593486 - RNA, 20 nt, Human
aauaaauaugccucuccuuu

SEQ ID NO: 2593487 - RNA, 19 nt, Human
aauaaauaugccucuccuu

SEQ ID NO: 2593488 - RNA, 16 nt, Human
aauaaaucugacccag

SEQ ID NO: 2593489 - RNA, 17 nt, Human
aauaaaucugacccagu

SEQ ID NO: 2593490 - RNA, 20 nt, Human
aauaaaucugacccagugcc

SEQ ID NO: 2593491 - RNA, 22 nt, Human
aauaaaucuguugccaagcugg

SEQ ID NO: 2593492 - RNA, 20 nt, Human
aauaaaucugguagaaaaau

SEQ ID NO: 2593493 - RNA, 18 nt, Human
aauaaaugagcuauguau

SEQ ID NO: 2593494 - RNA, 16 nt, Human
aauaaaugagcuaugu

SEQ ID NO: 2593495 - RNA, 22 nt, Human
aauaaaugagcuauguauuaac

SEQ ID NO: 2593496 - RNA, 17 nt, Human
aauaaaugcaauaugua

SEQ ID NO: 2593497 - RNA, 19 nt, Human
aauaaaugcaauauguauu

SEQ ID NO: 2593498 - RNA, 16 nt, Human
aauaaaucauaaaacu

SEQ ID NO: 2593499 - RNA, 15 nt, Human
aauaaaucugaccca

SEQ ID NO: 2593500 - RNA, 21 nt, Human
aauaaaucauuaauacucuuc

SEQ ID NO: 2593501 - RNA, 14 nt, Human
aauaaauauuuaug

SEQ ID NO: 2593502 - RNA, 21 nt, Human
aauaacaaugaaaguugauaa

SEQ ID NO: 2593503 - RNA, 18 nt, Human
aauaaauuguauauucac

SEQ ID NO: 2593504 - RNA, 17 nt, Human
aauaaauuguauauuca

SEQ ID NO: 2593505 - RNA, 16 nt, Human
aauaaauuguauauuc

SEQ ID NO: 2593506 - RNA, 15 nt, Human
aauaaauuguauauu

SEQ ID NO: 2593507 - RNA, 13 nt, Human
aauaaauuguaua

SEQ ID NO: 2593508 - RNA, 12 nt, Human
aauaaauuguau

SEQ ID NO: 2593509 - RNA, 20 nt, Human
aauaaauuguaauuguaaag

SEQ ID NO: 2593510 - RNA, 20 nt, Human
aauaaauugcuccuugacau

SEQ ID NO: 2593511 - RNA, 16 nt, Human
aauaaauugcuccuug

SEQ ID NO: 2593512 - RNA, 14 nt, Human
aauaaaugucuugc

SEQ ID NO: 2593513 - RNA, 12 nt, Human
aauaaaugucuu

SEQ ID NO: 2593514 - RNA, 23 nt, Human
aauaaaugucuuuuuuuuaaugu

SEQ ID NO: 2593515 - RNA, 13 nt, Human
aauaaaugucuuu

SEQ ID NO: 2593516 - RNA, 23 nt, Human
aauaaaugguauagcaaauguuu

SEQ ID NO: 2593517 - RNA, 22 nt, Human
aauaaaugguauagcaaauguu

SEQ ID NO: 2593518 - RNA, 21 nt, Human
aauaaaugguauagcaaaugu

SEQ ID NO: 2593519 - RNA, 17 nt, Human
aauaaaugguauagcaa

SEQ ID NO: 2593520 - RNA, 21 nt, Human
aauaaauguaucuuauucaca

SEQ ID NO: 2593521 - RNA, 20 nt, Human
aauaaauguaucuuauucac

SEQ ID NO: 2593522 - RNA, 13 nt, Human
aauaaaugucauu

SEQ ID NO: 2593523 - RNA, 17 nt, Human
aauaaaugucauuaaaa

SEQ ID NO: 2593524 - RNA, 13 nt, Human
aauaacugugaag

SEQ ID NO: 2593525 - RNA, 21 nt, Human
aauaacuccuucuuguaguag

SEQ ID NO: 2593526 - RNA, 19 nt, Human
aauaacucuguggcauuau

SEQ ID NO: 2593527 - RNA, 15 nt, Human
aauaacgauaaaaga

SEQ ID NO: 2593528 - RNA, 17 nt, Human
aauaaccggauauauac

SEQ ID NO: 2593529 - RNA, 18 nt, Human
aauaaccucaaagugacu

SEQ ID NO: 2593530 - RNA, 22 nt, Human
aauaaccacuuaaaaaaugucc

SEQ ID NO: 2593531 - RNA, 18 nt, Human
aauaacccuuugguuuuu

SEQ ID NO: 2593532 - RNA, 24 nt, Human
aauaacaauguuaaggaaacucuu

SEQ ID NO: 2593533 - RNA, 20 nt, Human
aauaacaauguuaaggaaac

SEQ ID NO: 2593534 - RNA, 15 nt, Human
aauaacaauguuaag

SEQ ID NO: 2593535 - RNA, 14 nt, Human
aauaacaauguuaa

SEQ ID NO: 2593536 - RNA, 19 nt, Human
aauaacaaugugcucucgg

SEQ ID NO: 2593537 - RNA, 13 nt, Human
aauaacaauguua

SEQ ID NO: 2593538 - RNA, 13 nt, Human
aauaacaaugugc

SEQ ID NO: 2593539 - RNA, 13 nt, Human
aauaaauuguuug

SEQ ID NO: 2593540 - RNA, 13 nt, Human
aauaacauuaccu

SEQ ID NO: 2593541 - RNA, 15 nt, Human
aauaacacacagcua

SEQ ID NO: 2593542 - RNA, 12 nt, Human
aauaacacacau

SEQ ID NO: 2593543 - RNA, 20 nt, Human
aauaacacacauauaaacau

SEQ ID NO: 2593544 - RNA, 13 nt, Human
aauaacauuugug

SEQ ID NO: 2593545 - RNA, 20 nt, Human
aauaacauuaccuuacugug

SEQ ID NO: 2593546 - RNA, 15 nt, Human
aauaacauuaccuua

SEQ ID NO: 2593547 - RNA, 14 nt, Human
aauaacauuaccuu

SEQ ID NO: 2593548 - RNA, 14 nt, Human
aauaaccacuuaaa

SEQ ID NO: 2593549 - RNA, 21 nt, Human
aauaaccacuuaaaaaauguc

SEQ ID NO: 2593550 - RNA, 18 nt, Human
aauuuguuauuuugcaac

SEQ ID NO: 2593551 - RNA, 16 nt, Human
aauuuguuauaaugaa

SEQ ID NO: 2593552 - RNA, 22 nt, Human
aauuuguaaaaacagcauugcu

SEQ ID NO: 2593553 - RNA, 23 nt, Human
aauuuguaaaaacagcauugcuu

SEQ ID NO: 2593554 - RNA, 20 nt, Human
aauuugugauacaaugcugu

SEQ ID NO: 2593555 - RNA, 17 nt, Human
aauuugguucuaggccg

SEQ ID NO: 2593556 - RNA, 22 nt, Human
aauuugguucuaauagaacuca

SEQ ID NO: 2593557 - RNA, 18 nt, Human
aauuugggggacuuacau

SEQ ID NO: 2593558 - RNA, 21 nt, Human
aauuugggggacuuacaugau

SEQ ID NO: 2593559 - RNA, 16 nt, Human
aauuugguucuaauag

SEQ ID NO: 2593560 - RNA, 16 nt, Human
aauuugcuucacucaa

SEQ ID NO: 2593561 - RNA, 23 nt, Human
aauuugcauuaaauucacaaacu

SEQ ID NO: 2593562 - RNA, 15 nt, Human
aauuugcccucccau

SEQ ID NO: 2593563 - RNA, 13 nt, Human
uacuuuuuguuau

SEQ ID NO: 2593564 - RNA, 18 nt, Human
uacuuuuuucuuauuuaa

SEQ ID NO: 2593565 - RNA, 14 nt, Human
uacuuuuuucuuau

SEQ ID NO: 2593566 - RNA, 15 nt, Human
aauuugcauuaaauu

SEQ ID NO: 2593567 - RNA, 18 nt, Human
aauuugcauuaaauucac

SEQ ID NO: 2593568 - RNA, 21 nt, Human
aauuugcauuaaauucacaaa

SEQ ID NO: 2593569 - RNA, 17 nt, Human
aauuugcauuaaauuca

SEQ ID NO: 2593570 - RNA, 14 nt, Human
uacuuuuaaacugu

SEQ ID NO: 2593571 - RNA, 15 nt, Human
uacuuuuaaacugug

SEQ ID NO: 2593572 - RNA, 13 nt, Human
uacuuuuuccugg

SEQ ID NO: 2593573 - RNA, 21 nt, Human
uacuuuuaaacagugagccug

SEQ ID NO: 2593574 - RNA, 23 nt, Human
uacuuuguugcaaguacugcugu

SEQ ID NO: 2593575 - RNA, 22 nt, Human
aauuuuuucucuaggaaauauu

SEQ ID NO: 2593576 - RNA, 14 nt, Human
aauuuuuguaauuu

SEQ ID NO: 2593577 - RNA, 18 nt, Human
aauuuuugguugaauaaa

SEQ ID NO: 2593578 - RNA, 14 nt, Human
aauuuuugguugaa

SEQ ID NO: 2593579 - RNA, 16 nt, Human
aauuuuugguugaaua

SEQ ID NO: 2593580 - RNA, 17 nt, Human
aauuuuuuuaauuuugu

SEQ ID NO: 2593581 - RNA, 16 nt, Human
aauuuuuuuaauuuug

SEQ ID NO: 2593582 - RNA, 19 nt, Human
aauuuuuuuaauuuacaaa

SEQ ID NO: 2593583 - RNA, 20 nt, Human
aauuuuuuuaauuuuguauu

SEQ ID NO: 2593584 - RNA, 18 nt, Human
aauuuuuuuaauuuugua

SEQ ID NO: 2593585 - RNA, 15 nt, Human
aauuuuuuuagaaag

SEQ ID NO: 2593586 - RNA, 20 nt, Human
aauuuuuuuaaccaaaggug

SEQ ID NO: 2593587 - RNA, 19 nt, Human
aauuuuuuuaaccaaaggu

SEQ ID NO: 2593588 - RNA, 20 nt, Human
aauuuuuuuagaaagcauuu

SEQ ID NO: 2593589 - RNA, 18 nt, Human
aauuuuuuuagaaagcau

SEQ ID NO: 2593590 - RNA, 22 nt, Human
aauuuuuuuaucgucacugcuu

SEQ ID NO: 2593591 - RNA, 14 nt, Human
aauuuuuuuucaug

SEQ ID NO: 2593592 - RNA, 16 nt, Human
aauuuuugccuucauu

SEQ ID NO: 2593593 - RNA, 17 nt, Human
aauuuuugccuucauua

SEQ ID NO: 2593594 - RNA, 20 nt, Human
aauuuuugccuucauuaccu

SEQ ID NO: 2593595 - RNA, 21 nt, Human
aauuuuucuuauuucauuucu

SEQ ID NO: 2593596 - RNA, 13 nt, Human
aauuuuuaagcaa

SEQ ID NO: 2593597 - RNA, 20 nt, Human
aauuuuuaaauguaaaacau

SEQ ID NO: 2593598 - RNA, 22 nt, Human
aauuuuuaaaguauauauuuau

SEQ ID NO: 2593599 - RNA, 13 nt, Human
aauuuguuugugc

SEQ ID NO: 2593600 - RNA, 17 nt, Human
aauuuguuugaaaucuu

SEQ ID NO: 2593601 - RNA, 12 nt, Human
aauuuguugcau

SEQ ID NO: 2593602 - RNA, 18 nt, Human
aauuuguugaaauuaugu

SEQ ID NO: 2593603 - RNA, 16 nt, Human
aauuuguuugugcuuc

SEQ ID NO: 2593604 - RNA, 15 nt, Human
aauuuguuugugcuu

SEQ ID NO: 2593605 - RNA, 14 nt, Human
aauuuguuugugcu

SEQ ID NO: 2593606 - RNA, 22 nt, Human
aauuuuuaaucuuuaauuuuac

SEQ ID NO: 2593607 - RNA, 13 nt, Human
aauuuuuaaagua

SEQ ID NO: 2593608 - RNA, 19 nt, Human
aauuuuuaaaguauauauu

SEQ ID NO: 2593609 - RNA, 20 nt, Human
aauuuuuaaaguauauauuu

SEQ ID NO: 2593610 - RNA, 21 nt, Human
uagaugaaaaagcauguacag

SEQ ID NO: 2593611 - RNA, 20 nt, Human
uagaugaaaaagcauguaca

SEQ ID NO: 2593612 - RNA, 19 nt, Human
uagaugaaaaagcauguac

SEQ ID NO: 2593613 - RNA, 18 nt, Human
uagaugaaaaagcaugua

SEQ ID NO: 2593614 - RNA, 17 nt, Human
uagaugaaaaagcaugu

SEQ ID NO: 2593615 - RNA, 13 nt, Human
uagaugaaaaagc

SEQ ID NO: 2593616 - RNA, 23 nt, Human
uagaugaaaaagcauguacagug

SEQ ID NO: 2593617 - RNA, 22 nt, Human
uagaugaaaaagcauguacagu

SEQ ID NO: 2593618 - RNA, 15 nt, Human
uagaugaacucaacu

SEQ ID NO: 2593619 - RNA, 16 nt, Human
uagaugaaguuuuaca

SEQ ID NO: 2593620 - RNA, 15 nt, Human
uagaucccccagacu

SEQ ID NO: 2593621 - RNA, 18 nt, Human
uagauccacacacagagg

SEQ ID NO: 2593622 - RNA, 19 nt, Human
uagaucuccaggagaacug

SEQ ID NO: 2593623 - RNA, 20 nt, Human
uagaugcaguucugaagaag

SEQ ID NO: 2593624 - RNA, 21 nt, Human
uagaugcaguucugaagaaga

SEQ ID NO: 2593625 - RNA, 10 nt, Human
uagaugcuga

SEQ ID NO: 2593626 - RNA, 22 nt, Human
uagaugcucuaugugcuuguaa

SEQ ID NO: 2593627 - RNA, 17 nt, Human
uagcaaagauaucucau

SEQ ID NO: 2593628 - RNA, 19 nt, Human
uagcaaagauaucucaucu

SEQ ID NO: 2593629 - RNA, 12 nt, Human
acaaauauuuau

SEQ ID NO: 2593630 - RNA, 18 nt, Human
acaaauauuuauuuucuu

SEQ ID NO: 2593631 - RNA, 22 nt, Human
acaaauauuuauuuucuuucug

SEQ ID NO: 2593632 - RNA, 23 nt, Human
acaaauauuuauuuucuuucugu

SEQ ID NO: 2593633 - RNA, 12 nt, Human
acaaauaugcaa

SEQ ID NO: 2593634 - RNA, 17 nt, Human
acaaauauaagaauaaa

SEQ ID NO: 2593635 - RNA, 16 nt, Human
acaaauauaagaauaa

SEQ ID NO: 2593636 - RNA, 15 nt, Human
acaaauauaagaaua

SEQ ID NO: 2593637 - RNA, 14 nt, Human
acaaauauaagaau

SEQ ID NO: 2593638 - RNA, 19 nt, Human
acaaauaugcaaaagguuc

SEQ ID NO: 2593639 - RNA, 19 nt, Human
acaaauauaagaauaaaau

SEQ ID NO: 2593640 - RNA, 11 nt, Human
acaaauaugca

SEQ ID NO: 2593641 - RNA, 22 nt, Human
uagauaggucagugcaaauacu

SEQ ID NO: 2593642 - RNA, 17 nt, Human
uagauaggccaugggca

SEQ ID NO: 2593643 - RNA, 17 nt, Human
uagauaguuagaaccug

SEQ ID NO: 2593644 - RNA, 16 nt, Human
uagauagguaaauacc

SEQ ID NO: 2593645 - RNA, 16 nt, Human
uagauccacacacaga

SEQ ID NO: 2593646 - RNA, 23 nt, Human
acaaagcuucuaucccaggaggu

SEQ ID NO: 2593647 - RNA, 23 nt, Human
acaaagcuuggaagagccugcag

SEQ ID NO: 2593648 - RNA, 22 nt, Human
acaaagcuucuaucccaggagg

SEQ ID NO: 2593649 - RNA, 21 nt, Human
acaaagcuucuaucccaggag

SEQ ID NO: 2593650 - RNA, 20 nt, Human
acaaagcuucuaucccagga

SEQ ID NO: 2593651 - RNA, 21 nt, Human
acaaagcuuagcaggagagga

SEQ ID NO: 2593652 - RNA, 19 nt, Human
acaaagcuuagcaggagag

SEQ ID NO: 2593653 - RNA, 16 nt, Human
acaaagcuuagcagga

SEQ ID NO: 2593654 - RNA, 23 nt, Human
acaaagccuuaucaagugucuuc

SEQ ID NO: 2593655 - RNA, 19 nt, Human
acaaagccuuaucaagugu

SEQ ID NO: 2593656 - RNA, 15 nt, Human
acaaaguguguauua

SEQ ID NO: 2593657 - RNA, 13 nt, Human
acaaaguguguau

SEQ ID NO: 2593658 - RNA, 12 nt, Human
acaaagugugua

SEQ ID NO: 2593659 - RNA, 18 nt, Human
acaaagugagacagucca

SEQ ID NO: 2593660 - RNA, 19 nt, Human
acaaaguguguauuaaaaa

SEQ ID NO: 2593661 - RNA, 18 nt, Human
acaaaguguguauuaaaa

SEQ ID NO: 2593662 - RNA, 17 nt, Human
acaaaguguguauuaaa

SEQ ID NO: 2593663 - RNA, 16 nt, Human
acaaaguguguauuaa

SEQ ID NO: 2593664 - RNA, 15 nt, Human
acaaaguuguaugug

SEQ ID NO: 2593665 - RNA, 21 nt, Human
acaaaguuacuagguaacuuc

SEQ ID NO: 2593666 - RNA, 23 nt, Human
acaaaguuacuagguaacuucau

SEQ ID NO: 2593667 - RNA, 21 nt, Human
acaaagcgugguggacaugca

SEQ ID NO: 2593668 - RNA, 18 nt, Human
acaaagccuuaucaagug

SEQ ID NO: 2593669 - RNA, 20 nt, Human
acaaagcccaagggaucugg

SEQ ID NO: 2593670 - RNA, 18 nt, Human
acaaagcccuuccauguc

SEQ ID NO: 2593671 - RNA, 11 nt, Human
acaaagcccaa

SEQ ID NO: 2593672 - RNA, 13 nt, Human
acaaagcccaagg

SEQ ID NO: 2593673 - RNA, 16 nt, Human
acaaagccagaagcug

SEQ ID NO: 2593674 - RNA, 20 nt, Human
acaaagccagaagcugagca

SEQ ID NO: 2593675 - RNA, 14 nt, Human
acaaagcagccacg

SEQ ID NO: 2593676 - RNA, 17 nt, Human
acaaagccaacagucaa

SEQ ID NO: 2593677 - RNA, 11 nt, Human
acaaagccaga

SEQ ID NO: 2593678 - RNA, 23 nt, Human
acaaaagcaagacuguugcucaa

SEQ ID NO: 2593679 - RNA, 19 nt, Human
acaaagccaaacucugcca

SEQ ID NO: 2593680 - RNA, 11 nt, Human
acaaaacuucc

SEQ ID NO: 2593681 - RNA, 14 nt, Human
acaaaacuuuucua

SEQ ID NO: 2593682 - RNA, 16 nt, Human
acaaaacuagagacuc

SEQ ID NO: 2593683 - RNA, 17 nt, Human
acaaaacuacaugagaa

SEQ ID NO: 2593684 - RNA, 23 nt, Human
acaaaacuacaugagaacaaaca

SEQ ID NO: 2593685 - RNA, 23 nt, Human
aauuuuuuuucauguuuuaacaa

SEQ ID NO: 2593686 - RNA, 19 nt, Human
aauuuuuuuuuccuagccc

SEQ ID NO: 2593687 - RNA, 15 nt, Human
aauuuuuuuucaugu

SEQ ID NO: 2593688 - RNA, 19 nt, Human
uagcuagaaauaugauuuu

SEQ ID NO: 2593689 - RNA, 14 nt, Human
uagcuagaaguggg

SEQ ID NO: 2593690 - RNA, 19 nt, Human
uagcuagaagugggccagg

SEQ ID NO: 2593691 - RNA, 23 nt, Human
uagcuacaggaagcaccccaugc

SEQ ID NO: 2593692 - RNA, 21 nt, Human
uagcuaucagaagaccacaaa

SEQ ID NO: 2593693 - RNA, 15 nt, Human
uagcuauuacugucu

SEQ ID NO: 2593694 - RNA, 14 nt, Human
uagcuauuacuguc

SEQ ID NO: 2593695 - RNA, 13 nt, Human
uagcuauuacugu

SEQ ID NO: 2593696 - RNA, 20 nt, Human
uagcuagaagugggccagga

SEQ ID NO: 2593697 - RNA, 18 nt, Human
uagcucaaacguggcuuu

SEQ ID NO: 2593698 - RNA, 17 nt, Human
uagcucaaacguggcuu

SEQ ID NO: 2593699 - RNA, 11 nt, Human
uagcuauuuuu

SEQ ID NO: 2593700 - RNA, 16 nt, Human
uagcuauuuuuaugga

SEQ ID NO: 2593701 - RNA, 17 nt, Human
uagcuauuuuuauggaa

SEQ ID NO: 2593702 - RNA, 19 nt, Human
uagcuauuuuuauggaauu

SEQ ID NO: 2593703 - RNA, 22 nt, Human
uagcucaggaccugggaccucc

SEQ ID NO: 2593704 - RNA, 16 nt, Human
uagcucaggugucccu

SEQ ID NO: 2593705 - RNA, 16 nt, Human
uagcuuaccagaagcu

SEQ ID NO: 2593706 - RNA, 15 nt, Human
uagcuuagaccucag

SEQ ID NO: 2593707 - RNA, 21 nt, Human
uagcuuacaagccagcuggag

SEQ ID NO: 2593708 - RNA, 16 nt, Human
uagcuacuaauuuuaa

SEQ ID NO: 2593709 - RNA, 18 nt, Human
uagccuuuggcucuggag

SEQ ID NO: 2593710 - RNA, 16 nt, Human
uagccuuuggcucugg

SEQ ID NO: 2593711 - RNA, 16 nt, Human
uagccuucucuguuca

SEQ ID NO: 2593712 - RNA, 20 nt, Human
uagccuucucuguucauuuc

SEQ ID NO: 2593713 - RNA, 22 nt, Human
uagccuucucuguucauuuccu

SEQ ID NO: 2593714 - RNA, 22 nt, Human
uagccuugcccggauucuggga

SEQ ID NO: 2593715 - RNA, 23 nt, Human
uagccuuccuccacauccuuucu

SEQ ID NO: 2593716 - RNA, 18 nt, Human
uagccuuccuccacaucc

SEQ ID NO: 2593717 - RNA, 13 nt, Human
uagccuucucugu

SEQ ID NO: 2593718 - RNA, 14 nt, Human
uagccuucucuguu

SEQ ID NO: 2593719 - RNA, 15 nt, Human
uagccuucucuguuc

SEQ ID NO: 2593720 - RNA, 13 nt, Human
uagccuuccucca

SEQ ID NO: 2593721 - RNA, 22 nt, Human
uagccuuccguaacccaacucu

SEQ ID NO: 2593722 - RNA, 18 nt, Human
acaaugaagauaaaaaga

SEQ ID NO: 2593723 - RNA, 19 nt, Human
acaaucuuaaggggcagcu

SEQ ID NO: 2593724 - RNA, 18 nt, Human
acaaucuuaaggggcagc

SEQ ID NO: 2593725 - RNA, 20 nt, Human
acaaucuuaaggggcagcuu

SEQ ID NO: 2593726 - RNA, 18 nt, Human
acaaucugacauucucag

SEQ ID NO: 2593727 - RNA, 19 nt, Human
acaagcuccaagcucccag

SEQ ID NO: 2593728 - RNA, 17 nt, Human
acaagcuccaagcuccc

SEQ ID NO: 2593729 - RNA, 16 nt, Human
acaagcuccaagcucc

SEQ ID NO: 2593730 - RNA, 15 nt, Human
acaagcuccaagcuc

SEQ ID NO: 2593731 - RNA, 22 nt, Human
acaagcuccaagcucccaggca

SEQ ID NO: 2593732 - RNA, 14 nt, Human
acaaguuguguuug

SEQ ID NO: 2593733 - RNA, 15 nt, Human
acaagcucccaggcc

SEQ ID NO: 2593734 - RNA, 22 nt, Human
acaagcugcaaaucagccaugu

SEQ ID NO: 2593735 - RNA, 16 nt, Human
acaagcuccuggucuu

SEQ ID NO: 2593736 - RNA, 21 nt, Human
acaauauaaccacaaagcaca

SEQ ID NO: 2593737 - RNA, 19 nt, Human
acaauauaaaacuguacuu

SEQ ID NO: 2593738 - RNA, 18 nt, Human
acaauauaaaacuguacu

SEQ ID NO: 2593739 - RNA, 19 nt, Human
acaauaugcaaugugaagc

SEQ ID NO: 2593740 - RNA, 15 nt, Human
acaauaugaauacag

SEQ ID NO: 2593741 - RNA, 14 nt, Human
acaauaugcaaugu

SEQ ID NO: 2593742 - RNA, 21 nt, Human
acaauaugaauacagggcaug

SEQ ID NO: 2593743 - RNA, 18 nt, Human
acaaucucggcucacugc

SEQ ID NO: 2593744 - RNA, 20 nt, Human
acaaucucggcucacugcau

SEQ ID NO: 2593745 - RNA, 12 nt, Human
acaaucucaaau

SEQ ID NO: 2593746 - RNA, 14 nt, Human
acaauauugaacuu

SEQ ID NO: 2593747 - RNA, 15 nt, Human
acaauauugacuuug

SEQ ID NO: 2593748 - RNA, 16 nt, Human
acaauaaaacauuaau

SEQ ID NO: 2593749 - RNA, 12 nt, Human
acaauaaaacau

SEQ ID NO: 2593750 - RNA, 14 nt, Human
acaauaaaaauguu

SEQ ID NO: 2593751 - RNA, 16 nt, Human
acaauaaaaauguuua

SEQ ID NO: 2593752 - RNA, 14 nt, Human
acaaguuuuaaaua

SEQ ID NO: 2593753 - RNA, 15 nt, Human
acaaguuguguuuga

SEQ ID NO: 2593754 - RNA, 22 nt, Human
acaaguuuuucugucaagaaga

SEQ ID NO: 2593755 - RNA, 16 nt, Human
acaaguuuuucuguca

SEQ ID NO: 2593756 - RNA, 15 nt, Human
acaaguuuuucuguc

SEQ ID NO: 2593757 - RNA, 21 nt, Human
acaauacucauaaugugaagu

SEQ ID NO: 2593758 - RNA, 18 nt, Human
acaauaguaaccugggua

SEQ ID NO: 2593759 - RNA, 19 nt, Human
acaauagcuuuacccucag

SEQ ID NO: 2593760 - RNA, 20 nt, Human
acaauagcuuuacccucagg

SEQ ID NO: 2593761 - RNA, 20 nt, Human
acaauaaaaauggcucagau

SEQ ID NO: 2593762 - RNA, 20 nt, Human
acaauaaaauuuuuuuucau

SEQ ID NO: 2593763 - RNA, 20 nt, Human
acaauacucauaaugugaag

SEQ ID NO: 2593764 - RNA, 19 nt, Human
acaauacucauaaugugaa

SEQ ID NO: 2593765 - RNA, 18 nt, Human
acaauacucauaauguga

SEQ ID NO: 2593766 - RNA, 22 nt, Human
uagcaagugaauuuuucucuaa

SEQ ID NO: 2593767 - RNA, 16 nt, Human
uagcaaggcaugaugu

SEQ ID NO: 2593768 - RNA, 18 nt, Human
uagcaagugaauuuuucu

SEQ ID NO: 2593769 - RNA, 18 nt, Human
uagcaagacacaucccua

SEQ ID NO: 2593770 - RNA, 20 nt, Human
uagcaagauugcuuaaaaua

SEQ ID NO: 2593771 - RNA, 24 nt, Human
uagcaagauugcuuaaaauagcaa

SEQ ID NO: 2593772 - RNA, 12 nt, Human
uagcaaauacau

SEQ ID NO: 2593773 - RNA, 23 nt, Human
uagcaaauaauuuccugguguga

SEQ ID NO: 2593774 - RNA, 16 nt, Human
uagcaaagauaucuca

SEQ ID NO: 2593775 - RNA, 21 nt, Human
uagcaaauguuuugacaugaa

SEQ ID NO: 2593776 - RNA, 17 nt, Human
uagcaaauguuuugaca

SEQ ID NO: 2593777 - RNA, 12 nt, Human
uagcaagacaca

SEQ ID NO: 2593778 - RNA, 17 nt, Human
uagcaagacacaucccu

SEQ ID NO: 2593779 - RNA, 15 nt, Human
acaaaugccacacau

SEQ ID NO: 2593780 - RNA, 21 nt, Human
acaaauucugucucuggauua

SEQ ID NO: 2593781 - RNA, 16 nt, Human
acaaaugccacacauc

SEQ ID NO: 2593782 - RNA, 20 nt, Human
acaaaugccacacaucaccc

SEQ ID NO: 2593783 - RNA, 15 nt, Human
acaaauggacauagg

SEQ ID NO: 2593784 - RNA, 22 nt, Human
acaaaugcugcgcccuucccca

SEQ ID NO: 2593785 - RNA, 16 nt, Human
acaaauggaggccugu

SEQ ID NO: 2593786 - RNA, 18 nt, Human
acaacagauuugugaacu

SEQ ID NO: 2593787 - RNA, 23 nt, Human
acaacagugcuaaaaaugggacu

SEQ ID NO: 2593788 - RNA, 17 nt, Human
acaacagugcuaaaaau

SEQ ID NO: 2593789 - RNA, 17 nt, Human
acaacaucuuuuucuac

SEQ ID NO: 2593790 - RNA, 13 nt, Human
acaagacacagug

SEQ ID NO: 2593791 - RNA, 17 nt, Human
acaaauuuacagagaca

SEQ ID NO: 2593792 - RNA, 17 nt, Human
acaacagauuugugaac

SEQ ID NO: 2593793 - RNA, 16 nt, Human
acaacagauuugugaa

SEQ ID NO: 2593794 - RNA, 15 nt, Human
acaacagauuuguga

SEQ ID NO: 2593795 - RNA, 18 nt, Human
acaaauugcuugaaagaa

SEQ ID NO: 2593796 - RNA, 20 nt, Human
acaaauugcuuacuuuggaa

SEQ ID NO: 2593797 - RNA, 22 nt, Human
acaaauugaacucuuugaauga

SEQ ID NO: 2593798 - RNA, 15 nt, Human
acaaauucuguuucu

SEQ ID NO: 2593799 - RNA, 16 nt, Human
acaaauucuguuucuu

SEQ ID NO: 2593800 - RNA, 12 nt, Human
acaaauucuguu

SEQ ID NO: 2593801 - RNA, 13 nt, Human
acaaauguaugau

SEQ ID NO: 2593802 - RNA, 16 nt, Human
acaagaccacguuucu

SEQ ID NO: 2593803 - RNA, 19 nt, Human
acaagaccaccacuucgaa

SEQ ID NO: 2593804 - RNA, 15 nt, Human
acaagacagaagcug

SEQ ID NO: 2593805 - RNA, 14 nt, Human
acaagacacaguga

SEQ ID NO: 2593806 - RNA, 17 nt, Human
acaagaccacguuucua

SEQ ID NO: 2593807 - RNA, 22 nt, Human
acaagagcccaggccuccuaca

SEQ ID NO: 2593808 - RNA, 18 nt, Human
acaagagcuuaacagugu

SEQ ID NO: 2593809 - RNA, 19 nt, Human
acaagagcuuaacagugug

SEQ ID NO: 2593810 - RNA, 22 nt, Human
acaagaguuuauuuccaaauaa

SEQ ID NO: 2593811 - RNA, 13 nt, Human
acaagaucuuuca

SEQ ID NO: 2593812 - RNA, 14 nt, Human
acaagaucuuucag

SEQ ID NO: 2593813 - RNA, 16 nt, Human
acaagagcgaaacucc

SEQ ID NO: 2593814 - RNA, 17 nt, Human
acaagagcgaaacuccg

SEQ ID NO: 2593815 - RNA, 18 nt, Human
acaagaguuuauuuccaa

SEQ ID NO: 2593816 - RNA, 18 nt, Human
acaagauagagagcuauu

SEQ ID NO: 2593817 - RNA, 22 nt, Human
acaagcucacagaccuuugaac

SEQ ID NO: 2593818 - RNA, 13 nt, Human
acaagcuccaagc

SEQ ID NO: 2593819 - RNA, 17 nt, Human
acaagcgugagccacug

SEQ ID NO: 2593820 - RNA, 19 nt, Human
acaagccccaggcaggcug

SEQ ID NO: 2593821 - RNA, 18 nt, Human
acaagauucccagagaca

SEQ ID NO: 2593822 - RNA, 21 nt, Human
acaagauucccagagacagga

SEQ ID NO: 2593823 - RNA, 14 nt, Human
acaagauucccaga

SEQ ID NO: 2593824 - RNA, 15 nt, Human
acaagaucuuucagg

SEQ ID NO: 2593825 - RNA, 16 nt, Human
acaagaucuuucagga

SEQ ID NO: 2593826 - RNA, 20 nt, Human
acaagaucuuucaggaaaga

SEQ ID NO: 2593827 - RNA, 15 nt, Human
acaagauucccagag

SEQ ID NO: 2593828 - RNA, 16 nt, Human
acaagauucccagaga

SEQ ID NO: 2593829 - RNA, 17 nt, Human
acaagauucccagagac

SEQ ID NO: 2593830 - RNA, 16 nt, Human
acaagccccaggcagg

SEQ ID NO: 2593831 - RNA, 17 nt, Human
acaagccccaggcaggc

SEQ ID NO: 2593832 - RNA, 14 nt, Human
acaagcccccccuu

SEQ ID NO: 2593833 - RNA, 18 nt, Human
acaagcccccccuuccac

SEQ ID NO: 2593834 - RNA, 17 nt, Human
acaagcccccccuucca

SEQ ID NO: 2593835 - RNA, 20 nt, Human
acaagauuuuaaagacaugu

SEQ ID NO: 2593836 - RNA, 15 nt, Human
acaagccccaggcag

SEQ ID NO: 2593837 - RNA, 23 nt, Human
aauugauuugcauugaacacaaa

SEQ ID NO: 2593838 - RNA, 14 nt, Human
aauugcaaaucuug

SEQ ID NO: 2593839 - RNA, 18 nt, Human
aauugcaaaucuugaaau

SEQ ID NO: 2593840 - RNA, 14 nt, Human
aauugcacucuaaa

SEQ ID NO: 2593841 - RNA, 21 nt, Human
aauugcacaauauugaacuuu

SEQ ID NO: 2593842 - RNA, 14 nt, Human
aauugcacuuuuaa

SEQ ID NO: 2593843 - RNA, 15 nt, Human
aauugcacucuaaaa

SEQ ID NO: 2593844 - RNA, 18 nt, Human
aauugcacuuuuaaaccu

SEQ ID NO: 2593845 - RNA, 14 nt, Human
aauugcagaacuaa

SEQ ID NO: 2593846 - RNA, 13 nt, Human
aauugcagacugu

SEQ ID NO: 2593847 - RNA, 11 nt, Human
aauugcauuga

SEQ ID NO: 2593848 - RNA, 23 nt, Human
aauugcuuacuuuggaauacauu

SEQ ID NO: 2593849 - RNA, 19 nt, Human
aauugaggacuauggaaau

SEQ ID NO: 2593850 - RNA, 17 nt, Human
aauugaggggauuaaua

SEQ ID NO: 2593851 - RNA, 23 nt, Human
aauugauuauucugauuccacuu

SEQ ID NO: 2593852 - RNA, 22 nt, Human
aauugauuauucugauuccacu

SEQ ID NO: 2593853 - RNA, 14 nt, Human
aauugauuauucug

SEQ ID NO: 2593854 - RNA, 14 nt, Human
aauugauuugcauu

SEQ ID NO: 2593855 - RNA, 16 nt, Human
aauugauuugcauuga

SEQ ID NO: 2593856 - RNA, 20 nt, Human
aauugauuugcauugaacac

SEQ ID NO: 2593857 - RNA, 22 nt, Human
aauugauuugcauugaacacaa

SEQ ID NO: 2593858 - RNA, 13 nt, Human
aauugauuugcau

SEQ ID NO: 2593859 - RNA, 15 nt, Human
aauugauuucaagac

SEQ ID NO: 2593860 - RNA, 13 nt, Human
uacuguaauuccu

SEQ ID NO: 2593861 - RNA, 15 nt, Human
uacuguaauuccuca

SEQ ID NO: 2593862 - RNA, 16 nt, Human
uacuguaauuccucaa

SEQ ID NO: 2593863 - RNA, 19 nt, Human
uacuguacagacagaaaaa

SEQ ID NO: 2593864 - RNA, 23 nt, Human
uacuguacagacagaaaaaacug

SEQ ID NO: 2593865 - RNA, 12 nt, Human
uacuguaauuuu

SEQ ID NO: 2593866 - RNA, 14 nt, Human
uacuguaauuuuau

SEQ ID NO: 2593867 - RNA, 20 nt, Human
uacuguaauuuuauaugaag

SEQ ID NO: 2593868 - RNA, 19 nt, Human
uacuguacaaugacuuuau

SEQ ID NO: 2593869 - RNA, 18 nt, Human
aauugacuucgacuguga

SEQ ID NO: 2593870 - RNA, 20 nt, Human
uacugacauguggggccagg

SEQ ID NO: 2593871 - RNA, 21 nt, Human
aauugacuuauuuauauaaau

SEQ ID NO: 2593872 - RNA, 18 nt, Human
aauugaggacacugauau

SEQ ID NO: 2593873 - RNA, 22 nt, Human
aauugagagaauggaaaacaga

SEQ ID NO: 2593874 - RNA, 15 nt, Human
aauugagauuagagg

SEQ ID NO: 2593875 - RNA, 16 nt, Human
uacucuagauuuuguu

SEQ ID NO: 2593876 - RNA, 15 nt, Human
uacucuagauuuugu

SEQ ID NO: 2593877 - RNA, 12 nt, Human
uacucuagauuu

SEQ ID NO: 2593878 - RNA, 14 nt, Human
uacucuagaugaag

SEQ ID NO: 2593879 - RNA, 13 nt, Human
uacucuacugaua

SEQ ID NO: 2593880 - RNA, 16 nt, Human
uacucucccauggcuu

SEQ ID NO: 2593881 - RNA, 18 nt, Human
uacucuccaaccuggaca

SEQ ID NO: 2593882 - RNA, 14 nt, Human
uacucuccaaccug

SEQ ID NO: 2593883 - RNA, 16 nt, Human
uacucuccaaccugga

SEQ ID NO: 2593884 - RNA, 12 nt, Human
uacucuccuaga

SEQ ID NO: 2593885 - RNA, 13 nt, Human
uacucuuucugua

SEQ ID NO: 2593886 - RNA, 14 nt, Human
uacucuuucuguau

SEQ ID NO: 2593887 - RNA, 15 nt, Human
uacucuuucuguaua

SEQ ID NO: 2593888 - RNA, 22 nt, Human
uacucuuugagauagaagaacu

SEQ ID NO: 2593889 - RNA, 14 nt, Human
uacucuuuuuguuu

SEQ ID NO: 2593890 - RNA, 16 nt, Human
uacucuuucuguauau

SEQ ID NO: 2593891 - RNA, 14 nt, Human
uacucuccuagaga

SEQ ID NO: 2593892 - RNA, 17 nt, Human
uacucuuugagauagaa

SEQ ID NO: 2593893 - RNA, 22 nt, Human
uacugaacaaucaaagcacuug

SEQ ID NO: 2593894 - RNA, 22 nt, Human
uacugacauguggggccagguc

SEQ ID NO: 2593895 - RNA, 20 nt, Human
uacugaaagguuacccugua

SEQ ID NO: 2593896 - RNA, 17 nt, Human
uacugagagugaacaaa

SEQ ID NO: 2593897 - RNA, 14 nt, Human
uacugacuuucuca

SEQ ID NO: 2593898 - RNA, 17 nt, Human
uacugacugagaauaua

SEQ ID NO: 2593899 - RNA, 16 nt, Human
uacuguaauuugugau

SEQ ID NO: 2593900 - RNA, 17 nt, Human
uacuguaauuugugaua

SEQ ID NO: 2593901 - RNA, 23 nt, Human
uacugguccaaaagauugcugaa

SEQ ID NO: 2593902 - RNA, 18 nt, Human
uacuggucuuguggaauu

SEQ ID NO: 2593903 - RNA, 15 nt, Human
uacuguaauuuguga

SEQ ID NO: 2593904 - RNA, 20 nt, Human
uacugagaaaagccucucca

SEQ ID NO: 2593905 - RNA, 16 nt, Human
uacugggagccuaccc

SEQ ID NO: 2593906 - RNA, 19 nt, Human
uacugagagugaacaaauu

SEQ ID NO: 2593907 - RNA, 13 nt, Human
uacugguccaaaa

SEQ ID NO: 2593908 - RNA, 18 nt, Human
uacugguccaaaagauug

SEQ ID NO: 2593909 - RNA, 14 nt, Human
aaugugggcagaga

SEQ ID NO: 2593910 - RNA, 19 nt, Human
aaugugguuauuucucuga

SEQ ID NO: 2593911 - RNA, 18 nt, Human
aaugugguuauuucucug

SEQ ID NO: 2593912 - RNA, 19 nt, Human
aauguguaauuuuguucua

SEQ ID NO: 2593913 - RNA, 16 nt, Human
aauguguaauuuuguu

SEQ ID NO: 2593914 - RNA, 15 nt, Human
aauguguaauuuugu

SEQ ID NO: 2593915 - RNA, 23 nt, Human
aaugugguuauuucucugauuug

SEQ ID NO: 2593916 - RNA, 21 nt, Human
aaugugguuauuucucugauu

SEQ ID NO: 2593917 - RNA, 22 nt, Human
aauguguauuacaaauauuuug

SEQ ID NO: 2593918 - RNA, 16 nt, Human
aauguguacaacuuaa

SEQ ID NO: 2593919 - RNA, 19 nt, Human
aauguguaucggaugcuuu

SEQ ID NO: 2593920 - RNA, 22 nt, Human
aauugaauaaugguaccagaua

SEQ ID NO: 2593921 - RNA, 21 nt, Human
aauugaauaaugguaccagau

SEQ ID NO: 2593922 - RNA, 14 nt, Human
aauugaauaauggu

SEQ ID NO: 2593923 - RNA, 17 nt, Human
aaugugugugguuuuuu

SEQ ID NO: 2593924 - RNA, 23 nt, Human
aauugaauaaugguaccagauaa

SEQ ID NO: 2593925 - RNA, 16 nt, Human
aauguguggccugcac

SEQ ID NO: 2593926 - RNA, 19 nt, Human
aaugugugccauagaguuu

SEQ ID NO: 2593927 - RNA, 23 nt, Human
aauugacagaucaagcugugaga

SEQ ID NO: 2593928 - RNA, 24 nt, Human
uacgcuccaucgcugucaucucag

SEQ ID NO: 2593929 - RNA, 14 nt, Human
aauugacauugcuu

SEQ ID NO: 2593930 - RNA, 13 nt, Human
uacgcucuccuuu

SEQ ID NO: 2593931 - RNA, 21 nt, Human
aauugaaucaguauaaacaaa

SEQ ID NO: 2593932 - RNA, 21 nt, Human
aauugacagaucaagcuguga

SEQ ID NO: 2593933 - RNA, 19 nt, Human
aauugacagaucaagcugu

SEQ ID NO: 2593934 - RNA, 19 nt, Human
aauugaauggucagcguug

SEQ ID NO: 2593935 - RNA, 18 nt, Human
aauugacagaucaagcug

SEQ ID NO: 2593936 - RNA, 13 nt, Human
uacgcugaagaug

SEQ ID NO: 2593937 - RNA, 14 nt, Human
uacgcuuugauuca

SEQ ID NO: 2593938 - RNA, 15 nt, Human
uacgcuuugauucau

SEQ ID NO: 2593939 - RNA, 15 nt, Human
uacgcucuccuuucu

SEQ ID NO: 2593940 - RNA, 19 nt, Human
uacgcucuccuuucuuucu

SEQ ID NO: 2593941 - RNA, 22 nt, Human
uacgcugaagauggcauccugu

SEQ ID NO: 2593942 - RNA, 21 nt, Human
uacgcucuccuuucuuucuaa

SEQ ID NO: 2593943 - RNA, 15 nt, Human
uacgucugacaggca

SEQ ID NO: 2593944 - RNA, 14 nt, Human
uacggacacccccu

SEQ ID NO: 2593945 - RNA, 13 nt, Human
uacggacaccccc

SEQ ID NO: 2593946 - RNA, 14 nt, Human
uacuaaaaauacaa

SEQ ID NO: 2593947 - RNA, 13 nt, Human
uacgugaguccug

SEQ ID NO: 2593948 - RNA, 21 nt, Human
uacgucugggagaaauugaca

SEQ ID NO: 2593949 - RNA, 13 nt, Human
uacgucugggaga

SEQ ID NO: 2593950 - RNA, 16 nt, Human
uacgucugacaggcaa

SEQ ID NO: 2593951 - RNA, 22 nt, Human
uacuagaagaugaauacaaaca

SEQ ID NO: 2593952 - RNA, 17 nt, Human
uacuagaagaugaauac

SEQ ID NO: 2593953 - RNA, 15 nt, Human
uacuagaugucuuua

SEQ ID NO: 2593954 - RNA, 19 nt, Human
uacuagaugucuuuaggca

SEQ ID NO: 2593955 - RNA, 19 nt, Human
uacuagagucugaacagcu

SEQ ID NO: 2593956 - RNA, 14 nt, Human
uacuagaugucuuu

SEQ ID NO: 2593957 - RNA, 18 nt, Human
uacuaaaaauacaaaaaa

SEQ ID NO: 2593958 - RNA, 20 nt, Human
uacuaaaaguucuucuccaa

SEQ ID NO: 2593959 - RNA, 14 nt, Human
uacgugagccaggu

SEQ ID NO: 2593960 - RNA, 14 nt, Human
uacgucugggagaa

SEQ ID NO: 2593961 - RNA, 14 nt, Human
uacuaaaaaugcaa

SEQ ID NO: 2593962 - RNA, 19 nt, Human
uacuauuuuuacugccacu

SEQ ID NO: 2593963 - RNA, 18 nt, Human
uacuauuuuuacugccac

SEQ ID NO: 2593964 - RNA, 15 nt, Human
uacuauuuuuacugc

SEQ ID NO: 2593965 - RNA, 14 nt, Human
uacuauuuuuacug

SEQ ID NO: 2593966 - RNA, 16 nt, Human
uacucuacccucuuag

SEQ ID NO: 2593967 - RNA, 22 nt, Human
uacucuacccucuuagaaaaac

SEQ ID NO: 2593968 - RNA, 13 nt, Human
uacuauuuagaua

SEQ ID NO: 2593969 - RNA, 14 nt, Human
uacuauuuuacuuc

SEQ ID NO: 2593970 - RNA, 19 nt, Human
uacuauuuuacuucuagag

SEQ ID NO: 2593971 - RNA, 13 nt, Human
uacuauuuuuacu

SEQ ID NO: 2593972 - RNA, 18 nt, Human
uacuauuuuacuucuaga

SEQ ID NO: 2593973 - RNA, 19 nt, Human
uacuauuuaaagccuccuc

SEQ ID NO: 2593974 - RNA, 12 nt, Human
uacuauuuaaag

SEQ ID NO: 2593975 - RNA, 21 nt, Human
uacuagggaucccucaucugu

SEQ ID NO: 2593976 - RNA, 22 nt, Human
uacuauuuaaagccuccucauc

SEQ ID NO: 2593977 - RNA, 21 nt, Human
uacuauuuaaagccuccucau

SEQ ID NO: 2593978 - RNA, 13 nt, Human
uacuagguaacuu

SEQ ID NO: 2593979 - RNA, 18 nt, Human
uacuagggaaaugccuuu

SEQ ID NO: 2593980 - RNA, 17 nt, Human
uacuagcauaugaguuu

SEQ ID NO: 2593981 - RNA, 23 nt, Human
uacuaggcuuaauaccuggguga

SEQ ID NO: 2593982 - RNA, 18 nt, Human
uacuagggagaagguuuc

SEQ ID NO: 2593983 - RNA, 19 nt, Human
uacuucuuaggguuaugau

SEQ ID NO: 2593984 - RNA, 15 nt, Human
uacuucugcuacaua

SEQ ID NO: 2593985 - RNA, 20 nt, Human
uacuucuccacccugcucuc

SEQ ID NO: 2593986 - RNA, 13 nt, Human
uacuucugaggua

SEQ ID NO: 2593987 - RNA, 21 nt, Human
uacuucugagggcaucuuggu

SEQ ID NO: 2593988 - RNA, 22 nt, Human
uacuucguguccgacucuucug

SEQ ID NO: 2593989 - RNA, 21 nt, Human
uacuucuagagauaguacaua

SEQ ID NO: 2593990 - RNA, 14 nt, Human
uacuucuccagccu

SEQ ID NO: 2593991 - RNA, 14 nt, Human
uacuucuugaaggu

SEQ ID NO: 2593992 - RNA, 16 nt, Human
uacuucuuauacauuu

SEQ ID NO: 2593993 - RNA, 14 nt, Human
uacuucuuauacau

SEQ ID NO: 2593994 - RNA, 15 nt, Human
uacuucuuauacauu

SEQ ID NO: 2593995 - RNA, 14 nt, Human
uacuuugacuuuuu

SEQ ID NO: 2593996 - RNA, 14 nt, Human
uacuuugaagucau

SEQ ID NO: 2593997 - RNA, 18 nt, Human
uacuuugaagucauacca

SEQ ID NO: 2593998 - RNA, 19 nt, Human
uacuuugaaaccagaaaau

SEQ ID NO: 2593999 - RNA, 16 nt, Human
uacuuugucugaaaaa

SEQ ID NO: 2594000 - RNA, 14 nt, Human
uacuuugucugaaa

SEQ ID NO: 2594001 - RNA, 11 nt, Human
uacuuugucag

SEQ ID NO: 2594002 - RNA, 23 nt, Human
uacuuugauauuuucaacgcagc

SEQ ID NO: 2594003 - RNA, 20 nt, Human
uacuuuguccuuuuuguuau

SEQ ID NO: 2594004 - RNA, 20 nt, Human
uacuugaaaucuaggauuau

SEQ ID NO: 2594005 - RNA, 22 nt, Human
uacuuuccacuugauuuugcaa

SEQ ID NO: 2594006 - RNA, 19 nt, Human
uacuuuccuuuccccagcc

SEQ ID NO: 2594007 - RNA, 17 nt, Human
uacuuucguacauuggc

SEQ ID NO: 2594008 - RNA, 20 nt, Human
uacuuuccuuuccccagccc

SEQ ID NO: 2594009 - RNA, 15 nt, Human
uacuugaaaauuaac

SEQ ID NO: 2594010 - RNA, 16 nt, Human
uacuucuuugcuuugc

SEQ ID NO: 2594011 - RNA, 18 nt, Human
uacuucuucauucaauac

SEQ ID NO: 2594012 - RNA, 18 nt, Human
aauuugcaagucauggcu

SEQ ID NO: 2594013 - RNA, 13 nt, Human
aauuugauugauu

SEQ ID NO: 2594014 - RNA, 14 nt, Human
aauuugauugauuu

SEQ ID NO: 2594015 - RNA, 15 nt, Human
aauuugauugauuug

SEQ ID NO: 2594016 - RNA, 16 nt, Human
aauuugauugauuuga

SEQ ID NO: 2594017 - RNA, 17 nt, Human
aauuugauuauuaacau

SEQ ID NO: 2594018 - RNA, 12 nt, Human
aauuugauugau

SEQ ID NO: 2594019 - RNA, 15 nt, Human
aauuucuuugccugu

SEQ ID NO: 2594020 - RNA, 21 nt, Human
aauuucuucacuguugaaaau

SEQ ID NO: 2594021 - RNA, 18 nt, Human
aauuucuuugccuguuca

SEQ ID NO: 2594022 - RNA, 18 nt, Human
aauuugaaaauaauuguu

SEQ ID NO: 2594023 - RNA, 23 nt, Human
aauuugaaaacauaaucugcaaa

SEQ ID NO: 2594024 - RNA, 19 nt, Human
aauuugaaaauaauuguuc

SEQ ID NO: 2594025 - RNA, 15 nt, Human
aauuugauuucuauu

SEQ ID NO: 2594026 - RNA, 17 nt, Human
aauuugauugauuugaa

SEQ ID NO: 2594027 - RNA, 20 nt, Human
aauuugauugauuugaagaa

SEQ ID NO: 2594028 - RNA, 15 nt, Human
uacuuauuacugcua

SEQ ID NO: 2594029 - RNA, 14 nt, Human
uacuuauuacugcu

SEQ ID NO: 2594030 - RNA, 20 nt, Human
uacuuaucauccacauuguu

SEQ ID NO: 2594031 - RNA, 13 nt, Human
uacuuauuccaga

SEQ ID NO: 2594032 - RNA, 14 nt, Human
uacuuccccuuccu

SEQ ID NO: 2594033 - RNA, 15 nt, Human
uacuuccccuuccua

SEQ ID NO: 2594034 - RNA, 18 nt, Human
uacuuccccuuccuaauu

SEQ ID NO: 2594035 - RNA, 20 nt, Human
uacuuccccuuccuaauucc

SEQ ID NO: 2594036 - RNA, 17 nt, Human
uacuuauuuuugacagu

SEQ ID NO: 2594037 - RNA, 19 nt, Human
uacuuauuuuugacagugu

SEQ ID NO: 2594038 - RNA, 23 nt, Human
uacuucccauuuuggaaguuuuc

SEQ ID NO: 2594039 - RNA, 18 nt, Human
uacuucuccacccugcuc

SEQ ID NO: 2594040 - RNA, 13 nt, Human
uacuucuccaccc

SEQ ID NO: 2594041 - RNA, 23 nt, Human
uacuuccugugacuucagcucug

SEQ ID NO: 2594042 - RNA, 14 nt, Human
uacuuccuccuccc

SEQ ID NO: 2594043 - RNA, 19 nt, Human
uacuuccuaucaagccagu

SEQ ID NO: 2594044 - RNA, 18 nt, Human
uacuucgucuucuaauuu

SEQ ID NO: 2594045 - RNA, 17 nt, Human
uacuucgucuucuaauu

SEQ ID NO: 2594046 - RNA, 16 nt, Human
uacuuccuccucccca

SEQ ID NO: 2594047 - RNA, 17 nt, Human
aauuuacagagacagaa

SEQ ID NO: 2594048 - RNA, 18 nt, Human
aauuuacagagacagaaa

SEQ ID NO: 2594049 - RNA, 17 nt, Human
aauuuaccugaagucuu

SEQ ID NO: 2594050 - RNA, 15 nt, Human
aauuuacauacucug

SEQ ID NO: 2594051 - RNA, 15 nt, Human
aauuuaccugaaguc

SEQ ID NO: 2594052 - RNA, 14 nt, Human
aauuuacuugccau

SEQ ID NO: 2594053 - RNA, 21 nt, Human
aauuuacaaaguguguauuaa

SEQ ID NO: 2594054 - RNA, 19 nt, Human
aauuuacaaaguguguauu

SEQ ID NO: 2594055 - RNA, 15 nt, Human
aauuuaguuauugau

SEQ ID NO: 2594056 - RNA, 18 nt, Human
aauuuacaaaguguguau

SEQ ID NO: 2594057 - RNA, 14 nt, Human
aauuuaagugcgug

SEQ ID NO: 2594058 - RNA, 14 nt, Human
aauuuaaguaucuu

SEQ ID NO: 2594059 - RNA, 21 nt, Human
aauuuaagcauuguuugcuua

SEQ ID NO: 2594060 - RNA, 23 nt, Human
aauuuaagcauuguuugcuuauu

SEQ ID NO: 2594061 - RNA, 11 nt, Human
aauuuaagcau

SEQ ID NO: 2594062 - RNA, 12 nt, Human
aauuuaagcauu

SEQ ID NO: 2594063 - RNA, 13 nt, Human
aauuuaagcauug

SEQ ID NO: 2594064 - RNA, 14 nt, Human
aauuuaagcauugu

SEQ ID NO: 2594065 - RNA, 15 nt, Human
aauuuaagcauuguu

SEQ ID NO: 2594066 - RNA, 16 nt, Human
aauuuaagcauuguuu

SEQ ID NO: 2594067 - RNA, 23 nt, Human
aauuuaaauauaauucuguaaau

SEQ ID NO: 2594068 - RNA, 20 nt, Human
aauuuaaauauaauucugua

SEQ ID NO: 2594069 - RNA, 19 nt, Human
aauuuaaauauaauucugu

SEQ ID NO: 2594070 - RNA, 16 nt, Human
aauuuaaauauaauuc

SEQ ID NO: 2594071 - RNA, 18 nt, Human
aauuggaccauccuauuu

SEQ ID NO: 2594072 - RNA, 15 nt, Human
aauuggagcucgugg

SEQ ID NO: 2594073 - RNA, 20 nt, Human
aauuggaacagaauguuuua

SEQ ID NO: 2594074 - RNA, 20 nt, Human
aauuggaagcugcccugccc

SEQ ID NO: 2594075 - RNA, 11 nt, Human
aauugcuuuga

SEQ ID NO: 2594076 - RNA, 10 nt, Human
aauugcuuug

SEQ ID NO: 2594077 - RNA, 22 nt, Human
aauugcuuuaccuuuuuucuua

SEQ ID NO: 2594078 - RNA, 15 nt, Human
aauugcuugaaagaa

SEQ ID NO: 2594079 - RNA, 17 nt, Human
aauugcuugaaagaaaa

SEQ ID NO: 2594080 - RNA, 22 nt, Human
aauugcuugaaagaaaauaugc

SEQ ID NO: 2594081 - RNA, 13 nt, Human
aauuuauuauggc

SEQ ID NO: 2594082 - RNA, 14 nt, Human
aauuuauuauggca

SEQ ID NO: 2594083 - RNA, 19 nt, Human
aauuuauuaguuaauauau

SEQ ID NO: 2594084 - RNA, 13 nt, Human
aauuucuauuaaa

SEQ ID NO: 2594085 - RNA, 19 nt, Human
aauuucucccagucauuua

SEQ ID NO: 2594086 - RNA, 21 nt, Human
aauuucuuacuaaacauuuug

SEQ ID NO: 2594087 - RNA, 20 nt, Human
aauuucuucacuguugaaaa

SEQ ID NO: 2594088 - RNA, 20 nt, Human
aauuucuuacuaaacauuuu

SEQ ID NO: 2594089 - RNA, 22 nt, Human
aauuucuuuauguaaucuaugu

SEQ ID NO: 2594090 - RNA, 20 nt, Human
aauuucuugguaagaagccg

SEQ ID NO: 2594091 - RNA, 17 nt, Human
aauuucuugguaagaag

SEQ ID NO: 2594092 - RNA, 17 nt, Human
aauuuauuaauugcuuu

SEQ ID NO: 2594093 - RNA, 15 nt, Human
aauuuauuaaaauga

SEQ ID NO: 2594094 - RNA, 18 nt, Human
aauuuauuaauugcuuug

SEQ ID NO: 2594095 - RNA, 18 nt, Human
aauuuauuaguuaauaua

SEQ ID NO: 2594096 - RNA, 17 nt, Human
aauuuauuaguuaauau

SEQ ID NO: 2594097 - RNA, 19 nt, Human
aauuuauuaauugcuuuga

SEQ ID NO: 2594098 - RNA, 17 nt, Human
aauuuaucacacuucug

SEQ ID NO: 2594099 - RNA, 17 nt, Human
aauuuauacaauaucau

SEQ ID NO: 2594100 - RNA, 20 nt, Human
aauuuauauacaaccugcuu

SEQ ID NO: 2594101 - RNA, 22 nt, Human
aauuuauaaacuuuuuucuuac

SEQ ID NO: 2594102 - RNA, 15 nt, Human
aauuuauacaauauc

SEQ ID NO: 2594103 - RNA, 16 nt, Human
aauuuaguuuuuguuc

SEQ ID NO: 2594104 - RNA, 17 nt, Human
aauuuaguuuuuguucu

SEQ ID NO: 2594105 - RNA, 20 nt, Human
aauuuaguuuuuguucuuaa

SEQ ID NO: 2594106 - RNA, 18 nt, Human
aauuuaguuuuuguucuu

SEQ ID NO: 2594107 - RNA, 13 nt, Human
uaugaaauaaaga

SEQ ID NO: 2594108 - RNA, 23 nt, Human
uaugaaagauggcugugccucug

SEQ ID NO: 2594109 - RNA, 22 nt, Human
uaugaaagauggcugugccucu

SEQ ID NO: 2594110 - RNA, 20 nt, Human
uaugaaagauggcugugccu

SEQ ID NO: 2594111 - RNA, 17 nt, Human
uaucuuugauucuccuu

SEQ ID NO: 2594112 - RNA, 13 nt, Human
uaucuuucuacag

SEQ ID NO: 2594113 - RNA, 12 nt, Human
uaucuuucuaca

SEQ ID NO: 2594114 - RNA, 16 nt, Human
uaucuuugauucuccu

SEQ ID NO: 2594115 - RNA, 23 nt, Human
uaucuuucgugauaaacuuugcu

SEQ ID NO: 2594116 - RNA, 19 nt, Human
uaucuuucgcacagcaguu

SEQ ID NO: 2594117 - RNA, 14 nt, Human
uaucuuuauuaauc

SEQ ID NO: 2594118 - RNA, 15 nt, Human
uaucuuuauuaauca

SEQ ID NO: 2594119 - RNA, 22 nt, Human
uaucuuguuuuuccacuacugc

SEQ ID NO: 2594120 - RNA, 20 nt, Human
acagccgcagccucccucug

SEQ ID NO: 2594121 - RNA, 19 nt, Human
acagccgauucaccugagc

SEQ ID NO: 2594122 - RNA, 13 nt, Human
acagccgcagccu

SEQ ID NO: 2594123 - RNA, 17 nt, Human
uaucuugucucugggcu

SEQ ID NO: 2594124 - RNA, 14 nt, Human
uaucuuguuuuucc

SEQ ID NO: 2594125 - RNA, 18 nt, Human
uaucuuguuuuuccacua

SEQ ID NO: 2594126 - RNA, 23 nt, Human
uaucuuggugaauuuuuuuuucc

SEQ ID NO: 2594127 - RNA, 15 nt, Human
uaucuugucucuggg

SEQ ID NO: 2594128 - RNA, 21 nt, Human
acagcccuucuuuccacagaa

SEQ ID NO: 2594129 - RNA, 20 nt, Human
acagcccuucuuuccacaga

SEQ ID NO: 2594130 - RNA, 14 nt, Human
acagcaaccccagg

SEQ ID NO: 2594131 - RNA, 23 nt, Human
acagcccgggcucugccucccau

SEQ ID NO: 2594132 - RNA, 22 nt, Human
acagcccgggcucugccuccca

SEQ ID NO: 2594133 - RNA, 21 nt, Human
acagcccgggcucugccuccc

SEQ ID NO: 2594134 - RNA, 20 nt, Human
acagcaacaauuuaugaauu

SEQ ID NO: 2594135 - RNA, 17 nt, Human
acagcaacaauuuauga

SEQ ID NO: 2594136 - RNA, 20 nt, Human
acagauacuccuccaagguu

SEQ ID NO: 2594137 - RNA, 20 nt, Human
acagauagauauaugcucug

SEQ ID NO: 2594138 - RNA, 22 nt, Human
acagauacuggaaguuuugcau

SEQ ID NO: 2594139 - RNA, 21 nt, Human
acagauacuggaaguuuugca

SEQ ID NO: 2594140 - RNA, 13 nt, Human
acagaugccccag

SEQ ID NO: 2594141 - RNA, 14 nt, Human
acagaugccccaga

SEQ ID NO: 2594142 - RNA, 16 nt, Human
acagaugccccagagc

SEQ ID NO: 2594143 - RNA, 17 nt, Human
acagaugccccagagcu

SEQ ID NO: 2594144 - RNA, 18 nt, Human
acagaugccccagagcug

SEQ ID NO: 2594145 - RNA, 19 nt, Human
acagaugccccagagcugu

SEQ ID NO: 2594146 - RNA, 21 nt, Human
acagaguuguuacauuuuuaa

SEQ ID NO: 2594147 - RNA, 22 nt, Human
acagaguuguuacauuuuuaag

SEQ ID NO: 2594148 - RNA, 20 nt, Human
acagauaagcaagagagaug

SEQ ID NO: 2594149 - RNA, 14 nt, Human
acagauaaucagug

SEQ ID NO: 2594150 - RNA, 15 nt, Human
acagaguuguuacau

SEQ ID NO: 2594151 - RNA, 14 nt, Human
acagaggaagagca

SEQ ID NO: 2594152 - RNA, 16 nt, Human
acagaggaagagcagg

SEQ ID NO: 2594153 - RNA, 21 nt, Human
acagauaagcaagagagaugu

SEQ ID NO: 2594154 - RNA, 17 nt, Human
acagauuuuuacaaaug

SEQ ID NO: 2594155 - RNA, 16 nt, Human
acagauuuuuacaaau

SEQ ID NO: 2594156 - RNA, 16 nt, Human
acagauucacacuguc

SEQ ID NO: 2594157 - RNA, 24 nt, Human
acagauguuucuuuuguauguaaa

SEQ ID NO: 2594158 - RNA, 17 nt, Human
acagauucacacugucu

SEQ ID NO: 2594159 - RNA, 18 nt, Human
acagcaaaacuccaucuc

SEQ ID NO: 2594160 - RNA, 20 nt, Human
acagaugucagccgagccgg

SEQ ID NO: 2594161 - RNA, 19 nt, Human
acagauucacacugucugg

SEQ ID NO: 2594162 - RNA, 15 nt, Human
acagauucacacugu

SEQ ID NO: 2594163 - RNA, 23 nt, Human
acagauguuucuuuuguauguaa

SEQ ID NO: 2594164 - RNA, 12 nt, Human
acagauguugaa

SEQ ID NO: 2594165 - RNA, 14 nt, Human
acagaugcuuuucu

SEQ ID NO: 2594166 - RNA, 21 nt, Human
acagaugcuuuucugucucug

SEQ ID NO: 2594167 - RNA, 16 nt, Human
acagauggauuugccu

SEQ ID NO: 2594168 - RNA, 17 nt, Human
acagauggauuugccug

SEQ ID NO: 2594169 - RNA, 12 nt, Human
acagaugccucc

SEQ ID NO: 2594170 - RNA, 21 nt, Human
acagaugccccagagcuguuu

SEQ ID NO: 2594171 - RNA, 22 nt, Human
acagaugccccagagcuguuua

SEQ ID NO: 2594172 - RNA, 23 nt, Human
acagaugggugcuuggaggaagg

SEQ ID NO: 2594173 - RNA, 22 nt, Human
acagauggcacuuugaaggggc

SEQ ID NO: 2594174 - RNA, 16 nt, Human
acagaugggcaaauua

SEQ ID NO: 2594175 - RNA, 20 nt, Human
acagauguaaaagacuuuuu

SEQ ID NO: 2594176 - RNA, 21 nt, Human
uauccuccagguuuuucaauu

SEQ ID NO: 2594177 - RNA, 20 nt, Human
uauccuccagguuuuucaau

SEQ ID NO: 2594178 - RNA, 19 nt, Human
uauccuccagguuuuucaa

SEQ ID NO: 2594179 - RNA, 18 nt, Human
uauccuccagguuuuuca

SEQ ID NO: 2594180 - RNA, 17 nt, Human
uauccuccagguuuuuc

SEQ ID NO: 2594181 - RNA, 15 nt, Human
uauccuccagguuuu

SEQ ID NO: 2594182 - RNA, 14 nt, Human
uauccuccagguuu

SEQ ID NO: 2594183 - RNA, 13 nt, Human
uauccuccagguu

SEQ ID NO: 2594184 - RNA, 19 nt, Human
uauccuacaacaagaguuu

SEQ ID NO: 2594185 - RNA, 15 nt, Human
uauccuacaacaaga

SEQ ID NO: 2594186 - RNA, 12 nt, Human
uauccuccaggu

SEQ ID NO: 2594187 - RNA, 14 nt, Human
uauccuacuucccc

SEQ ID NO: 2594188 - RNA, 17 nt, Human
uauccuacuuccccuuc

SEQ ID NO: 2594189 - RNA, 12 nt, Human
uauccuacuucu

SEQ ID NO: 2594190 - RNA, 22 nt, Human
uauccuccagguuuuucaauua

SEQ ID NO: 2594191 - RNA, 16 nt, Human
uaucucacuugugcca

SEQ ID NO: 2594192 - RNA, 13 nt, Human
uaucucagggccu

SEQ ID NO: 2594193 - RNA, 15 nt, Human
uaucucagggccugg

SEQ ID NO: 2594194 - RNA, 19 nt, Human
uaucccuacuguaauuugu

SEQ ID NO: 2594195 - RNA, 20 nt, Human
uaucccuacuguaauuugug

SEQ ID NO: 2594196 - RNA, 15 nt, Human
uaucccucaccugua

SEQ ID NO: 2594197 - RNA, 15 nt, Human
uaucccuacauguau

SEQ ID NO: 2594198 - RNA, 16 nt, Human
uaucccggcugcccuu

SEQ ID NO: 2594199 - RNA, 12 nt, Human
uaucccucucca

SEQ ID NO: 2594200 - RNA, 15 nt, Human
uauauuuauuacugu

SEQ ID NO: 2594201 - RNA, 22 nt, Human
uauauuuauaacucaucauaaa

SEQ ID NO: 2594202 - RNA, 23 nt, Human
uauauuuauaacucaucauaaaa

SEQ ID NO: 2594203 - RNA, 19 nt, Human
uauauuuauuacuguaaga

SEQ ID NO: 2594204 - RNA, 24 nt, Human
uauauuuauaacucaucauaaaau

SEQ ID NO: 2594205 - RNA, 16 nt, Human
uauauuuauacuguau

SEQ ID NO: 2594206 - RNA, 15 nt, Human
uaucccggcugcccu

SEQ ID NO: 2594207 - RNA, 11 nt, Human
uaucucugugu

SEQ ID NO: 2594208 - RNA, 16 nt, Human
uaucucugugugcaca

SEQ ID NO: 2594209 - RNA, 17 nt, Human
uaucucugugugcacaa

SEQ ID NO: 2594210 - RNA, 18 nt, Human
uaucucugugugcacaaa

SEQ ID NO: 2594211 - RNA, 23 nt, Human
uaucucugugugcacaaauauuu

SEQ ID NO: 2594212 - RNA, 22 nt, Human
acagagagucccacugccucag

SEQ ID NO: 2594213 - RNA, 18 nt, Human
uaucucugaagcauguuu

SEQ ID NO: 2594214 - RNA, 23 nt, Human
uaucucugaagcauguuucaugu

SEQ ID NO: 2594215 - RNA, 17 nt, Human
uaucucugaagcauguu

SEQ ID NO: 2594216 - RNA, 16 nt, Human
uaucucugaagcaugu

SEQ ID NO: 2594217 - RNA, 15 nt, Human
uaucucugaagcaug

SEQ ID NO: 2594218 - RNA, 13 nt, Human
uaucucucugugc

SEQ ID NO: 2594219 - RNA, 12 nt, Human
uaucucucugug

SEQ ID NO: 2594220 - RNA, 20 nt, Human
uaucucucucucuuuuugga

SEQ ID NO: 2594221 - RNA, 20 nt, Human
uaucucuauuuaauauuuau

SEQ ID NO: 2594222 - RNA, 18 nt, Human
uaucucuauuuaauauuu

SEQ ID NO: 2594223 - RNA, 17 nt, Human
uaucucuauuuaauauu

SEQ ID NO: 2594224 - RNA, 16 nt, Human
uaucucuauuuaauau

SEQ ID NO: 2594225 - RNA, 16 nt, Human
uaucucgugggagagc

SEQ ID NO: 2594226 - RNA, 21 nt, Human
acagagcaagugagacccugu

SEQ ID NO: 2594227 - RNA, 11 nt, Human
acagagccagu

SEQ ID NO: 2594228 - RNA, 14 nt, Human
acagagcaggacug

SEQ ID NO: 2594229 - RNA, 15 nt, Human
acagagcaagacucu

SEQ ID NO: 2594230 - RNA, 17 nt, Human
acagaguuguuacauuu

SEQ ID NO: 2594231 - RNA, 18 nt, Human
acagaguuguuacauuuu

SEQ ID NO: 2594232 - RNA, 19 nt, Human
acagaguuguuacauuuuu

SEQ ID NO: 2594233 - RNA, 20 nt, Human
acagaguuguuacauuuuua

SEQ ID NO: 2594234 - RNA, 14 nt, Human
acagagcuucccug

SEQ ID NO: 2594235 - RNA, 15 nt, Human
acagagcuucccuga

SEQ ID NO: 2594236 - RNA, 20 nt, Human
acagaggaagaauuuguuau

SEQ ID NO: 2594237 - RNA, 19 nt, Human
acagaggaagaauuuguua

SEQ ID NO: 2594238 - RNA, 16 nt, Human
acagagcuucccugac

SEQ ID NO: 2594239 - RNA, 16 nt, Human
acagaguuguuacauu

SEQ ID NO: 2594240 - RNA, 21 nt, Human
acagagcugguugggaagaca

SEQ ID NO: 2594241 - RNA, 21 nt, Human
acagagcugggauguuucugu

SEQ ID NO: 2594242 - RNA, 18 nt, Human
acagagcugggauguuuc

SEQ ID NO: 2594243 - RNA, 10 nt, Human
acagagcugg

SEQ ID NO: 2594244 - RNA, 15 nt, Human
acagagcucuccagc

SEQ ID NO: 2594245 - RNA, 18 nt, Human
acagagcucuccagcucc

SEQ ID NO: 2594246 - RNA, 14 nt, Human
acagagcugggaug

SEQ ID NO: 2594247 - RNA, 18 nt, Human
uauauucccaauagcaac

SEQ ID NO: 2594248 - RNA, 19 nt, Human
uauauuccauauauuagca

SEQ ID NO: 2594249 - RNA, 21 nt, Human
uauauuccauauauuagcauu

SEQ ID NO: 2594250 - RNA, 14 nt, Human
uauauucauauauu

SEQ ID NO: 2594251 - RNA, 23 nt, Human
uauauuauuucuaggaagaauuu

SEQ ID NO: 2594252 - RNA, 22 nt, Human
uauauuauuucuaggaagaauu

SEQ ID NO: 2594253 - RNA, 16 nt, Human
uauauuauuucuagga

SEQ ID NO: 2594254 - RNA, 12 nt, Human
uauauuuacaaa

SEQ ID NO: 2594255 - RNA, 15 nt, Human
uauauuuaacaagau

SEQ ID NO: 2594256 - RNA, 15 nt, Human
uauauuuaaugauaa

SEQ ID NO: 2594257 - RNA, 14 nt, Human
uauauuuaaaagaa

SEQ ID NO: 2594258 - RNA, 19 nt, Human
acagaaagcagaacaguga

SEQ ID NO: 2594259 - RNA, 15 nt, Human
acagacacaggcccg

SEQ ID NO: 2594260 - RNA, 17 nt, Human
acagacacaggcccggc

SEQ ID NO: 2594261 - RNA, 22 nt, Human
acagacacaggcccggcuccag

SEQ ID NO: 2594262 - RNA, 18 nt, Human
acagacacaggcccggcu

SEQ ID NO: 2594263 - RNA, 22 nt, Human
uauauuaucaugcaaaugcugu

SEQ ID NO: 2594264 - RNA, 21 nt, Human
acagacuggaagcacagcuuc

SEQ ID NO: 2594265 - RNA, 19 nt, Human
acagacuggaagcacagcu

SEQ ID NO: 2594266 - RNA, 17 nt, Human
acagacuggaagcacag

SEQ ID NO: 2594267 - RNA, 13 nt, Human
acacuugugugug

SEQ ID NO: 2594268 - RNA, 16 nt, Human
acacuugugugugggc

SEQ ID NO: 2594269 - RNA, 18 nt, Human
acacuugugugugggcug

SEQ ID NO: 2594270 - RNA, 22 nt, Human
acacuugugugugggcugugag

SEQ ID NO: 2594271 - RNA, 19 nt, Human
acacuuguuccagcucuuu

SEQ ID NO: 2594272 - RNA, 20 nt, Human
acacuuguuccagcucuuug

SEQ ID NO: 2594273 - RNA, 19 nt, Human
acacuuguccccaaauccg

SEQ ID NO: 2594274 - RNA, 23 nt, Human
acacuguuucaaacuuuacuaug

SEQ ID NO: 2594275 - RNA, 13 nt, Human
acacuuaacagau

SEQ ID NO: 2594276 - RNA, 11 nt, Human
acacuuaacag

SEQ ID NO: 2594277 - RNA, 13 nt, Human
acacuuaaaaaug

SEQ ID NO: 2594278 - RNA, 15 nt, Human
acacuuaaaaauggu

SEQ ID NO: 2594279 - RNA, 15 nt, Human
acacuguuucaaacu

SEQ ID NO: 2594280 - RNA, 21 nt, Human
acacuguuuacaagaaaaaau

SEQ ID NO: 2594281 - RNA, 23 nt, Human
acacuguuuacaagaaaaaauga

SEQ ID NO: 2594282 - RNA, 20 nt, Human
acacuuguugauuaauggaa

SEQ ID NO: 2594283 - RNA, 23 nt, Human
acacuuguugauuaauggaaaug

SEQ ID NO: 2594284 - RNA, 22 nt, Human
acacuuuaugccggaugugcuu

SEQ ID NO: 2594285 - RNA, 21 nt, Human
acacuuuaugccggaugugcu

SEQ ID NO: 2594286 - RNA, 13 nt, Human
acacuuuacaaug

SEQ ID NO: 2594287 - RNA, 12 nt, Human
acacuuuacaau

SEQ ID NO: 2594288 - RNA, 22 nt, Human
acacuuuaauuaccaaccuguu

SEQ ID NO: 2594289 - RNA, 23 nt, Human
acacuugugugugggcugugagu

SEQ ID NO: 2594290 - RNA, 22 nt, Human
acacuuugcacugauauaucau

SEQ ID NO: 2594291 - RNA, 19 nt, Human
acacuuugcacugauauau

SEQ ID NO: 2594292 - RNA, 19 nt, Human
acacuuugccauauuuuca

SEQ ID NO: 2594293 - RNA, 21 nt, Human
acacuuugaaauguguuucug

SEQ ID NO: 2594294 - RNA, 20 nt, Human
acacuuugaaauguguuucu

SEQ ID NO: 2594295 - RNA, 17 nt, Human
acacuuugcacugauau

SEQ ID NO: 2594296 - RNA, 18 nt, Human
acacuuugaaauguguuu

SEQ ID NO: 2594297 - RNA, 17 nt, Human
acacuuugaaauguguu

SEQ ID NO: 2594298 - RNA, 23 nt, Human
acacuuuaugccggaugugcuuu

SEQ ID NO: 2594299 - RNA, 12 nt, Human
acagaaacaaaa

SEQ ID NO: 2594300 - RNA, 17 nt, Human
acagaaacaaaaacacu

SEQ ID NO: 2594301 - RNA, 18 nt, Human
acagaaaauucuucucca

SEQ ID NO: 2594302 - RNA, 23 nt, Human
acacuuugaaauguguuucugua

SEQ ID NO: 2594303 - RNA, 18 nt, Human
acagaaaccucuacuaaa

SEQ ID NO: 2594304 - RNA, 15 nt, Human
acagaaaccuuuuua

SEQ ID NO: 2594305 - RNA, 20 nt, Human
acagaaaccuuuuuaaaaau

SEQ ID NO: 2594306 - RNA, 14 nt, Human
acagaaacauuuuc

SEQ ID NO: 2594307 - RNA, 24 nt, Human
acacucgcccgcccacuguccugg

SEQ ID NO: 2594308 - RNA, 23 nt, Human
acacucgcccgcccacuguccug

SEQ ID NO: 2594309 - RNA, 16 nt, Human
acacucgcccgcccac

SEQ ID NO: 2594310 - RNA, 13 nt, Human
acacucugagacu

SEQ ID NO: 2594311 - RNA, 11 nt, Human
acacucugaga

SEQ ID NO: 2594312 - RNA, 14 nt, Human
acacuccagugaga

SEQ ID NO: 2594313 - RNA, 14 nt, Human
acacuccagugcca

SEQ ID NO: 2594314 - RNA, 13 nt, Human
acacuccagugcc

SEQ ID NO: 2594315 - RNA, 13 nt, Human
acacuccuucaca

SEQ ID NO: 2594316 - RNA, 21 nt, Human
acacuccaauuaaggauuuua

SEQ ID NO: 2594317 - RNA, 12 nt, Human
acacuccagccu

SEQ ID NO: 2594318 - RNA, 14 nt, Human
acacuccagccuga

SEQ ID NO: 2594319 - RNA, 15 nt, Human
acacuccagccugag

SEQ ID NO: 2594320 - RNA, 16 nt, Human
acacuccagccugagc

SEQ ID NO: 2594321 - RNA, 15 nt, Human
acacuccagccuggg

SEQ ID NO: 2594322 - RNA, 17 nt, Human
acacuccagccugagca

SEQ ID NO: 2594323 - RNA, 18 nt, Human
uauaaguaagaaaauauu

SEQ ID NO: 2594324 - RNA, 16 nt, Human
uauaaguaagaaaaua

SEQ ID NO: 2594325 - RNA, 15 nt, Human
uauaaguaagaaaau

SEQ ID NO: 2594326 - RNA, 14 nt, Human
uauaaguaagaaaa

SEQ ID NO: 2594327 - RNA, 16 nt, Human
acacucacccaacaau

SEQ ID NO: 2594328 - RNA, 17 nt, Human
uauaagguuuaaaaaga

SEQ ID NO: 2594329 - RNA, 15 nt, Human
uauaagguuuuaagu

SEQ ID NO: 2594330 - RNA, 16 nt, Human
uauaacuagcuagaag

SEQ ID NO: 2594331 - RNA, 19 nt, Human
acacucagaccugaauucu

SEQ ID NO: 2594332 - RNA, 14 nt, Human
acacucagaccuga

SEQ ID NO: 2594333 - RNA, 13 nt, Human
acacucagcacaa

SEQ ID NO: 2594334 - RNA, 18 nt, Human
acacuccaauuaaggauu

SEQ ID NO: 2594335 - RNA, 17 nt, Human
acacuccaauuaaggau

SEQ ID NO: 2594336 - RNA, 16 nt, Human
acacucagcacaaggc

SEQ ID NO: 2594337 - RNA, 16 nt, Human
acacucacuccugaga

SEQ ID NO: 2594338 - RNA, 19 nt, Human
acacucaccucuaaaacag

SEQ ID NO: 2594339 - RNA, 16 nt, Human
uauaaguagcaggcca

SEQ ID NO: 2594340 - RNA, 18 nt, Human
acacucaccucuaaaaca

SEQ ID NO: 2594341 - RNA, 21 nt, Human
acacucacuccugagaccccu

SEQ ID NO: 2594342 - RNA, 20 nt, Human
acacuguucucugcccucca

SEQ ID NO: 2594343 - RNA, 18 nt, Human
acacuguucucugcccuc

SEQ ID NO: 2594344 - RNA, 17 nt, Human
acacuguucucugcccu

SEQ ID NO: 2594345 - RNA, 16 nt, Human
acacuguucucugccc

SEQ ID NO: 2594346 - RNA, 23 nt, Human
acacuguucucugcccuccaaga

SEQ ID NO: 2594347 - RNA, 22 nt, Human
acacuguucucugcccuccaag

SEQ ID NO: 2594348 - RNA, 20 nt, Human
acacuguucugaaagugacu

SEQ ID NO: 2594349 - RNA, 14 nt, Human
acacuguucugaaa

SEQ ID NO: 2594350 - RNA, 22 nt, Human
acacugaaauauacacacagca

SEQ ID NO: 2594351 - RNA, 14 nt, Human
acacugaagaagca

SEQ ID NO: 2594352 - RNA, 12 nt, Human
acacugaagaag

SEQ ID NO: 2594353 - RNA, 15 nt, Human
acacuguucucugcc

SEQ ID NO: 2594354 - RNA, 14 nt, Human
acacuguucucugc

SEQ ID NO: 2594355 - RNA, 23 nt, Human
acacugaaaaaucuaagugauau

SEQ ID NO: 2594356 - RNA, 21 nt, Human
acacucuuuugcuuuauucca

SEQ ID NO: 2594357 - RNA, 17 nt, Human
acacugaaauauacaca

SEQ ID NO: 2594358 - RNA, 18 nt, Human
acacugaaauauacacac

SEQ ID NO: 2594359 - RNA, 20 nt, Human
acacugaaauauacacacag

SEQ ID NO: 2594360 - RNA, 21 nt, Human
acacugaaauauacacacagc

SEQ ID NO: 2594361 - RNA, 16 nt, Human
acacucuuuguaagag

SEQ ID NO: 2594362 - RNA, 12 nt, Human
acacucuuugua

SEQ ID NO: 2594363 - RNA, 14 nt, Human
acacucugcucugc

SEQ ID NO: 2594364 - RNA, 13 nt, Human
acacucugcucug

SEQ ID NO: 2594365 - RNA, 16 nt, Human
acacucugcucugccc

SEQ ID NO: 2594366 - RNA, 14 nt, Human
acacucuggcuggu

SEQ ID NO: 2594367 - RNA, 20 nt, Human
acacucugggcuccagagug

SEQ ID NO: 2594368 - RNA, 17 nt, Human
acacccacucagcuccg

SEQ ID NO: 2594369 - RNA, 12 nt, Human
acacccagccuc

SEQ ID NO: 2594370 - RNA, 16 nt, Human
acacccagccucaguc

SEQ ID NO: 2594371 - RNA, 14 nt, Human
acacccagccucag

SEQ ID NO: 2594372 - RNA, 13 nt, Human
acacccagccuca

SEQ ID NO: 2594373 - RNA, 23 nt, Human
acacccaccguccgcccugcucc

SEQ ID NO: 2594374 - RNA, 20 nt, Human
acacccagccucaguccucc

SEQ ID NO: 2594375 - RNA, 17 nt, Human
acacccagccucagucc

SEQ ID NO: 2594376 - RNA, 23 nt, Human
acacccagccucaguccuccccu

SEQ ID NO: 2594377 - RNA, 21 nt, Human
acaccccagacgaugucuuca

SEQ ID NO: 2594378 - RNA, 20 nt, Human
acaccccauugguggacuac

SEQ ID NO: 2594379 - RNA, 15 nt, Human
acacccaucuguuuu

SEQ ID NO: 2594380 - RNA, 13 nt, Human
acacccauguuuc

SEQ ID NO: 2594381 - RNA, 16 nt, Human
acaccucccugaacca

SEQ ID NO: 2594382 - RNA, 22 nt, Human
acaccucccugaaccaucccug

SEQ ID NO: 2594383 - RNA, 19 nt, Human
acaccucccaggagacagu

SEQ ID NO: 2594384 - RNA, 13 nt, Human
acaccucccugaa

SEQ ID NO: 2594385 - RNA, 13 nt, Human
acaccucccagga

SEQ ID NO: 2594386 - RNA, 23 nt, Human
acaccccuccccugcccuagagc

SEQ ID NO: 2594387 - RNA, 14 nt, Human
acacccccaccccu

SEQ ID NO: 2594388 - RNA, 16 nt, Human
acaccccuccccugcc

SEQ ID NO: 2594389 - RNA, 12 nt, Human
acaccucgcccc

SEQ ID NO: 2594390 - RNA, 18 nt, Human
acaccucugcacaagcug

SEQ ID NO: 2594391 - RNA, 16 nt, Human
acaccuugacagggca

SEQ ID NO: 2594392 - RNA, 15 nt, Human
acaccuugacagggc

SEQ ID NO: 2594393 - RNA, 14 nt, Human
acaccuucucugga

SEQ ID NO: 2594394 - RNA, 13 nt, Human
acaccuucucugg

SEQ ID NO: 2594395 - RNA, 14 nt, Human
acaccuugacaggg

SEQ ID NO: 2594396 - RNA, 13 nt, Human
acaccugcccugc

SEQ ID NO: 2594397 - RNA, 14 nt, Human
acaccugcccugcc

SEQ ID NO: 2594398 - RNA, 15 nt, Human
acaccugauguguac

SEQ ID NO: 2594399 - RNA, 18 nt, Human
acaccugauguguacauc

SEQ ID NO: 2594400 - RNA, 17 nt, Human
acaccugauguguacau

SEQ ID NO: 2594401 - RNA, 11 nt, Human
acaccugcacc

SEQ ID NO: 2594402 - RNA, 12 nt, Human
acaccugcaccu

SEQ ID NO: 2594403 - RNA, 14 nt, Human
acaccugcaccucc

SEQ ID NO: 2594404 - RNA, 15 nt, Human
acaccugcaccuccc

SEQ ID NO: 2594405 - RNA, 16 nt, Human
acaccugcaccucccc

SEQ ID NO: 2594406 - RNA, 18 nt, Human
acaccugcaccucccccc

SEQ ID NO: 2594407 - RNA, 19 nt, Human
acaccugcaccucccccca

SEQ ID NO: 2594408 - RNA, 24 nt, Human
acaccugcaccuccccccacugca

SEQ ID NO: 2594409 - RNA, 20 nt, Human
acaccuuggacauccuccuc

SEQ ID NO: 2594410 - RNA, 19 nt, Human
acacuaagagagaaugaga

SEQ ID NO: 2594411 - RNA, 18 nt, Human
acacuaagagagaaugag

SEQ ID NO: 2594412 - RNA, 17 nt, Human
acacuaagagagaauga

SEQ ID NO: 2594413 - RNA, 19 nt, Human
acacuaaccacgcuggacc

SEQ ID NO: 2594414 - RNA, 17 nt, Human
acacuaaccacgcugga

SEQ ID NO: 2594415 - RNA, 16 nt, Human
acacuaaccacgcugg

SEQ ID NO: 2594416 - RNA, 15 nt, Human
uauaaccccagcucc

SEQ ID NO: 2594417 - RNA, 19 nt, Human
uauaacuacuccggagaca

SEQ ID NO: 2594418 - RNA, 14 nt, Human
uauaacuaguccuu

SEQ ID NO: 2594419 - RNA, 16 nt, Human
uauaaggaaagcaaua

SEQ ID NO: 2594420 - RNA, 18 nt, Human
uauaacuaguccuuuacu

SEQ ID NO: 2594421 - RNA, 22 nt, Human
uauaaggaaagcaauaaaugaa

SEQ ID NO: 2594422 - RNA, 23 nt, Human
uauaaggaaagcaauaaaugaau

SEQ ID NO: 2594423 - RNA, 21 nt, Human
acacuagccagacacucugcu

SEQ ID NO: 2594424 - RNA, 19 nt, Human
acacuagccagacacucug

SEQ ID NO: 2594425 - RNA, 14 nt, Human
acacuacauuagaa

SEQ ID NO: 2594426 - RNA, 23 nt, Human
acacuaauuccuuucuauccuac

SEQ ID NO: 2594427 - RNA, 22 nt, Human
uauaaccaguguuguggauuua

SEQ ID NO: 2594428 - RNA, 17 nt, Human
acacuagcccaaugaaa

SEQ ID NO: 2594429 - RNA, 20 nt, Human
acacuagcccaaugaaauga

SEQ ID NO: 2594430 - RNA, 22 nt, Human
acacuagcuaauaucaauagaa

SEQ ID NO: 2594431 - RNA, 13 nt, Human
acacuagccucuc

SEQ ID NO: 2594432 - RNA, 15 nt, Human
acacuagccucucca

SEQ ID NO: 2594433 - RNA, 22 nt, Human
acacccaccguccgcccugcuc

SEQ ID NO: 2594434 - RNA, 21 nt, Human
acacccaccguccgcccugcu

SEQ ID NO: 2594435 - RNA, 15 nt, Human
acacccacucagcuc

SEQ ID NO: 2594436 - RNA, 17 nt, Human
acacccaccguccgccc

SEQ ID NO: 2594437 - RNA, 13 nt, Human
acacccagcccac

SEQ ID NO: 2594438 - RNA, 12 nt, Human
acacccagccca

SEQ ID NO: 2594439 - RNA, 22 nt, Human
acacauguccaagaagcccagg

SEQ ID NO: 2594440 - RNA, 21 nt, Human
acacauguccaagaagcccag

SEQ ID NO: 2594441 - RNA, 18 nt, Human
acacauucggcucccugg

SEQ ID NO: 2594442 - RNA, 17 nt, Human
acacauucaauaagcau

SEQ ID NO: 2594443 - RNA, 16 nt, Human
acacauucaauaagca

SEQ ID NO: 2594444 - RNA, 23 nt, Human
acacauuaucgggagcagugucu

SEQ ID NO: 2594445 - RNA, 20 nt, Human
acacauuaucgggagcagug

SEQ ID NO: 2594446 - RNA, 19 nt, Human
acacauguccaagaagccc

SEQ ID NO: 2594447 - RNA, 18 nt, Human
acacauguccaagaagcc

SEQ ID NO: 2594448 - RNA, 13 nt, Human
acacauguccaag

SEQ ID NO: 2594449 - RNA, 21 nt, Human
uauaaaaucagccaauuaugu

SEQ ID NO: 2594450 - RNA, 15 nt, Human
uauaaaauauuuuca

SEQ ID NO: 2594451 - RNA, 13 nt, Human
acacaugcauaca

SEQ ID NO: 2594452 - RNA, 14 nt, Human
acacaugcauacac

SEQ ID NO: 2594453 - RNA, 15 nt, Human
uauaaaauuaagcaa

SEQ ID NO: 2594454 - RNA, 15 nt, Human
acacaugcauacaca

SEQ ID NO: 2594455 - RNA, 16 nt, Human
acacaugcauacacac

SEQ ID NO: 2594456 - RNA, 17 nt, Human
acacaugcauacacaca

SEQ ID NO: 2594457 - RNA, 18 nt, Human
acacaugcauacacacac

SEQ ID NO: 2594458 - RNA, 19 nt, Human
acacaugcauacacacaca

SEQ ID NO: 2594459 - RNA, 21 nt, Human
uauaaaaauaaaaaacacugg

SEQ ID NO: 2594460 - RNA, 20 nt, Human
uauaaaaauaaaaaacacug

SEQ ID NO: 2594461 - RNA, 21 nt, Human
uaguuuuuguucuuaauugca

SEQ ID NO: 2594462 - RNA, 15 nt, Human
uaguuuuuguucuua

SEQ ID NO: 2594463 - RNA, 16 nt, Human
uauaaaacuguacuuc

SEQ ID NO: 2594464 - RNA, 22 nt, Human
uauaaaacugcguuaaaggcuc

SEQ ID NO: 2594465 - RNA, 19 nt, Human
uauaaaacugcguuaaagg

SEQ ID NO: 2594466 - RNA, 17 nt, Human
uauaaaacaggucaaua

SEQ ID NO: 2594467 - RNA, 20 nt, Human
uauaaaaucagccaauuaug

SEQ ID NO: 2594468 - RNA, 19 nt, Human
uauaaaaucagccaauuau

SEQ ID NO: 2594469 - RNA, 17 nt, Human
uauaaaaucagccaauu

SEQ ID NO: 2594470 - RNA, 16 nt, Human
uauaaaaucagccaau

SEQ ID NO: 2594471 - RNA, 21 nt, Human
uauaaaauaugaagacauaaa

SEQ ID NO: 2594472 - RNA, 23 nt, Human
uauaaaauaugaagacauaaacc

SEQ ID NO: 2594473 - RNA, 14 nt, Human
uauaaaaucagcca

SEQ ID NO: 2594474 - RNA, 15 nt, Human
uauaaaacuuuccuc

SEQ ID NO: 2594475 - RNA, 19 nt, Human
uauaaaacuguacuucacu

SEQ ID NO: 2594476 - RNA, 12 nt, Human
uauaaaacuucu

SEQ ID NO: 2594477 - RNA, 14 nt, Human
uauaaaagacugac

SEQ ID NO: 2594478 - RNA, 16 nt, Human
uaguuauaguuucaga

SEQ ID NO: 2594479 - RNA, 18 nt, Human
uaguucagguaacaggca

SEQ ID NO: 2594480 - RNA, 22 nt, Human
uaguuuuuaaaauaucuuuuga

SEQ ID NO: 2594481 - RNA, 15 nt, Human
uaguuuugucaaacu

SEQ ID NO: 2594482 - RNA, 18 nt, Human
uaguuuuuaccuaccaca

SEQ ID NO: 2594483 - RNA, 17 nt, Human
uaguuuuuguaauuuau

SEQ ID NO: 2594484 - RNA, 13 nt, Human
uaguuuuuguucu

SEQ ID NO: 2594485 - RNA, 17 nt, Human
uaguuuuucuucaacau

SEQ ID NO: 2594486 - RNA, 10 nt, Human
uaguuuuugu

SEQ ID NO: 2594487 - RNA, 21 nt, Human
uaguuuuuaaaauaucuuuug

SEQ ID NO: 2594488 - RNA, 13 nt, Human
uaguuuugucaaa

SEQ ID NO: 2594489 - RNA, 22 nt, Human
uaguuuugauuuaauguuuuca

SEQ ID NO: 2594490 - RNA, 13 nt, Human
uaguacugcucuu

SEQ ID NO: 2594491 - RNA, 15 nt, Human
uaguacugcucuugu

SEQ ID NO: 2594492 - RNA, 21 nt, Human
uaguacuccugcaaaauuuua

SEQ ID NO: 2594493 - RNA, 20 nt, Human
uaguaauagagcaaaauuga

SEQ ID NO: 2594494 - RNA, 17 nt, Human
uaguacuccugcaaaau

SEQ ID NO: 2594495 - RNA, 19 nt, Human
uaguacuccugcaaaauuu

SEQ ID NO: 2594496 - RNA, 20 nt, Human
uaguacuccugcaaaauuuu

SEQ ID NO: 2594497 - RNA, 22 nt, Human
uaguacuugaaaucuaggauua

SEQ ID NO: 2594498 - RNA, 13 nt, Human
uaguagagacagg

SEQ ID NO: 2594499 - RNA, 22 nt, Human
uaguccugugaaugccacugcc

SEQ ID NO: 2594500 - RNA, 12 nt, Human
uaguccugugaa

SEQ ID NO: 2594501 - RNA, 12 nt, Human
uagucgugagcu

SEQ ID NO: 2594502 - RNA, 22 nt, Human
uaguccuauucuauugcaguua

SEQ ID NO: 2594503 - RNA, 11 nt, Human
uaguccuguga

SEQ ID NO: 2594504 - RNA, 21 nt, Human
uagucuacucuuaagccaucu

SEQ ID NO: 2594505 - RNA, 20 nt, Human
uagucuacucuuaagccauc

SEQ ID NO: 2594506 - RNA, 22 nt, Human
uagucuacucuuaagccaucuu

SEQ ID NO: 2594507 - RNA, 18 nt, Human
uagucuagauggcuccuc

SEQ ID NO: 2594508 - RNA, 20 nt, Human
uagucuagauggcuccucuc

SEQ ID NO: 2594509 - RNA, 14 nt, Human
uagucuauuagcca

SEQ ID NO: 2594510 - RNA, 20 nt, Human
uagucguggagaugucuucg

SEQ ID NO: 2594511 - RNA, 19 nt, Human
uagucguggagaugucuuc

SEQ ID NO: 2594512 - RNA, 21 nt, Human
uagucgugagcucuugugagg

SEQ ID NO: 2594513 - RNA, 23 nt, Human
uagucuaaggaugcuaaaccuua

SEQ ID NO: 2594514 - RNA, 21 nt, Human
uagucguggagaugucuucgu

SEQ ID NO: 2594515 - RNA, 17 nt, Human
uaguguuggagaagaac

SEQ ID NO: 2594516 - RNA, 16 nt, Human
uaguguuggagaagaa

SEQ ID NO: 2594517 - RNA, 13 nt, Human
uaguguucauaaa

SEQ ID NO: 2594518 - RNA, 21 nt, Human
uagucuuuugcuuuuggcaaa

SEQ ID NO: 2594519 - RNA, 16 nt, Human
uagucuuuugcuuuug

SEQ ID NO: 2594520 - RNA, 15 nt, Human
uagucuuuugcuuuu

SEQ ID NO: 2594521 - RNA, 12 nt, Human
uaguguuggaga

SEQ ID NO: 2594522 - RNA, 17 nt, Human
uagucuuaagaacugcu

SEQ ID NO: 2594523 - RNA, 19 nt, Human
uagucuagauggcuccucu

SEQ ID NO: 2594524 - RNA, 12 nt, Human
uagucucaggac

SEQ ID NO: 2594525 - RNA, 15 nt, Human
uagucuucaagcaga

SEQ ID NO: 2594526 - RNA, 17 nt, Human
uagucuucaagcagauu

SEQ ID NO: 2594527 - RNA, 12 nt, Human
uagucuucucau

SEQ ID NO: 2594528 - RNA, 14 nt, Human
uagucuucucauag

SEQ ID NO: 2594529 - RNA, 18 nt, Human
uagucuucucauagcauu

SEQ ID NO: 2594530 - RNA, 14 nt, Human
uagucuuuugcuuu

SEQ ID NO: 2594531 - RNA, 19 nt, Human
uagucuucucauagcauua

SEQ ID NO: 2594532 - RNA, 14 nt, Human
acacacugaagaag

SEQ ID NO: 2594533 - RNA, 20 nt, Human
acacacgcaggaacucccag

SEQ ID NO: 2594534 - RNA, 16 nt, Human
acacacgcaggaacuc

SEQ ID NO: 2594535 - RNA, 14 nt, Human
acacacgcaggaac

SEQ ID NO: 2594536 - RNA, 18 nt, Human
acacacgcacgcacacac

SEQ ID NO: 2594537 - RNA, 15 nt, Human
acacacugaggcagg

SEQ ID NO: 2594538 - RNA, 16 nt, Human
acacacugaggcaggg

SEQ ID NO: 2594539 - RNA, 22 nt, Human
acacagcuuuaucaccagagag

SEQ ID NO: 2594540 - RNA, 21 nt, Human
acacagcuuuaucaccagaga

SEQ ID NO: 2594541 - RNA, 20 nt, Human
acacagcuuuaucaccagag

SEQ ID NO: 2594542 - RNA, 15 nt, Human
acacagcugggcugu

SEQ ID NO: 2594543 - RNA, 16 nt, Human
acacagcugggcugug

SEQ ID NO: 2594544 - RNA, 12 nt, Human
acacagcugggc

SEQ ID NO: 2594545 - RNA, 18 nt, Human
acacacugaggcagggaa

SEQ ID NO: 2594546 - RNA, 22 nt, Human
acacagcucuucuccaggcugu

SEQ ID NO: 2594547 - RNA, 22 nt, Human
acacagcugagagacuuuuaau

SEQ ID NO: 2594548 - RNA, 19 nt, Human
acacagcugcagagacaga

SEQ ID NO: 2594549 - RNA, 20 nt, Human
acacaggacccccuuccccu

SEQ ID NO: 2594550 - RNA, 18 nt, Human
acacaggacccccuuccc

SEQ ID NO: 2594551 - RNA, 17 nt, Human
acacaggacccccuucc

SEQ ID NO: 2594552 - RNA, 24 nt, Human
acacaggauccuauucucaccagg

SEQ ID NO: 2594553 - RNA, 15 nt, Human
acacaggcaacugag

SEQ ID NO: 2594554 - RNA, 16 nt, Human
acacaggcaacugagg

SEQ ID NO: 2594555 - RNA, 19 nt, Human
acacaggcaacugaggcag

SEQ ID NO: 2594556 - RNA, 20 nt, Human
acacaggcaacugaggcaga

SEQ ID NO: 2594557 - RNA, 11 nt, Human
acacagugagu

SEQ ID NO: 2594558 - RNA, 14 nt, Human
acacaggaggagaa

SEQ ID NO: 2594559 - RNA, 23 nt, Human
acacagucucacccagacuccag

SEQ ID NO: 2594560 - RNA, 19 nt, Human
acacagucuuggcucacug

SEQ ID NO: 2594561 - RNA, 17 nt, Human
acacagugaccauacua

SEQ ID NO: 2594562 - RNA, 21 nt, Human
uagguuggcaaaaaggcagga

SEQ ID NO: 2594563 - RNA, 15 nt, Human
uagguuggacuggaa

SEQ ID NO: 2594564 - RNA, 24 nt, Human
uagguuggaagcuagcuccccucc

SEQ ID NO: 2594565 - RNA, 16 nt, Human
acacagucugcaagau

SEQ ID NO: 2594566 - RNA, 15 nt, Human
acacagucugcaaga

SEQ ID NO: 2594567 - RNA, 20 nt, Human
uagguugccaauaauacacu

SEQ ID NO: 2594568 - RNA, 21 nt, Human
uagguuuaacucagaucacua

SEQ ID NO: 2594569 - RNA, 19 nt, Human
uagguuuaacucagaucac

SEQ ID NO: 2594570 - RNA, 17 nt, Human
uagguuuaacucagauc

SEQ ID NO: 2594571 - RNA, 15 nt, Human
uagguuuaacucaga

SEQ ID NO: 2594572 - RNA, 16 nt, Human
uaguaagaaaacauca

SEQ ID NO: 2594573 - RNA, 14 nt, Human
uaguaauagagcaa

SEQ ID NO: 2594574 - RNA, 14 nt, Human
uaguaagugccuuc

SEQ ID NO: 2594575 - RNA, 14 nt, Human
uaguaaggcugugu

SEQ ID NO: 2594576 - RNA, 13 nt, Human
uaguaaggcugug

SEQ ID NO: 2594577 - RNA, 12 nt, Human
acacacacagcc

SEQ ID NO: 2594578 - RNA, 13 nt, Human
acacacacagcca

SEQ ID NO: 2594579 - RNA, 14 nt, Human
acacacacagccac

SEQ ID NO: 2594580 - RNA, 15 nt, Human
acacacacagccaca

SEQ ID NO: 2594581 - RNA, 16 nt, Human
acacacacagccacac

SEQ ID NO: 2594582 - RNA, 11 nt, Human
acacacacagg

SEQ ID NO: 2594583 - RNA, 17 nt, Human
acacacagccacacaca

SEQ ID NO: 2594584 - RNA, 18 nt, Human
acacacagccacacacac

SEQ ID NO: 2594585 - RNA, 21 nt, Human
acacacagccacacacacaga

SEQ ID NO: 2594586 - RNA, 22 nt, Human
acacacagccacacacacagaa

SEQ ID NO: 2594587 - RNA, 14 nt, Human
acacacagccacac

SEQ ID NO: 2594588 - RNA, 15 nt, Human
acacacagccacaca

SEQ ID NO: 2594589 - RNA, 13 nt, Human
acacacagccaca

SEQ ID NO: 2594590 - RNA, 14 nt, Human
acacacacaggagg

SEQ ID NO: 2594591 - RNA, 12 nt, Human
acacacagcucu

SEQ ID NO: 2594592 - RNA, 11 nt, Human
acacacagcuc

SEQ ID NO: 2594593 - RNA, 21 nt, Human
acacacauauaaacaucacac

SEQ ID NO: 2594594 - RNA, 17 nt, Human
acacacaggcaacugag

SEQ ID NO: 2594595 - RNA, 19 nt, Human
acacacagcucuguccugg

SEQ ID NO: 2594596 - RNA, 20 nt, Human
acacacagcuaacacacagc

SEQ ID NO: 2594597 - RNA, 12 nt, Human
acacacagcucc

SEQ ID NO: 2594598 - RNA, 13 nt, Human
acacacaggagga

SEQ ID NO: 2594599 - RNA, 20 nt, Human
acacacucaaaucaagaaac

SEQ ID NO: 2594600 - RNA, 13 nt, Human
acacacugaagaa

SEQ ID NO: 2594601 - RNA, 20 nt, Human
acacaccuguagcacuuacu

SEQ ID NO: 2594602 - RNA, 11 nt, Human
acacaccugua

SEQ ID NO: 2594603 - RNA, 22 nt, Human
acacaccuaagggacauguuuu

SEQ ID NO: 2594604 - RNA, 21 nt, Human
acacaccuaagggacauguuu

SEQ ID NO: 2594605 - RNA, 17 nt, Human
acacaccuaagggacau

SEQ ID NO: 2594606 - RNA, 18 nt, Human
acacaccaggcugugggc

SEQ ID NO: 2594607 - RNA, 17 nt, Human
acacacgcacgcacaca

SEQ ID NO: 2594608 - RNA, 16 nt, Human
acacacgcacgcacac

SEQ ID NO: 2594609 - RNA, 15 nt, Human
acacacgcacgcaca

SEQ ID NO: 2594610 - RNA, 14 nt, Human
acacacgcacgcac

SEQ ID NO: 2594611 - RNA, 24 nt, Human
acacaccuguagucccagcuacuc

SEQ ID NO: 2594612 - RNA, 13 nt, Human
acacacgcacgca

SEQ ID NO: 2594613 - RNA, 23 nt, Human
acacacgcacacacacacacagg

SEQ ID NO: 2594614 - RNA, 20 nt, Human
acacacaugcauacacacac

SEQ ID NO: 2594615 - RNA, 21 nt, Human
acacacaugcauacacacaca

SEQ ID NO: 2594616 - RNA, 15 nt, Human
acacaccacacauac

SEQ ID NO: 2594617 - RNA, 12 nt, Human
acacaccaggcu

SEQ ID NO: 2594618 - RNA, 16 nt, Human
acacaccaggcugugg

SEQ ID NO: 2594619 - RNA, 22 nt, Human
acacaccaggcugugggccuca

SEQ ID NO: 2594620 - RNA, 16 nt, Human
acacacaugcauacac

SEQ ID NO: 2594621 - RNA, 17 nt, Human
acacacaugcauacaca

SEQ ID NO: 2594622 - RNA, 18 nt, Human
acacacaugcauacacac

SEQ ID NO: 2594623 - RNA, 19 nt, Human
acacacaugcauacacaca

SEQ ID NO: 2594624 - RNA, 14 nt, Human
acacacaugcauac

SEQ ID NO: 2594625 - RNA, 15 nt, Human
acacacaugcauaca

SEQ ID NO: 2594626 - RNA, 14 nt, Human
acacacacacgcac

SEQ ID NO: 2594627 - RNA, 13 nt, Human
acacacacacgca

SEQ ID NO: 2594628 - RNA, 17 nt, Human
acacacacacaugcaua

SEQ ID NO: 2594629 - RNA, 12 nt, Human
acacacacagaa

SEQ ID NO: 2594630 - RNA, 13 nt, Human
acacacacagaaa

SEQ ID NO: 2594631 - RNA, 14 nt, Human
acacacacagaaaa

SEQ ID NO: 2594632 - RNA, 15 nt, Human
acacacacagaaaau

SEQ ID NO: 2594633 - RNA, 16 nt, Human
acacacacacgcacgc

SEQ ID NO: 2594634 - RNA, 16 nt, Human
acacacacagaaaaua

SEQ ID NO: 2594635 - RNA, 22 nt, Human
acacaagaagaagggcacccua

SEQ ID NO: 2594636 - RNA, 15 nt, Human
acacacacacaugca

SEQ ID NO: 2594637 - RNA, 17 nt, Human
acaauguauuuauuuaa

SEQ ID NO: 2594638 - RNA, 14 nt, Human
acaauguauuuauu

SEQ ID NO: 2594639 - RNA, 19 nt, Human
acaauguauuuauuuaaaa

SEQ ID NO: 2594640 - RNA, 18 nt, Human
acacaacuauuuuuccaa

SEQ ID NO: 2594641 - RNA, 17 nt, Human
acacaacuauauuguuu

SEQ ID NO: 2594642 - RNA, 14 nt, Human
acacaacuauauug

SEQ ID NO: 2594643 - RNA, 21 nt, Human
acaaugguuuucuuguguguu

SEQ ID NO: 2594644 - RNA, 17 nt, Human
acaaugcugauuuggug

SEQ ID NO: 2594645 - RNA, 19 nt, Human
uagcuuagagccucccuca

SEQ ID NO: 2594646 - RNA, 17 nt, Human
uagcuuagagccucccu

SEQ ID NO: 2594647 - RNA, 13 nt, Human
uagcuuagagccu

SEQ ID NO: 2594648 - RNA, 20 nt, Human
uagcuuagaccucagccugu

SEQ ID NO: 2594649 - RNA, 23 nt, Human
uagcuuagaccucagccugugcu

SEQ ID NO: 2594650 - RNA, 16 nt, Human
uagcuuagaccucagc

SEQ ID NO: 2594651 - RNA, 17 nt, Human
uagcuuagaccucagcc

SEQ ID NO: 2594652 - RNA, 18 nt, Human
uagcuuagaccucagccu

SEQ ID NO: 2594653 - RNA, 19 nt, Human
uagcuuagaccucagccug

SEQ ID NO: 2594654 - RNA, 17 nt, Human
acaaugcuguauuuuaa

SEQ ID NO: 2594655 - RNA, 14 nt, Human
acaaugcuguauuu

SEQ ID NO: 2594656 - RNA, 15 nt, Human
acaaugguuuucuug

SEQ ID NO: 2594657 - RNA, 17 nt, Human
acaauggggauguugug

SEQ ID NO: 2594658 - RNA, 21 nt, Human
acaauggcuaauucccagagu

SEQ ID NO: 2594659 - RNA, 15 nt, Human
ucacaguucucuccu

SEQ ID NO: 2594660 - RNA, 22 nt, Human
ucacaguuacccuaaacucucu

SEQ ID NO: 2594661 - RNA, 13 nt, Human
ucacaguuccucg

SEQ ID NO: 2594662 - RNA, 14 nt, Human
ucacaguuccucgc

SEQ ID NO: 2594663 - RNA, 16 nt, Human
ucacaguuccucgccc

SEQ ID NO: 2594664 - RNA, 17 nt, Human
ucacaguuccucgcccu

SEQ ID NO: 2594665 - RNA, 18 nt, Human
ucacaguuccucgcccug

SEQ ID NO: 2594666 - RNA, 19 nt, Human
ucacaguuccucgcccugg

SEQ ID NO: 2594667 - RNA, 20 nt, Human
ucacaguuccucgcccuggg

SEQ ID NO: 2594668 - RNA, 21 nt, Human
ucacaguuccucgcccugggu

SEQ ID NO: 2594669 - RNA, 22 nt, Human
ucacaguuccucgcccuggguc

SEQ ID NO: 2594670 - RNA, 23 nt, Human
ucacauccuggccuggcacauca

SEQ ID NO: 2594671 - RNA, 18 nt, Human
ucacauccuguguuucua

SEQ ID NO: 2594672 - RNA, 19 nt, Human
ucacauccuguguuucuag

SEQ ID NO: 2594673 - RNA, 15 nt, Human
ucacauccuggccug

SEQ ID NO: 2594674 - RNA, 11 nt, Human
ucacauccugg

SEQ ID NO: 2594675 - RNA, 10 nt, Human
ucacauccug

SEQ ID NO: 2594676 - RNA, 19 nt, Human
ucacauccuggccuggcac

SEQ ID NO: 2594677 - RNA, 18 nt, Human
ucacauccuggccuggca

SEQ ID NO: 2594678 - RNA, 17 nt, Human
ucacauccuguguuucu

SEQ ID NO: 2594679 - RNA, 15 nt, Human
ucacauaucugucau

SEQ ID NO: 2594680 - RNA, 12 nt, Human
ucacauaucugu

SEQ ID NO: 2594681 - RNA, 20 nt, Human
ucacaaauccuaaaagaagc

SEQ ID NO: 2594682 - RNA, 16 nt, Human
ucacaacaaccugguc

SEQ ID NO: 2594683 - RNA, 21 nt, Human
ucacaacagauuauuaccuua

SEQ ID NO: 2594684 - RNA, 23 nt, Human
ucacaccugacucugaaaucuga

SEQ ID NO: 2594685 - RNA, 12 nt, Human
ucacaacagauc

SEQ ID NO: 2594686 - RNA, 19 nt, Human
ucacacgaggggccccgug

SEQ ID NO: 2594687 - RNA, 19 nt, Human
ucacaccuguaaucccaac

SEQ ID NO: 2594688 - RNA, 22 nt, Human
ucacacgucuggcuucacagau

SEQ ID NO: 2594689 - RNA, 17 nt, Human
ucacacgggguauuuua

SEQ ID NO: 2594690 - RNA, 18 nt, Human
ucacacgggggcagcuga

SEQ ID NO: 2594691 - RNA, 17 nt, Human
ucacacgggggcagcug

SEQ ID NO: 2594692 - RNA, 19 nt, Human
ucacacugagaauguaaga

SEQ ID NO: 2594693 - RNA, 12 nt, Human
ucacacugagaa

SEQ ID NO: 2594694 - RNA, 17 nt, Human
ucacacucucacauguu

SEQ ID NO: 2594695 - RNA, 16 nt, Human
ucacacucucacaugu

SEQ ID NO: 2594696 - RNA, 11 nt, Human
ucacacugaga

SEQ ID NO: 2594697 - RNA, 21 nt, Human
ucacacugagaauguaagaac

SEQ ID NO: 2594698 - RNA, 20 nt, Human
ucacacugagaauguaagaa

SEQ ID NO: 2594699 - RNA, 23 nt, Human
ucacacugagaauguaagaacua

SEQ ID NO: 2594700 - RNA, 17 nt, Human
ucacaguguugcccagg

SEQ ID NO: 2594701 - RNA, 23 nt, Human
ucacaguguuugcaaugguguug

SEQ ID NO: 2594702 - RNA, 22 nt, Human
ucacaguguuugcaaugguguu

SEQ ID NO: 2594703 - RNA, 18 nt, Human
ucacaguguuugcaaugg

SEQ ID NO: 2594704 - RNA, 14 nt, Human
ucacaguguuugca

SEQ ID NO: 2594705 - RNA, 11 nt, Human
ucacaguguuu

SEQ ID NO: 2594706 - RNA, 13 nt, Human
ucacacucugggu

SEQ ID NO: 2594707 - RNA, 14 nt, Human
ucacaguguuucga

SEQ ID NO: 2594708 - RNA, 14 nt, Human
ucacaugaccacau

SEQ ID NO: 2594709 - RNA, 13 nt, Human
ucacaugaccaca

SEQ ID NO: 2594710 - RNA, 21 nt, Human
ucacaugaacauacuggcugg

SEQ ID NO: 2594711 - RNA, 20 nt, Human
ucacaucuuucacacuucca

SEQ ID NO: 2594712 - RNA, 22 nt, Human
ucacaucuuucacacuuccacc

SEQ ID NO: 2594713 - RNA, 15 nt, Human
ucacaucuuggcaca

SEQ ID NO: 2594714 - RNA, 14 nt, Human
ucacaucuuucaca

SEQ ID NO: 2594715 - RNA, 17 nt, Human
ucacaucuuucacacuu

SEQ ID NO: 2594716 - RNA, 15 nt, Human
ucaccaggggcaggc

SEQ ID NO: 2594717 - RNA, 21 nt, Human
ucaccaggggcaggcacagca

SEQ ID NO: 2594718 - RNA, 19 nt, Human
ucaccaggggcaggcacag

SEQ ID NO: 2594719 - RNA, 18 nt, Human
ucaccaggggcaggcaca

SEQ ID NO: 2594720 - RNA, 23 nt, Human
ucacaugagcuauuuccauucca

SEQ ID NO: 2594721 - RNA, 18 nt, Human
ucacaugaccacauagca

SEQ ID NO: 2594722 - RNA, 20 nt, Human
ucacaugaccacauagcaug

SEQ ID NO: 2594723 - RNA, 17 nt, Human
ucaccagcugccucuuc

SEQ ID NO: 2594724 - RNA, 15 nt, Human
ucaccagcugccucu

SEQ ID NO: 2594725 - RNA, 20 nt, Human
ucaccagcugccucuucugu

SEQ ID NO: 2594726 - RNA, 22 nt, Human
ucaccaggaauguuaaagucag

SEQ ID NO: 2594727 - RNA, 22 nt, Human
ucaccaggggcaggcacagcac

SEQ ID NO: 2594728 - RNA, 13 nt, Human
ucaccaguguccc

SEQ ID NO: 2594729 - RNA, 19 nt, Human
ucaccagugcgauucugga

SEQ ID NO: 2594730 - RNA, 21 nt, Human
ucaccaguguccccuccacug

SEQ ID NO: 2594731 - RNA, 14 nt, Human
ucaccaucucaggc

SEQ ID NO: 2594732 - RNA, 20 nt, Human
ucaccaguguccccuccacu

SEQ ID NO: 2594733 - RNA, 17 nt, Human
ucaccaguguccccucc

SEQ ID NO: 2594734 - RNA, 17 nt, Human
ucacccaugaagacagg

SEQ ID NO: 2594735 - RNA, 21 nt, Human
ucacccagcuaaucuguaggg

SEQ ID NO: 2594736 - RNA, 17 nt, Human
ucacccagcuaaucugu

SEQ ID NO: 2594737 - RNA, 16 nt, Human
ucacccagccccaggg

SEQ ID NO: 2594738 - RNA, 15 nt, Human
ucaccaucucaggcc

SEQ ID NO: 2594739 - RNA, 16 nt, Human
ucaccaucucaggcca

SEQ ID NO: 2594740 - RNA, 15 nt, Human
ucaccccggccaccu

SEQ ID NO: 2594741 - RNA, 21 nt, Human
ucaccccaguggccacucagc

SEQ ID NO: 2594742 - RNA, 22 nt, Human
ucaccccaccccaccccaccuc

SEQ ID NO: 2594743 - RNA, 12 nt, Human
ucaccccauccc

SEQ ID NO: 2594744 - RNA, 13 nt, Human
ucaccccauccca

SEQ ID NO: 2594745 - RNA, 16 nt, Human
ucaccccagggccuga

SEQ ID NO: 2594746 - RNA, 19 nt, Human
ucaccccagggccugagcc

SEQ ID NO: 2594747 - RNA, 20 nt, Human
ucaccccagggccugagccu

SEQ ID NO: 2594748 - RNA, 21 nt, Human
ucaccccagggccugagccug

SEQ ID NO: 2594749 - RNA, 13 nt, Human
ucaccccagggcc

SEQ ID NO: 2594750 - RNA, 15 nt, Human
ucaccccagggccug

SEQ ID NO: 2594751 - RNA, 12 nt, Human
ucaccccagggc

SEQ ID NO: 2594752 - RNA, 13 nt, Human
ucaccccacccuu

SEQ ID NO: 2594753 - RNA, 20 nt, Human
ucaccccagccccaaaacuc

SEQ ID NO: 2594754 - RNA, 14 nt, Human
ucaccccagcccca

SEQ ID NO: 2594755 - RNA, 13 nt, Human
ucaccccagcccc

SEQ ID NO: 2594756 - RNA, 22 nt, Human
ucaccccacuuaucccucucca

SEQ ID NO: 2594757 - RNA, 12 nt, Human
ucacccaugugc

SEQ ID NO: 2594758 - RNA, 12 nt, Human
ucaccccacccu

SEQ ID NO: 2594759 - RNA, 22 nt, Human
accaacauacucccaucuguga

SEQ ID NO: 2594760 - RNA, 21 nt, Human
accaacauacucccaucugug

SEQ ID NO: 2594761 - RNA, 19 nt, Human
accaacauacucccaucug

SEQ ID NO: 2594762 - RNA, 20 nt, Human
ucaagugauucucaugccuc

SEQ ID NO: 2594763 - RNA, 17 nt, Human
accaacauacucccauc

SEQ ID NO: 2594764 - RNA, 15 nt, Human
ucaagugaaaaagga

SEQ ID NO: 2594765 - RNA, 15 nt, Human
ucaagucaaauuaau

SEQ ID NO: 2594766 - RNA, 15 nt, Human
ucaagucaccuccuu

SEQ ID NO: 2594767 - RNA, 17 nt, Human
ucaagugauucucaugc

SEQ ID NO: 2594768 - RNA, 15 nt, Human
ucaagucacucccaa

SEQ ID NO: 2594769 - RNA, 15 nt, Human
ucaagugaaucuaaa

SEQ ID NO: 2594770 - RNA, 19 nt, Human
ucaagugaaucuaaaagcu

SEQ ID NO: 2594771 - RNA, 23 nt, Human
ucaagugaaaaaggaggaagaga

SEQ ID NO: 2594772 - RNA, 15 nt, Human
accaaucaugaauua

SEQ ID NO: 2594773 - RNA, 15 nt, Human
accaauguucucucu

SEQ ID NO: 2594774 - RNA, 13 nt, Human
accaaucaugaau

SEQ ID NO: 2594775 - RNA, 11 nt, Human
accaauauuug

SEQ ID NO: 2594776 - RNA, 13 nt, Human
accaauauuugua

SEQ ID NO: 2594777 - RNA, 16 nt, Human
accaauauuuguagaa

SEQ ID NO: 2594778 - RNA, 17 nt, Human
accaauauuguacaguu

SEQ ID NO: 2594779 - RNA, 16 nt, Human
accaauauuguacagu

SEQ ID NO: 2594780 - RNA, 14 nt, Human
accaauauuguaca

SEQ ID NO: 2594781 - RNA, 15 nt, Human
accaauauuguacag

SEQ ID NO: 2594782 - RNA, 19 nt, Human
accaauauuguacaguuuu

SEQ ID NO: 2594783 - RNA, 18 nt, Human
accaacaucccauugccc

SEQ ID NO: 2594784 - RNA, 18 nt, Human
accaauauuguacaguuu

SEQ ID NO: 2594785 - RNA, 22 nt, Human
ucaauuuuaucccucaccugua

SEQ ID NO: 2594786 - RNA, 21 nt, Human
ucaauuuuaucccucaccugu

SEQ ID NO: 2594787 - RNA, 16 nt, Human
ucaauuuuaucccuca

SEQ ID NO: 2594788 - RNA, 23 nt, Human
ucaauucuucccuaucuuugcca

SEQ ID NO: 2594789 - RNA, 17 nt, Human
ucaauucuucccuaucu

SEQ ID NO: 2594790 - RNA, 19 nt, Human
ucaauucuucccuaucuuu

SEQ ID NO: 2594791 - RNA, 15 nt, Human
ucaauucuugccaaa

SEQ ID NO: 2594792 - RNA, 20 nt, Human
ucaauuuuucuuauuucauu

SEQ ID NO: 2594793 - RNA, 23 nt, Human
ucaauuuuucuuauuucauuucu

SEQ ID NO: 2594794 - RNA, 11 nt, Human
ucacaaauaaa

SEQ ID NO: 2594795 - RNA, 20 nt, Human
ucaauuuuugguugaauaaa

SEQ ID NO: 2594796 - RNA, 16 nt, Human
accacaccucccugaa

SEQ ID NO: 2594797 - RNA, 22 nt, Human
accacacguaaugaaacuugga

SEQ ID NO: 2594798 - RNA, 14 nt, Human
accacacuccagcu

SEQ ID NO: 2594799 - RNA, 13 nt, Human
accacacccugua

SEQ ID NO: 2594800 - RNA, 24 nt, Human
accacacccagccucaguccuccc

SEQ ID NO: 2594801 - RNA, 17 nt, Human
accacacccuguacugu

SEQ ID NO: 2594802 - RNA, 16 nt, Human
accacaccgcagaagc

SEQ ID NO: 2594803 - RNA, 15 nt, Human
accacaccucccuga

SEQ ID NO: 2594804 - RNA, 16 nt, Human
ucaauuccucugggaa

SEQ ID NO: 2594805 - RNA, 13 nt, Human
ucaauuccugggc

SEQ ID NO: 2594806 - RNA, 12 nt, Human
ucaauucucaaa

SEQ ID NO: 2594807 - RNA, 17 nt, Human
ucaauuccugggcccca

SEQ ID NO: 2594808 - RNA, 22 nt, Human
accacaccucccugaaccaucc

SEQ ID NO: 2594809 - RNA, 13 nt, Human
accacacuggacu

SEQ ID NO: 2594810 - RNA, 15 nt, Human
ucaauuccucuggga

SEQ ID NO: 2594811 - RNA, 16 nt, Human
accacacuggacuccg

SEQ ID NO: 2594812 - RNA, 14 nt, Human
accacaaaaauuga

SEQ ID NO: 2594813 - RNA, 17 nt, Human
accaauugauuuuaaac

SEQ ID NO: 2594814 - RNA, 22 nt, Human
accacacccagccucaguccuc

SEQ ID NO: 2594815 - RNA, 17 nt, Human
accacacccagccucag

SEQ ID NO: 2594816 - RNA, 16 nt, Human
accacacccagccuca

SEQ ID NO: 2594817 - RNA, 15 nt, Human
accacacccagccuc

SEQ ID NO: 2594818 - RNA, 14 nt, Human
accacaaaaaugaa

SEQ ID NO: 2594819 - RNA, 14 nt, Human
accacacccagccu

SEQ ID NO: 2594820 - RNA, 13 nt, Human
accaaucauuuua

SEQ ID NO: 2594821 - RNA, 13 nt, Human
accaaugucuuga

SEQ ID NO: 2594822 - RNA, 14 nt, Human
accaauugccaaag

SEQ ID NO: 2594823 - RNA, 16 nt, Human
accaauucaacccuuu

SEQ ID NO: 2594824 - RNA, 16 nt, Human
accaauugguuaaucu

SEQ ID NO: 2594825 - RNA, 11 nt, Human
accagacaggu

SEQ ID NO: 2594826 - RNA, 14 nt, Human
accagacaccuuga

SEQ ID NO: 2594827 - RNA, 16 nt, Human
accagacacccaggac

SEQ ID NO: 2594828 - RNA, 17 nt, Human
accagacacccaggacu

SEQ ID NO: 2594829 - RNA, 19 nt, Human
accagacgguucaccagcc

SEQ ID NO: 2594830 - RNA, 20 nt, Human
accagacgguucaccagccu

SEQ ID NO: 2594831 - RNA, 16 nt, Human
accagagcccaccuug

SEQ ID NO: 2594832 - RNA, 14 nt, Human
accagagcccaccu

SEQ ID NO: 2594833 - RNA, 12 nt, Human
accagagcccac

SEQ ID NO: 2594834 - RNA, 22 nt, Human
accacuuuuguucuugguuugu

SEQ ID NO: 2594835 - RNA, 13 nt, Human
accagaacaaggu

SEQ ID NO: 2594836 - RNA, 14 nt, Human
accagaagcccaga

SEQ ID NO: 2594837 - RNA, 16 nt, Human
accagaagcccagaau

SEQ ID NO: 2594838 - RNA, 13 nt, Human
accagaagcccag

SEQ ID NO: 2594839 - RNA, 14 nt, Human
accagacacccagg

SEQ ID NO: 2594840 - RNA, 15 nt, Human
accagacacccagga

SEQ ID NO: 2594841 - RNA, 15 nt, Human
accagaagcaacaga

SEQ ID NO: 2594842 - RNA, 14 nt, Human
accagaagccaaag

SEQ ID NO: 2594843 - RNA, 18 nt, Human
accacuuguguuuugcaa

SEQ ID NO: 2594844 - RNA, 15 nt, Human
accacuuuuguucuu

SEQ ID NO: 2594845 - RNA, 16 nt, Human
accacuuuuguucuug

SEQ ID NO: 2594846 - RNA, 21 nt, Human
accacuuuuguucuugguuug

SEQ ID NO: 2594847 - RNA, 15 nt, Human
accacugucuucuuc

SEQ ID NO: 2594848 - RNA, 17 nt, Human
accacuucauucuugaa

SEQ ID NO: 2594849 - RNA, 13 nt, Human
accacuucauucu

SEQ ID NO: 2594850 - RNA, 13 nt, Human
accacuucgaaac

SEQ ID NO: 2594851 - RNA, 15 nt, Human
accacuucuuuuaua

SEQ ID NO: 2594852 - RNA, 16 nt, Human
accacuucuuuuauaa

SEQ ID NO: 2594853 - RNA, 17 nt, Human
accacuucuuuuauaac

SEQ ID NO: 2594854 - RNA, 18 nt, Human
accacuggccaccaggcu

SEQ ID NO: 2594855 - RNA, 17 nt, Human
accacuggccaccaggc

SEQ ID NO: 2594856 - RNA, 16 nt, Human
accacuggccaccagg

SEQ ID NO: 2594857 - RNA, 15 nt, Human
accacuggccaccag

SEQ ID NO: 2594858 - RNA, 20 nt, Human
accacuggccaccaggcugg

SEQ ID NO: 2594859 - RNA, 19 nt, Human
accacuggccaccaggcug

SEQ ID NO: 2594860 - RNA, 16 nt, Human
accacuggucuguagg

SEQ ID NO: 2594861 - RNA, 16 nt, Human
accacuguguauuuaa

SEQ ID NO: 2594862 - RNA, 21 nt, Human
accacuggccaccaggcuggc

SEQ ID NO: 2594863 - RNA, 19 nt, Human
accacuguaaaaugaaauu

SEQ ID NO: 2594864 - RNA, 13 nt, Human
accacugucuucu

SEQ ID NO: 2594865 - RNA, 20 nt, Human
accacuguaaaaugaaauua

SEQ ID NO: 2594866 - RNA, 18 nt, Human
ucaccccggccaccugcg

SEQ ID NO: 2594867 - RNA, 17 nt, Human
ucaccccggccaccugc

SEQ ID NO: 2594868 - RNA, 17 nt, Human
accacugcacuccagcc

SEQ ID NO: 2594869 - RNA, 20 nt, Human
accacugcacuccagccugg

SEQ ID NO: 2594870 - RNA, 21 nt, Human
accacugcacuccagccuggg

SEQ ID NO: 2594871 - RNA, 18 nt, Human
accacugcacuccagccu

SEQ ID NO: 2594872 - RNA, 15 nt, Human
accacugcucugaug

SEQ ID NO: 2594873 - RNA, 17 nt, Human
accacugcucugaugaa

SEQ ID NO: 2594874 - RNA, 23 nt, Human
accacugcucugaugaagaggag

SEQ ID NO: 2594875 - RNA, 12 nt, Human
accacuggccac

SEQ ID NO: 2594876 - RNA, 14 nt, Human
accacuggccacca

SEQ ID NO: 2594877 - RNA, 19 nt, Human
ucaccugauucaacuaaaa

SEQ ID NO: 2594878 - RNA, 21 nt, Human
ucaccugauucaacuaaaaaa

SEQ ID NO: 2594879 - RNA, 16 nt, Human
ucaccugccccaacuc

SEQ ID NO: 2594880 - RNA, 14 nt, Human
ucaccugugcuucg

SEQ ID NO: 2594881 - RNA, 15 nt, Human
ucaccugccccucaa

SEQ ID NO: 2594882 - RNA, 13 nt, Human
ucaccugccccuc

SEQ ID NO: 2594883 - RNA, 19 nt, Human
ucaccugagucacccuacc

SEQ ID NO: 2594884 - RNA, 12 nt, Human
ucaccugauuca

SEQ ID NO: 2594885 - RNA, 18 nt, Human
ucaccugauucaacuaaa

SEQ ID NO: 2594886 - RNA, 17 nt, Human
ucaccugaggucgggag

SEQ ID NO: 2594887 - RNA, 17 nt, Human
ucaccucuuaaagaaaa

SEQ ID NO: 2594888 - RNA, 16 nt, Human
ucaccugaagacucau

SEQ ID NO: 2594889 - RNA, 18 nt, Human
ucaccucuggacuggcua

SEQ ID NO: 2594890 - RNA, 19 nt, Human
ucaccucuggacuggcuag

SEQ ID NO: 2594891 - RNA, 23 nt, Human
accaggcuggcgcagccaaggcc

SEQ ID NO: 2594892 - RNA, 12 nt, Human
ucaccucugccu

SEQ ID NO: 2594893 - RNA, 13 nt, Human
ucaccucugccuc

SEQ ID NO: 2594894 - RNA, 14 nt, Human
ucaccucugccuca

SEQ ID NO: 2594895 - RNA, 15 nt, Human
ucaccucugccucaa

SEQ ID NO: 2594896 - RNA, 15 nt, Human
ucaccucucccuugg

SEQ ID NO: 2594897 - RNA, 19 nt, Human
accaggcuugccugcaggc

SEQ ID NO: 2594898 - RNA, 20 nt, Human
ucaccucuaaaacaguccuu

SEQ ID NO: 2594899 - RNA, 21 nt, Human
accagccuccaugcugccucc

SEQ ID NO: 2594900 - RNA, 20 nt, Human
accagccuccaugcugccuc

SEQ ID NO: 2594901 - RNA, 19 nt, Human
accagccuccaugcugccu

SEQ ID NO: 2594902 - RNA, 14 nt, Human
accagccuccaugc

SEQ ID NO: 2594903 - RNA, 20 nt, Human
accagacuguggagaaauaa

SEQ ID NO: 2594904 - RNA, 18 nt, Human
accagacuguggagaaau

SEQ ID NO: 2594905 - RNA, 13 nt, Human
accagacugugga

SEQ ID NO: 2594906 - RNA, 21 nt, Human
accagacuguggagaaauaaa

SEQ ID NO: 2594907 - RNA, 16 nt, Human
accaggcuggcgcagc

SEQ ID NO: 2594908 - RNA, 19 nt, Human
accaggcugcucagggcug

SEQ ID NO: 2594909 - RNA, 20 nt, Human
accaggccguccucccgggc

SEQ ID NO: 2594910 - RNA, 19 nt, Human
accaggccguccucccggg

SEQ ID NO: 2594911 - RNA, 12 nt, Human
accaggccuggg

SEQ ID NO: 2594912 - RNA, 23 nt, Human
accaggcgagagacuuguggccu

SEQ ID NO: 2594913 - RNA, 17 nt, Human
accagccucgucuucau

SEQ ID NO: 2594914 - RNA, 20 nt, Human
accagccuccguauuucaga

SEQ ID NO: 2594915 - RNA, 18 nt, Human
accaggccguccucccgg

SEQ ID NO: 2594916 - RNA, 19 nt, Human
accagccucgucuucauua

SEQ ID NO: 2594917 - RNA, 16 nt, Human
accaggccguccuccc

SEQ ID NO: 2594918 - RNA, 14 nt, Human
accagggacugagg

SEQ ID NO: 2594919 - RNA, 22 nt, Human
accaggcuggcgcagccaaggc

SEQ ID NO: 2594920 - RNA, 20 nt, Human
accaggcuggcgcagccaag

SEQ ID NO: 2594921 - RNA, 19 nt, Human
accaggcuggcgcagccaa

SEQ ID NO: 2594922 - RNA, 17 nt, Human
accaggcuggcgcagcc

SEQ ID NO: 2594923 - RNA, 18 nt, Human
accaggcuugccugcagg

SEQ ID NO: 2594924 - RNA, 20 nt, Human
ucacuauguugcccaggcag

SEQ ID NO: 2594925 - RNA, 19 nt, Human
ucacuauguugcccaggca

SEQ ID NO: 2594926 - RNA, 17 nt, Human
ucacuauguugcccagg

SEQ ID NO: 2594927 - RNA, 18 nt, Human
ucacuauguugcccaggc

SEQ ID NO: 2594928 - RNA, 20 nt, Human
ucacucccuucuaccugcca

SEQ ID NO: 2594929 - RNA, 19 nt, Human
ucacucccuucuaccugcc

SEQ ID NO: 2594930 - RNA, 15 nt, Human
ucacucccuucuacc

SEQ ID NO: 2594931 - RNA, 13 nt, Human
ucacuccccucca

SEQ ID NO: 2594932 - RNA, 15 nt, Human
ucacucccuccauca

SEQ ID NO: 2594933 - RNA, 22 nt, Human
ucacuaggcccccacuugccuc

SEQ ID NO: 2594934 - RNA, 14 nt, Human
ucacucccagucca

SEQ ID NO: 2594935 - RNA, 14 nt, Human
ucacuccggugugc

SEQ ID NO: 2594936 - RNA, 17 nt, Human
ucacuccggugugccug

SEQ ID NO: 2594937 - RNA, 19 nt, Human
ucacuccggugugccugca

SEQ ID NO: 2594938 - RNA, 20 nt, Human
ucacuccggugugccugcag

SEQ ID NO: 2594939 - RNA, 21 nt, Human
ucacuccggugugccugcagc

SEQ ID NO: 2594940 - RNA, 22 nt, Human
ucacuccggugugccugcagcc

SEQ ID NO: 2594941 - RNA, 23 nt, Human
ucacuccggugugccugcagccc

SEQ ID NO: 2594942 - RNA, 20 nt, Human
ucaccuguuuuuaagcuguu

SEQ ID NO: 2594943 - RNA, 19 nt, Human
ucaccuguuuuuaagcugu

SEQ ID NO: 2594944 - RNA, 21 nt, Human
ucaccuguugcuuacaauuuu

SEQ ID NO: 2594945 - RNA, 20 nt, Human
ucaccuguugcuuacaauuu

SEQ ID NO: 2594946 - RNA, 18 nt, Human
ucaccuguuuuuaagcug

SEQ ID NO: 2594947 - RNA, 20 nt, Human
ucaccugugcuucgggcccu

SEQ ID NO: 2594948 - RNA, 21 nt, Human
ucaccugugcuucgggcccuu

SEQ ID NO: 2594949 - RNA, 19 nt, Human
ucaccuguugcuuacaauu

SEQ ID NO: 2594950 - RNA, 18 nt, Human
ucaccuguugcuuacaau

SEQ ID NO: 2594951 - RNA, 14 nt, Human
ucaccuguugcuua

SEQ ID NO: 2594952 - RNA, 23 nt, Human
ucaccugcccagaucccagaagg

SEQ ID NO: 2594953 - RNA, 22 nt, Human
ucaccuguuuuuaagcuguuuc

SEQ ID NO: 2594954 - RNA, 21 nt, Human
ucaccuguuuuuaagcuguuu

SEQ ID NO: 2594955 - RNA, 15 nt, Human
ucaccuuaggcaggg

SEQ ID NO: 2594956 - RNA, 18 nt, Human
ucaccuuaggcagggaag

SEQ ID NO: 2594957 - RNA, 20 nt, Human
ucaccuuaggcagggaagug

SEQ ID NO: 2594958 - RNA, 21 nt, Human
ucacuaggcccccacuugccu

SEQ ID NO: 2594959 - RNA, 19 nt, Human
ucacuaggcccccacuugc

SEQ ID NO: 2594960 - RNA, 14 nt, Human
ucacuagccaugau

SEQ ID NO: 2594961 - RNA, 14 nt, Human
ucacuacugcaguc

SEQ ID NO: 2594962 - RNA, 17 nt, Human
ucacuagauggcgagca

SEQ ID NO: 2594963 - RNA, 12 nt, Human
ucacuacugcag

SEQ ID NO: 2594964 - RNA, 21 nt, Human
ucacuacucacagucucuuua

SEQ ID NO: 2594965 - RNA, 22 nt, Human
ucacuacucacagucucuuuaa

SEQ ID NO: 2594966 - RNA, 19 nt, Human
ucacuaccuccucagggau

SEQ ID NO: 2594967 - RNA, 18 nt, Human
ucacuaccuccucaggga

SEQ ID NO: 2594968 - RNA, 16 nt, Human
ucacuaccuccucagg

SEQ ID NO: 2594969 - RNA, 15 nt, Human
ucacuaccuccucag

SEQ ID NO: 2594970 - RNA, 14 nt, Human
ucacuaccuccuca

SEQ ID NO: 2594971 - RNA, 20 nt, Human
ucacuacccuauucucucuu

SEQ ID NO: 2594972 - RNA, 21 nt, Human
ucaccuucguuuacuaugccu

SEQ ID NO: 2594973 - RNA, 19 nt, Human
ucacuacucacagucucuu

SEQ ID NO: 2594974 - RNA, 20 nt, Human
ucacuaccuccucagggaug

SEQ ID NO: 2594975 - RNA, 18 nt, Human
ucagagccugcaguuauu

SEQ ID NO: 2594976 - RNA, 15 nt, Human
ucagagccugcaguu

SEQ ID NO: 2594977 - RNA, 14 nt, Human
ucagagccugcagu

SEQ ID NO: 2594978 - RNA, 13 nt, Human
ucagagccugcag

SEQ ID NO: 2594979 - RNA, 21 nt, Human
ucagagagggugggagugggc

SEQ ID NO: 2594980 - RNA, 16 nt, Human
ucagagagggugggag

SEQ ID NO: 2594981 - RNA, 23 nt, Human
ucagagagggugggagugggccc

SEQ ID NO: 2594982 - RNA, 12 nt, Human
ucagagccugca

SEQ ID NO: 2594983 - RNA, 20 nt, Human
ucagagacuccugcaggcag

SEQ ID NO: 2594984 - RNA, 17 nt, Human
ucagagacuccugcagg

SEQ ID NO: 2594985 - RNA, 16 nt, Human
ucagagacuccugcag

SEQ ID NO: 2594986 - RNA, 16 nt, Human
ucagagaggccuuuug

SEQ ID NO: 2594987 - RNA, 21 nt, Human
ucagagacuccugcaggcagc

SEQ ID NO: 2594988 - RNA, 18 nt, Human
ucagaaucucaaauaacu

SEQ ID NO: 2594989 - RNA, 19 nt, Human
ucagaaucucaaauaacua

SEQ ID NO: 2594990 - RNA, 17 nt, Human
ucagaaucucucuucuu

SEQ ID NO: 2594991 - RNA, 20 nt, Human
ucagaaucuacccaaaggau

SEQ ID NO: 2594992 - RNA, 14 nt, Human
ucagaagacacuga

SEQ ID NO: 2594993 - RNA, 12 nt, Human
ucagaagauaac

SEQ ID NO: 2594994 - RNA, 17 nt, Human
acccagccucaguccuc

SEQ ID NO: 2594995 - RNA, 13 nt, Human
acccagccucagu

SEQ ID NO: 2594996 - RNA, 14 nt, Human
ucagaagauaacuu

SEQ ID NO: 2594997 - RNA, 16 nt, Human
ucagaagccucugggu

SEQ ID NO: 2594998 - RNA, 13 nt, Human
ucagaagccugag

SEQ ID NO: 2594999 - RNA, 15 nt, Human
ucagaagccugaggc

SEQ ID NO: 2595000 - RNA, 20 nt, Human
ucagaagccugaggcuggga

SEQ ID NO: 2595001 - RNA, 12 nt, Human
acccagccucag

SEQ ID NO: 2595002 - RNA, 18 nt, Human
acccagccgcugcccggc

SEQ ID NO: 2595003 - RNA, 16 nt, Human
acccagccgcugcccg

SEQ ID NO: 2595004 - RNA, 14 nt, Human
acccagccgcugcc

SEQ ID NO: 2595005 - RNA, 13 nt, Human
acccagccgcugc

SEQ ID NO: 2595006 - RNA, 21 nt, Human
acccagcccuggucucagcag

SEQ ID NO: 2595007 - RNA, 19 nt, Human
acccagcccuggucucagc

SEQ ID NO: 2595008 - RNA, 16 nt, Human
acccagcccuggucuc

SEQ ID NO: 2595009 - RNA, 15 nt, Human
acccagcccuggucu

SEQ ID NO: 2595010 - RNA, 14 nt, Human
acccagcccugguc

SEQ ID NO: 2595011 - RNA, 13 nt, Human
acccagcccuggu

SEQ ID NO: 2595012 - RNA, 12 nt, Human
acccagcccugg

SEQ ID NO: 2595013 - RNA, 15 nt, Human
acccagcccucaucc

SEQ ID NO: 2595014 - RNA, 16 nt, Human
acccagcccucauccc

SEQ ID NO: 2595015 - RNA, 21 nt, Human
acccagccccuugagaaaccu

SEQ ID NO: 2595016 - RNA, 20 nt, Human
acccagccccuugagaaacc

SEQ ID NO: 2595017 - RNA, 17 nt, Human
acccagccccuugagaa

SEQ ID NO: 2595018 - RNA, 16 nt, Human
acccagccccuugaga

SEQ ID NO: 2595019 - RNA, 22 nt, Human
acccagaggaaggggccagagg

SEQ ID NO: 2595020 - RNA, 19 nt, Human
acccagaguuuuuauguag

SEQ ID NO: 2595021 - RNA, 19 nt, Human
acccagcccauucucucuc

SEQ ID NO: 2595022 - RNA, 14 nt, Human
acccagccccaggg

SEQ ID NO: 2595023 - RNA, 22 nt, Human
acccagcccauucucucuccug

SEQ ID NO: 2595024 - RNA, 23 nt, Human
acccagcccauucucucuccugu

SEQ ID NO: 2595025 - RNA, 22 nt, Human
ucagaaguuucugccgcagccc

SEQ ID NO: 2595026 - RNA, 19 nt, Human
ucagaaguuucugccgcag

SEQ ID NO: 2595027 - RNA, 15 nt, Human
ucagaagugagcuuu

SEQ ID NO: 2595028 - RNA, 19 nt, Human
ucagaagugagcuuugcug

SEQ ID NO: 2595029 - RNA, 21 nt, Human
ucagaagugagcuuugcugcu

SEQ ID NO: 2595030 - RNA, 19 nt, Human
ucagaaguuucucagcucc

SEQ ID NO: 2595031 - RNA, 19 nt, Human
ucagaaggcaaaugacuuu

SEQ ID NO: 2595032 - RNA, 22 nt, Human
ucagaaggcaaaugacuuugga

SEQ ID NO: 2595033 - RNA, 18 nt, Human
ucagaaggcaaaugacuu

SEQ ID NO: 2595034 - RNA, 23 nt, Human
ucagaaggagaaggaaggagacu

SEQ ID NO: 2595035 - RNA, 14 nt, Human
ucagaagccuuugg

SEQ ID NO: 2595036 - RNA, 12 nt, Human
ucagaaggagaa

SEQ ID NO: 2595037 - RNA, 13 nt, Human
ucagaaggagaag

SEQ ID NO: 2595038 - RNA, 14 nt, Human
ucagaaggagaagg

SEQ ID NO: 2595039 - RNA, 16 nt, Human
ucagaaggagaaggaa

SEQ ID NO: 2595040 - RNA, 18 nt, Human
ucagaaggagaaggaagg

SEQ ID NO: 2595041 - RNA, 15 nt, Human
ucagaaggggagggg

SEQ ID NO: 2595042 - RNA, 16 nt, Human
ucagaagggaggcugg

SEQ ID NO: 2595043 - RNA, 20 nt, Human
ucagaaggggaggggagaca

SEQ ID NO: 2595044 - RNA, 12 nt, Human
ucagaaggcucu

SEQ ID NO: 2595045 - RNA, 19 nt, Human
ucagaaggagaaggaagga

SEQ ID NO: 2595046 - RNA, 13 nt, Human
ucagaagggaggc

SEQ ID NO: 2595047 - RNA, 20 nt, Human
ucagaaggcucuucugacua

SEQ ID NO: 2595048 - RNA, 12 nt, Human
ucagaagggagg

SEQ ID NO: 2595049 - RNA, 23 nt, Human
accauuucuugagguaaaagcau

SEQ ID NO: 2595050 - RNA, 22 nt, Human
accauuugcauggcuccagaaa

SEQ ID NO: 2595051 - RNA, 14 nt, Human
accauugucuuguu

SEQ ID NO: 2595052 - RNA, 21 nt, Human
acccacguucucacacccacc

SEQ ID NO: 2595053 - RNA, 20 nt, Human
acccacguguaacugucagc

SEQ ID NO: 2595054 - RNA, 23 nt, Human
acccaccuuguuggagccugcag

SEQ ID NO: 2595055 - RNA, 13 nt, Human
acccacucagcuc

SEQ ID NO: 2595056 - RNA, 15 nt, Human
acccacucaucagaa

SEQ ID NO: 2595057 - RNA, 18 nt, Human
acccacucuccucugccu

SEQ ID NO: 2595058 - RNA, 22 nt, Human
acccaccuuguuggagccugca

SEQ ID NO: 2595059 - RNA, 11 nt, Human
acccacugcuc

SEQ ID NO: 2595060 - RNA, 10 nt, Human
acccacugcu

SEQ ID NO: 2595061 - RNA, 11 nt, Human
acccacugcuu

SEQ ID NO: 2595062 - RNA, 15 nt, Human
acccacugcucuggu

SEQ ID NO: 2595063 - RNA, 14 nt, Human
acccacugcucugg

SEQ ID NO: 2595064 - RNA, 13 nt, Human
acccacugcucug

SEQ ID NO: 2595065 - RNA, 16 nt, Human
acccagagaauauaua

SEQ ID NO: 2595066 - RNA, 14 nt, Human
acccagagaauaua

SEQ ID NO: 2595067 - RNA, 22 nt, Human
acccagagaagccccuucccca

SEQ ID NO: 2595068 - RNA, 19 nt, Human
acccagagaagccccuucc

SEQ ID NO: 2595069 - RNA, 18 nt, Human
acccagagaagccccuuc

SEQ ID NO: 2595070 - RNA, 17 nt, Human
acccagagaagccccuu

SEQ ID NO: 2595071 - RNA, 15 nt, Human
acccagacucagaca

SEQ ID NO: 2595072 - RNA, 14 nt, Human
acccagcccauucu

SEQ ID NO: 2595073 - RNA, 24 nt, Human
acccagagcauuacgugagccagg

SEQ ID NO: 2595074 - RNA, 23 nt, Human
acccagagcauuacgugagccag

SEQ ID NO: 2595075 - RNA, 18 nt, Human
acccagagaauauauaca

SEQ ID NO: 2595076 - RNA, 17 nt, Human
acccagagaggaaucag

SEQ ID NO: 2595077 - RNA, 15 nt, Human
acccagacccagugg

SEQ ID NO: 2595078 - RNA, 14 nt, Human
acccagacccagug

SEQ ID NO: 2595079 - RNA, 13 nt, Human
acccagacccagu

SEQ ID NO: 2595080 - RNA, 10 nt, Human
acccagaccc

SEQ ID NO: 2595081 - RNA, 20 nt, Human
acccacucuccucugccuca

SEQ ID NO: 2595082 - RNA, 22 nt, Human
acccagaccuguuagcagacag

SEQ ID NO: 2595083 - RNA, 23 nt, Human
accauuaaaacugaagucugaaa

SEQ ID NO: 2595084 - RNA, 22 nt, Human
accauuaaaacugaagucugaa

SEQ ID NO: 2595085 - RNA, 21 nt, Human
accauuaaaacugaagucuga

SEQ ID NO: 2595086 - RNA, 20 nt, Human
accauuaaaacugaagucug

SEQ ID NO: 2595087 - RNA, 13 nt, Human
accauuaaaacug

SEQ ID NO: 2595088 - RNA, 20 nt, Human
accauguuugagcucagacc

SEQ ID NO: 2595089 - RNA, 21 nt, Human
accauguuugagcucagaccc

SEQ ID NO: 2595090 - RNA, 12 nt, Human
accauuaaaacu

SEQ ID NO: 2595091 - RNA, 18 nt, Human
accauuaugaagaagaga

SEQ ID NO: 2595092 - RNA, 18 nt, Human
accauugaauucuugguu

SEQ ID NO: 2595093 - RNA, 21 nt, Human
accauucagugauuacuguca

SEQ ID NO: 2595094 - RNA, 24 nt, Human
accauucugacucgguuucuccaa

SEQ ID NO: 2595095 - RNA, 23 nt, Human
ucacucuuauugcccacgcugga

SEQ ID NO: 2595096 - RNA, 21 nt, Human
ucacucuuauugcccacgcug

SEQ ID NO: 2595097 - RNA, 21 nt, Human
ucacucuuccagaaucccaag

SEQ ID NO: 2595098 - RNA, 17 nt, Human
ucacucuuccagaaucc

SEQ ID NO: 2595099 - RNA, 15 nt, Human
ucacucuuccagaau

SEQ ID NO: 2595100 - RNA, 21 nt, Human
ucacucccuucuaccugccac

SEQ ID NO: 2595101 - RNA, 15 nt, Human
ucacuccuaccuggu

SEQ ID NO: 2595102 - RNA, 13 nt, Human
ucacucuuggagc

SEQ ID NO: 2595103 - RNA, 19 nt, Human
ucacucuuccugcaaggac

SEQ ID NO: 2595104 - RNA, 18 nt, Human
ucacucuuccugcaagga

SEQ ID NO: 2595105 - RNA, 17 nt, Human
accauguagaaaauuug

SEQ ID NO: 2595106 - RNA, 17 nt, Human
accauguacaugaagaa

SEQ ID NO: 2595107 - RNA, 11 nt, Human
accauguacau

SEQ ID NO: 2595108 - RNA, 14 nt, Human
accauguacauagc

SEQ ID NO: 2595109 - RNA, 21 nt, Human
accauguaaagaacauaaaua

SEQ ID NO: 2595110 - RNA, 22 nt, Human
accauggucggaaaacaugcua

SEQ ID NO: 2595111 - RNA, 16 nt, Human
ucacucuugccaaccu

SEQ ID NO: 2595112 - RNA, 22 nt, Human
accccacccuugcccaccccac

SEQ ID NO: 2595113 - RNA, 14 nt, Human
accccacuacacag

SEQ ID NO: 2595114 - RNA, 20 nt, Human
accccacccuugcccacccc

SEQ ID NO: 2595115 - RNA, 18 nt, Human
accccacccuugcccacc

SEQ ID NO: 2595116 - RNA, 17 nt, Human
accccacccuugcccac

SEQ ID NO: 2595117 - RNA, 16 nt, Human
accccacccuugccca

SEQ ID NO: 2595118 - RNA, 15 nt, Human
accccacccuugccc

SEQ ID NO: 2595119 - RNA, 19 nt, Human
accccacccucccuggagu

SEQ ID NO: 2595120 - RNA, 19 nt, Human
accccacccuuccccuccu

SEQ ID NO: 2595121 - RNA, 12 nt, Human
acccagggccug

SEQ ID NO: 2595122 - RNA, 13 nt, Human
acccagggccugc

SEQ ID NO: 2595123 - RNA, 14 nt, Human
acccagggccugca

SEQ ID NO: 2595124 - RNA, 18 nt, Human
accccacccucccuggag

SEQ ID NO: 2595125 - RNA, 17 nt, Human
accccacccucccugga

SEQ ID NO: 2595126 - RNA, 16 nt, Human
accccacccucccugg

SEQ ID NO: 2595127 - RNA, 21 nt, Human
acccagggcccaggcaaauca

SEQ ID NO: 2595128 - RNA, 20 nt, Human
accccacccucccuggagug

SEQ ID NO: 2595129 - RNA, 13 nt, Human
accccacccuucc

SEQ ID NO: 2595130 - RNA, 24 nt, Human
acccagcgagcccugguggcagug

SEQ ID NO: 2595131 - RNA, 22 nt, Human
acccaggccgcagcucuugccc

SEQ ID NO: 2595132 - RNA, 15 nt, Human
acccaggcaccugca

SEQ ID NO: 2595133 - RNA, 15 nt, Human
acccaggccgcagcu

SEQ ID NO: 2595134 - RNA, 17 nt, Human
acccaggaguguggcca

SEQ ID NO: 2595135 - RNA, 20 nt, Human
acccaggcuggaguacagug

SEQ ID NO: 2595136 - RNA, 23 nt, Human
acccaggccgcagcucuugcccu

SEQ ID NO: 2595137 - RNA, 20 nt, Human
acccaggcuggagugcaaug

SEQ ID NO: 2595138 - RNA, 22 nt, Human
acccaggcugggcaaggaggcc

SEQ ID NO: 2595139 - RNA, 20 nt, Human
acccaggcugggcaaggagg

SEQ ID NO: 2595140 - RNA, 14 nt, Human
acccaggcugggca

SEQ ID NO: 2595141 - RNA, 13 nt, Human
acccaggcugggc

SEQ ID NO: 2595142 - RNA, 12 nt, Human
acccaggcuggg

SEQ ID NO: 2595143 - RNA, 19 nt, Human
acccaggcuggagugcagu

SEQ ID NO: 2595144 - RNA, 15 nt, Human
accccaggccccgag

SEQ ID NO: 2595145 - RNA, 14 nt, Human
accccaggccccga

SEQ ID NO: 2595146 - RNA, 13 nt, Human
accccaggccccg

SEQ ID NO: 2595147 - RNA, 12 nt, Human
accccaggcccc

SEQ ID NO: 2595148 - RNA, 22 nt, Human
accccagcugugagccuuggcu

SEQ ID NO: 2595149 - RNA, 21 nt, Human
accccagcugugagccuuggc

SEQ ID NO: 2595150 - RNA, 20 nt, Human
accccagcugugagccuugg

SEQ ID NO: 2595151 - RNA, 19 nt, Human
accccagcugugagccuug

SEQ ID NO: 2595152 - RNA, 18 nt, Human
accccagcugugagccuu

SEQ ID NO: 2595153 - RNA, 17 nt, Human
accccagcugugagccu

SEQ ID NO: 2595154 - RNA, 18 nt, Human
accccacuuaucccucuc

SEQ ID NO: 2595155 - RNA, 17 nt, Human
accccacuuaucccucu

SEQ ID NO: 2595156 - RNA, 23 nt, Human
accccagcuggggccaggcuggg

SEQ ID NO: 2595157 - RNA, 14 nt, Human
acccccacacacac

SEQ ID NO: 2595158 - RNA, 15 nt, Human
acccccacacacaca

SEQ ID NO: 2595159 - RNA, 20 nt, Human
acccccacacacacacacau

SEQ ID NO: 2595160 - RNA, 21 nt, Human
acccccacacacacacacaug

SEQ ID NO: 2595161 - RNA, 15 nt, Human
acccccacaccucag

SEQ ID NO: 2595162 - RNA, 17 nt, Human
acccccacaccucaguu

SEQ ID NO: 2595163 - RNA, 15 nt, Human
acccccaccaagggc

SEQ ID NO: 2595164 - RNA, 13 nt, Human
acccccaccaagg

SEQ ID NO: 2595165 - RNA, 10 nt, Human
acccccacca

SEQ ID NO: 2595166 - RNA, 16 nt, Human
acccccaaggggcagu

SEQ ID NO: 2595167 - RNA, 10 nt, Human
accccagggc

SEQ ID NO: 2595168 - RNA, 20 nt, Human
accccaggcugaagcagguu

SEQ ID NO: 2595169 - RNA, 12 nt, Human
acccccacacac

SEQ ID NO: 2595170 - RNA, 13 nt, Human
acccccacacaca

SEQ ID NO: 2595171 - RNA, 16 nt, Human
acccccaaauuuucuu

SEQ ID NO: 2595172 - RNA, 22 nt, Human
ucagccgagccgggccuggggc

SEQ ID NO: 2595173 - RNA, 16 nt, Human
ucagccgggcccugag

SEQ ID NO: 2595174 - RNA, 18 nt, Human
ucagccuagccgaccuca

SEQ ID NO: 2595175 - RNA, 19 nt, Human
ucagccuagccgaccucag

SEQ ID NO: 2595176 - RNA, 20 nt, Human
ucagccuagccgaccucagc

SEQ ID NO: 2595177 - RNA, 21 nt, Human
ucagccuagccgaccucagcc

SEQ ID NO: 2595178 - RNA, 22 nt, Human
ucagccuagccgaccucagccu

SEQ ID NO: 2595179 - RNA, 23 nt, Human
acccagcgagcccugguggcagu

SEQ ID NO: 2595180 - RNA, 19 nt, Human
acccagcgagcccuggugg

SEQ ID NO: 2595181 - RNA, 23 nt, Human
ucagccguguaaccauggaccca

SEQ ID NO: 2595182 - RNA, 21 nt, Human
ucagccgagccgggccugggg

SEQ ID NO: 2595183 - RNA, 20 nt, Human
ucagccgagccgggccuggg

SEQ ID NO: 2595184 - RNA, 19 nt, Human
ucagccgagccgggccugg

SEQ ID NO: 2595185 - RNA, 18 nt, Human
ucagccgagccgggccug

SEQ ID NO: 2595186 - RNA, 14 nt, Human
ucagcccacccccc

SEQ ID NO: 2595187 - RNA, 21 nt, Human
ucagcccugggccccaccacc

SEQ ID NO: 2595188 - RNA, 22 nt, Human
ucagcccugggccccaccaccu

SEQ ID NO: 2595189 - RNA, 23 nt, Human
ucagcccugggccccaccaccua

SEQ ID NO: 2595190 - RNA, 21 nt, Human
ucagcccaaaccaccagaagc

SEQ ID NO: 2595191 - RNA, 22 nt, Human
ucagcccaaaccaccagaagcc

SEQ ID NO: 2595192 - RNA, 12 nt, Human
ucagcccacccc

SEQ ID NO: 2595193 - RNA, 13 nt, Human
ucagcccaccccc

SEQ ID NO: 2595194 - RNA, 16 nt, Human
ucagcccaagaugcuu

SEQ ID NO: 2595195 - RNA, 16 nt, Human
ucagccauucacugcc

SEQ ID NO: 2595196 - RNA, 14 nt, Human
ucagccaugugcug

SEQ ID NO: 2595197 - RNA, 21 nt, Human
ucagccaugaggaguugcugu

SEQ ID NO: 2595198 - RNA, 14 nt, Human
ucagagcugacaca

SEQ ID NO: 2595199 - RNA, 18 nt, Human
ucagagcuacuugggcca

SEQ ID NO: 2595200 - RNA, 17 nt, Human
ucagagcuacuugggcc

SEQ ID NO: 2595201 - RNA, 16 nt, Human
ucagagcuacuugggc

SEQ ID NO: 2595202 - RNA, 21 nt, Human
ucagagaggccuuuuggaaug

SEQ ID NO: 2595203 - RNA, 22 nt, Human
ucagagaggccuuuuggaaugu

SEQ ID NO: 2595204 - RNA, 11 nt, Human
ucagagagggu

SEQ ID NO: 2595205 - RNA, 14 nt, Human
ucagccaaauguaa

SEQ ID NO: 2595206 - RNA, 16 nt, Human
ucagccaaauguaauu

SEQ ID NO: 2595207 - RNA, 22 nt, Human
ucagccaaauguaauugaauaa

SEQ ID NO: 2595208 - RNA, 21 nt, Human
ucagccaacgaguaauuuauu

SEQ ID NO: 2595209 - RNA, 18 nt, Human
ucagagcugacacaggau

SEQ ID NO: 2595210 - RNA, 19 nt, Human
ucagcauuuccacaccaag

SEQ ID NO: 2595211 - RNA, 22 nt, Human
ucagccaagaauucuuaaauau

SEQ ID NO: 2595212 - RNA, 13 nt, Human
ucagccaggagcu

SEQ ID NO: 2595213 - RNA, 22 nt, Human
ucagccaagguuuuauaaggcu

SEQ ID NO: 2595214 - RNA, 15 nt, Human
ucagccaagcacagu

SEQ ID NO: 2595215 - RNA, 14 nt, Human
ucagccaagcacag

SEQ ID NO: 2595216 - RNA, 12 nt, Human
ucagccaagcac

SEQ ID NO: 2595217 - RNA, 23 nt, Human
ucagccaaauguaauugaauaaa

SEQ ID NO: 2595218 - RNA, 18 nt, Human
ucagccagggccaggggu

SEQ ID NO: 2595219 - RNA, 16 nt, Human
ucagccagggccaggg

SEQ ID NO: 2595220 - RNA, 14 nt, Human
ucagccagggccag

SEQ ID NO: 2595221 - RNA, 13 nt, Human
ucagccagggcca

SEQ ID NO: 2595222 - RNA, 12 nt, Human
ucagccagggcc

SEQ ID NO: 2595223 - RNA, 20 nt, Human
ucagccaagcacaguggugg

SEQ ID NO: 2595224 - RNA, 19 nt, Human
ucagccaggagcugggcag

SEQ ID NO: 2595225 - RNA, 14 nt, Human
ucagccauguauuu

SEQ ID NO: 2595226 - RNA, 23 nt, Human
ucagccaugaggaguugcuguuu

SEQ ID NO: 2595227 - RNA, 18 nt, Human
ucagccaucaacaagagu

SEQ ID NO: 2595228 - RNA, 13 nt, Human
ucagcucacugca

SEQ ID NO: 2595229 - RNA, 16 nt, Human
ucagcucacugcaacc

SEQ ID NO: 2595230 - RNA, 23 nt, Human
ucagcuauuuaaaaaaaaaagag

SEQ ID NO: 2595231 - RNA, 20 nt, Human
ucagcuauuuacugccaaag

SEQ ID NO: 2595232 - RNA, 22 nt, Human
ucagcuauuuaaaaaaaaaaga

SEQ ID NO: 2595233 - RNA, 19 nt, Human
ucagcuauuuacugccaaa

SEQ ID NO: 2595234 - RNA, 19 nt, Human
ucagcuacugauuuuugug

SEQ ID NO: 2595235 - RNA, 14 nt, Human
ucagcggggacagc

SEQ ID NO: 2595236 - RNA, 19 nt, Human
ucagcuucguuuauuuuca

SEQ ID NO: 2595237 - RNA, 21 nt, Human
ucagcuucguuuauuuucaag

SEQ ID NO: 2595238 - RNA, 15 nt, Human
ucagcuucugcuggg

SEQ ID NO: 2595239 - RNA, 14 nt, Human
ucagcuucugcugg

SEQ ID NO: 2595240 - RNA, 20 nt, Human
ucagcuucuauccuugacuu

SEQ ID NO: 2595241 - RNA, 23 nt, Human
ucagcuuccuacccacaccucug

SEQ ID NO: 2595242 - RNA, 18 nt, Human
ucagcucagcgccagccu

SEQ ID NO: 2595243 - RNA, 14 nt, Human
ucagcucacuguuc

SEQ ID NO: 2595244 - RNA, 20 nt, Human
ucagcuuguaaauagcucag

SEQ ID NO: 2595245 - RNA, 19 nt, Human
ucagcuucugcugggcugg

SEQ ID NO: 2595246 - RNA, 18 nt, Human
ucagcuucugcugggcug

SEQ ID NO: 2595247 - RNA, 17 nt, Human
ucagcuucugcugggcu

SEQ ID NO: 2595248 - RNA, 16 nt, Human
ucagcuucugcugggc

SEQ ID NO: 2595249 - RNA, 22 nt, Human
ucagcuucugcugggcuggggc

SEQ ID NO: 2595250 - RNA, 21 nt, Human
ucagcuucugcugggcugggg

SEQ ID NO: 2595251 - RNA, 13 nt, Human
ucagcuucuuaau

SEQ ID NO: 2595252 - RNA, 20 nt, Human
ucaggaaaucaaauaugcaa

SEQ ID NO: 2595253 - RNA, 21 nt, Human
ucaggaaaucaaauaugcaaa

SEQ ID NO: 2595254 - RNA, 19 nt, Human
ucaggaaagagaacuucca

SEQ ID NO: 2595255 - RNA, 15 nt, Human
ucaggaaaggaauca

SEQ ID NO: 2595256 - RNA, 14 nt, Human
ucaggaaagacgga

SEQ ID NO: 2595257 - RNA, 13 nt, Human
ucaggaaagagaa

SEQ ID NO: 2595258 - RNA, 19 nt, Human
ucaggaaaagccucugugu

SEQ ID NO: 2595259 - RNA, 18 nt, Human
ucaggaaaagccucugug

SEQ ID NO: 2595260 - RNA, 17 nt, Human
ucaggaaaagccucugu

SEQ ID NO: 2595261 - RNA, 16 nt, Human
ucaggaaaagccucug

SEQ ID NO: 2595262 - RNA, 15 nt, Human
ucagcuugcugcccu

SEQ ID NO: 2595263 - RNA, 20 nt, Human
ucaggaaaacugacagagga

SEQ ID NO: 2595264 - RNA, 21 nt, Human
ucaggaaaacugacagaggag

SEQ ID NO: 2595265 - RNA, 22 nt, Human
ucaggaaaacugacagaggagg

SEQ ID NO: 2595266 - RNA, 20 nt, Human
ucagcuuuuugucuuuucug

SEQ ID NO: 2595267 - RNA, 14 nt, Human
ucagcuucuucauc

SEQ ID NO: 2595268 - RNA, 23 nt, Human
ucagcuucugcugggcuggggcc

SEQ ID NO: 2595269 - RNA, 14 nt, Human
ucagcuucuuaaua

SEQ ID NO: 2595270 - RNA, 14 nt, Human
accccugugcuccg

SEQ ID NO: 2595271 - RNA, 17 nt, Human
accccugucucuagcca

SEQ ID NO: 2595272 - RNA, 21 nt, Human
accccuguccucacugcuccc

SEQ ID NO: 2595273 - RNA, 19 nt, Human
accccuguccucacugcuc

SEQ ID NO: 2595274 - RNA, 18 nt, Human
accccuguccucacugcu

SEQ ID NO: 2595275 - RNA, 17 nt, Human
accccuguccucacugc

SEQ ID NO: 2595276 - RNA, 16 nt, Human
accccuguccucacug

SEQ ID NO: 2595277 - RNA, 15 nt, Human
accccuguccucacu

SEQ ID NO: 2595278 - RNA, 23 nt, Human
accccuuccccacugccugccca

SEQ ID NO: 2595279 - RNA, 19 nt, Human
accccuguggagcccgcac

SEQ ID NO: 2595280 - RNA, 22 nt, Human
accccugugcuccgugccucca

SEQ ID NO: 2595281 - RNA, 21 nt, Human
accccugugcuccgugccucc

SEQ ID NO: 2595282 - RNA, 13 nt, Human
accccuguggagc

SEQ ID NO: 2595283 - RNA, 18 nt, Human
accccuguggagcccgca

SEQ ID NO: 2595284 - RNA, 15 nt, Human
accccuucgcuccug

SEQ ID NO: 2595285 - RNA, 14 nt, Human
accccuucgcuccu

SEQ ID NO: 2595286 - RNA, 14 nt, Human
ucagccuugccaga

SEQ ID NO: 2595287 - RNA, 15 nt, Human
ucagccuugccagag

SEQ ID NO: 2595288 - RNA, 12 nt, Human
accccuuccugu

SEQ ID NO: 2595289 - RNA, 14 nt, Human
accccuuccugucc

SEQ ID NO: 2595290 - RNA, 16 nt, Human
accccuucgcuccugu

SEQ ID NO: 2595291 - RNA, 20 nt, Human
ucagcgacuccguuggccac

SEQ ID NO: 2595292 - RNA, 19 nt, Human
ucagcgacuccguuggcca

SEQ ID NO: 2595293 - RNA, 16 nt, Human
ucagccuugccagaga

SEQ ID NO: 2595294 - RNA, 17 nt, Human
ucagccuugccagagau

SEQ ID NO: 2595295 - RNA, 22 nt, Human
ucagcggccccuugacucuggg

SEQ ID NO: 2595296 - RNA, 21 nt, Human
ucagcgauguaugcagcuauc

SEQ ID NO: 2595297 - RNA, 23 nt, Human
ucagcgacuccguuggccacucc

SEQ ID NO: 2595298 - RNA, 18 nt, Human
ucagcgauguaugcagcu

SEQ ID NO: 2595299 - RNA, 22 nt, Human
ucagccuuggauaaugcuguug

SEQ ID NO: 2595300 - RNA, 12 nt, Human
acccccacccaa

SEQ ID NO: 2595301 - RNA, 14 nt, Human
accccccagcacug

SEQ ID NO: 2595302 - RNA, 13 nt, Human
accccccagcacu

SEQ ID NO: 2595303 - RNA, 12 nt, Human
acccccacccca

SEQ ID NO: 2595304 - RNA, 14 nt, Human
acccccaccccaca

SEQ ID NO: 2595305 - RNA, 12 nt, Human
accccccucauu

SEQ ID NO: 2595306 - RNA, 11 nt, Human
accccccucug

SEQ ID NO: 2595307 - RNA, 12 nt, Human
accccccugggc

SEQ ID NO: 2595308 - RNA, 15 nt, Human
accccccugggcuga

SEQ ID NO: 2595309 - RNA, 17 nt, Human
accccccagcacugagg

SEQ ID NO: 2595310 - RNA, 15 nt, Human
accccccagcacuga

SEQ ID NO: 2595311 - RNA, 19 nt, Human
accccccagcacugaggaa

SEQ ID NO: 2595312 - RNA, 20 nt, Human
accccccagaaccuguccuu

SEQ ID NO: 2595313 - RNA, 13 nt, Human
acccccgcccagg

SEQ ID NO: 2595314 - RNA, 22 nt, Human
acccccgaguuuggucccuggg

SEQ ID NO: 2595315 - RNA, 20 nt, Human
acccccgcccaggcuggcca

SEQ ID NO: 2595316 - RNA, 19 nt, Human
acccccgcccaggcuggcc

SEQ ID NO: 2595317 - RNA, 16 nt, Human
acccccgcccaggcug

SEQ ID NO: 2595318 - RNA, 15 nt, Human
acccccgcccaggcu

SEQ ID NO: 2595319 - RNA, 23 nt, Human
acccccgcccaggcuggccagcc

SEQ ID NO: 2595320 - RNA, 21 nt, Human
acccccgcccaggcuggccag

SEQ ID NO: 2595321 - RNA, 14 nt, Human
accccugguucuca

SEQ ID NO: 2595322 - RNA, 22 nt, Human
accccugguucucaucuuucuu

SEQ ID NO: 2595323 - RNA, 20 nt, Human
accccugguucucaucuuuc

SEQ ID NO: 2595324 - RNA, 16 nt, Human
accccugguucucauc

SEQ ID NO: 2595325 - RNA, 15 nt, Human
accccugguucucau

SEQ ID NO: 2595326 - RNA, 14 nt, Human
ucaacaucaauguu

SEQ ID NO: 2595327 - RNA, 15 nt, Human
ucaacaucaauguuc

SEQ ID NO: 2595328 - RNA, 16 nt, Human
ucaacaucaauguuca

SEQ ID NO: 2595329 - RNA, 17 nt, Human
ucaacaucaauguucau

SEQ ID NO: 2595330 - RNA, 18 nt, Human
ucaacaucaauguucauu

SEQ ID NO: 2595331 - RNA, 12 nt, Human
ucaacaucuuuu

SEQ ID NO: 2595332 - RNA, 19 nt, Human
ucaacaucaauguucauug

SEQ ID NO: 2595333 - RNA, 20 nt, Human
ucaacaucaauguucauugu

SEQ ID NO: 2595334 - RNA, 23 nt, Human
ucaacaucaauguucauuguaau

SEQ ID NO: 2595335 - RNA, 12 nt, Human
ucaagaaacuga

SEQ ID NO: 2595336 - RNA, 13 nt, Human
ucaagaaacugag

SEQ ID NO: 2595337 - RNA, 17 nt, Human
ucaagaaacugaggaau

SEQ ID NO: 2595338 - RNA, 18 nt, Human
ucaagaaacugaggaauu

SEQ ID NO: 2595339 - RNA, 20 nt, Human
ucaagaaacugaggaauuuu

SEQ ID NO: 2595340 - RNA, 22 nt, Human
ucaagaaacugaggaauuuucu

SEQ ID NO: 2595341 - RNA, 23 nt, Human
ucaagaaacugaggaauuuucuu

SEQ ID NO: 2595342 - RNA, 15 nt, Human
ucaacauguuacuga

SEQ ID NO: 2595343 - RNA, 19 nt, Human
ucaacauguuacugaccag

SEQ ID NO: 2595344 - RNA, 21 nt, Human
ucaacaucaauguucauugua

SEQ ID NO: 2595345 - RNA, 15 nt, Human
ucaacaucuuuuaca

SEQ ID NO: 2595346 - RNA, 22 nt, Human
ucaacauguuacugaccagcaa

SEQ ID NO: 2595347 - RNA, 20 nt, Human
ucaacauguuacugaccagc

SEQ ID NO: 2595348 - RNA, 21 nt, Human
ucaacauguuacugaccagca

SEQ ID NO: 2595349 - RNA, 23 nt, Human
ucaagaagcaggcuacacugaca

SEQ ID NO: 2595350 - RNA, 19 nt, Human
ucaagaagacauggagacu

SEQ ID NO: 2595351 - RNA, 12 nt, Human
ucaagaagacau

SEQ ID NO: 2595352 - RNA, 23 nt, Human
ucaagaagaagauggauuggugu

SEQ ID NO: 2595353 - RNA, 22 nt, Human
ucaagaaauaaaaggaagccaa

SEQ ID NO: 2595354 - RNA, 20 nt, Human
ucaagaaauaaaaggaagcc

SEQ ID NO: 2595355 - RNA, 21 nt, Human
ucaagaaauaaaaggaagcca

SEQ ID NO: 2595356 - RNA, 21 nt, Human
ucaagaaagcuucaaacugca

SEQ ID NO: 2595357 - RNA, 22 nt, Human
ucaagaauggggaucacagaga

SEQ ID NO: 2595358 - RNA, 21 nt, Human
ucaagaauaaucacgcuuucc

SEQ ID NO: 2595359 - RNA, 17 nt, Human
ucaagacauuaaaucua

SEQ ID NO: 2595360 - RNA, 20 nt, Human
ucaagacauuaaaucuauga

SEQ ID NO: 2595361 - RNA, 20 nt, Human
ucaagacuggaaggugggga

SEQ ID NO: 2595362 - RNA, 19 nt, Human
ucaagacuggaaggugggg

SEQ ID NO: 2595363 - RNA, 19 nt, Human
ucaagagaguaauggguuu

SEQ ID NO: 2595364 - RNA, 18 nt, Human
ucaagagauuuaauuaau

SEQ ID NO: 2595365 - RNA, 15 nt, Human
ucaagagauuuaauu

SEQ ID NO: 2595366 - RNA, 16 nt, Human
ucaagaccuucucccc

SEQ ID NO: 2595367 - RNA, 16 nt, Human
ucaagagcugcccucc

SEQ ID NO: 2595368 - RNA, 13 nt, Human
ucaagagcugccc

SEQ ID NO: 2595369 - RNA, 19 nt, Human
ucaagauacugcuacugua

SEQ ID NO: 2595370 - RNA, 21 nt, Human
ucaagauacugcuacuguaau

SEQ ID NO: 2595371 - RNA, 22 nt, Human
ucaagauacugcuacuguaauu

SEQ ID NO: 2595372 - RNA, 15 nt, Human
ucaagagcacacuug

SEQ ID NO: 2595373 - RNA, 22 nt, Human
ucaagaugaugaugaucuuuaa

SEQ ID NO: 2595374 - RNA, 16 nt, Human
ucaagaucaaugaaau

SEQ ID NO: 2595375 - RNA, 22 nt, Human
ucaagaucaaugaaaugauguc

SEQ ID NO: 2595376 - RNA, 17 nt, Human
ucaagaugucagacugg

SEQ ID NO: 2595377 - RNA, 16 nt, Human
ucaagggggacugucu

SEQ ID NO: 2595378 - RNA, 20 nt, Human
ucaagggaauguaacugcug

SEQ ID NO: 2595379 - RNA, 19 nt, Human
ucaagggaauguaacugcu

SEQ ID NO: 2595380 - RNA, 21 nt, Human
ucaagggaauguaacugcuga

SEQ ID NO: 2595381 - RNA, 18 nt, Human
ucaaggcugcuuagaauc

SEQ ID NO: 2595382 - RNA, 17 nt, Human
ucaaggcugcuuagaau

SEQ ID NO: 2595383 - RNA, 18 nt, Human
ucaagaugucagacuggc

SEQ ID NO: 2595384 - RNA, 15 nt, Human
ucaagaucauguacc

SEQ ID NO: 2595385 - RNA, 20 nt, Human
ucaagauguccuccuuguuc

SEQ ID NO: 2595386 - RNA, 16 nt, Human
ucaaguauuauaccuu

SEQ ID NO: 2595387 - RNA, 21 nt, Human
ucaaguauuauaccuuuuuua

SEQ ID NO: 2595388 - RNA, 23 nt, Human
ucaaguauuauaccuuuuuuaga

SEQ ID NO: 2595389 - RNA, 12 nt, Human
ucaaguauuugg

SEQ ID NO: 2595390 - RNA, 11 nt, Human
ucaaguauuau

SEQ ID NO: 2595391 - RNA, 15 nt, Human
ucaaguauuauaccu

SEQ ID NO: 2595392 - RNA, 16 nt, Human
ucaacagcuaugcugg

SEQ ID NO: 2595393 - RNA, 18 nt, Human
ucaacacucccuucccau

SEQ ID NO: 2595394 - RNA, 12 nt, Human
ucaacagagaag

SEQ ID NO: 2595395 - RNA, 17 nt, Human
ucaacagagaaggcagg

SEQ ID NO: 2595396 - RNA, 19 nt, Human
ucaacagagaaggcaggaa

SEQ ID NO: 2595397 - RNA, 22 nt, Human
ucaacagagaaggcaggaaugu

SEQ ID NO: 2595398 - RNA, 16 nt, Human
ucaacagguuuuccug

SEQ ID NO: 2595399 - RNA, 15 nt, Human
ucaacagcuccccau

SEQ ID NO: 2595400 - RNA, 18 nt, Human
ucaacagcuaugcuggua

SEQ ID NO: 2595401 - RNA, 18 nt, Human
ucaacaggagaauuuuac

SEQ ID NO: 2595402 - RNA, 17 nt, Human
ucaaauuucuaaaucuc

SEQ ID NO: 2595403 - RNA, 15 nt, Human
acauucuuauaaaua

SEQ ID NO: 2595404 - RNA, 17 nt, Human
ucaacaagggagagacc

SEQ ID NO: 2595405 - RNA, 22 nt, Human
ucaacaagggagagaccucauc

SEQ ID NO: 2595406 - RNA, 19 nt, Human
ucaacaagggagagaccuc

SEQ ID NO: 2595407 - RNA, 20 nt, Human
ucaacaagggagagaccuca

SEQ ID NO: 2595408 - RNA, 23 nt, Human
ucaacacuuaaggguuuuagaaa

SEQ ID NO: 2595409 - RNA, 12 nt, Human
acauucuguuaa

SEQ ID NO: 2595410 - RNA, 20 nt, Human
acauucuggcucagggaggu

SEQ ID NO: 2595411 - RNA, 18 nt, Human
acauucugcuuucaucuu

SEQ ID NO: 2595412 - RNA, 22 nt, Human
acauucugucgccuuagcaugu

SEQ ID NO: 2595413 - RNA, 14 nt, Human
acauucuguaaaau

SEQ ID NO: 2595414 - RNA, 16 nt, Human
acauucaugccuggcu

SEQ ID NO: 2595415 - RNA, 14 nt, Human
acauuccaagacag

SEQ ID NO: 2595416 - RNA, 13 nt, Human
acauuccaagaca

SEQ ID NO: 2595417 - RNA, 11 nt, Human
acauuccaaga

SEQ ID NO: 2595418 - RNA, 17 nt, Human
acauuccaagacaguau

SEQ ID NO: 2595419 - RNA, 15 nt, Human
acauuccaagacagu

SEQ ID NO: 2595420 - RNA, 19 nt, Human
acauucugauuuggaaaaa

SEQ ID NO: 2595421 - RNA, 16 nt, Human
acauucugccaggccc

SEQ ID NO: 2595422 - RNA, 12 nt, Human
acauucugcuuu

SEQ ID NO: 2595423 - RNA, 15 nt, Human
ucaaauuucuaaauc

SEQ ID NO: 2595424 - RNA, 16 nt, Human
ucaaauuucuaaaucu

SEQ ID NO: 2595425 - RNA, 15 nt, Human
acauucuguuaauca

SEQ ID NO: 2595426 - RNA, 14 nt, Human
ucaaauuucuaaau

SEQ ID NO: 2595427 - RNA, 14 nt, Human
acauucuuauaaau

SEQ ID NO: 2595428 - RNA, 23 nt, Human
acauucugucgccuuagcauguu

SEQ ID NO: 2595429 - RNA, 10 nt, Human
acauucuuau

SEQ ID NO: 2595430 - RNA, 18 nt, Human
acaugucuccuauccugg

SEQ ID NO: 2595431 - RNA, 16 nt, Human
acaugucuccuauccu

SEQ ID NO: 2595432 - RNA, 17 nt, Human
acaugucuguucuacau

SEQ ID NO: 2595433 - RNA, 16 nt, Human
acauguccuugugugu

SEQ ID NO: 2595434 - RNA, 21 nt, Human
acauguccuuguguguuuuga

SEQ ID NO: 2595435 - RNA, 15 nt, Human
acaugucccuacacc

SEQ ID NO: 2595436 - RNA, 18 nt, Human
acaugucuguucuacaua

SEQ ID NO: 2595437 - RNA, 11 nt, Human
acauuaacagu

SEQ ID NO: 2595438 - RNA, 12 nt, Human
acauuaacaguu

SEQ ID NO: 2595439 - RNA, 19 nt, Human
acauguccaagaagcccag

SEQ ID NO: 2595440 - RNA, 21 nt, Human
acauguccaagaagcccagga

SEQ ID NO: 2595441 - RNA, 17 nt, Human
acaugcugaagccaaag

SEQ ID NO: 2595442 - RNA, 14 nt, Human
acaugcugaagcca

SEQ ID NO: 2595443 - RNA, 19 nt, Human
acaugcucuuagaaaauuc

SEQ ID NO: 2595444 - RNA, 21 nt, Human
acaugcugagucucccaaggc

SEQ ID NO: 2595445 - RNA, 14 nt, Human
acaugcugagucuc

SEQ ID NO: 2595446 - RNA, 22 nt, Human
acauuagcaguuugcuuuguau

SEQ ID NO: 2595447 - RNA, 18 nt, Human
acauuagcaguuugcuuu

SEQ ID NO: 2595448 - RNA, 21 nt, Human
acauuaagaaaaucauauugc

SEQ ID NO: 2595449 - RNA, 17 nt, Human
acauuaagaaaaucaua

SEQ ID NO: 2595450 - RNA, 16 nt, Human
acauuaagaaaaucau

SEQ ID NO: 2595451 - RNA, 14 nt, Human
acauuaagaaaauc

SEQ ID NO: 2595452 - RNA, 13 nt, Human
acauuaagaaaau

SEQ ID NO: 2595453 - RNA, 12 nt, Human
acauuaagaaaa

SEQ ID NO: 2595454 - RNA, 22 nt, Human
acauuaacaguuuuccaugaaa

SEQ ID NO: 2595455 - RNA, 16 nt, Human
acauuaacaguuuucc

SEQ ID NO: 2595456 - RNA, 17 nt, Human
acauuaacaguuuucca

SEQ ID NO: 2595457 - RNA, 18 nt, Human
acauuaacaguuuuccau

SEQ ID NO: 2595458 - RNA, 20 nt, Human
acauuaacaguuuuccauga

SEQ ID NO: 2595459 - RNA, 13 nt, Human
acauucaaggcau

SEQ ID NO: 2595460 - RNA, 18 nt, Human
acauucaacccuggagag

SEQ ID NO: 2595461 - RNA, 15 nt, Human
acauucaauaagcau

SEQ ID NO: 2595462 - RNA, 14 nt, Human
acauucaccugccc

SEQ ID NO: 2595463 - RNA, 20 nt, Human
acauucaccugccccaacuc

SEQ ID NO: 2595464 - RNA, 13 nt, Human
acauucaccugcc

SEQ ID NO: 2595465 - RNA, 12 nt, Human
acauucaauguu

SEQ ID NO: 2595466 - RNA, 16 nt, Human
acauucaggaagauga

SEQ ID NO: 2595467 - RNA, 23 nt, Human
acauucaauaagcaucaaacucu

SEQ ID NO: 2595468 - RNA, 15 nt, Human
acauucaugccuggc

SEQ ID NO: 2595469 - RNA, 21 nt, Human
ucaaaauaugccccauucaac

SEQ ID NO: 2595470 - RNA, 15 nt, Human
ucaaaauauguucuu

SEQ ID NO: 2595471 - RNA, 23 nt, Human
ucaaaauaccaugccauuuaaag

SEQ ID NO: 2595472 - RNA, 21 nt, Human
ucaaaauaaaaagugacacag

SEQ ID NO: 2595473 - RNA, 20 nt, Human
ucaaaauaaaaagugacaca

SEQ ID NO: 2595474 - RNA, 13 nt, Human
ucaaaauaaaaac

SEQ ID NO: 2595475 - RNA, 20 nt, Human
ucaaaauaaaaaccaagaag

SEQ ID NO: 2595476 - RNA, 14 nt, Human
ucaaaauaauuuua

SEQ ID NO: 2595477 - RNA, 23 nt, Human
ucaaaauaaaaagugacacagca

SEQ ID NO: 2595478 - RNA, 21 nt, Human
ucaaaauaccaugccauuuaa

SEQ ID NO: 2595479 - RNA, 12 nt, Human
ucaaaauaaaaa

SEQ ID NO: 2595480 - RNA, 23 nt, Human
ucaaaagacaauucuuuauacaa

SEQ ID NO: 2595481 - RNA, 15 nt, Human
ucaaaagcuggauua

SEQ ID NO: 2595482 - RNA, 18 nt, Human
ucaaaagcaaaugagauc

SEQ ID NO: 2595483 - RNA, 14 nt, Human
ucaaaaguugaaau

SEQ ID NO: 2595484 - RNA, 15 nt, Human
ucaaaaguugaaauu

SEQ ID NO: 2595485 - RNA, 16 nt, Human
ucaaaaguugaaauua

SEQ ID NO: 2595486 - RNA, 16 nt, Human
ucaaaauauuuguaca

SEQ ID NO: 2595487 - RNA, 17 nt, Human
ucaaaauauuuguacau

SEQ ID NO: 2595488 - RNA, 19 nt, Human
ucaaaauauuuguacauag

SEQ ID NO: 2595489 - RNA, 18 nt, Human
ucaaaauauuuguacaua

SEQ ID NO: 2595490 - RNA, 15 nt, Human
ucaaaaugacagcca

SEQ ID NO: 2595491 - RNA, 19 nt, Human
ucaaaauuguuacaaauug

SEQ ID NO: 2595492 - RNA, 16 nt, Human
ucaaaauuguuacaaa

SEQ ID NO: 2595493 - RNA, 12 nt, Human
ucaaaaugcuuu

SEQ ID NO: 2595494 - RNA, 17 nt, Human
ucaaaaugcuuuuuauu

SEQ ID NO: 2595495 - RNA, 19 nt, Human
ucaaaaugcuuuuuauuuc

SEQ ID NO: 2595496 - RNA, 14 nt, Human
ucaaaaugucuaag

SEQ ID NO: 2595497 - RNA, 14 nt, Human
ucaaaaugucugua

SEQ ID NO: 2595498 - RNA, 13 nt, Human
uauuuuugcccug

SEQ ID NO: 2595499 - RNA, 17 nt, Human
uauuuuugcauggcacu

SEQ ID NO: 2595500 - RNA, 12 nt, Human
uauuuuugcaug

SEQ ID NO: 2595501 - RNA, 22 nt, Human
uauuuuugaaaggcauguuccu

SEQ ID NO: 2595502 - RNA, 18 nt, Human
ucaaaagaaagaaaauca

SEQ ID NO: 2595503 - RNA, 19 nt, Human
ucaaaagacaauucuuuau

SEQ ID NO: 2595504 - RNA, 18 nt, Human
ucaaaagacaauucuuua

SEQ ID NO: 2595505 - RNA, 16 nt, Human
ucaaaagacaauucuu

SEQ ID NO: 2595506 - RNA, 15 nt, Human
ucaaaagacaauucu

SEQ ID NO: 2595507 - RNA, 14 nt, Human
ucaaaagacaauuc

SEQ ID NO: 2595508 - RNA, 12 nt, Human
ucaaaagacaau

SEQ ID NO: 2595509 - RNA, 18 nt, Human
ucaaaagaaaaggcaaaa

SEQ ID NO: 2595510 - RNA, 19 nt, Human
ucaaaagaaucagaaacag

SEQ ID NO: 2595511 - RNA, 14 nt, Human
uauuuuucucauga

SEQ ID NO: 2595512 - RNA, 12 nt, Human
uauuuuuaucuu

SEQ ID NO: 2595513 - RNA, 14 nt, Human
uauuuuucuaaggu

SEQ ID NO: 2595514 - RNA, 21 nt, Human
uauuuuuauauuuaguuauag

SEQ ID NO: 2595515 - RNA, 16 nt, Human
uauuuuuacugccacu

SEQ ID NO: 2595516 - RNA, 15 nt, Human
uauuuuuacugccac

SEQ ID NO: 2595517 - RNA, 12 nt, Human
uauuuuuacugc

SEQ ID NO: 2595518 - RNA, 18 nt, Human
uauuuuuacauucugaau

SEQ ID NO: 2595519 - RNA, 19 nt, Human
uauuuuuauagauuugacc

SEQ ID NO: 2595520 - RNA, 18 nt, Human
uauuuuuacugccacucu

SEQ ID NO: 2595521 - RNA, 17 nt, Human
uauuuguguaauagaaa

SEQ ID NO: 2595522 - RNA, 17 nt, Human
uauuuuuaauuaaauaa

SEQ ID NO: 2595523 - RNA, 18 nt, Human
uauuuguguauuuaacag

SEQ ID NO: 2595524 - RNA, 17 nt, Human
uauuuguguauuuaaca

SEQ ID NO: 2595525 - RNA, 14 nt, Human
uauuuguguaauag

SEQ ID NO: 2595526 - RNA, 13 nt, Human
uauuuguguaaua

SEQ ID NO: 2595527 - RNA, 14 nt, Human
uauuuguggaauaa

SEQ ID NO: 2595528 - RNA, 12 nt, Human
uauuuguggaau

SEQ ID NO: 2595529 - RNA, 15 nt, Human
uauuuguguauuuaa

SEQ ID NO: 2595530 - RNA, 13 nt, Human
uauuuguguauuu

SEQ ID NO: 2595531 - RNA, 17 nt, Human
uauuuguaaauuuaugu

SEQ ID NO: 2595532 - RNA, 22 nt, Human
uauuuguaaauuuaugugaugg

SEQ ID NO: 2595533 - RNA, 16 nt, Human
uauuuguaaauuuaug

SEQ ID NO: 2595534 - RNA, 22 nt, Human
uauuugugacuaauuguauaac

SEQ ID NO: 2595535 - RNA, 17 nt, Human
uauuugugacuaauugu

SEQ ID NO: 2595536 - RNA, 14 nt, Human
uauuugugacuaau

SEQ ID NO: 2595537 - RNA, 12 nt, Human
uauuugugacua

SEQ ID NO: 2595538 - RNA, 20 nt, Human
uauuugugacuaauuguaua

SEQ ID NO: 2595539 - RNA, 19 nt, Human
uauuugugacuaauuguau

SEQ ID NO: 2595540 - RNA, 21 nt, Human
uauuugugacuaauuguauaa

SEQ ID NO: 2595541 - RNA, 18 nt, Human
uauuugugauagcacuuu

SEQ ID NO: 2595542 - RNA, 18 nt, Human
uauuugugaugacaacug

SEQ ID NO: 2595543 - RNA, 16 nt, Human
acaugaaguccaagca

SEQ ID NO: 2595544 - RNA, 22 nt, Human
acaugaagauucuuucccaauu

SEQ ID NO: 2595545 - RNA, 15 nt, Human
acaugaagauucuuu

SEQ ID NO: 2595546 - RNA, 17 nt, Human
acaugaagauucuuucc

SEQ ID NO: 2595547 - RNA, 18 nt, Human
acaugaagauucuuuccc

SEQ ID NO: 2595548 - RNA, 16 nt, Human
acaugaagaagcuaaa

SEQ ID NO: 2595549 - RNA, 13 nt, Human
acaugaagaagcu

SEQ ID NO: 2595550 - RNA, 16 nt, Human
ucaaauaaacacugug

SEQ ID NO: 2595551 - RNA, 13 nt, Human
ucaaauacaucuu

SEQ ID NO: 2595552 - RNA, 15 nt, Human
ucaaauaaacacugu

SEQ ID NO: 2595553 - RNA, 14 nt, Human
ucaaauaaacacug

SEQ ID NO: 2595554 - RNA, 13 nt, Human
ucaaauaaacacu

SEQ ID NO: 2595555 - RNA, 11 nt, Human
ucaaauaaaca

SEQ ID NO: 2595556 - RNA, 22 nt, Human
ucaaaguuuugaaaagcuauua

SEQ ID NO: 2595557 - RNA, 18 nt, Human
ucaaauaacuaaaaggua

SEQ ID NO: 2595558 - RNA, 19 nt, Human
acaugauccugcaauucca

SEQ ID NO: 2595559 - RNA, 19 nt, Human
acaugagcaucaggccagg

SEQ ID NO: 2595560 - RNA, 18 nt, Human
acaugagcaucaggccag

SEQ ID NO: 2595561 - RNA, 17 nt, Human
acaugagcaucaggcca

SEQ ID NO: 2595562 - RNA, 22 nt, Human
acaugcuacacacugcauguuu

SEQ ID NO: 2595563 - RNA, 20 nt, Human
acaugagcaucaggccaggc

SEQ ID NO: 2595564 - RNA, 18 nt, Human
acaugagucccaguggga

SEQ ID NO: 2595565 - RNA, 15 nt, Human
acaugaucuucuuua

SEQ ID NO: 2595566 - RNA, 17 nt, Human
acaugaucuucuuuaua

SEQ ID NO: 2595567 - RNA, 17 nt, Human
ucaaacacaaaugcagg

SEQ ID NO: 2595568 - RNA, 16 nt, Human
ucaaacacaaaugcag

SEQ ID NO: 2595569 - RNA, 15 nt, Human
ucaaacacaaaugca

SEQ ID NO: 2595570 - RNA, 17 nt, Human
ucaaacacaguuacacu

SEQ ID NO: 2595571 - RNA, 11 nt, Human
ucaaacacagu

SEQ ID NO: 2595572 - RNA, 12 nt, Human
ucaaacacugca

SEQ ID NO: 2595573 - RNA, 14 nt, Human
ucaaacacaaaugc

SEQ ID NO: 2595574 - RNA, 17 nt, Human
ucaaacaacacuggugu

SEQ ID NO: 2595575 - RNA, 15 nt, Human
ucaaacaacacuggu

SEQ ID NO: 2595576 - RNA, 21 nt, Human
ucaaacaaagccagaagcuga

SEQ ID NO: 2595577 - RNA, 24 nt, Human
ucaaaauuagugcuuuuuguguca

SEQ ID NO: 2595578 - RNA, 16 nt, Human
ucaaaauuugaagaau

SEQ ID NO: 2595579 - RNA, 14 nt, Human
ucaaacaaagccag

SEQ ID NO: 2595580 - RNA, 15 nt, Human
ucaaacaaagccaga

SEQ ID NO: 2595581 - RNA, 16 nt, Human
ucaaacaaagccagaa

SEQ ID NO: 2595582 - RNA, 17 nt, Human
ucaaacaaagccagaag

SEQ ID NO: 2595583 - RNA, 19 nt, Human
ucaaacaaacucucugaac

SEQ ID NO: 2595584 - RNA, 14 nt, Human
ucaaagcugaaaug

SEQ ID NO: 2595585 - RNA, 10 nt, Human
ucaaagcaga

SEQ ID NO: 2595586 - RNA, 22 nt, Human
ucaaagcaccaaaauaagaaaa

SEQ ID NO: 2595587 - RNA, 14 nt, Human
ucaaacacugcagg

SEQ ID NO: 2595588 - RNA, 20 nt, Human
ucaaacacaguuacacuugu

SEQ ID NO: 2595589 - RNA, 16 nt, Human
ucaaacacugcaggca

SEQ ID NO: 2595590 - RNA, 19 nt, Human
ucaaagcaggggaguaugc

SEQ ID NO: 2595591 - RNA, 18 nt, Human
ucaaagccaaguuuauau

SEQ ID NO: 2595592 - RNA, 15 nt, Human
ucaaagccacacucu

SEQ ID NO: 2595593 - RNA, 15 nt, Human
ucaaagcuuuuucca

SEQ ID NO: 2595594 - RNA, 20 nt, Human
ucaaagcuugaagaucguua

SEQ ID NO: 2595595 - RNA, 14 nt, Human
ucaaagcuugaaga

SEQ ID NO: 2595596 - RNA, 16 nt, Human
ucaaagcuuuuuccag

SEQ ID NO: 2595597 - RNA, 15 nt, Human
ucaaaggacaaagug

SEQ ID NO: 2595598 - RNA, 19 nt, Human
ucaaaggcacagugaaggc

SEQ ID NO: 2595599 - RNA, 12 nt, Human
ucaaagccagcg

SEQ ID NO: 2595600 - RNA, 22 nt, Human
ucaaagccagcguccuccucug

SEQ ID NO: 2595601 - RNA, 23 nt, Human
ucaaagccagcguccuccucugu

SEQ ID NO: 2595602 - RNA, 20 nt, Human
ucaaaguuuugaaaagcuau

SEQ ID NO: 2595603 - RNA, 19 nt, Human
ucaaaguuuugaaaagcua

SEQ ID NO: 2595604 - RNA, 18 nt, Human
ucaaaguuuugaaaagcu

SEQ ID NO: 2595605 - RNA, 17 nt, Human
ucaaaguuuugaaaagc

SEQ ID NO: 2595606 - RNA, 15 nt, Human
ucaaaguuuugaaaa

SEQ ID NO: 2595607 - RNA, 14 nt, Human
ucaaaguuuugaaa

SEQ ID NO: 2595608 - RNA, 13 nt, Human
ucaaaguuuugaa

SEQ ID NO: 2595609 - RNA, 18 nt, Human
ucaaagggcccacaguga

SEQ ID NO: 2595610 - RNA, 14 nt, Human
acauauugauuucc

SEQ ID NO: 2595611 - RNA, 16 nt, Human
acauauugauuuccgu

SEQ ID NO: 2595612 - RNA, 21 nt, Human
acauaugugcuggaauucuaa

SEQ ID NO: 2595613 - RNA, 13 nt, Human
acauaugugaaua

SEQ ID NO: 2595614 - RNA, 13 nt, Human
acauauguaaaau

SEQ ID NO: 2595615 - RNA, 14 nt, Human
acauauguaaaaua

SEQ ID NO: 2595616 - RNA, 18 nt, Human
acauauugauuuccguua

SEQ ID NO: 2595617 - RNA, 22 nt, Human
acauauugauuuccguuaaaau

SEQ ID NO: 2595618 - RNA, 23 nt, Human
acauauugauuuccguuaaaaua

SEQ ID NO: 2595619 - RNA, 18 nt, Human
acauauuaggaaaauaug

SEQ ID NO: 2595620 - RNA, 14 nt, Human
acauauuaugucuu

SEQ ID NO: 2595621 - RNA, 15 nt, Human
acauaucuuuauuaa

SEQ ID NO: 2595622 - RNA, 18 nt, Human
acauaugcaccuuguguc

SEQ ID NO: 2595623 - RNA, 17 nt, Human
acauaugcaccuugugu

SEQ ID NO: 2595624 - RNA, 16 nt, Human
acauaugcaccuugug

SEQ ID NO: 2595625 - RNA, 15 nt, Human
acauaugcaccuugu

SEQ ID NO: 2595626 - RNA, 20 nt, Human
acauaugcaccuugugucug

SEQ ID NO: 2595627 - RNA, 19 nt, Human
acauaugcaccuugugucu

SEQ ID NO: 2595628 - RNA, 23 nt, Human
acauauggacucugcacaugaau

SEQ ID NO: 2595629 - RNA, 21 nt, Human
acauaugaguguggaagccgg

SEQ ID NO: 2595630 - RNA, 19 nt, Human
acauaugaguguggaagcc

SEQ ID NO: 2595631 - RNA, 14 nt, Human
acauaugaggggga

SEQ ID NO: 2595632 - RNA, 19 nt, Human
acauaucuuuauuaaucac

SEQ ID NO: 2595633 - RNA, 15 nt, Human
acauaugaaauuuaa

SEQ ID NO: 2595634 - RNA, 18 nt, Human
acauaugaaauuuaauau

SEQ ID NO: 2595635 - RNA, 16 nt, Human
acauaucuuuauuaau

SEQ ID NO: 2595636 - RNA, 18 nt, Human
acauaucuuuauuaauca

SEQ ID NO: 2595637 - RNA, 15 nt, Human
acauaugaaaauaca

SEQ ID NO: 2595638 - RNA, 21 nt, Human
acauauaaagcacuauacaga

SEQ ID NO: 2595639 - RNA, 13 nt, Human
acauaguuuuuaa

SEQ ID NO: 2595640 - RNA, 20 nt, Human
acauauaaacaucacacaca

SEQ ID NO: 2595641 - RNA, 15 nt, Human
acauaguuauuuauu

SEQ ID NO: 2595642 - RNA, 19 nt, Human
acauauauaacaaugcugu

SEQ ID NO: 2595643 - RNA, 23 nt, Human
acauauaauguuguuauuuaaag

SEQ ID NO: 2595644 - RNA, 21 nt, Human
acauagugaugguuccccugu

SEQ ID NO: 2595645 - RNA, 16 nt, Human
acauagugaugguucc

SEQ ID NO: 2595646 - RNA, 16 nt, Human
acauaggacucaaagu

SEQ ID NO: 2595647 - RNA, 22 nt, Human
acauagcuugauaaagggccaa

SEQ ID NO: 2595648 - RNA, 14 nt, Human
acauagaauuaaca

SEQ ID NO: 2595649 - RNA, 18 nt, Human
acauagaauuaacacaug

SEQ ID NO: 2595650 - RNA, 22 nt, Human
acauagagaucauccuuuccag

SEQ ID NO: 2595651 - RNA, 23 nt, Human
acauagagagggagaagaaguca

SEQ ID NO: 2595652 - RNA, 20 nt, Human
acauagagagggagaagaag

SEQ ID NO: 2595653 - RNA, 13 nt, Human
acauagauguccc

SEQ ID NO: 2595654 - RNA, 19 nt, Human
acauagcccaucccugccu

SEQ ID NO: 2595655 - RNA, 18 nt, Human
acauagcccaucccugcc

SEQ ID NO: 2595656 - RNA, 14 nt, Human
acauagcccauccc

SEQ ID NO: 2595657 - RNA, 16 nt, Human
acauagcaugacauuu

SEQ ID NO: 2595658 - RNA, 18 nt, Human
acauagcaugacauuucu

SEQ ID NO: 2595659 - RNA, 19 nt, Human
acauagcaugacauuucuu

SEQ ID NO: 2595660 - RNA, 21 nt, Human
acauagcaugacauuucuuug

SEQ ID NO: 2595661 - RNA, 15 nt, Human
acauagaugucccuu

SEQ ID NO: 2595662 - RNA, 19 nt, Human
acauagcuaucaagugugc

SEQ ID NO: 2595663 - RNA, 21 nt, Human
acauagcuuacaagccagcug

SEQ ID NO: 2595664 - RNA, 17 nt, Human
acauagccuauauuuac

SEQ ID NO: 2595665 - RNA, 16 nt, Human
acauagccuauauuua

SEQ ID NO: 2595666 - RNA, 13 nt, Human
acauagccuauau

SEQ ID NO: 2595667 - RNA, 22 nt, Human
acauagcccaucccugccuggu

SEQ ID NO: 2595668 - RNA, 20 nt, Human
acauagccuauauuuacagu

SEQ ID NO: 2595669 - RNA, 19 nt, Human
acauagccuauauuuacag

SEQ ID NO: 2595670 - RNA, 19 nt, Human
acauagcgaauacaaaauu

SEQ ID NO: 2595671 - RNA, 16 nt, Human
acaucaacaucuuggu

SEQ ID NO: 2595672 - RNA, 18 nt, Human
acaucaacaucuugguca

SEQ ID NO: 2595673 - RNA, 18 nt, Human
acaucaacccgagucauu

SEQ ID NO: 2595674 - RNA, 14 nt, Human
acaucaagcacaga

SEQ ID NO: 2595675 - RNA, 18 nt, Human
acaucaagcacagaagga

SEQ ID NO: 2595676 - RNA, 20 nt, Human
acaucaauauugucauuccu

SEQ ID NO: 2595677 - RNA, 18 nt, Human
acaucaauauugucauuc

SEQ ID NO: 2595678 - RNA, 13 nt, Human
acaucaauguuca

SEQ ID NO: 2595679 - RNA, 20 nt, Human
acaucaauguucauuguaau

SEQ ID NO: 2595680 - RNA, 17 nt, Human
acaucaauguucauugu

SEQ ID NO: 2595681 - RNA, 18 nt, Human
acaucaauguucauugua

SEQ ID NO: 2595682 - RNA, 23 nt, Human
acaucaauauugucauuccugua

SEQ ID NO: 2595683 - RNA, 14 nt, Human
acaucaauguucau

SEQ ID NO: 2595684 - RNA, 15 nt, Human
acaucaauguucauu

SEQ ID NO: 2595685 - RNA, 16 nt, Human
acaucaauguucauug

SEQ ID NO: 2595686 - RNA, 13 nt, Human
acaucaacagaua

SEQ ID NO: 2595687 - RNA, 12 nt, Human
acaucaaagagg

SEQ ID NO: 2595688 - RNA, 20 nt, Human
acauauuuguuaaauauuua

SEQ ID NO: 2595689 - RNA, 18 nt, Human
acauauuuuauagaacuu

SEQ ID NO: 2595690 - RNA, 16 nt, Human
acauauuuuauagaac

SEQ ID NO: 2595691 - RNA, 14 nt, Human
acauauuuguuaaa

SEQ ID NO: 2595692 - RNA, 19 nt, Human
acauauuuguuaaauauuu

SEQ ID NO: 2595693 - RNA, 19 nt, Human
acauauuuguggaauaaug

SEQ ID NO: 2595694 - RNA, 17 nt, Human
acauauuuguggaauaa

SEQ ID NO: 2595695 - RNA, 16 nt, Human
acauauuuguggaaua

SEQ ID NO: 2595696 - RNA, 15 nt, Human
acauauuuguggaau

SEQ ID NO: 2595697 - RNA, 20 nt, Human
acauauucauuuggaaauaa

SEQ ID NO: 2595698 - RNA, 18 nt, Human
acauauuuccaagaaguu

SEQ ID NO: 2595699 - RNA, 12 nt, Human
acauauucauuu

SEQ ID NO: 2595700 - RNA, 14 nt, Human
acaucuauucucuc

SEQ ID NO: 2595701 - RNA, 18 nt, Human
acaucuauuuuggauugu

SEQ ID NO: 2595702 - RNA, 19 nt, Human
acaucuauuuuggauugua

SEQ ID NO: 2595703 - RNA, 21 nt, Human
acaucuaagccugaaggggcg

SEQ ID NO: 2595704 - RNA, 15 nt, Human
acaucagaaaggaau

SEQ ID NO: 2595705 - RNA, 15 nt, Human
acaucuaagccugaa

SEQ ID NO: 2595706 - RNA, 22 nt, Human
acaucucagacccuuuagccaa

SEQ ID NO: 2595707 - RNA, 12 nt, Human
acaucucagacc

SEQ ID NO: 2595708 - RNA, 23 nt, Human
acaucuauuuuggauuguauauu

SEQ ID NO: 2595709 - RNA, 19 nt, Human
acaucucaggggccagagg

SEQ ID NO: 2595710 - RNA, 20 nt, Human
acaucucaggggccagagga

SEQ ID NO: 2595711 - RNA, 15 nt, Human
acaucacuuguacaa

SEQ ID NO: 2595712 - RNA, 16 nt, Human
acaucacuuguacaaa

SEQ ID NO: 2595713 - RNA, 13 nt, Human
acaucagaaagga

SEQ ID NO: 2595714 - RNA, 11 nt, Human
acaucagaaag

SEQ ID NO: 2595715 - RNA, 19 nt, Human
acaucacuuguacaaaaua

SEQ ID NO: 2595716 - RNA, 19 nt, Human
acaucacucugcugcuuag

SEQ ID NO: 2595717 - RNA, 16 nt, Human
acaucacucugcugcu

SEQ ID NO: 2595718 - RNA, 22 nt, Human
acaucaccgacgcgucuccugu

SEQ ID NO: 2595719 - RNA, 23 nt, Human
acaucaccgacgcgucuccuguu

SEQ ID NO: 2595720 - RNA, 21 nt, Human
acaucaccgacgcgucuccug

SEQ ID NO: 2595721 - RNA, 20 nt, Human
acaucaccgacgcgucuccu

SEQ ID NO: 2595722 - RNA, 22 nt, Human
acaucacccuuaccaugugccu

SEQ ID NO: 2595723 - RNA, 16 nt, Human
acaucaccacaguuua

SEQ ID NO: 2595724 - RNA, 13 nt, Human
acaucacacacac

SEQ ID NO: 2595725 - RNA, 13 nt, Human
acaucacaggaca

SEQ ID NO: 2595726 - RNA, 19 nt, Human
acaucuugcucugcugaca

SEQ ID NO: 2595727 - RNA, 18 nt, Human
acaucuugcucugcugac

SEQ ID NO: 2595728 - RNA, 17 nt, Human
acaugaaaacacauuuu

SEQ ID NO: 2595729 - RNA, 21 nt, Human
acaucuugcucugcugacaga

SEQ ID NO: 2595730 - RNA, 18 nt, Human
acaugaaaacacauuuuu

SEQ ID NO: 2595731 - RNA, 19 nt, Human
acaugaaaacacauuuuuc

SEQ ID NO: 2595732 - RNA, 21 nt, Human
uauuugguuuggccaucucug

SEQ ID NO: 2595733 - RNA, 23 nt, Human
uauuuguaaaagaacaguaaaca

SEQ ID NO: 2595734 - RNA, 16 nt, Human
acaugaaaacacauuu

SEQ ID NO: 2595735 - RNA, 17 nt, Human
uauuugguacuguauuu

SEQ ID NO: 2595736 - RNA, 23 nt, Human
uauuugggccugcuccagaccug

SEQ ID NO: 2595737 - RNA, 14 nt, Human
acaucuuaguauuu

SEQ ID NO: 2595738 - RNA, 18 nt, Human
acaucuuaguauuugcau

SEQ ID NO: 2595739 - RNA, 17 nt, Human
acaucuguguuucaagu

SEQ ID NO: 2595740 - RNA, 23 nt, Human
acaucugccuuaaaaccaaagag

SEQ ID NO: 2595741 - RNA, 16 nt, Human
acaucuguuuuaaauu

SEQ ID NO: 2595742 - RNA, 17 nt, Human
acaucuguuuuaaauuu

SEQ ID NO: 2595743 - RNA, 14 nt, Human
acaucuugaucugc

SEQ ID NO: 2595744 - RNA, 23 nt, Human
acaucuucccuagaggguuccug

SEQ ID NO: 2595745 - RNA, 16 nt, Human
acaucuucagcaaaua

SEQ ID NO: 2595746 - RNA, 13 nt, Human
acaucuucaaagc

SEQ ID NO: 2595747 - RNA, 23 nt, Human
acaucuugaucugcucagcccug

SEQ ID NO: 2595748 - RNA, 22 nt, Human
acaucuugaucugcucagcccu

SEQ ID NO: 2595749 - RNA, 21 nt, Human
acaucuugaucugcucagccc

SEQ ID NO: 2595750 - RNA, 20 nt, Human
acaucuugaucugcucagcc

SEQ ID NO: 2595751 - RNA, 13 nt, Human
acaucuugcucug

SEQ ID NO: 2595752 - RNA, 22 nt, Human
acaucucugcacccuggggccu

SEQ ID NO: 2595753 - RNA, 21 nt, Human
acaucuccuccauacucagga

SEQ ID NO: 2595754 - RNA, 23 nt, Human
acaucucuuccuccgaggccagu

SEQ ID NO: 2595755 - RNA, 13 nt, Human
acaucucuuccuc

SEQ ID NO: 2595756 - RNA, 12 nt, Human
acaucucugcuu

SEQ ID NO: 2595757 - RNA, 15 nt, Human
acaucucugcuugag

SEQ ID NO: 2595758 - RNA, 17 nt, Human
acaucucuuugaauuuu

SEQ ID NO: 2595759 - RNA, 14 nt, Human
acaucucuuugaau

SEQ ID NO: 2595760 - RNA, 20 nt, Human
acaucucuuugaugucauau

SEQ ID NO: 2595761 - RNA, 15 nt, Human
acaucugugucuugu

SEQ ID NO: 2595762 - RNA, 16 nt, Human
acaucugugucuuguu

SEQ ID NO: 2595763 - RNA, 15 nt, Human
acaucuguccuguga

SEQ ID NO: 2595764 - RNA, 23 nt, Human
acaucucuuugaauuuucugugu

SEQ ID NO: 2595765 - RNA, 13 nt, Human
acaucugaaagcc

SEQ ID NO: 2595766 - RNA, 12 nt, Human
acaucugccuua

SEQ ID NO: 2595767 - RNA, 11 nt, Human
acaucugccuu

SEQ ID NO: 2595768 - RNA, 16 nt, Human
acaguuuguuaguaug

SEQ ID NO: 2595769 - RNA, 20 nt, Human
acaguuuguuaguaugaggc

SEQ ID NO: 2595770 - RNA, 16 nt, Human
acaguuuguuuacaca

SEQ ID NO: 2595771 - RNA, 15 nt, Human
acaguuuguuuacac

SEQ ID NO: 2595772 - RNA, 14 nt, Human
acaguuuguuuaca

SEQ ID NO: 2595773 - RNA, 14 nt, Human
acaguuugucacau

SEQ ID NO: 2595774 - RNA, 22 nt, Human
acaguuuguuuacacacgugca

SEQ ID NO: 2595775 - RNA, 12 nt, Human
acaguuuuccau

SEQ ID NO: 2595776 - RNA, 16 nt, Human
acaguuuucugagaaa

SEQ ID NO: 2595777 - RNA, 17 nt, Human
acaguuuucugagaaag

SEQ ID NO: 2595778 - RNA, 15 nt, Human
acaguuuucugagaa

SEQ ID NO: 2595779 - RNA, 14 nt, Human
acaguuuuccauga

SEQ ID NO: 2595780 - RNA, 15 nt, Human
acaguuuuccaugaa

SEQ ID NO: 2595781 - RNA, 16 nt, Human
acaguuuuccaugaaa

SEQ ID NO: 2595782 - RNA, 17 nt, Human
acaguuuuccaugaaaa

SEQ ID NO: 2595783 - RNA, 18 nt, Human
acaguuuuccaugaaaac

SEQ ID NO: 2595784 - RNA, 19 nt, Human
acaguuuuccaugaaaacg

SEQ ID NO: 2595785 - RNA, 21 nt, Human
acaguuuuccaugaaaacguu

SEQ ID NO: 2595786 - RNA, 23 nt, Human
acaguuuuccaugaaaacguuuu

SEQ ID NO: 2595787 - RNA, 18 nt, Human
acaguuuucugagaaaga

SEQ ID NO: 2595788 - RNA, 19 nt, Human
acaguuuucugagaaagac

SEQ ID NO: 2595789 - RNA, 20 nt, Human
acaguuuucugagaaagacu

SEQ ID NO: 2595790 - RNA, 21 nt, Human
acaguuuucugagaaagacua

SEQ ID NO: 2595791 - RNA, 15 nt, Human
acaguuuuuauugcu

SEQ ID NO: 2595792 - RNA, 21 nt, Human
acaguuuucuggcuggagccu

SEQ ID NO: 2595793 - RNA, 14 nt, Human
acaguuuuccuucu

SEQ ID NO: 2595794 - RNA, 22 nt, Human
acaguuuuccuucucaucugug

SEQ ID NO: 2595795 - RNA, 18 nt, Human
acaguuuugguugcuuua

SEQ ID NO: 2595796 - RNA, 19 nt, Human
acaguuuugguugcuuuaa

SEQ ID NO: 2595797 - RNA, 24 nt, Human
acaguuuugguugcuuuaauauca

SEQ ID NO: 2595798 - RNA, 23 nt, Human
acaguuuugucagucuuucuuag

SEQ ID NO: 2595799 - RNA, 23 nt, Human
acauacuuucauccugacucugc

SEQ ID NO: 2595800 - RNA, 12 nt, Human
acauagaaaguu

SEQ ID NO: 2595801 - RNA, 22 nt, Human
acauacuuucauccugacucug

SEQ ID NO: 2595802 - RNA, 16 nt, Human
acauagaaauugccug

SEQ ID NO: 2595803 - RNA, 21 nt, Human
acauagaaauugccugacgaa

SEQ ID NO: 2595804 - RNA, 16 nt, Human
acauacuugaagggcc

SEQ ID NO: 2595805 - RNA, 17 nt, Human
acauacuugaagggcca

SEQ ID NO: 2595806 - RNA, 18 nt, Human
acauacuugaagggccag

SEQ ID NO: 2595807 - RNA, 19 nt, Human
acauacuugaagggccaga

SEQ ID NO: 2595808 - RNA, 20 nt, Human
acauacuugaagggccagag

SEQ ID NO: 2595809 - RNA, 21 nt, Human
acauacuugaagggccagagc

SEQ ID NO: 2595810 - RNA, 22 nt, Human
acauacuugaagggccagagcc

SEQ ID NO: 2595811 - RNA, 23 nt, Human
acauacuugaagggccagagcca

SEQ ID NO: 2595812 - RNA, 17 nt, Human
acauacucccaucugug

SEQ ID NO: 2595813 - RNA, 14 nt, Human
acauacucugcuua

SEQ ID NO: 2595814 - RNA, 19 nt, Human
acauacuggccuggacugu

SEQ ID NO: 2595815 - RNA, 18 nt, Human
acauacuggccuggacug

SEQ ID NO: 2595816 - RNA, 15 nt, Human
acauacuugaagggc

SEQ ID NO: 2595817 - RNA, 16 nt, Human
acauacuggcugguga

SEQ ID NO: 2595818 - RNA, 12 nt, Human
acauacuucagc

SEQ ID NO: 2595819 - RNA, 24 nt, Human
acauacuccuuccaucaaauagaa

SEQ ID NO: 2595820 - RNA, 12 nt, Human
acauacugcugu

SEQ ID NO: 2595821 - RNA, 21 nt, Human
acauacuaaccagcagaaaug

SEQ ID NO: 2595822 - RNA, 22 nt, Human
acauacuaaccagcagaaaugc

SEQ ID NO: 2595823 - RNA, 13 nt, Human
acauacucccauc

SEQ ID NO: 2595824 - RNA, 20 nt, Human
acauacccuggccgcccccu

SEQ ID NO: 2595825 - RNA, 14 nt, Human
acauacccuccccc

SEQ ID NO: 2595826 - RNA, 15 nt, Human
acauaccagcuuaga

SEQ ID NO: 2595827 - RNA, 13 nt, Human
acauacuaaccag

SEQ ID NO: 2595828 - RNA, 21 nt, Human
acauacccuggccgcccccug

SEQ ID NO: 2595829 - RNA, 20 nt, Human
acaguucuuugggccagaca

SEQ ID NO: 2595830 - RNA, 22 nt, Human
acaguucuuugggccagacaug

SEQ ID NO: 2595831 - RNA, 20 nt, Human
acaguugaaaaacagcugag

SEQ ID NO: 2595832 - RNA, 18 nt, Human
acaguuggaaauccaucc

SEQ ID NO: 2595833 - RNA, 15 nt, Human
acaguugcugucaua

SEQ ID NO: 2595834 - RNA, 21 nt, Human
acaguugcugucauaagaaug

SEQ ID NO: 2595835 - RNA, 16 nt, Human
acaguuggccuucaga

SEQ ID NO: 2595836 - RNA, 22 nt, Human
acaguugcugucauaagaauga

SEQ ID NO: 2595837 - RNA, 22 nt, Human
uauuucuaggaagaauuuuaaa

SEQ ID NO: 2595838 - RNA, 21 nt, Human
acaguucuuugggccagacau

SEQ ID NO: 2595839 - RNA, 15 nt, Human
acaguugaaaaacag

SEQ ID NO: 2595840 - RNA, 16 nt, Human
acaguugaaaaacagc

SEQ ID NO: 2595841 - RNA, 11 nt, Human
acaguuguuug

SEQ ID NO: 2595842 - RNA, 12 nt, Human
acaguuguuuga

SEQ ID NO: 2595843 - RNA, 13 nt, Human
acaguuguuugau

SEQ ID NO: 2595844 - RNA, 15 nt, Human
acaguuguuugaugc

SEQ ID NO: 2595845 - RNA, 22 nt, Human
acaguuguuugaugcauuaaaa

SEQ ID NO: 2595846 - RNA, 14 nt, Human
acaguugggugaga

SEQ ID NO: 2595847 - RNA, 15 nt, Human
acaguuguuggccuc

SEQ ID NO: 2595848 - RNA, 20 nt, Human
acaguuuaauaccacagcuu

SEQ ID NO: 2595849 - RNA, 20 nt, Human
acaguuucuuagcuuuuuaa

SEQ ID NO: 2595850 - RNA, 18 nt, Human
acaguuucuuagcuuuuu

SEQ ID NO: 2595851 - RNA, 17 nt, Human
acaguuucuuagcuuuu

SEQ ID NO: 2595852 - RNA, 16 nt, Human
acaguuucuuagcuuu

SEQ ID NO: 2595853 - RNA, 14 nt, Human
acaguuucuuagcu

SEQ ID NO: 2595854 - RNA, 12 nt, Human
acaguuucuuag

SEQ ID NO: 2595855 - RNA, 13 nt, Human
acaguuugcugua

SEQ ID NO: 2595856 - RNA, 12 nt, Human
acaguuugcugu

SEQ ID NO: 2595857 - RNA, 14 nt, Human
acaguuugcucuag

SEQ ID NO: 2595858 - RNA, 15 nt, Human
acaguuugaacaaaa

SEQ ID NO: 2595859 - RNA, 22 nt, Human
acaguuucuuagcuuuuuaauu

SEQ ID NO: 2595860 - RNA, 19 nt, Human
acaguuucuuuuuucuuac

SEQ ID NO: 2595861 - RNA, 19 nt, Human
uauuucuaggaagaauuuu

SEQ ID NO: 2595862 - RNA, 17 nt, Human
uauuucuaggaagaauu

SEQ ID NO: 2595863 - RNA, 16 nt, Human
uauuucuaggaagaau

SEQ ID NO: 2595864 - RNA, 15 nt, Human
uauuucgaaagcugc

SEQ ID NO: 2595865 - RNA, 19 nt, Human
uauuuccucaugugaucac

SEQ ID NO: 2595866 - RNA, 15 nt, Human
uauuuccuuaaacug

SEQ ID NO: 2595867 - RNA, 19 nt, Human
uauuuccuuaaacugugug

SEQ ID NO: 2595868 - RNA, 18 nt, Human
uauuucccucucauuuug

SEQ ID NO: 2595869 - RNA, 23 nt, Human
uauuuccuauauuguuuucagug

SEQ ID NO: 2595870 - RNA, 21 nt, Human
uauuuccccaacauguaauaa

SEQ ID NO: 2595871 - RNA, 21 nt, Human
uauuuccauuccagaauaucu

SEQ ID NO: 2595872 - RNA, 22 nt, Human
uauuuccccaggggaaaaugaa

SEQ ID NO: 2595873 - RNA, 21 nt, Human
uauuuccccaggggaaaauga

SEQ ID NO: 2595874 - RNA, 20 nt, Human
uauuucccuccccuggggac

SEQ ID NO: 2595875 - RNA, 15 nt, Human
uauuucccuccccug

SEQ ID NO: 2595876 - RNA, 22 nt, Human
uauuucccugaaggaaccaaag

SEQ ID NO: 2595877 - RNA, 22 nt, Human
uauuucccucaccuuucccauc

SEQ ID NO: 2595878 - RNA, 19 nt, Human
uaugaaauaaagaaauugc

SEQ ID NO: 2595879 - RNA, 14 nt, Human
uaugaaauaaagaa

SEQ ID NO: 2595880 - RNA, 21 nt, Human
uaugaaauauuauguuaaaac

SEQ ID NO: 2595881 - RNA, 14 nt, Human
uaugaagaacugag

SEQ ID NO: 2595882 - RNA, 20 nt, Human
uaugaagaaaaaauacauuu

SEQ ID NO: 2595883 - RNA, 13 nt, Human
uaugaagaaaaaa

SEQ ID NO: 2595884 - RNA, 15 nt, Human
uaugaagaaaaaaua

SEQ ID NO: 2595885 - RNA, 16 nt, Human
uaugaagaaaaaauac

SEQ ID NO: 2595886 - RNA, 18 nt, Human
uauuuccauucaacaaga

SEQ ID NO: 2595887 - RNA, 19 nt, Human
uaugaagauaaguguauuu

SEQ ID NO: 2595888 - RNA, 14 nt, Human
uaugaagacauaaa

SEQ ID NO: 2595889 - RNA, 21 nt, Human
uaugaagcuaccucaaacuuc

SEQ ID NO: 2595890 - RNA, 13 nt, Human
uauuucauuucuu

SEQ ID NO: 2595891 - RNA, 16 nt, Human
uaugaagaacugagga

SEQ ID NO: 2595892 - RNA, 17 nt, Human
uaugaagaacugaggag

SEQ ID NO: 2595893 - RNA, 15 nt, Human
uaugaagaagagagu

SEQ ID NO: 2595894 - RNA, 20 nt, Human
uccaagcuggucccacucag

SEQ ID NO: 2595895 - RNA, 16 nt, Human
uccaagcuggucccac

SEQ ID NO: 2595896 - RNA, 12 nt, Human
uccaagaagccc

SEQ ID NO: 2595897 - RNA, 19 nt, Human
uccaacuguguucauuaga

SEQ ID NO: 2595898 - RNA, 20 nt, Human
uccaacuguauauauuccca

SEQ ID NO: 2595899 - RNA, 18 nt, Human
uccaacuguguucauuag

SEQ ID NO: 2595900 - RNA, 15 nt, Human
uccaacuucauuuga

SEQ ID NO: 2595901 - RNA, 21 nt, Human
uccaacuggauuauaaauaaa

SEQ ID NO: 2595902 - RNA, 21 nt, Human
uccaaccuggggggcaguggu

SEQ ID NO: 2595903 - RNA, 13 nt, Human
uccaacuccagga

SEQ ID NO: 2595904 - RNA, 18 nt, Human
uccaaccuaaccccuuuc

SEQ ID NO: 2595905 - RNA, 20 nt, Human
uccaaccuaaccccuuuccu

SEQ ID NO: 2595906 - RNA, 21 nt, Human
uccaaccuaaccccuuuccug

SEQ ID NO: 2595907 - RNA, 23 nt, Human
uccaaccuaaccccuuuccugcg

SEQ ID NO: 2595908 - RNA, 13 nt, Human
uccaaccuuccca

SEQ ID NO: 2595909 - RNA, 21 nt, Human
uccaaccugcaaagaucuguc

SEQ ID NO: 2595910 - RNA, 14 nt, Human
uccaaccuggacaa

SEQ ID NO: 2595911 - RNA, 17 nt, Human
uccaaccuggacaacaa

SEQ ID NO: 2595912 - RNA, 16 nt, Human
uccaauccuauguuuu

SEQ ID NO: 2595913 - RNA, 22 nt, Human
uccaaucccauagaugggucug

SEQ ID NO: 2595914 - RNA, 14 nt, Human
uccaauccucacug

SEQ ID NO: 2595915 - RNA, 15 nt, Human
uccaauccucacugg

SEQ ID NO: 2595916 - RNA, 16 nt, Human
uccaauccucacuggg

SEQ ID NO: 2595917 - RNA, 17 nt, Human
uccaauccucacugggu

SEQ ID NO: 2595918 - RNA, 16 nt, Human
uccaauccugcccccu

SEQ ID NO: 2595919 - RNA, 14 nt, Human
uccaauccugcccc

SEQ ID NO: 2595920 - RNA, 13 nt, Human
uccaauccugccc

SEQ ID NO: 2595921 - RNA, 18 nt, Human
uccaauccucacugggug

SEQ ID NO: 2595922 - RNA, 19 nt, Human
uccaaucuaaccacaucaa

SEQ ID NO: 2595923 - RNA, 18 nt, Human
uccaauccugcccccuga

SEQ ID NO: 2595924 - RNA, 20 nt, Human
uccaagugaacacuagccag

SEQ ID NO: 2595925 - RNA, 17 nt, Human
uccaagugaacacuagc

SEQ ID NO: 2595926 - RNA, 18 nt, Human
uccaagugccagaggugg

SEQ ID NO: 2595927 - RNA, 17 nt, Human
uccaagugccagaggug

SEQ ID NO: 2595928 - RNA, 15 nt, Human
uccaagugccaauau

SEQ ID NO: 2595929 - RNA, 21 nt, Human
uccaagugaacacuagccaga

SEQ ID NO: 2595930 - RNA, 18 nt, Human
uccaaucccaccaacccu

SEQ ID NO: 2595931 - RNA, 19 nt, Human
uccaaggaaaccacagcug

SEQ ID NO: 2595932 - RNA, 12 nt, Human
uccaagcuuuug

SEQ ID NO: 2595933 - RNA, 18 nt, Human
uccaaggguacuaaggaa

SEQ ID NO: 2595934 - RNA, 21 nt, Human
uccaagcuggucccacucagu

SEQ ID NO: 2595935 - RNA, 23 nt, Human
uccaagguggucugcucgggccc

SEQ ID NO: 2595936 - RNA, 20 nt, Human
uccaaggaaaccacagcugc

SEQ ID NO: 2595937 - RNA, 15 nt, Human
uccaagguggucugc

SEQ ID NO: 2595938 - RNA, 17 nt, Human
uccaagucucaguggcu

SEQ ID NO: 2595939 - RNA, 17 nt, Human
uccaacccucaucacca

SEQ ID NO: 2595940 - RNA, 16 nt, Human
uccaacccucaucacc

SEQ ID NO: 2595941 - RNA, 23 nt, Human
uccaacccucaucaccaacgucu

SEQ ID NO: 2595942 - RNA, 14 nt, Human
uccaacccucauca

SEQ ID NO: 2595943 - RNA, 22 nt, Human
uccaaccccccagcacugagga

SEQ ID NO: 2595944 - RNA, 21 nt, Human
uccaaccccccagcacugagg

SEQ ID NO: 2595945 - RNA, 20 nt, Human
uccaaccccccagcacugag

SEQ ID NO: 2595946 - RNA, 19 nt, Human
uccaaccccccagcacuga

SEQ ID NO: 2595947 - RNA, 23 nt, Human
uccaaccccccagcacugaggaa

SEQ ID NO: 2595948 - RNA, 16 nt, Human
uccaacccgaggcccg

SEQ ID NO: 2595949 - RNA, 15 nt, Human
accugccaggaagcc

SEQ ID NO: 2595950 - RNA, 16 nt, Human
accugccagccuggcu

SEQ ID NO: 2595951 - RNA, 18 nt, Human
accugccagccuggcuuc

SEQ ID NO: 2595952 - RNA, 21 nt, Human
accugccagccuggcuucugg

SEQ ID NO: 2595953 - RNA, 15 nt, Human
uccaacccaugauga

SEQ ID NO: 2595954 - RNA, 18 nt, Human
uccaaccccccagcacug

SEQ ID NO: 2595955 - RNA, 17 nt, Human
uccaaccccccagcacu

SEQ ID NO: 2595956 - RNA, 14 nt, Human
uccaaccccccagc

SEQ ID NO: 2595957 - RNA, 17 nt, Human
uccaaccccccaccugc

SEQ ID NO: 2595958 - RNA, 19 nt, Human
uccaaccccaacuccagua

SEQ ID NO: 2595959 - RNA, 18 nt, Human
uccaaccccaacuccagu

SEQ ID NO: 2595960 - RNA, 16 nt, Human
uccaaccccaacucca

SEQ ID NO: 2595961 - RNA, 15 nt, Human
uccaaccccaacucc

SEQ ID NO: 2595962 - RNA, 14 nt, Human
uccaaccccaacuc

SEQ ID NO: 2595963 - RNA, 17 nt, Human
uccaacccauuagccau

SEQ ID NO: 2595964 - RNA, 22 nt, Human
uccaacccaugaugagcuccuc

SEQ ID NO: 2595965 - RNA, 14 nt, Human
accugccaggaagc

SEQ ID NO: 2595966 - RNA, 12 nt, Human
accugccaggaa

SEQ ID NO: 2595967 - RNA, 22 nt, Human
accugccacucacacagccagg

SEQ ID NO: 2595968 - RNA, 21 nt, Human
accugccacucacacagccag

SEQ ID NO: 2595969 - RNA, 20 nt, Human
accugccacucacacagcca

SEQ ID NO: 2595970 - RNA, 19 nt, Human
accugccacucacacagcc

SEQ ID NO: 2595971 - RNA, 14 nt, Human
accugccagccugg

SEQ ID NO: 2595972 - RNA, 15 nt, Human
accugccagccuggc

SEQ ID NO: 2595973 - RNA, 17 nt, Human
accugccacucacacag

SEQ ID NO: 2595974 - RNA, 16 nt, Human
accugccacucacaca

SEQ ID NO: 2595975 - RNA, 14 nt, Human
accugccacucaca

SEQ ID NO: 2595976 - RNA, 13 nt, Human
accugccacucac

SEQ ID NO: 2595977 - RNA, 15 nt, Human
uccacccaggagccc

SEQ ID NO: 2595978 - RNA, 14 nt, Human
uccacccaggagcc

SEQ ID NO: 2595979 - RNA, 12 nt, Human
uccacccaggag

SEQ ID NO: 2595980 - RNA, 17 nt, Human
uccacccaccuuggccu

SEQ ID NO: 2595981 - RNA, 12 nt, Human
uccacccagcaa

SEQ ID NO: 2595982 - RNA, 12 nt, Human
uccacccagccc

SEQ ID NO: 2595983 - RNA, 19 nt, Human
uccacccaccucagccucc

SEQ ID NO: 2595984 - RNA, 18 nt, Human
uccacccaccucagccuc

SEQ ID NO: 2595985 - RNA, 17 nt, Human
uccacccaccucagccu

SEQ ID NO: 2595986 - RNA, 15 nt, Human
uccaaucucauggag

SEQ ID NO: 2595987 - RNA, 17 nt, Human
accuggccucugcacuc

SEQ ID NO: 2595988 - RNA, 16 nt, Human
accuggccucugcacu

SEQ ID NO: 2595989 - RNA, 16 nt, Human
accuggccaccugagg

SEQ ID NO: 2595990 - RNA, 13 nt, Human
accuggccaccug

SEQ ID NO: 2595991 - RNA, 18 nt, Human
accuggcacugcugugcu

SEQ ID NO: 2595992 - RNA, 21 nt, Human
accuggcaucgcaccauucug

SEQ ID NO: 2595993 - RNA, 17 nt, Human
accuggcagcucuggac

SEQ ID NO: 2595994 - RNA, 14 nt, Human
accuggccucugca

SEQ ID NO: 2595995 - RNA, 14 nt, Human
accuggcacugcug

SEQ ID NO: 2595996 - RNA, 23 nt, Human
accuggcaagcuagaaccuggag

SEQ ID NO: 2595997 - RNA, 22 nt, Human
accuggcaagcuagaaccugga

SEQ ID NO: 2595998 - RNA, 20 nt, Human
accuggcaagcuagaaccug

SEQ ID NO: 2595999 - RNA, 17 nt, Human
accuggcacugcugugc

SEQ ID NO: 2596000 - RNA, 15 nt, Human
accuggcacugcugu

SEQ ID NO: 2596001 - RNA, 14 nt, Human
accuggcagcucug

SEQ ID NO: 2596002 - RNA, 16 nt, Human
accuggaguuccugaa

SEQ ID NO: 2596003 - RNA, 22 nt, Human
accuggaggggcuagaaccuag

SEQ ID NO: 2596004 - RNA, 19 nt, Human
accuggaguuccugaaccu

SEQ ID NO: 2596005 - RNA, 14 nt, Human
accuggaggggcua

SEQ ID NO: 2596006 - RNA, 15 nt, Human
accuggagggcugga

SEQ ID NO: 2596007 - RNA, 22 nt, Human
accuggagggcuagaaccuggc

SEQ ID NO: 2596008 - RNA, 23 nt, Human
accuggagggcuagaaccuggag

SEQ ID NO: 2596009 - RNA, 22 nt, Human
accuggagggcuagaaccugga

SEQ ID NO: 2596010 - RNA, 20 nt, Human
accuggagggcuagaaccug

SEQ ID NO: 2596011 - RNA, 21 nt, Human
accuggagggcuagaaccuag

SEQ ID NO: 2596012 - RNA, 13 nt, Human
accuggagggcua

SEQ ID NO: 2596013 - RNA, 18 nt, Human
accuggagccccugggug

SEQ ID NO: 2596014 - RNA, 17 nt, Human
accuggagccccugggu

SEQ ID NO: 2596015 - RNA, 13 nt, Human
uccacccagccca

SEQ ID NO: 2596016 - RNA, 14 nt, Human
uccacccagcccau

SEQ ID NO: 2596017 - RNA, 15 nt, Human
uccacccagcccauu

SEQ ID NO: 2596018 - RNA, 17 nt, Human
uccacccagcccauucu

SEQ ID NO: 2596019 - RNA, 20 nt, Human
accuggccucugcacucccc

SEQ ID NO: 2596020 - RNA, 18 nt, Human
accuggccucugcacucc

SEQ ID NO: 2596021 - RNA, 23 nt, Human
accuggccucugcacuccccugc

SEQ ID NO: 2596022 - RNA, 14 nt, Human
accuggguccaaau

SEQ ID NO: 2596023 - RNA, 22 nt, Human
accuggcugagguuccucugcc

SEQ ID NO: 2596024 - RNA, 21 nt, Human
accuggcugagguuccucugc

SEQ ID NO: 2596025 - RNA, 19 nt, Human
accuggcugagguuccucu

SEQ ID NO: 2596026 - RNA, 13 nt, Human
accuggcugaggu

SEQ ID NO: 2596027 - RNA, 19 nt, Human
accuggcugagccuggcug

SEQ ID NO: 2596028 - RNA, 18 nt, Human
accuggguccaaauaaaa

SEQ ID NO: 2596029 - RNA, 17 nt, Human
accuggguccaaauaaa

SEQ ID NO: 2596030 - RNA, 16 nt, Human
accuggguccaaauaa

SEQ ID NO: 2596031 - RNA, 15 nt, Human
accuggguccaaaua

SEQ ID NO: 2596032 - RNA, 21 nt, Human
accuggguccaaauaaaaacu

SEQ ID NO: 2596033 - RNA, 20 nt, Human
accuggguccaaauaaaaac

SEQ ID NO: 2596034 - RNA, 23 nt, Human
accuggguccaaauaaaaacuaa

SEQ ID NO: 2596035 - RNA, 19 nt, Human
accugguacccuccuggcu

SEQ ID NO: 2596036 - RNA, 18 nt, Human
accugguacccuccuggc

SEQ ID NO: 2596037 - RNA, 16 nt, Human
accugguacccuccug

SEQ ID NO: 2596038 - RNA, 15 nt, Human
accuggguccuuuuc

SEQ ID NO: 2596039 - RNA, 17 nt, Human
accuggguucccuuucc

SEQ ID NO: 2596040 - RNA, 22 nt, Human
accuggguucccuuuccuucca

SEQ ID NO: 2596041 - RNA, 20 nt, Human
accuuagacagucccugcca

SEQ ID NO: 2596042 - RNA, 19 nt, Human
accuuagacagucccugcc

SEQ ID NO: 2596043 - RNA, 18 nt, Human
accuuagacagucccugc

SEQ ID NO: 2596044 - RNA, 19 nt, Human
accuguuucugcagccacu

SEQ ID NO: 2596045 - RNA, 21 nt, Human
accuggucacaggacucugcc

SEQ ID NO: 2596046 - RNA, 19 nt, Human
accuguuuuuaagcuguuu

SEQ ID NO: 2596047 - RNA, 18 nt, Human
accuguuuuuaagcuguu

SEQ ID NO: 2596048 - RNA, 18 nt, Human
accuguuuucgcaccuac

SEQ ID NO: 2596049 - RNA, 16 nt, Human
accuguuuuuaagcug

SEQ ID NO: 2596050 - RNA, 20 nt, Human
accuguuuuuaagcuguuuc

SEQ ID NO: 2596051 - RNA, 14 nt, Human
acgagaaaacaaua

SEQ ID NO: 2596052 - RNA, 21 nt, Human
accuuuuuuauacauaaacaa

SEQ ID NO: 2596053 - RNA, 22 nt, Human
accuuuuuuauacauaaacaag

SEQ ID NO: 2596054 - RNA, 14 nt, Human
uccagggaagcugg

SEQ ID NO: 2596055 - RNA, 16 nt, Human
uccagggaagcuggcc

SEQ ID NO: 2596056 - RNA, 19 nt, Human
accuuuuuuauacauaaac

SEQ ID NO: 2596057 - RNA, 20 nt, Human
accuuuuuuauacauaaaca

SEQ ID NO: 2596058 - RNA, 12 nt, Human
uccagggaagcu

SEQ ID NO: 2596059 - RNA, 17 nt, Human
uccaggcuuggauguaa

SEQ ID NO: 2596060 - RNA, 20 nt, Human
uccaggcugucuuucacuga

SEQ ID NO: 2596061 - RNA, 21 nt, Human
uccaggcuguaucccaugagc

SEQ ID NO: 2596062 - RNA, 19 nt, Human
acgaggcccucgggcccag

SEQ ID NO: 2596063 - RNA, 18 nt, Human
acgaggcccucgggccca

SEQ ID NO: 2596064 - RNA, 16 nt, Human
acgaggcccucgggcc

SEQ ID NO: 2596065 - RNA, 13 nt, Human
acgaggcccucgg

SEQ ID NO: 2596066 - RNA, 17 nt, Human
acgccagauucuuuccu

SEQ ID NO: 2596067 - RNA, 19 nt, Human
acgccagauucuuuccuga

SEQ ID NO: 2596068 - RNA, 16 nt, Human
acgagcaggcuucuuc

SEQ ID NO: 2596069 - RNA, 19 nt, Human
acgagcuguuuacuaggga

SEQ ID NO: 2596070 - RNA, 11 nt, Human
acgaggcccuc

SEQ ID NO: 2596071 - RNA, 12 nt, Human
acgaggaagccc

SEQ ID NO: 2596072 - RNA, 19 nt, Human
acgagcaggcuacugucag

SEQ ID NO: 2596073 - RNA, 20 nt, Human
acgagcaggcuacugucagc

SEQ ID NO: 2596074 - RNA, 19 nt, Human
acgagacccuacaggagag

SEQ ID NO: 2596075 - RNA, 20 nt, Human
acgagacccuacaggagagg

SEQ ID NO: 2596076 - RNA, 17 nt, Human
uccagggaagcuggccg

SEQ ID NO: 2596077 - RNA, 15 nt, Human
acgagaaagaucauu

SEQ ID NO: 2596078 - RNA, 18 nt, Human
uccagggaagcuggccga

SEQ ID NO: 2596079 - RNA, 20 nt, Human
acgagaggggaagaguguac

SEQ ID NO: 2596080 - RNA, 18 nt, Human
acgagagguaugccugua

SEQ ID NO: 2596081 - RNA, 21 nt, Human
acgagaggggaagaguguacu

SEQ ID NO: 2596082 - RNA, 19 nt, Human
acgagaucaagagaucaag

SEQ ID NO: 2596083 - RNA, 19 nt, Human
uccaggcacccuucuuucc

SEQ ID NO: 2596084 - RNA, 16 nt, Human
uccaggcacccuucuu

SEQ ID NO: 2596085 - RNA, 15 nt, Human
uccaggcacccuucu

SEQ ID NO: 2596086 - RNA, 21 nt, Human
uccaggcacccuucuuuccuc

SEQ ID NO: 2596087 - RNA, 20 nt, Human
uccaggcacccuucuuuccu

SEQ ID NO: 2596088 - RNA, 14 nt, Human
uccaggcacugaga

SEQ ID NO: 2596089 - RNA, 16 nt, Human
uccaggcacugagaua

SEQ ID NO: 2596090 - RNA, 13 nt, Human
uccaggcagaucc

SEQ ID NO: 2596091 - RNA, 13 nt, Human
uccagccccugga

SEQ ID NO: 2596092 - RNA, 23 nt, Human
uccagccccucuggucgcuccug

SEQ ID NO: 2596093 - RNA, 18 nt, Human
uccagccccucuggucgc

SEQ ID NO: 2596094 - RNA, 16 nt, Human
uccagccccucugguc

SEQ ID NO: 2596095 - RNA, 15 nt, Human
uccagccccucuggu

SEQ ID NO: 2596096 - RNA, 19 nt, Human
uccagagaguccucuggau

SEQ ID NO: 2596097 - RNA, 18 nt, Human
uccagagaguccucugga

SEQ ID NO: 2596098 - RNA, 14 nt, Human
uccagccccucugg

SEQ ID NO: 2596099 - RNA, 12 nt, Human
uccagccccugg

SEQ ID NO: 2596100 - RNA, 15 nt, Human
uccagagaguggcuc

SEQ ID NO: 2596101 - RNA, 21 nt, Human
uccagagagagaagugccccu

SEQ ID NO: 2596102 - RNA, 15 nt, Human
uccagagaguccucu

SEQ ID NO: 2596103 - RNA, 23 nt, Human
uccagagagagaagugccccugc

SEQ ID NO: 2596104 - RNA, 17 nt, Human
uccagagaguggcuccu

SEQ ID NO: 2596105 - RNA, 16 nt, Human
uccagagaguggcucc

SEQ ID NO: 2596106 - RNA, 14 nt, Human
uccaggcagaucca

SEQ ID NO: 2596107 - RNA, 15 nt, Human
uccaggcagauccag

SEQ ID NO: 2596108 - RNA, 16 nt, Human
uccaggcagauccagg

SEQ ID NO: 2596109 - RNA, 17 nt, Human
uccaggcagauccagga

SEQ ID NO: 2596110 - RNA, 18 nt, Human
uccaggcagauccaggac

SEQ ID NO: 2596111 - RNA, 19 nt, Human
uccaggcagauccaggacu

SEQ ID NO: 2596112 - RNA, 20 nt, Human
uccaggcagauccaggacua

SEQ ID NO: 2596113 - RNA, 21 nt, Human
uccaggcagauccaggacuau

SEQ ID NO: 2596114 - RNA, 23 nt, Human
uccaggcagucgggggcuggccu

SEQ ID NO: 2596115 - RNA, 14 nt, Human
uccaggcaggcuaa

SEQ ID NO: 2596116 - RNA, 22 nt, Human
uccaggcagucgggggcuggcc

SEQ ID NO: 2596117 - RNA, 16 nt, Human
uccaggccagggggcc

SEQ ID NO: 2596118 - RNA, 23 nt, Human
uccaggcacccuucuuuccucuu

SEQ ID NO: 2596119 - RNA, 14 nt, Human
uccaggcuguaucc

SEQ ID NO: 2596120 - RNA, 18 nt, Human
uccaggccagggggccag

SEQ ID NO: 2596121 - RNA, 17 nt, Human
uccaggccauggaggca

SEQ ID NO: 2596122 - RNA, 21 nt, Human
uccaggccccaaaaccacagc

SEQ ID NO: 2596123 - RNA, 16 nt, Human
uccagaauuucccaaa

SEQ ID NO: 2596124 - RNA, 12 nt, Human
uccacugccugg

SEQ ID NO: 2596125 - RNA, 15 nt, Human
uccacucccagugcu

SEQ ID NO: 2596126 - RNA, 10 nt, Human
uccacuggac

SEQ ID NO: 2596127 - RNA, 12 nt, Human
uccacuggacuu

SEQ ID NO: 2596128 - RNA, 16 nt, Human
uccacuggacuugagc

SEQ ID NO: 2596129 - RNA, 22 nt, Human
uccacugccuucgauacaccgg

SEQ ID NO: 2596130 - RNA, 15 nt, Human
uccacugccuucgau

SEQ ID NO: 2596131 - RNA, 13 nt, Human
uccacugccuucg

SEQ ID NO: 2596132 - RNA, 15 nt, Human
uccacugagggcagu

SEQ ID NO: 2596133 - RNA, 22 nt, Human
uccagaauuucccaaagcagug

SEQ ID NO: 2596134 - RNA, 20 nt, Human
uccagaauuucccaaagcag

SEQ ID NO: 2596135 - RNA, 13 nt, Human
uccagacacaugu

SEQ ID NO: 2596136 - RNA, 14 nt, Human
uccagacccggcug

SEQ ID NO: 2596137 - RNA, 18 nt, Human
uccacuggggauugggcc

SEQ ID NO: 2596138 - RNA, 22 nt, Human
uccacuggccggagucagugcc

SEQ ID NO: 2596139 - RNA, 17 nt, Human
uccacuggacuugagcu

SEQ ID NO: 2596140 - RNA, 18 nt, Human
uccagacccggcugcgug

SEQ ID NO: 2596141 - RNA, 15 nt, Human
uccagacccggcugc

SEQ ID NO: 2596142 - RNA, 19 nt, Human
uccagacccggcugcgugg

SEQ ID NO: 2596143 - RNA, 15 nt, Human
uccagaccugaagaa

SEQ ID NO: 2596144 - RNA, 16 nt, Human
uccagaccugaagaau

SEQ ID NO: 2596145 - RNA, 11 nt, Human
uccagaccuga

SEQ ID NO: 2596146 - RNA, 19 nt, Human
uccagacaaaccagaagca

SEQ ID NO: 2596147 - RNA, 24 nt, Human
uccagacaaaccagaagcaacaga

SEQ ID NO: 2596148 - RNA, 18 nt, Human
uccagacguaggggaggg

SEQ ID NO: 2596149 - RNA, 21 nt, Human
uccagaccuuguucacacucu

SEQ ID NO: 2596150 - RNA, 15 nt, Human
uccagacucucugug

SEQ ID NO: 2596151 - RNA, 14 nt, Human
uccagacucucugu

SEQ ID NO: 2596152 - RNA, 22 nt, Human
uccagacugcuuccaauuuucu

SEQ ID NO: 2596153 - RNA, 13 nt, Human
uccagaccugauc

SEQ ID NO: 2596154 - RNA, 18 nt, Human
uccagaccugauccugga

SEQ ID NO: 2596155 - RNA, 19 nt, Human
uccagaccugauccuggag

SEQ ID NO: 2596156 - RNA, 22 nt, Human
uccagaccugauccuggaggcc

SEQ ID NO: 2596157 - RNA, 23 nt, Human
uccagacugcuuccaauuuucug

SEQ ID NO: 2596158 - RNA, 14 nt, Human
uccagacuuccuug

SEQ ID NO: 2596159 - RNA, 19 nt, Human
uccagacuuccuugagaca

SEQ ID NO: 2596160 - RNA, 20 nt, Human
uccagacuuccuugagacac

SEQ ID NO: 2596161 - RNA, 19 nt, Human
uccagagagagaagugccc

SEQ ID NO: 2596162 - RNA, 14 nt, Human
uccagagacuggga

SEQ ID NO: 2596163 - RNA, 14 nt, Human
uccacgacugucuc

SEQ ID NO: 2596164 - RNA, 15 nt, Human
uccacgacugucucc

SEQ ID NO: 2596165 - RNA, 16 nt, Human
uccacgacugucucca

SEQ ID NO: 2596166 - RNA, 19 nt, Human
uccaccuucccaugcccug

SEQ ID NO: 2596167 - RNA, 18 nt, Human
uccaccuucccaugcccu

SEQ ID NO: 2596168 - RNA, 16 nt, Human
uccaccuucccaugcc

SEQ ID NO: 2596169 - RNA, 22 nt, Human
accuuuugggaauguuuuaaau

SEQ ID NO: 2596170 - RNA, 16 nt, Human
accuuuugggaauguu

SEQ ID NO: 2596171 - RNA, 19 nt, Human
accuuuugggaauguuuua

SEQ ID NO: 2596172 - RNA, 21 nt, Human
accuuuugcaccugcucucuu

SEQ ID NO: 2596173 - RNA, 23 nt, Human
accuucaauaaaguaucuacaug

SEQ ID NO: 2596174 - RNA, 13 nt, Human
uccacucccagug

SEQ ID NO: 2596175 - RNA, 19 nt, Human
uccacucccaggcagcccu

SEQ ID NO: 2596176 - RNA, 14 nt, Human
uccacucccaggca

SEQ ID NO: 2596177 - RNA, 13 nt, Human
uccacucccacuu

SEQ ID NO: 2596178 - RNA, 19 nt, Human
uccacgacugucuccaugg

SEQ ID NO: 2596179 - RNA, 12 nt, Human
uccacucccacu

SEQ ID NO: 2596180 - RNA, 15 nt, Human
uccacucaguugcaa

SEQ ID NO: 2596181 - RNA, 15 nt, Human
uccacuccuccuagc

SEQ ID NO: 2596182 - RNA, 18 nt, Human
uccacuccuccuagccac

SEQ ID NO: 2596183 - RNA, 17 nt, Human
uccacgacugucuccau

SEQ ID NO: 2596184 - RNA, 18 nt, Human
uccacgacugucuccaug

SEQ ID NO: 2596185 - RNA, 20 nt, Human
accuuuugagugccuuacac

SEQ ID NO: 2596186 - RNA, 17 nt, Human
accuuuugagugccuua

SEQ ID NO: 2596187 - RNA, 14 nt, Human
accuuuugagugcc

SEQ ID NO: 2596188 - RNA, 13 nt, Human
accuucaauaaag

SEQ ID NO: 2596189 - RNA, 14 nt, Human
accuucaauaaagu

SEQ ID NO: 2596190 - RNA, 15 nt, Human
accuucaauaaagua

SEQ ID NO: 2596191 - RNA, 17 nt, Human
accuucaauaaaguauc

SEQ ID NO: 2596192 - RNA, 19 nt, Human
accuucaauaaaguaucua

SEQ ID NO: 2596193 - RNA, 20 nt, Human
accuucaauaaaguaucuac

SEQ ID NO: 2596194 - RNA, 16 nt, Human
accuucaauuccuggg

SEQ ID NO: 2596195 - RNA, 22 nt, Human
accuuaucugugcgugaaacac

SEQ ID NO: 2596196 - RNA, 18 nt, Human
accuuauuguaccucucu

SEQ ID NO: 2596197 - RNA, 17 nt, Human
accuuauuguaccucuc

SEQ ID NO: 2596198 - RNA, 14 nt, Human
accuuauuguaccu

SEQ ID NO: 2596199 - RNA, 23 nt, Human
accuuaucugugcgugaaacaca

SEQ ID NO: 2596200 - RNA, 12 nt, Human
accuucaauaaa

SEQ ID NO: 2596201 - RNA, 19 nt, Human
accuucaaacuagggccaa

SEQ ID NO: 2596202 - RNA, 18 nt, Human
accuuauuuuuucccaaa

SEQ ID NO: 2596203 - RNA, 22 nt, Human
accuuauuguaccucucuuaua

SEQ ID NO: 2596204 - RNA, 20 nt, Human
accuuauuguaccucucuua

SEQ ID NO: 2596205 - RNA, 16 nt, Human
accuuauuuuuuccca

SEQ ID NO: 2596206 - RNA, 13 nt, Human
accuacauguauu

SEQ ID NO: 2596207 - RNA, 14 nt, Human
accuacauguauuu

SEQ ID NO: 2596208 - RNA, 15 nt, Human
accuacauguauuug

SEQ ID NO: 2596209 - RNA, 14 nt, Human
accuaccaaaaaau

SEQ ID NO: 2596210 - RNA, 15 nt, Human
accuaccacaguguc

SEQ ID NO: 2596211 - RNA, 20 nt, Human
accuacaguguacagucuug

SEQ ID NO: 2596212 - RNA, 18 nt, Human
accuacaguguacagucu

SEQ ID NO: 2596213 - RNA, 17 nt, Human
accuacaguguacaguc

SEQ ID NO: 2596214 - RNA, 16 nt, Human
accuacaguguacagu

SEQ ID NO: 2596215 - RNA, 22 nt, Human
accuaauccaggcagauccagg

SEQ ID NO: 2596216 - RNA, 21 nt, Human
accuaauccaggcagauccag

SEQ ID NO: 2596217 - RNA, 20 nt, Human
accuaaugcuccuuguuccu

SEQ ID NO: 2596218 - RNA, 12 nt, Human
accuaauguuua

SEQ ID NO: 2596219 - RNA, 19 nt, Human
accuaauguuuaugagcca

SEQ ID NO: 2596220 - RNA, 20 nt, Human
accuaauguuuaugagccag

SEQ ID NO: 2596221 - RNA, 16 nt, Human
accuaauuagagcaga

SEQ ID NO: 2596222 - RNA, 15 nt, Human
accuaauuagagcag

SEQ ID NO: 2596223 - RNA, 22 nt, Human
accuacaccauuaucuuggaaa

SEQ ID NO: 2596224 - RNA, 19 nt, Human
accuaauuagagcagauga

SEQ ID NO: 2596225 - RNA, 15 nt, Human
accuacaguguacag

SEQ ID NO: 2596226 - RNA, 21 nt, Human
accuagggugauauuaaccag

SEQ ID NO: 2596227 - RNA, 15 nt, Human
accuaccucagguug

SEQ ID NO: 2596228 - RNA, 14 nt, Human
accuaccucagguu

SEQ ID NO: 2596229 - RNA, 13 nt, Human
accuaccucaggu

SEQ ID NO: 2596230 - RNA, 12 nt, Human
accuaccucagg

SEQ ID NO: 2596231 - RNA, 14 nt, Human
accuaccaucaggg

SEQ ID NO: 2596232 - RNA, 21 nt, Human
accuaccaccccuuccugucc

SEQ ID NO: 2596233 - RNA, 19 nt, Human
accuaccaccccuuccugu

SEQ ID NO: 2596234 - RNA, 18 nt, Human
accuaccaccccuuccug

SEQ ID NO: 2596235 - RNA, 15 nt, Human
accuaccacaugcca

SEQ ID NO: 2596236 - RNA, 20 nt, Human
accuaccaccacgcccggcu

SEQ ID NO: 2596237 - RNA, 16 nt, Human
accuaccaccacgccc

SEQ ID NO: 2596238 - RNA, 16 nt, Human
accuaccacagugucu

SEQ ID NO: 2596239 - RNA, 17 nt, Human
accuaccacagugucug

SEQ ID NO: 2596240 - RNA, 12 nt, Human
accuaccacaug

SEQ ID NO: 2596241 - RNA, 19 nt, Human
accuaccacagugucugua

SEQ ID NO: 2596242 - RNA, 21 nt, Human
accuaguggcuguccagugcc

SEQ ID NO: 2596243 - RNA, 19 nt, Human
accuaguggcuguccagug

SEQ ID NO: 2596244 - RNA, 17 nt, Human
accuaguggcuguccag

SEQ ID NO: 2596245 - RNA, 16 nt, Human
accuaguggcugucca

SEQ ID NO: 2596246 - RNA, 23 nt, Human
accuaguggcuguccagugccca

SEQ ID NO: 2596247 - RNA, 14 nt, Human
accuaguuuuccau

SEQ ID NO: 2596248 - RNA, 16 nt, Human
accuaccucagguugc

SEQ ID NO: 2596249 - RNA, 13 nt, Human
accuagucuaagg

SEQ ID NO: 2596250 - RNA, 15 nt, Human
accuaguagucauuu

SEQ ID NO: 2596251 - RNA, 19 nt, Human
accucaaaaugucuaagau

SEQ ID NO: 2596252 - RNA, 22 nt, Human
accuaguggcuguccagugccc

SEQ ID NO: 2596253 - RNA, 15 nt, Human
accuauaaaacaggu

SEQ ID NO: 2596254 - RNA, 16 nt, Human
accuauaaaguaaagc

SEQ ID NO: 2596255 - RNA, 18 nt, Human
accuauaaaacaggucaa

SEQ ID NO: 2596256 - RNA, 23 nt, Human
accucaaacuuccagucagguag

SEQ ID NO: 2596257 - RNA, 18 nt, Human
accuauaaaguaaagcua

SEQ ID NO: 2596258 - RNA, 22 nt, Human
ucaggaaaucaaauaugcaaag

SEQ ID NO: 2596259 - RNA, 23 nt, Human
ucaggaaaucaaauaugcaaagc

SEQ ID NO: 2596260 - RNA, 12 nt, Human
ucaggaagcuca

SEQ ID NO: 2596261 - RNA, 22 nt, Human
ucaggaaaggaaucauuucuau

SEQ ID NO: 2596262 - RNA, 18 nt, Human
ucaggaaauauauaugug

SEQ ID NO: 2596263 - RNA, 19 nt, Human
ucaggaaauauauaugugu

SEQ ID NO: 2596264 - RNA, 20 nt, Human
ucaggaaauauauaugugug

SEQ ID NO: 2596265 - RNA, 21 nt, Human
ucaggaaauauauaugugugu

SEQ ID NO: 2596266 - RNA, 13 nt, Human
ucaggaacagaag

SEQ ID NO: 2596267 - RNA, 14 nt, Human
ucaggaagcucagg

SEQ ID NO: 2596268 - RNA, 13 nt, Human
ucaggaagcucag

SEQ ID NO: 2596269 - RNA, 15 nt, Human
ucaggaagcucaggg

SEQ ID NO: 2596270 - RNA, 14 nt, Human
ucaggaacagaagg

SEQ ID NO: 2596271 - RNA, 16 nt, Human
ucaggaacagaaggau

SEQ ID NO: 2596272 - RNA, 16 nt, Human
accgcgacuaauuuca

SEQ ID NO: 2596273 - RNA, 17 nt, Human
accgcgacuaauuucaa

SEQ ID NO: 2596274 - RNA, 18 nt, Human
ucaggaacagcuauggga

SEQ ID NO: 2596275 - RNA, 20 nt, Human
accgcgacuaauuucaaaau

SEQ ID NO: 2596276 - RNA, 15 nt, Human
accgcgucuggugac

SEQ ID NO: 2596277 - RNA, 19 nt, Human
accgcguuguaaaauauag

SEQ ID NO: 2596278 - RNA, 18 nt, Human
accgcguuguaaaauaua

SEQ ID NO: 2596279 - RNA, 15 nt, Human
accgcguuguaaaau

SEQ ID NO: 2596280 - RNA, 13 nt, Human
accgcguuguaaa

SEQ ID NO: 2596281 - RNA, 13 nt, Human
accgcuccccagc

SEQ ID NO: 2596282 - RNA, 15 nt, Human
accuaaaaaagauau

SEQ ID NO: 2596283 - RNA, 14 nt, Human
accgcuccccagcc

SEQ ID NO: 2596284 - RNA, 15 nt, Human
accuaaacagauaua

SEQ ID NO: 2596285 - RNA, 22 nt, Human
accuaaaauuugcccucccauc

SEQ ID NO: 2596286 - RNA, 21 nt, Human
accuaaaauuugcccucccau

SEQ ID NO: 2596287 - RNA, 19 nt, Human
accuaaaauuugcccuccc

SEQ ID NO: 2596288 - RNA, 23 nt, Human
accuaaacauagaaauugccuga

SEQ ID NO: 2596289 - RNA, 19 nt, Human
accuaaaaaagauauauua

SEQ ID NO: 2596290 - RNA, 16 nt, Human
accuaaaaaagauaua

SEQ ID NO: 2596291 - RNA, 21 nt, Human
accuaaaagagauuucaagag

SEQ ID NO: 2596292 - RNA, 13 nt, Human
accuaaaagagau

SEQ ID NO: 2596293 - RNA, 21 nt, Human
accuaaaaggaaaucucaccc

SEQ ID NO: 2596294 - RNA, 22 nt, Human
accuaaaaggaaaucucacccc

SEQ ID NO: 2596295 - RNA, 15 nt, Human
accuaaccccuuucc

SEQ ID NO: 2596296 - RNA, 16 nt, Human
accuaaccccuuuccu

SEQ ID NO: 2596297 - RNA, 18 nt, Human
accuaacauuauuuauuc

SEQ ID NO: 2596298 - RNA, 15 nt, Human
accuaaauggccuca

SEQ ID NO: 2596299 - RNA, 22 nt, Human
ucauccuucuggaauaaggaga

SEQ ID NO: 2596300 - RNA, 14 nt, Human
ucaucuaggauuuu

SEQ ID NO: 2596301 - RNA, 18 nt, Human
ucaucuagguaaauuaca

SEQ ID NO: 2596302 - RNA, 13 nt, Human
ucaucuaguuuua

SEQ ID NO: 2596303 - RNA, 16 nt, Human
ucaugaauuaguuuua

SEQ ID NO: 2596304 - RNA, 16 nt, Human
ucaugaaucugcaaug

SEQ ID NO: 2596305 - RNA, 13 nt, Human
ucaugaagcccaa

SEQ ID NO: 2596306 - RNA, 18 nt, Human
ucaucuauuucugagaag

SEQ ID NO: 2596307 - RNA, 23 nt, Human
ucaucuauaaagaagaacuugca

SEQ ID NO: 2596308 - RNA, 13 nt, Human
ucaucuauaaaga

SEQ ID NO: 2596309 - RNA, 11 nt, Human
ucaucuauuuc

SEQ ID NO: 2596310 - RNA, 14 nt, Human
ucaucuauuucuga

SEQ ID NO: 2596311 - RNA, 15 nt, Human
ucaucuauuucugag

SEQ ID NO: 2596312 - RNA, 16 nt, Human
ucaucuauuucugaga

SEQ ID NO: 2596313 - RNA, 17 nt, Human
ucaucuauuucugagaa

SEQ ID NO: 2596314 - RNA, 19 nt, Human
ucauccuccucagaucuuc

SEQ ID NO: 2596315 - RNA, 13 nt, Human
ucauccuccucag

SEQ ID NO: 2596316 - RNA, 18 nt, Human
ucauccucauacccaccc

SEQ ID NO: 2596317 - RNA, 20 nt, Human
ucauccugacucugcccccu

SEQ ID NO: 2596318 - RNA, 19 nt, Human
ucauccugacucugccccc

SEQ ID NO: 2596319 - RNA, 17 nt, Human
ucauccugacucugccc

SEQ ID NO: 2596320 - RNA, 16 nt, Human
ucauccugacucugcc

SEQ ID NO: 2596321 - RNA, 14 nt, Human
ucauccuucuggaa

SEQ ID NO: 2596322 - RNA, 13 nt, Human
ucauccugcaggc

SEQ ID NO: 2596323 - RNA, 12 nt, Human
ucauccugcagg

SEQ ID NO: 2596324 - RNA, 14 nt, Human
ucauccgaggcagg

SEQ ID NO: 2596325 - RNA, 15 nt, Human
ucauccgaggcaggg

SEQ ID NO: 2596326 - RNA, 21 nt, Human
ucaucccgagcaccuccacau

SEQ ID NO: 2596327 - RNA, 23 nt, Human
ucaucccgagcaccuccacaucc

SEQ ID NO: 2596328 - RNA, 18 nt, Human
ucaucccuaaugcugcag

SEQ ID NO: 2596329 - RNA, 17 nt, Human
ucaucccuaaugcugca

SEQ ID NO: 2596330 - RNA, 21 nt, Human
ucaucccuaugggauucagug

SEQ ID NO: 2596331 - RNA, 15 nt, Human
ucauccuaagcuauu

SEQ ID NO: 2596332 - RNA, 19 nt, Human
ucauccggcagccuggaug

SEQ ID NO: 2596333 - RNA, 15 nt, Human
ucauccggcagccug

SEQ ID NO: 2596334 - RNA, 17 nt, Human
ucauccggcagccugga

SEQ ID NO: 2596335 - RNA, 14 nt, Human
ucaucccauguaca

SEQ ID NO: 2596336 - RNA, 23 nt, Human
accuccugccucgaacuggcugc

SEQ ID NO: 2596337 - RNA, 18 nt, Human
ucaucccauucugcguca

SEQ ID NO: 2596338 - RNA, 20 nt, Human
ucauccccaccugucuucaa

SEQ ID NO: 2596339 - RNA, 12 nt, Human
ucauccccaggg

SEQ ID NO: 2596340 - RNA, 20 nt, Human
ucauccccaggggucccagc

SEQ ID NO: 2596341 - RNA, 21 nt, Human
ucauccccaggggucccagcc

SEQ ID NO: 2596342 - RNA, 17 nt, Human
ucauccccucacuugcc

SEQ ID NO: 2596343 - RNA, 17 nt, Human
accucccugacccgucu

SEQ ID NO: 2596344 - RNA, 13 nt, Human
accucccugaccc

SEQ ID NO: 2596345 - RNA, 14 nt, Human
accucccugcaacc

SEQ ID NO: 2596346 - RNA, 13 nt, Human
accucccugccuc

SEQ ID NO: 2596347 - RNA, 14 nt, Human
accucccugccucc

SEQ ID NO: 2596348 - RNA, 12 nt, Human
accuccugccuc

SEQ ID NO: 2596349 - RNA, 13 nt, Human
accuccugccucg

SEQ ID NO: 2596350 - RNA, 10 nt, Human
accucccucc

SEQ ID NO: 2596351 - RNA, 16 nt, Human
accucaacugccuacu

SEQ ID NO: 2596352 - RNA, 22 nt, Human
accucaacccccauuucuauuu

SEQ ID NO: 2596353 - RNA, 15 nt, Human
accucccucccggca

SEQ ID NO: 2596354 - RNA, 22 nt, Human
accucaacugccuacuccaaaa

SEQ ID NO: 2596355 - RNA, 14 nt, Human
accucccugaacca

SEQ ID NO: 2596356 - RNA, 15 nt, Human
accucccugaaccau

SEQ ID NO: 2596357 - RNA, 20 nt, Human
accucccugaaccaucccug

SEQ ID NO: 2596358 - RNA, 21 nt, Human
accucaacccccauuucuauu

SEQ ID NO: 2596359 - RNA, 19 nt, Human
accucaacccccauuucua

SEQ ID NO: 2596360 - RNA, 16 nt, Human
accucaaccugugaug

SEQ ID NO: 2596361 - RNA, 16 nt, Human
accucaaccaaugcca

SEQ ID NO: 2596362 - RNA, 21 nt, Human
accugaggcccuucucuccag

SEQ ID NO: 2596363 - RNA, 20 nt, Human
accugaggcccuucucucca

SEQ ID NO: 2596364 - RNA, 16 nt, Human
accugaggcccuucuc

SEQ ID NO: 2596365 - RNA, 15 nt, Human
accugaggcccuucu

SEQ ID NO: 2596366 - RNA, 22 nt, Human
accugaggugggcccaggacca

SEQ ID NO: 2596367 - RNA, 21 nt, Human
accugaggugggcccaggacc

SEQ ID NO: 2596368 - RNA, 19 nt, Human
accugaggugggcccagga

SEQ ID NO: 2596369 - RNA, 18 nt, Human
accugaggugggcccagg

SEQ ID NO: 2596370 - RNA, 17 nt, Human
accugaggugggcccag

SEQ ID NO: 2596371 - RNA, 16 nt, Human
accugaggugggccca

SEQ ID NO: 2596372 - RNA, 14 nt, Human
accugaggugggcc

SEQ ID NO: 2596373 - RNA, 12 nt, Human
accugagguggg

SEQ ID NO: 2596374 - RNA, 24 nt, Human
accugaggugggcccaggaccagc

SEQ ID NO: 2596375 - RNA, 23 nt, Human
accugaggugggcccaggaccag

SEQ ID NO: 2596376 - RNA, 22 nt, Human
accugagucacccuaccugugc

SEQ ID NO: 2596377 - RNA, 23 nt, Human
accugagucacccuaccugugcc

SEQ ID NO: 2596378 - RNA, 21 nt, Human
accugagucguacagaaagcu

SEQ ID NO: 2596379 - RNA, 22 nt, Human
accugaggcccuucucuccagc

SEQ ID NO: 2596380 - RNA, 18 nt, Human
accugauugugucucuug

SEQ ID NO: 2596381 - RNA, 17 nt, Human
accugauugugucucuu

SEQ ID NO: 2596382 - RNA, 15 nt, Human
accugauugugucuc

SEQ ID NO: 2596383 - RNA, 14 nt, Human
accugaucaaugac

SEQ ID NO: 2596384 - RNA, 16 nt, Human
accugaucaaugacag

SEQ ID NO: 2596385 - RNA, 18 nt, Human
accugagucugcuauauu

SEQ ID NO: 2596386 - RNA, 21 nt, Human
accugauuuacaguuucaaaa

SEQ ID NO: 2596387 - RNA, 15 nt, Human
accugauuuacaguu

SEQ ID NO: 2596388 - RNA, 20 nt, Human
accugaucaaugacagagcc

SEQ ID NO: 2596389 - RNA, 17 nt, Human
accugaucaaugacaga

SEQ ID NO: 2596390 - RNA, 14 nt, Human
accugauugugucu

SEQ ID NO: 2596391 - RNA, 23 nt, Human
accugcacuggggagcccgucuc

SEQ ID NO: 2596392 - RNA, 22 nt, Human
accugcaccuccccccacugca

SEQ ID NO: 2596393 - RNA, 21 nt, Human
accugcaccuccccccacugc

SEQ ID NO: 2596394 - RNA, 15 nt, Human
accugcaggccaaga

SEQ ID NO: 2596395 - RNA, 19 nt, Human
accugcaggccaagagcag

SEQ ID NO: 2596396 - RNA, 21 nt, Human
accugcauccguaguucccug

SEQ ID NO: 2596397 - RNA, 22 nt, Human
accugcauccguaguucccuga

SEQ ID NO: 2596398 - RNA, 17 nt, Human
accugcagguugggcca

SEQ ID NO: 2596399 - RNA, 13 nt, Human
accugcagguugg

SEQ ID NO: 2596400 - RNA, 22 nt, Human
accugcagguugggccauacug

SEQ ID NO: 2596401 - RNA, 19 nt, Human
accugcauccguaguuccc

SEQ ID NO: 2596402 - RNA, 14 nt, Human
accugaggcccuuc

SEQ ID NO: 2596403 - RNA, 13 nt, Human
accugaggaagcg

SEQ ID NO: 2596404 - RNA, 15 nt, Human
accugagcuccccac

SEQ ID NO: 2596405 - RNA, 12 nt, Human
accugagcugcc

SEQ ID NO: 2596406 - RNA, 18 nt, Human
accugagcugccauccag

SEQ ID NO: 2596407 - RNA, 19 nt, Human
accugagcuagaagcugga

SEQ ID NO: 2596408 - RNA, 20 nt, Human
accugagcuagaagcuggag

SEQ ID NO: 2596409 - RNA, 14 nt, Human
accugagcucccca

SEQ ID NO: 2596410 - RNA, 23 nt, Human
accugagaccaguugggagcacu

SEQ ID NO: 2596411 - RNA, 23 nt, Human
accugacucugaaaucugaagac

SEQ ID NO: 2596412 - RNA, 22 nt, Human
accugacucugaaaucugaaga

SEQ ID NO: 2596413 - RNA, 20 nt, Human
accugaccgugggcggggcc

SEQ ID NO: 2596414 - RNA, 19 nt, Human
accugacguagcugcaaag

SEQ ID NO: 2596415 - RNA, 20 nt, Human
accugacuauugaaguugca

SEQ ID NO: 2596416 - RNA, 19 nt, Human
accugacucugaaaucuga

SEQ ID NO: 2596417 - RNA, 18 nt, Human
accugacucugaaaucug

SEQ ID NO: 2596418 - RNA, 17 nt, Human
accugacucugaaaucu

SEQ ID NO: 2596419 - RNA, 16 nt, Human
accugacucugaaauc

SEQ ID NO: 2596420 - RNA, 15 nt, Human
accugacucugaaau

SEQ ID NO: 2596421 - RNA, 14 nt, Human
accugacucugaaa

SEQ ID NO: 2596422 - RNA, 13 nt, Human
accugacucugaa

SEQ ID NO: 2596423 - RNA, 22 nt, Human
accugacucgucugacugugug

SEQ ID NO: 2596424 - RNA, 16 nt, Human
accugaccccugcuca

SEQ ID NO: 2596425 - RNA, 17 nt, Human
accugaccccugcucag

SEQ ID NO: 2596426 - RNA, 18 nt, Human
accugaccgugggcgggg

SEQ ID NO: 2596427 - RNA, 14 nt, Human
accugaccgugggc

SEQ ID NO: 2596428 - RNA, 23 nt, Human
accugaccccugcucaguaaagc

SEQ ID NO: 2596429 - RNA, 21 nt, Human
accugaaaaaaaguuuacaag

SEQ ID NO: 2596430 - RNA, 21 nt, Human
accugaaaacacugugcacau

SEQ ID NO: 2596431 - RNA, 12 nt, Human
accugaaaagua

SEQ ID NO: 2596432 - RNA, 13 nt, Human
accucuccaaggg

SEQ ID NO: 2596433 - RNA, 11 nt, Human
accucuccaag

SEQ ID NO: 2596434 - RNA, 10 nt, Human
accucuccaa

SEQ ID NO: 2596435 - RNA, 18 nt, Human
accucucaucaguguccu

SEQ ID NO: 2596436 - RNA, 22 nt, Human
accucuccaagggcuucugcac

SEQ ID NO: 2596437 - RNA, 20 nt, Human
accucuccaagggcuucugc

SEQ ID NO: 2596438 - RNA, 19 nt, Human
accucuccaucuucagcuu

SEQ ID NO: 2596439 - RNA, 15 nt, Human
accucuccaucuuca

SEQ ID NO: 2596440 - RNA, 22 nt, Human
accucguccucccccugccagu

SEQ ID NO: 2596441 - RNA, 11 nt, Human
accugaaaaca

SEQ ID NO: 2596442 - RNA, 18 nt, Human
accugaaaacacugugca

SEQ ID NO: 2596443 - RNA, 19 nt, Human
accugaaaacacugugcac

SEQ ID NO: 2596444 - RNA, 20 nt, Human
accugaaaacacugugcaca

SEQ ID NO: 2596445 - RNA, 19 nt, Human
accugaaaaaaaguuuaca

SEQ ID NO: 2596446 - RNA, 18 nt, Human
accugaaaaaaaguuuac

SEQ ID NO: 2596447 - RNA, 15 nt, Human
accugaaaaaaaguu

SEQ ID NO: 2596448 - RNA, 22 nt, Human
accucuuuauuuuuugauugaa

SEQ ID NO: 2596449 - RNA, 19 nt, Human
accucuuuauuuuuugauu

SEQ ID NO: 2596450 - RNA, 20 nt, Human
accucuccaucuucagcuuc

SEQ ID NO: 2596451 - RNA, 17 nt, Human
accucuccccuggaacu

SEQ ID NO: 2596452 - RNA, 23 nt, Human
accucuccaucuucagcuucuuc

SEQ ID NO: 2596453 - RNA, 13 nt, Human
accucucccaggg

SEQ ID NO: 2596454 - RNA, 15 nt, Human
ucauugaccugaggc

SEQ ID NO: 2596455 - RNA, 14 nt, Human
ucauugaccugagg

SEQ ID NO: 2596456 - RNA, 12 nt, Human
ucauugaccuga

SEQ ID NO: 2596457 - RNA, 22 nt, Human
ucauugaaaucuuuuugcuuug

SEQ ID NO: 2596458 - RNA, 17 nt, Human
ucauugccuuaacugga

SEQ ID NO: 2596459 - RNA, 23 nt, Human
ucauugccuuaacuggagcccca

SEQ ID NO: 2596460 - RNA, 20 nt, Human
ucauugccuuaacuggagcc

SEQ ID NO: 2596461 - RNA, 15 nt, Human
ucauugcugagccuc

SEQ ID NO: 2596462 - RNA, 16 nt, Human
ucauugcugagccucu

SEQ ID NO: 2596463 - RNA, 18 nt, Human
ucauugcugaaaauggua

SEQ ID NO: 2596464 - RNA, 17 nt, Human
ucauugcugaaaauggu

SEQ ID NO: 2596465 - RNA, 14 nt, Human
ucauugcugaaaau

SEQ ID NO: 2596466 - RNA, 19 nt, Human
ucauugauaugaaaaauau

SEQ ID NO: 2596467 - RNA, 17 nt, Human
ucauugaagucagaugu

SEQ ID NO: 2596468 - RNA, 14 nt, Human
ucauugaaguauuu

SEQ ID NO: 2596469 - RNA, 18 nt, Human
ucauugcccccagggcac

SEQ ID NO: 2596470 - RNA, 18 nt, Human
ucauugauugucagcuac

SEQ ID NO: 2596471 - RNA, 16 nt, Human
accuccugucucuggc

SEQ ID NO: 2596472 - RNA, 15 nt, Human
accuccugucucugg

SEQ ID NO: 2596473 - RNA, 17 nt, Human
accuccugucucuggcc

SEQ ID NO: 2596474 - RNA, 23 nt, Human
ucauugcugaaaaugguauuuuc

SEQ ID NO: 2596475 - RNA, 23 nt, Human
ucauugcugagccucugcucccc

SEQ ID NO: 2596476 - RNA, 17 nt, Human
ucauugcugagccucug

SEQ ID NO: 2596477 - RNA, 22 nt, Human
ucauugcugagccucugcuccc

SEQ ID NO: 2596478 - RNA, 13 nt, Human
accuccugggcua

SEQ ID NO: 2596479 - RNA, 19 nt, Human
accucggugccuuccucuu

SEQ ID NO: 2596480 - RNA, 12 nt, Human
accuccuucucu

SEQ ID NO: 2596481 - RNA, 21 nt, Human
accuccuuguaacaucaggga

SEQ ID NO: 2596482 - RNA, 23 nt, Human
accuccuucucugucucaugugu

SEQ ID NO: 2596483 - RNA, 14 nt, Human
accucguccucccc

SEQ ID NO: 2596484 - RNA, 15 nt, Human
accucguccuccccc

SEQ ID NO: 2596485 - RNA, 18 nt, Human
accucguccucccccugc

SEQ ID NO: 2596486 - RNA, 20 nt, Human
accucguccucccccugcca

SEQ ID NO: 2596487 - RNA, 21 nt, Human
accucguccucccccugccag

SEQ ID NO: 2596488 - RNA, 18 nt, Human
accucuaaaacaguccuu

SEQ ID NO: 2596489 - RNA, 17 nt, Human
ucauucuucucuagcug

SEQ ID NO: 2596490 - RNA, 13 nt, Human
ucauucuucucua

SEQ ID NO: 2596491 - RNA, 18 nt, Human
ucauucuuauuucaugaa

SEQ ID NO: 2596492 - RNA, 16 nt, Human
ucauucuuagcucuua

SEQ ID NO: 2596493 - RNA, 14 nt, Human
ucauucuuauuuca

SEQ ID NO: 2596494 - RNA, 18 nt, Human
ucauucucugucucaucc

SEQ ID NO: 2596495 - RNA, 19 nt, Human
ucauucucugucucaucca

SEQ ID NO: 2596496 - RNA, 18 nt, Human
ucauucugaaggagcccc

SEQ ID NO: 2596497 - RNA, 20 nt, Human
ucauuacuuuaccaccccca

SEQ ID NO: 2596498 - RNA, 14 nt, Human
ucauucucugucuc

SEQ ID NO: 2596499 - RNA, 15 nt, Human
ucauucucugucuca

SEQ ID NO: 2596500 - RNA, 16 nt, Human
ucauucucugucucau

SEQ ID NO: 2596501 - RNA, 21 nt, Human
ucauuaaugacacuugucccc

SEQ ID NO: 2596502 - RNA, 18 nt, Human
ucauuacuuuaccacccc

SEQ ID NO: 2596503 - RNA, 13 nt, Human
ucauugaaaucuu

SEQ ID NO: 2596504 - RNA, 12 nt, Human
ucauugaaaucu

SEQ ID NO: 2596505 - RNA, 12 nt, Human
ucauucuucugu

SEQ ID NO: 2596506 - RNA, 18 nt, Human
ucauucuugaaagcugug

SEQ ID NO: 2596507 - RNA, 17 nt, Human
ucauucuugaaagcugu

SEQ ID NO: 2596508 - RNA, 13 nt, Human
ucaugauccaacu

SEQ ID NO: 2596509 - RNA, 16 nt, Human
ucaugauccaacuaau

SEQ ID NO: 2596510 - RNA, 21 nt, Human
ucaugaauuaguuuuauaugc

SEQ ID NO: 2596511 - RNA, 16 nt, Human
ucaugaucuugugaca

SEQ ID NO: 2596512 - RNA, 17 nt, Human
ucaugaucuugugacau

SEQ ID NO: 2596513 - RNA, 18 nt, Human
ucaugaucuugugacaua

SEQ ID NO: 2596514 - RNA, 13 nt, Human
ucaugaucucccu

SEQ ID NO: 2596515 - RNA, 14 nt, Human
ucaugaucucccug

SEQ ID NO: 2596516 - RNA, 15 nt, Human
ucaugaucucccugc

SEQ ID NO: 2596517 - RNA, 16 nt, Human
ucaugaucucccugcc

SEQ ID NO: 2596518 - RNA, 17 nt, Human
ucaugaucucccugccg

SEQ ID NO: 2596519 - RNA, 18 nt, Human
ucaugaucucccugccgc

SEQ ID NO: 2596520 - RNA, 19 nt, Human
ucaugaucucccugccgcc

SEQ ID NO: 2596521 - RNA, 22 nt, Human
ucaugaucucccugccgccuca

SEQ ID NO: 2596522 - RNA, 13 nt, Human
ucaugauuagcaa

SEQ ID NO: 2596523 - RNA, 14 nt, Human
ucauuaaugacacu

SEQ ID NO: 2596524 - RNA, 13 nt, Human
ucauuaaugacac

SEQ ID NO: 2596525 - RNA, 23 nt, Human
ucauuaagguauuauuuuuucca

SEQ ID NO: 2596526 - RNA, 14 nt, Human
ucaugauuagcaag

SEQ ID NO: 2596527 - RNA, 15 nt, Human
ucauuaaugacacuu

SEQ ID NO: 2596528 - RNA, 19 nt, Human
ucauuaaugacacuugucc

SEQ ID NO: 2596529 - RNA, 22 nt, Human
ucauuaaugacacuugucccca

SEQ ID NO: 2596530 - RNA, 13 nt, Human
ucauuaauucuau

SEQ ID NO: 2596531 - RNA, 14 nt, Human
ucauuaauucuaua

SEQ ID NO: 2596532 - RNA, 20 nt, Human
ucauuaccuuuuuugauaaa

SEQ ID NO: 2596533 - RNA, 13 nt, Human
ucauuaccacagg

SEQ ID NO: 2596534 - RNA, 21 nt, Human
acgguggucacuggaacucag

SEQ ID NO: 2596535 - RNA, 21 nt, Human
acggugggccuugcuggggac

SEQ ID NO: 2596536 - RNA, 23 nt, Human
acgggcuuguugcuguugauguu

SEQ ID NO: 2596537 - RNA, 16 nt, Human
acgguucaccagccuc

SEQ ID NO: 2596538 - RNA, 19 nt, Human
acgguucaccagccucucu

SEQ ID NO: 2596539 - RNA, 18 nt, Human
acgggcaugggcacuccc

SEQ ID NO: 2596540 - RNA, 16 nt, Human
acgggcaguagcugug

SEQ ID NO: 2596541 - RNA, 14 nt, Human
acgggcugcccugc

SEQ ID NO: 2596542 - RNA, 20 nt, Human
acggugggccuugcugggga

SEQ ID NO: 2596543 - RNA, 15 nt, Human
acgggacugacgcaa

SEQ ID NO: 2596544 - RNA, 18 nt, Human
ucccacccccacccccag

SEQ ID NO: 2596545 - RNA, 16 nt, Human
acgggacugacgcaac

SEQ ID NO: 2596546 - RNA, 20 nt, Human
acgggaggguaaggcugugg

SEQ ID NO: 2596547 - RNA, 22 nt, Human
ucccaccccauuuucugugggc

SEQ ID NO: 2596548 - RNA, 20 nt, Human
ucccaccccauuuucugugg

SEQ ID NO: 2596549 - RNA, 16 nt, Human
ucccaccccacccccu

SEQ ID NO: 2596550 - RNA, 18 nt, Human
ucccaccccacccccuuc

SEQ ID NO: 2596551 - RNA, 20 nt, Human
ucccaccccacccccuucag

SEQ ID NO: 2596552 - RNA, 22 nt, Human
ucccaccccacccccuucagug

SEQ ID NO: 2596553 - RNA, 13 nt, Human
ucccacagcgcug

SEQ ID NO: 2596554 - RNA, 12 nt, Human
ucccaccccacc

SEQ ID NO: 2596555 - RNA, 13 nt, Human
ucccaccccaccc

SEQ ID NO: 2596556 - RNA, 16 nt, Human
ucccacaaaggagagc

SEQ ID NO: 2596557 - RNA, 22 nt, Human
ucccaauagcaacguagcuucu

SEQ ID NO: 2596558 - RNA, 23 nt, Human
ucccaaguuuuaggacaaacagc

SEQ ID NO: 2596559 - RNA, 17 nt, Human
ucccaauaggcagacug

SEQ ID NO: 2596560 - RNA, 15 nt, Human
ucccaagucuacaga

SEQ ID NO: 2596561 - RNA, 14 nt, Human
ucccaagucuacag

SEQ ID NO: 2596562 - RNA, 18 nt, Human
ucccaaguuuuaggacaa

SEQ ID NO: 2596563 - RNA, 18 nt, Human
ucccaaguggugccuaaa

SEQ ID NO: 2596564 - RNA, 16 nt, Human
ucccaaguggugccua

SEQ ID NO: 2596565 - RNA, 12 nt, Human
ucccaaguggug

SEQ ID NO: 2596566 - RNA, 17 nt, Human
ucccaagugccagucuu

SEQ ID NO: 2596567 - RNA, 20 nt, Human
ucccaccccacacacgccag

SEQ ID NO: 2596568 - RNA, 15 nt, Human
ucccaccccacacac

SEQ ID NO: 2596569 - RNA, 14 nt, Human
ucccacaaguggug

SEQ ID NO: 2596570 - RNA, 23 nt, Human
ucccacaauauaaaacuguacuu

SEQ ID NO: 2596571 - RNA, 16 nt, Human
ucccacaagugguggu

SEQ ID NO: 2596572 - RNA, 23 nt, Human
ucccacaaucuuaaggggcagcu

SEQ ID NO: 2596573 - RNA, 22 nt, Human
ucccacaaucuuaaggggcagc

SEQ ID NO: 2596574 - RNA, 13 nt, Human
ucccacacccugg

SEQ ID NO: 2596575 - RNA, 16 nt, Human
ucccacaccuccacag

SEQ ID NO: 2596576 - RNA, 15 nt, Human
ucccacaccuccaca

SEQ ID NO: 2596577 - RNA, 18 nt, Human
ucccacaccguguaaacc

SEQ ID NO: 2596578 - RNA, 18 nt, Human
ucccacaccuccacaguu

SEQ ID NO: 2596579 - RNA, 17 nt, Human
ucccacaccuccacagu

SEQ ID NO: 2596580 - RNA, 18 nt, Human
ucccacacuggugacugc

SEQ ID NO: 2596581 - RNA, 22 nt, Human
ucccacacugcuaggugggcca

SEQ ID NO: 2596582 - RNA, 19 nt, Human
acgugggcaaacaggcagu

SEQ ID NO: 2596583 - RNA, 15 nt, Human
acgugggcggcagag

SEQ ID NO: 2596584 - RNA, 20 nt, Human
acgugggcggcagagaggac

SEQ ID NO: 2596585 - RNA, 20 nt, Human
acguggggcagcacagagag

SEQ ID NO: 2596586 - RNA, 19 nt, Human
acguggggcagcacagaga

SEQ ID NO: 2596587 - RNA, 15 nt, Human
acguggggcagcaca

SEQ ID NO: 2596588 - RNA, 14 nt, Human
acguggggcagcac

SEQ ID NO: 2596589 - RNA, 22 nt, Human
acgugggucuucagggggccag

SEQ ID NO: 2596590 - RNA, 14 nt, Human
acguguagcuauau

SEQ ID NO: 2596591 - RNA, 18 nt, Human
acguguacuacaauuuaa

SEQ ID NO: 2596592 - RNA, 15 nt, Human
acgugugauuuuucu

SEQ ID NO: 2596593 - RNA, 12 nt, Human
acgugugauuuu

SEQ ID NO: 2596594 - RNA, 11 nt, Human
acgugugugac

SEQ ID NO: 2596595 - RNA, 16 nt, Human
acgugugugacucaga

SEQ ID NO: 2596596 - RNA, 16 nt, Human
acguucaccccuccac

SEQ ID NO: 2596597 - RNA, 14 nt, Human
acguucaccccucc

SEQ ID NO: 2596598 - RNA, 21 nt, Human
acguuccuauugucauuaaag

SEQ ID NO: 2596599 - RNA, 16 nt, Human
acguuccuuacugcag

SEQ ID NO: 2596600 - RNA, 18 nt, Human
acguuccuuacugcagaa

SEQ ID NO: 2596601 - RNA, 19 nt, Human
acguuccuuacugcagaau

SEQ ID NO: 2596602 - RNA, 20 nt, Human
acguuccuuacugcagaaua

SEQ ID NO: 2596603 - RNA, 14 nt, Human
acguucggggcaug

SEQ ID NO: 2596604 - RNA, 14 nt, Human
acguuccagccggc

SEQ ID NO: 2596605 - RNA, 12 nt, Human
acguuccagccg

SEQ ID NO: 2596606 - RNA, 11 nt, Human
acguuccagcc

SEQ ID NO: 2596607 - RNA, 20 nt, Human
acguuccuauugucauuaaa

SEQ ID NO: 2596608 - RNA, 18 nt, Human
acguuccuauugucauua

SEQ ID NO: 2596609 - RNA, 16 nt, Human
acguuccuauugucau

SEQ ID NO: 2596610 - RNA, 22 nt, Human
acguauaaaagccuguuuaaga

SEQ ID NO: 2596611 - RNA, 16 nt, Human
acguacuuagcagcua

SEQ ID NO: 2596612 - RNA, 17 nt, Human
acgguuugaagccugga

SEQ ID NO: 2596613 - RNA, 20 nt, Human
acguacguaucagcggcccc

SEQ ID NO: 2596614 - RNA, 15 nt, Human
acgguuuuacugcag

SEQ ID NO: 2596615 - RNA, 17 nt, Human
acgguuuuacugcagcu

SEQ ID NO: 2596616 - RNA, 23 nt, Human
acguggcugcuucaaggauccug

SEQ ID NO: 2596617 - RNA, 16 nt, Human
acgugggcaaacaggc

SEQ ID NO: 2596618 - RNA, 16 nt, Human
acgugggagacaagaa

SEQ ID NO: 2596619 - RNA, 11 nt, Human
acgugggagac

SEQ ID NO: 2596620 - RNA, 18 nt, Human
acguggcuuuuagacaga

SEQ ID NO: 2596621 - RNA, 14 nt, Human
acguaugcauguga

SEQ ID NO: 2596622 - RNA, 13 nt, Human
acguaugcaugug

SEQ ID NO: 2596623 - RNA, 24 nt, Human
acguagcuucuaccaugaacagaa

SEQ ID NO: 2596624 - RNA, 16 nt, Human
acguagcugcaaagga

SEQ ID NO: 2596625 - RNA, 20 nt, Human
acguagcugcaaaggacaga

SEQ ID NO: 2596626 - RNA, 17 nt, Human
acguagcugaggccgga

SEQ ID NO: 2596627 - RNA, 18 nt, Human
acguacuuagcagcuauc

SEQ ID NO: 2596628 - RNA, 16 nt, Human
acguauugguccagcu

SEQ ID NO: 2596629 - RNA, 20 nt, Human
acguauguuuuuguguauuu

SEQ ID NO: 2596630 - RNA, 16 nt, Human
ucccaaagcagugcau

SEQ ID NO: 2596631 - RNA, 15 nt, Human
ucccaaacgccuccc

SEQ ID NO: 2596632 - RNA, 21 nt, Human
ucccaaacgccuccccugccc

SEQ ID NO: 2596633 - RNA, 18 nt, Human
ucccaaacccuucagugc

SEQ ID NO: 2596634 - RNA, 22 nt, Human
ucccaaaauuguuuugagcuuu

SEQ ID NO: 2596635 - RNA, 15 nt, Human
ucccaaaauuguuuu

SEQ ID NO: 2596636 - RNA, 14 nt, Human
ucccaaaauuguuu

SEQ ID NO: 2596637 - RNA, 14 nt, Human
uccauuuaguucuu

SEQ ID NO: 2596638 - RNA, 20 nt, Human
uccauuuaguucuuuguuau

SEQ ID NO: 2596639 - RNA, 20 nt, Human
uccauuucgccccucauuua

SEQ ID NO: 2596640 - RNA, 21 nt, Human
uccauuucaucuauuucugag

SEQ ID NO: 2596641 - RNA, 23 nt, Human
uccauuucaucuauuucugagaa

SEQ ID NO: 2596642 - RNA, 20 nt, Human
ucccaaaagcccauucauuc

SEQ ID NO: 2596643 - RNA, 23 nt, Human
uccauuuuuucaagguaauuucu

SEQ ID NO: 2596644 - RNA, 17 nt, Human
uccauuucucauguuuu

SEQ ID NO: 2596645 - RNA, 14 nt, Human
uccauuucucaugu

SEQ ID NO: 2596646 - RNA, 14 nt, Human
uccauuugaaagaa

SEQ ID NO: 2596647 - RNA, 18 nt, Human
ucccaaagcagugcaugc

SEQ ID NO: 2596648 - RNA, 17 nt, Human
ucccaaagcagugcaug

SEQ ID NO: 2596649 - RNA, 22 nt, Human
ucccaaagccuugugucuacag

SEQ ID NO: 2596650 - RNA, 19 nt, Human
ucccaaagccagaaccaga

SEQ ID NO: 2596651 - RNA, 22 nt, Human
ucccaaaggacuccacccaucc

SEQ ID NO: 2596652 - RNA, 16 nt, Human
ucccaaaggacuccac

SEQ ID NO: 2596653 - RNA, 21 nt, Human
ucccaaagcagugcaugcugu

SEQ ID NO: 2596654 - RNA, 20 nt, Human
ucccaaguagcugggauuac

SEQ ID NO: 2596655 - RNA, 21 nt, Human
ucccaaguagcugggauuaca

SEQ ID NO: 2596656 - RNA, 14 nt, Human
ucccaaagugcugg

SEQ ID NO: 2596657 - RNA, 13 nt, Human
ucccaaagugcug

SEQ ID NO: 2596658 - RNA, 20 nt, Human
uccauccugaggcuccacuu

SEQ ID NO: 2596659 - RNA, 21 nt, Human
uccauccugaggcuccacuug

SEQ ID NO: 2596660 - RNA, 23 nt, Human
acgccagauucuuuccugaggcu

SEQ ID NO: 2596661 - RNA, 22 nt, Human
acgccagauucuuuccugaggc

SEQ ID NO: 2596662 - RNA, 16 nt, Human
uccaucuaaacugccc

SEQ ID NO: 2596663 - RNA, 20 nt, Human
uccauccuugagucaaaaaa

SEQ ID NO: 2596664 - RNA, 17 nt, Human
uccauccuuucugccuc

SEQ ID NO: 2596665 - RNA, 19 nt, Human
uccauccugaggcuccacu

SEQ ID NO: 2596666 - RNA, 20 nt, Human
uccaucuccaagaaugcuga

SEQ ID NO: 2596667 - RNA, 18 nt, Human
uccaucuccaagaaugcu

SEQ ID NO: 2596668 - RNA, 16 nt, Human
uccaucuccaagaaug

SEQ ID NO: 2596669 - RNA, 21 nt, Human
uccaucuaaauaccugcccug

SEQ ID NO: 2596670 - RNA, 18 nt, Human
uccaucuaaacugccccc

SEQ ID NO: 2596671 - RNA, 21 nt, Human
uccaucuccaagaaugcugaa

SEQ ID NO: 2596672 - RNA, 14 nt, Human
uccaucucgccacc

SEQ ID NO: 2596673 - RNA, 23 nt, Human
uccaucucgccaccccuccuucc

SEQ ID NO: 2596674 - RNA, 16 nt, Human
uccaucucucuggccc

SEQ ID NO: 2596675 - RNA, 16 nt, Human
uccaucucgccacccc

SEQ ID NO: 2596676 - RNA, 18 nt, Human
uccauugacauguacaga

SEQ ID NO: 2596677 - RNA, 17 nt, Human
uccauugacauguacag

SEQ ID NO: 2596678 - RNA, 16 nt, Human
uccauugacauguaca

SEQ ID NO: 2596679 - RNA, 15 nt, Human
uccauugacauguac

SEQ ID NO: 2596680 - RNA, 14 nt, Human
uccauugacaugua

SEQ ID NO: 2596681 - RNA, 19 nt, Human
uccauucuuucugauaacu

SEQ ID NO: 2596682 - RNA, 13 nt, Human
uccauucuggaag

SEQ ID NO: 2596683 - RNA, 14 nt, Human
uccauucuggaagu

SEQ ID NO: 2596684 - RNA, 12 nt, Human
uccauucuuucu

SEQ ID NO: 2596685 - RNA, 14 nt, Human
uccauucuuucuga

SEQ ID NO: 2596686 - RNA, 18 nt, Human
uccauucuuucugauaac

SEQ ID NO: 2596687 - RNA, 16 nt, Human
uccauucucccaggua

SEQ ID NO: 2596688 - RNA, 12 nt, Human
uccauucuggaa

SEQ ID NO: 2596689 - RNA, 15 nt, Human
uccauucucccaggu

SEQ ID NO: 2596690 - RNA, 14 nt, Human
uccauucucccagg

SEQ ID NO: 2596691 - RNA, 21 nt, Human
uccaugaagauguagaggaga

SEQ ID NO: 2596692 - RNA, 21 nt, Human
uccaugaagaccacauccaca

SEQ ID NO: 2596693 - RNA, 20 nt, Human
uccaugaagaccacauccac

SEQ ID NO: 2596694 - RNA, 12 nt, Human
uccauuccucag

SEQ ID NO: 2596695 - RNA, 23 nt, Human
uccaugaagaccacauccacaca

SEQ ID NO: 2596696 - RNA, 13 nt, Human
uccauuccucagg

SEQ ID NO: 2596697 - RNA, 14 nt, Human
uccauuccucaggg

SEQ ID NO: 2596698 - RNA, 15 nt, Human
uccauuccucaggga

SEQ ID NO: 2596699 - RNA, 13 nt, Human
uccaugaagaugu

SEQ ID NO: 2596700 - RNA, 15 nt, Human
uccaugaaaaugcaa

SEQ ID NO: 2596701 - RNA, 17 nt, Human
uccaucucucuggcccu

SEQ ID NO: 2596702 - RNA, 16 nt, Human
uccaugaaaaugcaac

SEQ ID NO: 2596703 - RNA, 23 nt, Human
acuacccacguucucacacccac

SEQ ID NO: 2596704 - RNA, 21 nt, Human
acuacccacguucucacaccc

SEQ ID NO: 2596705 - RNA, 18 nt, Human
acuacccuauucucucuu

SEQ ID NO: 2596706 - RNA, 15 nt, Human
acuaccuccucaggg

SEQ ID NO: 2596707 - RNA, 14 nt, Human
acuaccuccucagg

SEQ ID NO: 2596708 - RNA, 15 nt, Human
acuacauucuguuaa

SEQ ID NO: 2596709 - RNA, 21 nt, Human
acuaccaagaggcccugucug

SEQ ID NO: 2596710 - RNA, 21 nt, Human
ucccccaacccccaccccaca

SEQ ID NO: 2596711 - RNA, 19 nt, Human
uccccauuucccaucugca

SEQ ID NO: 2596712 - RNA, 18 nt, Human
uccccauuucccaucugc

SEQ ID NO: 2596713 - RNA, 17 nt, Human
uccccauuucccaucug

SEQ ID NO: 2596714 - RNA, 16 nt, Human
uccccauuucccaucu

SEQ ID NO: 2596715 - RNA, 15 nt, Human
uccccauuucccauc

SEQ ID NO: 2596716 - RNA, 18 nt, Human
uccccauugccuccuccu

SEQ ID NO: 2596717 - RNA, 19 nt, Human
uccccauuuagguuucuga

SEQ ID NO: 2596718 - RNA, 17 nt, Human
uccccauucuuccuagu

SEQ ID NO: 2596719 - RNA, 22 nt, Human
uccccauucuuccuaguuuucu

SEQ ID NO: 2596720 - RNA, 14 nt, Human
uccccauucuuccu

SEQ ID NO: 2596721 - RNA, 24 nt, Human
uccccauuagcuuucaauuccgua

SEQ ID NO: 2596722 - RNA, 15 nt, Human
ucccccaaccccagc

SEQ ID NO: 2596723 - RNA, 12 nt, Human
ucccccaacaga

SEQ ID NO: 2596724 - RNA, 20 nt, Human
uccccauuucccaucugcac

SEQ ID NO: 2596725 - RNA, 14 nt, Human
ucccccaaccccca

SEQ ID NO: 2596726 - RNA, 15 nt, Human
ucccccaacccccac

SEQ ID NO: 2596727 - RNA, 16 nt, Human
ucccccaacccccacc

SEQ ID NO: 2596728 - RNA, 17 nt, Human
ucccccaacccccaccc

SEQ ID NO: 2596729 - RNA, 19 nt, Human
ucccccaacccccacccca

SEQ ID NO: 2596730 - RNA, 20 nt, Human
ucccccaacccccaccccac

SEQ ID NO: 2596731 - RNA, 21 nt, Human
uccccaccgcagacaggacca

SEQ ID NO: 2596732 - RNA, 18 nt, Human
uccccaccgcagacagga

SEQ ID NO: 2596733 - RNA, 17 nt, Human
uccccaccgcagacagg

SEQ ID NO: 2596734 - RNA, 22 nt, Human
uccccaccccugcccccagccc

SEQ ID NO: 2596735 - RNA, 18 nt, Human
uccccaccccugccccca

SEQ ID NO: 2596736 - RNA, 16 nt, Human
uccccaccccugcccc

SEQ ID NO: 2596737 - RNA, 15 nt, Human
uccccaccccugccc

SEQ ID NO: 2596738 - RNA, 16 nt, Human
uccccaugcagacaug

SEQ ID NO: 2596739 - RNA, 14 nt, Human
uccccaucuucuaa

SEQ ID NO: 2596740 - RNA, 13 nt, Human
uccccauggagcc

SEQ ID NO: 2596741 - RNA, 19 nt, Human
uccccaucuucuaaaccca

SEQ ID NO: 2596742 - RNA, 22 nt, Human
uccccaccgcagacaggaccag

SEQ ID NO: 2596743 - RNA, 17 nt, Human
uccccaugucucgacuc

SEQ ID NO: 2596744 - RNA, 19 nt, Human
uccccauuagagucagccu

SEQ ID NO: 2596745 - RNA, 21 nt, Human
uccccauuagagucagccuuc

SEQ ID NO: 2596746 - RNA, 15 nt, Human
uccccauggagccag

SEQ ID NO: 2596747 - RNA, 16 nt, Human
uccccauggagccagc

SEQ ID NO: 2596748 - RNA, 11 nt, Human
uccccauggga

SEQ ID NO: 2596749 - RNA, 23 nt, Human
uccccaugggaagacgaggcccu

SEQ ID NO: 2596750 - RNA, 14 nt, Human
ucccagucauuuaa

SEQ ID NO: 2596751 - RNA, 22 nt, Human
ucccagucauuuaauaaaugug

SEQ ID NO: 2596752 - RNA, 17 nt, Human
ucccaguaccuccuguc

SEQ ID NO: 2596753 - RNA, 23 nt, Human
ucccaguaccuccugucucuggc

SEQ ID NO: 2596754 - RNA, 18 nt, Human
ucccagcugccauguuuc

SEQ ID NO: 2596755 - RNA, 24 nt, Human
ucccagcugacaguccucuccacc

SEQ ID NO: 2596756 - RNA, 15 nt, Human
ucccaucacccgcua

SEQ ID NO: 2596757 - RNA, 16 nt, Human
ucccauaugccugggc

SEQ ID NO: 2596758 - RNA, 14 nt, Human
ucccaucaaaacuc

SEQ ID NO: 2596759 - RNA, 22 nt, Human
ucccauaugccugggcagaagg

SEQ ID NO: 2596760 - RNA, 18 nt, Human
ucccagucuacccagaga

SEQ ID NO: 2596761 - RNA, 17 nt, Human
ucccagucuacccagag

SEQ ID NO: 2596762 - RNA, 15 nt, Human
ucccagucuacccag

SEQ ID NO: 2596763 - RNA, 22 nt, Human
ucccagucaccuuguggcaagc

SEQ ID NO: 2596764 - RNA, 20 nt, Human
ucccaguccaaauguccucc

SEQ ID NO: 2596765 - RNA, 18 nt, Human
ucccauccagugucucac

SEQ ID NO: 2596766 - RNA, 15 nt, Human
ucccauccaggcagu

SEQ ID NO: 2596767 - RNA, 14 nt, Human
ucccauccagggcc

SEQ ID NO: 2596768 - RNA, 14 nt, Human
ucccauccaggcag

SEQ ID NO: 2596769 - RNA, 13 nt, Human
ucccauccaggca

SEQ ID NO: 2596770 - RNA, 13 nt, Human
ucccauccagggc

SEQ ID NO: 2596771 - RNA, 22 nt, Human
ucccaucacuggagcaccaggc

SEQ ID NO: 2596772 - RNA, 12 nt, Human
ucccauccaggc

SEQ ID NO: 2596773 - RNA, 14 nt, Human
ucccaucacuggag

SEQ ID NO: 2596774 - RNA, 15 nt, Human
ucccaucccccugcc

SEQ ID NO: 2596775 - RNA, 14 nt, Human
ucccaucccccugc

SEQ ID NO: 2596776 - RNA, 13 nt, Human
ucccaucccccug

SEQ ID NO: 2596777 - RNA, 22 nt, Human
ucccaucccagcugaaauacug

SEQ ID NO: 2596778 - RNA, 18 nt, Human
ucccaucccacugcuccc

SEQ ID NO: 2596779 - RNA, 16 nt, Human
ucccaucccagcugaa

SEQ ID NO: 2596780 - RNA, 19 nt, Human
ucccaucccccugcccucg

SEQ ID NO: 2596781 - RNA, 18 nt, Human
ucccaucccccugcccuc

SEQ ID NO: 2596782 - RNA, 17 nt, Human
ucccaucccccugcccu

SEQ ID NO: 2596783 - RNA, 16 nt, Human
ucccaucccccugccc

SEQ ID NO: 2596784 - RNA, 15 nt, Human
ucccauccccuggac

SEQ ID NO: 2596785 - RNA, 13 nt, Human
ucccauccccugg

SEQ ID NO: 2596786 - RNA, 14 nt, Human
uccccaccccugcc

SEQ ID NO: 2596787 - RNA, 13 nt, Human
uccccaccccugc

SEQ ID NO: 2596788 - RNA, 18 nt, Human
uccccacaggagcccugc

SEQ ID NO: 2596789 - RNA, 15 nt, Human
uccccaccaccccag

SEQ ID NO: 2596790 - RNA, 14 nt, Human
ucccauccuacccu

SEQ ID NO: 2596791 - RNA, 20 nt, Human
ucccauccuacccucgggcc

SEQ ID NO: 2596792 - RNA, 18 nt, Human
ucccauccuacccucggg

SEQ ID NO: 2596793 - RNA, 21 nt, Human
ucccagcagcccuaaggaucu

SEQ ID NO: 2596794 - RNA, 18 nt, Human
ucccagcagcccuaagga

SEQ ID NO: 2596795 - RNA, 13 nt, Human
ucccagcagcccu

SEQ ID NO: 2596796 - RNA, 20 nt, Human
ucccagcaugcugagauuac

SEQ ID NO: 2596797 - RNA, 18 nt, Human
ucccagcagggccacucc

SEQ ID NO: 2596798 - RNA, 12 nt, Human
ucccagccaccc

SEQ ID NO: 2596799 - RNA, 13 nt, Human
ucccagccacccc

SEQ ID NO: 2596800 - RNA, 14 nt, Human
ucccagccaccccg

SEQ ID NO: 2596801 - RNA, 20 nt, Human
ucccagccaccccgggcucu

SEQ ID NO: 2596802 - RNA, 20 nt, Human
ucccagccacucgggaggcu

SEQ ID NO: 2596803 - RNA, 16 nt, Human
ucccagccacucggga

SEQ ID NO: 2596804 - RNA, 24 nt, Human
ucccagccaccccgggcucucugc

SEQ ID NO: 2596805 - RNA, 17 nt, Human
ucccagcugugcucugg

SEQ ID NO: 2596806 - RNA, 22 nt, Human
ucccagcugacaguccucucca

SEQ ID NO: 2596807 - RNA, 20 nt, Human
ucccagcugacaguccucuc

SEQ ID NO: 2596808 - RNA, 18 nt, Human
ucccagcugacaguccuc

SEQ ID NO: 2596809 - RNA, 17 nt, Human
ucccagcugacaguccu

SEQ ID NO: 2596810 - RNA, 22 nt, Human
ucccagcucucccucuggcccu

SEQ ID NO: 2596811 - RNA, 23 nt, Human
ucccagcucucccucuggcccug

SEQ ID NO: 2596812 - RNA, 16 nt, Human
ucccagcugacagucc

SEQ ID NO: 2596813 - RNA, 17 nt, Human
ucccagcugaaauacug

SEQ ID NO: 2596814 - RNA, 22 nt, Human
ucccagccacucgggaggcuga

SEQ ID NO: 2596815 - RNA, 12 nt, Human
ucccagccccaa

SEQ ID NO: 2596816 - RNA, 15 nt, Human
ucccagcccaaagcu

SEQ ID NO: 2596817 - RNA, 14 nt, Human
ucccagcucucccu

SEQ ID NO: 2596818 - RNA, 16 nt, Human
ucccagcucucccucu

SEQ ID NO: 2596819 - RNA, 18 nt, Human
ucccagcucucccucugg

SEQ ID NO: 2596820 - RNA, 19 nt, Human
ucccagcucucccucuggc

SEQ ID NO: 2596821 - RNA, 21 nt, Human
ucccagcucucccucuggccc

SEQ ID NO: 2596822 - RNA, 15 nt, Human
acuacaguuuguuag

SEQ ID NO: 2596823 - RNA, 11 nt, Human
acuacauucug

SEQ ID NO: 2596824 - RNA, 12 nt, Human
acuacauucugu

SEQ ID NO: 2596825 - RNA, 13 nt, Human
acuacauucuguu

SEQ ID NO: 2596826 - RNA, 23 nt, Human
ucccagauuggcucacacugaga

SEQ ID NO: 2596827 - RNA, 22 nt, Human
ucccagauuggcucacacugag

SEQ ID NO: 2596828 - RNA, 14 nt, Human
acuacauucuguua

SEQ ID NO: 2596829 - RNA, 19 nt, Human
ucccagcacuuugggaggc

SEQ ID NO: 2596830 - RNA, 21 nt, Human
ucccagcacuuugggaggcca

SEQ ID NO: 2596831 - RNA, 22 nt, Human
ucccagcacuuugggaggccua

SEQ ID NO: 2596832 - RNA, 23 nt, Human
ucccagcacuuugggaggccaag

SEQ ID NO: 2596833 - RNA, 21 nt, Human
ucccagcacuuugggaggccu

SEQ ID NO: 2596834 - RNA, 18 nt, Human
ucccagcacuuugggagg

SEQ ID NO: 2596835 - RNA, 16 nt, Human
ucccagcacuuuggga

SEQ ID NO: 2596836 - RNA, 13 nt, Human
ucccagcacuuug

SEQ ID NO: 2596837 - RNA, 23 nt, Human
ucccagcacaugaaaccuuauuu

SEQ ID NO: 2596838 - RNA, 23 nt, Human
acuacaaagcuucuaucccagga

SEQ ID NO: 2596839 - RNA, 22 nt, Human
acuacaaacaaaauuucuauua

SEQ ID NO: 2596840 - RNA, 11 nt, Human
acuacaaauca

SEQ ID NO: 2596841 - RNA, 13 nt, Human
acuacaaaucaag

SEQ ID NO: 2596842 - RNA, 19 nt, Human
acuacaaaucaaguauuug

SEQ ID NO: 2596843 - RNA, 20 nt, Human
acuacaaacaaaauuucuau

SEQ ID NO: 2596844 - RNA, 21 nt, Human
acuacaaacaaaauuucuauu

SEQ ID NO: 2596845 - RNA, 12 nt, Human
acuaaccacgcu

SEQ ID NO: 2596846 - RNA, 17 nt, Human
acuaacauauaauguug

SEQ ID NO: 2596847 - RNA, 15 nt, Human
acuaacauauaaugu

SEQ ID NO: 2596848 - RNA, 17 nt, Human
acuaacaggauauuuaa

SEQ ID NO: 2596849 - RNA, 17 nt, Human
acuaacagauaagcaag

SEQ ID NO: 2596850 - RNA, 15 nt, Human
acguugcugugggaa

SEQ ID NO: 2596851 - RNA, 14 nt, Human
acguugcuguggga

SEQ ID NO: 2596852 - RNA, 12 nt, Human
acguugcugugg

SEQ ID NO: 2596853 - RNA, 11 nt, Human
acguugcugug

SEQ ID NO: 2596854 - RNA, 17 nt, Human
acguucucacacccacc

SEQ ID NO: 2596855 - RNA, 13 nt, Human
acguugcucccca

SEQ ID NO: 2596856 - RNA, 16 nt, Human
acguugagccccugga

SEQ ID NO: 2596857 - RNA, 15 nt, Human
acguucucacaccca

SEQ ID NO: 2596858 - RNA, 21 nt, Human
acguuccuuacugcagaauag

SEQ ID NO: 2596859 - RNA, 13 nt, Human
acuacaguuuguu

SEQ ID NO: 2596860 - RNA, 14 nt, Human
acuacaguuuguua

SEQ ID NO: 2596861 - RNA, 17 nt, Human
acuacaguccucccauc

SEQ ID NO: 2596862 - RNA, 15 nt, Human
acuacaggcacccac

SEQ ID NO: 2596863 - RNA, 20 nt, Human
acuacacagucugcaagauu

SEQ ID NO: 2596864 - RNA, 11 nt, Human
acuacaggcac

SEQ ID NO: 2596865 - RNA, 19 nt, Human
acuacaaccaagcucucug

SEQ ID NO: 2596866 - RNA, 17 nt, Human
acuacaauuuaaagcaa

SEQ ID NO: 2596867 - RNA, 22 nt, Human
acuacaauuuaaagcaaaggag

SEQ ID NO: 2596868 - RNA, 16 nt, Human
ucccugaaggccccgc

SEQ ID NO: 2596869 - RNA, 22 nt, Human
ucccugacucauucugaaggag

SEQ ID NO: 2596870 - RNA, 22 nt, Human
ucccucccggcaugggaaagcc

SEQ ID NO: 2596871 - RNA, 16 nt, Human
ucccugacucucugug

SEQ ID NO: 2596872 - RNA, 11 nt, Human
ucccugagcag

SEQ ID NO: 2596873 - RNA, 14 nt, Human
ucccugacugggag

SEQ ID NO: 2596874 - RNA, 20 nt, Human
ucccugacucucugugaccu

SEQ ID NO: 2596875 - RNA, 17 nt, Human
ucccugacucucuguga

SEQ ID NO: 2596876 - RNA, 18 nt, Human
ucccugacucucugugac

SEQ ID NO: 2596877 - RNA, 11 nt, Human
ucccugaggca

SEQ ID NO: 2596878 - RNA, 15 nt, Human
ucccugacugggagu

SEQ ID NO: 2596879 - RNA, 20 nt, Human
ucccugaggcagguccccag

SEQ ID NO: 2596880 - RNA, 21 nt, Human
ucccugaggcagguccccaga

SEQ ID NO: 2596881 - RNA, 22 nt, Human
ucccugaggcagguccccagac

SEQ ID NO: 2596882 - RNA, 14 nt, Human
ucccugagucacca

SEQ ID NO: 2596883 - RNA, 15 nt, Human
ucccugagucaccag

SEQ ID NO: 2596884 - RNA, 16 nt, Human
ucccugagucaccagg

SEQ ID NO: 2596885 - RNA, 16 nt, Human
ucccugcaaccaacua

SEQ ID NO: 2596886 - RNA, 15 nt, Human
ucccugcaaccaacu

SEQ ID NO: 2596887 - RNA, 21 nt, Human
ucccugauaacaaccuggaga

SEQ ID NO: 2596888 - RNA, 19 nt, Human
ucccugauaacaaccugga

SEQ ID NO: 2596889 - RNA, 17 nt, Human
ucccugagucaccagga

SEQ ID NO: 2596890 - RNA, 21 nt, Human
ucccugagucaccaggaaugu

SEQ ID NO: 2596891 - RNA, 13 nt, Human
acucaccugcugg

SEQ ID NO: 2596892 - RNA, 16 nt, Human
acucaccugcuggccc

SEQ ID NO: 2596893 - RNA, 17 nt, Human
acucaccugcuggcccc

SEQ ID NO: 2596894 - RNA, 18 nt, Human
acucaccugcuggccccu

SEQ ID NO: 2596895 - RNA, 19 nt, Human
acucaccugcuggccccuc

SEQ ID NO: 2596896 - RNA, 12 nt, Human
acucaccugggg

SEQ ID NO: 2596897 - RNA, 20 nt, Human
acucaccugcuggccccuca

SEQ ID NO: 2596898 - RNA, 20 nt, Human
acucaccuggggcugcuggc

SEQ ID NO: 2596899 - RNA, 19 nt, Human
acucaccuggggcugcugg

SEQ ID NO: 2596900 - RNA, 18 nt, Human
acucaccuggggcugcug

SEQ ID NO: 2596901 - RNA, 14 nt, Human
acucaccuggggcu

SEQ ID NO: 2596902 - RNA, 15 nt, Human
acucaccuguuacuu

SEQ ID NO: 2596903 - RNA, 23 nt, Human
acucaccuggggcugcuggccug

SEQ ID NO: 2596904 - RNA, 23 nt, Human
acucacgauaaauaaucggccca

SEQ ID NO: 2596905 - RNA, 21 nt, Human
acucacuccugagaccccugg

SEQ ID NO: 2596906 - RNA, 20 nt, Human
acucacuccugagaccccug

SEQ ID NO: 2596907 - RNA, 22 nt, Human
acucacuccugagaccccuggc

SEQ ID NO: 2596908 - RNA, 22 nt, Human
acucacugcucaagaagacaug

SEQ ID NO: 2596909 - RNA, 15 nt, Human
acucacugcucaaga

SEQ ID NO: 2596910 - RNA, 22 nt, Human
acucacuggggccuacagcuuu

SEQ ID NO: 2596911 - RNA, 17 nt, Human
acucacuaggcccccac

SEQ ID NO: 2596912 - RNA, 15 nt, Human
acucacuaggccccc

SEQ ID NO: 2596913 - RNA, 14 nt, Human
acucacuaggcccc

SEQ ID NO: 2596914 - RNA, 22 nt, Human
acucacuaggcccccacuugcc

SEQ ID NO: 2596915 - RNA, 21 nt, Human
acucacuaggcccccacuugc

SEQ ID NO: 2596916 - RNA, 16 nt, Human
acucacuccugagacc

SEQ ID NO: 2596917 - RNA, 14 nt, Human
acucacuccugaga

SEQ ID NO: 2596918 - RNA, 13 nt, Human
acucacuccugag

SEQ ID NO: 2596919 - RNA, 15 nt, Human
ucccugaaggccccg

SEQ ID NO: 2596920 - RNA, 11 nt, Human
ucccugaaggc

SEQ ID NO: 2596921 - RNA, 20 nt, Human
ucccucccggcaugggaaag

SEQ ID NO: 2596922 - RNA, 20 nt, Human
ucccugaaggaaccaaagcg

SEQ ID NO: 2596923 - RNA, 21 nt, Human
ucccucuuucccucccuuccu

SEQ ID NO: 2596924 - RNA, 18 nt, Human
ucccucuuucccucccuu

SEQ ID NO: 2596925 - RNA, 20 nt, Human
ucccucuuucccucccuucc

SEQ ID NO: 2596926 - RNA, 14 nt, Human
ucccucuuucccuc

SEQ ID NO: 2596927 - RNA, 13 nt, Human
ucccggcugcccu

SEQ ID NO: 2596928 - RNA, 14 nt, Human
ucccggcugcccuu

SEQ ID NO: 2596929 - RNA, 15 nt, Human
ucccggcugcccuuu

SEQ ID NO: 2596930 - RNA, 18 nt, Human
ucccggcugcccuuucug

SEQ ID NO: 2596931 - RNA, 22 nt, Human
ucccggcugcccuuucugggca

SEQ ID NO: 2596932 - RNA, 21 nt, Human
ucccucccaccucugugaccu

SEQ ID NO: 2596933 - RNA, 19 nt, Human
ucccucccaccucugugac

SEQ ID NO: 2596934 - RNA, 16 nt, Human
ucccucccaccucugu

SEQ ID NO: 2596935 - RNA, 15 nt, Human
ucccucccaccucug

SEQ ID NO: 2596936 - RNA, 14 nt, Human
ucccucccaccucu

SEQ ID NO: 2596937 - RNA, 13 nt, Human
ucccucccaccuc

SEQ ID NO: 2596938 - RNA, 23 nt, Human
ucccuccacuccuuccugccacc

SEQ ID NO: 2596939 - RNA, 20 nt, Human
ucccuccacguucaccccuc

SEQ ID NO: 2596940 - RNA, 19 nt, Human
ucccuccacguucaccccu

SEQ ID NO: 2596941 - RNA, 18 nt, Human
ucccuccacguucacccc

SEQ ID NO: 2596942 - RNA, 11 nt, Human
uccccucccau

SEQ ID NO: 2596943 - RNA, 14 nt, Human
uccccucacagccu

SEQ ID NO: 2596944 - RNA, 21 nt, Human
uccccucaaagucugcaacuu

SEQ ID NO: 2596945 - RNA, 18 nt, Human
uccccucaaagucugcaa

SEQ ID NO: 2596946 - RNA, 17 nt, Human
uccccucaaagucugca

SEQ ID NO: 2596947 - RNA, 13 nt, Human
uccccucacagcc

SEQ ID NO: 2596948 - RNA, 14 nt, Human
uccccuccccugcu

SEQ ID NO: 2596949 - RNA, 13 nt, Human
uccccuccccugc

SEQ ID NO: 2596950 - RNA, 18 nt, Human
uccccuccccggcccuac

SEQ ID NO: 2596951 - RNA, 17 nt, Human
uccccucccaucuggga

SEQ ID NO: 2596952 - RNA, 15 nt, Human
uccccucccaucugg

SEQ ID NO: 2596953 - RNA, 14 nt, Human
uccccucccaucug

SEQ ID NO: 2596954 - RNA, 16 nt, Human
uccccuccccugcugc

SEQ ID NO: 2596955 - RNA, 15 nt, Human
uccccuccccugcug

SEQ ID NO: 2596956 - RNA, 17 nt, Human
uccccuccccugcugca

SEQ ID NO: 2596957 - RNA, 14 nt, Human
uccccucccuccuc

SEQ ID NO: 2596958 - RNA, 12 nt, Human
uccccucccugg

SEQ ID NO: 2596959 - RNA, 16 nt, Human
uccccucccuccucug

SEQ ID NO: 2596960 - RNA, 13 nt, Human
uccccucccuggc

SEQ ID NO: 2596961 - RNA, 14 nt, Human
uccccucaaagucu

SEQ ID NO: 2596962 - RNA, 19 nt, Human
uccccuauggggauggucc

SEQ ID NO: 2596963 - RNA, 18 nt, Human
uccccuauccacccagcc

SEQ ID NO: 2596964 - RNA, 20 nt, Human
uccccuauccacccagccca

SEQ ID NO: 2596965 - RNA, 21 nt, Human
uccccuauccacccagcccau

SEQ ID NO: 2596966 - RNA, 21 nt, Human
uccccuaguaagugccuucca

SEQ ID NO: 2596967 - RNA, 20 nt, Human
uccccuaguaagugccuucc

SEQ ID NO: 2596968 - RNA, 18 nt, Human
uccccuaguaagugccuu

SEQ ID NO: 2596969 - RNA, 22 nt, Human
uccccuaguaagugccuuccau

SEQ ID NO: 2596970 - RNA, 15 nt, Human
uccccuauccaccca

SEQ ID NO: 2596971 - RNA, 16 nt, Human
uccccuauccacccag

SEQ ID NO: 2596972 - RNA, 17 nt, Human
uccccuauccacccagc

SEQ ID NO: 2596973 - RNA, 21 nt, Human
acucacccaugugccaaggug

SEQ ID NO: 2596974 - RNA, 18 nt, Human
acucacccaugugccaag

SEQ ID NO: 2596975 - RNA, 20 nt, Human
uccccuaagcagaccacuga

SEQ ID NO: 2596976 - RNA, 14 nt, Human
acucaccaucugug

SEQ ID NO: 2596977 - RNA, 15 nt, Human
acucaccauguaaaa

SEQ ID NO: 2596978 - RNA, 17 nt, Human
acucacccaugugccaa

SEQ ID NO: 2596979 - RNA, 12 nt, Human
acucacccaagc

SEQ ID NO: 2596980 - RNA, 23 nt, Human
uccccuacccccuccucucugcc

SEQ ID NO: 2596981 - RNA, 17 nt, Human
uccccuaguaagugccu

SEQ ID NO: 2596982 - RNA, 17 nt, Human
uccccuaccacugucuu

SEQ ID NO: 2596983 - RNA, 13 nt, Human
uccccuaaugccu

SEQ ID NO: 2596984 - RNA, 21 nt, Human
acuacuagggaaaugccuuug

SEQ ID NO: 2596985 - RNA, 14 nt, Human
acuacuagggaaau

SEQ ID NO: 2596986 - RNA, 19 nt, Human
acuaccuccucagggaugg

SEQ ID NO: 2596987 - RNA, 17 nt, Human
acuaccuccucagggau

SEQ ID NO: 2596988 - RNA, 17 nt, Human
acuacucccccaggugg

SEQ ID NO: 2596989 - RNA, 15 nt, Human
acucaccaucugugc

SEQ ID NO: 2596990 - RNA, 13 nt, Human
acucaccaucugu

SEQ ID NO: 2596991 - RNA, 23 nt, Human
acucaccaguguccccuccacug

SEQ ID NO: 2596992 - RNA, 19 nt, Human
acucaccaguguccccucc

SEQ ID NO: 2596993 - RNA, 17 nt, Human
acucaccaguguccccu

SEQ ID NO: 2596994 - RNA, 12 nt, Human
acucaccccagc

SEQ ID NO: 2596995 - RNA, 21 nt, Human
acucacauuuauucugcucac

SEQ ID NO: 2596996 - RNA, 21 nt, Human
acuacuccucugcagugccuu

SEQ ID NO: 2596997 - RNA, 19 nt, Human
acuacuccucugcagugcc

SEQ ID NO: 2596998 - RNA, 14 nt, Human
acuacuccucugca

SEQ ID NO: 2596999 - RNA, 20 nt, Human
acuacuccggagacaggguu

SEQ ID NO: 2597000 - RNA, 15 nt, Human
acuacucagggaaug

SEQ ID NO: 2597001 - RNA, 17 nt, Human
acuacucagggaaugaa

SEQ ID NO: 2597002 - RNA, 17 nt, Human
uccccucggagaagagc

SEQ ID NO: 2597003 - RNA, 18 nt, Human
uccccuccuugggcacuu

SEQ ID NO: 2597004 - RNA, 14 nt, Human
uccccuccuugggc

SEQ ID NO: 2597005 - RNA, 12 nt, Human
uccccuccuugg

SEQ ID NO: 2597006 - RNA, 23 nt, Human
uccccuccuugccuccuguguaa

SEQ ID NO: 2597007 - RNA, 17 nt, Human
uccccucuauuuagcau

SEQ ID NO: 2597008 - RNA, 16 nt, Human
uccccucggagaagag

SEQ ID NO: 2597009 - RNA, 15 nt, Human
uccccucccuggcuc

SEQ ID NO: 2597010 - RNA, 16 nt, Human
uccccucccuggcucc

SEQ ID NO: 2597011 - RNA, 19 nt, Human
uccccucccuggcucccau

SEQ ID NO: 2597012 - RNA, 21 nt, Human
uccccuccuugccuccugugu

SEQ ID NO: 2597013 - RNA, 22 nt, Human
uccccuccuugccuccugugua

SEQ ID NO: 2597014 - RNA, 15 nt, Human
uccccucuccuuccu

SEQ ID NO: 2597015 - RNA, 17 nt, Human
uccccuugcccagggcu

SEQ ID NO: 2597016 - RNA, 20 nt, Human
uccccuugcccagggcucag

SEQ ID NO: 2597017 - RNA, 22 nt, Human
uccccuugcccagggcucagcc

SEQ ID NO: 2597018 - RNA, 18 nt, Human
uccccuugcccuugcccu

SEQ ID NO: 2597019 - RNA, 14 nt, Human
uccccuugcccuug

SEQ ID NO: 2597020 - RNA, 24 nt, Human
uccccuugcccagggcucagccug

SEQ ID NO: 2597021 - RNA, 23 nt, Human
uccccuugcccuugcccugaccu

SEQ ID NO: 2597022 - RNA, 21 nt, Human
uccccuugcccuugcccugac

SEQ ID NO: 2597023 - RNA, 20 nt, Human
uccccuugcccuugcccuga

SEQ ID NO: 2597024 - RNA, 19 nt, Human
uccccuugcccuugcccug

SEQ ID NO: 2597025 - RNA, 14 nt, Human
uccccuugggcggc

SEQ ID NO: 2597026 - RNA, 22 nt, Human
uccccuugggcggcugagagcc

SEQ ID NO: 2597027 - RNA, 17 nt, Human
uccccuugggcggcuga

SEQ ID NO: 2597028 - RNA, 17 nt, Human
ucccgaguagcugggac

SEQ ID NO: 2597029 - RNA, 16 nt, Human
ucccgaguagcuggga

SEQ ID NO: 2597030 - RNA, 20 nt, Human
ucccgaguagcugagauuau

SEQ ID NO: 2597031 - RNA, 23 nt, Human
ucccggcaugggaaagccaccuc

SEQ ID NO: 2597032 - RNA, 18 nt, Human
ucccgaguagcugggacu

SEQ ID NO: 2597033 - RNA, 22 nt, Human
ucccgagcaccuccacauccuc

SEQ ID NO: 2597034 - RNA, 20 nt, Human
ucccgagcaaagucuaaagu

SEQ ID NO: 2597035 - RNA, 19 nt, Human
ucccgagcaaagucuaaag

SEQ ID NO: 2597036 - RNA, 17 nt, Human
uccccuuuuauugcugc

SEQ ID NO: 2597037 - RNA, 15 nt, Human
ucccgaguagcuggg

SEQ ID NO: 2597038 - RNA, 20 nt, Human
ucccgaauagcugggacuac

SEQ ID NO: 2597039 - RNA, 21 nt, Human
uccccuuuguauuccuuaaau

SEQ ID NO: 2597040 - RNA, 15 nt, Human
acuccugacagucuu

SEQ ID NO: 2597041 - RNA, 21 nt, Human
acuccugacagucuugugcuu

SEQ ID NO: 2597042 - RNA, 19 nt, Human
acuccugacagucuugugc

SEQ ID NO: 2597043 - RNA, 17 nt, Human
acuccugcaggcagcca

SEQ ID NO: 2597044 - RNA, 19 nt, Human
acuccugcaggcagccagg

SEQ ID NO: 2597045 - RNA, 18 nt, Human
acuccugcaggcagccag

SEQ ID NO: 2597046 - RNA, 18 nt, Human
acuccucgguacucccau

SEQ ID NO: 2597047 - RNA, 23 nt, Human
acuccucggccuggcuccuaccc

SEQ ID NO: 2597048 - RNA, 19 nt, Human
acuccucggccuggcuccu

SEQ ID NO: 2597049 - RNA, 17 nt, Human
acuccucggccuggcuc

SEQ ID NO: 2597050 - RNA, 22 nt, Human
acuccuccuccaaaggcccccu

SEQ ID NO: 2597051 - RNA, 21 nt, Human
acuccuccuccaaaggccccc

SEQ ID NO: 2597052 - RNA, 16 nt, Human
acuccucggccuggcu

SEQ ID NO: 2597053 - RNA, 23 nt, Human
acuccucuaagccacucuuccaa

SEQ ID NO: 2597054 - RNA, 21 nt, Human
acuccucuaagccacucuucc

SEQ ID NO: 2597055 - RNA, 14 nt, Human
acuccucugacuca

SEQ ID NO: 2597056 - RNA, 17 nt, Human
acuccucugcagugccu

SEQ ID NO: 2597057 - RNA, 12 nt, Human
acuccucugcag

SEQ ID NO: 2597058 - RNA, 20 nt, Human
acuccucugacucagggcuc

SEQ ID NO: 2597059 - RNA, 20 nt, Human
acuccucugcagugccuugg

SEQ ID NO: 2597060 - RNA, 13 nt, Human
acuccucugucca

SEQ ID NO: 2597061 - RNA, 16 nt, Human
acuccucuuauuugcu

SEQ ID NO: 2597062 - RNA, 14 nt, Human
acuccucuuauuug

SEQ ID NO: 2597063 - RNA, 14 nt, Human
acuccucuguccag

SEQ ID NO: 2597064 - RNA, 23 nt, Human
acuccagaauuucccaaagcagu

SEQ ID NO: 2597065 - RNA, 13 nt, Human
acuccagccugag

SEQ ID NO: 2597066 - RNA, 14 nt, Human
acuccagccugagc

SEQ ID NO: 2597067 - RNA, 12 nt, Human
acuccagccugg

SEQ ID NO: 2597068 - RNA, 15 nt, Human
acuccagccugagca

SEQ ID NO: 2597069 - RNA, 19 nt, Human
acuccagccugagcaacag

SEQ ID NO: 2597070 - RNA, 20 nt, Human
acuccagccugagcaacaga

SEQ ID NO: 2597071 - RNA, 19 nt, Human
acuccagccuggcgacaga

SEQ ID NO: 2597072 - RNA, 15 nt, Human
acuccuccuagccac

SEQ ID NO: 2597073 - RNA, 16 nt, Human
acuccuccuagccacc

SEQ ID NO: 2597074 - RNA, 23 nt, Human
acuccuccuccaaaggcccccua

SEQ ID NO: 2597075 - RNA, 18 nt, Human
acuccuccuagccaccca

SEQ ID NO: 2597076 - RNA, 13 nt, Human
acuccagccuggg

SEQ ID NO: 2597077 - RNA, 14 nt, Human
acuccuccuagcca

SEQ ID NO: 2597078 - RNA, 13 nt, Human
acuccuccuagcc

SEQ ID NO: 2597079 - RNA, 14 nt, Human
acuccagccugggc

SEQ ID NO: 2597080 - RNA, 17 nt, Human
acuccagaauuucccaa

SEQ ID NO: 2597081 - RNA, 15 nt, Human
acuccagaauuuccc

SEQ ID NO: 2597082 - RNA, 21 nt, Human
acuccaaagaaauguaaggga

SEQ ID NO: 2597083 - RNA, 15 nt, Human
acuccaaagaaaugu

SEQ ID NO: 2597084 - RNA, 18 nt, Human
acuccaaagaaauguaag

SEQ ID NO: 2597085 - RNA, 14 nt, Human
acuccaaagaaaug

SEQ ID NO: 2597086 - RNA, 15 nt, Human
acucauugaccugag

SEQ ID NO: 2597087 - RNA, 13 nt, Human
acucauucaaaag

SEQ ID NO: 2597088 - RNA, 21 nt, Human
acucauucaaaaguugaaauu

SEQ ID NO: 2597089 - RNA, 15 nt, Human
acucauucugaagga

SEQ ID NO: 2597090 - RNA, 19 nt, Human
acucauucugaaggagccc

SEQ ID NO: 2597091 - RNA, 13 nt, Human
acucauuccugua

SEQ ID NO: 2597092 - RNA, 23 nt, Human
acucauucagggauagcacugag

SEQ ID NO: 2597093 - RNA, 14 nt, Human
acucauugaccuga

SEQ ID NO: 2597094 - RNA, 15 nt, Human
acucauucuucugua

SEQ ID NO: 2597095 - RNA, 15 nt, Human
acucacuuucuagau

SEQ ID NO: 2597096 - RNA, 14 nt, Human
acucagaaacauca

SEQ ID NO: 2597097 - RNA, 15 nt, Human
acucagaaacaucag

SEQ ID NO: 2597098 - RNA, 12 nt, Human
acucauguguau

SEQ ID NO: 2597099 - RNA, 11 nt, Human
acucaugugua

SEQ ID NO: 2597100 - RNA, 10 nt, Human
acucaugugu

SEQ ID NO: 2597101 - RNA, 21 nt, Human
acucauguguaugggcaaaaa

SEQ ID NO: 2597102 - RNA, 13 nt, Human
acucauguguaug

SEQ ID NO: 2597103 - RNA, 22 nt, Human
uccggcuccugugcuuucccug

SEQ ID NO: 2597104 - RNA, 17 nt, Human
uccggcuccugugcuuu

SEQ ID NO: 2597105 - RNA, 16 nt, Human
uccggcuccugugcuu

SEQ ID NO: 2597106 - RNA, 14 nt, Human
uccggcuccugugc

SEQ ID NO: 2597107 - RNA, 21 nt, Human
uccgggaccuggugcugccuc

SEQ ID NO: 2597108 - RNA, 23 nt, Human
uccgggagggugcggcugugcag

SEQ ID NO: 2597109 - RNA, 16 nt, Human
uccggggagcgcccgc

SEQ ID NO: 2597110 - RNA, 16 nt, Human
ucccuuuuugaagugu

SEQ ID NO: 2597111 - RNA, 15 nt, Human
ucccuuuuugaagug

SEQ ID NO: 2597112 - RNA, 21 nt, Human
ucccuuuuuccuuguccccac

SEQ ID NO: 2597113 - RNA, 17 nt, Human
ucccuuuuuccuugucc

SEQ ID NO: 2597114 - RNA, 16 nt, Human
ucccuuuuuccuuguc

SEQ ID NO: 2597115 - RNA, 15 nt, Human
ucccuuuuuccuugu

SEQ ID NO: 2597116 - RNA, 14 nt, Human
ucccuuuuuccuug

SEQ ID NO: 2597117 - RNA, 23 nt, Human
ucccuuuugcggaugggaggggu

SEQ ID NO: 2597118 - RNA, 15 nt, Human
ucccuuuugcaucau

SEQ ID NO: 2597119 - RNA, 20 nt, Human
ucccuuuuuauaucccauuu

SEQ ID NO: 2597120 - RNA, 19 nt, Human
ucccuuucugcuuguguua

SEQ ID NO: 2597121 - RNA, 23 nt, Human
ucccuuucuccccugcccccagg

SEQ ID NO: 2597122 - RNA, 13 nt, Human
ucccuuucuuggc

SEQ ID NO: 2597123 - RNA, 13 nt, Human
ucccuuuuacaua

SEQ ID NO: 2597124 - RNA, 16 nt, Human
ucccuuucuuggccag

SEQ ID NO: 2597125 - RNA, 17 nt, Human
ucccuuucuuggccagu

SEQ ID NO: 2597126 - RNA, 17 nt, Human
ucccuuuuacauacugc

SEQ ID NO: 2597127 - RNA, 19 nt, Human
ucccuuuuacauacugcug

SEQ ID NO: 2597128 - RNA, 12 nt, Human
ucccuuuuccuu

SEQ ID NO: 2597129 - RNA, 20 nt, Human
ucccuuuuacauacugcugu

SEQ ID NO: 2597130 - RNA, 22 nt, Human
uccggguuugagauggacacac

SEQ ID NO: 2597131 - RNA, 22 nt, Human
uccgggggcagcucuggagggg

SEQ ID NO: 2597132 - RNA, 17 nt, Human
uccggucccugucccag

SEQ ID NO: 2597133 - RNA, 19 nt, Human
uccuaaauauauuuuaaga

SEQ ID NO: 2597134 - RNA, 20 nt, Human
uccggguuugagauggacac

SEQ ID NO: 2597135 - RNA, 15 nt, Human
uccuaaaugcaguga

SEQ ID NO: 2597136 - RNA, 19 nt, Human
uccuaaaugcagugaauug

SEQ ID NO: 2597137 - RNA, 22 nt, Human
uccuaagaaagaggagugcuug

SEQ ID NO: 2597138 - RNA, 20 nt, Human
uccuaagaaagaggagugcu

SEQ ID NO: 2597139 - RNA, 13 nt, Human
uccuaagaaagag

SEQ ID NO: 2597140 - RNA, 16 nt, Human
uccuaagagugcuggg

SEQ ID NO: 2597141 - RNA, 16 nt, Human
uccuaacacagcaugu

SEQ ID NO: 2597142 - RNA, 14 nt, Human
uccuacuuccccuu

SEQ ID NO: 2597143 - RNA, 16 nt, Human
uccuagaaauucccca

SEQ ID NO: 2597144 - RNA, 23 nt, Human
ucccuguuuucugagcccgggcu

SEQ ID NO: 2597145 - RNA, 22 nt, Human
ucccuguuuucugagcccgggc

SEQ ID NO: 2597146 - RNA, 15 nt, Human
ucccuuaaacaaaaa

SEQ ID NO: 2597147 - RNA, 18 nt, Human
ucccuuaaaauagaaaua

SEQ ID NO: 2597148 - RNA, 22 nt, Human
ucccuuaaacaaaaauuaaaau

SEQ ID NO: 2597149 - RNA, 20 nt, Human
ucccuguuugaagccugccc

SEQ ID NO: 2597150 - RNA, 20 nt, Human
ucccugugcugacggaagcc

SEQ ID NO: 2597151 - RNA, 21 nt, Human
ucccuguuuucugagcccggg

SEQ ID NO: 2597152 - RNA, 19 nt, Human
ucccuguuuucugagcccg

SEQ ID NO: 2597153 - RNA, 18 nt, Human
ucccuguuuucugagccc

SEQ ID NO: 2597154 - RNA, 15 nt, Human
ucccuguuuucugag

SEQ ID NO: 2597155 - RNA, 11 nt, Human
ucccuguuuuc

SEQ ID NO: 2597156 - RNA, 17 nt, Human
ucccuuacgugaguccu

SEQ ID NO: 2597157 - RNA, 14 nt, Human
ucccuuuccuucca

SEQ ID NO: 2597158 - RNA, 17 nt, Human
ucccuuuccuuccaucc

SEQ ID NO: 2597159 - RNA, 18 nt, Human
ucccuuucuccccugccc

SEQ ID NO: 2597160 - RNA, 17 nt, Human
ucccuuucuccccugcc

SEQ ID NO: 2597161 - RNA, 16 nt, Human
ucccuuucuccccugc

SEQ ID NO: 2597162 - RNA, 15 nt, Human
ucccuuucuccccug

SEQ ID NO: 2597163 - RNA, 14 nt, Human
ucccuuucuccccu

SEQ ID NO: 2597164 - RNA, 23 nt, Human
ucccuuuccuuccaucccuaccc

SEQ ID NO: 2597165 - RNA, 18 nt, Human
ucccuuuccuuccauccc

SEQ ID NO: 2597166 - RNA, 19 nt, Human
ucccuuuccuuccaucccu

SEQ ID NO: 2597167 - RNA, 15 nt, Human
ucccugguggcagcu

SEQ ID NO: 2597168 - RNA, 12 nt, Human
ucccugucccag

SEQ ID NO: 2597169 - RNA, 14 nt, Human
ucccugucccucua

SEQ ID NO: 2597170 - RNA, 22 nt, Human
ucccugucaccaagcucacagu

SEQ ID NO: 2597171 - RNA, 12 nt, Human
ucccuguccucc

SEQ ID NO: 2597172 - RNA, 14 nt, Human
ucccuguccuccuc

SEQ ID NO: 2597173 - RNA, 16 nt, Human
ucccugucggccuggu

SEQ ID NO: 2597174 - RNA, 20 nt, Human
ucccugugccuaacaccagc

SEQ ID NO: 2597175 - RNA, 15 nt, Human
ucccuguccuccucg

SEQ ID NO: 2597176 - RNA, 21 nt, Human
ucccugggggaagcccuggau

SEQ ID NO: 2597177 - RNA, 13 nt, Human
ucccuggucccuu

SEQ ID NO: 2597178 - RNA, 21 nt, Human
ucccugguaauaaguacugug

SEQ ID NO: 2597179 - RNA, 14 nt, Human
ucccuggucccuug

SEQ ID NO: 2597180 - RNA, 19 nt, Human
ucccuggucccuuggagac

SEQ ID NO: 2597181 - RNA, 21 nt, Human
acuccugcaggcagccaggcc

SEQ ID NO: 2597182 - RNA, 18 nt, Human
ucccugggggaagcccug

SEQ ID NO: 2597183 - RNA, 20 nt, Human
ucccuggggcuagggggagc

SEQ ID NO: 2597184 - RNA, 19 nt, Human
ucccugggggaagcccugg

SEQ ID NO: 2597185 - RNA, 20 nt, Human
ucccugggggaagcccugga

SEQ ID NO: 2597186 - RNA, 14 nt, Human
ucccuggggugggg

SEQ ID NO: 2597187 - RNA, 14 nt, Human
uccuuguguuacua

SEQ ID NO: 2597188 - RNA, 23 nt, Human
uccuuguguuacuaaguuuuuau

SEQ ID NO: 2597189 - RNA, 14 nt, Human
uccuuguuucaaac

SEQ ID NO: 2597190 - RNA, 13 nt, Human
uccuuguuucaaa

SEQ ID NO: 2597191 - RNA, 22 nt, Human
uccuugugguuuaugucaucau

SEQ ID NO: 2597192 - RNA, 19 nt, Human
uccuugugguuuaugucau

SEQ ID NO: 2597193 - RNA, 14 nt, Human
uccuuguuccuaga

SEQ ID NO: 2597194 - RNA, 22 nt, Human
uccuuuaaaaaaauuuaagugc

SEQ ID NO: 2597195 - RNA, 16 nt, Human
uccuuuaaaaaaauuu

SEQ ID NO: 2597196 - RNA, 22 nt, Human
uccuuguuucaaacacaaaugc

SEQ ID NO: 2597197 - RNA, 17 nt, Human
uccuuuaaauccuucca

SEQ ID NO: 2597198 - RNA, 19 nt, Human
uccuuuagcgcccaguugg

SEQ ID NO: 2597199 - RNA, 15 nt, Human
uccuuuagcgcccag

SEQ ID NO: 2597200 - RNA, 22 nt, Human
uccuuuacacauucggcucccu

SEQ ID NO: 2597201 - RNA, 12 nt, Human
uccuuuacacau

SEQ ID NO: 2597202 - RNA, 21 nt, Human
uccuuuaaaaaaauuuaagug

SEQ ID NO: 2597203 - RNA, 21 nt, Human
uccuuuaauuuuuuacuauuu

SEQ ID NO: 2597204 - RNA, 22 nt, Human
uccuuguccccacacuccuaca

SEQ ID NO: 2597205 - RNA, 20 nt, Human
uccuuguccccacacuccua

SEQ ID NO: 2597206 - RNA, 19 nt, Human
uccuuguccccacacuccu

SEQ ID NO: 2597207 - RNA, 18 nt, Human
uccuuguccccacacucc

SEQ ID NO: 2597208 - RNA, 17 nt, Human
uccuuguccccacacuc

SEQ ID NO: 2597209 - RNA, 16 nt, Human
uccuuguccccacacu

SEQ ID NO: 2597210 - RNA, 14 nt, Human
uccuuguccccaca

SEQ ID NO: 2597211 - RNA, 13 nt, Human
uccuuguccccac

SEQ ID NO: 2597212 - RNA, 16 nt, Human
uccuuguccacccacc

SEQ ID NO: 2597213 - RNA, 15 nt, Human
uccuuguccacccac

SEQ ID NO: 2597214 - RNA, 13 nt, Human
uccuugucacugg

SEQ ID NO: 2597215 - RNA, 15 nt, Human
uccuuguauuuaaau

SEQ ID NO: 2597216 - RNA, 17 nt, Human
uccuugugguuuauguc

SEQ ID NO: 2597217 - RNA, 19 nt, Human
uccuuguggccugggccuc

SEQ ID NO: 2597218 - RNA, 18 nt, Human
uccuuguggccugggccu

SEQ ID NO: 2597219 - RNA, 12 nt, Human
uccuugugcaug

SEQ ID NO: 2597220 - RNA, 19 nt, Human
uccuuccuugcuguccuag

SEQ ID NO: 2597221 - RNA, 16 nt, Human
uccuucuaguuuccca

SEQ ID NO: 2597222 - RNA, 17 nt, Human
uccuucuaguuucccac

SEQ ID NO: 2597223 - RNA, 16 nt, Human
uccuuccuugaccagc

SEQ ID NO: 2597224 - RNA, 18 nt, Human
uccuucuaguuucccaca

SEQ ID NO: 2597225 - RNA, 12 nt, Human
uccuucucccuu

SEQ ID NO: 2597226 - RNA, 20 nt, Human
uccuucucucaccuccuaaa

SEQ ID NO: 2597227 - RNA, 15 nt, Human
uccuucugaaguguu

SEQ ID NO: 2597228 - RNA, 15 nt, Human
uccuucucugucuca

SEQ ID NO: 2597229 - RNA, 12 nt, Human
uccuucucuguc

SEQ ID NO: 2597230 - RNA, 13 nt, Human
uccuucuccuccu

SEQ ID NO: 2597231 - RNA, 21 nt, Human
uccuuggugugacccucugaa

SEQ ID NO: 2597232 - RNA, 17 nt, Human
uccuucugaccacagca

SEQ ID NO: 2597233 - RNA, 15 nt, Human
uccuucagugccuua

SEQ ID NO: 2597234 - RNA, 14 nt, Human
uccuucagugccuu

SEQ ID NO: 2597235 - RNA, 19 nt, Human
acuggccucgccuggccug

SEQ ID NO: 2597236 - RNA, 18 nt, Human
acuggccucgccuggccu

SEQ ID NO: 2597237 - RNA, 17 nt, Human
acuggccucgccuggcc

SEQ ID NO: 2597238 - RNA, 14 nt, Human
acuggccucugcug

SEQ ID NO: 2597239 - RNA, 23 nt, Human
acuggccggucugcaagucagag

SEQ ID NO: 2597240 - RNA, 16 nt, Human
acuggccucgccuggc

SEQ ID NO: 2597241 - RNA, 22 nt, Human
acuggccggucugcaagucaga

SEQ ID NO: 2597242 - RNA, 19 nt, Human
acuggccggagucagugcc

SEQ ID NO: 2597243 - RNA, 17 nt, Human
acuggccccugggucag

SEQ ID NO: 2597244 - RNA, 19 nt, Human
acuggccaccaggcuggcg

SEQ ID NO: 2597245 - RNA, 18 nt, Human
acuggccaccaggcuggc

SEQ ID NO: 2597246 - RNA, 17 nt, Human
acuggccaccaggcugg

SEQ ID NO: 2597247 - RNA, 16 nt, Human
acuggccaccaggcug

SEQ ID NO: 2597248 - RNA, 22 nt, Human
acuggccaccaggcuggcgcag

SEQ ID NO: 2597249 - RNA, 21 nt, Human
acuggccaccaggcuggcgca

SEQ ID NO: 2597250 - RNA, 23 nt, Human
acuggccaccaggcuggcgcagc

SEQ ID NO: 2597251 - RNA, 14 nt, Human
acuggccaucucca

SEQ ID NO: 2597252 - RNA, 13 nt, Human
acuggccaucucc

SEQ ID NO: 2597253 - RNA, 23 nt, Human
acuggccaguggcuggaucugug

SEQ ID NO: 2597254 - RNA, 13 nt, Human
acuggccccuggg

SEQ ID NO: 2597255 - RNA, 12 nt, Human
acuggccccugg

SEQ ID NO: 2597256 - RNA, 21 nt, Human
acuggccccuagaaucagccu

SEQ ID NO: 2597257 - RNA, 15 nt, Human
acuggccccuggguc

SEQ ID NO: 2597258 - RNA, 14 nt, Human
acuggccccugggu

SEQ ID NO: 2597259 - RNA, 18 nt, Human
uccuucccaaaggacucc

SEQ ID NO: 2597260 - RNA, 23 nt, Human
uccuucccaaaggacuccaccca

SEQ ID NO: 2597261 - RNA, 16 nt, Human
uccuuccuguucugaa

SEQ ID NO: 2597262 - RNA, 14 nt, Human
uccuuccuucccac

SEQ ID NO: 2597263 - RNA, 19 nt, Human
uccuuccuguucugaacug

SEQ ID NO: 2597264 - RNA, 15 nt, Human
uccuuccuucccacc

SEQ ID NO: 2597265 - RNA, 14 nt, Human
uccuuccuucccug

SEQ ID NO: 2597266 - RNA, 15 nt, Human
uccuuccuucccugg

SEQ ID NO: 2597267 - RNA, 16 nt, Human
uccuuccuucccuggc

SEQ ID NO: 2597268 - RNA, 21 nt, Human
uccuuccaguguccuuagaac

SEQ ID NO: 2597269 - RNA, 15 nt, Human
uccuuccaucaaaua

SEQ ID NO: 2597270 - RNA, 16 nt, Human
uccuuccaggccccca

SEQ ID NO: 2597271 - RNA, 21 nt, Human
uccuuccaggcccccaccacu

SEQ ID NO: 2597272 - RNA, 16 nt, Human
uccuuccaucccuacc

SEQ ID NO: 2597273 - RNA, 17 nt, Human
uccuuccaucccuaccc

SEQ ID NO: 2597274 - RNA, 13 nt, Human
uccuuccaugaaa

SEQ ID NO: 2597275 - RNA, 17 nt, Human
uccuucagugccuuaug

SEQ ID NO: 2597276 - RNA, 16 nt, Human
uccuucagugccuuau

SEQ ID NO: 2597277 - RNA, 17 nt, Human
uccuuccaccucccucc

SEQ ID NO: 2597278 - RNA, 13 nt, Human
uccuuccaggccc

SEQ ID NO: 2597279 - RNA, 14 nt, Human
uccuuccaccuccc

SEQ ID NO: 2597280 - RNA, 23 nt, Human
acuggccucgccuggccugaggu

SEQ ID NO: 2597281 - RNA, 22 nt, Human
acuggccucgccuggccugagg

SEQ ID NO: 2597282 - RNA, 12 nt, Human
uccuuccaccuc

SEQ ID NO: 2597283 - RNA, 14 nt, Human
ucgagaccagucug

SEQ ID NO: 2597284 - RNA, 15 nt, Human
ucgagcaugccugga

SEQ ID NO: 2597285 - RNA, 18 nt, Human
ucgagcaugccuggaugg

SEQ ID NO: 2597286 - RNA, 16 nt, Human
ucgagcaugccuggau

SEQ ID NO: 2597287 - RNA, 16 nt, Human
ucgcgacaaugcaaac

SEQ ID NO: 2597288 - RNA, 19 nt, Human
ucgcgacaaugcaaaccau

SEQ ID NO: 2597289 - RNA, 17 nt, Human
ucgaggaaccagagcca

SEQ ID NO: 2597290 - RNA, 17 nt, Human
acuggcugucaguauga

SEQ ID NO: 2597291 - RNA, 21 nt, Human
acuggcugucaguaugacauu

SEQ ID NO: 2597292 - RNA, 13 nt, Human
acuggcuuuggcu

SEQ ID NO: 2597293 - RNA, 15 nt, Human
acuggcuuuggcuuc

SEQ ID NO: 2597294 - RNA, 16 nt, Human
acuggcuuuggcuucu

SEQ ID NO: 2597295 - RNA, 18 nt, Human
acuggcuuuggcuucuug

SEQ ID NO: 2597296 - RNA, 12 nt, Human
acuggcugguga

SEQ ID NO: 2597297 - RNA, 19 nt, Human
acuggcuuuuauuaaugca

SEQ ID NO: 2597298 - RNA, 18 nt, Human
acuggcuuuuauuaaugc

SEQ ID NO: 2597299 - RNA, 14 nt, Human
acuggcuuuuauua

SEQ ID NO: 2597300 - RNA, 18 nt, Human
ucgcgugcccucgcugcu

SEQ ID NO: 2597301 - RNA, 16 nt, Human
ucgcgugcccucgcug

SEQ ID NO: 2597302 - RNA, 20 nt, Human
ucgcgugcccucgcugcuuc

SEQ ID NO: 2597303 - RNA, 18 nt, Human
ucgcuauugucaccaggg

SEQ ID NO: 2597304 - RNA, 18 nt, Human
ucgcucaaucaagaaaau

SEQ ID NO: 2597305 - RNA, 13 nt, Human
ucgcgcugccugu

SEQ ID NO: 2597306 - RNA, 12 nt, Human
ucgcgcugccug

SEQ ID NO: 2597307 - RNA, 14 nt, Human
ucgcgcucagcaug

SEQ ID NO: 2597308 - RNA, 16 nt, Human
ucgcgcugccugugug

SEQ ID NO: 2597309 - RNA, 15 nt, Human
ucgcgcugccugugu

SEQ ID NO: 2597310 - RNA, 20 nt, Human
ucgcggcggagcuggccccg

SEQ ID NO: 2597311 - RNA, 19 nt, Human
ucgcggcggagcuggcccc

SEQ ID NO: 2597312 - RNA, 18 nt, Human
ucgcggcggagcuggccc

SEQ ID NO: 2597313 - RNA, 16 nt, Human
ucgcggcggagcuggc

SEQ ID NO: 2597314 - RNA, 20 nt, Human
uccuuucuugguucauaaau

SEQ ID NO: 2597315 - RNA, 22 nt, Human
uccuuucuugguucauaaauga

SEQ ID NO: 2597316 - RNA, 15 nt, Human
uccuuucuuucuaac

SEQ ID NO: 2597317 - RNA, 18 nt, Human
uccuuucuccagccagca

SEQ ID NO: 2597318 - RNA, 17 nt, Human
uccuuucuccagccagc

SEQ ID NO: 2597319 - RNA, 17 nt, Human
uccuuucuuuuucuucu

SEQ ID NO: 2597320 - RNA, 16 nt, Human
uccuuucuuuuucuuc

SEQ ID NO: 2597321 - RNA, 14 nt, Human
uccuuucuuuuucu

SEQ ID NO: 2597322 - RNA, 18 nt, Human
ucgaagcucagcccaccc

SEQ ID NO: 2597323 - RNA, 19 nt, Human
ucgaagcucagcccacccc

SEQ ID NO: 2597324 - RNA, 11 nt, Human
uccuuucuauc

SEQ ID NO: 2597325 - RNA, 21 nt, Human
uccuuucuaucauuuuuguac

SEQ ID NO: 2597326 - RNA, 19 nt, Human
uccuuuacacucaggcuuu

SEQ ID NO: 2597327 - RNA, 13 nt, Human
uccuuucucaccg

SEQ ID NO: 2597328 - RNA, 15 nt, Human
uccuuucuauugaaa

SEQ ID NO: 2597329 - RNA, 14 nt, Human
uccuuucucagccg

SEQ ID NO: 2597330 - RNA, 16 nt, Human
uccuuucuccagccag

SEQ ID NO: 2597331 - RNA, 15 nt, Human
uccuuucucauccca

SEQ ID NO: 2597332 - RNA, 23 nt, Human
uccuuucucagccgcuucugacu

SEQ ID NO: 2597333 - RNA, 23 nt, Human
uccuuuagcgcccaguugggugg

SEQ ID NO: 2597334 - RNA, 22 nt, Human
uccuuuagcgcccaguugggug

SEQ ID NO: 2597335 - RNA, 19 nt, Human
ucgagaccagccuggccaa

SEQ ID NO: 2597336 - RNA, 18 nt, Human
ucgagaccagccuggcca

SEQ ID NO: 2597337 - RNA, 15 nt, Human
ucgagaccagccugg

SEQ ID NO: 2597338 - RNA, 14 nt, Human
ucgagaccagccug

SEQ ID NO: 2597339 - RNA, 16 nt, Human
ucgagaccagccuggc

SEQ ID NO: 2597340 - RNA, 17 nt, Human
ucgagaccagccuggcc

SEQ ID NO: 2597341 - RNA, 16 nt, Human
ucgagaacuuucauuu

SEQ ID NO: 2597342 - RNA, 15 nt, Human
ucgagaacuuucauu

SEQ ID NO: 2597343 - RNA, 19 nt, Human
ucgagaagcugcucuggaa

SEQ ID NO: 2597344 - RNA, 22 nt, Human
ucgagaacuuucauuuuuuucc

SEQ ID NO: 2597345 - RNA, 14 nt, Human
ucgagacacuugcc

SEQ ID NO: 2597346 - RNA, 16 nt, Human
ucgagacacagugaag

SEQ ID NO: 2597347 - RNA, 21 nt, Human
ucgagaagcugcucuggaauu

SEQ ID NO: 2597348 - RNA, 14 nt, Human
ucgagacagaaccu

SEQ ID NO: 2597349 - RNA, 18 nt, Human
ucgagaccaaccugacca

SEQ ID NO: 2597350 - RNA, 13 nt, Human
ucgagaccagccu

SEQ ID NO: 2597351 - RNA, 22 nt, Human
ucgaaucucugugccuucgucu

SEQ ID NO: 2597352 - RNA, 15 nt, Human
ucgaauuaauagcuu

SEQ ID NO: 2597353 - RNA, 17 nt, Human
ucgaaucucugugccuu

SEQ ID NO: 2597354 - RNA, 16 nt, Human
ucgaaucucugugccu

SEQ ID NO: 2597355 - RNA, 14 nt, Human
ucgaaucucugugc

SEQ ID NO: 2597356 - RNA, 20 nt, Human
ucgaaucuacuaauuccaca

SEQ ID NO: 2597357 - RNA, 14 nt, Human
ucgagaacuuucau

SEQ ID NO: 2597358 - RNA, 21 nt, Human
ucgaauuaauagcuuuuauug

SEQ ID NO: 2597359 - RNA, 16 nt, Human
ucgaauuaauagcuuu

SEQ ID NO: 2597360 - RNA, 14 nt, Human
ucgacuugcauuuu

SEQ ID NO: 2597361 - RNA, 22 nt, Human
acugccuucgcuucuugccucu

SEQ ID NO: 2597362 - RNA, 21 nt, Human
acugccuucgcuucuugccuc

SEQ ID NO: 2597363 - RNA, 17 nt, Human
acugccuucgcuucuug

SEQ ID NO: 2597364 - RNA, 16 nt, Human
acugccuucgcuucuu

SEQ ID NO: 2597365 - RNA, 15 nt, Human
acugccuucgcuucu

SEQ ID NO: 2597366 - RNA, 16 nt, Human
acugccuuaaaacuuu

SEQ ID NO: 2597367 - RNA, 15 nt, Human
acugccuuaaaacuu

SEQ ID NO: 2597368 - RNA, 14 nt, Human
acugccugggcucc

SEQ ID NO: 2597369 - RNA, 14 nt, Human
acugccuuaaaacu

SEQ ID NO: 2597370 - RNA, 20 nt, Human
acugccugauggaccuguca

SEQ ID NO: 2597371 - RNA, 17 nt, Human
acugccugauggaccug

SEQ ID NO: 2597372 - RNA, 23 nt, Human
acugccugcagaggucugugcug

SEQ ID NO: 2597373 - RNA, 22 nt, Human
acugccugcagaggucugugcu

SEQ ID NO: 2597374 - RNA, 9 nt, Human
acugccugc

SEQ ID NO: 2597375 - RNA, 24 nt, Human
acugccugcagaggucugugcuga

SEQ ID NO: 2597376 - RNA, 12 nt, Human
acugccugccca

SEQ ID NO: 2597377 - RNA, 13 nt, Human
acugccugcccac

SEQ ID NO: 2597378 - RNA, 14 nt, Human
acugccugcccacc

SEQ ID NO: 2597379 - RNA, 16 nt, Human
acugccugcccacccg

SEQ ID NO: 2597380 - RNA, 19 nt, Human
acugccugcccacccgugg

SEQ ID NO: 2597381 - RNA, 22 nt, Human
acugccugcccacccguggaga

SEQ ID NO: 2597382 - RNA, 23 nt, Human
acugccugcccacccguggagau

SEQ ID NO: 2597383 - RNA, 15 nt, Human
acugccucuuccucc

SEQ ID NO: 2597384 - RNA, 14 nt, Human
acugccucuuccuc

SEQ ID NO: 2597385 - RNA, 19 nt, Human
acugccucucccuggcccu

SEQ ID NO: 2597386 - RNA, 17 nt, Human
acugccucucccuggcc

SEQ ID NO: 2597387 - RNA, 18 nt, Human
acugccucucccuggccc

SEQ ID NO: 2597388 - RNA, 16 nt, Human
acugccucucccuggc

SEQ ID NO: 2597389 - RNA, 15 nt, Human
acugcauuauauuua

SEQ ID NO: 2597390 - RNA, 23 nt, Human
acugcauuaccgcguuguaaaau

SEQ ID NO: 2597391 - RNA, 16 nt, Human
acugcauuagaaauua

SEQ ID NO: 2597392 - RNA, 14 nt, Human
acugcauuauauuu

SEQ ID NO: 2597393 - RNA, 21 nt, Human
acugcauguaccauuugcaug

SEQ ID NO: 2597394 - RNA, 22 nt, Human
acugcauuaccgcguuguaaaa

SEQ ID NO: 2597395 - RNA, 21 nt, Human
acugcauuaccgcguuguaaa

SEQ ID NO: 2597396 - RNA, 20 nt, Human
acugcauuaccgcguuguaa

SEQ ID NO: 2597397 - RNA, 21 nt, Human
acugccuauuuuaauaaacac

SEQ ID NO: 2597398 - RNA, 16 nt, Human
acugccuauuuuaaua

SEQ ID NO: 2597399 - RNA, 16 nt, Human
acugccucagguuccu

SEQ ID NO: 2597400 - RNA, 15 nt, Human
acugccucagguucc

SEQ ID NO: 2597401 - RNA, 13 nt, Human
acugccucagguu

SEQ ID NO: 2597402 - RNA, 12 nt, Human
acugccucaggu

SEQ ID NO: 2597403 - RNA, 15 nt, Human
acugcauugagaacu

SEQ ID NO: 2597404 - RNA, 17 nt, Human
acugccucgaaacacag

SEQ ID NO: 2597405 - RNA, 19 nt, Human
acugccucgaaacacagaa

SEQ ID NO: 2597406 - RNA, 22 nt, Human
acugccucgggaaccucacucu

SEQ ID NO: 2597407 - RNA, 15 nt, Human
acugcauguuuguga

SEQ ID NO: 2597408 - RNA, 16 nt, Human
acugcauguuugugau

SEQ ID NO: 2597409 - RNA, 18 nt, Human
acugcaugcacuucuuac

SEQ ID NO: 2597410 - RNA, 13 nt, Human
acugcaugcugcu

SEQ ID NO: 2597411 - RNA, 16 nt, Human
acugcaugcugcugga

SEQ ID NO: 2597412 - RNA, 17 nt, Human
acugcaugcugcuggac

SEQ ID NO: 2597413 - RNA, 12 nt, Human
acugcaugcacu

SEQ ID NO: 2597414 - RNA, 14 nt, Human
acugcaugcacuuc

SEQ ID NO: 2597415 - RNA, 23 nt, Human
acugcauccuccgccucccgggu

SEQ ID NO: 2597416 - RNA, 22 nt, Human
acugcaucaagaugugacaugu

SEQ ID NO: 2597417 - RNA, 20 nt, Human
acugcaucaagaugugacau

SEQ ID NO: 2597418 - RNA, 20 nt, Human
acugcauacuuuuuaaaugu

SEQ ID NO: 2597419 - RNA, 23 nt, Human
acugcauacuuuuuaaauguaaa

SEQ ID NO: 2597420 - RNA, 17 nt, Human
acugcauccuccgccuc

SEQ ID NO: 2597421 - RNA, 20 nt, Human
acugcauccuccgccucccg

SEQ ID NO: 2597422 - RNA, 23 nt, Human
uccuagagaacgcagcccuagag

SEQ ID NO: 2597423 - RNA, 19 nt, Human
uccuagagaacgcagcccu

SEQ ID NO: 2597424 - RNA, 18 nt, Human
uccuagagaacgcagccc

SEQ ID NO: 2597425 - RNA, 17 nt, Human
uccuagagaacgcagcc

SEQ ID NO: 2597426 - RNA, 21 nt, Human
uccuagaaguuacugaaugca

SEQ ID NO: 2597427 - RNA, 20 nt, Human
uccuagaaguuacugaaugc

SEQ ID NO: 2597428 - RNA, 19 nt, Human
uccuagaaguuacugaaug

SEQ ID NO: 2597429 - RNA, 21 nt, Human
uccuagaaauuccccacccug

SEQ ID NO: 2597430 - RNA, 22 nt, Human
uccuagaaauuccccacccuga

SEQ ID NO: 2597431 - RNA, 13 nt, Human
acugcauacuuuu

SEQ ID NO: 2597432 - RNA, 16 nt, Human
acugcauacuuuuuaa

SEQ ID NO: 2597433 - RNA, 17 nt, Human
acugcauacuuuuuaaa

SEQ ID NO: 2597434 - RNA, 18 nt, Human
acugcauacuuuuuaaau

SEQ ID NO: 2597435 - RNA, 16 nt, Human
acugcauaugaaagga

SEQ ID NO: 2597436 - RNA, 19 nt, Human
uccuagagacagaagcagg

SEQ ID NO: 2597437 - RNA, 18 nt, Human
uccuagagacagaagcag

SEQ ID NO: 2597438 - RNA, 15 nt, Human
uccuagaggaccuga

SEQ ID NO: 2597439 - RNA, 14 nt, Human
uccuagaggaccug

SEQ ID NO: 2597440 - RNA, 17 nt, Human
uccuagagggaggggcc

SEQ ID NO: 2597441 - RNA, 20 nt, Human
uccuagagggaggggccuag

SEQ ID NO: 2597442 - RNA, 20 nt, Human
acugcauaccaaccugggca

SEQ ID NO: 2597443 - RNA, 22 nt, Human
acugcauaccaaccugggcaau

SEQ ID NO: 2597444 - RNA, 22 nt, Human
acugcucccugaagccagccuu

SEQ ID NO: 2597445 - RNA, 21 nt, Human
acugcucccugaagccagccu

SEQ ID NO: 2597446 - RNA, 20 nt, Human
acugcucccugaagccagcc

SEQ ID NO: 2597447 - RNA, 19 nt, Human
acugcucccugaagccagc

SEQ ID NO: 2597448 - RNA, 18 nt, Human
acugcucccugaagccag

SEQ ID NO: 2597449 - RNA, 17 nt, Human
acugcucccugaagcca

SEQ ID NO: 2597450 - RNA, 16 nt, Human
acugcucccugaagcc

SEQ ID NO: 2597451 - RNA, 15 nt, Human
acugcucccugaagc

SEQ ID NO: 2597452 - RNA, 23 nt, Human
acugcucccugaagccagccuuc

SEQ ID NO: 2597453 - RNA, 15 nt, Human
acugcuggcugccuu

SEQ ID NO: 2597454 - RNA, 14 nt, Human
acugcuggcugccu

SEQ ID NO: 2597455 - RNA, 20 nt, Human
acugcuggguggcccauccc

SEQ ID NO: 2597456 - RNA, 19 nt, Human
acugcuggguggcccaucc

SEQ ID NO: 2597457 - RNA, 18 nt, Human
acugcuggguggcccauc

SEQ ID NO: 2597458 - RNA, 17 nt, Human
acugcuggguggcccau

SEQ ID NO: 2597459 - RNA, 16 nt, Human
acugcuggguggccca

SEQ ID NO: 2597460 - RNA, 13 nt, Human
acugcuggguggc

SEQ ID NO: 2597461 - RNA, 12 nt, Human
acugcugggugg

SEQ ID NO: 2597462 - RNA, 13 nt, Human
acugcugggacug

SEQ ID NO: 2597463 - RNA, 18 nt, Human
acugcugggacuggccag

SEQ ID NO: 2597464 - RNA, 19 nt, Human
acugcugggacuggccagg

SEQ ID NO: 2597465 - RNA, 18 nt, Human
acugcuuaacuucacaua

SEQ ID NO: 2597466 - RNA, 21 nt, Human
acugcugugcugugcccaagu

SEQ ID NO: 2597467 - RNA, 22 nt, Human
acugcuguaaauaaaugcuuua

SEQ ID NO: 2597468 - RNA, 15 nt, Human
acugcuaaauaaaau

SEQ ID NO: 2597469 - RNA, 14 nt, Human
acugcuaaauaaaa

SEQ ID NO: 2597470 - RNA, 13 nt, Human
acugcuaaauaaa

SEQ ID NO: 2597471 - RNA, 23 nt, Human
acugccuucgcuucuugccucug

SEQ ID NO: 2597472 - RNA, 20 nt, Human
acugccuucucaacuccaaa

SEQ ID NO: 2597473 - RNA, 19 nt, Human
acugccuucucaacuccaa

SEQ ID NO: 2597474 - RNA, 13 nt, Human
acugccuucucaa

SEQ ID NO: 2597475 - RNA, 20 nt, Human
acugcuaaauaaaauuuguu

SEQ ID NO: 2597476 - RNA, 19 nt, Human
acugcuaaauaaaauuugu

SEQ ID NO: 2597477 - RNA, 17 nt, Human
acugcuaaauaaaauuu

SEQ ID NO: 2597478 - RNA, 16 nt, Human
acugcuaaauaaaauu

SEQ ID NO: 2597479 - RNA, 16 nt, Human
acugcuaagaauauuu

SEQ ID NO: 2597480 - RNA, 18 nt, Human
acugcuaagaauauuuga

SEQ ID NO: 2597481 - RNA, 21 nt, Human
acugcuccccagcccuggcuc

SEQ ID NO: 2597482 - RNA, 20 nt, Human
acugcuccccagcccuggcu

SEQ ID NO: 2597483 - RNA, 19 nt, Human
acugcuccccagcccuggc

SEQ ID NO: 2597484 - RNA, 13 nt, Human
acugcuacuguaa

SEQ ID NO: 2597485 - RNA, 19 nt, Human
acugcuaaguauuucccag

SEQ ID NO: 2597486 - RNA, 18 nt, Human
acugcuaaguauuuccca

SEQ ID NO: 2597487 - RNA, 17 nt, Human
acugcuaaguauuuccc

SEQ ID NO: 2597488 - RNA, 20 nt, Human
acugcuaaguauuucccagc

SEQ ID NO: 2597489 - RNA, 23 nt, Human
acugcuacaaauacucuuaggaa

SEQ ID NO: 2597490 - RNA, 19 nt, Human
acuggcacaguuuucugag

SEQ ID NO: 2597491 - RNA, 20 nt, Human
acuggcacaguuuucugaga

SEQ ID NO: 2597492 - RNA, 21 nt, Human
acuggcauugucccugugccu

SEQ ID NO: 2597493 - RNA, 17 nt, Human
acuggcauugucccugu

SEQ ID NO: 2597494 - RNA, 15 nt, Human
acuggccaccaggcu

SEQ ID NO: 2597495 - RNA, 14 nt, Human
acuggccaccaggc

SEQ ID NO: 2597496 - RNA, 16 nt, Human
acuggccacaguuguu

SEQ ID NO: 2597497 - RNA, 13 nt, Human
acuggcacaguuu

SEQ ID NO: 2597498 - RNA, 14 nt, Human
acuggaugaagauu

SEQ ID NO: 2597499 - RNA, 17 nt, Human
acuggaugcagaaacag

SEQ ID NO: 2597500 - RNA, 18 nt, Human
acuggaugcagaaacagu

SEQ ID NO: 2597501 - RNA, 15 nt, Human
acuggauuaaacuua

SEQ ID NO: 2597502 - RNA, 13 nt, Human
acuggaugaagau

SEQ ID NO: 2597503 - RNA, 22 nt, Human
acuggaugaaauaacuccuucu

SEQ ID NO: 2597504 - RNA, 11 nt, Human
acuggaugaaa

SEQ ID NO: 2597505 - RNA, 10 nt, Human
acuggaugaa

SEQ ID NO: 2597506 - RNA, 19 nt, Human
acuggaguucuaugcucuc

SEQ ID NO: 2597507 - RNA, 18 nt, Human
acuggauacugcccgggg

SEQ ID NO: 2597508 - RNA, 20 nt, Human
acugcuuaacuucacauauu

SEQ ID NO: 2597509 - RNA, 17 nt, Human
acugcuuccagugaggc

SEQ ID NO: 2597510 - RNA, 21 nt, Human
acugcuugugaaaggaaagag

SEQ ID NO: 2597511 - RNA, 16 nt, Human
acugcuuguguuuuua

SEQ ID NO: 2597512 - RNA, 15 nt, Human
acuggaguucuaugc

SEQ ID NO: 2597513 - RNA, 13 nt, Human
acuggaguucuau

SEQ ID NO: 2597514 - RNA, 17 nt, Human
acuggaguuacauuaau

SEQ ID NO: 2597515 - RNA, 16 nt, Human
acuggaguuacauuaa

SEQ ID NO: 2597516 - RNA, 15 nt, Human
acuggaguuacauua

SEQ ID NO: 2597517 - RNA, 14 nt, Human
acuggaguuacauu

SEQ ID NO: 2597518 - RNA, 17 nt, Human
acugcuuucuuucguuu

SEQ ID NO: 2597519 - RNA, 23 nt, Human
acugcuuucuuucguuuguuugu

SEQ ID NO: 2597520 - RNA, 19 nt, Human
acugcuucaugacauuccu

SEQ ID NO: 2597521 - RNA, 16 nt, Human
acugcuuguuuccuag

SEQ ID NO: 2597522 - RNA, 13 nt, Human
acugcuuguuucc

SEQ ID NO: 2597523 - RNA, 18 nt, Human
acugcuuguguuuuuaac

SEQ ID NO: 2597524 - RNA, 23 nt, Human
acugucccucaaaugacccaaag

SEQ ID NO: 2597525 - RNA, 15 nt, Human
acugugcuggagcca

SEQ ID NO: 2597526 - RNA, 18 nt, Human
acugucagccgggcccug

SEQ ID NO: 2597527 - RNA, 16 nt, Human
acugucccuugccuca

SEQ ID NO: 2597528 - RNA, 21 nt, Human
acugugcuggagccacuaacu

SEQ ID NO: 2597529 - RNA, 18 nt, Human
acugugcuggagccacua

SEQ ID NO: 2597530 - RNA, 22 nt, Human
acugugcuggagccacuaacua

SEQ ID NO: 2597531 - RNA, 22 nt, Human
acugugcuuucuauuguacaga

SEQ ID NO: 2597532 - RNA, 21 nt, Human
acugugcuuucuauuguacag

SEQ ID NO: 2597533 - RNA, 20 nt, Human
acugugcuuucuauuguaca

SEQ ID NO: 2597534 - RNA, 14 nt, Human
acugugcuuucuau

SEQ ID NO: 2597535 - RNA, 13 nt, Human
acugugcuuucua

SEQ ID NO: 2597536 - RNA, 12 nt, Human
acugugcuuucu

SEQ ID NO: 2597537 - RNA, 11 nt, Human
acugugcuuuc

SEQ ID NO: 2597538 - RNA, 14 nt, Human
acuguggaaaaaua

SEQ ID NO: 2597539 - RNA, 15 nt, Human
acuguggaaaaauau

SEQ ID NO: 2597540 - RNA, 17 nt, Human
acuguggaaaaauauuu

SEQ ID NO: 2597541 - RNA, 19 nt, Human
acuguggaaaaauauuuaa

SEQ ID NO: 2597542 - RNA, 18 nt, Human
acugucacuuugcucugg

SEQ ID NO: 2597543 - RNA, 15 nt, Human
acugucacuuugcuc

SEQ ID NO: 2597544 - RNA, 19 nt, Human
acugucacuuugcucuggg

SEQ ID NO: 2597545 - RNA, 16 nt, Human
acugucagccgggccc

SEQ ID NO: 2597546 - RNA, 20 nt, Human
acugucccucaaaugaccca

SEQ ID NO: 2597547 - RNA, 17 nt, Human
acuguccuacccacccu

SEQ ID NO: 2597548 - RNA, 23 nt, Human
acuguccuacccacccuccuuuc

SEQ ID NO: 2597549 - RNA, 18 nt, Human
acuguccuacccacccuc

SEQ ID NO: 2597550 - RNA, 18 nt, Human
acugggacaggggagaac

SEQ ID NO: 2597551 - RNA, 16 nt, Human
acugggagaaaugaaa

SEQ ID NO: 2597552 - RNA, 21 nt, Human
acuggcuuuuauuaaugcacu

SEQ ID NO: 2597553 - RNA, 20 nt, Human
acuggcuuuuauuaaugcac

SEQ ID NO: 2597554 - RNA, 23 nt, Human
acuggcuuuuauuaaugcacuuu

SEQ ID NO: 2597555 - RNA, 19 nt, Human
acugggaagauaggcucug

SEQ ID NO: 2597556 - RNA, 22 nt, Human
acugggaagauaggcucugcac

SEQ ID NO: 2597557 - RNA, 23 nt, Human
acugggaagauaggcucugcaca

SEQ ID NO: 2597558 - RNA, 16 nt, Human
acugggaagugacuua

SEQ ID NO: 2597559 - RNA, 15 nt, Human
acugucacuguuccu

SEQ ID NO: 2597560 - RNA, 24 nt, Human
acugucacucauugcugagccucu

SEQ ID NO: 2597561 - RNA, 21 nt, Human
acugggaccuuuagugguggc

SEQ ID NO: 2597562 - RNA, 23 nt, Human
acugucacucauugcugagccuc

SEQ ID NO: 2597563 - RNA, 21 nt, Human
acugucagcuccccucggaga

SEQ ID NO: 2597564 - RNA, 15 nt, Human
acugucacuguuucu

SEQ ID NO: 2597565 - RNA, 16 nt, Human
acugucacuguuucuc

SEQ ID NO: 2597566 - RNA, 20 nt, Human
acugucacuguuucucugcu

SEQ ID NO: 2597567 - RNA, 21 nt, Human
acugucacuguuucucugcug

SEQ ID NO: 2597568 - RNA, 18 nt, Human
acuguggaggaaggauug

SEQ ID NO: 2597569 - RNA, 17 nt, Human
acuguggaggaaggauu

SEQ ID NO: 2597570 - RNA, 16 nt, Human
acuguggaggaaggau

SEQ ID NO: 2597571 - RNA, 15 nt, Human
acuguggaggaagga

SEQ ID NO: 2597572 - RNA, 12 nt, Human
acuguggaggaa

SEQ ID NO: 2597573 - RNA, 18 nt, Human
acuguggguagacacaca

SEQ ID NO: 2597574 - RNA, 14 nt, Human
acugugguccuaug

SEQ ID NO: 2597575 - RNA, 12 nt, Human
acuguguacaua

SEQ ID NO: 2597576 - RNA, 16 nt, Human
acuguguacauaacug

SEQ ID NO: 2597577 - RNA, 18 nt, Human
acuguguacauaacugaa

SEQ ID NO: 2597578 - RNA, 21 nt, Human
acugugugcucaggagcccug

SEQ ID NO: 2597579 - RNA, 20 nt, Human
acugugugcucaggagcccu

SEQ ID NO: 2597580 - RNA, 19 nt, Human
acugugugcucaggagccc

SEQ ID NO: 2597581 - RNA, 15 nt, Human
acugugugcucagga

SEQ ID NO: 2597582 - RNA, 23 nt, Human
acuguguacaguaaauggcuuau

SEQ ID NO: 2597583 - RNA, 17 nt, Human
acuguguacauaacuga

SEQ ID NO: 2597584 - RNA, 12 nt, Human
acuguguauaga

SEQ ID NO: 2597585 - RNA, 15 nt, Human
acuguguauuccaag

SEQ ID NO: 2597586 - RNA, 16 nt, Human
acuguguauuccaaga

SEQ ID NO: 2597587 - RNA, 12 nt, Human
acugugugcuca

SEQ ID NO: 2597588 - RNA, 16 nt, Human
acuguguccuggugcu

SEQ ID NO: 2597589 - RNA, 14 nt, Human
acuguguccuggug

SEQ ID NO: 2597590 - RNA, 21 nt, Human
acuguguauuccaagacaugu

SEQ ID NO: 2597591 - RNA, 13 nt, Human
acuguguccuggu

SEQ ID NO: 2597592 - RNA, 22 nt, Human
ucggguuuuauuguuuaaaauc

SEQ ID NO: 2597593 - RNA, 21 nt, Human
ucgguaaguugaauggccugc

SEQ ID NO: 2597594 - RNA, 16 nt, Human
ucgggggcuggccuag

SEQ ID NO: 2597595 - RNA, 13 nt, Human
ucgggggcuggcc

SEQ ID NO: 2597596 - RNA, 12 nt, Human
ucgggcuccugu

SEQ ID NO: 2597597 - RNA, 16 nt, Human
ucggggggacagcucc

SEQ ID NO: 2597598 - RNA, 13 nt, Human
ucgggcccuuccc

SEQ ID NO: 2597599 - RNA, 12 nt, Human
ucgggcaugaca

SEQ ID NO: 2597600 - RNA, 11 nt, Human
ucgggcaugac

SEQ ID NO: 2597601 - RNA, 14 nt, Human
ucgggcccagcccc

SEQ ID NO: 2597602 - RNA, 12 nt, Human
ucgggcccagcc

SEQ ID NO: 2597603 - RNA, 11 nt, Human
ucgggcccagc

SEQ ID NO: 2597604 - RNA, 21 nt, Human
ucgggcccaccuggccaccug

SEQ ID NO: 2597605 - RNA, 17 nt, Human
ucgggcccaggccaucu

SEQ ID NO: 2597606 - RNA, 15 nt, Human
ucgggcccagccccc

SEQ ID NO: 2597607 - RNA, 18 nt, Human
ucgggcccaccuggccac

SEQ ID NO: 2597608 - RNA, 17 nt, Human
ucgggcccaccuggcca

SEQ ID NO: 2597609 - RNA, 14 nt, Human
ucgggcccaccugg

SEQ ID NO: 2597610 - RNA, 18 nt, Human
ucggcucacugcauccuc

SEQ ID NO: 2597611 - RNA, 10 nt, Human
acugugugug

SEQ ID NO: 2597612 - RNA, 19 nt, Human
acuguguggacugugaugc

SEQ ID NO: 2597613 - RNA, 21 nt, Human
acuguguccuggugcucucug

SEQ ID NO: 2597614 - RNA, 19 nt, Human
acugugugcagacucaaua

SEQ ID NO: 2597615 - RNA, 17 nt, Human
acuguguggacugugau

SEQ ID NO: 2597616 - RNA, 18 nt, Human
acuguguggacugugaug

SEQ ID NO: 2597617 - RNA, 14 nt, Human
ucggcuccugcugc

SEQ ID NO: 2597618 - RNA, 13 nt, Human
ucggcuccugcug

SEQ ID NO: 2597619 - RNA, 12 nt, Human
ucggcuccugcu

SEQ ID NO: 2597620 - RNA, 11 nt, Human
ucggcuccugc

SEQ ID NO: 2597621 - RNA, 14 nt, Human
ucggcucccuggag

SEQ ID NO: 2597622 - RNA, 12 nt, Human
ucggcucccugg

SEQ ID NO: 2597623 - RNA, 19 nt, Human
ucggcuccccauguguccu

SEQ ID NO: 2597624 - RNA, 18 nt, Human
ucggcuccugcugcacca

SEQ ID NO: 2597625 - RNA, 17 nt, Human
ucggcuccugcugcacc

SEQ ID NO: 2597626 - RNA, 16 nt, Human
ucggcuccugcugcac

SEQ ID NO: 2597627 - RNA, 15 nt, Human
ucggcuccugcugca

SEQ ID NO: 2597628 - RNA, 15 nt, Human
ucggcugaccaugcu

SEQ ID NO: 2597629 - RNA, 17 nt, Human
ucgggaggucgaggcag

SEQ ID NO: 2597630 - RNA, 16 nt, Human
ucggcugaccaugcuc

SEQ ID NO: 2597631 - RNA, 17 nt, Human
ucggcuuuucucagcug

SEQ ID NO: 2597632 - RNA, 14 nt, Human
ucgggaacaguguu

SEQ ID NO: 2597633 - RNA, 19 nt, Human
ucgggaggucgaggcagga

SEQ ID NO: 2597634 - RNA, 21 nt, Human
ucgggaggucgaggcaggagg

SEQ ID NO: 2597635 - RNA, 20 nt, Human
ucgguauccccccaucuugc

SEQ ID NO: 2597636 - RNA, 16 nt, Human
ucgguagguucagcca

SEQ ID NO: 2597637 - RNA, 13 nt, Human
ucgguacucccau

SEQ ID NO: 2597638 - RNA, 13 nt, Human
ucguaaaauuaag

SEQ ID NO: 2597639 - RNA, 22 nt, Human
ucgguggagacuaucagcccaa

SEQ ID NO: 2597640 - RNA, 16 nt, Human
ucguaaaauuaagaaa

SEQ ID NO: 2597641 - RNA, 23 nt, Human
ucgguuccacgucccccuggggc

SEQ ID NO: 2597642 - RNA, 15 nt, Human
ucgguuccacguccc

SEQ ID NO: 2597643 - RNA, 13 nt, Human
ucgguuucuccaa

SEQ ID NO: 2597644 - RNA, 19 nt, Human
ucguuucaaaaacacagug

SEQ ID NO: 2597645 - RNA, 19 nt, Human
ucgguuucuaacuuggagc

SEQ ID NO: 2597646 - RNA, 22 nt, Human
ucguuuucaaaauuguuacaaa

SEQ ID NO: 2597647 - RNA, 13 nt, Human
ucguuucuguaua

SEQ ID NO: 2597648 - RNA, 12 nt, Human
ucguuucuguau

SEQ ID NO: 2597649 - RNA, 21 nt, Human
ucguuucaaaaacacaguguu

SEQ ID NO: 2597650 - RNA, 17 nt, Human
ucguuugaaucacagua

SEQ ID NO: 2597651 - RNA, 20 nt, Human
ucuaaaacuaaauagcaugu

SEQ ID NO: 2597652 - RNA, 17 nt, Human
ucuaaaacuaaauagca

SEQ ID NO: 2597653 - RNA, 21 nt, Human
ucuaaaacuaaauagcaugua

SEQ ID NO: 2597654 - RNA, 15 nt, Human
ucuaaaacuaaauag

SEQ ID NO: 2597655 - RNA, 15 nt, Human
ucuaaaacaauaaaa

SEQ ID NO: 2597656 - RNA, 11 nt, Human
ucuaaaacaau

SEQ ID NO: 2597657 - RNA, 18 nt, Human
ucuaaaaaacagaggcca

SEQ ID NO: 2597658 - RNA, 14 nt, Human
ucuaaaaacaccaa

SEQ ID NO: 2597659 - RNA, 16 nt, Human
ucuaaaagguucaggg

SEQ ID NO: 2597660 - RNA, 17 nt, Human
ucuaaaagauccuuuuu

SEQ ID NO: 2597661 - RNA, 11 nt, Human
ucuaaaagaaa

SEQ ID NO: 2597662 - RNA, 23 nt, Human
ucuaaaagguucagggaaccguu

SEQ ID NO: 2597663 - RNA, 13 nt, Human
ucuaaaaugaguu

SEQ ID NO: 2597664 - RNA, 17 nt, Human
acuuaaauaaugugaaa

SEQ ID NO: 2597665 - RNA, 18 nt, Human
acuuaaauaaugugaaac

SEQ ID NO: 2597666 - RNA, 16 nt, Human
acuuaaauaaugugaa

SEQ ID NO: 2597667 - RNA, 15 nt, Human
acuuaaauaauguga

SEQ ID NO: 2597668 - RNA, 12 nt, Human
acuguuguauaa

SEQ ID NO: 2597669 - RNA, 17 nt, Human
acuuaauacuaccuuga

SEQ ID NO: 2597670 - RNA, 18 nt, Human
acuuaauacuaccuugaa

SEQ ID NO: 2597671 - RNA, 19 nt, Human
acuuaauacuaccuugaaa

SEQ ID NO: 2597672 - RNA, 21 nt, Human
acuuaauacuaccuugaaaau

SEQ ID NO: 2597673 - RNA, 17 nt, Human
acuuaauaauguguaca

SEQ ID NO: 2597674 - RNA, 13 nt, Human
acuuaauaaugug

SEQ ID NO: 2597675 - RNA, 20 nt, Human
acuguuguaacuaggcucag

SEQ ID NO: 2597676 - RNA, 15 nt, Human
acuuaaguuaaacau

SEQ ID NO: 2597677 - RNA, 17 nt, Human
acuuaagggagaaaaaa

SEQ ID NO: 2597678 - RNA, 19 nt, Human
acuuaaguugguccuuuac

SEQ ID NO: 2597679 - RNA, 13 nt, Human
acuuaauaaauuc

SEQ ID NO: 2597680 - RNA, 17 nt, Human
acuuaauaaauucagau

SEQ ID NO: 2597681 - RNA, 22 nt, Human
acuguugggguggguauaaaag

SEQ ID NO: 2597682 - RNA, 21 nt, Human
acuguugggguggguauaaaa

SEQ ID NO: 2597683 - RNA, 20 nt, Human
acuguugggguggguauaaa

SEQ ID NO: 2597684 - RNA, 21 nt, Human
acuguugcucaaaucuauuca

SEQ ID NO: 2597685 - RNA, 12 nt, Human
acuguugcucaa

SEQ ID NO: 2597686 - RNA, 21 nt, Human
acuguucucuucuugaacacu

SEQ ID NO: 2597687 - RNA, 18 nt, Human
acuguugggguggguaua

SEQ ID NO: 2597688 - RNA, 18 nt, Human
acuguugcccaggcuggc

SEQ ID NO: 2597689 - RNA, 17 nt, Human
acuguugcccaggcugg

SEQ ID NO: 2597690 - RNA, 14 nt, Human
acuguugcccaggc

SEQ ID NO: 2597691 - RNA, 13 nt, Human
acuguugcccagg

SEQ ID NO: 2597692 - RNA, 17 nt, Human
acuguucugugucuuuc

SEQ ID NO: 2597693 - RNA, 16 nt, Human
acuguucugugucuuu

SEQ ID NO: 2597694 - RNA, 15 nt, Human
acuguucugugucuu

SEQ ID NO: 2597695 - RNA, 13 nt, Human
acuguucuguguc

SEQ ID NO: 2597696 - RNA, 12 nt, Human
acuguugcccag

SEQ ID NO: 2597697 - RNA, 12 nt, Human
acuuagaggaaa

SEQ ID NO: 2597698 - RNA, 18 nt, Human
acuuagaauaaaauugua

SEQ ID NO: 2597699 - RNA, 17 nt, Human
acuuagaauaaaauugu

SEQ ID NO: 2597700 - RNA, 22 nt, Human
acuuagaauaaaauuguaaaau

SEQ ID NO: 2597701 - RNA, 16 nt, Human
acuuacuugcuuauuu

SEQ ID NO: 2597702 - RNA, 14 nt, Human
acuuacuugcuuau

SEQ ID NO: 2597703 - RNA, 15 nt, Human
acuuagaaagcaggg

SEQ ID NO: 2597704 - RNA, 16 nt, Human
acuuagaauaaaauug

SEQ ID NO: 2597705 - RNA, 15 nt, Human
acuuagaauaaaauu

SEQ ID NO: 2597706 - RNA, 19 nt, Human
acuuagaaagcaggggcua

SEQ ID NO: 2597707 - RNA, 16 nt, Human
acuuagaaagcagggg

SEQ ID NO: 2597708 - RNA, 16 nt, Human
acuuagaaauugcauu

SEQ ID NO: 2597709 - RNA, 17 nt, Human
acuuauaauuuuccuaa

SEQ ID NO: 2597710 - RNA, 20 nt, Human
acuuagugcggacaaguuuu

SEQ ID NO: 2597711 - RNA, 14 nt, Human
acuucagcucuguu

SEQ ID NO: 2597712 - RNA, 13 nt, Human
acuuaaucuaaau

SEQ ID NO: 2597713 - RNA, 14 nt, Human
acuuaauagaaaca

SEQ ID NO: 2597714 - RNA, 15 nt, Human
acuuaauagaaacau

SEQ ID NO: 2597715 - RNA, 18 nt, Human
acuuaaucaauuaauuuu

SEQ ID NO: 2597716 - RNA, 19 nt, Human
acuuaaucaauuaauuuuu

SEQ ID NO: 2597717 - RNA, 15 nt, Human
acuuaaucuaaaugg

SEQ ID NO: 2597718 - RNA, 16 nt, Human
acuuaaucuaaaugga

SEQ ID NO: 2597719 - RNA, 15 nt, Human
acuuaccuucaauaa

SEQ ID NO: 2597720 - RNA, 16 nt, Human
acuuaccuucaauaaa

SEQ ID NO: 2597721 - RNA, 19 nt, Human
acuuaccuaaacagauaua

SEQ ID NO: 2597722 - RNA, 17 nt, Human
acuuaccuagauuuaca

SEQ ID NO: 2597723 - RNA, 15 nt, Human
acuuacuugcuuauu

SEQ ID NO: 2597724 - RNA, 17 nt, Human
acuuaccuucaauaaag

SEQ ID NO: 2597725 - RNA, 19 nt, Human
acuuaccuucaauaaagua

SEQ ID NO: 2597726 - RNA, 20 nt, Human
acuuaccuucaauaaaguau

SEQ ID NO: 2597727 - RNA, 17 nt, Human
acuuacaugauucauuu

SEQ ID NO: 2597728 - RNA, 18 nt, Human
acuuacaugauucauuuu

SEQ ID NO: 2597729 - RNA, 19 nt, Human
acuuacaugauucauuuua

SEQ ID NO: 2597730 - RNA, 14 nt, Human
acuuacaugauuca

SEQ ID NO: 2597731 - RNA, 23 nt, Human
acuuacauuguucaauuagaaua

SEQ ID NO: 2597732 - RNA, 21 nt, Human
acuuaccgugagcgacaaaga

SEQ ID NO: 2597733 - RNA, 16 nt, Human
acuuaccauaugugcu

SEQ ID NO: 2597734 - RNA, 21 nt, Human
ucuaaguaaaaccacagcagu

SEQ ID NO: 2597735 - RNA, 22 nt, Human
ucuaaguaaaaccacagcaguu

SEQ ID NO: 2597736 - RNA, 21 nt, Human
ucuacagugguuuuauacuga

SEQ ID NO: 2597737 - RNA, 13 nt, Human
ucuacagugguuu

SEQ ID NO: 2597738 - RNA, 12 nt, Human
ucuacagugguu

SEQ ID NO: 2597739 - RNA, 23 nt, Human
ucuaaguaaaaccacagcaguug

SEQ ID NO: 2597740 - RNA, 20 nt, Human
ucuacauaaguaauucaaga

SEQ ID NO: 2597741 - RNA, 17 nt, Human
ucuacauaaguaauuca

SEQ ID NO: 2597742 - RNA, 16 nt, Human
ucuacauacuauggaa

SEQ ID NO: 2597743 - RNA, 14 nt, Human
ucuaaagcugccag

SEQ ID NO: 2597744 - RNA, 13 nt, Human
ucuaaagcugcca

SEQ ID NO: 2597745 - RNA, 20 nt, Human
ucuaaagccauuguaguccu

SEQ ID NO: 2597746 - RNA, 15 nt, Human
ucuaaagcugccagc

SEQ ID NO: 2597747 - RNA, 18 nt, Human
ucuaaagccuuaagucuu

SEQ ID NO: 2597748 - RNA, 16 nt, Human
ucuaaagcugccagcc

SEQ ID NO: 2597749 - RNA, 20 nt, Human
ucuaaggaugucacagggcc

SEQ ID NO: 2597750 - RNA, 23 nt, Human
ucuaaggaugucacagggccaac

SEQ ID NO: 2597751 - RNA, 19 nt, Human
ucuaaggaugucacagggc

SEQ ID NO: 2597752 - RNA, 18 nt, Human
ucuaagccuuuccauaag

SEQ ID NO: 2597753 - RNA, 16 nt, Human
acuguucccugaggug

SEQ ID NO: 2597754 - RNA, 19 nt, Human
acuguucccugagguggga

SEQ ID NO: 2597755 - RNA, 13 nt, Human
acuguuauuuaua

SEQ ID NO: 2597756 - RNA, 18 nt, Human
acuguucccucugcuccu

SEQ ID NO: 2597757 - RNA, 14 nt, Human
acuguucucugccc

SEQ ID NO: 2597758 - RNA, 22 nt, Human
acuguucccucugcuccuggag

SEQ ID NO: 2597759 - RNA, 20 nt, Human
acuguucccucugcuccugg

SEQ ID NO: 2597760 - RNA, 20 nt, Human
acuguucucugcccuccaag

SEQ ID NO: 2597761 - RNA, 15 nt, Human
acuguucucugcccu

SEQ ID NO: 2597762 - RNA, 21 nt, Human
acuguucucugcccuccaaga

SEQ ID NO: 2597763 - RNA, 18 nt, Human
acuguucucuucuugaac

SEQ ID NO: 2597764 - RNA, 22 nt, Human
ucuacagugguuuuauacugaa

SEQ ID NO: 2597765 - RNA, 23 nt, Human
ucuacagugguuuuauacugaag

SEQ ID NO: 2597766 - RNA, 22 nt, Human
ucuacauaaguaauucaagaaa

SEQ ID NO: 2597767 - RNA, 13 nt, Human
ucuaccagacugu

SEQ ID NO: 2597768 - RNA, 20 nt, Human
ucuaccaagcuauccuggcu

SEQ ID NO: 2597769 - RNA, 22 nt, Human
ucuaccagccucccuauuuuuu

SEQ ID NO: 2597770 - RNA, 17 nt, Human
ucuaccagacuguguau

SEQ ID NO: 2597771 - RNA, 16 nt, Human
ucuaccagacugugua

SEQ ID NO: 2597772 - RNA, 19 nt, Human
ucuaccaugaacagaaaac

SEQ ID NO: 2597773 - RNA, 14 nt, Human
ucuaccauuucaga

SEQ ID NO: 2597774 - RNA, 15 nt, Human
ucuaccauuucagag

SEQ ID NO: 2597775 - RNA, 18 nt, Human
ucuaccauuucagagagg

SEQ ID NO: 2597776 - RNA, 21 nt, Human
ucuaccagacuguguauucau

SEQ ID NO: 2597777 - RNA, 23 nt, Human
acuguuaccugaucaaugacaga

SEQ ID NO: 2597778 - RNA, 21 nt, Human
acuguuaccugaucaaugaca

SEQ ID NO: 2597779 - RNA, 22 nt, Human
ucuacccagagaagccccuucc

SEQ ID NO: 2597780 - RNA, 21 nt, Human
ucuacccaaaggauacuguaa

SEQ ID NO: 2597781 - RNA, 13 nt, Human
ucuacccaaagga

SEQ ID NO: 2597782 - RNA, 20 nt, Human
acuguuagaaaauggacacu

SEQ ID NO: 2597783 - RNA, 23 nt, Human
acuguuaugaaauaaagaaauug

SEQ ID NO: 2597784 - RNA, 19 nt, Human
acuguuaugaaauaaagaa

SEQ ID NO: 2597785 - RNA, 21 nt, Human
ucuccuccuuuucacaguucu

SEQ ID NO: 2597786 - RNA, 23 nt, Human
ucuccucccuuccuuuucccugc

SEQ ID NO: 2597787 - RNA, 14 nt, Human
ucuccuccugccca

SEQ ID NO: 2597788 - RNA, 16 nt, Human
ucuccuccugcccacc

SEQ ID NO: 2597789 - RNA, 16 nt, Human
ucuccucgcaagcugg

SEQ ID NO: 2597790 - RNA, 21 nt, Human
ucuccucggcccccuccaucg

SEQ ID NO: 2597791 - RNA, 14 nt, Human
ucuccucggccccc

SEQ ID NO: 2597792 - RNA, 16 nt, Human
ucuccucucagccccu

SEQ ID NO: 2597793 - RNA, 13 nt, Human
ucuccucuccccu

SEQ ID NO: 2597794 - RNA, 14 nt, Human
ucuccucccuuccu

SEQ ID NO: 2597795 - RNA, 13 nt, Human
ucuccucccuucc

SEQ ID NO: 2597796 - RNA, 18 nt, Human
ucuccuccccacccgccc

SEQ ID NO: 2597797 - RNA, 15 nt, Human
ucuccuccccacccg

SEQ ID NO: 2597798 - RNA, 12 nt, Human
ucuccuccccaa

SEQ ID NO: 2597799 - RNA, 12 nt, Human
ucuccucccagg

SEQ ID NO: 2597800 - RNA, 16 nt, Human
ucuccuccaugggaga

SEQ ID NO: 2597801 - RNA, 19 nt, Human
ucuccuauguguaagguga

SEQ ID NO: 2597802 - RNA, 20 nt, Human
ucuccuccaugggagaaaau

SEQ ID NO: 2597803 - RNA, 15 nt, Human
ucuccuauguguaag

SEQ ID NO: 2597804 - RNA, 14 nt, Human
ucuccuauguguaa

SEQ ID NO: 2597805 - RNA, 20 nt, Human
ucuccucaaguccccaagau

SEQ ID NO: 2597806 - RNA, 16 nt, Human
acuuguguuuugcaag

SEQ ID NO: 2597807 - RNA, 16 nt, Human
ucuccucuccccucua

SEQ ID NO: 2597808 - RNA, 23 nt, Human
acuugugugugggcugugagugu

SEQ ID NO: 2597809 - RNA, 15 nt, Human
acuuguuccagcucu

SEQ ID NO: 2597810 - RNA, 16 nt, Human
acuuguuccagcucuu

SEQ ID NO: 2597811 - RNA, 15 nt, Human
acuuuaaaauaaaau

SEQ ID NO: 2597812 - RNA, 17 nt, Human
acuuucuagccagagga

SEQ ID NO: 2597813 - RNA, 17 nt, Human
acuuucuauccucugua

SEQ ID NO: 2597814 - RNA, 13 nt, Human
acuuucucaguuu

SEQ ID NO: 2597815 - RNA, 16 nt, Human
acuuucuagccagagg

SEQ ID NO: 2597816 - RNA, 14 nt, Human
acuuugaccucugc

SEQ ID NO: 2597817 - RNA, 14 nt, Human
acuuucucaguuuu

SEQ ID NO: 2597818 - RNA, 17 nt, Human
acuuucucaguuuucau

SEQ ID NO: 2597819 - RNA, 20 nt, Human
acuuuaaaggaaaaaauguu

SEQ ID NO: 2597820 - RNA, 21 nt, Human
acuuuaaaggaaaaaauguug

SEQ ID NO: 2597821 - RNA, 12 nt, Human
acuuuaaaggaa

SEQ ID NO: 2597822 - RNA, 21 nt, Human
acuuguucaaaauauguucuu

SEQ ID NO: 2597823 - RNA, 17 nt, Human
acuuuaagacugagcac

SEQ ID NO: 2597824 - RNA, 15 nt, Human
acuuuaagcacuaca

SEQ ID NO: 2597825 - RNA, 14 nt, Human
acuuuaagcacuac

SEQ ID NO: 2597826 - RNA, 13 nt, Human
acuuuaagcacua

SEQ ID NO: 2597827 - RNA, 14 nt, Human
acuuuaagaggaca

SEQ ID NO: 2597828 - RNA, 15 nt, Human
acuuuaaguuucagg

SEQ ID NO: 2597829 - RNA, 23 nt, Human
acuuuaagcagcucuugcuaauc

SEQ ID NO: 2597830 - RNA, 19 nt, Human
acuuuaagcagcucuugcu

SEQ ID NO: 2597831 - RNA, 16 nt, Human
acuuuaagcacuacau

SEQ ID NO: 2597832 - RNA, 19 nt, Human
acuuuaauuaccaaccugu

SEQ ID NO: 2597833 - RNA, 18 nt, Human
acuuuaaguuucaggaua

SEQ ID NO: 2597834 - RNA, 23 nt, Human
ucuccuauccugguuuuuguagc

SEQ ID NO: 2597835 - RNA, 17 nt, Human
ucuccuagacugacccu

SEQ ID NO: 2597836 - RNA, 20 nt, Human
ucuccuagagacagaagcag

SEQ ID NO: 2597837 - RNA, 19 nt, Human
ucuccuagagacagaagca

SEQ ID NO: 2597838 - RNA, 23 nt, Human
ucuccuagacugacccugaucag

SEQ ID NO: 2597839 - RNA, 23 nt, Human
ucuccguuagcuccuguggcccc

SEQ ID NO: 2597840 - RNA, 22 nt, Human
ucuccguuagcuccuguggccc

SEQ ID NO: 2597841 - RNA, 21 nt, Human
ucuccguuagcuccuguggcc

SEQ ID NO: 2597842 - RNA, 20 nt, Human
ucuccguuagcuccuguggc

SEQ ID NO: 2597843 - RNA, 11 nt, Human
ucuccccacac

SEQ ID NO: 2597844 - RNA, 13 nt, Human
ucuccccacacua

SEQ ID NO: 2597845 - RNA, 20 nt, Human
ucucccauggagccccagcc

SEQ ID NO: 2597846 - RNA, 18 nt, Human
ucucccauggagccccag

SEQ ID NO: 2597847 - RNA, 15 nt, Human
ucucccauggagccc

SEQ ID NO: 2597848 - RNA, 22 nt, Human
ucucccaucccccugcccucgu

SEQ ID NO: 2597849 - RNA, 22 nt, Human
ucucccauggagccccagcccc

SEQ ID NO: 2597850 - RNA, 21 nt, Human
ucucccauggagccccagccc

SEQ ID NO: 2597851 - RNA, 22 nt, Human
ucucccauggcuuaaugcuucu

SEQ ID NO: 2597852 - RNA, 17 nt, Human
ucucccauugucccucu

SEQ ID NO: 2597853 - RNA, 18 nt, Human
ucucccauugucccucug

SEQ ID NO: 2597854 - RNA, 19 nt, Human
ucucccauugucccucugc

SEQ ID NO: 2597855 - RNA, 10 nt, Human
ucuccccaca

SEQ ID NO: 2597856 - RNA, 18 nt, Human
ucucccaucccccugccc

SEQ ID NO: 2597857 - RNA, 17 nt, Human
ucucccaucccccugcc

SEQ ID NO: 2597858 - RNA, 15 nt, Human
ucucccaucccccug

SEQ ID NO: 2597859 - RNA, 14 nt, Human
ucucccaucccccu

SEQ ID NO: 2597860 - RNA, 20 nt, Human
ucucccaucccccugcccuc

SEQ ID NO: 2597861 - RNA, 19 nt, Human
ucucccaucccccugcccu

SEQ ID NO: 2597862 - RNA, 13 nt, Human
ucucccauggagc

SEQ ID NO: 2597863 - RNA, 23 nt, Human
ucucccauccagugucucacagc

SEQ ID NO: 2597864 - RNA, 11 nt, Human
ucucccaggaa

SEQ ID NO: 2597865 - RNA, 17 nt, Human
ucucccagcucuagaca

SEQ ID NO: 2597866 - RNA, 13 nt, Human
ucucccauccccc

SEQ ID NO: 2597867 - RNA, 12 nt, Human
ucucccaucccc

SEQ ID NO: 2597868 - RNA, 11 nt, Human
ucucccauccc

SEQ ID NO: 2597869 - RNA, 19 nt, Human
ucuccauggcuuccuccuc

SEQ ID NO: 2597870 - RNA, 20 nt, Human
ucuccauggccaccuuuuca

SEQ ID NO: 2597871 - RNA, 20 nt, Human
ucuccauggcuuccuccucc

SEQ ID NO: 2597872 - RNA, 17 nt, Human
ucuccauggcuuccucc

SEQ ID NO: 2597873 - RNA, 16 nt, Human
ucuccauguuugaugu

SEQ ID NO: 2597874 - RNA, 15 nt, Human
ucuccauggcccugc

SEQ ID NO: 2597875 - RNA, 18 nt, Human
ucuccauggcccugcaaa

SEQ ID NO: 2597876 - RNA, 15 nt, Human
ucuccauggccaccu

SEQ ID NO: 2597877 - RNA, 18 nt, Human
ucuccaucuucagcuucu

SEQ ID NO: 2597878 - RNA, 14 nt, Human
ucuccauggcccug

SEQ ID NO: 2597879 - RNA, 14 nt, Human
ucuccaucuguuug

SEQ ID NO: 2597880 - RNA, 18 nt, Human
ucuccaucucucuggccc

SEQ ID NO: 2597881 - RNA, 17 nt, Human
ucuccaucuggcagggu

SEQ ID NO: 2597882 - RNA, 15 nt, Human
ucucccaccccugcc

SEQ ID NO: 2597883 - RNA, 16 nt, Human
ucucccacgugggaga

SEQ ID NO: 2597884 - RNA, 15 nt, Human
ucucccacgugggag

SEQ ID NO: 2597885 - RNA, 14 nt, Human
ucucccacguggga

SEQ ID NO: 2597886 - RNA, 14 nt, Human
ucucccaccuagca

SEQ ID NO: 2597887 - RNA, 16 nt, Human
ucucccagauaaugug

SEQ ID NO: 2597888 - RNA, 18 nt, Human
ucucccagauaaugugaa

SEQ ID NO: 2597889 - RNA, 21 nt, Human
ucucccagauaaugugaaaau

SEQ ID NO: 2597890 - RNA, 23 nt, Human
ucucccagauaaugugaaaaugg

SEQ ID NO: 2597891 - RNA, 19 nt, Human
ucucccacuagacaagucc

SEQ ID NO: 2597892 - RNA, 12 nt, Human
ucucagggccug

SEQ ID NO: 2597893 - RNA, 13 nt, Human
ucucagggccugg

SEQ ID NO: 2597894 - RNA, 12 nt, Human
ucucaggaaauc

SEQ ID NO: 2597895 - RNA, 14 nt, Human
ucucaggcucugcc

SEQ ID NO: 2597896 - RNA, 15 nt, Human
ucucaggcucugccc

SEQ ID NO: 2597897 - RNA, 17 nt, Human
ucucaggcucugcccug

SEQ ID NO: 2597898 - RNA, 18 nt, Human
ucucaggcuggugggagg

SEQ ID NO: 2597899 - RNA, 19 nt, Human
ucucaggcucugcccugcc

SEQ ID NO: 2597900 - RNA, 20 nt, Human
ucucaggcucugcccugccc

SEQ ID NO: 2597901 - RNA, 19 nt, Human
ucucagcucuucugacuua

SEQ ID NO: 2597902 - RNA, 22 nt, Human
ucucagcucccccuguccccuc

SEQ ID NO: 2597903 - RNA, 21 nt, Human
ucucagcucccccuguccccu

SEQ ID NO: 2597904 - RNA, 19 nt, Human
ucucagcucccccuguccc

SEQ ID NO: 2597905 - RNA, 18 nt, Human
ucucagcucccccugucc

SEQ ID NO: 2597906 - RNA, 17 nt, Human
ucucagcucccccuguc

SEQ ID NO: 2597907 - RNA, 22 nt, Human
ucucagcucccauuucuacucu

SEQ ID NO: 2597908 - RNA, 21 nt, Human
ucucagcuccagguggcucug

SEQ ID NO: 2597909 - RNA, 16 nt, Human
ucucagcuccaggugg

SEQ ID NO: 2597910 - RNA, 18 nt, Human
ucucagcucccauuucua

SEQ ID NO: 2597911 - RNA, 17 nt, Human
ucucagcucccauuucu

SEQ ID NO: 2597912 - RNA, 11 nt, Human
ucucagcuccc

SEQ ID NO: 2597913 - RNA, 15 nt, Human
acuuguggacacagc

SEQ ID NO: 2597914 - RNA, 12 nt, Human
ucucagccuccc

SEQ ID NO: 2597915 - RNA, 13 nt, Human
ucucagccuccca

SEQ ID NO: 2597916 - RNA, 19 nt, Human
ucucagggccuggucguuu

SEQ ID NO: 2597917 - RNA, 11 nt, Human
ucucagggcuc

SEQ ID NO: 2597918 - RNA, 19 nt, Human
ucucaggcuggugggaggg

SEQ ID NO: 2597919 - RNA, 14 nt, Human
ucucagggccuggu

SEQ ID NO: 2597920 - RNA, 15 nt, Human
ucucagggccugguc

SEQ ID NO: 2597921 - RNA, 16 nt, Human
ucucauuacuuuugaa

SEQ ID NO: 2597922 - RNA, 12 nt, Human
ucucagggcucc

SEQ ID NO: 2597923 - RNA, 16 nt, Human
ucucauuccagaggaa

SEQ ID NO: 2597924 - RNA, 17 nt, Human
ucucauuccaacaguga

SEQ ID NO: 2597925 - RNA, 19 nt, Human
ucucauuccaacagugagu

SEQ ID NO: 2597926 - RNA, 13 nt, Human
ucucauuccccag

SEQ ID NO: 2597927 - RNA, 19 nt, Human
ucucauuggacccuuccau

SEQ ID NO: 2597928 - RNA, 16 nt, Human
ucucauuccccaggug

SEQ ID NO: 2597929 - RNA, 15 nt, Human
ucucauugcuuacaa

SEQ ID NO: 2597930 - RNA, 14 nt, Human
ucucauuccccagg

SEQ ID NO: 2597931 - RNA, 17 nt, Human
ucuccaaaauaaaacuu

SEQ ID NO: 2597932 - RNA, 19 nt, Human
ucuccaaaauaaaacuuuu

SEQ ID NO: 2597933 - RNA, 22 nt, Human
ucuccaaacugaagcagccucu

SEQ ID NO: 2597934 - RNA, 13 nt, Human
ucuccaaaauaaa

SEQ ID NO: 2597935 - RNA, 22 nt, Human
ucuccaaaauaaaacuuuuuaa

SEQ ID NO: 2597936 - RNA, 20 nt, Human
ucuccaaccccccagcacug

SEQ ID NO: 2597937 - RNA, 19 nt, Human
ucuccaaccccccagcacu

SEQ ID NO: 2597938 - RNA, 18 nt, Human
ucuccaaccccccagcac

SEQ ID NO: 2597939 - RNA, 17 nt, Human
ucuccaaccccccagca

SEQ ID NO: 2597940 - RNA, 23 nt, Human
ucuccaaacugaagcagccucuc

SEQ ID NO: 2597941 - RNA, 12 nt, Human
ucuccaaaugag

SEQ ID NO: 2597942 - RNA, 24 nt, Human
ucuccaaaugagaucuaagccuuu

SEQ ID NO: 2597943 - RNA, 22 nt, Human
ucuccaaccccccagcacugag

SEQ ID NO: 2597944 - RNA, 21 nt, Human
ucuccaaccccccagcacuga

SEQ ID NO: 2597945 - RNA, 23 nt, Human
ucuccaaccccccagcacugagg

SEQ ID NO: 2597946 - RNA, 15 nt, Human
ucuccaaccuggaca

SEQ ID NO: 2597947 - RNA, 16 nt, Human
ucuccaucucucuggc

SEQ ID NO: 2597948 - RNA, 14 nt, Human
ucuccaucucucug

SEQ ID NO: 2597949 - RNA, 11 nt, Human
ucuccaucucu

SEQ ID NO: 2597950 - RNA, 22 nt, Human
ucuccauccuuucugccucuca

SEQ ID NO: 2597951 - RNA, 19 nt, Human
ucuccauccuuucugccuc

SEQ ID NO: 2597952 - RNA, 17 nt, Human
ucuccauccuuucugcc

SEQ ID NO: 2597953 - RNA, 19 nt, Human
ucuccauccacaugggagc

SEQ ID NO: 2597954 - RNA, 13 nt, Human
ucuccauccacau

SEQ ID NO: 2597955 - RNA, 17 nt, Human
ucuccaucagcuguaag

SEQ ID NO: 2597956 - RNA, 15 nt, Human
ucuccauauguuaca

SEQ ID NO: 2597957 - RNA, 13 nt, Human
ucuccaucagcug

SEQ ID NO: 2597958 - RNA, 17 nt, Human
ucuccagugguugcugu

SEQ ID NO: 2597959 - RNA, 18 nt, Human
ucuccagugguugcuguu

SEQ ID NO: 2597960 - RNA, 21 nt, Human
ucuccagggaguccccucccc

SEQ ID NO: 2597961 - RNA, 15 nt, Human
ucuccaguuuucagu

SEQ ID NO: 2597962 - RNA, 20 nt, Human
ucuccauaaccccacccuug

SEQ ID NO: 2597963 - RNA, 18 nt, Human
ucuccauaaccccacccu

SEQ ID NO: 2597964 - RNA, 17 nt, Human
ucuccauaaccccaccc

SEQ ID NO: 2597965 - RNA, 20 nt, Human
ucuccagugguugcuguuga

SEQ ID NO: 2597966 - RNA, 22 nt, Human
ucuccauaaccccacccuugcc

SEQ ID NO: 2597967 - RNA, 21 nt, Human
ucuccauaaccccacccuugc

SEQ ID NO: 2597968 - RNA, 23 nt, Human
ucuccauaaccccacccuugccc

SEQ ID NO: 2597969 - RNA, 14 nt, Human
ucuccauauguuac

SEQ ID NO: 2597970 - RNA, 17 nt, Human
ucuccaagaaugcugaa

SEQ ID NO: 2597971 - RNA, 16 nt, Human
ucuccaagaaugcuga

SEQ ID NO: 2597972 - RNA, 15 nt, Human
ucuccaagaaugcug

SEQ ID NO: 2597973 - RNA, 14 nt, Human
ucuccaagaaugcu

SEQ ID NO: 2597974 - RNA, 20 nt, Human
ucuccagggaguccccuccc

SEQ ID NO: 2597975 - RNA, 18 nt, Human
ucuccaagaaugcugaaa

SEQ ID NO: 2597976 - RNA, 16 nt, Human
ucuccaggcuguaucc

SEQ ID NO: 2597977 - RNA, 22 nt, Human
ucuccaggggcugcuuccuccu

SEQ ID NO: 2597978 - RNA, 20 nt, Human
ucuccaggggcugcuuccuc

SEQ ID NO: 2597979 - RNA, 18 nt, Human
ucuccaggggcugcuucc

SEQ ID NO: 2597980 - RNA, 17 nt, Human
ucuccaggggcugcuuc

SEQ ID NO: 2597981 - RNA, 23 nt, Human
ucuccaggggcugcuuccuccug

SEQ ID NO: 2597982 - RNA, 19 nt, Human
ucuccaguauccacuuugc

SEQ ID NO: 2597983 - RNA, 19 nt, Human
ucuccaggucucacgggca

SEQ ID NO: 2597984 - RNA, 21 nt, Human
acuugaacccauauuuguaca

SEQ ID NO: 2597985 - RNA, 19 nt, Human
acuugaacccgggaggcag

SEQ ID NO: 2597986 - RNA, 20 nt, Human
acuugaacccgggaggcaga

SEQ ID NO: 2597987 - RNA, 16 nt, Human
acuucuccacccugcu

SEQ ID NO: 2597988 - RNA, 15 nt, Human
acuucuccacccugc

SEQ ID NO: 2597989 - RNA, 16 nt, Human
acuugaaucaaagcag

SEQ ID NO: 2597990 - RNA, 22 nt, Human
acuugaaguuguuacuaacuaa

SEQ ID NO: 2597991 - RNA, 20 nt, Human
acuugaaguuguuacuaacu

SEQ ID NO: 2597992 - RNA, 13 nt, Human
acuugaaguuguu

SEQ ID NO: 2597993 - RNA, 12 nt, Human
acuugaaguugu

SEQ ID NO: 2597994 - RNA, 11 nt, Human
acuugaaguug

SEQ ID NO: 2597995 - RNA, 21 nt, Human
acuugaagggccagagccagg

SEQ ID NO: 2597996 - RNA, 22 nt, Human
acuugaagggccagagccaggg

SEQ ID NO: 2597997 - RNA, 17 nt, Human
acuugaagggccagagc

SEQ ID NO: 2597998 - RNA, 18 nt, Human
acuugaagggccagagcc

SEQ ID NO: 2597999 - RNA, 19 nt, Human
acuugaagggccagagcca

SEQ ID NO: 2598000 - RNA, 20 nt, Human
acuugaagggccagagccag

SEQ ID NO: 2598001 - RNA, 15 nt, Human
acuugaagggccaga

SEQ ID NO: 2598002 - RNA, 14 nt, Human
acuugaagggccag

SEQ ID NO: 2598003 - RNA, 21 nt, Human
acuugaacccgggaggcagag

SEQ ID NO: 2598004 - RNA, 19 nt, Human
acuugagcccagagugaac

SEQ ID NO: 2598005 - RNA, 19 nt, Human
acuugaauccuagggccug

SEQ ID NO: 2598006 - RNA, 12 nt, Human
acuugagaggau

SEQ ID NO: 2598007 - RNA, 19 nt, Human
acuugagaggaugaaugua

SEQ ID NO: 2598008 - RNA, 16 nt, Human
acuugagaggaugaau

SEQ ID NO: 2598009 - RNA, 20 nt, Human
acuugagcaccgucauggcu

SEQ ID NO: 2598010 - RNA, 15 nt, Human
acuugagcuuuaaaa

SEQ ID NO: 2598011 - RNA, 20 nt, Human
acuuggcucgaaucucugug

SEQ ID NO: 2598012 - RNA, 19 nt, Human
acuuggcucgaaucucugu

SEQ ID NO: 2598013 - RNA, 18 nt, Human
acuuggcucgaaucucug

SEQ ID NO: 2598014 - RNA, 17 nt, Human
acuuggcuacacaggga

SEQ ID NO: 2598015 - RNA, 16 nt, Human
acuugucaauaaaauc

SEQ ID NO: 2598016 - RNA, 14 nt, Human
acuugucaauauuu

SEQ ID NO: 2598017 - RNA, 13 nt, Human
acuugucaauauu

SEQ ID NO: 2598018 - RNA, 21 nt, Human
acuuggcucgaaucucugugc

SEQ ID NO: 2598019 - RNA, 17 nt, Human
acuugucaauauuuaaa

SEQ ID NO: 2598020 - RNA, 16 nt, Human
acuugucaauauuuaa

SEQ ID NO: 2598021 - RNA, 20 nt, Human
acuugucaauauuuaaacau

SEQ ID NO: 2598022 - RNA, 13 nt, Human
acuugucauguga

SEQ ID NO: 2598023 - RNA, 18 nt, Human
acuuguggacacagcucu

SEQ ID NO: 2598024 - RNA, 17 nt, Human
acuuguggacacagcuc

SEQ ID NO: 2598025 - RNA, 18 nt, Human
acuugucccacuaucugg

SEQ ID NO: 2598026 - RNA, 17 nt, Human
acuuguccccaaauccg

SEQ ID NO: 2598027 - RNA, 22 nt, Human
acuuguccccaaauccgaaccu

SEQ ID NO: 2598028 - RNA, 16 nt, Human
acuuguggacacagcu

SEQ ID NO: 2598029 - RNA, 16 nt, Human
acuuggcaacagaagc

SEQ ID NO: 2598030 - RNA, 15 nt, Human
acuuggcaacagaag

SEQ ID NO: 2598031 - RNA, 18 nt, Human
acuuggcaucagcuggcg

SEQ ID NO: 2598032 - RNA, 19 nt, Human
acuuggccaagcagggagg

SEQ ID NO: 2598033 - RNA, 10 nt, Human
acuuggccaa

SEQ ID NO: 2598034 - RNA, 14 nt, Human
acuuggccucugga

SEQ ID NO: 2598035 - RNA, 20 nt, Human
acuuggaggguugguccucu

SEQ ID NO: 2598036 - RNA, 11 nt, Human
acuuggagccg

SEQ ID NO: 2598037 - RNA, 19 nt, Human
acuuggagccccagugcca

SEQ ID NO: 2598038 - RNA, 14 nt, Human
acuugcucuugaug

SEQ ID NO: 2598039 - RNA, 14 nt, Human
acuuggagccccag

SEQ ID NO: 2598040 - RNA, 17 nt, Human
acuugccucuuccuuga

SEQ ID NO: 2598041 - RNA, 13 nt, Human
acuugccucuucc

SEQ ID NO: 2598042 - RNA, 23 nt, Human
acuugagcuuuaaaaaucauugu

SEQ ID NO: 2598043 - RNA, 20 nt, Human
acuugccuucuucacccagc

SEQ ID NO: 2598044 - RNA, 23 nt, Human
acuugcucucuggccuuuuccua

SEQ ID NO: 2598045 - RNA, 14 nt, Human
ucuauuucuccucc

SEQ ID NO: 2598046 - RNA, 15 nt, Human
ucuauuucuccucca

SEQ ID NO: 2598047 - RNA, 16 nt, Human
ucuauuucuccuccau

SEQ ID NO: 2598048 - RNA, 20 nt, Human
ucuauuucuccuccauggga

SEQ ID NO: 2598049 - RNA, 11 nt, Human
ucuauuucuag

SEQ ID NO: 2598050 - RNA, 15 nt, Human
ucuauuuccuggaau

SEQ ID NO: 2598051 - RNA, 14 nt, Human
ucucacacccaccg

SEQ ID NO: 2598052 - RNA, 13 nt, Human
ucuauuucugcug

SEQ ID NO: 2598053 - RNA, 21 nt, Human
ucuauuucugcugaauuuuca

SEQ ID NO: 2598054 - RNA, 23 nt, Human
ucucacacaugagcaucaggcca

SEQ ID NO: 2598055 - RNA, 12 nt, Human
ucuauuucugcu

SEQ ID NO: 2598056 - RNA, 11 nt, Human
ucuauuucugc

SEQ ID NO: 2598057 - RNA, 20 nt, Human
ucuauuucugagaagguccu

SEQ ID NO: 2598058 - RNA, 17 nt, Human
ucuauuucuaugagaaa

SEQ ID NO: 2598059 - RNA, 12 nt, Human
ucuauuucugag

SEQ ID NO: 2598060 - RNA, 13 nt, Human
ucuauuucugaga

SEQ ID NO: 2598061 - RNA, 15 nt, Human
ucuauuucugagaag

SEQ ID NO: 2598062 - RNA, 22 nt, Human
acuuauaucaucagcauaccuu

SEQ ID NO: 2598063 - RNA, 17 nt, Human
acuuauaucaucagcau

SEQ ID NO: 2598064 - RNA, 13 nt, Human
acuucagcucugu

SEQ ID NO: 2598065 - RNA, 14 nt, Human
acuucaggcucuuc

SEQ ID NO: 2598066 - RNA, 11 nt, Human
acuucagcuga

SEQ ID NO: 2598067 - RNA, 16 nt, Human
acuucagcugacuuuu

SEQ ID NO: 2598068 - RNA, 13 nt, Human
ucucacuaaacuu

SEQ ID NO: 2598069 - RNA, 23 nt, Human
ucucacgggcaugggcacucccu

SEQ ID NO: 2598070 - RNA, 22 nt, Human
ucucacgggcaugggcacuccc

SEQ ID NO: 2598071 - RNA, 21 nt, Human
ucucacgggcaugggcacucc

SEQ ID NO: 2598072 - RNA, 17 nt, Human
ucucacuaaacuuuacc

SEQ ID NO: 2598073 - RNA, 15 nt, Human
ucucacuaaacuuua

SEQ ID NO: 2598074 - RNA, 11 nt, Human
ucucacuccuu

SEQ ID NO: 2598075 - RNA, 15 nt, Human
ucucaccuguacucu

SEQ ID NO: 2598076 - RNA, 20 nt, Human
ucucacgggcaguagcugug

SEQ ID NO: 2598077 - RNA, 21 nt, Human
ucucacacuggcguagaaguu

SEQ ID NO: 2598078 - RNA, 14 nt, Human
ucucacacuggcgu

SEQ ID NO: 2598079 - RNA, 23 nt, Human
ucucacacccaccguccgcccug

SEQ ID NO: 2598080 - RNA, 23 nt, Human
acuucuaaguaaaaccacagcag

SEQ ID NO: 2598081 - RNA, 15 nt, Human
acuucuaaaugaagu

SEQ ID NO: 2598082 - RNA, 16 nt, Human
acuucuaaaugaagug

SEQ ID NO: 2598083 - RNA, 23 nt, Human
acuucgugggaucugccccuccc

SEQ ID NO: 2598084 - RNA, 22 nt, Human
acuucgugggaucugccccucc

SEQ ID NO: 2598085 - RNA, 13 nt, Human
acuucgugggauc

SEQ ID NO: 2598086 - RNA, 20 nt, Human
acuucgucuucuaauuucaa

SEQ ID NO: 2598087 - RNA, 19 nt, Human
acuucgucuucuaauuuca

SEQ ID NO: 2598088 - RNA, 15 nt, Human
acuucgucuucuaau

SEQ ID NO: 2598089 - RNA, 18 nt, Human
acuucgucuucuaauuuc

SEQ ID NO: 2598090 - RNA, 15 nt, Human
acuucuaauauauuu

SEQ ID NO: 2598091 - RNA, 11 nt, Human
acuucuaauau

SEQ ID NO: 2598092 - RNA, 17 nt, Human
acuucuaaaugcauauc

SEQ ID NO: 2598093 - RNA, 22 nt, Human
acuucuaauauauuuuuauauu

SEQ ID NO: 2598094 - RNA, 22 nt, Human
acuucucaaaccuguuuaaaua

SEQ ID NO: 2598095 - RNA, 23 nt, Human
acuucuacuucugcccuugccaa

SEQ ID NO: 2598096 - RNA, 14 nt, Human
acuucuccacccug

SEQ ID NO: 2598097 - RNA, 18 nt, Human
acuuccuguccagcucca

SEQ ID NO: 2598098 - RNA, 22 nt, Human
acuuccuguccagcuccaaccu

SEQ ID NO: 2598099 - RNA, 14 nt, Human
acuuccuguccaga

SEQ ID NO: 2598100 - RNA, 12 nt, Human
ucucacucuguc

SEQ ID NO: 2598101 - RNA, 13 nt, Human
ucucacuccuuga

SEQ ID NO: 2598102 - RNA, 16 nt, Human
ucucacuauaccagua

SEQ ID NO: 2598103 - RNA, 22 nt, Human
acuuccuuacuaagcauagcaa

SEQ ID NO: 2598104 - RNA, 21 nt, Human
acuuccuguuugggccccucu

SEQ ID NO: 2598105 - RNA, 18 nt, Human
acuuccuguuugggcccc

SEQ ID NO: 2598106 - RNA, 14 nt, Human
acuuccuugagaca

SEQ ID NO: 2598107 - RNA, 22 nt, Human
acuuccuugagacacggagccc

SEQ ID NO: 2598108 - RNA, 15 nt, Human
acuuccugugacuuc

SEQ ID NO: 2598109 - RNA, 23 nt, Human
acuuccuguccagcuccaaccug

SEQ ID NO: 2598110 - RNA, 17 nt, Human
acuuccuguuugggccc

SEQ ID NO: 2598111 - RNA, 17 nt, Human
acuuccuguccagagag

SEQ ID NO: 2598112 - RNA, 22 nt, Human
acuucgggaggucgaggcagga

SEQ ID NO: 2598113 - RNA, 19 nt, Human
acuucgacucaggauccag

SEQ ID NO: 2598114 - RNA, 15 nt, Human
acuucgacucaggau

SEQ ID NO: 2598115 - RNA, 19 nt, Human
acuuccuugcucucccucu

SEQ ID NO: 2598116 - RNA, 16 nt, Human
acuuccuugcucuccc

SEQ ID NO: 2598117 - RNA, 18 nt, Human
ucugaagucacugcacag

SEQ ID NO: 2598118 - RNA, 16 nt, Human
ucugaagucacugcac

SEQ ID NO: 2598119 - RNA, 15 nt, Human
ucugaagucacugca

SEQ ID NO: 2598120 - RNA, 15 nt, Human
ucugacaacagacuu

SEQ ID NO: 2598121 - RNA, 16 nt, Human
ucugacaacagacuuc

SEQ ID NO: 2598122 - RNA, 15 nt, Human
ucugaccugcaggcc

SEQ ID NO: 2598123 - RNA, 16 nt, Human
ucugaccugcaggcca

SEQ ID NO: 2598124 - RNA, 17 nt, Human
ucugaccugcaggccaa

SEQ ID NO: 2598125 - RNA, 19 nt, Human
ucugaccugcaggccaaga

SEQ ID NO: 2598126 - RNA, 21 nt, Human
ucugaccugcaggccaagagc

SEQ ID NO: 2598127 - RNA, 14 nt, Human
agaaaugaaagcag

SEQ ID NO: 2598128 - RNA, 22 nt, Human
agaaaucccuguuuaauauuua

SEQ ID NO: 2598129 - RNA, 16 nt, Human
agaaaugaaaaaauau

SEQ ID NO: 2598130 - RNA, 23 nt, Human
agaaaugaaaaaauauauaucaa

SEQ ID NO: 2598131 - RNA, 18 nt, Human
agaaaugaaaaaauauau

SEQ ID NO: 2598132 - RNA, 12 nt, Human
ucugaagaagau

SEQ ID NO: 2598133 - RNA, 22 nt, Human
ucugaagaccucgagcagauga

SEQ ID NO: 2598134 - RNA, 22 nt, Human
ucugaagaguggguuucacaag

SEQ ID NO: 2598135 - RNA, 20 nt, Human
ucugaagcauguuucauguu

SEQ ID NO: 2598136 - RNA, 15 nt, Human
ucugaagcauguuuc

SEQ ID NO: 2598137 - RNA, 21 nt, Human
ucugaagcauguuucauguuu

SEQ ID NO: 2598138 - RNA, 14 nt, Human
ucugaagcauguuu

SEQ ID NO: 2598139 - RNA, 13 nt, Human
ucugaagcauguu

SEQ ID NO: 2598140 - RNA, 12 nt, Human
ucugaagcaugu

SEQ ID NO: 2598141 - RNA, 12 nt, Human
ucugaagcagau

SEQ ID NO: 2598142 - RNA, 17 nt, Human
ucugaagucacaucaca

SEQ ID NO: 2598143 - RNA, 20 nt, Human
ucugaagucacaucacagga

SEQ ID NO: 2598144 - RNA, 22 nt, Human
ucugaagucacaucacaggaca

SEQ ID NO: 2598145 - RNA, 23 nt, Human
ucugaagucacaucacaggacac

SEQ ID NO: 2598146 - RNA, 20 nt, Human
agaaagcugguaaacuauuu

SEQ ID NO: 2598147 - RNA, 19 nt, Human
agaaagcugguaaacuauu

SEQ ID NO: 2598148 - RNA, 16 nt, Human
agaaagcugguaaacu

SEQ ID NO: 2598149 - RNA, 13 nt, Human
agaaagcugccug

SEQ ID NO: 2598150 - RNA, 20 nt, Human
agaaagccuguuccccucac

SEQ ID NO: 2598151 - RNA, 19 nt, Human
agaaagccuguuccccuca

SEQ ID NO: 2598152 - RNA, 22 nt, Human
agaaagccuguuccccucacug

SEQ ID NO: 2598153 - RNA, 21 nt, Human
agaaagccugggugacauuug

SEQ ID NO: 2598154 - RNA, 20 nt, Human
agaaagccugggugacauuu

SEQ ID NO: 2598155 - RNA, 19 nt, Human
agaaagccugggugacauu

SEQ ID NO: 2598156 - RNA, 18 nt, Human
agaaagccugggugacau

SEQ ID NO: 2598157 - RNA, 22 nt, Human
agaaacuuuauucaaguaaaaa

SEQ ID NO: 2598158 - RNA, 14 nt, Human
agaaagaaaaucag

SEQ ID NO: 2598159 - RNA, 12 nt, Human
agaaacuuuauu

SEQ ID NO: 2598160 - RNA, 13 nt, Human
agaaacuucgccu

SEQ ID NO: 2598161 - RNA, 23 nt, Human
agaaacuugugaaguggaaaugu

SEQ ID NO: 2598162 - RNA, 19 nt, Human
agaaacuuccaaauccccu

SEQ ID NO: 2598163 - RNA, 13 nt, Human
agaaacuugugaa

SEQ ID NO: 2598164 - RNA, 12 nt, Human
agaaaucuaaaa

SEQ ID NO: 2598165 - RNA, 18 nt, Human
agaaaucaguaauauuua

SEQ ID NO: 2598166 - RNA, 17 nt, Human
agaaaucacagaaucau

SEQ ID NO: 2598167 - RNA, 21 nt, Human
agaaaucauuuggguuaauau

SEQ ID NO: 2598168 - RNA, 17 nt, Human
agaaaugaaaaaauaua

SEQ ID NO: 2598169 - RNA, 19 nt, Human
agaaaucccuguuuaauau

SEQ ID NO: 2598170 - RNA, 14 nt, Human
agaaauauaauuga

SEQ ID NO: 2598171 - RNA, 19 nt, Human
agaaauaucugaaaaugua

SEQ ID NO: 2598172 - RNA, 17 nt, Human
agaaaucaaagagagaa

SEQ ID NO: 2598173 - RNA, 20 nt, Human
agaaauaucugaaaauguau

SEQ ID NO: 2598174 - RNA, 19 nt, Human
ucugcacuccccugcuggg

SEQ ID NO: 2598175 - RNA, 18 nt, Human
ucugcacuccccugcugg

SEQ ID NO: 2598176 - RNA, 18 nt, Human
ucugauuacacaaaacaa

SEQ ID NO: 2598177 - RNA, 18 nt, Human
ucugauucccaagcucug

SEQ ID NO: 2598178 - RNA, 24 nt, Human
ucugaguuucauucuccugccugu

SEQ ID NO: 2598179 - RNA, 14 nt, Human
ucugauaacuagau

SEQ ID NO: 2598180 - RNA, 20 nt, Human
ucugauaacuagauggugcu

SEQ ID NO: 2598181 - RNA, 21 nt, Human
ucugauaacuagauggugcug

SEQ ID NO: 2598182 - RNA, 19 nt, Human
ucugauaagagaaucaaca

SEQ ID NO: 2598183 - RNA, 15 nt, Human
ucugauaaugaaaau

SEQ ID NO: 2598184 - RNA, 22 nt, Human
ucugauaacuagauggugcuga

SEQ ID NO: 2598185 - RNA, 23 nt, Human
ucugaugcaagcaagaaacacug

SEQ ID NO: 2598186 - RNA, 13 nt, Human
ucugauggcuucu

SEQ ID NO: 2598187 - RNA, 18 nt, Human
ucugauggcuucuccagg

SEQ ID NO: 2598188 - RNA, 15 nt, Human
ucugauggcuucucc

SEQ ID NO: 2598189 - RNA, 23 nt, Human
ucugagacucgcgacaaugcaaa

SEQ ID NO: 2598190 - RNA, 22 nt, Human
ucugagacucgcgacaaugcaa

SEQ ID NO: 2598191 - RNA, 23 nt, Human
ucugacuacugggcaaagagugu

SEQ ID NO: 2598192 - RNA, 22 nt, Human
ucugacuacugggcaaagagug

SEQ ID NO: 2598193 - RNA, 23 nt, Human
ucugacgugccuuuugcaccccu

SEQ ID NO: 2598194 - RNA, 20 nt, Human
ucugacgugccuuuugcacc

SEQ ID NO: 2598195 - RNA, 22 nt, Human
ucugagacucucuuaggagcag

SEQ ID NO: 2598196 - RNA, 22 nt, Human
ucugaguuucauucuccugccu

SEQ ID NO: 2598197 - RNA, 20 nt, Human
ucugaguuucauucuccugc

SEQ ID NO: 2598198 - RNA, 15 nt, Human
ucugaguuucauucu

SEQ ID NO: 2598199 - RNA, 17 nt, Human
ucugaguuccugcaugc

SEQ ID NO: 2598200 - RNA, 24 nt, Human
ucugaguguuuuuacuacaguugu

SEQ ID NO: 2598201 - RNA, 21 nt, Human
agaaauuaugugccagauuua

SEQ ID NO: 2598202 - RNA, 13 nt, Human
agaaauuaugugc

SEQ ID NO: 2598203 - RNA, 18 nt, Human
ucugcaggucccuaauaa

SEQ ID NO: 2598204 - RNA, 13 nt, Human
ucugcaggcagac

SEQ ID NO: 2598205 - RNA, 22 nt, Human
ucugcaggcaccuuaguggcuu

SEQ ID NO: 2598206 - RNA, 14 nt, Human
ucugcaggucccua

SEQ ID NO: 2598207 - RNA, 17 nt, Human
agaaauuuauaaacuuu

SEQ ID NO: 2598208 - RNA, 16 nt, Human
agaaauuuauaaacuu

SEQ ID NO: 2598209 - RNA, 22 nt, Human
agaaauuaugugccagauuuau

SEQ ID NO: 2598210 - RNA, 17 nt, Human
agaaauuauuuaauaaa

SEQ ID NO: 2598211 - RNA, 16 nt, Human
agaaauuauuuaauaa

SEQ ID NO: 2598212 - RNA, 14 nt, Human
agaaauuauuuaau

SEQ ID NO: 2598213 - RNA, 14 nt, Human
ucugcaggcagaca

SEQ ID NO: 2598214 - RNA, 13 nt, Human
agaaauuccugua

SEQ ID NO: 2598215 - RNA, 17 nt, Human
ucugcaggucccuaaua

SEQ ID NO: 2598216 - RNA, 16 nt, Human
ucugcaggucccuaau

SEQ ID NO: 2598217 - RNA, 15 nt, Human
ucugcaggucccuaa

SEQ ID NO: 2598218 - RNA, 20 nt, Human
ucugcagcugaccucuguug

SEQ ID NO: 2598219 - RNA, 14 nt, Human
ucugcagcugaccu

SEQ ID NO: 2598220 - RNA, 13 nt, Human
ucugcagcugacc

SEQ ID NO: 2598221 - RNA, 17 nt, Human
ucugcaggcaccuuagu

SEQ ID NO: 2598222 - RNA, 14 nt, Human
ucugcaggcaccuu

SEQ ID NO: 2598223 - RNA, 15 nt, Human
ucugcagcuguuuua

SEQ ID NO: 2598224 - RNA, 22 nt, Human
ucugcaggauugauuaugcaga

SEQ ID NO: 2598225 - RNA, 18 nt, Human
ucugcagcaauaaagcag

SEQ ID NO: 2598226 - RNA, 20 nt, Human
ucugcacuccccugcugggu

SEQ ID NO: 2598227 - RNA, 13 nt, Human
ucugauuccacuu

SEQ ID NO: 2598228 - RNA, 11 nt, Human
ucugauuccac

SEQ ID NO: 2598229 - RNA, 16 nt, Human
ucugcagcaugaccug

SEQ ID NO: 2598230 - RNA, 20 nt, Human
ucugcagcaugaccugugac

SEQ ID NO: 2598231 - RNA, 14 nt, Human
ucugcagccagccc

SEQ ID NO: 2598232 - RNA, 15 nt, Human
ucugcagccagccca

SEQ ID NO: 2598233 - RNA, 16 nt, Human
ucugcagccagcccag

SEQ ID NO: 2598234 - RNA, 23 nt, Human
ucugcagcccggcgccaccaucc

SEQ ID NO: 2598235 - RNA, 15 nt, Human
ucugcagcccaggga

SEQ ID NO: 2598236 - RNA, 13 nt, Human
ucugcagcccagg

SEQ ID NO: 2598237 - RNA, 18 nt, Human
ucugcagccagcccagcc

SEQ ID NO: 2598238 - RNA, 19 nt, Human
ucugcagccagcccagccc

SEQ ID NO: 2598239 - RNA, 23 nt, Human
ucucucaucucuuagcuccccuc

SEQ ID NO: 2598240 - RNA, 19 nt, Human
ucucucaucucuuagcucc

SEQ ID NO: 2598241 - RNA, 14 nt, Human
ucucucaucucuua

SEQ ID NO: 2598242 - RNA, 15 nt, Human
ucucucaugaaccuc

SEQ ID NO: 2598243 - RNA, 17 nt, Human
ucucucaugaaccucaa

SEQ ID NO: 2598244 - RNA, 12 nt, Human
ucucucaugaac

SEQ ID NO: 2598245 - RNA, 22 nt, Human
ucucucaucucuuagcuccccu

SEQ ID NO: 2598246 - RNA, 16 nt, Human
ucucucauugucugug

SEQ ID NO: 2598247 - RNA, 22 nt, Human
ucucucaugaaccucaagcugc

SEQ ID NO: 2598248 - RNA, 19 nt, Human
ucucuccagccccuggaug

SEQ ID NO: 2598249 - RNA, 18 nt, Human
ucucuccagccccuggau

SEQ ID NO: 2598250 - RNA, 16 nt, Human
ucucuccagccccugg

SEQ ID NO: 2598251 - RNA, 17 nt, Human
ucucuccagccccugga

SEQ ID NO: 2598252 - RNA, 15 nt, Human
acuuugaccucugca

SEQ ID NO: 2598253 - RNA, 16 nt, Human
acuuugaccucugcag

SEQ ID NO: 2598254 - RNA, 19 nt, Human
acuuucucuucauacuuuu

SEQ ID NO: 2598255 - RNA, 22 nt, Human
acuuucuauagcagauugugua

SEQ ID NO: 2598256 - RNA, 18 nt, Human
acuuucucaguuuucaua

SEQ ID NO: 2598257 - RNA, 16 nt, Human
ucucucaauaugcuua

SEQ ID NO: 2598258 - RNA, 18 nt, Human
acuuugaccucugcagca

SEQ ID NO: 2598259 - RNA, 15 nt, Human
ucucucacuccuuga

SEQ ID NO: 2598260 - RNA, 13 nt, Human
ucucucacuccuu

SEQ ID NO: 2598261 - RNA, 20 nt, Human
ucucucaauaugcuuacaaa

SEQ ID NO: 2598262 - RNA, 17 nt, Human
ucucugcccuccaagac

SEQ ID NO: 2598263 - RNA, 16 nt, Human
ucucugcccuccaaga

SEQ ID NO: 2598264 - RNA, 15 nt, Human
ucucugcccuccaag

SEQ ID NO: 2598265 - RNA, 11 nt, Human
ucucugcccuc

SEQ ID NO: 2598266 - RNA, 16 nt, Human
ucucuccuguaccucu

SEQ ID NO: 2598267 - RNA, 17 nt, Human
ucucuccuguaccucuu

SEQ ID NO: 2598268 - RNA, 11 nt, Human
ucucuccuccu

SEQ ID NO: 2598269 - RNA, 14 nt, Human
ucucuccuguaccu

SEQ ID NO: 2598270 - RNA, 21 nt, Human
ucucucccuccccugccauuu

SEQ ID NO: 2598271 - RNA, 20 nt, Human
ucucucccucccuuugaaau

SEQ ID NO: 2598272 - RNA, 13 nt, Human
ucucuccucccca

SEQ ID NO: 2598273 - RNA, 15 nt, Human
ucucuggaugccuga

SEQ ID NO: 2598274 - RNA, 22 nt, Human
ucucuggagugagcucuguuuc

SEQ ID NO: 2598275 - RNA, 22 nt, Human
ucucuggagccaaguccagauu

SEQ ID NO: 2598276 - RNA, 20 nt, Human
ucucuggagccaaguccaga

SEQ ID NO: 2598277 - RNA, 18 nt, Human
ucucuggagccaagucca

SEQ ID NO: 2598278 - RNA, 19 nt, Human
ucucuggaauuugaaacac

SEQ ID NO: 2598279 - RNA, 12 nt, Human
ucucuggccuuc

SEQ ID NO: 2598280 - RNA, 19 nt, Human
ucucuggccucccacccga

SEQ ID NO: 2598281 - RNA, 18 nt, Human
ucucuggccucccacccg

SEQ ID NO: 2598282 - RNA, 17 nt, Human
ucucuggccucccaccc

SEQ ID NO: 2598283 - RNA, 15 nt, Human
ucucuggccucccac

SEQ ID NO: 2598284 - RNA, 15 nt, Human
ucucuggccccaagg

SEQ ID NO: 2598285 - RNA, 14 nt, Human
ucucuggaugccug

SEQ ID NO: 2598286 - RNA, 11 nt, Human
ucucuggccuc

SEQ ID NO: 2598287 - RNA, 19 nt, Human
ucucuggcccuucuugccu

SEQ ID NO: 2598288 - RNA, 23 nt, Human
ucucugcucugcgugucaccugu

SEQ ID NO: 2598289 - RNA, 11 nt, Human
ucucugcugcc

SEQ ID NO: 2598290 - RNA, 13 nt, Human
ucucugcugaagg

SEQ ID NO: 2598291 - RNA, 13 nt, Human
ucucugcugccgc

SEQ ID NO: 2598292 - RNA, 12 nt, Human
ucucugcugccg

SEQ ID NO: 2598293 - RNA, 12 nt, Human
ucucugcuggcc

SEQ ID NO: 2598294 - RNA, 14 nt, Human
ucucugcuggccca

SEQ ID NO: 2598295 - RNA, 15 nt, Human
ucucugcuggcccag

SEQ ID NO: 2598296 - RNA, 16 nt, Human
ucucugcuggcccagc

SEQ ID NO: 2598297 - RNA, 19 nt, Human
ucucugcuggcccagccaa

SEQ ID NO: 2598298 - RNA, 15 nt, Human
ucucuggaauuugaa

SEQ ID NO: 2598299 - RNA, 11 nt, Human
ucucugcugua

SEQ ID NO: 2598300 - RNA, 18 nt, Human
ucucugcuugagucaggu

SEQ ID NO: 2598301 - RNA, 19 nt, Human
ucucugcuugagucagguu

SEQ ID NO: 2598302 - RNA, 22 nt, Human
ucucuggaaaggggggagcugg

SEQ ID NO: 2598303 - RNA, 16 nt, Human
ucucuugauucauaau

SEQ ID NO: 2598304 - RNA, 14 nt, Human
ucucuugauucaua

SEQ ID NO: 2598305 - RNA, 18 nt, Human
ucucuugagccugggagg

SEQ ID NO: 2598306 - RNA, 18 nt, Human
ucucuugaggccaggagu

SEQ ID NO: 2598307 - RNA, 21 nt, Human
ucucuggccuucggccuccau

SEQ ID NO: 2598308 - RNA, 22 nt, Human
ucucuggccuucggccuccauc

SEQ ID NO: 2598309 - RNA, 23 nt, Human
ucucuggccuucggccuccaucc

SEQ ID NO: 2598310 - RNA, 17 nt, Human
ucucuugagccugggag

SEQ ID NO: 2598311 - RNA, 16 nt, Human
ucucuugggaacugaa

SEQ ID NO: 2598312 - RNA, 23 nt, Human
ucucuugggaacugaacucacuu

SEQ ID NO: 2598313 - RNA, 15 nt, Human
ucucuugcacccgcc

SEQ ID NO: 2598314 - RNA, 14 nt, Human
ucucuugcacccgc

SEQ ID NO: 2598315 - RNA, 13 nt, Human
ucucuugcacccg

SEQ ID NO: 2598316 - RNA, 12 nt, Human
ucucuugcaccc

SEQ ID NO: 2598317 - RNA, 22 nt, Human
ucucuugcacccgccucucccg

SEQ ID NO: 2598318 - RNA, 17 nt, Human
ucucuugcacccgccuc

SEQ ID NO: 2598319 - RNA, 15 nt, Human
ucucuugaguuuguc

SEQ ID NO: 2598320 - RNA, 12 nt, Human
ucucuugauuuu

SEQ ID NO: 2598321 - RNA, 14 nt, Human
ucucuugaguuugu

SEQ ID NO: 2598322 - RNA, 13 nt, Human
ucucuugagggag

SEQ ID NO: 2598323 - RNA, 22 nt, Human
ucucuugagggagcuuagccaa

SEQ ID NO: 2598324 - RNA, 21 nt, Human
ucucuuuaaugucacaggcag

SEQ ID NO: 2598325 - RNA, 20 nt, Human
ucucuuuaaugucacaggca

SEQ ID NO: 2598326 - RNA, 13 nt, Human
agaaaaagaaaaa

SEQ ID NO: 2598327 - RNA, 16 nt, Human
ucucuuuaaucuucag

SEQ ID NO: 2598328 - RNA, 17 nt, Human
ucucuuuaaucuucagu

SEQ ID NO: 2598329 - RNA, 20 nt, Human
ucucuuuaaucuucaguuuu

SEQ ID NO: 2598330 - RNA, 10 nt, Human
agaaaagaaa

SEQ ID NO: 2598331 - RNA, 11 nt, Human
agaaaagaaaa

SEQ ID NO: 2598332 - RNA, 12 nt, Human
agaaaagaaaaa

SEQ ID NO: 2598333 - RNA, 13 nt, Human
agaaaagaaaaaa

SEQ ID NO: 2598334 - RNA, 9 nt, Human
agaaaagaa

SEQ ID NO: 2598335 - RNA, 20 nt, Human
agaaaaagcuccuguccucc

SEQ ID NO: 2598336 - RNA, 17 nt, Human
agaaaagaaaaaaaaag

SEQ ID NO: 2598337 - RNA, 18 nt, Human
agaaaagaaaaaaaaaga

SEQ ID NO: 2598338 - RNA, 17 nt, Human
agaaaagacaugaauau

SEQ ID NO: 2598339 - RNA, 17 nt, Human
agaaacacccucacacu

SEQ ID NO: 2598340 - RNA, 23 nt, Human
agaaacacgaacuuuagcugcau

SEQ ID NO: 2598341 - RNA, 19 nt, Human
agaaaacuuguauuaugug

SEQ ID NO: 2598342 - RNA, 21 nt, Human
agaaaacuuguauuaugugug

SEQ ID NO: 2598343 - RNA, 17 nt, Human
agaaaaaggaugcacag

SEQ ID NO: 2598344 - RNA, 20 nt, Human
agaaaaagcaauaaccucaa

SEQ ID NO: 2598345 - RNA, 21 nt, Human
agaaacguuuggaacaaucua

SEQ ID NO: 2598346 - RNA, 20 nt, Human
agaaacguuuggaacaaucu

SEQ ID NO: 2598347 - RNA, 23 nt, Human
agaaacucacccccaaggggcag

SEQ ID NO: 2598348 - RNA, 15 nt, Human
agaaacucaccccca

SEQ ID NO: 2598349 - RNA, 22 nt, Human
agaaacucacccccaaggggca

SEQ ID NO: 2598350 - RNA, 14 nt, Human
agaaacuuccaaau

SEQ ID NO: 2598351 - RNA, 16 nt, Human
agaaacgucuucuaaa

SEQ ID NO: 2598352 - RNA, 18 nt, Human
agaaacgucuucuaaacu

SEQ ID NO: 2598353 - RNA, 19 nt, Human
agaaacguuuggaacaauc

SEQ ID NO: 2598354 - RNA, 21 nt, Human
agaaacgucuucuaaacuucc

SEQ ID NO: 2598355 - RNA, 18 nt, Human
agaaaccuuuuuaaaaau

SEQ ID NO: 2598356 - RNA, 20 nt, Human
agaaaccuuauuguaccucu

SEQ ID NO: 2598357 - RNA, 15 nt, Human
agaaacgucuucuaa

SEQ ID NO: 2598358 - RNA, 12 nt, Human
agaaacagugag

SEQ ID NO: 2598359 - RNA, 13 nt, Human
agaaacagugagu

SEQ ID NO: 2598360 - RNA, 13 nt, Human
agaaacaguuaac

SEQ ID NO: 2598361 - RNA, 18 nt, Human
agaaaccuuauuguaccu

SEQ ID NO: 2598362 - RNA, 16 nt, Human
agaaaccuuauuguac

SEQ ID NO: 2598363 - RNA, 17 nt, Human
agaaaccuuaauaugug

SEQ ID NO: 2598364 - RNA, 20 nt, Human
agaaacaguuaacuuucaga

SEQ ID NO: 2598365 - RNA, 14 nt, Human
agaaacagagacag

SEQ ID NO: 2598366 - RNA, 19 nt, Human
agaaacagagacaggccca

SEQ ID NO: 2598367 - RNA, 15 nt, Human
agaaacagagacagg

SEQ ID NO: 2598368 - RNA, 16 nt, Human
agaaauuugauuucua

SEQ ID NO: 2598369 - RNA, 17 nt, Human
agaaccccuacaugaaa

SEQ ID NO: 2598370 - RNA, 19 nt, Human
agaaccccuacaugaaaca

SEQ ID NO: 2598371 - RNA, 20 nt, Human
agaacccugcguggggacag

SEQ ID NO: 2598372 - RNA, 20 nt, Human
agaacccuuggcuugcccac

SEQ ID NO: 2598373 - RNA, 22 nt, Human
agaaccccuggcuccaggccag

SEQ ID NO: 2598374 - RNA, 15 nt, Human
agaaugucaguaugu

SEQ ID NO: 2598375 - RNA, 16 nt, Human
agaaugucaguaugug

SEQ ID NO: 2598376 - RNA, 16 nt, Human
agaaccgagcaaagau

SEQ ID NO: 2598377 - RNA, 15 nt, Human
agaaccgagcaaaga

SEQ ID NO: 2598378 - RNA, 14 nt, Human
agaaccgagcaaag

SEQ ID NO: 2598379 - RNA, 13 nt, Human
agaaugucaguau

SEQ ID NO: 2598380 - RNA, 16 nt, Human
agaaauuuccagagaa

SEQ ID NO: 2598381 - RNA, 15 nt, Human
agaaauuugauuucu

SEQ ID NO: 2598382 - RNA, 23 nt, Human
agaaccccaggguccuguagccc

SEQ ID NO: 2598383 - RNA, 23 nt, Human
agaaauuuauuuccuaguucugu

SEQ ID NO: 2598384 - RNA, 15 nt, Human
agaaauuuauuuccu

SEQ ID NO: 2598385 - RNA, 13 nt, Human
agaaauuuauuuc

SEQ ID NO: 2598386 - RNA, 14 nt, Human
agaaauuuccagag

SEQ ID NO: 2598387 - RNA, 17 nt, Human
agaaugucaguaugugg

SEQ ID NO: 2598388 - RNA, 19 nt, Human
agaaugucaguauguggaa

SEQ ID NO: 2598389 - RNA, 21 nt, Human
agaauguguuuaaacuugguu

SEQ ID NO: 2598390 - RNA, 18 nt, Human
agaauguguuuucugaau

SEQ ID NO: 2598391 - RNA, 17 nt, Human
agaauguguuuucugaa

SEQ ID NO: 2598392 - RNA, 15 nt, Human
agaauguuguauuca

SEQ ID NO: 2598393 - RNA, 19 nt, Human
agaauguuguauucaguga

SEQ ID NO: 2598394 - RNA, 18 nt, Human
agaauguuuuacugugaa

SEQ ID NO: 2598395 - RNA, 18 nt, Human
agaauguuguauucagug

SEQ ID NO: 2598396 - RNA, 19 nt, Human
agaauuaguggcacuugcu

SEQ ID NO: 2598397 - RNA, 19 nt, Human
agaauguuuuacugugaaa

SEQ ID NO: 2598398 - RNA, 18 nt, Human
ucuggguagcuguaaggc

SEQ ID NO: 2598399 - RNA, 21 nt, Human
ucugggguucagccccuccuc

SEQ ID NO: 2598400 - RNA, 22 nt, Human
ucugggguucagccccuccucu

SEQ ID NO: 2598401 - RNA, 16 nt, Human
ucugggguucagcccc

SEQ ID NO: 2598402 - RNA, 17 nt, Human
ucugggguucagccccu

SEQ ID NO: 2598403 - RNA, 18 nt, Human
ucugggguucagccccuc

SEQ ID NO: 2598404 - RNA, 19 nt, Human
ucugggguucagccccucc

SEQ ID NO: 2598405 - RNA, 22 nt, Human
ucuggguuccuuccucugagcc

SEQ ID NO: 2598406 - RNA, 15 nt, Human
ucugggucagugguc

SEQ ID NO: 2598407 - RNA, 23 nt, Human
ucugggguucagccccuccucug

SEQ ID NO: 2598408 - RNA, 22 nt, Human
ucugguaauauugacuuguaua

SEQ ID NO: 2598409 - RNA, 21 nt, Human
ucugguaauauugacuuguau

SEQ ID NO: 2598410 - RNA, 15 nt, Human
ucugguacucuccua

SEQ ID NO: 2598411 - RNA, 23 nt, Human
ucuggguuccuuccucugagccu

SEQ ID NO: 2598412 - RNA, 21 nt, Human
ucugggcuuggggcuuccuaa

SEQ ID NO: 2598413 - RNA, 19 nt, Human
ucugggcuuggggcuuccu

SEQ ID NO: 2598414 - RNA, 22 nt, Human
ucuggggucuuuuuaugcauuu

SEQ ID NO: 2598415 - RNA, 17 nt, Human
ucugggguuaugauggc

SEQ ID NO: 2598416 - RNA, 19 nt, Human
ucugggcugucuauucuag

SEQ ID NO: 2598417 - RNA, 17 nt, Human
ucugggcugcuacccag

SEQ ID NO: 2598418 - RNA, 22 nt, Human
ucugggcugcuacccagaaauc

SEQ ID NO: 2598419 - RNA, 14 nt, Human
agaauucucuaguu

SEQ ID NO: 2598420 - RNA, 13 nt, Human
ucugggcuccaga

SEQ ID NO: 2598421 - RNA, 20 nt, Human
agaauucucagaaucucaaa

SEQ ID NO: 2598422 - RNA, 20 nt, Human
agaauuccuucagggugaug

SEQ ID NO: 2598423 - RNA, 18 nt, Human
agaauuccuucaggguga

SEQ ID NO: 2598424 - RNA, 12 nt, Human
agaauuccuuca

SEQ ID NO: 2598425 - RNA, 18 nt, Human
agaauucuagugcugcug

SEQ ID NO: 2598426 - RNA, 14 nt, Human
agaauucuagugcu

SEQ ID NO: 2598427 - RNA, 23 nt, Human
agaauucuagugcugcugaagau

SEQ ID NO: 2598428 - RNA, 20 nt, Human
agaauuccaaggaguuccau

SEQ ID NO: 2598429 - RNA, 20 nt, Human
agaauuauaauuaguuccuc

SEQ ID NO: 2598430 - RNA, 20 nt, Human
agaauuccaggguauggcca

SEQ ID NO: 2598431 - RNA, 22 nt, Human
agaauucccucucucugacucu

SEQ ID NO: 2598432 - RNA, 20 nt, Human
agaauucccucucucugacu

SEQ ID NO: 2598433 - RNA, 19 nt, Human
agaauucccucucucugac

SEQ ID NO: 2598434 - RNA, 22 nt, Human
ucuguggaaaguguaaagcauu

SEQ ID NO: 2598435 - RNA, 20 nt, Human
ucuguggaaaguguaaagca

SEQ ID NO: 2598436 - RNA, 16 nt, Human
ucuguggaaaguguaa

SEQ ID NO: 2598437 - RNA, 15 nt, Human
ucuguggaaagugua

SEQ ID NO: 2598438 - RNA, 14 nt, Human
ucuguggaaagugu

SEQ ID NO: 2598439 - RNA, 22 nt, Human
ucugugcuuugacucaccuguu

SEQ ID NO: 2598440 - RNA, 20 nt, Human
ucugugcuuugacucaccug

SEQ ID NO: 2598441 - RNA, 21 nt, Human
ucugugcuuuccagcucaccc

SEQ ID NO: 2598442 - RNA, 12 nt, Human
ucugugggcugc

SEQ ID NO: 2598443 - RNA, 23 nt, Human
ucugugggaugggaugguggagg

SEQ ID NO: 2598444 - RNA, 22 nt, Human
ucuguggaccacugcaugagcu

SEQ ID NO: 2598445 - RNA, 20 nt, Human
ucugugcccaugggcacugc

SEQ ID NO: 2598446 - RNA, 19 nt, Human
ucugugcccaugggcacug

SEQ ID NO: 2598447 - RNA, 16 nt, Human
ucugugcccaugggca

SEQ ID NO: 2598448 - RNA, 22 nt, Human
ucugugcccaugggcacugcug

SEQ ID NO: 2598449 - RNA, 21 nt, Human
ucugugcccaugggcacugcu

SEQ ID NO: 2598450 - RNA, 14 nt, Human
ucugugccccaugc

SEQ ID NO: 2598451 - RNA, 17 nt, Human
ucugugcuuuccagcuc

SEQ ID NO: 2598452 - RNA, 16 nt, Human
ucugugcuuuccagcu

SEQ ID NO: 2598453 - RNA, 14 nt, Human
ucugugcuuuccag

SEQ ID NO: 2598454 - RNA, 15 nt, Human
ucugugccccaugcc

SEQ ID NO: 2598455 - RNA, 12 nt, Human
ucugugcugugu

SEQ ID NO: 2598456 - RNA, 17 nt, Human
ucugugccccaugccug

SEQ ID NO: 2598457 - RNA, 16 nt, Human
ucugugaugauccuca

SEQ ID NO: 2598458 - RNA, 16 nt, Human
ucugugaccucaggca

SEQ ID NO: 2598459 - RNA, 15 nt, Human
ucugugaccucaggc

SEQ ID NO: 2598460 - RNA, 14 nt, Human
ucugugaccucagg

SEQ ID NO: 2598461 - RNA, 13 nt, Human
ucugugaccucag

SEQ ID NO: 2598462 - RNA, 19 nt, Human
ucugugaccaaugucuuga

SEQ ID NO: 2598463 - RNA, 19 nt, Human
ucugugcaugguggcacca

SEQ ID NO: 2598464 - RNA, 17 nt, Human
ucugugcaugguggcac

SEQ ID NO: 2598465 - RNA, 21 nt, Human
ucugugcacgcaguggccuuc

SEQ ID NO: 2598466 - RNA, 19 nt, Human
ucugugcacgcaguggccu

SEQ ID NO: 2598467 - RNA, 22 nt, Human
ucugugcaugguggcaccagcg

SEQ ID NO: 2598468 - RNA, 15 nt, Human
ucugugcccaugggc

SEQ ID NO: 2598469 - RNA, 20 nt, Human
ucugugggcugcacucugug

SEQ ID NO: 2598470 - RNA, 19 nt, Human
ucugugggcugcacucugu

SEQ ID NO: 2598471 - RNA, 16 nt, Human
ucugugggcugcacuc

SEQ ID NO: 2598472 - RNA, 15 nt, Human
ucugugggcugcacu

SEQ ID NO: 2598473 - RNA, 23 nt, Human
ucugugggcugcacucugugccc

SEQ ID NO: 2598474 - RNA, 21 nt, Human
ucugugggcugcacucugugc

SEQ ID NO: 2598475 - RNA, 19 nt, Human
ucugugggugacccagguc

SEQ ID NO: 2598476 - RNA, 17 nt, Human
ucuguucugcacacagc

SEQ ID NO: 2598477 - RNA, 18 nt, Human
ucuguucugcacacagca

SEQ ID NO: 2598478 - RNA, 22 nt, Human
ucuguucuguggaaaguguaaa

SEQ ID NO: 2598479 - RNA, 19 nt, Human
ucuguucuguggaaagugu

SEQ ID NO: 2598480 - RNA, 16 nt, Human
ucuguucuguggaaag

SEQ ID NO: 2598481 - RNA, 15 nt, Human
ucuguucuguggaaa

SEQ ID NO: 2598482 - RNA, 23 nt, Human
ucuguucuguggaaaguguaaag

SEQ ID NO: 2598483 - RNA, 14 nt, Human
ucuguucuguggaa

SEQ ID NO: 2598484 - RNA, 12 nt, Human
ucuguucugugg

SEQ ID NO: 2598485 - RNA, 21 nt, Human
ucugugggugacccagguccu

SEQ ID NO: 2598486 - RNA, 19 nt, Human
ucuguucugcacacagcac

SEQ ID NO: 2598487 - RNA, 16 nt, Human
ucuguuuagauaauac

SEQ ID NO: 2598488 - RNA, 19 nt, Human
ucuguuuagauaauacacc

SEQ ID NO: 2598489 - RNA, 23 nt, Human
ucuguuuagauaauacaccacua

SEQ ID NO: 2598490 - RNA, 14 nt, Human
ucuguucuugcuac

SEQ ID NO: 2598491 - RNA, 13 nt, Human
ucuguucuugaag

SEQ ID NO: 2598492 - RNA, 20 nt, Human
ucuguccccuucucucaucu

SEQ ID NO: 2598493 - RNA, 19 nt, Human
ucuguccccuucucucauc

SEQ ID NO: 2598494 - RNA, 15 nt, Human
ucuguccccuucucu

SEQ ID NO: 2598495 - RNA, 21 nt, Human
ucugucccacuuggcaucagc

SEQ ID NO: 2598496 - RNA, 17 nt, Human
ucugucccacuuggcau

SEQ ID NO: 2598497 - RNA, 13 nt, Human
ucugucccagguu

SEQ ID NO: 2598498 - RNA, 23 nt, Human
ucuguauuuccccaacauguaau

SEQ ID NO: 2598499 - RNA, 20 nt, Human
ucuguauuuccccaacaugu

SEQ ID NO: 2598500 - RNA, 23 nt, Human
ucuguauuuaugugugaggagcu

SEQ ID NO: 2598501 - RNA, 13 nt, Human
ucuguccagggcc

SEQ ID NO: 2598502 - RNA, 17 nt, Human
ucuguccagggcccuga

SEQ ID NO: 2598503 - RNA, 19 nt, Human
ucuguccagggcccugagc

SEQ ID NO: 2598504 - RNA, 20 nt, Human
ucuguccagggcccugagcu

SEQ ID NO: 2598505 - RNA, 22 nt, Human
ucuguccccuucucucaucucu

SEQ ID NO: 2598506 - RNA, 21 nt, Human
ucuguccccuucucucaucuc

SEQ ID NO: 2598507 - RNA, 19 nt, Human
ucugucccgggguccugug

SEQ ID NO: 2598508 - RNA, 20 nt, Human
ucugucccgggguccugugg

SEQ ID NO: 2598509 - RNA, 11 nt, Human
ucugugaauaa

SEQ ID NO: 2598510 - RNA, 12 nt, Human
ucugugaauaag

SEQ ID NO: 2598511 - RNA, 13 nt, Human
ucugugaauaagc

SEQ ID NO: 2598512 - RNA, 16 nt, Human
ucugugaccaaugucu

SEQ ID NO: 2598513 - RNA, 18 nt, Human
ucugugaccaaugucuug

SEQ ID NO: 2598514 - RNA, 16 nt, Human
ucugugaauaagccau

SEQ ID NO: 2598515 - RNA, 15 nt, Human
ucugugaauucagau

SEQ ID NO: 2598516 - RNA, 18 nt, Human
ucuguacgucugacaggc

SEQ ID NO: 2598517 - RNA, 16 nt, Human
ucugguagauagaaau

SEQ ID NO: 2598518 - RNA, 18 nt, Human
ucugguagauagaaauaa

SEQ ID NO: 2598519 - RNA, 20 nt, Human
ucugguagauuuuuaacgaa

SEQ ID NO: 2598520 - RNA, 15 nt, Human
ucugggggaguggaa

SEQ ID NO: 2598521 - RNA, 15 nt, Human
ucuguauuuaauuuu

SEQ ID NO: 2598522 - RNA, 20 nt, Human
ucuguaucaggacccagagg

SEQ ID NO: 2598523 - RNA, 18 nt, Human
ucuguaucggagacagug

SEQ ID NO: 2598524 - RNA, 19 nt, Human
ucuguaucggagacaguga

SEQ ID NO: 2598525 - RNA, 12 nt, Human
ucuguaucucuc

SEQ ID NO: 2598526 - RNA, 21 nt, Human
ucuguaucggagacagugauc

SEQ ID NO: 2598527 - RNA, 13 nt, Human
ucuguaucucucu

SEQ ID NO: 2598528 - RNA, 12 nt, Human
ucuguagaaaug

SEQ ID NO: 2598529 - RNA, 21 nt, Human
ucuguagaaaugguuguauua

SEQ ID NO: 2598530 - RNA, 17 nt, Human
ucuguagaaaugguugu

SEQ ID NO: 2598531 - RNA, 15 nt, Human
ucuguauauacaaua

SEQ ID NO: 2598532 - RNA, 15 nt, Human
ucuguauauacuuuu

SEQ ID NO: 2598533 - RNA, 15 nt, Human
ucuguauauuuuggg

SEQ ID NO: 2598534 - RNA, 16 nt, Human
ucuguauauuuuggga

SEQ ID NO: 2598535 - RNA, 17 nt, Human
agacacacugaagaagc

SEQ ID NO: 2598536 - RNA, 17 nt, Human
agacacaggcccggcuc

SEQ ID NO: 2598537 - RNA, 16 nt, Human
agacacacugaagaag

SEQ ID NO: 2598538 - RNA, 10 nt, Human
agacacacac

SEQ ID NO: 2598539 - RNA, 11 nt, Human
agacacacaca

SEQ ID NO: 2598540 - RNA, 17 nt, Human
agacacacgcacacaca

SEQ ID NO: 2598541 - RNA, 18 nt, Human
agacacacgcacacacac

SEQ ID NO: 2598542 - RNA, 22 nt, Human
agacacaggcccggcuccaggc

SEQ ID NO: 2598543 - RNA, 21 nt, Human
agacacaggcccggcuccagg

SEQ ID NO: 2598544 - RNA, 20 nt, Human
agacacaggcccggcuccag

SEQ ID NO: 2598545 - RNA, 19 nt, Human
agacacaggcccggcucca

SEQ ID NO: 2598546 - RNA, 20 nt, Human
agacacaacuauuuuuccaa

SEQ ID NO: 2598547 - RNA, 19 nt, Human
agacacaacuauuuuucca

SEQ ID NO: 2598548 - RNA, 13 nt, Human
agacacaagccuu

SEQ ID NO: 2598549 - RNA, 14 nt, Human
agacacaagccuuc

SEQ ID NO: 2598550 - RNA, 18 nt, Human
agaauucucuaguuugau

SEQ ID NO: 2598551 - RNA, 19 nt, Human
agaauucucuaguuugauu

SEQ ID NO: 2598552 - RNA, 17 nt, Human
agaauucucuuauccaa

SEQ ID NO: 2598553 - RNA, 13 nt, Human
agaauucugcuac

SEQ ID NO: 2598554 - RNA, 20 nt, Human
agaauucugcuaccucacug

SEQ ID NO: 2598555 - RNA, 22 nt, Human
agaauucugcuaccucacuggg

SEQ ID NO: 2598556 - RNA, 15 nt, Human
agacacagggacuug

SEQ ID NO: 2598557 - RNA, 22 nt, Human
agacaccuuggacauccuccuc

SEQ ID NO: 2598558 - RNA, 22 nt, Human
agacaccuugacagggcacacc

SEQ ID NO: 2598559 - RNA, 24 nt, Human
agacacauguccaagaagcccagg

SEQ ID NO: 2598560 - RNA, 19 nt, Human
agacaccuugacagggcac

SEQ ID NO: 2598561 - RNA, 22 nt, Human
agacacauguccaagaagccca

SEQ ID NO: 2598562 - RNA, 21 nt, Human
agacacauguccaagaagccc

SEQ ID NO: 2598563 - RNA, 23 nt, Human
agacacaggcccggcuccaggcu

SEQ ID NO: 2598564 - RNA, 18 nt, Human
agacacagaagaggcugg

SEQ ID NO: 2598565 - RNA, 13 nt, Human
agacacaggcccu

SEQ ID NO: 2598566 - RNA, 17 nt, Human
agacacagaagaggcug

SEQ ID NO: 2598567 - RNA, 20 nt, Human
agacagaagcaggcuggagg

SEQ ID NO: 2598568 - RNA, 19 nt, Human
agacagaagcaggcuggag

SEQ ID NO: 2598569 - RNA, 17 nt, Human
agacagaagcaggcugg

SEQ ID NO: 2598570 - RNA, 16 nt, Human
agacagaagcaggcug

SEQ ID NO: 2598571 - RNA, 15 nt, Human
agacagaagcaggcu

SEQ ID NO: 2598572 - RNA, 17 nt, Human
agacagaaccuuguuau

SEQ ID NO: 2598573 - RNA, 17 nt, Human
agacagaaccccuacau

SEQ ID NO: 2598574 - RNA, 18 nt, Human
agacagaaccuuguuauu

SEQ ID NO: 2598575 - RNA, 14 nt, Human
agacagcugccugg

SEQ ID NO: 2598576 - RNA, 13 nt, Human
agacagcugccug

SEQ ID NO: 2598577 - RNA, 16 nt, Human
agacacgcucuucuau

SEQ ID NO: 2598578 - RNA, 21 nt, Human
agacacggagcccagcccucc

SEQ ID NO: 2598579 - RNA, 12 nt, Human
agacagaaaaaa

SEQ ID NO: 2598580 - RNA, 15 nt, Human
agacacuugccuucu

SEQ ID NO: 2598581 - RNA, 15 nt, Human
ucuuacauguuuucu

SEQ ID NO: 2598582 - RNA, 19 nt, Human
ucuuacaggcacaaaauga

SEQ ID NO: 2598583 - RNA, 17 nt, Human
ucuuacaggcacaaaau

SEQ ID NO: 2598584 - RNA, 14 nt, Human
ucuuacauguuuuc

SEQ ID NO: 2598585 - RNA, 23 nt, Human
ucuuaccuguaugucuccaguau

SEQ ID NO: 2598586 - RNA, 21 nt, Human
ucuuaccuguaugucuccagu

SEQ ID NO: 2598587 - RNA, 14 nt, Human
ucuuacuaaacauu

SEQ ID NO: 2598588 - RNA, 18 nt, Human
ucuuacgauggcacccag

SEQ ID NO: 2598589 - RNA, 19 nt, Human
ucuuacgcccaacccuucc

SEQ ID NO: 2598590 - RNA, 24 nt, Human
ucuuacuaaacauuuuguuauugg

SEQ ID NO: 2598591 - RNA, 16 nt, Human
ucuuacuaaacauuuu

SEQ ID NO: 2598592 - RNA, 19 nt, Human
ucuuacugucuuuuuucua

SEQ ID NO: 2598593 - RNA, 22 nt, Human
ucuuacugcaaaugucaucaga

SEQ ID NO: 2598594 - RNA, 18 nt, Human
ucuuacuguaccuguucc

SEQ ID NO: 2598595 - RNA, 13 nt, Human
ucuuacugaaggu

SEQ ID NO: 2598596 - RNA, 15 nt, Human
ucuuacugcaaaugu

SEQ ID NO: 2598597 - RNA, 14 nt, Human
ucuuacugcaaaug

SEQ ID NO: 2598598 - RNA, 13 nt, Human
ucuuacugcaaau

SEQ ID NO: 2598599 - RNA, 23 nt, Human
ucuuacugaagguaaaauugaaa

SEQ ID NO: 2598600 - RNA, 22 nt, Human
ucuuauuagaacaggcaaguga

SEQ ID NO: 2598601 - RNA, 17 nt, Human
ucuuauuagggagaaaa

SEQ ID NO: 2598602 - RNA, 22 nt, Human
ucuuagauggauucuccacuca

SEQ ID NO: 2598603 - RNA, 13 nt, Human
ucuuagaaaugaa

SEQ ID NO: 2598604 - RNA, 18 nt, Human
ucuuagauggauucucca

SEQ ID NO: 2598605 - RNA, 18 nt, Human
ucuuauguaugugaaagu

SEQ ID NO: 2598606 - RNA, 23 nt, Human
ucuuacuuuccuuuccccagccc

SEQ ID NO: 2598607 - RNA, 22 nt, Human
ucuuacuuuccuuuccccagcc

SEQ ID NO: 2598608 - RNA, 22 nt, Human
ucuuagaugcaguucugaagaa

SEQ ID NO: 2598609 - RNA, 23 nt, Human
ucuuagaugcaguucugaagaag

SEQ ID NO: 2598610 - RNA, 12 nt, Human
ucuuagauguau

SEQ ID NO: 2598611 - RNA, 16 nt, Human
agacagcugccuggga

SEQ ID NO: 2598612 - RNA, 15 nt, Human
agacagcugccuggg

SEQ ID NO: 2598613 - RNA, 12 nt, Human
agacagucccug

SEQ ID NO: 2598614 - RNA, 22 nt, Human
agacaguaugagucaaugugca

SEQ ID NO: 2598615 - RNA, 17 nt, Human
agacagucaaggagugg

SEQ ID NO: 2598616 - RNA, 20 nt, Human
agacagucaaggaguggcuu

SEQ ID NO: 2598617 - RNA, 19 nt, Human
agacagucccugccaaugg

SEQ ID NO: 2598618 - RNA, 14 nt, Human
agacagucccugcc

SEQ ID NO: 2598619 - RNA, 13 nt, Human
agacagucccugc

SEQ ID NO: 2598620 - RNA, 15 nt, Human
agacagugaucucca

SEQ ID NO: 2598621 - RNA, 17 nt, Human
agacagugaucuccaua

SEQ ID NO: 2598622 - RNA, 18 nt, Human
agacagugaucuccauau

SEQ ID NO: 2598623 - RNA, 20 nt, Human
agacagugaucuccauaugu

SEQ ID NO: 2598624 - RNA, 21 nt, Human
agacagugaucuccauauguu

SEQ ID NO: 2598625 - RNA, 14 nt, Human
agacagugggaaau

SEQ ID NO: 2598626 - RNA, 13 nt, Human
agacagugggaaa

SEQ ID NO: 2598627 - RNA, 17 nt, Human
agacaguccagccugga

SEQ ID NO: 2598628 - RNA, 12 nt, Human
agacagugaucu

SEQ ID NO: 2598629 - RNA, 15 nt, Human
agacaguccagccug

SEQ ID NO: 2598630 - RNA, 17 nt, Human
agacagucaccccagga

SEQ ID NO: 2598631 - RNA, 14 nt, Human
agacaguuucuuag

SEQ ID NO: 2598632 - RNA, 13 nt, Human
agacaguuucuua

SEQ ID NO: 2598633 - RNA, 15 nt, Human
agacaguucaagaaa

SEQ ID NO: 2598634 - RNA, 20 nt, Human
ucuuaaucuuuucacaaaua

SEQ ID NO: 2598635 - RNA, 19 nt, Human
ucuuaaucuuuucacaaau

SEQ ID NO: 2598636 - RNA, 15 nt, Human
agacagugggaaaua

SEQ ID NO: 2598637 - RNA, 14 nt, Human
agacaguucaagaa

SEQ ID NO: 2598638 - RNA, 20 nt, Human
agacaguugggugagaacaa

SEQ ID NO: 2598639 - RNA, 20 nt, Human
ucuuaaugaaguuugaaugu

SEQ ID NO: 2598640 - RNA, 19 nt, Human
ucuuaaugaaguuugaaug

SEQ ID NO: 2598641 - RNA, 18 nt, Human
ucuuaaugaaguuugaau

SEQ ID NO: 2598642 - RNA, 17 nt, Human
ucuuaaugaaguuugaa

SEQ ID NO: 2598643 - RNA, 16 nt, Human
ucuuaaugaaguuuga

SEQ ID NO: 2598644 - RNA, 15 nt, Human
ucuuaaugaaguuug

SEQ ID NO: 2598645 - RNA, 22 nt, Human
ucuuaaucuuuucacaaauaaa

SEQ ID NO: 2598646 - RNA, 21 nt, Human
ucuuaaucuuuucacaaauaa

SEQ ID NO: 2598647 - RNA, 22 nt, Human
ucuuaaugaaguuugaauguua

SEQ ID NO: 2598648 - RNA, 21 nt, Human
ucuuaaugaaguuugaauguu

SEQ ID NO: 2598649 - RNA, 23 nt, Human
ucuuaaugaaguuugaauguuaa

SEQ ID NO: 2598650 - RNA, 20 nt, Human
ucuuaauuauuauuuguguu

SEQ ID NO: 2598651 - RNA, 19 nt, Human
ucuuaauuuugguuguauu

SEQ ID NO: 2598652 - RNA, 17 nt, Human
ucuuaauuuugguugua

SEQ ID NO: 2598653 - RNA, 23 nt, Human
ucuuaauuuaaucuuuuuuaugu

SEQ ID NO: 2598654 - RNA, 19 nt, Human
ucuuacaauaauucuauga

SEQ ID NO: 2598655 - RNA, 21 nt, Human
ucuuaauuuugguuguauucu

SEQ ID NO: 2598656 - RNA, 20 nt, Human
ucuuaauuuugguuguauuc

SEQ ID NO: 2598657 - RNA, 14 nt, Human
ucuuacaaacaugu

SEQ ID NO: 2598658 - RNA, 14 nt, Human
agacuuccuugaga

SEQ ID NO: 2598659 - RNA, 16 nt, Human
agacuuccuugagaca

SEQ ID NO: 2598660 - RNA, 15 nt, Human
agacuucccugaaug

SEQ ID NO: 2598661 - RNA, 19 nt, Human
agacuucccugaauguauu

SEQ ID NO: 2598662 - RNA, 21 nt, Human
agacuuccaaaccugacagau

SEQ ID NO: 2598663 - RNA, 19 nt, Human
agacuuaguauauuuucuu

SEQ ID NO: 2598664 - RNA, 22 nt, Human
agacuuaguauauuuucuuuuc

SEQ ID NO: 2598665 - RNA, 17 nt, Human
agacuuagggcaccagg

SEQ ID NO: 2598666 - RNA, 21 nt, Human
agacuuacuuuacucauuuuu

SEQ ID NO: 2598667 - RNA, 18 nt, Human
agacuuaguauauuuucu

SEQ ID NO: 2598668 - RNA, 20 nt, Human
agacuuccaaaccugacaga

SEQ ID NO: 2598669 - RNA, 19 nt, Human
agacuuccaaaccugacag

SEQ ID NO: 2598670 - RNA, 17 nt, Human
agacuucauuuuuccua

SEQ ID NO: 2598671 - RNA, 20 nt, Human
agacuuacuuuacucauuuu

SEQ ID NO: 2598672 - RNA, 19 nt, Human
agacuuacuuuacucauuu

SEQ ID NO: 2598673 - RNA, 16 nt, Human
agacuuagggcaccag

SEQ ID NO: 2598674 - RNA, 15 nt, Human
agacuuaccaggaag

SEQ ID NO: 2598675 - RNA, 23 nt, Human
agacuuaauagaaacauugaaga

SEQ ID NO: 2598676 - RNA, 20 nt, Human
agacuguaggaagaguagca

SEQ ID NO: 2598677 - RNA, 18 nt, Human
agacuguagccuggauau

SEQ ID NO: 2598678 - RNA, 17 nt, Human
agacuuaauagaaacau

SEQ ID NO: 2598679 - RNA, 23 nt, Human
agacuguuuuucagggagguggc

SEQ ID NO: 2598680 - RNA, 21 nt, Human
agacugucagcuuccaaacau

SEQ ID NO: 2598681 - RNA, 22 nt, Human
agacuguaggaagaguagcauu

SEQ ID NO: 2598682 - RNA, 14 nt, Human
agacuguacaaagu

SEQ ID NO: 2598683 - RNA, 15 nt, Human
agacuguacaaagua

SEQ ID NO: 2598684 - RNA, 16 nt, Human
agacuguacaaaguag

SEQ ID NO: 2598685 - RNA, 18 nt, Human
agacugguccugugugca

SEQ ID NO: 2598686 - RNA, 17 nt, Human
agacugguccugugugc

SEQ ID NO: 2598687 - RNA, 15 nt, Human
agacugguccugugu

SEQ ID NO: 2598688 - RNA, 15 nt, Human
agacuggguuucuag

SEQ ID NO: 2598689 - RNA, 20 nt, Human
agacucgcgacaaugcaaac

SEQ ID NO: 2598690 - RNA, 23 nt, Human
agacucgauucauauugaauaua

SEQ ID NO: 2598691 - RNA, 14 nt, Human
ucuuucuuagaaau

SEQ ID NO: 2598692 - RNA, 22 nt, Human
agacuugguguccuuucccucc

SEQ ID NO: 2598693 - RNA, 23 nt, Human
agacuugguguccuuucccucca

SEQ ID NO: 2598694 - RNA, 20 nt, Human
agacuucgacucaggaucca

SEQ ID NO: 2598695 - RNA, 16 nt, Human
agacuucgacucagga

SEQ ID NO: 2598696 - RNA, 19 nt, Human
agacuugguguccuuuccc

SEQ ID NO: 2598697 - RNA, 18 nt, Human
agacuuguaugaaagaug

SEQ ID NO: 2598698 - RNA, 19 nt, Human
agacuuuacaugacacagc

SEQ ID NO: 2598699 - RNA, 14 nt, Human
agacuuuaaagaau

SEQ ID NO: 2598700 - RNA, 20 nt, Human
agacuuuacaugacacagcu

SEQ ID NO: 2598701 - RNA, 12 nt, Human
agacuuucuguu

SEQ ID NO: 2598702 - RNA, 19 nt, Human
agacuuuucuuucagccaa

SEQ ID NO: 2598703 - RNA, 19 nt, Human
agacuuuuuuuaaauagua

SEQ ID NO: 2598704 - RNA, 21 nt, Human
agagaaaaaaaguuugccaga

SEQ ID NO: 2598705 - RNA, 22 nt, Human
agagaaaaaauauuuuccugcc

SEQ ID NO: 2598706 - RNA, 24 nt, Human
agagacagaaagcagaacagugau

SEQ ID NO: 2598707 - RNA, 20 nt, Human
agagacagaagcaggcugga

SEQ ID NO: 2598708 - RNA, 17 nt, Human
agagacagaagcaggcu

SEQ ID NO: 2598709 - RNA, 15 nt, Human
agagacagaagcagg

SEQ ID NO: 2598710 - RNA, 14 nt, Human
agagacagaagcag

SEQ ID NO: 2598711 - RNA, 20 nt, Human
agagacaaacaccucccagg

SEQ ID NO: 2598712 - RNA, 13 nt, Human
agagacagaagca

SEQ ID NO: 2598713 - RNA, 23 nt, Human
agagacagaagcaggcuggaggu

SEQ ID NO: 2598714 - RNA, 13 nt, Human
agagacagagagg

SEQ ID NO: 2598715 - RNA, 22 nt, Human
agagaauuucuaccauuucaga

SEQ ID NO: 2598716 - RNA, 23 nt, Human
agagaauuucuaccauuucagag

SEQ ID NO: 2598717 - RNA, 19 nt, Human
agagacaaacaccucccag

SEQ ID NO: 2598718 - RNA, 21 nt, Human
agagacaaacaccucccagga

SEQ ID NO: 2598719 - RNA, 17 nt, Human
agagaauggaaaacaga

SEQ ID NO: 2598720 - RNA, 16 nt, Human
agagaaugucugaucu

SEQ ID NO: 2598721 - RNA, 19 nt, Human
agagaauuguuugaacccg

SEQ ID NO: 2598722 - RNA, 13 nt, Human
agagaaaaacaaa

SEQ ID NO: 2598723 - RNA, 17 nt, Human
agagaauguagauauug

SEQ ID NO: 2598724 - RNA, 15 nt, Human
agagaaaaacaaauu

SEQ ID NO: 2598725 - RNA, 17 nt, Human
ucuuuauacaacagugc

SEQ ID NO: 2598726 - RNA, 14 nt, Human
ucuuuauacaacag

SEQ ID NO: 2598727 - RNA, 13 nt, Human
ucuuuauacaaca

SEQ ID NO: 2598728 - RNA, 20 nt, Human
ucuuuauaauucuacuuuga

SEQ ID NO: 2598729 - RNA, 16 nt, Human
ucuuuauacuguaauu

SEQ ID NO: 2598730 - RNA, 21 nt, Human
ucuuuauacaacagugcuaaa

SEQ ID NO: 2598731 - RNA, 20 nt, Human
ucuuuauacaacagugcuaa

SEQ ID NO: 2598732 - RNA, 13 nt, Human
ucuuucugcuuug

SEQ ID NO: 2598733 - RNA, 16 nt, Human
ucuuucuuagaaauuu

SEQ ID NO: 2598734 - RNA, 15 nt, Human
ucuuucuuagaaauu

SEQ ID NO: 2598735 - RNA, 19 nt, Human
ucuuucuggcuaugcauuu

SEQ ID NO: 2598736 - RNA, 14 nt, Human
ucuuucuuccucug

SEQ ID NO: 2598737 - RNA, 18 nt, Human
ucuuucuggcuaugcauu

SEQ ID NO: 2598738 - RNA, 13 nt, Human
ucuuucuggaguc

SEQ ID NO: 2598739 - RNA, 21 nt, Human
ucuuucugcagaaacagaaag

SEQ ID NO: 2598740 - RNA, 22 nt, Human
ucuuucugcagaaacagaaagg

SEQ ID NO: 2598741 - RNA, 19 nt, Human
agacucgcgacaaugcaaa

SEQ ID NO: 2598742 - RNA, 18 nt, Human
agacucgcgacaaugcaa

SEQ ID NO: 2598743 - RNA, 17 nt, Human
agacucgcgacaaugca

SEQ ID NO: 2598744 - RNA, 15 nt, Human
agacucgcgacaaug

SEQ ID NO: 2598745 - RNA, 16 nt, Human
ucuuucuuccucugcu

SEQ ID NO: 2598746 - RNA, 15 nt, Human
ucuuucuuccucugc

SEQ ID NO: 2598747 - RNA, 19 nt, Human
ucuuucuuagaaauuuauu

SEQ ID NO: 2598748 - RNA, 17 nt, Human
ucuuucuuccucugcug

SEQ ID NO: 2598749 - RNA, 15 nt, Human
agacuccugcccugu

SEQ ID NO: 2598750 - RNA, 14 nt, Human
agacuccugcccug

SEQ ID NO: 2598751 - RNA, 16 nt, Human
agacuccugcccuguu

SEQ ID NO: 2598752 - RNA, 20 nt, Human
agacuccuugagagaccagg

SEQ ID NO: 2598753 - RNA, 14 nt, Human
agacucgagaacuu

SEQ ID NO: 2598754 - RNA, 18 nt, Human
agacucgagaacuuucau

SEQ ID NO: 2598755 - RNA, 15 nt, Human
agacucgagaacuuu

SEQ ID NO: 2598756 - RNA, 19 nt, Human
agacucgagaacuuucauu

SEQ ID NO: 2598757 - RNA, 20 nt, Human
agacucgauucauauugaau

SEQ ID NO: 2598758 - RNA, 21 nt, Human
ucuugauaccccccucugucu

SEQ ID NO: 2598759 - RNA, 20 nt, Human
ucuugauaccccccucuguc

SEQ ID NO: 2598760 - RNA, 17 nt, Human
ucuugauaccccccucu

SEQ ID NO: 2598761 - RNA, 19 nt, Human
ucuugaucaacaucuuuuc

SEQ ID NO: 2598762 - RNA, 18 nt, Human
ucuugaucaacaucuuuu

SEQ ID NO: 2598763 - RNA, 22 nt, Human
ucuugauaccccccucugucuu

SEQ ID NO: 2598764 - RNA, 17 nt, Human
ucuugaucaacaucuuu

SEQ ID NO: 2598765 - RNA, 17 nt, Human
ucuuggucuucccaggc

SEQ ID NO: 2598766 - RNA, 15 nt, Human
ucuuggucuucccag

SEQ ID NO: 2598767 - RNA, 13 nt, Human
ucuugguuccagc

SEQ ID NO: 2598768 - RNA, 23 nt, Human
ucuugaucaacaucuuuucuugc

SEQ ID NO: 2598769 - RNA, 20 nt, Human
ucuugaucaacaucuuuucu

SEQ ID NO: 2598770 - RNA, 17 nt, Human
ucuugguuccagccugc

SEQ ID NO: 2598771 - RNA, 18 nt, Human
ucuugguuccagccugcc

SEQ ID NO: 2598772 - RNA, 21 nt, Human
ucuugguucauaaaugaauuu

SEQ ID NO: 2598773 - RNA, 18 nt, Human
ucuugguucauaaaugaa

SEQ ID NO: 2598774 - RNA, 19 nt, Human
ucuugguugaaaauaaaaa

SEQ ID NO: 2598775 - RNA, 19 nt, Human
ucuugguuccagccugcca

SEQ ID NO: 2598776 - RNA, 23 nt, Human
ucuugguugaaaauaaaaagauc

SEQ ID NO: 2598777 - RNA, 13 nt, Human
ucuugguugagga

SEQ ID NO: 2598778 - RNA, 14 nt, Human
ucuugguuuccaaa

SEQ ID NO: 2598779 - RNA, 17 nt, Human
ucuugguuggcuggccu

SEQ ID NO: 2598780 - RNA, 15 nt, Human
ucuugguugaggaaa

SEQ ID NO: 2598781 - RNA, 14 nt, Human
ucuugguuuguaaa

SEQ ID NO: 2598782 - RNA, 14 nt, Human
ucuuuaauuuuaca

SEQ ID NO: 2598783 - RNA, 22 nt, Human
ucuuuaaugucacaggcagguc

SEQ ID NO: 2598784 - RNA, 15 nt, Human
ucuuuaguuuuugug

SEQ ID NO: 2598785 - RNA, 16 nt, Human
ucuugguuuguaaauu

SEQ ID NO: 2598786 - RNA, 15 nt, Human
ucuugguuuccuucc

SEQ ID NO: 2598787 - RNA, 17 nt, Human
ucuuguaaauaaagccc

SEQ ID NO: 2598788 - RNA, 13 nt, Human
ucuuguaaauaaa

SEQ ID NO: 2598789 - RNA, 20 nt, Human
ucuuuaaugucacaggcagg

SEQ ID NO: 2598790 - RNA, 18 nt, Human
ucuuguaaauaaagcccu

SEQ ID NO: 2598791 - RNA, 20 nt, Human
ucuucugcccaauuggagga

SEQ ID NO: 2598792 - RNA, 18 nt, Human
ucuucugccggcccuggg

SEQ ID NO: 2598793 - RNA, 19 nt, Human
ucuucugccggcccugggg

SEQ ID NO: 2598794 - RNA, 22 nt, Human
ucuucugcuaugugacuugcau

SEQ ID NO: 2598795 - RNA, 16 nt, Human
ucuucugccuguuaua

SEQ ID NO: 2598796 - RNA, 15 nt, Human
ucuucugccuguuau

SEQ ID NO: 2598797 - RNA, 12 nt, Human
ucuucugccugu

SEQ ID NO: 2598798 - RNA, 11 nt, Human
ucuucugcucc

SEQ ID NO: 2598799 - RNA, 12 nt, Human
ucuucugcucca

SEQ ID NO: 2598800 - RNA, 22 nt, Human
ucuucugcuucagccucccgag

SEQ ID NO: 2598801 - RNA, 17 nt, Human
ucuucugggagggcagc

SEQ ID NO: 2598802 - RNA, 18 nt, Human
ucuucuggcucaaaaaga

SEQ ID NO: 2598803 - RNA, 21 nt, Human
ucuucuggcucaaaaagagaa

SEQ ID NO: 2598804 - RNA, 12 nt, Human
ucuucuggcuca

SEQ ID NO: 2598805 - RNA, 13 nt, Human
ucuucuggcucaa

SEQ ID NO: 2598806 - RNA, 17 nt, Human
ucuucuggagucuccag

SEQ ID NO: 2598807 - RNA, 19 nt, Human
ucuucuggagucuccagug

SEQ ID NO: 2598808 - RNA, 22 nt, Human
ucuucuguacgucugacaggca

SEQ ID NO: 2598809 - RNA, 21 nt, Human
ucuucuguacgucugacaggc

SEQ ID NO: 2598810 - RNA, 15 nt, Human
ucuuauuucauuucu

SEQ ID NO: 2598811 - RNA, 14 nt, Human
ucuuauuucaugaa

SEQ ID NO: 2598812 - RNA, 13 nt, Human
ucuuauuuauuau

SEQ ID NO: 2598813 - RNA, 15 nt, Human
ucuuauucucacucc

SEQ ID NO: 2598814 - RNA, 22 nt, Human
ucuuauugcaaaauagcauuug

SEQ ID NO: 2598815 - RNA, 17 nt, Human
ucuuauuuaaugaaaga

SEQ ID NO: 2598816 - RNA, 18 nt, Human
ucuuauucaguaaaaaac

SEQ ID NO: 2598817 - RNA, 17 nt, Human
ucuuauucaguaaaaaa

SEQ ID NO: 2598818 - RNA, 18 nt, Human
ucuuauuucaugaaaauu

SEQ ID NO: 2598819 - RNA, 16 nt, Human
ucuuauuucaugaaaa

SEQ ID NO: 2598820 - RNA, 11 nt, Human
ucuuauuugcu

SEQ ID NO: 2598821 - RNA, 16 nt, Human
ucuuauuucauuucuu

SEQ ID NO: 2598822 - RNA, 21 nt, Human
ucuucugacuuaagugugcaa

SEQ ID NO: 2598823 - RNA, 19 nt, Human
ucuucugagcuauuucauc

SEQ ID NO: 2598824 - RNA, 21 nt, Human
ucuucugagcuauuucaucua

SEQ ID NO: 2598825 - RNA, 17 nt, Human
ucuucugacgugccuuu

SEQ ID NO: 2598826 - RNA, 15 nt, Human
ucuucugacgugccu

SEQ ID NO: 2598827 - RNA, 14 nt, Human
ucuucugacgugcc

SEQ ID NO: 2598828 - RNA, 13 nt, Human
ucuucuucaccau

SEQ ID NO: 2598829 - RNA, 14 nt, Human
ucuucuucaccauu

SEQ ID NO: 2598830 - RNA, 12 nt, Human
ucuucuuaugca

SEQ ID NO: 2598831 - RNA, 15 nt, Human
ucuucuucaccauuu

SEQ ID NO: 2598832 - RNA, 14 nt, Human
ucuucuucagaaga

SEQ ID NO: 2598833 - RNA, 13 nt, Human
ucuucuucccucc

SEQ ID NO: 2598834 - RNA, 16 nt, Human
ucuucuucagaagaca

SEQ ID NO: 2598835 - RNA, 23 nt, Human
ucuucuguacgucugacaggcaa

SEQ ID NO: 2598836 - RNA, 15 nt, Human
ucuucuuacaugcau

SEQ ID NO: 2598837 - RNA, 20 nt, Human
ucuucuguacgucugacagg

SEQ ID NO: 2598838 - RNA, 23 nt, Human
agacauacuaaccagcagaaaug

SEQ ID NO: 2598839 - RNA, 13 nt, Human
ucuucuugaaauu

SEQ ID NO: 2598840 - RNA, 17 nt, Human
ucuucuugaaauuuuaa

SEQ ID NO: 2598841 - RNA, 19 nt, Human
ucuucuuccugaagcugag

SEQ ID NO: 2598842 - RNA, 22 nt, Human
ucuucuucccucccuaucuaac

SEQ ID NO: 2598843 - RNA, 14 nt, Human
ucuucuucuucaga

SEQ ID NO: 2598844 - RNA, 14 nt, Human
agacauacuugaag

SEQ ID NO: 2598845 - RNA, 16 nt, Human
agacauacuugaaggg

SEQ ID NO: 2598846 - RNA, 17 nt, Human
agacauacuugaagggc

SEQ ID NO: 2598847 - RNA, 19 nt, Human
agacauacuugaagggcca

SEQ ID NO: 2598848 - RNA, 13 nt, Human
agacauacuugaa

SEQ ID NO: 2598849 - RNA, 22 nt, Human
agacauacuccuuccaucaaau

SEQ ID NO: 2598850 - RNA, 23 nt, Human
ucuucuugaacacucaugcugaa

SEQ ID NO: 2598851 - RNA, 22 nt, Human
ucuucuugaacacucaugcuga

SEQ ID NO: 2598852 - RNA, 21 nt, Human
ucuucuugaacacucaugcug

SEQ ID NO: 2598853 - RNA, 15 nt, Human
ucuucuucuucagaa

SEQ ID NO: 2598854 - RNA, 23 nt, Human
agacauuucucuuacugcaaaug

SEQ ID NO: 2598855 - RNA, 21 nt, Human
agacauuugcuaugagcuggg

SEQ ID NO: 2598856 - RNA, 22 nt, Human
agacauuuguaaauguaaaacu

SEQ ID NO: 2598857 - RNA, 22 nt, Human
agacauggagacuccugcccug

SEQ ID NO: 2598858 - RNA, 16 nt, Human
agacauggcuugccac

SEQ ID NO: 2598859 - RNA, 23 nt, Human
agacauuuauacucuuuuuucau

SEQ ID NO: 2598860 - RNA, 21 nt, Human
agacauuuauacucuuuuuuc

SEQ ID NO: 2598861 - RNA, 17 nt, Human
agacauuuauacucuuu

SEQ ID NO: 2598862 - RNA, 15 nt, Human
agacauuuauacucu

SEQ ID NO: 2598863 - RNA, 22 nt, Human
agacauggcuugccacagcucu

SEQ ID NO: 2598864 - RNA, 12 nt, Human
agacauggggag

SEQ ID NO: 2598865 - RNA, 23 nt, Human
agacauuguuuugccaacauugc

SEQ ID NO: 2598866 - RNA, 14 nt, Human
agacauagaauuaa

SEQ ID NO: 2598867 - RNA, 20 nt, Human
agacauacuugaagggccag

SEQ ID NO: 2598868 - RNA, 21 nt, Human
agacauacuugaagggccaga

SEQ ID NO: 2598869 - RNA, 23 nt, Human
agacauacuugaagggccagagc

SEQ ID NO: 2598870 - RNA, 14 nt, Human
agacaugaauauga

SEQ ID NO: 2598871 - RNA, 20 nt, Human
agacaugagugcgugcucag

SEQ ID NO: 2598872 - RNA, 22 nt, Human
agacaugauuuccuugaaugug

SEQ ID NO: 2598873 - RNA, 15 nt, Human
agacaugauuuccuu

SEQ ID NO: 2598874 - RNA, 17 nt, Human
agacaugaauaugauua

SEQ ID NO: 2598875 - RNA, 17 nt, Human
agacaugaaugcacacu

SEQ ID NO: 2598876 - RNA, 19 nt, Human
agacauggagacuccugcc

SEQ ID NO: 2598877 - RNA, 18 nt, Human
agacauggagacuccugc

SEQ ID NO: 2598878 - RNA, 13 nt, Human
agacauggagacu

SEQ ID NO: 2598879 - RNA, 15 nt, Human
agacaugcugacuuu

SEQ ID NO: 2598880 - RNA, 23 nt, Human
agacaugccacaaggacuuccug

SEQ ID NO: 2598881 - RNA, 18 nt, Human
ucuugagccuugaacuuu

SEQ ID NO: 2598882 - RNA, 19 nt, Human
ucuugagccuugaacuuug

SEQ ID NO: 2598883 - RNA, 17 nt, Human
agacucaucuuacugua

SEQ ID NO: 2598884 - RNA, 16 nt, Human
agacucaucuuacugu

SEQ ID NO: 2598885 - RNA, 21 nt, Human
ucuugaguuugucgcucaugu

SEQ ID NO: 2598886 - RNA, 22 nt, Human
ucuugauaagaccaccaccuca

SEQ ID NO: 2598887 - RNA, 18 nt, Human
agacucaucuuacuguac

SEQ ID NO: 2598888 - RNA, 14 nt, Human
ucuugauaagacca

SEQ ID NO: 2598889 - RNA, 22 nt, Human
ucuugaguuugucgcucaugug

SEQ ID NO: 2598890 - RNA, 21 nt, Human
ucuugaguuuuguuuuaaaau

SEQ ID NO: 2598891 - RNA, 17 nt, Human
ucuugagccuugaacuu

SEQ ID NO: 2598892 - RNA, 15 nt, Human
agacucauucuucug

SEQ ID NO: 2598893 - RNA, 21 nt, Human
agacucaguggggaggggcug

SEQ ID NO: 2598894 - RNA, 15 nt, Human
agacucaccucugcc

SEQ ID NO: 2598895 - RNA, 12 nt, Human
agacucaguguu

SEQ ID NO: 2598896 - RNA, 13 nt, Human
agacucaguguuc

SEQ ID NO: 2598897 - RNA, 12 nt, Human
agacucaguuug

SEQ ID NO: 2598898 - RNA, 15 nt, Human
agacucaguuuguca

SEQ ID NO: 2598899 - RNA, 16 nt, Human
agacucaguuugucag

SEQ ID NO: 2598900 - RNA, 17 nt, Human
agacucaguuugucaga

SEQ ID NO: 2598901 - RNA, 21 nt, Human
agacucaguuugucagacuuu

SEQ ID NO: 2598902 - RNA, 22 nt, Human
agaccugccccuccucucugcc

SEQ ID NO: 2598903 - RNA, 23 nt, Human
agaccugccccuccucucugccc

SEQ ID NO: 2598904 - RNA, 16 nt, Human
agaccugccccuccuc

SEQ ID NO: 2598905 - RNA, 16 nt, Human
agaccucgagcagaug

SEQ ID NO: 2598906 - RNA, 13 nt, Human
agaccugccccuc

SEQ ID NO: 2598907 - RNA, 23 nt, Human
agacuauucaaacagucucagga

SEQ ID NO: 2598908 - RNA, 20 nt, Human
agaccugcugagggaccagc

SEQ ID NO: 2598909 - RNA, 22 nt, Human
agacucaagguucccagagaug

SEQ ID NO: 2598910 - RNA, 21 nt, Human
agacucaagguucccagagau

SEQ ID NO: 2598911 - RNA, 12 nt, Human
agacucaccucu

SEQ ID NO: 2598912 - RNA, 14 nt, Human
agacucaccucugc

SEQ ID NO: 2598913 - RNA, 22 nt, Human
agacucagguuguaguaaagaa

SEQ ID NO: 2598914 - RNA, 23 nt, Human
agacucagguuguaguaaagaaa

SEQ ID NO: 2598915 - RNA, 20 nt, Human
agacucacaaccugaaccua

SEQ ID NO: 2598916 - RNA, 17 nt, Human
agacuauuuaacuugag

SEQ ID NO: 2598917 - RNA, 20 nt, Human
agaccuggagccccugggug

SEQ ID NO: 2598918 - RNA, 19 nt, Human
agaccuggagccccugggu

SEQ ID NO: 2598919 - RNA, 16 nt, Human
agaccuggagccccug

SEQ ID NO: 2598920 - RNA, 13 nt, Human
agaccuggagccc

SEQ ID NO: 2598921 - RNA, 18 nt, Human
agacuauuuaacuugagg

SEQ ID NO: 2598922 - RNA, 13 nt, Human
agacucaaaugcu

SEQ ID NO: 2598923 - RNA, 16 nt, Human
agaccgagugaaccua

SEQ ID NO: 2598924 - RNA, 21 nt, Human
agaccgagcgcuuucuggaaa

SEQ ID NO: 2598925 - RNA, 20 nt, Human
agaccgaacuguuguauaaa

SEQ ID NO: 2598926 - RNA, 16 nt, Human
agacccuaccccacca

SEQ ID NO: 2598927 - RNA, 18 nt, Human
agacccuaccccaccacg

SEQ ID NO: 2598928 - RNA, 17 nt, Human
agaccgaacuguuguau

SEQ ID NO: 2598929 - RNA, 16 nt, Human
agaccguccucacccc

SEQ ID NO: 2598930 - RNA, 15 nt, Human
agaccguccucaccc

SEQ ID NO: 2598931 - RNA, 14 nt, Human
agaccguccucacc

SEQ ID NO: 2598932 - RNA, 13 nt, Human
agaccguccucac

SEQ ID NO: 2598933 - RNA, 19 nt, Human
agaccguccucaccccugu

SEQ ID NO: 2598934 - RNA, 18 nt, Human
agaccguccucaccccug

SEQ ID NO: 2598935 - RNA, 13 nt, Human
agaccaaaauaaa

SEQ ID NO: 2598936 - RNA, 14 nt, Human
agaccccuggcuuu

SEQ ID NO: 2598937 - RNA, 15 nt, Human
agaccccuggcuuuu

SEQ ID NO: 2598938 - RNA, 21 nt, Human
agaccccuggcuuuucacugc

SEQ ID NO: 2598939 - RNA, 19 nt, Human
agacccuaagccuccuuuu

SEQ ID NO: 2598940 - RNA, 15 nt, Human
agacccgaggaaacu

SEQ ID NO: 2598941 - RNA, 14 nt, Human
agacccggcugcgu

SEQ ID NO: 2598942 - RNA, 20 nt, Human
agaccguccucaccccuguc

SEQ ID NO: 2598943 - RNA, 14 nt, Human
agaccuagggagga

SEQ ID NO: 2598944 - RNA, 15 nt, Human
agaccuagggaggac

SEQ ID NO: 2598945 - RNA, 16 nt, Human
agaccuauuugacaua

SEQ ID NO: 2598946 - RNA, 11 nt, Human
agaccucagcc

SEQ ID NO: 2598947 - RNA, 19 nt, Human
agaccuauuccuccugggc

SEQ ID NO: 2598948 - RNA, 16 nt, Human
agaccuauuccuccug

SEQ ID NO: 2598949 - RNA, 19 nt, Human
agaccuagggaggaccuua

SEQ ID NO: 2598950 - RNA, 12 nt, Human
agaccucagcca

SEQ ID NO: 2598951 - RNA, 14 nt, Human
agaccucagccaug

SEQ ID NO: 2598952 - RNA, 12 nt, Human
agaccucagccu

SEQ ID NO: 2598953 - RNA, 13 nt, Human
agaccucagccug

SEQ ID NO: 2598954 - RNA, 14 nt, Human
agaccucagccugu

SEQ ID NO: 2598955 - RNA, 15 nt, Human
agaccucagccugug

SEQ ID NO: 2598956 - RNA, 16 nt, Human
agaccucagccugugc

SEQ ID NO: 2598957 - RNA, 17 nt, Human
agaccucagccugugcu

SEQ ID NO: 2598958 - RNA, 19 nt, Human
agaccucagccugugcugc

SEQ ID NO: 2598959 - RNA, 23 nt, Human
agaccuccccagccccuagccca

SEQ ID NO: 2598960 - RNA, 20 nt, Human
agaccuccccagccccuagc

SEQ ID NO: 2598961 - RNA, 17 nt, Human
agaccuccccagccccu

SEQ ID NO: 2598962 - RNA, 15 nt, Human
agaccuccccagccc

SEQ ID NO: 2598963 - RNA, 14 nt, Human
agaccuccccagcc

SEQ ID NO: 2598964 - RNA, 22 nt, Human
agaccucaucaggaugaaccca

SEQ ID NO: 2598965 - RNA, 19 nt, Human
agaccucaucaggaugaac

SEQ ID NO: 2598966 - RNA, 18 nt, Human
agaccucaucaggaugaa

SEQ ID NO: 2598967 - RNA, 13 nt, Human
agaccugaagaau

SEQ ID NO: 2598968 - RNA, 18 nt, Human
agaccucagugccuuccu

SEQ ID NO: 2598969 - RNA, 20 nt, Human
agaccucagugccuuccugu

SEQ ID NO: 2598970 - RNA, 17 nt, Human
agaccucaucaggauga

SEQ ID NO: 2598971 - RNA, 16 nt, Human
agaccucaucaggaug

SEQ ID NO: 2598972 - RNA, 15 nt, Human
agaccucaucaggau

SEQ ID NO: 2598973 - RNA, 18 nt, Human
agaccucagccaugagga

SEQ ID NO: 2598974 - RNA, 20 nt, Human
agaccucagccugugcugcc

SEQ ID NO: 2598975 - RNA, 16 nt, Human
agaucauccuuuccag

SEQ ID NO: 2598976 - RNA, 15 nt, Human
agaucauccuuucca

SEQ ID NO: 2598977 - RNA, 13 nt, Human
agaucauccuuuc

SEQ ID NO: 2598978 - RNA, 18 nt, Human
agaucauauacgugaaaa

SEQ ID NO: 2598979 - RNA, 21 nt, Human
agaucauccagaaguuccuca

SEQ ID NO: 2598980 - RNA, 16 nt, Human
agaucauauacgugaa

SEQ ID NO: 2598981 - RNA, 13 nt, Human
agauccaggacua

SEQ ID NO: 2598982 - RNA, 18 nt, Human
agaucauccuuuccagca

SEQ ID NO: 2598983 - RNA, 12 nt, Human
agaucaugaaga

SEQ ID NO: 2598984 - RNA, 18 nt, Human
agaucaguguaccauuug

SEQ ID NO: 2598985 - RNA, 21 nt, Human
agaucaguguaccauuugccu

SEQ ID NO: 2598986 - RNA, 13 nt, Human
ugaccaaugucuu

SEQ ID NO: 2598987 - RNA, 14 nt, Human
ugaccaaugucuug

SEQ ID NO: 2598988 - RNA, 15 nt, Human
agaucaguguaccau

SEQ ID NO: 2598989 - RNA, 13 nt, Human
agaucagccuggg

SEQ ID NO: 2598990 - RNA, 15 nt, Human
agaucagccugggca

SEQ ID NO: 2598991 - RNA, 20 nt, Human
ugacauuguggcacauucuu

SEQ ID NO: 2598992 - RNA, 17 nt, Human
ugacaguucugaagaau

SEQ ID NO: 2598993 - RNA, 22 nt, Human
ugacauuguagagcuucuggca

SEQ ID NO: 2598994 - RNA, 21 nt, Human
ugacauuguuggccaaagcca

SEQ ID NO: 2598995 - RNA, 20 nt, Human
ugacauuguuggccaaagcc

SEQ ID NO: 2598996 - RNA, 18 nt, Human
ugaccaaugauggucacc

SEQ ID NO: 2598997 - RNA, 21 nt, Human
ugaccaauauuguacaguuuu

SEQ ID NO: 2598998 - RNA, 19 nt, Human
ugaccaauauuguacaguu

SEQ ID NO: 2598999 - RNA, 15 nt, Human
ugacauuuauauauu

SEQ ID NO: 2599000 - RNA, 16 nt, Human
ugacauuuauauauug

SEQ ID NO: 2599001 - RNA, 23 nt, Human
ugaccaauauuauacuaagaaaa

SEQ ID NO: 2599002 - RNA, 18 nt, Human
ugaccaauauuguacagu

SEQ ID NO: 2599003 - RNA, 17 nt, Human
ugaccaauauuguacag

SEQ ID NO: 2599004 - RNA, 14 nt, Human
ugacaaaaauucaa

SEQ ID NO: 2599005 - RNA, 21 nt, Human
ugacacacagcucuguccugg

SEQ ID NO: 2599006 - RNA, 18 nt, Human
ugacacagaaaauguuga

SEQ ID NO: 2599007 - RNA, 19 nt, Human
ugacacagaaaauguugag

SEQ ID NO: 2599008 - RNA, 22 nt, Human
ugacagccucccacccccaucu

SEQ ID NO: 2599009 - RNA, 17 nt, Human
ugacagccucccacccc

SEQ ID NO: 2599010 - RNA, 19 nt, Human
ugacagccucccaccccca

SEQ ID NO: 2599011 - RNA, 20 nt, Human
ugacaggcaaugcuggcugu

SEQ ID NO: 2599012 - RNA, 23 nt, Human
ugacagcugcuccuagagggagg

SEQ ID NO: 2599013 - RNA, 16 nt, Human
ugacagcugucccugu

SEQ ID NO: 2599014 - RNA, 17 nt, Human
ugacagcugucccuguc

SEQ ID NO: 2599015 - RNA, 18 nt, Human
ugacagcugucccuguca

SEQ ID NO: 2599016 - RNA, 14 nt, Human
ugacaggcagcaga

SEQ ID NO: 2599017 - RNA, 13 nt, Human
ugacaggcagcag

SEQ ID NO: 2599018 - RNA, 20 nt, Human
ugacagcugucccugucacc

SEQ ID NO: 2599019 - RNA, 21 nt, Human
ugacagcugucccugucacca

SEQ ID NO: 2599020 - RNA, 12 nt, Human
ugacagcugcuc

SEQ ID NO: 2599021 - RNA, 13 nt, Human
ugacagcugcucc

SEQ ID NO: 2599022 - RNA, 14 nt, Human
ugacagcugcuccu

SEQ ID NO: 2599023 - RNA, 15 nt, Human
ugacagcugcuccua

SEQ ID NO: 2599024 - RNA, 18 nt, Human
ugacagcugcuccuagag

SEQ ID NO: 2599025 - RNA, 21 nt, Human
ugacagcugcuccuagaggga

SEQ ID NO: 2599026 - RNA, 22 nt, Human
ugacagcugcuccuagagggag

SEQ ID NO: 2599027 - RNA, 12 nt, Human
ugacagcugucc

SEQ ID NO: 2599028 - RNA, 14 nt, Human
ugacagcugucccu

SEQ ID NO: 2599029 - RNA, 21 nt, Human
ugacagggaagcuacagguua

SEQ ID NO: 2599030 - RNA, 20 nt, Human
ugacagggaagcuacagguu

SEQ ID NO: 2599031 - RNA, 19 nt, Human
ugacagggaagcuacaggu

SEQ ID NO: 2599032 - RNA, 17 nt, Human
ugacagggaagcuacag

SEQ ID NO: 2599033 - RNA, 16 nt, Human
ugacagggaagcuaca

SEQ ID NO: 2599034 - RNA, 14 nt, Human
ugacagggaagcua

SEQ ID NO: 2599035 - RNA, 13 nt, Human
ugacagggaagcu

SEQ ID NO: 2599036 - RNA, 12 nt, Human
ugacagggaagc

SEQ ID NO: 2599037 - RNA, 18 nt, Human
ugacaggcagccuggaca

SEQ ID NO: 2599038 - RNA, 19 nt, Human
ugacaggcagcagagacuu

SEQ ID NO: 2599039 - RNA, 16 nt, Human
ugacaggcagcagaga

SEQ ID NO: 2599040 - RNA, 15 nt, Human
ugacaggcagcagag

SEQ ID NO: 2599041 - RNA, 20 nt, Human
ugacaggcagccuggacaua

SEQ ID NO: 2599042 - RNA, 16 nt, Human
ugacagggcacaccgg

SEQ ID NO: 2599043 - RNA, 11 nt, Human
ugacagggcac

SEQ ID NO: 2599044 - RNA, 23 nt, Human
ugacagggaagcuacagguuaca

SEQ ID NO: 2599045 - RNA, 16 nt, Human
ugacaguguugaaaau

SEQ ID NO: 2599046 - RNA, 19 nt, Human
ugacaguguugaaaauguu

SEQ ID NO: 2599047 - RNA, 23 nt, Human
ugacaguuuuccauaaagaagau

SEQ ID NO: 2599048 - RNA, 16 nt, Human
ugacaguucugaagaa

SEQ ID NO: 2599049 - RNA, 20 nt, Human
ugacagggcacaccgggcac

SEQ ID NO: 2599050 - RNA, 21 nt, Human
ugacagugccugggaauguau

SEQ ID NO: 2599051 - RNA, 21 nt, Human
ugacaguggccgcccaaggcc

SEQ ID NO: 2599052 - RNA, 13 nt, Human
agaugcuggguug

SEQ ID NO: 2599053 - RNA, 18 nt, Human
agaugcuggguuggugca

SEQ ID NO: 2599054 - RNA, 19 nt, Human
agaugcuggcccagggccc

SEQ ID NO: 2599055 - RNA, 23 nt, Human
agaugcuggcccagggcccagag

SEQ ID NO: 2599056 - RNA, 20 nt, Human
agaugcuggcccagggccca

SEQ ID NO: 2599057 - RNA, 21 nt, Human
agaugcuggcccagggcccag

SEQ ID NO: 2599058 - RNA, 22 nt, Human
agaugcuggcccagggcccaga

SEQ ID NO: 2599059 - RNA, 14 nt, Human
agaugcuagaacuc

SEQ ID NO: 2599060 - RNA, 15 nt, Human
agaugcuagaacucc

SEQ ID NO: 2599061 - RNA, 19 nt, Human
agaugcaguucugaagaag

SEQ ID NO: 2599062 - RNA, 18 nt, Human
agaugcaguucugaagaa

SEQ ID NO: 2599063 - RNA, 15 nt, Human
agaugccugaagcca

SEQ ID NO: 2599064 - RNA, 17 nt, Human
agaugcagagagccauu

SEQ ID NO: 2599065 - RNA, 15 nt, Human
agaugcagagagcca

SEQ ID NO: 2599066 - RNA, 14 nt, Human
agaugcagagagcc

SEQ ID NO: 2599067 - RNA, 13 nt, Human
agaugcagagagc

SEQ ID NO: 2599068 - RNA, 12 nt, Human
agaugcagagag

SEQ ID NO: 2599069 - RNA, 17 nt, Human
agaugcaguucugaaga

SEQ ID NO: 2599070 - RNA, 15 nt, Human
agaugcaccagcccu

SEQ ID NO: 2599071 - RNA, 14 nt, Human
agaugcaccagccc

SEQ ID NO: 2599072 - RNA, 16 nt, Human
agauccagggacugaa

SEQ ID NO: 2599073 - RNA, 14 nt, Human
agaucauggcaucc

SEQ ID NO: 2599074 - RNA, 19 nt, Human
agauccagggacagaggcc

SEQ ID NO: 2599075 - RNA, 22 nt, Human
agauccagggacagaggcccca

SEQ ID NO: 2599076 - RNA, 23 nt, Human
agaugcaccaccaagccaaggga

SEQ ID NO: 2599077 - RNA, 21 nt, Human
agaugcaccaccaagccaagg

SEQ ID NO: 2599078 - RNA, 21 nt, Human
agaucccagaaggaccuccug

SEQ ID NO: 2599079 - RNA, 21 nt, Human
agaugugcacccaugggcucu

SEQ ID NO: 2599080 - RNA, 18 nt, Human
agaugugcaaaugcaagc

SEQ ID NO: 2599081 - RNA, 16 nt, Human
agaugugcaaaugcaa

SEQ ID NO: 2599082 - RNA, 20 nt, Human
agaugugauuuaauaguguu

SEQ ID NO: 2599083 - RNA, 12 nt, Human
agaugugauuua

SEQ ID NO: 2599084 - RNA, 23 nt, Human
agaugcuggguuggugcacagug

SEQ ID NO: 2599085 - RNA, 15 nt, Human
agaugcuucucacug

SEQ ID NO: 2599086 - RNA, 22 nt, Human
agauguggaaaagccaagaggc

SEQ ID NO: 2599087 - RNA, 17 nt, Human
agauguggaaaagccaa

SEQ ID NO: 2599088 - RNA, 15 nt, Human
agaugugcacccaug

SEQ ID NO: 2599089 - RNA, 13 nt, Human
agaugugcaccca

SEQ ID NO: 2599090 - RNA, 18 nt, Human
agauguucagucauuuuu

SEQ ID NO: 2599091 - RNA, 17 nt, Human
agauguucagucauuuu

SEQ ID NO: 2599092 - RNA, 17 nt, Human
agauguucuaagucuuu

SEQ ID NO: 2599093 - RNA, 21 nt, Human
agauguucagauugcuuugau

SEQ ID NO: 2599094 - RNA, 17 nt, Human
agauguuagaucagggg

SEQ ID NO: 2599095 - RNA, 12 nt, Human
agauguuaaaaa

SEQ ID NO: 2599096 - RNA, 21 nt, Human
agauguggccuuccauuuaua

SEQ ID NO: 2599097 - RNA, 13 nt, Human
ugacccacugcuu

SEQ ID NO: 2599098 - RNA, 12 nt, Human
ugacccacugcu

SEQ ID NO: 2599099 - RNA, 23 nt, Human
ugacccaccccugugcuccgugc

SEQ ID NO: 2599100 - RNA, 18 nt, Human
ugacccaccccugugcuc

SEQ ID NO: 2599101 - RNA, 17 nt, Human
ugacccaccccugugcu

SEQ ID NO: 2599102 - RNA, 16 nt, Human
ugacccaccccugugc

SEQ ID NO: 2599103 - RNA, 15 nt, Human
ugacccaccccugug

SEQ ID NO: 2599104 - RNA, 13 nt, Human
ugacccaccccug

SEQ ID NO: 2599105 - RNA, 12 nt, Human
ugacccaccccu

SEQ ID NO: 2599106 - RNA, 11 nt, Human
ugacccacccc

SEQ ID NO: 2599107 - RNA, 16 nt, Human
ugacccaaagaccaau

SEQ ID NO: 2599108 - RNA, 17 nt, Human
ugacccacaagaaauga

SEQ ID NO: 2599109 - RNA, 19 nt, Human
agauguucucuaucauuua

SEQ ID NO: 2599110 - RNA, 18 nt, Human
agauguucucuaucauuu

SEQ ID NO: 2599111 - RNA, 23 nt, Human
ugaccauucuccaccugccaggg

SEQ ID NO: 2599112 - RNA, 17 nt, Human
agauguucucuaucauu

SEQ ID NO: 2599113 - RNA, 15 nt, Human
agauguucucuauca

SEQ ID NO: 2599114 - RNA, 12 nt, Human
agauguucucua

SEQ ID NO: 2599115 - RNA, 20 nt, Human
agauguucuaagucuuucca

SEQ ID NO: 2599116 - RNA, 21 nt, Human
agauguucuaagucuuuccau

SEQ ID NO: 2599117 - RNA, 22 nt, Human
agauguucuaagucuuuccauu

SEQ ID NO: 2599118 - RNA, 22 nt, Human
agagucccacugccucagguuc

SEQ ID NO: 2599119 - RNA, 21 nt, Human
agagucccacugccucagguu

SEQ ID NO: 2599120 - RNA, 20 nt, Human
agagucccacugccucaggu

SEQ ID NO: 2599121 - RNA, 19 nt, Human
agagucccacugccucagg

SEQ ID NO: 2599122 - RNA, 21 nt, Human
agagucccagagcaggaggcc

SEQ ID NO: 2599123 - RNA, 18 nt, Human
agagucccacugccucag

SEQ ID NO: 2599124 - RNA, 15 nt, Human
agagucccacugccu

SEQ ID NO: 2599125 - RNA, 14 nt, Human
agagucccacugcc

SEQ ID NO: 2599126 - RNA, 13 nt, Human
agagucccacugc

SEQ ID NO: 2599127 - RNA, 14 nt, Human
agaguccaggcccc

SEQ ID NO: 2599128 - RNA, 15 nt, Human
agaguccaggcccca

SEQ ID NO: 2599129 - RNA, 16 nt, Human
agaguccaggccccaa

SEQ ID NO: 2599130 - RNA, 19 nt, Human
agagucaucuccaucagcu

SEQ ID NO: 2599131 - RNA, 21 nt, Human
agagucaucuccaucagcugu

SEQ ID NO: 2599132 - RNA, 18 nt, Human
agagucauauuuugauua

SEQ ID NO: 2599133 - RNA, 13 nt, Human
agagucaucucca

SEQ ID NO: 2599134 - RNA, 14 nt, Human
agagucaucuccau

SEQ ID NO: 2599135 - RNA, 18 nt, Human
agagucaucuccaucagc

SEQ ID NO: 2599136 - RNA, 13 nt, Human
agagucauauuuu

SEQ ID NO: 2599137 - RNA, 17 nt, Human
agagucauauuuugauu

SEQ ID NO: 2599138 - RNA, 15 nt, Human
agagucauauuuuga

SEQ ID NO: 2599139 - RNA, 18 nt, Human
agagucagccuucccccu

SEQ ID NO: 2599140 - RNA, 18 nt, Human
ugaauguggcuugagaaa

SEQ ID NO: 2599141 - RNA, 14 nt, Human
ugaauguguguggu

SEQ ID NO: 2599142 - RNA, 14 nt, Human
ugaaugugucacua

SEQ ID NO: 2599143 - RNA, 16 nt, Human
agagucagcagaacug

SEQ ID NO: 2599144 - RNA, 19 nt, Human
ugaaugguuccaugccuga

SEQ ID NO: 2599145 - RNA, 21 nt, Human
ugaaugguguuguaugccuuu

SEQ ID NO: 2599146 - RNA, 20 nt, Human
ugaaugguguuguaugccuu

SEQ ID NO: 2599147 - RNA, 18 nt, Human
ugaaugguguuguaugcc

SEQ ID NO: 2599148 - RNA, 22 nt, Human
ugaaugguuccaugccugaggg

SEQ ID NO: 2599149 - RNA, 21 nt, Human
ugaaugguuccaugccugagg

SEQ ID NO: 2599150 - RNA, 23 nt, Human
ugaaugguuccaugccugagggu

SEQ ID NO: 2599151 - RNA, 19 nt, Human
ugaaugucagugugacuga

SEQ ID NO: 2599152 - RNA, 15 nt, Human
ugaaugucuuuugaa

SEQ ID NO: 2599153 - RNA, 20 nt, Human
ugaaugucuaaggucacaca

SEQ ID NO: 2599154 - RNA, 23 nt, Human
ugaaugucuuuugaauauuccca

SEQ ID NO: 2599155 - RNA, 16 nt, Human
ugaaugucauucacaa

SEQ ID NO: 2599156 - RNA, 20 nt, Human
ugaaugguuuucaaaauaaa

SEQ ID NO: 2599157 - RNA, 15 nt, Human
ugaaugguguuguau

SEQ ID NO: 2599158 - RNA, 15 nt, Human
ugaaugguccagggu

SEQ ID NO: 2599159 - RNA, 14 nt, Human
ugaaugguccaggg

SEQ ID NO: 2599160 - RNA, 21 nt, Human
ugaauggucagcguugcaugu

SEQ ID NO: 2599161 - RNA, 20 nt, Human
ugaaugguauggaacucucu

SEQ ID NO: 2599162 - RNA, 13 nt, Human
ugaauggucagcg

SEQ ID NO: 2599163 - RNA, 17 nt, Human
ugaauggguccauuuug

SEQ ID NO: 2599164 - RNA, 17 nt, Human
ugaagcaccaagcucaa

SEQ ID NO: 2599165 - RNA, 20 nt, Human
ugaaugggcaaaacugaauu

SEQ ID NO: 2599166 - RNA, 19 nt, Human
ugaaugggcaaaacugaau

SEQ ID NO: 2599167 - RNA, 13 nt, Human
ugaaugguaugga

SEQ ID NO: 2599168 - RNA, 17 nt, Human
ugaaugggcaaaacuga

SEQ ID NO: 2599169 - RNA, 18 nt, Human
agagucuggugaagcuca

SEQ ID NO: 2599170 - RNA, 17 nt, Human
agagucugaacagcugu

SEQ ID NO: 2599171 - RNA, 16 nt, Human
agagucugaacagcug

SEQ ID NO: 2599172 - RNA, 13 nt, Human
agagucugaacag

SEQ ID NO: 2599173 - RNA, 12 nt, Human
agagucugaaca

SEQ ID NO: 2599174 - RNA, 12 nt, Human
agaguccuauuu

SEQ ID NO: 2599175 - RNA, 13 nt, Human
agaguccucacuc

SEQ ID NO: 2599176 - RNA, 20 nt, Human
agaguugauacuacaguuug

SEQ ID NO: 2599177 - RNA, 22 nt, Human
agaguugauacuacaguuuguu

SEQ ID NO: 2599178 - RNA, 17 nt, Human
agaguugauacuacagu

SEQ ID NO: 2599179 - RNA, 23 nt, Human
agagucuggugaagcucacuucu

SEQ ID NO: 2599180 - RNA, 12 nt, Human
agagucugucuc

SEQ ID NO: 2599181 - RNA, 21 nt, Human
agaguuguaaauauauaaaua

SEQ ID NO: 2599182 - RNA, 20 nt, Human
agaguuguaaauauauaaau

SEQ ID NO: 2599183 - RNA, 19 nt, Human
agaguuguaaauauauaaa

SEQ ID NO: 2599184 - RNA, 18 nt, Human
agaguuguaaauauauaa

SEQ ID NO: 2599185 - RNA, 17 nt, Human
agaguuguaaauauaua

SEQ ID NO: 2599186 - RNA, 16 nt, Human
agaguuguaaauauau

SEQ ID NO: 2599187 - RNA, 15 nt, Human
agaguuguaaauaua

SEQ ID NO: 2599188 - RNA, 13 nt, Human
agaguuguaaaua

SEQ ID NO: 2599189 - RNA, 12 nt, Human
agaguuguuaca

SEQ ID NO: 2599190 - RNA, 20 nt, Human
agaguugaugguuguacaua

SEQ ID NO: 2599191 - RNA, 16 nt, Human
agagugaaaauugucu

SEQ ID NO: 2599192 - RNA, 16 nt, Human
agaguugcugggagcu

SEQ ID NO: 2599193 - RNA, 17 nt, Human
agaguuuagcuggaaaa

SEQ ID NO: 2599194 - RNA, 16 nt, Human
agaguuuagcuggaaa

SEQ ID NO: 2599195 - RNA, 21 nt, Human
agaguuguuacauuuuuaagu

SEQ ID NO: 2599196 - RNA, 14 nt, Human
agaguuuaacacaa

SEQ ID NO: 2599197 - RNA, 19 nt, Human
agaguugugcacauggcuu

SEQ ID NO: 2599198 - RNA, 22 nt, Human
agaguuguaaauauauaaauau

SEQ ID NO: 2599199 - RNA, 18 nt, Human
agaucacgccacugcacu

SEQ ID NO: 2599200 - RNA, 17 nt, Human
agaucacgccacugcac

SEQ ID NO: 2599201 - RNA, 21 nt, Human
agaucaccagcccggccugcu

SEQ ID NO: 2599202 - RNA, 16 nt, Human
agaucaccagcccggc

SEQ ID NO: 2599203 - RNA, 15 nt, Human
agaucaccagcccgg

SEQ ID NO: 2599204 - RNA, 14 nt, Human
agaucaccagcccg

SEQ ID NO: 2599205 - RNA, 22 nt, Human
agaucacgccacugcacuccag

SEQ ID NO: 2599206 - RNA, 23 nt, Human
ugaauuucuucacuguugaaaau

SEQ ID NO: 2599207 - RNA, 21 nt, Human
ugaauuucuucacuguugaaa

SEQ ID NO: 2599208 - RNA, 15 nt, Human
ugaauuucuuuugcc

SEQ ID NO: 2599209 - RNA, 13 nt, Human
ugaauuucuaaaa

SEQ ID NO: 2599210 - RNA, 16 nt, Human
agaucacgcuccccgc

SEQ ID NO: 2599211 - RNA, 15 nt, Human
agaucacgcuccccg

SEQ ID NO: 2599212 - RNA, 20 nt, Human
ugaauuucuucacuguugaa

SEQ ID NO: 2599213 - RNA, 17 nt, Human
ugaauuuucccacugca

SEQ ID NO: 2599214 - RNA, 16 nt, Human
ugaauuuucccacugc

SEQ ID NO: 2599215 - RNA, 15 nt, Human
ugaauuuucccacug

SEQ ID NO: 2599216 - RNA, 14 nt, Human
ugaauuuucccacu

SEQ ID NO: 2599217 - RNA, 14 nt, Human
ugaauuuucugugu

SEQ ID NO: 2599218 - RNA, 13 nt, Human
ugaauuuucugug

SEQ ID NO: 2599219 - RNA, 20 nt, Human
ugaauuuucccacugcaccc

SEQ ID NO: 2599220 - RNA, 15 nt, Human
ugaauuuucuguguu

SEQ ID NO: 2599221 - RNA, 23 nt, Human
ugaauuuucuuuuuaauaaaaag

SEQ ID NO: 2599222 - RNA, 22 nt, Human
ugaauuuuucucuaacucagaa

SEQ ID NO: 2599223 - RNA, 19 nt, Human
ugaauuuucacaugaacau

SEQ ID NO: 2599224 - RNA, 18 nt, Human
ugaauuuucacaugaaca

SEQ ID NO: 2599225 - RNA, 17 nt, Human
ugaauuuucacaugaac

SEQ ID NO: 2599226 - RNA, 16 nt, Human
ugaauuuucacaugaa

SEQ ID NO: 2599227 - RNA, 15 nt, Human
ugaauuuucacauga

SEQ ID NO: 2599228 - RNA, 13 nt, Human
ugaauuuucacau

SEQ ID NO: 2599229 - RNA, 16 nt, Human
ugaauuuuuuuuuccu

SEQ ID NO: 2599230 - RNA, 19 nt, Human
ugaauuuuuuuuuccuagc

SEQ ID NO: 2599231 - RNA, 20 nt, Human
ugaauuuuuuuuuccuagcc

SEQ ID NO: 2599232 - RNA, 18 nt, Human
ugacaaaaauucaacuca

SEQ ID NO: 2599233 - RNA, 19 nt, Human
ugacaaaaaguuuccauau

SEQ ID NO: 2599234 - RNA, 20 nt, Human
ugacacacagcucuguccug

SEQ ID NO: 2599235 - RNA, 21 nt, Human
ugaauuuuuuucaucuucucu

SEQ ID NO: 2599236 - RNA, 23 nt, Human
ugaauuuuuuucaucuucucugg

SEQ ID NO: 2599237 - RNA, 23 nt, Human
agauacugcuacuguaauuuuau

SEQ ID NO: 2599238 - RNA, 19 nt, Human
agauacugcuacuguaauu

SEQ ID NO: 2599239 - RNA, 19 nt, Human
agauacuggaaguuuugca

SEQ ID NO: 2599240 - RNA, 20 nt, Human
agauacuggaaguuuugcau

SEQ ID NO: 2599241 - RNA, 21 nt, Human
agauacuggaaguuuugcauu

SEQ ID NO: 2599242 - RNA, 20 nt, Human
agauacgacuuuauuuucug

SEQ ID NO: 2599243 - RNA, 14 nt, Human
agauaaaucuagua

SEQ ID NO: 2599244 - RNA, 13 nt, Human
agauaaauuauaa

SEQ ID NO: 2599245 - RNA, 21 nt, Human
agauaacaagaucuuucagga

SEQ ID NO: 2599246 - RNA, 18 nt, Human
agauaacaagaucuuuca

SEQ ID NO: 2599247 - RNA, 19 nt, Human
agauacgacuuuauuuucu

SEQ ID NO: 2599248 - RNA, 17 nt, Human
agauaaagguucaugca

SEQ ID NO: 2599249 - RNA, 12 nt, Human
agauaaauauua

SEQ ID NO: 2599250 - RNA, 22 nt, Human
agaguuuaacacaaguccugug

SEQ ID NO: 2599251 - RNA, 18 nt, Human
agauaaagauuucuugag

SEQ ID NO: 2599252 - RNA, 12 nt, Human
agauaaaugugc

SEQ ID NO: 2599253 - RNA, 14 nt, Human
agauaaauauuaua

SEQ ID NO: 2599254 - RNA, 15 nt, Human
agaguuuaacacaag

SEQ ID NO: 2599255 - RNA, 16 nt, Human
agaucacgccacugca

SEQ ID NO: 2599256 - RNA, 15 nt, Human
agaucacgccacugc

SEQ ID NO: 2599257 - RNA, 14 nt, Human
agaucacgccacug

SEQ ID NO: 2599258 - RNA, 16 nt, Human
agaucaaggagaggag

SEQ ID NO: 2599259 - RNA, 18 nt, Human
agaucaagcugugagaca

SEQ ID NO: 2599260 - RNA, 14 nt, Human
agaucaagcuguga

SEQ ID NO: 2599261 - RNA, 12 nt, Human
agaucaagcugu

SEQ ID NO: 2599262 - RNA, 21 nt, Human
agaucaauuuguaauugcuua

SEQ ID NO: 2599263 - RNA, 14 nt, Human
agaucaauuuguaa

SEQ ID NO: 2599264 - RNA, 15 nt, Human
agaucaccagaauaa

SEQ ID NO: 2599265 - RNA, 12 nt, Human
agauauucaagu

SEQ ID NO: 2599266 - RNA, 22 nt, Human
agauauugucagaguucugcuc

SEQ ID NO: 2599267 - RNA, 18 nt, Human
agauauugugaaguacau

SEQ ID NO: 2599268 - RNA, 19 nt, Human
agauauugugaaguacaua

SEQ ID NO: 2599269 - RNA, 13 nt, Human
agauauuuauaua

SEQ ID NO: 2599270 - RNA, 23 nt, Human
agauauuuacaugaauugcauuu

SEQ ID NO: 2599271 - RNA, 21 nt, Human
agauauugugaaguacauauu

SEQ ID NO: 2599272 - RNA, 15 nt, Human
agauauuaccaguuu

SEQ ID NO: 2599273 - RNA, 17 nt, Human
agauauggcagcgaaag

SEQ ID NO: 2599274 - RNA, 17 nt, Human
agauaugggacauuuuu

SEQ ID NO: 2599275 - RNA, 18 nt, Human
agagcagaugcagagagc

SEQ ID NO: 2599276 - RNA, 15 nt, Human
agagcagaugcagag

SEQ ID NO: 2599277 - RNA, 14 nt, Human
agagcagaugcaga

SEQ ID NO: 2599278 - RNA, 20 nt, Human
agagcaggaggccccuggcc

SEQ ID NO: 2599279 - RNA, 15 nt, Human
agagcaggaggcccc

SEQ ID NO: 2599280 - RNA, 19 nt, Human
agagcagaugcagagagcc

SEQ ID NO: 2599281 - RNA, 23 nt, Human
agagcaggaggccccuggcccag

SEQ ID NO: 2599282 - RNA, 22 nt, Human
agagcaggaggccccuggccca

SEQ ID NO: 2599283 - RNA, 12 nt, Human
agagcaggcaca

SEQ ID NO: 2599284 - RNA, 13 nt, Human
agagcaggcacau

SEQ ID NO: 2599285 - RNA, 18 nt, Human
agagcaggcacauggagg

SEQ ID NO: 2599286 - RNA, 19 nt, Human
agagcaggcacauggagga

SEQ ID NO: 2599287 - RNA, 20 nt, Human
agagcaggcacauggaggag

SEQ ID NO: 2599288 - RNA, 13 nt, Human
agagcaggcuggc

SEQ ID NO: 2599289 - RNA, 19 nt, Human
agagcaggcguucagcuca

SEQ ID NO: 2599290 - RNA, 22 nt, Human
agagcaggcuggcagcucucca

SEQ ID NO: 2599291 - RNA, 17 nt, Human
agagcaggcuggcagcu

SEQ ID NO: 2599292 - RNA, 22 nt, Human
agagcagggauuaaccucugca

SEQ ID NO: 2599293 - RNA, 24 nt, Human
agagcagggauuaaccucugcacu

SEQ ID NO: 2599294 - RNA, 23 nt, Human
agagcaggcuggcagcucuccag

SEQ ID NO: 2599295 - RNA, 22 nt, Human
agagcagggguccuugguguga

SEQ ID NO: 2599296 - RNA, 18 nt, Human
agagcagagaccaucccu

SEQ ID NO: 2599297 - RNA, 17 nt, Human
agagcagagaccauccc

SEQ ID NO: 2599298 - RNA, 20 nt, Human
agagcagagaccaucccuga

SEQ ID NO: 2599299 - RNA, 23 nt, Human
agagcagaacggagccccaggcc

SEQ ID NO: 2599300 - RNA, 20 nt, Human
agagcagaacggagccccag

SEQ ID NO: 2599301 - RNA, 12 nt, Human
agagcagaugca

SEQ ID NO: 2599302 - RNA, 14 nt, Human
agagcagaggcagc

SEQ ID NO: 2599303 - RNA, 17 nt, Human
agagccagagaagugac

SEQ ID NO: 2599304 - RNA, 16 nt, Human
agagccagagaaguga

SEQ ID NO: 2599305 - RNA, 15 nt, Human
agagccagagaagug

SEQ ID NO: 2599306 - RNA, 13 nt, Human
agagccagagaag

SEQ ID NO: 2599307 - RNA, 10 nt, Human
agagccagag

SEQ ID NO: 2599308 - RNA, 16 nt, Human
agagccacccuguguu

SEQ ID NO: 2599309 - RNA, 22 nt, Human
agagccagaaccuggagggcua

SEQ ID NO: 2599310 - RNA, 11 nt, Human
agagccuugcg

SEQ ID NO: 2599311 - RNA, 21 nt, Human
agagccuugcggaagguucua

SEQ ID NO: 2599312 - RNA, 17 nt, Human
agagccuugguguccac

SEQ ID NO: 2599313 - RNA, 19 nt, Human
agagccuugguguccaccu

SEQ ID NO: 2599314 - RNA, 20 nt, Human
agagccuugguguccaccug

SEQ ID NO: 2599315 - RNA, 21 nt, Human
agagccuugguguccaccugg

SEQ ID NO: 2599316 - RNA, 16 nt, Human
agagcagugggccugg

SEQ ID NO: 2599317 - RNA, 22 nt, Human
agagcauuacgugagccaggua

SEQ ID NO: 2599318 - RNA, 21 nt, Human
agagcauuacgugagccaggu

SEQ ID NO: 2599319 - RNA, 20 nt, Human
agagcauuacgugagccagg

SEQ ID NO: 2599320 - RNA, 19 nt, Human
agagcauuacgugagccag

SEQ ID NO: 2599321 - RNA, 17 nt, Human
agagcauugcauggaca

SEQ ID NO: 2599322 - RNA, 19 nt, Human
agagcauugaauuggagag

SEQ ID NO: 2599323 - RNA, 18 nt, Human
agagcauugccauucccu

SEQ ID NO: 2599324 - RNA, 15 nt, Human
agagcauugccauuc

SEQ ID NO: 2599325 - RNA, 15 nt, Human
agagccaccaagagg

SEQ ID NO: 2599326 - RNA, 19 nt, Human
agagccaccaagagggacg

SEQ ID NO: 2599327 - RNA, 20 nt, Human
agagcauuuccaacaccaca

SEQ ID NO: 2599328 - RNA, 18 nt, Human
ucuuugggaauauuugaa

SEQ ID NO: 2599329 - RNA, 16 nt, Human
ucuuugggaauauuug

SEQ ID NO: 2599330 - RNA, 16 nt, Human
agagauuuaauuaauc

SEQ ID NO: 2599331 - RNA, 13 nt, Human
agagauuuaauua

SEQ ID NO: 2599332 - RNA, 12 nt, Human
agagauuucaag

SEQ ID NO: 2599333 - RNA, 18 nt, Human
agagcaaaauaauuuuaa

SEQ ID NO: 2599334 - RNA, 13 nt, Human
agagauuuuucau

SEQ ID NO: 2599335 - RNA, 21 nt, Human
ucuuuggacccugaggcccag

SEQ ID NO: 2599336 - RNA, 17 nt, Human
ucuuuggacccugaggc

SEQ ID NO: 2599337 - RNA, 14 nt, Human
ucuuuggcuccccu

SEQ ID NO: 2599338 - RNA, 22 nt, Human
ucuuuggcuccccuguaccuuu

SEQ ID NO: 2599339 - RNA, 15 nt, Human
ucuuugggaauauuu

SEQ ID NO: 2599340 - RNA, 13 nt, Human
agagacaggaaaa

SEQ ID NO: 2599341 - RNA, 21 nt, Human
agagacaggaaaauccucugg

SEQ ID NO: 2599342 - RNA, 12 nt, Human
agagcagagacc

SEQ ID NO: 2599343 - RNA, 22 nt, Human
agagcacuuaagagaauauuuu

SEQ ID NO: 2599344 - RNA, 21 nt, Human
agagcacuuaagagaauauuu

SEQ ID NO: 2599345 - RNA, 20 nt, Human
agagcacuuaagagaauauu

SEQ ID NO: 2599346 - RNA, 19 nt, Human
agagcacuuaagagaauau

SEQ ID NO: 2599347 - RNA, 19 nt, Human
agagcaccuaguccaguga

SEQ ID NO: 2599348 - RNA, 18 nt, Human
agagcaccuaguccagug

SEQ ID NO: 2599349 - RNA, 17 nt, Human
agagcaccccucucugc

SEQ ID NO: 2599350 - RNA, 16 nt, Human
agagcaccccucucug

SEQ ID NO: 2599351 - RNA, 20 nt, Human
agagcacuggguugcagggg

SEQ ID NO: 2599352 - RNA, 21 nt, Human
agagcacuggguugcagggga

SEQ ID NO: 2599353 - RNA, 15 nt, Human
agagcacuuaagaga

SEQ ID NO: 2599354 - RNA, 21 nt, Human
agagcaaugcccguaaugcuu

SEQ ID NO: 2599355 - RNA, 14 nt, Human
agagcaagucugca

SEQ ID NO: 2599356 - RNA, 16 nt, Human
agagcaagucugcagg

SEQ ID NO: 2599357 - RNA, 14 nt, Human
agagcaagucugga

SEQ ID NO: 2599358 - RNA, 16 nt, Human
agagcacagcccuccc

SEQ ID NO: 2599359 - RNA, 15 nt, Human
agagcacagcccucc

SEQ ID NO: 2599360 - RNA, 14 nt, Human
agagcacagcccuc

SEQ ID NO: 2599361 - RNA, 13 nt, Human
agagcacagcccu

SEQ ID NO: 2599362 - RNA, 11 nt, Human
agagcacagcc

SEQ ID NO: 2599363 - RNA, 20 nt, Human
agagcacacuuggcccaagu

SEQ ID NO: 2599364 - RNA, 14 nt, Human
agagcacacuguag

SEQ ID NO: 2599365 - RNA, 23 nt, Human
agagcaagauccugucuuuaagg

SEQ ID NO: 2599366 - RNA, 14 nt, Human
agagcaaaauugau

SEQ ID NO: 2599367 - RNA, 17 nt, Human
ugaaauaagccagacau

SEQ ID NO: 2599368 - RNA, 18 nt, Human
ugaaauaagccagacauc

SEQ ID NO: 2599369 - RNA, 20 nt, Human
ugaaauaagccagacaucaa

SEQ ID NO: 2599370 - RNA, 23 nt, Human
ugaaauaagccagacaucaacag

SEQ ID NO: 2599371 - RNA, 15 nt, Human
ugaaaguuaauccac

SEQ ID NO: 2599372 - RNA, 17 nt, Human
ugaaaguuugcacugua

SEQ ID NO: 2599373 - RNA, 18 nt, Human
ugaaaguuuucagaaccu

SEQ ID NO: 2599374 - RNA, 20 nt, Human
ugaaaguuuucagaaccucu

SEQ ID NO: 2599375 - RNA, 11 nt, Human
ugaaagugacu

SEQ ID NO: 2599376 - RNA, 18 nt, Human
agagcgccgugaguucuc

SEQ ID NO: 2599377 - RNA, 13 nt, Human
agagcgccccucc

SEQ ID NO: 2599378 - RNA, 17 nt, Human
agagcgagagucugucu

SEQ ID NO: 2599379 - RNA, 18 nt, Human
agagccuuuuucuaggcc

SEQ ID NO: 2599380 - RNA, 23 nt, Human
agagccuuuggaugaccagaaca

SEQ ID NO: 2599381 - RNA, 21 nt, Human
agagccuuuggaugaccagaa

SEQ ID NO: 2599382 - RNA, 22 nt, Human
agagccuugguguccaccuggc

SEQ ID NO: 2599383 - RNA, 23 nt, Human
agagccuugguguccaccuggcc

SEQ ID NO: 2599384 - RNA, 21 nt, Human
agagcgugcuccagccuggcu

SEQ ID NO: 2599385 - RNA, 23 nt, Human
agagcggucucaggcugguggga

SEQ ID NO: 2599386 - RNA, 14 nt, Human
agagcggucucagg

SEQ ID NO: 2599387 - RNA, 13 nt, Human
agagcgcgucugg

SEQ ID NO: 2599388 - RNA, 21 nt, Human
agagcgccgugaguucucagg

SEQ ID NO: 2599389 - RNA, 20 nt, Human
agagcgccgugaguucucag

SEQ ID NO: 2599390 - RNA, 22 nt, Human
agagcgccgugaguucucaggg

SEQ ID NO: 2599391 - RNA, 14 nt, Human
agagcgccugcccc

SEQ ID NO: 2599392 - RNA, 15 nt, Human
agagcgccugccccu

SEQ ID NO: 2599393 - RNA, 20 nt, Human
agagcgccugccccucccag

SEQ ID NO: 2599394 - RNA, 21 nt, Human
agagcgccugccccucccaga

SEQ ID NO: 2599395 - RNA, 23 nt, Human
agagcgccugccccucccagaac

SEQ ID NO: 2599396 - RNA, 18 nt, Human
agagcugccaccugccug

SEQ ID NO: 2599397 - RNA, 13 nt, Human
agagcugcccucc

SEQ ID NO: 2599398 - RNA, 21 nt, Human
agagcugcccuccuuguccac

SEQ ID NO: 2599399 - RNA, 20 nt, Human
agagcugcccuccuugucca

SEQ ID NO: 2599400 - RNA, 17 nt, Human
ugaaauuguacauauuu

SEQ ID NO: 2599401 - RNA, 14 nt, Human
ugaaauuguacaua

SEQ ID NO: 2599402 - RNA, 22 nt, Human
ugaaauugucuagcagagcagg

SEQ ID NO: 2599403 - RNA, 23 nt, Human
ugaaauuguacauauuuguggaa

SEQ ID NO: 2599404 - RNA, 18 nt, Human
ugaaauuguuuaaguguu

SEQ ID NO: 2599405 - RNA, 23 nt, Human
ugaaauuguuuaaguguuguaaa

SEQ ID NO: 2599406 - RNA, 21 nt, Human
ugaaauuuucuagacuuucug

SEQ ID NO: 2599407 - RNA, 17 nt, Human
ugaaauuuucuagacuu

SEQ ID NO: 2599408 - RNA, 20 nt, Human
ugaaauuuuccaaugucugc

SEQ ID NO: 2599409 - RNA, 19 nt, Human
ugaaauuuuccaaugucug

SEQ ID NO: 2599410 - RNA, 18 nt, Human
ugaaauuuuccaaugucu

SEQ ID NO: 2599411 - RNA, 16 nt, Human
ugaaauuuuauaugcu

SEQ ID NO: 2599412 - RNA, 18 nt, Human
ugaaauuuuauaugcuua

SEQ ID NO: 2599413 - RNA, 17 nt, Human
ugaaauuuuccaauguc

SEQ ID NO: 2599414 - RNA, 17 nt, Human
ugaaauuuuaaacuaua

SEQ ID NO: 2599415 - RNA, 22 nt, Human
ugaaauuuuauaugcuuacuga

SEQ ID NO: 2599416 - RNA, 19 nt, Human
ugaaauuuuaaaaauuguu

SEQ ID NO: 2599417 - RNA, 14 nt, Human
ugaaauuuuaaccu

SEQ ID NO: 2599418 - RNA, 20 nt, Human
ugaaauuuuaaccuaugaua

SEQ ID NO: 2599419 - RNA, 22 nt, Human
ugaaauuuuaaccuaugauauu

SEQ ID NO: 2599420 - RNA, 19 nt, Human
ugaaauacacaaguaaaca

SEQ ID NO: 2599421 - RNA, 14 nt, Human
ugaaauaauaaauc

SEQ ID NO: 2599422 - RNA, 15 nt, Human
ugaaauaucuguauu

SEQ ID NO: 2599423 - RNA, 16 nt, Human
ugaaauauacacacag

SEQ ID NO: 2599424 - RNA, 17 nt, Human
ugaaauauacacacagc

SEQ ID NO: 2599425 - RNA, 19 nt, Human
ugaaauaguucaaagccaa

SEQ ID NO: 2599426 - RNA, 15 nt, Human
ugaaauauacacaca

SEQ ID NO: 2599427 - RNA, 15 nt, Human
ugaaauuguauuaca

SEQ ID NO: 2599428 - RNA, 18 nt, Human
ugaaauauuauguuaaaa

SEQ ID NO: 2599429 - RNA, 12 nt, Human
ugaaauaugcau

SEQ ID NO: 2599430 - RNA, 18 nt, Human
ugaaauaugcuggcugga

SEQ ID NO: 2599431 - RNA, 19 nt, Human
agaggcugaggccuggacu

SEQ ID NO: 2599432 - RNA, 18 nt, Human
agaggcugaggccuggac

SEQ ID NO: 2599433 - RNA, 17 nt, Human
agaggcugaggccugga

SEQ ID NO: 2599434 - RNA, 14 nt, Human
agaggcugaggccu

SEQ ID NO: 2599435 - RNA, 13 nt, Human
agaggcugaaaga

SEQ ID NO: 2599436 - RNA, 19 nt, Human
agaggcugaaagaggccaa

SEQ ID NO: 2599437 - RNA, 13 nt, Human
agaggcugaggac

SEQ ID NO: 2599438 - RNA, 17 nt, Human
agagguauuuaucuuua

SEQ ID NO: 2599439 - RNA, 16 nt, Human
agaggucaagcccagg

SEQ ID NO: 2599440 - RNA, 18 nt, Human
agaggucaagcccaggag

SEQ ID NO: 2599441 - RNA, 20 nt, Human
agaggucaagcccaggagga

SEQ ID NO: 2599442 - RNA, 13 nt, Human
agaggcugaggca

SEQ ID NO: 2599443 - RNA, 16 nt, Human
agagguagggcugcca

SEQ ID NO: 2599444 - RNA, 19 nt, Human
agagguccacaacacacag

SEQ ID NO: 2599445 - RNA, 14 nt, Human
agaggucugugcug

SEQ ID NO: 2599446 - RNA, 13 nt, Human
agaggucugugcu

SEQ ID NO: 2599447 - RNA, 22 nt, Human
agaggucucugccggcucuuuc

SEQ ID NO: 2599448 - RNA, 18 nt, Human
agaggucugugcugaggc

SEQ ID NO: 2599449 - RNA, 16 nt, Human
agaggucugugcugag

SEQ ID NO: 2599450 - RNA, 19 nt, Human
agaggucugugcugaggcc

SEQ ID NO: 2599451 - RNA, 12 nt, Human
agaggucuuuuu

SEQ ID NO: 2599452 - RNA, 15 nt, Human
agagguugcagugag

SEQ ID NO: 2599453 - RNA, 13 nt, Human
agagguuucagug

SEQ ID NO: 2599454 - RNA, 17 nt, Human
agagguucauuucaaau

SEQ ID NO: 2599455 - RNA, 17 nt, Human
agaguagaauugcauug

SEQ ID NO: 2599456 - RNA, 18 nt, Human
agaguagaauugcauuga

SEQ ID NO: 2599457 - RNA, 22 nt, Human
agaguagauggugaaauuuauu

SEQ ID NO: 2599458 - RNA, 21 nt, Human
agaguagauggugaaauuuau

SEQ ID NO: 2599459 - RNA, 13 nt, Human
agaguagacauuu

SEQ ID NO: 2599460 - RNA, 18 nt, Human
ugaagcaaagcaccagcu

SEQ ID NO: 2599461 - RNA, 17 nt, Human
ugaagcaaagcaccagc

SEQ ID NO: 2599462 - RNA, 22 nt, Human
agaguagcaaguucuagagaag

SEQ ID NO: 2599463 - RNA, 12 nt, Human
agaguagcaagu

SEQ ID NO: 2599464 - RNA, 23 nt, Human
agaguagcaaguucuagagaaga

SEQ ID NO: 2599465 - RNA, 15 nt, Human
ugaagcaaacacauu

SEQ ID NO: 2599466 - RNA, 18 nt, Human
ugaagcaaaucagaaacu

SEQ ID NO: 2599467 - RNA, 14 nt, Human
ugaagcaaaucaga

SEQ ID NO: 2599468 - RNA, 15 nt, Human
ugaagcaaaucagaa

SEQ ID NO: 2599469 - RNA, 16 nt, Human
agaguacagugagcca

SEQ ID NO: 2599470 - RNA, 19 nt, Human
agaguacagugagccaaga

SEQ ID NO: 2599471 - RNA, 15 nt, Human
agaguagaauugcau

SEQ ID NO: 2599472 - RNA, 16 nt, Human
agaguagaauugcauu

SEQ ID NO: 2599473 - RNA, 18 nt, Human
agaguaauggguuucaua

SEQ ID NO: 2599474 - RNA, 17 nt, Human
agaguaauggguuucau

SEQ ID NO: 2599475 - RNA, 14 nt, Human
agaguaauggguuu

SEQ ID NO: 2599476 - RNA, 22 nt, Human
agagguuugacuagaugaugga

SEQ ID NO: 2599477 - RNA, 18 nt, Human
agagguuuuaaagugauu

SEQ ID NO: 2599478 - RNA, 22 nt, Human
agaguaauccaagcaaauguga

SEQ ID NO: 2599479 - RNA, 19 nt, Human
agagguuuuaaagugauua

SEQ ID NO: 2599480 - RNA, 12 nt, Human
agagguuuuguu

SEQ ID NO: 2599481 - RNA, 13 nt, Human
agaggcagggucu

SEQ ID NO: 2599482 - RNA, 10 nt, Human
agaggcaggg

SEQ ID NO: 2599483 - RNA, 19 nt, Human
agaggccaugauucgccca

SEQ ID NO: 2599484 - RNA, 14 nt, Human
agaggccauggcag

SEQ ID NO: 2599485 - RNA, 13 nt, Human
agaggcagggagg

SEQ ID NO: 2599486 - RNA, 22 nt, Human
agaggcaggggcuugcuuugca

SEQ ID NO: 2599487 - RNA, 17 nt, Human
agaggcagggaggggac

SEQ ID NO: 2599488 - RNA, 15 nt, Human
agaggccauggcaga

SEQ ID NO: 2599489 - RNA, 16 nt, Human
agaggccauggcagaa

SEQ ID NO: 2599490 - RNA, 20 nt, Human
agaggccauggcagaauaau

SEQ ID NO: 2599491 - RNA, 23 nt, Human
agaggccauggcagaauaaucuu

SEQ ID NO: 2599492 - RNA, 17 nt, Human
agaggcuaugugagcac

SEQ ID NO: 2599493 - RNA, 19 nt, Human
agaggcuauuauuuucacu

SEQ ID NO: 2599494 - RNA, 22 nt, Human
agaggcucguugacuggcugug

SEQ ID NO: 2599495 - RNA, 22 nt, Human
agaggccauguuccaauaaaca

SEQ ID NO: 2599496 - RNA, 19 nt, Human
agaggccaugggccuccug

SEQ ID NO: 2599497 - RNA, 22 nt, Human
agagcuucuuccaggugcccag

SEQ ID NO: 2599498 - RNA, 23 nt, Human
agagcuucuuccaggugcccagc

SEQ ID NO: 2599499 - RNA, 14 nt, Human
agagcuuggacugg

SEQ ID NO: 2599500 - RNA, 13 nt, Human
agagcuuggacug

SEQ ID NO: 2599501 - RNA, 17 nt, Human
agagcuugaugccagua

SEQ ID NO: 2599502 - RNA, 22 nt, Human
agagcuuucuguccuuuuggca

SEQ ID NO: 2599503 - RNA, 23 nt, Human
agagcuuggacuggaugcauguu

SEQ ID NO: 2599504 - RNA, 23 nt, Human
agagcuuucuguccuuuuggcac

SEQ ID NO: 2599505 - RNA, 22 nt, Human
agagcuuucuucccgaacccca

SEQ ID NO: 2599506 - RNA, 23 nt, Human
agaggcagagagcggucucaggc

SEQ ID NO: 2599507 - RNA, 14 nt, Human
agaggcagagagcg

SEQ ID NO: 2599508 - RNA, 13 nt, Human
agaggcagagagc

SEQ ID NO: 2599509 - RNA, 12 nt, Human
agaggcagagag

SEQ ID NO: 2599510 - RNA, 22 nt, Human
agaggcagagaaagaagagaca

SEQ ID NO: 2599511 - RNA, 22 nt, Human
agaggaaaaguaaggugcaguu

SEQ ID NO: 2599512 - RNA, 21 nt, Human
agaggaaaaguaaggugcagu

SEQ ID NO: 2599513 - RNA, 19 nt, Human
agaggaaaaguaaggugca

SEQ ID NO: 2599514 - RNA, 18 nt, Human
agaggaaaaguaaggugc

SEQ ID NO: 2599515 - RNA, 16 nt, Human
agaggaaaaaaaugac

SEQ ID NO: 2599516 - RNA, 17 nt, Human
agaggaaaaaaaugacu

SEQ ID NO: 2599517 - RNA, 19 nt, Human
agaggcagccccauucugc

SEQ ID NO: 2599518 - RNA, 13 nt, Human
agaggcagcccca

SEQ ID NO: 2599519 - RNA, 24 nt, Human
agaggcagccccauucugccugcc

SEQ ID NO: 2599520 - RNA, 15 nt, Human
agaggcagagagcgg

SEQ ID NO: 2599521 - RNA, 15 nt, Human
agagcuucuuccagg

SEQ ID NO: 2599522 - RNA, 22 nt, Human
agagcuucuguugcugccucau

SEQ ID NO: 2599523 - RNA, 15 nt, Human
agagcuuaacagugu

SEQ ID NO: 2599524 - RNA, 21 nt, Human
agagcuuaaugauaauauugu

SEQ ID NO: 2599525 - RNA, 21 nt, Human
agagcuguucacagccagacu

SEQ ID NO: 2599526 - RNA, 20 nt, Human
agagcuguucccaaauuuuc

SEQ ID NO: 2599527 - RNA, 19 nt, Human
agagcuguuuauggccuca

SEQ ID NO: 2599528 - RNA, 20 nt, Human
agagcuguuuauggccucag

SEQ ID NO: 2599529 - RNA, 21 nt, Human
agagcuguuuauggccucagc

SEQ ID NO: 2599530 - RNA, 18 nt, Human
agagcuggcaaagguggc

SEQ ID NO: 2599531 - RNA, 15 nt, Human
agagcuggcaaaggu

SEQ ID NO: 2599532 - RNA, 19 nt, Human
agagcuggagccuggugcc

SEQ ID NO: 2599533 - RNA, 18 nt, Human
agagcuggagccuggugc

SEQ ID NO: 2599534 - RNA, 12 nt, Human
agagcuggagcc

SEQ ID NO: 2599535 - RNA, 17 nt, Human
agagcuggagccuggug

SEQ ID NO: 2599536 - RNA, 15 nt, Human
agagcuggagccugg

SEQ ID NO: 2599537 - RNA, 14 nt, Human
agagcugcgggcug

SEQ ID NO: 2599538 - RNA, 20 nt, Human
ugaagaaaggguguuuuucu

SEQ ID NO: 2599539 - RNA, 21 nt, Human
ugaagaaaccuucagauuugu

SEQ ID NO: 2599540 - RNA, 14 nt, Human
agagcugccucucg

SEQ ID NO: 2599541 - RNA, 22 nt, Human
agagcugcucuggaaaauguga

SEQ ID NO: 2599542 - RNA, 16 nt, Human
agagcugcucuggaaa

SEQ ID NO: 2599543 - RNA, 15 nt, Human
agagcugcucuggaa

SEQ ID NO: 2599544 - RNA, 14 nt, Human
agagcugcucugga

SEQ ID NO: 2599545 - RNA, 23 nt, Human
agagcugcucuggaaaaugugac

SEQ ID NO: 2599546 - RNA, 19 nt, Human
ugaacuuugaccucugcag

SEQ ID NO: 2599547 - RNA, 20 nt, Human
ugaacuuugaccucugcagc

SEQ ID NO: 2599548 - RNA, 11 nt, Human
ugaacuuugcu

SEQ ID NO: 2599549 - RNA, 15 nt, Human
ugaacuuugcugagc

SEQ ID NO: 2599550 - RNA, 22 nt, Human
ugaacuuugaccucugcagcaa

SEQ ID NO: 2599551 - RNA, 21 nt, Human
ugaagaaaaucacuuaggaaa

SEQ ID NO: 2599552 - RNA, 15 nt, Human
ugaagaaaaucacuu

SEQ ID NO: 2599553 - RNA, 13 nt, Human
ugaacuuuuugua

SEQ ID NO: 2599554 - RNA, 16 nt, Human
ugaacuuugcugagcc

SEQ ID NO: 2599555 - RNA, 21 nt, Human
ugaacuauggacggugcucca

SEQ ID NO: 2599556 - RNA, 15 nt, Human
ugaagaaaaaauaca

SEQ ID NO: 2599557 - RNA, 17 nt, Human
ugaagaaaaaauacauu

SEQ ID NO: 2599558 - RNA, 18 nt, Human
ugaagaaaaaauacauuu

SEQ ID NO: 2599559 - RNA, 17 nt, Human
ugaagaaaacuccuuua

SEQ ID NO: 2599560 - RNA, 19 nt, Human
ugaagaaaaaauacauuuu

SEQ ID NO: 2599561 - RNA, 15 nt, Human
ugaagaaaagugggc

SEQ ID NO: 2599562 - RNA, 18 nt, Human
ugaagaaaagugggccag

SEQ ID NO: 2599563 - RNA, 19 nt, Human
ugaacaaauuuacagagac

SEQ ID NO: 2599564 - RNA, 20 nt, Human
ugaacaaauuuacagagaca

SEQ ID NO: 2599565 - RNA, 18 nt, Human
ugaacaaauuuacagaga

SEQ ID NO: 2599566 - RNA, 15 nt, Human
ugaaauuuuuauuaa

SEQ ID NO: 2599567 - RNA, 19 nt, Human
ugaaauuuucuagacuuuc

SEQ ID NO: 2599568 - RNA, 18 nt, Human
ugaaauuuucuagacuuu

SEQ ID NO: 2599569 - RNA, 20 nt, Human
ugaaauuuucuagacuuucu

SEQ ID NO: 2599570 - RNA, 14 nt, Human
ugaaccuaccuuca

SEQ ID NO: 2599571 - RNA, 16 nt, Human
ugaaccgcugaauaug

SEQ ID NO: 2599572 - RNA, 22 nt, Human
ugaaccgaugagaaauaaaguu

SEQ ID NO: 2599573 - RNA, 20 nt, Human
ugaaccuaccuucauuucag

SEQ ID NO: 2599574 - RNA, 15 nt, Human
ugaaccugaugcuga

SEQ ID NO: 2599575 - RNA, 12 nt, Human
ugaaccuggagg

SEQ ID NO: 2599576 - RNA, 22 nt, Human
ugaaccuaggagugccccauuc

SEQ ID NO: 2599577 - RNA, 21 nt, Human
ugaaccuaggagugccccauu

SEQ ID NO: 2599578 - RNA, 18 nt, Human
ugaacucaaacugaggaa

SEQ ID NO: 2599579 - RNA, 17 nt, Human
ugaacucaacuuugaca

SEQ ID NO: 2599580 - RNA, 12 nt, Human
ugaacuccuggc

SEQ ID NO: 2599581 - RNA, 15 nt, Human
ugaacuccuggccuc

SEQ ID NO: 2599582 - RNA, 14 nt, Human
ugaacuccuggccu

SEQ ID NO: 2599583 - RNA, 23 nt, Human
ugaacuauuccccagcagggucu

SEQ ID NO: 2599584 - RNA, 14 nt, Human
ugaacucaaacuga

SEQ ID NO: 2599585 - RNA, 16 nt, Human
ugaacucaaacugagg

SEQ ID NO: 2599586 - RNA, 17 nt, Human
ugaacucaaacugagga

SEQ ID NO: 2599587 - RNA, 23 nt, Human
ugaacuaggguggugcauuuuug

SEQ ID NO: 2599588 - RNA, 21 nt, Human
ugaacuaggauuguaguccca

SEQ ID NO: 2599589 - RNA, 17 nt, Human
ugaaccugaugcugacu

SEQ ID NO: 2599590 - RNA, 23 nt, Human
ugaacuagaguuuagcuggaaaa

SEQ ID NO: 2599591 - RNA, 16 nt, Human
agcauuugucaacaaa

SEQ ID NO: 2599592 - RNA, 14 nt, Human
agcauuuauaaauu

SEQ ID NO: 2599593 - RNA, 20 nt, Human
agcauuuaguccaaugucuu

SEQ ID NO: 2599594 - RNA, 17 nt, Human
agcauuugaaugcauuu

SEQ ID NO: 2599595 - RNA, 16 nt, Human
agcauuugaaugcauu

SEQ ID NO: 2599596 - RNA, 13 nt, Human
agcauuuauguuu

SEQ ID NO: 2599597 - RNA, 21 nt, Human
agcauuuaguccaaugucuuu

SEQ ID NO: 2599598 - RNA, 17 nt, Human
agcauuguuugcuuauu

SEQ ID NO: 2599599 - RNA, 15 nt, Human
agcauuuacuuugaa

SEQ ID NO: 2599600 - RNA, 17 nt, Human
agcauuuacuuugaauu

SEQ ID NO: 2599601 - RNA, 20 nt, Human
agcauuuaauguagccaugg

SEQ ID NO: 2599602 - RNA, 14 nt, Human
agcauuuuauaaau

SEQ ID NO: 2599603 - RNA, 15 nt, Human
agcauuuuauaaauc

SEQ ID NO: 2599604 - RNA, 13 nt, Human
agcauuuuauaaa

SEQ ID NO: 2599605 - RNA, 23 nt, Human
agcauuuuagcaauuuauacaau

SEQ ID NO: 2599606 - RNA, 20 nt, Human
agcauuuuauaaaucgcuuu

SEQ ID NO: 2599607 - RNA, 12 nt, Human
agcauuuuccuc

SEQ ID NO: 2599608 - RNA, 22 nt, Human
agcauuuugcuaaaugugaaug

SEQ ID NO: 2599609 - RNA, 15 nt, Human
agcauuuuguauuug

SEQ ID NO: 2599610 - RNA, 15 nt, Human
agcauuuugcuaaau

SEQ ID NO: 2599611 - RNA, 18 nt, Human
agccaaacauccuacaag

SEQ ID NO: 2599612 - RNA, 18 nt, Human
agccaaacccaugaggca

SEQ ID NO: 2599613 - RNA, 19 nt, Human
agccaaacccaugaggcaa

SEQ ID NO: 2599614 - RNA, 14 nt, Human
agccaaacccuguc

SEQ ID NO: 2599615 - RNA, 15 nt, Human
agccaaacccugucu

SEQ ID NO: 2599616 - RNA, 22 nt, Human
agccaaaauguaggcuuaguuu

SEQ ID NO: 2599617 - RNA, 17 nt, Human
agccaaaauguaggcuu

SEQ ID NO: 2599618 - RNA, 18 nt, Human
agcauuuuugauuuaugc

SEQ ID NO: 2599619 - RNA, 16 nt, Human
agcauuuuugauuuau

SEQ ID NO: 2599620 - RNA, 12 nt, Human
agcauucugucu

SEQ ID NO: 2599621 - RNA, 22 nt, Human
agcauucucacuccuaccuggu

SEQ ID NO: 2599622 - RNA, 22 nt, Human
agcauuuagauguauagguuga

SEQ ID NO: 2599623 - RNA, 17 nt, Human
agcauuuaauguagcca

SEQ ID NO: 2599624 - RNA, 21 nt, Human
agcauuguuugcuuauuguuc

SEQ ID NO: 2599625 - RNA, 22 nt, Human
agcauuguuugcuuauuguucc

SEQ ID NO: 2599626 - RNA, 23 nt, Human
agcauuguuugcuuauuguucca

SEQ ID NO: 2599627 - RNA, 20 nt, Human
agcauuccagccccucuggu

SEQ ID NO: 2599628 - RNA, 19 nt, Human
agcauuccagccccucugg

SEQ ID NO: 2599629 - RNA, 19 nt, Human
agcauuccaacaaaggguu

SEQ ID NO: 2599630 - RNA, 17 nt, Human
agcauuccaacaaaggg

SEQ ID NO: 2599631 - RNA, 16 nt, Human
agcauuccagccccuc

SEQ ID NO: 2599632 - RNA, 18 nt, Human
agcauuccuucuuugaua

SEQ ID NO: 2599633 - RNA, 17 nt, Human
agcauuccuucuuugau

SEQ ID NO: 2599634 - RNA, 16 nt, Human
agcauuccuucuuuga

SEQ ID NO: 2599635 - RNA, 15 nt, Human
agcauuccuucuuug

SEQ ID NO: 2599636 - RNA, 23 nt, Human
agcauuccuucuuugauaauguu

SEQ ID NO: 2599637 - RNA, 22 nt, Human
agcauuccuucuuugauaaugu

SEQ ID NO: 2599638 - RNA, 21 nt, Human
agcauuccuucuuugauaaug

SEQ ID NO: 2599639 - RNA, 19 nt, Human
agcauuccuucuuugauaa

SEQ ID NO: 2599640 - RNA, 24 nt, Human
agcauuccuucuuugauaauguua

SEQ ID NO: 2599641 - RNA, 14 nt, Human
agcauuccuuuuga

SEQ ID NO: 2599642 - RNA, 19 nt, Human
agcauucgagacagaaccu

SEQ ID NO: 2599643 - RNA, 20 nt, Human
agcauucucacuccuaccug

SEQ ID NO: 2599644 - RNA, 18 nt, Human
agcauucucacuccuacc

SEQ ID NO: 2599645 - RNA, 15 nt, Human
agcauuccaacaaag

SEQ ID NO: 2599646 - RNA, 14 nt, Human
agcauuccaacaaa

SEQ ID NO: 2599647 - RNA, 13 nt, Human
agcauuccaacaa

SEQ ID NO: 2599648 - RNA, 17 nt, Human
agcauucagagagcagc

SEQ ID NO: 2599649 - RNA, 16 nt, Human
agcauucagagagcag

SEQ ID NO: 2599650 - RNA, 15 nt, Human
agcauucagagagca

SEQ ID NO: 2599651 - RNA, 14 nt, Human
agcauucagagagc

SEQ ID NO: 2599652 - RNA, 18 nt, Human
agcauucacaacuuguuu

SEQ ID NO: 2599653 - RNA, 22 nt, Human
agcauucaauuuauucaagaaa

SEQ ID NO: 2599654 - RNA, 23 nt, Human
agcauucaauuuauucaagaaaa

SEQ ID NO: 2599655 - RNA, 20 nt, Human
agcauuacgugagccaggua

SEQ ID NO: 2599656 - RNA, 19 nt, Human
agcauuacgugagccaggu

SEQ ID NO: 2599657 - RNA, 18 nt, Human
agcauuacgugagccagg

SEQ ID NO: 2599658 - RNA, 17 nt, Human
agcauuacgugagccag

SEQ ID NO: 2599659 - RNA, 17 nt, Human
agcauuagauuucucau

SEQ ID NO: 2599660 - RNA, 19 nt, Human
agcauuaugauguggguca

SEQ ID NO: 2599661 - RNA, 17 nt, Human
agcauuacaaauugcuu

SEQ ID NO: 2599662 - RNA, 15 nt, Human
agcauguacaguguu

SEQ ID NO: 2599663 - RNA, 14 nt, Human
agcauguacagugu

SEQ ID NO: 2599664 - RNA, 12 nt, Human
agcauguacagu

SEQ ID NO: 2599665 - RNA, 19 nt, Human
agcaugggccuggccaccu

SEQ ID NO: 2599666 - RNA, 13 nt, Human
agcauguaauggu

SEQ ID NO: 2599667 - RNA, 19 nt, Human
agcauggcugccaauggga

SEQ ID NO: 2599668 - RNA, 16 nt, Human
agcauggcugugagga

SEQ ID NO: 2599669 - RNA, 13 nt, Human
agcauggcuguga

SEQ ID NO: 2599670 - RNA, 23 nt, Human
agcauccugccuuagagccaggc

SEQ ID NO: 2599671 - RNA, 22 nt, Human
agcauccugccuuagagccagg

SEQ ID NO: 2599672 - RNA, 14 nt, Human
agcaugggccuggc

SEQ ID NO: 2599673 - RNA, 17 nt, Human
agcauggcugugaggau

SEQ ID NO: 2599674 - RNA, 21 nt, Human
agcauauucaggaagcucagg

SEQ ID NO: 2599675 - RNA, 20 nt, Human
agcaucacaugaacuuguaa

SEQ ID NO: 2599676 - RNA, 19 nt, Human
agcauauucaggaagcuca

SEQ ID NO: 2599677 - RNA, 17 nt, Human
agcauauucaggaagcu

SEQ ID NO: 2599678 - RNA, 14 nt, Human
ugaucacggcucac

SEQ ID NO: 2599679 - RNA, 13 nt, Human
ugaucacggcuca

SEQ ID NO: 2599680 - RNA, 15 nt, Human
ugaucacggcucacu

SEQ ID NO: 2599681 - RNA, 14 nt, Human
ugaucaccugcccu

SEQ ID NO: 2599682 - RNA, 18 nt, Human
ugaucacggcucacugca

SEQ ID NO: 2599683 - RNA, 16 nt, Human
ugauacauccaaagca

SEQ ID NO: 2599684 - RNA, 17 nt, Human
ugauacaagauuagaag

SEQ ID NO: 2599685 - RNA, 16 nt, Human
ugauacaagauuagaa

SEQ ID NO: 2599686 - RNA, 20 nt, Human
ugauacaaauugcagacugu

SEQ ID NO: 2599687 - RNA, 22 nt, Human
ugauacauccaaagcagacagc

SEQ ID NO: 2599688 - RNA, 13 nt, Human
ugauacccagagc

SEQ ID NO: 2599689 - RNA, 14 nt, Human
ugauaccagcugga

SEQ ID NO: 2599690 - RNA, 15 nt, Human
ugauaccccccucug

SEQ ID NO: 2599691 - RNA, 18 nt, Human
ugauacccauagcuucca

SEQ ID NO: 2599692 - RNA, 21 nt, Human
ugauacccauagcuuccauga

SEQ ID NO: 2599693 - RNA, 15 nt, Human
ugaucacacucuggg

SEQ ID NO: 2599694 - RNA, 13 nt, Human
ugaucacacucug

SEQ ID NO: 2599695 - RNA, 12 nt, Human
ugaucacacucu

SEQ ID NO: 2599696 - RNA, 14 nt, Human
ugaucaauuaaaug

SEQ ID NO: 2599697 - RNA, 15 nt, Human
ugaucaauuaaaugu

SEQ ID NO: 2599698 - RNA, 16 nt, Human
ugaucaauuaaaugua

SEQ ID NO: 2599699 - RNA, 17 nt, Human
ugaucaauuaaauguag

SEQ ID NO: 2599700 - RNA, 19 nt, Human
ugauaccccccucugucuu

SEQ ID NO: 2599701 - RNA, 18 nt, Human
ugauaccccccucugucu

SEQ ID NO: 2599702 - RNA, 17 nt, Human
ugauaccccccucuguc

SEQ ID NO: 2599703 - RNA, 19 nt, Human
ugaucaaugacagagccuu

SEQ ID NO: 2599704 - RNA, 18 nt, Human
ugaucaaugacagagccu

SEQ ID NO: 2599705 - RNA, 14 nt, Human
ugaucaaugacaga

SEQ ID NO: 2599706 - RNA, 19 nt, Human
ugauaccgaauugugacuc

SEQ ID NO: 2599707 - RNA, 19 nt, Human
ugaucaauaaaaugugauu

SEQ ID NO: 2599708 - RNA, 21 nt, Human
ugaucaauaaaaugugauuuu

SEQ ID NO: 2599709 - RNA, 13 nt, Human
agcauggcugcca

SEQ ID NO: 2599710 - RNA, 23 nt, Human
agcaucccuugaccaggccuggg

SEQ ID NO: 2599711 - RNA, 22 nt, Human
agcaucccuugaccaggccugg

SEQ ID NO: 2599712 - RNA, 21 nt, Human
agcaucccuugaccaggccug

SEQ ID NO: 2599713 - RNA, 21 nt, Human
agcauccugccuuagagccag

SEQ ID NO: 2599714 - RNA, 22 nt, Human
agcaucccaggaucgcaagagc

SEQ ID NO: 2599715 - RNA, 20 nt, Human
agcauccaccuccuucucug

SEQ ID NO: 2599716 - RNA, 18 nt, Human
agcauccaccuccuucuc

SEQ ID NO: 2599717 - RNA, 17 nt, Human
agcauccaccuccuucu

SEQ ID NO: 2599718 - RNA, 16 nt, Human
agcauccaccuccuuc

SEQ ID NO: 2599719 - RNA, 15 nt, Human
agcauccaccuccuu

SEQ ID NO: 2599720 - RNA, 22 nt, Human
agcaucauuuugcauucaaauu

SEQ ID NO: 2599721 - RNA, 20 nt, Human
agcaucccugaggagccagg

SEQ ID NO: 2599722 - RNA, 24 nt, Human
agcauccauguguggacucaaguc

SEQ ID NO: 2599723 - RNA, 20 nt, Human
agcaucauuuugcauucaaa

SEQ ID NO: 2599724 - RNA, 19 nt, Human
agcaucauuuugcauucaa

SEQ ID NO: 2599725 - RNA, 18 nt, Human
agcaucauuuugcauuca

SEQ ID NO: 2599726 - RNA, 16 nt, Human
agcaucauuuugcauu

SEQ ID NO: 2599727 - RNA, 21 nt, Human
agcaucauuauuugcagagac

SEQ ID NO: 2599728 - RNA, 21 nt, Human
agcaucaggccaggcccucug

SEQ ID NO: 2599729 - RNA, 22 nt, Human
agcaucaggccaggcccucugc

SEQ ID NO: 2599730 - RNA, 23 nt, Human
agcaucaggccaggcccucugcc

SEQ ID NO: 2599731 - RNA, 22 nt, Human
agcaucaggguuaagaagacuu

SEQ ID NO: 2599732 - RNA, 16 nt, Human
agcauauucaggaagc

SEQ ID NO: 2599733 - RNA, 14 nt, Human
ugaucacagcagcu

SEQ ID NO: 2599734 - RNA, 13 nt, Human
agcaucaccucag

SEQ ID NO: 2599735 - RNA, 14 nt, Human
agcaucaccucagg

SEQ ID NO: 2599736 - RNA, 15 nt, Human
agcaucaccucaggc

SEQ ID NO: 2599737 - RNA, 16 nt, Human
agcaucaccucaggcc

SEQ ID NO: 2599738 - RNA, 19 nt, Human
agcaucaccucaggccagg

SEQ ID NO: 2599739 - RNA, 20 nt, Human
agcaucaccucaggccaggu

SEQ ID NO: 2599740 - RNA, 17 nt, Human
agcaucacuugggauua

SEQ ID NO: 2599741 - RNA, 23 nt, Human
ugauccagaaagaaaacuuguau

SEQ ID NO: 2599742 - RNA, 15 nt, Human
ugauccagagcacag

SEQ ID NO: 2599743 - RNA, 19 nt, Human
ugaucccaagugccagucu

SEQ ID NO: 2599744 - RNA, 13 nt, Human
ugauccagaaaga

SEQ ID NO: 2599745 - RNA, 18 nt, Human
ugauccacucgccuucau

SEQ ID NO: 2599746 - RNA, 14 nt, Human
ugauccacucgccu

SEQ ID NO: 2599747 - RNA, 18 nt, Human
agccaccccagaaauggu

SEQ ID NO: 2599748 - RNA, 14 nt, Human
agccaccccgggcu

SEQ ID NO: 2599749 - RNA, 20 nt, Human
agccaccccagaaaugguga

SEQ ID NO: 2599750 - RNA, 19 nt, Human
agccaccccgggcucucug

SEQ ID NO: 2599751 - RNA, 20 nt, Human
agccaccccgggcucucugc

SEQ ID NO: 2599752 - RNA, 21 nt, Human
agccaccccgggcucucugcu

SEQ ID NO: 2599753 - RNA, 23 nt, Human
agccaccccgggcucucugcugu

SEQ ID NO: 2599754 - RNA, 20 nt, Human
ugauccucccaccucagccu

SEQ ID NO: 2599755 - RNA, 19 nt, Human
ugauccucccaccucagcc

SEQ ID NO: 2599756 - RNA, 13 nt, Human
ugaucuaggaaga

SEQ ID NO: 2599757 - RNA, 15 nt, Human
ugaucgugcuaaauu

SEQ ID NO: 2599758 - RNA, 22 nt, Human
ugaucgugcuaaauuuucagua

SEQ ID NO: 2599759 - RNA, 20 nt, Human
ugaucccuguguugucucua

SEQ ID NO: 2599760 - RNA, 21 nt, Human
ugaucccuguuacccagagaa

SEQ ID NO: 2599761 - RNA, 22 nt, Human
ugauccguuccauugcaagcuu

SEQ ID NO: 2599762 - RNA, 18 nt, Human
ugauccucccaccucagc

SEQ ID NO: 2599763 - RNA, 19 nt, Human
ugaucccuguguugucucu

SEQ ID NO: 2599764 - RNA, 18 nt, Human
ugauccccaagugugaac

SEQ ID NO: 2599765 - RNA, 12 nt, Human
ugaucccagcac

SEQ ID NO: 2599766 - RNA, 13 nt, Human
ugaucccagcacu

SEQ ID NO: 2599767 - RNA, 17 nt, Human
agccaauuauguuaaac

SEQ ID NO: 2599768 - RNA, 16 nt, Human
agccaauuauguuaaa

SEQ ID NO: 2599769 - RNA, 20 nt, Human
agccaauuauguuaaacuag

SEQ ID NO: 2599770 - RNA, 16 nt, Human
agccaauucagacagg

SEQ ID NO: 2599771 - RNA, 15 nt, Human
agccaauuuuucugc

SEQ ID NO: 2599772 - RNA, 14 nt, Human
agccaauuuuucug

SEQ ID NO: 2599773 - RNA, 13 nt, Human
agccaauuuuucu

SEQ ID NO: 2599774 - RNA, 17 nt, Human
agccaauucagacaggc

SEQ ID NO: 2599775 - RNA, 18 nt, Human
agccaauucagacaggca

SEQ ID NO: 2599776 - RNA, 13 nt, Human
agccaaugcuguc

SEQ ID NO: 2599777 - RNA, 22 nt, Human
agccaauccccuccuugggcac

SEQ ID NO: 2599778 - RNA, 13 nt, Human
agccaaugcuuac

SEQ ID NO: 2599779 - RNA, 15 nt, Human
agccaauuauguuaa

SEQ ID NO: 2599780 - RNA, 21 nt, Human
agccaauccccuccuugggca

SEQ ID NO: 2599781 - RNA, 19 nt, Human
agccaaacccuugucagug

SEQ ID NO: 2599782 - RNA, 13 nt, Human
agccaaacccuug

SEQ ID NO: 2599783 - RNA, 16 nt, Human
agccaaacccugucug

SEQ ID NO: 2599784 - RNA, 14 nt, Human
agccacacacacag

SEQ ID NO: 2599785 - RNA, 15 nt, Human
agccacacacacaga

SEQ ID NO: 2599786 - RNA, 16 nt, Human
agccacacacacagaa

SEQ ID NO: 2599787 - RNA, 17 nt, Human
agccacacacacagaaa

SEQ ID NO: 2599788 - RNA, 18 nt, Human
agccacacacacagaaaa

SEQ ID NO: 2599789 - RNA, 19 nt, Human
agccacacacacagaaaau

SEQ ID NO: 2599790 - RNA, 20 nt, Human
agccacacacacagaaaaua

SEQ ID NO: 2599791 - RNA, 21 nt, Human
agccacacacacagaaaauau

SEQ ID NO: 2599792 - RNA, 17 nt, Human
agccacacaaacguuua

SEQ ID NO: 2599793 - RNA, 19 nt, Human
agccacaaaauaaauguug

SEQ ID NO: 2599794 - RNA, 10 nt, Human
agccacacac

SEQ ID NO: 2599795 - RNA, 12 nt, Human
agccacacacac

SEQ ID NO: 2599796 - RNA, 13 nt, Human
agccacacacaca

SEQ ID NO: 2599797 - RNA, 23 nt, Human
agccaauuuuucugcacugagca

SEQ ID NO: 2599798 - RNA, 20 nt, Human
agccaauuuuucugcacuga

SEQ ID NO: 2599799 - RNA, 17 nt, Human
agccaauuuuucugcac

SEQ ID NO: 2599800 - RNA, 16 nt, Human
agccaauuuuucugca

SEQ ID NO: 2599801 - RNA, 19 nt, Human
agccacaagaaauuugauu

SEQ ID NO: 2599802 - RNA, 20 nt, Human
agccacagaagccaggagca

SEQ ID NO: 2599803 - RNA, 19 nt, Human
agccacagaagccaggagc

SEQ ID NO: 2599804 - RNA, 18 nt, Human
agccacagaagccaggag

SEQ ID NO: 2599805 - RNA, 17 nt, Human
agccacagaagccagga

SEQ ID NO: 2599806 - RNA, 12 nt, Human
agccacagaagc

SEQ ID NO: 2599807 - RNA, 10 nt, Human
agccacagaa

SEQ ID NO: 2599808 - RNA, 23 nt, Human
agccacagaagccaggagcaaau

SEQ ID NO: 2599809 - RNA, 13 nt, Human
agccacaggccug

SEQ ID NO: 2599810 - RNA, 13 nt, Human
agccacagcuggu

SEQ ID NO: 2599811 - RNA, 22 nt, Human
agccacacacacagaaaauaua

SEQ ID NO: 2599812 - RNA, 23 nt, Human
agccacacacacagaaaauauac

SEQ ID NO: 2599813 - RNA, 21 nt, Human
agccacacugugggacucuuc

SEQ ID NO: 2599814 - RNA, 21 nt, Human
agccacacucugggcuccaga

SEQ ID NO: 2599815 - RNA, 13 nt, Human
agccaccacgccc

SEQ ID NO: 2599816 - RNA, 17 nt, Human
agccaccacguccagcu

SEQ ID NO: 2599817 - RNA, 16 nt, Human
agccaccaucuuugca

SEQ ID NO: 2599818 - RNA, 13 nt, Human
agccaccaucuuu

SEQ ID NO: 2599819 - RNA, 17 nt, Human
agccaccaucuuugcag

SEQ ID NO: 2599820 - RNA, 23 nt, Human
agccaccaugcccagcucagagg

SEQ ID NO: 2599821 - RNA, 21 nt, Human
agccacaggccugagauuuca

SEQ ID NO: 2599822 - RNA, 17 nt, Human
agccacaggccugagau

SEQ ID NO: 2599823 - RNA, 16 nt, Human
agccacaggccugaga

SEQ ID NO: 2599824 - RNA, 14 nt, Human
agccacaggccuga

SEQ ID NO: 2599825 - RNA, 23 nt, Human
agccacaggccugagauuucauc

SEQ ID NO: 2599826 - RNA, 22 nt, Human
agccacaggccugagauuucau

SEQ ID NO: 2599827 - RNA, 22 nt, Human
agccacagaagccaggagcaaa

SEQ ID NO: 2599828 - RNA, 15 nt, Human
ugauuaaguaaugau

SEQ ID NO: 2599829 - RNA, 16 nt, Human
ugauuaaguaaugaua

SEQ ID NO: 2599830 - RNA, 16 nt, Human
agccacggccaggcca

SEQ ID NO: 2599831 - RNA, 13 nt, Human
ugauuaaauucuu

SEQ ID NO: 2599832 - RNA, 16 nt, Human
ugauuaaauucuugca

SEQ ID NO: 2599833 - RNA, 17 nt, Human
ugauuaaauucuugcaa

SEQ ID NO: 2599834 - RNA, 20 nt, Human
ugauuaaccacuucagcuga

SEQ ID NO: 2599835 - RNA, 17 nt, Human
ugauguuuuccaugagu

SEQ ID NO: 2599836 - RNA, 21 nt, Human
ugauguuuuaaggaugcuugu

SEQ ID NO: 2599837 - RNA, 19 nt, Human
ugauguuuuccaugagucc

SEQ ID NO: 2599838 - RNA, 23 nt, Human
ugauguuuuccaugaguccccug

SEQ ID NO: 2599839 - RNA, 19 nt, Human
ugauggguuaguggaugga

SEQ ID NO: 2599840 - RNA, 23 nt, Human
ugauggguuaguggauggaaggg

SEQ ID NO: 2599841 - RNA, 15 nt, Human
ugaugggggaggggg

SEQ ID NO: 2599842 - RNA, 14 nt, Human
ugauggggaaggag

SEQ ID NO: 2599843 - RNA, 21 nt, Human
ugauggucagcucccuucucu

SEQ ID NO: 2599844 - RNA, 16 nt, Human
ugauggucagcucccu

SEQ ID NO: 2599845 - RNA, 15 nt, Human
ugauggucagcuccc

SEQ ID NO: 2599846 - RNA, 22 nt, Human
ugauggggcccugccuccuuug

SEQ ID NO: 2599847 - RNA, 15 nt, Human
ugaugggucaguugu

SEQ ID NO: 2599848 - RNA, 17 nt, Human
ugauggggaaggaggcu

SEQ ID NO: 2599849 - RNA, 20 nt, Human
ugaugaucuuugcagacagg

SEQ ID NO: 2599850 - RNA, 19 nt, Human
ugaugaucuuugcagacag

SEQ ID NO: 2599851 - RNA, 15 nt, Human
ugaugaaaauauuua

SEQ ID NO: 2599852 - RNA, 23 nt, Human
ugaugaaaugaggucagagccug

SEQ ID NO: 2599853 - RNA, 15 nt, Human
ugaucuaggaagacu

SEQ ID NO: 2599854 - RNA, 14 nt, Human
ugaucuaggaagac

SEQ ID NO: 2599855 - RNA, 17 nt, Human
ugaucuagagccaguua

SEQ ID NO: 2599856 - RNA, 18 nt, Human
ugaugaaaauauuuaaag

SEQ ID NO: 2599857 - RNA, 22 nt, Human
ugaugaaaugaggucagagccu

SEQ ID NO: 2599858 - RNA, 13 nt, Human
ugauggggcccug

SEQ ID NO: 2599859 - RNA, 22 nt, Human
ugaugggcaacccccagccugc

SEQ ID NO: 2599860 - RNA, 21 nt, Human
ugaugggcaacccccagccug

SEQ ID NO: 2599861 - RNA, 15 nt, Human
ugauggcuucuccag

SEQ ID NO: 2599862 - RNA, 13 nt, Human
ugauggcuucucc

SEQ ID NO: 2599863 - RNA, 18 nt, Human
ugauggcaacagaucugg

SEQ ID NO: 2599864 - RNA, 19 nt, Human
ugauggcaacagaucugga

SEQ ID NO: 2599865 - RNA, 16 nt, Human
ugauggcaacagaucu

SEQ ID NO: 2599866 - RNA, 21 nt, Human
ugaugaucuuugcagacaggc

SEQ ID NO: 2599867 - RNA, 15 nt, Human
ugauggcaauuuugu

SEQ ID NO: 2599868 - RNA, 23 nt, Human
ugauggcaacagaucuggaaccu

SEQ ID NO: 2599869 - RNA, 17 nt, Human
ugauggcaauuuuguaa

SEQ ID NO: 2599870 - RNA, 22 nt, Human
ugauggcaccacugcacuccag

SEQ ID NO: 2599871 - RNA, 20 nt, Human
ugauggcaggauggccuggc

SEQ ID NO: 2599872 - RNA, 22 nt, Human
ugauggcacuuagcuaucagaa

SEQ ID NO: 2599873 - RNA, 16 nt, Human
agcaggcuacugucag

SEQ ID NO: 2599874 - RNA, 17 nt, Human
agcaggcuacugucagc

SEQ ID NO: 2599875 - RNA, 19 nt, Human
agcaggcuacugucagcuc

SEQ ID NO: 2599876 - RNA, 20 nt, Human
agcaggcuacugucagcucc

SEQ ID NO: 2599877 - RNA, 14 nt, Human
agcaggcuacuguc

SEQ ID NO: 2599878 - RNA, 13 nt, Human
agcaggccuugcg

SEQ ID NO: 2599879 - RNA, 12 nt, Human
agcaggccuugc

SEQ ID NO: 2599880 - RNA, 21 nt, Human
agcaggcguucagcucacugu

SEQ ID NO: 2599881 - RNA, 21 nt, Human
agcaggccuugcgcuguugcg

SEQ ID NO: 2599882 - RNA, 16 nt, Human
agcaggaggaggugcc

SEQ ID NO: 2599883 - RNA, 23 nt, Human
agcaggagauugagaaggagaga

SEQ ID NO: 2599884 - RNA, 21 nt, Human
agcaggagauugagaaggaga

SEQ ID NO: 2599885 - RNA, 20 nt, Human
agcaggagauugagaaggag

SEQ ID NO: 2599886 - RNA, 14 nt, Human
agcaggaggccagg

SEQ ID NO: 2599887 - RNA, 15 nt, Human
agcaggaggccaggc

SEQ ID NO: 2599888 - RNA, 23 nt, Human
agcaggaggccccuggcccagcg

SEQ ID NO: 2599889 - RNA, 20 nt, Human
agcaggaggccccuggccca

SEQ ID NO: 2599890 - RNA, 16 nt, Human
agcaggaggccccugg

SEQ ID NO: 2599891 - RNA, 15 nt, Human
agcaggaggccccug

SEQ ID NO: 2599892 - RNA, 20 nt, Human
agcaggcacuugauuccuug

SEQ ID NO: 2599893 - RNA, 16 nt, Human
agcaggcacauggagg

SEQ ID NO: 2599894 - RNA, 21 nt, Human
agcaggauaguugcuccgccu

SEQ ID NO: 2599895 - RNA, 14 nt, Human
agcaggcacaugga

SEQ ID NO: 2599896 - RNA, 19 nt, Human
agcaggcacauggaggagc

SEQ ID NO: 2599897 - RNA, 22 nt, Human
agcaggauaguugcuccgccuc

SEQ ID NO: 2599898 - RNA, 19 nt, Human
agcaggagauugagaagga

SEQ ID NO: 2599899 - RNA, 18 nt, Human
agcaggagauugagaagg

SEQ ID NO: 2599900 - RNA, 15 nt, Human
agcaggagauugaga

SEQ ID NO: 2599901 - RNA, 23 nt, Human
agcaggagaggagagccagagaa

SEQ ID NO: 2599902 - RNA, 22 nt, Human
agcaggagaggagagccagaga

SEQ ID NO: 2599903 - RNA, 21 nt, Human
agcaggagaggagagccagag

SEQ ID NO: 2599904 - RNA, 20 nt, Human
agcaggagaggagagccaga

SEQ ID NO: 2599905 - RNA, 19 nt, Human
agcaggagaggagagccag

SEQ ID NO: 2599906 - RNA, 17 nt, Human
agcaggagaggagagcc

SEQ ID NO: 2599907 - RNA, 16 nt, Human
agcaggagaggagagc

SEQ ID NO: 2599908 - RNA, 14 nt, Human
agcaggagaggaga

SEQ ID NO: 2599909 - RNA, 22 nt, Human
agcaggaccucugaaacccugg

SEQ ID NO: 2599910 - RNA, 23 nt, Human
agcaggacugaauuguccccagu

SEQ ID NO: 2599911 - RNA, 13 nt, Human
agcaggaccucug

SEQ ID NO: 2599912 - RNA, 15 nt, Human
agcaggaagcucaga

SEQ ID NO: 2599913 - RNA, 16 nt, Human
agcagcagggagggcu

SEQ ID NO: 2599914 - RNA, 19 nt, Human
agcagcagccuuuaaugca

SEQ ID NO: 2599915 - RNA, 18 nt, Human
agcagcagugaaaacaag

SEQ ID NO: 2599916 - RNA, 16 nt, Human
agcagcagugaaaaca

SEQ ID NO: 2599917 - RNA, 23 nt, Human
agcagcagugaaaacaagugcug

SEQ ID NO: 2599918 - RNA, 18 nt, Human
agcagcaucugcuaauaa

SEQ ID NO: 2599919 - RNA, 13 nt, Human
agcaggacaugga

SEQ ID NO: 2599920 - RNA, 20 nt, Human
agcagccaagggaugaaaga

SEQ ID NO: 2599921 - RNA, 22 nt, Human
agcaggaagcauucagagagca

SEQ ID NO: 2599922 - RNA, 12 nt, Human
agcaggaagcuc

SEQ ID NO: 2599923 - RNA, 14 nt, Human
agcaggaagcucag

SEQ ID NO: 2599924 - RNA, 11 nt, Human
agcagccacau

SEQ ID NO: 2599925 - RNA, 15 nt, Human
agcagccacauuccu

SEQ ID NO: 2599926 - RNA, 20 nt, Human
agcagccaagcuccuuggga

SEQ ID NO: 2599927 - RNA, 21 nt, Human
agcagccaagcuccuugggag

SEQ ID NO: 2599928 - RNA, 22 nt, Human
agcagccaagcuccuugggagg

SEQ ID NO: 2599929 - RNA, 20 nt, Human
ugacccaugcugcccuguga

SEQ ID NO: 2599930 - RNA, 14 nt, Human
ugacccaggccgca

SEQ ID NO: 2599931 - RNA, 13 nt, Human
ugacccaggccgc

SEQ ID NO: 2599932 - RNA, 19 nt, Human
agcagcaccguucugugca

SEQ ID NO: 2599933 - RNA, 12 nt, Human
ugacccaggccg

SEQ ID NO: 2599934 - RNA, 20 nt, Human
ugacccagcacugcccaaag

SEQ ID NO: 2599935 - RNA, 23 nt, Human
ugacccagccccuugagaaaccu

SEQ ID NO: 2599936 - RNA, 15 nt, Human
ugacccaggccgcag

SEQ ID NO: 2599937 - RNA, 20 nt, Human
agcagcaccguucugugcac

SEQ ID NO: 2599938 - RNA, 19 nt, Human
ugacccaugcugcccugug

SEQ ID NO: 2599939 - RNA, 18 nt, Human
ugacccaugcugcccugu

SEQ ID NO: 2599940 - RNA, 17 nt, Human
ugacccaugcugcccug

SEQ ID NO: 2599941 - RNA, 21 nt, Human
ugacccagccccuugagaaac

SEQ ID NO: 2599942 - RNA, 19 nt, Human
ugacccagccccuugagaa

SEQ ID NO: 2599943 - RNA, 18 nt, Human
ugacccagccccuugaga

SEQ ID NO: 2599944 - RNA, 15 nt, Human
agcagggcucagcgg

SEQ ID NO: 2599945 - RNA, 14 nt, Human
agcagggcucagcg

SEQ ID NO: 2599946 - RNA, 21 nt, Human
agcagggauuaaccucugcac

SEQ ID NO: 2599947 - RNA, 20 nt, Human
agcagggauuaaccucugca

SEQ ID NO: 2599948 - RNA, 22 nt, Human
agcagggauuaaccucugcacu

SEQ ID NO: 2599949 - RNA, 24 nt, Human
agcagggaugcccuggagguggcu

SEQ ID NO: 2599950 - RNA, 13 nt, Human
agcagggcucagc

SEQ ID NO: 2599951 - RNA, 19 nt, Human
agcagggcauggcugggaa

SEQ ID NO: 2599952 - RNA, 19 nt, Human
agcagggauuaaccucugc

SEQ ID NO: 2599953 - RNA, 17 nt, Human
agcagggaugcccugga

SEQ ID NO: 2599954 - RNA, 22 nt, Human
agcagggaugcccuggaggugg

SEQ ID NO: 2599955 - RNA, 11 nt, Human
agcagggagga

SEQ ID NO: 2599956 - RNA, 21 nt, Human
agcagggaaaaugcagcaggg

SEQ ID NO: 2599957 - RNA, 22 nt, Human
agcaggcuggcagcucuccagu

SEQ ID NO: 2599958 - RNA, 20 nt, Human
agcaggcuggcagcucucca

SEQ ID NO: 2599959 - RNA, 24 nt, Human
agcaggcuggcagcucuccaguca

SEQ ID NO: 2599960 - RNA, 20 nt, Human
agcagggaaaauauauaucu

SEQ ID NO: 2599961 - RNA, 20 nt, Human
agcagggagggcuucugcca

SEQ ID NO: 2599962 - RNA, 16 nt, Human
agcaggggcguggagg

SEQ ID NO: 2599963 - RNA, 16 nt, Human
agcagggcugcuguga

SEQ ID NO: 2599964 - RNA, 23 nt, Human
agcagggcucugccccagaggcc

SEQ ID NO: 2599965 - RNA, 16 nt, Human
agcagggcucugcccc

SEQ ID NO: 2599966 - RNA, 23 nt, Human
agcagggcuacccugagcugagg

SEQ ID NO: 2599967 - RNA, 22 nt, Human
agcagggcucagcggggacagc

SEQ ID NO: 2599968 - RNA, 23 nt, Human
agcagggucuuuucaucugggaa

SEQ ID NO: 2599969 - RNA, 22 nt, Human
agcagggucuuuucaucuggga

SEQ ID NO: 2599970 - RNA, 20 nt, Human
agcagggucuuuucaucugg

SEQ ID NO: 2599971 - RNA, 19 nt, Human
agcagggucuuuucaucug

SEQ ID NO: 2599972 - RNA, 18 nt, Human
agcagggucuuuucaucu

SEQ ID NO: 2599973 - RNA, 16 nt, Human
agcagggucuuuucau

SEQ ID NO: 2599974 - RNA, 17 nt, Human
agcagggucugggcagg

SEQ ID NO: 2599975 - RNA, 16 nt, Human
agcagggucugggcag

SEQ ID NO: 2599976 - RNA, 21 nt, Human
agcaggggcuacaagagggaa

SEQ ID NO: 2599977 - RNA, 20 nt, Human
agcaggggcuacaagaggga

SEQ ID NO: 2599978 - RNA, 19 nt, Human
agcaggggcuacaagaggg

SEQ ID NO: 2599979 - RNA, 16 nt, Human
agcaggggcuacaaga

SEQ ID NO: 2599980 - RNA, 22 nt, Human
agcagggguccuuggugugacc

SEQ ID NO: 2599981 - RNA, 18 nt, Human
agcaggguagucugguuu

SEQ ID NO: 2599982 - RNA, 21 nt, Human
agcaggguagucugguuucua

SEQ ID NO: 2599983 - RNA, 21 nt, Human
agcagguccccagcuuuggcu

SEQ ID NO: 2599984 - RNA, 20 nt, Human
agcagguccccagcuuuggc

SEQ ID NO: 2599985 - RNA, 17 nt, Human
agcaggguguugggaua

SEQ ID NO: 2599986 - RNA, 15 nt, Human
agcagggugcugugg

SEQ ID NO: 2599987 - RNA, 14 nt, Human
agcagguaccacug

SEQ ID NO: 2599988 - RNA, 20 nt, Human
agcaggugcugcuacccucc

SEQ ID NO: 2599989 - RNA, 18 nt, Human
agcaggugcugcuacccu

SEQ ID NO: 2599990 - RNA, 17 nt, Human
agcaggugcugcuaccc

SEQ ID NO: 2599991 - RNA, 16 nt, Human
agcaggugcugcuacc

SEQ ID NO: 2599992 - RNA, 15 nt, Human
agcaggugcugcuac

SEQ ID NO: 2599993 - RNA, 13 nt, Human
agcaggugcugac

SEQ ID NO: 2599994 - RNA, 19 nt, Human
agcagguggcaucucuaau

SEQ ID NO: 2599995 - RNA, 16 nt, Human
agcagguggcaucucu

SEQ ID NO: 2599996 - RNA, 17 nt, Human
agcaggugggaaauggu

SEQ ID NO: 2599997 - RNA, 13 nt, Human
agcagguggggag

SEQ ID NO: 2599998 - RNA, 18 nt, Human
agcaggugguccugagac

SEQ ID NO: 2599999 - RNA, 17 nt, Human
agcaggugguccugaga

SEQ ID NO: 2600000 - RNA, 13 nt, Human
agcaggugguccu

SEQ ID NO: 2600001 - RNA, 14 nt, Human
agcagguggggagg

SEQ ID NO: 2600002 - RNA, 19 nt, Human
agcaggcucucaggccagc

SEQ ID NO: 2600003 - RNA, 18 nt, Human
agcaggcucucaggccag

SEQ ID NO: 2600004 - RNA, 17 nt, Human
agcaggcucucaggcca

SEQ ID NO: 2600005 - RNA, 16 nt, Human
agcaggcucucaggcc

SEQ ID NO: 2600006 - RNA, 15 nt, Human
agcaggcucucaggc

SEQ ID NO: 2600007 - RNA, 14 nt, Human
agcaggcucucagg

SEQ ID NO: 2600008 - RNA, 13 nt, Human
agcaggcucucag

SEQ ID NO: 2600009 - RNA, 17 nt, Human
agcaggcucgggcuccc

SEQ ID NO: 2600010 - RNA, 22 nt, Human
agcaggcuacacugacacuggu

SEQ ID NO: 2600011 - RNA, 16 nt, Human
agcaggcuacacugac

SEQ ID NO: 2600012 - RNA, 23 nt, Human
agcaggcucucaggccagcugcu

SEQ ID NO: 2600013 - RNA, 22 nt, Human
agcaggcucucaggccagcugc

SEQ ID NO: 2600014 - RNA, 21 nt, Human
agcaggcucucaggccagcug

SEQ ID NO: 2600015 - RNA, 15 nt, Human
agcagggaaacagcu

SEQ ID NO: 2600016 - RNA, 14 nt, Human
agcagggaaacagc

SEQ ID NO: 2600017 - RNA, 17 nt, Human
agcaggcuggcagcucu

SEQ ID NO: 2600018 - RNA, 16 nt, Human
agcaggcuggcagcuc

SEQ ID NO: 2600019 - RNA, 14 nt, Human
agcaggcuggcagc

SEQ ID NO: 2600020 - RNA, 13 nt, Human
agcaggcuggcag

SEQ ID NO: 2600021 - RNA, 15 nt, Human
agcaggcugugaguu

SEQ ID NO: 2600022 - RNA, 13 nt, Human
agcagggaaacag

SEQ ID NO: 2600023 - RNA, 16 nt, Human
ugaguacguugugcau

SEQ ID NO: 2600024 - RNA, 17 nt, Human
ugaguacguugugcauu

SEQ ID NO: 2600025 - RNA, 18 nt, Human
ugaguacguugugcauuu

SEQ ID NO: 2600026 - RNA, 19 nt, Human
ugaguacguugugcauuug

SEQ ID NO: 2600027 - RNA, 15 nt, Human
agcauaucugccuuu

SEQ ID NO: 2600028 - RNA, 14 nt, Human
ugaguaagagcugg

SEQ ID NO: 2600029 - RNA, 16 nt, Human
ugaguaagagcuggug

SEQ ID NO: 2600030 - RNA, 17 nt, Human
ugaguaagagcuggugu

SEQ ID NO: 2600031 - RNA, 18 nt, Human
ugaguaagagcugguguc

SEQ ID NO: 2600032 - RNA, 21 nt, Human
ugaguaagagcuggugucuga

SEQ ID NO: 2600033 - RNA, 23 nt, Human
ugaguaagagcuggugucugauu

SEQ ID NO: 2600034 - RNA, 13 nt, Human
agcauaucugccu

SEQ ID NO: 2600035 - RNA, 19 nt, Human
agcauaccaacacgagcag

SEQ ID NO: 2600036 - RNA, 22 nt, Human
agcauaccaacacgagcaggcu

SEQ ID NO: 2600037 - RNA, 16 nt, Human
agcauagaaggcaggu

SEQ ID NO: 2600038 - RNA, 13 nt, Human
agcaguuuucaag

SEQ ID NO: 2600039 - RNA, 17 nt, Human
agcaguuuucaagucaa

SEQ ID NO: 2600040 - RNA, 18 nt, Human
agcaguuuucaagucaaa

SEQ ID NO: 2600041 - RNA, 21 nt, Human
agcaguuuucaagucaaauua

SEQ ID NO: 2600042 - RNA, 22 nt, Human
agcaguuuucaagucaaauuaa

SEQ ID NO: 2600043 - RNA, 23 nt, Human
agcauaaaaauuagccaagugug

SEQ ID NO: 2600044 - RNA, 13 nt, Human
agcauaccaacac

SEQ ID NO: 2600045 - RNA, 13 nt, Human
agcauacauuuau

SEQ ID NO: 2600046 - RNA, 14 nt, Human
agcauacauuuaua

SEQ ID NO: 2600047 - RNA, 20 nt, Human
agcauacauuuauaauguuu

SEQ ID NO: 2600048 - RNA, 12 nt, Human
agcauacaacuu

SEQ ID NO: 2600049 - RNA, 14 nt, Human
agcagucgugccug

SEQ ID NO: 2600050 - RNA, 17 nt, Human
agcagucgugccugugu

SEQ ID NO: 2600051 - RNA, 16 nt, Human
agcagucgugccugug

SEQ ID NO: 2600052 - RNA, 19 nt, Human
agcagucaggaaagagaac

SEQ ID NO: 2600053 - RNA, 19 nt, Human
agcaguccugccucagccu

SEQ ID NO: 2600054 - RNA, 22 nt, Human
agcaguccugccucagccuccg

SEQ ID NO: 2600055 - RNA, 18 nt, Human
agcaguuucuguccugcu

SEQ ID NO: 2600056 - RNA, 20 nt, Human
agcaguuucuguccugcugg

SEQ ID NO: 2600057 - RNA, 19 nt, Human
agcaguuucuguccugcug

SEQ ID NO: 2600058 - RNA, 14 nt, Human
agcaguuugcuuug

SEQ ID NO: 2600059 - RNA, 19 nt, Human
agcauaaaaauuagccaag

SEQ ID NO: 2600060 - RNA, 18 nt, Human
agcagucaggaaagagaa

SEQ ID NO: 2600061 - RNA, 17 nt, Human
agcagucaggaaagaga

SEQ ID NO: 2600062 - RNA, 16 nt, Human
agcaguaucaugaagc

SEQ ID NO: 2600063 - RNA, 21 nt, Human
agcaguagaaauaauaugcau

SEQ ID NO: 2600064 - RNA, 22 nt, Human
agcaguagaaauaauaugcauu

SEQ ID NO: 2600065 - RNA, 17 nt, Human
agcagguucccaagcuc

SEQ ID NO: 2600066 - RNA, 18 nt, Human
agcagguucccaagcuca

SEQ ID NO: 2600067 - RNA, 16 nt, Human
agcagguucccaagcu

SEQ ID NO: 2600068 - RNA, 21 nt, Human
agcaggugguccugagaccug

SEQ ID NO: 2600069 - RNA, 20 nt, Human
agcaggugguccugagaccu

SEQ ID NO: 2600070 - RNA, 23 nt, Human
agcagguucccaagcucagaggc

SEQ ID NO: 2600071 - RNA, 20 nt, Human
agcagguugaggggcuccug

SEQ ID NO: 2600072 - RNA, 21 nt, Human
agcagguugaggggcuccugg

SEQ ID NO: 2600073 - RNA, 22 nt, Human
agcagguugaggggcuccugga

SEQ ID NO: 2600074 - RNA, 17 nt, Human
agcagguuuuucuccuc

SEQ ID NO: 2600075 - RNA, 17 nt, Human
agcaguaacugacaacu

SEQ ID NO: 2600076 - RNA, 16 nt, Human
ugauaaguaaaugcua

SEQ ID NO: 2600077 - RNA, 22 nt, Human
ugaguucuacauaaguaauuca

SEQ ID NO: 2600078 - RNA, 20 nt, Human
ugaguucuacauaaguaauu

SEQ ID NO: 2600079 - RNA, 15 nt, Human
ugaguucuacauaag

SEQ ID NO: 2600080 - RNA, 14 nt, Human
ugauacaaugcugu

SEQ ID NO: 2600081 - RNA, 15 nt, Human
ugauacaaugcugug

SEQ ID NO: 2600082 - RNA, 19 nt, Human
ugauaauauuguggugcca

SEQ ID NO: 2600083 - RNA, 15 nt, Human
ugaguguggaagccg

SEQ ID NO: 2600084 - RNA, 12 nt, Human
ugaguguggaag

SEQ ID NO: 2600085 - RNA, 14 nt, Human
ugaguguggcuccc

SEQ ID NO: 2600086 - RNA, 16 nt, Human
ugaguguggcuccccu

SEQ ID NO: 2600087 - RNA, 17 nt, Human
ugaguguggcuccccuc

SEQ ID NO: 2600088 - RNA, 18 nt, Human
ugaguguggcuccccucu

SEQ ID NO: 2600089 - RNA, 17 nt, Human
ugaguguguccaagugu

SEQ ID NO: 2600090 - RNA, 21 nt, Human
ugagugggggaucacagccuc

SEQ ID NO: 2600091 - RNA, 18 nt, Human
ugaguuccuagccaccgc

SEQ ID NO: 2600092 - RNA, 14 nt, Human
ugaguuccuagcca

SEQ ID NO: 2600093 - RNA, 24 nt, Human
ugaguuacuugcugcccugugcuc

SEQ ID NO: 2600094 - RNA, 15 nt, Human
ugaguuacuuccuau

SEQ ID NO: 2600095 - RNA, 18 nt, Human
ugaguucauacccuguua

SEQ ID NO: 2600096 - RNA, 16 nt, Human
ugaguuacagccuguu

SEQ ID NO: 2600097 - RNA, 22 nt, Human
ugaguguuuuuacuacaguugu

SEQ ID NO: 2600098 - RNA, 14 nt, Human
ugaguacuacaguc

SEQ ID NO: 2600099 - RNA, 15 nt, Human
ugaguacagcagaaa

SEQ ID NO: 2600100 - RNA, 20 nt, Human
ugaguacguugugcauuugg

SEQ ID NO: 2600101 - RNA, 18 nt, Human
ugagucaccaagcccagu

SEQ ID NO: 2600102 - RNA, 22 nt, Human
ugagucacccuaccugugccug

SEQ ID NO: 2600103 - RNA, 13 nt, Human
ugagucaccagga

SEQ ID NO: 2600104 - RNA, 20 nt, Human
ugagucacccuaccugugcc

SEQ ID NO: 2600105 - RNA, 16 nt, Human
ugagucacccaugaag

SEQ ID NO: 2600106 - RNA, 16 nt, Human
ugagugagccuggcuc

SEQ ID NO: 2600107 - RNA, 14 nt, Human
ugagugagccuggc

SEQ ID NO: 2600108 - RNA, 21 nt, Human
ugagucaugaucucccugccg

SEQ ID NO: 2600109 - RNA, 20 nt, Human
ugagucagguuugaguagag

SEQ ID NO: 2600110 - RNA, 20 nt, Human
ugagucaugaucucccugcc

SEQ ID NO: 2600111 - RNA, 22 nt, Human
ugagucaugaucucccugccgc

SEQ ID NO: 2600112 - RNA, 20 nt, Human
ugagugauuauuuguuauuu

SEQ ID NO: 2600113 - RNA, 14 nt, Human
ugagugauagagcu

SEQ ID NO: 2600114 - RNA, 22 nt, Human
ugagugaggguuucugagcugc

SEQ ID NO: 2600115 - RNA, 19 nt, Human
ugagugagccuggcucuug

SEQ ID NO: 2600116 - RNA, 17 nt, Human
ugagugagccuggcucu

SEQ ID NO: 2600117 - RNA, 15 nt, Human
ugagugauccuccaa

SEQ ID NO: 2600118 - RNA, 20 nt, Human
ugagugaugcggcagauuga

SEQ ID NO: 2600119 - RNA, 20 nt, Human
ugagugauccuccaacuuca

SEQ ID NO: 2600120 - RNA, 14 nt, Human
ugagugccuuacac

SEQ ID NO: 2600121 - RNA, 13 nt, Human
ugagugccuuaca

SEQ ID NO: 2600122 - RNA, 17 nt, Human
ugagugcagcucuggag

SEQ ID NO: 2600123 - RNA, 19 nt, Human
ugagugcagccguuugaga

SEQ ID NO: 2600124 - RNA, 14 nt, Human
ugagugauuauuug

SEQ ID NO: 2600125 - RNA, 16 nt, Human
ugagugccuuacacaa

SEQ ID NO: 2600126 - RNA, 15 nt, Human
ugagugcaguccuga

SEQ ID NO: 2600127 - RNA, 14 nt, Human
ugagugccuggcca

SEQ ID NO: 2600128 - RNA, 12 nt, Human
ugagugccuggc

SEQ ID NO: 2600129 - RNA, 18 nt, Human
ugaguggaugauguuucg

SEQ ID NO: 2600130 - RNA, 21 nt, Human
ugaguggcaggggacaggagu

SEQ ID NO: 2600131 - RNA, 13 nt, Human
ugaguggcagggg

SEQ ID NO: 2600132 - RNA, 15 nt, Human
ugaguggcauggcca

SEQ ID NO: 2600133 - RNA, 22 nt, Human
agccucuagggaccccuccucc

SEQ ID NO: 2600134 - RNA, 21 nt, Human
agccucuagggaccccuccuc

SEQ ID NO: 2600135 - RNA, 20 nt, Human
agccucuagggaccccuccu

SEQ ID NO: 2600136 - RNA, 16 nt, Human
agccucgucuucauua

SEQ ID NO: 2600137 - RNA, 18 nt, Human
agccucuagggaccccuc

SEQ ID NO: 2600138 - RNA, 16 nt, Human
agccucuccccagguc

SEQ ID NO: 2600139 - RNA, 23 nt, Human
agccucuccaggaaugccuccuc

SEQ ID NO: 2600140 - RNA, 18 nt, Human
agccucucaccuguacuc

SEQ ID NO: 2600141 - RNA, 12 nt, Human
agccucuccagg

SEQ ID NO: 2600142 - RNA, 22 nt, Human
agccucuccccagguccagcuc

SEQ ID NO: 2600143 - RNA, 18 nt, Human
agccucuccccaggucca

SEQ ID NO: 2600144 - RNA, 23 nt, Human
agccucuccccagguccagcucu

SEQ ID NO: 2600145 - RNA, 13 nt, Human
agccucuccccug

SEQ ID NO: 2600146 - RNA, 14 nt, Human
agccucuccaggaa

SEQ ID NO: 2600147 - RNA, 20 nt, Human
agccucgccgucugugaauu

SEQ ID NO: 2600148 - RNA, 17 nt, Human
agccucgacacagagug

SEQ ID NO: 2600149 - RNA, 18 nt, Human
agccucgacacagagugg

SEQ ID NO: 2600150 - RNA, 18 nt, Human
agccuccugcccaguccc

SEQ ID NO: 2600151 - RNA, 21 nt, Human
agccuccuguguagcugggau

SEQ ID NO: 2600152 - RNA, 21 nt, Human
ugcagacaggcaagcaccucc

SEQ ID NO: 2600153 - RNA, 13 nt, Human
ugcagacaggcaa

SEQ ID NO: 2600154 - RNA, 12 nt, Human
ugcagacaggca

SEQ ID NO: 2600155 - RNA, 18 nt, Human
agccuccugcccuuaccu

SEQ ID NO: 2600156 - RNA, 14 nt, Human
agccuccugcccuu

SEQ ID NO: 2600157 - RNA, 13 nt, Human
agccuccugcccu

SEQ ID NO: 2600158 - RNA, 16 nt, Human
agccuccugcccaguc

SEQ ID NO: 2600159 - RNA, 15 nt, Human
agccuccugcccagu

SEQ ID NO: 2600160 - RNA, 14 nt, Human
agccuccugcccag

SEQ ID NO: 2600161 - RNA, 13 nt, Human
agccuccugccca

SEQ ID NO: 2600162 - RNA, 11 nt, Human
agccuccugcc

SEQ ID NO: 2600163 - RNA, 20 nt, Human
agccuccugaguagcuggga

SEQ ID NO: 2600164 - RNA, 19 nt, Human
agccuccugaguagcugga

SEQ ID NO: 2600165 - RNA, 21 nt, Human
ugcagccucacaguccuuacc

SEQ ID NO: 2600166 - RNA, 21 nt, Human
agccucuuucugucccuucug

SEQ ID NO: 2600167 - RNA, 17 nt, Human
ugcagccucacaguccu

SEQ ID NO: 2600168 - RNA, 18 nt, Human
ugcagccucacaguccuu

SEQ ID NO: 2600169 - RNA, 15 nt, Human
agccucuuucugucc

SEQ ID NO: 2600170 - RNA, 18 nt, Human
agccucuuucugucccuu

SEQ ID NO: 2600171 - RNA, 11 nt, Human
agccucugugu

SEQ ID NO: 2600172 - RNA, 21 nt, Human
agccucugucacugcaggcac

SEQ ID NO: 2600173 - RNA, 22 nt, Human
agccucugucacugcaggcacu

SEQ ID NO: 2600174 - RNA, 14 nt, Human
agccucugucacug

SEQ ID NO: 2600175 - RNA, 22 nt, Human
agccucugggucagugguccac

SEQ ID NO: 2600176 - RNA, 23 nt, Human
agccucugggucagugguccaca

SEQ ID NO: 2600177 - RNA, 20 nt, Human
agccucuccggcagaaggga

SEQ ID NO: 2600178 - RNA, 23 nt, Human
agccucugugucacuggcugccu

SEQ ID NO: 2600179 - RNA, 20 nt, Human
agccucugugucacuggcug

SEQ ID NO: 2600180 - RNA, 19 nt, Human
agccucugugucacuggcu

SEQ ID NO: 2600181 - RNA, 18 nt, Human
agccucugugucacuggc

SEQ ID NO: 2600182 - RNA, 15 nt, Human
agccucugugucacu

SEQ ID NO: 2600183 - RNA, 14 nt, Human
agccucugugucac

SEQ ID NO: 2600184 - RNA, 13 nt, Human
agccucuguguca

SEQ ID NO: 2600185 - RNA, 21 nt, Human
agccucugugucacuggcugc

SEQ ID NO: 2600186 - RNA, 20 nt, Human
agccucuuaaagcugccugu

SEQ ID NO: 2600187 - RNA, 22 nt, Human
agccucuuaaagcugccuguag

SEQ ID NO: 2600188 - RNA, 23 nt, Human
agccucuuaaagcugccuguagu

SEQ ID NO: 2600189 - RNA, 19 nt, Human
ugcaggggcucuggagaga

SEQ ID NO: 2600190 - RNA, 18 nt, Human
ugcaggggcucuggagag

SEQ ID NO: 2600191 - RNA, 14 nt, Human
ugcaggggcucugg

SEQ ID NO: 2600192 - RNA, 22 nt, Human
ugcaggggauugaagcccucca

SEQ ID NO: 2600193 - RNA, 21 nt, Human
ugcaggggcucuggagagaaa

SEQ ID NO: 2600194 - RNA, 19 nt, Human
ugcagggggugugucugcu

SEQ ID NO: 2600195 - RNA, 17 nt, Human
ugcaggguggugcuggg

SEQ ID NO: 2600196 - RNA, 22 nt, Human
ugcagggggugugucugcucag

SEQ ID NO: 2600197 - RNA, 21 nt, Human
ugcaggggauugaagcccucc

SEQ ID NO: 2600198 - RNA, 20 nt, Human
ugcaggggauugaagcccuc

SEQ ID NO: 2600199 - RNA, 13 nt, Human
ugcaggggcucug

SEQ ID NO: 2600200 - RNA, 22 nt, Human
ugcaggucccuaauaaagcugu

SEQ ID NO: 2600201 - RNA, 19 nt, Human
ugcaggguggugcugggac

SEQ ID NO: 2600202 - RNA, 18 nt, Human
ugcaggguggugcuggga

SEQ ID NO: 2600203 - RNA, 20 nt, Human
ugcaggguggugcugggacu

SEQ ID NO: 2600204 - RNA, 14 nt, Human
ugcaggugcugcug

SEQ ID NO: 2600205 - RNA, 23 nt, Human
ugcaggugagcccauggcccucc

SEQ ID NO: 2600206 - RNA, 16 nt, Human
ugcaggugcugcugcg

SEQ ID NO: 2600207 - RNA, 13 nt, Human
ugcagguggggag

SEQ ID NO: 2600208 - RNA, 15 nt, Human
ugcaggucucaaccc

SEQ ID NO: 2600209 - RNA, 13 nt, Human
ugcaggugcacca

SEQ ID NO: 2600210 - RNA, 19 nt, Human
ugcaggugagcccauggcc

SEQ ID NO: 2600211 - RNA, 22 nt, Human
ugcaugccaaauuguaguucuu

SEQ ID NO: 2600212 - RNA, 22 nt, Human
ugcaugcagccacugugcugaa

SEQ ID NO: 2600213 - RNA, 22 nt, Human
ugcaugcacuguucccccugug

SEQ ID NO: 2600214 - RNA, 18 nt, Human
ugcaugcagccacugugc

SEQ ID NO: 2600215 - RNA, 14 nt, Human
ugcaugauuuugua

SEQ ID NO: 2600216 - RNA, 19 nt, Human
ugcaugcacuguucccccu

SEQ ID NO: 2600217 - RNA, 18 nt, Human
ugcaugauuuuguaaccc

SEQ ID NO: 2600218 - RNA, 18 nt, Human
ugcaugcugucccuuacg

SEQ ID NO: 2600219 - RNA, 21 nt, Human
ugcaugcggcccagcccggcu

SEQ ID NO: 2600220 - RNA, 18 nt, Human
ugcaugcggcccagcccg

SEQ ID NO: 2600221 - RNA, 16 nt, Human
ugcaugcggcccagcc

SEQ ID NO: 2600222 - RNA, 15 nt, Human
ugcaugcggcccagc

SEQ ID NO: 2600223 - RNA, 13 nt, Human
ugcaugcggccca

SEQ ID NO: 2600224 - RNA, 14 nt, Human
ugcaugccuggucu

SEQ ID NO: 2600225 - RNA, 21 nt, Human
ugcaugcugucccuuacguga

SEQ ID NO: 2600226 - RNA, 19 nt, Human
ugcaugcugucccuuacgu

SEQ ID NO: 2600227 - RNA, 11 nt, Human
ugcauggaaau

SEQ ID NO: 2600228 - RNA, 19 nt, Human
ugcauggaaaccugaaaaa

SEQ ID NO: 2600229 - RNA, 15 nt, Human
ugcauggaaaccuga

SEQ ID NO: 2600230 - RNA, 17 nt, Human
ugcaugcugcuggacag

SEQ ID NO: 2600231 - RNA, 16 nt, Human
ugcaugcucucugcag

SEQ ID NO: 2600232 - RNA, 17 nt, Human
ugcaugcucucugcagc

SEQ ID NO: 2600233 - RNA, 18 nt, Human
ugcaugcucucugcagcc

SEQ ID NO: 2600234 - RNA, 19 nt, Human
ugcaugcucucugcagcca

SEQ ID NO: 2600235 - RNA, 20 nt, Human
ugcaucuuggggacaucucu

SEQ ID NO: 2600236 - RNA, 22 nt, Human
ugcaucuuacugaagguaaaau

SEQ ID NO: 2600237 - RNA, 19 nt, Human
ugcaucuguccucaugugu

SEQ ID NO: 2600238 - RNA, 14 nt, Human
ugcaucuguccuca

SEQ ID NO: 2600239 - RNA, 14 nt, Human
ugcaucuuacugaa

SEQ ID NO: 2600240 - RNA, 17 nt, Human
ugcaucuuacugaaggu

SEQ ID NO: 2600241 - RNA, 18 nt, Human
ugcaucuuacugaaggua

SEQ ID NO: 2600242 - RNA, 11 nt, Human
ugcaugaaaau

SEQ ID NO: 2600243 - RNA, 18 nt, Human
ugcaugaagguuucugaa

SEQ ID NO: 2600244 - RNA, 13 nt, Human
ugcaugaagguuu

SEQ ID NO: 2600245 - RNA, 21 nt, Human
ugcaugaagguuucugaaaau

SEQ ID NO: 2600246 - RNA, 19 nt, Human
ugcaugaagguuucugaaa

SEQ ID NO: 2600247 - RNA, 13 nt, Human
ugcaucuguccuc

SEQ ID NO: 2600248 - RNA, 14 nt, Human
ugcaucucagccca

SEQ ID NO: 2600249 - RNA, 13 nt, Human
ugcaucucagccc

SEQ ID NO: 2600250 - RNA, 19 nt, Human
ugcaucuacucccaaguau

SEQ ID NO: 2600251 - RNA, 21 nt, Human
ugcaucucacuggaugcaaag

SEQ ID NO: 2600252 - RNA, 18 nt, Human
ugcaucuagauuauggag

SEQ ID NO: 2600253 - RNA, 21 nt, Human
ugcaucuagaggcuuccuuca

SEQ ID NO: 2600254 - RNA, 19 nt, Human
ugcauagagguaccagcaa

SEQ ID NO: 2600255 - RNA, 14 nt, Human
ugcaucuacuccca

SEQ ID NO: 2600256 - RNA, 17 nt, Human
ugcaucguuucaucuuc

SEQ ID NO: 2600257 - RNA, 19 nt, Human
ugcauagagccacguaugu

SEQ ID NO: 2600258 - RNA, 21 nt, Human
ugcaguagucucugugcuuug

SEQ ID NO: 2600259 - RNA, 16 nt, Human
ugcaguaucaugcccu

SEQ ID NO: 2600260 - RNA, 21 nt, Human
ugcaguaucaugcccugugca

SEQ ID NO: 2600261 - RNA, 16 nt, Human
ugcaguaugaaaauaa

SEQ ID NO: 2600262 - RNA, 17 nt, Human
ugcaguauugagcacug

SEQ ID NO: 2600263 - RNA, 15 nt, Human
ugcaguaugaaaaua

SEQ ID NO: 2600264 - RNA, 18 nt, Human
ugcaguagucucugugcu

SEQ ID NO: 2600265 - RNA, 15 nt, Human
ugcaguagucucugu

SEQ ID NO: 2600266 - RNA, 20 nt, Human
ugcaguagauuuucuuuaaa

SEQ ID NO: 2600267 - RNA, 19 nt, Human
ugcaguagauuuucuuuaa

SEQ ID NO: 2600268 - RNA, 16 nt, Human
ugcagguuuguuacau

SEQ ID NO: 2600269 - RNA, 16 nt, Human
ugcaguagauuuucuu

SEQ ID NO: 2600270 - RNA, 15 nt, Human
ugcagguuuguuaca

SEQ ID NO: 2600271 - RNA, 23 nt, Human
ugcagguugggccauacuggccu

SEQ ID NO: 2600272 - RNA, 20 nt, Human
ugcagguucuucuuccugaa

SEQ ID NO: 2600273 - RNA, 18 nt, Human
ugcauaccacuuuuguuc

SEQ ID NO: 2600274 - RNA, 20 nt, Human
ugcauaccacuuuuguucuu

SEQ ID NO: 2600275 - RNA, 16 nt, Human
ugcauaccacuuuugu

SEQ ID NO: 2600276 - RNA, 19 nt, Human
ugcagucacguggaggagc

SEQ ID NO: 2600277 - RNA, 21 nt, Human
ugcagucacguggaggagcag

SEQ ID NO: 2600278 - RNA, 15 nt, Human
ugcagucacuggagg

SEQ ID NO: 2600279 - RNA, 14 nt, Human
ugcagucacuggag

SEQ ID NO: 2600280 - RNA, 21 nt, Human
ugcagucagucaugauggcac

SEQ ID NO: 2600281 - RNA, 18 nt, Human
ugcauacuucaaaaguau

SEQ ID NO: 2600282 - RNA, 17 nt, Human
ugcauacuucaaaagua

SEQ ID NO: 2600283 - RNA, 16 nt, Human
ugcauacuucaaaagu

SEQ ID NO: 2600284 - RNA, 15 nt, Human
ugcauacuucaaaag

SEQ ID NO: 2600285 - RNA, 14 nt, Human
ugcauacuucaaaa

SEQ ID NO: 2600286 - RNA, 19 nt, Human
ugcauacucauuaggaugg

SEQ ID NO: 2600287 - RNA, 13 nt, Human
ugcauacucauua

SEQ ID NO: 2600288 - RNA, 14 nt, Human
ugcauaccacuuuu

SEQ ID NO: 2600289 - RNA, 17 nt, Human
ugcagucacuggagguu

SEQ ID NO: 2600290 - RNA, 13 nt, Human
ugcagucaucuug

SEQ ID NO: 2600291 - RNA, 21 nt, Human
ugcauacuucaaaaguauuuu

SEQ ID NO: 2600292 - RNA, 18 nt, Human
ugcauacuuuuuaaaugu

SEQ ID NO: 2600293 - RNA, 19 nt, Human
ugcauacuuuuuaaaugua

SEQ ID NO: 2600294 - RNA, 22 nt, Human
ugcauacuuuuuaaauguaaag

SEQ ID NO: 2600295 - RNA, 17 nt, Human
ugcauagaauaaaauuu

SEQ ID NO: 2600296 - RNA, 20 nt, Human
ugcauagauucccugagcag

SEQ ID NO: 2600297 - RNA, 23 nt, Human
ugcauacuuuuuaaauguaaaga

SEQ ID NO: 2600298 - RNA, 19 nt, Human
ugcauacuucaaaaguauu

SEQ ID NO: 2600299 - RNA, 17 nt, Human
ugcauagagccacguau

SEQ ID NO: 2600300 - RNA, 13 nt, Human
ugccauaauuacu

SEQ ID NO: 2600301 - RNA, 16 nt, Human
ugccauaaaacauuaa

SEQ ID NO: 2600302 - RNA, 14 nt, Human
ugccauaaaacauu

SEQ ID NO: 2600303 - RNA, 13 nt, Human
ugccauaaaacau

SEQ ID NO: 2600304 - RNA, 12 nt, Human
ugccauaaaaca

SEQ ID NO: 2600305 - RNA, 23 nt, Human
ugccaguuuaaucauugccuggu

SEQ ID NO: 2600306 - RNA, 19 nt, Human
ugccaguuuuguuuccuuu

SEQ ID NO: 2600307 - RNA, 17 nt, Human
ugccaguuauggcuaua

SEQ ID NO: 2600308 - RNA, 23 nt, Human
ugccagccuuccucugcagcuga

SEQ ID NO: 2600309 - RNA, 18 nt, Human
ugccagccuuccucugca

SEQ ID NO: 2600310 - RNA, 17 nt, Human
ugccagccuuccucugc

SEQ ID NO: 2600311 - RNA, 13 nt, Human
ugccagcuauuuu

SEQ ID NO: 2600312 - RNA, 21 nt, Human
ugccagccuuccucugcagcu

SEQ ID NO: 2600313 - RNA, 19 nt, Human
ugccagcuacuuccuccuc

SEQ ID NO: 2600314 - RNA, 17 nt, Human
ugccagcucagucccau

SEQ ID NO: 2600315 - RNA, 15 nt, Human
ugccagugccuuacc

SEQ ID NO: 2600316 - RNA, 20 nt, Human
ugccagugccuuaccuccug

SEQ ID NO: 2600317 - RNA, 21 nt, Human
ugccagugccuuaccuccugc

SEQ ID NO: 2600318 - RNA, 22 nt, Human
ugccagugccuuaccuccugcc

SEQ ID NO: 2600319 - RNA, 23 nt, Human
ugccagugccuuaccuccugccc

SEQ ID NO: 2600320 - RNA, 16 nt, Human
ugccagccuggcuucu

SEQ ID NO: 2600321 - RNA, 17 nt, Human
ugccagccuggcuucug

SEQ ID NO: 2600322 - RNA, 18 nt, Human
ugccagccuggcuucugg

SEQ ID NO: 2600323 - RNA, 20 nt, Human
ugccagccuggcuucuggag

SEQ ID NO: 2600324 - RNA, 21 nt, Human
ugccagccuggcuucuggagc

SEQ ID NO: 2600325 - RNA, 22 nt, Human
ugccagccuggcuucuggagcc

SEQ ID NO: 2600326 - RNA, 14 nt, Human
ugccagccuuccuc

SEQ ID NO: 2600327 - RNA, 12 nt, Human
ugccagccuucc

SEQ ID NO: 2600328 - RNA, 23 nt, Human
ugccagccuggcuucuggagccc

SEQ ID NO: 2600329 - RNA, 17 nt, Human
ugccagccgagauagcc

SEQ ID NO: 2600330 - RNA, 23 nt, Human
ugccagccagcagccagcucuca

SEQ ID NO: 2600331 - RNA, 22 nt, Human
ugccagccgagauagccaaggc

SEQ ID NO: 2600332 - RNA, 21 nt, Human
ugccagccgugaugcucaggc

SEQ ID NO: 2600333 - RNA, 20 nt, Human
ugccagccgugaugcucagg

SEQ ID NO: 2600334 - RNA, 19 nt, Human
ugccagccgugaugcucag

SEQ ID NO: 2600335 - RNA, 12 nt, Human
ugccagccuggc

SEQ ID NO: 2600336 - RNA, 15 nt, Human
ugccagccuggcuuc

SEQ ID NO: 2600337 - RNA, 13 nt, Human
ugccacaggacac

SEQ ID NO: 2600338 - RNA, 14 nt, Human
ugccacaggacaca

SEQ ID NO: 2600339 - RNA, 18 nt, Human
ugccacaggacacaguca

SEQ ID NO: 2600340 - RNA, 13 nt, Human
ugccacaggccuc

SEQ ID NO: 2600341 - RNA, 12 nt, Human
ugccacaggccu

SEQ ID NO: 2600342 - RNA, 11 nt, Human
ugccacaggcc

SEQ ID NO: 2600343 - RNA, 20 nt, Human
ugccacaggacacagucaga

SEQ ID NO: 2600344 - RNA, 14 nt, Human
ugccacaggccucc

SEQ ID NO: 2600345 - RNA, 15 nt, Human
ugccagccagcagcc

SEQ ID NO: 2600346 - RNA, 16 nt, Human
ugccagccagcagcca

SEQ ID NO: 2600347 - RNA, 17 nt, Human
ugccagccagcagccag

SEQ ID NO: 2600348 - RNA, 22 nt, Human
ugccagccagcagccagcucuc

SEQ ID NO: 2600349 - RNA, 13 nt, Human
ugccacagccucc

SEQ ID NO: 2600350 - RNA, 17 nt, Human
ugccacagccuccccug

SEQ ID NO: 2600351 - RNA, 21 nt, Human
ugccacagccuccccugccag

SEQ ID NO: 2600352 - RNA, 12 nt, Human
ugccacaggaca

SEQ ID NO: 2600353 - RNA, 22 nt, Human
ugccacagccuccccugccagg

SEQ ID NO: 2600354 - RNA, 12 nt, Human
ugccacagcucu

SEQ ID NO: 2600355 - RNA, 14 nt, Human
ugccaaugggagcu

SEQ ID NO: 2600356 - RNA, 13 nt, Human
ugccaauggacua

SEQ ID NO: 2600357 - RNA, 16 nt, Human
ugccacagagcgggga

SEQ ID NO: 2600358 - RNA, 14 nt, Human
ugccacagagcggg

SEQ ID NO: 2600359 - RNA, 19 nt, Human
ugccaauggaaccuccuuu

SEQ ID NO: 2600360 - RNA, 15 nt, Human
ugccacagagcgggg

SEQ ID NO: 2600361 - RNA, 18 nt, Human
ugccaauggaaccuccuu

SEQ ID NO: 2600362 - RNA, 14 nt, Human
ugccaauggaaccu

SEQ ID NO: 2600363 - RNA, 20 nt, Human
ugccaaugaggucugaaaug

SEQ ID NO: 2600364 - RNA, 21 nt, Human
ugccaauauuaaaucugcugg

SEQ ID NO: 2600365 - RNA, 22 nt, Human
ugccaaggccagaguggccugg

SEQ ID NO: 2600366 - RNA, 19 nt, Human
ugccaauauuaaaucugcu

SEQ ID NO: 2600367 - RNA, 21 nt, Human
ugccaaugaggucugaaaugg

SEQ ID NO: 2600368 - RNA, 16 nt, Human
ugccaaggccagagug

SEQ ID NO: 2600369 - RNA, 20 nt, Human
ugccaaggccagaguggccu

SEQ ID NO: 2600370 - RNA, 21 nt, Human
ugccaaggccagaguggccug

SEQ ID NO: 2600371 - RNA, 23 nt, Human
ugccaagcuccaagccccaucuu

SEQ ID NO: 2600372 - RNA, 16 nt, Human
ugccaagcuccaagcc

SEQ ID NO: 2600373 - RNA, 15 nt, Human
ugccaagcuccaagc

SEQ ID NO: 2600374 - RNA, 22 nt, Human
ugccaagcucaggaccaggcaa

SEQ ID NO: 2600375 - RNA, 18 nt, Human
ugccaagcucaggaccag

SEQ ID NO: 2600376 - RNA, 13 nt, Human
ugccaagcuccaa

SEQ ID NO: 2600377 - RNA, 15 nt, Human
ugccaagcucaggac

SEQ ID NO: 2600378 - RNA, 22 nt, Human
ugccaagcauuuaauguagcca

SEQ ID NO: 2600379 - RNA, 14 nt, Human
ugccaagcucagga

SEQ ID NO: 2600380 - RNA, 17 nt, Human
ugcauuuaaaacagaca

SEQ ID NO: 2600381 - RNA, 19 nt, Human
ugcauuuaaaacagacacu

SEQ ID NO: 2600382 - RNA, 15 nt, Human
ugcauuuaaaacaga

SEQ ID NO: 2600383 - RNA, 13 nt, Human
ugcauugugcuuc

SEQ ID NO: 2600384 - RNA, 15 nt, Human
ugcauugugcuucuu

SEQ ID NO: 2600385 - RNA, 12 nt, Human
ugcauugugcuu

SEQ ID NO: 2600386 - RNA, 16 nt, Human
ugcauuuaaaagauac

SEQ ID NO: 2600387 - RNA, 20 nt, Human
ugcauuuaaaacagacacug

SEQ ID NO: 2600388 - RNA, 22 nt, Human
ugcauuuaaaacagacacuggc

SEQ ID NO: 2600389 - RNA, 17 nt, Human
ugccaagcacugugcuc

SEQ ID NO: 2600390 - RNA, 15 nt, Human
ugccaagcacugugc

SEQ ID NO: 2600391 - RNA, 14 nt, Human
ugccaagcacugug

SEQ ID NO: 2600392 - RNA, 19 nt, Human
ugccaagcacagugccugc

SEQ ID NO: 2600393 - RNA, 15 nt, Human
agcgcccuuccucuc

SEQ ID NO: 2600394 - RNA, 14 nt, Human
agcgcccuuccucu

SEQ ID NO: 2600395 - RNA, 13 nt, Human
agcgcccuuccuc

SEQ ID NO: 2600396 - RNA, 12 nt, Human
agcgcccuuccu

SEQ ID NO: 2600397 - RNA, 23 nt, Human
agcgccgugaguucucagggcuc

SEQ ID NO: 2600398 - RNA, 22 nt, Human
agcgccgugaguucucagggcu

SEQ ID NO: 2600399 - RNA, 21 nt, Human
agcgccgugaguucucagggc

SEQ ID NO: 2600400 - RNA, 20 nt, Human
agcgccgugaguucucaggg

SEQ ID NO: 2600401 - RNA, 19 nt, Human
agcgccgugaguucucagg

SEQ ID NO: 2600402 - RNA, 17 nt, Human
agcgccgugaguucuca

SEQ ID NO: 2600403 - RNA, 17 nt, Human
agcgcccuuccucucca

SEQ ID NO: 2600404 - RNA, 16 nt, Human
agcgcccuuccucucc

SEQ ID NO: 2600405 - RNA, 20 nt, Human
ugcauuggaagaccccaccc

SEQ ID NO: 2600406 - RNA, 24 nt, Human
agcgccgugaguucucagggcucc

SEQ ID NO: 2600407 - RNA, 21 nt, Human
agcgccuaguggggucucccu

SEQ ID NO: 2600408 - RNA, 18 nt, Human
ugcauuguaucgauguua

SEQ ID NO: 2600409 - RNA, 19 nt, Human
ugcauuggaagaccccacc

SEQ ID NO: 2600410 - RNA, 13 nt, Human
agccuugaacuuu

SEQ ID NO: 2600411 - RNA, 23 nt, Human
agccuugaacuuugaccucugca

SEQ ID NO: 2600412 - RNA, 15 nt, Human
agccuucuuugcuug

SEQ ID NO: 2600413 - RNA, 22 nt, Human
agccuucuuccaucccaggaca

SEQ ID NO: 2600414 - RNA, 20 nt, Human
agccuucuuccaucccagga

SEQ ID NO: 2600415 - RNA, 18 nt, Human
agccuucuuccaucccag

SEQ ID NO: 2600416 - RNA, 23 nt, Human
agccuucuuugcuugccucucug

SEQ ID NO: 2600417 - RNA, 19 nt, Human
agccuucuuugcuugccuc

SEQ ID NO: 2600418 - RNA, 15 nt, Human
agccuucucuguuca

SEQ ID NO: 2600419 - RNA, 19 nt, Human
agccuucucuguucauuuc

SEQ ID NO: 2600420 - RNA, 20 nt, Human
agccuucucuguucauuucc

SEQ ID NO: 2600421 - RNA, 21 nt, Human
agccuucucuguucauuuccu

SEQ ID NO: 2600422 - RNA, 22 nt, Human
agccuucucuguucauuuccuc

SEQ ID NO: 2600423 - RNA, 23 nt, Human
agccuucucuguucauuuccuca

SEQ ID NO: 2600424 - RNA, 15 nt, Human
agccuucuguaggaa

SEQ ID NO: 2600425 - RNA, 20 nt, Human
agccuucugaggacauucca

SEQ ID NO: 2600426 - RNA, 12 nt, Human
agccugugccuc

SEQ ID NO: 2600427 - RNA, 15 nt, Human
agccuguuuaagaga

SEQ ID NO: 2600428 - RNA, 18 nt, Human
agccuuaaucagguccuc

SEQ ID NO: 2600429 - RNA, 18 nt, Human
agccuguuuuguuggaag

SEQ ID NO: 2600430 - RNA, 20 nt, Human
agccuguuuuaaguucugga

SEQ ID NO: 2600431 - RNA, 14 nt, Human
agccuucucuguuc

SEQ ID NO: 2600432 - RNA, 20 nt, Human
agccuuagaagucacacagu

SEQ ID NO: 2600433 - RNA, 16 nt, Human
agcgcccgcugggcug

SEQ ID NO: 2600434 - RNA, 15 nt, Human
agcgcccgcugggcu

SEQ ID NO: 2600435 - RNA, 14 nt, Human
agcgcccgcugggc

SEQ ID NO: 2600436 - RNA, 16 nt, Human
agcgccccucccuagu

SEQ ID NO: 2600437 - RNA, 19 nt, Human
agcgcccgcugggcugagc

SEQ ID NO: 2600438 - RNA, 15 nt, Human
agcgccccucccuag

SEQ ID NO: 2600439 - RNA, 11 nt, Human
agcgccccucc

SEQ ID NO: 2600440 - RNA, 16 nt, Human
agccuuggggauucuu

SEQ ID NO: 2600441 - RNA, 23 nt, Human
agccuuggggauucuuccaucug

SEQ ID NO: 2600442 - RNA, 16 nt, Human
agccuugggaccccug

SEQ ID NO: 2600443 - RNA, 16 nt, Human
agccuuggcaucuaga

SEQ ID NO: 2600444 - RNA, 23 nt, Human
agccuugggaacaugcgugugac

SEQ ID NO: 2600445 - RNA, 19 nt, Human
agccuuggauaaugcuguu

SEQ ID NO: 2600446 - RNA, 20 nt, Human
agccuuggauaaugcuguug

SEQ ID NO: 2600447 - RNA, 22 nt, Human
agccuuggauaaugcuguugcc

SEQ ID NO: 2600448 - RNA, 23 nt, Human
agccuuggauaaugcuguugccu

SEQ ID NO: 2600449 - RNA, 16 nt, Human
agccuuggauguauau

SEQ ID NO: 2600450 - RNA, 19 nt, Human
agccuugaccauucuccac

SEQ ID NO: 2600451 - RNA, 18 nt, Human
agccuugaccauucucca

SEQ ID NO: 2600452 - RNA, 21 nt, Human
agccuugaccauucuccaccu

SEQ ID NO: 2600453 - RNA, 19 nt, Human
agccuugcggaagguucua

SEQ ID NO: 2600454 - RNA, 22 nt, Human
agccugaguagaaaggccuuua

SEQ ID NO: 2600455 - RNA, 17 nt, Human
agccugaguagaaaggc

SEQ ID NO: 2600456 - RNA, 16 nt, Human
agccugagucaccugc

SEQ ID NO: 2600457 - RNA, 23 nt, Human
agccugaguagaaaggccuuuaa

SEQ ID NO: 2600458 - RNA, 19 nt, Human
agccugagucaccugcaga

SEQ ID NO: 2600459 - RNA, 13 nt, Human
agccugaguagaa

SEQ ID NO: 2600460 - RNA, 17 nt, Human
agccugaggcugagacu

SEQ ID NO: 2600461 - RNA, 19 nt, Human
ugcauggcuccagaaaugu

SEQ ID NO: 2600462 - RNA, 18 nt, Human
ugcauggcuccagaaaug

SEQ ID NO: 2600463 - RNA, 11 nt, Human
agccugaggcu

SEQ ID NO: 2600464 - RNA, 16 nt, Human
ugcauggcuccagaaa

SEQ ID NO: 2600465 - RNA, 20 nt, Human
ugcauggcacuugcaucugu

SEQ ID NO: 2600466 - RNA, 19 nt, Human
ugcauggaaauucccuuca

SEQ ID NO: 2600467 - RNA, 23 nt, Human
ugcauggaaauucccuucaucug

SEQ ID NO: 2600468 - RNA, 23 nt, Human
ugcauggacaccccuuauccagg

SEQ ID NO: 2600469 - RNA, 19 nt, Human
ugcauggaauuuguaaguu

SEQ ID NO: 2600470 - RNA, 19 nt, Human
ugcauggcacuugcaucug

SEQ ID NO: 2600471 - RNA, 13 nt, Human
ugcauggagcagg

SEQ ID NO: 2600472 - RNA, 21 nt, Human
agccugugcauguaugucuug

SEQ ID NO: 2600473 - RNA, 17 nt, Human
agccugugccucuggga

SEQ ID NO: 2600474 - RNA, 18 nt, Human
agccugugccucugggac

SEQ ID NO: 2600475 - RNA, 19 nt, Human
agccugugccucugggacu

SEQ ID NO: 2600476 - RNA, 16 nt, Human
agccugucucuuccau

SEQ ID NO: 2600477 - RNA, 15 nt, Human
agccugucucuucca

SEQ ID NO: 2600478 - RNA, 14 nt, Human
agccugucucuucc

SEQ ID NO: 2600479 - RNA, 18 nt, Human
agccuguccugggcuggu

SEQ ID NO: 2600480 - RNA, 17 nt, Human
agccuguccugggcugg

SEQ ID NO: 2600481 - RNA, 14 nt, Human
agccuguccugggc

SEQ ID NO: 2600482 - RNA, 11 nt, Human
agccuguccug

SEQ ID NO: 2600483 - RNA, 19 nt, Human
agccugucccauggacacu

SEQ ID NO: 2600484 - RNA, 16 nt, Human
agccuguaaucccagc

SEQ ID NO: 2600485 - RNA, 17 nt, Human
agccuguaaucccagcu

SEQ ID NO: 2600486 - RNA, 16 nt, Human
agccuguaucuugggg

SEQ ID NO: 2600487 - RNA, 18 nt, Human
agccuguaaucccagcua

SEQ ID NO: 2600488 - RNA, 15 nt, Human
agccuguaaucccag

SEQ ID NO: 2600489 - RNA, 20 nt, Human
ugcaaaguaucccuacugua

SEQ ID NO: 2600490 - RNA, 14 nt, Human
ugcaaaggcuggga

SEQ ID NO: 2600491 - RNA, 20 nt, Human
ugcaaagucaugcaaaggcu

SEQ ID NO: 2600492 - RNA, 21 nt, Human
ugcaaagucaugcaaaggcug

SEQ ID NO: 2600493 - RNA, 23 nt, Human
ugcaaagucaugcaaaggcuggg

SEQ ID NO: 2600494 - RNA, 22 nt, Human
ugcaaagucaugcaaaggcugg

SEQ ID NO: 2600495 - RNA, 23 nt, Human
ugcaaaguucccuacuuccugug

SEQ ID NO: 2600496 - RNA, 14 nt, Human
ugcaaagcccagcu

SEQ ID NO: 2600497 - RNA, 15 nt, Human
ugcaaagcccagcuu

SEQ ID NO: 2600498 - RNA, 17 nt, Human
ugcaaagcccagcuuga

SEQ ID NO: 2600499 - RNA, 13 nt, Human
ugcaaaggaaaua

SEQ ID NO: 2600500 - RNA, 16 nt, Human
ugcaaaggaaauacca

SEQ ID NO: 2600501 - RNA, 21 nt, Human
ugcaaaggguaucaggugcug

SEQ ID NO: 2600502 - RNA, 13 nt, Human
ugcaaaggcuggg

SEQ ID NO: 2600503 - RNA, 12 nt, Human
ugcaaaggcugg

SEQ ID NO: 2600504 - RNA, 15 nt, Human
ugcaaaggacagauc

SEQ ID NO: 2600505 - RNA, 12 nt, Human
ugcaaaggacug

SEQ ID NO: 2600506 - RNA, 13 nt, Human
ugcaaaggacaga

SEQ ID NO: 2600507 - RNA, 12 nt, Human
ugcaaagauuug

SEQ ID NO: 2600508 - RNA, 20 nt, Human
ugcaaagcacugacuucuaa

SEQ ID NO: 2600509 - RNA, 22 nt, Human
ugcaaagcacugacuucuaagu

SEQ ID NO: 2600510 - RNA, 18 nt, Human
ugcaaagcacugacuucu

SEQ ID NO: 2600511 - RNA, 23 nt, Human
ugcaaagaucuguccucagccuu

SEQ ID NO: 2600512 - RNA, 12 nt, Human
ugcaaagaucug

SEQ ID NO: 2600513 - RNA, 20 nt, Human
ugcaaaccaucauugaaauc

SEQ ID NO: 2600514 - RNA, 18 nt, Human
ugcaaaccaucauugaaa

SEQ ID NO: 2600515 - RNA, 17 nt, Human
ugcaaacuuuauuuuca

SEQ ID NO: 2600516 - RNA, 12 nt, Human
ugcaaacuuuau

SEQ ID NO: 2600517 - RNA, 12 nt, Human
ugcaaagaaaau

SEQ ID NO: 2600518 - RNA, 16 nt, Human
ugcaaagaaaaucaga

SEQ ID NO: 2600519 - RNA, 13 nt, Human
ugcaaagaggcaa

SEQ ID NO: 2600520 - RNA, 15 nt, Human
ugcaaagaggcaaga

SEQ ID NO: 2600521 - RNA, 19 nt, Human
ugcaaagaggcaagaggcu

SEQ ID NO: 2600522 - RNA, 19 nt, Human
ugauuucacaacagaucaa

SEQ ID NO: 2600523 - RNA, 16 nt, Human
ugauuucacaacagau

SEQ ID NO: 2600524 - RNA, 13 nt, Human
ugauuucauucaa

SEQ ID NO: 2600525 - RNA, 13 nt, Human
ugauuucauuuca

SEQ ID NO: 2600526 - RNA, 17 nt, Human
ugauuucauuucaacug

SEQ ID NO: 2600527 - RNA, 14 nt, Human
ugauuuccaaagag

SEQ ID NO: 2600528 - RNA, 22 nt, Human
ugauuuaugcauggaaaccuga

SEQ ID NO: 2600529 - RNA, 13 nt, Human
ugauuuaugcaug

SEQ ID NO: 2600530 - RNA, 22 nt, Human
ugauuuauaguuuguacaugca

SEQ ID NO: 2600531 - RNA, 16 nt, Human
ugauuuauaguuugua

SEQ ID NO: 2600532 - RNA, 18 nt, Human
agccacggccaggccaga

SEQ ID NO: 2600533 - RNA, 17 nt, Human
agccacggccaggccag

SEQ ID NO: 2600534 - RNA, 13 nt, Human
ugcaaaccaucau

SEQ ID NO: 2600535 - RNA, 12 nt, Human
ugcaaaccauca

SEQ ID NO: 2600536 - RNA, 13 nt, Human
ugauuugcauuga

SEQ ID NO: 2600537 - RNA, 14 nt, Human
ugauuugcauugaa

SEQ ID NO: 2600538 - RNA, 18 nt, Human
ugauuugcauugaacaca

SEQ ID NO: 2600539 - RNA, 15 nt, Human
ugauuugcauugaac

SEQ ID NO: 2600540 - RNA, 12 nt, Human
ugauuuggaaaa

SEQ ID NO: 2600541 - RNA, 20 nt, Human
ugauuugacuguuuuuaccc

SEQ ID NO: 2600542 - RNA, 18 nt, Human
ugauuugacuguuuuuac

SEQ ID NO: 2600543 - RNA, 14 nt, Human
ugauuugacuguuu

SEQ ID NO: 2600544 - RNA, 23 nt, Human
ugauuucccguggccccagccug

SEQ ID NO: 2600545 - RNA, 12 nt, Human
ugauuugcauug

SEQ ID NO: 2600546 - RNA, 23 nt, Human
ugauuugacuguuuuuacccaua

SEQ ID NO: 2600547 - RNA, 22 nt, Human
ugauuucccguggccccagccu

SEQ ID NO: 2600548 - RNA, 21 nt, Human
ugauuucccguggccccagcc

SEQ ID NO: 2600549 - RNA, 20 nt, Human
ugauuucccguggccccagc

SEQ ID NO: 2600550 - RNA, 19 nt, Human
ugauuucccguggccccag

SEQ ID NO: 2600551 - RNA, 19 nt, Human
ugauuugaagaacauguga

SEQ ID NO: 2600552 - RNA, 21 nt, Human
ugauuuccccuccaagguaug

SEQ ID NO: 2600553 - RNA, 18 nt, Human
ugauuuccaaagagaaaa

SEQ ID NO: 2600554 - RNA, 18 nt, Human
ugauuucccguggcccca

SEQ ID NO: 2600555 - RNA, 17 nt, Human
ugauuucccguggcccc

SEQ ID NO: 2600556 - RNA, 12 nt, Human
agcccaggccuc

SEQ ID NO: 2600557 - RNA, 13 nt, Human
agcccaggccccu

SEQ ID NO: 2600558 - RNA, 22 nt, Human
ugcaaucguaauguacagaugg

SEQ ID NO: 2600559 - RNA, 22 nt, Human
ugcaauauuuccucaugugauc

SEQ ID NO: 2600560 - RNA, 19 nt, Human
ugcaauccugucuuucuga

SEQ ID NO: 2600561 - RNA, 19 nt, Human
ugcaauauuuccucaugug

SEQ ID NO: 2600562 - RNA, 16 nt, Human
ugcaauauuuccucau

SEQ ID NO: 2600563 - RNA, 21 nt, Human
ugcaauauuaaugccuuuaaa

SEQ ID NO: 2600564 - RNA, 18 nt, Human
ugcaauauuaaugccuuu

SEQ ID NO: 2600565 - RNA, 14 nt, Human
ugcaauauguauua

SEQ ID NO: 2600566 - RNA, 23 nt, Human
ugcaauauaucuaaauugaauaa

SEQ ID NO: 2600567 - RNA, 22 nt, Human
ugcaauauaucuaaauugaaua

SEQ ID NO: 2600568 - RNA, 21 nt, Human
ugcaauauaucuaaauugaau

SEQ ID NO: 2600569 - RNA, 18 nt, Human
ugcaagugugugcaugug

SEQ ID NO: 2600570 - RNA, 23 nt, Human
ugcaagugugugcaugugugcga

SEQ ID NO: 2600571 - RNA, 13 nt, Human
ugcaagugugugc

SEQ ID NO: 2600572 - RNA, 14 nt, Human
ugcaagugugugca

SEQ ID NO: 2600573 - RNA, 21 nt, Human
ugcaagugugugcacaugugu

SEQ ID NO: 2600574 - RNA, 23 nt, Human
ugcaagugugugcacaugugugc

SEQ ID NO: 2600575 - RNA, 15 nt, Human
ugcaaggucauuuuu

SEQ ID NO: 2600576 - RNA, 20 nt, Human
ugcaagggcuccccacugcc

SEQ ID NO: 2600577 - RNA, 18 nt, Human
ugcaaggggaaaaucuca

SEQ ID NO: 2600578 - RNA, 15 nt, Human
ugcaagguggcucca

SEQ ID NO: 2600579 - RNA, 16 nt, Human
ugcaaggucuuugguu

SEQ ID NO: 2600580 - RNA, 23 nt, Human
ugcaagguuuaggcugguggccc

SEQ ID NO: 2600581 - RNA, 15 nt, Human
ugcaaguacugcugu

SEQ ID NO: 2600582 - RNA, 19 nt, Human
ugcaaguacugcuguaaau

SEQ ID NO: 2600583 - RNA, 19 nt, Human
ugcaaguguguaugugcgu

SEQ ID NO: 2600584 - RNA, 22 nt, Human
ugcaaguguguaugugcgugug

SEQ ID NO: 2600585 - RNA, 18 nt, Human
ugcaagugucugugugca

SEQ ID NO: 2600586 - RNA, 11 nt, Human
ugcaagggaaa

SEQ ID NO: 2600587 - RNA, 14 nt, Human
ugcaaggccuuucu

SEQ ID NO: 2600588 - RNA, 16 nt, Human
ugcaagggacugugug

SEQ ID NO: 2600589 - RNA, 21 nt, Human
ugcaagggcagaacacuaacc

SEQ ID NO: 2600590 - RNA, 20 nt, Human
ugcaagggcagaacacuaac

SEQ ID NO: 2600591 - RNA, 21 nt, Human
ugcaagggacuguguguugcc

SEQ ID NO: 2600592 - RNA, 16 nt, Human
ugcaagggcuccccac

SEQ ID NO: 2600593 - RNA, 15 nt, Human
ugcaagggcucccca

SEQ ID NO: 2600594 - RNA, 22 nt, Human
ugcaagggcagaacacuaaccu

SEQ ID NO: 2600595 - RNA, 23 nt, Human
ugcaaggccgcuguucacccaca

SEQ ID NO: 2600596 - RNA, 24 nt, Human
ugcaaggccgcuguucacccacag

SEQ ID NO: 2600597 - RNA, 17 nt, Human
ugcaaggaccaggacuc

SEQ ID NO: 2600598 - RNA, 13 nt, Human
ugcaaggcaaaga

SEQ ID NO: 2600599 - RNA, 21 nt, Human
ugcaagccagauuuuccugaa

SEQ ID NO: 2600600 - RNA, 15 nt, Human
ugcaagccagauuuu

SEQ ID NO: 2600601 - RNA, 18 nt, Human
ugcaagauucugaaacau

SEQ ID NO: 2600602 - RNA, 23 nt, Human
ugcaagagccuugguguccaccu

SEQ ID NO: 2600603 - RNA, 15 nt, Human
ugcaacaggcacuca

SEQ ID NO: 2600604 - RNA, 24 nt, Human
ugcaacagcacuggcucucuccag

SEQ ID NO: 2600605 - RNA, 19 nt, Human
ugcaagagacucuggccuc

SEQ ID NO: 2600606 - RNA, 14 nt, Human
ugcaagagccuugg

SEQ ID NO: 2600607 - RNA, 19 nt, Human
ugcaaggaaggaaagaaag

SEQ ID NO: 2600608 - RNA, 13 nt, Human
ugcaaggaccagg

SEQ ID NO: 2600609 - RNA, 14 nt, Human
ugcaaggaccagga

SEQ ID NO: 2600610 - RNA, 15 nt, Human
ugcaaggaccaggac

SEQ ID NO: 2600611 - RNA, 15 nt, Human
ugcaaggaaggaaag

SEQ ID NO: 2600612 - RNA, 16 nt, Human
ugcaaggaaggaaaga

SEQ ID NO: 2600613 - RNA, 12 nt, Human
ugcaaggaagga

SEQ ID NO: 2600614 - RNA, 20 nt, Human
ugcaaggaagccacagcugg

SEQ ID NO: 2600615 - RNA, 14 nt, Human
ugcaagccugcguu

SEQ ID NO: 2600616 - RNA, 12 nt, Human
ugcaagccugcg

SEQ ID NO: 2600617 - RNA, 19 nt, Human
ugcaaggaagccacagcug

SEQ ID NO: 2600618 - RNA, 17 nt, Human
ugcaagcagggcucugc

SEQ ID NO: 2600619 - RNA, 16 nt, Human
ugcaagcagggcucug

SEQ ID NO: 2600620 - RNA, 20 nt, Human
ugcaagcagggcucugcccc

SEQ ID NO: 2600621 - RNA, 23 nt, Human
ugcaagccccugcuccagaagau

SEQ ID NO: 2600622 - RNA, 17 nt, Human
ugcaaauccuaugugau

SEQ ID NO: 2600623 - RNA, 18 nt, Human
ugcaaauccuaugugauu

SEQ ID NO: 2600624 - RNA, 21 nt, Human
ugcaaauccuaugugauuuua

SEQ ID NO: 2600625 - RNA, 19 nt, Human
ugcaaauccuaugugauuu

SEQ ID NO: 2600626 - RNA, 14 nt, Human
ugcaaaucuugaaa

SEQ ID NO: 2600627 - RNA, 21 nt, Human
ugcaaaugcuaugagaugcau

SEQ ID NO: 2600628 - RNA, 15 nt, Human
ugcaaaugcuguauu

SEQ ID NO: 2600629 - RNA, 14 nt, Human
ugcaaauuaacagu

SEQ ID NO: 2600630 - RNA, 18 nt, Human
ugcaaaugucaucagaac

SEQ ID NO: 2600631 - RNA, 22 nt, Human
ugcaaaugucagauacaaugua

SEQ ID NO: 2600632 - RNA, 18 nt, Human
ugcaaauauuuuuuugua

SEQ ID NO: 2600633 - RNA, 10 nt, Human
ugcaaauccu

SEQ ID NO: 2600634 - RNA, 21 nt, Human
ugcaaauauuuuuuuguagau

SEQ ID NO: 2600635 - RNA, 12 nt, Human
ugcaaauccuau

SEQ ID NO: 2600636 - RNA, 14 nt, Human
ugcaaauccuaugu

SEQ ID NO: 2600637 - RNA, 15 nt, Human
ugcaaauccuaugug

SEQ ID NO: 2600638 - RNA, 13 nt, Human
ugcaacaggcugg

SEQ ID NO: 2600639 - RNA, 17 nt, Human
ugcaacagcacuggcuc

SEQ ID NO: 2600640 - RNA, 14 nt, Human
ugcaacagcacugg

SEQ ID NO: 2600641 - RNA, 13 nt, Human
ugcaacagcacug

SEQ ID NO: 2600642 - RNA, 15 nt, Human
ugcaacacacagaca

SEQ ID NO: 2600643 - RNA, 13 nt, Human
ugcaacaaaauuc

SEQ ID NO: 2600644 - RNA, 12 nt, Human
ugcaacacacag

SEQ ID NO: 2600645 - RNA, 13 nt, Human
ugcaacacacaga

SEQ ID NO: 2600646 - RNA, 14 nt, Human
ugcaacacacagac

SEQ ID NO: 2600647 - RNA, 15 nt, Human
ugcaacaacauguau

SEQ ID NO: 2600648 - RNA, 13 nt, Human
ugcaacaacaugu

SEQ ID NO: 2600649 - RNA, 18 nt, Human
agccccggcccugggcuc

SEQ ID NO: 2600650 - RNA, 16 nt, Human
agccccggcccugggc

SEQ ID NO: 2600651 - RNA, 14 nt, Human
agccccggcccugg

SEQ ID NO: 2600652 - RNA, 22 nt, Human
agccccgcagaccuccccagcc

SEQ ID NO: 2600653 - RNA, 24 nt, Human
agccccggggugaguccauucucc

SEQ ID NO: 2600654 - RNA, 21 nt, Human
agccccggcccugggcucgga

SEQ ID NO: 2600655 - RNA, 18 nt, Human
agccccucccaccacagc

SEQ ID NO: 2600656 - RNA, 18 nt, Human
agccccgugggguuccuc

SEQ ID NO: 2600657 - RNA, 12 nt, Human
agccccuccucu

SEQ ID NO: 2600658 - RNA, 13 nt, Human
agccccuccucug

SEQ ID NO: 2600659 - RNA, 14 nt, Human
agccccuccucugc

SEQ ID NO: 2600660 - RNA, 15 nt, Human
agccccuccucugcc

SEQ ID NO: 2600661 - RNA, 16 nt, Human
agccccuccucugcca

SEQ ID NO: 2600662 - RNA, 17 nt, Human
agccccuccucugccac

SEQ ID NO: 2600663 - RNA, 18 nt, Human
agccccuccucugccacc

SEQ ID NO: 2600664 - RNA, 23 nt, Human
agccccucccaccacagcaggug

SEQ ID NO: 2600665 - RNA, 11 nt, Human
agccccuccuc

SEQ ID NO: 2600666 - RNA, 18 nt, Human
agccccuguauggcacug

SEQ ID NO: 2600667 - RNA, 14 nt, Human
agccccugguccug

SEQ ID NO: 2600668 - RNA, 12 nt, Human
agccccugggug

SEQ ID NO: 2600669 - RNA, 20 nt, Human
agccccugucuagagaggga

SEQ ID NO: 2600670 - RNA, 21 nt, Human
agccccugucuagagagggag

SEQ ID NO: 2600671 - RNA, 15 nt, Human
agccccuguggagac

SEQ ID NO: 2600672 - RNA, 14 nt, Human
agccccuguggaga

SEQ ID NO: 2600673 - RNA, 22 nt, Human
agccccugucuagagagggagg

SEQ ID NO: 2600674 - RNA, 23 nt, Human
agccccugucuagagagggaggc

SEQ ID NO: 2600675 - RNA, 16 nt, Human
agccccucuggucgcu

SEQ ID NO: 2600676 - RNA, 13 nt, Human
agccccucugguc

SEQ ID NO: 2600677 - RNA, 12 nt, Human
agccccucuggu

SEQ ID NO: 2600678 - RNA, 23 nt, Human
agccccuccucugccaccucccc

SEQ ID NO: 2600679 - RNA, 19 nt, Human
agccccuccucugccaccu

SEQ ID NO: 2600680 - RNA, 20 nt, Human
agccccuccucugccaccuc

SEQ ID NO: 2600681 - RNA, 21 nt, Human
agccccuccucugccaccucc

SEQ ID NO: 2600682 - RNA, 22 nt, Human
agccccuccucugccaccuccc

SEQ ID NO: 2600683 - RNA, 21 nt, Human
agcccccuuugggcccaggga

SEQ ID NO: 2600684 - RNA, 20 nt, Human
agcccccuuugggcccaggg

SEQ ID NO: 2600685 - RNA, 19 nt, Human
agcccccuuugggcccagg

SEQ ID NO: 2600686 - RNA, 18 nt, Human
agcccccuuugggcccag

SEQ ID NO: 2600687 - RNA, 16 nt, Human
agcccccuugacaccg

SEQ ID NO: 2600688 - RNA, 14 nt, Human
agccccgaggccuu

SEQ ID NO: 2600689 - RNA, 23 nt, Human
agccccgcagaccuccccagccc

SEQ ID NO: 2600690 - RNA, 16 nt, Human
agccccgccuccaggc

SEQ ID NO: 2600691 - RNA, 19 nt, Human
agccccgcagaccucccca

SEQ ID NO: 2600692 - RNA, 15 nt, Human
agccccgcgccuccu

SEQ ID NO: 2600693 - RNA, 18 nt, Human
agccccgcgccuccuucc

SEQ ID NO: 2600694 - RNA, 19 nt, Human
agcccaggccuccuacagc

SEQ ID NO: 2600695 - RNA, 14 nt, Human
agcccaggccuccu

SEQ ID NO: 2600696 - RNA, 15 nt, Human
agcccccuggccucu

SEQ ID NO: 2600697 - RNA, 22 nt, Human
agcccaggccgggguggagcau

SEQ ID NO: 2600698 - RNA, 16 nt, Human
agcccccuggccucug

SEQ ID NO: 2600699 - RNA, 17 nt, Human
agcccccuggccucugu

SEQ ID NO: 2600700 - RNA, 19 nt, Human
agcccccuggccucugugc

SEQ ID NO: 2600701 - RNA, 15 nt, Human
agcccgggcucugcc

SEQ ID NO: 2600702 - RNA, 14 nt, Human
agcccgggcucugc

SEQ ID NO: 2600703 - RNA, 13 nt, Human
agcccgggcucug

SEQ ID NO: 2600704 - RNA, 19 nt, Human
agccccuucugacccaugc

SEQ ID NO: 2600705 - RNA, 16 nt, Human
agccccuucugaccca

SEQ ID NO: 2600706 - RNA, 15 nt, Human
agccccuucugaccc

SEQ ID NO: 2600707 - RNA, 23 nt, Human
agccccuuccuugcucugcaccc

SEQ ID NO: 2600708 - RNA, 17 nt, Human
agccccuuccuugcucu

SEQ ID NO: 2600709 - RNA, 17 nt, Human
agccccuuccccauggg

SEQ ID NO: 2600710 - RNA, 15 nt, Human
agccccuuccccaug

SEQ ID NO: 2600711 - RNA, 13 nt, Human
agccccuucccca

SEQ ID NO: 2600712 - RNA, 18 nt, Human
agccccuguggagacugg

SEQ ID NO: 2600713 - RNA, 14 nt, Human
agccccuuagcccc

SEQ ID NO: 2600714 - RNA, 14 nt, Human
agccccuucugacc

SEQ ID NO: 2600715 - RNA, 19 nt, Human
agcccugcagagggcacag

SEQ ID NO: 2600716 - RNA, 16 nt, Human
agcccugcagagggca

SEQ ID NO: 2600717 - RNA, 15 nt, Human
agcccugcagagggc

SEQ ID NO: 2600718 - RNA, 14 nt, Human
agcccugcagaggg

SEQ ID NO: 2600719 - RNA, 19 nt, Human
agccccuucucagaaucua

SEQ ID NO: 2600720 - RNA, 18 nt, Human
agccccuucucagaaucu

SEQ ID NO: 2600721 - RNA, 16 nt, Human
agccccuucucagaau

SEQ ID NO: 2600722 - RNA, 15 nt, Human
agccccuucucagaa

SEQ ID NO: 2600723 - RNA, 18 nt, Human
agcccugaguuccuagcc

SEQ ID NO: 2600724 - RNA, 16 nt, Human
agcccgggcucugccu

SEQ ID NO: 2600725 - RNA, 20 nt, Human
agcccugaguuccuagccac

SEQ ID NO: 2600726 - RNA, 23 nt, Human
agcccugaguuccuagccaccgc

SEQ ID NO: 2600727 - RNA, 14 nt, Human
agcccugaguuccu

SEQ ID NO: 2600728 - RNA, 21 nt, Human
ugcagaauacaguaagcugcu

SEQ ID NO: 2600729 - RNA, 23 nt, Human
ugcagaaggaagggcauccuucu

SEQ ID NO: 2600730 - RNA, 22 nt, Human
ugcagaaggaaaaauguguaau

SEQ ID NO: 2600731 - RNA, 21 nt, Human
ugcagaaggaaaaauguguaa

SEQ ID NO: 2600732 - RNA, 20 nt, Human
ugcagaaggaaaaaugugua

SEQ ID NO: 2600733 - RNA, 15 nt, Human
ugcagaaggccaaga

SEQ ID NO: 2600734 - RNA, 13 nt, Human
ugcagaaggccaa

SEQ ID NO: 2600735 - RNA, 22 nt, Human
ugcagaagacaguauggcagcu

SEQ ID NO: 2600736 - RNA, 19 nt, Human
ugcagaaggaaaaaugugu

SEQ ID NO: 2600737 - RNA, 16 nt, Human
ugcagaaggaaaaaug

SEQ ID NO: 2600738 - RNA, 15 nt, Human
ugcagaaggaaaaau

SEQ ID NO: 2600739 - RNA, 20 nt, Human
ugcacuccagccugggcaac

SEQ ID NO: 2600740 - RNA, 18 nt, Human
ugcacuccagccugggcg

SEQ ID NO: 2600741 - RNA, 16 nt, Human
ugcacuccagccuggg

SEQ ID NO: 2600742 - RNA, 12 nt, Human
ugcacuccagcc

SEQ ID NO: 2600743 - RNA, 13 nt, Human
ugcacuccagccu

SEQ ID NO: 2600744 - RNA, 17 nt, Human
ugcacuccagccugggc

SEQ ID NO: 2600745 - RNA, 18 nt, Human
ugcacuccagccugggca

SEQ ID NO: 2600746 - RNA, 14 nt, Human
ugcacccucuaucc

SEQ ID NO: 2600747 - RNA, 17 nt, Human
ugcacuccagccugagc

SEQ ID NO: 2600748 - RNA, 15 nt, Human
ugcacuccagccugg

SEQ ID NO: 2600749 - RNA, 15 nt, Human
ugcaccggcuggccu

SEQ ID NO: 2600750 - RNA, 14 nt, Human
ugcaccggcuggcc

SEQ ID NO: 2600751 - RNA, 14 nt, Human
ugcaccccucccau

SEQ ID NO: 2600752 - RNA, 13 nt, Human
ugcaccccuccca

SEQ ID NO: 2600753 - RNA, 12 nt, Human
ugcaccccuccc

SEQ ID NO: 2600754 - RNA, 19 nt, Human
ugcacccccuccugcugca

SEQ ID NO: 2600755 - RNA, 18 nt, Human
ugcacccccuccugcugc

SEQ ID NO: 2600756 - RNA, 17 nt, Human
ugcacccccuccugcug

SEQ ID NO: 2600757 - RNA, 16 nt, Human
ugcacccccuccugcu

SEQ ID NO: 2600758 - RNA, 15 nt, Human
ugcacccccuccugc

SEQ ID NO: 2600759 - RNA, 15 nt, Human
ugcaccccucccauu

SEQ ID NO: 2600760 - RNA, 15 nt, Human
ugcacccuggggccu

SEQ ID NO: 2600761 - RNA, 15 nt, Human
ugcacuccagccuga

SEQ ID NO: 2600762 - RNA, 14 nt, Human
ugcacuccagccug

SEQ ID NO: 2600763 - RNA, 16 nt, Human
ugcaccggcuggccug

SEQ ID NO: 2600764 - RNA, 22 nt, Human
ugcacccuggggccuggaccug

SEQ ID NO: 2600765 - RNA, 14 nt, Human
ugcacucagcucuu

SEQ ID NO: 2600766 - RNA, 19 nt, Human
ugcaccccaaagcuuuccu

SEQ ID NO: 2600767 - RNA, 18 nt, Human
ugcaccccaaagcuuucc

SEQ ID NO: 2600768 - RNA, 15 nt, Human
ugcaccaucccuuuu

SEQ ID NO: 2600769 - RNA, 23 nt, Human
ugcaccaggguugaccccagagg

SEQ ID NO: 2600770 - RNA, 16 nt, Human
ugcaccaacccagccg

SEQ ID NO: 2600771 - RNA, 23 nt, Human
ugcaccccaaagcuuuccugccc

SEQ ID NO: 2600772 - RNA, 22 nt, Human
ugcaccccaaagcuuuccugcc

SEQ ID NO: 2600773 - RNA, 21 nt, Human
ugcaccccaaagcuuuccugc

SEQ ID NO: 2600774 - RNA, 20 nt, Human
ugcaccccaaagcuuuccug

SEQ ID NO: 2600775 - RNA, 14 nt, Human
ugcaccccaugcug

SEQ ID NO: 2600776 - RNA, 16 nt, Human
ugcaccccaugcuguu

SEQ ID NO: 2600777 - RNA, 14 nt, Human
ugcaccccccuggg

SEQ ID NO: 2600778 - RNA, 14 nt, Human
ugcacccccuccug

SEQ ID NO: 2600779 - RNA, 12 nt, Human
ugcacccccucc

SEQ ID NO: 2600780 - RNA, 15 nt, Human
ugcaccccccugggc

SEQ ID NO: 2600781 - RNA, 16 nt, Human
ugcaccccccugggcu

SEQ ID NO: 2600782 - RNA, 13 nt, Human
ugcaccagcccuu

SEQ ID NO: 2600783 - RNA, 21 nt, Human
ugcaccacugcacuccagccu

SEQ ID NO: 2600784 - RNA, 15 nt, Human
ugcaccaacccagcc

SEQ ID NO: 2600785 - RNA, 15 nt, Human
ugcaccacugcacuc

SEQ ID NO: 2600786 - RNA, 19 nt, Human
ugcacaugugugcgugugc

SEQ ID NO: 2600787 - RNA, 20 nt, Human
agcccugggaggcucuggag

SEQ ID NO: 2600788 - RNA, 18 nt, Human
agcccugggaggcucugg

SEQ ID NO: 2600789 - RNA, 17 nt, Human
agcccugggaggcucug

SEQ ID NO: 2600790 - RNA, 20 nt, Human
agcccugcagugugguagcg

SEQ ID NO: 2600791 - RNA, 18 nt, Human
ugcacauguuuccucuag

SEQ ID NO: 2600792 - RNA, 17 nt, Human
ugcacauguuuccucua

SEQ ID NO: 2600793 - RNA, 16 nt, Human
ugcacauguuuccucu

SEQ ID NO: 2600794 - RNA, 14 nt, Human
ugcacauguuuccu

SEQ ID NO: 2600795 - RNA, 13 nt, Human
ugcacauguuucc

SEQ ID NO: 2600796 - RNA, 23 nt, Human
ugcacaugucuuguacaugugua

SEQ ID NO: 2600797 - RNA, 21 nt, Human
agcccugggccccaccaccua

SEQ ID NO: 2600798 - RNA, 13 nt, Human
ugcacaugugugc

SEQ ID NO: 2600799 - RNA, 22 nt, Human
ugcacaugucuuguacaugugu

SEQ ID NO: 2600800 - RNA, 17 nt, Human
agcccugggccccacca

SEQ ID NO: 2600801 - RNA, 19 nt, Human
agcccugggccccaccacc

SEQ ID NO: 2600802 - RNA, 23 nt, Human
agcccugggccccaccaccuagg

SEQ ID NO: 2600803 - RNA, 16 nt, Human
agcccugggccccacc

SEQ ID NO: 2600804 - RNA, 18 nt, Human
agcccugggaucacugug

SEQ ID NO: 2600805 - RNA, 16 nt, Human
agcccugggaucacug

SEQ ID NO: 2600806 - RNA, 16 nt, Human
aggacgcucucuggcc

SEQ ID NO: 2600807 - RNA, 17 nt, Human
aggacgcucucuggccu

SEQ ID NO: 2600808 - RNA, 19 nt, Human
aggacgcucucuggccuuc

SEQ ID NO: 2600809 - RNA, 20 nt, Human
aggacgcucucuggccuucg

SEQ ID NO: 2600810 - RNA, 14 nt, Human
aggacgccacccag

SEQ ID NO: 2600811 - RNA, 22 nt, Human
aggaccuuuccaccacagccag

SEQ ID NO: 2600812 - RNA, 20 nt, Human
aggacgaacauccaaccuuc

SEQ ID NO: 2600813 - RNA, 20 nt, Human
aggaccuucgggcugugccc

SEQ ID NO: 2600814 - RNA, 21 nt, Human
aggaccuuuccaccacagcca

SEQ ID NO: 2600815 - RNA, 13 nt, Human
aggacgcucucug

SEQ ID NO: 2600816 - RNA, 14 nt, Human
aggacgcucucugg

SEQ ID NO: 2600817 - RNA, 23 nt, Human
aggacaaucaguccccucccauc

SEQ ID NO: 2600818 - RNA, 22 nt, Human
aggacaaucaguccccucccau

SEQ ID NO: 2600819 - RNA, 21 nt, Human
aggacaaucaguccccuccca

SEQ ID NO: 2600820 - RNA, 20 nt, Human
aggacaaucaguccccuccc

SEQ ID NO: 2600821 - RNA, 19 nt, Human
aggacaaucaguccccucc

SEQ ID NO: 2600822 - RNA, 18 nt, Human
aggacaaucaguccccuc

SEQ ID NO: 2600823 - RNA, 17 nt, Human
aggacaaucaguccccu

SEQ ID NO: 2600824 - RNA, 14 nt, Human
aggacaaggcuaga

SEQ ID NO: 2600825 - RNA, 17 nt, Human
aggacaacgaggaagcc

SEQ ID NO: 2600826 - RNA, 18 nt, Human
aggacaacgaggaagccc

SEQ ID NO: 2600827 - RNA, 14 nt, Human
aggacaacgaggaa

SEQ ID NO: 2600828 - RNA, 20 nt, Human
aggaauuccccaaagaaugu

SEQ ID NO: 2600829 - RNA, 23 nt, Human
aggaauucccagcccaaagcugu

SEQ ID NO: 2600830 - RNA, 22 nt, Human
aggaauucuaggcaucccaggg

SEQ ID NO: 2600831 - RNA, 16 nt, Human
aggacaacgaggaagc

SEQ ID NO: 2600832 - RNA, 16 nt, Human
aggacaauuucaaaaa

SEQ ID NO: 2600833 - RNA, 15 nt, Human
aggacaauuucaaaa

SEQ ID NO: 2600834 - RNA, 14 nt, Human
aggacaauuucaaa

SEQ ID NO: 2600835 - RNA, 18 nt, Human
aggacaauucaugaacuu

SEQ ID NO: 2600836 - RNA, 23 nt, Human
aggacacacuaaucgaacuauga

SEQ ID NO: 2600837 - RNA, 13 nt, Human
aggacacacuaau

SEQ ID NO: 2600838 - RNA, 23 nt, Human
aggacacagaugaaacacaaaca

SEQ ID NO: 2600839 - RNA, 13 nt, Human
aggacacagucag

SEQ ID NO: 2600840 - RNA, 18 nt, Human
aggaccuucgggcugugc

SEQ ID NO: 2600841 - RNA, 19 nt, Human
aggaccuucgggcugugcc

SEQ ID NO: 2600842 - RNA, 15 nt, Human
aggaccuuaucugug

SEQ ID NO: 2600843 - RNA, 16 nt, Human
aggaccuuaucugugc

SEQ ID NO: 2600844 - RNA, 21 nt, Human
aggaccuguggccaaguucuu

SEQ ID NO: 2600845 - RNA, 17 nt, Human
aggacuccuuaaauuug

SEQ ID NO: 2600846 - RNA, 20 nt, Human
aggacuccccaggccaggcc

SEQ ID NO: 2600847 - RNA, 23 nt, Human
aggacucccuccucaccucugga

SEQ ID NO: 2600848 - RNA, 18 nt, Human
aggacucccuccucaccu

SEQ ID NO: 2600849 - RNA, 19 nt, Human
aggacucccuccucaccuc

SEQ ID NO: 2600850 - RNA, 12 nt, Human
aggacucucagg

SEQ ID NO: 2600851 - RNA, 13 nt, Human
aggacucugaggc

SEQ ID NO: 2600852 - RNA, 14 nt, Human
aggacucugaggcu

SEQ ID NO: 2600853 - RNA, 17 nt, Human
aggacucugaggcucuu

SEQ ID NO: 2600854 - RNA, 15 nt, Human
aggacucugcccaga

SEQ ID NO: 2600855 - RNA, 18 nt, Human
aggacucugcccagacca

SEQ ID NO: 2600856 - RNA, 13 nt, Human
aggacuccccagg

SEQ ID NO: 2600857 - RNA, 20 nt, Human
aggacucagcuccccagagu

SEQ ID NO: 2600858 - RNA, 19 nt, Human
aggacucagcuccccagag

SEQ ID NO: 2600859 - RNA, 18 nt, Human
aggacucagcuccccaga

SEQ ID NO: 2600860 - RNA, 17 nt, Human
aggacucagcuccccag

SEQ ID NO: 2600861 - RNA, 17 nt, Human
aggacuccacccauccu

SEQ ID NO: 2600862 - RNA, 19 nt, Human
aggacuccccaggccaggc

SEQ ID NO: 2600863 - RNA, 18 nt, Human
aggacuccccaggccagg

SEQ ID NO: 2600864 - RNA, 17 nt, Human
aggacuccccaggccag

SEQ ID NO: 2600865 - RNA, 16 nt, Human
aggacuccccaggcca

SEQ ID NO: 2600866 - RNA, 12 nt, Human
aggacucccucc

SEQ ID NO: 2600867 - RNA, 13 nt, Human
aggacucccuccu

SEQ ID NO: 2600868 - RNA, 14 nt, Human
aggacucccuccuc

SEQ ID NO: 2600869 - RNA, 15 nt, Human
aggacucccuccuca

SEQ ID NO: 2600870 - RNA, 16 nt, Human
aggacucccuccucac

SEQ ID NO: 2600871 - RNA, 17 nt, Human
aggacucccuccucacc

SEQ ID NO: 2600872 - RNA, 14 nt, Human
aggacucagcuccc

SEQ ID NO: 2600873 - RNA, 13 nt, Human
aggacucagcucc

SEQ ID NO: 2600874 - RNA, 18 nt, Human
aggacucagaagccucug

SEQ ID NO: 2600875 - RNA, 20 nt, Human
aggacuauagcccagguccu

SEQ ID NO: 2600876 - RNA, 19 nt, Human
aggacuauagcccaggucc

SEQ ID NO: 2600877 - RNA, 20 nt, Human
aggacuauauuugggccugc

SEQ ID NO: 2600878 - RNA, 18 nt, Human
aggacuauagcccagguc

SEQ ID NO: 2600879 - RNA, 16 nt, Human
aggacuauagcccagg

SEQ ID NO: 2600880 - RNA, 22 nt, Human
aggacuagaaccuggagggcug

SEQ ID NO: 2600881 - RNA, 18 nt, Human
aggacuagaaccuggagg

SEQ ID NO: 2600882 - RNA, 19 nt, Human
aggacuaggguccugggga

SEQ ID NO: 2600883 - RNA, 16 nt, Human
aggacuaggguccugg

SEQ ID NO: 2600884 - RNA, 18 nt, Human
aggacuaggguccugggg

SEQ ID NO: 2600885 - RNA, 17 nt, Human
aggacuagaaccuggag

SEQ ID NO: 2600886 - RNA, 20 nt, Human
aggacuacguuaagggaagg

SEQ ID NO: 2600887 - RNA, 19 nt, Human
aggacuacguuaagggaag

SEQ ID NO: 2600888 - RNA, 15 nt, Human
aggacuaggguccug

SEQ ID NO: 2600889 - RNA, 16 nt, Human
aggacggugcaaccca

SEQ ID NO: 2600890 - RNA, 22 nt, Human
aggacggggccggccagguggg

SEQ ID NO: 2600891 - RNA, 21 nt, Human
aggacggggccggccaggugg

SEQ ID NO: 2600892 - RNA, 20 nt, Human
aggacggggccggccaggug

SEQ ID NO: 2600893 - RNA, 19 nt, Human
aggacggggccggccaggu

SEQ ID NO: 2600894 - RNA, 16 nt, Human
aggacggggccggcca

SEQ ID NO: 2600895 - RNA, 15 nt, Human
aggacggggccggcc

SEQ ID NO: 2600896 - RNA, 13 nt, Human
aggacggccggcu

SEQ ID NO: 2600897 - RNA, 15 nt, Human
aggacgccacccagc

SEQ ID NO: 2600898 - RNA, 15 nt, Human
aggacgcuucugaau

SEQ ID NO: 2600899 - RNA, 14 nt, Human
aggacgcuucugaa

SEQ ID NO: 2600900 - RNA, 13 nt, Human
aggacgcuucuga

SEQ ID NO: 2600901 - RNA, 20 nt, Human
aggacgugggcggcagagag

SEQ ID NO: 2600902 - RNA, 14 nt, Human
aggacgugggcggc

SEQ ID NO: 2600903 - RNA, 19 nt, Human
aggacuuuucuuuguggcu

SEQ ID NO: 2600904 - RNA, 17 nt, Human
aggacuuuucuuugugg

SEQ ID NO: 2600905 - RNA, 18 nt, Human
aggagaaacuggaacucu

SEQ ID NO: 2600906 - RNA, 19 nt, Human
aggagaaacuggaacucuc

SEQ ID NO: 2600907 - RNA, 17 nt, Human
aggagaaacuggaacuc

SEQ ID NO: 2600908 - RNA, 22 nt, Human
aggacuuuucuuuguggcuucc

SEQ ID NO: 2600909 - RNA, 23 nt, Human
aggacugcacagcguccugucca

SEQ ID NO: 2600910 - RNA, 21 nt, Human
aggacugcacagcguccuguc

SEQ ID NO: 2600911 - RNA, 18 nt, Human
aggacucugccuccucuu

SEQ ID NO: 2600912 - RNA, 17 nt, Human
aggacucugccuccucu

SEQ ID NO: 2600913 - RNA, 16 nt, Human
aggacucugccuccuc

SEQ ID NO: 2600914 - RNA, 14 nt, Human
aggacucugccucc

SEQ ID NO: 2600915 - RNA, 13 nt, Human
aggacucugccuc

SEQ ID NO: 2600916 - RNA, 12 nt, Human
aggacucugccu

SEQ ID NO: 2600917 - RNA, 21 nt, Human
aggacuuccuguccagcucca

SEQ ID NO: 2600918 - RNA, 17 nt, Human
aggacuguauuugugac

SEQ ID NO: 2600919 - RNA, 22 nt, Human
aggacuuccuguccagcuccaa

SEQ ID NO: 2600920 - RNA, 16 nt, Human
aggacuguauuuguga

SEQ ID NO: 2600921 - RNA, 15 nt, Human
aggacuguauuugug

SEQ ID NO: 2600922 - RNA, 15 nt, Human
aggacugggccacuu

SEQ ID NO: 2600923 - RNA, 12 nt, Human
aggacugggcca

SEQ ID NO: 2600924 - RNA, 11 nt, Human
aggacugggcc

SEQ ID NO: 2600925 - RNA, 22 nt, Human
aggacugccgaccgaggcugga

SEQ ID NO: 2600926 - RNA, 18 nt, Human
aggacugccccgugcaga

SEQ ID NO: 2600927 - RNA, 21 nt, Human
aggacugccccgugcagacug

SEQ ID NO: 2600928 - RNA, 13 nt, Human
aggacugccgacc

SEQ ID NO: 2600929 - RNA, 17 nt, Human
aggacugccgaccgagg

SEQ ID NO: 2600930 - RNA, 21 nt, Human
aggacugccgaccgaggcugg

SEQ ID NO: 2600931 - RNA, 14 nt, Human
aggagccccagcua

SEQ ID NO: 2600932 - RNA, 15 nt, Human
aggagccccauuccu

SEQ ID NO: 2600933 - RNA, 16 nt, Human
aggagccccauuccug

SEQ ID NO: 2600934 - RNA, 18 nt, Human
aggagccccauuccuggg

SEQ ID NO: 2600935 - RNA, 19 nt, Human
aggagccccauuccuggga

SEQ ID NO: 2600936 - RNA, 21 nt, Human
aggagccccauuccugggaaa

SEQ ID NO: 2600937 - RNA, 22 nt, Human
aggagcaaauguuucugcagua

SEQ ID NO: 2600938 - RNA, 21 nt, Human
aggagcccuuaucugugcuca

SEQ ID NO: 2600939 - RNA, 23 nt, Human
aggagcccugggaggcucuggag

SEQ ID NO: 2600940 - RNA, 17 nt, Human
aggagccccgaggccuu

SEQ ID NO: 2600941 - RNA, 16 nt, Human
aggagccuccugcccu

SEQ ID NO: 2600942 - RNA, 17 nt, Human
aggagaguagaacagau

SEQ ID NO: 2600943 - RNA, 17 nt, Human
aggagagucccagagca

SEQ ID NO: 2600944 - RNA, 20 nt, Human
aggagagucccagagcagga

SEQ ID NO: 2600945 - RNA, 16 nt, Human
aggagaaaugcaucca

SEQ ID NO: 2600946 - RNA, 16 nt, Human
aggacuugaaagcauc

SEQ ID NO: 2600947 - RNA, 19 nt, Human
aggacuugaaagcauccau

SEQ ID NO: 2600948 - RNA, 21 nt, Human
aggacuugaaagcauccaugu

SEQ ID NO: 2600949 - RNA, 12 nt, Human
aggagaaaugca

SEQ ID NO: 2600950 - RNA, 20 nt, Human
aggagauaucugagggagga

SEQ ID NO: 2600951 - RNA, 16 nt, Human
aggagaugcuccuugg

SEQ ID NO: 2600952 - RNA, 23 nt, Human
aggagauaucugagggaggaggc

SEQ ID NO: 2600953 - RNA, 19 nt, Human
aggagauaucugagggagg

SEQ ID NO: 2600954 - RNA, 18 nt, Human
aggagauaucugagggag

SEQ ID NO: 2600955 - RNA, 14 nt, Human
aggagauaucugag

SEQ ID NO: 2600956 - RNA, 21 nt, Human
aggagauaaaucuaguauaca

SEQ ID NO: 2600957 - RNA, 24 nt, Human
aggagagucccagagcaggaggcc

SEQ ID NO: 2600958 - RNA, 21 nt, Human
aggagagucccagagcaggag

SEQ ID NO: 2600959 - RNA, 12 nt, Human
aggagauaaauc

SEQ ID NO: 2600960 - RNA, 13 nt, Human
aggagcagccaca

SEQ ID NO: 2600961 - RNA, 12 nt, Human
aggagcagccac

SEQ ID NO: 2600962 - RNA, 17 nt, Human
aggagaugcuccuuggg

SEQ ID NO: 2600963 - RNA, 18 nt, Human
aggagaugcuccuugggc

SEQ ID NO: 2600964 - RNA, 22 nt, Human
aggagaugcuccuugggcccuu

SEQ ID NO: 2600965 - RNA, 20 nt, Human
aggagauggaaguugcagug

SEQ ID NO: 2600966 - RNA, 22 nt, Human
aggagcaaaggcugagaacacu

SEQ ID NO: 2600967 - RNA, 19 nt, Human
aggagcaaauguuucugca

SEQ ID NO: 2600968 - RNA, 18 nt, Human
aggagcaaauguuucugc

SEQ ID NO: 2600969 - RNA, 17 nt, Human
aggagcaaauguuucug

SEQ ID NO: 2600970 - RNA, 22 nt, Human
aggagcacaggcagcuggauga

SEQ ID NO: 2600971 - RNA, 15 nt, Human
aggagcacaggcagc

SEQ ID NO: 2600972 - RNA, 19 nt, Human
uggaagcauauuguuauua

SEQ ID NO: 2600973 - RNA, 22 nt, Human
uggaagcauguaggagaaucca

SEQ ID NO: 2600974 - RNA, 12 nt, Human
uggaagcccucc

SEQ ID NO: 2600975 - RNA, 13 nt, Human
uggaagcccuccu

SEQ ID NO: 2600976 - RNA, 15 nt, Human
uggaagcccuccuuc

SEQ ID NO: 2600977 - RNA, 16 nt, Human
uggaagcccuccuucc

SEQ ID NO: 2600978 - RNA, 17 nt, Human
uggaagcccuccuucca

SEQ ID NO: 2600979 - RNA, 16 nt, Human
uggaagccagcuuucc

SEQ ID NO: 2600980 - RNA, 18 nt, Human
uggaagccagcuuucccu

SEQ ID NO: 2600981 - RNA, 15 nt, Human
uggaagccagcuuuc

SEQ ID NO: 2600982 - RNA, 17 nt, Human
uggaagcauguaggaga

SEQ ID NO: 2600983 - RNA, 19 nt, Human
uggaagcauguaggagaau

SEQ ID NO: 2600984 - RNA, 22 nt, Human
aggaggacaauucaugaacuuc

SEQ ID NO: 2600985 - RNA, 14 nt, Human
aggaggacaauuca

SEQ ID NO: 2600986 - RNA, 13 nt, Human
aggaggacaauuc

SEQ ID NO: 2600987 - RNA, 23 nt, Human
aggaggaaucaugucaggccugu

SEQ ID NO: 2600988 - RNA, 22 nt, Human
aggaggaaucaugucaggccug

SEQ ID NO: 2600989 - RNA, 17 nt, Human
aggaggaaggcaagagg

SEQ ID NO: 2600990 - RNA, 17 nt, Human
uggaagccggagggugu

SEQ ID NO: 2600991 - RNA, 14 nt, Human
aggaggaaggcaag

SEQ ID NO: 2600992 - RNA, 19 nt, Human
uggaagcccuccuuccacg

SEQ ID NO: 2600993 - RNA, 13 nt, Human
aggaggcuccaga

SEQ ID NO: 2600994 - RNA, 16 nt, Human
aggaggcuccagaggg

SEQ ID NO: 2600995 - RNA, 23 nt, Human
aggaggcgcacuuuccuccuggc

SEQ ID NO: 2600996 - RNA, 15 nt, Human
aggaggagcaggggc

SEQ ID NO: 2600997 - RNA, 17 nt, Human
aggaggcuccagagggc

SEQ ID NO: 2600998 - RNA, 18 nt, Human
aggaggcuccagagggca

SEQ ID NO: 2600999 - RNA, 19 nt, Human
aggaggcuccagagggcac

SEQ ID NO: 2601000 - RNA, 16 nt, Human
aggaggcugaggcaga

SEQ ID NO: 2601001 - RNA, 17 nt, Human
aggaggcugaggcagaa

SEQ ID NO: 2601002 - RNA, 17 nt, Human
aggaggcugaggcagga

SEQ ID NO: 2601003 - RNA, 19 nt, Human
aggaggcugaggcaggagg

SEQ ID NO: 2601004 - RNA, 13 nt, Human
aggaggcugaggg

SEQ ID NO: 2601005 - RNA, 20 nt, Human
aggauagaugcuggcccagg

SEQ ID NO: 2601006 - RNA, 21 nt, Human
aggauagaugcuggcccaggg

SEQ ID NO: 2601007 - RNA, 14 nt, Human
aggauagcauuuuu

SEQ ID NO: 2601008 - RNA, 22 nt, Human
aggauagaugcuggcccagggc

SEQ ID NO: 2601009 - RNA, 21 nt, Human
aggauaggaguucacuucauc

SEQ ID NO: 2601010 - RNA, 16 nt, Human
aggauaggaguucacu

SEQ ID NO: 2601011 - RNA, 18 nt, Human
aggauauauuuucacuuu

SEQ ID NO: 2601012 - RNA, 14 nt, Human
aggauauauuuuca

SEQ ID NO: 2601013 - RNA, 18 nt, Human
aggauagaugcuggccca

SEQ ID NO: 2601014 - RNA, 19 nt, Human
aggauagaugcuggcccag

SEQ ID NO: 2601015 - RNA, 15 nt, Human
aggauagaugcuggc

SEQ ID NO: 2601016 - RNA, 14 nt, Human
aggauagaugcugg

SEQ ID NO: 2601017 - RNA, 13 nt, Human
aggaggcuggcag

SEQ ID NO: 2601018 - RNA, 14 nt, Human
aggaggcuggcugg

SEQ ID NO: 2601019 - RNA, 13 nt, Human
aggaggcuggcug

SEQ ID NO: 2601020 - RNA, 16 nt, Human
aggaggcuggcaggua

SEQ ID NO: 2601021 - RNA, 23 nt, Human
aggaugaucuaggaagacuuugg

SEQ ID NO: 2601022 - RNA, 22 nt, Human
aggaugaucuaggaagacuuug

SEQ ID NO: 2601023 - RNA, 22 nt, Human
aggaugcacagaguuguuacau

SEQ ID NO: 2601024 - RNA, 23 nt, Human
aggaugagagcccagagguaaca

SEQ ID NO: 2601025 - RNA, 19 nt, Human
aggaugagcucuacccagg

SEQ ID NO: 2601026 - RNA, 16 nt, Human
aggauucuuccucccu

SEQ ID NO: 2601027 - RNA, 17 nt, Human
aggauucuuccucccuc

SEQ ID NO: 2601028 - RNA, 19 nt, Human
aggauucuuccucccuccc

SEQ ID NO: 2601029 - RNA, 17 nt, Human
aggauugauuaugcaga

SEQ ID NO: 2601030 - RNA, 22 nt, Human
aggauugaagagcauugcaugg

SEQ ID NO: 2601031 - RNA, 14 nt, Human
aggauugaagagca

SEQ ID NO: 2601032 - RNA, 13 nt, Human
aggauugaagagc

SEQ ID NO: 2601033 - RNA, 18 nt, Human
aggaugcagagucagcag

SEQ ID NO: 2601034 - RNA, 16 nt, Human
aggaugauuuuggccu

SEQ ID NO: 2601035 - RNA, 18 nt, Human
aggaucaugguguaauaa

SEQ ID NO: 2601036 - RNA, 17 nt, Human
aggaucaugguguaaua

SEQ ID NO: 2601037 - RNA, 20 nt, Human
aggaucauuuguuggaauga

SEQ ID NO: 2601038 - RNA, 15 nt, Human
aggaucaugguguaa

SEQ ID NO: 2601039 - RNA, 15 nt, Human
aggauaucuucucca

SEQ ID NO: 2601040 - RNA, 21 nt, Human
aggauauauuuucacuuugug

SEQ ID NO: 2601041 - RNA, 13 nt, Human
aggaucagucuga

SEQ ID NO: 2601042 - RNA, 20 nt, Human
aggaugagagcccagaggua

SEQ ID NO: 2601043 - RNA, 19 nt, Human
aggaugagagcccagaggu

SEQ ID NO: 2601044 - RNA, 18 nt, Human
aggaugagagcccagagg

SEQ ID NO: 2601045 - RNA, 17 nt, Human
aggaugagagcccagag

SEQ ID NO: 2601046 - RNA, 16 nt, Human
aggaugagagcccaga

SEQ ID NO: 2601047 - RNA, 15 nt, Human
aggaugagagcccag

SEQ ID NO: 2601048 - RNA, 14 nt, Human
aggaugagagccca

SEQ ID NO: 2601049 - RNA, 13 nt, Human
aggaugagagccc

SEQ ID NO: 2601050 - RNA, 20 nt, Human
aggaugaauguaugugcacu

SEQ ID NO: 2601051 - RNA, 18 nt, Human
aggaugaauguaugugca

SEQ ID NO: 2601052 - RNA, 12 nt, Human
aggaugaaugua

SEQ ID NO: 2601053 - RNA, 22 nt, Human
aggaucaugguguaauaagaca

SEQ ID NO: 2601054 - RNA, 23 nt, Human
aggaugacgguauuaugcuucuu

SEQ ID NO: 2601055 - RNA, 20 nt, Human
aggaugacgguauuaugcuu

SEQ ID NO: 2601056 - RNA, 20 nt, Human
aggaugaccuggauaacuua

SEQ ID NO: 2601057 - RNA, 19 nt, Human
aggaugaaugaggucccag

SEQ ID NO: 2601058 - RNA, 20 nt, Human
aggaugaaugaggucccagg

SEQ ID NO: 2601059 - RNA, 21 nt, Human
aggaugaaugaggucccaggc

SEQ ID NO: 2601060 - RNA, 22 nt, Human
aggaugaaugaggucccaggca

SEQ ID NO: 2601061 - RNA, 21 nt, Human
aggaucauuuguuggaaugaa

SEQ ID NO: 2601062 - RNA, 13 nt, Human
aggaucuuuugaa

SEQ ID NO: 2601063 - RNA, 18 nt, Human
aggaucuuuugaacccag

SEQ ID NO: 2601064 - RNA, 17 nt, Human
uggaagaccccacccaa

SEQ ID NO: 2601065 - RNA, 15 nt, Human
uggaagagggcugca

SEQ ID NO: 2601066 - RNA, 15 nt, Human
uggaagagccugcag

SEQ ID NO: 2601067 - RNA, 23 nt, Human
uggaagagccugcaggugcugcu

SEQ ID NO: 2601068 - RNA, 16 nt, Human
uggaagacagcucuua

SEQ ID NO: 2601069 - RNA, 15 nt, Human
uggaagacagcucuu

SEQ ID NO: 2601070 - RNA, 15 nt, Human
uggaagaccccaccc

SEQ ID NO: 2601071 - RNA, 13 nt, Human
uggaagaccccac

SEQ ID NO: 2601072 - RNA, 21 nt, Human
uggaaauuuguuauaaugaau

SEQ ID NO: 2601073 - RNA, 23 nt, Human
uggaaauuuguuauaaugaauga

SEQ ID NO: 2601074 - RNA, 13 nt, Human
ugcuuuuucugac

SEQ ID NO: 2601075 - RNA, 14 nt, Human
ugcuuuuucuaaug

SEQ ID NO: 2601076 - RNA, 13 nt, Human
ugcuuuuucuaau

SEQ ID NO: 2601077 - RNA, 12 nt, Human
ugcuuuuucuga

SEQ ID NO: 2601078 - RNA, 15 nt, Human
ugcuuuuucaccaga

SEQ ID NO: 2601079 - RNA, 18 nt, Human
ugcuuuuuauuucugcau

SEQ ID NO: 2601080 - RNA, 19 nt, Human
ugcuuuuuauuucugcaua

SEQ ID NO: 2601081 - RNA, 16 nt, Human
ugcuuuuuauggccug

SEQ ID NO: 2601082 - RNA, 15 nt, Human
ugcuuuuuauuucug

SEQ ID NO: 2601083 - RNA, 17 nt, Human
ugcuuuuuaaguguuaa

SEQ ID NO: 2601084 - RNA, 21 nt, Human
uggaaaguguaaagcauucca

SEQ ID NO: 2601085 - RNA, 18 nt, Human
uggaaaguguaaagcauu

SEQ ID NO: 2601086 - RNA, 17 nt, Human
uggaaaguguaaagcau

SEQ ID NO: 2601087 - RNA, 13 nt, Human
uggaaauaaaugu

SEQ ID NO: 2601088 - RNA, 15 nt, Human
uggaaauaaauguau

SEQ ID NO: 2601089 - RNA, 23 nt, Human
uggaaauaaauguaucauagaaa

SEQ ID NO: 2601090 - RNA, 21 nt, Human
ugcuuuuugagguggcacuuu

SEQ ID NO: 2601091 - RNA, 20 nt, Human
ugcuuuuugagguggcacuu

SEQ ID NO: 2601092 - RNA, 17 nt, Human
ugcuuuuugagguggca

SEQ ID NO: 2601093 - RNA, 14 nt, Human
uggaaagugaauuu

SEQ ID NO: 2601094 - RNA, 15 nt, Human
uggaaagugaauuug

SEQ ID NO: 2601095 - RNA, 16 nt, Human
uggaaagugaauuuga

SEQ ID NO: 2601096 - RNA, 16 nt, Human
uggaaaguguaaagca

SEQ ID NO: 2601097 - RNA, 15 nt, Human
uggaaaguguaaagc

SEQ ID NO: 2601098 - RNA, 14 nt, Human
uggaaaguguaaag

SEQ ID NO: 2601099 - RNA, 13 nt, Human
uggaaaguguaaa

SEQ ID NO: 2601100 - RNA, 17 nt, Human
uggaaagugaauuugaa

SEQ ID NO: 2601101 - RNA, 20 nt, Human
uggaaagugaauuugaauga

SEQ ID NO: 2601102 - RNA, 21 nt, Human
uggaaagugaauuugaaugaa

SEQ ID NO: 2601103 - RNA, 23 nt, Human
uggaaagugaauuugaaugaaaa

SEQ ID NO: 2601104 - RNA, 22 nt, Human
ugcuuuggaccuaaauggccuc

SEQ ID NO: 2601105 - RNA, 21 nt, Human
ugcuuuggaccuaaauggccu

SEQ ID NO: 2601106 - RNA, 23 nt, Human
ugcuuuggaccuaaauggccuca

SEQ ID NO: 2601107 - RNA, 15 nt, Human
ugcuuugggaagccg

SEQ ID NO: 2601108 - RNA, 15 nt, Human
ugcuuugggcugccc

SEQ ID NO: 2601109 - RNA, 14 nt, Human
ugcuuugggcugcc

SEQ ID NO: 2601110 - RNA, 16 nt, Human
ugcuugaggaaaacaa

SEQ ID NO: 2601111 - RNA, 13 nt, Human
ugcuuuggaaauc

SEQ ID NO: 2601112 - RNA, 18 nt, Human
ugcuuuggaccuaaaugg

SEQ ID NO: 2601113 - RNA, 13 nt, Human
ugcuugaggaaaa

SEQ ID NO: 2601114 - RNA, 12 nt, Human
ugcuugaggaaa

SEQ ID NO: 2601115 - RNA, 16 nt, Human
ugcuugagcccaggag

SEQ ID NO: 2601116 - RNA, 13 nt, Human
ugcuugagcccag

SEQ ID NO: 2601117 - RNA, 14 nt, Human
ugcuugagcccagg

SEQ ID NO: 2601118 - RNA, 15 nt, Human
ugcuugagcucagga

SEQ ID NO: 2601119 - RNA, 15 nt, Human
ugcuugacaacaucu

SEQ ID NO: 2601120 - RNA, 16 nt, Human
ugcuugacaacaucug

SEQ ID NO: 2601121 - RNA, 20 nt, Human
ugcuugacauaauuucacug

SEQ ID NO: 2601122 - RNA, 17 nt, Human
aggagccuccugcccuu

SEQ ID NO: 2601123 - RNA, 23 nt, Human
aggagcccuuaucugugcucagg

SEQ ID NO: 2601124 - RNA, 17 nt, Human
ugcuuuuaaaaaaaaau

SEQ ID NO: 2601125 - RNA, 18 nt, Human
ugcuuuuggucuguguga

SEQ ID NO: 2601126 - RNA, 20 nt, Human
ugcuuuugucuaugggacuc

SEQ ID NO: 2601127 - RNA, 23 nt, Human
ugcuuuuuaauauugauaugcuu

SEQ ID NO: 2601128 - RNA, 22 nt, Human
ugcuuugugauuuuuguaauuu

SEQ ID NO: 2601129 - RNA, 16 nt, Human
ugcuuugggcugcccu

SEQ ID NO: 2601130 - RNA, 17 nt, Human
ugcuuugugugauugaa

SEQ ID NO: 2601131 - RNA, 17 nt, Human
ugcuuugugauuuuugu

SEQ ID NO: 2601132 - RNA, 16 nt, Human
ugcuuugugugauuga

SEQ ID NO: 2601133 - RNA, 17 nt, Human
ugcuuuggcuuacuugu

SEQ ID NO: 2601134 - RNA, 14 nt, Human
uggaguugaaaauc

SEQ ID NO: 2601135 - RNA, 20 nt, Human
uggaguuacauuaauguuaa

SEQ ID NO: 2601136 - RNA, 18 nt, Human
uggaguuacauuaauguu

SEQ ID NO: 2601137 - RNA, 20 nt, Human
uggaguuccugaaccugaug

SEQ ID NO: 2601138 - RNA, 17 nt, Human
uggaguuacauuaaugu

SEQ ID NO: 2601139 - RNA, 20 nt, Human
uggaguuaacgggugaauaa

SEQ ID NO: 2601140 - RNA, 19 nt, Human
uggaguguguauuguuccc

SEQ ID NO: 2601141 - RNA, 19 nt, Human
uggaguguuccccuuccac

SEQ ID NO: 2601142 - RNA, 22 nt, Human
uggaguguuccccuuccacuga

SEQ ID NO: 2601143 - RNA, 17 nt, Human
uggaguggggcaguaga

SEQ ID NO: 2601144 - RNA, 15 nt, Human
uggaguguguauugu

SEQ ID NO: 2601145 - RNA, 20 nt, Human
uggaguguguauuguuccca

SEQ ID NO: 2601146 - RNA, 19 nt, Human
uggaguguaugacugcaca

SEQ ID NO: 2601147 - RNA, 17 nt, Human
uggaguguaugacugca

SEQ ID NO: 2601148 - RNA, 17 nt, Human
uggaguguggcugagga

SEQ ID NO: 2601149 - RNA, 16 nt, Human
uggaguggggcaguag

SEQ ID NO: 2601150 - RNA, 13 nt, Human
uggaguggggcag

SEQ ID NO: 2601151 - RNA, 14 nt, Human
uggaguguaugacu

SEQ ID NO: 2601152 - RNA, 13 nt, Human
uggaguggccacu

SEQ ID NO: 2601153 - RNA, 19 nt, Human
uggagugcagggaggagag

SEQ ID NO: 2601154 - RNA, 17 nt, Human
uggagugcagggaggag

SEQ ID NO: 2601155 - RNA, 15 nt, Human
uggagugcagggagg

SEQ ID NO: 2601156 - RNA, 20 nt, Human
uggaggugccagcaaagccc

SEQ ID NO: 2601157 - RNA, 19 nt, Human
uggaggugccagcaaagcc

SEQ ID NO: 2601158 - RNA, 17 nt, Human
uggaggugccagcaaag

SEQ ID NO: 2601159 - RNA, 22 nt, Human
uggaggucacauucaggaagau

SEQ ID NO: 2601160 - RNA, 17 nt, Human
uggaggugggagcagga

SEQ ID NO: 2601161 - RNA, 13 nt, Human
uggaggugggagc

SEQ ID NO: 2601162 - RNA, 12 nt, Human
uggaggugggag

SEQ ID NO: 2601163 - RNA, 20 nt, Human
uggaggucacauucaggaag

SEQ ID NO: 2601164 - RNA, 18 nt, Human
uggaggucacauucagga

SEQ ID NO: 2601165 - RNA, 20 nt, Human
uggaggucgguagguucagc

SEQ ID NO: 2601166 - RNA, 20 nt, Human
uggagguacgaaaagagggg

SEQ ID NO: 2601167 - RNA, 16 nt, Human
aggcauuugcugaaua

SEQ ID NO: 2601168 - RNA, 20 nt, Human
aggcauuugcugaauacaga

SEQ ID NO: 2601169 - RNA, 22 nt, Human
uggaggugucaggcugcuggcg

SEQ ID NO: 2601170 - RNA, 21 nt, Human
uggaggugucaggcugcuggc

SEQ ID NO: 2601171 - RNA, 20 nt, Human
uggaggugucaggcugcugg

SEQ ID NO: 2601172 - RNA, 18 nt, Human
uggaggugucaggcugcu

SEQ ID NO: 2601173 - RNA, 17 nt, Human
uggagguuaaggcugag

SEQ ID NO: 2601174 - RNA, 19 nt, Human
uggagguuaaggcugagga

SEQ ID NO: 2601175 - RNA, 19 nt, Human
uggagguggggccuggagc

SEQ ID NO: 2601176 - RNA, 20 nt, Human
uggaggugggagcaggagau

SEQ ID NO: 2601177 - RNA, 18 nt, Human
uggaggugggagcaggag

SEQ ID NO: 2601178 - RNA, 16 nt, Human
uggaggugucaggcug

SEQ ID NO: 2601179 - RNA, 17 nt, Human
uggaggugggguuggga

SEQ ID NO: 2601180 - RNA, 15 nt, Human
uggaggugggguugg

SEQ ID NO: 2601181 - RNA, 14 nt, Human
uggagguggggccu

SEQ ID NO: 2601182 - RNA, 14 nt, Human
uggagugcagugag

SEQ ID NO: 2601183 - RNA, 17 nt, Human
uggagugcaaugacaca

SEQ ID NO: 2601184 - RNA, 21 nt, Human
uggauugcacguggccucuug

SEQ ID NO: 2601185 - RNA, 17 nt, Human
uggauugcacguggccu

SEQ ID NO: 2601186 - RNA, 23 nt, Human
uggcacaucagcacgauuucugu

SEQ ID NO: 2601187 - RNA, 18 nt, Human
uggcacauuuaagagaca

SEQ ID NO: 2601188 - RNA, 23 nt, Human
uggcacauccuaugcaauauauc

SEQ ID NO: 2601189 - RNA, 19 nt, Human
uggcacauccuaugcaaua

SEQ ID NO: 2601190 - RNA, 18 nt, Human
uggcacauccuaugcaau

SEQ ID NO: 2601191 - RNA, 15 nt, Human
uggcacauccuaugc

SEQ ID NO: 2601192 - RNA, 21 nt, Human
uggcacauuuccccagaccug

SEQ ID NO: 2601193 - RNA, 18 nt, Human
uggcaccacugcacucca

SEQ ID NO: 2601194 - RNA, 19 nt, Human
uggcaccacugcacuccag

SEQ ID NO: 2601195 - RNA, 21 nt, Human
uggcaccacugcacuccagcc

SEQ ID NO: 2601196 - RNA, 17 nt, Human
uggauuccaaccccaac

SEQ ID NO: 2601197 - RNA, 12 nt, Human
uggauucucaga

SEQ ID NO: 2601198 - RNA, 13 nt, Human
uggauucucagau

SEQ ID NO: 2601199 - RNA, 14 nt, Human
uggauucucagaua

SEQ ID NO: 2601200 - RNA, 15 nt, Human
uggauucucagauau

SEQ ID NO: 2601201 - RNA, 16 nt, Human
uggauucucagauauu

SEQ ID NO: 2601202 - RNA, 16 nt, Human
uggauucugagagcug

SEQ ID NO: 2601203 - RNA, 17 nt, Human
uggauucugagagcugu

SEQ ID NO: 2601204 - RNA, 13 nt, Human
uggauugagggua

SEQ ID NO: 2601205 - RNA, 17 nt, Human
uggauucuuauguagca

SEQ ID NO: 2601206 - RNA, 19 nt, Human
uggauucucagauauuuau

SEQ ID NO: 2601207 - RNA, 15 nt, Human
uggaguucuugugcc

SEQ ID NO: 2601208 - RNA, 14 nt, Human
uggaguucuugugc

SEQ ID NO: 2601209 - RNA, 16 nt, Human
uggaguucuugugcca

SEQ ID NO: 2601210 - RNA, 15 nt, Human
uggaguugaucugga

SEQ ID NO: 2601211 - RNA, 17 nt, Human
uggaguugaucuggaac

SEQ ID NO: 2601212 - RNA, 19 nt, Human
uggaguugaucuggaaccc

SEQ ID NO: 2601213 - RNA, 23 nt, Human
uggaugccugguggcagcugcgg

SEQ ID NO: 2601214 - RNA, 21 nt, Human
uggaugccugguggcagcugc

SEQ ID NO: 2601215 - RNA, 23 nt, Human
uggauuauuuaauaacauuaccu

SEQ ID NO: 2601216 - RNA, 20 nt, Human
uggauuauuuaauaacauua

SEQ ID NO: 2601217 - RNA, 18 nt, Human
uggauuauuuaauaacau

SEQ ID NO: 2601218 - RNA, 17 nt, Human
uggauuauuuaauaaca

SEQ ID NO: 2601219 - RNA, 22 nt, Human
uggaguugaucuggaacccaga

SEQ ID NO: 2601220 - RNA, 23 nt, Human
uggaugcggaacccaaauuacgu

SEQ ID NO: 2601221 - RNA, 20 nt, Human
uggauucauuuccugcccuu

SEQ ID NO: 2601222 - RNA, 19 nt, Human
uggauucauuuccugcccu

SEQ ID NO: 2601223 - RNA, 18 nt, Human
uggauucauuuccugccc

SEQ ID NO: 2601224 - RNA, 17 nt, Human
uggauucauuuccugcc

SEQ ID NO: 2601225 - RNA, 15 nt, Human
uggauucauuuccug

SEQ ID NO: 2601226 - RNA, 13 nt, Human
uggauucauuucc

SEQ ID NO: 2601227 - RNA, 18 nt, Human
uggauucauuacagcuua

SEQ ID NO: 2601228 - RNA, 22 nt, Human
uggcagcucaccucucccuugg

SEQ ID NO: 2601229 - RNA, 21 nt, Human
uggcagcucaccucucccuug

SEQ ID NO: 2601230 - RNA, 23 nt, Human
uggcagcucaccucucccuugga

SEQ ID NO: 2601231 - RNA, 15 nt, Human
aggccaccuccccag

SEQ ID NO: 2601232 - RNA, 14 nt, Human
aggccaccucccca

SEQ ID NO: 2601233 - RNA, 13 nt, Human
uggcagcucagag

SEQ ID NO: 2601234 - RNA, 20 nt, Human
uggcacccggccccugcugg

SEQ ID NO: 2601235 - RNA, 19 nt, Human
uggcacccggccccugcug

SEQ ID NO: 2601236 - RNA, 14 nt, Human
uggcaccagacacc

SEQ ID NO: 2601237 - RNA, 16 nt, Human
uggcaccagacaccca

SEQ ID NO: 2601238 - RNA, 18 nt, Human
uggcacccggccccugcu

SEQ ID NO: 2601239 - RNA, 18 nt, Human
aggccaccucuccaaggg

SEQ ID NO: 2601240 - RNA, 17 nt, Human
aggccaccucuccaagg

SEQ ID NO: 2601241 - RNA, 16 nt, Human
aggccaccucuccaag

SEQ ID NO: 2601242 - RNA, 15 nt, Human
aggccaccucuccaa

SEQ ID NO: 2601243 - RNA, 14 nt, Human
aggccaccucucca

SEQ ID NO: 2601244 - RNA, 13 nt, Human
aggccaccucucc

SEQ ID NO: 2601245 - RNA, 12 nt, Human
aggccaccucuc

SEQ ID NO: 2601246 - RNA, 11 nt, Human
aggccaccucu

SEQ ID NO: 2601247 - RNA, 17 nt, Human
aggccaccuccccagca

SEQ ID NO: 2601248 - RNA, 16 nt, Human
aggccaccuccagaaa

SEQ ID NO: 2601249 - RNA, 23 nt, Human
aggccaccucuccaagggcuucu

SEQ ID NO: 2601250 - RNA, 19 nt, Human
aggccaccucuccaagggc

SEQ ID NO: 2601251 - RNA, 13 nt, Human
aggccaccugccc

SEQ ID NO: 2601252 - RNA, 13 nt, Human
aggccagccuggc

SEQ ID NO: 2601253 - RNA, 18 nt, Human
aggccaccugcccccuuc

SEQ ID NO: 2601254 - RNA, 14 nt, Human
aggccaccugcccc

SEQ ID NO: 2601255 - RNA, 15 nt, Human
aggccaccugccccc

SEQ ID NO: 2601256 - RNA, 16 nt, Human
aggccaccugcccccu

SEQ ID NO: 2601257 - RNA, 17 nt, Human
aggccaccugcccccuu

SEQ ID NO: 2601258 - RNA, 13 nt, Human
aggccagccuuga

SEQ ID NO: 2601259 - RNA, 15 nt, Human
aggccagccuugacc

SEQ ID NO: 2601260 - RNA, 13 nt, Human
aggccagcugccu

SEQ ID NO: 2601261 - RNA, 22 nt, Human
aggcccccagcccagggcuccu

SEQ ID NO: 2601262 - RNA, 19 nt, Human
aggcccccagcccagggcu

SEQ ID NO: 2601263 - RNA, 18 nt, Human
aggcccccagcccagggc

SEQ ID NO: 2601264 - RNA, 17 nt, Human
aggcccccagcccaggg

SEQ ID NO: 2601265 - RNA, 14 nt, Human
aggcccccagccca

SEQ ID NO: 2601266 - RNA, 20 nt, Human
aggcccccacuugccucuuc

SEQ ID NO: 2601267 - RNA, 18 nt, Human
aggcccccacuugccucu

SEQ ID NO: 2601268 - RNA, 17 nt, Human
aggcccccacuugccuc

SEQ ID NO: 2601269 - RNA, 14 nt, Human
aggccccaggaagc

SEQ ID NO: 2601270 - RNA, 15 nt, Human
aggccccaggaagcc

SEQ ID NO: 2601271 - RNA, 16 nt, Human
aggccccaggaagccg

SEQ ID NO: 2601272 - RNA, 13 nt, Human
aggcccccacuug

SEQ ID NO: 2601273 - RNA, 13 nt, Human
aggcccccaagcc

SEQ ID NO: 2601274 - RNA, 19 nt, Human
aggccagcugccccagcca

SEQ ID NO: 2601275 - RNA, 12 nt, Human
aggcccaagaga

SEQ ID NO: 2601276 - RNA, 20 nt, Human
aggcccaagagaugaagagu

SEQ ID NO: 2601277 - RNA, 13 nt, Human
aggcccagagggc

SEQ ID NO: 2601278 - RNA, 13 nt, Human
aggcccggccucu

SEQ ID NO: 2601279 - RNA, 14 nt, Human
aggcccggccucuc

SEQ ID NO: 2601280 - RNA, 23 nt, Human
aggccccgaggacccagacccag

SEQ ID NO: 2601281 - RNA, 21 nt, Human
aggccccgaggacccagaccc

SEQ ID NO: 2601282 - RNA, 19 nt, Human
aggcccgcaugcggcccag

SEQ ID NO: 2601283 - RNA, 17 nt, Human
aggcccggcuccaggcu

SEQ ID NO: 2601284 - RNA, 15 nt, Human
aggcccggccucuca

SEQ ID NO: 2601285 - RNA, 13 nt, Human
aggcccggcucca

SEQ ID NO: 2601286 - RNA, 23 nt, Human
aggcccccagcccagggcuccug

SEQ ID NO: 2601287 - RNA, 15 nt, Human
aggcccccaggugcc

SEQ ID NO: 2601288 - RNA, 14 nt, Human
aggccccgcccagg

SEQ ID NO: 2601289 - RNA, 20 nt, Human
aggccccgaggacccagacc

SEQ ID NO: 2601290 - RNA, 19 nt, Human
aggccccgaggacccagac

SEQ ID NO: 2601291 - RNA, 18 nt, Human
aggccccgaggacccaga

SEQ ID NO: 2601292 - RNA, 17 nt, Human
aggccccgaggacccag

SEQ ID NO: 2601293 - RNA, 21 nt, Human
uggagcucguggaacaguuac

SEQ ID NO: 2601294 - RNA, 17 nt, Human
uggagcucguggaacag

SEQ ID NO: 2601295 - RNA, 21 nt, Human
uggagcucgugggacagucac

SEQ ID NO: 2601296 - RNA, 17 nt, Human
aggcaagcaccuccugc

SEQ ID NO: 2601297 - RNA, 17 nt, Human
uggagccaauggagacu

SEQ ID NO: 2601298 - RNA, 15 nt, Human
uggagccaaguccag

SEQ ID NO: 2601299 - RNA, 17 nt, Human
uggagccaacugcugcu

SEQ ID NO: 2601300 - RNA, 17 nt, Human
uggagccaaggguucag

SEQ ID NO: 2601301 - RNA, 13 nt, Human
uggagccagcucc

SEQ ID NO: 2601302 - RNA, 16 nt, Human
uggagccacuaacuag

SEQ ID NO: 2601303 - RNA, 16 nt, Human
uggagccaaguccaga

SEQ ID NO: 2601304 - RNA, 18 nt, Human
uggagcaugggccuggcc

SEQ ID NO: 2601305 - RNA, 17 nt, Human
uggagcaugggccuggc

SEQ ID NO: 2601306 - RNA, 16 nt, Human
uggagcaucugacuca

SEQ ID NO: 2601307 - RNA, 15 nt, Human
uggagcaucugacuc

SEQ ID NO: 2601308 - RNA, 16 nt, Human
uggagccaacugcugc

SEQ ID NO: 2601309 - RNA, 17 nt, Human
uggagcauuggcugaga

SEQ ID NO: 2601310 - RNA, 18 nt, Human
uggagcaggacucuauuu

SEQ ID NO: 2601311 - RNA, 17 nt, Human
uggagcagaggggcuga

SEQ ID NO: 2601312 - RNA, 11 nt, Human
uggagcaucug

SEQ ID NO: 2601313 - RNA, 20 nt, Human
aggcaaggcaggugccucca

SEQ ID NO: 2601314 - RNA, 22 nt, Human
aggcaaggcaggugccuccagg

SEQ ID NO: 2601315 - RNA, 19 nt, Human
aggcaaggcaggugccucc

SEQ ID NO: 2601316 - RNA, 15 nt, Human
aggcaaggcaggugc

SEQ ID NO: 2601317 - RNA, 14 nt, Human
aggcaaggcaggug

SEQ ID NO: 2601318 - RNA, 13 nt, Human
aggcaaggcaggu

SEQ ID NO: 2601319 - RNA, 16 nt, Human
aggcaaggcugucaau

SEQ ID NO: 2601320 - RNA, 21 nt, Human
aggcacacacugugcuuucua

SEQ ID NO: 2601321 - RNA, 20 nt, Human
aggcacacacugugcuuucu

SEQ ID NO: 2601322 - RNA, 19 nt, Human
aggcacacacugugcuuuc

SEQ ID NO: 2601323 - RNA, 16 nt, Human
aggcacacacugugcu

SEQ ID NO: 2601324 - RNA, 14 nt, Human
aggcacacacugug

SEQ ID NO: 2601325 - RNA, 17 nt, Human
aggcaaggcugucaauu

SEQ ID NO: 2601326 - RNA, 19 nt, Human
aggcaagcaccuccugccu

SEQ ID NO: 2601327 - RNA, 18 nt, Human
aggcaagcaccuccugcc

SEQ ID NO: 2601328 - RNA, 12 nt, Human
aggcaagcccug

SEQ ID NO: 2601329 - RNA, 20 nt, Human
aggcaagcaccuccugccuc

SEQ ID NO: 2601330 - RNA, 17 nt, Human
aggauugcuacuguccu

SEQ ID NO: 2601331 - RNA, 15 nt, Human
aggauugcuacuguc

SEQ ID NO: 2601332 - RNA, 16 nt, Human
uggacuguucccugag

SEQ ID NO: 2601333 - RNA, 18 nt, Human
aggauugcuacuguccua

SEQ ID NO: 2601334 - RNA, 14 nt, Human
uggagaaaauggac

SEQ ID NO: 2601335 - RNA, 23 nt, Human
uggacuucacauaagcucagaau

SEQ ID NO: 2601336 - RNA, 18 nt, Human
uggacuucacauaagcuc

SEQ ID NO: 2601337 - RNA, 21 nt, Human
uggacuuagaaagcaggggcu

SEQ ID NO: 2601338 - RNA, 20 nt, Human
uggacuuagaaagcaggggc

SEQ ID NO: 2601339 - RNA, 20 nt, Human
uggacuguuuucucucggcu

SEQ ID NO: 2601340 - RNA, 17 nt, Human
uggacuguuuucucucg

SEQ ID NO: 2601341 - RNA, 17 nt, Human
uggacuguucccugagg

SEQ ID NO: 2601342 - RNA, 22 nt, Human
uggacuguuuucucucggcucc

SEQ ID NO: 2601343 - RNA, 18 nt, Human
uggacuuagaaagcaggg

SEQ ID NO: 2601344 - RNA, 16 nt, Human
uggacuuagaaagcag

SEQ ID NO: 2601345 - RNA, 15 nt, Human
uggacuuagaaagca

SEQ ID NO: 2601346 - RNA, 20 nt, Human
uggagcagagcaagucugca

SEQ ID NO: 2601347 - RNA, 12 nt, Human
uggagcagagca

SEQ ID NO: 2601348 - RNA, 17 nt, Human
uggagcagaccaccccg

SEQ ID NO: 2601349 - RNA, 13 nt, Human
uggagcagaccac

SEQ ID NO: 2601350 - RNA, 15 nt, Human
uggagcagaaucagu

SEQ ID NO: 2601351 - RNA, 22 nt, Human
uggagcagagcaagucugcagg

SEQ ID NO: 2601352 - RNA, 21 nt, Human
uggagcagagcaagucugcag

SEQ ID NO: 2601353 - RNA, 12 nt, Human
uggagcagaggg

SEQ ID NO: 2601354 - RNA, 13 nt, Human
uggagcagagggg

SEQ ID NO: 2601355 - RNA, 16 nt, Human
uggagcagaggggcug

SEQ ID NO: 2601356 - RNA, 14 nt, Human
uggagcagaaucag

SEQ ID NO: 2601357 - RNA, 17 nt, Human
uggagcaccaggcacga

SEQ ID NO: 2601358 - RNA, 21 nt, Human
uggagcaaagugagggccgag

SEQ ID NO: 2601359 - RNA, 19 nt, Human
uggagaaauuauuuaauaa

SEQ ID NO: 2601360 - RNA, 17 nt, Human
uggagaaauuauuuaau

SEQ ID NO: 2601361 - RNA, 15 nt, Human
uggagaaauuauuua

SEQ ID NO: 2601362 - RNA, 11 nt, Human
uggagaaauua

SEQ ID NO: 2601363 - RNA, 23 nt, Human
uggagaaauaaaaauaccucuuu

SEQ ID NO: 2601364 - RNA, 21 nt, Human
uggagaaauaaaaauaccucu

SEQ ID NO: 2601365 - RNA, 15 nt, Human
uggagaaaggaguga

SEQ ID NO: 2601366 - RNA, 22 nt, Human
uggacuucacauaagcucagaa

SEQ ID NO: 2601367 - RNA, 20 nt, Human
uggacuucuuuuacucauga

SEQ ID NO: 2601368 - RNA, 14 nt, Human
uggagaaacccugu

SEQ ID NO: 2601369 - RNA, 16 nt, Human
uggagaaacccugucu

SEQ ID NO: 2601370 - RNA, 18 nt, Human
uggagaaagcacugaccu

SEQ ID NO: 2601371 - RNA, 17 nt, Human
uggagaaagcacugacc

SEQ ID NO: 2601372 - RNA, 19 nt, Human
uggagaaagcacugaccug

SEQ ID NO: 2601373 - RNA, 17 nt, Human
uggagaaacccuugaaa

SEQ ID NO: 2601374 - RNA, 17 nt, Human
uggagaaacuguagucu

SEQ ID NO: 2601375 - RNA, 14 nt, Human
uggagaaagcacug

SEQ ID NO: 2601376 - RNA, 22 nt, Human
uggagaaacuguagucucagga

SEQ ID NO: 2601377 - RNA, 22 nt, Human
aggcagggcucucuuuccuucu

SEQ ID NO: 2601378 - RNA, 20 nt, Human
aggcagggguggggguggag

SEQ ID NO: 2601379 - RNA, 19 nt, Human
aggcaggggugggggugga

SEQ ID NO: 2601380 - RNA, 16 nt, Human
aggcaggggugggggu

SEQ ID NO: 2601381 - RNA, 15 nt, Human
aggcagggguggggg

SEQ ID NO: 2601382 - RNA, 23 nt, Human
aggcagggggaaggugggguccu

SEQ ID NO: 2601383 - RNA, 13 nt, Human
aggcaggggcgga

SEQ ID NO: 2601384 - RNA, 21 nt, Human
aggcaggccaaggccuucucc

SEQ ID NO: 2601385 - RNA, 22 nt, Human
aggcaggccaaggccuucuccu

SEQ ID NO: 2601386 - RNA, 22 nt, Human
aggcaggcauagaggcuucucc

SEQ ID NO: 2601387 - RNA, 22 nt, Human
aggcaggcuaaggcguggagcu

SEQ ID NO: 2601388 - RNA, 18 nt, Human
aggcaggcuaaggcgugg

SEQ ID NO: 2601389 - RNA, 23 nt, Human
aggcaggcuaaggcguggagcug

SEQ ID NO: 2601390 - RNA, 14 nt, Human
aggcaggcuuuguu

SEQ ID NO: 2601391 - RNA, 21 nt, Human
aggcagggccuugcccagaga

SEQ ID NO: 2601392 - RNA, 23 nt, Human
aggcagggccuugcccagagaug

SEQ ID NO: 2601393 - RNA, 22 nt, Human
aggcagggaaaggcucugaaag

SEQ ID NO: 2601394 - RNA, 22 nt, Human
aggcagggccuugcccagagau

SEQ ID NO: 2601395 - RNA, 18 nt, Human
aggcagcuggaugagacu

SEQ ID NO: 2601396 - RNA, 17 nt, Human
aggcagcugccugcucu

SEQ ID NO: 2601397 - RNA, 22 nt, Human
aggcagcuggaugagacuucca

SEQ ID NO: 2601398 - RNA, 12 nt, Human
aggcacagcaca

SEQ ID NO: 2601399 - RNA, 12 nt, Human
aggcacacuucu

SEQ ID NO: 2601400 - RNA, 15 nt, Human
aggcacacuucuucu

SEQ ID NO: 2601401 - RNA, 16 nt, Human
aggcacacuucuucuu

SEQ ID NO: 2601402 - RNA, 20 nt, Human
aggcacacuucuucuugguc

SEQ ID NO: 2601403 - RNA, 23 nt, Human
aggcacacagcugcagagacaga

SEQ ID NO: 2601404 - RNA, 18 nt, Human
aggcacacagcugcagag

SEQ ID NO: 2601405 - RNA, 23 nt, Human
aggcacacacugugcuuucuauu

SEQ ID NO: 2601406 - RNA, 14 nt, Human
aggcacacagcugc

SEQ ID NO: 2601407 - RNA, 19 nt, Human
aggcaggacaugcugaagc

SEQ ID NO: 2601408 - RNA, 14 nt, Human
aggcaggacaugcu

SEQ ID NO: 2601409 - RNA, 20 nt, Human
aggcaggaagggcaggaagg

SEQ ID NO: 2601410 - RNA, 16 nt, Human
aggcaggaagggcagg

SEQ ID NO: 2601411 - RNA, 17 nt, Human
aggcaggaagggcagga

SEQ ID NO: 2601412 - RNA, 15 nt, Human
aggcagcuugaaacu

SEQ ID NO: 2601413 - RNA, 23 nt, Human
aggcagcuuuaaccauuaaaacu

SEQ ID NO: 2601414 - RNA, 22 nt, Human
aggcagcuuuaaccauuaaaac

SEQ ID NO: 2601415 - RNA, 20 nt, Human
aggcagcuuuuucucuccca

SEQ ID NO: 2601416 - RNA, 15 nt, Human
aggcauagaggcuuc

SEQ ID NO: 2601417 - RNA, 22 nt, Human
aggcauaaagucagggguuccc

SEQ ID NO: 2601418 - RNA, 16 nt, Human
aggcauugccaagggc

SEQ ID NO: 2601419 - RNA, 18 nt, Human
aggcauugccaagggcuu

SEQ ID NO: 2601420 - RNA, 20 nt, Human
aggcauugccaagggcuuug

SEQ ID NO: 2601421 - RNA, 21 nt, Human
aggcauugccaagggcuuugu

SEQ ID NO: 2601422 - RNA, 13 nt, Human
aggcauugccaag

SEQ ID NO: 2601423 - RNA, 14 nt, Human
aggcauugccaagg

SEQ ID NO: 2601424 - RNA, 22 nt, Human
aggcauagaggcuucuccgcca

SEQ ID NO: 2601425 - RNA, 13 nt, Human
aggcauaggccug

SEQ ID NO: 2601426 - RNA, 14 nt, Human
aggcauaggccugg

SEQ ID NO: 2601427 - RNA, 15 nt, Human
aggcauaggccuggg

SEQ ID NO: 2601428 - RNA, 20 nt, Human
aggcauuuaggccaugggac

SEQ ID NO: 2601429 - RNA, 18 nt, Human
aggcauugugggaagggg

SEQ ID NO: 2601430 - RNA, 20 nt, Human
aggcauuucuaucacauauu

SEQ ID NO: 2601431 - RNA, 12 nt, Human
aggcauuuccua

SEQ ID NO: 2601432 - RNA, 14 nt, Human
aggcauuguuugag

SEQ ID NO: 2601433 - RNA, 15 nt, Human
aggcauaaagucagg

SEQ ID NO: 2601434 - RNA, 13 nt, Human
aggcaggugccug

SEQ ID NO: 2601435 - RNA, 21 nt, Human
aggcaggugccuccaggugug

SEQ ID NO: 2601436 - RNA, 15 nt, Human
aggcaggugccugga

SEQ ID NO: 2601437 - RNA, 20 nt, Human
aggcaggugccuccaggugu

SEQ ID NO: 2601438 - RNA, 18 nt, Human
aggcaggugccuccaggu

SEQ ID NO: 2601439 - RNA, 17 nt, Human
aggcaggugccuccagg

SEQ ID NO: 2601440 - RNA, 15 nt, Human
aggcaggugccucca

SEQ ID NO: 2601441 - RNA, 14 nt, Human
aggcaggugccucc

SEQ ID NO: 2601442 - RNA, 17 nt, Human
aggcaggugggauggau

SEQ ID NO: 2601443 - RNA, 12 nt, Human
aggcagggucuc

SEQ ID NO: 2601444 - RNA, 23 nt, Human
aggcagggguggggguggaggcu

SEQ ID NO: 2601445 - RNA, 22 nt, Human
aggcagggguggggguggaggc

SEQ ID NO: 2601446 - RNA, 14 nt, Human
aggcagggucagga

SEQ ID NO: 2601447 - RNA, 17 nt, Human
aggcagggucaggagag

SEQ ID NO: 2601448 - RNA, 19 nt, Human
aggcagggucaggagaggg

SEQ ID NO: 2601449 - RNA, 22 nt, Human
aggcaggucuugaacuccuggc

SEQ ID NO: 2601450 - RNA, 20 nt, Human
aggcagggucaggagagggg

SEQ ID NO: 2601451 - RNA, 23 nt, Human
aggcagggucaggagaggggcag

SEQ ID NO: 2601452 - RNA, 21 nt, Human
aggcagggucccauuucucac

SEQ ID NO: 2601453 - RNA, 16 nt, Human
agcuguuuacuaggga

SEQ ID NO: 2601454 - RNA, 22 nt, Human
agcuguuuacuagggaucccuc

SEQ ID NO: 2601455 - RNA, 12 nt, Human
agcuguuuaaga

SEQ ID NO: 2601456 - RNA, 20 nt, Human
agcuguuguacauuuaugau

SEQ ID NO: 2601457 - RNA, 18 nt, Human
agcuguuguacauuuaug

SEQ ID NO: 2601458 - RNA, 15 nt, Human
ugcuacccucccugc

SEQ ID NO: 2601459 - RNA, 14 nt, Human
ugcuacccucccug

SEQ ID NO: 2601460 - RNA, 23 nt, Human
agcuguuguacauuuaugauuua

SEQ ID NO: 2601461 - RNA, 22 nt, Human
agcuguuguacauuuaugauuu

SEQ ID NO: 2601462 - RNA, 23 nt, Human
ugcuacccaugacuuuauaugga

SEQ ID NO: 2601463 - RNA, 13 nt, Human
agcuuaacagugu

SEQ ID NO: 2601464 - RNA, 20 nt, Human
agcuuaaaggggcuagagug

SEQ ID NO: 2601465 - RNA, 19 nt, Human
agcuguuuauuuuauauua

SEQ ID NO: 2601466 - RNA, 16 nt, Human
agcuguuuaagauggg

SEQ ID NO: 2601467 - RNA, 19 nt, Human
agcuguuuauggccucagc

SEQ ID NO: 2601468 - RNA, 20 nt, Human
agcuguuuauggccucagcu

SEQ ID NO: 2601469 - RNA, 21 nt, Human
agcuguuuauggccucagcug

SEQ ID NO: 2601470 - RNA, 17 nt, Human
agcuguuuauggccuca

SEQ ID NO: 2601471 - RNA, 18 nt, Human
agcuguuuauggccucag

SEQ ID NO: 2601472 - RNA, 13 nt, Human
agcuguuuaugca

SEQ ID NO: 2601473 - RNA, 20 nt, Human
ugcuaauuuugaaaaacugc

SEQ ID NO: 2601474 - RNA, 19 nt, Human
ugcuaauuuugaaaaacug

SEQ ID NO: 2601475 - RNA, 18 nt, Human
ugcuaauuuugaaaaacu

SEQ ID NO: 2601476 - RNA, 16 nt, Human
ugcuaauuuugaaaaa

SEQ ID NO: 2601477 - RNA, 14 nt, Human
ugcuacaaaaacac

SEQ ID NO: 2601478 - RNA, 15 nt, Human
ugcuacaaaaacaca

SEQ ID NO: 2601479 - RNA, 11 nt, Human
ugcuacacacu

SEQ ID NO: 2601480 - RNA, 13 nt, Human
ugcuaccaaagca

SEQ ID NO: 2601481 - RNA, 14 nt, Human
ugcuacacaguaua

SEQ ID NO: 2601482 - RNA, 15 nt, Human
ugccuuuugcacccc

SEQ ID NO: 2601483 - RNA, 14 nt, Human
ugccuuuugcaccc

SEQ ID NO: 2601484 - RNA, 15 nt, Human
ugccuuuucuagccc

SEQ ID NO: 2601485 - RNA, 19 nt, Human
ugccuuuucccaacuccag

SEQ ID NO: 2601486 - RNA, 17 nt, Human
ugccuuuucccaacucc

SEQ ID NO: 2601487 - RNA, 21 nt, Human
ugccuuggggaauuuccucua

SEQ ID NO: 2601488 - RNA, 20 nt, Human
ugccuuggggaauuuccucu

SEQ ID NO: 2601489 - RNA, 16 nt, Human
ugccuuggugugcugu

SEQ ID NO: 2601490 - RNA, 22 nt, Human
ugccuuuugcaccccucccauu

SEQ ID NO: 2601491 - RNA, 20 nt, Human
ugccuuuugcaccccuccca

SEQ ID NO: 2601492 - RNA, 19 nt, Human
ugccuuuugcaccccuccc

SEQ ID NO: 2601493 - RNA, 18 nt, Human
ugccuuuugcaccccucc

SEQ ID NO: 2601494 - RNA, 17 nt, Human
ugccuuuugcaccccuc

SEQ ID NO: 2601495 - RNA, 21 nt, Human
ugccuuuugcaccccucccau

SEQ ID NO: 2601496 - RNA, 15 nt, Human
ugcgguagccagcac

SEQ ID NO: 2601497 - RNA, 16 nt, Human
ugcgguagccagcaca

SEQ ID NO: 2601498 - RNA, 17 nt, Human
ugcgguagccagcacac

SEQ ID NO: 2601499 - RNA, 15 nt, Human
ugcgguccacccagg

SEQ ID NO: 2601500 - RNA, 14 nt, Human
ugcgguccacccag

SEQ ID NO: 2601501 - RNA, 16 nt, Human
ugcuaagugugaacug

SEQ ID NO: 2601502 - RNA, 15 nt, Human
ugcuaagugugaacu

SEQ ID NO: 2601503 - RNA, 14 nt, Human
ugcuaagugugaac

SEQ ID NO: 2601504 - RNA, 13 nt, Human
ugcuaagugugaa

SEQ ID NO: 2601505 - RNA, 17 nt, Human
ugcgguauccgccccca

SEQ ID NO: 2601506 - RNA, 17 nt, Human
ugcggguuugaggauag

SEQ ID NO: 2601507 - RNA, 18 nt, Human
ugcgguagccagcacaca

SEQ ID NO: 2601508 - RNA, 18 nt, Human
ugcuaaguauuucccagc

SEQ ID NO: 2601509 - RNA, 17 nt, Human
ugcuaaguauuucccag

SEQ ID NO: 2601510 - RNA, 14 nt, Human
ugcuaaucaguguc

SEQ ID NO: 2601511 - RNA, 13 nt, Human
ugcuaaucagugu

SEQ ID NO: 2601512 - RNA, 23 nt, Human
ugcuaaucagggaggucauuuug

SEQ ID NO: 2601513 - RNA, 22 nt, Human
ugcuaaucagggaggucauuuu

SEQ ID NO: 2601514 - RNA, 19 nt, Human
ugcuaagugugaacuggac

SEQ ID NO: 2601515 - RNA, 17 nt, Human
ugcuaagugugaacugg

SEQ ID NO: 2601516 - RNA, 21 nt, Human
ugcuaauauaaguuucuuugc

SEQ ID NO: 2601517 - RNA, 12 nt, Human
ugcuaauaaaac

SEQ ID NO: 2601518 - RNA, 18 nt, Human
ugcuaauuuauccugaaa

SEQ ID NO: 2601519 - RNA, 20 nt, Human
ugcuaaucuucuuaugcaau

SEQ ID NO: 2601520 - RNA, 22 nt, Human
ugcuaaucuucuuaugcaauuu

SEQ ID NO: 2601521 - RNA, 13 nt, Human
ugcuaaucuucuu

SEQ ID NO: 2601522 - RNA, 17 nt, Human
ugcuaaucuucagggca

SEQ ID NO: 2601523 - RNA, 19 nt, Human
ugcuaaucagugucucaca

SEQ ID NO: 2601524 - RNA, 12 nt, Human
agcuuguguauc

SEQ ID NO: 2601525 - RNA, 20 nt, Human
agcuuguguauccauuauca

SEQ ID NO: 2601526 - RNA, 17 nt, Human
agcuuguucccugucuu

SEQ ID NO: 2601527 - RNA, 16 nt, Human
agcuuguuauuuauaa

SEQ ID NO: 2601528 - RNA, 18 nt, Human
agcuuguggagccccaca

SEQ ID NO: 2601529 - RNA, 17 nt, Human
agcuuguggagccccac

SEQ ID NO: 2601530 - RNA, 14 nt, Human
agcuuguggagccc

SEQ ID NO: 2601531 - RNA, 19 nt, Human
agcuugugcacaauucugu

SEQ ID NO: 2601532 - RNA, 23 nt, Human
agcuuguccaacccgaggcccgc

SEQ ID NO: 2601533 - RNA, 22 nt, Human
agcuuguauuuugugaagacug

SEQ ID NO: 2601534 - RNA, 22 nt, Human
agcuugucuaugguacaaaaau

SEQ ID NO: 2601535 - RNA, 19 nt, Human
agcuugcucuucaguggga

SEQ ID NO: 2601536 - RNA, 22 nt, Human
agcuugcucuucagugggagaa

SEQ ID NO: 2601537 - RNA, 16 nt, Human
agcuugcugcccuagg

SEQ ID NO: 2601538 - RNA, 21 nt, Human
agcuuguauaguguaaaauaa

SEQ ID NO: 2601539 - RNA, 18 nt, Human
agcuuguauaguguaaaa

SEQ ID NO: 2601540 - RNA, 12 nt, Human
agcuuguauuuu

SEQ ID NO: 2601541 - RNA, 20 nt, Human
agcuuguauaguguaaaaua

SEQ ID NO: 2601542 - RNA, 22 nt, Human
agcuuguccaacccgaggcccg

SEQ ID NO: 2601543 - RNA, 16 nt, Human
agcuugcccuguuaaa

SEQ ID NO: 2601544 - RNA, 18 nt, Human
agcuugcccuguuaaaag

SEQ ID NO: 2601545 - RNA, 19 nt, Human
agcuugcccuguuaaaaga

SEQ ID NO: 2601546 - RNA, 22 nt, Human
agcuugcgcauucucauggaga

SEQ ID NO: 2601547 - RNA, 21 nt, Human
agcuugcgcauucucauggag

SEQ ID NO: 2601548 - RNA, 23 nt, Human
agcuugcgcauucucauggagaa

SEQ ID NO: 2601549 - RNA, 23 nt, Human
agcuugcguuagaaugaggagga

SEQ ID NO: 2601550 - RNA, 17 nt, Human
agcuugcucacaucuug

SEQ ID NO: 2601551 - RNA, 15 nt, Human
agcuugcucacaucu

SEQ ID NO: 2601552 - RNA, 14 nt, Human
agcuugcucuucag

SEQ ID NO: 2601553 - RNA, 23 nt, Human
agcuugaccgugaggccagagac

SEQ ID NO: 2601554 - RNA, 16 nt, Human
agcuugaccugaggcu

SEQ ID NO: 2601555 - RNA, 14 nt, Human
agcuugaccugagg

SEQ ID NO: 2601556 - RNA, 22 nt, Human
agcuugaggguugggcuggugu

SEQ ID NO: 2601557 - RNA, 20 nt, Human
agcuugcccuggugccucac

SEQ ID NO: 2601558 - RNA, 18 nt, Human
agcuugccccggccccgg

SEQ ID NO: 2601559 - RNA, 14 nt, Human
agcuugccccggcc

SEQ ID NO: 2601560 - RNA, 18 nt, Human
agcuugauaaagggccaa

SEQ ID NO: 2601561 - RNA, 22 nt, Human
agcuugaccgugaggccagaga

SEQ ID NO: 2601562 - RNA, 20 nt, Human
agcuugaccgugaggccaga

SEQ ID NO: 2601563 - RNA, 17 nt, Human
agcuuacaagccagcug

SEQ ID NO: 2601564 - RNA, 15 nt, Human
agcuuacaagccagc

SEQ ID NO: 2601565 - RNA, 15 nt, Human
agcuuucaauuccgu

SEQ ID NO: 2601566 - RNA, 20 nt, Human
agcuuuccauguugcugcca

SEQ ID NO: 2601567 - RNA, 19 nt, Human
agcuuuccauguugcugcc

SEQ ID NO: 2601568 - RNA, 21 nt, Human
agcuuucccaaauaaacucua

SEQ ID NO: 2601569 - RNA, 17 nt, Human
agcuuuccauguugcug

SEQ ID NO: 2601570 - RNA, 16 nt, Human
agcuuuccauguugcu

SEQ ID NO: 2601571 - RNA, 22 nt, Human
agcuuucauguaaacugugcac

SEQ ID NO: 2601572 - RNA, 15 nt, Human
agcuuuccugcccca

SEQ ID NO: 2601573 - RNA, 14 nt, Human
agcuuuccugcccc

SEQ ID NO: 2601574 - RNA, 13 nt, Human
agcuuuccugccc

SEQ ID NO: 2601575 - RNA, 12 nt, Human
agcuuuccugcc

SEQ ID NO: 2601576 - RNA, 12 nt, Human
agcuuucccugc

SEQ ID NO: 2601577 - RNA, 16 nt, Human
agcuuucccugccucu

SEQ ID NO: 2601578 - RNA, 22 nt, Human
agcuuuccccaugucucgacuc

SEQ ID NO: 2601579 - RNA, 22 nt, Human
agcuuugcccaacaccagcccc

SEQ ID NO: 2601580 - RNA, 15 nt, Human
agcuuugcccaacac

SEQ ID NO: 2601581 - RNA, 20 nt, Human
agcuuugccagcugcugcug

SEQ ID NO: 2601582 - RNA, 19 nt, Human
agcuuugccagcugcugcu

SEQ ID NO: 2601583 - RNA, 17 nt, Human
agcuuugccagcugcug

SEQ ID NO: 2601584 - RNA, 16 nt, Human
agcuuugccagcugcu

SEQ ID NO: 2601585 - RNA, 22 nt, Human
agcuuugcauguuccacuaacc

SEQ ID NO: 2601586 - RNA, 18 nt, Human
agcuuugcauguuccacu

SEQ ID NO: 2601587 - RNA, 10 nt, Human
agcuuugcua

SEQ ID NO: 2601588 - RNA, 16 nt, Human
agcuuugcuaccaaag

SEQ ID NO: 2601589 - RNA, 21 nt, Human
agcuuugcuaccaaagcaccu

SEQ ID NO: 2601590 - RNA, 10 nt, Human
agcuuugcuc

SEQ ID NO: 2601591 - RNA, 22 nt, Human
agcuuuccugccccaggccuga

SEQ ID NO: 2601592 - RNA, 21 nt, Human
agcuuuccugccccaggccug

SEQ ID NO: 2601593 - RNA, 20 nt, Human
agcuuuccugccccaggccu

SEQ ID NO: 2601594 - RNA, 22 nt, Human
agcuuugagguggaagagggcu

SEQ ID NO: 2601595 - RNA, 15 nt, Human
agcuuugauuuuuac

SEQ ID NO: 2601596 - RNA, 20 nt, Human
agcuuuggcuaugagggccu

SEQ ID NO: 2601597 - RNA, 19 nt, Human
agcuuuggaccuaauccaa

SEQ ID NO: 2601598 - RNA, 18 nt, Human
agcuuuggaccuaaucca

SEQ ID NO: 2601599 - RNA, 16 nt, Human
agcuuuggaaacagga

SEQ ID NO: 2601600 - RNA, 18 nt, Human
agcuuugcucuuugguag

SEQ ID NO: 2601601 - RNA, 21 nt, Human
agcuuugcucuuugguagaaa

SEQ ID NO: 2601602 - RNA, 13 nt, Human
agcuuugcugcua

SEQ ID NO: 2601603 - RNA, 12 nt, Human
agcuuugcugcu

SEQ ID NO: 2601604 - RNA, 23 nt, Human
agcuuugcucuuugguagaaaag

SEQ ID NO: 2601605 - RNA, 13 nt, Human
agcuuugcugcug

SEQ ID NO: 2601606 - RNA, 22 nt, Human
agcuuugcugcugaaggcucau

SEQ ID NO: 2601607 - RNA, 20 nt, Human
agcuuugcuucucucucuaa

SEQ ID NO: 2601608 - RNA, 17 nt, Human
agcuuuggugcaauggc

SEQ ID NO: 2601609 - RNA, 21 nt, Human
agcuuuggcuaugagggccuu

SEQ ID NO: 2601610 - RNA, 13 nt, Human
aggaaaagaaaag

SEQ ID NO: 2601611 - RNA, 14 nt, Human
aggaaaagcugcug

SEQ ID NO: 2601612 - RNA, 15 nt, Human
aggaaaagccucugu

SEQ ID NO: 2601613 - RNA, 14 nt, Human
aggaaaagccucug

SEQ ID NO: 2601614 - RNA, 16 nt, Human
aggaaaagcaaauuga

SEQ ID NO: 2601615 - RNA, 19 nt, Human
aggaaaagccucuguguca

SEQ ID NO: 2601616 - RNA, 17 nt, Human
aggaaaagccucugugu

SEQ ID NO: 2601617 - RNA, 20 nt, Human
aggaaaagcggacaucagcu

SEQ ID NO: 2601618 - RNA, 18 nt, Human
ugcucuuagcugucugcu

SEQ ID NO: 2601619 - RNA, 14 nt, Human
ugcucuucaagaaa

SEQ ID NO: 2601620 - RNA, 22 nt, Human
ugcucugcgugucaccugugcu

SEQ ID NO: 2601621 - RNA, 23 nt, Human
ugcucugcgugucaccugugcuu

SEQ ID NO: 2601622 - RNA, 15 nt, Human
ugcucuuagcugucu

SEQ ID NO: 2601623 - RNA, 15 nt, Human
ugcucugcugacaga

SEQ ID NO: 2601624 - RNA, 14 nt, Human
ugcucugcugacag

SEQ ID NO: 2601625 - RNA, 15 nt, Human
ugcugagaaaacaug

SEQ ID NO: 2601626 - RNA, 14 nt, Human
ugcugagaagcuuu

SEQ ID NO: 2601627 - RNA, 14 nt, Human
ugcucuucuuuaga

SEQ ID NO: 2601628 - RNA, 23 nt, Human
ugcucuucuguggaccacugcau

SEQ ID NO: 2601629 - RNA, 20 nt, Human
ugcucuugaacuccugaccu

SEQ ID NO: 2601630 - RNA, 22 nt, Human
ugcucuugaacuccugaccuca

SEQ ID NO: 2601631 - RNA, 15 nt, Human
ugcucuugaacuccu

SEQ ID NO: 2601632 - RNA, 13 nt, Human
ugcucuucugugg

SEQ ID NO: 2601633 - RNA, 13 nt, Human
ugcucuucagugg

SEQ ID NO: 2601634 - RNA, 12 nt, Human
ugcucugcccuu

SEQ ID NO: 2601635 - RNA, 11 nt, Human
ugcucugcccu

SEQ ID NO: 2601636 - RNA, 20 nt, Human
ugcucugaggcuuccagaga

SEQ ID NO: 2601637 - RNA, 18 nt, Human
ugcucugaggcuuccaga

SEQ ID NO: 2601638 - RNA, 17 nt, Human
ugcucugaggcuuccag

SEQ ID NO: 2601639 - RNA, 16 nt, Human
ugcucugaggcuucca

SEQ ID NO: 2601640 - RNA, 13 nt, Human
ugcucucugccac

SEQ ID NO: 2601641 - RNA, 22 nt, Human
ugcucugaauuaguccuugcuu

SEQ ID NO: 2601642 - RNA, 17 nt, Human
ugcucucugcagccagc

SEQ ID NO: 2601643 - RNA, 20 nt, Human
ugcucucugcagccagccca

SEQ ID NO: 2601644 - RNA, 12 nt, Human
ugcucucugcca

SEQ ID NO: 2601645 - RNA, 21 nt, Human
ugcucucugcagccagcccag

SEQ ID NO: 2601646 - RNA, 22 nt, Human
ugcucucgcaccuuuccaaagu

SEQ ID NO: 2601647 - RNA, 13 nt, Human
ugcucucugcagc

SEQ ID NO: 2601648 - RNA, 14 nt, Human
ugcucucugcagcc

SEQ ID NO: 2601649 - RNA, 15 nt, Human
ugcucucugcagcca

SEQ ID NO: 2601650 - RNA, 19 nt, Human
ugcucucgcaccuuuccaa

SEQ ID NO: 2601651 - RNA, 12 nt, Human
ugcucuccuuuc

SEQ ID NO: 2601652 - RNA, 14 nt, Human
ugcuccaggcaggc

SEQ ID NO: 2601653 - RNA, 12 nt, Human
ugcuccaggcag

SEQ ID NO: 2601654 - RNA, 23 nt, Human
ugcuccagucaacaaacuauuuc

SEQ ID NO: 2601655 - RNA, 22 nt, Human
ugcuccaggcaggcuaaggcgu

SEQ ID NO: 2601656 - RNA, 20 nt, Human
ugcuccagcuguucagcugg

SEQ ID NO: 2601657 - RNA, 21 nt, Human
ugcuccagcuguucagcuggu

SEQ ID NO: 2601658 - RNA, 19 nt, Human
ugcuaugagcuggggaugu

SEQ ID NO: 2601659 - RNA, 20 nt, Human
ugcuaugagcuggggauguc

SEQ ID NO: 2601660 - RNA, 16 nt, Human
ugcuaugagcugggga

SEQ ID NO: 2601661 - RNA, 18 nt, Human
ugcuaucucccccagccc

SEQ ID NO: 2601662 - RNA, 16 nt, Human
ugcuauggauggcuuc

SEQ ID NO: 2601663 - RNA, 12 nt, Human
ugcuauggggag

SEQ ID NO: 2601664 - RNA, 18 nt, Human
ugcuauggggagaaaaga

SEQ ID NO: 2601665 - RNA, 19 nt, Human
ugcuauggggagaaaagac

SEQ ID NO: 2601666 - RNA, 22 nt, Human
ugcuaugagcuggggaugucuc

SEQ ID NO: 2601667 - RNA, 20 nt, Human
aggaaaccacagcugcugga

SEQ ID NO: 2601668 - RNA, 13 nt, Human
ugcuaugaaugau

SEQ ID NO: 2601669 - RNA, 18 nt, Human
ugcucaaaucuauucaga

SEQ ID NO: 2601670 - RNA, 19 nt, Human
ugcucaaaauuugaagaau

SEQ ID NO: 2601671 - RNA, 21 nt, Human
ugcucaaaauuugaagaauga

SEQ ID NO: 2601672 - RNA, 18 nt, Human
ugcucaaaauuugaagaa

SEQ ID NO: 2601673 - RNA, 14 nt, Human
ugcucaaaauuuga

SEQ ID NO: 2601674 - RNA, 21 nt, Human
ugcucaaaucuauucagacaa

SEQ ID NO: 2601675 - RNA, 19 nt, Human
ugcucaaaucuauucagac

SEQ ID NO: 2601676 - RNA, 14 nt, Human
ugcucaagaaacaa

SEQ ID NO: 2601677 - RNA, 15 nt, Human
ugcucaaaaaucugu

SEQ ID NO: 2601678 - RNA, 15 nt, Human
ugcucaaaaaaugag

SEQ ID NO: 2601679 - RNA, 17 nt, Human
ugcuaucucccccagcc

SEQ ID NO: 2601680 - RNA, 14 nt, Human
ugcuaucuccccca

SEQ ID NO: 2601681 - RNA, 17 nt, Human
aggaaaccacagcugcu

SEQ ID NO: 2601682 - RNA, 16 nt, Human
aggaaaccacagcugc

SEQ ID NO: 2601683 - RNA, 22 nt, Human
ugcuaucgcaccacuguguauu

SEQ ID NO: 2601684 - RNA, 13 nt, Human
ugcuaucuccccc

SEQ ID NO: 2601685 - RNA, 16 nt, Human
aggaaaagcugcugac

SEQ ID NO: 2601686 - RNA, 15 nt, Human
aggaaaaugaucuga

SEQ ID NO: 2601687 - RNA, 14 nt, Human
aggaaaaugaauaa

SEQ ID NO: 2601688 - RNA, 13 nt, Human
aggaaaauuucac

SEQ ID NO: 2601689 - RNA, 12 nt, Human
aggaaacaguua

SEQ ID NO: 2601690 - RNA, 21 nt, Human
aggaaacaaagcuuagcagga

SEQ ID NO: 2601691 - RNA, 14 nt, Human
aggaaacaacagcu

SEQ ID NO: 2601692 - RNA, 15 nt, Human
aggaaacaacagcuu

SEQ ID NO: 2601693 - RNA, 20 nt, Human
aggaaaucaaauaugcaaag

SEQ ID NO: 2601694 - RNA, 14 nt, Human
aggaaauaaaaccu

SEQ ID NO: 2601695 - RNA, 20 nt, Human
aggaaagucauuggcuuuau

SEQ ID NO: 2601696 - RNA, 19 nt, Human
aggaaagucauuggcuuua

SEQ ID NO: 2601697 - RNA, 17 nt, Human
aggaaagucauuggcuu

SEQ ID NO: 2601698 - RNA, 16 nt, Human
aggaaagucauuggcu

SEQ ID NO: 2601699 - RNA, 23 nt, Human
aggaaagucauuggcuuuauccu

SEQ ID NO: 2601700 - RNA, 22 nt, Human
aggaaagucauuggcuuuaucc

SEQ ID NO: 2601701 - RNA, 21 nt, Human
aggaaaucaaauaugcaaagc

SEQ ID NO: 2601702 - RNA, 22 nt, Human
aggaaaucaaauaugcaaagca

SEQ ID NO: 2601703 - RNA, 16 nt, Human
aggaaauaaaaccuuu

SEQ ID NO: 2601704 - RNA, 23 nt, Human
aggaagagcaggcacauggagga

SEQ ID NO: 2601705 - RNA, 21 nt, Human
aggaagaguagcauuucauuc

SEQ ID NO: 2601706 - RNA, 14 nt, Human
aggaagagggacag

SEQ ID NO: 2601707 - RNA, 16 nt, Human
ugcugaggccugggcc

SEQ ID NO: 2601708 - RNA, 15 nt, Human
ugcugaggccugggc

SEQ ID NO: 2601709 - RNA, 14 nt, Human
ugcugaggccuggg

SEQ ID NO: 2601710 - RNA, 13 nt, Human
ugcugaggccugg

SEQ ID NO: 2601711 - RNA, 16 nt, Human
ugcugaggcucugacc

SEQ ID NO: 2601712 - RNA, 17 nt, Human
ugcugaggccuccagcu

SEQ ID NO: 2601713 - RNA, 17 nt, Human
ugcugaggccugggccg

SEQ ID NO: 2601714 - RNA, 23 nt, Human
aggaaaggcuccaggagcagcca

SEQ ID NO: 2601715 - RNA, 13 nt, Human
aggaaagucauug

SEQ ID NO: 2601716 - RNA, 21 nt, Human
aggaaagggggucccaguggg

SEQ ID NO: 2601717 - RNA, 19 nt, Human
aggaaagggggucccagug

SEQ ID NO: 2601718 - RNA, 13 nt, Human
aggaaagggaagg

SEQ ID NO: 2601719 - RNA, 23 nt, Human
ugcugagccuguaaaauaaaagg

SEQ ID NO: 2601720 - RNA, 20 nt, Human
ugcugagccucugcucccca

SEQ ID NO: 2601721 - RNA, 16 nt, Human
ugcugagccucugcuc

SEQ ID NO: 2601722 - RNA, 17 nt, Human
ugcugagccucugcucc

SEQ ID NO: 2601723 - RNA, 12 nt, Human
ugcugagccucu

SEQ ID NO: 2601724 - RNA, 14 nt, Human
ugcugagccucugc

SEQ ID NO: 2601725 - RNA, 14 nt, Human
ugcugagagaaaua

SEQ ID NO: 2601726 - RNA, 17 nt, Human
ugcugagaagcuuuuga

SEQ ID NO: 2601727 - RNA, 23 nt, Human
ugcugagagaaauauggaacuua

SEQ ID NO: 2601728 - RNA, 15 nt, Human
ugcugagagacccaa

SEQ ID NO: 2601729 - RNA, 17 nt, Human
ugcugagagacccaagg

SEQ ID NO: 2601730 - RNA, 18 nt, Human
ugcugagagacccaagga

SEQ ID NO: 2601731 - RNA, 21 nt, Human
ugcugagagacccaaggagga

SEQ ID NO: 2601732 - RNA, 20 nt, Human
ugcugagauuacagguguga

SEQ ID NO: 2601733 - RNA, 22 nt, Human
ugcugagagacccaaggaggaa

SEQ ID NO: 2601734 - RNA, 21 nt, Human
aggaaggcucuucuccccaga

SEQ ID NO: 2601735 - RNA, 20 nt, Human
aggaaggcucuucuccccag

SEQ ID NO: 2601736 - RNA, 13 nt, Human
aggaaggcggggc

SEQ ID NO: 2601737 - RNA, 19 nt, Human
aggaaggcaggaagagagc

SEQ ID NO: 2601738 - RNA, 16 nt, Human
aggaauguguggccug

SEQ ID NO: 2601739 - RNA, 14 nt, Human
aggaauguuaaagu

SEQ ID NO: 2601740 - RNA, 20 nt, Human
aggaaugggggccucuucaa

SEQ ID NO: 2601741 - RNA, 13 nt, Human
aggaaugggcugu

SEQ ID NO: 2601742 - RNA, 21 nt, Human
aggaaugggggccucuucaaa

SEQ ID NO: 2601743 - RNA, 18 nt, Human
aggaauguagcugguuuc

SEQ ID NO: 2601744 - RNA, 17 nt, Human
aggaauuaaguuaucuu

SEQ ID NO: 2601745 - RNA, 22 nt, Human
aggaauucccagcccaaagcug

SEQ ID NO: 2601746 - RNA, 22 nt, Human
aggaauguuaaagucaguggga

SEQ ID NO: 2601747 - RNA, 23 nt, Human
aggaauuaaguuagggaauggca

SEQ ID NO: 2601748 - RNA, 13 nt, Human
aggaaggcaagag

SEQ ID NO: 2601749 - RNA, 18 nt, Human
aggaaggauuguaaaaaa

SEQ ID NO: 2601750 - RNA, 17 nt, Human
aggaaggauuguaaaaa

SEQ ID NO: 2601751 - RNA, 16 nt, Human
aggaaggauuguaaaa

SEQ ID NO: 2601752 - RNA, 17 nt, Human
aggaaggcaggaagaga

SEQ ID NO: 2601753 - RNA, 15 nt, Human
aggaaggcaggaaga

SEQ ID NO: 2601754 - RNA, 14 nt, Human
aggaaggcaagagg

SEQ ID NO: 2601755 - RNA, 15 nt, Human
aggaaggauuguaaa

SEQ ID NO: 2601756 - RNA, 14 nt, Human
aggaaggauuguaa

SEQ ID NO: 2601757 - RNA, 14 nt, Human
aggaaggaugagca

SEQ ID NO: 2601758 - RNA, 17 nt, Human
aggaaggaugagcauuu

SEQ ID NO: 2601759 - RNA, 18 nt, Human
aggaagccacagcuggug

SEQ ID NO: 2601760 - RNA, 15 nt, Human
aggaagcucagggcc

SEQ ID NO: 2601761 - RNA, 16 nt, Human
aggaagcucagggccu

SEQ ID NO: 2601762 - RNA, 16 nt, Human
aggaagccacagcugg

SEQ ID NO: 2601763 - RNA, 15 nt, Human
aggaagccacagcug

SEQ ID NO: 2601764 - RNA, 14 nt, Human
aggaagcucagggc

SEQ ID NO: 2601765 - RNA, 13 nt, Human
aggaagcucaggg

SEQ ID NO: 2601766 - RNA, 15 nt, Human
aggaagccaaagagu

SEQ ID NO: 2601767 - RNA, 13 nt, Human
aggaagccagcag

SEQ ID NO: 2601768 - RNA, 18 nt, Human
aggaagcagcuuucccca

SEQ ID NO: 2601769 - RNA, 19 nt, Human
aggaagcauucagagagca

SEQ ID NO: 2601770 - RNA, 18 nt, Human
aggaagcauucagagagc

SEQ ID NO: 2601771 - RNA, 22 nt, Human
aggaagaugggggcaagaagau

SEQ ID NO: 2601772 - RNA, 13 nt, Human
aggaagcaacgaa

SEQ ID NO: 2601773 - RNA, 23 nt, Human
aggaagcagaauaaagcaauuuu

SEQ ID NO: 2601774 - RNA, 22 nt, Human
aggaagcagaauaaagcaauuu

SEQ ID NO: 2601775 - RNA, 21 nt, Human
aggaagcagaauaaagcaauu

SEQ ID NO: 2601776 - RNA, 18 nt, Human
aggaagaugggggcaaga

SEQ ID NO: 2601777 - RNA, 17 nt, Human
aggaagaugaaagagga

SEQ ID NO: 2601778 - RNA, 15 nt, Human
aggaagaugaaagag

SEQ ID NO: 2601779 - RNA, 18 nt, Human
aggaagaucuuaaauuuu

SEQ ID NO: 2601780 - RNA, 20 nt, Human
aggaagaugggggcaagaag

SEQ ID NO: 2601781 - RNA, 19 nt, Human
aggaagaugggggcaagaa

SEQ ID NO: 2601782 - RNA, 16 nt, Human
aggaagcaaacuaagc

SEQ ID NO: 2601783 - RNA, 16 nt, Human
aggaagaucuuaaauu

SEQ ID NO: 2601784 - RNA, 23 nt, Human
agcucuguccugggagugagcug

SEQ ID NO: 2601785 - RNA, 14 nt, Human
agcugcaaaggaca

SEQ ID NO: 2601786 - RNA, 15 nt, Human
agcugcaaaggacag

SEQ ID NO: 2601787 - RNA, 16 nt, Human
agcugcaaaggacaga

SEQ ID NO: 2601788 - RNA, 19 nt, Human
agcugcaaaggacagaucc

SEQ ID NO: 2601789 - RNA, 13 nt, Human
agcugcaaaggac

SEQ ID NO: 2601790 - RNA, 20 nt, Human
agcugauuuuaacaauaacu

SEQ ID NO: 2601791 - RNA, 21 nt, Human
agcucuguccugggagugagc

SEQ ID NO: 2601792 - RNA, 16 nt, Human
agcucuguccugggag

SEQ ID NO: 2601793 - RNA, 24 nt, Human
agcugcacagggcagcugggccca

SEQ ID NO: 2601794 - RNA, 23 nt, Human
agcugcacagggcagcugggccc

SEQ ID NO: 2601795 - RNA, 22 nt, Human
agcugcacagggcagcugggcc

SEQ ID NO: 2601796 - RNA, 21 nt, Human
agcugcacagggcagcugggc

SEQ ID NO: 2601797 - RNA, 20 nt, Human
agcugcacagggcagcuggg

SEQ ID NO: 2601798 - RNA, 19 nt, Human
agcugcacagggcagcugg

SEQ ID NO: 2601799 - RNA, 15 nt, Human
agcugcacagggcag

SEQ ID NO: 2601800 - RNA, 17 nt, Human
agcugcacugaugcugc

SEQ ID NO: 2601801 - RNA, 19 nt, Human
agcugcacugaugcugccc

SEQ ID NO: 2601802 - RNA, 11 nt, Human
agcugcacuga

SEQ ID NO: 2601803 - RNA, 21 nt, Human
agcugcaagugacaucucuuu

SEQ ID NO: 2601804 - RNA, 19 nt, Human
agcugauuuuaacaauaac

SEQ ID NO: 2601805 - RNA, 15 nt, Human
agcugcaagugacau

SEQ ID NO: 2601806 - RNA, 18 nt, Human
agcugcaagugacaucuc

SEQ ID NO: 2601807 - RNA, 20 nt, Human
agcugccagccgagauagcc

SEQ ID NO: 2601808 - RNA, 14 nt, Human
agcugccagccgag

SEQ ID NO: 2601809 - RNA, 13 nt, Human
agcugcagagcca

SEQ ID NO: 2601810 - RNA, 19 nt, Human
agcugcagagacagagagg

SEQ ID NO: 2601811 - RNA, 18 nt, Human
agcugcagagacagagag

SEQ ID NO: 2601812 - RNA, 17 nt, Human
agcugcagagacagaga

SEQ ID NO: 2601813 - RNA, 20 nt, Human
agcugcacugaugcugcccc

SEQ ID NO: 2601814 - RNA, 22 nt, Human
agcugcacugaugcugccccuc

SEQ ID NO: 2601815 - RNA, 15 nt, Human
agcugcagagacaga

SEQ ID NO: 2601816 - RNA, 11 nt, Human
agcugcagaac

SEQ ID NO: 2601817 - RNA, 11 nt, Human
agcugcccucc

SEQ ID NO: 2601818 - RNA, 14 nt, Human
agcugccccuggcu

SEQ ID NO: 2601819 - RNA, 20 nt, Human
agcugccccggggaggggcg

SEQ ID NO: 2601820 - RNA, 18 nt, Human
agcugcccagaguugcug

SEQ ID NO: 2601821 - RNA, 14 nt, Human
agcugcccagaguu

SEQ ID NO: 2601822 - RNA, 15 nt, Human
agcugccccagccag

SEQ ID NO: 2601823 - RNA, 14 nt, Human
agcugccccagcca

SEQ ID NO: 2601824 - RNA, 16 nt, Human
agcugccccagccaga

SEQ ID NO: 2601825 - RNA, 17 nt, Human
agcugccauccagggau

SEQ ID NO: 2601826 - RNA, 16 nt, Human
agcugcagagccaccc

SEQ ID NO: 2601827 - RNA, 20 nt, Human
ugcccuguuaaaagaugaaa

SEQ ID NO: 2601828 - RNA, 19 nt, Human
ugcccuguucucuaccaag

SEQ ID NO: 2601829 - RNA, 17 nt, Human
ugcccuguucucuacca

SEQ ID NO: 2601830 - RNA, 22 nt, Human
agcugcccuccuuguccaccca

SEQ ID NO: 2601831 - RNA, 18 nt, Human
ugcccuuaccugccagga

SEQ ID NO: 2601832 - RNA, 22 nt, Human
ugccgaaugugcagguuuguua

SEQ ID NO: 2601833 - RNA, 20 nt, Human
ugcccuguuguguauagaug

SEQ ID NO: 2601834 - RNA, 19 nt, Human
ugcccuguuguguauagau

SEQ ID NO: 2601835 - RNA, 15 nt, Human
ugcccuuaaaucaua

SEQ ID NO: 2601836 - RNA, 20 nt, Human
ugcccuuacacuuacuguug

SEQ ID NO: 2601837 - RNA, 18 nt, Human
ugcccuuacacuuacugu

SEQ ID NO: 2601838 - RNA, 15 nt, Human
ugccgacagaaggaa

SEQ ID NO: 2601839 - RNA, 15 nt, Human
ugccgaccagagccc

SEQ ID NO: 2601840 - RNA, 21 nt, Human
ugccgaccagagccccacacg

SEQ ID NO: 2601841 - RNA, 22 nt, Human
ugccgaccagagccccacacgg

SEQ ID NO: 2601842 - RNA, 15 nt, Human
ugccgaccgaggcug

SEQ ID NO: 2601843 - RNA, 16 nt, Human
ugccgaccgaggcugg

SEQ ID NO: 2601844 - RNA, 22 nt, Human
ugccgaccgaggcuggagcugg

SEQ ID NO: 2601845 - RNA, 23 nt, Human
ugccgaccgaggcuggagcuggc

SEQ ID NO: 2601846 - RNA, 14 nt, Human
ugccgaccucgucc

SEQ ID NO: 2601847 - RNA, 15 nt, Human
ugccgaccucguccu

SEQ ID NO: 2601848 - RNA, 17 nt, Human
ugccgaccucguccucc

SEQ ID NO: 2601849 - RNA, 21 nt, Human
ugccgaccucguccucccccu

SEQ ID NO: 2601850 - RNA, 21 nt, Human
ugccgauauacucuagaugaa

SEQ ID NO: 2601851 - RNA, 15 nt, Human
ugccgacuccugggu

SEQ ID NO: 2601852 - RNA, 14 nt, Human
ugccgacuccuggg

SEQ ID NO: 2601853 - RNA, 22 nt, Human
ugccgaccucguccucccccug

SEQ ID NO: 2601854 - RNA, 17 nt, Human
ugccgcagagcuggccg

SEQ ID NO: 2601855 - RNA, 15 nt, Human
ugccgcagagcuggc

SEQ ID NO: 2601856 - RNA, 14 nt, Human
ugccgcagagcugg

SEQ ID NO: 2601857 - RNA, 13 nt, Human
ugccgcagagcug

SEQ ID NO: 2601858 - RNA, 17 nt, Human
ugccgcaauacaggaac

SEQ ID NO: 2601859 - RNA, 20 nt, Human
ugccgcaagucugcagcccg

SEQ ID NO: 2601860 - RNA, 22 nt, Human
ugccgcaauggccaugugggga

SEQ ID NO: 2601861 - RNA, 12 nt, Human
ugccgcacccca

SEQ ID NO: 2601862 - RNA, 13 nt, Human
ugccgcaccccag

SEQ ID NO: 2601863 - RNA, 15 nt, Human
ugccgcaccccagag

SEQ ID NO: 2601864 - RNA, 13 nt, Human
ugccucagccucc

SEQ ID NO: 2601865 - RNA, 12 nt, Human
ugccucagccuc

SEQ ID NO: 2601866 - RNA, 12 nt, Human
ugccgcagcccu

SEQ ID NO: 2601867 - RNA, 14 nt, Human
ugccgcagcccugc

SEQ ID NO: 2601868 - RNA, 18 nt, Human
ugccgcaccccagagugu

SEQ ID NO: 2601869 - RNA, 15 nt, Human
ugccucagcccugac

SEQ ID NO: 2601870 - RNA, 16 nt, Human
ugccucagcccugacc

SEQ ID NO: 2601871 - RNA, 12 nt, Human
agcucuggucca

SEQ ID NO: 2601872 - RNA, 17 nt, Human
agcucugguccauagag

SEQ ID NO: 2601873 - RNA, 14 nt, Human
agcucuguccuggg

SEQ ID NO: 2601874 - RNA, 15 nt, Human
agcucucugcaucua

SEQ ID NO: 2601875 - RNA, 19 nt, Human
agcucugaaaccaguguua

SEQ ID NO: 2601876 - RNA, 21 nt, Human
agcucugaagucacaucacag

SEQ ID NO: 2601877 - RNA, 23 nt, Human
agcucugaagucacaucacagga

SEQ ID NO: 2601878 - RNA, 23 nt, Human
agcucuggcugaacccugugcug

SEQ ID NO: 2601879 - RNA, 18 nt, Human
agcucugggagaggauuu

SEQ ID NO: 2601880 - RNA, 15 nt, Human
agcucugggagagga

SEQ ID NO: 2601881 - RNA, 12 nt, Human
agcucuggcuuc

SEQ ID NO: 2601882 - RNA, 20 nt, Human
agcucuggcuuccagaaaac

SEQ ID NO: 2601883 - RNA, 12 nt, Human
agcucgguggac

SEQ ID NO: 2601884 - RNA, 14 nt, Human
agcucgguggaccc

SEQ ID NO: 2601885 - RNA, 15 nt, Human
agcucgguggaccca

SEQ ID NO: 2601886 - RNA, 16 nt, Human
agcucgguggacccag

SEQ ID NO: 2601887 - RNA, 17 nt, Human
agcucgguggacccagg

SEQ ID NO: 2601888 - RNA, 18 nt, Human
agcucgguggacccaggg

SEQ ID NO: 2601889 - RNA, 19 nt, Human
agcucgguggacccaggga

SEQ ID NO: 2601890 - RNA, 18 nt, Human
agcucugaaaccaguguu

SEQ ID NO: 2601891 - RNA, 11 nt, Human
agcucucugca

SEQ ID NO: 2601892 - RNA, 20 nt, Human
agcucgguggacccagggau

SEQ ID NO: 2601893 - RNA, 21 nt, Human
agcuccuucuguccuacucug

SEQ ID NO: 2601894 - RNA, 16 nt, Human
agcuccuucuguccua

SEQ ID NO: 2601895 - RNA, 16 nt, Human
agcucccauuucuacu

SEQ ID NO: 2601896 - RNA, 22 nt, Human
agcuccuugggaggccccacug

SEQ ID NO: 2601897 - RNA, 20 nt, Human
agcuccuugggaggccccac

SEQ ID NO: 2601898 - RNA, 13 nt, Human
agcucccaggcau

SEQ ID NO: 2601899 - RNA, 12 nt, Human
agcucccaggaa

SEQ ID NO: 2601900 - RNA, 16 nt, Human
agcuccaucuccacuc

SEQ ID NO: 2601901 - RNA, 15 nt, Human
agcuccaucuccacu

SEQ ID NO: 2601902 - RNA, 13 nt, Human
agcuccaucucca

SEQ ID NO: 2601903 - RNA, 13 nt, Human
agcuccaguucga

SEQ ID NO: 2601904 - RNA, 15 nt, Human
agcuccuucuguccu

SEQ ID NO: 2601905 - RNA, 23 nt, Human
agcucccaggcauuccccaggag

SEQ ID NO: 2601906 - RNA, 14 nt, Human
agcucccaggaaca

SEQ ID NO: 2601907 - RNA, 13 nt, Human
agcucccaggaac

SEQ ID NO: 2601908 - RNA, 13 nt, Human
agcucccaggccg

SEQ ID NO: 2601909 - RNA, 21 nt, Human
agcucccaggccgagaagcca

SEQ ID NO: 2601910 - RNA, 14 nt, Human
agcucccaggccga

SEQ ID NO: 2601911 - RNA, 20 nt, Human
ugccauagaguuuaacacaa

SEQ ID NO: 2601912 - RNA, 15 nt, Human
ugccaagcacagugc

SEQ ID NO: 2601913 - RNA, 13 nt, Human
ugccaucaucucc

SEQ ID NO: 2601914 - RNA, 15 nt, Human
ugccaucaucuccug

SEQ ID NO: 2601915 - RNA, 16 nt, Human
ugccaucaucuccugc

SEQ ID NO: 2601916 - RNA, 16 nt, Human
ugccaucauguuuaca

SEQ ID NO: 2601917 - RNA, 23 nt, Human
ugccaucaucuccugccuuccuc

SEQ ID NO: 2601918 - RNA, 13 nt, Human
ugccauauuuuca

SEQ ID NO: 2601919 - RNA, 14 nt, Human
ugccauauuuucac

SEQ ID NO: 2601920 - RNA, 17 nt, Human
ugccauauuuucaccau

SEQ ID NO: 2601921 - RNA, 21 nt, Human
ugccauagaguuuaacacaag

SEQ ID NO: 2601922 - RNA, 16 nt, Human
ugccauagucacaugg

SEQ ID NO: 2601923 - RNA, 21 nt, Human
ugccauauugcacaugucuua

SEQ ID NO: 2601924 - RNA, 17 nt, Human
ugccauagucacauggc

SEQ ID NO: 2601925 - RNA, 20 nt, Human
ugccauauugcacaugucuu

SEQ ID NO: 2601926 - RNA, 18 nt, Human
ugccauacuuugucugaa

SEQ ID NO: 2601927 - RNA, 17 nt, Human
ugccauacuuugucuga

SEQ ID NO: 2601928 - RNA, 22 nt, Human
ugccauacuuugucugaaaaau

SEQ ID NO: 2601929 - RNA, 18 nt, Human
ugccauagaguuuaacac

SEQ ID NO: 2601930 - RNA, 13 nt, Human
ugccauagaguuu

SEQ ID NO: 2601931 - RNA, 23 nt, Human
ugccauaaaacauuaagaaaauc

SEQ ID NO: 2601932 - RNA, 21 nt, Human
ugccauaaaacauuaagaaaa

SEQ ID NO: 2601933 - RNA, 20 nt, Human
ugccauaaaacauuaagaaa

SEQ ID NO: 2601934 - RNA, 22 nt, Human
ugccauaaaacauuaagaaaau

SEQ ID NO: 2601935 - RNA, 15 nt, Human
ugccauacuuugucu

SEQ ID NO: 2601936 - RNA, 21 nt, Human
ugccuggauggggcugcaccg

SEQ ID NO: 2601937 - RNA, 20 nt, Human
ugccuggauggggcugcacc

SEQ ID NO: 2601938 - RNA, 17 nt, Human
ugccuggauggggcugc

SEQ ID NO: 2601939 - RNA, 16 nt, Human
ugccuggauggggcug

SEQ ID NO: 2601940 - RNA, 16 nt, Human
agcugccuguucagcu

SEQ ID NO: 2601941 - RNA, 14 nt, Human
agcugccuguucag

SEQ ID NO: 2601942 - RNA, 18 nt, Human
agcugccuguucagcucc

SEQ ID NO: 2601943 - RNA, 16 nt, Human
agcugcuugggcuuca

SEQ ID NO: 2601944 - RNA, 22 nt, Human
agcugcuucucccacuuggcca

SEQ ID NO: 2601945 - RNA, 12 nt, Human
agcugcuucucc

SEQ ID NO: 2601946 - RNA, 20 nt, Human
agcugcuugggcuucauccu

SEQ ID NO: 2601947 - RNA, 23 nt, Human
ugccugcuuuucacugcugcaag

SEQ ID NO: 2601948 - RNA, 21 nt, Human
ugccuggacauuugccuugcu

SEQ ID NO: 2601949 - RNA, 23 nt, Human
agcugcuggagacuccuaggcag

SEQ ID NO: 2601950 - RNA, 14 nt, Human
agcugcuggagacu

SEQ ID NO: 2601951 - RNA, 14 nt, Human
agcugcuggcuugc

SEQ ID NO: 2601952 - RNA, 17 nt, Human
agcugcuggcuugcagu

SEQ ID NO: 2601953 - RNA, 19 nt, Human
agcuggccgugggccuggg

SEQ ID NO: 2601954 - RNA, 18 nt, Human
agcuggcgucugucuuca

SEQ ID NO: 2601955 - RNA, 21 nt, Human
agcuggcgucaugcaaaguca

SEQ ID NO: 2601956 - RNA, 15 nt, Human
agcuggcgucugucu

SEQ ID NO: 2601957 - RNA, 17 nt, Human
agcuggccgugggccug

SEQ ID NO: 2601958 - RNA, 16 nt, Human
agcuggccgugggccu

SEQ ID NO: 2601959 - RNA, 22 nt, Human
agcuggccgcgccaaauaaugu

SEQ ID NO: 2601960 - RNA, 19 nt, Human
agcuggccgggagccugau

SEQ ID NO: 2601961 - RNA, 18 nt, Human
agcuggccgggagccuga

SEQ ID NO: 2601962 - RNA, 23 nt, Human
agcugcuucucccacuuggccaa

SEQ ID NO: 2601963 - RNA, 23 nt, Human
agcuggccgaggguccuggcucc

SEQ ID NO: 2601964 - RNA, 23 nt, Human
ugccugcccaggccccugccacc

SEQ ID NO: 2601965 - RNA, 22 nt, Human
ugccugcccaggccccugccac

SEQ ID NO: 2601966 - RNA, 20 nt, Human
ugccugcccaggccccugcc

SEQ ID NO: 2601967 - RNA, 11 nt, Human
ugccuccaggu

SEQ ID NO: 2601968 - RNA, 23 nt, Human
ugccuccagggcuggacugaggc

SEQ ID NO: 2601969 - RNA, 12 nt, Human
ugccucugccug

SEQ ID NO: 2601970 - RNA, 21 nt, Human
ugccugcuuuuuauggccugu

SEQ ID NO: 2601971 - RNA, 20 nt, Human
ugccugcuuuuuauggccug

SEQ ID NO: 2601972 - RNA, 22 nt, Human
ugccugcuuuuuauggccugug

SEQ ID NO: 2601973 - RNA, 22 nt, Human
ugccugcuuuucacugcugcaa

SEQ ID NO: 2601974 - RNA, 21 nt, Human
ugccuccagggcuggacugag

SEQ ID NO: 2601975 - RNA, 20 nt, Human
ugccuccagggcuggacuga

SEQ ID NO: 2601976 - RNA, 19 nt, Human
ugccuccagggcuggacug

SEQ ID NO: 2601977 - RNA, 18 nt, Human
ugccuccagggcuggacu

SEQ ID NO: 2601978 - RNA, 17 nt, Human
ugccucugccucugaca

SEQ ID NO: 2601979 - RNA, 20 nt, Human
ugccucugccucugacacac

SEQ ID NO: 2601980 - RNA, 18 nt, Human
ugccucugccucugacac

SEQ ID NO: 2601981 - RNA, 17 nt, Human
ugccuccagggcuggac

SEQ ID NO: 2601982 - RNA, 16 nt, Human
ugccuccagggcugga

SEQ ID NO: 2601983 - RNA, 15 nt, Human
ugccuccagggcugg

SEQ ID NO: 2601984 - RNA, 14 nt, Human
ugccuccagggcug

SEQ ID NO: 2601985 - RNA, 12 nt, Human
ugccuccagggc

SEQ ID NO: 2601986 - RNA, 19 nt, Human
ugccuccaggaaccacacc

SEQ ID NO: 2601987 - RNA, 20 nt, Human
ugccuccaggaaccacacca

SEQ ID NO: 2601988 - RNA, 20 nt, Human
ugccuccacucccacuuccc

SEQ ID NO: 2601989 - RNA, 19 nt, Human
ugccuccacucccacuucc

SEQ ID NO: 2601990 - RNA, 14 nt, Human
ugccuccaggaacc

SEQ ID NO: 2601991 - RNA, 17 nt, Human
ugccuccaggaaccaca

SEQ ID NO: 2601992 - RNA, 14 nt, Human
ugccucagccuccc

SEQ ID NO: 2601993 - RNA, 17 nt, Human
ugccuccacucccacuu

SEQ ID NO: 2601994 - RNA, 16 nt, Human
ugccuccacucccacu

SEQ ID NO: 2601995 - RNA, 15 nt, Human
ugccuccacucccac

SEQ ID NO: 2601996 - RNA, 14 nt, Human
ugccuccacuccca

SEQ ID NO: 2601997 - RNA, 13 nt, Human
ugccuccacuccc

SEQ ID NO: 2601998 - RNA, 20 nt, Human
ugccuccaccgcugccuaag

SEQ ID NO: 2601999 - RNA, 19 nt, Human
ugccucagcccugacccug

SEQ ID NO: 2602000 - RNA, 19 nt, Human
ugccuguguccaugcgcuc

SEQ ID NO: 2602001 - RNA, 15 nt, Human
ugccuguguccaugc

SEQ ID NO: 2602002 - RNA, 23 nt, Human
ugccuguggcgccgucuccaggg

SEQ ID NO: 2602003 - RNA, 22 nt, Human
ugccuguggcgccgucuccagg

SEQ ID NO: 2602004 - RNA, 21 nt, Human
ugccuguggcgccgucuccag

SEQ ID NO: 2602005 - RNA, 21 nt, Human
ugccuguggaaucuggaguga

SEQ ID NO: 2602006 - RNA, 19 nt, Human
ugccuguggaaucuggagu

SEQ ID NO: 2602007 - RNA, 11 nt, Human
ugccuguggcg

SEQ ID NO: 2602008 - RNA, 17 nt, Human
ugccuguucaguuacag

SEQ ID NO: 2602009 - RNA, 13 nt, Human
ugccuguucaguu

SEQ ID NO: 2602010 - RNA, 12 nt, Human
ugccuguucagu

SEQ ID NO: 2602011 - RNA, 21 nt, Human
ugccuguguccaugcgcucag

SEQ ID NO: 2602012 - RNA, 21 nt, Human
ugccuguucaguuacagaaag

SEQ ID NO: 2602013 - RNA, 20 nt, Human
ugccuguucaguuacagaaa

SEQ ID NO: 2602014 - RNA, 19 nt, Human
ugccuguucaguuacagaa

SEQ ID NO: 2602015 - RNA, 18 nt, Human
ugccuguucaguuacaga

SEQ ID NO: 2602016 - RNA, 14 nt, Human
ugccuguucccauu

SEQ ID NO: 2602017 - RNA, 14 nt, Human
agcuguucacagcc

SEQ ID NO: 2602018 - RNA, 19 nt, Human
agcuguuacugucuucagu

SEQ ID NO: 2602019 - RNA, 12 nt, Human
ugccugugccug

SEQ ID NO: 2602020 - RNA, 14 nt, Human
ugccuguggaacug

SEQ ID NO: 2602021 - RNA, 19 nt, Human
ugccugugccacccaccag

SEQ ID NO: 2602022 - RNA, 20 nt, Human
ugccugugccacccaccagg

SEQ ID NO: 2602023 - RNA, 19 nt, Human
agcuguuauuucuauuuuu

SEQ ID NO: 2602024 - RNA, 23 nt, Human
agcugugugaaauaccagugugg

SEQ ID NO: 2602025 - RNA, 14 nt, Human
ugccugugccaccc

SEQ ID NO: 2602026 - RNA, 17 nt, Human
ugccugugaggcagggg

SEQ ID NO: 2602027 - RNA, 16 nt, Human
ugccugugccacccac

SEQ ID NO: 2602028 - RNA, 21 nt, Human
ugccuuacccucauguucuua

SEQ ID NO: 2602029 - RNA, 23 nt, Human
ugccuuaauaagaaugguugccu

SEQ ID NO: 2602030 - RNA, 14 nt, Human
ugccuuaccuccug

SEQ ID NO: 2602031 - RNA, 15 nt, Human
ugccuuaccuccugc

SEQ ID NO: 2602032 - RNA, 16 nt, Human
ugccuuaccuccugcc

SEQ ID NO: 2602033 - RNA, 17 nt, Human
ugccuuaccuccugccc

SEQ ID NO: 2602034 - RNA, 16 nt, Human
ugccuuggggacaaga

SEQ ID NO: 2602035 - RNA, 16 nt, Human
ugccuugggcugcucc

SEQ ID NO: 2602036 - RNA, 17 nt, Human
ugccuugggcugcuccu

SEQ ID NO: 2602037 - RNA, 19 nt, Human
ugccuuggggaauuuccuc

SEQ ID NO: 2602038 - RNA, 18 nt, Human
ugccuuggggaauuuccu

SEQ ID NO: 2602039 - RNA, 19 nt, Human
ugccuugggcugcuccuca

SEQ ID NO: 2602040 - RNA, 17 nt, Human
ugccuguugggccagga

SEQ ID NO: 2602041 - RNA, 16 nt, Human
ugccuguugggccagg

SEQ ID NO: 2602042 - RNA, 20 nt, Human
ugccuuacccucauguucuu

SEQ ID NO: 2602043 - RNA, 22 nt, Human
ugccuguucaguuacagaaagu

SEQ ID NO: 2602044 - RNA, 17 nt, Human
ugccuuaaagucaguaa

SEQ ID NO: 2602045 - RNA, 16 nt, Human
ugccuuaacuggagcc

SEQ ID NO: 2602046 - RNA, 19 nt, Human
agcuguggacuuuguucac

SEQ ID NO: 2602047 - RNA, 22 nt, Human
agcugugccacccugggcucug

SEQ ID NO: 2602048 - RNA, 21 nt, Human
agcugugccacccugggcucu

SEQ ID NO: 2602049 - RNA, 18 nt, Human
agcugugcucuggacagg

SEQ ID NO: 2602050 - RNA, 17 nt, Human
agcugugcucuggacag

SEQ ID NO: 2602051 - RNA, 15 nt, Human
agcuguguccuugca

SEQ ID NO: 2602052 - RNA, 18 nt, Human
agcuguguccuugcaccu

SEQ ID NO: 2602053 - RNA, 20 nt, Human
agcuguguccuugcaccugc

SEQ ID NO: 2602054 - RNA, 21 nt, Human
agcuguggguacagagagguc

SEQ ID NO: 2602055 - RNA, 18 nt, Human
agcuguuacugucuucag

SEQ ID NO: 2602056 - RNA, 14 nt, Human
agcuguuacugucu

SEQ ID NO: 2602057 - RNA, 21 nt, Human
agcuguguccuugcaccugca

SEQ ID NO: 2602058 - RNA, 24 nt, Human
agcuguguccuugcaccugcaucc

SEQ ID NO: 2602059 - RNA, 13 nt, Human
agcugugugaaau

SEQ ID NO: 2602060 - RNA, 14 nt, Human
agcugugugaaaua

SEQ ID NO: 2602061 - RNA, 20 nt, Human
agcugggguggggaccucag

SEQ ID NO: 2602062 - RNA, 16 nt, Human
agcugggacuacaggu

SEQ ID NO: 2602063 - RNA, 23 nt, Human
agcugggacuacaggcacccacc

SEQ ID NO: 2602064 - RNA, 20 nt, Human
agcugggacuacaggcaccc

SEQ ID NO: 2602065 - RNA, 23 nt, Human
agcugggguggggaccucaggcc

SEQ ID NO: 2602066 - RNA, 22 nt, Human
agcugggguggggaccucaggc

SEQ ID NO: 2602067 - RNA, 20 nt, Human
agcugugccacccugggcuc

SEQ ID NO: 2602068 - RNA, 19 nt, Human
agcugugccacccugggcu

SEQ ID NO: 2602069 - RNA, 18 nt, Human
agcugugccacccugggc

SEQ ID NO: 2602070 - RNA, 13 nt, Human
agcugugccaccc

SEQ ID NO: 2602071 - RNA, 12 nt, Human
agcugugccacc

SEQ ID NO: 2602072 - RNA, 19 nt, Human
agcugugcagguggggaga

SEQ ID NO: 2602073 - RNA, 14 nt, Human
agcugggucaggca

SEQ ID NO: 2602074 - RNA, 20 nt, Human
agcuggguaaucgauggggg

SEQ ID NO: 2602075 - RNA, 20 nt, Human
agucacccuaccugugccug

SEQ ID NO: 2602076 - RNA, 17 nt, Human
agucaccucauggaauu

SEQ ID NO: 2602077 - RNA, 15 nt, Human
agucaccucauggaa

SEQ ID NO: 2602078 - RNA, 14 nt, Human
agucaccucaugga

SEQ ID NO: 2602079 - RNA, 19 nt, Human
agucacacgggggcagcug

SEQ ID NO: 2602080 - RNA, 19 nt, Human
agucacccuaccugugccu

SEQ ID NO: 2602081 - RNA, 16 nt, Human
agucacacgggggcag

SEQ ID NO: 2602082 - RNA, 19 nt, Human
agucaccccggccaccugc

SEQ ID NO: 2602083 - RNA, 23 nt, Human
agucacacagugagucgaggaca

SEQ ID NO: 2602084 - RNA, 15 nt, Human
agucacacagugagu

SEQ ID NO: 2602085 - RNA, 16 nt, Human
aguauuucuaugaaau

SEQ ID NO: 2602086 - RNA, 17 nt, Human
aguauuucuaugaaaua

SEQ ID NO: 2602087 - RNA, 18 nt, Human
aguauuucuaugaaauau

SEQ ID NO: 2602088 - RNA, 23 nt, Human
agucacacaguauuacuucugcu

SEQ ID NO: 2602089 - RNA, 15 nt, Human
aguauugaagcauuu

SEQ ID NO: 2602090 - RNA, 18 nt, Human
aguauugaagcauuuuau

SEQ ID NO: 2602091 - RNA, 20 nt, Human
aguauugaagcauuuuauaa

SEQ ID NO: 2602092 - RNA, 21 nt, Human
aguauugaagcauuuuauaaa

SEQ ID NO: 2602093 - RNA, 15 nt, Human
aguauucuugucaaa

SEQ ID NO: 2602094 - RNA, 14 nt, Human
aguauucuucucuu

SEQ ID NO: 2602095 - RNA, 12 nt, Human
aguauucuucuc

SEQ ID NO: 2602096 - RNA, 18 nt, Human
aguauucuugucaaaaaa

SEQ ID NO: 2602097 - RNA, 14 nt, Human
aguauugaagcauu

SEQ ID NO: 2602098 - RNA, 14 nt, Human
aguaugguggcugg

SEQ ID NO: 2602099 - RNA, 18 nt, Human
aguauuagaauaccacag

SEQ ID NO: 2602100 - RNA, 18 nt, Human
aguauuacuucugcuaca

SEQ ID NO: 2602101 - RNA, 17 nt, Human
aguaugguggcuggguu

SEQ ID NO: 2602102 - RNA, 15 nt, Human
aguauuacuucugcu

SEQ ID NO: 2602103 - RNA, 22 nt, Human
aguaguaccaaaugcuuuaaaa

SEQ ID NO: 2602104 - RNA, 18 nt, Human
aguaguaaaaauuaaaaa

SEQ ID NO: 2602105 - RNA, 14 nt, Human
aguaguaaaaauua

SEQ ID NO: 2602106 - RNA, 17 nt, Human
aguaguaccaaaugcuu

SEQ ID NO: 2602107 - RNA, 14 nt, Human
aguaguacuugaaa

SEQ ID NO: 2602108 - RNA, 21 nt, Human
aguaguaccaaaugcuuuaaa

SEQ ID NO: 2602109 - RNA, 19 nt, Human
aguaguaccaaaugcuuua

SEQ ID NO: 2602110 - RNA, 18 nt, Human
aguaguaccaaaugcuuu

SEQ ID NO: 2602111 - RNA, 16 nt, Human
aguaugguggcugggu

SEQ ID NO: 2602112 - RNA, 15 nt, Human
aguaugguggcuggg

SEQ ID NO: 2602113 - RNA, 15 nt, Human
ugucaauuacaggaa

SEQ ID NO: 2602114 - RNA, 14 nt, Human
ugucaauuacagga

SEQ ID NO: 2602115 - RNA, 17 nt, Human
ugucaaguugugcuugu

SEQ ID NO: 2602116 - RNA, 16 nt, Human
ugucaaguugugcuug

SEQ ID NO: 2602117 - RNA, 15 nt, Human
ugucaaguugugcuu

SEQ ID NO: 2602118 - RNA, 14 nt, Human
ugucaaguugugcu

SEQ ID NO: 2602119 - RNA, 19 nt, Human
ugucaagugggaucuguca

SEQ ID NO: 2602120 - RNA, 18 nt, Human
ugucaaguuccuuugggu

SEQ ID NO: 2602121 - RNA, 19 nt, Human
ugucaagucucugcuggcc

SEQ ID NO: 2602122 - RNA, 17 nt, Human
ugucaagucucugcugg

SEQ ID NO: 2602123 - RNA, 18 nt, Human
ugucaagucucugcuggc

SEQ ID NO: 2602124 - RNA, 17 nt, Human
ugucaauuacaggaagu

SEQ ID NO: 2602125 - RNA, 19 nt, Human
ugucaauuacaggaaguac

SEQ ID NO: 2602126 - RNA, 16 nt, Human
aguaguaauagagcaa

SEQ ID NO: 2602127 - RNA, 13 nt, Human
aguaguaaaaauu

SEQ ID NO: 2602128 - RNA, 23 nt, Human
aguagguuggaagcuagcucccc

SEQ ID NO: 2602129 - RNA, 20 nt, Human
aguagguuggaagcuagcuc

SEQ ID NO: 2602130 - RNA, 13 nt, Human
aguaggugcuuga

SEQ ID NO: 2602131 - RNA, 13 nt, Human
aguagggucaggc

SEQ ID NO: 2602132 - RNA, 15 nt, Human
uguaucacaaaucuu

SEQ ID NO: 2602133 - RNA, 18 nt, Human
uguaucacaaaucuuaac

SEQ ID NO: 2602134 - RNA, 23 nt, Human
uguauauuugugauagcacuuuc

SEQ ID NO: 2602135 - RNA, 17 nt, Human
uguaucaaugaguaaca

SEQ ID NO: 2602136 - RNA, 15 nt, Human
uguaguguuggagaa

SEQ ID NO: 2602137 - RNA, 22 nt, Human
uguauauuuuaagaaauaacag

SEQ ID NO: 2602138 - RNA, 22 nt, Human
uguauauuugugauagcacuuu

SEQ ID NO: 2602139 - RNA, 14 nt, Human
uguaguguuggaga

SEQ ID NO: 2602140 - RNA, 21 nt, Human
uguagugccucuuucauccac

SEQ ID NO: 2602141 - RNA, 17 nt, Human
uguaugugcgugugugc

SEQ ID NO: 2602142 - RNA, 20 nt, Human
uguaugugggggucugugug

SEQ ID NO: 2602143 - RNA, 19 nt, Human
uguaugugcacugucacuu

SEQ ID NO: 2602144 - RNA, 14 nt, Human
uguauguguguaug

SEQ ID NO: 2602145 - RNA, 17 nt, Human
uguaugugcacugucac

SEQ ID NO: 2602146 - RNA, 16 nt, Human
uguaugugcacuguca

SEQ ID NO: 2602147 - RNA, 11 nt, Human
uguaugugcac

SEQ ID NO: 2602148 - RNA, 21 nt, Human
uguaugucagacauccauguu

SEQ ID NO: 2602149 - RNA, 12 nt, Human
uguauguggggg

SEQ ID NO: 2602150 - RNA, 19 nt, Human
uguaugucuuggacacugu

SEQ ID NO: 2602151 - RNA, 14 nt, Human
uguaugucuuggac

SEQ ID NO: 2602152 - RNA, 18 nt, Human
uguaugucucgugguagg

SEQ ID NO: 2602153 - RNA, 15 nt, Human
uguauguauaauuca

SEQ ID NO: 2602154 - RNA, 13 nt, Human
uguauguauaauu

SEQ ID NO: 2602155 - RNA, 12 nt, Human
uguauguauaau

SEQ ID NO: 2602156 - RNA, 16 nt, Human
uguaucauagaaaugu

SEQ ID NO: 2602157 - RNA, 17 nt, Human
uguaucauagaaaugua

SEQ ID NO: 2602158 - RNA, 21 nt, Human
uguaucaucuggauaggagcc

SEQ ID NO: 2602159 - RNA, 17 nt, Human
uguaucauuugaacaac

SEQ ID NO: 2602160 - RNA, 15 nt, Human
uguaucauagaaaug

SEQ ID NO: 2602161 - RNA, 21 nt, Human
uguaucaggugcccaucccug

SEQ ID NO: 2602162 - RNA, 18 nt, Human
uguaucagaggccuauaa

SEQ ID NO: 2602163 - RNA, 21 nt, Human
uguaucaggaaauauauaugu

SEQ ID NO: 2602164 - RNA, 19 nt, Human
uguauucucuccuguaccu

SEQ ID NO: 2602165 - RNA, 20 nt, Human
uguauucucuccuguaccuc

SEQ ID NO: 2602166 - RNA, 22 nt, Human
uguauucuagcuaauguaauaa

SEQ ID NO: 2602167 - RNA, 22 nt, Human
uguauuuuuuuuucuaagagaa

SEQ ID NO: 2602168 - RNA, 21 nt, Human
uguauuuuuuuuucuaagaga

SEQ ID NO: 2602169 - RNA, 20 nt, Human
uguauuuuuuugcaagugaa

SEQ ID NO: 2602170 - RNA, 17 nt, Human
uguauuuuuuugcaagu

SEQ ID NO: 2602171 - RNA, 14 nt, Human
ugucaaaaaaaaaa

SEQ ID NO: 2602172 - RNA, 23 nt, Human
ugucaaaaaugucuuggguaggc

SEQ ID NO: 2602173 - RNA, 15 nt, Human
ugucaaaauaauuuu

SEQ ID NO: 2602174 - RNA, 16 nt, Human
ugucaaacaaagccag

SEQ ID NO: 2602175 - RNA, 17 nt, Human
ugucaaacaaagccaga

SEQ ID NO: 2602176 - RNA, 21 nt, Human
ugucaaacaaagccagaagcu

SEQ ID NO: 2602177 - RNA, 22 nt, Human
ugucaaacaaagccagaagcug

SEQ ID NO: 2602178 - RNA, 18 nt, Human
ugucaaggcugcuuagaa

SEQ ID NO: 2602179 - RNA, 19 nt, Human
ugucaaggcugcuuagaau

SEQ ID NO: 2602180 - RNA, 16 nt, Human
ugucaagucucugcug

SEQ ID NO: 2602181 - RNA, 22 nt, Human
uguauuacaaauccaaugaaau

SEQ ID NO: 2602182 - RNA, 21 nt, Human
uguauuaauauucauuguaua

SEQ ID NO: 2602183 - RNA, 21 nt, Human
uguauuccaagacaugucugu

SEQ ID NO: 2602184 - RNA, 20 nt, Human
uguauucuagcuaauguaau

SEQ ID NO: 2602185 - RNA, 17 nt, Human
uguauucccaguuacuu

SEQ ID NO: 2602186 - RNA, 13 nt, Human
uguauuacaaauc

SEQ ID NO: 2602187 - RNA, 19 nt, Human
uguauguuuugguaucugu

SEQ ID NO: 2602188 - RNA, 14 nt, Human
uguauguuugcaca

SEQ ID NO: 2602189 - RNA, 16 nt, Human
uguauguuugcacacu

SEQ ID NO: 2602190 - RNA, 11 nt, Human
uguauguuuug

SEQ ID NO: 2602191 - RNA, 22 nt, Human
uguauguuugcacacuugugug

SEQ ID NO: 2602192 - RNA, 16 nt, Human
uguauguuuacauauc

SEQ ID NO: 2602193 - RNA, 15 nt, Human
uguauguuuacauau

SEQ ID NO: 2602194 - RNA, 13 nt, Human
uguauguuuacau

SEQ ID NO: 2602195 - RNA, 11 nt, Human
uguauguuuac

SEQ ID NO: 2602196 - RNA, 19 nt, Human
agguuuuaaguuguuugca

SEQ ID NO: 2602197 - RNA, 14 nt, Human
agguuuuaaguugu

SEQ ID NO: 2602198 - RNA, 21 nt, Human
agguuuuaaagugauuaaacg

SEQ ID NO: 2602199 - RNA, 17 nt, Human
agguuuuaaagugauua

SEQ ID NO: 2602200 - RNA, 15 nt, Human
agguuuuaaagugau

SEQ ID NO: 2602201 - RNA, 16 nt, Human
uguagaggagaaacug

SEQ ID NO: 2602202 - RNA, 23 nt, Human
agguuuguuuagaagaagugugu

SEQ ID NO: 2602203 - RNA, 14 nt, Human
uguagagcuucugg

SEQ ID NO: 2602204 - RNA, 18 nt, Human
uguagagccagggucuca

SEQ ID NO: 2602205 - RNA, 16 nt, Human
uguagagccagggucu

SEQ ID NO: 2602206 - RNA, 14 nt, Human
uguacuuuguacaa

SEQ ID NO: 2602207 - RNA, 21 nt, Human
uguagaaaugguuguauuaga

SEQ ID NO: 2602208 - RNA, 13 nt, Human
uguagaaaugguu

SEQ ID NO: 2602209 - RNA, 23 nt, Human
uguagaaaauuuguuauuuugca

SEQ ID NO: 2602210 - RNA, 21 nt, Human
uguagaaaugaugauguggaa

SEQ ID NO: 2602211 - RNA, 23 nt, Human
uguagaaaagggaacugaacauu

SEQ ID NO: 2602212 - RNA, 22 nt, Human
agguuuacaauuuacaaagugu

SEQ ID NO: 2602213 - RNA, 18 nt, Human
agguuuacaauuuacaaa

SEQ ID NO: 2602214 - RNA, 23 nt, Human
agguuuacaauuuacaaagugug

SEQ ID NO: 2602215 - RNA, 18 nt, Human
agguuuaggcugguggcc

SEQ ID NO: 2602216 - RNA, 20 nt, Human
agguuuaggcugguggccca

SEQ ID NO: 2602217 - RNA, 21 nt, Human
agguuuaggcugguggcccag

SEQ ID NO: 2602218 - RNA, 19 nt, Human
uguacuugcucuugaugcc

SEQ ID NO: 2602219 - RNA, 23 nt, Human
uguacuugcucuugaugccuggc

SEQ ID NO: 2602220 - RNA, 22 nt, Human
uguacuugcucuugaugccugg

SEQ ID NO: 2602221 - RNA, 21 nt, Human
uguagaaaagggaacugaaca

SEQ ID NO: 2602222 - RNA, 20 nt, Human
uguagaaaagggaacugaac

SEQ ID NO: 2602223 - RNA, 19 nt, Human
uguagaaaagggaacugaa

SEQ ID NO: 2602224 - RNA, 18 nt, Human
uguagaaaagggaacuga

SEQ ID NO: 2602225 - RNA, 15 nt, Human
uguacuugucaaaga

SEQ ID NO: 2602226 - RNA, 22 nt, Human
uguacuuggaguauuggggucu

SEQ ID NO: 2602227 - RNA, 11 nt, Human
uguacuuugug

SEQ ID NO: 2602228 - RNA, 22 nt, Human
agguuuuucaauuaaacggauu

SEQ ID NO: 2602229 - RNA, 21 nt, Human
agguuuuucaauuaaacggau

SEQ ID NO: 2602230 - RNA, 20 nt, Human
agguuuuucaauuaaacgga

SEQ ID NO: 2602231 - RNA, 18 nt, Human
agguuuuucaauuaaacg

SEQ ID NO: 2602232 - RNA, 17 nt, Human
agguuuuucaauuaaac

SEQ ID NO: 2602233 - RNA, 16 nt, Human
agguuuuucaauuaaa

SEQ ID NO: 2602234 - RNA, 15 nt, Human
agguuuuucaauuaa

SEQ ID NO: 2602235 - RNA, 14 nt, Human
agguuuuucaauua

SEQ ID NO: 2602236 - RNA, 23 nt, Human
agguuuuucaauuaaacggauua

SEQ ID NO: 2602237 - RNA, 13 nt, Human
agguuuuucuuaa

SEQ ID NO: 2602238 - RNA, 20 nt, Human
agguuuuuggaauuaugucu

SEQ ID NO: 2602239 - RNA, 14 nt, Human
agguuuuauuuugu

SEQ ID NO: 2602240 - RNA, 13 nt, Human
agguuuuuauuag

SEQ ID NO: 2602241 - RNA, 14 nt, Human
agguuuuuaagccu

SEQ ID NO: 2602242 - RNA, 13 nt, Human
agguuuuucaauu

SEQ ID NO: 2602243 - RNA, 12 nt, Human
agguuuuucaau

SEQ ID NO: 2602244 - RNA, 15 nt, Human
agguuuuuauuagua

SEQ ID NO: 2602245 - RNA, 20 nt, Human
agguuuuuauuaguaccaua

SEQ ID NO: 2602246 - RNA, 17 nt, Human
agguuuuauaaggcuga

SEQ ID NO: 2602247 - RNA, 13 nt, Human
aguaaaauccaca

SEQ ID NO: 2602248 - RNA, 19 nt, Human
agguuuuuguuuguuuccu

SEQ ID NO: 2602249 - RNA, 14 nt, Human
aguaaaacuugcug

SEQ ID NO: 2602250 - RNA, 20 nt, Human
aguaaugauaacuggaaacu

SEQ ID NO: 2602251 - RNA, 18 nt, Human
aguaaugauaacuggaaa

SEQ ID NO: 2602252 - RNA, 17 nt, Human
aguaaugauaacuggaa

SEQ ID NO: 2602253 - RNA, 14 nt, Human
aguaauaugcacac

SEQ ID NO: 2602254 - RNA, 15 nt, Human
aguaauaugcacaca

SEQ ID NO: 2602255 - RNA, 14 nt, Human
aguaauagagcaaa

SEQ ID NO: 2602256 - RNA, 22 nt, Human
aguaccuccugucucuggccug

SEQ ID NO: 2602257 - RNA, 12 nt, Human
aguaccuccugu

SEQ ID NO: 2602258 - RNA, 17 nt, Human
aguagaagucuuagaug

SEQ ID NO: 2602259 - RNA, 21 nt, Human
aguagaagucuuagauguaua

SEQ ID NO: 2602260 - RNA, 19 nt, Human
aguagaagucuuagaugua

SEQ ID NO: 2602261 - RNA, 20 nt, Human
aguagaagucuuagauguau

SEQ ID NO: 2602262 - RNA, 19 nt, Human
aguacccucucagcuccag

SEQ ID NO: 2602263 - RNA, 18 nt, Human
aguacccucucagcucca

SEQ ID NO: 2602264 - RNA, 16 nt, Human
aguacccucucagcuc

SEQ ID NO: 2602265 - RNA, 19 nt, Human
aguacccguucacauuuuu

SEQ ID NO: 2602266 - RNA, 15 nt, Human
aguaccuauaaagua

SEQ ID NO: 2602267 - RNA, 15 nt, Human
aguaccuccugcccc

SEQ ID NO: 2602268 - RNA, 23 nt, Human
aguaccuauaaaguaaagcuaaa

SEQ ID NO: 2602269 - RNA, 21 nt, Human
aguaccuauaaaguaaagcua

SEQ ID NO: 2602270 - RNA, 16 nt, Human
aguacauuuggagaca

SEQ ID NO: 2602271 - RNA, 21 nt, Human
aguacccaaaagcucagccag

SEQ ID NO: 2602272 - RNA, 15 nt, Human
aguacccaaaagcuc

SEQ ID NO: 2602273 - RNA, 14 nt, Human
aguaccauuuauac

SEQ ID NO: 2602274 - RNA, 21 nt, Human
aguaccauuuauacaaauuag

SEQ ID NO: 2602275 - RNA, 22 nt, Human
aguacccaaaagcucagccagc

SEQ ID NO: 2602276 - RNA, 21 nt, Human
aguaauggguuucauauuucu

SEQ ID NO: 2602277 - RNA, 15 nt, Human
aguaauggguuucau

SEQ ID NO: 2602278 - RNA, 21 nt, Human
aguaaugcuacgugugauuuu

SEQ ID NO: 2602279 - RNA, 20 nt, Human
aguaaugcuacgugugauuu

SEQ ID NO: 2602280 - RNA, 19 nt, Human
aguaaugcuacgugugauu

SEQ ID NO: 2602281 - RNA, 18 nt, Human
aguaaugcuacgugugau

SEQ ID NO: 2602282 - RNA, 17 nt, Human
aguaaugcuacguguga

SEQ ID NO: 2602283 - RNA, 23 nt, Human
aguaauggguuucauauuucuua

SEQ ID NO: 2602284 - RNA, 22 nt, Human
aguaauggguuucauauuucuu

SEQ ID NO: 2602285 - RNA, 15 nt, Human
aguaauucaagaaaa

SEQ ID NO: 2602286 - RNA, 13 nt, Human
aguaauuaucggg

SEQ ID NO: 2602287 - RNA, 23 nt, Human
aguacagguaaggugagggaaua

SEQ ID NO: 2602288 - RNA, 22 nt, Human
aguaauuaucgggaacaguguu

SEQ ID NO: 2602289 - RNA, 20 nt, Human
aguaauuaucgggaacagug

SEQ ID NO: 2602290 - RNA, 21 nt, Human
aguacagguaaggugagggaa

SEQ ID NO: 2602291 - RNA, 18 nt, Human
aguacauauuaggaaaau

SEQ ID NO: 2602292 - RNA, 22 nt, Human
aguacauaaaggugguaugugu

SEQ ID NO: 2602293 - RNA, 17 nt, Human
aguacauauuaggaaaa

SEQ ID NO: 2602294 - RNA, 21 nt, Human
aguacauuuaauacagcagug

SEQ ID NO: 2602295 - RNA, 13 nt, Human
aguacauuuaaua

SEQ ID NO: 2602296 - RNA, 12 nt, Human
aguacauuuaau

SEQ ID NO: 2602297 - RNA, 14 nt, Human
aguacauguuaaac

SEQ ID NO: 2602298 - RNA, 20 nt, Human
uguaggcauaaagucagggg

SEQ ID NO: 2602299 - RNA, 17 nt, Human
uguaggcauaaagucag

SEQ ID NO: 2602300 - RNA, 16 nt, Human
uguaggcagacacagg

SEQ ID NO: 2602301 - RNA, 15 nt, Human
uguaggcagacacag

SEQ ID NO: 2602302 - RNA, 14 nt, Human
uguaggcagacaca

SEQ ID NO: 2602303 - RNA, 13 nt, Human
uguaggcagacac

SEQ ID NO: 2602304 - RNA, 17 nt, Human
uguaggcuuaguuugug

SEQ ID NO: 2602305 - RNA, 19 nt, Human
uguaguaauugacaugugc

SEQ ID NO: 2602306 - RNA, 18 nt, Human
uguaguaauugacaugug

SEQ ID NO: 2602307 - RNA, 13 nt, Human
uguagggagggcg

SEQ ID NO: 2602308 - RNA, 12 nt, Human
uguagggaacuc

SEQ ID NO: 2602309 - RNA, 23 nt, Human
uguaguaucaaauauuagaugug

SEQ ID NO: 2602310 - RNA, 21 nt, Human
uguaguaucaaauauuagaug

SEQ ID NO: 2602311 - RNA, 19 nt, Human
uguaguaucaaauauuaga

SEQ ID NO: 2602312 - RNA, 18 nt, Human
uguaguaucaaauauuag

SEQ ID NO: 2602313 - RNA, 18 nt, Human
uguaguagcccuuucugu

SEQ ID NO: 2602314 - RNA, 20 nt, Human
uguaggccaaauuuguagug

SEQ ID NO: 2602315 - RNA, 13 nt, Human
uguaguagucuca

SEQ ID NO: 2602316 - RNA, 14 nt, Human
uguaguaucaaaua

SEQ ID NO: 2602317 - RNA, 14 nt, Human
uguaguagucucau

SEQ ID NO: 2602318 - RNA, 15 nt, Human
uguaguauaaagaaa

SEQ ID NO: 2602319 - RNA, 12 nt, Human
uguaggcagaca

SEQ ID NO: 2602320 - RNA, 11 nt, Human
uguaggcagac

SEQ ID NO: 2602321 - RNA, 17 nt, Human
aguagccgagagccugc

SEQ ID NO: 2602322 - RNA, 18 nt, Human
aguagccgagagccugcu

SEQ ID NO: 2602323 - RNA, 22 nt, Human
aguagccuaacacacuccaaga

SEQ ID NO: 2602324 - RNA, 19 nt, Human
aguagccgagagccugcuc

SEQ ID NO: 2602325 - RNA, 19 nt, Human
aguagcccuuucugugugc

SEQ ID NO: 2602326 - RNA, 17 nt, Human
aguagcccuuucugugu

SEQ ID NO: 2602327 - RNA, 16 nt, Human
aguagcccuuucugug

SEQ ID NO: 2602328 - RNA, 22 nt, Human
aguagccaggguguggcccugc

SEQ ID NO: 2602329 - RNA, 21 nt, Human
aguagcccuuucugugugcac

SEQ ID NO: 2602330 - RNA, 20 nt, Human
aguagcccuuucugugugca

SEQ ID NO: 2602331 - RNA, 15 nt, Human
aguagccgagagccu

SEQ ID NO: 2602332 - RNA, 16 nt, Human
aguagccgagagccug

SEQ ID NO: 2602333 - RNA, 23 nt, Human
aguagccaggguguggcccugcc

SEQ ID NO: 2602334 - RNA, 15 nt, Human
aguagcccuuucugu

SEQ ID NO: 2602335 - RNA, 15 nt, Human
aguagcauuucauuc

SEQ ID NO: 2602336 - RNA, 14 nt, Human
aguagcauuucauu

SEQ ID NO: 2602337 - RNA, 13 nt, Human
aguagcauuucau

SEQ ID NO: 2602338 - RNA, 22 nt, Human
aguagacauuucucuuacugca

SEQ ID NO: 2602339 - RNA, 15 nt, Human
aguagaauugcauug

SEQ ID NO: 2602340 - RNA, 21 nt, Human
aguagaccuuguuacuucuga

SEQ ID NO: 2602341 - RNA, 20 nt, Human
aguagaccuuguuacuucug

SEQ ID NO: 2602342 - RNA, 14 nt, Human
aguagaauugcauu

SEQ ID NO: 2602343 - RNA, 11 nt, Human
aguagagacag

SEQ ID NO: 2602344 - RNA, 23 nt, Human
aguagaccuuguuacuucugagg

SEQ ID NO: 2602345 - RNA, 20 nt, Human
aguagcauguugagccaggc

SEQ ID NO: 2602346 - RNA, 15 nt, Human
aggugacagagugag

SEQ ID NO: 2602347 - RNA, 13 nt, Human
aggugacagagug

SEQ ID NO: 2602348 - RNA, 17 nt, Human
aggucuugaacuccugg

SEQ ID NO: 2602349 - RNA, 20 nt, Human
aggucuucaucgaaucuacu

SEQ ID NO: 2602350 - RNA, 21 nt, Human
aggucuucaucgaaucuacua

SEQ ID NO: 2602351 - RNA, 13 nt, Human
aggugaccccagg

SEQ ID NO: 2602352 - RNA, 20 nt, Human
aggugaccaaaauccccuuc

SEQ ID NO: 2602353 - RNA, 20 nt, Human
aggugacaugugaaaccuuu

SEQ ID NO: 2602354 - RNA, 16 nt, Human
aggugacaugugaaac

SEQ ID NO: 2602355 - RNA, 15 nt, Human
aggugacaugugaaa

SEQ ID NO: 2602356 - RNA, 14 nt, Human
aggugacaugugaa

SEQ ID NO: 2602357 - RNA, 22 nt, Human
aggugacagagugagacucugu

SEQ ID NO: 2602358 - RNA, 22 nt, Human
aggugagcaaccaguuggcuag

SEQ ID NO: 2602359 - RNA, 21 nt, Human
aggugagcaaccaguuggcua

SEQ ID NO: 2602360 - RNA, 20 nt, Human
aggugagcccauggcccucc

SEQ ID NO: 2602361 - RNA, 18 nt, Human
aggugagcacggccaaca

SEQ ID NO: 2602362 - RNA, 22 nt, Human
aggugagcacggccaacaaagc

SEQ ID NO: 2602363 - RNA, 13 nt, Human
aggugagggaagc

SEQ ID NO: 2602364 - RNA, 21 nt, Human
aggugagaagcagaggaagga

SEQ ID NO: 2602365 - RNA, 23 nt, Human
aggugagaagcagaggaaggaga

SEQ ID NO: 2602366 - RNA, 22 nt, Human
aggugacugggcccugccucug

SEQ ID NO: 2602367 - RNA, 20 nt, Human
aggugacugggcccugccuc

SEQ ID NO: 2602368 - RNA, 16 nt, Human
aggugagaagcagagg

SEQ ID NO: 2602369 - RNA, 19 nt, Human
aggugacccaaugauucag

SEQ ID NO: 2602370 - RNA, 22 nt, Human
aggugaccaaaauccccuucuc

SEQ ID NO: 2602371 - RNA, 19 nt, Human
aggugaccaaaucagugug

SEQ ID NO: 2602372 - RNA, 19 nt, Human
aggugacugggcccugccu

SEQ ID NO: 2602373 - RNA, 20 nt, Human
aggugaccuugcaacuucau

SEQ ID NO: 2602374 - RNA, 16 nt, Human
aggugaccuucuggga

SEQ ID NO: 2602375 - RNA, 22 nt, Human
agguccagcccuggcugaagga

SEQ ID NO: 2602376 - RNA, 21 nt, Human
agguccagcccuggcugaagg

SEQ ID NO: 2602377 - RNA, 20 nt, Human
agguccagcccuggcugaag

SEQ ID NO: 2602378 - RNA, 18 nt, Human
agguccagcccuggcuga

SEQ ID NO: 2602379 - RNA, 14 nt, Human
agguccagcucugg

SEQ ID NO: 2602380 - RNA, 13 nt, Human
agguccagcucug

SEQ ID NO: 2602381 - RNA, 17 nt, Human
agguccagcccuggcug

SEQ ID NO: 2602382 - RNA, 16 nt, Human
agguccagcccuggcu

SEQ ID NO: 2602383 - RNA, 22 nt, Human
agguccacggucuguucuugaa

SEQ ID NO: 2602384 - RNA, 21 nt, Human
agguccacggucuguucuuga

SEQ ID NO: 2602385 - RNA, 23 nt, Human
agguccagcccuggcugaaggac

SEQ ID NO: 2602386 - RNA, 16 nt, Human
aggucuucagccauca

SEQ ID NO: 2602387 - RNA, 17 nt, Human
agguccagcucuggagg

SEQ ID NO: 2602388 - RNA, 16 nt, Human
agguccagcucuggag

SEQ ID NO: 2602389 - RNA, 15 nt, Human
agguccagcucugga

SEQ ID NO: 2602390 - RNA, 16 nt, Human
aggucuugaacuccug

SEQ ID NO: 2602391 - RNA, 15 nt, Human
uggucacugcuguca

SEQ ID NO: 2602392 - RNA, 14 nt, Human
uggucacugcuguc

SEQ ID NO: 2602393 - RNA, 15 nt, Human
aggucagcaugucua

SEQ ID NO: 2602394 - RNA, 19 nt, Human
aggucagcgugcuuagccu

SEQ ID NO: 2602395 - RNA, 16 nt, Human
aggucagcaugucuau

SEQ ID NO: 2602396 - RNA, 16 nt, Human
aggucagcuugcugcc

SEQ ID NO: 2602397 - RNA, 18 nt, Human
aggucagcuugcugcccu

SEQ ID NO: 2602398 - RNA, 19 nt, Human
agguccacaacacacagau

SEQ ID NO: 2602399 - RNA, 15 nt, Human
aggucaggaguuccu

SEQ ID NO: 2602400 - RNA, 19 nt, Human
aggucaggaguuagaggcc

SEQ ID NO: 2602401 - RNA, 21 nt, Human
aggucaggaguuagaggccag

SEQ ID NO: 2602402 - RNA, 16 nt, Human
aggucaggaguuccua

SEQ ID NO: 2602403 - RNA, 18 nt, Human
aggucagagccugcaguu

SEQ ID NO: 2602404 - RNA, 17 nt, Human
aggucagagccugcagu

SEQ ID NO: 2602405 - RNA, 15 nt, Human
aggucagagccugca

SEQ ID NO: 2602406 - RNA, 14 nt, Human
aggucagagccugc

SEQ ID NO: 2602407 - RNA, 13 nt, Human
aggucagagccug

SEQ ID NO: 2602408 - RNA, 16 nt, Human
uggucagauuugaacu

SEQ ID NO: 2602409 - RNA, 15 nt, Human
uggucagauuugaac

SEQ ID NO: 2602410 - RNA, 13 nt, Human
uggucacugcugu

SEQ ID NO: 2602411 - RNA, 14 nt, Human
ugguagcucaggug

SEQ ID NO: 2602412 - RNA, 22 nt, Human
uggucacugccauggaggcaca

SEQ ID NO: 2602413 - RNA, 14 nt, Human
uggucacugccaug

SEQ ID NO: 2602414 - RNA, 13 nt, Human
uggucacugccau

SEQ ID NO: 2602415 - RNA, 17 nt, Human
uggugcuguggccaggg

SEQ ID NO: 2602416 - RNA, 13 nt, Human
uggugcuguggcc

SEQ ID NO: 2602417 - RNA, 12 nt, Human
uggugcuguggc

SEQ ID NO: 2602418 - RNA, 19 nt, Human
uggugcugggacugagcca

SEQ ID NO: 2602419 - RNA, 16 nt, Human
uggugcugggacugag

SEQ ID NO: 2602420 - RNA, 21 nt, Human
uggugcugggacugagccagu

SEQ ID NO: 2602421 - RNA, 22 nt, Human
uggugcuuacacaucucagacc

SEQ ID NO: 2602422 - RNA, 20 nt, Human
uggugcuguggccaggguga

SEQ ID NO: 2602423 - RNA, 18 nt, Human
ugguggaagaggggacag

SEQ ID NO: 2602424 - RNA, 21 nt, Human
ugguggagaggcccggccucu

SEQ ID NO: 2602425 - RNA, 16 nt, Human
ugguggacaguccugg

SEQ ID NO: 2602426 - RNA, 17 nt, Human
ugguggacaguccuggg

SEQ ID NO: 2602427 - RNA, 13 nt, Human
ugguggagggcca

SEQ ID NO: 2602428 - RNA, 18 nt, Human
ugguggacaguccuggga

SEQ ID NO: 2602429 - RNA, 16 nt, Human
ugguggcaagagcccc

SEQ ID NO: 2602430 - RNA, 19 nt, Human
ugguggaagaggggacagg

SEQ ID NO: 2602431 - RNA, 12 nt, Human
ugguggcagugg

SEQ ID NO: 2602432 - RNA, 15 nt, Human
ugguggcagcugcgg

SEQ ID NO: 2602433 - RNA, 13 nt, Human
ugguggcagcugc

SEQ ID NO: 2602434 - RNA, 14 nt, Human
ugguggcagcugcg

SEQ ID NO: 2602435 - RNA, 14 nt, Human
uggugugaacuaaa

SEQ ID NO: 2602436 - RNA, 22 nt, Human
uggugugaacuaaacuuucaca

SEQ ID NO: 2602437 - RNA, 12 nt, Human
uggugugaaggu

SEQ ID NO: 2602438 - RNA, 11 nt, Human
uggugugaagg

SEQ ID NO: 2602439 - RNA, 23 nt, Human
uggugugaacuaaacuuucacac

SEQ ID NO: 2602440 - RNA, 23 nt, Human
uggugugaccacugcagaagaca

SEQ ID NO: 2602441 - RNA, 20 nt, Human
uggugucuccaaccccccag

SEQ ID NO: 2602442 - RNA, 19 nt, Human
uggugucuccaacccccca

SEQ ID NO: 2602443 - RNA, 15 nt, Human
ugguggcacaggccc

SEQ ID NO: 2602444 - RNA, 11 nt, Human
uggugucucca

SEQ ID NO: 2602445 - RNA, 19 nt, Human
uggugucuggauucccagg

SEQ ID NO: 2602446 - RNA, 15 nt, Human
uggugugaaagucag

SEQ ID NO: 2602447 - RNA, 20 nt, Human
ugguuaggcauugugggaag

SEQ ID NO: 2602448 - RNA, 18 nt, Human
ugguuaggcauuguggga

SEQ ID NO: 2602449 - RNA, 13 nt, Human
ugguuagaaaugc

SEQ ID NO: 2602450 - RNA, 14 nt, Human
ugguuagaaaugca

SEQ ID NO: 2602451 - RNA, 13 nt, Human
ugguuagaaaagu

SEQ ID NO: 2602452 - RNA, 13 nt, Human
ugguuaaugccau

SEQ ID NO: 2602453 - RNA, 18 nt, Human
uggugcugccacacuuca

SEQ ID NO: 2602454 - RNA, 15 nt, Human
uggugcugagaagcu

SEQ ID NO: 2602455 - RNA, 19 nt, Human
uggugcugcugcugcugug

SEQ ID NO: 2602456 - RNA, 12 nt, Human
uggugcuggaua

SEQ ID NO: 2602457 - RNA, 17 nt, Human
uggugcuggauauuuuc

SEQ ID NO: 2602458 - RNA, 21 nt, Human
uggugcuggauauuuucaaau

SEQ ID NO: 2602459 - RNA, 15 nt, Human
uggugcugggacuga

SEQ ID NO: 2602460 - RNA, 14 nt, Human
uggugcugggacug

SEQ ID NO: 2602461 - RNA, 13 nt, Human
uggugcugggacu

SEQ ID NO: 2602462 - RNA, 18 nt, Human
uggugcuggauauuuuca

SEQ ID NO: 2602463 - RNA, 13 nt, Human
uggugcugaccuc

SEQ ID NO: 2602464 - RNA, 16 nt, Human
uggugcucucugccac

SEQ ID NO: 2602465 - RNA, 15 nt, Human
uggugcugaccucug

SEQ ID NO: 2602466 - RNA, 13 nt, Human
uggugcugagaag

SEQ ID NO: 2602467 - RNA, 13 nt, Human
uggugcugccaca

SEQ ID NO: 2602468 - RNA, 14 nt, Human
uggugcucaguugu

SEQ ID NO: 2602469 - RNA, 11 nt, Human
uggugcucagu

SEQ ID NO: 2602470 - RNA, 23 nt, Human
uggugcuauaggcuggagaagcu

SEQ ID NO: 2602471 - RNA, 22 nt, Human
uggugcuauaggcuggagaagc

SEQ ID NO: 2602472 - RNA, 17 nt, Human
uggugcucaguuguaga

SEQ ID NO: 2602473 - RNA, 15 nt, Human
uggugcucaguugua

SEQ ID NO: 2602474 - RNA, 21 nt, Human
uggugcucaguuguagaaugu

SEQ ID NO: 2602475 - RNA, 15 nt, Human
uggugcucucugcca

SEQ ID NO: 2602476 - RNA, 17 nt, Human
uggugcgaucuggguuc

SEQ ID NO: 2602477 - RNA, 18 nt, Human
uggugcuauaggcuggag

SEQ ID NO: 2602478 - RNA, 16 nt, Human
uggugcuacgccugca

SEQ ID NO: 2602479 - RNA, 16 nt, Human
uggugcgaucuggguu

SEQ ID NO: 2602480 - RNA, 11 nt, Human
uggugccuuca

SEQ ID NO: 2602481 - RNA, 21 nt, Human
uggugccugauucggcugucu

SEQ ID NO: 2602482 - RNA, 12 nt, Human
uggugccuucau

SEQ ID NO: 2602483 - RNA, 14 nt, Human
uggugccuucauuu

SEQ ID NO: 2602484 - RNA, 24 nt, Human
uggugccuggccuggcacacauca

SEQ ID NO: 2602485 - RNA, 23 nt, Human
uggugccuggccuggcacacauc

SEQ ID NO: 2602486 - RNA, 22 nt, Human
uggugccuggccuggcacacau

SEQ ID NO: 2602487 - RNA, 19 nt, Human
uggugccuggccuggcaca

SEQ ID NO: 2602488 - RNA, 18 nt, Human
uggugccuggccuggcac

SEQ ID NO: 2602489 - RNA, 17 nt, Human
uggugccuggccuggca

SEQ ID NO: 2602490 - RNA, 14 nt, Human
uggugccuggccug

SEQ ID NO: 2602491 - RNA, 13 nt, Human
uggugccuggccu

SEQ ID NO: 2602492 - RNA, 18 nt, Human
uggugccugagaggcagg

SEQ ID NO: 2602493 - RNA, 17 nt, Human
uggugccugagaggcag

SEQ ID NO: 2602494 - RNA, 15 nt, Human
uggugccugagaggc

SEQ ID NO: 2602495 - RNA, 14 nt, Human
uggugccugagagg

SEQ ID NO: 2602496 - RNA, 20 nt, Human
uggugccugagaggcaggca

SEQ ID NO: 2602497 - RNA, 19 nt, Human
uggugccugagaggcaggc

SEQ ID NO: 2602498 - RNA, 12 nt, Human
uggugccuggcc

SEQ ID NO: 2602499 - RNA, 22 nt, Human
uggugccuaaaguuuaaccaaa

SEQ ID NO: 2602500 - RNA, 13 nt, Human
uggugccugagag

SEQ ID NO: 2602501 - RNA, 10 nt, Human
uggugccuga

SEQ ID NO: 2602502 - RNA, 20 nt, Human
uggugcccuguucucuacca

SEQ ID NO: 2602503 - RNA, 19 nt, Human
aggugaguuugagcugccu

SEQ ID NO: 2602504 - RNA, 13 nt, Human
aggugagggaugu

SEQ ID NO: 2602505 - RNA, 21 nt, Human
aggugaguuugagcugccuuc

SEQ ID NO: 2602506 - RNA, 20 nt, Human
aggugaguuugagcugccuu

SEQ ID NO: 2602507 - RNA, 22 nt, Human
aggugaguuugagcugccuucc

SEQ ID NO: 2602508 - RNA, 18 nt, Human
aggugauauauuuaaaaa

SEQ ID NO: 2602509 - RNA, 18 nt, Human
aggugauauccauucuuu

SEQ ID NO: 2602510 - RNA, 19 nt, Human
aggugauauccauucuuuc

SEQ ID NO: 2602511 - RNA, 22 nt, Human
aggugauauccauucuuucuga

SEQ ID NO: 2602512 - RNA, 20 nt, Human
aggugcauauuuauaaaaau

SEQ ID NO: 2602513 - RNA, 21 nt, Human
aggugcaucuggggaacuaga

SEQ ID NO: 2602514 - RNA, 23 nt, Human
aggugcaucuggggaacuagagg

SEQ ID NO: 2602515 - RNA, 20 nt, Human
aggugauccacccaccucag

SEQ ID NO: 2602516 - RNA, 14 nt, Human
aggugauccaccca

SEQ ID NO: 2602517 - RNA, 18 nt, Human
aggugcccagaaugaggc

SEQ ID NO: 2602518 - RNA, 22 nt, Human
aggugcccagaaugaggcugcu

SEQ ID NO: 2602519 - RNA, 17 nt, Human
aggugcccaucccugga

SEQ ID NO: 2602520 - RNA, 17 nt, Human
aggugccccaaaaugca

SEQ ID NO: 2602521 - RNA, 15 nt, Human
aggugccagcaacug

SEQ ID NO: 2602522 - RNA, 14 nt, Human
aggugccagcaacu

SEQ ID NO: 2602523 - RNA, 20 nt, Human
aggugccagcaaagccccau

SEQ ID NO: 2602524 - RNA, 19 nt, Human
aggugccagcaaagcccca

SEQ ID NO: 2602525 - RNA, 18 nt, Human
aggugccagcaaagcccc

SEQ ID NO: 2602526 - RNA, 16 nt, Human
aggugccagcaaagcc

SEQ ID NO: 2602527 - RNA, 21 nt, Human
aggugccagcaacugaauaaa

SEQ ID NO: 2602528 - RNA, 20 nt, Human
aggugccagcaacugaauaa

SEQ ID NO: 2602529 - RNA, 19 nt, Human
aggugccagcaacugaaua

SEQ ID NO: 2602530 - RNA, 18 nt, Human
aggugccagcaacugaau

SEQ ID NO: 2602531 - RNA, 21 nt, Human
aggugcccagaauaaguuauu

SEQ ID NO: 2602532 - RNA, 17 nt, Human
aggugggauccuccagg

SEQ ID NO: 2602533 - RNA, 16 nt, Human
aggugggauccuccag

SEQ ID NO: 2602534 - RNA, 23 nt, Human
agguggggcagcuugaggguugg

SEQ ID NO: 2602535 - RNA, 18 nt, Human
aggugggauccuccaggu

SEQ ID NO: 2602536 - RNA, 16 nt, Human
agguggggcagcuuga

SEQ ID NO: 2602537 - RNA, 15 nt, Human
aggugggauccucca

SEQ ID NO: 2602538 - RNA, 18 nt, Human
aggugccugucccacccc

SEQ ID NO: 2602539 - RNA, 17 nt, Human
aggugccugucccaccc

SEQ ID NO: 2602540 - RNA, 18 nt, Human
aggugccuccaggugugc

SEQ ID NO: 2602541 - RNA, 11 nt, Human
aggugccugug

SEQ ID NO: 2602542 - RNA, 17 nt, Human
aggugccugugaggcag

SEQ ID NO: 2602543 - RNA, 23 nt, Human
aggugggauaucccuaugcugcc

SEQ ID NO: 2602544 - RNA, 18 nt, Human
aggugccucaagagaagg

SEQ ID NO: 2602545 - RNA, 16 nt, Human
aggugccuccaggugu

SEQ ID NO: 2602546 - RNA, 15 nt, Human
aggugccuccaggug

SEQ ID NO: 2602547 - RNA, 14 nt, Human
aggugccuccaggu

SEQ ID NO: 2602548 - RNA, 12 nt, Human
aggugccuccag

SEQ ID NO: 2602549 - RNA, 19 nt, Human
aggugcccuuggaggccag

SEQ ID NO: 2602550 - RNA, 20 nt, Human
aggugcccuuggaggccagc

SEQ ID NO: 2602551 - RNA, 21 nt, Human
aggugcccuuggaggccagcc

SEQ ID NO: 2602552 - RNA, 22 nt, Human
aggugcccuuggaggccagcca

SEQ ID NO: 2602553 - RNA, 19 nt, Human
aggugucuuccucccaagu

SEQ ID NO: 2602554 - RNA, 16 nt, Human
aggugucuuccuccca

SEQ ID NO: 2602555 - RNA, 20 nt, Human
agguguggagccgaggccua

SEQ ID NO: 2602556 - RNA, 18 nt, Human
aggugugggggcugcagc

SEQ ID NO: 2602557 - RNA, 17 nt, Human
aggugugggggcugcag

SEQ ID NO: 2602558 - RNA, 16 nt, Human
aggugugggggcugca

SEQ ID NO: 2602559 - RNA, 14 nt, Human
aggugugggggcug

SEQ ID NO: 2602560 - RNA, 20 nt, Human
aggugucuuccucccaagug

SEQ ID NO: 2602561 - RNA, 22 nt, Human
agguucuccguuagcuccugug

SEQ ID NO: 2602562 - RNA, 21 nt, Human
agguucuccguuagcuccugu

SEQ ID NO: 2602563 - RNA, 20 nt, Human
agguucuccguuagcuccug

SEQ ID NO: 2602564 - RNA, 19 nt, Human
agguucuccguuagcuccu

SEQ ID NO: 2602565 - RNA, 17 nt, Human
agguucuauuuggaauu

SEQ ID NO: 2602566 - RNA, 15 nt, Human
agguucuauuuggaa

SEQ ID NO: 2602567 - RNA, 22 nt, Human
agguucucuccuccccaaggag

SEQ ID NO: 2602568 - RNA, 17 nt, Human
agguucucuccucccca

SEQ ID NO: 2602569 - RNA, 14 nt, Human
agguucucuccucc

SEQ ID NO: 2602570 - RNA, 17 nt, Human
agguucuggugugaacu

SEQ ID NO: 2602571 - RNA, 17 nt, Human
agguucuuagugucacu

SEQ ID NO: 2602572 - RNA, 15 nt, Human
agguuuaacucagau

SEQ ID NO: 2602573 - RNA, 17 nt, Human
agguuuacaauuuacaa

SEQ ID NO: 2602574 - RNA, 16 nt, Human
agguuuacaauuuaca

SEQ ID NO: 2602575 - RNA, 23 nt, Human
agguuuaacucagaucacuacug

SEQ ID NO: 2602576 - RNA, 20 nt, Human
agguuuaacucagaucacua

SEQ ID NO: 2602577 - RNA, 19 nt, Human
agguuuaacucagaucacu

SEQ ID NO: 2602578 - RNA, 18 nt, Human
agguuuaacucagaucac

SEQ ID NO: 2602579 - RNA, 17 nt, Human
agguuuaacucagauca

SEQ ID NO: 2602580 - RNA, 14 nt, Human
agguuuaagcuguu

SEQ ID NO: 2602581 - RNA, 23 nt, Human
aggugggguauuuaccacagcag

SEQ ID NO: 2602582 - RNA, 21 nt, Human
agguggggcgggaaagccagu

SEQ ID NO: 2602583 - RNA, 19 nt, Human
agguggggucacucuggca

SEQ ID NO: 2602584 - RNA, 17 nt, Human
agguggggcgggaaagc

SEQ ID NO: 2602585 - RNA, 22 nt, Human
aggugggguauuuaccacagca

SEQ ID NO: 2602586 - RNA, 20 nt, Human
aggugugcucugaucaucca

SEQ ID NO: 2602587 - RNA, 15 nt, Human
aggugugcucugauc

SEQ ID NO: 2602588 - RNA, 17 nt, Human
aggugugaaccaccaca

SEQ ID NO: 2602589 - RNA, 17 nt, Human
aggugucugcacccagg

SEQ ID NO: 2602590 - RNA, 16 nt, Human
aggugucugcacccag

SEQ ID NO: 2602591 - RNA, 14 nt, Human
aggugucugcaccc

SEQ ID NO: 2602592 - RNA, 15 nt, Human
aggugucuuccuccc

SEQ ID NO: 2602593 - RNA, 21 nt, Human
aggugucugcacccaggggug

SEQ ID NO: 2602594 - RNA, 14 nt, Human
aggugucuuccucc

SEQ ID NO: 2602595 - RNA, 16 nt, Human
uguaaauaguauuuga

SEQ ID NO: 2602596 - RNA, 16 nt, Human
aggugauauauuuaaa

SEQ ID NO: 2602597 - RNA, 21 nt, Human
uguaaauacuguuuuuaacaa

SEQ ID NO: 2602598 - RNA, 16 nt, Human
uguaaauagcucaggu

SEQ ID NO: 2602599 - RNA, 15 nt, Human
uguaaauagcucagg

SEQ ID NO: 2602600 - RNA, 17 nt, Human
uguaaauaaaggaacca

SEQ ID NO: 2602601 - RNA, 18 nt, Human
uguaaauaaagcccuggg

SEQ ID NO: 2602602 - RNA, 19 nt, Human
uguaaauaaagaacuagca

SEQ ID NO: 2602603 - RNA, 14 nt, Human
uguaaauaaagccc

SEQ ID NO: 2602604 - RNA, 13 nt, Human
uguaaauaaagcc

SEQ ID NO: 2602605 - RNA, 17 nt, Human
uguaaaguuagucuacu

SEQ ID NO: 2602606 - RNA, 14 nt, Human
uguaaaguuagucu

SEQ ID NO: 2602607 - RNA, 12 nt, Human
uguaaaguuagu

SEQ ID NO: 2602608 - RNA, 22 nt, Human
uguaaaguguggucccaacagg

SEQ ID NO: 2602609 - RNA, 14 nt, Human
uguaaauaaaaaga

SEQ ID NO: 2602610 - RNA, 22 nt, Human
uguaaacuguguauuccaagac

SEQ ID NO: 2602611 - RNA, 13 nt, Human
uguaaacuuuuug

SEQ ID NO: 2602612 - RNA, 16 nt, Human
uguaaagaaagagaga

SEQ ID NO: 2602613 - RNA, 17 nt, Human
uguaaagaaagagagaa

SEQ ID NO: 2602614 - RNA, 18 nt, Human
uguaaagaaagagagaaa

SEQ ID NO: 2602615 - RNA, 19 nt, Human
uguaaagaaagagagaaaa

SEQ ID NO: 2602616 - RNA, 14 nt, Human
uguaaagaaagaga

SEQ ID NO: 2602617 - RNA, 15 nt, Human
uguaaagaaagagag

SEQ ID NO: 2602618 - RNA, 13 nt, Human
uguaaagaaagag

SEQ ID NO: 2602619 - RNA, 20 nt, Human
uguaaagaaagagagaaaau

SEQ ID NO: 2602620 - RNA, 21 nt, Human
uguaaagaaagagagaaaaua

SEQ ID NO: 2602621 - RNA, 16 nt, Human
uguaaaggagucaaaa

SEQ ID NO: 2602622 - RNA, 22 nt, Human
uguaaagaaagagagaaaauaa

SEQ ID NO: 2602623 - RNA, 16 nt, Human
uguaaaggaauuuaaa

SEQ ID NO: 2602624 - RNA, 19 nt, Human
uguaaaggagucaaaacua

SEQ ID NO: 2602625 - RNA, 21 nt, Human
uguaaaggagucaaaacuaca

SEQ ID NO: 2602626 - RNA, 19 nt, Human
uguaaaguaggaaaaauaa

SEQ ID NO: 2602627 - RNA, 13 nt, Human
uguaaaguguggu

SEQ ID NO: 2602628 - RNA, 12 nt, Human
uguaaagugugg

SEQ ID NO: 2602629 - RNA, 16 nt, Human
uguaaaguguaaaucc

SEQ ID NO: 2602630 - RNA, 17 nt, Human
uguaaaguguaaauccu

SEQ ID NO: 2602631 - RNA, 18 nt, Human
uguaaaguauguaaacag

SEQ ID NO: 2602632 - RNA, 23 nt, Human
ugguuuggggcgaggcagaggac

SEQ ID NO: 2602633 - RNA, 22 nt, Human
ugguuuggggcgaggcagagga

SEQ ID NO: 2602634 - RNA, 14 nt, Human
ugguuugcagauga

SEQ ID NO: 2602635 - RNA, 21 nt, Human
ugguuuuccccucccuggguu

SEQ ID NO: 2602636 - RNA, 20 nt, Human
ugguuuuccccucccugggu

SEQ ID NO: 2602637 - RNA, 19 nt, Human
uguaaacuguguauuccaa

SEQ ID NO: 2602638 - RNA, 18 nt, Human
ugguuuuccccucccugg

SEQ ID NO: 2602639 - RNA, 14 nt, Human
ugguuuuccccucc

SEQ ID NO: 2602640 - RNA, 15 nt, Human
ugguuuucaaaauaa

SEQ ID NO: 2602641 - RNA, 17 nt, Human
ugguuuucaaaauaaaa

SEQ ID NO: 2602642 - RNA, 15 nt, Human
ugguuuguaaauuaa

SEQ ID NO: 2602643 - RNA, 14 nt, Human
ugguuuucaaaaua

SEQ ID NO: 2602644 - RNA, 19 nt, Human
ugguuuggggcgaggcaga

SEQ ID NO: 2602645 - RNA, 23 nt, Human
ugguuuggcccuucuccuuuuga

SEQ ID NO: 2602646 - RNA, 22 nt, Human
ugguuuggcccuucuccuuuug

SEQ ID NO: 2602647 - RNA, 21 nt, Human
ugguuuggcccuucuccuuuu

SEQ ID NO: 2602648 - RNA, 20 nt, Human
ugguuuggccaucucuggau

SEQ ID NO: 2602649 - RNA, 19 nt, Human
ugguuuggccaucucugga

SEQ ID NO: 2602650 - RNA, 22 nt, Human
ugguuuggaaugcuucuucuca

SEQ ID NO: 2602651 - RNA, 16 nt, Human
ugguuuggaaugcuuc

SEQ ID NO: 2602652 - RNA, 14 nt, Human
ugguuugcuacuuc

SEQ ID NO: 2602653 - RNA, 14 nt, Human
ugguuuccugcccu

SEQ ID NO: 2602654 - RNA, 15 nt, Human
ugguuuccugcccug

SEQ ID NO: 2602655 - RNA, 17 nt, Human
ugguuugcagaugacaa

SEQ ID NO: 2602656 - RNA, 20 nt, Human
ugguuucccccuucuacauu

SEQ ID NO: 2602657 - RNA, 19 nt, Human
ugguuugcagaugacaaaa

SEQ ID NO: 2602658 - RNA, 20 nt, Human
ugguuuccugcccugggagg

SEQ ID NO: 2602659 - RNA, 12 nt, Human
ugguuuccugcc

SEQ ID NO: 2602660 - RNA, 13 nt, Human
ugguuuccugccc

SEQ ID NO: 2602661 - RNA, 17 nt, Human
ugguuucccccuucuac

SEQ ID NO: 2602662 - RNA, 19 nt, Human
ugguuuccucauuccugaa

SEQ ID NO: 2602663 - RNA, 14 nt, Human
ugguuauggagagg

SEQ ID NO: 2602664 - RNA, 16 nt, Human
ugguuauaaaagugau

SEQ ID NO: 2602665 - RNA, 20 nt, Human
ugguuauaaaagugauuguu

SEQ ID NO: 2602666 - RNA, 15 nt, Human
ugguuauaaaaguga

SEQ ID NO: 2602667 - RNA, 20 nt, Human
agggggugucucaggccaca

SEQ ID NO: 2602668 - RNA, 20 nt, Human
aggggguggccucccaacuc

SEQ ID NO: 2602669 - RNA, 19 nt, Human
agggguaggcagagccuuu

SEQ ID NO: 2602670 - RNA, 17 nt, Human
agggguaggcagagccu

SEQ ID NO: 2602671 - RNA, 14 nt, Human
aggggucaaagaaa

SEQ ID NO: 2602672 - RNA, 22 nt, Human
agggguacauuucccugugcug

SEQ ID NO: 2602673 - RNA, 19 nt, Human
agggguaauauauugcugc

SEQ ID NO: 2602674 - RNA, 20 nt, Human
aggggguuugcuggggaacu

SEQ ID NO: 2602675 - RNA, 16 nt, Human
aggggguuugggggcu

SEQ ID NO: 2602676 - RNA, 22 nt, Human
aggggguuugggggcuugcaag

SEQ ID NO: 2602677 - RNA, 15 nt, Human
agggguggagacugc

SEQ ID NO: 2602678 - RNA, 17 nt, Human
agggguggagacugcuu

SEQ ID NO: 2602679 - RNA, 23 nt, Human
aggggugcccccuccucucccau

SEQ ID NO: 2602680 - RNA, 18 nt, Human
aggggugggacacccugu

SEQ ID NO: 2602681 - RNA, 21 nt, Human
aggggugcccccuccucuccc

SEQ ID NO: 2602682 - RNA, 20 nt, Human
aggggugcccccuccucucc

SEQ ID NO: 2602683 - RNA, 17 nt, Human
aggggugcccccuccuc

SEQ ID NO: 2602684 - RNA, 16 nt, Human
aggggugcccccuccu

SEQ ID NO: 2602685 - RNA, 13 nt, Human
aggggugcccccu

SEQ ID NO: 2602686 - RNA, 11 nt, Human
aggggugcccc

SEQ ID NO: 2602687 - RNA, 22 nt, Human
aggggugauuucagagagggca

SEQ ID NO: 2602688 - RNA, 16 nt, Human
aggggucaaagaaaug

SEQ ID NO: 2602689 - RNA, 13 nt, Human
aggggucaggcuc

SEQ ID NO: 2602690 - RNA, 17 nt, Human
aggggugauuucagaga

SEQ ID NO: 2602691 - RNA, 13 nt, Human
aggggugauuuca

SEQ ID NO: 2602692 - RNA, 16 nt, Human
agggucucacucuguc

SEQ ID NO: 2602693 - RNA, 15 nt, Human
agggucucacucugu

SEQ ID NO: 2602694 - RNA, 14 nt, Human
agggucucacucug

SEQ ID NO: 2602695 - RNA, 15 nt, Human
aggguaaggcugugg

SEQ ID NO: 2602696 - RNA, 22 nt, Human
agggguuuucgaagcucagccc

SEQ ID NO: 2602697 - RNA, 22 nt, Human
agggguuuuaggucucuucccc

SEQ ID NO: 2602698 - RNA, 21 nt, Human
agggguuuucgaagcucagcc

SEQ ID NO: 2602699 - RNA, 23 nt, Human
agggguugccacaggccucccug

SEQ ID NO: 2602700 - RNA, 22 nt, Human
agggguugccacaggccucccu

SEQ ID NO: 2602701 - RNA, 20 nt, Human
agggguggagacugcuuccc

SEQ ID NO: 2602702 - RNA, 20 nt, Human
agggguggcugccucauuua

SEQ ID NO: 2602703 - RNA, 21 nt, Human
agggguggcugccucauuuag

SEQ ID NO: 2602704 - RNA, 21 nt, Human
agggguugccacaggccuccc

SEQ ID NO: 2602705 - RNA, 19 nt, Human
agggguugguugaggugga

SEQ ID NO: 2602706 - RNA, 23 nt, Human
agggguugguugagguggaagcc

SEQ ID NO: 2602707 - RNA, 20 nt, Human
agggguuuuaggucucuucc

SEQ ID NO: 2602708 - RNA, 17 nt, Human
agggguuuggucuggga

SEQ ID NO: 2602709 - RNA, 20 nt, Human
agggguugguugagguggaa

SEQ ID NO: 2602710 - RNA, 13 nt, Human
aggggagcccacu

SEQ ID NO: 2602711 - RNA, 17 nt, Human
aggggagcccacugucc

SEQ ID NO: 2602712 - RNA, 21 nt, Human
aggggagcccacuguccuggg

SEQ ID NO: 2602713 - RNA, 24 nt, Human
aggggagcccacuguccugggccu

SEQ ID NO: 2602714 - RNA, 12 nt, Human
aggggagcccac

SEQ ID NO: 2602715 - RNA, 15 nt, Human
aggggaaucagaacu

SEQ ID NO: 2602716 - RNA, 16 nt, Human
aggggaaucagaacuc

SEQ ID NO: 2602717 - RNA, 18 nt, Human
aggggagcaugggaagug

SEQ ID NO: 2602718 - RNA, 16 nt, Human
aggggaauugaggaca

SEQ ID NO: 2602719 - RNA, 21 nt, Human
aggggaauguuugccucugcc

SEQ ID NO: 2602720 - RNA, 20 nt, Human
aggggaauguuugccucugc

SEQ ID NO: 2602721 - RNA, 19 nt, Human
aggggaauguuugccucug

SEQ ID NO: 2602722 - RNA, 20 nt, Human
aggggcugcccgcucccagu

SEQ ID NO: 2602723 - RNA, 19 nt, Human
aggggcugcccgcucccag

SEQ ID NO: 2602724 - RNA, 17 nt, Human
aggggcugcccgcuccc

SEQ ID NO: 2602725 - RNA, 16 nt, Human
aggggcugcccgcucc

SEQ ID NO: 2602726 - RNA, 15 nt, Human
aggggcugcccgcuc

SEQ ID NO: 2602727 - RNA, 13 nt, Human
aggggcugcccgc

SEQ ID NO: 2602728 - RNA, 12 nt, Human
aggggcugcccg

SEQ ID NO: 2602729 - RNA, 20 nt, Human
aggggcugaaagaacaugga

SEQ ID NO: 2602730 - RNA, 20 nt, Human
aggggcugcuuccuccugga

SEQ ID NO: 2602731 - RNA, 18 nt, Human
aggggcugcuuccuccug

SEQ ID NO: 2602732 - RNA, 16 nt, Human
aggggcugcuuccucc

SEQ ID NO: 2602733 - RNA, 15 nt, Human
aggggcugcuuccuc

SEQ ID NO: 2602734 - RNA, 22 nt, Human
aggggcucucagcucagcgcca

SEQ ID NO: 2602735 - RNA, 16 nt, Human
aggggagcccuccacg

SEQ ID NO: 2602736 - RNA, 17 nt, Human
aggggcucucagcucag

SEQ ID NO: 2602737 - RNA, 21 nt, Human
aggggcucuggagagaaacaa

SEQ ID NO: 2602738 - RNA, 17 nt, Human
aggggcucuggagagaa

SEQ ID NO: 2602739 - RNA, 15 nt, Human
aggggcucuggagag

SEQ ID NO: 2602740 - RNA, 12 nt, Human
aggggagcccuc

SEQ ID NO: 2602741 - RNA, 11 nt, Human
aggggagcccu

SEQ ID NO: 2602742 - RNA, 13 nt, Human
aggggcuccugga

SEQ ID NO: 2602743 - RNA, 14 nt, Human
aggggcuccuggaa

SEQ ID NO: 2602744 - RNA, 23 nt, Human
aggggcuccuggaaaggcucagu

SEQ ID NO: 2602745 - RNA, 22 nt, Human
aggggcugcugaccuccacagc

SEQ ID NO: 2602746 - RNA, 15 nt, Human
agggggccaggugca

SEQ ID NO: 2602747 - RNA, 19 nt, Human
agggggccaccuccccagg

SEQ ID NO: 2602748 - RNA, 21 nt, Human
aggggcugcuuccuccuggaa

SEQ ID NO: 2602749 - RNA, 15 nt, Human
agggggccaccuccc

SEQ ID NO: 2602750 - RNA, 10 nt, Human
agggggccac

SEQ ID NO: 2602751 - RNA, 20 nt, Human
ugguacccccuucugggcau

SEQ ID NO: 2602752 - RNA, 17 nt, Human
ugguacccccuucuggg

SEQ ID NO: 2602753 - RNA, 16 nt, Human
ugguacccccuucugg

SEQ ID NO: 2602754 - RNA, 22 nt, Human
ugguacccagccaucugcccag

SEQ ID NO: 2602755 - RNA, 21 nt, Human
ugguacccagccaucugccca

SEQ ID NO: 2602756 - RNA, 19 nt, Human
ugguacccagccaucugcc

SEQ ID NO: 2602757 - RNA, 18 nt, Human
ugguacccagccaucugc

SEQ ID NO: 2602758 - RNA, 17 nt, Human
ugguacccagccaucug

SEQ ID NO: 2602759 - RNA, 14 nt, Human
ugguacccucugga

SEQ ID NO: 2602760 - RNA, 21 nt, Human
ugguacccuccuggcucuuga

SEQ ID NO: 2602761 - RNA, 16 nt, Human
ugguacccuccuggcu

SEQ ID NO: 2602762 - RNA, 15 nt, Human
ugguacccuccuggc

SEQ ID NO: 2602763 - RNA, 14 nt, Human
ugguacccagccau

SEQ ID NO: 2602764 - RNA, 13 nt, Human
ugguacccagcca

SEQ ID NO: 2602765 - RNA, 18 nt, Human
ugguaccaggucuccucc

SEQ ID NO: 2602766 - RNA, 15 nt, Human
ugguaccaggucucc

SEQ ID NO: 2602767 - RNA, 18 nt, Human
ugguaccagauaaaauua

SEQ ID NO: 2602768 - RNA, 15 nt, Human
ugguaccagauaaaa

SEQ ID NO: 2602769 - RNA, 14 nt, Human
ugguaccagauaaa

SEQ ID NO: 2602770 - RNA, 13 nt, Human
ugguagagauuca

SEQ ID NO: 2602771 - RNA, 22 nt, Human
ugguagagaccgagccucuguc

SEQ ID NO: 2602772 - RNA, 17 nt, Human
ugguagaccaaaauaaa

SEQ ID NO: 2602773 - RNA, 12 nt, Human
ugguagcucagg

SEQ ID NO: 2602774 - RNA, 19 nt, Human
ugguagccaguugaauuua

SEQ ID NO: 2602775 - RNA, 22 nt, Human
ugguacuuuuaugauguauauu

SEQ ID NO: 2602776 - RNA, 21 nt, Human
ugguacuuuuaugauguauau

SEQ ID NO: 2602777 - RNA, 19 nt, Human
ugguacuuuuaugauguau

SEQ ID NO: 2602778 - RNA, 23 nt, Human
ugguacuuuuaugauguauauuu

SEQ ID NO: 2602779 - RNA, 20 nt, Human
ugguagaauuggagaguaaa

SEQ ID NO: 2602780 - RNA, 20 nt, Human
ugguagagugugccugaagu

SEQ ID NO: 2602781 - RNA, 13 nt, Human
ugguaacuguuaa

SEQ ID NO: 2602782 - RNA, 22 nt, Human
ugguaagaagccgggaacagac

SEQ ID NO: 2602783 - RNA, 17 nt, Human
ugguaacaguucauguu

SEQ ID NO: 2602784 - RNA, 23 nt, Human
ugguaaauuuccccaacagugug

SEQ ID NO: 2602785 - RNA, 22 nt, Human
ugguaaauuuccccaacagugu

SEQ ID NO: 2602786 - RNA, 20 nt, Human
ugguaaauuuccccaacagu

SEQ ID NO: 2602787 - RNA, 21 nt, Human
ugguaacaguucauguuugcu

SEQ ID NO: 2602788 - RNA, 18 nt, Human
ugguaacaguucauguuu

SEQ ID NO: 2602789 - RNA, 21 nt, Human
ugguaacauccuuucuauuga

SEQ ID NO: 2602790 - RNA, 23 nt, Human
ugggugcgaccccaucugcccag

SEQ ID NO: 2602791 - RNA, 19 nt, Human
ugguaaauuuccccaacag

SEQ ID NO: 2602792 - RNA, 16 nt, Human
ugguaaauuuccccaa

SEQ ID NO: 2602793 - RNA, 21 nt, Human
ugguaaauuaguauuuauuua

SEQ ID NO: 2602794 - RNA, 17 nt, Human
uggguggcaccagcagc

SEQ ID NO: 2602795 - RNA, 20 nt, Human
uggguggcaccagcagccug

SEQ ID NO: 2602796 - RNA, 22 nt, Human
ugggugcgaccccaucugccca

SEQ ID NO: 2602797 - RNA, 21 nt, Human
ugggugcgaccccaucugccc

SEQ ID NO: 2602798 - RNA, 20 nt, Human
ugggugcgaccccaucugcc

SEQ ID NO: 2602799 - RNA, 19 nt, Human
ugggugcgaccccaucugc

SEQ ID NO: 2602800 - RNA, 21 nt, Human
uggguggcaccagcagccugg

SEQ ID NO: 2602801 - RNA, 14 nt, Human
agggugggcuucag

SEQ ID NO: 2602802 - RNA, 18 nt, Human
uggguccaugggcagagc

SEQ ID NO: 2602803 - RNA, 16 nt, Human
aggguggugaccucug

SEQ ID NO: 2602804 - RNA, 16 nt, Human
agggucuugggaaaua

SEQ ID NO: 2602805 - RNA, 15 nt, Human
agggucuugggaaau

SEQ ID NO: 2602806 - RNA, 17 nt, Human
agggugggauggaggag

SEQ ID NO: 2602807 - RNA, 18 nt, Human
agggugggauggaggaga

SEQ ID NO: 2602808 - RNA, 15 nt, Human
agggugggagugggc

SEQ ID NO: 2602809 - RNA, 20 nt, Human
agggucugcucuuucucugc

SEQ ID NO: 2602810 - RNA, 17 nt, Human
agggucugcucuuucuc

SEQ ID NO: 2602811 - RNA, 14 nt, Human
agggucugcucuuu

SEQ ID NO: 2602812 - RNA, 13 nt, Human
agggucugcucuu

SEQ ID NO: 2602813 - RNA, 22 nt, Human
agggucugcucuuucucugcca

SEQ ID NO: 2602814 - RNA, 21 nt, Human
agggucugcucuuucucugcc

SEQ ID NO: 2602815 - RNA, 23 nt, Human
agggucugcucuuucucugccag

SEQ ID NO: 2602816 - RNA, 13 nt, Human
agggucuggagaa

SEQ ID NO: 2602817 - RNA, 14 nt, Human
agggucuggagaag

SEQ ID NO: 2602818 - RNA, 19 nt, Human
agggucuggagaagcagug

SEQ ID NO: 2602819 - RNA, 17 nt, Human
agggucugggcaggacu

SEQ ID NO: 2602820 - RNA, 15 nt, Human
agggucuggagaagc

SEQ ID NO: 2602821 - RNA, 15 nt, Human
agggucuucccuacc

SEQ ID NO: 2602822 - RNA, 14 nt, Human
agggucuugggaaa

SEQ ID NO: 2602823 - RNA, 17 nt, Human
agggucuucccuaccuc

SEQ ID NO: 2602824 - RNA, 18 nt, Human
ugggucgcccuggacugu

SEQ ID NO: 2602825 - RNA, 16 nt, Human
ugggucgcccuggacu

SEQ ID NO: 2602826 - RNA, 20 nt, Human
ugggucccacuuccccuccu

SEQ ID NO: 2602827 - RNA, 19 nt, Human
ugggucccacuuccccucc

SEQ ID NO: 2602828 - RNA, 17 nt, Human
ugggucccacuuccccu

SEQ ID NO: 2602829 - RNA, 22 nt, Human
ugggucccacuuccccuccuac

SEQ ID NO: 2602830 - RNA, 21 nt, Human
uggguccugggucuuucaugg

SEQ ID NO: 2602831 - RNA, 18 nt, Human
uggguccucacaucuuuc

SEQ ID NO: 2602832 - RNA, 17 nt, Human
ugggucccccacgugac

SEQ ID NO: 2602833 - RNA, 19 nt, Human
ugggugagaugcuggagaa

SEQ ID NO: 2602834 - RNA, 18 nt, Human
ugggugagaugcuggaga

SEQ ID NO: 2602835 - RNA, 13 nt, Human
ugggugagaacaa

SEQ ID NO: 2602836 - RNA, 23 nt, Human
ugggugaccaguugcacuuggcc

SEQ ID NO: 2602837 - RNA, 12 nt, Human
ugggugacauuu

SEQ ID NO: 2602838 - RNA, 17 nt, Human
ugggugacagagcaaga

SEQ ID NO: 2602839 - RNA, 14 nt, Human
ugggugacagagca

SEQ ID NO: 2602840 - RNA, 15 nt, Human
ugggugaagggagag

SEQ ID NO: 2602841 - RNA, 18 nt, Human
uggguccuuuucagaagu

SEQ ID NO: 2602842 - RNA, 13 nt, Human
ugggugcgacccc

SEQ ID NO: 2602843 - RNA, 18 nt, Human
ugggugcccaagcucaga

SEQ ID NO: 2602844 - RNA, 17 nt, Human
ugggugcccaagcucag

SEQ ID NO: 2602845 - RNA, 23 nt, Human
ugggugccccccuugccagacau

SEQ ID NO: 2602846 - RNA, 21 nt, Human
ugggugagaugcuggagaaga

SEQ ID NO: 2602847 - RNA, 15 nt, Human
uggggccuggagcag

SEQ ID NO: 2602848 - RNA, 20 nt, Human
uggggccuggaccugccucc

SEQ ID NO: 2602849 - RNA, 19 nt, Human
uggggccuggaccugccuc

SEQ ID NO: 2602850 - RNA, 17 nt, Human
uggggccuggaccugcc

SEQ ID NO: 2602851 - RNA, 16 nt, Human
uggggccuggaccugc

SEQ ID NO: 2602852 - RNA, 15 nt, Human
uggggccuggaccug

SEQ ID NO: 2602853 - RNA, 19 nt, Human
uggggccugauggggaggg

SEQ ID NO: 2602854 - RNA, 17 nt, Human
uggggcucacacaccug

SEQ ID NO: 2602855 - RNA, 20 nt, Human
uggggcuagggggagccccu

SEQ ID NO: 2602856 - RNA, 15 nt, Human
uggggcucagagugg

SEQ ID NO: 2602857 - RNA, 23 nt, Human
uggggcugcaccggcuggccugg

SEQ ID NO: 2602858 - RNA, 22 nt, Human
uggggcugcaccggcuggccug

SEQ ID NO: 2602859 - RNA, 17 nt, Human
uggggcucgccaugccg

SEQ ID NO: 2602860 - RNA, 13 nt, Human
uggggcucgccau

SEQ ID NO: 2602861 - RNA, 23 nt, Human
uggggcuccuuucuccagccagc

SEQ ID NO: 2602862 - RNA, 21 nt, Human
uggggcuccuuucuccagcca

SEQ ID NO: 2602863 - RNA, 11 nt, Human
uggggcuccuu

SEQ ID NO: 2602864 - RNA, 14 nt, Human
uggggcucccgccc

SEQ ID NO: 2602865 - RNA, 20 nt, Human
uggggaggggcgcuggccca

SEQ ID NO: 2602866 - RNA, 19 nt, Human
uggggaggggcgcuggccc

SEQ ID NO: 2602867 - RNA, 15 nt, Human
uggggaggggcgcug

SEQ ID NO: 2602868 - RNA, 12 nt, Human
uggggaggggcg

SEQ ID NO: 2602869 - RNA, 22 nt, Human
uggggaggggcgcuggcccagc

SEQ ID NO: 2602870 - RNA, 21 nt, Human
uggggaggggcgcuggcccag

SEQ ID NO: 2602871 - RNA, 21 nt, Human
uggggagggccguaccccacc

SEQ ID NO: 2602872 - RNA, 17 nt, Human
uggggagggccguaccc

SEQ ID NO: 2602873 - RNA, 22 nt, Human
uggggagggauucugguuccag

SEQ ID NO: 2602874 - RNA, 22 nt, Human
uggggagggauuuggggcucag

SEQ ID NO: 2602875 - RNA, 21 nt, Human
uggggccaguuggucccccuu

SEQ ID NO: 2602876 - RNA, 12 nt, Human
uggggcccugcc

SEQ ID NO: 2602877 - RNA, 23 nt, Human
uggggaggggcgcuggcccagcc

SEQ ID NO: 2602878 - RNA, 21 nt, Human
uggggccccuuuuuacucccc

SEQ ID NO: 2602879 - RNA, 22 nt, Human
uggggccccuuuuuacuccccu

SEQ ID NO: 2602880 - RNA, 22 nt, Human
uggggccuaucagugugccccc

SEQ ID NO: 2602881 - RNA, 19 nt, Human
uggggccuaucagugugcc

SEQ ID NO: 2602882 - RNA, 14 nt, Human
uggggccuccagaa

SEQ ID NO: 2602883 - RNA, 20 nt, Human
uggggccuccagaacucacu

SEQ ID NO: 2602884 - RNA, 11 nt, Human
uggggccucug

SEQ ID NO: 2602885 - RNA, 20 nt, Human
uggggccuaucagugugccc

SEQ ID NO: 2602886 - RNA, 12 nt, Human
uggggccucugu

SEQ ID NO: 2602887 - RNA, 12 nt, Human
agggcuccagac

SEQ ID NO: 2602888 - RNA, 15 nt, Human
agggcuccagacaca

SEQ ID NO: 2602889 - RNA, 14 nt, Human
agggcucagccugg

SEQ ID NO: 2602890 - RNA, 15 nt, Human
agggcucagccuggu

SEQ ID NO: 2602891 - RNA, 23 nt, Human
agggcucaggauuucgugggucu

SEQ ID NO: 2602892 - RNA, 13 nt, Human
agggcucaggauu

SEQ ID NO: 2602893 - RNA, 24 nt, Human
agggcucaggauuucgugggucug

SEQ ID NO: 2602894 - RNA, 23 nt, Human
agggcucuaaaaaaagccccaaa

SEQ ID NO: 2602895 - RNA, 15 nt, Human
agggcucuaaaaaaa

SEQ ID NO: 2602896 - RNA, 15 nt, Human
uggggaccucaggcc

SEQ ID NO: 2602897 - RNA, 14 nt, Human
uggggaccucaggc

SEQ ID NO: 2602898 - RNA, 21 nt, Human
agggcucucuuuccuucuugc

SEQ ID NO: 2602899 - RNA, 19 nt, Human
agggcucucuuuccuucuu

SEQ ID NO: 2602900 - RNA, 15 nt, Human
agggcucugaccagu

SEQ ID NO: 2602901 - RNA, 14 nt, Human
agggcucugaccag

SEQ ID NO: 2602902 - RNA, 15 nt, Human
agggcucugauauuc

SEQ ID NO: 2602903 - RNA, 22 nt, Human
agggcucugauauuccaugaau

SEQ ID NO: 2602904 - RNA, 17 nt, Human
uggggaccucaggccug

SEQ ID NO: 2602905 - RNA, 16 nt, Human
uggggaccucaggccu

SEQ ID NO: 2602906 - RNA, 21 nt, Human
uggggagacugggcugaggga

SEQ ID NO: 2602907 - RNA, 17 nt, Human
uggggagacugggcuga

SEQ ID NO: 2602908 - RNA, 14 nt, Human
agggcugaaagcca

SEQ ID NO: 2602909 - RNA, 17 nt, Human
agggcucugauauucca

SEQ ID NO: 2602910 - RNA, 15 nt, Human
agggcucuuuagcca

SEQ ID NO: 2602911 - RNA, 21 nt, Human
agggcucugauauuccaugaa

SEQ ID NO: 2602912 - RNA, 21 nt, Human
uggggagcccgucucaguguu

SEQ ID NO: 2602913 - RNA, 19 nt, Human
uggggagcccgucucagug

SEQ ID NO: 2602914 - RNA, 18 nt, Human
uggggagcccgucucagu

SEQ ID NO: 2602915 - RNA, 22 nt, Human
uggggagccaacagaagcuucc

SEQ ID NO: 2602916 - RNA, 16 nt, Human
uggggagccaacagaa

SEQ ID NO: 2602917 - RNA, 15 nt, Human
uggggagcagagaca

SEQ ID NO: 2602918 - RNA, 17 nt, Human
uggggagcagagacacu

SEQ ID NO: 2602919 - RNA, 18 nt, Human
uggggagggauucugguu

SEQ ID NO: 2602920 - RNA, 23 nt, Human
uggggaggcggacguuccagccg

SEQ ID NO: 2602921 - RNA, 14 nt, Human
uggggagggauuug

SEQ ID NO: 2602922 - RNA, 22 nt, Human
uggggaggcggacguuccagcc

SEQ ID NO: 2602923 - RNA, 13 nt, Human
aggggaaaagagg

SEQ ID NO: 2602924 - RNA, 18 nt, Human
agggcuuuguuuugcaca

SEQ ID NO: 2602925 - RNA, 18 nt, Human
uggggugcugggaggagg

SEQ ID NO: 2602926 - RNA, 16 nt, Human
uggggugggccucugg

SEQ ID NO: 2602927 - RNA, 12 nt, Human
uggggugggccu

SEQ ID NO: 2602928 - RNA, 13 nt, Human
uggggugggagag

SEQ ID NO: 2602929 - RNA, 15 nt, Human
uggggugggagaggu

SEQ ID NO: 2602930 - RNA, 13 nt, Human
uggggucuguaaa

SEQ ID NO: 2602931 - RNA, 18 nt, Human
uggggucuggcagccucc

SEQ ID NO: 2602932 - RNA, 14 nt, Human
uggggucuggcagc

SEQ ID NO: 2602933 - RNA, 17 nt, Human
uggggucuggcagccuc

SEQ ID NO: 2602934 - RNA, 14 nt, Human
uggggucugacccc

SEQ ID NO: 2602935 - RNA, 21 nt, Human
uggggucuggaguugaucugg

SEQ ID NO: 2602936 - RNA, 16 nt, Human
uggggucuguaaaauc

SEQ ID NO: 2602937 - RNA, 14 nt, Human
uggggugaggacca

SEQ ID NO: 2602938 - RNA, 17 nt, Human
uggggugaggaccacuc

SEQ ID NO: 2602939 - RNA, 17 nt, Human
uggggugaugcugggcu

SEQ ID NO: 2602940 - RNA, 13 nt, Human
uggggugcuggga

SEQ ID NO: 2602941 - RNA, 17 nt, Human
uggggugccgccugccc

SEQ ID NO: 2602942 - RNA, 15 nt, Human
uggggugccgccugc

SEQ ID NO: 2602943 - RNA, 13 nt, Human
aggggaaaaugaa

SEQ ID NO: 2602944 - RNA, 23 nt, Human
aggggaaaccaguguagccuugc

SEQ ID NO: 2602945 - RNA, 20 nt, Human
aggggaaaccaguguagccu

SEQ ID NO: 2602946 - RNA, 21 nt, Human
aggggaaaccaguguagccuu

SEQ ID NO: 2602947 - RNA, 14 nt, Human
aggggaacagacug

SEQ ID NO: 2602948 - RNA, 18 nt, Human
aggggaaaaucagccugc

SEQ ID NO: 2602949 - RNA, 22 nt, Human
aggggaaaaucagccugcucca

SEQ ID NO: 2602950 - RNA, 18 nt, Human
aggggaagaguguacugg

SEQ ID NO: 2602951 - RNA, 16 nt, Human
aggggaagaguguacu

SEQ ID NO: 2602952 - RNA, 21 nt, Human
aggggaauaaacuguugaguc

SEQ ID NO: 2602953 - RNA, 22 nt, Human
aggggaagaguguacugggggu

SEQ ID NO: 2602954 - RNA, 13 nt, Human
aggggaauguuug

SEQ ID NO: 2602955 - RNA, 14 nt, Human
aggggaagggccag

SEQ ID NO: 2602956 - RNA, 23 nt, Human
aggggaagggccagucugggcug

SEQ ID NO: 2602957 - RNA, 17 nt, Human
aggggaauaauagaaga

SEQ ID NO: 2602958 - RNA, 18 nt, Human
aggggaauaauagaagaa

SEQ ID NO: 2602959 - RNA, 19 nt, Human
aggggaauaauagaagaac

SEQ ID NO: 2602960 - RNA, 14 nt, Human
uggggucacucugg

SEQ ID NO: 2602961 - RNA, 13 nt, Human
uggggucacucug

SEQ ID NO: 2602962 - RNA, 19 nt, Human
ugggguacccacugcucug

SEQ ID NO: 2602963 - RNA, 18 nt, Human
ugggguacccacugcucu

SEQ ID NO: 2602964 - RNA, 17 nt, Human
ugggguacccacugcuc

SEQ ID NO: 2602965 - RNA, 14 nt, Human
uggggcuggcacaa

SEQ ID NO: 2602966 - RNA, 14 nt, Human
uggggcuggccucc

SEQ ID NO: 2602967 - RNA, 13 nt, Human
uggggcugcuggc

SEQ ID NO: 2602968 - RNA, 12 nt, Human
uggggcugcugg

SEQ ID NO: 2602969 - RNA, 19 nt, Human
uggggcugcuccuccaggg

SEQ ID NO: 2602970 - RNA, 21 nt, Human
uggggcugcuccuccagggcc

SEQ ID NO: 2602971 - RNA, 14 nt, Human
uggggcugcuccuc

SEQ ID NO: 2602972 - RNA, 15 nt, Human
uggggcugcuccucc

SEQ ID NO: 2602973 - RNA, 16 nt, Human
uggggcugcuccucca

SEQ ID NO: 2602974 - RNA, 17 nt, Human
uggggcugcuccuccag

SEQ ID NO: 2602975 - RNA, 22 nt, Human
uggggucacucuggcagcucag

SEQ ID NO: 2602976 - RNA, 15 nt, Human
uggggucagccaggg

SEQ ID NO: 2602977 - RNA, 14 nt, Human
uggggucagccagg

SEQ ID NO: 2602978 - RNA, 13 nt, Human
uggggucagccag

SEQ ID NO: 2602979 - RNA, 17 nt, Human
uggggucagagacugcu

SEQ ID NO: 2602980 - RNA, 19 nt, Human
uggggucagccagggccag

SEQ ID NO: 2602981 - RNA, 18 nt, Human
uggggucagccagggcca

SEQ ID NO: 2602982 - RNA, 21 nt, Human
uggggucagccagggccaggg

SEQ ID NO: 2602983 - RNA, 16 nt, Human
uggggucacucuggca

SEQ ID NO: 2602984 - RNA, 21 nt, Human
ugggguauuuggggcuuauuu

SEQ ID NO: 2602985 - RNA, 24 nt, Human
ugggguauuuaccacagcagcuga

SEQ ID NO: 2602986 - RNA, 20 nt, Human
ugggguauuuaccacagcag

SEQ ID NO: 2602987 - RNA, 16 nt, Human
uggggcugggcagcua

SEQ ID NO: 2602988 - RNA, 19 nt, Human
ugggguccuggccauccca

SEQ ID NO: 2602989 - RNA, 15 nt, Human
ugggguccuggccau

SEQ ID NO: 2602990 - RNA, 16 nt, Human
ugggguccuggccauc

SEQ ID NO: 2602991 - RNA, 16 nt, Human
ugggguccuggggccu

SEQ ID NO: 2602992 - RNA, 21 nt, Human
uggggucucacaguguugccc

SEQ ID NO: 2602993 - RNA, 23 nt, Human
uggggucucacaguguugcccag

SEQ ID NO: 2602994 - RNA, 13 nt, Human
uggggucucccuc

SEQ ID NO: 2602995 - RNA, 19 nt, Human
uggggucucccucuccugc

SEQ ID NO: 2602996 - RNA, 21 nt, Human
uggggucucccucuccugccu

SEQ ID NO: 2602997 - RNA, 22 nt, Human
uggggucucccucuccugccua

SEQ ID NO: 2602998 - RNA, 13 nt, Human
ugggguccccauc

SEQ ID NO: 2602999 - RNA, 20 nt, Human
ugggguccuggagcagacca

SEQ ID NO: 2603000 - RNA, 13 nt, Human
uggggucccucua

SEQ ID NO: 2603001 - RNA, 12 nt, Human
ugggguccuggc

SEQ ID NO: 2603002 - RNA, 13 nt, Human
uggggucaugccc

SEQ ID NO: 2603003 - RNA, 18 nt, Human
uggggucaugcccuccuc

SEQ ID NO: 2603004 - RNA, 20 nt, Human
uggggucaugcccuccucuc

SEQ ID NO: 2603005 - RNA, 14 nt, Human
ugggguccagggag

SEQ ID NO: 2603006 - RNA, 18 nt, Human
agggagggacauggcccc

SEQ ID NO: 2603007 - RNA, 15 nt, Human
agggaggcaagcccu

SEQ ID NO: 2603008 - RNA, 13 nt, Human
agggagggcucca

SEQ ID NO: 2603009 - RNA, 15 nt, Human
agggagggagggcuc

SEQ ID NO: 2603010 - RNA, 19 nt, Human
ugggccccugccucucugc

SEQ ID NO: 2603011 - RNA, 15 nt, Human
ugggccccugccucu

SEQ ID NO: 2603012 - RNA, 15 nt, Human
ugggccccugccaga

SEQ ID NO: 2603013 - RNA, 16 nt, Human
agggaggcaagcccug

SEQ ID NO: 2603014 - RNA, 13 nt, Human
agggaggcaagcc

SEQ ID NO: 2603015 - RNA, 14 nt, Human
agggaggcaagccc

SEQ ID NO: 2603016 - RNA, 22 nt, Human
ugggccccagcccacccuccug

SEQ ID NO: 2603017 - RNA, 20 nt, Human
ugggccccagcccacccucc

SEQ ID NO: 2603018 - RNA, 18 nt, Human
ugggccccagcccacccu

SEQ ID NO: 2603019 - RNA, 17 nt, Human
ugggccccagcccaccc

SEQ ID NO: 2603020 - RNA, 18 nt, Human
ugggccccaguuguauuu

SEQ ID NO: 2603021 - RNA, 20 nt, Human
ugggccauacuggccucgcc

SEQ ID NO: 2603022 - RNA, 18 nt, Human
ugggccauacuggccucg

SEQ ID NO: 2603023 - RNA, 17 nt, Human
ugggccauacuggccuc

SEQ ID NO: 2603024 - RNA, 16 nt, Human
ugggccauacuggccu

SEQ ID NO: 2603025 - RNA, 18 nt, Human
ugggccauagcuccugcu

SEQ ID NO: 2603026 - RNA, 24 nt, Human
ugggccauacuggccucgccuggc

SEQ ID NO: 2603027 - RNA, 19 nt, Human
ugggcagaagggagaagga

SEQ ID NO: 2603028 - RNA, 18 nt, Human
ugggcagaagggagaagg

SEQ ID NO: 2603029 - RNA, 16 nt, Human
ugggccagucugugga

SEQ ID NO: 2603030 - RNA, 20 nt, Human
ugggccagucuguggaucag

SEQ ID NO: 2603031 - RNA, 15 nt, Human
ugggccauacuggcc

SEQ ID NO: 2603032 - RNA, 14 nt, Human
ugggccaguguggg

SEQ ID NO: 2603033 - RNA, 16 nt, Human
ugggcccccaaaugga

SEQ ID NO: 2603034 - RNA, 15 nt, Human
ugggccccagccuuc

SEQ ID NO: 2603035 - RNA, 22 nt, Human
ugggccccaguuguauuuauuu

SEQ ID NO: 2603036 - RNA, 21 nt, Human
ugggcccccaaauggaaaugg

SEQ ID NO: 2603037 - RNA, 23 nt, Human
ugggccccucaucugcucagcag

SEQ ID NO: 2603038 - RNA, 19 nt, Human
ugggccccucaucugcuca

SEQ ID NO: 2603039 - RNA, 15 nt, Human
ugggccccucuccca

SEQ ID NO: 2603040 - RNA, 18 nt, Human
ugggccaggagccuccug

SEQ ID NO: 2603041 - RNA, 12 nt, Human
ugggcagagcag

SEQ ID NO: 2603042 - RNA, 11 nt, Human
ugggcagagca

SEQ ID NO: 2603043 - RNA, 12 nt, Human
ugggcagaagga

SEQ ID NO: 2603044 - RNA, 22 nt, Human
ugggcacugggaugagccgcug

SEQ ID NO: 2603045 - RNA, 22 nt, Human
ugggcacugcuggguggcccau

SEQ ID NO: 2603046 - RNA, 21 nt, Human
ugggcacugcuggguggccca

SEQ ID NO: 2603047 - RNA, 17 nt, Human
ugggcagaagggagaag

SEQ ID NO: 2603048 - RNA, 15 nt, Human
ugggcagaagggaga

SEQ ID NO: 2603049 - RNA, 18 nt, Human
ugggcagaaggccaagag

SEQ ID NO: 2603050 - RNA, 17 nt, Human
ugggcagaaggccaaga

SEQ ID NO: 2603051 - RNA, 16 nt, Human
ugggcagaaggccaag

SEQ ID NO: 2603052 - RNA, 15 nt, Human
ugggcacuuuuuaau

SEQ ID NO: 2603053 - RNA, 16 nt, Human
ugggcacugggaugag

SEQ ID NO: 2603054 - RNA, 15 nt, Human
ugggcacugggauga

SEQ ID NO: 2603055 - RNA, 23 nt, Human
ugggcacugcuggguggcccauc

SEQ ID NO: 2603056 - RNA, 15 nt, Human
ugggcagaaggccaa

SEQ ID NO: 2603057 - RNA, 20 nt, Human
ugggaggaucucuugagccu

SEQ ID NO: 2603058 - RNA, 21 nt, Human
ugggaggaucucuugagccug

SEQ ID NO: 2603059 - RNA, 22 nt, Human
ugggaggaucucuugagccugg

SEQ ID NO: 2603060 - RNA, 19 nt, Human
ugggaggccaaggugggag

SEQ ID NO: 2603061 - RNA, 20 nt, Human
ugggaggccaaggugggagg

SEQ ID NO: 2603062 - RNA, 19 nt, Human
ugggaggcaagaggggugg

SEQ ID NO: 2603063 - RNA, 18 nt, Human
ugggaggcaagaggggug

SEQ ID NO: 2603064 - RNA, 16 nt, Human
ugggaggcauggcccu

SEQ ID NO: 2603065 - RNA, 18 nt, Human
ugggaggcauggcccugg

SEQ ID NO: 2603066 - RNA, 23 nt, Human
ugggaggcaagagggguggagac

SEQ ID NO: 2603067 - RNA, 14 nt, Human
ugggaggccaagga

SEQ ID NO: 2603068 - RNA, 16 nt, Human
ugggaggccccacugg

SEQ ID NO: 2603069 - RNA, 20 nt, Human
ugggaggccccacuggggaa

SEQ ID NO: 2603070 - RNA, 15 nt, Human
ugggcaccuggggag

SEQ ID NO: 2603071 - RNA, 18 nt, Human
ugggaggccccacugggg

SEQ ID NO: 2603072 - RNA, 17 nt, Human
ugggcaccuggggagug

SEQ ID NO: 2603073 - RNA, 19 nt, Human
ugggcaccuggggaguggg

SEQ ID NO: 2603074 - RNA, 20 nt, Human
ugggcaccuggggaguggga

SEQ ID NO: 2603075 - RNA, 17 nt, Human
ugggcacugcugggugg

SEQ ID NO: 2603076 - RNA, 16 nt, Human
ugggcacugcugggug

SEQ ID NO: 2603077 - RNA, 14 nt, Human
ugggcacugcuggg

SEQ ID NO: 2603078 - RNA, 21 nt, Human
ugggcacgcugugggcaggug

SEQ ID NO: 2603079 - RNA, 19 nt, Human
ugggcacgcugugggcagg

SEQ ID NO: 2603080 - RNA, 15 nt, Human
agggcccugagcuga

SEQ ID NO: 2603081 - RNA, 16 nt, Human
agggcccugagcucgg

SEQ ID NO: 2603082 - RNA, 23 nt, Human
agggccccucugcccagcuuggg

SEQ ID NO: 2603083 - RNA, 21 nt, Human
agggccccucugcccagcuug

SEQ ID NO: 2603084 - RNA, 13 nt, Human
agggcccuaccug

SEQ ID NO: 2603085 - RNA, 19 nt, Human
agggcccugagcugagggc

SEQ ID NO: 2603086 - RNA, 18 nt, Human
agggcccugagcugaggg

SEQ ID NO: 2603087 - RNA, 12 nt, Human
agggcccugcag

SEQ ID NO: 2603088 - RNA, 13 nt, Human
agggcccugcaga

SEQ ID NO: 2603089 - RNA, 15 nt, Human
agggcccuucacugc

SEQ ID NO: 2603090 - RNA, 24 nt, Human
agggcccugguguuucuagcacug

SEQ ID NO: 2603091 - RNA, 13 nt, Human
agggcccuggugu

SEQ ID NO: 2603092 - RNA, 12 nt, Human
agggcucagccu

SEQ ID NO: 2603093 - RNA, 13 nt, Human
agggcucagccug

SEQ ID NO: 2603094 - RNA, 23 nt, Human
agggcucagcggggacagcuccu

SEQ ID NO: 2603095 - RNA, 22 nt, Human
agggcucagcggggacagcucc

SEQ ID NO: 2603096 - RNA, 20 nt, Human
agggcucagcggggacagcu

SEQ ID NO: 2603097 - RNA, 19 nt, Human
agggcucagcggggacagc

SEQ ID NO: 2603098 - RNA, 20 nt, Human
agggccccucugcccagcuu

SEQ ID NO: 2603099 - RNA, 19 nt, Human
agggccccucugcccagcu

SEQ ID NO: 2603100 - RNA, 18 nt, Human
agggccccucugcccagc

SEQ ID NO: 2603101 - RNA, 17 nt, Human
agggccccucugcccag

SEQ ID NO: 2603102 - RNA, 16 nt, Human
agggccccucugccca

SEQ ID NO: 2603103 - RNA, 15 nt, Human
agggccccucugccc

SEQ ID NO: 2603104 - RNA, 14 nt, Human
agggccccucugcc

SEQ ID NO: 2603105 - RNA, 13 nt, Human
agggccccucugc

SEQ ID NO: 2603106 - RNA, 17 nt, Human
agggcccaagucccugu

SEQ ID NO: 2603107 - RNA, 16 nt, Human
agggcccaagucccug

SEQ ID NO: 2603108 - RNA, 19 nt, Human
agggccaugcugaagggac

SEQ ID NO: 2603109 - RNA, 22 nt, Human
agggcccaagucccuguuuucu

SEQ ID NO: 2603110 - RNA, 19 nt, Human
agggcccaagucccuguuu

SEQ ID NO: 2603111 - RNA, 23 nt, Human
agggccaugcugaggccugggcc

SEQ ID NO: 2603112 - RNA, 22 nt, Human
agggccaugcugaggccugggc

SEQ ID NO: 2603113 - RNA, 21 nt, Human
agggccaugcugaggccuggg

SEQ ID NO: 2603114 - RNA, 20 nt, Human
agggccaugcugaggccugg

SEQ ID NO: 2603115 - RNA, 19 nt, Human
agggccaugcugaggccug

SEQ ID NO: 2603116 - RNA, 18 nt, Human
agggccaugcugaaggga

SEQ ID NO: 2603117 - RNA, 17 nt, Human
agggccaugccugcccc

SEQ ID NO: 2603118 - RNA, 15 nt, Human
agggccagagccagg

SEQ ID NO: 2603119 - RNA, 19 nt, Human
agggccaguccugccuggc

SEQ ID NO: 2603120 - RNA, 21 nt, Human
agggccaguccugccuggcca

SEQ ID NO: 2603121 - RNA, 15 nt, Human
agggccagucugggc

SEQ ID NO: 2603122 - RNA, 22 nt, Human
agggccaguccugccuggccag

SEQ ID NO: 2603123 - RNA, 23 nt, Human
agggccaguccugccuggccagg

SEQ ID NO: 2603124 - RNA, 11 nt, Human
agggccagagc

SEQ ID NO: 2603125 - RNA, 12 nt, Human
agggccagagcc

SEQ ID NO: 2603126 - RNA, 13 nt, Human
agggccagagcca

SEQ ID NO: 2603127 - RNA, 14 nt, Human
agggccagagccag

SEQ ID NO: 2603128 - RNA, 18 nt, Human
agggccacgugccaggcc

SEQ ID NO: 2603129 - RNA, 19 nt, Human
agggccacgugccaggccc

SEQ ID NO: 2603130 - RNA, 20 nt, Human
agggccacgugccaggcccg

SEQ ID NO: 2603131 - RNA, 14 nt, Human
agggccacucugcc

SEQ ID NO: 2603132 - RNA, 15 nt, Human
agggccacucugccu

SEQ ID NO: 2603133 - RNA, 18 nt, Human
agggccacucugccucug

SEQ ID NO: 2603134 - RNA, 14 nt, Human
agggccacugaaga

SEQ ID NO: 2603135 - RNA, 17 nt, Human
agggcaucuuagcuucu

SEQ ID NO: 2603136 - RNA, 22 nt, Human
agggcaucuugguccaggaaau

SEQ ID NO: 2603137 - RNA, 22 nt, Human
agggcaugccccggccaccucu

SEQ ID NO: 2603138 - RNA, 21 nt, Human
agggcaugccccggccaccuc

SEQ ID NO: 2603139 - RNA, 20 nt, Human
agggcaugccccggccaccu

SEQ ID NO: 2603140 - RNA, 15 nt, Human
agggcaugccccggc

SEQ ID NO: 2603141 - RNA, 22 nt, Human
agggcaugccacgugggcucau

SEQ ID NO: 2603142 - RNA, 18 nt, Human
agggcaugcauuuugcag

SEQ ID NO: 2603143 - RNA, 21 nt, Human
agggccacaugggaggcucac

SEQ ID NO: 2603144 - RNA, 15 nt, Human
agggccacgugccag

SEQ ID NO: 2603145 - RNA, 16 nt, Human
agggccacgugccagg

SEQ ID NO: 2603146 - RNA, 20 nt, Human
agggccacaugggaggcuca

SEQ ID NO: 2603147 - RNA, 23 nt, Human
agggcaugccccggccaccucug

SEQ ID NO: 2603148 - RNA, 17 nt, Human
agggcaugcgcacaagg

SEQ ID NO: 2603149 - RNA, 21 nt, Human
agggcaugcgcacaaggcuga

SEQ ID NO: 2603150 - RNA, 23 nt, Human
agggcaggaaggagagccugcug

SEQ ID NO: 2603151 - RNA, 19 nt, Human
agggcaggaaggagagccu

SEQ ID NO: 2603152 - RNA, 21 nt, Human
agggcaggaaggagagccugc

SEQ ID NO: 2603153 - RNA, 23 nt, Human
agggcagcuugccccggccccgg

SEQ ID NO: 2603154 - RNA, 18 nt, Human
agggcagcuugccccggc

SEQ ID NO: 2603155 - RNA, 17 nt, Human
agggcagcuugccccgg

SEQ ID NO: 2603156 - RNA, 13 nt, Human
agggcagcuugcc

SEQ ID NO: 2603157 - RNA, 16 nt, Human
agggcaggaaggagag

SEQ ID NO: 2603158 - RNA, 18 nt, Human
agggcaggaaggagagcc

SEQ ID NO: 2603159 - RNA, 12 nt, Human
agggcaucuccu

SEQ ID NO: 2603160 - RNA, 21 nt, Human
agggcaucuccugugcauggg

SEQ ID NO: 2603161 - RNA, 23 nt, Human
agggcaucuccugugcaugggug

SEQ ID NO: 2603162 - RNA, 11 nt, Human
agggcaggcau

SEQ ID NO: 2603163 - RNA, 13 nt, Human
agggcaucuccug

SEQ ID NO: 2603164 - RNA, 14 nt, Human
agggcaucuccugu

SEQ ID NO: 2603165 - RNA, 16 nt, Human
agggcaucuccugugc

SEQ ID NO: 2603166 - RNA, 15 nt, Human
agggagggcuccaga

SEQ ID NO: 2603167 - RNA, 14 nt, Human
agggagggcuccag

SEQ ID NO: 2603168 - RNA, 16 nt, Human
agggagggcuccagac

SEQ ID NO: 2603169 - RNA, 20 nt, Human
agggcacauuccuugccugc

SEQ ID NO: 2603170 - RNA, 19 nt, Human
agggcacauuccuugccug

SEQ ID NO: 2603171 - RNA, 14 nt, Human
agggcaccaggggu

SEQ ID NO: 2603172 - RNA, 15 nt, Human
agggcacuggagcug

SEQ ID NO: 2603173 - RNA, 13 nt, Human
agggcacuggagc

SEQ ID NO: 2603174 - RNA, 21 nt, Human
agggcacauuccuugccugca

SEQ ID NO: 2603175 - RNA, 14 nt, Human
agggcacugguggc

SEQ ID NO: 2603176 - RNA, 21 nt, Human
agggcaccagggguuucucgc

SEQ ID NO: 2603177 - RNA, 19 nt, Human
agggcaccagggguuucuc

SEQ ID NO: 2603178 - RNA, 21 nt, Human
agggcacccuaguucuaccuc

SEQ ID NO: 2603179 - RNA, 16 nt, Human
agggcacugcugcugc

SEQ ID NO: 2603180 - RNA, 11 nt, Human
agggcagcuug

SEQ ID NO: 2603181 - RNA, 20 nt, Human
agggcagcugggcccaaccc

SEQ ID NO: 2603182 - RNA, 18 nt, Human
agggcagcugggcccaac

SEQ ID NO: 2603183 - RNA, 17 nt, Human
agggcagcugggcccaa

SEQ ID NO: 2603184 - RNA, 16 nt, Human
agggcagcugggccca

SEQ ID NO: 2603185 - RNA, 15 nt, Human
agggcagcugggccc

SEQ ID NO: 2603186 - RNA, 14 nt, Human
agggcagcugggcc

SEQ ID NO: 2603187 - RNA, 16 nt, Human
agggcacugguggccc

SEQ ID NO: 2603188 - RNA, 17 nt, Human
agggcagcgccaggcug

SEQ ID NO: 2603189 - RNA, 23 nt, Human
agggaaggaacucuggcuuccag

SEQ ID NO: 2603190 - RNA, 21 nt, Human
agggaagcuacagguuacaac

SEQ ID NO: 2603191 - RNA, 16 nt, Human
agggaagcuggccgag

SEQ ID NO: 2603192 - RNA, 13 nt, Human
agggaagcuacag

SEQ ID NO: 2603193 - RNA, 19 nt, Human
agggaagcacugccucccu

SEQ ID NO: 2603194 - RNA, 19 nt, Human
agggaagcuacagguuaca

SEQ ID NO: 2603195 - RNA, 16 nt, Human
agggaagcuacagguu

SEQ ID NO: 2603196 - RNA, 13 nt, Human
agggaagcuggcc

SEQ ID NO: 2603197 - RNA, 16 nt, Human
agggaagccugaaaaa

SEQ ID NO: 2603198 - RNA, 14 nt, Human
agggaagagugcau

SEQ ID NO: 2603199 - RNA, 12 nt, Human
agggaagagcag

SEQ ID NO: 2603200 - RNA, 15 nt, Human
agggaagagaaagug

SEQ ID NO: 2603201 - RNA, 13 nt, Human
agggaacagacag

SEQ ID NO: 2603202 - RNA, 14 nt, Human
agggaacagacagg

SEQ ID NO: 2603203 - RNA, 15 nt, Human
agggaacagacagga

SEQ ID NO: 2603204 - RNA, 14 nt, Human
agggaacagugagg

SEQ ID NO: 2603205 - RNA, 21 nt, Human
agggaacagacaggagaaaug

SEQ ID NO: 2603206 - RNA, 17 nt, Human
agggaacagacaggaga

SEQ ID NO: 2603207 - RNA, 18 nt, Human
agggaacagacaggagaa

SEQ ID NO: 2603208 - RNA, 19 nt, Human
agggaacagacaggagaaa

SEQ ID NO: 2603209 - RNA, 20 nt, Human
agggaacagacaggagaaau

SEQ ID NO: 2603210 - RNA, 15 nt, Human
agggaacucuggggu

SEQ ID NO: 2603211 - RNA, 14 nt, Human
agggaacucugggg

SEQ ID NO: 2603212 - RNA, 16 nt, Human
agggaagaaaagagcu

SEQ ID NO: 2603213 - RNA, 19 nt, Human
agggaaccguuauuauaau

SEQ ID NO: 2603214 - RNA, 22 nt, Human
agggaaccguuauuauaauugu

SEQ ID NO: 2603215 - RNA, 14 nt, Human
agggaaccuguguc

SEQ ID NO: 2603216 - RNA, 19 nt, Human
agggaacgggguccuucaa

SEQ ID NO: 2603217 - RNA, 22 nt, Human
aggcccucccuguuccccagag

SEQ ID NO: 2603218 - RNA, 23 nt, Human
aggcccucccuguuccccagaga

SEQ ID NO: 2603219 - RNA, 13 nt, Human
agggaaauuucag

SEQ ID NO: 2603220 - RNA, 20 nt, Human
aggcccucccuguuccccag

SEQ ID NO: 2603221 - RNA, 22 nt, Human
aggcccuaucuguuuacagugu

SEQ ID NO: 2603222 - RNA, 15 nt, Human
aggcccggggcuggc

SEQ ID NO: 2603223 - RNA, 20 nt, Human
aggcccggcuccaggcuccu

SEQ ID NO: 2603224 - RNA, 18 nt, Human
aggcccggcuccaggcuc

SEQ ID NO: 2603225 - RNA, 21 nt, Human
aggcccggcuccaggcuccuu

SEQ ID NO: 2603226 - RNA, 20 nt, Human
aggcccgcucuacaucuucu

SEQ ID NO: 2603227 - RNA, 13 nt, Human
aggcccggggcug

SEQ ID NO: 2603228 - RNA, 14 nt, Human
aggcccggggcugg

SEQ ID NO: 2603229 - RNA, 15 nt, Human
aggcccguccggcag

SEQ ID NO: 2603230 - RNA, 13 nt, Human
agggaagggccug

SEQ ID NO: 2603231 - RNA, 14 nt, Human
agggaagggccugc

SEQ ID NO: 2603232 - RNA, 16 nt, Human
agggaagggccugcca

SEQ ID NO: 2603233 - RNA, 13 nt, Human
agggaaggggaca

SEQ ID NO: 2603234 - RNA, 22 nt, Human
agggaaggggacaaggacuagg

SEQ ID NO: 2603235 - RNA, 16 nt, Human
agggaaguaacaguaa

SEQ ID NO: 2603236 - RNA, 12 nt, Human
agggaagggugg

SEQ ID NO: 2603237 - RNA, 21 nt, Human
agggaaggggaggcagccggc

SEQ ID NO: 2603238 - RNA, 18 nt, Human
agggaagggccugccaca

SEQ ID NO: 2603239 - RNA, 20 nt, Human
agggaaggggaggcagccgg

SEQ ID NO: 2603240 - RNA, 22 nt, Human
agggaaggauacaaaagcaugu

SEQ ID NO: 2603241 - RNA, 18 nt, Human
agggaaggaacucuggcu

SEQ ID NO: 2603242 - RNA, 16 nt, Human
agggaaggccccacag

SEQ ID NO: 2603243 - RNA, 23 nt, Human
agggaauccccgaaggugcugga

SEQ ID NO: 2603244 - RNA, 20 nt, Human
agggaauccccgaaggugcu

SEQ ID NO: 2603245 - RNA, 18 nt, Human
agggaauccccgaaggug

SEQ ID NO: 2603246 - RNA, 16 nt, Human
agggaauccccgaagg

SEQ ID NO: 2603247 - RNA, 22 nt, Human
agggaaugccugagugccuggc

SEQ ID NO: 2603248 - RNA, 21 nt, Human
agggaaugccugagugccugg

SEQ ID NO: 2603249 - RNA, 18 nt, Human
agggaaugccugagugcc

SEQ ID NO: 2603250 - RNA, 14 nt, Human
agggaaugccugag

SEQ ID NO: 2603251 - RNA, 13 nt, Human
agggaaugccuga

SEQ ID NO: 2603252 - RNA, 23 nt, Human
agggaaugagacaggaccuagga

SEQ ID NO: 2603253 - RNA, 18 nt, Human
agggaaugaaccuggagg

SEQ ID NO: 2603254 - RNA, 21 nt, Human
agggaaugaaggugucagaau

SEQ ID NO: 2603255 - RNA, 22 nt, Human
agggaaguaacaguaacgcagg

SEQ ID NO: 2603256 - RNA, 15 nt, Human
agggaaguccccagg

SEQ ID NO: 2603257 - RNA, 13 nt, Human
agggaaguuuugu

SEQ ID NO: 2603258 - RNA, 22 nt, Human
agggacaaguggacucagggca

SEQ ID NO: 2603259 - RNA, 18 nt, Human
agggaauugaggucugcu

SEQ ID NO: 2603260 - RNA, 16 nt, Human
agggaauugcagagua

SEQ ID NO: 2603261 - RNA, 21 nt, Human
agggaauuucuucaacucccu

SEQ ID NO: 2603262 - RNA, 15 nt, Human
agggaauuucaggaa

SEQ ID NO: 2603263 - RNA, 15 nt, Human
agggaauggcacagc

SEQ ID NO: 2603264 - RNA, 16 nt, Human
ugggacuacaggcacc

SEQ ID NO: 2603265 - RNA, 15 nt, Human
ugggacuacaggcac

SEQ ID NO: 2603266 - RNA, 19 nt, Human
agggaggaggccaccucuc

SEQ ID NO: 2603267 - RNA, 17 nt, Human
agggaggaggccaccuc

SEQ ID NO: 2603268 - RNA, 16 nt, Human
agggaggaggccaccu

SEQ ID NO: 2603269 - RNA, 21 nt, Human
agggaggaggccaccucucca

SEQ ID NO: 2603270 - RNA, 20 nt, Human
agggaggaggccaccucucc

SEQ ID NO: 2603271 - RNA, 20 nt, Human
ugggacguggcucagccagc

SEQ ID NO: 2603272 - RNA, 14 nt, Human
ugggacuacaggca

SEQ ID NO: 2603273 - RNA, 21 nt, Human
agggaggacgcucucuggccu

SEQ ID NO: 2603274 - RNA, 22 nt, Human
agggaggacgcucucuggccuu

SEQ ID NO: 2603275 - RNA, 23 nt, Human
agggaggacgcucucuggccuuc

SEQ ID NO: 2603276 - RNA, 22 nt, Human
agggaggaccagggcagggcca

SEQ ID NO: 2603277 - RNA, 15 nt, Human
agggaggaggccacc

SEQ ID NO: 2603278 - RNA, 21 nt, Human
agggaggaaucgaggaaccag

SEQ ID NO: 2603279 - RNA, 22 nt, Human
agggaggaaucgaggaaccaga

SEQ ID NO: 2603280 - RNA, 23 nt, Human
agggaggaaucgaggaaccagag

SEQ ID NO: 2603281 - RNA, 22 nt, Human
agggagagagagagagagagga

SEQ ID NO: 2603282 - RNA, 14 nt, Human
agggacagagccau

SEQ ID NO: 2603283 - RNA, 16 nt, Human
agggacagaggcccca

SEQ ID NO: 2603284 - RNA, 13 nt, Human
agggagagagaga

SEQ ID NO: 2603285 - RNA, 23 nt, Human
agggagagagagagagagaggac

SEQ ID NO: 2603286 - RNA, 15 nt, Human
agggagagccagcuc

SEQ ID NO: 2603287 - RNA, 14 nt, Human
agggagagcggggc

SEQ ID NO: 2603288 - RNA, 17 nt, Human
agggagaggagugacug

SEQ ID NO: 2603289 - RNA, 13 nt, Human
agggagaggagug

SEQ ID NO: 2603290 - RNA, 16 nt, Human
agggagagcggggcag

SEQ ID NO: 2603291 - RNA, 21 nt, Human
agggacaccagccaggcucug

SEQ ID NO: 2603292 - RNA, 20 nt, Human
agggacaccagccaggcucu

SEQ ID NO: 2603293 - RNA, 18 nt, Human
agggacaccagccaggcu

SEQ ID NO: 2603294 - RNA, 16 nt, Human
agggacaccagccagg

SEQ ID NO: 2603295 - RNA, 15 nt, Human
agggacaccagccag

SEQ ID NO: 2603296 - RNA, 14 nt, Human
agggacaccagcca

SEQ ID NO: 2603297 - RNA, 19 nt, Human
agggacaaguggacucagg

SEQ ID NO: 2603298 - RNA, 10 nt, Human
agggacagag

SEQ ID NO: 2603299 - RNA, 18 nt, Human
agggacagagacaccugc

SEQ ID NO: 2603300 - RNA, 19 nt, Human
agggacagagacaccugca

SEQ ID NO: 2603301 - RNA, 20 nt, Human
agggacagagacaccugcac

SEQ ID NO: 2603302 - RNA, 23 nt, Human
agggaggaagaagcuuaggcagg

SEQ ID NO: 2603303 - RNA, 21 nt, Human
agggaggaagaagcuuaggca

SEQ ID NO: 2603304 - RNA, 15 nt, Human
agggaggaagaagcu

SEQ ID NO: 2603305 - RNA, 13 nt, Human
agggagcugggac

SEQ ID NO: 2603306 - RNA, 13 nt, Human
agggagcacuggg

SEQ ID NO: 2603307 - RNA, 14 nt, Human
agggagcagacagg

SEQ ID NO: 2603308 - RNA, 16 nt, Human
agggagagguggagca

SEQ ID NO: 2603309 - RNA, 14 nt, Human
agggagagggaggu

SEQ ID NO: 2603310 - RNA, 13 nt, Human
agggagagggagg

SEQ ID NO: 2603311 - RNA, 19 nt, Human
agggagagucauauuuuga

SEQ ID NO: 2603312 - RNA, 21 nt, Human
agggagcaaguccuucccuuu

SEQ ID NO: 2603313 - RNA, 19 nt, Human
agggagcaaguccuucccu

SEQ ID NO: 2603314 - RNA, 20 nt, Human
ugggacucaaugcacugaca

SEQ ID NO: 2603315 - RNA, 13 nt, Human
ugggacucagccu

SEQ ID NO: 2603316 - RNA, 21 nt, Human
ugggacguggcucagccagca

SEQ ID NO: 2603317 - RNA, 23 nt, Human
agggaggaggccaccucuccaag

SEQ ID NO: 2603318 - RNA, 23 nt, Human
ugggacucagccuucagacagag

SEQ ID NO: 2603319 - RNA, 17 nt, Human
ugggacucagccuucag

SEQ ID NO: 2603320 - RNA, 16 nt, Human
ugggacugagccaguc

SEQ ID NO: 2603321 - RNA, 15 nt, Human
ugggacugagccagu

SEQ ID NO: 2603322 - RNA, 14 nt, Human
ugggacugagccag

SEQ ID NO: 2603323 - RNA, 18 nt, Human
ugggacugcuaaauaaaa

SEQ ID NO: 2603324 - RNA, 17 nt, Human
ugggacugcuaaauaaa

SEQ ID NO: 2603325 - RNA, 20 nt, Human
ugggacugagccagucccag

SEQ ID NO: 2603326 - RNA, 18 nt, Human
ugggacugcugcuucuua

SEQ ID NO: 2603327 - RNA, 23 nt, Human
ugggacuggccagguuucugccc

SEQ ID NO: 2603328 - RNA, 22 nt, Human
ugggagaaccaaaaagaggcua

SEQ ID NO: 2603329 - RNA, 14 nt, Human
ugggagaaccucag

SEQ ID NO: 2603330 - RNA, 15 nt, Human
ugggagaaccucagg

SEQ ID NO: 2603331 - RNA, 22 nt, Human
ugggagaaccucaggcuuccuu

SEQ ID NO: 2603332 - RNA, 23 nt, Human
ugggagaaccucaggcuuccuug

SEQ ID NO: 2603333 - RNA, 19 nt, Human
ugggagaaugucaguaugu

SEQ ID NO: 2603334 - RNA, 20 nt, Human
ugggagaaugucaguaugug

SEQ ID NO: 2603335 - RNA, 22 nt, Human
ugggagaaugucaguaugugga

SEQ ID NO: 2603336 - RNA, 21 nt, Human
ugggagaauucuuacauguuu

SEQ ID NO: 2603337 - RNA, 22 nt, Human
ugggagaauucuuacauguuuu

SEQ ID NO: 2603338 - RNA, 18 nt, Human
ugggagacugcugaguca

SEQ ID NO: 2603339 - RNA, 21 nt, Human
ugggagagagacguguacaua

SEQ ID NO: 2603340 - RNA, 14 nt, Human
ugggagagcccagc

SEQ ID NO: 2603341 - RNA, 18 nt, Human
ugggagagcccagccauu

SEQ ID NO: 2603342 - RNA, 16 nt, Human
ugggagagccuuccag

SEQ ID NO: 2603343 - RNA, 18 nt, Human
ugggaggaucucuugagc

SEQ ID NO: 2603344 - RNA, 21 nt, Human
ugggagagaagagaaugcaca

SEQ ID NO: 2603345 - RNA, 19 nt, Human
ugggagagaagagaaugca

SEQ ID NO: 2603346 - RNA, 16 nt, Human
ugggagacaugugaca

SEQ ID NO: 2603347 - RNA, 22 nt, Human
ugggagacaagaaaucccuguu

SEQ ID NO: 2603348 - RNA, 18 nt, Human
ugggagaccuguaaucau

SEQ ID NO: 2603349 - RNA, 15 nt, Human
ugggagacaugugac

SEQ ID NO: 2603350 - RNA, 14 nt, Human
ugggagacauguga

SEQ ID NO: 2603351 - RNA, 19 nt, Human
ugggagacacccaaagggu

SEQ ID NO: 2603352 - RNA, 21 nt, Human
ugggagacaagaaaucccugu

SEQ ID NO: 2603353 - RNA, 13 nt, Human
uuaauaaacacuc

SEQ ID NO: 2603354 - RNA, 22 nt, Human
uuaaguucuggaugcauuucuc

SEQ ID NO: 2603355 - RNA, 12 nt, Human
uuaaguuacuuc

SEQ ID NO: 2603356 - RNA, 17 nt, Human
uuaauaaacacucuuga

SEQ ID NO: 2603357 - RNA, 18 nt, Human
uuaaguugcugaugaacu

SEQ ID NO: 2603358 - RNA, 22 nt, Human
uuaauaaacuuuuuuuugagaa

SEQ ID NO: 2603359 - RNA, 23 nt, Human
uuaaugaaagacuguacaaagua

SEQ ID NO: 2603360 - RNA, 20 nt, Human
uuaaugaaagacuguacaaa

SEQ ID NO: 2603361 - RNA, 20 nt, Human
uuaauaaauuauuuauuauu

SEQ ID NO: 2603362 - RNA, 18 nt, Human
uuaauaaauuauuuauua

SEQ ID NO: 2603363 - RNA, 12 nt, Human
uuaauaacaauu

SEQ ID NO: 2603364 - RNA, 14 nt, Human
uuaauaaagacagg

SEQ ID NO: 2603365 - RNA, 13 nt, Human
uuaauaaagacag

SEQ ID NO: 2603366 - RNA, 21 nt, Human
uuaaugaaauaucuguauuua

SEQ ID NO: 2603367 - RNA, 17 nt, Human
uuaaugaaauaucugua

SEQ ID NO: 2603368 - RNA, 22 nt, Human
uuaaugaaauaucuguauuuaa

SEQ ID NO: 2603369 - RNA, 14 nt, Human
uuaaugaagaaagu

SEQ ID NO: 2603370 - RNA, 18 nt, Human
uuaaugaagaaaguggaa

SEQ ID NO: 2603371 - RNA, 23 nt, Human
uuaaugaagaaaguggaaaacaa

SEQ ID NO: 2603372 - RNA, 14 nt, Human
uuaaugaaguuuga

SEQ ID NO: 2603373 - RNA, 14 nt, Human
uuaauucauguuuc

SEQ ID NO: 2603374 - RNA, 17 nt, Human
uuaauuccaauuauaug

SEQ ID NO: 2603375 - RNA, 21 nt, Human
uuaauuccaugaaucgcuucu

SEQ ID NO: 2603376 - RNA, 19 nt, Human
uuaauuccaauaugaugac

SEQ ID NO: 2603377 - RNA, 15 nt, Human
uuaauucauguuucu

SEQ ID NO: 2603378 - RNA, 16 nt, Human
uuaauuccuuucucau

SEQ ID NO: 2603379 - RNA, 15 nt, Human
uuaauucuuagcuca

SEQ ID NO: 2603380 - RNA, 13 nt, Human
uuaauuguuguuu

SEQ ID NO: 2603381 - RNA, 15 nt, Human
uuaauuguucauuuu

SEQ ID NO: 2603382 - RNA, 17 nt, Human
uuaauucucuuucaaag

SEQ ID NO: 2603383 - RNA, 17 nt, Human
uuaauucucaugugauc

SEQ ID NO: 2603384 - RNA, 22 nt, Human
uuaauuccaugaaucgcuucuc

SEQ ID NO: 2603385 - RNA, 14 nt, Human
uuaauucucuugaa

SEQ ID NO: 2603386 - RNA, 22 nt, Human
uuaauuguuguuucuuucuagu

SEQ ID NO: 2603387 - RNA, 20 nt, Human
uuaauuguuguuucuuucua

SEQ ID NO: 2603388 - RNA, 19 nt, Human
uuaauuguuguuucuuucu

SEQ ID NO: 2603389 - RNA, 16 nt, Human
uuaauuguuguuucuu

SEQ ID NO: 2603390 - RNA, 18 nt, Human
uuaauuguuuugcacuuu

SEQ ID NO: 2603391 - RNA, 18 nt, Human
uuaauuuaaacaccuccu

SEQ ID NO: 2603392 - RNA, 19 nt, Human
uuaauuguuuugcacuuuu

SEQ ID NO: 2603393 - RNA, 23 nt, Human
auaaacaagaccacguuucuaaa

SEQ ID NO: 2603394 - RNA, 15 nt, Human
auaaacaagaccacg

SEQ ID NO: 2603395 - RNA, 22 nt, Human
auaaacaagaccacguuucuaa

SEQ ID NO: 2603396 - RNA, 23 nt, Human
auaaaauuguaaaauuguauaga

SEQ ID NO: 2603397 - RNA, 13 nt, Human
auaaaauuuguug

SEQ ID NO: 2603398 - RNA, 16 nt, Human
auaaaauuuguugcau

SEQ ID NO: 2603399 - RNA, 17 nt, Human
auaaaauuuuuuuucau

SEQ ID NO: 2603400 - RNA, 19 nt, Human
auaaaauuuuuuuucaugu

SEQ ID NO: 2603401 - RNA, 19 nt, Human
auaaacaacuuaauguucu

SEQ ID NO: 2603402 - RNA, 16 nt, Human
auaaacaacuuaaugu

SEQ ID NO: 2603403 - RNA, 23 nt, Human
auaaaauuuuuuuucauguuuua

SEQ ID NO: 2603404 - RNA, 15 nt, Human
auaaacaaaguuacu

SEQ ID NO: 2603405 - RNA, 20 nt, Human
auaaaauuuuuaaucuuuaa

SEQ ID NO: 2603406 - RNA, 18 nt, Human
auaaaauuauuuuggauu

SEQ ID NO: 2603407 - RNA, 13 nt, Human
auaaaauuauuuu

SEQ ID NO: 2603408 - RNA, 21 nt, Human
auaaaauuguaaaauuguaua

SEQ ID NO: 2603409 - RNA, 11 nt, Human
auaaaauugua

SEQ ID NO: 2603410 - RNA, 22 nt, Human
auaaaauucuauuacaguaugu

SEQ ID NO: 2603411 - RNA, 14 nt, Human
auaaaauuauagau

SEQ ID NO: 2603412 - RNA, 13 nt, Human
auaaaauuauaga

SEQ ID NO: 2603413 - RNA, 19 nt, Human
auaaaauguugaaaaguca

SEQ ID NO: 2603414 - RNA, 21 nt, Human
auaaaauuauagaugggaaug

SEQ ID NO: 2603415 - RNA, 20 nt, Human
auaaaauuauagaugggaau

SEQ ID NO: 2603416 - RNA, 23 nt, Human
auaaaauuauagaugggaaugaa

SEQ ID NO: 2603417 - RNA, 13 nt, Human
auaaaauuauucc

SEQ ID NO: 2603418 - RNA, 13 nt, Human
auaaaauuaugcc

SEQ ID NO: 2603419 - RNA, 17 nt, Human
uuacaaaacuacaugag

SEQ ID NO: 2603420 - RNA, 18 nt, Human
uuacaaaacuacaugaga

SEQ ID NO: 2603421 - RNA, 20 nt, Human
uuacaaaacuacaugagaac

SEQ ID NO: 2603422 - RNA, 16 nt, Human
auaaaauuaaagcuga

SEQ ID NO: 2603423 - RNA, 19 nt, Human
uuaauuuuuuugagacaga

SEQ ID NO: 2603424 - RNA, 17 nt, Human
uuaauuuuuuuauuguu

SEQ ID NO: 2603425 - RNA, 15 nt, Human
uuaauuuuuuuauug

SEQ ID NO: 2603426 - RNA, 23 nt, Human
uuaauuuuuuuaaccaaagguga

SEQ ID NO: 2603427 - RNA, 22 nt, Human
uuaauuuuuuuaaccaaaggug

SEQ ID NO: 2603428 - RNA, 18 nt, Human
uuacaaaaauauaaaaua

SEQ ID NO: 2603429 - RNA, 22 nt, Human
uuaauuuacaaaaauauaaaau

SEQ ID NO: 2603430 - RNA, 14 nt, Human
uuaauuuacaaaaa

SEQ ID NO: 2603431 - RNA, 23 nt, Human
uuaauuuacaaaaauauaaaaua

SEQ ID NO: 2603432 - RNA, 18 nt, Human
uuaauuuuuuuaaccaaa

SEQ ID NO: 2603433 - RNA, 17 nt, Human
uuaauuuuuuuaaccaa

SEQ ID NO: 2603434 - RNA, 16 nt, Human
uuaagaagcuguugua

SEQ ID NO: 2603435 - RNA, 14 nt, Human
uuaagaagcuguug

SEQ ID NO: 2603436 - RNA, 13 nt, Human
uuaagaagcuguu

SEQ ID NO: 2603437 - RNA, 11 nt, Human
uuaagaagcug

SEQ ID NO: 2603438 - RNA, 22 nt, Human
uuaagaagacugcauuauauuu

SEQ ID NO: 2603439 - RNA, 22 nt, Human
uuaagaagcuguuguacauuua

SEQ ID NO: 2603440 - RNA, 21 nt, Human
uuaagaagcuguuguacauuu

SEQ ID NO: 2603441 - RNA, 20 nt, Human
uuaagaagcuguuguacauu

SEQ ID NO: 2603442 - RNA, 18 nt, Human
uuaagaagcuguuguaca

SEQ ID NO: 2603443 - RNA, 12 nt, Human
uuaagaaggcaa

SEQ ID NO: 2603444 - RNA, 14 nt, Human
uuaagaaggcaaaa

SEQ ID NO: 2603445 - RNA, 13 nt, Human
uuaagaggcaggg

SEQ ID NO: 2603446 - RNA, 16 nt, Human
uuaagaggcagggucu

SEQ ID NO: 2603447 - RNA, 15 nt, Human
uuaagaggcaggguc

SEQ ID NO: 2603448 - RNA, 18 nt, Human
uuaaguaaggaauuuuau

SEQ ID NO: 2603449 - RNA, 20 nt, Human
uuaagaggcagaaaauugca

SEQ ID NO: 2603450 - RNA, 23 nt, Human
uuaagaagcuguuguacauuuau

SEQ ID NO: 2603451 - RNA, 23 nt, Human
uuaagagccauauaaguuugaag

SEQ ID NO: 2603452 - RNA, 22 nt, Human
uuaagguuauuuauuuaaaugu

SEQ ID NO: 2603453 - RNA, 15 nt, Human
uuaagguuauuuauu

SEQ ID NO: 2603454 - RNA, 17 nt, Human
uuaagucuguuuuauga

SEQ ID NO: 2603455 - RNA, 18 nt, Human
uuaagucuguuuuaugac

SEQ ID NO: 2603456 - RNA, 20 nt, Human
uuaagucuguuuuaugacuu

SEQ ID NO: 2603457 - RNA, 21 nt, Human
uuaagucuguuuuaugacuuc

SEQ ID NO: 2603458 - RNA, 18 nt, Human
uuaaguaaugauaacugg

SEQ ID NO: 2603459 - RNA, 17 nt, Human
uuaaguacuauguauca

SEQ ID NO: 2603460 - RNA, 22 nt, Human
uuaagugcugcauuuaaaagau

SEQ ID NO: 2603461 - RNA, 13 nt, Human
uuaagugaauguc

SEQ ID NO: 2603462 - RNA, 16 nt, Human
uuaagugaugaacauu

SEQ ID NO: 2603463 - RNA, 21 nt, Human
uuaagugcguguguagaguua

SEQ ID NO: 2603464 - RNA, 19 nt, Human
uuaagugcguguguagagu

SEQ ID NO: 2603465 - RNA, 18 nt, Human
uuaagugcguguguagag

SEQ ID NO: 2603466 - RNA, 17 nt, Human
uuaagugcguguguaga

SEQ ID NO: 2603467 - RNA, 16 nt, Human
uuaagugcuuuguaau

SEQ ID NO: 2603468 - RNA, 22 nt, Human
uuaaguuacacauuuuucagau

SEQ ID NO: 2603469 - RNA, 21 nt, Human
uuaaguguuguaaauauuuau

SEQ ID NO: 2603470 - RNA, 18 nt, Human
uuaaguuagggaauggca

SEQ ID NO: 2603471 - RNA, 22 nt, Human
auaaaauaauuuuuauauuuga

SEQ ID NO: 2603472 - RNA, 21 nt, Human
auaaaauaauuuuuauauuug

SEQ ID NO: 2603473 - RNA, 16 nt, Human
auaaaauaauuuuuau

SEQ ID NO: 2603474 - RNA, 13 nt, Human
auaaaauaaagua

SEQ ID NO: 2603475 - RNA, 14 nt, Human
auaaaauaaaguau

SEQ ID NO: 2603476 - RNA, 20 nt, Human
aguuucaggugacaugugaa

SEQ ID NO: 2603477 - RNA, 18 nt, Human
aguuucaggugacaugug

SEQ ID NO: 2603478 - RNA, 17 nt, Human
aguuucaggugacaugu

SEQ ID NO: 2603479 - RNA, 16 nt, Human
aguuucaggugacaug

SEQ ID NO: 2603480 - RNA, 15 nt, Human
aguuucaggugacau

SEQ ID NO: 2603481 - RNA, 14 nt, Human
aguuucaggugaca

SEQ ID NO: 2603482 - RNA, 11 nt, Human
aguuucaggug

SEQ ID NO: 2603483 - RNA, 20 nt, Human
aguuucaggauacaugugcc

SEQ ID NO: 2603484 - RNA, 22 nt, Human
aguuucaggugacaugugaaac

SEQ ID NO: 2603485 - RNA, 21 nt, Human
aguuucaggugacaugugaaa

SEQ ID NO: 2603486 - RNA, 22 nt, Human
auaaaagggacugagaaauuua

SEQ ID NO: 2603487 - RNA, 20 nt, Human
auaaaaggucggaccagcuu

SEQ ID NO: 2603488 - RNA, 13 nt, Human
auaaaagugauca

SEQ ID NO: 2603489 - RNA, 17 nt, Human
auaaaagugaucaauaa

SEQ ID NO: 2603490 - RNA, 18 nt, Human
auaaaagugaucaauaaa

SEQ ID NO: 2603491 - RNA, 22 nt, Human
auaaaagugaucaauaaaaugu

SEQ ID NO: 2603492 - RNA, 18 nt, Human
auaaaagugauuguuggc

SEQ ID NO: 2603493 - RNA, 14 nt, Human
auaaaagugauugu

SEQ ID NO: 2603494 - RNA, 21 nt, Human
auaaaagugauuguuggcaca

SEQ ID NO: 2603495 - RNA, 21 nt, Human
auaaaaguacauguuaaacuu

SEQ ID NO: 2603496 - RNA, 15 nt, Human
auaaaaguacauguu

SEQ ID NO: 2603497 - RNA, 19 nt, Human
auaaaauccauacauuugu

SEQ ID NO: 2603498 - RNA, 18 nt, Human
auaaaauccauacauuug

SEQ ID NO: 2603499 - RNA, 23 nt, Human
auaaaaucagccaauuauguuaa

SEQ ID NO: 2603500 - RNA, 22 nt, Human
auaaaaucagccaauuauguua

SEQ ID NO: 2603501 - RNA, 18 nt, Human
auaaaaucagccaauuau

SEQ ID NO: 2603502 - RNA, 16 nt, Human
auaaaaucagccaauu

SEQ ID NO: 2603503 - RNA, 16 nt, Human
auaaaauaaaguauau

SEQ ID NO: 2603504 - RNA, 17 nt, Human
auaaaauguugaaaagu

SEQ ID NO: 2603505 - RNA, 16 nt, Human
auaaaauguugaaaag

SEQ ID NO: 2603506 - RNA, 13 nt, Human
auaaaauguugaa

SEQ ID NO: 2603507 - RNA, 12 nt, Human
auaaaauguuga

SEQ ID NO: 2603508 - RNA, 13 nt, Human
auaaaaugugauu

SEQ ID NO: 2603509 - RNA, 20 nt, Human
auaaaaugugauuuuucuga

SEQ ID NO: 2603510 - RNA, 18 nt, Human
auaaaaugaggacauguu

SEQ ID NO: 2603511 - RNA, 13 nt, Human
auaaaaugaccag

SEQ ID NO: 2603512 - RNA, 19 nt, Human
auaaaaugaggacauguuu

SEQ ID NO: 2603513 - RNA, 18 nt, Human
auaaaaucauguacauuu

SEQ ID NO: 2603514 - RNA, 20 nt, Human
auaaaaucauguacauuucu

SEQ ID NO: 2603515 - RNA, 15 nt, Human
auaaaaugaccagua

SEQ ID NO: 2603516 - RNA, 22 nt, Human
auaaaugguuaaaagagguuuu

SEQ ID NO: 2603517 - RNA, 17 nt, Human
auaaauguaucauagaa

SEQ ID NO: 2603518 - RNA, 21 nt, Human
auaaauguaucauagaaaugu

SEQ ID NO: 2603519 - RNA, 13 nt, Human
auaaauguaucau

SEQ ID NO: 2603520 - RNA, 15 nt, Human
auaaauguacauuaa

SEQ ID NO: 2603521 - RNA, 20 nt, Human
auaaaugagcuauguauuaa

SEQ ID NO: 2603522 - RNA, 18 nt, Human
auaaaugagcuauguauu

SEQ ID NO: 2603523 - RNA, 17 nt, Human
auaaaugagcuauguau

SEQ ID NO: 2603524 - RNA, 17 nt, Human
auaaaugaauuuuaguu

SEQ ID NO: 2603525 - RNA, 16 nt, Human
auaaaugguuaaaaga

SEQ ID NO: 2603526 - RNA, 22 nt, Human
auaaaugguauagcaaauguuu

SEQ ID NO: 2603527 - RNA, 16 nt, Human
auaaaugaauuuuagu

SEQ ID NO: 2603528 - RNA, 20 nt, Human
auaaaugaagcagcuuuaaa

SEQ ID NO: 2603529 - RNA, 18 nt, Human
auaaaugaagcagcuuua

SEQ ID NO: 2603530 - RNA, 11 nt, Human
auaaaugaaug

SEQ ID NO: 2603531 - RNA, 14 nt, Human
auaacuaaauaaag

SEQ ID NO: 2603532 - RNA, 16 nt, Human
auaacuaaaagguaug

SEQ ID NO: 2603533 - RNA, 18 nt, Human
auaaauguaucuuauuca

SEQ ID NO: 2603534 - RNA, 15 nt, Human
auaaauguaucuuau

SEQ ID NO: 2603535 - RNA, 17 nt, Human
auaaaugucauuaaaau

SEQ ID NO: 2603536 - RNA, 20 nt, Human
auaacuacuccggagacagg

SEQ ID NO: 2603537 - RNA, 19 nt, Human
auaacuacuccggagacag

SEQ ID NO: 2603538 - RNA, 13 nt, Human
auaacuacugugu

SEQ ID NO: 2603539 - RNA, 15 nt, Human
auaacuacuguguuc

SEQ ID NO: 2603540 - RNA, 15 nt, Human
uuacagccucugacu

SEQ ID NO: 2603541 - RNA, 14 nt, Human
uuacagccucugac

SEQ ID NO: 2603542 - RNA, 15 nt, Human
uuacagcgagaggca

SEQ ID NO: 2603543 - RNA, 13 nt, Human
uuacagcugccug

SEQ ID NO: 2603544 - RNA, 20 nt, Human
auaacuagauggugcugaga

SEQ ID NO: 2603545 - RNA, 21 nt, Human
auaacuagauggugcugagaa

SEQ ID NO: 2603546 - RNA, 17 nt, Human
uuacagccucacuugaa

SEQ ID NO: 2603547 - RNA, 19 nt, Human
auaacuagauggugcugag

SEQ ID NO: 2603548 - RNA, 19 nt, Human
auaacuacuguguuccugg

SEQ ID NO: 2603549 - RNA, 16 nt, Human
auaacuacuguguucc

SEQ ID NO: 2603550 - RNA, 18 nt, Human
auaacuacuguguuccug

SEQ ID NO: 2603551 - RNA, 14 nt, Human
uuacaggaaguacu

SEQ ID NO: 2603552 - RNA, 21 nt, Human
uuacagcuggguggcacugcc

SEQ ID NO: 2603553 - RNA, 20 nt, Human
uuacagcuggguggcacugc

SEQ ID NO: 2603554 - RNA, 21 nt, Human
uuacagcgagaggcagagaaa

SEQ ID NO: 2603555 - RNA, 14 nt, Human
uuacagcugccugc

SEQ ID NO: 2603556 - RNA, 11 nt, Human
uuacagcugug

SEQ ID NO: 2603557 - RNA, 19 nt, Human
uuacaguaggagcccagcu

SEQ ID NO: 2603558 - RNA, 17 nt, Human
uuacagugaaaauguaa

SEQ ID NO: 2603559 - RNA, 22 nt, Human
auaaauaugccucuccuuugua

SEQ ID NO: 2603560 - RNA, 14 nt, Human
auaaauaugcagug

SEQ ID NO: 2603561 - RNA, 13 nt, Human
auaaauaugcagu

SEQ ID NO: 2603562 - RNA, 12 nt, Human
auaaauauuaua

SEQ ID NO: 2603563 - RNA, 22 nt, Human
auaaauauuauauuauauauau

SEQ ID NO: 2603564 - RNA, 14 nt, Human
auaaaucuguugcc

SEQ ID NO: 2603565 - RNA, 17 nt, Human
auaaaugaagcagcuuu

SEQ ID NO: 2603566 - RNA, 11 nt, Human
auaaaugaagc

SEQ ID NO: 2603567 - RNA, 20 nt, Human
auaaauauauauauccucug

SEQ ID NO: 2603568 - RNA, 12 nt, Human
auaaauaugaag

SEQ ID NO: 2603569 - RNA, 15 nt, Human
auaaauaugagugcc

SEQ ID NO: 2603570 - RNA, 14 nt, Human
auaaauaugagugc

SEQ ID NO: 2603571 - RNA, 14 nt, Human
auaaauaugaagcu

SEQ ID NO: 2603572 - RNA, 23 nt, Human
auaaauauauauauauauaaaau

SEQ ID NO: 2603573 - RNA, 22 nt, Human
auaaauauauauauauauaaaa

SEQ ID NO: 2603574 - RNA, 21 nt, Human
auaaauauauauauauauaaa

SEQ ID NO: 2603575 - RNA, 21 nt, Human
auaaauauauauaaauauaua

SEQ ID NO: 2603576 - RNA, 20 nt, Human
auaaauauauauaaauauau

SEQ ID NO: 2603577 - RNA, 11 nt, Human
auaaauagcua

SEQ ID NO: 2603578 - RNA, 23 nt, Human
auaaauaccucuuagcugagugg

SEQ ID NO: 2603579 - RNA, 18 nt, Human
auaaauaccucuuagcug

SEQ ID NO: 2603580 - RNA, 14 nt, Human
auaaauaccucuua

SEQ ID NO: 2603581 - RNA, 15 nt, Human
auaaauaaucuguac

SEQ ID NO: 2603582 - RNA, 21 nt, Human
auaaauaaucggcccacagcu

SEQ ID NO: 2603583 - RNA, 12 nt, Human
auaaaguuugcu

SEQ ID NO: 2603584 - RNA, 13 nt, Human
auaaaguuucuca

SEQ ID NO: 2603585 - RNA, 18 nt, Human
auaaaguuggugacagau

SEQ ID NO: 2603586 - RNA, 14 nt, Human
auaaauaacuuuuu

SEQ ID NO: 2603587 - RNA, 19 nt, Human
auaaaguuugcuuagaaaa

SEQ ID NO: 2603588 - RNA, 12 nt, Human
auaaauaacuuu

SEQ ID NO: 2603589 - RNA, 15 nt, Human
auaaaguucuguacu

SEQ ID NO: 2603590 - RNA, 22 nt, Human
auaaaguugaagcuaagauuua

SEQ ID NO: 2603591 - RNA, 21 nt, Human
auaaaguucugaguguuuuua

SEQ ID NO: 2603592 - RNA, 17 nt, Human
auaaaguuggugacaga

SEQ ID NO: 2603593 - RNA, 16 nt, Human
auaaaguuggugacag

SEQ ID NO: 2603594 - RNA, 17 nt, Human
auaaacacccaugaauc

SEQ ID NO: 2603595 - RNA, 13 nt, Human
auaaaguguaaua

SEQ ID NO: 2603596 - RNA, 21 nt, Human
auaacuuauauuguaagaaau

SEQ ID NO: 2603597 - RNA, 22 nt, Human
auaacuuauauuguaagaaaua

SEQ ID NO: 2603598 - RNA, 23 nt, Human
auaacuuauauuguaagaaauac

SEQ ID NO: 2603599 - RNA, 20 nt, Human
auaacuuauauuguaagaaa

SEQ ID NO: 2603600 - RNA, 23 nt, Human
uuagacacuggcugccagcuauu

SEQ ID NO: 2603601 - RNA, 23 nt, Human
uuagacaaauacucauguguaug

SEQ ID NO: 2603602 - RNA, 16 nt, Human
uuagacaagagauggg

SEQ ID NO: 2603603 - RNA, 22 nt, Human
uuagacaaauacucauguguau

SEQ ID NO: 2603604 - RNA, 21 nt, Human
uuagacaaauacucaugugua

SEQ ID NO: 2603605 - RNA, 20 nt, Human
uuagacaaauacucaugugu

SEQ ID NO: 2603606 - RNA, 19 nt, Human
uuagacaaauacucaugug

SEQ ID NO: 2603607 - RNA, 18 nt, Human
uuagacaaauacucaugu

SEQ ID NO: 2603608 - RNA, 15 nt, Human
uuagacaaauacuca

SEQ ID NO: 2603609 - RNA, 11 nt, Human
uuagacagagu

SEQ ID NO: 2603610 - RNA, 18 nt, Human
uuagaagauauuagucuu

SEQ ID NO: 2603611 - RNA, 18 nt, Human
uuagaacauuuuaauuca

SEQ ID NO: 2603612 - RNA, 16 nt, Human
uuagaagaaguguguc

SEQ ID NO: 2603613 - RNA, 23 nt, Human
uuagaagauauuagucuuggggc

SEQ ID NO: 2603614 - RNA, 14 nt, Human
uuagaagaagugug

SEQ ID NO: 2603615 - RNA, 15 nt, Human
uuagaagaagugugu

SEQ ID NO: 2603616 - RNA, 12 nt, Human
uuagaacauuuu

SEQ ID NO: 2603617 - RNA, 13 nt, Human
uuagaaccuuucu

SEQ ID NO: 2603618 - RNA, 11 nt, Human
uuagaaauaua

SEQ ID NO: 2603619 - RNA, 13 nt, Human
uuagaaauagaca

SEQ ID NO: 2603620 - RNA, 15 nt, Human
uuagaaauagacagu

SEQ ID NO: 2603621 - RNA, 12 nt, Human
uuagaaauauaa

SEQ ID NO: 2603622 - RNA, 14 nt, Human
uuagaaauauaauu

SEQ ID NO: 2603623 - RNA, 15 nt, Human
uuacuguaagaaaau

SEQ ID NO: 2603624 - RNA, 18 nt, Human
uuacugguccaaaagauu

SEQ ID NO: 2603625 - RNA, 13 nt, Human
uuacugcaaaugu

SEQ ID NO: 2603626 - RNA, 19 nt, Human
uuacugaucaugcauuguu

SEQ ID NO: 2603627 - RNA, 18 nt, Human
uuacugcaaaugucauca

SEQ ID NO: 2603628 - RNA, 15 nt, Human
uuacugguccaaaag

SEQ ID NO: 2603629 - RNA, 17 nt, Human
uuacugguccaaaagau

SEQ ID NO: 2603630 - RNA, 14 nt, Human
uuacugguccaaaa

SEQ ID NO: 2603631 - RNA, 18 nt, Human
uuacucagaauucucuag

SEQ ID NO: 2603632 - RNA, 23 nt, Human
uuacucagaauucucuaguuuga

SEQ ID NO: 2603633 - RNA, 19 nt, Human
uuaccuuagauuagcucug

SEQ ID NO: 2603634 - RNA, 15 nt, Human
uuacucaacccucuc

SEQ ID NO: 2603635 - RNA, 19 nt, Human
uuacuauuuuacuucuaga

SEQ ID NO: 2603636 - RNA, 21 nt, Human
uuaccuuagauuagcucugga

SEQ ID NO: 2603637 - RNA, 23 nt, Human
uuaccuguuuucgcaccuaccau

SEQ ID NO: 2603638 - RNA, 14 nt, Human
uuacugauauauuu

SEQ ID NO: 2603639 - RNA, 23 nt, Human
uuacugauauauuuuacaauuuu

SEQ ID NO: 2603640 - RNA, 22 nt, Human
uuacugauagggauacaugcuc

SEQ ID NO: 2603641 - RNA, 19 nt, Human
uuacugagcuucucuguga

SEQ ID NO: 2603642 - RNA, 13 nt, Human
uuacugaucaugc

SEQ ID NO: 2603643 - RNA, 14 nt, Human
uuacugaucaugca

SEQ ID NO: 2603644 - RNA, 15 nt, Human
uuacugaucaugcau

SEQ ID NO: 2603645 - RNA, 16 nt, Human
uuacugaucaugcauu

SEQ ID NO: 2603646 - RNA, 17 nt, Human
uuacugaucaugcauug

SEQ ID NO: 2603647 - RNA, 18 nt, Human
uuacugaucaugcauugu

SEQ ID NO: 2603648 - RNA, 21 nt, Human
uuacugaucaugcauuguuga

SEQ ID NO: 2603649 - RNA, 23 nt, Human
uuacugaaugcaccauggucaaa

SEQ ID NO: 2603650 - RNA, 12 nt, Human
uuacucagcccu

SEQ ID NO: 2603651 - RNA, 13 nt, Human
uuacugagcuucu

SEQ ID NO: 2603652 - RNA, 12 nt, Human
uuacugaccagc

SEQ ID NO: 2603653 - RNA, 18 nt, Human
uuacugagcuucucugug

SEQ ID NO: 2603654 - RNA, 17 nt, Human
uuacugagcuucucugu

SEQ ID NO: 2603655 - RNA, 16 nt, Human
uuacugagcuucucug

SEQ ID NO: 2603656 - RNA, 14 nt, Human
uuacugagcuucuc

SEQ ID NO: 2603657 - RNA, 12 nt, Human
uuaccugggaaa

SEQ ID NO: 2603658 - RNA, 18 nt, Human
uuaccugggcauucuugu

SEQ ID NO: 2603659 - RNA, 14 nt, Human
uuacaucuguuuua

SEQ ID NO: 2603660 - RNA, 14 nt, Human
uuaccuuacagaag

SEQ ID NO: 2603661 - RNA, 22 nt, Human
uuaccuguuuucgcaccuacca

SEQ ID NO: 2603662 - RNA, 13 nt, Human
uuaccugugaaau

SEQ ID NO: 2603663 - RNA, 20 nt, Human
uuacauaagauaaaugugcu

SEQ ID NO: 2603664 - RNA, 21 nt, Human
uuacauaaucuguacaaugaa

SEQ ID NO: 2603665 - RNA, 20 nt, Human
uuacagugaaaauguaagcu

SEQ ID NO: 2603666 - RNA, 19 nt, Human
uuacagugaaaauguaagc

SEQ ID NO: 2603667 - RNA, 14 nt, Human
uuacauacugcugu

SEQ ID NO: 2603668 - RNA, 13 nt, Human
uuacauccuuaaa

SEQ ID NO: 2603669 - RNA, 20 nt, Human
uuacaucauuuuuguaucua

SEQ ID NO: 2603670 - RNA, 18 nt, Human
uuacaucauuuuuguauc

SEQ ID NO: 2603671 - RNA, 14 nt, Human
uuacaucauuuuug

SEQ ID NO: 2603672 - RNA, 13 nt, Human
uuacaucauuuuu

SEQ ID NO: 2603673 - RNA, 22 nt, Human
uuacauauuugcauauguauga

SEQ ID NO: 2603674 - RNA, 16 nt, Human
uuacauagguauauau

SEQ ID NO: 2603675 - RNA, 22 nt, Human
uuacauaucaccucauggccua

SEQ ID NO: 2603676 - RNA, 18 nt, Human
uuacaucaaggcuucaaa

SEQ ID NO: 2603677 - RNA, 23 nt, Human
aguuguuugauucagacagcugc

SEQ ID NO: 2603678 - RNA, 21 nt, Human
aguuguuugauucagacagcu

SEQ ID NO: 2603679 - RNA, 22 nt, Human
aguuguaaauauauaaauauau

SEQ ID NO: 2603680 - RNA, 20 nt, Human
aguuguaaauauauaaauau

SEQ ID NO: 2603681 - RNA, 18 nt, Human
aguuguaaauauauaaau

SEQ ID NO: 2603682 - RNA, 17 nt, Human
aguuguaaauauauaaa

SEQ ID NO: 2603683 - RNA, 16 nt, Human
aguuguaaauauauaa

SEQ ID NO: 2603684 - RNA, 15 nt, Human
aguuguaaauauaua

SEQ ID NO: 2603685 - RNA, 14 nt, Human
aguuguaaauauau

SEQ ID NO: 2603686 - RNA, 13 nt, Human
aguuguaaauaua

SEQ ID NO: 2603687 - RNA, 18 nt, Human
aguuggucccccuuccau

SEQ ID NO: 2603688 - RNA, 16 nt, Human
aguugggagcacugga

SEQ ID NO: 2603689 - RNA, 13 nt, Human
aguuggugacaga

SEQ ID NO: 2603690 - RNA, 16 nt, Human
aguuuaggauaaaaua

SEQ ID NO: 2603691 - RNA, 20 nt, Human
aguuuaauggugccuucauu

SEQ ID NO: 2603692 - RNA, 22 nt, Human
aguuuaauccuucuaguuuccc

SEQ ID NO: 2603693 - RNA, 23 nt, Human
aguuuaaccaaaaagaccagacu

SEQ ID NO: 2603694 - RNA, 22 nt, Human
aguuuaacacaaguccugugaa

SEQ ID NO: 2603695 - RNA, 14 nt, Human
aguuuaaggaauau

SEQ ID NO: 2603696 - RNA, 12 nt, Human
aguuuaaaaaaa

SEQ ID NO: 2603697 - RNA, 13 nt, Human
aguuguuugcaug

SEQ ID NO: 2603698 - RNA, 19 nt, Human
aguuguuuucagacucaga

SEQ ID NO: 2603699 - RNA, 16 nt, Human
aguuggcuaggacccc

SEQ ID NO: 2603700 - RNA, 18 nt, Human
aguuggcuggaugaaauu

SEQ ID NO: 2603701 - RNA, 18 nt, Human
aguuggcuaggggagcag

SEQ ID NO: 2603702 - RNA, 16 nt, Human
aguuggccagagagcc

SEQ ID NO: 2603703 - RNA, 16 nt, Human
aguugcugcaaaccug

SEQ ID NO: 2603704 - RNA, 17 nt, Human
aguugcugcaaaccuga

SEQ ID NO: 2603705 - RNA, 16 nt, Human
aguugcguggacucug

SEQ ID NO: 2603706 - RNA, 21 nt, Human
aguugcuccgccucugcuggc

SEQ ID NO: 2603707 - RNA, 17 nt, Human
aguuggguggaugccug

SEQ ID NO: 2603708 - RNA, 13 nt, Human
aguuggcuucuaa

SEQ ID NO: 2603709 - RNA, 23 nt, Human
aguugggaacuucagauggaccu

SEQ ID NO: 2603710 - RNA, 21 nt, Human
aguuggguggaugccuggugg

SEQ ID NO: 2603711 - RNA, 13 nt, Human
aguugggagcacu

SEQ ID NO: 2603712 - RNA, 15 nt, Human
aguugggagcacugg

SEQ ID NO: 2603713 - RNA, 20 nt, Human
aguugcguggacucugcaca

SEQ ID NO: 2603714 - RNA, 23 nt, Human
aguugcagacucaguuugucaga

SEQ ID NO: 2603715 - RNA, 17 nt, Human
aguugcacggcugcuga

SEQ ID NO: 2603716 - RNA, 16 nt, Human
aguugcacggcugcug

SEQ ID NO: 2603717 - RNA, 15 nt, Human
aguugcacggcugcu

SEQ ID NO: 2603718 - RNA, 17 nt, Human
aguugcacagcuaugaa

SEQ ID NO: 2603719 - RNA, 15 nt, Human
aguugcacugauauu

SEQ ID NO: 2603720 - RNA, 20 nt, Human
aguugcacggcugcugaggc

SEQ ID NO: 2603721 - RNA, 20 nt, Human
aguugcacuuggccucugga

SEQ ID NO: 2603722 - RNA, 11 nt, Human
aguugcagaaa

SEQ ID NO: 2603723 - RNA, 16 nt, Human
aguugcagacucaguu

SEQ ID NO: 2603724 - RNA, 17 nt, Human
aguugcagacucaguuu

SEQ ID NO: 2603725 - RNA, 18 nt, Human
aguugcagacucaguuug

SEQ ID NO: 2603726 - RNA, 22 nt, Human
aguugcagacucaguuugucag

SEQ ID NO: 2603727 - RNA, 16 nt, Human
aguugcagauucauuu

SEQ ID NO: 2603728 - RNA, 15 nt, Human
aguucuucgggaaga

SEQ ID NO: 2603729 - RNA, 22 nt, Human
aguucuuaaggauugugauauu

SEQ ID NO: 2603730 - RNA, 21 nt, Human
aguucuuaguugcuguauguc

SEQ ID NO: 2603731 - RNA, 20 nt, Human
aguucuuaguugcuguaugu

SEQ ID NO: 2603732 - RNA, 19 nt, Human
uuaaaggcuucucucucac

SEQ ID NO: 2603733 - RNA, 17 nt, Human
uuaaaggcuucucucuc

SEQ ID NO: 2603734 - RNA, 20 nt, Human
uuaaaggcuucucucucacc

SEQ ID NO: 2603735 - RNA, 19 nt, Human
uuaaaggguguacuuauau

SEQ ID NO: 2603736 - RNA, 21 nt, Human
uuaaaggggcagaaaaacucu

SEQ ID NO: 2603737 - RNA, 20 nt, Human
uuaaauaaauuguauauuca

SEQ ID NO: 2603738 - RNA, 18 nt, Human
uuaaauaaauuguauauu

SEQ ID NO: 2603739 - RNA, 21 nt, Human
uuaaauaaaugucauuaaaau

SEQ ID NO: 2603740 - RNA, 17 nt, Human
uuaaauaaauuguauau

SEQ ID NO: 2603741 - RNA, 15 nt, Human
uuaaauaaauuguau

SEQ ID NO: 2603742 - RNA, 13 nt, Human
uuaaauaaauugu

SEQ ID NO: 2603743 - RNA, 18 nt, Human
uuaaauaaaugucauuaa

SEQ ID NO: 2603744 - RNA, 20 nt, Human
uuaaauaaaugucauuaaaa

SEQ ID NO: 2603745 - RNA, 16 nt, Human
uuaaaggaaaaaaugu

SEQ ID NO: 2603746 - RNA, 12 nt, Human
uuaaaggaaaaa

SEQ ID NO: 2603747 - RNA, 15 nt, Human
uuaaaauuuauugcu

SEQ ID NO: 2603748 - RNA, 22 nt, Human
uuaaaggaagguucugguguga

SEQ ID NO: 2603749 - RNA, 12 nt, Human
uuaaaggaguua

SEQ ID NO: 2603750 - RNA, 17 nt, Human
uuaaaggaaaaaauguu

SEQ ID NO: 2603751 - RNA, 20 nt, Human
uuaaaggaagguucuggugu

SEQ ID NO: 2603752 - RNA, 18 nt, Human
uuaaaggcaccaucuaau

SEQ ID NO: 2603753 - RNA, 17 nt, Human
uuaaaggauguuggugu

SEQ ID NO: 2603754 - RNA, 16 nt, Human
uuaaaggcuucucucu

SEQ ID NO: 2603755 - RNA, 15 nt, Human
uuaaaggcuucucuc

SEQ ID NO: 2603756 - RNA, 15 nt, Human
uuaaaggcuguggua

SEQ ID NO: 2603757 - RNA, 12 nt, Human
uuaaaaaauguc

SEQ ID NO: 2603758 - RNA, 13 nt, Human
uuaaaaaaugucc

SEQ ID NO: 2603759 - RNA, 16 nt, Human
uuaaaaaauguccaug

SEQ ID NO: 2603760 - RNA, 16 nt, Human
aguuuauacucaccuu

SEQ ID NO: 2603761 - RNA, 17 nt, Human
aguuuaguaaggcugug

SEQ ID NO: 2603762 - RNA, 20 nt, Human
uuaaaaagaaacaagaugcu

SEQ ID NO: 2603763 - RNA, 17 nt, Human
uuaaaaagaaacaagau

SEQ ID NO: 2603764 - RNA, 16 nt, Human
uuaaaaacuauuuaac

SEQ ID NO: 2603765 - RNA, 13 nt, Human
uuaaaauguucac

SEQ ID NO: 2603766 - RNA, 23 nt, Human
uuaaaaagggcagggcaucuccu

SEQ ID NO: 2603767 - RNA, 13 nt, Human
uuaaaauugugau

SEQ ID NO: 2603768 - RNA, 18 nt, Human
uuaaaauugugauguguc

SEQ ID NO: 2603769 - RNA, 12 nt, Human
uuaaaauuuauu

SEQ ID NO: 2603770 - RNA, 15 nt, Human
uuaacaaaagcaaga

SEQ ID NO: 2603771 - RNA, 21 nt, Human
uuaacaacaauaacacugucu

SEQ ID NO: 2603772 - RNA, 23 nt, Human
uuaacaaacaucacucugcugcu

SEQ ID NO: 2603773 - RNA, 22 nt, Human
uuaacaaacaucacucugcugc

SEQ ID NO: 2603774 - RNA, 17 nt, Human
uuaaauuuguaaguuuc

SEQ ID NO: 2603775 - RNA, 15 nt, Human
uuaaauuuguaaguu

SEQ ID NO: 2603776 - RNA, 14 nt, Human
uuaaauuuguaagu

SEQ ID NO: 2603777 - RNA, 13 nt, Human
uuaaauuuguaag

SEQ ID NO: 2603778 - RNA, 16 nt, Human
uuaaauuuuaauuuau

SEQ ID NO: 2603779 - RNA, 21 nt, Human
uuaaauuuguaaguuucaggu

SEQ ID NO: 2603780 - RNA, 15 nt, Human
uuaaauuuuaauuua

SEQ ID NO: 2603781 - RNA, 16 nt, Human
uuaaauaauaaagauc

SEQ ID NO: 2603782 - RNA, 20 nt, Human
uuaaauucuugcaaaguauc

SEQ ID NO: 2603783 - RNA, 16 nt, Human
uuaaauugcuguguau

SEQ ID NO: 2603784 - RNA, 15 nt, Human
uuaaauuucuaccgc

SEQ ID NO: 2603785 - RNA, 23 nt, Human
aguuucagauauauaucauauug

SEQ ID NO: 2603786 - RNA, 17 nt, Human
aguuucagauauauauc

SEQ ID NO: 2603787 - RNA, 15 nt, Human
aguuucagauauaua

SEQ ID NO: 2603788 - RNA, 14 nt, Human
aguuucagauauau

SEQ ID NO: 2603789 - RNA, 18 nt, Human
aguuucagagaaguucug

SEQ ID NO: 2603790 - RNA, 17 nt, Human
aguuucacugccauaua

SEQ ID NO: 2603791 - RNA, 12 nt, Human
aguuucagagaa

SEQ ID NO: 2603792 - RNA, 15 nt, Human
aguuucacugacuua

SEQ ID NO: 2603793 - RNA, 17 nt, Human
aguuucaauucagugcu

SEQ ID NO: 2603794 - RNA, 16 nt, Human
aguuucaauucagugc

SEQ ID NO: 2603795 - RNA, 17 nt, Human
uuaacaguuuuccauga

SEQ ID NO: 2603796 - RNA, 19 nt, Human
uuaacaguuuuccaugaaa

SEQ ID NO: 2603797 - RNA, 20 nt, Human
uuaacaguuuuccaugaaaa

SEQ ID NO: 2603798 - RNA, 21 nt, Human
uuaacaguuuuccaugaaaac

SEQ ID NO: 2603799 - RNA, 22 nt, Human
uuaacaacaauaacacugucuc

SEQ ID NO: 2603800 - RNA, 14 nt, Human
uuaacaacuugucu

SEQ ID NO: 2603801 - RNA, 17 nt, Human
uuaacagucauuuaaaa

SEQ ID NO: 2603802 - RNA, 16 nt, Human
uuaacagucauuuaaa

SEQ ID NO: 2603803 - RNA, 13 nt, Human
uuaacaguuuucc

SEQ ID NO: 2603804 - RNA, 14 nt, Human
uuaacaguuuucca

SEQ ID NO: 2603805 - RNA, 16 nt, Human
uuaacaguuuuccaug

SEQ ID NO: 2603806 - RNA, 15 nt, Human
uuaacagucauuuaa

SEQ ID NO: 2603807 - RNA, 22 nt, Human
uuaacagggucucuagugcugu

SEQ ID NO: 2603808 - RNA, 13 nt, Human
uuaacagggaggg

SEQ ID NO: 2603809 - RNA, 16 nt, Human
uguuuugccaacauug

SEQ ID NO: 2603810 - RNA, 14 nt, Human
uguuuugcacuuuu

SEQ ID NO: 2603811 - RNA, 14 nt, Human
uguuuugcaagcca

SEQ ID NO: 2603812 - RNA, 13 nt, Human
uguuuugcacuuu

SEQ ID NO: 2603813 - RNA, 12 nt, Human
uguuuugcacuu

SEQ ID NO: 2603814 - RNA, 20 nt, Human
uguuuugauaaaguaguaaa

SEQ ID NO: 2603815 - RNA, 18 nt, Human
uguuuugauaaaguagua

SEQ ID NO: 2603816 - RNA, 20 nt, Human
uguuuugauguuuguggccu

SEQ ID NO: 2603817 - RNA, 16 nt, Human
aguucugcagauaaac

SEQ ID NO: 2603818 - RNA, 14 nt, Human
aguucugacuugac

SEQ ID NO: 2603819 - RNA, 13 nt, Human
aguucugaagaau

SEQ ID NO: 2603820 - RNA, 14 nt, Human
aguucugaguguuu

SEQ ID NO: 2603821 - RNA, 15 nt, Human
aguucugaguguuuu

SEQ ID NO: 2603822 - RNA, 21 nt, Human
aguucugcagauaaacaguag

SEQ ID NO: 2603823 - RNA, 22 nt, Human
aguucugaguguuuuuacuaca

SEQ ID NO: 2603824 - RNA, 14 nt, Human
aguucugguuccua

SEQ ID NO: 2603825 - RNA, 11 nt, Human
aguucugggca

SEQ ID NO: 2603826 - RNA, 12 nt, Human
aguucugcucua

SEQ ID NO: 2603827 - RNA, 12 nt, Human
aguucugggugc

SEQ ID NO: 2603828 - RNA, 19 nt, Human
aguucugggugcucccuac

SEQ ID NO: 2603829 - RNA, 14 nt, Human
aguucuguaaaaua

SEQ ID NO: 2603830 - RNA, 17 nt, Human
aguucugggugcucccu

SEQ ID NO: 2603831 - RNA, 12 nt, Human
aguucuguagaa

SEQ ID NO: 2603832 - RNA, 23 nt, Human
aguucuguacucaaauguagcca

SEQ ID NO: 2603833 - RNA, 16 nt, Human
aguucuuaguugcugu

SEQ ID NO: 2603834 - RNA, 15 nt, Human
aguucugcuccucuc

SEQ ID NO: 2603835 - RNA, 14 nt, Human
aguucugcuccucu

SEQ ID NO: 2603836 - RNA, 12 nt, Human
aguucugcuccu

SEQ ID NO: 2603837 - RNA, 19 nt, Human
aguucugcuccucuccagg

SEQ ID NO: 2603838 - RNA, 18 nt, Human
aguucugcuccucuccag

SEQ ID NO: 2603839 - RNA, 17 nt, Human
aguucugcuccucucca

SEQ ID NO: 2603840 - RNA, 16 nt, Human
aguucugcuccucucc

SEQ ID NO: 2603841 - RNA, 21 nt, Human
aguucugcuccucuccaggca

SEQ ID NO: 2603842 - RNA, 20 nt, Human
aguucugcuccucuccaggc

SEQ ID NO: 2603843 - RNA, 21 nt, Human
uguuuuauuuuaauucaguug

SEQ ID NO: 2603844 - RNA, 13 nt, Human
uguuuggagacag

SEQ ID NO: 2603845 - RNA, 18 nt, Human
uguuuuaugacuucauua

SEQ ID NO: 2603846 - RNA, 12 nt, Human
uguuuuaucaug

SEQ ID NO: 2603847 - RNA, 23 nt, Human
uguuuuaucaugacauguuauau

SEQ ID NO: 2603848 - RNA, 22 nt, Human
uguuugcacguuaugguguuuc

SEQ ID NO: 2603849 - RNA, 21 nt, Human
uguuugaugcauuaaaagaaa

SEQ ID NO: 2603850 - RNA, 23 nt, Human
uguuugcacguuaugguguuucu

SEQ ID NO: 2603851 - RNA, 24 nt, Human
uguuugcucucccgguucuuccag

SEQ ID NO: 2603852 - RNA, 15 nt, Human
uguuugcuuauuguu

SEQ ID NO: 2603853 - RNA, 16 nt, Human
uguuugcuuauuguuc

SEQ ID NO: 2603854 - RNA, 18 nt, Human
uguuugcuuauuguucca

SEQ ID NO: 2603855 - RNA, 18 nt, Human
uguuuggaauauugucca

SEQ ID NO: 2603856 - RNA, 23 nt, Human
uguuugcucucccgguucuucca

SEQ ID NO: 2603857 - RNA, 20 nt, Human
uguuugcuuauuguuccaag

SEQ ID NO: 2603858 - RNA, 21 nt, Human
uguuugcuuauuguuccaaga

SEQ ID NO: 2603859 - RNA, 18 nt, Human
uguuugcuucauaaauga

SEQ ID NO: 2603860 - RNA, 23 nt, Human
uguuugcuuauuguuccaagaca

SEQ ID NO: 2603861 - RNA, 20 nt, Human
uguuuuccaugaguccccug

SEQ ID NO: 2603862 - RNA, 17 nt, Human
uguuuuccagcuccuca

SEQ ID NO: 2603863 - RNA, 15 nt, Human
uguuuuccagcuccu

SEQ ID NO: 2603864 - RNA, 22 nt, Human
uguuuucccgagcaaagucuaa

SEQ ID NO: 2603865 - RNA, 23 nt, Human
uguuuucccgagcaaagucuaaa

SEQ ID NO: 2603866 - RNA, 18 nt, Human
uguuuuccauuguuugaa

SEQ ID NO: 2603867 - RNA, 12 nt, Human
uguuuucccuga

SEQ ID NO: 2603868 - RNA, 19 nt, Human
uguuuucauuaucucaaaa

SEQ ID NO: 2603869 - RNA, 15 nt, Human
uguuuuauuccugua

SEQ ID NO: 2603870 - RNA, 14 nt, Human
uguuuuauuccugu

SEQ ID NO: 2603871 - RNA, 15 nt, Human
uguuuucauaauaaa

SEQ ID NO: 2603872 - RNA, 20 nt, Human
uguuuucauggugaaaaugu

SEQ ID NO: 2603873 - RNA, 12 nt, Human
uguuuugauaaa

SEQ ID NO: 2603874 - RNA, 19 nt, Human
uguuuugagcuuuccaugu

SEQ ID NO: 2603875 - RNA, 18 nt, Human
uguuuugagcuuuccaug

SEQ ID NO: 2603876 - RNA, 16 nt, Human
uguuuugagcuuucca

SEQ ID NO: 2603877 - RNA, 17 nt, Human
uguuuugacggaugauu

SEQ ID NO: 2603878 - RNA, 22 nt, Human
uguuuugaaugguguuguaugc

SEQ ID NO: 2603879 - RNA, 19 nt, Human
uguuuugaaugguguugua

SEQ ID NO: 2603880 - RNA, 17 nt, Human
uguuuugaaggcaaaau

SEQ ID NO: 2603881 - RNA, 23 nt, Human
uguuuucugagcccgggcugccu

SEQ ID NO: 2603882 - RNA, 12 nt, Human
uguuuucugaau

SEQ ID NO: 2603883 - RNA, 17 nt, Human
uguuuucugaauaacau

SEQ ID NO: 2603884 - RNA, 17 nt, Human
uguuuucuuuugguaaa

SEQ ID NO: 2603885 - RNA, 11 nt, Human
uguuuucuucu

SEQ ID NO: 2603886 - RNA, 19 nt, Human
uguuuauugucaaaguggu

SEQ ID NO: 2603887 - RNA, 17 nt, Human
uguuuauugucaaagug

SEQ ID NO: 2603888 - RNA, 13 nt, Human
uguuuauuaacaa

SEQ ID NO: 2603889 - RNA, 14 nt, Human
uguuuauuaacaaa

SEQ ID NO: 2603890 - RNA, 16 nt, Human
uguuuauuaacaaauu

SEQ ID NO: 2603891 - RNA, 19 nt, Human
uguuuauuaacaaauuaug

SEQ ID NO: 2603892 - RNA, 16 nt, Human
uguuuaugugugugug

SEQ ID NO: 2603893 - RNA, 13 nt, Human
uguuuaugugugu

SEQ ID NO: 2603894 - RNA, 16 nt, Human
uguuuauaaacauugu

SEQ ID NO: 2603895 - RNA, 21 nt, Human
uguuuauagcaaacuuggaau

SEQ ID NO: 2603896 - RNA, 16 nt, Human
uguuuauaccuuugcc

SEQ ID NO: 2603897 - RNA, 15 nt, Human
uguuuauacagcuca

SEQ ID NO: 2603898 - RNA, 20 nt, Human
uguuuauauaaaugcuuuua

SEQ ID NO: 2603899 - RNA, 16 nt, Human
uguuuauauaaaugcu

SEQ ID NO: 2603900 - RNA, 14 nt, Human
uguuuauauaaaug

SEQ ID NO: 2603901 - RNA, 13 nt, Human
uguugcugaauag

SEQ ID NO: 2603902 - RNA, 23 nt, Human
uguugcucaaaucuauucagaca

SEQ ID NO: 2603903 - RNA, 14 nt, Human
uguuuaguugcaga

SEQ ID NO: 2603904 - RNA, 11 nt, Human
uguugcugaau

SEQ ID NO: 2603905 - RNA, 21 nt, Human
uguugcucaaaucuauucaga

SEQ ID NO: 2603906 - RNA, 14 nt, Human
uguugcucagucuc

SEQ ID NO: 2603907 - RNA, 21 nt, Human
uguugcuaagccccagcaagc

SEQ ID NO: 2603908 - RNA, 12 nt, Human
uguugcuaagcc

SEQ ID NO: 2603909 - RNA, 22 nt, Human
uguugcuaagccccagcaagca

SEQ ID NO: 2603910 - RNA, 19 nt, Human
uguugcucaaaaaaugagc

SEQ ID NO: 2603911 - RNA, 18 nt, Human
uguugccuuuaugguuuc

SEQ ID NO: 2603912 - RNA, 11 nt, Human
uguugcuaagc

SEQ ID NO: 2603913 - RNA, 19 nt, Human
uguugccuugcauaauggu

SEQ ID NO: 2603914 - RNA, 20 nt, Human
uguugcacacccacucagcu

SEQ ID NO: 2603915 - RNA, 21 nt, Human
uguugcacacccacucagcuc

SEQ ID NO: 2603916 - RNA, 22 nt, Human
uguugcacacccacucagcucc

SEQ ID NO: 2603917 - RNA, 22 nt, Human
uguugccuugaaccacuucccu

SEQ ID NO: 2603918 - RNA, 19 nt, Human
uguugcccaggcaggucuu

SEQ ID NO: 2603919 - RNA, 19 nt, Human
uguuucuuuguaaugaaaa

SEQ ID NO: 2603920 - RNA, 18 nt, Human
uguuucuuuguaaugaaa

SEQ ID NO: 2603921 - RNA, 13 nt, Human
uguuucuuucuag

SEQ ID NO: 2603922 - RNA, 18 nt, Human
uguuucuuccaaagcaca

SEQ ID NO: 2603923 - RNA, 19 nt, Human
uguuucuguuauuaacaaa

SEQ ID NO: 2603924 - RNA, 15 nt, Human
uguuucuguuauuaa

SEQ ID NO: 2603925 - RNA, 14 nt, Human
uguuucuguuauua

SEQ ID NO: 2603926 - RNA, 17 nt, Human
uguuucuguucaccuuc

SEQ ID NO: 2603927 - RNA, 17 nt, Human
uguuucuuccaaagcac

SEQ ID NO: 2603928 - RNA, 19 nt, Human
uguuucuuccaaagcacau

SEQ ID NO: 2603929 - RNA, 24 nt, Human
uguuuauuuauagaguguacuuaa

SEQ ID NO: 2603930 - RNA, 14 nt, Human
uguuuauuuauaga

SEQ ID NO: 2603931 - RNA, 22 nt, Human
uguuuauuuauaagcagauuua

SEQ ID NO: 2603932 - RNA, 23 nt, Human
uguuuauuuauaagcagauuuaa

SEQ ID NO: 2603933 - RNA, 13 nt, Human
uguuucuguuauu

SEQ ID NO: 2603934 - RNA, 12 nt, Human
uguuucuguuau

SEQ ID NO: 2603935 - RNA, 15 nt, Human
uguuuauuuaucagu

SEQ ID NO: 2603936 - RNA, 22 nt, Human
uguuugauucagacagcugccu

SEQ ID NO: 2603937 - RNA, 17 nt, Human
uguuugauucagacagc

SEQ ID NO: 2603938 - RNA, 13 nt, Human
uguuugaugcauu

SEQ ID NO: 2603939 - RNA, 16 nt, Human
uguuugaugcauuaaa

SEQ ID NO: 2603940 - RNA, 19 nt, Human
uguuugaugcauuaaaaga

SEQ ID NO: 2603941 - RNA, 22 nt, Human
uguuugaggauauauuuucacu

SEQ ID NO: 2603942 - RNA, 18 nt, Human
uguuugagcucugcagcc

SEQ ID NO: 2603943 - RNA, 22 nt, Human
uguuugagguuuuuaagccuua

SEQ ID NO: 2603944 - RNA, 14 nt, Human
uguuugagcucaga

SEQ ID NO: 2603945 - RNA, 23 nt, Human
uguuugagcucagacccccacuc

SEQ ID NO: 2603946 - RNA, 21 nt, Human
uguuucuuuuguauguaaaug

SEQ ID NO: 2603947 - RNA, 20 nt, Human
uguuucuuuuguauguaaau

SEQ ID NO: 2603948 - RNA, 14 nt, Human
uguuucuuuuguau

SEQ ID NO: 2603949 - RNA, 13 nt, Human
uguuucuuuugua

SEQ ID NO: 2603950 - RNA, 15 nt, Human
uguuucuuuucacau

SEQ ID NO: 2603951 - RNA, 13 nt, Human
uguuugaaaucuu

SEQ ID NO: 2603952 - RNA, 18 nt, Human
uguuugaaacaaagaagg

SEQ ID NO: 2603953 - RNA, 13 nt, Human
uguuugagcucag

SEQ ID NO: 2603954 - RNA, 14 nt, Human
uguuugagaaauua

SEQ ID NO: 2603955 - RNA, 22 nt, Human
uguuugacaaaguuacugauuc

SEQ ID NO: 2603956 - RNA, 22 nt, Human
uguuugacaaagaaacccaagu

SEQ ID NO: 2603957 - RNA, 17 nt, Human
uguuugaagccugcccu

SEQ ID NO: 2603958 - RNA, 22 nt, Human
uguuugaaucccacgcuucucu

SEQ ID NO: 2603959 - RNA, 21 nt, Human
uguuugacaaagaaacccaag

SEQ ID NO: 2603960 - RNA, 21 nt, Human
uguuugacgggaaacaaaacu

SEQ ID NO: 2603961 - RNA, 19 nt, Human
aguggugguuuucuguucu

SEQ ID NO: 2603962 - RNA, 20 nt, Human
aguggugguuuucuguucuu

SEQ ID NO: 2603963 - RNA, 21 nt, Human
aguggugguuuucuguucuuu

SEQ ID NO: 2603964 - RNA, 23 nt, Human
aguggugguuuucuguucuuucu

SEQ ID NO: 2603965 - RNA, 17 nt, Human
aguggugguuuucuguu

SEQ ID NO: 2603966 - RNA, 18 nt, Human
aguggugguuuucuguuc

SEQ ID NO: 2603967 - RNA, 21 nt, Human
agugguggugaacagaacaaa

SEQ ID NO: 2603968 - RNA, 20 nt, Human
aguggugguaacccuggugg

SEQ ID NO: 2603969 - RNA, 18 nt, Human
aguggugguaacccuggu

SEQ ID NO: 2603970 - RNA, 19 nt, Human
aguggugguaacccuggug

SEQ ID NO: 2603971 - RNA, 18 nt, Human
agugguggcagggccuag

SEQ ID NO: 2603972 - RNA, 16 nt, Human
agugguggcagggccu

SEQ ID NO: 2603973 - RNA, 15 nt, Human
agugguggcagggcc

SEQ ID NO: 2603974 - RNA, 14 nt, Human
agugguggcagggc

SEQ ID NO: 2603975 - RNA, 13 nt, Human
agugguggcaggg

SEQ ID NO: 2603976 - RNA, 11 nt, Human
agugguggcag

SEQ ID NO: 2603977 - RNA, 22 nt, Human
aguggugcucaguuguagaaug

SEQ ID NO: 2603978 - RNA, 20 nt, Human
aguggugcucaguuguagaa

SEQ ID NO: 2603979 - RNA, 17 nt, Human
aguggugcucaguugua

SEQ ID NO: 2603980 - RNA, 16 nt, Human
aguggugcucaguugu

SEQ ID NO: 2603981 - RNA, 15 nt, Human
aguggugcucaguug

SEQ ID NO: 2603982 - RNA, 13 nt, Human
aguggugcucagu

SEQ ID NO: 2603983 - RNA, 20 nt, Human
aguggaccaggacaggacca

SEQ ID NO: 2603984 - RNA, 16 nt, Human
aguggaccaggacagg

SEQ ID NO: 2603985 - RNA, 19 nt, Human
aguggaccaggacaggacc

SEQ ID NO: 2603986 - RNA, 20 nt, Human
aguggacauuguuggcagca

SEQ ID NO: 2603987 - RNA, 13 nt, Human
aguggaccaggac

SEQ ID NO: 2603988 - RNA, 14 nt, Human
aguggaccaggaca

SEQ ID NO: 2603989 - RNA, 15 nt, Human
aguggaccaggacag

SEQ ID NO: 2603990 - RNA, 17 nt, Human
aguggugcgaucugggu

SEQ ID NO: 2603991 - RNA, 22 nt, Human
aguggaaugcuuccuagaaguu

SEQ ID NO: 2603992 - RNA, 23 nt, Human
aguggaauaguauccuccagguu

SEQ ID NO: 2603993 - RNA, 22 nt, Human
aguggaauaguauccuccaggu

SEQ ID NO: 2603994 - RNA, 21 nt, Human
aguggaauaguauccuccagg

SEQ ID NO: 2603995 - RNA, 20 nt, Human
aguggaauaguauccuccag

SEQ ID NO: 2603996 - RNA, 19 nt, Human
aguggaauaguauccucca

SEQ ID NO: 2603997 - RNA, 17 nt, Human
aguggaauaguauccuc

SEQ ID NO: 2603998 - RNA, 13 nt, Human
aguggacaggagu

SEQ ID NO: 2603999 - RNA, 20 nt, Human
aguggacaccaggagucccu

SEQ ID NO: 2604000 - RNA, 22 nt, Human
aguggacaccaggagucccugg

SEQ ID NO: 2604001 - RNA, 18 nt, Human
uguuacaaaguuguaugu

SEQ ID NO: 2604002 - RNA, 14 nt, Human
uguuacaaauugua

SEQ ID NO: 2604003 - RNA, 21 nt, Human
aguguaaaauauuuugaauca

SEQ ID NO: 2604004 - RNA, 18 nt, Human
aguguaaaauauuuugaa

SEQ ID NO: 2604005 - RNA, 14 nt, Human
aguguaaaauauuu

SEQ ID NO: 2604006 - RNA, 15 nt, Human
aguggugugaucuca

SEQ ID NO: 2604007 - RNA, 22 nt, Human
aguguaaagcauuccaacaaag

SEQ ID NO: 2604008 - RNA, 20 nt, Human
aguguaaagcauuccaacaa

SEQ ID NO: 2604009 - RNA, 18 nt, Human
aguguaaagcauuccaac

SEQ ID NO: 2604010 - RNA, 17 nt, Human
aguguaaagcauuccaa

SEQ ID NO: 2604011 - RNA, 16 nt, Human
aguguaaagcauucca

SEQ ID NO: 2604012 - RNA, 14 nt, Human
aguguaaagcauuc

SEQ ID NO: 2604013 - RNA, 13 nt, Human
aguguaaagcauu

SEQ ID NO: 2604014 - RNA, 21 nt, Human
aguguaaauaguuacuccagu

SEQ ID NO: 2604015 - RNA, 14 nt, Human
aguguaaauccuuu

SEQ ID NO: 2604016 - RNA, 21 nt, Human
aguguaaauccuuuuucuuua

SEQ ID NO: 2604017 - RNA, 13 nt, Human
aguguaacagcug

SEQ ID NO: 2604018 - RNA, 14 nt, Human
aguguaacagcuga

SEQ ID NO: 2604019 - RNA, 15 nt, Human
aguguaacagcugag

SEQ ID NO: 2604020 - RNA, 16 nt, Human
aguguaacagcugagg

SEQ ID NO: 2604021 - RNA, 17 nt, Human
aguguaacagcugaggu

SEQ ID NO: 2604022 - RNA, 16 nt, Human
aguguaccauuugccu

SEQ ID NO: 2604023 - RNA, 16 nt, Human
aguguagaagcauucc

SEQ ID NO: 2604024 - RNA, 15 nt, Human
aguguagaagcauuc

SEQ ID NO: 2604025 - RNA, 14 nt, Human
aguguagaagcauu

SEQ ID NO: 2604026 - RNA, 13 nt, Human
aguguagaagcau

SEQ ID NO: 2604027 - RNA, 12 nt, Human
aguguagaagca

SEQ ID NO: 2604028 - RNA, 20 nt, Human
aguguagaagcauuccuucu

SEQ ID NO: 2604029 - RNA, 19 nt, Human
aguguagaagcauuccuuc

SEQ ID NO: 2604030 - RNA, 18 nt, Human
aguguagaagcauuccuu

SEQ ID NO: 2604031 - RNA, 17 nt, Human
aguguagaagcauuccu

SEQ ID NO: 2604032 - RNA, 18 nt, Human
agugugauugggaauaaa

SEQ ID NO: 2604033 - RNA, 23 nt, Human
aguguacccccgcccaggcuggc

SEQ ID NO: 2604034 - RNA, 22 nt, Human
aguguacccccgcccaggcugg

SEQ ID NO: 2604035 - RNA, 20 nt, Human
aguguacccccgcccaggcu

SEQ ID NO: 2604036 - RNA, 19 nt, Human
aguguacccccgcccaggc

SEQ ID NO: 2604037 - RNA, 17 nt, Human
aguguacuuaacuauuc

SEQ ID NO: 2604038 - RNA, 20 nt, Human
agugugccccccauccuggc

SEQ ID NO: 2604039 - RNA, 19 nt, Human
agugugccccccauccugg

SEQ ID NO: 2604040 - RNA, 17 nt, Human
agugugccccccauccu

SEQ ID NO: 2604041 - RNA, 13 nt, Human
agugugcccccca

SEQ ID NO: 2604042 - RNA, 19 nt, Human
agugugcauauuguacacu

SEQ ID NO: 2604043 - RNA, 18 nt, Human
agugugcauauuguacac

SEQ ID NO: 2604044 - RNA, 17 nt, Human
agugugcauauuguaca

SEQ ID NO: 2604045 - RNA, 16 nt, Human
agugugguguuuccug

SEQ ID NO: 2604046 - RNA, 22 nt, Human
agugugauugggaauaaauaug

SEQ ID NO: 2604047 - RNA, 21 nt, Human
agugugauugggaauaaauau

SEQ ID NO: 2604048 - RNA, 20 nt, Human
agugugauugggaauaaaua

SEQ ID NO: 2604049 - RNA, 19 nt, Human
agugugauugggaauaaau

SEQ ID NO: 2604050 - RNA, 12 nt, Human
agugugcaaaau

SEQ ID NO: 2604051 - RNA, 23 nt, Human
agugugauugggaauaaauaugc

SEQ ID NO: 2604052 - RNA, 14 nt, Human
agugugcaaaauau

SEQ ID NO: 2604053 - RNA, 16 nt, Human
agugugcauauuguac

SEQ ID NO: 2604054 - RNA, 15 nt, Human
agugugcauauugua

SEQ ID NO: 2604055 - RNA, 21 nt, Human
agugugcaguucuaguuugca

SEQ ID NO: 2604056 - RNA, 17 nt, Human
agugugcacuaaggggc

SEQ ID NO: 2604057 - RNA, 22 nt, Human
agugugcacuaaggggcccggc

SEQ ID NO: 2604058 - RNA, 19 nt, Human
agugugguguuuccuggca

SEQ ID NO: 2604059 - RNA, 20 nt, Human
aguguguauuaaaaaaaaca

SEQ ID NO: 2604060 - RNA, 23 nt, Human
aguguguauuaaaaaaaacaaaa

SEQ ID NO: 2604061 - RNA, 22 nt, Human
aguguguauuaaaaaaaacaaa

SEQ ID NO: 2604062 - RNA, 15 nt, Human
aguguguauuguucc

SEQ ID NO: 2604063 - RNA, 16 nt, Human
aguguguauuguuccc

SEQ ID NO: 2604064 - RNA, 17 nt, Human
agugugguguuuccugg

SEQ ID NO: 2604065 - RNA, 23 nt, Human
agugugccccccauccuggccca

SEQ ID NO: 2604066 - RNA, 22 nt, Human
agugugccccccauccuggccc

SEQ ID NO: 2604067 - RNA, 23 nt, Human
agugugguguuuccugcaggcca

SEQ ID NO: 2604068 - RNA, 18 nt, Human
uguugcccaggcaggucu

SEQ ID NO: 2604069 - RNA, 17 nt, Human
uguugcccaggcagguc

SEQ ID NO: 2604070 - RNA, 16 nt, Human
uguugcccaggcaggu

SEQ ID NO: 2604071 - RNA, 15 nt, Human
uguugcccaggcagg

SEQ ID NO: 2604072 - RNA, 12 nt, Human
uguugcccaggc

SEQ ID NO: 2604073 - RNA, 13 nt, Human
uguugcccaggca

SEQ ID NO: 2604074 - RNA, 15 nt, Human
uguugauuuucuguu

SEQ ID NO: 2604075 - RNA, 18 nt, Human
uguugauuuucuguugua

SEQ ID NO: 2604076 - RNA, 14 nt, Human
uguugauuuucugu

SEQ ID NO: 2604077 - RNA, 20 nt, Human
uguugauuucuuuccagagg

SEQ ID NO: 2604078 - RNA, 19 nt, Human
uguugauuucuuuccagag

SEQ ID NO: 2604079 - RNA, 17 nt, Human
uguugcaagugcaauaa

SEQ ID NO: 2604080 - RNA, 19 nt, Human
uguugcaaguacugcugua

SEQ ID NO: 2604081 - RNA, 17 nt, Human
uguugcaaguacugcug

SEQ ID NO: 2604082 - RNA, 14 nt, Human
uguucugugucuuu

SEQ ID NO: 2604083 - RNA, 22 nt, Human
uguucuguggaaaguguaaagc

SEQ ID NO: 2604084 - RNA, 21 nt, Human
uguucuguggaaaguguaaag

SEQ ID NO: 2604085 - RNA, 13 nt, Human
uguucugugucuu

SEQ ID NO: 2604086 - RNA, 20 nt, Human
uguucuguggaaaguguaaa

SEQ ID NO: 2604087 - RNA, 19 nt, Human
uguucuguggaaaguguaa

SEQ ID NO: 2604088 - RNA, 18 nt, Human
uguucuguggaaagugua

SEQ ID NO: 2604089 - RNA, 17 nt, Human
uguucuguggaaagugu

SEQ ID NO: 2604090 - RNA, 13 nt, Human
uguucuguggaaa

SEQ ID NO: 2604091 - RNA, 23 nt, Human
uguucugugaugaggggaggggg

SEQ ID NO: 2604092 - RNA, 18 nt, Human
uguucugugauauaagug

SEQ ID NO: 2604093 - RNA, 15 nt, Human
uguucugugauauaa

SEQ ID NO: 2604094 - RNA, 19 nt, Human
uguucuguuuaauacucau

SEQ ID NO: 2604095 - RNA, 13 nt, Human
uguucuguuuaau

SEQ ID NO: 2604096 - RNA, 19 nt, Human
uguugauugcuaaauguaa

SEQ ID NO: 2604097 - RNA, 18 nt, Human
uguugauugcuaaaugua

SEQ ID NO: 2604098 - RNA, 17 nt, Human
uguugauugcuaaaugu

SEQ ID NO: 2604099 - RNA, 16 nt, Human
uguugauugcuaaaug

SEQ ID NO: 2604100 - RNA, 14 nt, Human
uguuauauaaaugg

SEQ ID NO: 2604101 - RNA, 13 nt, Human
uguuauauaaaug

SEQ ID NO: 2604102 - RNA, 18 nt, Human
uguuauagguuguuggau

SEQ ID NO: 2604103 - RNA, 18 nt, Human
uguuccagauucaaucga

SEQ ID NO: 2604104 - RNA, 14 nt, Human
uguuccagcaguuu

SEQ ID NO: 2604105 - RNA, 20 nt, Human
uguuccacaaguuaaauaaa

SEQ ID NO: 2604106 - RNA, 20 nt, Human
agugugucuuagugugugca

SEQ ID NO: 2604107 - RNA, 14 nt, Human
agugugucuaaauu

SEQ ID NO: 2604108 - RNA, 19 nt, Human
aguguguauuguucccagu

SEQ ID NO: 2604109 - RNA, 21 nt, Human
aguguguauuguucccaguga

SEQ ID NO: 2604110 - RNA, 18 nt, Human
aguguguccaagugugug

SEQ ID NO: 2604111 - RNA, 21 nt, Human
aguguguccaagugugugugc

SEQ ID NO: 2604112 - RNA, 15 nt, Human
uguuauaaucuuuca

SEQ ID NO: 2604113 - RNA, 21 nt, Human
agugugugauuuuuugcauuc

SEQ ID NO: 2604114 - RNA, 17 nt, Human
agugugugcaaguaugu

SEQ ID NO: 2604115 - RNA, 18 nt, Human
agugugugcacaugugug

SEQ ID NO: 2604116 - RNA, 19 nt, Human
agugugugcacaugugugc

SEQ ID NO: 2604117 - RNA, 14 nt, Human
uguuccuagugaaa

SEQ ID NO: 2604118 - RNA, 18 nt, Human
uguuccuagugaaagagg

SEQ ID NO: 2604119 - RNA, 20 nt, Human
uguucuggugaggccuugcu

SEQ ID NO: 2604120 - RNA, 21 nt, Human
uguucuggugaggccuugcuc

SEQ ID NO: 2604121 - RNA, 15 nt, Human
uguuccuacgggcuu

SEQ ID NO: 2604122 - RNA, 14 nt, Human
uguuccuagaguag

SEQ ID NO: 2604123 - RNA, 16 nt, Human
uguuccuagaguagag

SEQ ID NO: 2604124 - RNA, 16 nt, Human
uguucugggacacagu

SEQ ID NO: 2604125 - RNA, 17 nt, Human
uguuccagccugcccuc

SEQ ID NO: 2604126 - RNA, 18 nt, Human
uguuccaguaaucuaaua

SEQ ID NO: 2604127 - RNA, 14 nt, Human
uguuccagcucuuu

SEQ ID NO: 2604128 - RNA, 20 nt, Human
uguucccaccaggcugcuca

SEQ ID NO: 2604129 - RNA, 21 nt, Human
uguucccaccaggcugcucag

SEQ ID NO: 2604130 - RNA, 17 nt, Human
uguucccaccugcugga

SEQ ID NO: 2604131 - RNA, 21 nt, Human
uguuccgugguuaaacucgcu

SEQ ID NO: 2604132 - RNA, 19 nt, Human
uguuccuacagccccuuuu

SEQ ID NO: 2604133 - RNA, 22 nt, Human
uguuccgaaaccaaagaagaaa

SEQ ID NO: 2604134 - RNA, 15 nt, Human
uguuccuacagcccc

SEQ ID NO: 2604135 - RNA, 19 nt, Human
uguucccucugcuccugga

SEQ ID NO: 2604136 - RNA, 18 nt, Human
uguucccucugcuccugg

SEQ ID NO: 2604137 - RNA, 16 nt, Human
uguucccucugcuccu

SEQ ID NO: 2604138 - RNA, 22 nt, Human
uguucccagugacacuucagag

SEQ ID NO: 2604139 - RNA, 14 nt, Human
uguucccucugcuc

SEQ ID NO: 2604140 - RNA, 14 nt, Human
ugugucuuuugcau

SEQ ID NO: 2604141 - RNA, 22 nt, Human
ugugugaaaggaagcuccacug

SEQ ID NO: 2604142 - RNA, 22 nt, Human
ugugucuuucacagcuccuccc

SEQ ID NO: 2604143 - RNA, 18 nt, Human
ugugucuuucacagcucc

SEQ ID NO: 2604144 - RNA, 20 nt, Human
ugugugaaagguacuucaaa

SEQ ID NO: 2604145 - RNA, 12 nt, Human
ugugugugggag

SEQ ID NO: 2604146 - RNA, 20 nt, Human
ugugugugggaguguguaau

SEQ ID NO: 2604147 - RNA, 14 nt, Human
uguguguguaugug

SEQ ID NO: 2604148 - RNA, 23 nt, Human
uguguguuuauugucaaaguggu

SEQ ID NO: 2604149 - RNA, 19 nt, Human
uguguguuuauugucaaag

SEQ ID NO: 2604150 - RNA, 13 nt, Human
ugugugugugaau

SEQ ID NO: 2604151 - RNA, 14 nt, Human
uguguguguauguu

SEQ ID NO: 2604152 - RNA, 20 nt, Human
ugugugugguuuuuuuucua

SEQ ID NO: 2604153 - RNA, 16 nt, Human
ugugucuuuugcauga

SEQ ID NO: 2604154 - RNA, 19 nt, Human
ugugugugggcugugagug

SEQ ID NO: 2604155 - RNA, 13 nt, Human
ugugugugguuuu

SEQ ID NO: 2604156 - RNA, 14 nt, Human
uguguguguaugcu

SEQ ID NO: 2604157 - RNA, 13 nt, Human
uguguguguaugu

SEQ ID NO: 2604158 - RNA, 21 nt, Human
ugugucucuugguccugcugc

SEQ ID NO: 2604159 - RNA, 18 nt, Human
uguguaauagaaaacuga

SEQ ID NO: 2604160 - RNA, 21 nt, Human
ugugucuugcaauggcagccu

SEQ ID NO: 2604161 - RNA, 20 nt, Human
ugugucucuugguccugcug

SEQ ID NO: 2604162 - RNA, 17 nt, Human
ugugucucuugguccug

SEQ ID NO: 2604163 - RNA, 13 nt, Human
uguguaaguagau

SEQ ID NO: 2604164 - RNA, 16 nt, Human
uguguaauagaaaacu

SEQ ID NO: 2604165 - RNA, 16 nt, Human
uguuaaguauguguaa

SEQ ID NO: 2604166 - RNA, 15 nt, Human
uguuaaguaugugua

SEQ ID NO: 2604167 - RNA, 22 nt, Human
uguuaauucagcacugauuuca

SEQ ID NO: 2604168 - RNA, 20 nt, Human
uguuaauucagcacugauuu

SEQ ID NO: 2604169 - RNA, 15 nt, Human
uguuaauucagcacu

SEQ ID NO: 2604170 - RNA, 12 nt, Human
uguuaauuauac

SEQ ID NO: 2604171 - RNA, 15 nt, Human
uguuaaguauuuuca

SEQ ID NO: 2604172 - RNA, 20 nt, Human
uguuaaggaaacucuuaucu

SEQ ID NO: 2604173 - RNA, 17 nt, Human
uguuaaggaaacucuua

SEQ ID NO: 2604174 - RNA, 16 nt, Human
uguuaaggaaacucuu

SEQ ID NO: 2604175 - RNA, 15 nt, Human
uguuaaggaaacucu

SEQ ID NO: 2604176 - RNA, 14 nt, Human
uguuaaggaaacuc

SEQ ID NO: 2604177 - RNA, 20 nt, Human
uguuaagcgugucuguauuu

SEQ ID NO: 2604178 - RNA, 22 nt, Human
uguuaaggaaacucuuaucuca

SEQ ID NO: 2604179 - RNA, 21 nt, Human
uguuaaggaaacucuuaucuc

SEQ ID NO: 2604180 - RNA, 20 nt, Human
uguuaagggaagaauuccag

SEQ ID NO: 2604181 - RNA, 23 nt, Human
uguuaaggaaacucuuaucucag

SEQ ID NO: 2604182 - RNA, 21 nt, Human
uguuaaauuuguaaguuucag

SEQ ID NO: 2604183 - RNA, 19 nt, Human
uguuaaauuuguaaguuuc

SEQ ID NO: 2604184 - RNA, 18 nt, Human
uguuaaauuuguaaguuu

SEQ ID NO: 2604185 - RNA, 17 nt, Human
uguuaaauuuguaaguu

SEQ ID NO: 2604186 - RNA, 16 nt, Human
uguuaaauuuguaagu

SEQ ID NO: 2604187 - RNA, 15 nt, Human
uguuaaauuuguaag

SEQ ID NO: 2604188 - RNA, 14 nt, Human
uguuaaauuuguaa

SEQ ID NO: 2604189 - RNA, 18 nt, Human
uguuaaauugcuguguau

SEQ ID NO: 2604190 - RNA, 18 nt, Human
uguuaaaugaaauuguaa

SEQ ID NO: 2604191 - RNA, 14 nt, Human
uguuaaaugaaacc

SEQ ID NO: 2604192 - RNA, 19 nt, Human
uguuaaaugaaauuguaaa

SEQ ID NO: 2604193 - RNA, 22 nt, Human
uguuaaauaucaguagaaacuc

SEQ ID NO: 2604194 - RNA, 16 nt, Human
uguuaaauauuuacau

SEQ ID NO: 2604195 - RNA, 24 nt, Human
uguuaaaucccauucauaacuuuc

SEQ ID NO: 2604196 - RNA, 16 nt, Human
uguuaaauaaauugua

SEQ ID NO: 2604197 - RNA, 14 nt, Human
uguuaaauaaauug

SEQ ID NO: 2604198 - RNA, 13 nt, Human
uguuaaauaaauu

SEQ ID NO: 2604199 - RNA, 20 nt, Human
uguuaaauaaauuguauauu

SEQ ID NO: 2604200 - RNA, 18 nt, Human
uguuaaauaaauuguaua

SEQ ID NO: 2604201 - RNA, 17 nt, Human
uguguucugauuagaaa

SEQ ID NO: 2604202 - RNA, 19 nt, Human
uguguuaaguauguguaaa

SEQ ID NO: 2604203 - RNA, 17 nt, Human
uguguucccauuucagc

SEQ ID NO: 2604204 - RNA, 15 nt, Human
uguguguuucacuuu

SEQ ID NO: 2604205 - RNA, 13 nt, Human
uguguguuucacu

SEQ ID NO: 2604206 - RNA, 15 nt, Human
uguguuccccaaagg

SEQ ID NO: 2604207 - RNA, 19 nt, Human
uguguucccauuucagcug

SEQ ID NO: 2604208 - RNA, 11 nt, Human
uguguuccugg

SEQ ID NO: 2604209 - RNA, 10 nt, Human
uguguuccug

SEQ ID NO: 2604210 - RNA, 15 nt, Human
uguguuccuggcaau

SEQ ID NO: 2604211 - RNA, 16 nt, Human
uguguuccuggcaaua

SEQ ID NO: 2604212 - RNA, 24 nt, Human
uguguuccuggcaauaguguguuc

SEQ ID NO: 2604213 - RNA, 20 nt, Human
uguguucgcgugugugggug

SEQ ID NO: 2604214 - RNA, 23 nt, Human
agugaguugauagcacagacccu

SEQ ID NO: 2604215 - RNA, 22 nt, Human
agugaguugauagcacagaccc

SEQ ID NO: 2604216 - RNA, 15 nt, Human
agugaggugcccagc

SEQ ID NO: 2604217 - RNA, 22 nt, Human
agugaggguuucugagcugcuc

SEQ ID NO: 2604218 - RNA, 16 nt, Human
agugcugaacagugga

SEQ ID NO: 2604219 - RNA, 12 nt, Human
agugcugcauuu

SEQ ID NO: 2604220 - RNA, 13 nt, Human
agugcugcauuua

SEQ ID NO: 2604221 - RNA, 12 nt, Human
agugcugagacc

SEQ ID NO: 2604222 - RNA, 22 nt, Human
agugcugucugaucugugcuuu

SEQ ID NO: 2604223 - RNA, 21 nt, Human
agugcugucugaucugugcuu

SEQ ID NO: 2604224 - RNA, 20 nt, Human
agugcugucugaucugugcu

SEQ ID NO: 2604225 - RNA, 19 nt, Human
agugcugucugaucugugc

SEQ ID NO: 2604226 - RNA, 22 nt, Human
agugcuguauaaaaucagccaa

SEQ ID NO: 2604227 - RNA, 19 nt, Human
agugcuguauaaaaucagc

SEQ ID NO: 2604228 - RNA, 17 nt, Human
agugcuguauaaaauca

SEQ ID NO: 2604229 - RNA, 16 nt, Human
agugcuguauaaaauc

SEQ ID NO: 2604230 - RNA, 15 nt, Human
agugcuguauaaaau

SEQ ID NO: 2604231 - RNA, 14 nt, Human
agugcuguauaaaa

SEQ ID NO: 2604232 - RNA, 21 nt, Human
agugcugggauuacaggugug

SEQ ID NO: 2604233 - RNA, 13 nt, Human
agugcuguauaaa

SEQ ID NO: 2604234 - RNA, 12 nt, Human
agugcuguauaa

SEQ ID NO: 2604235 - RNA, 12 nt, Human
agugcuguaaaa

SEQ ID NO: 2604236 - RNA, 16 nt, Human
agugcugcauuuaaaa

SEQ ID NO: 2604237 - RNA, 17 nt, Human
agugcugcauuuaaaag

SEQ ID NO: 2604238 - RNA, 19 nt, Human
agugcugcauuuaaaagau

SEQ ID NO: 2604239 - RNA, 20 nt, Human
agugcugggauuacaggugu

SEQ ID NO: 2604240 - RNA, 20 nt, Human
uguggucacaggaaguagag

SEQ ID NO: 2604241 - RNA, 23 nt, Human
uguggguuucuaaagcugccagc

SEQ ID NO: 2604242 - RNA, 22 nt, Human
uguggguggauauaaauauaua

SEQ ID NO: 2604243 - RNA, 20 nt, Human
uguggguggauauaaauaua

SEQ ID NO: 2604244 - RNA, 17 nt, Human
uguggguggauauaaau

SEQ ID NO: 2604245 - RNA, 13 nt, Human
ugugggugggaga

SEQ ID NO: 2604246 - RNA, 21 nt, Human
uguggguuucuaaagcugcca

SEQ ID NO: 2604247 - RNA, 12 nt, Human
agugcugugaaa

SEQ ID NO: 2604248 - RNA, 13 nt, Human
agugcugugaaaa

SEQ ID NO: 2604249 - RNA, 14 nt, Human
agugcugugaaaaa

SEQ ID NO: 2604250 - RNA, 16 nt, Human
agugcugugaaaaaaa

SEQ ID NO: 2604251 - RNA, 14 nt, Human
agugcuguggccug

SEQ ID NO: 2604252 - RNA, 16 nt, Human
agugcuguggccuggg

SEQ ID NO: 2604253 - RNA, 17 nt, Human
agugcuguggccugggc

SEQ ID NO: 2604254 - RNA, 18 nt, Human
agugcuguggccugggca

SEQ ID NO: 2604255 - RNA, 20 nt, Human
agugcuguggccugggcaag

SEQ ID NO: 2604256 - RNA, 16 nt, Human
ugugguguuuccuggc

SEQ ID NO: 2604257 - RNA, 14 nt, Human
ugugguguuuccug

SEQ ID NO: 2604258 - RNA, 15 nt, Human
uguguaacagcuccu

SEQ ID NO: 2604259 - RNA, 20 nt, Human
ugugguguuuccuggcacug

SEQ ID NO: 2604260 - RNA, 14 nt, Human
uguguaacagcucc

SEQ ID NO: 2604261 - RNA, 21 nt, Human
ugugguguuuccugcaggcca

SEQ ID NO: 2604262 - RNA, 15 nt, Human
uguggucccacccca

SEQ ID NO: 2604263 - RNA, 13 nt, Human
uguggucccaccc

SEQ ID NO: 2604264 - RNA, 16 nt, Human
uguggucccaacagga

SEQ ID NO: 2604265 - RNA, 23 nt, Human
uguggugugucccccucugucca

SEQ ID NO: 2604266 - RNA, 14 nt, Human
uguggugucugugu

SEQ ID NO: 2604267 - RNA, 16 nt, Human
ugucuugggcagagcu

SEQ ID NO: 2604268 - RNA, 13 nt, Human
ugucuugggcaga

SEQ ID NO: 2604269 - RNA, 12 nt, Human
ugucuugggcag

SEQ ID NO: 2604270 - RNA, 19 nt, Human
ugucuuggacacuguacaa

SEQ ID NO: 2604271 - RNA, 22 nt, Human
ugucuugggcagagcuggcucu

SEQ ID NO: 2604272 - RNA, 21 nt, Human
ugucuugggcagagcuggcuc

SEQ ID NO: 2604273 - RNA, 13 nt, Human
ugucuuguacaug

SEQ ID NO: 2604274 - RNA, 23 nt, Human
ugucagacauccauguuuguaaa

SEQ ID NO: 2604275 - RNA, 20 nt, Human
ugucagaccuauuugacaua

SEQ ID NO: 2604276 - RNA, 12 nt, Human
ugucagacuuua

SEQ ID NO: 2604277 - RNA, 13 nt, Human
ugucagacuggcu

SEQ ID NO: 2604278 - RNA, 14 nt, Human
ugucagacuuuaaa

SEQ ID NO: 2604279 - RNA, 23 nt, Human
ugucagacuuuaaagaauaauau

SEQ ID NO: 2604280 - RNA, 11 nt, Human
ugucagagcug

SEQ ID NO: 2604281 - RNA, 18 nt, Human
ugucacuuugcucugggu

SEQ ID NO: 2604282 - RNA, 21 nt, Human
agucacguggaggagcagugc

SEQ ID NO: 2604283 - RNA, 18 nt, Human
agucacguggaggagcag

SEQ ID NO: 2604284 - RNA, 16 nt, Human
ugucagaaaccaguua

SEQ ID NO: 2604285 - RNA, 21 nt, Human
ugucagaacuagaauuugauu

SEQ ID NO: 2604286 - RNA, 21 nt, Human
ugucagaaaccaguuauguga

SEQ ID NO: 2604287 - RNA, 21 nt, Human
ugugaaaggaaagagggaggu

SEQ ID NO: 2604288 - RNA, 18 nt, Human
ugugaaaggaaagaggcu

SEQ ID NO: 2604289 - RNA, 22 nt, Human
ugucuuguacauguguagccug

SEQ ID NO: 2604290 - RNA, 20 nt, Human
ugucuuguacauguguagcc

SEQ ID NO: 2604291 - RNA, 17 nt, Human
ugucuuguacaugugua

SEQ ID NO: 2604292 - RNA, 16 nt, Human
ugucuuguacaugugu

SEQ ID NO: 2604293 - RNA, 15 nt, Human
ugugaaaggaaagag

SEQ ID NO: 2604294 - RNA, 21 nt, Human
ugugaaauaaaacuggcuuug

SEQ ID NO: 2604295 - RNA, 14 nt, Human
ugugaaaugaaaac

SEQ ID NO: 2604296 - RNA, 21 nt, Human
ugugaaauaguucaaagccaa

SEQ ID NO: 2604297 - RNA, 20 nt, Human
ugugaaaggaagcuccacug

SEQ ID NO: 2604298 - RNA, 20 nt, Human
ugugaaauaaaacuggcuuu

SEQ ID NO: 2604299 - RNA, 22 nt, Human
ugugaaagucagaugcccagag

SEQ ID NO: 2604300 - RNA, 19 nt, Human
ugucuuggcuuucauguua

SEQ ID NO: 2604301 - RNA, 21 nt, Human
ugugaaagucagaugcccaga

SEQ ID NO: 2604302 - RNA, 15 nt, Human
ugucuuguguuucuu

SEQ ID NO: 2604303 - RNA, 12 nt, Human
ugugaaauuauu

SEQ ID NO: 2604304 - RNA, 14 nt, Human
ugugaaaugcuggc

SEQ ID NO: 2604305 - RNA, 22 nt, Human
ugugaacuggacccuguugcua

SEQ ID NO: 2604306 - RNA, 21 nt, Human
ugugaacuggacccuguugcu

SEQ ID NO: 2604307 - RNA, 19 nt, Human
ugugaacuggacccuguug

SEQ ID NO: 2604308 - RNA, 20 nt, Human
ugugaacaaaagaugcucuu

SEQ ID NO: 2604309 - RNA, 17 nt, Human
ugugaaccaccacaccc

SEQ ID NO: 2604310 - RNA, 20 nt, Human
ugugaacuuggggaacaagg

SEQ ID NO: 2604311 - RNA, 21 nt, Human
ugugaaccaccacacccagcc

SEQ ID NO: 2604312 - RNA, 20 nt, Human
ugugaaccaccacacccagc

SEQ ID NO: 2604313 - RNA, 15 nt, Human
ugugaacagcggcug

SEQ ID NO: 2604314 - RNA, 19 nt, Human
ugugaaccaccacacccag

SEQ ID NO: 2604315 - RNA, 16 nt, Human
ugugaccuuaguguuu

SEQ ID NO: 2604316 - RNA, 15 nt, Human
ugugaccuuaguguu

SEQ ID NO: 2604317 - RNA, 15 nt, Human
ugugaccugaaguuc

SEQ ID NO: 2604318 - RNA, 14 nt, Human
ugugaccugaaguu

SEQ ID NO: 2604319 - RNA, 21 nt, Human
ugugaccucaggcacuagccu

SEQ ID NO: 2604320 - RNA, 20 nt, Human
ugugaccucaggcacuagcc

SEQ ID NO: 2604321 - RNA, 13 nt, Human
ugugaccugaggg

SEQ ID NO: 2604322 - RNA, 16 nt, Human
ugugaccugaaguuca

SEQ ID NO: 2604323 - RNA, 14 nt, Human
ugugaccugagggc

SEQ ID NO: 2604324 - RNA, 14 nt, Human
ugugaagagaacca

SEQ ID NO: 2604325 - RNA, 14 nt, Human
ugugaccucaggca

SEQ ID NO: 2604326 - RNA, 13 nt, Human
ugugaccucaggc

SEQ ID NO: 2604327 - RNA, 16 nt, Human
ugugacccucugaaug

SEQ ID NO: 2604328 - RNA, 14 nt, Human
ugugacccucugaa

SEQ ID NO: 2604329 - RNA, 18 nt, Human
ugugaacuuuauuaaaua

SEQ ID NO: 2604330 - RNA, 22 nt, Human
ugugacuauauagagauguuuu

SEQ ID NO: 2604331 - RNA, 18 nt, Human
ugugacuauauagagaug

SEQ ID NO: 2604332 - RNA, 23 nt, Human
ugugacuaauuguauaacagguu

SEQ ID NO: 2604333 - RNA, 22 nt, Human
ugugacuaauuguauaacaggu

SEQ ID NO: 2604334 - RNA, 19 nt, Human
ugugacuaauuguauaaca

SEQ ID NO: 2604335 - RNA, 18 nt, Human
ugugacuaauuguauaac

SEQ ID NO: 2604336 - RNA, 17 nt, Human
ugugacuaauuguauaa

SEQ ID NO: 2604337 - RNA, 15 nt, Human
ugugacuaauuguau

SEQ ID NO: 2604338 - RNA, 19 nt, Human
ugugaccuuaguguuucug

SEQ ID NO: 2604339 - RNA, 18 nt, Human
ugugaccuuaguguuucu

SEQ ID NO: 2604340 - RNA, 22 nt, Human
agucucaggaaaucaaauaugc

SEQ ID NO: 2604341 - RNA, 15 nt, Human
ugugagaugcuagaa

SEQ ID NO: 2604342 - RNA, 19 nt, Human
ugugagaugcuagaacucc

SEQ ID NO: 2604343 - RNA, 23 nt, Human
ugugacucuuuuuagggccaggc

SEQ ID NO: 2604344 - RNA, 20 nt, Human
ugugacuauauagagauguu

SEQ ID NO: 2604345 - RNA, 15 nt, Human
ugugagagguuugac

SEQ ID NO: 2604346 - RNA, 16 nt, Human
ugugagagguuugacu

SEQ ID NO: 2604347 - RNA, 16 nt, Human
ugugacugaauuucuu

SEQ ID NO: 2604348 - RNA, 15 nt, Human
ugugacugaauuucu

SEQ ID NO: 2604349 - RNA, 15 nt, Human
agucucuaucauuaa

SEQ ID NO: 2604350 - RNA, 21 nt, Human
agucucaguuugugugucuua

SEQ ID NO: 2604351 - RNA, 20 nt, Human
agucucaguuugugugucuu

SEQ ID NO: 2604352 - RNA, 18 nt, Human
agucucaguuuguguguc

SEQ ID NO: 2604353 - RNA, 10 nt, Human
agucucaguu

SEQ ID NO: 2604354 - RNA, 19 nt, Human
agucucaguggcuucaucu

SEQ ID NO: 2604355 - RNA, 13 nt, Human
agucucaggagca

SEQ ID NO: 2604356 - RNA, 17 nt, Human
agucucaggagcauggg

SEQ ID NO: 2604357 - RNA, 14 nt, Human
agucucuucuccac

SEQ ID NO: 2604358 - RNA, 13 nt, Human
agucucuucucca

SEQ ID NO: 2604359 - RNA, 16 nt, Human
agucucugugcuuuga

SEQ ID NO: 2604360 - RNA, 20 nt, Human
agucucucucucucucuccc

SEQ ID NO: 2604361 - RNA, 19 nt, Human
agucucucucucucucucc

SEQ ID NO: 2604362 - RNA, 21 nt, Human
agucucuaucauuaaaguucu

SEQ ID NO: 2604363 - RNA, 20 nt, Human
agucucuaucauuaaaguuc

SEQ ID NO: 2604364 - RNA, 22 nt, Human
agucucucuggggccacacaga

SEQ ID NO: 2604365 - RNA, 19 nt, Human
agucucuaucauuaaaguu

SEQ ID NO: 2604366 - RNA, 18 nt, Human
agucucuaucauuaaagu

SEQ ID NO: 2604367 - RNA, 17 nt, Human
agucucuaucauuaaag

SEQ ID NO: 2604368 - RNA, 16 nt, Human
agucucuaucauuaaa

SEQ ID NO: 2604369 - RNA, 14 nt, Human
agucuuuguacaga

SEQ ID NO: 2604370 - RNA, 13 nt, Human
agugaaacugcuu

SEQ ID NO: 2604371 - RNA, 21 nt, Human
agugaaacugcuuguuuccua

SEQ ID NO: 2604372 - RNA, 24 nt, Human
agugaaacugcuuguuuccuagca

SEQ ID NO: 2604373 - RNA, 18 nt, Human
agucuuguauuaaguugu

SEQ ID NO: 2604374 - RNA, 16 nt, Human
agucuuguauuaaguu

SEQ ID NO: 2604375 - RNA, 17 nt, Human
agucuuggggcaggaug

SEQ ID NO: 2604376 - RNA, 22 nt, Human
agucuuggcggcagcagccauc

SEQ ID NO: 2604377 - RNA, 21 nt, Human
agucuuggcggcagcagccau

SEQ ID NO: 2604378 - RNA, 15 nt, Human
agucuuggcucacug

SEQ ID NO: 2604379 - RNA, 20 nt, Human
agucuuucuuagugccugug

SEQ ID NO: 2604380 - RNA, 16 nt, Human
agucuucacucucuga

SEQ ID NO: 2604381 - RNA, 17 nt, Human
agucuucacucucugaa

SEQ ID NO: 2604382 - RNA, 23 nt, Human
agucuucaagcagauuggagaaa

SEQ ID NO: 2604383 - RNA, 17 nt, Human
agucucuucuccacugg

SEQ ID NO: 2604384 - RNA, 16 nt, Human
agucuuaucaagcagc

SEQ ID NO: 2604385 - RNA, 15 nt, Human
agucuuaucaagcag

SEQ ID NO: 2604386 - RNA, 12 nt, Human
agucucuucaga

SEQ ID NO: 2604387 - RNA, 16 nt, Human
agucucuucuccacug

SEQ ID NO: 2604388 - RNA, 15 nt, Human
agucucuucuccacu

SEQ ID NO: 2604389 - RNA, 19 nt, Human
agucuucacucucugaaga

SEQ ID NO: 2604390 - RNA, 14 nt, Human
agucuuccaaacca

SEQ ID NO: 2604391 - RNA, 15 nt, Human
agucuuggcggcagc

SEQ ID NO: 2604392 - RNA, 21 nt, Human
agucuugcuaccucagucagu

SEQ ID NO: 2604393 - RNA, 16 nt, Human
agucuugcagcaggau

SEQ ID NO: 2604394 - RNA, 17 nt, Human
agucuugacgaguguga

SEQ ID NO: 2604395 - RNA, 17 nt, Human
agugaggcucugcccuu

SEQ ID NO: 2604396 - RNA, 16 nt, Human
agugaggcucugcccu

SEQ ID NO: 2604397 - RNA, 14 nt, Human
agugaggcucugcc

SEQ ID NO: 2604398 - RNA, 15 nt, Human
agugaggcucugccc

SEQ ID NO: 2604399 - RNA, 14 nt, Human
uguggccaaggagc

SEQ ID NO: 2604400 - RNA, 24 nt, Human
uguggccaaaggagggucaggaag

SEQ ID NO: 2604401 - RNA, 16 nt, Human
uguggccaaaggaggg

SEQ ID NO: 2604402 - RNA, 17 nt, Human
uguggcaucuuugccuu

SEQ ID NO: 2604403 - RNA, 21 nt, Human
uguggcaucuuugccuugggc

SEQ ID NO: 2604404 - RNA, 19 nt, Human
uguggccagggugagagcu

SEQ ID NO: 2604405 - RNA, 20 nt, Human
uguggccaaggagcugcuau

SEQ ID NO: 2604406 - RNA, 21 nt, Human
uguggccaaggagcugcuaua

SEQ ID NO: 2604407 - RNA, 15 nt, Human
uguggccaaggagcu

SEQ ID NO: 2604408 - RNA, 17 nt, Human
uguggccaaggagcugc

SEQ ID NO: 2604409 - RNA, 18 nt, Human
uguggccaaggagcugcu

SEQ ID NO: 2604410 - RNA, 19 nt, Human
uguggccaaggagcugcua

SEQ ID NO: 2604411 - RNA, 18 nt, Human
uguggccaaguucuuagu

SEQ ID NO: 2604412 - RNA, 20 nt, Human
agugaggcucugcccuuggu

SEQ ID NO: 2604413 - RNA, 19 nt, Human
agugaggcucugcccuugg

SEQ ID NO: 2604414 - RNA, 21 nt, Human
agugaggcucugcccuugguu

SEQ ID NO: 2604415 - RNA, 20 nt, Human
uguggccagggugagagcug

SEQ ID NO: 2604416 - RNA, 19 nt, Human
agugagggagggcugucau

SEQ ID NO: 2604417 - RNA, 14 nt, Human
agugagggauuauc

SEQ ID NO: 2604418 - RNA, 21 nt, Human
agugaguugauagcacagacc

SEQ ID NO: 2604419 - RNA, 15 nt, Human
agugagucgaggaca

SEQ ID NO: 2604420 - RNA, 16 nt, Human
agugagggucagagag

SEQ ID NO: 2604421 - RNA, 22 nt, Human
agugagggucagagaggaguca

SEQ ID NO: 2604422 - RNA, 17 nt, Human
agugaggguuucugagc

SEQ ID NO: 2604423 - RNA, 23 nt, Human
agugagggucagagaggagucag

SEQ ID NO: 2604424 - RNA, 21 nt, Human
agugaggguuucugagcugcu

SEQ ID NO: 2604425 - RNA, 20 nt, Human
agugaggguuucugagcugc

SEQ ID NO: 2604426 - RNA, 14 nt, Human
agugaggugcccag

SEQ ID NO: 2604427 - RNA, 24 nt, Human
agugagggguaaaagcugaucugg

SEQ ID NO: 2604428 - RNA, 22 nt, Human
agugagggguaaaagcugaucu

SEQ ID NO: 2604429 - RNA, 13 nt, Human
agugagggucaga

SEQ ID NO: 2604430 - RNA, 15 nt, Human
agugagggucagaga

SEQ ID NO: 2604431 - RNA, 18 nt, Human
agugaggggaaaccaggg

SEQ ID NO: 2604432 - RNA, 20 nt, Human
agugagggcuugucauuacc

SEQ ID NO: 2604433 - RNA, 12 nt, Human
agugagggccug

SEQ ID NO: 2604434 - RNA, 20 nt, Human
ugugcuggauggagcccagg

SEQ ID NO: 2604435 - RNA, 19 nt, Human
ugugcuggauggagcccag

SEQ ID NO: 2604436 - RNA, 15 nt, Human
ugugcuggaggacug

SEQ ID NO: 2604437 - RNA, 20 nt, Human
ugugcuggagccacuaacua

SEQ ID NO: 2604438 - RNA, 19 nt, Human
ugugcuggagccacuaacu

SEQ ID NO: 2604439 - RNA, 15 nt, Human
ugugcuggagccacu

SEQ ID NO: 2604440 - RNA, 14 nt, Human
ugugcuggagccac

SEQ ID NO: 2604441 - RNA, 13 nt, Human
ugugcuggagcca

SEQ ID NO: 2604442 - RNA, 17 nt, Human
ugugcugggagcuccac

SEQ ID NO: 2604443 - RNA, 12 nt, Human
ugugcugggagc

SEQ ID NO: 2604444 - RNA, 10 nt, Human
ugugcuggga

SEQ ID NO: 2604445 - RNA, 21 nt, Human
ugugcuggauggagcccaggc

SEQ ID NO: 2604446 - RNA, 18 nt, Human
ugugcuggagauguuuua

SEQ ID NO: 2604447 - RNA, 13 nt, Human
ugugcuggagaug

SEQ ID NO: 2604448 - RNA, 18 nt, Human
ugugcuggaauucuaaca

SEQ ID NO: 2604449 - RNA, 21 nt, Human
ugugcccccauguaagcaccc

SEQ ID NO: 2604450 - RNA, 19 nt, Human
ugugcccagcccggaccuu

SEQ ID NO: 2604451 - RNA, 19 nt, Human
ugugcccaugggcacugcu

SEQ ID NO: 2604452 - RNA, 18 nt, Human
ugugcccaugggcacugc

SEQ ID NO: 2604453 - RNA, 14 nt, Human
ugugcccaugggca

SEQ ID NO: 2604454 - RNA, 21 nt, Human
ugugcccaugggcacugcugg

SEQ ID NO: 2604455 - RNA, 20 nt, Human
ugugcccaugggcacugcug

SEQ ID NO: 2604456 - RNA, 14 nt, Human
ugugccccaugccu

SEQ ID NO: 2604457 - RNA, 22 nt, Human
ugugcccaugggcacugcuggg

SEQ ID NO: 2604458 - RNA, 23 nt, Human
ugugccccaugccuguccagccu

SEQ ID NO: 2604459 - RNA, 15 nt, Human
ugugccccaugccug

SEQ ID NO: 2604460 - RNA, 19 nt, Human
ugugccccaugccugucca

SEQ ID NO: 2604461 - RNA, 22 nt, Human
ugugcccccagacgcacguggg

SEQ ID NO: 2604462 - RNA, 16 nt, Human
ugugcccccagacgca

SEQ ID NO: 2604463 - RNA, 16 nt, Human
uguggcagugguuuug

SEQ ID NO: 2604464 - RNA, 15 nt, Human
uguggcagugguuuu

SEQ ID NO: 2604465 - RNA, 12 nt, Human
uguggcaguggu

SEQ ID NO: 2604466 - RNA, 11 nt, Human
uguggcagugg

SEQ ID NO: 2604467 - RNA, 23 nt, Human
uguggcaggcagcgccaagcaac

SEQ ID NO: 2604468 - RNA, 23 nt, Human
uguggcaguuuggcaaacucucc

SEQ ID NO: 2604469 - RNA, 21 nt, Human
uguggaguucaucuugaauug

SEQ ID NO: 2604470 - RNA, 14 nt, Human
uguggcaggcagcg

SEQ ID NO: 2604471 - RNA, 21 nt, Human
ugugcugggagcuccacucug

SEQ ID NO: 2604472 - RNA, 20 nt, Human
uguggaggaguccaggccau

SEQ ID NO: 2604473 - RNA, 20 nt, Human
uguggaggaaggauuguaaa

SEQ ID NO: 2604474 - RNA, 13 nt, Human
uguggagggcaca

SEQ ID NO: 2604475 - RNA, 21 nt, Human
uguggaggaaggauuguaaaa

SEQ ID NO: 2604476 - RNA, 21 nt, Human
uguggagguacacucuuauag

SEQ ID NO: 2604477 - RNA, 17 nt, Human
uguggaguucaucuuga

SEQ ID NO: 2604478 - RNA, 18 nt, Human
uguggaguggggcaguag

SEQ ID NO: 2604479 - RNA, 16 nt, Human
uguggaguggggcagu

SEQ ID NO: 2604480 - RNA, 12 nt, Human
uguggagugggg

SEQ ID NO: 2604481 - RNA, 19 nt, Human
uguggagggcacauuccuu

SEQ ID NO: 2604482 - RNA, 15 nt, Human
agugaaagaaaauaa

SEQ ID NO: 2604483 - RNA, 16 nt, Human
agugaaagcuagagau

SEQ ID NO: 2604484 - RNA, 16 nt, Human
agugaacaaauuuaca

SEQ ID NO: 2604485 - RNA, 20 nt, Human
agugaacaaauuuacagaga

SEQ ID NO: 2604486 - RNA, 20 nt, Human
ugugaucuaucaauagucaa

SEQ ID NO: 2604487 - RNA, 20 nt, Human
ugugaucaggcuauguaugg

SEQ ID NO: 2604488 - RNA, 21 nt, Human
ugugauccuuuuauguuauuu

SEQ ID NO: 2604489 - RNA, 17 nt, Human
ugugauccuuuuauguu

SEQ ID NO: 2604490 - RNA, 13 nt, Human
ugugaucgucuga

SEQ ID NO: 2604491 - RNA, 18 nt, Human
ugugaucccaagugccag

SEQ ID NO: 2604492 - RNA, 23 nt, Human
ugugaucccaagugccagucuug

SEQ ID NO: 2604493 - RNA, 20 nt, Human
ugugauggggcccugccucc

SEQ ID NO: 2604494 - RNA, 19 nt, Human
ugugauggggcccugccuc

SEQ ID NO: 2604495 - RNA, 18 nt, Human
ugugauggggcccugccu

SEQ ID NO: 2604496 - RNA, 16 nt, Human
ugugaugaauacugua

SEQ ID NO: 2604497 - RNA, 18 nt, Human
ugugaugaauacuguauu

SEQ ID NO: 2604498 - RNA, 14 nt, Human
ugugaugaauacug

SEQ ID NO: 2604499 - RNA, 15 nt, Human
ugugaugaacuuucu

SEQ ID NO: 2604500 - RNA, 22 nt, Human
ugugauuucccguggccccagc

SEQ ID NO: 2604501 - RNA, 20 nt, Human
ugugauuucccguggcccca

SEQ ID NO: 2604502 - RNA, 19 nt, Human
ugugauuucccguggcccc

SEQ ID NO: 2604503 - RNA, 15 nt, Human
ugugauuucccgugg

SEQ ID NO: 2604504 - RNA, 23 nt, Human
ugugauuuagaacuguaugucag

SEQ ID NO: 2604505 - RNA, 18 nt, Human
ugugauuuagaacuguau

SEQ ID NO: 2604506 - RNA, 17 nt, Human
ugugauuuagaacugua

SEQ ID NO: 2604507 - RNA, 22 nt, Human
ugugauuuaauaguguuaauca

SEQ ID NO: 2604508 - RNA, 20 nt, Human
ugugauuuaauaguguuaau

SEQ ID NO: 2604509 - RNA, 19 nt, Human
ugugauuuaauaguguuaa

SEQ ID NO: 2604510 - RNA, 17 nt, Human
ugugauuuaauaguguu

SEQ ID NO: 2604511 - RNA, 16 nt, Human
ugugauuuaauagugu

SEQ ID NO: 2604512 - RNA, 15 nt, Human
ugugauuuaauagug

SEQ ID NO: 2604513 - RNA, 23 nt, Human
ugugaugguucguucuguuuaca

SEQ ID NO: 2604514 - RNA, 17 nt, Human
ugugauuguggaaugga

SEQ ID NO: 2604515 - RNA, 18 nt, Human
ugugaugacaacuggaau

SEQ ID NO: 2604516 - RNA, 14 nt, Human
ugugauguauucua

SEQ ID NO: 2604517 - RNA, 22 nt, Human
ugugaugguucguucuguuuac

SEQ ID NO: 2604518 - RNA, 19 nt, Human
ugugaugguucguucuguu

SEQ ID NO: 2604519 - RNA, 16 nt, Human
ugugauguauucuagc

SEQ ID NO: 2604520 - RNA, 20 nt, Human
ugugauugggaauaaauaug

SEQ ID NO: 2604521 - RNA, 14 nt, Human
ugugauuguggaau

SEQ ID NO: 2604522 - RNA, 14 nt, Human
ugugauugugccua

SEQ ID NO: 2604523 - RNA, 23 nt, Human
ugugccacucaccgaagccacuu

SEQ ID NO: 2604524 - RNA, 22 nt, Human
ugugccacccugggcucugugg

SEQ ID NO: 2604525 - RNA, 21 nt, Human
ugugccacccugggcucugug

SEQ ID NO: 2604526 - RNA, 17 nt, Human
ugugccacccugggcuc

SEQ ID NO: 2604527 - RNA, 16 nt, Human
ugugccacccugggcu

SEQ ID NO: 2604528 - RNA, 15 nt, Human
ugugccacccugggc

SEQ ID NO: 2604529 - RNA, 14 nt, Human
ugugccacccuggg

SEQ ID NO: 2604530 - RNA, 12 nt, Human
ugugccacccug

SEQ ID NO: 2604531 - RNA, 18 nt, Human
ugugccagauuuaugcau

SEQ ID NO: 2604532 - RNA, 18 nt, Human
ugugccaauauguauugu

SEQ ID NO: 2604533 - RNA, 16 nt, Human
ugugccacccaccagg

SEQ ID NO: 2604534 - RNA, 20 nt, Human
ugugccacccaccagggcga

SEQ ID NO: 2604535 - RNA, 17 nt, Human
ugugccaauauguauug

SEQ ID NO: 2604536 - RNA, 21 nt, Human
ugugcauuuuugugaaaugaa

SEQ ID NO: 2604537 - RNA, 16 nt, Human
ugugccaauauguauu

SEQ ID NO: 2604538 - RNA, 22 nt, Human
ugugcauuuuugugaaaugaaa

SEQ ID NO: 2604539 - RNA, 15 nt, Human
ugugauuugacuguu

SEQ ID NO: 2604540 - RNA, 14 nt, Human
ugugauuugacugu

SEQ ID NO: 2604541 - RNA, 13 nt, Human
ugugauuugacug

SEQ ID NO: 2604542 - RNA, 12 nt, Human
ugugauuugacu

SEQ ID NO: 2604543 - RNA, 23 nt, Human
ugugauuuccuacuaaccuguuc

SEQ ID NO: 2604544 - RNA, 24 nt, Human
ugugauuucccguggccccagccu

SEQ ID NO: 2604545 - RNA, 23 nt, Human
ugugauuucccguggccccagcc

SEQ ID NO: 2604546 - RNA, 23 nt, Human
ugugauuugacuguuuuuaccca

SEQ ID NO: 2604547 - RNA, 23 nt, Human
ugugcauuuggugguuucagaaa

SEQ ID NO: 2604548 - RNA, 22 nt, Human
ugugauuugacuguuuuuaccc

SEQ ID NO: 2604549 - RNA, 17 nt, Human
ugugauuugacuguuuu

SEQ ID NO: 2604550 - RNA, 22 nt, Human
ugugccauagaguuuaacacaa

SEQ ID NO: 2604551 - RNA, 21 nt, Human
ugugccauagucacauggccu

SEQ ID NO: 2604552 - RNA, 18 nt, Human
ugugccauagucacaugg

SEQ ID NO: 2604553 - RNA, 16 nt, Human
ugugccauagucacau

SEQ ID NO: 2604554 - RNA, 18 nt, Human
ugugccagggcaaugaug

SEQ ID NO: 2604555 - RNA, 21 nt, Human
ugugccagggcaaugaugaau

SEQ ID NO: 2604556 - RNA, 21 nt, Human
ugugccauagaguuuaacaca

SEQ ID NO: 2604557 - RNA, 20 nt, Human
ugugccauagaguuuaacac

SEQ ID NO: 2604558 - RNA, 18 nt, Human
ugugccauagaguuuaac

SEQ ID NO: 2604559 - RNA, 20 nt, Human
ugugccagauuuaugcauau

SEQ ID NO: 2604560 - RNA, 20 nt, Human
ugugccagguuuuuggucug

SEQ ID NO: 2604561 - RNA, 16 nt, Human
ugugccaugugccagg

SEQ ID NO: 2604562 - RNA, 12 nt, Human
ugugccaugugc

SEQ ID NO: 2604563 - RNA, 14 nt, Human
ugugcccacccucc

SEQ ID NO: 2604564 - RNA, 23 nt, Human
ugugcccacccuccacucuccuc

SEQ ID NO: 2604565 - RNA, 21 nt, Human
ugugcccacaucccaggcuuc

SEQ ID NO: 2604566 - RNA, 20 nt, Human
ugugcccacaucccaggcuu

SEQ ID NO: 2604567 - RNA, 17 nt, Human
ugugcccacaucccagg

SEQ ID NO: 2604568 - RNA, 22 nt, Human
ugugccauuuuaaaaaaaaagg

SEQ ID NO: 2604569 - RNA, 12 nt, Human
ugugcccaaguu

SEQ ID NO: 2604570 - RNA, 17 nt, Human
auauugcacaugucuua

SEQ ID NO: 2604571 - RNA, 16 nt, Human
auauugcacaugucuu

SEQ ID NO: 2604572 - RNA, 15 nt, Human
auauugcacaugucu

SEQ ID NO: 2604573 - RNA, 13 nt, Human
auauugcacaugu

SEQ ID NO: 2604574 - RNA, 22 nt, Human
auauugauuucugccuuccuug

SEQ ID NO: 2604575 - RNA, 16 nt, Human
auauugauuucugccu

SEQ ID NO: 2604576 - RNA, 21 nt, Human
auauugcacaugucuuaauga

SEQ ID NO: 2604577 - RNA, 20 nt, Human
auauugcacaugucuuaaug

SEQ ID NO: 2604578 - RNA, 19 nt, Human
auauugcacaugucuuaau

SEQ ID NO: 2604579 - RNA, 16 nt, Human
auauugccgcacuagg

SEQ ID NO: 2604580 - RNA, 16 nt, Human
auauugcauaugcaua

SEQ ID NO: 2604581 - RNA, 21 nt, Human
auauugcugauggugcaauga

SEQ ID NO: 2604582 - RNA, 17 nt, Human
auauugcugauggugca

SEQ ID NO: 2604583 - RNA, 18 nt, Human
auauuguguugugaaugu

SEQ ID NO: 2604584 - RNA, 13 nt, Human
auauuguguuugu

SEQ ID NO: 2604585 - RNA, 17 nt, Human
auauuguguugugaaug

SEQ ID NO: 2604586 - RNA, 22 nt, Human
auauugcugagagaaauaugga

SEQ ID NO: 2604587 - RNA, 20 nt, Human
auauuguuuucaguguacau

SEQ ID NO: 2604588 - RNA, 17 nt, Human
auauuguguuuguguau

SEQ ID NO: 2604589 - RNA, 21 nt, Human
auauuguguuuguguauuuac

SEQ ID NO: 2604590 - RNA, 20 nt, Human
auauuguuauuauauaauua

SEQ ID NO: 2604591 - RNA, 13 nt, Human
auauuugaaauau

SEQ ID NO: 2604592 - RNA, 15 nt, Human
auauuucugauauaa

SEQ ID NO: 2604593 - RNA, 18 nt, Human
auauuuaaacagcagugu

SEQ ID NO: 2604594 - RNA, 14 nt, Human
auauuuaaacagca

SEQ ID NO: 2604595 - RNA, 12 nt, Human
auauuuaaacag

SEQ ID NO: 2604596 - RNA, 15 nt, Human
auauuuaaaagaaag

SEQ ID NO: 2604597 - RNA, 14 nt, Human
auauuuaaagacag

SEQ ID NO: 2604598 - RNA, 21 nt, Human
auauuuaaacaugguuacaau

SEQ ID NO: 2604599 - RNA, 23 nt, Human
auauuuaaacaugguuacaauca

SEQ ID NO: 2604600 - RNA, 22 nt, Human
auauuuaaaggcccuaucuguu

SEQ ID NO: 2604601 - RNA, 15 nt, Human
auauuucgaaagcug

SEQ ID NO: 2604602 - RNA, 12 nt, Human
auauuuuaacuu

SEQ ID NO: 2604603 - RNA, 16 nt, Human
auauuuuaaaaugaga

SEQ ID NO: 2604604 - RNA, 14 nt, Human
auauuuuaaaauga

SEQ ID NO: 2604605 - RNA, 15 nt, Human
auauuuguuauguag

SEQ ID NO: 2604606 - RNA, 13 nt, Human
auauuuguuaaau

SEQ ID NO: 2604607 - RNA, 21 nt, Human
auauuuguuaaauauuuacau

SEQ ID NO: 2604608 - RNA, 22 nt, Human
auauuuguuaaauauuuacaua

SEQ ID NO: 2604609 - RNA, 22 nt, Human
auauuuguaucacaaaucuuaa

SEQ ID NO: 2604610 - RNA, 18 nt, Human
auauuuguauaguugcuu

SEQ ID NO: 2604611 - RNA, 12 nt, Human
auauuuguagaa

SEQ ID NO: 2604612 - RNA, 20 nt, Human
auauuugugauagcacuuuc

SEQ ID NO: 2604613 - RNA, 21 nt, Human
auauuugugauagcacuuucu

SEQ ID NO: 2604614 - RNA, 22 nt, Human
auauuugugauagcacuuucua

SEQ ID NO: 2604615 - RNA, 17 nt, Human
auauuuguguauuuaac

SEQ ID NO: 2604616 - RNA, 14 nt, Human
auauuuguggaaua

SEQ ID NO: 2604617 - RNA, 19 nt, Human
auauuugaaauauugacuu

SEQ ID NO: 2604618 - RNA, 14 nt, Human
auauuugaaauauu

SEQ ID NO: 2604619 - RNA, 23 nt, Human
auauuugaaauauugacuuuuua

SEQ ID NO: 2604620 - RNA, 14 nt, Human
auauuugaaucuug

SEQ ID NO: 2604621 - RNA, 13 nt, Human
auauuugaaucuu

SEQ ID NO: 2604622 - RNA, 11 nt, Human
auauuugaauc

SEQ ID NO: 2604623 - RNA, 14 nt, Human
auauuuguacaaaa

SEQ ID NO: 2604624 - RNA, 13 nt, Human
auauuuguacaaa

SEQ ID NO: 2604625 - RNA, 11 nt, Human
auauuuguaca

SEQ ID NO: 2604626 - RNA, 13 nt, Human
auauuuguacaua

SEQ ID NO: 2604627 - RNA, 12 nt, Human
auauuuguacau

SEQ ID NO: 2604628 - RNA, 20 nt, Human
auauuuguaaauuuauguga

SEQ ID NO: 2604629 - RNA, 15 nt, Human
auauuugaaucuugu

SEQ ID NO: 2604630 - RNA, 14 nt, Human
auauuaaugccuuu

SEQ ID NO: 2604631 - RNA, 14 nt, Human
auauuaauauuccu

SEQ ID NO: 2604632 - RNA, 15 nt, Human
auauuaaugccuuua

SEQ ID NO: 2604633 - RNA, 19 nt, Human
auauuaauauauaucugcu

SEQ ID NO: 2604634 - RNA, 21 nt, Human
auauucauuguauaaaaauag

SEQ ID NO: 2604635 - RNA, 23 nt, Human
auauucauuguauaaaaauagaa

SEQ ID NO: 2604636 - RNA, 24 nt, Human
auauuaagaaagacuaucuaaaug

SEQ ID NO: 2604637 - RNA, 22 nt, Human
auauuaaggaagacaaugugaa

SEQ ID NO: 2604638 - RNA, 12 nt, Human
auauuaaaucug

SEQ ID NO: 2604639 - RNA, 13 nt, Human
auauuaaaucugc

SEQ ID NO: 2604640 - RNA, 17 nt, Human
auauuaaauacagacac

SEQ ID NO: 2604641 - RNA, 13 nt, Human
auauuaaauacag

SEQ ID NO: 2604642 - RNA, 12 nt, Human
auauuaaauaca

SEQ ID NO: 2604643 - RNA, 14 nt, Human
auauuaaaggaguu

SEQ ID NO: 2604644 - RNA, 20 nt, Human
auauuaaauacagacacuaa

SEQ ID NO: 2604645 - RNA, 19 nt, Human
auauuaaauacagacacua

SEQ ID NO: 2604646 - RNA, 23 nt, Human
auauuaaauauguuagcaaagag

SEQ ID NO: 2604647 - RNA, 14 nt, Human
uucauguuugcuuc

SEQ ID NO: 2604648 - RNA, 15 nt, Human
uucauguuuuaacaa

SEQ ID NO: 2604649 - RNA, 17 nt, Human
uucauguuuuaacaaaa

SEQ ID NO: 2604650 - RNA, 18 nt, Human
uucauguuuugugacuau

SEQ ID NO: 2604651 - RNA, 17 nt, Human
uucauguuuugugacua

SEQ ID NO: 2604652 - RNA, 16 nt, Human
uucauguuuugugacu

SEQ ID NO: 2604653 - RNA, 18 nt, Human
uucauguuuuaacaaaaa

SEQ ID NO: 2604654 - RNA, 22 nt, Human
uucauguugcacacccacucag

SEQ ID NO: 2604655 - RNA, 12 nt, Human
uucauguuucuu

SEQ ID NO: 2604656 - RNA, 13 nt, Human
uucauguuucuua

SEQ ID NO: 2604657 - RNA, 18 nt, Human
auauguuuuaagaggcag

SEQ ID NO: 2604658 - RNA, 17 nt, Human
auauguuuuuuagauca

SEQ ID NO: 2604659 - RNA, 14 nt, Human
auauguuuuuuaga

SEQ ID NO: 2604660 - RNA, 21 nt, Human
auauguuuugugggaacagau

SEQ ID NO: 2604661 - RNA, 20 nt, Human
auauguuuuaagaggcaggg

SEQ ID NO: 2604662 - RNA, 22 nt, Human
auauugauccagaaagaaaacu

SEQ ID NO: 2604663 - RNA, 15 nt, Human
auauugauccagaaa

SEQ ID NO: 2604664 - RNA, 16 nt, Human
auauugaaaaaauaga

SEQ ID NO: 2604665 - RNA, 23 nt, Human
auauucuuauguaugugaaaguu

SEQ ID NO: 2604666 - RNA, 21 nt, Human
auauugauuuccguuaaaaua

SEQ ID NO: 2604667 - RNA, 22 nt, Human
auauugauuuccguuaaaauac

SEQ ID NO: 2604668 - RNA, 19 nt, Human
auauugauuuccguuaaaa

SEQ ID NO: 2604669 - RNA, 13 nt, Human
auauugaugugug

SEQ ID NO: 2604670 - RNA, 21 nt, Human
auauugaauauaauauauuug

SEQ ID NO: 2604671 - RNA, 18 nt, Human
auauugaauauaauauau

SEQ ID NO: 2604672 - RNA, 15 nt, Human
auauuccugaaugaa

SEQ ID NO: 2604673 - RNA, 17 nt, Human
auauuccugaaugaaau

SEQ ID NO: 2604674 - RNA, 18 nt, Human
auauuccugaaugaaaua

SEQ ID NO: 2604675 - RNA, 22 nt, Human
auauuccugaaugaaauaucag

SEQ ID NO: 2604676 - RNA, 23 nt, Human
auauuccugaaugaaauaucaga

SEQ ID NO: 2604677 - RNA, 17 nt, Human
auauucccuagaaacuu

SEQ ID NO: 2604678 - RNA, 23 nt, Human
auauucccuagaaacuuccaaau

SEQ ID NO: 2604679 - RNA, 15 nt, Human
auauuccaugaaugu

SEQ ID NO: 2604680 - RNA, 16 nt, Human
auauuccaugaaugua

SEQ ID NO: 2604681 - RNA, 19 nt, Human
auauuccaugaauguauca

SEQ ID NO: 2604682 - RNA, 18 nt, Human
auauuccccuaucucuag

SEQ ID NO: 2604683 - RNA, 13 nt, Human
auauucauuucaa

SEQ ID NO: 2604684 - RNA, 13 nt, Human
auauucauuugga

SEQ ID NO: 2604685 - RNA, 15 nt, Human
auauucauuuggaaa

SEQ ID NO: 2604686 - RNA, 18 nt, Human
auauuccauauauuagca

SEQ ID NO: 2604687 - RNA, 21 nt, Human
auauuccugcagccuggaggc

SEQ ID NO: 2604688 - RNA, 22 nt, Human
auauucucacgggcaguagcug

SEQ ID NO: 2604689 - RNA, 16 nt, Human
auauucuguuggccag

SEQ ID NO: 2604690 - RNA, 14 nt, Human
auauucuuauguau

SEQ ID NO: 2604691 - RNA, 21 nt, Human
aucacaacgugcauugugcuu

SEQ ID NO: 2604692 - RNA, 18 nt, Human
aucacaacgugcauugug

SEQ ID NO: 2604693 - RNA, 17 nt, Human
aucacaacgugcauugu

SEQ ID NO: 2604694 - RNA, 15 nt, Human
aucacaacgugcauu

SEQ ID NO: 2604695 - RNA, 17 nt, Human
aucacaacacuggcuga

SEQ ID NO: 2604696 - RNA, 16 nt, Human
aucacaacaagaaauu

SEQ ID NO: 2604697 - RNA, 19 nt, Human
aucaaucaucugugugaaa

SEQ ID NO: 2604698 - RNA, 20 nt, Human
aucaaucacagcuuguauuu

SEQ ID NO: 2604699 - RNA, 14 nt, Human
aucaaucacagcuu

SEQ ID NO: 2604700 - RNA, 20 nt, Human
aucaaucaucugugugaaaa

SEQ ID NO: 2604701 - RNA, 22 nt, Human
aucacaacgugcauugugcuuc

SEQ ID NO: 2604702 - RNA, 22 nt, Human
aucacggcucacugcagccuca

SEQ ID NO: 2604703 - RNA, 13 nt, Human
aucacuacugcag

SEQ ID NO: 2604704 - RNA, 22 nt, Human
aucacggucgccaccuggcauu

SEQ ID NO: 2604705 - RNA, 14 nt, Human
aucacuacugcagu

SEQ ID NO: 2604706 - RNA, 20 nt, Human
aucacuaauacuaauucauu

SEQ ID NO: 2604707 - RNA, 21 nt, Human
aucacguaaagcuagaaauga

SEQ ID NO: 2604708 - RNA, 14 nt, Human
aucacguaaagcua

SEQ ID NO: 2604709 - RNA, 18 nt, Human
uuccuuuguguuucuauu

SEQ ID NO: 2604710 - RNA, 20 nt, Human
uuccuuuuaaaacacuucca

SEQ ID NO: 2604711 - RNA, 22 nt, Human
uuccuuuuaaaacacuuccaua

SEQ ID NO: 2604712 - RNA, 21 nt, Human
uuccuuuuaaaacacuuccau

SEQ ID NO: 2604713 - RNA, 12 nt, Human
uuccuuuuaauu

SEQ ID NO: 2604714 - RNA, 21 nt, Human
uuccuuuguuuuuuuuuccug

SEQ ID NO: 2604715 - RNA, 20 nt, Human
uuccuuuuagccuaguucau

SEQ ID NO: 2604716 - RNA, 15 nt, Human
uuccuuuucccugcu

SEQ ID NO: 2604717 - RNA, 14 nt, Human
uuccuuuucccugc

SEQ ID NO: 2604718 - RNA, 12 nt, Human
uuccuuuuauca

SEQ ID NO: 2604719 - RNA, 22 nt, Human
aucacugguugcacuuaugauu

SEQ ID NO: 2604720 - RNA, 12 nt, Human
aucacugucuuu

SEQ ID NO: 2604721 - RNA, 14 nt, Human
aucacugucuuucc

SEQ ID NO: 2604722 - RNA, 15 nt, Human
aucacugucuuuccu

SEQ ID NO: 2604723 - RNA, 16 nt, Human
aucacugucuuuccua

SEQ ID NO: 2604724 - RNA, 18 nt, Human
aucacugucuuuccuaga

SEQ ID NO: 2604725 - RNA, 19 nt, Human
aucacugucuuuccuagau

SEQ ID NO: 2604726 - RNA, 22 nt, Human
aucacuggcaaugaaaaauucu

SEQ ID NO: 2604727 - RNA, 23 nt, Human
aucacuggcaaugaaaaauucuc

SEQ ID NO: 2604728 - RNA, 16 nt, Human
aucacuggcaaugaaa

SEQ ID NO: 2604729 - RNA, 18 nt, Human
aucacuggcaaugaaaaa

SEQ ID NO: 2604730 - RNA, 21 nt, Human
aucacugucuuuccuagaugg

SEQ ID NO: 2604731 - RNA, 15 nt, Human
uuccuuuggagcuuu

SEQ ID NO: 2604732 - RNA, 14 nt, Human
aucaaguauuauac

SEQ ID NO: 2604733 - RNA, 18 nt, Human
aucaaguauuauaccuuu

SEQ ID NO: 2604734 - RNA, 13 nt, Human
aucaaguauuaua

SEQ ID NO: 2604735 - RNA, 18 nt, Human
aucaagaugucagacugg

SEQ ID NO: 2604736 - RNA, 17 nt, Human
aucaauacacuaguugu

SEQ ID NO: 2604737 - RNA, 12 nt, Human
aucaauacacua

SEQ ID NO: 2604738 - RNA, 21 nt, Human
aucaauaauauauuuucuguu

SEQ ID NO: 2604739 - RNA, 20 nt, Human
aucaauaauauauuuucugu

SEQ ID NO: 2604740 - RNA, 18 nt, Human
aucaauaauauauuuucu

SEQ ID NO: 2604741 - RNA, 16 nt, Human
aucaauaauauauuuu

SEQ ID NO: 2604742 - RNA, 19 nt, Human
aucaauacacuaguuguuu

SEQ ID NO: 2604743 - RNA, 22 nt, Human
aucaauauugucauuccuguau

SEQ ID NO: 2604744 - RNA, 13 nt, Human
aucaaucaacuua

SEQ ID NO: 2604745 - RNA, 20 nt, Human
aucaauauugucauuccugu

SEQ ID NO: 2604746 - RNA, 18 nt, Human
aucaauauugucauuccu

SEQ ID NO: 2604747 - RNA, 13 nt, Human
aucaaucaaaccc

SEQ ID NO: 2604748 - RNA, 12 nt, Human
aucaagaaaguc

SEQ ID NO: 2604749 - RNA, 14 nt, Human
auauuuuguauaua

SEQ ID NO: 2604750 - RNA, 13 nt, Human
auauuuuguauau

SEQ ID NO: 2604751 - RNA, 21 nt, Human
auauuuuguauauaucugcuu

SEQ ID NO: 2604752 - RNA, 23 nt, Human
aucaagaauggggaucacagaga

SEQ ID NO: 2604753 - RNA, 15 nt, Human
aucaagaaaguguug

SEQ ID NO: 2604754 - RNA, 15 nt, Human
aucaagacuggaagg

SEQ ID NO: 2604755 - RNA, 17 nt, Human
aucaagagcugcccucc

SEQ ID NO: 2604756 - RNA, 16 nt, Human
aucaagagcugcccuc

SEQ ID NO: 2604757 - RNA, 15 nt, Human
aucaagagcugcccu

SEQ ID NO: 2604758 - RNA, 22 nt, Human
aucaagaugagagaacuggagg

SEQ ID NO: 2604759 - RNA, 20 nt, Human
aucaagagcugcccuccuug

SEQ ID NO: 2604760 - RNA, 19 nt, Human
aucaagagcugcccuccuu

SEQ ID NO: 2604761 - RNA, 19 nt, Human
auauuuugggaaucuuuuc

SEQ ID NO: 2604762 - RNA, 21 nt, Human
auauuuugcacaguuagcaaa

SEQ ID NO: 2604763 - RNA, 19 nt, Human
auauuuugauuauuguauu

SEQ ID NO: 2604764 - RNA, 17 nt, Human
auauuuugauuauugua

SEQ ID NO: 2604765 - RNA, 13 nt, Human
auauuuugauuau

SEQ ID NO: 2604766 - RNA, 14 nt, Human
auauuuugaaucaa

SEQ ID NO: 2604767 - RNA, 19 nt, Human
auauuuugaaucaauaaua

SEQ ID NO: 2604768 - RNA, 13 nt, Human
auauuuugaauca

SEQ ID NO: 2604769 - RNA, 12 nt, Human
auauuuugaauc

SEQ ID NO: 2604770 - RNA, 21 nt, Human
auauuuucuuuaaaagacaaa

SEQ ID NO: 2604771 - RNA, 18 nt, Human
auauuuucuuuaaugcuu

SEQ ID NO: 2604772 - RNA, 21 nt, Human
uuccugguacccagccaucug

SEQ ID NO: 2604773 - RNA, 19 nt, Human
uuccugguacccagccauc

SEQ ID NO: 2604774 - RNA, 14 nt, Human
uuccuggucuguag

SEQ ID NO: 2604775 - RNA, 18 nt, Human
uuccugguacccagccau

SEQ ID NO: 2604776 - RNA, 17 nt, Human
uuccugguacccagcca

SEQ ID NO: 2604777 - RNA, 16 nt, Human
uuccugguacccagcc

SEQ ID NO: 2604778 - RNA, 19 nt, Human
uuccuggugccaauuucaa

SEQ ID NO: 2604779 - RNA, 20 nt, Human
uuccuggugccaauuucaag

SEQ ID NO: 2604780 - RNA, 21 nt, Human
uuccuguguguccaaaacugc

SEQ ID NO: 2604781 - RNA, 23 nt, Human
uuccuguuagguauuagaaagug

SEQ ID NO: 2604782 - RNA, 22 nt, Human
uuccuguguguccaaaacugcc

SEQ ID NO: 2604783 - RNA, 17 nt, Human
uuccuguucccaugaga

SEQ ID NO: 2604784 - RNA, 11 nt, Human
uuccucuuucc

SEQ ID NO: 2604785 - RNA, 15 nt, Human
uuccugguacccagc

SEQ ID NO: 2604786 - RNA, 15 nt, Human
uuccuucagggugau

SEQ ID NO: 2604787 - RNA, 14 nt, Human
uuccuucaggguga

SEQ ID NO: 2604788 - RNA, 24 nt, Human
auauuuucaaauuguaucuagugc

SEQ ID NO: 2604789 - RNA, 20 nt, Human
auauuuucaacgcagcccug

SEQ ID NO: 2604790 - RNA, 19 nt, Human
auauuuucaacgcagcccu

SEQ ID NO: 2604791 - RNA, 23 nt, Human
auauuuucaugacuuuuccaugu

SEQ ID NO: 2604792 - RNA, 22 nt, Human
uuccuucagggugaugccaggu

SEQ ID NO: 2604793 - RNA, 21 nt, Human
auauuuucaccauuugauuau

SEQ ID NO: 2604794 - RNA, 22 nt, Human
uuccuucagugcaucugggaag

SEQ ID NO: 2604795 - RNA, 14 nt, Human
uuccuucagugccu

SEQ ID NO: 2604796 - RNA, 11 nt, Human
uuccuucagug

SEQ ID NO: 2604797 - RNA, 20 nt, Human
uuccuguuggauuuguuuaa

SEQ ID NO: 2604798 - RNA, 19 nt, Human
uuccuguuggauuuguuua

SEQ ID NO: 2604799 - RNA, 15 nt, Human
uuccuucagcuucca

SEQ ID NO: 2604800 - RNA, 13 nt, Human
uuccuguucugaa

SEQ ID NO: 2604801 - RNA, 15 nt, Human
uuccuguucugaacu

SEQ ID NO: 2604802 - RNA, 20 nt, Human
uuccuguucuuaagacguga

SEQ ID NO: 2604803 - RNA, 14 nt, Human
auauuuuaagacga

SEQ ID NO: 2604804 - RNA, 12 nt, Human
auauuuuaaaua

SEQ ID NO: 2604805 - RNA, 14 nt, Human
auauuuuauaauuu

SEQ ID NO: 2604806 - RNA, 15 nt, Human
auauuuuaugugaga

SEQ ID NO: 2604807 - RNA, 15 nt, Human
uuccuaauccucuag

SEQ ID NO: 2604808 - RNA, 13 nt, Human
uuccuaauccucu

SEQ ID NO: 2604809 - RNA, 15 nt, Human
auauuuuauuauaua

SEQ ID NO: 2604810 - RNA, 20 nt, Human
auauuuuaugugagagaaag

SEQ ID NO: 2604811 - RNA, 17 nt, Human
auauuuucaaauuguau

SEQ ID NO: 2604812 - RNA, 13 nt, Human
uuccuaagugauu

SEQ ID NO: 2604813 - RNA, 16 nt, Human
uuccuaauaaaguucu

SEQ ID NO: 2604814 - RNA, 19 nt, Human
uuccuaauaaaguucugua

SEQ ID NO: 2604815 - RNA, 15 nt, Human
uuccuaauaaaguuc

SEQ ID NO: 2604816 - RNA, 11 nt, Human
uuccuccuggg

SEQ ID NO: 2604817 - RNA, 14 nt, Human
uuccuccugggccc

SEQ ID NO: 2604818 - RNA, 15 nt, Human
uuccuccugggcccu

SEQ ID NO: 2604819 - RNA, 21 nt, Human
uuccuccugggcccucucugc

SEQ ID NO: 2604820 - RNA, 14 nt, Human
uuccuccuggaaau

SEQ ID NO: 2604821 - RNA, 22 nt, Human
uuccuaauaaaguucuguacuc

SEQ ID NO: 2604822 - RNA, 13 nt, Human
uuccuccugugua

SEQ ID NO: 2604823 - RNA, 14 nt, Human
uuccuccuggcaga

SEQ ID NO: 2604824 - RNA, 23 nt, Human
uuccuccugggcccucucugcuc

SEQ ID NO: 2604825 - RNA, 17 nt, Human
uuccuccuguguacagg

SEQ ID NO: 2604826 - RNA, 18 nt, Human
uuccucgcagagaggcca

SEQ ID NO: 2604827 - RNA, 15 nt, Human
uuccuccuuccaugg

SEQ ID NO: 2604828 - RNA, 14 nt, Human
uuccucgcccuggg

SEQ ID NO: 2604829 - RNA, 15 nt, Human
uuccucuagaagcca

SEQ ID NO: 2604830 - RNA, 19 nt, Human
uuccucuagugcccuccac

SEQ ID NO: 2604831 - RNA, 21 nt, Human
uuccucuguuucuccuucuga

SEQ ID NO: 2604832 - RNA, 12 nt, Human
uuccucugggaa

SEQ ID NO: 2604833 - RNA, 19 nt, Human
uuccucuuccccuugcccu

SEQ ID NO: 2604834 - RNA, 18 nt, Human
uuccucuuccccuugccc

SEQ ID NO: 2604835 - RNA, 20 nt, Human
uuccucuucuauuuuguaaa

SEQ ID NO: 2604836 - RNA, 13 nt, Human
uuccucuucccca

SEQ ID NO: 2604837 - RNA, 16 nt, Human
uuccucuuccccuugc

SEQ ID NO: 2604838 - RNA, 17 nt, Human
uuccucuaguucuuugu

SEQ ID NO: 2604839 - RNA, 17 nt, Human
uuccucuauugauguac

SEQ ID NO: 2604840 - RNA, 17 nt, Human
uuccucuagaagccaag

SEQ ID NO: 2604841 - RNA, 23 nt, Human
uuccucuagugcccuccacagcc

SEQ ID NO: 2604842 - RNA, 13 nt, Human
aucauuugcuuuu

SEQ ID NO: 2604843 - RNA, 18 nt, Human
aucauuuguuggaaugaa

SEQ ID NO: 2604844 - RNA, 19 nt, Human
aucauuuguucaaagcugu

SEQ ID NO: 2604845 - RNA, 18 nt, Human
aucauuugcccuuaagga

SEQ ID NO: 2604846 - RNA, 15 nt, Human
aucauuugcccuuaa

SEQ ID NO: 2604847 - RNA, 12 nt, Human
aucauuuguuca

SEQ ID NO: 2604848 - RNA, 17 nt, Human
aucauuugaacaacuag

SEQ ID NO: 2604849 - RNA, 18 nt, Human
uucuguacucaaauguag

SEQ ID NO: 2604850 - RNA, 20 nt, Human
uucuguacugauuuuuguaa

SEQ ID NO: 2604851 - RNA, 14 nt, Human
uucuguacugauuu

SEQ ID NO: 2604852 - RNA, 15 nt, Human
aucauuucuugggcc

SEQ ID NO: 2604853 - RNA, 18 nt, Human
aucauuucuugggcccuc

SEQ ID NO: 2604854 - RNA, 19 nt, Human
aucauuucuugggcccucc

SEQ ID NO: 2604855 - RNA, 22 nt, Human
aucauuucuugggcccuccuga

SEQ ID NO: 2604856 - RNA, 14 nt, Human
auccagguaaucca

SEQ ID NO: 2604857 - RNA, 15 nt, Human
aucauuuuaauuauu

SEQ ID NO: 2604858 - RNA, 14 nt, Human
aucauuuuaauuau

SEQ ID NO: 2604859 - RNA, 17 nt, Human
auccaggguggugguga

SEQ ID NO: 2604860 - RNA, 16 nt, Human
auccagguucagcuug

SEQ ID NO: 2604861 - RNA, 15 nt, Human
auccagguucagcuu

SEQ ID NO: 2604862 - RNA, 15 nt, Human
aucccaacugucuuu

SEQ ID NO: 2604863 - RNA, 19 nt, Human
aucccaagaucugugcagc

SEQ ID NO: 2604864 - RNA, 17 nt, Human
aucccaagacccagggc

SEQ ID NO: 2604865 - RNA, 17 nt, Human
aucccaacugucuuuuu

SEQ ID NO: 2604866 - RNA, 23 nt, Human
aucccaacugucuuuuuuucccu

SEQ ID NO: 2604867 - RNA, 23 nt, Human
aucccaggaucgcaagagccaug

SEQ ID NO: 2604868 - RNA, 21 nt, Human
aucccaagaucugugcagccc

SEQ ID NO: 2604869 - RNA, 17 nt, Human
aucccaggauguacaag

SEQ ID NO: 2604870 - RNA, 19 nt, Human
auccauguaagguaucagu

SEQ ID NO: 2604871 - RNA, 12 nt, Human
auccauguacug

SEQ ID NO: 2604872 - RNA, 14 nt, Human
auccauguacugua

SEQ ID NO: 2604873 - RNA, 18 nt, Human
auccauguacuguaguuu

SEQ ID NO: 2604874 - RNA, 22 nt, Human
auccauguacuguaguuuuucu

SEQ ID NO: 2604875 - RNA, 20 nt, Human
auccauguacuguaguuuuu

SEQ ID NO: 2604876 - RNA, 18 nt, Human
auccauguuaguuuuuac

SEQ ID NO: 2604877 - RNA, 18 nt, Human
auccauuaucauguguaa

SEQ ID NO: 2604878 - RNA, 17 nt, Human
auccauuaucaugugua

SEQ ID NO: 2604879 - RNA, 16 nt, Human
auccauuaucaugugu

SEQ ID NO: 2604880 - RNA, 22 nt, Human
auccauuccucagggacagaga

SEQ ID NO: 2604881 - RNA, 14 nt, Human
auccauuccucagg

SEQ ID NO: 2604882 - RNA, 18 nt, Human
auccauuccucagggaca

SEQ ID NO: 2604883 - RNA, 15 nt, Human
auccauuaucaugug

SEQ ID NO: 2604884 - RNA, 14 nt, Human
auccauuaucaugu

SEQ ID NO: 2604885 - RNA, 16 nt, Human
auccauguuuguaaaa

SEQ ID NO: 2604886 - RNA, 19 nt, Human
auccauguuaguuuuuacu

SEQ ID NO: 2604887 - RNA, 20 nt, Human
auccauguuaguuuuuacuu

SEQ ID NO: 2604888 - RNA, 18 nt, Human
aucccuguguugucucua

SEQ ID NO: 2604889 - RNA, 18 nt, Human
aucccuguuacccagaga

SEQ ID NO: 2604890 - RNA, 21 nt, Human
aucccuguuuaauauuuaaac

SEQ ID NO: 2604891 - RNA, 20 nt, Human
aucccuguuuaauauuuaaa

SEQ ID NO: 2604892 - RNA, 18 nt, Human
aucccuguuuaauauuua

SEQ ID NO: 2604893 - RNA, 17 nt, Human
aucccuguuuaauauuu

SEQ ID NO: 2604894 - RNA, 23 nt, Human
aucccuguuuaauauuuaaacag

SEQ ID NO: 2604895 - RNA, 22 nt, Human
aucccuguuuaauauuuaaaca

SEQ ID NO: 2604896 - RNA, 16 nt, Human
aucccuguuuaauauu

SEQ ID NO: 2604897 - RNA, 15 nt, Human
aucccuguuuaauau

SEQ ID NO: 2604898 - RNA, 14 nt, Human
aucccuguuuaaua

SEQ ID NO: 2604899 - RNA, 19 nt, Human
aucccuguuacccagagaa

SEQ ID NO: 2604900 - RNA, 13 nt, Human
aucccuguuuaau

SEQ ID NO: 2604901 - RNA, 20 nt, Human
aucccucuacagagcuuccc

SEQ ID NO: 2604902 - RNA, 21 nt, Human
aucccucuacagagcuucccu

SEQ ID NO: 2604903 - RNA, 22 nt, Human
aucccucuacagagcuucccug

SEQ ID NO: 2604904 - RNA, 23 nt, Human
aucccucuacagagcuucccuga

SEQ ID NO: 2604905 - RNA, 22 nt, Human
aucccucuccauaaccccaccc

SEQ ID NO: 2604906 - RNA, 12 nt, Human
aucccucuccau

SEQ ID NO: 2604907 - RNA, 11 nt, Human
aucccucucca

SEQ ID NO: 2604908 - RNA, 16 nt, Human
aucccucucuggauug

SEQ ID NO: 2604909 - RNA, 14 nt, Human
aucccucucuggau

SEQ ID NO: 2604910 - RNA, 14 nt, Human
aucccucuccuccc

SEQ ID NO: 2604911 - RNA, 16 nt, Human
aucccugggcauugcu

SEQ ID NO: 2604912 - RNA, 17 nt, Human
aucccugggcauugcuu

SEQ ID NO: 2604913 - RNA, 18 nt, Human
aucccugggcauugcuuu

SEQ ID NO: 2604914 - RNA, 15 nt, Human
aucccugccugguca

SEQ ID NO: 2604915 - RNA, 17 nt, Human
aucccucuacagagcuu

SEQ ID NO: 2604916 - RNA, 11 nt, Human
aucccucaucu

SEQ ID NO: 2604917 - RNA, 18 nt, Human
aucccucccccccaugca

SEQ ID NO: 2604918 - RNA, 19 nt, Human
aucccucccccccaugcac

SEQ ID NO: 2604919 - RNA, 21 nt, Human
aucccucccccccaugcacug

SEQ ID NO: 2604920 - RNA, 22 nt, Human
aucccucccccccaugcacugu

SEQ ID NO: 2604921 - RNA, 16 nt, Human
aucccuccccaguuca

SEQ ID NO: 2604922 - RNA, 15 nt, Human
aucccuccccaguuc

SEQ ID NO: 2604923 - RNA, 13 nt, Human
aucccucaucugu

SEQ ID NO: 2604924 - RNA, 17 nt, Human
aucccucaucugucccu

SEQ ID NO: 2604925 - RNA, 17 nt, Human
aucccauaugccugggc

SEQ ID NO: 2604926 - RNA, 16 nt, Human
aucccauaugccuggg

SEQ ID NO: 2604927 - RNA, 19 nt, Human
aucccaggcuucacccuga

SEQ ID NO: 2604928 - RNA, 12 nt, Human
aucccaggggac

SEQ ID NO: 2604929 - RNA, 19 nt, Human
aucccaggggaccacaccu

SEQ ID NO: 2604930 - RNA, 19 nt, Human
aucccaggggcccaaggcg

SEQ ID NO: 2604931 - RNA, 17 nt, Human
aucccaggggcccaagg

SEQ ID NO: 2604932 - RNA, 20 nt, Human
aucccaggggaccacaccuc

SEQ ID NO: 2604933 - RNA, 23 nt, Human
aucccaggggaccacaccucccu

SEQ ID NO: 2604934 - RNA, 22 nt, Human
uucugggacacaguucaauucu

SEQ ID NO: 2604935 - RNA, 11 nt, Human
uucugggacac

SEQ ID NO: 2604936 - RNA, 14 nt, Human
uucugccucugagg

SEQ ID NO: 2604937 - RNA, 10 nt, Human
uucugggaca

SEQ ID NO: 2604938 - RNA, 23 nt, Human
uucugccgcagcccugcagaggg

SEQ ID NO: 2604939 - RNA, 17 nt, Human
uucugccacuucccagg

SEQ ID NO: 2604940 - RNA, 14 nt, Human
uucugccacuuccc

SEQ ID NO: 2604941 - RNA, 16 nt, Human
uucugccgcagcccug

SEQ ID NO: 2604942 - RNA, 13 nt, Human
uucugccucucaa

SEQ ID NO: 2604943 - RNA, 16 nt, Human
uucugccgugugcccu

SEQ ID NO: 2604944 - RNA, 17 nt, Human
uucugccggcccugggg

SEQ ID NO: 2604945 - RNA, 18 nt, Human
uucugccggcccuggggc

SEQ ID NO: 2604946 - RNA, 12 nt, Human
uucuggugugaa

SEQ ID NO: 2604947 - RNA, 19 nt, Human
uucuggugggguguguucc

SEQ ID NO: 2604948 - RNA, 19 nt, Human
uucuguacauagccuauau

SEQ ID NO: 2604949 - RNA, 18 nt, Human
uucuguacauagccuaua

SEQ ID NO: 2604950 - RNA, 16 nt, Human
uucuguacauagccua

SEQ ID NO: 2604951 - RNA, 15 nt, Human
uucuguacauagccu

SEQ ID NO: 2604952 - RNA, 22 nt, Human
uucuguacaugcauugagcucu

SEQ ID NO: 2604953 - RNA, 22 nt, Human
uucuguacauagccuauauuua

SEQ ID NO: 2604954 - RNA, 17 nt, Human
uucuguaccaaaguguu

SEQ ID NO: 2604955 - RNA, 21 nt, Human
uucuggucucuaggcugggga

SEQ ID NO: 2604956 - RNA, 19 nt, Human
uucuggugaggccuugcuc

SEQ ID NO: 2604957 - RNA, 19 nt, Human
uucugguagauagaaauaa

SEQ ID NO: 2604958 - RNA, 18 nt, Human
uucugguacucuccuaga

SEQ ID NO: 2604959 - RNA, 17 nt, Human
uucugguagauagaaau

SEQ ID NO: 2604960 - RNA, 18 nt, Human
uucugguagauagaaaua

SEQ ID NO: 2604961 - RNA, 15 nt, Human
uucugguacucuccu

SEQ ID NO: 2604962 - RNA, 19 nt, Human
uucuggguggggcaguggg

SEQ ID NO: 2604963 - RNA, 18 nt, Human
uucuggguggccucggga

SEQ ID NO: 2604964 - RNA, 13 nt, Human
uucugggugucca

SEQ ID NO: 2604965 - RNA, 14 nt, Human
uucuggguggccuc

SEQ ID NO: 2604966 - RNA, 22 nt, Human
uucugggagacacccaaagggu

SEQ ID NO: 2604967 - RNA, 23 nt, Human
uucugggaaauggcuugaagcca

SEQ ID NO: 2604968 - RNA, 23 nt, Human
uucugcaucagcugcugaaacaa

SEQ ID NO: 2604969 - RNA, 14 nt, Human
uucugaagaagaug

SEQ ID NO: 2604970 - RNA, 23 nt, Human
uucugcauuuuauucuggaugga

SEQ ID NO: 2604971 - RNA, 18 nt, Human
uucugcauuuugcuauug

SEQ ID NO: 2604972 - RNA, 17 nt, Human
uucugcauuuugcuauu

SEQ ID NO: 2604973 - RNA, 21 nt, Human
uucugcauuuugcuauuguaa

SEQ ID NO: 2604974 - RNA, 13 nt, Human
uucugaagaagau

SEQ ID NO: 2604975 - RNA, 12 nt, Human
uucugaagaaga

SEQ ID NO: 2604976 - RNA, 19 nt, Human
aucauugaaaucuuuuugc

SEQ ID NO: 2604977 - RNA, 13 nt, Human
uucucugucucau

SEQ ID NO: 2604978 - RNA, 17 nt, Human
uucucugucucauccau

SEQ ID NO: 2604979 - RNA, 17 nt, Human
uucucugucucaugugu

SEQ ID NO: 2604980 - RNA, 19 nt, Human
uucucuguguuuguuccua

SEQ ID NO: 2604981 - RNA, 18 nt, Human
uucucuguguuuguuccu

SEQ ID NO: 2604982 - RNA, 24 nt, Human
uucucuguguuuguuccuacagcc

SEQ ID NO: 2604983 - RNA, 20 nt, Human
uucucugugaacgauuuaga

SEQ ID NO: 2604984 - RNA, 12 nt, Human
uucucugugaac

SEQ ID NO: 2604985 - RNA, 13 nt, Human
uucucuucacuca

SEQ ID NO: 2604986 - RNA, 15 nt, Human
uucugaaaauauaac

SEQ ID NO: 2604987 - RNA, 16 nt, Human
uucucuuacugcaaau

SEQ ID NO: 2604988 - RNA, 14 nt, Human
uucucuuacugcaa

SEQ ID NO: 2604989 - RNA, 23 nt, Human
uucucuuacugcaaaugucauca

SEQ ID NO: 2604990 - RNA, 15 nt, Human
uucucuuaauuuaau

SEQ ID NO: 2604991 - RNA, 15 nt, Human
uucugaaagggacgc

SEQ ID NO: 2604992 - RNA, 19 nt, Human
uucugaaaauuaacacugc

SEQ ID NO: 2604993 - RNA, 13 nt, Human
aucaucaaggcac

SEQ ID NO: 2604994 - RNA, 18 nt, Human
aucaucaaggcacugccu

SEQ ID NO: 2604995 - RNA, 21 nt, Human
aucauauugguauucacuaau

SEQ ID NO: 2604996 - RNA, 15 nt, Human
aucauauuauacaga

SEQ ID NO: 2604997 - RNA, 16 nt, Human
aucauauuauacagac

SEQ ID NO: 2604998 - RNA, 22 nt, Human
aucauaggaagggaccaaggca

SEQ ID NO: 2604999 - RNA, 21 nt, Human
aucauaggaagggaccaaggc

SEQ ID NO: 2605000 - RNA, 17 nt, Human
aucauagguauuucaaa

SEQ ID NO: 2605001 - RNA, 16 nt, Human
aucauagguauuucaa

SEQ ID NO: 2605002 - RNA, 18 nt, Human
aucauagguauuucaaaa

SEQ ID NO: 2605003 - RNA, 12 nt, Human
aucauaguacag

SEQ ID NO: 2605004 - RNA, 21 nt, Human
aucauaugauucugcuuuuac

SEQ ID NO: 2605005 - RNA, 18 nt, Human
aucauguuuacagaggac

SEQ ID NO: 2605006 - RNA, 23 nt, Human
aucauguuuacagaggacaguau

SEQ ID NO: 2605007 - RNA, 17 nt, Human
aucaucaguauugaagc

SEQ ID NO: 2605008 - RNA, 22 nt, Human
aucaucagcauaccuuuauugu

SEQ ID NO: 2605009 - RNA, 20 nt, Human
aucaucagcauaccuuuauu

SEQ ID NO: 2605010 - RNA, 19 nt, Human
aucaucaaggcacugccug

SEQ ID NO: 2605011 - RNA, 15 nt, Human
aucaucaguauugaa

SEQ ID NO: 2605012 - RNA, 12 nt, Human
aucauucaagug

SEQ ID NO: 2605013 - RNA, 14 nt, Human
aucauucauuuucu

SEQ ID NO: 2605014 - RNA, 15 nt, Human
aucauguuugcucuc

SEQ ID NO: 2605015 - RNA, 14 nt, Human
aucauguuugcucu

SEQ ID NO: 2605016 - RNA, 13 nt, Human
aucauguuugcuc

SEQ ID NO: 2605017 - RNA, 12 nt, Human
aucauguuugcu

SEQ ID NO: 2605018 - RNA, 16 nt, Human
aucauguuugcucucc

SEQ ID NO: 2605019 - RNA, 16 nt, Human
aucauuauguaauguc

SEQ ID NO: 2605020 - RNA, 22 nt, Human
aucauuaaagccugaguuugcu

SEQ ID NO: 2605021 - RNA, 15 nt, Human
aucauugaaaucuuu

SEQ ID NO: 2605022 - RNA, 14 nt, Human
aucauugaaaucuu

SEQ ID NO: 2605023 - RNA, 22 nt, Human
aucauucauucuuagcucuuaa

SEQ ID NO: 2605024 - RNA, 15 nt, Human
aucaguauugaagca

SEQ ID NO: 2605025 - RNA, 22 nt, Human
aucaguauugaagcauuuuaua

SEQ ID NO: 2605026 - RNA, 19 nt, Human
aucagucauaacuaaauaa

SEQ ID NO: 2605027 - RNA, 13 nt, Human
aucagucaauauu

SEQ ID NO: 2605028 - RNA, 22 nt, Human
aucaguauaauucuguacugau

SEQ ID NO: 2605029 - RNA, 21 nt, Human
aucaguauaauucuguacuga

SEQ ID NO: 2605030 - RNA, 16 nt, Human
aucaguauaauucugu

SEQ ID NO: 2605031 - RNA, 16 nt, Human
aucaguauaaacaaag

SEQ ID NO: 2605032 - RNA, 14 nt, Human
aucaguauaauucu

SEQ ID NO: 2605033 - RNA, 18 nt, Human
aucaguauaaacaaaguu

SEQ ID NO: 2605034 - RNA, 17 nt, Human
aucagcacgauuucugu

SEQ ID NO: 2605035 - RNA, 18 nt, Human
aucagcacgauuucuguu

SEQ ID NO: 2605036 - RNA, 15 nt, Human
aucagcacgauuucu

SEQ ID NO: 2605037 - RNA, 16 nt, Human
aucagcacgauuucug

SEQ ID NO: 2605038 - RNA, 22 nt, Human
aucagaugaacucuuagaaaug

SEQ ID NO: 2605039 - RNA, 22 nt, Human
aucagaucauuucaaaacucau

SEQ ID NO: 2605040 - RNA, 23 nt, Human
aucagaugaacucuuagaaauga

SEQ ID NO: 2605041 - RNA, 17 nt, Human
aucagaguugcugcaaa

SEQ ID NO: 2605042 - RNA, 17 nt, Human
aucagaggccuauaaug

SEQ ID NO: 2605043 - RNA, 18 nt, Human
aucagaucauuucaaaac

SEQ ID NO: 2605044 - RNA, 14 nt, Human
aucagugugccccc

SEQ ID NO: 2605045 - RNA, 13 nt, Human
aucagugugcccc

SEQ ID NO: 2605046 - RNA, 15 nt, Human
aucagugucucacac

SEQ ID NO: 2605047 - RNA, 14 nt, Human
aucagugucucaca

SEQ ID NO: 2605048 - RNA, 19 nt, Human
aucagugugucuaaauuug

SEQ ID NO: 2605049 - RNA, 22 nt, Human
aucagugugccccccauccugg

SEQ ID NO: 2605050 - RNA, 15 nt, Human
aucagugugcccccc

SEQ ID NO: 2605051 - RNA, 17 nt, Human
aucauaagauauuuuuc

SEQ ID NO: 2605052 - RNA, 20 nt, Human
aucagugugucuaaauuuga

SEQ ID NO: 2605053 - RNA, 17 nt, Human
aucauacacuuccuucu

SEQ ID NO: 2605054 - RNA, 12 nt, Human
aucauagaaaug

SEQ ID NO: 2605055 - RNA, 15 nt, Human
aucauagaaauguaa

SEQ ID NO: 2605056 - RNA, 16 nt, Human
aucagucccuauguau

SEQ ID NO: 2605057 - RNA, 23 nt, Human
aucaguccccucccaucugggag

SEQ ID NO: 2605058 - RNA, 22 nt, Human
aucaguccccucccaucuggga

SEQ ID NO: 2605059 - RNA, 17 nt, Human
aucaguccccucccauc

SEQ ID NO: 2605060 - RNA, 16 nt, Human
aucaguccccucccau

SEQ ID NO: 2605061 - RNA, 15 nt, Human
aucaguccccuccca

SEQ ID NO: 2605062 - RNA, 13 nt, Human
aucaguccccucc

SEQ ID NO: 2605063 - RNA, 21 nt, Human
aucagucccuauguauuugca

SEQ ID NO: 2605064 - RNA, 21 nt, Human
aucaguccucuuucaaaggua

SEQ ID NO: 2605065 - RNA, 19 nt, Human
aucagucuauccacagaga

SEQ ID NO: 2605066 - RNA, 14 nt, Human
aucaguccuuugau

SEQ ID NO: 2605067 - RNA, 13 nt, Human
aucaguggagcca

SEQ ID NO: 2605068 - RNA, 22 nt, Human
aucaguggcauggcuccagucu

SEQ ID NO: 2605069 - RNA, 19 nt, Human
aucagugguuauuuaggga

SEQ ID NO: 2605070 - RNA, 16 nt, Human
aucagugucuuuccac

SEQ ID NO: 2605071 - RNA, 19 nt, Human
aucaguguaccauuugccu

SEQ ID NO: 2605072 - RNA, 17 nt, Human
aucaguguccucuugcu

SEQ ID NO: 2605073 - RNA, 14 nt, Human
uucucaguuuucau

SEQ ID NO: 2605074 - RNA, 22 nt, Human
uucucagacuuuggaaaaugca

SEQ ID NO: 2605075 - RNA, 15 nt, Human
uucucaguuuucaua

SEQ ID NO: 2605076 - RNA, 23 nt, Human
uucucagaaucucaaauaacuaa

SEQ ID NO: 2605077 - RNA, 22 nt, Human
uucucagucaguaauugccaaa

SEQ ID NO: 2605078 - RNA, 22 nt, Human
uucucacacccaccguccgccc

SEQ ID NO: 2605079 - RNA, 18 nt, Human
uucucacacccaccgucc

SEQ ID NO: 2605080 - RNA, 15 nt, Human
uucucacacccaccg

SEQ ID NO: 2605081 - RNA, 14 nt, Human
uucucacacccacc

SEQ ID NO: 2605082 - RNA, 19 nt, Human
uucucagaaucucaaauaa

SEQ ID NO: 2605083 - RNA, 22 nt, Human
uucucagaaucucaaauaacua

SEQ ID NO: 2605084 - RNA, 23 nt, Human
aucagaaauacagauuuugauag

SEQ ID NO: 2605085 - RNA, 19 nt, Human
aucagaaauacagauuuug

SEQ ID NO: 2605086 - RNA, 15 nt, Human
aucagaaauacagau

SEQ ID NO: 2605087 - RNA, 14 nt, Human
aucagaaauacaga

SEQ ID NO: 2605088 - RNA, 15 nt, Human
uucucaucacucccc

SEQ ID NO: 2605089 - RNA, 24 nt, Human
uucucauaggaaaaguacauuuaa

SEQ ID NO: 2605090 - RNA, 22 nt, Human
uucucauaggaaaaguacauuu

SEQ ID NO: 2605091 - RNA, 17 nt, Human
uucucaucacuccccuc

SEQ ID NO: 2605092 - RNA, 16 nt, Human
uucucaucacuccccu

SEQ ID NO: 2605093 - RNA, 17 nt, Human
uucucaucccacgcacu

SEQ ID NO: 2605094 - RNA, 13 nt, Human
uucucauagcauu

SEQ ID NO: 2605095 - RNA, 14 nt, Human
uucucauagcauua

SEQ ID NO: 2605096 - RNA, 17 nt, Human
uucucauagcauuaacu

SEQ ID NO: 2605097 - RNA, 18 nt, Human
uucucauagcauuaacua

SEQ ID NO: 2605098 - RNA, 21 nt, Human
uucucauagcauuaacuaauc

SEQ ID NO: 2605099 - RNA, 22 nt, Human
uucucauagcauuaacuaaucu

SEQ ID NO: 2605100 - RNA, 20 nt, Human
uucucauaggaaaaguacau

SEQ ID NO: 2605101 - RNA, 13 nt, Human
aucagaagauaac

SEQ ID NO: 2605102 - RNA, 22 nt, Human
aucagaagaccacaaaaauuga

SEQ ID NO: 2605103 - RNA, 23 nt, Human
aucagaagaccacaaaaauugac

SEQ ID NO: 2605104 - RNA, 22 nt, Human
aucagaacucaaauggggccag

SEQ ID NO: 2605105 - RNA, 23 nt, Human
aucagaacucaaauggggccaga

SEQ ID NO: 2605106 - RNA, 13 nt, Human
aucagaacagcag

SEQ ID NO: 2605107 - RNA, 14 nt, Human
aucagaacagcaga

SEQ ID NO: 2605108 - RNA, 21 nt, Human
aucagagcagcagugaaaaca

SEQ ID NO: 2605109 - RNA, 15 nt, Human
aucagaggccuauaa

SEQ ID NO: 2605110 - RNA, 14 nt, Human
aucagaggccuaua

SEQ ID NO: 2605111 - RNA, 22 nt, Human
aucagagaugcaccaccaagcc

SEQ ID NO: 2605112 - RNA, 17 nt, Human
aucagaagauaacuuga

SEQ ID NO: 2605113 - RNA, 14 nt, Human
aucagaagauaacu

SEQ ID NO: 2605114 - RNA, 12 nt, Human
aucagaaggaga

SEQ ID NO: 2605115 - RNA, 17 nt, Human
uucucaagugccuuaau

SEQ ID NO: 2605116 - RNA, 23 nt, Human
uucuaguuuucaguuuguauaua

SEQ ID NO: 2605117 - RNA, 23 nt, Human
uucuauaaggccauaaaacaggu

SEQ ID NO: 2605118 - RNA, 14 nt, Human
uucucaaccuacca

SEQ ID NO: 2605119 - RNA, 22 nt, Human
uucucaacaaagcacaguguua

SEQ ID NO: 2605120 - RNA, 15 nt, Human
uucucaaccuaccac

SEQ ID NO: 2605121 - RNA, 22 nt, Human
uucucaagauacugcuacugua

SEQ ID NO: 2605122 - RNA, 15 nt, Human
uucucaagugccuua

SEQ ID NO: 2605123 - RNA, 11 nt, Human
uucucaagugc

SEQ ID NO: 2605124 - RNA, 15 nt, Human
uucucaagcccugca

SEQ ID NO: 2605125 - RNA, 14 nt, Human
uucucaagcccugc

SEQ ID NO: 2605126 - RNA, 18 nt, Human
uucucaacuccaaacuga

SEQ ID NO: 2605127 - RNA, 14 nt, Human
uucucaacuccaaa

SEQ ID NO: 2605128 - RNA, 15 nt, Human
uucuaguuugcauuc

SEQ ID NO: 2605129 - RNA, 14 nt, Human
uucuaguuugcauu

SEQ ID NO: 2605130 - RNA, 19 nt, Human
uucuaguuuucaguuugua

SEQ ID NO: 2605131 - RNA, 14 nt, Human
uucuaguuuucagu

SEQ ID NO: 2605132 - RNA, 13 nt, Human
uucuaguuuuguc

SEQ ID NO: 2605133 - RNA, 14 nt, Human
uucuauaaggccau

SEQ ID NO: 2605134 - RNA, 21 nt, Human
uucuauaaggccauaaaacag

SEQ ID NO: 2605135 - RNA, 13 nt, Human
uucuauaaggcca

SEQ ID NO: 2605136 - RNA, 22 nt, Human
uucuaggcuacaauuuucuccc

SEQ ID NO: 2605137 - RNA, 23 nt, Human
uucuaggcuacaauuuucuccca

SEQ ID NO: 2605138 - RNA, 18 nt, Human
uucuagguggcaaggcug

SEQ ID NO: 2605139 - RNA, 15 nt, Human
uucuagggaaaugaa

SEQ ID NO: 2605140 - RNA, 23 nt, Human
uucuagguggcaaggcugugcuc

SEQ ID NO: 2605141 - RNA, 15 nt, Human
uucuagguucuaaaa

SEQ ID NO: 2605142 - RNA, 22 nt, Human
uucuaguuucccacaauauaaa

SEQ ID NO: 2605143 - RNA, 15 nt, Human
uucuaguuucccaca

SEQ ID NO: 2605144 - RNA, 15 nt, Human
uuccuuuuuuauaca

SEQ ID NO: 2605145 - RNA, 21 nt, Human
uuccuuuuuuaaaaaugcaaa

SEQ ID NO: 2605146 - RNA, 13 nt, Human
uucuaggccuggg

SEQ ID NO: 2605147 - RNA, 23 nt, Human
uuccuuuugaacgccccccccca

SEQ ID NO: 2605148 - RNA, 17 nt, Human
uuccuuuuguguacagu

SEQ ID NO: 2605149 - RNA, 15 nt, Human
uuccuuuuguguaca

SEQ ID NO: 2605150 - RNA, 17 nt, Human
uuccuuuucccugcuuc

SEQ ID NO: 2605151 - RNA, 16 nt, Human
uuccuuuucccugcuu

SEQ ID NO: 2605152 - RNA, 18 nt, Human
uuccuuuucuaacucucc

SEQ ID NO: 2605153 - RNA, 20 nt, Human
uuccuuuugaacgccccccc

SEQ ID NO: 2605154 - RNA, 20 nt, Human
uuauuuaugccucuguauuu

SEQ ID NO: 2605155 - RNA, 14 nt, Human
uuauuuaugccucu

SEQ ID NO: 2605156 - RNA, 14 nt, Human
uuauuuaucaguga

SEQ ID NO: 2605157 - RNA, 18 nt, Human
uuauuuaucagugacaga

SEQ ID NO: 2605158 - RNA, 13 nt, Human
uuauuuauuuaau

SEQ ID NO: 2605159 - RNA, 15 nt, Human
uuauuuauuuaaaug

SEQ ID NO: 2605160 - RNA, 15 nt, Human
uuauuuauuggagau

SEQ ID NO: 2605161 - RNA, 13 nt, Human
uuauuuauuaaga

SEQ ID NO: 2605162 - RNA, 22 nt, Human
uuauuuauucagcuucauuugu

SEQ ID NO: 2605163 - RNA, 17 nt, Human
uuauuuauucagcuuca

SEQ ID NO: 2605164 - RNA, 14 nt, Human
uuauuuauuaagau

SEQ ID NO: 2605165 - RNA, 15 nt, Human
uuauuuauuaagaug

SEQ ID NO: 2605166 - RNA, 19 nt, Human
uuauuuccuaguucuguag

SEQ ID NO: 2605167 - RNA, 18 nt, Human
uuauuuccuaguucugua

SEQ ID NO: 2605168 - RNA, 19 nt, Human
uuauuuccaaauaaaauga

SEQ ID NO: 2605169 - RNA, 17 nt, Human
uuauuuccaaauaaaau

SEQ ID NO: 2605170 - RNA, 18 nt, Human
uuauuucauaaacaacuu

SEQ ID NO: 2605171 - RNA, 15 nt, Human
uuauuucaugaaaau

SEQ ID NO: 2605172 - RNA, 20 nt, Human
uuauuucaucauauuauaca

SEQ ID NO: 2605173 - RNA, 14 nt, Human
uuauuuauuuaaua

SEQ ID NO: 2605174 - RNA, 15 nt, Human
uuauuuauuuaugga

SEQ ID NO: 2605175 - RNA, 23 nt, Human
uuauuucaaaauauacauucaaa

SEQ ID NO: 2605176 - RNA, 21 nt, Human
uuauuucacuuuagaugcuga

SEQ ID NO: 2605177 - RNA, 20 nt, Human
uuauuucacuuuagaugcug

SEQ ID NO: 2605178 - RNA, 11 nt, Human
uuauuucagaa

SEQ ID NO: 2605179 - RNA, 15 nt, Human
uuauuucagaaaugu

SEQ ID NO: 2605180 - RNA, 17 nt, Human
uuauuucagaaauguac

SEQ ID NO: 2605181 - RNA, 23 nt, Human
uuauuuagacucaucuuacugua

SEQ ID NO: 2605182 - RNA, 17 nt, Human
uuauuuagacucaucuu

SEQ ID NO: 2605183 - RNA, 18 nt, Human
uuauuuagacaagagaug

SEQ ID NO: 2605184 - RNA, 17 nt, Human
uuauuuagcaccaggga

SEQ ID NO: 2605185 - RNA, 16 nt, Human
uuauuuagacaagaga

SEQ ID NO: 2605186 - RNA, 15 nt, Human
uuauuuagacaagag

SEQ ID NO: 2605187 - RNA, 14 nt, Human
uuauuuagacaaga

SEQ ID NO: 2605188 - RNA, 15 nt, Human
uuauuuacugcuagu

SEQ ID NO: 2605189 - RNA, 22 nt, Human
uuauuuacugagcuucucugug

SEQ ID NO: 2605190 - RNA, 15 nt, Human
uuauuuacagaugaa

SEQ ID NO: 2605191 - RNA, 20 nt, Human
uuauuuacagaugaauguau

SEQ ID NO: 2605192 - RNA, 19 nt, Human
uuauuuaauaacauuaccu

SEQ ID NO: 2605193 - RNA, 16 nt, Human
uuauuuaauguuaugu

SEQ ID NO: 2605194 - RNA, 14 nt, Human
uuauuuaauuaaaa

SEQ ID NO: 2605195 - RNA, 17 nt, Human
uuauuuacuaauuuucu

SEQ ID NO: 2605196 - RNA, 21 nt, Human
uuauuuacugagcuucucugu

SEQ ID NO: 2605197 - RNA, 17 nt, Human
uuauuuacugagcuucu

SEQ ID NO: 2605198 - RNA, 15 nt, Human
uuauuuauacacugu

SEQ ID NO: 2605199 - RNA, 16 nt, Human
uuauuuaggcuuugua

SEQ ID NO: 2605200 - RNA, 17 nt, Human
uuauuuauaaucacuuu

SEQ ID NO: 2605201 - RNA, 15 nt, Human
uuauuuaguauuuau

SEQ ID NO: 2605202 - RNA, 16 nt, Human
uuauuuaguuccuuga

SEQ ID NO: 2605203 - RNA, 18 nt, Human
uuauuuagacucaucuua

SEQ ID NO: 2605204 - RNA, 17 nt, Human
uuauuuagggaacugcu

SEQ ID NO: 2605205 - RNA, 18 nt, Human
uuauuuagggaacugcuu

SEQ ID NO: 2605206 - RNA, 21 nt, Human
uuauuuagggaacugcuugac

SEQ ID NO: 2605207 - RNA, 17 nt, Human
auagcuguacaaauaua

SEQ ID NO: 2605208 - RNA, 15 nt, Human
auagcuguacaaaua

SEQ ID NO: 2605209 - RNA, 23 nt, Human
auagcuggucuuauuuguaaagc

SEQ ID NO: 2605210 - RNA, 22 nt, Human
auagcuggucuuauuuguaaag

SEQ ID NO: 2605211 - RNA, 17 nt, Human
auagcugggacuacagg

SEQ ID NO: 2605212 - RNA, 18 nt, Human
auagcuguauugaaucau

SEQ ID NO: 2605213 - RNA, 17 nt, Human
auagcuguauugaauca

SEQ ID NO: 2605214 - RNA, 16 nt, Human
auagcuguauugaauc

SEQ ID NO: 2605215 - RNA, 15 nt, Human
auagcuguauugaau

SEQ ID NO: 2605216 - RNA, 13 nt, Human
auagcuguauuga

SEQ ID NO: 2605217 - RNA, 18 nt, Human
auagcuguacaaauauaa

SEQ ID NO: 2605218 - RNA, 23 nt, Human
auagcuguacaaauauaagaaua

SEQ ID NO: 2605219 - RNA, 19 nt, Human
uuauuguguuugucauuag

SEQ ID NO: 2605220 - RNA, 22 nt, Human
auagcuguauugaaucauguag

SEQ ID NO: 2605221 - RNA, 18 nt, Human
uuauuguguuugucauua

SEQ ID NO: 2605222 - RNA, 17 nt, Human
uuauuguuuaaaaucau

SEQ ID NO: 2605223 - RNA, 22 nt, Human
uuauuguguuugucauuagccu

SEQ ID NO: 2605224 - RNA, 20 nt, Human
uuauuguguuugucauuagc

SEQ ID NO: 2605225 - RNA, 20 nt, Human
uuauuguguuuuuaauuuau

SEQ ID NO: 2605226 - RNA, 13 nt, Human
uuauuguuccaag

SEQ ID NO: 2605227 - RNA, 16 nt, Human
uuauuguuccaagaca

SEQ ID NO: 2605228 - RNA, 18 nt, Human
uuauuuaaugaaagacug

SEQ ID NO: 2605229 - RNA, 22 nt, Human
uuauuuaaugaaagacuguaca

SEQ ID NO: 2605230 - RNA, 15 nt, Human
uuauuuaauaacauu

SEQ ID NO: 2605231 - RNA, 14 nt, Human
uuauuuaauaacau

SEQ ID NO: 2605232 - RNA, 14 nt, Human
uuauuuaauaacaa

SEQ ID NO: 2605233 - RNA, 13 nt, Human
uuauuuaauaaca

SEQ ID NO: 2605234 - RNA, 12 nt, Human
uuauuuaauaac

SEQ ID NO: 2605235 - RNA, 10 nt, Human
uuauuuaaua

SEQ ID NO: 2605236 - RNA, 23 nt, Human
uuauuuaacagcugaauuaucua

SEQ ID NO: 2605237 - RNA, 16 nt, Human
uuauuuaaaugucuaa

SEQ ID NO: 2605238 - RNA, 15 nt, Human
uuauuuaaaugucua

SEQ ID NO: 2605239 - RNA, 20 nt, Human
uuauuuaaaugucuaaugua

SEQ ID NO: 2605240 - RNA, 13 nt, Human
uuauuuaacagcu

SEQ ID NO: 2605241 - RNA, 12 nt, Human
uuauuuaaauga

SEQ ID NO: 2605242 - RNA, 20 nt, Human
uuauuuaaacucuguugcaa

SEQ ID NO: 2605243 - RNA, 14 nt, Human
uuauuuaaauuuua

SEQ ID NO: 2605244 - RNA, 16 nt, Human
uuauuuaaaagauuca

SEQ ID NO: 2605245 - RNA, 15 nt, Human
uuauuuaaaagauuc

SEQ ID NO: 2605246 - RNA, 14 nt, Human
uuauuuaaaagauu

SEQ ID NO: 2605247 - RNA, 22 nt, Human
uuauuguuuaaagcaacugucu

SEQ ID NO: 2605248 - RNA, 18 nt, Human
uuauuuaaaagauucauu

SEQ ID NO: 2605249 - RNA, 17 nt, Human
uuauuuaaaagauucau

SEQ ID NO: 2605250 - RNA, 13 nt, Human
uuauuuaaaagau

SEQ ID NO: 2605251 - RNA, 12 nt, Human
uuauuguuuaaa

SEQ ID NO: 2605252 - RNA, 23 nt, Human
uuauuguuccaagacauugucaa

SEQ ID NO: 2605253 - RNA, 17 nt, Human
uuauuguuccaagacau

SEQ ID NO: 2605254 - RNA, 18 nt, Human
uuauuguuccaagacauu

SEQ ID NO: 2605255 - RNA, 19 nt, Human
uuauuguuccaagacauug

SEQ ID NO: 2605256 - RNA, 22 nt, Human
uuauuguuccaagacauuguca

SEQ ID NO: 2605257 - RNA, 18 nt, Human
auagcuacuaauuuuaaa

SEQ ID NO: 2605258 - RNA, 16 nt, Human
auagcuacaggaagca

SEQ ID NO: 2605259 - RNA, 19 nt, Human
auagcucaggugucccugc

SEQ ID NO: 2605260 - RNA, 14 nt, Human
auagcuauauccau

SEQ ID NO: 2605261 - RNA, 16 nt, Human
auagcuauauccaugu

SEQ ID NO: 2605262 - RNA, 17 nt, Human
auagcuauauccaugua

SEQ ID NO: 2605263 - RNA, 19 nt, Human
auagcuauauccauguacu

SEQ ID NO: 2605264 - RNA, 20 nt, Human
auagcuauauccauguacug

SEQ ID NO: 2605265 - RNA, 22 nt, Human
auagcuauauccauguacugua

SEQ ID NO: 2605266 - RNA, 14 nt, Human
auagcuauuacugu

SEQ ID NO: 2605267 - RNA, 23 nt, Human
auagcuauauccauguacuguag

SEQ ID NO: 2605268 - RNA, 21 nt, Human
auagcuaagaaauaaaacugu

SEQ ID NO: 2605269 - RNA, 15 nt, Human
auagcuacaggaagc

SEQ ID NO: 2605270 - RNA, 22 nt, Human
auagcucaggugucccugcacu

SEQ ID NO: 2605271 - RNA, 20 nt, Human
auagcuccccgcuucugccu

SEQ ID NO: 2605272 - RNA, 20 nt, Human
auagcuauuuuuauggaauu

SEQ ID NO: 2605273 - RNA, 13 nt, Human
auagcucaguuua

SEQ ID NO: 2605274 - RNA, 22 nt, Human
auagcuauuacugucugguuuu

SEQ ID NO: 2605275 - RNA, 18 nt, Human
auagcuauuacugucugg

SEQ ID NO: 2605276 - RNA, 12 nt, Human
auagcuauuuuu

SEQ ID NO: 2605277 - RNA, 18 nt, Human
auagcuauuuuuauggaa

SEQ ID NO: 2605278 - RNA, 21 nt, Human
auagcucaggugucccugcac

SEQ ID NO: 2605279 - RNA, 20 nt, Human
auagcucaggugucccugca

SEQ ID NO: 2605280 - RNA, 12 nt, Human
auagcugggacu

SEQ ID NO: 2605281 - RNA, 20 nt, Human
auagcucuuuggcagucuau

SEQ ID NO: 2605282 - RNA, 15 nt, Human
auagcucuuucaggg

SEQ ID NO: 2605283 - RNA, 17 nt, Human
auagcugagauuccugg

SEQ ID NO: 2605284 - RNA, 21 nt, Human
auagcugagauuccugguucg

SEQ ID NO: 2605285 - RNA, 23 nt, Human
auagcuccccgcuucugccugca

SEQ ID NO: 2605286 - RNA, 20 nt, Human
auagcuccugcuccacagcc

SEQ ID NO: 2605287 - RNA, 22 nt, Human
auagcucaguuuauccaaggug

SEQ ID NO: 2605288 - RNA, 21 nt, Human
auaacuuugcuugcaguagau

SEQ ID NO: 2605289 - RNA, 14 nt, Human
auaacuuugcuugc

SEQ ID NO: 2605290 - RNA, 12 nt, Human
auaacuuugcuu

SEQ ID NO: 2605291 - RNA, 13 nt, Human
auaacuugucuaa

SEQ ID NO: 2605292 - RNA, 20 nt, Human
auaagagagucauaaaccuu

SEQ ID NO: 2605293 - RNA, 19 nt, Human
auaagagggcacacacugu

SEQ ID NO: 2605294 - RNA, 17 nt, Human
auaagagggcacacacu

SEQ ID NO: 2605295 - RNA, 21 nt, Human
auaagaggcugauaauuccag

SEQ ID NO: 2605296 - RNA, 17 nt, Human
auaacuucuuaaaaguu

SEQ ID NO: 2605297 - RNA, 16 nt, Human
auaacuucuuaaaagu

SEQ ID NO: 2605298 - RNA, 19 nt, Human
auaacuucuuaaaaguugu

SEQ ID NO: 2605299 - RNA, 16 nt, Human
auaacuucaagcaaac

SEQ ID NO: 2605300 - RNA, 15 nt, Human
auaagauauuuuuca

SEQ ID NO: 2605301 - RNA, 16 nt, Human
auaagaguagaaacug

SEQ ID NO: 2605302 - RNA, 18 nt, Human
auagccugccucuucucu

SEQ ID NO: 2605303 - RNA, 13 nt, Human
auaagauaaaugu

SEQ ID NO: 2605304 - RNA, 17 nt, Human
auaagauaaaugugcug

SEQ ID NO: 2605305 - RNA, 14 nt, Human
auagcuacuaauuu

SEQ ID NO: 2605306 - RNA, 17 nt, Human
auagcuacuaauuuuaa

SEQ ID NO: 2605307 - RNA, 23 nt, Human
auagcuaacauuuuaaauaaaag

SEQ ID NO: 2605308 - RNA, 22 nt, Human
auagcuaacauuuuaaauaaaa

SEQ ID NO: 2605309 - RNA, 15 nt, Human
auagcuaacauuuua

SEQ ID NO: 2605310 - RNA, 20 nt, Human
auagcggguuacuuucacau

SEQ ID NO: 2605311 - RNA, 21 nt, Human
uucaaggauccugagccagau

SEQ ID NO: 2605312 - RNA, 19 nt, Human
uucaaggauccugagccag

SEQ ID NO: 2605313 - RNA, 18 nt, Human
uucaaggauccugagcca

SEQ ID NO: 2605314 - RNA, 16 nt, Human
uucaaggauccugagc

SEQ ID NO: 2605315 - RNA, 12 nt, Human
uucaacuuuucc

SEQ ID NO: 2605316 - RNA, 22 nt, Human
uucaagaaaacaacuucaauau

SEQ ID NO: 2605317 - RNA, 13 nt, Human
uucaagaaacuga

SEQ ID NO: 2605318 - RNA, 20 nt, Human
uucaagaaacugaggaauuu

SEQ ID NO: 2605319 - RNA, 12 nt, Human
uucaagaaacug

SEQ ID NO: 2605320 - RNA, 15 nt, Human
uucaaggauccugag

SEQ ID NO: 2605321 - RNA, 22 nt, Human
uucaagaaagcuucaaacugca

SEQ ID NO: 2605322 - RNA, 23 nt, Human
uucaagaaacugaggaauuuucu

SEQ ID NO: 2605323 - RNA, 19 nt, Human
uucaagaaaaguaagcccu

SEQ ID NO: 2605324 - RNA, 18 nt, Human
uucaaguggggcucgcca

SEQ ID NO: 2605325 - RNA, 22 nt, Human
uucaagugcaugcucucugcag

SEQ ID NO: 2605326 - RNA, 20 nt, Human
uucaagugauucuccugccu

SEQ ID NO: 2605327 - RNA, 19 nt, Human
uucaaguguaaaauauuuu

SEQ ID NO: 2605328 - RNA, 22 nt, Human
uucaaguggggcucgccaugcc

SEQ ID NO: 2605329 - RNA, 13 nt, Human
uucaaguuaaagu

SEQ ID NO: 2605330 - RNA, 16 nt, Human
uucaaguuagcucagg

SEQ ID NO: 2605331 - RNA, 17 nt, Human
uucaaguuaaauuuuau

SEQ ID NO: 2605332 - RNA, 23 nt, Human
uucaaguuccaaguugcuaauac

SEQ ID NO: 2605333 - RNA, 17 nt, Human
uucaaguuauuguacag

SEQ ID NO: 2605334 - RNA, 14 nt, Human
uucaaguuauugua

SEQ ID NO: 2605335 - RNA, 17 nt, Human
uucaaguuagcucagga

SEQ ID NO: 2605336 - RNA, 20 nt, Human
uucaaguuauuguacagcug

SEQ ID NO: 2605337 - RNA, 14 nt, Human
uucaaguucaaucc

SEQ ID NO: 2605338 - RNA, 16 nt, Human
uucaauaaagcauuua

SEQ ID NO: 2605339 - RNA, 18 nt, Human
uucaauaaagcauuuaua

SEQ ID NO: 2605340 - RNA, 20 nt, Human
uucaagugauucucaugccu

SEQ ID NO: 2605341 - RNA, 22 nt, Human
uucaagugauucucaugccuca

SEQ ID NO: 2605342 - RNA, 20 nt, Human
uucaaggcaucaugcagagu

SEQ ID NO: 2605343 - RNA, 17 nt, Human
uucaaggccauccuucc

SEQ ID NO: 2605344 - RNA, 16 nt, Human
uucaaggccauccuuc

SEQ ID NO: 2605345 - RNA, 17 nt, Human
uucaaaaaguguuuauu

SEQ ID NO: 2605346 - RNA, 14 nt, Human
uucaaaaaguguuu

SEQ ID NO: 2605347 - RNA, 13 nt, Human
uucaaaaaguguu

SEQ ID NO: 2605348 - RNA, 15 nt, Human
uucaaaaauauaacu

SEQ ID NO: 2605349 - RNA, 17 nt, Human
uucaaaauaaaaaugag

SEQ ID NO: 2605350 - RNA, 23 nt, Human
uucaaaaacacaguguuuuugua

SEQ ID NO: 2605351 - RNA, 17 nt, Human
uucaaaaacacaguguu

SEQ ID NO: 2605352 - RNA, 18 nt, Human
uucaaaaaaauaaaauaa

SEQ ID NO: 2605353 - RNA, 18 nt, Human
uucaaaaaaacacuaguu

SEQ ID NO: 2605354 - RNA, 15 nt, Human
uucaaaaacuguauu

SEQ ID NO: 2605355 - RNA, 21 nt, Human
uucaaaaagucuacgcucucc

SEQ ID NO: 2605356 - RNA, 16 nt, Human
uucaaaaaacuuguaa

SEQ ID NO: 2605357 - RNA, 17 nt, Human
uucaaaaaaacacuagu

SEQ ID NO: 2605358 - RNA, 14 nt, Human
uucaaaaaaacacu

SEQ ID NO: 2605359 - RNA, 16 nt, Human
uuauuucucugauuug

SEQ ID NO: 2605360 - RNA, 12 nt, Human
uuauuucugcau

SEQ ID NO: 2605361 - RNA, 13 nt, Human
uuauuucugcaua

SEQ ID NO: 2605362 - RNA, 15 nt, Human
uuauuucugcauaug

SEQ ID NO: 2605363 - RNA, 20 nt, Human
uuauuucugcauauguugaa

SEQ ID NO: 2605364 - RNA, 22 nt, Human
uuauuucugcauauguugaaua

SEQ ID NO: 2605365 - RNA, 16 nt, Human
uuauuuuuuucugauu

SEQ ID NO: 2605366 - RNA, 15 nt, Human
uuauuuuuuucugau

SEQ ID NO: 2605367 - RNA, 19 nt, Human
uuauuucuaggaagaauuu

SEQ ID NO: 2605368 - RNA, 22 nt, Human
uuauuucucagacuuuggaaaa

SEQ ID NO: 2605369 - RNA, 14 nt, Human
uuauuucucugauu

SEQ ID NO: 2605370 - RNA, 21 nt, Human
uuauuuccuaguucuguagaa

SEQ ID NO: 2605371 - RNA, 17 nt, Human
uucaaaaugcuuuuuau

SEQ ID NO: 2605372 - RNA, 20 nt, Human
uucaaaaugcuuuuuauuau

SEQ ID NO: 2605373 - RNA, 16 nt, Human
uucaaaauauguucuu

SEQ ID NO: 2605374 - RNA, 16 nt, Human
uucaaaauggagggaa

SEQ ID NO: 2605375 - RNA, 14 nt, Human
uucaaaaugucugu

SEQ ID NO: 2605376 - RNA, 18 nt, Human
uucaaaaugucuguagcu

SEQ ID NO: 2605377 - RNA, 15 nt, Human
uucaaacuggggccu

SEQ ID NO: 2605378 - RNA, 16 nt, Human
uucaaacuggggccuc

SEQ ID NO: 2605379 - RNA, 21 nt, Human
uucaaacuggggccuccagaa

SEQ ID NO: 2605380 - RNA, 21 nt, Human
uucaacugccaaaaugcucua

SEQ ID NO: 2605381 - RNA, 15 nt, Human
uucaaacauauauaa

SEQ ID NO: 2605382 - RNA, 12 nt, Human
uucaccagagca

SEQ ID NO: 2605383 - RNA, 18 nt, Human
uucacauagcugucuaga

SEQ ID NO: 2605384 - RNA, 17 nt, Human
uucacauuuuuguauuu

SEQ ID NO: 2605385 - RNA, 19 nt, Human
uucaccagaggaaucacuc

SEQ ID NO: 2605386 - RNA, 18 nt, Human
uucaccagauuugcuaau

SEQ ID NO: 2605387 - RNA, 19 nt, Human
uucacauuuuccuuuucaa

SEQ ID NO: 2605388 - RNA, 22 nt, Human
uucaccacaugugcacaugcac

SEQ ID NO: 2605389 - RNA, 17 nt, Human
uucacauauugauuucc

SEQ ID NO: 2605390 - RNA, 19 nt, Human
uucacauuguauucagagu

SEQ ID NO: 2605391 - RNA, 15 nt, Human
uucacauagcugucu

SEQ ID NO: 2605392 - RNA, 18 nt, Human
uucacauccuguguuucu

SEQ ID NO: 2605393 - RNA, 10 nt, Human
uucacaggcg

SEQ ID NO: 2605394 - RNA, 19 nt, Human
uucacaggcgaggccugga

SEQ ID NO: 2605395 - RNA, 12 nt, Human
uucacaguguuu

SEQ ID NO: 2605396 - RNA, 19 nt, Human
uucacauaaaauagauuuu

SEQ ID NO: 2605397 - RNA, 13 nt, Human
uucacaguuuuuc

SEQ ID NO: 2605398 - RNA, 15 nt, Human
uucacauacccuccc

SEQ ID NO: 2605399 - RNA, 20 nt, Human
uucacauaagcucagaaucc

SEQ ID NO: 2605400 - RNA, 18 nt, Human
uucacauaagcucagaau

SEQ ID NO: 2605401 - RNA, 22 nt, Human
uucacaguguuucgacagcuga

SEQ ID NO: 2605402 - RNA, 17 nt, Human
uucacauagagaucauc

SEQ ID NO: 2605403 - RNA, 17 nt, Human
uucacauacccuccccc

SEQ ID NO: 2605404 - RNA, 19 nt, Human
uucacauagagaucauccu

SEQ ID NO: 2605405 - RNA, 17 nt, Human
uucacauagaugucccu

SEQ ID NO: 2605406 - RNA, 15 nt, Human
uucacagcuccuccc

SEQ ID NO: 2605407 - RNA, 13 nt, Human
uucacagcuccuc

SEQ ID NO: 2605408 - RNA, 21 nt, Human
uucaauaaaguauuuaauuag

SEQ ID NO: 2605409 - RNA, 17 nt, Human
uucacagcuccucccac

SEQ ID NO: 2605410 - RNA, 15 nt, Human
uucacagcucugugu

SEQ ID NO: 2605411 - RNA, 23 nt, Human
uucacagcucuguguugccaugu

SEQ ID NO: 2605412 - RNA, 20 nt, Human
uucaauaaagcauuuauaaa

SEQ ID NO: 2605413 - RNA, 13 nt, Human
uucaauaaaguau

SEQ ID NO: 2605414 - RNA, 12 nt, Human
uucaauaaagua

SEQ ID NO: 2605415 - RNA, 19 nt, Human
uucaauaaaguauuuaauu

SEQ ID NO: 2605416 - RNA, 18 nt, Human
uucaauaaaguauuuaau

SEQ ID NO: 2605417 - RNA, 14 nt, Human
uucaauaaaguauu

SEQ ID NO: 2605418 - RNA, 14 nt, Human
uucaauaaaguauc

SEQ ID NO: 2605419 - RNA, 19 nt, Human
uucaauaaaguaucuacau

SEQ ID NO: 2605420 - RNA, 17 nt, Human
auaggcacaggaaacca

SEQ ID NO: 2605421 - RNA, 22 nt, Human
auaggcaccuaccaccacgccc

SEQ ID NO: 2605422 - RNA, 18 nt, Human
auaggaaugugaaagcac

SEQ ID NO: 2605423 - RNA, 23 nt, Human
auaggaucauuuguuggaaugaa

SEQ ID NO: 2605424 - RNA, 17 nt, Human
auagggcugagcucucu

SEQ ID NO: 2605425 - RNA, 14 nt, Human
auagggcugagcuc

SEQ ID NO: 2605426 - RNA, 14 nt, Human
auagggucuaacuc

SEQ ID NO: 2605427 - RNA, 15 nt, Human
auagggagaaaccaa

SEQ ID NO: 2605428 - RNA, 14 nt, Human
auaggcuggagaag

SEQ ID NO: 2605429 - RNA, 13 nt, Human
auaggcuggagaa

SEQ ID NO: 2605430 - RNA, 22 nt, Human
auaggcucugcacagauggauu

SEQ ID NO: 2605431 - RNA, 18 nt, Human
auaggcuggagaagcuca

SEQ ID NO: 2605432 - RNA, 16 nt, Human
auaggcuggagaagcu

SEQ ID NO: 2605433 - RNA, 21 nt, Human
auaggcuggagaagcucaccc

SEQ ID NO: 2605434 - RNA, 20 nt, Human
auaggcagacuggguuucua

SEQ ID NO: 2605435 - RNA, 17 nt, Human
auaggcagacuggguuu

SEQ ID NO: 2605436 - RNA, 22 nt, Human
auaggccaaacuggcaaacuuc

SEQ ID NO: 2605437 - RNA, 19 nt, Human
auaggaacuuaaauaaugu

SEQ ID NO: 2605438 - RNA, 10 nt, Human
auagcuuuau

SEQ ID NO: 2605439 - RNA, 18 nt, Human
auagcuuuauuuuuuaag

SEQ ID NO: 2605440 - RNA, 19 nt, Human
auagcuuuauuuuuuaagu

SEQ ID NO: 2605441 - RNA, 21 nt, Human
auagcuuuauuuuuuaaguau

SEQ ID NO: 2605442 - RNA, 21 nt, Human
auaggaauugacccacaagaa

SEQ ID NO: 2605443 - RNA, 22 nt, Human
auagcuuuauuuuuuaaguauu

SEQ ID NO: 2605444 - RNA, 23 nt, Human
auagcuuuauuuuuuaaguauuu

SEQ ID NO: 2605445 - RNA, 22 nt, Human
uucaccauguuggccaggcugc

SEQ ID NO: 2605446 - RNA, 22 nt, Human
uucaccauguuggccaggcugg

SEQ ID NO: 2605447 - RNA, 24 nt, Human
uucaccauuuggcaaugccaucau

SEQ ID NO: 2605448 - RNA, 22 nt, Human
auagcuuacaagccagcuggag

SEQ ID NO: 2605449 - RNA, 21 nt, Human
auagcuucaccccaaucccag

SEQ ID NO: 2605450 - RNA, 20 nt, Human
auagcuuguauaguguaaaa

SEQ ID NO: 2605451 - RNA, 17 nt, Human
auagcuuguauagugua

SEQ ID NO: 2605452 - RNA, 14 nt, Human
auagcuuguauagu

SEQ ID NO: 2605453 - RNA, 23 nt, Human
auagcuugcgcauucucauggag

SEQ ID NO: 2605454 - RNA, 19 nt, Human
auagcuugcgcauucucau

SEQ ID NO: 2605455 - RNA, 22 nt, Human
auagcuucaccccaaucccagc

SEQ ID NO: 2605456 - RNA, 20 nt, Human
uucagcaaacucuuuuccca

SEQ ID NO: 2605457 - RNA, 13 nt, Human
uucagcaagacaa

SEQ ID NO: 2605458 - RNA, 19 nt, Human
uucagaugucuucugccug

SEQ ID NO: 2605459 - RNA, 18 nt, Human
uucagaugucuucugccu

SEQ ID NO: 2605460 - RNA, 17 nt, Human
uucagaugucuucugcc

SEQ ID NO: 2605461 - RNA, 14 nt, Human
uucagaugucuucu

SEQ ID NO: 2605462 - RNA, 23 nt, Human
uucagaugucuucugccuguuau

SEQ ID NO: 2605463 - RNA, 20 nt, Human
uucagaugucuucugccugu

SEQ ID NO: 2605464 - RNA, 15 nt, Human
uucagaugcuucugg

SEQ ID NO: 2605465 - RNA, 19 nt, Human
uucagaugcuucugggaga

SEQ ID NO: 2605466 - RNA, 17 nt, Human
uucagaucucuaacuuc

SEQ ID NO: 2605467 - RNA, 16 nt, Human
uucagaucauggcauc

SEQ ID NO: 2605468 - RNA, 17 nt, Human
uucagaucagugcuuga

SEQ ID NO: 2605469 - RNA, 15 nt, Human
uucagacaagcaaca

SEQ ID NO: 2605470 - RNA, 20 nt, Human
uucagacaagcaacagguuu

SEQ ID NO: 2605471 - RNA, 21 nt, Human
uucagacaagcaacagguuuu

SEQ ID NO: 2605472 - RNA, 21 nt, Human
uucagaaucacuucugagaac

SEQ ID NO: 2605473 - RNA, 19 nt, Human
uucagaaucacuucugaga

SEQ ID NO: 2605474 - RNA, 21 nt, Human
uucagccaucaacaagaguug

SEQ ID NO: 2605475 - RNA, 17 nt, Human
uucagccaggagcuggg

SEQ ID NO: 2605476 - RNA, 13 nt, Human
uucagcccaucuc

SEQ ID NO: 2605477 - RNA, 20 nt, Human
uucagcccauauuucaucgu

SEQ ID NO: 2605478 - RNA, 13 nt, Human
uucagccccuccu

SEQ ID NO: 2605479 - RNA, 11 nt, Human
uucagccaagg

SEQ ID NO: 2605480 - RNA, 18 nt, Human
uucagccaccagccccug

SEQ ID NO: 2605481 - RNA, 13 nt, Human
uucagccaggagc

SEQ ID NO: 2605482 - RNA, 12 nt, Human
uucagccaggag

SEQ ID NO: 2605483 - RNA, 16 nt, Human
uucagcccucaccccu

SEQ ID NO: 2605484 - RNA, 12 nt, Human
uucagcccucac

SEQ ID NO: 2605485 - RNA, 14 nt, Human
uucagccccuccuc

SEQ ID NO: 2605486 - RNA, 15 nt, Human
uucagccccuccucu

SEQ ID NO: 2605487 - RNA, 16 nt, Human
uucagccccuccucug

SEQ ID NO: 2605488 - RNA, 17 nt, Human
uucagccccuccucugc

SEQ ID NO: 2605489 - RNA, 18 nt, Human
uucagccccuccucugcc

SEQ ID NO: 2605490 - RNA, 19 nt, Human
uucagccccuccucugcca

SEQ ID NO: 2605491 - RNA, 20 nt, Human
uucagccccuccucugccac

SEQ ID NO: 2605492 - RNA, 23 nt, Human
uucagccccuccucugccaccuc

SEQ ID NO: 2605493 - RNA, 19 nt, Human
uucagccaagaauucuuaa

SEQ ID NO: 2605494 - RNA, 13 nt, Human
uucagcacugucc

SEQ ID NO: 2605495 - RNA, 14 nt, Human
uucagccaagaauu

SEQ ID NO: 2605496 - RNA, 16 nt, Human
uucagcaccacccuag

SEQ ID NO: 2605497 - RNA, 22 nt, Human
uucagcaccuacaguguacagu

SEQ ID NO: 2605498 - RNA, 23 nt, Human
uucagcaccuacaguguacaguc

SEQ ID NO: 2605499 - RNA, 16 nt, Human
uucacuggaguuacau

SEQ ID NO: 2605500 - RNA, 23 nt, Human
uucacugcugcaaggccuuucug

SEQ ID NO: 2605501 - RNA, 19 nt, Human
uucacugcugcaaggccuu

SEQ ID NO: 2605502 - RNA, 13 nt, Human
uucacugcugcaa

SEQ ID NO: 2605503 - RNA, 19 nt, Human
uucacugcuggcugccuua

SEQ ID NO: 2605504 - RNA, 18 nt, Human
uucacugcuggcugccuu

SEQ ID NO: 2605505 - RNA, 17 nt, Human
uucacugcuggcugccu

SEQ ID NO: 2605506 - RNA, 16 nt, Human
uucacugcuggcugcc

SEQ ID NO: 2605507 - RNA, 15 nt, Human
uucacugcuggcugc

SEQ ID NO: 2605508 - RNA, 13 nt, Human
uucacugcuggcu

SEQ ID NO: 2605509 - RNA, 12 nt, Human
uucacugcugca

SEQ ID NO: 2605510 - RNA, 16 nt, Human
uucacugccuuugcuc

SEQ ID NO: 2605511 - RNA, 13 nt, Human
uucacugccccca

SEQ ID NO: 2605512 - RNA, 20 nt, Human
uucacugcauggcucccaca

SEQ ID NO: 2605513 - RNA, 14 nt, Human
auauauauaaaccu

SEQ ID NO: 2605514 - RNA, 13 nt, Human
auauauauaaacc

SEQ ID NO: 2605515 - RNA, 12 nt, Human
auauauauaaac

SEQ ID NO: 2605516 - RNA, 11 nt, Human
auauauauaaa

SEQ ID NO: 2605517 - RNA, 13 nt, Human
auauauagaaucu

SEQ ID NO: 2605518 - RNA, 22 nt, Human
auauauacauagcaugacauuu

SEQ ID NO: 2605519 - RNA, 23 nt, Human
auauauacaguaacuuuaugugu

SEQ ID NO: 2605520 - RNA, 21 nt, Human
auauauacaguaacuuuaugu

SEQ ID NO: 2605521 - RNA, 20 nt, Human
auauauacaguaacuuuaug

SEQ ID NO: 2605522 - RNA, 14 nt, Human
auauauacauauau

SEQ ID NO: 2605523 - RNA, 20 nt, Human
uucagaaaauauuauguguu

SEQ ID NO: 2605524 - RNA, 14 nt, Human
uucagaaaauauua

SEQ ID NO: 2605525 - RNA, 16 nt, Human
uucacuguauaaauag

SEQ ID NO: 2605526 - RNA, 15 nt, Human
uucacuguauaaaua

SEQ ID NO: 2605527 - RNA, 13 nt, Human
uucacuguauaaa

SEQ ID NO: 2605528 - RNA, 13 nt, Human
uucagaaaauauu

SEQ ID NO: 2605529 - RNA, 19 nt, Human
uucacuggaguuacauuaa

SEQ ID NO: 2605530 - RNA, 17 nt, Human
uucacuggaguuacauu

SEQ ID NO: 2605531 - RNA, 20 nt, Human
uucacuggccacaguuguuu

SEQ ID NO: 2605532 - RNA, 15 nt, Human
uucacuguagaauga

SEQ ID NO: 2605533 - RNA, 22 nt, Human
uucacuguagaaugauuucaug

SEQ ID NO: 2605534 - RNA, 20 nt, Human
uucacuguaagacucauucc

SEQ ID NO: 2605535 - RNA, 13 nt, Human
uucacuggcccaa

SEQ ID NO: 2605536 - RNA, 21 nt, Human
uucagaaaauauuauguguuu

SEQ ID NO: 2605537 - RNA, 19 nt, Human
uucacuguauaaauaggag

SEQ ID NO: 2605538 - RNA, 18 nt, Human
uucacuguauaaauagga

SEQ ID NO: 2605539 - RNA, 19 nt, Human
uucagaaagcauuacauuu

SEQ ID NO: 2605540 - RNA, 13 nt, Human
uucagaaagcauu

SEQ ID NO: 2605541 - RNA, 15 nt, Human
uucagaaagaagugg

SEQ ID NO: 2605542 - RNA, 23 nt, Human
uucagaagugagcuuugcugcua

SEQ ID NO: 2605543 - RNA, 22 nt, Human
uucagaagugagcuuugcugcu

SEQ ID NO: 2605544 - RNA, 16 nt, Human
uucagaaggggagggg

SEQ ID NO: 2605545 - RNA, 21 nt, Human
uucagaagugagcuuugcugc

SEQ ID NO: 2605546 - RNA, 12 nt, Human
uucagaagagau

SEQ ID NO: 2605547 - RNA, 20 nt, Human
uucagaaguuuggcaauagu

SEQ ID NO: 2605548 - RNA, 15 nt, Human
uucagaaucacuucu

SEQ ID NO: 2605549 - RNA, 23 nt, Human
uucagaaguuuggcaauaguuug

SEQ ID NO: 2605550 - RNA, 21 nt, Human
auauagguuuuguuugcuauc

SEQ ID NO: 2605551 - RNA, 20 nt, Human
auauagguuuuguuugcuau

SEQ ID NO: 2605552 - RNA, 19 nt, Human
auauagguuuuguuugcua

SEQ ID NO: 2605553 - RNA, 18 nt, Human
auauagguuuuguuugcu

SEQ ID NO: 2605554 - RNA, 16 nt, Human
auauagguugugcaaa

SEQ ID NO: 2605555 - RNA, 15 nt, Human
auauagguugugcaa

SEQ ID NO: 2605556 - RNA, 22 nt, Human
auauagguugugcaaauuaaca

SEQ ID NO: 2605557 - RNA, 14 nt, Human
auauagguuuuguu

SEQ ID NO: 2605558 - RNA, 13 nt, Human
auauaguuuuacu

SEQ ID NO: 2605559 - RNA, 16 nt, Human
auauaguuuuacuuuu

SEQ ID NO: 2605560 - RNA, 18 nt, Human
auauaguuuuacuuuuaa

SEQ ID NO: 2605561 - RNA, 23 nt, Human
auauaguuuuacuuuuaaacugu

SEQ ID NO: 2605562 - RNA, 12 nt, Human
auauaguuuuac

SEQ ID NO: 2605563 - RNA, 16 nt, Human
auauaguuuacuauuu

SEQ ID NO: 2605564 - RNA, 23 nt, Human
auauagguuuuguuugcuaucuu

SEQ ID NO: 2605565 - RNA, 18 nt, Human
auauauaacaaugcugua

SEQ ID NO: 2605566 - RNA, 17 nt, Human
auauauaacaaugcugu

SEQ ID NO: 2605567 - RNA, 19 nt, Human
auauauaacaaugcuguau

SEQ ID NO: 2605568 - RNA, 19 nt, Human
auauauaaaaagaaaagau

SEQ ID NO: 2605569 - RNA, 18 nt, Human
auauauacaguaacuuua

SEQ ID NO: 2605570 - RNA, 10 nt, Human
auauauaaaa

SEQ ID NO: 2605571 - RNA, 16 nt, Human
auauauacaguaacuu

SEQ ID NO: 2605572 - RNA, 19 nt, Human
auauaagcuuguauuccuu

SEQ ID NO: 2605573 - RNA, 17 nt, Human
auauaacaaugcuguau

SEQ ID NO: 2605574 - RNA, 14 nt, Human
auauaagaauaaaa

SEQ ID NO: 2605575 - RNA, 23 nt, Human
auauaaggaaagcaauaaaugaa

SEQ ID NO: 2605576 - RNA, 15 nt, Human
auauaacaaugcugu

SEQ ID NO: 2605577 - RNA, 12 nt, Human
auauaacaaugc

SEQ ID NO: 2605578 - RNA, 22 nt, Human
auauaaauuuuuuuuguuucau

SEQ ID NO: 2605579 - RNA, 17 nt, Human
auauaaauuuuuuuugu

SEQ ID NO: 2605580 - RNA, 15 nt, Human
auauaaauggcuggu

SEQ ID NO: 2605581 - RNA, 22 nt, Human
auauaaaugcuuuuaaaaaucu

SEQ ID NO: 2605582 - RNA, 18 nt, Human
auauaaauggcugguuuu

SEQ ID NO: 2605583 - RNA, 18 nt, Human
auagucaaauugugugaa

SEQ ID NO: 2605584 - RNA, 17 nt, Human
auagucaaauuguguga

SEQ ID NO: 2605585 - RNA, 22 nt, Human
auagucaagaaaaauuauugua

SEQ ID NO: 2605586 - RNA, 19 nt, Human
auagucaauguuucuuuua

SEQ ID NO: 2605587 - RNA, 22 nt, Human
auagucauguaagcugaaaaua

SEQ ID NO: 2605588 - RNA, 14 nt, Human
auagucacaagagc

SEQ ID NO: 2605589 - RNA, 21 nt, Human
auagucaagaaaaauuauugu

SEQ ID NO: 2605590 - RNA, 21 nt, Human
auagggucucuucagguucuu

SEQ ID NO: 2605591 - RNA, 22 nt, Human
auagggccuggucccugggagg

SEQ ID NO: 2605592 - RNA, 16 nt, Human
auagggucucuucagg

SEQ ID NO: 2605593 - RNA, 15 nt, Human
auaguuuguacaugc

SEQ ID NO: 2605594 - RNA, 13 nt, Human
auaguuuguacau

SEQ ID NO: 2605595 - RNA, 15 nt, Human
auaguuuuacuuuua

SEQ ID NO: 2605596 - RNA, 21 nt, Human
auaguuuuacuuuuaaacugu

SEQ ID NO: 2605597 - RNA, 22 nt, Human
auaguuuuacuuuuaaacugug

SEQ ID NO: 2605598 - RNA, 17 nt, Human
auaguccagcuuuguuc

SEQ ID NO: 2605599 - RNA, 21 nt, Human
auaguuucagauauauaucau

SEQ ID NO: 2605600 - RNA, 14 nt, Human
auaguuucagauau

SEQ ID NO: 2605601 - RNA, 22 nt, Human
auauaaaugcaauauuaaugcc

SEQ ID NO: 2605602 - RNA, 23 nt, Human
auauaaauggcugguuuuuagaa

SEQ ID NO: 2605603 - RNA, 17 nt, Human
auauaaaugguuaaaag

SEQ ID NO: 2605604 - RNA, 21 nt, Human
auauaaauauauauaaauaua

SEQ ID NO: 2605605 - RNA, 20 nt, Human
auauaaauauauauaaauau

SEQ ID NO: 2605606 - RNA, 23 nt, Human
auauaaauauauauauauauaaa

SEQ ID NO: 2605607 - RNA, 22 nt, Human
auauaaauauuagaaacagcuu

SEQ ID NO: 2605608 - RNA, 16 nt, Human
auauaaauauuagaaa

SEQ ID NO: 2605609 - RNA, 21 nt, Human
auauaaaccuaaaaaagauau

SEQ ID NO: 2605610 - RNA, 20 nt, Human
auauaaaccuaaaaaagaua

SEQ ID NO: 2605611 - RNA, 17 nt, Human
auauaaauauauauaaa

SEQ ID NO: 2605612 - RNA, 15 nt, Human
auauaaauauauaua

SEQ ID NO: 2605613 - RNA, 24 nt, Human
auauaaaauaaauauauauaaacc

SEQ ID NO: 2605614 - RNA, 21 nt, Human
auauaaaauaaauauauauaa

SEQ ID NO: 2605615 - RNA, 18 nt, Human
auauaaaauaaauauaua

SEQ ID NO: 2605616 - RNA, 14 nt, Human
auauaaaauaugaa

SEQ ID NO: 2605617 - RNA, 16 nt, Human
auauaaaauaaauaua

SEQ ID NO: 2605618 - RNA, 15 nt, Human
auauaaaauaaauau

SEQ ID NO: 2605619 - RNA, 23 nt, Human
auauaaaaggcaaauguguacau

SEQ ID NO: 2605620 - RNA, 21 nt, Human
auauaaaaggcaaauguguac

SEQ ID NO: 2605621 - RNA, 23 nt, Human
auaguuuuacuuuuaaacugugu

SEQ ID NO: 2605622 - RNA, 16 nt, Human
auaguuuuauuaauaa

SEQ ID NO: 2605623 - RNA, 13 nt, Human
auauaaaauauuu

SEQ ID NO: 2605624 - RNA, 19 nt, Human
auauaaaccuaaaaaagau

SEQ ID NO: 2605625 - RNA, 14 nt, Human
auauaaaccuaaaa

SEQ ID NO: 2605626 - RNA, 15 nt, Human
auauaaacacuauau

SEQ ID NO: 2605627 - RNA, 13 nt, Human
auauaaacacuau

SEQ ID NO: 2605628 - RNA, 22 nt, Human
uucagggaauuucaggaacuag

SEQ ID NO: 2605629 - RNA, 18 nt, Human
uucagggcagggcucuga

SEQ ID NO: 2605630 - RNA, 16 nt, Human
uucaggggacucagcc

SEQ ID NO: 2605631 - RNA, 17 nt, Human
uucaggggacucagccc

SEQ ID NO: 2605632 - RNA, 19 nt, Human
uucaggggacucagcccug

SEQ ID NO: 2605633 - RNA, 20 nt, Human
uucaggggacucagcccuga

SEQ ID NO: 2605634 - RNA, 23 nt, Human
uucagcccuaaaucuagacucaa

SEQ ID NO: 2605635 - RNA, 20 nt, Human
uucagccuagccgaccucag

SEQ ID NO: 2605636 - RNA, 21 nt, Human
uucagccuagccgaccucagc

SEQ ID NO: 2605637 - RNA, 22 nt, Human
uucagccuagccgaccucagcc

SEQ ID NO: 2605638 - RNA, 15 nt, Human
uucagccucuuucug

SEQ ID NO: 2605639 - RNA, 12 nt, Human
uucagccucugg

SEQ ID NO: 2605640 - RNA, 23 nt, Human
uucagccuagccgaccucagccu

SEQ ID NO: 2605641 - RNA, 20 nt, Human
uucaguaauaaacuguguuu

SEQ ID NO: 2605642 - RNA, 15 nt, Human
uucagggugaugcca

SEQ ID NO: 2605643 - RNA, 16 nt, Human
uucaggguccugagau

SEQ ID NO: 2605644 - RNA, 22 nt, Human
uucaguacccucucagcuccag

SEQ ID NO: 2605645 - RNA, 21 nt, Human
uucaguacccucucagcucca

SEQ ID NO: 2605646 - RNA, 14 nt, Human
uucaguaauaacuc

SEQ ID NO: 2605647 - RNA, 21 nt, Human
uucaggggagucccgucagga

SEQ ID NO: 2605648 - RNA, 23 nt, Human
uucaggggacucagcccugaggu

SEQ ID NO: 2605649 - RNA, 22 nt, Human
uucaggggcugcccgcucccag

SEQ ID NO: 2605650 - RNA, 13 nt, Human
uucagggggccag

SEQ ID NO: 2605651 - RNA, 21 nt, Human
uucagggggguugugaggccu

SEQ ID NO: 2605652 - RNA, 23 nt, Human
uucaggggcugcccgcucccagu

SEQ ID NO: 2605653 - RNA, 22 nt, Human
uucagggggccaggugcacaga

SEQ ID NO: 2605654 - RNA, 22 nt, Human
uucagggggguugugaggccug

SEQ ID NO: 2605655 - RNA, 13 nt, Human
uucagggucauag

SEQ ID NO: 2605656 - RNA, 17 nt, Human
uucauagacccucucaa

SEQ ID NO: 2605657 - RNA, 13 nt, Human
uucauagcccagu

SEQ ID NO: 2605658 - RNA, 19 nt, Human
uucauagcuaagaaauaaa

SEQ ID NO: 2605659 - RNA, 14 nt, Human
uucauagauuuccu

SEQ ID NO: 2605660 - RNA, 16 nt, Human
uucauauuuacuucuu

SEQ ID NO: 2605661 - RNA, 21 nt, Human
uucauauuuacuucuuauaca

SEQ ID NO: 2605662 - RNA, 16 nt, Human
uucauaccuacaugua

SEQ ID NO: 2605663 - RNA, 19 nt, Human
uucauaccuacauguauuu

SEQ ID NO: 2605664 - RNA, 17 nt, Human
uucauacucuagauuuu

SEQ ID NO: 2605665 - RNA, 14 nt, Human
uucauacucuagau

SEQ ID NO: 2605666 - RNA, 17 nt, Human
uucaguauguugucaaa

SEQ ID NO: 2605667 - RNA, 16 nt, Human
uucauagacccucuca

SEQ ID NO: 2605668 - RNA, 17 nt, Human
uucaguauuuuggagaa

SEQ ID NO: 2605669 - RNA, 19 nt, Human
uucaguauguugucaaaga

SEQ ID NO: 2605670 - RNA, 20 nt, Human
uucaguauaauuuaacuuca

SEQ ID NO: 2605671 - RNA, 23 nt, Human
uucaguauaauuuaacuucagag

SEQ ID NO: 2605672 - RNA, 23 nt, Human
uucaguaccuggaggaggagcag

SEQ ID NO: 2605673 - RNA, 16 nt, Human
uucaguaccuggagga

SEQ ID NO: 2605674 - RNA, 15 nt, Human
uucaguaccuggagg

SEQ ID NO: 2605675 - RNA, 17 nt, Human
uucaguaccuggaggag

SEQ ID NO: 2605676 - RNA, 16 nt, Human
uucaguauaauuuaac

SEQ ID NO: 2605677 - RNA, 22 nt, Human
auauauuaaaaauauaaaacug

SEQ ID NO: 2605678 - RNA, 18 nt, Human
auauauuaaaaauauaaa

SEQ ID NO: 2605679 - RNA, 17 nt, Human
auauauuaaaaauauaa

SEQ ID NO: 2605680 - RNA, 16 nt, Human
auauauuaaaaauaua

SEQ ID NO: 2605681 - RNA, 17 nt, Human
auauauguuuuugaagg

SEQ ID NO: 2605682 - RNA, 18 nt, Human
auauauguuuuugaaggc

SEQ ID NO: 2605683 - RNA, 18 nt, Human
uucauccaauccucacug

SEQ ID NO: 2605684 - RNA, 20 nt, Human
uucauccaauccucacuggg

SEQ ID NO: 2605685 - RNA, 21 nt, Human
uucauccaauccucacugggu

SEQ ID NO: 2605686 - RNA, 22 nt, Human
uucauccaauccucacugggug

SEQ ID NO: 2605687 - RNA, 16 nt, Human
uucauccaauccucac

SEQ ID NO: 2605688 - RNA, 21 nt, Human
uucaucauccuaagcuauuca

SEQ ID NO: 2605689 - RNA, 18 nt, Human
uucaucauccuaagcuau

SEQ ID NO: 2605690 - RNA, 22 nt, Human
auaucuaaauugaauaauggua

SEQ ID NO: 2605691 - RNA, 14 nt, Human
auaucuaaauuuag

SEQ ID NO: 2605692 - RNA, 18 nt, Human
auaucuaaauugaauaau

SEQ ID NO: 2605693 - RNA, 17 nt, Human
auaucuaaauugaauaa

SEQ ID NO: 2605694 - RNA, 20 nt, Human
auaucuaauuauuuugcagu

SEQ ID NO: 2605695 - RNA, 18 nt, Human
auauauucagccuggcuu

SEQ ID NO: 2605696 - RNA, 14 nt, Human
auaucuaaauugaa

SEQ ID NO: 2605697 - RNA, 13 nt, Human
auaucuaaauuga

SEQ ID NO: 2605698 - RNA, 17 nt, Human
auaucgacuuguuuuug

SEQ ID NO: 2605699 - RNA, 14 nt, Human
auauccuuugccuc

SEQ ID NO: 2605700 - RNA, 15 nt, Human
auaucugaaauguga

SEQ ID NO: 2605701 - RNA, 20 nt, Human
auaucugccuuuauuguguu

SEQ ID NO: 2605702 - RNA, 18 nt, Human
auaucugccuuuauugug

SEQ ID NO: 2605703 - RNA, 16 nt, Human
auaucugccuuuauug

SEQ ID NO: 2605704 - RNA, 14 nt, Human
auaucugccuuuau

SEQ ID NO: 2605705 - RNA, 22 nt, Human
auaucugaaaauguauguguaa

SEQ ID NO: 2605706 - RNA, 20 nt, Human
auaucuaucuuauauaguuu

SEQ ID NO: 2605707 - RNA, 21 nt, Human
auaucuaucuuauauaguuua

SEQ ID NO: 2605708 - RNA, 13 nt, Human
auaucuaucuuau

SEQ ID NO: 2605709 - RNA, 14 nt, Human
auaucuaucuuaua

SEQ ID NO: 2605710 - RNA, 24 nt, Human
auaucuguauuuaauuuugacacu

SEQ ID NO: 2605711 - RNA, 18 nt, Human
auaucuguauuuaauuuu

SEQ ID NO: 2605712 - RNA, 15 nt, Human
auaucuguauauaaa

SEQ ID NO: 2605713 - RNA, 20 nt, Human
auaucuguauuuaauuuuga

SEQ ID NO: 2605714 - RNA, 15 nt, Human
auaucuggacaagcc

SEQ ID NO: 2605715 - RNA, 16 nt, Human
auaucugcuucagugg

SEQ ID NO: 2605716 - RNA, 13 nt, Human
auaucugcuucag

SEQ ID NO: 2605717 - RNA, 21 nt, Human
auaucugggauucuacuuuaa

SEQ ID NO: 2605718 - RNA, 17 nt, Human
auaucugggauucuacu

SEQ ID NO: 2605719 - RNA, 11 nt, Human
auaucugcugu

SEQ ID NO: 2605720 - RNA, 23 nt, Human
auaucugccuuuauuguguuugu

SEQ ID NO: 2605721 - RNA, 18 nt, Human
auaucugcuguccagaca

SEQ ID NO: 2605722 - RNA, 13 nt, Human
auaucugcugucc

SEQ ID NO: 2605723 - RNA, 12 nt, Human
auaucugcuguc

SEQ ID NO: 2605724 - RNA, 20 nt, Human
auaugauuuaaaucagccgu

SEQ ID NO: 2605725 - RNA, 15 nt, Human
auaucuugaaaugaa

SEQ ID NO: 2605726 - RNA, 19 nt, Human
auaucuucugauuuguccc

SEQ ID NO: 2605727 - RNA, 16 nt, Human
auaugcaaagcacuga

SEQ ID NO: 2605728 - RNA, 15 nt, Human
auaugauucugcuuu

SEQ ID NO: 2605729 - RNA, 13 nt, Human
auaugauuuaaaa

SEQ ID NO: 2605730 - RNA, 23 nt, Human
auaugcaaagcacugacuucuaa

SEQ ID NO: 2605731 - RNA, 16 nt, Human
auaugauuuaaaacau

SEQ ID NO: 2605732 - RNA, 15 nt, Human
auaugauuuaaaaca

SEQ ID NO: 2605733 - RNA, 20 nt, Human
auaugauuuaaaacauguaa

SEQ ID NO: 2605734 - RNA, 15 nt, Human
auaugcacaauagca

SEQ ID NO: 2605735 - RNA, 19 nt, Human
auaugcacacagugcuuuc

SEQ ID NO: 2605736 - RNA, 16 nt, Human
auauguauuaauauuc

SEQ ID NO: 2605737 - RNA, 16 nt, Human
auauguauguguguau

SEQ ID NO: 2605738 - RNA, 15 nt, Human
auauguaugugugua

SEQ ID NO: 2605739 - RNA, 16 nt, Human
auaugcaaugugaagc

SEQ ID NO: 2605740 - RNA, 21 nt, Human
auauguauuguaaacaugugu

SEQ ID NO: 2605741 - RNA, 14 nt, Human
auauguauuguaaa

SEQ ID NO: 2605742 - RNA, 14 nt, Human
auaugucaagccau

SEQ ID NO: 2605743 - RNA, 16 nt, Human
auaugugaacauuuau

SEQ ID NO: 2605744 - RNA, 21 nt, Human
uucauggacacuuugaaaugu

SEQ ID NO: 2605745 - RNA, 11 nt, Human
auauguccugg

SEQ ID NO: 2605746 - RNA, 14 nt, Human
auaugucagggcgu

SEQ ID NO: 2605747 - RNA, 19 nt, Human
uucauguaaacugugcacc

SEQ ID NO: 2605748 - RNA, 18 nt, Human
uucauguaauccucaaga

SEQ ID NO: 2605749 - RNA, 21 nt, Human
uucauguacaagaugaaggag

SEQ ID NO: 2605750 - RNA, 22 nt, Human
uucaugucaacuucuggcuccu

SEQ ID NO: 2605751 - RNA, 17 nt, Human
uucauguacaagaugaa

SEQ ID NO: 2605752 - RNA, 19 nt, Human
uucauguaaacaaaauuua

SEQ ID NO: 2605753 - RNA, 19 nt, Human
uucauggugaaaauguacu

SEQ ID NO: 2605754 - RNA, 14 nt, Human
uucauguaaacugu

SEQ ID NO: 2605755 - RNA, 17 nt, Human
uucauguaaacugugca

SEQ ID NO: 2605756 - RNA, 18 nt, Human
uucauguaaacugugcac

SEQ ID NO: 2605757 - RNA, 17 nt, Human
uucauggcagaaggcaa

SEQ ID NO: 2605758 - RNA, 13 nt, Human
auaugugaacauu

SEQ ID NO: 2605759 - RNA, 21 nt, Human
uucauggggugaugcugggcu

SEQ ID NO: 2605760 - RNA, 22 nt, Human
uuguaaguuucaggugacaugu

SEQ ID NO: 2605761 - RNA, 19 nt, Human
uuguaaguuucaggugaca

SEQ ID NO: 2605762 - RNA, 18 nt, Human
uuguaaguuucaggugac

SEQ ID NO: 2605763 - RNA, 17 nt, Human
uuguaaguuucagguga

SEQ ID NO: 2605764 - RNA, 16 nt, Human
uuguaaguuucaggug

SEQ ID NO: 2605765 - RNA, 17 nt, Human
uuguaagaugcuggguu

SEQ ID NO: 2605766 - RNA, 13 nt, Human
uuguaaguuucag

SEQ ID NO: 2605767 - RNA, 22 nt, Human
uuguaagaguguagaagcauuc

SEQ ID NO: 2605768 - RNA, 21 nt, Human
uuguaagaguguagaagcauu

SEQ ID NO: 2605769 - RNA, 19 nt, Human
uuguaagaguguagaagca

SEQ ID NO: 2605770 - RNA, 17 nt, Human
uuguaagaguguagaag

SEQ ID NO: 2605771 - RNA, 15 nt, Human
uuguaagaugcuggg

SEQ ID NO: 2605772 - RNA, 13 nt, Human
uuguaagaugcug

SEQ ID NO: 2605773 - RNA, 18 nt, Human
uuguaauugcuuacauuu

SEQ ID NO: 2605774 - RNA, 17 nt, Human
uuguaauugcuuacauu

SEQ ID NO: 2605775 - RNA, 19 nt, Human
uuguaauugcuuacauuuu

SEQ ID NO: 2605776 - RNA, 23 nt, Human
uuguaauucuaaaugaauguuua

SEQ ID NO: 2605777 - RNA, 22 nt, Human
uuguaauuuaaacaggcccagc

SEQ ID NO: 2605778 - RNA, 21 nt, Human
uuguaauuuaaacaggcccag

SEQ ID NO: 2605779 - RNA, 23 nt, Human
uuguaauuuaaacaggcccagca

SEQ ID NO: 2605780 - RNA, 18 nt, Human
uuguaauuauugugauuu

SEQ ID NO: 2605781 - RNA, 14 nt, Human
uuguaauuauugug

SEQ ID NO: 2605782 - RNA, 17 nt, Human
uuguaauucuaaaugaa

SEQ ID NO: 2605783 - RNA, 14 nt, Human
uuguaauucuaaau

SEQ ID NO: 2605784 - RNA, 12 nt, Human
uuguaauuauug

SEQ ID NO: 2605785 - RNA, 14 nt, Human
uuguaaucacuguu

SEQ ID NO: 2605786 - RNA, 15 nt, Human
uuguaaucguuaugu

SEQ ID NO: 2605787 - RNA, 20 nt, Human
uuguaaucguuaugugugua

SEQ ID NO: 2605788 - RNA, 20 nt, Human
uuguaaccucagcucuggga

SEQ ID NO: 2605789 - RNA, 19 nt, Human
uuguaaccucagcucuggg

SEQ ID NO: 2605790 - RNA, 18 nt, Human
uuguaaccucagcucugg

SEQ ID NO: 2605791 - RNA, 16 nt, Human
uuguaaccucagcucu

SEQ ID NO: 2605792 - RNA, 16 nt, Human
uuguaacguugcugug

SEQ ID NO: 2605793 - RNA, 15 nt, Human
uuguaacguugcugu

SEQ ID NO: 2605794 - RNA, 17 nt, Human
uuguaacagacauuguu

SEQ ID NO: 2605795 - RNA, 16 nt, Human
uuguaacagacauugu

SEQ ID NO: 2605796 - RNA, 16 nt, Human
uuguaacccagauuuu

SEQ ID NO: 2605797 - RNA, 15 nt, Human
uuguaaccucagcuc

SEQ ID NO: 2605798 - RNA, 14 nt, Human
uuguaaccucagcu

SEQ ID NO: 2605799 - RNA, 22 nt, Human
uuguaacccagauuuugcugua

SEQ ID NO: 2605800 - RNA, 18 nt, Human
uuguaagacaaagguuuu

SEQ ID NO: 2605801 - RNA, 21 nt, Human
uuguaagacaaagguuuuccu

SEQ ID NO: 2605802 - RNA, 17 nt, Human
uuguaagaaauacugua

SEQ ID NO: 2605803 - RNA, 19 nt, Human
uuguaagacaauccaugua

SEQ ID NO: 2605804 - RNA, 16 nt, Human
uuguaagacaauccau

SEQ ID NO: 2605805 - RNA, 22 nt, Human
uuguaagacaaagguuuuccuc

SEQ ID NO: 2605806 - RNA, 20 nt, Human
uuguaagaguggaaccaaca

SEQ ID NO: 2605807 - RNA, 15 nt, Human
uuguaagaguguaga

SEQ ID NO: 2605808 - RNA, 15 nt, Human
uugguuuugacugga

SEQ ID NO: 2605809 - RNA, 19 nt, Human
uuguaaauuuaugugaugg

SEQ ID NO: 2605810 - RNA, 15 nt, Human
uuguaacagacauug

SEQ ID NO: 2605811 - RNA, 14 nt, Human
uuguaacagacauu

SEQ ID NO: 2605812 - RNA, 13 nt, Human
uuguaaauuguca

SEQ ID NO: 2605813 - RNA, 13 nt, Human
uugguuuugacug

SEQ ID NO: 2605814 - RNA, 18 nt, Human
augaaugucagugugacu

SEQ ID NO: 2605815 - RNA, 16 nt, Human
augaaugucaguguga

SEQ ID NO: 2605816 - RNA, 18 nt, Human
uugggguggguauaaaag

SEQ ID NO: 2605817 - RNA, 16 nt, Human
uugggguuguguuguc

SEQ ID NO: 2605818 - RNA, 15 nt, Human
uugggguuguguugu

SEQ ID NO: 2605819 - RNA, 20 nt, Human
uugggguggguauaaaagau

SEQ ID NO: 2605820 - RNA, 18 nt, Human
uuggguaccuauuuucau

SEQ ID NO: 2605821 - RNA, 14 nt, Human
uuggguaggcggga

SEQ ID NO: 2605822 - RNA, 19 nt, Human
uugggucaccccuccagga

SEQ ID NO: 2605823 - RNA, 18 nt, Human
uuggugguuucagaaaug

SEQ ID NO: 2605824 - RNA, 19 nt, Human
uuggugguuucagaaaugu

SEQ ID NO: 2605825 - RNA, 14 nt, Human
uuggguccuggguc

SEQ ID NO: 2605826 - RNA, 16 nt, Human
uugggguuuuuuaaua

SEQ ID NO: 2605827 - RNA, 19 nt, Human
uuggguggagaagccauug

SEQ ID NO: 2605828 - RNA, 18 nt, Human
uuggguggagaagccauu

SEQ ID NO: 2605829 - RNA, 17 nt, Human
uuggguggagaagccau

SEQ ID NO: 2605830 - RNA, 16 nt, Human
uuggguggagaagcca

SEQ ID NO: 2605831 - RNA, 15 nt, Human
uuggguggagaagcc

SEQ ID NO: 2605832 - RNA, 14 nt, Human
uuggguggagaagc

SEQ ID NO: 2605833 - RNA, 19 nt, Human
uuggugucgggcaugacac

SEQ ID NO: 2605834 - RNA, 18 nt, Human
uuggugucgggcaugaca

SEQ ID NO: 2605835 - RNA, 17 nt, Human
uuggugucgggcaugac

SEQ ID NO: 2605836 - RNA, 20 nt, Human
uugguguaaagccaacaccc

SEQ ID NO: 2605837 - RNA, 12 nt, Human
uuggugguuuuu

SEQ ID NO: 2605838 - RNA, 14 nt, Human
uugguuuguaaauu

SEQ ID NO: 2605839 - RNA, 20 nt, Human
uugguuuggccaucucugga

SEQ ID NO: 2605840 - RNA, 18 nt, Human
uugguuugcagaugacaa

SEQ ID NO: 2605841 - RNA, 16 nt, Human
uugguguguggagaug

SEQ ID NO: 2605842 - RNA, 13 nt, Human
uugguguugacau

SEQ ID NO: 2605843 - RNA, 23 nt, Human
augaaauuuucuagacuuucugu

SEQ ID NO: 2605844 - RNA, 21 nt, Human
augaaauuuucuagacuuucu

SEQ ID NO: 2605845 - RNA, 19 nt, Human
augaaauuuucuagacuuu

SEQ ID NO: 2605846 - RNA, 22 nt, Human
augaaauuuucuagacuuucug

SEQ ID NO: 2605847 - RNA, 21 nt, Human
augaaauuuaauauagcuauu

SEQ ID NO: 2605848 - RNA, 20 nt, Human
augaaauuuuccaaugucug

SEQ ID NO: 2605849 - RNA, 20 nt, Human
augaaauacacaaguaaaca

SEQ ID NO: 2605850 - RNA, 19 nt, Human
augaaauacacaaguaaac

SEQ ID NO: 2605851 - RNA, 17 nt, Human
augaaauacuauuuaaa

SEQ ID NO: 2605852 - RNA, 22 nt, Human
augaaauacuguuugagguuuu

SEQ ID NO: 2605853 - RNA, 15 nt, Human
augaaauaugcaucu

SEQ ID NO: 2605854 - RNA, 13 nt, Human
augaaauaugcau

SEQ ID NO: 2605855 - RNA, 13 nt, Human
augaaauaucaga

SEQ ID NO: 2605856 - RNA, 15 nt, Human
augaaauaucuguau

SEQ ID NO: 2605857 - RNA, 19 nt, Human
augaaauaucagacuagug

SEQ ID NO: 2605858 - RNA, 18 nt, Human
augaacaaauugaacucu

SEQ ID NO: 2605859 - RNA, 15 nt, Human
augaacaaauugaac

SEQ ID NO: 2605860 - RNA, 13 nt, Human
augaacacacugu

SEQ ID NO: 2605861 - RNA, 22 nt, Human
augaacacacuguguccuggug

SEQ ID NO: 2605862 - RNA, 15 nt, Human
augaacacacugugu

SEQ ID NO: 2605863 - RNA, 22 nt, Human
augaaccacaucuugcucugcu

SEQ ID NO: 2605864 - RNA, 23 nt, Human
augaaccacaucuugcucugcug

SEQ ID NO: 2605865 - RNA, 16 nt, Human
uuggcccaagcucuug

SEQ ID NO: 2605866 - RNA, 16 nt, Human
uuggccaucucuggau

SEQ ID NO: 2605867 - RNA, 14 nt, Human
uuggagcugagccu

SEQ ID NO: 2605868 - RNA, 14 nt, Human
uuggagccugcagg

SEQ ID NO: 2605869 - RNA, 18 nt, Human
uuggagccugcagagcug

SEQ ID NO: 2605870 - RNA, 14 nt, Human
uuggagcuucaugg

SEQ ID NO: 2605871 - RNA, 21 nt, Human
uuggagcuuuuuucuuuaaga

SEQ ID NO: 2605872 - RNA, 15 nt, Human
uuggaggccagccag

SEQ ID NO: 2605873 - RNA, 16 nt, Human
uuggaggccuuuagau

SEQ ID NO: 2605874 - RNA, 22 nt, Human
augaaauaacuccuucuuguag

SEQ ID NO: 2605875 - RNA, 20 nt, Human
augaaauaacuccuucuugu

SEQ ID NO: 2605876 - RNA, 14 nt, Human
augaaauaaagaaa

SEQ ID NO: 2605877 - RNA, 18 nt, Human
augaacuuguaaaggaau

SEQ ID NO: 2605878 - RNA, 17 nt, Human
augaacuuucucuucau

SEQ ID NO: 2605879 - RNA, 17 nt, Human
augaaccuggagggcua

SEQ ID NO: 2605880 - RNA, 15 nt, Human
augaagaaaaaauac

SEQ ID NO: 2605881 - RNA, 17 nt, Human
augaagaaaaaauacau

SEQ ID NO: 2605882 - RNA, 19 nt, Human
augaagaaaaaauacauuu

SEQ ID NO: 2605883 - RNA, 20 nt, Human
augaagaaaaaauacauuuu

SEQ ID NO: 2605884 - RNA, 22 nt, Human
augaagaaaaaauacauuuuau

SEQ ID NO: 2605885 - RNA, 19 nt, Human
augaagaaaagugggccag

SEQ ID NO: 2605886 - RNA, 22 nt, Human
augaacccaggacgcuucugaa

SEQ ID NO: 2605887 - RNA, 21 nt, Human
augaacccaggacgcuucuga

SEQ ID NO: 2605888 - RNA, 16 nt, Human
augaacacuuaauaaa

SEQ ID NO: 2605889 - RNA, 13 nt, Human
augaaccuggagg

SEQ ID NO: 2605890 - RNA, 17 nt, Human
augaaccgcugaauaug

SEQ ID NO: 2605891 - RNA, 23 nt, Human
augaaccucaagcugcaucuaga

SEQ ID NO: 2605892 - RNA, 14 nt, Human
augaaccuucuggc

SEQ ID NO: 2605893 - RNA, 14 nt, Human
augaagaacugagg

SEQ ID NO: 2605894 - RNA, 14 nt, Human
augaagaaagugga

SEQ ID NO: 2605895 - RNA, 19 nt, Human
augaagaaaaucacuuagg

SEQ ID NO: 2605896 - RNA, 21 nt, Human
augaagaaaagugggccagug

SEQ ID NO: 2605897 - RNA, 22 nt, Human
augaagaaaagugggccagugu

SEQ ID NO: 2605898 - RNA, 14 nt, Human
augaagcaaugcuu

SEQ ID NO: 2605899 - RNA, 21 nt, Human
augaagaugucuaauaguuau

SEQ ID NO: 2605900 - RNA, 22 nt, Human
augaagauguuucaaaaaaucu

SEQ ID NO: 2605901 - RNA, 19 nt, Human
augaagauucuccugugcu

SEQ ID NO: 2605902 - RNA, 14 nt, Human
augaagcaaacaca

SEQ ID NO: 2605903 - RNA, 18 nt, Human
augaaucuauuauacugu

SEQ ID NO: 2605904 - RNA, 23 nt, Human
augaaucuauuauacuguauuaa

SEQ ID NO: 2605905 - RNA, 17 nt, Human
augaaugaaacauuuug

SEQ ID NO: 2605906 - RNA, 15 nt, Human
augaauguauuuauu

SEQ ID NO: 2605907 - RNA, 17 nt, Human
augaauguauuuauuug

SEQ ID NO: 2605908 - RNA, 19 nt, Human
augaauguaugugcacugu

SEQ ID NO: 2605909 - RNA, 20 nt, Human
augaauguauuuauuuggga

SEQ ID NO: 2605910 - RNA, 14 nt, Human
augaaugaaugaau

SEQ ID NO: 2605911 - RNA, 16 nt, Human
augaaucuuuuccacu

SEQ ID NO: 2605912 - RNA, 15 nt, Human
augaauguaucagga

SEQ ID NO: 2605913 - RNA, 18 nt, Human
augaauguaugugcacug

SEQ ID NO: 2605914 - RNA, 17 nt, Human
augaauguaugugcacu

SEQ ID NO: 2605915 - RNA, 16 nt, Human
augaauguaugugcac

SEQ ID NO: 2605916 - RNA, 16 nt, Human
augaauguaucaggaa

SEQ ID NO: 2605917 - RNA, 16 nt, Human
augaaucuauuauacu

SEQ ID NO: 2605918 - RNA, 21 nt, Human
augaaucuaugccaaagauca

SEQ ID NO: 2605919 - RNA, 14 nt, Human
augaaucuaugcca

SEQ ID NO: 2605920 - RNA, 11 nt, Human
augaaucuaug

SEQ ID NO: 2605921 - RNA, 16 nt, Human
augaaucuaagcagca

SEQ ID NO: 2605922 - RNA, 14 nt, Human
augaaucuaagcag

SEQ ID NO: 2605923 - RNA, 20 nt, Human
augaaucgcuucucuuuuga

SEQ ID NO: 2605924 - RNA, 17 nt, Human
augaaucgcuucucuuu

SEQ ID NO: 2605925 - RNA, 22 nt, Human
augaagcagcuuuaaacaaauu

SEQ ID NO: 2605926 - RNA, 18 nt, Human
augaaucccacccacaug

SEQ ID NO: 2605927 - RNA, 15 nt, Human
augaaucgcuucucu

SEQ ID NO: 2605928 - RNA, 21 nt, Human
augaaucccacccacauguga

SEQ ID NO: 2605929 - RNA, 15 nt, Human
augaagcaaugcuuc

SEQ ID NO: 2605930 - RNA, 15 nt, Human
augaagcagcuuuaa

SEQ ID NO: 2605931 - RNA, 13 nt, Human
augaagcagcuuu

SEQ ID NO: 2605932 - RNA, 22 nt, Human
augaagauucuccugugcuaga

SEQ ID NO: 2605933 - RNA, 15 nt, Human
augaagcaaacacau

SEQ ID NO: 2605934 - RNA, 15 nt, Human
uugcuuugugauuuu

SEQ ID NO: 2605935 - RNA, 13 nt, Human
uugcuuugcccug

SEQ ID NO: 2605936 - RNA, 14 nt, Human
uugcuuugcccagc

SEQ ID NO: 2605937 - RNA, 13 nt, Human
uugcuuuguaugc

SEQ ID NO: 2605938 - RNA, 20 nt, Human
uugcuuucugcucagcuucu

SEQ ID NO: 2605939 - RNA, 14 nt, Human
uugcuuucugaaau

SEQ ID NO: 2605940 - RNA, 15 nt, Human
uugcuuucugaaauu

SEQ ID NO: 2605941 - RNA, 16 nt, Human
uugcuuuauaaauaaa

SEQ ID NO: 2605942 - RNA, 20 nt, Human
uugcuuuaugccuucuuauu

SEQ ID NO: 2605943 - RNA, 13 nt, Human
uugcuuucugaaa

SEQ ID NO: 2605944 - RNA, 22 nt, Human
uugcuuugaagcaguuguguca

SEQ ID NO: 2605945 - RNA, 16 nt, Human
uugcuuugaagcaguu

SEQ ID NO: 2605946 - RNA, 11 nt, Human
uugcuuugagc

SEQ ID NO: 2605947 - RNA, 15 nt, Human
uugcuuugaagcagu

SEQ ID NO: 2605948 - RNA, 15 nt, Human
uugcuuucugcucag

SEQ ID NO: 2605949 - RNA, 14 nt, Human
uugcuuugaagcag

SEQ ID NO: 2605950 - RNA, 15 nt, Human
uugcuuuauuccaga

SEQ ID NO: 2605951 - RNA, 17 nt, Human
uugcuucauaaaugaag

SEQ ID NO: 2605952 - RNA, 15 nt, Human
uugcuucauaaauga

SEQ ID NO: 2605953 - RNA, 20 nt, Human
uugcuucauaaaugaagcag

SEQ ID NO: 2605954 - RNA, 13 nt, Human
uugcuuaugacau

SEQ ID NO: 2605955 - RNA, 15 nt, Human
uugcuuauuguucca

SEQ ID NO: 2605956 - RNA, 16 nt, Human
uugcuuauuguuccaa

SEQ ID NO: 2605957 - RNA, 18 nt, Human
uugcuuauuguuccaaga

SEQ ID NO: 2605958 - RNA, 20 nt, Human
uugcuuauuguuccaagaca

SEQ ID NO: 2605959 - RNA, 14 nt, Human
uugcuucauaaaug

SEQ ID NO: 2605960 - RNA, 12 nt, Human
uugcuucacuca

SEQ ID NO: 2605961 - RNA, 22 nt, Human
uugcuuauuguuccaagacauu

SEQ ID NO: 2605962 - RNA, 23 nt, Human
uugcuuauuguuccaagacauug

SEQ ID NO: 2605963 - RNA, 17 nt, Human
uugcucuugaugccugg

SEQ ID NO: 2605964 - RNA, 14 nt, Human
uugcucuugaugcc

SEQ ID NO: 2605965 - RNA, 18 nt, Human
uugcucuugaugccuggc

SEQ ID NO: 2605966 - RNA, 17 nt, Human
uugcugaaaaugguauu

SEQ ID NO: 2605967 - RNA, 16 nt, Human
uugcucuuucuacucu

SEQ ID NO: 2605968 - RNA, 22 nt, Human
uugcuuagucacuuauuucaua

SEQ ID NO: 2605969 - RNA, 12 nt, Human
aucuuuaaaaua

SEQ ID NO: 2605970 - RNA, 15 nt, Human
aucuuuaaaauacac

SEQ ID NO: 2605971 - RNA, 15 nt, Human
aucuuguuuuuccac

SEQ ID NO: 2605972 - RNA, 23 nt, Human
aucuuguuuuuccacuacugcua

SEQ ID NO: 2605973 - RNA, 23 nt, Human
uugcucuguaaucucguuucaaa

SEQ ID NO: 2605974 - RNA, 14 nt, Human
uugcucugggugga

SEQ ID NO: 2605975 - RNA, 19 nt, Human
uugcucuuaaguuguggag

SEQ ID NO: 2605976 - RNA, 14 nt, Human
uugcucuggcugag

SEQ ID NO: 2605977 - RNA, 18 nt, Human
uuggagacacaacuauuu

SEQ ID NO: 2605978 - RNA, 18 nt, Human
uuggagaauuuagguuuu

SEQ ID NO: 2605979 - RNA, 21 nt, Human
uuggagaguuuccugaaacaa

SEQ ID NO: 2605980 - RNA, 14 nt, Human
uuggagaaauuauu

SEQ ID NO: 2605981 - RNA, 20 nt, Human
uuggagaagcccgugugaga

SEQ ID NO: 2605982 - RNA, 18 nt, Human
uuggagaagguuaucaaa

SEQ ID NO: 2605983 - RNA, 15 nt, Human
uuggagaaauuauuu

SEQ ID NO: 2605984 - RNA, 13 nt, Human
uuggagaauuuag

SEQ ID NO: 2605985 - RNA, 14 nt, Human
uuggagaucaagga

SEQ ID NO: 2605986 - RNA, 20 nt, Human
uuggagauaaucuagaacac

SEQ ID NO: 2605987 - RNA, 11 nt, Human
uuggagccugc

SEQ ID NO: 2605988 - RNA, 15 nt, Human
uuggagccugcagag

SEQ ID NO: 2605989 - RNA, 13 nt, Human
uuggagccugcag

SEQ ID NO: 2605990 - RNA, 18 nt, Human
uuggagaguuuccugaaa

SEQ ID NO: 2605991 - RNA, 22 nt, Human
uuggagaagaacugaaaucaua

SEQ ID NO: 2605992 - RNA, 17 nt, Human
uuggagaagaacugaaa

SEQ ID NO: 2605993 - RNA, 15 nt, Human
uuggagaagaacuga

SEQ ID NO: 2605994 - RNA, 15 nt, Human
uuggaaaaugcauug

SEQ ID NO: 2605995 - RNA, 19 nt, Human
uuggaaaagaauacagaaa

SEQ ID NO: 2605996 - RNA, 22 nt, Human
uuggaaaagaauacagaaagau

SEQ ID NO: 2605997 - RNA, 13 nt, Human
uuggacuugagga

SEQ ID NO: 2605998 - RNA, 15 nt, Human
uuggacuggaugcau

SEQ ID NO: 2605999 - RNA, 15 nt, Human
uuggacugacauuua

SEQ ID NO: 2606000 - RNA, 16 nt, Human
uuggacucuugcucuu

SEQ ID NO: 2606001 - RNA, 15 nt, Human
uuggacucuugcucu

SEQ ID NO: 2606002 - RNA, 17 nt, Human
uuggacucuugcucuuu

SEQ ID NO: 2606003 - RNA, 14 nt, Human
uuggacugacauuu

SEQ ID NO: 2606004 - RNA, 15 nt, Human
uuggaaaauaaauca

SEQ ID NO: 2606005 - RNA, 12 nt, Human
uuggaaaauaaa

SEQ ID NO: 2606006 - RNA, 17 nt, Human
uuggaaaauaaauuauu

SEQ ID NO: 2606007 - RNA, 17 nt, Human
uuggaaaaagugaugga

SEQ ID NO: 2606008 - RNA, 13 nt, Human
uuggaaaaaguga

SEQ ID NO: 2606009 - RNA, 14 nt, Human
uuggaaaagaauac

SEQ ID NO: 2606010 - RNA, 21 nt, Human
uuggaaaaauccagaaagaaa

SEQ ID NO: 2606011 - RNA, 20 nt, Human
uugcuuugugauuuuuguaa

SEQ ID NO: 2606012 - RNA, 16 nt, Human
uugcuuuguaugcacu

SEQ ID NO: 2606013 - RNA, 21 nt, Human
aucugugaggggcucucucau

SEQ ID NO: 2606014 - RNA, 22 nt, Human
aucugugaggggcucucucaug

SEQ ID NO: 2606015 - RNA, 22 nt, Human
aucugucauuugagcagggcuc

SEQ ID NO: 2606016 - RNA, 17 nt, Human
aucugucauuugagcag

SEQ ID NO: 2606017 - RNA, 12 nt, Human
aucugucauuug

SEQ ID NO: 2606018 - RNA, 23 nt, Human
uugccccggccccggccccagcc

SEQ ID NO: 2606019 - RNA, 22 nt, Human
uugccccggccccggccccagc

SEQ ID NO: 2606020 - RNA, 17 nt, Human
uugcccggauucuggga

SEQ ID NO: 2606021 - RNA, 13 nt, Human
uugccccugagac

SEQ ID NO: 2606022 - RNA, 12 nt, Human
uugccccccacc

SEQ ID NO: 2606023 - RNA, 13 nt, Human
uugccccccaccc

SEQ ID NO: 2606024 - RNA, 16 nt, Human
uugccccccaccccag

SEQ ID NO: 2606025 - RNA, 19 nt, Human
uugccccccaccccagccu

SEQ ID NO: 2606026 - RNA, 17 nt, Human
aucugucacaccagcca

SEQ ID NO: 2606027 - RNA, 23 nt, Human
aucugucaagugggaucugucac

SEQ ID NO: 2606028 - RNA, 15 nt, Human
uugcccugaccuccc

SEQ ID NO: 2606029 - RNA, 13 nt, Human
uugcccugaccuc

SEQ ID NO: 2606030 - RNA, 12 nt, Human
uugcccugaccu

SEQ ID NO: 2606031 - RNA, 15 nt, Human
uugcccucccauccc

SEQ ID NO: 2606032 - RNA, 12 nt, Human
uugcccucccau

SEQ ID NO: 2606033 - RNA, 19 nt, Human
uugcccggauucugggagg

SEQ ID NO: 2606034 - RNA, 13 nt, Human
aucugugucuugu

SEQ ID NO: 2606035 - RNA, 20 nt, Human
aucuguuuuuaaaaaucaua

SEQ ID NO: 2606036 - RNA, 12 nt, Human
aucugugucuug

SEQ ID NO: 2606037 - RNA, 18 nt, Human
aucuguguacaaagaaau

SEQ ID NO: 2606038 - RNA, 22 nt, Human
aucuguguacaaagaaauaaca

SEQ ID NO: 2606039 - RNA, 17 nt, Human
aucuguguacaaagaaa

SEQ ID NO: 2606040 - RNA, 16 nt, Human
aucuguguacaaagaa

SEQ ID NO: 2606041 - RNA, 15 nt, Human
aucuguguacaaaga

SEQ ID NO: 2606042 - RNA, 22 nt, Human
aucugugggcauggucaaaggc

SEQ ID NO: 2606043 - RNA, 17 nt, Human
aucugugcuuuccagcu

SEQ ID NO: 2606044 - RNA, 16 nt, Human
aucugugcuuuccagc

SEQ ID NO: 2606045 - RNA, 15 nt, Human
aucugugcuuuccag

SEQ ID NO: 2606046 - RNA, 19 nt, Human
aucugugcuuuccagcuca

SEQ ID NO: 2606047 - RNA, 18 nt, Human
aucugugcuuuccagcuc

SEQ ID NO: 2606048 - RNA, 19 nt, Human
aucugugggcauggucaaa

SEQ ID NO: 2606049 - RNA, 21 nt, Human
aucugugcccagagaugggac

SEQ ID NO: 2606050 - RNA, 16 nt, Human
aucugugcgugaaaca

SEQ ID NO: 2606051 - RNA, 17 nt, Human
aucugugcgugaaacac

SEQ ID NO: 2606052 - RNA, 19 nt, Human
aucugugcucaggacucag

SEQ ID NO: 2606053 - RNA, 18 nt, Human
aucugugcgugaaacaca

SEQ ID NO: 2606054 - RNA, 19 nt, Human
aucugugcgugaaacacac

SEQ ID NO: 2606055 - RNA, 12 nt, Human
aucugugcccca

SEQ ID NO: 2606056 - RNA, 13 nt, Human
aucugugccccau

SEQ ID NO: 2606057 - RNA, 15 nt, Human
aucugugccccaugc

SEQ ID NO: 2606058 - RNA, 23 nt, Human
aucugugccccaugccuguccag

SEQ ID NO: 2606059 - RNA, 17 nt, Human
aucugugauaauuuucu

SEQ ID NO: 2606060 - RNA, 18 nt, Human
aucugucacaccagccau

SEQ ID NO: 2606061 - RNA, 16 nt, Human
aucugugcacugccca

SEQ ID NO: 2606062 - RNA, 14 nt, Human
aucugugcccagag

SEQ ID NO: 2606063 - RNA, 17 nt, Human
aucugugcccagagaug

SEQ ID NO: 2606064 - RNA, 22 nt, Human
aucugugcaaauccuugauacu

SEQ ID NO: 2606065 - RNA, 12 nt, Human
aucugugaugau

SEQ ID NO: 2606066 - RNA, 15 nt, Human
aucuuauaauuuaaa

SEQ ID NO: 2606067 - RNA, 16 nt, Human
aucuuaaggggcagcu

SEQ ID NO: 2606068 - RNA, 19 nt, Human
aucuuaaaguguguuucua

SEQ ID NO: 2606069 - RNA, 16 nt, Human
aucuuauaauuuaaaa

SEQ ID NO: 2606070 - RNA, 16 nt, Human
aucuuaauuauuguac

SEQ ID NO: 2606071 - RNA, 14 nt, Human
aucuugcucugcug

SEQ ID NO: 2606072 - RNA, 12 nt, Human
aucuuaauuuug

SEQ ID NO: 2606073 - RNA, 14 nt, Human
aucuuggacugaca

SEQ ID NO: 2606074 - RNA, 16 nt, Human
aucuuggacugacauu

SEQ ID NO: 2606075 - RNA, 19 nt, Human
aucuuggacugacauuuag

SEQ ID NO: 2606076 - RNA, 21 nt, Human
aucuuggacugacauuuagcg

SEQ ID NO: 2606077 - RNA, 16 nt, Human
aucuugcucugcugac

SEQ ID NO: 2606078 - RNA, 15 nt, Human
aucuugcucugcuga

SEQ ID NO: 2606079 - RNA, 17 nt, Human
aucuuggggacaucucu

SEQ ID NO: 2606080 - RNA, 18 nt, Human
aucuugggacuggguuug

SEQ ID NO: 2606081 - RNA, 17 nt, Human
aucuugggacuggguuu

SEQ ID NO: 2606082 - RNA, 13 nt, Human
aucuugggacugg

SEQ ID NO: 2606083 - RNA, 15 nt, Human
aucuuggcucacugc

SEQ ID NO: 2606084 - RNA, 23 nt, Human
aucuuggcacauuuaagagacag

SEQ ID NO: 2606085 - RNA, 23 nt, Human
aucuuggggggguggccgcugag

SEQ ID NO: 2606086 - RNA, 20 nt, Human
aucuuggggggguggccgcu

SEQ ID NO: 2606087 - RNA, 23 nt, Human
aucuuggggacaucucuuugaau

SEQ ID NO: 2606088 - RNA, 22 nt, Human
aucuuggggacaucucuuugaa

SEQ ID NO: 2606089 - RNA, 16 nt, Human
aucuuggggggguggc

SEQ ID NO: 2606090 - RNA, 12 nt, Human
aucuugguaaau

SEQ ID NO: 2606091 - RNA, 23 nt, Human
aucuugggggacagggcuggccc

SEQ ID NO: 2606092 - RNA, 23 nt, Human
aucucacacaugagcaucaggcc

SEQ ID NO: 2606093 - RNA, 19 nt, Human
aucucaaauucucaaccua

SEQ ID NO: 2606094 - RNA, 23 nt, Human
aucuagaggcuuccuucauuucc

SEQ ID NO: 2606095 - RNA, 16 nt, Human
aucucaaauuucuaaa

SEQ ID NO: 2606096 - RNA, 17 nt, Human
aucucaaauuucuaaau

SEQ ID NO: 2606097 - RNA, 13 nt, Human
aucucaccccauc

SEQ ID NO: 2606098 - RNA, 14 nt, Human
aucucaccccaucc

SEQ ID NO: 2606099 - RNA, 16 nt, Human
aucucaccccauccca

SEQ ID NO: 2606100 - RNA, 22 nt, Human
aucucaccccaucccacacccu

SEQ ID NO: 2606101 - RNA, 23 nt, Human
aucucaccccaucccacacccug

SEQ ID NO: 2606102 - RNA, 14 nt, Human
aucugacccagugc

SEQ ID NO: 2606103 - RNA, 18 nt, Human
aucugacccagugccccc

SEQ ID NO: 2606104 - RNA, 15 nt, Human
aucugaaggagauuu

SEQ ID NO: 2606105 - RNA, 13 nt, Human
aucugacccagug

SEQ ID NO: 2606106 - RNA, 16 nt, Human
aucucuuguuuaaauu

SEQ ID NO: 2606107 - RNA, 15 nt, Human
aucucuugaggccag

SEQ ID NO: 2606108 - RNA, 22 nt, Human
aucucuuuguucuaaagaugga

SEQ ID NO: 2606109 - RNA, 22 nt, Human
aucucuuuugaauccaugcuug

SEQ ID NO: 2606110 - RNA, 21 nt, Human
aucugaagagcuauuauauaa

SEQ ID NO: 2606111 - RNA, 21 nt, Human
aucucuuugaauuuucugugu

SEQ ID NO: 2606112 - RNA, 15 nt, Human
aucucuuugaauuuu

SEQ ID NO: 2606113 - RNA, 19 nt, Human
aucucuuuuugcuuucgaa

SEQ ID NO: 2606114 - RNA, 15 nt, Human
uugauuaaauucuug

SEQ ID NO: 2606115 - RNA, 16 nt, Human
uugauuaaauucuugc

SEQ ID NO: 2606116 - RNA, 20 nt, Human
uugauuaaauucuugcaaag

SEQ ID NO: 2606117 - RNA, 21 nt, Human
uugauuaaauucuugcaaagu

SEQ ID NO: 2606118 - RNA, 17 nt, Human
uugcaacuuuguauaaa

SEQ ID NO: 2606119 - RNA, 16 nt, Human
uugcaacuuuguauaa

SEQ ID NO: 2606120 - RNA, 18 nt, Human
uugcaacuuuguauaaaa

SEQ ID NO: 2606121 - RNA, 14 nt, Human
uugcaagaaucagu

SEQ ID NO: 2606122 - RNA, 16 nt, Human
uugcaagucauggcug

SEQ ID NO: 2606123 - RNA, 23 nt, Human
uugauguucuuucacccuuuucu

SEQ ID NO: 2606124 - RNA, 16 nt, Human
uugauguuaacacauu

SEQ ID NO: 2606125 - RNA, 14 nt, Human
uugauguuaacaca

SEQ ID NO: 2606126 - RNA, 13 nt, Human
uugauguuggcug

SEQ ID NO: 2606127 - RNA, 16 nt, Human
uugauguuggcuggga

SEQ ID NO: 2606128 - RNA, 13 nt, Human
uugauguuugugg

SEQ ID NO: 2606129 - RNA, 15 nt, Human
uugauguuuguggcc

SEQ ID NO: 2606130 - RNA, 16 nt, Human
uugauguuuguggccu

SEQ ID NO: 2606131 - RNA, 17 nt, Human
uugauguuuguggccuc

SEQ ID NO: 2606132 - RNA, 18 nt, Human
uugauguuuguggccuca

SEQ ID NO: 2606133 - RNA, 19 nt, Human
uugauguuuguggccucag

SEQ ID NO: 2606134 - RNA, 18 nt, Human
aucugacucacaagaaga

SEQ ID NO: 2606135 - RNA, 13 nt, Human
aucugaaggagau

SEQ ID NO: 2606136 - RNA, 18 nt, Human
aucugagaaaagcuuuga

SEQ ID NO: 2606137 - RNA, 20 nt, Human
aucugacccagugcccccac

SEQ ID NO: 2606138 - RNA, 21 nt, Human
aucugacccagugcccccacu

SEQ ID NO: 2606139 - RNA, 16 nt, Human
aucugagaaucuuuau

SEQ ID NO: 2606140 - RNA, 14 nt, Human
aucugagaaucuuu

SEQ ID NO: 2606141 - RNA, 22 nt, Human
aucugagaaaagcuuugaaccc

SEQ ID NO: 2606142 - RNA, 13 nt, Human
aucugagaaucuu

SEQ ID NO: 2606143 - RNA, 21 nt, Human
uugccccaacccccagcaccc

SEQ ID NO: 2606144 - RNA, 17 nt, Human
uugccccaacccccagc

SEQ ID NO: 2606145 - RNA, 16 nt, Human
uugccccaacccccag

SEQ ID NO: 2606146 - RNA, 22 nt, Human
uugcccccagggcacuucacag

SEQ ID NO: 2606147 - RNA, 15 nt, Human
uugcccccagggcac

SEQ ID NO: 2606148 - RNA, 15 nt, Human
uugcccauccaucug

SEQ ID NO: 2606149 - RNA, 14 nt, Human
uugcccauccaucu

SEQ ID NO: 2606150 - RNA, 15 nt, Human
uugccccaaccccca

SEQ ID NO: 2606151 - RNA, 14 nt, Human
uugccccaaccccc

SEQ ID NO: 2606152 - RNA, 18 nt, Human
uugccaccccacccuccc

SEQ ID NO: 2606153 - RNA, 17 nt, Human
uugccaccccacccucc

SEQ ID NO: 2606154 - RNA, 12 nt, Human
uugccaccccac

SEQ ID NO: 2606155 - RNA, 18 nt, Human
uugccacaggccucccug

SEQ ID NO: 2606156 - RNA, 18 nt, Human
uugcccaggcuggucuca

SEQ ID NO: 2606157 - RNA, 17 nt, Human
uugcccagggcucagcc

SEQ ID NO: 2606158 - RNA, 18 nt, Human
uugcccagggcucagccu

SEQ ID NO: 2606159 - RNA, 19 nt, Human
uugcccagggcucagccug

SEQ ID NO: 2606160 - RNA, 20 nt, Human
uugcccagggcucagccugg

SEQ ID NO: 2606161 - RNA, 23 nt, Human
uugcccaggcuggcgugcagugg

SEQ ID NO: 2606162 - RNA, 14 nt, Human
uugcccaggcuggc

SEQ ID NO: 2606163 - RNA, 12 nt, Human
uugcccaggcug

SEQ ID NO: 2606164 - RNA, 11 nt, Human
uugcccaggcu

SEQ ID NO: 2606165 - RNA, 18 nt, Human
uugcccaggcaggucuug

SEQ ID NO: 2606166 - RNA, 16 nt, Human
uugcccaggcaggucu

SEQ ID NO: 2606167 - RNA, 14 nt, Human
uugcccaggcaggu

SEQ ID NO: 2606168 - RNA, 13 nt, Human
uugcccaggcagg

SEQ ID NO: 2606169 - RNA, 18 nt, Human
uugccacaggacacaguc

SEQ ID NO: 2606170 - RNA, 15 nt, Human
uugccacaacccugu

SEQ ID NO: 2606171 - RNA, 13 nt, Human
uugccacagcucu

SEQ ID NO: 2606172 - RNA, 21 nt, Human
uugccaaugaggucugaaaug

SEQ ID NO: 2606173 - RNA, 16 nt, Human
uugccacaggccuccc

SEQ ID NO: 2606174 - RNA, 15 nt, Human
uugccacaggccucc

SEQ ID NO: 2606175 - RNA, 11 nt, Human
uugccacaggc

SEQ ID NO: 2606176 - RNA, 19 nt, Human
uugccacaggccucccugu

SEQ ID NO: 2606177 - RNA, 13 nt, Human
uugccaccaggag

SEQ ID NO: 2606178 - RNA, 14 nt, Human
uugccaccaggaga

SEQ ID NO: 2606179 - RNA, 15 nt, Human
uugccaccaggagaa

SEQ ID NO: 2606180 - RNA, 16 nt, Human
uugccaccaggagaac

SEQ ID NO: 2606181 - RNA, 16 nt, Human
uugcacccgccucucc

SEQ ID NO: 2606182 - RNA, 16 nt, Human
uugcaccccucccauu

SEQ ID NO: 2606183 - RNA, 15 nt, Human
uugcaccccucccau

SEQ ID NO: 2606184 - RNA, 14 nt, Human
uugcaccccuccca

SEQ ID NO: 2606185 - RNA, 13 nt, Human
uugcaccccuccc

SEQ ID NO: 2606186 - RNA, 12 nt, Human
uugcaccccucc

SEQ ID NO: 2606187 - RNA, 24 nt, Human
uugcaccccucacucuggccucag

SEQ ID NO: 2606188 - RNA, 22 nt, Human
uugcaccccucacucuggccuc

SEQ ID NO: 2606189 - RNA, 13 nt, Human
uugcaccccucac

SEQ ID NO: 2606190 - RNA, 19 nt, Human
uugcaccccaugcuguuga

SEQ ID NO: 2606191 - RNA, 22 nt, Human
uugcaccccaaagcuuuccugc

SEQ ID NO: 2606192 - RNA, 19 nt, Human
uugcacccagcccuggucu

SEQ ID NO: 2606193 - RNA, 16 nt, Human
uugcacccagcccugg

SEQ ID NO: 2606194 - RNA, 21 nt, Human
uugcaccccaaagcuuuccug

SEQ ID NO: 2606195 - RNA, 20 nt, Human
uugcaauccacaaucugaca

SEQ ID NO: 2606196 - RNA, 15 nt, Human
uugcacccagcccug

SEQ ID NO: 2606197 - RNA, 13 nt, Human
uugcacccagccc

SEQ ID NO: 2606198 - RNA, 12 nt, Human
uugcacccagcc

SEQ ID NO: 2606199 - RNA, 21 nt, Human
uugcaccacugcacuccagcc

SEQ ID NO: 2606200 - RNA, 18 nt, Human
uugcaagugaagguuuac

SEQ ID NO: 2606201 - RNA, 13 nt, Human
uugcaauaauacu

SEQ ID NO: 2606202 - RNA, 15 nt, Human
uugcaagugaagguu

SEQ ID NO: 2606203 - RNA, 22 nt, Human
uugcaacuucaugucaacuucu

SEQ ID NO: 2606204 - RNA, 14 nt, Human
uugcaauggcagcc

SEQ ID NO: 2606205 - RNA, 20 nt, Human
uugcaauaauacuucucaaa

SEQ ID NO: 2606206 - RNA, 14 nt, Human
uugcaauaauacuu

SEQ ID NO: 2606207 - RNA, 12 nt, Human
uugcaacuucau

SEQ ID NO: 2606208 - RNA, 22 nt, Human
uugcaugggcuaaugaagauca

SEQ ID NO: 2606209 - RNA, 18 nt, Human
uugcaugggcuaaugaag

SEQ ID NO: 2606210 - RNA, 17 nt, Human
uugcaugggcuaaugaa

SEQ ID NO: 2606211 - RNA, 20 nt, Human
uugcauggcuccagaaaugu

SEQ ID NO: 2606212 - RNA, 19 nt, Human
uugcauggcuccagaaaug

SEQ ID NO: 2606213 - RNA, 19 nt, Human
uugcauggcaucaccucca

SEQ ID NO: 2606214 - RNA, 19 nt, Human
uugcauggcacuugcaucu

SEQ ID NO: 2606215 - RNA, 15 nt, Human
uugcaugauguauuu

SEQ ID NO: 2606216 - RNA, 14 nt, Human
uugcaugaggcuag

SEQ ID NO: 2606217 - RNA, 12 nt, Human
uugcaugaggcu

SEQ ID NO: 2606218 - RNA, 14 nt, Human
uugcaugauguauu

SEQ ID NO: 2606219 - RNA, 14 nt, Human
uugcaccugcucuc

SEQ ID NO: 2606220 - RNA, 17 nt, Human
uugcaccuaccucacag

SEQ ID NO: 2606221 - RNA, 22 nt, Human
uugccaaccuguaauaaauaug

SEQ ID NO: 2606222 - RNA, 21 nt, Human
uugccaaccuguaauaaauau

SEQ ID NO: 2606223 - RNA, 19 nt, Human
uugccaaccuguaauaaau

SEQ ID NO: 2606224 - RNA, 18 nt, Human
uugccaaccuguaauaaa

SEQ ID NO: 2606225 - RNA, 16 nt, Human
uugccaacauugccua

SEQ ID NO: 2606226 - RNA, 13 nt, Human
uugccaacauugc

SEQ ID NO: 2606227 - RNA, 18 nt, Human
uugccaaauauguccugg

SEQ ID NO: 2606228 - RNA, 17 nt, Human
uugccaaauauguccug

SEQ ID NO: 2606229 - RNA, 16 nt, Human
uugccaaauauguccu

SEQ ID NO: 2606230 - RNA, 22 nt, Human
uugccaaccuuauagggaugag

SEQ ID NO: 2606231 - RNA, 23 nt, Human
uugccaaccuguaauaaauauga

SEQ ID NO: 2606232 - RNA, 15 nt, Human
uugccaagcucagga

SEQ ID NO: 2606233 - RNA, 22 nt, Human
uugccaagcuccaagccccauc

SEQ ID NO: 2606234 - RNA, 14 nt, Human
aucucaaauuucua

SEQ ID NO: 2606235 - RNA, 23 nt, Human
aucucaaauaacuaaaagguaug

SEQ ID NO: 2606236 - RNA, 14 nt, Human
aucucaaauaacua

SEQ ID NO: 2606237 - RNA, 21 nt, Human
aucucaaauaacuaaaaggua

SEQ ID NO: 2606238 - RNA, 19 nt, Human
aucucaaaacugcacuguc

SEQ ID NO: 2606239 - RNA, 20 nt, Human
aucucaaaacugcacuguca

SEQ ID NO: 2606240 - RNA, 15 nt, Human
aucucaaaacugcac

SEQ ID NO: 2606241 - RNA, 19 nt, Human
aucuauuuuuggcagucug

SEQ ID NO: 2606242 - RNA, 23 nt, Human
aucuauuuuuggcagucugaauu

SEQ ID NO: 2606243 - RNA, 14 nt, Human
aucucaaaaaauaa

SEQ ID NO: 2606244 - RNA, 19 nt, Human
aucuagauacuguaucaug

SEQ ID NO: 2606245 - RNA, 16 nt, Human
aucuagauaucgacuu

SEQ ID NO: 2606246 - RNA, 18 nt, Human
aucuacucccaaguaugg

SEQ ID NO: 2606247 - RNA, 16 nt, Human
aucuacucagaaauuu

SEQ ID NO: 2606248 - RNA, 13 nt, Human
aucuacucccaag

SEQ ID NO: 2606249 - RNA, 19 nt, Human
aucuagauuauggagcuuu

SEQ ID NO: 2606250 - RNA, 14 nt, Human
aucuagcaaauguu

SEQ ID NO: 2606251 - RNA, 22 nt, Human
aucuagcaaucacaacacuggc

SEQ ID NO: 2606252 - RNA, 18 nt, Human
aucuagcaaauguuaugc

SEQ ID NO: 2606253 - RNA, 15 nt, Human
aucuagcaaucacaa

SEQ ID NO: 2606254 - RNA, 18 nt, Human
aucuaggaagacuuugga

SEQ ID NO: 2606255 - RNA, 17 nt, Human
aucuaggaagacuuugg

SEQ ID NO: 2606256 - RNA, 19 nt, Human
aucuaggaagacuuuggaa

SEQ ID NO: 2606257 - RNA, 22 nt, Human
aucuauuuuggauuguauauug

SEQ ID NO: 2606258 - RNA, 11 nt, Human
uugagugccuu

SEQ ID NO: 2606259 - RNA, 21 nt, Human
uugagugcugucuccauguuu

SEQ ID NO: 2606260 - RNA, 23 nt, Human
uugagugggguuaucucuguguu

SEQ ID NO: 2606261 - RNA, 17 nt, Human
uugagccagcagacauu

SEQ ID NO: 2606262 - RNA, 17 nt, Human
uugaguguuuuaagaua

SEQ ID NO: 2606263 - RNA, 14 nt, Human
uugagugcucugau

SEQ ID NO: 2606264 - RNA, 15 nt, Human
uugagugcucugauc

SEQ ID NO: 2606265 - RNA, 17 nt, Human
uugaguggaugauguuu

SEQ ID NO: 2606266 - RNA, 19 nt, Human
uugaguggaugauguuucg

SEQ ID NO: 2606267 - RNA, 15 nt, Human
uugauacuacaguuu

SEQ ID NO: 2606268 - RNA, 17 nt, Human
uugauacuacaguuugu

SEQ ID NO: 2606269 - RNA, 18 nt, Human
uugauagcacagacccug

SEQ ID NO: 2606270 - RNA, 13 nt, Human
uugauagcaaagc

SEQ ID NO: 2606271 - RNA, 16 nt, Human
uugauacuuguucaaa

SEQ ID NO: 2606272 - RNA, 17 nt, Human
uugauacuuguucaaaa

SEQ ID NO: 2606273 - RNA, 21 nt, Human
aucuaccuucuguaguuuuau

SEQ ID NO: 2606274 - RNA, 17 nt, Human
aucuaccuucuguaguu

SEQ ID NO: 2606275 - RNA, 15 nt, Human
aucuaccuucuguag

SEQ ID NO: 2606276 - RNA, 22 nt, Human
aucuaccuuccagucaggauga

SEQ ID NO: 2606277 - RNA, 15 nt, Human
aucuacuaauuccac

SEQ ID NO: 2606278 - RNA, 19 nt, Human
aucuacuaauuccacaccu

SEQ ID NO: 2606279 - RNA, 18 nt, Human
aucuagauacuguaucau

SEQ ID NO: 2606280 - RNA, 21 nt, Human
aucuaccucacuauucaagua

SEQ ID NO: 2606281 - RNA, 17 nt, Human
aucuaccccuuacuuau

SEQ ID NO: 2606282 - RNA, 21 nt, Human
aucuacccaaaggauacugua

SEQ ID NO: 2606283 - RNA, 15 nt, Human
aucuacccaaaggau

SEQ ID NO: 2606284 - RNA, 14 nt, Human
aucuacccaaagga

SEQ ID NO: 2606285 - RNA, 23 nt, Human
aucuaauauguaacaagccaccc

SEQ ID NO: 2606286 - RNA, 20 nt, Human
aucuaauauguaacaagcca

SEQ ID NO: 2606287 - RNA, 14 nt, Human
aucuaauauuaaaa

SEQ ID NO: 2606288 - RNA, 16 nt, Human
aucuaauuauuuugca

SEQ ID NO: 2606289 - RNA, 13 nt, Human
uugacaugggaca

SEQ ID NO: 2606290 - RNA, 23 nt, Human
uugacaugagauuuauaagguuu

SEQ ID NO: 2606291 - RNA, 19 nt, Human
uugacagcuuugcugcuga

SEQ ID NO: 2606292 - RNA, 16 nt, Human
uugacaucaacugcau

SEQ ID NO: 2606293 - RNA, 13 nt, Human
uugacaucaacug

SEQ ID NO: 2606294 - RNA, 12 nt, Human
uugacagggcac

SEQ ID NO: 2606295 - RNA, 10 nt, Human
uugacagggc

SEQ ID NO: 2606296 - RNA, 22 nt, Human
uugacacuauaucuguauauaa

SEQ ID NO: 2606297 - RNA, 19 nt, Human
uugacacuauaucuguaua

SEQ ID NO: 2606298 - RNA, 18 nt, Human
uugacacuauaucuguau

SEQ ID NO: 2606299 - RNA, 14 nt, Human
uugacacuauaucu

SEQ ID NO: 2606300 - RNA, 22 nt, Human
uugacaccagcuguucuguccc

SEQ ID NO: 2606301 - RNA, 23 nt, Human
uugacacuagcccaaugaaauga

SEQ ID NO: 2606302 - RNA, 19 nt, Human
uugacaggauuauuggaaa

SEQ ID NO: 2606303 - RNA, 19 nt, Human
auccgaaccuccucuguga

SEQ ID NO: 2606304 - RNA, 20 nt, Human
auccgaaccuccucugugaa

SEQ ID NO: 2606305 - RNA, 16 nt, Human
auccgaaccuccucug

SEQ ID NO: 2606306 - RNA, 18 nt, Human
uugacaauaaaugugcuu

SEQ ID NO: 2606307 - RNA, 18 nt, Human
uugacaauaauuucaggu

SEQ ID NO: 2606308 - RNA, 22 nt, Human
aucccuuuauuacccccuccuu

SEQ ID NO: 2606309 - RNA, 18 nt, Human
aucccuuuuugaagugua

SEQ ID NO: 2606310 - RNA, 22 nt, Human
aucccuugaccaggccugggcc

SEQ ID NO: 2606311 - RNA, 14 nt, Human
uugacacaagugga

SEQ ID NO: 2606312 - RNA, 17 nt, Human
uugacacaaguggaccu

SEQ ID NO: 2606313 - RNA, 16 nt, Human
uugacacagaaaaugu

SEQ ID NO: 2606314 - RNA, 18 nt, Human
uugacacaaguggaccuu

SEQ ID NO: 2606315 - RNA, 12 nt, Human
uugacaccugcu

SEQ ID NO: 2606316 - RNA, 19 nt, Human
uugacacaggucuuuccua

SEQ ID NO: 2606317 - RNA, 22 nt, Human
uugacacaggucuuuccuaagg

SEQ ID NO: 2606318 - RNA, 13 nt, Human
uugacacaggucu

SEQ ID NO: 2606319 - RNA, 13 nt, Human
aucccuuuauuac

SEQ ID NO: 2606320 - RNA, 14 nt, Human
aucccuuuauuacc

SEQ ID NO: 2606321 - RNA, 18 nt, Human
aucccuugaccaggccug

SEQ ID NO: 2606322 - RNA, 14 nt, Human
aucccuugaccagg

SEQ ID NO: 2606323 - RNA, 19 nt, Human
aucccuuccuuuuagccua

SEQ ID NO: 2606324 - RNA, 21 nt, Human
aucccuuccuuuuagccuagu

SEQ ID NO: 2606325 - RNA, 11 nt, Human
uugagacagag

SEQ ID NO: 2606326 - RNA, 10 nt, Human
uugagacaga

SEQ ID NO: 2606327 - RNA, 22 nt, Human
uugagacacggagcccagcccu

SEQ ID NO: 2606328 - RNA, 20 nt, Human
uugagacacugguuuacacu

SEQ ID NO: 2606329 - RNA, 13 nt, Human
uugagaauuuuaa

SEQ ID NO: 2606330 - RNA, 19 nt, Human
uugagaaguuuuguacaga

SEQ ID NO: 2606331 - RNA, 18 nt, Human
uugagaaguuuuguacag

SEQ ID NO: 2606332 - RNA, 16 nt, Human
uugagaaguuuuguac

SEQ ID NO: 2606333 - RNA, 23 nt, Human
uugagaaaccuuauuguaccucu

SEQ ID NO: 2606334 - RNA, 19 nt, Human
uugagaaagagcacuuaag

SEQ ID NO: 2606335 - RNA, 20 nt, Human
uugagaaacaaauaauuugu

SEQ ID NO: 2606336 - RNA, 23 nt, Human
uugagaaucccaaauuugauuga

SEQ ID NO: 2606337 - RNA, 22 nt, Human
uugagaauugugcucaaaauuu

SEQ ID NO: 2606338 - RNA, 18 nt, Human
uugagaaugguuacaaag

SEQ ID NO: 2606339 - RNA, 22 nt, Human
uugagacacugguuuacacuuu

SEQ ID NO: 2606340 - RNA, 18 nt, Human
uugagcagggauccuggu

SEQ ID NO: 2606341 - RNA, 18 nt, Human
uugagcaacuuucuuaca

SEQ ID NO: 2606342 - RNA, 12 nt, Human
uugagcagggcu

SEQ ID NO: 2606343 - RNA, 19 nt, Human
uugagcaguggcuggucca

SEQ ID NO: 2606344 - RNA, 14 nt, Human
uugagccagcagac

SEQ ID NO: 2606345 - RNA, 13 nt, Human
uugagccagcaga

SEQ ID NO: 2606346 - RNA, 16 nt, Human
uugagcagggcucagc

SEQ ID NO: 2606347 - RNA, 14 nt, Human
uugacauugcguuu

SEQ ID NO: 2606348 - RNA, 18 nt, Human
uugacauguacagagaac

SEQ ID NO: 2606349 - RNA, 14 nt, Human
uugacauguacaga

SEQ ID NO: 2606350 - RNA, 13 nt, Human
uugacauguacag

SEQ ID NO: 2606351 - RNA, 14 nt, Human
uugacauguggaaa

SEQ ID NO: 2606352 - RNA, 22 nt, Human
uugacauguggaaagugaauuu

SEQ ID NO: 2606353 - RNA, 18 nt, Human
uugacauugcguuugacc

SEQ ID NO: 2606354 - RNA, 16 nt, Human
uugaccaagcaggaag

SEQ ID NO: 2606355 - RNA, 18 nt, Human
uugaccaagcaggaagcu

SEQ ID NO: 2606356 - RNA, 20 nt, Human
uugaccaagcaggaagcuca

SEQ ID NO: 2606357 - RNA, 22 nt, Human
uugaccaagcaggaagcucaga

SEQ ID NO: 2606358 - RNA, 11 nt, Human
uugaccaggcc

SEQ ID NO: 2606359 - RNA, 21 nt, Human
uugaccagcagaucccagcuc

SEQ ID NO: 2606360 - RNA, 22 nt, Human
uugaccagcagaucccagcuca

SEQ ID NO: 2606361 - RNA, 12 nt, Human
uugacuuuuuau

SEQ ID NO: 2606362 - RNA, 17 nt, Human
uugaccauucuccaccu

SEQ ID NO: 2606363 - RNA, 17 nt, Human
uugacuuuuugcauuua

SEQ ID NO: 2606364 - RNA, 16 nt, Human
uugacuuuuugcauuu

SEQ ID NO: 2606365 - RNA, 22 nt, Human
uugagaaaccuuauuguaccuc

SEQ ID NO: 2606366 - RNA, 10 nt, Human
uugagaaacc

SEQ ID NO: 2606367 - RNA, 22 nt, Human
augcgugcauaccacuuuuguu

SEQ ID NO: 2606368 - RNA, 20 nt, Human
augcgugcauaccacuuuug

SEQ ID NO: 2606369 - RNA, 12 nt, Human
augcgugugugu

SEQ ID NO: 2606370 - RNA, 18 nt, Human
augcuacaggauuugaaa

SEQ ID NO: 2606371 - RNA, 14 nt, Human
augcgcaggcuggc

SEQ ID NO: 2606372 - RNA, 18 nt, Human
augcgcaggcuggcccug

SEQ ID NO: 2606373 - RNA, 20 nt, Human
augcgcaggcuggcccugcc

SEQ ID NO: 2606374 - RNA, 22 nt, Human
augcgcaggcuggcccugcccu

SEQ ID NO: 2606375 - RNA, 21 nt, Human
augccucuccuuuguauauua

SEQ ID NO: 2606376 - RNA, 20 nt, Human
augccucuccuuuguauauu

SEQ ID NO: 2606377 - RNA, 17 nt, Human
augccucuccuuuguau

SEQ ID NO: 2606378 - RNA, 19 nt, Human
augcgagugcucauuucag

SEQ ID NO: 2606379 - RNA, 13 nt, Human
augcgcaggcugg

SEQ ID NO: 2606380 - RNA, 22 nt, Human
augccuuuucccaacuccagaa

SEQ ID NO: 2606381 - RNA, 20 nt, Human
augccuuuucccaacuccag

SEQ ID NO: 2606382 - RNA, 14 nt, Human
augccuuuucccaa

SEQ ID NO: 2606383 - RNA, 15 nt, Human
augccucucucaggc

SEQ ID NO: 2606384 - RNA, 14 nt, Human
augccucucucagg

SEQ ID NO: 2606385 - RNA, 13 nt, Human
augccucucucag

SEQ ID NO: 2606386 - RNA, 14 nt, Human
augcccucagggga

SEQ ID NO: 2606387 - RNA, 16 nt, Human
augccucuccuuugua

SEQ ID NO: 2606388 - RNA, 16 nt, Human
augccccuggcuggga

SEQ ID NO: 2606389 - RNA, 20 nt, Human
augccccuguacuccagccu

SEQ ID NO: 2606390 - RNA, 17 nt, Human
augcccggcuaauuuuu

SEQ ID NO: 2606391 - RNA, 17 nt, Human
augcccagggccacucu

SEQ ID NO: 2606392 - RNA, 14 nt, Human
augccaucaucucc

SEQ ID NO: 2606393 - RNA, 15 nt, Human
augccaucaucuccu

SEQ ID NO: 2606394 - RNA, 21 nt, Human
augccauccucaaacacugca

SEQ ID NO: 2606395 - RNA, 12 nt, Human
augccauccuca

SEQ ID NO: 2606396 - RNA, 16 nt, Human
augccaucaucuccug

SEQ ID NO: 2606397 - RNA, 21 nt, Human
augccaugaggaacaaggcaa

SEQ ID NO: 2606398 - RNA, 16 nt, Human
augcccagccccuucu

SEQ ID NO: 2606399 - RNA, 15 nt, Human
augcccagccccuuc

SEQ ID NO: 2606400 - RNA, 23 nt, Human
augccauccucaaacacugcagg

SEQ ID NO: 2606401 - RNA, 17 nt, Human
augccaucugugggcac

SEQ ID NO: 2606402 - RNA, 21 nt, Human
augccccgucccccucuggcu

SEQ ID NO: 2606403 - RNA, 18 nt, Human
augccccgucccccucug

SEQ ID NO: 2606404 - RNA, 17 nt, Human
augcccagccccuucug

SEQ ID NO: 2606405 - RNA, 21 nt, Human
augcccagggccacucugccu

SEQ ID NO: 2606406 - RNA, 15 nt, Human
augcccagcguuuga

SEQ ID NO: 2606407 - RNA, 16 nt, Human
augcccagcucagagg

SEQ ID NO: 2606408 - RNA, 20 nt, Human
augccaguaggcucaacuag

SEQ ID NO: 2606409 - RNA, 23 nt, Human
augccaguaacgcgucuuccuga

SEQ ID NO: 2606410 - RNA, 21 nt, Human
augccagguucuauuuggaau

SEQ ID NO: 2606411 - RNA, 20 nt, Human
augccagguucuauuuggaa

SEQ ID NO: 2606412 - RNA, 22 nt, Human
augccaguaacgcgucuuccug

SEQ ID NO: 2606413 - RNA, 19 nt, Human
augccagguucuauuugga

SEQ ID NO: 2606414 - RNA, 18 nt, Human
augccagguucuauuugg

SEQ ID NO: 2606415 - RNA, 16 nt, Human
augccagcuacuuccu

SEQ ID NO: 2606416 - RNA, 18 nt, Human
augccagcucagucccau

SEQ ID NO: 2606417 - RNA, 12 nt, Human
augccaggacac

SEQ ID NO: 2606418 - RNA, 19 nt, Human
augccagcucagucccauc

SEQ ID NO: 2606419 - RNA, 18 nt, Human
augccacugccuucgcuu

SEQ ID NO: 2606420 - RNA, 15 nt, Human
augccacugccuucg

SEQ ID NO: 2606421 - RNA, 17 nt, Human
augccacugccuucgcu

SEQ ID NO: 2606422 - RNA, 22 nt, Human
augccagagacggaagccuuuu

SEQ ID NO: 2606423 - RNA, 21 nt, Human
uuuaaugaaagacuguacaaa

SEQ ID NO: 2606424 - RNA, 23 nt, Human
uuuaaugaaagacuguacaaagu

SEQ ID NO: 2606425 - RNA, 17 nt, Human
uuuaggauaaaauaaug

SEQ ID NO: 2606426 - RNA, 20 nt, Human
uuuaggagggaguuaucuaa

SEQ ID NO: 2606427 - RNA, 23 nt, Human
uuuagggacucaauuucucccca

SEQ ID NO: 2606428 - RNA, 18 nt, Human
uuuaggcugguggcccag

SEQ ID NO: 2606429 - RNA, 19 nt, Human
uuuaggcagggauuugagg

SEQ ID NO: 2606430 - RNA, 19 nt, Human
uuuagggagagucauauuu

SEQ ID NO: 2606431 - RNA, 21 nt, Human
uuuagggagagucauauuuug

SEQ ID NO: 2606432 - RNA, 14 nt, Human
uuuagggccaggca

SEQ ID NO: 2606433 - RNA, 15 nt, Human
uuuagggcagcuugc

SEQ ID NO: 2606434 - RNA, 13 nt, Human
uuuagggcagcuu

SEQ ID NO: 2606435 - RNA, 17 nt, Human
uuuacuuaucuuaugcc

SEQ ID NO: 2606436 - RNA, 16 nt, Human
uuuacuuaucuuaugc

SEQ ID NO: 2606437 - RNA, 22 nt, Human
uuuacuuaaagauuuaucaaau

SEQ ID NO: 2606438 - RNA, 20 nt, Human
uuuacuuaaagauuuaucaa

SEQ ID NO: 2606439 - RNA, 23 nt, Human
uuuacuuaaagauuuaucaaauc

SEQ ID NO: 2606440 - RNA, 13 nt, Human
uuuacuucuuaua

SEQ ID NO: 2606441 - RNA, 14 nt, Human
uuuacuucuuauac

SEQ ID NO: 2606442 - RNA, 15 nt, Human
uuuacuucuuauaca

SEQ ID NO: 2606443 - RNA, 17 nt, Human
uuuaggagauuuuaggu

SEQ ID NO: 2606444 - RNA, 21 nt, Human
uuuauaugcuucuguuuuaua

SEQ ID NO: 2606445 - RNA, 13 nt, Human
uuuauauguacau

SEQ ID NO: 2606446 - RNA, 14 nt, Human
uuuauauguacaug

SEQ ID NO: 2606447 - RNA, 16 nt, Human
uuuaguuacagcugug

SEQ ID NO: 2606448 - RNA, 17 nt, Human
uuuaguuaaauuucugg

SEQ ID NO: 2606449 - RNA, 23 nt, Human
uuuauauggaugauucagaaauu

SEQ ID NO: 2606450 - RNA, 19 nt, Human
uuuaucacauguauguuuu

SEQ ID NO: 2606451 - RNA, 17 nt, Human
uuuauauguacaugaga

SEQ ID NO: 2606452 - RNA, 19 nt, Human
uuuagugaucacagcagcu

SEQ ID NO: 2606453 - RNA, 16 nt, Human
uuuagggccaggcagg

SEQ ID NO: 2606454 - RNA, 20 nt, Human
uuuagggcuguaaaaugcau

SEQ ID NO: 2606455 - RNA, 19 nt, Human
uuuauaugcuucuguuuua

SEQ ID NO: 2606456 - RNA, 13 nt, Human
uuuaguggcuuca

SEQ ID NO: 2606457 - RNA, 18 nt, Human
uuuaccugaagucuuugu

SEQ ID NO: 2606458 - RNA, 22 nt, Human
uuuaccugaagucuuuguacag

SEQ ID NO: 2606459 - RNA, 15 nt, Human
uuuaccuauguaaca

SEQ ID NO: 2606460 - RNA, 18 nt, Human
uuuaccuaccacaguguc

SEQ ID NO: 2606461 - RNA, 18 nt, Human
uuuaccguuucuucccug

SEQ ID NO: 2606462 - RNA, 13 nt, Human
uuuacccuuggcu

SEQ ID NO: 2606463 - RNA, 19 nt, Human
uuuaccuaccacagugucu

SEQ ID NO: 2606464 - RNA, 20 nt, Human
augcuacugucucacugaaa

SEQ ID NO: 2606465 - RNA, 14 nt, Human
augcuacugucuca

SEQ ID NO: 2606466 - RNA, 21 nt, Human
augcuacuacaaaaaaguugu

SEQ ID NO: 2606467 - RNA, 20 nt, Human
uuuacccuucuuuucugacu

SEQ ID NO: 2606468 - RNA, 22 nt, Human
augcuacgugugauuuuucugg

SEQ ID NO: 2606469 - RNA, 20 nt, Human
augcuacgugugauuuuucu

SEQ ID NO: 2606470 - RNA, 19 nt, Human
augcuacgugugauuuuuc

SEQ ID NO: 2606471 - RNA, 17 nt, Human
augcuacgugugauuuu

SEQ ID NO: 2606472 - RNA, 16 nt, Human
augcuacgugugauuu

SEQ ID NO: 2606473 - RNA, 15 nt, Human
augcuacgugugauu

SEQ ID NO: 2606474 - RNA, 14 nt, Human
augcuacgugugau

SEQ ID NO: 2606475 - RNA, 23 nt, Human
augcuaccuugugacccagcacu

SEQ ID NO: 2606476 - RNA, 20 nt, Human
augcuaaaccuuaguacuga

SEQ ID NO: 2606477 - RNA, 14 nt, Human
augcuaaaccuuag

SEQ ID NO: 2606478 - RNA, 17 nt, Human
augcguguuucugacuc

SEQ ID NO: 2606479 - RNA, 12 nt, Human
augcuaaaccuu

SEQ ID NO: 2606480 - RNA, 16 nt, Human
augcgugugugugugu

SEQ ID NO: 2606481 - RNA, 16 nt, Human
augcguguuucugacu

SEQ ID NO: 2606482 - RNA, 16 nt, Human
uuuacugcagcuuugu

SEQ ID NO: 2606483 - RNA, 21 nt, Human
uuuacugagcuucucugugaa

SEQ ID NO: 2606484 - RNA, 18 nt, Human
uuuacugagcuucucugu

SEQ ID NO: 2606485 - RNA, 17 nt, Human
uuuacugagcuucucug

SEQ ID NO: 2606486 - RNA, 14 nt, Human
uuuacugagcuucu

SEQ ID NO: 2606487 - RNA, 21 nt, Human
uuuacuccaguggugaagaaa

SEQ ID NO: 2606488 - RNA, 13 nt, Human
uuuacuccagugg

SEQ ID NO: 2606489 - RNA, 12 nt, Human
uuuacuccccuu

SEQ ID NO: 2606490 - RNA, 13 nt, Human
uuuacuccccuug

SEQ ID NO: 2606491 - RNA, 18 nt, Human
uuuacuccccuugagcug

SEQ ID NO: 2606492 - RNA, 13 nt, Human
uuuacugaacaau

SEQ ID NO: 2606493 - RNA, 14 nt, Human
uuuacugaagccuu

SEQ ID NO: 2606494 - RNA, 12 nt, Human
uuuacugccacu

SEQ ID NO: 2606495 - RNA, 11 nt, Human
uuuacugccac

SEQ ID NO: 2606496 - RNA, 22 nt, Human
uuuacugccaaagggaaauauc

SEQ ID NO: 2606497 - RNA, 17 nt, Human
uuuacugugaaacuggc

SEQ ID NO: 2606498 - RNA, 20 nt, Human
uuuacugucaaaauaauuuu

SEQ ID NO: 2606499 - RNA, 11 nt, Human
uuuacuuaaac

SEQ ID NO: 2606500 - RNA, 16 nt, Human
uuuacuuaaagauuua

SEQ ID NO: 2606501 - RNA, 15 nt, Human
uuuacuuaaagauuu

SEQ ID NO: 2606502 - RNA, 14 nt, Human
uuuacuuaaagauu

SEQ ID NO: 2606503 - RNA, 14 nt, Human
uuuacuguuuguua

SEQ ID NO: 2606504 - RNA, 16 nt, Human
uuucccuauuagagaa

SEQ ID NO: 2606505 - RNA, 12 nt, Human
uuucccaauuca

SEQ ID NO: 2606506 - RNA, 20 nt, Human
uuucccuaagccaagggccu

SEQ ID NO: 2606507 - RNA, 12 nt, Human
uuucccaacucu

SEQ ID NO: 2606508 - RNA, 15 nt, Human
uuucccaauuaggaa

SEQ ID NO: 2606509 - RNA, 14 nt, Human
uuuccauuguuuga

SEQ ID NO: 2606510 - RNA, 21 nt, Human
uuuccauugguuuaccuguga

SEQ ID NO: 2606511 - RNA, 14 nt, Human
uuuccauuccagaa

SEQ ID NO: 2606512 - RNA, 13 nt, Human
uuuccauuccaga

SEQ ID NO: 2606513 - RNA, 21 nt, Human
uuuccauuauuuauauuaguu

SEQ ID NO: 2606514 - RNA, 13 nt, Human
uuuccauguaucu

SEQ ID NO: 2606515 - RNA, 19 nt, Human
uuuccaugcguguuucuga

SEQ ID NO: 2606516 - RNA, 14 nt, Human
uuuccauguugcug

SEQ ID NO: 2606517 - RNA, 17 nt, Human
uuuccauguugcugcca

SEQ ID NO: 2606518 - RNA, 13 nt, Human
uuuccauuauuua

SEQ ID NO: 2606519 - RNA, 18 nt, Human
uuucauguaaacugugca

SEQ ID NO: 2606520 - RNA, 19 nt, Human
uuucauguaaacugugcac

SEQ ID NO: 2606521 - RNA, 12 nt, Human
uuucauguacaa

SEQ ID NO: 2606522 - RNA, 18 nt, Human
uuucauguacaagaugaa

SEQ ID NO: 2606523 - RNA, 22 nt, Human
uuucauggugaaaauguacuga

SEQ ID NO: 2606524 - RNA, 21 nt, Human
uuucauggugaaaauguacug

SEQ ID NO: 2606525 - RNA, 20 nt, Human
uuucauggugaaaauguacu

SEQ ID NO: 2606526 - RNA, 13 nt, Human
uuucauggacacu

SEQ ID NO: 2606527 - RNA, 18 nt, Human
uuucauggacacuuugaa

SEQ ID NO: 2606528 - RNA, 22 nt, Human
uuucauggggugaugcugggcu

SEQ ID NO: 2606529 - RNA, 11 nt, Human
uuucagaaaug

SEQ ID NO: 2606530 - RNA, 12 nt, Human
uuucagaaaugu

SEQ ID NO: 2606531 - RNA, 23 nt, Human
uuucaucccuaugggauucagug

SEQ ID NO: 2606532 - RNA, 21 nt, Human
uuucauccacuagugcaaauc

SEQ ID NO: 2606533 - RNA, 20 nt, Human
uuucauccacuagugcaaau

SEQ ID NO: 2606534 - RNA, 20 nt, Human
uuucagaaauaugugguuuc

SEQ ID NO: 2606535 - RNA, 20 nt, Human
uuucaucugcucuccuuccu

SEQ ID NO: 2606536 - RNA, 19 nt, Human
uuucaucugcucuccuucc

SEQ ID NO: 2606537 - RNA, 18 nt, Human
uuucaucugcucuccuuc

SEQ ID NO: 2606538 - RNA, 17 nt, Human
uuucaucugcucuccuu

SEQ ID NO: 2606539 - RNA, 16 nt, Human
uuucaucugcucuccu

SEQ ID NO: 2606540 - RNA, 15 nt, Human
uuucaucugcucucc

SEQ ID NO: 2606541 - RNA, 11 nt, Human
uuucaucugcu

SEQ ID NO: 2606542 - RNA, 16 nt, Human
uuucaucuauuucuga

SEQ ID NO: 2606543 - RNA, 13 nt, Human
uuucaucuauuuc

SEQ ID NO: 2606544 - RNA, 18 nt, Human
uuucaucuauuucugaga

SEQ ID NO: 2606545 - RNA, 16 nt, Human
uuucaucucuuguaua

SEQ ID NO: 2606546 - RNA, 19 nt, Human
uuucaaacauauauaacaa

SEQ ID NO: 2606547 - RNA, 12 nt, Human
uuucaaacuuua

SEQ ID NO: 2606548 - RNA, 20 nt, Human
uuucaaacuccugacuuugu

SEQ ID NO: 2606549 - RNA, 14 nt, Human
uuucacaugaacau

SEQ ID NO: 2606550 - RNA, 15 nt, Human
uuucacauuaauauu

SEQ ID NO: 2606551 - RNA, 19 nt, Human
auggaaugguuauaaaagu

SEQ ID NO: 2606552 - RNA, 20 nt, Human
auggaaugguuauaaaagug

SEQ ID NO: 2606553 - RNA, 13 nt, Human
auggaauugauuu

SEQ ID NO: 2606554 - RNA, 14 nt, Human
auggaauugauuug

SEQ ID NO: 2606555 - RNA, 15 nt, Human
auggaauugauuugc

SEQ ID NO: 2606556 - RNA, 16 nt, Human
auggaauugauuugca

SEQ ID NO: 2606557 - RNA, 17 nt, Human
auggaaugcuguguuaa

SEQ ID NO: 2606558 - RNA, 21 nt, Human
auggaaugcuguguuaaauaa

SEQ ID NO: 2606559 - RNA, 18 nt, Human
auggaaugguuauaaaag

SEQ ID NO: 2606560 - RNA, 16 nt, Human
auggaaugguuauaaa

SEQ ID NO: 2606561 - RNA, 20 nt, Human
auggaaugcuugaaaaaugu

SEQ ID NO: 2606562 - RNA, 16 nt, Human
auggaaugcuugaaaa

SEQ ID NO: 2606563 - RNA, 22 nt, Human
auggaagcuuccaguccaaucu

SEQ ID NO: 2606564 - RNA, 15 nt, Human
auggaagcuuccagu

SEQ ID NO: 2606565 - RNA, 15 nt, Human
auggaaugcuugaaa

SEQ ID NO: 2606566 - RNA, 16 nt, Human
uuucagaaauaugugg

SEQ ID NO: 2606567 - RNA, 15 nt, Human
uuucacuauuuccuu

SEQ ID NO: 2606568 - RNA, 16 nt, Human
uuucacuauuuccuuu

SEQ ID NO: 2606569 - RNA, 21 nt, Human
uuucagaaagaaguggggaca

SEQ ID NO: 2606570 - RNA, 14 nt, Human
uuucacggaaguuu

SEQ ID NO: 2606571 - RNA, 23 nt, Human
uuucaccuguuuuuaagcuguuu

SEQ ID NO: 2606572 - RNA, 22 nt, Human
uuucacggugccagguuuucug

SEQ ID NO: 2606573 - RNA, 23 nt, Human
uuucacggaaguuuucaaugaug

SEQ ID NO: 2606574 - RNA, 19 nt, Human
uuucacggaaguuuucaau

SEQ ID NO: 2606575 - RNA, 18 nt, Human
uuucacggaaguuuucaa

SEQ ID NO: 2606576 - RNA, 15 nt, Human
uuucacgggagauuu

SEQ ID NO: 2606577 - RNA, 13 nt, Human
uuucacauucuua

SEQ ID NO: 2606578 - RNA, 13 nt, Human
uuucaccuguaaa

SEQ ID NO: 2606579 - RNA, 16 nt, Human
uuucacauucuuauaa

SEQ ID NO: 2606580 - RNA, 15 nt, Human
uuucacauucuuaua

SEQ ID NO: 2606581 - RNA, 21 nt, Human
uuucacauucuuauaaauaug

SEQ ID NO: 2606582 - RNA, 14 nt, Human
uuucaccuguaaac

SEQ ID NO: 2606583 - RNA, 17 nt, Human
uuucaccuguaaaccug

SEQ ID NO: 2606584 - RNA, 18 nt, Human
uuucaccuguaaaccuga

SEQ ID NO: 2606585 - RNA, 22 nt, Human
uuucaccuguuuuuaagcuguu

SEQ ID NO: 2606586 - RNA, 18 nt, Human
auggaagacagcucuuau

SEQ ID NO: 2606587 - RNA, 17 nt, Human
auggaagacagcucuua

SEQ ID NO: 2606588 - RNA, 14 nt, Human
auggaaggggcuga

SEQ ID NO: 2606589 - RNA, 14 nt, Human
augcuucugggaga

SEQ ID NO: 2606590 - RNA, 17 nt, Human
auggaagauuuuaaauu

SEQ ID NO: 2606591 - RNA, 16 nt, Human
auggaagauuuuaaau

SEQ ID NO: 2606592 - RNA, 17 nt, Human
augcuucugacuucaua

SEQ ID NO: 2606593 - RNA, 21 nt, Human
augcuucuguuuuauaauuuu

SEQ ID NO: 2606594 - RNA, 16 nt, Human
augcuucucacugcca

SEQ ID NO: 2606595 - RNA, 20 nt, Human
augcuucucacugccaugcc

SEQ ID NO: 2606596 - RNA, 22 nt, Human
augcuguauuuuaaaagaauga

SEQ ID NO: 2606597 - RNA, 19 nt, Human
augcuguauuuuaaaagaa

SEQ ID NO: 2606598 - RNA, 20 nt, Human
augcuggcuguuggcugggg

SEQ ID NO: 2606599 - RNA, 19 nt, Human
augcuggcuguuggcuggg

SEQ ID NO: 2606600 - RNA, 23 nt, Human
augcuguauuuuaaaagaaugau

SEQ ID NO: 2606601 - RNA, 15 nt, Human
augcuguugauugcu

SEQ ID NO: 2606602 - RNA, 12 nt, Human
augcuguugauu

SEQ ID NO: 2606603 - RNA, 11 nt, Human
augcuguugau

SEQ ID NO: 2606604 - RNA, 20 nt, Human
augcugucaacuaugauaug

SEQ ID NO: 2606605 - RNA, 15 nt, Human
augcuguugccucau

SEQ ID NO: 2606606 - RNA, 16 nt, Human
augcuguugccucauc

SEQ ID NO: 2606607 - RNA, 17 nt, Human
augcuguugccucaucu

SEQ ID NO: 2606608 - RNA, 18 nt, Human
augcuguugccucaucua

SEQ ID NO: 2606609 - RNA, 19 nt, Human
augcuguugauugcuaaau

SEQ ID NO: 2606610 - RNA, 18 nt, Human
augcuguugauugcuaaa

SEQ ID NO: 2606611 - RNA, 17 nt, Human
augcuguugauugcuaa

SEQ ID NO: 2606612 - RNA, 16 nt, Human
augcuguugauugcua

SEQ ID NO: 2606613 - RNA, 22 nt, Human
augcuguugauugcuaaaugua

SEQ ID NO: 2606614 - RNA, 21 nt, Human
augcuguugauugcuaaaugu

SEQ ID NO: 2606615 - RNA, 23 nt, Human
augcuguugauugcuaaauguaa

SEQ ID NO: 2606616 - RNA, 14 nt, Human
augcuguugccuca

SEQ ID NO: 2606617 - RNA, 16 nt, Human
augcuggagccugugu

SEQ ID NO: 2606618 - RNA, 14 nt, Human
augcuggagccugu

SEQ ID NO: 2606619 - RNA, 13 nt, Human
augcuggagccug

SEQ ID NO: 2606620 - RNA, 12 nt, Human
augcuggagccu

SEQ ID NO: 2606621 - RNA, 11 nt, Human
augcuggagcc

SEQ ID NO: 2606622 - RNA, 15 nt, Human
augcuggagagguua

SEQ ID NO: 2606623 - RNA, 14 nt, Human
augcuggagagguu

SEQ ID NO: 2606624 - RNA, 13 nt, Human
augcuggagaggu

SEQ ID NO: 2606625 - RNA, 12 nt, Human
augcuggagagg

SEQ ID NO: 2606626 - RNA, 23 nt, Human
augcuggagaagagaggagagga

SEQ ID NO: 2606627 - RNA, 19 nt, Human
augcuggagaagagaggag

SEQ ID NO: 2606628 - RNA, 18 nt, Human
augcuggagaagagagga

SEQ ID NO: 2606629 - RNA, 17 nt, Human
augcuggagaagagagg

SEQ ID NO: 2606630 - RNA, 16 nt, Human
augcuggagaagagag

SEQ ID NO: 2606631 - RNA, 15 nt, Human
augcuggagaagaga

SEQ ID NO: 2606632 - RNA, 14 nt, Human
augcuggagaagag

SEQ ID NO: 2606633 - RNA, 18 nt, Human
augcuggcuguuggcugg

SEQ ID NO: 2606634 - RNA, 22 nt, Human
augcuggagccuguguaacagc

SEQ ID NO: 2606635 - RNA, 18 nt, Human
augcuggagccuguguaa

SEQ ID NO: 2606636 - RNA, 19 nt, Human
augcuggaugcuccuucca

SEQ ID NO: 2606637 - RNA, 17 nt, Human
augcuggaugucugcca

SEQ ID NO: 2606638 - RNA, 23 nt, Human
augcuggagccuguguaacagcu

SEQ ID NO: 2606639 - RNA, 14 nt, Human
augcuccuggccca

SEQ ID NO: 2606640 - RNA, 15 nt, Human
augcuccaaaugcug

SEQ ID NO: 2606641 - RNA, 12 nt, Human
augcuggagaag

SEQ ID NO: 2606642 - RNA, 21 nt, Human
augcuggacggcauuccugcu

SEQ ID NO: 2606643 - RNA, 22 nt, Human
augcuggacggcauuccugcuu

SEQ ID NO: 2606644 - RNA, 19 nt, Human
augcuccuggcccacugca

SEQ ID NO: 2606645 - RNA, 16 nt, Human
augcucaucugcuggu

SEQ ID NO: 2606646 - RNA, 14 nt, Human
augcucaucugcug

SEQ ID NO: 2606647 - RNA, 16 nt, Human
augcucccuccccugc

SEQ ID NO: 2606648 - RNA, 17 nt, Human
augcucccuccccugcc

SEQ ID NO: 2606649 - RNA, 18 nt, Human
augcucccuccccugccc

SEQ ID NO: 2606650 - RNA, 19 nt, Human
augcucccuccccugcccu

SEQ ID NO: 2606651 - RNA, 20 nt, Human
augcucccuccccugcccug

SEQ ID NO: 2606652 - RNA, 22 nt, Human
augcucccuccccugcccuggu

SEQ ID NO: 2606653 - RNA, 16 nt, Human
augcucauaacggauc

SEQ ID NO: 2606654 - RNA, 13 nt, Human
augcucaucugcu

SEQ ID NO: 2606655 - RNA, 21 nt, Human
augcucauaacggaucagaaa

SEQ ID NO: 2606656 - RNA, 18 nt, Human
augcucagcccugacugg

SEQ ID NO: 2606657 - RNA, 13 nt, Human
augcucagcccug

SEQ ID NO: 2606658 - RNA, 17 nt, Human
augcucagaccagcucu

SEQ ID NO: 2606659 - RNA, 22 nt, Human
uuuaucacauguauguuuuggu

SEQ ID NO: 2606660 - RNA, 14 nt, Human
uuuaucagaauucu

SEQ ID NO: 2606661 - RNA, 13 nt, Human
uuuaucagugaca

SEQ ID NO: 2606662 - RNA, 18 nt, Human
uuuaucagugacagaguu

SEQ ID NO: 2606663 - RNA, 14 nt, Human
augcucaaguuuuu

SEQ ID NO: 2606664 - RNA, 21 nt, Human
uuuaucagugacagaguucac

SEQ ID NO: 2606665 - RNA, 16 nt, Human
augcucaaguuuuuca

SEQ ID NO: 2606666 - RNA, 15 nt, Human
augcucaaguuuuuc

SEQ ID NO: 2606667 - RNA, 20 nt, Human
augcucaaguuuuucagaaa

SEQ ID NO: 2606668 - RNA, 15 nt, Human
augcucacagucuca

SEQ ID NO: 2606669 - RNA, 12 nt, Human
augcucagacca

SEQ ID NO: 2606670 - RNA, 14 nt, Human
augcucagaccagc

SEQ ID NO: 2606671 - RNA, 21 nt, Human
uuuaaaaaauuaaucugggcc

SEQ ID NO: 2606672 - RNA, 19 nt, Human
augcagaguugacaugaga

SEQ ID NO: 2606673 - RNA, 16 nt, Human
augcagaguugacaug

SEQ ID NO: 2606674 - RNA, 23 nt, Human
augcagagguaaaagugugagca

SEQ ID NO: 2606675 - RNA, 15 nt, Human
augcagagucagcag

SEQ ID NO: 2606676 - RNA, 16 nt, Human
augcagagucagcaga

SEQ ID NO: 2606677 - RNA, 17 nt, Human
augcagagucagcagaa

SEQ ID NO: 2606678 - RNA, 18 nt, Human
uuuaaaaaaauuuaagug

SEQ ID NO: 2606679 - RNA, 17 nt, Human
uuuaaaaaaauuuaagu

SEQ ID NO: 2606680 - RNA, 16 nt, Human
uuuaaaaaaauuuaag

SEQ ID NO: 2606681 - RNA, 21 nt, Human
uuuaaaaaaauaaaacauuuu

SEQ ID NO: 2606682 - RNA, 21 nt, Human
uuuaaaaagaaacaagaugcu

SEQ ID NO: 2606683 - RNA, 23 nt, Human
uuuaaaaacuauuuaacuugagc

SEQ ID NO: 2606684 - RNA, 14 nt, Human
uuuaaaaacuauuu

SEQ ID NO: 2606685 - RNA, 15 nt, Human
uuuaaaaaccuugua

SEQ ID NO: 2606686 - RNA, 21 nt, Human
uuuaaaaacuauuuaacuuga

SEQ ID NO: 2606687 - RNA, 15 nt, Human
uuuaaaaagucuuca

SEQ ID NO: 2606688 - RNA, 23 nt, Human
uuuaaaaauacagauagauauau

SEQ ID NO: 2606689 - RNA, 14 nt, Human
uuuaaaucugugau

SEQ ID NO: 2606690 - RNA, 14 nt, Human
uuuaaaugaagaaa

SEQ ID NO: 2606691 - RNA, 18 nt, Human
uuuaaaugcauaaaugca

SEQ ID NO: 2606692 - RNA, 11 nt, Human
uuuaaaugcac

SEQ ID NO: 2606693 - RNA, 15 nt, Human
uuuaaauguaaagau

SEQ ID NO: 2606694 - RNA, 20 nt, Human
uuuaagacgaaacauuuguu

SEQ ID NO: 2606695 - RNA, 18 nt, Human
uuuaaauguaaagauauu

SEQ ID NO: 2606696 - RNA, 14 nt, Human
uuuaaauggacaga

SEQ ID NO: 2606697 - RNA, 16 nt, Human
uuuaaauguaaaacau

SEQ ID NO: 2606698 - RNA, 21 nt, Human
uuuaaauauaugcuaagucuu

SEQ ID NO: 2606699 - RNA, 20 nt, Human
uuuaaggaugcuuguacaua

SEQ ID NO: 2606700 - RNA, 21 nt, Human
uuuaaggaugcuuguacauaa

SEQ ID NO: 2606701 - RNA, 22 nt, Human
uuuaaggaugcuuguacauaau

SEQ ID NO: 2606702 - RNA, 18 nt, Human
uuuaaggcuaaaacuuaa

SEQ ID NO: 2606703 - RNA, 22 nt, Human
uuuaaggguuuguggaaaauga

SEQ ID NO: 2606704 - RNA, 16 nt, Human
uuuaaugaaagacugu

SEQ ID NO: 2606705 - RNA, 20 nt, Human
uuuaaggguuuguggaaaau

SEQ ID NO: 2606706 - RNA, 17 nt, Human
uuuaaggguuuguggaa

SEQ ID NO: 2606707 - RNA, 19 nt, Human
uuuaaggaugcuuguacau

SEQ ID NO: 2606708 - RNA, 12 nt, Human
uuuaaggaaaca

SEQ ID NO: 2606709 - RNA, 11 nt, Human
uuuaaggaaaa

SEQ ID NO: 2606710 - RNA, 14 nt, Human
uuuaagcuguaaaa

SEQ ID NO: 2606711 - RNA, 12 nt, Human
uuuaaggaauau

SEQ ID NO: 2606712 - RNA, 21 nt, Human
uuuaagcuguuacugucuuca

SEQ ID NO: 2606713 - RNA, 18 nt, Human
uuuaagcuguuuccauag

SEQ ID NO: 2606714 - RNA, 22 nt, Human
uuuaagcuuauuuaauuaaaaa

SEQ ID NO: 2606715 - RNA, 13 nt, Human
uuuaagcuguuuc

SEQ ID NO: 2606716 - RNA, 12 nt, Human
uuuaagcuguuu

SEQ ID NO: 2606717 - RNA, 14 nt, Human
uuuaagagacagcc

SEQ ID NO: 2606718 - RNA, 14 nt, Human
uuuaagaggcaggg

SEQ ID NO: 2606719 - RNA, 11 nt, Human
uuuaagcuguu

SEQ ID NO: 2606720 - RNA, 12 nt, Human
uuuaagagaaau

SEQ ID NO: 2606721 - RNA, 14 nt, Human
uuuaagacuguaau

SEQ ID NO: 2606722 - RNA, 19 nt, Human
uuuaagacguguuuguguu

SEQ ID NO: 2606723 - RNA, 17 nt, Human
uuuaagacguguuugug

SEQ ID NO: 2606724 - RNA, 22 nt, Human
augcacuguucccccugugcag

SEQ ID NO: 2606725 - RNA, 23 nt, Human
augcacuuuguucuggcucuucc

SEQ ID NO: 2606726 - RNA, 14 nt, Human
augcagaauacuuu

SEQ ID NO: 2606727 - RNA, 13 nt, Human
augcagaaggaag

SEQ ID NO: 2606728 - RNA, 14 nt, Human
augcagagagccau

SEQ ID NO: 2606729 - RNA, 13 nt, Human
augcagagagcca

SEQ ID NO: 2606730 - RNA, 22 nt, Human
augcagacaugagugcgugcuc

SEQ ID NO: 2606731 - RNA, 20 nt, Human
augcagaauguuuuuaaaau

SEQ ID NO: 2606732 - RNA, 18 nt, Human
uuuaaaaaaauuccaagu

SEQ ID NO: 2606733 - RNA, 23 nt, Human
augcagagcgccgugaguucuca

SEQ ID NO: 2606734 - RNA, 21 nt, Human
augcagagcgccgugaguucu

SEQ ID NO: 2606735 - RNA, 23 nt, Human
augcagagagccauuuugugaau

SEQ ID NO: 2606736 - RNA, 22 nt, Human
augcagagagccauuuugugaa

SEQ ID NO: 2606737 - RNA, 21 nt, Human
augcagagagccauuuuguga

SEQ ID NO: 2606738 - RNA, 20 nt, Human
augcagagagccauuuugug

SEQ ID NO: 2606739 - RNA, 19 nt, Human
augcagagagccauuuugu

SEQ ID NO: 2606740 - RNA, 16 nt, Human
augcagagagccauuu

SEQ ID NO: 2606741 - RNA, 17 nt, Human
augcagagguccacaac

SEQ ID NO: 2606742 - RNA, 18 nt, Human
augcagagguccacaaca

SEQ ID NO: 2606743 - RNA, 12 nt, Human
augcaaagcacu

SEQ ID NO: 2606744 - RNA, 13 nt, Human
augcaaagcacug

SEQ ID NO: 2606745 - RNA, 14 nt, Human
augcaaagcacuga

SEQ ID NO: 2606746 - RNA, 21 nt, Human
augcaccuugugucuguacac

SEQ ID NO: 2606747 - RNA, 19 nt, Human
augcaccuugugucuguac

SEQ ID NO: 2606748 - RNA, 16 nt, Human
augcaaagaggcaaga

SEQ ID NO: 2606749 - RNA, 21 nt, Human
augcacuguucccccugugca

SEQ ID NO: 2606750 - RNA, 20 nt, Human
augcacugugaaggacccuu

SEQ ID NO: 2606751 - RNA, 18 nt, Human
augcacugugaaggaccc

SEQ ID NO: 2606752 - RNA, 19 nt, Human
augcacugugaaggacccu

SEQ ID NO: 2606753 - RNA, 21 nt, Human
augcacuuuguucuggcucuu

SEQ ID NO: 2606754 - RNA, 16 nt, Human
augcacuaugaggaau

SEQ ID NO: 2606755 - RNA, 13 nt, Human
augcacuaugagg

SEQ ID NO: 2606756 - RNA, 16 nt, Human
augcacgaccuuggga

SEQ ID NO: 2606757 - RNA, 14 nt, Human
augcacgaccuugg

SEQ ID NO: 2606758 - RNA, 22 nt, Human
augcacgugugcacacacacca

SEQ ID NO: 2606759 - RNA, 12 nt, Human
augcacugugaa

SEQ ID NO: 2606760 - RNA, 13 nt, Human
augcacugugaag

SEQ ID NO: 2606761 - RNA, 14 nt, Human
augcacucagcucu

SEQ ID NO: 2606762 - RNA, 17 nt, Human
uuguucuugguuuguaa

SEQ ID NO: 2606763 - RNA, 19 nt, Human
uuguucuugguuuguaaau

SEQ ID NO: 2606764 - RNA, 17 nt, Human
uuguucuuaauugcacu

SEQ ID NO: 2606765 - RNA, 14 nt, Human
uuguucuucuuaaa

SEQ ID NO: 2606766 - RNA, 14 nt, Human
augauuguaaaaua

SEQ ID NO: 2606767 - RNA, 18 nt, Human
augauuuaaaacauguaa

SEQ ID NO: 2606768 - RNA, 14 nt, Human
augauuuaaaacau

SEQ ID NO: 2606769 - RNA, 13 nt, Human
augauuuaaaaca

SEQ ID NO: 2606770 - RNA, 18 nt, Human
augauuguaaaauagcuu

SEQ ID NO: 2606771 - RNA, 15 nt, Human
augauuguaaaauag

SEQ ID NO: 2606772 - RNA, 22 nt, Human
augauugugcacauacuugaga

SEQ ID NO: 2606773 - RNA, 16 nt, Human
augauuuaauaaaaua

SEQ ID NO: 2606774 - RNA, 14 nt, Human
augauuuaauaaaa

SEQ ID NO: 2606775 - RNA, 13 nt, Human
augauuuaauaaa

SEQ ID NO: 2606776 - RNA, 16 nt, Human
augauuuaaaagggaa

SEQ ID NO: 2606777 - RNA, 19 nt, Human
augauuuaauaaaauaauu

SEQ ID NO: 2606778 - RNA, 18 nt, Human
augauuuaauaaaauaau

SEQ ID NO: 2606779 - RNA, 13 nt, Human
augauuuauaguu

SEQ ID NO: 2606780 - RNA, 22 nt, Human
augauuuaauaaaauaauucua

SEQ ID NO: 2606781 - RNA, 13 nt, Human
augauuucauuca

SEQ ID NO: 2606782 - RNA, 14 nt, Human
augauuucauuuca

SEQ ID NO: 2606783 - RNA, 15 nt, Human
augauuuauaguuug

SEQ ID NO: 2606784 - RNA, 14 nt, Human
augauuuauaguuu

SEQ ID NO: 2606785 - RNA, 20 nt, Human
augauuuauaguuuguacau

SEQ ID NO: 2606786 - RNA, 17 nt, Human
augauuuccuugaaugu

SEQ ID NO: 2606787 - RNA, 18 nt, Human
augauuuccuugaaugug

SEQ ID NO: 2606788 - RNA, 19 nt, Human
augauuuccuugaaugugg

SEQ ID NO: 2606789 - RNA, 15 nt, Human
augauuuccuugaau

SEQ ID NO: 2606790 - RNA, 16 nt, Human
augauuuccuugaaug

SEQ ID NO: 2606791 - RNA, 13 nt, Human
augauuuccuuga

SEQ ID NO: 2606792 - RNA, 20 nt, Human
augauuuccaaagagaaaaa

SEQ ID NO: 2606793 - RNA, 15 nt, Human
augauuuuugucauc

SEQ ID NO: 2606794 - RNA, 22 nt, Human
augauuuuuagaugagauuguu

SEQ ID NO: 2606795 - RNA, 17 nt, Human
augauuuuuuuuucaua

SEQ ID NO: 2606796 - RNA, 21 nt, Human
augauuuuuuuuucauacacu

SEQ ID NO: 2606797 - RNA, 21 nt, Human
augcaaaauaauaccugucca

SEQ ID NO: 2606798 - RNA, 21 nt, Human
augcaaaaguucugacuugac

SEQ ID NO: 2606799 - RNA, 20 nt, Human
augcaaaaguucugacuuga

SEQ ID NO: 2606800 - RNA, 14 nt, Human
augcaaagaggcaa

SEQ ID NO: 2606801 - RNA, 15 nt, Human
augcaaagaggcaag

SEQ ID NO: 2606802 - RNA, 12 nt, Human
augcaaaaagaa

SEQ ID NO: 2606803 - RNA, 23 nt, Human
augcaaaagguucacuaaagcag

SEQ ID NO: 2606804 - RNA, 19 nt, Human
augcaaaaauuagccgggc

SEQ ID NO: 2606805 - RNA, 18 nt, Human
augaggucagagccugca

SEQ ID NO: 2606806 - RNA, 16 nt, Human
augaggucagagccug

SEQ ID NO: 2606807 - RNA, 21 nt, Human
augagguacaaccuguucugc

SEQ ID NO: 2606808 - RNA, 15 nt, Human
augaggucagagccu

SEQ ID NO: 2606809 - RNA, 20 nt, Human
augaggucagagccugcagu

SEQ ID NO: 2606810 - RNA, 19 nt, Human
augaggucagagccugcag

SEQ ID NO: 2606811 - RNA, 15 nt, Human
augaguaaaggagua

SEQ ID NO: 2606812 - RNA, 18 nt, Human
augagguugcuuacuaag

SEQ ID NO: 2606813 - RNA, 22 nt, Human
augagguucaacuguugauugc

SEQ ID NO: 2606814 - RNA, 22 nt, Human
augaggucagagccugcaguua

SEQ ID NO: 2606815 - RNA, 17 nt, Human
augagguacugagagug

SEQ ID NO: 2606816 - RNA, 18 nt, Human
augagguacugagaguga

SEQ ID NO: 2606817 - RNA, 15 nt, Human
augagguacugagag

SEQ ID NO: 2606818 - RNA, 23 nt, Human
uuguaauuuuuuuaauuuacaaa

SEQ ID NO: 2606819 - RNA, 22 nt, Human
uuguacaaaaaaaaaguuuuau

SEQ ID NO: 2606820 - RNA, 16 nt, Human
uuguacaaaaaaaaag

SEQ ID NO: 2606821 - RNA, 12 nt, Human
uuguacaaaaua

SEQ ID NO: 2606822 - RNA, 16 nt, Human
uuguagcauuucuuga

SEQ ID NO: 2606823 - RNA, 16 nt, Human
uuguagccuuccucca

SEQ ID NO: 2606824 - RNA, 22 nt, Human
uuguagccuuccuccacauccu

SEQ ID NO: 2606825 - RNA, 14 nt, Human
uuguccacccaccu

SEQ ID NO: 2606826 - RNA, 22 nt, Human
uuguccaauuguugacaguucu

SEQ ID NO: 2606827 - RNA, 19 nt, Human
uuguccaauuguugacagu

SEQ ID NO: 2606828 - RNA, 21 nt, Human
uuguccaacccgaggcccgca

SEQ ID NO: 2606829 - RNA, 21 nt, Human
uugucauauaagauucauauu

SEQ ID NO: 2606830 - RNA, 15 nt, Human
uugucagugacagua

SEQ ID NO: 2606831 - RNA, 15 nt, Human
uugucaguaucugua

SEQ ID NO: 2606832 - RNA, 13 nt, Human
uugucagagcugg

SEQ ID NO: 2606833 - RNA, 15 nt, Human
uugucagagcuggga

SEQ ID NO: 2606834 - RNA, 18 nt, Human
uugucagauaugauaugu

SEQ ID NO: 2606835 - RNA, 12 nt, Human
uugucagcuacu

SEQ ID NO: 2606836 - RNA, 12 nt, Human
uugucagacuuu

SEQ ID NO: 2606837 - RNA, 14 nt, Human
uugucagacuuuaa

SEQ ID NO: 2606838 - RNA, 18 nt, Human
uugucagacuuuaaagaa

SEQ ID NO: 2606839 - RNA, 20 nt, Human
uugucagacuuuaaagaaua

SEQ ID NO: 2606840 - RNA, 23 nt, Human
uugucacaauccuaacacauuau

SEQ ID NO: 2606841 - RNA, 19 nt, Human
uugucaauauuuaaacaug

SEQ ID NO: 2606842 - RNA, 19 nt, Human
uugucaauauuaaauacag

SEQ ID NO: 2606843 - RNA, 18 nt, Human
uugucaauauuaaauaca

SEQ ID NO: 2606844 - RNA, 14 nt, Human
uugucaauauuaaa

SEQ ID NO: 2606845 - RNA, 20 nt, Human
uugucaagucucugcuggcc

SEQ ID NO: 2606846 - RNA, 17 nt, Human
uugucacacacuuuggc

SEQ ID NO: 2606847 - RNA, 20 nt, Human
uugucaauaaaauccauaca

SEQ ID NO: 2606848 - RNA, 14 nt, Human
augaguuugcuuau

SEQ ID NO: 2606849 - RNA, 15 nt, Human
augaguuugcccugg

SEQ ID NO: 2606850 - RNA, 22 nt, Human
augaguuugcccugguuucacu

SEQ ID NO: 2606851 - RNA, 20 nt, Human
augaguuucauagcuaagaa

SEQ ID NO: 2606852 - RNA, 15 nt, Human
augaguuucauagcu

SEQ ID NO: 2606853 - RNA, 19 nt, Human
augaguuguuuucagacuc

SEQ ID NO: 2606854 - RNA, 20 nt, Human
augaguuguuuucagacuca

SEQ ID NO: 2606855 - RNA, 22 nt, Human
augaguuguuuucagacucaga

SEQ ID NO: 2606856 - RNA, 23 nt, Human
augaguuguuuucagacucagac

SEQ ID NO: 2606857 - RNA, 13 nt, Human
augaguccccugu

SEQ ID NO: 2606858 - RNA, 17 nt, Human
augagucaaugugcagu

SEQ ID NO: 2606859 - RNA, 16 nt, Human
augagucaaugugcag

SEQ ID NO: 2606860 - RNA, 19 nt, Human
augagucaaugugcagugu

SEQ ID NO: 2606861 - RNA, 15 nt, Human
augagucccaguggg

SEQ ID NO: 2606862 - RNA, 23 nt, Human
augaguccccuguuuguuucuga

SEQ ID NO: 2606863 - RNA, 18 nt, Human
augaguuggcugggaaua

SEQ ID NO: 2606864 - RNA, 16 nt, Human
augagucccaguggga

SEQ ID NO: 2606865 - RNA, 20 nt, Human
uuguccccaccgcagacagg

SEQ ID NO: 2606866 - RNA, 18 nt, Human
uuguccccaccgcagaca

SEQ ID NO: 2606867 - RNA, 13 nt, Human
uuguccauugucc

SEQ ID NO: 2606868 - RNA, 19 nt, Human
uuguccagcugagcgccag

SEQ ID NO: 2606869 - RNA, 19 nt, Human
uugucccacuaucugggug

SEQ ID NO: 2606870 - RNA, 12 nt, Human
uuguccccacac

SEQ ID NO: 2606871 - RNA, 11 nt, Human
uuguccccaca

SEQ ID NO: 2606872 - RNA, 23 nt, Human
uuguccccaaauccgaaccuccu

SEQ ID NO: 2606873 - RNA, 21 nt, Human
uugucccagaggcugccccac

SEQ ID NO: 2606874 - RNA, 23 nt, Human
uugucccauuucuaaaggccucu

SEQ ID NO: 2606875 - RNA, 13 nt, Human
uuguccagcgccu

SEQ ID NO: 2606876 - RNA, 20 nt, Human
uugucccacucaagccaagc

SEQ ID NO: 2606877 - RNA, 16 nt, Human
uuguccccgacccuug

SEQ ID NO: 2606878 - RNA, 15 nt, Human
uuguccccgacccuu

SEQ ID NO: 2606879 - RNA, 17 nt, Human
uuguccccacacuccua

SEQ ID NO: 2606880 - RNA, 15 nt, Human
uuguccccacacucc

SEQ ID NO: 2606881 - RNA, 11 nt, Human
uuguccccagu

SEQ ID NO: 2606882 - RNA, 18 nt, Human
uugugaggaagccgcugg

SEQ ID NO: 2606883 - RNA, 17 nt, Human
uugugaggaagccgcug

SEQ ID NO: 2606884 - RNA, 22 nt, Human
uugugaggaaagucauuggcuu

SEQ ID NO: 2606885 - RNA, 15 nt, Human
uugugauagcacuuu

SEQ ID NO: 2606886 - RNA, 18 nt, Human
uugugagccaccacgucc

SEQ ID NO: 2606887 - RNA, 20 nt, Human
uugugauacaaugcugugcc

SEQ ID NO: 2606888 - RNA, 21 nt, Human
uugugaauggauuggauuauu

SEQ ID NO: 2606889 - RNA, 14 nt, Human
uugugaauggauug

SEQ ID NO: 2606890 - RNA, 13 nt, Human
uugugaauggauu

SEQ ID NO: 2606891 - RNA, 15 nt, Human
uugugaauggauugg

SEQ ID NO: 2606892 - RNA, 19 nt, Human
uugugacagauuauacaga

SEQ ID NO: 2606893 - RNA, 13 nt, Human
uugugaggaagcc

SEQ ID NO: 2606894 - RNA, 17 nt, Human
uugugaggaaagucauu

SEQ ID NO: 2606895 - RNA, 16 nt, Human
uugugaggaaagucau

SEQ ID NO: 2606896 - RNA, 16 nt, Human
uugugaccaaguuaua

SEQ ID NO: 2606897 - RNA, 16 nt, Human
uugugaccugaaguuc

SEQ ID NO: 2606898 - RNA, 18 nt, Human
uugugaugugaguugcac

SEQ ID NO: 2606899 - RNA, 12 nt, Human
uugugauguguc

SEQ ID NO: 2606900 - RNA, 22 nt, Human
uugugaugucccaacuuguaaa

SEQ ID NO: 2606901 - RNA, 18 nt, Human
uugugaugucccaacuug

SEQ ID NO: 2606902 - RNA, 16 nt, Human
uugugauauggagccc

SEQ ID NO: 2606903 - RNA, 21 nt, Human
uugugauagcacuuucuacaa

SEQ ID NO: 2606904 - RNA, 20 nt, Human
uugugauagcuaacauuuua

SEQ ID NO: 2606905 - RNA, 16 nt, Human
uugugauagcacuuuc

SEQ ID NO: 2606906 - RNA, 19 nt, Human
uugugauagcacuuucuac

SEQ ID NO: 2606907 - RNA, 17 nt, Human
uugugauauggagcccu

SEQ ID NO: 2606908 - RNA, 23 nt, Human
uugugaucagaccauaauguuac

SEQ ID NO: 2606909 - RNA, 23 nt, Human
uugugauuauuucacuuuagaug

SEQ ID NO: 2606910 - RNA, 22 nt, Human
uugugauuauuucacuuuagau

SEQ ID NO: 2606911 - RNA, 18 nt, Human
uugugauuauuucacuuu

SEQ ID NO: 2606912 - RNA, 17 nt, Human
uugugauuauuucacuu

SEQ ID NO: 2606913 - RNA, 19 nt, Human
uugugauucaaucuguaaa

SEQ ID NO: 2606914 - RNA, 23 nt, Human
uugugauucaaucuguaaacugu

SEQ ID NO: 2606915 - RNA, 14 nt, Human
uugugauucugccu

SEQ ID NO: 2606916 - RNA, 15 nt, Human
uuguguacaguuauu

SEQ ID NO: 2606917 - RNA, 21 nt, Human
uuguguaauagaaaacugaaa

SEQ ID NO: 2606918 - RNA, 19 nt, Human
uuguguaauagaaaacuga

SEQ ID NO: 2606919 - RNA, 15 nt, Human
uuguguacagugugu

SEQ ID NO: 2606920 - RNA, 13 nt, Human
uuguucacacucu

SEQ ID NO: 2606921 - RNA, 22 nt, Human
uuguucaauaauaaauauuuuu

SEQ ID NO: 2606922 - RNA, 17 nt, Human
uugugucugcaggauug

SEQ ID NO: 2606923 - RNA, 13 nt, Human
uuguucaauuaga

SEQ ID NO: 2606924 - RNA, 15 nt, Human
uuguucaauuagaau

SEQ ID NO: 2606925 - RNA, 20 nt, Human
uuguucaauaauaaauauuu

SEQ ID NO: 2606926 - RNA, 15 nt, Human
uugugucuguacacg

SEQ ID NO: 2606927 - RNA, 14 nt, Human
uugugucuguacac

SEQ ID NO: 2606928 - RNA, 13 nt, Human
uugugucuguaca

SEQ ID NO: 2606929 - RNA, 13 nt, Human
uugugucugcagg

SEQ ID NO: 2606930 - RNA, 20 nt, Human
uuguguaucguaaccagcca

SEQ ID NO: 2606931 - RNA, 23 nt, Human
uuguguauccauuaucaugugua

SEQ ID NO: 2606932 - RNA, 22 nt, Human
uuguguauccauuaucaugugu

SEQ ID NO: 2606933 - RNA, 21 nt, Human
uuguguauccauuaucaugug

SEQ ID NO: 2606934 - RNA, 20 nt, Human
uuguguauccauuaucaugu

SEQ ID NO: 2606935 - RNA, 14 nt, Human
uuguguauuuaaca

SEQ ID NO: 2606936 - RNA, 13 nt, Human
uuguguauuuaac

SEQ ID NO: 2606937 - RNA, 19 nt, Human
uuguguauuuacgcuuuga

SEQ ID NO: 2606938 - RNA, 21 nt, Human
uuguguauuuaacagggaggg

SEQ ID NO: 2606939 - RNA, 18 nt, Human
uugugucccaugaucccu

SEQ ID NO: 2606940 - RNA, 21 nt, Human
uuguguaucguaaccagccag

SEQ ID NO: 2606941 - RNA, 19 nt, Human
uugugucauguuuaagaaa

SEQ ID NO: 2606942 - RNA, 20 nt, Human
uuguguauuuacgcuuugau

SEQ ID NO: 2606943 - RNA, 22 nt, Human
uuguguauuuacgcuuugauuc

SEQ ID NO: 2606944 - RNA, 23 nt, Human
uuguguauuuacgcuuugauuca

SEQ ID NO: 2606945 - RNA, 21 nt, Human
uugugucaaugggcaaugaca

SEQ ID NO: 2606946 - RNA, 23 nt, Human
auuaaucaaucaucugugugaaa

SEQ ID NO: 2606947 - RNA, 13 nt, Human
auuaaucacuauu

SEQ ID NO: 2606948 - RNA, 16 nt, Human
auuaaucacuauuguu

SEQ ID NO: 2606949 - RNA, 13 nt, Human
auuaaguuaucuu

SEQ ID NO: 2606950 - RNA, 24 nt, Human
auuaagucugugagauucauucau

SEQ ID NO: 2606951 - RNA, 16 nt, Human
auuaauauucauugua

SEQ ID NO: 2606952 - RNA, 17 nt, Human
auuaauauuccucaguu

SEQ ID NO: 2606953 - RNA, 20 nt, Human
auuaagcccucuuccaucau

SEQ ID NO: 2606954 - RNA, 17 nt, Human
auuaauauucauuguau

SEQ ID NO: 2606955 - RNA, 19 nt, Human
auuaauauucauuguauaa

SEQ ID NO: 2606956 - RNA, 14 nt, Human
auuaauauuuuaau

SEQ ID NO: 2606957 - RNA, 16 nt, Human
auuacuguaagaaaau

SEQ ID NO: 2606958 - RNA, 15 nt, Human
auuacuguaagaaaa

SEQ ID NO: 2606959 - RNA, 15 nt, Human
auuacugguccaaaa

SEQ ID NO: 2606960 - RNA, 13 nt, Human
auuacuguuuguc

SEQ ID NO: 2606961 - RNA, 15 nt, Human
auuaaucaugaaugu

SEQ ID NO: 2606962 - RNA, 19 nt, Human
auuaaucaucuauaaagaa

SEQ ID NO: 2606963 - RNA, 14 nt, Human
auuaaucaucuaua

SEQ ID NO: 2606964 - RNA, 18 nt, Human
auuacugucugguuuuaa

SEQ ID NO: 2606965 - RNA, 13 nt, Human
auuacuucugcua

SEQ ID NO: 2606966 - RNA, 12 nt, Human
auuacuucugcu

SEQ ID NO: 2606967 - RNA, 14 nt, Human
auuacuucugcuac

SEQ ID NO: 2606968 - RNA, 15 nt, Human
auuagacuccuccuc

SEQ ID NO: 2606969 - RNA, 16 nt, Human
auuagacuccuccucc

SEQ ID NO: 2606970 - RNA, 13 nt, Human
auuagacuccucc

SEQ ID NO: 2606971 - RNA, 22 nt, Human
auuagacuguaggaagaguagc

SEQ ID NO: 2606972 - RNA, 13 nt, Human
auuagagaagaga

SEQ ID NO: 2606973 - RNA, 20 nt, Human
uuuugcuuuuucugacucca

SEQ ID NO: 2606974 - RNA, 21 nt, Human
uuuugcuuucgaacugcuagu

SEQ ID NO: 2606975 - RNA, 21 nt, Human
uuuugcuuuuggcaaaacucu

SEQ ID NO: 2606976 - RNA, 17 nt, Human
uuuugcuuuuucugacu

SEQ ID NO: 2606977 - RNA, 21 nt, Human
uuuugcuguuguuucuaaaca

SEQ ID NO: 2606978 - RNA, 18 nt, Human
uuuugcuguuuccuuuua

SEQ ID NO: 2606979 - RNA, 14 nt, Human
auuaaaauccucaa

SEQ ID NO: 2606980 - RNA, 16 nt, Human
auuaaaauccucaauc

SEQ ID NO: 2606981 - RNA, 22 nt, Human
auuaaaauauggcuauaaauau

SEQ ID NO: 2606982 - RNA, 11 nt, Human
auuaaaaucuu

SEQ ID NO: 2606983 - RNA, 12 nt, Human
auuaaaaucuua

SEQ ID NO: 2606984 - RNA, 13 nt, Human
auuaaaaucuuaa

SEQ ID NO: 2606985 - RNA, 19 nt, Human
auuaaaaugauuguaaaau

SEQ ID NO: 2606986 - RNA, 18 nt, Human
auuaaaaugauuguaaaa

SEQ ID NO: 2606987 - RNA, 15 nt, Human
auuaaaaucuuaaac

SEQ ID NO: 2606988 - RNA, 13 nt, Human
auuaaaaugaaua

SEQ ID NO: 2606989 - RNA, 20 nt, Human
auuaaaaugauuguaaaaua

SEQ ID NO: 2606990 - RNA, 18 nt, Human
auuaaacagauuuuuaca

SEQ ID NO: 2606991 - RNA, 23 nt, Human
uuuugugcauuaucuagauacug

SEQ ID NO: 2606992 - RNA, 13 nt, Human
uuuugugagaugu

SEQ ID NO: 2606993 - RNA, 21 nt, Human
uuuuguggucauuaagcauug

SEQ ID NO: 2606994 - RNA, 13 nt, Human
uuuuguguacagu

SEQ ID NO: 2606995 - RNA, 14 nt, Human
uuuugugaagcaaa

SEQ ID NO: 2606996 - RNA, 15 nt, Human
uuuuggaggugcuua

SEQ ID NO: 2606997 - RNA, 13 nt, Human
uuuuggaggugcu

SEQ ID NO: 2606998 - RNA, 20 nt, Human
uuuuggagaagguuaucaaa

SEQ ID NO: 2606999 - RNA, 22 nt, Human
uuuugugaaaugaaaacaugua

SEQ ID NO: 2607000 - RNA, 24 nt, Human
uuuugugaaaugaaaacauguaau

SEQ ID NO: 2607001 - RNA, 23 nt, Human
uuuugugacuauauagagauguu

SEQ ID NO: 2607002 - RNA, 23 nt, Human
uuuugugaauggauuggauuauu

SEQ ID NO: 2607003 - RNA, 14 nt, Human
uuuugugaagacug

SEQ ID NO: 2607004 - RNA, 19 nt, Human
uuuugugaauggauuggau

SEQ ID NO: 2607005 - RNA, 14 nt, Human
uuuugugaacuuuu

SEQ ID NO: 2607006 - RNA, 21 nt, Human
uuuugugaaguuuaauugacu

SEQ ID NO: 2607007 - RNA, 15 nt, Human
uuuuuauauuuaguu

SEQ ID NO: 2607008 - RNA, 13 nt, Human
uuuuuacaauaaa

SEQ ID NO: 2607009 - RNA, 19 nt, Human
uuuuuacaaguuuuaaaua

SEQ ID NO: 2607010 - RNA, 14 nt, Human
uuuuuauauauaca

SEQ ID NO: 2607011 - RNA, 21 nt, Human
uuuuuaaugugcuguguaaag

SEQ ID NO: 2607012 - RNA, 20 nt, Human
uuuuuaaugugcuguguaaa

SEQ ID NO: 2607013 - RNA, 19 nt, Human
uuuuuaauucaccaaagua

SEQ ID NO: 2607014 - RNA, 12 nt, Human
uuuuuaauuauu

SEQ ID NO: 2607015 - RNA, 17 nt, Human
uuuuguuuuucauucag

SEQ ID NO: 2607016 - RNA, 20 nt, Human
uuuuuaauuguuguuucuuu

SEQ ID NO: 2607017 - RNA, 18 nt, Human
uuuuuaauuguuguuucu

SEQ ID NO: 2607018 - RNA, 23 nt, Human
uuuuuaauuuacaaaaauauaaa

SEQ ID NO: 2607019 - RNA, 21 nt, Human
uuuuuaauuuauuauugaaau

SEQ ID NO: 2607020 - RNA, 16 nt, Human
uuuuuaauuuauuuau

SEQ ID NO: 2607021 - RNA, 18 nt, Human
uuuuuacaaguuuuaaau

SEQ ID NO: 2607022 - RNA, 18 nt, Human
uuuuuaauuuuguauuuu

SEQ ID NO: 2607023 - RNA, 12 nt, Human
uuuuuaauuuug

SEQ ID NO: 2607024 - RNA, 15 nt, Human
uuuuguuuucauuau

SEQ ID NO: 2607025 - RNA, 15 nt, Human
uuuuguuuuggcuga

SEQ ID NO: 2607026 - RNA, 16 nt, Human
uuuuguuuuaaaauua

SEQ ID NO: 2607027 - RNA, 16 nt, Human
uuuuguuuuugucuua

SEQ ID NO: 2607028 - RNA, 23 nt, Human
uuuuguucgcauggucacacacu

SEQ ID NO: 2607029 - RNA, 19 nt, Human
uuuuguucuuaauugcacu

SEQ ID NO: 2607030 - RNA, 19 nt, Human
uuuuguuccccuccuccac

SEQ ID NO: 2607031 - RNA, 15 nt, Human
uuuuguuccccuccu

SEQ ID NO: 2607032 - RNA, 16 nt, Human
uuuuguuaccuuuaug

SEQ ID NO: 2607033 - RNA, 14 nt, Human
uuuuguuccccucc

SEQ ID NO: 2607034 - RNA, 10 nt, Human
uuuuuguaaa

SEQ ID NO: 2607035 - RNA, 18 nt, Human
uuuuugguugucaauauu

SEQ ID NO: 2607036 - RNA, 16 nt, Human
uuuuuguagccuuccu

SEQ ID NO: 2607037 - RNA, 14 nt, Human
uuuuuguaaagugu

SEQ ID NO: 2607038 - RNA, 20 nt, Human
uuuuuggaggugcuuaagca

SEQ ID NO: 2607039 - RNA, 20 nt, Human
uuuuuggcuuuagacacugg

SEQ ID NO: 2607040 - RNA, 22 nt, Human
uuuuugggaaaagaaaagucaa

SEQ ID NO: 2607041 - RNA, 12 nt, Human
uuuuuggggaua

SEQ ID NO: 2607042 - RNA, 16 nt, Human
uuuuuggggauaugcu

SEQ ID NO: 2607043 - RNA, 18 nt, Human
auuaaguacuauguauca

SEQ ID NO: 2607044 - RNA, 17 nt, Human
auuaaguaucugacauc

SEQ ID NO: 2607045 - RNA, 19 nt, Human
auuaaguacuauguaucaa

SEQ ID NO: 2607046 - RNA, 15 nt, Human
auuaaggauuuuaug

SEQ ID NO: 2607047 - RNA, 17 nt, Human
auuaaggauuuuaugcu

SEQ ID NO: 2607048 - RNA, 20 nt, Human
auuaaggauuuuaugcuuua

SEQ ID NO: 2607049 - RNA, 13 nt, Human
auuaaggaagaca

SEQ ID NO: 2607050 - RNA, 17 nt, Human
auuaagcccucuuccau

SEQ ID NO: 2607051 - RNA, 16 nt, Human
auuaagcccucuucca

SEQ ID NO: 2607052 - RNA, 15 nt, Human
auuaagccuuccaca

SEQ ID NO: 2607053 - RNA, 11 nt, Human
uuuuuguauuu

SEQ ID NO: 2607054 - RNA, 12 nt, Human
uuuuuguauguu

SEQ ID NO: 2607055 - RNA, 20 nt, Human
uuuuugaggcuaugaauaua

SEQ ID NO: 2607056 - RNA, 15 nt, Human
uuuuugcaagugaag

SEQ ID NO: 2607057 - RNA, 18 nt, Human
uuuuugcaagugaagguu

SEQ ID NO: 2607058 - RNA, 21 nt, Human
uuuuugauaaaguuucucaga

SEQ ID NO: 2607059 - RNA, 14 nt, Human
uuuuugauagcuuu

SEQ ID NO: 2607060 - RNA, 17 nt, Human
uuuuugcauuuaaaaca

SEQ ID NO: 2607061 - RNA, 14 nt, Human
uuuuugccuucauu

SEQ ID NO: 2607062 - RNA, 21 nt, Human
uuuuugcauggcacuugcauc

SEQ ID NO: 2607063 - RNA, 20 nt, Human
uuuuugcaccccaugcuguu

SEQ ID NO: 2607064 - RNA, 19 nt, Human
uuuuugcaccccaugcugu

SEQ ID NO: 2607065 - RNA, 20 nt, Human
uuuuugcacauguuuccucu

SEQ ID NO: 2607066 - RNA, 23 nt, Human
uuuuugcaccccaugcuguugau

SEQ ID NO: 2607067 - RNA, 22 nt, Human
uuuuugcaccccaugcuguuga

SEQ ID NO: 2607068 - RNA, 18 nt, Human
uuuuugcaggagcaguau

SEQ ID NO: 2607069 - RNA, 22 nt, Human
uuuuuggaagaggacuccuuaa

SEQ ID NO: 2607070 - RNA, 15 nt, Human
uuuuuggaggugcuu

SEQ ID NO: 2607071 - RNA, 22 nt, Human
uuuuuggagggguuuaugcuca

SEQ ID NO: 2607072 - RNA, 21 nt, Human
uuuuuggagaagguuaucaaa

SEQ ID NO: 2607073 - RNA, 15 nt, Human
uuuuugaagcuguau

SEQ ID NO: 2607074 - RNA, 24 nt, Human
uuuuugaaguguaggcagacacag

SEQ ID NO: 2607075 - RNA, 14 nt, Human
uuuuugaaguguag

SEQ ID NO: 2607076 - RNA, 12 nt, Human
uuuuugaagugu

SEQ ID NO: 2607077 - RNA, 11 nt, Human
uuuuugaagug

SEQ ID NO: 2607078 - RNA, 12 nt, Human
uuuuucaauuaa

SEQ ID NO: 2607079 - RNA, 22 nt, Human
uuuuugaaggcagaaagcaaaa

SEQ ID NO: 2607080 - RNA, 23 nt, Human
uuuuugaaggcagaaagcaaaau

SEQ ID NO: 2607081 - RNA, 19 nt, Human
uuuuucaaagauguguugc

SEQ ID NO: 2607082 - RNA, 16 nt, Human
uuuuucaauauuuauu

SEQ ID NO: 2607083 - RNA, 17 nt, Human
uuuuuauauuugaaaua

SEQ ID NO: 2607084 - RNA, 12 nt, Human
uuuuuauuucug

SEQ ID NO: 2607085 - RNA, 19 nt, Human
uuuuuauuuguuugugcau

SEQ ID NO: 2607086 - RNA, 15 nt, Human
auucagccuggcuuc

SEQ ID NO: 2607087 - RNA, 19 nt, Human
auuauuuuuucagaccgaa

SEQ ID NO: 2607088 - RNA, 17 nt, Human
auuauuuuuucagaccg

SEQ ID NO: 2607089 - RNA, 16 nt, Human
auucaaaaaguguuua

SEQ ID NO: 2607090 - RNA, 14 nt, Human
auucaaaaaguguu

SEQ ID NO: 2607091 - RNA, 17 nt, Human
auucaaaaaguguuuau

SEQ ID NO: 2607092 - RNA, 13 nt, Human
auuauuuaauaaa

SEQ ID NO: 2607093 - RNA, 12 nt, Human
auuauuuaauaa

SEQ ID NO: 2607094 - RNA, 22 nt, Human
auuauuuuuccacuuuguucuu

SEQ ID NO: 2607095 - RNA, 19 nt, Human
auuauuuuuccacuuuguu

SEQ ID NO: 2607096 - RNA, 21 nt, Human
auuauuuuuucagaccgaaaa

SEQ ID NO: 2607097 - RNA, 16 nt, Human
auuauuuuuucagacc

SEQ ID NO: 2607098 - RNA, 15 nt, Human
auuauuuuuucagac

SEQ ID NO: 2607099 - RNA, 14 nt, Human
auuauuuuuucaga

SEQ ID NO: 2607100 - RNA, 13 nt, Human
auuauuuuuucag

SEQ ID NO: 2607101 - RNA, 12 nt, Human
auuauuuaaaca

SEQ ID NO: 2607102 - RNA, 11 nt, Human
auuauuuaaac

SEQ ID NO: 2607103 - RNA, 19 nt, Human
auuauugugauuucccgug

SEQ ID NO: 2607104 - RNA, 16 nt, Human
auuauuguauuuauuc

SEQ ID NO: 2607105 - RNA, 13 nt, Human
auuauuguauuua

SEQ ID NO: 2607106 - RNA, 18 nt, Human
auuauuguugcauuaaaa

SEQ ID NO: 2607107 - RNA, 23 nt, Human
auuauuguguguuauuuaaauga

SEQ ID NO: 2607108 - RNA, 18 nt, Human
auuauuggaauuaaccug

SEQ ID NO: 2607109 - RNA, 14 nt, Human
auuauuggaauuaa

SEQ ID NO: 2607110 - RNA, 13 nt, Human
auuauugcuguug

SEQ ID NO: 2607111 - RNA, 15 nt, Human
auuauucagugucac

SEQ ID NO: 2607112 - RNA, 12 nt, Human
auuauugcauua

SEQ ID NO: 2607113 - RNA, 21 nt, Human
auucacucauacaucuggccg

SEQ ID NO: 2607114 - RNA, 14 nt, Human
auucacuauuggcu

SEQ ID NO: 2607115 - RNA, 20 nt, Human
auucacuauuggcugggagu

SEQ ID NO: 2607116 - RNA, 13 nt, Human
auucacucccaca

SEQ ID NO: 2607117 - RNA, 12 nt, Human
auucacucccac

SEQ ID NO: 2607118 - RNA, 15 nt, Human
auucacucuuccaga

SEQ ID NO: 2607119 - RNA, 23 nt, Human
auucaccuuccagugucucggag

SEQ ID NO: 2607120 - RNA, 16 nt, Human
auucacccccaaacag

SEQ ID NO: 2607121 - RNA, 16 nt, Human
auucacccccuuuccu

SEQ ID NO: 2607122 - RNA, 13 nt, Human
auucaccugagca

SEQ ID NO: 2607123 - RNA, 19 nt, Human
auucaccugccccaacucu

SEQ ID NO: 2607124 - RNA, 22 nt, Human
auucacccccuuuccuggacac

SEQ ID NO: 2607125 - RNA, 19 nt, Human
auucacccagacagcuccc

SEQ ID NO: 2607126 - RNA, 14 nt, Human
auucacccagacag

SEQ ID NO: 2607127 - RNA, 22 nt, Human
auucaaacagucucaggaaauc

SEQ ID NO: 2607128 - RNA, 17 nt, Human
auucaaacuggggccuc

SEQ ID NO: 2607129 - RNA, 19 nt, Human
auucaaacuggggccucca

SEQ ID NO: 2607130 - RNA, 17 nt, Human
auucaaagcucuauuaa

SEQ ID NO: 2607131 - RNA, 19 nt, Human
auucaaagcaccaaaauaa

SEQ ID NO: 2607132 - RNA, 22 nt, Human
auucaaacuggggccuccagaa

SEQ ID NO: 2607133 - RNA, 13 nt, Human
auuauucaguguc

SEQ ID NO: 2607134 - RNA, 14 nt, Human
auuauucaguguca

SEQ ID NO: 2607135 - RNA, 20 nt, Human
auuauauggcuugaguuuaa

SEQ ID NO: 2607136 - RNA, 16 nt, Human
auuauaucuaauuauu

SEQ ID NO: 2607137 - RNA, 19 nt, Human
auuauaucaauuuccucau

SEQ ID NO: 2607138 - RNA, 15 nt, Human
auuauaacuuaaaaa

SEQ ID NO: 2607139 - RNA, 22 nt, Human
auuauaacuuaaaaaaaugaca

SEQ ID NO: 2607140 - RNA, 15 nt, Human
auuauaacuuaaaau

SEQ ID NO: 2607141 - RNA, 15 nt, Human
auuauaaauuauguu

SEQ ID NO: 2607142 - RNA, 21 nt, Human
auuauaacugaaggagaaggu

SEQ ID NO: 2607143 - RNA, 13 nt, Human
auuaguuuugauu

SEQ ID NO: 2607144 - RNA, 17 nt, Human
auuccaagugauugaaa

SEQ ID NO: 2607145 - RNA, 16 nt, Human
auuccagaauaucugg

SEQ ID NO: 2607146 - RNA, 17 nt, Human
auuccaauaugaugacu

SEQ ID NO: 2607147 - RNA, 18 nt, Human
auuccaauaugaugacuc

SEQ ID NO: 2607148 - RNA, 12 nt, Human
auuccagaauau

SEQ ID NO: 2607149 - RNA, 12 nt, Human
auuccacagcug

SEQ ID NO: 2607150 - RNA, 15 nt, Human
auuccagaaugcugu

SEQ ID NO: 2607151 - RNA, 19 nt, Human
auuccagaaugcuguacau

SEQ ID NO: 2607152 - RNA, 14 nt, Human
auuccagaaugcug

SEQ ID NO: 2607153 - RNA, 18 nt, Human
auuccagaauaucuggga

SEQ ID NO: 2607154 - RNA, 20 nt, Human
auuccagaaugcuguacauc

SEQ ID NO: 2607155 - RNA, 23 nt, Human
auuccagaaugcuguacaucuau

SEQ ID NO: 2607156 - RNA, 17 nt, Human
auuccagaccugaagaa

SEQ ID NO: 2607157 - RNA, 18 nt, Human
auuccagaccugaagaau

SEQ ID NO: 2607158 - RNA, 23 nt, Human
auuccagacugcuuccaauuuuc

SEQ ID NO: 2607159 - RNA, 18 nt, Human
auuccagagaguggcucc

SEQ ID NO: 2607160 - RNA, 17 nt, Human
auucccaagcucugcuc

SEQ ID NO: 2607161 - RNA, 19 nt, Human
auucccaagcucugcuccu

SEQ ID NO: 2607162 - RNA, 18 nt, Human
auucccaagcucugcucc

SEQ ID NO: 2607163 - RNA, 20 nt, Human
auuccccaggaggccagccu

SEQ ID NO: 2607164 - RNA, 19 nt, Human
auucccacaccuccacagu

SEQ ID NO: 2607165 - RNA, 18 nt, Human
auucccacaccuccacag

SEQ ID NO: 2607166 - RNA, 18 nt, Human
auuccagagacaucagca

SEQ ID NO: 2607167 - RNA, 22 nt, Human
auuccccaggaggccagccuug

SEQ ID NO: 2607168 - RNA, 14 nt, Human
auuccccauucuuc

SEQ ID NO: 2607169 - RNA, 15 nt, Human
auucccaccaagguc

SEQ ID NO: 2607170 - RNA, 14 nt, Human
auucccaccaaggu

SEQ ID NO: 2607171 - RNA, 21 nt, Human
auuccccagguggcugaccca

SEQ ID NO: 2607172 - RNA, 22 nt, Human
auuccccagguggcugacccag

SEQ ID NO: 2607173 - RNA, 19 nt, Human
auuccuaaacuaucuuuuu

SEQ ID NO: 2607174 - RNA, 17 nt, Human
auuccuaaacuaucuuu

SEQ ID NO: 2607175 - RNA, 15 nt, Human
auuccuaaacuaucu

SEQ ID NO: 2607176 - RNA, 20 nt, Human
auuccccauugccuccuccu

SEQ ID NO: 2607177 - RNA, 17 nt, Human
auuccccauugccuccu

SEQ ID NO: 2607178 - RNA, 13 nt, Human
auuccccauugcc

SEQ ID NO: 2607179 - RNA, 15 nt, Human
auuccccauucuucc

SEQ ID NO: 2607180 - RNA, 20 nt, Human
auuccuaacacagcaugugu

SEQ ID NO: 2607181 - RNA, 20 nt, Human
auuccuaaacuaucuuuuuu

SEQ ID NO: 2607182 - RNA, 18 nt, Human
auuccuacaaagauguuu

SEQ ID NO: 2607183 - RNA, 13 nt, Human
auucagguauguu

SEQ ID NO: 2607184 - RNA, 18 nt, Human
auucagguauguugccuu

SEQ ID NO: 2607185 - RNA, 15 nt, Human
auucagugagggucu

SEQ ID NO: 2607186 - RNA, 17 nt, Human
auucagguauguugccu

SEQ ID NO: 2607187 - RNA, 16 nt, Human
auucagugagggucuu

SEQ ID NO: 2607188 - RNA, 21 nt, Human
auucagugagggucuucuuac

SEQ ID NO: 2607189 - RNA, 22 nt, Human
auucaggagaguagaacagaua

SEQ ID NO: 2607190 - RNA, 21 nt, Human
auucaggagaguagaacagau

SEQ ID NO: 2607191 - RNA, 22 nt, Human
auucaggacuuaacggcuccag

SEQ ID NO: 2607192 - RNA, 11 nt, Human
auucaggcugc

SEQ ID NO: 2607193 - RNA, 13 nt, Human
auucaggcugcuu

SEQ ID NO: 2607194 - RNA, 16 nt, Human
auucaggcugcuuggg

SEQ ID NO: 2607195 - RNA, 17 nt, Human
auucagugauuacuguc

SEQ ID NO: 2607196 - RNA, 19 nt, Human
auucagugauuacugucaa

SEQ ID NO: 2607197 - RNA, 15 nt, Human
auucagugauuacug

SEQ ID NO: 2607198 - RNA, 17 nt, Human
auucagugcuguggccu

SEQ ID NO: 2607199 - RNA, 20 nt, Human
auucagugcuguggccuggg

SEQ ID NO: 2607200 - RNA, 19 nt, Human
auucaguggcgagaaauaa

SEQ ID NO: 2607201 - RNA, 14 nt, Human
auucagugcuucuu

SEQ ID NO: 2607202 - RNA, 17 nt, Human
auucagugcuucuuaaa

SEQ ID NO: 2607203 - RNA, 21 nt, Human
auucagugcuguggccugggc

SEQ ID NO: 2607204 - RNA, 22 nt, Human
auucagugcuguggccugggca

SEQ ID NO: 2607205 - RNA, 14 nt, Human
auucagugucacug

SEQ ID NO: 2607206 - RNA, 19 nt, Human
auucaguguuaaaugugau

SEQ ID NO: 2607207 - RNA, 16 nt, Human
auucaguucccagaau

SEQ ID NO: 2607208 - RNA, 19 nt, Human
auucaguucccagaaucaa

SEQ ID NO: 2607209 - RNA, 17 nt, Human
auucaguucccagaauc

SEQ ID NO: 2607210 - RNA, 19 nt, Human
auucagugcuucuuaaaga

SEQ ID NO: 2607211 - RNA, 17 nt, Human
auucagauuguuaucua

SEQ ID NO: 2607212 - RNA, 19 nt, Human
auucagauuuuaaaaaguc

SEQ ID NO: 2607213 - RNA, 14 nt, Human
auucagauuuuaaa

SEQ ID NO: 2607214 - RNA, 17 nt, Human
auucagcacugauuuca

SEQ ID NO: 2607215 - RNA, 14 nt, Human
auucagcacugauu

SEQ ID NO: 2607216 - RNA, 14 nt, Human
auucagccuggcuu

SEQ ID NO: 2607217 - RNA, 21 nt, Human
auucagcacugauuucacaac

SEQ ID NO: 2607218 - RNA, 20 nt, Human
auucagcacugauuucacaa

SEQ ID NO: 2607219 - RNA, 19 nt, Human
auucagcacugauuucaca

SEQ ID NO: 2607220 - RNA, 21 nt, Human
auucaggacuuaacggcucca

SEQ ID NO: 2607221 - RNA, 19 nt, Human
auucacucuuccagaaucc

SEQ ID NO: 2607222 - RNA, 21 nt, Human
auucacucccacacccaagaa

SEQ ID NO: 2607223 - RNA, 15 nt, Human
auucacugcccccag

SEQ ID NO: 2607224 - RNA, 20 nt, Human
auucacugcccccagcucuu

SEQ ID NO: 2607225 - RNA, 16 nt, Human
auucacuuauauguuc

SEQ ID NO: 2607226 - RNA, 12 nt, Human
auucagaaaaaa

SEQ ID NO: 2607227 - RNA, 14 nt, Human
auucacuugcauuu

SEQ ID NO: 2607228 - RNA, 23 nt, Human
augugauauauaaguguacauau

SEQ ID NO: 2607229 - RNA, 22 nt, Human
augugauauauaaguguacaua

SEQ ID NO: 2607230 - RNA, 21 nt, Human
augugauauauaaguguacau

SEQ ID NO: 2607231 - RNA, 19 nt, Human
augugauauauaaguguac

SEQ ID NO: 2607232 - RNA, 17 nt, Human
augugauauauaagugu

SEQ ID NO: 2607233 - RNA, 16 nt, Human
augugauauauaagug

SEQ ID NO: 2607234 - RNA, 23 nt, Human
augugauccuuuuauguuauuua

SEQ ID NO: 2607235 - RNA, 21 nt, Human
augugauccuuuuauguuauu

SEQ ID NO: 2607236 - RNA, 18 nt, Human
augugauccuuuuauguu

SEQ ID NO: 2607237 - RNA, 17 nt, Human
augugauccuuuuaugu

SEQ ID NO: 2607238 - RNA, 16 nt, Human
augugauccuuuuaug

SEQ ID NO: 2607239 - RNA, 18 nt, Human
augugauccuuuuggagu

SEQ ID NO: 2607240 - RNA, 17 nt, Human
augugaugaauacugua

SEQ ID NO: 2607241 - RNA, 19 nt, Human
augugaugaauacuguauu

SEQ ID NO: 2607242 - RNA, 21 nt, Human
uuuguaagaguguagaagcau

SEQ ID NO: 2607243 - RNA, 19 nt, Human
uuuguaagaguguagaagc

SEQ ID NO: 2607244 - RNA, 18 nt, Human
uuuguaagaguguagaag

SEQ ID NO: 2607245 - RNA, 17 nt, Human
uuuguaagaguguagaa

SEQ ID NO: 2607246 - RNA, 16 nt, Human
uuuguaagaguguaga

SEQ ID NO: 2607247 - RNA, 12 nt, Human
uuuguaagagug

SEQ ID NO: 2607248 - RNA, 14 nt, Human
uuuguaagaugcug

SEQ ID NO: 2607249 - RNA, 22 nt, Human
uuuguaagaguguagaagcauu

SEQ ID NO: 2607250 - RNA, 23 nt, Human
uuuguaagaguguagaagcauuc

SEQ ID NO: 2607251 - RNA, 15 nt, Human
uuuguaagaugcugg

SEQ ID NO: 2607252 - RNA, 22 nt, Human
uuuguaaguuagguaacuguau

SEQ ID NO: 2607253 - RNA, 13 nt, Human
uuuguaaguuuau

SEQ ID NO: 2607254 - RNA, 16 nt, Human
uuuguaauuuuuuuau

SEQ ID NO: 2607255 - RNA, 23 nt, Human
uuuguacaaaaaaaaaguuuuau

SEQ ID NO: 2607256 - RNA, 14 nt, Human
uuuguaaguuucag

SEQ ID NO: 2607257 - RNA, 21 nt, Human
uuuguaaguuuaugucuaaag

SEQ ID NO: 2607258 - RNA, 21 nt, Human
uuuguaaguuucaggugacau

SEQ ID NO: 2607259 - RNA, 14 nt, Human
uuuguacagacaac

SEQ ID NO: 2607260 - RNA, 17 nt, Human
uuuguacaguuugcugu

SEQ ID NO: 2607261 - RNA, 19 nt, Human
uuuguacagacguaugcuu

SEQ ID NO: 2607262 - RNA, 22 nt, Human
uuuguacagacguaugcuuauu

SEQ ID NO: 2607263 - RNA, 21 nt, Human
uuuguacaauugaacuuaaau

SEQ ID NO: 2607264 - RNA, 10 nt, Human
uuuguacaga

SEQ ID NO: 2607265 - RNA, 18 nt, Human
uuuguacagacguaugcu

SEQ ID NO: 2607266 - RNA, 17 nt, Human
uuuguaguguuggagaa

SEQ ID NO: 2607267 - RNA, 19 nt, Human
uuuguacauaguuauuuau

SEQ ID NO: 2607268 - RNA, 18 nt, Human
uuuguacaguuugcugua

SEQ ID NO: 2607269 - RNA, 22 nt, Human
uuugugauacaaugcugugccc

SEQ ID NO: 2607270 - RNA, 19 nt, Human
uuugucuuauauauauuuc

SEQ ID NO: 2607271 - RNA, 14 nt, Human
uuugucuuauauau

SEQ ID NO: 2607272 - RNA, 20 nt, Human
uuugucuuauauauauuucu

SEQ ID NO: 2607273 - RNA, 15 nt, Human
uuugugauacaaugc

SEQ ID NO: 2607274 - RNA, 19 nt, Human
uuugugcauuaucuagaua

SEQ ID NO: 2607275 - RNA, 20 nt, Human
uuugugauauggagcccugu

SEQ ID NO: 2607276 - RNA, 19 nt, Human
uuugugauauggagcccug

SEQ ID NO: 2607277 - RNA, 15 nt, Human
uuugugauucaaucu

SEQ ID NO: 2607278 - RNA, 16 nt, Human
uuugugauacaaugcu

SEQ ID NO: 2607279 - RNA, 23 nt, Human
uuugucuuaaaaaguggaaaaau

SEQ ID NO: 2607280 - RNA, 13 nt, Human
uuugucuuaaaaa

SEQ ID NO: 2607281 - RNA, 14 nt, Human
uuugucuuaaaaag

SEQ ID NO: 2607282 - RNA, 23 nt, Human
uuugugcuaucagacuguaggau

SEQ ID NO: 2607283 - RNA, 22 nt, Human
uuugugcugaauguugggacug

SEQ ID NO: 2607284 - RNA, 13 nt, Human
uuugugccagccg

SEQ ID NO: 2607285 - RNA, 13 nt, Human
uuuguuucauauu

SEQ ID NO: 2607286 - RNA, 22 nt, Human
uuugugcauuaucuagauacug

SEQ ID NO: 2607287 - RNA, 17 nt, Human
uuugugauuuagaacug

SEQ ID NO: 2607288 - RNA, 20 nt, Human
uuugugauucaaucuguaaa

SEQ ID NO: 2607289 - RNA, 14 nt, Human
uuuguuucugaaag

SEQ ID NO: 2607290 - RNA, 14 nt, Human
uuuguuuccuuugu

SEQ ID NO: 2607291 - RNA, 15 nt, Human
uuuguuuccuuuguu

SEQ ID NO: 2607292 - RNA, 18 nt, Human
uuuguuucucccccuggg

SEQ ID NO: 2607293 - RNA, 15 nt, Human
uuuguuucuaccucc

SEQ ID NO: 2607294 - RNA, 16 nt, Human
uuuguuucugaaaggg

SEQ ID NO: 2607295 - RNA, 15 nt, Human
uuuguuuuaaaauua

SEQ ID NO: 2607296 - RNA, 13 nt, Human
augugagaccauu

SEQ ID NO: 2607297 - RNA, 14 nt, Human
augugagacugguu

SEQ ID NO: 2607298 - RNA, 18 nt, Human
augugacuuugcaucagc

SEQ ID NO: 2607299 - RNA, 14 nt, Human
augugagagaaagu

SEQ ID NO: 2607300 - RNA, 16 nt, Human
augugagagguuugac

SEQ ID NO: 2607301 - RNA, 15 nt, Human
augugagagaaagug

SEQ ID NO: 2607302 - RNA, 15 nt, Human
augugauauauaagu

SEQ ID NO: 2607303 - RNA, 13 nt, Human
augugauauauaa

SEQ ID NO: 2607304 - RNA, 21 nt, Human
augugauacccauagcuucca

SEQ ID NO: 2607305 - RNA, 21 nt, Human
augugauaaguucuuaugcca

SEQ ID NO: 2607306 - RNA, 20 nt, Human
augugauaaggaucagaaca

SEQ ID NO: 2607307 - RNA, 17 nt, Human
augugagagguuugacu

SEQ ID NO: 2607308 - RNA, 23 nt, Human
augucgucaaagcugaaauggac

SEQ ID NO: 2607309 - RNA, 21 nt, Human
augucgugaccaacuagacau

SEQ ID NO: 2607310 - RNA, 20 nt, Human
augucgugaccaacuagaca

SEQ ID NO: 2607311 - RNA, 19 nt, Human
augucgugaccaacuagac

SEQ ID NO: 2607312 - RNA, 13 nt, Human
augucggccucua

SEQ ID NO: 2607313 - RNA, 17 nt, Human
auguccuccuuguucua

SEQ ID NO: 2607314 - RNA, 15 nt, Human
augucgccucugcau

SEQ ID NO: 2607315 - RNA, 23 nt, Human
auguccuccagaagccucuggcu

SEQ ID NO: 2607316 - RNA, 20 nt, Human
auguccuccagaagccucug

SEQ ID NO: 2607317 - RNA, 22 nt, Human
auguccuccagaagccucuggc

SEQ ID NO: 2607318 - RNA, 22 nt, Human
augucgugaccaacuagacauu

SEQ ID NO: 2607319 - RNA, 13 nt, Human
augucuaaagagc

SEQ ID NO: 2607320 - RNA, 11 nt, Human
augucuaaaga

SEQ ID NO: 2607321 - RNA, 18 nt, Human
augugacaauuuuguaca

SEQ ID NO: 2607322 - RNA, 20 nt, Human
augugacaauuuuguacaaa

SEQ ID NO: 2607323 - RNA, 21 nt, Human
augugacaauuuuguacaaau

SEQ ID NO: 2607324 - RNA, 16 nt, Human
augugacagguaaacu

SEQ ID NO: 2607325 - RNA, 11 nt, Human
augugacacau

SEQ ID NO: 2607326 - RNA, 17 nt, Human
augucuaaaugcugaaa

SEQ ID NO: 2607327 - RNA, 19 nt, Human
augugacaugcgggcuggg

SEQ ID NO: 2607328 - RNA, 19 nt, Human
augugacauuuauauauug

SEQ ID NO: 2607329 - RNA, 14 nt, Human
augugacauuuaua

SEQ ID NO: 2607330 - RNA, 13 nt, Human
augugacauuuau

SEQ ID NO: 2607331 - RNA, 17 nt, Human
auguccaagaagcccag

SEQ ID NO: 2607332 - RNA, 16 nt, Human
auguccaagaagccca

SEQ ID NO: 2607333 - RNA, 21 nt, Human
auguccuaaggacacacuaau

SEQ ID NO: 2607334 - RNA, 19 nt, Human
auguccuauauuggcuaaa

SEQ ID NO: 2607335 - RNA, 15 nt, Human
auguccucaccacau

SEQ ID NO: 2607336 - RNA, 17 nt, Human
auguccucaccacaugc

SEQ ID NO: 2607337 - RNA, 16 nt, Human
auguccuccagaagcc

SEQ ID NO: 2607338 - RNA, 18 nt, Human
auguccuccagaagccuc

SEQ ID NO: 2607339 - RNA, 19 nt, Human
auguccuccagaagccucu

SEQ ID NO: 2607340 - RNA, 14 nt, Human
augucccuugcugu

SEQ ID NO: 2607341 - RNA, 13 nt, Human
augucauuuccuu

SEQ ID NO: 2607342 - RNA, 20 nt, Human
auguccuaaggacacacuaa

SEQ ID NO: 2607343 - RNA, 19 nt, Human
auguccuaaggacacacua

SEQ ID NO: 2607344 - RNA, 18 nt, Human
auguccuaaggacacacu

SEQ ID NO: 2607345 - RNA, 17 nt, Human
auguccuaaggacacac

SEQ ID NO: 2607346 - RNA, 20 nt, Human
augucccuuucuuggccagu

SEQ ID NO: 2607347 - RNA, 16 nt, Human
auguccuaaggacaca

SEQ ID NO: 2607348 - RNA, 16 nt, Human
augucccuuucuuggc

SEQ ID NO: 2607349 - RNA, 15 nt, Human
augucauuucauuuc

SEQ ID NO: 2607350 - RNA, 18 nt, Human
augucauuucauuuccua

SEQ ID NO: 2607351 - RNA, 13 nt, Human
augucauuaaaug

SEQ ID NO: 2607352 - RNA, 17 nt, Human
augucauuaaaauaaau

SEQ ID NO: 2607353 - RNA, 18 nt, Human
augucauugaguaauaua

SEQ ID NO: 2607354 - RNA, 20 nt, Human
augucauuaaaauaaauaaa

SEQ ID NO: 2607355 - RNA, 17 nt, Human
augucauauauuacuag

SEQ ID NO: 2607356 - RNA, 21 nt, Human
augucauguguacaaaaguuu

SEQ ID NO: 2607357 - RNA, 15 nt, Human
augucaucauacaug

SEQ ID NO: 2607358 - RNA, 14 nt, Human
augucaucauacau

SEQ ID NO: 2607359 - RNA, 19 nt, Human
auguauauuuaaaagaaag

SEQ ID NO: 2607360 - RNA, 12 nt, Human
auguaucaauga

SEQ ID NO: 2607361 - RNA, 19 nt, Human
auguauauuuuauaucaau

SEQ ID NO: 2607362 - RNA, 16 nt, Human
auguauauguguucau

SEQ ID NO: 2607363 - RNA, 20 nt, Human
auguauauacccacacacau

SEQ ID NO: 2607364 - RNA, 16 nt, Human
auguauauacauuuau

SEQ ID NO: 2607365 - RNA, 19 nt, Human
uuuggcaaacgcuaaagag

SEQ ID NO: 2607366 - RNA, 14 nt, Human
uuuggauuugacau

SEQ ID NO: 2607367 - RNA, 18 nt, Human
uuuggcaaacucuccacc

SEQ ID NO: 2607368 - RNA, 21 nt, Human
uuuggcugaaauucuccugga

SEQ ID NO: 2607369 - RNA, 20 nt, Human
uuuggcugaaauucuccugg

SEQ ID NO: 2607370 - RNA, 23 nt, Human
uuuggcucuccucagaagaaaga

SEQ ID NO: 2607371 - RNA, 13 nt, Human
uuuggcugcugaa

SEQ ID NO: 2607372 - RNA, 12 nt, Human
uuuggcugcuga

SEQ ID NO: 2607373 - RNA, 20 nt, Human
uuugggcagaagggagaagg

SEQ ID NO: 2607374 - RNA, 15 nt, Human
uuugggcccagggac

SEQ ID NO: 2607375 - RNA, 14 nt, Human
uuugggcccaggga

SEQ ID NO: 2607376 - RNA, 12 nt, Human
uuugggcccagg

SEQ ID NO: 2607377 - RNA, 15 nt, Human
uuugggccccucucc

SEQ ID NO: 2607378 - RNA, 14 nt, Human
uuugggcugcccug

SEQ ID NO: 2607379 - RNA, 14 nt, Human
uuuggcuuccauga

SEQ ID NO: 2607380 - RNA, 19 nt, Human
uuuggcugugucuaaacug

SEQ ID NO: 2607381 - RNA, 17 nt, Human
uuuggcugugucuaaac

SEQ ID NO: 2607382 - RNA, 15 nt, Human
uuuggcugugucuaa

SEQ ID NO: 2607383 - RNA, 14 nt, Human
uuuggcugugucua

SEQ ID NO: 2607384 - RNA, 13 nt, Human
uuuggcugugucu

SEQ ID NO: 2607385 - RNA, 22 nt, Human
uuuggcugaaauucuccuggag

SEQ ID NO: 2607386 - RNA, 22 nt, Human
uuugggauaggaaaaaugagua

SEQ ID NO: 2607387 - RNA, 17 nt, Human
uuugggaggcugaggcg

SEQ ID NO: 2607388 - RNA, 22 nt, Human
uuugggguacccacugcucugg

SEQ ID NO: 2607389 - RNA, 20 nt, Human
uuugggguagcuagaggaac

SEQ ID NO: 2607390 - RNA, 17 nt, Human
uuuggguaccuauuuuc

SEQ ID NO: 2607391 - RNA, 13 nt, Human
uuuggggaagaac

SEQ ID NO: 2607392 - RNA, 21 nt, Human
uuugggguacccacugcucug

SEQ ID NO: 2607393 - RNA, 17 nt, Human
auguauauaaacaugcu

SEQ ID NO: 2607394 - RNA, 21 nt, Human
auguauaauucaaagcaccaa

SEQ ID NO: 2607395 - RNA, 23 nt, Human
auguauaauauuuuuaauuaaau

SEQ ID NO: 2607396 - RNA, 14 nt, Human
auguauaauauuuu

SEQ ID NO: 2607397 - RNA, 12 nt, Human
uuugccuuuugc

SEQ ID NO: 2607398 - RNA, 22 nt, Human
uuugccuguucaguuacagaaa

SEQ ID NO: 2607399 - RNA, 19 nt, Human
uuugccuuuugcaaacuuu

SEQ ID NO: 2607400 - RNA, 23 nt, Human
uuugccuguucaguuacagaaag

SEQ ID NO: 2607401 - RNA, 20 nt, Human
uuugccuguucaguuacaga

SEQ ID NO: 2607402 - RNA, 19 nt, Human
uuugccuguucaguuacag

SEQ ID NO: 2607403 - RNA, 21 nt, Human
uuugccuugggcugcuccuca

SEQ ID NO: 2607404 - RNA, 19 nt, Human
uuugcaaacuuuauuuuca

SEQ ID NO: 2607405 - RNA, 15 nt, Human
uuugcaaaggagcuc

SEQ ID NO: 2607406 - RNA, 12 nt, Human
uuugcaaaauuu

SEQ ID NO: 2607407 - RNA, 16 nt, Human
uuugccuguucaguua

SEQ ID NO: 2607408 - RNA, 15 nt, Human
uuugccuguucaguu

SEQ ID NO: 2607409 - RNA, 14 nt, Human
uuugccuguucagu

SEQ ID NO: 2607410 - RNA, 12 nt, Human
uuugccugugcc

SEQ ID NO: 2607411 - RNA, 14 nt, Human
uuugauuucauuaa

SEQ ID NO: 2607412 - RNA, 13 nt, Human
uuugauuucuauu

SEQ ID NO: 2607413 - RNA, 14 nt, Human
uuugauuuaauguu

SEQ ID NO: 2607414 - RNA, 12 nt, Human
uuugauuuaugc

SEQ ID NO: 2607415 - RNA, 18 nt, Human
uuugauucagacagcugc

SEQ ID NO: 2607416 - RNA, 22 nt, Human
uuugauugagaguaacuuaagu

SEQ ID NO: 2607417 - RNA, 21 nt, Human
uuugauugagaguaacuuaag

SEQ ID NO: 2607418 - RNA, 15 nt, Human
uuugauugauuugaa

SEQ ID NO: 2607419 - RNA, 21 nt, Human
uuugauucuccuucagcccuc

SEQ ID NO: 2607420 - RNA, 15 nt, Human
uuugauucugugugu

SEQ ID NO: 2607421 - RNA, 19 nt, Human
uuugcuaagcauuccaacu

SEQ ID NO: 2607422 - RNA, 20 nt, Human
uuugcuggagcucugcccau

SEQ ID NO: 2607423 - RNA, 19 nt, Human
uuugcuggggccgaaagaa

SEQ ID NO: 2607424 - RNA, 22 nt, Human
uuugcuggggccgaaagaacag

SEQ ID NO: 2607425 - RNA, 20 nt, Human
uuuggauuggggucccucua

SEQ ID NO: 2607426 - RNA, 14 nt, Human
uuuggauuguauau

SEQ ID NO: 2607427 - RNA, 16 nt, Human
uuuggauuugacauug

SEQ ID NO: 2607428 - RNA, 22 nt, Human
uuuggauuggaugaauuccaaa

SEQ ID NO: 2607429 - RNA, 19 nt, Human
uuugcuguacuagagaucu

SEQ ID NO: 2607430 - RNA, 18 nt, Human
uuuggauucuuauguagc

SEQ ID NO: 2607431 - RNA, 20 nt, Human
uuuggauucuuauguagcag

SEQ ID NO: 2607432 - RNA, 18 nt, Human
uuuggauugacucugcau

SEQ ID NO: 2607433 - RNA, 19 nt, Human
uuugcugggcaguuuuucu

SEQ ID NO: 2607434 - RNA, 22 nt, Human
uuugcuaacuagcuuggaaacu

SEQ ID NO: 2607435 - RNA, 19 nt, Human
uuugaccucugcagcaaua

SEQ ID NO: 2607436 - RNA, 21 nt, Human
uuugaccucugcagcaauaaa

SEQ ID NO: 2607437 - RNA, 14 nt, Human
uuugacaaggggca

SEQ ID NO: 2607438 - RNA, 18 nt, Human
uuugacaaagguaaauca

SEQ ID NO: 2607439 - RNA, 18 nt, Human
uuugacacuauaucugua

SEQ ID NO: 2607440 - RNA, 17 nt, Human
uuugacacuauaucugu

SEQ ID NO: 2607441 - RNA, 15 nt, Human
uuugacacuauaucu

SEQ ID NO: 2607442 - RNA, 16 nt, Human
uuugaauuuucugugu

SEQ ID NO: 2607443 - RNA, 15 nt, Human
uuugacaacaaauua

SEQ ID NO: 2607444 - RNA, 20 nt, Human
uuugacaacguuucagcgac

SEQ ID NO: 2607445 - RNA, 20 nt, Human
uuucccuucaguacccucuc

SEQ ID NO: 2607446 - RNA, 19 nt, Human
uuucccuucaguacccucu

SEQ ID NO: 2607447 - RNA, 14 nt, Human
uuucccuuaucaaa

SEQ ID NO: 2607448 - RNA, 15 nt, Human
uuucccuugaggaaa

SEQ ID NO: 2607449 - RNA, 20 nt, Human
uuugaauguuauuuguuauu

SEQ ID NO: 2607450 - RNA, 19 nt, Human
uuucccuccacuccuuccu

SEQ ID NO: 2607451 - RNA, 23 nt, Human
uuucccucccuuccucuuuccau

SEQ ID NO: 2607452 - RNA, 14 nt, Human
uuucccucgcuggg

SEQ ID NO: 2607453 - RNA, 16 nt, Human
uuucccugccucucau

SEQ ID NO: 2607454 - RNA, 13 nt, Human
uuucccugaccuc

SEQ ID NO: 2607455 - RNA, 13 nt, Human
uuucccugugcug

SEQ ID NO: 2607456 - RNA, 14 nt, Human
uuucccugacuccu

SEQ ID NO: 2607457 - RNA, 16 nt, Human
uuucccuucaguaccc

SEQ ID NO: 2607458 - RNA, 12 nt, Human
uuucccugugcu

SEQ ID NO: 2607459 - RNA, 22 nt, Human
uuucccugcuuaaugaaaagcu

SEQ ID NO: 2607460 - RNA, 15 nt, Human
uuugauucagacagc

SEQ ID NO: 2607461 - RNA, 18 nt, Human
uuugaugcuggagagguu

SEQ ID NO: 2607462 - RNA, 16 nt, Human
uuugaugcuggagagg

SEQ ID NO: 2607463 - RNA, 16 nt, Human
uuugaugccaagaaag

SEQ ID NO: 2607464 - RNA, 16 nt, Human
uuugauuauuguauuu

SEQ ID NO: 2607465 - RNA, 18 nt, Human
uuugauuaauccagaaua

SEQ ID NO: 2607466 - RNA, 14 nt, Human
uuugauuauuguau

SEQ ID NO: 2607467 - RNA, 15 nt, Human
uuugauccaagcugg

SEQ ID NO: 2607468 - RNA, 13 nt, Human
uuugagaguucua

SEQ ID NO: 2607469 - RNA, 14 nt, Human
uuugauccaagcug

SEQ ID NO: 2607470 - RNA, 15 nt, Human
uuugaugaguuguga

SEQ ID NO: 2607471 - RNA, 10 nt, Human
uuugagacgg

SEQ ID NO: 2607472 - RNA, 13 nt, Human
uuugagacagagu

SEQ ID NO: 2607473 - RNA, 16 nt, Human
uuugagaaauuaagua

SEQ ID NO: 2607474 - RNA, 13 nt, Human
uuugagacaggag

SEQ ID NO: 2607475 - RNA, 19 nt, Human
uuugagacaguuucuuagc

SEQ ID NO: 2607476 - RNA, 18 nt, Human
uuugagacaguuucuuag

SEQ ID NO: 2607477 - RNA, 17 nt, Human
uuugagacaguuucuua

SEQ ID NO: 2607478 - RNA, 16 nt, Human
uuugagacaguuucuu

SEQ ID NO: 2607479 - RNA, 14 nt, Human
uuugagaagaaaac

SEQ ID NO: 2607480 - RNA, 15 nt, Human
uuugagacaguuucu

SEQ ID NO: 2607481 - RNA, 18 nt, Human
uuugagaagaaaacaucu

SEQ ID NO: 2607482 - RNA, 21 nt, Human
uuugagagaaauaugaagaac

SEQ ID NO: 2607483 - RNA, 19 nt, Human
uuugagaccagccugggca

SEQ ID NO: 2607484 - RNA, 22 nt, Human
uuugagacaguuucuuagcuuu

SEQ ID NO: 2607485 - RNA, 20 nt, Human
uuugagacaguuucuuagcu

SEQ ID NO: 2607486 - RNA, 16 nt, Human
uuugagaccagccugg

SEQ ID NO: 2607487 - RNA, 20 nt, Human
uuugacuguuuuuacccaua

SEQ ID NO: 2607488 - RNA, 13 nt, Human
uuugaccuuuuau

SEQ ID NO: 2607489 - RNA, 23 nt, Human
uuugaccuguugggagugaggau

SEQ ID NO: 2607490 - RNA, 18 nt, Human
uuugaccucugcagcaau

SEQ ID NO: 2607491 - RNA, 13 nt, Human
uuugagaaaugca

SEQ ID NO: 2607492 - RNA, 21 nt, Human
uuugagaaacaacaauuucua

SEQ ID NO: 2607493 - RNA, 19 nt, Human
uuugacuguuuuuacccau

SEQ ID NO: 2607494 - RNA, 16 nt, Human
uuugacuguuuuuacc

SEQ ID NO: 2607495 - RNA, 21 nt, Human
augugcuaguaauuggaaagg

SEQ ID NO: 2607496 - RNA, 19 nt, Human
augugcuauacugcauacu

SEQ ID NO: 2607497 - RNA, 18 nt, Human
augugcuauacugcauac

SEQ ID NO: 2607498 - RNA, 19 nt, Human
augugcuguguaaaguuag

SEQ ID NO: 2607499 - RNA, 18 nt, Human
augugcuguguaaaguua

SEQ ID NO: 2607500 - RNA, 17 nt, Human
augugcuguguaaaguu

SEQ ID NO: 2607501 - RNA, 16 nt, Human
augugcuguguaaagu

SEQ ID NO: 2607502 - RNA, 15 nt, Human
augugcuguguaaag

SEQ ID NO: 2607503 - RNA, 14 nt, Human
augugcuguguaaa

SEQ ID NO: 2607504 - RNA, 13 nt, Human
augugcuguguaa

SEQ ID NO: 2607505 - RNA, 18 nt, Human
augugcugcgugccugug

SEQ ID NO: 2607506 - RNA, 11 nt, Human
augugcugugu

SEQ ID NO: 2607507 - RNA, 20 nt, Human
augugcuaguaauuggaaag

SEQ ID NO: 2607508 - RNA, 21 nt, Human
augugccagguuuuuggucug

SEQ ID NO: 2607509 - RNA, 20 nt, Human
augugccagggcaaugauga

SEQ ID NO: 2607510 - RNA, 21 nt, Human
augugccagggcaaugaugaa

SEQ ID NO: 2607511 - RNA, 15 nt, Human
augugccaagguggg

SEQ ID NO: 2607512 - RNA, 13 nt, Human
augugccaaggug

SEQ ID NO: 2607513 - RNA, 23 nt, Human
augugcaguguagcccacacuug

SEQ ID NO: 2607514 - RNA, 19 nt, Human
augugcauucuuuuaaaag

SEQ ID NO: 2607515 - RNA, 20 nt, Human
augugcauucuuuuaaaaga

SEQ ID NO: 2607516 - RNA, 19 nt, Human
augugcagguuuguuacau

SEQ ID NO: 2607517 - RNA, 20 nt, Human
augugcauuuuugugaaaug

SEQ ID NO: 2607518 - RNA, 21 nt, Human
augugcauuuuugugaaauga

SEQ ID NO: 2607519 - RNA, 13 nt, Human
uuuguuuucuuug

SEQ ID NO: 2607520 - RNA, 14 nt, Human
uuuguuuucauggu

SEQ ID NO: 2607521 - RNA, 12 nt, Human
uuuguuuugcac

SEQ ID NO: 2607522 - RNA, 18 nt, Human
uuuguuuugcuuuuucug

SEQ ID NO: 2607523 - RNA, 12 nt, Human
uuuguuuuucau

SEQ ID NO: 2607524 - RNA, 13 nt, Human
uuuguuuuuaauu

SEQ ID NO: 2607525 - RNA, 14 nt, Human
uuuguuuuuaugaa

SEQ ID NO: 2607526 - RNA, 18 nt, Human
augugcacugucacuuug

SEQ ID NO: 2607527 - RNA, 15 nt, Human
augugcacugucacu

SEQ ID NO: 2607528 - RNA, 22 nt, Human
uuuuaaaaaaauaaaacauuuu

SEQ ID NO: 2607529 - RNA, 21 nt, Human
uuuuaaaaaaauaaaacauuu

SEQ ID NO: 2607530 - RNA, 22 nt, Human
augugcacugucacuuugcucu

SEQ ID NO: 2607531 - RNA, 17 nt, Human
augugcagguuuguuac

SEQ ID NO: 2607532 - RNA, 20 nt, Human
uuuuaaaaaaauaaaacauu

SEQ ID NO: 2607533 - RNA, 19 nt, Human
uuuuaaaaaaauaaaacau

SEQ ID NO: 2607534 - RNA, 18 nt, Human
uuuuaaaaaaauaaaaca

SEQ ID NO: 2607535 - RNA, 13 nt, Human
uuuuaaaaaaaua

SEQ ID NO: 2607536 - RNA, 22 nt, Human
augugcacccaugggcucugac

SEQ ID NO: 2607537 - RNA, 13 nt, Human
uuuguuuuuuggu

SEQ ID NO: 2607538 - RNA, 22 nt, Human
uuuguuuuuuuccaacuguguu

SEQ ID NO: 2607539 - RNA, 16 nt, Human
uuuguuuuuuuccaac

SEQ ID NO: 2607540 - RNA, 18 nt, Human
uuuuaaaaaacugcugac

SEQ ID NO: 2607541 - RNA, 21 nt, Human
auguguguccacgacugucuc

SEQ ID NO: 2607542 - RNA, 22 nt, Human
auguguguccacgacugucucc

SEQ ID NO: 2607543 - RNA, 18 nt, Human
auguguguguguugugug

SEQ ID NO: 2607544 - RNA, 22 nt, Human
auguguguguguuguguguggg

SEQ ID NO: 2607545 - RNA, 23 nt, Human
auguguguguguuguguguggga

SEQ ID NO: 2607546 - RNA, 20 nt, Human
auguguguagacaaauauuu

SEQ ID NO: 2607547 - RNA, 14 nt, Human
auguguguauaugu

SEQ ID NO: 2607548 - RNA, 12 nt, Human
auguguguauau

SEQ ID NO: 2607549 - RNA, 16 nt, Human
auguguguauauguau

SEQ ID NO: 2607550 - RNA, 17 nt, Human
auguguguauauguaug

SEQ ID NO: 2607551 - RNA, 18 nt, Human
auguguguauauguaugu

SEQ ID NO: 2607552 - RNA, 22 nt, Human
auguguguauauguaugugugu

SEQ ID NO: 2607553 - RNA, 20 nt, Human
auguguguaugggugugugu

SEQ ID NO: 2607554 - RNA, 13 nt, Human
augugcuuuucuc

SEQ ID NO: 2607555 - RNA, 20 nt, Human
augugcuguguaaaguuagu

SEQ ID NO: 2607556 - RNA, 17 nt, Human
augugcuuuucuccaau

SEQ ID NO: 2607557 - RNA, 16 nt, Human
augugcuuuucuccaa

SEQ ID NO: 2607558 - RNA, 15 nt, Human
augugcuuuucucca

SEQ ID NO: 2607559 - RNA, 23 nt, Human
auguggaaaagccaagaggcugc

SEQ ID NO: 2607560 - RNA, 13 nt, Human
auguggaaaacag

SEQ ID NO: 2607561 - RNA, 15 nt, Human
auguggaaagugaau

SEQ ID NO: 2607562 - RNA, 16 nt, Human
auguggaaagugaauu

SEQ ID NO: 2607563 - RNA, 17 nt, Human
auguggaaagugaauuu

SEQ ID NO: 2607564 - RNA, 14 nt, Human
auguguggccugca

SEQ ID NO: 2607565 - RNA, 19 nt, Human
auguguguagacaaauauu

SEQ ID NO: 2607566 - RNA, 17 nt, Human
auguguguaagugugug

SEQ ID NO: 2607567 - RNA, 10 nt, Human
auguguguau

SEQ ID NO: 2607568 - RNA, 19 nt, Human
auguggaaagugaauuuga

SEQ ID NO: 2607569 - RNA, 15 nt, Human
auguguggcagauuu

SEQ ID NO: 2607570 - RNA, 12 nt, Human
auguguuuccau

SEQ ID NO: 2607571 - RNA, 15 nt, Human
auguguuugaacuuc

SEQ ID NO: 2607572 - RNA, 16 nt, Human
auguguuugugugugu

SEQ ID NO: 2607573 - RNA, 12 nt, Human
auguguuugugu

SEQ ID NO: 2607574 - RNA, 18 nt, Human
auguguuugguucugggg

SEQ ID NO: 2607575 - RNA, 13 nt, Human
auguuaaauaaau

SEQ ID NO: 2607576 - RNA, 15 nt, Human
auguguuuucugaau

SEQ ID NO: 2607577 - RNA, 14 nt, Human
auguguuuucugaa

SEQ ID NO: 2607578 - RNA, 21 nt, Human
auguuaaacuuacuuaguguu

SEQ ID NO: 2607579 - RNA, 17 nt, Human
auguguguuuaaauaaa

SEQ ID NO: 2607580 - RNA, 16 nt, Human
auguguguuuaaauaa

SEQ ID NO: 2607581 - RNA, 15 nt, Human
auguguguuuaaaua

SEQ ID NO: 2607582 - RNA, 12 nt, Human
auguguguuuaa

SEQ ID NO: 2607583 - RNA, 23 nt, Human
auguguguccacgacugucucca

SEQ ID NO: 2607584 - RNA, 19 nt, Human
auguguguuuaaauaaagu

SEQ ID NO: 2607585 - RNA, 14 nt, Human
auguuauguaaaag

SEQ ID NO: 2607586 - RNA, 21 nt, Human
auguuauguaaaaggccaaac

SEQ ID NO: 2607587 - RNA, 18 nt, Human
auguuaugcccagcguuu

SEQ ID NO: 2607588 - RNA, 13 nt, Human
auguuauguaaaa

SEQ ID NO: 2607589 - RNA, 18 nt, Human
auguuaugcauaaaguca

SEQ ID NO: 2607590 - RNA, 13 nt, Human
auguuauuuaaca

SEQ ID NO: 2607591 - RNA, 23 nt, Human
auguuauuuaacagcugaauuau

SEQ ID NO: 2607592 - RNA, 15 nt, Human
auguuauugcauaau

SEQ ID NO: 2607593 - RNA, 20 nt, Human
auguuauuuauauauuggua

SEQ ID NO: 2607594 - RNA, 20 nt, Human
auguuauuuguuauuuucag

SEQ ID NO: 2607595 - RNA, 18 nt, Human
auguuauuuauauauugg

SEQ ID NO: 2607596 - RNA, 12 nt, Human
auguuauuuaua

SEQ ID NO: 2607597 - RNA, 19 nt, Human
auguuauuuuuuaauuauu

SEQ ID NO: 2607598 - RNA, 17 nt, Human
auguuauuuuuuaauua

SEQ ID NO: 2607599 - RNA, 18 nt, Human
auguuauuuucuguugaa

SEQ ID NO: 2607600 - RNA, 21 nt, Human
auguuauuuucuguugaaguu

SEQ ID NO: 2607601 - RNA, 20 nt, Human
auguuacauaagauaaaugu

SEQ ID NO: 2607602 - RNA, 14 nt, Human
auguuacauuauua

SEQ ID NO: 2607603 - RNA, 17 nt, Human
auguuacaucacagugu

SEQ ID NO: 2607604 - RNA, 20 nt, Human
auguuacaucuguuuuaaau

SEQ ID NO: 2607605 - RNA, 17 nt, Human
auguuacacuaagggug

SEQ ID NO: 2607606 - RNA, 14 nt, Human
auguuacauuguuu

SEQ ID NO: 2607607 - RNA, 17 nt, Human
auguuaugcauaaaguc

SEQ ID NO: 2607608 - RNA, 13 nt, Human
auguuaagcagau

SEQ ID NO: 2607609 - RNA, 19 nt, Human
auguuacauaagauaaaug

SEQ ID NO: 2607610 - RNA, 12 nt, Human
auguuaagcaga

SEQ ID NO: 2607611 - RNA, 23 nt, Human
auguuaacacauuuuguauaauu

SEQ ID NO: 2607612 - RNA, 22 nt, Human
auguuaacacauuuuguauaau

SEQ ID NO: 2607613 - RNA, 21 nt, Human
auguuaacacauuuuguauaa

SEQ ID NO: 2607614 - RNA, 20 nt, Human
auguuaacacauuuuguaua

SEQ ID NO: 2607615 - RNA, 23 nt, Human
auguuaaccagaauaaaguucug

SEQ ID NO: 2607616 - RNA, 18 nt, Human
auguuaaccucaguguca

SEQ ID NO: 2607617 - RNA, 21 nt, Human
auguuaaccucagugucauuu

SEQ ID NO: 2607618 - RNA, 18 nt, Human
auguuaaauaaauuguau

SEQ ID NO: 2607619 - RNA, 17 nt, Human
auguuaaauaaauugua

SEQ ID NO: 2607620 - RNA, 16 nt, Human
auguuaaauaaauugu

SEQ ID NO: 2607621 - RNA, 14 nt, Human
auguuaaauaaauu

SEQ ID NO: 2607622 - RNA, 20 nt, Human
auguuaaauaaauuguauau

SEQ ID NO: 2607623 - RNA, 19 nt, Human
auguuaaauaaauuguaua

SEQ ID NO: 2607624 - RNA, 22 nt, Human
auguuaaauaaauuguauauuc

SEQ ID NO: 2607625 - RNA, 18 nt, Human
auguuaaaucccauucau

SEQ ID NO: 2607626 - RNA, 18 nt, Human
auguuaacacauuuugua

SEQ ID NO: 2607627 - RNA, 16 nt, Human
auguuaacacauuuug

SEQ ID NO: 2607628 - RNA, 15 nt, Human
auguuaacacauuuu

SEQ ID NO: 2607629 - RNA, 13 nt, Human
auguuaacacauu

SEQ ID NO: 2607630 - RNA, 12 nt, Human
auguuaacacau

SEQ ID NO: 2607631 - RNA, 22 nt, Human
auguuaaauuuguaaguuucag

SEQ ID NO: 2607632 - RNA, 23 nt, Human
auguuaaauuuguaaguuucagg

SEQ ID NO: 2607633 - RNA, 20 nt, Human
auguuaaauuuguaaguuuc

SEQ ID NO: 2607634 - RNA, 18 nt, Human
auguuaaauuuguaaguu

SEQ ID NO: 2607635 - RNA, 17 nt, Human
auguuaaauuuguaagu

SEQ ID NO: 2607636 - RNA, 16 nt, Human
auguuaaauuuguaag

SEQ ID NO: 2607637 - RNA, 15 nt, Human
auguuaaauuuguaa

SEQ ID NO: 2607638 - RNA, 14 nt, Human
auguuaaauuugua

SEQ ID NO: 2607639 - RNA, 12 nt, Human
auguuaaauuug

SEQ ID NO: 2607640 - RNA, 20 nt, Human
auguuaaaucccauucauaa

SEQ ID NO: 2607641 - RNA, 16 nt, Human
auguugaaaagucaaa

SEQ ID NO: 2607642 - RNA, 12 nt, Human
auguugaaagau

SEQ ID NO: 2607643 - RNA, 20 nt, Human
auguuauuuuuuaauuauua

SEQ ID NO: 2607644 - RNA, 22 nt, Human
auguuauuuguuauuuucagua

SEQ ID NO: 2607645 - RNA, 14 nt, Human
auguucaacuggag

SEQ ID NO: 2607646 - RNA, 18 nt, Human
auguucacuuuugacaaa

SEQ ID NO: 2607647 - RNA, 14 nt, Human
auguucacuuuuga

SEQ ID NO: 2607648 - RNA, 22 nt, Human
auguucaacuggagacacuauu

SEQ ID NO: 2607649 - RNA, 15 nt, Human
auguugcccaggcag

SEQ ID NO: 2607650 - RNA, 14 nt, Human
auguugcccaggca

SEQ ID NO: 2607651 - RNA, 13 nt, Human
auguugcccaggc

SEQ ID NO: 2607652 - RNA, 18 nt, Human
auguugaaagaucaaaag

SEQ ID NO: 2607653 - RNA, 18 nt, Human
auguuggauuuauaaaug

SEQ ID NO: 2607654 - RNA, 16 nt, Human
auguuggauuuauaaa

SEQ ID NO: 2607655 - RNA, 21 nt, Human
auguuggauuuauaaaugcua

SEQ ID NO: 2607656 - RNA, 20 nt, Human
auguuggauuuauaaaugcu

SEQ ID NO: 2607657 - RNA, 20 nt, Human
uuuuagacaaauacucaugu

SEQ ID NO: 2607658 - RNA, 18 nt, Human
uuuuagacaaauacucau

SEQ ID NO: 2607659 - RNA, 17 nt, Human
uuuuagaguugauacua

SEQ ID NO: 2607660 - RNA, 21 nt, Human
uuuuagacccuauugcugcuu

SEQ ID NO: 2607661 - RNA, 19 nt, Human
auguugaaaagucaaacug

SEQ ID NO: 2607662 - RNA, 20 nt, Human
auguugcucagucucccuuu

SEQ ID NO: 2607663 - RNA, 19 nt, Human
auguugcucagucucccuu

SEQ ID NO: 2607664 - RNA, 20 nt, Human
auguugcugaggagugagga

SEQ ID NO: 2607665 - RNA, 13 nt, Human
auguugcugccaa

SEQ ID NO: 2607666 - RNA, 11 nt, Human
auguugcugcc

SEQ ID NO: 2607667 - RNA, 15 nt, Human
auguugcuggacugu

SEQ ID NO: 2607668 - RNA, 17 nt, Human
auguuggaagagaaagc

SEQ ID NO: 2607669 - RNA, 19 nt, Human
auguugcuggacugucaua

SEQ ID NO: 2607670 - RNA, 17 nt, Human
auguugcuuaggaugug

SEQ ID NO: 2607671 - RNA, 18 nt, Human
uuuuauggcuuuugugca

SEQ ID NO: 2607672 - RNA, 19 nt, Human
uuuuauggcuuuugugcau

SEQ ID NO: 2607673 - RNA, 22 nt, Human
uuuuauggcacuaguauuucua

SEQ ID NO: 2607674 - RNA, 18 nt, Human
uuuuaguuaaauuucugg

SEQ ID NO: 2607675 - RNA, 16 nt, Human
uuuuaguucuuuggaa

SEQ ID NO: 2607676 - RNA, 22 nt, Human
uuuuagacaaauacucaugugu

SEQ ID NO: 2607677 - RNA, 21 nt, Human
uuuuagacaaauacucaugug

SEQ ID NO: 2607678 - RNA, 21 nt, Human
uuuuagacagucucacuuugu

SEQ ID NO: 2607679 - RNA, 15 nt, Human
uuuuaguagagacag

SEQ ID NO: 2607680 - RNA, 14 nt, Human
uuuuagucacuuuu

SEQ ID NO: 2607681 - RNA, 13 nt, Human
uuuuagucacuuu

SEQ ID NO: 2607682 - RNA, 18 nt, Human
uuuuagugauuuuaauaa

SEQ ID NO: 2607683 - RNA, 23 nt, Human
uuuuagacaaauacucaugugua

SEQ ID NO: 2607684 - RNA, 12 nt, Human
uuuuauuaauaa

SEQ ID NO: 2607685 - RNA, 22 nt, Human
uuuuauuaauaaacauucuauc

SEQ ID NO: 2607686 - RNA, 19 nt, Human
uuuuauuaauaaacauucu

SEQ ID NO: 2607687 - RNA, 21 nt, Human
uuuuauggcuuuugugcauua

SEQ ID NO: 2607688 - RNA, 12 nt, Human
uuuuauuaaauu

SEQ ID NO: 2607689 - RNA, 13 nt, Human
uuuuauuaaugca

SEQ ID NO: 2607690 - RNA, 20 nt, Human
uuuuauucauaagccaauuu

SEQ ID NO: 2607691 - RNA, 11 nt, Human
uuuuauuaaug

SEQ ID NO: 2607692 - RNA, 13 nt, Human
uuuuauuccacau

SEQ ID NO: 2607693 - RNA, 15 nt, Human
uuuuauuccacaucu

SEQ ID NO: 2607694 - RNA, 18 nt, Human
uuuuauuccuguauguug

SEQ ID NO: 2607695 - RNA, 15 nt, Human
uuuuauuccuguaug

SEQ ID NO: 2607696 - RNA, 21 nt, Human
uuuuauuguaacagacauugu

SEQ ID NO: 2607697 - RNA, 20 nt, Human
uuuuauuguaacagacauug

SEQ ID NO: 2607698 - RNA, 19 nt, Human
uuuuauuguaacagacauu

SEQ ID NO: 2607699 - RNA, 16 nt, Human
uuuuauuguaacagac

SEQ ID NO: 2607700 - RNA, 18 nt, Human
uuuuauugacacagaaaa

SEQ ID NO: 2607701 - RNA, 19 nt, Human
uuuuauugagaauuuuaaa

SEQ ID NO: 2607702 - RNA, 16 nt, Human
uuuuauugacacagaa

SEQ ID NO: 2607703 - RNA, 19 nt, Human
uuuuauugaaucuauuuaa

SEQ ID NO: 2607704 - RNA, 17 nt, Human
uuuucagcuucugcugg

SEQ ID NO: 2607705 - RNA, 20 nt, Human
uuuucagcuucugcugggcu

SEQ ID NO: 2607706 - RNA, 15 nt, Human
uuuucagcuucugcu

SEQ ID NO: 2607707 - RNA, 12 nt, Human
uuuucagcuucu

SEQ ID NO: 2607708 - RNA, 16 nt, Human
uuuucaguauuuugga

SEQ ID NO: 2607709 - RNA, 23 nt, Human
uuuucagucauauaaaagcuaug

SEQ ID NO: 2607710 - RNA, 15 nt, Human
uuuucagucauauaa

SEQ ID NO: 2607711 - RNA, 23 nt, Human
uuuucaguauuuuggagaaauua

SEQ ID NO: 2607712 - RNA, 23 nt, Human
uuuucaguagggcuacaaaaccu

SEQ ID NO: 2607713 - RNA, 20 nt, Human
uuuucaggcuagauguaugu

SEQ ID NO: 2607714 - RNA, 17 nt, Human
uuuuauuguuuaaagca

SEQ ID NO: 2607715 - RNA, 20 nt, Human
uuuuauuguauaaacuauca

SEQ ID NO: 2607716 - RNA, 22 nt, Human
uuuuauuguaacagacauuguu

SEQ ID NO: 2607717 - RNA, 10 nt, Human
uuuuauuguu

SEQ ID NO: 2607718 - RNA, 11 nt, Human
uuuuauugugu

SEQ ID NO: 2607719 - RNA, 13 nt, Human
uuuuccacuuugu

SEQ ID NO: 2607720 - RNA, 13 nt, Human
uuuuccacuacug

SEQ ID NO: 2607721 - RNA, 15 nt, Human
uuuuccacuacugcu

SEQ ID NO: 2607722 - RNA, 14 nt, Human
uuuuccaaugucug

SEQ ID NO: 2607723 - RNA, 15 nt, Human
uuuuccaaugucugc

SEQ ID NO: 2607724 - RNA, 22 nt, Human
uuuuccacaagauucccagaga

SEQ ID NO: 2607725 - RNA, 15 nt, Human
uuuuccacccuggaa

SEQ ID NO: 2607726 - RNA, 22 nt, Human
uuuuccaaauguaauaaacuuu

SEQ ID NO: 2607727 - RNA, 18 nt, Human
uuuuccaagugugcauau

SEQ ID NO: 2607728 - RNA, 11 nt, Human
uuuuccaaaug

SEQ ID NO: 2607729 - RNA, 19 nt, Human
uuuuccaaagagugauagu

SEQ ID NO: 2607730 - RNA, 14 nt, Human
uuuucaguguacau

SEQ ID NO: 2607731 - RNA, 16 nt, Human
uuuucucugguaauau

SEQ ID NO: 2607732 - RNA, 14 nt, Human
uuuucucugguaau

SEQ ID NO: 2607733 - RNA, 21 nt, Human
uuuucucugguaauauugacu

SEQ ID NO: 2607734 - RNA, 22 nt, Human
uuuucucuugggcugagacugg

SEQ ID NO: 2607735 - RNA, 12 nt, Human
uuuucucuuucu

SEQ ID NO: 2607736 - RNA, 14 nt, Human
uuuucucuuucucc

SEQ ID NO: 2607737 - RNA, 15 nt, Human
uuuucucuuucucuc

SEQ ID NO: 2607738 - RNA, 22 nt, Human
uuuucucuuucuccuuagucuu

SEQ ID NO: 2607739 - RNA, 21 nt, Human
uuuucuagcccgaauacaaac

SEQ ID NO: 2607740 - RNA, 18 nt, Human
uuuucuagacuuucuguu

SEQ ID NO: 2607741 - RNA, 16 nt, Human
uuuucuauaauuuaaa

SEQ ID NO: 2607742 - RNA, 13 nt, Human
uuuuccagcuccu

SEQ ID NO: 2607743 - RNA, 20 nt, Human
uuuuccagcuggaugagaau

SEQ ID NO: 2607744 - RNA, 12 nt, Human
uuuuccaggcug

SEQ ID NO: 2607745 - RNA, 14 nt, Human
uuuucuagacuuuc

SEQ ID NO: 2607746 - RNA, 13 nt, Human
uuuucuagacuuu

SEQ ID NO: 2607747 - RNA, 18 nt, Human
uuuucuagcccgaauaca

SEQ ID NO: 2607748 - RNA, 17 nt, Human
uuuucuacuuuuuuuaa

SEQ ID NO: 2607749 - RNA, 14 nt, Human
auguuuauuccuug

SEQ ID NO: 2607750 - RNA, 20 nt, Human
auguuuuuaaaaguuucaau

SEQ ID NO: 2607751 - RNA, 14 nt, Human
auguuuauuccuga

SEQ ID NO: 2607752 - RNA, 22 nt, Human
auguuuuuaaaaguuucaaugu

SEQ ID NO: 2607753 - RNA, 18 nt, Human
auguuuauuccugauaau

SEQ ID NO: 2607754 - RNA, 23 nt, Human
auguuuuuaaaaguuucaaugug

SEQ ID NO: 2607755 - RNA, 15 nt, Human
auguuuuucaugaaa

SEQ ID NO: 2607756 - RNA, 21 nt, Human
auguuuuucugccagggagcu

SEQ ID NO: 2607757 - RNA, 22 nt, Human
auguuuuucugccagggagcuu

SEQ ID NO: 2607758 - RNA, 21 nt, Human
auguuuuuguuuucuuugaau

SEQ ID NO: 2607759 - RNA, 19 nt, Human
auuaaaacacaacaucuuu

SEQ ID NO: 2607760 - RNA, 14 nt, Human
auuaaaacaauauu

SEQ ID NO: 2607761 - RNA, 18 nt, Human
auuaaaacaauauuguuu

SEQ ID NO: 2607762 - RNA, 20 nt, Human
auuaaaacaauauuguuucu

SEQ ID NO: 2607763 - RNA, 21 nt, Human
auuaaaacaauauuguuucua

SEQ ID NO: 2607764 - RNA, 23 nt, Human
auuaaaaaucucaaauuucuaaa

SEQ ID NO: 2607765 - RNA, 22 nt, Human
auuaaaaaugaaauuauuuaua

SEQ ID NO: 2607766 - RNA, 12 nt, Human
auuaaaaaacaa

SEQ ID NO: 2607767 - RNA, 23 nt, Human
auuaaaaaaaacaaaaagaacaa

SEQ ID NO: 2607768 - RNA, 20 nt, Human
auuaaaaaaaacaaaaagaa

SEQ ID NO: 2607769 - RNA, 19 nt, Human
auuaaaaaaaacaaaaaga

SEQ ID NO: 2607770 - RNA, 15 nt, Human
auuaaaaaaaacaaa

SEQ ID NO: 2607771 - RNA, 14 nt, Human
auuaaaaaaaacaa

SEQ ID NO: 2607772 - RNA, 14 nt, Human
auuaaaaaaaaaga

SEQ ID NO: 2607773 - RNA, 20 nt, Human
auuaaaaaaaaagaucuguu

SEQ ID NO: 2607774 - RNA, 15 nt, Human
auguuuuuuuuuaaa

SEQ ID NO: 2607775 - RNA, 19 nt, Human
auguuuuuuagaucaaaua

SEQ ID NO: 2607776 - RNA, 22 nt, Human
auguuuuuuaaaauauuuaucu

SEQ ID NO: 2607777 - RNA, 22 nt, Human
auguuuuuuagaucaaauacuu

SEQ ID NO: 2607778 - RNA, 21 nt, Human
auguuuacacucuuuguaaga

SEQ ID NO: 2607779 - RNA, 19 nt, Human
auguuuacacucuuuguaa

SEQ ID NO: 2607780 - RNA, 18 nt, Human
auguuuacacucuuugua

SEQ ID NO: 2607781 - RNA, 16 nt, Human
auguuuacacucuuug

SEQ ID NO: 2607782 - RNA, 16 nt, Human
auguuuacaaauggac

SEQ ID NO: 2607783 - RNA, 19 nt, Human
auguuuaacuuaaucaauu

SEQ ID NO: 2607784 - RNA, 17 nt, Human
auguuuaacuuaaucaa

SEQ ID NO: 2607785 - RNA, 18 nt, Human
auguuggucauuuuaugu

SEQ ID NO: 2607786 - RNA, 13 nt, Human
auguuggcuggga

SEQ ID NO: 2607787 - RNA, 14 nt, Human
auguugguguucca

SEQ ID NO: 2607788 - RNA, 12 nt, Human
auguugggacug

SEQ ID NO: 2607789 - RNA, 20 nt, Human
auguugggaaacuuggcucg

SEQ ID NO: 2607790 - RNA, 19 nt, Human
auguugggaaacuuggcuc

SEQ ID NO: 2607791 - RNA, 12 nt, Human
auguuggcuggg

SEQ ID NO: 2607792 - RNA, 12 nt, Human
uuuucuuaacca

SEQ ID NO: 2607793 - RNA, 17 nt, Human
auguuggccaggcuggu

SEQ ID NO: 2607794 - RNA, 21 nt, Human
uuuucugauuguaacguugcu

SEQ ID NO: 2607795 - RNA, 14 nt, Human
uuuucugauuguaa

SEQ ID NO: 2607796 - RNA, 17 nt, Human
uuuucucuuucucuccu

SEQ ID NO: 2607797 - RNA, 16 nt, Human
uuuucugcaagccugc

SEQ ID NO: 2607798 - RNA, 23 nt, Human
uuuucugauuguaacguugcugu

SEQ ID NO: 2607799 - RNA, 20 nt, Human
uuuucugcacugagcagagu

SEQ ID NO: 2607800 - RNA, 16 nt, Human
uuuucugcacugagca

SEQ ID NO: 2607801 - RNA, 13 nt, Human
uuuucugcacuga

SEQ ID NO: 2607802 - RNA, 21 nt, Human
uuuucuggaauacaugaaaua

SEQ ID NO: 2607803 - RNA, 17 nt, Human
uuuucuggaauacauga

SEQ ID NO: 2607804 - RNA, 16 nt, Human
uuuucugcuuuugaaa

SEQ ID NO: 2607805 - RNA, 16 nt, Human
uuuucugcccuggcug

SEQ ID NO: 2607806 - RNA, 15 nt, Human
uuuucugcccuggcu

SEQ ID NO: 2607807 - RNA, 13 nt, Human
uuuucugcccugg

SEQ ID NO: 2607808 - RNA, 12 nt, Human
uuuucugcccug

SEQ ID NO: 2607809 - RNA, 14 nt, Human
uuuucuuaaauaau

SEQ ID NO: 2607810 - RNA, 23 nt, Human
uuuucuuaaauaauaaagaucau

SEQ ID NO: 2607811 - RNA, 13 nt, Human
uuuucuguucuuu

SEQ ID NO: 2607812 - RNA, 12 nt, Human
uuuucuguuaua

SEQ ID NO: 2607813 - RNA, 23 nt, Human
uuuucuguugaaguuuacaauca

SEQ ID NO: 2607814 - RNA, 15 nt, Human
auugcaaaauagcau

SEQ ID NO: 2607815 - RNA, 16 nt, Human
auugauuugcauugaa

SEQ ID NO: 2607816 - RNA, 20 nt, Human
auugauuugcauugaacaca

SEQ ID NO: 2607817 - RNA, 13 nt, Human
auugauuugcauu

SEQ ID NO: 2607818 - RNA, 15 nt, Human
auugauuugcauuga

SEQ ID NO: 2607819 - RNA, 12 nt, Human
auugauuugcau

SEQ ID NO: 2607820 - RNA, 20 nt, Human
auugauuucugccuuccuug

SEQ ID NO: 2607821 - RNA, 14 nt, Human
auugauuugaagaa

SEQ ID NO: 2607822 - RNA, 16 nt, Human
auugauuugaagaaca

SEQ ID NO: 2607823 - RNA, 21 nt, Human
auugauuucugccuuccuugc

SEQ ID NO: 2607824 - RNA, 15 nt, Human
auugauuucugccuu

SEQ ID NO: 2607825 - RNA, 19 nt, Human
auugauguguuuauuuaua

SEQ ID NO: 2607826 - RNA, 22 nt, Human
auugauguacagucugucauga

SEQ ID NO: 2607827 - RNA, 13 nt, Human
auugauggggaag

SEQ ID NO: 2607828 - RNA, 13 nt, Human
auugacaaacucu

SEQ ID NO: 2607829 - RNA, 12 nt, Human
auugauguguuu

SEQ ID NO: 2607830 - RNA, 21 nt, Human
auugauguacagucugucaug

SEQ ID NO: 2607831 - RNA, 16 nt, Human
auugauggggaaggag

SEQ ID NO: 2607832 - RNA, 19 nt, Human
auugcaacaggcugggcuu

SEQ ID NO: 2607833 - RNA, 12 nt, Human
auugcaccacug

SEQ ID NO: 2607834 - RNA, 18 nt, Human
auugcaacaggcugggcu

SEQ ID NO: 2607835 - RNA, 17 nt, Human
auugcaacaggcugggc

SEQ ID NO: 2607836 - RNA, 19 nt, Human
auugcacguggccucuuga

SEQ ID NO: 2607837 - RNA, 17 nt, Human
auugcacguggccucuu

SEQ ID NO: 2607838 - RNA, 16 nt, Human
auugcacguggccucu

SEQ ID NO: 2607839 - RNA, 15 nt, Human
auugcacguggccuc

SEQ ID NO: 2607840 - RNA, 15 nt, Human
auugcacauuguaaa

SEQ ID NO: 2607841 - RNA, 23 nt, Human
auugcacguggccucuugagcag

SEQ ID NO: 2607842 - RNA, 15 nt, Human
auugcacuccagccu

SEQ ID NO: 2607843 - RNA, 21 nt, Human
auugcacaugucuuaaugaag

SEQ ID NO: 2607844 - RNA, 17 nt, Human
auugcacuccagccugg

SEQ ID NO: 2607845 - RNA, 16 nt, Human
auugcacuccagccug

SEQ ID NO: 2607846 - RNA, 18 nt, Human
auugcacuccagccuggg

SEQ ID NO: 2607847 - RNA, 20 nt, Human
auugcacucuaaaagguuca

SEQ ID NO: 2607848 - RNA, 19 nt, Human
auugcacuccagccugggc

SEQ ID NO: 2607849 - RNA, 14 nt, Human
auugaaguaaugaa

SEQ ID NO: 2607850 - RNA, 15 nt, Human
auugaaguaaugaau

SEQ ID NO: 2607851 - RNA, 18 nt, Human
auugaagucagauguggu

SEQ ID NO: 2607852 - RNA, 16 nt, Human
auugaagucagaugug

SEQ ID NO: 2607853 - RNA, 19 nt, Human
auugaaguauuuugcugga

SEQ ID NO: 2607854 - RNA, 16 nt, Human
auugaaguaaugaauu

SEQ ID NO: 2607855 - RNA, 22 nt, Human
auugaauaaugguaccagauaa

SEQ ID NO: 2607856 - RNA, 14 nt, Human
auugaauaauggua

SEQ ID NO: 2607857 - RNA, 19 nt, Human
auugaauaaaguugaagcu

SEQ ID NO: 2607858 - RNA, 13 nt, Human
auugaaucaguau

SEQ ID NO: 2607859 - RNA, 13 nt, Human
auugaaucaugua

SEQ ID NO: 2607860 - RNA, 20 nt, Human
auugaaucaguauaaacaaa

SEQ ID NO: 2607861 - RNA, 23 nt, Human
auugaauauaauauauuugugua

SEQ ID NO: 2607862 - RNA, 21 nt, Human
auugaauuaucuugguugaaa

SEQ ID NO: 2607863 - RNA, 20 nt, Human
auugaauucuugguugagga

SEQ ID NO: 2607864 - RNA, 22 nt, Human
auugaauucuugguugaggaaa

SEQ ID NO: 2607865 - RNA, 23 nt, Human
auugaauucuugguugaggaaac

SEQ ID NO: 2607866 - RNA, 16 nt, Human
auugaauguuuccaac

SEQ ID NO: 2607867 - RNA, 23 nt, Human
auugaaucugauuggacauuuuc

SEQ ID NO: 2607868 - RNA, 14 nt, Human
auugaaucugauug

SEQ ID NO: 2607869 - RNA, 13 nt, Human
auugaauuaucuu

SEQ ID NO: 2607870 - RNA, 16 nt, Human
auugaaucuauuuaag

SEQ ID NO: 2607871 - RNA, 14 nt, Human
auugaaucuauuua

SEQ ID NO: 2607872 - RNA, 20 nt, Human
auugaaucauguaguaucaa

SEQ ID NO: 2607873 - RNA, 14 nt, Human
auugaaucauguag

SEQ ID NO: 2607874 - RNA, 10 nt, Human
auugaaucua

SEQ ID NO: 2607875 - RNA, 16 nt, Human
auugaaauuguacaua

SEQ ID NO: 2607876 - RNA, 17 nt, Human
auugaaauucugagaaa

SEQ ID NO: 2607877 - RNA, 13 nt, Human
auugaaauucuga

SEQ ID NO: 2607878 - RNA, 14 nt, Human
auuccuauugugau

SEQ ID NO: 2607879 - RNA, 14 nt, Human
auugaaauuuauac

SEQ ID NO: 2607880 - RNA, 17 nt, Human
auugaaauuguacauau

SEQ ID NO: 2607881 - RNA, 21 nt, Human
auugaaauuguacauauuugu

SEQ ID NO: 2607882 - RNA, 14 nt, Human
auugaacacaaacu

SEQ ID NO: 2607883 - RNA, 22 nt, Human
auugaacaaguuguuucauuga

SEQ ID NO: 2607884 - RNA, 21 nt, Human
auuccuauacgcagcgugcuu

SEQ ID NO: 2607885 - RNA, 17 nt, Human
auuccuauauaguuuau

SEQ ID NO: 2607886 - RNA, 17 nt, Human
auuccuaccucccugca

SEQ ID NO: 2607887 - RNA, 15 nt, Human
auugaacacaaacug

SEQ ID NO: 2607888 - RNA, 16 nt, Human
auugaacacaaacugu

SEQ ID NO: 2607889 - RNA, 17 nt, Human
auugaacacaaacugua

SEQ ID NO: 2607890 - RNA, 18 nt, Human
auugaacacaaacuguaa

SEQ ID NO: 2607891 - RNA, 19 nt, Human
auugaacacaaacuguaaa

SEQ ID NO: 2607892 - RNA, 20 nt, Human
auugaacacaaacuguaaau

SEQ ID NO: 2607893 - RNA, 15 nt, Human
auugaacccaggagg

SEQ ID NO: 2607894 - RNA, 16 nt, Human
auugaaauuuauacac

SEQ ID NO: 2607895 - RNA, 14 nt, Human
auugaacccaggag

SEQ ID NO: 2607896 - RNA, 20 nt, Human
auuggcuagagguucaaaga

SEQ ID NO: 2607897 - RNA, 22 nt, Human
auuggcuagagguucaaagaua

SEQ ID NO: 2607898 - RNA, 19 nt, Human
auuggcuagagguucaaag

SEQ ID NO: 2607899 - RNA, 14 nt, Human
auuggcauguguau

SEQ ID NO: 2607900 - RNA, 12 nt, Human
auuggccuggag

SEQ ID NO: 2607901 - RNA, 11 nt, Human
auuggccugga

SEQ ID NO: 2607902 - RNA, 17 nt, Human
auuggcauguguauguu

SEQ ID NO: 2607903 - RNA, 22 nt, Human
auuggccauucuauuguggcaa

SEQ ID NO: 2607904 - RNA, 17 nt, Human
auuggagcucgugggac

SEQ ID NO: 2607905 - RNA, 16 nt, Human
auuggagcucguggaa

SEQ ID NO: 2607906 - RNA, 17 nt, Human
auuggagauagggaaag

SEQ ID NO: 2607907 - RNA, 22 nt, Human
auuggagaaguaauccuaggga

SEQ ID NO: 2607908 - RNA, 15 nt, Human
auuggcagcagauuu

SEQ ID NO: 2607909 - RNA, 22 nt, Human
auuggcagcaggugcugcuacc

SEQ ID NO: 2607910 - RNA, 19 nt, Human
auuggcagcaggugcugcu

SEQ ID NO: 2607911 - RNA, 17 nt, Human
auuggagccaccaugcc

SEQ ID NO: 2607912 - RNA, 18 nt, Human
auuggcagcaggugcugc

SEQ ID NO: 2607913 - RNA, 18 nt, Human
auuggagaguaaaaacug

SEQ ID NO: 2607914 - RNA, 18 nt, Human
auuggcuauuuaaaacuu

SEQ ID NO: 2607915 - RNA, 17 nt, Human
auuggcuauuuaaaacu

SEQ ID NO: 2607916 - RNA, 23 nt, Human
auuggcuagagguucaaagauau

SEQ ID NO: 2607917 - RNA, 16 nt, Human
auuggcucacacugag

SEQ ID NO: 2607918 - RNA, 15 nt, Human
auuggcucacacuga

SEQ ID NO: 2607919 - RNA, 13 nt, Human
auuggcucacacu

SEQ ID NO: 2607920 - RNA, 19 nt, Human
auuggcuauuuaaagacaa

SEQ ID NO: 2607921 - RNA, 14 nt, Human
auugcaucuguaua

SEQ ID NO: 2607922 - RNA, 13 nt, Human
auugcaucuguau

SEQ ID NO: 2607923 - RNA, 22 nt, Human
auugcaucuggguagcuguaag

SEQ ID NO: 2607924 - RNA, 19 nt, Human
auugcaucuguauaaguaa

SEQ ID NO: 2607925 - RNA, 15 nt, Human
auugcaucuguauaa

SEQ ID NO: 2607926 - RNA, 15 nt, Human
auugcaugugacucu

SEQ ID NO: 2607927 - RNA, 17 nt, Human
auugcaugugacucuga

SEQ ID NO: 2607928 - RNA, 23 nt, Human
auugcauuaaauauaauaugcac

SEQ ID NO: 2607929 - RNA, 13 nt, Human
auugcaugugacu

SEQ ID NO: 2607930 - RNA, 14 nt, Human
auugcaugugacuc

SEQ ID NO: 2607931 - RNA, 11 nt, Human
auugcauugac

SEQ ID NO: 2607932 - RNA, 15 nt, Human
auugccugcagagag

SEQ ID NO: 2607933 - RNA, 16 nt, Human
auugccugcagagaga

SEQ ID NO: 2607934 - RNA, 18 nt, Human
auugcaugugacucugaa

SEQ ID NO: 2607935 - RNA, 18 nt, Human
auugccuuaacuggagcc

SEQ ID NO: 2607936 - RNA, 17 nt, Human
auugccugcagagagaa

SEQ ID NO: 2607937 - RNA, 22 nt, Human
auugcaucucccagauaaugug

SEQ ID NO: 2607938 - RNA, 23 nt, Human
auugcaucucccagauaauguga

SEQ ID NO: 2607939 - RNA, 20 nt, Human
auugcaucuggguagcugua

SEQ ID NO: 2607940 - RNA, 21 nt, Human
auugcaucuggguagcuguaa

SEQ ID NO: 2607941 - RNA, 15 nt, Human
auugcaucucccaga

SEQ ID NO: 2607942 - RNA, 13 nt, Human
auugcacucuaaa

SEQ ID NO: 2607943 - RNA, 16 nt, Human
auugcauauaacuuau

SEQ ID NO: 2607944 - RNA, 18 nt, Human
auugcauauaacuuauau

SEQ ID NO: 2607945 - RNA, 22 nt, Human
auugcauauaacuuauauugua

SEQ ID NO: 2607946 - RNA, 16 nt, Human
auugcauauauacaua

SEQ ID NO: 2607947 - RNA, 23 nt, Human
auugccuuuagugaucacagcag

SEQ ID NO: 2607948 - RNA, 15 nt, Human
auuggacccuuccau

SEQ ID NO: 2607949 - RNA, 18 nt, Human
auuggaaugggcagcuca

SEQ ID NO: 2607950 - RNA, 16 nt, Human
auuggaacagaauguu

SEQ ID NO: 2607951 - RNA, 16 nt, Human
auuggaagaccccacc

SEQ ID NO: 2607952 - RNA, 19 nt, Human
auuggaagaaauuccugua

SEQ ID NO: 2607953 - RNA, 18 nt, Human
auuggaagaaauuccugu

SEQ ID NO: 2607954 - RNA, 14 nt, Human
auuggaagaaauuc

SEQ ID NO: 2607955 - RNA, 17 nt, Human
auuggcucacacugaga

SEQ ID NO: 2607956 - RNA, 18 nt, Human
auugaaucuauuuaagua

SEQ ID NO: 2607957 - RNA, 15 nt, Human
auuucuuugccuguu

SEQ ID NO: 2607958 - RNA, 18 nt, Human
auuugaauguuaagcaga

SEQ ID NO: 2607959 - RNA, 13 nt, Human
auuugaauguuaa

SEQ ID NO: 2607960 - RNA, 14 nt, Human
auuucuuuccagag

SEQ ID NO: 2607961 - RNA, 13 nt, Human
auuucuuuccaga

SEQ ID NO: 2607962 - RNA, 23 nt, Human
auuugaauguaugcuucauacag

SEQ ID NO: 2607963 - RNA, 13 nt, Human
auuucuugugccu

SEQ ID NO: 2607964 - RNA, 20 nt, Human
auuucuugggcccuccugaa

SEQ ID NO: 2607965 - RNA, 20 nt, Human
auuucuugguaagaagccgg

SEQ ID NO: 2607966 - RNA, 17 nt, Human
auuucuugggcccuccu

SEQ ID NO: 2607967 - RNA, 18 nt, Human
auuucuugggcccuccug

SEQ ID NO: 2607968 - RNA, 19 nt, Human
auuucuugguaagaagccg

SEQ ID NO: 2607969 - RNA, 14 nt, Human
auuucuugggcccu

SEQ ID NO: 2607970 - RNA, 16 nt, Human
auuucuugggcccucc

SEQ ID NO: 2607971 - RNA, 20 nt, Human
auuucuugagguaaaagcau

SEQ ID NO: 2607972 - RNA, 16 nt, Human
auuucuuccacaagag

SEQ ID NO: 2607973 - RNA, 21 nt, Human
auuucuugaguuuuguuuuaa

SEQ ID NO: 2607974 - RNA, 19 nt, Human
auuucuuaucaccacagua

SEQ ID NO: 2607975 - RNA, 21 nt, Human
auuucuuauauaugugaacau

SEQ ID NO: 2607976 - RNA, 14 nt, Human
auuucuuauauaug

SEQ ID NO: 2607977 - RNA, 11 nt, Human
auuucuuauag

SEQ ID NO: 2607978 - RNA, 18 nt, Human
auuucuuaucaccacagu

SEQ ID NO: 2607979 - RNA, 15 nt, Human
auuucuuaucaccac

SEQ ID NO: 2607980 - RNA, 13 nt, Human
auuucuucacugu

SEQ ID NO: 2607981 - RNA, 17 nt, Human
auuugaggucuguucuu

SEQ ID NO: 2607982 - RNA, 18 nt, Human
auuugaggucuguucuuu

SEQ ID NO: 2607983 - RNA, 16 nt, Human
auuugagcagggcuca

SEQ ID NO: 2607984 - RNA, 15 nt, Human
auuugagcagggcuc

SEQ ID NO: 2607985 - RNA, 19 nt, Human
auuugaauguuaagcagau

SEQ ID NO: 2607986 - RNA, 12 nt, Human
auuugagaaaug

SEQ ID NO: 2607987 - RNA, 16 nt, Human
auuugagaaaugcaua

SEQ ID NO: 2607988 - RNA, 14 nt, Human
auuugagaaaugca

SEQ ID NO: 2607989 - RNA, 17 nt, Human
auuugagaaaugcauau

SEQ ID NO: 2607990 - RNA, 17 nt, Human
auuugagagaaauauga

SEQ ID NO: 2607991 - RNA, 21 nt, Human
auuugagaauauaaaaaacuu

SEQ ID NO: 2607992 - RNA, 14 nt, Human
auuugagaauauaa

SEQ ID NO: 2607993 - RNA, 21 nt, Human
auuuggaguguuccccuucca

SEQ ID NO: 2607994 - RNA, 17 nt, Human
auuuggagacucugugg

SEQ ID NO: 2607995 - RNA, 11 nt, Human
auuuggagacu

SEQ ID NO: 2607996 - RNA, 23 nt, Human
auuugaugcuguuugacaaaguu

SEQ ID NO: 2607997 - RNA, 16 nt, Human
auuugaugcuguuuga

SEQ ID NO: 2607998 - RNA, 19 nt, Human
auuugaugcuggagagguu

SEQ ID NO: 2607999 - RNA, 17 nt, Human
auuugaugcuggagagg

SEQ ID NO: 2608000 - RNA, 15 nt, Human
auuugaugccaggac

SEQ ID NO: 2608001 - RNA, 16 nt, Human
auuugaugcuggagag

SEQ ID NO: 2608002 - RNA, 14 nt, Human
auuugaugcuaaau

SEQ ID NO: 2608003 - RNA, 21 nt, Human
auuugaggucuguucuuucca

SEQ ID NO: 2608004 - RNA, 18 nt, Human
auuugagagaaauaugaa

SEQ ID NO: 2608005 - RNA, 21 nt, Human
auuugagauguauuucaacuu

SEQ ID NO: 2608006 - RNA, 17 nt, Human
auuugaucguuccaguu

SEQ ID NO: 2608007 - RNA, 15 nt, Human
auuugauaucacagu

SEQ ID NO: 2608008 - RNA, 23 nt, Human
auuugaucguuccaguucccacu

SEQ ID NO: 2608009 - RNA, 14 nt, Human
auuugauaucacag

SEQ ID NO: 2608010 - RNA, 20 nt, Human
auuugauaguauugugcaua

SEQ ID NO: 2608011 - RNA, 20 nt, Human
auuuguaauugcuuacauuu

SEQ ID NO: 2608012 - RNA, 19 nt, Human
auuuguaauugcuuacauu

SEQ ID NO: 2608013 - RNA, 15 nt, Human
auuuguaauugcuua

SEQ ID NO: 2608014 - RNA, 15 nt, Human
auuuguacaguucag

SEQ ID NO: 2608015 - RNA, 13 nt, Human
auuuguacaguuc

SEQ ID NO: 2608016 - RNA, 21 nt, Human
auuuguacauaguuauuuauu

SEQ ID NO: 2608017 - RNA, 23 nt, Human
auuuguaauugcuuacauuuuua

SEQ ID NO: 2608018 - RNA, 13 nt, Human
auuuguacaaaaa

SEQ ID NO: 2608019 - RNA, 21 nt, Human
auuuggugguuucagaaaugu

SEQ ID NO: 2608020 - RNA, 19 nt, Human
auuuggcaaugccaucauc

SEQ ID NO: 2608021 - RNA, 16 nt, Human
auuugguucauuaauu

SEQ ID NO: 2608022 - RNA, 21 nt, Human
auuugguucauuaauucuaua

SEQ ID NO: 2608023 - RNA, 18 nt, Human
auuugguucuaggccggg

SEQ ID NO: 2608024 - RNA, 15 nt, Human
auuugguucuaauag

SEQ ID NO: 2608025 - RNA, 22 nt, Human
auuugguuuggccaucucugga

SEQ ID NO: 2608026 - RNA, 20 nt, Human
auuugguuuggccaucucug

SEQ ID NO: 2608027 - RNA, 21 nt, Human
auuuauaaaacuucucaagau

SEQ ID NO: 2608028 - RNA, 14 nt, Human
auuuauaaaacuuc

SEQ ID NO: 2608029 - RNA, 15 nt, Human
auuuauaaaacuucu

SEQ ID NO: 2608030 - RNA, 17 nt, Human
auuuauaaagcuaaaau

SEQ ID NO: 2608031 - RNA, 21 nt, Human
auuuauaaagcuaaaauaacc

SEQ ID NO: 2608032 - RNA, 15 nt, Human
auuuauaaacuuuuu

SEQ ID NO: 2608033 - RNA, 18 nt, Human
auuuauggucaacacuua

SEQ ID NO: 2608034 - RNA, 17 nt, Human
auuuauaaaugcuauuu

SEQ ID NO: 2608035 - RNA, 23 nt, Human
auuuauguaaacugcauuagaaa

SEQ ID NO: 2608036 - RNA, 14 nt, Human
auuuauaaaugcua

SEQ ID NO: 2608037 - RNA, 13 nt, Human
auuuauaaaugcu

SEQ ID NO: 2608038 - RNA, 22 nt, Human
auuuauaaauauauuuaagaua

SEQ ID NO: 2608039 - RNA, 16 nt, Human
auuuauaaaugcuauu

SEQ ID NO: 2608040 - RNA, 15 nt, Human
auuuauaaaugcuau

SEQ ID NO: 2608041 - RNA, 13 nt, Human
auuuauaacucau

SEQ ID NO: 2608042 - RNA, 13 nt, Human
auuuauguuugca

SEQ ID NO: 2608043 - RNA, 15 nt, Human
auuuauuaauugcuu

SEQ ID NO: 2608044 - RNA, 16 nt, Human
auuuauuaauugcuuu

SEQ ID NO: 2608045 - RNA, 17 nt, Human
auuuauuaauugcuuug

SEQ ID NO: 2608046 - RNA, 18 nt, Human
auuuauuaauugcuuuga

SEQ ID NO: 2608047 - RNA, 13 nt, Human
auuuaugugugag

SEQ ID NO: 2608048 - RNA, 18 nt, Human
auuuaugugugaggagcu

SEQ ID NO: 2608049 - RNA, 19 nt, Human
auuuaugugugaggagcug

SEQ ID NO: 2608050 - RNA, 22 nt, Human
auuuaugugugaggagcugcug

SEQ ID NO: 2608051 - RNA, 22 nt, Human
auuuaugucuauuuaagccuca

SEQ ID NO: 2608052 - RNA, 20 nt, Human
auuuauguagaugugcauuu

SEQ ID NO: 2608053 - RNA, 21 nt, Human
auuuauguagaugugcauuuu

SEQ ID NO: 2608054 - RNA, 12 nt, Human
auuuauguaaac

SEQ ID NO: 2608055 - RNA, 12 nt, Human
auuuauguagau

SEQ ID NO: 2608056 - RNA, 14 nt, Human
auuuauguagaugu

SEQ ID NO: 2608057 - RNA, 18 nt, Human
auuuauguagaugugcau

SEQ ID NO: 2608058 - RNA, 16 nt, Human
auuuaguguucauaaa

SEQ ID NO: 2608059 - RNA, 22 nt, Human
auuuacuugccauuacucaauu

SEQ ID NO: 2608060 - RNA, 15 nt, Human
auuuacuuugaauuu

SEQ ID NO: 2608061 - RNA, 19 nt, Human
auuuacuucuuauacauuu

SEQ ID NO: 2608062 - RNA, 20 nt, Human
auuuacuucuuauacauuug

SEQ ID NO: 2608063 - RNA, 14 nt, Human
auuuaguuauaguu

SEQ ID NO: 2608064 - RNA, 13 nt, Human
auuuaguuauagu

SEQ ID NO: 2608065 - RNA, 21 nt, Human
auuuaguguuuuuaccucugu

SEQ ID NO: 2608066 - RNA, 20 nt, Human
auuuacuugccauuacucaa

SEQ ID NO: 2608067 - RNA, 17 nt, Human
auuuaguguucauaaau

SEQ ID NO: 2608068 - RNA, 23 nt, Human
auuuauaaaaauaaaaaacacug

SEQ ID NO: 2608069 - RNA, 17 nt, Human
auuuaguucuuuguuau

SEQ ID NO: 2608070 - RNA, 13 nt, Human
auuuaguuauuga

SEQ ID NO: 2608071 - RNA, 16 nt, Human
auuuaguuauaguuuc

SEQ ID NO: 2608072 - RNA, 12 nt, Human
auuuaguucuuu

SEQ ID NO: 2608073 - RNA, 16 nt, Human
auuuaguucuuuguua

SEQ ID NO: 2608074 - RNA, 14 nt, Human
auuuauugcuugau

SEQ ID NO: 2608075 - RNA, 18 nt, Human
auuguagagccagagguc

SEQ ID NO: 2608076 - RNA, 17 nt, Human
auuguagagccagaggu

SEQ ID NO: 2608077 - RNA, 16 nt, Human
auuguaguccuguaau

SEQ ID NO: 2608078 - RNA, 18 nt, Human
auuguagcauuucuugau

SEQ ID NO: 2608079 - RNA, 16 nt, Human
auuguagcauuucuug

SEQ ID NO: 2608080 - RNA, 14 nt, Human
auuguaguuaauga

SEQ ID NO: 2608081 - RNA, 15 nt, Human
auuguagcauuucuu

SEQ ID NO: 2608082 - RNA, 22 nt, Human
auuguacucaauggauuugaug

SEQ ID NO: 2608083 - RNA, 18 nt, Human
auuguacucaauggauuu

SEQ ID NO: 2608084 - RNA, 17 nt, Human
auuguuuucaguguaca

SEQ ID NO: 2608085 - RNA, 14 nt, Human
auuguauaaaaaua

SEQ ID NO: 2608086 - RNA, 15 nt, Human
auuguauaaaaauag

SEQ ID NO: 2608087 - RNA, 10 nt, Human
auuguuuuca

SEQ ID NO: 2608088 - RNA, 13 nt, Human
auuguuuuaucau

SEQ ID NO: 2608089 - RNA, 17 nt, Human
auuguauaaaaauagaa

SEQ ID NO: 2608090 - RNA, 18 nt, Human
auuguuuugccaacauug

SEQ ID NO: 2608091 - RNA, 15 nt, Human
auuguuuugcacuuu

SEQ ID NO: 2608092 - RNA, 20 nt, Human
auuguuuugagcuuuccaug

SEQ ID NO: 2608093 - RNA, 18 nt, Human
auuguuuuaucaugacau

SEQ ID NO: 2608094 - RNA, 17 nt, Human
auuuaaaaaaaaaccug

SEQ ID NO: 2608095 - RNA, 18 nt, Human
auuguuuucaguguacau

SEQ ID NO: 2608096 - RNA, 19 nt, Human
auuguuuucaguguacaug

SEQ ID NO: 2608097 - RNA, 21 nt, Human
auuuaaaagggaagucuagag

SEQ ID NO: 2608098 - RNA, 19 nt, Human
auuuaaaagggaagucuag

SEQ ID NO: 2608099 - RNA, 15 nt, Human
auuuaaaagggaagu

SEQ ID NO: 2608100 - RNA, 19 nt, Human
auuuaaaagauucauuuuu

SEQ ID NO: 2608101 - RNA, 18 nt, Human
auuuaaaagauucauuuu

SEQ ID NO: 2608102 - RNA, 16 nt, Human
auuuaaaagauucauu

SEQ ID NO: 2608103 - RNA, 18 nt, Human
auuguuuugguuugcuac

SEQ ID NO: 2608104 - RNA, 19 nt, Human
auuuaaaaaaaaaagagga

SEQ ID NO: 2608105 - RNA, 14 nt, Human
auuuaaaaaaaauc

SEQ ID NO: 2608106 - RNA, 15 nt, Human
auuuacuaagccaca

SEQ ID NO: 2608107 - RNA, 21 nt, Human
auuuaccacagcagcugaaca

SEQ ID NO: 2608108 - RNA, 15 nt, Human
auuuacuacuuuugc

SEQ ID NO: 2608109 - RNA, 22 nt, Human
auuuacuaagccacaagaaauu

SEQ ID NO: 2608110 - RNA, 21 nt, Human
auuuacuaagccacaagaaau

SEQ ID NO: 2608111 - RNA, 23 nt, Human
auuuacuaagccacaagaaauuu

SEQ ID NO: 2608112 - RNA, 20 nt, Human
auuuacugagcuucucugug

SEQ ID NO: 2608113 - RNA, 13 nt, Human
auuuacugagcuu

SEQ ID NO: 2608114 - RNA, 22 nt, Human
auuuacucauucauuuauucau

SEQ ID NO: 2608115 - RNA, 15 nt, Human
auuuaccacuugugu

SEQ ID NO: 2608116 - RNA, 19 nt, Human
auuuacauguauuauuuca

SEQ ID NO: 2608117 - RNA, 16 nt, Human
auuuacauguauuauu

SEQ ID NO: 2608118 - RNA, 20 nt, Human
auuuacaugaauugcauuuu

SEQ ID NO: 2608119 - RNA, 21 nt, Human
auuuacaugaauugcauuuua

SEQ ID NO: 2608120 - RNA, 18 nt, Human
auuuacaugaauugcauu

SEQ ID NO: 2608121 - RNA, 16 nt, Human
auuuacauaugaaauu

SEQ ID NO: 2608122 - RNA, 21 nt, Human
auuuacauaugaaauuuaaua

SEQ ID NO: 2608123 - RNA, 22 nt, Human
auuuaccacuuguguuuugcaa

SEQ ID NO: 2608124 - RNA, 15 nt, Human
auuuaccacagcagc

SEQ ID NO: 2608125 - RNA, 22 nt, Human
auuuacauguauuauuucauua

SEQ ID NO: 2608126 - RNA, 18 nt, Human
auuuaccacagcagcuga

SEQ ID NO: 2608127 - RNA, 17 nt, Human
auuuaccacagcagcug

SEQ ID NO: 2608128 - RNA, 16 nt, Human
auuuaaaaugauuaga

SEQ ID NO: 2608129 - RNA, 14 nt, Human
auuuaaaaugauua

SEQ ID NO: 2608130 - RNA, 13 nt, Human
auuuaaaaugauu

SEQ ID NO: 2608131 - RNA, 15 nt, Human
auuuaaaauugugau

SEQ ID NO: 2608132 - RNA, 21 nt, Human
auuuaaauacagucuuccauu

SEQ ID NO: 2608133 - RNA, 21 nt, Human
auuuaaaauguguuucuuaca

SEQ ID NO: 2608134 - RNA, 15 nt, Human
auuuaaauauaauuc

SEQ ID NO: 2608135 - RNA, 13 nt, Human
auuuaaauauaau

SEQ ID NO: 2608136 - RNA, 22 nt, Human
auuuaaauauaauucuguaaau

SEQ ID NO: 2608137 - RNA, 20 nt, Human
auuuaaauauaauucuguaa

SEQ ID NO: 2608138 - RNA, 19 nt, Human
auuuaaauauaauucugua

SEQ ID NO: 2608139 - RNA, 18 nt, Human
auuuaaauauaauucugu

SEQ ID NO: 2608140 - RNA, 23 nt, Human
auuuaaauauaauucuguaaaug

SEQ ID NO: 2608141 - RNA, 16 nt, Human
auuuaaauauuaaaua

SEQ ID NO: 2608142 - RNA, 14 nt, Human
auuuacacugggag

SEQ ID NO: 2608143 - RNA, 17 nt, Human
auuuaaaugucuaaugu

SEQ ID NO: 2608144 - RNA, 13 nt, Human
auuuacaguuuca

SEQ ID NO: 2608145 - RNA, 23 nt, Human
auuuacagugaaaauguaagcug

SEQ ID NO: 2608146 - RNA, 22 nt, Human
auuuacagugaaaauguaagcu

SEQ ID NO: 2608147 - RNA, 21 nt, Human
auuuacagugaaaauguaagc

SEQ ID NO: 2608148 - RNA, 24 nt, Human
auuuacaguuucaaaaacuguauu

SEQ ID NO: 2608149 - RNA, 15 nt, Human
auuuacaguuucaaa

SEQ ID NO: 2608150 - RNA, 14 nt, Human
auuuacauaugaaa

SEQ ID NO: 2608151 - RNA, 15 nt, Human
auuuacauaugaaau

SEQ ID NO: 2608152 - RNA, 20 nt, Human
auuuacagugaaaauguaag

SEQ ID NO: 2608153 - RNA, 21 nt, Human
auuuacagccucacuugaaug

SEQ ID NO: 2608154 - RNA, 19 nt, Human
auuuacagaugaauguauu

SEQ ID NO: 2608155 - RNA, 20 nt, Human
auuuauuacuguaagaaaau

SEQ ID NO: 2608156 - RNA, 19 nt, Human
auuuauuacuguaagaaaa

SEQ ID NO: 2608157 - RNA, 15 nt, Human
auuuauuaccucuga

SEQ ID NO: 2608158 - RNA, 14 nt, Human
auuuauuaccucug

SEQ ID NO: 2608159 - RNA, 19 nt, Human
auuuauugcuugauacuuu

SEQ ID NO: 2608160 - RNA, 20 nt, Human
auuuauugcuugauacuuuu

SEQ ID NO: 2608161 - RNA, 13 nt, Human
auuuauugcuuua

SEQ ID NO: 2608162 - RNA, 12 nt, Human
auuuauugcuuu

SEQ ID NO: 2608163 - RNA, 14 nt, Human
auuuauugcuuuau

SEQ ID NO: 2608164 - RNA, 17 nt, Human
auuuauuuuugcauggc

SEQ ID NO: 2608165 - RNA, 19 nt, Human
auuuauuuuuuacauuauu

SEQ ID NO: 2608166 - RNA, 21 nt, Human
auuuauuuuucucaugaaucu

SEQ ID NO: 2608167 - RNA, 18 nt, Human
auuuauuuuuuacauuau

SEQ ID NO: 2608168 - RNA, 14 nt, Human
auuuauuuuuuaca

SEQ ID NO: 2608169 - RNA, 17 nt, Human
auuuauuuuccucccca

SEQ ID NO: 2608170 - RNA, 13 nt, Human
auuuauuuuccuc

SEQ ID NO: 2608171 - RNA, 20 nt, Human
auuuauuuuccuccccagca

SEQ ID NO: 2608172 - RNA, 21 nt, Human
auuuauuuuaauaauguuuca

SEQ ID NO: 2608173 - RNA, 19 nt, Human
auuuauuguuuauuuauca

SEQ ID NO: 2608174 - RNA, 20 nt, Human
auuuauuguuuauuuaucag

SEQ ID NO: 2608175 - RNA, 21 nt, Human
auuuauuguuuauuuaucagu

SEQ ID NO: 2608176 - RNA, 22 nt, Human
auuucaugugucaacuucaaca

SEQ ID NO: 2608177 - RNA, 14 nt, Human
auuucaugugucaa

SEQ ID NO: 2608178 - RNA, 14 nt, Human
auuucauuccuaac

SEQ ID NO: 2608179 - RNA, 22 nt, Human
auuuccauauaaauauuagaaa

SEQ ID NO: 2608180 - RNA, 17 nt, Human
auuuccauauggauuuu

SEQ ID NO: 2608181 - RNA, 15 nt, Human
auuuccauauggauu

SEQ ID NO: 2608182 - RNA, 17 nt, Human
auuuccauuccagaaua

SEQ ID NO: 2608183 - RNA, 16 nt, Human
auuuccauuccagaau

SEQ ID NO: 2608184 - RNA, 15 nt, Human
auuuccauuccagaa

SEQ ID NO: 2608185 - RNA, 15 nt, Human
auuuccauuauuuau

SEQ ID NO: 2608186 - RNA, 17 nt, Human
auuuccauuauuuauau

SEQ ID NO: 2608187 - RNA, 18 nt, Human
auuucaugcuaucucugu

SEQ ID NO: 2608188 - RNA, 15 nt, Human
auuucaugauuucau

SEQ ID NO: 2608189 - RNA, 19 nt, Human
auuucaaaaauauaacuua

SEQ ID NO: 2608190 - RNA, 14 nt, Human
auuucaugaaaauu

SEQ ID NO: 2608191 - RNA, 21 nt, Human
auuucaucugcucuccuuccu

SEQ ID NO: 2608192 - RNA, 20 nt, Human
auuucaucugcucuccuucc

SEQ ID NO: 2608193 - RNA, 18 nt, Human
auuucaaaaauauaacuu

SEQ ID NO: 2608194 - RNA, 17 nt, Human
auuucaaaaauauaacu

SEQ ID NO: 2608195 - RNA, 15 nt, Human
auuucaaaaauauaa

SEQ ID NO: 2608196 - RNA, 14 nt, Human
auuucaaaaauaua

SEQ ID NO: 2608197 - RNA, 20 nt, Human
auuucaaaaaaauaaaauaa

SEQ ID NO: 2608198 - RNA, 19 nt, Human
auuucaaaaaaauaaaaua

SEQ ID NO: 2608199 - RNA, 19 nt, Human
auuucaucugcucuccuuc

SEQ ID NO: 2608200 - RNA, 18 nt, Human
auuucaucugcucuccuu

SEQ ID NO: 2608201 - RNA, 14 nt, Human
auuucaaaacucau

SEQ ID NO: 2608202 - RNA, 16 nt, Human
auuucccaaagcagug

SEQ ID NO: 2608203 - RNA, 14 nt, Human
auuucccaaagcag

SEQ ID NO: 2608204 - RNA, 17 nt, Human
auuuccguuaaaauacc

SEQ ID NO: 2608205 - RNA, 14 nt, Human
auuuccuaaauaua

SEQ ID NO: 2608206 - RNA, 19 nt, Human
auuuccuaauuuugagaaa

SEQ ID NO: 2608207 - RNA, 15 nt, Human
auuuccuaguucugu

SEQ ID NO: 2608208 - RNA, 20 nt, Human
auuuccuaguucuguagaaa

SEQ ID NO: 2608209 - RNA, 18 nt, Human
auuuccuaguucuguaga

SEQ ID NO: 2608210 - RNA, 22 nt, Human
auuuccuaguucuguagaaaug

SEQ ID NO: 2608211 - RNA, 18 nt, Human
auuuccuaucaccuauuu

SEQ ID NO: 2608212 - RNA, 21 nt, Human
auuuccuaaauauauuuuaag

SEQ ID NO: 2608213 - RNA, 13 nt, Human
auuuccuuuauaa

SEQ ID NO: 2608214 - RNA, 18 nt, Human
auuuccuuuggagcuuuu

SEQ ID NO: 2608215 - RNA, 23 nt, Human
auuuccuugaauguggcuugaga

SEQ ID NO: 2608216 - RNA, 20 nt, Human
auuuccugcccuuccucagu

SEQ ID NO: 2608217 - RNA, 13 nt, Human
auuuccugcccuu

SEQ ID NO: 2608218 - RNA, 19 nt, Human
auuuccucuauugauguac

SEQ ID NO: 2608219 - RNA, 18 nt, Human
auuuccucuauugaugua

SEQ ID NO: 2608220 - RNA, 22 nt, Human
auuuccucuauugauguacagu

SEQ ID NO: 2608221 - RNA, 22 nt, Human
auuuccucaugugaucacaauu

SEQ ID NO: 2608222 - RNA, 21 nt, Human
auuuccucaugugaucacaau

SEQ ID NO: 2608223 - RNA, 16 nt, Human
auuuccuccacaaauu

SEQ ID NO: 2608224 - RNA, 11 nt, Human
auuuccucuau

SEQ ID NO: 2608225 - RNA, 20 nt, Human
auuuccuccgucaccucaga

SEQ ID NO: 2608226 - RNA, 24 nt, Human
auuuccucaacguugcuccccauc

SEQ ID NO: 2608227 - RNA, 22 nt, Human
auuuccucaacguugcucccca

SEQ ID NO: 2608228 - RNA, 19 nt, Human
auuuccuauuuuuggaaga

SEQ ID NO: 2608229 - RNA, 20 nt, Human
auuuccuauguaacugcauu

SEQ ID NO: 2608230 - RNA, 21 nt, Human
auuucgucuguuuauaaacau

SEQ ID NO: 2608231 - RNA, 20 nt, Human
auuucgugggucuguuuucc

SEQ ID NO: 2608232 - RNA, 14 nt, Human
auuucuaaaaaaca

SEQ ID NO: 2608233 - RNA, 20 nt, Human
auuucuaaaaaacagaggcc

SEQ ID NO: 2608234 - RNA, 19 nt, Human
auuuccuuuuuuguuauua

SEQ ID NO: 2608235 - RNA, 21 nt, Human
auuucgccguugaagaggaag

SEQ ID NO: 2608236 - RNA, 20 nt, Human
auuucuuacuaaacauuuug

SEQ ID NO: 2608237 - RNA, 13 nt, Human
auuucuuacaggc

SEQ ID NO: 2608238 - RNA, 21 nt, Human
auuucuaaaaaacagaggcca

SEQ ID NO: 2608239 - RNA, 22 nt, Human
auuucgugggucuguuuuccuu

SEQ ID NO: 2608240 - RNA, 20 nt, Human
caccagagcagaugcagaga

SEQ ID NO: 2608241 - RNA, 19 nt, Human
caccagagcagaugcagag

SEQ ID NO: 2608242 - RNA, 18 nt, Human
caccagagcagaugcaga

SEQ ID NO: 2608243 - RNA, 17 nt, Human
caccagagcagaugcag

SEQ ID NO: 2608244 - RNA, 16 nt, Human
caccagagcagaugca

SEQ ID NO: 2608245 - RNA, 12 nt, Human
caccagagcaga

SEQ ID NO: 2608246 - RNA, 21 nt, Human
caccagagagggacugacacc

SEQ ID NO: 2608247 - RNA, 15 nt, Human
caccagagcccaccu

SEQ ID NO: 2608248 - RNA, 11 nt, Human
caccagagacc

SEQ ID NO: 2608249 - RNA, 19 nt, Human
caccagacacccaggacuu

SEQ ID NO: 2608250 - RNA, 20 nt, Human
caccagacacccaggacuua

SEQ ID NO: 2608251 - RNA, 14 nt, Human
caccagagagggac

SEQ ID NO: 2608252 - RNA, 21 nt, Human
caccagagaccguccucaccc

SEQ ID NO: 2608253 - RNA, 20 nt, Human
caccagagaccguccucacc

SEQ ID NO: 2608254 - RNA, 19 nt, Human
caccagagaccguccucac

SEQ ID NO: 2608255 - RNA, 16 nt, Human
caccagagaccguccu

SEQ ID NO: 2608256 - RNA, 22 nt, Human
caccacgauguggcccuggccu

SEQ ID NO: 2608257 - RNA, 22 nt, Human
caccagagcccaccuuggcuca

SEQ ID NO: 2608258 - RNA, 20 nt, Human
caccagagcccaccuuggcu

SEQ ID NO: 2608259 - RNA, 18 nt, Human
caccagagcccaccuugg

SEQ ID NO: 2608260 - RNA, 17 nt, Human
caccagagcccaccuug

SEQ ID NO: 2608261 - RNA, 16 nt, Human
caccacacccagccuc

SEQ ID NO: 2608262 - RNA, 15 nt, Human
caccacacccagccu

SEQ ID NO: 2608263 - RNA, 14 nt, Human
caccacacucagcc

SEQ ID NO: 2608264 - RNA, 19 nt, Human
caccacacccagcccacuu

SEQ ID NO: 2608265 - RNA, 15 nt, Human
caccacacucagccc

SEQ ID NO: 2608266 - RNA, 19 nt, Human
caccacacugauccagccc

SEQ ID NO: 2608267 - RNA, 13 nt, Human
caccacagacaca

SEQ ID NO: 2608268 - RNA, 12 nt, Human
caccacagacac

SEQ ID NO: 2608269 - RNA, 18 nt, Human
caccacacccagccucag

SEQ ID NO: 2608270 - RNA, 17 nt, Human
caccacacccagccuca

SEQ ID NO: 2608271 - RNA, 14 nt, Human
caccacagacacac

SEQ ID NO: 2608272 - RNA, 13 nt, Human
caccaccuuccca

SEQ ID NO: 2608273 - RNA, 14 nt, Human
caccaccuucccag

SEQ ID NO: 2608274 - RNA, 15 nt, Human
caccagacacccagg

SEQ ID NO: 2608275 - RNA, 16 nt, Human
caccagacacccagga

SEQ ID NO: 2608276 - RNA, 17 nt, Human
caccagacacccaggac

SEQ ID NO: 2608277 - RNA, 18 nt, Human
caccagacacccaggacu

SEQ ID NO: 2608278 - RNA, 14 nt, Human
caccagacacccag

SEQ ID NO: 2608279 - RNA, 19 nt, Human
caccacgcuggggucuggg

SEQ ID NO: 2608280 - RNA, 15 nt, Human
caccacgcccggcua

SEQ ID NO: 2608281 - RNA, 14 nt, Human
caccacgcccggcu

SEQ ID NO: 2608282 - RNA, 18 nt, Human
caccacgauguggcccug

SEQ ID NO: 2608283 - RNA, 19 nt, Human
caccacgauguggcccugg

SEQ ID NO: 2608284 - RNA, 20 nt, Human
caccacgauguggcccuggc

SEQ ID NO: 2608285 - RNA, 21 nt, Human
caccacgauguggcccuggcc

SEQ ID NO: 2608286 - RNA, 15 nt, Human
caccaccuucccagc

SEQ ID NO: 2608287 - RNA, 16 nt, Human
caccaccuucccagcu

SEQ ID NO: 2608288 - RNA, 18 nt, Human
caccaccuucccagcucu

SEQ ID NO: 2608289 - RNA, 19 nt, Human
caccaccuucccagcucuc

SEQ ID NO: 2608290 - RNA, 22 nt, Human
caccaccuucccagcucucccu

SEQ ID NO: 2608291 - RNA, 21 nt, Human
caccaccuucccagcucuccc

SEQ ID NO: 2608292 - RNA, 15 nt, Human
caccacgauguggcc

SEQ ID NO: 2608293 - RNA, 22 nt, Human
cacauguccaagaagcccagga

SEQ ID NO: 2608294 - RNA, 21 nt, Human
cacauguccaagaagcccagg

SEQ ID NO: 2608295 - RNA, 19 nt, Human
cacauguccaagaagccca

SEQ ID NO: 2608296 - RNA, 18 nt, Human
cacauguccaagaagccc

SEQ ID NO: 2608297 - RNA, 17 nt, Human
caccaacgucugugcca

SEQ ID NO: 2608298 - RNA, 14 nt, Human
caccaacucuugca

SEQ ID NO: 2608299 - RNA, 14 nt, Human
caccaagcacagca

SEQ ID NO: 2608300 - RNA, 15 nt, Human
caccaagcacagcag

SEQ ID NO: 2608301 - RNA, 16 nt, Human
caccaagcacagcagc

SEQ ID NO: 2608302 - RNA, 17 nt, Human
caccaagcacagcagcc

SEQ ID NO: 2608303 - RNA, 13 nt, Human
caccaagcacagc

SEQ ID NO: 2608304 - RNA, 22 nt, Human
caccaagacuuguuuuaugcuc

SEQ ID NO: 2608305 - RNA, 18 nt, Human
caccaacucuugcagguc

SEQ ID NO: 2608306 - RNA, 15 nt, Human
caccaagaaagcagg

SEQ ID NO: 2608307 - RNA, 21 nt, Human
caccaaggucuucagccauca

SEQ ID NO: 2608308 - RNA, 20 nt, Human
caccaaggucuucagccauc

SEQ ID NO: 2608309 - RNA, 15 nt, Human
caccaaggucuucag

SEQ ID NO: 2608310 - RNA, 14 nt, Human
caccaaggucuuca

SEQ ID NO: 2608311 - RNA, 23 nt, Human
caccaagggcgcaagaguagcgg

SEQ ID NO: 2608312 - RNA, 19 nt, Human
caccaagggcgcaagagua

SEQ ID NO: 2608313 - RNA, 18 nt, Human
caccaagggcgcaagagu

SEQ ID NO: 2608314 - RNA, 10 nt, Human
caccaagggc

SEQ ID NO: 2608315 - RNA, 23 nt, Human
caccaagcugugccacccugggc

SEQ ID NO: 2608316 - RNA, 22 nt, Human
caccaagcugugccacccuggg

SEQ ID NO: 2608317 - RNA, 21 nt, Human
caccaagcugugccacccugg

SEQ ID NO: 2608318 - RNA, 20 nt, Human
caccaagcugugccacccug

SEQ ID NO: 2608319 - RNA, 18 nt, Human
caccaagcugugccaccc

SEQ ID NO: 2608320 - RNA, 16 nt, Human
caccaagcugugccac

SEQ ID NO: 2608321 - RNA, 15 nt, Human
caccaagcugugcca

SEQ ID NO: 2608322 - RNA, 18 nt, Human
caccaauugauuuuaaac

SEQ ID NO: 2608323 - RNA, 13 nt, Human
caccaagccaagg

SEQ ID NO: 2608324 - RNA, 21 nt, Human
caccaagcaggaaaugaaaau

SEQ ID NO: 2608325 - RNA, 18 nt, Human
caccaagcacagcagccu

SEQ ID NO: 2608326 - RNA, 19 nt, Human
caccaagcacagcagccug

SEQ ID NO: 2608327 - RNA, 12 nt, Human
caccaagcccag

SEQ ID NO: 2608328 - RNA, 13 nt, Human
caccaagcccagu

SEQ ID NO: 2608329 - RNA, 14 nt, Human
caccaagcugugcc

SEQ ID NO: 2608330 - RNA, 14 nt, Human
caccaagccaaggg

SEQ ID NO: 2608331 - RNA, 24 nt, Human
caccaucaagccaccaacauacuc

SEQ ID NO: 2608332 - RNA, 19 nt, Human
caccaucaagccaccaaca

SEQ ID NO: 2608333 - RNA, 17 nt, Human
caccaucaagccaccaa

SEQ ID NO: 2608334 - RNA, 16 nt, Human
caccaucaagccacca

SEQ ID NO: 2608335 - RNA, 21 nt, Human
caccaucccuuuuugaagugu

SEQ ID NO: 2608336 - RNA, 20 nt, Human
caccaucccuuuuugaagug

SEQ ID NO: 2608337 - RNA, 19 nt, Human
caccaucccuuuuugaagu

SEQ ID NO: 2608338 - RNA, 16 nt, Human
caccaucccuuuuuga

SEQ ID NO: 2608339 - RNA, 15 nt, Human
caccaucccuuuuug

SEQ ID NO: 2608340 - RNA, 18 nt, Human
caccaucaugucuggcua

SEQ ID NO: 2608341 - RNA, 17 nt, Human
caccaucaugucuggcu

SEQ ID NO: 2608342 - RNA, 15 nt, Human
caccaucaugucugg

SEQ ID NO: 2608343 - RNA, 21 nt, Human
caccaugccaggcuaauuuuu

SEQ ID NO: 2608344 - RNA, 22 nt, Human
caccaugcagugccccuagcuu

SEQ ID NO: 2608345 - RNA, 21 nt, Human
caccaugcagugccccuagcu

SEQ ID NO: 2608346 - RNA, 11 nt, Human
caccaugaaac

SEQ ID NO: 2608347 - RNA, 14 nt, Human
caccaucuuugcag

SEQ ID NO: 2608348 - RNA, 23 nt, Human
caccaucuuaagagaugccucau

SEQ ID NO: 2608349 - RNA, 22 nt, Human
caccaucucaggccaccugccc

SEQ ID NO: 2608350 - RNA, 18 nt, Human
caccaucucaggccaccu

SEQ ID NO: 2608351 - RNA, 19 nt, Human
caccaucucaggccaccug

SEQ ID NO: 2608352 - RNA, 20 nt, Human
caccaucucaggccaccugc

SEQ ID NO: 2608353 - RNA, 21 nt, Human
caccaucucaggccaccugcc

SEQ ID NO: 2608354 - RNA, 21 nt, Human
caccauccugcagccuccucc

SEQ ID NO: 2608355 - RNA, 20 nt, Human
caccauccugcagccuccuc

SEQ ID NO: 2608356 - RNA, 15 nt, Human
caccauccugcagcc

SEQ ID NO: 2608357 - RNA, 18 nt, Human
caccauccgccagggccc

SEQ ID NO: 2608358 - RNA, 13 nt, Human
caccauccugcug

SEQ ID NO: 2608359 - RNA, 13 nt, Human
caccaucucaggc

SEQ ID NO: 2608360 - RNA, 14 nt, Human
caccaucucaggcc

SEQ ID NO: 2608361 - RNA, 20 nt, Human
caccauguugcccaggcugg

SEQ ID NO: 2608362 - RNA, 18 nt, Human
caccauguacauagcuug

SEQ ID NO: 2608363 - RNA, 23 nt, Human
caccaugggguccuaccaauaga

SEQ ID NO: 2608364 - RNA, 18 nt, Human
caccaugggguccuacca

SEQ ID NO: 2608365 - RNA, 12 nt, Human
caccauggccag

SEQ ID NO: 2608366 - RNA, 16 nt, Human
caccauggccagccaa

SEQ ID NO: 2608367 - RNA, 20 nt, Human
caccauguuggccaggcugc

SEQ ID NO: 2608368 - RNA, 20 nt, Human
caccauguuggccaggcugg

SEQ ID NO: 2608369 - RNA, 19 nt, Human
caccauguuggccaggcug

SEQ ID NO: 2608370 - RNA, 15 nt, Human
caccaucaagccacc

SEQ ID NO: 2608371 - RNA, 14 nt, Human
caccaucaagccac

SEQ ID NO: 2608372 - RNA, 13 nt, Human
caccaucaagcca

SEQ ID NO: 2608373 - RNA, 16 nt, Human
caccauauucagugcu

SEQ ID NO: 2608374 - RNA, 21 nt, Human
caccauauucagugcuguggc

SEQ ID NO: 2608375 - RNA, 21 nt, Human
caccauauuaccacagacaua

SEQ ID NO: 2608376 - RNA, 18 nt, Human
caccauaggucaccuuua

SEQ ID NO: 2608377 - RNA, 18 nt, Human
caccaguuccuuucaaug

SEQ ID NO: 2608378 - RNA, 19 nt, Human
caccaggggcaggcacagc

SEQ ID NO: 2608379 - RNA, 18 nt, Human
caccaggggcaggcacag

SEQ ID NO: 2608380 - RNA, 17 nt, Human
caccaggggcaggcaca

SEQ ID NO: 2608381 - RNA, 16 nt, Human
caccaggggcaggcac

SEQ ID NO: 2608382 - RNA, 13 nt, Human
caccaggggcagg

SEQ ID NO: 2608383 - RNA, 12 nt, Human
caccaggggcag

SEQ ID NO: 2608384 - RNA, 21 nt, Human
caccaggggcaggcacagcac

SEQ ID NO: 2608385 - RNA, 20 nt, Human
caccaggggcaggcacagca

SEQ ID NO: 2608386 - RNA, 15 nt, Human
caccagggguuucuc

SEQ ID NO: 2608387 - RNA, 19 nt, Human
caccaggguugaccccaga

SEQ ID NO: 2608388 - RNA, 20 nt, Human
caccagaggcugcagaaggc

SEQ ID NO: 2608389 - RNA, 16 nt, Human
caccagaggcugcaga

SEQ ID NO: 2608390 - RNA, 11 nt, Human
caccagagcug

SEQ ID NO: 2608391 - RNA, 21 nt, Human
caccagagcauuuccaacacc

SEQ ID NO: 2608392 - RNA, 23 nt, Human
caccagaggcugcagaaggccaa

SEQ ID NO: 2608393 - RNA, 21 nt, Human
caccagaggcugcagaaggcc

SEQ ID NO: 2608394 - RNA, 11 nt, Human
caccagcacca

SEQ ID NO: 2608395 - RNA, 18 nt, Human
caccaguguccccuccac

SEQ ID NO: 2608396 - RNA, 16 nt, Human
caccaguguccccucc

SEQ ID NO: 2608397 - RNA, 14 nt, Human
caccaguguccccu

SEQ ID NO: 2608398 - RNA, 13 nt, Human
caccagugucccc

SEQ ID NO: 2608399 - RNA, 21 nt, Human
caccagugacuuuuucuaaga

SEQ ID NO: 2608400 - RNA, 22 nt, Human
caccaggguugaccccagagga

SEQ ID NO: 2608401 - RNA, 23 nt, Human
caccaggguugaccccagaggau

SEQ ID NO: 2608402 - RNA, 16 nt, Human
caccagguagaacaca

SEQ ID NO: 2608403 - RNA, 15 nt, Human
caccagucacugucc

SEQ ID NO: 2608404 - RNA, 17 nt, Human
caccagucacugucccu

SEQ ID NO: 2608405 - RNA, 15 nt, Human
cacaugcauacacac

SEQ ID NO: 2608406 - RNA, 16 nt, Human
cacaugcauacacaca

SEQ ID NO: 2608407 - RNA, 17 nt, Human
cacaugcauacacacac

SEQ ID NO: 2608408 - RNA, 18 nt, Human
cacaugcauacacacaca

SEQ ID NO: 2608409 - RNA, 13 nt, Human
cacaugcauacac

SEQ ID NO: 2608410 - RNA, 14 nt, Human
cacaugcauacaca

SEQ ID NO: 2608411 - RNA, 20 nt, Human
cacaugcaaggucauuuuuu

SEQ ID NO: 2608412 - RNA, 18 nt, Human
cacaugcacgugugugca

SEQ ID NO: 2608413 - RNA, 17 nt, Human
cacaugcaaggucauuu

SEQ ID NO: 2608414 - RNA, 19 nt, Human
cacaugcaaggucauuuuu

SEQ ID NO: 2608415 - RNA, 17 nt, Human
cacaugagucccagugg

SEQ ID NO: 2608416 - RNA, 15 nt, Human
cacaugagucccagu

SEQ ID NO: 2608417 - RNA, 18 nt, Human
cacaugagucccaguggg

SEQ ID NO: 2608418 - RNA, 16 nt, Human
cacaugagauaauaug

SEQ ID NO: 2608419 - RNA, 14 nt, Human
cacaugagucccag

SEQ ID NO: 2608420 - RNA, 18 nt, Human
cacaugagcuauuuccau

SEQ ID NO: 2608421 - RNA, 21 nt, Human
cacaugagaucuaggugagga

SEQ ID NO: 2608422 - RNA, 17 nt, Human
cacauguccaagaagcc

SEQ ID NO: 2608423 - RNA, 16 nt, Human
cacauguccaagaagc

SEQ ID NO: 2608424 - RNA, 23 nt, Human
cacaugucaccguggaccuuccu

SEQ ID NO: 2608425 - RNA, 22 nt, Human
cacaugucaccguggaccuucc

SEQ ID NO: 2608426 - RNA, 20 nt, Human
cacaugucaccguggaccuu

SEQ ID NO: 2608427 - RNA, 19 nt, Human
cacaugucaccguggaccu

SEQ ID NO: 2608428 - RNA, 20 nt, Human
cacaugucaguaccuucaaa

SEQ ID NO: 2608429 - RNA, 12 nt, Human
cacaugucaccg

SEQ ID NO: 2608430 - RNA, 22 nt, Human
cacaugcugagucucccaaggc

SEQ ID NO: 2608431 - RNA, 19 nt, Human
cacauguauguuuugguau

SEQ ID NO: 2608432 - RNA, 18 nt, Human
cacaugcggagaacaaau

SEQ ID NO: 2608433 - RNA, 22 nt, Human
cacaugcucaaugacucucugg

SEQ ID NO: 2608434 - RNA, 21 nt, Human
cacaugcugagucucccaagg

SEQ ID NO: 2608435 - RNA, 18 nt, Human
cacaugcugagucuccca

SEQ ID NO: 2608436 - RNA, 17 nt, Human
cacaugcugagucuccc

SEQ ID NO: 2608437 - RNA, 16 nt, Human
cacaugcugagucucc

SEQ ID NO: 2608438 - RNA, 21 nt, Human
cacaugccucucucaggccaa

SEQ ID NO: 2608439 - RNA, 20 nt, Human
cacaugccucucucaggcca

SEQ ID NO: 2608440 - RNA, 14 nt, Human
cacaugcagcugca

SEQ ID NO: 2608441 - RNA, 21 nt, Human
cacaugagcaucaggccaggc

SEQ ID NO: 2608442 - RNA, 20 nt, Human
cacaugagcaucaggccagg

SEQ ID NO: 2608443 - RNA, 19 nt, Human
cacaugagcaucaggccag

SEQ ID NO: 2608444 - RNA, 18 nt, Human
cacaugagcaucaggcca

SEQ ID NO: 2608445 - RNA, 17 nt, Human
cacaugagcaucaggcc

SEQ ID NO: 2608446 - RNA, 13 nt, Human
cacaugagcauca

SEQ ID NO: 2608447 - RNA, 20 nt, Human
cacaguuuugguugcuuuaa

SEQ ID NO: 2608448 - RNA, 24 nt, Human
cacaugaaucccacccacauguga

SEQ ID NO: 2608449 - RNA, 20 nt, Human
cacaugacucgggggugggg

SEQ ID NO: 2608450 - RNA, 21 nt, Human
cacaugacaacuuugccagcu

SEQ ID NO: 2608451 - RNA, 15 nt, Human
cacaugagauaauau

SEQ ID NO: 2608452 - RNA, 20 nt, Human
cacaugaaguccaagcauuu

SEQ ID NO: 2608453 - RNA, 17 nt, Human
cacaugaaguccaagca

SEQ ID NO: 2608454 - RNA, 16 nt, Human
cacaugaaguccaagc

SEQ ID NO: 2608455 - RNA, 21 nt, Human
cacaguuuucuggcuggagcc

SEQ ID NO: 2608456 - RNA, 19 nt, Human
cacaguuuugguugcuuua

SEQ ID NO: 2608457 - RNA, 21 nt, Human
cacaguuuucugagaaagacu

SEQ ID NO: 2608458 - RNA, 22 nt, Human
cacaguuuucugagaaagacua

SEQ ID NO: 2608459 - RNA, 15 nt, Human
cacagugaagugcug

SEQ ID NO: 2608460 - RNA, 15 nt, Human
cacagugaagcaaau

SEQ ID NO: 2608461 - RNA, 17 nt, Human
cacagugaaggcugucc

SEQ ID NO: 2608462 - RNA, 18 nt, Human
cacagugacucgggcucc

SEQ ID NO: 2608463 - RNA, 22 nt, Human
cacagugaaggcuguccuuacc

SEQ ID NO: 2608464 - RNA, 22 nt, Human
cacagugacucgggcuccugug

SEQ ID NO: 2608465 - RNA, 21 nt, Human
cacagugacucgggcuccugu

SEQ ID NO: 2608466 - RNA, 20 nt, Human
cacagugacucgggcuccug

SEQ ID NO: 2608467 - RNA, 19 nt, Human
cacagugacucgggcuccu

SEQ ID NO: 2608468 - RNA, 23 nt, Human
cacagugacucgggcuccugugc

SEQ ID NO: 2608469 - RNA, 22 nt, Human
cacaggcccccuugaguggggu

SEQ ID NO: 2608470 - RNA, 21 nt, Human
cacaggcccccuugagugggg

SEQ ID NO: 2608471 - RNA, 13 nt, Human
cacaggcccccuu

SEQ ID NO: 2608472 - RNA, 12 nt, Human
cacaggcccccu

SEQ ID NO: 2608473 - RNA, 14 nt, Human
cacaggcccggcuc

SEQ ID NO: 2608474 - RNA, 23 nt, Human
cacaguccuuaccagcagagcac

SEQ ID NO: 2608475 - RNA, 17 nt, Human
cacagucuaauuuuuau

SEQ ID NO: 2608476 - RNA, 16 nt, Human
cacagucuaauuuuua

SEQ ID NO: 2608477 - RNA, 14 nt, Human
cacagucucucucu

SEQ ID NO: 2608478 - RNA, 22 nt, Human
cacagucucuuuaaucuucagu

SEQ ID NO: 2608479 - RNA, 19 nt, Human
cacaggcagguccaggguu

SEQ ID NO: 2608480 - RNA, 20 nt, Human
cacaggcaguuacuucugag

SEQ ID NO: 2608481 - RNA, 20 nt, Human
cacaggcaaaauccuugcuu

SEQ ID NO: 2608482 - RNA, 13 nt, Human
cacaggcaacuga

SEQ ID NO: 2608483 - RNA, 16 nt, Human
cacaggcaaaauccuu

SEQ ID NO: 2608484 - RNA, 24 nt, Human
cacaggauccuauucucaccagga

SEQ ID NO: 2608485 - RNA, 14 nt, Human
cacaggcaacugag

SEQ ID NO: 2608486 - RNA, 17 nt, Human
cacaggcaacugaggca

SEQ ID NO: 2608487 - RNA, 18 nt, Human
cacaggcaacugaggcag

SEQ ID NO: 2608488 - RNA, 19 nt, Human
cacaggcaacugaggcaga

SEQ ID NO: 2608489 - RNA, 20 nt, Human
cacagcucuucuccaggcug

SEQ ID NO: 2608490 - RNA, 19 nt, Human
cacagcucuucuccaggcu

SEQ ID NO: 2608491 - RNA, 22 nt, Human
cacaggacaugcgguagccagc

SEQ ID NO: 2608492 - RNA, 23 nt, Human
cacaggacaugcgguagccagca

SEQ ID NO: 2608493 - RNA, 20 nt, Human
cacaggacaugcgguagcca

SEQ ID NO: 2608494 - RNA, 17 nt, Human
cacaggacacagucaga

SEQ ID NO: 2608495 - RNA, 19 nt, Human
cacaggacacagucagauu

SEQ ID NO: 2608496 - RNA, 16 nt, Human
cacaggacacagucag

SEQ ID NO: 2608497 - RNA, 15 nt, Human
cacaggacauuucuc

SEQ ID NO: 2608498 - RNA, 17 nt, Human
cacaggacauuucucua

SEQ ID NO: 2608499 - RNA, 19 nt, Human
cacaggacccccuuccccu

SEQ ID NO: 2608500 - RNA, 17 nt, Human
cacaggacccccuuccc

SEQ ID NO: 2608501 - RNA, 16 nt, Human
cacaggacccccuucc

SEQ ID NO: 2608502 - RNA, 16 nt, Human
cacaggacucugccuc

SEQ ID NO: 2608503 - RNA, 15 nt, Human
cacaggacucugccu

SEQ ID NO: 2608504 - RNA, 17 nt, Human
cacaggaucagucugau

SEQ ID NO: 2608505 - RNA, 23 nt, Human
cacaggauccuauucucaccagg

SEQ ID NO: 2608506 - RNA, 20 nt, Human
cacaggauccuauucucacc

SEQ ID NO: 2608507 - RNA, 19 nt, Human
cacaggauccuauucucac

SEQ ID NO: 2608508 - RNA, 16 nt, Human
cacaggaugaaggcaa

SEQ ID NO: 2608509 - RNA, 14 nt, Human
cacagcaaccccag

SEQ ID NO: 2608510 - RNA, 17 nt, Human
cacagcaaccccaggcu

SEQ ID NO: 2608511 - RNA, 18 nt, Human
cacagcaaccccaggcug

SEQ ID NO: 2608512 - RNA, 16 nt, Human
cacacgugcaauuugu

SEQ ID NO: 2608513 - RNA, 20 nt, Human
cacacgucauuucuuagcua

SEQ ID NO: 2608514 - RNA, 19 nt, Human
cacacgucauguuucuuca

SEQ ID NO: 2608515 - RNA, 20 nt, Human
cacacgucugacccucucca

SEQ ID NO: 2608516 - RNA, 24 nt, Human
cacacgucugacccucuccacccc

SEQ ID NO: 2608517 - RNA, 20 nt, Human
cacacguaaugaaacuugga

SEQ ID NO: 2608518 - RNA, 19 nt, Human
cacacgguuugaagccugg

SEQ ID NO: 2608519 - RNA, 21 nt, Human
cacacggaggcaucugcaccc

SEQ ID NO: 2608520 - RNA, 20 nt, Human
cacacgguuugaagccugga

SEQ ID NO: 2608521 - RNA, 17 nt, Human
cacacguacuuaaauga

SEQ ID NO: 2608522 - RNA, 19 nt, Human
cacacguaaugaaacuugg

SEQ ID NO: 2608523 - RNA, 18 nt, Human
cacacggaggcaucugca

SEQ ID NO: 2608524 - RNA, 20 nt, Human
cacacggaggcaucugcacc

SEQ ID NO: 2608525 - RNA, 22 nt, Human
cacacgcuccucccucugaggc

SEQ ID NO: 2608526 - RNA, 22 nt, Human
cacacggacacucaaaagcugg

SEQ ID NO: 2608527 - RNA, 19 nt, Human
cacacgcaggaacucccag

SEQ ID NO: 2608528 - RNA, 14 nt, Human
cacacgcaggaacu

SEQ ID NO: 2608529 - RNA, 21 nt, Human
cacacgcacgcacacacacaa

SEQ ID NO: 2608530 - RNA, 19 nt, Human
cacacgcacgcacacacac

SEQ ID NO: 2608531 - RNA, 17 nt, Human
cacacgcacgcacacac

SEQ ID NO: 2608532 - RNA, 15 nt, Human
cacacgcacgcacac

SEQ ID NO: 2608533 - RNA, 14 nt, Human
cacacgcacgcaca

SEQ ID NO: 2608534 - RNA, 13 nt, Human
cacacgcacgcac

SEQ ID NO: 2608535 - RNA, 22 nt, Human
cacacgcaggaacucccagcaa

SEQ ID NO: 2608536 - RNA, 20 nt, Human
cacacgccucccacuggggu

SEQ ID NO: 2608537 - RNA, 21 nt, Human
cacacgcaggaacucccagca

SEQ ID NO: 2608538 - RNA, 20 nt, Human
cacacgcaggaacucccagc

SEQ ID NO: 2608539 - RNA, 17 nt, Human
cacacgccucccacugg

SEQ ID NO: 2608540 - RNA, 15 nt, Human
cacagcaaggcaccu

SEQ ID NO: 2608541 - RNA, 23 nt, Human
cacagcaaggaggcuggcugggg

SEQ ID NO: 2608542 - RNA, 22 nt, Human
cacagcaaggaggcuggcuggg

SEQ ID NO: 2608543 - RNA, 21 nt, Human
cacagcaaggaggcuggcugg

SEQ ID NO: 2608544 - RNA, 18 nt, Human
cacagcaaggaggcuggc

SEQ ID NO: 2608545 - RNA, 16 nt, Human
cacagcaaggaggcug

SEQ ID NO: 2608546 - RNA, 19 nt, Human
cacagcaaggcaccugcag

SEQ ID NO: 2608547 - RNA, 17 nt, Human
cacagcaaggcaccugc

SEQ ID NO: 2608548 - RNA, 20 nt, Human
cacagccagcaccuggcauc

SEQ ID NO: 2608549 - RNA, 17 nt, Human
cacagccagcaccuggc

SEQ ID NO: 2608550 - RNA, 16 nt, Human
cacagccagcaccugg

SEQ ID NO: 2608551 - RNA, 15 nt, Human
cacagccagcaccug

SEQ ID NO: 2608552 - RNA, 15 nt, Human
cacagcacagccaac

SEQ ID NO: 2608553 - RNA, 12 nt, Human
cacagcacagcc

SEQ ID NO: 2608554 - RNA, 20 nt, Human
cacagcccacguccugucag

SEQ ID NO: 2608555 - RNA, 18 nt, Human
cacagcccacguccuguc

SEQ ID NO: 2608556 - RNA, 17 nt, Human
cacagcccacguccugu

SEQ ID NO: 2608557 - RNA, 16 nt, Human
cacagcccacguccug

SEQ ID NO: 2608558 - RNA, 18 nt, Human
cacagcucuucuccaggc

SEQ ID NO: 2608559 - RNA, 13 nt, Human
cacagccauccca

SEQ ID NO: 2608560 - RNA, 20 nt, Human
cacagccaggugccuuggag

SEQ ID NO: 2608561 - RNA, 19 nt, Human
cacagccaggugccuugga

SEQ ID NO: 2608562 - RNA, 17 nt, Human
cacagccaggugccuug

SEQ ID NO: 2608563 - RNA, 16 nt, Human
cacagccaggugccuu

SEQ ID NO: 2608564 - RNA, 15 nt, Human
cacagccaggugccu

SEQ ID NO: 2608565 - RNA, 20 nt, Human
cacagccaucccagccuugg

SEQ ID NO: 2608566 - RNA, 19 nt, Human
cacagccaucccagccuug

SEQ ID NO: 2608567 - RNA, 17 nt, Human
cacagccaucccagccu

SEQ ID NO: 2608568 - RNA, 16 nt, Human
cacagccaucccagcc

SEQ ID NO: 2608569 - RNA, 14 nt, Human
cacagcccacgucc

SEQ ID NO: 2608570 - RNA, 22 nt, Human
cacagccaucccagccuuggca

SEQ ID NO: 2608571 - RNA, 19 nt, Human
cacagcccaaagaaggaaa

SEQ ID NO: 2608572 - RNA, 19 nt, Human
caccauguuugagcucaga

SEQ ID NO: 2608573 - RNA, 22 nt, Human
caccauguuugagcucagaccc

SEQ ID NO: 2608574 - RNA, 18 nt, Human
caccauguuugagcucag

SEQ ID NO: 2608575 - RNA, 22 nt, Human
caccauuaaaagggauuaccca

SEQ ID NO: 2608576 - RNA, 14 nt, Human
caccauuaaaaggg

SEQ ID NO: 2608577 - RNA, 23 nt, Human
caccauguuugagcucagacccc

SEQ ID NO: 2608578 - RNA, 14 nt, Human
caccauuccuggaa

SEQ ID NO: 2608579 - RNA, 23 nt, Human
caccauuccuggaaaccacaguc

SEQ ID NO: 2608580 - RNA, 13 nt, Human
caccauuccugga

SEQ ID NO: 2608581 - RNA, 13 nt, Human
caccauucagguc

SEQ ID NO: 2608582 - RNA, 13 nt, Human
caccauucugacu

SEQ ID NO: 2608583 - RNA, 14 nt, Human
caccauucugacuc

SEQ ID NO: 2608584 - RNA, 17 nt, Human
caccauuuggcaaugcc

SEQ ID NO: 2608585 - RNA, 22 nt, Human
cacccaaagagguauuuaucuu

SEQ ID NO: 2608586 - RNA, 14 nt, Human
cacccaaaagucaa

SEQ ID NO: 2608587 - RNA, 23 nt, Human
cacccaaaagucaaaaggugccu

SEQ ID NO: 2608588 - RNA, 21 nt, Human
cacccaagcuuggcagccgag

SEQ ID NO: 2608589 - RNA, 19 nt, Human
cacccaagcuuggcagccg

SEQ ID NO: 2608590 - RNA, 17 nt, Human
cacccaagcuuggcagc

SEQ ID NO: 2608591 - RNA, 13 nt, Human
cacccaagggccu

SEQ ID NO: 2608592 - RNA, 16 nt, Human
cacccaagcaaggcca

SEQ ID NO: 2608593 - RNA, 15 nt, Human
cacccaagcuuggca

SEQ ID NO: 2608594 - RNA, 14 nt, Human
cacccaagcuuggc

SEQ ID NO: 2608595 - RNA, 13 nt, Human
cacccaagcuugg

SEQ ID NO: 2608596 - RNA, 19 nt, Human
cacccaagagauuguuguu

SEQ ID NO: 2608597 - RNA, 15 nt, Human
caaacuggggccucc

SEQ ID NO: 2608598 - RNA, 20 nt, Human
caacaggcugggcuucagug

SEQ ID NO: 2608599 - RNA, 21 nt, Human
caaauuggagcuucauggcag

SEQ ID NO: 2608600 - RNA, 20 nt, Human
caaauugcuuacuuuggaau

SEQ ID NO: 2608601 - RNA, 15 nt, Human
caaauuaaucuuucu

SEQ ID NO: 2608602 - RNA, 22 nt, Human
caaauugcuccuaagcuucaaa

SEQ ID NO: 2608603 - RNA, 19 nt, Human
caaauugcuugaaagaaaa

SEQ ID NO: 2608604 - RNA, 17 nt, Human
caaauugcuugaaagaa

SEQ ID NO: 2608605 - RNA, 16 nt, Human
caaauuaauaaucuua

SEQ ID NO: 2608606 - RNA, 17 nt, Human
caaauuaauaaucuuau

SEQ ID NO: 2608607 - RNA, 14 nt, Human
caaauucuguuucu

SEQ ID NO: 2608608 - RNA, 14 nt, Human
caaauucuucugaa

SEQ ID NO: 2608609 - RNA, 15 nt, Human
caaauucuguuucuu

SEQ ID NO: 2608610 - RNA, 15 nt, Human
caaauucuucugaac

SEQ ID NO: 2608611 - RNA, 17 nt, Human
caaauugaacucuuuga

SEQ ID NO: 2608612 - RNA, 19 nt, Human
caaauugagagaauggaaa

SEQ ID NO: 2608613 - RNA, 13 nt, Human
caaauuaacuuga

SEQ ID NO: 2608614 - RNA, 22 nt, Human
caaauuaaggguuaagaaaaga

SEQ ID NO: 2608615 - RNA, 15 nt, Human
caaauuaauaaucuu

SEQ ID NO: 2608616 - RNA, 18 nt, Human
caaauucugucucuggau

SEQ ID NO: 2608617 - RNA, 22 nt, Human
caaauguuuacagggagccucc

SEQ ID NO: 2608618 - RNA, 20 nt, Human
caaauguuuacagggagccu

SEQ ID NO: 2608619 - RNA, 18 nt, Human
caaauguuuacagggagc

SEQ ID NO: 2608620 - RNA, 17 nt, Human
caaauguuuacagggag

SEQ ID NO: 2608621 - RNA, 15 nt, Human
caaauguuuugacau

SEQ ID NO: 2608622 - RNA, 14 nt, Human
caaauguuucugca

SEQ ID NO: 2608623 - RNA, 11 nt, Human
caaauguuucu

SEQ ID NO: 2608624 - RNA, 22 nt, Human
caaaguucccuacuuccuguga

SEQ ID NO: 2608625 - RNA, 19 nt, Human
caaaguggugagaggcauc

SEQ ID NO: 2608626 - RNA, 21 nt, Human
caaaguucccuacuuccugug

SEQ ID NO: 2608627 - RNA, 15 nt, Human
caaauauuuauuuuc

SEQ ID NO: 2608628 - RNA, 16 nt, Human
caaauauuuauuuucu

SEQ ID NO: 2608629 - RNA, 12 nt, Human
caaauauuuauu

SEQ ID NO: 2608630 - RNA, 14 nt, Human
caaauauuuauuuu

SEQ ID NO: 2608631 - RNA, 13 nt, Human
caaauauuccaga

SEQ ID NO: 2608632 - RNA, 17 nt, Human
caaauauuccagagacu

SEQ ID NO: 2608633 - RNA, 22 nt, Human
caaagccccaugcuggagccug

SEQ ID NO: 2608634 - RNA, 21 nt, Human
caaagccccaugcuggagccu

SEQ ID NO: 2608635 - RNA, 15 nt, Human
caaagcccuaaaauu

SEQ ID NO: 2608636 - RNA, 23 nt, Human
caaagccccuugcucuccccugc

SEQ ID NO: 2608637 - RNA, 14 nt, Human
caaaggagauugga

SEQ ID NO: 2608638 - RNA, 15 nt, Human
caaaggacuccaccc

SEQ ID NO: 2608639 - RNA, 16 nt, Human
caaaggaccucagcug

SEQ ID NO: 2608640 - RNA, 20 nt, Human
caaaggagauaaaucuagua

SEQ ID NO: 2608641 - RNA, 23 nt, Human
caaaggacuguuuuuuccugagc

SEQ ID NO: 2608642 - RNA, 18 nt, Human
caaaggacuugacuugca

SEQ ID NO: 2608643 - RNA, 20 nt, Human
caaaggagauuggaaggaac

SEQ ID NO: 2608644 - RNA, 17 nt, Human
caaagggaaauaucauu

SEQ ID NO: 2608645 - RNA, 15 nt, Human
caaagggaaauauca

SEQ ID NO: 2608646 - RNA, 18 nt, Human
caaagggaaauaucauuu

SEQ ID NO: 2608647 - RNA, 14 nt, Human
caaagggagagaga

SEQ ID NO: 2608648 - RNA, 15 nt, Human
caaagggagcagaac

SEQ ID NO: 2608649 - RNA, 22 nt, Human
caaagggagcacuggguugacu

SEQ ID NO: 2608650 - RNA, 17 nt, Human
caaaguggugagaggca

SEQ ID NO: 2608651 - RNA, 16 nt, Human
caaaguggugagaggc

SEQ ID NO: 2608652 - RNA, 23 nt, Human
caaaggguaucaggugcugccau

SEQ ID NO: 2608653 - RNA, 19 nt, Human
caaagugguauagaaaugc

SEQ ID NO: 2608654 - RNA, 18 nt, Human
caaagugguauagaaaug

SEQ ID NO: 2608655 - RNA, 21 nt, Human
caaaggguaucaggugcugcc

SEQ ID NO: 2608656 - RNA, 20 nt, Human
caaaggguaucaggugcugc

SEQ ID NO: 2608657 - RNA, 18 nt, Human
caaagggcugaaagccau

SEQ ID NO: 2608658 - RNA, 21 nt, Human
caaagggcugaaagccauuug

SEQ ID NO: 2608659 - RNA, 17 nt, Human
caaagggcugaaagcca

SEQ ID NO: 2608660 - RNA, 14 nt, Human
caaagggcugaaag

SEQ ID NO: 2608661 - RNA, 13 nt, Human
caaagaaauuaug

SEQ ID NO: 2608662 - RNA, 20 nt, Human
caaagacaaauucuguuucu

SEQ ID NO: 2608663 - RNA, 21 nt, Human
caaagacaaauucuguuucuu

SEQ ID NO: 2608664 - RNA, 15 nt, Human
caaagaauguuuaua

SEQ ID NO: 2608665 - RNA, 14 nt, Human
caaagaaauguaag

SEQ ID NO: 2608666 - RNA, 12 nt, Human
caaagaaauuau

SEQ ID NO: 2608667 - RNA, 19 nt, Human
caaacuggcaaacuucaga

SEQ ID NO: 2608668 - RNA, 17 nt, Human
caaacuggcaaacuuca

SEQ ID NO: 2608669 - RNA, 19 nt, Human
caaacugccuuggcuucag

SEQ ID NO: 2608670 - RNA, 16 nt, Human
caaagaccuugugugu

SEQ ID NO: 2608671 - RNA, 21 nt, Human
caaagaccacacauuugugua

SEQ ID NO: 2608672 - RNA, 14 nt, Human
caaagacagaagcc

SEQ ID NO: 2608673 - RNA, 18 nt, Human
caaagaccaaauuccuug

SEQ ID NO: 2608674 - RNA, 17 nt, Human
caaagacgaccuuuacc

SEQ ID NO: 2608675 - RNA, 23 nt, Human
caaagaccuuguguguaugugua

SEQ ID NO: 2608676 - RNA, 18 nt, Human
caaagaccuuguguguau

SEQ ID NO: 2608677 - RNA, 16 nt, Human
caaagacuuaguauau

SEQ ID NO: 2608678 - RNA, 19 nt, Human
caaagacuuaguauauuuu

SEQ ID NO: 2608679 - RNA, 20 nt, Human
caaagacuuaguauauuuuc

SEQ ID NO: 2608680 - RNA, 14 nt, Human
caaagagguuuuaa

SEQ ID NO: 2608681 - RNA, 21 nt, Human
caaagagguuuuaaaaaaauc

SEQ ID NO: 2608682 - RNA, 20 nt, Human
caaagccccaugcuggagcc

SEQ ID NO: 2608683 - RNA, 19 nt, Human
caaagccccaugcuggagc

SEQ ID NO: 2608684 - RNA, 16 nt, Human
caaagccccaugcugg

SEQ ID NO: 2608685 - RNA, 15 nt, Human
caaagccccaugcug

SEQ ID NO: 2608686 - RNA, 13 nt, Human
caaagcccagcuu

SEQ ID NO: 2608687 - RNA, 17 nt, Human
caaagaguguagaucag

SEQ ID NO: 2608688 - RNA, 14 nt, Human
caaagcccaaggga

SEQ ID NO: 2608689 - RNA, 19 nt, Human
caaagcccaaagugguaua

SEQ ID NO: 2608690 - RNA, 22 nt, Human
caaagagugggcugcaucuggg

SEQ ID NO: 2608691 - RNA, 20 nt, Human
caaagagugggcugcaucug

SEQ ID NO: 2608692 - RNA, 16 nt, Human
caaagaguuaauauau

SEQ ID NO: 2608693 - RNA, 17 nt, Human
caaagcccaaaguggua

SEQ ID NO: 2608694 - RNA, 17 nt, Human
caaagaguagacauuuc

SEQ ID NO: 2608695 - RNA, 18 nt, Human
caaagaggugacugggcc

SEQ ID NO: 2608696 - RNA, 14 nt, Human
caaagaguagaauu

SEQ ID NO: 2608697 - RNA, 16 nt, Human
caaagagguauuuauc

SEQ ID NO: 2608698 - RNA, 16 nt, Human
auuuuaaauggacaga

SEQ ID NO: 2608699 - RNA, 15 nt, Human
auuuuaaauggacag

SEQ ID NO: 2608700 - RNA, 21 nt, Human
auuuuaaauaaaagugaucaa

SEQ ID NO: 2608701 - RNA, 14 nt, Human
auuuuaaauaaaag

SEQ ID NO: 2608702 - RNA, 15 nt, Human
auuuuaaauaaaaga

SEQ ID NO: 2608703 - RNA, 16 nt, Human
auuuuaaauaaaagaa

SEQ ID NO: 2608704 - RNA, 20 nt, Human
auuuuaaauaaaagugauca

SEQ ID NO: 2608705 - RNA, 18 nt, Human
auuuguacaguucaguuc

SEQ ID NO: 2608706 - RNA, 16 nt, Human
auuuguacauauguaa

SEQ ID NO: 2608707 - RNA, 18 nt, Human
auuuguacauauguaaaa

SEQ ID NO: 2608708 - RNA, 19 nt, Human
auuuguacauauguaaaau

SEQ ID NO: 2608709 - RNA, 21 nt, Human
auuuguacauauguaaaauaa

SEQ ID NO: 2608710 - RNA, 13 nt, Human
auuuuaacaaaag

SEQ ID NO: 2608711 - RNA, 22 nt, Human
auuuuaaauuauaacuuaaaau

SEQ ID NO: 2608712 - RNA, 16 nt, Human
auuuuaaauucacaau

SEQ ID NO: 2608713 - RNA, 18 nt, Human
auuuuaacaaaagcaaga

SEQ ID NO: 2608714 - RNA, 16 nt, Human
auuuuaacaaaagcaa

SEQ ID NO: 2608715 - RNA, 21 nt, Human
auuuuaagacguguuuguguu

SEQ ID NO: 2608716 - RNA, 20 nt, Human
auuuuaagacguguuugugu

SEQ ID NO: 2608717 - RNA, 19 nt, Human
auuuuaauaauguuucaaa

SEQ ID NO: 2608718 - RNA, 18 nt, Human
auuuuaauaauguuucaa

SEQ ID NO: 2608719 - RNA, 20 nt, Human
auuuuaaguauugcaucugu

SEQ ID NO: 2608720 - RNA, 19 nt, Human
auuuuaaguauugcaucug

SEQ ID NO: 2608721 - RNA, 16 nt, Human
auuuuaaguauugcau

SEQ ID NO: 2608722 - RNA, 14 nt, Human
auuuuaaguauugc

SEQ ID NO: 2608723 - RNA, 23 nt, Human
auuuuaaguauugcaucuguaua

SEQ ID NO: 2608724 - RNA, 22 nt, Human
auuuuaaguauugcaucuguau

SEQ ID NO: 2608725 - RNA, 12 nt, Human
auuuuaagugcu

SEQ ID NO: 2608726 - RNA, 14 nt, Human
auuuuaagugcuuu

SEQ ID NO: 2608727 - RNA, 16 nt, Human
auuuuaagugcuuugu

SEQ ID NO: 2608728 - RNA, 17 nt, Human
auuuuaagugcuuugua

SEQ ID NO: 2608729 - RNA, 18 nt, Human
auuuuaagugcuuuguaa

SEQ ID NO: 2608730 - RNA, 23 nt, Human
caaacugccuaagcccuccgcca

SEQ ID NO: 2608731 - RNA, 18 nt, Human
caaacugccuaagcccuc

SEQ ID NO: 2608732 - RNA, 17 nt, Human
caaacugccuaagcccu

SEQ ID NO: 2608733 - RNA, 23 nt, Human
auuuuaaugaagaaaguggaaaa

SEQ ID NO: 2608734 - RNA, 14 nt, Human
auuuuaaucaaguu

SEQ ID NO: 2608735 - RNA, 18 nt, Human
auuuuaaucaaguugaau

SEQ ID NO: 2608736 - RNA, 13 nt, Human
auuuuaaucuaau

SEQ ID NO: 2608737 - RNA, 22 nt, Human
caaacugaggaauuucaccugu

SEQ ID NO: 2608738 - RNA, 17 nt, Human
caaacugaggaauuuca

SEQ ID NO: 2608739 - RNA, 16 nt, Human
caagcauaccaacacg

SEQ ID NO: 2608740 - RNA, 21 nt, Human
caagcagucgugccugugucc

SEQ ID NO: 2608741 - RNA, 18 nt, Human
caagcagucuacccaccu

SEQ ID NO: 2608742 - RNA, 20 nt, Human
caagcagucgugccuguguc

SEQ ID NO: 2608743 - RNA, 19 nt, Human
caagcagucgugccugugu

SEQ ID NO: 2608744 - RNA, 18 nt, Human
caagcagucgugccugug

SEQ ID NO: 2608745 - RNA, 16 nt, Human
caagcagucgugccug

SEQ ID NO: 2608746 - RNA, 17 nt, Human
caagcaggaaaugaaaa

SEQ ID NO: 2608747 - RNA, 23 nt, Human
caagcaggaaaugaaaaugucuu

SEQ ID NO: 2608748 - RNA, 15 nt, Human
caagcagucgugccu

SEQ ID NO: 2608749 - RNA, 12 nt, Human
caagcaggaagc

SEQ ID NO: 2608750 - RNA, 13 nt, Human
caagcaggaagcu

SEQ ID NO: 2608751 - RNA, 21 nt, Human
caagcaucuuggggggguggc

SEQ ID NO: 2608752 - RNA, 13 nt, Human
caagcauucuccu

SEQ ID NO: 2608753 - RNA, 15 nt, Human
caagcauucuccugu

SEQ ID NO: 2608754 - RNA, 21 nt, Human
caagcauaccaacacgagcag

SEQ ID NO: 2608755 - RNA, 19 nt, Human
caagcauuuagauguauag

SEQ ID NO: 2608756 - RNA, 16 nt, Human
caagcauuuagaugua

SEQ ID NO: 2608757 - RNA, 14 nt, Human
caagcauucugucu

SEQ ID NO: 2608758 - RNA, 21 nt, Human
caagcauuuaauguagccaug

SEQ ID NO: 2608759 - RNA, 18 nt, Human
caagccaacgacaaagcc

SEQ ID NO: 2608760 - RNA, 19 nt, Human
caagccaacgacaaagcca

SEQ ID NO: 2608761 - RNA, 20 nt, Human
caagccaacuuguaaauaca

SEQ ID NO: 2608762 - RNA, 18 nt, Human
caagccaacuuguaaaua

SEQ ID NO: 2608763 - RNA, 15 nt, Human
caagccaacuuguaa

SEQ ID NO: 2608764 - RNA, 22 nt, Human
caagcauuuaauguagccaugg

SEQ ID NO: 2608765 - RNA, 21 nt, Human
caagccaacuuguaaauacac

SEQ ID NO: 2608766 - RNA, 13 nt, Human
caagccaagcagc

SEQ ID NO: 2608767 - RNA, 14 nt, Human
caagccaagcagcc

SEQ ID NO: 2608768 - RNA, 15 nt, Human
caagccaagcagcca

SEQ ID NO: 2608769 - RNA, 17 nt, Human
caagcccagcacugcuu

SEQ ID NO: 2608770 - RNA, 12 nt, Human
caagcccaggag

SEQ ID NO: 2608771 - RNA, 16 nt, Human
caagccaagcagccaa

SEQ ID NO: 2608772 - RNA, 14 nt, Human
caagccagcuggag

SEQ ID NO: 2608773 - RNA, 20 nt, Human
caagcccaguucagcuuggg

SEQ ID NO: 2608774 - RNA, 13 nt, Human
caagccccaggca

SEQ ID NO: 2608775 - RNA, 15 nt, Human
caagccccaggcagg

SEQ ID NO: 2608776 - RNA, 17 nt, Human
caagccccaggcaggcu

SEQ ID NO: 2608777 - RNA, 18 nt, Human
caagccccaggcaggcug

SEQ ID NO: 2608778 - RNA, 16 nt, Human
caagcccccccuucca

SEQ ID NO: 2608779 - RNA, 14 nt, Human
caagcccccccuuc

SEQ ID NO: 2608780 - RNA, 16 nt, Human
caaggauccugagcca

SEQ ID NO: 2608781 - RNA, 15 nt, Human
caaggauccugagcc

SEQ ID NO: 2608782 - RNA, 22 nt, Human
caaggacugagggacucugaag

SEQ ID NO: 2608783 - RNA, 15 nt, Human
caaggacugagggac

SEQ ID NO: 2608784 - RNA, 20 nt, Human
caagcuuggcagccgagcuc

SEQ ID NO: 2608785 - RNA, 14 nt, Human
caaggacugaggga

SEQ ID NO: 2608786 - RNA, 17 nt, Human
caaggauccugagccag

SEQ ID NO: 2608787 - RNA, 23 nt, Human
caagggaauuucuucaacucccu

SEQ ID NO: 2608788 - RNA, 14 nt, Human
caaggcugucaauu

SEQ ID NO: 2608789 - RNA, 13 nt, Human
caaggcugucaau

SEQ ID NO: 2608790 - RNA, 21 nt, Human
caaggcugggggaagaagcuc

SEQ ID NO: 2608791 - RNA, 14 nt, Human
caaggauccugagc

SEQ ID NO: 2608792 - RNA, 20 nt, Human
caaggacuaggguccugggg

SEQ ID NO: 2608793 - RNA, 21 nt, Human
caaggacuaggguccugggga

SEQ ID NO: 2608794 - RNA, 16 nt, Human
caaggacuaggguccu

SEQ ID NO: 2608795 - RNA, 16 nt, Human
caagcuuggcagccga

SEQ ID NO: 2608796 - RNA, 14 nt, Human
caagcuuggcagcc

SEQ ID NO: 2608797 - RNA, 14 nt, Human
caaggacuaggguc

SEQ ID NO: 2608798 - RNA, 18 nt, Human
caaggacuaggguccugg

SEQ ID NO: 2608799 - RNA, 19 nt, Human
caaggacuaggguccuggg

SEQ ID NO: 2608800 - RNA, 19 nt, Human
caagcuucaguuuccuggu

SEQ ID NO: 2608801 - RNA, 12 nt, Human
caagcuucaguu

SEQ ID NO: 2608802 - RNA, 22 nt, Human
caagcuucaguuuccuggucug

SEQ ID NO: 2608803 - RNA, 16 nt, Human
caagcuguuuucuucu

SEQ ID NO: 2608804 - RNA, 17 nt, Human
caagcuuguccaacccg

SEQ ID NO: 2608805 - RNA, 13 nt, Human
caagcuuggcagc

SEQ ID NO: 2608806 - RNA, 13 nt, Human
caagcuucuuuua

SEQ ID NO: 2608807 - RNA, 21 nt, Human
caagcugugccacccugggcu

SEQ ID NO: 2608808 - RNA, 20 nt, Human
caagcugugccacccugggc

SEQ ID NO: 2608809 - RNA, 19 nt, Human
caagcugugccacccuggg

SEQ ID NO: 2608810 - RNA, 18 nt, Human
caagcugugccacccugg

SEQ ID NO: 2608811 - RNA, 14 nt, Human
caagcuguuuucuu

SEQ ID NO: 2608812 - RNA, 17 nt, Human
caagcugugccacccug

SEQ ID NO: 2608813 - RNA, 16 nt, Human
caagcugugccacccu

SEQ ID NO: 2608814 - RNA, 15 nt, Human
caagcugugccaccc

SEQ ID NO: 2608815 - RNA, 14 nt, Human
caagcugugccacc

SEQ ID NO: 2608816 - RNA, 12 nt, Human
caagcugugcca

SEQ ID NO: 2608817 - RNA, 23 nt, Human
caagcugugagacagugggaaau

SEQ ID NO: 2608818 - RNA, 22 nt, Human
caagcugugagacagugggaaa

SEQ ID NO: 2608819 - RNA, 17 nt, Human
caagagggucugaggaa

SEQ ID NO: 2608820 - RNA, 16 nt, Human
caagagggucugagga

SEQ ID NO: 2608821 - RNA, 12 nt, Human
caagagggucug

SEQ ID NO: 2608822 - RNA, 21 nt, Human
caagaggggguggaggggugu

SEQ ID NO: 2608823 - RNA, 18 nt, Human
caagaggggguggagggg

SEQ ID NO: 2608824 - RNA, 17 nt, Human
caagaggggguggaggg

SEQ ID NO: 2608825 - RNA, 15 nt, Human
caagaggggguggag

SEQ ID NO: 2608826 - RNA, 12 nt, Human
caagagccuugg

SEQ ID NO: 2608827 - RNA, 18 nt, Human
caagagccuuggugucca

SEQ ID NO: 2608828 - RNA, 14 nt, Human
caagagggggugga

SEQ ID NO: 2608829 - RNA, 21 nt, Human
caagagccuugguguccaccu

SEQ ID NO: 2608830 - RNA, 22 nt, Human
caagaggguccuuuaguaccug

SEQ ID NO: 2608831 - RNA, 23 nt, Human
caagagggguggagacugcuucc

SEQ ID NO: 2608832 - RNA, 21 nt, Human
caagagggguggagacugcuu

SEQ ID NO: 2608833 - RNA, 16 nt, Human
caagagggguggagac

SEQ ID NO: 2608834 - RNA, 20 nt, Human
caagcagagguggccagagc

SEQ ID NO: 2608835 - RNA, 12 nt, Human
caagcagccaag

SEQ ID NO: 2608836 - RNA, 13 nt, Human
caagcagccaagc

SEQ ID NO: 2608837 - RNA, 14 nt, Human
caagcagccaagcu

SEQ ID NO: 2608838 - RNA, 18 nt, Human
caagcagagguggccaga

SEQ ID NO: 2608839 - RNA, 17 nt, Human
caagcagagguggccag

SEQ ID NO: 2608840 - RNA, 21 nt, Human
caagcagauuggagaaacccu

SEQ ID NO: 2608841 - RNA, 22 nt, Human
caagcagcgaccgcccccuccu

SEQ ID NO: 2608842 - RNA, 21 nt, Human
caagcagccugagcaacucuu

SEQ ID NO: 2608843 - RNA, 22 nt, Human
caagcagccaagcuccuuggga

SEQ ID NO: 2608844 - RNA, 23 nt, Human
caagagccugagagugaggugga

SEQ ID NO: 2608845 - RNA, 22 nt, Human
caagagcccccuugacaccggg

SEQ ID NO: 2608846 - RNA, 17 nt, Human
caagagcccccuugaca

SEQ ID NO: 2608847 - RNA, 20 nt, Human
caagagggcacugguggccc

SEQ ID NO: 2608848 - RNA, 19 nt, Human
caagagggcacugguggcc

SEQ ID NO: 2608849 - RNA, 18 nt, Human
caagagggcacugguggc

SEQ ID NO: 2608850 - RNA, 17 nt, Human
caagagggcacuggugg

SEQ ID NO: 2608851 - RNA, 11 nt, Human
caagagccuga

SEQ ID NO: 2608852 - RNA, 13 nt, Human
caagagccugaga

SEQ ID NO: 2608853 - RNA, 17 nt, Human
caagagcccaggccucc

SEQ ID NO: 2608854 - RNA, 21 nt, Human
caagacuucaguauguuguca

SEQ ID NO: 2608855 - RNA, 16 nt, Human
caagacuucaguaugu

SEQ ID NO: 2608856 - RNA, 15 nt, Human
caagacuuggcaaca

SEQ ID NO: 2608857 - RNA, 20 nt, Human
caagacuuggcaacagaagc

SEQ ID NO: 2608858 - RNA, 21 nt, Human
caagacuugguguccuuuccc

SEQ ID NO: 2608859 - RNA, 17 nt, Human
caagacuguugcucaaa

SEQ ID NO: 2608860 - RNA, 16 nt, Human
caagacuguugcucaa

SEQ ID NO: 2608861 - RNA, 18 nt, Human
caagacuguugcucaaau

SEQ ID NO: 2608862 - RNA, 22 nt, Human
caagacuggaagguggggacag

SEQ ID NO: 2608863 - RNA, 14 nt, Human
caagacuguugcuc

SEQ ID NO: 2608864 - RNA, 22 nt, Human
caacuugcauccaacuccagga

SEQ ID NO: 2608865 - RNA, 22 nt, Human
caacuugagggcccagagcagg

SEQ ID NO: 2608866 - RNA, 21 nt, Human
caacuugagggcccagagcag

SEQ ID NO: 2608867 - RNA, 20 nt, Human
caacuugagggcccagagca

SEQ ID NO: 2608868 - RNA, 19 nt, Human
caacuugagggcccagagc

SEQ ID NO: 2608869 - RNA, 16 nt, Human
caacuugagggcccag

SEQ ID NO: 2608870 - RNA, 18 nt, Human
caacuucuucagagcuga

SEQ ID NO: 2608871 - RNA, 13 nt, Human
caacuugagggcc

SEQ ID NO: 2608872 - RNA, 20 nt, Human
caacuucuuuuuauuuucuu

SEQ ID NO: 2608873 - RNA, 23 nt, Human
caacuucuccauccuuucugccu

SEQ ID NO: 2608874 - RNA, 14 nt, Human
caacuucuucagag

SEQ ID NO: 2608875 - RNA, 14 nt, Human
caacuucuggcucc

SEQ ID NO: 2608876 - RNA, 19 nt, Human
caacuucuacuucugcccu

SEQ ID NO: 2608877 - RNA, 14 nt, Human
caagaaaucccugu

SEQ ID NO: 2608878 - RNA, 21 nt, Human
caagaaauaaaaggaagccaa

SEQ ID NO: 2608879 - RNA, 23 nt, Human
caagacccuuguggucccacccc

SEQ ID NO: 2608880 - RNA, 15 nt, Human
caagaaaucccuguu

SEQ ID NO: 2608881 - RNA, 13 nt, Human
caagaaaugaaag

SEQ ID NO: 2608882 - RNA, 19 nt, Human
caagaaauaaaaggaagcc

SEQ ID NO: 2608883 - RNA, 20 nt, Human
caagaaauaaaaggaagcca

SEQ ID NO: 2608884 - RNA, 13 nt, Human
caagaaauaaaag

SEQ ID NO: 2608885 - RNA, 12 nt, Human
caagaaagucca

SEQ ID NO: 2608886 - RNA, 22 nt, Human
caagacgcugugcugcccugcc

SEQ ID NO: 2608887 - RNA, 21 nt, Human
caagacgcugugcugcccugc

SEQ ID NO: 2608888 - RNA, 20 nt, Human
caagaccuucaccaaacaua

SEQ ID NO: 2608889 - RNA, 17 nt, Human
caagaccuguugguucc

SEQ ID NO: 2608890 - RNA, 19 nt, Human
caagacugcacaucaaaau

SEQ ID NO: 2608891 - RNA, 20 nt, Human
caagacgcugugcugcccug

SEQ ID NO: 2608892 - RNA, 17 nt, Human
caagaccucagugccuu

SEQ ID NO: 2608893 - RNA, 14 nt, Human
caagaccuguuggu

SEQ ID NO: 2608894 - RNA, 13 nt, Human
caagaccuucucc

SEQ ID NO: 2608895 - RNA, 18 nt, Human
caagguucccucugagaa

SEQ ID NO: 2608896 - RNA, 17 nt, Human
caagguucccucugaga

SEQ ID NO: 2608897 - RNA, 16 nt, Human
caagguucccucugag

SEQ ID NO: 2608898 - RNA, 15 nt, Human
caagguucccucuga

SEQ ID NO: 2608899 - RNA, 22 nt, Human
caagguuuaaacuucucugaag

SEQ ID NO: 2608900 - RNA, 19 nt, Human
caagguucccucugagaau

SEQ ID NO: 2608901 - RNA, 22 nt, Human
caagugaaaaaggaggaagaga

SEQ ID NO: 2608902 - RNA, 23 nt, Human
caagugaaaaaggaggaagagaa

SEQ ID NO: 2608903 - RNA, 17 nt, Human
caagguuuaggcuggug

SEQ ID NO: 2608904 - RNA, 12 nt, Human
caagugaagguu

SEQ ID NO: 2608905 - RNA, 11 nt, Human
caagugaaggu

SEQ ID NO: 2608906 - RNA, 14 nt, Human
caagugaagaaaag

SEQ ID NO: 2608907 - RNA, 19 nt, Human
caagugaacacuagccaga

SEQ ID NO: 2608908 - RNA, 14 nt, Human
caagugagacccug

SEQ ID NO: 2608909 - RNA, 21 nt, Human
caagugaagguuuacaauuua

SEQ ID NO: 2608910 - RNA, 14 nt, Human
caagugaagguuua

SEQ ID NO: 2608911 - RNA, 19 nt, Human
caagugaauuuuucucuaa

SEQ ID NO: 2608912 - RNA, 15 nt, Human
caagugacaucucuu

SEQ ID NO: 2608913 - RNA, 16 nt, Human
caagugacaucucuuu

SEQ ID NO: 2608914 - RNA, 18 nt, Human
caagugauucuccugccu

SEQ ID NO: 2608915 - RNA, 19 nt, Human
caagugauucuccugccuc

SEQ ID NO: 2608916 - RNA, 15 nt, Human
caagugagacccugu

SEQ ID NO: 2608917 - RNA, 19 nt, Human
caagugagacccugucuca

SEQ ID NO: 2608918 - RNA, 19 nt, Human
caagugcaugcucucugca

SEQ ID NO: 2608919 - RNA, 22 nt, Human
caagugccacugcccgagcugg

SEQ ID NO: 2608920 - RNA, 15 nt, Human
caagugccagaggug

SEQ ID NO: 2608921 - RNA, 14 nt, Human
caagugccagaggu

SEQ ID NO: 2608922 - RNA, 13 nt, Human
caagugccagagg

SEQ ID NO: 2608923 - RNA, 23 nt, Human
caagugccacugcccgagcuggu

SEQ ID NO: 2608924 - RNA, 20 nt, Human
caagugccagaggugggcag

SEQ ID NO: 2608925 - RNA, 19 nt, Human
caagugccagaggugggca

SEQ ID NO: 2608926 - RNA, 17 nt, Human
caagugccagagguggg

SEQ ID NO: 2608927 - RNA, 16 nt, Human
caagugccagaggugg

SEQ ID NO: 2608928 - RNA, 22 nt, Human
caagugccagaggugggcaggu

SEQ ID NO: 2608929 - RNA, 21 nt, Human
caagugccagaggugggcagg

SEQ ID NO: 2608930 - RNA, 20 nt, Human
caagugccagucuugugucu

SEQ ID NO: 2608931 - RNA, 13 nt, Human
caagugaaucuaa

SEQ ID NO: 2608932 - RNA, 17 nt, Human
caagugcaugcucucug

SEQ ID NO: 2608933 - RNA, 20 nt, Human
caagugauucuccugccuca

SEQ ID NO: 2608934 - RNA, 14 nt, Human
caagggccuggccu

SEQ ID NO: 2608935 - RNA, 13 nt, Human
caagggccuggcc

SEQ ID NO: 2608936 - RNA, 15 nt, Human
caagggccuggccug

SEQ ID NO: 2608937 - RNA, 21 nt, Human
caaggggaauguuugccucug

SEQ ID NO: 2608938 - RNA, 17 nt, Human
caagggaucugguccua

SEQ ID NO: 2608939 - RNA, 20 nt, Human
caagggaucugguccuaccc

SEQ ID NO: 2608940 - RNA, 21 nt, Human
caagggaucugguccuaccca

SEQ ID NO: 2608941 - RNA, 20 nt, Human
caagggagagaccucaucag

SEQ ID NO: 2608942 - RNA, 19 nt, Human
caagggagagaccucauca

SEQ ID NO: 2608943 - RNA, 17 nt, Human
caagggagagaccucau

SEQ ID NO: 2608944 - RNA, 15 nt, Human
caagggagagaccuc

SEQ ID NO: 2608945 - RNA, 14 nt, Human
caagggagagaccu

SEQ ID NO: 2608946 - RNA, 19 nt, Human
caagggcaaaauucccagg

SEQ ID NO: 2608947 - RNA, 17 nt, Human
caagggcaaaauuccca

SEQ ID NO: 2608948 - RNA, 19 nt, Human
caagggcaaaaagucuaca

SEQ ID NO: 2608949 - RNA, 13 nt, Human
caagggauggugc

SEQ ID NO: 2608950 - RNA, 20 nt, Human
caagggcagaacacuaaccu

SEQ ID NO: 2608951 - RNA, 20 nt, Human
caagggccaugcugaaggga

SEQ ID NO: 2608952 - RNA, 14 nt, Human
caagggccaugcug

SEQ ID NO: 2608953 - RNA, 23 nt, Human
caaggggaauguuugccucugcc

SEQ ID NO: 2608954 - RNA, 18 nt, Human
caaggggaaucagaacuc

SEQ ID NO: 2608955 - RNA, 16 nt, Human
caaggggaaaaucuca

SEQ ID NO: 2608956 - RNA, 21 nt, Human
caagggccaugcugaagggac

SEQ ID NO: 2608957 - RNA, 12 nt, Human
caagggccucuu

SEQ ID NO: 2608958 - RNA, 18 nt, Human
caaggggcagucuggagg

SEQ ID NO: 2608959 - RNA, 16 nt, Human
caaggggcagucugga

SEQ ID NO: 2608960 - RNA, 19 nt, Human
caaggggcagucuggaggg

SEQ ID NO: 2608961 - RNA, 19 nt, Human
caaggguucagagacucag

SEQ ID NO: 2608962 - RNA, 20 nt, Human
caaggguucagagacucagg

SEQ ID NO: 2608963 - RNA, 22 nt, Human
caagguaauuucuugugccucu

SEQ ID NO: 2608964 - RNA, 16 nt, Human
caagguagccauccca

SEQ ID NO: 2608965 - RNA, 15 nt, Human
caagguagccauccc

SEQ ID NO: 2608966 - RNA, 16 nt, Human
caagguagcccuggcc

SEQ ID NO: 2608967 - RNA, 21 nt, Human
caagguagcccuggccagagg

SEQ ID NO: 2608968 - RNA, 13 nt, Human
caaggucauuuuu

SEQ ID NO: 2608969 - RNA, 23 nt, Human
caagguagcccuggccagaggcu

SEQ ID NO: 2608970 - RNA, 23 nt, Human
caacugcaucaagaugugacaug

SEQ ID NO: 2608971 - RNA, 20 nt, Human
caacugcaucaagaugugac

SEQ ID NO: 2608972 - RNA, 17 nt, Human
caacugcaucaagaugu

SEQ ID NO: 2608973 - RNA, 18 nt, Human
caacugaaugaggucagc

SEQ ID NO: 2608974 - RNA, 18 nt, Human
caacugaauaaauaccuc

SEQ ID NO: 2608975 - RNA, 19 nt, Human
caacuggacauugucugcg

SEQ ID NO: 2608976 - RNA, 22 nt, Human
caacuggccggucugcaaguca

SEQ ID NO: 2608977 - RNA, 13 nt, Human
caacugggcccaa

SEQ ID NO: 2608978 - RNA, 21 nt, Human
caacugucuauuucugcugaa

SEQ ID NO: 2608979 - RNA, 18 nt, Human
caacugucuauuucugcu

SEQ ID NO: 2608980 - RNA, 21 nt, Human
caacugucucgaugcaaugaa

SEQ ID NO: 2608981 - RNA, 15 nt, Human
caacuguauauauuc

SEQ ID NO: 2608982 - RNA, 13 nt, Human
caacuguauauau

SEQ ID NO: 2608983 - RNA, 12 nt, Human
caacuguauaua

SEQ ID NO: 2608984 - RNA, 16 nt, Human
caacuguguucauuag

SEQ ID NO: 2608985 - RNA, 23 nt, Human
caacugucucgaugcaaugaaca

SEQ ID NO: 2608986 - RNA, 21 nt, Human
caaccugauugugucucuugg

SEQ ID NO: 2608987 - RNA, 19 nt, Human
caaccugauugugucucuu

SEQ ID NO: 2608988 - RNA, 19 nt, Human
caaccuccgccucccgggu

SEQ ID NO: 2608989 - RNA, 17 nt, Human
caaccugauugugucuc

SEQ ID NO: 2608990 - RNA, 17 nt, Human
caacucuugcaggucuc

SEQ ID NO: 2608991 - RNA, 13 nt, Human
caacucuuugaga

SEQ ID NO: 2608992 - RNA, 16 nt, Human
caacucuugauuaucc

SEQ ID NO: 2608993 - RNA, 18 nt, Human
caacucuugauuauccau

SEQ ID NO: 2608994 - RNA, 21 nt, Human
caaccugccugacauuuggag

SEQ ID NO: 2608995 - RNA, 17 nt, Human
caaccugcaaagaucug

SEQ ID NO: 2608996 - RNA, 12 nt, Human
caacucuugauu

SEQ ID NO: 2608997 - RNA, 14 nt, Human
caacucuuugagaa

SEQ ID NO: 2608998 - RNA, 15 nt, Human
caacucuuugagaaa

SEQ ID NO: 2608999 - RNA, 16 nt, Human
caacucuuugagaaac

SEQ ID NO: 2609000 - RNA, 13 nt, Human
caacugaaaagac

SEQ ID NO: 2609001 - RNA, 14 nt, Human
caacugaaaagacu

SEQ ID NO: 2609002 - RNA, 22 nt, Human
caacugaaaagacucaguguuc

SEQ ID NO: 2609003 - RNA, 16 nt, Human
caaauuuacagagaca

SEQ ID NO: 2609004 - RNA, 17 nt, Human
caaauuuacagagacag

SEQ ID NO: 2609005 - RNA, 23 nt, Human
caaauuuacagagacagaaagca

SEQ ID NO: 2609006 - RNA, 14 nt, Human
caacaggcugggcu

SEQ ID NO: 2609007 - RNA, 23 nt, Human
caacagugugaaguuagaauucc

SEQ ID NO: 2609008 - RNA, 22 nt, Human
caacagugugaaguuagaauuc

SEQ ID NO: 2609009 - RNA, 21 nt, Human
caacagugugaaguuagaauu

SEQ ID NO: 2609010 - RNA, 19 nt, Human
caacagugugaaguuagaa

SEQ ID NO: 2609011 - RNA, 18 nt, Human
caacagugugaaguuaga

SEQ ID NO: 2609012 - RNA, 17 nt, Human
caacagugugaaguuag

SEQ ID NO: 2609013 - RNA, 16 nt, Human
caacagugugaaguua

SEQ ID NO: 2609014 - RNA, 14 nt, Human
caacagugugaagu

SEQ ID NO: 2609015 - RNA, 17 nt, Human
caacagugcuaaaaaug

SEQ ID NO: 2609016 - RNA, 16 nt, Human
caacagugcuaaaaau

SEQ ID NO: 2609017 - RNA, 14 nt, Human
caacagugcuaaaa

SEQ ID NO: 2609018 - RNA, 13 nt, Human
caacagugcuaaa

SEQ ID NO: 2609019 - RNA, 13 nt, Human
caacagugugaag

SEQ ID NO: 2609020 - RNA, 18 nt, Human
caacagugcuaaaaaugg

SEQ ID NO: 2609021 - RNA, 12 nt, Human
caacagugugaa

SEQ ID NO: 2609022 - RNA, 12 nt, Human
caacagugcuaa

SEQ ID NO: 2609023 - RNA, 12 nt, Human
caacagugaguc

SEQ ID NO: 2609024 - RNA, 11 nt, Human
caacagugagu

SEQ ID NO: 2609025 - RNA, 17 nt, Human
caacaggcugggcuuca

SEQ ID NO: 2609026 - RNA, 15 nt, Human
caacauacucccauc

SEQ ID NO: 2609027 - RNA, 14 nt, Human
caacauacucccau

SEQ ID NO: 2609028 - RNA, 22 nt, Human
caacaguuuuuuaugcuaauca

SEQ ID NO: 2609029 - RNA, 23 nt, Human
caacaguguuaggccuggcacag

SEQ ID NO: 2609030 - RNA, 22 nt, Human
caacaguguuaggccuggcaca

SEQ ID NO: 2609031 - RNA, 20 nt, Human
caacaguguuaggccuggca

SEQ ID NO: 2609032 - RNA, 14 nt, Human
caacaguuccuuca

SEQ ID NO: 2609033 - RNA, 16 nt, Human
caacauacucccaucu

SEQ ID NO: 2609034 - RNA, 21 nt, Human
caaccuaccaccccuuccugu

SEQ ID NO: 2609035 - RNA, 20 nt, Human
caaccuaccaccccuuccug

SEQ ID NO: 2609036 - RNA, 18 nt, Human
caaccuaccaccccuucc

SEQ ID NO: 2609037 - RNA, 13 nt, Human
caaccuaaauuug

SEQ ID NO: 2609038 - RNA, 18 nt, Human
caaccuaaccccuuuccu

SEQ ID NO: 2609039 - RNA, 18 nt, Human
caaccucaacugccuacu

SEQ ID NO: 2609040 - RNA, 22 nt, Human
caaccuaccaccccuuccuguc

SEQ ID NO: 2609041 - RNA, 14 nt, Human
caaccucauugaca

SEQ ID NO: 2609042 - RNA, 15 nt, Human
caccacagacacaca

SEQ ID NO: 2609043 - RNA, 21 nt, Human
cacacuaaccuggguucccuu

SEQ ID NO: 2609044 - RNA, 13 nt, Human
cacacacacacaa

SEQ ID NO: 2609045 - RNA, 18 nt, Human
cacacagauuugagcuca

SEQ ID NO: 2609046 - RNA, 20 nt, Human
cacacagauuugagcucagc

SEQ ID NO: 2609047 - RNA, 17 nt, Human
cacacagaaaauauacu

SEQ ID NO: 2609048 - RNA, 18 nt, Human
cacacagaaaauauacug

SEQ ID NO: 2609049 - RNA, 19 nt, Human
cacacagaaaauauacugu

SEQ ID NO: 2609050 - RNA, 14 nt, Human
cacacagagugguc

SEQ ID NO: 2609051 - RNA, 20 nt, Human
cacacagaguggucuuucug

SEQ ID NO: 2609052 - RNA, 13 nt, Human
cacacagaaaaua

SEQ ID NO: 2609053 - RNA, 14 nt, Human
cacacagaaaauau

SEQ ID NO: 2609054 - RNA, 15 nt, Human
cacacagaaaauaua

SEQ ID NO: 2609055 - RNA, 16 nt, Human
cacacagaaaauauac

SEQ ID NO: 2609056 - RNA, 21 nt, Human
cacacagaggcugccucuccc

SEQ ID NO: 2609057 - RNA, 11 nt, Human
cacacagaaaa

SEQ ID NO: 2609058 - RNA, 12 nt, Human
cacacagaaaau

SEQ ID NO: 2609059 - RNA, 23 nt, Human
cacacacugugcuuucuauugua

SEQ ID NO: 2609060 - RNA, 22 nt, Human
cacacacugugcuuucuauugu

SEQ ID NO: 2609061 - RNA, 12 nt, Human
cacacacuuuug

SEQ ID NO: 2609062 - RNA, 14 nt, Human
cacacacuuuggcu

SEQ ID NO: 2609063 - RNA, 21 nt, Human
cacacacucgcccgcccacug

SEQ ID NO: 2609064 - RNA, 20 nt, Human
cacacacucgcccgcccacu

SEQ ID NO: 2609065 - RNA, 14 nt, Human
cacacacugaugcu

SEQ ID NO: 2609066 - RNA, 15 nt, Human
cacacacucacugcg

SEQ ID NO: 2609067 - RNA, 11 nt, Human
cacacacacac

SEQ ID NO: 2609068 - RNA, 12 nt, Human
cacacacacaca

SEQ ID NO: 2609069 - RNA, 13 nt, Human
cacacaccccaau

SEQ ID NO: 2609070 - RNA, 20 nt, Human
cacacaccagagcccaccuu

SEQ ID NO: 2609071 - RNA, 16 nt, Human
cacacaccagagccca

SEQ ID NO: 2609072 - RNA, 15 nt, Human
cacacaccagagccc

SEQ ID NO: 2609073 - RNA, 20 nt, Human
cacaaucucggcucacugca

SEQ ID NO: 2609074 - RNA, 22 nt, Human
cacaaucucggcucacugcauc

SEQ ID NO: 2609075 - RNA, 23 nt, Human
cacaaucucggcucacugcaucc

SEQ ID NO: 2609076 - RNA, 24 nt, Human
cacaaucucggcucacugcauccu

SEQ ID NO: 2609077 - RNA, 19 nt, Human
cacacaaggauagaugcug

SEQ ID NO: 2609078 - RNA, 16 nt, Human
cacacaagaagaaggg

SEQ ID NO: 2609079 - RNA, 18 nt, Human
cacacaagaagaagggca

SEQ ID NO: 2609080 - RNA, 16 nt, Human
cacacgcacacacaca

SEQ ID NO: 2609081 - RNA, 23 nt, Human
cacacgcacacacacacacagga

SEQ ID NO: 2609082 - RNA, 17 nt, Human
cacaccucccugaacca

SEQ ID NO: 2609083 - RNA, 14 nt, Human
cacaccucccugaa

SEQ ID NO: 2609084 - RNA, 16 nt, Human
cacaccucccugaacc

SEQ ID NO: 2609085 - RNA, 13 nt, Human
cacaccuccacag

SEQ ID NO: 2609086 - RNA, 12 nt, Human
cacaccuccaca

SEQ ID NO: 2609087 - RNA, 22 nt, Human
cacaccucaguucccuuggccu

SEQ ID NO: 2609088 - RNA, 14 nt, Human
cacaccuagcguca

SEQ ID NO: 2609089 - RNA, 15 nt, Human
cacaccucagaggcu

SEQ ID NO: 2609090 - RNA, 23 nt, Human
cacaccuaagggacauguuuuga

SEQ ID NO: 2609091 - RNA, 13 nt, Human
cacaccucaguuc

SEQ ID NO: 2609092 - RNA, 17 nt, Human
cacaccucaguucccuu

SEQ ID NO: 2609093 - RNA, 18 nt, Human
cacaccucaguucccuug

SEQ ID NO: 2609094 - RNA, 20 nt, Human
cacaccucaguucccuuggc

SEQ ID NO: 2609095 - RNA, 21 nt, Human
cacaccucaguucccuuggcc

SEQ ID NO: 2609096 - RNA, 20 nt, Human
cacacccagcccacuucugc

SEQ ID NO: 2609097 - RNA, 14 nt, Human
cacacccagcccac

SEQ ID NO: 2609098 - RNA, 16 nt, Human
cacaccuaagggacau

SEQ ID NO: 2609099 - RNA, 20 nt, Human
cacaccguguaaaccaaagc

SEQ ID NO: 2609100 - RNA, 19 nt, Human
cacacccagccucaguccu

SEQ ID NO: 2609101 - RNA, 18 nt, Human
cacacccagccucagucc

SEQ ID NO: 2609102 - RNA, 16 nt, Human
cacacccagccucagu

SEQ ID NO: 2609103 - RNA, 15 nt, Human
cacacccagccucag

SEQ ID NO: 2609104 - RNA, 14 nt, Human
cacacccagccuca

SEQ ID NO: 2609105 - RNA, 13 nt, Human
cacacccagccuc

SEQ ID NO: 2609106 - RNA, 14 nt, Human
cacaccaggcugug

SEQ ID NO: 2609107 - RNA, 17 nt, Human
cacaccaggcugugggc

SEQ ID NO: 2609108 - RNA, 12 nt, Human
cacacccagccu

SEQ ID NO: 2609109 - RNA, 19 nt, Human
cacaccaggcugugggccu

SEQ ID NO: 2609110 - RNA, 22 nt, Human
cacaccagagcccaccuuggcu

SEQ ID NO: 2609111 - RNA, 21 nt, Human
cacaccagagcccaccuuggc

SEQ ID NO: 2609112 - RNA, 22 nt, Human
cacaccaggccguccucccggg

SEQ ID NO: 2609113 - RNA, 12 nt, Human
cacaccagccau

SEQ ID NO: 2609114 - RNA, 15 nt, Human
cacacagaguggucu

SEQ ID NO: 2609115 - RNA, 23 nt, Human
cacaccaggccguccucccgggc

SEQ ID NO: 2609116 - RNA, 13 nt, Human
cacaccaggcugu

SEQ ID NO: 2609117 - RNA, 20 nt, Human
cacaccaggcugugggccuc

SEQ ID NO: 2609118 - RNA, 15 nt, Human
cacacagcucugucc

SEQ ID NO: 2609119 - RNA, 14 nt, Human
cacacagcucuguc

SEQ ID NO: 2609120 - RNA, 13 nt, Human
cacacagcucugu

SEQ ID NO: 2609121 - RNA, 22 nt, Human
cacacagauuugagcucagccc

SEQ ID NO: 2609122 - RNA, 15 nt, Human
cacacagcagcaguu

SEQ ID NO: 2609123 - RNA, 19 nt, Human
cacacagcaagucaggguu

SEQ ID NO: 2609124 - RNA, 18 nt, Human
caauuuuucugcacugag

SEQ ID NO: 2609125 - RNA, 15 nt, Human
cacaaacagaggccg

SEQ ID NO: 2609126 - RNA, 13 nt, Human
caauuuuucugca

SEQ ID NO: 2609127 - RNA, 11 nt, Human
caauuuuucca

SEQ ID NO: 2609128 - RNA, 17 nt, Human
cacaaaccugccugggu

SEQ ID NO: 2609129 - RNA, 13 nt, Human
cacaaaccugccu

SEQ ID NO: 2609130 - RNA, 14 nt, Human
caauuuuucugcac

SEQ ID NO: 2609131 - RNA, 15 nt, Human
cacaaaccaugcaaa

SEQ ID NO: 2609132 - RNA, 13 nt, Human
cacaaacucacca

SEQ ID NO: 2609133 - RNA, 23 nt, Human
cacaaacguuuacuuaucuuaug

SEQ ID NO: 2609134 - RNA, 22 nt, Human
cacaaacguauguaaauguaua

SEQ ID NO: 2609135 - RNA, 15 nt, Human
cacaaaccugccugg

SEQ ID NO: 2609136 - RNA, 12 nt, Human
cacaaacuguaa

SEQ ID NO: 2609137 - RNA, 17 nt, Human
cacaaacgggcucagca

SEQ ID NO: 2609138 - RNA, 11 nt, Human
caauuuuguaa

SEQ ID NO: 2609139 - RNA, 18 nt, Human
caauuuugcaugcucgau

SEQ ID NO: 2609140 - RNA, 20 nt, Human
caauuuucuggaauacauga

SEQ ID NO: 2609141 - RNA, 13 nt, Human
caauuauuuuuac

SEQ ID NO: 2609142 - RNA, 12 nt, Human
caauuuuguaac

SEQ ID NO: 2609143 - RNA, 15 nt, Human
caauuauguuaaacu

SEQ ID NO: 2609144 - RNA, 13 nt, Human
caauuauguuaaa

SEQ ID NO: 2609145 - RNA, 23 nt, Human
caauuauaucaguccucuuucaa

SEQ ID NO: 2609146 - RNA, 16 nt, Human
caauuagggccuagcc

SEQ ID NO: 2609147 - RNA, 20 nt, Human
caaugguuugcaaggaagcc

SEQ ID NO: 2609148 - RNA, 19 nt, Human
caaugguuugcaaggaagc

SEQ ID NO: 2609149 - RNA, 22 nt, Human
caaugcacacaaaacaacccua

SEQ ID NO: 2609150 - RNA, 16 nt, Human
caaugcacacaaaaca

SEQ ID NO: 2609151 - RNA, 14 nt, Human
caaugcacuuuguu

SEQ ID NO: 2609152 - RNA, 18 nt, Human
caaugguuuucuugugug

SEQ ID NO: 2609153 - RNA, 18 nt, Human
caaugguuugcaaggaag

SEQ ID NO: 2609154 - RNA, 17 nt, Human
caaugguuugcaaggaa

SEQ ID NO: 2609155 - RNA, 16 nt, Human
caaugguuugcaagga

SEQ ID NO: 2609156 - RNA, 13 nt, Human
caaugguuugcaa

SEQ ID NO: 2609157 - RNA, 19 nt, Human
cacaaucucggcucacugc

SEQ ID NO: 2609158 - RNA, 20 nt, Human
cacaauccuaacacauuauc

SEQ ID NO: 2609159 - RNA, 22 nt, Human
cacaauccuaacacauuaucgg

SEQ ID NO: 2609160 - RNA, 23 nt, Human
cacaauccuaacacauuaucggg

SEQ ID NO: 2609161 - RNA, 22 nt, Human
cacaagugccacugcccgagcu

SEQ ID NO: 2609162 - RNA, 16 nt, Human
cacaaggcuguugcau

SEQ ID NO: 2609163 - RNA, 17 nt, Human
cacaaggugcaaaucaa

SEQ ID NO: 2609164 - RNA, 13 nt, Human
cacaaguaaacau

SEQ ID NO: 2609165 - RNA, 20 nt, Human
cacaaguccugugaauuucu

SEQ ID NO: 2609166 - RNA, 16 nt, Human
cacaaguccugugaau

SEQ ID NO: 2609167 - RNA, 21 nt, Human
cacaaggcugaccaagagaga

SEQ ID NO: 2609168 - RNA, 12 nt, Human
cacaagugaaaa

SEQ ID NO: 2609169 - RNA, 16 nt, Human
cacaagugaaaaacau

SEQ ID NO: 2609170 - RNA, 20 nt, Human
cacaagaaauuugauuucua

SEQ ID NO: 2609171 - RNA, 14 nt, Human
cacaagaaauuuga

SEQ ID NO: 2609172 - RNA, 12 nt, Human
cacaagaaauuu

SEQ ID NO: 2609173 - RNA, 19 nt, Human
cacaagaagaccagacugu

SEQ ID NO: 2609174 - RNA, 23 nt, Human
cacaagaaaugaaagcagggacu

SEQ ID NO: 2609175 - RNA, 23 nt, Human
cacaagacccaaaaggcagaagc

SEQ ID NO: 2609176 - RNA, 15 nt, Human
cacaaggccaucugg

SEQ ID NO: 2609177 - RNA, 14 nt, Human
cacaaggcugacca

SEQ ID NO: 2609178 - RNA, 18 nt, Human
cacaaggcugaccaagag

SEQ ID NO: 2609179 - RNA, 19 nt, Human
cacaaggcugaccaagaga

SEQ ID NO: 2609180 - RNA, 12 nt, Human
cacaacuuguuu

SEQ ID NO: 2609181 - RNA, 20 nt, Human
cacaacuuguuuuugguuuu

SEQ ID NO: 2609182 - RNA, 15 nt, Human
cacaagaaaugaaag

SEQ ID NO: 2609183 - RNA, 13 nt, Human
cacaagaaaugaa

SEQ ID NO: 2609184 - RNA, 23 nt, Human
cacaaauauuuauuuucuuucug

SEQ ID NO: 2609185 - RNA, 13 nt, Human
cacaaauauuuau

SEQ ID NO: 2609186 - RNA, 21 nt, Human
cacaaauauuuauuuucuuuc

SEQ ID NO: 2609187 - RNA, 17 nt, Human
cacaaagguagcuuuuc

SEQ ID NO: 2609188 - RNA, 13 nt, Human
cacaaacuguaaa

SEQ ID NO: 2609189 - RNA, 16 nt, Human
cacaaagguauaauuu

SEQ ID NO: 2609190 - RNA, 10 nt, Human
cacaaauaaa

SEQ ID NO: 2609191 - RNA, 12 nt, Human
cacaaauaaaau

SEQ ID NO: 2609192 - RNA, 13 nt, Human
caaugcacuuugu

SEQ ID NO: 2609193 - RNA, 14 nt, Human
caaugcacugacau

SEQ ID NO: 2609194 - RNA, 23 nt, Human
caaugcaaaccaucauugaaauc

SEQ ID NO: 2609195 - RNA, 22 nt, Human
caaugauuguuaauuuacagcu

SEQ ID NO: 2609196 - RNA, 20 nt, Human
caaugcaaaccaucauugaa

SEQ ID NO: 2609197 - RNA, 22 nt, Human
caaugcaaaccaucauugaaau

SEQ ID NO: 2609198 - RNA, 21 nt, Human
caaugcaaaccaucauugaaa

SEQ ID NO: 2609199 - RNA, 14 nt, Human
caaugauggucacc

SEQ ID NO: 2609200 - RNA, 14 nt, Human
caaugcaaaccauc

SEQ ID NO: 2609201 - RNA, 14 nt, Human
caaugauguccaga

SEQ ID NO: 2609202 - RNA, 15 nt, Human
caaugauuguuaauu

SEQ ID NO: 2609203 - RNA, 14 nt, Human
caaugaccuuucaa

SEQ ID NO: 2609204 - RNA, 23 nt, Human
caaugaaauacacaaguaaacau

SEQ ID NO: 2609205 - RNA, 22 nt, Human
caaugaaauacacaaguaaaca

SEQ ID NO: 2609206 - RNA, 11 nt, Human
caaugaaauga

SEQ ID NO: 2609207 - RNA, 13 nt, Human
caaugaccuuuca

SEQ ID NO: 2609208 - RNA, 15 nt, Human
caaugaaaaaaugua

SEQ ID NO: 2609209 - RNA, 17 nt, Human
caaugaaaguuugcacu

SEQ ID NO: 2609210 - RNA, 16 nt, Human
caaugaccuuucaaua

SEQ ID NO: 2609211 - RNA, 15 nt, Human
caaugaccuuucaau

SEQ ID NO: 2609212 - RNA, 13 nt, Human
caaugaaaugaau

SEQ ID NO: 2609213 - RNA, 24 nt, Human
caaugauggcaauuuuguaacgaa

SEQ ID NO: 2609214 - RNA, 21 nt, Human
caaugauggcaauuuuguaac

SEQ ID NO: 2609215 - RNA, 13 nt, Human
caaugauggucac

SEQ ID NO: 2609216 - RNA, 18 nt, Human
caaucucggcucacugca

SEQ ID NO: 2609217 - RNA, 17 nt, Human
caaucucccgcugcugc

SEQ ID NO: 2609218 - RNA, 20 nt, Human
caaucgacuggguuuauguc

SEQ ID NO: 2609219 - RNA, 19 nt, Human
caaucgacuggguuuaugu

SEQ ID NO: 2609220 - RNA, 14 nt, Human
caauccuuguucag

SEQ ID NO: 2609221 - RNA, 20 nt, Human
caaucuauuaauagcugccu

SEQ ID NO: 2609222 - RNA, 20 nt, Human
caaucuaaccacaucaauau

SEQ ID NO: 2609223 - RNA, 15 nt, Human
caaucuaaccacauc

SEQ ID NO: 2609224 - RNA, 22 nt, Human
caaucuauuaauagcugccuua

SEQ ID NO: 2609225 - RNA, 21 nt, Human
caaucucaaauucucaaccua

SEQ ID NO: 2609226 - RNA, 20 nt, Human
caaucucaaauucucaaccu

SEQ ID NO: 2609227 - RNA, 13 nt, Human
caauauuccugaa

SEQ ID NO: 2609228 - RNA, 17 nt, Human
caauccugucuuucuga

SEQ ID NO: 2609229 - RNA, 18 nt, Human
caauccugugggugaaga

SEQ ID NO: 2609230 - RNA, 22 nt, Human
caauauuauaauuuuuuucaau

SEQ ID NO: 2609231 - RNA, 14 nt, Human
caauauuauaauuu

SEQ ID NO: 2609232 - RNA, 14 nt, Human
caauauuauacuaa

SEQ ID NO: 2609233 - RNA, 18 nt, Human
caauauuauacuaagaaa

SEQ ID NO: 2609234 - RNA, 19 nt, Human
caauauuauacuaagaaaa

SEQ ID NO: 2609235 - RNA, 21 nt, Human
caauauuauacuaagaaaaga

SEQ ID NO: 2609236 - RNA, 15 nt, Human
caauauucaaaugcg

SEQ ID NO: 2609237 - RNA, 13 nt, Human
caauauucaaaug

SEQ ID NO: 2609238 - RNA, 22 nt, Human
caauauuauacuaagaaaagau

SEQ ID NO: 2609239 - RNA, 23 nt, Human
caauauuauacuaagaaaagaua

SEQ ID NO: 2609240 - RNA, 20 nt, Human
caauaucaguuauuuuuuga

SEQ ID NO: 2609241 - RNA, 14 nt, Human
caauauuaaaucug

SEQ ID NO: 2609242 - RNA, 23 nt, Human
caauauuaaauacagacacuaag

SEQ ID NO: 2609243 - RNA, 15 nt, Human
caauauuaaaucugc

SEQ ID NO: 2609244 - RNA, 23 nt, Human
caauauuaaugccuuuaaaguau

SEQ ID NO: 2609245 - RNA, 17 nt, Human
caauauuaaugccuuua

SEQ ID NO: 2609246 - RNA, 13 nt, Human
caauauuauaauu

SEQ ID NO: 2609247 - RNA, 12 nt, Human
caagugcuggca

SEQ ID NO: 2609248 - RNA, 13 nt, Human
caagugccuuaau

SEQ ID NO: 2609249 - RNA, 18 nt, Human
caagugcugaacagugga

SEQ ID NO: 2609250 - RNA, 20 nt, Human
caagugcugaacaguggagg

SEQ ID NO: 2609251 - RNA, 17 nt, Human
caagugcugaacagugg

SEQ ID NO: 2609252 - RNA, 16 nt, Human
caagugcugaacagug

SEQ ID NO: 2609253 - RNA, 14 nt, Human
caagugcugaacag

SEQ ID NO: 2609254 - RNA, 16 nt, Human
caagugccugcuuuua

SEQ ID NO: 2609255 - RNA, 13 nt, Human
caauaucagugcu

SEQ ID NO: 2609256 - RNA, 21 nt, Human
caagugcuggcaccaccaggc

SEQ ID NO: 2609257 - RNA, 14 nt, Human
caauaucagacuuu

SEQ ID NO: 2609258 - RNA, 13 nt, Human
uuuuuucuuacug

SEQ ID NO: 2609259 - RNA, 11 nt, Human
uuuuuucugau

SEQ ID NO: 2609260 - RNA, 12 nt, Human
uuuuuugaaaac

SEQ ID NO: 2609261 - RNA, 17 nt, Human
ccaaacucaccugcccc

SEQ ID NO: 2609262 - RNA, 19 nt, Human
ccaaacauccuacaagaca

SEQ ID NO: 2609263 - RNA, 20 nt, Human
ccaaacauccuacaagacac

SEQ ID NO: 2609264 - RNA, 21 nt, Human
cauuuuuccuucccuucucca

SEQ ID NO: 2609265 - RNA, 22 nt, Human
ccaaacaccuuccagcuccugu

SEQ ID NO: 2609266 - RNA, 18 nt, Human
cauuuuuccuucccuucu

SEQ ID NO: 2609267 - RNA, 16 nt, Human
cauuuuuccuucccuu

SEQ ID NO: 2609268 - RNA, 16 nt, Human
ccaaacagccacacug

SEQ ID NO: 2609269 - RNA, 20 nt, Human
ccaaacaccuuccagcuccu

SEQ ID NO: 2609270 - RNA, 18 nt, Human
cauuuuuccuaacaggau

SEQ ID NO: 2609271 - RNA, 13 nt, Human
cauuuuuccuaac

SEQ ID NO: 2609272 - RNA, 20 nt, Human
cauuuuucagauauaaaaga

SEQ ID NO: 2609273 - RNA, 18 nt, Human
cauuuuucagauauaaaa

SEQ ID NO: 2609274 - RNA, 14 nt, Human
cauuuuaguucuuu

SEQ ID NO: 2609275 - RNA, 17 nt, Human
cauuuuagucacuuuuu

SEQ ID NO: 2609276 - RNA, 16 nt, Human
cauuuuagucacuuuu

SEQ ID NO: 2609277 - RNA, 15 nt, Human
cauuuuagucacuuu

SEQ ID NO: 2609278 - RNA, 11 nt, Human
cauuuuauaaa

SEQ ID NO: 2609279 - RNA, 13 nt, Human
cauuuuauaaauc

SEQ ID NO: 2609280 - RNA, 17 nt, Human
cauuuuauaaaucgcuu

SEQ ID NO: 2609281 - RNA, 18 nt, Human
cauuuuauaaaucgcuuu

SEQ ID NO: 2609282 - RNA, 21 nt, Human
cauuuuauaaaucgcuuuuga

SEQ ID NO: 2609283 - RNA, 18 nt, Human
cauuuuaaaaaugaaauu

SEQ ID NO: 2609284 - RNA, 20 nt, Human
cauuuuaaaaaaaaaggcau

SEQ ID NO: 2609285 - RNA, 12 nt, Human
cauuuugugaau

SEQ ID NO: 2609286 - RNA, 20 nt, Human
cauuuuguauaauuguaucg

SEQ ID NO: 2609287 - RNA, 18 nt, Human
cauuuuguauaauuguau

SEQ ID NO: 2609288 - RNA, 17 nt, Human
cauuuuguauaauugua

SEQ ID NO: 2609289 - RNA, 21 nt, Human
cauuuuguauaauuguaucgu

SEQ ID NO: 2609290 - RNA, 16 nt, Human
cauuuugugaauggau

SEQ ID NO: 2609291 - RNA, 15 nt, Human
cauuuugugaaugga

SEQ ID NO: 2609292 - RNA, 14 nt, Human
cauuuugugaaugg

SEQ ID NO: 2609293 - RNA, 13 nt, Human
cauuuugugaaug

SEQ ID NO: 2609294 - RNA, 21 nt, Human
cauuuugugaauggauuggau

SEQ ID NO: 2609295 - RNA, 18 nt, Human
cauuuugugaauggauug

SEQ ID NO: 2609296 - RNA, 22 nt, Human
cauuuuguggucauuaagcauu

SEQ ID NO: 2609297 - RNA, 14 nt, Human
cauuuuguauaauu

SEQ ID NO: 2609298 - RNA, 15 nt, Human
cauuuuguauaauug

SEQ ID NO: 2609299 - RNA, 23 nt, Human
cauuuuauaaaucgcuuuugaua

SEQ ID NO: 2609300 - RNA, 14 nt, Human
cauuuuauauguca

SEQ ID NO: 2609301 - RNA, 22 nt, Human
cauuugaaaauuuugauguuuu

SEQ ID NO: 2609302 - RNA, 20 nt, Human
cauuugaaaauuuugauguu

SEQ ID NO: 2609303 - RNA, 15 nt, Human
cauuugaaagaaagg

SEQ ID NO: 2609304 - RNA, 14 nt, Human
cauuugaaagaaag

SEQ ID NO: 2609305 - RNA, 11 nt, Human
cauuugaaaga

SEQ ID NO: 2609306 - RNA, 11 nt, Human
cauuugaaugc

SEQ ID NO: 2609307 - RNA, 10 nt, Human
cauuugaaug

SEQ ID NO: 2609308 - RNA, 19 nt, Human
cauuugaaagaaaggacuc

SEQ ID NO: 2609309 - RNA, 21 nt, Human
cauuugaauaaagccugcuuu

SEQ ID NO: 2609310 - RNA, 18 nt, Human
cauuugcucauggaauug

SEQ ID NO: 2609311 - RNA, 13 nt, Human
cauuugcucaugg

SEQ ID NO: 2609312 - RNA, 14 nt, Human
cauuugcuccuuuc

SEQ ID NO: 2609313 - RNA, 13 nt, Human
cauuugcuccuuu

SEQ ID NO: 2609314 - RNA, 20 nt, Human
cauuuguuugaacugauaaa

SEQ ID NO: 2609315 - RNA, 22 nt, Human
cauuuguuugaacugauaaaga

SEQ ID NO: 2609316 - RNA, 17 nt, Human
cauuuguuugaacugau

SEQ ID NO: 2609317 - RNA, 19 nt, Human
cauuugcucuuucaucucu

SEQ ID NO: 2609318 - RNA, 22 nt, Human
cauuugcguuccaugaugcugg

SEQ ID NO: 2609319 - RNA, 18 nt, Human
cauuugagcagggcucag

SEQ ID NO: 2609320 - RNA, 17 nt, Human
cauuugagcagggcuca

SEQ ID NO: 2609321 - RNA, 14 nt, Human
cauuugccuauucc

SEQ ID NO: 2609322 - RNA, 12 nt, Human
cauuugccuauu

SEQ ID NO: 2609323 - RNA, 18 nt, Human
cauuugaaagaaaggacu

SEQ ID NO: 2609324 - RNA, 20 nt, Human
cauuugagcagggcucagcg

SEQ ID NO: 2609325 - RNA, 14 nt, Human
cauuugccuugcug

SEQ ID NO: 2609326 - RNA, 18 nt, Human
cauuugccuauucccaca

SEQ ID NO: 2609327 - RNA, 17 nt, Human
cauuugccuauucccac

SEQ ID NO: 2609328 - RNA, 15 nt, Human
cauuugccuauuccc

SEQ ID NO: 2609329 - RNA, 19 nt, Human
cauuugccuauucccacac

SEQ ID NO: 2609330 - RNA, 21 nt, Human
cauuugcgaaugguuccauuc

SEQ ID NO: 2609331 - RNA, 21 nt, Human
cauuugcguuccaugaugcug

SEQ ID NO: 2609332 - RNA, 20 nt, Human
cauuugcuaacuagcuugga

SEQ ID NO: 2609333 - RNA, 18 nt, Human
cauuuagccaccaucuuu

SEQ ID NO: 2609334 - RNA, 20 nt, Human
cauuuagauugaaaacuuuu

SEQ ID NO: 2609335 - RNA, 22 nt, Human
cauuuagccaccaucuuugcag

SEQ ID NO: 2609336 - RNA, 17 nt, Human
cauuuagccaccaucuu

SEQ ID NO: 2609337 - RNA, 19 nt, Human
cauuuagauugaaaacuuu

SEQ ID NO: 2609338 - RNA, 20 nt, Human
cauuuagagaggaaaaguaa

SEQ ID NO: 2609339 - RNA, 21 nt, Human
cauuuagagaggaaaaguaac

SEQ ID NO: 2609340 - RNA, 22 nt, Human
cauuuagcuaaacggauuccaa

SEQ ID NO: 2609341 - RNA, 17 nt, Human
cauuuaggccaugggac

SEQ ID NO: 2609342 - RNA, 20 nt, Human
cauuuccugcccuuccucag

SEQ ID NO: 2609343 - RNA, 19 nt, Human
cauuuccugcccuuccuca

SEQ ID NO: 2609344 - RNA, 17 nt, Human
cauuuccugcccuuccu

SEQ ID NO: 2609345 - RNA, 13 nt, Human
cauuuccugcccu

SEQ ID NO: 2609346 - RNA, 12 nt, Human
cauuuccugccc

SEQ ID NO: 2609347 - RNA, 11 nt, Human
cauuuccugcc

SEQ ID NO: 2609348 - RNA, 19 nt, Human
cauuuccugagaccacaga

SEQ ID NO: 2609349 - RNA, 20 nt, Human
cauuuccugacagaaggacu

SEQ ID NO: 2609350 - RNA, 13 nt, Human
cauuuccugacag

SEQ ID NO: 2609351 - RNA, 15 nt, Human
cauuuccuaaauaua

SEQ ID NO: 2609352 - RNA, 23 nt, Human
cauuuccuaucaccuauuuccau

SEQ ID NO: 2609353 - RNA, 17 nt, Human
cauuuaggggccacuuu

SEQ ID NO: 2609354 - RNA, 17 nt, Human
cauuuccuauguaacug

SEQ ID NO: 2609355 - RNA, 19 nt, Human
cauuuccuauguaacugca

SEQ ID NO: 2609356 - RNA, 16 nt, Human
cauuguuuuaaaaaga

SEQ ID NO: 2609357 - RNA, 22 nt, Human
cauuuaauaauauacuugugga

SEQ ID NO: 2609358 - RNA, 15 nt, Human
cauuuaaaagauaca

SEQ ID NO: 2609359 - RNA, 16 nt, Human
cauuuaaaagauacag

SEQ ID NO: 2609360 - RNA, 12 nt, Human
cauuuaaaagau

SEQ ID NO: 2609361 - RNA, 13 nt, Human
cauuguuuuaaaa

SEQ ID NO: 2609362 - RNA, 22 nt, Human
cauuguuugucugucuucauag

SEQ ID NO: 2609363 - RNA, 18 nt, Human
cauuguuugucugucuuc

SEQ ID NO: 2609364 - RNA, 13 nt, Human
cauuuccuguguc

SEQ ID NO: 2609365 - RNA, 12 nt, Human
cauuuccugugu

SEQ ID NO: 2609366 - RNA, 16 nt, Human
cauuuccuucaaggca

SEQ ID NO: 2609367 - RNA, 23 nt, Human
cauuuccugcccuuccucaguuu

SEQ ID NO: 2609368 - RNA, 21 nt, Human
cauuuccugcccuuccucagu

SEQ ID NO: 2609369 - RNA, 21 nt, Human
cauuucgguggcuagucaagc

SEQ ID NO: 2609370 - RNA, 17 nt, Human
cauuucgccccucauuu

SEQ ID NO: 2609371 - RNA, 21 nt, Human
cauuucgccccucauuuaucc

SEQ ID NO: 2609372 - RNA, 17 nt, Human
cauuucuacucucccau

SEQ ID NO: 2609373 - RNA, 15 nt, Human
cauuucgguggcuag

SEQ ID NO: 2609374 - RNA, 17 nt, Human
cauuucuaaaggccucu

SEQ ID NO: 2609375 - RNA, 18 nt, Human
cauuucuaaaggccucuu

SEQ ID NO: 2609376 - RNA, 23 nt, Human
cauuucuaaaggccucuuccuug

SEQ ID NO: 2609377 - RNA, 18 nt, Human
cauuucuauuuauuuacu

SEQ ID NO: 2609378 - RNA, 14 nt, Human
cauuucuauuuauu

SEQ ID NO: 2609379 - RNA, 13 nt, Human
cauuucuauuuau

SEQ ID NO: 2609380 - RNA, 20 nt, Human
cauuucuacucuuaaguuuc

SEQ ID NO: 2609381 - RNA, 22 nt, Human
cauuucuacucucccauggcuu

SEQ ID NO: 2609382 - RNA, 21 nt, Human
cauuucuacucucccauggcu

SEQ ID NO: 2609383 - RNA, 20 nt, Human
cauuucuacucucccauggc

SEQ ID NO: 2609384 - RNA, 23 nt, Human
cauuucuacucuuaaguuucuca

SEQ ID NO: 2609385 - RNA, 21 nt, Human
cauuucuacucuuaaguuucu

SEQ ID NO: 2609386 - RNA, 18 nt, Human
cauuucuacugugacuga

SEQ ID NO: 2609387 - RNA, 23 nt, Human
cauuucuagaacaucccugccag

SEQ ID NO: 2609388 - RNA, 21 nt, Human
cauuguagagcuucuggcacu

SEQ ID NO: 2609389 - RNA, 19 nt, Human
cauuguagagcuucuggca

SEQ ID NO: 2609390 - RNA, 17 nt, Human
cauuguagagcuucugg

SEQ ID NO: 2609391 - RNA, 16 nt, Human
cauuguagagcuucug

SEQ ID NO: 2609392 - RNA, 17 nt, Human
cauuguauauaugugug

SEQ ID NO: 2609393 - RNA, 16 nt, Human
cauuguauauaugugu

SEQ ID NO: 2609394 - RNA, 15 nt, Human
cauuguauauaugug

SEQ ID NO: 2609395 - RNA, 14 nt, Human
cauuguauauaugu

SEQ ID NO: 2609396 - RNA, 22 nt, Human
cauuguauaguuggaaucauau

SEQ ID NO: 2609397 - RNA, 16 nt, Human
cauuguauaaaaauag

SEQ ID NO: 2609398 - RNA, 15 nt, Human
cauuguauaaaaaua

SEQ ID NO: 2609399 - RNA, 20 nt, Human
cauugccauucccugccugg

SEQ ID NO: 2609400 - RNA, 19 nt, Human
cauugccauucccugccug

SEQ ID NO: 2609401 - RNA, 18 nt, Human
cauugccauucccugccu

SEQ ID NO: 2609402 - RNA, 17 nt, Human
cauugccauucccugcc

SEQ ID NO: 2609403 - RNA, 16 nt, Human
cauugccauucccugc

SEQ ID NO: 2609404 - RNA, 17 nt, Human
cauugccaccaggagaa

SEQ ID NO: 2609405 - RNA, 20 nt, Human
cauugccaccaggagaacca

SEQ ID NO: 2609406 - RNA, 15 nt, Human
cauugccauucccug

SEQ ID NO: 2609407 - RNA, 20 nt, Human
cauugccuauuucaguggca

SEQ ID NO: 2609408 - RNA, 13 nt, Human
cauugccuauuuc

SEQ ID NO: 2609409 - RNA, 18 nt, Human
cauugcccccagggcacu

SEQ ID NO: 2609410 - RNA, 17 nt, Human
cauugcccccagggcac

SEQ ID NO: 2609411 - RNA, 12 nt, Human
cauugcccuggu

SEQ ID NO: 2609412 - RNA, 18 nt, Human
cauugccuccuccuuccc

SEQ ID NO: 2609413 - RNA, 14 nt, Human
cauuguagaaaagc

SEQ ID NO: 2609414 - RNA, 15 nt, Human
cauuguagagcuucu

SEQ ID NO: 2609415 - RNA, 15 nt, Human
cacccaagggccugg

SEQ ID NO: 2609416 - RNA, 14 nt, Human
cacccaagggccug

SEQ ID NO: 2609417 - RNA, 15 nt, Human
cauugccaagggcuu

SEQ ID NO: 2609418 - RNA, 13 nt, Human
cauugccaccagg

SEQ ID NO: 2609419 - RNA, 14 nt, Human
cauugccaccagga

SEQ ID NO: 2609420 - RNA, 15 nt, Human
cauugccaccaggag

SEQ ID NO: 2609421 - RNA, 16 nt, Human
cauugccaccaggaga

SEQ ID NO: 2609422 - RNA, 17 nt, Human
cauuguuggccaaagcc

SEQ ID NO: 2609423 - RNA, 13 nt, Human
cauuguugagcua

SEQ ID NO: 2609424 - RNA, 20 nt, Human
cauuguugagcuauugcugu

SEQ ID NO: 2609425 - RNA, 16 nt, Human
cauuguugaggugguc

SEQ ID NO: 2609426 - RNA, 21 nt, Human
cauuguugagguggucugaau

SEQ ID NO: 2609427 - RNA, 13 nt, Human
cauugugcuucuu

SEQ ID NO: 2609428 - RNA, 17 nt, Human
cauuguggcacauucuu

SEQ ID NO: 2609429 - RNA, 17 nt, Human
cauugugcuucuuucuu

SEQ ID NO: 2609430 - RNA, 18 nt, Human
cauuguucaauuagaaua

SEQ ID NO: 2609431 - RNA, 16 nt, Human
cauuguggcuccuauc

SEQ ID NO: 2609432 - RNA, 13 nt, Human
cauuguggcuccu

SEQ ID NO: 2609433 - RNA, 19 nt, Human
cauuguggcugucagcagg

SEQ ID NO: 2609434 - RNA, 21 nt, Human
cauuguggcugucagcaggaa

SEQ ID NO: 2609435 - RNA, 18 nt, Human
cauuguuuagaaagaaua

SEQ ID NO: 2609436 - RNA, 18 nt, Human
cauuguugagguggucug

SEQ ID NO: 2609437 - RNA, 13 nt, Human
cauuguuggcagc

SEQ ID NO: 2609438 - RNA, 17 nt, Human
cauuguuuauuaacaaa

SEQ ID NO: 2609439 - RNA, 18 nt, Human
cauuguuggccaaagcca

SEQ ID NO: 2609440 - RNA, 20 nt, Human
cauuguuugaaacaaagaag

SEQ ID NO: 2609441 - RNA, 19 nt, Human
cauuguuugaaacaaagaa

SEQ ID NO: 2609442 - RNA, 18 nt, Human
cauuguuugaaacaaaga

SEQ ID NO: 2609443 - RNA, 14 nt, Human
cauuguuugaaaca

SEQ ID NO: 2609444 - RNA, 22 nt, Human
cauuguuugaaacaaagaaggu

SEQ ID NO: 2609445 - RNA, 21 nt, Human
cauuguuugaaacaaagaagg

SEQ ID NO: 2609446 - RNA, 14 nt, Human
cauuguuugcuuau

SEQ ID NO: 2609447 - RNA, 17 nt, Human
cauuguuugcuuauugu

SEQ ID NO: 2609448 - RNA, 18 nt, Human
cauuguuugcuuauuguu

SEQ ID NO: 2609449 - RNA, 19 nt, Human
cauuguuugcuuauuguuc

SEQ ID NO: 2609450 - RNA, 20 nt, Human
cauuguuugcuuauuguucc

SEQ ID NO: 2609451 - RNA, 17 nt, Human
cauuguuuggagacauu

SEQ ID NO: 2609452 - RNA, 15 nt, Human
cauuguuuggagaca

SEQ ID NO: 2609453 - RNA, 21 nt, Human
cauuguuugcuuauuguucca

SEQ ID NO: 2609454 - RNA, 22 nt, Human
cauuguuugcuuauuguuccaa

SEQ ID NO: 2609455 - RNA, 13 nt, Human
cauugucccucug

SEQ ID NO: 2609456 - RNA, 14 nt, Human
cauugucccucugc

SEQ ID NO: 2609457 - RNA, 15 nt, Human
cauugucccucugcc

SEQ ID NO: 2609458 - RNA, 18 nt, Human
cauugucccucugcccca

SEQ ID NO: 2609459 - RNA, 19 nt, Human
cauugucccucugccccau

SEQ ID NO: 2609460 - RNA, 21 nt, Human
cauugucccucugccccaucc

SEQ ID NO: 2609461 - RNA, 19 nt, Human
cauugucccugaagagaag

SEQ ID NO: 2609462 - RNA, 18 nt, Human
cauugugaacugacaggc

SEQ ID NO: 2609463 - RNA, 17 nt, Human
cauugugaacugacagg

SEQ ID NO: 2609464 - RNA, 15 nt, Human
cauugucuuguucug

SEQ ID NO: 2609465 - RNA, 13 nt, Human
cauugucuuguuc

SEQ ID NO: 2609466 - RNA, 23 nt, Human
cauugucuucggaaaccuuggug

SEQ ID NO: 2609467 - RNA, 13 nt, Human
cauugucuucgga

SEQ ID NO: 2609468 - RNA, 22 nt, Human
cauuguauggauaguaaaauuc

SEQ ID NO: 2609469 - RNA, 22 nt, Human
cauuguaugauguguugugaua

SEQ ID NO: 2609470 - RNA, 20 nt, Human
cauuguaugauguguuguga

SEQ ID NO: 2609471 - RNA, 18 nt, Human
cauuguaugauguguugu

SEQ ID NO: 2609472 - RNA, 17 nt, Human
cauuguaugauguguug

SEQ ID NO: 2609473 - RNA, 16 nt, Human
cauuguaugauguguu

SEQ ID NO: 2609474 - RNA, 22 nt, Human
cauuguaucgauguuauguaaa

SEQ ID NO: 2609475 - RNA, 22 nt, Human
cauuguauauauguguguuuaa

SEQ ID NO: 2609476 - RNA, 20 nt, Human
cauuguauauauguguguuu

SEQ ID NO: 2609477 - RNA, 16 nt, Human
cauuguaucgauguua

SEQ ID NO: 2609478 - RNA, 17 nt, Human
cauuguaucgauguuau

SEQ ID NO: 2609479 - RNA, 21 nt, Human
cauuguaucgauguuauguaa

SEQ ID NO: 2609480 - RNA, 15 nt, Human
cauuguaugaugugu

SEQ ID NO: 2609481 - RNA, 23 nt, Human
cauuguauucagaguugaugguu

SEQ ID NO: 2609482 - RNA, 21 nt, Human
cauuguccaauccuauguuuu

SEQ ID NO: 2609483 - RNA, 19 nt, Human
cauuguccaauccuauguu

SEQ ID NO: 2609484 - RNA, 12 nt, Human
ccaacccucauc

SEQ ID NO: 2609485 - RNA, 15 nt, Human
ccaagaagcccagga

SEQ ID NO: 2609486 - RNA, 15 nt, Human
ccaacccucagagcc

SEQ ID NO: 2609487 - RNA, 14 nt, Human
ccaacccucagagc

SEQ ID NO: 2609488 - RNA, 21 nt, Human
ccaaccccccagcacugagga

SEQ ID NO: 2609489 - RNA, 18 nt, Human
ccaaccccugaggaagau

SEQ ID NO: 2609490 - RNA, 12 nt, Human
ccaaccccugug

SEQ ID NO: 2609491 - RNA, 15 nt, Human
ccaacccgaggcccg

SEQ ID NO: 2609492 - RNA, 15 nt, Human
ccaaccccuguggag

SEQ ID NO: 2609493 - RNA, 17 nt, Human
ccaacccgaggcccgca

SEQ ID NO: 2609494 - RNA, 20 nt, Human
ccaaccccccagcacugagg

SEQ ID NO: 2609495 - RNA, 19 nt, Human
ccaaccccccagcacugag

SEQ ID NO: 2609496 - RNA, 18 nt, Human
ccaaccccccagcacuga

SEQ ID NO: 2609497 - RNA, 17 nt, Human
ccaaccccccagcacug

SEQ ID NO: 2609498 - RNA, 15 nt, Human
ccaaccccccagcac

SEQ ID NO: 2609499 - RNA, 14 nt, Human
ccaaccccccagca

SEQ ID NO: 2609500 - RNA, 13 nt, Human
ccaaccccccagc

SEQ ID NO: 2609501 - RNA, 18 nt, Human
ccaaccccccaccugcca

SEQ ID NO: 2609502 - RNA, 12 nt, Human
ccaagaaugcug

SEQ ID NO: 2609503 - RNA, 12 nt, Human
ccaagaaucuau

SEQ ID NO: 2609504 - RNA, 17 nt, Human
ccaagaaguuuaaggaa

SEQ ID NO: 2609505 - RNA, 20 nt, Human
ccaagaauagaugcugacug

SEQ ID NO: 2609506 - RNA, 19 nt, Human
ccaagacagaugccccaga

SEQ ID NO: 2609507 - RNA, 21 nt, Human
ccaagacagaugccccagagc

SEQ ID NO: 2609508 - RNA, 15 nt, Human
ccaagaaugcugaaa

SEQ ID NO: 2609509 - RNA, 14 nt, Human
ccaagaaugcugaa

SEQ ID NO: 2609510 - RNA, 13 nt, Human
ccaagaaugcuga

SEQ ID NO: 2609511 - RNA, 18 nt, Human
ccaagacagaugccccag

SEQ ID NO: 2609512 - RNA, 20 nt, Human
ccaagaagcccaggaaaggc

SEQ ID NO: 2609513 - RNA, 19 nt, Human
ccaagaagcccaggaaagg

SEQ ID NO: 2609514 - RNA, 13 nt, Human
ccaagaaguugga

SEQ ID NO: 2609515 - RNA, 22 nt, Human
ccaagaagggcuagaaccugga

SEQ ID NO: 2609516 - RNA, 13 nt, Human
ccaagaagggcua

SEQ ID NO: 2609517 - RNA, 19 nt, Human
ccaagaauagaugcugacu

SEQ ID NO: 2609518 - RNA, 12 nt, Human
ccaagaagggcu

SEQ ID NO: 2609519 - RNA, 20 nt, Human
ccaagacuugguguccuuuc

SEQ ID NO: 2609520 - RNA, 21 nt, Human
ccaagacuugguguccuuucc

SEQ ID NO: 2609521 - RNA, 20 nt, Human
ccaagacuuggcaacagaag

SEQ ID NO: 2609522 - RNA, 18 nt, Human
ccaagacuuggcaacaga

SEQ ID NO: 2609523 - RNA, 22 nt, Human
ccaagacuuggcaacagaagca

SEQ ID NO: 2609524 - RNA, 19 nt, Human
ccaagacuugguguccuuu

SEQ ID NO: 2609525 - RNA, 14 nt, Human
ccaagaggcugcag

SEQ ID NO: 2609526 - RNA, 15 nt, Human
ccaagaggcugcagc

SEQ ID NO: 2609527 - RNA, 22 nt, Human
ccaagacuugguguccuuuccc

SEQ ID NO: 2609528 - RNA, 20 nt, Human
ccaagagacaugcugacuuu

SEQ ID NO: 2609529 - RNA, 24 nt, Human
ccaagagacuccuugagagaccag

SEQ ID NO: 2609530 - RNA, 12 nt, Human
ccaagagagaaa

SEQ ID NO: 2609531 - RNA, 13 nt, Human
ccaagagagaaag

SEQ ID NO: 2609532 - RNA, 14 nt, Human
ccaagagagaaaga

SEQ ID NO: 2609533 - RNA, 16 nt, Human
ccaagaucgcgccacu

SEQ ID NO: 2609534 - RNA, 16 nt, Human
ccaagagucugaugau

SEQ ID NO: 2609535 - RNA, 19 nt, Human
ccaagaggguccuuuagua

SEQ ID NO: 2609536 - RNA, 21 nt, Human
ccaagaggcuguucccaccag

SEQ ID NO: 2609537 - RNA, 16 nt, Human
ccaagaggcugcagcc

SEQ ID NO: 2609538 - RNA, 15 nt, Human
ccaagagagaaagaa

SEQ ID NO: 2609539 - RNA, 22 nt, Human
ccaaacugacucuuaagaagac

SEQ ID NO: 2609540 - RNA, 19 nt, Human
ccaaagcagugcaugcugu

SEQ ID NO: 2609541 - RNA, 23 nt, Human
ccaaagcagugcaugcugucccu

SEQ ID NO: 2609542 - RNA, 19 nt, Human
ccaaagccaaagcuaggcc

SEQ ID NO: 2609543 - RNA, 17 nt, Human
ccaaagccuccuccagc

SEQ ID NO: 2609544 - RNA, 22 nt, Human
ccaaagccuccuccagccgcca

SEQ ID NO: 2609545 - RNA, 21 nt, Human
ccaaagccaauaacacacagc

SEQ ID NO: 2609546 - RNA, 20 nt, Human
ccaaagccaauaacacacag

SEQ ID NO: 2609547 - RNA, 14 nt, Human
ccaaagccaaugug

SEQ ID NO: 2609548 - RNA, 13 nt, Human
ccaaagccaccag

SEQ ID NO: 2609549 - RNA, 22 nt, Human
ccaaagccaccagacugacaaa

SEQ ID NO: 2609550 - RNA, 20 nt, Human
ccaaacucaccugccccuca

SEQ ID NO: 2609551 - RNA, 13 nt, Human
ccaaacagugaca

SEQ ID NO: 2609552 - RNA, 13 nt, Human
ccaaacucugcca

SEQ ID NO: 2609553 - RNA, 12 nt, Human
ccaaacugccua

SEQ ID NO: 2609554 - RNA, 15 nt, Human
ccaaagcuaggccug

SEQ ID NO: 2609555 - RNA, 17 nt, Human
ccaaagcgaauuuuaaa

SEQ ID NO: 2609556 - RNA, 15 nt, Human
ccaaagccagaacca

SEQ ID NO: 2609557 - RNA, 23 nt, Human
ccaaagccccuugcucuccccug

SEQ ID NO: 2609558 - RNA, 17 nt, Human
ccaaagcuaggccuggc

SEQ ID NO: 2609559 - RNA, 16 nt, Human
ccaaagcuaggccugg

SEQ ID NO: 2609560 - RNA, 21 nt, Human
ccaaagcuaggccuggccaga

SEQ ID NO: 2609561 - RNA, 18 nt, Human
ccaaagcuaggguggccc

SEQ ID NO: 2609562 - RNA, 19 nt, Human
ccaaagcuaggguggcccu

SEQ ID NO: 2609563 - RNA, 15 nt, Human
ccaaagcuuuccugc

SEQ ID NO: 2609564 - RNA, 14 nt, Human
ccaaagcuuuccug

SEQ ID NO: 2609565 - RNA, 13 nt, Human
ccaaagcuuuccu

SEQ ID NO: 2609566 - RNA, 16 nt, Human
ccaaagcuuucaugua

SEQ ID NO: 2609567 - RNA, 23 nt, Human
ccaaagcuaggguggcccuugca

SEQ ID NO: 2609568 - RNA, 15 nt, Human
ccaaagccagacagc

SEQ ID NO: 2609569 - RNA, 20 nt, Human
ccaaagcuuuccugccccag

SEQ ID NO: 2609570 - RNA, 19 nt, Human
ccaaagcuuuccugcccca

SEQ ID NO: 2609571 - RNA, 17 nt, Human
ccaaagcuuuccugccc

SEQ ID NO: 2609572 - RNA, 16 nt, Human
ccaaagcuuuccugcc

SEQ ID NO: 2609573 - RNA, 15 nt, Human
ccaaaggaagcacau

SEQ ID NO: 2609574 - RNA, 23 nt, Human
ccaaaggaagcacaugccucucu

SEQ ID NO: 2609575 - RNA, 23 nt, Human
ccaaaggaaaaagcacaagaagc

SEQ ID NO: 2609576 - RNA, 18 nt, Human
ccaaaggaagucuaggag

SEQ ID NO: 2609577 - RNA, 22 nt, Human
ccaaaggaaaaagcacaagaag

SEQ ID NO: 2609578 - RNA, 17 nt, Human
ccaaaggaaaaagcaca

SEQ ID NO: 2609579 - RNA, 12 nt, Human
ccaaaggaaaaa

SEQ ID NO: 2609580 - RNA, 21 nt, Human
ccaaagcuguuggucuguccc

SEQ ID NO: 2609581 - RNA, 20 nt, Human
ccaaaggccauggagagcug

SEQ ID NO: 2609582 - RNA, 19 nt, Human
ccaaaggccauggagagcu

SEQ ID NO: 2609583 - RNA, 22 nt, Human
ccaaaggcauuuuauugcuuga

SEQ ID NO: 2609584 - RNA, 21 nt, Human
ccaaaggacuccacccauccu

SEQ ID NO: 2609585 - RNA, 19 nt, Human
ccaaaggaugugauauaua

SEQ ID NO: 2609586 - RNA, 16 nt, Human
ccaaaggaugugauau

SEQ ID NO: 2609587 - RNA, 16 nt, Human
ccaaaggcucucuccu

SEQ ID NO: 2609588 - RNA, 17 nt, Human
ccaaaggacuccaccca

SEQ ID NO: 2609589 - RNA, 12 nt, Human
ccaaaggaggcu

SEQ ID NO: 2609590 - RNA, 15 nt, Human
ccaaaggaggcuggc

SEQ ID NO: 2609591 - RNA, 16 nt, Human
ccaaaggaggcuggca

SEQ ID NO: 2609592 - RNA, 17 nt, Human
ccaaaggaggcuggcag

SEQ ID NO: 2609593 - RNA, 18 nt, Human
ccaaaggaggcuggcagg

SEQ ID NO: 2609594 - RNA, 12 nt, Human
ccaacccagccg

SEQ ID NO: 2609595 - RNA, 21 nt, Human
ccaacccagccgcugcccggc

SEQ ID NO: 2609596 - RNA, 19 nt, Human
ccaacccagccgcugcccg

SEQ ID NO: 2609597 - RNA, 16 nt, Human
ccaacccagccgcugc

SEQ ID NO: 2609598 - RNA, 13 nt, Human
ccaacccagccgc

SEQ ID NO: 2609599 - RNA, 13 nt, Human
ccaaccccagccg

SEQ ID NO: 2609600 - RNA, 14 nt, Human
ccaaccccaacucc

SEQ ID NO: 2609601 - RNA, 12 nt, Human
ccaacccaucag

SEQ ID NO: 2609602 - RNA, 14 nt, Human
ccaacccaucagaa

SEQ ID NO: 2609603 - RNA, 13 nt, Human
ccaacccccaccc

SEQ ID NO: 2609604 - RNA, 16 nt, Human
ccaacccccaccccac

SEQ ID NO: 2609605 - RNA, 17 nt, Human
ccaacccccaccccaca

SEQ ID NO: 2609606 - RNA, 18 nt, Human
ccaacccccaccccacac

SEQ ID NO: 2609607 - RNA, 21 nt, Human
ccaacccccagcacccgggcu

SEQ ID NO: 2609608 - RNA, 15 nt, Human
ccaacccccagcacc

SEQ ID NO: 2609609 - RNA, 14 nt, Human
ccaacccccagcac

SEQ ID NO: 2609610 - RNA, 13 nt, Human
ccaacccccagca

SEQ ID NO: 2609611 - RNA, 19 nt, Human
ccaacccccaccccacacu

SEQ ID NO: 2609612 - RNA, 20 nt, Human
ccaacccccaccccacacuu

SEQ ID NO: 2609613 - RNA, 22 nt, Human
ccaacauacucccaucugugaa

SEQ ID NO: 2609614 - RNA, 21 nt, Human
ccaacauacucccaucuguga

SEQ ID NO: 2609615 - RNA, 15 nt, Human
ccaacagguggcagg

SEQ ID NO: 2609616 - RNA, 14 nt, Human
ccaacagguggcag

SEQ ID NO: 2609617 - RNA, 20 nt, Human
ccaacauugccuauuucagu

SEQ ID NO: 2609618 - RNA, 20 nt, Human
ccaaccaaguggcucccaca

SEQ ID NO: 2609619 - RNA, 20 nt, Human
ccaacaggaggacaauucau

SEQ ID NO: 2609620 - RNA, 19 nt, Human
ccaacaggaggacaauuca

SEQ ID NO: 2609621 - RNA, 13 nt, Human
ccaacaucaacau

SEQ ID NO: 2609622 - RNA, 20 nt, Human
ccaacauacucccaucugug

SEQ ID NO: 2609623 - RNA, 19 nt, Human
ccaacauacucccaucugu

SEQ ID NO: 2609624 - RNA, 18 nt, Human
ccaacauacucccaucug

SEQ ID NO: 2609625 - RNA, 17 nt, Human
ccaacauacucccaucu

SEQ ID NO: 2609626 - RNA, 23 nt, Human
ccaacagcgacauagcccauccc

SEQ ID NO: 2609627 - RNA, 22 nt, Human
ccaacagcgacauagcccaucc

SEQ ID NO: 2609628 - RNA, 19 nt, Human
ccaacacugugcccuggug

SEQ ID NO: 2609629 - RNA, 18 nt, Human
ccaacacugugcccuggu

SEQ ID NO: 2609630 - RNA, 19 nt, Human
ccaacagaagaacuguguu

SEQ ID NO: 2609631 - RNA, 22 nt, Human
ccaacagaugcuuuucugucuc

SEQ ID NO: 2609632 - RNA, 17 nt, Human
ccaacagaugcuuuucu

SEQ ID NO: 2609633 - RNA, 16 nt, Human
ccaacauacucccauc

SEQ ID NO: 2609634 - RNA, 18 nt, Human
ccaacaggaggacaauuc

SEQ ID NO: 2609635 - RNA, 17 nt, Human
ccaacaggaggacaauu

SEQ ID NO: 2609636 - RNA, 16 nt, Human
ccaacaggaggacaau

SEQ ID NO: 2609637 - RNA, 15 nt, Human
ccaacaggaggacaa

SEQ ID NO: 2609638 - RNA, 15 nt, Human
ccaacaggagcuggg

SEQ ID NO: 2609639 - RNA, 23 nt, Human
ccaacaggagcugggauccuaag

SEQ ID NO: 2609640 - RNA, 15 nt, Human
ccaaaguacacuguu

SEQ ID NO: 2609641 - RNA, 18 nt, Human
ccaaaguacacuguuuca

SEQ ID NO: 2609642 - RNA, 12 nt, Human
ccaaaggccccc

SEQ ID NO: 2609643 - RNA, 21 nt, Human
ccaaaggccauggagagcugg

SEQ ID NO: 2609644 - RNA, 14 nt, Human
ccaaaggcccccua

SEQ ID NO: 2609645 - RNA, 21 nt, Human
ccaaagggugaagcuauuuau

SEQ ID NO: 2609646 - RNA, 20 nt, Human
ccaaaggugaaggaauauau

SEQ ID NO: 2609647 - RNA, 15 nt, Human
ccaaaggugaaggaa

SEQ ID NO: 2609648 - RNA, 23 nt, Human
ccaaagggugaagcuauuuaucu

SEQ ID NO: 2609649 - RNA, 23 nt, Human
ccaaauuucauaccuaucaucuu

SEQ ID NO: 2609650 - RNA, 20 nt, Human
ccaaaguacacuguuucaaa

SEQ ID NO: 2609651 - RNA, 13 nt, Human
ccaacaaagcugu

SEQ ID NO: 2609652 - RNA, 12 nt, Human
ccaacaaagcug

SEQ ID NO: 2609653 - RNA, 19 nt, Human
ccaacaaagaacacuaacu

SEQ ID NO: 2609654 - RNA, 20 nt, Human
ccaaauuugauugauuugaa

SEQ ID NO: 2609655 - RNA, 21 nt, Human
ccaaauuuuggccaaaguguu

SEQ ID NO: 2609656 - RNA, 22 nt, Human
ccaaaggugaaggaauauaugg

SEQ ID NO: 2609657 - RNA, 15 nt, Human
ccaaauuugauugau

SEQ ID NO: 2609658 - RNA, 17 nt, Human
ccaaauuuucuuuuuau

SEQ ID NO: 2609659 - RNA, 13 nt, Human
ccaacaccaagca

SEQ ID NO: 2609660 - RNA, 16 nt, Human
ccaacaccaagcacag

SEQ ID NO: 2609661 - RNA, 17 nt, Human
ccaacaccaagcacagc

SEQ ID NO: 2609662 - RNA, 19 nt, Human
ccaacaccaagcacagcag

SEQ ID NO: 2609663 - RNA, 17 nt, Human
ccaacaccacagacaca

SEQ ID NO: 2609664 - RNA, 16 nt, Human
ccaacaccacagacac

SEQ ID NO: 2609665 - RNA, 15 nt, Human
ccaacaccacagaca

SEQ ID NO: 2609666 - RNA, 14 nt, Human
ccaacaccacagac

SEQ ID NO: 2609667 - RNA, 22 nt, Human
ccaacaccaagcacagcagccu

SEQ ID NO: 2609668 - RNA, 23 nt, Human
ccaacaccaagcacagcagccug

SEQ ID NO: 2609669 - RNA, 21 nt, Human
ccaacaaaggguuuuaaugua

SEQ ID NO: 2609670 - RNA, 14 nt, Human
ccaacaaagcuguu

SEQ ID NO: 2609671 - RNA, 22 nt, Human
ccaacaaaggguuuuaauguag

SEQ ID NO: 2609672 - RNA, 22 nt, Human
ccaacaauccuagugcuuuccu

SEQ ID NO: 2609673 - RNA, 17 nt, Human
ccaacacugugcccugg

SEQ ID NO: 2609674 - RNA, 16 nt, Human
ccaacacugugcccug

SEQ ID NO: 2609675 - RNA, 15 nt, Human
ccaacacugugcccu

SEQ ID NO: 2609676 - RNA, 14 nt, Human
ccaacacugugccc

SEQ ID NO: 2609677 - RNA, 13 nt, Human
ccaacaccagccc

SEQ ID NO: 2609678 - RNA, 23 nt, Human
ccaacaccacagacacacacacg

SEQ ID NO: 2609679 - RNA, 21 nt, Human
ccaacaccacagacacacaca

SEQ ID NO: 2609680 - RNA, 18 nt, Human
ccaacaccacagacacac

SEQ ID NO: 2609681 - RNA, 20 nt, Human
ccaacacgcaccugccucag

SEQ ID NO: 2609682 - RNA, 21 nt, Human
ccaacacgcaccugccucagg

SEQ ID NO: 2609683 - RNA, 21 nt, Human
ccaacacucaagaagcaggcu

SEQ ID NO: 2609684 - RNA, 17 nt, Human
ccaacacgcaccugccu

SEQ ID NO: 2609685 - RNA, 14 nt, Human
ccaacacucaagaa

SEQ ID NO: 2609686 - RNA, 22 nt, Human
ccaagcacugugcucagggcua

SEQ ID NO: 2609687 - RNA, 21 nt, Human
ccaagcacugugcucagggcu

SEQ ID NO: 2609688 - RNA, 14 nt, Human
ccaagcacugugcu

SEQ ID NO: 2609689 - RNA, 13 nt, Human
ccaagcacagcag

SEQ ID NO: 2609690 - RNA, 14 nt, Human
ccaagcacagcagc

SEQ ID NO: 2609691 - RNA, 15 nt, Human
ccaagcacagcagcc

SEQ ID NO: 2609692 - RNA, 17 nt, Human
ccaagcacagcagccug

SEQ ID NO: 2609693 - RNA, 23 nt, Human
ccaagcacagugguggcagggcc

SEQ ID NO: 2609694 - RNA, 22 nt, Human
ccaagcacagugguggcagggc

SEQ ID NO: 2609695 - RNA, 21 nt, Human
ccaagcacagugguggcaggg

SEQ ID NO: 2609696 - RNA, 20 nt, Human
ccaagcacagugguggcagg

SEQ ID NO: 2609697 - RNA, 19 nt, Human
ccaagcacagugguggcag

SEQ ID NO: 2609698 - RNA, 16 nt, Human
ccaagcacaguggugg

SEQ ID NO: 2609699 - RNA, 18 nt, Human
ccaagcacagcagccugg

SEQ ID NO: 2609700 - RNA, 21 nt, Human
ccaagauucacaccugacucu

SEQ ID NO: 2609701 - RNA, 17 nt, Human
ccaagcaaaaucaugga

SEQ ID NO: 2609702 - RNA, 21 nt, Human
ccaagauugcgccauugcacu

SEQ ID NO: 2609703 - RNA, 14 nt, Human
ccaagcaaguauua

SEQ ID NO: 2609704 - RNA, 23 nt, Human
ccaagcaaccuggguccaaauaa

SEQ ID NO: 2609705 - RNA, 18 nt, Human
ccaagcaaccugggucca

SEQ ID NO: 2609706 - RNA, 20 nt, Human
ccaagcaaaggugaagagac

SEQ ID NO: 2609707 - RNA, 17 nt, Human
ccaagcaaccugggucc

SEQ ID NO: 2609708 - RNA, 12 nt, Human
ccaagcacagca

SEQ ID NO: 2609709 - RNA, 20 nt, Human
ccaaguccugaagaggcggg

SEQ ID NO: 2609710 - RNA, 19 nt, Human
ccaaguccugaagaggcgg

SEQ ID NO: 2609711 - RNA, 16 nt, Human
ccaaguccugaagagg

SEQ ID NO: 2609712 - RNA, 23 nt, Human
ccaagucccuguuuucugagccc

SEQ ID NO: 2609713 - RNA, 22 nt, Human
ccaagucccuguuuucugagcc

SEQ ID NO: 2609714 - RNA, 15 nt, Human
ccaaguccugaagag

SEQ ID NO: 2609715 - RNA, 15 nt, Human
ccaagucccuguuuu

SEQ ID NO: 2609716 - RNA, 13 nt, Human
ccaagucccuguu

SEQ ID NO: 2609717 - RNA, 12 nt, Human
ccaagucccugu

SEQ ID NO: 2609718 - RNA, 22 nt, Human
ccaaguugauuuaguguuuuua

SEQ ID NO: 2609719 - RNA, 17 nt, Human
ccaaguuuacucaaccc

SEQ ID NO: 2609720 - RNA, 22 nt, Human
ccaaguuguggugcugacaaag

SEQ ID NO: 2609721 - RNA, 18 nt, Human
ccaaguuguggugcugac

SEQ ID NO: 2609722 - RNA, 22 nt, Human
ccaaguuauaaaucaaugucac

SEQ ID NO: 2609723 - RNA, 14 nt, Human
ccaagucucagugg

SEQ ID NO: 2609724 - RNA, 17 nt, Human
ccaagucuacagaguga

SEQ ID NO: 2609725 - RNA, 14 nt, Human
ccaagucuacagag

SEQ ID NO: 2609726 - RNA, 15 nt, Human
ccaaguucucaccuc

SEQ ID NO: 2609727 - RNA, 19 nt, Human
ccaaguuccgucaguccaa

SEQ ID NO: 2609728 - RNA, 21 nt, Human
ccaaguuuacucaacccucuc

SEQ ID NO: 2609729 - RNA, 14 nt, Human
ccaaguuuauauac

SEQ ID NO: 2609730 - RNA, 23 nt, Human
ccaauaaaagcaauuccaaccuu

SEQ ID NO: 2609731 - RNA, 22 nt, Human
ccaauaaaagcaauuccaaccu

SEQ ID NO: 2609732 - RNA, 13 nt, Human
ccaauaaacagga

SEQ ID NO: 2609733 - RNA, 13 nt, Human
ccaauaaaccagg

SEQ ID NO: 2609734 - RNA, 16 nt, Human
ccaauaacacacagcu

SEQ ID NO: 2609735 - RNA, 14 nt, Human
ccaauaaaccaggu

SEQ ID NO: 2609736 - RNA, 22 nt, Human
ccaauaaaugugaaauucuguc

SEQ ID NO: 2609737 - RNA, 14 nt, Human
ccaauaacacacag

SEQ ID NO: 2609738 - RNA, 18 nt, Human
ccaauagauuccccauug

SEQ ID NO: 2609739 - RNA, 22 nt, Human
ccaauaguuguugauuggcagg

SEQ ID NO: 2609740 - RNA, 18 nt, Human
ccaauagggcugagcucu

SEQ ID NO: 2609741 - RNA, 20 nt, Human
ccaagucaagugaaaaagga

SEQ ID NO: 2609742 - RNA, 14 nt, Human
ccaaguauuuauua

SEQ ID NO: 2609743 - RNA, 20 nt, Human
ccaagucagcuuugccuucc

SEQ ID NO: 2609744 - RNA, 13 nt, Human
ccaaguccagauu

SEQ ID NO: 2609745 - RNA, 23 nt, Human
ccaaguccaaauguuuacaggga

SEQ ID NO: 2609746 - RNA, 14 nt, Human
ccaaguccaaaugu

SEQ ID NO: 2609747 - RNA, 21 nt, Human
ccaagucagcuuugccuucca

SEQ ID NO: 2609748 - RNA, 20 nt, Human
ccaaguagcugggauuacag

SEQ ID NO: 2609749 - RNA, 16 nt, Human
ccaagguggcacggug

SEQ ID NO: 2609750 - RNA, 21 nt, Human
ccaagguuuuauaaggcugau

SEQ ID NO: 2609751 - RNA, 20 nt, Human
ccaagguuuuauaaggcuga

SEQ ID NO: 2609752 - RNA, 15 nt, Human
ccaagguggcacggu

SEQ ID NO: 2609753 - RNA, 19 nt, Human
ccaaggucuucagccauca

SEQ ID NO: 2609754 - RNA, 19 nt, Human
ccaagguuuuauaaggcug

SEQ ID NO: 2609755 - RNA, 23 nt, Human
ccaagguuuggggaagaacgaag

SEQ ID NO: 2609756 - RNA, 17 nt, Human
ccaaggucuucagccau

SEQ ID NO: 2609757 - RNA, 18 nt, Human
ccaaggggugggccacag

SEQ ID NO: 2609758 - RNA, 18 nt, Human
ccaaggugggaggauugc

SEQ ID NO: 2609759 - RNA, 13 nt, Human
ccaaggugggagg

SEQ ID NO: 2609760 - RNA, 18 nt, Human
ccaagggccuggccugag

SEQ ID NO: 2609761 - RNA, 16 nt, Human
ccaagggccuggccug

SEQ ID NO: 2609762 - RNA, 23 nt, Human
ccaagggcuucugcacccuccac

SEQ ID NO: 2609763 - RNA, 22 nt, Human
ccaagggcuucugcacccucca

SEQ ID NO: 2609764 - RNA, 21 nt, Human
ccaagggcuucugcacccucc

SEQ ID NO: 2609765 - RNA, 20 nt, Human
ccaagggcuucugcacccuc

SEQ ID NO: 2609766 - RNA, 19 nt, Human
ccaagggcuucugcacccu

SEQ ID NO: 2609767 - RNA, 17 nt, Human
ccaagggcuucugcacc

SEQ ID NO: 2609768 - RNA, 14 nt, Human
ccaagggcuucugc

SEQ ID NO: 2609769 - RNA, 19 nt, Human
ccaagggccuggccugagc

SEQ ID NO: 2609770 - RNA, 20 nt, Human
ccaaggguucagagacucag

SEQ ID NO: 2609771 - RNA, 23 nt, Human
ccaaggguucagagacucagggc

SEQ ID NO: 2609772 - RNA, 20 nt, Human
ccaaggggcagucuggaggg

SEQ ID NO: 2609773 - RNA, 22 nt, Human
ccaaggggaauguuugccucug

SEQ ID NO: 2609774 - RNA, 21 nt, Human
ccaagggcuuuguuuugcaca

SEQ ID NO: 2609775 - RNA, 19 nt, Human
ccaaggggaaucagaacuc

SEQ ID NO: 2609776 - RNA, 15 nt, Human
ccaaggggcagucug

SEQ ID NO: 2609777 - RNA, 16 nt, Human
ccaaggggcagucugg

SEQ ID NO: 2609778 - RNA, 22 nt, Human
ccaagggcaaaauucccaggga

SEQ ID NO: 2609779 - RNA, 20 nt, Human
ccaagggaugaaagagaagg

SEQ ID NO: 2609780 - RNA, 18 nt, Human
ccaagggcaaaauuccca

SEQ ID NO: 2609781 - RNA, 24 nt, Human
ccaagggcaaaauucccagggaag

SEQ ID NO: 2609782 - RNA, 15 nt, Human
ccaagggccuggccu

SEQ ID NO: 2609783 - RNA, 19 nt, Human
ccaagggaaccuguguccg

SEQ ID NO: 2609784 - RNA, 18 nt, Human
ccaagggaaccugugucc

SEQ ID NO: 2609785 - RNA, 17 nt, Human
ccaagggaaccuguguc

SEQ ID NO: 2609786 - RNA, 16 nt, Human
ccaagggaaccugugu

SEQ ID NO: 2609787 - RNA, 13 nt, Human
ccaagggaucugg

SEQ ID NO: 2609788 - RNA, 19 nt, Human
ccaagggaugaaagagaag

SEQ ID NO: 2609789 - RNA, 21 nt, Human
ccaagggaucugguccuaccc

SEQ ID NO: 2609790 - RNA, 24 nt, Human
ccaagggaguuaggcuauucacaa

SEQ ID NO: 2609791 - RNA, 21 nt, Human
ccaaggccaaaggaagcacau

SEQ ID NO: 2609792 - RNA, 18 nt, Human
ccaaggccaaaggaagca

SEQ ID NO: 2609793 - RNA, 22 nt, Human
ccaagggaaaggggugcuuuua

SEQ ID NO: 2609794 - RNA, 21 nt, Human
ccaagggaaaggggugcuuuu

SEQ ID NO: 2609795 - RNA, 17 nt, Human
ccaagggaaaggggugc

SEQ ID NO: 2609796 - RNA, 21 nt, Human
ccaagggaaagaaaaggaagg

SEQ ID NO: 2609797 - RNA, 19 nt, Human
ccaaggccagaguggccug

SEQ ID NO: 2609798 - RNA, 12 nt, Human
ccaagcucagaa

SEQ ID NO: 2609799 - RNA, 19 nt, Human
ccaagcucacaguuccucg

SEQ ID NO: 2609800 - RNA, 22 nt, Human
ccaagcucacaguuccucgccc

SEQ ID NO: 2609801 - RNA, 15 nt, Human
ccaaggccagagugg

SEQ ID NO: 2609802 - RNA, 18 nt, Human
ccaaggccagaguggccu

SEQ ID NO: 2609803 - RNA, 23 nt, Human
ccaagcauuuaauguagccaugg

SEQ ID NO: 2609804 - RNA, 23 nt, Human
ccaagcaucuuggggggguggcc

SEQ ID NO: 2609805 - RNA, 22 nt, Human
ccaagcaucuuggggggguggc

SEQ ID NO: 2609806 - RNA, 13 nt, Human
ccaagcaucuugg

SEQ ID NO: 2609807 - RNA, 17 nt, Human
ccaagcauuuagaugua

SEQ ID NO: 2609808 - RNA, 22 nt, Human
ccaagcauaccaacacgagcag

SEQ ID NO: 2609809 - RNA, 13 nt, Human
ccaagcagggagg

SEQ ID NO: 2609810 - RNA, 17 nt, Human
ccaaggccaaaggaagc

SEQ ID NO: 2609811 - RNA, 22 nt, Human
ccaagcucccaggcauucccca

SEQ ID NO: 2609812 - RNA, 16 nt, Human
ccaagcucccaggcau

SEQ ID NO: 2609813 - RNA, 15 nt, Human
ccaagcucccaggca

SEQ ID NO: 2609814 - RNA, 17 nt, Human
ccaagcuagaauucccu

SEQ ID NO: 2609815 - RNA, 15 nt, Human
ccaagcuagaauucc

SEQ ID NO: 2609816 - RNA, 21 nt, Human
ccaagcgaggucaacagagaa

SEQ ID NO: 2609817 - RNA, 14 nt, Human
ccaagcucccaggc

SEQ ID NO: 2609818 - RNA, 17 nt, Human
ccaagcucaaagcgugg

SEQ ID NO: 2609819 - RNA, 22 nt, Human
ccaagcuagaauucccucucuc

SEQ ID NO: 2609820 - RNA, 16 nt, Human
ccaagcuauccuggcu

SEQ ID NO: 2609821 - RNA, 18 nt, Human
ccaagcucaaagcgugga

SEQ ID NO: 2609822 - RNA, 13 nt, Human
ccaagcucacagu

SEQ ID NO: 2609823 - RNA, 17 nt, Human
ccaagcucacaguuccu

SEQ ID NO: 2609824 - RNA, 18 nt, Human
ccaagcucacaguuccuc

SEQ ID NO: 2609825 - RNA, 15 nt, Human
ccaagccuggcaagg

SEQ ID NO: 2609826 - RNA, 14 nt, Human
ccaagccugcaacu

SEQ ID NO: 2609827 - RNA, 13 nt, Human
ccaagccugacca

SEQ ID NO: 2609828 - RNA, 19 nt, Human
ccaagccuggucagcccaa

SEQ ID NO: 2609829 - RNA, 20 nt, Human
ccaagccuggucagcccaaa

SEQ ID NO: 2609830 - RNA, 19 nt, Human
ccaagccuuggcucuaccc

SEQ ID NO: 2609831 - RNA, 22 nt, Human
ccaagccuuggggauucuucca

SEQ ID NO: 2609832 - RNA, 20 nt, Human
ccaagcgaggucaacagaga

SEQ ID NO: 2609833 - RNA, 22 nt, Human
ccaagccuacuuuugccauuga

SEQ ID NO: 2609834 - RNA, 13 nt, Human
ccaagccguggcu

SEQ ID NO: 2609835 - RNA, 23 nt, Human
ccaagcccuggagccaacugcug

SEQ ID NO: 2609836 - RNA, 22 nt, Human
ccaagcccgacuugcuguuuug

SEQ ID NO: 2609837 - RNA, 18 nt, Human
ccaagcccgacuugcugu

SEQ ID NO: 2609838 - RNA, 17 nt, Human
ccaagcccgacuugcug

SEQ ID NO: 2609839 - RNA, 23 nt, Human
ccaagccaagggaaccugugucc

SEQ ID NO: 2609840 - RNA, 22 nt, Human
ccaagccaagggaaccuguguc

SEQ ID NO: 2609841 - RNA, 20 nt, Human
ccaagccaagggaaccugug

SEQ ID NO: 2609842 - RNA, 18 nt, Human
ccaagccaagggaaccug

SEQ ID NO: 2609843 - RNA, 19 nt, Human
ccaagccagaggcuggguu

SEQ ID NO: 2609844 - RNA, 17 nt, Human
ccaagccagaggcuggg

SEQ ID NO: 2609845 - RNA, 16 nt, Human
ccaagccagaggcugg

SEQ ID NO: 2609846 - RNA, 17 nt, Human
ccacccccacccaaggg

SEQ ID NO: 2609847 - RNA, 16 nt, Human
ccaccauuccuggaaa

SEQ ID NO: 2609848 - RNA, 15 nt, Human
ccaccauuccuggaa

SEQ ID NO: 2609849 - RNA, 21 nt, Human
ccaccauuccuggaaaccaca

SEQ ID NO: 2609850 - RNA, 19 nt, Human
ccaccaugggguccuacca

SEQ ID NO: 2609851 - RNA, 17 nt, Human
ccaccaugcccagucga

SEQ ID NO: 2609852 - RNA, 14 nt, Human
ccaccaugucugcc

SEQ ID NO: 2609853 - RNA, 14 nt, Human
ccaccauuccugga

SEQ ID NO: 2609854 - RNA, 17 nt, Human
ccaccaugucugcccca

SEQ ID NO: 2609855 - RNA, 21 nt, Human
ccacccaggagccccgaggcc

SEQ ID NO: 2609856 - RNA, 14 nt, Human
ccacccaagcuugg

SEQ ID NO: 2609857 - RNA, 12 nt, Human
ccacccaggagg

SEQ ID NO: 2609858 - RNA, 15 nt, Human
ccacccaagcuuggc

SEQ ID NO: 2609859 - RNA, 14 nt, Human
ccacccaggaggga

SEQ ID NO: 2609860 - RNA, 23 nt, Human
ccacccaggagccccgaggccuu

SEQ ID NO: 2609861 - RNA, 17 nt, Human
ccacccaucgcugugug

SEQ ID NO: 2609862 - RNA, 14 nt, Human
ccacccaucgcugu

SEQ ID NO: 2609863 - RNA, 12 nt, Human
ccaccccaacau

SEQ ID NO: 2609864 - RNA, 21 nt, Human
ccacccauccuaccaaugcau

SEQ ID NO: 2609865 - RNA, 23 nt, Human
ccacccaggagggagggggcuau

SEQ ID NO: 2609866 - RNA, 17 nt, Human
ccacccaggagggaggg

SEQ ID NO: 2609867 - RNA, 18 nt, Human
ccacccaggagggagggg

SEQ ID NO: 2609868 - RNA, 16 nt, Human
ccaauauucauagcag

SEQ ID NO: 2609869 - RNA, 16 nt, Human
ccacaggacauuucuc

SEQ ID NO: 2609870 - RNA, 21 nt, Human
ccacaggacauuucucuaaga

SEQ ID NO: 2609871 - RNA, 23 nt, Human
ccacaggaagccugcaguccugg

SEQ ID NO: 2609872 - RNA, 17 nt, Human
ccacaggaagugaagaa

SEQ ID NO: 2609873 - RNA, 16 nt, Human
ccacaggacacaguca

SEQ ID NO: 2609874 - RNA, 16 nt, Human
ccacaggaucagucug

SEQ ID NO: 2609875 - RNA, 20 nt, Human
ccacaggagugggaaaacac

SEQ ID NO: 2609876 - RNA, 17 nt, Human
ccacaggacacagucag

SEQ ID NO: 2609877 - RNA, 13 nt, Human
ccacaggcagcuu

SEQ ID NO: 2609878 - RNA, 12 nt, Human
ccacaggcagcu

SEQ ID NO: 2609879 - RNA, 14 nt, Human
ccacaggcagcuuu

SEQ ID NO: 2609880 - RNA, 16 nt, Human
ccacaggcccuuccuc

SEQ ID NO: 2609881 - RNA, 15 nt, Human
ccacaggcccuuccu

SEQ ID NO: 2609882 - RNA, 22 nt, Human
ccacaggcccuuccucuccacu

SEQ ID NO: 2609883 - RNA, 19 nt, Human
ccacaggcccuuccucucc

SEQ ID NO: 2609884 - RNA, 18 nt, Human
ccacaggcccuuccucuc

SEQ ID NO: 2609885 - RNA, 17 nt, Human
ccacaggcccuuccucu

SEQ ID NO: 2609886 - RNA, 22 nt, Human
ccacaggcccuuuccucaggca

SEQ ID NO: 2609887 - RNA, 21 nt, Human
ccacaggcccuuuccucaggc

SEQ ID NO: 2609888 - RNA, 16 nt, Human
ccacaggccgcccugc

SEQ ID NO: 2609889 - RNA, 12 nt, Human
ccacaggccucc

SEQ ID NO: 2609890 - RNA, 23 nt, Human
ccacaggcccuuuccucaggcaa

SEQ ID NO: 2609891 - RNA, 17 nt, Human
ccacaggccgcccugcg

SEQ ID NO: 2609892 - RNA, 16 nt, Human
ccacaggcccacagua

SEQ ID NO: 2609893 - RNA, 19 nt, Human
ccacaggcccuuuccucag

SEQ ID NO: 2609894 - RNA, 23 nt, Human
ccacaggcccuuccucuccacug

SEQ ID NO: 2609895 - RNA, 22 nt, Human
ccacaggaagccugcaguccug

SEQ ID NO: 2609896 - RNA, 19 nt, Human
ccacaggaagccugcaguc

SEQ ID NO: 2609897 - RNA, 22 nt, Human
ccacagcuuuuuaccaaguuuc

SEQ ID NO: 2609898 - RNA, 20 nt, Human
ccacaggaaccacaagacug

SEQ ID NO: 2609899 - RNA, 14 nt, Human
ccacacucagcaca

SEQ ID NO: 2609900 - RNA, 14 nt, Human
ccacagcugcucaa

SEQ ID NO: 2609901 - RNA, 12 nt, Human
ccacacuccagc

SEQ ID NO: 2609902 - RNA, 14 nt, Human
ccacagcugcugga

SEQ ID NO: 2609903 - RNA, 13 nt, Human
ccacagcugcugg

SEQ ID NO: 2609904 - RNA, 12 nt, Human
ccacagcugcug

SEQ ID NO: 2609905 - RNA, 16 nt, Human
ccacagcugcuggaga

SEQ ID NO: 2609906 - RNA, 17 nt, Human
ccacagcuuccccucuc

SEQ ID NO: 2609907 - RNA, 22 nt, Human
ccacacguaaugaaacuuggau

SEQ ID NO: 2609908 - RNA, 19 nt, Human
ccacaccuggcacugcugu

SEQ ID NO: 2609909 - RNA, 18 nt, Human
ccacaccuggcacugcug

SEQ ID NO: 2609910 - RNA, 16 nt, Human
ccacacccuguacugu

SEQ ID NO: 2609911 - RNA, 21 nt, Human
ccacacccucccccgccacuc

SEQ ID NO: 2609912 - RNA, 15 nt, Human
ccacacccucuccca

SEQ ID NO: 2609913 - RNA, 19 nt, Human
ccacacccuguacuguucu

SEQ ID NO: 2609914 - RNA, 14 nt, Human
ccacaccuggcacu

SEQ ID NO: 2609915 - RNA, 17 nt, Human
ccacaccuggcacugcu

SEQ ID NO: 2609916 - RNA, 18 nt, Human
ccacacccucucccagga

SEQ ID NO: 2609917 - RNA, 17 nt, Human
ccacacucacuccugag

SEQ ID NO: 2609918 - RNA, 20 nt, Human
ccacacuauuaccaugagaa

SEQ ID NO: 2609919 - RNA, 18 nt, Human
ccacacuauuaccaugag

SEQ ID NO: 2609920 - RNA, 17 nt, Human
ccacacuauuaccauga

SEQ ID NO: 2609921 - RNA, 24 nt, Human
ccacacucacuccugagaccccug

SEQ ID NO: 2609922 - RNA, 19 nt, Human
ccacacgcuccucccucug

SEQ ID NO: 2609923 - RNA, 16 nt, Human
ccacacuaaccugggu

SEQ ID NO: 2609924 - RNA, 22 nt, Human
ccacacuaaccuggguucccuu

SEQ ID NO: 2609925 - RNA, 23 nt, Human
ccacacuaaccuggguucccuuu

SEQ ID NO: 2609926 - RNA, 16 nt, Human
ccacacccagcucagc

SEQ ID NO: 2609927 - RNA, 19 nt, Human
ccacacccagccucagucc

SEQ ID NO: 2609928 - RNA, 17 nt, Human
ccacacccagccucagu

SEQ ID NO: 2609929 - RNA, 16 nt, Human
ccacacccagccucag

SEQ ID NO: 2609930 - RNA, 15 nt, Human
ccacacccagccuca

SEQ ID NO: 2609931 - RNA, 14 nt, Human
ccacacccagccuc

SEQ ID NO: 2609932 - RNA, 13 nt, Human
ccacacccagccu

SEQ ID NO: 2609933 - RNA, 11 nt, Human
ccacacccucc

SEQ ID NO: 2609934 - RNA, 20 nt, Human
ccacacccccaccccuugcu

SEQ ID NO: 2609935 - RNA, 15 nt, Human
ccacacccccacccc

SEQ ID NO: 2609936 - RNA, 13 nt, Human
ccacacccccacc

SEQ ID NO: 2609937 - RNA, 16 nt, Human
ccacacccucacugcu

SEQ ID NO: 2609938 - RNA, 22 nt, Human
ccacacccagcccacuucugcc

SEQ ID NO: 2609939 - RNA, 21 nt, Human
ccacacccagcccacuucugc

SEQ ID NO: 2609940 - RNA, 14 nt, Human
ccacaccaagcugu

SEQ ID NO: 2609941 - RNA, 13 nt, Human
ccacaccaagcug

SEQ ID NO: 2609942 - RNA, 12 nt, Human
ccacaccaagcu

SEQ ID NO: 2609943 - RNA, 14 nt, Human
ccacaccaagcagc

SEQ ID NO: 2609944 - RNA, 20 nt, Human
ccacaccaagcugugccacc

SEQ ID NO: 2609945 - RNA, 18 nt, Human
ccacaccaagcugugcca

SEQ ID NO: 2609946 - RNA, 23 nt, Human
ccacaccaagcugugccacccug

SEQ ID NO: 2609947 - RNA, 13 nt, Human
ccacaccacaucu

SEQ ID NO: 2609948 - RNA, 14 nt, Human
ccacaccaggccgu

SEQ ID NO: 2609949 - RNA, 15 nt, Human
ccacacccagcccac

SEQ ID NO: 2609950 - RNA, 20 nt, Human
ccacacccagcccacuucug

SEQ ID NO: 2609951 - RNA, 20 nt, Human
ccacacagacuugggcaggg

SEQ ID NO: 2609952 - RNA, 18 nt, Human
ccaauauuaaaucugcug

SEQ ID NO: 2609953 - RNA, 12 nt, Human
ccaauauuauaa

SEQ ID NO: 2609954 - RNA, 22 nt, Human
ccaauauguauuguaaacaugu

SEQ ID NO: 2609955 - RNA, 16 nt, Human
ccaauauguauuguaa

SEQ ID NO: 2609956 - RNA, 15 nt, Human
ccaauauuaaaucug

SEQ ID NO: 2609957 - RNA, 22 nt, Human
ccaauagggcugagcucucugu

SEQ ID NO: 2609958 - RNA, 15 nt, Human
ccaauauguauugua

SEQ ID NO: 2609959 - RNA, 15 nt, Human
ccacaccaaaccucu

SEQ ID NO: 2609960 - RNA, 13 nt, Human
ccaauauuauaau

SEQ ID NO: 2609961 - RNA, 13 nt, Human
ccacacagagugg

SEQ ID NO: 2609962 - RNA, 17 nt, Human
ccacauggcuuccuccu

SEQ ID NO: 2609963 - RNA, 21 nt, Human
ccacauggcuuccuccugcgc

SEQ ID NO: 2609964 - RNA, 16 nt, Human
ccacaugggaggcuca

SEQ ID NO: 2609965 - RNA, 14 nt, Human
ccacaugucaccgu

SEQ ID NO: 2609966 - RNA, 21 nt, Human
ccacauggggcugggcagcua

SEQ ID NO: 2609967 - RNA, 20 nt, Human
ccacauggggcugggcagcu

SEQ ID NO: 2609968 - RNA, 19 nt, Human
ccacauggggcugggcagc

SEQ ID NO: 2609969 - RNA, 19 nt, Human
ccacaugugacacauaugc

SEQ ID NO: 2609970 - RNA, 15 nt, Human
ccacaugugacacau

SEQ ID NO: 2609971 - RNA, 16 nt, Human
ccacauuccugaugcu

SEQ ID NO: 2609972 - RNA, 16 nt, Human
ccacaugugcacaugc

SEQ ID NO: 2609973 - RNA, 17 nt, Human
ccacaucuugcucugcu

SEQ ID NO: 2609974 - RNA, 18 nt, Human
ccacaucuugcucugcug

SEQ ID NO: 2609975 - RNA, 19 nt, Human
ccacaucuugcucugcuga

SEQ ID NO: 2609976 - RNA, 17 nt, Human
ccacaugcggagaacaa

SEQ ID NO: 2609977 - RNA, 15 nt, Human
ccaccaacccucaga

SEQ ID NO: 2609978 - RNA, 15 nt, Human
ccaccaacaucccau

SEQ ID NO: 2609979 - RNA, 12 nt, Human
ccaccaacccau

SEQ ID NO: 2609980 - RNA, 14 nt, Human
ccaccaacucuugc

SEQ ID NO: 2609981 - RNA, 21 nt, Human
ccaccaacccaucagaaggag

SEQ ID NO: 2609982 - RNA, 21 nt, Human
ccaccaagagggacgccuggg

SEQ ID NO: 2609983 - RNA, 17 nt, Human
ccaccaagagggacgcc

SEQ ID NO: 2609984 - RNA, 17 nt, Human
ccaccaagacuuguuuu

SEQ ID NO: 2609985 - RNA, 15 nt, Human
ccaccaacucuugca

SEQ ID NO: 2609986 - RNA, 22 nt, Human
ccaccaugcccagcucagaggg

SEQ ID NO: 2609987 - RNA, 16 nt, Human
ccaccauggccagcca

SEQ ID NO: 2609988 - RNA, 17 nt, Human
ccaccauggccagccaa

SEQ ID NO: 2609989 - RNA, 21 nt, Human
ccaccauggccagccaacuuu

SEQ ID NO: 2609990 - RNA, 22 nt, Human
ccacauuuggaauacuuuuugu

SEQ ID NO: 2609991 - RNA, 16 nt, Human
ccacauuuuauauuua

SEQ ID NO: 2609992 - RNA, 19 nt, Human
ccacauuuggaauacuuuu

SEQ ID NO: 2609993 - RNA, 21 nt, Human
ccaccaacauacucccaucug

SEQ ID NO: 2609994 - RNA, 16 nt, Human
ccacauuguuuuaaaa

SEQ ID NO: 2609995 - RNA, 14 nt, Human
ccacauuguuuuaa

SEQ ID NO: 2609996 - RNA, 13 nt, Human
ccacauuuggaau

SEQ ID NO: 2609997 - RNA, 22 nt, Human
ccacauugggcagcgcccuucc

SEQ ID NO: 2609998 - RNA, 20 nt, Human
ccacaucccgggacgcagca

SEQ ID NO: 2609999 - RNA, 18 nt, Human
ccacaucccaggcuucac

SEQ ID NO: 2610000 - RNA, 15 nt, Human
ccacaucccaggcuu

SEQ ID NO: 2610001 - RNA, 13 nt, Human
ccacaucccaggc

SEQ ID NO: 2610002 - RNA, 17 nt, Human
ccacaucccuuugaaac

SEQ ID NO: 2610003 - RNA, 13 nt, Human
ccacauccuccac

SEQ ID NO: 2610004 - RNA, 15 nt, Human
ccacaucuaagccug

SEQ ID NO: 2610005 - RNA, 22 nt, Human
ccacaucuaagccugaaggggc

SEQ ID NO: 2610006 - RNA, 23 nt, Human
ccacaucuaagccugaaggggcg

SEQ ID NO: 2610007 - RNA, 19 nt, Human
ccacauccuccguccagcc

SEQ ID NO: 2610008 - RNA, 20 nt, Human
ccacauccuccguccagccg

SEQ ID NO: 2610009 - RNA, 20 nt, Human
ccacaguuuccucaucuguc

SEQ ID NO: 2610010 - RNA, 22 nt, Human
ccacaguuuccucaucugucca

SEQ ID NO: 2610011 - RNA, 22 nt, Human
ccacauccacacacgcaggaac

SEQ ID NO: 2610012 - RNA, 12 nt, Human
ccacaucccagg

SEQ ID NO: 2610013 - RNA, 22 nt, Human
ccacaguucaguggcagggcuc

SEQ ID NO: 2610014 - RNA, 15 nt, Human
ccacaguucaguggc

SEQ ID NO: 2610015 - RNA, 23 nt, Human
ccacaguguuggcgagaggaggg

SEQ ID NO: 2610016 - RNA, 22 nt, Human
ccacaguguuggcgagaggagg

SEQ ID NO: 2610017 - RNA, 21 nt, Human
ccacaguguuggcgagaggag

SEQ ID NO: 2610018 - RNA, 12 nt, Human
ccacagugucug

SEQ ID NO: 2610019 - RNA, 21 nt, Human
ccacagugacucgggcuccug

SEQ ID NO: 2610020 - RNA, 16 nt, Human
ccacagucaaagaagg

SEQ ID NO: 2610021 - RNA, 23 nt, Human
ccacagugacucgggcuccugug

SEQ ID NO: 2610022 - RNA, 22 nt, Human
ccacagugacucgggcuccugu

SEQ ID NO: 2610023 - RNA, 12 nt, Human
ccacagugcugu

SEQ ID NO: 2610024 - RNA, 14 nt, Human
ccacagugcugucu

SEQ ID NO: 2610025 - RNA, 16 nt, Human
ccacagggaacccugc

SEQ ID NO: 2610026 - RNA, 18 nt, Human
ccacaggccucccuguuu

SEQ ID NO: 2610027 - RNA, 16 nt, Human
ccacaggccucccugu

SEQ ID NO: 2610028 - RNA, 15 nt, Human
ccacaggccucccug

SEQ ID NO: 2610029 - RNA, 13 nt, Human
ccacaggccuccc

SEQ ID NO: 2610030 - RNA, 12 nt, Human
ccacaggccuga

SEQ ID NO: 2610031 - RNA, 11 nt, Human
ccacaggccug

SEQ ID NO: 2610032 - RNA, 19 nt, Human
ccacaggccugagauuuca

SEQ ID NO: 2610033 - RNA, 14 nt, Human
ccacaggccugaga

SEQ ID NO: 2610034 - RNA, 22 nt, Human
ccacaggccugagauuucaucu

SEQ ID NO: 2610035 - RNA, 16 nt, Human
ccacaguaaguuccua

SEQ ID NO: 2610036 - RNA, 15 nt, Human
ccacaguagucuuga

SEQ ID NO: 2610037 - RNA, 14 nt, Human
ccacagucaaagaa

SEQ ID NO: 2610038 - RNA, 17 nt, Human
ccacaggugggaggagu

SEQ ID NO: 2610039 - RNA, 17 nt, Human
ccacaguagucuugaug

SEQ ID NO: 2610040 - RNA, 23 nt, Human
ccacagguguuuauacagcucag

SEQ ID NO: 2610041 - RNA, 22 nt, Human
ccacagguucaugccaccaugg

SEQ ID NO: 2610042 - RNA, 11 nt, Human
ccacagggucu

SEQ ID NO: 2610043 - RNA, 18 nt, Human
ccacaggguucaaaaugu

SEQ ID NO: 2610044 - RNA, 22 nt, Human
ccacaggguucaaaaugucugu

SEQ ID NO: 2610045 - RNA, 20 nt, Human
ccacagggcuaagagcuagc

SEQ ID NO: 2610046 - RNA, 14 nt, Human
ccacagggcuaaga

SEQ ID NO: 2610047 - RNA, 17 nt, Human
ccacagggcuaagagcu

SEQ ID NO: 2610048 - RNA, 18 nt, Human
ccacuaagcagaggaggg

SEQ ID NO: 2610049 - RNA, 16 nt, Human
ccacguccugucagug

SEQ ID NO: 2610050 - RNA, 19 nt, Human
ccacuaagcagaggagggg

SEQ ID NO: 2610051 - RNA, 21 nt, Human
ccacuaagcagaggaggggcc

SEQ ID NO: 2610052 - RNA, 14 nt, Human
ccacuacaccuggc

SEQ ID NO: 2610053 - RNA, 13 nt, Human
ccacuacaccugg

SEQ ID NO: 2610054 - RNA, 22 nt, Human
ccacuaagcagaggaggggccg

SEQ ID NO: 2610055 - RNA, 16 nt, Human
ccacuacaccuggcug

SEQ ID NO: 2610056 - RNA, 15 nt, Human
ccacuacaccuggcu

SEQ ID NO: 2610057 - RNA, 14 nt, Human
ccacuacacuccag

SEQ ID NO: 2610058 - RNA, 18 nt, Human
ccacuacacuccagccug

SEQ ID NO: 2610059 - RNA, 19 nt, Human
ccacuacacuccagccuga

SEQ ID NO: 2610060 - RNA, 15 nt, Human
ccacguccugucagu

SEQ ID NO: 2610061 - RNA, 22 nt, Human
ccacgucccccuggggcuucuc

SEQ ID NO: 2610062 - RNA, 15 nt, Human
ccacgucccccuggg

SEQ ID NO: 2610063 - RNA, 17 nt, Human
ccacgguggucacugga

SEQ ID NO: 2610064 - RNA, 21 nt, Human
ccacggucuguucuugaagca

SEQ ID NO: 2610065 - RNA, 18 nt, Human
ccacggcucuaggugggg

SEQ ID NO: 2610066 - RNA, 15 nt, Human
ccaccccacacacgc

SEQ ID NO: 2610067 - RNA, 12 nt, Human
ccaccccacacu

SEQ ID NO: 2610068 - RNA, 14 nt, Human
ccaccccacccccu

SEQ ID NO: 2610069 - RNA, 13 nt, Human
ccaccccacacuu

SEQ ID NO: 2610070 - RNA, 12 nt, Human
ccaccccagccu

SEQ ID NO: 2610071 - RNA, 14 nt, Human
ccaccccagccuaa

SEQ ID NO: 2610072 - RNA, 13 nt, Human
ccaccccagcugc

SEQ ID NO: 2610073 - RNA, 17 nt, Human
ccaccccacccccuuca

SEQ ID NO: 2610074 - RNA, 19 nt, Human
ccaccccagaaauggugaa

SEQ ID NO: 2610075 - RNA, 18 nt, Human
ccaccccagcugcucccc

SEQ ID NO: 2610076 - RNA, 17 nt, Human
ccaccccagugcaccca

SEQ ID NO: 2610077 - RNA, 19 nt, Human
ccaccccagugcacccacu

SEQ ID NO: 2610078 - RNA, 18 nt, Human
ccacggccaggccagagg

SEQ ID NO: 2610079 - RNA, 16 nt, Human
ccacggccaggccaga

SEQ ID NO: 2610080 - RNA, 19 nt, Human
ccacgcuggagugcaguga

SEQ ID NO: 2610081 - RNA, 18 nt, Human
ccacgcuggagugcagug

SEQ ID NO: 2610082 - RNA, 14 nt, Human
ccacgguguucugu

SEQ ID NO: 2610083 - RNA, 18 nt, Human
ccacgggaaguuuagaga

SEQ ID NO: 2610084 - RNA, 17 nt, Human
ccacggucuguucuuga

SEQ ID NO: 2610085 - RNA, 20 nt, Human
ccacggccgcuccaggggug

SEQ ID NO: 2610086 - RNA, 23 nt, Human
ccacggccaggccagagggagug

SEQ ID NO: 2610087 - RNA, 18 nt, Human
ccacggccgcuccagggg

SEQ ID NO: 2610088 - RNA, 16 nt, Human
ccacggccgcuccagg

SEQ ID NO: 2610089 - RNA, 15 nt, Human
ccacggccgcuccag

SEQ ID NO: 2610090 - RNA, 22 nt, Human
ccaccugucaaacaaagccaga

SEQ ID NO: 2610091 - RNA, 13 nt, Human
ccacgcuggagug

SEQ ID NO: 2610092 - RNA, 16 nt, Human
ccacgcuggagugcag

SEQ ID NO: 2610093 - RNA, 20 nt, Human
ccaccugucucagccuccca

SEQ ID NO: 2610094 - RNA, 23 nt, Human
ccaccugucucagccucccagag

SEQ ID NO: 2610095 - RNA, 12 nt, Human
ccaccugucuca

SEQ ID NO: 2610096 - RNA, 15 nt, Human
ccaccugucucagcc

SEQ ID NO: 2610097 - RNA, 16 nt, Human
ccaccugucucagccu

SEQ ID NO: 2610098 - RNA, 18 nt, Human
ccaccugucucagccucc

SEQ ID NO: 2610099 - RNA, 15 nt, Human
ccacccccacccaag

SEQ ID NO: 2610100 - RNA, 12 nt, Human
ccacccccacac

SEQ ID NO: 2610101 - RNA, 18 nt, Human
ccaccccauuuucugugg

SEQ ID NO: 2610102 - RNA, 18 nt, Human
ccaccccauccaguucau

SEQ ID NO: 2610103 - RNA, 22 nt, Human
ccaccccagugcacccacucug

SEQ ID NO: 2610104 - RNA, 12 nt, Human
ccacccccacca

SEQ ID NO: 2610105 - RNA, 14 nt, Human
ccacccccacaccu

SEQ ID NO: 2610106 - RNA, 13 nt, Human
ccacccccacacc

SEQ ID NO: 2610107 - RNA, 23 nt, Human
ccaccccaugucaccggauccug

SEQ ID NO: 2610108 - RNA, 21 nt, Human
ccacccccaccaagggcgcaa

SEQ ID NO: 2610109 - RNA, 15 nt, Human
ccacccccaccaagg

SEQ ID NO: 2610110 - RNA, 15 nt, Human
ccaccugguggccuc

SEQ ID NO: 2610111 - RNA, 17 nt, Human
ccaccugguggccucug

SEQ ID NO: 2610112 - RNA, 11 nt, Human
ccaccugucuc

SEQ ID NO: 2610113 - RNA, 19 nt, Human
ccaccugucaaacaaagcc

SEQ ID NO: 2610114 - RNA, 20 nt, Human
ccaccugucaaacaaagcca

SEQ ID NO: 2610115 - RNA, 21 nt, Human
ccaccugguuccggaauccug

SEQ ID NO: 2610116 - RNA, 15 nt, Human
ccacuacauucuguu

SEQ ID NO: 2610117 - RNA, 14 nt, Human
ccacuacauucugu

SEQ ID NO: 2610118 - RNA, 11 nt, Human
ccacuacauuc

SEQ ID NO: 2610119 - RNA, 20 nt, Human
ccacuacacuccagccugag

SEQ ID NO: 2610120 - RNA, 21 nt, Human
ccacuacacuccagccugagc

SEQ ID NO: 2610121 - RNA, 22 nt, Human
ccacuacacuccagccugagca

SEQ ID NO: 2610122 - RNA, 22 nt, Human
ccacuacaugcagcccaugccc

SEQ ID NO: 2610123 - RNA, 16 nt, Human
ccacuacauucuguua

SEQ ID NO: 2610124 - RNA, 17 nt, Human
ccacuacauucuguuaa

SEQ ID NO: 2610125 - RNA, 15 nt, Human
ccacuagacccacug

SEQ ID NO: 2610126 - RNA, 17 nt, Human
ccacuagacccacugga

SEQ ID NO: 2610127 - RNA, 21 nt, Human
ccacuagaacucuccaucuua

SEQ ID NO: 2610128 - RNA, 17 nt, Human
ccacuacaccuggcuga

SEQ ID NO: 2610129 - RNA, 16 nt, Human
ccacuaggacucugag

SEQ ID NO: 2610130 - RNA, 18 nt, Human
ccacuaggacucugaggc

SEQ ID NO: 2610131 - RNA, 22 nt, Human
ccacuccagaccccuggcuuuu

SEQ ID NO: 2610132 - RNA, 21 nt, Human
ccacuccagaccccuggcuuu

SEQ ID NO: 2610133 - RNA, 20 nt, Human
ccacuccagaccccuggcuu

SEQ ID NO: 2610134 - RNA, 18 nt, Human
ccacucaggcauuugacu

SEQ ID NO: 2610135 - RNA, 14 nt, Human
ccacucagcuuccu

SEQ ID NO: 2610136 - RNA, 20 nt, Human
ccacucaggaggcugaggca

SEQ ID NO: 2610137 - RNA, 13 nt, Human
ccacucaggccaa

SEQ ID NO: 2610138 - RNA, 20 nt, Human
ccacucaggccaacaagcca

SEQ ID NO: 2610139 - RNA, 11 nt, Human
ccacucagcuc

SEQ ID NO: 2610140 - RNA, 15 nt, Human
ccacucagcuccgug

SEQ ID NO: 2610141 - RNA, 13 nt, Human
ccacucagcuucc

SEQ ID NO: 2610142 - RNA, 13 nt, Human
ccacucaggaggc

SEQ ID NO: 2610143 - RNA, 19 nt, Human
ccacuaggacucugaggcu

SEQ ID NO: 2610144 - RNA, 20 nt, Human
ccacuaggacucugaggcuc

SEQ ID NO: 2610145 - RNA, 17 nt, Human
ccacuagugcaaaucau

SEQ ID NO: 2610146 - RNA, 16 nt, Human
ccacuagugcaaauca

SEQ ID NO: 2610147 - RNA, 14 nt, Human
ccacuagugcaaau

SEQ ID NO: 2610148 - RNA, 14 nt, Human
ccacuaucugggug

SEQ ID NO: 2610149 - RNA, 21 nt, Human
ccacuauggucaucuuuuucu

SEQ ID NO: 2610150 - RNA, 21 nt, Human
ccagacaccuugacagggcac

SEQ ID NO: 2610151 - RNA, 21 nt, Human
ccagaauuucccaaagcagug

SEQ ID NO: 2610152 - RNA, 18 nt, Human
ccagaauuucccaaagca

SEQ ID NO: 2610153 - RNA, 19 nt, Human
ccagaauuucccaaagcag

SEQ ID NO: 2610154 - RNA, 12 nt, Human
ccagaauuuccc

SEQ ID NO: 2610155 - RNA, 13 nt, Human
ccagaauuucaaa

SEQ ID NO: 2610156 - RNA, 21 nt, Human
ccagaaugcuguacaucuauu

SEQ ID NO: 2610157 - RNA, 16 nt, Human
ccagaaugcuuuagga

SEQ ID NO: 2610158 - RNA, 23 nt, Human
ccagaauggucuuucuaaugugu

SEQ ID NO: 2610159 - RNA, 17 nt, Human
ccagaccccuggcuuuu

SEQ ID NO: 2610160 - RNA, 14 nt, Human
ccagagcagaugca

SEQ ID NO: 2610161 - RNA, 22 nt, Human
ccagagcacuggguugcagggg

SEQ ID NO: 2610162 - RNA, 16 nt, Human
ccagaccccuggcuuu

SEQ ID NO: 2610163 - RNA, 15 nt, Human
ccagaccccuggcuu

SEQ ID NO: 2610164 - RNA, 23 nt, Human
ccagagcaggaggccccuggccc

SEQ ID NO: 2610165 - RNA, 21 nt, Human
ccagagcaggaggccccuggc

SEQ ID NO: 2610166 - RNA, 19 nt, Human
ccagagcaggaggccccug

SEQ ID NO: 2610167 - RNA, 15 nt, Human
ccagagcaggaggcc

SEQ ID NO: 2610168 - RNA, 14 nt, Human
ccagagcaggaggc

SEQ ID NO: 2610169 - RNA, 12 nt, Human
ccagagcaggag

SEQ ID NO: 2610170 - RNA, 15 nt, Human
ccagagcaggaagca

SEQ ID NO: 2610171 - RNA, 14 nt, Human
ccagagcaggaagc

SEQ ID NO: 2610172 - RNA, 23 nt, Human
ccagagcagaugcagagagccau

SEQ ID NO: 2610173 - RNA, 22 nt, Human
ccagagcagaugcagagagcca

SEQ ID NO: 2610174 - RNA, 20 nt, Human
ccagagcagaugcagagagc

SEQ ID NO: 2610175 - RNA, 18 nt, Human
ccagagcagaugcagaga

SEQ ID NO: 2610176 - RNA, 17 nt, Human
ccagagcagaugcagag

SEQ ID NO: 2610177 - RNA, 16 nt, Human
ccagagcagaugcaga

SEQ ID NO: 2610178 - RNA, 15 nt, Human
ccagagcagaugcag

SEQ ID NO: 2610179 - RNA, 24 nt, Human
ccagaccccucuggccaggaugga

SEQ ID NO: 2610180 - RNA, 14 nt, Human
ccagaccccuggcu

SEQ ID NO: 2610181 - RNA, 20 nt, Human
ccagaccccucuggccagga

SEQ ID NO: 2610182 - RNA, 21 nt, Human
ccagaccccucuggccaggau

SEQ ID NO: 2610183 - RNA, 22 nt, Human
ccagaccccucuggccaggaug

SEQ ID NO: 2610184 - RNA, 23 nt, Human
ccagaccccucuggccaggaugg

SEQ ID NO: 2610185 - RNA, 18 nt, Human
ccagacagacaucucugc

SEQ ID NO: 2610186 - RNA, 19 nt, Human
ccagacagacaucucugca

SEQ ID NO: 2610187 - RNA, 21 nt, Human
ccagacagcaacggggaggcc

SEQ ID NO: 2610188 - RNA, 13 nt, Human
ccagacagccugu

SEQ ID NO: 2610189 - RNA, 12 nt, Human
ccagacagccug

SEQ ID NO: 2610190 - RNA, 14 nt, Human
ccagacagccugua

SEQ ID NO: 2610191 - RNA, 18 nt, Human
ccagaccccucuggccag

SEQ ID NO: 2610192 - RNA, 19 nt, Human
ccagaccccucuggccagg

SEQ ID NO: 2610193 - RNA, 13 nt, Human
ccagacacucugc

SEQ ID NO: 2610194 - RNA, 18 nt, Human
ccagacacagaagaggcu

SEQ ID NO: 2610195 - RNA, 14 nt, Human
ccagacacaggccc

SEQ ID NO: 2610196 - RNA, 15 nt, Human
ccagacacucugcuc

SEQ ID NO: 2610197 - RNA, 23 nt, Human
ccagacacugaccauccacucua

SEQ ID NO: 2610198 - RNA, 22 nt, Human
ccagacagacaucucugcaccc

SEQ ID NO: 2610199 - RNA, 17 nt, Human
ccagacagacaacacug

SEQ ID NO: 2610200 - RNA, 23 nt, Human
ccagaaguuugagaucagccugg

SEQ ID NO: 2610201 - RNA, 12 nt, Human
ccagaaguguga

SEQ ID NO: 2610202 - RNA, 22 nt, Human
ccagaauaaacuggcagcucag

SEQ ID NO: 2610203 - RNA, 16 nt, Human
ccagaauaaacccagc

SEQ ID NO: 2610204 - RNA, 20 nt, Human
ccagaaguuugucaagucaa

SEQ ID NO: 2610205 - RNA, 14 nt, Human
ccagaagcccagaa

SEQ ID NO: 2610206 - RNA, 20 nt, Human
ccagaagucaagcccagcca

SEQ ID NO: 2610207 - RNA, 22 nt, Human
ccagaaguuugagaucagccug

SEQ ID NO: 2610208 - RNA, 12 nt, Human
ccagaagcccag

SEQ ID NO: 2610209 - RNA, 13 nt, Human
ccagaagcccaga

SEQ ID NO: 2610210 - RNA, 16 nt, Human
ccagaagccaaagacu

SEQ ID NO: 2610211 - RNA, 22 nt, Human
ccagaacacacuccaucagcuu

SEQ ID NO: 2610212 - RNA, 18 nt, Human
ccagaagaauauucagga

SEQ ID NO: 2610213 - RNA, 17 nt, Human
ccagaagaauauucagg

SEQ ID NO: 2610214 - RNA, 16 nt, Human
ccagaagaauauucag

SEQ ID NO: 2610215 - RNA, 19 nt, Human
ccagaacacacuccaucag

SEQ ID NO: 2610216 - RNA, 20 nt, Human
ccagaagaauauucaggacu

SEQ ID NO: 2610217 - RNA, 19 nt, Human
ccagaagaauauucaggac

SEQ ID NO: 2610218 - RNA, 22 nt, Human
ccagaagauagcuucaccccaa

SEQ ID NO: 2610219 - RNA, 22 nt, Human
ccagaagauccccucaggacug

SEQ ID NO: 2610220 - RNA, 18 nt, Human
ccagaagauccccucagg

SEQ ID NO: 2610221 - RNA, 24 nt, Human
ccagaagauccccucaggacugca

SEQ ID NO: 2610222 - RNA, 13 nt, Human
ccacugcagaaga

SEQ ID NO: 2610223 - RNA, 18 nt, Human
ccacugcagaagacagua

SEQ ID NO: 2610224 - RNA, 12 nt, Human
ccacucccacuu

SEQ ID NO: 2610225 - RNA, 11 nt, Human
ccacucccacu

SEQ ID NO: 2610226 - RNA, 20 nt, Human
ccacuccagcuccuucgcuu

SEQ ID NO: 2610227 - RNA, 23 nt, Human
ccacucccacuucccugacacug

SEQ ID NO: 2610228 - RNA, 22 nt, Human
ccacucccacuucccugacacu

SEQ ID NO: 2610229 - RNA, 21 nt, Human
ccacucccacuucccugacac

SEQ ID NO: 2610230 - RNA, 17 nt, Human
ccacucccacuucccug

SEQ ID NO: 2610231 - RNA, 15 nt, Human
ccacucccaggcagc

SEQ ID NO: 2610232 - RNA, 13 nt, Human
ccacucccaggca

SEQ ID NO: 2610233 - RNA, 19 nt, Human
ccacuuagaaauugcauuu

SEQ ID NO: 2610234 - RNA, 13 nt, Human
ccacuuaccuuca

SEQ ID NO: 2610235 - RNA, 14 nt, Human
ccacuuaccuucaa

SEQ ID NO: 2610236 - RNA, 19 nt, Human
ccacuuaccuucaauaaag

SEQ ID NO: 2610237 - RNA, 12 nt, Human
ccacuuaccuag

SEQ ID NO: 2610238 - RNA, 13 nt, Human
ccacuuaaaaugu

SEQ ID NO: 2610239 - RNA, 21 nt, Human
ccacuuaaaaaauguccauga

SEQ ID NO: 2610240 - RNA, 14 nt, Human
ccacugcaggcccc

SEQ ID NO: 2610241 - RNA, 16 nt, Human
ccacuuaaaaaauguc

SEQ ID NO: 2610242 - RNA, 17 nt, Human
ccacuuaaaaaaugucc

SEQ ID NO: 2610243 - RNA, 19 nt, Human
ccacuuaaaaaauguccau

SEQ ID NO: 2610244 - RNA, 23 nt, Human
ccacugcacuccagccuggguga

SEQ ID NO: 2610245 - RNA, 14 nt, Human
ccacucccagugcu

SEQ ID NO: 2610246 - RNA, 14 nt, Human
ccacucccaggcag

SEQ ID NO: 2610247 - RNA, 13 nt, Human
ccacugcaggccc

SEQ ID NO: 2610248 - RNA, 17 nt, Human
ccacuuaucccucucca

SEQ ID NO: 2610249 - RNA, 22 nt, Human
ccacuuauuccccauucuuccu

SEQ ID NO: 2610250 - RNA, 17 nt, Human
ccacuucaagugaccac

SEQ ID NO: 2610251 - RNA, 21 nt, Human
ccacuuaccuucaauaaagua

SEQ ID NO: 2610252 - RNA, 22 nt, Human
ccacuuaccuucaauaaaguau

SEQ ID NO: 2610253 - RNA, 21 nt, Human
ccacuuagaaauugcauuucc

SEQ ID NO: 2610254 - RNA, 13 nt, Human
ccacuucagcuga

SEQ ID NO: 2610255 - RNA, 14 nt, Human
ccacuucagcugac

SEQ ID NO: 2610256 - RNA, 17 nt, Human
ccagaaauuagaaaccu

SEQ ID NO: 2610257 - RNA, 22 nt, Human
ccagaaaugucuaaaugcugaa

SEQ ID NO: 2610258 - RNA, 13 nt, Human
ccagaaauuagaa

SEQ ID NO: 2610259 - RNA, 22 nt, Human
ccagaacaagguucccucugag

SEQ ID NO: 2610260 - RNA, 17 nt, Human
ccagaacacacuccauc

SEQ ID NO: 2610261 - RNA, 22 nt, Human
ccagaaauccaucuaaauaccu

SEQ ID NO: 2610262 - RNA, 16 nt, Human
ccagaaaucauuuuac

SEQ ID NO: 2610263 - RNA, 21 nt, Human
ccagaaauaaaguuggugaca

SEQ ID NO: 2610264 - RNA, 23 nt, Human
ccagaaauaaaguuggugacaga

SEQ ID NO: 2610265 - RNA, 14 nt, Human
ccagaaaggagacu

SEQ ID NO: 2610266 - RNA, 16 nt, Human
ccagaaaggagacuag

SEQ ID NO: 2610267 - RNA, 13 nt, Human
ccacuucaauaga

SEQ ID NO: 2610268 - RNA, 21 nt, Human
ccacuucaggguucuccucuc

SEQ ID NO: 2610269 - RNA, 12 nt, Human
ccagaaagaaaa

SEQ ID NO: 2610270 - RNA, 24 nt, Human
ccagaaacuguucccaccugcugg

SEQ ID NO: 2610271 - RNA, 20 nt, Human
ccaggacggggccggccagg

SEQ ID NO: 2610272 - RNA, 14 nt, Human
ccaggacaggcccg

SEQ ID NO: 2610273 - RNA, 15 nt, Human
ccaggacaggcccgg

SEQ ID NO: 2610274 - RNA, 17 nt, Human
ccaggacaggcccggcg

SEQ ID NO: 2610275 - RNA, 13 nt, Human
ccaggacaggccc

SEQ ID NO: 2610276 - RNA, 21 nt, Human
ccaggacaccacacccagccu

SEQ ID NO: 2610277 - RNA, 20 nt, Human
ccaggacaccacacccagcc

SEQ ID NO: 2610278 - RNA, 19 nt, Human
ccaggacaccacacccagc

SEQ ID NO: 2610279 - RNA, 18 nt, Human
ccaggacaccacacccag

SEQ ID NO: 2610280 - RNA, 17 nt, Human
ccaggacaccacaccca

SEQ ID NO: 2610281 - RNA, 14 nt, Human
ccaggacaggacca

SEQ ID NO: 2610282 - RNA, 23 nt, Human
ccaggacaccacacccagccuca

SEQ ID NO: 2610283 - RNA, 22 nt, Human
ccaggacaccacacccagccuc

SEQ ID NO: 2610284 - RNA, 13 nt, Human
ccaggacaggacc

SEQ ID NO: 2610285 - RNA, 19 nt, Human
ccaggacuauagcccaggu

SEQ ID NO: 2610286 - RNA, 18 nt, Human
ccaggacuauagcccagg

SEQ ID NO: 2610287 - RNA, 23 nt, Human
ccaggacggggccggccaggugg

SEQ ID NO: 2610288 - RNA, 21 nt, Human
ccaggacggggccggccaggu

SEQ ID NO: 2610289 - RNA, 22 nt, Human
ccaggacuauagcccagguccu

SEQ ID NO: 2610290 - RNA, 20 nt, Human
ccaggacuauagcccagguc

SEQ ID NO: 2610291 - RNA, 20 nt, Human
ccaggacuauauuugggccu

SEQ ID NO: 2610292 - RNA, 17 nt, Human
ccaggacuccccaggcc

SEQ ID NO: 2610293 - RNA, 15 nt, Human
ccaggacuccccagg

SEQ ID NO: 2610294 - RNA, 21 nt, Human
ccaggacuauauuugggccug

SEQ ID NO: 2610295 - RNA, 21 nt, Human
ccaggacuccccaggccaggc

SEQ ID NO: 2610296 - RNA, 19 nt, Human
ccaggacuccccaggccag

SEQ ID NO: 2610297 - RNA, 14 nt, Human
ccaggacucccucc

SEQ ID NO: 2610298 - RNA, 22 nt, Human
ccaggacuccccaggccaggcc

SEQ ID NO: 2610299 - RNA, 23 nt, Human
ccaggacucccuccucaccucug

SEQ ID NO: 2610300 - RNA, 16 nt, Human
ccaggacucccuccuc

SEQ ID NO: 2610301 - RNA, 17 nt, Human
ccaggacucccuccuca

SEQ ID NO: 2610302 - RNA, 18 nt, Human
ccaggacucccuccucac

SEQ ID NO: 2610303 - RNA, 22 nt, Human
ccaggacucccuccucaccucu

SEQ ID NO: 2610304 - RNA, 23 nt, Human
ccagcuggggccaggcugggucg

SEQ ID NO: 2610305 - RNA, 22 nt, Human
ccagcuggggccaggcuggguc

SEQ ID NO: 2610306 - RNA, 21 nt, Human
ccagcuggggccaggcugggu

SEQ ID NO: 2610307 - RNA, 20 nt, Human
ccagcuggggccaggcuggg

SEQ ID NO: 2610308 - RNA, 19 nt, Human
ccagcuggggccaggcugg

SEQ ID NO: 2610309 - RNA, 18 nt, Human
ccagcuggggccaggcug

SEQ ID NO: 2610310 - RNA, 17 nt, Human
ccagcuggggccaggcu

SEQ ID NO: 2610311 - RNA, 23 nt, Human
ccagcugggcucugccacccuac

SEQ ID NO: 2610312 - RNA, 22 nt, Human
ccagcugggcucugccacccua

SEQ ID NO: 2610313 - RNA, 21 nt, Human
ccagcugggcucugccacccu

SEQ ID NO: 2610314 - RNA, 17 nt, Human
ccagcugggcucugcca

SEQ ID NO: 2610315 - RNA, 19 nt, Human
ccagcugggcucugcaauu

SEQ ID NO: 2610316 - RNA, 16 nt, Human
ccagcugggcucugcc

SEQ ID NO: 2610317 - RNA, 16 nt, Human
ccagcuggcagcagag

SEQ ID NO: 2610318 - RNA, 21 nt, Human
ccaggaaggggguccacccag

SEQ ID NO: 2610319 - RNA, 22 nt, Human
ccaggaaggggguccacccagc

SEQ ID NO: 2610320 - RNA, 15 nt, Human
ccaggaaggcggggc

SEQ ID NO: 2610321 - RNA, 18 nt, Human
ccaggaaggcggggcuuc

SEQ ID NO: 2610322 - RNA, 20 nt, Human
ccaggaagccgugcccugcc

SEQ ID NO: 2610323 - RNA, 15 nt, Human
ccaggaagccgugcc

SEQ ID NO: 2610324 - RNA, 22 nt, Human
ccaggaagccagcaggcucuca

SEQ ID NO: 2610325 - RNA, 20 nt, Human
ccaggaagccagcaggcucu

SEQ ID NO: 2610326 - RNA, 19 nt, Human
ccagcuggggcguggggag

SEQ ID NO: 2610327 - RNA, 16 nt, Human
ccagcuggggcguggg

SEQ ID NO: 2610328 - RNA, 11 nt, Human
ccaggaagccg

SEQ ID NO: 2610329 - RNA, 16 nt, Human
ccaggaauuucccagg

SEQ ID NO: 2610330 - RNA, 17 nt, Human
ccaggaauuucccagga

SEQ ID NO: 2610331 - RNA, 14 nt, Human
ccaggaauuuccca

SEQ ID NO: 2610332 - RNA, 19 nt, Human
ccaggaaugccuccucccu

SEQ ID NO: 2610333 - RNA, 18 nt, Human
ccaggaauuucccaggac

SEQ ID NO: 2610334 - RNA, 19 nt, Human
ccaggaauuucccaggacc

SEQ ID NO: 2610335 - RNA, 20 nt, Human
ccaggaauuucccaggaccc

SEQ ID NO: 2610336 - RNA, 21 nt, Human
ccaggaauuucccaggacccu

SEQ ID NO: 2610337 - RNA, 23 nt, Human
ccaggaauuucccaggacccuga

SEQ ID NO: 2610338 - RNA, 22 nt, Human
ccaggaauuucccaggacccug

SEQ ID NO: 2610339 - RNA, 20 nt, Human
ccaggaauguuaaagucagu

SEQ ID NO: 2610340 - RNA, 16 nt, Human
ccagcgagcccuggug

SEQ ID NO: 2610341 - RNA, 15 nt, Human
ccagcgagcccuggu

SEQ ID NO: 2610342 - RNA, 22 nt, Human
ccagccuugaccauucuccacc

SEQ ID NO: 2610343 - RNA, 14 nt, Human
ccagcgagcccugg

SEQ ID NO: 2610344 - RNA, 13 nt, Human
ccagcucuggucc

SEQ ID NO: 2610345 - RNA, 12 nt, Human
ccagcucugguc

SEQ ID NO: 2610346 - RNA, 11 nt, Human
ccagcucuggu

SEQ ID NO: 2610347 - RNA, 19 nt, Human
ccagcucuggaggggaggg

SEQ ID NO: 2610348 - RNA, 14 nt, Human
ccagcucuggaggg

SEQ ID NO: 2610349 - RNA, 12 nt, Human
ccagcucuggcu

SEQ ID NO: 2610350 - RNA, 14 nt, Human
ccagcucuggcuuc

SEQ ID NO: 2610351 - RNA, 19 nt, Human
ccagccuucuuugcuugcc

SEQ ID NO: 2610352 - RNA, 18 nt, Human
ccagccuucuuugcuugc

SEQ ID NO: 2610353 - RNA, 22 nt, Human
ccagccuucuuccaucccagga

SEQ ID NO: 2610354 - RNA, 19 nt, Human
ccagccuucuuccauccca

SEQ ID NO: 2610355 - RNA, 18 nt, Human
ccagccuucuuccauccc

SEQ ID NO: 2610356 - RNA, 22 nt, Human
ccagccuuccucugcagcugac

SEQ ID NO: 2610357 - RNA, 21 nt, Human
ccagccuuccucugcagcuga

SEQ ID NO: 2610358 - RNA, 20 nt, Human
ccagccuuccucugcagcug

SEQ ID NO: 2610359 - RNA, 12 nt, Human
ccagagcccagc

SEQ ID NO: 2610360 - RNA, 13 nt, Human
ccagagcccagcu

SEQ ID NO: 2610361 - RNA, 14 nt, Human
ccagagcccagcuc

SEQ ID NO: 2610362 - RNA, 15 nt, Human
ccagagcccagcucc

SEQ ID NO: 2610363 - RNA, 20 nt, Human
ccagccuugaccauucucca

SEQ ID NO: 2610364 - RNA, 19 nt, Human
ccagccuugaccauucucc

SEQ ID NO: 2610365 - RNA, 21 nt, Human
ccagagcauuacgugagccag

SEQ ID NO: 2610366 - RNA, 20 nt, Human
ccagagcauuacgugagcca

SEQ ID NO: 2610367 - RNA, 14 nt, Human
ccagagcagggugu

SEQ ID NO: 2610368 - RNA, 12 nt, Human
ccagagcagggu

SEQ ID NO: 2610369 - RNA, 23 nt, Human
ccagagcauuacgugagccaggu

SEQ ID NO: 2610370 - RNA, 22 nt, Human
ccagagcauuacgugagccagg

SEQ ID NO: 2610371 - RNA, 16 nt, Human
ccagagcccaccuugg

SEQ ID NO: 2610372 - RNA, 11 nt, Human
ccagagcccag

SEQ ID NO: 2610373 - RNA, 20 nt, Human
ccagagcauuuccaacacca

SEQ ID NO: 2610374 - RNA, 18 nt, Human
ccagagcauuuccaacac

SEQ ID NO: 2610375 - RNA, 22 nt, Human
ccagagcccaccuuggcucaag

SEQ ID NO: 2610376 - RNA, 20 nt, Human
ccagcugcuugggcuucauc

SEQ ID NO: 2610377 - RNA, 20 nt, Human
ccagcugcgcuugcuuuucu

SEQ ID NO: 2610378 - RNA, 19 nt, Human
ccagcugcgcuugcuuuuc

SEQ ID NO: 2610379 - RNA, 21 nt, Human
ccagcugcgcuugcuuuucug

SEQ ID NO: 2610380 - RNA, 12 nt, Human
ccagcugcuccc

SEQ ID NO: 2610381 - RNA, 14 nt, Human
ccagcugcucccca

SEQ ID NO: 2610382 - RNA, 14 nt, Human
ccagcugcuccccu

SEQ ID NO: 2610383 - RNA, 16 nt, Human
ccagcugcuccccucc

SEQ ID NO: 2610384 - RNA, 17 nt, Human
ccagcugcuccccuccc

SEQ ID NO: 2610385 - RNA, 19 nt, Human
ccagcugcuccccucccuc

SEQ ID NO: 2610386 - RNA, 21 nt, Human
ccagcugcuccccucccuccu

SEQ ID NO: 2610387 - RNA, 13 nt, Human
ccagcuggcagca

SEQ ID NO: 2610388 - RNA, 18 nt, Human
ccagcugggcucugcaau

SEQ ID NO: 2610389 - RNA, 16 nt, Human
ccagcugggcucugca

SEQ ID NO: 2610390 - RNA, 14 nt, Human
ccagcuggcagcag

SEQ ID NO: 2610391 - RNA, 15 nt, Human
ccagcuggcagcaga

SEQ ID NO: 2610392 - RNA, 20 nt, Human
ccagcuggcagcagagugug

SEQ ID NO: 2610393 - RNA, 15 nt, Human
ccagcugggcucugc

SEQ ID NO: 2610394 - RNA, 23 nt, Human
ccagcugcuugggcuucauccuc

SEQ ID NO: 2610395 - RNA, 24 nt, Human
ccagcuggagaaauaugguacuca

SEQ ID NO: 2610396 - RNA, 22 nt, Human
ccagcucugguccauagagagc

SEQ ID NO: 2610397 - RNA, 21 nt, Human
ccagcucugguccauagagag

SEQ ID NO: 2610398 - RNA, 17 nt, Human
ccagcucugguccauag

SEQ ID NO: 2610399 - RNA, 14 nt, Human
ccagcucuggucca

SEQ ID NO: 2610400 - RNA, 14 nt, Human
ccagcugcacugau

SEQ ID NO: 2610401 - RNA, 18 nt, Human
ccagcugcacugaugcug

SEQ ID NO: 2610402 - RNA, 19 nt, Human
ccagcugcacugaugcugc

SEQ ID NO: 2610403 - RNA, 18 nt, Human
ccagcugccccagccaga

SEQ ID NO: 2610404 - RNA, 16 nt, Human
ccagcugccccagcca

SEQ ID NO: 2610405 - RNA, 19 nt, Human
ccagcugccgaccagagcc

SEQ ID NO: 2610406 - RNA, 20 nt, Human
ccagcugccgaccagagccc

SEQ ID NO: 2610407 - RNA, 18 nt, Human
ccagcugccgaccagagc

SEQ ID NO: 2610408 - RNA, 18 nt, Human
ccagcugcgcuugcuuuu

SEQ ID NO: 2610409 - RNA, 17 nt, Human
ccagcugcgcuugcuuu

SEQ ID NO: 2610410 - RNA, 16 nt, Human
ccagcugcgcuugcuu

SEQ ID NO: 2610411 - RNA, 13 nt, Human
ccagcugccucuu

SEQ ID NO: 2610412 - RNA, 10 nt, Human
ccagcugccu

SEQ ID NO: 2610413 - RNA, 12 nt, Human
ccagcugccucc

SEQ ID NO: 2610414 - RNA, 22 nt, Human
ccaggcauuccccaggaggcca

SEQ ID NO: 2610415 - RNA, 23 nt, Human
ccaggcauuccccaggaggccag

SEQ ID NO: 2610416 - RNA, 16 nt, Human
ccaggcauugccaagg

SEQ ID NO: 2610417 - RNA, 15 nt, Human
ccaggccccaggaag

SEQ ID NO: 2610418 - RNA, 24 nt, Human
ccaggcauuccccaggaggccagc

SEQ ID NO: 2610419 - RNA, 24 nt, Human
ccaggcagucgggggcuggccuag

SEQ ID NO: 2610420 - RNA, 20 nt, Human
ccaggcauccuccacaauag

SEQ ID NO: 2610421 - RNA, 14 nt, Human
ccaggcauucccca

SEQ ID NO: 2610422 - RNA, 23 nt, Human
ccaggcagucgggggcuggccua

SEQ ID NO: 2610423 - RNA, 22 nt, Human
ccaggcagucgggggcuggccu

SEQ ID NO: 2610424 - RNA, 21 nt, Human
ccaggcagucgggggcuggcc

SEQ ID NO: 2610425 - RNA, 20 nt, Human
ccaggcagucgggggcuggc

SEQ ID NO: 2610426 - RNA, 19 nt, Human
ccaggcagucgggggcugg

SEQ ID NO: 2610427 - RNA, 17 nt, Human
ccaggcagucgggggcu

SEQ ID NO: 2610428 - RNA, 12 nt, Human
ccaggcagucgg

SEQ ID NO: 2610429 - RNA, 13 nt, Human
ccaggcauggugg

SEQ ID NO: 2610430 - RNA, 14 nt, Human
ccaggagccuccug

SEQ ID NO: 2610431 - RNA, 13 nt, Human
ccaggagccuccu

SEQ ID NO: 2610432 - RNA, 18 nt, Human
ccaggagccuccugcccu

SEQ ID NO: 2610433 - RNA, 19 nt, Human
ccaggagccuccugcccuu

SEQ ID NO: 2610434 - RNA, 23 nt, Human
ccaggagcugggcagaaggccaa

SEQ ID NO: 2610435 - RNA, 12 nt, Human
ccaggaggccag

SEQ ID NO: 2610436 - RNA, 13 nt, Human
ccaggaggccagc

SEQ ID NO: 2610437 - RNA, 14 nt, Human
ccaggaggccagcc

SEQ ID NO: 2610438 - RNA, 19 nt, Human
ccaggcaggugccuggaca

SEQ ID NO: 2610439 - RNA, 14 nt, Human
ccaggaggacugcc

SEQ ID NO: 2610440 - RNA, 16 nt, Human
ccaggagcagccacau

SEQ ID NO: 2610441 - RNA, 15 nt, Human
ccaggagcagccaca

SEQ ID NO: 2610442 - RNA, 23 nt, Human
ccaggagcauccaccuccuucuc

SEQ ID NO: 2610443 - RNA, 20 nt, Human
ccaggagcauccaccuccuu

SEQ ID NO: 2610444 - RNA, 18 nt, Human
ccaggagcauccaccucc

SEQ ID NO: 2610445 - RNA, 15 nt, Human
ccaggagccccgagg

SEQ ID NO: 2610446 - RNA, 20 nt, Human
ccaguaacgcgucuuccuga

SEQ ID NO: 2610447 - RNA, 19 nt, Human
ccaguaacgcgucuuccug

SEQ ID NO: 2610448 - RNA, 18 nt, Human
ccaguaagggaaauagaa

SEQ ID NO: 2610449 - RNA, 21 nt, Human
ccaguaacgcgucuuccugag

SEQ ID NO: 2610450 - RNA, 15 nt, Human
ccaguaacucaucug

SEQ ID NO: 2610451 - RNA, 16 nt, Human
ccaguaacucaucugu

SEQ ID NO: 2610452 - RNA, 23 nt, Human
ccagguggggugaggcagugggu

SEQ ID NO: 2610453 - RNA, 13 nt, Human
ccaggugccuugg

SEQ ID NO: 2610454 - RNA, 22 nt, Human
ccaggugcuacacccuuuucca

SEQ ID NO: 2610455 - RNA, 20 nt, Human
ccagguggggugaggcagug

SEQ ID NO: 2610456 - RNA, 23 nt, Human
ccaggugugcacguggcaugugg

SEQ ID NO: 2610457 - RNA, 16 nt, Human
ccaggugugcacgugg

SEQ ID NO: 2610458 - RNA, 22 nt, Human
ccagguguguccaccugggcau

SEQ ID NO: 2610459 - RNA, 14 nt, Human
ccagguucagcuug

SEQ ID NO: 2610460 - RNA, 17 nt, Human
ccagguguuacuguaau

SEQ ID NO: 2610461 - RNA, 21 nt, Human
ccagguguuacuguaauuccu

SEQ ID NO: 2610462 - RNA, 16 nt, Human
ccagguuaucugggca

SEQ ID NO: 2610463 - RNA, 20 nt, Human
ccagugaauucuugaaggaa

SEQ ID NO: 2610464 - RNA, 16 nt, Human
ccagugaauucuugaa

SEQ ID NO: 2610465 - RNA, 20 nt, Human
ccagugaaaucaguuacucu

SEQ ID NO: 2610466 - RNA, 22 nt, Human
ccagucuuccugacacuuuaau

SEQ ID NO: 2610467 - RNA, 15 nt, Human
ccagugaaccaaaga

SEQ ID NO: 2610468 - RNA, 21 nt, Human
ccagucuguggaucagagaug

SEQ ID NO: 2610469 - RNA, 18 nt, Human
ccaguaucuauauaugug

SEQ ID NO: 2610470 - RNA, 16 nt, Human
ccagucuguuccccau

SEQ ID NO: 2610471 - RNA, 17 nt, Human
ccagucuuccugacacu

SEQ ID NO: 2610472 - RNA, 12 nt, Human
ccagucuugugu

SEQ ID NO: 2610473 - RNA, 22 nt, Human
ccaguaccuccugucucuggcc

SEQ ID NO: 2610474 - RNA, 20 nt, Human
ccaguaccuccugucucugg

SEQ ID NO: 2610475 - RNA, 18 nt, Human
ccaguaccuccugucucu

SEQ ID NO: 2610476 - RNA, 16 nt, Human
ccaguaccuuugucac

SEQ ID NO: 2610477 - RNA, 22 nt, Human
ccaguagaccuuguuacuucug

SEQ ID NO: 2610478 - RNA, 17 nt, Human
ccaguaccuuugucaca

SEQ ID NO: 2610479 - RNA, 16 nt, Human
ccaguacgugcuaaca

SEQ ID NO: 2610480 - RNA, 13 nt, Human
ccaguaucgcuca

SEQ ID NO: 2610481 - RNA, 14 nt, Human
ccaguaucuauaua

SEQ ID NO: 2610482 - RNA, 21 nt, Human
ccaguagcuugggacaaauca

SEQ ID NO: 2610483 - RNA, 15 nt, Human
ccagguccagcucug

SEQ ID NO: 2610484 - RNA, 14 nt, Human
ccagguccagcucu

SEQ ID NO: 2610485 - RNA, 13 nt, Human
ccagguccagcuc

SEQ ID NO: 2610486 - RNA, 16 nt, Human
ccagguccacggucug

SEQ ID NO: 2610487 - RNA, 20 nt, Human
ccaggucacccuuugcugug

SEQ ID NO: 2610488 - RNA, 20 nt, Human
ccagggcuaugggagcagcu

SEQ ID NO: 2610489 - RNA, 19 nt, Human
ccagguccagcucuggagg

SEQ ID NO: 2610490 - RNA, 17 nt, Human
ccagguccagcucugga

SEQ ID NO: 2610491 - RNA, 16 nt, Human
ccagguccagcucugg

SEQ ID NO: 2610492 - RNA, 18 nt, Human
ccagguccagcucuggag

SEQ ID NO: 2610493 - RNA, 20 nt, Human
ccagggccuggaagacagag

SEQ ID NO: 2610494 - RNA, 19 nt, Human
ccagggccuggaagacaga

SEQ ID NO: 2610495 - RNA, 17 nt, Human
ccagggccuggaagaca

SEQ ID NO: 2610496 - RNA, 16 nt, Human
ccagggccuggaagac

SEQ ID NO: 2610497 - RNA, 16 nt, Human
ccagggcuagugacuu

SEQ ID NO: 2610498 - RNA, 17 nt, Human
ccagggcuauagcucag

SEQ ID NO: 2610499 - RNA, 21 nt, Human
ccagggccuggaagacagaga

SEQ ID NO: 2610500 - RNA, 19 nt, Human
ccagggcuagugacuugug

SEQ ID NO: 2610501 - RNA, 19 nt, Human
ccagggcuaugggagcagc

SEQ ID NO: 2610502 - RNA, 21 nt, Human
ccagggcuauagcucaggacc

SEQ ID NO: 2610503 - RNA, 11 nt, Human
ccagggcucag

SEQ ID NO: 2610504 - RNA, 16 nt, Human
ccagggcucagccugg

SEQ ID NO: 2610505 - RNA, 20 nt, Human
ccagggcucagccugguggg

SEQ ID NO: 2610506 - RNA, 12 nt, Human
ccagggcucagc

SEQ ID NO: 2610507 - RNA, 13 nt, Human
ccagggcucagcc

SEQ ID NO: 2610508 - RNA, 14 nt, Human
ccagggcucagccu

SEQ ID NO: 2610509 - RNA, 15 nt, Human
ccagggcucagccug

SEQ ID NO: 2610510 - RNA, 19 nt, Human
ccaggucuuggagcugagc

SEQ ID NO: 2610511 - RNA, 21 nt, Human
ccaggucuccuccaccgccau

SEQ ID NO: 2610512 - RNA, 19 nt, Human
ccaggucuccuccaccgcc

SEQ ID NO: 2610513 - RNA, 16 nt, Human
ccaggucuccuccacc

SEQ ID NO: 2610514 - RNA, 15 nt, Human
ccaggucuccuccac

SEQ ID NO: 2610515 - RNA, 14 nt, Human
ccaggucuccucca

SEQ ID NO: 2610516 - RNA, 23 nt, Human
ccaggucuuggagcugagccucu

SEQ ID NO: 2610517 - RNA, 22 nt, Human
ccaggucuuggagcugagccuc

SEQ ID NO: 2610518 - RNA, 21 nt, Human
ccaggucuuggagcugagccu

SEQ ID NO: 2610519 - RNA, 20 nt, Human
ccaggucuuggagcugagcc

SEQ ID NO: 2610520 - RNA, 14 nt, Human
ccagguccucugau

SEQ ID NO: 2610521 - RNA, 13 nt, Human
ccagguccucuga

SEQ ID NO: 2610522 - RNA, 22 nt, Human
ccagguccucugauacccagag

SEQ ID NO: 2610523 - RNA, 23 nt, Human
ccaggucucacgggcaugggcac

SEQ ID NO: 2610524 - RNA, 16 nt, Human
ccaggucucacgggca

SEQ ID NO: 2610525 - RNA, 15 nt, Human
ccaggucucacgggc

SEQ ID NO: 2610526 - RNA, 19 nt, Human
ccaggugcuaggaacacuc

SEQ ID NO: 2610527 - RNA, 13 nt, Human
ccaggugcccagc

SEQ ID NO: 2610528 - RNA, 15 nt, Human
ccaggugcccagcua

SEQ ID NO: 2610529 - RNA, 14 nt, Human
ccaggugccuugga

SEQ ID NO: 2610530 - RNA, 12 nt, Human
ccaggugccuug

SEQ ID NO: 2610531 - RNA, 17 nt, Human
ccaggugccaguuaugg

SEQ ID NO: 2610532 - RNA, 12 nt, Human
ccagggaagggg

SEQ ID NO: 2610533 - RNA, 20 nt, Human
ccaggccccgaggacccaga

SEQ ID NO: 2610534 - RNA, 19 nt, Human
ccaggccccgaggacccag

SEQ ID NO: 2610535 - RNA, 22 nt, Human
ccaggccccgaggacccagacc

SEQ ID NO: 2610536 - RNA, 21 nt, Human
ccaggccccgaggacccagac

SEQ ID NO: 2610537 - RNA, 23 nt, Human
ccaggccccgaggacccagaccc

SEQ ID NO: 2610538 - RNA, 13 nt, Human
ccaggccccugcc

SEQ ID NO: 2610539 - RNA, 16 nt, Human
ccaggccccaggaagc

SEQ ID NO: 2610540 - RNA, 17 nt, Human
ccaggccccaggaagcc

SEQ ID NO: 2610541 - RNA, 19 nt, Human
ccaggcccccaagccugca

SEQ ID NO: 2610542 - RNA, 20 nt, Human
ccaggcccccaagccugcag

SEQ ID NO: 2610543 - RNA, 21 nt, Human
ccaggcuggucucgaacuccu

SEQ ID NO: 2610544 - RNA, 19 nt, Human
ccaggcuggucucaaacuc

SEQ ID NO: 2610545 - RNA, 20 nt, Human
ccaggcuguaucccaugagc

SEQ ID NO: 2610546 - RNA, 17 nt, Human
ccaggcuugccugcagg

SEQ ID NO: 2610547 - RNA, 14 nt, Human
ccagggcagggcca

SEQ ID NO: 2610548 - RNA, 13 nt, Human
ccagggcagggcc

SEQ ID NO: 2610549 - RNA, 13 nt, Human
ccagggccacgug

SEQ ID NO: 2610550 - RNA, 17 nt, Human
ccagggccacgugccag

SEQ ID NO: 2610551 - RNA, 19 nt, Human
ccagggccacgugccaggc

SEQ ID NO: 2610552 - RNA, 21 nt, Human
ccagggccacgugccaggccc

SEQ ID NO: 2610553 - RNA, 22 nt, Human
ccagggccacgugccaggcccg

SEQ ID NO: 2610554 - RNA, 17 nt, Human
ccagggccacucugccu

SEQ ID NO: 2610555 - RNA, 19 nt, Human
ccagggccacucugccucu

SEQ ID NO: 2610556 - RNA, 20 nt, Human
ccagggccacucugccucug

SEQ ID NO: 2610557 - RNA, 17 nt, Human
ccagggaagagaaagug

SEQ ID NO: 2610558 - RNA, 17 nt, Human
ccagggaagcuggccga

SEQ ID NO: 2610559 - RNA, 18 nt, Human
ccagggaagcuggccgag

SEQ ID NO: 2610560 - RNA, 19 nt, Human
ccagggcacuucacagagu

SEQ ID NO: 2610561 - RNA, 17 nt, Human
ccagggaagcugucccu

SEQ ID NO: 2610562 - RNA, 19 nt, Human
ccaggcuuuuuuaucaugu

SEQ ID NO: 2610563 - RNA, 18 nt, Human
ccaggcuugccugcaggc

SEQ ID NO: 2610564 - RNA, 21 nt, Human
ccaggcugguuucgaacuccu

SEQ ID NO: 2610565 - RNA, 21 nt, Human
cccacaaaggagagcuagcag

SEQ ID NO: 2610566 - RNA, 18 nt, Human
ccauucugccugcccagg

SEQ ID NO: 2610567 - RNA, 17 nt, Human
ccauucugccugcccag

SEQ ID NO: 2610568 - RNA, 17 nt, Human
ccauucuccaccugcca

SEQ ID NO: 2610569 - RNA, 16 nt, Human
ccauucugccugccca

SEQ ID NO: 2610570 - RNA, 20 nt, Human
ccauucugccugcccaggcc

SEQ ID NO: 2610571 - RNA, 19 nt, Human
ccauucugccugcccaggc

SEQ ID NO: 2610572 - RNA, 14 nt, Human
ccauucuccaccug

SEQ ID NO: 2610573 - RNA, 21 nt, Human
ccauucugccugcccaggccc

SEQ ID NO: 2610574 - RNA, 16 nt, Human
ccauucuccaccugcc

SEQ ID NO: 2610575 - RNA, 15 nt, Human
ccauucuccaccugc

SEQ ID NO: 2610576 - RNA, 14 nt, Human
ccauggacuuuguu

SEQ ID NO: 2610577 - RNA, 13 nt, Human
ccauggacuuugu

SEQ ID NO: 2610578 - RNA, 20 nt, Human
ccaugcuguugauugcuaaa

SEQ ID NO: 2610579 - RNA, 22 nt, Human
ccaugcuguugauugcuaaaug

SEQ ID NO: 2610580 - RNA, 21 nt, Human
ccaugcuguugauugcuaaau

SEQ ID NO: 2610581 - RNA, 24 nt, Human
ccaugcuguugauugcuaaaugua

SEQ ID NO: 2610582 - RNA, 21 nt, Human
ccaugcugggaagacgccuga

SEQ ID NO: 2610583 - RNA, 24 nt, Human
ccaugcuggagccuguguaacagc

SEQ ID NO: 2610584 - RNA, 16 nt, Human
ccaugcuuagucacug

SEQ ID NO: 2610585 - RNA, 16 nt, Human
ccauggacaggcuggc

SEQ ID NO: 2610586 - RNA, 18 nt, Human
ccauggacaggcuggcuc

SEQ ID NO: 2610587 - RNA, 19 nt, Human
ccauggacaggcuggcucc

SEQ ID NO: 2610588 - RNA, 23 nt, Human
ccauggacuucacauaagcucag

SEQ ID NO: 2610589 - RNA, 22 nt, Human
ccauggacucuacacugugaac

SEQ ID NO: 2610590 - RNA, 17 nt, Human
ccaugcuuagucacugc

SEQ ID NO: 2610591 - RNA, 15 nt, Human
ccauggacaggcugg

SEQ ID NO: 2610592 - RNA, 15 nt, Human
ccauggacucuacac

SEQ ID NO: 2610593 - RNA, 13 nt, Human
cccaaaaggcaga

SEQ ID NO: 2610594 - RNA, 18 nt, Human
cccaaaaggcagaagcaa

SEQ ID NO: 2610595 - RNA, 20 nt, Human
cccaaacaaauaugcaaaag

SEQ ID NO: 2610596 - RNA, 22 nt, Human
cccaaaagucaaaaggugccug

SEQ ID NO: 2610597 - RNA, 23 nt, Human
cccaaaagucaaaaggugccugu

SEQ ID NO: 2610598 - RNA, 17 nt, Human
cccaaacaaauaugcaa

SEQ ID NO: 2610599 - RNA, 23 nt, Human
ccauuuuggauucuuauggacaa

SEQ ID NO: 2610600 - RNA, 20 nt, Human
ccauuuugggguacccacug

SEQ ID NO: 2610601 - RNA, 12 nt, Human
ccauucuggaag

SEQ ID NO: 2610602 - RNA, 15 nt, Human
ccauucuggaaguga

SEQ ID NO: 2610603 - RNA, 22 nt, Human
ccauuuugggguacccacugcu

SEQ ID NO: 2610604 - RNA, 15 nt, Human
cccaaagaugcagcc

SEQ ID NO: 2610605 - RNA, 12 nt, Human
cccaaagaugca

SEQ ID NO: 2610606 - RNA, 16 nt, Human
cccaaagcagugcaug

SEQ ID NO: 2610607 - RNA, 19 nt, Human
cccaaagagccuggagaag

SEQ ID NO: 2610608 - RNA, 18 nt, Human
cccaaagagccuggagaa

SEQ ID NO: 2610609 - RNA, 21 nt, Human
cccaaagaauguuuauagcaa

SEQ ID NO: 2610610 - RNA, 22 nt, Human
cccaaacaccuuccagcuccug

SEQ ID NO: 2610611 - RNA, 21 nt, Human
cccaaacaccuuccagcuccu

SEQ ID NO: 2610612 - RNA, 19 nt, Human
cccaaacaccuuccagcuc

SEQ ID NO: 2610613 - RNA, 16 nt, Human
cccaaacaccuuccag

SEQ ID NO: 2610614 - RNA, 17 nt, Human
cccaaaccaccagaagc

SEQ ID NO: 2610615 - RNA, 18 nt, Human
cccaaaccaccagaagcc

SEQ ID NO: 2610616 - RNA, 22 nt, Human
cccaaaccaccagaagcccaga

SEQ ID NO: 2610617 - RNA, 12 nt, Human
cccaaaccucca

SEQ ID NO: 2610618 - RNA, 23 nt, Human
cccaaacuguugauuauuagcca

SEQ ID NO: 2610619 - RNA, 12 nt, Human
cccaaagaagga

SEQ ID NO: 2610620 - RNA, 20 nt, Human
ccauccucuguacagagccc

SEQ ID NO: 2610621 - RNA, 12 nt, Human
ccauccagaggc

SEQ ID NO: 2610622 - RNA, 19 nt, Human
ccauccacucuacccuccc

SEQ ID NO: 2610623 - RNA, 22 nt, Human
ccauccacucuacccucccacc

SEQ ID NO: 2610624 - RNA, 13 nt, Human
ccauccaggcagu

SEQ ID NO: 2610625 - RNA, 12 nt, Human
ccauccaggcag

SEQ ID NO: 2610626 - RNA, 15 nt, Human
ccauccuccccuucc

SEQ ID NO: 2610627 - RNA, 21 nt, Human
ccauccagggaugccaucugu

SEQ ID NO: 2610628 - RNA, 17 nt, Human
ccauccuccccuucccu

SEQ ID NO: 2610629 - RNA, 18 nt, Human
ccauccuccccuucccug

SEQ ID NO: 2610630 - RNA, 21 nt, Human
ccauccuccccuucccugcaa

SEQ ID NO: 2610631 - RNA, 16 nt, Human
ccaucaucaugugugu

SEQ ID NO: 2610632 - RNA, 16 nt, Human
ccaucaguuagagcug

SEQ ID NO: 2610633 - RNA, 15 nt, Human
ccaucauaggaaggg

SEQ ID NO: 2610634 - RNA, 15 nt, Human
ccauccaaggccagg

SEQ ID NO: 2610635 - RNA, 20 nt, Human
ccauccaaauaagaaaccua

SEQ ID NO: 2610636 - RNA, 17 nt, Human
ccauccacaugggagcc

SEQ ID NO: 2610637 - RNA, 16 nt, Human
ccauccacucuacccu

SEQ ID NO: 2610638 - RNA, 23 nt, Human
ccaucaguguacccccgcccagg

SEQ ID NO: 2610639 - RNA, 22 nt, Human
ccaucaguguacccccgcccag

SEQ ID NO: 2610640 - RNA, 18 nt, Human
ccaucaguguacccccgc

SEQ ID NO: 2610641 - RNA, 17 nt, Human
ccaucagguuccauccc

SEQ ID NO: 2610642 - RNA, 12 nt, Human
ccaucagugcuc

SEQ ID NO: 2610643 - RNA, 17 nt, Human
ccaucagugcucccuca

SEQ ID NO: 2610644 - RNA, 22 nt, Human
ccaucauugaaaucuuuuugcu

SEQ ID NO: 2610645 - RNA, 19 nt, Human
ccaucagcuguaagaagag

SEQ ID NO: 2610646 - RNA, 24 nt, Human
ccaucagcuguaagaagagacugg

SEQ ID NO: 2610647 - RNA, 17 nt, Human
ccaucaggacucuugug

SEQ ID NO: 2610648 - RNA, 21 nt, Human
ccaucagcuuaggggcugcug

SEQ ID NO: 2610649 - RNA, 23 nt, Human
ccaucagaaacacccucacacug

SEQ ID NO: 2610650 - RNA, 15 nt, Human
ccaucacaugaccac

SEQ ID NO: 2610651 - RNA, 18 nt, Human
ccaucuccuuucagggaa

SEQ ID NO: 2610652 - RNA, 14 nt, Human
ccaucucgccaccc

SEQ ID NO: 2610653 - RNA, 20 nt, Human
ccaucucgccaccccuccuu

SEQ ID NO: 2610654 - RNA, 22 nt, Human
ccaucucgccaccccuccuucc

SEQ ID NO: 2610655 - RNA, 23 nt, Human
ccaucucgccaccccuccuuccu

SEQ ID NO: 2610656 - RNA, 16 nt, Human
ccaucuccuuucaggg

SEQ ID NO: 2610657 - RNA, 17 nt, Human
ccaucuccuuucaggga

SEQ ID NO: 2610658 - RNA, 23 nt, Human
ccaucugcgugacaauaaaacau

SEQ ID NO: 2610659 - RNA, 22 nt, Human
ccaucugcgugacaauaaaaca

SEQ ID NO: 2610660 - RNA, 19 nt, Human
ccauccucuguacagagcc

SEQ ID NO: 2610661 - RNA, 12 nt, Human
ccauccucugua

SEQ ID NO: 2610662 - RNA, 13 nt, Human
ccaucaccagaca

SEQ ID NO: 2610663 - RNA, 22 nt, Human
ccaucagaaacacccucacacu

SEQ ID NO: 2610664 - RNA, 20 nt, Human
ccaucacaggguugggccca

SEQ ID NO: 2610665 - RNA, 13 nt, Human
ccaucacaggguu

SEQ ID NO: 2610666 - RNA, 19 nt, Human
ccauaugaccucaugcauc

SEQ ID NO: 2610667 - RNA, 18 nt, Human
ccauaugaccucaugcau

SEQ ID NO: 2610668 - RNA, 16 nt, Human
ccauauaaguuugaag

SEQ ID NO: 2610669 - RNA, 15 nt, Human
ccauauaaguuugaa

SEQ ID NO: 2610670 - RNA, 22 nt, Human
ccauauaaguuugaaggaaaca

SEQ ID NO: 2610671 - RNA, 19 nt, Human
ccauauaaguuugaaggaa

SEQ ID NO: 2610672 - RNA, 23 nt, Human
ccauauaaguuugaaggaaacag

SEQ ID NO: 2610673 - RNA, 18 nt, Human
ccaucaaggguacacugc

SEQ ID NO: 2610674 - RNA, 13 nt, Human
ccauauccugccu

SEQ ID NO: 2610675 - RNA, 18 nt, Human
ccauauccccucuccccc

SEQ ID NO: 2610676 - RNA, 18 nt, Human
ccauauccuuacccuccu

SEQ ID NO: 2610677 - RNA, 19 nt, Human
ccagugaggcucugcccuu

SEQ ID NO: 2610678 - RNA, 18 nt, Human
ccagugaggcucugcccu

SEQ ID NO: 2610679 - RNA, 16 nt, Human
ccagugaaccaaagag

SEQ ID NO: 2610680 - RNA, 17 nt, Human
ccagugaggcucugccc

SEQ ID NO: 2610681 - RNA, 20 nt, Human
ccagugaggcucugcccuug

SEQ ID NO: 2610682 - RNA, 23 nt, Human
ccauaccuuccuucccugggcug

SEQ ID NO: 2610683 - RNA, 22 nt, Human
ccauaccacccaaugcugaugu

SEQ ID NO: 2610684 - RNA, 12 nt, Human
ccauacuaauua

SEQ ID NO: 2610685 - RNA, 13 nt, Human
ccauacuaauuau

SEQ ID NO: 2610686 - RNA, 23 nt, Human
ccauacuaauuauacccccugca

SEQ ID NO: 2610687 - RNA, 17 nt, Human
ccauacuuaucucucug

SEQ ID NO: 2610688 - RNA, 22 nt, Human
ccauacuggccucgccuggccu

SEQ ID NO: 2610689 - RNA, 21 nt, Human
ccauacuggccucgccuggcc

SEQ ID NO: 2610690 - RNA, 20 nt, Human
ccauacuggccucgccuggc

SEQ ID NO: 2610691 - RNA, 19 nt, Human
ccauacuuugucugaaaaa

SEQ ID NO: 2610692 - RNA, 18 nt, Human
ccauacuggccucgccug

SEQ ID NO: 2610693 - RNA, 17 nt, Human
ccauacuggccucgccu

SEQ ID NO: 2610694 - RNA, 14 nt, Human
ccauacuggccucg

SEQ ID NO: 2610695 - RNA, 24 nt, Human
ccauaccuuccuucccugggcugu

SEQ ID NO: 2610696 - RNA, 13 nt, Human
ccauacuggccuc

SEQ ID NO: 2610697 - RNA, 20 nt, Human
ccaugcucaucugcuggucc

SEQ ID NO: 2610698 - RNA, 18 nt, Human
ccaugcucaucugcuggu

SEQ ID NO: 2610699 - RNA, 17 nt, Human
ccaugcucaucugcugg

SEQ ID NO: 2610700 - RNA, 13 nt, Human
ccaugcugcccug

SEQ ID NO: 2610701 - RNA, 11 nt, Human
ccaugcugccc

SEQ ID NO: 2610702 - RNA, 20 nt, Human
ccaugcuggagccuguguaa

SEQ ID NO: 2610703 - RNA, 19 nt, Human
ccaugcuggagccugugua

SEQ ID NO: 2610704 - RNA, 18 nt, Human
ccaugcuggagccugugu

SEQ ID NO: 2610705 - RNA, 17 nt, Human
ccaugcuggagccugug

SEQ ID NO: 2610706 - RNA, 22 nt, Human
ccaugcuggagccuguguaaca

SEQ ID NO: 2610707 - RNA, 21 nt, Human
ccaugcuggagccuguguaac

SEQ ID NO: 2610708 - RNA, 16 nt, Human
ccaugcugggaagacg

SEQ ID NO: 2610709 - RNA, 16 nt, Human
ccaugcuggagccugu

SEQ ID NO: 2610710 - RNA, 15 nt, Human
ccaugcuggagccug

SEQ ID NO: 2610711 - RNA, 14 nt, Human
ccaugcuggagccu

SEQ ID NO: 2610712 - RNA, 13 nt, Human
ccaugcuggagcc

SEQ ID NO: 2610713 - RNA, 12 nt, Human
ccaugcuggagc

SEQ ID NO: 2610714 - RNA, 19 nt, Human
ccaugcugaggccugggcc

SEQ ID NO: 2610715 - RNA, 18 nt, Human
ccaugcugaggccugggc

SEQ ID NO: 2610716 - RNA, 20 nt, Human
ccaugcugaggccugggccg

SEQ ID NO: 2610717 - RNA, 14 nt, Human
ccaugcugcccugu

SEQ ID NO: 2610718 - RNA, 13 nt, Human
ccaugcccaccug

SEQ ID NO: 2610719 - RNA, 15 nt, Human
ccaugcccaccugcc

SEQ ID NO: 2610720 - RNA, 16 nt, Human
ccaugcccaccugccc

SEQ ID NO: 2610721 - RNA, 17 nt, Human
ccaugcccaccugccca

SEQ ID NO: 2610722 - RNA, 18 nt, Human
ccaugcccaccugcccau

SEQ ID NO: 2610723 - RNA, 21 nt, Human
ccaugcccaccugcccaucac

SEQ ID NO: 2610724 - RNA, 21 nt, Human
ccaugcacugugaaggacccu

SEQ ID NO: 2610725 - RNA, 19 nt, Human
ccaugcacugugaaggacc

SEQ ID NO: 2610726 - RNA, 20 nt, Human
ccaugcacugugaaggaccc

SEQ ID NO: 2610727 - RNA, 12 nt, Human
ccaugcagagcg

SEQ ID NO: 2610728 - RNA, 20 nt, Human
ccaugccaaagcuagggugg

SEQ ID NO: 2610729 - RNA, 16 nt, Human
ccaugcgcucagggcc

SEQ ID NO: 2610730 - RNA, 15 nt, Human
ccaugcgcucagggc

SEQ ID NO: 2610731 - RNA, 13 nt, Human
ccaugcgcucagg

SEQ ID NO: 2610732 - RNA, 22 nt, Human
ccaugcgcccccuccgcccugc

SEQ ID NO: 2610733 - RNA, 16 nt, Human
ccaugcucaucugcug

SEQ ID NO: 2610734 - RNA, 13 nt, Human
ccaugcucaucug

SEQ ID NO: 2610735 - RNA, 22 nt, Human
ccaugcgcucagggccaugcug

SEQ ID NO: 2610736 - RNA, 20 nt, Human
ccaugcguguuucugacucu

SEQ ID NO: 2610737 - RNA, 18 nt, Human
ccaugcccagcucagagg

SEQ ID NO: 2610738 - RNA, 14 nt, Human
ccaugccucagccc

SEQ ID NO: 2610739 - RNA, 12 nt, Human
ccaugccucagc

SEQ ID NO: 2610740 - RNA, 16 nt, Human
ccaugccucagcccug

SEQ ID NO: 2610741 - RNA, 15 nt, Human
ccaugccucagcccu

SEQ ID NO: 2610742 - RNA, 21 nt, Human
ccaugccucagcccugacccu

SEQ ID NO: 2610743 - RNA, 16 nt, Human
ccaugauguuuagaaa

SEQ ID NO: 2610744 - RNA, 18 nt, Human
ccaugauguuuuccauga

SEQ ID NO: 2610745 - RNA, 19 nt, Human
ccaugauuaaccacuucag

SEQ ID NO: 2610746 - RNA, 21 nt, Human
ccaugauuaaccacuucagcu

SEQ ID NO: 2610747 - RNA, 13 nt, Human
ccaugcacuguga

SEQ ID NO: 2610748 - RNA, 15 nt, Human
ccaugcacugugaag

SEQ ID NO: 2610749 - RNA, 16 nt, Human
ccaugcacugugaagg

SEQ ID NO: 2610750 - RNA, 17 nt, Human
ccaugcacugugaagga

SEQ ID NO: 2610751 - RNA, 11 nt, Human
ccaugcacugu

SEQ ID NO: 2610752 - RNA, 19 nt, Human
ccaugcaauauuuccucau

SEQ ID NO: 2610753 - RNA, 18 nt, Human
ccaugcaauauuuccuca

SEQ ID NO: 2610754 - RNA, 15 nt, Human
ccaugauguggagug

SEQ ID NO: 2610755 - RNA, 18 nt, Human
ccaugauguagugccucu

SEQ ID NO: 2610756 - RNA, 22 nt, Human
ccaugauggugcugaccucugg

SEQ ID NO: 2610757 - RNA, 19 nt, Human
ccaugauggugcugaccuc

SEQ ID NO: 2610758 - RNA, 22 nt, Human
ccaugauguggaguggggcagu

SEQ ID NO: 2610759 - RNA, 17 nt, Human
ccaugauguggaguggg

SEQ ID NO: 2610760 - RNA, 23 nt, Human
ccaugauucuauuuauauguaca

SEQ ID NO: 2610761 - RNA, 14 nt, Human
ccaugauucgccca

SEQ ID NO: 2610762 - RNA, 15 nt, Human
ccaugauggcaacag

SEQ ID NO: 2610763 - RNA, 16 nt, Human
ccaugauggcaacaga

SEQ ID NO: 2610764 - RNA, 19 nt, Human
ccaugauggcaacagaucu

SEQ ID NO: 2610765 - RNA, 21 nt, Human
ccaugauggcaacagaucugg

SEQ ID NO: 2610766 - RNA, 14 nt, Human
ccaugauggcaaca

SEQ ID NO: 2610767 - RNA, 12 nt, Human
ccaugaugcugg

SEQ ID NO: 2610768 - RNA, 14 nt, Human
ccaugaagauguag

SEQ ID NO: 2610769 - RNA, 15 nt, Human
ccaugaagacaggau

SEQ ID NO: 2610770 - RNA, 14 nt, Human
ccaugaagacagga

SEQ ID NO: 2610771 - RNA, 18 nt, Human
ccaugaagagauuuuuca

SEQ ID NO: 2610772 - RNA, 22 nt, Human
ccaugaagagauuuuucaugau

SEQ ID NO: 2610773 - RNA, 22 nt, Human
ccaucugggcuccuaaccuucc

SEQ ID NO: 2610774 - RNA, 22 nt, Human
ccaucugggaguccccuuuucu

SEQ ID NO: 2610775 - RNA, 12 nt, Human
ccaucugggcuc

SEQ ID NO: 2610776 - RNA, 18 nt, Human
ccaucuggguccuugcac

SEQ ID NO: 2610777 - RNA, 17 nt, Human
ccaucuggguccuugca

SEQ ID NO: 2610778 - RNA, 16 nt, Human
ccaucugggcuccucc

SEQ ID NO: 2610779 - RNA, 17 nt, Human
ccaucugggaguccccu

SEQ ID NO: 2610780 - RNA, 16 nt, Human
ccaucugggagucccc

SEQ ID NO: 2610781 - RNA, 14 nt, Human
ccaucuggcagggu

SEQ ID NO: 2610782 - RNA, 16 nt, Human
ccaucuggcagggugg

SEQ ID NO: 2610783 - RNA, 13 nt, Human
ccaugaagacagg

SEQ ID NO: 2610784 - RNA, 16 nt, Human
ccaugaagacaggaca

SEQ ID NO: 2610785 - RNA, 17 nt, Human
ccaugaagacaggacag

SEQ ID NO: 2610786 - RNA, 19 nt, Human
ccaugaagacaggacagug

SEQ ID NO: 2610787 - RNA, 12 nt, Human
ccaugaagacag

SEQ ID NO: 2610788 - RNA, 23 nt, Human
ccaucuggguccuugcaccccuc

SEQ ID NO: 2610789 - RNA, 22 nt, Human
ccaucuggguccuugcaccccu

SEQ ID NO: 2610790 - RNA, 18 nt, Human
cccagcaagugagagcug

SEQ ID NO: 2610791 - RNA, 16 nt, Human
cccagcaagugagagc

SEQ ID NO: 2610792 - RNA, 22 nt, Human
cccagauugcaacaggcugggc

SEQ ID NO: 2610793 - RNA, 21 nt, Human
cccagauugcaacaggcuggg

SEQ ID NO: 2610794 - RNA, 18 nt, Human
cccagauaccagccccug

SEQ ID NO: 2610795 - RNA, 14 nt, Human
cccagauaccagcc

SEQ ID NO: 2610796 - RNA, 21 nt, Human
cccagaguuuuuauguagcag

SEQ ID NO: 2610797 - RNA, 14 nt, Human
cccagaguuuuuau

SEQ ID NO: 2610798 - RNA, 16 nt, Human
cccagaucagcuccua

SEQ ID NO: 2610799 - RNA, 14 nt, Human
cccagaucccagaa

SEQ ID NO: 2610800 - RNA, 12 nt, Human
cccagauccuca

SEQ ID NO: 2610801 - RNA, 16 nt, Human
cccagaucccagaagg

SEQ ID NO: 2610802 - RNA, 18 nt, Human
cccagaucuggucccuug

SEQ ID NO: 2610803 - RNA, 19 nt, Human
cccagaucuggucccuugc

SEQ ID NO: 2610804 - RNA, 21 nt, Human
cccagauguuuuacgucuggg

SEQ ID NO: 2610805 - RNA, 19 nt, Human
cccagauguuuuacgucug

SEQ ID NO: 2610806 - RNA, 22 nt, Human
cccagauguuuuacgucuggga

SEQ ID NO: 2610807 - RNA, 21 nt, Human
cccagaugggggaaagcacag

SEQ ID NO: 2610808 - RNA, 20 nt, Human
cccagaucuggucccuugca

SEQ ID NO: 2610809 - RNA, 20 nt, Human
cccagauugcaacaggcugg

SEQ ID NO: 2610810 - RNA, 23 nt, Human
cccagagguaacagaacagcuuc

SEQ ID NO: 2610811 - RNA, 20 nt, Human
cccagagguaacagaacagc

SEQ ID NO: 2610812 - RNA, 18 nt, Human
cccagagguaacagaaca

SEQ ID NO: 2610813 - RNA, 13 nt, Human
cccagagguaaca

SEQ ID NO: 2610814 - RNA, 22 nt, Human
cccagagguaacagaacagcuu

SEQ ID NO: 2610815 - RNA, 15 nt, Human
cccagagugugaaac

SEQ ID NO: 2610816 - RNA, 17 nt, Human
cccagagugugaaacuu

SEQ ID NO: 2610817 - RNA, 16 nt, Human
cccagagugugggaag

SEQ ID NO: 2610818 - RNA, 23 nt, Human
cccagaguugcugggagcugaaa

SEQ ID NO: 2610819 - RNA, 23 nt, Human
cccagagugugggaagggagagc

SEQ ID NO: 2610820 - RNA, 16 nt, Human
cccacacucacuccug

SEQ ID NO: 2610821 - RNA, 14 nt, Human
cccacacucacucc

SEQ ID NO: 2610822 - RNA, 13 nt, Human
cccacacucacuc

SEQ ID NO: 2610823 - RNA, 14 nt, Human
cccacacuaaccug

SEQ ID NO: 2610824 - RNA, 18 nt, Human
cccagagggccugcaagg

SEQ ID NO: 2610825 - RNA, 20 nt, Human
cccagagggccugcaaggga

SEQ ID NO: 2610826 - RNA, 24 nt, Human
cccacaccuccacaguucaguggc

SEQ ID NO: 2610827 - RNA, 15 nt, Human
cccacaccuccacag

SEQ ID NO: 2610828 - RNA, 15 nt, Human
cccacaccguguaaa

SEQ ID NO: 2610829 - RNA, 13 nt, Human
cccacaccucagu

SEQ ID NO: 2610830 - RNA, 22 nt, Human
cccacaccucaguucccuuggc

SEQ ID NO: 2610831 - RNA, 22 nt, Human
cccacacggaggcaucugcacc

SEQ ID NO: 2610832 - RNA, 15 nt, Human
cccacaccucugcca

SEQ ID NO: 2610833 - RNA, 19 nt, Human
cccacaccuccacaguuca

SEQ ID NO: 2610834 - RNA, 16 nt, Human
cccacaccucugccag

SEQ ID NO: 2610835 - RNA, 23 nt, Human
cccacacggaggcaucugcaccc

SEQ ID NO: 2610836 - RNA, 15 nt, Human
cccacacacucgccc

SEQ ID NO: 2610837 - RNA, 20 nt, Human
cccacaccaggccguccucc

SEQ ID NO: 2610838 - RNA, 14 nt, Human
cccacacccagcua

SEQ ID NO: 2610839 - RNA, 12 nt, Human
cccacacccugg

SEQ ID NO: 2610840 - RNA, 18 nt, Human
cccaauuuugcagggagc

SEQ ID NO: 2610841 - RNA, 13 nt, Human
cccacaaagccuu

SEQ ID NO: 2610842 - RNA, 19 nt, Human
cccaauuaggaaguguaac

SEQ ID NO: 2610843 - RNA, 13 nt, Human
cccacacacucgc

SEQ ID NO: 2610844 - RNA, 22 nt, Human
cccacaaagccuuaucaagugu

SEQ ID NO: 2610845 - RNA, 14 nt, Human
cccacacaccccaa

SEQ ID NO: 2610846 - RNA, 14 nt, Human
cccaauuggaggaa

SEQ ID NO: 2610847 - RNA, 15 nt, Human
cccaauuucagacuc

SEQ ID NO: 2610848 - RNA, 21 nt, Human
cccaauucuuacaaacaugug

SEQ ID NO: 2610849 - RNA, 16 nt, Human
cccaauguaggagcug

SEQ ID NO: 2610850 - RNA, 14 nt, Human
cccaauuaggaagu

SEQ ID NO: 2610851 - RNA, 15 nt, Human
cccaauuaggaagug

SEQ ID NO: 2610852 - RNA, 15 nt, Human
cccaaugcugauguc

SEQ ID NO: 2610853 - RNA, 20 nt, Human
cccaaucccagcuaccucaa

SEQ ID NO: 2610854 - RNA, 16 nt, Human
cccaagugugaacaaa

SEQ ID NO: 2610855 - RNA, 23 nt, Human
cccaaguuuuaggacaaacagcu

SEQ ID NO: 2610856 - RNA, 22 nt, Human
cccaaguuuuaggacaaacagc

SEQ ID NO: 2610857 - RNA, 21 nt, Human
cccaauaaacauuaagauuga

SEQ ID NO: 2610858 - RNA, 11 nt, Human
cccaauauuau

SEQ ID NO: 2610859 - RNA, 17 nt, Human
cccaauauuauaauuuu

SEQ ID NO: 2610860 - RNA, 15 nt, Human
cccaauauuauaauu

SEQ ID NO: 2610861 - RNA, 12 nt, Human
cccaauauuaua

SEQ ID NO: 2610862 - RNA, 23 nt, Human
cccaaugcacuuuguucuggcuc

SEQ ID NO: 2610863 - RNA, 19 nt, Human
cccaaucccagcuaccuca

SEQ ID NO: 2610864 - RNA, 23 nt, Human
cccaaauggaaaugggcagagca

SEQ ID NO: 2610865 - RNA, 19 nt, Human
cccaaauuugauugauuug

SEQ ID NO: 2610866 - RNA, 17 nt, Human
cccaagggccuggccug

SEQ ID NO: 2610867 - RNA, 16 nt, Human
cccaaauuugauugau

SEQ ID NO: 2610868 - RNA, 20 nt, Human
cccaacaccagccccugccc

SEQ ID NO: 2610869 - RNA, 17 nt, Human
cccaacaccagccccug

SEQ ID NO: 2610870 - RNA, 16 nt, Human
cccaacaccagccccu

SEQ ID NO: 2610871 - RNA, 19 nt, Human
cccaagggccuggccugag

SEQ ID NO: 2610872 - RNA, 18 nt, Human
cccaagggccuggccuga

SEQ ID NO: 2610873 - RNA, 23 nt, Human
cccaagggccuggccugagcugg

SEQ ID NO: 2610874 - RNA, 15 nt, Human
cccaaguggugccua

SEQ ID NO: 2610875 - RNA, 15 nt, Human
cccaagugugaacaa

SEQ ID NO: 2610876 - RNA, 23 nt, Human
cccaagugggggcagagggcaga

SEQ ID NO: 2610877 - RNA, 19 nt, Human
cccagccccuagcccagga

SEQ ID NO: 2610878 - RNA, 18 nt, Human
cccagccccuagcccagg

SEQ ID NO: 2610879 - RNA, 17 nt, Human
cccagccccuagcccag

SEQ ID NO: 2610880 - RNA, 14 nt, Human
cccagccccuagcc

SEQ ID NO: 2610881 - RNA, 15 nt, Human
cccagccccggggug

SEQ ID NO: 2610882 - RNA, 13 nt, Human
cccagccccuagc

SEQ ID NO: 2610883 - RNA, 11 nt, Human
cccagccccuu

SEQ ID NO: 2610884 - RNA, 23 nt, Human
cccagcaagugagagcugggugu

SEQ ID NO: 2610885 - RNA, 22 nt, Human
cccagcaagugagagcugggug

SEQ ID NO: 2610886 - RNA, 21 nt, Human
cccagcaagugagagcugggu

SEQ ID NO: 2610887 - RNA, 20 nt, Human
cccagcaagugagagcuggg

SEQ ID NO: 2610888 - RNA, 19 nt, Human
cccagcaagugagagcugg

SEQ ID NO: 2610889 - RNA, 21 nt, Human
cccagccggccucucuggccu

SEQ ID NO: 2610890 - RNA, 20 nt, Human
cccagccggccucucuggcc

SEQ ID NO: 2610891 - RNA, 19 nt, Human
cccagccggccucucuggc

SEQ ID NO: 2610892 - RNA, 18 nt, Human
cccagccggccucucugg

SEQ ID NO: 2610893 - RNA, 23 nt, Human
cccagccggccucucuggccucc

SEQ ID NO: 2610894 - RNA, 22 nt, Human
cccagccggccucucuggccuc

SEQ ID NO: 2610895 - RNA, 10 nt, Human
cccagccugg

SEQ ID NO: 2610896 - RNA, 12 nt, Human
cccagccugcua

SEQ ID NO: 2610897 - RNA, 17 nt, Human
cccagccggccucucug

SEQ ID NO: 2610898 - RNA, 16 nt, Human
cccagccggccucucu

SEQ ID NO: 2610899 - RNA, 15 nt, Human
cccagccggccucuc

SEQ ID NO: 2610900 - RNA, 14 nt, Human
cccagccggccucu

SEQ ID NO: 2610901 - RNA, 17 nt, Human
cccagccgcugcccggc

SEQ ID NO: 2610902 - RNA, 14 nt, Human
cccagccgcugccc

SEQ ID NO: 2610903 - RNA, 16 nt, Human
cccagcccuguggaag

SEQ ID NO: 2610904 - RNA, 21 nt, Human
cccagcccuggucucagcagc

SEQ ID NO: 2610905 - RNA, 15 nt, Human
cccagcccuguggaa

SEQ ID NO: 2610906 - RNA, 14 nt, Human
cccagccgcucgga

SEQ ID NO: 2610907 - RNA, 21 nt, Human
cccagcccuuugggaggcuga

SEQ ID NO: 2610908 - RNA, 22 nt, Human
cccagcccuuugggaggcugag

SEQ ID NO: 2610909 - RNA, 19 nt, Human
cccagcccuggucucagca

SEQ ID NO: 2610910 - RNA, 18 nt, Human
cccagcccuggucucagc

SEQ ID NO: 2610911 - RNA, 14 nt, Human
cccagcccuggucu

SEQ ID NO: 2610912 - RNA, 18 nt, Human
cccagcccuggcucugca

SEQ ID NO: 2610913 - RNA, 16 nt, Human
cccagcccuggcucug

SEQ ID NO: 2610914 - RNA, 15 nt, Human
cccagcccuggcucu

SEQ ID NO: 2610915 - RNA, 14 nt, Human
cccagcccuggcuc

SEQ ID NO: 2610916 - RNA, 20 nt, Human
cccagccccuagcccaggag

SEQ ID NO: 2610917 - RNA, 18 nt, Human
cccagccccuucugaccc

SEQ ID NO: 2610918 - RNA, 22 nt, Human
cccagccccuagcccaggagag

SEQ ID NO: 2610919 - RNA, 21 nt, Human
cccagcuacucagaagccuga

SEQ ID NO: 2610920 - RNA, 22 nt, Human
cccagcuacucagaagccugag

SEQ ID NO: 2610921 - RNA, 23 nt, Human
cccagcuacucagaagccugagg

SEQ ID NO: 2610922 - RNA, 21 nt, Human
cccagcuacucaagaggcuga

SEQ ID NO: 2610923 - RNA, 16 nt, Human
cccagcucccccggga

SEQ ID NO: 2610924 - RNA, 15 nt, Human
cccagcuccccaaga

SEQ ID NO: 2610925 - RNA, 17 nt, Human
cccagcuccggccuguc

SEQ ID NO: 2610926 - RNA, 15 nt, Human
cccagcucccuagga

SEQ ID NO: 2610927 - RNA, 19 nt, Human
cccagcucccccgggaggg

SEQ ID NO: 2610928 - RNA, 14 nt, Human
cccagcucuagaca

SEQ ID NO: 2610929 - RNA, 23 nt, Human
cccagcucuagacaacccugcaa

SEQ ID NO: 2610930 - RNA, 17 nt, Human
cccagcuaagaaccugg

SEQ ID NO: 2610931 - RNA, 18 nt, Human
cccagcuaagaaccugga

SEQ ID NO: 2610932 - RNA, 19 nt, Human
cccagcuaagaaccuggaa

SEQ ID NO: 2610933 - RNA, 20 nt, Human
cccagcuaagaaccuggaac

SEQ ID NO: 2610934 - RNA, 16 nt, Human
cccagcuaagaaccug

SEQ ID NO: 2610935 - RNA, 20 nt, Human
cccagcggccccucccacac

SEQ ID NO: 2610936 - RNA, 19 nt, Human
cccagcggccccucccaca

SEQ ID NO: 2610937 - RNA, 18 nt, Human
cccagcggccccucccac

SEQ ID NO: 2610938 - RNA, 14 nt, Human
cccagcuaauuuuu

SEQ ID NO: 2610939 - RNA, 23 nt, Human
cccagcuaaucuguagggcugga

SEQ ID NO: 2610940 - RNA, 20 nt, Human
cccagcuaaucuguagggcu

SEQ ID NO: 2610941 - RNA, 19 nt, Human
cccagcuaaucuguagggc

SEQ ID NO: 2610942 - RNA, 18 nt, Human
cccagcuaaucuguaggg

SEQ ID NO: 2610943 - RNA, 22 nt, Human
cccagcuaagaaccuggaacuu

SEQ ID NO: 2610944 - RNA, 17 nt, Human
cccagcuacucagaagc

SEQ ID NO: 2610945 - RNA, 22 nt, Human
cccagcuaccucaaccaaugcc

SEQ ID NO: 2610946 - RNA, 22 nt, Human
cccagcuacccuuuuucuccag

SEQ ID NO: 2610947 - RNA, 14 nt, Human
cccagcuaccucaa

SEQ ID NO: 2610948 - RNA, 14 nt, Human
cccagccuggccca

SEQ ID NO: 2610949 - RNA, 13 nt, Human
cccagccuggccc

SEQ ID NO: 2610950 - RNA, 12 nt, Human
cccagccuggcc

SEQ ID NO: 2610951 - RNA, 15 nt, Human
cccagcgagcccugg

SEQ ID NO: 2610952 - RNA, 18 nt, Human
cccagcgagcccuggugg

SEQ ID NO: 2610953 - RNA, 17 nt, Human
cccagcgagcccuggug

SEQ ID NO: 2610954 - RNA, 23 nt, Human
cccagcgagcccugguggcagug

SEQ ID NO: 2610955 - RNA, 19 nt, Human
cccagcgagcccugguggc

SEQ ID NO: 2610956 - RNA, 16 nt, Human
cccagccuggcccagc

SEQ ID NO: 2610957 - RNA, 15 nt, Human
cccagccuggcccag

SEQ ID NO: 2610958 - RNA, 14 nt, Human
cccagcggccccuc

SEQ ID NO: 2610959 - RNA, 15 nt, Human
cccagcggccccucc

SEQ ID NO: 2610960 - RNA, 23 nt, Human
cccagggucuucccuaccucagg

SEQ ID NO: 2610961 - RNA, 16 nt, Human
cccagggucuucccua

SEQ ID NO: 2610962 - RNA, 18 nt, Human
cccagggucuucccuacc

SEQ ID NO: 2610963 - RNA, 23 nt, Human
cccaggguagcccgccugccagu

SEQ ID NO: 2610964 - RNA, 22 nt, Human
cccaggguagcccgccugccag

SEQ ID NO: 2610965 - RNA, 21 nt, Human
cccaggguagcccgccugcca

SEQ ID NO: 2610966 - RNA, 19 nt, Human
cccaggguagcccgccugc

SEQ ID NO: 2610967 - RNA, 15 nt, Human
cccagggucuucccu

SEQ ID NO: 2610968 - RNA, 17 nt, Human
cccaggguagcccgccu

SEQ ID NO: 2610969 - RNA, 16 nt, Human
cccaggguagcccgcc

SEQ ID NO: 2610970 - RNA, 15 nt, Human
cccaggguagcccgc

SEQ ID NO: 2610971 - RNA, 13 nt, Human
cccaggguagccc

SEQ ID NO: 2610972 - RNA, 23 nt, Human
cccaggggugcccccuccucucc

SEQ ID NO: 2610973 - RNA, 22 nt, Human
cccaggggugcccccuccucuc

SEQ ID NO: 2610974 - RNA, 21 nt, Human
cccaggggugcccccuccucu

SEQ ID NO: 2610975 - RNA, 19 nt, Human
cccaggggugcccccuccu

SEQ ID NO: 2610976 - RNA, 18 nt, Human
cccaggggugcccccucc

SEQ ID NO: 2610977 - RNA, 17 nt, Human
cccaggggugcccccuc

SEQ ID NO: 2610978 - RNA, 20 nt, Human
cccaggggucccagccaccc

SEQ ID NO: 2610979 - RNA, 18 nt, Human
cccaggggcccacaggga

SEQ ID NO: 2610980 - RNA, 21 nt, Human
cccaggggcuggcuucaggag

SEQ ID NO: 2610981 - RNA, 15 nt, Human
cccaggggucccagc

SEQ ID NO: 2610982 - RNA, 16 nt, Human
cccaggggucccagcc

SEQ ID NO: 2610983 - RNA, 18 nt, Human
cccaggggucccagccac

SEQ ID NO: 2610984 - RNA, 19 nt, Human
cccaggggucccagccacc

SEQ ID NO: 2610985 - RNA, 19 nt, Human
cccaggggagcccuccacg

SEQ ID NO: 2610986 - RNA, 22 nt, Human
cccaggggcauguauuggccug

SEQ ID NO: 2610987 - RNA, 17 nt, Human
cccaggggcccacaggg

SEQ ID NO: 2610988 - RNA, 23 nt, Human
cccaggggcauguauuggccugg

SEQ ID NO: 2610989 - RNA, 15 nt, Human
cccaggggagagggu

SEQ ID NO: 2610990 - RNA, 21 nt, Human
cccaggggagagggucuggag

SEQ ID NO: 2610991 - RNA, 22 nt, Human
cccaggggagagggucuggaga

SEQ ID NO: 2610992 - RNA, 23 nt, Human
cccaggggagagggucuggagaa

SEQ ID NO: 2610993 - RNA, 16 nt, Human
cccaggggagcccucc

SEQ ID NO: 2610994 - RNA, 15 nt, Human
cccaggggagcccuc

SEQ ID NO: 2610995 - RNA, 14 nt, Human
cccaggggagcccu

SEQ ID NO: 2610996 - RNA, 24 nt, Human
cccaggggagagggucuggagaag

SEQ ID NO: 2610997 - RNA, 23 nt, Human
cccaggcgggagcgguggcccug

SEQ ID NO: 2610998 - RNA, 22 nt, Human
cccaggcgggagcgguggcccu

SEQ ID NO: 2610999 - RNA, 13 nt, Human
cccaggcgggagc

SEQ ID NO: 2611000 - RNA, 14 nt, Human
cccaggcugagccu

SEQ ID NO: 2611001 - RNA, 17 nt, Human
cccaggggaccacaccu

SEQ ID NO: 2611002 - RNA, 13 nt, Human
cccaggggagagg

SEQ ID NO: 2611003 - RNA, 18 nt, Human
cccaggcgccccuucccc

SEQ ID NO: 2611004 - RNA, 16 nt, Human
cccaggccugccuguu

SEQ ID NO: 2611005 - RNA, 15 nt, Human
cccaggccugccugu

SEQ ID NO: 2611006 - RNA, 13 nt, Human
cccaggccucugu

SEQ ID NO: 2611007 - RNA, 18 nt, Human
cccaggccuccuacagcu

SEQ ID NO: 2611008 - RNA, 17 nt, Human
cccaggccuccuacagc

SEQ ID NO: 2611009 - RNA, 23 nt, Human
cccaggccccgaggacccagacc

SEQ ID NO: 2611010 - RNA, 22 nt, Human
cccaggccccgaggacccagac

SEQ ID NO: 2611011 - RNA, 14 nt, Human
cccaggccgcagcu

SEQ ID NO: 2611012 - RNA, 13 nt, Human
cccaggccgcagc

SEQ ID NO: 2611013 - RNA, 18 nt, Human
cccaggccgagaagccag

SEQ ID NO: 2611014 - RNA, 21 nt, Human
cccaggccgcagcucuugccc

SEQ ID NO: 2611015 - RNA, 17 nt, Human
cccaggccgcagcucuu

SEQ ID NO: 2611016 - RNA, 16 nt, Human
cccaggccgcagcucu

SEQ ID NO: 2611017 - RNA, 21 nt, Human
cccaggccgggguggagcaug

SEQ ID NO: 2611018 - RNA, 18 nt, Human
cccaggccgcagcucuug

SEQ ID NO: 2611019 - RNA, 15 nt, Human
cccaggccguggcug

SEQ ID NO: 2611020 - RNA, 18 nt, Human
cccaguccccaccccugc

SEQ ID NO: 2611021 - RNA, 15 nt, Human
cccaguccccacccc

SEQ ID NO: 2611022 - RNA, 14 nt, Human
cccaguccccaccc

SEQ ID NO: 2611023 - RNA, 13 nt, Human
cccaguccccacc

SEQ ID NO: 2611024 - RNA, 22 nt, Human
cccagucagccucucucccagu

SEQ ID NO: 2611025 - RNA, 23 nt, Human
cccaguccaaauguccuccagaa

SEQ ID NO: 2611026 - RNA, 21 nt, Human
cccagucagccucucucccag

SEQ ID NO: 2611027 - RNA, 20 nt, Human
cccagucagccucucuccca

SEQ ID NO: 2611028 - RNA, 19 nt, Human
cccaguccaaauguccucc

SEQ ID NO: 2611029 - RNA, 19 nt, Human
cccagucagccucucuccc

SEQ ID NO: 2611030 - RNA, 18 nt, Human
cccagucagccucucucc

SEQ ID NO: 2611031 - RNA, 17 nt, Human
cccagucagccucucuc

SEQ ID NO: 2611032 - RNA, 16 nt, Human
cccagucagccucucu

SEQ ID NO: 2611033 - RNA, 15 nt, Human
cccagucagccucuc

SEQ ID NO: 2611034 - RNA, 14 nt, Human
cccagucagccucu

SEQ ID NO: 2611035 - RNA, 13 nt, Human
cccagucagccuc

SEQ ID NO: 2611036 - RNA, 16 nt, Human
cccaguagaccuuguu

SEQ ID NO: 2611037 - RNA, 23 nt, Human
cccaguauucuagguagugcccu

SEQ ID NO: 2611038 - RNA, 20 nt, Human
cccagucuggaaugcagugg

SEQ ID NO: 2611039 - RNA, 20 nt, Human
cccaguccccaccccugccc

SEQ ID NO: 2611040 - RNA, 19 nt, Human
cccaguccccaccccugcc

SEQ ID NO: 2611041 - RNA, 17 nt, Human
cccagucuguuccccau

SEQ ID NO: 2611042 - RNA, 12 nt, Human
cccagugacacu

SEQ ID NO: 2611043 - RNA, 13 nt, Human
cccagugacacuu

SEQ ID NO: 2611044 - RNA, 18 nt, Human
cccagugacacuucagag

SEQ ID NO: 2611045 - RNA, 13 nt, Human
cccagugcccaca

SEQ ID NO: 2611046 - RNA, 21 nt, Human
cccagugagcacucccaaguc

SEQ ID NO: 2611047 - RNA, 19 nt, Human
cccagugagcacucccaag

SEQ ID NO: 2611048 - RNA, 19 nt, Human
cccagugagauuacagagg

SEQ ID NO: 2611049 - RNA, 19 nt, Human
cccagugacacuucagaga

SEQ ID NO: 2611050 - RNA, 22 nt, Human
cccagugacacuucagagagcu

SEQ ID NO: 2611051 - RNA, 23 nt, Human
cccaggugcuaggaacacuccuu

SEQ ID NO: 2611052 - RNA, 18 nt, Human
cccagguggcugacccag

SEQ ID NO: 2611053 - RNA, 19 nt, Human
cccagguggcugacccagu

SEQ ID NO: 2611054 - RNA, 22 nt, Human
cccagguggcugacccaguccc

SEQ ID NO: 2611055 - RNA, 23 nt, Human
cccagguggcugacccagucccu

SEQ ID NO: 2611056 - RNA, 16 nt, Human
cccagguggcugaccc

SEQ ID NO: 2611057 - RNA, 13 nt, Human
cccaggugccagu

SEQ ID NO: 2611058 - RNA, 22 nt, Human
cccaggugcuaggaacacuccu

SEQ ID NO: 2611059 - RNA, 22 nt, Human
cccaggguggacuuagaaagca

SEQ ID NO: 2611060 - RNA, 17 nt, Human
cccagguccagcucugg

SEQ ID NO: 2611061 - RNA, 18 nt, Human
cccagguccagcucugga

SEQ ID NO: 2611062 - RNA, 13 nt, Human
cccagguccucac

SEQ ID NO: 2611063 - RNA, 20 nt, Human
cccagguccucugauaccca

SEQ ID NO: 2611064 - RNA, 15 nt, Human
cccagguccucugau

SEQ ID NO: 2611065 - RNA, 22 nt, Human
cccaggccccugccacccuggg

SEQ ID NO: 2611066 - RNA, 21 nt, Human
cccaggccccugccacccugg

SEQ ID NO: 2611067 - RNA, 18 nt, Human
cccaggccccugccaccc

SEQ ID NO: 2611068 - RNA, 16 nt, Human
cccaggccccugccac

SEQ ID NO: 2611069 - RNA, 11 nt, Human
cccaggccccu

SEQ ID NO: 2611070 - RNA, 13 nt, Human
cccaggccccagg

SEQ ID NO: 2611071 - RNA, 17 nt, Human
cccaggccccaggaagc

SEQ ID NO: 2611072 - RNA, 18 nt, Human
cccaggccccaggaagcc

SEQ ID NO: 2611073 - RNA, 21 nt, Human
cccaggccaucuuccaggugg

SEQ ID NO: 2611074 - RNA, 20 nt, Human
cccaggccaucuuccaggug

SEQ ID NO: 2611075 - RNA, 18 nt, Human
cccaggccaucuuccagg

SEQ ID NO: 2611076 - RNA, 14 nt, Human
cccaggccaucuuc

SEQ ID NO: 2611077 - RNA, 22 nt, Human
cccaggccaucuuccagguggg

SEQ ID NO: 2611078 - RNA, 20 nt, Human
cccaggccaggccaccagga

SEQ ID NO: 2611079 - RNA, 17 nt, Human
cccaggccaggccacca

SEQ ID NO: 2611080 - RNA, 22 nt, Human
cccaggccaggccaccaggaug

SEQ ID NO: 2611081 - RNA, 18 nt, Human
cccaggccaggcuccuuc

SEQ ID NO: 2611082 - RNA, 19 nt, Human
cccaggccaggcuccuucc

SEQ ID NO: 2611083 - RNA, 21 nt, Human
cccaggccaggcuccuuccug

SEQ ID NO: 2611084 - RNA, 14 nt, Human
cccaggccaguaag

SEQ ID NO: 2611085 - RNA, 23 nt, Human
cccaggccaggcuccuuccuguc

SEQ ID NO: 2611086 - RNA, 13 nt, Human
cccaggccaggcc

SEQ ID NO: 2611087 - RNA, 14 nt, Human
cccaggcauugcca

SEQ ID NO: 2611088 - RNA, 21 nt, Human
cccaggcauugccaagggcuu

SEQ ID NO: 2611089 - RNA, 23 nt, Human
cccaggcauuccccaggaggcca

SEQ ID NO: 2611090 - RNA, 22 nt, Human
cccaggcauuccccaggaggcc

SEQ ID NO: 2611091 - RNA, 21 nt, Human
cccaggcauuccccaggaggc

SEQ ID NO: 2611092 - RNA, 20 nt, Human
cccaggcauuccccaggagg

SEQ ID NO: 2611093 - RNA, 17 nt, Human
cccaggcaggucuugaa

SEQ ID NO: 2611094 - RNA, 23 nt, Human
cccaggcagggccaacccuucuc

SEQ ID NO: 2611095 - RNA, 15 nt, Human
cccaggcagggccaa

SEQ ID NO: 2611096 - RNA, 18 nt, Human
cccaggcauuccccagga

SEQ ID NO: 2611097 - RNA, 20 nt, Human
cccaggcaaaucaguuacua

SEQ ID NO: 2611098 - RNA, 23 nt, Human
cccaggaucagauugcaugugac

SEQ ID NO: 2611099 - RNA, 14 nt, Human
cccaggcaggccac

SEQ ID NO: 2611100 - RNA, 13 nt, Human
cccaggcaggcug

SEQ ID NO: 2611101 - RNA, 13 nt, Human
cccaggcaggucu

SEQ ID NO: 2611102 - RNA, 11 nt, Human
cccaggcaggu

SEQ ID NO: 2611103 - RNA, 22 nt, Human
cccaggaguuugaggcugcagc

SEQ ID NO: 2611104 - RNA, 23 nt, Human
cccaggaguuugaggcugcagcg

SEQ ID NO: 2611105 - RNA, 18 nt, Human
cccaggagccccgaggcc

SEQ ID NO: 2611106 - RNA, 12 nt, Human
cccagcucuccc

SEQ ID NO: 2611107 - RNA, 13 nt, Human
cccagcucucccu

SEQ ID NO: 2611108 - RNA, 14 nt, Human
cccagcucucccuc

SEQ ID NO: 2611109 - RNA, 15 nt, Human
cccagcucucccucu

SEQ ID NO: 2611110 - RNA, 16 nt, Human
cccagcucucccucug

SEQ ID NO: 2611111 - RNA, 17 nt, Human
cccagcucucccucugg

SEQ ID NO: 2611112 - RNA, 18 nt, Human
cccagcucucccucuggc

SEQ ID NO: 2611113 - RNA, 19 nt, Human
cccagcucucccucuggcc

SEQ ID NO: 2611114 - RNA, 17 nt, Human
cccaggagcugcccaga

SEQ ID NO: 2611115 - RNA, 21 nt, Human
cccaggagccccgaggccuuc

SEQ ID NO: 2611116 - RNA, 22 nt, Human
cccaggaggccagccuugacca

SEQ ID NO: 2611117 - RNA, 13 nt, Human
cccaggaggccag

SEQ ID NO: 2611118 - RNA, 14 nt, Human
cccaggagggaggg

SEQ ID NO: 2611119 - RNA, 18 nt, Human
cccaggagggagggggcu

SEQ ID NO: 2611120 - RNA, 22 nt, Human
cccaggaguggaggaggccugg

SEQ ID NO: 2611121 - RNA, 23 nt, Human
cccaggagguggagguugcagug

SEQ ID NO: 2611122 - RNA, 24 nt, Human
cccaggaguucgaggcugcaguca

SEQ ID NO: 2611123 - RNA, 22 nt, Human
ccccucagggucccugguggca

SEQ ID NO: 2611124 - RNA, 17 nt, Human
ccccaggaggccagccu

SEQ ID NO: 2611125 - RNA, 14 nt, Human
cccaguggcugcug

SEQ ID NO: 2611126 - RNA, 20 nt, Human
cccagugcccacaggaucag

SEQ ID NO: 2611127 - RNA, 15 nt, Human
cccagugcccacagg

SEQ ID NO: 2611128 - RNA, 18 nt, Human
cccagugccgagaaggaa

SEQ ID NO: 2611129 - RNA, 17 nt, Human
cccagugccgagaagga

SEQ ID NO: 2611130 - RNA, 16 nt, Human
cccaugcugcccugug

SEQ ID NO: 2611131 - RNA, 15 nt, Human
cccaugcugcccugu

SEQ ID NO: 2611132 - RNA, 16 nt, Human
cccaguggccacucag

SEQ ID NO: 2611133 - RNA, 22 nt, Human
cccagugccaagcacagugccu

SEQ ID NO: 2611134 - RNA, 14 nt, Human
cccagugcacccac

SEQ ID NO: 2611135 - RNA, 15 nt, Human
cccagugcacccacu

SEQ ID NO: 2611136 - RNA, 18 nt, Human
cccaugcugcccugugag

SEQ ID NO: 2611137 - RNA, 17 nt, Human
cccaugcugcccuguga

SEQ ID NO: 2611138 - RNA, 13 nt, Human
cccauggagccag

SEQ ID NO: 2611139 - RNA, 14 nt, Human
cccauggagcccca

SEQ ID NO: 2611140 - RNA, 13 nt, Human
cccauggagcccc

SEQ ID NO: 2611141 - RNA, 19 nt, Human
cccauggagccagcucccu

SEQ ID NO: 2611142 - RNA, 19 nt, Human
cccaguggccucaacccuc

SEQ ID NO: 2611143 - RNA, 21 nt, Human
cccaguggccucaacccuccc

SEQ ID NO: 2611144 - RNA, 22 nt, Human
cccaguggccacucagcuuccu

SEQ ID NO: 2611145 - RNA, 17 nt, Human
cccaguggccacucagc

SEQ ID NO: 2611146 - RNA, 13 nt, Human
cccaguggccuca

SEQ ID NO: 2611147 - RNA, 18 nt, Human
cccaguggccucaacccu

SEQ ID NO: 2611148 - RNA, 14 nt, Human
cccauuccugggaa

SEQ ID NO: 2611149 - RNA, 19 nt, Human
cccauucuacacagagcag

SEQ ID NO: 2611150 - RNA, 18 nt, Human
cccauucuacacagagca

SEQ ID NO: 2611151 - RNA, 18 nt, Human
cccauuccugaagaacca

SEQ ID NO: 2611152 - RNA, 21 nt, Human
cccauucgguguggugcagug

SEQ ID NO: 2611153 - RNA, 20 nt, Human
cccaugggcacugcugggug

SEQ ID NO: 2611154 - RNA, 18 nt, Human
cccaugggcacugcuggg

SEQ ID NO: 2611155 - RNA, 17 nt, Human
cccaugggcacugcugg

SEQ ID NO: 2611156 - RNA, 16 nt, Human
cccaugggcacugcug

SEQ ID NO: 2611157 - RNA, 21 nt, Human
cccaugggcacugcugggugg

SEQ ID NO: 2611158 - RNA, 14 nt, Human
cccaugggcucuga

SEQ ID NO: 2611159 - RNA, 21 nt, Human
cccaugggaagacgaggcccu

SEQ ID NO: 2611160 - RNA, 17 nt, Human
cccauggcuuaaugcuu

SEQ ID NO: 2611161 - RNA, 21 nt, Human
cccauggagccccagcccccu

SEQ ID NO: 2611162 - RNA, 15 nt, Human
cccaugggcacugcu

SEQ ID NO: 2611163 - RNA, 22 nt, Human
cccaugggaagacgaggcccuc

SEQ ID NO: 2611164 - RNA, 17 nt, Human
cccauggcccucccagu

SEQ ID NO: 2611165 - RNA, 16 nt, Human
cccauggagccccagc

SEQ ID NO: 2611166 - RNA, 15 nt, Human
cccauggagccccag

SEQ ID NO: 2611167 - RNA, 13 nt, Human
ccccaaggcugcg

SEQ ID NO: 2611168 - RNA, 17 nt, Human
ccccaagcuguuuucuu

SEQ ID NO: 2611169 - RNA, 15 nt, Human
ccccaaggagggaga

SEQ ID NO: 2611170 - RNA, 13 nt, Human
ccccaagccuggc

SEQ ID NO: 2611171 - RNA, 14 nt, Human
ccccaagccuggca

SEQ ID NO: 2611172 - RNA, 14 nt, Human
ccccaagcuguuuu

SEQ ID NO: 2611173 - RNA, 16 nt, Human
ccccaagcuguuuucu

SEQ ID NO: 2611174 - RNA, 16 nt, Human
ccccaagaaagccuca

SEQ ID NO: 2611175 - RNA, 23 nt, Human
ccccaagacuugguguccuuucc

SEQ ID NO: 2611176 - RNA, 20 nt, Human
ccccacccaagggccuggcc

SEQ ID NO: 2611177 - RNA, 14 nt, Human
ccccacccaagggc

SEQ ID NO: 2611178 - RNA, 20 nt, Human
ccccacccaagcuuggcagc

SEQ ID NO: 2611179 - RNA, 19 nt, Human
ccccacccaagcuuggcag

SEQ ID NO: 2611180 - RNA, 18 nt, Human
ccccacccaagcuuggca

SEQ ID NO: 2611181 - RNA, 16 nt, Human
ccccacccaagcuugg

SEQ ID NO: 2611182 - RNA, 17 nt, Human
ccccacccccuccccag

SEQ ID NO: 2611183 - RNA, 23 nt, Human
ccccacccccuccccaggggaga

SEQ ID NO: 2611184 - RNA, 12 nt, Human
ccccacccccuu

SEQ ID NO: 2611185 - RNA, 17 nt, Human
ccccacccccuucagug

SEQ ID NO: 2611186 - RNA, 23 nt, Human
ccccaccccggggacccugugac

SEQ ID NO: 2611187 - RNA, 19 nt, Human
ccccaccccggggacccug

SEQ ID NO: 2611188 - RNA, 21 nt, Human
ccccacccccuucagugccca

SEQ ID NO: 2611189 - RNA, 12 nt, Human
ccccaacagugu

SEQ ID NO: 2611190 - RNA, 19 nt, Human
ccccaacaucucccuccca

SEQ ID NO: 2611191 - RNA, 22 nt, Human
ccccaacaucucccucccacau

SEQ ID NO: 2611192 - RNA, 20 nt, Human
ccccaacagcgacauagccc

SEQ ID NO: 2611193 - RNA, 22 nt, Human
ccccaacacugugcccuggugg

SEQ ID NO: 2611194 - RNA, 22 nt, Human
ccccaacagcgacauagcccau

SEQ ID NO: 2611195 - RNA, 21 nt, Human
ccccaacacugugcccuggug

SEQ ID NO: 2611196 - RNA, 20 nt, Human
ccccaacacugugcccuggu

SEQ ID NO: 2611197 - RNA, 19 nt, Human
ccccaacacugugcccugg

SEQ ID NO: 2611198 - RNA, 18 nt, Human
ccccaacacugugcccug

SEQ ID NO: 2611199 - RNA, 17 nt, Human
ccccaacacugugcccu

SEQ ID NO: 2611200 - RNA, 16 nt, Human
ccccaacacugugccc

SEQ ID NO: 2611201 - RNA, 19 nt, Human
cccauucucucuccugucc

SEQ ID NO: 2611202 - RNA, 21 nt, Human
cccauucugccuccauucuga

SEQ ID NO: 2611203 - RNA, 22 nt, Human
ccccaaauggaaaugggcagag

SEQ ID NO: 2611204 - RNA, 13 nt, Human
cccauucugccug

SEQ ID NO: 2611205 - RNA, 17 nt, Human
cccauucucucuccugu

SEQ ID NO: 2611206 - RNA, 18 nt, Human
cccauucucucuccuguc

SEQ ID NO: 2611207 - RNA, 20 nt, Human
cccauucucucuccugucca

SEQ ID NO: 2611208 - RNA, 16 nt, Human
cggccuccauccugag

SEQ ID NO: 2611209 - RNA, 17 nt, Human
cggccuccauccugagg

SEQ ID NO: 2611210 - RNA, 22 nt, Human
cggccccugcauccccuuggcu

SEQ ID NO: 2611211 - RNA, 15 nt, Human
cggccccucccgccc

SEQ ID NO: 2611212 - RNA, 17 nt, Human
cggccccgucuguggcu

SEQ ID NO: 2611213 - RNA, 19 nt, Human
cggccccggccccagccag

SEQ ID NO: 2611214 - RNA, 15 nt, Human
cggccccggccccag

SEQ ID NO: 2611215 - RNA, 14 nt, Human
cggccccggcccca

SEQ ID NO: 2611216 - RNA, 18 nt, Human
cggcccccuggucucugg

SEQ ID NO: 2611217 - RNA, 17 nt, Human
cggcccccuccaucggg

SEQ ID NO: 2611218 - RNA, 15 nt, Human
cggcccccuggucuc

SEQ ID NO: 2611219 - RNA, 20 nt, Human
cggcccccgcgcgcgucccc

SEQ ID NO: 2611220 - RNA, 22 nt, Human
cggccccagccagaguuccugc

SEQ ID NO: 2611221 - RNA, 16 nt, Human
cggccccagccagagu

SEQ ID NO: 2611222 - RNA, 14 nt, Human
cggccccagccaga

SEQ ID NO: 2611223 - RNA, 12 nt, Human
cggccccagcca

SEQ ID NO: 2611224 - RNA, 21 nt, Human
cggcccccagagcgccccucc

SEQ ID NO: 2611225 - RNA, 18 nt, Human
cggcccccagagcgcccc

SEQ ID NO: 2611226 - RNA, 17 nt, Human
cggcccaggauggcuuu

SEQ ID NO: 2611227 - RNA, 19 nt, Human
cggcaggggccuggagauc

SEQ ID NO: 2611228 - RNA, 18 nt, Human
cggcaggggccuggagau

SEQ ID NO: 2611229 - RNA, 17 nt, Human
cggcaggggccuggaga

SEQ ID NO: 2611230 - RNA, 15 nt, Human
cggcaggggccugga

SEQ ID NO: 2611231 - RNA, 20 nt, Human
cggcccauccccaggcaccu

SEQ ID NO: 2611232 - RNA, 20 nt, Human
cggcagguucacaggcgagg

SEQ ID NO: 2611233 - RNA, 17 nt, Human
cggcagguucacaggcg

SEQ ID NO: 2611234 - RNA, 16 nt, Human
cggcaguucugggugc

SEQ ID NO: 2611235 - RNA, 20 nt, Human
cggcaguucugggugcuccc

SEQ ID NO: 2611236 - RNA, 18 nt, Human
cggcuggccuggccccuc

SEQ ID NO: 2611237 - RNA, 14 nt, Human
cggcuggccuggcc

SEQ ID NO: 2611238 - RNA, 16 nt, Human
cggcuggccuggcccc

SEQ ID NO: 2611239 - RNA, 15 nt, Human
cggcuggccuggccc

SEQ ID NO: 2611240 - RNA, 13 nt, Human
cggccuggcuccu

SEQ ID NO: 2611241 - RNA, 19 nt, Human
cggccugcucccagcagcc

SEQ ID NO: 2611242 - RNA, 18 nt, Human
cggccugcucccagcagc

SEQ ID NO: 2611243 - RNA, 15 nt, Human
cggccugcucccagc

SEQ ID NO: 2611244 - RNA, 12 nt, Human
cggccuguccuc

SEQ ID NO: 2611245 - RNA, 15 nt, Human
cggccuguccuccaa

SEQ ID NO: 2611246 - RNA, 15 nt, Human
cggccuuuggcuuca

SEQ ID NO: 2611247 - RNA, 21 nt, Human
cggccuguccuccaacaccaa

SEQ ID NO: 2611248 - RNA, 15 nt, Human
cggccugguguucug

SEQ ID NO: 2611249 - RNA, 19 nt, Human
cggccuucaacugaaaaga

SEQ ID NO: 2611250 - RNA, 13 nt, Human
cggccugcuccca

SEQ ID NO: 2611251 - RNA, 14 nt, Human
cggccugcucccag

SEQ ID NO: 2611252 - RNA, 17 nt, Human
cggccugaugcucccuc

SEQ ID NO: 2611253 - RNA, 19 nt, Human
cggccugaugcucccuccc

SEQ ID NO: 2611254 - RNA, 23 nt, Human
cggccugaugcucccuccccugc

SEQ ID NO: 2611255 - RNA, 14 nt, Human
cggccucccaaagu

SEQ ID NO: 2611256 - RNA, 22 nt, Human
cgggagccugaucaccugcccu

SEQ ID NO: 2611257 - RNA, 21 nt, Human
cgggagccugaucaccugccc

SEQ ID NO: 2611258 - RNA, 20 nt, Human
cgggaggauguucugggaca

SEQ ID NO: 2611259 - RNA, 22 nt, Human
cgggaggcggagcuugcaguga

SEQ ID NO: 2611260 - RNA, 19 nt, Human
cgggaggcugagacaggag

SEQ ID NO: 2611261 - RNA, 18 nt, Human
cgggaggcugagacagga

SEQ ID NO: 2611262 - RNA, 17 nt, Human
cgggaggcugagacagg

SEQ ID NO: 2611263 - RNA, 16 nt, Human
cgggaggcugagacag

SEQ ID NO: 2611264 - RNA, 20 nt, Human
cgggagcgguggcccugucc

SEQ ID NO: 2611265 - RNA, 17 nt, Human
cgggagcgguggcccug

SEQ ID NO: 2611266 - RNA, 13 nt, Human
cgggaggcugaga

SEQ ID NO: 2611267 - RNA, 16 nt, Human
cggcugucucagacuc

SEQ ID NO: 2611268 - RNA, 23 nt, Human
cggcugguuuuguaagaugcugg

SEQ ID NO: 2611269 - RNA, 22 nt, Human
cggcugguuuuguaagaugcug

SEQ ID NO: 2611270 - RNA, 17 nt, Human
cggcugguuuuguaaga

SEQ ID NO: 2611271 - RNA, 17 nt, Human
cggcugggcacacgccu

SEQ ID NO: 2611272 - RNA, 16 nt, Human
cggcugggcacacgcc

SEQ ID NO: 2611273 - RNA, 20 nt, Human
cggcugggcacacgccuccc

SEQ ID NO: 2611274 - RNA, 12 nt, Human
cggcugggcaca

SEQ ID NO: 2611275 - RNA, 15 nt, Human
cgggcagcacagcaa

SEQ ID NO: 2611276 - RNA, 19 nt, Human
cgggaggggcccgcuugcc

SEQ ID NO: 2611277 - RNA, 17 nt, Human
cgggaggucgaggcagg

SEQ ID NO: 2611278 - RNA, 16 nt, Human
cgggaggucgaggcag

SEQ ID NO: 2611279 - RNA, 20 nt, Human
cgggaggcugagacaggaga

SEQ ID NO: 2611280 - RNA, 23 nt, Human
cgggaggcugagacaggagaauc

SEQ ID NO: 2611281 - RNA, 15 nt, Human
cgggaggggcccgcu

SEQ ID NO: 2611282 - RNA, 14 nt, Human
cgggaggggcccgc

SEQ ID NO: 2611283 - RNA, 12 nt, Human
cgggcaugacac

SEQ ID NO: 2611284 - RNA, 15 nt, Human
cgggcaugacacgaa

SEQ ID NO: 2611285 - RNA, 15 nt, Human
cgggcaugggcacuc

SEQ ID NO: 2611286 - RNA, 15 nt, Human
cggggagggugacag

SEQ ID NO: 2611287 - RNA, 17 nt, Human
cggggaguuucuuuccu

SEQ ID NO: 2611288 - RNA, 23 nt, Human
cggggaggccaagugcaggcugg

SEQ ID NO: 2611289 - RNA, 22 nt, Human
cggggagggugacaguggccgc

SEQ ID NO: 2611290 - RNA, 13 nt, Human
cggaccccagcug

SEQ ID NO: 2611291 - RNA, 12 nt, Human
cggaccccagcu

SEQ ID NO: 2611292 - RNA, 15 nt, Human
cggacacuccuagag

SEQ ID NO: 2611293 - RNA, 14 nt, Human
cggacacuccuaga

SEQ ID NO: 2611294 - RNA, 16 nt, Human
cggacacuccuagaga

SEQ ID NO: 2611295 - RNA, 14 nt, Human
cggaccuuucagcu

SEQ ID NO: 2611296 - RNA, 22 nt, Human
cggaccccagcugugagccuug

SEQ ID NO: 2611297 - RNA, 21 nt, Human
cggaccuuggcagcccaggcc

SEQ ID NO: 2611298 - RNA, 20 nt, Human
cggaccccagcugugagccu

SEQ ID NO: 2611299 - RNA, 14 nt, Human
cggaccccagcugu

SEQ ID NO: 2611300 - RNA, 16 nt, Human
cggacguuuccaucag

SEQ ID NO: 2611301 - RNA, 15 nt, Human
cggacguuuccauca

SEQ ID NO: 2611302 - RNA, 16 nt, Human
cggacguuccagccgg

SEQ ID NO: 2611303 - RNA, 15 nt, Human
cggacguuccagccg

SEQ ID NO: 2611304 - RNA, 14 nt, Human
cggacguuccagcc

SEQ ID NO: 2611305 - RNA, 15 nt, Human
cggaucuguugcaaa

SEQ ID NO: 2611306 - RNA, 16 nt, Human
cggaucugagaaucuu

SEQ ID NO: 2611307 - RNA, 14 nt, Human
cggaucugagaauc

SEQ ID NO: 2611308 - RNA, 19 nt, Human
cggaucuuuggacagaagc

SEQ ID NO: 2611309 - RNA, 21 nt, Human
cggacuaagccuaccugcucu

SEQ ID NO: 2611310 - RNA, 20 nt, Human
cggacuaagccuaccugcuc

SEQ ID NO: 2611311 - RNA, 18 nt, Human
cggacguuuccaucaggu

SEQ ID NO: 2611312 - RNA, 16 nt, Human
cggaucuuuggacaga

SEQ ID NO: 2611313 - RNA, 14 nt, Human
cggauccugggugg

SEQ ID NO: 2611314 - RNA, 23 nt, Human
cggcaaccccaguucugcuccuc

SEQ ID NO: 2611315 - RNA, 22 nt, Human
cggcaaccccaguucugcuccu

SEQ ID NO: 2611316 - RNA, 21 nt, Human
cggcaaccccaguucugcucc

SEQ ID NO: 2611317 - RNA, 20 nt, Human
cggcaaccccaguucugcuc

SEQ ID NO: 2611318 - RNA, 19 nt, Human
cggcaaccccaguucugcu

SEQ ID NO: 2611319 - RNA, 17 nt, Human
cggcaaccccaguucug

SEQ ID NO: 2611320 - RNA, 16 nt, Human
cggauuuauuuuucca

SEQ ID NO: 2611321 - RNA, 15 nt, Human
cggauuuggggugga

SEQ ID NO: 2611322 - RNA, 12 nt, Human
cggcaacaucaa

SEQ ID NO: 2611323 - RNA, 22 nt, Human
cggauuauuuuuucagaccgaa

SEQ ID NO: 2611324 - RNA, 20 nt, Human
cggauuauuuuuucagaccg

SEQ ID NO: 2611325 - RNA, 19 nt, Human
cggauuauuuuuucagacc

SEQ ID NO: 2611326 - RNA, 18 nt, Human
cggauuauuuuuucagac

SEQ ID NO: 2611327 - RNA, 17 nt, Human
cggauuauuuuuucaga

SEQ ID NO: 2611328 - RNA, 16 nt, Human
cggauuauuuuuucag

SEQ ID NO: 2611329 - RNA, 14 nt, Human
cggauuauuuuuuc

SEQ ID NO: 2611330 - RNA, 13 nt, Human
cggaugugcuuuu

SEQ ID NO: 2611331 - RNA, 24 nt, Human
cggauuccaaagaguagaauugca

SEQ ID NO: 2611332 - RNA, 23 nt, Human
cggauuggcuuguguguuucacu

SEQ ID NO: 2611333 - RNA, 23 nt, Human
cggauuauuuuuucagaccgaaa

SEQ ID NO: 2611334 - RNA, 14 nt, Human
cggcaggggccugg

SEQ ID NO: 2611335 - RNA, 22 nt, Human
cggcaggcucacugccaggcca

SEQ ID NO: 2611336 - RNA, 20 nt, Human
cggcaggcucacugccaggc

SEQ ID NO: 2611337 - RNA, 23 nt, Human
cggcaggcucacugccaggccag

SEQ ID NO: 2611338 - RNA, 19 nt, Human
cggcaggcucacugccagg

SEQ ID NO: 2611339 - RNA, 18 nt, Human
cggcaggcucacugccag

SEQ ID NO: 2611340 - RNA, 17 nt, Human
cggcaggcucacugcca

SEQ ID NO: 2611341 - RNA, 14 nt, Human
cggcaggcucacug

SEQ ID NO: 2611342 - RNA, 22 nt, Human
cggcaggacaacgaggaagccc

SEQ ID NO: 2611343 - RNA, 18 nt, Human
cggcacagggucugcucu

SEQ ID NO: 2611344 - RNA, 14 nt, Human
cggcacagggucug

SEQ ID NO: 2611345 - RNA, 16 nt, Human
cggcaauuuccggcca

SEQ ID NO: 2611346 - RNA, 20 nt, Human
cggaaugaaccacaucuugc

SEQ ID NO: 2611347 - RNA, 17 nt, Human
cggaacugcaugcugcu

SEQ ID NO: 2611348 - RNA, 18 nt, Human
cggaacugcaugcugcug

SEQ ID NO: 2611349 - RNA, 16 nt, Human
cggaacugcaugcugc

SEQ ID NO: 2611350 - RNA, 20 nt, Human
cggaaagcagcucaaaggca

SEQ ID NO: 2611351 - RNA, 20 nt, Human
cggaagaccugaagaguggu

SEQ ID NO: 2611352 - RNA, 21 nt, Human
cggaauccuguccucagcuuc

SEQ ID NO: 2611353 - RNA, 18 nt, Human
cggaauccuguccucagc

SEQ ID NO: 2611354 - RNA, 18 nt, Human
cggacagccacggccagg

SEQ ID NO: 2611355 - RNA, 16 nt, Human
cggacagccacggcca

SEQ ID NO: 2611356 - RNA, 15 nt, Human
cggacagccacggcc

SEQ ID NO: 2611357 - RNA, 13 nt, Human
cggacaaguuuua

SEQ ID NO: 2611358 - RNA, 14 nt, Human
cggacacccccucg

SEQ ID NO: 2611359 - RNA, 12 nt, Human
cggacacccccu

SEQ ID NO: 2611360 - RNA, 20 nt, Human
cggaaccgcccaggaucaga

SEQ ID NO: 2611361 - RNA, 19 nt, Human
cggaacccaagcuuagaac

SEQ ID NO: 2611362 - RNA, 17 nt, Human
cggaacccaagcuuaga

SEQ ID NO: 2611363 - RNA, 15 nt, Human
cggaacaagccuaaa

SEQ ID NO: 2611364 - RNA, 12 nt, Human
cggaaagcagcu

SEQ ID NO: 2611365 - RNA, 13 nt, Human
cggaaagcagcuc

SEQ ID NO: 2611366 - RNA, 20 nt, Human
cgcucggaggccccaaagga

SEQ ID NO: 2611367 - RNA, 19 nt, Human
cgcucggaggccccaaagg

SEQ ID NO: 2611368 - RNA, 16 nt, Human
cgcucggaggccccaa

SEQ ID NO: 2611369 - RNA, 15 nt, Human
cgcucggaggcccca

SEQ ID NO: 2611370 - RNA, 14 nt, Human
cgcucggaggcccc

SEQ ID NO: 2611371 - RNA, 12 nt, Human
cgcucggaggcc

SEQ ID NO: 2611372 - RNA, 21 nt, Human
cgcucgcuuccgcauccuagu

SEQ ID NO: 2611373 - RNA, 17 nt, Human
cggaaaccuugguguag

SEQ ID NO: 2611374 - RNA, 17 nt, Human
cgcucuccuuucuuucu

SEQ ID NO: 2611375 - RNA, 21 nt, Human
cgcuccugucugccagccagc

SEQ ID NO: 2611376 - RNA, 17 nt, Human
cgcuccugucugccagc

SEQ ID NO: 2611377 - RNA, 20 nt, Human
cgcuccugucugccagccag

SEQ ID NO: 2611378 - RNA, 13 nt, Human
cgcuccugugucu

SEQ ID NO: 2611379 - RNA, 17 nt, Human
cgcuauugucaccaggg

SEQ ID NO: 2611380 - RNA, 16 nt, Human
cgcuccugucugccag

SEQ ID NO: 2611381 - RNA, 18 nt, Human
cgcucagcaugcauccuu

SEQ ID NO: 2611382 - RNA, 13 nt, Human
cgcagaagcagac

SEQ ID NO: 2611383 - RNA, 17 nt, Human
cgcacuuuccuccuggc

SEQ ID NO: 2611384 - RNA, 13 nt, Human
cgcacacacacaa

SEQ ID NO: 2611385 - RNA, 13 nt, Human
cgcacacacacac

SEQ ID NO: 2611386 - RNA, 11 nt, Human
cgcaaugugac

SEQ ID NO: 2611387 - RNA, 16 nt, Human
cgcacaaggcugacca

SEQ ID NO: 2611388 - RNA, 21 nt, Human
cgcacaaggcugaccaagaga

SEQ ID NO: 2611389 - RNA, 22 nt, Human
cgcacaauaguaaccuggguaa

SEQ ID NO: 2611390 - RNA, 10 nt, Human
cgcacacaca

SEQ ID NO: 2611391 - RNA, 20 nt, Human
cgcaaugugcccccagacgc

SEQ ID NO: 2611392 - RNA, 18 nt, Human
cgcaaugugcccccagac

SEQ ID NO: 2611393 - RNA, 12 nt, Human
cgauuucuguuu

SEQ ID NO: 2611394 - RNA, 23 nt, Human
cgauugcaggagucccugccauc

SEQ ID NO: 2611395 - RNA, 13 nt, Human
cgauuggcuuuaa

SEQ ID NO: 2611396 - RNA, 15 nt, Human
cgcaagucugcagcc

SEQ ID NO: 2611397 - RNA, 14 nt, Human
cgcaagucugcagc

SEQ ID NO: 2611398 - RNA, 20 nt, Human
cgcaagccuguaaucccagc

SEQ ID NO: 2611399 - RNA, 21 nt, Human
cgcaagccuguaaucccagcu

SEQ ID NO: 2611400 - RNA, 18 nt, Human
cgauuuaauucucuugaa

SEQ ID NO: 2611401 - RNA, 15 nt, Human
cgauuuaauucucuu

SEQ ID NO: 2611402 - RNA, 14 nt, Human
cgauuuaauucucu

SEQ ID NO: 2611403 - RNA, 15 nt, Human
cgauuggcuuuaaac

SEQ ID NO: 2611404 - RNA, 19 nt, Human
cgauucuucugcuucagcc

SEQ ID NO: 2611405 - RNA, 13 nt, Human
cgauucuucugcu

SEQ ID NO: 2611406 - RNA, 11 nt, Human
cgauucuggau

SEQ ID NO: 2611407 - RNA, 21 nt, Human
cgauugcaggagucccugcca

SEQ ID NO: 2611408 - RNA, 21 nt, Human
cgauucuucugcuucagccuc

SEQ ID NO: 2611409 - RNA, 19 nt, Human
cgaucuggguucacugcaa

SEQ ID NO: 2611410 - RNA, 17 nt, Human
cgaucucuuauuuuaca

SEQ ID NO: 2611411 - RNA, 21 nt, Human
cgaugaauuuggagacucugu

SEQ ID NO: 2611412 - RNA, 19 nt, Human
cgaucggggcacugcaggg

SEQ ID NO: 2611413 - RNA, 13 nt, Human
cgauccuuccucc

SEQ ID NO: 2611414 - RNA, 22 nt, Human
cgauccaccugucucagccucc

SEQ ID NO: 2611415 - RNA, 19 nt, Human
cgaucgcggcggagcuggc

SEQ ID NO: 2611416 - RNA, 20 nt, Human
cgagcucguguauccugggg

SEQ ID NO: 2611417 - RNA, 19 nt, Human
cgagcucguguauccuggg

SEQ ID NO: 2611418 - RNA, 18 nt, Human
cgagcucguguauccugg

SEQ ID NO: 2611419 - RNA, 23 nt, Human
cgagcgcuuucuggaaaagagga

SEQ ID NO: 2611420 - RNA, 17 nt, Human
cgagcucguguauccug

SEQ ID NO: 2611421 - RNA, 18 nt, Human
cgagcgcuuucuggaaaa

SEQ ID NO: 2611422 - RNA, 19 nt, Human
ccuuuguauauuauuucua

SEQ ID NO: 2611423 - RNA, 14 nt, Human
ccuuuguauauuau

SEQ ID NO: 2611424 - RNA, 12 nt, Human
ccuuuguauauu

SEQ ID NO: 2611425 - RNA, 22 nt, Human
cgagcucguguauccuggggcu

SEQ ID NO: 2611426 - RNA, 21 nt, Human
cgagcucguguauccuggggc

SEQ ID NO: 2611427 - RNA, 15 nt, Human
cgagcuggauguccc

SEQ ID NO: 2611428 - RNA, 12 nt, Human
cgagcugggggc

SEQ ID NO: 2611429 - RNA, 13 nt, Human
cgagcugggggcc

SEQ ID NO: 2611430 - RNA, 15 nt, Human
cgagcugggggccau

SEQ ID NO: 2611431 - RNA, 16 nt, Human
cgagcugggggccaug

SEQ ID NO: 2611432 - RNA, 20 nt, Human
cgagcugggggccaugagcu

SEQ ID NO: 2611433 - RNA, 23 nt, Human
cgagcugggggccaugagcucca

SEQ ID NO: 2611434 - RNA, 13 nt, Human
cgagcuggugcau

SEQ ID NO: 2611435 - RNA, 14 nt, Human
cgagcuggugcauu

SEQ ID NO: 2611436 - RNA, 15 nt, Human
cgagcuggugcauua

SEQ ID NO: 2611437 - RNA, 21 nt, Human
cgagcuggugcauuacagaga

SEQ ID NO: 2611438 - RNA, 23 nt, Human
cgagcuggugcauuacagagagg

SEQ ID NO: 2611439 - RNA, 18 nt, Human
ccuuuguauucucuccug

SEQ ID NO: 2611440 - RNA, 20 nt, Human
ccuuuguauucucuccugua

SEQ ID NO: 2611441 - RNA, 15 nt, Human
ccuuuguauucucuc

SEQ ID NO: 2611442 - RNA, 19 nt, Human
ccuuuggcucuggagacag

SEQ ID NO: 2611443 - RNA, 16 nt, Human
ccuuuggcucuggaga

SEQ ID NO: 2611444 - RNA, 15 nt, Human
ccuuuggcucuggag

SEQ ID NO: 2611445 - RNA, 14 nt, Human
ccuuuggcucugga

SEQ ID NO: 2611446 - RNA, 23 nt, Human
ccuuuguaaauugucagaugcug

SEQ ID NO: 2611447 - RNA, 12 nt, Human
cgaggacaggga

SEQ ID NO: 2611448 - RNA, 14 nt, Human
cgaggaaacucaga

SEQ ID NO: 2611449 - RNA, 14 nt, Human
cgagcuuuucuaaa

SEQ ID NO: 2611450 - RNA, 22 nt, Human
cgagcuggugcauuacagagag

SEQ ID NO: 2611451 - RNA, 14 nt, Human
cgaggaaccagagc

SEQ ID NO: 2611452 - RNA, 15 nt, Human
cgaggaaccagagcc

SEQ ID NO: 2611453 - RNA, 16 nt, Human
cgaggaaccagagcca

SEQ ID NO: 2611454 - RNA, 13 nt, Human
cgaggacagggag

SEQ ID NO: 2611455 - RNA, 19 nt, Human
cgaggaaccagagccaugg

SEQ ID NO: 2611456 - RNA, 11 nt, Human
cgaggaagccc

SEQ ID NO: 2611457 - RNA, 19 nt, Human
cgaggccuucucugaagga

SEQ ID NO: 2611458 - RNA, 18 nt, Human
cgaggccuucucugaagg

SEQ ID NO: 2611459 - RNA, 22 nt, Human
cgaggcugcccacuauggucau

SEQ ID NO: 2611460 - RNA, 13 nt, Human
cgagggaugaugc

SEQ ID NO: 2611461 - RNA, 15 nt, Human
cgaggcuggagcugg

SEQ ID NO: 2611462 - RNA, 16 nt, Human
cgaggcuggagcuggc

SEQ ID NO: 2611463 - RNA, 20 nt, Human
cgauccaccugucucagccu

SEQ ID NO: 2611464 - RNA, 23 nt, Human
ccuuugaagaggaaaaugaauaa

SEQ ID NO: 2611465 - RNA, 14 nt, Human
ccuuugaagaggaa

SEQ ID NO: 2611466 - RNA, 13 nt, Human
ccuuugaagagga

SEQ ID NO: 2611467 - RNA, 14 nt, Human
ccuuugaauccucu

SEQ ID NO: 2611468 - RNA, 16 nt, Human
ccuuugaauccucucu

SEQ ID NO: 2611469 - RNA, 12 nt, Human
ccuuugaagagg

SEQ ID NO: 2611470 - RNA, 23 nt, Human
ccuuucuuuuucuucuucccucc

SEQ ID NO: 2611471 - RNA, 17 nt, Human
ccuuucuuuuucuucuu

SEQ ID NO: 2611472 - RNA, 16 nt, Human
ccuuucuuuuucuucu

SEQ ID NO: 2611473 - RNA, 15 nt, Human
ccuuucuuuuucuuc

SEQ ID NO: 2611474 - RNA, 18 nt, Human
ccuuucuugguucauaaa

SEQ ID NO: 2611475 - RNA, 13 nt, Human
ccuuucuugguuc

SEQ ID NO: 2611476 - RNA, 13 nt, Human
ccuuucuuggcca

SEQ ID NO: 2611477 - RNA, 15 nt, Human
ccuuucuuggccagu

SEQ ID NO: 2611478 - RNA, 14 nt, Human
ccuuugacaaaggu

SEQ ID NO: 2611479 - RNA, 23 nt, Human
ccuuugacgccaucccagcccca

SEQ ID NO: 2611480 - RNA, 22 nt, Human
ccuuugagcccacaaagccuua

SEQ ID NO: 2611481 - RNA, 19 nt, Human
ccuuugagacaguuucuua

SEQ ID NO: 2611482 - RNA, 17 nt, Human
ccuuugagacaguuucu

SEQ ID NO: 2611483 - RNA, 15 nt, Human
ccuuugagacaguuu

SEQ ID NO: 2611484 - RNA, 13 nt, Human
ccuuugagacagu

SEQ ID NO: 2611485 - RNA, 20 nt, Human
ccuuugaauccucucucugu

SEQ ID NO: 2611486 - RNA, 19 nt, Human
ccuuugagugcaguccuga

SEQ ID NO: 2611487 - RNA, 22 nt, Human
ccuuugagugcaguccugauca

SEQ ID NO: 2611488 - RNA, 21 nt, Human
ccuuugauuaaagacuccagu

SEQ ID NO: 2611489 - RNA, 17 nt, Human
ccuuugauaaaauaaau

SEQ ID NO: 2611490 - RNA, 22 nt, Human
ccuuugaguuuccucaggcugc

SEQ ID NO: 2611491 - RNA, 19 nt, Human
ccuuugcugaggccuccag

SEQ ID NO: 2611492 - RNA, 16 nt, Human
ccuuugcccagaaaga

SEQ ID NO: 2611493 - RNA, 21 nt, Human
ccuuugccccaccuuuauuaa

SEQ ID NO: 2611494 - RNA, 13 nt, Human
ccuuugcaggcau

SEQ ID NO: 2611495 - RNA, 15 nt, Human
ccuuugcauggagug

SEQ ID NO: 2611496 - RNA, 12 nt, Human
ccuuugcaggca

SEQ ID NO: 2611497 - RNA, 18 nt, Human
ccuuugcacugagggcca

SEQ ID NO: 2611498 - RNA, 17 nt, Human
ccuuugcacugagggcc

SEQ ID NO: 2611499 - RNA, 19 nt, Human
ccuuugcacugagggccac

SEQ ID NO: 2611500 - RNA, 16 nt, Human
ccuuugcacugagggc

SEQ ID NO: 2611501 - RNA, 14 nt, Human
ccuuugcacugagg

SEQ ID NO: 2611502 - RNA, 13 nt, Human
ccuuugcacugag

SEQ ID NO: 2611503 - RNA, 23 nt, Human
ccuuugcugugaggcuguccugu

SEQ ID NO: 2611504 - RNA, 22 nt, Human
ccuuugcugugaggcuguccug

SEQ ID NO: 2611505 - RNA, 17 nt, Human
ccuuugcugugaggcug

SEQ ID NO: 2611506 - RNA, 13 nt, Human
ccuuugcugugag

SEQ ID NO: 2611507 - RNA, 16 nt, Human
ccuuugcuugaaagaa

SEQ ID NO: 2611508 - RNA, 19 nt, Human
ccuuuggcaggugcagccc

SEQ ID NO: 2611509 - RNA, 20 nt, Human
ccuuuggcaggugcagcccc

SEQ ID NO: 2611510 - RNA, 12 nt, Human
ccuuuggcucug

SEQ ID NO: 2611511 - RNA, 19 nt, Human
ccuuuggaugaccagaaca

SEQ ID NO: 2611512 - RNA, 15 nt, Human
ccuuuggccauucca

SEQ ID NO: 2611513 - RNA, 14 nt, Human
ccuuuggagaccau

SEQ ID NO: 2611514 - RNA, 16 nt, Human
ccuuuggaugaccaga

SEQ ID NO: 2611515 - RNA, 18 nt, Human
ccuuuggcaggugcagcc

SEQ ID NO: 2611516 - RNA, 15 nt, Human
ccuuuggcagaguuc

SEQ ID NO: 2611517 - RNA, 19 nt, Human
ccuuguggucccaccccac

SEQ ID NO: 2611518 - RNA, 16 nt, Human
ccuuguggucccaccc

SEQ ID NO: 2611519 - RNA, 20 nt, Human
ccuuguggucccaccccaca

SEQ ID NO: 2611520 - RNA, 23 nt, Human
ccuugugucuacagagaaccugg

SEQ ID NO: 2611521 - RNA, 19 nt, Human
ccuuggcucccauucacuc

SEQ ID NO: 2611522 - RNA, 13 nt, Human
ccuuggcugcagg

SEQ ID NO: 2611523 - RNA, 12 nt, Human
ccuuggcugcag

SEQ ID NO: 2611524 - RNA, 12 nt, Human
ccuuggcucaga

SEQ ID NO: 2611525 - RNA, 15 nt, Human
ccuuggcucagacau

SEQ ID NO: 2611526 - RNA, 18 nt, Human
ccuuggcucaauccucua

SEQ ID NO: 2611527 - RNA, 22 nt, Human
ccuuggcucaauccucuaagcu

SEQ ID NO: 2611528 - RNA, 17 nt, Human
ccuuggcaugccuucca

SEQ ID NO: 2611529 - RNA, 20 nt, Human
ccuuggcaugccuuccagca

SEQ ID NO: 2611530 - RNA, 18 nt, Human
ccuuggccagaagucaag

SEQ ID NO: 2611531 - RNA, 21 nt, Human
ccuuggcaugccuuccagcac

SEQ ID NO: 2611532 - RNA, 13 nt, Human
ccuuuaagagaaa

SEQ ID NO: 2611533 - RNA, 23 nt, Human
ccuuuaaaguaugaaucuaugcc

SEQ ID NO: 2611534 - RNA, 22 nt, Human
ccuuuaaaguaugaaucuaugc

SEQ ID NO: 2611535 - RNA, 18 nt, Human
ccuuuaaaguaugaaucu

SEQ ID NO: 2611536 - RNA, 20 nt, Human
ccuuuaaaaaaauuuaagug

SEQ ID NO: 2611537 - RNA, 12 nt, Human
ccuuuaaaauuu

SEQ ID NO: 2611538 - RNA, 21 nt, Human
ccuuuaaaauuuuuuuagaaa

SEQ ID NO: 2611539 - RNA, 20 nt, Human
ccuuuaaaauuuuuuuagaa

SEQ ID NO: 2611540 - RNA, 17 nt, Human
ccuuguguguaugugua

SEQ ID NO: 2611541 - RNA, 15 nt, Human
ccuuguguguaugug

SEQ ID NO: 2611542 - RNA, 15 nt, Human
ccuuguuacuucuga

SEQ ID NO: 2611543 - RNA, 17 nt, Human
ccuuucucuucucuguu

SEQ ID NO: 2611544 - RNA, 14 nt, Human
ccuuucuggcucuc

SEQ ID NO: 2611545 - RNA, 13 nt, Human
ccuuucugugugc

SEQ ID NO: 2611546 - RNA, 11 nt, Human
ccuuucugugu

SEQ ID NO: 2611547 - RNA, 20 nt, Human
ccuuucuccccugcccccag

SEQ ID NO: 2611548 - RNA, 14 nt, Human
ccuuucuccuuugu

SEQ ID NO: 2611549 - RNA, 17 nt, Human
ccuuucucgauuuuauc

SEQ ID NO: 2611550 - RNA, 15 nt, Human
ccuuucuccuuugua

SEQ ID NO: 2611551 - RNA, 14 nt, Human
cgcagacaggacca

SEQ ID NO: 2611552 - RNA, 13 nt, Human
cgcagacaggacc

SEQ ID NO: 2611553 - RNA, 17 nt, Human
cgcagacaccuuggaca

SEQ ID NO: 2611554 - RNA, 15 nt, Human
cgcccagcugcaccu

SEQ ID NO: 2611555 - RNA, 11 nt, Human
cgcccaggaga

SEQ ID NO: 2611556 - RNA, 23 nt, Human
cgcccagcugcaccugccagccu

SEQ ID NO: 2611557 - RNA, 18 nt, Human
cgcccagcugcaccugcc

SEQ ID NO: 2611558 - RNA, 20 nt, Human
cgcccagcugcaccugccag

SEQ ID NO: 2611559 - RNA, 19 nt, Human
cgcccaggcuggagugcaa

SEQ ID NO: 2611560 - RNA, 20 nt, Human
cgcccaggcuggagugcaau

SEQ ID NO: 2611561 - RNA, 12 nt, Human
cgcccaggcugg

SEQ ID NO: 2611562 - RNA, 17 nt, Human
cgcccaggaucagauug

SEQ ID NO: 2611563 - RNA, 15 nt, Human
cgcccaggagacauc

SEQ ID NO: 2611564 - RNA, 15 nt, Human
cgcccccacugguga

SEQ ID NO: 2611565 - RNA, 12 nt, Human
cgccccagccuc

SEQ ID NO: 2611566 - RNA, 23 nt, Human
cgcccaggaucagauugcaugug

SEQ ID NO: 2611567 - RNA, 14 nt, Human
cgccccagccucug

SEQ ID NO: 2611568 - RNA, 14 nt, Human
cgcccccaccucca

SEQ ID NO: 2611569 - RNA, 12 nt, Human
cgcccccaccuc

SEQ ID NO: 2611570 - RNA, 17 nt, Human
cgcgacaaugcaaacca

SEQ ID NO: 2611571 - RNA, 16 nt, Human
cgcgacaaugcaaacc

SEQ ID NO: 2611572 - RNA, 14 nt, Human
cgcccugccacuca

SEQ ID NO: 2611573 - RNA, 11 nt, Human
cgcccugccac

SEQ ID NO: 2611574 - RNA, 17 nt, Human
cgcccucuguccugacu

SEQ ID NO: 2611575 - RNA, 16 nt, Human
cgcccucuguccugac

SEQ ID NO: 2611576 - RNA, 14 nt, Human
cgcccucuguccug

SEQ ID NO: 2611577 - RNA, 17 nt, Human
cgcccccuccgcccugc

SEQ ID NO: 2611578 - RNA, 23 nt, Human
cgcccccggguuuggcgggccaa

SEQ ID NO: 2611579 - RNA, 22 nt, Human
cgcccccaguccccaccccugc

SEQ ID NO: 2611580 - RNA, 18 nt, Human
cgcccccaguccccaccc

SEQ ID NO: 2611581 - RNA, 20 nt, Human
cgcccccuccgcccugccac

SEQ ID NO: 2611582 - RNA, 19 nt, Human
cgcccccuccgcccugcca

SEQ ID NO: 2611583 - RNA, 14 nt, Human
cgcccccuccucua

SEQ ID NO: 2611584 - RNA, 12 nt, Human
cgcccccugccc

SEQ ID NO: 2611585 - RNA, 20 nt, Human
cgcccuccccuccccugcug

SEQ ID NO: 2611586 - RNA, 18 nt, Human
cgcccuccccuccccugc

SEQ ID NO: 2611587 - RNA, 16 nt, Human
cgcccuccccuccccu

SEQ ID NO: 2611588 - RNA, 14 nt, Human
cgcccuccccuccc

SEQ ID NO: 2611589 - RNA, 22 nt, Human
cgcccuccccuccccugcugca

SEQ ID NO: 2611590 - RNA, 17 nt, Human
cgcccguccugccugug

SEQ ID NO: 2611591 - RNA, 12 nt, Human
cgcccucccagg

SEQ ID NO: 2611592 - RNA, 13 nt, Human
cgcccucccaggc

SEQ ID NO: 2611593 - RNA, 14 nt, Human
cgcuaagagggagg

SEQ ID NO: 2611594 - RNA, 16 nt, Human
cgcuaagagggaggga

SEQ ID NO: 2611595 - RNA, 15 nt, Human
cgcuaagagggaggg

SEQ ID NO: 2611596 - RNA, 21 nt, Human
cgcuaagagggagggagggcu

SEQ ID NO: 2611597 - RNA, 23 nt, Human
cgcguguguggguggauauaaau

SEQ ID NO: 2611598 - RNA, 23 nt, Human
cgcuagaugggcauggggugggc

SEQ ID NO: 2611599 - RNA, 20 nt, Human
cgcuagaugggcauggggug

SEQ ID NO: 2611600 - RNA, 17 nt, Human
cgcuagaggccugagga

SEQ ID NO: 2611601 - RNA, 15 nt, Human
cgcuagaggccugag

SEQ ID NO: 2611602 - RNA, 14 nt, Human
cgcuagaggccuga

SEQ ID NO: 2611603 - RNA, 13 nt, Human
cgcuagaggccug

SEQ ID NO: 2611604 - RNA, 20 nt, Human
cgcgugcacacaccagagcc

SEQ ID NO: 2611605 - RNA, 19 nt, Human
cgcgugcccucgcugcuuc

SEQ ID NO: 2611606 - RNA, 21 nt, Human
cgcgucuccuguuuuucuggg

SEQ ID NO: 2611607 - RNA, 19 nt, Human
cgcgugcacguggagagcu

SEQ ID NO: 2611608 - RNA, 19 nt, Human
cgcgugcacacaccagagc

SEQ ID NO: 2611609 - RNA, 16 nt, Human
cgcgugcacacaccag

SEQ ID NO: 2611610 - RNA, 15 nt, Human
cgcgacuaauuucaa

SEQ ID NO: 2611611 - RNA, 12 nt, Human
cgcccugccacu

SEQ ID NO: 2611612 - RNA, 22 nt, Human
cgcgacuaauuucaaaaugcuu

SEQ ID NO: 2611613 - RNA, 16 nt, Human
cgcgucuuccugagug

SEQ ID NO: 2611614 - RNA, 14 nt, Human
cgcgucuuccugag

SEQ ID NO: 2611615 - RNA, 13 nt, Human
cgcgucuuccuga

SEQ ID NO: 2611616 - RNA, 12 nt, Human
cgcgucuuccug

SEQ ID NO: 2611617 - RNA, 13 nt, Human
cgcgucuccuguu

SEQ ID NO: 2611618 - RNA, 12 nt, Human
cgcgucuccugu

SEQ ID NO: 2611619 - RNA, 21 nt, Human
cgcgucgcccucccaggcucu

SEQ ID NO: 2611620 - RNA, 14 nt, Human
cgugcauaccacuu

SEQ ID NO: 2611621 - RNA, 18 nt, Human
cgugcauaccacuuuugu

SEQ ID NO: 2611622 - RNA, 22 nt, Human
cgugcacacaccagagcccacc

SEQ ID NO: 2611623 - RNA, 17 nt, Human
cgugaaguauacuguau

SEQ ID NO: 2611624 - RNA, 15 nt, Human
cgugcaccuguacuc

SEQ ID NO: 2611625 - RNA, 22 nt, Human
cgugcaguggugcgaucugggu

SEQ ID NO: 2611626 - RNA, 19 nt, Human
cgugcauaccacuuuuguu

SEQ ID NO: 2611627 - RNA, 21 nt, Human
cgugccagucgcgcugccugu

SEQ ID NO: 2611628 - RNA, 19 nt, Human
cgugcccaggggcccacag

SEQ ID NO: 2611629 - RNA, 22 nt, Human
cgugccagucgcgcugccugug

SEQ ID NO: 2611630 - RNA, 17 nt, Human
cgugccccgccuccccg

SEQ ID NO: 2611631 - RNA, 20 nt, Human
cgugcccaguggcugcuccu

SEQ ID NO: 2611632 - RNA, 16 nt, Human
cgugcccaguggcugc

SEQ ID NO: 2611633 - RNA, 21 nt, Human
cgugccuccaccaccacuggc

SEQ ID NO: 2611634 - RNA, 20 nt, Human
cgugccuccaccaccacugg

SEQ ID NO: 2611635 - RNA, 18 nt, Human
cgugccuccaccaccacu

SEQ ID NO: 2611636 - RNA, 17 nt, Human
cgugccuccaccaccac

SEQ ID NO: 2611637 - RNA, 14 nt, Human
cgugccuccaccac

SEQ ID NO: 2611638 - RNA, 13 nt, Human
cgugccuccacca

SEQ ID NO: 2611639 - RNA, 17 nt, Human
cgugccguuacucucca

SEQ ID NO: 2611640 - RNA, 19 nt, Human
cgugccguuacucuccaac

SEQ ID NO: 2611641 - RNA, 21 nt, Human
cgugcacacaccagagcccac

SEQ ID NO: 2611642 - RNA, 20 nt, Human
cgugcacacaccagagccca

SEQ ID NO: 2611643 - RNA, 13 nt, Human
cgugaaacccugu

SEQ ID NO: 2611644 - RNA, 13 nt, Human
cgugaagggauuu

SEQ ID NO: 2611645 - RNA, 19 nt, Human
cgugaaggccgagaagcaa

SEQ ID NO: 2611646 - RNA, 12 nt, Human
cgugacaacacu

SEQ ID NO: 2611647 - RNA, 19 nt, Human
cgucuguggcuuucagccu

SEQ ID NO: 2611648 - RNA, 14 nt, Human
cgucuguucccccu

SEQ ID NO: 2611649 - RNA, 18 nt, Human
cgucugucuucacagcuc

SEQ ID NO: 2611650 - RNA, 17 nt, Human
cgucuguuuauaaacau

SEQ ID NO: 2611651 - RNA, 12 nt, Human
cgugaaacacac

SEQ ID NO: 2611652 - RNA, 15 nt, Human
cgugaaacacaccag

SEQ ID NO: 2611653 - RNA, 16 nt, Human
cgugaaagcagaugag

SEQ ID NO: 2611654 - RNA, 16 nt, Human
cgugaaacacaccagg

SEQ ID NO: 2611655 - RNA, 20 nt, Human
cgugaaacacaccaggcugu

SEQ ID NO: 2611656 - RNA, 22 nt, Human
cgugaaacacaccaggcugugg

SEQ ID NO: 2611657 - RNA, 24 nt, Human
cgugaaacacaccaggcugugggc

SEQ ID NO: 2611658 - RNA, 21 nt, Human
cgucuguggcuuucagccucu

SEQ ID NO: 2611659 - RNA, 15 nt, Human
cgucuguauauuuug

SEQ ID NO: 2611660 - RNA, 22 nt, Human
cgucugggagaaauugacagau

SEQ ID NO: 2611661 - RNA, 21 nt, Human
cgucugggagaaauugacaga

SEQ ID NO: 2611662 - RNA, 14 nt, Human
cgucugggagaaau

SEQ ID NO: 2611663 - RNA, 24 nt, Human
cgucuggaggggccccugcuucuc

SEQ ID NO: 2611664 - RNA, 17 nt, Human
cgucugggguucagccc

SEQ ID NO: 2611665 - RNA, 18 nt, Human
cgucugggguucagcccc

SEQ ID NO: 2611666 - RNA, 19 nt, Human
cgucugggguucagccccu

SEQ ID NO: 2611667 - RNA, 23 nt, Human
cgucugggguucagccccuccuc

SEQ ID NO: 2611668 - RNA, 14 nt, Human
cgucugacaggcaa

SEQ ID NO: 2611669 - RNA, 13 nt, Human
cgucugacaggca

SEQ ID NO: 2611670 - RNA, 23 nt, Human
cgucuggaggggccccugcuucu

SEQ ID NO: 2611671 - RNA, 20 nt, Human
cgucuggaggggccccugcu

SEQ ID NO: 2611672 - RNA, 18 nt, Human
cgucuggaggggccccug

SEQ ID NO: 2611673 - RNA, 14 nt, Human
cgucuggaggggcc

SEQ ID NO: 2611674 - RNA, 15 nt, Human
cgucuggaaguccaa

SEQ ID NO: 2611675 - RNA, 23 nt, Human
cgucucucucccauggagcccca

SEQ ID NO: 2611676 - RNA, 16 nt, Human
cgucugacccucucca

SEQ ID NO: 2611677 - RNA, 23 nt, Human
cgucugcuaacuuggagccccag

SEQ ID NO: 2611678 - RNA, 18 nt, Human
cgucucucucccauggag

SEQ ID NO: 2611679 - RNA, 14 nt, Human
cgucucucucccau

SEQ ID NO: 2611680 - RNA, 13 nt, Human
cgucucucuccca

SEQ ID NO: 2611681 - RNA, 22 nt, Human
cgucucucccucccuuugaaau

SEQ ID NO: 2611682 - RNA, 14 nt, Human
cgucuaccugaggg

SEQ ID NO: 2611683 - RNA, 19 nt, Human
cgucuaagucaugagcuga

SEQ ID NO: 2611684 - RNA, 14 nt, Human
cguccccugucccc

SEQ ID NO: 2611685 - RNA, 15 nt, Human
cguccgcccugcucc

SEQ ID NO: 2611686 - RNA, 12 nt, Human
cguccgcccugc

SEQ ID NO: 2611687 - RNA, 14 nt, Human
cgucccugcccaug

SEQ ID NO: 2611688 - RNA, 13 nt, Human
cgucccugcccau

SEQ ID NO: 2611689 - RNA, 11 nt, Human
cguccccuguc

SEQ ID NO: 2611690 - RNA, 13 nt, Human
cgucccccugggg

SEQ ID NO: 2611691 - RNA, 15 nt, Human
cgucccauauccugc

SEQ ID NO: 2611692 - RNA, 17 nt, Human
cgucccauauccugccu

SEQ ID NO: 2611693 - RNA, 22 nt, Human
cgucccccucuggcuccagcug

SEQ ID NO: 2611694 - RNA, 20 nt, Human
cguccucaccccuguccuca

SEQ ID NO: 2611695 - RNA, 17 nt, Human
cguccucaccccugucc

SEQ ID NO: 2611696 - RNA, 14 nt, Human
cguccucaccccug

SEQ ID NO: 2611697 - RNA, 15 nt, Human
cguccgcgcgccagc

SEQ ID NO: 2611698 - RNA, 22 nt, Human
cguccgcccugcuccucccugg

SEQ ID NO: 2611699 - RNA, 19 nt, Human
cguccgcccugcuccuccc

SEQ ID NO: 2611700 - RNA, 20 nt, Human
cguccggcaguucugggugc

SEQ ID NO: 2611701 - RNA, 22 nt, Human
cguccucaccccuguccucacu

SEQ ID NO: 2611702 - RNA, 13 nt, Human
cguccucccccug

SEQ ID NO: 2611703 - RNA, 15 nt, Human
cguccucccccugcc

SEQ ID NO: 2611704 - RNA, 16 nt, Human
cguccucccccugcca

SEQ ID NO: 2611705 - RNA, 16 nt, Human
cguccucccgggcccu

SEQ ID NO: 2611706 - RNA, 14 nt, Human
cguccucccgggcc

SEQ ID NO: 2611707 - RNA, 17 nt, Human
cguccucccccugccag

SEQ ID NO: 2611708 - RNA, 22 nt, Human
cguccucccccugccagugccu

SEQ ID NO: 2611709 - RNA, 18 nt, Human
cguccucccgggcccucc

SEQ ID NO: 2611710 - RNA, 17 nt, Human
cguccucccgggcccuc

SEQ ID NO: 2611711 - RNA, 17 nt, Human
cguccuccucaccucau

SEQ ID NO: 2611712 - RNA, 17 nt, Human
cgucgaggggcucucag

SEQ ID NO: 2611713 - RNA, 21 nt, Human
cguccuccucaccucaugccc

SEQ ID NO: 2611714 - RNA, 16 nt, Human
cgucgaggggcucuca

SEQ ID NO: 2611715 - RNA, 18 nt, Human
cgucggggggacagcucc

SEQ ID NO: 2611716 - RNA, 16 nt, Human
cgucgcccucccaggc

SEQ ID NO: 2611717 - RNA, 16 nt, Human
cgucgcacagucucuc

SEQ ID NO: 2611718 - RNA, 13 nt, Human
cgucgcacagucu

SEQ ID NO: 2611719 - RNA, 15 nt, Human
cgucgcccucccagg

SEQ ID NO: 2611720 - RNA, 18 nt, Human
cgucagccuccagccucu

SEQ ID NO: 2611721 - RNA, 17 nt, Human
cgucagccuccagccuc

SEQ ID NO: 2611722 - RNA, 16 nt, Human
cgucagccuccagccu

SEQ ID NO: 2611723 - RNA, 15 nt, Human
cgucagccuccagcc

SEQ ID NO: 2611724 - RNA, 20 nt, Human
cgucagggcccaagucccug

SEQ ID NO: 2611725 - RNA, 20 nt, Human
cgucagccuccagccucugu

SEQ ID NO: 2611726 - RNA, 19 nt, Human
cgucagcuggcacugucuc

SEQ ID NO: 2611727 - RNA, 15 nt, Human
cgucaguauuuuccc

SEQ ID NO: 2611728 - RNA, 15 nt, Human
cgucagugccuaccc

SEQ ID NO: 2611729 - RNA, 17 nt, Human
cgucaguaucaggccug

SEQ ID NO: 2611730 - RNA, 14 nt, Human
cgucaucuaguuuu

SEQ ID NO: 2611731 - RNA, 20 nt, Human
cgucaucauuuuuccuuccc

SEQ ID NO: 2611732 - RNA, 17 nt, Human
cgucaucuaguuuuaaa

SEQ ID NO: 2611733 - RNA, 19 nt, Human
cgucaucacuuuucaguga

SEQ ID NO: 2611734 - RNA, 16 nt, Human
cguccacggcucuagg

SEQ ID NO: 2611735 - RNA, 22 nt, Human
cguccaccaugggguccuacca

SEQ ID NO: 2611736 - RNA, 22 nt, Human
cguccacggcucuagguggggc

SEQ ID NO: 2611737 - RNA, 19 nt, Human
cguccaggagccugugccu

SEQ ID NO: 2611738 - RNA, 21 nt, Human
cguccagccgccauugccacc

SEQ ID NO: 2611739 - RNA, 19 nt, Human
cgucauggcuuaauguuua

SEQ ID NO: 2611740 - RNA, 15 nt, Human
cgucaugcuuguguu

SEQ ID NO: 2611741 - RNA, 20 nt, Human
cgucauggcuuaauguuuau

SEQ ID NO: 2611742 - RNA, 15 nt, Human
cgucauguuccucaa

SEQ ID NO: 2611743 - RNA, 14 nt, Human
cgucccccucuggc

SEQ ID NO: 2611744 - RNA, 21 nt, Human
cgucccccucuggcuccagcu

SEQ ID NO: 2611745 - RNA, 11 nt, Human
cguccagggag

SEQ ID NO: 2611746 - RNA, 14 nt, Human
cgucagccuccagc

SEQ ID NO: 2611747 - RNA, 13 nt, Human
cgucagccuccag

SEQ ID NO: 2611748 - RNA, 12 nt, Human
cgucagccucca

SEQ ID NO: 2611749 - RNA, 17 nt, Human
cgucagaagcacccagg

SEQ ID NO: 2611750 - RNA, 12 nt, Human
cgucaccucaga

SEQ ID NO: 2611751 - RNA, 20 nt, Human
cgucaccaucucaggccacc

SEQ ID NO: 2611752 - RNA, 21 nt, Human
cgucaccaucucaggccaccu

SEQ ID NO: 2611753 - RNA, 16 nt, Human
cgucaccaucucaggc

SEQ ID NO: 2611754 - RNA, 14 nt, Human
cgucaccaccucuc

SEQ ID NO: 2611755 - RNA, 18 nt, Human
cgucaccaucucaggcca

SEQ ID NO: 2611756 - RNA, 17 nt, Human
cgucaacgugcauuuua

SEQ ID NO: 2611757 - RNA, 16 nt, Human
cguauagcuguauuga

SEQ ID NO: 2611758 - RNA, 15 nt, Human
cguauagcuguauug

SEQ ID NO: 2611759 - RNA, 12 nt, Human
cguauagcugua

SEQ ID NO: 2611760 - RNA, 22 nt, Human
cguaguucccugaaaacccaga

SEQ ID NO: 2611761 - RNA, 22 nt, Human
cguauaugucucaggucccugc

SEQ ID NO: 2611762 - RNA, 20 nt, Human
cguaugucuguuaccauguc

SEQ ID NO: 2611763 - RNA, 15 nt, Human
cguauugguccagcu

SEQ ID NO: 2611764 - RNA, 16 nt, Human
cguaugucuguuacca

SEQ ID NO: 2611765 - RNA, 15 nt, Human
cguauguaaauguau

SEQ ID NO: 2611766 - RNA, 13 nt, Human
cguaugcauguga

SEQ ID NO: 2611767 - RNA, 22 nt, Human
cguauaaaagccuguuuaagag

SEQ ID NO: 2611768 - RNA, 21 nt, Human
cguauaaaagccuguuuaaga

SEQ ID NO: 2611769 - RNA, 17 nt, Human
cguauaaaagccuguuu

SEQ ID NO: 2611770 - RNA, 16 nt, Human
cguauaaaagccuguu

SEQ ID NO: 2611771 - RNA, 22 nt, Human
cguagcuucuaccaugaacaga

SEQ ID NO: 2611772 - RNA, 16 nt, Human
cguagcugcaaaggac

SEQ ID NO: 2611773 - RNA, 19 nt, Human
cguagccagcugcucccca

SEQ ID NO: 2611774 - RNA, 16 nt, Human
cguagccagcugcucc

SEQ ID NO: 2611775 - RNA, 21 nt, Human
cguagauucccaucauacacu

SEQ ID NO: 2611776 - RNA, 20 nt, Human
cguagccaaggugggcugag

SEQ ID NO: 2611777 - RNA, 23 nt, Human
cguaggggagggguugccacagg

SEQ ID NO: 2611778 - RNA, 14 nt, Human
cguaguucccugaa

SEQ ID NO: 2611779 - RNA, 13 nt, Human
cguaguucccuga

SEQ ID NO: 2611780 - RNA, 14 nt, Human
cguaggggaggggu

SEQ ID NO: 2611781 - RNA, 17 nt, Human
cguaggggagggguugc

SEQ ID NO: 2611782 - RNA, 17 nt, Human
cguaguagggucaggcc

SEQ ID NO: 2611783 - RNA, 23 nt, Human
cggugcuaucucccccagcccca

SEQ ID NO: 2611784 - RNA, 14 nt, Human
cggggccccagggc

SEQ ID NO: 2611785 - RNA, 19 nt, Human
cggggcagcugccagagaa

SEQ ID NO: 2611786 - RNA, 16 nt, Human
cggggcaugcuggggc

SEQ ID NO: 2611787 - RNA, 17 nt, Human
cggggcaugcuggggca

SEQ ID NO: 2611788 - RNA, 19 nt, Human
cggggcaugcuggggcaag

SEQ ID NO: 2611789 - RNA, 19 nt, Human
cggggaguuucuuuccugc

SEQ ID NO: 2611790 - RNA, 18 nt, Human
cggggaguuucuuuccug

SEQ ID NO: 2611791 - RNA, 15 nt, Human
cggggcacugcaggg

SEQ ID NO: 2611792 - RNA, 14 nt, Human
cggggcagcugcca

SEQ ID NO: 2611793 - RNA, 18 nt, Human
cguagaucaccagaauaa

SEQ ID NO: 2611794 - RNA, 19 nt, Human
cguagaucaccagaauaaa

SEQ ID NO: 2611795 - RNA, 16 nt, Human
cgguggcccugucccu

SEQ ID NO: 2611796 - RNA, 14 nt, Human
cgguggcccugucc

SEQ ID NO: 2611797 - RNA, 11 nt, Human
cgguggccucu

SEQ ID NO: 2611798 - RNA, 15 nt, Human
cgguggaggccaggg

SEQ ID NO: 2611799 - RNA, 14 nt, Human
cgguggaggccagg

SEQ ID NO: 2611800 - RNA, 13 nt, Human
cgguggaggccag

SEQ ID NO: 2611801 - RNA, 22 nt, Human
cggugcuguccucagguggcca

SEQ ID NO: 2611802 - RNA, 15 nt, Human
cggugcuccaggcag

SEQ ID NO: 2611803 - RNA, 14 nt, Human
cggugcuccaggca

SEQ ID NO: 2611804 - RNA, 13 nt, Human
cggugcuccaggc

SEQ ID NO: 2611805 - RNA, 17 nt, Human
cggggccucgggaccuc

SEQ ID NO: 2611806 - RNA, 15 nt, Human
cggggccccagggcu

SEQ ID NO: 2611807 - RNA, 21 nt, Human
cggugcuguccucagguggcc

SEQ ID NO: 2611808 - RNA, 17 nt, Human
cggugcuguccucaggu

SEQ ID NO: 2611809 - RNA, 16 nt, Human
cggugcuccaggcagg

SEQ ID NO: 2611810 - RNA, 16 nt, Human
cggugcuguccucagg

SEQ ID NO: 2611811 - RNA, 17 nt, Human
cuaaaaaaaaaaaagua

SEQ ID NO: 2611812 - RNA, 20 nt, Human
cgugccuccuuccaccuccc

SEQ ID NO: 2611813 - RNA, 19 nt, Human
cgugccuccuuccaccucc

SEQ ID NO: 2611814 - RNA, 23 nt, Human
cgugccuccaccaccacuggcca

SEQ ID NO: 2611815 - RNA, 22 nt, Human
cgugccuccaccaccacuggcc

SEQ ID NO: 2611816 - RNA, 12 nt, Human
cgugccuggcca

SEQ ID NO: 2611817 - RNA, 14 nt, Human
cgugccugugucca

SEQ ID NO: 2611818 - RNA, 12 nt, Human
cgugccuguguc

SEQ ID NO: 2611819 - RNA, 16 nt, Human
cgugccuggccacgcc

SEQ ID NO: 2611820 - RNA, 18 nt, Human
cgugccuucagcucuaca

SEQ ID NO: 2611821 - RNA, 16 nt, Human
cgugccuucagcucua

SEQ ID NO: 2611822 - RNA, 15 nt, Human
cgugccuucagcucu

SEQ ID NO: 2611823 - RNA, 13 nt, Human
cgugccuucagcu

SEQ ID NO: 2611824 - RNA, 23 nt, Human
cguggccccagccuggcccagcu

SEQ ID NO: 2611825 - RNA, 22 nt, Human
cguggccccagccuggcccagc

SEQ ID NO: 2611826 - RNA, 20 nt, Human
cgugccuuuugcaccccucc

SEQ ID NO: 2611827 - RNA, 19 nt, Human
cgugccuuuugcaccccuc

SEQ ID NO: 2611828 - RNA, 17 nt, Human
cgugccuuuugcacccc

SEQ ID NO: 2611829 - RNA, 16 nt, Human
cgugccuuuugcaccc

SEQ ID NO: 2611830 - RNA, 23 nt, Human
cgugccuccuuccaccucccucc

SEQ ID NO: 2611831 - RNA, 15 nt, Human
cgugccuguguccau

SEQ ID NO: 2611832 - RNA, 15 nt, Human
cguggcucagccagc

SEQ ID NO: 2611833 - RNA, 18 nt, Human
cguggcucagccagcacu

SEQ ID NO: 2611834 - RNA, 14 nt, Human
cguggcucagccag

SEQ ID NO: 2611835 - RNA, 22 nt, Human
cguggcuaagaguguccuagga

SEQ ID NO: 2611836 - RNA, 16 nt, Human
cguggccucuugagca

SEQ ID NO: 2611837 - RNA, 15 nt, Human
cguggccucuugagc

SEQ ID NO: 2611838 - RNA, 23 nt, Human
cguggccucuugagcaguggcug

SEQ ID NO: 2611839 - RNA, 20 nt, Human
cguggccuuccccagccucu

SEQ ID NO: 2611840 - RNA, 11 nt, Human
cguuccagccg

SEQ ID NO: 2611841 - RNA, 10 nt, Human
cguuccagcc

SEQ ID NO: 2611842 - RNA, 21 nt, Human
cguuccagccggcauggcugg

SEQ ID NO: 2611843 - RNA, 13 nt, Human
cguuccaguuccc

SEQ ID NO: 2611844 - RNA, 17 nt, Human
cguggcugcuucaagga

SEQ ID NO: 2611845 - RNA, 19 nt, Human
cguggcugcggcacccuug

SEQ ID NO: 2611846 - RNA, 15 nt, Human
cguggcugcuucaag

SEQ ID NO: 2611847 - RNA, 14 nt, Human
cguggcugcuucaa

SEQ ID NO: 2611848 - RNA, 12 nt, Human
cguggcugcuuc

SEQ ID NO: 2611849 - RNA, 15 nt, Human
cguggcucugcuggc

SEQ ID NO: 2611850 - RNA, 14 nt, Human
cguggcucugcugg

SEQ ID NO: 2611851 - RNA, 13 nt, Human
cguggcucugcug

SEQ ID NO: 2611852 - RNA, 21 nt, Human
cguggcugcccacacacccca

SEQ ID NO: 2611853 - RNA, 12 nt, Human
cguucuguuuac

SEQ ID NO: 2611854 - RNA, 20 nt, Human
cguuuacuuaucuuaugcca

SEQ ID NO: 2611855 - RNA, 20 nt, Human
cguuuacuaugccugugucu

SEQ ID NO: 2611856 - RNA, 14 nt, Human
cguuuauuuucaag

SEQ ID NO: 2611857 - RNA, 15 nt, Human
cguuuauuuucaaga

SEQ ID NO: 2611858 - RNA, 13 nt, Human
cguuucaaaaaca

SEQ ID NO: 2611859 - RNA, 23 nt, Human
cguuucagugucaaauaaacacu

SEQ ID NO: 2611860 - RNA, 15 nt, Human
cguuucaaaaacaca

SEQ ID NO: 2611861 - RNA, 22 nt, Human
cguuucauuuagucaugugacc

SEQ ID NO: 2611862 - RNA, 22 nt, Human
cguuucagcgacuccguuggcc

SEQ ID NO: 2611863 - RNA, 22 nt, Human
cguuucagugucaaauaaacac

SEQ ID NO: 2611864 - RNA, 20 nt, Human
cguuccaugaugcugggauu

SEQ ID NO: 2611865 - RNA, 17 nt, Human
cguuccuauugucauua

SEQ ID NO: 2611866 - RNA, 22 nt, Human
cguuccuucaaagcaaaugucu

SEQ ID NO: 2611867 - RNA, 20 nt, Human
cguuccuauugucauuaaag

SEQ ID NO: 2611868 - RNA, 14 nt, Human
cguucucacaccca

SEQ ID NO: 2611869 - RNA, 18 nt, Human
cguucucacacccaccgu

SEQ ID NO: 2611870 - RNA, 16 nt, Human
cguucucacacccacc

SEQ ID NO: 2611871 - RNA, 15 nt, Human
cguucucacacccac

SEQ ID NO: 2611872 - RNA, 18 nt, Human
cguuccuuacugcagaau

SEQ ID NO: 2611873 - RNA, 18 nt, Human
cguucugcuggccuggau

SEQ ID NO: 2611874 - RNA, 17 nt, Human
cguucugcuggccugga

SEQ ID NO: 2611875 - RNA, 20 nt, Human
cguucuguuuacaucaguuu

SEQ ID NO: 2611876 - RNA, 12 nt, Human
cguucugugcac

SEQ ID NO: 2611877 - RNA, 12 nt, Human
cguucucugccu

SEQ ID NO: 2611878 - RNA, 14 nt, Human
cguucugcucauca

SEQ ID NO: 2611879 - RNA, 19 nt, Human
cguuucuaaaggcuaccuu

SEQ ID NO: 2611880 - RNA, 21 nt, Human
cguuucuaaaggcuaccuuug

SEQ ID NO: 2611881 - RNA, 20 nt, Human
cguuucuaugacacaugcaa

SEQ ID NO: 2611882 - RNA, 22 nt, Human
cguuucuccaccuagacuguaa

SEQ ID NO: 2611883 - RNA, 18 nt, Human
cguuucuccaccuagacu

SEQ ID NO: 2611884 - RNA, 20 nt, Human
cguuuccugagaagugucua

SEQ ID NO: 2611885 - RNA, 22 nt, Human
cguuuccaucagguuccauccc

SEQ ID NO: 2611886 - RNA, 11 nt, Human
cguuuccauca

SEQ ID NO: 2611887 - RNA, 15 nt, Human
cguuuucuguuugga

SEQ ID NO: 2611888 - RNA, 13 nt, Human
cguuuugaagcua

SEQ ID NO: 2611889 - RNA, 20 nt, Human
cguuuugaagcuacugugug

SEQ ID NO: 2611890 - RNA, 15 nt, Human
cguuuuggaagcucu

SEQ ID NO: 2611891 - RNA, 23 nt, Human
cguuuugugugguggcaccuccu

SEQ ID NO: 2611892 - RNA, 23 nt, Human
cguuuuuauaaaaaauggugccu

SEQ ID NO: 2611893 - RNA, 13 nt, Human
cguuucuucccug

SEQ ID NO: 2611894 - RNA, 12 nt, Human
cguuucuucccu

SEQ ID NO: 2611895 - RNA, 17 nt, Human
cguuugaccuuuuaugu

SEQ ID NO: 2611896 - RNA, 16 nt, Human
cguuugagaagaaaac

SEQ ID NO: 2611897 - RNA, 17 nt, Human
ccuugaaugaugccaug

SEQ ID NO: 2611898 - RNA, 17 nt, Human
ccuugaacuuugaccuc

SEQ ID NO: 2611899 - RNA, 16 nt, Human
ccuugaacuggguacu

SEQ ID NO: 2611900 - RNA, 21 nt, Human
ccuugaaaacacuguucucug

SEQ ID NO: 2611901 - RNA, 19 nt, Human
ccuugaaaacacuguucuc

SEQ ID NO: 2611902 - RNA, 22 nt, Human
ccuugaaaacacuguucucugc

SEQ ID NO: 2611903 - RNA, 14 nt, Human
ccuugaacugggua

SEQ ID NO: 2611904 - RNA, 18 nt, Human
ccuucgcuccugugucuu

SEQ ID NO: 2611905 - RNA, 15 nt, Human
ccuucgcuccugugu

SEQ ID NO: 2611906 - RNA, 14 nt, Human
ccuucgcuccugug

SEQ ID NO: 2611907 - RNA, 13 nt, Human
ccuucgcuccugu

SEQ ID NO: 2611908 - RNA, 21 nt, Human
ccuucuuugauaauguuaaau

SEQ ID NO: 2611909 - RNA, 20 nt, Human
ccuucuuugauaauguuaaa

SEQ ID NO: 2611910 - RNA, 19 nt, Human
ccuucuuugauaauguuaa

SEQ ID NO: 2611911 - RNA, 18 nt, Human
ccuucuuugauaauguua

SEQ ID NO: 2611912 - RNA, 18 nt, Human
ccuucuuugcuugccucu

SEQ ID NO: 2611913 - RNA, 20 nt, Human
ccuucgcgguggaaggcccg

SEQ ID NO: 2611914 - RNA, 17 nt, Human
ccuucgcgguggaaggc

SEQ ID NO: 2611915 - RNA, 13 nt, Human
ccuucuuugauaa

SEQ ID NO: 2611916 - RNA, 15 nt, Human
ccuugaaaacacugu

SEQ ID NO: 2611917 - RNA, 16 nt, Human
ccuucuuuuucuucuu

SEQ ID NO: 2611918 - RNA, 14 nt, Human
ccuucuuuuucuuc

SEQ ID NO: 2611919 - RNA, 20 nt, Human
ccuugaccauucuccaccug

SEQ ID NO: 2611920 - RNA, 19 nt, Human
ccuugaccauucuccaccu

SEQ ID NO: 2611921 - RNA, 17 nt, Human
ccuugacagggcacacc

SEQ ID NO: 2611922 - RNA, 15 nt, Human
ccuugacagggcaca

SEQ ID NO: 2611923 - RNA, 21 nt, Human
ccuugacaaagucaagccaca

SEQ ID NO: 2611924 - RNA, 12 nt, Human
ccuugaaugugg

SEQ ID NO: 2611925 - RNA, 23 nt, Human
ccuugacaaagucaagccacaug

SEQ ID NO: 2611926 - RNA, 14 nt, Human
ccuugacaccugcu

SEQ ID NO: 2611927 - RNA, 13 nt, Human
ccuugacagggca

SEQ ID NO: 2611928 - RNA, 14 nt, Human
ccuugacagggcac

SEQ ID NO: 2611929 - RNA, 21 nt, Human
ccuugaccauucuccaccugc

SEQ ID NO: 2611930 - RNA, 16 nt, Human
ccuugaccaggccugg

SEQ ID NO: 2611931 - RNA, 15 nt, Human
ccuugaccaggccug

SEQ ID NO: 2611932 - RNA, 22 nt, Human
ccuugaguugauucagcucugc

SEQ ID NO: 2611933 - RNA, 23 nt, Human
ccuugaguugauucagcucugca

SEQ ID NO: 2611934 - RNA, 19 nt, Human
ccuuggauuguccccgacc

SEQ ID NO: 2611935 - RNA, 14 nt, Human
ccuugaucuguaua

SEQ ID NO: 2611936 - RNA, 15 nt, Human
ccuuggcaccagaca

SEQ ID NO: 2611937 - RNA, 20 nt, Human
ccuuggcaccagacacccag

SEQ ID NO: 2611938 - RNA, 21 nt, Human
ccuuggcaccagacacccagg

SEQ ID NO: 2611939 - RNA, 22 nt, Human
ccuuggcaccagacacccagga

SEQ ID NO: 2611940 - RNA, 23 nt, Human
ccuuggcaccagacacccaggac

SEQ ID NO: 2611941 - RNA, 19 nt, Human
ccuuggcaucacagggcag

SEQ ID NO: 2611942 - RNA, 18 nt, Human
ccuuggcaucuagagcuu

SEQ ID NO: 2611943 - RNA, 15 nt, Human
ccuuggcaugccuuc

SEQ ID NO: 2611944 - RNA, 11 nt, Human
ccuuuggcuuc

SEQ ID NO: 2611945 - RNA, 19 nt, Human
ccuucagugccuuauggaa

SEQ ID NO: 2611946 - RNA, 23 nt, Human
ccuucaagaucauguaccccaau

SEQ ID NO: 2611947 - RNA, 22 nt, Human
ccuucaagaccuucaccaaaca

SEQ ID NO: 2611948 - RNA, 13 nt, Human
ccuucaacugaaa

SEQ ID NO: 2611949 - RNA, 24 nt, Human
ccuucaacugaaaagacucagugu

SEQ ID NO: 2611950 - RNA, 18 nt, Human
ccuucaagaccuucacca

SEQ ID NO: 2611951 - RNA, 13 nt, Human
ccuucaagaccuu

SEQ ID NO: 2611952 - RNA, 19 nt, Human
ccuucaagaacucugggcu

SEQ ID NO: 2611953 - RNA, 14 nt, Human
ccuucaaccauucc

SEQ ID NO: 2611954 - RNA, 19 nt, Human
ccuucaaagcaaaugucuu

SEQ ID NO: 2611955 - RNA, 15 nt, Human
ccuuauuuuuuccca

SEQ ID NO: 2611956 - RNA, 16 nt, Human
ccuuauuuuuucccaa

SEQ ID NO: 2611957 - RNA, 14 nt, Human
ccuuauuuucaaga

SEQ ID NO: 2611958 - RNA, 18 nt, Human
ccuuauuuucaagaaacu

SEQ ID NO: 2611959 - RNA, 15 nt, Human
ccuucaaagcaaaug

SEQ ID NO: 2611960 - RNA, 21 nt, Human
ccuuagauuagcucuggacca

SEQ ID NO: 2611961 - RNA, 18 nt, Human
ccuuagauuagcucugga

SEQ ID NO: 2611962 - RNA, 16 nt, Human
ccuuauuguaccucuc

SEQ ID NO: 2611963 - RNA, 15 nt, Human
ccuuauuguaccucu

SEQ ID NO: 2611964 - RNA, 18 nt, Human
ccuuagagccaggcacac

SEQ ID NO: 2611965 - RNA, 17 nt, Human
ccuuagagccaggcaca

SEQ ID NO: 2611966 - RNA, 16 nt, Human
ccuuagagccaggcac

SEQ ID NO: 2611967 - RNA, 16 nt, Human
ccuuagauuagcucug

SEQ ID NO: 2611968 - RNA, 16 nt, Human
ccuuagaccuuccaua

SEQ ID NO: 2611969 - RNA, 15 nt, Human
ccuuagagccaggca

SEQ ID NO: 2611970 - RNA, 16 nt, Human
ccuuagagacaucaaa

SEQ ID NO: 2611971 - RNA, 19 nt, Human
ccuuagacagucccugcca

SEQ ID NO: 2611972 - RNA, 18 nt, Human
ccuuagacagucccugcc

SEQ ID NO: 2611973 - RNA, 20 nt, Human
ccuuagaacauuuuaauuca

SEQ ID NO: 2611974 - RNA, 21 nt, Human
ccuuagacagucccugccaau

SEQ ID NO: 2611975 - RNA, 17 nt, Human
ccuuagacagucccugc

SEQ ID NO: 2611976 - RNA, 16 nt, Human
ccuuagacagucccug

SEQ ID NO: 2611977 - RNA, 18 nt, Human
ccuuagaaccuuucuuac

SEQ ID NO: 2611978 - RNA, 16 nt, Human
ccuuagaaccuuucuu

SEQ ID NO: 2611979 - RNA, 15 nt, Human
ccuuagaaccuuucu

SEQ ID NO: 2611980 - RNA, 14 nt, Human
ccuuagaaccuuuc

SEQ ID NO: 2611981 - RNA, 16 nt, Human
ccuuaccagcagagca

SEQ ID NO: 2611982 - RNA, 15 nt, Human
ccuuaccagcagagc

SEQ ID NO: 2611983 - RNA, 17 nt, Human
ccuuacccuccuuggga

SEQ ID NO: 2611984 - RNA, 17 nt, Human
ccuuaccagcagagcac

SEQ ID NO: 2611985 - RNA, 20 nt, Human
ccuuaccucggugccuuccu

SEQ ID NO: 2611986 - RNA, 13 nt, Human
ccuuaccuccugc

SEQ ID NO: 2611987 - RNA, 14 nt, Human
ccuuaccuccugcc

SEQ ID NO: 2611988 - RNA, 16 nt, Human
ccuuaccuccugccca

SEQ ID NO: 2611989 - RNA, 17 nt, Human
ccuuaccuccugcccag

SEQ ID NO: 2611990 - RNA, 18 nt, Human
ccuuaccuccugcccagg

SEQ ID NO: 2611991 - RNA, 20 nt, Human
ccuuaccuccugcccaggag

SEQ ID NO: 2611992 - RNA, 14 nt, Human
ccuuaccucuuccg

SEQ ID NO: 2611993 - RNA, 14 nt, Human
ccuuaccugccagg

SEQ ID NO: 2611994 - RNA, 23 nt, Human
ccugugcugguguccugaccacc

SEQ ID NO: 2611995 - RNA, 22 nt, Human
ccugugcugguguccugaccac

SEQ ID NO: 2611996 - RNA, 22 nt, Human
ccugugcuucgggcccuuccca

SEQ ID NO: 2611997 - RNA, 21 nt, Human
ccugugcugguguccugacca

SEQ ID NO: 2611998 - RNA, 18 nt, Human
ccugugcugguguccuga

SEQ ID NO: 2611999 - RNA, 17 nt, Human
ccugugcugguguccug

SEQ ID NO: 2612000 - RNA, 14 nt, Human
ccugugcugguguc

SEQ ID NO: 2612001 - RNA, 12 nt, Human
ccugugcuggug

SEQ ID NO: 2612002 - RNA, 21 nt, Human
ccugugcugcccgucuucagc

SEQ ID NO: 2612003 - RNA, 23 nt, Human
ccugugcugcccgucuucagccu

SEQ ID NO: 2612004 - RNA, 24 nt, Human
ccugugcugguguccugaccaccc

SEQ ID NO: 2612005 - RNA, 16 nt, Human
ccuguggaagggacua

SEQ ID NO: 2612006 - RNA, 19 nt, Human
ccuguggaagggacuagga

SEQ ID NO: 2612007 - RNA, 20 nt, Human
ccuguggaagggacuaggag

SEQ ID NO: 2612008 - RNA, 18 nt, Human
ccuguggcaggcagcgcc

SEQ ID NO: 2612009 - RNA, 15 nt, Human
ccuguggcaggcagc

SEQ ID NO: 2612010 - RNA, 14 nt, Human
ccuguggcaggcag

SEQ ID NO: 2612011 - RNA, 24 nt, Human
ccuguggaagggacuaggagcacu

SEQ ID NO: 2612012 - RNA, 22 nt, Human
ccuguggcaggcagcgccaagc

SEQ ID NO: 2612013 - RNA, 19 nt, Human
ccuguggcaggcagcgcca

SEQ ID NO: 2612014 - RNA, 22 nt, Human
ccuguggccccacccugggccc

SEQ ID NO: 2612015 - RNA, 20 nt, Human
ccuguggccccacccugggc

SEQ ID NO: 2612016 - RNA, 18 nt, Human
ccuguggccccacccugg

SEQ ID NO: 2612017 - RNA, 14 nt, Human
ccuuaccagcagag

SEQ ID NO: 2612018 - RNA, 17 nt, Human
ccuguggccccacccug

SEQ ID NO: 2612019 - RNA, 16 nt, Human
ccuguggccccacccu

SEQ ID NO: 2612020 - RNA, 15 nt, Human
ccuguggccccaccc

SEQ ID NO: 2612021 - RNA, 18 nt, Human
ccuguggcaucuuugccu

SEQ ID NO: 2612022 - RNA, 23 nt, Human
ccuguggcaucuuugccuugggc

SEQ ID NO: 2612023 - RNA, 20 nt, Human
ccuguggccaaguucuuagu

SEQ ID NO: 2612024 - RNA, 13 nt, Human
ccuucgccaccug

SEQ ID NO: 2612025 - RNA, 23 nt, Human
ccuucgauacaccgggccuggag

SEQ ID NO: 2612026 - RNA, 22 nt, Human
ccuucgauacaccgggccugga

SEQ ID NO: 2612027 - RNA, 20 nt, Human
ccuucgauacaccgggccug

SEQ ID NO: 2612028 - RNA, 16 nt, Human
ccuuccugccaccagu

SEQ ID NO: 2612029 - RNA, 17 nt, Human
ccuuccugccaccaguc

SEQ ID NO: 2612030 - RNA, 17 nt, Human
ccuuccugccaccugcu

SEQ ID NO: 2612031 - RNA, 11 nt, Human
ccuuccugccc

SEQ ID NO: 2612032 - RNA, 18 nt, Human
ccuuccugccaccugcug

SEQ ID NO: 2612033 - RNA, 15 nt, Human
ccuucgauacaccgg

SEQ ID NO: 2612034 - RNA, 21 nt, Human
ccuucccaaaggacuccaccc

SEQ ID NO: 2612035 - RNA, 18 nt, Human
ccuucccaaaggacucca

SEQ ID NO: 2612036 - RNA, 15 nt, Human
ccuuccucugcagcu

SEQ ID NO: 2612037 - RNA, 12 nt, Human
ccuuccucugca

SEQ ID NO: 2612038 - RNA, 14 nt, Human
ccuuccucugaggc

SEQ ID NO: 2612039 - RNA, 16 nt, Human
ccuuccauguggagaa

SEQ ID NO: 2612040 - RNA, 19 nt, Human
ccuuccaugucggccucua

SEQ ID NO: 2612041 - RNA, 16 nt, Human
ccuucccaaaggacuc

SEQ ID NO: 2612042 - RNA, 20 nt, Human
ccuuccaugucggccucuaa

SEQ ID NO: 2612043 - RNA, 14 nt, Human
ccuuccugccacca

SEQ ID NO: 2612044 - RNA, 17 nt, Human
ccuuccucugcagcuga

SEQ ID NO: 2612045 - RNA, 16 nt, Human
ccuuccucugcagcug

SEQ ID NO: 2612046 - RNA, 18 nt, Human
ccuuccucugcagcugac

SEQ ID NO: 2612047 - RNA, 14 nt, Human
ccuuccucuuucca

SEQ ID NO: 2612048 - RNA, 16 nt, Human
ccuuccagggguggga

SEQ ID NO: 2612049 - RNA, 15 nt, Human
ccuuccagggguggg

SEQ ID NO: 2612050 - RNA, 15 nt, Human
ccuuccacugagggc

SEQ ID NO: 2612051 - RNA, 17 nt, Human
ccuuccacugagggcag

SEQ ID NO: 2612052 - RNA, 18 nt, Human
ccuuccacgcugucucca

SEQ ID NO: 2612053 - RNA, 19 nt, Human
ccuuccacgcugucuccag

SEQ ID NO: 2612054 - RNA, 20 nt, Human
ccuuccacggauccauguag

SEQ ID NO: 2612055 - RNA, 20 nt, Human
ccuuccacgcugucuccaga

SEQ ID NO: 2612056 - RNA, 21 nt, Human
ccuuccacggauccauguagc

SEQ ID NO: 2612057 - RNA, 22 nt, Human
ccuuccaggggugggacacccu

SEQ ID NO: 2612058 - RNA, 18 nt, Human
ccuuccaggggugggaca

SEQ ID NO: 2612059 - RNA, 23 nt, Human
ccuuccaugucgccucugcauuc

SEQ ID NO: 2612060 - RNA, 21 nt, Human
ccuuccaugucgccucugcau

SEQ ID NO: 2612061 - RNA, 20 nt, Human
ccuuccaugucgccucugca

SEQ ID NO: 2612062 - RNA, 19 nt, Human
ccuuccaugucgccucugc

SEQ ID NO: 2612063 - RNA, 17 nt, Human
ccuucaucuccagggag

SEQ ID NO: 2612064 - RNA, 14 nt, Human
ccuucaucuggaac

SEQ ID NO: 2612065 - RNA, 15 nt, Human
ccuucaucuccaggg

SEQ ID NO: 2612066 - RNA, 13 nt, Human
ccuucaucuggaa

SEQ ID NO: 2612067 - RNA, 14 nt, Human
ccuucaucuccagg

SEQ ID NO: 2612068 - RNA, 18 nt, Human
ccuuccacacccccaccc

SEQ ID NO: 2612069 - RNA, 15 nt, Human
ccuuccacaccccca

SEQ ID NO: 2612070 - RNA, 16 nt, Human
ccuuccaccucccucc

SEQ ID NO: 2612071 - RNA, 20 nt, Human
ccuucagugccuuauggaac

SEQ ID NO: 2612072 - RNA, 18 nt, Human
ccuucaguuaugauuuuu

SEQ ID NO: 2612073 - RNA, 21 nt, Human
ccuucagucuugaauuucuaa

SEQ ID NO: 2612074 - RNA, 15 nt, Human
ccuucagugccuuau

SEQ ID NO: 2612075 - RNA, 24 nt, Human
ccuucaguacccucucagcuccag

SEQ ID NO: 2612076 - RNA, 20 nt, Human
ccuucagucuugaauuucua

SEQ ID NO: 2612077 - RNA, 23 nt, Human
ccuucaguacccucucagcucca

SEQ ID NO: 2612078 - RNA, 20 nt, Human
ccuucaguacccucucagcu

SEQ ID NO: 2612079 - RNA, 19 nt, Human
ccuucaguacccucucagc

SEQ ID NO: 2612080 - RNA, 17 nt, Human
ccuucaguacccucuca

SEQ ID NO: 2612081 - RNA, 14 nt, Human
ccuucagugccuua

SEQ ID NO: 2612082 - RNA, 13 nt, Human
ccuucagugccuu

SEQ ID NO: 2612083 - RNA, 14 nt, Human
ccuucaauaaagua

SEQ ID NO: 2612084 - RNA, 22 nt, Human
ccuucaauaaaugguauagcaa

SEQ ID NO: 2612085 - RNA, 16 nt, Human
ccuucaauaaaguauc

SEQ ID NO: 2612086 - RNA, 17 nt, Human
ccuucaaguuagcucag

SEQ ID NO: 2612087 - RNA, 19 nt, Human
ccuucaaguuagcucagga

SEQ ID NO: 2612088 - RNA, 14 nt, Human
ccuucaauuccugg

SEQ ID NO: 2612089 - RNA, 15 nt, Human
ccuucaauuccuggg

SEQ ID NO: 2612090 - RNA, 16 nt, Human
ccuucaauuccugggc

SEQ ID NO: 2612091 - RNA, 20 nt, Human
ccuucaauuccugggcccca

SEQ ID NO: 2612092 - RNA, 12 nt, Human
ccuucacaaagc

SEQ ID NO: 2612093 - RNA, 18 nt, Human
ccuucacaaagcccaagg

SEQ ID NO: 2612094 - RNA, 20 nt, Human
ccuucagggugaugccaggu

SEQ ID NO: 2612095 - RNA, 19 nt, Human
ccuucagggugaugccagg

SEQ ID NO: 2612096 - RNA, 18 nt, Human
ccuucagggugaugccag

SEQ ID NO: 2612097 - RNA, 12 nt, Human
ccuucaggguga

SEQ ID NO: 2612098 - RNA, 19 nt, Human
ccuguggaaucuggaguga

SEQ ID NO: 2612099 - RNA, 21 nt, Human
ccuguccccucagcuccagac

SEQ ID NO: 2612100 - RNA, 18 nt, Human
ccuguccccucagcucca

SEQ ID NO: 2612101 - RNA, 17 nt, Human
ccuguccccucagcucc

SEQ ID NO: 2612102 - RNA, 16 nt, Human
ccuguccccucagcuc

SEQ ID NO: 2612103 - RNA, 15 nt, Human
ccuguccccucagcu

SEQ ID NO: 2612104 - RNA, 14 nt, Human
ccuguccccucagc

SEQ ID NO: 2612105 - RNA, 18 nt, Human
ccuguccccgcacugggc

SEQ ID NO: 2612106 - RNA, 17 nt, Human
ccugucccccugacaac

SEQ ID NO: 2612107 - RNA, 16 nt, Human
ccugucccccugacaa

SEQ ID NO: 2612108 - RNA, 19 nt, Human
ccuguccagcuccaaccug

SEQ ID NO: 2612109 - RNA, 17 nt, Human
ccuguccaaacugccua

SEQ ID NO: 2612110 - RNA, 19 nt, Human
ccuguccaaacugccuaag

SEQ ID NO: 2612111 - RNA, 23 nt, Human
ccuguccaaacugccuaagcccu

SEQ ID NO: 2612112 - RNA, 12 nt, Human
ccuguccaaccu

SEQ ID NO: 2612113 - RNA, 19 nt, Human
ccuguccaaccuaaccccu

SEQ ID NO: 2612114 - RNA, 21 nt, Human
ccuguccacacccagcucagc

SEQ ID NO: 2612115 - RNA, 19 nt, Human
ccuguccacacccagcuca

SEQ ID NO: 2612116 - RNA, 22 nt, Human
ccuguccacacccagcucagca

SEQ ID NO: 2612117 - RNA, 16 nt, Human
ccuguccacacccagc

SEQ ID NO: 2612118 - RNA, 18 nt, Human
ccuguccacacccagcuc

SEQ ID NO: 2612119 - RNA, 23 nt, Human
ccuguccaaccuaaccccuuucc

SEQ ID NO: 2612120 - RNA, 14 nt, Human
ccuguccagcucca

SEQ ID NO: 2612121 - RNA, 15 nt, Human
ccuguccagcuccaa

SEQ ID NO: 2612122 - RNA, 13 nt, Human
ccuguccagcucc

SEQ ID NO: 2612123 - RNA, 22 nt, Human
ccuguccagccugggcagccag

SEQ ID NO: 2612124 - RNA, 13 nt, Human
ccuguccagagag

SEQ ID NO: 2612125 - RNA, 12 nt, Human
ccuguccagccu

SEQ ID NO: 2612126 - RNA, 14 nt, Human
ccuguccagccugg

SEQ ID NO: 2612127 - RNA, 16 nt, Human
ccuguccagccugggc

SEQ ID NO: 2612128 - RNA, 22 nt, Human
ccugugagcuaggaauuguguu

SEQ ID NO: 2612129 - RNA, 15 nt, Human
ccugugagcccagcu

SEQ ID NO: 2612130 - RNA, 17 nt, Human
ccugugagcccagcugg

SEQ ID NO: 2612131 - RNA, 20 nt, Human
ccugugaguacuacaguccu

SEQ ID NO: 2612132 - RNA, 20 nt, Human
ccugugagcccagcuggguc

SEQ ID NO: 2612133 - RNA, 13 nt, Human
ccugugaggcagg

SEQ ID NO: 2612134 - RNA, 14 nt, Human
ccugugaggcaggg

SEQ ID NO: 2612135 - RNA, 22 nt, Human
ccuguccuccugguggguccag

SEQ ID NO: 2612136 - RNA, 17 nt, Human
ccuguccuccugguggg

SEQ ID NO: 2612137 - RNA, 16 nt, Human
ccuguccuccuggugg

SEQ ID NO: 2612138 - RNA, 14 nt, Human
ccuguccuccuggu

SEQ ID NO: 2612139 - RNA, 18 nt, Human
ccugugacuucagcucug

SEQ ID NO: 2612140 - RNA, 23 nt, Human
ccuguccucccauccccuggacu

SEQ ID NO: 2612141 - RNA, 22 nt, Human
ccuguccucccauccccuggac

SEQ ID NO: 2612142 - RNA, 21 nt, Human
ccuguccucccauccccugga

SEQ ID NO: 2612143 - RNA, 17 nt, Human
ccuguccucccaucccc

SEQ ID NO: 2612144 - RNA, 13 nt, Human
ccuguccuccucg

SEQ ID NO: 2612145 - RNA, 14 nt, Human
ccuguccuccucgg

SEQ ID NO: 2612146 - RNA, 15 nt, Human
ccuguccuccucgga

SEQ ID NO: 2612147 - RNA, 23 nt, Human
ccuguccuccucggaucaccgag

SEQ ID NO: 2612148 - RNA, 22 nt, Human
ccuguccucacugcucccugaa

SEQ ID NO: 2612149 - RNA, 13 nt, Human
ccuguccuccaac

SEQ ID NO: 2612150 - RNA, 15 nt, Human
ccuguccucagcuuc

SEQ ID NO: 2612151 - RNA, 21 nt, Human
ccuguccuccaacaccaagca

SEQ ID NO: 2612152 - RNA, 22 nt, Human
ccuguccuccaacaccaagcac

SEQ ID NO: 2612153 - RNA, 16 nt, Human
ccuguccucccauccc

SEQ ID NO: 2612154 - RNA, 21 nt, Human
ccugugauggggcccugccuc

SEQ ID NO: 2612155 - RNA, 20 nt, Human
ccugugauggggcccugccu

SEQ ID NO: 2612156 - RNA, 22 nt, Human
ccugugauggggcccugccucc

SEQ ID NO: 2612157 - RNA, 19 nt, Human
ccugugauggggcccugcc

SEQ ID NO: 2612158 - RNA, 18 nt, Human
ccugugauggggcccugc

SEQ ID NO: 2612159 - RNA, 17 nt, Human
ccugugauggggcccug

SEQ ID NO: 2612160 - RNA, 23 nt, Human
ccugugaggugcagagugcccag

SEQ ID NO: 2612161 - RNA, 17 nt, Human
ccugugaggcaggggcg

SEQ ID NO: 2612162 - RNA, 19 nt, Human
ccugugaggugcagagugc

SEQ ID NO: 2612163 - RNA, 19 nt, Human
ccugugccucugggacugg

SEQ ID NO: 2612164 - RNA, 20 nt, Human
ccugugccuccucaccccca

SEQ ID NO: 2612165 - RNA, 21 nt, Human
ccugugccuccucacccccag

SEQ ID NO: 2612166 - RNA, 22 nt, Human
ccugugcugcccgucuucagcc

SEQ ID NO: 2612167 - RNA, 15 nt, Human
ccugugccucuggga

SEQ ID NO: 2612168 - RNA, 17 nt, Human
ccugugccucugggacu

SEQ ID NO: 2612169 - RNA, 18 nt, Human
ccugugcagccgcugagc

SEQ ID NO: 2612170 - RNA, 20 nt, Human
ccugugcagccgcugagcga

SEQ ID NO: 2612171 - RNA, 21 nt, Human
ccugugcagccgcugagcgag

SEQ ID NO: 2612172 - RNA, 17 nt, Human
ccugugcauguaugucu

SEQ ID NO: 2612173 - RNA, 14 nt, Human
ccugugcauguaug

SEQ ID NO: 2612174 - RNA, 20 nt, Human
ccugugcauguaugucuugg

SEQ ID NO: 2612175 - RNA, 19 nt, Human
ccugugccacccaccaggg

SEQ ID NO: 2612176 - RNA, 21 nt, Human
ccugugccacccaccagggcg

SEQ ID NO: 2612177 - RNA, 23 nt, Human
ccugugcccacaucccaggcuuc

SEQ ID NO: 2612178 - RNA, 18 nt, Human
ccugugccuaacaccagc

SEQ ID NO: 2612179 - RNA, 15 nt, Human
ccugugccuccucac

SEQ ID NO: 2612180 - RNA, 15 nt, Human
ccugugcccuuauuc

SEQ ID NO: 2612181 - RNA, 15 nt, Human
ccuggugcugccaca

SEQ ID NO: 2612182 - RNA, 21 nt, Human
ccuggugcugccacacuucag

SEQ ID NO: 2612183 - RNA, 18 nt, Human
ccuggugcugccacacuu

SEQ ID NO: 2612184 - RNA, 20 nt, Human
ccuggugcugccucuaccug

SEQ ID NO: 2612185 - RNA, 12 nt, Human
ccuggugcugcu

SEQ ID NO: 2612186 - RNA, 15 nt, Human
ccuggugcugccucu

SEQ ID NO: 2612187 - RNA, 17 nt, Human
ccugggcaccuggggag

SEQ ID NO: 2612188 - RNA, 13 nt, Human
ccugggcagaaag

SEQ ID NO: 2612189 - RNA, 13 nt, Human
ccuggugcugcug

SEQ ID NO: 2612190 - RNA, 13 nt, Human
ccuggugcuggau

SEQ ID NO: 2612191 - RNA, 13 nt, Human
ccugguggcagcu

SEQ ID NO: 2612192 - RNA, 12 nt, Human
ccugguggcagc

SEQ ID NO: 2612193 - RNA, 12 nt, Human
ccugguggacag

SEQ ID NO: 2612194 - RNA, 14 nt, Human
ccugguggacaguc

SEQ ID NO: 2612195 - RNA, 17 nt, Human
ccugguggacaguccug

SEQ ID NO: 2612196 - RNA, 18 nt, Human
ccugguggacaguccugg

SEQ ID NO: 2612197 - RNA, 19 nt, Human
ccugguggacaguccuggg

SEQ ID NO: 2612198 - RNA, 22 nt, Human
ccugguggagaaagcacugacc

SEQ ID NO: 2612199 - RNA, 12 nt, Human
ccugguggagaa

SEQ ID NO: 2612200 - RNA, 20 nt, Human
ccugguggacaguccuggga

SEQ ID NO: 2612201 - RNA, 18 nt, Human
ccugguggcagcucaccu

SEQ ID NO: 2612202 - RNA, 17 nt, Human
ccugguggcagcucacc

SEQ ID NO: 2612203 - RNA, 16 nt, Human
ccugguggcagcucac

SEQ ID NO: 2612204 - RNA, 14 nt, Human
ccugguggcagcuc

SEQ ID NO: 2612205 - RNA, 23 nt, Human
ccuguaauuccuaccucccugca

SEQ ID NO: 2612206 - RNA, 23 nt, Human
ccuguaauuguuguuuguaugua

SEQ ID NO: 2612207 - RNA, 15 nt, Human
ccuguaaucccagcu

SEQ ID NO: 2612208 - RNA, 16 nt, Human
ccuguaaucccagcua

SEQ ID NO: 2612209 - RNA, 18 nt, Human
ccuguaaucccagcuacu

SEQ ID NO: 2612210 - RNA, 23 nt, Human
ccuguaaucccagcuacucagga

SEQ ID NO: 2612211 - RNA, 15 nt, Human
ccuguacaauauuua

SEQ ID NO: 2612212 - RNA, 18 nt, Human
ccuguaauuuuuuucuua

SEQ ID NO: 2612213 - RNA, 21 nt, Human
ccuguacaauauuuaaaauuu

SEQ ID NO: 2612214 - RNA, 20 nt, Human
ccuguaauccuagcacuuug

SEQ ID NO: 2612215 - RNA, 20 nt, Human
ccuguaaucccagcacuugg

SEQ ID NO: 2612216 - RNA, 18 nt, Human
ccuguaaucccagcacuu

SEQ ID NO: 2612217 - RNA, 23 nt, Human
ccuguaaucccagcacuuuggga

SEQ ID NO: 2612218 - RNA, 21 nt, Human
ccuguaaucccagcacuuugg

SEQ ID NO: 2612219 - RNA, 16 nt, Human
ccuguaaucccagcag

SEQ ID NO: 2612220 - RNA, 21 nt, Human
ccuguagagugggagcugagu

SEQ ID NO: 2612221 - RNA, 19 nt, Human
ccuguagagugggagcuga

SEQ ID NO: 2612222 - RNA, 15 nt, Human
ccuguagcacuuacu

SEQ ID NO: 2612223 - RNA, 18 nt, Human
ccuguacuguucuguguc

SEQ ID NO: 2612224 - RNA, 23 nt, Human
ccuguagagugggagcugagugg

SEQ ID NO: 2612225 - RNA, 22 nt, Human
ccuguaccuuuugaggagcccc

SEQ ID NO: 2612226 - RNA, 12 nt, Human
ccuguacacuga

SEQ ID NO: 2612227 - RNA, 23 nt, Human
ccuguaccuuuugaggagcccca

SEQ ID NO: 2612228 - RNA, 13 nt, Human
ccuguacucagga

SEQ ID NO: 2612229 - RNA, 14 nt, Human
ccuguacucaggag

SEQ ID NO: 2612230 - RNA, 15 nt, Human
ccuguacucaggagg

SEQ ID NO: 2612231 - RNA, 21 nt, Human
ccuguacucaggaggcugagg

SEQ ID NO: 2612232 - RNA, 22 nt, Human
ccuguacucaggaggcugaggg

SEQ ID NO: 2612233 - RNA, 17 nt, Human
ccuguacuguucugugu

SEQ ID NO: 2612234 - RNA, 16 nt, Human
ccuguacucuuccgaa

SEQ ID NO: 2612235 - RNA, 15 nt, Human
ccuguacucuuccga

SEQ ID NO: 2612236 - RNA, 20 nt, Human
ccuguacucgcuugugcaga

SEQ ID NO: 2612237 - RNA, 19 nt, Human
ccuguacucgcuugugcag

SEQ ID NO: 2612238 - RNA, 18 nt, Human
ccuguacucgcuugugca

SEQ ID NO: 2612239 - RNA, 17 nt, Human
ccuguacucgcuugugc

SEQ ID NO: 2612240 - RNA, 23 nt, Human
ccuguacucaggaggcugagggg

SEQ ID NO: 2612241 - RNA, 22 nt, Human
ccuguauucucaaacacaguua

SEQ ID NO: 2612242 - RNA, 14 nt, Human
ccuguauguugucc

SEQ ID NO: 2612243 - RNA, 13 nt, Human
ccuguauguuguc

SEQ ID NO: 2612244 - RNA, 17 nt, Human
ccuguaugucuccagua

SEQ ID NO: 2612245 - RNA, 16 nt, Human
ccuguaugucuccagu

SEQ ID NO: 2612246 - RNA, 19 nt, Human
ccuguaguugcguggacuc

SEQ ID NO: 2612247 - RNA, 23 nt, Human
ccugucaaacaaagccagaagcu

SEQ ID NO: 2612248 - RNA, 20 nt, Human
ccugucaaacaaagccagaa

SEQ ID NO: 2612249 - RNA, 22 nt, Human
ccugucaaacaaagccagaagc

SEQ ID NO: 2612250 - RNA, 17 nt, Human
ccuguauuuucuuucuc

SEQ ID NO: 2612251 - RNA, 18 nt, Human
ccugucaaacaaagccag

SEQ ID NO: 2612252 - RNA, 19 nt, Human
ccugucaaacaaagccaga

SEQ ID NO: 2612253 - RNA, 18 nt, Human
ccuguaguugcguggacu

SEQ ID NO: 2612254 - RNA, 23 nt, Human
ccuguaguuaggaaauaaaaccu

SEQ ID NO: 2612255 - RNA, 21 nt, Human
ccuguaguuaggaaauaaaac

SEQ ID NO: 2612256 - RNA, 22 nt, Human
ccuguaguuaggaaauaaaacc

SEQ ID NO: 2612257 - RNA, 16 nt, Human
ccuguaguuaggaaau

SEQ ID NO: 2612258 - RNA, 17 nt, Human
ccuguaguuaggaaaua

SEQ ID NO: 2612259 - RNA, 18 nt, Human
ccuguaguuaggaaauaa

SEQ ID NO: 2612260 - RNA, 19 nt, Human
ccuguaguuaggaaauaaa

SEQ ID NO: 2612261 - RNA, 15 nt, Human
ccuguagucccagcu

SEQ ID NO: 2612262 - RNA, 16 nt, Human
ccuguagucccagcua

SEQ ID NO: 2612263 - RNA, 13 nt, Human
ccuguaguccuag

SEQ ID NO: 2612264 - RNA, 14 nt, Human
ccuguaguuaggaa

SEQ ID NO: 2612265 - RNA, 15 nt, Human
ccuguaguuaggaaa

SEQ ID NO: 2612266 - RNA, 19 nt, Human
ccuguagucccagccacuc

SEQ ID NO: 2612267 - RNA, 18 nt, Human
ccuguagucccagccacu

SEQ ID NO: 2612268 - RNA, 14 nt, Human
ccuguagucccagc

SEQ ID NO: 2612269 - RNA, 13 nt, Human
ccuguagucccag

SEQ ID NO: 2612270 - RNA, 19 nt, Human
ccugcguucuugugacaga

SEQ ID NO: 2612271 - RNA, 22 nt, Human
ccugcguuuuggaagcucugaa

SEQ ID NO: 2612272 - RNA, 17 nt, Human
ccugcguggggacaggg

SEQ ID NO: 2612273 - RNA, 16 nt, Human
ccugcguggggacagg

SEQ ID NO: 2612274 - RNA, 15 nt, Human
ccugcguggggacag

SEQ ID NO: 2612275 - RNA, 13 nt, Human
ccugcguggggac

SEQ ID NO: 2612276 - RNA, 12 nt, Human
ccugcgugggga

SEQ ID NO: 2612277 - RNA, 16 nt, Human
ccugcuccagaccuga

SEQ ID NO: 2612278 - RNA, 22 nt, Human
ccugcuccagaccugauccugg

SEQ ID NO: 2612279 - RNA, 12 nt, Human
ccugcuccagcu

SEQ ID NO: 2612280 - RNA, 13 nt, Human
ccugcuccagcug

SEQ ID NO: 2612281 - RNA, 14 nt, Human
ccugcuccagcugu

SEQ ID NO: 2612282 - RNA, 16 nt, Human
ccugcucccaggccag

SEQ ID NO: 2612283 - RNA, 12 nt, Human
ccugcucccagg

SEQ ID NO: 2612284 - RNA, 23 nt, Human
ccugcucccagcagcccuaagga

SEQ ID NO: 2612285 - RNA, 16 nt, Human
ccugcucccagcagcc

SEQ ID NO: 2612286 - RNA, 15 nt, Human
ccugcucccagcagc

SEQ ID NO: 2612287 - RNA, 14 nt, Human
ccugcucccagcag

SEQ ID NO: 2612288 - RNA, 13 nt, Human
ccugcucccagca

SEQ ID NO: 2612289 - RNA, 12 nt, Human
ccugcucccagc

SEQ ID NO: 2612290 - RNA, 22 nt, Human
ccugcuccagcuguucagcugg

SEQ ID NO: 2612291 - RNA, 16 nt, Human
ccugcaaccugauugu

SEQ ID NO: 2612292 - RNA, 19 nt, Human
ccugcaacaccuuguuucc

SEQ ID NO: 2612293 - RNA, 23 nt, Human
ccugcgucgaagcuuugaaggcc

SEQ ID NO: 2612294 - RNA, 22 nt, Human
ccugcguccuccucaccucaug

SEQ ID NO: 2612295 - RNA, 20 nt, Human
ccugcguccuccucaccuca

SEQ ID NO: 2612296 - RNA, 23 nt, Human
ccugcgucucauacucaccucac

SEQ ID NO: 2612297 - RNA, 18 nt, Human
ccugcaacaccuuguuuc

SEQ ID NO: 2612298 - RNA, 19 nt, Human
ccugcaaagcccagcuuga

SEQ ID NO: 2612299 - RNA, 17 nt, Human
ccugauuugcugggcag

SEQ ID NO: 2612300 - RNA, 22 nt, Human
ccugauuugcugggcaguuuuu

SEQ ID NO: 2612301 - RNA, 20 nt, Human
ccugauuuacaguuucaaaa

SEQ ID NO: 2612302 - RNA, 17 nt, Human
ccugauuuacaguuuca

SEQ ID NO: 2612303 - RNA, 14 nt, Human
ccugauuuacaguu

SEQ ID NO: 2612304 - RNA, 18 nt, Human
ccugauuuaggagaagcc

SEQ ID NO: 2612305 - RNA, 19 nt, Human
ccugauuuaggagaagcca

SEQ ID NO: 2612306 - RNA, 20 nt, Human
ccugauuuaggagaagccag

SEQ ID NO: 2612307 - RNA, 21 nt, Human
ccugauuuaggagaagccagg

SEQ ID NO: 2612308 - RNA, 22 nt, Human
ccugauuuaggagaagccagga

SEQ ID NO: 2612309 - RNA, 20 nt, Human
ccugcuuggguggagaagcc

SEQ ID NO: 2612310 - RNA, 23 nt, Human
ccugcuuggguggagaagccauu

SEQ ID NO: 2612311 - RNA, 22 nt, Human
ccugcuuggguggagaagccau

SEQ ID NO: 2612312 - RNA, 21 nt, Human
ccugcuuggguggagaagcca

SEQ ID NO: 2612313 - RNA, 20 nt, Human
ccugcuuuuuauggccugug

SEQ ID NO: 2612314 - RNA, 16 nt, Human
ccuggaaaccacaguc

SEQ ID NO: 2612315 - RNA, 15 nt, Human
ccuggaaaccacagu

SEQ ID NO: 2612316 - RNA, 12 nt, Human
ccuggaaaccac

SEQ ID NO: 2612317 - RNA, 17 nt, Human
ccuggaaaccacagucc

SEQ ID NO: 2612318 - RNA, 17 nt, Human
ccugcuuugggcugccc

SEQ ID NO: 2612319 - RNA, 18 nt, Human
ccugcuuugggcugcccu

SEQ ID NO: 2612320 - RNA, 18 nt, Human
ccugcuccucccuggcug

SEQ ID NO: 2612321 - RNA, 17 nt, Human
ccugcuccucccuggcu

SEQ ID NO: 2612322 - RNA, 16 nt, Human
ccugcuccucccuggc

SEQ ID NO: 2612323 - RNA, 15 nt, Human
ccugcuccucccugg

SEQ ID NO: 2612324 - RNA, 15 nt, Human
ccugcucccucccau

SEQ ID NO: 2612325 - RNA, 18 nt, Human
ccugcucccccacccccu

SEQ ID NO: 2612326 - RNA, 23 nt, Human
ccugcucccccacccccucccca

SEQ ID NO: 2612327 - RNA, 14 nt, Human
ccugcucccccacc

SEQ ID NO: 2612328 - RNA, 16 nt, Human
ccugcucccccacccc

SEQ ID NO: 2612329 - RNA, 21 nt, Human
ccugcuggguguggcgcagca

SEQ ID NO: 2612330 - RNA, 20 nt, Human
ccugcuccucccuggcugcc

SEQ ID NO: 2612331 - RNA, 19 nt, Human
ccugcuccucccuggcugc

SEQ ID NO: 2612332 - RNA, 17 nt, Human
ccugcuggucacagccu

SEQ ID NO: 2612333 - RNA, 13 nt, Human
ccugcugguucag

SEQ ID NO: 2612334 - RNA, 19 nt, Human
ccugcugguucaggguugg

SEQ ID NO: 2612335 - RNA, 22 nt, Human
ccugcuuccaggaaacuccaca

SEQ ID NO: 2612336 - RNA, 20 nt, Human
ccugcuggucacagccuccu

SEQ ID NO: 2612337 - RNA, 18 nt, Human
ccugcuggucacagccuc

SEQ ID NO: 2612338 - RNA, 22 nt, Human
ccugcuucuccagccuggaccc

SEQ ID NO: 2612339 - RNA, 20 nt, Human
ccugcuucuccagccuggac

SEQ ID NO: 2612340 - RNA, 17 nt, Human
ccugcuucuccagccug

SEQ ID NO: 2612341 - RNA, 16 nt, Human
ccugcuucuccagccu

SEQ ID NO: 2612342 - RNA, 15 nt, Human
ccugcuucuccagcc

SEQ ID NO: 2612343 - RNA, 14 nt, Human
ccugcuucuccagc

SEQ ID NO: 2612344 - RNA, 22 nt, Human
ccugcuuccugucuuugggaga

SEQ ID NO: 2612345 - RNA, 15 nt, Human
ccugcuuccugucuu

SEQ ID NO: 2612346 - RNA, 16 nt, Human
ccuggagccccugggu

SEQ ID NO: 2612347 - RNA, 14 nt, Human
ccuggagccccugg

SEQ ID NO: 2612348 - RNA, 17 nt, Human
ccuggagccccugggug

SEQ ID NO: 2612349 - RNA, 21 nt, Human
ccuggcacugcuuccagugag

SEQ ID NO: 2612350 - RNA, 16 nt, Human
ccuggcagccccuguu

SEQ ID NO: 2612351 - RNA, 14 nt, Human
ccuggcagccccug

SEQ ID NO: 2612352 - RNA, 13 nt, Human
ccuggcagaacug

SEQ ID NO: 2612353 - RNA, 17 nt, Human
ccuggcaugggaaugaa

SEQ ID NO: 2612354 - RNA, 16 nt, Human
ccuggcaugggaauga

SEQ ID NO: 2612355 - RNA, 19 nt, Human
ccuggcagccgugccuuca

SEQ ID NO: 2612356 - RNA, 18 nt, Human
ccuggcagccgugccuuc

SEQ ID NO: 2612357 - RNA, 12 nt, Human
ccuggcagccgu

SEQ ID NO: 2612358 - RNA, 17 nt, Human
ccuggcacugcuuccag

SEQ ID NO: 2612359 - RNA, 20 nt, Human
ccuggcacugcuuccaguga

SEQ ID NO: 2612360 - RNA, 18 nt, Human
ccuggagccaacugcugc

SEQ ID NO: 2612361 - RNA, 15 nt, Human
ccuggagccaacugc

SEQ ID NO: 2612362 - RNA, 19 nt, Human
ccuggagcaggccuugcgc

SEQ ID NO: 2612363 - RNA, 18 nt, Human
ccuggagcaggccuugcg

SEQ ID NO: 2612364 - RNA, 22 nt, Human
ccuggagccagacucuggucuu

SEQ ID NO: 2612365 - RNA, 16 nt, Human
ccuggagccagacucu

SEQ ID NO: 2612366 - RNA, 13 nt, Human
ccuggagcccaga

SEQ ID NO: 2612367 - RNA, 17 nt, Human
ccuggagcccagaggag

SEQ ID NO: 2612368 - RNA, 14 nt, Human
ccuggagcccagag

SEQ ID NO: 2612369 - RNA, 13 nt, Human
ccuggagccccug

SEQ ID NO: 2612370 - RNA, 11 nt, Human
ccuggagcccc

SEQ ID NO: 2612371 - RNA, 12 nt, Human
ccuggagccccu

SEQ ID NO: 2612372 - RNA, 15 nt, Human
ccuggagcaggccuu

SEQ ID NO: 2612373 - RNA, 14 nt, Human
ccuggagcaggccu

SEQ ID NO: 2612374 - RNA, 13 nt, Human
ccuggagcaggcc

SEQ ID NO: 2612375 - RNA, 18 nt, Human
ccuggagcagaccacccc

SEQ ID NO: 2612376 - RNA, 21 nt, Human
ccuggagauccuccugcagac

SEQ ID NO: 2612377 - RNA, 14 nt, Human
ccuggacugggagg

SEQ ID NO: 2612378 - RNA, 13 nt, Human
ccuggacugggag

SEQ ID NO: 2612379 - RNA, 18 nt, Human
ccuggacugggagguaga

SEQ ID NO: 2612380 - RNA, 17 nt, Human
ccuggacugggagguag

SEQ ID NO: 2612381 - RNA, 14 nt, Human
ccuggacuguuuuc

SEQ ID NO: 2612382 - RNA, 19 nt, Human
ccuggagauccuccugcag

SEQ ID NO: 2612383 - RNA, 17 nt, Human
ccuggacccccagcuuu

SEQ ID NO: 2612384 - RNA, 16 nt, Human
ccuggacccccagcuu

SEQ ID NO: 2612385 - RNA, 15 nt, Human
ccuggacccccagcu

SEQ ID NO: 2612386 - RNA, 12 nt, Human
ccuggaccccca

SEQ ID NO: 2612387 - RNA, 20 nt, Human
ccuggacauuuuuucaguca

SEQ ID NO: 2612388 - RNA, 19 nt, Human
ccuggacauuuuuucaguc

SEQ ID NO: 2612389 - RNA, 21 nt, Human
ccuggacaugaagauucuuuc

SEQ ID NO: 2612390 - RNA, 23 nt, Human
ccuggacaugaagauucuuuccc

SEQ ID NO: 2612391 - RNA, 21 nt, Human
ccuggacauuugccuugcugg

SEQ ID NO: 2612392 - RNA, 20 nt, Human
ccuggacauuugccuugcug

SEQ ID NO: 2612393 - RNA, 24 nt, Human
ccuggacaugaagauucuuuccca

SEQ ID NO: 2612394 - RNA, 20 nt, Human
ccuggacauccucuucugcu

SEQ ID NO: 2612395 - RNA, 18 nt, Human
ccuggacauagagaggga

SEQ ID NO: 2612396 - RNA, 23 nt, Human
ccuggaaaggcucagucucagga

SEQ ID NO: 2612397 - RNA, 15 nt, Human
ccuggaaaggcucag

SEQ ID NO: 2612398 - RNA, 17 nt, Human
ccuggaaaggcucaguc

SEQ ID NO: 2612399 - RNA, 20 nt, Human
ccuggaaaggcucagucuca

SEQ ID NO: 2612400 - RNA, 21 nt, Human
ccuggaaaggcucagucucag

SEQ ID NO: 2612401 - RNA, 22 nt, Human
ccuggaaaggcucagucucagg

SEQ ID NO: 2612402 - RNA, 23 nt, Human
ccuggaccugccuccugccugcc

SEQ ID NO: 2612403 - RNA, 22 nt, Human
ccuggaccugccuccugccugc

SEQ ID NO: 2612404 - RNA, 20 nt, Human
ccuggaccugccuccugccu

SEQ ID NO: 2612405 - RNA, 16 nt, Human
ccuggaccugccuccu

SEQ ID NO: 2612406 - RNA, 14 nt, Human
ccuggaccugccuc

SEQ ID NO: 2612407 - RNA, 13 nt, Human
ccuggaccugccu

SEQ ID NO: 2612408 - RNA, 23 nt, Human
ccuggaccugcccugggccacac

SEQ ID NO: 2612409 - RNA, 21 nt, Human
ccuggaccugcccugggccac

SEQ ID NO: 2612410 - RNA, 13 nt, Human
ccuggacccugug

SEQ ID NO: 2612411 - RNA, 14 nt, Human
ccuggacccugugg

SEQ ID NO: 2612412 - RNA, 20 nt, Human
ccuggacugugugcucagga

SEQ ID NO: 2612413 - RNA, 17 nt, Human
ccuggacugugugcuca

SEQ ID NO: 2612414 - RNA, 14 nt, Human
ccuggacuccugca

SEQ ID NO: 2612415 - RNA, 15 nt, Human
ccuggacuagaggga

SEQ ID NO: 2612416 - RNA, 22 nt, Human
ccuggacuagagggaccucucc

SEQ ID NO: 2612417 - RNA, 18 nt, Human
ccuggcaugggaaugaau

SEQ ID NO: 2612418 - RNA, 14 nt, Human
ccuggccaggagcu

SEQ ID NO: 2612419 - RNA, 15 nt, Human
ccuggccaggagcuc

SEQ ID NO: 2612420 - RNA, 16 nt, Human
ccuggccaggagcucu

SEQ ID NO: 2612421 - RNA, 18 nt, Human
ccuggccaggagcucuuc

SEQ ID NO: 2612422 - RNA, 19 nt, Human
ccuggccaggagcucuuca

SEQ ID NO: 2612423 - RNA, 20 nt, Human
ccuggccaggagcucuucag

SEQ ID NO: 2612424 - RNA, 21 nt, Human
ccuggccaggagcucuucagg

SEQ ID NO: 2612425 - RNA, 13 nt, Human
ccuggccaggcac

SEQ ID NO: 2612426 - RNA, 12 nt, Human
ccuggccaggca

SEQ ID NO: 2612427 - RNA, 22 nt, Human
ccuggccaggagcucuucaggc

SEQ ID NO: 2612428 - RNA, 21 nt, Human
ccuggcccccacccucugcca

SEQ ID NO: 2612429 - RNA, 12 nt, Human
ccuggcccccag

SEQ ID NO: 2612430 - RNA, 14 nt, Human
ccuggcccccagcu

SEQ ID NO: 2612431 - RNA, 15 nt, Human
ccuggccccaugucu

SEQ ID NO: 2612432 - RNA, 17 nt, Human
ccuggccccaugucucu

SEQ ID NO: 2612433 - RNA, 18 nt, Human
ccuggccccaugucucuc

SEQ ID NO: 2612434 - RNA, 20 nt, Human
ccuggccccaugucucucag

SEQ ID NO: 2612435 - RNA, 21 nt, Human
ccuggccccaugucucucaga

SEQ ID NO: 2612436 - RNA, 23 nt, Human
ccuggccagggccuggaagacag

SEQ ID NO: 2612437 - RNA, 20 nt, Human
ccuggccagggccuggaaga

SEQ ID NO: 2612438 - RNA, 14 nt, Human
ccuggccaucccac

SEQ ID NO: 2612439 - RNA, 15 nt, Human
ccuggccaucccaca

SEQ ID NO: 2612440 - RNA, 18 nt, Human
ccuggccccauggucagc

SEQ ID NO: 2612441 - RNA, 14 nt, Human
ccuggccccauguc

SEQ ID NO: 2612442 - RNA, 19 nt, Human
ccuggccagggccuggaag

SEQ ID NO: 2612443 - RNA, 15 nt, Human
ccuggccagggccug

SEQ ID NO: 2612444 - RNA, 14 nt, Human
ccuggccagggccu

SEQ ID NO: 2612445 - RNA, 21 nt, Human
ccuggccaggcacccccugga

SEQ ID NO: 2612446 - RNA, 14 nt, Human
ccuggccaggcaga

SEQ ID NO: 2612447 - RNA, 22 nt, Human
ccuggccaggcagaucugugcc

SEQ ID NO: 2612448 - RNA, 15 nt, Human
ccuggccuuucauau

SEQ ID NO: 2612449 - RNA, 14 nt, Human
ccuggccccucagg

SEQ ID NO: 2612450 - RNA, 20 nt, Human
ccuggcgacugccccugccu

SEQ ID NO: 2612451 - RNA, 14 nt, Human
ccuggccuuucaua

SEQ ID NO: 2612452 - RNA, 12 nt, Human
ccuggcggggug

SEQ ID NO: 2612453 - RNA, 17 nt, Human
ccuggcucagagccagu

SEQ ID NO: 2612454 - RNA, 16 nt, Human
ccuggcucagagccag

SEQ ID NO: 2612455 - RNA, 13 nt, Human
ccuggcucagagc

SEQ ID NO: 2612456 - RNA, 20 nt, Human
ccuggcgggaugggccaccg

SEQ ID NO: 2612457 - RNA, 19 nt, Human
ccuggcgggaugggccacc

SEQ ID NO: 2612458 - RNA, 17 nt, Human
ccuggcgggaugggcca

SEQ ID NO: 2612459 - RNA, 13 nt, Human
ccuggcgggaugg

SEQ ID NO: 2612460 - RNA, 21 nt, Human
ccuggcgggaugggccaccgc

SEQ ID NO: 2612461 - RNA, 22 nt, Human
ccuggcucugcaaugggcacug

SEQ ID NO: 2612462 - RNA, 16 nt, Human
ccuggcucucagaagg

SEQ ID NO: 2612463 - RNA, 11 nt, Human
ccuggcucuga

SEQ ID NO: 2612464 - RNA, 20 nt, Human
ccuggcucugaccgaaacag

SEQ ID NO: 2612465 - RNA, 14 nt, Human
ccuggcugaaggac

SEQ ID NO: 2612466 - RNA, 13 nt, Human
ccuggcugaagga

SEQ ID NO: 2612467 - RNA, 20 nt, Human
ccuggcucuugugcuggaug

SEQ ID NO: 2612468 - RNA, 13 nt, Human
ccuggcucuugug

SEQ ID NO: 2612469 - RNA, 12 nt, Human
ccugggcagaag

SEQ ID NO: 2612470 - RNA, 23 nt, Human
ccugggcaaaugaauggcucacu

SEQ ID NO: 2612471 - RNA, 21 nt, Human
ccugggcaaaugaauggcuca

SEQ ID NO: 2612472 - RNA, 23 nt, Human
ccugggauguggcugcagcagcg

SEQ ID NO: 2612473 - RNA, 21 nt, Human
ccugggauguggcugcagcag

SEQ ID NO: 2612474 - RNA, 13 nt, Human
ccugggcaaagcc

SEQ ID NO: 2612475 - RNA, 15 nt, Human
ccugggaucugcucg

SEQ ID NO: 2612476 - RNA, 21 nt, Human
ccugggaugagaguuuuggau

SEQ ID NO: 2612477 - RNA, 20 nt, Human
ccugggauguccacagaugc

SEQ ID NO: 2612478 - RNA, 22 nt, Human
ccugggauguccacagaugccu

SEQ ID NO: 2612479 - RNA, 14 nt, Human
ccugggcagaagga

SEQ ID NO: 2612480 - RNA, 15 nt, Human
ccugggcaccugggg

SEQ ID NO: 2612481 - RNA, 20 nt, Human
ccugggcaccuggggagugg

SEQ ID NO: 2612482 - RNA, 21 nt, Human
ccugggaggcucuggagccca

SEQ ID NO: 2612483 - RNA, 13 nt, Human
ccugggaggcucu

SEQ ID NO: 2612484 - RNA, 16 nt, Human
ccuggcugagguuccu

SEQ ID NO: 2612485 - RNA, 19 nt, Human
ccuggcugagccuggcugg

SEQ ID NO: 2612486 - RNA, 18 nt, Human
ccuggcugagccuggcug

SEQ ID NO: 2612487 - RNA, 23 nt, Human
ccuggcugaccccaaagagccug

SEQ ID NO: 2612488 - RNA, 22 nt, Human
ccuggcugaccccaaagagccu

SEQ ID NO: 2612489 - RNA, 20 nt, Human
ccuggcugaaggacugugac

SEQ ID NO: 2612490 - RNA, 19 nt, Human
ccuggcugaaggacuguga

SEQ ID NO: 2612491 - RNA, 16 nt, Human
ccuggcugaaggacug

SEQ ID NO: 2612492 - RNA, 22 nt, Human
ccuggcugagguuccucugccu

SEQ ID NO: 2612493 - RNA, 21 nt, Human
ccuggcugagguuccucugcc

SEQ ID NO: 2612494 - RNA, 20 nt, Human
ccuggcugagguuccucugc

SEQ ID NO: 2612495 - RNA, 19 nt, Human
ccuggcugagguuccucug

SEQ ID NO: 2612496 - RNA, 13 nt, Human
ccugggaggcagu

SEQ ID NO: 2612497 - RNA, 20 nt, Human
ccugggaucccucauccuca

SEQ ID NO: 2612498 - RNA, 16 nt, Human
ccugggaucccucauc

SEQ ID NO: 2612499 - RNA, 20 nt, Human
ccugggaggucaaggcugca

SEQ ID NO: 2612500 - RNA, 16 nt, Human
ccugggaggcggagag

SEQ ID NO: 2612501 - RNA, 14 nt, Human
ccugggaggcggag

SEQ ID NO: 2612502 - RNA, 23 nt, Human
ccuggcugagguuccucugccug

SEQ ID NO: 2612503 - RNA, 23 nt, Human
ccugggaggcggagaguacagug

SEQ ID NO: 2612504 - RNA, 15 nt, Human
cccuguuuguuucug

SEQ ID NO: 2612505 - RNA, 21 nt, Human
cccuguuuaauauuuaaacag

SEQ ID NO: 2612506 - RNA, 20 nt, Human
cccuguuugaagccugcccu

SEQ ID NO: 2612507 - RNA, 14 nt, Human
cccuguuuccugag

SEQ ID NO: 2612508 - RNA, 15 nt, Human
cccuuacagccucug

SEQ ID NO: 2612509 - RNA, 14 nt, Human
cccuuacacuuacu

SEQ ID NO: 2612510 - RNA, 16 nt, Human
cccuuacacguaccuc

SEQ ID NO: 2612511 - RNA, 15 nt, Human
cccuuacacguaccu

SEQ ID NO: 2612512 - RNA, 18 nt, Human
cccuuacagccucugacu

SEQ ID NO: 2612513 - RNA, 17 nt, Human
cccuuacagccucugac

SEQ ID NO: 2612514 - RNA, 14 nt, Human
cccuuacaguagga

SEQ ID NO: 2612515 - RNA, 16 nt, Human
cccuguuuguuucuga

SEQ ID NO: 2612516 - RNA, 19 nt, Human
cccuguuuaauauuuaaac

SEQ ID NO: 2612517 - RNA, 18 nt, Human
cccuguuuaauauuuaaa

SEQ ID NO: 2612518 - RNA, 17 nt, Human
cccuguuuaauauuuaa

SEQ ID NO: 2612519 - RNA, 16 nt, Human
cccuguuuaauauuua

SEQ ID NO: 2612520 - RNA, 14 nt, Human
cccuguuuaauauu

SEQ ID NO: 2612521 - RNA, 11 nt, Human
cccuguuuaau

SEQ ID NO: 2612522 - RNA, 11 nt, Human
cccuguugcua

SEQ ID NO: 2612523 - RNA, 23 nt, Human
cccuguggggaucucaggggcug

SEQ ID NO: 2612524 - RNA, 20 nt, Human
cccuguggggaucucagggg

SEQ ID NO: 2612525 - RNA, 15 nt, Human
cccuguggggaucuc

SEQ ID NO: 2612526 - RNA, 20 nt, Human
cccuguugacgaagucucuu

SEQ ID NO: 2612527 - RNA, 18 nt, Human
cccugugggcccccaaau

SEQ ID NO: 2612528 - RNA, 14 nt, Human
cccuguggggaucu

SEQ ID NO: 2612529 - RNA, 12 nt, Human
cccuguggggau

SEQ ID NO: 2612530 - RNA, 22 nt, Human
cccugucccucccaccucugug

SEQ ID NO: 2612531 - RNA, 21 nt, Human
cccugucccucccaccucugu

SEQ ID NO: 2612532 - RNA, 13 nt, Human
cccugucccccag

SEQ ID NO: 2612533 - RNA, 18 nt, Human
cccuguacuguucugugu

SEQ ID NO: 2612534 - RNA, 19 nt, Human
cccuguaccuuuugaggag

SEQ ID NO: 2612535 - RNA, 21 nt, Human
cccuguccaaacugccuaagc

SEQ ID NO: 2612536 - RNA, 22 nt, Human
cccugguuuccugcccugggag

SEQ ID NO: 2612537 - RNA, 23 nt, Human
cccugguuuccugcccugggagg

SEQ ID NO: 2612538 - RNA, 17 nt, Human
ccccucccgccccuucc

SEQ ID NO: 2612539 - RNA, 18 nt, Human
ccccuccccugcugcagg

SEQ ID NO: 2612540 - RNA, 17 nt, Human
cccuguacaauauuuaa

SEQ ID NO: 2612541 - RNA, 22 nt, Human
ccccucccgucuacucauuccc

SEQ ID NO: 2612542 - RNA, 18 nt, Human
cccuguacaauauuuaaa

SEQ ID NO: 2612543 - RNA, 15 nt, Human
cccugugggccccca

SEQ ID NO: 2612544 - RNA, 20 nt, Human
cccugucccucccaccucug

SEQ ID NO: 2612545 - RNA, 19 nt, Human
cccugucccucccaccucu

SEQ ID NO: 2612546 - RNA, 18 nt, Human
cccugucccucccaccuc

SEQ ID NO: 2612547 - RNA, 17 nt, Human
cccugucccucccaccu

SEQ ID NO: 2612548 - RNA, 16 nt, Human
cccugugggcccccaa

SEQ ID NO: 2612549 - RNA, 19 nt, Human
cccuguccccucagcucca

SEQ ID NO: 2612550 - RNA, 18 nt, Human
cccuguccccucagcucc

SEQ ID NO: 2612551 - RNA, 13 nt, Human
cccuguccccuca

SEQ ID NO: 2612552 - RNA, 19 nt, Human
cccugucccccagcucugg

SEQ ID NO: 2612553 - RNA, 18 nt, Human
cccugucccccagcucug

SEQ ID NO: 2612554 - RNA, 17 nt, Human
cccugucccccagcucu

SEQ ID NO: 2612555 - RNA, 16 nt, Human
cccugucccccagcuc

SEQ ID NO: 2612556 - RNA, 15 nt, Human
cccugucccccagcu

SEQ ID NO: 2612557 - RNA, 16 nt, Human
cccugucccucccacc

SEQ ID NO: 2612558 - RNA, 15 nt, Human
cccugucccucccac

SEQ ID NO: 2612559 - RNA, 14 nt, Human
cccugucccuccca

SEQ ID NO: 2612560 - RNA, 13 nt, Human
cccugucccuccc

SEQ ID NO: 2612561 - RNA, 12 nt, Human
cccugucccucc

SEQ ID NO: 2612562 - RNA, 10 nt, Human
cccugucccu

SEQ ID NO: 2612563 - RNA, 20 nt, Human
cccuguccccucccccuucc

SEQ ID NO: 2612564 - RNA, 19 nt, Human
cccugguggcagugggagc

SEQ ID NO: 2612565 - RNA, 16 nt, Human
cccugguggcaguggg

SEQ ID NO: 2612566 - RNA, 21 nt, Human
cccugguuuccugcccuggga

SEQ ID NO: 2612567 - RNA, 15 nt, Human
cccugguggcagugg

SEQ ID NO: 2612568 - RNA, 21 nt, Human
cccugguggcagugggagcug

SEQ ID NO: 2612569 - RNA, 13 nt, Human
ccccucccauuag

SEQ ID NO: 2612570 - RNA, 20 nt, Human
ccccuccccauuagcuuuca

SEQ ID NO: 2612571 - RNA, 15 nt, Human
ccccucccccaaccc

SEQ ID NO: 2612572 - RNA, 11 nt, Human
ccccucccauu

SEQ ID NO: 2612573 - RNA, 14 nt, Human
ccccucccaucugg

SEQ ID NO: 2612574 - RNA, 15 nt, Human
ccccuccccagggga

SEQ ID NO: 2612575 - RNA, 17 nt, Human
ccccuagcccaggagag

SEQ ID NO: 2612576 - RNA, 13 nt, Human
ccccuagcccagg

SEQ ID NO: 2612577 - RNA, 13 nt, Human
ccccucccaucug

SEQ ID NO: 2612578 - RNA, 11 nt, Human
ccccucccauc

SEQ ID NO: 2612579 - RNA, 14 nt, Human
ccccucccagggcc

SEQ ID NO: 2612580 - RNA, 21 nt, Human
ccccucccccaacccccaccc

SEQ ID NO: 2612581 - RNA, 16 nt, Human
ccccucccccaacccc

SEQ ID NO: 2612582 - RNA, 18 nt, Human
ccccucccccaaccccca

SEQ ID NO: 2612583 - RNA, 15 nt, Human
ccccuccccugcugc

SEQ ID NO: 2612584 - RNA, 21 nt, Human
ccccuccccggcccuaccagc

SEQ ID NO: 2612585 - RNA, 13 nt, Human
ccccuccccugcu

SEQ ID NO: 2612586 - RNA, 14 nt, Human
ccccucccccuucu

SEQ ID NO: 2612587 - RNA, 19 nt, Human
ccccuccccuaaugccugc

SEQ ID NO: 2612588 - RNA, 14 nt, Human
ccccguuucuggug

SEQ ID NO: 2612589 - RNA, 20 nt, Human
ccccgucugggguucagccc

SEQ ID NO: 2612590 - RNA, 21 nt, Human
ccccgucugggguucagcccc

SEQ ID NO: 2612591 - RNA, 22 nt, Human
ccccgucugggguucagccccu

SEQ ID NO: 2612592 - RNA, 14 nt, Human
ccccgucuguggcu

SEQ ID NO: 2612593 - RNA, 15 nt, Human
ccccgugcagacugg

SEQ ID NO: 2612594 - RNA, 19 nt, Human
ccccgugcagacuggaggg

SEQ ID NO: 2612595 - RNA, 22 nt, Human
ccccuacccccuccucucugcc

SEQ ID NO: 2612596 - RNA, 22 nt, Human
ccccuaccccacaccaggccgu

SEQ ID NO: 2612597 - RNA, 20 nt, Human
ccccuaccccacaccaggcc

SEQ ID NO: 2612598 - RNA, 13 nt, Human
ccccuaccccaca

SEQ ID NO: 2612599 - RNA, 20 nt, Human
ccccuaccacugucuucuuc

SEQ ID NO: 2612600 - RNA, 15 nt, Human
ccccuaccacugucu

SEQ ID NO: 2612601 - RNA, 23 nt, Human
ccccuaaugacaucaccacaguu

SEQ ID NO: 2612602 - RNA, 18 nt, Human
ccccuaaugccugcggag

SEQ ID NO: 2612603 - RNA, 20 nt, Human
ccccucagggucccuggugg

SEQ ID NO: 2612604 - RNA, 18 nt, Human
ccccucagggucccuggu

SEQ ID NO: 2612605 - RNA, 17 nt, Human
ccccucagggucccugg

SEQ ID NO: 2612606 - RNA, 12 nt, Human
ccccuagcccag

SEQ ID NO: 2612607 - RNA, 18 nt, Human
cccccgggaggggcccgc

SEQ ID NO: 2612608 - RNA, 14 nt, Human
cccccuccucuccc

SEQ ID NO: 2612609 - RNA, 15 nt, Human
cccccgggaggggcc

SEQ ID NO: 2612610 - RNA, 15 nt, Human
cccccggcccccugg

SEQ ID NO: 2612611 - RNA, 14 nt, Human
cccccggcccccug

SEQ ID NO: 2612612 - RNA, 23 nt, Human
cccccgcuguaaugaaacaccuu

SEQ ID NO: 2612613 - RNA, 21 nt, Human
cccccgcgcgcgucccccugc

SEQ ID NO: 2612614 - RNA, 13 nt, Human
cccccggcccccu

SEQ ID NO: 2612615 - RNA, 21 nt, Human
cccccgcugucagccauuccu

SEQ ID NO: 2612616 - RNA, 18 nt, Human
cccccucgugccagucgc

SEQ ID NO: 2612617 - RNA, 13 nt, Human
cccccucgugcca

SEQ ID NO: 2612618 - RNA, 22 nt, Human
cccccucgggucuccucacucc

SEQ ID NO: 2612619 - RNA, 16 nt, Human
cccccuccugcugcag

SEQ ID NO: 2612620 - RNA, 13 nt, Human
cccccuccugcug

SEQ ID NO: 2612621 - RNA, 12 nt, Human
cccccuccugcu

SEQ ID NO: 2612622 - RNA, 13 nt, Human
cccccuccucucu

SEQ ID NO: 2612623 - RNA, 22 nt, Human
cccccuccucucccaucccccu

SEQ ID NO: 2612624 - RNA, 15 nt, Human
cccccuccugcugca

SEQ ID NO: 2612625 - RNA, 14 nt, Human
cccccuccugcugc

SEQ ID NO: 2612626 - RNA, 15 nt, Human
cccccuccuugcucu

SEQ ID NO: 2612627 - RNA, 21 nt, Human
cccccgagcugggggccauga

SEQ ID NO: 2612628 - RNA, 12 nt, Human
cccccgccacuc

SEQ ID NO: 2612629 - RNA, 18 nt, Human
cccccgcccaggcuggcc

SEQ ID NO: 2612630 - RNA, 13 nt, Human
cccccgcccaggc

SEQ ID NO: 2612631 - RNA, 12 nt, Human
cccccgcccccu

SEQ ID NO: 2612632 - RNA, 11 nt, Human
cccccgccccg

SEQ ID NO: 2612633 - RNA, 18 nt, Human
cccccgccccgccccaca

SEQ ID NO: 2612634 - RNA, 16 nt, Human
cccccgcccccugccc

SEQ ID NO: 2612635 - RNA, 14 nt, Human
cccccgcccccugc

SEQ ID NO: 2612636 - RNA, 13 nt, Human
cccccgcccccug

SEQ ID NO: 2612637 - RNA, 14 nt, Human
ccccccucaccagg

SEQ ID NO: 2612638 - RNA, 12 nt, Human
ccccccucuguc

SEQ ID NO: 2612639 - RNA, 11 nt, Human
ccccccccucc

SEQ ID NO: 2612640 - RNA, 13 nt, Human
cccccgagcuggg

SEQ ID NO: 2612641 - RNA, 15 nt, Human
cccccgagcuggggg

SEQ ID NO: 2612642 - RNA, 13 nt, Human
ccccccuuccacu

SEQ ID NO: 2612643 - RNA, 12 nt, Human
ccccccuuccac

SEQ ID NO: 2612644 - RNA, 11 nt, Human
ccccccuucca

SEQ ID NO: 2612645 - RNA, 16 nt, Human
ccccgucccccucugg

SEQ ID NO: 2612646 - RNA, 20 nt, Human
ccccgucccccucuggcucc

SEQ ID NO: 2612647 - RNA, 21 nt, Human
ccccgucucugguuccucccc

SEQ ID NO: 2612648 - RNA, 21 nt, Human
ccccgucaccaucucaggcca

SEQ ID NO: 2612649 - RNA, 14 nt, Human
ccccgucucuacua

SEQ ID NO: 2612650 - RNA, 12 nt, Human
cccccuggagag

SEQ ID NO: 2612651 - RNA, 20 nt, Human
cccccugcuggcucuucugc

SEQ ID NO: 2612652 - RNA, 18 nt, Human
cccccugcuggcucuucu

SEQ ID NO: 2612653 - RNA, 15 nt, Human
cccccuggccucugu

SEQ ID NO: 2612654 - RNA, 19 nt, Human
cccccuggccucugugccu

SEQ ID NO: 2612655 - RNA, 22 nt, Human
cccccuggccucugugccuucu

SEQ ID NO: 2612656 - RNA, 10 nt, Human
cccccugggc

SEQ ID NO: 2612657 - RNA, 14 nt, Human
ccccgucacagccu

SEQ ID NO: 2612658 - RNA, 16 nt, Human
ccccgucacagccuca

SEQ ID NO: 2612659 - RNA, 13 nt, Human
cccccucugcccu

SEQ ID NO: 2612660 - RNA, 14 nt, Human
cccccucugcccug

SEQ ID NO: 2612661 - RNA, 22 nt, Human
cccccugccccccagccucugg

SEQ ID NO: 2612662 - RNA, 16 nt, Human
cccccucugcccugcg

SEQ ID NO: 2612663 - RNA, 14 nt, Human
cccccugcccugca

SEQ ID NO: 2612664 - RNA, 13 nt, Human
cccccugcccugc

SEQ ID NO: 2612665 - RNA, 12 nt, Human
cccccugcccug

SEQ ID NO: 2612666 - RNA, 22 nt, Human
cccccugcccucguggccagcc

SEQ ID NO: 2612667 - RNA, 15 nt, Human
cccccugcuggcucu

SEQ ID NO: 2612668 - RNA, 24 nt, Human
cccccugccggccggggcugagac

SEQ ID NO: 2612669 - RNA, 12 nt, Human
cccccugcuggc

SEQ ID NO: 2612670 - RNA, 20 nt, Human
cccccugcccucguggccag

SEQ ID NO: 2612671 - RNA, 19 nt, Human
cccccugcccucguggcca

SEQ ID NO: 2612672 - RNA, 16 nt, Human
cccccugcccucgugg

SEQ ID NO: 2612673 - RNA, 21 nt, Human
cccccugccccccagccucug

SEQ ID NO: 2612674 - RNA, 12 nt, Human
cccccugcccuc

SEQ ID NO: 2612675 - RNA, 13 nt, Human
cccccugcccucc

SEQ ID NO: 2612676 - RNA, 12 nt, Human
cccccagcccca

SEQ ID NO: 2612677 - RNA, 13 nt, Human
cccccagccccgg

SEQ ID NO: 2612678 - RNA, 12 nt, Human
cccccagcccug

SEQ ID NO: 2612679 - RNA, 14 nt, Human
cccccagcccugug

SEQ ID NO: 2612680 - RNA, 13 nt, Human
cccccagcccugu

SEQ ID NO: 2612681 - RNA, 11 nt, Human
cccccagcugu

SEQ ID NO: 2612682 - RNA, 15 nt, Human
cccccaggacugggc

SEQ ID NO: 2612683 - RNA, 13 nt, Human
cccccaggacugg

SEQ ID NO: 2612684 - RNA, 12 nt, Human
cccccaggacug

SEQ ID NO: 2612685 - RNA, 11 nt, Human
cccccaggacu

SEQ ID NO: 2612686 - RNA, 23 nt, Human
cccccagcuuugcuaccaaagca

SEQ ID NO: 2612687 - RNA, 14 nt, Human
cccccagcuguggg

SEQ ID NO: 2612688 - RNA, 21 nt, Human
cccccagcccagggcuccugc

SEQ ID NO: 2612689 - RNA, 14 nt, Human
cccccagcccaggg

SEQ ID NO: 2612690 - RNA, 13 nt, Human
cccccagcccagg

SEQ ID NO: 2612691 - RNA, 18 nt, Human
cccccagcacugaggaag

SEQ ID NO: 2612692 - RNA, 17 nt, Human
cccccagcacugaggaa

SEQ ID NO: 2612693 - RNA, 15 nt, Human
cccccagcacugagg

SEQ ID NO: 2612694 - RNA, 12 nt, Human
cccccacacaca

SEQ ID NO: 2612695 - RNA, 14 nt, Human
cccccacacacaca

SEQ ID NO: 2612696 - RNA, 19 nt, Human
cccccacacacacacacau

SEQ ID NO: 2612697 - RNA, 13 nt, Human
cccccagcacuga

SEQ ID NO: 2612698 - RNA, 11 nt, Human
cccccacacac

SEQ ID NO: 2612699 - RNA, 13 nt, Human
cccccaauccaug

SEQ ID NO: 2612700 - RNA, 16 nt, Human
cccccaaggggcaguc

SEQ ID NO: 2612701 - RNA, 23 nt, Human
cccccaaggggcagucuggaggg

SEQ ID NO: 2612702 - RNA, 17 nt, Human
cccccauccuggcccau

SEQ ID NO: 2612703 - RNA, 18 nt, Human
cccccaugcacugugaag

SEQ ID NO: 2612704 - RNA, 16 nt, Human
cccccaucucuucugg

SEQ ID NO: 2612705 - RNA, 15 nt, Human
cccccauccuggccc

SEQ ID NO: 2612706 - RNA, 13 nt, Human
cccccauccuggc

SEQ ID NO: 2612707 - RNA, 23 nt, Human
cccccauccccauccuccagcuu

SEQ ID NO: 2612708 - RNA, 19 nt, Human
cccccauccuccccuuccc

SEQ ID NO: 2612709 - RNA, 22 nt, Human
cccccaguccccaccccugccc

SEQ ID NO: 2612710 - RNA, 20 nt, Human
cccccaguccccaccccugc

SEQ ID NO: 2612711 - RNA, 22 nt, Human
cccccauccccauccuccagcu

SEQ ID NO: 2612712 - RNA, 15 nt, Human
cccccaguccccacc

SEQ ID NO: 2612713 - RNA, 20 nt, Human
cccccaggggaaagaugagc

SEQ ID NO: 2612714 - RNA, 17 nt, Human
cccccaggacugggcca

SEQ ID NO: 2612715 - RNA, 18 nt, Human
cccccagcuuugcccaac

SEQ ID NO: 2612716 - RNA, 16 nt, Human
cccccaggcugcugga

SEQ ID NO: 2612717 - RNA, 13 nt, Human
ccccccacucugu

SEQ ID NO: 2612718 - RNA, 12 nt, Human
ccccccacucuc

SEQ ID NO: 2612719 - RNA, 12 nt, Human
ccccccagcacu

SEQ ID NO: 2612720 - RNA, 12 nt, Human
ccccccacugca

SEQ ID NO: 2612721 - RNA, 18 nt, Human
ccccccagaaccuguccu

SEQ ID NO: 2612722 - RNA, 14 nt, Human
cccccaugcacugu

SEQ ID NO: 2612723 - RNA, 12 nt, Human
ccccccaccccu

SEQ ID NO: 2612724 - RNA, 13 nt, Human
ccccccaccccug

SEQ ID NO: 2612725 - RNA, 11 nt, Human
ccccccacucu

SEQ ID NO: 2612726 - RNA, 13 nt, Human
ccccccagccucu

SEQ ID NO: 2612727 - RNA, 12 nt, Human
ccccccagccuc

SEQ ID NO: 2612728 - RNA, 14 nt, Human
ccccccagcacuga

SEQ ID NO: 2612729 - RNA, 13 nt, Human
ccccccagcacug

SEQ ID NO: 2612730 - RNA, 14 nt, Human
ccccccaugcacug

SEQ ID NO: 2612731 - RNA, 13 nt, Human
cccccccuuccac

SEQ ID NO: 2612732 - RNA, 12 nt, Human
cccccccuucca

SEQ ID NO: 2612733 - RNA, 13 nt, Human
ccccaggaccagc

SEQ ID NO: 2612734 - RNA, 15 nt, Human
ccccaggaccagcuc

SEQ ID NO: 2612735 - RNA, 13 nt, Human
ccccaggaggcca

SEQ ID NO: 2612736 - RNA, 24 nt, Human
ccccagcuuugcccaacaccagcc

SEQ ID NO: 2612737 - RNA, 14 nt, Human
ccccagcuuugccc

SEQ ID NO: 2612738 - RNA, 13 nt, Human
ccccagcuuugcc

SEQ ID NO: 2612739 - RNA, 11 nt, Human
ccccaggacca

SEQ ID NO: 2612740 - RNA, 12 nt, Human
ccccaggaagcc

SEQ ID NO: 2612741 - RNA, 23 nt, Human
ccccaggaagccgugcccugccc

SEQ ID NO: 2612742 - RNA, 14 nt, Human
ccccagcucaaugg

SEQ ID NO: 2612743 - RNA, 22 nt, Human
ccccagcuacccuuuuucucca

SEQ ID NO: 2612744 - RNA, 11 nt, Human
ccccagcuacc

SEQ ID NO: 2612745 - RNA, 11 nt, Human
ccccagcuccg

SEQ ID NO: 2612746 - RNA, 23 nt, Human
ccccagcgucccagucucuggca

SEQ ID NO: 2612747 - RNA, 21 nt, Human
ccccagcugugagccuuggcu

SEQ ID NO: 2612748 - RNA, 19 nt, Human
ccccagcugugagccuugg

SEQ ID NO: 2612749 - RNA, 16 nt, Human
ccccagcugugagccu

SEQ ID NO: 2612750 - RNA, 15 nt, Human
ccccagcugugagcc

SEQ ID NO: 2612751 - RNA, 14 nt, Human
ccccagcugugagc

SEQ ID NO: 2612752 - RNA, 13 nt, Human
ccccagcuccggc

SEQ ID NO: 2612753 - RNA, 12 nt, Human
ccccagcucugg

SEQ ID NO: 2612754 - RNA, 22 nt, Human
ccccaggaggccagccuugacc

SEQ ID NO: 2612755 - RNA, 21 nt, Human
ccccaggaggccagccuugac

SEQ ID NO: 2612756 - RNA, 15 nt, Human
ccccaggaggccagc

SEQ ID NO: 2612757 - RNA, 14 nt, Human
ccccaggaggccag

SEQ ID NO: 2612758 - RNA, 23 nt, Human
cccccaacacugugcccuggugg

SEQ ID NO: 2612759 - RNA, 22 nt, Human
cccccaacacugugcccuggug

SEQ ID NO: 2612760 - RNA, 14 nt, Human
cccccaaccccagc

SEQ ID NO: 2612761 - RNA, 23 nt, Human
cccccaaccaaguggcucccaca

SEQ ID NO: 2612762 - RNA, 18 nt, Human
cccccaaccccugaggaa

SEQ ID NO: 2612763 - RNA, 16 nt, Human
cccccaaccccugagg

SEQ ID NO: 2612764 - RNA, 14 nt, Human
cccccaaccccuga

SEQ ID NO: 2612765 - RNA, 19 nt, Human
cccccaagcuguuuucuuc

SEQ ID NO: 2612766 - RNA, 13 nt, Human
cccccaagccugc

SEQ ID NO: 2612767 - RNA, 14 nt, Human
cccccaagccugca

SEQ ID NO: 2612768 - RNA, 11 nt, Human
ccccaggcagg

SEQ ID NO: 2612769 - RNA, 22 nt, Human
ccccaggccaggccaccaggau

SEQ ID NO: 2612770 - RNA, 15 nt, Human
ccccaggccaggcca

SEQ ID NO: 2612771 - RNA, 13 nt, Human
ccccaggccaggc

SEQ ID NO: 2612772 - RNA, 14 nt, Human
ccccaggcaggcug

SEQ ID NO: 2612773 - RNA, 18 nt, Human
ccccaggcaggcugugcg

SEQ ID NO: 2612774 - RNA, 12 nt, Human
ccccaggccagg

SEQ ID NO: 2612775 - RNA, 23 nt, Human
ccccaggcaggcugugcgcugac

SEQ ID NO: 2612776 - RNA, 13 nt, Human
ccccacuggugac

SEQ ID NO: 2612777 - RNA, 12 nt, Human
ccccacugguga

SEQ ID NO: 2612778 - RNA, 14 nt, Human
ccccacuggugaca

SEQ ID NO: 2612779 - RNA, 19 nt, Human
ccccagcccuccuuaucaa

SEQ ID NO: 2612780 - RNA, 15 nt, Human
ccccagcccugugga

SEQ ID NO: 2612781 - RNA, 13 nt, Human
ccccagcccugug

SEQ ID NO: 2612782 - RNA, 14 nt, Human
ccccagcccugugg

SEQ ID NO: 2612783 - RNA, 16 nt, Human
ccccagcccuggcucu

SEQ ID NO: 2612784 - RNA, 13 nt, Human
ccccagcccuggc

SEQ ID NO: 2612785 - RNA, 19 nt, Human
ccccagcccuggcucugca

SEQ ID NO: 2612786 - RNA, 12 nt, Human
ccccagcccugu

SEQ ID NO: 2612787 - RNA, 19 nt, Human
ccccagcuaagaaccugga

SEQ ID NO: 2612788 - RNA, 21 nt, Human
ccccagcuaagaaccuggaac

SEQ ID NO: 2612789 - RNA, 17 nt, Human
ccccagcuaagaaccug

SEQ ID NO: 2612790 - RNA, 18 nt, Human
ccccagcgucccagucuc

SEQ ID NO: 2612791 - RNA, 16 nt, Human
ccccagccucuggcau

SEQ ID NO: 2612792 - RNA, 12 nt, Human
ccccagccuucu

SEQ ID NO: 2612793 - RNA, 19 nt, Human
ccccagcgagagucccugc

SEQ ID NO: 2612794 - RNA, 16 nt, Human
ccccagccgcucggag

SEQ ID NO: 2612795 - RNA, 19 nt, Human
ccccagccuaagaugaaga

SEQ ID NO: 2612796 - RNA, 13 nt, Human
ccccagccucccu

SEQ ID NO: 2612797 - RNA, 21 nt, Human
ccccagccuaagaugaagagg

SEQ ID NO: 2612798 - RNA, 15 nt, Human
ccccagccucuggca

SEQ ID NO: 2612799 - RNA, 14 nt, Human
ccccagccucuggc

SEQ ID NO: 2612800 - RNA, 15 nt, Human
ccccagccucccuga

SEQ ID NO: 2612801 - RNA, 12 nt, Human
ccccacucugug

SEQ ID NO: 2612802 - RNA, 13 nt, Human
ccccacccucagc

SEQ ID NO: 2612803 - RNA, 18 nt, Human
ccccaccccuugcucuca

SEQ ID NO: 2612804 - RNA, 14 nt, Human
ccccacugaccaga

SEQ ID NO: 2612805 - RNA, 21 nt, Human
ccccacugacagccucccacc

SEQ ID NO: 2612806 - RNA, 13 nt, Human
ccccacucugugc

SEQ ID NO: 2612807 - RNA, 15 nt, Human
ccccacugacagccu

SEQ ID NO: 2612808 - RNA, 17 nt, Human
ccccaccccugccccca

SEQ ID NO: 2612809 - RNA, 14 nt, Human
ccccaccccugccc

SEQ ID NO: 2612810 - RNA, 13 nt, Human
ccccaccccugcc

SEQ ID NO: 2612811 - RNA, 22 nt, Human
ccccaccccggggacccuguga

SEQ ID NO: 2612812 - RNA, 19 nt, Human
ccccaccccugggggcucu

SEQ ID NO: 2612813 - RNA, 23 nt, Human
ccccaccccugcccccagccccg

SEQ ID NO: 2612814 - RNA, 12 nt, Human
ccccaccccugg

SEQ ID NO: 2612815 - RNA, 20 nt, Human
ccccaccccugggggcucuc

SEQ ID NO: 2612816 - RNA, 13 nt, Human
ccccaccccuucc

SEQ ID NO: 2612817 - RNA, 15 nt, Human
ccccaccccuucccc

SEQ ID NO: 2612818 - RNA, 17 nt, Human
ccccaccccuuccccac

SEQ ID NO: 2612819 - RNA, 15 nt, Human
ccccaccccuugcuc

SEQ ID NO: 2612820 - RNA, 13 nt, Human
ccccaccccuugc

SEQ ID NO: 2612821 - RNA, 18 nt, Human
ccccaccccuuccccacu

SEQ ID NO: 2612822 - RNA, 22 nt, Human
ccccaccccuuccccacugccu

SEQ ID NO: 2612823 - RNA, 15 nt, Human
ccccacugaccagaa

SEQ ID NO: 2612824 - RNA, 12 nt, Human
ccccacugcagg

SEQ ID NO: 2612825 - RNA, 16 nt, Human
ccccacugcaggcccc

SEQ ID NO: 2612826 - RNA, 18 nt, Human
ccccacugcaggccccgc

SEQ ID NO: 2612827 - RNA, 19 nt, Human
ccccacugccuacugcauc

SEQ ID NO: 2612828 - RNA, 16 nt, Human
ccccacugccuacugc

SEQ ID NO: 2612829 - RNA, 12 nt, Human
ccccacugccug

SEQ ID NO: 2612830 - RNA, 15 nt, Human
ccccacugccugccc

SEQ ID NO: 2612831 - RNA, 14 nt, Human
ccccacuggggaaa

SEQ ID NO: 2612832 - RNA, 22 nt, Human
ccccacuggggaaauaacagcu

SEQ ID NO: 2612833 - RNA, 16 nt, Human
ccccacugccugccca

SEQ ID NO: 2612834 - RNA, 17 nt, Human
ccccacugccugcccac

SEQ ID NO: 2612835 - RNA, 17 nt, Human
cccuuugggcccaggga

SEQ ID NO: 2612836 - RNA, 15 nt, Human
cccuuugggcccagg

SEQ ID NO: 2612837 - RNA, 14 nt, Human
cccuuugggcccag

SEQ ID NO: 2612838 - RNA, 18 nt, Human
cccuuugggcccagggac

SEQ ID NO: 2612839 - RNA, 15 nt, Human
cccuuugugcugugg

SEQ ID NO: 2612840 - RNA, 14 nt, Human
cccuuugugcugug

SEQ ID NO: 2612841 - RNA, 20 nt, Human
cccuuugguuuuuuucuucu

SEQ ID NO: 2612842 - RNA, 12 nt, Human
cccuuugagugc

SEQ ID NO: 2612843 - RNA, 14 nt, Human
cccuuugagugcag

SEQ ID NO: 2612844 - RNA, 17 nt, Human
cccuuugcccagaaaga

SEQ ID NO: 2612845 - RNA, 16 nt, Human
cccuuucuuggccagu

SEQ ID NO: 2612846 - RNA, 23 nt, Human
cccuuugcugugaggcuguccug

SEQ ID NO: 2612847 - RNA, 16 nt, Human
cccuuugggaggcuga

SEQ ID NO: 2612848 - RNA, 20 nt, Human
cccuuugggaggcugaggcg

SEQ ID NO: 2612849 - RNA, 22 nt, Human
cccuuucuccccugcccccagg

SEQ ID NO: 2612850 - RNA, 14 nt, Human
cccuuucuccccug

SEQ ID NO: 2612851 - RNA, 14 nt, Human
cccuuucuggcucu

SEQ ID NO: 2612852 - RNA, 12 nt, Human
cccuuucugugu

SEQ ID NO: 2612853 - RNA, 22 nt, Human
cccuuucugggcaccggggccu

SEQ ID NO: 2612854 - RNA, 20 nt, Human
cccuuugacgccaucccagc

SEQ ID NO: 2612855 - RNA, 14 nt, Human
cccuuucuuggcca

SEQ ID NO: 2612856 - RNA, 15 nt, Human
cccuuucuuggccag

SEQ ID NO: 2612857 - RNA, 17 nt, Human
cccuuucuuggccaguu

SEQ ID NO: 2612858 - RNA, 16 nt, Human
cccuuguggucccacc

SEQ ID NO: 2612859 - RNA, 14 nt, Human
cccuugugguccca

SEQ ID NO: 2612860 - RNA, 18 nt, Human
cccuugggcggcugagag

SEQ ID NO: 2612861 - RNA, 18 nt, Human
cccuuggggagcaggcuc

SEQ ID NO: 2612862 - RNA, 18 nt, Human
cccuuguggucccacccc

SEQ ID NO: 2612863 - RNA, 20 nt, Human
cccuuguggucccaccccac

SEQ ID NO: 2612864 - RNA, 15 nt, Human
cccuuggguucugau

SEQ ID NO: 2612865 - RNA, 23 nt, Human
cccuugugcgugggugaagccgc

SEQ ID NO: 2612866 - RNA, 13 nt, Human
cccuuuccuucca

SEQ ID NO: 2612867 - RNA, 15 nt, Human
cccuuuccuuccauc

SEQ ID NO: 2612868 - RNA, 18 nt, Human
cccuuuccuuccaucccu

SEQ ID NO: 2612869 - RNA, 18 nt, Human
cccuuuccuuccuucccu

SEQ ID NO: 2612870 - RNA, 21 nt, Human
cccuuuccuuccuucccuggc

SEQ ID NO: 2612871 - RNA, 14 nt, Human
cccuuuccucaggc

SEQ ID NO: 2612872 - RNA, 17 nt, Human
cccuugugcguggguga

SEQ ID NO: 2612873 - RNA, 13 nt, Human
cccuuuccugcgg

SEQ ID NO: 2612874 - RNA, 16 nt, Human
cccuuggccugucuca

SEQ ID NO: 2612875 - RNA, 21 nt, Human
cccuugcccuugcccugaccu

SEQ ID NO: 2612876 - RNA, 18 nt, Human
cccuugcccuugcccuga

SEQ ID NO: 2612877 - RNA, 17 nt, Human
cccuugcccuugcccug

SEQ ID NO: 2612878 - RNA, 16 nt, Human
cccuugcccuugcccu

SEQ ID NO: 2612879 - RNA, 21 nt, Human
cccuugcccugaccucccagc

SEQ ID NO: 2612880 - RNA, 20 nt, Human
cccuugcccugaccucccag

SEQ ID NO: 2612881 - RNA, 19 nt, Human
cccuugcccugaccuccca

SEQ ID NO: 2612882 - RNA, 22 nt, Human
cccuugccgucuaccugagggg

SEQ ID NO: 2612883 - RNA, 23 nt, Human
cccuuggcugugaggccccugga

SEQ ID NO: 2612884 - RNA, 14 nt, Human
cccuuggcugugag

SEQ ID NO: 2612885 - RNA, 22 nt, Human
cccuuggcugugaggccccugg

SEQ ID NO: 2612886 - RNA, 19 nt, Human
cccuuggccugucucaucc

SEQ ID NO: 2612887 - RNA, 15 nt, Human
cccuuggcucaaucc

SEQ ID NO: 2612888 - RNA, 18 nt, Human
cccuugccgucuaccuga

SEQ ID NO: 2612889 - RNA, 17 nt, Human
cccuugccgucuaccug

SEQ ID NO: 2612890 - RNA, 22 nt, Human
cccuugcacuaaaguauguaaa

SEQ ID NO: 2612891 - RNA, 16 nt, Human
cccuugcagcuaguuu

SEQ ID NO: 2612892 - RNA, 19 nt, Human
cccuugcagcuaguuuucu

SEQ ID NO: 2612893 - RNA, 19 nt, Human
cccuugcaguucagcacca

SEQ ID NO: 2612894 - RNA, 16 nt, Human
cccuugcccugaccuc

SEQ ID NO: 2612895 - RNA, 15 nt, Human
cccuugcccugaccu

SEQ ID NO: 2612896 - RNA, 18 nt, Human
cccuugccaccccacccu

SEQ ID NO: 2612897 - RNA, 13 nt, Human
cccuugccacccc

SEQ ID NO: 2612898 - RNA, 21 nt, Human
cccuugcaguucagcaccacc

SEQ ID NO: 2612899 - RNA, 23 nt, Human
cccuugcaguucagcaccacccu

SEQ ID NO: 2612900 - RNA, 16 nt, Human
cccuugaugaagaagu

SEQ ID NO: 2612901 - RNA, 18 nt, Human
cccuuccucuccacccuc

SEQ ID NO: 2612902 - RNA, 17 nt, Human
cccuuccucuccacccu

SEQ ID NO: 2612903 - RNA, 20 nt, Human
cccuuccucuccacugccuu

SEQ ID NO: 2612904 - RNA, 15 nt, Human
cccuugaugaagaag

SEQ ID NO: 2612905 - RNA, 17 nt, Human
cccuuccucuccacugc

SEQ ID NO: 2612906 - RNA, 16 nt, Human
cccuuccucuccacug

SEQ ID NO: 2612907 - RNA, 15 nt, Human
cccuuccucuccacc

SEQ ID NO: 2612908 - RNA, 13 nt, Human
cccuuccucucca

SEQ ID NO: 2612909 - RNA, 20 nt, Human
cccuuaccaugugccugauc

SEQ ID NO: 2612910 - RNA, 19 nt, Human
cccuuacagccucugacuu

SEQ ID NO: 2612911 - RNA, 17 nt, Human
cccuuaccccuuagccu

SEQ ID NO: 2612912 - RNA, 20 nt, Human
cccuuccuacagauagucaa

SEQ ID NO: 2612913 - RNA, 22 nt, Human
cccuuaccccuuagccucccug

SEQ ID NO: 2612914 - RNA, 17 nt, Human
cccuuaccacugcucug

SEQ ID NO: 2612915 - RNA, 21 nt, Human
cccuuaccacugcucugauga

SEQ ID NO: 2612916 - RNA, 19 nt, Human
cccuuaccucggugccuuc

SEQ ID NO: 2612917 - RNA, 13 nt, Human
ccgauccuuccuc

SEQ ID NO: 2612918 - RNA, 15 nt, Human
ccgaguuuccccaga

SEQ ID NO: 2612919 - RNA, 14 nt, Human
ccgagucugucucu

SEQ ID NO: 2612920 - RNA, 16 nt, Human
ccgagugaaccuaccu

SEQ ID NO: 2612921 - RNA, 17 nt, Human
ccgagucugucucuguc

SEQ ID NO: 2612922 - RNA, 16 nt, Human
ccgaggggcucaggaa

SEQ ID NO: 2612923 - RNA, 18 nt, Human
ccgaggggcucaggaaaa

SEQ ID NO: 2612924 - RNA, 23 nt, Human
ccgaggggcgggacccaggcacc

SEQ ID NO: 2612925 - RNA, 13 nt, Human
ccgaggggcggga

SEQ ID NO: 2612926 - RNA, 22 nt, Human
ccgagucucuucuccacuggau

SEQ ID NO: 2612927 - RNA, 16 nt, Human
ccgaggguccuggcuc

SEQ ID NO: 2612928 - RNA, 21 nt, Human
ccgagucucuucuccacugga

SEQ ID NO: 2612929 - RNA, 14 nt, Human
ccgccccgccccac

SEQ ID NO: 2612930 - RNA, 13 nt, Human
ccgaugcugcuuu

SEQ ID NO: 2612931 - RNA, 11 nt, Human
ccgaugcugcu

SEQ ID NO: 2612932 - RNA, 19 nt, Human
ccgaugcuccagccaaccc

SEQ ID NO: 2612933 - RNA, 22 nt, Human
ccgaugcuccagccaaccccug

SEQ ID NO: 2612934 - RNA, 14 nt, Human
ccgauccuuccucc

SEQ ID NO: 2612935 - RNA, 14 nt, Human
ccgaugcuccagcc

SEQ ID NO: 2612936 - RNA, 15 nt, Human
ccgaugcuccagcca

SEQ ID NO: 2612937 - RNA, 12 nt, Human
ccgcccugccac

SEQ ID NO: 2612938 - RNA, 11 nt, Human
ccgcccugcca

SEQ ID NO: 2612939 - RNA, 17 nt, Human
ccgccccuuccccgagg

SEQ ID NO: 2612940 - RNA, 19 nt, Human
ccgccccuuccccgaggga

SEQ ID NO: 2612941 - RNA, 18 nt, Human
ccgagaucacgccacugc

SEQ ID NO: 2612942 - RNA, 20 nt, Human
ccgagcaaagucuaaaguuu

SEQ ID NO: 2612943 - RNA, 18 nt, Human
ccgagcaaagucuaaagu

SEQ ID NO: 2612944 - RNA, 23 nt, Human
ccgagcaaagaucaaaauaaaaa

SEQ ID NO: 2612945 - RNA, 21 nt, Human
ccgagcaaagaucaaaauaaa

SEQ ID NO: 2612946 - RNA, 16 nt, Human
ccgagccuggcuccaa

SEQ ID NO: 2612947 - RNA, 19 nt, Human
ccgagccgggccuggggcu

SEQ ID NO: 2612948 - RNA, 16 nt, Human
ccgagccgggccuggg

SEQ ID NO: 2612949 - RNA, 18 nt, Human
ccgagcgcuuucuggaaa

SEQ ID NO: 2612950 - RNA, 21 nt, Human
ccgagccucugucacugcagg

SEQ ID NO: 2612951 - RNA, 19 nt, Human
ccgagcgcuuucuggaaaa

SEQ ID NO: 2612952 - RNA, 19 nt, Human
ccgagccuggcuccaaacc

SEQ ID NO: 2612953 - RNA, 19 nt, Human
ccgagcucguguauccugg

SEQ ID NO: 2612954 - RNA, 17 nt, Human
ccgaggccuucucugaa

SEQ ID NO: 2612955 - RNA, 16 nt, Human
ccgagggcgaccccgu

SEQ ID NO: 2612956 - RNA, 15 nt, Human
ccgagggcgaccccg

SEQ ID NO: 2612957 - RNA, 20 nt, Human
ccgagggaugaugccacacc

SEQ ID NO: 2612958 - RNA, 19 nt, Human
ccgagggaugaugccacac

SEQ ID NO: 2612959 - RNA, 16 nt, Human
ccgagggaugaugcca

SEQ ID NO: 2612960 - RNA, 18 nt, Human
ccgagggaugaugccaca

SEQ ID NO: 2612961 - RNA, 17 nt, Human
ccgaggcuggagcuggc

SEQ ID NO: 2612962 - RNA, 21 nt, Human
ccgagcucguguauccugggg

SEQ ID NO: 2612963 - RNA, 20 nt, Human
ccgagcucguguauccuggg

SEQ ID NO: 2612964 - RNA, 14 nt, Human
ccgaggcuggagcu

SEQ ID NO: 2612965 - RNA, 23 nt, Human
cccuuuuugaaguguaggcagac

SEQ ID NO: 2612966 - RNA, 16 nt, Human
cccuuuuucuccagcu

SEQ ID NO: 2612967 - RNA, 20 nt, Human
ccgacuugaauuuucccacu

SEQ ID NO: 2612968 - RNA, 15 nt, Human
cccuuuuugaagugu

SEQ ID NO: 2612969 - RNA, 19 nt, Human
cccuuuuuuggcugcugaa

SEQ ID NO: 2612970 - RNA, 23 nt, Human
ccgacuugaauuuucccacugca

SEQ ID NO: 2612971 - RNA, 22 nt, Human
ccgacuugaauuuucccacugc

SEQ ID NO: 2612972 - RNA, 21 nt, Human
ccgacuugaauuuucccacug

SEQ ID NO: 2612973 - RNA, 23 nt, Human
ccgacuugcuguuuuguucugug

SEQ ID NO: 2612974 - RNA, 16 nt, Human
ccgacuugcuguuuug

SEQ ID NO: 2612975 - RNA, 22 nt, Human
ccgacuuuguaccccccaaccc

SEQ ID NO: 2612976 - RNA, 13 nt, Human
ccgagaagcaaga

SEQ ID NO: 2612977 - RNA, 22 nt, Human
ccgagauagccaaggccaaagg

SEQ ID NO: 2612978 - RNA, 19 nt, Human
ccgagauagccaaggccaa

SEQ ID NO: 2612979 - RNA, 17 nt, Human
ccgagaaggaagccucc

SEQ ID NO: 2612980 - RNA, 18 nt, Human
ccgagauagccaaggcca

SEQ ID NO: 2612981 - RNA, 23 nt, Human
ccgagagagcaccccucucugca

SEQ ID NO: 2612982 - RNA, 14 nt, Human
ccgagaagccagug

SEQ ID NO: 2612983 - RNA, 19 nt, Human
ccgagaagcaagaaagaaa

SEQ ID NO: 2612984 - RNA, 18 nt, Human
cccuuuuuuggcugcuga

SEQ ID NO: 2612985 - RNA, 17 nt, Human
cccuuuuuuggcugcug

SEQ ID NO: 2612986 - RNA, 16 nt, Human
cccuuuuuacuccccu

SEQ ID NO: 2612987 - RNA, 23 nt, Human
cccuuuuuacuccccuugagcug

SEQ ID NO: 2612988 - RNA, 16 nt, Human
cccuuuuuccuugucc

SEQ ID NO: 2612989 - RNA, 15 nt, Human
cccuuuuucuccagc

SEQ ID NO: 2612990 - RNA, 23 nt, Human
cccuuuuuccuuguccccacacu

SEQ ID NO: 2612991 - RNA, 18 nt, Human
cccuuuuuacuccccuug

SEQ ID NO: 2612992 - RNA, 11 nt, Human
cccuuuuccuu

SEQ ID NO: 2612993 - RNA, 16 nt, Human
cccuuuucagcuucug

SEQ ID NO: 2612994 - RNA, 15 nt, Human
cccuuuucagcuucu

SEQ ID NO: 2612995 - RNA, 18 nt, Human
cccuuuucagcuucugcu

SEQ ID NO: 2612996 - RNA, 16 nt, Human
cccuuuucuacaguua

SEQ ID NO: 2612997 - RNA, 13 nt, Human
cccuuuucuguuu

SEQ ID NO: 2612998 - RNA, 22 nt, Human
cccuuuuggcccccgagcuggg

SEQ ID NO: 2612999 - RNA, 14 nt, Human
cccuuuuggccccc

SEQ ID NO: 2613000 - RNA, 20 nt, Human
cccuuuuggcccccgagcug

SEQ ID NO: 2613001 - RNA, 23 nt, Human
cccuuuucuuuucuacccuagcc

SEQ ID NO: 2613002 - RNA, 18 nt, Human
cccuuuucuuuucuaccc

SEQ ID NO: 2613003 - RNA, 21 nt, Human
cccuuuugcggaugggagggg

SEQ ID NO: 2613004 - RNA, 20 nt, Human
ccguggggccgccgccucuu

SEQ ID NO: 2613005 - RNA, 19 nt, Human
ccgccgacuuuguaccccc

SEQ ID NO: 2613006 - RNA, 12 nt, Human
ccggcuggccug

SEQ ID NO: 2613007 - RNA, 12 nt, Human
ccggcugcccuu

SEQ ID NO: 2613008 - RNA, 17 nt, Human
ccggcucuuuccuugcu

SEQ ID NO: 2613009 - RNA, 22 nt, Human
ccggcugcuuuucccuaagcca

SEQ ID NO: 2613010 - RNA, 17 nt, Human
ccggacacuccuagaga

SEQ ID NO: 2613011 - RNA, 16 nt, Human
ccggacacuccuagag

SEQ ID NO: 2613012 - RNA, 15 nt, Human
ccggcugcagaggcc

SEQ ID NO: 2613013 - RNA, 14 nt, Human
ccggcucuuuccuu

SEQ ID NO: 2613014 - RNA, 22 nt, Human
ccgggaggcagagguugcagug

SEQ ID NO: 2613015 - RNA, 13 nt, Human
ccggcuggccugg

SEQ ID NO: 2613016 - RNA, 19 nt, Human
ccgggauauauauucucuc

SEQ ID NO: 2613017 - RNA, 22 nt, Human
ccgggagggugcggcugugcag

SEQ ID NO: 2613018 - RNA, 22 nt, Human
ccgggaggggcccgcuugccuc

SEQ ID NO: 2613019 - RNA, 16 nt, Human
ccgggaggggcccgcu

SEQ ID NO: 2613020 - RNA, 15 nt, Human
ccgggaggggcccgc

SEQ ID NO: 2613021 - RNA, 12 nt, Human
ccggcuggaaau

SEQ ID NO: 2613022 - RNA, 15 nt, Human
ccgggcacucagaag

SEQ ID NO: 2613023 - RNA, 15 nt, Human
ccgcuucugccugca

SEQ ID NO: 2613024 - RNA, 18 nt, Human
ccgcuguucacccacagg

SEQ ID NO: 2613025 - RNA, 19 nt, Human
ccgcuguucacccacaggg

SEQ ID NO: 2613026 - RNA, 21 nt, Human
ccgcuguucacccacagggcu

SEQ ID NO: 2613027 - RNA, 19 nt, Human
ccgcugugagccccugguc

SEQ ID NO: 2613028 - RNA, 18 nt, Human
ccgcugugagccccuggu

SEQ ID NO: 2613029 - RNA, 15 nt, Human
ccgcugugagccccu

SEQ ID NO: 2613030 - RNA, 20 nt, Human
ccgcugugagccccuggucc

SEQ ID NO: 2613031 - RNA, 14 nt, Human
ccgcuguucaccca

SEQ ID NO: 2613032 - RNA, 15 nt, Human
ccgcuguucacccac

SEQ ID NO: 2613033 - RNA, 16 nt, Human
ccgcuguucacccaca

SEQ ID NO: 2613034 - RNA, 15 nt, Human
ccgcccugcuccucc

SEQ ID NO: 2613035 - RNA, 14 nt, Human
ccgcccugcuccuc

SEQ ID NO: 2613036 - RNA, 15 nt, Human
ccgcccugccacuca

SEQ ID NO: 2613037 - RNA, 14 nt, Human
ccgcccugccacuc

SEQ ID NO: 2613038 - RNA, 13 nt, Human
ccgcccugccacu

SEQ ID NO: 2613039 - RNA, 22 nt, Human
ccgcccugcuccucccuggcug

SEQ ID NO: 2613040 - RNA, 21 nt, Human
ccgcccugcuccucccuggcu

SEQ ID NO: 2613041 - RNA, 19 nt, Human
ccgcccugcuccucccugg

SEQ ID NO: 2613042 - RNA, 18 nt, Human
ccgcccugcuccucccug

SEQ ID NO: 2613043 - RNA, 15 nt, Human
ccgccgacuuuguac

SEQ ID NO: 2613044 - RNA, 21 nt, Human
ccgcccuugccgaaccaggag

SEQ ID NO: 2613045 - RNA, 20 nt, Human
ccgcuugccucggcuccugc

SEQ ID NO: 2613046 - RNA, 18 nt, Human
ccgcuugccucggcuccu

SEQ ID NO: 2613047 - RNA, 14 nt, Human
ccgcuugccucggc

SEQ ID NO: 2613048 - RNA, 13 nt, Human
ccgcuugccucgg

SEQ ID NO: 2613049 - RNA, 22 nt, Human
ccgcuugccucggcuccugcug

SEQ ID NO: 2613050 - RNA, 21 nt, Human
ccgcuugccucggcuccugcu

SEQ ID NO: 2613051 - RNA, 15 nt, Human
ccgcuuggagcagag

SEQ ID NO: 2613052 - RNA, 23 nt, Human
ccgcuuucuacccagcgagcccu

SEQ ID NO: 2613053 - RNA, 11 nt, Human
ccggaagccaa

SEQ ID NO: 2613054 - RNA, 17 nt, Human
ccgcuuggagcagaggg

SEQ ID NO: 2613055 - RNA, 18 nt, Human
ccgcuuggagcagagggg

SEQ ID NO: 2613056 - RNA, 22 nt, Human
ccggaauccuguccucagcuuc

SEQ ID NO: 2613057 - RNA, 20 nt, Human
ccggaauccuguccucagcu

SEQ ID NO: 2613058 - RNA, 22 nt, Human
ccggaagccaaaccucugugag

SEQ ID NO: 2613059 - RNA, 19 nt, Human
ccggaauccuguccucagc

SEQ ID NO: 2613060 - RNA, 13 nt, Human
ccuaccugcucuc

SEQ ID NO: 2613061 - RNA, 12 nt, Human
ccuaccugcucu

SEQ ID NO: 2613062 - RNA, 14 nt, Human
ccuaccugugccug

SEQ ID NO: 2613063 - RNA, 15 nt, Human
ccuaccugugccuga

SEQ ID NO: 2613064 - RNA, 16 nt, Human
ccuaccugugccugac

SEQ ID NO: 2613065 - RNA, 12 nt, Human
ccuaccugguaa

SEQ ID NO: 2613066 - RNA, 21 nt, Human
ccuaccugauuggugcaaccc

SEQ ID NO: 2613067 - RNA, 19 nt, Human
ccuagagaacgcagcccua

SEQ ID NO: 2613068 - RNA, 18 nt, Human
ccuagagaacgcagcccu

SEQ ID NO: 2613069 - RNA, 17 nt, Human
ccuagagaacgcagccc

SEQ ID NO: 2613070 - RNA, 20 nt, Human
ccuagagaacgcagcccuag

SEQ ID NO: 2613071 - RNA, 22 nt, Human
ccuaccuguucagugucccggg

SEQ ID NO: 2613072 - RNA, 17 nt, Human
ccuaccuguucaguguc

SEQ ID NO: 2613073 - RNA, 13 nt, Human
ccuaccuguucag

SEQ ID NO: 2613074 - RNA, 16 nt, Human
ccuaccugcucuccaa

SEQ ID NO: 2613075 - RNA, 23 nt, Human
ccuaccuguucagugucccgggc

SEQ ID NO: 2613076 - RNA, 19 nt, Human
ccuaccuucauuucaggag

SEQ ID NO: 2613077 - RNA, 19 nt, Human
ccuaccucagguugcuggu

SEQ ID NO: 2613078 - RNA, 14 nt, Human
ccuaccucagguug

SEQ ID NO: 2613079 - RNA, 13 nt, Human
ccuaccucagguu

SEQ ID NO: 2613080 - RNA, 19 nt, Human
ccuacccucgggcccaccu

SEQ ID NO: 2613081 - RNA, 23 nt, Human
ccuaccucagguugcugguugcu

SEQ ID NO: 2613082 - RNA, 22 nt, Human
ccuaccucagguugcugguugc

SEQ ID NO: 2613083 - RNA, 18 nt, Human
ccuacccucgggcccacc

SEQ ID NO: 2613084 - RNA, 14 nt, Human
ccuacccucgggcc

SEQ ID NO: 2613085 - RNA, 21 nt, Human
ccuaccccucccagcugacag

SEQ ID NO: 2613086 - RNA, 18 nt, Human
ccuaccccucccagcuga

SEQ ID NO: 2613087 - RNA, 17 nt, Human
ccuaccccucccagcug

SEQ ID NO: 2613088 - RNA, 16 nt, Human
ccuaccccucccagcu

SEQ ID NO: 2613089 - RNA, 15 nt, Human
ccuaccccucccagc

SEQ ID NO: 2613090 - RNA, 14 nt, Human
ccuaccccucccag

SEQ ID NO: 2613091 - RNA, 21 nt, Human
ccuaccccgcagacaccuugg

SEQ ID NO: 2613092 - RNA, 17 nt, Human
ccuacccccuccucucu

SEQ ID NO: 2613093 - RNA, 14 nt, Human
ccuaccccaccacg

SEQ ID NO: 2613094 - RNA, 20 nt, Human
ccuaccccgcagacaccuug

SEQ ID NO: 2613095 - RNA, 19 nt, Human
ccuacccccuccucucugc

SEQ ID NO: 2613096 - RNA, 13 nt, Human
ccuaccccaccac

SEQ ID NO: 2613097 - RNA, 14 nt, Human
ccuaauuccacagc

SEQ ID NO: 2613098 - RNA, 15 nt, Human
ccuaauuccacagcu

SEQ ID NO: 2613099 - RNA, 16 nt, Human
ccuaauuccacagcug

SEQ ID NO: 2613100 - RNA, 17 nt, Human
ccuaauuccacagcugc

SEQ ID NO: 2613101 - RNA, 18 nt, Human
ccuaauuucuccucccuu

SEQ ID NO: 2613102 - RNA, 17 nt, Human
ccuaauuucuccucccu

SEQ ID NO: 2613103 - RNA, 16 nt, Human
ccuaauuucuccuccc

SEQ ID NO: 2613104 - RNA, 15 nt, Human
ccuaauuucuccucc

SEQ ID NO: 2613105 - RNA, 14 nt, Human
ccuaauuucuccuc

SEQ ID NO: 2613106 - RNA, 19 nt, Human
ccuaccccacaccaggccg

SEQ ID NO: 2613107 - RNA, 18 nt, Human
ccuaccccacaccaggcc

SEQ ID NO: 2613108 - RNA, 13 nt, Human
ccuaccccacacc

SEQ ID NO: 2613109 - RNA, 12 nt, Human
ccuaccccacac

SEQ ID NO: 2613110 - RNA, 21 nt, Human
ccuaccccacaccaggccguc

SEQ ID NO: 2613111 - RNA, 20 nt, Human
ccuaccccacaccaggccgu

SEQ ID NO: 2613112 - RNA, 23 nt, Human
ccuaccccacaccaggccguccu

SEQ ID NO: 2613113 - RNA, 11 nt, Human
ccuaccccacc

SEQ ID NO: 2613114 - RNA, 12 nt, Human
ccuaaagaaaaa

SEQ ID NO: 2613115 - RNA, 14 nt, Human
ccuaaacuaucuuu

SEQ ID NO: 2613116 - RNA, 18 nt, Human
ccuaaaacaaaagcucau

SEQ ID NO: 2613117 - RNA, 11 nt, Human
ccuaaacugua

SEQ ID NO: 2613118 - RNA, 12 nt, Human
ccuaaagagaua

SEQ ID NO: 2613119 - RNA, 13 nt, Human
ccuaauuccacag

SEQ ID NO: 2613120 - RNA, 19 nt, Human
ccuaaaguagacuucauuu

SEQ ID NO: 2613121 - RNA, 22 nt, Human
ccgugccuccaccaccacuggc

SEQ ID NO: 2613122 - RNA, 17 nt, Human
ccgugccuccaccacca

SEQ ID NO: 2613123 - RNA, 23 nt, Human
ccgugccuccaccaccacuggcc

SEQ ID NO: 2613124 - RNA, 17 nt, Human
ccgugccuucagcucua

SEQ ID NO: 2613125 - RNA, 16 nt, Human
ccgugccuucagcucu

SEQ ID NO: 2613126 - RNA, 19 nt, Human
ccgggcgcggccagccccg

SEQ ID NO: 2613127 - RNA, 17 nt, Human
ccgggcgcggccagccc

SEQ ID NO: 2613128 - RNA, 15 nt, Human
ccgggcgcggccagc

SEQ ID NO: 2613129 - RNA, 14 nt, Human
ccgugccuccacca

SEQ ID NO: 2613130 - RNA, 15 nt, Human
ccgugccuucagcuc

SEQ ID NO: 2613131 - RNA, 14 nt, Human
ccgugccuucagcu

SEQ ID NO: 2613132 - RNA, 17 nt, Human
ccgggcccucccuugga

SEQ ID NO: 2613133 - RNA, 14 nt, Human
ccgggcccucccuu

SEQ ID NO: 2613134 - RNA, 13 nt, Human
ccgggcccucccu

SEQ ID NO: 2613135 - RNA, 23 nt, Human
ccgggccccugggcuuggccugc

SEQ ID NO: 2613136 - RNA, 21 nt, Human
ccgggccccugggcuuggccu

SEQ ID NO: 2613137 - RNA, 19 nt, Human
ccgggccccugggcuuggc

SEQ ID NO: 2613138 - RNA, 16 nt, Human
ccgggccccugggcuu

SEQ ID NO: 2613139 - RNA, 14 nt, Human
ccgggccccugggc

SEQ ID NO: 2613140 - RNA, 13 nt, Human
ccgggccuggggc

SEQ ID NO: 2613141 - RNA, 23 nt, Human
ccgggccgaauccccucccuguc

SEQ ID NO: 2613142 - RNA, 15 nt, Human
ccgggcccugaguaa

SEQ ID NO: 2613143 - RNA, 18 nt, Human
ccgggcccucccuuggaa

SEQ ID NO: 2613144 - RNA, 19 nt, Human
ccgggccuggagaacuaga

SEQ ID NO: 2613145 - RNA, 20 nt, Human
ccgggcacucagaagacacu

SEQ ID NO: 2613146 - RNA, 23 nt, Human
ccguggcuucccgcucagcccuc

SEQ ID NO: 2613147 - RNA, 13 nt, Human
ccgugggccuggg

SEQ ID NO: 2613148 - RNA, 21 nt, Human
ccguggcuucccgcucagccc

SEQ ID NO: 2613149 - RNA, 15 nt, Human
ccguggcuucccgcu

SEQ ID NO: 2613150 - RNA, 14 nt, Human
ccgugggcucccug

SEQ ID NO: 2613151 - RNA, 19 nt, Human
ccgugggcggggccuugcg

SEQ ID NO: 2613152 - RNA, 18 nt, Human
ccgugggcggggccuugc

SEQ ID NO: 2613153 - RNA, 12 nt, Human
ccgugggcgggg

SEQ ID NO: 2613154 - RNA, 20 nt, Human
ccguuguuuacuuaaagauu

SEQ ID NO: 2613155 - RNA, 17 nt, Human
ccguggggccgccgccu

SEQ ID NO: 2613156 - RNA, 23 nt, Human
ccguuucauuuagucaugugacc

SEQ ID NO: 2613157 - RNA, 12 nt, Human
ccguuguuuacu

SEQ ID NO: 2613158 - RNA, 14 nt, Human
ccuaaaaaagauau

SEQ ID NO: 2613159 - RNA, 12 nt, Human
ccuaaaaaagau

SEQ ID NO: 2613160 - RNA, 15 nt, Human
ccguuucuucccugu

SEQ ID NO: 2613161 - RNA, 13 nt, Human
ccguuucuucccu

SEQ ID NO: 2613162 - RNA, 23 nt, Human
ccguuuccuuucauuuacugugg

SEQ ID NO: 2613163 - RNA, 22 nt, Human
ccguuugagaagaaaacaucua

SEQ ID NO: 2613164 - RNA, 13 nt, Human
ccuaaaacaaaag

SEQ ID NO: 2613165 - RNA, 18 nt, Human
ccuaaaaaagauauauua

SEQ ID NO: 2613166 - RNA, 14 nt, Human
ccuaaaaacacaga

SEQ ID NO: 2613167 - RNA, 12 nt, Human
ccuaaaacaaau

SEQ ID NO: 2613168 - RNA, 21 nt, Human
ccuaaaccaaaaacugaaagu

SEQ ID NO: 2613169 - RNA, 17 nt, Human
ccuagagggaggggccu

SEQ ID NO: 2613170 - RNA, 22 nt, Human
ccucaccccacuuaucccucuc

SEQ ID NO: 2613171 - RNA, 23 nt, Human
ccucacccacuuuggccuccguu

SEQ ID NO: 2613172 - RNA, 17 nt, Human
ccucacccccagcuuug

SEQ ID NO: 2613173 - RNA, 19 nt, Human
ccucacccccagcuuugcu

SEQ ID NO: 2613174 - RNA, 15 nt, Human
ccucaccccacugug

SEQ ID NO: 2613175 - RNA, 15 nt, Human
ccucaccccugguuc

SEQ ID NO: 2613176 - RNA, 16 nt, Human
ccucaccccugcccug

SEQ ID NO: 2613177 - RNA, 17 nt, Human
ccucaccccugcccugg

SEQ ID NO: 2613178 - RNA, 17 nt, Human
ccucaccccgucugggg

SEQ ID NO: 2613179 - RNA, 13 nt, Human
ccucaccccugcc

SEQ ID NO: 2613180 - RNA, 14 nt, Human
ccucaccccugccc

SEQ ID NO: 2613181 - RNA, 15 nt, Human
ccucacccccucggg

SEQ ID NO: 2613182 - RNA, 24 nt, Human
ccucaccccacuuaucccucucca

SEQ ID NO: 2613183 - RNA, 16 nt, Human
ccucaccccgucuggg

SEQ ID NO: 2613184 - RNA, 22 nt, Human
ccucacaguccuuaccagcaga

SEQ ID NO: 2613185 - RNA, 20 nt, Human
ccucacaguccuuaccagca

SEQ ID NO: 2613186 - RNA, 12 nt, Human
ccucaccccacu

SEQ ID NO: 2613187 - RNA, 21 nt, Human
ccucacggugccuuuuuucac

SEQ ID NO: 2613188 - RNA, 14 nt, Human
ccucacgcaccucc

SEQ ID NO: 2613189 - RNA, 19 nt, Human
ccucaccuuuucccgggga

SEQ ID NO: 2613190 - RNA, 22 nt, Human
ccucaccuugcaacacacagac

SEQ ID NO: 2613191 - RNA, 17 nt, Human
ccucacgcaccucccau

SEQ ID NO: 2613192 - RNA, 17 nt, Human
ccucaccuuucccaucu

SEQ ID NO: 2613193 - RNA, 16 nt, Human
ccucaccuuggcacca

SEQ ID NO: 2613194 - RNA, 21 nt, Human
ccucaccuuggcaccagacac

SEQ ID NO: 2613195 - RNA, 15 nt, Human
ccucaccuuggcacc

SEQ ID NO: 2613196 - RNA, 19 nt, Human
ccucaccuugcaacacaca

SEQ ID NO: 2613197 - RNA, 21 nt, Human
ccucaccuugcaacacacaga

SEQ ID NO: 2613198 - RNA, 15 nt, Human
ccucaccuguagcag

SEQ ID NO: 2613199 - RNA, 18 nt, Human
ccucaccugggcaccugg

SEQ ID NO: 2613200 - RNA, 19 nt, Human
ccucaccugggcaccuggg

SEQ ID NO: 2613201 - RNA, 22 nt, Human
ccucaccugggcaccuggggag

SEQ ID NO: 2613202 - RNA, 17 nt, Human
ccucaccuugcaacaca

SEQ ID NO: 2613203 - RNA, 18 nt, Human
ccucaccuugcaacacac

SEQ ID NO: 2613204 - RNA, 23 nt, Human
ccucaccccugguucucaucuuu

SEQ ID NO: 2613205 - RNA, 22 nt, Human
ccucaccccugguucucaucuu

SEQ ID NO: 2613206 - RNA, 21 nt, Human
ccucaccccugguucucaucu

SEQ ID NO: 2613207 - RNA, 20 nt, Human
ccucaccccugguucucauc

SEQ ID NO: 2613208 - RNA, 20 nt, Human
ccucaccccuguccucacug

SEQ ID NO: 2613209 - RNA, 19 nt, Human
ccucaccccuguccucacu

SEQ ID NO: 2613210 - RNA, 15 nt, Human
ccucaccccuguccu

SEQ ID NO: 2613211 - RNA, 18 nt, Human
ccucaccccugcccuggg

SEQ ID NO: 2613212 - RNA, 22 nt, Human
ccucaccccuguccucacugcu

SEQ ID NO: 2613213 - RNA, 21 nt, Human
ccucaccccuguccucacugc

SEQ ID NO: 2613214 - RNA, 19 nt, Human
ccucacccgaggcugccca

SEQ ID NO: 2613215 - RNA, 14 nt, Human
ccucaccuccucua

SEQ ID NO: 2613216 - RNA, 12 nt, Human
ccucaccucugg

SEQ ID NO: 2613217 - RNA, 13 nt, Human
ccucaccucugga

SEQ ID NO: 2613218 - RNA, 18 nt, Human
ccucaccucuggacuggc

SEQ ID NO: 2613219 - RNA, 20 nt, Human
ccucaccucuggacuggcua

SEQ ID NO: 2613220 - RNA, 22 nt, Human
ccucaccucuggacuggcuaga

SEQ ID NO: 2613221 - RNA, 16 nt, Human
ccucaccugagagcca

SEQ ID NO: 2613222 - RNA, 14 nt, Human
ccucaccugggcac

SEQ ID NO: 2613223 - RNA, 18 nt, Human
ccucaauaagccuugucg

SEQ ID NO: 2613224 - RNA, 16 nt, Human
ccucaauaagccuugu

SEQ ID NO: 2613225 - RNA, 13 nt, Human
ccucaauccagcu

SEQ ID NO: 2613226 - RNA, 23 nt, Human
ccucaaugccaguaacgcgucuu

SEQ ID NO: 2613227 - RNA, 18 nt, Human
ccucaauccagcuauguu

SEQ ID NO: 2613228 - RNA, 24 nt, Human
ccuauguccuaaggacacacuaau

SEQ ID NO: 2613229 - RNA, 17 nt, Human
ccuaugugauuuuaacu

SEQ ID NO: 2613230 - RNA, 15 nt, Human
ccucaauaagccuug

SEQ ID NO: 2613231 - RNA, 20 nt, Human
ccuaugugauuuuaacucug

SEQ ID NO: 2613232 - RNA, 23 nt, Human
ccuauguccuaaggacacacuaa

SEQ ID NO: 2613233 - RNA, 22 nt, Human
ccuauguccuaaggacacacua

SEQ ID NO: 2613234 - RNA, 21 nt, Human
ccuauguccuaaggacacacu

SEQ ID NO: 2613235 - RNA, 20 nt, Human
ccuauguccuaaggacacac

SEQ ID NO: 2613236 - RNA, 19 nt, Human
ccuauguccuaaggacaca

SEQ ID NO: 2613237 - RNA, 15 nt, Human
ccuauguccuaagga

SEQ ID NO: 2613238 - RNA, 14 nt, Human
ccuauguccuaagg

SEQ ID NO: 2613239 - RNA, 14 nt, Human
ccuauguauuugca

SEQ ID NO: 2613240 - RNA, 18 nt, Human
ccuaugucauuucauuuc

SEQ ID NO: 2613241 - RNA, 16 nt, Human
ccuauguaguccgugc

SEQ ID NO: 2613242 - RNA, 18 nt, Human
ccuauguaguccgugcug

SEQ ID NO: 2613243 - RNA, 18 nt, Human
ccuaugggagucaagugu

SEQ ID NO: 2613244 - RNA, 22 nt, Human
ccuaugguauaaugguugacug

SEQ ID NO: 2613245 - RNA, 16 nt, Human
ccucaaugugaccagg

SEQ ID NO: 2613246 - RNA, 20 nt, Human
ccucaauucccccuggccac

SEQ ID NO: 2613247 - RNA, 20 nt, Human
ccucaaugugaaucagaccc

SEQ ID NO: 2613248 - RNA, 21 nt, Human
ccucaaugugaaucagacccu

SEQ ID NO: 2613249 - RNA, 14 nt, Human
ccucaaugugacca

SEQ ID NO: 2613250 - RNA, 22 nt, Human
ccucaaugugaaucagacccua

SEQ ID NO: 2613251 - RNA, 17 nt, Human
ccucacaguccuuacca

SEQ ID NO: 2613252 - RNA, 15 nt, Human
ccucacaggccccag

SEQ ID NO: 2613253 - RNA, 24 nt, Human
ccuaucagugugccccccauccug

SEQ ID NO: 2613254 - RNA, 22 nt, Human
ccuaucagugugccccccaucc

SEQ ID NO: 2613255 - RNA, 20 nt, Human
ccuaucagugugccccccau

SEQ ID NO: 2613256 - RNA, 18 nt, Human
ccuaucagugugcccccc

SEQ ID NO: 2613257 - RNA, 17 nt, Human
ccuaucagugugccccc

SEQ ID NO: 2613258 - RNA, 16 nt, Human
ccuaucagugugcccc

SEQ ID NO: 2613259 - RNA, 12 nt, Human
ccuaucagugug

SEQ ID NO: 2613260 - RNA, 21 nt, Human
ccuaucagccugucucuucca

SEQ ID NO: 2613261 - RNA, 17 nt, Human
ccuaucagaaguuucuc

SEQ ID NO: 2613262 - RNA, 20 nt, Human
ccuaucagaguugcugcaaa

SEQ ID NO: 2613263 - RNA, 17 nt, Human
ccuaucaccuccccucc

SEQ ID NO: 2613264 - RNA, 18 nt, Human
ccuaucaccuccccuccu

SEQ ID NO: 2613265 - RNA, 19 nt, Human
ccuauggcuggccacugca

SEQ ID NO: 2613266 - RNA, 18 nt, Human
ccuauggcuggccacugc

SEQ ID NO: 2613267 - RNA, 23 nt, Human
ccuauggcuggccacugcacaga

SEQ ID NO: 2613268 - RNA, 21 nt, Human
ccuauggcuggccacugcaca

SEQ ID NO: 2613269 - RNA, 17 nt, Human
ccuauggggauggucca

SEQ ID NO: 2613270 - RNA, 11 nt, Human
ccuauggaugu

SEQ ID NO: 2613271 - RNA, 12 nt, Human
ccuauccaccca

SEQ ID NO: 2613272 - RNA, 24 nt, Human
ccuauauuuacagugaaaauguaa

SEQ ID NO: 2613273 - RNA, 13 nt, Human
ccuauccacccag

SEQ ID NO: 2613274 - RNA, 13 nt, Human
ccuagagggaggg

SEQ ID NO: 2613275 - RNA, 15 nt, Human
ccuagagggaggggc

SEQ ID NO: 2613276 - RNA, 16 nt, Human
ccuagagggaggggcc

SEQ ID NO: 2613277 - RNA, 16 nt, Human
ccuaucaccuauuucc

SEQ ID NO: 2613278 - RNA, 17 nt, Human
ccuaucaccuauuucca

SEQ ID NO: 2613279 - RNA, 15 nt, Human
ccuaucaccuccccu

SEQ ID NO: 2613280 - RNA, 16 nt, Human
ccuaucaccuccccuc

SEQ ID NO: 2613281 - RNA, 21 nt, Human
ccuagagacagaagcaggcug

SEQ ID NO: 2613282 - RNA, 16 nt, Human
ccuagagacagaagca

SEQ ID NO: 2613283 - RNA, 23 nt, Human
ccuagagaagcuaaaaccugagc

SEQ ID NO: 2613284 - RNA, 15 nt, Human
ccuagagcacacugu

SEQ ID NO: 2613285 - RNA, 17 nt, Human
ccuagagccugccugga

SEQ ID NO: 2613286 - RNA, 14 nt, Human
ccuagagccugccu

SEQ ID NO: 2613287 - RNA, 13 nt, Human
ccuagagccugcc

SEQ ID NO: 2613288 - RNA, 19 nt, Human
ccuagagccugccuggagc

SEQ ID NO: 2613289 - RNA, 18 nt, Human
ccuagagccugccuggag

SEQ ID NO: 2613290 - RNA, 22 nt, Human
ccucuguccugacuucaggggc

SEQ ID NO: 2613291 - RNA, 20 nt, Human
ccugaggcccuucucuccag

SEQ ID NO: 2613292 - RNA, 19 nt, Human
ccugaggcccuucucucca

SEQ ID NO: 2613293 - RNA, 17 nt, Human
ccugaggcccuucucuc

SEQ ID NO: 2613294 - RNA, 16 nt, Human
ccugaggcccuucucu

SEQ ID NO: 2613295 - RNA, 22 nt, Human
ccugaggcccuucucuccagcc

SEQ ID NO: 2613296 - RNA, 21 nt, Human
ccugaggcccuucucuccagc

SEQ ID NO: 2613297 - RNA, 19 nt, Human
ccugaggcagguccccaga

SEQ ID NO: 2613298 - RNA, 23 nt, Human
ccugaggcccuucucuccagccc

SEQ ID NO: 2613299 - RNA, 16 nt, Human
ccugacaacacucauu

SEQ ID NO: 2613300 - RNA, 15 nt, Human
ccugacaacacucau

SEQ ID NO: 2613301 - RNA, 14 nt, Human
ccugacaacacuca

SEQ ID NO: 2613302 - RNA, 12 nt, Human
ccugacaacacu

SEQ ID NO: 2613303 - RNA, 14 nt, Human
ccugaggcccagag

SEQ ID NO: 2613304 - RNA, 13 nt, Human
ccugaggcccaga

SEQ ID NO: 2613305 - RNA, 21 nt, Human
ccugaauuuuguugcuguuuu

SEQ ID NO: 2613306 - RNA, 18 nt, Human
ccugaggcagguccccag

SEQ ID NO: 2613307 - RNA, 12 nt, Human
ccugaggcccag

SEQ ID NO: 2613308 - RNA, 21 nt, Human
ccugauggcacuuagcuauca

SEQ ID NO: 2613309 - RNA, 17 nt, Human
ccugauggaccugucac

SEQ ID NO: 2613310 - RNA, 13 nt, Human
ccugaugcugacu

SEQ ID NO: 2613311 - RNA, 23 nt, Human
ccugauggcaggauggccuggcc

SEQ ID NO: 2613312 - RNA, 20 nt, Human
ccugauggcaggauggccug

SEQ ID NO: 2613313 - RNA, 18 nt, Human
ccugaugguacaggaaag

SEQ ID NO: 2613314 - RNA, 23 nt, Human
ccugaugcugacauucaccugcc

SEQ ID NO: 2613315 - RNA, 13 nt, Human
ccugaugcugaca

SEQ ID NO: 2613316 - RNA, 21 nt, Human
ccugaugcugacauucaccug

SEQ ID NO: 2613317 - RNA, 18 nt, Human
ccugaugcuucuucagag

SEQ ID NO: 2613318 - RNA, 17 nt, Human
ccugaugcuucuucaga

SEQ ID NO: 2613319 - RNA, 22 nt, Human
ccugauggucagcucccuucuc

SEQ ID NO: 2613320 - RNA, 21 nt, Human
ccugauggucagcucccuucu

SEQ ID NO: 2613321 - RNA, 20 nt, Human
ccugauggucagcucccuuc

SEQ ID NO: 2613322 - RNA, 18 nt, Human
ccugauggucagcucccu

SEQ ID NO: 2613323 - RNA, 17 nt, Human
ccugauggucagcuccc

SEQ ID NO: 2613324 - RNA, 16 nt, Human
ccugauggucagcucc

SEQ ID NO: 2613325 - RNA, 21 nt, Human
ccugaugguacaggaaagcuc

SEQ ID NO: 2613326 - RNA, 17 nt, Human
ccugauggccaggccag

SEQ ID NO: 2613327 - RNA, 23 nt, Human
ccugauggucagcucccuucucu

SEQ ID NO: 2613328 - RNA, 16 nt, Human
ccugauguuaaaauuc

SEQ ID NO: 2613329 - RNA, 23 nt, Human
ccugauugugucucuugguccug

SEQ ID NO: 2613330 - RNA, 17 nt, Human
ccugauguuaaaauucc

SEQ ID NO: 2613331 - RNA, 14 nt, Human
ccugaugcuucuuc

SEQ ID NO: 2613332 - RNA, 16 nt, Human
ccugaugcucccuccc

SEQ ID NO: 2613333 - RNA, 19 nt, Human
ccugaugcucccuccccug

SEQ ID NO: 2613334 - RNA, 20 nt, Human
ccugaugcucccuccccugc

SEQ ID NO: 2613335 - RNA, 23 nt, Human
ccugaugcucccuccccugcccu

SEQ ID NO: 2613336 - RNA, 13 nt, Human
ccugaugacagag

SEQ ID NO: 2613337 - RNA, 16 nt, Human
ccugaugcucauauca

SEQ ID NO: 2613338 - RNA, 16 nt, Human
ccugaugcagucacgu

SEQ ID NO: 2613339 - RNA, 15 nt, Human
ccugaugcagucacg

SEQ ID NO: 2613340 - RNA, 16 nt, Human
ccugaugacagagcga

SEQ ID NO: 2613341 - RNA, 13 nt, Human
ccugaugcucccu

SEQ ID NO: 2613342 - RNA, 14 nt, Human
ccugaugcucccuc

SEQ ID NO: 2613343 - RNA, 18 nt, Human
ccugaggcuccacuuggu

SEQ ID NO: 2613344 - RNA, 20 nt, Human
ccugaggcuccacuuggucu

SEQ ID NO: 2613345 - RNA, 12 nt, Human
ccugaggcuccu

SEQ ID NO: 2613346 - RNA, 18 nt, Human
ccugaggcuccugugcua

SEQ ID NO: 2613347 - RNA, 17 nt, Human
ccugaggcuccugugcu

SEQ ID NO: 2613348 - RNA, 14 nt, Human
ccugaggcugagac

SEQ ID NO: 2613349 - RNA, 19 nt, Human
ccugaucugacauccccac

SEQ ID NO: 2613350 - RNA, 23 nt, Human
ccugaucgccaaccuuuccccca

SEQ ID NO: 2613351 - RNA, 22 nt, Human
ccucuuuggucuacacugugcu

SEQ ID NO: 2613352 - RNA, 14 nt, Human
ccucuuugucuaaa

SEQ ID NO: 2613353 - RNA, 15 nt, Human
ccucuuugucuaaaa

SEQ ID NO: 2613354 - RNA, 19 nt, Human
ccucuuugucuaaaacaau

SEQ ID NO: 2613355 - RNA, 22 nt, Human
ccucuuugucuaaaacaauaaa

SEQ ID NO: 2613356 - RNA, 13 nt, Human
ccucuuccucuga

SEQ ID NO: 2613357 - RNA, 12 nt, Human
ccucuuccucug

SEQ ID NO: 2613358 - RNA, 11 nt, Human
ccucuuccucu

SEQ ID NO: 2613359 - RNA, 19 nt, Human
ccucuuccucccucauucc

SEQ ID NO: 2613360 - RNA, 16 nt, Human
ccucuuccucccucau

SEQ ID NO: 2613361 - RNA, 15 nt, Human
ccucuuccucccuca

SEQ ID NO: 2613362 - RNA, 17 nt, Human
ccucuuaugggcugggu

SEQ ID NO: 2613363 - RNA, 22 nt, Human
ccucuuagacuucugcuuucca

SEQ ID NO: 2613364 - RNA, 20 nt, Human
ccucuuagacuucugcuuuc

SEQ ID NO: 2613365 - RNA, 21 nt, Human
ccucuuaaagaaaacccaccc

SEQ ID NO: 2613366 - RNA, 17 nt, Human
ccucuuagcugagugga

SEQ ID NO: 2613367 - RNA, 14 nt, Human
ccucuuagcugagu

SEQ ID NO: 2613368 - RNA, 13 nt, Human
ccucuucaaauua

SEQ ID NO: 2613369 - RNA, 17 nt, Human
ccucuucaccccccacu

SEQ ID NO: 2613370 - RNA, 13 nt, Human
ccucuucaccccc

SEQ ID NO: 2613371 - RNA, 17 nt, Human
ccucuuccccuugcccu

SEQ ID NO: 2613372 - RNA, 21 nt, Human
ccucuuccccuugcccuugcc

SEQ ID NO: 2613373 - RNA, 20 nt, Human
ccucuuccggagauguagca

SEQ ID NO: 2613374 - RNA, 18 nt, Human
ccucuuccgugacgucac

SEQ ID NO: 2613375 - RNA, 19 nt, Human
ccucuuccggagauguagc

SEQ ID NO: 2613376 - RNA, 14 nt, Human
ccugaaauuucacc

SEQ ID NO: 2613377 - RNA, 14 nt, Human
ccugaaauuucaga

SEQ ID NO: 2613378 - RNA, 15 nt, Human
ccugaaauuucagau

SEQ ID NO: 2613379 - RNA, 13 nt, Human
ccugaacaagaau

SEQ ID NO: 2613380 - RNA, 15 nt, Human
ccugaacaagaauug

SEQ ID NO: 2613381 - RNA, 16 nt, Human
ccugaacaagaauugg

SEQ ID NO: 2613382 - RNA, 17 nt, Human
ccugaacaagaauugga

SEQ ID NO: 2613383 - RNA, 19 nt, Human
ccugaaagaggcugaggcc

SEQ ID NO: 2613384 - RNA, 15 nt, Human
ccugaaagaggcuga

SEQ ID NO: 2613385 - RNA, 23 nt, Human
ccugaaagaggaaugaaguacuc

SEQ ID NO: 2613386 - RNA, 17 nt, Human
ccugaaaacacugugca

SEQ ID NO: 2613387 - RNA, 18 nt, Human
ccugaaagaggaaugaag

SEQ ID NO: 2613388 - RNA, 23 nt, Human
ccucuuugucuaaaacaauaaaa

SEQ ID NO: 2613389 - RNA, 17 nt, Human
ccugaauccaaacuaau

SEQ ID NO: 2613390 - RNA, 20 nt, Human
ccugaauccaaacuaaucca

SEQ ID NO: 2613391 - RNA, 20 nt, Human
ccugaaucccccuugccacc

SEQ ID NO: 2613392 - RNA, 19 nt, Human
ccugaaucccccuugccac

SEQ ID NO: 2613393 - RNA, 21 nt, Human
ccugaauccaaacuaauccau

SEQ ID NO: 2613394 - RNA, 21 nt, Human
ccugaaggaacauuccuuagu

SEQ ID NO: 2613395 - RNA, 23 nt, Human
ccugaaugguuccaugccugagg

SEQ ID NO: 2613396 - RNA, 22 nt, Human
ccugaaugguuccaugccugag

SEQ ID NO: 2613397 - RNA, 21 nt, Human
ccugaaugguuccaugccuga

SEQ ID NO: 2613398 - RNA, 20 nt, Human
ccugaaugguuccaugccug

SEQ ID NO: 2613399 - RNA, 22 nt, Human
ccugaaucccccuugccacccc

SEQ ID NO: 2613400 - RNA, 13 nt, Human
ccugaaugaaaua

SEQ ID NO: 2613401 - RNA, 19 nt, Human
ccugaauuuauuauuguuc

SEQ ID NO: 2613402 - RNA, 21 nt, Human
ccugaauucuauuugcugggc

SEQ ID NO: 2613403 - RNA, 15 nt, Human
ccugaauucuuuuuc

SEQ ID NO: 2613404 - RNA, 18 nt, Human
ccugaauucuauuugcug

SEQ ID NO: 2613405 - RNA, 14 nt, Human
ccugaauucuauuu

SEQ ID NO: 2613406 - RNA, 23 nt, Human
ccugaauguauugaacuuggaaa

SEQ ID NO: 2613407 - RNA, 17 nt, Human
ccugaagucacacagug

SEQ ID NO: 2613408 - RNA, 16 nt, Human
ccugaagucacacagu

SEQ ID NO: 2613409 - RNA, 13 nt, Human
ccugaaggccccg

SEQ ID NO: 2613410 - RNA, 15 nt, Human
ccugaagucacacag

SEQ ID NO: 2613411 - RNA, 23 nt, Human
ccugaagcuaucguaaaauuaag

SEQ ID NO: 2613412 - RNA, 22 nt, Human
ccugaagcuaucguaaaauuaa

SEQ ID NO: 2613413 - RNA, 17 nt, Human
ccugaagaaccaguccc

SEQ ID NO: 2613414 - RNA, 20 nt, Human
ccugaagcuaucguaaaauu

SEQ ID NO: 2613415 - RNA, 21 nt, Human
ccugaagacucauucuucugu

SEQ ID NO: 2613416 - RNA, 21 nt, Human
ccugaacauccuuccuuccca

SEQ ID NO: 2613417 - RNA, 20 nt, Human
ccugaacauccuuccuuccc

SEQ ID NO: 2613418 - RNA, 18 nt, Human
ccugaacauccuuccuuc

SEQ ID NO: 2613419 - RNA, 21 nt, Human
ccugaacaagaauuggaagcu

SEQ ID NO: 2613420 - RNA, 13 nt, Human
ccugaagaaccag

SEQ ID NO: 2613421 - RNA, 16 nt, Human
ccugaagaaccagucc

SEQ ID NO: 2613422 - RNA, 14 nt, Human
ccugaagaacagua

SEQ ID NO: 2613423 - RNA, 19 nt, Human
ccugaacugggaccuuuag

SEQ ID NO: 2613424 - RNA, 13 nt, Human
ccugaaccuagga

SEQ ID NO: 2613425 - RNA, 22 nt, Human
ccucugucugcccuucacccca

SEQ ID NO: 2613426 - RNA, 16 nt, Human
ccucugucugcccuuc

SEQ ID NO: 2613427 - RNA, 14 nt, Human
ccucugucugcccu

SEQ ID NO: 2613428 - RNA, 22 nt, Human
ccucugucuugugaaggcaggg

SEQ ID NO: 2613429 - RNA, 20 nt, Human
ccucugucuuggcuuucaug

SEQ ID NO: 2613430 - RNA, 18 nt, Human
ccucugugaccaaugucu

SEQ ID NO: 2613431 - RNA, 19 nt, Human
ccucugugaccaaugucuu

SEQ ID NO: 2613432 - RNA, 15 nt, Human
ccucugugaccucag

SEQ ID NO: 2613433 - RNA, 22 nt, Human
ccucugucuuggcuuucauguu

SEQ ID NO: 2613434 - RNA, 21 nt, Human
ccucugugaccaaugucuuga

SEQ ID NO: 2613435 - RNA, 17 nt, Human
ccucugugaccucaggc

SEQ ID NO: 2613436 - RNA, 14 nt, Human
ccucugugccuucu

SEQ ID NO: 2613437 - RNA, 16 nt, Human
ccucugugcugugugu

SEQ ID NO: 2613438 - RNA, 13 nt, Human
ccucugugcugug

SEQ ID NO: 2613439 - RNA, 21 nt, Human
ccucugugccuucuuuugauu

SEQ ID NO: 2613440 - RNA, 20 nt, Human
ccucuguguccuucccugca

SEQ ID NO: 2613441 - RNA, 19 nt, Human
ccucuguguccuucccugc

SEQ ID NO: 2613442 - RNA, 13 nt, Human
ccucuguguccuu

SEQ ID NO: 2613443 - RNA, 23 nt, Human
ccucugugucacuggcugccucc

SEQ ID NO: 2613444 - RNA, 22 nt, Human
ccucugugucacuggcugccuc

SEQ ID NO: 2613445 - RNA, 21 nt, Human
ccucugugucacuggcugccu

SEQ ID NO: 2613446 - RNA, 19 nt, Human
ccucugugucacuggcugc

SEQ ID NO: 2613447 - RNA, 18 nt, Human
ccucugugucacuggcug

SEQ ID NO: 2613448 - RNA, 17 nt, Human
ccucugugucacuggcu

SEQ ID NO: 2613449 - RNA, 16 nt, Human
ccucugugucacuggc

SEQ ID NO: 2613450 - RNA, 14 nt, Human
ccucugugucacug

SEQ ID NO: 2613451 - RNA, 16 nt, Human
ccucugugaccucagg

SEQ ID NO: 2613452 - RNA, 18 nt, Human
ccucuguguauuugcuuu

SEQ ID NO: 2613453 - RNA, 15 nt, Human
ccucugugcugugug

SEQ ID NO: 2613454 - RNA, 16 nt, Human
ccucuguuugacaaac

SEQ ID NO: 2613455 - RNA, 21 nt, Human
ccucuguuucucuuuccuugg

SEQ ID NO: 2613456 - RNA, 23 nt, Human
ccucuguuguccuccccuugggc

SEQ ID NO: 2613457 - RNA, 18 nt, Human
ccucuguuguccuccccu

SEQ ID NO: 2613458 - RNA, 15 nt, Human
ccucuguuguccucc

SEQ ID NO: 2613459 - RNA, 22 nt, Human
ccucuguucaguguaaauaguu

SEQ ID NO: 2613460 - RNA, 16 nt, Human
ccucuguucaguguaa

SEQ ID NO: 2613461 - RNA, 19 nt, Human
ccucugugugcuccuccuu

SEQ ID NO: 2613462 - RNA, 21 nt, Human
ccucuguucugcacacagcac

SEQ ID NO: 2613463 - RNA, 23 nt, Human
ccucuuagaugcaguucugaaga

SEQ ID NO: 2613464 - RNA, 14 nt, Human
ccucuuaugggcug

SEQ ID NO: 2613465 - RNA, 16 nt, Human
ccucuuaugggcuggg

SEQ ID NO: 2613466 - RNA, 15 nt, Human
ccucuuaugggcugg

SEQ ID NO: 2613467 - RNA, 14 nt, Human
ccucuuagaaaaac

SEQ ID NO: 2613468 - RNA, 21 nt, Human
ccucuuaauguaugauuacau

SEQ ID NO: 2613469 - RNA, 23 nt, Human
ccucuuaaagcugccuguaguua

SEQ ID NO: 2613470 - RNA, 21 nt, Human
ccucuguuugacaaaccucua

SEQ ID NO: 2613471 - RNA, 17 nt, Human
ccucuuaaaaaauaaaa

SEQ ID NO: 2613472 - RNA, 18 nt, Human
ccucuuaaaaaauaaaaa

SEQ ID NO: 2613473 - RNA, 19 nt, Human
ccucuuaaaaaauaaaaac

SEQ ID NO: 2613474 - RNA, 20 nt, Human
ccucuuaaagaaaacccacc

SEQ ID NO: 2613475 - RNA, 19 nt, Human
ccucuuaaagaaaacccac

SEQ ID NO: 2613476 - RNA, 17 nt, Human
ccucuuaaagcugccug

SEQ ID NO: 2613477 - RNA, 19 nt, Human
ccucuuaaagcugccugua

SEQ ID NO: 2613478 - RNA, 20 nt, Human
ccucuuaaagcugccuguag

SEQ ID NO: 2613479 - RNA, 21 nt, Human
ccucuuaaagcugccuguagu

SEQ ID NO: 2613480 - RNA, 22 nt, Human
ccucuuaaagcugccuguaguu

SEQ ID NO: 2613481 - RNA, 15 nt, Human
ccucuguccaggcac

SEQ ID NO: 2613482 - RNA, 19 nt, Human
ccucuguccaggcacugag

SEQ ID NO: 2613483 - RNA, 17 nt, Human
ccucuguccaggcacug

SEQ ID NO: 2613484 - RNA, 20 nt, Human
ccucuguccaggcacugaga

SEQ ID NO: 2613485 - RNA, 21 nt, Human
ccucuguccaggcacugagau

SEQ ID NO: 2613486 - RNA, 14 nt, Human
ccucuguccagggc

SEQ ID NO: 2613487 - RNA, 15 nt, Human
ccucuguccagggcc

SEQ ID NO: 2613488 - RNA, 18 nt, Human
ccucugucagucacagcc

SEQ ID NO: 2613489 - RNA, 19 nt, Human
ccucugucagucacagcca

SEQ ID NO: 2613490 - RNA, 21 nt, Human
ccucugucagucacagccacc

SEQ ID NO: 2613491 - RNA, 15 nt, Human
ccucugucagucaca

SEQ ID NO: 2613492 - RNA, 16 nt, Human
ccucugucagucacag

SEQ ID NO: 2613493 - RNA, 19 nt, Human
ccucugucacugcaggcac

SEQ ID NO: 2613494 - RNA, 17 nt, Human
ccucugucacugcaggc

SEQ ID NO: 2613495 - RNA, 13 nt, Human
ccucugucugccc

SEQ ID NO: 2613496 - RNA, 16 nt, Human
ccucuguccugacuuc

SEQ ID NO: 2613497 - RNA, 14 nt, Human
ccucuguccugacu

SEQ ID NO: 2613498 - RNA, 13 nt, Human
ccucuguccugac

SEQ ID NO: 2613499 - RNA, 11 nt, Human
ccucuguccug

SEQ ID NO: 2613500 - RNA, 22 nt, Human
ccucuguccccuucucucaucu

SEQ ID NO: 2613501 - RNA, 21 nt, Human
ccucuguccccuucucucauc

SEQ ID NO: 2613502 - RNA, 19 nt, Human
ccucuguccccuucucuca

SEQ ID NO: 2613503 - RNA, 18 nt, Human
ccucuguccccuucucuc

SEQ ID NO: 2613504 - RNA, 17 nt, Human
ccucuguccccuucucu

SEQ ID NO: 2613505 - RNA, 14 nt, Human
ccucuguccccuuc

SEQ ID NO: 2613506 - RNA, 18 nt, Human
ccucuguccagggcccug

SEQ ID NO: 2613507 - RNA, 20 nt, Human
ccucuguccagggcccugag

SEQ ID NO: 2613508 - RNA, 21 nt, Human
ccucuguccagggcccugagc

SEQ ID NO: 2613509 - RNA, 23 nt, Human
ccucuguccagggcccugagcuc

SEQ ID NO: 2613510 - RNA, 16 nt, Human
ccucuguacagagccc

SEQ ID NO: 2613511 - RNA, 15 nt, Human
ccucuguacagagcc

SEQ ID NO: 2613512 - RNA, 21 nt, Human
ccucuggucgcuccugcccac

SEQ ID NO: 2613513 - RNA, 20 nt, Human
ccucuggucgcuccugccca

SEQ ID NO: 2613514 - RNA, 19 nt, Human
ccucuggucgcuccugccc

SEQ ID NO: 2613515 - RNA, 17 nt, Human
ccucuggucgcuccugc

SEQ ID NO: 2613516 - RNA, 14 nt, Human
ccucuguacagagc

SEQ ID NO: 2613517 - RNA, 18 nt, Human
ccucuguacagagcccac

SEQ ID NO: 2613518 - RNA, 17 nt, Human
ccucuguacagagccca

SEQ ID NO: 2613519 - RNA, 23 nt, Human
ccucuguacagagcccacgcccc

SEQ ID NO: 2613520 - RNA, 23 nt, Human
ccucugguuuggggcgaggcaga

SEQ ID NO: 2613521 - RNA, 21 nt, Human
ccucugguuuggggcgaggca

SEQ ID NO: 2613522 - RNA, 18 nt, Human
ccucugguuuggggcgag

SEQ ID NO: 2613523 - RNA, 16 nt, Human
ccucuggucugggugc

SEQ ID NO: 2613524 - RNA, 16 nt, Human
ccucugguuuggggcg

SEQ ID NO: 2613525 - RNA, 21 nt, Human
ccucugcacuccccugcuggg

SEQ ID NO: 2613526 - RNA, 20 nt, Human
ccucugcacuccccugcugg

SEQ ID NO: 2613527 - RNA, 19 nt, Human
ccucugcacuccccugcug

SEQ ID NO: 2613528 - RNA, 14 nt, Human
ccucugcacucccc

SEQ ID NO: 2613529 - RNA, 16 nt, Human
ccucugcagcugaccu

SEQ ID NO: 2613530 - RNA, 15 nt, Human
ccucugcagcugacc

SEQ ID NO: 2613531 - RNA, 13 nt, Human
ccucugcagcuga

SEQ ID NO: 2613532 - RNA, 12 nt, Human
ccucugcagcug

SEQ ID NO: 2613533 - RNA, 22 nt, Human
ccucugcacuccccugcugggu

SEQ ID NO: 2613534 - RNA, 19 nt, Human
ccucugcagcugaccucug

SEQ ID NO: 2613535 - RNA, 17 nt, Human
ccucugcagcugaccuc

SEQ ID NO: 2613536 - RNA, 16 nt, Human
ccucugcagugccuug

SEQ ID NO: 2613537 - RNA, 19 nt, Human
ccucugccaaaggauguga

SEQ ID NO: 2613538 - RNA, 17 nt, Human
ccucugcagugccuugg

SEQ ID NO: 2613539 - RNA, 22 nt, Human
ccucugcagcugaccucuguug

SEQ ID NO: 2613540 - RNA, 18 nt, Human
ccucugacacacagcucu

SEQ ID NO: 2613541 - RNA, 17 nt, Human
ccucugacacacagcuc

SEQ ID NO: 2613542 - RNA, 11 nt, Human
ccucugcacaa

SEQ ID NO: 2613543 - RNA, 15 nt, Human
ccucugcacaagcug

SEQ ID NO: 2613544 - RNA, 21 nt, Human
ccucugcacuacugacaugug

SEQ ID NO: 2613545 - RNA, 20 nt, Human
ccucugcacuacugacaugu

SEQ ID NO: 2613546 - RNA, 20 nt, Human
ccucugcacaagcugcaccc

SEQ ID NO: 2613547 - RNA, 17 nt, Human
ccucugcacaagcugca

SEQ ID NO: 2613548 - RNA, 19 nt, Human
ccucugcacaagcugcacc

SEQ ID NO: 2613549 - RNA, 16 nt, Human
ccucuggcuccagcug

SEQ ID NO: 2613550 - RNA, 17 nt, Human
ccucuggcuccagcugg

SEQ ID NO: 2613551 - RNA, 17 nt, Human
ccucuggcccugccuuc

SEQ ID NO: 2613552 - RNA, 24 nt, Human
ccucuggcuagaggccagccccac

SEQ ID NO: 2613553 - RNA, 22 nt, Human
ccucuggcuggcuaacuggaag

SEQ ID NO: 2613554 - RNA, 23 nt, Human
ccucuggcuggcuaacuggaagc

SEQ ID NO: 2613555 - RNA, 18 nt, Human
ccucuggauugugggaau

SEQ ID NO: 2613556 - RNA, 12 nt, Human
ccucuggccagg

SEQ ID NO: 2613557 - RNA, 15 nt, Human
ccucuggccaggaug

SEQ ID NO: 2613558 - RNA, 12 nt, Human
ccucuggcccug

SEQ ID NO: 2613559 - RNA, 13 nt, Human
ccucuggcccugc

SEQ ID NO: 2613560 - RNA, 15 nt, Human
ccucuggcccugccu

SEQ ID NO: 2613561 - RNA, 18 nt, Human
ccucuggcccugccuucu

SEQ ID NO: 2613562 - RNA, 12 nt, Human
ccucuggcuaga

SEQ ID NO: 2613563 - RNA, 13 nt, Human
ccucuggcuagag

SEQ ID NO: 2613564 - RNA, 22 nt, Human
ccucuggcuagaggccagcccc

SEQ ID NO: 2613565 - RNA, 23 nt, Human
ccucuggcuagaggccagcccca

SEQ ID NO: 2613566 - RNA, 17 nt, Human
ccucugggucagugguc

SEQ ID NO: 2613567 - RNA, 20 nt, Human
ccucugggucagugguccac

SEQ ID NO: 2613568 - RNA, 16 nt, Human
ccucuggucgcuccug

SEQ ID NO: 2613569 - RNA, 12 nt, Human
ccucugggacug

SEQ ID NO: 2613570 - RNA, 23 nt, Human
ccucugggaaaugagaaggcagc

SEQ ID NO: 2613571 - RNA, 14 nt, Human
ccucugggcacugg

SEQ ID NO: 2613572 - RNA, 16 nt, Human
ccucugggcaggaccu

SEQ ID NO: 2613573 - RNA, 22 nt, Human
ccucuggagggguguggcuccu

SEQ ID NO: 2613574 - RNA, 20 nt, Human
ccucuggagggguguggcuc

SEQ ID NO: 2613575 - RNA, 13 nt, Human
ccucuggaguggc

SEQ ID NO: 2613576 - RNA, 14 nt, Human
ccucuggaguggcc

SEQ ID NO: 2613577 - RNA, 15 nt, Human
ccucuggaguggcca

SEQ ID NO: 2613578 - RNA, 23 nt, Human
ccucuggcauuagaauuauuuaa

SEQ ID NO: 2613579 - RNA, 21 nt, Human
ccucuggcauuagaauuauuu

SEQ ID NO: 2613580 - RNA, 21 nt, Human
ccucuggauggcaccagaggc

SEQ ID NO: 2613581 - RNA, 16 nt, Human
ccucuggauggcacca

SEQ ID NO: 2613582 - RNA, 16 nt, Human
ccucuggaguggccac

SEQ ID NO: 2613583 - RNA, 21 nt, Human
ccucuggaguggccacuaagc

SEQ ID NO: 2613584 - RNA, 18 nt, Human
ccucuggacuggcuagag

SEQ ID NO: 2613585 - RNA, 17 nt, Human
ccucuggaggggugugg

SEQ ID NO: 2613586 - RNA, 14 nt, Human
ccucuggacuggcu

SEQ ID NO: 2613587 - RNA, 15 nt, Human
ccucuggacuggcua

SEQ ID NO: 2613588 - RNA, 16 nt, Human
ccucuggacuggcuag

SEQ ID NO: 2613589 - RNA, 17 nt, Human
ccucuggacuggcuaga

SEQ ID NO: 2613590 - RNA, 22 nt, Human
ccucugccaaaggaugugauau

SEQ ID NO: 2613591 - RNA, 20 nt, Human
ccucugccaaaggaugugau

SEQ ID NO: 2613592 - RNA, 13 nt, Human
ccucugccaccag

SEQ ID NO: 2613593 - RNA, 11 nt, Human
ccucugccacc

SEQ ID NO: 2613594 - RNA, 19 nt, Human
ccucugccaccagagaccg

SEQ ID NO: 2613595 - RNA, 17 nt, Human
ccucugccaccagagac

SEQ ID NO: 2613596 - RNA, 24 nt, Human
ccucugccaccagagaccguccuc

SEQ ID NO: 2613597 - RNA, 23 nt, Human
ccucuggacggcaggcucacugc

SEQ ID NO: 2613598 - RNA, 22 nt, Human
ccucuggacggcaggcucacug

SEQ ID NO: 2613599 - RNA, 21 nt, Human
ccucuggacggcaggcucacu

SEQ ID NO: 2613600 - RNA, 16 nt, Human
ccucuggacggcaggc

SEQ ID NO: 2613601 - RNA, 15 nt, Human
ccucuggacggcagg

SEQ ID NO: 2613602 - RNA, 12 nt, Human
ccucucugcucu

SEQ ID NO: 2613603 - RNA, 15 nt, Human
ccucucugcucugcg

SEQ ID NO: 2613604 - RNA, 22 nt, Human
ccucucugccgcaauacaggaa

SEQ ID NO: 2613605 - RNA, 16 nt, Human
ccucucugcucugcgu

SEQ ID NO: 2613606 - RNA, 15 nt, Human
ccucuccuggaggau

SEQ ID NO: 2613607 - RNA, 14 nt, Human
ccucuccuggagga

SEQ ID NO: 2613608 - RNA, 13 nt, Human
ccucucugcccua

SEQ ID NO: 2613609 - RNA, 13 nt, Human
ccucuccuggagg

SEQ ID NO: 2613610 - RNA, 12 nt, Human
ccucuccuggag

SEQ ID NO: 2613611 - RNA, 11 nt, Human
ccucuccugga

SEQ ID NO: 2613612 - RNA, 17 nt, Human
ccucuccugccuacuca

SEQ ID NO: 2613613 - RNA, 21 nt, Human
ccucuccccagguccagcucu

SEQ ID NO: 2613614 - RNA, 19 nt, Human
ccucucccauugucccucu

SEQ ID NO: 2613615 - RNA, 23 nt, Human
ccucuccccagguccagcucugg

SEQ ID NO: 2613616 - RNA, 19 nt, Human
ccucuccccccccccucca

SEQ ID NO: 2613617 - RNA, 19 nt, Human
ccucuccccauucggugug

SEQ ID NO: 2613618 - RNA, 23 nt, Human
ccucuccccuaccacugucuucu

SEQ ID NO: 2613619 - RNA, 18 nt, Human
ccucuccccuaccacugu

SEQ ID NO: 2613620 - RNA, 20 nt, Human
ccucuccccccccccuccaa

SEQ ID NO: 2613621 - RNA, 16 nt, Human
ccucuccccugauuac

SEQ ID NO: 2613622 - RNA, 13 nt, Human
ccucuccugccua

SEQ ID NO: 2613623 - RNA, 14 nt, Human
ccucuccugccuac

SEQ ID NO: 2613624 - RNA, 15 nt, Human
ccucuccugccuacu

SEQ ID NO: 2613625 - RNA, 16 nt, Human
ccucuccugccuacuc

SEQ ID NO: 2613626 - RNA, 15 nt, Human
ccucugacacacagc

SEQ ID NO: 2613627 - RNA, 16 nt, Human
ccucugacacacagcu

SEQ ID NO: 2613628 - RNA, 20 nt, Human
ccucugaaaacggcccucuu

SEQ ID NO: 2613629 - RNA, 18 nt, Human
ccucugaaaacggcccuc

SEQ ID NO: 2613630 - RNA, 23 nt, Human
ccucucuuuguucucagcucccc

SEQ ID NO: 2613631 - RNA, 22 nt, Human
ccucucuuuguucucagcuccc

SEQ ID NO: 2613632 - RNA, 21 nt, Human
ccucucuuuguucucagcucc

SEQ ID NO: 2613633 - RNA, 20 nt, Human
ccucucuuuguucucagcuc

SEQ ID NO: 2613634 - RNA, 19 nt, Human
ccucucuuuguucucagcu

SEQ ID NO: 2613635 - RNA, 18 nt, Human
ccucucuuuguucucagc

SEQ ID NO: 2613636 - RNA, 23 nt, Human
ccucugaaaaccaauguucucuc

SEQ ID NO: 2613637 - RNA, 18 nt, Human
ccucucuggccucccacc

SEQ ID NO: 2613638 - RNA, 17 nt, Human
ccucucuggccucccac

SEQ ID NO: 2613639 - RNA, 16 nt, Human
ccucucuggccuccca

SEQ ID NO: 2613640 - RNA, 15 nt, Human
ccucucuggccuccc

SEQ ID NO: 2613641 - RNA, 13 nt, Human
ccucucuggccuc

SEQ ID NO: 2613642 - RNA, 22 nt, Human
ccucucuggccucccacccgau

SEQ ID NO: 2613643 - RNA, 10 nt, Human
ccucucuguu

SEQ ID NO: 2613644 - RNA, 19 nt, Human
ccucucuggccucccaccc

SEQ ID NO: 2613645 - RNA, 20 nt, Human
ccucucuuauagaauauuua

SEQ ID NO: 2613646 - RNA, 14 nt, Human
ccucucuugcaccc

SEQ ID NO: 2613647 - RNA, 13 nt, Human
ccucucuugcacc

SEQ ID NO: 2613648 - RNA, 11 nt, Human
ccucucuugca

SEQ ID NO: 2613649 - RNA, 23 nt, Human
ccucucuugcacccgccucuccc

SEQ ID NO: 2613650 - RNA, 21 nt, Human
ccucucuugcacccgccucuc

SEQ ID NO: 2613651 - RNA, 18 nt, Human
ccucucuugcacccgccu

SEQ ID NO: 2613652 - RNA, 17 nt, Human
ccucucuugcacccgcc

SEQ ID NO: 2613653 - RNA, 18 nt, Human
ccucucuugguuuccuuc

SEQ ID NO: 2613654 - RNA, 19 nt, Human
ccucucuugguuuccuucc

SEQ ID NO: 2613655 - RNA, 15 nt, Human
ccucucuuuguucuc

SEQ ID NO: 2613656 - RNA, 21 nt, Human
ccucucuugguuuccuuccuu

SEQ ID NO: 2613657 - RNA, 19 nt, Human
ccucucacugucugagagu

SEQ ID NO: 2613658 - RNA, 15 nt, Human
ccucucacugucuga

SEQ ID NO: 2613659 - RNA, 14 nt, Human
ccucucacugucug

SEQ ID NO: 2613660 - RNA, 13 nt, Human
ccucucacugucu

SEQ ID NO: 2613661 - RNA, 17 nt, Human
ccucucaccuguacucu

SEQ ID NO: 2613662 - RNA, 12 nt, Human
ccucucacuguc

SEQ ID NO: 2613663 - RNA, 23 nt, Human
ccucucagagcuacuugggccau

SEQ ID NO: 2613664 - RNA, 22 nt, Human
ccucucagagcuacuugggcca

SEQ ID NO: 2613665 - RNA, 21 nt, Human
ccucucagagcuacuugggcc

SEQ ID NO: 2613666 - RNA, 15 nt, Human
ccucucagagcuacu

SEQ ID NO: 2613667 - RNA, 14 nt, Human
ccucucagagcuac

SEQ ID NO: 2613668 - RNA, 18 nt, Human
ccucucagcuccaggugg

SEQ ID NO: 2613669 - RNA, 16 nt, Human
ccucucagcuccaggu

SEQ ID NO: 2613670 - RNA, 13 nt, Human
ccucucagcucca

SEQ ID NO: 2613671 - RNA, 14 nt, Human
ccucucaggcaugc

SEQ ID NO: 2613672 - RNA, 20 nt, Human
ccucucaggcaugccugugu

SEQ ID NO: 2613673 - RNA, 21 nt, Human
ccucucaggcaugccugugug

SEQ ID NO: 2613674 - RNA, 23 nt, Human
ccuccuguugcacccagcccugg

SEQ ID NO: 2613675 - RNA, 12 nt, Human
ccuccuucagac

SEQ ID NO: 2613676 - RNA, 16 nt, Human
ccucucacuaaacuuu

SEQ ID NO: 2613677 - RNA, 18 nt, Human
ccuccuuaucaaaggaca

SEQ ID NO: 2613678 - RNA, 20 nt, Human
ccuccuuaucaaaggacacc

SEQ ID NO: 2613679 - RNA, 23 nt, Human
ccuccugugugugcgccuacagg

SEQ ID NO: 2613680 - RNA, 22 nt, Human
ccuccuguugcacccagcccug

SEQ ID NO: 2613681 - RNA, 21 nt, Human
ccuccuguugcacccagcccu

SEQ ID NO: 2613682 - RNA, 19 nt, Human
ccuccuguugcacccagcc

SEQ ID NO: 2613683 - RNA, 18 nt, Human
ccuccuguugcacccagc

SEQ ID NO: 2613684 - RNA, 17 nt, Human
ccuccuguugcacccag

SEQ ID NO: 2613685 - RNA, 16 nt, Human
ccuccuguugcaccca

SEQ ID NO: 2613686 - RNA, 15 nt, Human
ccuccuguugcaccc

SEQ ID NO: 2613687 - RNA, 17 nt, Human
ccuccuguguagcuggg

SEQ ID NO: 2613688 - RNA, 22 nt, Human
ccucucccaucccccugcccuc

SEQ ID NO: 2613689 - RNA, 21 nt, Human
ccucucccaucccccugcccu

SEQ ID NO: 2613690 - RNA, 20 nt, Human
ccucucccaucccccugccc

SEQ ID NO: 2613691 - RNA, 19 nt, Human
ccucucccaucccccugcc

SEQ ID NO: 2613692 - RNA, 18 nt, Human
ccucucccaucccccugc

SEQ ID NO: 2613693 - RNA, 17 nt, Human
ccucucccaucccccug

SEQ ID NO: 2613694 - RNA, 16 nt, Human
ccucucccaucccccu

SEQ ID NO: 2613695 - RNA, 15 nt, Human
ccucucccauccccc

SEQ ID NO: 2613696 - RNA, 18 nt, Human
ccucuccccagcccagag

SEQ ID NO: 2613697 - RNA, 19 nt, Human
ccucuccccagcccagaga

SEQ ID NO: 2613698 - RNA, 20 nt, Human
ccucuccccagcccagagac

SEQ ID NO: 2613699 - RNA, 21 nt, Human
ccucuccccagcccagagaca

SEQ ID NO: 2613700 - RNA, 12 nt, Human
ccucucccauca

SEQ ID NO: 2613701 - RNA, 14 nt, Human
ccucucccaucccc

SEQ ID NO: 2613702 - RNA, 13 nt, Human
ccucucccauccc

SEQ ID NO: 2613703 - RNA, 16 nt, Human
ccucuccacugccuuc

SEQ ID NO: 2613704 - RNA, 14 nt, Human
ccucuccacugccu

SEQ ID NO: 2613705 - RNA, 13 nt, Human
ccucuccacugcc

SEQ ID NO: 2613706 - RNA, 12 nt, Human
ccucuccacugc

SEQ ID NO: 2613707 - RNA, 18 nt, Human
ccucucaggugaccaaaa

SEQ ID NO: 2613708 - RNA, 19 nt, Human
ccucuccacugccuucgau

SEQ ID NO: 2613709 - RNA, 12 nt, Human
ccucucccaggg

SEQ ID NO: 2613710 - RNA, 21 nt, Human
ccuccccucucuugcacccgc

SEQ ID NO: 2613711 - RNA, 14 nt, Human
ccucagucucccuc

SEQ ID NO: 2613712 - RNA, 21 nt, Human
ccucaguccuccccucacagc

SEQ ID NO: 2613713 - RNA, 20 nt, Human
ccucaguccuccccucacag

SEQ ID NO: 2613714 - RNA, 19 nt, Human
ccucaguccuccccucaca

SEQ ID NO: 2613715 - RNA, 18 nt, Human
ccucaguccuccccucac

SEQ ID NO: 2613716 - RNA, 17 nt, Human
ccucaguccuccccuca

SEQ ID NO: 2613717 - RNA, 16 nt, Human
ccucaguccuccccuc

SEQ ID NO: 2613718 - RNA, 12 nt, Human
ccucaguccucc

SEQ ID NO: 2613719 - RNA, 11 nt, Human
ccucaguccuc

SEQ ID NO: 2613720 - RNA, 15 nt, Human
ccucagucuggcccu

SEQ ID NO: 2613721 - RNA, 21 nt, Human
ccucaguaaguaucuggagga

SEQ ID NO: 2613722 - RNA, 15 nt, Human
ccucaguaagacgac

SEQ ID NO: 2613723 - RNA, 18 nt, Human
ccucagguugcugguugc

SEQ ID NO: 2613724 - RNA, 17 nt, Human
ccucagguugcugguug

SEQ ID NO: 2613725 - RNA, 16 nt, Human
ccucagguugcugguu

SEQ ID NO: 2613726 - RNA, 23 nt, Human
ccucagguuccuauggcuggcca

SEQ ID NO: 2613727 - RNA, 22 nt, Human
ccucagguugcugguugcugug

SEQ ID NO: 2613728 - RNA, 21 nt, Human
ccucagguugcugguugcugu

SEQ ID NO: 2613729 - RNA, 23 nt, Human
ccucagguugcugguugcugugu

SEQ ID NO: 2613730 - RNA, 19 nt, Human
ccucagguuugccugaggg

SEQ ID NO: 2613731 - RNA, 21 nt, Human
ccucagguggccagccuggau

SEQ ID NO: 2613732 - RNA, 20 nt, Human
ccucaggucagggugaggau

SEQ ID NO: 2613733 - RNA, 12 nt, Human
ccucagguggcc

SEQ ID NO: 2613734 - RNA, 16 nt, Human
ccucagguggccaugc

SEQ ID NO: 2613735 - RNA, 15 nt, Human
ccucagguggccaug

SEQ ID NO: 2613736 - RNA, 15 nt, Human
ccucagguuccuaug

SEQ ID NO: 2613737 - RNA, 18 nt, Human
ccucaggugggccgcagg

SEQ ID NO: 2613738 - RNA, 15 nt, Human
ccucaggugggccgc

SEQ ID NO: 2613739 - RNA, 23 nt, Human
ccucagguggccagccuggaucu

SEQ ID NO: 2613740 - RNA, 21 nt, Human
ccucagguggccaugccucag

SEQ ID NO: 2613741 - RNA, 18 nt, Human
ccucagguggccaugccu

SEQ ID NO: 2613742 - RNA, 15 nt, Human
ccucagggucccugg

SEQ ID NO: 2613743 - RNA, 21 nt, Human
ccucagguaaucgaccugccu

SEQ ID NO: 2613744 - RNA, 22 nt, Human
ccucagguaaucgaccugccuc

SEQ ID NO: 2613745 - RNA, 23 nt, Human
ccucagguaaucgaccugccucg

SEQ ID NO: 2613746 - RNA, 16 nt, Human
ccucaggugagaagca

SEQ ID NO: 2613747 - RNA, 19 nt, Human
ccucaggugauccacccac

SEQ ID NO: 2613748 - RNA, 17 nt, Human
ccucaggugauccaccc

SEQ ID NO: 2613749 - RNA, 22 nt, Human
ccucaggugauccacccaccuc

SEQ ID NO: 2613750 - RNA, 19 nt, Human
ccucaggucagggugagga

SEQ ID NO: 2613751 - RNA, 11 nt, Human
ccucagguggc

SEQ ID NO: 2613752 - RNA, 21 nt, Human
ccucagaacaaagugagacag

SEQ ID NO: 2613753 - RNA, 21 nt, Human
ccucagaaacacuggggcugg

SEQ ID NO: 2613754 - RNA, 20 nt, Human
ccucagaaacacuggggcug

SEQ ID NO: 2613755 - RNA, 19 nt, Human
ccucagaaacacuggggcu

SEQ ID NO: 2613756 - RNA, 16 nt, Human
ccucagaacccuuggc

SEQ ID NO: 2613757 - RNA, 21 nt, Human
ccucagaacccuuggcuugcc

SEQ ID NO: 2613758 - RNA, 22 nt, Human
ccucacuaucccggcugcccuu

SEQ ID NO: 2613759 - RNA, 18 nt, Human
ccucagaaacacuggggc

SEQ ID NO: 2613760 - RNA, 20 nt, Human
ccucagaaaacaaggaugaa

SEQ ID NO: 2613761 - RNA, 21 nt, Human
ccucacuaggcuucugguuga

SEQ ID NO: 2613762 - RNA, 21 nt, Human
ccucacuaucccggcugcccu

SEQ ID NO: 2613763 - RNA, 14 nt, Human
ccucagcauccugg

SEQ ID NO: 2613764 - RNA, 23 nt, Human
ccucagaacaaagugagacaguc

SEQ ID NO: 2613765 - RNA, 22 nt, Human
ccucagaacccuuggcuugccc

SEQ ID NO: 2613766 - RNA, 17 nt, Human
ccucagcauccuggcac

SEQ ID NO: 2613767 - RNA, 16 nt, Human
ccucagcauccuggca

SEQ ID NO: 2613768 - RNA, 14 nt, Human
ccucagggucccug

SEQ ID NO: 2613769 - RNA, 23 nt, Human
ccucagggauggccguuggccac

SEQ ID NO: 2613770 - RNA, 21 nt, Human
ccucaggccugggggcugggc

SEQ ID NO: 2613771 - RNA, 14 nt, Human
ccucaggccugggg

SEQ ID NO: 2613772 - RNA, 11 nt, Human
ccucaggccug

SEQ ID NO: 2613773 - RNA, 11 nt, Human
ccucagccaga

SEQ ID NO: 2613774 - RNA, 15 nt, Human
ccucagccagagaag

SEQ ID NO: 2613775 - RNA, 16 nt, Human
ccucagccagagaagc

SEQ ID NO: 2613776 - RNA, 16 nt, Human
ccucccucccucuuuc

SEQ ID NO: 2613777 - RNA, 19 nt, Human
ccucccucccggcauggga

SEQ ID NO: 2613778 - RNA, 19 nt, Human
ccucccucacccugagccc

SEQ ID NO: 2613779 - RNA, 14 nt, Human
ccucccucccggca

SEQ ID NO: 2613780 - RNA, 16 nt, Human
ccucccuccucugucc

SEQ ID NO: 2613781 - RNA, 19 nt, Human
ccucccugaagccuuugca

SEQ ID NO: 2613782 - RNA, 20 nt, Human
ccucccugaaccaucccuga

SEQ ID NO: 2613783 - RNA, 20 nt, Human
ccucccugaaaauguuuuuc

SEQ ID NO: 2613784 - RNA, 13 nt, Human
ccucccuccucug

SEQ ID NO: 2613785 - RNA, 13 nt, Human
ccucccugaacca

SEQ ID NO: 2613786 - RNA, 18 nt, Human
ccuccucccuccugccga

SEQ ID NO: 2613787 - RNA, 13 nt, Human
ccuccucccugca

SEQ ID NO: 2613788 - RNA, 14 nt, Human
ccuccucccugcau

SEQ ID NO: 2613789 - RNA, 17 nt, Human
ccuccucccugcaucug

SEQ ID NO: 2613790 - RNA, 12 nt, Human
ccuccucccuua

SEQ ID NO: 2613791 - RNA, 16 nt, Human
ccuccucccugcaucu

SEQ ID NO: 2613792 - RNA, 13 nt, Human
ccuccuccccacu

SEQ ID NO: 2613793 - RNA, 14 nt, Human
ccuccuccccacuu

SEQ ID NO: 2613794 - RNA, 21 nt, Human
ccucccugcaucugaccagca

SEQ ID NO: 2613795 - RNA, 22 nt, Human
ccucccugcaucugaccagcag

SEQ ID NO: 2613796 - RNA, 14 nt, Human
ccucccugcaucug

SEQ ID NO: 2613797 - RNA, 20 nt, Human
ccucccugcaucugaccagc

SEQ ID NO: 2613798 - RNA, 23 nt, Human
ccuccucccacccggcugcagag

SEQ ID NO: 2613799 - RNA, 18 nt, Human
ccucccuagugacccgga

SEQ ID NO: 2613800 - RNA, 21 nt, Human
ccucccuagccagcacuugua

SEQ ID NO: 2613801 - RNA, 20 nt, Human
ccucccgucuacucauuccc

SEQ ID NO: 2613802 - RNA, 21 nt, Human
ccucccgggcccucccuugga

SEQ ID NO: 2613803 - RNA, 14 nt, Human
ccucccucacccug

SEQ ID NO: 2613804 - RNA, 16 nt, Human
ccucccggugcccaag

SEQ ID NO: 2613805 - RNA, 15 nt, Human
ccucccuagccagca

SEQ ID NO: 2613806 - RNA, 13 nt, Human
ccucccucccucu

SEQ ID NO: 2613807 - RNA, 15 nt, Human
ccucccucccucuuu

SEQ ID NO: 2613808 - RNA, 17 nt, Human
ccuccccucuccuuccu

SEQ ID NO: 2613809 - RNA, 23 nt, Human
ccucaguccuccccucacagccu

SEQ ID NO: 2613810 - RNA, 22 nt, Human
ccucaguccuccccucacagcc

SEQ ID NO: 2613811 - RNA, 24 nt, Human
ccucaguccuccccucacagccuc

SEQ ID NO: 2613812 - RNA, 20 nt, Human
ccuccccuccuugccuccug

SEQ ID NO: 2613813 - RNA, 19 nt, Human
ccucccgggcccucccuug

SEQ ID NO: 2613814 - RNA, 17 nt, Human
ccucccgggcccucccu

SEQ ID NO: 2613815 - RNA, 16 nt, Human
ccucccgggcccuccc

SEQ ID NO: 2613816 - RNA, 14 nt, Human
ccucccgggcccuc

SEQ ID NO: 2613817 - RNA, 13 nt, Human
ccucccggugccc

SEQ ID NO: 2613818 - RNA, 17 nt, Human
ccuccccucucuugcac

SEQ ID NO: 2613819 - RNA, 16 nt, Human
ccuccccucucuugca

SEQ ID NO: 2613820 - RNA, 16 nt, Human
ccuccccucucugcac

SEQ ID NO: 2613821 - RNA, 12 nt, Human
ccuccuccugac

SEQ ID NO: 2613822 - RNA, 22 nt, Human
ccuccucccuuuuuccuugucc

SEQ ID NO: 2613823 - RNA, 17 nt, Human
ccuccucccuuuuuccu

SEQ ID NO: 2613824 - RNA, 15 nt, Human
ccuccucccuuuuuc

SEQ ID NO: 2613825 - RNA, 14 nt, Human
ccuccucccuuuuu

SEQ ID NO: 2613826 - RNA, 16 nt, Human
ccuccucccuuagcuc

SEQ ID NO: 2613827 - RNA, 15 nt, Human
ccuccucccuuagcu

SEQ ID NO: 2613828 - RNA, 14 nt, Human
ccuccucccuuagc

SEQ ID NO: 2613829 - RNA, 14 nt, Human
ccuccuccuggacu

SEQ ID NO: 2613830 - RNA, 12 nt, Human
ccuccucugcca

SEQ ID NO: 2613831 - RNA, 13 nt, Human
ccuccucugccac

SEQ ID NO: 2613832 - RNA, 14 nt, Human
ccuccucugccacc

SEQ ID NO: 2613833 - RNA, 15 nt, Human
ccuccucugccaccu

SEQ ID NO: 2613834 - RNA, 18 nt, Human
ccuccucugccaccuccc

SEQ ID NO: 2613835 - RNA, 20 nt, Human
ccuccucugccaccuccccu

SEQ ID NO: 2613836 - RNA, 19 nt, Human
ccuccugcagaccacgccc

SEQ ID NO: 2613837 - RNA, 12 nt, Human
ccuccugcccac

SEQ ID NO: 2613838 - RNA, 14 nt, Human
ccuccugcccaccu

SEQ ID NO: 2613839 - RNA, 17 nt, Human
ccuccugcccaccuguc

SEQ ID NO: 2613840 - RNA, 12 nt, Human
ccuccugcccag

SEQ ID NO: 2613841 - RNA, 13 nt, Human
ccuccugcccagg

SEQ ID NO: 2613842 - RNA, 18 nt, Human
ccuccugaguagcuggga

SEQ ID NO: 2613843 - RNA, 21 nt, Human
ccuccucugccaccuccccua

SEQ ID NO: 2613844 - RNA, 13 nt, Human
ccuccugccucga

SEQ ID NO: 2613845 - RNA, 14 nt, Human
ccuccugcccagga

SEQ ID NO: 2613846 - RNA, 15 nt, Human
ccuccugcccaggag

SEQ ID NO: 2613847 - RNA, 16 nt, Human
ccuccugcccaggaga

SEQ ID NO: 2613848 - RNA, 19 nt, Human
ccuccugcccaggagagcc

SEQ ID NO: 2613849 - RNA, 17 nt, Human
ccuccugcccagucccc

SEQ ID NO: 2613850 - RNA, 15 nt, Human
ccuccugcccagucc

SEQ ID NO: 2613851 - RNA, 21 nt, Human
ccuccugcccaggagagccag

SEQ ID NO: 2613852 - RNA, 23 nt, Human
ccuccugcccaggagagccagcc

SEQ ID NO: 2613853 - RNA, 22 nt, Human
ccuccugugugugcgccuacag

SEQ ID NO: 2613854 - RNA, 15 nt, Human
ccuccugugugugcg

SEQ ID NO: 2613855 - RNA, 18 nt, Human
ccuccugggaucugcucg

SEQ ID NO: 2613856 - RNA, 21 nt, Human
ccuccugggcccucucugcuc

SEQ ID NO: 2613857 - RNA, 14 nt, Human
ccuccugggccccu

SEQ ID NO: 2613858 - RNA, 13 nt, Human
ccuccugugugug

SEQ ID NO: 2613859 - RNA, 17 nt, Human
ccuccugggaaugaagc

SEQ ID NO: 2613860 - RNA, 18 nt, Human
ccuccugccgacuccugg

SEQ ID NO: 2613861 - RNA, 19 nt, Human
ccuccugcccaguccccca

SEQ ID NO: 2613862 - RNA, 12 nt, Human
ccuccugccucc

SEQ ID NO: 2613863 - RNA, 13 nt, Human
ccuccuggacucc

SEQ ID NO: 2613864 - RNA, 13 nt, Human
ccuccugggcuaa

SEQ ID NO: 2613865 - RNA, 17 nt, Human
ccuccugggaucugcuc

SEQ ID NO: 2613866 - RNA, 21 nt, Human
ccuccuggacauuuuuucagu

SEQ ID NO: 2613867 - RNA, 19 nt, Human
ccuccugccgacuccuggg

SEQ ID NO: 2613868 - RNA, 21 nt, Human
cugguccugaggguccccacc

SEQ ID NO: 2613869 - RNA, 14 nt, Human
cugguccugugugc

SEQ ID NO: 2613870 - RNA, 14 nt, Human
cugguccagggcua

SEQ ID NO: 2613871 - RNA, 13 nt, Human
cugguccagggcu

SEQ ID NO: 2613872 - RNA, 15 nt, Human
cuggucgcuccugcc

SEQ ID NO: 2613873 - RNA, 14 nt, Human
cuggucgcuccugc

SEQ ID NO: 2613874 - RNA, 13 nt, Human
cuggucgcuccug

SEQ ID NO: 2613875 - RNA, 19 nt, Human
cugguccuuccaggccccc

SEQ ID NO: 2613876 - RNA, 16 nt, Human
cugguccuuccaggcc

SEQ ID NO: 2613877 - RNA, 17 nt, Human
cugguccuuccaggccc

SEQ ID NO: 2613878 - RNA, 18 nt, Human
cugguccauagagagcaa

SEQ ID NO: 2613879 - RNA, 18 nt, Human
cuggucccacucagucca

SEQ ID NO: 2613880 - RNA, 15 nt, Human
cuggucccacucagu

SEQ ID NO: 2613881 - RNA, 17 nt, Human
cugggucagucuggugg

SEQ ID NO: 2613882 - RNA, 13 nt, Human
cugggucagucug

SEQ ID NO: 2613883 - RNA, 16 nt, Human
cuggguccaaauaaaa

SEQ ID NO: 2613884 - RNA, 15 nt, Human
cuggguccaaauaaa

SEQ ID NO: 2613885 - RNA, 14 nt, Human
cuggguccaaauaa

SEQ ID NO: 2613886 - RNA, 13 nt, Human
cuggguccaaaua

SEQ ID NO: 2613887 - RNA, 21 nt, Human
cugggucagucuggugggagg

SEQ ID NO: 2613888 - RNA, 18 nt, Human
cugggucagucugguggg

SEQ ID NO: 2613889 - RNA, 12 nt, Human
cugggucagugg

SEQ ID NO: 2613890 - RNA, 19 nt, Human
cuggguucuacccaggugc

SEQ ID NO: 2613891 - RNA, 23 nt, Human
cuggguccaaauaaaaacuaaau

SEQ ID NO: 2613892 - RNA, 21 nt, Human
cuggguccaaauaaaaacuaa

SEQ ID NO: 2613893 - RNA, 20 nt, Human
cuggguccaaauaaaaacua

SEQ ID NO: 2613894 - RNA, 19 nt, Human
cuggguccaaauaaaaacu

SEQ ID NO: 2613895 - RNA, 17 nt, Human
cugguccauagagagca

SEQ ID NO: 2613896 - RNA, 15 nt, Human
cugguccauagagag

SEQ ID NO: 2613897 - RNA, 18 nt, Human
cuggguuggaaaacagua

SEQ ID NO: 2613898 - RNA, 13 nt, Human
cuggguuggaaaa

SEQ ID NO: 2613899 - RNA, 13 nt, Human
cuggguuggaggg

SEQ ID NO: 2613900 - RNA, 20 nt, Human
cugguucucaucuuucuuga

SEQ ID NO: 2613901 - RNA, 16 nt, Human
cugguucucaucuuuc

SEQ ID NO: 2613902 - RNA, 15 nt, Human
cugguucucaucuuu

SEQ ID NO: 2613903 - RNA, 14 nt, Human
cugguucucaucuu

SEQ ID NO: 2613904 - RNA, 12 nt, Human
cugguucucauc

SEQ ID NO: 2613905 - RNA, 23 nt, Human
cugguggucuguuggcaggcugg

SEQ ID NO: 2613906 - RNA, 22 nt, Human
cugguggucuguuggcaggcug

SEQ ID NO: 2613907 - RNA, 20 nt, Human
cugguggucuguuggcaggc

SEQ ID NO: 2613908 - RNA, 18 nt, Human
cugguggucuguuggcag

SEQ ID NO: 2613909 - RNA, 22 nt, Human
cugguggguccaggggccccuc

SEQ ID NO: 2613910 - RNA, 17 nt, Human
cugguggguccaggggc

SEQ ID NO: 2613911 - RNA, 16 nt, Human
cugguggguccagggg

SEQ ID NO: 2613912 - RNA, 22 nt, Human
cuggugggguguguuccaacug

SEQ ID NO: 2613913 - RNA, 13 nt, Human
cuggugggccaac

SEQ ID NO: 2613914 - RNA, 12 nt, Human
cuggugggccuc

SEQ ID NO: 2613915 - RNA, 17 nt, Human
cuggugggccuccucug

SEQ ID NO: 2613916 - RNA, 20 nt, Human
cugguggccccguuucuggu

SEQ ID NO: 2613917 - RNA, 13 nt, Human
cugguggcccagg

SEQ ID NO: 2613918 - RNA, 14 nt, Human
cugguggcccagga

SEQ ID NO: 2613919 - RNA, 23 nt, Human
cugguggagaaagcacugaccug

SEQ ID NO: 2613920 - RNA, 22 nt, Human
cugguggagaaagcacugaccu

SEQ ID NO: 2613921 - RNA, 11 nt, Human
cugguggccca

SEQ ID NO: 2613922 - RNA, 12 nt, Human
cugguggcccag

SEQ ID NO: 2613923 - RNA, 22 nt, Human
cugguggccccguuucuggugg

SEQ ID NO: 2613924 - RNA, 21 nt, Human
cugguggccccguuucuggug

SEQ ID NO: 2613925 - RNA, 24 nt, Human
cuggugggaucugugcccagagau

SEQ ID NO: 2613926 - RNA, 23 nt, Human
cuggugggaucugugcccagaga

SEQ ID NO: 2613927 - RNA, 23 nt, Human
cugguggcagugggagcugccug

SEQ ID NO: 2613928 - RNA, 19 nt, Human
cugguggcagugggagcug

SEQ ID NO: 2613929 - RNA, 21 nt, Human
cugguggagaaagcacugacc

SEQ ID NO: 2613930 - RNA, 18 nt, Human
cugguggagaaagcacug

SEQ ID NO: 2613931 - RNA, 15 nt, Human
cugguggagaaagca

SEQ ID NO: 2613932 - RNA, 19 nt, Human
cugguggacaguccuggga

SEQ ID NO: 2613933 - RNA, 21 nt, Human
cugguggacaguccugggaga

SEQ ID NO: 2613934 - RNA, 15 nt, Human
cugguggacaguccu

SEQ ID NO: 2613935 - RNA, 16 nt, Human
cugguggacaguccug

SEQ ID NO: 2613936 - RNA, 17 nt, Human
cugguggacaguccugg

SEQ ID NO: 2613937 - RNA, 18 nt, Human
cugguggacaguccuggg

SEQ ID NO: 2613938 - RNA, 18 nt, Human
cuggugcuguggccaggg

SEQ ID NO: 2613939 - RNA, 17 nt, Human
cuggugcuguggccagg

SEQ ID NO: 2613940 - RNA, 16 nt, Human
cuggugcuguggccag

SEQ ID NO: 2613941 - RNA, 12 nt, Human
cuggugcugugg

SEQ ID NO: 2613942 - RNA, 14 nt, Human
cuggugcugcugcu

SEQ ID NO: 2613943 - RNA, 20 nt, Human
cuggugcuggauauuuucaa

SEQ ID NO: 2613944 - RNA, 20 nt, Human
cuggugcuguggccagggug

SEQ ID NO: 2613945 - RNA, 19 nt, Human
cuggugcuguggccagggu

SEQ ID NO: 2613946 - RNA, 23 nt, Human
cuggugcuguggccagggugaga

SEQ ID NO: 2613947 - RNA, 12 nt, Human
cugguggacagu

SEQ ID NO: 2613948 - RNA, 18 nt, Human
cuggucgcuccugcccac

SEQ ID NO: 2613949 - RNA, 16 nt, Human
cuggucgcuccugccc

SEQ ID NO: 2613950 - RNA, 23 nt, Human
cuggucgcuccugcccacggagu

SEQ ID NO: 2613951 - RNA, 18 nt, Human
cuggucucaaacuccuga

SEQ ID NO: 2613952 - RNA, 19 nt, Human
cugggguggggaccucagg

SEQ ID NO: 2613953 - RNA, 18 nt, Human
cugggguggggaccucag

SEQ ID NO: 2613954 - RNA, 17 nt, Human
cugggguggggaccuca

SEQ ID NO: 2613955 - RNA, 18 nt, Human
cugggggccucagugcca

SEQ ID NO: 2613956 - RNA, 19 nt, Human
cuggggugccgccugcccg

SEQ ID NO: 2613957 - RNA, 18 nt, Human
cuggggugccgccugccc

SEQ ID NO: 2613958 - RNA, 17 nt, Human
cuggggugccgccugcc

SEQ ID NO: 2613959 - RNA, 16 nt, Human
cuggggugccgccugc

SEQ ID NO: 2613960 - RNA, 22 nt, Human
cugggggccaugagcuccagac

SEQ ID NO: 2613961 - RNA, 23 nt, Human
cugggggccaugagcuccagacc

SEQ ID NO: 2613962 - RNA, 17 nt, Human
cugggggccucagugcc

SEQ ID NO: 2613963 - RNA, 13 nt, Human
cugggggccucag

SEQ ID NO: 2613964 - RNA, 22 nt, Human
cugggguggggaccucaggccu

SEQ ID NO: 2613965 - RNA, 21 nt, Human
cugggguggggaccucaggcc

SEQ ID NO: 2613966 - RNA, 23 nt, Human
cugggguggggaccucaggccug

SEQ ID NO: 2613967 - RNA, 20 nt, Human
cuggguacuuguggacacag

SEQ ID NO: 2613968 - RNA, 13 nt, Human
cuggguagcugua

SEQ ID NO: 2613969 - RNA, 14 nt, Human
cuggguagcuguaa

SEQ ID NO: 2613970 - RNA, 15 nt, Human
cuggguagcuguaag

SEQ ID NO: 2613971 - RNA, 23 nt, Human
cuggguacuuguggacacagcuc

SEQ ID NO: 2613972 - RNA, 21 nt, Human
cuggguacuuguggacacagc

SEQ ID NO: 2613973 - RNA, 20 nt, Human
cugggcuuggggaccagagc

SEQ ID NO: 2613974 - RNA, 17 nt, Human
cugggcuuggggaccag

SEQ ID NO: 2613975 - RNA, 21 nt, Human
cugggcuuggggaccagagcu

SEQ ID NO: 2613976 - RNA, 20 nt, Human
cugggggccaugagcuccag

SEQ ID NO: 2613977 - RNA, 13 nt, Human
cugggcucaagca

SEQ ID NO: 2613978 - RNA, 13 nt, Human
cugggcuugggga

SEQ ID NO: 2613979 - RNA, 23 nt, Human
cugggcuucaguggcagcugcuu

SEQ ID NO: 2613980 - RNA, 22 nt, Human
cugggcuucaguggcagcugcu

SEQ ID NO: 2613981 - RNA, 21 nt, Human
cugggcuucaguggcagcugc

SEQ ID NO: 2613982 - RNA, 20 nt, Human
cugggcuucaguggcagcug

SEQ ID NO: 2613983 - RNA, 19 nt, Human
cugggcuucaguggcagcu

SEQ ID NO: 2613984 - RNA, 17 nt, Human
cugggcuucaguggcag

SEQ ID NO: 2613985 - RNA, 18 nt, Human
cugggcuucaguggcagc

SEQ ID NO: 2613986 - RNA, 15 nt, Human
cugggcgcccuggaa

SEQ ID NO: 2613987 - RNA, 14 nt, Human
cugggcgcccugga

SEQ ID NO: 2613988 - RNA, 13 nt, Human
cugggcgacagag

SEQ ID NO: 2613989 - RNA, 18 nt, Human
cugggcgcccuggaagcc

SEQ ID NO: 2613990 - RNA, 16 nt, Human
cugggcgcccuggaag

SEQ ID NO: 2613991 - RNA, 17 nt, Human
cugggcucaagcagucu

SEQ ID NO: 2613992 - RNA, 23 nt, Human
cugggcguaguggcucacaccug

SEQ ID NO: 2613993 - RNA, 19 nt, Human
cuggcucuuccaggcuggg

SEQ ID NO: 2613994 - RNA, 18 nt, Human
cuggcucuuccaggcugg

SEQ ID NO: 2613995 - RNA, 23 nt, Human
cuggcucuugauaccccccucug

SEQ ID NO: 2613996 - RNA, 22 nt, Human
cuggcucuugauaccccccucu

SEQ ID NO: 2613997 - RNA, 21 nt, Human
cuggcucuugauaccccccuc

SEQ ID NO: 2613998 - RNA, 20 nt, Human
cuggcucuugauaccccccu

SEQ ID NO: 2613999 - RNA, 20 nt, Human
cuggcucuuccaggcuggga

SEQ ID NO: 2614000 - RNA, 14 nt, Human
cuggccucugugcc

SEQ ID NO: 2614001 - RNA, 15 nt, Human
cuggccucugugccu

SEQ ID NO: 2614002 - RNA, 16 nt, Human
cuggccucugugccuu

SEQ ID NO: 2614003 - RNA, 20 nt, Human
cuggccucugugccuucuuu

SEQ ID NO: 2614004 - RNA, 13 nt, Human
cuggccugagcug

SEQ ID NO: 2614005 - RNA, 17 nt, Human
cuggcucuuccaggcug

SEQ ID NO: 2614006 - RNA, 19 nt, Human
cuggcugcccuggcccuga

SEQ ID NO: 2614007 - RNA, 18 nt, Human
cuggcugcccuggcccug

SEQ ID NO: 2614008 - RNA, 17 nt, Human
cuggcugcccuggcccu

SEQ ID NO: 2614009 - RNA, 16 nt, Human
cuggcugcccuggccc

SEQ ID NO: 2614010 - RNA, 15 nt, Human
cuggcugcccuggcc

SEQ ID NO: 2614011 - RNA, 14 nt, Human
cuggcugcccuggc

SEQ ID NO: 2614012 - RNA, 13 nt, Human
cuggcugcccugg

SEQ ID NO: 2614013 - RNA, 16 nt, Human
cuggcugagccuggcu

SEQ ID NO: 2614014 - RNA, 14 nt, Human
cuggcugagcccug

SEQ ID NO: 2614015 - RNA, 12 nt, Human
cuggcugagccc

SEQ ID NO: 2614016 - RNA, 23 nt, Human
cuggcugaccccaaagagccugg

SEQ ID NO: 2614017 - RNA, 22 nt, Human
cuggcugaccccaaagagccug

SEQ ID NO: 2614018 - RNA, 19 nt, Human
cuggcugaccccaaagagc

SEQ ID NO: 2614019 - RNA, 17 nt, Human
cuggcugaaggacugug

SEQ ID NO: 2614020 - RNA, 16 nt, Human
cuggcugaaggacugu

SEQ ID NO: 2614021 - RNA, 15 nt, Human
cuggcugaaggacug

SEQ ID NO: 2614022 - RNA, 14 nt, Human
cuggcugaaggacu

SEQ ID NO: 2614023 - RNA, 13 nt, Human
cuggcugaaggac

SEQ ID NO: 2614024 - RNA, 12 nt, Human
cuggcugaagga

SEQ ID NO: 2614025 - RNA, 23 nt, Human
cuggcugaacccugugcuggugu

SEQ ID NO: 2614026 - RNA, 21 nt, Human
cuggcugaacccugugcuggu

SEQ ID NO: 2614027 - RNA, 20 nt, Human
cuggcugaacccugugcugg

SEQ ID NO: 2614028 - RNA, 19 nt, Human
cuggcugaacccugugcug

SEQ ID NO: 2614029 - RNA, 18 nt, Human
cuggcugaacccugugcu

SEQ ID NO: 2614030 - RNA, 17 nt, Human
cuggcugaacccugugc

SEQ ID NO: 2614031 - RNA, 16 nt, Human
cuggcugaacccugug

SEQ ID NO: 2614032 - RNA, 13 nt, Human
cuggcugaacccu

SEQ ID NO: 2614033 - RNA, 22 nt, Human
cuggcucuuuggagaucaagga

SEQ ID NO: 2614034 - RNA, 17 nt, Human
cuggcucuugugcugga

SEQ ID NO: 2614035 - RNA, 20 nt, Human
cuggcucuugugcuggaugg

SEQ ID NO: 2614036 - RNA, 23 nt, Human
cuggcugggacguggcucagcca

SEQ ID NO: 2614037 - RNA, 14 nt, Human
cuggcugcugcccc

SEQ ID NO: 2614038 - RNA, 13 nt, Human
cuggcugcugccc

SEQ ID NO: 2614039 - RNA, 12 nt, Human
cuggcugcugcc

SEQ ID NO: 2614040 - RNA, 14 nt, Human
cuggcugggcaugg

SEQ ID NO: 2614041 - RNA, 15 nt, Human
cuggcugggcaugga

SEQ ID NO: 2614042 - RNA, 17 nt, Human
cuggcugggcauggacg

SEQ ID NO: 2614043 - RNA, 22 nt, Human
cuggcugccuccacucccacuu

SEQ ID NO: 2614044 - RNA, 21 nt, Human
cuggcugccuccacucccacu

SEQ ID NO: 2614045 - RNA, 20 nt, Human
cuggcugccuccacucccac

SEQ ID NO: 2614046 - RNA, 18 nt, Human
cuggcugccuccacuccc

SEQ ID NO: 2614047 - RNA, 16 nt, Human
cuggcugccuccacuc

SEQ ID NO: 2614048 - RNA, 15 nt, Human
cuggcugccuccacu

SEQ ID NO: 2614049 - RNA, 23 nt, Human
cuggcugcccuggcccugaggug

SEQ ID NO: 2614050 - RNA, 20 nt, Human
cuggcugcccuggcccugag

SEQ ID NO: 2614051 - RNA, 19 nt, Human
cuggcugccuuagaaccuu

SEQ ID NO: 2614052 - RNA, 14 nt, Human
cuggcugccuuaga

SEQ ID NO: 2614053 - RNA, 19 nt, Human
cuggcuguuggcugggggc

SEQ ID NO: 2614054 - RNA, 22 nt, Human
cuggcuggguggcaccagcagc

SEQ ID NO: 2614055 - RNA, 21 nt, Human
cuggcuggguggcaccagcag

SEQ ID NO: 2614056 - RNA, 22 nt, Human
cuggcuggggccuaucagugug

SEQ ID NO: 2614057 - RNA, 21 nt, Human
cuggcuggggccuaucagugu

SEQ ID NO: 2614058 - RNA, 18 nt, Human
cuggcuggggccuaucag

SEQ ID NO: 2614059 - RNA, 13 nt, Human
cuggcuggggccu

SEQ ID NO: 2614060 - RNA, 24 nt, Human
cuggcuggggccuaucagugugcc

SEQ ID NO: 2614061 - RNA, 23 nt, Human
cuggcuggggccuaucagugugc

SEQ ID NO: 2614062 - RNA, 22 nt, Human
cuggcuuccagguaucuccagg

SEQ ID NO: 2614063 - RNA, 16 nt, Human
cuggcuuccagguauc

SEQ ID NO: 2614064 - RNA, 23 nt, Human
cuggcuuccagguaucuccagga

SEQ ID NO: 2614065 - RNA, 15 nt, Human
cuggcuuccagguau

SEQ ID NO: 2614066 - RNA, 14 nt, Human
cuggcuuccaggua

SEQ ID NO: 2614067 - RNA, 12 nt, Human
cuggcuuccagg

SEQ ID NO: 2614068 - RNA, 13 nt, Human
cuggcuucaggag

SEQ ID NO: 2614069 - RNA, 14 nt, Human
cuggcuucacagau

SEQ ID NO: 2614070 - RNA, 20 nt, Human
cuggcuguuggcugggggcc

SEQ ID NO: 2614071 - RNA, 22 nt, Human
cuggcuuuucacugcuggcugc

SEQ ID NO: 2614072 - RNA, 20 nt, Human
cuggcuuuucacugcuggcu

SEQ ID NO: 2614073 - RNA, 19 nt, Human
cuggcuuuucacugcuggc

SEQ ID NO: 2614074 - RNA, 17 nt, Human
cuggcuuuucacugcug

SEQ ID NO: 2614075 - RNA, 22 nt, Human
cugggaaaugagaaggcagcca

SEQ ID NO: 2614076 - RNA, 21 nt, Human
cugggaaaugagaaggcagcc

SEQ ID NO: 2614077 - RNA, 23 nt, Human
cugggaaaugagaaggcagccac

SEQ ID NO: 2614078 - RNA, 19 nt, Human
cugggaacaccauagguca

SEQ ID NO: 2614079 - RNA, 20 nt, Human
cugggaaaugagaaggcagc

SEQ ID NO: 2614080 - RNA, 19 nt, Human
cugggaaaugagaaggcag

SEQ ID NO: 2614081 - RNA, 18 nt, Human
cugggaaauauucccuag

SEQ ID NO: 2614082 - RNA, 16 nt, Human
cugggaaauauucccu

SEQ ID NO: 2614083 - RNA, 16 nt, Human
cugggaaauaagagag

SEQ ID NO: 2614084 - RNA, 17 nt, Human
cugggaaauaagagaga

SEQ ID NO: 2614085 - RNA, 16 nt, Human
cuggcuucuccuuugg

SEQ ID NO: 2614086 - RNA, 12 nt, Human
cuggcuucuccu

SEQ ID NO: 2614087 - RNA, 16 nt, Human
cuggcuucgcaaaaug

SEQ ID NO: 2614088 - RNA, 18 nt, Human
cuggcuuccuucucucaa

SEQ ID NO: 2614089 - RNA, 14 nt, Human
cuggcuucuggagc

SEQ ID NO: 2614090 - RNA, 15 nt, Human
cuggcuucuggagcc

SEQ ID NO: 2614091 - RNA, 16 nt, Human
cuggcuucuggagccc

SEQ ID NO: 2614092 - RNA, 20 nt, Human
cuggcuucuggagcccuugg

SEQ ID NO: 2614093 - RNA, 16 nt, Human
cuggcuuuucacugcu

SEQ ID NO: 2614094 - RNA, 15 nt, Human
cuggcuuuucacugc

SEQ ID NO: 2614095 - RNA, 22 nt, Human
cugggaacccaaguccaagcau

SEQ ID NO: 2614096 - RNA, 23 nt, Human
cugggaaauggcuugaagccaag

SEQ ID NO: 2614097 - RNA, 17 nt, Human
cugggaacucaccuggg

SEQ ID NO: 2614098 - RNA, 15 nt, Human
cugggaacugcagac

SEQ ID NO: 2614099 - RNA, 20 nt, Human
cugggaacugcagaccuguc

SEQ ID NO: 2614100 - RNA, 19 nt, Human
cugggaacugcagaccugu

SEQ ID NO: 2614101 - RNA, 18 nt, Human
cugggaacugcagaccug

SEQ ID NO: 2614102 - RNA, 20 nt, Human
cugggaacucaccuggggcu

SEQ ID NO: 2614103 - RNA, 23 nt, Human
cugggaacugcagaccuguccuc

SEQ ID NO: 2614104 - RNA, 21 nt, Human
cugggaacugcagaccugucc

SEQ ID NO: 2614105 - RNA, 19 nt, Human
cugggaagacgccugagcu

SEQ ID NO: 2614106 - RNA, 17 nt, Human
cugggaagauaggcucu

SEQ ID NO: 2614107 - RNA, 23 nt, Human
cugggagcuccacucugcuucuc

SEQ ID NO: 2614108 - RNA, 13 nt, Human
cugggaagggaag

SEQ ID NO: 2614109 - RNA, 13 nt, Human
cugggagcucugc

SEQ ID NO: 2614110 - RNA, 24 nt, Human
cugggaagauaggcucugcacaga

SEQ ID NO: 2614111 - RNA, 18 nt, Human
cugggaagauaggcucug

SEQ ID NO: 2614112 - RNA, 20 nt, Human
cugggaagauaggcucugca

SEQ ID NO: 2614113 - RNA, 21 nt, Human
cugggaagauaggcucugcac

SEQ ID NO: 2614114 - RNA, 22 nt, Human
cugggaagauaggcucugcaca

SEQ ID NO: 2614115 - RNA, 15 nt, Human
cugggagcucugcag

SEQ ID NO: 2614116 - RNA, 14 nt, Human
cugggagcucugca

SEQ ID NO: 2614117 - RNA, 13 nt, Human
cugggaggaaaag

SEQ ID NO: 2614118 - RNA, 22 nt, Human
cugggaggaaaagaaaagaggg

SEQ ID NO: 2614119 - RNA, 16 nt, Human
cugggaggcucuggag

SEQ ID NO: 2614120 - RNA, 15 nt, Human
cugggaggcucugga

SEQ ID NO: 2614121 - RNA, 16 nt, Human
cugggaggcagugaug

SEQ ID NO: 2614122 - RNA, 19 nt, Human
cugggaggcauggcccugg

SEQ ID NO: 2614123 - RNA, 13 nt, Human
cugggaggcaugg

SEQ ID NO: 2614124 - RNA, 14 nt, Human
cugggaggcaguga

SEQ ID NO: 2614125 - RNA, 13 nt, Human
cugggaggaagca

SEQ ID NO: 2614126 - RNA, 14 nt, Human
cugggaggaagcag

SEQ ID NO: 2614127 - RNA, 15 nt, Human
cugggagggcagcag

SEQ ID NO: 2614128 - RNA, 17 nt, Human
cugggagggcagcaggg

SEQ ID NO: 2614129 - RNA, 19 nt, Human
cugggagggcagcagggcu

SEQ ID NO: 2614130 - RNA, 20 nt, Human
cugggagggcagcagggcua

SEQ ID NO: 2614131 - RNA, 18 nt, Human
cugggaggucaaggcugc

SEQ ID NO: 2614132 - RNA, 11 nt, Human
cugggagggca

SEQ ID NO: 2614133 - RNA, 13 nt, Human
cugggagggcagc

SEQ ID NO: 2614134 - RNA, 23 nt, Human
cugggagggauagaggggggcug

SEQ ID NO: 2614135 - RNA, 22 nt, Human
cugggaggcucuggagcccacu

SEQ ID NO: 2614136 - RNA, 22 nt, Human
cugggaggcggagaguacagug

SEQ ID NO: 2614137 - RNA, 22 nt, Human
cugggaggcauggcccuggggu

SEQ ID NO: 2614138 - RNA, 21 nt, Human
cugggauuacaggcuccugcc

SEQ ID NO: 2614139 - RNA, 22 nt, Human
cugggauuacaggcuccugcca

SEQ ID NO: 2614140 - RNA, 19 nt, Human
cugggcaaugauggcaauu

SEQ ID NO: 2614141 - RNA, 23 nt, Human
cugggauuacaggcuccugccac

SEQ ID NO: 2614142 - RNA, 19 nt, Human
cugggauuacaggcuccug

SEQ ID NO: 2614143 - RNA, 20 nt, Human
cugggauuacaggcuccugc

SEQ ID NO: 2614144 - RNA, 21 nt, Human
cugggauuacaggcgugagcc

SEQ ID NO: 2614145 - RNA, 12 nt, Human
cugggagugagc

SEQ ID NO: 2614146 - RNA, 13 nt, Human
cugggagugagcu

SEQ ID NO: 2614147 - RNA, 16 nt, Human
cugggagugagcuggu

SEQ ID NO: 2614148 - RNA, 23 nt, Human
cugggaguugaucgccuuuccca

SEQ ID NO: 2614149 - RNA, 20 nt, Human
cugggagggcccacuucagg

SEQ ID NO: 2614150 - RNA, 22 nt, Human
cugggagggguuuucgaagcuc

SEQ ID NO: 2614151 - RNA, 22 nt, Human
cugggagggcagcagggcuacc

SEQ ID NO: 2614152 - RNA, 13 nt, Human
cugggagggccca

SEQ ID NO: 2614153 - RNA, 17 nt, Human
cugggccccugccucuc

SEQ ID NO: 2614154 - RNA, 16 nt, Human
cugggccccugccucu

SEQ ID NO: 2614155 - RNA, 12 nt, Human
cugggccccugc

SEQ ID NO: 2614156 - RNA, 21 nt, Human
cugggccccucaucugcucag

SEQ ID NO: 2614157 - RNA, 20 nt, Human
cugggccccucaucugcuca

SEQ ID NO: 2614158 - RNA, 10 nt, Human
cugggccccu

SEQ ID NO: 2614159 - RNA, 20 nt, Human
cugggcaaugugauaaaacc

SEQ ID NO: 2614160 - RNA, 23 nt, Human
cugggcacacgccucccacuggg

SEQ ID NO: 2614161 - RNA, 22 nt, Human
cugggcacacgccucccacugg

SEQ ID NO: 2614162 - RNA, 17 nt, Human
cugggcacacgccuccc

SEQ ID NO: 2614163 - RNA, 16 nt, Human
cugggcacacgccucc

SEQ ID NO: 2614164 - RNA, 18 nt, Human
cuggacacucagaccuga

SEQ ID NO: 2614165 - RNA, 21 nt, Human
cuggaauguaaucaauguuuc

SEQ ID NO: 2614166 - RNA, 17 nt, Human
cuggacacucagaccug

SEQ ID NO: 2614167 - RNA, 13 nt, Human
cuggacagcccca

SEQ ID NO: 2614168 - RNA, 14 nt, Human
cuggacagccccac

SEQ ID NO: 2614169 - RNA, 15 nt, Human
cuggacagccccacc

SEQ ID NO: 2614170 - RNA, 16 nt, Human
cuggacagccccaccc

SEQ ID NO: 2614171 - RNA, 18 nt, Human
cuggacagccccacccug

SEQ ID NO: 2614172 - RNA, 19 nt, Human
cuggacagccccacccugg

SEQ ID NO: 2614173 - RNA, 20 nt, Human
cuggaauguaaucaauguuu

SEQ ID NO: 2614174 - RNA, 15 nt, Human
cuggaauguaaucaa

SEQ ID NO: 2614175 - RNA, 20 nt, Human
cuggaauggaaggguucugg

SEQ ID NO: 2614176 - RNA, 14 nt, Human
cuggaauguaauca

SEQ ID NO: 2614177 - RNA, 15 nt, Human
cuggaaugcaguggu

SEQ ID NO: 2614178 - RNA, 14 nt, Human
cuggaaugcagugg

SEQ ID NO: 2614179 - RNA, 14 nt, Human
cuggaauaaguuca

SEQ ID NO: 2614180 - RNA, 17 nt, Human
cuggaaguuuugcauuu

SEQ ID NO: 2614181 - RNA, 20 nt, Human
cuggaaguuuugcauuuaug

SEQ ID NO: 2614182 - RNA, 23 nt, Human
cuggaauaauccuaaacauauga

SEQ ID NO: 2614183 - RNA, 21 nt, Human
cuggaagugcuaauuuugaaa

SEQ ID NO: 2614184 - RNA, 23 nt, Human
cuggaagcauguaggagaaucca

SEQ ID NO: 2614185 - RNA, 12 nt, Human
cuggaagcacau

SEQ ID NO: 2614186 - RNA, 18 nt, Human
cugcuuuucugcccuggc

SEQ ID NO: 2614187 - RNA, 15 nt, Human
cuggaagcacauguu

SEQ ID NO: 2614188 - RNA, 14 nt, Human
cuggaagcacagcu

SEQ ID NO: 2614189 - RNA, 18 nt, Human
cuggaagcacagcuucau

SEQ ID NO: 2614190 - RNA, 15 nt, Human
cuggaagcacagcuu

SEQ ID NO: 2614191 - RNA, 17 nt, Human
cugcuuuucugcccugg

SEQ ID NO: 2614192 - RNA, 16 nt, Human
cugcuuuucugcccug

SEQ ID NO: 2614193 - RNA, 15 nt, Human
cugcuuuucugcccu

SEQ ID NO: 2614194 - RNA, 14 nt, Human
cugcuuuucugccc

SEQ ID NO: 2614195 - RNA, 21 nt, Human
cugcuuuuccuuggggcaggc

SEQ ID NO: 2614196 - RNA, 22 nt, Human
cugcuuuuccuuggggcaggca

SEQ ID NO: 2614197 - RNA, 23 nt, Human
cugcuuuuccuuggggcaggcag

SEQ ID NO: 2614198 - RNA, 15 nt, Human
cugcuuuccaaagcc

SEQ ID NO: 2614199 - RNA, 17 nt, Human
cugcuuuccaaagccaa

SEQ ID NO: 2614200 - RNA, 13 nt, Human
cugcugaaacaac

SEQ ID NO: 2614201 - RNA, 22 nt, Human
cugcucuuucucugccagugac

SEQ ID NO: 2614202 - RNA, 14 nt, Human
cugcucuuguuucu

SEQ ID NO: 2614203 - RNA, 21 nt, Human
cugcucuuucucugccaguga

SEQ ID NO: 2614204 - RNA, 20 nt, Human
cugcucuuucucugccagug

SEQ ID NO: 2614205 - RNA, 19 nt, Human
cugcucuuucucugccagu

SEQ ID NO: 2614206 - RNA, 18 nt, Human
cugcucuuucucugccag

SEQ ID NO: 2614207 - RNA, 17 nt, Human
cugcucuuucucugcca

SEQ ID NO: 2614208 - RNA, 16 nt, Human
cugcucuuucucugcc

SEQ ID NO: 2614209 - RNA, 15 nt, Human
cugcucuuucucugc

SEQ ID NO: 2614210 - RNA, 14 nt, Human
cugcucuuucucug

SEQ ID NO: 2614211 - RNA, 19 nt, Human
cugcucugaggcuuccaga

SEQ ID NO: 2614212 - RNA, 18 nt, Human
cugcucugaggcuuccag

SEQ ID NO: 2614213 - RNA, 13 nt, Human
cugcucugaggcu

SEQ ID NO: 2614214 - RNA, 12 nt, Human
cugcucugauga

SEQ ID NO: 2614215 - RNA, 21 nt, Human
cugcucugaggcuuccagaga

SEQ ID NO: 2614216 - RNA, 20 nt, Human
cugcucugaggcuuccagag

SEQ ID NO: 2614217 - RNA, 22 nt, Human
cugcucugaggcuuccagagag

SEQ ID NO: 2614218 - RNA, 16 nt, Human
cugcuuucuccauugu

SEQ ID NO: 2614219 - RNA, 21 nt, Human
cugcuuuccccuguggggauc

SEQ ID NO: 2614220 - RNA, 20 nt, Human
cugcuuuccccuguggggau

SEQ ID NO: 2614221 - RNA, 19 nt, Human
cugcuuuccccugugggga

SEQ ID NO: 2614222 - RNA, 22 nt, Human
cugcuuucuccauuguaaacca

SEQ ID NO: 2614223 - RNA, 18 nt, Human
cugcuuuccccugugggg

SEQ ID NO: 2614224 - RNA, 17 nt, Human
cugcuuuccccuguggg

SEQ ID NO: 2614225 - RNA, 16 nt, Human
cugcuuuccccugugg

SEQ ID NO: 2614226 - RNA, 15 nt, Human
cugcuuuccccugug

SEQ ID NO: 2614227 - RNA, 14 nt, Human
cugcuuuccccugu

SEQ ID NO: 2614228 - RNA, 12 nt, Human
cugcuuuccaca

SEQ ID NO: 2614229 - RNA, 18 nt, Human
cugcuuugggcugcccug

SEQ ID NO: 2614230 - RNA, 17 nt, Human
cugcuuugggcugcccu

SEQ ID NO: 2614231 - RNA, 20 nt, Human
cugcuuugggcugcccuggu

SEQ ID NO: 2614232 - RNA, 19 nt, Human
cugcuuugggcugcccugg

SEQ ID NO: 2614233 - RNA, 17 nt, Human
cugcuuuuaccaugccc

SEQ ID NO: 2614234 - RNA, 15 nt, Human
cugcuuuucacugcu

SEQ ID NO: 2614235 - RNA, 18 nt, Human
cugcuuuucccuaagcca

SEQ ID NO: 2614236 - RNA, 21 nt, Human
cugcuuuucccuaagccaagg

SEQ ID NO: 2614237 - RNA, 17 nt, Human
cugcuuuucacugcugc

SEQ ID NO: 2614238 - RNA, 14 nt, Human
cugcuuuuaccaug

SEQ ID NO: 2614239 - RNA, 18 nt, Human
cugcuuuucacugcugca

SEQ ID NO: 2614240 - RNA, 15 nt, Human
cugcuuuucccuaag

SEQ ID NO: 2614241 - RNA, 23 nt, Human
cugcuuugggcugcccuggugcu

SEQ ID NO: 2614242 - RNA, 22 nt, Human
cugcuuugggcugcccuggugc

SEQ ID NO: 2614243 - RNA, 21 nt, Human
cugcuuugggcugcccuggug

SEQ ID NO: 2614244 - RNA, 19 nt, Human
cuggagagccagaaccugg

SEQ ID NO: 2614245 - RNA, 17 nt, Human
cuggagagaaguuucug

SEQ ID NO: 2614246 - RNA, 23 nt, Human
cuggagagccagaaccuggaggg

SEQ ID NO: 2614247 - RNA, 22 nt, Human
cuggagagccagaaccuggagg

SEQ ID NO: 2614248 - RNA, 22 nt, Human
cuggagagaaacaauaaagaga

SEQ ID NO: 2614249 - RNA, 14 nt, Human
cuggagagaaacaa

SEQ ID NO: 2614250 - RNA, 12 nt, Human
cuggagagaagu

SEQ ID NO: 2614251 - RNA, 21 nt, Human
cuggagacuuagggcaccagg

SEQ ID NO: 2614252 - RNA, 15 nt, Human
cuggagacuuagggc

SEQ ID NO: 2614253 - RNA, 22 nt, Human
cuggagagcuagaaccuggaga

SEQ ID NO: 2614254 - RNA, 20 nt, Human
cuggagagcuagaaccugga

SEQ ID NO: 2614255 - RNA, 19 nt, Human
cuggagagcuagaaccugg

SEQ ID NO: 2614256 - RNA, 13 nt, Human
cuggagagcuaga

SEQ ID NO: 2614257 - RNA, 23 nt, Human
cuggagagcuagaaccuggaggg

SEQ ID NO: 2614258 - RNA, 22 nt, Human
cuggagagcuagaaccuggagg

SEQ ID NO: 2614259 - RNA, 23 nt, Human
cuggagaggagggaugcugccug

SEQ ID NO: 2614260 - RNA, 22 nt, Human
cuggagaggcccucuggagugg

SEQ ID NO: 2614261 - RNA, 12 nt, Human
cuggagagguua

SEQ ID NO: 2614262 - RNA, 21 nt, Human
cuggagagguuauaggucacu

SEQ ID NO: 2614263 - RNA, 17 nt, Human
cuggagcaucugacuca

SEQ ID NO: 2614264 - RNA, 16 nt, Human
cuggagcaucugacuc

SEQ ID NO: 2614265 - RNA, 12 nt, Human
cuggagcaucug

SEQ ID NO: 2614266 - RNA, 21 nt, Human
cuggagcaggccuugcgcugu

SEQ ID NO: 2614267 - RNA, 16 nt, Human
cuggagcaggccuugc

SEQ ID NO: 2614268 - RNA, 12 nt, Human
cuggagcaggcc

SEQ ID NO: 2614269 - RNA, 22 nt, Human
cuggagcagaccaccccgccug

SEQ ID NO: 2614270 - RNA, 18 nt, Human
cuggagcagaccaccccg

SEQ ID NO: 2614271 - RNA, 15 nt, Human
cuggagcagaccacc

SEQ ID NO: 2614272 - RNA, 13 nt, Human
cuggagcagacca

SEQ ID NO: 2614273 - RNA, 13 nt, Human
cuggagcaccagg

SEQ ID NO: 2614274 - RNA, 20 nt, Human
cuggagaguucaauggcugc

SEQ ID NO: 2614275 - RNA, 23 nt, Human
cuggagaguucaauggcugcuga

SEQ ID NO: 2614276 - RNA, 14 nt, Human
cuggagcaccaggc

SEQ ID NO: 2614277 - RNA, 15 nt, Human
cuggagcaccaggca

SEQ ID NO: 2614278 - RNA, 23 nt, Human
cuggagcaccaggcacgaaccca

SEQ ID NO: 2614279 - RNA, 19 nt, Human
cuggacaguaucacugucu

SEQ ID NO: 2614280 - RNA, 17 nt, Human
cuggacauagagaggga

SEQ ID NO: 2614281 - RNA, 20 nt, Human
cuggacaguaucacugucuu

SEQ ID NO: 2614282 - RNA, 23 nt, Human
cuggacauagagagggagaagaa

SEQ ID NO: 2614283 - RNA, 18 nt, Human
cuggacauagagagggag

SEQ ID NO: 2614284 - RNA, 23 nt, Human
cuggacaugaagauucuuuccca

SEQ ID NO: 2614285 - RNA, 17 nt, Human
cuggacauuuuuucagu

SEQ ID NO: 2614286 - RNA, 18 nt, Human
cuggacauccucuucugc

SEQ ID NO: 2614287 - RNA, 18 nt, Human
cuggacauuugccuugcu

SEQ ID NO: 2614288 - RNA, 14 nt, Human
cuggaccacugggc

SEQ ID NO: 2614289 - RNA, 15 nt, Human
cuggaccacugggca

SEQ ID NO: 2614290 - RNA, 23 nt, Human
cuggaccaacccuguuuccugag

SEQ ID NO: 2614291 - RNA, 22 nt, Human
cuggaccaacccuguuuccuga

SEQ ID NO: 2614292 - RNA, 21 nt, Human
cuggaccaacccuguuuccug

SEQ ID NO: 2614293 - RNA, 15 nt, Human
cuggacggcauuccu

SEQ ID NO: 2614294 - RNA, 17 nt, Human
cuggacggcauuccugc

SEQ ID NO: 2614295 - RNA, 19 nt, Human
cuggacggcauuccugcuu

SEQ ID NO: 2614296 - RNA, 18 nt, Human
cuggacggggacugggga

SEQ ID NO: 2614297 - RNA, 15 nt, Human
cuggacggggacugg

SEQ ID NO: 2614298 - RNA, 20 nt, Human
cuggacggcauuccugcuua

SEQ ID NO: 2614299 - RNA, 16 nt, Human
cuggacucaccucccc

SEQ ID NO: 2614300 - RNA, 13 nt, Human
cuggacucaggau

SEQ ID NO: 2614301 - RNA, 19 nt, Human
cuggacucaggaugcccag

SEQ ID NO: 2614302 - RNA, 20 nt, Human
cuggacucaggaugcccagg

SEQ ID NO: 2614303 - RNA, 22 nt, Human
cuggacucaggaugcccagggc

SEQ ID NO: 2614304 - RNA, 23 nt, Human
cuggacggggacuggggaugugg

SEQ ID NO: 2614305 - RNA, 20 nt, Human
cuggacuagagggaccucuc

SEQ ID NO: 2614306 - RNA, 21 nt, Human
cuggacuagagggaccucucc

SEQ ID NO: 2614307 - RNA, 23 nt, Human
cuggacuagagggaccucuccca

SEQ ID NO: 2614308 - RNA, 22 nt, Human
cuggagccuguguaacagcucc

SEQ ID NO: 2614309 - RNA, 19 nt, Human
cuggagccuguguaacagc

SEQ ID NO: 2614310 - RNA, 18 nt, Human
cuggagccuguguaacag

SEQ ID NO: 2614311 - RNA, 17 nt, Human
cuggagccuguguaaca

SEQ ID NO: 2614312 - RNA, 16 nt, Human
cuggagccuguguaac

SEQ ID NO: 2614313 - RNA, 15 nt, Human
cuggagccuguguaa

SEQ ID NO: 2614314 - RNA, 14 nt, Human
cuggagccugugua

SEQ ID NO: 2614315 - RNA, 13 nt, Human
cuggagccugugu

SEQ ID NO: 2614316 - RNA, 12 nt, Human
cuggagccugug

SEQ ID NO: 2614317 - RNA, 16 nt, Human
cuggagcccagaggag

SEQ ID NO: 2614318 - RNA, 21 nt, Human
cuggagcccacuguacuugcu

SEQ ID NO: 2614319 - RNA, 13 nt, Human
cuggaggagagaa

SEQ ID NO: 2614320 - RNA, 22 nt, Human
cuggaggacuagaaccuggagg

SEQ ID NO: 2614321 - RNA, 21 nt, Human
cuggaggacuagaaccuggag

SEQ ID NO: 2614322 - RNA, 20 nt, Human
cuggaggacuagaaccugga

SEQ ID NO: 2614323 - RNA, 19 nt, Human
cuggaggacuagaaccugg

SEQ ID NO: 2614324 - RNA, 19 nt, Human
cuggaggaaaacugagacu

SEQ ID NO: 2614325 - RNA, 14 nt, Human
cuggaggaaaacug

SEQ ID NO: 2614326 - RNA, 17 nt, Human
cuggaggaaaacugaga

SEQ ID NO: 2614327 - RNA, 19 nt, Human
cuggagcuggcgucugucu

SEQ ID NO: 2614328 - RNA, 11 nt, Human
cuggagcuggc

SEQ ID NO: 2614329 - RNA, 24 nt, Human
cuggagccuguguaacagcuccuu

SEQ ID NO: 2614330 - RNA, 23 nt, Human
cuggagccuguguaacagcuccu

SEQ ID NO: 2614331 - RNA, 20 nt, Human
cuggagcccacuguacuugc

SEQ ID NO: 2614332 - RNA, 17 nt, Human
cuggagcccacuguacu

SEQ ID NO: 2614333 - RNA, 16 nt, Human
cuggagcccacuguac

SEQ ID NO: 2614334 - RNA, 15 nt, Human
cuggagcccacugua

SEQ ID NO: 2614335 - RNA, 16 nt, Human
cuggagccaaguccag

SEQ ID NO: 2614336 - RNA, 15 nt, Human
cuggagccaagucca

SEQ ID NO: 2614337 - RNA, 20 nt, Human
cuggagccaacugcugcuuu

SEQ ID NO: 2614338 - RNA, 18 nt, Human
cuggagccaacugcugcu

SEQ ID NO: 2614339 - RNA, 23 nt, Human
cuggagcaucugacucacaagaa

SEQ ID NO: 2614340 - RNA, 22 nt, Human
cuggagcaucugacucacaaga

SEQ ID NO: 2614341 - RNA, 17 nt, Human
cuggagccaacugcugc

SEQ ID NO: 2614342 - RNA, 18 nt, Human
cuggagccacuaacuaga

SEQ ID NO: 2614343 - RNA, 16 nt, Human
cuggagccacuaacua

SEQ ID NO: 2614344 - RNA, 19 nt, Human
cuggagccaaguccagauu

SEQ ID NO: 2614345 - RNA, 17 nt, Human
cuggagccaaguccaga

SEQ ID NO: 2614346 - RNA, 15 nt, Human
cuggagccacuaacu

SEQ ID NO: 2614347 - RNA, 13 nt, Human
cuggagcccacug

SEQ ID NO: 2614348 - RNA, 21 nt, Human
cuggagccagacucuggucuu

SEQ ID NO: 2614349 - RNA, 16 nt, Human
cuggagccagacucug

SEQ ID NO: 2614350 - RNA, 22 nt, Human
cuggagccagacucuggucuuc

SEQ ID NO: 2614351 - RNA, 17 nt, Human
cuggaggagagaagaau

SEQ ID NO: 2614352 - RNA, 14 nt, Human
cuggaggagagaag

SEQ ID NO: 2614353 - RNA, 14 nt, Human
cuggaggaggagca

SEQ ID NO: 2614354 - RNA, 21 nt, Human
cuggagggaaugaaccuggag

SEQ ID NO: 2614355 - RNA, 19 nt, Human
cuggagggaaugaaccugg

SEQ ID NO: 2614356 - RNA, 21 nt, Human
cuggaggccgggugcucaggg

SEQ ID NO: 2614357 - RNA, 15 nt, Human
cuggauggggcugca

SEQ ID NO: 2614358 - RNA, 23 nt, Human
cuggauggcaccagaggcugcag

SEQ ID NO: 2614359 - RNA, 16 nt, Human
cuggauggcaccagag

SEQ ID NO: 2614360 - RNA, 15 nt, Human
cuggauggcaccaga

SEQ ID NO: 2614361 - RNA, 21 nt, Human
cuggauggauuugaagcaaag

SEQ ID NO: 2614362 - RNA, 20 nt, Human
cuggaugggcugcagcagag

SEQ ID NO: 2614363 - RNA, 18 nt, Human
cuggaugggcugcagcag

SEQ ID NO: 2614364 - RNA, 22 nt, Human
cuggagggcuagaaccuggcag

SEQ ID NO: 2614365 - RNA, 22 nt, Human
cuggagggcuagaaccuggaga

SEQ ID NO: 2614366 - RNA, 21 nt, Human
cuggagggcuagaaccuggag

SEQ ID NO: 2614367 - RNA, 20 nt, Human
cuggagggcuagaaccugga

SEQ ID NO: 2614368 - RNA, 19 nt, Human
cuggagggcuagaaccugg

SEQ ID NO: 2614369 - RNA, 20 nt, Human
cuggagggcuagaaccuaga

SEQ ID NO: 2614370 - RNA, 23 nt, Human
cuggagggaaugaaccuggaggg

SEQ ID NO: 2614371 - RNA, 22 nt, Human
cuggagggaaugaaccuggagg

SEQ ID NO: 2614372 - RNA, 22 nt, Human
cuggagggcuagaaucuggaga

SEQ ID NO: 2614373 - RNA, 20 nt, Human
cuggagggcuagaaucugga

SEQ ID NO: 2614374 - RNA, 19 nt, Human
cuggagggcuagaaucugg

SEQ ID NO: 2614375 - RNA, 21 nt, Human
cuggagggcuagaacuggaga

SEQ ID NO: 2614376 - RNA, 21 nt, Human
cuggauggaggaaaaccaagc

SEQ ID NO: 2614377 - RNA, 13 nt, Human
cuggauuaaacuu

SEQ ID NO: 2614378 - RNA, 23 nt, Human
cuggauuaaacuuaaucuaaaug

SEQ ID NO: 2614379 - RNA, 16 nt, Human
cuggauggggcugcac

SEQ ID NO: 2614380 - RNA, 19 nt, Human
cuggaugguucccagaggg

SEQ ID NO: 2614381 - RNA, 20 nt, Human
cuggaugguucccagagggu

SEQ ID NO: 2614382 - RNA, 17 nt, Human
cuggauuauauuaugaa

SEQ ID NO: 2614383 - RNA, 19 nt, Human
cuggaugucugccaauuuu

SEQ ID NO: 2614384 - RNA, 23 nt, Human
cuggauuauucaaaaugauguau

SEQ ID NO: 2614385 - RNA, 13 nt, Human
cuggauucccagg

SEQ ID NO: 2614386 - RNA, 14 nt, Human
cuggauucccagga

SEQ ID NO: 2614387 - RNA, 19 nt, Human
cuggauucauuuccugccc

SEQ ID NO: 2614388 - RNA, 18 nt, Human
cuggauucauuuccugcc

SEQ ID NO: 2614389 - RNA, 16 nt, Human
cuggauucauuuccug

SEQ ID NO: 2614390 - RNA, 15 nt, Human
cuggaugucugccaa

SEQ ID NO: 2614391 - RNA, 20 nt, Human
cuggauguuuuuucccuguu

SEQ ID NO: 2614392 - RNA, 18 nt, Human
cuggcacaguuuucugag

SEQ ID NO: 2614393 - RNA, 19 nt, Human
cuggcacaguuuucugaga

SEQ ID NO: 2614394 - RNA, 14 nt, Human
cuggcacagugucu

SEQ ID NO: 2614395 - RNA, 12 nt, Human
cuggcacagugu

SEQ ID NO: 2614396 - RNA, 12 nt, Human
cuggcacagucu

SEQ ID NO: 2614397 - RNA, 17 nt, Human
cuggcacagggcagugg

SEQ ID NO: 2614398 - RNA, 16 nt, Human
cuggcacagggcagug

SEQ ID NO: 2614399 - RNA, 14 nt, Human
cuggcacugcuucc

SEQ ID NO: 2614400 - RNA, 13 nt, Human
cuggcacugcuuc

SEQ ID NO: 2614401 - RNA, 21 nt, Human
cuggcacagugucugggcuga

SEQ ID NO: 2614402 - RNA, 20 nt, Human
cuggcacagugucugggcug

SEQ ID NO: 2614403 - RNA, 19 nt, Human
cuggcacagugucugggcu

SEQ ID NO: 2614404 - RNA, 15 nt, Human
cuggcacagugucug

SEQ ID NO: 2614405 - RNA, 23 nt, Human
cuggcacuauaauguaagcucua

SEQ ID NO: 2614406 - RNA, 13 nt, Human
cuggauuuuguca

SEQ ID NO: 2614407 - RNA, 19 nt, Human
cuggcaaaaggaucuuugu

SEQ ID NO: 2614408 - RNA, 22 nt, Human
cuggauugaucggagccuccuc

SEQ ID NO: 2614409 - RNA, 20 nt, Human
cuggauuggguuaugaauau

SEQ ID NO: 2614410 - RNA, 20 nt, Human
cuggcaaaaggaucuuugug

SEQ ID NO: 2614411 - RNA, 23 nt, Human
cuggcaaaaggaucuuuguggcc

SEQ ID NO: 2614412 - RNA, 21 nt, Human
cuggcaaaaggaucuuugugg

SEQ ID NO: 2614413 - RNA, 16 nt, Human
cuggcaaacaugaaaa

SEQ ID NO: 2614414 - RNA, 22 nt, Human
cuggcaaacaugaaaaaucggc

SEQ ID NO: 2614415 - RNA, 19 nt, Human
cuggcaaacuucagacuga

SEQ ID NO: 2614416 - RNA, 21 nt, Human
cuggcaaugaaaaauucucag

SEQ ID NO: 2614417 - RNA, 22 nt, Human
cuggcaaugaaaaauucucagu

SEQ ID NO: 2614418 - RNA, 18 nt, Human
cuggcaaagggagcagaa

SEQ ID NO: 2614419 - RNA, 20 nt, Human
cuggcaauaguguguucuga

SEQ ID NO: 2614420 - RNA, 12 nt, Human
cuggcaaaggcc

SEQ ID NO: 2614421 - RNA, 19 nt, Human
cuggcaaagcuuuuagaaa

SEQ ID NO: 2614422 - RNA, 20 nt, Human
cuggcaaagcuuuuagaaau

SEQ ID NO: 2614423 - RNA, 18 nt, Human
cuggcaaagacagaagcc

SEQ ID NO: 2614424 - RNA, 15 nt, Human
cuggcacagaaaccu

SEQ ID NO: 2614425 - RNA, 21 nt, Human
cuggcacacaguaggugcuca

SEQ ID NO: 2614426 - RNA, 21 nt, Human
cuggcacacaucaggaguuca

SEQ ID NO: 2614427 - RNA, 16 nt, Human
cuggcacagaaaccuc

SEQ ID NO: 2614428 - RNA, 12 nt, Human
cuggcacacauc

SEQ ID NO: 2614429 - RNA, 18 nt, Human
cuggcacaaacucuuggu

SEQ ID NO: 2614430 - RNA, 15 nt, Human
cuggcccagcucccc

SEQ ID NO: 2614431 - RNA, 14 nt, Human
cuggcccagcuccc

SEQ ID NO: 2614432 - RNA, 13 nt, Human
cuggcccagcucc

SEQ ID NO: 2614433 - RNA, 12 nt, Human
cuggcccagcuc

SEQ ID NO: 2614434 - RNA, 19 nt, Human
cuggcccagcggccccucc

SEQ ID NO: 2614435 - RNA, 18 nt, Human
cuggcccagcggccccuc

SEQ ID NO: 2614436 - RNA, 17 nt, Human
cuggcccagcggccccu

SEQ ID NO: 2614437 - RNA, 14 nt, Human
cuggcccagcggcc

SEQ ID NO: 2614438 - RNA, 12 nt, Human
cuggcccagggc

SEQ ID NO: 2614439 - RNA, 22 nt, Human
cuggcccagcucccccgggagg

SEQ ID NO: 2614440 - RNA, 11 nt, Human
cuggcccaggg

SEQ ID NO: 2614441 - RNA, 13 nt, Human
cuggcccagggcc

SEQ ID NO: 2614442 - RNA, 14 nt, Human
cuggcccagggccc

SEQ ID NO: 2614443 - RNA, 15 nt, Human
cuggcccagggccca

SEQ ID NO: 2614444 - RNA, 17 nt, Human
cuggccuagcauacgua

SEQ ID NO: 2614445 - RNA, 13 nt, Human
cuggcccagcggc

SEQ ID NO: 2614446 - RNA, 12 nt, Human
cuggcccagcgg

SEQ ID NO: 2614447 - RNA, 22 nt, Human
cuggcccagccggccucucugg

SEQ ID NO: 2614448 - RNA, 21 nt, Human
cuggcccagccggccucucug

SEQ ID NO: 2614449 - RNA, 23 nt, Human
cuggcccagccggccucucuggc

SEQ ID NO: 2614450 - RNA, 20 nt, Human
cuggcccagccggccucucu

SEQ ID NO: 2614451 - RNA, 19 nt, Human
cuggcccagccggccucuc

SEQ ID NO: 2614452 - RNA, 12 nt, Human
cuggcccacugc

SEQ ID NO: 2614453 - RNA, 13 nt, Human
cuggcccacugca

SEQ ID NO: 2614454 - RNA, 22 nt, Human
cuggccuccggcgucagccucc

SEQ ID NO: 2614455 - RNA, 21 nt, Human
cuggccuccggcgucagccuc

SEQ ID NO: 2614456 - RNA, 20 nt, Human
cuggccuccggcgucagccu

SEQ ID NO: 2614457 - RNA, 21 nt, Human
cuggccuccccugccaccagg

SEQ ID NO: 2614458 - RNA, 18 nt, Human
cuggccuccccugccacc

SEQ ID NO: 2614459 - RNA, 17 nt, Human
cuggccuccccugccac

SEQ ID NO: 2614460 - RNA, 16 nt, Human
cuggccuccccugcca

SEQ ID NO: 2614461 - RNA, 20 nt, Human
cuggccucgccuggccugag

SEQ ID NO: 2614462 - RNA, 19 nt, Human
cuggccucgccuggccuga

SEQ ID NO: 2614463 - RNA, 18 nt, Human
cuggccucgccuggccug

SEQ ID NO: 2614464 - RNA, 17 nt, Human
cuggccucgccuggccu

SEQ ID NO: 2614465 - RNA, 16 nt, Human
cuggccucgccuggcc

SEQ ID NO: 2614466 - RNA, 12 nt, Human
cuggccucgccu

SEQ ID NO: 2614467 - RNA, 11 nt, Human
cuggccucugu

SEQ ID NO: 2614468 - RNA, 13 nt, Human
cuggccucugugc

SEQ ID NO: 2614469 - RNA, 17 nt, Human
cuggccucuggcucuca

SEQ ID NO: 2614470 - RNA, 23 nt, Human
cuggccuagucccuuccacaccc

SEQ ID NO: 2614471 - RNA, 12 nt, Human
cuggccuagucc

SEQ ID NO: 2614472 - RNA, 23 nt, Human
cuggccuaggagauaucugaggg

SEQ ID NO: 2614473 - RNA, 21 nt, Human
cuggccuaggagauaucugag

SEQ ID NO: 2614474 - RNA, 23 nt, Human
cuggccuagcauacguacacauu

SEQ ID NO: 2614475 - RNA, 17 nt, Human
cuggccuagucccuucc

SEQ ID NO: 2614476 - RNA, 17 nt, Human
cuggccucccacagacu

SEQ ID NO: 2614477 - RNA, 23 nt, Human
cuggccucccacccgaugcugcu

SEQ ID NO: 2614478 - RNA, 22 nt, Human
cuggccucccacccgaugcugc

SEQ ID NO: 2614479 - RNA, 17 nt, Human
cuggccucccacccgau

SEQ ID NO: 2614480 - RNA, 15 nt, Human
cuggccucccacccg

SEQ ID NO: 2614481 - RNA, 13 nt, Human
cuggccucccacc

SEQ ID NO: 2614482 - RNA, 19 nt, Human
cuggccucccacagacuca

SEQ ID NO: 2614483 - RNA, 16 nt, Human
cuggcacugcuuccag

SEQ ID NO: 2614484 - RNA, 15 nt, Human
cuggcacugcuucca

SEQ ID NO: 2614485 - RNA, 17 nt, Human
cuggcacugcuuccagu

SEQ ID NO: 2614486 - RNA, 19 nt, Human
cuggcacugaauuaaucau

SEQ ID NO: 2614487 - RNA, 20 nt, Human
cuggcacugacugggcauag

SEQ ID NO: 2614488 - RNA, 19 nt, Human
cuggcauuagaauuauuua

SEQ ID NO: 2614489 - RNA, 19 nt, Human
cuggcauuauguccacugu

SEQ ID NO: 2614490 - RNA, 16 nt, Human
cuggcacugcugugcu

SEQ ID NO: 2614491 - RNA, 22 nt, Human
cuggcauuagaauuauuuaaac

SEQ ID NO: 2614492 - RNA, 14 nt, Human
cuggcacugcugug

SEQ ID NO: 2614493 - RNA, 13 nt, Human
cuggcacugcugu

SEQ ID NO: 2614494 - RNA, 20 nt, Human
cuggcauuagaauuauuuaa

SEQ ID NO: 2614495 - RNA, 17 nt, Human
cuggcauugucccugug

SEQ ID NO: 2614496 - RNA, 16 nt, Human
cuggcauugucccugu

SEQ ID NO: 2614497 - RNA, 21 nt, Human
cuggcauuauguccacugugu

SEQ ID NO: 2614498 - RNA, 19 nt, Human
cuggcauugucccugugcc

SEQ ID NO: 2614499 - RNA, 23 nt, Human
cuggccaacaucgugaaacccug

SEQ ID NO: 2614500 - RNA, 16 nt, Human
cuggccaacgggguga

SEQ ID NO: 2614501 - RNA, 16 nt, Human
cuggccagaugcacca

SEQ ID NO: 2614502 - RNA, 20 nt, Human
cuggccagaugcaccagccc

SEQ ID NO: 2614503 - RNA, 19 nt, Human
cuggccagaugcaccagcc

SEQ ID NO: 2614504 - RNA, 18 nt, Human
cuggccagaugcaccagc

SEQ ID NO: 2614505 - RNA, 17 nt, Human
cuggccagaugcaccag

SEQ ID NO: 2614506 - RNA, 18 nt, Human
cuggcccacagcaggugc

SEQ ID NO: 2614507 - RNA, 21 nt, Human
cuggccagaugcaccagcccu

SEQ ID NO: 2614508 - RNA, 22 nt, Human
cuggccagaugcaccagcccuu

SEQ ID NO: 2614509 - RNA, 17 nt, Human
cuggccaacaugguaaa

SEQ ID NO: 2614510 - RNA, 17 nt, Human
cugccccuggcagcccc

SEQ ID NO: 2614511 - RNA, 16 nt, Human
cugccccuggcagccc

SEQ ID NO: 2614512 - RNA, 15 nt, Human
cugccccuggcagcc

SEQ ID NO: 2614513 - RNA, 14 nt, Human
cugccccuggcagc

SEQ ID NO: 2614514 - RNA, 20 nt, Human
cugcccaggggugcccccuc

SEQ ID NO: 2614515 - RNA, 19 nt, Human
cugcccaggggugcccccu

SEQ ID NO: 2614516 - RNA, 18 nt, Human
cugcccaggggugccccc

SEQ ID NO: 2614517 - RNA, 17 nt, Human
cugcccaggggugcccc

SEQ ID NO: 2614518 - RNA, 16 nt, Human
cugcccaggggugccc

SEQ ID NO: 2614519 - RNA, 15 nt, Human
cugcccaggggugcc

SEQ ID NO: 2614520 - RNA, 14 nt, Human
cugcccaggggugc

SEQ ID NO: 2614521 - RNA, 13 nt, Human
cugcccaggggug

SEQ ID NO: 2614522 - RNA, 14 nt, Human
cugcccaguccccc

SEQ ID NO: 2614523 - RNA, 13 nt, Human
cugcccagucccc

SEQ ID NO: 2614524 - RNA, 22 nt, Human
cugcccaggggugcccccuccu

SEQ ID NO: 2614525 - RNA, 21 nt, Human
cugcccaggggugcccccucc

SEQ ID NO: 2614526 - RNA, 19 nt, Human
cugcccagucccccaaccc

SEQ ID NO: 2614527 - RNA, 18 nt, Human
cugcccagucccccaacc

SEQ ID NO: 2614528 - RNA, 18 nt, Human
cugcccaggccugccugu

SEQ ID NO: 2614529 - RNA, 17 nt, Human
cugcccaggccugccug

SEQ ID NO: 2614530 - RNA, 22 nt, Human
cugcccaggggagcccuccacg

SEQ ID NO: 2614531 - RNA, 18 nt, Human
cugcccaggggagcccuc

SEQ ID NO: 2614532 - RNA, 17 nt, Human
cugcccaggggagcccu

SEQ ID NO: 2614533 - RNA, 16 nt, Human
cugcccaggggagccc

SEQ ID NO: 2614534 - RNA, 19 nt, Human
cugcccaggccugccuguu

SEQ ID NO: 2614535 - RNA, 22 nt, Human
cugcccagcuugggcccagcug

SEQ ID NO: 2614536 - RNA, 21 nt, Human
cugcccagcuugggcccagcu

SEQ ID NO: 2614537 - RNA, 23 nt, Human
cugcccagcuugggcccagcugg

SEQ ID NO: 2614538 - RNA, 20 nt, Human
cugcccaggacggggccggc

SEQ ID NO: 2614539 - RNA, 21 nt, Human
cugcccaggacggggccggcc

SEQ ID NO: 2614540 - RNA, 11 nt, Human
cugcccaggag

SEQ ID NO: 2614541 - RNA, 20 nt, Human
cugcccagcuugggcccagc

SEQ ID NO: 2614542 - RNA, 19 nt, Human
cugcccagcuugggcccag

SEQ ID NO: 2614543 - RNA, 17 nt, Human
cugcccagcuugggccc

SEQ ID NO: 2614544 - RNA, 16 nt, Human
cugcccagcuugggcc

SEQ ID NO: 2614545 - RNA, 15 nt, Human
cugcccagcuugggc

SEQ ID NO: 2614546 - RNA, 13 nt, Human
cugcccaggcccc

SEQ ID NO: 2614547 - RNA, 23 nt, Human
cugcccaggagagccagcccucc

SEQ ID NO: 2614548 - RNA, 21 nt, Human
cugcccaggagagccagcccu

SEQ ID NO: 2614549 - RNA, 22 nt, Human
cugcccaggagagccagcccuc

SEQ ID NO: 2614550 - RNA, 12 nt, Human
cugcccaggaga

SEQ ID NO: 2614551 - RNA, 17 nt, Human
cugcccaggagagccag

SEQ ID NO: 2614552 - RNA, 18 nt, Human
cugcccaggagagccagc

SEQ ID NO: 2614553 - RNA, 19 nt, Human
cugcccaggagagccagcc

SEQ ID NO: 2614554 - RNA, 17 nt, Human
cugcccaacccuucccu

SEQ ID NO: 2614555 - RNA, 20 nt, Human
cugcccaacccuucccucac

SEQ ID NO: 2614556 - RNA, 17 nt, Human
cugcccaaccugcucuc

SEQ ID NO: 2614557 - RNA, 17 nt, Human
cugcccaaaaauauggu

SEQ ID NO: 2614558 - RNA, 22 nt, Human
cugcccaaagugcuuccaaggc

SEQ ID NO: 2614559 - RNA, 20 nt, Human
cugccauuugcacccuccgc

SEQ ID NO: 2614560 - RNA, 21 nt, Human
cugccauuugcacccuccgcc

SEQ ID NO: 2614561 - RNA, 16 nt, Human
cugccauuucugagau

SEQ ID NO: 2614562 - RNA, 17 nt, Human
cugccauggaggcacac

SEQ ID NO: 2614563 - RNA, 19 nt, Human
cugccauuugcacccuccg

SEQ ID NO: 2614564 - RNA, 16 nt, Human
cugcccugcccaccug

SEQ ID NO: 2614565 - RNA, 15 nt, Human
cugcccugcccaccu

SEQ ID NO: 2614566 - RNA, 14 nt, Human
cugcccugcccacc

SEQ ID NO: 2614567 - RNA, 13 nt, Human
cugcccugcccac

SEQ ID NO: 2614568 - RNA, 11 nt, Human
cugcccugccc

SEQ ID NO: 2614569 - RNA, 13 nt, Human
cugcccugccacu

SEQ ID NO: 2614570 - RNA, 20 nt, Human
cugcccugcacgucauggga

SEQ ID NO: 2614571 - RNA, 17 nt, Human
cugcccugcacgucaug

SEQ ID NO: 2614572 - RNA, 17 nt, Human
cugcccucguggccagc

SEQ ID NO: 2614573 - RNA, 19 nt, Human
cugcccuccaagaccuucu

SEQ ID NO: 2614574 - RNA, 15 nt, Human
cugcccggcugcgga

SEQ ID NO: 2614575 - RNA, 21 nt, Human
cugcccggcgcccucuguccu

SEQ ID NO: 2614576 - RNA, 20 nt, Human
cugcccggcgcccucugucc

SEQ ID NO: 2614577 - RNA, 17 nt, Human
cugcccggcgcccucug

SEQ ID NO: 2614578 - RNA, 16 nt, Human
cugcccggcgcccucu

SEQ ID NO: 2614579 - RNA, 15 nt, Human
cugcccggcgcccuc

SEQ ID NO: 2614580 - RNA, 11 nt, Human
cugccccuggc

SEQ ID NO: 2614581 - RNA, 11 nt, Human
cugcccggcug

SEQ ID NO: 2614582 - RNA, 16 nt, Human
cugcccucguggccag

SEQ ID NO: 2614583 - RNA, 18 nt, Human
cugcccuccuuguccacc

SEQ ID NO: 2614584 - RNA, 20 nt, Human
cugcccuccuuguccaccca

SEQ ID NO: 2614585 - RNA, 21 nt, Human
cugcccuccccagagcacugg

SEQ ID NO: 2614586 - RNA, 20 nt, Human
cugcccuccccucucugcac

SEQ ID NO: 2614587 - RNA, 23 nt, Human
cugcccggcgcccucuguccuga

SEQ ID NO: 2614588 - RNA, 22 nt, Human
cugcccggcgcccucuguccug

SEQ ID NO: 2614589 - RNA, 21 nt, Human
cugcccgggaaggucaccagc

SEQ ID NO: 2614590 - RNA, 17 nt, Human
cugcccuccccagagca

SEQ ID NO: 2614591 - RNA, 15 nt, Human
cugcccuccaucccg

SEQ ID NO: 2614592 - RNA, 14 nt, Human
cugcccuccccucu

SEQ ID NO: 2614593 - RNA, 22 nt, Human
cugcccuccagcucuuuccucc

SEQ ID NO: 2614594 - RNA, 14 nt, Human
cugcccuccauccc

SEQ ID NO: 2614595 - RNA, 10 nt, Human
cugcccuccc

SEQ ID NO: 2614596 - RNA, 15 nt, Human
cugccaggagcuuug

SEQ ID NO: 2614597 - RNA, 22 nt, Human
cugccagccuggcuucuggagc

SEQ ID NO: 2614598 - RNA, 23 nt, Human
cugccagccuggcuucuggagcc

SEQ ID NO: 2614599 - RNA, 15 nt, Human
cugccaggcaggggu

SEQ ID NO: 2614600 - RNA, 17 nt, Human
cugccaugccagcuuau

SEQ ID NO: 2614601 - RNA, 12 nt, Human
cugccaggcagg

SEQ ID NO: 2614602 - RNA, 13 nt, Human
cugccaggcaggg

SEQ ID NO: 2614603 - RNA, 19 nt, Human
cugccaugccagcuuaucu

SEQ ID NO: 2614604 - RNA, 19 nt, Human
cugccaggaagccagcagg

SEQ ID NO: 2614605 - RNA, 18 nt, Human
cugccaggaagccagcag

SEQ ID NO: 2614606 - RNA, 16 nt, Human
cugccaggaagccagc

SEQ ID NO: 2614607 - RNA, 15 nt, Human
cugccaggaagccag

SEQ ID NO: 2614608 - RNA, 19 nt, Human
cugccagccgagauagcca

SEQ ID NO: 2614609 - RNA, 20 nt, Human
cugccagccagcagccagcu

SEQ ID NO: 2614610 - RNA, 23 nt, Human
cugccagccagcagccagcucuc

SEQ ID NO: 2614611 - RNA, 12 nt, Human
cugccagccugg

SEQ ID NO: 2614612 - RNA, 13 nt, Human
cugccagccuggc

SEQ ID NO: 2614613 - RNA, 14 nt, Human
cugccagccuggcu

SEQ ID NO: 2614614 - RNA, 15 nt, Human
cugccagccuggcuu

SEQ ID NO: 2614615 - RNA, 16 nt, Human
cugccagccuggcuuc

SEQ ID NO: 2614616 - RNA, 19 nt, Human
cugccagccuggcuucugg

SEQ ID NO: 2614617 - RNA, 20 nt, Human
cugccagccuggcuucugga

SEQ ID NO: 2614618 - RNA, 20 nt, Human
cugccacccuggggagaaag

SEQ ID NO: 2614619 - RNA, 16 nt, Human
cugccacccuggggag

SEQ ID NO: 2614620 - RNA, 17 nt, Human
cugccaccauccugcug

SEQ ID NO: 2614621 - RNA, 14 nt, Human
cugccaccauccug

SEQ ID NO: 2614622 - RNA, 17 nt, Human
cugccaccagucacugu

SEQ ID NO: 2614623 - RNA, 14 nt, Human
cugccaccagucac

SEQ ID NO: 2614624 - RNA, 19 nt, Human
cugccaccauccugcugcu

SEQ ID NO: 2614625 - RNA, 14 nt, Human
cugccacccaccuc

SEQ ID NO: 2614626 - RNA, 15 nt, Human
cugccacccaccucc

SEQ ID NO: 2614627 - RNA, 17 nt, Human
cugccacccaccucccu

SEQ ID NO: 2614628 - RNA, 15 nt, Human
cugccacccugggga

SEQ ID NO: 2614629 - RNA, 18 nt, Human
cugccacccaccucccug

SEQ ID NO: 2614630 - RNA, 12 nt, Human
cugccagccaca

SEQ ID NO: 2614631 - RNA, 12 nt, Human
cugccagccagc

SEQ ID NO: 2614632 - RNA, 13 nt, Human
cugccagccagca

SEQ ID NO: 2614633 - RNA, 14 nt, Human
cugccagccagcag

SEQ ID NO: 2614634 - RNA, 15 nt, Human
cugccagccagcagc

SEQ ID NO: 2614635 - RNA, 16 nt, Human
cugccagccagcagcc

SEQ ID NO: 2614636 - RNA, 18 nt, Human
cugccagccagcagccag

SEQ ID NO: 2614637 - RNA, 19 nt, Human
cugccagccagcagccagc

SEQ ID NO: 2614638 - RNA, 12 nt, Human
cugccaccaguc

SEQ ID NO: 2614639 - RNA, 22 nt, Human
cugccaccagagaccguccuca

SEQ ID NO: 2614640 - RNA, 23 nt, Human
cugccaccaggccaccuccccag

SEQ ID NO: 2614641 - RNA, 18 nt, Human
cugccaccaggccaccuc

SEQ ID NO: 2614642 - RNA, 17 nt, Human
cugccaccaggccaccu

SEQ ID NO: 2614643 - RNA, 15 nt, Human
cugccaccaggccac

SEQ ID NO: 2614644 - RNA, 14 nt, Human
cugccaccaggcca

SEQ ID NO: 2614645 - RNA, 21 nt, Human
cugccaccagagaccguccuc

SEQ ID NO: 2614646 - RNA, 15 nt, Human
cugccaccagagacc

SEQ ID NO: 2614647 - RNA, 13 nt, Human
cugccaccaggcc

SEQ ID NO: 2614648 - RNA, 21 nt, Human
cugccacagccuccccugcca

SEQ ID NO: 2614649 - RNA, 22 nt, Human
cugccacagccuccccugccag

SEQ ID NO: 2614650 - RNA, 15 nt, Human
cugccaccaaaggcc

SEQ ID NO: 2614651 - RNA, 12 nt, Human
cugcaggggcuc

SEQ ID NO: 2614652 - RNA, 23 nt, Human
cugccacagccuccccugccagg

SEQ ID NO: 2614653 - RNA, 14 nt, Human
cugccaccagagac

SEQ ID NO: 2614654 - RNA, 18 nt, Human
cugccaccaccagaaagc

SEQ ID NO: 2614655 - RNA, 22 nt, Human
cugccaccaaaggccaggguca

SEQ ID NO: 2614656 - RNA, 18 nt, Human
cugccaccaaaggccagg

SEQ ID NO: 2614657 - RNA, 19 nt, Human
cugccaccacgcccggcua

SEQ ID NO: 2614658 - RNA, 22 nt, Human
cugccacacuucaggcucuucu

SEQ ID NO: 2614659 - RNA, 17 nt, Human
cugccacacuucaggcu

SEQ ID NO: 2614660 - RNA, 14 nt, Human
cugcaggggcucug

SEQ ID NO: 2614661 - RNA, 24 nt, Human
cugccacacgucugacccucucca

SEQ ID NO: 2614662 - RNA, 13 nt, Human
cugccacacuuca

SEQ ID NO: 2614663 - RNA, 22 nt, Human
cugcagggcccucccuuuuccc

SEQ ID NO: 2614664 - RNA, 21 nt, Human
cugcagggccaggacugagcc

SEQ ID NO: 2614665 - RNA, 17 nt, Human
cugcagggccaggacug

SEQ ID NO: 2614666 - RNA, 16 nt, Human
cugcagggccaggacu

SEQ ID NO: 2614667 - RNA, 15 nt, Human
cugcagggccaggac

SEQ ID NO: 2614668 - RNA, 14 nt, Human
cugcagggccagga

SEQ ID NO: 2614669 - RNA, 11 nt, Human
cugcaggggcu

SEQ ID NO: 2614670 - RNA, 23 nt, Human
cugccugagggccccucugccca

SEQ ID NO: 2614671 - RNA, 22 nt, Human
cugccugagggccccucugccc

SEQ ID NO: 2614672 - RNA, 21 nt, Human
cugccugagggccccucugcc

SEQ ID NO: 2614673 - RNA, 20 nt, Human
cugccugagggccccucugc

SEQ ID NO: 2614674 - RNA, 18 nt, Human
cugccugagggccccucu

SEQ ID NO: 2614675 - RNA, 17 nt, Human
cugccugagggccccuc

SEQ ID NO: 2614676 - RNA, 16 nt, Human
cugccugagggccccu

SEQ ID NO: 2614677 - RNA, 15 nt, Human
cugccugagggcccc

SEQ ID NO: 2614678 - RNA, 20 nt, Human
cugccugacauuuggagugu

SEQ ID NO: 2614679 - RNA, 23 nt, Human
cugccugacauuuggaguguucc

SEQ ID NO: 2614680 - RNA, 12 nt, Human
cugccugagcuu

SEQ ID NO: 2614681 - RNA, 16 nt, Human
cugccugauggaccug

SEQ ID NO: 2614682 - RNA, 16 nt, Human
cugccugcccacacag

SEQ ID NO: 2614683 - RNA, 13 nt, Human
cugccugcccacc

SEQ ID NO: 2614684 - RNA, 14 nt, Human
cugccugcccaccc

SEQ ID NO: 2614685 - RNA, 13 nt, Human
cugccugcccaca

SEQ ID NO: 2614686 - RNA, 15 nt, Human
cugccugcccaggcc

SEQ ID NO: 2614687 - RNA, 20 nt, Human
cugccuuaaagucaguaacu

SEQ ID NO: 2614688 - RNA, 22 nt, Human
cugccuuaaaaccaaagagggc

SEQ ID NO: 2614689 - RNA, 19 nt, Human
cugccuuaaaaccaaagag

SEQ ID NO: 2614690 - RNA, 18 nt, Human
cugccuuaaaaccaaaga

SEQ ID NO: 2614691 - RNA, 17 nt, Human
cugccuuaaaaccaaag

SEQ ID NO: 2614692 - RNA, 16 nt, Human
cugccuuaaaaccaaa

SEQ ID NO: 2614693 - RNA, 15 nt, Human
cugccugcccacccg

SEQ ID NO: 2614694 - RNA, 16 nt, Human
cugccugcccacccgu

SEQ ID NO: 2614695 - RNA, 14 nt, Human
cugccugcccaggc

SEQ ID NO: 2614696 - RNA, 13 nt, Human
cugccugcccagg

SEQ ID NO: 2614697 - RNA, 13 nt, Human
cugccucucugca

SEQ ID NO: 2614698 - RNA, 12 nt, Human
cugccucucugc

SEQ ID NO: 2614699 - RNA, 14 nt, Human
cugccucucugcag

SEQ ID NO: 2614700 - RNA, 18 nt, Human
cugccucucgguggccag

SEQ ID NO: 2614701 - RNA, 12 nt, Human
cugccucuuccu

SEQ ID NO: 2614702 - RNA, 22 nt, Human
cugccucuucccccugcuucca

SEQ ID NO: 2614703 - RNA, 21 nt, Human
cugccucuucccccugcuucc

SEQ ID NO: 2614704 - RNA, 15 nt, Human
cugccucuucccccu

SEQ ID NO: 2614705 - RNA, 23 nt, Human
cugccucuuagacuucugcuuuc

SEQ ID NO: 2614706 - RNA, 22 nt, Human
cugccucuuagacuucugcuuu

SEQ ID NO: 2614707 - RNA, 20 nt, Human
cugccucuguuugacaaacc

SEQ ID NO: 2614708 - RNA, 19 nt, Human
cugccucuuagacuucugc

SEQ ID NO: 2614709 - RNA, 13 nt, Human
cugccucuucucu

SEQ ID NO: 2614710 - RNA, 23 nt, Human
cugccugaagucacacagugagu

SEQ ID NO: 2614711 - RNA, 14 nt, Human
cugccucuucucua

SEQ ID NO: 2614712 - RNA, 15 nt, Human
cugcccugggaggca

SEQ ID NO: 2614713 - RNA, 22 nt, Human
cugcccugggaggcagugaugg

SEQ ID NO: 2614714 - RNA, 20 nt, Human
cugcccuggcugcugccccc

SEQ ID NO: 2614715 - RNA, 18 nt, Human
cugcccuggcugcugccc

SEQ ID NO: 2614716 - RNA, 21 nt, Human
cugcccuggcugcugccccca

SEQ ID NO: 2614717 - RNA, 19 nt, Human
cugcccugggauguccaca

SEQ ID NO: 2614718 - RNA, 12 nt, Human
cugcccugggag

SEQ ID NO: 2614719 - RNA, 13 nt, Human
cugcccugggagg

SEQ ID NO: 2614720 - RNA, 11 nt, Human
cugcccuggga

SEQ ID NO: 2614721 - RNA, 16 nt, Human
cugcccugccacuuug

SEQ ID NO: 2614722 - RNA, 15 nt, Human
cugccuaagugcagc

SEQ ID NO: 2614723 - RNA, 13 nt, Human
cugccuauuuuaa

SEQ ID NO: 2614724 - RNA, 18 nt, Human
cugccuaaguggcugcug

SEQ ID NO: 2614725 - RNA, 21 nt, Human
cugccucaaugugaaucagac

SEQ ID NO: 2614726 - RNA, 15 nt, Human
cugccucacagcugg

SEQ ID NO: 2614727 - RNA, 24 nt, Human
cugccucaaugugaaucagacccu

SEQ ID NO: 2614728 - RNA, 21 nt, Human
cugcccugggauguccacaga

SEQ ID NO: 2614729 - RNA, 14 nt, Human
cugccuaaguggcu

SEQ ID NO: 2614730 - RNA, 15 nt, Human
cugccuaaguggcug

SEQ ID NO: 2614731 - RNA, 16 nt, Human
cugccuaaguggcugc

SEQ ID NO: 2614732 - RNA, 13 nt, Human
cugccucagccuc

SEQ ID NO: 2614733 - RNA, 23 nt, Human
cugccucacagcuggccgucacu

SEQ ID NO: 2614734 - RNA, 14 nt, Human
cugccucacuuccu

SEQ ID NO: 2614735 - RNA, 23 nt, Human
cugccucacuuccuacaagagca

SEQ ID NO: 2614736 - RNA, 12 nt, Human
cugccucagccu

SEQ ID NO: 2614737 - RNA, 12 nt, Human
cugccucaggac

SEQ ID NO: 2614738 - RNA, 14 nt, Human
cugccucagcccgc

SEQ ID NO: 2614739 - RNA, 11 nt, Human
cugccucagga

SEQ ID NO: 2614740 - RNA, 13 nt, Human
cugccucaggacu

SEQ ID NO: 2614741 - RNA, 14 nt, Human
cugccucaggacug

SEQ ID NO: 2614742 - RNA, 14 nt, Human
cugccucagccucc

SEQ ID NO: 2614743 - RNA, 21 nt, Human
cugccuccacccucugagcuu

SEQ ID NO: 2614744 - RNA, 20 nt, Human
cugccuccacccucugagcu

SEQ ID NO: 2614745 - RNA, 18 nt, Human
cugccuccacccucugag

SEQ ID NO: 2614746 - RNA, 17 nt, Human
cugccuccacccucuga

SEQ ID NO: 2614747 - RNA, 16 nt, Human
cugccuccacccucug

SEQ ID NO: 2614748 - RNA, 15 nt, Human
cugccuccacccucu

SEQ ID NO: 2614749 - RNA, 12 nt, Human
cugccuccaccc

SEQ ID NO: 2614750 - RNA, 13 nt, Human
cugccucauuuag

SEQ ID NO: 2614751 - RNA, 16 nt, Human
cugccucucccuggcc

SEQ ID NO: 2614752 - RNA, 15 nt, Human
cugccuccacuccca

SEQ ID NO: 2614753 - RNA, 14 nt, Human
cugccuccacuccc

SEQ ID NO: 2614754 - RNA, 13 nt, Human
cugccuccacucc

SEQ ID NO: 2614755 - RNA, 19 nt, Human
cugccucucccuggcccuc

SEQ ID NO: 2614756 - RNA, 17 nt, Human
cugccucucccuggccc

SEQ ID NO: 2614757 - RNA, 18 nt, Human
cugccucucccuggcccu

SEQ ID NO: 2614758 - RNA, 22 nt, Human
cugccucaggaggcaggaccuu

SEQ ID NO: 2614759 - RNA, 23 nt, Human
cugccucaggaggcaggaccuuc

SEQ ID NO: 2614760 - RNA, 17 nt, Human
cugccucagguuccuau

SEQ ID NO: 2614761 - RNA, 13 nt, Human
cugccucagguuc

SEQ ID NO: 2614762 - RNA, 18 nt, Human
cugccucagguuccuaug

SEQ ID NO: 2614763 - RNA, 12 nt, Human
cugccucauuua

SEQ ID NO: 2614764 - RNA, 12 nt, Human
cugccucagguu

SEQ ID NO: 2614765 - RNA, 18 nt, Human
cugcuaaguauuucccag

SEQ ID NO: 2614766 - RNA, 23 nt, Human
cugcuaacuuggagccccagugc

SEQ ID NO: 2614767 - RNA, 21 nt, Human
cugcuaacuuggagccccagu

SEQ ID NO: 2614768 - RNA, 20 nt, Human
cugcuaacuuggagccccag

SEQ ID NO: 2614769 - RNA, 17 nt, Human
cugcuaaguauuuccca

SEQ ID NO: 2614770 - RNA, 13 nt, Human
cugcuccagaccu

SEQ ID NO: 2614771 - RNA, 14 nt, Human
cugcuccagaccug

SEQ ID NO: 2614772 - RNA, 15 nt, Human
cugcuccagaccuga

SEQ ID NO: 2614773 - RNA, 14 nt, Human
cugcuccagcuguu

SEQ ID NO: 2614774 - RNA, 18 nt, Human
cugcguucuugugacaga

SEQ ID NO: 2614775 - RNA, 20 nt, Human
cugcguuuuggaagcucuga

SEQ ID NO: 2614776 - RNA, 15 nt, Human
cugcuaaauaaaauu

SEQ ID NO: 2614777 - RNA, 12 nt, Human
cugcuaaauaaa

SEQ ID NO: 2614778 - RNA, 23 nt, Human
cugcuaaauaaaauuuguugcau

SEQ ID NO: 2614779 - RNA, 16 nt, Human
cugcgguccacccagg

SEQ ID NO: 2614780 - RNA, 17 nt, Human
cugcgguccacccagga

SEQ ID NO: 2614781 - RNA, 18 nt, Human
cugcguggggacagggcu

SEQ ID NO: 2614782 - RNA, 19 nt, Human
cugcgugucaccugugcuu

SEQ ID NO: 2614783 - RNA, 20 nt, Human
cugcguggggacagggcucg

SEQ ID NO: 2614784 - RNA, 20 nt, Human
cugcggaccccagcugugag

SEQ ID NO: 2614785 - RNA, 16 nt, Human
cugcggaccccagcug

SEQ ID NO: 2614786 - RNA, 15 nt, Human
cugcggaccccagcu

SEQ ID NO: 2614787 - RNA, 14 nt, Human
cugcggaccccagc

SEQ ID NO: 2614788 - RNA, 13 nt, Human
cugcggaccccag

SEQ ID NO: 2614789 - RNA, 14 nt, Human
cugcggaaaaggaa

SEQ ID NO: 2614790 - RNA, 17 nt, Human
cugcgcuugcuuuucug

SEQ ID NO: 2614791 - RNA, 21 nt, Human
cugcggaaugaaccacaucuu

SEQ ID NO: 2614792 - RNA, 13 nt, Human
cugcggguggggc

SEQ ID NO: 2614793 - RNA, 23 nt, Human
cugcggaccccagcugugagccu

SEQ ID NO: 2614794 - RNA, 23 nt, Human
cugcgggugaacaaagcagccac

SEQ ID NO: 2614795 - RNA, 21 nt, Human
cugcggguggggcuuggggcu

SEQ ID NO: 2614796 - RNA, 22 nt, Human
cugcgguagaugggagggaggc

SEQ ID NO: 2614797 - RNA, 15 nt, Human
cugcgguccacccag

SEQ ID NO: 2614798 - RNA, 15 nt, Human
cugccuuaucuugca

SEQ ID NO: 2614799 - RNA, 23 nt, Human
cugccuuagucucaguuugugug

SEQ ID NO: 2614800 - RNA, 20 nt, Human
cugccuuagucucaguuugu

SEQ ID NO: 2614801 - RNA, 16 nt, Human
cugccuuagucucagu

SEQ ID NO: 2614802 - RNA, 19 nt, Human
cugccuuagagccaggcac

SEQ ID NO: 2614803 - RNA, 17 nt, Human
cugccuuagagccaggc

SEQ ID NO: 2614804 - RNA, 15 nt, Human
cugccuuagagccag

SEQ ID NO: 2614805 - RNA, 17 nt, Human
cugccuuaucuugcacc

SEQ ID NO: 2614806 - RNA, 13 nt, Human
cugcgcuugcuuu

SEQ ID NO: 2614807 - RNA, 20 nt, Human
cugcggaaugaaccacaucu

SEQ ID NO: 2614808 - RNA, 18 nt, Human
cugcuccuuccuucaccu

SEQ ID NO: 2614809 - RNA, 15 nt, Human
cugcucgccuuagca

SEQ ID NO: 2614810 - RNA, 20 nt, Human
cugcuccuggagccuuugaa

SEQ ID NO: 2614811 - RNA, 19 nt, Human
cugcuccuggagccuuuga

SEQ ID NO: 2614812 - RNA, 15 nt, Human
cugcuccuggagccu

SEQ ID NO: 2614813 - RNA, 13 nt, Human
cugcuccuggagc

SEQ ID NO: 2614814 - RNA, 18 nt, Human
cugcuccucuccccagca

SEQ ID NO: 2614815 - RNA, 17 nt, Human
cugcucgggcccaggcc

SEQ ID NO: 2614816 - RNA, 16 nt, Human
cugcucgggcccaggc

SEQ ID NO: 2614817 - RNA, 15 nt, Human
cugcucgggcccagg

SEQ ID NO: 2614818 - RNA, 14 nt, Human
cugcucgggcccag

SEQ ID NO: 2614819 - RNA, 13 nt, Human
cugcucgggccca

SEQ ID NO: 2614820 - RNA, 16 nt, Human
cugcucgccuuagcac

SEQ ID NO: 2614821 - RNA, 19 nt, Human
cugcucuccuuccuggagc

SEQ ID NO: 2614822 - RNA, 17 nt, Human
cugcucuccuuccugga

SEQ ID NO: 2614823 - RNA, 22 nt, Human
cugcucgggcccaggccaucuu

SEQ ID NO: 2614824 - RNA, 19 nt, Human
cugcucgggcccaggccau

SEQ ID NO: 2614825 - RNA, 16 nt, Human
cugcucuccuuccugg

SEQ ID NO: 2614826 - RNA, 22 nt, Human
cugcucugaauuaguccuugcu

SEQ ID NO: 2614827 - RNA, 21 nt, Human
cugcucugaauuaguccuugc

SEQ ID NO: 2614828 - RNA, 20 nt, Human
cugcucuccuuccuggagcc

SEQ ID NO: 2614829 - RNA, 22 nt, Human
cugcucccugaagccagccuuc

SEQ ID NO: 2614830 - RNA, 21 nt, Human
cugcucccugaagccagccuu

SEQ ID NO: 2614831 - RNA, 20 nt, Human
cugcucccugaagccagccu

SEQ ID NO: 2614832 - RNA, 19 nt, Human
cugcucccugaagccagcc

SEQ ID NO: 2614833 - RNA, 18 nt, Human
cugcucccugaagccagc

SEQ ID NO: 2614834 - RNA, 17 nt, Human
cugcucccugaagccag

SEQ ID NO: 2614835 - RNA, 16 nt, Human
cugcucccugaagcca

SEQ ID NO: 2614836 - RNA, 15 nt, Human
cugcucccugaagcc

SEQ ID NO: 2614837 - RNA, 17 nt, Human
cugcuccucuccaggca

SEQ ID NO: 2614838 - RNA, 16 nt, Human
cugcuccucuccaggc

SEQ ID NO: 2614839 - RNA, 15 nt, Human
cugcuccucuccagg

SEQ ID NO: 2614840 - RNA, 14 nt, Human
cugcuccucuccag

SEQ ID NO: 2614841 - RNA, 17 nt, Human
cugcuccucuccccagc

SEQ ID NO: 2614842 - RNA, 16 nt, Human
cugcuccucuccccag

SEQ ID NO: 2614843 - RNA, 21 nt, Human
cugcuccagaccugauccugg

SEQ ID NO: 2614844 - RNA, 22 nt, Human
cugcuccagaccugauccugga

SEQ ID NO: 2614845 - RNA, 15 nt, Human
cugcuccagcuguuc

SEQ ID NO: 2614846 - RNA, 14 nt, Human
cugcucccugaagc

SEQ ID NO: 2614847 - RNA, 13 nt, Human
cugcuccccuccc

SEQ ID NO: 2614848 - RNA, 17 nt, Human
cugcuccccucccuccu

SEQ ID NO: 2614849 - RNA, 12 nt, Human
cugcagggaaaa

SEQ ID NO: 2614850 - RNA, 22 nt, Human
cugcagggaaaauuauuugcau

SEQ ID NO: 2614851 - RNA, 17 nt, Human
cugcagggacugccagu

SEQ ID NO: 2614852 - RNA, 15 nt, Human
cugcagggacugcca

SEQ ID NO: 2614853 - RNA, 23 nt, Human
cugcagggaaaauuauuugcaua

SEQ ID NO: 2614854 - RNA, 13 nt, Human
cugcagggccagg

SEQ ID NO: 2614855 - RNA, 16 nt, Human
cugcagggccaagcac

SEQ ID NO: 2614856 - RNA, 22 nt, Human
cugcagggaguccgaaagggac

SEQ ID NO: 2614857 - RNA, 20 nt, Human
cugcagccucaaccuccugg

SEQ ID NO: 2614858 - RNA, 19 nt, Human
cugcagccucaaccuccug

SEQ ID NO: 2614859 - RNA, 21 nt, Human
cugcaggcccuggccuccccu

SEQ ID NO: 2614860 - RNA, 22 nt, Human
cugcagccucaaccuccugggc

SEQ ID NO: 2614861 - RNA, 16 nt, Human
cugcagccaggccacu

SEQ ID NO: 2614862 - RNA, 17 nt, Human
cugcagccaggccacug

SEQ ID NO: 2614863 - RNA, 22 nt, Human
cugcagccaggccacuggcccc

SEQ ID NO: 2614864 - RNA, 23 nt, Human
cugcagccaggccacuggccccu

SEQ ID NO: 2614865 - RNA, 16 nt, Human
cugcagcccagggacc

SEQ ID NO: 2614866 - RNA, 12 nt, Human
cugcagcccagg

SEQ ID NO: 2614867 - RNA, 23 nt, Human
cugcagccagcccagcccagcug

SEQ ID NO: 2614868 - RNA, 24 nt, Human
cugcagcccggcgccaccauccug

SEQ ID NO: 2614869 - RNA, 11 nt, Human
cugcagccuca

SEQ ID NO: 2614870 - RNA, 17 nt, Human
cugcagauuugggcugg

SEQ ID NO: 2614871 - RNA, 15 nt, Human
cugcagccaggccac

SEQ ID NO: 2614872 - RNA, 17 nt, Human
cugcagaguuuccaaaa

SEQ ID NO: 2614873 - RNA, 23 nt, Human
cugcagaggucugugcugaggcc

SEQ ID NO: 2614874 - RNA, 22 nt, Human
cugcagaggucugugcugaggc

SEQ ID NO: 2614875 - RNA, 22 nt, Human
cugcagaggggcaggcccugca

SEQ ID NO: 2614876 - RNA, 21 nt, Human
cugcagaggggcaggcccugc

SEQ ID NO: 2614877 - RNA, 19 nt, Human
cugcagaggggcuuucugg

SEQ ID NO: 2614878 - RNA, 20 nt, Human
cugcagaggggcuuucugga

SEQ ID NO: 2614879 - RNA, 22 nt, Human
cugcagaggggcuuucuggaga

SEQ ID NO: 2614880 - RNA, 21 nt, Human
cugcagaggucugugcugagg

SEQ ID NO: 2614881 - RNA, 19 nt, Human
cugcagaggucugugcuga

SEQ ID NO: 2614882 - RNA, 18 nt, Human
cugcagaggucugugcug

SEQ ID NO: 2614883 - RNA, 17 nt, Human
cugcagaggucugugcu

SEQ ID NO: 2614884 - RNA, 16 nt, Human
cugcagaggucugugc

SEQ ID NO: 2614885 - RNA, 23 nt, Human
cugcagaggggcaggcccugcac

SEQ ID NO: 2614886 - RNA, 23 nt, Human
cugcagaggggcuuucuggagag

SEQ ID NO: 2614887 - RNA, 20 nt, Human
cugcacccuccacccugucc

SEQ ID NO: 2614888 - RNA, 18 nt, Human
cugcacccuccacccugu

SEQ ID NO: 2614889 - RNA, 17 nt, Human
cugcacccuccacccug

SEQ ID NO: 2614890 - RNA, 16 nt, Human
cugcacccuccacccu

SEQ ID NO: 2614891 - RNA, 19 nt, Human
cugcaccggcuggccuggc

SEQ ID NO: 2614892 - RNA, 18 nt, Human
cugcaccggcuggccugg

SEQ ID NO: 2614893 - RNA, 17 nt, Human
cugcaccggcuggccug

SEQ ID NO: 2614894 - RNA, 17 nt, Human
cugcacuugcagacucu

SEQ ID NO: 2614895 - RNA, 16 nt, Human
cugcacuugcagacuc

SEQ ID NO: 2614896 - RNA, 19 nt, Human
cugcacuuauacccaugaa

SEQ ID NO: 2614897 - RNA, 21 nt, Human
cugcacccuccacccuguccc

SEQ ID NO: 2614898 - RNA, 16 nt, Human
cugcacuuacuugcuu

SEQ ID NO: 2614899 - RNA, 17 nt, Human
cugcacccucccuccga

SEQ ID NO: 2614900 - RNA, 15 nt, Human
cugcacuuacuugcu

SEQ ID NO: 2614901 - RNA, 14 nt, Human
cugcacuugcagac

SEQ ID NO: 2614902 - RNA, 12 nt, Human
cugcagagcugc

SEQ ID NO: 2614903 - RNA, 21 nt, Human
cugcagagcugcgggcugggu

SEQ ID NO: 2614904 - RNA, 19 nt, Human
cugcagaggggcaggcccu

SEQ ID NO: 2614905 - RNA, 17 nt, Human
cugcagaggggcaggcc

SEQ ID NO: 2614906 - RNA, 15 nt, Human
cugcagaggggcagg

SEQ ID NO: 2614907 - RNA, 14 nt, Human
cugcagaggggcag

SEQ ID NO: 2614908 - RNA, 13 nt, Human
cugcagaggggca

SEQ ID NO: 2614909 - RNA, 21 nt, Human
cugcagagcagugggccuggc

SEQ ID NO: 2614910 - RNA, 23 nt, Human
cugcagagcagugggccuggcca

SEQ ID NO: 2614911 - RNA, 18 nt, Human
cugcagagcagugggccu

SEQ ID NO: 2614912 - RNA, 20 nt, Human
cugcagagcaggaaacauga

SEQ ID NO: 2614913 - RNA, 13 nt, Human
cugcagaagacag

SEQ ID NO: 2614914 - RNA, 20 nt, Human
cugcagaacguauuggucca

SEQ ID NO: 2614915 - RNA, 21 nt, Human
cugcagaacguauugguccag

SEQ ID NO: 2614916 - RNA, 23 nt, Human
cugcagaacguauugguccagcu

SEQ ID NO: 2614917 - RNA, 23 nt, Human
cugcagaagacaguauggcagcu

SEQ ID NO: 2614918 - RNA, 14 nt, Human
cugcagagagaagc

SEQ ID NO: 2614919 - RNA, 13 nt, Human
cugcagaaggaaa

SEQ ID NO: 2614920 - RNA, 17 nt, Human
cugcagagacagagagg

SEQ ID NO: 2614921 - RNA, 16 nt, Human
cugcaauugcuuagga

SEQ ID NO: 2614922 - RNA, 15 nt, Human
cugcaauugcuuagg

SEQ ID NO: 2614923 - RNA, 20 nt, Human
cugcaauuccccucugcugc

SEQ ID NO: 2614924 - RNA, 17 nt, Human
cugcaauuccccucugc

SEQ ID NO: 2614925 - RNA, 16 nt, Human
cugcaauuccccucug

SEQ ID NO: 2614926 - RNA, 15 nt, Human
cugcaauuccccucu

SEQ ID NO: 2614927 - RNA, 23 nt, Human
cugcaauuaaagugauacugaaa

SEQ ID NO: 2614928 - RNA, 16 nt, Human
cugcaauguuuuccuu

SEQ ID NO: 2614929 - RNA, 15 nt, Human
cugcaauguuuuccu

SEQ ID NO: 2614930 - RNA, 18 nt, Human
cugcaaugugggcagaga

SEQ ID NO: 2614931 - RNA, 21 nt, Human
cugcaaugggcacugggauga

SEQ ID NO: 2614932 - RNA, 17 nt, Human
cugcaaugggcacuggg

SEQ ID NO: 2614933 - RNA, 23 nt, Human
cugcaauccugucuuucugagca

SEQ ID NO: 2614934 - RNA, 22 nt, Human
cugcaaucuucucagaaggcaa

SEQ ID NO: 2614935 - RNA, 18 nt, Human
cugcaaugaagucucuga

SEQ ID NO: 2614936 - RNA, 21 nt, Human
cugcaaugaagucucugaagu

SEQ ID NO: 2614937 - RNA, 18 nt, Human
cugcaauuucauaugcug

SEQ ID NO: 2614938 - RNA, 20 nt, Human
cugcaauuucauaugcugua

SEQ ID NO: 2614939 - RNA, 13 nt, Human
cugcacaaagccc

SEQ ID NO: 2614940 - RNA, 20 nt, Human
cugcacaaagcccuuccaug

SEQ ID NO: 2614941 - RNA, 18 nt, Human
cugcacaaagcccuucca

SEQ ID NO: 2614942 - RNA, 20 nt, Human
cugcaauugcuuaggauguu

SEQ ID NO: 2614943 - RNA, 16 nt, Human
cugcacaaacucacca

SEQ ID NO: 2614944 - RNA, 21 nt, Human
cugcacaaagcccuuccaugu

SEQ ID NO: 2614945 - RNA, 16 nt, Human
cugcaauccugucuuu

SEQ ID NO: 2614946 - RNA, 15 nt, Human
cugcaauccugucuu

SEQ ID NO: 2614947 - RNA, 17 nt, Human
cugcaaacgcugccugc

SEQ ID NO: 2614948 - RNA, 15 nt, Human
cugcaaacgcugccu

SEQ ID NO: 2614949 - RNA, 16 nt, Human
cugcaaacgcugccug

SEQ ID NO: 2614950 - RNA, 20 nt, Human
cugcaaaccugaccccugcu

SEQ ID NO: 2614951 - RNA, 13 nt, Human
cugcaaacgcugc

SEQ ID NO: 2614952 - RNA, 18 nt, Human
cugcaaaccugaccccug

SEQ ID NO: 2614953 - RNA, 23 nt, Human
cugcaaaauuugaugccaggaca

SEQ ID NO: 2614954 - RNA, 23 nt, Human
cugcaaacaugggguuggcuggg

SEQ ID NO: 2614955 - RNA, 22 nt, Human
cugcaaacaccaacauguuggg

SEQ ID NO: 2614956 - RNA, 22 nt, Human
cugcaaaaugaggaauguauau

SEQ ID NO: 2614957 - RNA, 11 nt, Human
cugcaaaauuu

SEQ ID NO: 2614958 - RNA, 13 nt, Human
cugcaaaauuuua

SEQ ID NO: 2614959 - RNA, 21 nt, Human
cugauucucagggucucugcu

SEQ ID NO: 2614960 - RNA, 20 nt, Human
cugauucucagggucucugc

SEQ ID NO: 2614961 - RNA, 18 nt, Human
cugauucucagggucucu

SEQ ID NO: 2614962 - RNA, 17 nt, Human
cugauucucagggucuc

SEQ ID NO: 2614963 - RNA, 15 nt, Human
cugauucucaggguc

SEQ ID NO: 2614964 - RNA, 14 nt, Human
cugauucucagggu

SEQ ID NO: 2614965 - RNA, 23 nt, Human
cugauucggcugucucagacucu

SEQ ID NO: 2614966 - RNA, 17 nt, Human
cugauucggcugucuca

SEQ ID NO: 2614967 - RNA, 17 nt, Human
cugcaaaaggacucuca

SEQ ID NO: 2614968 - RNA, 16 nt, Human
cugauuggcucaccca

SEQ ID NO: 2614969 - RNA, 14 nt, Human
cugauuggcucacc

SEQ ID NO: 2614970 - RNA, 15 nt, Human
cugauuggacauuuu

SEQ ID NO: 2614971 - RNA, 18 nt, Human
cugcaaaaggacucucag

SEQ ID NO: 2614972 - RNA, 21 nt, Human
cugcaaaaugaggaauguaua

SEQ ID NO: 2614973 - RNA, 19 nt, Human
cugcaaaaugaggaaugua

SEQ ID NO: 2614974 - RNA, 12 nt, Human
cugcaaaaugag

SEQ ID NO: 2614975 - RNA, 14 nt, Human
cugcaaaaugagac

SEQ ID NO: 2614976 - RNA, 20 nt, Human
cugcacagggcagcugggcc

SEQ ID NO: 2614977 - RNA, 19 nt, Human
cugcacagggcagcugggc

SEQ ID NO: 2614978 - RNA, 18 nt, Human
cugcacagggcagcuggg

SEQ ID NO: 2614979 - RNA, 17 nt, Human
cugcacagggcagcugg

SEQ ID NO: 2614980 - RNA, 22 nt, Human
cugcacagggcagcugggccca

SEQ ID NO: 2614981 - RNA, 21 nt, Human
cugcacagggcagcugggccc

SEQ ID NO: 2614982 - RNA, 18 nt, Human
cugcacagugcaucucag

SEQ ID NO: 2614983 - RNA, 16 nt, Human
cugcacagggcagcug

SEQ ID NO: 2614984 - RNA, 19 nt, Human
cugcacagcggccccugca

SEQ ID NO: 2614985 - RNA, 13 nt, Human
cugcacagcggcc

SEQ ID NO: 2614986 - RNA, 18 nt, Human
cugcacaagcugcacccu

SEQ ID NO: 2614987 - RNA, 13 nt, Human
cugcacaagcugc

SEQ ID NO: 2614988 - RNA, 14 nt, Human
cugcacaagcugca

SEQ ID NO: 2614989 - RNA, 15 nt, Human
cugcacaagcugcac

SEQ ID NO: 2614990 - RNA, 16 nt, Human
cugcacaagcugcacc

SEQ ID NO: 2614991 - RNA, 17 nt, Human
cugcacccucaggcagg

SEQ ID NO: 2614992 - RNA, 19 nt, Human
cugcacccccuccugcugc

SEQ ID NO: 2614993 - RNA, 18 nt, Human
cugcacccccuccugcug

SEQ ID NO: 2614994 - RNA, 17 nt, Human
cugcacccccuccugcu

SEQ ID NO: 2614995 - RNA, 16 nt, Human
cugcacccccuccugc

SEQ ID NO: 2614996 - RNA, 14 nt, Human
cugcacccccuccu

SEQ ID NO: 2614997 - RNA, 13 nt, Human
cugcacccccucc

SEQ ID NO: 2614998 - RNA, 16 nt, Human
cugcaccccccugggc

SEQ ID NO: 2614999 - RNA, 17 nt, Human
cugcaccccccugggcu

SEQ ID NO: 2615000 - RNA, 15 nt, Human
cugcacccuccaccc

SEQ ID NO: 2615001 - RNA, 14 nt, Human
cugcacccuccacc

SEQ ID NO: 2615002 - RNA, 13 nt, Human
cugcacccuccac

SEQ ID NO: 2615003 - RNA, 12 nt, Human
cugcacccucca

SEQ ID NO: 2615004 - RNA, 16 nt, Human
cugcacccucaggcag

SEQ ID NO: 2615005 - RNA, 18 nt, Human
cugcacccucaggcaggu

SEQ ID NO: 2615006 - RNA, 23 nt, Human
cugcaccaacccagccgcugccc

SEQ ID NO: 2615007 - RNA, 21 nt, Human
cugcaccaacccagccgcugc

SEQ ID NO: 2615008 - RNA, 17 nt, Human
cugcaccaacccagccg

SEQ ID NO: 2615009 - RNA, 16 nt, Human
cugcaccaacccagcc

SEQ ID NO: 2615010 - RNA, 13 nt, Human
cugcaccaaccca

SEQ ID NO: 2615011 - RNA, 21 nt, Human
cugcacauuaaggagaaaucu

SEQ ID NO: 2615012 - RNA, 21 nt, Human
cugcacagugcaucucagccc

SEQ ID NO: 2615013 - RNA, 13 nt, Human
cugcacccagggg

SEQ ID NO: 2615014 - RNA, 12 nt, Human
cugcacccaggg

SEQ ID NO: 2615015 - RNA, 14 nt, Human
cugcaccccccugg

SEQ ID NO: 2615016 - RNA, 15 nt, Human
cugcaccccccuggg

SEQ ID NO: 2615017 - RNA, 11 nt, Human
cugcacccagg

SEQ ID NO: 2615018 - RNA, 17 nt, Human
cugagucguacagaaag

SEQ ID NO: 2615019 - RNA, 18 nt, Human
cugagucguacagaaagc

SEQ ID NO: 2615020 - RNA, 19 nt, Human
cugagucguacagaaagcu

SEQ ID NO: 2615021 - RNA, 20 nt, Human
cugagucguacagaaagcug

SEQ ID NO: 2615022 - RNA, 15 nt, Human
cugagucucccaagg

SEQ ID NO: 2615023 - RNA, 21 nt, Human
cugagucguacagaaagcugc

SEQ ID NO: 2615024 - RNA, 23 nt, Human
cugagucguacagaaagcugccu

SEQ ID NO: 2615025 - RNA, 22 nt, Human
cugaguccuuaaacagggcauc

SEQ ID NO: 2615026 - RNA, 21 nt, Human
cugaguccuuaaacagggcau

SEQ ID NO: 2615027 - RNA, 15 nt, Human
cugaguccuuaaaca

SEQ ID NO: 2615028 - RNA, 16 nt, Human
cugagggcuuccuuug

SEQ ID NO: 2615029 - RNA, 14 nt, Human
cugagggcuuccuu

SEQ ID NO: 2615030 - RNA, 16 nt, Human
cugagggcgaggggag

SEQ ID NO: 2615031 - RNA, 22 nt, Human
cugagggccccucugcccagcu

SEQ ID NO: 2615032 - RNA, 21 nt, Human
cugagggccccucugcccagc

SEQ ID NO: 2615033 - RNA, 20 nt, Human
cugagggccccucugcccag

SEQ ID NO: 2615034 - RNA, 19 nt, Human
cugagggccccucugccca

SEQ ID NO: 2615035 - RNA, 18 nt, Human
cugagggccccucugccc

SEQ ID NO: 2615036 - RNA, 17 nt, Human
cugagggccccucugcc

SEQ ID NO: 2615037 - RNA, 16 nt, Human
cugagggccccucugc

SEQ ID NO: 2615038 - RNA, 15 nt, Human
cugagggccccucug

SEQ ID NO: 2615039 - RNA, 13 nt, Human
cugagggccccuc

SEQ ID NO: 2615040 - RNA, 16 nt, Human
cugagggccacacuau

SEQ ID NO: 2615041 - RNA, 15 nt, Human
cugagggccacacua

SEQ ID NO: 2615042 - RNA, 14 nt, Human
cugagggccacacu

SEQ ID NO: 2615043 - RNA, 13 nt, Human
cugagggccacac

SEQ ID NO: 2615044 - RNA, 23 nt, Human
cugagggcagaaagguucugccc

SEQ ID NO: 2615045 - RNA, 20 nt, Human
cugagggcagaaagguucug

SEQ ID NO: 2615046 - RNA, 21 nt, Human
cugagggauggacugaugcuu

SEQ ID NO: 2615047 - RNA, 16 nt, Human
cugagggcagucgaua

SEQ ID NO: 2615048 - RNA, 19 nt, Human
cugagggaccaacugggcc

SEQ ID NO: 2615049 - RNA, 20 nt, Human
cugagggaccaacugggccc

SEQ ID NO: 2615050 - RNA, 21 nt, Human
cugagggaccaacugggccca

SEQ ID NO: 2615051 - RNA, 13 nt, Human
cugagggaccagc

SEQ ID NO: 2615052 - RNA, 20 nt, Human
cugagggauggacugaugcu

SEQ ID NO: 2615053 - RNA, 14 nt, Human
cugacccagugaga

SEQ ID NO: 2615054 - RNA, 23 nt, Human
cugacccagugcccccacugacc

SEQ ID NO: 2615055 - RNA, 20 nt, Human
cugacccagugcccccacug

SEQ ID NO: 2615056 - RNA, 21 nt, Human
cugacccagugcccccacuga

SEQ ID NO: 2615057 - RNA, 14 nt, Human
cugaggcuuuggau

SEQ ID NO: 2615058 - RNA, 15 nt, Human
cugaggcuuuggauu

SEQ ID NO: 2615059 - RNA, 17 nt, Human
cugaggcuuuggauuug

SEQ ID NO: 2615060 - RNA, 18 nt, Human
cugaggcuuuggauuuga

SEQ ID NO: 2615061 - RNA, 23 nt, Human
cugagggaaagcccagaaaagga

SEQ ID NO: 2615062 - RNA, 19 nt, Human
cugagggaaagcccagaaa

SEQ ID NO: 2615063 - RNA, 21 nt, Human
cugaggcuuuggauuugacau

SEQ ID NO: 2615064 - RNA, 12 nt, Human
cugagggaccaa

SEQ ID NO: 2615065 - RNA, 16 nt, Human
cugagggaccaacugg

SEQ ID NO: 2615066 - RNA, 18 nt, Human
cugagggaccaacugggc

SEQ ID NO: 2615067 - RNA, 13 nt, Human
cugacccagugcc

SEQ ID NO: 2615068 - RNA, 18 nt, Human
cugacccagugcccccac

SEQ ID NO: 2615069 - RNA, 12 nt, Human
cugacccagugc

SEQ ID NO: 2615070 - RNA, 13 nt, Human
cugacccagugag

SEQ ID NO: 2615071 - RNA, 18 nt, Human
cugacccagucccugggg

SEQ ID NO: 2615072 - RNA, 11 nt, Human
cugacccaguc

SEQ ID NO: 2615073 - RNA, 23 nt, Human
cugacccaggccgcagcucuugc

SEQ ID NO: 2615074 - RNA, 12 nt, Human
cugacccagucc

SEQ ID NO: 2615075 - RNA, 13 nt, Human
cugacccaguccc

SEQ ID NO: 2615076 - RNA, 14 nt, Human
cugacccagucccu

SEQ ID NO: 2615077 - RNA, 15 nt, Human
cugacccagucccug

SEQ ID NO: 2615078 - RNA, 16 nt, Human
cugacccagucccugg

SEQ ID NO: 2615079 - RNA, 17 nt, Human
cugacccagucccuggg

SEQ ID NO: 2615080 - RNA, 21 nt, Human
cugaccaugcucaucugcugg

SEQ ID NO: 2615081 - RNA, 20 nt, Human
cugaccaugcucaucugcug

SEQ ID NO: 2615082 - RNA, 17 nt, Human
cugacccaggccgcagc

SEQ ID NO: 2615083 - RNA, 21 nt, Human
cugacccaggccgcagcucuu

SEQ ID NO: 2615084 - RNA, 19 nt, Human
cugacccaggccgcagcuc

SEQ ID NO: 2615085 - RNA, 10 nt, Human
cugacccagu

SEQ ID NO: 2615086 - RNA, 22 nt, Human
cugaccaugcucaucugcuggu

SEQ ID NO: 2615087 - RNA, 18 nt, Human
cugacccaggccgcagcu

SEQ ID NO: 2615088 - RNA, 18 nt, Human
cugaccauuucagggguc

SEQ ID NO: 2615089 - RNA, 16 nt, Human
cugagucugaaggcug

SEQ ID NO: 2615090 - RNA, 15 nt, Human
cugagucugaaggcu

SEQ ID NO: 2615091 - RNA, 14 nt, Human
cugagucugaaggc

SEQ ID NO: 2615092 - RNA, 13 nt, Human
cugagucugaagg

SEQ ID NO: 2615093 - RNA, 14 nt, Human
cugagucuccugug

SEQ ID NO: 2615094 - RNA, 13 nt, Human
cugagucuccugu

SEQ ID NO: 2615095 - RNA, 17 nt, Human
cugagucucccaaggcu

SEQ ID NO: 2615096 - RNA, 16 nt, Human
cugagucucccaaggc

SEQ ID NO: 2615097 - RNA, 17 nt, Human
cugagugaaccuguaua

SEQ ID NO: 2615098 - RNA, 16 nt, Human
cugagucuccugugcc

SEQ ID NO: 2615099 - RNA, 15 nt, Human
cugagucuccugugc

SEQ ID NO: 2615100 - RNA, 18 nt, Human
cugagugaaccuguauaa

SEQ ID NO: 2615101 - RNA, 14 nt, Human
cugagugccuuuug

SEQ ID NO: 2615102 - RNA, 16 nt, Human
cugagugccuggccaa

SEQ ID NO: 2615103 - RNA, 14 nt, Human
cugagugccuggcc

SEQ ID NO: 2615104 - RNA, 13 nt, Human
cugagugccuggc

SEQ ID NO: 2615105 - RNA, 19 nt, Human
cugagugcagccguuugag

SEQ ID NO: 2615106 - RNA, 19 nt, Human
cugauaaaaccauguagaa

SEQ ID NO: 2615107 - RNA, 23 nt, Human
cugauaaaaccauguagaaaauu

SEQ ID NO: 2615108 - RNA, 13 nt, Human
cugauaaagauga

SEQ ID NO: 2615109 - RNA, 22 nt, Human
cugagugggggaucacagccuc

SEQ ID NO: 2615110 - RNA, 18 nt, Human
cugaguggaucuccaagg

SEQ ID NO: 2615111 - RNA, 22 nt, Human
cugaguggacuggaguggagca

SEQ ID NO: 2615112 - RNA, 21 nt, Human
cugaguggacuggaguggagc

SEQ ID NO: 2615113 - RNA, 19 nt, Human
cugagugccuggccaaagg

SEQ ID NO: 2615114 - RNA, 16 nt, Human
cugaguggacuggagu

SEQ ID NO: 2615115 - RNA, 15 nt, Human
cugagugccuuuugg

SEQ ID NO: 2615116 - RNA, 16 nt, Human
cugagugccuuuuggu

SEQ ID NO: 2615117 - RNA, 16 nt, Human
cugaguggcaggggac

SEQ ID NO: 2615118 - RNA, 13 nt, Human
cugaguggcaggg

SEQ ID NO: 2615119 - RNA, 18 nt, Human
cugaguggcaggggacag

SEQ ID NO: 2615120 - RNA, 22 nt, Human
cugaugucaauuucuguguugc

SEQ ID NO: 2615121 - RNA, 20 nt, Human
cugaugucaauuucuguguu

SEQ ID NO: 2615122 - RNA, 19 nt, Human
cugaugucaauuucugugu

SEQ ID NO: 2615123 - RNA, 18 nt, Human
cugaugucaauuucugug

SEQ ID NO: 2615124 - RNA, 22 nt, Human
cugaucuccauggcuuccuccu

SEQ ID NO: 2615125 - RNA, 15 nt, Human
cugauguccucacca

SEQ ID NO: 2615126 - RNA, 13 nt, Human
cugauguguacau

SEQ ID NO: 2615127 - RNA, 15 nt, Human
cugauguucagugua

SEQ ID NO: 2615128 - RNA, 14 nt, Human
cugauguucagugu

SEQ ID NO: 2615129 - RNA, 20 nt, Human
cugauguuacaucacagugu

SEQ ID NO: 2615130 - RNA, 13 nt, Human
cugauguucagug

SEQ ID NO: 2615131 - RNA, 12 nt, Human
cugaucccucua

SEQ ID NO: 2615132 - RNA, 13 nt, Human
cugaucccucuac

SEQ ID NO: 2615133 - RNA, 19 nt, Human
cugauccuggaggcccagu

SEQ ID NO: 2615134 - RNA, 20 nt, Human
cugauccugugaaguaagga

SEQ ID NO: 2615135 - RNA, 21 nt, Human
cugauccuggaggcccaguuc

SEQ ID NO: 2615136 - RNA, 23 nt, Human
cugauccugugaaguaaggaugu

SEQ ID NO: 2615137 - RNA, 20 nt, Human
cugaucgccaaccuuucccc

SEQ ID NO: 2615138 - RNA, 21 nt, Human
cugaucgugacgcugaauaaa

SEQ ID NO: 2615139 - RNA, 14 nt, Human
cugaucgugacgcu

SEQ ID NO: 2615140 - RNA, 22 nt, Human
cugaucgugacgcugaauaaau

SEQ ID NO: 2615141 - RNA, 15 nt, Human
cugaucgugcuaaau

SEQ ID NO: 2615142 - RNA, 17 nt, Human
cugaucgugcuaaauuu

SEQ ID NO: 2615143 - RNA, 19 nt, Human
cugaucgugcuaaauuuuc

SEQ ID NO: 2615144 - RNA, 20 nt, Human
cugaucuccauggcuuccuc

SEQ ID NO: 2615145 - RNA, 14 nt, Human
cugaucuccauggc

SEQ ID NO: 2615146 - RNA, 13 nt, Human
cugaucuccaugg

SEQ ID NO: 2615147 - RNA, 21 nt, Human
cugaucgugcuaaauuuucag

SEQ ID NO: 2615148 - RNA, 19 nt, Human
cugauagggauacaugcuc

SEQ ID NO: 2615149 - RNA, 17 nt, Human
cugauagggauacaugc

SEQ ID NO: 2615150 - RNA, 17 nt, Human
cugauaggccaaguuug

SEQ ID NO: 2615151 - RNA, 22 nt, Human
cugauagcucuuuggcagucua

SEQ ID NO: 2615152 - RNA, 15 nt, Human
cugauaguuacuguu

SEQ ID NO: 2615153 - RNA, 15 nt, Human
cugauagcucuuugg

SEQ ID NO: 2615154 - RNA, 21 nt, Human
cugauaaagaugagugagcau

SEQ ID NO: 2615155 - RNA, 14 nt, Human
cugauaaagaaaga

SEQ ID NO: 2615156 - RNA, 15 nt, Human
cugauacccagagca

SEQ ID NO: 2615157 - RNA, 12 nt, Human
cugauaccucaa

SEQ ID NO: 2615158 - RNA, 20 nt, Human
cugauccagcccugaguucc

SEQ ID NO: 2615159 - RNA, 21 nt, Human
cugauccagagcacagaucug

SEQ ID NO: 2615160 - RNA, 15 nt, Human
cugauccagagcaca

SEQ ID NO: 2615161 - RNA, 13 nt, Human
cugauccagagca

SEQ ID NO: 2615162 - RNA, 16 nt, Human
cugaucaugcauuguu

SEQ ID NO: 2615163 - RNA, 18 nt, Human
cugauccagccucucccc

SEQ ID NO: 2615164 - RNA, 22 nt, Human
cugauaguuacuguugugaccu

SEQ ID NO: 2615165 - RNA, 21 nt, Human
cugauaguuacuguugugacc

SEQ ID NO: 2615166 - RNA, 19 nt, Human
cugauaguuacuguuguga

SEQ ID NO: 2615167 - RNA, 18 nt, Human
cugauaguuacuguugug

SEQ ID NO: 2615168 - RNA, 17 nt, Human
cugauaguuacuguugu

SEQ ID NO: 2615169 - RNA, 16 nt, Human
cugauaguuacuguug

SEQ ID NO: 2615170 - RNA, 22 nt, Human
cugaucagugggccuccaagga

SEQ ID NO: 2615171 - RNA, 19 nt, Human
cugaucagucuaagauggg

SEQ ID NO: 2615172 - RNA, 12 nt, Human
cugaucaugcau

SEQ ID NO: 2615173 - RNA, 14 nt, Human
cugaucaugcauug

SEQ ID NO: 2615174 - RNA, 15 nt, Human
cugaucaugcauugu

SEQ ID NO: 2615175 - RNA, 17 nt, Human
cugaucaugcauuguug

SEQ ID NO: 2615176 - RNA, 13 nt, Human
cugauucacugca

SEQ ID NO: 2615177 - RNA, 18 nt, Human
cugauucaacuaaaaaaa

SEQ ID NO: 2615178 - RNA, 15 nt, Human
cugauucaacuaaaa

SEQ ID NO: 2615179 - RNA, 17 nt, Human
cugauucaacuaaaaaa

SEQ ID NO: 2615180 - RNA, 15 nt, Human
cugauucccaagcuc

SEQ ID NO: 2615181 - RNA, 18 nt, Human
cugauucccaagcucugc

SEQ ID NO: 2615182 - RNA, 17 nt, Human
cugauucccaagcucug

SEQ ID NO: 2615183 - RNA, 20 nt, Human
cugauucccaagcucugcuc

SEQ ID NO: 2615184 - RNA, 19 nt, Human
cugauucccaagcucugcu

SEQ ID NO: 2615185 - RNA, 22 nt, Human
cugauucccaagcucugcuccu

SEQ ID NO: 2615186 - RNA, 16 nt, Human
cugauucggcugucuc

SEQ ID NO: 2615187 - RNA, 18 nt, Human
cugauucacugcauggcu

SEQ ID NO: 2615188 - RNA, 15 nt, Human
cugauucacugcaug

SEQ ID NO: 2615189 - RNA, 20 nt, Human
cugauucacugcauggcucc

SEQ ID NO: 2615190 - RNA, 22 nt, Human
cugauucauaauaaauaucugu

SEQ ID NO: 2615191 - RNA, 13 nt, Human
cugauguuccuag

SEQ ID NO: 2615192 - RNA, 18 nt, Human
cugauguuccuagugaaa

SEQ ID NO: 2615193 - RNA, 20 nt, Human
cugauguuccuagugaaaga

SEQ ID NO: 2615194 - RNA, 21 nt, Human
cugauguuccuagugaaagag

SEQ ID NO: 2615195 - RNA, 19 nt, Human
cugauuagaaaugaccaau

SEQ ID NO: 2615196 - RNA, 14 nt, Human
cugauuacaccagc

SEQ ID NO: 2615197 - RNA, 13 nt, Human
cugauuagaaaug

SEQ ID NO: 2615198 - RNA, 14 nt, Human
cugauucaacuaaa

SEQ ID NO: 2615199 - RNA, 11 nt, Human
cugauuagaaa

SEQ ID NO: 2615200 - RNA, 23 nt, Human
cugauuagaaaugaccaauauua

SEQ ID NO: 2615201 - RNA, 15 nt, Human
cugauguuggaagag

SEQ ID NO: 2615202 - RNA, 21 nt, Human
cugauuaaguugucuaaacaa

SEQ ID NO: 2615203 - RNA, 16 nt, Human
cugauuacacaaaaca

SEQ ID NO: 2615204 - RNA, 21 nt, Human
cugauguucaguguaauuucu

SEQ ID NO: 2615205 - RNA, 19 nt, Human
cugauguucaguguaauuu

SEQ ID NO: 2615206 - RNA, 17 nt, Human
cugauguucaguguaau

SEQ ID NO: 2615207 - RNA, 16 nt, Human
cugauguucaguguaa

SEQ ID NO: 2615208 - RNA, 22 nt, Human
cugauguugagggaacagacag

SEQ ID NO: 2615209 - RNA, 16 nt, Human
cuccugacccaguccc

SEQ ID NO: 2615210 - RNA, 17 nt, Human
cuccucuuuccucucuu

SEQ ID NO: 2615211 - RNA, 15 nt, Human
cuccucuuuccucuc

SEQ ID NO: 2615212 - RNA, 23 nt, Human
cuccugacccaguccccgugccc

SEQ ID NO: 2615213 - RNA, 14 nt, Human
cuccugaccucagg

SEQ ID NO: 2615214 - RNA, 14 nt, Human
cuccugaccugagg

SEQ ID NO: 2615215 - RNA, 15 nt, Human
cuccugaccugaggc

SEQ ID NO: 2615216 - RNA, 14 nt, Human
cuccugaccuuagg

SEQ ID NO: 2615217 - RNA, 22 nt, Human
cuccugagaccccuggccuccg

SEQ ID NO: 2615218 - RNA, 21 nt, Human
cuccugagaccccuggccucc

SEQ ID NO: 2615219 - RNA, 20 nt, Human
cuccugagaccccuggccuc

SEQ ID NO: 2615220 - RNA, 19 nt, Human
cuccugagaccccuggccu

SEQ ID NO: 2615221 - RNA, 23 nt, Human
cuccugagaccccuggccuccgg

SEQ ID NO: 2615222 - RNA, 18 nt, Human
cuccugagaccccuggcc

SEQ ID NO: 2615223 - RNA, 17 nt, Human
cuccugagaccccuggc

SEQ ID NO: 2615224 - RNA, 15 nt, Human
cuccugagaccccug

SEQ ID NO: 2615225 - RNA, 20 nt, Human
cuccugagaaaaaagguucc

SEQ ID NO: 2615226 - RNA, 16 nt, Human
cuccugaccugaggcu

SEQ ID NO: 2615227 - RNA, 16 nt, Human
cuccugaccugucacc

SEQ ID NO: 2615228 - RNA, 17 nt, Human
cuccugaggacagcugu

SEQ ID NO: 2615229 - RNA, 16 nt, Human
cuccugaggacagcug

SEQ ID NO: 2615230 - RNA, 15 nt, Human
cuccugaggacagcu

SEQ ID NO: 2615231 - RNA, 14 nt, Human
cuccugaggacagc

SEQ ID NO: 2615232 - RNA, 19 nt, Human
cuccugaggacagcugucc

SEQ ID NO: 2615233 - RNA, 18 nt, Human
cuccugaggacagcuguc

SEQ ID NO: 2615234 - RNA, 21 nt, Human
cuccugaggacagcuguccuc

SEQ ID NO: 2615235 - RNA, 17 nt, Human
cuccugaggcuuuggau

SEQ ID NO: 2615236 - RNA, 16 nt, Human
cuccugaggcuuugga

SEQ ID NO: 2615237 - RNA, 16 nt, Human
cuccugaggggcaucu

SEQ ID NO: 2615238 - RNA, 19 nt, Human
cuccugaggggcaucugcc

SEQ ID NO: 2615239 - RNA, 20 nt, Human
cuccugaggggcaucugccc

SEQ ID NO: 2615240 - RNA, 21 nt, Human
cuccugaggggcaucugcccc

SEQ ID NO: 2615241 - RNA, 22 nt, Human
cuccugaggggcaucugccccu

SEQ ID NO: 2615242 - RNA, 14 nt, Human
cuccugcaggcagc

SEQ ID NO: 2615243 - RNA, 13 nt, Human
cuccugcaggcag

SEQ ID NO: 2615244 - RNA, 12 nt, Human
cuccugcaggca

SEQ ID NO: 2615245 - RNA, 22 nt, Human
cuccugaguagcugggauuaca

SEQ ID NO: 2615246 - RNA, 17 nt, Human
cuccugaguagcuggga

SEQ ID NO: 2615247 - RNA, 21 nt, Human
cuccugaguagcuggauuaca

SEQ ID NO: 2615248 - RNA, 18 nt, Human
cuccucuagcuguggggg

SEQ ID NO: 2615249 - RNA, 17 nt, Human
cuccucuagcugugggg

SEQ ID NO: 2615250 - RNA, 19 nt, Human
cuccucuagcugugggggu

SEQ ID NO: 2615251 - RNA, 13 nt, Human
cuccucuaagcca

SEQ ID NO: 2615252 - RNA, 18 nt, Human
cuccucggccuggcuccu

SEQ ID NO: 2615253 - RNA, 16 nt, Human
cuccucggccuggcuc

SEQ ID NO: 2615254 - RNA, 15 nt, Human
cuccucggccuggcu

SEQ ID NO: 2615255 - RNA, 14 nt, Human
cuccucggccuggc

SEQ ID NO: 2615256 - RNA, 20 nt, Human
cuccucggcccccuccaucg

SEQ ID NO: 2615257 - RNA, 19 nt, Human
cuccucggcccccuccauc

SEQ ID NO: 2615258 - RNA, 18 nt, Human
cuccucggcccccuccau

SEQ ID NO: 2615259 - RNA, 17 nt, Human
cuccucgcaagcugggu

SEQ ID NO: 2615260 - RNA, 21 nt, Human
cuccucccuuccuuuucccug

SEQ ID NO: 2615261 - RNA, 15 nt, Human
cuccucccuuccuuu

SEQ ID NO: 2615262 - RNA, 14 nt, Human
cuccucccuuccuu

SEQ ID NO: 2615263 - RNA, 13 nt, Human
cuccucccuuccu

SEQ ID NO: 2615264 - RNA, 22 nt, Human
cuccucccuuccuuuucccugc

SEQ ID NO: 2615265 - RNA, 19 nt, Human
cuccucgcaagcuggguaa

SEQ ID NO: 2615266 - RNA, 13 nt, Human
cuccucucaguac

SEQ ID NO: 2615267 - RNA, 13 nt, Human
cuccucucagccc

SEQ ID NO: 2615268 - RNA, 18 nt, Human
cuccucuugccacugccu

SEQ ID NO: 2615269 - RNA, 11 nt, Human
cuccucuccag

SEQ ID NO: 2615270 - RNA, 19 nt, Human
cuccucuugccacugccuc

SEQ ID NO: 2615271 - RNA, 22 nt, Human
cuccucuuuccucucuuuguuc

SEQ ID NO: 2615272 - RNA, 21 nt, Human
cuccucuuguaaauaaagccc

SEQ ID NO: 2615273 - RNA, 20 nt, Human
cuccucuuguaaauaaagcc

SEQ ID NO: 2615274 - RNA, 14 nt, Human
cuccucuuguaaau

SEQ ID NO: 2615275 - RNA, 13 nt, Human
cuccucuuguaaa

SEQ ID NO: 2615276 - RNA, 12 nt, Human
cuccucuuguaa

SEQ ID NO: 2615277 - RNA, 20 nt, Human
cuccucccuuagcucccugu

SEQ ID NO: 2615278 - RNA, 15 nt, Human
cuccucccuuagcuc

SEQ ID NO: 2615279 - RNA, 14 nt, Human
cuccucccuuagcu

SEQ ID NO: 2615280 - RNA, 21 nt, Human
cuccucccuggcugcccuggc

SEQ ID NO: 2615281 - RNA, 22 nt, Human
cuccucccuggcugcccuggcc

SEQ ID NO: 2615282 - RNA, 20 nt, Human
cuccucccuggcugcccugg

SEQ ID NO: 2615283 - RNA, 19 nt, Human
cuccucccuggcugcccug

SEQ ID NO: 2615284 - RNA, 18 nt, Human
cuccucccuggcugcccu

SEQ ID NO: 2615285 - RNA, 17 nt, Human
cuccucccuggcugccc

SEQ ID NO: 2615286 - RNA, 14 nt, Human
cuccucccuggcug

SEQ ID NO: 2615287 - RNA, 13 nt, Human
cuccucccuggcu

SEQ ID NO: 2615288 - RNA, 16 nt, Human
cuccucccugcaucug

SEQ ID NO: 2615289 - RNA, 18 nt, Human
cuccucccugcaucugac

SEQ ID NO: 2615290 - RNA, 12 nt, Human
cuccucccuggc

SEQ ID NO: 2615291 - RNA, 23 nt, Human
cuccucccugcaucugaccagca

SEQ ID NO: 2615292 - RNA, 14 nt, Human
cuccucagaucuuc

SEQ ID NO: 2615293 - RNA, 14 nt, Human
cuccucccugcauc

SEQ ID NO: 2615294 - RNA, 15 nt, Human
cuccucccugcaucu

SEQ ID NO: 2615295 - RNA, 13 nt, Human
cuccucccugcau

SEQ ID NO: 2615296 - RNA, 15 nt, Human
cuccucccucugagg

SEQ ID NO: 2615297 - RNA, 14 nt, Human
cuccucccucugag

SEQ ID NO: 2615298 - RNA, 14 nt, Human
cuccucccuccugc

SEQ ID NO: 2615299 - RNA, 12 nt, Human
cuccucagaucu

SEQ ID NO: 2615300 - RNA, 20 nt, Human
cuccucacuggccaucccuc

SEQ ID NO: 2615301 - RNA, 18 nt, Human
cuccucacuggccauccc

SEQ ID NO: 2615302 - RNA, 14 nt, Human
cuccucacuggcca

SEQ ID NO: 2615303 - RNA, 16 nt, Human
cuccucacucccuucu

SEQ ID NO: 2615304 - RNA, 19 nt, Human
cuccuaucaccuccccucc

SEQ ID NO: 2615305 - RNA, 21 nt, Human
cuccucacucccuucccauaa

SEQ ID NO: 2615306 - RNA, 14 nt, Human
cuccucacucccuu

SEQ ID NO: 2615307 - RNA, 21 nt, Human
cucccuuggaaaccugcccug

SEQ ID NO: 2615308 - RNA, 20 nt, Human
cucccuuggaaaccugcccu

SEQ ID NO: 2615309 - RNA, 19 nt, Human
cucccuuggaaaccugccc

SEQ ID NO: 2615310 - RNA, 18 nt, Human
cucccuuggaaaccugcc

SEQ ID NO: 2615311 - RNA, 13 nt, Human
cucccuucugcua

SEQ ID NO: 2615312 - RNA, 14 nt, Human
cucccuucugcuac

SEQ ID NO: 2615313 - RNA, 15 nt, Human
cucccuucugcuacu

SEQ ID NO: 2615314 - RNA, 16 nt, Human
cucccuucugcuacug

SEQ ID NO: 2615315 - RNA, 16 nt, Human
cucccuucucuucaca

SEQ ID NO: 2615316 - RNA, 18 nt, Human
cucccuucuaccugccac

SEQ ID NO: 2615317 - RNA, 17 nt, Human
cucccuucuaccugcca

SEQ ID NO: 2615318 - RNA, 21 nt, Human
cucccuucuaccugccacuca

SEQ ID NO: 2615319 - RNA, 14 nt, Human
cucccuucucccau

SEQ ID NO: 2615320 - RNA, 14 nt, Human
cucccuuccucuuu

SEQ ID NO: 2615321 - RNA, 20 nt, Human
cucccuuccuuuucccugcu

SEQ ID NO: 2615322 - RNA, 15 nt, Human
cucccuucuaccugc

SEQ ID NO: 2615323 - RNA, 19 nt, Human
cucccuuccuuuucccugc

SEQ ID NO: 2615324 - RNA, 12 nt, Human
cucccuuccuuu

SEQ ID NO: 2615325 - RNA, 17 nt, Human
cucccuuagcucccugu

SEQ ID NO: 2615326 - RNA, 13 nt, Human
cucccuuccucuu

SEQ ID NO: 2615327 - RNA, 23 nt, Human
cucccuguuugaagccugcccuu

SEQ ID NO: 2615328 - RNA, 22 nt, Human
cucccuguuugaagccugcccu

SEQ ID NO: 2615329 - RNA, 17 nt, Human
cucccuucccauaagcu

SEQ ID NO: 2615330 - RNA, 15 nt, Human
cucccuuucccuucu

SEQ ID NO: 2615331 - RNA, 14 nt, Human
cucccuuucccuuc

SEQ ID NO: 2615332 - RNA, 22 nt, Human
cucccuuggaaaccugcccugc

SEQ ID NO: 2615333 - RNA, 14 nt, Human
cucccuuucucccc

SEQ ID NO: 2615334 - RNA, 12 nt, Human
cucccuuucucc

SEQ ID NO: 2615335 - RNA, 13 nt, Human
cucccuuucaaca

SEQ ID NO: 2615336 - RNA, 12 nt, Human
cucccuuucaac

SEQ ID NO: 2615337 - RNA, 17 nt, Human
cucccuuggauuguccc

SEQ ID NO: 2615338 - RNA, 22 nt, Human
cuccuaguacuaacuccuagga

SEQ ID NO: 2615339 - RNA, 17 nt, Human
cuccuaucaccuccccu

SEQ ID NO: 2615340 - RNA, 18 nt, Human
cuccuaucaccuccccuc

SEQ ID NO: 2615341 - RNA, 23 nt, Human
cucccuuucuccccugcccccag

SEQ ID NO: 2615342 - RNA, 15 nt, Human
cucccuuucuccccu

SEQ ID NO: 2615343 - RNA, 15 nt, Human
cuccuaggaaaauac

SEQ ID NO: 2615344 - RNA, 20 nt, Human
cuccuagggaaaaguucaua

SEQ ID NO: 2615345 - RNA, 20 nt, Human
cucccuucaaccauucccca

SEQ ID NO: 2615346 - RNA, 19 nt, Human
cucccuucaaccauucccc

SEQ ID NO: 2615347 - RNA, 18 nt, Human
cucccuucaaccauuccc

SEQ ID NO: 2615348 - RNA, 12 nt, Human
cucccuucaacc

SEQ ID NO: 2615349 - RNA, 23 nt, Human
cucccuucccaccucucucacuc

SEQ ID NO: 2615350 - RNA, 10 nt, Human
cucccuuccu

SEQ ID NO: 2615351 - RNA, 14 nt, Human
cucccuggguucag

SEQ ID NO: 2615352 - RNA, 11 nt, Human
cucccuggguu

SEQ ID NO: 2615353 - RNA, 22 nt, Human
cucccuggcugcccuggcccug

SEQ ID NO: 2615354 - RNA, 21 nt, Human
cucccuggcugcccuggcccu

SEQ ID NO: 2615355 - RNA, 21 nt, Human
cucccuguuugaagccugccc

SEQ ID NO: 2615356 - RNA, 12 nt, Human
cucccuguuuga

SEQ ID NO: 2615357 - RNA, 22 nt, Human
cucccuguugacgaagucucuu

SEQ ID NO: 2615358 - RNA, 21 nt, Human
cucccuguugacgaagucucu

SEQ ID NO: 2615359 - RNA, 17 nt, Human
cucccuguucuugggua

SEQ ID NO: 2615360 - RNA, 19 nt, Human
cucccuguuccccagagaa

SEQ ID NO: 2615361 - RNA, 19 nt, Human
cucccuguugacgaagucu

SEQ ID NO: 2615362 - RNA, 19 nt, Human
cucccuguugaagcucugg

SEQ ID NO: 2615363 - RNA, 14 nt, Human
cucccuggcuccca

SEQ ID NO: 2615364 - RNA, 15 nt, Human
cucccuggcucccau

SEQ ID NO: 2615365 - RNA, 15 nt, Human
cucccuggcucucag

SEQ ID NO: 2615366 - RNA, 16 nt, Human
cucccuggcucucaga

SEQ ID NO: 2615367 - RNA, 18 nt, Human
cucccuggcucucagaag

SEQ ID NO: 2615368 - RNA, 20 nt, Human
cucccuggcugcccuggccc

SEQ ID NO: 2615369 - RNA, 19 nt, Human
cucccuggcugcccuggcc

SEQ ID NO: 2615370 - RNA, 18 nt, Human
cucccuggcugcccuggc

SEQ ID NO: 2615371 - RNA, 17 nt, Human
cucccuggcugcccugg

SEQ ID NO: 2615372 - RNA, 15 nt, Human
cucccuggcugcccu

SEQ ID NO: 2615373 - RNA, 14 nt, Human
cucccuggcugccc

SEQ ID NO: 2615374 - RNA, 13 nt, Human
cucccuggcugcc

SEQ ID NO: 2615375 - RNA, 20 nt, Human
cucccuggcucucagaaggu

SEQ ID NO: 2615376 - RNA, 18 nt, Human
cucccaucucacacauga

SEQ ID NO: 2615377 - RNA, 15 nt, Human
cucccaucucacaca

SEQ ID NO: 2615378 - RNA, 15 nt, Human
cucccuggccuguuc

SEQ ID NO: 2615379 - RNA, 16 nt, Human
cucccuggccuguucu

SEQ ID NO: 2615380 - RNA, 19 nt, Human
cucccuggccuguucuguu

SEQ ID NO: 2615381 - RNA, 21 nt, Human
cucccuggccuguucuguuuu

SEQ ID NO: 2615382 - RNA, 11 nt, Human
cucccuggcuc

SEQ ID NO: 2615383 - RNA, 12 nt, Human
cucccuggcucc

SEQ ID NO: 2615384 - RNA, 13 nt, Human
cucccuggccugu

SEQ ID NO: 2615385 - RNA, 14 nt, Human
cucccaucucacac

SEQ ID NO: 2615386 - RNA, 20 nt, Human
cucccauaaccgcugauucu

SEQ ID NO: 2615387 - RNA, 17 nt, Human
cucccauaaccgcugau

SEQ ID NO: 2615388 - RNA, 23 nt, Human
cucccauccccuggacugggagg

SEQ ID NO: 2615389 - RNA, 21 nt, Human
cucccagugucuuccuguggg

SEQ ID NO: 2615390 - RNA, 20 nt, Human
cucccagugucuuccugugg

SEQ ID NO: 2615391 - RNA, 19 nt, Human
cucccagugucuuccugug

SEQ ID NO: 2615392 - RNA, 17 nt, Human
cucccagugucuuccug

SEQ ID NO: 2615393 - RNA, 12 nt, Human
cucccagugucu

SEQ ID NO: 2615394 - RNA, 19 nt, Human
cucccagucuacccagaga

SEQ ID NO: 2615395 - RNA, 18 nt, Human
cucccagucuacccagag

SEQ ID NO: 2615396 - RNA, 16 nt, Human
cucccagucuacccag

SEQ ID NO: 2615397 - RNA, 22 nt, Human
cucccagucaccuuguggcaag

SEQ ID NO: 2615398 - RNA, 16 nt, Human
cucccaguaccuccug

SEQ ID NO: 2615399 - RNA, 20 nt, Human
cucccaguccaaauguccuc

SEQ ID NO: 2615400 - RNA, 20 nt, Human
cuccuucuguccuacucugu

SEQ ID NO: 2615401 - RNA, 15 nt, Human
cuccuucuguccuac

SEQ ID NO: 2615402 - RNA, 14 nt, Human
cuccuucuguccua

SEQ ID NO: 2615403 - RNA, 20 nt, Human
cuccuucucugucucaugug

SEQ ID NO: 2615404 - RNA, 16 nt, Human
cuccuucucugucuca

SEQ ID NO: 2615405 - RNA, 21 nt, Human
cuccuucucugucucaugugu

SEQ ID NO: 2615406 - RNA, 18 nt, Human
cuccuuccaccucccucc

SEQ ID NO: 2615407 - RNA, 13 nt, Human
cuccuucucccuu

SEQ ID NO: 2615408 - RNA, 13 nt, Human
cuccuucagcccu

SEQ ID NO: 2615409 - RNA, 19 nt, Human
cuccuucagacacccucaa

SEQ ID NO: 2615410 - RNA, 13 nt, Human
cuccuucagacac

SEQ ID NO: 2615411 - RNA, 14 nt, Human
cuccuucagacacc

SEQ ID NO: 2615412 - RNA, 12 nt, Human
cuccuucagaca

SEQ ID NO: 2615413 - RNA, 20 nt, Human
cuccuucagcccucaccccu

SEQ ID NO: 2615414 - RNA, 17 nt, Human
cuccuucagcccucacc

SEQ ID NO: 2615415 - RNA, 15 nt, Human
cuccuucagcccuca

SEQ ID NO: 2615416 - RNA, 14 nt, Human
cuccuucagcccuc

SEQ ID NO: 2615417 - RNA, 16 nt, Human
cuccuuccaccucccu

SEQ ID NO: 2615418 - RNA, 18 nt, Human
cuccuuccaacaggagcu

SEQ ID NO: 2615419 - RNA, 14 nt, Human
cuccuuccaacagg

SEQ ID NO: 2615420 - RNA, 15 nt, Human
cuccuuccaccuccc

SEQ ID NO: 2615421 - RNA, 17 nt, Human
cuccuugggaggaagca

SEQ ID NO: 2615422 - RNA, 14 nt, Human
cuccuugggaggaa

SEQ ID NO: 2615423 - RNA, 13 nt, Human
cuccuugggagga

SEQ ID NO: 2615424 - RNA, 17 nt, Human
cuccuugcucugcaggc

SEQ ID NO: 2615425 - RNA, 13 nt, Human
cuccuuggaaauc

SEQ ID NO: 2615426 - RNA, 17 nt, Human
cuccuugccuccugugu

SEQ ID NO: 2615427 - RNA, 14 nt, Human
cuccuugcucugca

SEQ ID NO: 2615428 - RNA, 13 nt, Human
cuccuugcucugc

SEQ ID NO: 2615429 - RNA, 17 nt, Human
cuccuugcuacccagaa

SEQ ID NO: 2615430 - RNA, 18 nt, Human
cuccuugccuccugugua

SEQ ID NO: 2615431 - RNA, 16 nt, Human
cucgaacuggcugcaa

SEQ ID NO: 2615432 - RNA, 21 nt, Human
cuccuugggaggaagcagaau

SEQ ID NO: 2615433 - RNA, 20 nt, Human
cuccuugggaggaagcagaa

SEQ ID NO: 2615434 - RNA, 19 nt, Human
cuccuugggaggaagcaga

SEQ ID NO: 2615435 - RNA, 18 nt, Human
cuccuugggaggaagcag

SEQ ID NO: 2615436 - RNA, 23 nt, Human
cuccuugggaggaagcagaauaa

SEQ ID NO: 2615437 - RNA, 22 nt, Human
cuccuugggaggaagcagaaua

SEQ ID NO: 2615438 - RNA, 13 nt, Human
cuccuugggaggc

SEQ ID NO: 2615439 - RNA, 16 nt, Human
cuccuugggaggcccc

SEQ ID NO: 2615440 - RNA, 21 nt, Human
cuccuugaaaacacuguucuc

SEQ ID NO: 2615441 - RNA, 11 nt, Human
cuccuucuucc

SEQ ID NO: 2615442 - RNA, 19 nt, Human
cuccuugacuccuuguggu

SEQ ID NO: 2615443 - RNA, 21 nt, Human
cuccuugauuuuagccuucuc

SEQ ID NO: 2615444 - RNA, 20 nt, Human
cuccuugagagaccaggcaa

SEQ ID NO: 2615445 - RNA, 17 nt, Human
cuccuugagagaccagg

SEQ ID NO: 2615446 - RNA, 11 nt, Human
cuccugugugu

SEQ ID NO: 2615447 - RNA, 23 nt, Human
cuccugugucuugcaauggcagc

SEQ ID NO: 2615448 - RNA, 11 nt, Human
cuccugccacc

SEQ ID NO: 2615449 - RNA, 13 nt, Human
cuccugcccacgg

SEQ ID NO: 2615450 - RNA, 18 nt, Human
cuccugccaguguggaac

SEQ ID NO: 2615451 - RNA, 14 nt, Human
cuccugcccaccug

SEQ ID NO: 2615452 - RNA, 15 nt, Human
cuccugugucuugca

SEQ ID NO: 2615453 - RNA, 21 nt, Human
cuccugcaggcagccaggcca

SEQ ID NO: 2615454 - RNA, 15 nt, Human
cuccugcaggcagcc

SEQ ID NO: 2615455 - RNA, 22 nt, Human
cuccugcaggcagccaggccac

SEQ ID NO: 2615456 - RNA, 14 nt, Human
cuccugccaaggag

SEQ ID NO: 2615457 - RNA, 23 nt, Human
cuccugaggggcaucugccccuc

SEQ ID NO: 2615458 - RNA, 21 nt, Human
cuccuucaccuuuguccccac

SEQ ID NO: 2615459 - RNA, 19 nt, Human
cuccuucaccuuugucccc

SEQ ID NO: 2615460 - RNA, 16 nt, Human
cuccuucaccuuuguc

SEQ ID NO: 2615461 - RNA, 14 nt, Human
cuccuucaccuuug

SEQ ID NO: 2615462 - RNA, 20 nt, Human
cuccuuaacacugagcuguc

SEQ ID NO: 2615463 - RNA, 17 nt, Human
cuccuuaacacugagcu

SEQ ID NO: 2615464 - RNA, 22 nt, Human
cuccuguugcacccagcccugg

SEQ ID NO: 2615465 - RNA, 21 nt, Human
cuccuguugcacccagcccug

SEQ ID NO: 2615466 - RNA, 20 nt, Human
cuccuguugcacccagcccu

SEQ ID NO: 2615467 - RNA, 19 nt, Human
cuccuguugcacccagccc

SEQ ID NO: 2615468 - RNA, 23 nt, Human
cuccuguugcacccagcccuggu

SEQ ID NO: 2615469 - RNA, 17 nt, Human
cuccuguugcacccagc

SEQ ID NO: 2615470 - RNA, 11 nt, Human
cuccugcccag

SEQ ID NO: 2615471 - RNA, 17 nt, Human
cuccugcccacggaguc

SEQ ID NO: 2615472 - RNA, 20 nt, Human
cucgaguuacagacaaagcg

SEQ ID NO: 2615473 - RNA, 16 nt, Human
cucgaguuacagacaa

SEQ ID NO: 2615474 - RNA, 14 nt, Human
cucgaaucucugug

SEQ ID NO: 2615475 - RNA, 13 nt, Human
cucgaaucucugu

SEQ ID NO: 2615476 - RNA, 17 nt, Human
cucgaagcgcgccacuc

SEQ ID NO: 2615477 - RNA, 20 nt, Human
cucgaagcgcgccacucgcu

SEQ ID NO: 2615478 - RNA, 17 nt, Human
cuccuugggaggcccca

SEQ ID NO: 2615479 - RNA, 21 nt, Human
cuccuugggaggccccacugg

SEQ ID NO: 2615480 - RNA, 15 nt, Human
cuccuugggcacuuu

SEQ ID NO: 2615481 - RNA, 22 nt, Human
cuccuugggaggccccacuggg

SEQ ID NO: 2615482 - RNA, 12 nt, Human
cucgaagcgcgc

SEQ ID NO: 2615483 - RNA, 13 nt, Human
cucgaagcgcgcc

SEQ ID NO: 2615484 - RNA, 18 nt, Human
cucgaaucucugugccuu

SEQ ID NO: 2615485 - RNA, 17 nt, Human
cucgaaucucugugccu

SEQ ID NO: 2615486 - RNA, 16 nt, Human
cucgaaucucugugcc

SEQ ID NO: 2615487 - RNA, 15 nt, Human
cucgaaucucugugc

SEQ ID NO: 2615488 - RNA, 23 nt, Human
cucgacguuuacaagcccccccu

SEQ ID NO: 2615489 - RNA, 15 nt, Human
cucgcgacaaugcaa

SEQ ID NO: 2615490 - RNA, 21 nt, Human
cucgcccgcccacuguccugg

SEQ ID NO: 2615491 - RNA, 19 nt, Human
cucgcuauugucaccaggg

SEQ ID NO: 2615492 - RNA, 20 nt, Human
cucgcccgcccacuguccug

SEQ ID NO: 2615493 - RNA, 16 nt, Human
cucgcccgcccacugu

SEQ ID NO: 2615494 - RNA, 15 nt, Human
cucgcccgcccacug

SEQ ID NO: 2615495 - RNA, 14 nt, Human
cucgcccgcccacu

SEQ ID NO: 2615496 - RNA, 12 nt, Human
cucgcccgccca

SEQ ID NO: 2615497 - RNA, 13 nt, Human
cucgcgacaaugc

SEQ ID NO: 2615498 - RNA, 14 nt, Human
cucgccccagcagg

SEQ ID NO: 2615499 - RNA, 18 nt, Human
cucgcccaccgcaugccc

SEQ ID NO: 2615500 - RNA, 17 nt, Human
cucgccaugccgggggu

SEQ ID NO: 2615501 - RNA, 13 nt, Human
cucgccaugccgg

SEQ ID NO: 2615502 - RNA, 12 nt, Human
cucgccaugccg

SEQ ID NO: 2615503 - RNA, 23 nt, Human
cucgcccaccgcaugcccccucg

SEQ ID NO: 2615504 - RNA, 22 nt, Human
cucgcccaccgcaugcccccuc

SEQ ID NO: 2615505 - RNA, 22 nt, Human
cucgcauaggaccuuuccacca

SEQ ID NO: 2615506 - RNA, 19 nt, Human
cucgcauaggaccuuucca

SEQ ID NO: 2615507 - RNA, 19 nt, Human
cucgccaccccuccuuccu

SEQ ID NO: 2615508 - RNA, 22 nt, Human
cucgcauuugucaaugacaguu

SEQ ID NO: 2615509 - RNA, 21 nt, Human
cucgcauuugucaaugacagu

SEQ ID NO: 2615510 - RNA, 13 nt, Human
cucggagaagagc

SEQ ID NO: 2615511 - RNA, 20 nt, Human
cucggagaagagcuguucac

SEQ ID NO: 2615512 - RNA, 12 nt, Human
cucggagaagag

SEQ ID NO: 2615513 - RNA, 18 nt, Human
cucggacuuagcugggag

SEQ ID NO: 2615514 - RNA, 19 nt, Human
cucggacuuagcugggaga

SEQ ID NO: 2615515 - RNA, 19 nt, Human
cucggaacugcaugcugcu

SEQ ID NO: 2615516 - RNA, 21 nt, Human
cucggaacugcaugcugcugg

SEQ ID NO: 2615517 - RNA, 19 nt, Human
cucgcuuucuauguaguuu

SEQ ID NO: 2615518 - RNA, 17 nt, Human
cucgcuuuguugcccag

SEQ ID NO: 2615519 - RNA, 22 nt, Human
cucggaacugcaugcugcugga

SEQ ID NO: 2615520 - RNA, 16 nt, Human
cucggaaggcuggcug

SEQ ID NO: 2615521 - RNA, 20 nt, Human
cucggaaggcuggcugggca

SEQ ID NO: 2615522 - RNA, 21 nt, Human
cucgcuauugucaccagggcu

SEQ ID NO: 2615523 - RNA, 22 nt, Human
cucgcuugugcagaaaacauug

SEQ ID NO: 2615524 - RNA, 14 nt, Human
cucgcuugugcaga

SEQ ID NO: 2615525 - RNA, 22 nt, Human
cucgcuuggacggcugggcaca

SEQ ID NO: 2615526 - RNA, 18 nt, Human
cucggccucccaaagugc

SEQ ID NO: 2615527 - RNA, 20 nt, Human
cucggccucccaaagugcug

SEQ ID NO: 2615528 - RNA, 22 nt, Human
cucggccucccaaagugcuggg

SEQ ID NO: 2615529 - RNA, 23 nt, Human
cucggccucccaaagugcuggga

SEQ ID NO: 2615530 - RNA, 15 nt, Human
cucggccuggcuccu

SEQ ID NO: 2615531 - RNA, 21 nt, Human
cucggccgucuucacucgccc

SEQ ID NO: 2615532 - RNA, 16 nt, Human
cucggcccccuccauc

SEQ ID NO: 2615533 - RNA, 15 nt, Human
cucggccucccaaag

SEQ ID NO: 2615534 - RNA, 17 nt, Human
cucggcccccuccaucg

SEQ ID NO: 2615535 - RNA, 13 nt, Human
cucggacucugcu

SEQ ID NO: 2615536 - RNA, 22 nt, Human
cucggacuaagccuaccugcuc

SEQ ID NO: 2615537 - RNA, 18 nt, Human
cucggacuaagccuaccu

SEQ ID NO: 2615538 - RNA, 12 nt, Human
cucggagccuca

SEQ ID NO: 2615539 - RNA, 22 nt, Human
cucuaaaugaggggccucaggu

SEQ ID NO: 2615540 - RNA, 23 nt, Human
cucuaaagcaauaauggucccau

SEQ ID NO: 2615541 - RNA, 18 nt, Human
cucuaacagcucaggauc

SEQ ID NO: 2615542 - RNA, 22 nt, Human
cucuaacagcucaggaucucuu

SEQ ID NO: 2615543 - RNA, 13 nt, Human
cucuaagccacuc

SEQ ID NO: 2615544 - RNA, 14 nt, Human
cucuaacagcucag

SEQ ID NO: 2615545 - RNA, 16 nt, Human
cucuaacagcucagga

SEQ ID NO: 2615546 - RNA, 18 nt, Human
cucuaaaugggaaaguau

SEQ ID NO: 2615547 - RNA, 19 nt, Human
cucauaguaugguggcugg

SEQ ID NO: 2615548 - RNA, 18 nt, Human
cucauaguaugguggcug

SEQ ID NO: 2615549 - RNA, 20 nt, Human
cucauaguaugguggcuggg

SEQ ID NO: 2615550 - RNA, 13 nt, Human
cucauauggccca

SEQ ID NO: 2615551 - RNA, 19 nt, Human
cucauagggaagaccugcu

SEQ ID NO: 2615552 - RNA, 15 nt, Human
cucauaaugugaagu

SEQ ID NO: 2615553 - RNA, 23 nt, Human
cucauaggaaaaguacauuuaau

SEQ ID NO: 2615554 - RNA, 14 nt, Human
cucauagggaagac

SEQ ID NO: 2615555 - RNA, 21 nt, Human
cucauaggaaaaguacauuua

SEQ ID NO: 2615556 - RNA, 21 nt, Human
cucauaacggaucagaaauac

SEQ ID NO: 2615557 - RNA, 19 nt, Human
cucauaacggaucagaaau

SEQ ID NO: 2615558 - RNA, 21 nt, Human
cucaguucagaaucacuucug

SEQ ID NO: 2615559 - RNA, 16 nt, Human
cuaaaagauauaagug

SEQ ID NO: 2615560 - RNA, 17 nt, Human
cucauaacggaucagaa

SEQ ID NO: 2615561 - RNA, 17 nt, Human
cucauaaugugaagugu

SEQ ID NO: 2615562 - RNA, 14 nt, Human
cucauaaugugaag

SEQ ID NO: 2615563 - RNA, 13 nt, Human
cucauaaugugaa

SEQ ID NO: 2615564 - RNA, 18 nt, Human
cucauaauagacuuccca

SEQ ID NO: 2615565 - RNA, 19 nt, Human
cucaggugucccugcacuu

SEQ ID NO: 2615566 - RNA, 20 nt, Human
cucagugucuggcugcagag

SEQ ID NO: 2615567 - RNA, 14 nt, Human
cucaggugagaagc

SEQ ID NO: 2615568 - RNA, 18 nt, Human
cucaggugucccugcacu

SEQ ID NO: 2615569 - RNA, 17 nt, Human
cucaggugucccugcac

SEQ ID NO: 2615570 - RNA, 21 nt, Human
cucagugucuggcugcagagc

SEQ ID NO: 2615571 - RNA, 22 nt, Human
cucagugucuggcugcagagca

SEQ ID NO: 2615572 - RNA, 16 nt, Human
cucagugugacuccuc

SEQ ID NO: 2615573 - RNA, 15 nt, Human
cucaguucagaauca

SEQ ID NO: 2615574 - RNA, 23 nt, Human
cucaguuacacaaaggaccucag

SEQ ID NO: 2615575 - RNA, 20 nt, Human
cucaguucauccauucuauu

SEQ ID NO: 2615576 - RNA, 18 nt, Human
cucaguucauccauucua

SEQ ID NO: 2615577 - RNA, 14 nt, Human
cucaguucccuugg

SEQ ID NO: 2615578 - RNA, 15 nt, Human
cucaguucccuuggc

SEQ ID NO: 2615579 - RNA, 16 nt, Human
cucaguucccuuggcc

SEQ ID NO: 2615580 - RNA, 17 nt, Human
cucaguucccuuggccu

SEQ ID NO: 2615581 - RNA, 18 nt, Human
cucaguucccuuggccuc

SEQ ID NO: 2615582 - RNA, 19 nt, Human
cucaguucccuuggccuca

SEQ ID NO: 2615583 - RNA, 23 nt, Human
cucagguggggucacucuggcag

SEQ ID NO: 2615584 - RNA, 22 nt, Human
cucagguggggucacucuggca

SEQ ID NO: 2615585 - RNA, 16 nt, Human
cucaggugucccugca

SEQ ID NO: 2615586 - RNA, 15 nt, Human
cucaggugucccugc

SEQ ID NO: 2615587 - RNA, 19 nt, Human
cucaggggcuguuugagga

SEQ ID NO: 2615588 - RNA, 14 nt, Human
cucagggucccugg

SEQ ID NO: 2615589 - RNA, 16 nt, Human
cucaggggugugccug

SEQ ID NO: 2615590 - RNA, 18 nt, Human
cucaggucccugcagggc

SEQ ID NO: 2615591 - RNA, 17 nt, Human
cucaggucccugcaggg

SEQ ID NO: 2615592 - RNA, 20 nt, Human
cucaggucccuggggcuagg

SEQ ID NO: 2615593 - RNA, 19 nt, Human
cucaggucagggugaggau

SEQ ID NO: 2615594 - RNA, 20 nt, Human
cucaggucagggugaggaug

SEQ ID NO: 2615595 - RNA, 13 nt, Human
cucaggugaccaa

SEQ ID NO: 2615596 - RNA, 17 nt, Human
cucaggggccagaggaa

SEQ ID NO: 2615597 - RNA, 13 nt, Human
cucaggggccaga

SEQ ID NO: 2615598 - RNA, 13 nt, Human
cuaaaagucuucg

SEQ ID NO: 2615599 - RNA, 15 nt, Human
cuaaaaguaaacauu

SEQ ID NO: 2615600 - RNA, 19 nt, Human
cuaaaagugggcuugauuc

SEQ ID NO: 2615601 - RNA, 14 nt, Human
cuaaaaguaaacau

SEQ ID NO: 2615602 - RNA, 13 nt, Human
cuaaaaguaaaca

SEQ ID NO: 2615603 - RNA, 16 nt, Human
cuaaaagguucaggga

SEQ ID NO: 2615604 - RNA, 12 nt, Human
cucagggucccu

SEQ ID NO: 2615605 - RNA, 16 nt, Human
cucaggggcuguuuga

SEQ ID NO: 2615606 - RNA, 15 nt, Human
cucaggggcuguuug

SEQ ID NO: 2615607 - RNA, 14 nt, Human
cucaggggcuguuu

SEQ ID NO: 2615608 - RNA, 20 nt, Human
cucaggggccagaggaacug

SEQ ID NO: 2615609 - RNA, 18 nt, Human
cucaggggccagaggaac

SEQ ID NO: 2615610 - RNA, 17 nt, Human
cucaggggcguguggcu

SEQ ID NO: 2615611 - RNA, 21 nt, Human
cuaaaagauauaagugcugua

SEQ ID NO: 2615612 - RNA, 20 nt, Human
cuaaaagauauaagugcugu

SEQ ID NO: 2615613 - RNA, 17 nt, Human
cuaaaagauauaagugc

SEQ ID NO: 2615614 - RNA, 16 nt, Human
cuaaaaaaaaaaaagu

SEQ ID NO: 2615615 - RNA, 16 nt, Human
cguuuuugguggaguc

SEQ ID NO: 2615616 - RNA, 13 nt, Human
cguuuuuccuuua

SEQ ID NO: 2615617 - RNA, 23 nt, Human
cuaaaagguaugcaaucaaaucu

SEQ ID NO: 2615618 - RNA, 20 nt, Human
cuaaaagauccuuuuuaaau

SEQ ID NO: 2615619 - RNA, 15 nt, Human
cuaaaagauccuuuu

SEQ ID NO: 2615620 - RNA, 13 nt, Human
cuaaaagauccuu

SEQ ID NO: 2615621 - RNA, 12 nt, Human
cuaaaagcacac

SEQ ID NO: 2615622 - RNA, 21 nt, Human
cucauauuuuguauauaucug

SEQ ID NO: 2615623 - RNA, 13 nt, Human
cucauauuuugua

SEQ ID NO: 2615624 - RNA, 12 nt, Human
cucauauuuugu

SEQ ID NO: 2615625 - RNA, 16 nt, Human
cucauauuuuguauau

SEQ ID NO: 2615626 - RNA, 23 nt, Human
cucaucauucucugucucaucca

SEQ ID NO: 2615627 - RNA, 19 nt, Human
cucauauugugauucugcc

SEQ ID NO: 2615628 - RNA, 21 nt, Human
cucauauugugauucugccuu

SEQ ID NO: 2615629 - RNA, 13 nt, Human
cucauauuuaaag

SEQ ID NO: 2615630 - RNA, 12 nt, Human
cucauauuuaaa

SEQ ID NO: 2615631 - RNA, 15 nt, Human
cucauauuuaaagac

SEQ ID NO: 2615632 - RNA, 13 nt, Human
cucauauugugau

SEQ ID NO: 2615633 - RNA, 22 nt, Human
cucauauuccugcagccuggag

SEQ ID NO: 2615634 - RNA, 24 nt, Human
cucauauuccugcagccuggaggc

SEQ ID NO: 2615635 - RNA, 19 nt, Human
cucauauggcccaguguca

SEQ ID NO: 2615636 - RNA, 18 nt, Human
cucauauggcccaguguc

SEQ ID NO: 2615637 - RNA, 15 nt, Human
cucauauuccugcag

SEQ ID NO: 2615638 - RNA, 20 nt, Human
cucauauuccugcagccugg

SEQ ID NO: 2615639 - RNA, 19 nt, Human
cucauccaccccaucccuc

SEQ ID NO: 2615640 - RNA, 16 nt, Human
cucauccaccccaucc

SEQ ID NO: 2615641 - RNA, 15 nt, Human
cucauccaccccauc

SEQ ID NO: 2615642 - RNA, 13 nt, Human
cucauccacccca

SEQ ID NO: 2615643 - RNA, 15 nt, Human
cucauccagggcucu

SEQ ID NO: 2615644 - RNA, 24 nt, Human
cucauccaccccaucccuccccag

SEQ ID NO: 2615645 - RNA, 16 nt, Human
cucauccaucaucaug

SEQ ID NO: 2615646 - RNA, 19 nt, Human
cucauccaucaucaugugu

SEQ ID NO: 2615647 - RNA, 10 nt, Human
cucaucccau

SEQ ID NO: 2615648 - RNA, 14 nt, Human
cucaucccacgcac

SEQ ID NO: 2615649 - RNA, 16 nt, Human
cucauccagggcucug

SEQ ID NO: 2615650 - RNA, 13 nt, Human
cucauccccaggg

SEQ ID NO: 2615651 - RNA, 14 nt, Human
cucauccccagggg

SEQ ID NO: 2615652 - RNA, 22 nt, Human
cucauccccaggggucccagcc

SEQ ID NO: 2615653 - RNA, 19 nt, Human
cucaucccacgcacuccau

SEQ ID NO: 2615654 - RNA, 13 nt, Human
cucauccugcagg

SEQ ID NO: 2615655 - RNA, 17 nt, Human
cucauuaggauggcuag

SEQ ID NO: 2615656 - RNA, 18 nt, Human
cucauuaggauggcuagu

SEQ ID NO: 2615657 - RNA, 18 nt, Human
cucaucuaucucaauccu

SEQ ID NO: 2615658 - RNA, 14 nt, Human
cucaucuaucucaa

SEQ ID NO: 2615659 - RNA, 19 nt, Human
cucauucaaaaguugaaau

SEQ ID NO: 2615660 - RNA, 15 nt, Human
cucauucaaaaguug

SEQ ID NO: 2615661 - RNA, 17 nt, Human
cucaucuccccaucauu

SEQ ID NO: 2615662 - RNA, 21 nt, Human
cucauuagcauuuugcuaaau

SEQ ID NO: 2615663 - RNA, 21 nt, Human
cucaucuagguaaauuacagu

SEQ ID NO: 2615664 - RNA, 14 nt, Human
cucauccugcaggc

SEQ ID NO: 2615665 - RNA, 16 nt, Human
cucauccuuguauaaa

SEQ ID NO: 2615666 - RNA, 16 nt, Human
cucaucgcguccuccu

SEQ ID NO: 2615667 - RNA, 18 nt, Human
cucauuccuccaccugcc

SEQ ID NO: 2615668 - RNA, 23 nt, Human
cucauuccccggggcguuucuuu

SEQ ID NO: 2615669 - RNA, 14 nt, Human
cucauuccccgggg

SEQ ID NO: 2615670 - RNA, 13 nt, Human
cucauuccccggg

SEQ ID NO: 2615671 - RNA, 14 nt, Human
cucauuccccaggu

SEQ ID NO: 2615672 - RNA, 21 nt, Human
cucauuccuccaccugccgug

SEQ ID NO: 2615673 - RNA, 12 nt, Human
cucauuccugcc

SEQ ID NO: 2615674 - RNA, 13 nt, Human
cucauuccugccu

SEQ ID NO: 2615675 - RNA, 16 nt, Human
cucauuccugccuguc

SEQ ID NO: 2615676 - RNA, 12 nt, Human
cucauucuucug

SEQ ID NO: 2615677 - RNA, 14 nt, Human
cucauucuucugua

SEQ ID NO: 2615678 - RNA, 13 nt, Human
cucauucuucugu

SEQ ID NO: 2615679 - RNA, 22 nt, Human
cucauucaggaaaacugacaga

SEQ ID NO: 2615680 - RNA, 18 nt, Human
cucauuccaacagugagu

SEQ ID NO: 2615681 - RNA, 17 nt, Human
cucauuccaacagugag

SEQ ID NO: 2615682 - RNA, 18 nt, Human
cucauuccaccuucccau

SEQ ID NO: 2615683 - RNA, 15 nt, Human
cucauuccagaggaa

SEQ ID NO: 2615684 - RNA, 21 nt, Human
cucauuccaccuucccaugcc

SEQ ID NO: 2615685 - RNA, 17 nt, Human
cucauuccagaggaagg

SEQ ID NO: 2615686 - RNA, 13 nt, Human
cucauuccccagg

SEQ ID NO: 2615687 - RNA, 12 nt, Human
cucauuccccag

SEQ ID NO: 2615688 - RNA, 19 nt, Human
cucauugcuuacaagccua

SEQ ID NO: 2615689 - RNA, 20 nt, Human
cucauugcugagccucugcu

SEQ ID NO: 2615690 - RNA, 18 nt, Human
cucauugcugagccucug

SEQ ID NO: 2615691 - RNA, 19 nt, Human
cucauugcugagccucugc

SEQ ID NO: 2615692 - RNA, 16 nt, Human
cucauugaccugaggc

SEQ ID NO: 2615693 - RNA, 20 nt, Human
cucauugcuuggaauucagc

SEQ ID NO: 2615694 - RNA, 18 nt, Human
cucauugacaagaacuga

SEQ ID NO: 2615695 - RNA, 13 nt, Human
cucauuggacccu

SEQ ID NO: 2615696 - RNA, 17 nt, Human
cucauuggacccuucca

SEQ ID NO: 2615697 - RNA, 18 nt, Human
cucauuggacccuuccau

SEQ ID NO: 2615698 - RNA, 15 nt, Human
cucauugaccugagg

SEQ ID NO: 2615699 - RNA, 13 nt, Human
cucauugaccuga

SEQ ID NO: 2615700 - RNA, 23 nt, Human
cucauucuucuguacgucugaca

SEQ ID NO: 2615701 - RNA, 17 nt, Human
cucauuccugccugucu

SEQ ID NO: 2615702 - RNA, 18 nt, Human
cucauuccugccugucuc

SEQ ID NO: 2615703 - RNA, 17 nt, Human
cucauugacaagaacug

SEQ ID NO: 2615704 - RNA, 21 nt, Human
cuccauccugaggcuccacuu

SEQ ID NO: 2615705 - RNA, 20 nt, Human
cuccauccugaggcuccacu

SEQ ID NO: 2615706 - RNA, 18 nt, Human
cuccaggcgccggcgggc

SEQ ID NO: 2615707 - RNA, 14 nt, Human
cuccaggcgccggc

SEQ ID NO: 2615708 - RNA, 13 nt, Human
cuccaggcgccgg

SEQ ID NO: 2615709 - RNA, 11 nt, Human
cuccaggcucc

SEQ ID NO: 2615710 - RNA, 9 nt, Human
cuccaucuc

SEQ ID NO: 2615711 - RNA, 22 nt, Human
cuccauccuuucugccucucaa

SEQ ID NO: 2615712 - RNA, 21 nt, Human
cuccauccuuucugccucuca

SEQ ID NO: 2615713 - RNA, 19 nt, Human
cuccauccuuucugccucu

SEQ ID NO: 2615714 - RNA, 18 nt, Human
cuccaucuaaacugcccc

SEQ ID NO: 2615715 - RNA, 21 nt, Human
cuccaucuccaagaaugcuga

SEQ ID NO: 2615716 - RNA, 18 nt, Human
cuccaucuccaagaaugc

SEQ ID NO: 2615717 - RNA, 23 nt, Human
cuccaucucauguaucaucugga

SEQ ID NO: 2615718 - RNA, 14 nt, Human
cuccaucucaugua

SEQ ID NO: 2615719 - RNA, 13 nt, Human
cuccaucuccacu

SEQ ID NO: 2615720 - RNA, 23 nt, Human
cuccauccugaggcuccacuugg

SEQ ID NO: 2615721 - RNA, 17 nt, Human
cuccaucuaaacugccc

SEQ ID NO: 2615722 - RNA, 20 nt, Human
cuccaucgcugucaucucag

SEQ ID NO: 2615723 - RNA, 15 nt, Human
cuccaggcaggcuaa

SEQ ID NO: 2615724 - RNA, 13 nt, Human
cuccaggcaggcu

SEQ ID NO: 2615725 - RNA, 20 nt, Human
cuccaggccacauggggcug

SEQ ID NO: 2615726 - RNA, 18 nt, Human
cuccagcuguucagcugg

SEQ ID NO: 2615727 - RNA, 19 nt, Human
cuccagcuguucagcuggu

SEQ ID NO: 2615728 - RNA, 21 nt, Human
cuccagcuccaagaccuguug

SEQ ID NO: 2615729 - RNA, 14 nt, Human
cuccagcuccaaga

SEQ ID NO: 2615730 - RNA, 19 nt, Human
cuccagccuggacccccag

SEQ ID NO: 2615731 - RNA, 13 nt, Human
cuccagcuccaag

SEQ ID NO: 2615732 - RNA, 19 nt, Human
cuccagccugccuggcagg

SEQ ID NO: 2615733 - RNA, 17 nt, Human
cuccagccugccuggca

SEQ ID NO: 2615734 - RNA, 14 nt, Human
cuccagccugagca

SEQ ID NO: 2615735 - RNA, 11 nt, Human
cuccagcuccu

SEQ ID NO: 2615736 - RNA, 19 nt, Human
cuccagcuggguuggaaaa

SEQ ID NO: 2615737 - RNA, 13 nt, Human
cuccagcuguuca

SEQ ID NO: 2615738 - RNA, 21 nt, Human
cucccaggcauuccccaggag

SEQ ID NO: 2615739 - RNA, 20 nt, Human
cucccaggcauuccccagga

SEQ ID NO: 2615740 - RNA, 19 nt, Human
cucccaggcauuccccagg

SEQ ID NO: 2615741 - RNA, 17 nt, Human
cucccaggcauucccca

SEQ ID NO: 2615742 - RNA, 17 nt, Human
cucccagucauuuaaua

SEQ ID NO: 2615743 - RNA, 21 nt, Human
cucccaggccgagaagccagu

SEQ ID NO: 2615744 - RNA, 14 nt, Human
cucccaggcgcccc

SEQ ID NO: 2615745 - RNA, 22 nt, Human
cucccaggcauuccccaggagg

SEQ ID NO: 2615746 - RNA, 22 nt, Human
cucccaggccaguaagggaaau

SEQ ID NO: 2615747 - RNA, 22 nt, Human
cucccaggccaggcuccuuccu

SEQ ID NO: 2615748 - RNA, 18 nt, Human
cucccaaguggugccuaa

SEQ ID NO: 2615749 - RNA, 17 nt, Human
cucccaaguggugccua

SEQ ID NO: 2615750 - RNA, 17 nt, Human
cucccaggccaggcucc

SEQ ID NO: 2615751 - RNA, 21 nt, Human
cucccaggccaggcuccuucc

SEQ ID NO: 2615752 - RNA, 16 nt, Human
cucccaaguggugccu

SEQ ID NO: 2615753 - RNA, 13 nt, Human
cucccaaguggug

SEQ ID NO: 2615754 - RNA, 17 nt, Human
cucccaagucuacagag

SEQ ID NO: 2615755 - RNA, 15 nt, Human
cucccaggcauuccc

SEQ ID NO: 2615756 - RNA, 22 nt, Human
cucccaaguagcugggauuaca

SEQ ID NO: 2615757 - RNA, 18 nt, Human
cucccaagggauggugcc

SEQ ID NO: 2615758 - RNA, 14 nt, Human
cucccaagggaugg

SEQ ID NO: 2615759 - RNA, 23 nt, Human
cucccaaggcugcgucuggaggg

SEQ ID NO: 2615760 - RNA, 22 nt, Human
cucccaaggcugcgucuggagg

SEQ ID NO: 2615761 - RNA, 21 nt, Human
cucccaaggggcccaaauucu

SEQ ID NO: 2615762 - RNA, 22 nt, Human
cucccaaggggcccaaauucuu

SEQ ID NO: 2615763 - RNA, 17 nt, Human
cuccauugguguugaca

SEQ ID NO: 2615764 - RNA, 15 nt, Human
cuccauuccagucuc

SEQ ID NO: 2615765 - RNA, 22 nt, Human
cuccaucuccaagaaugcugaa

SEQ ID NO: 2615766 - RNA, 14 nt, Human
cuccauucugacca

SEQ ID NO: 2615767 - RNA, 20 nt, Human
cuccauucugaccauuucag

SEQ ID NO: 2615768 - RNA, 14 nt, Human
cuccaugugggcua

SEQ ID NO: 2615769 - RNA, 22 nt, Human
cuccauuaggauuugccccuuc

SEQ ID NO: 2615770 - RNA, 24 nt, Human
cuccauucccguggaacguuuuuc

SEQ ID NO: 2615771 - RNA, 23 nt, Human
cuccagccccuucucagaaucua

SEQ ID NO: 2615772 - RNA, 21 nt, Human
cuccagccccuucucagaauc

SEQ ID NO: 2615773 - RNA, 19 nt, Human
cuccagccccuucucagaa

SEQ ID NO: 2615774 - RNA, 20 nt, Human
cuccagccagccagcucauu

SEQ ID NO: 2615775 - RNA, 24 nt, Human
cuccagccagcaaugauguccaga

SEQ ID NO: 2615776 - RNA, 23 nt, Human
cuccagccagcaaugauguccag

SEQ ID NO: 2615777 - RNA, 18 nt, Human
cuccagcaccauccgcca

SEQ ID NO: 2615778 - RNA, 13 nt, Human
cuccagccaaccc

SEQ ID NO: 2615779 - RNA, 14 nt, Human
cuccagccaacccc

SEQ ID NO: 2615780 - RNA, 17 nt, Human
cuccagccaaccccugu

SEQ ID NO: 2615781 - RNA, 16 nt, Human
cuccagccagcaauga

SEQ ID NO: 2615782 - RNA, 13 nt, Human
cuccagccagcaa

SEQ ID NO: 2615783 - RNA, 12 nt, Human
cuccagccagca

SEQ ID NO: 2615784 - RNA, 11 nt, Human
cuccagccagc

SEQ ID NO: 2615785 - RNA, 18 nt, Human
cuccagccaaccccugug

SEQ ID NO: 2615786 - RNA, 19 nt, Human
cuccagccaaccccugugg

SEQ ID NO: 2615787 - RNA, 20 nt, Human
cuccagccaaccccugugga

SEQ ID NO: 2615788 - RNA, 21 nt, Human
cuccagccaaccccuguggag

SEQ ID NO: 2615789 - RNA, 20 nt, Human
cuccagcucaccagccccag

SEQ ID NO: 2615790 - RNA, 19 nt, Human
cuccagcucaccagcccca

SEQ ID NO: 2615791 - RNA, 11 nt, Human
cuccagccucu

SEQ ID NO: 2615792 - RNA, 13 nt, Human
cuccagccucugu

SEQ ID NO: 2615793 - RNA, 22 nt, Human
cuccagccccuucucagaaucu

SEQ ID NO: 2615794 - RNA, 17 nt, Human
cuccagccucuguuccc

SEQ ID NO: 2615795 - RNA, 13 nt, Human
cuccagccugagc

SEQ ID NO: 2615796 - RNA, 20 nt, Human
cuccagaccccuggcuuuuc

SEQ ID NO: 2615797 - RNA, 19 nt, Human
cuccagaccccuggcuuuu

SEQ ID NO: 2615798 - RNA, 19 nt, Human
cuccacucugacuggcaca

SEQ ID NO: 2615799 - RNA, 18 nt, Human
cuccagaccccuggcuuu

SEQ ID NO: 2615800 - RNA, 17 nt, Human
cuccagaccccuggcuu

SEQ ID NO: 2615801 - RNA, 15 nt, Human
cuccagaccccuggc

SEQ ID NO: 2615802 - RNA, 14 nt, Human
cuccagaccccugg

SEQ ID NO: 2615803 - RNA, 21 nt, Human
cuccacucugcuucucugacu

SEQ ID NO: 2615804 - RNA, 20 nt, Human
cuccacucugcuucucugac

SEQ ID NO: 2615805 - RNA, 17 nt, Human
cuccacucugcuucucu

SEQ ID NO: 2615806 - RNA, 16 nt, Human
cuccacucugcuucuc

SEQ ID NO: 2615807 - RNA, 11 nt, Human
cuccacugccu

SEQ ID NO: 2615808 - RNA, 15 nt, Human
cuccacucugcuucu

SEQ ID NO: 2615809 - RNA, 14 nt, Human
cuccacucugcuuc

SEQ ID NO: 2615810 - RNA, 13 nt, Human
cuccacucugcuu

SEQ ID NO: 2615811 - RNA, 12 nt, Human
cuccacucugcu

SEQ ID NO: 2615812 - RNA, 21 nt, Human
cuccacucuccucuuccaggc

SEQ ID NO: 2615813 - RNA, 17 nt, Human
cuccaccugcucccagg

SEQ ID NO: 2615814 - RNA, 18 nt, Human
cuccaccucagccuugga

SEQ ID NO: 2615815 - RNA, 12 nt, Human
cuccacccugcu

SEQ ID NO: 2615816 - RNA, 14 nt, Human
cuccacccucugag

SEQ ID NO: 2615817 - RNA, 13 nt, Human
cuccacccucuga

SEQ ID NO: 2615818 - RNA, 18 nt, Human
cuccacccucccagaccu

SEQ ID NO: 2615819 - RNA, 14 nt, Human
cuccacccucccag

SEQ ID NO: 2615820 - RNA, 17 nt, Human
cuccacccucugagcuu

SEQ ID NO: 2615821 - RNA, 16 nt, Human
cuccacccucugagcu

SEQ ID NO: 2615822 - RNA, 19 nt, Human
cuccacccucugagcuuug

SEQ ID NO: 2615823 - RNA, 15 nt, Human
cuccaccucagccuu

SEQ ID NO: 2615824 - RNA, 21 nt, Human
cuccaccugccagggacagag

SEQ ID NO: 2615825 - RNA, 18 nt, Human
cuccaccugccagggaca

SEQ ID NO: 2615826 - RNA, 17 nt, Human
cuccaccugccagggac

SEQ ID NO: 2615827 - RNA, 15 nt, Human
cuccaccugccaggg

SEQ ID NO: 2615828 - RNA, 16 nt, Human
cuccaccucagccuug

SEQ ID NO: 2615829 - RNA, 17 nt, Human
cuccaccucagccuugg

SEQ ID NO: 2615830 - RNA, 13 nt, Human
cuccacaguguug

SEQ ID NO: 2615831 - RNA, 21 nt, Human
cuccacaguucgaccugcggc

SEQ ID NO: 2615832 - RNA, 23 nt, Human
cuccacaguucaguggcagggcu

SEQ ID NO: 2615833 - RNA, 17 nt, Human
cuccacaguucaguggc

SEQ ID NO: 2615834 - RNA, 15 nt, Human
cuccacaguucagug

SEQ ID NO: 2615835 - RNA, 15 nt, Human
cuccacagcuaccuc

SEQ ID NO: 2615836 - RNA, 11 nt, Human
cuccacccugc

SEQ ID NO: 2615837 - RNA, 22 nt, Human
cuccacaguucgaccugcggcu

SEQ ID NO: 2615838 - RNA, 19 nt, Human
cuccacccccagcugcuug

SEQ ID NO: 2615839 - RNA, 22 nt, Human
cuccacccccagcugcuugugu

SEQ ID NO: 2615840 - RNA, 16 nt, Human
cuccaccccccagaac

SEQ ID NO: 2615841 - RNA, 21 nt, Human
cuccaccccccagaaccuguc

SEQ ID NO: 2615842 - RNA, 22 nt, Human
cuccaccccccagaaccugucc

SEQ ID NO: 2615843 - RNA, 23 nt, Human
cuccaccccccagaaccuguccu

SEQ ID NO: 2615844 - RNA, 16 nt, Human
cuccacagcaacccca

SEQ ID NO: 2615845 - RNA, 23 nt, Human
cuccacagccaucccagccuugg

SEQ ID NO: 2615846 - RNA, 16 nt, Human
cuccacagccauccca

SEQ ID NO: 2615847 - RNA, 19 nt, Human
cuccacagcaaccccaggc

SEQ ID NO: 2615848 - RNA, 14 nt, Human
cuccacagccgcag

SEQ ID NO: 2615849 - RNA, 15 nt, Human
cuccacagccgcagc

SEQ ID NO: 2615850 - RNA, 19 nt, Human
cucauugucuguguagagu

SEQ ID NO: 2615851 - RNA, 20 nt, Human
cucuccagauguuuccagac

SEQ ID NO: 2615852 - RNA, 13 nt, Human
cucuccaggcacc

SEQ ID NO: 2615853 - RNA, 13 nt, Human
cucuccagccccu

SEQ ID NO: 2615854 - RNA, 12 nt, Human
cucuccagcccc

SEQ ID NO: 2615855 - RNA, 20 nt, Human
cucuccaccucagccuugga

SEQ ID NO: 2615856 - RNA, 15 nt, Human
cucuccacugccuuc

SEQ ID NO: 2615857 - RNA, 16 nt, Human
cucuccaucuucagcu

SEQ ID NO: 2615858 - RNA, 19 nt, Human
cucuccaggcacccuucuu

SEQ ID NO: 2615859 - RNA, 18 nt, Human
cucuccaggcacccuucu

SEQ ID NO: 2615860 - RNA, 17 nt, Human
cucuccaggcgccggcg

SEQ ID NO: 2615861 - RNA, 15 nt, Human
cucuccaucuucagc

SEQ ID NO: 2615862 - RNA, 18 nt, Human
cucuccauaaccccaccc

SEQ ID NO: 2615863 - RNA, 16 nt, Human
cucuccauaaccccac

SEQ ID NO: 2615864 - RNA, 13 nt, Human
cucuccauaaccc

SEQ ID NO: 2615865 - RNA, 21 nt, Human
cucuccauucccguggaacgu

SEQ ID NO: 2615866 - RNA, 20 nt, Human
cucucccaucacuucccuac

SEQ ID NO: 2615867 - RNA, 20 nt, Human
cucucccaucccccugcccu

SEQ ID NO: 2615868 - RNA, 18 nt, Human
cucucccaucccccugcc

SEQ ID NO: 2615869 - RNA, 16 nt, Human
cucucccaucccccug

SEQ ID NO: 2615870 - RNA, 13 nt, Human
cucucccaucccc

SEQ ID NO: 2615871 - RNA, 22 nt, Human
cucucccagucuacccagagaa

SEQ ID NO: 2615872 - RNA, 21 nt, Human
cucucccagucuacccagaga

SEQ ID NO: 2615873 - RNA, 12 nt, Human
cucucccauccc

SEQ ID NO: 2615874 - RNA, 14 nt, Human
cucucccaucacuu

SEQ ID NO: 2615875 - RNA, 18 nt, Human
cucucccaucacuucccu

SEQ ID NO: 2615876 - RNA, 12 nt, Human
cucucccaggac

SEQ ID NO: 2615877 - RNA, 13 nt, Human
cucucccaggacc

SEQ ID NO: 2615878 - RNA, 13 nt, Human
cucucccaucacu

SEQ ID NO: 2615879 - RNA, 20 nt, Human
cucucccagucuacccagag

SEQ ID NO: 2615880 - RNA, 13 nt, Human
cucucccaggggc

SEQ ID NO: 2615881 - RNA, 11 nt, Human
cucucccaggg

SEQ ID NO: 2615882 - RNA, 14 nt, Human
cucucagucucuga

SEQ ID NO: 2615883 - RNA, 15 nt, Human
cucucagucucugag

SEQ ID NO: 2615884 - RNA, 16 nt, Human
cucucagucucugagc

SEQ ID NO: 2615885 - RNA, 17 nt, Human
cucucagucucugagca

SEQ ID NO: 2615886 - RNA, 15 nt, Human
cucucaggugaccaa

SEQ ID NO: 2615887 - RNA, 13 nt, Human
cucucagucucug

SEQ ID NO: 2615888 - RNA, 18 nt, Human
cucucaguacuuuggagg

SEQ ID NO: 2615889 - RNA, 19 nt, Human
cucucaguacuuuggaggc

SEQ ID NO: 2615890 - RNA, 23 nt, Human
cucucaggccagcugcuugggcu

SEQ ID NO: 2615891 - RNA, 22 nt, Human
cucucaggccagcugcuugggc

SEQ ID NO: 2615892 - RNA, 21 nt, Human
cucuaaguuccacugagcucc

SEQ ID NO: 2615893 - RNA, 20 nt, Human
cucuaaguuccacugagcuc

SEQ ID NO: 2615894 - RNA, 19 nt, Human
cucuaaguuccacugagcu

SEQ ID NO: 2615895 - RNA, 18 nt, Human
cucuaaguuccacugagc

SEQ ID NO: 2615896 - RNA, 16 nt, Human
cucuaaguuccacuga

SEQ ID NO: 2615897 - RNA, 23 nt, Human
cucuaaggccgaagaaggguccu

SEQ ID NO: 2615898 - RNA, 14 nt, Human
cucuaagguugggc

SEQ ID NO: 2615899 - RNA, 19 nt, Human
cucuaagccacucuuccaa

SEQ ID NO: 2615900 - RNA, 15 nt, Human
cucuaauaucagcaa

SEQ ID NO: 2615901 - RNA, 16 nt, Human
cucuccacugccuucg

SEQ ID NO: 2615902 - RNA, 23 nt, Human
cucuccaccuaguggcuguccag

SEQ ID NO: 2615903 - RNA, 12 nt, Human
cucuccaccuca

SEQ ID NO: 2615904 - RNA, 13 nt, Human
cucuccaccucag

SEQ ID NO: 2615905 - RNA, 14 nt, Human
cucuccaccucagc

SEQ ID NO: 2615906 - RNA, 15 nt, Human
cucuccaccucagcc

SEQ ID NO: 2615907 - RNA, 16 nt, Human
cucuccaccucagccu

SEQ ID NO: 2615908 - RNA, 17 nt, Human
cucuccaccucagccuu

SEQ ID NO: 2615909 - RNA, 18 nt, Human
cucuccaccucagccuug

SEQ ID NO: 2615910 - RNA, 19 nt, Human
cucuccaagugccagaggu

SEQ ID NO: 2615911 - RNA, 16 nt, Human
cucuccaagugccaga

SEQ ID NO: 2615912 - RNA, 15 nt, Human
cucuccaagugccag

SEQ ID NO: 2615913 - RNA, 14 nt, Human
cucuccaagugcca

SEQ ID NO: 2615914 - RNA, 22 nt, Human
cucuccaagugccagagguggg

SEQ ID NO: 2615915 - RNA, 20 nt, Human
cucuccaagugccagaggug

SEQ ID NO: 2615916 - RNA, 22 nt, Human
cucuccaccuaguggcugucca

SEQ ID NO: 2615917 - RNA, 20 nt, Human
cucuccaccuaguggcuguc

SEQ ID NO: 2615918 - RNA, 17 nt, Human
cucuccaccuaguggcu

SEQ ID NO: 2615919 - RNA, 14 nt, Human
cucuccaccuagug

SEQ ID NO: 2615920 - RNA, 10 nt, Human
cucuccaccu

SEQ ID NO: 2615921 - RNA, 18 nt, Human
cucucagucucugagcag

SEQ ID NO: 2615922 - RNA, 16 nt, Human
cucucaucaacugaau

SEQ ID NO: 2615923 - RNA, 12 nt, Human
cucucaguuuuu

SEQ ID NO: 2615924 - RNA, 17 nt, Human
cucucaucaacugaaug

SEQ ID NO: 2615925 - RNA, 18 nt, Human
cucucaucaacugaauga

SEQ ID NO: 2615926 - RNA, 22 nt, Human
cucucaucaguguccucuugcu

SEQ ID NO: 2615927 - RNA, 21 nt, Human
cucucaguuccgauuucccag

SEQ ID NO: 2615928 - RNA, 13 nt, Human
cucucaugaaccu

SEQ ID NO: 2615929 - RNA, 17 nt, Human
cucucaucucuuagcuc

SEQ ID NO: 2615930 - RNA, 20 nt, Human
cucuccaagucucaguggcu

SEQ ID NO: 2615931 - RNA, 23 nt, Human
cucuccaagucucaguggcuuca

SEQ ID NO: 2615932 - RNA, 21 nt, Human
cucucccauugucccucugcc

SEQ ID NO: 2615933 - RNA, 13 nt, Human
cucuccccacacu

SEQ ID NO: 2615934 - RNA, 14 nt, Human
cucuccccacacua

SEQ ID NO: 2615935 - RNA, 15 nt, Human
cucuccccacacuaa

SEQ ID NO: 2615936 - RNA, 23 nt, Human
cucucccauggagccccagcccc

SEQ ID NO: 2615937 - RNA, 22 nt, Human
cucucccauggagccccagccc

SEQ ID NO: 2615938 - RNA, 21 nt, Human
cucucccauggagccccagcc

SEQ ID NO: 2615939 - RNA, 19 nt, Human
cucucccauggagccccag

SEQ ID NO: 2615940 - RNA, 18 nt, Human
cucucccauggagcccca

SEQ ID NO: 2615941 - RNA, 16 nt, Human
cucucccauggagccc

SEQ ID NO: 2615942 - RNA, 14 nt, Human
cucucccauggagc

SEQ ID NO: 2615943 - RNA, 13 nt, Human
cucucccauggag

SEQ ID NO: 2615944 - RNA, 13 nt, Human
cucucccauggcu

SEQ ID NO: 2615945 - RNA, 16 nt, Human
cucucccauugucccu

SEQ ID NO: 2615946 - RNA, 18 nt, Human
cucucccauugucccucu

SEQ ID NO: 2615947 - RNA, 19 nt, Human
cucucccauugucccucug

SEQ ID NO: 2615948 - RNA, 14 nt, Human
cucucccauuuccu

SEQ ID NO: 2615949 - RNA, 12 nt, Human
cucuccccacac

SEQ ID NO: 2615950 - RNA, 14 nt, Human
cucuccuguaccuc

SEQ ID NO: 2615951 - RNA, 15 nt, Human
cucuccuguaccucu

SEQ ID NO: 2615952 - RNA, 13 nt, Human
cucuccuguaccu

SEQ ID NO: 2615953 - RNA, 17 nt, Human
cucuccuguaccucuug

SEQ ID NO: 2615954 - RNA, 18 nt, Human
cucuccuguaccucuuga

SEQ ID NO: 2615955 - RNA, 22 nt, Human
cucuccuguaccucuugagccu

SEQ ID NO: 2615956 - RNA, 11 nt, Human
cucuccccagc

SEQ ID NO: 2615957 - RNA, 18 nt, Human
cucuccuguacuuuuucc

SEQ ID NO: 2615958 - RNA, 23 nt, Human
cucuccuuucuuuuucuucuucc

SEQ ID NO: 2615959 - RNA, 12 nt, Human
cucuccugucca

SEQ ID NO: 2615960 - RNA, 19 nt, Human
cucuccuuuggccauucca

SEQ ID NO: 2615961 - RNA, 19 nt, Human
cucucgcaccuuuccaaag

SEQ ID NO: 2615962 - RNA, 22 nt, Human
cucuccuuuguauauuauuucu

SEQ ID NO: 2615963 - RNA, 20 nt, Human
cucuccuuuguauauuauuu

SEQ ID NO: 2615964 - RNA, 17 nt, Human
cucucgcaccuuuccaa

SEQ ID NO: 2615965 - RNA, 18 nt, Human
cucuccuuuguauauuau

SEQ ID NO: 2615966 - RNA, 15 nt, Human
cucuccuuuguauau

SEQ ID NO: 2615967 - RNA, 14 nt, Human
cucuccuuuguaua

SEQ ID NO: 2615968 - RNA, 13 nt, Human
cucuccuuuguau

SEQ ID NO: 2615969 - RNA, 18 nt, Human
cucucgcaccuuuccaaa

SEQ ID NO: 2615970 - RNA, 12 nt, Human
cucucggaacug

SEQ ID NO: 2615971 - RNA, 16 nt, Human
cucucggaacugcaug

SEQ ID NO: 2615972 - RNA, 19 nt, Human
cucucggaacugcaugcug

SEQ ID NO: 2615973 - RNA, 20 nt, Human
cucucggaacugcaugcugc

SEQ ID NO: 2615974 - RNA, 21 nt, Human
cucucggaacugcaugcugcu

SEQ ID NO: 2615975 - RNA, 23 nt, Human
cucucggaacugcaugcugcugg

SEQ ID NO: 2615976 - RNA, 16 nt, Human
cucucggaaggcuggc

SEQ ID NO: 2615977 - RNA, 18 nt, Human
cucucggaaggcuggcug

SEQ ID NO: 2615978 - RNA, 19 nt, Human
cucucggaaggcuggcugg

SEQ ID NO: 2615979 - RNA, 22 nt, Human
cucucggaaggcuggcugggca

SEQ ID NO: 2615980 - RNA, 12 nt, Human
cucucucaggcc

SEQ ID NO: 2615981 - RNA, 14 nt, Human
cucucugacucuca

SEQ ID NO: 2615982 - RNA, 16 nt, Human
cucucucacuccuuga

SEQ ID NO: 2615983 - RNA, 15 nt, Human
cucucucacuccuug

SEQ ID NO: 2615984 - RNA, 14 nt, Human
cucucucacuccuu

SEQ ID NO: 2615985 - RNA, 19 nt, Human
cucucuacaaacucccacu

SEQ ID NO: 2615986 - RNA, 17 nt, Human
cucucguaacugguuuc

SEQ ID NO: 2615987 - RNA, 16 nt, Human
cucucguaacugguuu

SEQ ID NO: 2615988 - RNA, 18 nt, Human
cucucggcuccccaugug

SEQ ID NO: 2615989 - RNA, 17 nt, Human
cucucggcuccccaugu

SEQ ID NO: 2615990 - RNA, 21 nt, Human
cucucgguuccacgucccccu

SEQ ID NO: 2615991 - RNA, 19 nt, Human
cucucggguucaagcaauu

SEQ ID NO: 2615992 - RNA, 19 nt, Human
cucucggguugugugucug

SEQ ID NO: 2615993 - RNA, 16 nt, Human
cucucggcuccccaug

SEQ ID NO: 2615994 - RNA, 15 nt, Human
cucucggcuccccau

SEQ ID NO: 2615995 - RNA, 14 nt, Human
cucucggcucccca

SEQ ID NO: 2615996 - RNA, 19 nt, Human
cucucggaguaucugggaa

SEQ ID NO: 2615997 - RNA, 20 nt, Human
cucucggaguaucugggaac

SEQ ID NO: 2615998 - RNA, 22 nt, Human
cucucugcaggucccuaauaaa

SEQ ID NO: 2615999 - RNA, 19 nt, Human
cucucugcaggucccuaau

SEQ ID NO: 2616000 - RNA, 17 nt, Human
cucucugcaggucccua

SEQ ID NO: 2616001 - RNA, 16 nt, Human
cucucugcaggucccu

SEQ ID NO: 2616002 - RNA, 14 nt, Human
cucucugcaggucc

SEQ ID NO: 2616003 - RNA, 13 nt, Human
cucucugcagguc

SEQ ID NO: 2616004 - RNA, 12 nt, Human
cucucugcaggu

SEQ ID NO: 2616005 - RNA, 17 nt, Human
cucucugcagccagccc

SEQ ID NO: 2616006 - RNA, 18 nt, Human
cucucugcagccagccca

SEQ ID NO: 2616007 - RNA, 19 nt, Human
cucucugcagccagcccag

SEQ ID NO: 2616008 - RNA, 20 nt, Human
cucucugcagccagcccagc

SEQ ID NO: 2616009 - RNA, 16 nt, Human
cucucugcagccagcc

SEQ ID NO: 2616010 - RNA, 18 nt, Human
cucucugcaccguacugu

SEQ ID NO: 2616011 - RNA, 23 nt, Human
cucugcaggucccuaauaaagcu

SEQ ID NO: 2616012 - RNA, 23 nt, Human
cucugcaauuccccucugcugcu

SEQ ID NO: 2616013 - RNA, 22 nt, Human
cucugcaauuccccucugcugc

SEQ ID NO: 2616014 - RNA, 15 nt, Human
cucugcagugccuug

SEQ ID NO: 2616015 - RNA, 14 nt, Human
cucugcagugccuu

SEQ ID NO: 2616016 - RNA, 13 nt, Human
cucugcagugccu

SEQ ID NO: 2616017 - RNA, 19 nt, Human
cucugccaacuucuucaga

SEQ ID NO: 2616018 - RNA, 16 nt, Human
cucugcagugccuugg

SEQ ID NO: 2616019 - RNA, 23 nt, Human
cucugcauacucauuaggauggc

SEQ ID NO: 2616020 - RNA, 17 nt, Human
cucugcaauuccccucu

SEQ ID NO: 2616021 - RNA, 16 nt, Human
cucugcaauuccccuc

SEQ ID NO: 2616022 - RNA, 23 nt, Human
cucugcaaugggcacugggauga

SEQ ID NO: 2616023 - RNA, 18 nt, Human
cucugcaaugggcacugg

SEQ ID NO: 2616024 - RNA, 15 nt, Human
cucugcaauuccccu

SEQ ID NO: 2616025 - RNA, 17 nt, Human
cucugcaaugggcacug

SEQ ID NO: 2616026 - RNA, 18 nt, Human
cucugcaaucuucucaga

SEQ ID NO: 2616027 - RNA, 17 nt, Human
cucugcaaucuucucag

SEQ ID NO: 2616028 - RNA, 16 nt, Human
cucugcaaaggaaaua

SEQ ID NO: 2616029 - RNA, 21 nt, Human
cucugcaauuccccucugcug

SEQ ID NO: 2616030 - RNA, 20 nt, Human
cucugcaauuccccucugcu

SEQ ID NO: 2616031 - RNA, 19 nt, Human
cucugcaauuccccucugc

SEQ ID NO: 2616032 - RNA, 18 nt, Human
cucugcaauuccccucug

SEQ ID NO: 2616033 - RNA, 22 nt, Human
cucugcaggucccuaauaaagc

SEQ ID NO: 2616034 - RNA, 12 nt, Human
cucugaucccuc

SEQ ID NO: 2616035 - RNA, 21 nt, Human
cucugaucccucuacagagcu

SEQ ID NO: 2616036 - RNA, 17 nt, Human
cucugauccuucuuccu

SEQ ID NO: 2616037 - RNA, 22 nt, Human
cucugaucccucuacagagcuu

SEQ ID NO: 2616038 - RNA, 22 nt, Human
cucugaucuccauggcuuccuc

SEQ ID NO: 2616039 - RNA, 15 nt, Human
cucugaucuccaugg

SEQ ID NO: 2616040 - RNA, 17 nt, Human
cucugaugaagaggagu

SEQ ID NO: 2616041 - RNA, 18 nt, Human
cucugagggcuuccuuug

SEQ ID NO: 2616042 - RNA, 15 nt, Human
cucugauaggccaag

SEQ ID NO: 2616043 - RNA, 19 nt, Human
cucugauauuccaugaaug

SEQ ID NO: 2616044 - RNA, 20 nt, Human
cucugauauuccaugaaugu

SEQ ID NO: 2616045 - RNA, 23 nt, Human
cucugauauuccaugaauguauc

SEQ ID NO: 2616046 - RNA, 15 nt, Human
cucugaucaaguauu

SEQ ID NO: 2616047 - RNA, 18 nt, Human
cucugauuuucaaagcuu

SEQ ID NO: 2616048 - RNA, 19 nt, Human
cucugauuuucaaagcuuu

SEQ ID NO: 2616049 - RNA, 15 nt, Human
cucugauuuucaaag

SEQ ID NO: 2616050 - RNA, 14 nt, Human
cucugauuugcaaa

SEQ ID NO: 2616051 - RNA, 22 nt, Human
cucugauuuucaaagcuuuuuc

SEQ ID NO: 2616052 - RNA, 20 nt, Human
cucugauuuucaaagcuuuu

SEQ ID NO: 2616053 - RNA, 18 nt, Human
cucugauuugcaaaaaaa

SEQ ID NO: 2616054 - RNA, 22 nt, Human
cucugcaagaauugaagcagga

SEQ ID NO: 2616055 - RNA, 13 nt, Human
cucugagcgccuc

SEQ ID NO: 2616056 - RNA, 15 nt, Human
cucugagccuuggga

SEQ ID NO: 2616057 - RNA, 15 nt, Human
cucugagcugugcag

SEQ ID NO: 2616058 - RNA, 13 nt, Human
cucugagccccug

SEQ ID NO: 2616059 - RNA, 22 nt, Human
cucugagccccugggacugcug

SEQ ID NO: 2616060 - RNA, 22 nt, Human
cucugagaucuaaggaugucac

SEQ ID NO: 2616061 - RNA, 21 nt, Human
cucugagaucuaaggauguca

SEQ ID NO: 2616062 - RNA, 13 nt, Human
cucugagcaguga

SEQ ID NO: 2616063 - RNA, 18 nt, Human
cucugagccaguucagua

SEQ ID NO: 2616064 - RNA, 16 nt, Human
cucugagcaaaugugg

SEQ ID NO: 2616065 - RNA, 17 nt, Human
cucugagggcuuccuuu

SEQ ID NO: 2616066 - RNA, 13 nt, Human
cucugagggcuuc

SEQ ID NO: 2616067 - RNA, 12 nt, Human
cucugagggcuu

SEQ ID NO: 2616068 - RNA, 19 nt, Human
cucugagggaaagcccaga

SEQ ID NO: 2616069 - RNA, 21 nt, Human
cucugaggcuuccagagaguc

SEQ ID NO: 2616070 - RNA, 19 nt, Human
cucugaggcuuccagagag

SEQ ID NO: 2616071 - RNA, 18 nt, Human
cucugaggcuuccagaga

SEQ ID NO: 2616072 - RNA, 16 nt, Human
cucugaggcuuccaga

SEQ ID NO: 2616073 - RNA, 15 nt, Human
cucugaggcuuccag

SEQ ID NO: 2616074 - RNA, 13 nt, Human
cucugaggcugua

SEQ ID NO: 2616075 - RNA, 21 nt, Human
cucugaggcuggauccuagcc

SEQ ID NO: 2616076 - RNA, 19 nt, Human
cucugaggcucuuucuggg

SEQ ID NO: 2616077 - RNA, 20 nt, Human
cucugaggcucuuucugggc

SEQ ID NO: 2616078 - RNA, 13 nt, Human
cucucugcccuaa

SEQ ID NO: 2616079 - RNA, 21 nt, Human
cucucugcccuaaugcgcagg

SEQ ID NO: 2616080 - RNA, 12 nt, Human
cucucugcccua

SEQ ID NO: 2616081 - RNA, 21 nt, Human
cucucugcagccagcccagcc

SEQ ID NO: 2616082 - RNA, 14 nt, Human
cucucugcucugcg

SEQ ID NO: 2616083 - RNA, 22 nt, Human
cucucugcucugcgugucaccu

SEQ ID NO: 2616084 - RNA, 13 nt, Human
cucucugcuguac

SEQ ID NO: 2616085 - RNA, 18 nt, Human
cucugacuggcacagucu

SEQ ID NO: 2616086 - RNA, 12 nt, Human
cucucugccacu

SEQ ID NO: 2616087 - RNA, 16 nt, Human
cucucugcaucugacc

SEQ ID NO: 2616088 - RNA, 12 nt, Human
cucucugcucug

SEQ ID NO: 2616089 - RNA, 21 nt, Human
cucugacuucugccuggagac

SEQ ID NO: 2616090 - RNA, 19 nt, Human
cucugacuucugccuggag

SEQ ID NO: 2616091 - RNA, 18 nt, Human
cucugacuucugccugga

SEQ ID NO: 2616092 - RNA, 17 nt, Human
cucugacuucugccugg

SEQ ID NO: 2616093 - RNA, 16 nt, Human
cucugacuucugccug

SEQ ID NO: 2616094 - RNA, 15 nt, Human
cucugacuucugccu

SEQ ID NO: 2616095 - RNA, 14 nt, Human
cucugacuucugcc

SEQ ID NO: 2616096 - RNA, 13 nt, Human
cucugacuucugc

SEQ ID NO: 2616097 - RNA, 21 nt, Human
cucugagaauuccaaggaguu

SEQ ID NO: 2616098 - RNA, 19 nt, Human
cucugagaauuccaaggag

SEQ ID NO: 2616099 - RNA, 18 nt, Human
cucugagaauuccaagga

SEQ ID NO: 2616100 - RNA, 22 nt, Human
cucugccccagaggccucucuc

SEQ ID NO: 2616101 - RNA, 22 nt, Human
cucugcccuaaugcgcaggcug

SEQ ID NO: 2616102 - RNA, 19 nt, Human
cucugccccagcucuggcu

SEQ ID NO: 2616103 - RNA, 21 nt, Human
cucugccccagcucuggcuuc

SEQ ID NO: 2616104 - RNA, 13 nt, Human
cucugccccagcu

SEQ ID NO: 2616105 - RNA, 16 nt, Human
cucugccccagcucug

SEQ ID NO: 2616106 - RNA, 17 nt, Human
cucugccccagcucugg

SEQ ID NO: 2616107 - RNA, 18 nt, Human
cucugccccagcucuggc

SEQ ID NO: 2616108 - RNA, 16 nt, Human
cucugccccagaggcc

SEQ ID NO: 2616109 - RNA, 15 nt, Human
cucugccccagaggc

SEQ ID NO: 2616110 - RNA, 20 nt, Human
cucugccccagaggccucuc

SEQ ID NO: 2616111 - RNA, 18 nt, Human
cucugccccagaggccuc

SEQ ID NO: 2616112 - RNA, 12 nt, Human
cucugccccagc

SEQ ID NO: 2616113 - RNA, 17 nt, Human
cucugcccagcuugggc

SEQ ID NO: 2616114 - RNA, 15 nt, Human
cucugcccagcuugg

SEQ ID NO: 2616115 - RNA, 18 nt, Human
cucugcccagcuugggcc

SEQ ID NO: 2616116 - RNA, 14 nt, Human
cucugccccagagg

SEQ ID NO: 2616117 - RNA, 14 nt, Human
cucugcccagcuug

SEQ ID NO: 2616118 - RNA, 13 nt, Human
cucugcccagcuu

SEQ ID NO: 2616119 - RNA, 23 nt, Human
cucugccagaagauccccucagg

SEQ ID NO: 2616120 - RNA, 17 nt, Human
cucugccagaagauccc

SEQ ID NO: 2616121 - RNA, 22 nt, Human
cucugccagaagauccccucag

SEQ ID NO: 2616122 - RNA, 18 nt, Human
cucugccaccuccccuau

SEQ ID NO: 2616123 - RNA, 14 nt, Human
cucugccagccaca

SEQ ID NO: 2616124 - RNA, 18 nt, Human
cucugccaccagagaccg

SEQ ID NO: 2616125 - RNA, 17 nt, Human
cucugccaccagagacc

SEQ ID NO: 2616126 - RNA, 16 nt, Human
cucugccaccagagac

SEQ ID NO: 2616127 - RNA, 14 nt, Human
cucugccaccagag

SEQ ID NO: 2616128 - RNA, 23 nt, Human
cucugccaacuucuucagagcug

SEQ ID NO: 2616129 - RNA, 11 nt, Human
cucugccacca

SEQ ID NO: 2616130 - RNA, 10 nt, Human
cucugccacc

SEQ ID NO: 2616131 - RNA, 20 nt, Human
cucugccacccuaccuguuc

SEQ ID NO: 2616132 - RNA, 18 nt, Human
cucugccacccuaccugu

SEQ ID NO: 2616133 - RNA, 17 nt, Human
cucugccacccuaccug

SEQ ID NO: 2616134 - RNA, 23 nt, Human
cucugccaccagagaccguccuc

SEQ ID NO: 2616135 - RNA, 22 nt, Human
cucugccacccuaccuguucag

SEQ ID NO: 2616136 - RNA, 12 nt, Human
cucugccaccuc

SEQ ID NO: 2616137 - RNA, 13 nt, Human
cucugccaccucc

SEQ ID NO: 2616138 - RNA, 14 nt, Human
cucugccaccuccc

SEQ ID NO: 2616139 - RNA, 23 nt, Human
cucugcccuccaagaccuucucc

SEQ ID NO: 2616140 - RNA, 16 nt, Human
cucugcccuccaagac

SEQ ID NO: 2616141 - RNA, 15 nt, Human
cucugcccuccaaga

SEQ ID NO: 2616142 - RNA, 14 nt, Human
cucugcccuccaag

SEQ ID NO: 2616143 - RNA, 23 nt, Human
cucugcccuaaugcgcaggcugg

SEQ ID NO: 2616144 - RNA, 11 nt, Human
cucugcccugc

SEQ ID NO: 2616145 - RNA, 15 nt, Human
cucugcccugcccua

SEQ ID NO: 2616146 - RNA, 16 nt, Human
cucugcccugcccuag

SEQ ID NO: 2616147 - RNA, 21 nt, Human
cucugccaaaggaugugauau

SEQ ID NO: 2616148 - RNA, 17 nt, Human
cucugcccugcccuagc

SEQ ID NO: 2616149 - RNA, 19 nt, Human
cucugcccugcccuagcuc

SEQ ID NO: 2616150 - RNA, 20 nt, Human
cucugcccugcccuagcucc

SEQ ID NO: 2616151 - RNA, 23 nt, Human
cucugcccugcccuagcuccaca

SEQ ID NO: 2616152 - RNA, 12 nt, Human
cucugcccugcg

SEQ ID NO: 2616153 - RNA, 14 nt, Human
cucugccucccuca

SEQ ID NO: 2616154 - RNA, 21 nt, Human
cucugccucccucacccugag

SEQ ID NO: 2616155 - RNA, 20 nt, Human
cucugccucccucacccuga

SEQ ID NO: 2616156 - RNA, 14 nt, Human
cucugccuccucuu

SEQ ID NO: 2616157 - RNA, 13 nt, Human
cucuggagagaaa

SEQ ID NO: 2616158 - RNA, 12 nt, Human
cucuggagagaa

SEQ ID NO: 2616159 - RNA, 24 nt, Human
cucuggagacagccccagagcagg

SEQ ID NO: 2616160 - RNA, 20 nt, Human
cucuggagacagccccagag

SEQ ID NO: 2616161 - RNA, 19 nt, Human
cucuggagccaaguccaga

SEQ ID NO: 2616162 - RNA, 15 nt, Human
cucuggagagaaaca

SEQ ID NO: 2616163 - RNA, 12 nt, Human
cucuggagccca

SEQ ID NO: 2616164 - RNA, 14 nt, Human
cucuggacuggcua

SEQ ID NO: 2616165 - RNA, 15 nt, Human
cucuggacuggcuag

SEQ ID NO: 2616166 - RNA, 16 nt, Human
cucuggacuggcuaga

SEQ ID NO: 2616167 - RNA, 19 nt, Human
cucuggacuggcuagaguc

SEQ ID NO: 2616168 - RNA, 19 nt, Human
cucuggagacagccccaga

SEQ ID NO: 2616169 - RNA, 18 nt, Human
cucuggagacagccccag

SEQ ID NO: 2616170 - RNA, 17 nt, Human
cucuggagacagcccca

SEQ ID NO: 2616171 - RNA, 16 nt, Human
cucuggagacagcccc

SEQ ID NO: 2616172 - RNA, 15 nt, Human
cucuggagacagccc

SEQ ID NO: 2616173 - RNA, 16 nt, Human
cucuggaccaacccug

SEQ ID NO: 2616174 - RNA, 20 nt, Human
cucuggaauuugcaagucau

SEQ ID NO: 2616175 - RNA, 18 nt, Human
cucuggacagccccaccc

SEQ ID NO: 2616176 - RNA, 15 nt, Human
cucuggacagcccca

SEQ ID NO: 2616177 - RNA, 16 nt, Human
cucuggacaaagcguu

SEQ ID NO: 2616178 - RNA, 22 nt, Human
cucuggaaaggggggagcuggg

SEQ ID NO: 2616179 - RNA, 21 nt, Human
cucuggaaaggggggagcugg

SEQ ID NO: 2616180 - RNA, 21 nt, Human
cucuggaagagaggaaugccu

SEQ ID NO: 2616181 - RNA, 23 nt, Human
cucuggacggcaggcucacugcc

SEQ ID NO: 2616182 - RNA, 13 nt, Human
cucuggacuggcu

SEQ ID NO: 2616183 - RNA, 18 nt, Human
cucuggacggcaggcuca

SEQ ID NO: 2616184 - RNA, 17 nt, Human
cucuggacggcaggcuc

SEQ ID NO: 2616185 - RNA, 16 nt, Human
cucuggacggcaggcu

SEQ ID NO: 2616186 - RNA, 20 nt, Human
cucuggaccagccuguugga

SEQ ID NO: 2616187 - RNA, 14 nt, Human
cucuggaccagccu

SEQ ID NO: 2616188 - RNA, 13 nt, Human
cucuggaccagcc

SEQ ID NO: 2616189 - RNA, 22 nt, Human
cucuggaccaacccuguuuccu

SEQ ID NO: 2616190 - RNA, 15 nt, Human
cucuggacggcaggc

SEQ ID NO: 2616191 - RNA, 20 nt, Human
cucugccugccccgccccca

SEQ ID NO: 2616192 - RNA, 13 nt, Human
cucugccuguccc

SEQ ID NO: 2616193 - RNA, 14 nt, Human
cucugccugucccu

SEQ ID NO: 2616194 - RNA, 15 nt, Human
cucugccugccccgc

SEQ ID NO: 2616195 - RNA, 16 nt, Human
cucugccugucccucu

SEQ ID NO: 2616196 - RNA, 18 nt, Human
cucugccugucccucuca

SEQ ID NO: 2616197 - RNA, 19 nt, Human
cucugccugucccucucag

SEQ ID NO: 2616198 - RNA, 20 nt, Human
cucugccugucccucucagg

SEQ ID NO: 2616199 - RNA, 16 nt, Human
cucugccuccucuuca

SEQ ID NO: 2616200 - RNA, 15 nt, Human
cucugccuccucuuc

SEQ ID NO: 2616201 - RNA, 14 nt, Human
cucugccucugaca

SEQ ID NO: 2616202 - RNA, 20 nt, Human
cucugcggaccccagcugug

SEQ ID NO: 2616203 - RNA, 19 nt, Human
cucugcggaccccagcugu

SEQ ID NO: 2616204 - RNA, 17 nt, Human
cucugcggaccccagcu

SEQ ID NO: 2616205 - RNA, 16 nt, Human
cucugcggaccccagc

SEQ ID NO: 2616206 - RNA, 15 nt, Human
cucugcggaccccag

SEQ ID NO: 2616207 - RNA, 14 nt, Human
cucugcggacccca

SEQ ID NO: 2616208 - RNA, 21 nt, Human
cucugccugucccucucaggc

SEQ ID NO: 2616209 - RNA, 14 nt, Human
cucuggaauuugaa

SEQ ID NO: 2616210 - RNA, 15 nt, Human
cucugcuuuggaaau

SEQ ID NO: 2616211 - RNA, 20 nt, Human
cucuggaaaaugugacccag

SEQ ID NO: 2616212 - RNA, 19 nt, Human
cucuggaaaaugugaccca

SEQ ID NO: 2616213 - RNA, 21 nt, Human
cucuggaaaaugugacccaga

SEQ ID NO: 2616214 - RNA, 15 nt, Human
cucuugggcugagac

SEQ ID NO: 2616215 - RNA, 16 nt, Human
cucuugggcugagacu

SEQ ID NO: 2616216 - RNA, 21 nt, Human
cucuugggaacugaacucacu

SEQ ID NO: 2616217 - RNA, 19 nt, Human
cucuugggaaauaugucaa

SEQ ID NO: 2616218 - RNA, 22 nt, Human
cucuuggagccugcagagcugc

SEQ ID NO: 2616219 - RNA, 20 nt, Human
cucuugagaucuugguccug

SEQ ID NO: 2616220 - RNA, 14 nt, Human
cucuuggcuccacu

SEQ ID NO: 2616221 - RNA, 16 nt, Human
cucuuggccugaucag

SEQ ID NO: 2616222 - RNA, 19 nt, Human
cucuugguccugcugcagu

SEQ ID NO: 2616223 - RNA, 18 nt, Human
cucuugguccugcugcag

SEQ ID NO: 2616224 - RNA, 18 nt, Human
cucuugggcugagacugg

SEQ ID NO: 2616225 - RNA, 15 nt, Human
cucuuggucuuccca

SEQ ID NO: 2616226 - RNA, 17 nt, Human
cucuugggcugagacug

SEQ ID NO: 2616227 - RNA, 18 nt, Human
cucuuggucuucccaggc

SEQ ID NO: 2616228 - RNA, 20 nt, Human
cucuugguuuccuuccuugg

SEQ ID NO: 2616229 - RNA, 14 nt, Human
cucuuguaaauaaa

SEQ ID NO: 2616230 - RNA, 12 nt, Human
cucuuguaaaua

SEQ ID NO: 2616231 - RNA, 15 nt, Human
cucuugaccucaggu

SEQ ID NO: 2616232 - RNA, 13 nt, Human
cucuugaccucag

SEQ ID NO: 2616233 - RNA, 22 nt, Human
cucuugagcaguggcuggucca

SEQ ID NO: 2616234 - RNA, 18 nt, Human
cucuugagcaguggcugg

SEQ ID NO: 2616235 - RNA, 15 nt, Human
cucuugagcaguggc

SEQ ID NO: 2616236 - RNA, 16 nt, Human
cucuugaccucaggug

SEQ ID NO: 2616237 - RNA, 16 nt, Human
cucuugaacugagcuu

SEQ ID NO: 2616238 - RNA, 17 nt, Human
cucuugaacugagcuug

SEQ ID NO: 2616239 - RNA, 18 nt, Human
cucuugaacuccugaccu

SEQ ID NO: 2616240 - RNA, 20 nt, Human
cucuugaagaugcugaaaca

SEQ ID NO: 2616241 - RNA, 19 nt, Human
cucuugaacugagcuugga

SEQ ID NO: 2616242 - RNA, 20 nt, Human
cucuugaagacacugaaaua

SEQ ID NO: 2616243 - RNA, 21 nt, Human
cucuugaagacacugaaauau

SEQ ID NO: 2616244 - RNA, 18 nt, Human
cucuuucucugccaguga

SEQ ID NO: 2616245 - RNA, 17 nt, Human
cucuuucucugccagug

SEQ ID NO: 2616246 - RNA, 16 nt, Human
cucuuucucugccagu

SEQ ID NO: 2616247 - RNA, 15 nt, Human
cucuuucucugccag

SEQ ID NO: 2616248 - RNA, 13 nt, Human
cucuuucucugcc

SEQ ID NO: 2616249 - RNA, 19 nt, Human
cucuuucucuccuuucuuu

SEQ ID NO: 2616250 - RNA, 12 nt, Human
cucuuucucugc

SEQ ID NO: 2616251 - RNA, 17 nt, Human
cucuuucuauuguuucu

SEQ ID NO: 2616252 - RNA, 18 nt, Human
cucuuucuccuuagucuu

SEQ ID NO: 2616253 - RNA, 15 nt, Human
cucuuuggacacuca

SEQ ID NO: 2616254 - RNA, 18 nt, Human
cucuuuggacacucacac

SEQ ID NO: 2616255 - RNA, 12 nt, Human
cucuuugcuuug

SEQ ID NO: 2616256 - RNA, 15 nt, Human
cucuuucucuccuuu

SEQ ID NO: 2616257 - RNA, 13 nt, Human
cucuuugcuuugc

SEQ ID NO: 2616258 - RNA, 14 nt, Human
cucuuugcuuugcu

SEQ ID NO: 2616259 - RNA, 15 nt, Human
cucuuugcuuugcuu

SEQ ID NO: 2616260 - RNA, 16 nt, Human
cucuuugcuuugcuuu

SEQ ID NO: 2616261 - RNA, 18 nt, Human
cucuuugcuuugcuuucu

SEQ ID NO: 2616262 - RNA, 11 nt, Human
cucuuucugua

SEQ ID NO: 2616263 - RNA, 13 nt, Human
cucuuucuguaua

SEQ ID NO: 2616264 - RNA, 12 nt, Human
cucuuucugggc

SEQ ID NO: 2616265 - RNA, 14 nt, Human
cucuugugcuggau

SEQ ID NO: 2616266 - RNA, 12 nt, Human
cucuuucaaaac

SEQ ID NO: 2616267 - RNA, 23 nt, Human
cucuugugcuggauggagcccag

SEQ ID NO: 2616268 - RNA, 22 nt, Human
cucuuucaagcagucgugccug

SEQ ID NO: 2616269 - RNA, 11 nt, Human
cucuuucaaag

SEQ ID NO: 2616270 - RNA, 13 nt, Human
cucuuucauccac

SEQ ID NO: 2616271 - RNA, 12 nt, Human
cucuuucaucca

SEQ ID NO: 2616272 - RNA, 17 nt, Human
cucuuuccaucuacccu

SEQ ID NO: 2616273 - RNA, 23 nt, Human
cucuuguaaugauauagccagaa

SEQ ID NO: 2616274 - RNA, 16 nt, Human
cucuuggucuucccag

SEQ ID NO: 2616275 - RNA, 21 nt, Human
cucuuguaauccgaaucucuu

SEQ ID NO: 2616276 - RNA, 15 nt, Human
cucuuguauuaaacu

SEQ ID NO: 2616277 - RNA, 20 nt, Human
cucuugugaggaaagucauu

SEQ ID NO: 2616278 - RNA, 24 nt, Human
cucuuguaaauaaagcccugggau

SEQ ID NO: 2616279 - RNA, 23 nt, Human
cucuuguaaauaaagcccuggga

SEQ ID NO: 2616280 - RNA, 20 nt, Human
cucuuguaaauaaagcccug

SEQ ID NO: 2616281 - RNA, 19 nt, Human
cucuuguaaauaaagcccu

SEQ ID NO: 2616282 - RNA, 18 nt, Human
cucuuguaaauaaagccc

SEQ ID NO: 2616283 - RNA, 17 nt, Human
cucuuguaaauaaagcc

SEQ ID NO: 2616284 - RNA, 21 nt, Human
cucuuccaggcugggagagcc

SEQ ID NO: 2616285 - RNA, 22 nt, Human
cucuuccaggcugggagagccu

SEQ ID NO: 2616286 - RNA, 23 nt, Human
cucuuccaggcugggagagccuu

SEQ ID NO: 2616287 - RNA, 13 nt, Human
cucuucauacuuu

SEQ ID NO: 2616288 - RNA, 15 nt, Human
cucuucauaauucua

SEQ ID NO: 2616289 - RNA, 19 nt, Human
cucuuccagucuuccugac

SEQ ID NO: 2616290 - RNA, 19 nt, Human
cucuucauacuuuuuuuca

SEQ ID NO: 2616291 - RNA, 22 nt, Human
cucuuccagucuuccugacacu

SEQ ID NO: 2616292 - RNA, 23 nt, Human
cucuuccagucuuccugacacuu

SEQ ID NO: 2616293 - RNA, 14 nt, Human
cucuucuccacugg

SEQ ID NO: 2616294 - RNA, 17 nt, Human
cucuucuccacuggaug

SEQ ID NO: 2616295 - RNA, 15 nt, Human
cucuucuccacugga

SEQ ID NO: 2616296 - RNA, 16 nt, Human
cucuucuccccagagu

SEQ ID NO: 2616297 - RNA, 19 nt, Human
cucuucuccacuggaugga

SEQ ID NO: 2616298 - RNA, 12 nt, Human
cucuucuccagg

SEQ ID NO: 2616299 - RNA, 16 nt, Human
cucuucuccuuucaca

SEQ ID NO: 2616300 - RNA, 15 nt, Human
cucuucuccuuucac

SEQ ID NO: 2616301 - RNA, 13 nt, Human
cucuucuccuuuc

SEQ ID NO: 2616302 - RNA, 21 nt, Human
cucuucugggagggcagcagg

SEQ ID NO: 2616303 - RNA, 22 nt, Human
cucuucugggagggcagcaggg

SEQ ID NO: 2616304 - RNA, 11 nt, Human
cucuucuggcu

SEQ ID NO: 2616305 - RNA, 14 nt, Human
cucuucuggcucaa

SEQ ID NO: 2616306 - RNA, 20 nt, Human
cucuucugcuuaggagagac

SEQ ID NO: 2616307 - RNA, 13 nt, Human
cucuucugcucca

SEQ ID NO: 2616308 - RNA, 21 nt, Human
cucuucugcuccacccuuggc

SEQ ID NO: 2616309 - RNA, 19 nt, Human
cucuucugcuccacccuug

SEQ ID NO: 2616310 - RNA, 20 nt, Human
cucuucugcuccacccuugg

SEQ ID NO: 2616311 - RNA, 14 nt, Human
cucuucugcuccac

SEQ ID NO: 2616312 - RNA, 15 nt, Human
cucuucugcuccacc

SEQ ID NO: 2616313 - RNA, 16 nt, Human
cucuucugcuccaccc

SEQ ID NO: 2616314 - RNA, 18 nt, Human
cucuucugcuccacccuu

SEQ ID NO: 2616315 - RNA, 18 nt, Human
cucuggcagcucagagag

SEQ ID NO: 2616316 - RNA, 17 nt, Human
cucuggcagcucagaga

SEQ ID NO: 2616317 - RNA, 15 nt, Human
cucuggagcccacug

SEQ ID NO: 2616318 - RNA, 20 nt, Human
cucuguucugcacacagcac

SEQ ID NO: 2616319 - RNA, 21 nt, Human
cucuguucugcacacagcacg

SEQ ID NO: 2616320 - RNA, 19 nt, Human
cucuguucugcacacagca

SEQ ID NO: 2616321 - RNA, 23 nt, Human
cucuguuccccuaguaagugccu

SEQ ID NO: 2616322 - RNA, 22 nt, Human
cucuguuccuucacauccugug

SEQ ID NO: 2616323 - RNA, 19 nt, Human
cucuggcagcucagagagg

SEQ ID NO: 2616324 - RNA, 20 nt, Human
cucuggcagcucagagaggg

SEQ ID NO: 2616325 - RNA, 14 nt, Human
cucuguuccccuag

SEQ ID NO: 2616326 - RNA, 16 nt, Human
cucuguuccuucacau

SEQ ID NO: 2616327 - RNA, 13 nt, Human
cucuuaaaaccca

SEQ ID NO: 2616328 - RNA, 24 nt, Human
cucuuaaaacccaagugccuuagc

SEQ ID NO: 2616329 - RNA, 20 nt, Human
cucuguugcaagugcaauaa

SEQ ID NO: 2616330 - RNA, 20 nt, Human
cucuuaaagaaaacccaccc

SEQ ID NO: 2616331 - RNA, 20 nt, Human
cucuuaaagcugccuguagu

SEQ ID NO: 2616332 - RNA, 13 nt, Human
cucuuaagaagac

SEQ ID NO: 2616333 - RNA, 17 nt, Human
cucuuaacaauuucugu

SEQ ID NO: 2616334 - RNA, 22 nt, Human
cucuuaaagaaaacccaccccg

SEQ ID NO: 2616335 - RNA, 18 nt, Human
cucuucaggccucccucu

SEQ ID NO: 2616336 - RNA, 19 nt, Human
cucuucaggccucccucuc

SEQ ID NO: 2616337 - RNA, 20 nt, Human
cucuucaggccucccucucu

SEQ ID NO: 2616338 - RNA, 20 nt, Human
cucuucaguuaagccuuugg

SEQ ID NO: 2616339 - RNA, 23 nt, Human
cucuucaguuaagccuuuggaaa

SEQ ID NO: 2616340 - RNA, 19 nt, Human
cucuucaguuaagccuuug

SEQ ID NO: 2616341 - RNA, 14 nt, Human
cucuucagguucuu

SEQ ID NO: 2616342 - RNA, 15 nt, Human
cucuucagguucuua

SEQ ID NO: 2616343 - RNA, 22 nt, Human
cucuucagguucuuagugucac

SEQ ID NO: 2616344 - RNA, 17 nt, Human
cugaaguagugugcagu

SEQ ID NO: 2616345 - RNA, 16 nt, Human
cugaagucacacagug

SEQ ID NO: 2616346 - RNA, 15 nt, Human
cugaagucacacagu

SEQ ID NO: 2616347 - RNA, 19 nt, Human
cugaagguaaaauugaaag

SEQ ID NO: 2616348 - RNA, 19 nt, Human
cugaagaggcgggccagcc

SEQ ID NO: 2616349 - RNA, 18 nt, Human
cugaagaggcgggccagc

SEQ ID NO: 2616350 - RNA, 15 nt, Human
cugaagguugaagag

SEQ ID NO: 2616351 - RNA, 20 nt, Human
cugaagaggcgggccagcca

SEQ ID NO: 2616352 - RNA, 14 nt, Human
cugaagucacacag

SEQ ID NO: 2616353 - RNA, 24 nt, Human
cugaagucuuuguacagacaacaa

SEQ ID NO: 2616354 - RNA, 22 nt, Human
cugaagucacugcacagugcau

SEQ ID NO: 2616355 - RNA, 16 nt, Human
cugaagucacugcaca

SEQ ID NO: 2616356 - RNA, 17 nt, Human
cugaagucacugcacag

SEQ ID NO: 2616357 - RNA, 15 nt, Human
cugaauaaaugucuu

SEQ ID NO: 2616358 - RNA, 13 nt, Human
cugaauaaauguc

SEQ ID NO: 2616359 - RNA, 12 nt, Human
cugaauaaaugu

SEQ ID NO: 2616360 - RNA, 17 nt, Human
cugaauaaaugguagua

SEQ ID NO: 2616361 - RNA, 14 nt, Human
cugaauaaauggua

SEQ ID NO: 2616362 - RNA, 12 nt, Human
cugaauaaaugg

SEQ ID NO: 2616363 - RNA, 23 nt, Human
cugaaguggacucuuugguggcu

SEQ ID NO: 2616364 - RNA, 15 nt, Human
cugaaguggacucuu

SEQ ID NO: 2616365 - RNA, 18 nt, Human
cugaagugcauccaaagg

SEQ ID NO: 2616366 - RNA, 17 nt, Human
cugaagugcauccaaag

SEQ ID NO: 2616367 - RNA, 16 nt, Human
cugaagugcauccaaa

SEQ ID NO: 2616368 - RNA, 14 nt, Human
cugaagugcaucca

SEQ ID NO: 2616369 - RNA, 22 nt, Human
cugaagugcauccaaaggugcu

SEQ ID NO: 2616370 - RNA, 19 nt, Human
cugaagugcauccaaaggu

SEQ ID NO: 2616371 - RNA, 16 nt, Human
cugaagugcuuagugu

SEQ ID NO: 2616372 - RNA, 13 nt, Human
cugaagugaaacu

SEQ ID NO: 2616373 - RNA, 17 nt, Human
cugaagugaaacugcuu

SEQ ID NO: 2616374 - RNA, 21 nt, Human
cugaagugagcacagccuagg

SEQ ID NO: 2616375 - RNA, 19 nt, Human
cugaagugagcacagccua

SEQ ID NO: 2616376 - RNA, 18 nt, Human
cugaagugagcacagccu

SEQ ID NO: 2616377 - RNA, 19 nt, Human
cugaagugaaacugcuugu

SEQ ID NO: 2616378 - RNA, 16 nt, Human
cugaauacaaagugau

SEQ ID NO: 2616379 - RNA, 16 nt, Human
cugaauaauuucuuac

SEQ ID NO: 2616380 - RNA, 15 nt, Human
cugaauaauuucuua

SEQ ID NO: 2616381 - RNA, 13 nt, Human
cugaauaauuucu

SEQ ID NO: 2616382 - RNA, 16 nt, Human
cugaauacauucugcu

SEQ ID NO: 2616383 - RNA, 18 nt, Human
cugaauacauucugcuuu

SEQ ID NO: 2616384 - RNA, 20 nt, Human
cugaauaacauuuguguggu

SEQ ID NO: 2616385 - RNA, 15 nt, Human
cugaauaacauuugu

SEQ ID NO: 2616386 - RNA, 11 nt, Human
cugaauaauaa

SEQ ID NO: 2616387 - RNA, 16 nt, Human
cugaauacagaggcaa

SEQ ID NO: 2616388 - RNA, 21 nt, Human
cugaagacucauucuucugua

SEQ ID NO: 2616389 - RNA, 19 nt, Human
cugaagacucauucuucug

SEQ ID NO: 2616390 - RNA, 16 nt, Human
cugaaccuuccaucuc

SEQ ID NO: 2616391 - RNA, 22 nt, Human
cugaacuucaggauaauaaagu

SEQ ID NO: 2616392 - RNA, 21 nt, Human
cugaagagaagggcagggcug

SEQ ID NO: 2616393 - RNA, 16 nt, Human
cugaagaggcgggcca

SEQ ID NO: 2616394 - RNA, 15 nt, Human
cugaagaggcgggcc

SEQ ID NO: 2616395 - RNA, 14 nt, Human
cugaagaggcgggc

SEQ ID NO: 2616396 - RNA, 15 nt, Human
cugaacccugugcug

SEQ ID NO: 2616397 - RNA, 20 nt, Human
cugaagagcuauuauauaaa

SEQ ID NO: 2616398 - RNA, 21 nt, Human
cugaacuuggcgcugccccug

SEQ ID NO: 2616399 - RNA, 16 nt, Human
cugaacuuggcgcugc

SEQ ID NO: 2616400 - RNA, 15 nt, Human
cugaacuuggcgcug

SEQ ID NO: 2616401 - RNA, 14 nt, Human
cugaaccuuccauc

SEQ ID NO: 2616402 - RNA, 21 nt, Human
cucuuuggucuacacugugcu

SEQ ID NO: 2616403 - RNA, 19 nt, Human
cucuuuggucuacacugug

SEQ ID NO: 2616404 - RNA, 18 nt, Human
cucuuuggcuccccugua

SEQ ID NO: 2616405 - RNA, 15 nt, Human
cucuuuggcagucua

SEQ ID NO: 2616406 - RNA, 20 nt, Human
cucuuugcuuugcuuucugc

SEQ ID NO: 2616407 - RNA, 22 nt, Human
cucuuugcuuugcuuucugcuc

SEQ ID NO: 2616408 - RNA, 18 nt, Human
cucuuugggccuggcucc

SEQ ID NO: 2616409 - RNA, 20 nt, Human
cugaacccugugcugguguc

SEQ ID NO: 2616410 - RNA, 23 nt, Human
cugaacccugugcugguguccug

SEQ ID NO: 2616411 - RNA, 18 nt, Human
cugaacccugugcuggug

SEQ ID NO: 2616412 - RNA, 17 nt, Human
cugaacccugugcuggu

SEQ ID NO: 2616413 - RNA, 20 nt, Human
cucuuuggggucagccaggg

SEQ ID NO: 2616414 - RNA, 19 nt, Human
cucuuuggggucagccagg

SEQ ID NO: 2616415 - RNA, 17 nt, Human
cucuuuggggucagcca

SEQ ID NO: 2616416 - RNA, 21 nt, Human
cucuuugggaauguuugucuc

SEQ ID NO: 2616417 - RNA, 20 nt, Human
cucuuugggaauguuugucu

SEQ ID NO: 2616418 - RNA, 15 nt, Human
cucuuugggaauguu

SEQ ID NO: 2616419 - RNA, 17 nt, Human
cugaaccggcuuuacca

SEQ ID NO: 2616420 - RNA, 14 nt, Human
cugaaccugaugcu

SEQ ID NO: 2616421 - RNA, 17 nt, Human
cugaaccugaugcugac

SEQ ID NO: 2616422 - RNA, 20 nt, Human
cugaaccggcuuuaccaaac

SEQ ID NO: 2616423 - RNA, 21 nt, Human
cugaaccuggguaacuaggga

SEQ ID NO: 2616424 - RNA, 11 nt, Human
cugacccacug

SEQ ID NO: 2616425 - RNA, 15 nt, Human
cugaccaugcucauc

SEQ ID NO: 2616426 - RNA, 23 nt, Human
cugaccauccacucuacccuccc

SEQ ID NO: 2616427 - RNA, 19 nt, Human
cugaccauccacucuaccc

SEQ ID NO: 2616428 - RNA, 22 nt, Human
cugaccauccacucuacccucc

SEQ ID NO: 2616429 - RNA, 13 nt, Human
cugaccagaacua

SEQ ID NO: 2616430 - RNA, 13 nt, Human
cugaccagcagcg

SEQ ID NO: 2616431 - RNA, 14 nt, Human
cugaccagcagcgc

SEQ ID NO: 2616432 - RNA, 15 nt, Human
cugaccagcagcgcc

SEQ ID NO: 2616433 - RNA, 15 nt, Human
cugaccauccacucu

SEQ ID NO: 2616434 - RNA, 16 nt, Human
cugaccauccacucua

SEQ ID NO: 2616435 - RNA, 17 nt, Human
cugaccacccuccccuc

SEQ ID NO: 2616436 - RNA, 16 nt, Human
cugaccacccuccccu

SEQ ID NO: 2616437 - RNA, 14 nt, Human
cugaccacccuccc

SEQ ID NO: 2616438 - RNA, 13 nt, Human
cugaccacccucc

SEQ ID NO: 2616439 - RNA, 12 nt, Human
cugaccacccuc

SEQ ID NO: 2616440 - RNA, 20 nt, Human
cugacauuguggcacauucu

SEQ ID NO: 2616441 - RNA, 18 nt, Human
cugaccacagcacagcca

SEQ ID NO: 2616442 - RNA, 23 nt, Human
cugaccacggacguuuccaucag

SEQ ID NO: 2616443 - RNA, 22 nt, Human
cugaccacggacguuuccauca

SEQ ID NO: 2616444 - RNA, 22 nt, Human
cugaccacgcuuucuagcuguu

SEQ ID NO: 2616445 - RNA, 16 nt, Human
cugacauuggagccug

SEQ ID NO: 2616446 - RNA, 15 nt, Human
cugacauuggagccu

SEQ ID NO: 2616447 - RNA, 12 nt, Human
cugaccacagca

SEQ ID NO: 2616448 - RNA, 14 nt, Human
cugaccacagcaca

SEQ ID NO: 2616449 - RNA, 15 nt, Human
cugaccacagcacag

SEQ ID NO: 2616450 - RNA, 19 nt, Human
cugacauucucaggaagcc

SEQ ID NO: 2616451 - RNA, 14 nt, Human
cugacauuggagcc

SEQ ID NO: 2616452 - RNA, 21 nt, Human
cugaccacacuuccuguccag

SEQ ID NO: 2616453 - RNA, 19 nt, Human
cugacaggcaaugcuggcu

SEQ ID NO: 2616454 - RNA, 18 nt, Human
cugacaggcaaugcuggc

SEQ ID NO: 2616455 - RNA, 17 nt, Human
cugacaggcaaugcugg

SEQ ID NO: 2616456 - RNA, 16 nt, Human
cugacaggcaaugcug

SEQ ID NO: 2616457 - RNA, 20 nt, Human
cugacaggcaaugcuggcug

SEQ ID NO: 2616458 - RNA, 21 nt, Human
cugacauuaacaguuuuccau

SEQ ID NO: 2616459 - RNA, 16 nt, Human
cugacauucaccugcc

SEQ ID NO: 2616460 - RNA, 22 nt, Human
cugacagcugcuccuagaggga

SEQ ID NO: 2616461 - RNA, 23 nt, Human
cugacauuaacaguuuuccauga

SEQ ID NO: 2616462 - RNA, 17 nt, Human
cugacauucaccugccc

SEQ ID NO: 2616463 - RNA, 23 nt, Human
cugacauucaccugccccaacuc

SEQ ID NO: 2616464 - RNA, 17 nt, Human
cugacauuguuggccaa

SEQ ID NO: 2616465 - RNA, 17 nt, Human
cugacagacagcccucc

SEQ ID NO: 2616466 - RNA, 19 nt, Human
cugacagacagcccuccau

SEQ ID NO: 2616467 - RNA, 21 nt, Human
cugacagacacaggcccggcu

SEQ ID NO: 2616468 - RNA, 11 nt, Human
cugacaggcaa

SEQ ID NO: 2616469 - RNA, 19 nt, Human
cugacagcugcuccuagag

SEQ ID NO: 2616470 - RNA, 23 nt, Human
cugacagcugcuccuagagggag

SEQ ID NO: 2616471 - RNA, 12 nt, Human
cugacagaggag

SEQ ID NO: 2616472 - RNA, 19 nt, Human
cugacagacacaggcccgg

SEQ ID NO: 2616473 - RNA, 16 nt, Human
cugaauuguccccagu

SEQ ID NO: 2616474 - RNA, 23 nt, Human
cugaauucuauuugcugggcuuu

SEQ ID NO: 2616475 - RNA, 17 nt, Human
cugaauucuauuugcug

SEQ ID NO: 2616476 - RNA, 15 nt, Human
cugaauuguccccag

SEQ ID NO: 2616477 - RNA, 19 nt, Human
cugaauccaaacuaaucca

SEQ ID NO: 2616478 - RNA, 20 nt, Human
cugaauccaaacuaauccau

SEQ ID NO: 2616479 - RNA, 22 nt, Human
cugaaucauucucgauuuaacu

SEQ ID NO: 2616480 - RNA, 19 nt, Human
cugaauaugaggcauuugg

SEQ ID NO: 2616481 - RNA, 21 nt, Human
cugaauaugaacggugagcau

SEQ ID NO: 2616482 - RNA, 16 nt, Human
cugaauauuuauauuu

SEQ ID NO: 2616483 - RNA, 20 nt, Human
cugaauauuuauauuucacu

SEQ ID NO: 2616484 - RNA, 21 nt, Human
cugaauauuuauauuucacua

SEQ ID NO: 2616485 - RNA, 23 nt, Human
cugaauaggcgaucacaacgugc

SEQ ID NO: 2616486 - RNA, 21 nt, Human
cugaauaggcgaucacaacgu

SEQ ID NO: 2616487 - RNA, 17 nt, Human
cugaauauacagcaggu

SEQ ID NO: 2616488 - RNA, 18 nt, Human
cugaauaggcgaucacaa

SEQ ID NO: 2616489 - RNA, 15 nt, Human
cugaauagcagaagg

SEQ ID NO: 2616490 - RNA, 22 nt, Human
cugaaucccccuugccacccca

SEQ ID NO: 2616491 - RNA, 21 nt, Human
cugaaucccccuugccacccc

SEQ ID NO: 2616492 - RNA, 20 nt, Human
cugaaucccccuugccaccc

SEQ ID NO: 2616493 - RNA, 19 nt, Human
cugaaucccccuugccacc

SEQ ID NO: 2616494 - RNA, 17 nt, Human
cugaaugaaacccccac

SEQ ID NO: 2616495 - RNA, 18 nt, Human
cugaaugaaacccccaca

SEQ ID NO: 2616496 - RNA, 19 nt, Human
cugaaugaaacccccacac

SEQ ID NO: 2616497 - RNA, 20 nt, Human
cugaaugaaacccccacaca

SEQ ID NO: 2616498 - RNA, 21 nt, Human
cugaaugaaacccccacacac

SEQ ID NO: 2616499 - RNA, 22 nt, Human
cugaaugaaacccccacacaca

SEQ ID NO: 2616500 - RNA, 23 nt, Human
cugaaugaaacccccacacacac

SEQ ID NO: 2616501 - RNA, 17 nt, Human
cugaaugaaauaucaga

SEQ ID NO: 2616502 - RNA, 16 nt, Human
cugaauucuauuugcu

SEQ ID NO: 2616503 - RNA, 22 nt, Human
cugaaugaaccuucuggccucc

SEQ ID NO: 2616504 - RNA, 16 nt, Human
cuuagacagucccugc

SEQ ID NO: 2616505 - RNA, 15 nt, Human
cuuagacagucccug

SEQ ID NO: 2616506 - RNA, 14 nt, Human
cuuagacagucccu

SEQ ID NO: 2616507 - RNA, 15 nt, Human
cuuagaagucacaca

SEQ ID NO: 2616508 - RNA, 14 nt, Human
cuuagaaauuuauu

SEQ ID NO: 2616509 - RNA, 17 nt, Human
cuuagaaauugcauuuc

SEQ ID NO: 2616510 - RNA, 15 nt, Human
cuuagaaauuuauuu

SEQ ID NO: 2616511 - RNA, 12 nt, Human
cuuagaacauuu

SEQ ID NO: 2616512 - RNA, 15 nt, Human
cuuagaacauuuuaa

SEQ ID NO: 2616513 - RNA, 16 nt, Human
cuuagaacauuuuaau

SEQ ID NO: 2616514 - RNA, 19 nt, Human
cuuagaacauuuuaauuca

SEQ ID NO: 2616515 - RNA, 15 nt, Human
cuuagaaccuuucuu

SEQ ID NO: 2616516 - RNA, 18 nt, Human
cuuagacagucccugcca

SEQ ID NO: 2616517 - RNA, 17 nt, Human
cuuagacagucccugcc

SEQ ID NO: 2616518 - RNA, 19 nt, Human
cuuagacagucccugccaa

SEQ ID NO: 2616519 - RNA, 16 nt, Human
cuuagacauaacaaaa

SEQ ID NO: 2616520 - RNA, 11 nt, Human
cuuagacaguc

SEQ ID NO: 2616521 - RNA, 19 nt, Human
cuuagaugcaguucugaag

SEQ ID NO: 2616522 - RNA, 23 nt, Human
cuuacuuuccuuuccccagccca

SEQ ID NO: 2616523 - RNA, 22 nt, Human
cuuacuuuccuuuccccagccc

SEQ ID NO: 2616524 - RNA, 21 nt, Human
cuuacuuuccuuuccccagcc

SEQ ID NO: 2616525 - RNA, 20 nt, Human
cuuacuuuccuuuccccagc

SEQ ID NO: 2616526 - RNA, 15 nt, Human
cuuacuguuucuguc

SEQ ID NO: 2616527 - RNA, 14 nt, Human
cuuacuguuucugu

SEQ ID NO: 2616528 - RNA, 13 nt, Human
cuuacuguuucug

SEQ ID NO: 2616529 - RNA, 19 nt, Human
cuuacuguggaggaaggau

SEQ ID NO: 2616530 - RNA, 19 nt, Human
cuuacuguuucugucagga

SEQ ID NO: 2616531 - RNA, 16 nt, Human
cuuacuguuucuguca

SEQ ID NO: 2616532 - RNA, 14 nt, Human
cuuacuuacccuca

SEQ ID NO: 2616533 - RNA, 21 nt, Human
cuuacuguuucugucaggaga

SEQ ID NO: 2616534 - RNA, 14 nt, Human
cuuacuuaguguua

SEQ ID NO: 2616535 - RNA, 23 nt, Human
cuuacuguaccuguuccuuagac

SEQ ID NO: 2616536 - RNA, 18 nt, Human
cuuacuguaccuguuccu

SEQ ID NO: 2616537 - RNA, 15 nt, Human
cuuacuguaccuguu

SEQ ID NO: 2616538 - RNA, 18 nt, Human
cuuacuguggaggaagga

SEQ ID NO: 2616539 - RNA, 17 nt, Human
cuuacuguggaggaagg

SEQ ID NO: 2616540 - RNA, 16 nt, Human
cuuacuguggaggaag

SEQ ID NO: 2616541 - RNA, 16 nt, Human
cuuacuguacaugaaa

SEQ ID NO: 2616542 - RNA, 13 nt, Human
cuuacuguacaug

SEQ ID NO: 2616543 - RNA, 20 nt, Human
cuuacuacaugugggagcuu

SEQ ID NO: 2616544 - RNA, 14 nt, Human
cuuacuccaggaga

SEQ ID NO: 2616545 - RNA, 23 nt, Human
cuuacuaagcuuugccagcugcu

SEQ ID NO: 2616546 - RNA, 21 nt, Human
cuuacuaagcuuugccagcug

SEQ ID NO: 2616547 - RNA, 22 nt, Human
cuuacuaaacauuuuguuauug

SEQ ID NO: 2616548 - RNA, 21 nt, Human
cuuacuaaacauuuuguuauu

SEQ ID NO: 2616549 - RNA, 15 nt, Human
cuuacgugaguccug

SEQ ID NO: 2616550 - RNA, 19 nt, Human
cuuacuaguuucccuugca

SEQ ID NO: 2616551 - RNA, 24 nt, Human
cuuacuaagcuuugccagcugcug

SEQ ID NO: 2616552 - RNA, 18 nt, Human
cuuacuacaugugggagc

SEQ ID NO: 2616553 - RNA, 15 nt, Human
cuuaaugcuucuuuc

SEQ ID NO: 2616554 - RNA, 21 nt, Human
cuuaaugauccguuccauugc

SEQ ID NO: 2616555 - RNA, 19 nt, Human
cuuaccuuuuuauuugcau

SEQ ID NO: 2616556 - RNA, 23 nt, Human
cuuacgaauacuuuugcccuuug

SEQ ID NO: 2616557 - RNA, 19 nt, Human
cuuacgcccaacccuuccc

SEQ ID NO: 2616558 - RNA, 20 nt, Human
cuuaccuuuuuauuugcaug

SEQ ID NO: 2616559 - RNA, 18 nt, Human
cuuacgauggcacccagu

SEQ ID NO: 2616560 - RNA, 21 nt, Human
cuuaugacaucacuuguacaa

SEQ ID NO: 2616561 - RNA, 13 nt, Human
cuuaugagauggg

SEQ ID NO: 2616562 - RNA, 22 nt, Human
cuuaugacaucacuuguacaaa

SEQ ID NO: 2616563 - RNA, 15 nt, Human
cuuaugauugcagau

SEQ ID NO: 2616564 - RNA, 14 nt, Human
cuuaugccacggga

SEQ ID NO: 2616565 - RNA, 23 nt, Human
cuuaugauucagauuguuaucua

SEQ ID NO: 2616566 - RNA, 12 nt, Human
cuuauuguucca

SEQ ID NO: 2616567 - RNA, 13 nt, Human
cuuauuguuccaa

SEQ ID NO: 2616568 - RNA, 14 nt, Human
cuuauuguuccaag

SEQ ID NO: 2616569 - RNA, 15 nt, Human
cuuauuguuccaaga

SEQ ID NO: 2616570 - RNA, 17 nt, Human
cuuauuguuccaagaca

SEQ ID NO: 2616571 - RNA, 15 nt, Human
cuuauuuaaugaaag

SEQ ID NO: 2616572 - RNA, 22 nt, Human
cuuauuguuccaagacauuguc

SEQ ID NO: 2616573 - RNA, 19 nt, Human
cuuauuguuccaagacauu

SEQ ID NO: 2616574 - RNA, 20 nt, Human
cuuauuguuccaagacauug

SEQ ID NO: 2616575 - RNA, 14 nt, Human
cuuauuuucaagaa

SEQ ID NO: 2616576 - RNA, 15 nt, Human
cuuauuuucaagaaa

SEQ ID NO: 2616577 - RNA, 18 nt, Human
cuuauuuucaagaaacug

SEQ ID NO: 2616578 - RNA, 19 nt, Human
cuuauuuucaagaaacuga

SEQ ID NO: 2616579 - RNA, 12 nt, Human
cuuauuuucaag

SEQ ID NO: 2616580 - RNA, 14 nt, Human
cuuaucugugcuca

SEQ ID NO: 2616581 - RNA, 16 nt, Human
cuuaucugugcucagg

SEQ ID NO: 2616582 - RNA, 15 nt, Human
cuuaucucucugugc

SEQ ID NO: 2616583 - RNA, 19 nt, Human
cuuaucugugcgugaaaca

SEQ ID NO: 2616584 - RNA, 20 nt, Human
cuuaucugugcgugaaacac

SEQ ID NO: 2616585 - RNA, 21 nt, Human
cuuaucugugcgugaaacaca

SEQ ID NO: 2616586 - RNA, 14 nt, Human
cuuaucuuaugcca

SEQ ID NO: 2616587 - RNA, 22 nt, Human
cuuaucugugcucaggacucag

SEQ ID NO: 2616588 - RNA, 21 nt, Human
cuuaucucucugugcugugga

SEQ ID NO: 2616589 - RNA, 14 nt, Human
cuuaucucucugug

SEQ ID NO: 2616590 - RNA, 13 nt, Human
cuuaucucucugu

SEQ ID NO: 2616591 - RNA, 17 nt, Human
cuuaucugugcgugaaa

SEQ ID NO: 2616592 - RNA, 12 nt, Human
cuuaucucucug

SEQ ID NO: 2616593 - RNA, 16 nt, Human
cuuaucuccaagacca

SEQ ID NO: 2616594 - RNA, 13 nt, Human
cuuaucuccaaga

SEQ ID NO: 2616595 - RNA, 14 nt, Human
cuuaucuccaagac

SEQ ID NO: 2616596 - RNA, 14 nt, Human
cuuaucaaaggaca

SEQ ID NO: 2616597 - RNA, 18 nt, Human
cuuauauuguaagaaaua

SEQ ID NO: 2616598 - RNA, 14 nt, Human
cuuauauuguaaga

SEQ ID NO: 2616599 - RNA, 17 nt, Human
cuuauauuguaagaaau

SEQ ID NO: 2616600 - RNA, 23 nt, Human
cuuaucucagucaugcauaaaua

SEQ ID NO: 2616601 - RNA, 22 nt, Human
cuuaucucagucaugcauaaau

SEQ ID NO: 2616602 - RNA, 21 nt, Human
cuuaucucagucaugcauaaa

SEQ ID NO: 2616603 - RNA, 16 nt, Human
cuuaucaagugucuuc

SEQ ID NO: 2616604 - RNA, 15 nt, Human
cuuaucaagugucuu

SEQ ID NO: 2616605 - RNA, 14 nt, Human
cuuaucaagugucu

SEQ ID NO: 2616606 - RNA, 12 nt, Human
cuuaucaagugu

SEQ ID NO: 2616607 - RNA, 11 nt, Human
cuuaucaagug

SEQ ID NO: 2616608 - RNA, 16 nt, Human
cuuaucaaaggacacc

SEQ ID NO: 2616609 - RNA, 14 nt, Human
cuuauaauuuaaaa

SEQ ID NO: 2616610 - RNA, 19 nt, Human
cuuauaggaauugacccac

SEQ ID NO: 2616611 - RNA, 15 nt, Human
cuuauacauuugaua

SEQ ID NO: 2616612 - RNA, 13 nt, Human
cuuauagguggcc

SEQ ID NO: 2616613 - RNA, 23 nt, Human
cuuauagucaauguuucuuuuau

SEQ ID NO: 2616614 - RNA, 13 nt, Human
cuuauaaauauga

SEQ ID NO: 2616615 - RNA, 17 nt, Human
cuuauaaauaugaagcu

SEQ ID NO: 2616616 - RNA, 13 nt, Human
cuuauaauuuaaa

SEQ ID NO: 2616617 - RNA, 21 nt, Human
cuuaggguuaugauuaaguaa

SEQ ID NO: 2616618 - RNA, 20 nt, Human
cuuaggugauccacucgccu

SEQ ID NO: 2616619 - RNA, 21 nt, Human
cuuagguggcaagcugugacu

SEQ ID NO: 2616620 - RNA, 18 nt, Human
cuuagguacuuauuccag

SEQ ID NO: 2616621 - RNA, 17 nt, Human
cuuagguuggcaaaaag

SEQ ID NO: 2616622 - RNA, 12 nt, Human
cuuauaaauaug

SEQ ID NO: 2616623 - RNA, 16 nt, Human
cuuaacggcuccagga

SEQ ID NO: 2616624 - RNA, 15 nt, Human
cuuaacggcuccagg

SEQ ID NO: 2616625 - RNA, 14 nt, Human
cuuaacggcuccag

SEQ ID NO: 2616626 - RNA, 15 nt, Human
cuuaaauucauuuua

SEQ ID NO: 2616627 - RNA, 16 nt, Human
cuuaaauuuuaauuua

SEQ ID NO: 2616628 - RNA, 12 nt, Human
cuuaaccaucuu

SEQ ID NO: 2616629 - RNA, 20 nt, Human
cuuaaccccaguaagccacu

SEQ ID NO: 2616630 - RNA, 17 nt, Human
cuuaaaaaaaugacaga

SEQ ID NO: 2616631 - RNA, 12 nt, Human
cuuaaaaaacuu

SEQ ID NO: 2616632 - RNA, 18 nt, Human
cuuaaaaaacuuguaaau

SEQ ID NO: 2616633 - RNA, 17 nt, Human
cuguuuuuuccugagcu

SEQ ID NO: 2616634 - RNA, 18 nt, Human
cuguuuuuuccugagcuu

SEQ ID NO: 2616635 - RNA, 15 nt, Human
cuuaaaaaaaugaca

SEQ ID NO: 2616636 - RNA, 14 nt, Human
cuguuuuuguagug

SEQ ID NO: 2616637 - RNA, 13 nt, Human
cuguuuuuuaguu

SEQ ID NO: 2616638 - RNA, 16 nt, Human
cuuaaaugagaaggaa

SEQ ID NO: 2616639 - RNA, 17 nt, Human
cuuaaaaaauaaaaacu

SEQ ID NO: 2616640 - RNA, 13 nt, Human
cuuaaaaaauguc

SEQ ID NO: 2616641 - RNA, 21 nt, Human
cuuaaaugaaagcauguggca

SEQ ID NO: 2616642 - RNA, 15 nt, Human
cuuaacuucacauau

SEQ ID NO: 2616643 - RNA, 16 nt, Human
cuuaacuucacauauu

SEQ ID NO: 2616644 - RNA, 17 nt, Human
cuuaacuucacauauug

SEQ ID NO: 2616645 - RNA, 22 nt, Human
cuuaacuucacauauugauuuc

SEQ ID NO: 2616646 - RNA, 12 nt, Human
cuuaacuucaca

SEQ ID NO: 2616647 - RNA, 14 nt, Human
cuuaacuucacaua

SEQ ID NO: 2616648 - RNA, 16 nt, Human
cuuaacuggagcccca

SEQ ID NO: 2616649 - RNA, 17 nt, Human
cuuaacuccuuccagug

SEQ ID NO: 2616650 - RNA, 22 nt, Human
cuuaacuuaaauuuuaauuuau

SEQ ID NO: 2616651 - RNA, 11 nt, Human
cuuaacuauuc

SEQ ID NO: 2616652 - RNA, 19 nt, Human
cuuaacugcauuuuuagac

SEQ ID NO: 2616653 - RNA, 19 nt, Human
cuuaagccaucuugguaaa

SEQ ID NO: 2616654 - RNA, 17 nt, Human
cuuaagccaucuuggua

SEQ ID NO: 2616655 - RNA, 16 nt, Human
cuuaagccaucuuggu

SEQ ID NO: 2616656 - RNA, 15 nt, Human
cuuaagccaucuugg

SEQ ID NO: 2616657 - RNA, 18 nt, Human
cuuaagcagaagcauuaa

SEQ ID NO: 2616658 - RNA, 14 nt, Human
cuuaagcagaagca

SEQ ID NO: 2616659 - RNA, 22 nt, Human
cuuaagccaucuugguaaauuu

SEQ ID NO: 2616660 - RNA, 20 nt, Human
cuuaagccaucuugguaaau

SEQ ID NO: 2616661 - RNA, 23 nt, Human
cuuaagccaucuugguaaauuuc

SEQ ID NO: 2616662 - RNA, 20 nt, Human
cuuaagccuuuugcucacaa

SEQ ID NO: 2616663 - RNA, 23 nt, Human
cuuaagagaauauuuuaaguauu

SEQ ID NO: 2616664 - RNA, 18 nt, Human
cuuaagagaauauuuuaa

SEQ ID NO: 2616665 - RNA, 14 nt, Human
cuuaagagaauauu

SEQ ID NO: 2616666 - RNA, 13 nt, Human
cuuaagagaauau

SEQ ID NO: 2616667 - RNA, 17 nt, Human
cuuaagagaugccucau

SEQ ID NO: 2616668 - RNA, 16 nt, Human
cuuaagaacugcuuuc

SEQ ID NO: 2616669 - RNA, 14 nt, Human
cuuaaucuaaaugg

SEQ ID NO: 2616670 - RNA, 16 nt, Human
cuuaaucuaaauggaa

SEQ ID NO: 2616671 - RNA, 18 nt, Human
cuuaaugccacuaaauug

SEQ ID NO: 2616672 - RNA, 18 nt, Human
cuuaauccagcugaugag

SEQ ID NO: 2616673 - RNA, 14 nt, Human
cuuaaugagauagu

SEQ ID NO: 2616674 - RNA, 12 nt, Human
cuuaaugagaua

SEQ ID NO: 2616675 - RNA, 16 nt, Human
cuuaaguuuauacucu

SEQ ID NO: 2616676 - RNA, 20 nt, Human
cuuaaguuucucagcuccca

SEQ ID NO: 2616677 - RNA, 16 nt, Human
cuuaaguuucucagcu

SEQ ID NO: 2616678 - RNA, 15 nt, Human
cuuaaguuucucagc

SEQ ID NO: 2616679 - RNA, 17 nt, Human
cuuaaguuucucagcuc

SEQ ID NO: 2616680 - RNA, 12 nt, Human
cuuaauaaauuc

SEQ ID NO: 2616681 - RNA, 18 nt, Human
cuuaaucaauuaauuuuu

SEQ ID NO: 2616682 - RNA, 20 nt, Human
cuuaaucagguccucagaga

SEQ ID NO: 2616683 - RNA, 22 nt, Human
cuuaaucagguccucagagaau

SEQ ID NO: 2616684 - RNA, 17 nt, Human
cuuaauaaauucagaua

SEQ ID NO: 2616685 - RNA, 18 nt, Human
cuuaauaaauucagauau

SEQ ID NO: 2616686 - RNA, 12 nt, Human
cuguuuuaugac

SEQ ID NO: 2616687 - RNA, 13 nt, Human
cuguuuuaugacu

SEQ ID NO: 2616688 - RNA, 14 nt, Human
cuguuuuaugacuu

SEQ ID NO: 2616689 - RNA, 15 nt, Human
cuguuuuaugacuuc

SEQ ID NO: 2616690 - RNA, 21 nt, Human
cuguuuuauuuuaauucaguu

SEQ ID NO: 2616691 - RNA, 13 nt, Human
cuguuuucucuug

SEQ ID NO: 2616692 - RNA, 14 nt, Human
cuguuuucucuuga

SEQ ID NO: 2616693 - RNA, 23 nt, Human
cuguuuguuucugaaagggacgc

SEQ ID NO: 2616694 - RNA, 21 nt, Human
cuguuuguuucugaaagggac

SEQ ID NO: 2616695 - RNA, 19 nt, Human
cuguuuuauaauuuuguga

SEQ ID NO: 2616696 - RNA, 12 nt, Human
cuguuuuaaauu

SEQ ID NO: 2616697 - RNA, 14 nt, Human
cuguuuuaaguucu

SEQ ID NO: 2616698 - RNA, 22 nt, Human
cuguuuuaaauuuauuucaaaa

SEQ ID NO: 2616699 - RNA, 17 nt, Human
cuguuucugcuugcucu

SEQ ID NO: 2616700 - RNA, 20 nt, Human
cuguuuguuugacaaagaaa

SEQ ID NO: 2616701 - RNA, 17 nt, Human
cuguuuucucuugagag

SEQ ID NO: 2616702 - RNA, 20 nt, Human
cuguuuucugagcccgggcu

SEQ ID NO: 2616703 - RNA, 19 nt, Human
cuguuuucugagcccgggc

SEQ ID NO: 2616704 - RNA, 17 nt, Human
cuguuuucugagcccgg

SEQ ID NO: 2616705 - RNA, 15 nt, Human
cuguuuucugagccc

SEQ ID NO: 2616706 - RNA, 16 nt, Human
cuguuuuaugacuuca

SEQ ID NO: 2616707 - RNA, 13 nt, Human
cuguuuucugagc

SEQ ID NO: 2616708 - RNA, 14 nt, Human
cuguuuuauacugu

SEQ ID NO: 2616709 - RNA, 12 nt, Human
cuguuuucuucu

SEQ ID NO: 2616710 - RNA, 18 nt, Human
cuguuuucuucuauucca

SEQ ID NO: 2616711 - RNA, 14 nt, Human
cuguuuucuguuuc

SEQ ID NO: 2616712 - RNA, 17 nt, Human
cuguuuugaaggcaaaa

SEQ ID NO: 2616713 - RNA, 12 nt, Human
cuguuuugaauu

SEQ ID NO: 2616714 - RNA, 22 nt, Human
cuguuuugccugaaguuggagu

SEQ ID NO: 2616715 - RNA, 15 nt, Human
cuguuuuucugggug

SEQ ID NO: 2616716 - RNA, 21 nt, Human
cuguuuuucuggguggccucg

SEQ ID NO: 2616717 - RNA, 21 nt, Human
cuguuuuucagggagguggcu

SEQ ID NO: 2616718 - RNA, 14 nt, Human
cuguuuuguucugu

SEQ ID NO: 2616719 - RNA, 20 nt, Human
cuguuuuguggucagcugua

SEQ ID NO: 2616720 - RNA, 15 nt, Human
cuguuuauagaauaa

SEQ ID NO: 2616721 - RNA, 13 nt, Human
cuguuuauggccu

SEQ ID NO: 2616722 - RNA, 14 nt, Human
cuguuuauggccuc

SEQ ID NO: 2616723 - RNA, 15 nt, Human
cuguuuauggccuca

SEQ ID NO: 2616724 - RNA, 16 nt, Human
cuguuuauggccucag

SEQ ID NO: 2616725 - RNA, 12 nt, Human
cuguuuagauaa

SEQ ID NO: 2616726 - RNA, 18 nt, Human
cuguuuacaagaaaaaau

SEQ ID NO: 2616727 - RNA, 20 nt, Human
cuguuuacaagaaaaaauga

SEQ ID NO: 2616728 - RNA, 17 nt, Human
cugguugaugccuguga

SEQ ID NO: 2616729 - RNA, 23 nt, Human
cugguucugaugaugugccuggg

SEQ ID NO: 2616730 - RNA, 23 nt, Human
cugguuggagagcuagaaccugg

SEQ ID NO: 2616731 - RNA, 17 nt, Human
cugguuggagagcuaga

SEQ ID NO: 2616732 - RNA, 18 nt, Human
cugguugcugugugguuu

SEQ ID NO: 2616733 - RNA, 15 nt, Human
cugguugcugugugg

SEQ ID NO: 2616734 - RNA, 14 nt, Human
cugguugcugugug

SEQ ID NO: 2616735 - RNA, 13 nt, Human
cugguugcugugu

SEQ ID NO: 2616736 - RNA, 13 nt, Human
cuguuuacagugu

SEQ ID NO: 2616737 - RNA, 15 nt, Human
cuguuuacaguguuc

SEQ ID NO: 2616738 - RNA, 21 nt, Human
cuguuuaauauuuaaacagca

SEQ ID NO: 2616739 - RNA, 14 nt, Human
cuguuuacaagaaa

SEQ ID NO: 2616740 - RNA, 15 nt, Human
cuguuuacaagaaaa

SEQ ID NO: 2616741 - RNA, 16 nt, Human
cuguuuacaagaaaaa

SEQ ID NO: 2616742 - RNA, 17 nt, Human
cuguuuacaagaaaaaa

SEQ ID NO: 2616743 - RNA, 20 nt, Human
cuguuucucuuuccuuggcu

SEQ ID NO: 2616744 - RNA, 19 nt, Human
cuguuucucuuuccuuggc

SEQ ID NO: 2616745 - RNA, 16 nt, Human
cuguuucucuuuccuu

SEQ ID NO: 2616746 - RNA, 18 nt, Human
cuguuuguuucugaaagg

SEQ ID NO: 2616747 - RNA, 13 nt, Human
cuguuuccuuuua

SEQ ID NO: 2616748 - RNA, 15 nt, Human
cuguuuccuuuuaug

SEQ ID NO: 2616749 - RNA, 13 nt, Human
cuguuucucugcu

SEQ ID NO: 2616750 - RNA, 14 nt, Human
cuguuucucugcug

SEQ ID NO: 2616751 - RNA, 21 nt, Human
cuguuucccagcaguggacuc

SEQ ID NO: 2616752 - RNA, 15 nt, Human
cuguuucccagcagu

SEQ ID NO: 2616753 - RNA, 12 nt, Human
cuguuucccagc

SEQ ID NO: 2616754 - RNA, 17 nt, Human
cuguuuauggccucagc

SEQ ID NO: 2616755 - RNA, 18 nt, Human
cuguuuauggccucagcu

SEQ ID NO: 2616756 - RNA, 19 nt, Human
cuguuuauggccucagcug

SEQ ID NO: 2616757 - RNA, 21 nt, Human
cuguuuauggccucagcugcc

SEQ ID NO: 2616758 - RNA, 22 nt, Human
cuguuuauggccucagcugccu

SEQ ID NO: 2616759 - RNA, 18 nt, Human
cuucaggcucuucuccuu

SEQ ID NO: 2616760 - RNA, 17 nt, Human
cuucaggcucuucuccu

SEQ ID NO: 2616761 - RNA, 16 nt, Human
cuucaggcucuucucc

SEQ ID NO: 2616762 - RNA, 15 nt, Human
cuucaggcucuucuc

SEQ ID NO: 2616763 - RNA, 22 nt, Human
cuucaggggcugcccgcuccca

SEQ ID NO: 2616764 - RNA, 20 nt, Human
cuucaggggcugcccgcucc

SEQ ID NO: 2616765 - RNA, 19 nt, Human
cuucaggggcugcccgcuc

SEQ ID NO: 2616766 - RNA, 18 nt, Human
cuucaggggcugcccgcu

SEQ ID NO: 2616767 - RNA, 17 nt, Human
cuucaggggcugcccgc

SEQ ID NO: 2616768 - RNA, 16 nt, Human
cuucaggggcugcccg

SEQ ID NO: 2616769 - RNA, 15 nt, Human
cuucaggggcugccc

SEQ ID NO: 2616770 - RNA, 14 nt, Human
cuucaggggcugcc

SEQ ID NO: 2616771 - RNA, 20 nt, Human
cuucaggccucccucucucu

SEQ ID NO: 2616772 - RNA, 21 nt, Human
cuucaggggagucccgucagg

SEQ ID NO: 2616773 - RNA, 19 nt, Human
cuucaggggcacuucauug

SEQ ID NO: 2616774 - RNA, 17 nt, Human
cuucaggggcacuucau

SEQ ID NO: 2616775 - RNA, 22 nt, Human
cuucaggggagucccgucagga

SEQ ID NO: 2616776 - RNA, 23 nt, Human
cuucaggggagucccgucaggac

SEQ ID NO: 2616777 - RNA, 14 nt, Human
cuucaggcucuucu

SEQ ID NO: 2616778 - RNA, 12 nt, Human
cuucaggccucc

SEQ ID NO: 2616779 - RNA, 15 nt, Human
cuucaggccucccuc

SEQ ID NO: 2616780 - RNA, 11 nt, Human
cuucagcugac

SEQ ID NO: 2616781 - RNA, 23 nt, Human
cuucagccuagccgaccucagcc

SEQ ID NO: 2616782 - RNA, 20 nt, Human
cuuauuuuuuucugauugua

SEQ ID NO: 2616783 - RNA, 19 nt, Human
cuuauuuuuuucugauugu

SEQ ID NO: 2616784 - RNA, 18 nt, Human
cuuauuuuuuucugauug

SEQ ID NO: 2616785 - RNA, 17 nt, Human
cuuauuuuuuucugauu

SEQ ID NO: 2616786 - RNA, 17 nt, Human
cuucagccaggagcugg

SEQ ID NO: 2616787 - RNA, 15 nt, Human
cuucagccaggagcu

SEQ ID NO: 2616788 - RNA, 15 nt, Human
cuucagccaccucuc

SEQ ID NO: 2616789 - RNA, 17 nt, Human
cuucagccaccucucuu

SEQ ID NO: 2616790 - RNA, 16 nt, Human
cuuauuuuuuucugau

SEQ ID NO: 2616791 - RNA, 19 nt, Human
cuuauuuuuucccaaagcc

SEQ ID NO: 2616792 - RNA, 15 nt, Human
cuuauuuuuucccaa

SEQ ID NO: 2616793 - RNA, 14 nt, Human
cuuauuuuuuccca

SEQ ID NO: 2616794 - RNA, 21 nt, Human
cuuauuuuuaaaauuuuaaua

SEQ ID NO: 2616795 - RNA, 17 nt, Human
cuuauuuuugacagugu

SEQ ID NO: 2616796 - RNA, 15 nt, Human
cuuauuuucucugug

SEQ ID NO: 2616797 - RNA, 16 nt, Human
cuuauuuucauguaua

SEQ ID NO: 2616798 - RNA, 14 nt, Human
cuuauuuucucugu

SEQ ID NO: 2616799 - RNA, 21 nt, Human
cuuauuguuccaagacauugu

SEQ ID NO: 2616800 - RNA, 19 nt, Human
cuucagcccucaccccugg

SEQ ID NO: 2616801 - RNA, 17 nt, Human
cuucagcccucaccccu

SEQ ID NO: 2616802 - RNA, 16 nt, Human
cuucagcccucacccc

SEQ ID NO: 2616803 - RNA, 15 nt, Human
cuucagcccucaccc

SEQ ID NO: 2616804 - RNA, 14 nt, Human
cuucagccaucaac

SEQ ID NO: 2616805 - RNA, 19 nt, Human
cuucagccaggagcugggc

SEQ ID NO: 2616806 - RNA, 18 nt, Human
cuucagccaggagcuggg

SEQ ID NO: 2616807 - RNA, 18 nt, Human
cuucagcgguuuauauaa

SEQ ID NO: 2616808 - RNA, 13 nt, Human
cuucagccuagcc

SEQ ID NO: 2616809 - RNA, 20 nt, Human
cuucagccuagccgaccuca

SEQ ID NO: 2616810 - RNA, 21 nt, Human
cuucagccuagccgaccucag

SEQ ID NO: 2616811 - RNA, 22 nt, Human
cuucagccuagccgaccucagc

SEQ ID NO: 2616812 - RNA, 16 nt, Human
cuuccaaauccccuaa

SEQ ID NO: 2616813 - RNA, 14 nt, Human
cuucauuuggagau

SEQ ID NO: 2616814 - RNA, 13 nt, Human
cuucauuuggaga

SEQ ID NO: 2616815 - RNA, 19 nt, Human
cuuccaaauccccuaagca

SEQ ID NO: 2616816 - RNA, 20 nt, Human
cuuccaaauccccuaagcag

SEQ ID NO: 2616817 - RNA, 19 nt, Human
cuuccaacccauuagccau

SEQ ID NO: 2616818 - RNA, 18 nt, Human
cuuccaacaggagcuggg

SEQ ID NO: 2616819 - RNA, 14 nt, Human
cuuccaagagccug

SEQ ID NO: 2616820 - RNA, 23 nt, Human
cuuccacacccccaccccuugcu

SEQ ID NO: 2616821 - RNA, 21 nt, Human
cuuccaagguggucugcucgg

SEQ ID NO: 2616822 - RNA, 20 nt, Human
cuuccaagguggucugcucg

SEQ ID NO: 2616823 - RNA, 14 nt, Human
cuuccacaccccca

SEQ ID NO: 2616824 - RNA, 23 nt, Human
cuuccacaagagcccaggccucc

SEQ ID NO: 2616825 - RNA, 22 nt, Human
cuuccacaagagcccaggccuc

SEQ ID NO: 2616826 - RNA, 15 nt, Human
cuuccaagagccuga

SEQ ID NO: 2616827 - RNA, 18 nt, Human
cuuccaagguggucugcu

SEQ ID NO: 2616828 - RNA, 16 nt, Human
cuuccaagguggucug

SEQ ID NO: 2616829 - RNA, 15 nt, Human
cuuccaagguggucu

SEQ ID NO: 2616830 - RNA, 16 nt, Human
cuuccaagcaaaggug

SEQ ID NO: 2616831 - RNA, 14 nt, Human
cuucagugccuuau

SEQ ID NO: 2616832 - RNA, 13 nt, Human
cuucagugccuua

SEQ ID NO: 2616833 - RNA, 17 nt, Human
cuucauuucauuguaug

SEQ ID NO: 2616834 - RNA, 16 nt, Human
cuucauuucauuguau

SEQ ID NO: 2616835 - RNA, 15 nt, Human
cuucauuucauugua

SEQ ID NO: 2616836 - RNA, 14 nt, Human
cuucauuucauugu

SEQ ID NO: 2616837 - RNA, 19 nt, Human
cuucauuucauuguaugau

SEQ ID NO: 2616838 - RNA, 18 nt, Human
cuucauuucauuguauga

SEQ ID NO: 2616839 - RNA, 14 nt, Human
cuucauuuccuccg

SEQ ID NO: 2616840 - RNA, 18 nt, Human
cuucauuuccugugucuu

SEQ ID NO: 2616841 - RNA, 12 nt, Human
cuucagugccuu

SEQ ID NO: 2616842 - RNA, 11 nt, Human
cuucagugccu

SEQ ID NO: 2616843 - RNA, 17 nt, Human
cuucagugcccaccaac

SEQ ID NO: 2616844 - RNA, 23 nt, Human
cuucaggguucuccucuccccuc

SEQ ID NO: 2616845 - RNA, 14 nt, Human
cuucaggguucucc

SEQ ID NO: 2616846 - RNA, 18 nt, Human
cuucaggguucuccucuc

SEQ ID NO: 2616847 - RNA, 20 nt, Human
cuucaggguucuccucuccc

SEQ ID NO: 2616848 - RNA, 21 nt, Human
cuucaggguucuccucucccc

SEQ ID NO: 2616849 - RNA, 18 nt, Human
cuucagggugaugccagg

SEQ ID NO: 2616850 - RNA, 23 nt, Human
cuucaggggcugcccgcucccag

SEQ ID NO: 2616851 - RNA, 23 nt, Human
cuucagggggccaggugcacaga

SEQ ID NO: 2616852 - RNA, 15 nt, Human
cuucagggggccagg

SEQ ID NO: 2616853 - RNA, 14 nt, Human
cuucagggggccag

SEQ ID NO: 2616854 - RNA, 22 nt, Human
cuuccuacccacaccucugcca

SEQ ID NO: 2616855 - RNA, 19 nt, Human
cuuccuacccacaccucug

SEQ ID NO: 2616856 - RNA, 18 nt, Human
cuuccuacccacaccucu

SEQ ID NO: 2616857 - RNA, 16 nt, Human
cuuccuacccacaccu

SEQ ID NO: 2616858 - RNA, 21 nt, Human
cuuccuacaagagcagccugu

SEQ ID NO: 2616859 - RNA, 22 nt, Human
cuuccuacaagagcagccugug

SEQ ID NO: 2616860 - RNA, 23 nt, Human
cuuccuacacccuuggacuugag

SEQ ID NO: 2616861 - RNA, 18 nt, Human
cuuccggcuccugugcuu

SEQ ID NO: 2616862 - RNA, 24 nt, Human
cuuccuacaagagcagccuguggc

SEQ ID NO: 2616863 - RNA, 18 nt, Human
cuuccuacaagagcagcc

SEQ ID NO: 2616864 - RNA, 15 nt, Human
cuuccggcuccugug

SEQ ID NO: 2616865 - RNA, 15 nt, Human
cuuccggagauguag

SEQ ID NO: 2616866 - RNA, 14 nt, Human
cuuccggagaugua

SEQ ID NO: 2616867 - RNA, 17 nt, Human
cuuccgcauccuagucu

SEQ ID NO: 2616868 - RNA, 15 nt, Human
cuuccgcauccuagu

SEQ ID NO: 2616869 - RNA, 18 nt, Human
cuuccgcauccuagucuc

SEQ ID NO: 2616870 - RNA, 23 nt, Human
cuuccgaaaaauccucuuccucu

SEQ ID NO: 2616871 - RNA, 22 nt, Human
cuuccgaaaaauccucuuccuc

SEQ ID NO: 2616872 - RNA, 21 nt, Human
cuuccgaaaaauccucuuccu

SEQ ID NO: 2616873 - RNA, 20 nt, Human
cuuccgaaaaauccucuucc

SEQ ID NO: 2616874 - RNA, 21 nt, Human
cuucccucuguuucucuuucc

SEQ ID NO: 2616875 - RNA, 17 nt, Human
cuucccucuguuucucu

SEQ ID NO: 2616876 - RNA, 16 nt, Human
cuucccucuguuucuc

SEQ ID NO: 2616877 - RNA, 14 nt, Human
cuucccuuuuacau

SEQ ID NO: 2616878 - RNA, 11 nt, Human
cuucccucugc

SEQ ID NO: 2616879 - RNA, 13 nt, Human
cuucccucugccu

SEQ ID NO: 2616880 - RNA, 15 nt, Human
cuucccucugccugu

SEQ ID NO: 2616881 - RNA, 16 nt, Human
cuucccucugccuguc

SEQ ID NO: 2616882 - RNA, 17 nt, Human
cuucccucugccugucc

SEQ ID NO: 2616883 - RNA, 18 nt, Human
cuucccucugccuguccc

SEQ ID NO: 2616884 - RNA, 19 nt, Human
cuucccucugccugucccu

SEQ ID NO: 2616885 - RNA, 16 nt, Human
cuuccccuugcccagg

SEQ ID NO: 2616886 - RNA, 14 nt, Human
cuucccaguggcug

SEQ ID NO: 2616887 - RNA, 21 nt, Human
cuucccagguaagcaggagga

SEQ ID NO: 2616888 - RNA, 21 nt, Human
cuucccaggguagcccgccug

SEQ ID NO: 2616889 - RNA, 19 nt, Human
cuucccaggguagcccgcc

SEQ ID NO: 2616890 - RNA, 11 nt, Human
cuucccagggu

SEQ ID NO: 2616891 - RNA, 19 nt, Human
cuucccaggaguggaggag

SEQ ID NO: 2616892 - RNA, 22 nt, Human
cuucccaggcuggggcugaccu

SEQ ID NO: 2616893 - RNA, 18 nt, Human
cuucccaggcuggggcug

SEQ ID NO: 2616894 - RNA, 21 nt, Human
cuucccagcucucccucuggc

SEQ ID NO: 2616895 - RNA, 22 nt, Human
cuucccagcucucccucuggcc

SEQ ID NO: 2616896 - RNA, 13 nt, Human
cuuccccuuuccc

SEQ ID NO: 2616897 - RNA, 15 nt, Human
cuucccgcucagccc

SEQ ID NO: 2616898 - RNA, 23 nt, Human
cuuccccuugcccuugcccugac

SEQ ID NO: 2616899 - RNA, 22 nt, Human
cuuccccuugcccuugcccuga

SEQ ID NO: 2616900 - RNA, 17 nt, Human
cuuccccuugcccuugc

SEQ ID NO: 2616901 - RNA, 14 nt, Human
cuuccccuugcccu

SEQ ID NO: 2616902 - RNA, 19 nt, Human
cuuccccuugcccagggcu

SEQ ID NO: 2616903 - RNA, 23 nt, Human
cuuccccuugcccagggcucagc

SEQ ID NO: 2616904 - RNA, 17 nt, Human
cuucccgcucagcccuc

SEQ ID NO: 2616905 - RNA, 16 nt, Human
cuucccgcucagcccu

SEQ ID NO: 2616906 - RNA, 15 nt, Human
cuucccucacaccgc

SEQ ID NO: 2616907 - RNA, 23 nt, Human
cuucccuaucuuugccacccuca

SEQ ID NO: 2616908 - RNA, 17 nt, Human
cuucccucaucucuccu

SEQ ID NO: 2616909 - RNA, 16 nt, Human
cuucccucaucucucc

SEQ ID NO: 2616910 - RNA, 17 nt, Human
cuucccucaccuuggca

SEQ ID NO: 2616911 - RNA, 15 nt, Human
cuucccucccuaucu

SEQ ID NO: 2616912 - RNA, 16 nt, Human
cuucccucuccccaag

SEQ ID NO: 2616913 - RNA, 19 nt, Human
cuuccagguaucuccagga

SEQ ID NO: 2616914 - RNA, 18 nt, Human
cuuccagguaucuccagg

SEQ ID NO: 2616915 - RNA, 14 nt, Human
cuuccagcuccugu

SEQ ID NO: 2616916 - RNA, 16 nt, Human
cuuccaggugcccagc

SEQ ID NO: 2616917 - RNA, 19 nt, Human
cuuccaggugcccagcuau

SEQ ID NO: 2616918 - RNA, 16 nt, Human
cuuccagguguuacug

SEQ ID NO: 2616919 - RNA, 19 nt, Human
cuuccagguguuacuguaa

SEQ ID NO: 2616920 - RNA, 20 nt, Human
cuuccagguguuacuguaau

SEQ ID NO: 2616921 - RNA, 22 nt, Human
cuuccagguguuacuguaauuc

SEQ ID NO: 2616922 - RNA, 14 nt, Human
cuuccagugaggcu

SEQ ID NO: 2616923 - RNA, 20 nt, Human
cuuccagucuuccugacacu

SEQ ID NO: 2616924 - RNA, 21 nt, Human
cuuccagucuuccugacacuu

SEQ ID NO: 2616925 - RNA, 17 nt, Human
cuuccaguccaaucuca

SEQ ID NO: 2616926 - RNA, 13 nt, Human
cuuccagucagga

SEQ ID NO: 2616927 - RNA, 20 nt, Human
cuuccagguaucuccaggau

SEQ ID NO: 2616928 - RNA, 22 nt, Human
cuucccacucuagggcagugga

SEQ ID NO: 2616929 - RNA, 20 nt, Human
cuucccacucuagggcagug

SEQ ID NO: 2616930 - RNA, 19 nt, Human
cuucccacucuagggcagu

SEQ ID NO: 2616931 - RNA, 20 nt, Human
cuuccaguccaaucucaugg

SEQ ID NO: 2616932 - RNA, 22 nt, Human
cuuccagucuuccugacacuuu

SEQ ID NO: 2616933 - RNA, 18 nt, Human
cuucccacucuagggcag

SEQ ID NO: 2616934 - RNA, 15 nt, Human
cuuccagugaggcuc

SEQ ID NO: 2616935 - RNA, 15 nt, Human
cuucccacuggaggu

SEQ ID NO: 2616936 - RNA, 14 nt, Human
cuucccacuggagg

SEQ ID NO: 2616937 - RNA, 21 nt, Human
cuucccagcagggccacuccc

SEQ ID NO: 2616938 - RNA, 14 nt, Human
cuucccagcucucc

SEQ ID NO: 2616939 - RNA, 15 nt, Human
cuucccagcucuccc

SEQ ID NO: 2616940 - RNA, 18 nt, Human
cuucccagcucucccucu

SEQ ID NO: 2616941 - RNA, 20 nt, Human
cuucccagcucucccucugg

SEQ ID NO: 2616942 - RNA, 24 nt, Human
cuuccaggggugggacacccugug

SEQ ID NO: 2616943 - RNA, 22 nt, Human
cuuccaggggugggacacccug

SEQ ID NO: 2616944 - RNA, 13 nt, Human
cuuccagcuccug

SEQ ID NO: 2616945 - RNA, 12 nt, Human
cuuccagcuccu

SEQ ID NO: 2616946 - RNA, 15 nt, Human
cuuccagcuccugua

SEQ ID NO: 2616947 - RNA, 19 nt, Human
cuuccagauccuggaaauc

SEQ ID NO: 2616948 - RNA, 12 nt, Human
cuuccaccagcc

SEQ ID NO: 2616949 - RNA, 13 nt, Human
cuuccaccagccu

SEQ ID NO: 2616950 - RNA, 14 nt, Human
cuuccaccagccug

SEQ ID NO: 2616951 - RNA, 15 nt, Human
cuuccaccagccugc

SEQ ID NO: 2616952 - RNA, 16 nt, Human
cuuccaccagccugca

SEQ ID NO: 2616953 - RNA, 14 nt, Human
cuuccagcacccug

SEQ ID NO: 2616954 - RNA, 15 nt, Human
cuuccagcacccugc

SEQ ID NO: 2616955 - RNA, 16 nt, Human
cuuccagcacccugca

SEQ ID NO: 2616956 - RNA, 17 nt, Human
cuucuccuuucacaacc

SEQ ID NO: 2616957 - RNA, 14 nt, Human
cuucuccuuucaca

SEQ ID NO: 2616958 - RNA, 22 nt, Human
cuucuccuuucacaaccuucug

SEQ ID NO: 2616959 - RNA, 20 nt, Human
cuucuccuuucacaaccuuc

SEQ ID NO: 2616960 - RNA, 13 nt, Human
cuucucuacagac

SEQ ID NO: 2616961 - RNA, 11 nt, Human
cuucucuacag

SEQ ID NO: 2616962 - RNA, 21 nt, Human
cuucucgaccacgggaagcau

SEQ ID NO: 2616963 - RNA, 20 nt, Human
cuucucuaaaugaggggccu

SEQ ID NO: 2616964 - RNA, 12 nt, Human
cuucuccccaga

SEQ ID NO: 2616965 - RNA, 16 nt, Human
cuucuccccagaguuc

SEQ ID NO: 2616966 - RNA, 13 nt, Human
cuucucccaugag

SEQ ID NO: 2616967 - RNA, 22 nt, Human
cuucuccuucaccuuugucccc

SEQ ID NO: 2616968 - RNA, 18 nt, Human
cuucucccacuuggccaa

SEQ ID NO: 2616969 - RNA, 16 nt, Human
cuucucccacacugcu

SEQ ID NO: 2616970 - RNA, 17 nt, Human
cuucuccaucuggcagg

SEQ ID NO: 2616971 - RNA, 14 nt, Human
cuucucccacacug

SEQ ID NO: 2616972 - RNA, 15 nt, Human
cuucuccacccugcu

SEQ ID NO: 2616973 - RNA, 14 nt, Human
cuucuccacccugc

SEQ ID NO: 2616974 - RNA, 14 nt, Human
cuucuccaggcugu

SEQ ID NO: 2616975 - RNA, 16 nt, Human
cuucuccacccugcuc

SEQ ID NO: 2616976 - RNA, 20 nt, Human
cuucuccaggucucacgggc

SEQ ID NO: 2616977 - RNA, 19 nt, Human
cuucuccaggguccacagg

SEQ ID NO: 2616978 - RNA, 14 nt, Human
cuucuccauccaca

SEQ ID NO: 2616979 - RNA, 13 nt, Human
cuucuccaggguc

SEQ ID NO: 2616980 - RNA, 19 nt, Human
cuucuccaauucugcccaa

SEQ ID NO: 2616981 - RNA, 22 nt, Human
cuucucauuucaccccucccuu

SEQ ID NO: 2616982 - RNA, 17 nt, Human
cuucuccaggcuguauc

SEQ ID NO: 2616983 - RNA, 19 nt, Human
cuucuccaucucucuggcc

SEQ ID NO: 2616984 - RNA, 18 nt, Human
cuucuccaucucucuggc

SEQ ID NO: 2616985 - RNA, 13 nt, Human
cuucuccaucucu

SEQ ID NO: 2616986 - RNA, 11 nt, Human
cuucuccaucu

SEQ ID NO: 2616987 - RNA, 22 nt, Human
cuucuccauccuuucugccucu

SEQ ID NO: 2616988 - RNA, 20 nt, Human
cuucuccauccuuucugccu

SEQ ID NO: 2616989 - RNA, 16 nt, Human
cuucuccauccacaug

SEQ ID NO: 2616990 - RNA, 13 nt, Human
cuucucccacacu

SEQ ID NO: 2616991 - RNA, 21 nt, Human
cuucuccaucucucuggcccu

SEQ ID NO: 2616992 - RNA, 14 nt, Human
cuucuccaucuggc

SEQ ID NO: 2616993 - RNA, 17 nt, Human
cuucugcuucagccucc

SEQ ID NO: 2616994 - RNA, 16 nt, Human
cuucugcuucagccuc

SEQ ID NO: 2616995 - RNA, 14 nt, Human
cuucugcucagcuc

SEQ ID NO: 2616996 - RNA, 15 nt, Human
cuucugcucagcucu

SEQ ID NO: 2616997 - RNA, 16 nt, Human
cuucugcucagcucug

SEQ ID NO: 2616998 - RNA, 18 nt, Human
cuucugcucagcucuggg

SEQ ID NO: 2616999 - RNA, 10 nt, Human
cuucugcucc

SEQ ID NO: 2617000 - RNA, 12 nt, Human
cuucugcuccac

SEQ ID NO: 2617001 - RNA, 14 nt, Human
cuucugcuccaccc

SEQ ID NO: 2617002 - RNA, 18 nt, Human
cuucugcuucagccuccc

SEQ ID NO: 2617003 - RNA, 20 nt, Human
cuucugcuacuggcaaaagg

SEQ ID NO: 2617004 - RNA, 13 nt, Human
cuucugcuccacc

SEQ ID NO: 2617005 - RNA, 22 nt, Human
cuucugcuuuucugcccuggcu

SEQ ID NO: 2617006 - RNA, 21 nt, Human
cuucugcuuuucugcccuggc

SEQ ID NO: 2617007 - RNA, 20 nt, Human
cuucugcuuuucugcccugg

SEQ ID NO: 2617008 - RNA, 19 nt, Human
cuucugcuuuucugcccug

SEQ ID NO: 2617009 - RNA, 18 nt, Human
cuucugcuuuucugcccu

SEQ ID NO: 2617010 - RNA, 17 nt, Human
cuucugcuuuucugccc

SEQ ID NO: 2617011 - RNA, 16 nt, Human
cuucugcuuuucugcc

SEQ ID NO: 2617012 - RNA, 14 nt, Human
cuucugcuuuucug

SEQ ID NO: 2617013 - RNA, 23 nt, Human
cuucugcuuuucugcccuggcug

SEQ ID NO: 2617014 - RNA, 11 nt, Human
cuucuggagcc

SEQ ID NO: 2617015 - RNA, 13 nt, Human
cuucuggagcccu

SEQ ID NO: 2617016 - RNA, 20 nt, Human
cuucugccuuagucucaguu

SEQ ID NO: 2617017 - RNA, 19 nt, Human
cuucugccuuagucucagu

SEQ ID NO: 2617018 - RNA, 21 nt, Human
cuucugccuuagucucaguuu

SEQ ID NO: 2617019 - RNA, 14 nt, Human
cuucugccuucuca

SEQ ID NO: 2617020 - RNA, 13 nt, Human
cuucugccuuuuu

SEQ ID NO: 2617021 - RNA, 16 nt, Human
cuucugccuucucaug

SEQ ID NO: 2617022 - RNA, 20 nt, Human
cuucucucagacuuacuuua

SEQ ID NO: 2617023 - RNA, 11 nt, Human
cuucugcuacu

SEQ ID NO: 2617024 - RNA, 13 nt, Human
cuucugcuacugg

SEQ ID NO: 2617025 - RNA, 19 nt, Human
cuucugcuacuggcaaaag

SEQ ID NO: 2617026 - RNA, 21 nt, Human
cuucugccauauucuguuggc

SEQ ID NO: 2617027 - RNA, 16 nt, Human
cuucucucaucucuua

SEQ ID NO: 2617028 - RNA, 14 nt, Human
cuucucucaucucu

SEQ ID NO: 2617029 - RNA, 17 nt, Human
cuucugccauauucugu

SEQ ID NO: 2617030 - RNA, 15 nt, Human
cuucugccauauucu

SEQ ID NO: 2617031 - RNA, 18 nt, Human
cuucucucaccuccuaaa

SEQ ID NO: 2617032 - RNA, 16 nt, Human
cuucucucaccuccua

SEQ ID NO: 2617033 - RNA, 15 nt, Human
cuucucucaccuccu

SEQ ID NO: 2617034 - RNA, 17 nt, Human
cuucucuagcugguggu

SEQ ID NO: 2617035 - RNA, 15 nt, Human
cuucucuagcuggug

SEQ ID NO: 2617036 - RNA, 15 nt, Human
cuucucuacagacuu

SEQ ID NO: 2617037 - RNA, 14 nt, Human
cuucucucaccucc

SEQ ID NO: 2617038 - RNA, 23 nt, Human
cuuccuacccacaccucugccag

SEQ ID NO: 2617039 - RNA, 22 nt, Human
cuuccuagaaguuacugaaugc

SEQ ID NO: 2617040 - RNA, 21 nt, Human
cuuccuagaaguuacugaaug

SEQ ID NO: 2617041 - RNA, 14 nt, Human
cuuccuucccuggc

SEQ ID NO: 2617042 - RNA, 13 nt, Human
cuuccuucccugg

SEQ ID NO: 2617043 - RNA, 18 nt, Human
cuuccuucccugggcugu

SEQ ID NO: 2617044 - RNA, 16 nt, Human
cuuccuucccugggcu

SEQ ID NO: 2617045 - RNA, 15 nt, Human
cuuccuucccuggcu

SEQ ID NO: 2617046 - RNA, 17 nt, Human
cuuccuucccuggcuug

SEQ ID NO: 2617047 - RNA, 21 nt, Human
cuuccuugaagaacugcaggc

SEQ ID NO: 2617048 - RNA, 18 nt, Human
cuuccuucugccugagcu

SEQ ID NO: 2617049 - RNA, 11 nt, Human
cuuccuucugc

SEQ ID NO: 2617050 - RNA, 21 nt, Human
cuuccuucccugggcugugcu

SEQ ID NO: 2617051 - RNA, 22 nt, Human
cuuccuugaagaacugcaggcc

SEQ ID NO: 2617052 - RNA, 14 nt, Human
cuuccuugaccagc

SEQ ID NO: 2617053 - RNA, 15 nt, Human
cuuccuugaccagca

SEQ ID NO: 2617054 - RNA, 16 nt, Human
cuuccuugaccagcag

SEQ ID NO: 2617055 - RNA, 18 nt, Human
cuuccuugagacacggag

SEQ ID NO: 2617056 - RNA, 20 nt, Human
cuuccuugagacacggagcc

SEQ ID NO: 2617057 - RNA, 23 nt, Human
cuuccuugagacacggagcccag

SEQ ID NO: 2617058 - RNA, 22 nt, Human
cuuccuugaccagcagauccca

SEQ ID NO: 2617059 - RNA, 15 nt, Human
cuuccuugcucugca

SEQ ID NO: 2617060 - RNA, 15 nt, Human
cuuccuugcucuccc

SEQ ID NO: 2617061 - RNA, 14 nt, Human
cuuccuugcucucc

SEQ ID NO: 2617062 - RNA, 19 nt, Human
cuuccuugcuaaugcacca

SEQ ID NO: 2617063 - RNA, 17 nt, Human
cuuccuugcucugcacc

SEQ ID NO: 2617064 - RNA, 16 nt, Human
cuuccuugcucugcac

SEQ ID NO: 2617065 - RNA, 17 nt, Human
cuuccuugcuguccuag

SEQ ID NO: 2617066 - RNA, 22 nt, Human
cuuccuuuucccugcuuccagg

SEQ ID NO: 2617067 - RNA, 20 nt, Human
cuucgaaagcaucauuauuu

SEQ ID NO: 2617068 - RNA, 19 nt, Human
cuuccuuuucccugcuucc

SEQ ID NO: 2617069 - RNA, 17 nt, Human
cuuccuuuucccugcuu

SEQ ID NO: 2617070 - RNA, 16 nt, Human
cuuccuuuucccugcu

SEQ ID NO: 2617071 - RNA, 15 nt, Human
cuuccuuuucccugc

SEQ ID NO: 2617072 - RNA, 15 nt, Human
cuucgaaaccuggga

SEQ ID NO: 2617073 - RNA, 15 nt, Human
cuuccuuuugaggga

SEQ ID NO: 2617074 - RNA, 19 nt, Human
cuuccuuggacucauuuua

SEQ ID NO: 2617075 - RNA, 19 nt, Human
cuuccuugcuguccuaggc

SEQ ID NO: 2617076 - RNA, 20 nt, Human
cuuccuugcuguccuaggcc

SEQ ID NO: 2617077 - RNA, 20 nt, Human
cuuccuuggacucauuuuaa

SEQ ID NO: 2617078 - RNA, 17 nt, Human
cuuccuugcuuaaggua

SEQ ID NO: 2617079 - RNA, 15 nt, Human
cuucgcuccuguguc

SEQ ID NO: 2617080 - RNA, 14 nt, Human
cuucgcuccugugu

SEQ ID NO: 2617081 - RNA, 13 nt, Human
cuucgcuccugug

SEQ ID NO: 2617082 - RNA, 18 nt, Human
cuucgacucaggauccag

SEQ ID NO: 2617083 - RNA, 13 nt, Human
cuucgacugugac

SEQ ID NO: 2617084 - RNA, 16 nt, Human
cuucgacucaggaucc

SEQ ID NO: 2617085 - RNA, 15 nt, Human
cuucgacucaggauc

SEQ ID NO: 2617086 - RNA, 14 nt, Human
cuucgacucaggau

SEQ ID NO: 2617087 - RNA, 18 nt, Human
cuucggccuccauccuga

SEQ ID NO: 2617088 - RNA, 19 nt, Human
cuucggccuccauccugag

SEQ ID NO: 2617089 - RNA, 17 nt, Human
cuucggccuccauccug

SEQ ID NO: 2617090 - RNA, 17 nt, Human
cuucgagcacuguccag

SEQ ID NO: 2617091 - RNA, 23 nt, Human
cuucgagguggaucacagaggcu

SEQ ID NO: 2617092 - RNA, 16 nt, Human
cuucgggcccuuccca

SEQ ID NO: 2617093 - RNA, 17 nt, Human
cuucgggcccuucccac

SEQ ID NO: 2617094 - RNA, 14 nt, Human
cuucgggcugugcc

SEQ ID NO: 2617095 - RNA, 15 nt, Human
cuucgggcugugccc

SEQ ID NO: 2617096 - RNA, 20 nt, Human
cuucgggaggucgaggcagg

SEQ ID NO: 2617097 - RNA, 21 nt, Human
cuucgggaggucgaggcagga

SEQ ID NO: 2617098 - RNA, 21 nt, Human
cuucucauuucaccccucccu

SEQ ID NO: 2617099 - RNA, 22 nt, Human
cuucucauagcauuaacuaauc

SEQ ID NO: 2617100 - RNA, 16 nt, Human
cuucucauacguccac

SEQ ID NO: 2617101 - RNA, 22 nt, Human
cuucucaggcucugcccugccc

SEQ ID NO: 2617102 - RNA, 13 nt, Human
cuucucauagcau

SEQ ID NO: 2617103 - RNA, 15 nt, Human
cuucucauagcauua

SEQ ID NO: 2617104 - RNA, 22 nt, Human
cuucucaggcaugaacauguac

SEQ ID NO: 2617105 - RNA, 13 nt, Human
cuucucaggcucu

SEQ ID NO: 2617106 - RNA, 15 nt, Human
cuucucaggcucugc

SEQ ID NO: 2617107 - RNA, 16 nt, Human
cuucucaggcucugcc

SEQ ID NO: 2617108 - RNA, 19 nt, Human
cuucucaggcucugcccug

SEQ ID NO: 2617109 - RNA, 20 nt, Human
cuucucaggcucugcccugc

SEQ ID NO: 2617110 - RNA, 21 nt, Human
cuucucaggcucugcccugcc

SEQ ID NO: 2617111 - RNA, 18 nt, Human
cuucucagaaucuaccca

SEQ ID NO: 2617112 - RNA, 14 nt, Human
cuucucagaaucua

SEQ ID NO: 2617113 - RNA, 14 nt, Human
cuucucagcuccca

SEQ ID NO: 2617114 - RNA, 19 nt, Human
cuucuaaacuuccccaucu

SEQ ID NO: 2617115 - RNA, 22 nt, Human
cuucuaaacuuccccaucuucu

SEQ ID NO: 2617116 - RNA, 21 nt, Human
cuucuaaagguguugucccuu

SEQ ID NO: 2617117 - RNA, 22 nt, Human
cuucuaaagguguugucccuuc

SEQ ID NO: 2617118 - RNA, 15 nt, Human
cuucuaaagguguug

SEQ ID NO: 2617119 - RNA, 19 nt, Human
cuucuaaacccaauccaaa

SEQ ID NO: 2617120 - RNA, 18 nt, Human
cuucuaaacuuccccauc

SEQ ID NO: 2617121 - RNA, 15 nt, Human
cuucguuuauuuuca

SEQ ID NO: 2617122 - RNA, 16 nt, Human
cuucguuuauuuucaa

SEQ ID NO: 2617123 - RNA, 18 nt, Human
cuucguuuauuuucaaga

SEQ ID NO: 2617124 - RNA, 19 nt, Human
cuucguuuacuaugccugu

SEQ ID NO: 2617125 - RNA, 21 nt, Human
cuucguuuacuaugccugugu

SEQ ID NO: 2617126 - RNA, 18 nt, Human
cuucguuuacuaugccug

SEQ ID NO: 2617127 - RNA, 13 nt, Human
cuuuccucgccug

SEQ ID NO: 2617128 - RNA, 14 nt, Human
cuuuccucuucccc

SEQ ID NO: 2617129 - RNA, 13 nt, Human
cuuuccucuuccc

SEQ ID NO: 2617130 - RNA, 16 nt, Human
cuuuccuccuggcaga

SEQ ID NO: 2617131 - RNA, 16 nt, Human
cuuuccuccuuccaug

SEQ ID NO: 2617132 - RNA, 13 nt, Human
cuuuccuccuucc

SEQ ID NO: 2617133 - RNA, 14 nt, Human
cuuuccuccuucca

SEQ ID NO: 2617134 - RNA, 16 nt, Human
cuuuccucuuuggucu

SEQ ID NO: 2617135 - RNA, 13 nt, Human
cuuucugaaauaa

SEQ ID NO: 2617136 - RNA, 20 nt, Human
cuuucugagcacacuuuagu

SEQ ID NO: 2617137 - RNA, 17 nt, Human
cuuucugagcacacuuu

SEQ ID NO: 2617138 - RNA, 21 nt, Human
cuuucugagcacacuuuagug

SEQ ID NO: 2617139 - RNA, 23 nt, Human
cuuucugauaacuagauggugcu

SEQ ID NO: 2617140 - RNA, 21 nt, Human
cuuucugauaacuagauggug

SEQ ID NO: 2617141 - RNA, 20 nt, Human
cuuucugaagccucacuuau

SEQ ID NO: 2617142 - RNA, 19 nt, Human
cuuuccucuuccccuugcc

SEQ ID NO: 2617143 - RNA, 23 nt, Human
cuuuaggcauuaaauuuuagcaa

SEQ ID NO: 2617144 - RNA, 23 nt, Human
cuuuagggacucaauuucucccc

SEQ ID NO: 2617145 - RNA, 21 nt, Human
cuuuagggacucaauuucucc

SEQ ID NO: 2617146 - RNA, 15 nt, Human
cuuuaggcauuaaau

SEQ ID NO: 2617147 - RNA, 16 nt, Human
cuuuagggcagcuugc

SEQ ID NO: 2617148 - RNA, 15 nt, Human
cuuuagggcagcuug

SEQ ID NO: 2617149 - RNA, 14 nt, Human
cuuuagggcagcuu

SEQ ID NO: 2617150 - RNA, 13 nt, Human
cuuuagggcagcu

SEQ ID NO: 2617151 - RNA, 19 nt, Human
cuuuccucaaaacuucaga

SEQ ID NO: 2617152 - RNA, 22 nt, Human
cuuuaguaccugaaaaguaacu

SEQ ID NO: 2617153 - RNA, 17 nt, Human
cuuuaguaccugaaaag

SEQ ID NO: 2617154 - RNA, 18 nt, Human
cuuuagggcagcuugccc

SEQ ID NO: 2617155 - RNA, 21 nt, Human
cuuuccucaggcaaggucugg

SEQ ID NO: 2617156 - RNA, 19 nt, Human
cuuuaguaccugaaaagua

SEQ ID NO: 2617157 - RNA, 15 nt, Human
cuuuagucgcugagg

SEQ ID NO: 2617158 - RNA, 18 nt, Human
cuuuagagcauugccauu

SEQ ID NO: 2617159 - RNA, 17 nt, Human
cuuuagagcauugccau

SEQ ID NO: 2617160 - RNA, 22 nt, Human
cuuuagagaaguauacauaagu

SEQ ID NO: 2617161 - RNA, 23 nt, Human
cuuuagagcauugccauucccug

SEQ ID NO: 2617162 - RNA, 19 nt, Human
cuuuagagcauugccauuc

SEQ ID NO: 2617163 - RNA, 14 nt, Human
cuuuagaguuagac

SEQ ID NO: 2617164 - RNA, 19 nt, Human
cuuuagagaaguauacaua

SEQ ID NO: 2617165 - RNA, 21 nt, Human
cuuuaggagggaguuaucuaa

SEQ ID NO: 2617166 - RNA, 18 nt, Human
cuuuaggcagcagcuuuu

SEQ ID NO: 2617167 - RNA, 17 nt, Human
cuuuagaguuagacugu

SEQ ID NO: 2617168 - RNA, 13 nt, Human
cuuuagaguagca

SEQ ID NO: 2617169 - RNA, 16 nt, Human
cuuucuuccucugcug

SEQ ID NO: 2617170 - RNA, 15 nt, Human
cuuucuucuauuuua

SEQ ID NO: 2617171 - RNA, 15 nt, Human
cuuucugugugcacc

SEQ ID NO: 2617172 - RNA, 12 nt, Human
cuuucugugugc

SEQ ID NO: 2617173 - RNA, 21 nt, Human
cuuucugugugcaccuuacca

SEQ ID NO: 2617174 - RNA, 14 nt, Human
cuuucugucucucu

SEQ ID NO: 2617175 - RNA, 16 nt, Human
cuuucuguauugagua

SEQ ID NO: 2617176 - RNA, 19 nt, Human
cuuucuguccuuuuggcac

SEQ ID NO: 2617177 - RNA, 18 nt, Human
cuuucugucccuucuguc

SEQ ID NO: 2617178 - RNA, 23 nt, Human
cuuucugucccuucugucccuca

SEQ ID NO: 2617179 - RNA, 19 nt, Human
cuuucuguauauacuuuuu

SEQ ID NO: 2617180 - RNA, 20 nt, Human
cuuucuguauauacuuuuuu

SEQ ID NO: 2617181 - RNA, 15 nt, Human
cuuucugccuggagu

SEQ ID NO: 2617182 - RNA, 13 nt, Human
cuuucugcucagc

SEQ ID NO: 2617183 - RNA, 14 nt, Human
cuuucugcucagcu

SEQ ID NO: 2617184 - RNA, 16 nt, Human
cuuucugcucagcuuc

SEQ ID NO: 2617185 - RNA, 18 nt, Human
cuuucuguauauacuuuu

SEQ ID NO: 2617186 - RNA, 14 nt, Human
cuuucugccuggag

SEQ ID NO: 2617187 - RNA, 12 nt, Human
cuuucugccugg

SEQ ID NO: 2617188 - RNA, 15 nt, Human
cuuucugccucucaa

SEQ ID NO: 2617189 - RNA, 14 nt, Human
cuuucugccucuca

SEQ ID NO: 2617190 - RNA, 11 nt, Human
cuuucugccug

SEQ ID NO: 2617191 - RNA, 15 nt, Human
cuuucugcagaaaca

SEQ ID NO: 2617192 - RNA, 22 nt, Human
cuuucuuuucuggaauguaauc

SEQ ID NO: 2617193 - RNA, 22 nt, Human
cuuucuugguucauaaaugaau

SEQ ID NO: 2617194 - RNA, 18 nt, Human
cuuucuuuugauucuucc

SEQ ID NO: 2617195 - RNA, 16 nt, Human
cuuucuuuuucuucuu

SEQ ID NO: 2617196 - RNA, 15 nt, Human
cuuucuuuuucuucu

SEQ ID NO: 2617197 - RNA, 14 nt, Human
cuuucuuuuucuuc

SEQ ID NO: 2617198 - RNA, 21 nt, Human
cuuucuugguucauaaaugaa

SEQ ID NO: 2617199 - RNA, 20 nt, Human
cuuucuugguucauaaauga

SEQ ID NO: 2617200 - RNA, 16 nt, Human
cuuucuugcugguugu

SEQ ID NO: 2617201 - RNA, 21 nt, Human
cuuucuugcugguugucauuu

SEQ ID NO: 2617202 - RNA, 13 nt, Human
cuuucuuggccag

SEQ ID NO: 2617203 - RNA, 14 nt, Human
cuuucuuggccagu

SEQ ID NO: 2617204 - RNA, 22 nt, Human
cuuucuugaucaacaucuuuuc

SEQ ID NO: 2617205 - RNA, 21 nt, Human
cuuucuugaucaacaucuuuu

SEQ ID NO: 2617206 - RNA, 14 nt, Human
cuuucuucucugcu

SEQ ID NO: 2617207 - RNA, 16 nt, Human
cuuucuucuauuuuau

SEQ ID NO: 2617208 - RNA, 20 nt, Human
cuuucuuuuucuucuucccu

SEQ ID NO: 2617209 - RNA, 19 nt, Human
cuuucuuuuuuuuuuuuga

SEQ ID NO: 2617210 - RNA, 17 nt, Human
cuuugacaaagguaaau

SEQ ID NO: 2617211 - RNA, 22 nt, Human
cuuugaaacaagauaacugaga

SEQ ID NO: 2617212 - RNA, 14 nt, Human
cuuuguggccaagg

SEQ ID NO: 2617213 - RNA, 15 nt, Human
cuuuguggccaagga

SEQ ID NO: 2617214 - RNA, 16 nt, Human
cuuuguggccaaggag

SEQ ID NO: 2617215 - RNA, 18 nt, Human
cuuuguggccaaggagcu

SEQ ID NO: 2617216 - RNA, 20 nt, Human
cuuuguggccaaggagcugc

SEQ ID NO: 2617217 - RNA, 21 nt, Human
cuuuguggccaaggagcugcu

SEQ ID NO: 2617218 - RNA, 18 nt, Human
cuuuguguagcuuugcuc

SEQ ID NO: 2617219 - RNA, 16 nt, Human
cuuuguguagcuuugc

SEQ ID NO: 2617220 - RNA, 22 nt, Human
cuuuguggccaaggagcugcua

SEQ ID NO: 2617221 - RNA, 21 nt, Human
cuuuguucuggcucuuccagg

SEQ ID NO: 2617222 - RNA, 16 nt, Human
cuuuguucuggcucuu

SEQ ID NO: 2617223 - RNA, 17 nt, Human
cuuugugauuauuucac

SEQ ID NO: 2617224 - RNA, 19 nt, Human
cuuugugaggaagccgcug

SEQ ID NO: 2617225 - RNA, 12 nt, Human
cuuugugauuuu

SEQ ID NO: 2617226 - RNA, 22 nt, Human
cuuugugauucaaucuguaaac

SEQ ID NO: 2617227 - RNA, 23 nt, Human
cuuugugauucaaucuguaaacu

SEQ ID NO: 2617228 - RNA, 18 nt, Human
cuuugugauuauuucacu

SEQ ID NO: 2617229 - RNA, 11 nt, Human
cuuuguggcca

SEQ ID NO: 2617230 - RNA, 12 nt, Human
cuuuguggccaa

SEQ ID NO: 2617231 - RNA, 13 nt, Human
cuuuguggccaag

SEQ ID NO: 2617232 - RNA, 13 nt, Human
cuuuguggcuucc

SEQ ID NO: 2617233 - RNA, 23 nt, Human
cuuugugaggaagccgcuggggc

SEQ ID NO: 2617234 - RNA, 23 nt, Human
cuuugggcccagggacaccagcc

SEQ ID NO: 2617235 - RNA, 22 nt, Human
cuuugggcccagggacaccagc

SEQ ID NO: 2617236 - RNA, 16 nt, Human
cuuugggcccagggac

SEQ ID NO: 2617237 - RNA, 12 nt, Human
cuuugggccaga

SEQ ID NO: 2617238 - RNA, 13 nt, Human
cuuugggccagac

SEQ ID NO: 2617239 - RNA, 15 nt, Human
cuuugggcccaggga

SEQ ID NO: 2617240 - RNA, 13 nt, Human
cuuugggcccagg

SEQ ID NO: 2617241 - RNA, 21 nt, Human
cuuugggccagacaugccaca

SEQ ID NO: 2617242 - RNA, 14 nt, Human
cuuugggaggcuga

SEQ ID NO: 2617243 - RNA, 17 nt, Human
cuuugggaggcugaggc

SEQ ID NO: 2617244 - RNA, 18 nt, Human
cuuugggaggcugaggcg

SEQ ID NO: 2617245 - RNA, 16 nt, Human
cuuuggauuugacauu

SEQ ID NO: 2617246 - RNA, 17 nt, Human
cuuuggauuugacauug

SEQ ID NO: 2617247 - RNA, 17 nt, Human
cuuuggcacuggggcac

SEQ ID NO: 2617248 - RNA, 12 nt, Human
cuuuggcacugg

SEQ ID NO: 2617249 - RNA, 17 nt, Human
cuuuggaaacaggacca

SEQ ID NO: 2617250 - RNA, 13 nt, Human
cuuuggauuugac

SEQ ID NO: 2617251 - RNA, 15 nt, Human
cuuuggauuugacau

SEQ ID NO: 2617252 - RNA, 20 nt, Human
cuuuggaaaaugcauuguau

SEQ ID NO: 2617253 - RNA, 21 nt, Human
cuuuggaaaaugcauuguauc

SEQ ID NO: 2617254 - RNA, 23 nt, Human
cuuugggaggccaaggugggagg

SEQ ID NO: 2617255 - RNA, 24 nt, Human
cuuuggcaggugcagcccccacug

SEQ ID NO: 2617256 - RNA, 18 nt, Human
cuuuggcacuggggcacu

SEQ ID NO: 2617257 - RNA, 13 nt, Human
cuuuggcaggugc

SEQ ID NO: 2617258 - RNA, 14 nt, Human
cuuuggcagaguuc

SEQ ID NO: 2617259 - RNA, 23 nt, Human
cuuuggaaagacuuuuccaaccc

SEQ ID NO: 2617260 - RNA, 16 nt, Human
cuuugcuuugcccagc

SEQ ID NO: 2617261 - RNA, 19 nt, Human
cuuuggaaaaugcauugua

SEQ ID NO: 2617262 - RNA, 17 nt, Human
cuuugcuuugcuuucug

SEQ ID NO: 2617263 - RNA, 17 nt, Human
cuuugcuuucugcucag

SEQ ID NO: 2617264 - RNA, 19 nt, Human
cuuugcuuucugcucagcu

SEQ ID NO: 2617265 - RNA, 21 nt, Human
cuuugcuuucugcucagcuuc

SEQ ID NO: 2617266 - RNA, 11 nt, Human
cuuugcuuugc

SEQ ID NO: 2617267 - RNA, 12 nt, Human
cuuuggaaagac

SEQ ID NO: 2617268 - RNA, 20 nt, Human
cuuugcuugccucucuguuu

SEQ ID NO: 2617269 - RNA, 17 nt, Human
cuuugcuugccucucug

SEQ ID NO: 2617270 - RNA, 12 nt, Human
cuuugcuuucug

SEQ ID NO: 2617271 - RNA, 13 nt, Human
cuuugcuuucugc

SEQ ID NO: 2617272 - RNA, 14 nt, Human
cuuugcuuucugcu

SEQ ID NO: 2617273 - RNA, 15 nt, Human
cuuugcuuucugcuc

SEQ ID NO: 2617274 - RNA, 16 nt, Human
cuuugcuuucugcuca

SEQ ID NO: 2617275 - RNA, 14 nt, Human
cuuugcuugaaaga

SEQ ID NO: 2617276 - RNA, 15 nt, Human
cuuugcuucccauug

SEQ ID NO: 2617277 - RNA, 19 nt, Human
cuuugcuugcaguagauuu

SEQ ID NO: 2617278 - RNA, 20 nt, Human
cuuugcuucaaauccaucca

SEQ ID NO: 2617279 - RNA, 14 nt, Human
cuuugcuugcagua

SEQ ID NO: 2617280 - RNA, 22 nt, Human
cuuugcauaacguauaaaagcc

SEQ ID NO: 2617281 - RNA, 17 nt, Human
cuuugaccucaaccugu

SEQ ID NO: 2617282 - RNA, 18 nt, Human
cuuugaccucaaccugug

SEQ ID NO: 2617283 - RNA, 19 nt, Human
cuuugacaaagguaaauca

SEQ ID NO: 2617284 - RNA, 17 nt, Human
cuuugaauuuucugugu

SEQ ID NO: 2617285 - RNA, 12 nt, Human
cuuugcauuuua

SEQ ID NO: 2617286 - RNA, 22 nt, Human
cuuugcauguuccacuaacccc

SEQ ID NO: 2617287 - RNA, 20 nt, Human
cuuugcauguuccacuaacc

SEQ ID NO: 2617288 - RNA, 21 nt, Human
cuuugcauggaauuuguaagu

SEQ ID NO: 2617289 - RNA, 21 nt, Human
cuuugcauggagacuugagga

SEQ ID NO: 2617290 - RNA, 21 nt, Human
cuuugaccucaaccugugaug

SEQ ID NO: 2617291 - RNA, 16 nt, Human
cuuugccacccucaug

SEQ ID NO: 2617292 - RNA, 17 nt, Human
cuuugccacccucaugc

SEQ ID NO: 2617293 - RNA, 18 nt, Human
cuuugccacccucaugcu

SEQ ID NO: 2617294 - RNA, 22 nt, Human
cuuugcauuuuaaaaaugaaau

SEQ ID NO: 2617295 - RNA, 19 nt, Human
cuuugcauuuuaaaaauga

SEQ ID NO: 2617296 - RNA, 14 nt, Human
cuuugcauuuugga

SEQ ID NO: 2617297 - RNA, 21 nt, Human
gaaaacacuguucucugcccu

SEQ ID NO: 2617298 - RNA, 20 nt, Human
gaaaacacuguucucugccc

SEQ ID NO: 2617299 - RNA, 16 nt, Human
gaaaacaugcuacaca

SEQ ID NO: 2617300 - RNA, 18 nt, Human
gaaaacaugcuacacacu

SEQ ID NO: 2617301 - RNA, 14 nt, Human
gaaaacaaggauga

SEQ ID NO: 2617302 - RNA, 19 nt, Human
gaaaaauuuaagcauuguu

SEQ ID NO: 2617303 - RNA, 20 nt, Human
gaaaaauuuaagcauuguuu

SEQ ID NO: 2617304 - RNA, 22 nt, Human
gaaaaauuuaagcauuguuugc

SEQ ID NO: 2617305 - RNA, 19 nt, Human
gaaaacacuguucucugcc

SEQ ID NO: 2617306 - RNA, 12 nt, Human
gaaaacaaggaa

SEQ ID NO: 2617307 - RNA, 19 nt, Human
gaaaaaucacauccuggcc

SEQ ID NO: 2617308 - RNA, 13 nt, Human
gaaaaauauuuaa

SEQ ID NO: 2617309 - RNA, 14 nt, Human
gaaaaauauuuaag

SEQ ID NO: 2617310 - RNA, 15 nt, Human
gaaaaauaugauauu

SEQ ID NO: 2617311 - RNA, 20 nt, Human
gaaaaauccucuuccucuga

SEQ ID NO: 2617312 - RNA, 11 nt, Human
gaaaaauuccu

SEQ ID NO: 2617313 - RNA, 18 nt, Human
gaaaaauccucuuccucu

SEQ ID NO: 2617314 - RNA, 13 nt, Human
gaaaaauccucuu

SEQ ID NO: 2617315 - RNA, 17 nt, Human
gaaaaauccagaaagaa

SEQ ID NO: 2617316 - RNA, 18 nt, Human
gaaaaauccagaaagaaa

SEQ ID NO: 2617317 - RNA, 20 nt, Human
gaaaaauuccuauugugauu

SEQ ID NO: 2617318 - RNA, 15 nt, Human
gaaaaauuccuauug

SEQ ID NO: 2617319 - RNA, 16 nt, Human
gaaaaauuuaagcauu

SEQ ID NO: 2617320 - RNA, 17 nt, Human
gaaaaauuuaagcauug

SEQ ID NO: 2617321 - RNA, 18 nt, Human
gaaaaauuuaagcauugu

SEQ ID NO: 2617322 - RNA, 15 nt, Human
cuuuuuuauacacau

SEQ ID NO: 2617323 - RNA, 19 nt, Human
gaaaaauaacuucaagcaa

SEQ ID NO: 2617324 - RNA, 14 nt, Human
cuuuuuuauacaca

SEQ ID NO: 2617325 - RNA, 10 nt, Human
gaaaaauaug

SEQ ID NO: 2617326 - RNA, 11 nt, Human
gaaaaauauga

SEQ ID NO: 2617327 - RNA, 16 nt, Human
cuuuuuuagaguugau

SEQ ID NO: 2617328 - RNA, 21 nt, Human
cuuuuuuaagauuuuucucaa

SEQ ID NO: 2617329 - RNA, 20 nt, Human
cuuuuuuaagauuuuucuca

SEQ ID NO: 2617330 - RNA, 15 nt, Human
cuuuuuuacacaaau

SEQ ID NO: 2617331 - RNA, 19 nt, Human
gaaaauaacaauaaaagac

SEQ ID NO: 2617332 - RNA, 15 nt, Human
gaaaauaaaaaguua

SEQ ID NO: 2617333 - RNA, 16 nt, Human
gaaaauaaaaaguuaa

SEQ ID NO: 2617334 - RNA, 14 nt, Human
gaaaagucaaacug

SEQ ID NO: 2617335 - RNA, 13 nt, Human
gaaaagucaaacu

SEQ ID NO: 2617336 - RNA, 22 nt, Human
gaaaagucaaggguaggguggg

SEQ ID NO: 2617337 - RNA, 14 nt, Human
gaaaaguauguuag

SEQ ID NO: 2617338 - RNA, 14 nt, Human
gaaaagguuuuauu

SEQ ID NO: 2617339 - RNA, 18 nt, Human
gaaaagguuuuauuuugu

SEQ ID NO: 2617340 - RNA, 17 nt, Human
gaaaagguuuuauuuug

SEQ ID NO: 2617341 - RNA, 21 nt, Human
gaaaaguaaggugcaguuccc

SEQ ID NO: 2617342 - RNA, 20 nt, Human
gaaaaguauguuagugcaaa

SEQ ID NO: 2617343 - RNA, 16 nt, Human
gaaaaguacauuuaau

SEQ ID NO: 2617344 - RNA, 14 nt, Human
gaaaaguacauuua

SEQ ID NO: 2617345 - RNA, 21 nt, Human
gaaaaccuaaguccuuuaugu

SEQ ID NO: 2617346 - RNA, 13 nt, Human
gaaaacccagaga

SEQ ID NO: 2617347 - RNA, 14 nt, Human
gaaaacccagagag

SEQ ID NO: 2617348 - RNA, 15 nt, Human
gaaaacccagagagg

SEQ ID NO: 2617349 - RNA, 22 nt, Human
gaaaacccagagaggaaucaga

SEQ ID NO: 2617350 - RNA, 14 nt, Human
gaaaaccccagcau

SEQ ID NO: 2617351 - RNA, 19 nt, Human
gaaaacaugcuacacacug

SEQ ID NO: 2617352 - RNA, 14 nt, Human
gaaaacaaggaagu

SEQ ID NO: 2617353 - RNA, 13 nt, Human
gaaaacauuccau

SEQ ID NO: 2617354 - RNA, 15 nt, Human
gaaaacauguaauaa

SEQ ID NO: 2617355 - RNA, 21 nt, Human
gaaaagggucuugggaaauau

SEQ ID NO: 2617356 - RNA, 19 nt, Human
gaaaacgucuugcuuggga

SEQ ID NO: 2617357 - RNA, 17 nt, Human
gaaaagguaaggugaag

SEQ ID NO: 2617358 - RNA, 19 nt, Human
gaaaagggaaguugugccu

SEQ ID NO: 2617359 - RNA, 21 nt, Human
gaaaagggagauucagacugu

SEQ ID NO: 2617360 - RNA, 17 nt, Human
gaaaacgguuaaaacug

SEQ ID NO: 2617361 - RNA, 18 nt, Human
gaaaagggaacugaacau

SEQ ID NO: 2617362 - RNA, 13 nt, Human
gaaaacggagcug

SEQ ID NO: 2617363 - RNA, 14 nt, Human
gaaaacggagcuga

SEQ ID NO: 2617364 - RNA, 14 nt, Human
gaaaacguggcugc

SEQ ID NO: 2617365 - RNA, 13 nt, Human
gaaaaccucuccu

SEQ ID NO: 2617366 - RNA, 13 nt, Human
cuuuuuauuugca

SEQ ID NO: 2617367 - RNA, 14 nt, Human
cuuuuuauuugcau

SEQ ID NO: 2617368 - RNA, 13 nt, Human
cuuuuuauuucug

SEQ ID NO: 2617369 - RNA, 16 nt, Human
cuuuuuauuucugcau

SEQ ID NO: 2617370 - RNA, 15 nt, Human
cuuuuuauuugcaug

SEQ ID NO: 2617371 - RNA, 19 nt, Human
cuuuuuaaaaauagacacu

SEQ ID NO: 2617372 - RNA, 17 nt, Human
cuuuugacaaaggcaag

SEQ ID NO: 2617373 - RNA, 20 nt, Human
cuuuuguucuugguuuguaa

SEQ ID NO: 2617374 - RNA, 22 nt, Human
cuuuuguucuugguuuguaaau

SEQ ID NO: 2617375 - RNA, 22 nt, Human
cuuuugaaguaguuuguauaac

SEQ ID NO: 2617376 - RNA, 21 nt, Human
cuuuugaauaaaaacuuugcu

SEQ ID NO: 2617377 - RNA, 13 nt, Human
cuuuugaauauuc

SEQ ID NO: 2617378 - RNA, 19 nt, Human
cuuuugaauccaugcuugg

SEQ ID NO: 2617379 - RNA, 20 nt, Human
cuuuugaauccaugcuuggg

SEQ ID NO: 2617380 - RNA, 21 nt, Human
cuuuugaauccaugcuugggu

SEQ ID NO: 2617381 - RNA, 23 nt, Human
cuuuugaauccaugcuugggugu

SEQ ID NO: 2617382 - RNA, 20 nt, Human
cuuuugaaguaguuuguaua

SEQ ID NO: 2617383 - RNA, 21 nt, Human
cuuuugaacgcccccccccac

SEQ ID NO: 2617384 - RNA, 18 nt, Human
cuuuugaacccaggaguu

SEQ ID NO: 2617385 - RNA, 20 nt, Human
cuuuugaacccaggaguuca

SEQ ID NO: 2617386 - RNA, 17 nt, Human
cuuuuucauauguugcu

SEQ ID NO: 2617387 - RNA, 22 nt, Human
cuuuuugaaguguaggcagaca

SEQ ID NO: 2617388 - RNA, 21 nt, Human
cuuuuugaaguguaggcagac

SEQ ID NO: 2617389 - RNA, 13 nt, Human
cuuuuugaagugu

SEQ ID NO: 2617390 - RNA, 16 nt, Human
cuuuuuaaaguguuuc

SEQ ID NO: 2617391 - RNA, 12 nt, Human
cuuuuugaagug

SEQ ID NO: 2617392 - RNA, 23 nt, Human
cuuuuugaaguguaggcagacac

SEQ ID NO: 2617393 - RNA, 19 nt, Human
cuuuuugaauguuauuugu

SEQ ID NO: 2617394 - RNA, 11 nt, Human
cuuuuugaaug

SEQ ID NO: 2617395 - RNA, 15 nt, Human
cuuuuuggaggugcu

SEQ ID NO: 2617396 - RNA, 18 nt, Human
cuuuuuuaaaugaagaaa

SEQ ID NO: 2617397 - RNA, 13 nt, Human
cuuuuugcuuucg

SEQ ID NO: 2617398 - RNA, 18 nt, Human
cuuuuugagguggcacuu

SEQ ID NO: 2617399 - RNA, 20 nt, Human
cuuuuugagguggcacuuuu

SEQ ID NO: 2617400 - RNA, 19 nt, Human
cuuuguuuugauguuugug

SEQ ID NO: 2617401 - RNA, 23 nt, Human
cuuuguuuugauguuuguggccu

SEQ ID NO: 2617402 - RNA, 23 nt, Human
cuuuguuuugcacacuuugccau

SEQ ID NO: 2617403 - RNA, 19 nt, Human
cuuuguuuugcacacuuug

SEQ ID NO: 2617404 - RNA, 24 nt, Human
cuuuguuuugauguuuguggccuc

SEQ ID NO: 2617405 - RNA, 20 nt, Human
cuuuguucuuuaggagauuu

SEQ ID NO: 2617406 - RNA, 17 nt, Human
cuuuguguagcuuugcu

SEQ ID NO: 2617407 - RNA, 16 nt, Human
cuuuguugcccaggcu

SEQ ID NO: 2617408 - RNA, 21 nt, Human
cuuuguugcaaguacugcugu

SEQ ID NO: 2617409 - RNA, 17 nt, Human
cuuuguuuuacugucuu

SEQ ID NO: 2617410 - RNA, 21 nt, Human
cuuuguuuguugucagcugaa

SEQ ID NO: 2617411 - RNA, 21 nt, Human
cuuuucugucucugccucccu

SEQ ID NO: 2617412 - RNA, 18 nt, Human
cuuuucugucucugccuc

SEQ ID NO: 2617413 - RNA, 17 nt, Human
cuuuucugucucugccu

SEQ ID NO: 2617414 - RNA, 16 nt, Human
cuuuucugucucugcc

SEQ ID NO: 2617415 - RNA, 17 nt, Human
cuuuucugcccuggcug

SEQ ID NO: 2617416 - RNA, 15 nt, Human
cuuuucugcccuggc

SEQ ID NO: 2617417 - RNA, 14 nt, Human
cuuuucugcccugg

SEQ ID NO: 2617418 - RNA, 15 nt, Human
cuuuucuguuugcua

SEQ ID NO: 2617419 - RNA, 12 nt, Human
cuuuucugcaga

SEQ ID NO: 2617420 - RNA, 15 nt, Human
cuuuucugcagaggg

SEQ ID NO: 2617421 - RNA, 13 nt, Human
cuuuucugcccug

SEQ ID NO: 2617422 - RNA, 20 nt, Human
cuuuucugcauuuugcuauu

SEQ ID NO: 2617423 - RNA, 14 nt, Human
cuuuucugcauuuu

SEQ ID NO: 2617424 - RNA, 13 nt, Human
cuuuucugcauuu

SEQ ID NO: 2617425 - RNA, 16 nt, Human
cuuuucuuaaaccuuc

SEQ ID NO: 2617426 - RNA, 15 nt, Human
cuuuucuuaaaccuu

SEQ ID NO: 2617427 - RNA, 14 nt, Human
cuuuugaaaucugu

SEQ ID NO: 2617428 - RNA, 16 nt, Human
cuuuugaaacaauacu

SEQ ID NO: 2617429 - RNA, 13 nt, Human
cuuuugaaacaau

SEQ ID NO: 2617430 - RNA, 14 nt, Human
cuuuucuuuuucuc

SEQ ID NO: 2617431 - RNA, 13 nt, Human
cuuuugaacccag

SEQ ID NO: 2617432 - RNA, 14 nt, Human
cuuuugaacccagg

SEQ ID NO: 2617433 - RNA, 17 nt, Human
cuugcaauuucuaccua

SEQ ID NO: 2617434 - RNA, 23 nt, Human
cuugcacacuccccugcacugga

SEQ ID NO: 2617435 - RNA, 19 nt, Human
cuugcacacuccccugcac

SEQ ID NO: 2617436 - RNA, 22 nt, Human
cuugcacacuccccugcacugg

SEQ ID NO: 2617437 - RNA, 18 nt, Human
cuugcaccccucacucug

SEQ ID NO: 2617438 - RNA, 16 nt, Human
cuugcaccccucacuc

SEQ ID NO: 2617439 - RNA, 14 nt, Human
cuugcaccccucac

SEQ ID NO: 2617440 - RNA, 23 nt, Human
cuugcaccccaaagcuuuccugc

SEQ ID NO: 2617441 - RNA, 22 nt, Human
cuugcaccccaaagcuuuccug

SEQ ID NO: 2617442 - RNA, 20 nt, Human
cuugcagacucuacagaggc

SEQ ID NO: 2617443 - RNA, 21 nt, Human
cuugcagacucuacagaggcc

SEQ ID NO: 2617444 - RNA, 17 nt, Human
cuugcacccgccucucc

SEQ ID NO: 2617445 - RNA, 16 nt, Human
cuugcacccgccucuc

SEQ ID NO: 2617446 - RNA, 15 nt, Human
cuugcacccgccucu

SEQ ID NO: 2617447 - RNA, 20 nt, Human
cuugcaccccucacucuggc

SEQ ID NO: 2617448 - RNA, 19 nt, Human
cuugcagcacucacacagg

SEQ ID NO: 2617449 - RNA, 18 nt, Human
cuugcacccgccucuccc

SEQ ID NO: 2617450 - RNA, 18 nt, Human
cuugcagcacucacacag

SEQ ID NO: 2617451 - RNA, 19 nt, Human
cuugcauccaacuccagga

SEQ ID NO: 2617452 - RNA, 23 nt, Human
cuugcagcaggaucuagaggggg

SEQ ID NO: 2617453 - RNA, 13 nt, Human
cuugcagcaggau

SEQ ID NO: 2617454 - RNA, 12 nt, Human
cuugcagcagga

SEQ ID NO: 2617455 - RNA, 23 nt, Human
cuugcagcacucacacaggaccc

SEQ ID NO: 2617456 - RNA, 22 nt, Human
cuugcagcacucacacaggacc

SEQ ID NO: 2617457 - RNA, 18 nt, Human
cuugcaauggcagccuug

SEQ ID NO: 2617458 - RNA, 17 nt, Human
cuugcaauggcagccuu

SEQ ID NO: 2617459 - RNA, 16 nt, Human
cuugcaauggcagccu

SEQ ID NO: 2617460 - RNA, 15 nt, Human
cuugcaauggcagcc

SEQ ID NO: 2617461 - RNA, 21 nt, Human
cuugaguugauucagcucugc

SEQ ID NO: 2617462 - RNA, 20 nt, Human
cuugaguugauucagcucug

SEQ ID NO: 2617463 - RNA, 18 nt, Human
cuugaguugauucagcuc

SEQ ID NO: 2617464 - RNA, 19 nt, Human
cuugaguugauucagcucu

SEQ ID NO: 2617465 - RNA, 19 nt, Human
cuugagccgggccccuggg

SEQ ID NO: 2617466 - RNA, 17 nt, Human
cuugagccgggccccug

SEQ ID NO: 2617467 - RNA, 20 nt, Human
cuugagccgggccccugggc

SEQ ID NO: 2617468 - RNA, 17 nt, Human
cuugaggguugggcugg

SEQ ID NO: 2617469 - RNA, 15 nt, Human
cuugaggguugggcu

SEQ ID NO: 2617470 - RNA, 12 nt, Human
cuugagccuggg

SEQ ID NO: 2617471 - RNA, 15 nt, Human
cuugagccugggagg

SEQ ID NO: 2617472 - RNA, 16 nt, Human
cuugagagaccaggca

SEQ ID NO: 2617473 - RNA, 13 nt, Human
cuugagcccagga

SEQ ID NO: 2617474 - RNA, 18 nt, Human
cuugagaccucagccaug

SEQ ID NO: 2617475 - RNA, 17 nt, Human
cuugagacuguuuugaa

SEQ ID NO: 2617476 - RNA, 14 nt, Human
cuugagagaccagg

SEQ ID NO: 2617477 - RNA, 22 nt, Human
cuugagacuguuuugaauuugg

SEQ ID NO: 2617478 - RNA, 15 nt, Human
cuugagcccaggagu

SEQ ID NO: 2617479 - RNA, 14 nt, Human
cuugagcccaggag

SEQ ID NO: 2617480 - RNA, 14 nt, Human
cuucuggcuuccuu

SEQ ID NO: 2617481 - RNA, 20 nt, Human
cuucuggcuuccuucucuca

SEQ ID NO: 2617482 - RNA, 15 nt, Human
cuucugggagggcag

SEQ ID NO: 2617483 - RNA, 13 nt, Human
cuugagaaaccuu

SEQ ID NO: 2617484 - RNA, 12 nt, Human
cuugagaaaccu

SEQ ID NO: 2617485 - RNA, 11 nt, Human
cuugagaaacc

SEQ ID NO: 2617486 - RNA, 17 nt, Human
cuugagacacggagccc

SEQ ID NO: 2617487 - RNA, 22 nt, Human
cuugagacacggagcccagccc

SEQ ID NO: 2617488 - RNA, 13 nt, Human
cuugagacagcuu

SEQ ID NO: 2617489 - RNA, 14 nt, Human
cuugagaccucagc

SEQ ID NO: 2617490 - RNA, 15 nt, Human
cuugagaccucagcc

SEQ ID NO: 2617491 - RNA, 16 nt, Human
cuugagaccucagcca

SEQ ID NO: 2617492 - RNA, 22 nt, Human
cuugagaaauauggacacuuaa

SEQ ID NO: 2617493 - RNA, 23 nt, Human
cuugagaagaccucaccuagaaa

SEQ ID NO: 2617494 - RNA, 17 nt, Human
cuucuggauucuuggcc

SEQ ID NO: 2617495 - RNA, 16 nt, Human
cuucuggauucuuggc

SEQ ID NO: 2617496 - RNA, 18 nt, Human
cuucuggauucuuggccc

SEQ ID NO: 2617497 - RNA, 17 nt, Human
cuucuggcacuuggaga

SEQ ID NO: 2617498 - RNA, 20 nt, Human
cuucuggagucuccaguggu

SEQ ID NO: 2617499 - RNA, 15 nt, Human
cuucuggauucuugg

SEQ ID NO: 2617500 - RNA, 18 nt, Human
cuucuggagucuccagug

SEQ ID NO: 2617501 - RNA, 16 nt, Human
cuucuggagucuccag

SEQ ID NO: 2617502 - RNA, 14 nt, Human
cuucuggagcccuu

SEQ ID NO: 2617503 - RNA, 12 nt, Human
cuucuggcucaa

SEQ ID NO: 2617504 - RNA, 16 nt, Human
cuucuggccucccaca

SEQ ID NO: 2617505 - RNA, 19 nt, Human
cuucuggccucccacagac

SEQ ID NO: 2617506 - RNA, 15 nt, Human
cuucuggccucccac

SEQ ID NO: 2617507 - RNA, 14 nt, Human
cuucuggccuccca

SEQ ID NO: 2617508 - RNA, 14 nt, Human
cuugcaugaggcua

SEQ ID NO: 2617509 - RNA, 13 nt, Human
cuugcaugaggcu

SEQ ID NO: 2617510 - RNA, 23 nt, Human
cuugccaaccuguaauaaauaug

SEQ ID NO: 2617511 - RNA, 22 nt, Human
cuugccaaccuguaauaaauau

SEQ ID NO: 2617512 - RNA, 21 nt, Human
cuugccaaccuguaauaaaua

SEQ ID NO: 2617513 - RNA, 20 nt, Human
cuugcaucguggagacaggg

SEQ ID NO: 2617514 - RNA, 20 nt, Human
cuugccaaccuguaauaaau

SEQ ID NO: 2617515 - RNA, 18 nt, Human
cuugcaucucauugcucu

SEQ ID NO: 2617516 - RNA, 17 nt, Human
cuugcaucguggagaca

SEQ ID NO: 2617517 - RNA, 15 nt, Human
cuugcauccaacucc

SEQ ID NO: 2617518 - RNA, 17 nt, Human
cuugcaugaggcuagug

SEQ ID NO: 2617519 - RNA, 23 nt, Human
cuugccaccccacccucccugga

SEQ ID NO: 2617520 - RNA, 22 nt, Human
cuugccaccccacccucccugg

SEQ ID NO: 2617521 - RNA, 21 nt, Human
cuugccaccccacccucccug

SEQ ID NO: 2617522 - RNA, 23 nt, Human
cuugccaggguuucgagaagcug

SEQ ID NO: 2617523 - RNA, 17 nt, Human
cuugccacuagggcucu

SEQ ID NO: 2617524 - RNA, 14 nt, Human
cuugccacagcucu

SEQ ID NO: 2617525 - RNA, 20 nt, Human
cuugccaccccacccucccu

SEQ ID NO: 2617526 - RNA, 18 nt, Human
cuugccaccccacccucc

SEQ ID NO: 2617527 - RNA, 13 nt, Human
cuugccaccccac

SEQ ID NO: 2617528 - RNA, 20 nt, Human
cuugccacagcucuugagga

SEQ ID NO: 2617529 - RNA, 22 nt, Human
cuugccaaugaggucugaaaug

SEQ ID NO: 2617530 - RNA, 23 nt, Human
cuugccaaugaggucugaaaugg

SEQ ID NO: 2617531 - RNA, 14 nt, Human
cuugcccuguuaaa

SEQ ID NO: 2617532 - RNA, 18 nt, Human
cuugcccuggugccucac

SEQ ID NO: 2617533 - RNA, 18 nt, Human
cuugccccaacccccagc

SEQ ID NO: 2617534 - RNA, 17 nt, Human
cuugccccaacccccag

SEQ ID NO: 2617535 - RNA, 14 nt, Human
cuugccccaacccc

SEQ ID NO: 2617536 - RNA, 13 nt, Human
cuugccccaaccc

SEQ ID NO: 2617537 - RNA, 20 nt, Human
cuugcccaguuucagggcua

SEQ ID NO: 2617538 - RNA, 20 nt, Human
cuugcccagggcucagccug

SEQ ID NO: 2617539 - RNA, 21 nt, Human
cuugcccagggcucagccugg

SEQ ID NO: 2617540 - RNA, 14 nt, Human
cuugcccaguuuca

SEQ ID NO: 2617541 - RNA, 23 nt, Human
cuugcccagggcucagccuggug

SEQ ID NO: 2617542 - RNA, 13 nt, Human
cuugcccagggcu

SEQ ID NO: 2617543 - RNA, 14 nt, Human
cuugcccagggcuc

SEQ ID NO: 2617544 - RNA, 15 nt, Human
cuugcccagggcuca

SEQ ID NO: 2617545 - RNA, 16 nt, Human
cuugcccagggcucag

SEQ ID NO: 2617546 - RNA, 18 nt, Human
cuugcccagggcucagcc

SEQ ID NO: 2617547 - RNA, 19 nt, Human
cuugcccagggcucagccu

SEQ ID NO: 2617548 - RNA, 20 nt, Human
cuugcuugauuguauggugg

SEQ ID NO: 2617549 - RNA, 14 nt, Human
cuuggaagcuccgc

SEQ ID NO: 2617550 - RNA, 20 nt, Human
cuuggaagcuccgcuuucua

SEQ ID NO: 2617551 - RNA, 17 nt, Human
cuugcuucccuaaucua

SEQ ID NO: 2617552 - RNA, 13 nt, Human
cuugcuucccuaa

SEQ ID NO: 2617553 - RNA, 20 nt, Human
cuugcugcccugugcuccuc

SEQ ID NO: 2617554 - RNA, 23 nt, Human
cuugcugcccuaggcuccgucag

SEQ ID NO: 2617555 - RNA, 21 nt, Human
cuugcugcaguaugaaaauaa

SEQ ID NO: 2617556 - RNA, 19 nt, Human
cuugcugagaggggcuguc

SEQ ID NO: 2617557 - RNA, 17 nt, Human
cuugcugagaggggcug

SEQ ID NO: 2617558 - RNA, 18 nt, Human
cuugcucuugaugccugg

SEQ ID NO: 2617559 - RNA, 17 nt, Human
cuugcucuugaugccug

SEQ ID NO: 2617560 - RNA, 19 nt, Human
cuugcucuugaugccuggc

SEQ ID NO: 2617561 - RNA, 22 nt, Human
cuugcucuuucuacucugaacu

SEQ ID NO: 2617562 - RNA, 20 nt, Human
cuugcucuuucuacucugaa

SEQ ID NO: 2617563 - RNA, 19 nt, Human
cuugcucuuucuacucuga

SEQ ID NO: 2617564 - RNA, 15 nt, Human
cuugcucuguaaucu

SEQ ID NO: 2617565 - RNA, 19 nt, Human
cuugcucuucagugggaga

SEQ ID NO: 2617566 - RNA, 14 nt, Human
cuugcucuguaauc

SEQ ID NO: 2617567 - RNA, 17 nt, Human
cuugcccuucccugucc

SEQ ID NO: 2617568 - RNA, 16 nt, Human
cuugcccuucccuguc

SEQ ID NO: 2617569 - RNA, 15 nt, Human
cuugcccuucccugu

SEQ ID NO: 2617570 - RNA, 14 nt, Human
cuugcccuucccug

SEQ ID NO: 2617571 - RNA, 12 nt, Human
cuugcccuuccc

SEQ ID NO: 2617572 - RNA, 21 nt, Human
cuugccccaacccccagcacc

SEQ ID NO: 2617573 - RNA, 20 nt, Human
cuugccccaacccccagcac

SEQ ID NO: 2617574 - RNA, 19 nt, Human
cuugccccaacccccagca

SEQ ID NO: 2617575 - RNA, 22 nt, Human
cuugcccuguuaaaagaugaaa

SEQ ID NO: 2617576 - RNA, 22 nt, Human
cuugcucugcugacagacacag

SEQ ID NO: 2617577 - RNA, 19 nt, Human
cuugcccuucccugucccu

SEQ ID NO: 2617578 - RNA, 23 nt, Human
cuugcucugcuugacaacaucug

SEQ ID NO: 2617579 - RNA, 14 nt, Human
cuuguuggagccug

SEQ ID NO: 2617580 - RNA, 22 nt, Human
cuuguugcuguugauguuuugu

SEQ ID NO: 2617581 - RNA, 19 nt, Human
cuuguugcaugauguauuu

SEQ ID NO: 2617582 - RNA, 20 nt, Human
cuuguugcucaaaaaaugag

SEQ ID NO: 2617583 - RNA, 19 nt, Human
cuuuaaaaaaauuuaagug

SEQ ID NO: 2617584 - RNA, 18 nt, Human
cuuuaaaaaaauuuaagu

SEQ ID NO: 2617585 - RNA, 17 nt, Human
cuuuaaaaaaauuuaag

SEQ ID NO: 2617586 - RNA, 20 nt, Human
cuuguuugcucaccuggggu

SEQ ID NO: 2617587 - RNA, 18 nt, Human
cuuguuugcucaccuggg

SEQ ID NO: 2617588 - RNA, 19 nt, Human
cuuguuugcucaccugggg

SEQ ID NO: 2617589 - RNA, 20 nt, Human
cuuguuugauuuuagcugca

SEQ ID NO: 2617590 - RNA, 22 nt, Human
cuuguuugauuuuagcugcaga

SEQ ID NO: 2617591 - RNA, 23 nt, Human
cuuguuugauuuuagcugcagaa

SEQ ID NO: 2617592 - RNA, 16 nt, Human
cuuguuugcucaccug

SEQ ID NO: 2617593 - RNA, 15 nt, Human
cuuguuuccaauguu

SEQ ID NO: 2617594 - RNA, 22 nt, Human
cuuguuucaauuccaccugcaa

SEQ ID NO: 2617595 - RNA, 14 nt, Human
cuuguuucuuuuca

SEQ ID NO: 2617596 - RNA, 12 nt, Human
cuuguuucaauu

SEQ ID NO: 2617597 - RNA, 20 nt, Human
cuuuaaaagacaaaucaaag

SEQ ID NO: 2617598 - RNA, 12 nt, Human
cuuuaaaagaau

SEQ ID NO: 2617599 - RNA, 17 nt, Human
cuuuaccuuuuuuauac

SEQ ID NO: 2617600 - RNA, 22 nt, Human
cuuuaaaaaauuaaucugggcc

SEQ ID NO: 2617601 - RNA, 19 nt, Human
cuuuaaaaacuauuuaacu

SEQ ID NO: 2617602 - RNA, 14 nt, Human
cuuuaaaaacuauu

SEQ ID NO: 2617603 - RNA, 21 nt, Human
cuuuaaaaagcuccaaaugca

SEQ ID NO: 2617604 - RNA, 23 nt, Human
cuuuaaaaacuauuuaacuugag

SEQ ID NO: 2617605 - RNA, 19 nt, Human
cuuuaccuuuuuuauacau

SEQ ID NO: 2617606 - RNA, 20 nt, Human
cuuuaccuuuuuuauacaua

SEQ ID NO: 2617607 - RNA, 23 nt, Human
cuuuagacccugggugggcucug

SEQ ID NO: 2617608 - RNA, 16 nt, Human
cuuuagacccugggug

SEQ ID NO: 2617609 - RNA, 14 nt, Human
cuuuagacccuggg

SEQ ID NO: 2617610 - RNA, 13 nt, Human
cuuuaccugagac

SEQ ID NO: 2617611 - RNA, 16 nt, Human
cuuuaccugagaccag

SEQ ID NO: 2617612 - RNA, 22 nt, Human
cuuuagaaugagagugugaaau

SEQ ID NO: 2617613 - RNA, 18 nt, Human
cuuuagaaugagagugug

SEQ ID NO: 2617614 - RNA, 15 nt, Human
cuuguggucccaccc

SEQ ID NO: 2617615 - RNA, 18 nt, Human
cuuguccuagcuugggag

SEQ ID NO: 2617616 - RNA, 14 nt, Human
cuuguccuuucccu

SEQ ID NO: 2617617 - RNA, 15 nt, Human
cuuguccuuucccuu

SEQ ID NO: 2617618 - RNA, 23 nt, Human
cuuguccuuuuguaccauggugu

SEQ ID NO: 2617619 - RNA, 16 nt, Human
cuuguccccacacucc

SEQ ID NO: 2617620 - RNA, 14 nt, Human
cuuguccccacacu

SEQ ID NO: 2617621 - RNA, 13 nt, Human
cuuguccccacac

SEQ ID NO: 2617622 - RNA, 21 nt, Human
cuuguccccugccugugccug

SEQ ID NO: 2617623 - RNA, 17 nt, Human
cuuguccccugccugug

SEQ ID NO: 2617624 - RNA, 20 nt, Human
cuuguccccacacuccuaca

SEQ ID NO: 2617625 - RNA, 18 nt, Human
cuuguccccacacuccua

SEQ ID NO: 2617626 - RNA, 20 nt, Human
cuuguccccuccucacuccc

SEQ ID NO: 2617627 - RNA, 21 nt, Human
cuuguccccuccucacucccu

SEQ ID NO: 2617628 - RNA, 19 nt, Human
cuuguggucccaccccaca

SEQ ID NO: 2617629 - RNA, 16 nt, Human
cuuguggucccacccc

SEQ ID NO: 2617630 - RNA, 16 nt, Human
cuuguuaagauaguua

SEQ ID NO: 2617631 - RNA, 21 nt, Human
cuuguucugugaugaggggag

SEQ ID NO: 2617632 - RNA, 20 nt, Human
cuuguucugugaugagggga

SEQ ID NO: 2617633 - RNA, 17 nt, Human
cuuguuacuucugaggu

SEQ ID NO: 2617634 - RNA, 15 nt, Human
cuuguuacuucugag

SEQ ID NO: 2617635 - RNA, 14 nt, Human
cuuguuacuucuga

SEQ ID NO: 2617636 - RNA, 21 nt, Human
cuuguguuucuuuaguuuuug

SEQ ID NO: 2617637 - RNA, 12 nt, Human
cuuguccccaca

SEQ ID NO: 2617638 - RNA, 22 nt, Human
cuuguguuuuuaacucaauauu

SEQ ID NO: 2617639 - RNA, 14 nt, Human
cuugguuuguaaau

SEQ ID NO: 2617640 - RNA, 15 nt, Human
cuugguuuguaaauu

SEQ ID NO: 2617641 - RNA, 22 nt, Human
cuuguaaugauauagccagaaa

SEQ ID NO: 2617642 - RNA, 21 nt, Human
cuuguaaugauauagccagaa

SEQ ID NO: 2617643 - RNA, 15 nt, Human
cuuguaauucuaaau

SEQ ID NO: 2617644 - RNA, 13 nt, Human
cuuguaauucuaa

SEQ ID NO: 2617645 - RNA, 22 nt, Human
cuuguaauuuuuuuaauuuaca

SEQ ID NO: 2617646 - RNA, 23 nt, Human
cuuguaauuuaaacaggcccagc

SEQ ID NO: 2617647 - RNA, 13 nt, Human
cuuguacaaaaua

SEQ ID NO: 2617648 - RNA, 22 nt, Human
cuuguaauuuaaacaggcccag

SEQ ID NO: 2617649 - RNA, 21 nt, Human
cuuguaauuuaaacaggccca

SEQ ID NO: 2617650 - RNA, 12 nt, Human
cuuguaauuuaa

SEQ ID NO: 2617651 - RNA, 23 nt, Human
cuuguaauucuaaaugaauguuu

SEQ ID NO: 2617652 - RNA, 16 nt, Human
cuuguaauucuaaaug

SEQ ID NO: 2617653 - RNA, 17 nt, Human
cuuguacuuuauuuucu

SEQ ID NO: 2617654 - RNA, 12 nt, Human
cuuguacaaaau

SEQ ID NO: 2617655 - RNA, 18 nt, Human
cuugguugucuccacaca

SEQ ID NO: 2617656 - RNA, 14 nt, Human
cuugguugucucca

SEQ ID NO: 2617657 - RNA, 17 nt, Human
cuugguuuccaaaggca

SEQ ID NO: 2617658 - RNA, 22 nt, Human
cuugguuucuucaacaggagaa

SEQ ID NO: 2617659 - RNA, 21 nt, Human
cuuggggcuugacuuuuguau

SEQ ID NO: 2617660 - RNA, 20 nt, Human
cuuggggcuugacuuuugua

SEQ ID NO: 2617661 - RNA, 14 nt, Human
cuugggcugcuccu

SEQ ID NO: 2617662 - RNA, 15 nt, Human
cuugguuggcuggcc

SEQ ID NO: 2617663 - RNA, 16 nt, Human
cuugguuggcuggccu

SEQ ID NO: 2617664 - RNA, 17 nt, Human
cuugguuggguccucac

SEQ ID NO: 2617665 - RNA, 18 nt, Human
cuuggggcugaugcaguu

SEQ ID NO: 2617666 - RNA, 15 nt, Human
cuuggggccuaugca

SEQ ID NO: 2617667 - RNA, 18 nt, Human
cuuggggcucacacaccu

SEQ ID NO: 2617668 - RNA, 14 nt, Human
cuuggggcuuccua

SEQ ID NO: 2617669 - RNA, 16 nt, Human
cuuggggcugaugcag

SEQ ID NO: 2617670 - RNA, 14 nt, Human
cuugggcugagacu

SEQ ID NO: 2617671 - RNA, 17 nt, Human
cuugggcugagacugga

SEQ ID NO: 2617672 - RNA, 21 nt, Human
cuugggcucccuguaaccucu

SEQ ID NO: 2617673 - RNA, 22 nt, Human
cuugggcggcugagagccccag

SEQ ID NO: 2617674 - RNA, 13 nt, Human
cuugggcucccug

SEQ ID NO: 2617675 - RNA, 18 nt, Human
cuugggcggcugagagcc

SEQ ID NO: 2617676 - RNA, 15 nt, Human
cuugggcggcugaga

SEQ ID NO: 2617677 - RNA, 14 nt, Human
cuugggcggcugag

SEQ ID NO: 2617678 - RNA, 12 nt, Human
cuugggcggcug

SEQ ID NO: 2617679 - RNA, 22 nt, Human
cuuggacuucuucucccccgcg

SEQ ID NO: 2617680 - RNA, 18 nt, Human
cuuggacucuugcucuuu

SEQ ID NO: 2617681 - RNA, 15 nt, Human
cuuggacucuugcuc

SEQ ID NO: 2617682 - RNA, 14 nt, Human
cuuggacucuugcu

SEQ ID NO: 2617683 - RNA, 13 nt, Human
cuuggacuugagg

SEQ ID NO: 2617684 - RNA, 22 nt, Human
cuuggagccaauggagacuguc

SEQ ID NO: 2617685 - RNA, 20 nt, Human
cuugggaggaagcagaauaa

SEQ ID NO: 2617686 - RNA, 21 nt, Human
cuugggaggaagcagaauaaa

SEQ ID NO: 2617687 - RNA, 13 nt, Human
cuuggagccccag

SEQ ID NO: 2617688 - RNA, 23 nt, Human
cuugggaggaagcagaauaaagc

SEQ ID NO: 2617689 - RNA, 22 nt, Human
cuugggaggaagcagaauaaag

SEQ ID NO: 2617690 - RNA, 14 nt, Human
cuugggaggcccca

SEQ ID NO: 2617691 - RNA, 15 nt, Human
cuugggaggccccac

SEQ ID NO: 2617692 - RNA, 19 nt, Human
cuugggaggccccacuggg

SEQ ID NO: 2617693 - RNA, 21 nt, Human
cuugggaggccccacugggga

SEQ ID NO: 2617694 - RNA, 22 nt, Human
cuugggaggccccacuggggaa

SEQ ID NO: 2617695 - RNA, 15 nt, Human
cuugggaggcuuccc

SEQ ID NO: 2617696 - RNA, 16 nt, Human
cuugggaggcuucccc

SEQ ID NO: 2617697 - RNA, 15 nt, Human
cuuggaagcuucugg

SEQ ID NO: 2617698 - RNA, 16 nt, Human
cuugcugcccuaggcu

SEQ ID NO: 2617699 - RNA, 22 nt, Human
cuuggaauuuguaaccucagcu

SEQ ID NO: 2617700 - RNA, 20 nt, Human
cuuggaauuuguaaccucag

SEQ ID NO: 2617701 - RNA, 13 nt, Human
cuuggacacugua

SEQ ID NO: 2617702 - RNA, 18 nt, Human
cuuggaaguugcauggca

SEQ ID NO: 2617703 - RNA, 21 nt, Human
cuuggaaguuucauauauugu

SEQ ID NO: 2617704 - RNA, 16 nt, Human
cuuggacucauuuuaa

SEQ ID NO: 2617705 - RNA, 19 nt, Human
cuuggaccucugcucugag

SEQ ID NO: 2617706 - RNA, 22 nt, Human
cuuggacuauuauaauuuaaug

SEQ ID NO: 2617707 - RNA, 17 nt, Human
cuuggaccucugcucug

SEQ ID NO: 2617708 - RNA, 14 nt, Human
cuuggacuauuaua

SEQ ID NO: 2617709 - RNA, 20 nt, Human
cuugggaugaugccucauga

SEQ ID NO: 2617710 - RNA, 18 nt, Human
cuugggccacugugaaga

SEQ ID NO: 2617711 - RNA, 20 nt, Human
cuugggccacugugaagaga

SEQ ID NO: 2617712 - RNA, 18 nt, Human
cuugggcccagcugggcu

SEQ ID NO: 2617713 - RNA, 16 nt, Human
cuugggcccagcuggg

SEQ ID NO: 2617714 - RNA, 15 nt, Human
cuugggcccagcugg

SEQ ID NO: 2617715 - RNA, 14 nt, Human
cuugggcccagcug

SEQ ID NO: 2617716 - RNA, 17 nt, Human
cuugggccauagcuccu

SEQ ID NO: 2617717 - RNA, 16 nt, Human
cuugggccauagcucc

SEQ ID NO: 2617718 - RNA, 13 nt, Human
cuugggcagagcu

SEQ ID NO: 2617719 - RNA, 22 nt, Human
cuugggcacuuuuuaauucacc

SEQ ID NO: 2617720 - RNA, 14 nt, Human
cuugggcccuuuga

SEQ ID NO: 2617721 - RNA, 16 nt, Human
cuugggcccuuugagu

SEQ ID NO: 2617722 - RNA, 17 nt, Human
cuugggcccuuugagug

SEQ ID NO: 2617723 - RNA, 19 nt, Human
cuugggcccuuugagugca

SEQ ID NO: 2617724 - RNA, 21 nt, Human
cuugggcccagcugggcucug

SEQ ID NO: 2617725 - RNA, 20 nt, Human
cuugggcccagcugggcucu

SEQ ID NO: 2617726 - RNA, 22 nt, Human
cuugggcccagcugggcucugc

SEQ ID NO: 2617727 - RNA, 12 nt, Human
cuugggcccucc

SEQ ID NO: 2617728 - RNA, 13 nt, Human
cuugggcccuccu

SEQ ID NO: 2617729 - RNA, 14 nt, Human
cuugggcccuccug

SEQ ID NO: 2617730 - RNA, 15 nt, Human
cuugggcccuucccu

SEQ ID NO: 2617731 - RNA, 16 nt, Human
gaccacacuccagcug

SEQ ID NO: 2617732 - RNA, 22 nt, Human
gaccacacuccagcugggauca

SEQ ID NO: 2617733 - RNA, 14 nt, Human
gaccacacuccagc

SEQ ID NO: 2617734 - RNA, 17 nt, Human
gaccacaccucccugaa

SEQ ID NO: 2617735 - RNA, 20 nt, Human
gaccacaccucccugaacca

SEQ ID NO: 2617736 - RNA, 12 nt, Human
gaccacagcaca

SEQ ID NO: 2617737 - RNA, 14 nt, Human
gaccacagcacagc

SEQ ID NO: 2617738 - RNA, 15 nt, Human
gaccacagcacagcc

SEQ ID NO: 2617739 - RNA, 16 nt, Human
gaccacagcacagcca

SEQ ID NO: 2617740 - RNA, 17 nt, Human
gaccacacuuccugucc

SEQ ID NO: 2617741 - RNA, 18 nt, Human
gaccacacuuccugucca

SEQ ID NO: 2617742 - RNA, 20 nt, Human
gaccacacuuccuguccaga

SEQ ID NO: 2617743 - RNA, 22 nt, Human
gaccacacuuccuguccagaga

SEQ ID NO: 2617744 - RNA, 21 nt, Human
gaccacagcaaggcaccugca

SEQ ID NO: 2617745 - RNA, 20 nt, Human
gaccacagcaaggcaccugc

SEQ ID NO: 2617746 - RNA, 11 nt, Human
gaccacagcaa

SEQ ID NO: 2617747 - RNA, 23 nt, Human
gaccacacuuccuguccagagag

SEQ ID NO: 2617748 - RNA, 16 nt, Human
gaccacacccuguacu

SEQ ID NO: 2617749 - RNA, 12 nt, Human
gaccacaccucc

SEQ ID NO: 2617750 - RNA, 21 nt, Human
gaccacacauuuguguaaaca

SEQ ID NO: 2617751 - RNA, 13 nt, Human
gaccaauucaacc

SEQ ID NO: 2617752 - RNA, 18 nt, Human
gaccacaaaacuuuucua

SEQ ID NO: 2617753 - RNA, 21 nt, Human
gaccaauauuguacaguuuuu

SEQ ID NO: 2617754 - RNA, 19 nt, Human
gaccaauauuguacaguuu

SEQ ID NO: 2617755 - RNA, 18 nt, Human
gaccaauauuguacaguu

SEQ ID NO: 2617756 - RNA, 17 nt, Human
gaccaauauuguacagu

SEQ ID NO: 2617757 - RNA, 16 nt, Human
gacauccauaaagaag

SEQ ID NO: 2617758 - RNA, 19 nt, Human
gacauccauaaagaagcaa

SEQ ID NO: 2617759 - RNA, 18 nt, Human
gacauccauaaagaagca

SEQ ID NO: 2617760 - RNA, 17 nt, Human
gacauccauaaagaagc

SEQ ID NO: 2617761 - RNA, 19 nt, Human
gacaucaguggcauggcuc

SEQ ID NO: 2617762 - RNA, 16 nt, Human
gacauccaagcuuccu

SEQ ID NO: 2617763 - RNA, 15 nt, Human
gacauccaagcuucc

SEQ ID NO: 2617764 - RNA, 17 nt, Human
gacauccaagcuuccuu

SEQ ID NO: 2617765 - RNA, 16 nt, Human
gacaucacuuguacaa

SEQ ID NO: 2617766 - RNA, 22 nt, Human
gacaucacuuguacaaaauaaa

SEQ ID NO: 2617767 - RNA, 13 nt, Human
gacaucaguggca

SEQ ID NO: 2617768 - RNA, 20 nt, Human
gacaucaguggcauggcucc

SEQ ID NO: 2617769 - RNA, 13 nt, Human
gacaucagcuggu

SEQ ID NO: 2617770 - RNA, 20 nt, Human
gacauccauaaagaagcaau

SEQ ID NO: 2617771 - RNA, 15 nt, Human
gaccaagcaggaagc

SEQ ID NO: 2617772 - RNA, 14 nt, Human
gaccaagcaggaag

SEQ ID NO: 2617773 - RNA, 16 nt, Human
gaccaagcaggaagcu

SEQ ID NO: 2617774 - RNA, 17 nt, Human
gaccaagcaggaagcuc

SEQ ID NO: 2617775 - RNA, 19 nt, Human
gaccaagcaggaagcucag

SEQ ID NO: 2617776 - RNA, 20 nt, Human
gaccaagcaggaagcucaga

SEQ ID NO: 2617777 - RNA, 20 nt, Human
gaccaagcaucuuggggggg

SEQ ID NO: 2617778 - RNA, 15 nt, Human
gaccaagcaucuugg

SEQ ID NO: 2617779 - RNA, 13 nt, Human
gaccaaggacccc

SEQ ID NO: 2617780 - RNA, 16 nt, Human
gaccaaggaccccuca

SEQ ID NO: 2617781 - RNA, 14 nt, Human
gaccaaguuauaaa

SEQ ID NO: 2617782 - RNA, 18 nt, Human
gaccaauauucaaaugcg

SEQ ID NO: 2617783 - RNA, 20 nt, Human
gaccaauauuauacuaagaa

SEQ ID NO: 2617784 - RNA, 18 nt, Human
gaccaagguuccagcuca

SEQ ID NO: 2617785 - RNA, 18 nt, Human
gaccaaggggugggccac

SEQ ID NO: 2617786 - RNA, 21 nt, Human
gaccaaguuauaaaucaaugu

SEQ ID NO: 2617787 - RNA, 19 nt, Human
gaccaaggcaaggcaggug

SEQ ID NO: 2617788 - RNA, 17 nt, Human
gaccaaggcaaggcagg

SEQ ID NO: 2617789 - RNA, 23 nt, Human
gaccaaggcaaggcaggugccuc

SEQ ID NO: 2617790 - RNA, 17 nt, Human
gaccaaggaccccucac

SEQ ID NO: 2617791 - RNA, 19 nt, Human
gaccaaggaccccucaccu

SEQ ID NO: 2617792 - RNA, 16 nt, Human
gaccaaggagaugaag

SEQ ID NO: 2617793 - RNA, 16 nt, Human
gaccacguuucuaaag

SEQ ID NO: 2617794 - RNA, 16 nt, Human
gaccaccaccucagag

SEQ ID NO: 2617795 - RNA, 23 nt, Human
gaccacaucuuuaucuguucuug

SEQ ID NO: 2617796 - RNA, 17 nt, Human
gaccacaucuuuaucug

SEQ ID NO: 2617797 - RNA, 18 nt, Human
gaccacauuuuauauuua

SEQ ID NO: 2617798 - RNA, 23 nt, Human
gaccacaggguucaaaaugucug

SEQ ID NO: 2617799 - RNA, 23 nt, Human
gaccacagcaucauuuugcauuc

SEQ ID NO: 2617800 - RNA, 21 nt, Human
gaccacaggguucaaaauguc

SEQ ID NO: 2617801 - RNA, 16 nt, Human
gaccacugcagaagac

SEQ ID NO: 2617802 - RNA, 18 nt, Human
gaccacugcagaagacag

SEQ ID NO: 2617803 - RNA, 21 nt, Human
gaccagacaccuugacagggc

SEQ ID NO: 2617804 - RNA, 22 nt, Human
gaccagacaccuugacagggca

SEQ ID NO: 2617805 - RNA, 21 nt, Human
gaccagagcugccaccugccu

SEQ ID NO: 2617806 - RNA, 23 nt, Human
gaccagacaccuugacagggcac

SEQ ID NO: 2617807 - RNA, 21 nt, Human
gaccagcaccaucucuccucc

SEQ ID NO: 2617808 - RNA, 20 nt, Human
gaccagcaccaucucuccuc

SEQ ID NO: 2617809 - RNA, 16 nt, Human
gaccagcagaucccag

SEQ ID NO: 2617810 - RNA, 17 nt, Human
gaccagcagaucccagc

SEQ ID NO: 2617811 - RNA, 18 nt, Human
gaccagcagaucccagcu

SEQ ID NO: 2617812 - RNA, 20 nt, Human
gaccagcagaucccagcuca

SEQ ID NO: 2617813 - RNA, 17 nt, Human
gaccagcacugucucag

SEQ ID NO: 2617814 - RNA, 20 nt, Human
gaccagcaacuugucuuuuu

SEQ ID NO: 2617815 - RNA, 20 nt, Human
gacccaugcugcccugugag

SEQ ID NO: 2617816 - RNA, 19 nt, Human
gacccaugcugcccuguga

SEQ ID NO: 2617817 - RNA, 18 nt, Human
gacccaugcugcccugug

SEQ ID NO: 2617818 - RNA, 23 nt, Human
gacccaugaguuggggucuggca

SEQ ID NO: 2617819 - RNA, 14 nt, Human
gacccaguggggag

SEQ ID NO: 2617820 - RNA, 13 nt, Human
gacccaugcugcc

SEQ ID NO: 2617821 - RNA, 16 nt, Human
gacccagugcccccac

SEQ ID NO: 2617822 - RNA, 17 nt, Human
gacccagugcccccacu

SEQ ID NO: 2617823 - RNA, 20 nt, Human
gacccagugcccccacugac

SEQ ID NO: 2617824 - RNA, 23 nt, Human
gacccagugagauuacagaggaa

SEQ ID NO: 2617825 - RNA, 22 nt, Human
gacccagccccuugagaaaccu

SEQ ID NO: 2617826 - RNA, 16 nt, Human
gacccagcccucaucc

SEQ ID NO: 2617827 - RNA, 23 nt, Human
gacccagccccuugagaaaccuu

SEQ ID NO: 2617828 - RNA, 15 nt, Human
gacccagugccccca

SEQ ID NO: 2617829 - RNA, 22 nt, Human
gacccagugagauuacagagga

SEQ ID NO: 2617830 - RNA, 12 nt, Human
gacccagugaga

SEQ ID NO: 2617831 - RNA, 16 nt, Human
gacccagucccugggg

SEQ ID NO: 2617832 - RNA, 18 nt, Human
gacccaaaaggcagaagc

SEQ ID NO: 2617833 - RNA, 19 nt, Human
gacccaaaaggcagaagca

SEQ ID NO: 2617834 - RNA, 13 nt, Human
gaccagcagcgcc

SEQ ID NO: 2617835 - RNA, 14 nt, Human
gaccagcagcgccu

SEQ ID NO: 2617836 - RNA, 16 nt, Human
gaccagcagcgccuuu

SEQ ID NO: 2617837 - RNA, 20 nt, Human
gaccagcagcgccuuuccca

SEQ ID NO: 2617838 - RNA, 23 nt, Human
gaccagcagcgccuuucccaacu

SEQ ID NO: 2617839 - RNA, 20 nt, Human
gacccaaaaggcagaagcaa

SEQ ID NO: 2617840 - RNA, 19 nt, Human
gacccacuggacucaccuc

SEQ ID NO: 2617841 - RNA, 20 nt, Human
gacccagauccucacaacca

SEQ ID NO: 2617842 - RNA, 16 nt, Human
gacccagauccucaca

SEQ ID NO: 2617843 - RNA, 15 nt, Human
gacccagauccucac

SEQ ID NO: 2617844 - RNA, 16 nt, Human
gacccagacccagugg

SEQ ID NO: 2617845 - RNA, 17 nt, Human
gacccagcacugcccaa

SEQ ID NO: 2617846 - RNA, 13 nt, Human
gacccagcacugc

SEQ ID NO: 2617847 - RNA, 23 nt, Human
gacccacuucacacacaggcaac

SEQ ID NO: 2617848 - RNA, 14 nt, Human
gacccagacccagu

SEQ ID NO: 2617849 - RNA, 10 nt, Human
gacccagacc

SEQ ID NO: 2617850 - RNA, 22 nt, Human
gaccccacccaagcuuggcagc

SEQ ID NO: 2617851 - RNA, 20 nt, Human
gaccccacccaagcuuggca

SEQ ID NO: 2617852 - RNA, 19 nt, Human
gaccccacccaagcuuggc

SEQ ID NO: 2617853 - RNA, 23 nt, Human
gaccccaaagagccuggagaagc

SEQ ID NO: 2617854 - RNA, 21 nt, Human
gaccccaaagagccuggagaa

SEQ ID NO: 2617855 - RNA, 14 nt, Human
gaccccacccaagc

SEQ ID NO: 2617856 - RNA, 12 nt, Human
gaccccacccaa

SEQ ID NO: 2617857 - RNA, 20 nt, Human
gaccccaaagagccuggaga

SEQ ID NO: 2617858 - RNA, 19 nt, Human
gaccccaaagagccuggag

SEQ ID NO: 2617859 - RNA, 18 nt, Human
gaccccaaagagccugga

SEQ ID NO: 2617860 - RNA, 16 nt, Human
gaccccaaagagccug

SEQ ID NO: 2617861 - RNA, 23 nt, Human
gaccccaaacaccuuccagcucc

SEQ ID NO: 2617862 - RNA, 20 nt, Human
gacccauucuacacagagca

SEQ ID NO: 2617863 - RNA, 17 nt, Human
gacccaugcugcccugu

SEQ ID NO: 2617864 - RNA, 17 nt, Human
gacccaucacgccugug

SEQ ID NO: 2617865 - RNA, 17 nt, Human
gacccccagcuccggcc

SEQ ID NO: 2617866 - RNA, 23 nt, Human
gacccccagcuccggccuguccu

SEQ ID NO: 2617867 - RNA, 13 nt, Human
gacccccagcucc

SEQ ID NO: 2617868 - RNA, 12 nt, Human
gaccccagagga

SEQ ID NO: 2617869 - RNA, 20 nt, Human
gaccccccaccaccagccgg

SEQ ID NO: 2617870 - RNA, 18 nt, Human
gacccccgcccccugccc

SEQ ID NO: 2617871 - RNA, 16 nt, Human
gacccccgcccccugc

SEQ ID NO: 2617872 - RNA, 15 nt, Human
gacccccgcccccug

SEQ ID NO: 2617873 - RNA, 11 nt, Human
gacccccgccc

SEQ ID NO: 2617874 - RNA, 22 nt, Human
gacccugcccugugggccccca

SEQ ID NO: 2617875 - RNA, 20 nt, Human
gacccugcccugugggcccc

SEQ ID NO: 2617876 - RNA, 17 nt, Human
gacccugcccugugggc

SEQ ID NO: 2617877 - RNA, 16 nt, Human
gacccugaggcccaga

SEQ ID NO: 2617878 - RNA, 12 nt, Human
gacccugaggcc

SEQ ID NO: 2617879 - RNA, 11 nt, Human
gacccugaggc

SEQ ID NO: 2617880 - RNA, 14 nt, Human
gacccccuuccccu

SEQ ID NO: 2617881 - RNA, 10 nt, Human
gacccugagg

SEQ ID NO: 2617882 - RNA, 12 nt, Human
gacccccuggag

SEQ ID NO: 2617883 - RNA, 19 nt, Human
gacccccgcccccugcccu

SEQ ID NO: 2617884 - RNA, 19 nt, Human
gacaguugggugagaacaa

SEQ ID NO: 2617885 - RNA, 15 nt, Human
gacaguucugaagaa

SEQ ID NO: 2617886 - RNA, 18 nt, Human
gacaguugggugagaaca

SEQ ID NO: 2617887 - RNA, 17 nt, Human
gacaguucauauguacc

SEQ ID NO: 2617888 - RNA, 15 nt, Human
gacaguucauaugua

SEQ ID NO: 2617889 - RNA, 14 nt, Human
gacaguucugaaga

SEQ ID NO: 2617890 - RNA, 14 nt, Human
gacaguucaagaaa

SEQ ID NO: 2617891 - RNA, 21 nt, Human
gacaguuauacugucgguuuu

SEQ ID NO: 2617892 - RNA, 14 nt, Human
gacaggcccaagag

SEQ ID NO: 2617893 - RNA, 22 nt, Human
gacagggcauggccagguggcc

SEQ ID NO: 2617894 - RNA, 15 nt, Human
gacaggcccaagaga

SEQ ID NO: 2617895 - RNA, 20 nt, Human
gacagggcauggccaggugg

SEQ ID NO: 2617896 - RNA, 15 nt, Human
gacagggcauggcca

SEQ ID NO: 2617897 - RNA, 22 nt, Human
gacaggcauguucucugaggac

SEQ ID NO: 2617898 - RNA, 14 nt, Human
gacagggcauggcc

SEQ ID NO: 2617899 - RNA, 16 nt, Human
gacaggcaaauaaaag

SEQ ID NO: 2617900 - RNA, 11 nt, Human
gacaggcccaa

SEQ ID NO: 2617901 - RNA, 23 nt, Human
gacaguuucuuagcuuuuuaauu

SEQ ID NO: 2617902 - RNA, 21 nt, Human
gacaguuucuuagcuuuuuaa

SEQ ID NO: 2617903 - RNA, 20 nt, Human
gacaguuucuuagcuuuuua

SEQ ID NO: 2617904 - RNA, 14 nt, Human
gacaguuucuuagc

SEQ ID NO: 2617905 - RNA, 12 nt, Human
gacaguuucuua

SEQ ID NO: 2617906 - RNA, 20 nt, Human
gacaguuuuccauaaagaag

SEQ ID NO: 2617907 - RNA, 22 nt, Human
gacaguuuuccuucucaucugu

SEQ ID NO: 2617908 - RNA, 23 nt, Human
gacaucaacugcaucaagaugug

SEQ ID NO: 2617909 - RNA, 15 nt, Human
gacaucacuuguaca

SEQ ID NO: 2617910 - RNA, 21 nt, Human
gacauaacguuuuuccuuuaa

SEQ ID NO: 2617911 - RNA, 16 nt, Human
gacauaacguuuuucc

SEQ ID NO: 2617912 - RNA, 19 nt, Human
gacaucaagcacagaagga

SEQ ID NO: 2617913 - RNA, 16 nt, Human
gacaucaacugcauca

SEQ ID NO: 2617914 - RNA, 22 nt, Human
gacauaacguuuuuccuuuaaa

SEQ ID NO: 2617915 - RNA, 14 nt, Human
gacauaacguuuuu

SEQ ID NO: 2617916 - RNA, 18 nt, Human
gacaggcaagcaccuccu

SEQ ID NO: 2617917 - RNA, 17 nt, Human
gacaggcaagcaccucc

SEQ ID NO: 2617918 - RNA, 12 nt, Human
gacagcaggugg

SEQ ID NO: 2617919 - RNA, 16 nt, Human
gacagcaggugggaaa

SEQ ID NO: 2617920 - RNA, 13 nt, Human
gacaggcaagcac

SEQ ID NO: 2617921 - RNA, 17 nt, Human
gacagaugucagccgag

SEQ ID NO: 2617922 - RNA, 18 nt, Human
gacagaugucagccgagc

SEQ ID NO: 2617923 - RNA, 19 nt, Human
gacagcaacggggaggcca

SEQ ID NO: 2617924 - RNA, 22 nt, Human
gacagcaacggggaggccaagu

SEQ ID NO: 2617925 - RNA, 13 nt, Human
gacagcagcucag

SEQ ID NO: 2617926 - RNA, 14 nt, Human
gacagcagcucagg

SEQ ID NO: 2617927 - RNA, 23 nt, Human
gacaggaugguucccuugaugaa

SEQ ID NO: 2617928 - RNA, 15 nt, Human
gacagcagcucaggc

SEQ ID NO: 2617929 - RNA, 16 nt, Human
gacagcagcucaggca

SEQ ID NO: 2617930 - RNA, 18 nt, Human
gacagcagcucaggcaca

SEQ ID NO: 2617931 - RNA, 20 nt, Human
gacagcagcucaggcacacu

SEQ ID NO: 2617932 - RNA, 19 nt, Human
gacaggcaaugcuggcugu

SEQ ID NO: 2617933 - RNA, 18 nt, Human
gacaggcaaugcuggcug

SEQ ID NO: 2617934 - RNA, 21 nt, Human
gacaggcaagcaccuccugcc

SEQ ID NO: 2617935 - RNA, 20 nt, Human
gacaggcaagcaccuccugc

SEQ ID NO: 2617936 - RNA, 21 nt, Human
gacaggcauguucucugagga

SEQ ID NO: 2617937 - RNA, 20 nt, Human
gacaggcauguucucugagg

SEQ ID NO: 2617938 - RNA, 23 nt, Human
gacaggcaaugcuggcuguuggc

SEQ ID NO: 2617939 - RNA, 22 nt, Human
gacagacacaggcccggcucca

SEQ ID NO: 2617940 - RNA, 20 nt, Human
gacagacacaggcccggcuc

SEQ ID NO: 2617941 - RNA, 17 nt, Human
gacagacacaggcccgg

SEQ ID NO: 2617942 - RNA, 16 nt, Human
gacacuagaagauuuu

SEQ ID NO: 2617943 - RNA, 20 nt, Human
gacacuaaguuauaguauau

SEQ ID NO: 2617944 - RNA, 18 nt, Human
gacacuaaguuauaguau

SEQ ID NO: 2617945 - RNA, 20 nt, Human
gacacggaucugagaaucuu

SEQ ID NO: 2617946 - RNA, 15 nt, Human
gacacggagcccagc

SEQ ID NO: 2617947 - RNA, 19 nt, Human
gacacggaucugagaaucu

SEQ ID NO: 2617948 - RNA, 23 nt, Human
gacacgcucuucuauuuuauucc

SEQ ID NO: 2617949 - RNA, 17 nt, Human
gacacuaaguuauagua

SEQ ID NO: 2617950 - RNA, 15 nt, Human
gacacuaacgacuuc

SEQ ID NO: 2617951 - RNA, 22 nt, Human
gaauuucccaggacccugaagg

SEQ ID NO: 2617952 - RNA, 14 nt, Human
gaauuucccaggac

SEQ ID NO: 2617953 - RNA, 15 nt, Human
gaauuucccaggacc

SEQ ID NO: 2617954 - RNA, 16 nt, Human
gaauuucccaggaccc

SEQ ID NO: 2617955 - RNA, 17 nt, Human
gaauuucccaggacccu

SEQ ID NO: 2617956 - RNA, 22 nt, Human
gacacgaauauugcugauggug

SEQ ID NO: 2617957 - RNA, 18 nt, Human
gaauuucccaaagcagug

SEQ ID NO: 2617958 - RNA, 16 nt, Human
gaauuucccaaagcag

SEQ ID NO: 2617959 - RNA, 22 nt, Human
gaauuucccaaagcagugcaug

SEQ ID NO: 2617960 - RNA, 12 nt, Human
gaauuucaccug

SEQ ID NO: 2617961 - RNA, 17 nt, Human
gaauuucaccuguaaac

SEQ ID NO: 2617962 - RNA, 21 nt, Human
gaauuucaccuguaaaccuga

SEQ ID NO: 2617963 - RNA, 16 nt, Human
gacagagugagacucu

SEQ ID NO: 2617964 - RNA, 21 nt, Human
gacagagucucacuguugccc

SEQ ID NO: 2617965 - RNA, 19 nt, Human
gacagagugagacucuguc

SEQ ID NO: 2617966 - RNA, 15 nt, Human
gacagagucugggug

SEQ ID NO: 2617967 - RNA, 20 nt, Human
gacagaugccccagagcugu

SEQ ID NO: 2617968 - RNA, 20 nt, Human
gacagagggaaacacagcag

SEQ ID NO: 2617969 - RNA, 13 nt, Human
gacagagggaaga

SEQ ID NO: 2617970 - RNA, 16 nt, Human
gacagagggaagaaaa

SEQ ID NO: 2617971 - RNA, 13 nt, Human
gacagagucuggg

SEQ ID NO: 2617972 - RNA, 15 nt, Human
gacagaggaugagcu

SEQ ID NO: 2617973 - RNA, 13 nt, Human
gacagaggcccca

SEQ ID NO: 2617974 - RNA, 18 nt, Human
gacagaggccccagccuc

SEQ ID NO: 2617975 - RNA, 19 nt, Human
gacagaggccccagccucc

SEQ ID NO: 2617976 - RNA, 23 nt, Human
gacagaggcagccccauucugcc

SEQ ID NO: 2617977 - RNA, 15 nt, Human
gacagaggccugccc

SEQ ID NO: 2617978 - RNA, 13 nt, Human
gacagaggccugc

SEQ ID NO: 2617979 - RNA, 12 nt, Human
gacagaggccug

SEQ ID NO: 2617980 - RNA, 19 nt, Human
gacagagggaagaaaagag

SEQ ID NO: 2617981 - RNA, 14 nt, Human
gacagagagagaga

SEQ ID NO: 2617982 - RNA, 16 nt, Human
gacagagaccuccugc

SEQ ID NO: 2617983 - RNA, 15 nt, Human
gacagagaccuccug

SEQ ID NO: 2617984 - RNA, 20 nt, Human
gacagagacccucugccacc

SEQ ID NO: 2617985 - RNA, 20 nt, Human
gacagagcuacacaggggaa

SEQ ID NO: 2617986 - RNA, 20 nt, Human
gacagagcugguugggaaga

SEQ ID NO: 2617987 - RNA, 12 nt, Human
gacagaggaggg

SEQ ID NO: 2617988 - RNA, 12 nt, Human
gacagaggcagc

SEQ ID NO: 2617989 - RNA, 13 nt, Human
gacacuauaucug

SEQ ID NO: 2617990 - RNA, 12 nt, Human
gacacuauaucu

SEQ ID NO: 2617991 - RNA, 18 nt, Human
gacacuagcccaaugaaa

SEQ ID NO: 2617992 - RNA, 16 nt, Human
gacagacagcccucca

SEQ ID NO: 2617993 - RNA, 21 nt, Human
gacagacaggcucuuagcagc

SEQ ID NO: 2617994 - RNA, 15 nt, Human
gacagacaggcucuu

SEQ ID NO: 2617995 - RNA, 14 nt, Human
gacagacaggcucu

SEQ ID NO: 2617996 - RNA, 23 nt, Human
gacagacacuucuaaaugaagug

SEQ ID NO: 2617997 - RNA, 15 nt, Human
gacagagacaccugc

SEQ ID NO: 2617998 - RNA, 16 nt, Human
gacagagacaccugca

SEQ ID NO: 2617999 - RNA, 17 nt, Human
gacagagacaccugcac

SEQ ID NO: 2618000 - RNA, 18 nt, Human
gacagagacaccugcacc

SEQ ID NO: 2618001 - RNA, 21 nt, Human
gacagagacaccugcaccucc

SEQ ID NO: 2618002 - RNA, 22 nt, Human
gacagagacaccugcaccuccc

SEQ ID NO: 2618003 - RNA, 23 nt, Human
gacagacuccugaggacagcugu

SEQ ID NO: 2618004 - RNA, 19 nt, Human
gacagacuccugaggacag

SEQ ID NO: 2618005 - RNA, 16 nt, Human
gacagacuccugagga

SEQ ID NO: 2618006 - RNA, 22 nt, Human
gacagaccacaucuuuaucugu

SEQ ID NO: 2618007 - RNA, 18 nt, Human
gacagaccacaucuuuau

SEQ ID NO: 2618008 - RNA, 18 nt, Human
gacagacaucucugcacc

SEQ ID NO: 2618009 - RNA, 23 nt, Human
gacagacucacaaccugaaccua

SEQ ID NO: 2618010 - RNA, 18 nt, Human
gacuggcacaguuuucug

SEQ ID NO: 2618011 - RNA, 22 nt, Human
gacuggcacaguuuucugagaa

SEQ ID NO: 2618012 - RNA, 14 nt, Human
gacuggcacaguuu

SEQ ID NO: 2618013 - RNA, 15 nt, Human
gacugcuagggagug

SEQ ID NO: 2618014 - RNA, 18 nt, Human
gacugcuaaauaaaauuu

SEQ ID NO: 2618015 - RNA, 17 nt, Human
gacugcuaaauaaaauu

SEQ ID NO: 2618016 - RNA, 14 nt, Human
gacugcuaaauaaa

SEQ ID NO: 2618017 - RNA, 20 nt, Human
gacugcuccccagcccuggc

SEQ ID NO: 2618018 - RNA, 19 nt, Human
gacugcuccccagcccugg

SEQ ID NO: 2618019 - RNA, 15 nt, Human
gacugcuccccagcc

SEQ ID NO: 2618020 - RNA, 24 nt, Human
gacugcuccccagcccuggcucug

SEQ ID NO: 2618021 - RNA, 21 nt, Human
gacugcuccccagcccuggcu

SEQ ID NO: 2618022 - RNA, 18 nt, Human
gacugccccaacuccugg

SEQ ID NO: 2618023 - RNA, 20 nt, Human
gacugcgaucuucagagcag

SEQ ID NO: 2618024 - RNA, 21 nt, Human
gacugcgggaugguccugggg

SEQ ID NO: 2618025 - RNA, 12 nt, Human
gacugcuaaaua

SEQ ID NO: 2618026 - RNA, 22 nt, Human
gacugcgggaugguccuggggc

SEQ ID NO: 2618027 - RNA, 20 nt, Human
gacugggaagauaggcucug

SEQ ID NO: 2618028 - RNA, 22 nt, Human
gacugggaagauaggcucugca

SEQ ID NO: 2618029 - RNA, 23 nt, Human
gacugggaagauaggcucugcac

SEQ ID NO: 2618030 - RNA, 16 nt, Human
gacuuaauagaaacau

SEQ ID NO: 2618031 - RNA, 23 nt, Human
gacuggcuuuuauuaaugcacuu

SEQ ID NO: 2618032 - RNA, 22 nt, Human
gacuggcuuuuauuaaugcacu

SEQ ID NO: 2618033 - RNA, 21 nt, Human
gacuggcuuuuauuaaugcac

SEQ ID NO: 2618034 - RNA, 20 nt, Human
gacuggcuuuuauuaaugca

SEQ ID NO: 2618035 - RNA, 10 nt, Human
gacuggcuuu

SEQ ID NO: 2618036 - RNA, 17 nt, Human
gacuggcuggcugcagu

SEQ ID NO: 2618037 - RNA, 14 nt, Human
gacuggcuggcugc

SEQ ID NO: 2618038 - RNA, 16 nt, Human
gacuggcuggcugcag

SEQ ID NO: 2618039 - RNA, 23 nt, Human
gacuggccaagguuuggggaaga

SEQ ID NO: 2618040 - RNA, 14 nt, Human
gacuggccccuggg

SEQ ID NO: 2618041 - RNA, 16 nt, Human
gacuggccccuggguc

SEQ ID NO: 2618042 - RNA, 22 nt, Human
gacuggccccugggucagucug

SEQ ID NO: 2618043 - RNA, 17 nt, Human
gacuggcuagaguccuc

SEQ ID NO: 2618044 - RNA, 20 nt, Human
gacuggcuagaguccucacu

SEQ ID NO: 2618045 - RNA, 21 nt, Human
gacuggcuagaguccucacuc

SEQ ID NO: 2618046 - RNA, 23 nt, Human
gacuggcuagaguccucacuccc

SEQ ID NO: 2618047 - RNA, 15 nt, Human
gacuuacuguacaug

SEQ ID NO: 2618048 - RNA, 16 nt, Human
gacuuacuguacauga

SEQ ID NO: 2618049 - RNA, 14 nt, Human
gacuuacaugauuc

SEQ ID NO: 2618050 - RNA, 15 nt, Human
gacuuacaugauuca

SEQ ID NO: 2618051 - RNA, 16 nt, Human
gacuuacaugauucau

SEQ ID NO: 2618052 - RNA, 18 nt, Human
gacuuacaugauucauuu

SEQ ID NO: 2618053 - RNA, 12 nt, Human
gacuuacuguac

SEQ ID NO: 2618054 - RNA, 18 nt, Human
gacuuacuguacaugaaa

SEQ ID NO: 2618055 - RNA, 23 nt, Human
gacuuacuguacaugaaaacaca

SEQ ID NO: 2618056 - RNA, 14 nt, Human
gacuuagaaagcag

SEQ ID NO: 2618057 - RNA, 14 nt, Human
gacuuaccaggaag

SEQ ID NO: 2618058 - RNA, 19 nt, Human
gacuuacaugauucauuuu

SEQ ID NO: 2618059 - RNA, 19 nt, Human
gacuuagaaagcaggggcu

SEQ ID NO: 2618060 - RNA, 18 nt, Human
gacuuagaaagcaggggc

SEQ ID NO: 2618061 - RNA, 16 nt, Human
gacuuagaaagcaggg

SEQ ID NO: 2618062 - RNA, 20 nt, Human
gacuucaucccucuggggcu

SEQ ID NO: 2618063 - RNA, 12 nt, Human
gacuucaucccu

SEQ ID NO: 2618064 - RNA, 22 nt, Human
gacuucacgaaguguugcaugg

SEQ ID NO: 2618065 - RNA, 14 nt, Human
gacuucagggcagg

SEQ ID NO: 2618066 - RNA, 14 nt, Human
gacuucagcucugu

SEQ ID NO: 2618067 - RNA, 23 nt, Human
gacuucaggggcugcccgcuccc

SEQ ID NO: 2618068 - RNA, 21 nt, Human
gacuucaggggcugcccgcuc

SEQ ID NO: 2618069 - RNA, 20 nt, Human
gacuucaggggcugcccgcu

SEQ ID NO: 2618070 - RNA, 19 nt, Human
gacuucaggggcugcccgc

SEQ ID NO: 2618071 - RNA, 18 nt, Human
gacuucaggggcugcccg

SEQ ID NO: 2618072 - RNA, 17 nt, Human
gacuucaggggcugccc

SEQ ID NO: 2618073 - RNA, 18 nt, Human
gacuucagggcagggcuc

SEQ ID NO: 2618074 - RNA, 22 nt, Human
gacuucagggcagggcucugau

SEQ ID NO: 2618075 - RNA, 17 nt, Human
gacuuagggcaccaggg

SEQ ID NO: 2618076 - RNA, 16 nt, Human
gacuuagggcaccagg

SEQ ID NO: 2618077 - RNA, 15 nt, Human
gacuuagcugggaga

SEQ ID NO: 2618078 - RNA, 17 nt, Human
gacuuaguauauuuucu

SEQ ID NO: 2618079 - RNA, 13 nt, Human
gacuucacacugc

SEQ ID NO: 2618080 - RNA, 14 nt, Human
gacuucacacugca

SEQ ID NO: 2618081 - RNA, 21 nt, Human
gacuucacauaagcucagaau

SEQ ID NO: 2618082 - RNA, 17 nt, Human
gacuucacauaagcuca

SEQ ID NO: 2618083 - RNA, 16 nt, Human
gacuucacacugcaag

SEQ ID NO: 2618084 - RNA, 22 nt, Human
gacuucacacugcaagagccuu

SEQ ID NO: 2618085 - RNA, 15 nt, Human
gacuuauuuucucug

SEQ ID NO: 2618086 - RNA, 16 nt, Human
gacuuauuuauauaaa

SEQ ID NO: 2618087 - RNA, 21 nt, Human
gacuccugcaggcagccaggc

SEQ ID NO: 2618088 - RNA, 20 nt, Human
gacuccugcaggcagccagg

SEQ ID NO: 2618089 - RNA, 19 nt, Human
gacuccugcaggcagccag

SEQ ID NO: 2618090 - RNA, 18 nt, Human
gacuccugcaggcagcca

SEQ ID NO: 2618091 - RNA, 15 nt, Human
gacuacaggcaccca

SEQ ID NO: 2618092 - RNA, 13 nt, Human
gacuacaggcacc

SEQ ID NO: 2618093 - RNA, 18 nt, Human
gacuacaggcacccacca

SEQ ID NO: 2618094 - RNA, 20 nt, Human
gacucgucugacugugugug

SEQ ID NO: 2618095 - RNA, 19 nt, Human
gacucgguuucuccaaacu

SEQ ID NO: 2618096 - RNA, 15 nt, Human
gacucuacagaggcc

SEQ ID NO: 2618097 - RNA, 16 nt, Human
gacugaauuucuuuug

SEQ ID NO: 2618098 - RNA, 16 nt, Human
gacucuacacugugaa

SEQ ID NO: 2618099 - RNA, 21 nt, Human
gacucuacagaggccaugggc

SEQ ID NO: 2618100 - RNA, 22 nt, Human
gacugaccaauauuguacaguu

SEQ ID NO: 2618101 - RNA, 21 nt, Human
gacugaccaauauuguacagu

SEQ ID NO: 2618102 - RNA, 16 nt, Human
gacugacccugaucag

SEQ ID NO: 2618103 - RNA, 11 nt, Human
gacugagaaau

SEQ ID NO: 2618104 - RNA, 21 nt, Human
gacugagggacucugaagccu

SEQ ID NO: 2618105 - RNA, 15 nt, Human
gacugagggacucug

SEQ ID NO: 2618106 - RNA, 23 nt, Human
gacugaggccugagcgcuccugc

SEQ ID NO: 2618107 - RNA, 21 nt, Human
gacugaggccugagcgcuccu

SEQ ID NO: 2618108 - RNA, 16 nt, Human
gacugaggggagggga

SEQ ID NO: 2618109 - RNA, 19 nt, Human
gacugaguaagaaaugcug

SEQ ID NO: 2618110 - RNA, 21 nt, Human
gacugaguaagaaaugcugcc

SEQ ID NO: 2618111 - RNA, 18 nt, Human
gacugaguacguugugca

SEQ ID NO: 2618112 - RNA, 14 nt, Human
gacugaggccugag

SEQ ID NO: 2618113 - RNA, 13 nt, Human
gacugaggccuga

SEQ ID NO: 2618114 - RNA, 22 nt, Human
gacugagccccgcagaccuccc

SEQ ID NO: 2618115 - RNA, 13 nt, Human
gacugagcucaag

SEQ ID NO: 2618116 - RNA, 16 nt, Human
gacugagcaccugcuu

SEQ ID NO: 2618117 - RNA, 15 nt, Human
gacugagcaccugcu

SEQ ID NO: 2618118 - RNA, 14 nt, Human
gacugagcagacug

SEQ ID NO: 2618119 - RNA, 15 nt, Human
gacugagcagacugg

SEQ ID NO: 2618120 - RNA, 17 nt, Human
gacugagccagucccag

SEQ ID NO: 2618121 - RNA, 14 nt, Human
gacugagccagucc

SEQ ID NO: 2618122 - RNA, 12 nt, Human
gacugagccagu

SEQ ID NO: 2618123 - RNA, 19 nt, Human
gacugagcagacuggugag

SEQ ID NO: 2618124 - RNA, 13 nt, Human
gacugagaaauuu

SEQ ID NO: 2618125 - RNA, 14 nt, Human
gacugagcaccugc

SEQ ID NO: 2618126 - RNA, 24 nt, Human
gacugcauuauauuuauuacugua

SEQ ID NO: 2618127 - RNA, 20 nt, Human
gacugccagucccccugccc

SEQ ID NO: 2618128 - RNA, 15 nt, Human
gacugcacagcggcc

SEQ ID NO: 2618129 - RNA, 21 nt, Human
gacugcacagcguccugucca

SEQ ID NO: 2618130 - RNA, 18 nt, Human
gacugcacagcggccccu

SEQ ID NO: 2618131 - RNA, 21 nt, Human
gacugauguugagggaacaga

SEQ ID NO: 2618132 - RNA, 14 nt, Human
gacugaugcuuuca

SEQ ID NO: 2618133 - RNA, 18 nt, Human
gaccugggaccuccccug

SEQ ID NO: 2618134 - RNA, 16 nt, Human
gaccuggcagcucugg

SEQ ID NO: 2618135 - RNA, 18 nt, Human
gaccuggcaaggacacag

SEQ ID NO: 2618136 - RNA, 21 nt, Human
gaccugguacccuccuggcuc

SEQ ID NO: 2618137 - RNA, 19 nt, Human
gaccugguacccuccuggc

SEQ ID NO: 2618138 - RNA, 17 nt, Human
gaccugguacccuccug

SEQ ID NO: 2618139 - RNA, 21 nt, Human
gacccuugacaccugcugaga

SEQ ID NO: 2618140 - RNA, 21 nt, Human
gacccugcgaaggggcccugg

SEQ ID NO: 2618141 - RNA, 10 nt, Human
gaccuggcag

SEQ ID NO: 2618142 - RNA, 15 nt, Human
gaccuggcagcucug

SEQ ID NO: 2618143 - RNA, 18 nt, Human
gaccuggcacuggaugca

SEQ ID NO: 2618144 - RNA, 22 nt, Human
gaccuggcacuggaugcagaaa

SEQ ID NO: 2618145 - RNA, 23 nt, Human
gacccuugccgucuaccugaggg

SEQ ID NO: 2618146 - RNA, 20 nt, Human
gacccuugccgucuaccuga

SEQ ID NO: 2618147 - RNA, 19 nt, Human
gacccuugccgucuaccug

SEQ ID NO: 2618148 - RNA, 20 nt, Human
gacccugcgaaggggcccug

SEQ ID NO: 2618149 - RNA, 18 nt, Human
gaccuguuagcagacagg

SEQ ID NO: 2618150 - RNA, 19 nt, Human
gaccuguuagcagacaggc

SEQ ID NO: 2618151 - RNA, 19 nt, Human
gaccuguugguuccaagcc

SEQ ID NO: 2618152 - RNA, 15 nt, Human
gaccuguugguucca

SEQ ID NO: 2618153 - RNA, 17 nt, Human
gaccuguuagcagacag

SEQ ID NO: 2618154 - RNA, 19 nt, Human
gaccugugucacuacguga

SEQ ID NO: 2618155 - RNA, 19 nt, Human
gaccuguggugcaaaagca

SEQ ID NO: 2618156 - RNA, 14 nt, Human
gaccuguggugcaa

SEQ ID NO: 2618157 - RNA, 22 nt, Human
gaccuguggggauuucucccag

SEQ ID NO: 2618158 - RNA, 23 nt, Human
gaccuguggggauuucucccagc

SEQ ID NO: 2618159 - RNA, 16 nt, Human
gaccugugagcccagc

SEQ ID NO: 2618160 - RNA, 19 nt, Human
gaccugugagcccagcugg

SEQ ID NO: 2618161 - RNA, 15 nt, Human
gaccugugagcccag

SEQ ID NO: 2618162 - RNA, 15 nt, Human
gaccugugaccagca

SEQ ID NO: 2618163 - RNA, 17 nt, Human
gaccugugaccagcacu

SEQ ID NO: 2618164 - RNA, 23 nt, Human
gaccugugagcccagcuggguca

SEQ ID NO: 2618165 - RNA, 20 nt, Human
gaccuguggggauuucuccc

SEQ ID NO: 2618166 - RNA, 21 nt, Human
gaccuguggggauuucuccca

SEQ ID NO: 2618167 - RNA, 19 nt, Human
gaccuguggccaaguucuu

SEQ ID NO: 2618168 - RNA, 20 nt, Human
gaccugucaugccccccuca

SEQ ID NO: 2618169 - RNA, 19 nt, Human
gaccugucaugccccccuc

SEQ ID NO: 2618170 - RNA, 17 nt, Human
gaccugucaugcccccc

SEQ ID NO: 2618171 - RNA, 15 nt, Human
gaccugucaugcccc

SEQ ID NO: 2618172 - RNA, 12 nt, Human
gaccuguaauca

SEQ ID NO: 2618173 - RNA, 16 nt, Human
gaccuguccuccuggu

SEQ ID NO: 2618174 - RNA, 15 nt, Human
gaccuguccuccugg

SEQ ID NO: 2618175 - RNA, 14 nt, Human
gaccuguccuccug

SEQ ID NO: 2618176 - RNA, 21 nt, Human
gaccugucaugccccccucaa

SEQ ID NO: 2618177 - RNA, 12 nt, Human
gaccugugacca

SEQ ID NO: 2618178 - RNA, 19 nt, Human
gaccuguccuccugguggg

SEQ ID NO: 2618179 - RNA, 17 nt, Human
gaccuggugcugccucu

SEQ ID NO: 2618180 - RNA, 22 nt, Human
gaccuggugcugccucuaccug

SEQ ID NO: 2618181 - RNA, 13 nt, Human
gaccugguuuuua

SEQ ID NO: 2618182 - RNA, 17 nt, Human
gaccuguaacuuuugua

SEQ ID NO: 2618183 - RNA, 23 nt, Human
gaccugguacccuccuggcucuu

SEQ ID NO: 2618184 - RNA, 23 nt, Human
gaccuuccucauccaccccaucc

SEQ ID NO: 2618185 - RNA, 22 nt, Human
gaccuuccucauccaccccauc

SEQ ID NO: 2618186 - RNA, 14 nt, Human
gaccuuccucaucc

SEQ ID NO: 2618187 - RNA, 12 nt, Human
gaccuuccucau

SEQ ID NO: 2618188 - RNA, 18 nt, Human
gaccuuccaagagccuga

SEQ ID NO: 2618189 - RNA, 22 nt, Human
gaccuuccauaaugcuacuguc

SEQ ID NO: 2618190 - RNA, 23 nt, Human
gaccuuccucgcagagaggccag

SEQ ID NO: 2618191 - RNA, 21 nt, Human
gaccuuccucgcagagaggcc

SEQ ID NO: 2618192 - RNA, 20 nt, Human
gaccuuccucgcagagaggc

SEQ ID NO: 2618193 - RNA, 19 nt, Human
gaccuuccucgcagagagg

SEQ ID NO: 2618194 - RNA, 18 nt, Human
gaccuuccucgcagagag

SEQ ID NO: 2618195 - RNA, 17 nt, Human
gaccuuccucgcagaga

SEQ ID NO: 2618196 - RNA, 16 nt, Human
gaccuuccucgcagag

SEQ ID NO: 2618197 - RNA, 16 nt, Human
gaccuuccugccacca

SEQ ID NO: 2618198 - RNA, 14 nt, Human
gaccuuccugccac

SEQ ID NO: 2618199 - RNA, 12 nt, Human
gaccuuccugcc

SEQ ID NO: 2618200 - RNA, 22 nt, Human
gaccuuccucgcagagaggcca

SEQ ID NO: 2618201 - RNA, 16 nt, Human
gaccuucgggcugugc

SEQ ID NO: 2618202 - RNA, 13 nt, Human
gaccuuaggccuu

SEQ ID NO: 2618203 - RNA, 15 nt, Human
gaccuuaggccuucc

SEQ ID NO: 2618204 - RNA, 16 nt, Human
gaccuuaggccuuccu

SEQ ID NO: 2618205 - RNA, 18 nt, Human
gaccuuaggccuuccucu

SEQ ID NO: 2618206 - RNA, 23 nt, Human
gaccuuaguguuucugugcaugg

SEQ ID NO: 2618207 - RNA, 22 nt, Human
gaccuuaguguuucugugcaug

SEQ ID NO: 2618208 - RNA, 21 nt, Human
gaccuuaguguuucugugcau

SEQ ID NO: 2618209 - RNA, 20 nt, Human
gaccuuaguguuucugugca

SEQ ID NO: 2618210 - RNA, 16 nt, Human
gaccuuaguguuucug

SEQ ID NO: 2618211 - RNA, 21 nt, Human
gaccuuaggccuuccucucuc

SEQ ID NO: 2618212 - RNA, 16 nt, Human
gaccuuccaagagccu

SEQ ID NO: 2618213 - RNA, 17 nt, Human
gaccuuccaagagccug

SEQ ID NO: 2618214 - RNA, 19 nt, Human
gaccuucaccaaacauacu

SEQ ID NO: 2618215 - RNA, 16 nt, Human
gaccuucaccaaacau

SEQ ID NO: 2618216 - RNA, 12 nt, Human
gaccuuaucugu

SEQ ID NO: 2618217 - RNA, 14 nt, Human
gaccuuaucugugc

SEQ ID NO: 2618218 - RNA, 21 nt, Human
gaccuuaucugugcgugaaac

SEQ ID NO: 2618219 - RNA, 22 nt, Human
gaccuuaucugugcgugaaaca

SEQ ID NO: 2618220 - RNA, 16 nt, Human
gaccuucuccuucacc

SEQ ID NO: 2618221 - RNA, 15 nt, Human
gaccuucuccuucac

SEQ ID NO: 2618222 - RNA, 18 nt, Human
gaccuucgggcugugccc

SEQ ID NO: 2618223 - RNA, 19 nt, Human
gaccuucgggcugugcccg

SEQ ID NO: 2618224 - RNA, 14 nt, Human
gaccuucuccuuca

SEQ ID NO: 2618225 - RNA, 21 nt, Human
gaccuucuccuucaccuuugu

SEQ ID NO: 2618226 - RNA, 20 nt, Human
gaccuucuccuucaccuuug

SEQ ID NO: 2618227 - RNA, 14 nt, Human
gaccuugaacuggg

SEQ ID NO: 2618228 - RNA, 23 nt, Human
gaccuucuaggacgccacccagc

SEQ ID NO: 2618229 - RNA, 18 nt, Human
gaccuucuccaaaugaga

SEQ ID NO: 2618230 - RNA, 12 nt, Human
gaccuucuggga

SEQ ID NO: 2618231 - RNA, 17 nt, Human
gaccuugaacuccuggg

SEQ ID NO: 2618232 - RNA, 23 nt, Human
gaccuuccugccaccagucacug

SEQ ID NO: 2618233 - RNA, 19 nt, Human
gaccuuccugccaccaguc

SEQ ID NO: 2618234 - RNA, 15 nt, Human
gaccuucuaggaagc

SEQ ID NO: 2618235 - RNA, 20 nt, Human
gaccuuucaauaggaaaaac

SEQ ID NO: 2618236 - RNA, 19 nt, Human
gaccuuucaauaggaaaaa

SEQ ID NO: 2618237 - RNA, 11 nt, Human
gaccuuucaau

SEQ ID NO: 2618238 - RNA, 22 nt, Human
gaccuuuaagagaaaugagcug

SEQ ID NO: 2618239 - RNA, 22 nt, Human
gacgcugugcugcccugcccac

SEQ ID NO: 2618240 - RNA, 21 nt, Human
gacgcugugcugcccugccca

SEQ ID NO: 2618241 - RNA, 13 nt, Human
gacgcuucugaau

SEQ ID NO: 2618242 - RNA, 22 nt, Human
gaccuuuagugguggccauuua

SEQ ID NO: 2618243 - RNA, 13 nt, Human
gacggagucccac

SEQ ID NO: 2618244 - RNA, 23 nt, Human
gacggagucccaccuuggcugca

SEQ ID NO: 2618245 - RNA, 14 nt, Human
gacguccugccacc

SEQ ID NO: 2618246 - RNA, 18 nt, Human
gacguccugccaccuggg

SEQ ID NO: 2618247 - RNA, 15 nt, Human
gacgucccugcccau

SEQ ID NO: 2618248 - RNA, 18 nt, Human
gacgucccuuuuuucucu

SEQ ID NO: 2618249 - RNA, 13 nt, Human
gacguccugccac

SEQ ID NO: 2618250 - RNA, 22 nt, Human
gacgugaccggacuuuucugca

SEQ ID NO: 2618251 - RNA, 22 nt, Human
gacgugauucaauucaacacuc

SEQ ID NO: 2618252 - RNA, 21 nt, Human
gacguccugccaccuggggca

SEQ ID NO: 2618253 - RNA, 16 nt, Human
gacgugauuuugcugu

SEQ ID NO: 2618254 - RNA, 12 nt, Human
gacguggcucag

SEQ ID NO: 2618255 - RNA, 14 nt, Human
gacguggcucagcc

SEQ ID NO: 2618256 - RNA, 23 nt, Human
gacgugccuuuugcaccccuccc

SEQ ID NO: 2618257 - RNA, 22 nt, Human
gacgugccuuuugcaccccucc

SEQ ID NO: 2618258 - RNA, 23 nt, Human
gacgugcacugagagugaaguga

SEQ ID NO: 2618259 - RNA, 18 nt, Human
gacgugcaccuguacuca

SEQ ID NO: 2618260 - RNA, 17 nt, Human
gacgugauuuugcugua

SEQ ID NO: 2618261 - RNA, 19 nt, Human
gacggagucucgcucuguc

SEQ ID NO: 2618262 - RNA, 19 nt, Human
gacggcacccacccagcac

SEQ ID NO: 2618263 - RNA, 21 nt, Human
gacggaagccuuuuuccccaa

SEQ ID NO: 2618264 - RNA, 14 nt, Human
gacggagccgggaa

SEQ ID NO: 2618265 - RNA, 20 nt, Human
gacggcaggcucacugccag

SEQ ID NO: 2618266 - RNA, 16 nt, Human
gacggcaggcucacug

SEQ ID NO: 2618267 - RNA, 11 nt, Human
gacggcaggcu

SEQ ID NO: 2618268 - RNA, 15 nt, Human
gacggccugaugcuc

SEQ ID NO: 2618269 - RNA, 20 nt, Human
gacggccugaugcucccucc

SEQ ID NO: 2618270 - RNA, 22 nt, Human
gacggccugaugcucccucccc

SEQ ID NO: 2618271 - RNA, 23 nt, Human
gacggccugaugcucccuccccu

SEQ ID NO: 2618272 - RNA, 19 nt, Human
gacggcaggcucacugcca

SEQ ID NO: 2618273 - RNA, 18 nt, Human
gacggcugggcacacgcc

SEQ ID NO: 2618274 - RNA, 22 nt, Human
gacgucccuccacguucacccc

SEQ ID NO: 2618275 - RNA, 13 nt, Human
gacggcugggcac

SEQ ID NO: 2618276 - RNA, 12 nt, Human
gacggcugggca

SEQ ID NO: 2618277 - RNA, 23 nt, Human
gacuaacuugucuuuggacccug

SEQ ID NO: 2618278 - RNA, 16 nt, Human
gacuaacuugucuuug

SEQ ID NO: 2618279 - RNA, 21 nt, Human
gacuaagccuaccugcucucc

SEQ ID NO: 2618280 - RNA, 18 nt, Human
gacuaagccuaccugcuc

SEQ ID NO: 2618281 - RNA, 15 nt, Human
gacuaagccuaccug

SEQ ID NO: 2618282 - RNA, 23 nt, Human
gacuaagcccugucgagacacuu

SEQ ID NO: 2618283 - RNA, 17 nt, Human
gacuaauauauuaauau

SEQ ID NO: 2618284 - RNA, 22 nt, Human
gacuaagcccugucgagacacu

SEQ ID NO: 2618285 - RNA, 14 nt, Human
gacuaagcccuguc

SEQ ID NO: 2618286 - RNA, 10 nt, Human
gacuaaagag

SEQ ID NO: 2618287 - RNA, 13 nt, Human
gacuaaagagaga

SEQ ID NO: 2618288 - RNA, 14 nt, Human
gacuaaagagagaa

SEQ ID NO: 2618289 - RNA, 17 nt, Human
gacuaaagagagaaugu

SEQ ID NO: 2618290 - RNA, 18 nt, Human
gacuaaagagagaaugua

SEQ ID NO: 2618291 - RNA, 18 nt, Human
gacuaaccccaccacacc

SEQ ID NO: 2618292 - RNA, 23 nt, Human
gacuaaaagauauaagugcugua

SEQ ID NO: 2618293 - RNA, 22 nt, Human
gacuaaaagauauaagugcugu

SEQ ID NO: 2618294 - RNA, 21 nt, Human
gacuaaaagauauaagugcug

SEQ ID NO: 2618295 - RNA, 20 nt, Human
gacuaaaagauauaagugcu

SEQ ID NO: 2618296 - RNA, 19 nt, Human
gacuaaaagauauaagugc

SEQ ID NO: 2618297 - RNA, 18 nt, Human
gacuaaaagauauaagug

SEQ ID NO: 2618298 - RNA, 17 nt, Human
gacuaaaagauauaagu

SEQ ID NO: 2618299 - RNA, 13 nt, Human
gacuaaaagauau

SEQ ID NO: 2618300 - RNA, 12 nt, Human
gacuaaaagaua

SEQ ID NO: 2618301 - RNA, 13 nt, Human
gacguuuccauca

SEQ ID NO: 2618302 - RNA, 18 nt, Human
gacuaaaaauauuauaac

SEQ ID NO: 2618303 - RNA, 15 nt, Human
gacguuccagccggc

SEQ ID NO: 2618304 - RNA, 13 nt, Human
gacguuccagccg

SEQ ID NO: 2618305 - RNA, 21 nt, Human
gacguucggggcaugcugggg

SEQ ID NO: 2618306 - RNA, 22 nt, Human
gacguuccagccggcauggcug

SEQ ID NO: 2618307 - RNA, 18 nt, Human
gacguuuacaagcccccc

SEQ ID NO: 2618308 - RNA, 15 nt, Human
gacguguuaugacuc

SEQ ID NO: 2618309 - RNA, 14 nt, Human
gacguguuaugacu

SEQ ID NO: 2618310 - RNA, 11 nt, Human
gacguguuaug

SEQ ID NO: 2618311 - RNA, 15 nt, Human
gacguggcucagcca

SEQ ID NO: 2618312 - RNA, 16 nt, Human
gacguggcucagccag

SEQ ID NO: 2618313 - RNA, 21 nt, Human
gaacucaccuggggcugcugg

SEQ ID NO: 2618314 - RNA, 16 nt, Human
gaacucaccuggggcu

SEQ ID NO: 2618315 - RNA, 16 nt, Human
gaacucaacuuugaca

SEQ ID NO: 2618316 - RNA, 13 nt, Human
gaacucagaucca

SEQ ID NO: 2618317 - RNA, 14 nt, Human
gaacucagauccag

SEQ ID NO: 2618318 - RNA, 14 nt, Human
gaacucacuggggc

SEQ ID NO: 2618319 - RNA, 16 nt, Human
gaacucacuggggccu

SEQ ID NO: 2618320 - RNA, 15 nt, Human
gaacucagauccagg

SEQ ID NO: 2618321 - RNA, 16 nt, Human
gaacucagauccaggg

SEQ ID NO: 2618322 - RNA, 18 nt, Human
gaacucagauccagggac

SEQ ID NO: 2618323 - RNA, 19 nt, Human
gaacucagauccagggaca

SEQ ID NO: 2618324 - RNA, 17 nt, Human
gaacucagccaagcaca

SEQ ID NO: 2618325 - RNA, 16 nt, Human
gaacucagccaagcac

SEQ ID NO: 2618326 - RNA, 15 nt, Human
gaacucagccaagca

SEQ ID NO: 2618327 - RNA, 14 nt, Human
gaacucagccaagc

SEQ ID NO: 2618328 - RNA, 18 nt, Human
gaacucagaucugucuga

SEQ ID NO: 2618329 - RNA, 22 nt, Human
gaacucaccuggggcugcuggc

SEQ ID NO: 2618330 - RNA, 21 nt, Human
gaacucagauccagggacaga

SEQ ID NO: 2618331 - RNA, 14 nt, Human
gaacuacugaggau

SEQ ID NO: 2618332 - RNA, 19 nt, Human
gaacuagaauuugauuauu

SEQ ID NO: 2618333 - RNA, 20 nt, Human
gaacuaccuugguuccccca

SEQ ID NO: 2618334 - RNA, 22 nt, Human
gaacuacgcuugcucauuuuuu

SEQ ID NO: 2618335 - RNA, 17 nt, Human
gaacuaacacuauuuua

SEQ ID NO: 2618336 - RNA, 17 nt, Human
gaacuaaacuuucacac

SEQ ID NO: 2618337 - RNA, 19 nt, Human
gaacuaccuugguuccccc

SEQ ID NO: 2618338 - RNA, 23 nt, Human
gaacuacaaacaaaauuucuauu

SEQ ID NO: 2618339 - RNA, 22 nt, Human
gaacuacaaacaaaauuucuau

SEQ ID NO: 2618340 - RNA, 15 nt, Human
gaacuaauaaaagca

SEQ ID NO: 2618341 - RNA, 14 nt, Human
gaacuaaacuuuca

SEQ ID NO: 2618342 - RNA, 16 nt, Human
gaacuaaacuuucaca

SEQ ID NO: 2618343 - RNA, 18 nt, Human
gaacuaaacuuucacacc

SEQ ID NO: 2618344 - RNA, 12 nt, Human
gaacuaaacuuu

SEQ ID NO: 2618345 - RNA, 17 nt, Human
gaacuaaacucauuuau

SEQ ID NO: 2618346 - RNA, 15 nt, Human
gaacguuuuuccugu

SEQ ID NO: 2618347 - RNA, 18 nt, Human
gaacgcccccccccaccc

SEQ ID NO: 2618348 - RNA, 19 nt, Human
gaacgcccccccccacccc

SEQ ID NO: 2618349 - RNA, 20 nt, Human
gaacgcguguguacacggga

SEQ ID NO: 2618350 - RNA, 20 nt, Human
gaacgcccccccccaccccu

SEQ ID NO: 2618351 - RNA, 12 nt, Human
gaacguuuuucc

SEQ ID NO: 2618352 - RNA, 22 nt, Human
gaaccuuuugagugccuuacac

SEQ ID NO: 2618353 - RNA, 21 nt, Human
gaacgacaauagcuuuacccu

SEQ ID NO: 2618354 - RNA, 21 nt, Human
gaacgcagcccuagagccugc

SEQ ID NO: 2618355 - RNA, 20 nt, Human
gaacgcagcccuagagccug

SEQ ID NO: 2618356 - RNA, 17 nt, Human
gaacgcagcccuagagc

SEQ ID NO: 2618357 - RNA, 16 nt, Human
gaacgcagcccuagag

SEQ ID NO: 2618358 - RNA, 23 nt, Human
gaacgcagcccuagagccugccu

SEQ ID NO: 2618359 - RNA, 22 nt, Human
gaacgcagcccuagagccugcc

SEQ ID NO: 2618360 - RNA, 18 nt, Human
gaacgauuuagaaagaag

SEQ ID NO: 2618361 - RNA, 12 nt, Human
gaacgcagcccu

SEQ ID NO: 2618362 - RNA, 14 nt, Human
gaacgagaggggaa

SEQ ID NO: 2618363 - RNA, 21 nt, Human
gaaccuuuugagugccuuaca

SEQ ID NO: 2618364 - RNA, 19 nt, Human
gaaccuuuugagugccuua

SEQ ID NO: 2618365 - RNA, 18 nt, Human
gaaccuuuugagugccuu

SEQ ID NO: 2618366 - RNA, 13 nt, Human
gaaccucuucccc

SEQ ID NO: 2618367 - RNA, 14 nt, Human
gaaccucuucccca

SEQ ID NO: 2618368 - RNA, 14 nt, Human
gaaccucagccugg

SEQ ID NO: 2618369 - RNA, 15 nt, Human
gaaccucagccuggc

SEQ ID NO: 2618370 - RNA, 17 nt, Human
gaaccucagccuggcca

SEQ ID NO: 2618371 - RNA, 18 nt, Human
gaaccucagccuggccag

SEQ ID NO: 2618372 - RNA, 19 nt, Human
gaaccucagccuggccaga

SEQ ID NO: 2618373 - RNA, 21 nt, Human
gaaccucagccuggccagaca

SEQ ID NO: 2618374 - RNA, 11 nt, Human
gaaccucaggc

SEQ ID NO: 2618375 - RNA, 14 nt, Human
gaaccucaggcuuc

SEQ ID NO: 2618376 - RNA, 13 nt, Human
gaaccuccucugu

SEQ ID NO: 2618377 - RNA, 14 nt, Human
gaaccuccucugug

SEQ ID NO: 2618378 - RNA, 15 nt, Human
gaaccuccucuguga

SEQ ID NO: 2618379 - RNA, 13 nt, Human
gaaccuccuuucu

SEQ ID NO: 2618380 - RNA, 16 nt, Human
gaaccuccucugugaa

SEQ ID NO: 2618381 - RNA, 15 nt, Human
gaaccucauccagcu

SEQ ID NO: 2618382 - RNA, 18 nt, Human
gaaccucaggcuuccuug

SEQ ID NO: 2618383 - RNA, 21 nt, Human
gaacauugcauauaacuuaua

SEQ ID NO: 2618384 - RNA, 20 nt, Human
gaacauccaaggagaaacag

SEQ ID NO: 2618385 - RNA, 23 nt, Human
gaacauccaaggagaaacagaga

SEQ ID NO: 2618386 - RNA, 23 nt, Human
gaacauugcauauaacuuauauu

SEQ ID NO: 2618387 - RNA, 14 nt, Human
gaacaucccuccug

SEQ ID NO: 2618388 - RNA, 21 nt, Human
gaaccucacucuugccaaccu

SEQ ID NO: 2618389 - RNA, 20 nt, Human
gaaccucacucuugccaacc

SEQ ID NO: 2618390 - RNA, 19 nt, Human
gaaccucacucuugccaac

SEQ ID NO: 2618391 - RNA, 18 nt, Human
gaaccucacucuugccaa

SEQ ID NO: 2618392 - RNA, 12 nt, Human
gaaccucagccu

SEQ ID NO: 2618393 - RNA, 13 nt, Human
gaaccucagccug

SEQ ID NO: 2618394 - RNA, 17 nt, Human
gaaccucacgcaccucc

SEQ ID NO: 2618395 - RNA, 18 nt, Human
gaaccucacgcaccuccc

SEQ ID NO: 2618396 - RNA, 19 nt, Human
gaaccucacgcaccuccca

SEQ ID NO: 2618397 - RNA, 20 nt, Human
gaaccucacgcaccucccau

SEQ ID NO: 2618398 - RNA, 17 nt, Human
gaaccucacucuugcca

SEQ ID NO: 2618399 - RNA, 16 nt, Human
gaaccucacucuugcc

SEQ ID NO: 2618400 - RNA, 11 nt, Human
gaaccucacuc

SEQ ID NO: 2618401 - RNA, 21 nt, Human
gaaccucacgcaccucccauc

SEQ ID NO: 2618402 - RNA, 21 nt, Human
gaaccaaagagacuggagcau

SEQ ID NO: 2618403 - RNA, 20 nt, Human
gaaccaaagagacuggagca

SEQ ID NO: 2618404 - RNA, 17 nt, Human
gaaccaaagagacugga

SEQ ID NO: 2618405 - RNA, 16 nt, Human
gaaccucacgcaccuc

SEQ ID NO: 2618406 - RNA, 17 nt, Human
gaaccuagaagggcuag

SEQ ID NO: 2618407 - RNA, 14 nt, Human
gaacacucugagac

SEQ ID NO: 2618408 - RNA, 13 nt, Human
gaacacucugaga

SEQ ID NO: 2618409 - RNA, 21 nt, Human
gaaauuuauuaguuaauauau

SEQ ID NO: 2618410 - RNA, 19 nt, Human
gaaauuuauuaguuaauau

SEQ ID NO: 2618411 - RNA, 22 nt, Human
gaaauuuauuuccuaguucugu

SEQ ID NO: 2618412 - RNA, 23 nt, Human
gaaauuuauuuccuaguucugua

SEQ ID NO: 2618413 - RNA, 11 nt, Human
gaaauuucaga

SEQ ID NO: 2618414 - RNA, 17 nt, Human
gaaauuuauaaacuuuu

SEQ ID NO: 2618415 - RNA, 16 nt, Human
gaaauuuauaaacuuu

SEQ ID NO: 2618416 - RNA, 17 nt, Human
gaaaauauacuguaaag

SEQ ID NO: 2618417 - RNA, 18 nt, Human
gaaauuguacauauuugu

SEQ ID NO: 2618418 - RNA, 17 nt, Human
gaaaauaauuguuccaa

SEQ ID NO: 2618419 - RNA, 18 nt, Human
gaaauuguauuacaaauc

SEQ ID NO: 2618420 - RNA, 16 nt, Human
gaaauuguauuacaaa

SEQ ID NO: 2618421 - RNA, 13 nt, Human
gaaaauauacugu

SEQ ID NO: 2618422 - RNA, 14 nt, Human
gaaaauauacugua

SEQ ID NO: 2618423 - RNA, 15 nt, Human
gaaaauauacuguaa

SEQ ID NO: 2618424 - RNA, 16 nt, Human
gaaaauauacuguaaa

SEQ ID NO: 2618425 - RNA, 12 nt, Human
gaaaauauacug

SEQ ID NO: 2618426 - RNA, 16 nt, Human
gaaaauauaaccagcc

SEQ ID NO: 2618427 - RNA, 20 nt, Human
gaaaauaguaaaugcuuugu

SEQ ID NO: 2618428 - RNA, 19 nt, Human
gaaaauagcucuuucaggg

SEQ ID NO: 2618429 - RNA, 23 nt, Human
gaaaauaaaucaaugcuauaacu

SEQ ID NO: 2618430 - RNA, 19 nt, Human
gaaaauacaacuuaaauaa

SEQ ID NO: 2618431 - RNA, 17 nt, Human
gaaaauaaaaaguuaaa

SEQ ID NO: 2618432 - RNA, 21 nt, Human
gaaauuucagauucccagagc

SEQ ID NO: 2618433 - RNA, 23 nt, Human
gaaauuucagauucccagagcaa

SEQ ID NO: 2618434 - RNA, 16 nt, Human
gaacacucuuuugcuu

SEQ ID NO: 2618435 - RNA, 18 nt, Human
gaacacucuuuugcuuua

SEQ ID NO: 2618436 - RNA, 15 nt, Human
gaacacucugagacu

SEQ ID NO: 2618437 - RNA, 21 nt, Human
gaacagauguuucuuuuguau

SEQ ID NO: 2618438 - RNA, 23 nt, Human
gaacacugcacucuuaagcuucc

SEQ ID NO: 2618439 - RNA, 16 nt, Human
gaacagugauuaccag

SEQ ID NO: 2618440 - RNA, 20 nt, Human
gaacagugauuaccagggac

SEQ ID NO: 2618441 - RNA, 21 nt, Human
gaacagauucacacugucugg

SEQ ID NO: 2618442 - RNA, 17 nt, Human
gaacagauucacacugu

SEQ ID NO: 2618443 - RNA, 22 nt, Human
gaacagccaaaugcauggugca

SEQ ID NO: 2618444 - RNA, 21 nt, Human
gaacagcggcuggacuuggag

SEQ ID NO: 2618445 - RNA, 18 nt, Human
gaacagccgcuccugucu

SEQ ID NO: 2618446 - RNA, 21 nt, Human
gaacagcuaugggagccccag

SEQ ID NO: 2618447 - RNA, 22 nt, Human
gaacagcuaugggagccccagg

SEQ ID NO: 2618448 - RNA, 23 nt, Human
gaacagcuaugggagccccaggg

SEQ ID NO: 2618449 - RNA, 22 nt, Human
gaacaucaucaaggcacugccu

SEQ ID NO: 2618450 - RNA, 21 nt, Human
gaacaucaucaaggcacugcc

SEQ ID NO: 2618451 - RNA, 17 nt, Human
gaacauccaaccuuccc

SEQ ID NO: 2618452 - RNA, 18 nt, Human
gaacauccaaccuuccca

SEQ ID NO: 2618453 - RNA, 15 nt, Human
gaacaucauuagaac

SEQ ID NO: 2618454 - RNA, 12 nt, Human
gaacauccaagg

SEQ ID NO: 2618455 - RNA, 23 nt, Human
gaacaucaccgacgcgucuccug

SEQ ID NO: 2618456 - RNA, 20 nt, Human
gaacaucaucaaggcacugc

SEQ ID NO: 2618457 - RNA, 13 nt, Human
gaacauacuucag

SEQ ID NO: 2618458 - RNA, 12 nt, Human
gaacauauuguu

SEQ ID NO: 2618459 - RNA, 18 nt, Human
gaacauauuguugaaagg

SEQ ID NO: 2618460 - RNA, 18 nt, Human
gaacauacuggcugguga

SEQ ID NO: 2618461 - RNA, 18 nt, Human
gaacagugaggugcccag

SEQ ID NO: 2618462 - RNA, 23 nt, Human
gaacagccaaaugcauggugcag

SEQ ID NO: 2618463 - RNA, 18 nt, Human
gaacagugcuugccacag

SEQ ID NO: 2618464 - RNA, 15 nt, Human
gaacauaaaauacaa

SEQ ID NO: 2618465 - RNA, 18 nt, Human
gaagauguagaggagaaa

SEQ ID NO: 2618466 - RNA, 15 nt, Human
gaagauaggcucugc

SEQ ID NO: 2618467 - RNA, 16 nt, Human
gaagauaggcucugca

SEQ ID NO: 2618468 - RNA, 17 nt, Human
gaagauaggcucugcac

SEQ ID NO: 2618469 - RNA, 13 nt, Human
gaagauaggcucu

SEQ ID NO: 2618470 - RNA, 18 nt, Human
gaagaggggcagcccuug

SEQ ID NO: 2618471 - RNA, 21 nt, Human
gaagauaaguguauuuuucaa

SEQ ID NO: 2618472 - RNA, 20 nt, Human
gaagauaauauuaaggaaga

SEQ ID NO: 2618473 - RNA, 17 nt, Human
gaagaggggcagcccuu

SEQ ID NO: 2618474 - RNA, 15 nt, Human
gaagaggggcagccc

SEQ ID NO: 2618475 - RNA, 14 nt, Human
gaagaggggcagcc

SEQ ID NO: 2618476 - RNA, 13 nt, Human
gaagaggggcagc

SEQ ID NO: 2618477 - RNA, 11 nt, Human
gaagaggggca

SEQ ID NO: 2618478 - RNA, 19 nt, Human
gaagaggggacaggucccu

SEQ ID NO: 2618479 - RNA, 14 nt, Human
gaagaggggacagg

SEQ ID NO: 2618480 - RNA, 20 nt, Human
gaagagggccugugggagcc

SEQ ID NO: 2618481 - RNA, 12 nt, Human
gaagagggcugc

SEQ ID NO: 2618482 - RNA, 13 nt, Human
gaagagggccugu

SEQ ID NO: 2618483 - RNA, 19 nt, Human
gaagagggauaagguaccu

SEQ ID NO: 2618484 - RNA, 11 nt, Human
gaagaggcuuc

SEQ ID NO: 2618485 - RNA, 20 nt, Human
gaagagggagaagcaugaaa

SEQ ID NO: 2618486 - RNA, 20 nt, Human
gaagccaagggaaaggggug

SEQ ID NO: 2618487 - RNA, 19 nt, Human
gaagccaagggaaaggggu

SEQ ID NO: 2618488 - RNA, 17 nt, Human
gaagccaagggaaaggg

SEQ ID NO: 2618489 - RNA, 16 nt, Human
gaagccaagggaaagg

SEQ ID NO: 2618490 - RNA, 15 nt, Human
gaagccaagggaaag

SEQ ID NO: 2618491 - RNA, 14 nt, Human
gaagccaagggaaa

SEQ ID NO: 2618492 - RNA, 18 nt, Human
gaagccaacuuggcuuuc

SEQ ID NO: 2618493 - RNA, 21 nt, Human
gaagccaaguggggugcuggg

SEQ ID NO: 2618494 - RNA, 19 nt, Human
gaagccaaguggggugcug

SEQ ID NO: 2618495 - RNA, 13 nt, Human
gaagccaaguggg

SEQ ID NO: 2618496 - RNA, 21 nt, Human
gaagccaagggaaaggggugc

SEQ ID NO: 2618497 - RNA, 23 nt, Human
gaagccaaguggggugcugggag

SEQ ID NO: 2618498 - RNA, 22 nt, Human
gaagccaaguggggugcuggga

SEQ ID NO: 2618499 - RNA, 18 nt, Human
gaagccaauucagacagg

SEQ ID NO: 2618500 - RNA, 16 nt, Human
gaagccacaggccuga

SEQ ID NO: 2618501 - RNA, 15 nt, Human
gaagccacaggccug

SEQ ID NO: 2618502 - RNA, 20 nt, Human
gaagccaauucagacaggca

SEQ ID NO: 2618503 - RNA, 20 nt, Human
gaagcauuaacuucucugga

SEQ ID NO: 2618504 - RNA, 18 nt, Human
gaagcauuaacuucucug

SEQ ID NO: 2618505 - RNA, 17 nt, Human
gaagcauuaacuucucu

SEQ ID NO: 2618506 - RNA, 15 nt, Human
gaagauguuucaaaa

SEQ ID NO: 2618507 - RNA, 22 nt, Human
gaagauguuuaacuuaaucaau

SEQ ID NO: 2618508 - RNA, 21 nt, Human
gaagauguuuaacuuaaucaa

SEQ ID NO: 2618509 - RNA, 13 nt, Human
gaagauguuuaac

SEQ ID NO: 2618510 - RNA, 17 nt, Human
gaagcauucagagagca

SEQ ID NO: 2618511 - RNA, 16 nt, Human
gaagcauucagagagc

SEQ ID NO: 2618512 - RNA, 15 nt, Human
gaagcauucagagag

SEQ ID NO: 2618513 - RNA, 21 nt, Human
gaagcauuaacuucucuggaa

SEQ ID NO: 2618514 - RNA, 18 nt, Human
gaagcauuccuucuuuga

SEQ ID NO: 2618515 - RNA, 15 nt, Human
gaagcauuccuucuu

SEQ ID NO: 2618516 - RNA, 22 nt, Human
gaagcauuccuucuuugauaau

SEQ ID NO: 2618517 - RNA, 17 nt, Human
gaagcauuuacuuugug

SEQ ID NO: 2618518 - RNA, 19 nt, Human
gaagcccaggaaaggcucc

SEQ ID NO: 2618519 - RNA, 16 nt, Human
gaagcccaggaaaggc

SEQ ID NO: 2618520 - RNA, 15 nt, Human
gaagcccaggaaagg

SEQ ID NO: 2618521 - RNA, 13 nt, Human
gaagcccaggaaa

SEQ ID NO: 2618522 - RNA, 22 nt, Human
gaagccagcaggcucucaggcc

SEQ ID NO: 2618523 - RNA, 21 nt, Human
gaagccagcaggcucucaggc

SEQ ID NO: 2618524 - RNA, 18 nt, Human
gaagccacaggccugaga

SEQ ID NO: 2618525 - RNA, 17 nt, Human
gaagccacaggccugag

SEQ ID NO: 2618526 - RNA, 19 nt, Human
gaagccagcaggcucucag

SEQ ID NO: 2618527 - RNA, 20 nt, Human
gaagccagcaggcucucagg

SEQ ID NO: 2618528 - RNA, 23 nt, Human
gaagcccuucuaccuuccugcaa

SEQ ID NO: 2618529 - RNA, 11 nt, Human
gaagcccugga

SEQ ID NO: 2618530 - RNA, 18 nt, Human
gaagcccuggauuucaga

SEQ ID NO: 2618531 - RNA, 19 nt, Human
gaagcccuggauuucagaa

SEQ ID NO: 2618532 - RNA, 22 nt, Human
gaagcccuggauuucagaaaga

SEQ ID NO: 2618533 - RNA, 17 nt, Human
gaagcccuccaaaagca

SEQ ID NO: 2618534 - RNA, 11 nt, Human
gaagcccuccu

SEQ ID NO: 2618535 - RNA, 12 nt, Human
gaagcccuccuu

SEQ ID NO: 2618536 - RNA, 14 nt, Human
gaagcccuccuucc

SEQ ID NO: 2618537 - RNA, 15 nt, Human
gaagcccuccuucca

SEQ ID NO: 2618538 - RNA, 16 nt, Human
gaagcccuccuuccac

SEQ ID NO: 2618539 - RNA, 19 nt, Human
gaagcccuccuuccacgga

SEQ ID NO: 2618540 - RNA, 19 nt, Human
gaagccccuuccccauggg

SEQ ID NO: 2618541 - RNA, 17 nt, Human
gaagccccuuccccaug

SEQ ID NO: 2618542 - RNA, 14 nt, Human
gaagccccuucccc

SEQ ID NO: 2618543 - RNA, 22 nt, Human
gaagcccccagcuaagaaccug

SEQ ID NO: 2618544 - RNA, 20 nt, Human
gaagcccccaccgugggcag

SEQ ID NO: 2618545 - RNA, 14 nt, Human
gaagcccccagcua

SEQ ID NO: 2618546 - RNA, 17 nt, Human
gaagcccccagcuaaga

SEQ ID NO: 2618547 - RNA, 21 nt, Human
gaagcccccagcuaagaaccu

SEQ ID NO: 2618548 - RNA, 23 nt, Human
gaagcccaggccccuuuucacuc

SEQ ID NO: 2618549 - RNA, 23 nt, Human
gaagcccaggaaaggcuccagga

SEQ ID NO: 2618550 - RNA, 12 nt, Human
gaagaacugaaa

SEQ ID NO: 2618551 - RNA, 23 nt, Human
gaagaacggggcucuucucauuu

SEQ ID NO: 2618552 - RNA, 22 nt, Human
gaagaacggggcucuucucauu

SEQ ID NO: 2618553 - RNA, 20 nt, Human
gaagaacggggcucuucuca

SEQ ID NO: 2618554 - RNA, 13 nt, Human
gaagaacggggcu

SEQ ID NO: 2618555 - RNA, 19 nt, Human
gaagacugcauuauauuua

SEQ ID NO: 2618556 - RNA, 15 nt, Human
gaagaacugcaggcc

SEQ ID NO: 2618557 - RNA, 14 nt, Human
gaagaacugcaggc

SEQ ID NO: 2618558 - RNA, 13 nt, Human
gaagaacugcagg

SEQ ID NO: 2618559 - RNA, 13 nt, Human
gaagacuuuggaa

SEQ ID NO: 2618560 - RNA, 11 nt, Human
gaagacuuugg

SEQ ID NO: 2618561 - RNA, 15 nt, Human
gaagacuggaagcua

SEQ ID NO: 2618562 - RNA, 16 nt, Human
gaagacuggaagcuaa

SEQ ID NO: 2618563 - RNA, 17 nt, Human
gaagacuggaagcuaau

SEQ ID NO: 2618564 - RNA, 20 nt, Human
gaagacugucagcuuccaaa

SEQ ID NO: 2618565 - RNA, 11 nt, Human
gaagacugugg

SEQ ID NO: 2618566 - RNA, 12 nt, Human
gaagacuguggc

SEQ ID NO: 2618567 - RNA, 23 nt, Human
gaacuuugaccucugcagcaaua

SEQ ID NO: 2618568 - RNA, 21 nt, Human
gaacucaucuagguaaauuac

SEQ ID NO: 2618569 - RNA, 24 nt, Human
gaacucagccaagcacaguggugg

SEQ ID NO: 2618570 - RNA, 20 nt, Human
gaacucagccaagcacagug

SEQ ID NO: 2618571 - RNA, 19 nt, Human
gaacucagccaagcacagu

SEQ ID NO: 2618572 - RNA, 18 nt, Human
gaacucagccaagcacag

SEQ ID NO: 2618573 - RNA, 20 nt, Human
gaacucaucuagguaaauua

SEQ ID NO: 2618574 - RNA, 19 nt, Human
gaacuuugcugagccugua

SEQ ID NO: 2618575 - RNA, 22 nt, Human
gaacucaucccuaaugcugcag

SEQ ID NO: 2618576 - RNA, 18 nt, Human
gaacucaucccuaaugcu

SEQ ID NO: 2618577 - RNA, 14 nt, Human
gaacuuuuuguagg

SEQ ID NO: 2618578 - RNA, 19 nt, Human
gaagaaccaguccccccac

SEQ ID NO: 2618579 - RNA, 22 nt, Human
gaagaaccaguccccccacccu

SEQ ID NO: 2618580 - RNA, 18 nt, Human
gaagaaaaaauacauuuu

SEQ ID NO: 2618581 - RNA, 13 nt, Human
gaagaaccagucc

SEQ ID NO: 2618582 - RNA, 13 nt, Human
gaagaaaaaauac

SEQ ID NO: 2618583 - RNA, 17 nt, Human
gaagacuuuggaaagag

SEQ ID NO: 2618584 - RNA, 14 nt, Human
gaagacuuuggaaa

SEQ ID NO: 2618585 - RNA, 20 nt, Human
gaagacuuuucuuucagcca

SEQ ID NO: 2618586 - RNA, 12 nt, Human
gaagagaaacca

SEQ ID NO: 2618587 - RNA, 13 nt, Human
gaagacuguggcu

SEQ ID NO: 2618588 - RNA, 19 nt, Human
gaagagaaugcacaaacag

SEQ ID NO: 2618589 - RNA, 18 nt, Human
gaagagacaggagggcaa

SEQ ID NO: 2618590 - RNA, 17 nt, Human
gaagagaagggcagggc

SEQ ID NO: 2618591 - RNA, 16 nt, Human
gaagagacugggaaga

SEQ ID NO: 2618592 - RNA, 16 nt, Human
gaagagagcaugagag

SEQ ID NO: 2618593 - RNA, 19 nt, Human
gaagagagaucaaauggaa

SEQ ID NO: 2618594 - RNA, 16 nt, Human
gaagagagaucaaaug

SEQ ID NO: 2618595 - RNA, 14 nt, Human
gaagagcacagccc

SEQ ID NO: 2618596 - RNA, 13 nt, Human
gaagagcacagcc

SEQ ID NO: 2618597 - RNA, 15 nt, Human
gaagagauuuuucau

SEQ ID NO: 2618598 - RNA, 18 nt, Human
gaagagauuuuucaugau

SEQ ID NO: 2618599 - RNA, 22 nt, Human
gaagagaggaguucaaugaucu

SEQ ID NO: 2618600 - RNA, 18 nt, Human
gaagagaugggcuuguuu

SEQ ID NO: 2618601 - RNA, 15 nt, Human
gaagagaggaguuca

SEQ ID NO: 2618602 - RNA, 13 nt, Human
gaagagaggaguu

SEQ ID NO: 2618603 - RNA, 12 nt, Human
gaagagaggagu

SEQ ID NO: 2618604 - RNA, 21 nt, Human
gaagagaggagaggagagagg

SEQ ID NO: 2618605 - RNA, 19 nt, Human
gaagagaggagaggagaga

SEQ ID NO: 2618606 - RNA, 14 nt, Human
gaagagaggagagg

SEQ ID NO: 2618607 - RNA, 13 nt, Human
gaagagaggagag

SEQ ID NO: 2618608 - RNA, 19 nt, Human
gaagagaggaguucaauga

SEQ ID NO: 2618609 - RNA, 18 nt, Human
gaagagaggaguucaaug

SEQ ID NO: 2618610 - RNA, 17 nt, Human
gaagagaggaguucaau

SEQ ID NO: 2618611 - RNA, 16 nt, Human
gaagagaggaguucaa

SEQ ID NO: 2618612 - RNA, 21 nt, Human
gaagagaggaguucaaugauc

SEQ ID NO: 2618613 - RNA, 20 nt, Human
gaagagaggaguucaaugau

SEQ ID NO: 2618614 - RNA, 21 nt, Human
gaagagaguccauauuucaau

SEQ ID NO: 2618615 - RNA, 15 nt, Human
gaagaggcugguucu

SEQ ID NO: 2618616 - RNA, 16 nt, Human
gaagaggcuggugcug

SEQ ID NO: 2618617 - RNA, 19 nt, Human
gaagaggcgggccagccag

SEQ ID NO: 2618618 - RNA, 18 nt, Human
gaagaggcgggccagcca

SEQ ID NO: 2618619 - RNA, 17 nt, Human
gaagaggcgggccagcc

SEQ ID NO: 2618620 - RNA, 16 nt, Human
gaagaggcgggccagc

SEQ ID NO: 2618621 - RNA, 15 nt, Human
gaagaggcgggccag

SEQ ID NO: 2618622 - RNA, 20 nt, Human
gaagagcacagcccucccgc

SEQ ID NO: 2618623 - RNA, 15 nt, Human
gaagagcacagcccu

SEQ ID NO: 2618624 - RNA, 15 nt, Human
gaagagcaggcacau

SEQ ID NO: 2618625 - RNA, 18 nt, Human
gaagagcaggcacaugga

SEQ ID NO: 2618626 - RNA, 23 nt, Human
gaagagcaggcacauggaggagc

SEQ ID NO: 2618627 - RNA, 15 nt, Human
gaaguacuggagaaa

SEQ ID NO: 2618628 - RNA, 21 nt, Human
gaaguacccguucacauuuuu

SEQ ID NO: 2618629 - RNA, 21 nt, Human
gaaguacguuauuguugacuu

SEQ ID NO: 2618630 - RNA, 13 nt, Human
gaaguagaaaggg

SEQ ID NO: 2618631 - RNA, 18 nt, Human
gaaguacuauaauuuacc

SEQ ID NO: 2618632 - RNA, 23 nt, Human
gaagguggugggggugcagauga

SEQ ID NO: 2618633 - RNA, 13 nt, Human
gaaguaaugaauu

SEQ ID NO: 2618634 - RNA, 15 nt, Human
gaaguaaugaauuuu

SEQ ID NO: 2618635 - RNA, 23 nt, Human
gaaggugcuggaggugggagcag

SEQ ID NO: 2618636 - RNA, 21 nt, Human
gaaggugcuggaggugggagc

SEQ ID NO: 2618637 - RNA, 20 nt, Human
gaaggugcuggaggugggag

SEQ ID NO: 2618638 - RNA, 19 nt, Human
gaaggugcuggagguggga

SEQ ID NO: 2618639 - RNA, 18 nt, Human
gaaggugcuggagguggg

SEQ ID NO: 2618640 - RNA, 17 nt, Human
gaaggugcuggaggugg

SEQ ID NO: 2618641 - RNA, 16 nt, Human
gaaggugcuggaggug

SEQ ID NO: 2618642 - RNA, 18 nt, Human
gaaggugcugacggccag

SEQ ID NO: 2618643 - RNA, 19 nt, Human
gaaggugcugacggccagg

SEQ ID NO: 2618644 - RNA, 14 nt, Human
gaaggugcuggagg

SEQ ID NO: 2618645 - RNA, 12 nt, Human
gaaggugcugga

SEQ ID NO: 2618646 - RNA, 21 nt, Human
gaaggugcugacggccaggga

SEQ ID NO: 2618647 - RNA, 22 nt, Human
gaaguaauaugcacacauuuuu

SEQ ID NO: 2618648 - RNA, 22 nt, Human
gaagguggauggccccagcaca

SEQ ID NO: 2618649 - RNA, 18 nt, Human
gaagguggccucugugga

SEQ ID NO: 2618650 - RNA, 20 nt, Human
gaagguuaggauuuaacagu

SEQ ID NO: 2618651 - RNA, 19 nt, Human
gaagggggcugggacaugg

SEQ ID NO: 2618652 - RNA, 16 nt, Human
gaagggggcugggaca

SEQ ID NO: 2618653 - RNA, 22 nt, Human
gaagggguaggauuacuaggug

SEQ ID NO: 2618654 - RNA, 22 nt, Human
gaaggugccccaaaaugcaaga

SEQ ID NO: 2618655 - RNA, 19 nt, Human
gaaggggguggugucucca

SEQ ID NO: 2618656 - RNA, 12 nt, Human
gaaggggguggu

SEQ ID NO: 2618657 - RNA, 18 nt, Human
gaaggggguccacccagc

SEQ ID NO: 2618658 - RNA, 17 nt, Human
gaaggggguccacccag

SEQ ID NO: 2618659 - RNA, 15 nt, Human
gaagggggcugggac

SEQ ID NO: 2618660 - RNA, 14 nt, Human
gaagcggcuggcag

SEQ ID NO: 2618661 - RNA, 18 nt, Human
gaagcggucguguuguga

SEQ ID NO: 2618662 - RNA, 21 nt, Human
gaagcccuggauuucagaaag

SEQ ID NO: 2618663 - RNA, 15 nt, Human
gaagcgugagacgcc

SEQ ID NO: 2618664 - RNA, 12 nt, Human
gaaguuugaaug

SEQ ID NO: 2618665 - RNA, 11 nt, Human
gaagucugaaa

SEQ ID NO: 2618666 - RNA, 21 nt, Human
gaaguuucugccgcagcccug

SEQ ID NO: 2618667 - RNA, 20 nt, Human
gaaguuucugccgcagcccu

SEQ ID NO: 2618668 - RNA, 15 nt, Human
gaagucuuagaugua

SEQ ID NO: 2618669 - RNA, 22 nt, Human
gaaguccaagcauuuagaugua

SEQ ID NO: 2618670 - RNA, 12 nt, Human
gaaguccaagca

SEQ ID NO: 2618671 - RNA, 15 nt, Human
gaagucucuuuucuu

SEQ ID NO: 2618672 - RNA, 21 nt, Human
gaagucucugaagugaaacug

SEQ ID NO: 2618673 - RNA, 16 nt, Human
gaagucucugaaguga

SEQ ID NO: 2618674 - RNA, 18 nt, Human
gaagucucuagguucuga

SEQ ID NO: 2618675 - RNA, 20 nt, Human
gaagucuaggagcugggagg

SEQ ID NO: 2618676 - RNA, 22 nt, Human
gaagucuaggagcugggaggaa

SEQ ID NO: 2618677 - RNA, 15 nt, Human
gaagucuaggagcug

SEQ ID NO: 2618678 - RNA, 16 nt, Human
gaagucuaggagcugg

SEQ ID NO: 2618679 - RNA, 18 nt, Human
gaagucgucuuaacucac

SEQ ID NO: 2618680 - RNA, 14 nt, Human
gaaguauccuucag

SEQ ID NO: 2618681 - RNA, 13 nt, Human
gaaguaggaagua

SEQ ID NO: 2618682 - RNA, 23 nt, Human
gaaguaggaagugaaaauaggua

SEQ ID NO: 2618683 - RNA, 23 nt, Human
gaaguauuauaaauuauguuuau

SEQ ID NO: 2618684 - RNA, 20 nt, Human
gaaguauuauaaauuauguu

SEQ ID NO: 2618685 - RNA, 19 nt, Human
gaaguauuauaaauuaugu

SEQ ID NO: 2618686 - RNA, 16 nt, Human
gaaguauuauaaauua

SEQ ID NO: 2618687 - RNA, 18 nt, Human
gaagucauaccaaugaaa

SEQ ID NO: 2618688 - RNA, 19 nt, Human
gaagucaugaagcccaagu

SEQ ID NO: 2618689 - RNA, 15 nt, Human
gaagucaugaagccc

SEQ ID NO: 2618690 - RNA, 16 nt, Human
gaaguauccuucagcc

SEQ ID NO: 2618691 - RNA, 14 nt, Human
gaaguauaccugau

SEQ ID NO: 2618692 - RNA, 19 nt, Human
gaaguaguuuguauaacuu

SEQ ID NO: 2618693 - RNA, 15 nt, Human
gaaguauuauaaauu

SEQ ID NO: 2618694 - RNA, 17 nt, Human
gaaguuugaauguuaaa

SEQ ID NO: 2618695 - RNA, 16 nt, Human
gaaguuugaauguuaa

SEQ ID NO: 2618696 - RNA, 14 nt, Human
gaaguuugaauguu

SEQ ID NO: 2618697 - RNA, 13 nt, Human
gaaguuugaaugu

SEQ ID NO: 2618698 - RNA, 20 nt, Human
gaaguuugagaucagccugg

SEQ ID NO: 2618699 - RNA, 20 nt, Human
gaaguuugaauguuaaauaa

SEQ ID NO: 2618700 - RNA, 19 nt, Human
gaaguuugaauguuaaaua

SEQ ID NO: 2618701 - RNA, 23 nt, Human
gaaguuuucaaugaugggcgagc

SEQ ID NO: 2618702 - RNA, 11 nt, Human
gaaguuuucaa

SEQ ID NO: 2618703 - RNA, 13 nt, Human
gaaguuuuacauu

SEQ ID NO: 2618704 - RNA, 19 nt, Human
gaaguuugauauuaaagga

SEQ ID NO: 2618705 - RNA, 18 nt, Human
gaauaacauguaauuaag

SEQ ID NO: 2618706 - RNA, 19 nt, Human
gaauaacauguaauuaagu

SEQ ID NO: 2618707 - RNA, 23 nt, Human
gaauaaaauacuauuuuuacugc

SEQ ID NO: 2618708 - RNA, 19 nt, Human
gaaguuuuuguacuguaaa

SEQ ID NO: 2618709 - RNA, 16 nt, Human
gaauaaaaacuuugcu

SEQ ID NO: 2618710 - RNA, 23 nt, Human
gaaguuuucaggacuuggucuga

SEQ ID NO: 2618711 - RNA, 13 nt, Human
gaaguuuucagga

SEQ ID NO: 2618712 - RNA, 12 nt, Human
gaaguuuugcau

SEQ ID NO: 2618713 - RNA, 18 nt, Human
gaaguuuuuguacuguaa

SEQ ID NO: 2618714 - RNA, 14 nt, Human
gaaguuuuuguacu

SEQ ID NO: 2618715 - RNA, 15 nt, Human
gaaguuuuguacaga

SEQ ID NO: 2618716 - RNA, 17 nt, Human
gaaguuuugcauuuaug

SEQ ID NO: 2618717 - RNA, 21 nt, Human
gaauacagaggcaacugcauu

SEQ ID NO: 2618718 - RNA, 16 nt, Human
gaauacaaacauauuu

SEQ ID NO: 2618719 - RNA, 14 nt, Human
gaauacagaaagau

SEQ ID NO: 2618720 - RNA, 23 nt, Human
gaauacagggcaugcauuuugca

SEQ ID NO: 2618721 - RNA, 21 nt, Human
gaauacaguaagcugcucuau

SEQ ID NO: 2618722 - RNA, 13 nt, Human
gaauacaguguua

SEQ ID NO: 2618723 - RNA, 18 nt, Human
gaauaaucacgcuuuccu

SEQ ID NO: 2618724 - RNA, 19 nt, Human
gaauaaucacgcuuuccug

SEQ ID NO: 2618725 - RNA, 20 nt, Human
gaauaaucacgcuuuccuga

SEQ ID NO: 2618726 - RNA, 21 nt, Human
gaauaaucacgcuuuccugaa

SEQ ID NO: 2618727 - RNA, 14 nt, Human
gaauaauuucccaa

SEQ ID NO: 2618728 - RNA, 17 nt, Human
gaauacaaacaccugga

SEQ ID NO: 2618729 - RNA, 14 nt, Human
gaauaauuucuuac

SEQ ID NO: 2618730 - RNA, 21 nt, Human
gaauaauuucccaauuaggaa

SEQ ID NO: 2618731 - RNA, 23 nt, Human
gaauaauuucccaauuaggaagu

SEQ ID NO: 2618732 - RNA, 17 nt, Human
gaauaagaaaguuucac

SEQ ID NO: 2618733 - RNA, 21 nt, Human
gaauaacucuguggcauuauu

SEQ ID NO: 2618734 - RNA, 21 nt, Human
gaauaaaauacuauuuuuacu

SEQ ID NO: 2618735 - RNA, 22 nt, Human
gaauaaccacuuaaaaaauguc

SEQ ID NO: 2618736 - RNA, 15 nt, Human
gaauaacuagcacca

SEQ ID NO: 2618737 - RNA, 23 nt, Human
gaauaaccacuuaaaaaaugucc

SEQ ID NO: 2618738 - RNA, 17 nt, Human
gaauaauacaguaucuc

SEQ ID NO: 2618739 - RNA, 15 nt, Human
gaauaauagaagaac

SEQ ID NO: 2618740 - RNA, 19 nt, Human
gaauaauaugcugccaaau

SEQ ID NO: 2618741 - RNA, 16 nt, Human
gaauaauacauugaau

SEQ ID NO: 2618742 - RNA, 12 nt, Human
gaauaauagaag

SEQ ID NO: 2618743 - RNA, 22 nt, Human
gaauaauaauuauccagaguuu

SEQ ID NO: 2618744 - RNA, 17 nt, Human
gaaucaagagcugcccu

SEQ ID NO: 2618745 - RNA, 16 nt, Human
gaaucaagagcugccc

SEQ ID NO: 2618746 - RNA, 15 nt, Human
gaaucaagagcugcc

SEQ ID NO: 2618747 - RNA, 14 nt, Human
gaaucaagagcugc

SEQ ID NO: 2618748 - RNA, 17 nt, Human
gaaucaacauuucucaa

SEQ ID NO: 2618749 - RNA, 22 nt, Human
gaaucaaagcaguuaacuuuaa

SEQ ID NO: 2618750 - RNA, 19 nt, Human
gaaucaagagcugcccucc

SEQ ID NO: 2618751 - RNA, 18 nt, Human
gaaucaagagcugcccuc

SEQ ID NO: 2618752 - RNA, 20 nt, Human
gaaucaagaugucagacugg

SEQ ID NO: 2618753 - RNA, 22 nt, Human
gaaucaagcuagaaggccacau

SEQ ID NO: 2618754 - RNA, 20 nt, Human
gaaucaagcuagaaggccac

SEQ ID NO: 2618755 - RNA, 21 nt, Human
gaaucaagaugucagacuggc

SEQ ID NO: 2618756 - RNA, 19 nt, Human
gaaucaaagcaaugcauuu

SEQ ID NO: 2618757 - RNA, 18 nt, Human
gaaucaaagcaaugcauu

SEQ ID NO: 2618758 - RNA, 17 nt, Human
gaaucaaagcaaugcau

SEQ ID NO: 2618759 - RNA, 17 nt, Human
gaaucaaagacauggaa

SEQ ID NO: 2618760 - RNA, 16 nt, Human
gaaucaaagacaugga

SEQ ID NO: 2618761 - RNA, 15 nt, Human
gaaucaaaacucucc

SEQ ID NO: 2618762 - RNA, 13 nt, Human
gaaucaaaacucu

SEQ ID NO: 2618763 - RNA, 14 nt, Human
gaaucaaaacucuc

SEQ ID NO: 2618764 - RNA, 16 nt, Human
gaauauuugaaucuug

SEQ ID NO: 2618765 - RNA, 14 nt, Human
gaauauuugaaucu

SEQ ID NO: 2618766 - RNA, 23 nt, Human
gaauaggcgaucacaacgugcau

SEQ ID NO: 2618767 - RNA, 22 nt, Human
gaauaggcgaucacaacgugca

SEQ ID NO: 2618768 - RNA, 22 nt, Human
gaauauuugaaucuugucucaa

SEQ ID NO: 2618769 - RNA, 18 nt, Human
gaauauuugaaucuuguc

SEQ ID NO: 2618770 - RNA, 17 nt, Human
gaauauuugaauguaug

SEQ ID NO: 2618771 - RNA, 16 nt, Human
gaauauuuuaacuucc

SEQ ID NO: 2618772 - RNA, 18 nt, Human
gaauauuuuaaguauugc

SEQ ID NO: 2618773 - RNA, 13 nt, Human
gaauauuugaauc

SEQ ID NO: 2618774 - RNA, 22 nt, Human
gaauauuuguuauguagauaac

SEQ ID NO: 2618775 - RNA, 22 nt, Human
gaauagcugggacuacaggugu

SEQ ID NO: 2618776 - RNA, 16 nt, Human
gaauaggcgaucacaa

SEQ ID NO: 2618777 - RNA, 23 nt, Human
gaauagcugggacuacaggugug

SEQ ID NO: 2618778 - RNA, 13 nt, Human
gaauaccuguccc

SEQ ID NO: 2618779 - RNA, 20 nt, Human
gaauacaguguuauuuucuu

SEQ ID NO: 2618780 - RNA, 15 nt, Human
gaauaccuguccccc

SEQ ID NO: 2618781 - RNA, 15 nt, Human
gaauuucccaaagca

SEQ ID NO: 2618782 - RNA, 17 nt, Human
gaauuuauuauuguucu

SEQ ID NO: 2618783 - RNA, 23 nt, Human
gaauuuauucaauuccucuggga

SEQ ID NO: 2618784 - RNA, 22 nt, Human
gaauuuaaauauaauucuguaa

SEQ ID NO: 2618785 - RNA, 20 nt, Human
gaauuuaaauauaauucugu

SEQ ID NO: 2618786 - RNA, 17 nt, Human
gaauuuaaauauaauuc

SEQ ID NO: 2618787 - RNA, 15 nt, Human
gaauuuaaauauaau

SEQ ID NO: 2618788 - RNA, 14 nt, Human
gaauuuaaauauaa

SEQ ID NO: 2618789 - RNA, 13 nt, Human
gaauuuaaauaua

SEQ ID NO: 2618790 - RNA, 21 nt, Human
gaauuuagggagaaauguugu

SEQ ID NO: 2618791 - RNA, 19 nt, Human
gaauuuagggagaaauguu

SEQ ID NO: 2618792 - RNA, 23 nt, Human
gaauuuaaauauaauucuguaaa

SEQ ID NO: 2618793 - RNA, 16 nt, Human
gaauuuaauaaucugu

SEQ ID NO: 2618794 - RNA, 22 nt, Human
gaauuuaucacacuucugugag

SEQ ID NO: 2618795 - RNA, 17 nt, Human
gaauuuauucaauuccu

SEQ ID NO: 2618796 - RNA, 13 nt, Human
gaauuuauucaau

SEQ ID NO: 2618797 - RNA, 19 nt, Human
gaauuuagguuuuuauuag

SEQ ID NO: 2618798 - RNA, 22 nt, Human
gaauuuauauacaaccugcuug

SEQ ID NO: 2618799 - RNA, 16 nt, Human
gaauuuagguuuuuau

SEQ ID NO: 2618800 - RNA, 20 nt, Human
gaauuuaucacacuucugug

SEQ ID NO: 2618801 - RNA, 16 nt, Human
gaauugugcucaaaau

SEQ ID NO: 2618802 - RNA, 16 nt, Human
gaauugugucugcagg

SEQ ID NO: 2618803 - RNA, 16 nt, Human
gaauugugugauguuu

SEQ ID NO: 2618804 - RNA, 18 nt, Human
gaauuuaaaaauaagaaa

SEQ ID NO: 2618805 - RNA, 23 nt, Human
gaauuguguuuauaauuuuaaau

SEQ ID NO: 2618806 - RNA, 15 nt, Human
gaauuguguuuauaa

SEQ ID NO: 2618807 - RNA, 22 nt, Human
gaauuguaaggaaugauuaauu

SEQ ID NO: 2618808 - RNA, 14 nt, Human
gaauuguaucauuu

SEQ ID NO: 2618809 - RNA, 14 nt, Human
gaauuguccccagu

SEQ ID NO: 2618810 - RNA, 23 nt, Human
gaauuguccccaguuugcagaaa

SEQ ID NO: 2618811 - RNA, 18 nt, Human
gaauugugaccaaguuau

SEQ ID NO: 2618812 - RNA, 13 nt, Human
gaauugauuugca

SEQ ID NO: 2618813 - RNA, 14 nt, Human
gaauugauuugcau

SEQ ID NO: 2618814 - RNA, 15 nt, Human
gaauugauuugcauu

SEQ ID NO: 2618815 - RNA, 17 nt, Human
gaauugauuugcauuga

SEQ ID NO: 2618816 - RNA, 12 nt, Human
gaauugauuugc

SEQ ID NO: 2618817 - RNA, 21 nt, Human
gaauugaucauuuucccccca

SEQ ID NO: 2618818 - RNA, 17 nt, Human
gaauucucuaguuugau

SEQ ID NO: 2618819 - RNA, 17 nt, Human
gaauucucagaaucuca

SEQ ID NO: 2618820 - RNA, 16 nt, Human
gaauuccuucagggug

SEQ ID NO: 2618821 - RNA, 17 nt, Human
gaauucggugugcacca

SEQ ID NO: 2618822 - RNA, 16 nt, Human
gaauuccaaggaguuc

SEQ ID NO: 2618823 - RNA, 12 nt, Human
gaauuccaagga

SEQ ID NO: 2618824 - RNA, 13 nt, Human
gaauuccaaggag

SEQ ID NO: 2618825 - RNA, 21 nt, Human
gaaugucagugugacugaucu

SEQ ID NO: 2618826 - RNA, 20 nt, Human
gaaugucagugugacugauc

SEQ ID NO: 2618827 - RNA, 23 nt, Human
gaauucaaacuggggccuccaga

SEQ ID NO: 2618828 - RNA, 23 nt, Human
gaauguauuguaccuuuuaacac

SEQ ID NO: 2618829 - RNA, 16 nt, Human
gaauucagauuuuaaa

SEQ ID NO: 2618830 - RNA, 19 nt, Human
gaauucucuaguuugauua

SEQ ID NO: 2618831 - RNA, 16 nt, Human
gaauucuagugcugcu

SEQ ID NO: 2618832 - RNA, 14 nt, Human
gaauucuagugcug

SEQ ID NO: 2618833 - RNA, 17 nt, Human
gaauuccuucaggguga

SEQ ID NO: 2618834 - RNA, 23 nt, Human
gaauucuaggcaucccaggggac

SEQ ID NO: 2618835 - RNA, 15 nt, Human
gaauucuauuugcug

SEQ ID NO: 2618836 - RNA, 17 nt, Human
gaauucuagugcugcug

SEQ ID NO: 2618837 - RNA, 18 nt, Human
gaauucugcuaccucacu

SEQ ID NO: 2618838 - RNA, 23 nt, Human
gaauucuugaaggaaaaugauac

SEQ ID NO: 2618839 - RNA, 20 nt, Human
gaauucuugguugaggaaac

SEQ ID NO: 2618840 - RNA, 19 nt, Human
gaauucuugguugaggaaa

SEQ ID NO: 2618841 - RNA, 19 nt, Human
gaauucugcuaccucacug

SEQ ID NO: 2618842 - RNA, 14 nt, Human
gaauugaaaaacca

SEQ ID NO: 2618843 - RNA, 16 nt, Human
gaauucuuuuggggaa

SEQ ID NO: 2618844 - RNA, 14 nt, Human
gaauugaagcagga

SEQ ID NO: 2618845 - RNA, 22 nt, Human
gaauugaggggauuaauaugaa

SEQ ID NO: 2618846 - RNA, 15 nt, Human
gaauugaggucugcu

SEQ ID NO: 2618847 - RNA, 20 nt, Human
gaauugaucauuuucccccc

SEQ ID NO: 2618848 - RNA, 15 nt, Human
gaauugaacccagga

SEQ ID NO: 2618849 - RNA, 16 nt, Human
gaauugaacccaggag

SEQ ID NO: 2618850 - RNA, 18 nt, Human
gaauugacuucgacugug

SEQ ID NO: 2618851 - RNA, 18 nt, Human
gaauugaacccaggaggu

SEQ ID NO: 2618852 - RNA, 18 nt, Human
gaauugaggggauuaaua

SEQ ID NO: 2618853 - RNA, 22 nt, Human
gaauguauuguaccuuuuaaca

SEQ ID NO: 2618854 - RNA, 21 nt, Human
gaauguauuguaccuuuuaac

SEQ ID NO: 2618855 - RNA, 13 nt, Human
gaauguauuuauu

SEQ ID NO: 2618856 - RNA, 16 nt, Human
gaauguauuuauuugg

SEQ ID NO: 2618857 - RNA, 23 nt, Human
gaauguauuuauuugggagaccg

SEQ ID NO: 2618858 - RNA, 14 nt, Human
gaaugucaguguga

SEQ ID NO: 2618859 - RNA, 21 nt, Human
gaauguaugcuucauacaggg

SEQ ID NO: 2618860 - RNA, 16 nt, Human
gaauguauuauucugc

SEQ ID NO: 2618861 - RNA, 15 nt, Human
gaauguauuguaccu

SEQ ID NO: 2618862 - RNA, 14 nt, Human
gaauguauuguacc

SEQ ID NO: 2618863 - RNA, 13 nt, Human
gaauguauuguac

SEQ ID NO: 2618864 - RNA, 12 nt, Human
gaauguauugua

SEQ ID NO: 2618865 - RNA, 17 nt, Human
gaauguauuauucugca

SEQ ID NO: 2618866 - RNA, 18 nt, Human
gaauguauuauucugcag

SEQ ID NO: 2618867 - RNA, 19 nt, Human
gaauguauuauucugcagc

SEQ ID NO: 2618868 - RNA, 21 nt, Human
gaauguauuauucugcagcau

SEQ ID NO: 2618869 - RNA, 15 nt, Human
gaauguaacugcuga

SEQ ID NO: 2618870 - RNA, 18 nt, Human
gaauguaacugcugaaaa

SEQ ID NO: 2618871 - RNA, 18 nt, Human
gaauguaagaacuacaaa

SEQ ID NO: 2618872 - RNA, 16 nt, Human
gaauguaugcuucaua

SEQ ID NO: 2618873 - RNA, 18 nt, Human
gaauguaugcuucauaca

SEQ ID NO: 2618874 - RNA, 22 nt, Human
gaaugguuccaugccugagggu

SEQ ID NO: 2618875 - RNA, 20 nt, Human
gaaugguuccaugccugagg

SEQ ID NO: 2618876 - RNA, 19 nt, Human
gaaugguuccaugccugag

SEQ ID NO: 2618877 - RNA, 22 nt, Human
gaaugguuuucaaaauaaaaau

SEQ ID NO: 2618878 - RNA, 22 nt, Human
gaauggaaggguucuggcugcc

SEQ ID NO: 2618879 - RNA, 21 nt, Human
gaauggaaggguucuggcugc

SEQ ID NO: 2618880 - RNA, 21 nt, Human
gaaugggcaaaacugaauuau

SEQ ID NO: 2618881 - RNA, 13 nt, Human
gaaugggaaaaga

SEQ ID NO: 2618882 - RNA, 23 nt, Human
gaaugggagguugaucagaucug

SEQ ID NO: 2618883 - RNA, 13 nt, Human
gaauggcaauggu

SEQ ID NO: 2618884 - RNA, 20 nt, Human
gaauggauuggauuauuuaa

SEQ ID NO: 2618885 - RNA, 19 nt, Human
gaauggauuggauuauuua

SEQ ID NO: 2618886 - RNA, 15 nt, Human
gaaugguccaggguu

SEQ ID NO: 2618887 - RNA, 14 nt, Human
gaaugguccagggu

SEQ ID NO: 2618888 - RNA, 16 nt, Human
gaaugguuccaugccu

SEQ ID NO: 2618889 - RNA, 17 nt, Human
gaaugguuauaaaagug

SEQ ID NO: 2618890 - RNA, 16 nt, Human
gaaugguuauaaaagu

SEQ ID NO: 2618891 - RNA, 13 nt, Human
gaaugguuauaaa

SEQ ID NO: 2618892 - RNA, 18 nt, Human
gaauggggaucacagaga

SEQ ID NO: 2618893 - RNA, 17 nt, Human
gaaugggcuguuuuugg

SEQ ID NO: 2618894 - RNA, 16 nt, Human
gaaugggcaguuacau

SEQ ID NO: 2618895 - RNA, 15 nt, Human
gaaugggcaguuaca

SEQ ID NO: 2618896 - RNA, 13 nt, Human
gaaugguccaggg

SEQ ID NO: 2618897 - RNA, 23 nt, Human
gaauggucagcguugcaugucgu

SEQ ID NO: 2618898 - RNA, 18 nt, Human
gaaugcuuuuugaauguu

SEQ ID NO: 2618899 - RNA, 20 nt, Human
gaaugccucaaugugaccag

SEQ ID NO: 2618900 - RNA, 14 nt, Human
gaaugccguggauu

SEQ ID NO: 2618901 - RNA, 13 nt, Human
gaaugcuuuagga

SEQ ID NO: 2618902 - RNA, 18 nt, Human
gaaugcccccagcuggcc

SEQ ID NO: 2618903 - RNA, 17 nt, Human
gaaugcccccagcuggc

SEQ ID NO: 2618904 - RNA, 14 nt, Human
gaaugcccucaggg

SEQ ID NO: 2618905 - RNA, 21 nt, Human
gaaugccacugccuucgcuuc

SEQ ID NO: 2618906 - RNA, 17 nt, Human
gaaugcccacaggcaaa

SEQ ID NO: 2618907 - RNA, 22 nt, Human
gaaugcccacaggcaaaugcau

SEQ ID NO: 2618908 - RNA, 22 nt, Human
gaaugccacugccuucgcuucu

SEQ ID NO: 2618909 - RNA, 14 nt, Human
gaaugcauuuuguu

SEQ ID NO: 2618910 - RNA, 14 nt, Human
gaaugcauaaaaug

SEQ ID NO: 2618911 - RNA, 11 nt, Human
gaaugcagugg

SEQ ID NO: 2618912 - RNA, 18 nt, Human
gaaugaagcuuguguauc

SEQ ID NO: 2618913 - RNA, 16 nt, Human
gaaugaagcuugugua

SEQ ID NO: 2618914 - RNA, 20 nt, Human
gaaugaagcuuguguaucca

SEQ ID NO: 2618915 - RNA, 17 nt, Human
gaaugaaggugucagaa

SEQ ID NO: 2618916 - RNA, 22 nt, Human
gaaucuuuauugagaaagagca

SEQ ID NO: 2618917 - RNA, 19 nt, Human
gaaucuuuauugagaaaga

SEQ ID NO: 2618918 - RNA, 18 nt, Human
gaaucuuuauugagaaag

SEQ ID NO: 2618919 - RNA, 17 nt, Human
gaaucuuuauugagaaa

SEQ ID NO: 2618920 - RNA, 23 nt, Human
gaaucuuuagagaaguauacaua

SEQ ID NO: 2618921 - RNA, 22 nt, Human
gaaucuuuagagaaguauacau

SEQ ID NO: 2618922 - RNA, 22 nt, Human
gaaucuugucucaaugcucaua

SEQ ID NO: 2618923 - RNA, 15 nt, Human
gaaugaaaaaacagu

SEQ ID NO: 2618924 - RNA, 23 nt, Human
gaaucuuuuucagaaacagugag

SEQ ID NO: 2618925 - RNA, 20 nt, Human
gaaucuuuccaauaaaccag

SEQ ID NO: 2618926 - RNA, 15 nt, Human
gaaugaaaaauuuaa

SEQ ID NO: 2618927 - RNA, 19 nt, Human
gaaugaaaaauuuaagcau

SEQ ID NO: 2618928 - RNA, 15 nt, Human
gaaugaaaacucauu

SEQ ID NO: 2618929 - RNA, 20 nt, Human
gaaugaaaaauuuaagcauu

SEQ ID NO: 2618930 - RNA, 22 nt, Human
gaaugaaaaauuuaagcauugu

SEQ ID NO: 2618931 - RNA, 16 nt, Human
gaaugaaaauuguaug

SEQ ID NO: 2618932 - RNA, 23 nt, Human
gaaugaaaaauuuaagcauuguu

SEQ ID NO: 2618933 - RNA, 18 nt, Human
gaaugaaccacaucuugc

SEQ ID NO: 2618934 - RNA, 22 nt, Human
gaaugaaccacaucuugcucug

SEQ ID NO: 2618935 - RNA, 23 nt, Human
gaaugaaccacaucuugcucugc

SEQ ID NO: 2618936 - RNA, 14 nt, Human
gaaugaaaccccca

SEQ ID NO: 2618937 - RNA, 15 nt, Human
gaaugaaccuucugg

SEQ ID NO: 2618938 - RNA, 17 nt, Human
gaaugaaccuucuggcc

SEQ ID NO: 2618939 - RNA, 17 nt, Human
gaucagcuguuugucau

SEQ ID NO: 2618940 - RNA, 18 nt, Human
gaucagcuguuugucaua

SEQ ID NO: 2618941 - RNA, 23 nt, Human
gaucagcuuauugucuagugaaa

SEQ ID NO: 2618942 - RNA, 14 nt, Human
gaucacuggagccc

SEQ ID NO: 2618943 - RNA, 16 nt, Human
gaucagcuguuuguca

SEQ ID NO: 2618944 - RNA, 14 nt, Human
gaucacuacugcag

SEQ ID NO: 2618945 - RNA, 12 nt, Human
gaucacuacugc

SEQ ID NO: 2618946 - RNA, 14 nt, Human
gaucaccugagguc

SEQ ID NO: 2618947 - RNA, 14 nt, Human
gaucaccugagguu

SEQ ID NO: 2618948 - RNA, 12 nt, Human
gaucacuggagc

SEQ ID NO: 2618949 - RNA, 13 nt, Human
gaucacuggagcc

SEQ ID NO: 2618950 - RNA, 20 nt, Human
gaucacggcucacugcagcc

SEQ ID NO: 2618951 - RNA, 23 nt, Human
gaucacggcucacugcagccuca

SEQ ID NO: 2618952 - RNA, 18 nt, Human
gaucaccagcccggccug

SEQ ID NO: 2618953 - RNA, 15 nt, Human
gaucaccagcccggc

SEQ ID NO: 2618954 - RNA, 14 nt, Human
gaucaccagcccgg

SEQ ID NO: 2618955 - RNA, 15 nt, Human
gaucaccagaauaaa

SEQ ID NO: 2618956 - RNA, 22 nt, Human
gaucaccagcccggccugcucc

SEQ ID NO: 2618957 - RNA, 20 nt, Human
gaucaccagcccggccugcu

SEQ ID NO: 2618958 - RNA, 16 nt, Human
gaucacauguggacuu

SEQ ID NO: 2618959 - RNA, 13 nt, Human
gaucacagggccc

SEQ ID NO: 2618960 - RNA, 20 nt, Human
gaucacagggccccagaagg

SEQ ID NO: 2618961 - RNA, 14 nt, Human
gaucaccagaauaa

SEQ ID NO: 2618962 - RNA, 14 nt, Human
gaucacagccucug

SEQ ID NO: 2618963 - RNA, 20 nt, Human
gaucacagcugcuuucuguu

SEQ ID NO: 2618964 - RNA, 17 nt, Human
gaucacagcugcuuucu

SEQ ID NO: 2618965 - RNA, 13 nt, Human
gaucacagcugcu

SEQ ID NO: 2618966 - RNA, 21 nt, Human
gauaucugagggaggaggcca

SEQ ID NO: 2618967 - RNA, 21 nt, Human
gaucacagcuucagccaggag

SEQ ID NO: 2618968 - RNA, 19 nt, Human
gaucacagcuucagccagg

SEQ ID NO: 2618969 - RNA, 19 nt, Human
gauaucacagucuaauuuu

SEQ ID NO: 2618970 - RNA, 18 nt, Human
gauaucacagucuaauuu

SEQ ID NO: 2618971 - RNA, 15 nt, Human
gauauccauucuuuc

SEQ ID NO: 2618972 - RNA, 16 nt, Human
gauauccauucuuucu

SEQ ID NO: 2618973 - RNA, 19 nt, Human
gauauccauucuuucugau

SEQ ID NO: 2618974 - RNA, 17 nt, Human
gauauauuuuucacagu

SEQ ID NO: 2618975 - RNA, 17 nt, Human
gauauauuuuuaagaua

SEQ ID NO: 2618976 - RNA, 15 nt, Human
gauauauuuuucaca

SEQ ID NO: 2618977 - RNA, 20 nt, Human
gauauaucaugagugaauaa

SEQ ID NO: 2618978 - RNA, 23 nt, Human
gauauaggucagugaggcccagg

SEQ ID NO: 2618979 - RNA, 16 nt, Human
gauauauuuuuaagau

SEQ ID NO: 2618980 - RNA, 23 nt, Human
gauaucugagggaggaggccacc

SEQ ID NO: 2618981 - RNA, 20 nt, Human
gauaucugagggaggaggcc

SEQ ID NO: 2618982 - RNA, 16 nt, Human
gauaucugagggagga

SEQ ID NO: 2618983 - RNA, 15 nt, Human
gauaucugagggagg

SEQ ID NO: 2618984 - RNA, 14 nt, Human
gauaucucaucucu

SEQ ID NO: 2618985 - RNA, 23 nt, Human
gauaucgacuuguuuuugcacau

SEQ ID NO: 2618986 - RNA, 13 nt, Human
gauaucucaucuc

SEQ ID NO: 2618987 - RNA, 17 nt, Human
gauaucccuaugcugcc

SEQ ID NO: 2618988 - RNA, 22 nt, Human
gauaucccuaugcugccuaggc

SEQ ID NO: 2618989 - RNA, 23 nt, Human
gauaucccuaugcugccuaggcu

SEQ ID NO: 2618990 - RNA, 17 nt, Human
gauaauuccaguggucc

SEQ ID NO: 2618991 - RNA, 13 nt, Human
gauaauuccagug

SEQ ID NO: 2618992 - RNA, 18 nt, Human
gauaauugcauucaucuu

SEQ ID NO: 2618993 - RNA, 18 nt, Human
gauaauucuagcuuugag

SEQ ID NO: 2618994 - RNA, 17 nt, Human
gauaaucaacugggcug

SEQ ID NO: 2618995 - RNA, 14 nt, Human
gauaauuauaauau

SEQ ID NO: 2618996 - RNA, 18 nt, Human
gauaauauuguggugcca

SEQ ID NO: 2618997 - RNA, 17 nt, Human
gauaauaugagaaucag

SEQ ID NO: 2618998 - RNA, 19 nt, Human
gauaggaaaaaugaguaau

SEQ ID NO: 2618999 - RNA, 16 nt, Human
gauacaaaagcaugug

SEQ ID NO: 2619000 - RNA, 17 nt, Human
gauaggucagugcaaau

SEQ ID NO: 2619001 - RNA, 18 nt, Human
gauaggaaugugaaagca

SEQ ID NO: 2619002 - RNA, 17 nt, Human
gauaggagccugcuggu

SEQ ID NO: 2619003 - RNA, 12 nt, Human
gauaggcucugc

SEQ ID NO: 2619004 - RNA, 20 nt, Human
gauaguuacuguugugaccu

SEQ ID NO: 2619005 - RNA, 17 nt, Human
gauaguuacuguuguga

SEQ ID NO: 2619006 - RNA, 14 nt, Human
gauaguuacuguug

SEQ ID NO: 2619007 - RNA, 12 nt, Human
gauaguuacugu

SEQ ID NO: 2619008 - RNA, 18 nt, Human
gauauaaaagacugacca

SEQ ID NO: 2619009 - RNA, 13 nt, Human
gauauaaauaaaa

SEQ ID NO: 2619010 - RNA, 20 nt, Human
gauagugucccacggugccu

SEQ ID NO: 2619011 - RNA, 13 nt, Human
gauaggcucugca

SEQ ID NO: 2619012 - RNA, 14 nt, Human
gauaggcucugcac

SEQ ID NO: 2619013 - RNA, 17 nt, Human
gauaggcucugcacaga

SEQ ID NO: 2619014 - RNA, 20 nt, Human
gauaggcucugcacagaugg

SEQ ID NO: 2619015 - RNA, 21 nt, Human
gauagggauacaugcucuuag

SEQ ID NO: 2619016 - RNA, 23 nt, Human
gauaguggggagacuucuuggcu

SEQ ID NO: 2619017 - RNA, 21 nt, Human
gauauaucaugagugaauaaa

SEQ ID NO: 2619018 - RNA, 13 nt, Human
gauauauaucaua

SEQ ID NO: 2619019 - RNA, 14 nt, Human
gauauauacauagc

SEQ ID NO: 2619020 - RNA, 18 nt, Human
gauauaugcucugcaugu

SEQ ID NO: 2619021 - RNA, 17 nt, Human
gauauauaaguguacau

SEQ ID NO: 2619022 - RNA, 15 nt, Human
gauauauaaguguac

SEQ ID NO: 2619023 - RNA, 21 nt, Human
gauauaguuuuacuuuuaaac

SEQ ID NO: 2619024 - RNA, 24 nt, Human
gauauaguuuuacuuuuaaacugu

SEQ ID NO: 2619025 - RNA, 19 nt, Human
gauauaguuuuacuuuuaa

SEQ ID NO: 2619026 - RNA, 16 nt, Human
gauauagccagaaaaa

SEQ ID NO: 2619027 - RNA, 15 nt, Human
gauauaaauaaaaca

SEQ ID NO: 2619028 - RNA, 19 nt, Human
gacuuccuguccagcucca

SEQ ID NO: 2619029 - RNA, 20 nt, Human
gacuuccuguccagcuccaa

SEQ ID NO: 2619030 - RNA, 21 nt, Human
gacuuccuguccagcuccaac

SEQ ID NO: 2619031 - RNA, 22 nt, Human
gacuuccuguccagcuccaacc

SEQ ID NO: 2619032 - RNA, 18 nt, Human
gacuuccuguccagcucc

SEQ ID NO: 2619033 - RNA, 14 nt, Human
gacuuccuugagac

SEQ ID NO: 2619034 - RNA, 14 nt, Human
gacuuccuuacuaa

SEQ ID NO: 2619035 - RNA, 21 nt, Human
gaguguguaauuuaaaauugu

SEQ ID NO: 2619036 - RNA, 22 nt, Human
gaguguguaauuuaaaauugug

SEQ ID NO: 2619037 - RNA, 16 nt, Human
gaguguguauuguucc

SEQ ID NO: 2619038 - RNA, 17 nt, Human
gaguguguauuguuccc

SEQ ID NO: 2619039 - RNA, 18 nt, Human
gaguguguauuguuccca

SEQ ID NO: 2619040 - RNA, 19 nt, Human
gacuucccacucuagggca

SEQ ID NO: 2619041 - RNA, 20 nt, Human
gacuucaguauguugucaaa

SEQ ID NO: 2619042 - RNA, 19 nt, Human
gacuucaguauguugucaa

SEQ ID NO: 2619043 - RNA, 17 nt, Human
gacuucaguauguuguc

SEQ ID NO: 2619044 - RNA, 13 nt, Human
gacuucaguaugu

SEQ ID NO: 2619045 - RNA, 24 nt, Human
gacuucaucucccaccuagcagca

SEQ ID NO: 2619046 - RNA, 21 nt, Human
gacuucaguauguugucaaag

SEQ ID NO: 2619047 - RNA, 21 nt, Human
gacuucauagauuuccuuccc

SEQ ID NO: 2619048 - RNA, 15 nt, Human
gacuucauuaauaau

SEQ ID NO: 2619049 - RNA, 16 nt, Human
gacuucauuuuuccua

SEQ ID NO: 2619050 - RNA, 15 nt, Human
gacuucauuuuuccu

SEQ ID NO: 2619051 - RNA, 16 nt, Human
gaguucaaugaucuag

SEQ ID NO: 2619052 - RNA, 15 nt, Human
gaguucaaugaucua

SEQ ID NO: 2619053 - RNA, 14 nt, Human
gaguucaaugaucu

SEQ ID NO: 2619054 - RNA, 13 nt, Human
gaguucaaugauc

SEQ ID NO: 2619055 - RNA, 12 nt, Human
gaguucaaugau

SEQ ID NO: 2619056 - RNA, 11 nt, Human
gaguucaauga

SEQ ID NO: 2619057 - RNA, 22 nt, Human
gaguucaauaaaugucuguuga

SEQ ID NO: 2619058 - RNA, 23 nt, Human
gaguuauuuuaauuaucuuuucu

SEQ ID NO: 2619059 - RNA, 11 nt, Human
gagugugugca

SEQ ID NO: 2619060 - RNA, 19 nt, Human
gaguguguauuguucccag

SEQ ID NO: 2619061 - RNA, 21 nt, Human
gaguguguccaagugugugug

SEQ ID NO: 2619062 - RNA, 19 nt, Human
gagugugugcaugugugug

SEQ ID NO: 2619063 - RNA, 17 nt, Human
gaguguguuugucaccg

SEQ ID NO: 2619064 - RNA, 19 nt, Human
gaguguuccccuuccacug

SEQ ID NO: 2619065 - RNA, 15 nt, Human
gaguucucagggcuc

SEQ ID NO: 2619066 - RNA, 14 nt, Human
gaguucucagggcu

SEQ ID NO: 2619067 - RNA, 13 nt, Human
gaguucucagggc

SEQ ID NO: 2619068 - RNA, 14 nt, Human
gaguucaguuuuac

SEQ ID NO: 2619069 - RNA, 11 nt, Human
gaguucuacau

SEQ ID NO: 2619070 - RNA, 19 nt, Human
gaguucgagaccagccugg

SEQ ID NO: 2619071 - RNA, 20 nt, Human
gaguucgagaccagccuggc

SEQ ID NO: 2619072 - RNA, 21 nt, Human
gaguucgagaccagccuggcc

SEQ ID NO: 2619073 - RNA, 19 nt, Human
gaguucgaggcugcaguca

SEQ ID NO: 2619074 - RNA, 15 nt, Human
gaguucaauggcugc

SEQ ID NO: 2619075 - RNA, 21 nt, Human
gaguucaaugaucuagguuua

SEQ ID NO: 2619076 - RNA, 19 nt, Human
gaguucaaugaucuagguu

SEQ ID NO: 2619077 - RNA, 18 nt, Human
gaguucaaugaucuaggu

SEQ ID NO: 2619078 - RNA, 19 nt, Human
gaguucaauggcugcugaa

SEQ ID NO: 2619079 - RNA, 16 nt, Human
gaguucaauggcugcu

SEQ ID NO: 2619080 - RNA, 22 nt, Human
gaguucacuucaucuucucagc

SEQ ID NO: 2619081 - RNA, 19 nt, Human
gaguucagguagcugcccc

SEQ ID NO: 2619082 - RNA, 21 nt, Human
gaguucagguagcugccccug

SEQ ID NO: 2619083 - RNA, 22 nt, Human
gaguucagguagcugccccugg

SEQ ID NO: 2619084 - RNA, 18 nt, Human
gaguucgagaccagccug

SEQ ID NO: 2619085 - RNA, 16 nt, Human
gauaauaauauauguu

SEQ ID NO: 2619086 - RNA, 12 nt, Human
gauaauacacca

SEQ ID NO: 2619087 - RNA, 23 nt, Human
gauaauacaccacuacauucugu

SEQ ID NO: 2619088 - RNA, 24 nt, Human
gauaauacaccacuacauucuguu

SEQ ID NO: 2619089 - RNA, 23 nt, Human
gauaaguucuuaugccauguuaa

SEQ ID NO: 2619090 - RNA, 15 nt, Human
gauaaccagcuguaa

SEQ ID NO: 2619091 - RNA, 16 nt, Human
gauaacagcacugacu

SEQ ID NO: 2619092 - RNA, 17 nt, Human
gauaaccuauaugauuu

SEQ ID NO: 2619093 - RNA, 23 nt, Human
gauaaccuauaugauuuauaguu

SEQ ID NO: 2619094 - RNA, 21 nt, Human
gauaaccuguacuucaaguua

SEQ ID NO: 2619095 - RNA, 13 nt, Human
gauaacuagaugg

SEQ ID NO: 2619096 - RNA, 22 nt, Human
gauaaccuguacuucaaguuaa

SEQ ID NO: 2619097 - RNA, 22 nt, Human
gauaaaauuauagaugggaaug

SEQ ID NO: 2619098 - RNA, 19 nt, Human
gauaaaauuauagauggga

SEQ ID NO: 2619099 - RNA, 18 nt, Human
gauaaaaugagguucaac

SEQ ID NO: 2619100 - RNA, 15 nt, Human
gauaaagauaucaau

SEQ ID NO: 2619101 - RNA, 11 nt, Human
gauaaagauga

SEQ ID NO: 2619102 - RNA, 17 nt, Human
gauaacaaccuggagac

SEQ ID NO: 2619103 - RNA, 13 nt, Human
gauaacagcacug

SEQ ID NO: 2619104 - RNA, 16 nt, Human
gauaacaaccuggaga

SEQ ID NO: 2619105 - RNA, 15 nt, Human
gauaacaagaucuuu

SEQ ID NO: 2619106 - RNA, 13 nt, Human
gauaaauuauaag

SEQ ID NO: 2619107 - RNA, 12 nt, Human
gauaaauuauaa

SEQ ID NO: 2619108 - RNA, 16 nt, Human
gauaaauuccacugga

SEQ ID NO: 2619109 - RNA, 13 nt, Human
gauaaacaguagu

SEQ ID NO: 2619110 - RNA, 14 nt, Human
gauaaaauaaauga

SEQ ID NO: 2619111 - RNA, 13 nt, Human
gaguucugguucc

SEQ ID NO: 2619112 - RNA, 20 nt, Human
gaguucucagggcuccugcc

SEQ ID NO: 2619113 - RNA, 19 nt, Human
gaguucucagggcuccugc

SEQ ID NO: 2619114 - RNA, 18 nt, Human
gaguucucagggcuccug

SEQ ID NO: 2619115 - RNA, 16 nt, Human
gaguucucagggcucc

SEQ ID NO: 2619116 - RNA, 21 nt, Human
gaguucucagggcuccugccu

SEQ ID NO: 2619117 - RNA, 22 nt, Human
gauccuccugcagaccacgccc

SEQ ID NO: 2619118 - RNA, 12 nt, Human
gauccugagcca

SEQ ID NO: 2619119 - RNA, 16 nt, Human
gauccucccaggcuuc

SEQ ID NO: 2619120 - RNA, 23 nt, Human
gauccuagccuuauccucugauc

SEQ ID NO: 2619121 - RNA, 22 nt, Human
gauccuagccuuauccucugau

SEQ ID NO: 2619122 - RNA, 21 nt, Human
gauccuccugcagaccacgcc

SEQ ID NO: 2619123 - RNA, 16 nt, Human
gauccuccugcagacc

SEQ ID NO: 2619124 - RNA, 15 nt, Human
gauccuccugcagac

SEQ ID NO: 2619125 - RNA, 14 nt, Human
gauccuggaaauca

SEQ ID NO: 2619126 - RNA, 12 nt, Human
gauccuggaggc

SEQ ID NO: 2619127 - RNA, 15 nt, Human
gauccuggaggccca

SEQ ID NO: 2619128 - RNA, 16 nt, Human
gauccuggaggcccag

SEQ ID NO: 2619129 - RNA, 17 nt, Human
gauccuggaggcccagu

SEQ ID NO: 2619130 - RNA, 16 nt, Human
gauccugucuuuaagg

SEQ ID NO: 2619131 - RNA, 19 nt, Human
gauccugucuuuaaggaaa

SEQ ID NO: 2619132 - RNA, 20 nt, Human
gauccugucuuuaaggaaaa

SEQ ID NO: 2619133 - RNA, 12 nt, Human
gauccugugaag

SEQ ID NO: 2619134 - RNA, 17 nt, Human
gaucuaagccuuuccau

SEQ ID NO: 2619135 - RNA, 23 nt, Human
gaucuaaggaugucacagggcca

SEQ ID NO: 2619136 - RNA, 23 nt, Human
gauccuggguggucugcaggcag

SEQ ID NO: 2619137 - RNA, 18 nt, Human
gaucuaagccuuuccaua

SEQ ID NO: 2619138 - RNA, 18 nt, Human
gaucuaggaagacuuugg

SEQ ID NO: 2619139 - RNA, 14 nt, Human
gaucuaggaagacu

SEQ ID NO: 2619140 - RNA, 13 nt, Human
gaucuaggaagac

SEQ ID NO: 2619141 - RNA, 17 nt, Human
gaucuaccccuuacuua

SEQ ID NO: 2619142 - RNA, 21 nt, Human
gaucuaaggaugucacagggc

SEQ ID NO: 2619143 - RNA, 18 nt, Human
gaucuaccagcauaaaua

SEQ ID NO: 2619144 - RNA, 19 nt, Human
gaucuagguuuaacucaga

SEQ ID NO: 2619145 - RNA, 18 nt, Human
gaucuagguuuaacucag

SEQ ID NO: 2619146 - RNA, 17 nt, Human
gaucuagguuuaacuca

SEQ ID NO: 2619147 - RNA, 16 nt, Human
gaucuagguuuaacuc

SEQ ID NO: 2619148 - RNA, 21 nt, Human
gaucuagguuuaacucagauc

SEQ ID NO: 2619149 - RNA, 20 nt, Human
gaucuagguuuaacucagau

SEQ ID NO: 2619150 - RNA, 22 nt, Human
gaucuagguuuaacucagauca

SEQ ID NO: 2619151 - RNA, 15 nt, Human
gaucugguccuaccc

SEQ ID NO: 2619152 - RNA, 14 nt, Human
gaucugguuuugcu

SEQ ID NO: 2619153 - RNA, 16 nt, Human
gaucugguuugacucc

SEQ ID NO: 2619154 - RNA, 16 nt, Human
gaucugguccuaccca

SEQ ID NO: 2619155 - RNA, 20 nt, Human
gaucuaggaagacuuuggaa

SEQ ID NO: 2619156 - RNA, 22 nt, Human
gaucuagaauguguuuucugaa

SEQ ID NO: 2619157 - RNA, 21 nt, Human
gaucuagaauguguuuucuga

SEQ ID NO: 2619158 - RNA, 20 nt, Human
gaucuagaauguguuuucug

SEQ ID NO: 2619159 - RNA, 16 nt, Human
gaucuagaauguguuu

SEQ ID NO: 2619160 - RNA, 15 nt, Human
gaucuagguuuaacu

SEQ ID NO: 2619161 - RNA, 14 nt, Human
gaucuagguuuaac

SEQ ID NO: 2619162 - RNA, 15 nt, Human
gaucuaggugaggau

SEQ ID NO: 2619163 - RNA, 14 nt, Human
gaucccucucugga

SEQ ID NO: 2619164 - RNA, 23 nt, Human
gaucccucuacagagcuucccug

SEQ ID NO: 2619165 - RNA, 21 nt, Human
gaucccucccccccaugcacu

SEQ ID NO: 2619166 - RNA, 23 nt, Human
gaucccucccccccaugcacugu

SEQ ID NO: 2619167 - RNA, 14 nt, Human
gaucccucaucugu

SEQ ID NO: 2619168 - RNA, 18 nt, Human
gaucccucaucugucccu

SEQ ID NO: 2619169 - RNA, 13 nt, Human
gaucccucccccc

SEQ ID NO: 2619170 - RNA, 19 nt, Human
gaucccucccccccaugca

SEQ ID NO: 2619171 - RNA, 20 nt, Human
gaucccuguguugucucuag

SEQ ID NO: 2619172 - RNA, 19 nt, Human
gaucccuguguugucucua

SEQ ID NO: 2619173 - RNA, 18 nt, Human
gaucccuguguugucucu

SEQ ID NO: 2619174 - RNA, 14 nt, Human
gaucccuguguugu

SEQ ID NO: 2619175 - RNA, 24 nt, Human
gaucccuguguugucucuagagca

SEQ ID NO: 2619176 - RNA, 21 nt, Human
gaucccuguguugucucuaga

SEQ ID NO: 2619177 - RNA, 20 nt, Human
gaucccuguuacccagagaa

SEQ ID NO: 2619178 - RNA, 18 nt, Human
gaucccuguuacccagag

SEQ ID NO: 2619179 - RNA, 18 nt, Human
gaucauagguauuucaaa

SEQ ID NO: 2619180 - RNA, 14 nt, Human
gaucaggcucugcc

SEQ ID NO: 2619181 - RNA, 17 nt, Human
gaucauagguauuucaa

SEQ ID NO: 2619182 - RNA, 19 nt, Human
gaucauauacgugaaaauu

SEQ ID NO: 2619183 - RNA, 12 nt, Human
gaucccucaucu

SEQ ID NO: 2619184 - RNA, 13 nt, Human
gaucauccacugu

SEQ ID NO: 2619185 - RNA, 17 nt, Human
gauccucccaccucagc

SEQ ID NO: 2619186 - RNA, 14 nt, Human
gauccuccaggugc

SEQ ID NO: 2619187 - RNA, 16 nt, Human
gauccucccaccucag

SEQ ID NO: 2619188 - RNA, 18 nt, Human
gauccgacugcuuuggac

SEQ ID NO: 2619189 - RNA, 17 nt, Human
gauccgacugcuuugga

SEQ ID NO: 2619190 - RNA, 14 nt, Human
gauccgacugcuuu

SEQ ID NO: 2619191 - RNA, 20 nt, Human
gauccgacugcuuuggaccu

SEQ ID NO: 2619192 - RNA, 23 nt, Human
gauccgacuugaauuuucccacu

SEQ ID NO: 2619193 - RNA, 23 nt, Human
gauccuaaugaaugcauaaaaug

SEQ ID NO: 2619194 - RNA, 20 nt, Human
gauccuagccuuauccucug

SEQ ID NO: 2619195 - RNA, 18 nt, Human
gauccuaagggcucaccg

SEQ ID NO: 2619196 - RNA, 18 nt, Human
gauccuaggcauuugcug

SEQ ID NO: 2619197 - RNA, 23 nt, Human
gaugcaccagcccuuagcaggga

SEQ ID NO: 2619198 - RNA, 15 nt, Human
gaugcaccagcccuu

SEQ ID NO: 2619199 - RNA, 14 nt, Human
gaugagaggaaauc

SEQ ID NO: 2619200 - RNA, 14 nt, Human
gaugcaccagcccu

SEQ ID NO: 2619201 - RNA, 18 nt, Human
gaugaccuugaaugaugc

SEQ ID NO: 2619202 - RNA, 23 nt, Human
gaugagaaauaaaguuucuguug

SEQ ID NO: 2619203 - RNA, 20 nt, Human
gaugaccuugaaugaugcca

SEQ ID NO: 2619204 - RNA, 15 nt, Human
gaugaccuggauaac

SEQ ID NO: 2619205 - RNA, 18 nt, Human
gaugagagcccagaggua

SEQ ID NO: 2619206 - RNA, 17 nt, Human
gaugagagcccagaggu

SEQ ID NO: 2619207 - RNA, 15 nt, Human
gaugagagcccagag

SEQ ID NO: 2619208 - RNA, 14 nt, Human
gaugagagcccaga

SEQ ID NO: 2619209 - RNA, 23 nt, Human
gaugagacuuccaaaccugacag

SEQ ID NO: 2619210 - RNA, 14 nt, Human
gaugagaagagggg

SEQ ID NO: 2619211 - RNA, 14 nt, Human
gaugcagggcaguc

SEQ ID NO: 2619212 - RNA, 22 nt, Human
gaugcaggugagcccauggccc

SEQ ID NO: 2619213 - RNA, 15 nt, Human
gaugcagggcaguca

SEQ ID NO: 2619214 - RNA, 21 nt, Human
gaugagagcccagagguaaca

SEQ ID NO: 2619215 - RNA, 16 nt, Human
gaugagaggaaaucac

SEQ ID NO: 2619216 - RNA, 16 nt, Human
gaugccugguggcagc

SEQ ID NO: 2619217 - RNA, 15 nt, Human
gaugccugguggcag

SEQ ID NO: 2619218 - RNA, 14 nt, Human
gaugccugguggca

SEQ ID NO: 2619219 - RNA, 14 nt, Human
gaugcagugcuucc

SEQ ID NO: 2619220 - RNA, 21 nt, Human
gaugaaaugaggucagagccu

SEQ ID NO: 2619221 - RNA, 15 nt, Human
gaugaaaugagguca

SEQ ID NO: 2619222 - RNA, 19 nt, Human
gaucuugagcaaguuccuu

SEQ ID NO: 2619223 - RNA, 19 nt, Human
gaucuucuuuauaauucua

SEQ ID NO: 2619224 - RNA, 15 nt, Human
gaucuguccucagcc

SEQ ID NO: 2619225 - RNA, 16 nt, Human
gaucuguccucagccu

SEQ ID NO: 2619226 - RNA, 17 nt, Human
gaucuguccucagccuu

SEQ ID NO: 2619227 - RNA, 18 nt, Human
gaucuguccucagccuug

SEQ ID NO: 2619228 - RNA, 22 nt, Human
gaucuucuguggguuucuaaag

SEQ ID NO: 2619229 - RNA, 19 nt, Human
gaucugucacaccagccau

SEQ ID NO: 2619230 - RNA, 18 nt, Human
gaucugucacaccagcca

SEQ ID NO: 2619231 - RNA, 17 nt, Human
gaucugucacaccagcc

SEQ ID NO: 2619232 - RNA, 24 nt, Human
gaucugguuuugcuauuagacugu

SEQ ID NO: 2619233 - RNA, 15 nt, Human
gaucuguccaaggaa

SEQ ID NO: 2619234 - RNA, 20 nt, Human
gaucugucacaccagccaua

SEQ ID NO: 2619235 - RNA, 14 nt, Human
gaucuguccucagc

SEQ ID NO: 2619236 - RNA, 18 nt, Human
gaucugguuuugcuauua

SEQ ID NO: 2619237 - RNA, 16 nt, Human
gaucugguuuugcuau

SEQ ID NO: 2619238 - RNA, 15 nt, Human
gaucuguauauacaa

SEQ ID NO: 2619239 - RNA, 20 nt, Human
gaucuguauauacaauaaca

SEQ ID NO: 2619240 - RNA, 16 nt, Human
gaucugucacaccagc

SEQ ID NO: 2619241 - RNA, 18 nt, Human
gaugaccagaacaagguu

SEQ ID NO: 2619242 - RNA, 23 nt, Human
gaugacccugcgaaggggcccug

SEQ ID NO: 2619243 - RNA, 17 nt, Human
gaugaccccuccccuaa

SEQ ID NO: 2619244 - RNA, 16 nt, Human
gaugaccccuccccua

SEQ ID NO: 2619245 - RNA, 13 nt, Human
gaugaccagaaca

SEQ ID NO: 2619246 - RNA, 12 nt, Human
gaugaccccucc

SEQ ID NO: 2619247 - RNA, 16 nt, Human
gaugaaugccguggau

SEQ ID NO: 2619248 - RNA, 15 nt, Human
gaugaaugccgugga

SEQ ID NO: 2619249 - RNA, 14 nt, Human
gaugaauguaugug

SEQ ID NO: 2619250 - RNA, 13 nt, Human
gaugaauguaugu

SEQ ID NO: 2619251 - RNA, 14 nt, Human
gaugaauguauuua

SEQ ID NO: 2619252 - RNA, 16 nt, Human
gaugaauuaaauuuaa

SEQ ID NO: 2619253 - RNA, 19 nt, Human
gaugacaaauggagaagaa

SEQ ID NO: 2619254 - RNA, 20 nt, Human
gaugacaaaaauucaacuca

SEQ ID NO: 2619255 - RNA, 22 nt, Human
gaugaaguuuuacauuguugag

SEQ ID NO: 2619256 - RNA, 23 nt, Human
gaugaaguuuuacauuguugagc

SEQ ID NO: 2619257 - RNA, 17 nt, Human
gaugaaguuuuacauug

SEQ ID NO: 2619258 - RNA, 13 nt, Human
gaugaaugagaau

SEQ ID NO: 2619259 - RNA, 19 nt, Human
gaugaaugaggucccaggc

SEQ ID NO: 2619260 - RNA, 23 nt, Human
gaugaaugaggucccaggcagag

SEQ ID NO: 2619261 - RNA, 15 nt, Human
gaugaaugauaaacu

SEQ ID NO: 2619262 - RNA, 13 nt, Human
gaucuuuaaaaua

SEQ ID NO: 2619263 - RNA, 16 nt, Human
gaugaaauguaaauac

SEQ ID NO: 2619264 - RNA, 23 nt, Human
gaugaaauuuucuagacuuucug

SEQ ID NO: 2619265 - RNA, 19 nt, Human
gaucuuggcuuacugcagc

SEQ ID NO: 2619266 - RNA, 23 nt, Human
gaugaacccaggacgcuucugaa

SEQ ID NO: 2619267 - RNA, 22 nt, Human
gaugaacccaggacgcuucuga

SEQ ID NO: 2619268 - RNA, 13 nt, Human
gaugaacccagga

SEQ ID NO: 2619269 - RNA, 19 nt, Human
gauucauuuuuaaucauga

SEQ ID NO: 2619270 - RNA, 18 nt, Human
gauuccaaagaguagaau

SEQ ID NO: 2619271 - RNA, 19 nt, Human
gauuccaaagaguagaauu

SEQ ID NO: 2619272 - RNA, 23 nt, Human
gauuccaaagaguagaauugcau

SEQ ID NO: 2619273 - RNA, 15 nt, Human
gauucccaagcucug

SEQ ID NO: 2619274 - RNA, 21 nt, Human
gauucauuuccugcccuuccu

SEQ ID NO: 2619275 - RNA, 16 nt, Human
gauucauuuccugccc

SEQ ID NO: 2619276 - RNA, 13 nt, Human
gauucauuuccug

SEQ ID NO: 2619277 - RNA, 10 nt, Human
gauucauuuu

SEQ ID NO: 2619278 - RNA, 23 nt, Human
gauucauuuccugcccuuccuca

SEQ ID NO: 2619279 - RNA, 19 nt, Human
gauucauuuuaacaucuga

SEQ ID NO: 2619280 - RNA, 23 nt, Human
gauucaucucucagaagggaggc

SEQ ID NO: 2619281 - RNA, 21 nt, Human
gauucaugccaauuagcaauu

SEQ ID NO: 2619282 - RNA, 11 nt, Human
gauucaugugg

SEQ ID NO: 2619283 - RNA, 17 nt, Human
gauucagguauguugcc

SEQ ID NO: 2619284 - RNA, 20 nt, Human
gauucaguguuaaaugugau

SEQ ID NO: 2619285 - RNA, 15 nt, Human
gauucaguuuucauu

SEQ ID NO: 2619286 - RNA, 22 nt, Human
gauucaguuuucauuugguuca

SEQ ID NO: 2619287 - RNA, 22 nt, Human
gauucaucucucagaagggagg

SEQ ID NO: 2619288 - RNA, 16 nt, Human
gauucauaguaacuuc

SEQ ID NO: 2619289 - RNA, 13 nt, Human
gauucaggaaugu

SEQ ID NO: 2619290 - RNA, 12 nt, Human
gauucaggcugc

SEQ ID NO: 2619291 - RNA, 13 nt, Human
gauucaggcugcu

SEQ ID NO: 2619292 - RNA, 16 nt, Human
gauucaggcugcuugg

SEQ ID NO: 2619293 - RNA, 18 nt, Human
gauucagacagcugccug

SEQ ID NO: 2619294 - RNA, 17 nt, Human
gauucagacagcugccu

SEQ ID NO: 2619295 - RNA, 14 nt, Human
gauucagacagcug

SEQ ID NO: 2619296 - RNA, 13 nt, Human
gauucagacagcu

SEQ ID NO: 2619297 - RNA, 21 nt, Human
gauuacaagcgugagccacug

SEQ ID NO: 2619298 - RNA, 13 nt, Human
gauuacaagcgug

SEQ ID NO: 2619299 - RNA, 15 nt, Human
gauuaauuaaaugca

SEQ ID NO: 2619300 - RNA, 12 nt, Human
gauguuuccaga

SEQ ID NO: 2619301 - RNA, 13 nt, Human
gauguuuccagac

SEQ ID NO: 2619302 - RNA, 19 nt, Human
gauguuuccagacuuccuu

SEQ ID NO: 2619303 - RNA, 14 nt, Human
gauguucuggcccu

SEQ ID NO: 2619304 - RNA, 23 nt, Human
gauguuucuuuuguauguaaaug

SEQ ID NO: 2619305 - RNA, 20 nt, Human
gauguuucuuuuguauguaa

SEQ ID NO: 2619306 - RNA, 19 nt, Human
gauguuucuuuuguaugua

SEQ ID NO: 2619307 - RNA, 18 nt, Human
gauguuucuuuuguaugu

SEQ ID NO: 2619308 - RNA, 13 nt, Human
gauguuuguggcc

SEQ ID NO: 2619309 - RNA, 14 nt, Human
gauguuuguggccu

SEQ ID NO: 2619310 - RNA, 15 nt, Human
gauguuuguggccuc

SEQ ID NO: 2619311 - RNA, 16 nt, Human
gauguuuguggccuca

SEQ ID NO: 2619312 - RNA, 17 nt, Human
gauguuuguggccucag

SEQ ID NO: 2619313 - RNA, 14 nt, Human
gauuaaguaaugau

SEQ ID NO: 2619314 - RNA, 18 nt, Human
gauguuuguggccucaga

SEQ ID NO: 2619315 - RNA, 22 nt, Human
gauuaaguaaugauaacuggaa

SEQ ID NO: 2619316 - RNA, 19 nt, Human
gauuaauccagaauaacua

SEQ ID NO: 2619317 - RNA, 15 nt, Human
gauuaauccagaaua

SEQ ID NO: 2619318 - RNA, 18 nt, Human
gauuaauaugaaaacuua

SEQ ID NO: 2619319 - RNA, 14 nt, Human
gauuaauaugaaaa

SEQ ID NO: 2619320 - RNA, 18 nt, Human
gauuaauauggggaugca

SEQ ID NO: 2619321 - RNA, 16 nt, Human
gaugcuagaacucccu

SEQ ID NO: 2619322 - RNA, 14 nt, Human
gaugcgcacugcau

SEQ ID NO: 2619323 - RNA, 22 nt, Human
gaugcagugcucgcuguugcug

SEQ ID NO: 2619324 - RNA, 20 nt, Human
gaugccugugaacugaacuc

SEQ ID NO: 2619325 - RNA, 17 nt, Human
gaugccugguggcagcu

SEQ ID NO: 2619326 - RNA, 18 nt, Human
gauguucuagcauggcug

SEQ ID NO: 2619327 - RNA, 21 nt, Human
gauguucucuaucauuuaaua

SEQ ID NO: 2619328 - RNA, 19 nt, Human
gauguucucuaucauuuaa

SEQ ID NO: 2619329 - RNA, 15 nt, Human
gauguucucuaucau

SEQ ID NO: 2619330 - RNA, 21 nt, Human
gaugcgguggcucacgccugu

SEQ ID NO: 2619331 - RNA, 16 nt, Human
gaugcgguggcucacg

SEQ ID NO: 2619332 - RNA, 19 nt, Human
gauguucuaagucuuucca

SEQ ID NO: 2619333 - RNA, 22 nt, Human
gauucuuuccugaggcugggcu

SEQ ID NO: 2619334 - RNA, 20 nt, Human
gauucuuuccugaggcuggg

SEQ ID NO: 2619335 - RNA, 19 nt, Human
gauugaaaacuuuucucag

SEQ ID NO: 2619336 - RNA, 15 nt, Human
gauugaaaacuuuuc

SEQ ID NO: 2619337 - RNA, 14 nt, Human
gauugaaaacuuuu

SEQ ID NO: 2619338 - RNA, 20 nt, Human
gauuccacuacaccuggcug

SEQ ID NO: 2619339 - RNA, 17 nt, Human
gauuccacuacaccugg

SEQ ID NO: 2619340 - RNA, 20 nt, Human
gauucuuuuuaaaguguuuc

SEQ ID NO: 2619341 - RNA, 16 nt, Human
gauugcaacaggcugg

SEQ ID NO: 2619342 - RNA, 19 nt, Human
gauucuuuccugaggcugg

SEQ ID NO: 2619343 - RNA, 20 nt, Human
gauuccaaguucucaccucu

SEQ ID NO: 2619344 - RNA, 22 nt, Human
gauuccaaccccaacuccagua

SEQ ID NO: 2619345 - RNA, 17 nt, Human
gauuccaaccccaacuc

SEQ ID NO: 2619346 - RNA, 17 nt, Human
gauucccaagcucugcu

SEQ ID NO: 2619347 - RNA, 16 nt, Human
gauucccaagcucugc

SEQ ID NO: 2619348 - RNA, 12 nt, Human
gauuggcucacc

SEQ ID NO: 2619349 - RNA, 20 nt, Human
gauuggcucacacugagaau

SEQ ID NO: 2619350 - RNA, 18 nt, Human
gauuggcucacacugaga

SEQ ID NO: 2619351 - RNA, 17 nt, Human
gauuggcucacacugag

SEQ ID NO: 2619352 - RNA, 22 nt, Human
gauugcugccacuuuuuaacua

SEQ ID NO: 2619353 - RNA, 14 nt, Human
gauugcuuaaaaua

SEQ ID NO: 2619354 - RNA, 21 nt, Human
gauugcugccccaucagugcu

SEQ ID NO: 2619355 - RNA, 17 nt, Human
gauugcuuaaaauagca

SEQ ID NO: 2619356 - RNA, 18 nt, Human
gauugcuuaaaauagcaa

SEQ ID NO: 2619357 - RNA, 16 nt, Human
gauugcuugagcccag

SEQ ID NO: 2619358 - RNA, 19 nt, Human
gauugcuugagcccaggag

SEQ ID NO: 2619359 - RNA, 18 nt, Human
gauugcaacaggcugggc

SEQ ID NO: 2619360 - RNA, 17 nt, Human
gauugcaacaggcuggg

SEQ ID NO: 2619361 - RNA, 16 nt, Human
gauugcugccacuuuu

SEQ ID NO: 2619362 - RNA, 13 nt, Human
gauugcugccacu

SEQ ID NO: 2619363 - RNA, 18 nt, Human
gauugcugauaauaaauu

SEQ ID NO: 2619364 - RNA, 16 nt, Human
gauugcugccccauca

SEQ ID NO: 2619365 - RNA, 20 nt, Human
gauugcugccccaucagugc

SEQ ID NO: 2619366 - RNA, 15 nt, Human
gauugcaacaggcug

SEQ ID NO: 2619367 - RNA, 20 nt, Human
gauugcuaaauguaacaguc

SEQ ID NO: 2619368 - RNA, 16 nt, Human
gauugcuaaauguaac

SEQ ID NO: 2619369 - RNA, 15 nt, Human
gauugcuaugaauga

SEQ ID NO: 2619370 - RNA, 22 nt, Human
gauuucuguuuagauaauacac

SEQ ID NO: 2619371 - RNA, 21 nt, Human
gauuucuguuuagauaauaca

SEQ ID NO: 2619372 - RNA, 18 nt, Human
gauuucaugcuaucucug

SEQ ID NO: 2619373 - RNA, 20 nt, Human
gauuucaugcuaucucugug

SEQ ID NO: 2619374 - RNA, 16 nt, Human
gauuucaugcuaucuc

SEQ ID NO: 2619375 - RNA, 13 nt, Human
gauuucaugauuu

SEQ ID NO: 2619376 - RNA, 20 nt, Human
gauuucauuucaacuguuug

SEQ ID NO: 2619377 - RNA, 17 nt, Human
gauuucuuuccagaggg

SEQ ID NO: 2619378 - RNA, 15 nt, Human
gauuucuuuccagag

SEQ ID NO: 2619379 - RNA, 11 nt, Human
gauuucuuucc

SEQ ID NO: 2619380 - RNA, 15 nt, Human
gauuuccagccaggg

SEQ ID NO: 2619381 - RNA, 21 nt, Human
gauuucauuucaacuguuugc

SEQ ID NO: 2619382 - RNA, 22 nt, Human
gauuugaacucagaucugucug

SEQ ID NO: 2619383 - RNA, 16 nt, Human
gauuugaacucagauc

SEQ ID NO: 2619384 - RNA, 13 nt, Human
gauuugaacucag

SEQ ID NO: 2619385 - RNA, 19 nt, Human
gauuuguuaaugauagcua

SEQ ID NO: 2619386 - RNA, 23 nt, Human
gauugggaauaaauaugccucuc

SEQ ID NO: 2619387 - RNA, 15 nt, Human
gauugggaauaaaua

SEQ ID NO: 2619388 - RNA, 16 nt, Human
gauuggcuuuaaacac

SEQ ID NO: 2619389 - RNA, 19 nt, Human
gauuggcuuguguguuuca

SEQ ID NO: 2619390 - RNA, 18 nt, Human
gauuggcuuguguguuuc

SEQ ID NO: 2619391 - RNA, 18 nt, Human
gauuggcucacccaagca

SEQ ID NO: 2619392 - RNA, 22 nt, Human
gauuggcucacccaagcaaggc

SEQ ID NO: 2619393 - RNA, 16 nt, Human
gauugggaauccgccc

SEQ ID NO: 2619394 - RNA, 13 nt, Human
gauugggacagag

SEQ ID NO: 2619395 - RNA, 15 nt, Human
gauugggccccugcc

SEQ ID NO: 2619396 - RNA, 13 nt, Human
gauuguucaucau

SEQ ID NO: 2619397 - RNA, 16 nt, Human
gauuguuaaaauaacu

SEQ ID NO: 2619398 - RNA, 18 nt, Human
gauuguucgggugugcaa

SEQ ID NO: 2619399 - RNA, 21 nt, Human
gauuguuaagucuaaauauuu

SEQ ID NO: 2619400 - RNA, 15 nt, Human
gauuuaaaagggaag

SEQ ID NO: 2619401 - RNA, 15 nt, Human
gauuuaaaacaugua

SEQ ID NO: 2619402 - RNA, 18 nt, Human
gauuguuuuaucaugaca

SEQ ID NO: 2619403 - RNA, 12 nt, Human
gauuguuuuauc

SEQ ID NO: 2619404 - RNA, 13 nt, Human
gauuguuguuugc

SEQ ID NO: 2619405 - RNA, 17 nt, Human
gauuguuugcucugaga

SEQ ID NO: 2619406 - RNA, 22 nt, Human
gauuucaucugcucuccuuccu

SEQ ID NO: 2619407 - RNA, 21 nt, Human
gauuucaucugcucuccuucc

SEQ ID NO: 2619408 - RNA, 20 nt, Human
gauuucaucugcucuccuuc

SEQ ID NO: 2619409 - RNA, 17 nt, Human
gauuucaucugcucucc

SEQ ID NO: 2619410 - RNA, 17 nt, Human
gcaauccugcaagaaca

SEQ ID NO: 2619411 - RNA, 14 nt, Human
gcaauccugucuuu

SEQ ID NO: 2619412 - RNA, 21 nt, Human
gcaaucguaauguacagaugg

SEQ ID NO: 2619413 - RNA, 21 nt, Human
gcaaucuauuaauagcugccu

SEQ ID NO: 2619414 - RNA, 14 nt, Human
gcaaugaacacuua

SEQ ID NO: 2619415 - RNA, 17 nt, Human
gcaaugaagucucugaa

SEQ ID NO: 2619416 - RNA, 19 nt, Human
gcaaugaagucucugaagu

SEQ ID NO: 2619417 - RNA, 18 nt, Human
gcaaugacagguaaauua

SEQ ID NO: 2619418 - RNA, 15 nt, Human
gcaaugaaaaauucu

SEQ ID NO: 2619419 - RNA, 19 nt, Human
gcaaucucggcucauugaa

SEQ ID NO: 2619420 - RNA, 23 nt, Human
gcaaucuauuaauagcugccuua

SEQ ID NO: 2619421 - RNA, 16 nt, Human
gcaaugaaaaauucuc

SEQ ID NO: 2619422 - RNA, 18 nt, Human
gcaagguccggcccaucc

SEQ ID NO: 2619423 - RNA, 19 nt, Human
gcaaggucuggccucaggu

SEQ ID NO: 2619424 - RNA, 22 nt, Human
gcaaggucuggccucagguggg

SEQ ID NO: 2619425 - RNA, 21 nt, Human
gcaaggugcucacaccccauu

SEQ ID NO: 2619426 - RNA, 14 nt, Human
gcaaggugcucaca

SEQ ID NO: 2619427 - RNA, 20 nt, Human
gcaagguggcuccagcacca

SEQ ID NO: 2619428 - RNA, 20 nt, Human
gcaagguuuaggcugguggc

SEQ ID NO: 2619429 - RNA, 21 nt, Human
gcaagguuuaggcugguggcc

SEQ ID NO: 2619430 - RNA, 22 nt, Human
gcaagguuuaggcugguggccc

SEQ ID NO: 2619431 - RNA, 24 nt, Human
gcaagguuuaggcugguggcccag

SEQ ID NO: 2619432 - RNA, 23 nt, Human
gcaagguuuaggcugguggccca

SEQ ID NO: 2619433 - RNA, 14 nt, Human
gcaaguaugugagu

SEQ ID NO: 2619434 - RNA, 18 nt, Human
gcaaguaugugagugugu

SEQ ID NO: 2619435 - RNA, 23 nt, Human
gcaaguauguuuuagcauguguu

SEQ ID NO: 2619436 - RNA, 18 nt, Human
gcaaggcugucaauuaca

SEQ ID NO: 2619437 - RNA, 14 nt, Human
gcaaggcugucaau

SEQ ID NO: 2619438 - RNA, 14 nt, Human
gcaaggucauuuuu

SEQ ID NO: 2619439 - RNA, 18 nt, Human
gcaaggcugugcucccug

SEQ ID NO: 2619440 - RNA, 13 nt, Human
gcaaggcugugcu

SEQ ID NO: 2619441 - RNA, 12 nt, Human
gcaagggacugu

SEQ ID NO: 2619442 - RNA, 21 nt, Human
gcaagggaauuucuucaacuc

SEQ ID NO: 2619443 - RNA, 12 nt, Human
gcaaggcugugc

SEQ ID NO: 2619444 - RNA, 21 nt, Human
gcaaggacacagaugaaacac

SEQ ID NO: 2619445 - RNA, 20 nt, Human
gcaaggaccaggacucccuc

SEQ ID NO: 2619446 - RNA, 15 nt, Human
gcaaggaaggaaaga

SEQ ID NO: 2619447 - RNA, 13 nt, Human
gcaaggaaggaaa

SEQ ID NO: 2619448 - RNA, 14 nt, Human
gcaaggaaggaaag

SEQ ID NO: 2619449 - RNA, 14 nt, Human
gcaaggaccaggac

SEQ ID NO: 2619450 - RNA, 15 nt, Human
gcaaggaccaggacu

SEQ ID NO: 2619451 - RNA, 13 nt, Human
gcaaggcugucaa

SEQ ID NO: 2619452 - RNA, 16 nt, Human
gcaaggaaaaacaggu

SEQ ID NO: 2619453 - RNA, 17 nt, Human
gcaagcuuggcuguaga

SEQ ID NO: 2619454 - RNA, 21 nt, Human
gcaagcuuggcuguagaagga

SEQ ID NO: 2619455 - RNA, 22 nt, Human
gcaagcuuggcuguagaaggag

SEQ ID NO: 2619456 - RNA, 13 nt, Human
gcaagcuggguaa

SEQ ID NO: 2619457 - RNA, 13 nt, Human
gcaagauauuuau

SEQ ID NO: 2619458 - RNA, 21 nt, Human
gcaagcacugcaugggcaagc

SEQ ID NO: 2619459 - RNA, 20 nt, Human
gcaagcaccuccugccucga

SEQ ID NO: 2619460 - RNA, 18 nt, Human
gcaagcaccuccugccuc

SEQ ID NO: 2619461 - RNA, 20 nt, Human
gcaagcaauccuagguaggg

SEQ ID NO: 2619462 - RNA, 14 nt, Human
gcaagcacaucugc

SEQ ID NO: 2619463 - RNA, 18 nt, Human
gcaagcaagaaacacugg

SEQ ID NO: 2619464 - RNA, 14 nt, Human
gcaagauugcuuaa

SEQ ID NO: 2619465 - RNA, 16 nt, Human
gcaagcaccuccugcc

SEQ ID NO: 2619466 - RNA, 15 nt, Human
gcaagcaccuccugc

SEQ ID NO: 2619467 - RNA, 12 nt, Human
gcaagauguggg

SEQ ID NO: 2619468 - RNA, 16 nt, Human
gcaagauauuuauaua

SEQ ID NO: 2619469 - RNA, 16 nt, Human
gcaagaugugggcagu

SEQ ID NO: 2619470 - RNA, 18 nt, Human
gcaagauucugaaacauu

SEQ ID NO: 2619471 - RNA, 13 nt, Human
gcaagauugcuua

SEQ ID NO: 2619472 - RNA, 22 nt, Human
gcaagauuuuccacaagauucc

SEQ ID NO: 2619473 - RNA, 22 nt, Human
gcaacuuuguauaaaagggacu

SEQ ID NO: 2619474 - RNA, 15 nt, Human
gcaagauauuuauau

SEQ ID NO: 2619475 - RNA, 17 nt, Human
gcaacuuuaagcagcuc

SEQ ID NO: 2619476 - RNA, 21 nt, Human
gcaacuugucuuuuucuggac

SEQ ID NO: 2619477 - RNA, 22 nt, Human
gcaacuugucuuuuucuggacu

SEQ ID NO: 2619478 - RNA, 23 nt, Human
gcaacuugucuuuuucuggacug

SEQ ID NO: 2619479 - RNA, 21 nt, Human
gcaacuguuaugaaauaaaga

SEQ ID NO: 2619480 - RNA, 20 nt, Human
gcaacuguuaugaaauaaag

SEQ ID NO: 2619481 - RNA, 18 nt, Human
gcaacuguuaugaaauaa

SEQ ID NO: 2619482 - RNA, 12 nt, Human
gcaacuguuaug

SEQ ID NO: 2619483 - RNA, 23 nt, Human
gcaacugucuauuucugcugaau

SEQ ID NO: 2619484 - RNA, 20 nt, Human
gcaacugucuauuucugcug

SEQ ID NO: 2619485 - RNA, 19 nt, Human
gcaacugucuauuucugcu

SEQ ID NO: 2619486 - RNA, 19 nt, Human
gcaacuugucuuuuucugg

SEQ ID NO: 2619487 - RNA, 18 nt, Human
gcaacugcauuggcuuug

SEQ ID NO: 2619488 - RNA, 19 nt, Human
gcaacugaggcagacagca

SEQ ID NO: 2619489 - RNA, 21 nt, Human
gcaacugaggcagacagcagc

SEQ ID NO: 2619490 - RNA, 22 nt, Human
gcaacugaggcagacagcagcu

SEQ ID NO: 2619491 - RNA, 18 nt, Human
gcaacugagucugcggga

SEQ ID NO: 2619492 - RNA, 19 nt, Human
gcaacugaauaaauaccuc

SEQ ID NO: 2619493 - RNA, 18 nt, Human
gcaacugaauaaauaccu

SEQ ID NO: 2619494 - RNA, 13 nt, Human
gcaacugaauaaa

SEQ ID NO: 2619495 - RNA, 15 nt, Human
gcaacucuugauuau

SEQ ID NO: 2619496 - RNA, 12 nt, Human
gcaacugaauaa

SEQ ID NO: 2619497 - RNA, 21 nt, Human
gcaacugaauaaauaccucuu

SEQ ID NO: 2619498 - RNA, 13 nt, Human
gcaacugaggcag

SEQ ID NO: 2619499 - RNA, 14 nt, Human
gcaacugaggcaga

SEQ ID NO: 2619500 - RNA, 15 nt, Human
gcaacugaggcagac

SEQ ID NO: 2619501 - RNA, 12 nt, Human
gcaaaugugaau

SEQ ID NO: 2619502 - RNA, 21 nt, Human
gcaaaugucagauacaaugua

SEQ ID NO: 2619503 - RNA, 18 nt, Human
gcaaaugucaucagaacu

SEQ ID NO: 2619504 - RNA, 13 nt, Human
gcaaaugacuuug

SEQ ID NO: 2619505 - RNA, 12 nt, Human
gcaaaucuugaa

SEQ ID NO: 2619506 - RNA, 20 nt, Human
gcaaaugcccaagggaaaga

SEQ ID NO: 2619507 - RNA, 14 nt, Human
gcaaaugcccaagg

SEQ ID NO: 2619508 - RNA, 12 nt, Human
gcaaaugacuuu

SEQ ID NO: 2619509 - RNA, 11 nt, Human
gcaaaugcccu

SEQ ID NO: 2619510 - RNA, 20 nt, Human
gcaaacuuuauuuuguguuu

SEQ ID NO: 2619511 - RNA, 23 nt, Human
gcaaacuuuguaugucauuuccu

SEQ ID NO: 2619512 - RNA, 23 nt, Human
gcaaacuuggaauuuguaaccuc

SEQ ID NO: 2619513 - RNA, 15 nt, Human
gcaaagacagaagcc

SEQ ID NO: 2619514 - RNA, 16 nt, Human
gcaaagacagaagccu

SEQ ID NO: 2619515 - RNA, 17 nt, Human
gcaaagacagaagccuc

SEQ ID NO: 2619516 - RNA, 21 nt, Human
gcaaagacuauucccuucuaa

SEQ ID NO: 2619517 - RNA, 20 nt, Human
gcaaagagccagcacccuga

SEQ ID NO: 2619518 - RNA, 13 nt, Human
gcaaagaggcaag

SEQ ID NO: 2619519 - RNA, 22 nt, Human
gcaaagacuauucccuucuaac

SEQ ID NO: 2619520 - RNA, 12 nt, Human
gcaaauaaaagu

SEQ ID NO: 2619521 - RNA, 23 nt, Human
gcaaaguucccuacuuccuguga

SEQ ID NO: 2619522 - RNA, 19 nt, Human
gcaaauaauuuccuggugu

SEQ ID NO: 2619523 - RNA, 22 nt, Human
gcaaauaauuuccuggugugaa

SEQ ID NO: 2619524 - RNA, 15 nt, Human
gcaaagucuaaaguu

SEQ ID NO: 2619525 - RNA, 14 nt, Human
gcaaagucuaaagu

SEQ ID NO: 2619526 - RNA, 23 nt, Human
gcaaagucaugcaaaggcuggga

SEQ ID NO: 2619527 - RNA, 22 nt, Human
gcaaagucaugcaaaggcuggg

SEQ ID NO: 2619528 - RNA, 16 nt, Human
gcaaagucaugcaaag

SEQ ID NO: 2619529 - RNA, 21 nt, Human
gcaaagucaugcaaaggcugg

SEQ ID NO: 2619530 - RNA, 14 nt, Human
gcaaagaggcaaga

SEQ ID NO: 2619531 - RNA, 21 nt, Human
gcaaagucuaaaguuuacagu

SEQ ID NO: 2619532 - RNA, 16 nt, Human
gcaaagucuaaaguuu

SEQ ID NO: 2619533 - RNA, 22 nt, Human
gcaaagucuaaaguuuacagua

SEQ ID NO: 2619534 - RNA, 20 nt, Human
gcaaagugaagacacuggcu

SEQ ID NO: 2619535 - RNA, 17 nt, Human
gcaaagugagggccgag

SEQ ID NO: 2619536 - RNA, 21 nt, Human
gcaaaccaucauugaaaucuu

SEQ ID NO: 2619537 - RNA, 20 nt, Human
gcaaaccaucauugaaaucu

SEQ ID NO: 2619538 - RNA, 19 nt, Human
gcaaaccaucauugaaauc

SEQ ID NO: 2619539 - RNA, 17 nt, Human
gcaaaccaucauugaaa

SEQ ID NO: 2619540 - RNA, 19 nt, Human
gauuuguuuuuguauuuuu

SEQ ID NO: 2619541 - RNA, 23 nt, Human
gauuuuaaaccauaaaaagcuga

SEQ ID NO: 2619542 - RNA, 22 nt, Human
gauuuuaaagagugaaaaauga

SEQ ID NO: 2619543 - RNA, 16 nt, Human
gcaaaccaucauugaa

SEQ ID NO: 2619544 - RNA, 21 nt, Human
gauuuuaaauucacaauagaa

SEQ ID NO: 2619545 - RNA, 20 nt, Human
gauuuuaacaaaagcaagac

SEQ ID NO: 2619546 - RNA, 12 nt, Human
gauuuuaacaau

SEQ ID NO: 2619547 - RNA, 14 nt, Human
gauuuuaacaauaa

SEQ ID NO: 2619548 - RNA, 15 nt, Human
gauuuuaacaauaac

SEQ ID NO: 2619549 - RNA, 14 nt, Human
gcaaacucugcugu

SEQ ID NO: 2619550 - RNA, 13 nt, Human
gcaaacucugcug

SEQ ID NO: 2619551 - RNA, 19 nt, Human
gcaaacucacugcucaaga

SEQ ID NO: 2619552 - RNA, 19 nt, Human
gcaaacuaagcccccgcug

SEQ ID NO: 2619553 - RNA, 17 nt, Human
gcaaacgcugccugccg

SEQ ID NO: 2619554 - RNA, 17 nt, Human
gcaaacucacugcucaa

SEQ ID NO: 2619555 - RNA, 18 nt, Human
gcaaacuuuauuuugugu

SEQ ID NO: 2619556 - RNA, 14 nt, Human
gcaaacgcugccug

SEQ ID NO: 2619557 - RNA, 15 nt, Human
gcaaacgcugccugc

SEQ ID NO: 2619558 - RNA, 16 nt, Human
gcaaacgcugccugcc

SEQ ID NO: 2619559 - RNA, 18 nt, Human
gcaaacgcugccugcccg

SEQ ID NO: 2619560 - RNA, 19 nt, Human
gcaaaccugaccccugcuc

SEQ ID NO: 2619561 - RNA, 21 nt, Human
gcaaaccugaccccugcucag

SEQ ID NO: 2619562 - RNA, 14 nt, Human
gcaaacgcuaaaga

SEQ ID NO: 2619563 - RNA, 22 nt, Human
gcaaacccccuuugugcugugg

SEQ ID NO: 2619564 - RNA, 18 nt, Human
gcaaacccccuuugugcu

SEQ ID NO: 2619565 - RNA, 19 nt, Human
gcaaacccaucaacaaaaa

SEQ ID NO: 2619566 - RNA, 23 nt, Human
gauuuuaacaauaacuacugugu

SEQ ID NO: 2619567 - RNA, 17 nt, Human
gauuuuaacaauaacua

SEQ ID NO: 2619568 - RNA, 23 nt, Human
gcagagaaugaaagggcccagag

SEQ ID NO: 2619569 - RNA, 22 nt, Human
gcagagaaugaaagggcccaga

SEQ ID NO: 2619570 - RNA, 20 nt, Human
gcagaaggaaaaauguguaa

SEQ ID NO: 2619571 - RNA, 15 nt, Human
gcagaaggaaaaaug

SEQ ID NO: 2619572 - RNA, 21 nt, Human
gcagaaggaaaaauguguaau

SEQ ID NO: 2619573 - RNA, 20 nt, Human
gcagagaaucauacuuagca

SEQ ID NO: 2619574 - RNA, 13 nt, Human
gcagagacacuaa

SEQ ID NO: 2619575 - RNA, 21 nt, Human
gcagagaauucucuuauccaa

SEQ ID NO: 2619576 - RNA, 21 nt, Human
gcagagaaugaaagggcccag

SEQ ID NO: 2619577 - RNA, 20 nt, Human
gcagagaaugaaagggccca

SEQ ID NO: 2619578 - RNA, 19 nt, Human
gcagagaaugaaagggccc

SEQ ID NO: 2619579 - RNA, 13 nt, Human
gcagaaggaaaaa

SEQ ID NO: 2619580 - RNA, 23 nt, Human
gcagagucuugcuaccucaguca

SEQ ID NO: 2619581 - RNA, 15 nt, Human
gcagaguugaagaca

SEQ ID NO: 2619582 - RNA, 22 nt, Human
gcagaguccugcacaguuuucu

SEQ ID NO: 2619583 - RNA, 15 nt, Human
gcagagucuugcuac

SEQ ID NO: 2619584 - RNA, 13 nt, Human
gcagagucagcag

SEQ ID NO: 2619585 - RNA, 14 nt, Human
gcagagucagcaga

SEQ ID NO: 2619586 - RNA, 14 nt, Human
gcagagucacacgg

SEQ ID NO: 2619587 - RNA, 13 nt, Human
gcagagucacacg

SEQ ID NO: 2619588 - RNA, 23 nt, Human
gcagagucacacgggggcagcug

SEQ ID NO: 2619589 - RNA, 12 nt, Human
gcagagucagca

SEQ ID NO: 2619590 - RNA, 15 nt, Human
gcagagaccaucccu

SEQ ID NO: 2619591 - RNA, 14 nt, Human
gcagagaccauccc

SEQ ID NO: 2619592 - RNA, 17 nt, Human
gcagagaccaucccuga

SEQ ID NO: 2619593 - RNA, 17 nt, Human
gcagagacaggaccuga

SEQ ID NO: 2619594 - RNA, 15 nt, Human
gcagagacagagagg

SEQ ID NO: 2619595 - RNA, 17 nt, Human
gcagaguugaagacaga

SEQ ID NO: 2619596 - RNA, 16 nt, Human
gcagaguugaagacag

SEQ ID NO: 2619597 - RNA, 19 nt, Human
gcagaguugaagacagagc

SEQ ID NO: 2619598 - RNA, 18 nt, Human
gcagaugcaaagaggcaa

SEQ ID NO: 2619599 - RNA, 17 nt, Human
gcagaugcaaagaggca

SEQ ID NO: 2619600 - RNA, 18 nt, Human
gcagaugcagagagccau

SEQ ID NO: 2619601 - RNA, 19 nt, Human
gcagaugcaaagaggcaag

SEQ ID NO: 2619602 - RNA, 22 nt, Human
gcagaugcaaagaggcaagagg

SEQ ID NO: 2619603 - RNA, 13 nt, Human
gcagaugcaauga

SEQ ID NO: 2619604 - RNA, 17 nt, Human
gcagaugcagagagcca

SEQ ID NO: 2619605 - RNA, 15 nt, Human
gcagaugcagagagc

SEQ ID NO: 2619606 - RNA, 19 nt, Human
gcagaugcaaugacucagg

SEQ ID NO: 2619607 - RNA, 22 nt, Human
gcagauggaaugcuguguuaaa

SEQ ID NO: 2619608 - RNA, 19 nt, Human
gcagauuuugcccuugaca

SEQ ID NO: 2619609 - RNA, 18 nt, Human
gcagauggaaugcugugu

SEQ ID NO: 2619610 - RNA, 15 nt, Human
gcagaugcuggucau

SEQ ID NO: 2619611 - RNA, 18 nt, Human
gcagcacucacacaggac

SEQ ID NO: 2619612 - RNA, 16 nt, Human
gcagcacucacacagg

SEQ ID NO: 2619613 - RNA, 19 nt, Human
gcagcaccguucugugcac

SEQ ID NO: 2619614 - RNA, 17 nt, Human
gcagcaccguucugugc

SEQ ID NO: 2619615 - RNA, 18 nt, Human
gcagcaccguucugugca

SEQ ID NO: 2619616 - RNA, 22 nt, Human
gcagcacagcaaggaggcuggc

SEQ ID NO: 2619617 - RNA, 12 nt, Human
gcagcacagcaa

SEQ ID NO: 2619618 - RNA, 14 nt, Human
gcagcacagagagg

SEQ ID NO: 2619619 - RNA, 12 nt, Human
gcagcaauaaag

SEQ ID NO: 2619620 - RNA, 20 nt, Human
gcaggaccucugaaacccug

SEQ ID NO: 2619621 - RNA, 14 nt, Human
gcaggaccugccug

SEQ ID NO: 2619622 - RNA, 15 nt, Human
gcaggaccugccugu

SEQ ID NO: 2619623 - RNA, 16 nt, Human
gcaggaccugccugua

SEQ ID NO: 2619624 - RNA, 19 nt, Human
gcaggagauugagaaggag

SEQ ID NO: 2619625 - RNA, 18 nt, Human
gcaggagauugagaagga

SEQ ID NO: 2619626 - RNA, 20 nt, Human
gcaggaccugccuguagccc

SEQ ID NO: 2619627 - RNA, 14 nt, Human
gcaggagauugaga

SEQ ID NO: 2619628 - RNA, 14 nt, Human
gcaggaccaggacu

SEQ ID NO: 2619629 - RNA, 13 nt, Human
gcaggaccaggac

SEQ ID NO: 2619630 - RNA, 12 nt, Human
gcaggaccagga

SEQ ID NO: 2619631 - RNA, 15 nt, Human
gcaggaccaggacua

SEQ ID NO: 2619632 - RNA, 11 nt, Human
gcaggaccuca

SEQ ID NO: 2619633 - RNA, 14 nt, Human
gcaggaccucagag

SEQ ID NO: 2619634 - RNA, 15 nt, Human
gcaggaccucagagu

SEQ ID NO: 2619635 - RNA, 12 nt, Human
gcaggaccucug

SEQ ID NO: 2619636 - RNA, 16 nt, Human
gcaggaccucagaguc

SEQ ID NO: 2619637 - RNA, 22 nt, Human
gcaggaccucagaguccaggcc

SEQ ID NO: 2619638 - RNA, 23 nt, Human
gcaggaccucagaguccaggccc

SEQ ID NO: 2619639 - RNA, 20 nt, Human
gcagcgccaagcaaccuggg

SEQ ID NO: 2619640 - RNA, 18 nt, Human
gcagcgccaagcaaccug

SEQ ID NO: 2619641 - RNA, 13 nt, Human
gcagcgccaggcu

SEQ ID NO: 2619642 - RNA, 18 nt, Human
gcagcgcccuuccucucc

SEQ ID NO: 2619643 - RNA, 16 nt, Human
gcagcgcccuuccucu

SEQ ID NO: 2619644 - RNA, 14 nt, Human
gcagcgccaggcug

SEQ ID NO: 2619645 - RNA, 21 nt, Human
gcagcgcccuuccucuccacc

SEQ ID NO: 2619646 - RNA, 19 nt, Human
gcagcgcccuuccucucca

SEQ ID NO: 2619647 - RNA, 22 nt, Human
gcagcgaccgcccccuccucua

SEQ ID NO: 2619648 - RNA, 18 nt, Human
gcagcgaccgcccccucc

SEQ ID NO: 2619649 - RNA, 17 nt, Human
gcagcgaccgcccccuc

SEQ ID NO: 2619650 - RNA, 16 nt, Human
gcagcgaccgcccccu

SEQ ID NO: 2619651 - RNA, 22 nt, Human
gcagcgagcuaugaucgcgcca

SEQ ID NO: 2619652 - RNA, 15 nt, Human
gcagcgccaagcaac

SEQ ID NO: 2619653 - RNA, 24 nt, Human
gcagcgaguuguggaaagccucug

SEQ ID NO: 2619654 - RNA, 21 nt, Human
gcaggaguuucguuuucaaaa

SEQ ID NO: 2619655 - RNA, 20 nt, Human
gcaggaguuucguuuucaaa

SEQ ID NO: 2619656 - RNA, 20 nt, Human
gcaggaggaggugccaacag

SEQ ID NO: 2619657 - RNA, 18 nt, Human
gcaggagggcccuaccug

SEQ ID NO: 2619658 - RNA, 22 nt, Human
gcaggagggcccuaccugauug

SEQ ID NO: 2619659 - RNA, 15 nt, Human
gcaggaggaggugcc

SEQ ID NO: 2619660 - RNA, 14 nt, Human
gcaggaggaggugc

SEQ ID NO: 2619661 - RNA, 11 nt, Human
gcaggaggaag

SEQ ID NO: 2619662 - RNA, 13 nt, Human
gcaggaggaggug

SEQ ID NO: 2619663 - RNA, 23 nt, Human
gcaggagauugagaaggagagaa

SEQ ID NO: 2619664 - RNA, 13 nt, Human
gcaggagcaguau

SEQ ID NO: 2619665 - RNA, 17 nt, Human
gcaggagcaguaucaug

SEQ ID NO: 2619666 - RNA, 22 nt, Human
gcaggagcaguaucaugaagcc

SEQ ID NO: 2619667 - RNA, 14 nt, Human
gcaggagccugagc

SEQ ID NO: 2619668 - RNA, 22 nt, Human
gcaggagauugagaaggagaga

SEQ ID NO: 2619669 - RNA, 21 nt, Human
gcaggagauugagaaggagag

SEQ ID NO: 2619670 - RNA, 14 nt, Human
gcagccuggacccu

SEQ ID NO: 2619671 - RNA, 23 nt, Human
gcagccugcgccaccgcccagag

SEQ ID NO: 2619672 - RNA, 18 nt, Human
gcagccuggacauagaga

SEQ ID NO: 2619673 - RNA, 22 nt, Human
gcagcgaccaccccugccucca

SEQ ID NO: 2619674 - RNA, 20 nt, Human
gcagcgaccaccccugccuc

SEQ ID NO: 2619675 - RNA, 14 nt, Human
gcagcgaccgcccc

SEQ ID NO: 2619676 - RNA, 16 nt, Human
gcagcgaccaccccug

SEQ ID NO: 2619677 - RNA, 15 nt, Human
gcagcgaccaccccu

SEQ ID NO: 2619678 - RNA, 14 nt, Human
gcagcgaccacccc

SEQ ID NO: 2619679 - RNA, 13 nt, Human
gcagcgaccaccc

SEQ ID NO: 2619680 - RNA, 12 nt, Human
gcagccuggagg

SEQ ID NO: 2619681 - RNA, 13 nt, Human
gcagccuggaggc

SEQ ID NO: 2619682 - RNA, 22 nt, Human
gcagccucaaccuccugggcua

SEQ ID NO: 2619683 - RNA, 21 nt, Human
gcagccucaaccuccugggcu

SEQ ID NO: 2619684 - RNA, 18 nt, Human
gcagccguuugagaagaa

SEQ ID NO: 2619685 - RNA, 22 nt, Human
gcagccguuugagaagaaaaca

SEQ ID NO: 2619686 - RNA, 18 nt, Human
gcagccgugccuucagcu

SEQ ID NO: 2619687 - RNA, 12 nt, Human
gcagcagggcua

SEQ ID NO: 2619688 - RNA, 17 nt, Human
gcagcagggcuacccug

SEQ ID NO: 2619689 - RNA, 15 nt, Human
gcagcagggaugccc

SEQ ID NO: 2619690 - RNA, 17 nt, Human
gcagcagggaugcccug

SEQ ID NO: 2619691 - RNA, 19 nt, Human
gcagcagggaugcccugga

SEQ ID NO: 2619692 - RNA, 20 nt, Human
gcagcagggaugcccuggag

SEQ ID NO: 2619693 - RNA, 19 nt, Human
gcagcacucacacaggacc

SEQ ID NO: 2619694 - RNA, 12 nt, Human
gcagcagaaggg

SEQ ID NO: 2619695 - RNA, 19 nt, Human
gcagcaggugcugcuaccc

SEQ ID NO: 2619696 - RNA, 18 nt, Human
gcagcaggugcugcuacc

SEQ ID NO: 2619697 - RNA, 17 nt, Human
gcagcaggugcugcuac

SEQ ID NO: 2619698 - RNA, 16 nt, Human
gcagcaggugcugcua

SEQ ID NO: 2619699 - RNA, 15 nt, Human
gcagcaggugcugcu

SEQ ID NO: 2619700 - RNA, 14 nt, Human
gcagcaggugcugc

SEQ ID NO: 2619701 - RNA, 13 nt, Human
gcagcaggugcug

SEQ ID NO: 2619702 - RNA, 12 nt, Human
gcagcaggugcu

SEQ ID NO: 2619703 - RNA, 19 nt, Human
gcagcagggcuacccugag

SEQ ID NO: 2619704 - RNA, 20 nt, Human
gcagcagggcuacccugagc

SEQ ID NO: 2619705 - RNA, 20 nt, Human
gcagccucaaccuccugggc

SEQ ID NO: 2619706 - RNA, 19 nt, Human
gcagccucaaccuccuggg

SEQ ID NO: 2619707 - RNA, 17 nt, Human
gcagccgugccuucagc

SEQ ID NO: 2619708 - RNA, 15 nt, Human
gcagccgugccuuca

SEQ ID NO: 2619709 - RNA, 14 nt, Human
gcagccgugccuuc

SEQ ID NO: 2619710 - RNA, 22 nt, Human
gcagcaggugcugcuacccucc

SEQ ID NO: 2619711 - RNA, 20 nt, Human
gcagcaggugcugcuacccu

SEQ ID NO: 2619712 - RNA, 14 nt, Human
gcacugauauuuua

SEQ ID NO: 2619713 - RNA, 22 nt, Human
gcacugaugcugccccucaucu

SEQ ID NO: 2619714 - RNA, 18 nt, Human
gcacugaugcugccccuc

SEQ ID NO: 2619715 - RNA, 19 nt, Human
gcacugaugcugccccuca

SEQ ID NO: 2619716 - RNA, 12 nt, Human
gcacugauuuca

SEQ ID NO: 2619717 - RNA, 15 nt, Human
gcacugauuucacaa

SEQ ID NO: 2619718 - RNA, 14 nt, Human
gcacugggcuuggg

SEQ ID NO: 2619719 - RNA, 23 nt, Human
gcacugggcuuggggaccagagc

SEQ ID NO: 2619720 - RNA, 22 nt, Human
gcacugggcuuggggaccagag

SEQ ID NO: 2619721 - RNA, 13 nt, Human
gcacugcaggggc

SEQ ID NO: 2619722 - RNA, 23 nt, Human
gcacuggggagcccgucucagug

SEQ ID NO: 2619723 - RNA, 22 nt, Human
gcacuggggagcccgucucagu

SEQ ID NO: 2619724 - RNA, 19 nt, Human
gcacuggggagcccgucuc

SEQ ID NO: 2619725 - RNA, 18 nt, Human
gcacuggggagcccgucu

SEQ ID NO: 2619726 - RNA, 20 nt, Human
gcacugauuucacaacagau

SEQ ID NO: 2619727 - RNA, 19 nt, Human
gcacugauuucacaacaga

SEQ ID NO: 2619728 - RNA, 15 nt, Human
gcacuggggagcccg

SEQ ID NO: 2619729 - RNA, 15 nt, Human
gcacugucaagauga

SEQ ID NO: 2619730 - RNA, 20 nt, Human
gcacugucacuuugcucugg

SEQ ID NO: 2619731 - RNA, 18 nt, Human
gcacugucacuuugcucu

SEQ ID NO: 2619732 - RNA, 16 nt, Human
gcacugucacuuugcu

SEQ ID NO: 2619733 - RNA, 15 nt, Human
gcacuguaugcugga

SEQ ID NO: 2619734 - RNA, 16 nt, Human
gcacuguaugcuggac

SEQ ID NO: 2619735 - RNA, 14 nt, Human
gcagaaggaagacu

SEQ ID NO: 2619736 - RNA, 13 nt, Human
gcagaaggaagac

SEQ ID NO: 2619737 - RNA, 21 nt, Human
gcagaagacaccagagcagau

SEQ ID NO: 2619738 - RNA, 20 nt, Human
gcagaagacaccagagcaga

SEQ ID NO: 2619739 - RNA, 18 nt, Human
gcagaagacaccagagca

SEQ ID NO: 2619740 - RNA, 16 nt, Human
gcagaagacaccagag

SEQ ID NO: 2619741 - RNA, 13 nt, Human
gcagaagcauuaa

SEQ ID NO: 2619742 - RNA, 12 nt, Human
gcagaaggaaga

SEQ ID NO: 2619743 - RNA, 12 nt, Human
gcacuguccugc

SEQ ID NO: 2619744 - RNA, 21 nt, Human
gcacugucacuuugcucuggg

SEQ ID NO: 2619745 - RNA, 23 nt, Human
gcacugucccuugccucaaugcc

SEQ ID NO: 2619746 - RNA, 18 nt, Human
gcacugucccuugccuca

SEQ ID NO: 2619747 - RNA, 17 nt, Human
gcacugucccuugccuc

SEQ ID NO: 2619748 - RNA, 17 nt, Human
gcacuguccugcuccac

SEQ ID NO: 2619749 - RNA, 16 nt, Human
gcacuguccugcucca

SEQ ID NO: 2619750 - RNA, 15 nt, Human
gcacuguccugcucc

SEQ ID NO: 2619751 - RNA, 14 nt, Human
gcacuguccugcuc

SEQ ID NO: 2619752 - RNA, 19 nt, Human
gcacuguccugcuccacag

SEQ ID NO: 2619753 - RNA, 18 nt, Human
gcacuguccugcuccaca

SEQ ID NO: 2619754 - RNA, 20 nt, Human
gcacuguccugcuccacagu

SEQ ID NO: 2619755 - RNA, 14 nt, Human
gcagaagacaguau

SEQ ID NO: 2619756 - RNA, 22 nt, Human
gcagaagaaugggaauauuuua

SEQ ID NO: 2619757 - RNA, 21 nt, Human
gcagaagaauugaacccagga

SEQ ID NO: 2619758 - RNA, 15 nt, Human
gcagaagacaccaga

SEQ ID NO: 2619759 - RNA, 14 nt, Human
gcagaagacaccag

SEQ ID NO: 2619760 - RNA, 23 nt, Human
gcagaagaauugaacccaggagg

SEQ ID NO: 2619761 - RNA, 19 nt, Human
gcaccucugaccuaucacu

SEQ ID NO: 2619762 - RNA, 21 nt, Human
gcaccugauggaaaagauaua

SEQ ID NO: 2619763 - RNA, 20 nt, Human
gcaccugcagguugggccau

SEQ ID NO: 2619764 - RNA, 15 nt, Human
gcaccugcagguugg

SEQ ID NO: 2619765 - RNA, 21 nt, Human
gcaccugcagguugggccaua

SEQ ID NO: 2619766 - RNA, 22 nt, Human
gcaccugcauccguaguucccu

SEQ ID NO: 2619767 - RNA, 13 nt, Human
gcaccugccagcc

SEQ ID NO: 2619768 - RNA, 14 nt, Human
gcaccugccagccu

SEQ ID NO: 2619769 - RNA, 15 nt, Human
gcaccugccagccug

SEQ ID NO: 2619770 - RNA, 16 nt, Human
gcaccugccagccugg

SEQ ID NO: 2619771 - RNA, 17 nt, Human
gcaccugccagccuggc

SEQ ID NO: 2619772 - RNA, 22 nt, Human
gcaccugccagccuggcuucug

SEQ ID NO: 2619773 - RNA, 15 nt, Human
gcaccugcccccugg

SEQ ID NO: 2619774 - RNA, 16 nt, Human
gcaccugcccccuggu

SEQ ID NO: 2619775 - RNA, 17 nt, Human
gcaccugcccccuggug

SEQ ID NO: 2619776 - RNA, 18 nt, Human
gcaccugcccccuggugg

SEQ ID NO: 2619777 - RNA, 20 nt, Human
gcaccugcuucaugcucagc

SEQ ID NO: 2619778 - RNA, 15 nt, Human
gcaccugcucucuug

SEQ ID NO: 2619779 - RNA, 19 nt, Human
gcacuaacguugagccccu

SEQ ID NO: 2619780 - RNA, 17 nt, Human
gcacuaaggugugcucu

SEQ ID NO: 2619781 - RNA, 13 nt, Human
gcaccugccucag

SEQ ID NO: 2619782 - RNA, 14 nt, Human
gcaccugccucagg

SEQ ID NO: 2619783 - RNA, 15 nt, Human
gcaccugccucagga

SEQ ID NO: 2619784 - RNA, 16 nt, Human
gcaccugccucaggac

SEQ ID NO: 2619785 - RNA, 12 nt, Human
gcaccugccuca

SEQ ID NO: 2619786 - RNA, 23 nt, Human
gcaccugcauccguaguucccug

SEQ ID NO: 2619787 - RNA, 21 nt, Human
gcaccugccgaccucguccuc

SEQ ID NO: 2619788 - RNA, 19 nt, Human
gcaccugccgaccucgucc

SEQ ID NO: 2619789 - RNA, 22 nt, Human
gcaccugcccccugguggacag

SEQ ID NO: 2619790 - RNA, 21 nt, Human
gcacuaggggauauaggagag

SEQ ID NO: 2619791 - RNA, 21 nt, Human
gcacuagccuuuggcucugga

SEQ ID NO: 2619792 - RNA, 22 nt, Human
gcacuagccuuuggcucuggag

SEQ ID NO: 2619793 - RNA, 20 nt, Human
gcacuagccuuuggcucugg

SEQ ID NO: 2619794 - RNA, 18 nt, Human
gcacuagccuuuggcucu

SEQ ID NO: 2619795 - RNA, 16 nt, Human
gcacuagccuuuggcu

SEQ ID NO: 2619796 - RNA, 15 nt, Human
gcacuagccuuuggc

SEQ ID NO: 2619797 - RNA, 13 nt, Human
gcacuagccuuug

SEQ ID NO: 2619798 - RNA, 20 nt, Human
gcacugagggccacacuauu

SEQ ID NO: 2619799 - RNA, 16 nt, Human
gcacugagggccacac

SEQ ID NO: 2619800 - RNA, 15 nt, Human
gcacugagggccaca

SEQ ID NO: 2619801 - RNA, 14 nt, Human
gcacugagggccac

SEQ ID NO: 2619802 - RNA, 13 nt, Human
gcacugaugcugc

SEQ ID NO: 2619803 - RNA, 24 nt, Human
gcacugagggccacacuauuacca

SEQ ID NO: 2619804 - RNA, 13 nt, Human
gcacugagggcca

SEQ ID NO: 2619805 - RNA, 12 nt, Human
gcacugagggcc

SEQ ID NO: 2619806 - RNA, 11 nt, Human
gcacugagggc

SEQ ID NO: 2619807 - RNA, 18 nt, Human
gcacugaggaagaacggg

SEQ ID NO: 2619808 - RNA, 17 nt, Human
gcacugaggaccagcca

SEQ ID NO: 2619809 - RNA, 18 nt, Human
gcacuacugacauguggg

SEQ ID NO: 2619810 - RNA, 17 nt, Human
gcacuacucugugccag

SEQ ID NO: 2619811 - RNA, 15 nt, Human
gcacuacucugugcc

SEQ ID NO: 2619812 - RNA, 17 nt, Human
gcacuacugacaugugg

SEQ ID NO: 2619813 - RNA, 19 nt, Human
gcacuacuccucugcagug

SEQ ID NO: 2619814 - RNA, 17 nt, Human
gcacuacuccucugcag

SEQ ID NO: 2619815 - RNA, 16 nt, Human
gcacuacuccucugca

SEQ ID NO: 2619816 - RNA, 13 nt, Human
gcacuacuccucu

SEQ ID NO: 2619817 - RNA, 21 nt, Human
gcacuaccacuccugccaagg

SEQ ID NO: 2619818 - RNA, 23 nt, Human
gcacuaaggggcccggccagcca

SEQ ID NO: 2619819 - RNA, 21 nt, Human
gcacuacucccucaaagcaca

SEQ ID NO: 2619820 - RNA, 18 nt, Human
gcacuaaggugugcucug

SEQ ID NO: 2619821 - RNA, 20 nt, Human
gcacuaacguugagccccug

SEQ ID NO: 2619822 - RNA, 14 nt, Human
gcacuaaggggccc

SEQ ID NO: 2619823 - RNA, 14 nt, Human
gcacaggcccccuu

SEQ ID NO: 2619824 - RNA, 14 nt, Human
gcacaggcagcugg

SEQ ID NO: 2619825 - RNA, 12 nt, Human
gcacaggcagcu

SEQ ID NO: 2619826 - RNA, 23 nt, Human
gcacaugcugagucucccaaggc

SEQ ID NO: 2619827 - RNA, 19 nt, Human
gcacaugccuguaguccca

SEQ ID NO: 2619828 - RNA, 21 nt, Human
gcacaggacaugcgguagcca

SEQ ID NO: 2619829 - RNA, 22 nt, Human
gcacaggacaugcgguagccag

SEQ ID NO: 2619830 - RNA, 16 nt, Human
gcacagcuucauuucc

SEQ ID NO: 2619831 - RNA, 14 nt, Human
gcacaggacaugcg

SEQ ID NO: 2619832 - RNA, 12 nt, Human
gcacagcuggcc

SEQ ID NO: 2619833 - RNA, 21 nt, Human
gcaaugacaucucaggggcca

SEQ ID NO: 2619834 - RNA, 19 nt, Human
gcaaugacaucucaggggc

SEQ ID NO: 2619835 - RNA, 16 nt, Human
gcaaugacaucucagg

SEQ ID NO: 2619836 - RNA, 19 nt, Human
gcaaugacagguaaauuaa

SEQ ID NO: 2619837 - RNA, 20 nt, Human
gcacagccucuuagaugcag

SEQ ID NO: 2619838 - RNA, 14 nt, Human
gcaaugaccuuuca

SEQ ID NO: 2619839 - RNA, 13 nt, Human
gcaaugaccuuuc

SEQ ID NO: 2619840 - RNA, 19 nt, Human
gcacagcuaacauggaagu

SEQ ID NO: 2619841 - RNA, 13 nt, Human
gcacagcuaugaa

SEQ ID NO: 2619842 - RNA, 14 nt, Human
gcacagccuucucc

SEQ ID NO: 2619843 - RNA, 16 nt, Human
gcaaugacaucuucaa

SEQ ID NO: 2619844 - RNA, 21 nt, Human
gcacagcggggccccagggcu

SEQ ID NO: 2619845 - RNA, 16 nt, Human
gcacagcuaugaaggc

SEQ ID NO: 2619846 - RNA, 15 nt, Human
gcaccuccugccucg

SEQ ID NO: 2619847 - RNA, 14 nt, Human
gcaccuccugccuc

SEQ ID NO: 2619848 - RNA, 17 nt, Human
gcacccggccccugcug

SEQ ID NO: 2619849 - RNA, 15 nt, Human
gcacccggccccugc

SEQ ID NO: 2619850 - RNA, 21 nt, Human
gcacccagugagcacucccaa

SEQ ID NO: 2619851 - RNA, 17 nt, Human
gcacccagugagcacuc

SEQ ID NO: 2619852 - RNA, 21 nt, Human
gcacccagccucuagggaccc

SEQ ID NO: 2619853 - RNA, 19 nt, Human
gcacccagccucuagggac

SEQ ID NO: 2619854 - RNA, 23 nt, Human
gcacccagugagcacucccaagu

SEQ ID NO: 2619855 - RNA, 15 nt, Human
gcacccagcccuggu

SEQ ID NO: 2619856 - RNA, 14 nt, Human
gcacccagcccugg

SEQ ID NO: 2619857 - RNA, 13 nt, Human
gcacccagcccug

SEQ ID NO: 2619858 - RNA, 12 nt, Human
gcacccagcccu

SEQ ID NO: 2619859 - RNA, 11 nt, Human
gcacccagccc

SEQ ID NO: 2619860 - RNA, 20 nt, Human
gcacccaccguggaggagga

SEQ ID NO: 2619861 - RNA, 14 nt, Human
gcacccacucugcu

SEQ ID NO: 2619862 - RNA, 14 nt, Human
gcacccggccccug

SEQ ID NO: 2619863 - RNA, 17 nt, Human
gcaccccaaagcuuucc

SEQ ID NO: 2619864 - RNA, 20 nt, Human
gcaccccaaagcuuuccugc

SEQ ID NO: 2619865 - RNA, 13 nt, Human
gcaccccaaggcu

SEQ ID NO: 2619866 - RNA, 20 nt, Human
gcacaugucuuguacaugug

SEQ ID NO: 2619867 - RNA, 13 nt, Human
gcacaugucuugu

SEQ ID NO: 2619868 - RNA, 18 nt, Human
gcaccaccaagccaaggg

SEQ ID NO: 2619869 - RNA, 21 nt, Human
gcacaugucuuguacaugugu

SEQ ID NO: 2619870 - RNA, 11 nt, Human
gcaccacccua

SEQ ID NO: 2619871 - RNA, 20 nt, Human
gcaccacccuagucccuucc

SEQ ID NO: 2619872 - RNA, 22 nt, Human
gcaccacccuagucccuucccc

SEQ ID NO: 2619873 - RNA, 22 nt, Human
gcacaugucuuaaugaaguuug

SEQ ID NO: 2619874 - RNA, 21 nt, Human
gcacaugucuuaaugaaguuu

SEQ ID NO: 2619875 - RNA, 20 nt, Human
gcacaugucuuaaugaaguu

SEQ ID NO: 2619876 - RNA, 17 nt, Human
gcacaugucuuaaugaa

SEQ ID NO: 2619877 - RNA, 15 nt, Human
gcacaugucuuaaug

SEQ ID NO: 2619878 - RNA, 13 nt, Human
gcacaugucuuaa

SEQ ID NO: 2619879 - RNA, 20 nt, Human
gcacaugcugagucucccaa

SEQ ID NO: 2619880 - RNA, 19 nt, Human
gcacaugcugagucuccca

SEQ ID NO: 2619881 - RNA, 22 nt, Human
gcacaugcugagucucccaagg

SEQ ID NO: 2619882 - RNA, 22 nt, Human
gcacauggaggagcuuggggga

SEQ ID NO: 2619883 - RNA, 22 nt, Human
gcaccaccgagagaggcuggga

SEQ ID NO: 2619884 - RNA, 23 nt, Human
gcaccacccuagucccuuccccu

SEQ ID NO: 2619885 - RNA, 19 nt, Human
gcaccacugcacuccagcc

SEQ ID NO: 2619886 - RNA, 19 nt, Human
gcacccaccguggaggagg

SEQ ID NO: 2619887 - RNA, 18 nt, Human
gcacccaccguggaggag

SEQ ID NO: 2619888 - RNA, 17 nt, Human
gcacccacccugggacc

SEQ ID NO: 2619889 - RNA, 14 nt, Human
gcacccacccuggg

SEQ ID NO: 2619890 - RNA, 13 nt, Human
gcacccacccugg

SEQ ID NO: 2619891 - RNA, 22 nt, Human
gcacccacccagcacccagcaa

SEQ ID NO: 2619892 - RNA, 22 nt, Human
gcaggggcucuggagagaaaca

SEQ ID NO: 2619893 - RNA, 20 nt, Human
gcaggggcucuggagagaaa

SEQ ID NO: 2619894 - RNA, 19 nt, Human
gcaggggcucuggagagaa

SEQ ID NO: 2619895 - RNA, 21 nt, Human
gcaggggcucuggagagaaac

SEQ ID NO: 2619896 - RNA, 18 nt, Human
gcaggggcucuggagaga

SEQ ID NO: 2619897 - RNA, 17 nt, Human
gcaggggcucuggagag

SEQ ID NO: 2619898 - RNA, 16 nt, Human
gcaggggcucuggaga

SEQ ID NO: 2619899 - RNA, 14 nt, Human
gcaggggcucugga

SEQ ID NO: 2619900 - RNA, 13 nt, Human
gcaggggcucugg

SEQ ID NO: 2619901 - RNA, 23 nt, Human
gcagggcuacccugagcugaggc

SEQ ID NO: 2619902 - RNA, 21 nt, Human
gcagggcuacccugagcugag

SEQ ID NO: 2619903 - RNA, 22 nt, Human
gcagggcuacccugagcugagg

SEQ ID NO: 2619904 - RNA, 12 nt, Human
gcagggcucagc

SEQ ID NO: 2619905 - RNA, 18 nt, Human
gcagggagggccugggcc

SEQ ID NO: 2619906 - RNA, 22 nt, Human
gcagggagggccugggccccag

SEQ ID NO: 2619907 - RNA, 16 nt, Human
gcagggagggcuucug

SEQ ID NO: 2619908 - RNA, 17 nt, Human
gcagggcuacccugagc

SEQ ID NO: 2619909 - RNA, 20 nt, Human
gcagggcuacccugagcuga

SEQ ID NO: 2619910 - RNA, 12 nt, Human
gcagggagggga

SEQ ID NO: 2619911 - RNA, 16 nt, Human
gcagggccucacacgg

SEQ ID NO: 2619912 - RNA, 13 nt, Human
gcagggaggggac

SEQ ID NO: 2619913 - RNA, 18 nt, Human
gcagggccuugcccagag

SEQ ID NO: 2619914 - RNA, 19 nt, Human
gcagggccuugcccagaga

SEQ ID NO: 2619915 - RNA, 21 nt, Human
gcagggccuugcccagagaug

SEQ ID NO: 2619916 - RNA, 15 nt, Human
gcaggcucacugcca

SEQ ID NO: 2619917 - RNA, 14 nt, Human
gcaggcucacugcc

SEQ ID NO: 2619918 - RNA, 16 nt, Human
gcaggcuagaaccugg

SEQ ID NO: 2619919 - RNA, 20 nt, Human
gcaggcuacacugacacugg

SEQ ID NO: 2619920 - RNA, 16 nt, Human
gcaggcuacacugaca

SEQ ID NO: 2619921 - RNA, 22 nt, Human
gcaggcuaaggcguggagcugc

SEQ ID NO: 2619922 - RNA, 21 nt, Human
gcaggcuaaggcguggagcug

SEQ ID NO: 2619923 - RNA, 20 nt, Human
gcaggcuaaggcguggagcu

SEQ ID NO: 2619924 - RNA, 15 nt, Human
gcaggcuacugucag

SEQ ID NO: 2619925 - RNA, 21 nt, Human
gcaggcucacugccaggccag

SEQ ID NO: 2619926 - RNA, 19 nt, Human
gcaggcucacugccaggcc

SEQ ID NO: 2619927 - RNA, 18 nt, Human
gcaggcucacugccaggc

SEQ ID NO: 2619928 - RNA, 17 nt, Human
gcaggcucacugccagg

SEQ ID NO: 2619929 - RNA, 23 nt, Human
gcaggcucacugccaggccagcc

SEQ ID NO: 2619930 - RNA, 22 nt, Human
gcaggcucacugccaggccagc

SEQ ID NO: 2619931 - RNA, 14 nt, Human
gcagggagggccug

SEQ ID NO: 2619932 - RNA, 17 nt, Human
gcagggagggccugggc

SEQ ID NO: 2619933 - RNA, 20 nt, Human
gcaggauucuuccucccucc

SEQ ID NO: 2619934 - RNA, 21 nt, Human
gcaggauaguugcuccgccuc

SEQ ID NO: 2619935 - RNA, 22 nt, Human
gcaggauaguugcuccgccucu

SEQ ID NO: 2619936 - RNA, 17 nt, Human
gcaggcuaaggcgugga

SEQ ID NO: 2619937 - RNA, 19 nt, Human
gcaggcguucagcucacug

SEQ ID NO: 2619938 - RNA, 13 nt, Human
gcaggcacagcac

SEQ ID NO: 2619939 - RNA, 12 nt, Human
gcaggcacagca

SEQ ID NO: 2619940 - RNA, 21 nt, Human
gcaggauugauuaugcagaau

SEQ ID NO: 2619941 - RNA, 19 nt, Human
gcaggauugauuaugcaga

SEQ ID NO: 2619942 - RNA, 24 nt, Human
gcaggauggccuggccagggccug

SEQ ID NO: 2619943 - RNA, 16 nt, Human
gcaggauggccuggcc

SEQ ID NO: 2619944 - RNA, 16 nt, Human
gcagugggagcugccu

SEQ ID NO: 2619945 - RNA, 15 nt, Human
gcagugcuucucaaa

SEQ ID NO: 2619946 - RNA, 23 nt, Human
gcagugccuuggggaauuuccuc

SEQ ID NO: 2619947 - RNA, 16 nt, Human
gcagugcuucucuaca

SEQ ID NO: 2619948 - RNA, 21 nt, Human
gcagugcucgcuguugcugaa

SEQ ID NO: 2619949 - RNA, 19 nt, Human
gcagugcucgcuguugcug

SEQ ID NO: 2619950 - RNA, 18 nt, Human
gcagugcucgcuguugcu

SEQ ID NO: 2619951 - RNA, 17 nt, Human
gcagugcucgcuguugc

SEQ ID NO: 2619952 - RNA, 23 nt, Human
gcagugcuuccaaggauggacca

SEQ ID NO: 2619953 - RNA, 17 nt, Human
gcagguggcaucucuaa

SEQ ID NO: 2619954 - RNA, 23 nt, Human
gcaggugcugcuacccucccugc

SEQ ID NO: 2619955 - RNA, 22 nt, Human
gcaggugcugcuacccucccug

SEQ ID NO: 2619956 - RNA, 21 nt, Human
gcaggugcugcuacccucccu

SEQ ID NO: 2619957 - RNA, 20 nt, Human
gcaggugcugcuacccuccc

SEQ ID NO: 2619958 - RNA, 15 nt, Human
gcaggugcugcugcg

SEQ ID NO: 2619959 - RNA, 15 nt, Human
gcagugccuugggga

SEQ ID NO: 2619960 - RNA, 22 nt, Human
gcagugccuuccauaauuauga

SEQ ID NO: 2619961 - RNA, 16 nt, Human
gcagugccuuccauaa

SEQ ID NO: 2619962 - RNA, 22 nt, Human
gcagugcgcgugcacguggaga

SEQ ID NO: 2619963 - RNA, 21 nt, Human
gcagguggggagacugggcug

SEQ ID NO: 2619964 - RNA, 13 nt, Human
gcagguggggagg

SEQ ID NO: 2619965 - RNA, 17 nt, Human
gcagguggggagacugg

SEQ ID NO: 2619966 - RNA, 16 nt, Human
gcaggugggagcuuga

SEQ ID NO: 2619967 - RNA, 20 nt, Human
gcaggggcuuguugcaggcu

SEQ ID NO: 2619968 - RNA, 14 nt, Human
gcagguccccagac

SEQ ID NO: 2619969 - RNA, 21 nt, Human
gcagggguggggguggaggcu

SEQ ID NO: 2619970 - RNA, 20 nt, Human
gcagggguggggguggaggc

SEQ ID NO: 2619971 - RNA, 19 nt, Human
gcagggguccuugguguga

SEQ ID NO: 2619972 - RNA, 18 nt, Human
gcagggguggcugccuca

SEQ ID NO: 2619973 - RNA, 17 nt, Human
gcaggggugggggugga

SEQ ID NO: 2619974 - RNA, 22 nt, Human
gcagggguggcugccucauuua

SEQ ID NO: 2619975 - RNA, 11 nt, Human
gcaggucccua

SEQ ID NO: 2619976 - RNA, 10 nt, Human
gcaggucccu

SEQ ID NO: 2619977 - RNA, 13 nt, Human
gcaggucccuaau

SEQ ID NO: 2619978 - RNA, 12 nt, Human
gcaggucccuaa

SEQ ID NO: 2619979 - RNA, 23 nt, Human
gcagguccccagacuccaccaag

SEQ ID NO: 2619980 - RNA, 23 nt, Human
gcagggguggggguggaggcuuc

SEQ ID NO: 2619981 - RNA, 15 nt, Human
gcaggugcugcuacc

SEQ ID NO: 2619982 - RNA, 14 nt, Human
gcaggugcugcuac

SEQ ID NO: 2619983 - RNA, 21 nt, Human
gcaggugccuccaggugugca

SEQ ID NO: 2619984 - RNA, 18 nt, Human
gcaggugccuccaggugu

SEQ ID NO: 2619985 - RNA, 16 nt, Human
gcaggugccuccaggu

SEQ ID NO: 2619986 - RNA, 15 nt, Human
gcaggugccuccagg

SEQ ID NO: 2619987 - RNA, 14 nt, Human
gcaggugccuccag

SEQ ID NO: 2619988 - RNA, 13 nt, Human
gcaggugccucca

SEQ ID NO: 2619989 - RNA, 16 nt, Human
gcauauaacuuauauu

SEQ ID NO: 2619990 - RNA, 23 nt, Human
gcauauaacuuauauuguaagaa

SEQ ID NO: 2619991 - RNA, 15 nt, Human
gcauauaacuuauau

SEQ ID NO: 2619992 - RNA, 23 nt, Human
gcauaggccugggugcuggcugc

SEQ ID NO: 2619993 - RNA, 17 nt, Human
gcauaggccugggugcu

SEQ ID NO: 2619994 - RNA, 22 nt, Human
gcauaggccugggugcuggcug

SEQ ID NO: 2619995 - RNA, 19 nt, Human
gcauaggaccuuuccacca

SEQ ID NO: 2619996 - RNA, 22 nt, Human
gcauagcccagacacagaagag

SEQ ID NO: 2619997 - RNA, 12 nt, Human
gcauaggccugg

SEQ ID NO: 2619998 - RNA, 16 nt, Human
gcauaggccugggugc

SEQ ID NO: 2619999 - RNA, 14 nt, Human
gcaguucugaagaa

SEQ ID NO: 2620000 - RNA, 13 nt, Human
gcaguucugaaga

SEQ ID NO: 2620001 - RNA, 18 nt, Human
gcauagauucccugagca

SEQ ID NO: 2620002 - RNA, 16 nt, Human
gcaguucuaguuugca

SEQ ID NO: 2620003 - RNA, 14 nt, Human
gcauagcaaacaga

SEQ ID NO: 2620004 - RNA, 21 nt, Human
gcaguucuaguuugcauuccu

SEQ ID NO: 2620005 - RNA, 16 nt, Human
gcauagcaagacacau

SEQ ID NO: 2620006 - RNA, 21 nt, Human
gcaguuccggauuggcuugug

SEQ ID NO: 2620007 - RNA, 23 nt, Human
gcaguuccggauuggcuugugug

SEQ ID NO: 2620008 - RNA, 15 nt, Human
gcaguguuuccuuuu

SEQ ID NO: 2620009 - RNA, 21 nt, Human
gcaguguuccuauuuggggcu

SEQ ID NO: 2620010 - RNA, 14 nt, Human
gcaguguuuccuuu

SEQ ID NO: 2620011 - RNA, 13 nt, Human
gcaguuacaugca

SEQ ID NO: 2620012 - RNA, 21 nt, Human
gcaguuacaugcauacuucaa

SEQ ID NO: 2620013 - RNA, 18 nt, Human
gcaguuacaugcauacuu

SEQ ID NO: 2620014 - RNA, 14 nt, Human
gcaguuauagaaaa

SEQ ID NO: 2620015 - RNA, 18 nt, Human
gcagugggagcugccugu

SEQ ID NO: 2620016 - RNA, 17 nt, Human
gcagugggagcugccug

SEQ ID NO: 2620017 - RNA, 21 nt, Human
gcagugugaggccagggcaga

SEQ ID NO: 2620018 - RNA, 20 nt, Human
gcagugugcacuaaggggcc

SEQ ID NO: 2620019 - RNA, 19 nt, Human
gcagugugaggccagggca

SEQ ID NO: 2620020 - RNA, 15 nt, Human
gcagugugaggccag

SEQ ID NO: 2620021 - RNA, 20 nt, Human
gcaguguuccccaucugggu

SEQ ID NO: 2620022 - RNA, 21 nt, Human
gcaguguuccccaucuggguc

SEQ ID NO: 2620023 - RNA, 21 nt, Human
gcagugugcacuaaggggccc

SEQ ID NO: 2620024 - RNA, 12 nt, Human
gcauauuguaca

SEQ ID NO: 2620025 - RNA, 19 nt, Human
gcauauugcuuuuucuaau

SEQ ID NO: 2620026 - RNA, 16 nt, Human
gcauauucuuauguau

SEQ ID NO: 2620027 - RNA, 18 nt, Human
gcauauuguacacuuuuu

SEQ ID NO: 2620028 - RNA, 17 nt, Human
gcauauuguacacuuuu

SEQ ID NO: 2620029 - RNA, 16 nt, Human
gcauauuguacacuuu

SEQ ID NO: 2620030 - RNA, 15 nt, Human
gcauauuguacacuu

SEQ ID NO: 2620031 - RNA, 20 nt, Human
gcauauuguacacuuuuuug

SEQ ID NO: 2620032 - RNA, 19 nt, Human
gcauauuguacacuuuuuu

SEQ ID NO: 2620033 - RNA, 21 nt, Human
gcauauuguauuacuagaaga

SEQ ID NO: 2620034 - RNA, 15 nt, Human
gcauauuguuauuau

SEQ ID NO: 2620035 - RNA, 21 nt, Human
gcaucaagaugugacauguuu

SEQ ID NO: 2620036 - RNA, 19 nt, Human
gcaucaaaagacaauucuu

SEQ ID NO: 2620037 - RNA, 18 nt, Human
gcaucaaaagacaauucu

SEQ ID NO: 2620038 - RNA, 17 nt, Human
gcaucaaaagacaauuc

SEQ ID NO: 2620039 - RNA, 19 nt, Human
gcauauuguuauuauauaa

SEQ ID NO: 2620040 - RNA, 16 nt, Human
gcaucaaaagacaauu

SEQ ID NO: 2620041 - RNA, 18 nt, Human
gcauauucaggaagcuca

SEQ ID NO: 2620042 - RNA, 17 nt, Human
gcauauucaggaagcuc

SEQ ID NO: 2620043 - RNA, 20 nt, Human
gcauauucaggaagcucagg

SEQ ID NO: 2620044 - RNA, 16 nt, Human
gcauauuccuuucuau

SEQ ID NO: 2620045 - RNA, 15 nt, Human
gcauauuccuuucua

SEQ ID NO: 2620046 - RNA, 20 nt, Human
gcauauuccuuucuaucauu

SEQ ID NO: 2620047 - RNA, 18 nt, Human
gcauauguguuggcuugu

SEQ ID NO: 2620048 - RNA, 21 nt, Human
gcauauguuucgcugauauau

SEQ ID NO: 2620049 - RNA, 15 nt, Human
gcauauucaggaagc

SEQ ID NO: 2620050 - RNA, 23 nt, Human
gcauauuauuuuauguugcauag

SEQ ID NO: 2620051 - RNA, 18 nt, Human
gcauauguugaauacuuu

SEQ ID NO: 2620052 - RNA, 19 nt, Human
gcauauguugaauacuuuu

SEQ ID NO: 2620053 - RNA, 20 nt, Human
gcauauguugaauacuuuuu

SEQ ID NO: 2620054 - RNA, 21 nt, Human
gcauauguugaauacuuuuua

SEQ ID NO: 2620055 - RNA, 18 nt, Human
gcauauuauuuuauguug

SEQ ID NO: 2620056 - RNA, 15 nt, Human
gcauauguaugacuc

SEQ ID NO: 2620057 - RNA, 14 nt, Human
gcauauguugaaua

SEQ ID NO: 2620058 - RNA, 17 nt, Human
gcauauguugaauacuu

SEQ ID NO: 2620059 - RNA, 12 nt, Human
gcauauguugaa

SEQ ID NO: 2620060 - RNA, 15 nt, Human
gcauauguguuggcu

SEQ ID NO: 2620061 - RNA, 15 nt, Human
gcaucaggccaggcc

SEQ ID NO: 2620062 - RNA, 13 nt, Human
gcaucaggccagg

SEQ ID NO: 2620063 - RNA, 22 nt, Human
gcaucaaaagacaauucuuuau

SEQ ID NO: 2620064 - RNA, 21 nt, Human
gcaucaaaagacaauucuuua

SEQ ID NO: 2620065 - RNA, 14 nt, Human
gcaucacagggcag

SEQ ID NO: 2620066 - RNA, 15 nt, Human
gcaucacagggcaga

SEQ ID NO: 2620067 - RNA, 16 nt, Human
gcaucacagggcagag

SEQ ID NO: 2620068 - RNA, 17 nt, Human
gcaucacagggcagagc

SEQ ID NO: 2620069 - RNA, 21 nt, Human
gcaucacagggcagagccggg

SEQ ID NO: 2620070 - RNA, 22 nt, Human
gcaucacagggcagagccggga

SEQ ID NO: 2620071 - RNA, 17 nt, Human
gcaucaggccaggcccu

SEQ ID NO: 2620072 - RNA, 16 nt, Human
gcaucaggccaggccc

SEQ ID NO: 2620073 - RNA, 15 nt, Human
gcaugaauuugugaa

SEQ ID NO: 2620074 - RNA, 23 nt, Human
gcaugaaguaauaugcacacauu

SEQ ID NO: 2620075 - RNA, 12 nt, Human
gcaucacaguuu

SEQ ID NO: 2620076 - RNA, 13 nt, Human
gcaucaccucagg

SEQ ID NO: 2620077 - RNA, 16 nt, Human
gcaugcacuguucccc

SEQ ID NO: 2620078 - RNA, 17 nt, Human
gcaugcacuguuccccc

SEQ ID NO: 2620079 - RNA, 21 nt, Human
gcaugcacuguucccccugug

SEQ ID NO: 2620080 - RNA, 22 nt, Human
gcaugcacuguucccccugugc

SEQ ID NO: 2620081 - RNA, 17 nt, Human
gcaugaauuugugaagg

SEQ ID NO: 2620082 - RNA, 15 nt, Human
gcaugacaagcccca

SEQ ID NO: 2620083 - RNA, 16 nt, Human
gcaugacaagccccag

SEQ ID NO: 2620084 - RNA, 17 nt, Human
gcaugacaagccccagg

SEQ ID NO: 2620085 - RNA, 18 nt, Human
gcaugacaagccccaggc

SEQ ID NO: 2620086 - RNA, 19 nt, Human
gcaugacaagccccaggca

SEQ ID NO: 2620087 - RNA, 22 nt, Human
gcaugccuggauggggcugcac

SEQ ID NO: 2620088 - RNA, 17 nt, Human
gcaugccuggauggggc

SEQ ID NO: 2620089 - RNA, 23 nt, Human
gcaugcacuguucccccugugca

SEQ ID NO: 2620090 - RNA, 21 nt, Human
gcaugacaagccccaggcagg

SEQ ID NO: 2620091 - RNA, 15 nt, Human
gcaugcauuuugcag

SEQ ID NO: 2620092 - RNA, 14 nt, Human
gcaugcauuuugca

SEQ ID NO: 2620093 - RNA, 21 nt, Human
gcaugcauuuugcagcaguga

SEQ ID NO: 2620094 - RNA, 19 nt, Human
gcauguuuuccagcuccuc

SEQ ID NO: 2620095 - RNA, 18 nt, Human
gcauguuuuccagcuccu

SEQ ID NO: 2620096 - RNA, 12 nt, Human
gcauguuugcug

SEQ ID NO: 2620097 - RNA, 20 nt, Human
gcauguuucauguuuuguga

SEQ ID NO: 2620098 - RNA, 15 nt, Human
gcauguuucauguuu

SEQ ID NO: 2620099 - RNA, 13 nt, Human
gcauuaaaagaaa

SEQ ID NO: 2620100 - RNA, 14 nt, Human
gcauuaaaagaaaa

SEQ ID NO: 2620101 - RNA, 18 nt, Human
gcauuacgugagccaggu

SEQ ID NO: 2620102 - RNA, 17 nt, Human
gcauuacgugagccagg

SEQ ID NO: 2620103 - RNA, 15 nt, Human
gcauuaaaagaaaau

SEQ ID NO: 2620104 - RNA, 14 nt, Human
gcauuacugcaugc

SEQ ID NO: 2620105 - RNA, 17 nt, Human
gcauuacugcaugcacu

SEQ ID NO: 2620106 - RNA, 15 nt, Human
gcauuagaauuauuu

SEQ ID NO: 2620107 - RNA, 16 nt, Human
gcauuagaaauagaca

SEQ ID NO: 2620108 - RNA, 21 nt, Human
gcauuagaaauagacaguaua

SEQ ID NO: 2620109 - RNA, 15 nt, Human
gcauuccagccccuc

SEQ ID NO: 2620110 - RNA, 12 nt, Human
gcauuccagccc

SEQ ID NO: 2620111 - RNA, 18 nt, Human
gcauuccaacaaaggguu

SEQ ID NO: 2620112 - RNA, 17 nt, Human
gcauuccaacaaagggu

SEQ ID NO: 2620113 - RNA, 19 nt, Human
gcauuccagccccucuggu

SEQ ID NO: 2620114 - RNA, 16 nt, Human
gcauuccagccccucu

SEQ ID NO: 2620115 - RNA, 18 nt, Human
gcauuagaauuauuuaaa

SEQ ID NO: 2620116 - RNA, 17 nt, Human
gcauuagaauuauuuaa

SEQ ID NO: 2620117 - RNA, 20 nt, Human
gcauuagauuucucauuugc

SEQ ID NO: 2620118 - RNA, 13 nt, Human
gcauuagaaauua

SEQ ID NO: 2620119 - RNA, 17 nt, Human
gcauguuugugauugac

SEQ ID NO: 2620120 - RNA, 16 nt, Human
gcauguugcugaggag

SEQ ID NO: 2620121 - RNA, 18 nt, Human
gcauguugagccaggccu

SEQ ID NO: 2620122 - RNA, 13 nt, Human
gcauggaauuugu

SEQ ID NO: 2620123 - RNA, 23 nt, Human
gcauggaaauucccuucaucugg

SEQ ID NO: 2620124 - RNA, 17 nt, Human
gcauggaauuuguaagu

SEQ ID NO: 2620125 - RNA, 23 nt, Human
gcauggacaccccuuauccagga

SEQ ID NO: 2620126 - RNA, 15 nt, Human
gcauggagaauaaac

SEQ ID NO: 2620127 - RNA, 15 nt, Human
gcaugcugucccuua

SEQ ID NO: 2620128 - RNA, 16 nt, Human
gcaugcuggggcaagu

SEQ ID NO: 2620129 - RNA, 21 nt, Human
gcaugccuuccagcacccugc

SEQ ID NO: 2620130 - RNA, 16 nt, Human
gcaugccuuccagcac

SEQ ID NO: 2620131 - RNA, 14 nt, Human
gcaugcgcacaagg

SEQ ID NO: 2620132 - RNA, 13 nt, Human
gcaugcggcccag

SEQ ID NO: 2620133 - RNA, 21 nt, Human
gcaugcgcacaaggcugacca

SEQ ID NO: 2620134 - RNA, 15 nt, Human
gcaugcccccucgug

SEQ ID NO: 2620135 - RNA, 12 nt, Human
gcaugcccccuc

SEQ ID NO: 2620136 - RNA, 13 nt, Human
gcaugccugugug

SEQ ID NO: 2620137 - RNA, 15 nt, Human
gcaugccugugugac

SEQ ID NO: 2620138 - RNA, 16 nt, Human
gcauugccaagggcuu

SEQ ID NO: 2620139 - RNA, 14 nt, Human
gcauugccauuccc

SEQ ID NO: 2620140 - RNA, 14 nt, Human
gcauugccaagggc

SEQ ID NO: 2620141 - RNA, 13 nt, Human
gcauugcauggac

SEQ ID NO: 2620142 - RNA, 13 nt, Human
gcauugcugguuc

SEQ ID NO: 2620143 - RNA, 15 nt, Human
gcauugcuuuccacu

SEQ ID NO: 2620144 - RNA, 12 nt, Human
gcauugcuuucc

SEQ ID NO: 2620145 - RNA, 12 nt, Human
gcauugcuuucu

SEQ ID NO: 2620146 - RNA, 14 nt, Human
gcauucucugaaga

SEQ ID NO: 2620147 - RNA, 16 nt, Human
gcauugauggggaagg

SEQ ID NO: 2620148 - RNA, 17 nt, Human
gcauugauggggaagga

SEQ ID NO: 2620149 - RNA, 18 nt, Human
gcauugauggggaaggag

SEQ ID NO: 2620150 - RNA, 14 nt, Human
gcauucucauggag

SEQ ID NO: 2620151 - RNA, 18 nt, Human
gcauucucacuccuaccu

SEQ ID NO: 2620152 - RNA, 13 nt, Human
gcauucuaguacu

SEQ ID NO: 2620153 - RNA, 23 nt, Human
gcauuccuucuuugauaauguua

SEQ ID NO: 2620154 - RNA, 15 nt, Human
gcauucucacuccua

SEQ ID NO: 2620155 - RNA, 13 nt, Human
gcauucucacucc

SEQ ID NO: 2620156 - RNA, 22 nt, Human
gcauuccuucuuugauaauguu

SEQ ID NO: 2620157 - RNA, 13 nt, Human
gcauucccagugg

SEQ ID NO: 2620158 - RNA, 12 nt, Human
gcauuccccagg

SEQ ID NO: 2620159 - RNA, 12 nt, Human
gcauuccccacu

SEQ ID NO: 2620160 - RNA, 15 nt, Human
gcauuggcagcaggu

SEQ ID NO: 2620161 - RNA, 17 nt, Human
gcauuugcugaauacag

SEQ ID NO: 2620162 - RNA, 16 nt, Human
gcauuuggauuggggu

SEQ ID NO: 2620163 - RNA, 22 nt, Human
gcauuuggauuggggucccucu

SEQ ID NO: 2620164 - RNA, 21 nt, Human
gcauuuggugguuucagaaau

SEQ ID NO: 2620165 - RNA, 23 nt, Human
gcauuugcugaauacagaggcaa

SEQ ID NO: 2620166 - RNA, 16 nt, Human
gcauuggaagacccca

SEQ ID NO: 2620167 - RNA, 20 nt, Human
gcauugcuuucugaaauuag

SEQ ID NO: 2620168 - RNA, 21 nt, Human
gcauuggaaacccuauuuccc

SEQ ID NO: 2620169 - RNA, 13 nt, Human
gcauugcuuucug

SEQ ID NO: 2620170 - RNA, 15 nt, Human
gcauuuuaaaaauga

SEQ ID NO: 2620171 - RNA, 23 nt, Human
gcauuuggauuggggucccucua

SEQ ID NO: 2620172 - RNA, 16 nt, Human
gcauuuuacuguacag

SEQ ID NO: 2620173 - RNA, 16 nt, Human
gcauuuuauugcuuga

SEQ ID NO: 2620174 - RNA, 12 nt, Human
gcauuuuauucu

SEQ ID NO: 2620175 - RNA, 17 nt, Human
gcauuuuaaaaaugaaa

SEQ ID NO: 2620176 - RNA, 13 nt, Human
gcauuuuauaaau

SEQ ID NO: 2620177 - RNA, 17 nt, Human
gcauuuuacuguacaga

SEQ ID NO: 2620178 - RNA, 21 nt, Human
gccaaacucaccugccccuca

SEQ ID NO: 2620179 - RNA, 18 nt, Human
gccaaacucugccagcca

SEQ ID NO: 2620180 - RNA, 19 nt, Human
gccaaacucaccugccccu

SEQ ID NO: 2620181 - RNA, 15 nt, Human
gccaaacagccacac

SEQ ID NO: 2620182 - RNA, 20 nt, Human
gccaaaggaagcacaugccu

SEQ ID NO: 2620183 - RNA, 16 nt, Human
gccaaaggaagcacau

SEQ ID NO: 2620184 - RNA, 14 nt, Human
gccaaaggaagcac

SEQ ID NO: 2620185 - RNA, 17 nt, Human
gccaaacucugccagcc

SEQ ID NO: 2620186 - RNA, 23 nt, Human
gccaaacaaaaagguucucaggu

SEQ ID NO: 2620187 - RNA, 14 nt, Human
gccaaaagcugcuc

SEQ ID NO: 2620188 - RNA, 15 nt, Human
gccaaaagcugcuca

SEQ ID NO: 2620189 - RNA, 16 nt, Human
gcauuuuguuugguau

SEQ ID NO: 2620190 - RNA, 23 nt, Human
gcauuuuguauuugucuaacugg

SEQ ID NO: 2620191 - RNA, 14 nt, Human
gcauuuuguauuug

SEQ ID NO: 2620192 - RNA, 19 nt, Human
gcauuuugcuauuguaaau

SEQ ID NO: 2620193 - RNA, 17 nt, Human
gcauuuugcuauuguaa

SEQ ID NO: 2620194 - RNA, 14 nt, Human
gcauuuugcuauug

SEQ ID NO: 2620195 - RNA, 13 nt, Human
gcauuuugcuauu

SEQ ID NO: 2620196 - RNA, 22 nt, Human
gcauuuuggagaguuuccugaa

SEQ ID NO: 2620197 - RNA, 23 nt, Human
gcauuuuggagaguuuccugaaa

SEQ ID NO: 2620198 - RNA, 22 nt, Human
gcauuuugcuaaaugugaauga

SEQ ID NO: 2620199 - RNA, 14 nt, Human
gcauuuucccagau

SEQ ID NO: 2620200 - RNA, 18 nt, Human
gcauuuucaccccacccu

SEQ ID NO: 2620201 - RNA, 20 nt, Human
gcauuuuccuccaucgcagu

SEQ ID NO: 2620202 - RNA, 22 nt, Human
gcccacccuccugucuucccag

SEQ ID NO: 2620203 - RNA, 19 nt, Human
gcccacccuccugucuucc

SEQ ID NO: 2620204 - RNA, 18 nt, Human
gcccacccuccugucuuc

SEQ ID NO: 2620205 - RNA, 20 nt, Human
gcccacccuccugucuuccc

SEQ ID NO: 2620206 - RNA, 18 nt, Human
gcccaccccgcucugcau

SEQ ID NO: 2620207 - RNA, 17 nt, Human
gcccaccccgcucugca

SEQ ID NO: 2620208 - RNA, 13 nt, Human
gcccaccccgcuc

SEQ ID NO: 2620209 - RNA, 22 nt, Human
gcccacccccugcccugcacgu

SEQ ID NO: 2620210 - RNA, 14 nt, Human
gcccacccuccugu

SEQ ID NO: 2620211 - RNA, 19 nt, Human
gcccacccguggagauggg

SEQ ID NO: 2620212 - RNA, 20 nt, Human
gcccacccccugcccugcac

SEQ ID NO: 2620213 - RNA, 19 nt, Human
gcccacccccugcccugca

SEQ ID NO: 2620214 - RNA, 18 nt, Human
gcccacccccugcccugc

SEQ ID NO: 2620215 - RNA, 17 nt, Human
gcccacccccugcccug

SEQ ID NO: 2620216 - RNA, 16 nt, Human
gcccacccccugcccu

SEQ ID NO: 2620217 - RNA, 15 nt, Human
gcccacccccugccc

SEQ ID NO: 2620218 - RNA, 14 nt, Human
gcccacccccugcc

SEQ ID NO: 2620219 - RNA, 22 nt, Human
gcccacccccucaagccaaucc

SEQ ID NO: 2620220 - RNA, 15 nt, Human
gcccaccccucaaca

SEQ ID NO: 2620221 - RNA, 18 nt, Human
gcccacaggaucagucug

SEQ ID NO: 2620222 - RNA, 13 nt, Human
gcccacaggauca

SEQ ID NO: 2620223 - RNA, 19 nt, Human
gcccacaggaucagucuga

SEQ ID NO: 2620224 - RNA, 15 nt, Human
gcccacccccucaag

SEQ ID NO: 2620225 - RNA, 19 nt, Human
gcccacagggaacccugcu

SEQ ID NO: 2620226 - RNA, 12 nt, Human
gcccacagggaa

SEQ ID NO: 2620227 - RNA, 19 nt, Human
gcccacagcucccacccca

SEQ ID NO: 2620228 - RNA, 15 nt, Human
gcccaccccccucau

SEQ ID NO: 2620229 - RNA, 16 nt, Human
gcccaaagaugcagcc

SEQ ID NO: 2620230 - RNA, 15 nt, Human
gcccaaagaugcagc

SEQ ID NO: 2620231 - RNA, 16 nt, Human
gcccaaagccagacag

SEQ ID NO: 2620232 - RNA, 17 nt, Human
gcccaaagccagacagc

SEQ ID NO: 2620233 - RNA, 17 nt, Human
gcccaaagucuguguga

SEQ ID NO: 2620234 - RNA, 19 nt, Human
gcccaaagugguauagaaa

SEQ ID NO: 2620235 - RNA, 16 nt, Human
gcccacagcuguauga

SEQ ID NO: 2620236 - RNA, 16 nt, Human
gcccacagcaggugcu

SEQ ID NO: 2620237 - RNA, 14 nt, Human
gcccacagcuccca

SEQ ID NO: 2620238 - RNA, 13 nt, Human
gcccacagcuccc

SEQ ID NO: 2620239 - RNA, 16 nt, Human
gcccacagcucccacc

SEQ ID NO: 2620240 - RNA, 17 nt, Human
gcccacagcucccaccc

SEQ ID NO: 2620241 - RNA, 13 nt, Human
gcccacacuugag

SEQ ID NO: 2620242 - RNA, 13 nt, Human
gcccacacccccu

SEQ ID NO: 2620243 - RNA, 23 nt, Human
gcccacacccagcuacuuuaaca

SEQ ID NO: 2620244 - RNA, 13 nt, Human
gcccacacacccc

SEQ ID NO: 2620245 - RNA, 17 nt, Human
gccauuucuuccacaag

SEQ ID NO: 2620246 - RNA, 21 nt, Human
gccauuuagccaccaucuuug

SEQ ID NO: 2620247 - RNA, 23 nt, Human
gccauugucuucggaaaccuugg

SEQ ID NO: 2620248 - RNA, 22 nt, Human
gccauuuaaagcuuauuaaaac

SEQ ID NO: 2620249 - RNA, 24 nt, Human
gccauggcuuccaagguggucugc

SEQ ID NO: 2620250 - RNA, 19 nt, Human
gccauggcuuccaaggugg

SEQ ID NO: 2620251 - RNA, 22 nt, Human
gccauuucuuccacaagagccc

SEQ ID NO: 2620252 - RNA, 20 nt, Human
gccauuucuuccacaagagc

SEQ ID NO: 2620253 - RNA, 15 nt, Human
gccauuugcuuuuuc

SEQ ID NO: 2620254 - RNA, 20 nt, Human
gccauuugcacccuccgccu

SEQ ID NO: 2620255 - RNA, 23 nt, Human
gccauuugcacccuccgccuuca

SEQ ID NO: 2620256 - RNA, 16 nt, Human
gccaucccagccuugg

SEQ ID NO: 2620257 - RNA, 20 nt, Human
gccauggagagcuggagccu

SEQ ID NO: 2620258 - RNA, 18 nt, Human
gccauggagagcuggagc

SEQ ID NO: 2620259 - RNA, 16 nt, Human
gccauggagagcugga

SEQ ID NO: 2620260 - RNA, 15 nt, Human
gccauggagagcugg

SEQ ID NO: 2620261 - RNA, 18 nt, Human
gccauggaggcacacagc

SEQ ID NO: 2620262 - RNA, 16 nt, Human
gccauggaggcacaca

SEQ ID NO: 2620263 - RNA, 23 nt, Human
gccauggagagcuggagccuggu

SEQ ID NO: 2620264 - RNA, 22 nt, Human
gccauggagagcuggagccugg

SEQ ID NO: 2620265 - RNA, 15 nt, Human
gccauggaggcacac

SEQ ID NO: 2620266 - RNA, 14 nt, Human
gccaugggacaggg

SEQ ID NO: 2620267 - RNA, 19 nt, Human
gccaugggacagggaggac

SEQ ID NO: 2620268 - RNA, 16 nt, Human
gccauggcgugucccu

SEQ ID NO: 2620269 - RNA, 17 nt, Human
gccauggcgugucccuc

SEQ ID NO: 2620270 - RNA, 20 nt, Human
gccauggcugucucaaacca

SEQ ID NO: 2620271 - RNA, 22 nt, Human
gccauggcgugucccucucgga

SEQ ID NO: 2620272 - RNA, 21 nt, Human
gccauggaggcacacagcugc

SEQ ID NO: 2620273 - RNA, 18 nt, Human
gccaggaagccagcaggc

SEQ ID NO: 2620274 - RNA, 17 nt, Human
gccaggaagccagcagg

SEQ ID NO: 2620275 - RNA, 11 nt, Human
gccaggaagcc

SEQ ID NO: 2620276 - RNA, 15 nt, Human
gccagcuuucccugc

SEQ ID NO: 2620277 - RNA, 17 nt, Human
gccagcuuuuccucccu

SEQ ID NO: 2620278 - RNA, 19 nt, Human
gccaggaagccagcaggcu

SEQ ID NO: 2620279 - RNA, 20 nt, Human
gccaggaagccagcaggcuc

SEQ ID NO: 2620280 - RNA, 13 nt, Human
gccagggcccugc

SEQ ID NO: 2620281 - RNA, 15 nt, Human
gccagggcccugcag

SEQ ID NO: 2620282 - RNA, 16 nt, Human
gccagggcccugcaga

SEQ ID NO: 2620283 - RNA, 17 nt, Human
gccagggcccugcagag

SEQ ID NO: 2620284 - RNA, 19 nt, Human
gccagggcccugcagaggg

SEQ ID NO: 2620285 - RNA, 23 nt, Human
gccaggguguggcccugccaucu

SEQ ID NO: 2620286 - RNA, 20 nt, Human
gccaggguguggcccugcca

SEQ ID NO: 2620287 - RNA, 14 nt, Human
gccaggguguggcc

SEQ ID NO: 2620288 - RNA, 20 nt, Human
gccaggguggucuugaucuc

SEQ ID NO: 2620289 - RNA, 23 nt, Human
gccaggggaaaaucagccugcuc

SEQ ID NO: 2620290 - RNA, 16 nt, Human
gccagguccuugcccu

SEQ ID NO: 2620291 - RNA, 22 nt, Human
gccaggucacccuuugcuguga

SEQ ID NO: 2620292 - RNA, 21 nt, Human
gccaggucacccuuugcugug

SEQ ID NO: 2620293 - RNA, 21 nt, Human
gccagguaaugugaauaaauu

SEQ ID NO: 2620294 - RNA, 16 nt, Human
gccagguaaugaggga

SEQ ID NO: 2620295 - RNA, 21 nt, Human
gccaggguuucgagaagcugc

SEQ ID NO: 2620296 - RNA, 15 nt, Human
gccagguaaugugaa

SEQ ID NO: 2620297 - RNA, 21 nt, Human
gccaggggaaaaucagccugc

SEQ ID NO: 2620298 - RNA, 22 nt, Human
gccaggggaaaaucagccugcu

SEQ ID NO: 2620299 - RNA, 17 nt, Human
gccaggggaaaaucagc

SEQ ID NO: 2620300 - RNA, 22 nt, Human
gccagggcuauagcucaggacc

SEQ ID NO: 2620301 - RNA, 22 nt, Human
gccagggccuggaagacagaga

SEQ ID NO: 2620302 - RNA, 11 nt, Human
gccagggcugc

SEQ ID NO: 2620303 - RNA, 16 nt, Human
gccagggccuggaaga

SEQ ID NO: 2620304 - RNA, 15 nt, Human
gccagggccuggaag

SEQ ID NO: 2620305 - RNA, 17 nt, Human
gccaucccagccuuggc

SEQ ID NO: 2620306 - RNA, 14 nt, Human
gccagugacagaca

SEQ ID NO: 2620307 - RNA, 17 nt, Human
gccaucccagccccaau

SEQ ID NO: 2620308 - RNA, 16 nt, Human
gccaucccagccccaa

SEQ ID NO: 2620309 - RNA, 15 nt, Human
gccaucccagcccca

SEQ ID NO: 2620310 - RNA, 14 nt, Human
gccaucccagcccc

SEQ ID NO: 2620311 - RNA, 13 nt, Human
gccaucccagccc

SEQ ID NO: 2620312 - RNA, 14 nt, Human
gccagucgcgcugc

SEQ ID NO: 2620313 - RNA, 15 nt, Human
gccagucgcgcugcc

SEQ ID NO: 2620314 - RNA, 19 nt, Human
gccaguccugccuggccag

SEQ ID NO: 2620315 - RNA, 20 nt, Human
gccaguccugccuggccagg

SEQ ID NO: 2620316 - RNA, 19 nt, Human
gccagucgcgcugccugug

SEQ ID NO: 2620317 - RNA, 18 nt, Human
gccagucgcgcugccugu

SEQ ID NO: 2620318 - RNA, 17 nt, Human
gccagucgcgcugccug

SEQ ID NO: 2620319 - RNA, 16 nt, Human
gccagucgcgcugccu

SEQ ID NO: 2620320 - RNA, 14 nt, Human
gccagucugggcug

SEQ ID NO: 2620321 - RNA, 13 nt, Human
gccagucugggcu

SEQ ID NO: 2620322 - RNA, 20 nt, Human
gccagucgcgcugccugugu

SEQ ID NO: 2620323 - RNA, 22 nt, Human
gccagucucacugugggaaggc

SEQ ID NO: 2620324 - RNA, 16 nt, Human
gccaggugccuuggag

SEQ ID NO: 2620325 - RNA, 15 nt, Human
gccaggugccuugga

SEQ ID NO: 2620326 - RNA, 14 nt, Human
gccaggugccuugg

SEQ ID NO: 2620327 - RNA, 13 nt, Human
gccaggugccuug

SEQ ID NO: 2620328 - RNA, 18 nt, Human
gccaguccugccuggcca

SEQ ID NO: 2620329 - RNA, 12 nt, Human
gccaggugccuu

SEQ ID NO: 2620330 - RNA, 14 nt, Human
gccaggugcagugg

SEQ ID NO: 2620331 - RNA, 13 nt, Human
gccaggugcagug

SEQ ID NO: 2620332 - RNA, 20 nt, Human
gccauccagguucagcuugu

SEQ ID NO: 2620333 - RNA, 19 nt, Human
gccauccagguucagcuug

SEQ ID NO: 2620334 - RNA, 20 nt, Human
gccagucuguggaucagaga

SEQ ID NO: 2620335 - RNA, 13 nt, Human
gccagucugugga

SEQ ID NO: 2620336 - RNA, 16 nt, Human
gccagucugggcugcc

SEQ ID NO: 2620337 - RNA, 15 nt, Human
gccagucugggcugc

SEQ ID NO: 2620338 - RNA, 12 nt, Human
gccagucugugg

SEQ ID NO: 2620339 - RNA, 13 nt, Human
gccagugacagac

SEQ ID NO: 2620340 - RNA, 13 nt, Human
gccagucuugugu

SEQ ID NO: 2620341 - RNA, 17 nt, Human
gccagucugggcugccg

SEQ ID NO: 2620342 - RNA, 20 nt, Human
gccagucuugacgaguguga

SEQ ID NO: 2620343 - RNA, 21 nt, Human
gccagaugcugauguucagug

SEQ ID NO: 2620344 - RNA, 20 nt, Human
gccagaugcugauguucagu

SEQ ID NO: 2620345 - RNA, 19 nt, Human
gccagaugcugauguucag

SEQ ID NO: 2620346 - RNA, 17 nt, Human
gccagaugcugauguuc

SEQ ID NO: 2620347 - RNA, 16 nt, Human
gccagaugcugauguu

SEQ ID NO: 2620348 - RNA, 15 nt, Human
gccagaugcugaugu

SEQ ID NO: 2620349 - RNA, 23 nt, Human
gccagaggaacuguccagagagc

SEQ ID NO: 2620350 - RNA, 22 nt, Human
gccagaggaacuguccagagag

SEQ ID NO: 2620351 - RNA, 16 nt, Human
gccagauucuuuccug

SEQ ID NO: 2620352 - RNA, 20 nt, Human
gccagagggagugacagagg

SEQ ID NO: 2620353 - RNA, 19 nt, Human
gccagagggagugacagag

SEQ ID NO: 2620354 - RNA, 14 nt, Human
gccagauggggccu

SEQ ID NO: 2620355 - RNA, 22 nt, Human
gccagauggacuccagccugcc

SEQ ID NO: 2620356 - RNA, 24 nt, Human
gccagaugcugauguucaguguaa

SEQ ID NO: 2620357 - RNA, 17 nt, Human
gccagauucuuuccuga

SEQ ID NO: 2620358 - RNA, 17 nt, Human
gccagccccggcccugg

SEQ ID NO: 2620359 - RNA, 19 nt, Human
gccagccccacccaggagg

SEQ ID NO: 2620360 - RNA, 18 nt, Human
gccagauggggccucugu

SEQ ID NO: 2620361 - RNA, 17 nt, Human
gccagauggggccucug

SEQ ID NO: 2620362 - RNA, 18 nt, Human
gccagccccacccaggag

SEQ ID NO: 2620363 - RNA, 19 nt, Human
gccagccccggcccugggc

SEQ ID NO: 2620364 - RNA, 18 nt, Human
gccagccccggcccuggg

SEQ ID NO: 2620365 - RNA, 11 nt, Human
gccagccccuc

SEQ ID NO: 2620366 - RNA, 12 nt, Human
gccagccccucc

SEQ ID NO: 2620367 - RNA, 21 nt, Human
gccagccccggcccugggcuc

SEQ ID NO: 2620368 - RNA, 16 nt, Human
gccagccccucccacc

SEQ ID NO: 2620369 - RNA, 19 nt, Human
gccagccuucuuccauccc

SEQ ID NO: 2620370 - RNA, 12 nt, Human
gccagccuucuu

SEQ ID NO: 2620371 - RNA, 22 nt, Human
gccagccuuccucugcagcuga

SEQ ID NO: 2620372 - RNA, 21 nt, Human
gccagccuuccucugcagcug

SEQ ID NO: 2620373 - RNA, 19 nt, Human
gccagccuuccucugcagc

SEQ ID NO: 2620374 - RNA, 17 nt, Human
gccagccuuccucugca

SEQ ID NO: 2620375 - RNA, 16 nt, Human
gccagccuuccucugc

SEQ ID NO: 2620376 - RNA, 20 nt, Human
gccagccugucccauggaca

SEQ ID NO: 2620377 - RNA, 12 nt, Human
gccagccuugac

SEQ ID NO: 2620378 - RNA, 20 nt, Human
gccagccgagauagccaagg

SEQ ID NO: 2620379 - RNA, 21 nt, Human
gccagccgagauagccaaggc

SEQ ID NO: 2620380 - RNA, 20 nt, Human
gccagccccuggccccagga

SEQ ID NO: 2620381 - RNA, 14 nt, Human
gccagccccuggcc

SEQ ID NO: 2620382 - RNA, 19 nt, Human
gccagccccuggccccagg

SEQ ID NO: 2620383 - RNA, 17 nt, Human
gccagccccucccacca

SEQ ID NO: 2620384 - RNA, 20 nt, Human
gccagccccucccaccacag

SEQ ID NO: 2620385 - RNA, 21 nt, Human
gccagccccucccaccacagc

SEQ ID NO: 2620386 - RNA, 22 nt, Human
gccagcccucccuguccuccuc

SEQ ID NO: 2620387 - RNA, 23 nt, Human
gccagcccucccuguccuccucg

SEQ ID NO: 2620388 - RNA, 15 nt, Human
gccagcccggcuggu

SEQ ID NO: 2620389 - RNA, 10 nt, Human
gccagcccuc

SEQ ID NO: 2620390 - RNA, 13 nt, Human
gccagcccucccu

SEQ ID NO: 2620391 - RNA, 14 nt, Human
gccagcccucccug

SEQ ID NO: 2620392 - RNA, 15 nt, Human
gccagcccucccugu

SEQ ID NO: 2620393 - RNA, 17 nt, Human
gccagcccucccugucc

SEQ ID NO: 2620394 - RNA, 20 nt, Human
gccagcccucccuguccucc

SEQ ID NO: 2620395 - RNA, 21 nt, Human
gccagcccucccuguccuccu

SEQ ID NO: 2620396 - RNA, 18 nt, Human
gccagcuuguuauuuaua

SEQ ID NO: 2620397 - RNA, 14 nt, Human
gccagcuggcagca

SEQ ID NO: 2620398 - RNA, 17 nt, Human
gccagcuggcagcagag

SEQ ID NO: 2620399 - RNA, 18 nt, Human
gccagcuggcagcagagu

SEQ ID NO: 2620400 - RNA, 15 nt, Human
gccagcugcuugggc

SEQ ID NO: 2620401 - RNA, 13 nt, Human
gccagcuggagaa

SEQ ID NO: 2620402 - RNA, 14 nt, Human
gccagcugcuuggg

SEQ ID NO: 2620403 - RNA, 14 nt, Human
gccagcugcucccc

SEQ ID NO: 2620404 - RNA, 15 nt, Human
gccagcugcucccca

SEQ ID NO: 2620405 - RNA, 16 nt, Human
gccagcugcuccccag

SEQ ID NO: 2620406 - RNA, 13 nt, Human
gccagcucccucu

SEQ ID NO: 2620407 - RNA, 16 nt, Human
gccagcucagucccau

SEQ ID NO: 2620408 - RNA, 13 nt, Human
gccagcucucagc

SEQ ID NO: 2620409 - RNA, 14 nt, Human
gccagcucucagcc

SEQ ID NO: 2620410 - RNA, 13 nt, Human
gccagcucuguau

SEQ ID NO: 2620411 - RNA, 15 nt, Human
gccagcucucagcca

SEQ ID NO: 2620412 - RNA, 14 nt, Human
gccagcucauuuca

SEQ ID NO: 2620413 - RNA, 13 nt, Human
gccagcugcuccc

SEQ ID NO: 2620414 - RNA, 13 nt, Human
gccagcugccucc

SEQ ID NO: 2620415 - RNA, 22 nt, Human
gccagccuugaccauucuccac

SEQ ID NO: 2620416 - RNA, 21 nt, Human
gccagccuugaccauucucca

SEQ ID NO: 2620417 - RNA, 20 nt, Human
gccagccuugaccauucucc

SEQ ID NO: 2620418 - RNA, 14 nt, Human
gccagccuugacca

SEQ ID NO: 2620419 - RNA, 19 nt, Human
gccagcguccuccucugug

SEQ ID NO: 2620420 - RNA, 22 nt, Human
gccagcguccuccucugugacc

SEQ ID NO: 2620421 - RNA, 23 nt, Human
gccagcuacuuccuccuccccac

SEQ ID NO: 2620422 - RNA, 12 nt, Human
gccagcgaacuu

SEQ ID NO: 2620423 - RNA, 21 nt, Human
gccagccuucuuccaucccag

SEQ ID NO: 2620424 - RNA, 12 nt, Human
gccagcguccuc

SEQ ID NO: 2620425 - RNA, 13 nt, Human
gccagcguccucc

SEQ ID NO: 2620426 - RNA, 16 nt, Human
gccagcgaacuugaca

SEQ ID NO: 2620427 - RNA, 19 nt, Human
gccagcgggaauggcagcu

SEQ ID NO: 2620428 - RNA, 13 nt, Human
gccacucagcuuc

SEQ ID NO: 2620429 - RNA, 16 nt, Human
gccacucaccgaagcc

SEQ ID NO: 2620430 - RNA, 23 nt, Human
gccacucacuaggcccccacuug

SEQ ID NO: 2620431 - RNA, 19 nt, Human
gccacucacuaggccccca

SEQ ID NO: 2620432 - RNA, 18 nt, Human
gccacucacuaggccccc

SEQ ID NO: 2620433 - RNA, 20 nt, Human
gccacucacacagccaggug

SEQ ID NO: 2620434 - RNA, 18 nt, Human
gccacucacacagccagg

SEQ ID NO: 2620435 - RNA, 17 nt, Human
gccacucacacagccag

SEQ ID NO: 2620436 - RNA, 14 nt, Human
gccacucacacagc

SEQ ID NO: 2620437 - RNA, 15 nt, Human
gccacucacuaggcc

SEQ ID NO: 2620438 - RNA, 14 nt, Human
gccacucacuaggc

SEQ ID NO: 2620439 - RNA, 23 nt, Human
gccacuaacuagagcagcccugg

SEQ ID NO: 2620440 - RNA, 20 nt, Human
gccacuauuguuagucucuu

SEQ ID NO: 2620441 - RNA, 21 nt, Human
gccacuauuguuagucucuug

SEQ ID NO: 2620442 - RNA, 16 nt, Human
gccacggccaggccag

SEQ ID NO: 2620443 - RNA, 21 nt, Human
gccacgugggcaaacaggcag

SEQ ID NO: 2620444 - RNA, 18 nt, Human
gccacgugccaggcccgg

SEQ ID NO: 2620445 - RNA, 16 nt, Human
gccacgugccaggccc

SEQ ID NO: 2620446 - RNA, 17 nt, Human
gccacgugccaggcccg

SEQ ID NO: 2620447 - RNA, 14 nt, Human
gccacgugccaggc

SEQ ID NO: 2620448 - RNA, 22 nt, Human
gccacguucuuacuaguuuccc

SEQ ID NO: 2620449 - RNA, 22 nt, Human
gccacguuggagaagcccgugu

SEQ ID NO: 2620450 - RNA, 22 nt, Human
gccacguuccuuacugcagaau

SEQ ID NO: 2620451 - RNA, 23 nt, Human
gccacguguuugugcuguggugu

SEQ ID NO: 2620452 - RNA, 16 nt, Human
gccacguuccuuacug

SEQ ID NO: 2620453 - RNA, 21 nt, Human
gccacguuccuuacugcagaa

SEQ ID NO: 2620454 - RNA, 22 nt, Human
gccaaauaaugucucugugaga

SEQ ID NO: 2620455 - RNA, 18 nt, Human
gccaaauaaugucucugu

SEQ ID NO: 2620456 - RNA, 15 nt, Human
gccaaauauguccug

SEQ ID NO: 2620457 - RNA, 16 nt, Human
gccaaauaaugucucu

SEQ ID NO: 2620458 - RNA, 12 nt, Human
gccaaaguguua

SEQ ID NO: 2620459 - RNA, 17 nt, Human
gccaaaggaugugauau

SEQ ID NO: 2620460 - RNA, 16 nt, Human
gccaaaggaugugaua

SEQ ID NO: 2620461 - RNA, 18 nt, Human
gccaaaggaugugauaua

SEQ ID NO: 2620462 - RNA, 19 nt, Human
gccaaagggaaauaucauu

SEQ ID NO: 2620463 - RNA, 19 nt, Human
gccaaagacuuaguauauu

SEQ ID NO: 2620464 - RNA, 16 nt, Human
gccaaagauaaucucu

SEQ ID NO: 2620465 - RNA, 14 nt, Human
gccaaagaucacuu

SEQ ID NO: 2620466 - RNA, 23 nt, Human
gccaaaggagggucaggaaggau

SEQ ID NO: 2620467 - RNA, 15 nt, Human
gccacggccaggcca

SEQ ID NO: 2620468 - RNA, 14 nt, Human
gccacggccaggcc

SEQ ID NO: 2620469 - RNA, 17 nt, Human
gccaaauauguccuggg

SEQ ID NO: 2620470 - RNA, 22 nt, Human
gccaaaugguuuaacuucugcc

SEQ ID NO: 2620471 - RNA, 16 nt, Human
gccaaauguaauugaa

SEQ ID NO: 2620472 - RNA, 18 nt, Human
gccaaauguaauugaaua

SEQ ID NO: 2620473 - RNA, 14 nt, Human
gccacggcagccua

SEQ ID NO: 2620474 - RNA, 18 nt, Human
gccacuccagaccccugg

SEQ ID NO: 2620475 - RNA, 16 nt, Human
gccacuccagaccccu

SEQ ID NO: 2620476 - RNA, 19 nt, Human
gccacuccagaccccuggc

SEQ ID NO: 2620477 - RNA, 19 nt, Human
gccacugaagcugggauuc

SEQ ID NO: 2620478 - RNA, 16 nt, Human
gccacucauuccugua

SEQ ID NO: 2620479 - RNA, 15 nt, Human
gccacucagcuuccu

SEQ ID NO: 2620480 - RNA, 22 nt, Human
gccacucaggcccaaagccucg

SEQ ID NO: 2620481 - RNA, 14 nt, Human
gccacucaggccca

SEQ ID NO: 2620482 - RNA, 20 nt, Human
gccacucaggaggcugaggc

SEQ ID NO: 2620483 - RNA, 21 nt, Human
gccacucaggaggcugaggca

SEQ ID NO: 2620484 - RNA, 16 nt, Human
gccacugcacagagcu

SEQ ID NO: 2620485 - RNA, 15 nt, Human
gccacugcacagagc

SEQ ID NO: 2620486 - RNA, 22 nt, Human
gccacugcacagagcucuccag

SEQ ID NO: 2620487 - RNA, 17 nt, Human
gccacugcacagagcuc

SEQ ID NO: 2620488 - RNA, 10 nt, Human
gccagagaag

SEQ ID NO: 2620489 - RNA, 13 nt, Human
gccagagaaguga

SEQ ID NO: 2620490 - RNA, 11 nt, Human
gccagagaagu

SEQ ID NO: 2620491 - RNA, 13 nt, Human
gccagagaagcua

SEQ ID NO: 2620492 - RNA, 18 nt, Human
gccacugcaccgggccac

SEQ ID NO: 2620493 - RNA, 17 nt, Human
gccacugcaccgggcca

SEQ ID NO: 2620494 - RNA, 22 nt, Human
gccagagauccaaaagaagccc

SEQ ID NO: 2620495 - RNA, 12 nt, Human
gccagagccagg

SEQ ID NO: 2620496 - RNA, 14 nt, Human
gccagagccagggg

SEQ ID NO: 2620497 - RNA, 17 nt, Human
gccagagaagugacagg

SEQ ID NO: 2620498 - RNA, 16 nt, Human
gccagagaagugacag

SEQ ID NO: 2620499 - RNA, 15 nt, Human
gccagagaagugaca

SEQ ID NO: 2620500 - RNA, 14 nt, Human
gccagagaagugac

SEQ ID NO: 2620501 - RNA, 19 nt, Human
gccagagaagugacaggga

SEQ ID NO: 2620502 - RNA, 18 nt, Human
gccagagaagugacaggg

SEQ ID NO: 2620503 - RNA, 23 nt, Human
gccagagauccaaaagaagcccc

SEQ ID NO: 2620504 - RNA, 15 nt, Human
gccagagacacaagc

SEQ ID NO: 2620505 - RNA, 12 nt, Human
gccagagacaca

SEQ ID NO: 2620506 - RNA, 21 nt, Human
gccagaggaacuguccagaga

SEQ ID NO: 2620507 - RNA, 20 nt, Human
gccagaggaacuguccagag

SEQ ID NO: 2620508 - RNA, 18 nt, Human
gccagaggaacuguccag

SEQ ID NO: 2620509 - RNA, 14 nt, Human
gccagaggaacugu

SEQ ID NO: 2620510 - RNA, 18 nt, Human
gccagagggagugacaga

SEQ ID NO: 2620511 - RNA, 15 nt, Human
gccagagcugggagg

SEQ ID NO: 2620512 - RNA, 22 nt, Human
gccagagcuacccgcagaguuc

SEQ ID NO: 2620513 - RNA, 18 nt, Human
gcccgggcucugccuccc

SEQ ID NO: 2620514 - RNA, 15 nt, Human
gcccgggcucugccu

SEQ ID NO: 2620515 - RNA, 14 nt, Human
gcccgggcucugcc

SEQ ID NO: 2620516 - RNA, 13 nt, Human
gcccgggcucugc

SEQ ID NO: 2620517 - RNA, 12 nt, Human
gcccgggcucug

SEQ ID NO: 2620518 - RNA, 15 nt, Human
gcccggcuccaggcu

SEQ ID NO: 2620519 - RNA, 14 nt, Human
gcccggcuccaggc

SEQ ID NO: 2620520 - RNA, 13 nt, Human
gcccggcuccagg

SEQ ID NO: 2620521 - RNA, 19 nt, Human
gccccuucugacccaugcu

SEQ ID NO: 2620522 - RNA, 17 nt, Human
gccccuucucagaaucu

SEQ ID NO: 2620523 - RNA, 13 nt, Human
gcccgcgcccgcg

SEQ ID NO: 2620524 - RNA, 20 nt, Human
gccccuucugacccaugcug

SEQ ID NO: 2620525 - RNA, 16 nt, Human
gccccuuccccgaggg

SEQ ID NO: 2620526 - RNA, 12 nt, Human
gccccugggcuu

SEQ ID NO: 2620527 - RNA, 11 nt, Human
gccccugggcu

SEQ ID NO: 2620528 - RNA, 18 nt, Human
gccccuucucagaaucua

SEQ ID NO: 2620529 - RNA, 20 nt, Human
gccccuuccuugcucugcac

SEQ ID NO: 2620530 - RNA, 23 nt, Human
gccccuucuagguggcaaggcug

SEQ ID NO: 2620531 - RNA, 14 nt, Human
gcccggaccuuggc

SEQ ID NO: 2620532 - RNA, 23 nt, Human
gcccgcuugccucggcuccugcu

SEQ ID NO: 2620533 - RNA, 22 nt, Human
gcccgcuugccucggcuccugc

SEQ ID NO: 2620534 - RNA, 21 nt, Human
gcccgcuugccucggcuccug

SEQ ID NO: 2620535 - RNA, 19 nt, Human
gcccgcuugccucggcucc

SEQ ID NO: 2620536 - RNA, 18 nt, Human
gcccgcuugccucggcuc

SEQ ID NO: 2620537 - RNA, 14 nt, Human
gcccgcuugccucg

SEQ ID NO: 2620538 - RNA, 12 nt, Human
gcccgcuugccu

SEQ ID NO: 2620539 - RNA, 12 nt, Human
gcccggcuccag

SEQ ID NO: 2620540 - RNA, 18 nt, Human
gcccgcugggcugagccc

SEQ ID NO: 2620541 - RNA, 17 nt, Human
gcccgcugggcugagcc

SEQ ID NO: 2620542 - RNA, 16 nt, Human
gcccgcugggcugagc

SEQ ID NO: 2620543 - RNA, 15 nt, Human
gcccgcugggcugag

SEQ ID NO: 2620544 - RNA, 14 nt, Human
gcccgcugggcuga

SEQ ID NO: 2620545 - RNA, 13 nt, Human
gcccgcugggcug

SEQ ID NO: 2620546 - RNA, 12 nt, Human
gcccgcugggcu

SEQ ID NO: 2620547 - RNA, 17 nt, Human
gcccgcugaguggacug

SEQ ID NO: 2620548 - RNA, 15 nt, Human
gcccgcucugcagac

SEQ ID NO: 2620549 - RNA, 13 nt, Human
gcccgcucccagu

SEQ ID NO: 2620550 - RNA, 22 nt, Human
gcccgcucuacaucuucugccu

SEQ ID NO: 2620551 - RNA, 12 nt, Human
gcccgcucccag

SEQ ID NO: 2620552 - RNA, 23 nt, Human
gcccgcgcccucgcccccgcccc

SEQ ID NO: 2620553 - RNA, 18 nt, Human
gcccgcggggacauuggg

SEQ ID NO: 2620554 - RNA, 16 nt, Human
gcccuccuuguccacc

SEQ ID NO: 2620555 - RNA, 14 nt, Human
gcccucuggagugg

SEQ ID NO: 2620556 - RNA, 16 nt, Human
gcccucuggaguggcc

SEQ ID NO: 2620557 - RNA, 17 nt, Human
gcccucuggaguggcca

SEQ ID NO: 2620558 - RNA, 18 nt, Human
gcccucuggaguggccac

SEQ ID NO: 2620559 - RNA, 19 nt, Human
gcccucuggaguggccacu

SEQ ID NO: 2620560 - RNA, 20 nt, Human
gcccucuggaguggccacua

SEQ ID NO: 2620561 - RNA, 22 nt, Human
gcccucuggaguggccacuaag

SEQ ID NO: 2620562 - RNA, 22 nt, Human
gcccucugcccacucccugcaa

SEQ ID NO: 2620563 - RNA, 14 nt, Human
gcccuccucuccca

SEQ ID NO: 2620564 - RNA, 17 nt, Human
gcccuccucucccauug

SEQ ID NO: 2620565 - RNA, 20 nt, Human
gcccuccucucccauugucc

SEQ ID NO: 2620566 - RNA, 12 nt, Human
gcccuccucucc

SEQ ID NO: 2620567 - RNA, 23 nt, Human
gcccuccugaaacuuacacacaa

SEQ ID NO: 2620568 - RNA, 15 nt, Human
gcccuccuuguccac

SEQ ID NO: 2620569 - RNA, 10 nt, Human
gcccuccuuc

SEQ ID NO: 2620570 - RNA, 20 nt, Human
gcccgggcucugccucccau

SEQ ID NO: 2620571 - RNA, 19 nt, Human
gcccgggcucugccuccca

SEQ ID NO: 2620572 - RNA, 21 nt, Human
gcccgggcucugccucccauc

SEQ ID NO: 2620573 - RNA, 19 nt, Human
gcccuccccauggagccag

SEQ ID NO: 2620574 - RNA, 22 nt, Human
gcccggagauuggacggccuga

SEQ ID NO: 2620575 - RNA, 19 nt, Human
gcccggagauuggacggcc

SEQ ID NO: 2620576 - RNA, 21 nt, Human
gcccggagauuggacggccug

SEQ ID NO: 2620577 - RNA, 13 nt, Human
gcccucccgcccc

SEQ ID NO: 2620578 - RNA, 22 nt, Human
gcccuccccuccccugcugcag

SEQ ID NO: 2620579 - RNA, 18 nt, Human
gcccuccuacccugcgcc

SEQ ID NO: 2620580 - RNA, 15 nt, Human
gcccucccugccccu

SEQ ID NO: 2620581 - RNA, 15 nt, Human
gcccucccgccccuu

SEQ ID NO: 2620582 - RNA, 13 nt, Human
gcccuccucaccc

SEQ ID NO: 2620583 - RNA, 14 nt, Human
gcccuccucacccc

SEQ ID NO: 2620584 - RNA, 21 nt, Human
gcccuccucaccccgucuggg

SEQ ID NO: 2620585 - RNA, 24 nt, Human
gcccuccuacccugcgcccagucc

SEQ ID NO: 2620586 - RNA, 19 nt, Human
gcccuccuacccugcgccc

SEQ ID NO: 2620587 - RNA, 19 nt, Human
gcccuccccuccccugcug

SEQ ID NO: 2620588 - RNA, 18 nt, Human
gcccuccccuccccugcu

SEQ ID NO: 2620589 - RNA, 17 nt, Human
gcccuccccuccccugc

SEQ ID NO: 2620590 - RNA, 16 nt, Human
gcccuccccuccccug

SEQ ID NO: 2620591 - RNA, 13 nt, Human
gcccuccccuccc

SEQ ID NO: 2620592 - RNA, 18 nt, Human
gcccuccccauggagcca

SEQ ID NO: 2620593 - RNA, 12 nt, Human
gcccuccccucc

SEQ ID NO: 2620594 - RNA, 19 nt, Human
gcccuccccucucugcacc

SEQ ID NO: 2620595 - RNA, 18 nt, Human
gcccuccccucucugcac

SEQ ID NO: 2620596 - RNA, 21 nt, Human
gcccuccccuccccugcugca

SEQ ID NO: 2620597 - RNA, 20 nt, Human
gcccuccccuccccugcugc

SEQ ID NO: 2620598 - RNA, 15 nt, Human
gcccuccccucucug

SEQ ID NO: 2620599 - RNA, 21 nt, Human
gccccucccacacacacccac

SEQ ID NO: 2620600 - RNA, 15 nt, Human
gccccucccacacac

SEQ ID NO: 2620601 - RNA, 14 nt, Human
gccccuccagcuug

SEQ ID NO: 2620602 - RNA, 18 nt, Human
gccccuccagcuugugga

SEQ ID NO: 2620603 - RNA, 13 nt, Human
gccccuccagcuu

SEQ ID NO: 2620604 - RNA, 12 nt, Human
gccccuccagcu

SEQ ID NO: 2620605 - RNA, 21 nt, Human
gccccucaucugcucagcagc

SEQ ID NO: 2620606 - RNA, 21 nt, Human
gccccucaucucucugcccaa

SEQ ID NO: 2620607 - RNA, 22 nt, Human
gccccuagcuuagagccucccu

SEQ ID NO: 2620608 - RNA, 20 nt, Human
gccccuauguaguccgugcu

SEQ ID NO: 2620609 - RNA, 21 nt, Human
gccccucagggucccuggugg

SEQ ID NO: 2620610 - RNA, 19 nt, Human
gccccucagggucccuggu

SEQ ID NO: 2620611 - RNA, 19 nt, Human
gccccuagcccaggagaga

SEQ ID NO: 2620612 - RNA, 18 nt, Human
gccccuagcccaggagag

SEQ ID NO: 2620613 - RNA, 15 nt, Human
gccccuagcccagga

SEQ ID NO: 2620614 - RNA, 14 nt, Human
gccccuagcccagg

SEQ ID NO: 2620615 - RNA, 21 nt, Human
gccccuagcccaggagagaga

SEQ ID NO: 2620616 - RNA, 20 nt, Human
gccccuagcccaggagagag

SEQ ID NO: 2620617 - RNA, 23 nt, Human
gccccucaacucuccuccagagu

SEQ ID NO: 2620618 - RNA, 16 nt, Human
gccccuaccccacacc

SEQ ID NO: 2620619 - RNA, 19 nt, Human
gccccguguccugccuguc

SEQ ID NO: 2620620 - RNA, 15 nt, Human
gccccgugcagacug

SEQ ID NO: 2620621 - RNA, 19 nt, Human
gccccgugcagacuggagg

SEQ ID NO: 2620622 - RNA, 20 nt, Human
gccccgugcagacuggaggg

SEQ ID NO: 2620623 - RNA, 22 nt, Human
gccccgugcagacuggagggga

SEQ ID NO: 2620624 - RNA, 17 nt, Human
gccccuagaaucagccu

SEQ ID NO: 2620625 - RNA, 13 nt, Human
gccccuagcccag

SEQ ID NO: 2620626 - RNA, 20 nt, Human
gccccuagaaucagccuagg

SEQ ID NO: 2620627 - RNA, 19 nt, Human
gccccuggcccagcggccc

SEQ ID NO: 2620628 - RNA, 18 nt, Human
gccccuggcccagcggcc

SEQ ID NO: 2620629 - RNA, 17 nt, Human
gccccuggcccagcggc

SEQ ID NO: 2620630 - RNA, 16 nt, Human
gccccuggcccagcgg

SEQ ID NO: 2620631 - RNA, 23 nt, Human
gccccuggcccagcggccccucc

SEQ ID NO: 2620632 - RNA, 22 nt, Human
gccccuggcccagcggccccuc

SEQ ID NO: 2620633 - RNA, 13 nt, Human
gccccuggcccca

SEQ ID NO: 2620634 - RNA, 13 nt, Human
gccccuggcccag

SEQ ID NO: 2620635 - RNA, 14 nt, Human
gccccuggccccag

SEQ ID NO: 2620636 - RNA, 12 nt, Human
gccccuggcugg

SEQ ID NO: 2620637 - RNA, 14 nt, Human
gccccuggcuggga

SEQ ID NO: 2620638 - RNA, 16 nt, Human
gccccuggcugggacg

SEQ ID NO: 2620639 - RNA, 23 nt, Human
gccccuggcugggacguggcuca

SEQ ID NO: 2620640 - RNA, 17 nt, Human
gccccuucccccuccaa

SEQ ID NO: 2620641 - RNA, 19 nt, Human
gccccugcacuccagccug

SEQ ID NO: 2620642 - RNA, 23 nt, Human
gccccuggcagccccuguucugg

SEQ ID NO: 2620643 - RNA, 20 nt, Human
gccccugagaucucugcagg

SEQ ID NO: 2620644 - RNA, 22 nt, Human
gccccugagcaaugucugugcu

SEQ ID NO: 2620645 - RNA, 20 nt, Human
gccccugagcaaugucugug

SEQ ID NO: 2620646 - RNA, 23 nt, Human
gccccugagcaaugucugugcua

SEQ ID NO: 2620647 - RNA, 13 nt, Human
gccccugcacaaa

SEQ ID NO: 2620648 - RNA, 21 nt, Human
gccccgucccccucuggcucc

SEQ ID NO: 2620649 - RNA, 23 nt, Human
gccccgucaccaucucaggccac

SEQ ID NO: 2620650 - RNA, 21 nt, Human
gccccgucaccaucucaggcc

SEQ ID NO: 2620651 - RNA, 22 nt, Human
gccccgucaccaucucaggcca

SEQ ID NO: 2620652 - RNA, 17 nt, Human
gccccgucccccucugg

SEQ ID NO: 2620653 - RNA, 18 nt, Human
gccccgggacuuggaggg

SEQ ID NO: 2620654 - RNA, 17 nt, Human
gccccgucaccaucuca

SEQ ID NO: 2620655 - RNA, 18 nt, Human
gccccgucaccaucucag

SEQ ID NO: 2620656 - RNA, 20 nt, Human
gccccgucaccaucucaggc

SEQ ID NO: 2620657 - RNA, 17 nt, Human
gccccgugggguuccuc

SEQ ID NO: 2620658 - RNA, 13 nt, Human
gccccgugaggca

SEQ ID NO: 2620659 - RNA, 20 nt, Human
gccccgucucaugaggggcc

SEQ ID NO: 2620660 - RNA, 14 nt, Human
gccccggcccuggg

SEQ ID NO: 2620661 - RNA, 13 nt, Human
gccccggccccgg

SEQ ID NO: 2620662 - RNA, 18 nt, Human
gccccggccccagccaga

SEQ ID NO: 2620663 - RNA, 17 nt, Human
gccccggccccagccag

SEQ ID NO: 2620664 - RNA, 16 nt, Human
gccccggccccagcca

SEQ ID NO: 2620665 - RNA, 14 nt, Human
gccccggccccagc

SEQ ID NO: 2620666 - RNA, 18 nt, Human
gccccggccaccucugcg

SEQ ID NO: 2620667 - RNA, 17 nt, Human
gccccggccaccucugc

SEQ ID NO: 2620668 - RNA, 17 nt, Human
gccccgggacuuggagg

SEQ ID NO: 2620669 - RNA, 21 nt, Human
gccccggcccugggcucggag

SEQ ID NO: 2620670 - RNA, 17 nt, Human
gccccggcccugggcuc

SEQ ID NO: 2620671 - RNA, 15 nt, Human
gccccggcccugggc

SEQ ID NO: 2620672 - RNA, 19 nt, Human
gccccggggugaguccauu

SEQ ID NO: 2620673 - RNA, 15 nt, Human
gccccgucaccaucu

SEQ ID NO: 2620674 - RNA, 22 nt, Human
gccccgcuuggcuucuucuuua

SEQ ID NO: 2620675 - RNA, 18 nt, Human
gccccgcuuggcuucuuc

SEQ ID NO: 2620676 - RNA, 17 nt, Human
gccccgcgccuccuucc

SEQ ID NO: 2620677 - RNA, 14 nt, Human
gccccgcuugucca

SEQ ID NO: 2620678 - RNA, 16 nt, Human
gccccgcuuguccagc

SEQ ID NO: 2620679 - RNA, 18 nt, Human
gccccgcuuguccagcgc

SEQ ID NO: 2620680 - RNA, 19 nt, Human
gccccgcuuguccagcgcc

SEQ ID NO: 2620681 - RNA, 16 nt, Human
gccccggccaccucug

SEQ ID NO: 2620682 - RNA, 15 nt, Human
gccccggccaccucu

SEQ ID NO: 2620683 - RNA, 14 nt, Human
gccccggccaccuc

SEQ ID NO: 2620684 - RNA, 13 nt, Human
gccccggccaccu

SEQ ID NO: 2620685 - RNA, 20 nt, Human
gccccgcuuguccagcgccu

SEQ ID NO: 2620686 - RNA, 14 nt, Human
gccccgcccaggcu

SEQ ID NO: 2620687 - RNA, 22 nt, Human
gccccgaggccuucucugaagg

SEQ ID NO: 2620688 - RNA, 19 nt, Human
gccccgcagaccuccccag

SEQ ID NO: 2620689 - RNA, 18 nt, Human
gccccgcagaccucccca

SEQ ID NO: 2620690 - RNA, 15 nt, Human
gccccgcagaccucc

SEQ ID NO: 2620691 - RNA, 15 nt, Human
gccccgccccacauu

SEQ ID NO: 2620692 - RNA, 22 nt, Human
gccccgccccacauuccgacaa

SEQ ID NO: 2620693 - RNA, 21 nt, Human
gccccgcagaccuccccagcc

SEQ ID NO: 2620694 - RNA, 20 nt, Human
gccccgcagaccuccccagc

SEQ ID NO: 2620695 - RNA, 13 nt, Human
gccccgccccaca

SEQ ID NO: 2620696 - RNA, 14 nt, Human
gccccgccccacau

SEQ ID NO: 2620697 - RNA, 14 nt, Human
gccccgccuccccg

SEQ ID NO: 2620698 - RNA, 21 nt, Human
gccccgcccccaguccccacc

SEQ ID NO: 2620699 - RNA, 13 nt, Human
gccccgccgccug

SEQ ID NO: 2620700 - RNA, 23 nt, Human
gccccauucugccugcccaggcc

SEQ ID NO: 2620701 - RNA, 22 nt, Human
gccccauucugccugcccaggc

SEQ ID NO: 2620702 - RNA, 23 nt, Human
gccccgaggccuucucugaagga

SEQ ID NO: 2620703 - RNA, 14 nt, Human
gccccaugcuggag

SEQ ID NO: 2620704 - RNA, 13 nt, Human
gccccaugcugga

SEQ ID NO: 2620705 - RNA, 20 nt, Human
gccccauucuuuuguaauuu

SEQ ID NO: 2620706 - RNA, 21 nt, Human
gcccaucccuggaaggugcug

SEQ ID NO: 2620707 - RNA, 19 nt, Human
gcccaucccugccugguca

SEQ ID NO: 2620708 - RNA, 18 nt, Human
gcccaucccugccugguc

SEQ ID NO: 2620709 - RNA, 16 nt, Human
gcccaucccugccugg

SEQ ID NO: 2620710 - RNA, 14 nt, Human
gcccaucccugccu

SEQ ID NO: 2620711 - RNA, 12 nt, Human
gcccaucccugc

SEQ ID NO: 2620712 - RNA, 20 nt, Human
gcccauccccccucaccagg

SEQ ID NO: 2620713 - RNA, 22 nt, Human
gcccaucugggggccucuucug

SEQ ID NO: 2620714 - RNA, 22 nt, Human
gcccaucuaugucccuugcugu

SEQ ID NO: 2620715 - RNA, 20 nt, Human
gccccagccagaguuccugc

SEQ ID NO: 2620716 - RNA, 19 nt, Human
gccccagccagaguuccug

SEQ ID NO: 2620717 - RNA, 14 nt, Human
gccccagccagagu

SEQ ID NO: 2620718 - RNA, 12 nt, Human
gccccagccaga

SEQ ID NO: 2620719 - RNA, 11 nt, Human
gccccagccag

SEQ ID NO: 2620720 - RNA, 19 nt, Human
gcccauggacaggcuggcu

SEQ ID NO: 2620721 - RNA, 20 nt, Human
gcccauggacaggcuggcuc

SEQ ID NO: 2620722 - RNA, 21 nt, Human
gcccauggacaggcuggcucc

SEQ ID NO: 2620723 - RNA, 23 nt, Human
gcccauggacaggcuggcuccag

SEQ ID NO: 2620724 - RNA, 16 nt, Human
gcccaugccaccgcuu

SEQ ID NO: 2620725 - RNA, 17 nt, Human
gcccaugaguccuugaa

SEQ ID NO: 2620726 - RNA, 18 nt, Human
gcccaucugggaaaauac

SEQ ID NO: 2620727 - RNA, 18 nt, Human
gcccaggcuggccagccc

SEQ ID NO: 2620728 - RNA, 13 nt, Human
gcccaugcccacc

SEQ ID NO: 2620729 - RNA, 14 nt, Human
gcccaugcccaccu

SEQ ID NO: 2620730 - RNA, 15 nt, Human
gcccaugcccaccug

SEQ ID NO: 2620731 - RNA, 19 nt, Human
gcccaugcccaccugccca

SEQ ID NO: 2620732 - RNA, 18 nt, Human
gccccagccuggcccagc

SEQ ID NO: 2620733 - RNA, 17 nt, Human
gccccagccuggcccag

SEQ ID NO: 2620734 - RNA, 16 nt, Human
gccccagccuggccca

SEQ ID NO: 2620735 - RNA, 15 nt, Human
gccccagccuggccc

SEQ ID NO: 2620736 - RNA, 14 nt, Human
gccccagccuggcc

SEQ ID NO: 2620737 - RNA, 13 nt, Human
gccccagccuggc

SEQ ID NO: 2620738 - RNA, 12 nt, Human
gccccagccugg

SEQ ID NO: 2620739 - RNA, 22 nt, Human
gccccagccuggcccagcuccc

SEQ ID NO: 2620740 - RNA, 21 nt, Human
gccccagccuggcccagcucc

SEQ ID NO: 2620741 - RNA, 20 nt, Human
gccccagccuggcccagcuc

SEQ ID NO: 2620742 - RNA, 19 nt, Human
gccccagccuggcccagcu

SEQ ID NO: 2620743 - RNA, 13 nt, Human
gccccagcucugg

SEQ ID NO: 2620744 - RNA, 22 nt, Human
gccccaggaaaggcccagccac

SEQ ID NO: 2620745 - RNA, 11 nt, Human
gccccaggacc

SEQ ID NO: 2620746 - RNA, 14 nt, Human
gccccaggaagccg

SEQ ID NO: 2620747 - RNA, 15 nt, Human
gccccaggaaaggcc

SEQ ID NO: 2620748 - RNA, 17 nt, Human
gccccagcugacaugga

SEQ ID NO: 2620749 - RNA, 11 nt, Human
gccccagcuga

SEQ ID NO: 2620750 - RNA, 14 nt, Human
gccccagcucuggc

SEQ ID NO: 2620751 - RNA, 16 nt, Human
gccccagcccacccuc

SEQ ID NO: 2620752 - RNA, 15 nt, Human
gccccagcccacccu

SEQ ID NO: 2620753 - RNA, 14 nt, Human
gccccagcccaccc

SEQ ID NO: 2620754 - RNA, 12 nt, Human
gccccagcccac

SEQ ID NO: 2620755 - RNA, 16 nt, Human
gccccagcccaagucc

SEQ ID NO: 2620756 - RNA, 15 nt, Human
gccccagcccaaguc

SEQ ID NO: 2620757 - RNA, 14 nt, Human
gccccagcccaagu

SEQ ID NO: 2620758 - RNA, 12 nt, Human
gccccagcccaa

SEQ ID NO: 2620759 - RNA, 17 nt, Human
gccccagcccccuuugg

SEQ ID NO: 2620760 - RNA, 20 nt, Human
gccccagcccacccuccugu

SEQ ID NO: 2620761 - RNA, 18 nt, Human
gccccagcccacccuccu

SEQ ID NO: 2620762 - RNA, 21 nt, Human
gccccagcccacccuccuguc

SEQ ID NO: 2620763 - RNA, 21 nt, Human
gccccagccucccugaagccu

SEQ ID NO: 2620764 - RNA, 16 nt, Human
gccccagccucccuga

SEQ ID NO: 2620765 - RNA, 18 nt, Human
gccccagccucccugaag

SEQ ID NO: 2620766 - RNA, 10 nt, Human
gccccagccu

SEQ ID NO: 2620767 - RNA, 21 nt, Human
gccccauucugccugcccagg

SEQ ID NO: 2620768 - RNA, 20 nt, Human
gccccauucugccugcccag

SEQ ID NO: 2620769 - RNA, 18 nt, Human
gccccauucugccugccc

SEQ ID NO: 2620770 - RNA, 17 nt, Human
gccccauucugccugcc

SEQ ID NO: 2620771 - RNA, 23 nt, Human
gccccauccucuguacagagccc

SEQ ID NO: 2620772 - RNA, 14 nt, Human
gccccaugccuguc

SEQ ID NO: 2620773 - RNA, 16 nt, Human
gccccaugccugucca

SEQ ID NO: 2620774 - RNA, 12 nt, Human
gccccaugcugg

SEQ ID NO: 2620775 - RNA, 23 nt, Human
gccccaugccuguccagccuggg

SEQ ID NO: 2620776 - RNA, 17 nt, Human
gccccaugccuguccag

SEQ ID NO: 2620777 - RNA, 20 nt, Human
gccccaugccuguccagccu

SEQ ID NO: 2620778 - RNA, 21 nt, Human
gccccagugcccacaggauca

SEQ ID NO: 2620779 - RNA, 17 nt, Human
gccccagugcccacagg

SEQ ID NO: 2620780 - RNA, 16 nt, Human
gccccagugcccacag

SEQ ID NO: 2620781 - RNA, 15 nt, Human
gccccagugcccaca

SEQ ID NO: 2620782 - RNA, 12 nt, Human
gccccaggacca

SEQ ID NO: 2620783 - RNA, 14 nt, Human
gccccaggaccagc

SEQ ID NO: 2620784 - RNA, 15 nt, Human
gccccaggaccagcu

SEQ ID NO: 2620785 - RNA, 16 nt, Human
gccccaggaccagcuc

SEQ ID NO: 2620786 - RNA, 17 nt, Human
gccccaggaccagcuca

SEQ ID NO: 2620787 - RNA, 18 nt, Human
gccccaggaccagcucag

SEQ ID NO: 2620788 - RNA, 19 nt, Human
gccccaggaccagcucagg

SEQ ID NO: 2620789 - RNA, 22 nt, Human
gccccaggaccagcucaggaca

SEQ ID NO: 2620790 - RNA, 23 nt, Human
gccccaggaccagcucaggacag

SEQ ID NO: 2620791 - RNA, 24 nt, Human
gccccaggaccagcucaggacaga

SEQ ID NO: 2620792 - RNA, 20 nt, Human
gccccaggaccuggcugcca

SEQ ID NO: 2620793 - RNA, 21 nt, Human
gccccaggaccuggcugccau

SEQ ID NO: 2620794 - RNA, 22 nt, Human
gccccaggaccuggcugccaua

SEQ ID NO: 2620795 - RNA, 12 nt, Human
gccccaggcagg

SEQ ID NO: 2620796 - RNA, 15 nt, Human
gccccaggcaggcug

SEQ ID NO: 2620797 - RNA, 19 nt, Human
gccccaggcaggcugugcg

SEQ ID NO: 2620798 - RNA, 20 nt, Human
gccccaggcaggcugugcgc

SEQ ID NO: 2620799 - RNA, 21 nt, Human
gccccaggcagggccaacccu

SEQ ID NO: 2620800 - RNA, 18 nt, Human
gcccaggccuccuacagc

SEQ ID NO: 2620801 - RNA, 16 nt, Human
gcccaggaaaggcucc

SEQ ID NO: 2620802 - RNA, 15 nt, Human
gcccaggaaaggcuc

SEQ ID NO: 2620803 - RNA, 12 nt, Human
gcccaggaaagg

SEQ ID NO: 2620804 - RNA, 22 nt, Human
gcccaggcgggagcgguggccc

SEQ ID NO: 2620805 - RNA, 12 nt, Human
gcccaggcggga

SEQ ID NO: 2620806 - RNA, 23 nt, Human
gcccagcuugggcccagcugggc

SEQ ID NO: 2620807 - RNA, 22 nt, Human
gcccagcuugggcccagcuggg

SEQ ID NO: 2620808 - RNA, 21 nt, Human
gcccagcuugggcccagcugg

SEQ ID NO: 2620809 - RNA, 20 nt, Human
gcccagcuugggcccagcug

SEQ ID NO: 2620810 - RNA, 19 nt, Human
gcccagcuugggcccagcu

SEQ ID NO: 2620811 - RNA, 17 nt, Human
gcccaggccugccuguu

SEQ ID NO: 2620812 - RNA, 22 nt, Human
gcccaggcuggccagccccaca

SEQ ID NO: 2620813 - RNA, 20 nt, Human
gcccaggcuggccagcccca

SEQ ID NO: 2620814 - RNA, 19 nt, Human
gcccaggcuggccagcccc

SEQ ID NO: 2620815 - RNA, 11 nt, Human
gcccaggcugg

SEQ ID NO: 2620816 - RNA, 19 nt, Human
gcccaccgcaugcccccuc

SEQ ID NO: 2620817 - RNA, 18 nt, Human
gcccaccgcaugcccccu

SEQ ID NO: 2620818 - RNA, 17 nt, Human
gcccaccgcaugccccc

SEQ ID NO: 2620819 - RNA, 16 nt, Human
gcccaccgcaugcccc

SEQ ID NO: 2620820 - RNA, 14 nt, Human
gcccaccgcaugcc

SEQ ID NO: 2620821 - RNA, 21 nt, Human
gcccaccuccccacgcccucc

SEQ ID NO: 2620822 - RNA, 17 nt, Human
gcccaccuccccacgcc

SEQ ID NO: 2620823 - RNA, 15 nt, Human
gcccaccuccccacg

SEQ ID NO: 2620824 - RNA, 12 nt, Human
gcccaccucccc

SEQ ID NO: 2620825 - RNA, 20 nt, Human
gcccaccgcaugcccccucg

SEQ ID NO: 2620826 - RNA, 10 nt, Human
gcccaccucc

SEQ ID NO: 2620827 - RNA, 19 nt, Human
gcccagcuauaccugugcc

SEQ ID NO: 2620828 - RNA, 18 nt, Human
gcccaccuccccacgccc

SEQ ID NO: 2620829 - RNA, 20 nt, Human
gcccagcuauaccugugccu

SEQ ID NO: 2620830 - RNA, 15 nt, Human
gcccagcucagaggg

SEQ ID NO: 2620831 - RNA, 13 nt, Human
gcccaccugccca

SEQ ID NO: 2620832 - RNA, 14 nt, Human
gcccaccugcccau

SEQ ID NO: 2620833 - RNA, 15 nt, Human
gcccaccugcccauc

SEQ ID NO: 2620834 - RNA, 20 nt, Human
gcccaccugcccaucacagg

SEQ ID NO: 2620835 - RNA, 17 nt, Human
gcccagcucccccggga

SEQ ID NO: 2620836 - RNA, 16 nt, Human
gcccagcucccccggg

SEQ ID NO: 2620837 - RNA, 19 nt, Human
gcccagcucccccgggagg

SEQ ID NO: 2620838 - RNA, 13 nt, Human
gcccagcucugaa

SEQ ID NO: 2620839 - RNA, 12 nt, Human
gcccagcuccaa

SEQ ID NO: 2620840 - RNA, 15 nt, Human
gcccagcuccaaggg

SEQ ID NO: 2620841 - RNA, 13 nt, Human
gcccagcuccccc

SEQ ID NO: 2620842 - RNA, 12 nt, Human
gcccagcucccc

SEQ ID NO: 2620843 - RNA, 11 nt, Human
gcccagcuccc

SEQ ID NO: 2620844 - RNA, 13 nt, Human
gcccagcugcacc

SEQ ID NO: 2620845 - RNA, 14 nt, Human
gcccagcugcaccu

SEQ ID NO: 2620846 - RNA, 15 nt, Human
gcccagcugcaccug

SEQ ID NO: 2620847 - RNA, 18 nt, Human
gcccagcugcaccugcca

SEQ ID NO: 2620848 - RNA, 23 nt, Human
gcccagcugcaccugccagccug

SEQ ID NO: 2620849 - RNA, 24 nt, Human
gcccagcugcaccugccagccugg

SEQ ID NO: 2620850 - RNA, 18 nt, Human
gcccagcuugggcccagc

SEQ ID NO: 2620851 - RNA, 17 nt, Human
gcccagcuugggcccag

SEQ ID NO: 2620852 - RNA, 16 nt, Human
gcccagcuugggccca

SEQ ID NO: 2620853 - RNA, 15 nt, Human
gcccaggcuggcgug

SEQ ID NO: 2620854 - RNA, 14 nt, Human
gcccaggcuggcgu

SEQ ID NO: 2620855 - RNA, 14 nt, Human
gcccagggcccaga

SEQ ID NO: 2620856 - RNA, 15 nt, Human
gcccagggcccagag

SEQ ID NO: 2620857 - RNA, 16 nt, Human
gcccagggcccagagc

SEQ ID NO: 2620858 - RNA, 17 nt, Human
gcccagggcccagagcc

SEQ ID NO: 2620859 - RNA, 16 nt, Human
gcccaggcuggcgugc

SEQ ID NO: 2620860 - RNA, 18 nt, Human
gcccagggcccagagccc

SEQ ID NO: 2620861 - RNA, 19 nt, Human
gcccagggcccagagccca

SEQ ID NO: 2620862 - RNA, 20 nt, Human
gcccagggcccagagcccag

SEQ ID NO: 2620863 - RNA, 21 nt, Human
gcccagggcccagagcccagc

SEQ ID NO: 2620864 - RNA, 23 nt, Human
gcccagggcccagagcccagcuc

SEQ ID NO: 2620865 - RNA, 12 nt, Human
gcccagggcuca

SEQ ID NO: 2620866 - RNA, 13 nt, Human
gcccagggcucag

SEQ ID NO: 2620867 - RNA, 14 nt, Human
gcccagggcucagc

SEQ ID NO: 2620868 - RNA, 15 nt, Human
gcccagggcucagcc

SEQ ID NO: 2620869 - RNA, 16 nt, Human
gcccagggcucagccu

SEQ ID NO: 2620870 - RNA, 17 nt, Human
gcccagggcucagccug

SEQ ID NO: 2620871 - RNA, 23 nt, Human
gcccaggcuggccagccccacag

SEQ ID NO: 2620872 - RNA, 17 nt, Human
gcccaggguucccccag

SEQ ID NO: 2620873 - RNA, 19 nt, Human
gcccaggguucccccagcc

SEQ ID NO: 2620874 - RNA, 20 nt, Human
gcccaggguucccccagccc

SEQ ID NO: 2620875 - RNA, 21 nt, Human
gcccaggguucccccagcccu

SEQ ID NO: 2620876 - RNA, 16 nt, Human
gcccagguccucugau

SEQ ID NO: 2620877 - RNA, 15 nt, Human
gcccagguccucuga

SEQ ID NO: 2620878 - RNA, 22 nt, Human
gcccaggguucccccagcccug

SEQ ID NO: 2620879 - RNA, 23 nt, Human
gcccaggguucccccagcccugu

SEQ ID NO: 2620880 - RNA, 18 nt, Human
gcccauccccccucacca

SEQ ID NO: 2620881 - RNA, 17 nt, Human
gcccauccccccucacc

SEQ ID NO: 2620882 - RNA, 16 nt, Human
gcccauccccccucac

SEQ ID NO: 2620883 - RNA, 15 nt, Human
gcccauccccccuca

SEQ ID NO: 2620884 - RNA, 14 nt, Human
gcccauccccccuc

SEQ ID NO: 2620885 - RNA, 12 nt, Human
gcccaucccccc

SEQ ID NO: 2620886 - RNA, 18 nt, Human
gcccauccccaggcaccu

SEQ ID NO: 2620887 - RNA, 19 nt, Human
gcccaguucacccugauuu

SEQ ID NO: 2620888 - RNA, 15 nt, Human
gcccagucccccaac

SEQ ID NO: 2620889 - RNA, 14 nt, Human
gcccagucccccaa

SEQ ID NO: 2620890 - RNA, 17 nt, Human
gcccagucccccaaccc

SEQ ID NO: 2620891 - RNA, 13 nt, Human
gcccaguggcugc

SEQ ID NO: 2620892 - RNA, 22 nt, Human
gcccagugucaaguugugcuug

SEQ ID NO: 2620893 - RNA, 21 nt, Human
gcccagucccccaaccccagc

SEQ ID NO: 2620894 - RNA, 20 nt, Human
gcccagucuggaaugcagug

SEQ ID NO: 2620895 - RNA, 13 nt, Human
gcccaguccccca

SEQ ID NO: 2620896 - RNA, 22 nt, Human
gcccagucuggaaugcaguggu

SEQ ID NO: 2620897 - RNA, 17 nt, Human
gcccaguagaccuuguu

SEQ ID NO: 2620898 - RNA, 15 nt, Human
gcccaguagaccuug

SEQ ID NO: 2620899 - RNA, 17 nt, Human
gcccagguuucuggucu

SEQ ID NO: 2620900 - RNA, 23 nt, Human
gcccagguuucuggucucuaggc

SEQ ID NO: 2620901 - RNA, 14 nt, Human
gcccagguuucugg

SEQ ID NO: 2620902 - RNA, 18 nt, Human
gcccuugagcuccccaaa

SEQ ID NO: 2620903 - RNA, 12 nt, Human
gccgaccucagc

SEQ ID NO: 2620904 - RNA, 13 nt, Human
gccgaccucagcc

SEQ ID NO: 2620905 - RNA, 14 nt, Human
gccgaccucagccu

SEQ ID NO: 2620906 - RNA, 15 nt, Human
gccgaccucagccuu

SEQ ID NO: 2620907 - RNA, 17 nt, Human
gccgaccucagccuucc

SEQ ID NO: 2620908 - RNA, 13 nt, Human
gccgaccucgucc

SEQ ID NO: 2620909 - RNA, 19 nt, Human
gccgaccucguccuccccc

SEQ ID NO: 2620910 - RNA, 21 nt, Human
gccgaccucguccucccccug

SEQ ID NO: 2620911 - RNA, 17 nt, Human
gcccuugagcuccccaa

SEQ ID NO: 2620912 - RNA, 22 nt, Human
gcccuugagcuccccaaaaacc

SEQ ID NO: 2620913 - RNA, 19 nt, Human
gcccuugcaguucagcacc

SEQ ID NO: 2620914 - RNA, 20 nt, Human
gcccuugcaguucagcacca

SEQ ID NO: 2620915 - RNA, 21 nt, Human
gcccuugcaguucagcaccac

SEQ ID NO: 2620916 - RNA, 22 nt, Human
gcccuugcaguucagcaccacc

SEQ ID NO: 2620917 - RNA, 16 nt, Human
gccgagauagccaagg

SEQ ID NO: 2620918 - RNA, 17 nt, Human
gccgagagccugcuccc

SEQ ID NO: 2620919 - RNA, 19 nt, Human
gccgagagccugcuccccc

SEQ ID NO: 2620920 - RNA, 20 nt, Human
gccgagagccugcuccccca

SEQ ID NO: 2620921 - RNA, 22 nt, Human
gccgagagccugcucccccacc

SEQ ID NO: 2620922 - RNA, 13 nt, Human
gccgacuccuggg

SEQ ID NO: 2620923 - RNA, 23 nt, Human
gccgacuuuguaccccccaaccc

SEQ ID NO: 2620924 - RNA, 21 nt, Human
gccgacuuuguaccccccaac

SEQ ID NO: 2620925 - RNA, 22 nt, Human
gccgacugcacagcggccccug

SEQ ID NO: 2620926 - RNA, 20 nt, Human
gccgaccucguccucccccu

SEQ ID NO: 2620927 - RNA, 13 nt, Human
gccgagaagcaag

SEQ ID NO: 2620928 - RNA, 14 nt, Human
gccgagaagcaaga

SEQ ID NO: 2620929 - RNA, 22 nt, Human
gccgagacauggcuugccacag

SEQ ID NO: 2620930 - RNA, 20 nt, Human
gccgagaagccagugcggca

SEQ ID NO: 2620931 - RNA, 12 nt, Human
gccgagagccug

SEQ ID NO: 2620932 - RNA, 15 nt, Human
gccgagagccugcuc

SEQ ID NO: 2620933 - RNA, 16 nt, Human
gccgagagccugcucc

SEQ ID NO: 2620934 - RNA, 23 nt, Human
gcccuucucuccagccccuggau

SEQ ID NO: 2620935 - RNA, 19 nt, Human
gcccuucuuuccacagaag

SEQ ID NO: 2620936 - RNA, 13 nt, Human
gcccuucucucca

SEQ ID NO: 2620937 - RNA, 22 nt, Human
gcccuuccucuccacugccuuc

SEQ ID NO: 2620938 - RNA, 12 nt, Human
gcccucuguccu

SEQ ID NO: 2620939 - RNA, 15 nt, Human
gcccucuguccugac

SEQ ID NO: 2620940 - RNA, 14 nt, Human
gcccucuguccuga

SEQ ID NO: 2620941 - RNA, 13 nt, Human
gcccucuguccug

SEQ ID NO: 2620942 - RNA, 14 nt, Human
gcccucuuccauca

SEQ ID NO: 2620943 - RNA, 11 nt, Human
gcccucuucca

SEQ ID NO: 2620944 - RNA, 19 nt, Human
gccgggccgaauccccucc

SEQ ID NO: 2620945 - RNA, 19 nt, Human
gccgggccccugggcuugg

SEQ ID NO: 2620946 - RNA, 17 nt, Human
gccgggccccugggcuu

SEQ ID NO: 2620947 - RNA, 14 nt, Human
gccgggccccuggg

SEQ ID NO: 2620948 - RNA, 16 nt, Human
gccggggacagaggcc

SEQ ID NO: 2620949 - RNA, 22 nt, Human
gccgggguggagcaugggccug

SEQ ID NO: 2620950 - RNA, 22 nt, Human
gccggggguucauaggucacug

SEQ ID NO: 2620951 - RNA, 15 nt, Human
gccggggcugagacu

SEQ ID NO: 2620952 - RNA, 21 nt, Human
gccggggacagaggccugccc

SEQ ID NO: 2620953 - RNA, 19 nt, Human
gccggggacagaggccugc

SEQ ID NO: 2620954 - RNA, 23 nt, Human
gccggggacagaggccugcccgg

SEQ ID NO: 2620955 - RNA, 19 nt, Human
gccgggugcgguggcucac

SEQ ID NO: 2620956 - RNA, 16 nt, Human
gccgggugcgguggcu

SEQ ID NO: 2620957 - RNA, 13 nt, Human
gccgggugcggug

SEQ ID NO: 2620958 - RNA, 14 nt, Human
gccgggucugccuc

SEQ ID NO: 2620959 - RNA, 21 nt, Human
gccgggucugccucuucuggg

SEQ ID NO: 2620960 - RNA, 22 nt, Human
gccggguacugagagucugcac

SEQ ID NO: 2620961 - RNA, 14 nt, Human
gccgagucugucuc

SEQ ID NO: 2620962 - RNA, 23 nt, Human
gccgggcaugguggcgcaagccu

SEQ ID NO: 2620963 - RNA, 12 nt, Human
gccgggccccug

SEQ ID NO: 2620964 - RNA, 22 nt, Human
gccgcaaaccacacuggacucc

SEQ ID NO: 2620965 - RNA, 13 nt, Human
gccgcagcccugc

SEQ ID NO: 2620966 - RNA, 17 nt, Human
gccgagauagccaaggc

SEQ ID NO: 2620967 - RNA, 18 nt, Human
gccgaggguccuggcucc

SEQ ID NO: 2620968 - RNA, 20 nt, Human
gccgaggguccuggcuccug

SEQ ID NO: 2620969 - RNA, 16 nt, Human
gccgaggguccuggcu

SEQ ID NO: 2620970 - RNA, 17 nt, Human
gccgauucaccugagca

SEQ ID NO: 2620971 - RNA, 17 nt, Human
gccgauauacucuagau

SEQ ID NO: 2620972 - RNA, 22 nt, Human
gccgauauacucuagaugaagu

SEQ ID NO: 2620973 - RNA, 14 nt, Human
gccgaguccaagcu

SEQ ID NO: 2620974 - RNA, 15 nt, Human
gccgaguccaagcug

SEQ ID NO: 2620975 - RNA, 18 nt, Human
gccgaguccaagcuggga

SEQ ID NO: 2620976 - RNA, 17 nt, Human
gccgcagcccugcagag

SEQ ID NO: 2620977 - RNA, 16 nt, Human
gccgcagcccugcaga

SEQ ID NO: 2620978 - RNA, 15 nt, Human
gccgcagcccugcag

SEQ ID NO: 2620979 - RNA, 21 nt, Human
gccgcaaaccacacuggacuc

SEQ ID NO: 2620980 - RNA, 19 nt, Human
gccgcaaaccacacuggac

SEQ ID NO: 2620981 - RNA, 17 nt, Human
gccgcaaaccacacugg

SEQ ID NO: 2620982 - RNA, 16 nt, Human
gccgcaaaccacacug

SEQ ID NO: 2620983 - RNA, 22 nt, Human
gccuaaaagugggcuugauucu

SEQ ID NO: 2620984 - RNA, 15 nt, Human
gccuauucccacacc

SEQ ID NO: 2620985 - RNA, 21 nt, Human
gccuauuucaguggcacguca

SEQ ID NO: 2620986 - RNA, 15 nt, Human
gccucaaaggcccgc

SEQ ID NO: 2620987 - RNA, 17 nt, Human
gccucaaaggcccgcuc

SEQ ID NO: 2620988 - RNA, 17 nt, Human
gccuauuuuaauaaaca

SEQ ID NO: 2620989 - RNA, 22 nt, Human
gccuauucccacaccuccacag

SEQ ID NO: 2620990 - RNA, 21 nt, Human
gccucagcauccuggcacccg

SEQ ID NO: 2620991 - RNA, 17 nt, Human
gccucagccauucacug

SEQ ID NO: 2620992 - RNA, 16 nt, Human
gccucagccauucacu

SEQ ID NO: 2620993 - RNA, 15 nt, Human
gccucagccauucac

SEQ ID NO: 2620994 - RNA, 16 nt, Human
gccucagccagagaag

SEQ ID NO: 2620995 - RNA, 14 nt, Human
gccucagccagaga

SEQ ID NO: 2620996 - RNA, 15 nt, Human
gccucagccagagaa

SEQ ID NO: 2620997 - RNA, 13 nt, Human
gccucagccagag

SEQ ID NO: 2620998 - RNA, 15 nt, Human
gccucacagaagaau

SEQ ID NO: 2620999 - RNA, 17 nt, Human
gccucagcauccuggca

SEQ ID NO: 2621000 - RNA, 18 nt, Human
gccucagcauccuggcac

SEQ ID NO: 2621001 - RNA, 14 nt, Human
gccucaacccuccc

SEQ ID NO: 2621002 - RNA, 14 nt, Human
gccucaaugccagu

SEQ ID NO: 2621003 - RNA, 17 nt, Human
gccucaauaagccuugu

SEQ ID NO: 2621004 - RNA, 15 nt, Human
gccucaacccucccu

SEQ ID NO: 2621005 - RNA, 23 nt, Human
gccucacacgguuugaagccugg

SEQ ID NO: 2621006 - RNA, 21 nt, Human
gccucaaugugguugcaaggc

SEQ ID NO: 2621007 - RNA, 13 nt, Human
gccucacagaaga

SEQ ID NO: 2621008 - RNA, 18 nt, Human
gccucaauaagccuuguc

SEQ ID NO: 2621009 - RNA, 21 nt, Human
gccucaaugugaaucagaccc

SEQ ID NO: 2621010 - RNA, 17 nt, Human
gccucaaugugaccagg

SEQ ID NO: 2621011 - RNA, 22 nt, Human
gccucaaugugaaucagacccu

SEQ ID NO: 2621012 - RNA, 24 nt, Human
gccucaagugauucuccugccuca

SEQ ID NO: 2621013 - RNA, 22 nt, Human
gccucaagugauucuccugccu

SEQ ID NO: 2621014 - RNA, 23 nt, Human
gccgucuaccugaggggccucuu

SEQ ID NO: 2621015 - RNA, 22 nt, Human
gccgucuaccugaggggccucu

SEQ ID NO: 2621016 - RNA, 20 nt, Human
gccgucuaccugaggggccu

SEQ ID NO: 2621017 - RNA, 18 nt, Human
gccgucuaccugaggggc

SEQ ID NO: 2621018 - RNA, 16 nt, Human
gccgugaguucucagg

SEQ ID NO: 2621019 - RNA, 21 nt, Human
gccgucuucacucgcccccgg

SEQ ID NO: 2621020 - RNA, 22 nt, Human
gccgucuucacucgcccccggg

SEQ ID NO: 2621021 - RNA, 23 nt, Human
gccgugaguucucagggcuccug

SEQ ID NO: 2621022 - RNA, 21 nt, Human
gccgugaguucucagggcucc

SEQ ID NO: 2621023 - RNA, 20 nt, Human
gccgugaguucucagggcuc

SEQ ID NO: 2621024 - RNA, 18 nt, Human
gccgugaguucucagggc

SEQ ID NO: 2621025 - RNA, 17 nt, Human
gccgugaugcucaggcu

SEQ ID NO: 2621026 - RNA, 12 nt, Human
gccgugcccagg

SEQ ID NO: 2621027 - RNA, 15 nt, Human
gccgugaugccuccc

SEQ ID NO: 2621028 - RNA, 18 nt, Human
gccggguucuagucuccu

SEQ ID NO: 2621029 - RNA, 16 nt, Human
gccgggugcucagggc

SEQ ID NO: 2621030 - RNA, 17 nt, Human
gccgggugcucagggcu

SEQ ID NO: 2621031 - RNA, 14 nt, Human
gccgucuccagggg

SEQ ID NO: 2621032 - RNA, 11 nt, Human
gccgucucaac

SEQ ID NO: 2621033 - RNA, 21 nt, Human
gccgucuccaggggcugcuuc

SEQ ID NO: 2621034 - RNA, 16 nt, Human
gccgucuccaggggcu

SEQ ID NO: 2621035 - RNA, 23 nt, Human
gccgucuccaggggcugcuuccu

SEQ ID NO: 2621036 - RNA, 19 nt, Human
gccgucuucacucgccccc

SEQ ID NO: 2621037 - RNA, 20 nt, Human
gccgucuucacucgcccccg

SEQ ID NO: 2621038 - RNA, 13 nt, Human
gccguggcuuccc

SEQ ID NO: 2621039 - RNA, 18 nt, Human
gccguugaagaggaaggg

SEQ ID NO: 2621040 - RNA, 12 nt, Human
gccguggcuucc

SEQ ID NO: 2621041 - RNA, 11 nt, Human
gccguggcuuc

SEQ ID NO: 2621042 - RNA, 23 nt, Human
gccguggauugcacguggccucu

SEQ ID NO: 2621043 - RNA, 22 nt, Human
gccguggauugcacguggccuc

SEQ ID NO: 2621044 - RNA, 21 nt, Human
gccguggauugcacguggccu

SEQ ID NO: 2621045 - RNA, 14 nt, Human
gccgugcccagggg

SEQ ID NO: 2621046 - RNA, 15 nt, Human
gccguggcugcggca

SEQ ID NO: 2621047 - RNA, 14 nt, Human
gccguggcugcggc

SEQ ID NO: 2621048 - RNA, 18 nt, Human
gccguggcugcggcaccc

SEQ ID NO: 2621049 - RNA, 23 nt, Human
gccuaaaagugggcuugauucug

SEQ ID NO: 2621050 - RNA, 16 nt, Human
gccuaaaaguaaacau

SEQ ID NO: 2621051 - RNA, 15 nt, Human
gccuaaaaguaaaca

SEQ ID NO: 2621052 - RNA, 17 nt, Human
gccuaaaaaugcaacuu

SEQ ID NO: 2621053 - RNA, 13 nt, Human
gccguuguuuacu

SEQ ID NO: 2621054 - RNA, 14 nt, Human
gccguuggccacgu

SEQ ID NO: 2621055 - RNA, 12 nt, Human
gccguuggccac

SEQ ID NO: 2621056 - RNA, 23 nt, Human
gccguuugagaagaaaacaucua

SEQ ID NO: 2621057 - RNA, 14 nt, Human
gccuaaaaaugcaa

SEQ ID NO: 2621058 - RNA, 19 nt, Human
gccguugauguuggcuggg

SEQ ID NO: 2621059 - RNA, 17 nt, Human
gccguugauguuggcug

SEQ ID NO: 2621060 - RNA, 20 nt, Human
gccguugauguuggcuggga

SEQ ID NO: 2621061 - RNA, 20 nt, Human
gccucucuggccucccaccc

SEQ ID NO: 2621062 - RNA, 19 nt, Human
gccucucuggccucccacc

SEQ ID NO: 2621063 - RNA, 18 nt, Human
gccucucuggccucccac

SEQ ID NO: 2621064 - RNA, 17 nt, Human
gccucucuggccuccca

SEQ ID NO: 2621065 - RNA, 16 nt, Human
gccucucuggccuccc

SEQ ID NO: 2621066 - RNA, 15 nt, Human
gccucucuggccucc

SEQ ID NO: 2621067 - RNA, 14 nt, Human
gccucucuggccuc

SEQ ID NO: 2621068 - RNA, 13 nt, Human
gccucucuggccu

SEQ ID NO: 2621069 - RNA, 12 nt, Human
gccucucuggcc

SEQ ID NO: 2621070 - RNA, 23 nt, Human
gccucucccgucagggcccaagu

SEQ ID NO: 2621071 - RNA, 17 nt, Human
gccucucucccagucua

SEQ ID NO: 2621072 - RNA, 17 nt, Human
gccucucugcagguccc

SEQ ID NO: 2621073 - RNA, 16 nt, Human
gccucucugcaggucc

SEQ ID NO: 2621074 - RNA, 19 nt, Human
gccucucccgucagggccc

SEQ ID NO: 2621075 - RNA, 18 nt, Human
gccucucccgucagggcc

SEQ ID NO: 2621076 - RNA, 17 nt, Human
gccucucccgucagggc

SEQ ID NO: 2621077 - RNA, 13 nt, Human
gccucucccguca

SEQ ID NO: 2621078 - RNA, 13 nt, Human
gccucuccccuga

SEQ ID NO: 2621079 - RNA, 12 nt, Human
gccucuccccug

SEQ ID NO: 2621080 - RNA, 23 nt, Human
gccucuccccagguccagcucug

SEQ ID NO: 2621081 - RNA, 22 nt, Human
gccucuccccagguccagcucu

SEQ ID NO: 2621082 - RNA, 20 nt, Human
gccucuccccagguccagcu

SEQ ID NO: 2621083 - RNA, 14 nt, Human
gccucucugcaggu

SEQ ID NO: 2621084 - RNA, 10 nt, Human
gccucucugc

SEQ ID NO: 2621085 - RNA, 16 nt, Human
gccucccuagccagca

SEQ ID NO: 2621086 - RNA, 19 nt, Human
gccucccgcguugggcaac

SEQ ID NO: 2621087 - RNA, 13 nt, Human
gccucccucaacc

SEQ ID NO: 2621088 - RNA, 14 nt, Human
gccucccucaaccc

SEQ ID NO: 2621089 - RNA, 20 nt, Human
gccucccucacccugagccc

SEQ ID NO: 2621090 - RNA, 18 nt, Human
gccucccucacccugagc

SEQ ID NO: 2621091 - RNA, 17 nt, Human
gccucccucacccugag

SEQ ID NO: 2621092 - RNA, 16 nt, Human
gccucccucucucuuc

SEQ ID NO: 2621093 - RNA, 21 nt, Human
gccucccucucucuucugcuc

SEQ ID NO: 2621094 - RNA, 22 nt, Human
gccucccucucucuucugcucc

SEQ ID NO: 2621095 - RNA, 23 nt, Human
gccucccucucucuucugcucca

SEQ ID NO: 2621096 - RNA, 12 nt, Human
gccucccucuga

SEQ ID NO: 2621097 - RNA, 14 nt, Human
gccucccucugacc

SEQ ID NO: 2621098 - RNA, 20 nt, Human
gccucccucugaccugcagg

SEQ ID NO: 2621099 - RNA, 21 nt, Human
gccucccucugaccugcaggc

SEQ ID NO: 2621100 - RNA, 13 nt, Human
gccucccugaagc

SEQ ID NO: 2621101 - RNA, 18 nt, Human
gccucccugaagccuuug

SEQ ID NO: 2621102 - RNA, 11 nt, Human
gccucccugaa

SEQ ID NO: 2621103 - RNA, 22 nt, Human
gccucccugaaaauguuuuucu

SEQ ID NO: 2621104 - RNA, 15 nt, Human
gccucucccaucacu

SEQ ID NO: 2621105 - RNA, 18 nt, Human
gccucuccccagguccag

SEQ ID NO: 2621106 - RNA, 20 nt, Human
gccucccgaauagcugggac

SEQ ID NO: 2621107 - RNA, 23 nt, Human
gccucccgaguagcugggacuac

SEQ ID NO: 2621108 - RNA, 21 nt, Human
gccucccgaguagcugggacu

SEQ ID NO: 2621109 - RNA, 19 nt, Human
gccucccgaauagcuggga

SEQ ID NO: 2621110 - RNA, 18 nt, Human
gccucccgaauagcuggg

SEQ ID NO: 2621111 - RNA, 15 nt, Human
gccucccauccaggg

SEQ ID NO: 2621112 - RNA, 22 nt, Human
gccucccauccagggcccccau

SEQ ID NO: 2621113 - RNA, 17 nt, Human
gccuccccaacccugcc

SEQ ID NO: 2621114 - RNA, 19 nt, Human
gccuccccaacccugcccc

SEQ ID NO: 2621115 - RNA, 20 nt, Human
gccuccccaacccugccccu

SEQ ID NO: 2621116 - RNA, 21 nt, Human
gccuccccaacccugccccug

SEQ ID NO: 2621117 - RNA, 22 nt, Human
gccuccccaacccugccccugc

SEQ ID NO: 2621118 - RNA, 19 nt, Human
gccuccccacggccgcucc

SEQ ID NO: 2621119 - RNA, 12 nt, Human
gccuccccaccu

SEQ ID NO: 2621120 - RNA, 20 nt, Human
gccuccccauuucccaucug

SEQ ID NO: 2621121 - RNA, 19 nt, Human
gccuccccauuucccaucu

SEQ ID NO: 2621122 - RNA, 18 nt, Human
gccuccccauuucccauc

SEQ ID NO: 2621123 - RNA, 16 nt, Human
gccuccccauuuccca

SEQ ID NO: 2621124 - RNA, 13 nt, Human
gccuccccauuuc

SEQ ID NO: 2621125 - RNA, 17 nt, Human
gccuccccagcucaccc

SEQ ID NO: 2621126 - RNA, 22 nt, Human
gccuccccacggccgcuccagg

SEQ ID NO: 2621127 - RNA, 21 nt, Human
gccuccccacggccgcuccag

SEQ ID NO: 2621128 - RNA, 22 nt, Human
gccuccccauuucccaucugca

SEQ ID NO: 2621129 - RNA, 21 nt, Human
gccuccccauuucccaucugc

SEQ ID NO: 2621130 - RNA, 23 nt, Human
gccuccccauuucccaucugcac

SEQ ID NO: 2621131 - RNA, 18 nt, Human
gccuccccgaaacaggcu

SEQ ID NO: 2621132 - RNA, 14 nt, Human
gccucagccuccca

SEQ ID NO: 2621133 - RNA, 12 nt, Human
gccucagccucc

SEQ ID NO: 2621134 - RNA, 22 nt, Human
gccucagccucccaaagugcug

SEQ ID NO: 2621135 - RNA, 22 nt, Human
gccucagcccugacccugugga

SEQ ID NO: 2621136 - RNA, 17 nt, Human
gccucagcccugacccu

SEQ ID NO: 2621137 - RNA, 12 nt, Human
gccugcccaggc

SEQ ID NO: 2621138 - RNA, 11 nt, Human
gccugcccagg

SEQ ID NO: 2621139 - RNA, 10 nt, Human
gccugcuggc

SEQ ID NO: 2621140 - RNA, 10 nt, Human
gccugcccac

SEQ ID NO: 2621141 - RNA, 13 nt, Human
gccugcccacccg

SEQ ID NO: 2621142 - RNA, 16 nt, Human
gccugccaguccuagc

SEQ ID NO: 2621143 - RNA, 14 nt, Human
gccugcccacccgu

SEQ ID NO: 2621144 - RNA, 21 nt, Human
gccugcuggucacagccuccu

SEQ ID NO: 2621145 - RNA, 19 nt, Human
gccugcuggucacagccuc

SEQ ID NO: 2621146 - RNA, 18 nt, Human
gccugcuggucacagccu

SEQ ID NO: 2621147 - RNA, 17 nt, Human
gccugcuggucacagcc

SEQ ID NO: 2621148 - RNA, 14 nt, Human
gccuggacccugug

SEQ ID NO: 2621149 - RNA, 19 nt, Human
gccugcuggcacccaccgu

SEQ ID NO: 2621150 - RNA, 17 nt, Human
gccugcuggcacccacc

SEQ ID NO: 2621151 - RNA, 16 nt, Human
gccugcuggcacccac

SEQ ID NO: 2621152 - RNA, 13 nt, Human
gccugcuggcacc

SEQ ID NO: 2621153 - RNA, 22 nt, Human
gccugcuggcacccaccgugga

SEQ ID NO: 2621154 - RNA, 13 nt, Human
gccugcugggcuc

SEQ ID NO: 2621155 - RNA, 16 nt, Human
gccugcugggcucucc

SEQ ID NO: 2621156 - RNA, 17 nt, Human
gccugcugggcucucca

SEQ ID NO: 2621157 - RNA, 18 nt, Human
gccugcugggcucuccac

SEQ ID NO: 2621158 - RNA, 19 nt, Human
gccugcugggcucuccacc

SEQ ID NO: 2621159 - RNA, 20 nt, Human
gccugcugggcucuccaccu

SEQ ID NO: 2621160 - RNA, 21 nt, Human
gccugcugggcucuccaccuc

SEQ ID NO: 2621161 - RNA, 22 nt, Human
gccugcugggcucuccaccuca

SEQ ID NO: 2621162 - RNA, 23 nt, Human
gccugcugggcucuccaccucag

SEQ ID NO: 2621163 - RNA, 24 nt, Human
gccugcugggcucuccaccucagc

SEQ ID NO: 2621164 - RNA, 20 nt, Human
gccugcagagcugcgggcug

SEQ ID NO: 2621165 - RNA, 20 nt, Human
gccugcagaggucugugcug

SEQ ID NO: 2621166 - RNA, 19 nt, Human
gccugcagaggucugugcu

SEQ ID NO: 2621167 - RNA, 10 nt, Human
gccugcagcc

SEQ ID NO: 2621168 - RNA, 18 nt, Human
gccugagcaacucuugau

SEQ ID NO: 2621169 - RNA, 23 nt, Human
gccugagauuucaucugcucucc

SEQ ID NO: 2621170 - RNA, 22 nt, Human
gccugagcaacagagugagacc

SEQ ID NO: 2621171 - RNA, 23 nt, Human
gccugccaguccuagcugcacag

SEQ ID NO: 2621172 - RNA, 20 nt, Human
gccugccaguccuagcugca

SEQ ID NO: 2621173 - RNA, 19 nt, Human
gccugccaguccuagcugc

SEQ ID NO: 2621174 - RNA, 18 nt, Human
gccugccaguccuagcug

SEQ ID NO: 2621175 - RNA, 21 nt, Human
gccugcagaggucugugcuga

SEQ ID NO: 2621176 - RNA, 18 nt, Human
gccugcaggaccugccug

SEQ ID NO: 2621177 - RNA, 19 nt, Human
gccugcaggaccugccugu

SEQ ID NO: 2621178 - RNA, 20 nt, Human
gccugcaggaccugccugua

SEQ ID NO: 2621179 - RNA, 21 nt, Human
gccugcaggaccugccuguag

SEQ ID NO: 2621180 - RNA, 14 nt, Human
gccugcaggaccug

SEQ ID NO: 2621181 - RNA, 16 nt, Human
gccugcaggaccugcc

SEQ ID NO: 2621182 - RNA, 17 nt, Human
gccugcaggaccugccu

SEQ ID NO: 2621183 - RNA, 11 nt, Human
gccugcagccc

SEQ ID NO: 2621184 - RNA, 20 nt, Human
gccucugcacuccccugcug

SEQ ID NO: 2621185 - RNA, 19 nt, Human
gccucugcacuccccugcu

SEQ ID NO: 2621186 - RNA, 18 nt, Human
gccucugcacuccccugc

SEQ ID NO: 2621187 - RNA, 17 nt, Human
gccucugcacuccccug

SEQ ID NO: 2621188 - RNA, 15 nt, Human
gccucugacacacag

SEQ ID NO: 2621189 - RNA, 23 nt, Human
gccucucuggccucccacccgau

SEQ ID NO: 2621190 - RNA, 19 nt, Human
gccucucuugguuuccuuc

SEQ ID NO: 2621191 - RNA, 16 nt, Human
gccucugcacuccccu

SEQ ID NO: 2621192 - RNA, 16 nt, Human
gccucugacacacagc

SEQ ID NO: 2621193 - RNA, 17 nt, Human
gccugaaaggagcccuu

SEQ ID NO: 2621194 - RNA, 23 nt, Human
gccugaaaggagcccuuaucugu

SEQ ID NO: 2621195 - RNA, 15 nt, Human
gccugaacauccuuc

SEQ ID NO: 2621196 - RNA, 18 nt, Human
gccugaaauuucaccauu

SEQ ID NO: 2621197 - RNA, 14 nt, Human
gccugaacauccuu

SEQ ID NO: 2621198 - RNA, 23 nt, Human
gccugaaagaggcugaggccugg

SEQ ID NO: 2621199 - RNA, 14 nt, Human
gccugaaaggagcc

SEQ ID NO: 2621200 - RNA, 21 nt, Human
gccucugcacuccccugcugg

SEQ ID NO: 2621201 - RNA, 15 nt, Human
gccucugcacucccc

SEQ ID NO: 2621202 - RNA, 12 nt, Human
gccucugcauuc

SEQ ID NO: 2621203 - RNA, 22 nt, Human
gccugagauuucaucugcucuc

SEQ ID NO: 2621204 - RNA, 18 nt, Human
gccugagauuucaucugc

SEQ ID NO: 2621205 - RNA, 13 nt, Human
gccugagaugguc

SEQ ID NO: 2621206 - RNA, 16 nt, Human
gccugagauuucaucu

SEQ ID NO: 2621207 - RNA, 17 nt, Human
gccugaaggggcgucug

SEQ ID NO: 2621208 - RNA, 18 nt, Human
gccugaaggggcgucugu

SEQ ID NO: 2621209 - RNA, 22 nt, Human
gccugaaggggcgucuguuccc

SEQ ID NO: 2621210 - RNA, 13 nt, Human
gccugagaguauu

SEQ ID NO: 2621211 - RNA, 21 nt, Human
gccugagaguauuuaggcaga

SEQ ID NO: 2621212 - RNA, 21 nt, Human
gccugaacauccuuccuuccc

SEQ ID NO: 2621213 - RNA, 14 nt, Human
gccugaaccuucca

SEQ ID NO: 2621214 - RNA, 18 nt, Human
gccugaagaguccucuga

SEQ ID NO: 2621215 - RNA, 22 nt, Human
gccugagaggcaggcauagagg

SEQ ID NO: 2621216 - RNA, 15 nt, Human
gccugaaccuuccau

SEQ ID NO: 2621217 - RNA, 20 nt, Human
gccugaagaguccucugaau

SEQ ID NO: 2621218 - RNA, 23 nt, Human
gcgguccacccaggagccccgag

SEQ ID NO: 2621219 - RNA, 18 nt, Human
gcggggcgaagcccaggc

SEQ ID NO: 2621220 - RNA, 17 nt, Human
gcggggcgaagcccagg

SEQ ID NO: 2621221 - RNA, 12 nt, Human
gcggggccuugc

SEQ ID NO: 2621222 - RNA, 19 nt, Human
gcggggacucgguaagcac

SEQ ID NO: 2621223 - RNA, 20 nt, Human
gcgguccacccaggagcccc

SEQ ID NO: 2621224 - RNA, 23 nt, Human
gcggggacagcuccuucuguccu

SEQ ID NO: 2621225 - RNA, 20 nt, Human
gcguccgcgcgccagcacag

SEQ ID NO: 2621226 - RNA, 19 nt, Human
gcguccgcgcgccagcaca

SEQ ID NO: 2621227 - RNA, 14 nt, Human
gcguccuccucugu

SEQ ID NO: 2621228 - RNA, 15 nt, Human
gcguccuccucugug

SEQ ID NO: 2621229 - RNA, 16 nt, Human
gcguccuccucuguga

SEQ ID NO: 2621230 - RNA, 21 nt, Human
gcguccuguccacacccagcu

SEQ ID NO: 2621231 - RNA, 19 nt, Human
gcguccuguccacacccag

SEQ ID NO: 2621232 - RNA, 20 nt, Human
gcguccuccucaccucaugc

SEQ ID NO: 2621233 - RNA, 13 nt, Human
gcguccuguccac

SEQ ID NO: 2621234 - RNA, 19 nt, Human
gcgguccccuccgccaggc

SEQ ID NO: 2621235 - RNA, 16 nt, Human
gcguccgcgcgccagc

SEQ ID NO: 2621236 - RNA, 20 nt, Human
gcggucucaggcugguggga

SEQ ID NO: 2621237 - RNA, 22 nt, Human
gcggucucaggcuggugggagg

SEQ ID NO: 2621238 - RNA, 22 nt, Human
gcgguccccuccgccaggcgag

SEQ ID NO: 2621239 - RNA, 19 nt, Human
gcggacagccacggccagg

SEQ ID NO: 2621240 - RNA, 16 nt, Human
gcggacagccacggcc

SEQ ID NO: 2621241 - RNA, 19 nt, Human
gcgcuggcccagccggccu

SEQ ID NO: 2621242 - RNA, 15 nt, Human
gcgcuuucuggaaaa

SEQ ID NO: 2621243 - RNA, 19 nt, Human
gcggaaugaaccacaucuu

SEQ ID NO: 2621244 - RNA, 23 nt, Human
gcggacagccacggccaggccag

SEQ ID NO: 2621245 - RNA, 22 nt, Human
gcgcuuucuggaaaagaggagu

SEQ ID NO: 2621246 - RNA, 15 nt, Human
gcggaaagcagcuca

SEQ ID NO: 2621247 - RNA, 17 nt, Human
gcgcuuuugcuggucac

SEQ ID NO: 2621248 - RNA, 20 nt, Human
gcggaacaaggagucagaca

SEQ ID NO: 2621249 - RNA, 19 nt, Human
gcggggacagcuccuucug

SEQ ID NO: 2621250 - RNA, 18 nt, Human
gcggggacagcuccuucu

SEQ ID NO: 2621251 - RNA, 16 nt, Human
gcggacaucagcuggu

SEQ ID NO: 2621252 - RNA, 17 nt, Human
gcgcuggcccagccggc

SEQ ID NO: 2621253 - RNA, 16 nt, Human
gcgcuggcccagccgg

SEQ ID NO: 2621254 - RNA, 19 nt, Human
gcgcuggccgggaccccga

SEQ ID NO: 2621255 - RNA, 17 nt, Human
gcgcugccccuggcagc

SEQ ID NO: 2621256 - RNA, 15 nt, Human
gcgcuggcccagccg

SEQ ID NO: 2621257 - RNA, 11 nt, Human
gcgcugcaaau

SEQ ID NO: 2621258 - RNA, 23 nt, Human
gcgcugacaaccaccgcucccca

SEQ ID NO: 2621259 - RNA, 14 nt, Human
gcgcugccccuggc

SEQ ID NO: 2621260 - RNA, 16 nt, Human
gcgcucuagccugggc

SEQ ID NO: 2621261 - RNA, 19 nt, Human
gcgcugacaaccaccgcuc

SEQ ID NO: 2621262 - RNA, 21 nt, Human
gcgccuacaggagugagcacu

SEQ ID NO: 2621263 - RNA, 20 nt, Human
gcgccuacaggagugagcac

SEQ ID NO: 2621264 - RNA, 21 nt, Human
gcgcuccugccgcagagcugg

SEQ ID NO: 2621265 - RNA, 20 nt, Human
gcgcuccugccgcagagcug

SEQ ID NO: 2621266 - RNA, 19 nt, Human
gcgcuccugccgcagagcu

SEQ ID NO: 2621267 - RNA, 20 nt, Human
gcgccuaguggggucucccu

SEQ ID NO: 2621268 - RNA, 21 nt, Human
gcgccuaguggggucucccuc

SEQ ID NO: 2621269 - RNA, 19 nt, Human
gcgcccaguccuuccaccu

SEQ ID NO: 2621270 - RNA, 21 nt, Human
gcgccagcacagaaacagagg

SEQ ID NO: 2621271 - RNA, 17 nt, Human
gcgccagcacagaaaca

SEQ ID NO: 2621272 - RNA, 12 nt, Human
gcgacuuucugc

SEQ ID NO: 2621273 - RNA, 19 nt, Human
gcgacuccguuggccacuc

SEQ ID NO: 2621274 - RNA, 18 nt, Human
gcgacuccguuggccacu

SEQ ID NO: 2621275 - RNA, 20 nt, Human
gcgacuccguuggccacucc

SEQ ID NO: 2621276 - RNA, 21 nt, Human
gcgacucuauagacucuagga

SEQ ID NO: 2621277 - RNA, 21 nt, Human
gcgaccccaucugcccaggac

SEQ ID NO: 2621278 - RNA, 13 nt, Human
gcgacuaauuuca

SEQ ID NO: 2621279 - RNA, 21 nt, Human
gcgacuaauuucaaaaugcuu

SEQ ID NO: 2621280 - RNA, 23 nt, Human
gcgacuaauuucaaaaugcuuuu

SEQ ID NO: 2621281 - RNA, 22 nt, Human
gcgacguuagucgugagcucuu

SEQ ID NO: 2621282 - RNA, 21 nt, Human
gcgacguuagucgugagcucu

SEQ ID NO: 2621283 - RNA, 23 nt, Human
gcgaccuuccucauccaccccau

SEQ ID NO: 2621284 - RNA, 21 nt, Human
gcgccaggauggaacacggcc

SEQ ID NO: 2621285 - RNA, 22 nt, Human
gcgccaggauggaacacggcca

SEQ ID NO: 2621286 - RNA, 15 nt, Human
gcgccaggcugacca

SEQ ID NO: 2621287 - RNA, 20 nt, Human
gcgccaggcugaccacagca

SEQ ID NO: 2621288 - RNA, 22 nt, Human
gcgccaggcugaccacagcaca

SEQ ID NO: 2621289 - RNA, 16 nt, Human
gcgccauugcacucca

SEQ ID NO: 2621290 - RNA, 16 nt, Human
gcgcccaccccgcucu

SEQ ID NO: 2621291 - RNA, 20 nt, Human
gcgccauugcacuccagccu

SEQ ID NO: 2621292 - RNA, 18 nt, Human
gcgccuacaggagugagc

SEQ ID NO: 2621293 - RNA, 13 nt, Human
gcgcccaccuccc

SEQ ID NO: 2621294 - RNA, 12 nt, Human
gcgcccaccucc

SEQ ID NO: 2621295 - RNA, 17 nt, Human
gcgcccaccuccccacg

SEQ ID NO: 2621296 - RNA, 17 nt, Human
gcgcccaguccuuccac

SEQ ID NO: 2621297 - RNA, 20 nt, Human
gcuaccaaagcaccuuagcu

SEQ ID NO: 2621298 - RNA, 23 nt, Human
gcuacccucccugcuguccccuc

SEQ ID NO: 2621299 - RNA, 19 nt, Human
gcuacccucccugcugucc

SEQ ID NO: 2621300 - RNA, 12 nt, Human
gcuacccugagc

SEQ ID NO: 2621301 - RNA, 14 nt, Human
gcuacccugagcug

SEQ ID NO: 2621302 - RNA, 16 nt, Human
gcuacccugagcugag

SEQ ID NO: 2621303 - RNA, 20 nt, Human
gcuacccugagcugaggcag

SEQ ID NO: 2621304 - RNA, 16 nt, Human
gcuacccuuuuucucc

SEQ ID NO: 2621305 - RNA, 19 nt, Human
gcuacccugagcugaggca

SEQ ID NO: 2621306 - RNA, 17 nt, Human
gcuacccacuucuaaau

SEQ ID NO: 2621307 - RNA, 17 nt, Human
gcuacccucccugcugu

SEQ ID NO: 2621308 - RNA, 16 nt, Human
gcuacccucccugcug

SEQ ID NO: 2621309 - RNA, 20 nt, Human
gcuacccccaugcuggaggu

SEQ ID NO: 2621310 - RNA, 14 nt, Human
gcuacccucccugc

SEQ ID NO: 2621311 - RNA, 22 nt, Human
gcuagacgagcaggcuucuucc

SEQ ID NO: 2621312 - RNA, 21 nt, Human
gcuagacgagcaggcuucuuc

SEQ ID NO: 2621313 - RNA, 21 nt, Human
gcuacccuuuuucuccagcug

SEQ ID NO: 2621314 - RNA, 20 nt, Human
gcuacccuuuuucuccagcu

SEQ ID NO: 2621315 - RNA, 19 nt, Human
gcuacccuuuuucuccagc

SEQ ID NO: 2621316 - RNA, 18 nt, Human
gcuacccuuuuucuccag

SEQ ID NO: 2621317 - RNA, 22 nt, Human
gcuacccuuuuucuccagcugg

SEQ ID NO: 2621318 - RNA, 13 nt, Human
gcuaccucaaggg

SEQ ID NO: 2621319 - RNA, 17 nt, Human
gcuaccucaagggggac

SEQ ID NO: 2621320 - RNA, 15 nt, Human
gcuagacacccauuu

SEQ ID NO: 2621321 - RNA, 14 nt, Human
gcuaccucacuggg

SEQ ID NO: 2621322 - RNA, 20 nt, Human
gcuagagauauggcagcgaa

SEQ ID NO: 2621323 - RNA, 21 nt, Human
gcuagagauauggcagcgaaa

SEQ ID NO: 2621324 - RNA, 20 nt, Human
gcuagaggaaccaaccccca

SEQ ID NO: 2621325 - RNA, 14 nt, Human
gcuaagaauauuug

SEQ ID NO: 2621326 - RNA, 23 nt, Human
gcuaagaaccuggaacuugggga

SEQ ID NO: 2621327 - RNA, 16 nt, Human
gcuaagaaccuggaac

SEQ ID NO: 2621328 - RNA, 17 nt, Human
gcuaagaaccuggaacu

SEQ ID NO: 2621329 - RNA, 14 nt, Human
gcuaagaaaagauu

SEQ ID NO: 2621330 - RNA, 18 nt, Human
gcuaacuuggagccccag

SEQ ID NO: 2621331 - RNA, 13 nt, Human
gcuaacuggaagc

SEQ ID NO: 2621332 - RNA, 20 nt, Human
gcuaacuuggagccccagug

SEQ ID NO: 2621333 - RNA, 21 nt, Human
gcuaacccccuucuacugagc

SEQ ID NO: 2621334 - RNA, 21 nt, Human
gcuaacauuuuaaauaaaaga

SEQ ID NO: 2621335 - RNA, 12 nt, Human
gcuaacuggaag

SEQ ID NO: 2621336 - RNA, 21 nt, Human
gcuaacuagcuuggaaacugg

SEQ ID NO: 2621337 - RNA, 17 nt, Human
gcuacacccuuuuccag

SEQ ID NO: 2621338 - RNA, 22 nt, Human
gcuacacaggggaaaagaggag

SEQ ID NO: 2621339 - RNA, 20 nt, Human
gcuacaccuuucuccuuugu

SEQ ID NO: 2621340 - RNA, 15 nt, Human
gcuacaccuuucucc

SEQ ID NO: 2621341 - RNA, 19 nt, Human
gcuacacccuuuuccagcu

SEQ ID NO: 2621342 - RNA, 13 nt, Human
gcuacaccuuucu

SEQ ID NO: 2621343 - RNA, 18 nt, Human
gcuaacauggaaguacua

SEQ ID NO: 2621344 - RNA, 17 nt, Human
gcuaacauggaaguacu

SEQ ID NO: 2621345 - RNA, 13 nt, Human
gcuaacauuuuaa

SEQ ID NO: 2621346 - RNA, 15 nt, Human
gcgugagacgccacc

SEQ ID NO: 2621347 - RNA, 11 nt, Human
gcgugagacgc

SEQ ID NO: 2621348 - RNA, 24 nt, Human
gcguccuguccacacccagcucag

SEQ ID NO: 2621349 - RNA, 14 nt, Human
gcuaacauggaagu

SEQ ID NO: 2621350 - RNA, 23 nt, Human
gcuaacauuuuaaauaaaagaaa

SEQ ID NO: 2621351 - RNA, 17 nt, Human
gcuaacauuuuaaauaa

SEQ ID NO: 2621352 - RNA, 14 nt, Human
gcuaacauuuuaaa

SEQ ID NO: 2621353 - RNA, 22 nt, Human
gcuaacccccuucuacugagcc

SEQ ID NO: 2621354 - RNA, 15 nt, Human
gcgugagccacugca

SEQ ID NO: 2621355 - RNA, 16 nt, Human
gcgugagaccugcccc

SEQ ID NO: 2621356 - RNA, 14 nt, Human
gcgugagccacugc

SEQ ID NO: 2621357 - RNA, 15 nt, Human
gcgugagaccugccc

SEQ ID NO: 2621358 - RNA, 16 nt, Human
gcgucgcccucccagg

SEQ ID NO: 2621359 - RNA, 15 nt, Human
gccuucaauaaaugg

SEQ ID NO: 2621360 - RNA, 19 nt, Human
gccuuauuagagugucuuu

SEQ ID NO: 2621361 - RNA, 12 nt, Human
gccuuauuaaag

SEQ ID NO: 2621362 - RNA, 18 nt, Human
gccuuagucucaguuugu

SEQ ID NO: 2621363 - RNA, 22 nt, Human
gccuuagucucaguuugugugu

SEQ ID NO: 2621364 - RNA, 23 nt, Human
gccuuauggaacacucugagacu

SEQ ID NO: 2621365 - RNA, 22 nt, Human
gccuuauggaacacucugagac

SEQ ID NO: 2621366 - RNA, 21 nt, Human
gccuuauggaacacucugaga

SEQ ID NO: 2621367 - RNA, 20 nt, Human
gccuuagcauguuugcugaa

SEQ ID NO: 2621368 - RNA, 18 nt, Human
gccuuagcauguuugcug

SEQ ID NO: 2621369 - RNA, 17 nt, Human
gccuuagcauguuugcu

SEQ ID NO: 2621370 - RNA, 15 nt, Human
gccuuagcauguuug

SEQ ID NO: 2621371 - RNA, 14 nt, Human
gccuuagcauguuu

SEQ ID NO: 2621372 - RNA, 23 nt, Human
gccuuagagccaggcacacacug

SEQ ID NO: 2621373 - RNA, 15 nt, Human
gccuuagucucaguu

SEQ ID NO: 2621374 - RNA, 16 nt, Human
gccuuagaaccuuucu

SEQ ID NO: 2621375 - RNA, 15 nt, Human
gccuuaccuccugcc

SEQ ID NO: 2621376 - RNA, 16 nt, Human
gccuuaccuccugccc

SEQ ID NO: 2621377 - RNA, 17 nt, Human
gccuuaccuccugccca

SEQ ID NO: 2621378 - RNA, 18 nt, Human
gccuuaccuccugcccag

SEQ ID NO: 2621379 - RNA, 19 nt, Human
gccuuaccuccugcccagg

SEQ ID NO: 2621380 - RNA, 20 nt, Human
gccuuaccuccugcccagga

SEQ ID NO: 2621381 - RNA, 21 nt, Human
gccuuaccuccugcccaggag

SEQ ID NO: 2621382 - RNA, 22 nt, Human
gccuuaccuccugcccaggaga

SEQ ID NO: 2621383 - RNA, 17 nt, Human
gccuuagagccaggcac

SEQ ID NO: 2621384 - RNA, 15 nt, Human
gccuuagagccaggc

SEQ ID NO: 2621385 - RNA, 14 nt, Human
gccuuagagccagg

SEQ ID NO: 2621386 - RNA, 13 nt, Human
gccuuagagccag

SEQ ID NO: 2621387 - RNA, 20 nt, Human
gccuuagaagucacacagua

SEQ ID NO: 2621388 - RNA, 19 nt, Human
gccuuacccucauguucuu

SEQ ID NO: 2621389 - RNA, 20 nt, Human
gccuguccugaccugucuca

SEQ ID NO: 2621390 - RNA, 12 nt, Human
gccuuaccuccu

SEQ ID NO: 2621391 - RNA, 13 nt, Human
gccuuaccuccug

SEQ ID NO: 2621392 - RNA, 14 nt, Human
gccuuaccuccugc

SEQ ID NO: 2621393 - RNA, 22 nt, Human
gccuguccuccaacaccaagca

SEQ ID NO: 2621394 - RNA, 14 nt, Human
gccugucccucuca

SEQ ID NO: 2621395 - RNA, 22 nt, Human
gccugucccauggacacuccag

SEQ ID NO: 2621396 - RNA, 18 nt, Human
gccugucccucucaggca

SEQ ID NO: 2621397 - RNA, 21 nt, Human
gccugucccauggacacucca

SEQ ID NO: 2621398 - RNA, 20 nt, Human
gccugucccacccccacccc

SEQ ID NO: 2621399 - RNA, 15 nt, Human
gccuguccagccugg

SEQ ID NO: 2621400 - RNA, 17 nt, Human
gccuguccagccugggc

SEQ ID NO: 2621401 - RNA, 16 nt, Human
gccuggagauccuccu

SEQ ID NO: 2621402 - RNA, 23 nt, Human
gccuggagacuuagggcaccagg

SEQ ID NO: 2621403 - RNA, 19 nt, Human
gccuggagacuuagggcac

SEQ ID NO: 2621404 - RNA, 17 nt, Human
gccuggagacuuagggc

SEQ ID NO: 2621405 - RNA, 15 nt, Human
gccuggagaagcuga

SEQ ID NO: 2621406 - RNA, 12 nt, Human
gccuggagaagc

SEQ ID NO: 2621407 - RNA, 23 nt, Human
gccuggaccugccuccugccugc

SEQ ID NO: 2621408 - RNA, 18 nt, Human
gccuggacuuuccugcaa

SEQ ID NO: 2621409 - RNA, 17 nt, Human
gccuggacuuuccugca

SEQ ID NO: 2621410 - RNA, 16 nt, Human
gccuggacuuuccugc

SEQ ID NO: 2621411 - RNA, 15 nt, Human
gccuggacuuuccug

SEQ ID NO: 2621412 - RNA, 19 nt, Human
gccuggaccugccuccugc

SEQ ID NO: 2621413 - RNA, 18 nt, Human
gccuggaccugccuccug

SEQ ID NO: 2621414 - RNA, 14 nt, Human
gccuggacuuuccu

SEQ ID NO: 2621415 - RNA, 17 nt, Human
gccuggaccugccuccu

SEQ ID NO: 2621416 - RNA, 16 nt, Human
gccuggaccugccucc

SEQ ID NO: 2621417 - RNA, 15 nt, Human
gccuggaccugccuc

SEQ ID NO: 2621418 - RNA, 14 nt, Human
gccuggaccugccu

SEQ ID NO: 2621419 - RNA, 11 nt, Human
gccuggaccug

SEQ ID NO: 2621420 - RNA, 15 nt, Human
gccugguggcagcug

SEQ ID NO: 2621421 - RNA, 20 nt, Human
gccuggagauccuccugcag

SEQ ID NO: 2621422 - RNA, 19 nt, Human
gccuggagauccuccugca

SEQ ID NO: 2621423 - RNA, 18 nt, Human
gccuggagauccuccugc

SEQ ID NO: 2621424 - RNA, 17 nt, Human
gccuggagauccuccug

SEQ ID NO: 2621425 - RNA, 13 nt, Human
gccuggagaagcu

SEQ ID NO: 2621426 - RNA, 22 nt, Human
gccuggagauccuccugcagac

SEQ ID NO: 2621427 - RNA, 17 nt, Human
gccugguggcagcugcg

SEQ ID NO: 2621428 - RNA, 16 nt, Human
gccugguggcagcugc

SEQ ID NO: 2621429 - RNA, 18 nt, Human
gccuguaaucacagcuac

SEQ ID NO: 2621430 - RNA, 12 nt, Human
gccuguccagcc

SEQ ID NO: 2621431 - RNA, 13 nt, Human
gccuguccagccu

SEQ ID NO: 2621432 - RNA, 14 nt, Human
gccuguccagccug

SEQ ID NO: 2621433 - RNA, 18 nt, Human
gccuguaaucccagcacu

SEQ ID NO: 2621434 - RNA, 16 nt, Human
gccuguaaucccagca

SEQ ID NO: 2621435 - RNA, 17 nt, Human
gccuguaaucccagcac

SEQ ID NO: 2621436 - RNA, 20 nt, Human
gccuguaaucccagcacuuu

SEQ ID NO: 2621437 - RNA, 19 nt, Human
gccuguaaucccagcacuu

SEQ ID NO: 2621438 - RNA, 17 nt, Human
gccuguaaucccagcag

SEQ ID NO: 2621439 - RNA, 18 nt, Human
gccuguaaucccagcagu

SEQ ID NO: 2621440 - RNA, 15 nt, Human
gccuguaaucccagc

SEQ ID NO: 2621441 - RNA, 20 nt, Human
gccuuuugcaccccucccau

SEQ ID NO: 2621442 - RNA, 22 nt, Human
gcgacagugagacucugucuca

SEQ ID NO: 2621443 - RNA, 22 nt, Human
gcgaccuuccucauccacccca

SEQ ID NO: 2621444 - RNA, 15 nt, Human
gcgaccuuccucauc

SEQ ID NO: 2621445 - RNA, 23 nt, Human
gcgaccucuccaucuucagcuuc

SEQ ID NO: 2621446 - RNA, 15 nt, Human
gcgaccgcccccucc

SEQ ID NO: 2621447 - RNA, 17 nt, Human
gcgaccccgucacagcc

SEQ ID NO: 2621448 - RNA, 20 nt, Human
gcgaccccaucugcccagga

SEQ ID NO: 2621449 - RNA, 19 nt, Human
gcgaccccaucugcccagg

SEQ ID NO: 2621450 - RNA, 14 nt, Human
gcgaccgcccccuc

SEQ ID NO: 2621451 - RNA, 13 nt, Human
gcgaccgcccccu

SEQ ID NO: 2621452 - RNA, 18 nt, Human
gcgaccccaucugcccag

SEQ ID NO: 2621453 - RNA, 17 nt, Human
gcgaccccaucugccca

SEQ ID NO: 2621454 - RNA, 16 nt, Human
gcgaccccaucugccc

SEQ ID NO: 2621455 - RNA, 15 nt, Human
gcgaccccaucugcc

SEQ ID NO: 2621456 - RNA, 14 nt, Human
gcgaccccaucugc

SEQ ID NO: 2621457 - RNA, 16 nt, Human
gcgaccaccccugccu

SEQ ID NO: 2621458 - RNA, 19 nt, Human
gcgaccaccccugccucca

SEQ ID NO: 2621459 - RNA, 21 nt, Human
gcgacauagcccaucccugcc

SEQ ID NO: 2621460 - RNA, 18 nt, Human
gcgacauagcccaucccu

SEQ ID NO: 2621461 - RNA, 15 nt, Human
gcgaccaccccugcc

SEQ ID NO: 2621462 - RNA, 17 nt, Human
gcgacauagcccauccc

SEQ ID NO: 2621463 - RNA, 16 nt, Human
gcgacauagcccaucc

SEQ ID NO: 2621464 - RNA, 14 nt, Human
gccuuuaugguuuc

SEQ ID NO: 2621465 - RNA, 13 nt, Human
gccuuuauugugu

SEQ ID NO: 2621466 - RNA, 20 nt, Human
gccuuuauuguguuugucau

SEQ ID NO: 2621467 - RNA, 14 nt, Human
gccuuuauuguguu

SEQ ID NO: 2621468 - RNA, 23 nt, Human
gccuuuauuguguuugucauuag

SEQ ID NO: 2621469 - RNA, 22 nt, Human
gccuuuauuguguuugucauua

SEQ ID NO: 2621470 - RNA, 13 nt, Human
gccuuuaaaauuu

SEQ ID NO: 2621471 - RNA, 18 nt, Human
gccuuuuauaaaccucua

SEQ ID NO: 2621472 - RNA, 14 nt, Human
gccuuuuauagcua

SEQ ID NO: 2621473 - RNA, 16 nt, Human
gccuuuuauuucuuaa

SEQ ID NO: 2621474 - RNA, 20 nt, Human
gccuuuucccucuuuggcuc

SEQ ID NO: 2621475 - RNA, 13 nt, Human
gccuuuucccucu

SEQ ID NO: 2621476 - RNA, 14 nt, Human
gccuuuucuagccc

SEQ ID NO: 2621477 - RNA, 19 nt, Human
gccuuuugcaccccuccca

SEQ ID NO: 2621478 - RNA, 18 nt, Human
gccuuuugcaccccuccc

SEQ ID NO: 2621479 - RNA, 17 nt, Human
gccuuuugcaccccucc

SEQ ID NO: 2621480 - RNA, 16 nt, Human
gccuuuugcaccccuc

SEQ ID NO: 2621481 - RNA, 15 nt, Human
gccuuuugcaccccu

SEQ ID NO: 2621482 - RNA, 14 nt, Human
gccuuuugcacccc

SEQ ID NO: 2621483 - RNA, 16 nt, Human
gccuucagcucuacag

SEQ ID NO: 2621484 - RNA, 13 nt, Human
gccuuccauaauu

SEQ ID NO: 2621485 - RNA, 14 nt, Human
gccuuccauaauua

SEQ ID NO: 2621486 - RNA, 15 nt, Human
gccuuccauaauuau

SEQ ID NO: 2621487 - RNA, 16 nt, Human
gccuuccauaauuaug

SEQ ID NO: 2621488 - RNA, 19 nt, Human
gccuuccaugucggccucu

SEQ ID NO: 2621489 - RNA, 18 nt, Human
gccuuccaugucggccuc

SEQ ID NO: 2621490 - RNA, 17 nt, Human
gccuuccaugucggccu

SEQ ID NO: 2621491 - RNA, 21 nt, Human
gccuuccauaauuaugacagu

SEQ ID NO: 2621492 - RNA, 17 nt, Human
gccuucagaaccaucca

SEQ ID NO: 2621493 - RNA, 16 nt, Human
gccuucagauguucuc

SEQ ID NO: 2621494 - RNA, 13 nt, Human
gccuucagcucua

SEQ ID NO: 2621495 - RNA, 23 nt, Human
gccuucagacagagaggacugua

SEQ ID NO: 2621496 - RNA, 20 nt, Human
gccuucacuccggugugccu

SEQ ID NO: 2621497 - RNA, 18 nt, Human
gccuucggccuccauccu

SEQ ID NO: 2621498 - RNA, 17 nt, Human
gccuucgcuucuugccu

SEQ ID NO: 2621499 - RNA, 22 nt, Human
gccuucgcgguggaaggcccga

SEQ ID NO: 2621500 - RNA, 14 nt, Human
gccuuccccugggc

SEQ ID NO: 2621501 - RNA, 16 nt, Human
gccuuccccuugccca

SEQ ID NO: 2621502 - RNA, 20 nt, Human
gccuuccaugucggccucua

SEQ ID NO: 2621503 - RNA, 14 nt, Human
gccuuccccagccu

SEQ ID NO: 2621504 - RNA, 15 nt, Human
gccuuccccagccuc

SEQ ID NO: 2621505 - RNA, 16 nt, Human
gccuuccccagccucu

SEQ ID NO: 2621506 - RNA, 17 nt, Human
gccuuccccagccucuu

SEQ ID NO: 2621507 - RNA, 18 nt, Human
gccuucccccucccaggg

SEQ ID NO: 2621508 - RNA, 23 nt, Human
gccuucccccucccagggccagg

SEQ ID NO: 2621509 - RNA, 19 nt, Human
gccuuuaaaucugugauga

SEQ ID NO: 2621510 - RNA, 19 nt, Human
gccuuuagugaucacagca

SEQ ID NO: 2621511 - RNA, 22 nt, Human
gccuuuagugaucacagcagcu

SEQ ID NO: 2621512 - RNA, 21 nt, Human
gccuuuagugaucacagcagc

SEQ ID NO: 2621513 - RNA, 21 nt, Human
gccuuuaaaauuuuuuuagaa

SEQ ID NO: 2621514 - RNA, 17 nt, Human
gccuuuaaaucugugau

SEQ ID NO: 2621515 - RNA, 18 nt, Human
gccuuuaaaguaugaauc

SEQ ID NO: 2621516 - RNA, 15 nt, Human
gccuuuaaaguauga

SEQ ID NO: 2621517 - RNA, 18 nt, Human
gccuuggggcugaugcag

SEQ ID NO: 2621518 - RNA, 16 nt, Human
gccuugggcugcuccu

SEQ ID NO: 2621519 - RNA, 18 nt, Human
gccuugggcugcuccuca

SEQ ID NO: 2621520 - RNA, 19 nt, Human
gccuuggggaauuuccucu

SEQ ID NO: 2621521 - RNA, 18 nt, Human
gccuuggggaauuuccuc

SEQ ID NO: 2621522 - RNA, 22 nt, Human
gccuugggcugcuccucauggu

SEQ ID NO: 2621523 - RNA, 21 nt, Human
gccuucgcuucuugccucugu

SEQ ID NO: 2621524 - RNA, 20 nt, Human
gccuucgcuucuugccucug

SEQ ID NO: 2621525 - RNA, 22 nt, Human
gccuucgcuucuugccucugug

SEQ ID NO: 2621526 - RNA, 20 nt, Human
gccuuggcuguuggcaguga

SEQ ID NO: 2621527 - RNA, 19 nt, Human
gccuucggccuccauccug

SEQ ID NO: 2621528 - RNA, 14 nt, Human
gccuugggcugcuc

SEQ ID NO: 2621529 - RNA, 15 nt, Human
gccuugggcugcucc

SEQ ID NO: 2621530 - RNA, 19 nt, Human
gccuucggacaacucaguc

SEQ ID NO: 2621531 - RNA, 17 nt, Human
ggucucuaggcugggga

SEQ ID NO: 2621532 - RNA, 16 nt, Human
ggucucuaggcugggg

SEQ ID NO: 2621533 - RNA, 15 nt, Human
ggucucuaggcuggg

SEQ ID NO: 2621534 - RNA, 16 nt, Human
ggucucuagugcugug

SEQ ID NO: 2621535 - RNA, 19 nt, Human
ggucucuagugcugugaaa

SEQ ID NO: 2621536 - RNA, 23 nt, Human
ggucucgcugaugcugggcuggg

SEQ ID NO: 2621537 - RNA, 21 nt, Human
ggucucgcuuuguugcccagg

SEQ ID NO: 2621538 - RNA, 19 nt, Human
ggucucgcuuuguugccca

SEQ ID NO: 2621539 - RNA, 20 nt, Human
ggucucgcuuuguugcccag

SEQ ID NO: 2621540 - RNA, 20 nt, Human
ggucucagcagcgaccaccc

SEQ ID NO: 2621541 - RNA, 18 nt, Human
ggucucaggcugguggga

SEQ ID NO: 2621542 - RNA, 16 nt, Human
ggucucccacguggga

SEQ ID NO: 2621543 - RNA, 14 nt, Human
ggucucccucuccu

SEQ ID NO: 2621544 - RNA, 22 nt, Human
ggucucgcugaugcugggcugg

SEQ ID NO: 2621545 - RNA, 18 nt, Human
ggucucuaggcuggggaa

SEQ ID NO: 2621546 - RNA, 19 nt, Human
ggucucucucucucuacaa

SEQ ID NO: 2621547 - RNA, 10 nt, Human
ggucucuggu

SEQ ID NO: 2621548 - RNA, 14 nt, Human
ggucucugcugccg

SEQ ID NO: 2621549 - RNA, 13 nt, Human
ggucucugcugcc

SEQ ID NO: 2621550 - RNA, 12 nt, Human
ggucucugcugc

SEQ ID NO: 2621551 - RNA, 19 nt, Human
ggucucugccggcucuuuc

SEQ ID NO: 2621552 - RNA, 20 nt, Human
ggucucuuacuuuccuuucc

SEQ ID NO: 2621553 - RNA, 21 nt, Human
ggucucuugagggagcuuagc

SEQ ID NO: 2621554 - RNA, 15 nt, Human
ggucucuugagggag

SEQ ID NO: 2621555 - RNA, 12 nt, Human
ggucugaaaugg

SEQ ID NO: 2621556 - RNA, 13 nt, Human
ggucugaaaugga

SEQ ID NO: 2621557 - RNA, 11 nt, Human
ggucugaaugu

SEQ ID NO: 2621558 - RNA, 12 nt, Human
ggucugaauguu

SEQ ID NO: 2621559 - RNA, 14 nt, Human
ggucugaauguucu

SEQ ID NO: 2621560 - RNA, 23 nt, Human
ggucucacucugucgcccagucu

SEQ ID NO: 2621561 - RNA, 22 nt, Human
ggucucacucugucgcccaguc

SEQ ID NO: 2621562 - RNA, 21 nt, Human
ggucucacaguguugcccagg

SEQ ID NO: 2621563 - RNA, 19 nt, Human
ggucucacaguguugccca

SEQ ID NO: 2621564 - RNA, 20 nt, Human
ggucucacaguguugcccag

SEQ ID NO: 2621565 - RNA, 14 nt, Human
ggucccaccccaca

SEQ ID NO: 2621566 - RNA, 23 nt, Human
ggucuauguaaaugcaucugucc

SEQ ID NO: 2621567 - RNA, 17 nt, Human
ggucccaccccacacac

SEQ ID NO: 2621568 - RNA, 12 nt, Human
ggucuauuucua

SEQ ID NO: 2621569 - RNA, 19 nt, Human
ggucuauugucuguauuug

SEQ ID NO: 2621570 - RNA, 21 nt, Human
ggucucaaacuccugggcuca

SEQ ID NO: 2621571 - RNA, 23 nt, Human
ggucucaaacuccugggcucagg

SEQ ID NO: 2621572 - RNA, 18 nt, Human
ggucucacaguguugccc

SEQ ID NO: 2621573 - RNA, 17 nt, Human
ggucuauugucuguauu

SEQ ID NO: 2621574 - RNA, 15 nt, Human
ggucuauugucugua

SEQ ID NO: 2621575 - RNA, 17 nt, Human
ggucucaaacuccugac

SEQ ID NO: 2621576 - RNA, 21 nt, Human
ggugaccaaaauccccuucuc

SEQ ID NO: 2621577 - RNA, 18 nt, Human
ggugacaugugaaaccuu

SEQ ID NO: 2621578 - RNA, 15 nt, Human
ggugacaugugaaac

SEQ ID NO: 2621579 - RNA, 22 nt, Human
ggugaccagcaccaucucuccu

SEQ ID NO: 2621580 - RNA, 20 nt, Human
ggugaccuuccaagagccug

SEQ ID NO: 2621581 - RNA, 21 nt, Human
ggugaccuuccaagagccuga

SEQ ID NO: 2621582 - RNA, 19 nt, Human
ggugaccuuccaagagccu

SEQ ID NO: 2621583 - RNA, 21 nt, Human
ggugaccucugccugaaguca

SEQ ID NO: 2621584 - RNA, 12 nt, Human
ggugagaacucu

SEQ ID NO: 2621585 - RNA, 19 nt, Human
ggugacugggcccugccuc

SEQ ID NO: 2621586 - RNA, 23 nt, Human
ggugacugcgaucuucagagcag

SEQ ID NO: 2621587 - RNA, 18 nt, Human
ggugacgccugcccuccc

SEQ ID NO: 2621588 - RNA, 15 nt, Human
ggugaccuucuggga

SEQ ID NO: 2621589 - RNA, 16 nt, Human
ggucugcaagucagag

SEQ ID NO: 2621590 - RNA, 15 nt, Human
ggucugcaagucaga

SEQ ID NO: 2621591 - RNA, 14 nt, Human
ggucugcaagucag

SEQ ID NO: 2621592 - RNA, 17 nt, Human
ggucugaauguucugac

SEQ ID NO: 2621593 - RNA, 21 nt, Human
ggucugaauguucugacauua

SEQ ID NO: 2621594 - RNA, 20 nt, Human
ggucugagucauggccgggu

SEQ ID NO: 2621595 - RNA, 22 nt, Human
ggucugaauguucugacauuaa

SEQ ID NO: 2621596 - RNA, 14 nt, Human
ggucugacccacug

SEQ ID NO: 2621597 - RNA, 16 nt, Human
ggucugcucgggccca

SEQ ID NO: 2621598 - RNA, 23 nt, Human
ggucugccucuucugggagggca

SEQ ID NO: 2621599 - RNA, 19 nt, Human
ggucugcaagucagaggau

SEQ ID NO: 2621600 - RNA, 17 nt, Human
ggucugcaagucagagg

SEQ ID NO: 2621601 - RNA, 20 nt, Human
ggucugcaagucagaggaug

SEQ ID NO: 2621602 - RNA, 13 nt, Human
ggucugcaggcag

SEQ ID NO: 2621603 - RNA, 12 nt, Human
ggucugccacca

SEQ ID NO: 2621604 - RNA, 14 nt, Human
ggucugcaggcagg

SEQ ID NO: 2621605 - RNA, 23 nt, Human
ggucugcaggcagggcugacucu

SEQ ID NO: 2621606 - RNA, 18 nt, Human
ggucugcucuuucucugc

SEQ ID NO: 2621607 - RNA, 16 nt, Human
ggucugcucuuucucu

SEQ ID NO: 2621608 - RNA, 19 nt, Human
ggucugcucgggcccaggc

SEQ ID NO: 2621609 - RNA, 18 nt, Human
ggucugcucgggcccagg

SEQ ID NO: 2621610 - RNA, 17 nt, Human
ggucugcucgggcccag

SEQ ID NO: 2621611 - RNA, 21 nt, Human
ggugacagagugagacucugu

SEQ ID NO: 2621612 - RNA, 20 nt, Human
ggucugcucuuucucugcca

SEQ ID NO: 2621613 - RNA, 19 nt, Human
ggucugcucuuucucugcc

SEQ ID NO: 2621614 - RNA, 14 nt, Human
ggugacaugugaaa

SEQ ID NO: 2621615 - RNA, 22 nt, Human
ggucugcucgggcccaggccau

SEQ ID NO: 2621616 - RNA, 12 nt, Human
ggugacaguggc

SEQ ID NO: 2621617 - RNA, 13 nt, Human
gguggcaucccag

SEQ ID NO: 2621618 - RNA, 15 nt, Human
gguggcauacgccug

SEQ ID NO: 2621619 - RNA, 16 nt, Human
gguggcagugggagcu

SEQ ID NO: 2621620 - RNA, 22 nt, Human
gguggcagugggagcugccugu

SEQ ID NO: 2621621 - RNA, 19 nt, Human
gguggcagugggagcugcc

SEQ ID NO: 2621622 - RNA, 21 nt, Human
ggugcugccauccagguucag

SEQ ID NO: 2621623 - RNA, 15 nt, Human
ggugcugacggccag

SEQ ID NO: 2621624 - RNA, 16 nt, Human
ggugcugacggccagg

SEQ ID NO: 2621625 - RNA, 17 nt, Human
ggugcugacggccaggg

SEQ ID NO: 2621626 - RNA, 20 nt, Human
ggugcugacggccagggaga

SEQ ID NO: 2621627 - RNA, 21 nt, Human
ggugcuauaggcuggagaagc

SEQ ID NO: 2621628 - RNA, 19 nt, Human
ggugcuauaggcuggagaa

SEQ ID NO: 2621629 - RNA, 17 nt, Human
ggugcuauaggcuggag

SEQ ID NO: 2621630 - RNA, 15 nt, Human
ggugcugccauccag

SEQ ID NO: 2621631 - RNA, 21 nt, Human
ggugcugacuucaucucccac

SEQ ID NO: 2621632 - RNA, 13 nt, Human
ggugcugagaagc

SEQ ID NO: 2621633 - RNA, 22 nt, Human
gguggccacuccagaccccugg

SEQ ID NO: 2621634 - RNA, 21 nt, Human
gguggccacuccagaccccug

SEQ ID NO: 2621635 - RNA, 20 nt, Human
gguggccacuccagaccccu

SEQ ID NO: 2621636 - RNA, 17 nt, Human
gguggcaucccaguggc

SEQ ID NO: 2621637 - RNA, 22 nt, Human
gguggccucccaacucacccca

SEQ ID NO: 2621638 - RNA, 23 nt, Human
gguggccacuccagaccccuggc

SEQ ID NO: 2621639 - RNA, 10 nt, Human
gguggccaug

SEQ ID NO: 2621640 - RNA, 23 nt, Human
gguggccucuccuuguggccugg

SEQ ID NO: 2621641 - RNA, 21 nt, Human
gguggcgacucuauagacucu

SEQ ID NO: 2621642 - RNA, 21 nt, Human
gguggcgggcgccuguaaucc

SEQ ID NO: 2621643 - RNA, 19 nt, Human
gguggcgggcaccuauagu

SEQ ID NO: 2621644 - RNA, 20 nt, Human
gguggcuagucaagcuccuc

SEQ ID NO: 2621645 - RNA, 23 nt, Human
gguggccucccaacucaccccag

SEQ ID NO: 2621646 - RNA, 22 nt, Human
gguggccucgggacaccugccc

SEQ ID NO: 2621647 - RNA, 12 nt, Human
gguggccucggg

SEQ ID NO: 2621648 - RNA, 20 nt, Human
gguggccaugccucagcccu

SEQ ID NO: 2621649 - RNA, 17 nt, Human
gguggccaugccucagc

SEQ ID NO: 2621650 - RNA, 20 nt, Human
ggugcuaucucccccagccc

SEQ ID NO: 2621651 - RNA, 19 nt, Human
ggugcuaucucccccagcc

SEQ ID NO: 2621652 - RNA, 17 nt, Human
ggugcuaucucccccag

SEQ ID NO: 2621653 - RNA, 16 nt, Human
ggugcuaucuccccca

SEQ ID NO: 2621654 - RNA, 23 nt, Human
ggugcuacaaaaacacagcaagg

SEQ ID NO: 2621655 - RNA, 23 nt, Human
ggugcuacacccuuuuccagcug

SEQ ID NO: 2621656 - RNA, 15 nt, Human
ggugcuacgccugca

SEQ ID NO: 2621657 - RNA, 22 nt, Human
ggugcgaccccaucugcccagg

SEQ ID NO: 2621658 - RNA, 21 nt, Human
ggugcgaccccaucugcccag

SEQ ID NO: 2621659 - RNA, 22 nt, Human
ggugcuacacccuuuuccagcu

SEQ ID NO: 2621660 - RNA, 19 nt, Human
ggugcgaccccaucugccc

SEQ ID NO: 2621661 - RNA, 21 nt, Human
ggugccugugaggcaggggcg

SEQ ID NO: 2621662 - RNA, 19 nt, Human
ggugagcccauggcccucc

SEQ ID NO: 2621663 - RNA, 15 nt, Human
ggugaggaccacucc

SEQ ID NO: 2621664 - RNA, 23 nt, Human
ggugagcacggccaacaaagcug

SEQ ID NO: 2621665 - RNA, 14 nt, Human
ggugagcaaccagu

SEQ ID NO: 2621666 - RNA, 19 nt, Human
ggugagcagaaguggagcu

SEQ ID NO: 2621667 - RNA, 18 nt, Human
ggugagcagacugguggg

SEQ ID NO: 2621668 - RNA, 22 nt, Human
ggugagcccauggcccucccag

SEQ ID NO: 2621669 - RNA, 18 nt, Human
ggugaggaccacuccugu

SEQ ID NO: 2621670 - RNA, 19 nt, Human
ggugccugagaggcaggca

SEQ ID NO: 2621671 - RNA, 18 nt, Human
ggugccugauucggcugu

SEQ ID NO: 2621672 - RNA, 14 nt, Human
ggugccugaggucu

SEQ ID NO: 2621673 - RNA, 21 nt, Human
ggugccugauucggcugucuc

SEQ ID NO: 2621674 - RNA, 18 nt, Human
ggugccuggguggggcug

SEQ ID NO: 2621675 - RNA, 13 nt, Human
ggugccuguccca

SEQ ID NO: 2621676 - RNA, 19 nt, Human
ggugccuggguggggcugc

SEQ ID NO: 2621677 - RNA, 22 nt, Human
ggugccuggguggggcugcucc

SEQ ID NO: 2621678 - RNA, 17 nt, Human
ggugccugucccacccc

SEQ ID NO: 2621679 - RNA, 23 nt, Human
ggugccuggguggggcugcuccu

SEQ ID NO: 2621680 - RNA, 17 nt, Human
ggugccugugaggcagg

SEQ ID NO: 2621681 - RNA, 18 nt, Human
ggugccugugaggcaggg

SEQ ID NO: 2621682 - RNA, 19 nt, Human
ggugccugugaggcagggg

SEQ ID NO: 2621683 - RNA, 23 nt, Human
ggugccuucuuauucucacucca

SEQ ID NO: 2621684 - RNA, 14 nt, Human
ggugcgaccccauc

SEQ ID NO: 2621685 - RNA, 12 nt, Human
ggugagagcugc

SEQ ID NO: 2621686 - RNA, 15 nt, Human
ggugagaagcagagg

SEQ ID NO: 2621687 - RNA, 16 nt, Human
ggugagaggggaacag

SEQ ID NO: 2621688 - RNA, 23 nt, Human
ggugagaugcuggagaagagagg

SEQ ID NO: 2621689 - RNA, 22 nt, Human
ggugagaugcuggagaagagag

SEQ ID NO: 2621690 - RNA, 21 nt, Human
ggugagaugcuggagaagaga

SEQ ID NO: 2621691 - RNA, 17 nt, Human
ggugagaugcuggagaa

SEQ ID NO: 2621692 - RNA, 14 nt, Human
ggugagaugcugga

SEQ ID NO: 2621693 - RNA, 16 nt, Human
ggugagaugcagcugg

SEQ ID NO: 2621694 - RNA, 16 nt, Human
gguugacuuucaggua

SEQ ID NO: 2621695 - RNA, 13 nt, Human
gguugagaaauga

SEQ ID NO: 2621696 - RNA, 11 nt, Human
gguugaggaaa

SEQ ID NO: 2621697 - RNA, 18 nt, Human
gguugaggggcuccugga

SEQ ID NO: 2621698 - RNA, 21 nt, Human
gguugagguccagcccuggcu

SEQ ID NO: 2621699 - RNA, 19 nt, Human
gguugaggggcuccuggaa

SEQ ID NO: 2621700 - RNA, 13 nt, Human
gguugagguuuca

SEQ ID NO: 2621701 - RNA, 14 nt, Human
gguugaucacacuc

SEQ ID NO: 2621702 - RNA, 22 nt, Human
gguugauaguuuaccugaauaa

SEQ ID NO: 2621703 - RNA, 19 nt, Human
gguugauaacuuugcuugc

SEQ ID NO: 2621704 - RNA, 17 nt, Human
gguugauaacuuugcuu

SEQ ID NO: 2621705 - RNA, 23 nt, Human
gguugagguccagcccuggcuga

SEQ ID NO: 2621706 - RNA, 19 nt, Human
gguugagguggaagcccuc

SEQ ID NO: 2621707 - RNA, 22 nt, Human
gguucuuguauuaagaaugaaa

SEQ ID NO: 2621708 - RNA, 17 nt, Human
gguucuugguagagauu

SEQ ID NO: 2621709 - RNA, 14 nt, Human
gguucuuguauuaa

SEQ ID NO: 2621710 - RNA, 16 nt, Human
gguucuuucuuccucu

SEQ ID NO: 2621711 - RNA, 14 nt, Human
gguucuuucuuccu

SEQ ID NO: 2621712 - RNA, 21 nt, Human
gguucacucuuggagccugca

SEQ ID NO: 2621713 - RNA, 23 nt, Human
gguucacucuuggagccugcaga

SEQ ID NO: 2621714 - RNA, 13 nt, Human
gguucuucccuuu

SEQ ID NO: 2621715 - RNA, 18 nt, Human
gguucuuaguucucacug

SEQ ID NO: 2621716 - RNA, 16 nt, Human
gguucuuagugucacu

SEQ ID NO: 2621717 - RNA, 21 nt, Human
gguucaaagauauuuugcuuu

SEQ ID NO: 2621718 - RNA, 22 nt, Human
gguucacaggcgaggccuggag

SEQ ID NO: 2621719 - RNA, 12 nt, Human
gguucaccagcc

SEQ ID NO: 2621720 - RNA, 13 nt, Human
gguucaccagccu

SEQ ID NO: 2621721 - RNA, 14 nt, Human
gguucaccagccuc

SEQ ID NO: 2621722 - RNA, 19 nt, Human
gguucacucuuggagccug

SEQ ID NO: 2621723 - RNA, 20 nt, Human
gguucacucuuggagccugc

SEQ ID NO: 2621724 - RNA, 15 nt, Human
gguucaccagccucu

SEQ ID NO: 2621725 - RNA, 21 nt, Human
gguucacgccuguaaucccag

SEQ ID NO: 2621726 - RNA, 22 nt, Human
gguucacgccuguaaucccagc

SEQ ID NO: 2621727 - RNA, 20 nt, Human
gguucacgugcagcucaagg

SEQ ID NO: 2621728 - RNA, 15 nt, Human
gguucacuaaagcag

SEQ ID NO: 2621729 - RNA, 13 nt, Human
gguuauuucucug

SEQ ID NO: 2621730 - RNA, 14 nt, Human
gguuauuuauuuaa

SEQ ID NO: 2621731 - RNA, 20 nt, Human
gguuauuuagggaacugcuu

SEQ ID NO: 2621732 - RNA, 13 nt, Human
gguuaugaauauu

SEQ ID NO: 2621733 - RNA, 23 nt, Human
gguuaucgaaauaacaauguuaa

SEQ ID NO: 2621734 - RNA, 15 nt, Human
gguuaucugucccag

SEQ ID NO: 2621735 - RNA, 20 nt, Human
gguuauugaaaauaugaugu

SEQ ID NO: 2621736 - RNA, 13 nt, Human
gguucaaagauau

SEQ ID NO: 2621737 - RNA, 19 nt, Human
gguuauuuuaguuucuguu

SEQ ID NO: 2621738 - RNA, 17 nt, Human
gguuauuuuaguuucug

SEQ ID NO: 2621739 - RNA, 24 nt, Human
gguuauuucucaacaaagcacagu

SEQ ID NO: 2621740 - RNA, 18 nt, Human
gguuauuuauuuaaaugu

SEQ ID NO: 2621741 - RNA, 23 nt, Human
gguuauuuuaguuucuguucugu

SEQ ID NO: 2621742 - RNA, 16 nt, Human
gguuaccaagaagccu

SEQ ID NO: 2621743 - RNA, 23 nt, Human
gguuacaaucauugcugaaaaug

SEQ ID NO: 2621744 - RNA, 17 nt, Human
gguuaggcauuguggga

SEQ ID NO: 2621745 - RNA, 16 nt, Human
gguuagggaaaacauu

SEQ ID NO: 2621746 - RNA, 20 nt, Human
gguuaggaguucgagaccag

SEQ ID NO: 2621747 - RNA, 13 nt, Human
gguuagggagggg

SEQ ID NO: 2621748 - RNA, 15 nt, Human
gguuagggaggggua

SEQ ID NO: 2621749 - RNA, 21 nt, Human
gguuaguggauggaaggggcu

SEQ ID NO: 2621750 - RNA, 22 nt, Human
gguuaguggauggaaggggcug

SEQ ID NO: 2621751 - RNA, 21 nt, Human
gguuauauuuuacuacugugg

SEQ ID NO: 2621752 - RNA, 14 nt, Human
gguuauaaaaguga

SEQ ID NO: 2621753 - RNA, 16 nt, Human
gguuaggauuuaacag

SEQ ID NO: 2621754 - RNA, 17 nt, Human
gguuaucgaaauaacaa

SEQ ID NO: 2621755 - RNA, 18 nt, Human
gguuaucaaaaauuucau

SEQ ID NO: 2621756 - RNA, 14 nt, Human
gguuaucucugugu

SEQ ID NO: 2621757 - RNA, 13 nt, Human
gguuauggagagg

SEQ ID NO: 2621758 - RNA, 13 nt, Human
gguuaagucuguu

SEQ ID NO: 2621759 - RNA, 16 nt, Human
gguuaagucuguuuua

SEQ ID NO: 2621760 - RNA, 23 nt, Human
gguuaagucuguuuuaugacuuc

SEQ ID NO: 2621761 - RNA, 17 nt, Human
gguuaaucuuuccugau

SEQ ID NO: 2621762 - RNA, 21 nt, Human
gguuaagcauuaccacucagg

SEQ ID NO: 2621763 - RNA, 15 nt, Human
gguuaaggcugagga

SEQ ID NO: 2621764 - RNA, 16 nt, Human
gguuaagcccugaggg

SEQ ID NO: 2621765 - RNA, 22 nt, Human
gguuaaggcugaggaaaggcca

SEQ ID NO: 2621766 - RNA, 21 nt, Human
gguuacccaguuagcucucaa

SEQ ID NO: 2621767 - RNA, 13 nt, Human
gguuacaacagau

SEQ ID NO: 2621768 - RNA, 14 nt, Human
gguuacaacagauu

SEQ ID NO: 2621769 - RNA, 13 nt, Human
gguuaauaaguuu

SEQ ID NO: 2621770 - RNA, 21 nt, Human
gguuacaacagauuugugaac

SEQ ID NO: 2621771 - RNA, 19 nt, Human
gguuacaacagauuuguga

SEQ ID NO: 2621772 - RNA, 14 nt, Human
gguguccugaccac

SEQ ID NO: 2621773 - RNA, 13 nt, Human
gguguccugacca

SEQ ID NO: 2621774 - RNA, 12 nt, Human
gguguccugacc

SEQ ID NO: 2621775 - RNA, 17 nt, Human
gguguccuuucccucca

SEQ ID NO: 2621776 - RNA, 23 nt, Human
gguuaaaaaaaggcauuguuuga

SEQ ID NO: 2621777 - RNA, 18 nt, Human
gguguccugaccacccuc

SEQ ID NO: 2621778 - RNA, 17 nt, Human
gguguccugaccacccu

SEQ ID NO: 2621779 - RNA, 20 nt, Human
gguguccugaccacccuccc

SEQ ID NO: 2621780 - RNA, 13 nt, Human
gguuaaaacuguc

SEQ ID NO: 2621781 - RNA, 11 nt, Human
gguuaaaacug

SEQ ID NO: 2621782 - RNA, 16 nt, Human
gguguaugguucugug

SEQ ID NO: 2621783 - RNA, 17 nt, Human
ggugucaagagggucug

SEQ ID NO: 2621784 - RNA, 19 nt, Human
ggugucaagagggucugag

SEQ ID NO: 2621785 - RNA, 17 nt, Human
gguguauuuauuuuccu

SEQ ID NO: 2621786 - RNA, 22 nt, Human
gguguauuuauuuuccucccca

SEQ ID NO: 2621787 - RNA, 23 nt, Human
gguguauuuauuuuccuccccag

SEQ ID NO: 2621788 - RNA, 20 nt, Human
ggugucaggcugcuggcgcc

SEQ ID NO: 2621789 - RNA, 17 nt, Human
ggugucaggcugcuggc

SEQ ID NO: 2621790 - RNA, 13 nt, Human
ggugucaggcugc

SEQ ID NO: 2621791 - RNA, 19 nt, Human
ggugucacuuacuguuucu

SEQ ID NO: 2621792 - RNA, 17 nt, Human
ggugucacuuacuguuu

SEQ ID NO: 2621793 - RNA, 23 nt, Human
ggugucacuuacuguuucuguca

SEQ ID NO: 2621794 - RNA, 15 nt, Human
ggugucacuuacugu

SEQ ID NO: 2621795 - RNA, 19 nt, Human
ggugucaccugaagacuca

SEQ ID NO: 2621796 - RNA, 17 nt, Human
ggugguuucagaaaugu

SEQ ID NO: 2621797 - RNA, 18 nt, Human
ggugguuucagaaaugug

SEQ ID NO: 2621798 - RNA, 22 nt, Human
ggugguucacucuuggagccug

SEQ ID NO: 2621799 - RNA, 23 nt, Human
ggugguucacucuuggagccugc

SEQ ID NO: 2621800 - RNA, 21 nt, Human
ggugguuauggagaggguguc

SEQ ID NO: 2621801 - RNA, 15 nt, Human
ggugguuuucuguuc

SEQ ID NO: 2621802 - RNA, 18 nt, Human
ggugguuuucuguucuuu

SEQ ID NO: 2621803 - RNA, 16 nt, Human
gguguaauaagacaua

SEQ ID NO: 2621804 - RNA, 15 nt, Human
gguguaauaagacau

SEQ ID NO: 2621805 - RNA, 18 nt, Human
gguguaauaagacauaac

SEQ ID NO: 2621806 - RNA, 21 nt, Human
gguggugucuccaacccccca

SEQ ID NO: 2621807 - RNA, 21 nt, Human
ggugguugcuguuuuccuccc

SEQ ID NO: 2621808 - RNA, 23 nt, Human
ggugguugcuguuuuccucccuu

SEQ ID NO: 2621809 - RNA, 14 nt, Human
gguguaauaagaca

SEQ ID NO: 2621810 - RNA, 14 nt, Human
gguggguggugggg

SEQ ID NO: 2621811 - RNA, 16 nt, Human
ggugggugguggggag

SEQ ID NO: 2621812 - RNA, 14 nt, Human
ggugguaacccugg

SEQ ID NO: 2621813 - RNA, 17 nt, Human
gguggguuuucuuccca

SEQ ID NO: 2621814 - RNA, 19 nt, Human
gguggguucuuuggaagga

SEQ ID NO: 2621815 - RNA, 16 nt, Human
gguggguuuucuuccc

SEQ ID NO: 2621816 - RNA, 16 nt, Human
ggugguaccaggucuc

SEQ ID NO: 2621817 - RNA, 15 nt, Human
ggugguaccaggucu

SEQ ID NO: 2621818 - RNA, 16 nt, Human
ggugguacccucugga

SEQ ID NO: 2621819 - RNA, 19 nt, Human
gguggucacuggaacucag

SEQ ID NO: 2621820 - RNA, 22 nt, Human
ggugguaccaggucuccuccac

SEQ ID NO: 2621821 - RNA, 14 nt, Human
ggugguaugugugu

SEQ ID NO: 2621822 - RNA, 14 nt, Human
gguggguauaaaag

SEQ ID NO: 2621823 - RNA, 10 nt, Human
ggugggucca

SEQ ID NO: 2621824 - RNA, 14 nt, Human
gguggguccauggg

SEQ ID NO: 2621825 - RNA, 20 nt, Human
gguggguccaggggccccuc

SEQ ID NO: 2621826 - RNA, 17 nt, Human
gguggguccaugggcag

SEQ ID NO: 2621827 - RNA, 20 nt, Human
gguggguccaugggcagagc

SEQ ID NO: 2621828 - RNA, 21 nt, Human
gguggcuagucaagcuccucc

SEQ ID NO: 2621829 - RNA, 22 nt, Human
gguggcuagucaagcuccuccu

SEQ ID NO: 2621830 - RNA, 23 nt, Human
gguggcuagucaagcuccuccuc

SEQ ID NO: 2621831 - RNA, 15 nt, Human
gguggcuagucagag

SEQ ID NO: 2621832 - RNA, 16 nt, Human
gguggcuagucagaga

SEQ ID NO: 2621833 - RNA, 17 nt, Human
gguggcuagucagagag

SEQ ID NO: 2621834 - RNA, 20 nt, Human
gguggcucccggagggcccu

SEQ ID NO: 2621835 - RNA, 17 nt, Human
gguggcucaugccugua

SEQ ID NO: 2621836 - RNA, 19 nt, Human
gguggcucacgccuguaau

SEQ ID NO: 2621837 - RNA, 13 nt, Human
gguggcugaccca

SEQ ID NO: 2621838 - RNA, 15 nt, Human
gguggcugacccagu

SEQ ID NO: 2621839 - RNA, 18 nt, Human
gguggcugacccaguccc

SEQ ID NO: 2621840 - RNA, 23 nt, Human
ggugggguccuggagcagaccac

SEQ ID NO: 2621841 - RNA, 14 nt, Human
ggugggguccugga

SEQ ID NO: 2621842 - RNA, 23 nt, Human
gguggggucaugcccuccucucc

SEQ ID NO: 2621843 - RNA, 22 nt, Human
gguggcuggagacgggugggcg

SEQ ID NO: 2621844 - RNA, 19 nt, Human
gguggcugacccagucccu

SEQ ID NO: 2621845 - RNA, 21 nt, Human
gguggcugacccagucccugg

SEQ ID NO: 2621846 - RNA, 22 nt, Human
gguggcugacccagucccuggg

SEQ ID NO: 2621847 - RNA, 23 nt, Human
gguggcugacccagucccugggg

SEQ ID NO: 2621848 - RNA, 15 nt, Human
gguggugaccucugc

SEQ ID NO: 2621849 - RNA, 14 nt, Human
gguggugaccucug

SEQ ID NO: 2621850 - RNA, 14 nt, Human
gguggucaggcgua

SEQ ID NO: 2621851 - RNA, 19 nt, Human
ggugguccugacucaacau

SEQ ID NO: 2621852 - RNA, 18 nt, Human
ggugguccugagaccuga

SEQ ID NO: 2621853 - RNA, 17 nt, Human
ggugguccugagaccug

SEQ ID NO: 2621854 - RNA, 15 nt, Human
gguggucugaauguu

SEQ ID NO: 2621855 - RNA, 18 nt, Human
gguggucugaauguucug

SEQ ID NO: 2621856 - RNA, 20 nt, Human
gguggucugcucgggcccag

SEQ ID NO: 2621857 - RNA, 19 nt, Human
gguggucugcucgggccca

SEQ ID NO: 2621858 - RNA, 14 nt, Human
gguggucugcucgg

SEQ ID NO: 2621859 - RNA, 13 nt, Human
gguggucugcucg

SEQ ID NO: 2621860 - RNA, 19 nt, Human
gguggucugaauguucuga

SEQ ID NO: 2621861 - RNA, 16 nt, Human
gguggucugcaggcag

SEQ ID NO: 2621862 - RNA, 17 nt, Human
gguggucugcaggcagg

SEQ ID NO: 2621863 - RNA, 18 nt, Human
gguggucugcaggcaggg

SEQ ID NO: 2621864 - RNA, 14 nt, Human
ggugguggggaggg

SEQ ID NO: 2621865 - RNA, 13 nt, Human
ggugguggggagg

SEQ ID NO: 2621866 - RNA, 17 nt, Human
ggugguggcacugagcc

SEQ ID NO: 2621867 - RNA, 21 nt, Human
ggugguggaucuguccaagga

SEQ ID NO: 2621868 - RNA, 20 nt, Human
gguggugggaaccaugaaga

SEQ ID NO: 2621869 - RNA, 14 nt, Human
ggugguggaucugu

SEQ ID NO: 2621870 - RNA, 13 nt, Human
ggugguggagcca

SEQ ID NO: 2621871 - RNA, 23 nt, Human
gguggugcugggacugagccagu

SEQ ID NO: 2621872 - RNA, 22 nt, Human
gguggucugcucgggcccaggc

SEQ ID NO: 2621873 - RNA, 16 nt, Human
gguggugaccucugcc

SEQ ID NO: 2621874 - RNA, 21 nt, Human
gguggucuguuggcaggcugg

SEQ ID NO: 2621875 - RNA, 16 nt, Human
gguggucuguuggcag

SEQ ID NO: 2621876 - RNA, 22 nt, Human
gguggucuguuggcaggcuggc

SEQ ID NO: 2621877 - RNA, 20 nt, Human
gguggugcugggacugagcc

SEQ ID NO: 2621878 - RNA, 18 nt, Human
gguauuuuugcccugagu

SEQ ID NO: 2621879 - RNA, 22 nt, Human
gguauuuuaggcagggauuuga

SEQ ID NO: 2621880 - RNA, 22 nt, Human
ggucaaaccgcacucacccaug

SEQ ID NO: 2621881 - RNA, 20 nt, Human
gguauuuucccccuuuucug

SEQ ID NO: 2621882 - RNA, 18 nt, Human
ggucaacagcuaugcugg

SEQ ID NO: 2621883 - RNA, 14 nt, Human
ggucaacagagaag

SEQ ID NO: 2621884 - RNA, 20 nt, Human
ggucaacagagaaggcagga

SEQ ID NO: 2621885 - RNA, 18 nt, Human
ggucacaggacucugccu

SEQ ID NO: 2621886 - RNA, 16 nt, Human
ggucacaggacucugc

SEQ ID NO: 2621887 - RNA, 19 nt, Human
ggucaacauggugaaaccc

SEQ ID NO: 2621888 - RNA, 23 nt, Human
ggucaacaucuuuuacauucugc

SEQ ID NO: 2621889 - RNA, 21 nt, Human
ggucacagcggagguguggag

SEQ ID NO: 2621890 - RNA, 14 nt, Human
ggucaccaugaaac

SEQ ID NO: 2621891 - RNA, 21 nt, Human
ggucacauucaggaagaugaa

SEQ ID NO: 2621892 - RNA, 17 nt, Human
ggucacauucaggaaga

SEQ ID NO: 2621893 - RNA, 16 nt, Human
ggucaccagcuccucc

SEQ ID NO: 2621894 - RNA, 15 nt, Human
ggucaccaugaaacu

SEQ ID NO: 2621895 - RNA, 13 nt, Human
ggucacuccuggg

SEQ ID NO: 2621896 - RNA, 18 nt, Human
ggucacuggcucuccaag

SEQ ID NO: 2621897 - RNA, 16 nt, Human
ggucacuggcucucca

SEQ ID NO: 2621898 - RNA, 13 nt, Human
ggucacuggcucu

SEQ ID NO: 2621899 - RNA, 13 nt, Human
ggucacuggaacu

SEQ ID NO: 2621900 - RNA, 15 nt, Human
ggucacuggaaaggg

SEQ ID NO: 2621901 - RNA, 13 nt, Human
ggucacuggaaag

SEQ ID NO: 2621902 - RNA, 14 nt, Human
ggucacugcuguca

SEQ ID NO: 2621903 - RNA, 13 nt, Human
ggucacugcuguc

SEQ ID NO: 2621904 - RNA, 12 nt, Human
ggucacugcugu

SEQ ID NO: 2621905 - RNA, 15 nt, Human
ggucacugccaugga

SEQ ID NO: 2621906 - RNA, 16 nt, Human
ggucccaccccacaca

SEQ ID NO: 2621907 - RNA, 15 nt, Human
ggucccaccccacac

SEQ ID NO: 2621908 - RNA, 13 nt, Human
ggucaggcuccau

SEQ ID NO: 2621909 - RNA, 19 nt, Human
ggucagguguucaagacca

SEQ ID NO: 2621910 - RNA, 17 nt, Human
ggucagggaccaaggac

SEQ ID NO: 2621911 - RNA, 22 nt, Human
ggucaggaguuagaggccagcc

SEQ ID NO: 2621912 - RNA, 16 nt, Human
ggucaggccacggcag

SEQ ID NO: 2621913 - RNA, 11 nt, Human
ggucagagccu

SEQ ID NO: 2621914 - RNA, 17 nt, Human
ggucacuggcucuccaa

SEQ ID NO: 2621915 - RNA, 13 nt, Human
ggucaggcagggu

SEQ ID NO: 2621916 - RNA, 21 nt, Human
ggucaggaguuccuaaccagc

SEQ ID NO: 2621917 - RNA, 22 nt, Human
ggucaggaaggaugagcauuua

SEQ ID NO: 2621918 - RNA, 18 nt, Human
ggucagcucccuucucug

SEQ ID NO: 2621919 - RNA, 21 nt, Human
ggucaggaguuagaggccagc

SEQ ID NO: 2621920 - RNA, 20 nt, Human
ggucagagacugcuguguuu

SEQ ID NO: 2621921 - RNA, 22 nt, Human
ggucagcuugcugcccuaggcu

SEQ ID NO: 2621922 - RNA, 22 nt, Human
ggucaggagaggggcagaacag

SEQ ID NO: 2621923 - RNA, 12 nt, Human
gguagccauccc

SEQ ID NO: 2621924 - RNA, 14 nt, Human
gguagccaggggga

SEQ ID NO: 2621925 - RNA, 19 nt, Human
gguauuguauuuauucaau

SEQ ID NO: 2621926 - RNA, 21 nt, Human
gguagccagcacacagggcag

SEQ ID NO: 2621927 - RNA, 16 nt, Human
gguagccaucauggau

SEQ ID NO: 2621928 - RNA, 22 nt, Human
gguauuguauuuauucaauaaa

SEQ ID NO: 2621929 - RNA, 20 nt, Human
gguauuguauuuauucaaua

SEQ ID NO: 2621930 - RNA, 23 nt, Human
gguauuguauuuauucaauaaag

SEQ ID NO: 2621931 - RNA, 14 nt, Human
gguauuuauaauau

SEQ ID NO: 2621932 - RNA, 14 nt, Human
gguagcagcuggac

SEQ ID NO: 2621933 - RNA, 13 nt, Human
gguagcagcugga

SEQ ID NO: 2621934 - RNA, 12 nt, Human
gguagcagcugg

SEQ ID NO: 2621935 - RNA, 13 nt, Human
gguagccagcaca

SEQ ID NO: 2621936 - RNA, 16 nt, Human
gguagccagcacacag

SEQ ID NO: 2621937 - RNA, 14 nt, Human
gguagauguucaga

SEQ ID NO: 2621938 - RNA, 12 nt, Human
gguagauguuca

SEQ ID NO: 2621939 - RNA, 18 nt, Human
gguagaucacgagaucaa

SEQ ID NO: 2621940 - RNA, 22 nt, Human
gguagaagcccuucuaccuucc

SEQ ID NO: 2621941 - RNA, 23 nt, Human
gguagaaauaucugaaaauguau

SEQ ID NO: 2621942 - RNA, 23 nt, Human
gguagagcugauccagagcacag

SEQ ID NO: 2621943 - RNA, 21 nt, Human
gguagagcugauccagagcac

SEQ ID NO: 2621944 - RNA, 17 nt, Human
gguagagcugauccaga

SEQ ID NO: 2621945 - RNA, 15 nt, Human
gguagagcugaucca

SEQ ID NO: 2621946 - RNA, 17 nt, Human
gguagaggaugaggaaa

SEQ ID NO: 2621947 - RNA, 23 nt, Human
gguagaguuugaaggaggugagg

SEQ ID NO: 2621948 - RNA, 19 nt, Human
gguagagauucauuauuuu

SEQ ID NO: 2621949 - RNA, 11 nt, Human
gguagaacaca

SEQ ID NO: 2621950 - RNA, 17 nt, Human
gguacuuguggacacag

SEQ ID NO: 2621951 - RNA, 16 nt, Human
gguacuuguggacaca

SEQ ID NO: 2621952 - RNA, 16 nt, Human
gguacuugucauuucg

SEQ ID NO: 2621953 - RNA, 19 nt, Human
gguacuucuugaaggugcu

SEQ ID NO: 2621954 - RNA, 22 nt, Human
gguagaaauaucugaaaaugua

SEQ ID NO: 2621955 - RNA, 13 nt, Human
gguacccacugcu

SEQ ID NO: 2621956 - RNA, 15 nt, Human
gguacuucuugaagg

SEQ ID NO: 2621957 - RNA, 16 nt, Human
gguacuucuugaaggu

SEQ ID NO: 2621958 - RNA, 11 nt, Human
gguacccacug

SEQ ID NO: 2621959 - RNA, 14 nt, Human
gguaccagcugcgc

SEQ ID NO: 2621960 - RNA, 12 nt, Human
gguaccagcugc

SEQ ID NO: 2621961 - RNA, 20 nt, Human
gguaccaggucuccuccacc

SEQ ID NO: 2621962 - RNA, 15 nt, Human
gguaccagcugcgcu

SEQ ID NO: 2621963 - RNA, 16 nt, Human
gguacccaauucaauu

SEQ ID NO: 2621964 - RNA, 22 nt, Human
gggugauuucagagagggcaga

SEQ ID NO: 2621965 - RNA, 16 nt, Human
gggugaugccagguuc

SEQ ID NO: 2621966 - RNA, 16 nt, Human
gggugauuucagagag

SEQ ID NO: 2621967 - RNA, 18 nt, Human
gggugauauggacagcag

SEQ ID NO: 2621968 - RNA, 14 nt, Human
gggugaggagcugg

SEQ ID NO: 2621969 - RNA, 15 nt, Human
gggugaggagcuggg

SEQ ID NO: 2621970 - RNA, 17 nt, Human
gggugagggucccaugu

SEQ ID NO: 2621971 - RNA, 19 nt, Human
gggugaguccauucuccca

SEQ ID NO: 2621972 - RNA, 18 nt, Human
gggugaggaccacuccug

SEQ ID NO: 2621973 - RNA, 17 nt, Human
gggugagaacaaccaaa

SEQ ID NO: 2621974 - RNA, 18 nt, Human
gggugagaugcuggagaa

SEQ ID NO: 2621975 - RNA, 15 nt, Human
gggugagaugcugga

SEQ ID NO: 2621976 - RNA, 20 nt, Human
gggugagaugcuggagaaga

SEQ ID NO: 2621977 - RNA, 15 nt, Human
gggugaggaccacuc

SEQ ID NO: 2621978 - RNA, 22 nt, Human
gggugcgaccccaucugcccag

SEQ ID NO: 2621979 - RNA, 21 nt, Human
gggugcgaccccaucugccca

SEQ ID NO: 2621980 - RNA, 19 nt, Human
gggugcgaccccaucugcc

SEQ ID NO: 2621981 - RNA, 16 nt, Human
gggugcucccuaccac

SEQ ID NO: 2621982 - RNA, 21 nt, Human
gggugcugcuucccucugccu

SEQ ID NO: 2621983 - RNA, 23 nt, Human
gggugcugcuucccucugccugu

SEQ ID NO: 2621984 - RNA, 15 nt, Human
gggugcugggaggag

SEQ ID NO: 2621985 - RNA, 19 nt, Human
gggugcuggcugcccagac

SEQ ID NO: 2621986 - RNA, 23 nt, Human
gggugcaguaucaugcccugugc

SEQ ID NO: 2621987 - RNA, 12 nt, Human
gggugcccccuc

SEQ ID NO: 2621988 - RNA, 18 nt, Human
gggugcccaagcucagaa

SEQ ID NO: 2621989 - RNA, 21 nt, Human
gggugccccccuugccagaca

SEQ ID NO: 2621990 - RNA, 14 nt, Human
gggugccgccugcc

SEQ ID NO: 2621991 - RNA, 15 nt, Human
gggugcccccuccuc

SEQ ID NO: 2621992 - RNA, 12 nt, Human
gggugccgccug

SEQ ID NO: 2621993 - RNA, 20 nt, Human
gggucuugguuccagccugc

SEQ ID NO: 2621994 - RNA, 23 nt, Human
gggucuucccuaccucaggcagg

SEQ ID NO: 2621995 - RNA, 21 nt, Human
gggucuuuucaucugggaaag

SEQ ID NO: 2621996 - RNA, 20 nt, Human
gggugaacaaagcagccacg

SEQ ID NO: 2621997 - RNA, 19 nt, Human
gggugaagagaaccgagca

SEQ ID NO: 2621998 - RNA, 20 nt, Human
gggucuguaaaaucuuucuu

SEQ ID NO: 2621999 - RNA, 17 nt, Human
gggucuguaaaaucuuu

SEQ ID NO: 2622000 - RNA, 16 nt, Human
gggucuguaaaaucuu

SEQ ID NO: 2622001 - RNA, 15 nt, Human
gggucuguaaaaucu

SEQ ID NO: 2622002 - RNA, 15 nt, Human
gggucugugucucuu

SEQ ID NO: 2622003 - RNA, 21 nt, Human
gggucuguaaaaucuuucuuu

SEQ ID NO: 2622004 - RNA, 20 nt, Human
gggucuucagggggccaggu

SEQ ID NO: 2622005 - RNA, 19 nt, Human
gggugacagagcaagugag

SEQ ID NO: 2622006 - RNA, 21 nt, Human
gggugacaagauagagagcua

SEQ ID NO: 2622007 - RNA, 13 nt, Human
gggugacaagaua

SEQ ID NO: 2622008 - RNA, 23 nt, Human
gggugaauaauaaaaguauauau

SEQ ID NO: 2622009 - RNA, 13 nt, Human
gggugaagggaga

SEQ ID NO: 2622010 - RNA, 14 nt, Human
gggugaagggagag

SEQ ID NO: 2622011 - RNA, 17 nt, Human
gggugaagugaagacaa

SEQ ID NO: 2622012 - RNA, 16 nt, Human
ggguuaagaagacuuu

SEQ ID NO: 2622013 - RNA, 18 nt, Human
gggugcugggaggaggga

SEQ ID NO: 2622014 - RNA, 22 nt, Human
ggguuaagaaaagagauauuuu

SEQ ID NO: 2622015 - RNA, 22 nt, Human
ggguucaagcgauucuucugcu

SEQ ID NO: 2622016 - RNA, 17 nt, Human
gggugcugggccccugc

SEQ ID NO: 2622017 - RNA, 14 nt, Human
ggguguguguuugu

SEQ ID NO: 2622018 - RNA, 22 nt, Human
ggguguguguuugugugagaga

SEQ ID NO: 2622019 - RNA, 16 nt, Human
gggugugggaggcccg

SEQ ID NO: 2622020 - RNA, 19 nt, Human
ggguucagaaaugcugccu

SEQ ID NO: 2622021 - RNA, 16 nt, Human
ggguucaaaaugucug

SEQ ID NO: 2622022 - RNA, 21 nt, Human
ggguucagaaaugcugccugc

SEQ ID NO: 2622023 - RNA, 20 nt, Human
ggguucagaaaugcugccug

SEQ ID NO: 2622024 - RNA, 19 nt, Human
ggguucagagacucagggc

SEQ ID NO: 2622025 - RNA, 13 nt, Human
ggguucagccccu

SEQ ID NO: 2622026 - RNA, 16 nt, Human
ggguucagccccuccu

SEQ ID NO: 2622027 - RNA, 17 nt, Human
ggguucagccccuccuc

SEQ ID NO: 2622028 - RNA, 19 nt, Human
ggguucagccccuccucug

SEQ ID NO: 2622029 - RNA, 20 nt, Human
ggguucagccccuccucugc

SEQ ID NO: 2622030 - RNA, 21 nt, Human
ggguucagccccuccucugcc

SEQ ID NO: 2622031 - RNA, 13 nt, Human
ggguucaggggac

SEQ ID NO: 2622032 - RNA, 23 nt, Human
ggguucaagcgauucuucugcuu

SEQ ID NO: 2622033 - RNA, 14 nt, Human
ggguuaugaauauu

SEQ ID NO: 2622034 - RNA, 13 nt, Human
ggguuaucucugu

SEQ ID NO: 2622035 - RNA, 20 nt, Human
ggguucaccugggcugaggc

SEQ ID NO: 2622036 - RNA, 12 nt, Human
ggguucuaccca

SEQ ID NO: 2622037 - RNA, 20 nt, Human
ggguuccuuccucugagccu

SEQ ID NO: 2622038 - RNA, 21 nt, Human
ggguuccuuccucugagccuu

SEQ ID NO: 2622039 - RNA, 14 nt, Human
ggguuccucuuccc

SEQ ID NO: 2622040 - RNA, 11 nt, Human
ggguuccugca

SEQ ID NO: 2622041 - RNA, 19 nt, Human
ggguuccuuccucugagcc

SEQ ID NO: 2622042 - RNA, 21 nt, Human
ggguucauaggucacuggcuc

SEQ ID NO: 2622043 - RNA, 20 nt, Human
ggguucauaggucacuggcu

SEQ ID NO: 2622044 - RNA, 19 nt, Human
ggguucauaggucacuggc

SEQ ID NO: 2622045 - RNA, 22 nt, Human
ggguucagccccuccucugcca

SEQ ID NO: 2622046 - RNA, 22 nt, Human
ggguucauaggucacuggcucu

SEQ ID NO: 2622047 - RNA, 13 nt, Human
ggguucauuauug

SEQ ID NO: 2622048 - RNA, 17 nt, Human
ggguucauuauuggaau

SEQ ID NO: 2622049 - RNA, 16 nt, Human
ggguucuuucuuccuc

SEQ ID NO: 2622050 - RNA, 17 nt, Human
ggguucuuucuuccucu

SEQ ID NO: 2622051 - RNA, 19 nt, Human
ggguucuuuggaaggagug

SEQ ID NO: 2622052 - RNA, 16 nt, Human
ggguucuuuggaagga

SEQ ID NO: 2622053 - RNA, 18 nt, Human
ggguucguggaaagggug

SEQ ID NO: 2622054 - RNA, 19 nt, Human
ggguucuuucuuccucugc

SEQ ID NO: 2622055 - RNA, 12 nt, Human
ggguugagggga

SEQ ID NO: 2622056 - RNA, 23 nt, Human
ggguugaaaauucaaaaaguguu

SEQ ID NO: 2622057 - RNA, 12 nt, Human
ggguugaaaauu

SEQ ID NO: 2622058 - RNA, 19 nt, Human
ggguugccacaggccuccc

SEQ ID NO: 2622059 - RNA, 21 nt, Human
ggguugagcagggauccuggu

SEQ ID NO: 2622060 - RNA, 18 nt, Human
ggguugccacaggccucc

SEQ ID NO: 2622061 - RNA, 20 nt, Human
ggguugccacaggccucccu

SEQ ID NO: 2622062 - RNA, 21 nt, Human
ggguuggagcaguagcuggag

SEQ ID NO: 2622063 - RNA, 17 nt, Human
ggguaagugagagaggg

SEQ ID NO: 2622064 - RNA, 14 nt, Human
gggucucacucugu

SEQ ID NO: 2622065 - RNA, 21 nt, Human
ggguaauaaacuuagaauaaa

SEQ ID NO: 2622066 - RNA, 18 nt, Human
gggucuccaggaggagac

SEQ ID NO: 2622067 - RNA, 19 nt, Human
gggucuccaggaggagacu

SEQ ID NO: 2622068 - RNA, 15 nt, Human
gggucucccuggagu

SEQ ID NO: 2622069 - RNA, 15 nt, Human
gggucucccucuccu

SEQ ID NO: 2622070 - RNA, 16 nt, Human
gggucucccucuccug

SEQ ID NO: 2622071 - RNA, 18 nt, Human
gggucucccucuccugcc

SEQ ID NO: 2622072 - RNA, 19 nt, Human
gggucucccucuccugccu

SEQ ID NO: 2622073 - RNA, 23 nt, Human
gggguuuucgaagcucagcccac

SEQ ID NO: 2622074 - RNA, 22 nt, Human
ggguaaaauuccuuagcuuaga

SEQ ID NO: 2622075 - RNA, 13 nt, Human
ggguaaacugugg

SEQ ID NO: 2622076 - RNA, 13 nt, Human
ggguaaggugccu

SEQ ID NO: 2622077 - RNA, 14 nt, Human
ggguaaggugccuu

SEQ ID NO: 2622078 - RNA, 19 nt, Human
gggguguggcuccuuccca

SEQ ID NO: 2622079 - RNA, 16 nt, Human
gggguggggucaugcc

SEQ ID NO: 2622080 - RNA, 21 nt, Human
gggguguguuccaacugcccc

SEQ ID NO: 2622081 - RNA, 15 nt, Human
gggguuguguuguca

SEQ ID NO: 2622082 - RNA, 17 nt, Human
gggguugugaggccugg

SEQ ID NO: 2622083 - RNA, 22 nt, Human
gggguugggauugggggcuggu

SEQ ID NO: 2622084 - RNA, 21 nt, Human
gggguugggauugggggcugg

SEQ ID NO: 2622085 - RNA, 15 nt, Human
gggguuaucucugug

SEQ ID NO: 2622086 - RNA, 13 nt, Human
gggguuggcuggg

SEQ ID NO: 2622087 - RNA, 21 nt, Human
gggucuggucuccucagccuc

SEQ ID NO: 2622088 - RNA, 14 nt, Human
gggucuguaaaauc

SEQ ID NO: 2622089 - RNA, 13 nt, Human
gggucuguaaaau

SEQ ID NO: 2622090 - RNA, 15 nt, Human
gggucuggcugagcu

SEQ ID NO: 2622091 - RNA, 22 nt, Human
gggucuggaguugaucuggaac

SEQ ID NO: 2622092 - RNA, 22 nt, Human
gggucuggcagccucccaucca

SEQ ID NO: 2622093 - RNA, 19 nt, Human
gggucugcucuuucucugc

SEQ ID NO: 2622094 - RNA, 20 nt, Human
gggucugccaccauccugcu

SEQ ID NO: 2622095 - RNA, 21 nt, Human
gggucugagucauggccgggu

SEQ ID NO: 2622096 - RNA, 21 nt, Human
gggucugcucuuucucugcca

SEQ ID NO: 2622097 - RNA, 20 nt, Human
gggucugcucuuucucugcc

SEQ ID NO: 2622098 - RNA, 22 nt, Human
gggucugcucuuucucugccag

SEQ ID NO: 2622099 - RNA, 20 nt, Human
gggucuggaguugaucugga

SEQ ID NO: 2622100 - RNA, 18 nt, Human
gggucucugcugccgccc

SEQ ID NO: 2622101 - RNA, 15 nt, Human
gggucucugcugccg

SEQ ID NO: 2622102 - RNA, 14 nt, Human
gggucucugcugcc

SEQ ID NO: 2622103 - RNA, 13 nt, Human
gggucucugcugc

SEQ ID NO: 2622104 - RNA, 12 nt, Human
gggucucugcug

SEQ ID NO: 2622105 - RNA, 20 nt, Human
gggucucuagugcugugaaa

SEQ ID NO: 2622106 - RNA, 15 nt, Human
gggucucuagugcug

SEQ ID NO: 2622107 - RNA, 20 nt, Human
gggucucccucuccugccua

SEQ ID NO: 2622108 - RNA, 21 nt, Human
gggucugaggaauccagaccc

SEQ ID NO: 2622109 - RNA, 12 nt, Human
gggucugaggaa

SEQ ID NO: 2622110 - RNA, 12 nt, Human
gggguggccucc

SEQ ID NO: 2622111 - RNA, 18 nt, Human
ggggugcugggccccugc

SEQ ID NO: 2622112 - RNA, 23 nt, Human
gggggacagggcuggcccagccc

SEQ ID NO: 2622113 - RNA, 22 nt, Human
gggggagccccuucugcucagc

SEQ ID NO: 2622114 - RNA, 12 nt, Human
gggggauaugaa

SEQ ID NO: 2622115 - RNA, 13 nt, Human
gggggaguggaau

SEQ ID NO: 2622116 - RNA, 17 nt, Human
gggggagucugaagcag

SEQ ID NO: 2622117 - RNA, 22 nt, Human
gggggagucugaagcagaugca

SEQ ID NO: 2622118 - RNA, 18 nt, Human
gggguggggguggaggcu

SEQ ID NO: 2622119 - RNA, 15 nt, Human
gggguggguauaaaa

SEQ ID NO: 2622120 - RNA, 15 nt, Human
ggggugggccucugg

SEQ ID NO: 2622121 - RNA, 14 nt, Human
ggggugggccucug

SEQ ID NO: 2622122 - RNA, 14 nt, Human
ggggugggccaggc

SEQ ID NO: 2622123 - RNA, 17 nt, Human
ggggugggccaggcuga

SEQ ID NO: 2622124 - RNA, 20 nt, Human
gggguggggggggugcuggg

SEQ ID NO: 2622125 - RNA, 17 nt, Human
gggguggggaccucagg

SEQ ID NO: 2622126 - RNA, 17 nt, Human
gggguggaggcuuccug

SEQ ID NO: 2622127 - RNA, 20 nt, Human
ggggugcuuuuauagaggcu

SEQ ID NO: 2622128 - RNA, 13 nt, Human
ggggugggccagg

SEQ ID NO: 2622129 - RNA, 15 nt, Human
ggggugggagagguc

SEQ ID NO: 2622130 - RNA, 16 nt, Human
gggggacuagccccug

SEQ ID NO: 2622131 - RNA, 21 nt, Human
gggggacuuacaugauucauu

SEQ ID NO: 2622132 - RNA, 22 nt, Human
gggggaggugggauccuccagg

SEQ ID NO: 2622133 - RNA, 23 nt, Human
ggggcugcaccggcuggccuggc

SEQ ID NO: 2622134 - RNA, 22 nt, Human
gggggacagggcuggcccagcc

SEQ ID NO: 2622135 - RNA, 18 nt, Human
gggggacagggcuggccc

SEQ ID NO: 2622136 - RNA, 23 nt, Human
ggggcugaccuuccucgcagaga

SEQ ID NO: 2622137 - RNA, 20 nt, Human
ggggcugaccuuccucgcag

SEQ ID NO: 2622138 - RNA, 18 nt, Human
ggggcucuggagagaaac

SEQ ID NO: 2622139 - RNA, 18 nt, Human
ggggcugaacggggagaa

SEQ ID NO: 2622140 - RNA, 22 nt, Human
ggggcugcaccggcuggccugg

SEQ ID NO: 2622141 - RNA, 21 nt, Human
ggggcugcaccggcuggccug

SEQ ID NO: 2622142 - RNA, 12 nt, Human
ggggcugcaccg

SEQ ID NO: 2622143 - RNA, 19 nt, Human
ggggcugaggugggaggau

SEQ ID NO: 2622144 - RNA, 17 nt, Human
ggggcugaggugggagg

SEQ ID NO: 2622145 - RNA, 17 nt, Human
ggggcucuggagagaaa

SEQ ID NO: 2622146 - RNA, 16 nt, Human
ggggcucuggagagaa

SEQ ID NO: 2622147 - RNA, 14 nt, Human
ggggcucuggagag

SEQ ID NO: 2622148 - RNA, 24 nt, Human
ggggcucucauguuuucaacugcc

SEQ ID NO: 2622149 - RNA, 14 nt, Human
ggggcucuucucau

SEQ ID NO: 2622150 - RNA, 12 nt, Human
ggggcucuggga

SEQ ID NO: 2622151 - RNA, 15 nt, Human
ggggcucgccaugcc

SEQ ID NO: 2622152 - RNA, 22 nt, Human
ggggcuccuuucuccagccagc

SEQ ID NO: 2622153 - RNA, 21 nt, Human
ggggcuccuuucuccagccag

SEQ ID NO: 2622154 - RNA, 21 nt, Human
ggggcuccuggaaaggcucag

SEQ ID NO: 2622155 - RNA, 20 nt, Human
ggggcucucagcucagcgcc

SEQ ID NO: 2622156 - RNA, 16 nt, Human
ggggcucucagcucag

SEQ ID NO: 2622157 - RNA, 13 nt, Human
ggggcucuggaga

SEQ ID NO: 2622158 - RNA, 15 nt, Human
ggggcuacaagaggg

SEQ ID NO: 2622159 - RNA, 14 nt, Human
ggggcuacaagagg

SEQ ID NO: 2622160 - RNA, 20 nt, Human
ggggcgucuguucccccuuc

SEQ ID NO: 2622161 - RNA, 15 nt, Human
ggggcguggggaggg

SEQ ID NO: 2622162 - RNA, 18 nt, Human
ggggcgucuguucccccu

SEQ ID NO: 2622163 - RNA, 17 nt, Human
ggggcuacaagagggaa

SEQ ID NO: 2622164 - RNA, 16 nt, Human
ggggcuacaagaggga

SEQ ID NO: 2622165 - RNA, 14 nt, Human
ggggcuagaaccua

SEQ ID NO: 2622166 - RNA, 21 nt, Human
ggggcuagaaccuagagaagc

SEQ ID NO: 2622167 - RNA, 13 nt, Human
ggggcucccgccc

SEQ ID NO: 2622168 - RNA, 11 nt, Human
ggggcuccugg

SEQ ID NO: 2622169 - RNA, 12 nt, Human
ggggcuccugga

SEQ ID NO: 2622170 - RNA, 13 nt, Human
ggggcuccuggaa

SEQ ID NO: 2622171 - RNA, 16 nt, Human
ggggcaacccugguga

SEQ ID NO: 2622172 - RNA, 17 nt, Human
ggggcacugcaggggcc

SEQ ID NO: 2622173 - RNA, 21 nt, Human
ggggcacaugcugagucuccc

SEQ ID NO: 2622174 - RNA, 22 nt, Human
ggggcaagaagaucacgcuccc

SEQ ID NO: 2622175 - RNA, 13 nt, Human
ggggcagaacagc

SEQ ID NO: 2622176 - RNA, 17 nt, Human
ggggcagucuggagggg

SEQ ID NO: 2622177 - RNA, 23 nt, Human
ggggcgcuggcccagccggccuc

SEQ ID NO: 2622178 - RNA, 18 nt, Human
ggggcgcuggcccagccg

SEQ ID NO: 2622179 - RNA, 17 nt, Human
ggggcgcuggcccagcc

SEQ ID NO: 2622180 - RNA, 15 nt, Human
ggggcgcuggcccag

SEQ ID NO: 2622181 - RNA, 14 nt, Human
ggggcgcuggccca

SEQ ID NO: 2622182 - RNA, 13 nt, Human
ggggcgcuggccc

SEQ ID NO: 2622183 - RNA, 21 nt, Human
ggggcgcucgcuuccgcaucc

SEQ ID NO: 2622184 - RNA, 13 nt, Human
ggggcaguggcaa

SEQ ID NO: 2622185 - RNA, 14 nt, Human
ggggcaucugcccc

SEQ ID NO: 2622186 - RNA, 20 nt, Human
ggggcaucugccccuccccc

SEQ ID NO: 2622187 - RNA, 11 nt, Human
gggccugggcc

SEQ ID NO: 2622188 - RNA, 22 nt, Human
gggcuuggggaccagagcugcc

SEQ ID NO: 2622189 - RNA, 23 nt, Human
gggcuuguugcuguugauguuuu

SEQ ID NO: 2622190 - RNA, 14 nt, Human
gggcuuucuggaga

SEQ ID NO: 2622191 - RNA, 15 nt, Human
gggcuuucuggagag

SEQ ID NO: 2622192 - RNA, 16 nt, Human
ggggaaaaucagccug

SEQ ID NO: 2622193 - RNA, 17 nt, Human
ggggaaaaucagccugc

SEQ ID NO: 2622194 - RNA, 19 nt, Human
ggggaaaaucagccugcuc

SEQ ID NO: 2622195 - RNA, 14 nt, Human
ggggagggauucug

SEQ ID NO: 2622196 - RNA, 22 nt, Human
ggggaggcggacguuccagccg

SEQ ID NO: 2622197 - RNA, 19 nt, Human
ggggaggaucacuggagcc

SEQ ID NO: 2622198 - RNA, 14 nt, Human
ggggaggcagccgg

SEQ ID NO: 2622199 - RNA, 13 nt, Human
ggggaggccaagu

SEQ ID NO: 2622200 - RNA, 21 nt, Human
ggggaggccaagugcaggcug

SEQ ID NO: 2622201 - RNA, 15 nt, Human
ggggaaaagagauga

SEQ ID NO: 2622202 - RNA, 12 nt, Human
ggggaggagggc

SEQ ID NO: 2622203 - RNA, 21 nt, Human
ggggaaaaucagccugcucca

SEQ ID NO: 2622204 - RNA, 21 nt, Human
ggggagggccguaccccaccc

SEQ ID NO: 2622205 - RNA, 15 nt, Human
ggggagggauucugg

SEQ ID NO: 2622206 - RNA, 20 nt, Human
ggggaggggcgcuggcccag

SEQ ID NO: 2622207 - RNA, 16 nt, Human
ggggaggggcgcuggc

SEQ ID NO: 2622208 - RNA, 13 nt, Human
ggggaggggcgcu

SEQ ID NO: 2622209 - RNA, 15 nt, Human
ggggagggggauccg

SEQ ID NO: 2622210 - RNA, 22 nt, Human
ggggagggguugccacaggccu

SEQ ID NO: 2622211 - RNA, 18 nt, Human
ggggaggggcugugggcg

SEQ ID NO: 2622212 - RNA, 21 nt, Human
ggggauuuccagccagggcug

SEQ ID NO: 2622213 - RNA, 14 nt, Human
ggggauuucuccca

SEQ ID NO: 2622214 - RNA, 15 nt, Human
ggggauuucucccag

SEQ ID NO: 2622215 - RNA, 20 nt, Human
ggggauucuuccaucugauu

SEQ ID NO: 2622216 - RNA, 13 nt, Human
gggccuggcuccc

SEQ ID NO: 2622217 - RNA, 17 nt, Human
gggccuggcucaggugg

SEQ ID NO: 2622218 - RNA, 18 nt, Human
gggccuggccugagcugg

SEQ ID NO: 2622219 - RNA, 14 nt, Human
gggccuggccugag

SEQ ID NO: 2622220 - RNA, 14 nt, Human
gggcccugggcugg

SEQ ID NO: 2622221 - RNA, 23 nt, Human
gggccccugggcuuggccugcug

SEQ ID NO: 2622222 - RNA, 21 nt, Human
gggccccugggcuuggccugc

SEQ ID NO: 2622223 - RNA, 14 nt, Human
gggccccugggcuu

SEQ ID NO: 2622224 - RNA, 19 nt, Human
gggccccugcuucuccagc

SEQ ID NO: 2622225 - RNA, 21 nt, Human
gggccccugcuucuccagccu

SEQ ID NO: 2622226 - RNA, 23 nt, Human
gggccccucugcccagcuugggc

SEQ ID NO: 2622227 - RNA, 22 nt, Human
gggccccucugcccagcuuggg

SEQ ID NO: 2622228 - RNA, 22 nt, Human
gggccccugccucucugcaggu

SEQ ID NO: 2622229 - RNA, 12 nt, Human
gggcccugagcu

SEQ ID NO: 2622230 - RNA, 18 nt, Human
gggccccuuuuuacuccc

SEQ ID NO: 2622231 - RNA, 16 nt, Human
gggcccgccuggcaga

SEQ ID NO: 2622232 - RNA, 20 nt, Human
gggcccgccuggcagaacug

SEQ ID NO: 2622233 - RNA, 13 nt, Human
gggcccugagcuc

SEQ ID NO: 2622234 - RNA, 22 nt, Human
gggcccugagcucgguggaccc

SEQ ID NO: 2622235 - RNA, 19 nt, Human
gggcccugcaccugugcag

SEQ ID NO: 2622236 - RNA, 18 nt, Human
gggcccugcaccugugca

SEQ ID NO: 2622237 - RNA, 18 nt, Human
gggcccugagcugagggc

SEQ ID NO: 2622238 - RNA, 23 nt, Human
gggcccgccuggcagaacugagc

SEQ ID NO: 2622239 - RNA, 13 nt, Human
gggcccugccucc

SEQ ID NO: 2622240 - RNA, 15 nt, Human
gggcccugcagaggg

SEQ ID NO: 2622241 - RNA, 13 nt, Human
gggccuggccuga

SEQ ID NO: 2622242 - RNA, 15 nt, Human
gggcccugggcugga

SEQ ID NO: 2622243 - RNA, 12 nt, Human
gggccuggccug

SEQ ID NO: 2622244 - RNA, 13 nt, Human
gggcccugggcug

SEQ ID NO: 2622245 - RNA, 14 nt, Human
gggccccagaggcu

SEQ ID NO: 2622246 - RNA, 18 nt, Human
gggccccagaaggcaggg

SEQ ID NO: 2622247 - RNA, 15 nt, Human
gggccccaccaccua

SEQ ID NO: 2622248 - RNA, 22 nt, Human
gggcccagggacaccagccagg

SEQ ID NO: 2622249 - RNA, 18 nt, Human
gggcccagggacaccagc

SEQ ID NO: 2622250 - RNA, 11 nt, Human
gggcccaggga

SEQ ID NO: 2622251 - RNA, 20 nt, Human
gggcccaggccaucuuccag

SEQ ID NO: 2622252 - RNA, 22 nt, Human
gggccccaaacgggcugcccug

SEQ ID NO: 2622253 - RNA, 14 nt, Human
gggcccaggaccag

SEQ ID NO: 2622254 - RNA, 9 nt, Human
gggcccagg

SEQ ID NO: 2622255 - RNA, 21 nt, Human
gggcccagcugggcucugcca

SEQ ID NO: 2622256 - RNA, 16 nt, Human
gggcccagcugggcuc

SEQ ID NO: 2622257 - RNA, 15 nt, Human
gggcccagcugggcu

SEQ ID NO: 2622258 - RNA, 12 nt, Human
gggcccagcugg

SEQ ID NO: 2622259 - RNA, 22 nt, Human
gggcccagcccccacagugcug

SEQ ID NO: 2622260 - RNA, 18 nt, Human
gggcccagcccccacagu

SEQ ID NO: 2622261 - RNA, 19 nt, Human
gggcccaggaccagcuggg

SEQ ID NO: 2622262 - RNA, 18 nt, Human
gggcccaggaccagcugg

SEQ ID NO: 2622263 - RNA, 17 nt, Human
gggcccaggaccagcug

SEQ ID NO: 2622264 - RNA, 16 nt, Human
gggcccaggaccagcu

SEQ ID NO: 2622265 - RNA, 14 nt, Human
gggcccaggcaaau

SEQ ID NO: 2622266 - RNA, 24 nt, Human
gggcccaggaccagcuggggcgug

SEQ ID NO: 2622267 - RNA, 13 nt, Human
gggcccaggcagg

SEQ ID NO: 2622268 - RNA, 14 nt, Human
gggccccagucagc

SEQ ID NO: 2622269 - RNA, 17 nt, Human
gggccccagcccacccu

SEQ ID NO: 2622270 - RNA, 18 nt, Human
gggccccagcccacccuc

SEQ ID NO: 2622271 - RNA, 16 nt, Human
gggccccagcccaccc

SEQ ID NO: 2622272 - RNA, 14 nt, Human
gggccccagcccac

SEQ ID NO: 2622273 - RNA, 13 nt, Human
gggccccagccca

SEQ ID NO: 2622274 - RNA, 12 nt, Human
gggccccagccc

SEQ ID NO: 2622275 - RNA, 14 nt, Human
gggcccccaucuca

SEQ ID NO: 2622276 - RNA, 18 nt, Human
gggccccagucagccucu

SEQ ID NO: 2622277 - RNA, 17 nt, Human
gggccccagucagccuc

SEQ ID NO: 2622278 - RNA, 23 nt, Human
gggcccccagcgagagucccugc

SEQ ID NO: 2622279 - RNA, 19 nt, Human
gggccccccuccuugcucu

SEQ ID NO: 2622280 - RNA, 17 nt, Human
gggccccccuccuugcu

SEQ ID NO: 2622281 - RNA, 15 nt, Human
gggccccccuccuug

SEQ ID NO: 2622282 - RNA, 19 nt, Human
gggccccagucagccucuc

SEQ ID NO: 2622283 - RNA, 21 nt, Human
gggccccccuccuugcucugc

SEQ ID NO: 2622284 - RNA, 19 nt, Human
gggccccucacccugccuu

SEQ ID NO: 2622285 - RNA, 17 nt, Human
gggccccucacccugcc

SEQ ID NO: 2622286 - RNA, 15 nt, Human
gggccccuccagcuu

SEQ ID NO: 2622287 - RNA, 14 nt, Human
gggccccuccagcu

SEQ ID NO: 2622288 - RNA, 21 nt, Human
gggccccucaucgcguccucc

SEQ ID NO: 2622289 - RNA, 13 nt, Human
gggccccuccagc

SEQ ID NO: 2622290 - RNA, 21 nt, Human
gggccccugccucucugcagg

SEQ ID NO: 2622291 - RNA, 19 nt, Human
gggccccugccucucugca

SEQ ID NO: 2622292 - RNA, 18 nt, Human
gggccccugccucucugc

SEQ ID NO: 2622293 - RNA, 17 nt, Human
gggccccugccucucug

SEQ ID NO: 2622294 - RNA, 15 nt, Human
gggccccugccucuc

SEQ ID NO: 2622295 - RNA, 13 nt, Human
gggccccugccuc

SEQ ID NO: 2622296 - RNA, 17 nt, Human
gggccccucugcccagc

SEQ ID NO: 2622297 - RNA, 16 nt, Human
gggccccucugcccag

SEQ ID NO: 2622298 - RNA, 15 nt, Human
gggccccucugccca

SEQ ID NO: 2622299 - RNA, 13 nt, Human
gggccccugccag

SEQ ID NO: 2622300 - RNA, 12 nt, Human
gggccccucugc

SEQ ID NO: 2622301 - RNA, 21 nt, Human
gggcauguauuggccuggagg

SEQ ID NO: 2622302 - RNA, 20 nt, Human
gggcauguauuggccuggag

SEQ ID NO: 2622303 - RNA, 19 nt, Human
gggcauguauuggccugga

SEQ ID NO: 2622304 - RNA, 22 nt, Human
gggcauguauuggccuggaggu

SEQ ID NO: 2622305 - RNA, 21 nt, Human
gggcauggggugggccucugg

SEQ ID NO: 2622306 - RNA, 18 nt, Human
gggcauguauuggccugg

SEQ ID NO: 2622307 - RNA, 20 nt, Human
gggcauggggugggccucug

SEQ ID NO: 2622308 - RNA, 17 nt, Human
gggcauggggugggccu

SEQ ID NO: 2622309 - RNA, 15 nt, Human
gggcauggggugggc

SEQ ID NO: 2622310 - RNA, 16 nt, Human
gggcauggccagcagc

SEQ ID NO: 2622311 - RNA, 20 nt, Human
gggcauggccagguggccac

SEQ ID NO: 2622312 - RNA, 17 nt, Human
gggcauggccagguggc

SEQ ID NO: 2622313 - RNA, 15 nt, Human
gggcauggccaggug

SEQ ID NO: 2622314 - RNA, 20 nt, Human
gggcauggacguucggggca

SEQ ID NO: 2622315 - RNA, 22 nt, Human
gggcauggacguucggggcaug

SEQ ID NO: 2622316 - RNA, 12 nt, Human
gggcaugacacg

SEQ ID NO: 2622317 - RNA, 14 nt, Human
gggcaucugccccu

SEQ ID NO: 2622318 - RNA, 17 nt, Human
gggcaucugccccuccc

SEQ ID NO: 2622319 - RNA, 19 nt, Human
gggcaucugccccuccccc

SEQ ID NO: 2622320 - RNA, 16 nt, Human
gggcaugccccggcca

SEQ ID NO: 2622321 - RNA, 20 nt, Human
gggcaucugccccuccccca

SEQ ID NO: 2622322 - RNA, 23 nt, Human
gggcaugccccggccaccucugc

SEQ ID NO: 2622323 - RNA, 22 nt, Human
gggcaugccccggccaccucug

SEQ ID NO: 2622324 - RNA, 20 nt, Human
gggcaugccccggccaccuc

SEQ ID NO: 2622325 - RNA, 14 nt, Human
gggcaugcuggggc

SEQ ID NO: 2622326 - RNA, 17 nt, Human
gggcaugcuggggcaag

SEQ ID NO: 2622327 - RNA, 17 nt, Human
gggcauauccaccaccu

SEQ ID NO: 2622328 - RNA, 22 nt, Human
gggcauagaugcaggugagccc

SEQ ID NO: 2622329 - RNA, 15 nt, Human
gggcauacuaauaaa

SEQ ID NO: 2622330 - RNA, 14 nt, Human
gggcaucuccagga

SEQ ID NO: 2622331 - RNA, 13 nt, Human
gggcauccucagg

SEQ ID NO: 2622332 - RNA, 13 nt, Human
gggcaucaugcau

SEQ ID NO: 2622333 - RNA, 22 nt, Human
gggcagugguaagcucuggcuu

SEQ ID NO: 2622334 - RNA, 21 nt, Human
gggcagugguaagcucuggcu

SEQ ID NO: 2622335 - RNA, 20 nt, Human
gggcagugguguggagaagc

SEQ ID NO: 2622336 - RNA, 18 nt, Human
gggcagugggucccagau

SEQ ID NO: 2622337 - RNA, 15 nt, Human
gggcagucuggaggg

SEQ ID NO: 2622338 - RNA, 17 nt, Human
gggcagucauuauccag

SEQ ID NO: 2622339 - RNA, 14 nt, Human
gggcagucuggagg

SEQ ID NO: 2622340 - RNA, 17 nt, Human
gggcagucuggaggggc

SEQ ID NO: 2622341 - RNA, 14 nt, Human
gggcccaccuggcc

SEQ ID NO: 2622342 - RNA, 13 nt, Human
gggcccaccuggc

SEQ ID NO: 2622343 - RNA, 10 nt, Human
gggcccaccu

SEQ ID NO: 2622344 - RNA, 12 nt, Human
gggcccacaccc

SEQ ID NO: 2622345 - RNA, 20 nt, Human
gggcccaagucccuguuuuc

SEQ ID NO: 2622346 - RNA, 17 nt, Human
gggcccagagagggugg

SEQ ID NO: 2622347 - RNA, 18 nt, Human
gggccacgugccaggccc

SEQ ID NO: 2622348 - RNA, 19 nt, Human
gggccacgugccaggcccg

SEQ ID NO: 2622349 - RNA, 15 nt, Human
gggccacucugccuc

SEQ ID NO: 2622350 - RNA, 16 nt, Human
gggccacucugccucu

SEQ ID NO: 2622351 - RNA, 19 nt, Human
gggcccaagacagaugccc

SEQ ID NO: 2622352 - RNA, 19 nt, Human
gggcccaaggcggccccuc

SEQ ID NO: 2622353 - RNA, 18 nt, Human
gggcccaaggcggccccu

SEQ ID NO: 2622354 - RNA, 23 nt, Human
gggcccaagacagaugccccaga

SEQ ID NO: 2622355 - RNA, 19 nt, Human
gggcccaccuggccaccug

SEQ ID NO: 2622356 - RNA, 18 nt, Human
gggcccaccuggccaccu

SEQ ID NO: 2622357 - RNA, 16 nt, Human
gggcccaccuggccac

SEQ ID NO: 2622358 - RNA, 15 nt, Human
gggcccaccuggcca

SEQ ID NO: 2622359 - RNA, 12 nt, Human
gggcccagagca

SEQ ID NO: 2622360 - RNA, 22 nt, Human
gggcccaccuggccaccugagg

SEQ ID NO: 2622361 - RNA, 11 nt, Human
gggcccagagc

SEQ ID NO: 2622362 - RNA, 12 nt, Human
gggcccagagcc

SEQ ID NO: 2622363 - RNA, 13 nt, Human
gggcccagagccc

SEQ ID NO: 2622364 - RNA, 15 nt, Human
gggcccagagcccag

SEQ ID NO: 2622365 - RNA, 16 nt, Human
gggcccagagcccagc

SEQ ID NO: 2622366 - RNA, 14 nt, Human
gggcccagagcagg

SEQ ID NO: 2622367 - RNA, 20 nt, Human
gggcccagagcccagcucca

SEQ ID NO: 2622368 - RNA, 17 nt, Human
gggcccagagcccagcu

SEQ ID NO: 2622369 - RNA, 19 nt, Human
gggcccagagcccagcucc

SEQ ID NO: 2622370 - RNA, 13 nt, Human
gggcccagccccc

SEQ ID NO: 2622371 - RNA, 12 nt, Human
gggcccagcccc

SEQ ID NO: 2622372 - RNA, 11 nt, Human
gggcccagccc

SEQ ID NO: 2622373 - RNA, 13 nt, Human
gggcccagaucug

SEQ ID NO: 2622374 - RNA, 14 nt, Human
gggcccagauucua

SEQ ID NO: 2622375 - RNA, 18 nt, Human
gggcauugauggggaagg

SEQ ID NO: 2622376 - RNA, 23 nt, Human
gggcauugauggggaaggaggcu

SEQ ID NO: 2622377 - RNA, 14 nt, Human
gggcauugcuuucc

SEQ ID NO: 2622378 - RNA, 13 nt, Human
gggccaagcccag

SEQ ID NO: 2622379 - RNA, 23 nt, Human
gggccaacuugagggcccagagc

SEQ ID NO: 2622380 - RNA, 13 nt, Human
gggccaagaaaga

SEQ ID NO: 2622381 - RNA, 11 nt, Human
gggccaacacc

SEQ ID NO: 2622382 - RNA, 15 nt, Human
gggccaacaccaggg

SEQ ID NO: 2622383 - RNA, 22 nt, Human
gggccaacuugagggcccagag

SEQ ID NO: 2622384 - RNA, 16 nt, Human
gggccaacaccaggga

SEQ ID NO: 2622385 - RNA, 16 nt, Human
gggccacagagaaagu

SEQ ID NO: 2622386 - RNA, 17 nt, Human
gggccaagacuuggcaa

SEQ ID NO: 2622387 - RNA, 13 nt, Human
gggccaaggacug

SEQ ID NO: 2622388 - RNA, 15 nt, Human
gggccacacagaaac

SEQ ID NO: 2622389 - RNA, 23 nt, Human
gggccacagagaaaguacuucuc

SEQ ID NO: 2622390 - RNA, 19 nt, Human
gggccacaugggaggcuca

SEQ ID NO: 2622391 - RNA, 19 nt, Human
gggccacagggcgagacuc

SEQ ID NO: 2622392 - RNA, 17 nt, Human
gggccaccuccccaggc

SEQ ID NO: 2622393 - RNA, 16 nt, Human
gggccaccuccccagg

SEQ ID NO: 2622394 - RNA, 15 nt, Human
gggccaccuccccag

SEQ ID NO: 2622395 - RNA, 14 nt, Human
gggccacgugccag

SEQ ID NO: 2622396 - RNA, 22 nt, Human
gggccaccuccccaggccgugg

SEQ ID NO: 2622397 - RNA, 19 nt, Human
gggccaccuccccaggccg

SEQ ID NO: 2622398 - RNA, 13 nt, Human
gggauagagagag

SEQ ID NO: 2622399 - RNA, 13 nt, Human
gggauagaugugu

SEQ ID NO: 2622400 - RNA, 13 nt, Human
gggauacugcagg

SEQ ID NO: 2622401 - RNA, 15 nt, Human
gggauacaugcucuu

SEQ ID NO: 2622402 - RNA, 13 nt, Human
gggauacaugcuc

SEQ ID NO: 2622403 - RNA, 23 nt, Human
gggaguucgagaccaaccugacc

SEQ ID NO: 2622404 - RNA, 21 nt, Human
gggauaugauuuaaaucagcc

SEQ ID NO: 2622405 - RNA, 14 nt, Human
gggauagaugugug

SEQ ID NO: 2622406 - RNA, 16 nt, Human
gggauagcacugagca

SEQ ID NO: 2622407 - RNA, 15 nt, Human
gggauauaggagagg

SEQ ID NO: 2622408 - RNA, 16 nt, Human
gggauccuccaggugc

SEQ ID NO: 2622409 - RNA, 15 nt, Human
gggauccuccaggug

SEQ ID NO: 2622410 - RNA, 16 nt, Human
gggauauaggagagga

SEQ ID NO: 2622411 - RNA, 12 nt, Human
gggauaugcuua

SEQ ID NO: 2622412 - RNA, 13 nt, Human
gggaucacaaggu

SEQ ID NO: 2622413 - RNA, 22 nt, Human
gggaucaaccagcuaagaaaag

SEQ ID NO: 2622414 - RNA, 22 nt, Human
gggaucacagagacauuccucc

SEQ ID NO: 2622415 - RNA, 13 nt, Human
gggaucacagaga

SEQ ID NO: 2622416 - RNA, 14 nt, Human
gggaucacagggcc

SEQ ID NO: 2622417 - RNA, 15 nt, Human
gggaucugccccucc

SEQ ID NO: 2622418 - RNA, 14 nt, Human
gggaucucaggggc

SEQ ID NO: 2622419 - RNA, 17 nt, Human
gggauccgacugcuuug

SEQ ID NO: 2622420 - RNA, 20 nt, Human
gggaucccucccccccaugc

SEQ ID NO: 2622421 - RNA, 23 nt, Human
gggauccuggaguucugguuccu

SEQ ID NO: 2622422 - RNA, 18 nt, Human
gggcaacccuggugacca

SEQ ID NO: 2622423 - RNA, 20 nt, Human
gggcaacccccagccugcua

SEQ ID NO: 2622424 - RNA, 24 nt, Human
gggcaagucccugacucucuguga

SEQ ID NO: 2622425 - RNA, 19 nt, Human
gggaucugguccuacccau

SEQ ID NO: 2622426 - RNA, 23 nt, Human
gggaucugguccuacccaucccc

SEQ ID NO: 2622427 - RNA, 18 nt, Human
gggaucuugcauucccag

SEQ ID NO: 2622428 - RNA, 17 nt, Human
gggaucugugcccagag

SEQ ID NO: 2622429 - RNA, 15 nt, Human
gggaugaaagagaag

SEQ ID NO: 2622430 - RNA, 11 nt, Human
gggaugaaaga

SEQ ID NO: 2622431 - RNA, 20 nt, Human
gggcaagaagaucacgcucc

SEQ ID NO: 2622432 - RNA, 13 nt, Human
gggcaagggccau

SEQ ID NO: 2622433 - RNA, 13 nt, Human
gggcaaggagacc

SEQ ID NO: 2622434 - RNA, 21 nt, Human
gggcaagaagaucacgcuccc

SEQ ID NO: 2622435 - RNA, 13 nt, Human
gggacugagaaau

SEQ ID NO: 2622436 - RNA, 19 nt, Human
gggacucugaagccucugg

SEQ ID NO: 2622437 - RNA, 20 nt, Human
gggacucugaagccucuggg

SEQ ID NO: 2622438 - RNA, 15 nt, Human
gggacuagccccugu

SEQ ID NO: 2622439 - RNA, 16 nt, Human
gggacucagcccugag

SEQ ID NO: 2622440 - RNA, 22 nt, Human
gggacucagccuucagacagag

SEQ ID NO: 2622441 - RNA, 17 nt, Human
gggacucagcccugagg

SEQ ID NO: 2622442 - RNA, 15 nt, Human
gggacuaugaauggg

SEQ ID NO: 2622443 - RNA, 17 nt, Human
gggaggugggauccucc

SEQ ID NO: 2622444 - RNA, 16 nt, Human
gggaggucgagguagg

SEQ ID NO: 2622445 - RNA, 16 nt, Human
gggaggugaccccagg

SEQ ID NO: 2622446 - RNA, 15 nt, Human
gggaggucgagguag

SEQ ID NO: 2622447 - RNA, 15 nt, Human
gggacugaagccaaa

SEQ ID NO: 2622448 - RNA, 18 nt, Human
gggacugaagccaaaguu

SEQ ID NO: 2622449 - RNA, 18 nt, Human
gggacugaaaaccucucc

SEQ ID NO: 2622450 - RNA, 19 nt, Human
gggacugaaaaccucuccu

SEQ ID NO: 2622451 - RNA, 14 nt, Human
gggagugagcuggu

SEQ ID NO: 2622452 - RNA, 11 nt, Human
gggagugagcu

SEQ ID NO: 2622453 - RNA, 18 nt, Human
gggagugacagaggcagc

SEQ ID NO: 2622454 - RNA, 23 nt, Human
gggagguggaagaagggagaaga

SEQ ID NO: 2622455 - RNA, 14 nt, Human
gggagguggcuggg

SEQ ID NO: 2622456 - RNA, 17 nt, Human
gggaguuaagaccuggc

SEQ ID NO: 2622457 - RNA, 20 nt, Human
gggaguuaagaccuggcagc

SEQ ID NO: 2622458 - RNA, 23 nt, Human
gggaguuaagaccuggcagcucu

SEQ ID NO: 2622459 - RNA, 20 nt, Human
gggaguucgagaccaaccug

SEQ ID NO: 2622460 - RNA, 21 nt, Human
gggaguuucuuuccugccuuc

SEQ ID NO: 2622461 - RNA, 22 nt, Human
gggaguugucaagucucugcug

SEQ ID NO: 2622462 - RNA, 11 nt, Human
gggagugugua

SEQ ID NO: 2622463 - RNA, 19 nt, Human
gggagugagacagaaguaa

SEQ ID NO: 2622464 - RNA, 21 nt, Human
gggagugggacagagucuggg

SEQ ID NO: 2622465 - RNA, 15 nt, Human
gggaguuaagaccug

SEQ ID NO: 2622466 - RNA, 16 nt, Human
gggaguuaagaccugg

SEQ ID NO: 2622467 - RNA, 21 nt, Human
gggcacagaaaauggaagaca

SEQ ID NO: 2622468 - RNA, 20 nt, Human
gggcacagaaaauggaagac

SEQ ID NO: 2622469 - RNA, 23 nt, Human
gggcacaccgggcacucagaaga

SEQ ID NO: 2622470 - RNA, 13 nt, Human
gggcacacacugu

SEQ ID NO: 2622471 - RNA, 12 nt, Human
gggcacacacug

SEQ ID NO: 2622472 - RNA, 15 nt, Human
gggcacacgccuccc

SEQ ID NO: 2622473 - RNA, 18 nt, Human
gggcacagaaaauggaag

SEQ ID NO: 2622474 - RNA, 19 nt, Human
gggcacacgccucccacug

SEQ ID NO: 2622475 - RNA, 20 nt, Human
gggcaccagggguuucucgc

SEQ ID NO: 2622476 - RNA, 18 nt, Human
gggcaccagggguuucuc

SEQ ID NO: 2622477 - RNA, 22 nt, Human
gggcacaugcugagucucccaa

SEQ ID NO: 2622478 - RNA, 20 nt, Human
gggcacaugcugagucuccc

SEQ ID NO: 2622479 - RNA, 23 nt, Human
gggcacaugcugagucucccaag

SEQ ID NO: 2622480 - RNA, 13 nt, Human
gggcacagggucu

SEQ ID NO: 2622481 - RNA, 16 nt, Human
gggcacagggucucua

SEQ ID NO: 2622482 - RNA, 19 nt, Human
gggcacucagaagacacug

SEQ ID NO: 2622483 - RNA, 16 nt, Human
gggcacucagaagaca

SEQ ID NO: 2622484 - RNA, 14 nt, Human
gggcaccggggccu

SEQ ID NO: 2622485 - RNA, 19 nt, Human
gggcaccuauagucccagc

SEQ ID NO: 2622486 - RNA, 12 nt, Human
gggcacccaccc

SEQ ID NO: 2622487 - RNA, 14 nt, Human
gggcacuggagcug

SEQ ID NO: 2622488 - RNA, 22 nt, Human
gggcacugcuggguggcccauc

SEQ ID NO: 2622489 - RNA, 21 nt, Human
gggcacugcuggguggcccau

SEQ ID NO: 2622490 - RNA, 20 nt, Human
gggcacugcuggguggccca

SEQ ID NO: 2622491 - RNA, 16 nt, Human
gggcacugcugggugg

SEQ ID NO: 2622492 - RNA, 14 nt, Human
gggcacugcugggu

SEQ ID NO: 2622493 - RNA, 13 nt, Human
gggcacugcuggg

SEQ ID NO: 2622494 - RNA, 16 nt, Human
gggcacugguggcccg

SEQ ID NO: 2622495 - RNA, 13 nt, Human
gggcacugguggc

SEQ ID NO: 2622496 - RNA, 18 nt, Human
gggcacgcugugggcagg

SEQ ID NO: 2622497 - RNA, 17 nt, Human
gggcacgcugugggcag

SEQ ID NO: 2622498 - RNA, 18 nt, Human
gggcaccuggggaguggg

SEQ ID NO: 2622499 - RNA, 20 nt, Human
gggcacucagaagacacuga

SEQ ID NO: 2622500 - RNA, 14 nt, Human
gggcagaaggaaga

SEQ ID NO: 2622501 - RNA, 16 nt, Human
gggcacuucacagagu

SEQ ID NO: 2622502 - RNA, 15 nt, Human
gggcacuucacagag

SEQ ID NO: 2622503 - RNA, 14 nt, Human
gggcacuucacaga

SEQ ID NO: 2622504 - RNA, 18 nt, Human
gggcacuucacagagugu

SEQ ID NO: 2622505 - RNA, 17 nt, Human
gggcacuucacagagug

SEQ ID NO: 2622506 - RNA, 18 nt, Human
gggcagaaggaagacuuc

SEQ ID NO: 2622507 - RNA, 23 nt, Human
gggcacuuuuuaauucaccaaag

SEQ ID NO: 2622508 - RNA, 22 nt, Human
gggcacuuuuuaauucaccaaa

SEQ ID NO: 2622509 - RNA, 14 nt, Human
gggcagaacacuaa

SEQ ID NO: 2622510 - RNA, 15 nt, Human
gggcagaaaguggcc

SEQ ID NO: 2622511 - RNA, 14 nt, Human
gggcagaagggaga

SEQ ID NO: 2622512 - RNA, 22 nt, Human
gggcagaacacuaaccugaccg

SEQ ID NO: 2622513 - RNA, 22 nt, Human
gggcagaacagccgcuccuguc

SEQ ID NO: 2622514 - RNA, 20 nt, Human
gggcaguagaaggucggagg

SEQ ID NO: 2622515 - RNA, 22 nt, Human
gggcaggugguggcacugagcc

SEQ ID NO: 2622516 - RNA, 17 nt, Human
gggcagguugguggggg

SEQ ID NO: 2622517 - RNA, 14 nt, Human
gggcagggugaccc

SEQ ID NO: 2622518 - RNA, 13 nt, Human
gggcaggugggag

SEQ ID NO: 2622519 - RNA, 18 nt, Human
gggcaggugguggcacug

SEQ ID NO: 2622520 - RNA, 16 nt, Human
gggcaggugguggcac

SEQ ID NO: 2622521 - RNA, 17 nt, Human
gggcaggugggagcuug

SEQ ID NO: 2622522 - RNA, 12 nt, Human
gggcagagcaga

SEQ ID NO: 2622523 - RNA, 18 nt, Human
gggcagaagggagaagga

SEQ ID NO: 2622524 - RNA, 16 nt, Human
gggcagaagggagaag

SEQ ID NO: 2622525 - RNA, 19 nt, Human
gggcagaagggagaaggau

SEQ ID NO: 2622526 - RNA, 11 nt, Human
gggcagagcag

SEQ ID NO: 2622527 - RNA, 14 nt, Human
gggcagggcaugac

SEQ ID NO: 2622528 - RNA, 20 nt, Human
gggcagggcaucuccugugc

SEQ ID NO: 2622529 - RNA, 22 nt, Human
ggcuugaguuuaaauuguaaua

SEQ ID NO: 2622530 - RNA, 21 nt, Human
ggcuuggggaccagagcugcc

SEQ ID NO: 2622531 - RNA, 19 nt, Human
ggcuuggggaccagagcug

SEQ ID NO: 2622532 - RNA, 22 nt, Human
ggcuuggggcucacacaccugu

SEQ ID NO: 2622533 - RNA, 16 nt, Human
ggcuugaagccaaaga

SEQ ID NO: 2622534 - RNA, 23 nt, Human
ggcuugcaaguauguuuuagcau

SEQ ID NO: 2622535 - RNA, 21 nt, Human
ggcuuuauccucuuuagaguu

SEQ ID NO: 2622536 - RNA, 20 nt, Human
ggcuuuauccucuuuagagu

SEQ ID NO: 2622537 - RNA, 18 nt, Human
ggcuuuauccucuuuaga

SEQ ID NO: 2622538 - RNA, 15 nt, Human
ggcuuuauccucuuu

SEQ ID NO: 2622539 - RNA, 14 nt, Human
ggcuuuauccucuu

SEQ ID NO: 2622540 - RNA, 13 nt, Human
ggcuuuagacacu

SEQ ID NO: 2622541 - RNA, 16 nt, Human
ggcuuguguguuucac

SEQ ID NO: 2622542 - RNA, 15 nt, Human
ggcuugucagagcug

SEQ ID NO: 2622543 - RNA, 16 nt, Human
ggcuugucagagcugg

SEQ ID NO: 2622544 - RNA, 17 nt, Human
ggcuugucagagcuggg

SEQ ID NO: 2622545 - RNA, 17 nt, Human
ggcuuguaacuccacca

SEQ ID NO: 2622546 - RNA, 18 nt, Human
ggcuuguaacuccaccaa

SEQ ID NO: 2622547 - RNA, 15 nt, Human
ggcuuggggcuuccu

SEQ ID NO: 2622548 - RNA, 15 nt, Human
ggcuuguaacuccac

SEQ ID NO: 2622549 - RNA, 22 nt, Human
ggcuuucauuauuaguacugcu

SEQ ID NO: 2622550 - RNA, 11 nt, Human
ggcuuucaugu

SEQ ID NO: 2622551 - RNA, 17 nt, Human
ggcuuuucacugcuggc

SEQ ID NO: 2622552 - RNA, 15 nt, Human
ggcuuuucacugcug

SEQ ID NO: 2622553 - RNA, 16 nt, Human
ggcuuucccuuaucaa

SEQ ID NO: 2622554 - RNA, 13 nt, Human
ggcuuuucacugc

SEQ ID NO: 2622555 - RNA, 14 nt, Human
ggcuuuucacugcu

SEQ ID NO: 2622556 - RNA, 10 nt, Human
ggcuuuugug

SEQ ID NO: 2622557 - RNA, 14 nt, Human
ggcuuuucucagcu

SEQ ID NO: 2622558 - RNA, 15 nt, Human
ggcuuuucucagcug

SEQ ID NO: 2622559 - RNA, 22 nt, Human
ggcuuuucacugcuggcugccu

SEQ ID NO: 2622560 - RNA, 19 nt, Human
ggcuuuucacugcuggcug

SEQ ID NO: 2622561 - RNA, 20 nt, Human
ggcuugaagccaaagaaaaa

SEQ ID NO: 2622562 - RNA, 21 nt, Human
ggcuugagaaauauggacacu

SEQ ID NO: 2622563 - RNA, 20 nt, Human
ggcuugagcccccgcgccca

SEQ ID NO: 2622564 - RNA, 15 nt, Human
ggcuugaagccaaag

SEQ ID NO: 2622565 - RNA, 13 nt, Human
ggcuugaagccaa

SEQ ID NO: 2622566 - RNA, 12 nt, Human
ggcuugaagcca

SEQ ID NO: 2622567 - RNA, 22 nt, Human
ggcuucaaccuugagacagcuu

SEQ ID NO: 2622568 - RNA, 20 nt, Human
ggcuucuucagaucagugcu

SEQ ID NO: 2622569 - RNA, 16 nt, Human
ggcuuauccagcuggu

SEQ ID NO: 2622570 - RNA, 22 nt, Human
ggcuuaguuuguguguugucuc

SEQ ID NO: 2622571 - RNA, 21 nt, Human
ggcuuagucacugagacagcc

SEQ ID NO: 2622572 - RNA, 22 nt, Human
ggcuuacuacaugugggagcuu

SEQ ID NO: 2622573 - RNA, 17 nt, Human
ggcuuacacguggagga

SEQ ID NO: 2622574 - RNA, 13 nt, Human
ggcuuacacccac

SEQ ID NO: 2622575 - RNA, 12 nt, Human
ggcugggcuuca

SEQ ID NO: 2622576 - RNA, 18 nt, Human
ggcugggcucccuuccca

SEQ ID NO: 2622577 - RNA, 17 nt, Human
ggcugggcucccuuccc

SEQ ID NO: 2622578 - RNA, 14 nt, Human
ggcugggcccagaa

SEQ ID NO: 2622579 - RNA, 17 nt, Human
ggcugggcuucaguggc

SEQ ID NO: 2622580 - RNA, 13 nt, Human
ggcugggcuucag

SEQ ID NO: 2622581 - RNA, 15 nt, Human
ggcuuaaaacaacac

SEQ ID NO: 2622582 - RNA, 16 nt, Human
ggcuuaauguuuauuc

SEQ ID NO: 2622583 - RNA, 14 nt, Human
ggcuuaauguuuau

SEQ ID NO: 2622584 - RNA, 12 nt, Human
ggcuuaauguuu

SEQ ID NO: 2622585 - RNA, 16 nt, Human
ggcuuaaugcuucuuu

SEQ ID NO: 2622586 - RNA, 19 nt, Human
ggcuuaagaaaucuaguau

SEQ ID NO: 2622587 - RNA, 14 nt, Human
ggcuuuugugcauu

SEQ ID NO: 2622588 - RNA, 16 nt, Human
gggaaggauacaaaag

SEQ ID NO: 2622589 - RNA, 21 nt, Human
gggaaggauacaaaagcaugu

SEQ ID NO: 2622590 - RNA, 23 nt, Human
gggaaggauacaaaagcauguga

SEQ ID NO: 2622591 - RNA, 14 nt, Human
gggaagggacacac

SEQ ID NO: 2622592 - RNA, 19 nt, Human
gggaaggccccacagacaa

SEQ ID NO: 2622593 - RNA, 13 nt, Human
gggaagggccagu

SEQ ID NO: 2622594 - RNA, 12 nt, Human
gggaagggccag

SEQ ID NO: 2622595 - RNA, 13 nt, Human
gggaagggagagc

SEQ ID NO: 2622596 - RNA, 16 nt, Human
gggaagggagagcggg

SEQ ID NO: 2622597 - RNA, 22 nt, Human
gggaaggcagggagggccuggg

SEQ ID NO: 2622598 - RNA, 12 nt, Human
gggaaggccagc

SEQ ID NO: 2622599 - RNA, 12 nt, Human
ggcuuucuggag

SEQ ID NO: 2622600 - RNA, 23 nt, Human
gggaaguccccgaguuuccccag

SEQ ID NO: 2622601 - RNA, 19 nt, Human
gggaaggucaccagcacca

SEQ ID NO: 2622602 - RNA, 14 nt, Human
gggaaguccccagg

SEQ ID NO: 2622603 - RNA, 21 nt, Human
gggaaggugggguccuggagc

SEQ ID NO: 2622604 - RNA, 12 nt, Human
gggaaggucacc

SEQ ID NO: 2622605 - RNA, 20 nt, Human
gggaaugaggcuugcugaga

SEQ ID NO: 2622606 - RNA, 14 nt, Human
gggaaugaggcuug

SEQ ID NO: 2622607 - RNA, 24 nt, Human
gggaaugaagcuuguguauccauu

SEQ ID NO: 2622608 - RNA, 14 nt, Human
gggaaugaagcuug

SEQ ID NO: 2622609 - RNA, 16 nt, Human
gggaaugaaccuggag

SEQ ID NO: 2622610 - RNA, 14 nt, Human
gggaaugaaccugg

SEQ ID NO: 2622611 - RNA, 21 nt, Human
gggaaugccugagugccuggc

SEQ ID NO: 2622612 - RNA, 17 nt, Human
gggaaugccugagugcc

SEQ ID NO: 2622613 - RNA, 21 nt, Human
gggaaugaggcuugcugagag

SEQ ID NO: 2622614 - RNA, 22 nt, Human
gggaauggcacagcccaaagaa

SEQ ID NO: 2622615 - RNA, 16 nt, Human
gggaauggcacagccc

SEQ ID NO: 2622616 - RNA, 16 nt, Human
gggaagggggcuggga

SEQ ID NO: 2622617 - RNA, 14 nt, Human
gggaagggggcugg

SEQ ID NO: 2622618 - RNA, 17 nt, Human
gggaagggggcugggac

SEQ ID NO: 2622619 - RNA, 22 nt, Human
gggaagggccagucugggcugc

SEQ ID NO: 2622620 - RNA, 16 nt, Human
gggaagggccagucug

SEQ ID NO: 2622621 - RNA, 18 nt, Human
gggaaggggacccccgcc

SEQ ID NO: 2622622 - RNA, 18 nt, Human
gggaccccgagccuggcu

SEQ ID NO: 2622623 - RNA, 20 nt, Human
gggaccccgagccuggcucc

SEQ ID NO: 2622624 - RNA, 18 nt, Human
gggacaaguggacucagg

SEQ ID NO: 2622625 - RNA, 16 nt, Human
gggaccccgagccugg

SEQ ID NO: 2622626 - RNA, 20 nt, Human
gggaccccuggugguucacu

SEQ ID NO: 2622627 - RNA, 14 nt, Human
gggaccccugagcu

SEQ ID NO: 2622628 - RNA, 13 nt, Human
gggaccccuccuc

SEQ ID NO: 2622629 - RNA, 20 nt, Human
gggacccuaagacuccucgg

SEQ ID NO: 2622630 - RNA, 23 nt, Human
gggacccugugacauggugccug

SEQ ID NO: 2622631 - RNA, 16 nt, Human
gggacccuuuccuucc

SEQ ID NO: 2622632 - RNA, 17 nt, Human
gggaauuucuucaacuc

SEQ ID NO: 2622633 - RNA, 21 nt, Human
gggaauguaacugcugaaaac

SEQ ID NO: 2622634 - RNA, 20 nt, Human
gggaauguauuauucugcag

SEQ ID NO: 2622635 - RNA, 14 nt, Human
gggaauugugugau

SEQ ID NO: 2622636 - RNA, 22 nt, Human
gggaauugaggucugcucggcc

SEQ ID NO: 2622637 - RNA, 21 nt, Human
gggaauguauuauucugcagc

SEQ ID NO: 2622638 - RNA, 15 nt, Human
gggaauggcagcugc

SEQ ID NO: 2622639 - RNA, 23 nt, Human
gggacaaggacuaggguccuggg

SEQ ID NO: 2622640 - RNA, 18 nt, Human
gggacaaaacccaccuug

SEQ ID NO: 2622641 - RNA, 13 nt, Human
gggaauuuccucu

SEQ ID NO: 2622642 - RNA, 12 nt, Human
gggaauuuccuc

SEQ ID NO: 2622643 - RNA, 18 nt, Human
gggaauugugugauguuu

SEQ ID NO: 2622644 - RNA, 15 nt, Human
gggaccucaggccug

SEQ ID NO: 2622645 - RNA, 13 nt, Human
gggaccucaggcc

SEQ ID NO: 2622646 - RNA, 12 nt, Human
gggaccucaggc

SEQ ID NO: 2622647 - RNA, 23 nt, Human
gggaccgccagauggggccucug

SEQ ID NO: 2622648 - RNA, 18 nt, Human
gggaccgguacagaaagg

SEQ ID NO: 2622649 - RNA, 16 nt, Human
gggacucaaugcacug

SEQ ID NO: 2622650 - RNA, 17 nt, Human
gggacuacaggcaccca

SEQ ID NO: 2622651 - RNA, 22 nt, Human
gggacguggcucagccagcacu

SEQ ID NO: 2622652 - RNA, 20 nt, Human
gggacguggcucagccagca

SEQ ID NO: 2622653 - RNA, 22 nt, Human
gggaccuccccugaggcucagg

SEQ ID NO: 2622654 - RNA, 19 nt, Human
gggacguggcucagccagc

SEQ ID NO: 2622655 - RNA, 12 nt, Human
gggaccucuccc

SEQ ID NO: 2622656 - RNA, 16 nt, Human
gggaccucucccaggg

SEQ ID NO: 2622657 - RNA, 23 nt, Human
gggaccucucccagggucccugg

SEQ ID NO: 2622658 - RNA, 14 nt, Human
ggcugcugaaggcu

SEQ ID NO: 2622659 - RNA, 13 nt, Human
ggcugcagggagu

SEQ ID NO: 2622660 - RNA, 12 nt, Human
ggcugcagggag

SEQ ID NO: 2622661 - RNA, 17 nt, Human
ggcugcugaaggcucga

SEQ ID NO: 2622662 - RNA, 15 nt, Human
ggcugcugaaggcuc

SEQ ID NO: 2622663 - RNA, 18 nt, Human
ggcugcugaaggcucgag

SEQ ID NO: 2622664 - RNA, 16 nt, Human
ggcugcugaccuccac

SEQ ID NO: 2622665 - RNA, 21 nt, Human
ggcugcugaccuccacagcuu

SEQ ID NO: 2622666 - RNA, 22 nt, Human
ggcugcuucaaggauccugagc

SEQ ID NO: 2622667 - RNA, 14 nt, Human
ggcugcuucaagga

SEQ ID NO: 2622668 - RNA, 12 nt, Human
ggcugcuucaag

SEQ ID NO: 2622669 - RNA, 11 nt, Human
ggcugcuucaa

SEQ ID NO: 2622670 - RNA, 17 nt, Human
ggcugcugcccccaccc

SEQ ID NO: 2622671 - RNA, 13 nt, Human
ggcugcugccccc

SEQ ID NO: 2622672 - RNA, 14 nt, Human
ggcugcugcccagg

SEQ ID NO: 2622673 - RNA, 12 nt, Human
ggcugcugccca

SEQ ID NO: 2622674 - RNA, 11 nt, Human
ggcugcugccc

SEQ ID NO: 2622675 - RNA, 10 nt, Human
ggcugcugcc

SEQ ID NO: 2622676 - RNA, 18 nt, Human
ggcugcugcccccacccc

SEQ ID NO: 2622677 - RNA, 19 nt, Human
ggcugcuggcgccucugca

SEQ ID NO: 2622678 - RNA, 18 nt, Human
ggcugcuggcgccucugc

SEQ ID NO: 2622679 - RNA, 14 nt, Human
ggcugcuggcgccu

SEQ ID NO: 2622680 - RNA, 15 nt, Human
ggcugcugugugccu

SEQ ID NO: 2622681 - RNA, 12 nt, Human
ggcugcuggagg

SEQ ID NO: 2622682 - RNA, 13 nt, Human
ggcugcuggagga

SEQ ID NO: 2622683 - RNA, 14 nt, Human
ggcugcuggaggaa

SEQ ID NO: 2622684 - RNA, 15 nt, Human
ggcugcuggaggaaa

SEQ ID NO: 2622685 - RNA, 13 nt, Human
ggcugcuggccug

SEQ ID NO: 2622686 - RNA, 16 nt, Human
ggcugcuggaggaaaa

SEQ ID NO: 2622687 - RNA, 18 nt, Human
ggcugcuuccuccuggaa

SEQ ID NO: 2622688 - RNA, 17 nt, Human
ggcugcuuccuccugga

SEQ ID NO: 2622689 - RNA, 16 nt, Human
ggcugcuuccuccugg

SEQ ID NO: 2622690 - RNA, 15 nt, Human
ggcugcuuccuccug

SEQ ID NO: 2622691 - RNA, 22 nt, Human
ggcuggaacagauucacacugu

SEQ ID NO: 2622692 - RNA, 14 nt, Human
ggcugcuuggccuu

SEQ ID NO: 2622693 - RNA, 19 nt, Human
ggcugcuuccuccuggaaa

SEQ ID NO: 2622694 - RNA, 15 nt, Human
ggcugcuuuccaaag

SEQ ID NO: 2622695 - RNA, 13 nt, Human
ggcugcuuccucc

SEQ ID NO: 2622696 - RNA, 17 nt, Human
ggcugcugugugccuuc

SEQ ID NO: 2622697 - RNA, 14 nt, Human
ggcugcuuagaauc

SEQ ID NO: 2622698 - RNA, 23 nt, Human
ggcugcuucaaggauccugagcc

SEQ ID NO: 2622699 - RNA, 16 nt, Human
ggcuggaccuaugucc

SEQ ID NO: 2622700 - RNA, 20 nt, Human
ggcuggaaucuggagagcua

SEQ ID NO: 2622701 - RNA, 19 nt, Human
ggcugggagagccuuccag

SEQ ID NO: 2622702 - RNA, 22 nt, Human
ggcuggaagauccugcgggugg

SEQ ID NO: 2622703 - RNA, 15 nt, Human
ggcuggaagauccug

SEQ ID NO: 2622704 - RNA, 23 nt, Human
ggcuggaacagauucacacuguc

SEQ ID NO: 2622705 - RNA, 19 nt, Human
ggcuggaaucuggagagcu

SEQ ID NO: 2622706 - RNA, 18 nt, Human
ggcuggaaucuggagagc

SEQ ID NO: 2622707 - RNA, 16 nt, Human
ggcuggaaucuggaga

SEQ ID NO: 2622708 - RNA, 14 nt, Human
ggcuggaaucugga

SEQ ID NO: 2622709 - RNA, 19 nt, Human
ggcuggaagauccugcggg

SEQ ID NO: 2622710 - RNA, 13 nt, Human
ggcuggaaucugg

SEQ ID NO: 2622711 - RNA, 23 nt, Human
ggcugggagagccuuccaggggu

SEQ ID NO: 2622712 - RNA, 20 nt, Human
ggcugggagagccuuccagg

SEQ ID NO: 2622713 - RNA, 14 nt, Human
ggcugggcagagga

SEQ ID NO: 2622714 - RNA, 13 nt, Human
ggcugggcagagg

SEQ ID NO: 2622715 - RNA, 19 nt, Human
ggcugggcagaggaaagca

SEQ ID NO: 2622716 - RNA, 15 nt, Human
ggcugggcagaggaa

SEQ ID NO: 2622717 - RNA, 18 nt, Human
ggcugggagagccuucca

SEQ ID NO: 2622718 - RNA, 22 nt, Human
ggcuggaccuauguccuaagga

SEQ ID NO: 2622719 - RNA, 12 nt, Human
ggcugggcagcu

SEQ ID NO: 2622720 - RNA, 15 nt, Human
ggcuggacguggugg

SEQ ID NO: 2622721 - RNA, 13 nt, Human
ggcugggcagcua

SEQ ID NO: 2622722 - RNA, 14 nt, Human
ggcugggcagcugu

SEQ ID NO: 2622723 - RNA, 13 nt, Human
ggcugggcagcug

SEQ ID NO: 2622724 - RNA, 13 nt, Human
ggcugagguggga

SEQ ID NO: 2622725 - RNA, 15 nt, Human
ggcugaggugggagg

SEQ ID NO: 2622726 - RNA, 19 nt, Human
ggcugagcggaugcaucug

SEQ ID NO: 2622727 - RNA, 22 nt, Human
ggcugagccccuaccccacacc

SEQ ID NO: 2622728 - RNA, 15 nt, Human
ggcugagcucucugu

SEQ ID NO: 2622729 - RNA, 16 nt, Human
ggcugagggagccugg

SEQ ID NO: 2622730 - RNA, 23 nt, Human
ggcugagggauggacugaugcuu

SEQ ID NO: 2622731 - RNA, 22 nt, Human
ggcugagggauggacugaugcu

SEQ ID NO: 2622732 - RNA, 15 nt, Human
ggcugagccuggcug

SEQ ID NO: 2622733 - RNA, 15 nt, Human
ggcugagcccuggca

SEQ ID NO: 2622734 - RNA, 16 nt, Human
ggcugagcccuggcag

SEQ ID NO: 2622735 - RNA, 18 nt, Human
ggcugagccccuacccca

SEQ ID NO: 2622736 - RNA, 16 nt, Human
ggcugagccccuaccc

SEQ ID NO: 2622737 - RNA, 12 nt, Human
ggcugagcccug

SEQ ID NO: 2622738 - RNA, 13 nt, Human
ggcugagcccugg

SEQ ID NO: 2622739 - RNA, 14 nt, Human
ggcugagcccuggc

SEQ ID NO: 2622740 - RNA, 19 nt, Human
ggcugagagccccagcuga

SEQ ID NO: 2622741 - RNA, 18 nt, Human
ggcugagagccccagcug

SEQ ID NO: 2622742 - RNA, 17 nt, Human
ggcugagagccccagcu

SEQ ID NO: 2622743 - RNA, 16 nt, Human
ggcugagagccccagc

SEQ ID NO: 2622744 - RNA, 13 nt, Human
ggcugagccccua

SEQ ID NO: 2622745 - RNA, 20 nt, Human
ggcugagagccccagcugac

SEQ ID NO: 2622746 - RNA, 15 nt, Human
ggcugagauaugaac

SEQ ID NO: 2622747 - RNA, 12 nt, Human
ggcugagacugg

SEQ ID NO: 2622748 - RNA, 15 nt, Human
ggcucuggagagaaa

SEQ ID NO: 2622749 - RNA, 13 nt, Human
ggcugagacugga

SEQ ID NO: 2622750 - RNA, 14 nt, Human
ggcugagagcccca

SEQ ID NO: 2622751 - RNA, 17 nt, Human
ggcugagagaguggcau

SEQ ID NO: 2622752 - RNA, 15 nt, Human
ggcugagagaguggc

SEQ ID NO: 2622753 - RNA, 21 nt, Human
ggcugagacuggauacugccc

SEQ ID NO: 2622754 - RNA, 14 nt, Human
ggcucuggagagaa

SEQ ID NO: 2622755 - RNA, 21 nt, Human
ggcucuggagacagccccaga

SEQ ID NO: 2622756 - RNA, 19 nt, Human
ggcucuggagacagcccca

SEQ ID NO: 2622757 - RNA, 17 nt, Human
ggcucuggagacagccc

SEQ ID NO: 2622758 - RNA, 16 nt, Human
ggcucuggagacagcc

SEQ ID NO: 2622759 - RNA, 15 nt, Human
ggcucuggagacagc

SEQ ID NO: 2622760 - RNA, 12 nt, Human
ggcucuggagac

SEQ ID NO: 2622761 - RNA, 17 nt, Human
ggccccugcauccccuu

SEQ ID NO: 2622762 - RNA, 19 nt, Human
ggcucugcuggccggagca

SEQ ID NO: 2622763 - RNA, 20 nt, Human
ggccccugccagacccccug

SEQ ID NO: 2622764 - RNA, 14 nt, Human
ggcucuggagccca

SEQ ID NO: 2622765 - RNA, 13 nt, Human
ggcucuggagccc

SEQ ID NO: 2622766 - RNA, 17 nt, Human
ggccccugcccggcugc

SEQ ID NO: 2622767 - RNA, 16 nt, Human
ggccccugcccggcug

SEQ ID NO: 2622768 - RNA, 17 nt, Human
ggcucugccucccauca

SEQ ID NO: 2622769 - RNA, 20 nt, Human
ggccccugcccggcugcgga

SEQ ID NO: 2622770 - RNA, 18 nt, Human
ggcugcagaggccagagg

SEQ ID NO: 2622771 - RNA, 16 nt, Human
ggcugcagaggccaga

SEQ ID NO: 2622772 - RNA, 21 nt, Human
ggcugcacucugugcccaugg

SEQ ID NO: 2622773 - RNA, 20 nt, Human
ggcugcacucugugcccaug

SEQ ID NO: 2622774 - RNA, 13 nt, Human
ggcugcagaggcc

SEQ ID NO: 2622775 - RNA, 19 nt, Human
ggcugcacucugugcccau

SEQ ID NO: 2622776 - RNA, 18 nt, Human
ggcugcacucugugccca

SEQ ID NO: 2622777 - RNA, 17 nt, Human
ggcugcacucugugccc

SEQ ID NO: 2622778 - RNA, 16 nt, Human
ggcugcacucugugcc

SEQ ID NO: 2622779 - RNA, 15 nt, Human
ggcugcacucugugc

SEQ ID NO: 2622780 - RNA, 22 nt, Human
ggcugcaagguuuaggcuggug

SEQ ID NO: 2622781 - RNA, 20 nt, Human
ggcugcagcagcgguggccu

SEQ ID NO: 2622782 - RNA, 13 nt, Human
ggcugcagcagcg

SEQ ID NO: 2622783 - RNA, 19 nt, Human
ggcugcagaggccagaggc

SEQ ID NO: 2622784 - RNA, 16 nt, Human
ggcugcagccaggcca

SEQ ID NO: 2622785 - RNA, 12 nt, Human
ggcugcagcaug

SEQ ID NO: 2622786 - RNA, 22 nt, Human
ggcugcagcagcgguggccucu

SEQ ID NO: 2622787 - RNA, 21 nt, Human
ggcugcagcauguugcugagg

SEQ ID NO: 2622788 - RNA, 22 nt, Human
ggcugcagccaggccacuggcc

SEQ ID NO: 2622789 - RNA, 19 nt, Human
ggcugcaccggcuggccug

SEQ ID NO: 2622790 - RNA, 18 nt, Human
ggcugcaccggcuggccu

SEQ ID NO: 2622791 - RNA, 17 nt, Human
ggcugcaccggcuggcc

SEQ ID NO: 2622792 - RNA, 24 nt, Human
ggcugcaaaggguaucaggugcug

SEQ ID NO: 2622793 - RNA, 24 nt, Human
ggcugaugucaauuucuguguugc

SEQ ID NO: 2622794 - RNA, 22 nt, Human
ggcugaugucaauuucuguguu

SEQ ID NO: 2622795 - RNA, 18 nt, Human
ggcugaugucaauuucug

SEQ ID NO: 2622796 - RNA, 22 nt, Human
ggcugaugccaaguuguuugag

SEQ ID NO: 2622797 - RNA, 18 nt, Human
ggcugcaaaggguaucag

SEQ ID NO: 2622798 - RNA, 23 nt, Human
ggcugcaaaggguaucaggugcu

SEQ ID NO: 2622799 - RNA, 22 nt, Human
ggcugcaaaggguaucaggugc

SEQ ID NO: 2622800 - RNA, 22 nt, Human
ggcugagguuccucugccugcc

SEQ ID NO: 2622801 - RNA, 21 nt, Human
ggcugagguuccucugccugc

SEQ ID NO: 2622802 - RNA, 20 nt, Human
ggcugagguuccucugccug

SEQ ID NO: 2622803 - RNA, 19 nt, Human
ggcugagguuccucugccu

SEQ ID NO: 2622804 - RNA, 18 nt, Human
ggcugagguuccucugcc

SEQ ID NO: 2622805 - RNA, 17 nt, Human
ggcugagguuccucugc

SEQ ID NO: 2622806 - RNA, 16 nt, Human
ggcugagguuccucug

SEQ ID NO: 2622807 - RNA, 14 nt, Human
ggcugagguuccuc

SEQ ID NO: 2622808 - RNA, 23 nt, Human
ggcugagguuccucugccugccc

SEQ ID NO: 2622809 - RNA, 22 nt, Human
ggcugagucaugaucucccugc

SEQ ID NO: 2622810 - RNA, 23 nt, Human
ggcugagucaugaucucccugcc

SEQ ID NO: 2622811 - RNA, 21 nt, Human
ggcugaugccaaguuguuuga

SEQ ID NO: 2622812 - RNA, 19 nt, Human
ggcugauaauuccaguggu

SEQ ID NO: 2622813 - RNA, 15 nt, Human
ggcugauggaguaaa

SEQ ID NO: 2622814 - RNA, 21 nt, Human
gcuugcaguagauuuucuuua

SEQ ID NO: 2622815 - RNA, 22 nt, Human
gcuugcacuuuguaacauguuu

SEQ ID NO: 2622816 - RNA, 19 nt, Human
gcuugcacuuuguaacaug

SEQ ID NO: 2622817 - RNA, 19 nt, Human
gcuugcagugagccgagau

SEQ ID NO: 2622818 - RNA, 23 nt, Human
gcuugcauaauaagcuaaagagg

SEQ ID NO: 2622819 - RNA, 14 nt, Human
gcuugccacagagc

SEQ ID NO: 2622820 - RNA, 15 nt, Human
gcuugcauaauaagc

SEQ ID NO: 2622821 - RNA, 22 nt, Human
gcuugcagagaugaggccgcca

SEQ ID NO: 2622822 - RNA, 14 nt, Human
gcuugauuuuugcc

SEQ ID NO: 2622823 - RNA, 23 nt, Human
gcuugcaaguauguuuuagcaug

SEQ ID NO: 2622824 - RNA, 14 nt, Human
gcuugauucugcag

SEQ ID NO: 2622825 - RNA, 19 nt, Human
gcuugaguuuggggaaugc

SEQ ID NO: 2622826 - RNA, 19 nt, Human
gcuucugguacucuccuag

SEQ ID NO: 2622827 - RNA, 18 nt, Human
gcuucugguacucuccua

SEQ ID NO: 2622828 - RNA, 17 nt, Human
gcuucugguacucuccu

SEQ ID NO: 2622829 - RNA, 23 nt, Human
gcuucugucuuauuugaaggcca

SEQ ID NO: 2622830 - RNA, 19 nt, Human
gcuucuggugaccuuccaa

SEQ ID NO: 2622831 - RNA, 16 nt, Human
gcuucuguugcugccu

SEQ ID NO: 2622832 - RNA, 22 nt, Human
gcuugaggguugggcugguguc

SEQ ID NO: 2622833 - RNA, 18 nt, Human
gcuugcccuguuaaaaga

SEQ ID NO: 2622834 - RNA, 13 nt, Human
gcuuggaggaagg

SEQ ID NO: 2622835 - RNA, 15 nt, Human
gcuuggaggaaggaa

SEQ ID NO: 2622836 - RNA, 14 nt, Human
gcuuggaggaagga

SEQ ID NO: 2622837 - RNA, 17 nt, Human
gcuugcccuggugccuc

SEQ ID NO: 2622838 - RNA, 19 nt, Human
gcuugcccuggugccucac

SEQ ID NO: 2622839 - RNA, 14 nt, Human
gcuugccccggccc

SEQ ID NO: 2622840 - RNA, 12 nt, Human
gcuugccccggc

SEQ ID NO: 2622841 - RNA, 16 nt, Human
gcuugccacagagcgg

SEQ ID NO: 2622842 - RNA, 15 nt, Human
gcuugccacagcucu

SEQ ID NO: 2622843 - RNA, 18 nt, Human
gcuucuaucccaggaggu

SEQ ID NO: 2622844 - RNA, 14 nt, Human
gcuucuaucccagg

SEQ ID NO: 2622845 - RNA, 20 nt, Human
gcuucuaucccaggaggugg

SEQ ID NO: 2622846 - RNA, 16 nt, Human
gcuucuauuagccagu

SEQ ID NO: 2622847 - RNA, 23 nt, Human
gcuucuccgccagccuccucugg

SEQ ID NO: 2622848 - RNA, 14 nt, Human
gcuucuccugaccc

SEQ ID NO: 2622849 - RNA, 24 nt, Human
gcuucuccgccagccuccucugga

SEQ ID NO: 2622850 - RNA, 12 nt, Human
gcuucuccugac

SEQ ID NO: 2622851 - RNA, 12 nt, Human
gcuucucucuca

SEQ ID NO: 2622852 - RNA, 15 nt, Human
gcuucuccuguguga

SEQ ID NO: 2622853 - RNA, 14 nt, Human
gcuucucuacagac

SEQ ID NO: 2622854 - RNA, 12 nt, Human
gcuucuauccca

SEQ ID NO: 2622855 - RNA, 20 nt, Human
gcuguucacccacagggcua

SEQ ID NO: 2622856 - RNA, 20 nt, Human
gcuucucugacuucugccug

SEQ ID NO: 2622857 - RNA, 18 nt, Human
gcuucucugacuucugcc

SEQ ID NO: 2622858 - RNA, 17 nt, Human
gcuucucugacuucugc

SEQ ID NO: 2622859 - RNA, 14 nt, Human
gcuucucugacuuc

SEQ ID NO: 2622860 - RNA, 14 nt, Human
gcuucucucucacc

SEQ ID NO: 2622861 - RNA, 13 nt, Human
gcuucucucucac

SEQ ID NO: 2622862 - RNA, 14 nt, Human
gcuucucucugugg

SEQ ID NO: 2622863 - RNA, 13 nt, Human
gcuucucugacuu

SEQ ID NO: 2622864 - RNA, 16 nt, Human
gcuucucucuguggga

SEQ ID NO: 2622865 - RNA, 22 nt, Human
gcuucucugacuucugccugga

SEQ ID NO: 2622866 - RNA, 21 nt, Human
gcuucucugacuucugccugg

SEQ ID NO: 2622867 - RNA, 16 nt, Human
gcuucucucucaccag

SEQ ID NO: 2622868 - RNA, 16 nt, Human
gcuucugguacucucc

SEQ ID NO: 2622869 - RNA, 15 nt, Human
gcuucugguacucuc

SEQ ID NO: 2622870 - RNA, 15 nt, Human
gcuguucacagccag

SEQ ID NO: 2622871 - RNA, 16 nt, Human
gcuguucacagccaga

SEQ ID NO: 2622872 - RNA, 23 nt, Human
gcuguucacagccagacuggcac

SEQ ID NO: 2622873 - RNA, 18 nt, Human
gcuuccagugaggcucug

SEQ ID NO: 2622874 - RNA, 20 nt, Human
gcuuccagugaggcucugcc

SEQ ID NO: 2622875 - RNA, 19 nt, Human
gcuuccagugaggcucugc

SEQ ID NO: 2622876 - RNA, 21 nt, Human
gcuuccagugaggcucugccc

SEQ ID NO: 2622877 - RNA, 23 nt, Human
gcuguguccuugcaccugcaucc

SEQ ID NO: 2622878 - RNA, 22 nt, Human
gcuguucacccacagggcuaag

SEQ ID NO: 2622879 - RNA, 13 nt, Human
ggaaaaauagccu

SEQ ID NO: 2622880 - RNA, 17 nt, Human
ggaaaaagcacaagaag

SEQ ID NO: 2622881 - RNA, 16 nt, Human
ggaaaaagcacaagaa

SEQ ID NO: 2622882 - RNA, 14 nt, Human
ggaaaaacugauuu

SEQ ID NO: 2622883 - RNA, 13 nt, Human
ggaaaaacacaag

SEQ ID NO: 2622884 - RNA, 21 nt, Human
ggaaaaacaucugaaagccac

SEQ ID NO: 2622885 - RNA, 19 nt, Human
ggaaaaaccacccccaaau

SEQ ID NO: 2622886 - RNA, 22 nt, Human
ggaaaaccaagccguggcuucc

SEQ ID NO: 2622887 - RNA, 15 nt, Human
ggaaaaauagccugc

SEQ ID NO: 2622888 - RNA, 16 nt, Human
ggaaaacugacagagg

SEQ ID NO: 2622889 - RNA, 21 nt, Human
ggaaaacugagacucagacag

SEQ ID NO: 2622890 - RNA, 11 nt, Human
ggaaaaauauu

SEQ ID NO: 2622891 - RNA, 21 nt, Human
ggaaaaccaagccguggcuuc

SEQ ID NO: 2622892 - RNA, 15 nt, Human
gcuuuuaccaugccc

SEQ ID NO: 2622893 - RNA, 20 nt, Human
gcuuuuaccaugccccugag

SEQ ID NO: 2622894 - RNA, 17 nt, Human
gcuuuuaaaaaaaaaua

SEQ ID NO: 2622895 - RNA, 16 nt, Human
gcuuugggcugcccug

SEQ ID NO: 2622896 - RNA, 15 nt, Human
gcuuugggcugcccu

SEQ ID NO: 2622897 - RNA, 20 nt, Human
ggaaaaaauaacaaugaaag

SEQ ID NO: 2622898 - RNA, 14 nt, Human
gcuuuuacuuaaac

SEQ ID NO: 2622899 - RNA, 19 nt, Human
ggaaaaaauguuggauuua

SEQ ID NO: 2622900 - RNA, 21 nt, Human
gcuuuuacugaagccuuucuu

SEQ ID NO: 2622901 - RNA, 13 nt, Human
gcuuggcagccga

SEQ ID NO: 2622902 - RNA, 14 nt, Human
gcuuggcacaugac

SEQ ID NO: 2622903 - RNA, 16 nt, Human
gcuuggagcagagggg

SEQ ID NO: 2622904 - RNA, 18 nt, Human
gcuuggagcagaggggcu

SEQ ID NO: 2622905 - RNA, 13 nt, Human
gcuuggccagaag

SEQ ID NO: 2622906 - RNA, 13 nt, Human
gcuuggcagcuga

SEQ ID NO: 2622907 - RNA, 18 nt, Human
gcuuggccagaagggggc

SEQ ID NO: 2622908 - RNA, 20 nt, Human
gcuuuaauaucaucaguauu

SEQ ID NO: 2622909 - RNA, 22 nt, Human
gcuuuaauaucaucaguauuga

SEQ ID NO: 2622910 - RNA, 23 nt, Human
gcuuuaauaucaucaguauugaa

SEQ ID NO: 2622911 - RNA, 13 nt, Human
gcuuggccugcug

SEQ ID NO: 2622912 - RNA, 12 nt, Human
gcuuuacaugca

SEQ ID NO: 2622913 - RNA, 19 nt, Human
gcuuuauccucuuuagagu

SEQ ID NO: 2622914 - RNA, 17 nt, Human
gcuuuauccucuuuaga

SEQ ID NO: 2622915 - RNA, 16 nt, Human
gcuuuauccucuuuag

SEQ ID NO: 2622916 - RNA, 15 nt, Human
gcuuuauccucuuua

SEQ ID NO: 2622917 - RNA, 20 nt, Human
gcuuuauccucuuuagaguu

SEQ ID NO: 2622918 - RNA, 21 nt, Human
gcuuuaauuuuuuuaaccaaa

SEQ ID NO: 2622919 - RNA, 20 nt, Human
gcuuuauggguguuaauuga

SEQ ID NO: 2622920 - RNA, 17 nt, Human
gcuuuauuccagaaugc

SEQ ID NO: 2622921 - RNA, 13 nt, Human
gcuuuaugcugaa

SEQ ID NO: 2622922 - RNA, 14 nt, Human
gcuuuaugcugaaa

SEQ ID NO: 2622923 - RNA, 15 nt, Human
gcuuuauguaauaau

SEQ ID NO: 2622924 - RNA, 22 nt, Human
gcuuuauucuucagauacaaac

SEQ ID NO: 2622925 - RNA, 13 nt, Human
gcuuuauucuuca

SEQ ID NO: 2622926 - RNA, 13 nt, Human
gcuuuauuuuuua

SEQ ID NO: 2622927 - RNA, 17 nt, Human
gcuuuauuuuuuaagua

SEQ ID NO: 2622928 - RNA, 22 nt, Human
gcuuuggaccuaaauggccuca

SEQ ID NO: 2622929 - RNA, 17 nt, Human
gcuuuggaccuaaucca

SEQ ID NO: 2622930 - RNA, 17 nt, Human
gcuuuggauuugacauu

SEQ ID NO: 2622931 - RNA, 14 nt, Human
gcuuugggcugccc

SEQ ID NO: 2622932 - RNA, 13 nt, Human
gcuuuggcuucuu

SEQ ID NO: 2622933 - RNA, 22 nt, Human
gcuuugggaauguuuuuagcug

SEQ ID NO: 2622934 - RNA, 15 nt, Human
ggaaauauuuauuuu

SEQ ID NO: 2622935 - RNA, 13 nt, Human
ggaaauauuuauu

SEQ ID NO: 2622936 - RNA, 12 nt, Human
ggaaauauuuau

SEQ ID NO: 2622937 - RNA, 16 nt, Human
ggaaaguguaaagcau

SEQ ID NO: 2622938 - RNA, 15 nt, Human
ggaaaguguaaagca

SEQ ID NO: 2622939 - RNA, 14 nt, Human
ggaaaguguaaagc

SEQ ID NO: 2622940 - RNA, 13 nt, Human
ggaaaguguaaag

SEQ ID NO: 2622941 - RNA, 18 nt, Human
ggaaauauuuauuuuaau

SEQ ID NO: 2622942 - RNA, 17 nt, Human
ggaaauauuuauuuuaa

SEQ ID NO: 2622943 - RNA, 20 nt, Human
ggaaauauuuagcaaauaau

SEQ ID NO: 2622944 - RNA, 17 nt, Human
ggaaauauuuagcaaau

SEQ ID NO: 2622945 - RNA, 17 nt, Human
ggaaaguguaaagcauu

SEQ ID NO: 2622946 - RNA, 17 nt, Human
ggaaauauugcuggggu

SEQ ID NO: 2622947 - RNA, 17 nt, Human
ggaacagacuggaagca

SEQ ID NO: 2622948 - RNA, 21 nt, Human
ggaaaagagauggccugagaa

SEQ ID NO: 2622949 - RNA, 14 nt, Human
ggaaaagaauacag

SEQ ID NO: 2622950 - RNA, 18 nt, Human
ggaaaagaauacagaaag

SEQ ID NO: 2622951 - RNA, 22 nt, Human
ggaaaagagcgcaucaggccug

SEQ ID NO: 2622952 - RNA, 22 nt, Human
ggaaaauaccccaucauucaug

SEQ ID NO: 2622953 - RNA, 13 nt, Human
ggaaaauacccca

SEQ ID NO: 2622954 - RNA, 14 nt, Human
ggaaaauaaauuau

SEQ ID NO: 2622955 - RNA, 16 nt, Human
ggaaagucauuggcuu

SEQ ID NO: 2622956 - RNA, 21 nt, Human
ggaaagucauuggcuuuaucc

SEQ ID NO: 2622957 - RNA, 13 nt, Human
ggaaagugaauuu

SEQ ID NO: 2622958 - RNA, 14 nt, Human
ggaaagugaauuug

SEQ ID NO: 2622959 - RNA, 18 nt, Human
ggaaagugaauuugaaug

SEQ ID NO: 2622960 - RNA, 19 nt, Human
ggaaagugaauuugaauga

SEQ ID NO: 2622961 - RNA, 22 nt, Human
ggaaagugaauuugaaugaaaa

SEQ ID NO: 2622962 - RNA, 15 nt, Human
ggaaaaucagccugc

SEQ ID NO: 2622963 - RNA, 20 nt, Human
ggaaagggugcugcuucccu

SEQ ID NO: 2622964 - RNA, 15 nt, Human
ggaaagggugcugcu

SEQ ID NO: 2622965 - RNA, 22 nt, Human
ggaaagggggucccagugggag

SEQ ID NO: 2622966 - RNA, 20 nt, Human
ggaaaggggucggcugacca

SEQ ID NO: 2622967 - RNA, 21 nt, Human
ggaaccucacucuugccaacc

SEQ ID NO: 2622968 - RNA, 16 nt, Human
ggaacgugacugcccc

SEQ ID NO: 2622969 - RNA, 23 nt, Human
ggaacuagacucccaagcuggac

SEQ ID NO: 2622970 - RNA, 17 nt, Human
ggaacgugacugcccca

SEQ ID NO: 2622971 - RNA, 21 nt, Human
ggaacuagagggauacacuga

SEQ ID NO: 2622972 - RNA, 17 nt, Human
ggaacucaccuggggcu

SEQ ID NO: 2622973 - RNA, 22 nt, Human
ggaacuagagggauacacugaa

SEQ ID NO: 2622974 - RNA, 13 nt, Human
ggaacucagaucc

SEQ ID NO: 2622975 - RNA, 15 nt, Human
ggaacucagauccag

SEQ ID NO: 2622976 - RNA, 16 nt, Human
ggaacucagauccagg

SEQ ID NO: 2622977 - RNA, 17 nt, Human
ggaacucagauccaggg

SEQ ID NO: 2622978 - RNA, 19 nt, Human
ggaacucagauccagggac

SEQ ID NO: 2622979 - RNA, 20 nt, Human
ggaacucagauccagggaca

SEQ ID NO: 2622980 - RNA, 21 nt, Human
ggaacucauuccugccugucu

SEQ ID NO: 2622981 - RNA, 11 nt, Human
ggaacucccag

SEQ ID NO: 2622982 - RNA, 14 nt, Human
ggaaccucagccug

SEQ ID NO: 2622983 - RNA, 15 nt, Human
ggaaccucagccugg

SEQ ID NO: 2622984 - RNA, 16 nt, Human
ggaaccucagccuggc

SEQ ID NO: 2622985 - RNA, 19 nt, Human
ggaaccucagccuggccag

SEQ ID NO: 2622986 - RNA, 20 nt, Human
ggaaccucagccuggccaga

SEQ ID NO: 2622987 - RNA, 21 nt, Human
ggaaccucagccuggccagac

SEQ ID NO: 2622988 - RNA, 23 nt, Human
ggaaccucagccuggccagacac

SEQ ID NO: 2622989 - RNA, 22 nt, Human
ggaaccucagccuggccagaca

SEQ ID NO: 2622990 - RNA, 18 nt, Human
ggaacgggguccuucaag

SEQ ID NO: 2622991 - RNA, 20 nt, Human
ggaacgguaaauuucugugg

SEQ ID NO: 2622992 - RNA, 20 nt, Human
ggaacagacuggaagcacag

SEQ ID NO: 2622993 - RNA, 19 nt, Human
ggaacagacuggaagcaca

SEQ ID NO: 2622994 - RNA, 16 nt, Human
ggaaaucaaauaugca

SEQ ID NO: 2622995 - RNA, 19 nt, Human
ggaacagcuaugggagccc

SEQ ID NO: 2622996 - RNA, 21 nt, Human
ggaaccccggggugcccacag

SEQ ID NO: 2622997 - RNA, 20 nt, Human
ggaacagcuaugggagcccc

SEQ ID NO: 2622998 - RNA, 24 nt, Human
ggaacccuuacaguaggagcccag

SEQ ID NO: 2622999 - RNA, 12 nt, Human
ggaaccucagcc

SEQ ID NO: 2623000 - RNA, 13 nt, Human
ggaaccucagccu

SEQ ID NO: 2623001 - RNA, 18 nt, Human
ggaaccucacucuugcca

SEQ ID NO: 2623002 - RNA, 12 nt, Human
ggaaccucacuc

SEQ ID NO: 2623003 - RNA, 17 nt, Human
ggaaccgcaggaagcug

SEQ ID NO: 2623004 - RNA, 15 nt, Human
ggaaccgcaggaagc

SEQ ID NO: 2623005 - RNA, 16 nt, Human
ggaaccgcaggaagcu

SEQ ID NO: 2623006 - RNA, 18 nt, Human
ggaaccgcaggaagcugc

SEQ ID NO: 2623007 - RNA, 18 nt, Human
ggaagcagaauaaagcaa

SEQ ID NO: 2623008 - RNA, 17 nt, Human
ggaagcagaauaaagca

SEQ ID NO: 2623009 - RNA, 16 nt, Human
ggaagcagaauaaagc

SEQ ID NO: 2623010 - RNA, 15 nt, Human
ggaagcagaauaaag

SEQ ID NO: 2623011 - RNA, 14 nt, Human
ggaagcagaauaaa

SEQ ID NO: 2623012 - RNA, 13 nt, Human
ggaagcagaauaa

SEQ ID NO: 2623013 - RNA, 12 nt, Human
ggaagcagaaua

SEQ ID NO: 2623014 - RNA, 23 nt, Human
ggaagcacauguuuauuuauucu

SEQ ID NO: 2623015 - RNA, 22 nt, Human
ggaagcagaauaaagcaauuuu

SEQ ID NO: 2623016 - RNA, 21 nt, Human
ggaagcagaauaaagcaauuu

SEQ ID NO: 2623017 - RNA, 20 nt, Human
ggaagcagaauaaagcaauu

SEQ ID NO: 2623018 - RNA, 19 nt, Human
ggaagcagaauaaagcaau

SEQ ID NO: 2623019 - RNA, 22 nt, Human
ggaagcagauacauaugagugu

SEQ ID NO: 2623020 - RNA, 19 nt, Human
ggaagcagugccuuccaua

SEQ ID NO: 2623021 - RNA, 20 nt, Human
ggaagcagugccuuccauaa

SEQ ID NO: 2623022 - RNA, 21 nt, Human
ggaagcagugccuuccauaau

SEQ ID NO: 2623023 - RNA, 12 nt, Human
ggaagcagugcc

SEQ ID NO: 2623024 - RNA, 13 nt, Human
ggaagcagcuuuc

SEQ ID NO: 2623025 - RNA, 11 nt, Human
ggaagcagugc

SEQ ID NO: 2623026 - RNA, 22 nt, Human
ggaagcacaugccucucucagg

SEQ ID NO: 2623027 - RNA, 21 nt, Human
ggaagcacaugccucucucag

SEQ ID NO: 2623028 - RNA, 23 nt, Human
ggaagcacaugccucucucaggc

SEQ ID NO: 2623029 - RNA, 22 nt, Human
ggaagcaccccaugccaaagcu

SEQ ID NO: 2623030 - RNA, 13 nt, Human
ggaagcaccccau

SEQ ID NO: 2623031 - RNA, 15 nt, Human
ggaagcaccccaugc

SEQ ID NO: 2623032 - RNA, 18 nt, Human
ggaagccagcaggcucuc

SEQ ID NO: 2623033 - RNA, 17 nt, Human
ggaagccagcaggcucu

SEQ ID NO: 2623034 - RNA, 16 nt, Human
ggaagccagcaggcuc

SEQ ID NO: 2623035 - RNA, 15 nt, Human
ggaagccagcaggcu

SEQ ID NO: 2623036 - RNA, 14 nt, Human
ggaagccagcaggc

SEQ ID NO: 2623037 - RNA, 13 nt, Human
ggaagccagcagg

SEQ ID NO: 2623038 - RNA, 22 nt, Human
ggaagccaaaauguaggcuuag

SEQ ID NO: 2623039 - RNA, 22 nt, Human
ggaagccaaaccucugugagca

SEQ ID NO: 2623040 - RNA, 18 nt, Human
ggaagccaacuuggcuuu

SEQ ID NO: 2623041 - RNA, 14 nt, Human
ggaagccaaagagu

SEQ ID NO: 2623042 - RNA, 18 nt, Human
ggaagcauucagagagca

SEQ ID NO: 2623043 - RNA, 16 nt, Human
ggaagcauucagagag

SEQ ID NO: 2623044 - RNA, 20 nt, Human
ggaagcauucagagagcagc

SEQ ID NO: 2623045 - RNA, 20 nt, Human
ggaagcauauuguuauuaua

SEQ ID NO: 2623046 - RNA, 17 nt, Human
ggaagcauguaggagaa

SEQ ID NO: 2623047 - RNA, 20 nt, Human
ggaagcauguaggagaaucc

SEQ ID NO: 2623048 - RNA, 21 nt, Human
ggaagcauguaggagaaucca

SEQ ID NO: 2623049 - RNA, 14 nt, Human
ggaagaggggacag

SEQ ID NO: 2623050 - RNA, 15 nt, Human
ggaagaguguacugg

SEQ ID NO: 2623051 - RNA, 16 nt, Human
ggaagaguguacuggg

SEQ ID NO: 2623052 - RNA, 20 nt, Human
ggaagaggggacaggucccu

SEQ ID NO: 2623053 - RNA, 19 nt, Human
ggaagaguguacugggggu

SEQ ID NO: 2623054 - RNA, 18 nt, Human
ggaagauaggcucugcac

SEQ ID NO: 2623055 - RNA, 17 nt, Human
ggaagauaggcucugca

SEQ ID NO: 2623056 - RNA, 21 nt, Human
ggaagauaggcucugcacaga

SEQ ID NO: 2623057 - RNA, 15 nt, Human
ggaagagggacagau

SEQ ID NO: 2623058 - RNA, 13 nt, Human
ggaagagccuugc

SEQ ID NO: 2623059 - RNA, 17 nt, Human
ggaagagcacagcccuc

SEQ ID NO: 2623060 - RNA, 16 nt, Human
ggaagagcacagcccu

SEQ ID NO: 2623061 - RNA, 14 nt, Human
ggaagagcacagcc

SEQ ID NO: 2623062 - RNA, 22 nt, Human
ggaagagaggaguucaaugauc

SEQ ID NO: 2623063 - RNA, 19 nt, Human
ggaagagcacagcccuccc

SEQ ID NO: 2623064 - RNA, 18 nt, Human
ggaagagcacagcccucc

SEQ ID NO: 2623065 - RNA, 19 nt, Human
ggaagagcagaacggagcc

SEQ ID NO: 2623066 - RNA, 21 nt, Human
ggaagagcaggcacauggagg

SEQ ID NO: 2623067 - RNA, 15 nt, Human
ggaagagcaggcaca

SEQ ID NO: 2623068 - RNA, 14 nt, Human
ggaagagcaggcac

SEQ ID NO: 2623069 - RNA, 22 nt, Human
ggaacucccagcaacacaagcu

SEQ ID NO: 2623070 - RNA, 13 nt, Human
ggaacucccagca

SEQ ID NO: 2623071 - RNA, 22 nt, Human
ggaacucauuccugccugucuc

SEQ ID NO: 2623072 - RNA, 23 nt, Human
ggaagagaggaguucaaugaucu

SEQ ID NO: 2623073 - RNA, 15 nt, Human
ggaacuccuggaaau

SEQ ID NO: 2623074 - RNA, 17 nt, Human
ggaagcacaugccucuc

SEQ ID NO: 2623075 - RNA, 15 nt, Human
ggaagcacaugccuc

SEQ ID NO: 2623076 - RNA, 14 nt, Human
ggaagcacaugccu

SEQ ID NO: 2623077 - RNA, 13 nt, Human
ggaagcacaugcc

SEQ ID NO: 2623078 - RNA, 17 nt, Human
ggaagcacagcuucauu

SEQ ID NO: 2623079 - RNA, 22 nt, Human
ggaagaugggggcaagaagauc

SEQ ID NO: 2623080 - RNA, 20 nt, Human
ggaagaugggggcaagaaga

SEQ ID NO: 2623081 - RNA, 19 nt, Human
ggaagaugggggcaagaag

SEQ ID NO: 2623082 - RNA, 18 nt, Human
ggaagauuuuaaauucac

SEQ ID NO: 2623083 - RNA, 22 nt, Human
ggaagauccugcggguggggcu

SEQ ID NO: 2623084 - RNA, 12 nt, Human
ggaagauccugc

SEQ ID NO: 2623085 - RNA, 18 nt, Human
ggaagaugggggcaagaa

SEQ ID NO: 2623086 - RNA, 23 nt, Human
ggaagaucuuaaauuuugugaua

SEQ ID NO: 2623087 - RNA, 22 nt, Human
ggaagaucuuaaauuuugugau

SEQ ID NO: 2623088 - RNA, 20 nt, Human
gcugggacuacaggcaccca

SEQ ID NO: 2623089 - RNA, 19 nt, Human
gcugggacuacaggcaccc

SEQ ID NO: 2623090 - RNA, 18 nt, Human
gcugggacuacaggcacc

SEQ ID NO: 2623091 - RNA, 13 nt, Human
gcugggacuacag

SEQ ID NO: 2623092 - RNA, 21 nt, Human
gcugggacguggcucagccag

SEQ ID NO: 2623093 - RNA, 22 nt, Human
gcugggacguggcucagccagc

SEQ ID NO: 2623094 - RNA, 12 nt, Human
gcugggacucag

SEQ ID NO: 2623095 - RNA, 19 nt, Human
gcugggacuacagguguga

SEQ ID NO: 2623096 - RNA, 19 nt, Human
gcugggacucagccuucag

SEQ ID NO: 2623097 - RNA, 16 nt, Human
gcugggacucagccuu

SEQ ID NO: 2623098 - RNA, 15 nt, Human
gcugggacucagccu

SEQ ID NO: 2623099 - RNA, 14 nt, Human
gcugggacucagcc

SEQ ID NO: 2623100 - RNA, 23 nt, Human
gcugggacucagccuucagacag

SEQ ID NO: 2623101 - RNA, 22 nt, Human
gcugggacucagccuucagaca

SEQ ID NO: 2623102 - RNA, 15 nt, Human
gcugggacugagcca

SEQ ID NO: 2623103 - RNA, 14 nt, Human
gcugggacugagcc

SEQ ID NO: 2623104 - RNA, 14 nt, Human
gcugggacuggcca

SEQ ID NO: 2623105 - RNA, 23 nt, Human
gcuggccucuggcucucaugggg

SEQ ID NO: 2623106 - RNA, 18 nt, Human
gcuggccucuggcucuca

SEQ ID NO: 2623107 - RNA, 14 nt, Human
gcuggccuggaucu

SEQ ID NO: 2623108 - RNA, 12 nt, Human
gcuggccuggau

SEQ ID NO: 2623109 - RNA, 19 nt, Human
gcugggacguggcucagcc

SEQ ID NO: 2623110 - RNA, 20 nt, Human
gcugggacguggcucagcca

SEQ ID NO: 2623111 - RNA, 17 nt, Human
gcugggacguggcucag

SEQ ID NO: 2623112 - RNA, 15 nt, Human
gcuggccuggaucuc

SEQ ID NO: 2623113 - RNA, 20 nt, Human
gcugggacaugggaaagggg

SEQ ID NO: 2623114 - RNA, 13 nt, Human
gcuggccgggacc

SEQ ID NO: 2623115 - RNA, 22 nt, Human
gcuggccggagcaaacucugcu

SEQ ID NO: 2623116 - RNA, 12 nt, Human
gcuggcccugcc

SEQ ID NO: 2623117 - RNA, 22 nt, Human
gcuggcccgugacagacuccug

SEQ ID NO: 2623118 - RNA, 19 nt, Human
gcuggcccgugacagacuc

SEQ ID NO: 2623119 - RNA, 17 nt, Human
gcuggcccgugacagac

SEQ ID NO: 2623120 - RNA, 20 nt, Human
gcuggccccucaccugggca

SEQ ID NO: 2623121 - RNA, 17 nt, Human
gcuggccgggagccuga

SEQ ID NO: 2623122 - RNA, 18 nt, Human
gcuggccgugggccuggg

SEQ ID NO: 2623123 - RNA, 22 nt, Human
gcuggccucccaaaugagccau

SEQ ID NO: 2623124 - RNA, 21 nt, Human
gcuggccucccaaaugagcca

SEQ ID NO: 2623125 - RNA, 22 nt, Human
gcuggaccuugaacuggguacu

SEQ ID NO: 2623126 - RNA, 21 nt, Human
gcuggaccuugaacuggguac

SEQ ID NO: 2623127 - RNA, 15 nt, Human
gcuggaugauggucu

SEQ ID NO: 2623128 - RNA, 20 nt, Human
gcuggaugagaauuugagug

SEQ ID NO: 2623129 - RNA, 20 nt, Human
gcuggaugagacuuccaaac

SEQ ID NO: 2623130 - RNA, 13 nt, Human
gcugcuuggccuu

SEQ ID NO: 2623131 - RNA, 21 nt, Human
gcuggaugucugccaauuuuu

SEQ ID NO: 2623132 - RNA, 18 nt, Human
gcuggaugucugccaauu

SEQ ID NO: 2623133 - RNA, 18 nt, Human
gcuggauggagcccaggc

SEQ ID NO: 2623134 - RNA, 16 nt, Human
gcuggauggagcccag

SEQ ID NO: 2623135 - RNA, 21 nt, Human
gcuggaugcuccuuccaacag

SEQ ID NO: 2623136 - RNA, 14 nt, Human
gcuggauggagccc

SEQ ID NO: 2623137 - RNA, 22 nt, Human
gcuggaugcuccuuccaacagg

SEQ ID NO: 2623138 - RNA, 22 nt, Human
gcugcuugggcuucauccuccu

SEQ ID NO: 2623139 - RNA, 17 nt, Human
gcugcuugggcuucauc

SEQ ID NO: 2623140 - RNA, 18 nt, Human
gcuggaccuugaacuggg

SEQ ID NO: 2623141 - RNA, 22 nt, Human
gcugcuugcccccaugcuggcg

SEQ ID NO: 2623142 - RNA, 12 nt, Human
gcugcuugcccc

SEQ ID NO: 2623143 - RNA, 21 nt, Human
gcugcuucuuaaccccaguaa

SEQ ID NO: 2623144 - RNA, 16 nt, Human
gcuggaccuugaacug

SEQ ID NO: 2623145 - RNA, 23 nt, Human
gcuggcccagccggccucucugg

SEQ ID NO: 2623146 - RNA, 20 nt, Human
gcuggcccagccggccucuc

SEQ ID NO: 2623147 - RNA, 19 nt, Human
gcuggcccagccggccucu

SEQ ID NO: 2623148 - RNA, 18 nt, Human
gcuggcccagccggccuc

SEQ ID NO: 2623149 - RNA, 17 nt, Human
gcuggcccagccggccu

SEQ ID NO: 2623150 - RNA, 16 nt, Human
gcuggcccagccggcc

SEQ ID NO: 2623151 - RNA, 13 nt, Human
gcuggcccagccg

SEQ ID NO: 2623152 - RNA, 20 nt, Human
gcuggcccagcccugcuggc

SEQ ID NO: 2623153 - RNA, 13 nt, Human
gcuggcccagggc

SEQ ID NO: 2623154 - RNA, 15 nt, Human
gcuggcccagggccc

SEQ ID NO: 2623155 - RNA, 16 nt, Human
gcuggcccagggccca

SEQ ID NO: 2623156 - RNA, 17 nt, Human
gcuggcccagggcccag

SEQ ID NO: 2623157 - RNA, 20 nt, Human
gcuggcaaagguggcucucc

SEQ ID NO: 2623158 - RNA, 15 nt, Human
gcuggcaaagguggc

SEQ ID NO: 2623159 - RNA, 19 nt, Human
gcuggcccagcccugcugg

SEQ ID NO: 2623160 - RNA, 17 nt, Human
gcuggcccagcccugcu

SEQ ID NO: 2623161 - RNA, 16 nt, Human
gcuggcccagcccugc

SEQ ID NO: 2623162 - RNA, 22 nt, Human
gcuggauuggguuaugaauauu

SEQ ID NO: 2623163 - RNA, 22 nt, Human
gcuggaugucugccaauuuuug

SEQ ID NO: 2623164 - RNA, 15 nt, Human
gcuggcaaagacaga

SEQ ID NO: 2623165 - RNA, 19 nt, Human
gcuggcaaagacagaagcc

SEQ ID NO: 2623166 - RNA, 16 nt, Human
gcuggauuacaggcau

SEQ ID NO: 2623167 - RNA, 21 nt, Human
gcuggcccagggcccagagcc

SEQ ID NO: 2623168 - RNA, 18 nt, Human
gcuggcccagggcccaga

SEQ ID NO: 2623169 - RNA, 19 nt, Human
gcuggcccagggcccagag

SEQ ID NO: 2623170 - RNA, 14 nt, Human
gcuggccccucacc

SEQ ID NO: 2623171 - RNA, 19 nt, Human
gcuggccccucaccugggc

SEQ ID NO: 2623172 - RNA, 23 nt, Human
gcuggccccucaccugggcaccu

SEQ ID NO: 2623173 - RNA, 11 nt, Human
gcuggccccuc

SEQ ID NO: 2623174 - RNA, 12 nt, Human
gcuggccccuca

SEQ ID NO: 2623175 - RNA, 24 nt, Human
gcuggccccgccgccugguacuca

SEQ ID NO: 2623176 - RNA, 23 nt, Human
gcuggccccgccgccugguacuc

SEQ ID NO: 2623177 - RNA, 22 nt, Human
gcuggccccgccgccugguacu

SEQ ID NO: 2623178 - RNA, 20 nt, Human
gcuggcccagggcccagagc

SEQ ID NO: 2623179 - RNA, 13 nt, Human
gcuggccccgccg

SEQ ID NO: 2623180 - RNA, 22 nt, Human
gcugcuucaaggauccugagcc

SEQ ID NO: 2623181 - RNA, 21 nt, Human
gcugcuucaaggauccugagc

SEQ ID NO: 2623182 - RNA, 20 nt, Human
gcugcuuagaauccaaacuu

SEQ ID NO: 2623183 - RNA, 18 nt, Human
gcugcuuagacauaacaa

SEQ ID NO: 2623184 - RNA, 23 nt, Human
gcugcuucaaggauccugagcca

SEQ ID NO: 2623185 - RNA, 21 nt, Human
gcugcuucucccacuuggcca

SEQ ID NO: 2623186 - RNA, 17 nt, Human
gcugcuuccuccuggaa

SEQ ID NO: 2623187 - RNA, 16 nt, Human
gcugcuugggcuucau

SEQ ID NO: 2623188 - RNA, 16 nt, Human
gcugcuuccuccugga

SEQ ID NO: 2623189 - RNA, 15 nt, Human
gcugcuuccuccugg

SEQ ID NO: 2623190 - RNA, 14 nt, Human
gcugcuuccuccug

SEQ ID NO: 2623191 - RNA, 13 nt, Human
gcugcuuccuccu

SEQ ID NO: 2623192 - RNA, 12 nt, Human
gcugcuucccuc

SEQ ID NO: 2623193 - RNA, 14 nt, Human
gcugcuucccucug

SEQ ID NO: 2623194 - RNA, 15 nt, Human
gcugcuucccucugc

SEQ ID NO: 2623195 - RNA, 20 nt, Human
gcugcuucccucugccuguc

SEQ ID NO: 2623196 - RNA, 21 nt, Human
gcugcuucccucugccugucc

SEQ ID NO: 2623197 - RNA, 22 nt, Human
gcugcuucccucugccuguccc

SEQ ID NO: 2623198 - RNA, 23 nt, Human
gcugcuucccucugccugucccu

SEQ ID NO: 2623199 - RNA, 18 nt, Human
gcugcgguccacccagga

SEQ ID NO: 2623200 - RNA, 17 nt, Human
gcugcgguccacccagg

SEQ ID NO: 2623201 - RNA, 19 nt, Human
gcugcgguccacccaggag

SEQ ID NO: 2623202 - RNA, 16 nt, Human
gcugcuagagccagca

SEQ ID NO: 2623203 - RNA, 19 nt, Human
gcugcuagcacuuggagcc

SEQ ID NO: 2623204 - RNA, 17 nt, Human
gcugcuauagccugggg

SEQ ID NO: 2623205 - RNA, 20 nt, Human
gcugcuagcacuuggagcca

SEQ ID NO: 2623206 - RNA, 23 nt, Human
gcugcuagcacuuggagccaagg

SEQ ID NO: 2623207 - RNA, 15 nt, Human
gcugcuauagccugg

SEQ ID NO: 2623208 - RNA, 16 nt, Human
gcugcuauagccuggg

SEQ ID NO: 2623209 - RNA, 23 nt, Human
gcugcucacuaccuccucaggga

SEQ ID NO: 2623210 - RNA, 21 nt, Human
gcugcucacuaccuccucagg

SEQ ID NO: 2623211 - RNA, 20 nt, Human
gcugcucagggaaaagcagc

SEQ ID NO: 2623212 - RNA, 13 nt, Human
gcugcuucaagga

SEQ ID NO: 2623213 - RNA, 19 nt, Human
gcugcucaucugauuuuug

SEQ ID NO: 2623214 - RNA, 21 nt, Human
gcugcucagggaaaagcagcu

SEQ ID NO: 2623215 - RNA, 21 nt, Human
gcuagaggccagccccaccca

SEQ ID NO: 2623216 - RNA, 18 nt, Human
gcuagaggccagccccac

SEQ ID NO: 2623217 - RNA, 19 nt, Human
gcuagaggccagccccacc

SEQ ID NO: 2623218 - RNA, 20 nt, Human
gcuagaggccagccccaccc

SEQ ID NO: 2623219 - RNA, 18 nt, Human
gcuagauguauguacuuc

SEQ ID NO: 2623220 - RNA, 11 nt, Human
gcugcccugug

SEQ ID NO: 2623221 - RNA, 22 nt, Human
gcugcccuggugcugccacacu

SEQ ID NO: 2623222 - RNA, 20 nt, Human
gcugcccuggugcugccaca

SEQ ID NO: 2623223 - RNA, 19 nt, Human
gcugcccuggugcugccac

SEQ ID NO: 2623224 - RNA, 18 nt, Human
gcugcccuggugcugcca

SEQ ID NO: 2623225 - RNA, 22 nt, Human
gcuagcagcagggagggcuucu

SEQ ID NO: 2623226 - RNA, 17 nt, Human
gcuagcacuuggagcca

SEQ ID NO: 2623227 - RNA, 23 nt, Human
gcuagcagaaaucuagaagacug

SEQ ID NO: 2623228 - RNA, 16 nt, Human
gcugcgcuugcuuuuc

SEQ ID NO: 2623229 - RNA, 15 nt, Human
gcugcgcuugcuuuu

SEQ ID NO: 2623230 - RNA, 19 nt, Human
gcugcgcccuuaccuuccc

SEQ ID NO: 2623231 - RNA, 16 nt, Human
gcugcgcccugggcuc

SEQ ID NO: 2623232 - RNA, 16 nt, Human
gcugcgguccacccag

SEQ ID NO: 2623233 - RNA, 15 nt, Human
gcugcgcccugggcu

SEQ ID NO: 2623234 - RNA, 20 nt, Human
gcugccuuuagucgcugagg

SEQ ID NO: 2623235 - RNA, 21 nt, Human
gcugccuuggcucagacaugu

SEQ ID NO: 2623236 - RNA, 23 nt, Human
gcugccuuggcucagacauguuu

SEQ ID NO: 2623237 - RNA, 17 nt, Human
gcugccuuggcucagac

SEQ ID NO: 2623238 - RNA, 19 nt, Human
gcugccuuggcucagacau

SEQ ID NO: 2623239 - RNA, 16 nt, Human
gcugccuuggcucaga

SEQ ID NO: 2623240 - RNA, 14 nt, Human
gcugccuuggcuca

SEQ ID NO: 2623241 - RNA, 14 nt, Human
gcugcccugugagu

SEQ ID NO: 2623242 - RNA, 12 nt, Human
gcugcccuguga

SEQ ID NO: 2623243 - RNA, 17 nt, Human
gcugcccuuucugggca

SEQ ID NO: 2623244 - RNA, 16 nt, Human
gcugccgaccagagcc

SEQ ID NO: 2623245 - RNA, 17 nt, Human
gcugccgaccagagccc

SEQ ID NO: 2623246 - RNA, 23 nt, Human
gcugcccuggugcugccacacuu

SEQ ID NO: 2623247 - RNA, 18 nt, Human
gcugcccuguaccccagc

SEQ ID NO: 2623248 - RNA, 17 nt, Human
gcugggauuacaggcgu

SEQ ID NO: 2623249 - RNA, 18 nt, Human
gcugggauuacaggcgug

SEQ ID NO: 2623250 - RNA, 19 nt, Human
gcugggauuacaggcuccu

SEQ ID NO: 2623251 - RNA, 20 nt, Human
gcugggauuacaggcuccug

SEQ ID NO: 2623252 - RNA, 15 nt, Human
gcugggcuggggccu

SEQ ID NO: 2623253 - RNA, 22 nt, Human
gcugggaggagggagagggagg

SEQ ID NO: 2623254 - RNA, 18 nt, Human
gcugggaggagggagagg

SEQ ID NO: 2623255 - RNA, 14 nt, Human
gcugggcuggggcc

SEQ ID NO: 2623256 - RNA, 17 nt, Human
gcugggcuucaguggca

SEQ ID NO: 2623257 - RNA, 17 nt, Human
gcugggaggagggagag

SEQ ID NO: 2623258 - RNA, 16 nt, Human
gcugggaggagggaga

SEQ ID NO: 2623259 - RNA, 21 nt, Human
gcugggaugauuggagggggg

SEQ ID NO: 2623260 - RNA, 21 nt, Human
gcugggagcuccacucugcuu

SEQ ID NO: 2623261 - RNA, 20 nt, Human
gcugggagcuccacucugcu

SEQ ID NO: 2623262 - RNA, 15 nt, Human
gcugggagcucugca

SEQ ID NO: 2623263 - RNA, 13 nt, Human
gcugggagcugaa

SEQ ID NO: 2623264 - RNA, 22 nt, Human
gcugggagcuccacucugcuuc

SEQ ID NO: 2623265 - RNA, 16 nt, Human
gcugggagcucugcag

SEQ ID NO: 2623266 - RNA, 18 nt, Human
gcugggagagccuuccag

SEQ ID NO: 2623267 - RNA, 17 nt, Human
gcugggagagccuucca

SEQ ID NO: 2623268 - RNA, 13 nt, Human
gcugggagagccu

SEQ ID NO: 2623269 - RNA, 12 nt, Human
gcugggagagcc

SEQ ID NO: 2623270 - RNA, 22 nt, Human
gcugggagagccuuccaggggu

SEQ ID NO: 2623271 - RNA, 19 nt, Human
gcugggagagccuuccagg

SEQ ID NO: 2623272 - RNA, 18 nt, Human
gcugggagcuccacucug

SEQ ID NO: 2623273 - RNA, 16 nt, Human
gcugggagcuccacuc

SEQ ID NO: 2623274 - RNA, 14 nt, Human
gcugggagcuccac

SEQ ID NO: 2623275 - RNA, 13 nt, Human
gcugggagcucca

SEQ ID NO: 2623276 - RNA, 17 nt, Human
gcugggacugagccagu

SEQ ID NO: 2623277 - RNA, 15 nt, Human
gcugggacuggccag

SEQ ID NO: 2623278 - RNA, 16 nt, Human
gcugggacuggccagg

SEQ ID NO: 2623279 - RNA, 15 nt, Human
gcuggggcugaccuu

SEQ ID NO: 2623280 - RNA, 19 nt, Human
gcuggggcguggggagggc

SEQ ID NO: 2623281 - RNA, 18 nt, Human
gcuggggcguggggaggg

SEQ ID NO: 2623282 - RNA, 13 nt, Human
gcugggggcagga

SEQ ID NO: 2623283 - RNA, 20 nt, Human
gcugggggcaggagggcccu

SEQ ID NO: 2623284 - RNA, 23 nt, Human
gcugggggcaggagggcccuacc

SEQ ID NO: 2623285 - RNA, 16 nt, Human
gcugggggccaugagc

SEQ ID NO: 2623286 - RNA, 23 nt, Human
gcugggggccaugagcuccagac

SEQ ID NO: 2623287 - RNA, 20 nt, Human
gcugggggccucagugccac

SEQ ID NO: 2623288 - RNA, 19 nt, Human
gcugggggccucagugcca

SEQ ID NO: 2623289 - RNA, 19 nt, Human
gcuggucccacucagucca

SEQ ID NO: 2623290 - RNA, 15 nt, Human
gcuggucccacucag

SEQ ID NO: 2623291 - RNA, 19 nt, Human
gcugggggugggccaggcu

SEQ ID NO: 2623292 - RNA, 15 nt, Human
gcugggggugggcca

SEQ ID NO: 2623293 - RNA, 18 nt, Human
gcugggggugggccaggc

SEQ ID NO: 2623294 - RNA, 13 nt, Human
gcugggggccuca

SEQ ID NO: 2623295 - RNA, 19 nt, Human
gcuggggccaggcuggguc

SEQ ID NO: 2623296 - RNA, 16 nt, Human
gcuggggccaggcugg

SEQ ID NO: 2623297 - RNA, 19 nt, Human
gcugggcuucaguggcagc

SEQ ID NO: 2623298 - RNA, 18 nt, Human
gcugggcuucaguggcag

SEQ ID NO: 2623299 - RNA, 15 nt, Human
gcugggcugggugcg

SEQ ID NO: 2623300 - RNA, 14 nt, Human
gcugggcugggugc

SEQ ID NO: 2623301 - RNA, 12 nt, Human
gcugggcugggu

SEQ ID NO: 2623302 - RNA, 17 nt, Human
gcugggcuggggccuga

SEQ ID NO: 2623303 - RNA, 21 nt, Human
gcuggggccuaucagugugcc

SEQ ID NO: 2623304 - RNA, 20 nt, Human
gcuggggccuaucagugugc

SEQ ID NO: 2623305 - RNA, 12 nt, Human
gcuggggccagu

SEQ ID NO: 2623306 - RNA, 17 nt, Human
gcuggggcguggggagg

SEQ ID NO: 2623307 - RNA, 15 nt, Human
gcuggggccugaugg

SEQ ID NO: 2623308 - RNA, 12 nt, Human
gcuggggccuga

SEQ ID NO: 2623309 - RNA, 19 nt, Human
gcuggggccugauggggag

SEQ ID NO: 2623310 - RNA, 23 nt, Human
gcugggggaagaagcucucuccu

SEQ ID NO: 2623311 - RNA, 16 nt, Human
gcuguguaaaguuagu

SEQ ID NO: 2623312 - RNA, 15 nt, Human
gcuguguaaaguuag

SEQ ID NO: 2623313 - RNA, 14 nt, Human
gcuguguaaaguua

SEQ ID NO: 2623314 - RNA, 13 nt, Human
gcuguguaaaguu

SEQ ID NO: 2623315 - RNA, 11 nt, Human
gcuguguaaag

SEQ ID NO: 2623316 - RNA, 12 nt, Human
gcuguguaaagu

SEQ ID NO: 2623317 - RNA, 14 nt, Human
gcuguguaucugau

SEQ ID NO: 2623318 - RNA, 22 nt, Human
gcuguguacacugacaccuuug

SEQ ID NO: 2623319 - RNA, 18 nt, Human
gcuguguaaaguuagucu

SEQ ID NO: 2623320 - RNA, 17 nt, Human
gcuguguaaaguuaguc

SEQ ID NO: 2623321 - RNA, 19 nt, Human
gcuguguaaaguuagucua

SEQ ID NO: 2623322 - RNA, 14 nt, Human
gcuguguccuugca

SEQ ID NO: 2623323 - RNA, 18 nt, Human
gcuguguccuugcaccug

SEQ ID NO: 2623324 - RNA, 19 nt, Human
gcuguguccuugcaccugc

SEQ ID NO: 2623325 - RNA, 20 nt, Human
gcuguguccuugcaccugca

SEQ ID NO: 2623326 - RNA, 21 nt, Human
gcuguguccuugcaccugcau

SEQ ID NO: 2623327 - RNA, 17 nt, Human
gcugucuggccaggccu

SEQ ID NO: 2623328 - RNA, 19 nt, Human
gcugucugaucugugcuuu

SEQ ID NO: 2623329 - RNA, 13 nt, Human
gcugucuggccag

SEQ ID NO: 2623330 - RNA, 20 nt, Human
gcugucuucucaggcucugc

SEQ ID NO: 2623331 - RNA, 22 nt, Human
gcugucuucucaggcucugccc

SEQ ID NO: 2623332 - RNA, 17 nt, Human
gcugucuccauguuuga

SEQ ID NO: 2623333 - RNA, 22 nt, Human
gcugucugaucugugcuuucca

SEQ ID NO: 2623334 - RNA, 18 nt, Human
gcugucugaucugugcuu

SEQ ID NO: 2623335 - RNA, 17 nt, Human
gcugucugaucugugcu

SEQ ID NO: 2623336 - RNA, 15 nt, Human
gcugucccugucacc

SEQ ID NO: 2623337 - RNA, 18 nt, Human
gcugucccugucaccaag

SEQ ID NO: 2623338 - RNA, 23 nt, Human
gcugucaauuacaggaaguacug

SEQ ID NO: 2623339 - RNA, 22 nt, Human
gcugucaauuacaggaaguacu

SEQ ID NO: 2623340 - RNA, 19 nt, Human
gcugucaauuacaggaagu

SEQ ID NO: 2623341 - RNA, 17 nt, Human
gcugucaauuacaggaa

SEQ ID NO: 2623342 - RNA, 15 nt, Human
gcugucccucccccu

SEQ ID NO: 2623343 - RNA, 13 nt, Human
gcugucacaggcg

SEQ ID NO: 2623344 - RNA, 19 nt, Human
gcugucccuuacgugaguc

SEQ ID NO: 2623345 - RNA, 21 nt, Human
gcugucccuuacgugaguccu

SEQ ID NO: 2623346 - RNA, 22 nt, Human
gcugucccuuacgugaguccug

SEQ ID NO: 2623347 - RNA, 16 nt, Human
gcugucccucccccuu

SEQ ID NO: 2623348 - RNA, 13 nt, Human
gcugucccucacu

SEQ ID NO: 2623349 - RNA, 14 nt, Human
gcugucccugucac

SEQ ID NO: 2623350 - RNA, 20 nt, Human
gcuggucccacucaguccau

SEQ ID NO: 2623351 - RNA, 14 nt, Human
gcuggucccacuca

SEQ ID NO: 2623352 - RNA, 15 nt, Human
gcuggugcuguggcc

SEQ ID NO: 2623353 - RNA, 19 nt, Human
gcuggugcuguggccaggg

SEQ ID NO: 2623354 - RNA, 17 nt, Human
gcuggugcuguggccag

SEQ ID NO: 2623355 - RNA, 12 nt, Human
gcugguggccca

SEQ ID NO: 2623356 - RNA, 13 nt, Human
gcugguggcccag

SEQ ID NO: 2623357 - RNA, 18 nt, Human
gcugguguccugaccacc

SEQ ID NO: 2623358 - RNA, 17 nt, Human
gcugguguccugaccac

SEQ ID NO: 2623359 - RNA, 16 nt, Human
gcugguguccugacca

SEQ ID NO: 2623360 - RNA, 15 nt, Human
gcugguguccugacc

SEQ ID NO: 2623361 - RNA, 13 nt, Human
gcuggugguuuca

SEQ ID NO: 2623362 - RNA, 14 nt, Human
gcuggugggagggg

SEQ ID NO: 2623363 - RNA, 12 nt, Human
gcuggugguuuc

SEQ ID NO: 2623364 - RNA, 18 nt, Human
gcuggugucaccugaaga

SEQ ID NO: 2623365 - RNA, 16 nt, Human
gcuggugucaccugaa

SEQ ID NO: 2623366 - RNA, 14 nt, Human
gcugguggcccagg

SEQ ID NO: 2623367 - RNA, 15 nt, Human
gcugguggcccagga

SEQ ID NO: 2623368 - RNA, 15 nt, Human
gcugguggcucccgg

SEQ ID NO: 2623369 - RNA, 21 nt, Human
gcuggugggaagcgucugucc

SEQ ID NO: 2623370 - RNA, 13 nt, Human
gcuggugggaggg

SEQ ID NO: 2623371 - RNA, 12 nt, Human
gcuggugggagg

SEQ ID NO: 2623372 - RNA, 22 nt, Human
gcugguguccugaccacccucc

SEQ ID NO: 2623373 - RNA, 19 nt, Human
gcugguguccugaccaccc

SEQ ID NO: 2623374 - RNA, 21 nt, Human
gcugguuagagguucccuuug

SEQ ID NO: 2623375 - RNA, 15 nt, Human
gcugguucaggguug

SEQ ID NO: 2623376 - RNA, 22 nt, Human
gcuguauuuuaaaagaaugauu

SEQ ID NO: 2623377 - RNA, 22 nt, Human
gcugguucaggguuggccccug

SEQ ID NO: 2623378 - RNA, 16 nt, Human
gcugucaauuacagga

SEQ ID NO: 2623379 - RNA, 18 nt, Human
gcugucaaguuccuuugg

SEQ ID NO: 2623380 - RNA, 14 nt, Human
gcugguuagaaaug

SEQ ID NO: 2623381 - RNA, 20 nt, Human
gcugucaaaacaaguuuuuc

SEQ ID NO: 2623382 - RNA, 19 nt, Human
ggcagugagugagccuggc

SEQ ID NO: 2623383 - RNA, 18 nt, Human
ggcagugagugagccugg

SEQ ID NO: 2623384 - RNA, 16 nt, Human
ggcagugagugagccu

SEQ ID NO: 2623385 - RNA, 15 nt, Human
ggcagugagugagcc

SEQ ID NO: 2623386 - RNA, 16 nt, Human
ggcagugagggagggc

SEQ ID NO: 2623387 - RNA, 21 nt, Human
ggcagugagggagggcuguca

SEQ ID NO: 2623388 - RNA, 23 nt, Human
ggcauguucucugaggacacuaa

SEQ ID NO: 2623389 - RNA, 19 nt, Human
ggcauuagaauuauuuaaa

SEQ ID NO: 2623390 - RNA, 17 nt, Human
ggcauuagaauuauuua

SEQ ID NO: 2623391 - RNA, 20 nt, Human
ggcauuagaauuauuuaaac

SEQ ID NO: 2623392 - RNA, 20 nt, Human
ggcauuauguccacugugua

SEQ ID NO: 2623393 - RNA, 14 nt, Human
ggcagugccagggc

SEQ ID NO: 2623394 - RNA, 16 nt, Human
ggcagugccagggcag

SEQ ID NO: 2623395 - RNA, 18 nt, Human
ggcagugaugcuggaugc

SEQ ID NO: 2623396 - RNA, 15 nt, Human
ggcagguuggugggg

SEQ ID NO: 2623397 - RNA, 22 nt, Human
ggcaggugguggcacugagccc

SEQ ID NO: 2623398 - RNA, 21 nt, Human
ggcaggugguggcacugagcc

SEQ ID NO: 2623399 - RNA, 17 nt, Human
ggcaggugguggcacug

SEQ ID NO: 2623400 - RNA, 14 nt, Human
ggcaggugguggca

SEQ ID NO: 2623401 - RNA, 23 nt, Human
ggcagguggaggugucaggcugc

SEQ ID NO: 2623402 - RNA, 12 nt, Human
ggcaggugggag

SEQ ID NO: 2623403 - RNA, 16 nt, Human
ggcaggugggagcuug

SEQ ID NO: 2623404 - RNA, 17 nt, Human
ggcaggugggagcuuga

SEQ ID NO: 2623405 - RNA, 23 nt, Human
ggcagucgggggcuggccuagga

SEQ ID NO: 2623406 - RNA, 22 nt, Human
ggcagucgggggcuggccuagg

SEQ ID NO: 2623407 - RNA, 19 nt, Human
ggcagucugaauuuuuaaa

SEQ ID NO: 2623408 - RNA, 20 nt, Human
ggcagguuagaaccuagaag

SEQ ID NO: 2623409 - RNA, 16 nt, Human
ggcagguuagaaccua

SEQ ID NO: 2623410 - RNA, 21 nt, Human
ggcagucgggggcuggccuag

SEQ ID NO: 2623411 - RNA, 13 nt, Human
ggcagucuggagg

SEQ ID NO: 2623412 - RNA, 14 nt, Human
ggcagucuggaggg

SEQ ID NO: 2623413 - RNA, 16 nt, Human
ggcagucuggaggggc

SEQ ID NO: 2623414 - RNA, 21 nt, Human
ggcagucuggaggggcauggc

SEQ ID NO: 2623415 - RNA, 22 nt, Human
ggccaccugcggugcuaucucc

SEQ ID NO: 2623416 - RNA, 16 nt, Human
ggccaccugcggugcu

SEQ ID NO: 2623417 - RNA, 23 nt, Human
ggcauuccagcuccuccgugcuu

SEQ ID NO: 2623418 - RNA, 21 nt, Human
ggccacacuauuaccaugaga

SEQ ID NO: 2623419 - RNA, 22 nt, Human
ggccacacuauuaccaugagaa

SEQ ID NO: 2623420 - RNA, 14 nt, Human
ggccaccugccccc

SEQ ID NO: 2623421 - RNA, 22 nt, Human
ggccaccugcccccuucuccca

SEQ ID NO: 2623422 - RNA, 17 nt, Human
ggccacaagacccuugu

SEQ ID NO: 2623423 - RNA, 16 nt, Human
ggccacaagacccuug

SEQ ID NO: 2623424 - RNA, 15 nt, Human
ggcauuccccaggag

SEQ ID NO: 2623425 - RNA, 20 nt, Human
ggccaagugcaggcuggcac

SEQ ID NO: 2623426 - RNA, 12 nt, Human
ggccaaguucuu

SEQ ID NO: 2623427 - RNA, 11 nt, Human
ggccacuguga

SEQ ID NO: 2623428 - RNA, 19 nt, Human
ggccacugcacagagcucu

SEQ ID NO: 2623429 - RNA, 15 nt, Human
ggccacugcacagag

SEQ ID NO: 2623430 - RNA, 14 nt, Human
ggccacugaagaua

SEQ ID NO: 2623431 - RNA, 22 nt, Human
ggccacucugccucugccugca

SEQ ID NO: 2623432 - RNA, 14 nt, Human
ggccaccuuuucag

SEQ ID NO: 2623433 - RNA, 23 nt, Human
ggccaccugcccccuucucccac

SEQ ID NO: 2623434 - RNA, 16 nt, Human
ggccacucugccucug

SEQ ID NO: 2623435 - RNA, 15 nt, Human
ggccacucugccucu

SEQ ID NO: 2623436 - RNA, 20 nt, Human
ggccacucugccucugccug

SEQ ID NO: 2623437 - RNA, 21 nt, Human
ggccacucugccucugccugc

SEQ ID NO: 2623438 - RNA, 16 nt, Human
ggccaggagccuccug

SEQ ID NO: 2623439 - RNA, 19 nt, Human
ggccaggaguuugagacca

SEQ ID NO: 2623440 - RNA, 18 nt, Human
ggccacuggccaucucca

SEQ ID NO: 2623441 - RNA, 18 nt, Human
ggccacugcacagagcuc

SEQ ID NO: 2623442 - RNA, 13 nt, Human
ggccaggagcucu

SEQ ID NO: 2623443 - RNA, 14 nt, Human
ggccaggagccucc

SEQ ID NO: 2623444 - RNA, 16 nt, Human
ggccacugugaagaga

SEQ ID NO: 2623445 - RNA, 16 nt, Human
ggccaggccagaggga

SEQ ID NO: 2623446 - RNA, 14 nt, Human
ggccaggccagagg

SEQ ID NO: 2623447 - RNA, 12 nt, Human
ggccaggcaggu

SEQ ID NO: 2623448 - RNA, 11 nt, Human
ggccaggccac

SEQ ID NO: 2623449 - RNA, 22 nt, Human
ggccaggcagaucugugcccca

SEQ ID NO: 2623450 - RNA, 16 nt, Human
ggccaggauggagggg

SEQ ID NO: 2623451 - RNA, 15 nt, Human
ggccaggcagaucug

SEQ ID NO: 2623452 - RNA, 15 nt, Human
ggccaggagcucuuc

SEQ ID NO: 2623453 - RNA, 20 nt, Human
ggccaggaguuugagaccag

SEQ ID NO: 2623454 - RNA, 22 nt, Human
ggccaggcugggucgcccugga

SEQ ID NO: 2623455 - RNA, 18 nt, Human
ggccaggcugggucgccc

SEQ ID NO: 2623456 - RNA, 11 nt, Human
ggccaggcugg

SEQ ID NO: 2623457 - RNA, 17 nt, Human
ggccaggccaccaggau

SEQ ID NO: 2623458 - RNA, 16 nt, Human
ggccaggccaccagga

SEQ ID NO: 2623459 - RNA, 15 nt, Human
ggccaggccaccagg

SEQ ID NO: 2623460 - RNA, 11 nt, Human
ggccaggcagg

SEQ ID NO: 2623461 - RNA, 15 nt, Human
ggccaggccagcugc

SEQ ID NO: 2623462 - RNA, 17 nt, Human
ggccaggccagcugccu

SEQ ID NO: 2623463 - RNA, 17 nt, Human
ggccccugagaucucug

SEQ ID NO: 2623464 - RNA, 21 nt, Human
ggccccugagaucucugcagg

SEQ ID NO: 2623465 - RNA, 12 nt, Human
ggccccugccac

SEQ ID NO: 2623466 - RNA, 16 nt, Human
ggccccugccacccug

SEQ ID NO: 2623467 - RNA, 13 nt, Human
ggccccugccacc

SEQ ID NO: 2623468 - RNA, 17 nt, Human
ggccccugccagacccc

SEQ ID NO: 2623469 - RNA, 19 nt, Human
ggccccugccagacccccu

SEQ ID NO: 2623470 - RNA, 13 nt, Human
ggccccugcccgg

SEQ ID NO: 2623471 - RNA, 18 nt, Human
ggccccugccacccuggg

SEQ ID NO: 2623472 - RNA, 17 nt, Human
ggccccugccacccugg

SEQ ID NO: 2623473 - RNA, 21 nt, Human
ggccccucagggucccuggug

SEQ ID NO: 2623474 - RNA, 20 nt, Human
ggccccucagggucccuggu

SEQ ID NO: 2623475 - RNA, 19 nt, Human
ggccccucagggucccugg

SEQ ID NO: 2623476 - RNA, 16 nt, Human
ggccccucaggguccc

SEQ ID NO: 2623477 - RNA, 22 nt, Human
ggccccucccacacacacccac

SEQ ID NO: 2623478 - RNA, 12 nt, Human
ggccccuccagc

SEQ ID NO: 2623479 - RNA, 23 nt, Human
ggccccucaucugcucagcagcu

SEQ ID NO: 2623480 - RNA, 22 nt, Human
ggccccucacccugccuuaucu

SEQ ID NO: 2623481 - RNA, 22 nt, Human
ggccccuauguaguccgugcug

SEQ ID NO: 2623482 - RNA, 17 nt, Human
ggccccuccagcuugug

SEQ ID NO: 2623483 - RNA, 19 nt, Human
ggccccucugcccagcuug

SEQ ID NO: 2623484 - RNA, 17 nt, Human
ggccccucugcccagcu

SEQ ID NO: 2623485 - RNA, 16 nt, Human
ggccccucugcccagc

SEQ ID NO: 2623486 - RNA, 15 nt, Human
ggccccucugcccag

SEQ ID NO: 2623487 - RNA, 14 nt, Human
ggccccucugaccu

SEQ ID NO: 2623488 - RNA, 14 nt, Human
ggccccucugccca

SEQ ID NO: 2623489 - RNA, 12 nt, Human
ggccccucugcc

SEQ ID NO: 2623490 - RNA, 20 nt, Human
ggcccccagcccagggcucc

SEQ ID NO: 2623491 - RNA, 18 nt, Human
ggcccccagcccagggcu

SEQ ID NO: 2623492 - RNA, 17 nt, Human
ggcccccagcccagggc

SEQ ID NO: 2623493 - RNA, 14 nt, Human
ggcccccagcccag

SEQ ID NO: 2623494 - RNA, 17 nt, Human
ggcccccagagcgcccc

SEQ ID NO: 2623495 - RNA, 16 nt, Human
ggcccccagagcgccc

SEQ ID NO: 2623496 - RNA, 15 nt, Human
ggcccccagagcgcc

SEQ ID NO: 2623497 - RNA, 12 nt, Human
ggcccccagagc

SEQ ID NO: 2623498 - RNA, 18 nt, Human
ggcccccacuugccucuu

SEQ ID NO: 2623499 - RNA, 16 nt, Human
ggcccccacuugccuc

SEQ ID NO: 2623500 - RNA, 15 nt, Human
ggcccccacuugccu

SEQ ID NO: 2623501 - RNA, 22 nt, Human
ggccaugggacagggaggacgc

SEQ ID NO: 2623502 - RNA, 13 nt, Human
ggccaugggccuc

SEQ ID NO: 2623503 - RNA, 22 nt, Human
ggccauggagagcuggagccug

SEQ ID NO: 2623504 - RNA, 21 nt, Human
ggccaggccaccuccagaaac

SEQ ID NO: 2623505 - RNA, 16 nt, Human
ggccaggcugcucuug

SEQ ID NO: 2623506 - RNA, 13 nt, Human
ggccauggcagaa

SEQ ID NO: 2623507 - RNA, 21 nt, Human
ggccauggagagcuggagccu

SEQ ID NO: 2623508 - RNA, 17 nt, Human
ggccccccuccuugcuc

SEQ ID NO: 2623509 - RNA, 15 nt, Human
ggcccccaucucaug

SEQ ID NO: 2623510 - RNA, 21 nt, Human
ggcccccaucucaugccccug

SEQ ID NO: 2623511 - RNA, 14 nt, Human
ggcccccaucucau

SEQ ID NO: 2623512 - RNA, 15 nt, Human
ggcccccagcugugg

SEQ ID NO: 2623513 - RNA, 23 nt, Human
ggcccccagcccagggcuccugc

SEQ ID NO: 2623514 - RNA, 19 nt, Human
ggcccccagagcgccccuc

SEQ ID NO: 2623515 - RNA, 12 nt, Human
ggcccccagcug

SEQ ID NO: 2623516 - RNA, 15 nt, Human
ggcccccuccaucgg

SEQ ID NO: 2623517 - RNA, 20 nt, Human
ggccccccuccuugcucugc

SEQ ID NO: 2623518 - RNA, 13 nt, Human
ggcccccgagcug

SEQ ID NO: 2623519 - RNA, 15 nt, Human
ggcccccgagcuggg

SEQ ID NO: 2623520 - RNA, 19 nt, Human
ggccccucacccugccuua

SEQ ID NO: 2623521 - RNA, 18 nt, Human
ggccccguuucugguggu

SEQ ID NO: 2623522 - RNA, 21 nt, Human
ggccccggccccagccagagu

SEQ ID NO: 2623523 - RNA, 18 nt, Human
ggccccggccccagccag

SEQ ID NO: 2623524 - RNA, 17 nt, Human
ggccccggccccagcca

SEQ ID NO: 2623525 - RNA, 16 nt, Human
ggccccggccccagcc

SEQ ID NO: 2623526 - RNA, 14 nt, Human
ggccccggccccag

SEQ ID NO: 2623527 - RNA, 21 nt, Human
ggccccgcuuguccagcgccu

SEQ ID NO: 2623528 - RNA, 13 nt, Human
ggccccggcccca

SEQ ID NO: 2623529 - RNA, 19 nt, Human
ggccccgcuuguccagcgc

SEQ ID NO: 2623530 - RNA, 17 nt, Human
ggccccgaggacccaga

SEQ ID NO: 2623531 - RNA, 18 nt, Human
ggcccccuggucucuggu

SEQ ID NO: 2623532 - RNA, 14 nt, Human
ggcccccuguccuc

SEQ ID NO: 2623533 - RNA, 17 nt, Human
ggcccccuggucucugg

SEQ ID NO: 2623534 - RNA, 18 nt, Human
ggccccgccgccugguac

SEQ ID NO: 2623535 - RNA, 15 nt, Human
ggccccgccgccugg

SEQ ID NO: 2623536 - RNA, 19 nt, Human
ggccccgaggacccagacc

SEQ ID NO: 2623537 - RNA, 18 nt, Human
ggccccgaggacccagac

SEQ ID NO: 2623538 - RNA, 14 nt, Human
ggccccgccgccug

SEQ ID NO: 2623539 - RNA, 21 nt, Human
ggcagaguuuguguguugucu

SEQ ID NO: 2623540 - RNA, 23 nt, Human
ggcagaguuguaaauauauaaau

SEQ ID NO: 2623541 - RNA, 22 nt, Human
ggcagaguuguaaauauauaaa

SEQ ID NO: 2623542 - RNA, 18 nt, Human
ggcagaguuguaaauaua

SEQ ID NO: 2623543 - RNA, 17 nt, Human
ggcagaguuguaaauau

SEQ ID NO: 2623544 - RNA, 16 nt, Human
ggcagaguuguaaaua

SEQ ID NO: 2623545 - RNA, 15 nt, Human
ggcagaguuguaaau

SEQ ID NO: 2623546 - RNA, 14 nt, Human
ggcagaguuguaaa

SEQ ID NO: 2623547 - RNA, 23 nt, Human
ggcagaguugaagacagagcuac

SEQ ID NO: 2623548 - RNA, 23 nt, Human
ggcagauacaggaaaagcugcug

SEQ ID NO: 2623549 - RNA, 15 nt, Human
ggcagauaaucagcc

SEQ ID NO: 2623550 - RNA, 18 nt, Human
ggcagauaaucagccucu

SEQ ID NO: 2623551 - RNA, 19 nt, Human
ggcagauaaucagccucuu

SEQ ID NO: 2623552 - RNA, 20 nt, Human
ggcagauaaucagccucuua

SEQ ID NO: 2623553 - RNA, 17 nt, Human
ggcagaggaaagcaaag

SEQ ID NO: 2623554 - RNA, 21 nt, Human
ggcagagcuuggacuggaugc

SEQ ID NO: 2623555 - RNA, 17 nt, Human
ggcagagcuuggacugg

SEQ ID NO: 2623556 - RNA, 13 nt, Human
ggcagagcuucuu

SEQ ID NO: 2623557 - RNA, 15 nt, Human
ggcagaggacagauc

SEQ ID NO: 2623558 - RNA, 12 nt, Human
ggcagaggcugg

SEQ ID NO: 2623559 - RNA, 13 nt, Human
ggcagaggcugga

SEQ ID NO: 2623560 - RNA, 10 nt, Human
ggcagcagau

SEQ ID NO: 2623561 - RNA, 18 nt, Human
ggcagcagaagggggugg

SEQ ID NO: 2623562 - RNA, 21 nt, Human
ggcagcaccugucuccuuuca

SEQ ID NO: 2623563 - RNA, 21 nt, Human
ggcagcacagagacccccgga

SEQ ID NO: 2623564 - RNA, 14 nt, Human
ggcagcacagagac

SEQ ID NO: 2623565 - RNA, 24 nt, Human
ggcagauuuagugaaagcuagaga

SEQ ID NO: 2623566 - RNA, 20 nt, Human
ggcagaucugugccccaugc

SEQ ID NO: 2623567 - RNA, 13 nt, Human
ggcagauugaaaa

SEQ ID NO: 2623568 - RNA, 16 nt, Human
ggcagauccaggacua

SEQ ID NO: 2623569 - RNA, 14 nt, Human
ggcagauccaggac

SEQ ID NO: 2623570 - RNA, 18 nt, Human
ggcagaucaccagagguc

SEQ ID NO: 2623571 - RNA, 15 nt, Human
ggcagaucugugccc

SEQ ID NO: 2623572 - RNA, 16 nt, Human
ggcagaucugugcccc

SEQ ID NO: 2623573 - RNA, 17 nt, Human
ggcagaucugugcccca

SEQ ID NO: 2623574 - RNA, 18 nt, Human
ggcagaucugugccccau

SEQ ID NO: 2623575 - RNA, 14 nt, Human
ggcaggaaggcuga

SEQ ID NO: 2623576 - RNA, 23 nt, Human
ggcaggaaggagagccugcugca

SEQ ID NO: 2623577 - RNA, 13 nt, Human
ggcagguccaggg

SEQ ID NO: 2623578 - RNA, 18 nt, Human
ggcagcuugccccggccc

SEQ ID NO: 2623579 - RNA, 15 nt, Human
ggcagcuugccccgg

SEQ ID NO: 2623580 - RNA, 13 nt, Human
ggcagcuugcccc

SEQ ID NO: 2623581 - RNA, 21 nt, Human
ggcagcuuuaaccauuaaaac

SEQ ID NO: 2623582 - RNA, 11 nt, Human
ggcaggaaaag

SEQ ID NO: 2623583 - RNA, 15 nt, Human
ggcaggaaggagagc

SEQ ID NO: 2623584 - RNA, 16 nt, Human
ggcaggaaggagagcc

SEQ ID NO: 2623585 - RNA, 14 nt, Human
ggcagguccccaga

SEQ ID NO: 2623586 - RNA, 19 nt, Human
ggcagguccccagacucca

SEQ ID NO: 2623587 - RNA, 23 nt, Human
ggcaggucuugaacuccuggccu

SEQ ID NO: 2623588 - RNA, 20 nt, Human
ggcaggugccuccaggugug

SEQ ID NO: 2623589 - RNA, 18 nt, Human
ggcaggugccuccaggug

SEQ ID NO: 2623590 - RNA, 16 nt, Human
ggcaggugccuccagg

SEQ ID NO: 2623591 - RNA, 15 nt, Human
ggcaggugccuccag

SEQ ID NO: 2623592 - RNA, 21 nt, Human
ggcaggugccuccaggugugc

SEQ ID NO: 2623593 - RNA, 14 nt, Human
ggcaggugccucca

SEQ ID NO: 2623594 - RNA, 13 nt, Human
ggcaggugccucc

SEQ ID NO: 2623595 - RNA, 22 nt, Human
ggcaggugccaugucugggaac

SEQ ID NO: 2623596 - RNA, 21 nt, Human
ggcaggugccaugucugggaa

SEQ ID NO: 2623597 - RNA, 16 nt, Human
ggcaggugaccuucug

SEQ ID NO: 2623598 - RNA, 21 nt, Human
ggcagcucaccucucccuugg

SEQ ID NO: 2623599 - RNA, 18 nt, Human
ggcagcucaccucucccu

SEQ ID NO: 2623600 - RNA, 22 nt, Human
ggcagcucaccucucccuugga

SEQ ID NO: 2623601 - RNA, 16 nt, Human
ggcagcucaccucucc

SEQ ID NO: 2623602 - RNA, 19 nt, Human
ggcagcugcgguccaccca

SEQ ID NO: 2623603 - RNA, 21 nt, Human
ggcagcuugaggguugggcug

SEQ ID NO: 2623604 - RNA, 19 nt, Human
ggaucaugguguaauaaga

SEQ ID NO: 2623605 - RNA, 16 nt, Human
ggaucaugguguaaua

SEQ ID NO: 2623606 - RNA, 21 nt, Human
ggaucaugguguaauaagaca

SEQ ID NO: 2623607 - RNA, 19 nt, Human
ggaucaucugccgugccug

SEQ ID NO: 2623608 - RNA, 15 nt, Human
ggauccacaccuggu

SEQ ID NO: 2623609 - RNA, 14 nt, Human
ggauccacaccugg

SEQ ID NO: 2623610 - RNA, 13 nt, Human
ggauccagaaggg

SEQ ID NO: 2623611 - RNA, 23 nt, Human
ggaucccaccccauuuucugugg

SEQ ID NO: 2623612 - RNA, 19 nt, Human
ggcaacccccagccugcua

SEQ ID NO: 2623613 - RNA, 16 nt, Human
ggaucagaugaacucu

SEQ ID NO: 2623614 - RNA, 16 nt, Human
ggaucagauugcaugu

SEQ ID NO: 2623615 - RNA, 12 nt, Human
ggaucagaauag

SEQ ID NO: 2623616 - RNA, 19 nt, Human
ggaucagcccucauuuugu

SEQ ID NO: 2623617 - RNA, 21 nt, Human
ggaucagaugaacucuuagaa

SEQ ID NO: 2623618 - RNA, 21 nt, Human
ggaucagucugauucccaagc

SEQ ID NO: 2623619 - RNA, 15 nt, Human
ggcaaccuugucucu

SEQ ID NO: 2623620 - RNA, 19 nt, Human
ggcaaccuugucucuaugc

SEQ ID NO: 2623621 - RNA, 18 nt, Human
ggcaacugcauuggcuuu

SEQ ID NO: 2623622 - RNA, 13 nt, Human
ggcaacugaggca

SEQ ID NO: 2623623 - RNA, 14 nt, Human
ggcaacugaggcag

SEQ ID NO: 2623624 - RNA, 15 nt, Human
ggcaacugaggcaga

SEQ ID NO: 2623625 - RNA, 15 nt, Human
ggcaaggcugucaau

SEQ ID NO: 2623626 - RNA, 23 nt, Human
ggcaacuugggaacuagacuccc

SEQ ID NO: 2623627 - RNA, 18 nt, Human
ggcaacuugggaacuaga

SEQ ID NO: 2623628 - RNA, 19 nt, Human
ggcaacugcauuggcuuug

SEQ ID NO: 2623629 - RNA, 19 nt, Human
ggcaacugaggcagacagc

SEQ ID NO: 2623630 - RNA, 20 nt, Human
ggcaacugaggcagacagca

SEQ ID NO: 2623631 - RNA, 23 nt, Human
ggcaacugaggcagacagcagcu

SEQ ID NO: 2623632 - RNA, 16 nt, Human
ggcacccggccccugc

SEQ ID NO: 2623633 - RNA, 15 nt, Human
ggcacccggccccug

SEQ ID NO: 2623634 - RNA, 19 nt, Human
ggcacccccuggagagaag

SEQ ID NO: 2623635 - RNA, 18 nt, Human
ggcacccccuggagagaa

SEQ ID NO: 2623636 - RNA, 17 nt, Human
ggcaccuaauccaggca

SEQ ID NO: 2623637 - RNA, 18 nt, Human
ggcaccuaauccaggcag

SEQ ID NO: 2623638 - RNA, 19 nt, Human
ggcaccuaauccaggcaga

SEQ ID NO: 2623639 - RNA, 16 nt, Human
ggcacccccuggagag

SEQ ID NO: 2623640 - RNA, 15 nt, Human
ggcacccccuggaga

SEQ ID NO: 2623641 - RNA, 14 nt, Human
ggcacccccuggag

SEQ ID NO: 2623642 - RNA, 17 nt, Human
ggcacccggccccugcu

SEQ ID NO: 2623643 - RNA, 13 nt, Human
ggcaaggcugugc

SEQ ID NO: 2623644 - RNA, 22 nt, Human
ggcaacuuuccuuguuccccau

SEQ ID NO: 2623645 - RNA, 21 nt, Human
ggcaagggccaugcugaaggg

SEQ ID NO: 2623646 - RNA, 14 nt, Human
ggcaaggcugugcu

SEQ ID NO: 2623647 - RNA, 19 nt, Human
ggcaagggccaugcugaag

SEQ ID NO: 2623648 - RNA, 16 nt, Human
ggcaaggcugucaauu

SEQ ID NO: 2623649 - RNA, 13 nt, Human
ggcaagugauuga

SEQ ID NO: 2623650 - RNA, 23 nt, Human
ggcaagucccugacucucuguga

SEQ ID NO: 2623651 - RNA, 22 nt, Human
ggcaagucccugacucucugug

SEQ ID NO: 2623652 - RNA, 16 nt, Human
ggcagagcagagacca

SEQ ID NO: 2623653 - RNA, 15 nt, Human
ggcagagcagagacc

SEQ ID NO: 2623654 - RNA, 20 nt, Human
ggcagagcagagaccauccc

SEQ ID NO: 2623655 - RNA, 16 nt, Human
ggcaccucacaggccc

SEQ ID NO: 2623656 - RNA, 19 nt, Human
ggcaccucacaggccccag

SEQ ID NO: 2623657 - RNA, 20 nt, Human
ggcacccccuggagagaagu

SEQ ID NO: 2623658 - RNA, 22 nt, Human
ggcaccuaauccaggcagaucc

SEQ ID NO: 2623659 - RNA, 18 nt, Human
ggcaccuauagucccagc

SEQ ID NO: 2623660 - RNA, 19 nt, Human
ggcaccuauagucccagcu

SEQ ID NO: 2623661 - RNA, 22 nt, Human
ggcaccuauagucccagcuacu

SEQ ID NO: 2623662 - RNA, 23 nt, Human
ggcaccuccuacgucaaacauga

SEQ ID NO: 2623663 - RNA, 20 nt, Human
ggcaccugcagguugggcca

SEQ ID NO: 2623664 - RNA, 16 nt, Human
ggcaccugcagguugg

SEQ ID NO: 2623665 - RNA, 17 nt, Human
ggcaccuauaaaacagg

SEQ ID NO: 2623666 - RNA, 12 nt, Human
ggcagagcagag

SEQ ID NO: 2623667 - RNA, 15 nt, Human
ggagggcuccagaca

SEQ ID NO: 2623668 - RNA, 14 nt, Human
ggagggcuccagac

SEQ ID NO: 2623669 - RNA, 20 nt, Human
ggagggcuagaaucuggaga

SEQ ID NO: 2623670 - RNA, 19 nt, Human
ggagggcuagaacuggaga

SEQ ID NO: 2623671 - RNA, 22 nt, Human
ggagggcuagaaucuggagagc

SEQ ID NO: 2623672 - RNA, 17 nt, Human
ggagggcuccagacaca

SEQ ID NO: 2623673 - RNA, 21 nt, Human
ggaguccaggccauggaggca

SEQ ID NO: 2623674 - RNA, 19 nt, Human
ggaguccacucccagugcu

SEQ ID NO: 2623675 - RNA, 16 nt, Human
ggagucccaaggaaag

SEQ ID NO: 2623676 - RNA, 17 nt, Human
ggagucccaaggaaagc

SEQ ID NO: 2623677 - RNA, 16 nt, Human
ggaguccacuuuguuu

SEQ ID NO: 2623678 - RNA, 15 nt, Human
ggaguccacucccag

SEQ ID NO: 2623679 - RNA, 17 nt, Human
ggagucaucucaaccau

SEQ ID NO: 2623680 - RNA, 23 nt, Human
ggagucaucucaaccauccccuc

SEQ ID NO: 2623681 - RNA, 16 nt, Human
ggagggcuggaaucug

SEQ ID NO: 2623682 - RNA, 14 nt, Human
ggagggcuggaauc

SEQ ID NO: 2623683 - RNA, 22 nt, Human
ggagggcugucaucugugcacu

SEQ ID NO: 2623684 - RNA, 20 nt, Human
ggagggcuggaaucuggaga

SEQ ID NO: 2623685 - RNA, 13 nt, Human
ggaggggacgcug

SEQ ID NO: 2623686 - RNA, 20 nt, Human
ggaggggacuauuuaugaag

SEQ ID NO: 2623687 - RNA, 21 nt, Human
ggaggggacuauuuaugaagg

SEQ ID NO: 2623688 - RNA, 18 nt, Human
ggagucagugccaggucc

SEQ ID NO: 2623689 - RNA, 21 nt, Human
ggagucccaccuuggcugcag

SEQ ID NO: 2623690 - RNA, 20 nt, Human
ggagucccaccuuggcugca

SEQ ID NO: 2623691 - RNA, 24 nt, Human
ggagucguggggugugcugggagc

SEQ ID NO: 2623692 - RNA, 22 nt, Human
ggagucguggggugugcuggga

SEQ ID NO: 2623693 - RNA, 21 nt, Human
ggagucuccagugguugcugu

SEQ ID NO: 2623694 - RNA, 16 nt, Human
ggagucccgucaggac

SEQ ID NO: 2623695 - RNA, 14 nt, Human
ggagucugaagcag

SEQ ID NO: 2623696 - RNA, 15 nt, Human
ggagucugaagcaga

SEQ ID NO: 2623697 - RNA, 16 nt, Human
ggagugaagaggggca

SEQ ID NO: 2623698 - RNA, 15 nt, Human
ggagugaagaggggc

SEQ ID NO: 2623699 - RNA, 12 nt, Human
ggagugaagagg

SEQ ID NO: 2623700 - RNA, 23 nt, Human
ggagugaaaccuuuagggcagcu

SEQ ID NO: 2623701 - RNA, 22 nt, Human
ggagugaaaccuuuagggcagc

SEQ ID NO: 2623702 - RNA, 21 nt, Human
ggagugaaaccuuuagggcag

SEQ ID NO: 2623703 - RNA, 16 nt, Human
ggagugacagaggcag

SEQ ID NO: 2623704 - RNA, 11 nt, Human
ggagugacaga

SEQ ID NO: 2623705 - RNA, 16 nt, Human
ggaucacagccucuga

SEQ ID NO: 2623706 - RNA, 14 nt, Human
ggaucacagagaca

SEQ ID NO: 2623707 - RNA, 17 nt, Human
ggauaggagccugcugg

SEQ ID NO: 2623708 - RNA, 13 nt, Human
ggaucacagggcc

SEQ ID NO: 2623709 - RNA, 14 nt, Human
ggaucacagggccc

SEQ ID NO: 2623710 - RNA, 17 nt, Human
ggaucacagggccccag

SEQ ID NO: 2623711 - RNA, 13 nt, Human
ggaucacuggagc

SEQ ID NO: 2623712 - RNA, 16 nt, Human
ggaucagaaauacaga

SEQ ID NO: 2623713 - RNA, 14 nt, Human
ggaucagaaauaca

SEQ ID NO: 2623714 - RNA, 17 nt, Human
ggaucagaacagcagag

SEQ ID NO: 2623715 - RNA, 16 nt, Human
ggaucagaacagcaga

SEQ ID NO: 2623716 - RNA, 14 nt, Human
ggaucacuggagcc

SEQ ID NO: 2623717 - RNA, 17 nt, Human
ggaucacuggagcccag

SEQ ID NO: 2623718 - RNA, 18 nt, Human
ggaucacuggagcccagg

SEQ ID NO: 2623719 - RNA, 19 nt, Human
ggaucacuggagcccagga

SEQ ID NO: 2623720 - RNA, 15 nt, Human
ggauaggagccugcu

SEQ ID NO: 2623721 - RNA, 14 nt, Human
ggauaggagccugc

SEQ ID NO: 2623722 - RNA, 18 nt, Human
ggauaggaaaaaugagua

SEQ ID NO: 2623723 - RNA, 13 nt, Human
ggauagcauuuuu

SEQ ID NO: 2623724 - RNA, 23 nt, Human
ggagugaggaauaguugagcccc

SEQ ID NO: 2623725 - RNA, 21 nt, Human
ggauagaugcuggcccagggc

SEQ ID NO: 2623726 - RNA, 14 nt, Human
ggauagaugugugg

SEQ ID NO: 2623727 - RNA, 15 nt, Human
ggauagaugugugga

SEQ ID NO: 2623728 - RNA, 19 nt, Human
ggauagaugcuggcccagg

SEQ ID NO: 2623729 - RNA, 20 nt, Human
ggauagaugcuggcccaggg

SEQ ID NO: 2623730 - RNA, 13 nt, Human
ggauagaugugug

SEQ ID NO: 2623731 - RNA, 18 nt, Human
ggauagaugcuggcccag

SEQ ID NO: 2623732 - RNA, 21 nt, Human
ggagugaggaauaguugagcc

SEQ ID NO: 2623733 - RNA, 21 nt, Human
ggagugaggaaggcaggaaga

SEQ ID NO: 2623734 - RNA, 21 nt, Human
ggagugaguguggcuccccuc

SEQ ID NO: 2623735 - RNA, 21 nt, Human
ggagugacagaggcagcccca

SEQ ID NO: 2623736 - RNA, 19 nt, Human
ggagugacagaggcagccc

SEQ ID NO: 2623737 - RNA, 18 nt, Human
ggagugacagaggcagcc

SEQ ID NO: 2623738 - RNA, 17 nt, Human
ggagugacagaggcagc

SEQ ID NO: 2623739 - RNA, 21 nt, Human
ggagugaguugauagcacaga

SEQ ID NO: 2623740 - RNA, 14 nt, Human
ggagugagcugguu

SEQ ID NO: 2623741 - RNA, 12 nt, Human
ggagugagcugg

SEQ ID NO: 2623742 - RNA, 20 nt, Human
ggagugaagaggggcagccc

SEQ ID NO: 2623743 - RNA, 19 nt, Human
ggagugaagaggggcagcc

SEQ ID NO: 2623744 - RNA, 18 nt, Human
ggagugaagaggggcagc

SEQ ID NO: 2623745 - RNA, 17 nt, Human
ggagugaagaggggcag

SEQ ID NO: 2623746 - RNA, 23 nt, Human
ggagugaagaggggcagcccuug

SEQ ID NO: 2623747 - RNA, 22 nt, Human
ggagugaagaggggcagcccuu

SEQ ID NO: 2623748 - RNA, 15 nt, Human
ggagugagaugccug

SEQ ID NO: 2623749 - RNA, 20 nt, Human
ggaggacgcucucuggccuu

SEQ ID NO: 2623750 - RNA, 21 nt, Human
ggaggacgcucucuggccuuc

SEQ ID NO: 2623751 - RNA, 19 nt, Human
ggaggacuagaaccuggag

SEQ ID NO: 2623752 - RNA, 16 nt, Human
ggaggacuagaaccug

SEQ ID NO: 2623753 - RNA, 22 nt, Human
ggaggacuagaaccuggagggc

SEQ ID NO: 2623754 - RNA, 21 nt, Human
ggaggacuagaaccuggaggg

SEQ ID NO: 2623755 - RNA, 21 nt, Human
ggaggacugccccgugcagac

SEQ ID NO: 2623756 - RNA, 17 nt, Human
ggaggagcaaaggcuga

SEQ ID NO: 2623757 - RNA, 13 nt, Human
ggaggagaaugag

SEQ ID NO: 2623758 - RNA, 12 nt, Human
ggaggagcaaag

SEQ ID NO: 2623759 - RNA, 21 nt, Human
ggagccgggaaagaagagccg

SEQ ID NO: 2623760 - RNA, 20 nt, Human
ggagccgcuggcagaaggga

SEQ ID NO: 2623761 - RNA, 14 nt, Human
ggagccgcuggcag

SEQ ID NO: 2623762 - RNA, 13 nt, Human
ggagccgcuggca

SEQ ID NO: 2623763 - RNA, 19 nt, Human
ggaggacgcucucuggccu

SEQ ID NO: 2623764 - RNA, 21 nt, Human
ggagccgaggccuaccccgca

SEQ ID NO: 2623765 - RNA, 13 nt, Human
ggagccgcagcag

SEQ ID NO: 2623766 - RNA, 21 nt, Human
ggagccgagaucacgccacug

SEQ ID NO: 2623767 - RNA, 13 nt, Human
ggagcccuugggu

SEQ ID NO: 2623768 - RNA, 22 nt, Human
ggaggaggccugggggcaggga

SEQ ID NO: 2623769 - RNA, 12 nt, Human
ggaggaggccug

SEQ ID NO: 2623770 - RNA, 22 nt, Human
ggaggaggccaccucuccaagg

SEQ ID NO: 2623771 - RNA, 19 nt, Human
ggaggaggccaccucucca

SEQ ID NO: 2623772 - RNA, 16 nt, Human
ggaggaggccaccucu

SEQ ID NO: 2623773 - RNA, 15 nt, Human
ggaggaggccaccuc

SEQ ID NO: 2623774 - RNA, 14 nt, Human
ggaggaggccaccu

SEQ ID NO: 2623775 - RNA, 13 nt, Human
ggaggaggccacc

SEQ ID NO: 2623776 - RNA, 13 nt, Human
ggaggaggaggca

SEQ ID NO: 2623777 - RNA, 14 nt, Human
ggaggaggaggcaa

SEQ ID NO: 2623778 - RNA, 12 nt, Human
ggaggagcaggg

SEQ ID NO: 2623779 - RNA, 13 nt, Human
ggaggagagaaga

SEQ ID NO: 2623780 - RNA, 17 nt, Human
ggaggagcagugcaggc

SEQ ID NO: 2623781 - RNA, 15 nt, Human
ggaggaggaaggcaa

SEQ ID NO: 2623782 - RNA, 13 nt, Human
ggaggaggaaggc

SEQ ID NO: 2623783 - RNA, 17 nt, Human
ggaggagcuugggggau

SEQ ID NO: 2623784 - RNA, 13 nt, Human
ggaggagggagag

SEQ ID NO: 2623785 - RNA, 12 nt, Human
ggaggagggaga

SEQ ID NO: 2623786 - RNA, 19 nt, Human
ggaggagggcggggggcac

SEQ ID NO: 2623787 - RNA, 15 nt, Human
ggaggaggugccaac

SEQ ID NO: 2623788 - RNA, 20 nt, Human
ggaggagguggcagcccugu

SEQ ID NO: 2623789 - RNA, 23 nt, Human
ggaggagguuuaggucaagaaga

SEQ ID NO: 2623790 - RNA, 16 nt, Human
ggaggaucacuggagc

SEQ ID NO: 2623791 - RNA, 17 nt, Human
ggaggaucacuggagcc

SEQ ID NO: 2623792 - RNA, 19 nt, Human
ggaggaucacuggagccca

SEQ ID NO: 2623793 - RNA, 20 nt, Human
ggaggaucacuggagcccag

SEQ ID NO: 2623794 - RNA, 21 nt, Human
ggaggaucacuggagcccagg

SEQ ID NO: 2623795 - RNA, 23 nt, Human
ggagggcuagaaccuggcagguu

SEQ ID NO: 2623796 - RNA, 13 nt, Human
ggagggcagcagg

SEQ ID NO: 2623797 - RNA, 15 nt, Human
ggagggcagcagggc

SEQ ID NO: 2623798 - RNA, 16 nt, Human
ggagggcagcagggcu

SEQ ID NO: 2623799 - RNA, 17 nt, Human
ggagggcagcagggcua

SEQ ID NO: 2623800 - RNA, 13 nt, Human
ggagggcuccaga

SEQ ID NO: 2623801 - RNA, 12 nt, Human
ggagggcuccag

SEQ ID NO: 2623802 - RNA, 21 nt, Human
ggagggcacauuccuugccug

SEQ ID NO: 2623803 - RNA, 23 nt, Human
ggagggcaagggccaugcugaag

SEQ ID NO: 2623804 - RNA, 16 nt, Human
ggagggcagcagaagg

SEQ ID NO: 2623805 - RNA, 21 nt, Human
ggagggcaagggccaugcuga

SEQ ID NO: 2623806 - RNA, 20 nt, Human
ggagggauuggccgcuuggc

SEQ ID NO: 2623807 - RNA, 22 nt, Human
ggagggauucugguuccagggu

SEQ ID NO: 2623808 - RNA, 12 nt, Human
ggagggauuugg

SEQ ID NO: 2623809 - RNA, 12 nt, Human
ggagggagggcu

SEQ ID NO: 2623810 - RNA, 15 nt, Human
ggagggaggcucagg

SEQ ID NO: 2623811 - RNA, 16 nt, Human
ggagggaggcucaggu

SEQ ID NO: 2623812 - RNA, 16 nt, Human
ggagggagcagacagg

SEQ ID NO: 2623813 - RNA, 13 nt, Human
ggagggagaggga

SEQ ID NO: 2623814 - RNA, 13 nt, Human
ggagggagaugga

SEQ ID NO: 2623815 - RNA, 15 nt, Human
ggaggauguucuggg

SEQ ID NO: 2623816 - RNA, 13 nt, Human
ggaggaugggcuc

SEQ ID NO: 2623817 - RNA, 14 nt, Human
ggaggauggagaga

SEQ ID NO: 2623818 - RNA, 21 nt, Human
ggaggauggagagaggggaau

SEQ ID NO: 2623819 - RNA, 22 nt, Human
ggagggacaaguggacucaggg

SEQ ID NO: 2623820 - RNA, 13 nt, Human
ggagggacauggc

SEQ ID NO: 2623821 - RNA, 21 nt, Human
ggagggaaugaaccuggaggg

SEQ ID NO: 2623822 - RNA, 15 nt, Human
ggagggaauugaggu

SEQ ID NO: 2623823 - RNA, 17 nt, Human
ggagggaauugaggucu

SEQ ID NO: 2623824 - RNA, 19 nt, Human
ggagggaauugaggucugc

SEQ ID NO: 2623825 - RNA, 23 nt, Human
ggaggaucacuugaguccagaag

SEQ ID NO: 2623826 - RNA, 17 nt, Human
ggaggaucucuugagcc

SEQ ID NO: 2623827 - RNA, 21 nt, Human
ggaggaucucuugagccuggg

SEQ ID NO: 2623828 - RNA, 17 nt, Human
ggaggaggugccaacag

SEQ ID NO: 2623829 - RNA, 22 nt, Human
ggaggaucacuggagcccagga

SEQ ID NO: 2623830 - RNA, 12 nt, Human
ggaggauggaga

SEQ ID NO: 2623831 - RNA, 13 nt, Human
ggaggauggagag

SEQ ID NO: 2623832 - RNA, 20 nt, Human
ggaggaucuuuugaacccag

SEQ ID NO: 2623833 - RNA, 20 nt, Human
ggaagccagcaggcucucag

SEQ ID NO: 2623834 - RNA, 14 nt, Human
ggaaggagagccug

SEQ ID NO: 2623835 - RNA, 15 nt, Human
ggaaggagagccugc

SEQ ID NO: 2623836 - RNA, 16 nt, Human
ggaaggagagccugcu

SEQ ID NO: 2623837 - RNA, 17 nt, Human
ggaaggagagccugcug

SEQ ID NO: 2623838 - RNA, 19 nt, Human
ggaccagcucaggacagau

SEQ ID NO: 2623839 - RNA, 22 nt, Human
ggaccagcucaggacagaugcc

SEQ ID NO: 2623840 - RNA, 19 nt, Human
ggaccagcuggggcguggg

SEQ ID NO: 2623841 - RNA, 12 nt, Human
ggaccagcuggg

SEQ ID NO: 2623842 - RNA, 22 nt, Human
ggaccagcuggggcguggggag

SEQ ID NO: 2623843 - RNA, 15 nt, Human
ggaccagcuuuuccc

SEQ ID NO: 2623844 - RNA, 17 nt, Human
ggaccagcuuuucccaa

SEQ ID NO: 2623845 - RNA, 22 nt, Human
ggaccagcuuuucccaaaagcc

SEQ ID NO: 2623846 - RNA, 14 nt, Human
ggaccaggacagga

SEQ ID NO: 2623847 - RNA, 16 nt, Human
ggaccagcucaggaca

SEQ ID NO: 2623848 - RNA, 18 nt, Human
ggaccagcucaggacaga

SEQ ID NO: 2623849 - RNA, 13 nt, Human
ggaaggagggagg

SEQ ID NO: 2623850 - RNA, 13 nt, Human
ggaaggagugaga

SEQ ID NO: 2623851 - RNA, 20 nt, Human
ggaaggaggguuagggaggg

SEQ ID NO: 2623852 - RNA, 14 nt, Human
ggacccagacccag

SEQ ID NO: 2623853 - RNA, 13 nt, Human
ggacccagaccca

SEQ ID NO: 2623854 - RNA, 17 nt, Human
ggacccagacccagugg

SEQ ID NO: 2623855 - RNA, 16 nt, Human
ggacccagacccagug

SEQ ID NO: 2623856 - RNA, 21 nt, Human
ggacccagaggaaggggccag

SEQ ID NO: 2623857 - RNA, 21 nt, Human
ggaccaggacuauagcccagg

SEQ ID NO: 2623858 - RNA, 17 nt, Human
ggaccaggacucccucc

SEQ ID NO: 2623859 - RNA, 11 nt, Human
ggaccaggacu

SEQ ID NO: 2623860 - RNA, 17 nt, Human
ggaccaggacaggacca

SEQ ID NO: 2623861 - RNA, 15 nt, Human
ggaccaggacucccu

SEQ ID NO: 2623862 - RNA, 14 nt, Human
ggacccagggauga

SEQ ID NO: 2623863 - RNA, 22 nt, Human
ggacccaugaguuggggucugg

SEQ ID NO: 2623864 - RNA, 19 nt, Human
ggacccaucacgccugugc

SEQ ID NO: 2623865 - RNA, 16 nt, Human
ggaccucugcucugag

SEQ ID NO: 2623866 - RNA, 14 nt, Human
ggaccucugcucug

SEQ ID NO: 2623867 - RNA, 13 nt, Human
ggaccucugcucu

SEQ ID NO: 2623868 - RNA, 12 nt, Human
ggaccucugcuc

SEQ ID NO: 2623869 - RNA, 12 nt, Human
ggaccucuccca

SEQ ID NO: 2623870 - RNA, 14 nt, Human
ggaccucucccagg

SEQ ID NO: 2623871 - RNA, 15 nt, Human
ggaccucucccaggg

SEQ ID NO: 2623872 - RNA, 22 nt, Human
ggacugcaagcagggcucugcc

SEQ ID NO: 2623873 - RNA, 16 nt, Human
ggacucuugcucuuuc

SEQ ID NO: 2623874 - RNA, 23 nt, Human
ggacugcacagcguccuguccac

SEQ ID NO: 2623875 - RNA, 22 nt, Human
ggacugcacagcguccugucca

SEQ ID NO: 2623876 - RNA, 17 nt, Human
ggacucugggguuuuua

SEQ ID NO: 2623877 - RNA, 11 nt, Human
ggacucugccu

SEQ ID NO: 2623878 - RNA, 20 nt, Human
ggacucucagucucugagca

SEQ ID NO: 2623879 - RNA, 21 nt, Human
ggacucucagucucugagcag

SEQ ID NO: 2623880 - RNA, 19 nt, Human
ggacucugaagccucuggg

SEQ ID NO: 2623881 - RNA, 17 nt, Human
ggacucugaagccucug

SEQ ID NO: 2623882 - RNA, 17 nt, Human
ggacucucagucucuga

SEQ ID NO: 2623883 - RNA, 18 nt, Human
ggacucucagucucugag

SEQ ID NO: 2623884 - RNA, 20 nt, Human
ggacucugcacaugucuugu

SEQ ID NO: 2623885 - RNA, 15 nt, Human
ggacucugcacauga

SEQ ID NO: 2623886 - RNA, 21 nt, Human
ggacucugcacaugucuugua

SEQ ID NO: 2623887 - RNA, 13 nt, Human
ggacucugcacau

SEQ ID NO: 2623888 - RNA, 21 nt, Human
ggacucugaggcucuuucugg

SEQ ID NO: 2623889 - RNA, 11 nt, Human
ggacucugagg

SEQ ID NO: 2623890 - RNA, 13 nt, Human
ggacucugaggcu

SEQ ID NO: 2623891 - RNA, 12 nt, Human
ggacuccucugu

SEQ ID NO: 2623892 - RNA, 14 nt, Human
ggacuccucugucc

SEQ ID NO: 2623893 - RNA, 13 nt, Human
ggaccuuccugcc

SEQ ID NO: 2623894 - RNA, 12 nt, Human
ggaccuuccugc

SEQ ID NO: 2623895 - RNA, 15 nt, Human
ggaccuuccugccac

SEQ ID NO: 2623896 - RNA, 15 nt, Human
ggacuccucugucca

SEQ ID NO: 2623897 - RNA, 17 nt, Human
ggaccugguacccuccu

SEQ ID NO: 2623898 - RNA, 17 nt, Human
ggaccuggugcugccuc

SEQ ID NO: 2623899 - RNA, 18 nt, Human
ggaccuuaggccuuccuc

SEQ ID NO: 2623900 - RNA, 21 nt, Human
ggaccuuaggccuuccucucu

SEQ ID NO: 2623901 - RNA, 15 nt, Human
ggaccuuaucugugc

SEQ ID NO: 2623902 - RNA, 22 nt, Human
ggaccuuaucugugcgugaaac

SEQ ID NO: 2623903 - RNA, 17 nt, Human
ggaccugccaggcaggg

SEQ ID NO: 2623904 - RNA, 16 nt, Human
ggaccugccaggcagg

SEQ ID NO: 2623905 - RNA, 14 nt, Human
ggaccugccaggca

SEQ ID NO: 2623906 - RNA, 17 nt, Human
ggaccugagucugcuau

SEQ ID NO: 2623907 - RNA, 17 nt, Human
ggaccucugcucugagg

SEQ ID NO: 2623908 - RNA, 23 nt, Human
ggaccugccuccugccugccccu

SEQ ID NO: 2623909 - RNA, 15 nt, Human
ggaccugccuguagc

SEQ ID NO: 2623910 - RNA, 14 nt, Human
ggaccuggcugcca

SEQ ID NO: 2623911 - RNA, 19 nt, Human
ggaccugccuccugccugc

SEQ ID NO: 2623912 - RNA, 14 nt, Human
ggaccugccuguag

SEQ ID NO: 2623913 - RNA, 22 nt, Human
ggaccugccuccugccugcccc

SEQ ID NO: 2623914 - RNA, 13 nt, Human
ggagauggaguuc

SEQ ID NO: 2623915 - RNA, 20 nt, Human
ggagauggaaguugcaguga

SEQ ID NO: 2623916 - RNA, 15 nt, Human
ggagaugcuccuugg

SEQ ID NO: 2623917 - RNA, 20 nt, Human
ggagagggucuggagaagca

SEQ ID NO: 2623918 - RNA, 14 nt, Human
ggagagggucugga

SEQ ID NO: 2623919 - RNA, 17 nt, Human
ggagagggucuggagaa

SEQ ID NO: 2623920 - RNA, 18 nt, Human
ggagagggucuggagaag

SEQ ID NO: 2623921 - RNA, 15 nt, Human
ggagaggggcacagg

SEQ ID NO: 2623922 - RNA, 18 nt, Human
ggagaggggaagggccag

SEQ ID NO: 2623923 - RNA, 22 nt, Human
ggagaggggaagggccagucug

SEQ ID NO: 2623924 - RNA, 24 nt, Human
ggagagggaugaggugcugggagg

SEQ ID NO: 2623925 - RNA, 14 nt, Human
ggagaggggcagaa

SEQ ID NO: 2623926 - RNA, 20 nt, Human
ggagauuuacaacuggggga

SEQ ID NO: 2623927 - RNA, 17 nt, Human
ggagauugagaaggaga

SEQ ID NO: 2623928 - RNA, 16 nt, Human
ggagauugagaaggag

SEQ ID NO: 2623929 - RNA, 14 nt, Human
ggagauugagaagg

SEQ ID NO: 2623930 - RNA, 21 nt, Human
ggagauugagaaggagagaaa

SEQ ID NO: 2623931 - RNA, 20 nt, Human
ggagauugagaaggagagaa

SEQ ID NO: 2623932 - RNA, 17 nt, Human
ggagauuggacggccug

SEQ ID NO: 2623933 - RNA, 14 nt, Human
ggagaugucuucgu

SEQ ID NO: 2623934 - RNA, 22 nt, Human
ggagaugucuucguacaguucu

SEQ ID NO: 2623935 - RNA, 14 nt, Human
ggagauucagacug

SEQ ID NO: 2623936 - RNA, 13 nt, Human
ggagaugucuucg

SEQ ID NO: 2623937 - RNA, 12 nt, Human
ggagaugucuuc

SEQ ID NO: 2623938 - RNA, 19 nt, Human
ggagauggaggaaagugau

SEQ ID NO: 2623939 - RNA, 18 nt, Human
ggagaugggccuuuugga

SEQ ID NO: 2623940 - RNA, 16 nt, Human
ggagauguagcaaaac

SEQ ID NO: 2623941 - RNA, 13 nt, Human
ggagcccugggag

SEQ ID NO: 2623942 - RNA, 20 nt, Human
ggagcccuuaucugugcuca

SEQ ID NO: 2623943 - RNA, 22 nt, Human
ggagcccuuaucugugcucagg

SEQ ID NO: 2623944 - RNA, 12 nt, Human
ggagcccuggga

SEQ ID NO: 2623945 - RNA, 16 nt, Human
ggagcccgucucagug

SEQ ID NO: 2623946 - RNA, 20 nt, Human
ggagcccgcacccccacccu

SEQ ID NO: 2623947 - RNA, 21 nt, Human
ggagcccgcacccccacccuu

SEQ ID NO: 2623948 - RNA, 14 nt, Human
ggagcccgcacccc

SEQ ID NO: 2623949 - RNA, 16 nt, Human
ggagcccgcaccccca

SEQ ID NO: 2623950 - RNA, 18 nt, Human
ggagcccgcacccccacc

SEQ ID NO: 2623951 - RNA, 14 nt, Human
ggagcaaaggcuga

SEQ ID NO: 2623952 - RNA, 22 nt, Human
ggagccccuggguggguggugg

SEQ ID NO: 2623953 - RNA, 18 nt, Human
ggagccccuucugcucag

SEQ ID NO: 2623954 - RNA, 19 nt, Human
ggagccccuucugcucagc

SEQ ID NO: 2623955 - RNA, 21 nt, Human
ggagccccuucugcucagcuc

SEQ ID NO: 2623956 - RNA, 17 nt, Human
ggagauuuuccuuccua

SEQ ID NO: 2623957 - RNA, 19 nt, Human
ggagauuuuagguguugau

SEQ ID NO: 2623958 - RNA, 16 nt, Human
ggagauuuuagguguu

SEQ ID NO: 2623959 - RNA, 16 nt, Human
ggagcaaacucugcug

SEQ ID NO: 2623960 - RNA, 16 nt, Human
ggagauuuuccuuccu

SEQ ID NO: 2623961 - RNA, 20 nt, Human
ggagcaaaaucgaugcagug

SEQ ID NO: 2623962 - RNA, 21 nt, Human
ggagaccccuuggggagcagg

SEQ ID NO: 2623963 - RNA, 15 nt, Human
ggacugucauagaaa

SEQ ID NO: 2623964 - RNA, 24 nt, Human
ggacuggguuuggaccccagcugg

SEQ ID NO: 2623965 - RNA, 23 nt, Human
ggacuggguuuggaccccagcug

SEQ ID NO: 2623966 - RNA, 21 nt, Human
ggacuggguuuggaccccagc

SEQ ID NO: 2623967 - RNA, 15 nt, Human
ggacuguauuuguga

SEQ ID NO: 2623968 - RNA, 20 nt, Human
ggacuguagggagggcggca

SEQ ID NO: 2623969 - RNA, 18 nt, Human
ggacuguagggagggcgg

SEQ ID NO: 2623970 - RNA, 20 nt, Human
ggacugccuugaauaucccc

SEQ ID NO: 2623971 - RNA, 18 nt, Human
ggacugccccgugcagac

SEQ ID NO: 2623972 - RNA, 21 nt, Human
ggacugccagucccccugccc

SEQ ID NO: 2623973 - RNA, 21 nt, Human
ggacugccccgugcagacugg

SEQ ID NO: 2623974 - RNA, 12 nt, Human
ggacugggaggu

SEQ ID NO: 2623975 - RNA, 11 nt, Human
ggacugggagg

SEQ ID NO: 2623976 - RNA, 19 nt, Human
ggacugcuaaauaaaauuu

SEQ ID NO: 2623977 - RNA, 18 nt, Human
ggacugcuaaauaaaauu

SEQ ID NO: 2623978 - RNA, 23 nt, Human
ggacuggggaugugggagggagc

SEQ ID NO: 2623979 - RNA, 17 nt, Human
ggacuggggauguggga

SEQ ID NO: 2623980 - RNA, 23 nt, Human
ggacugggccacuucuggguggg

SEQ ID NO: 2623981 - RNA, 18 nt, Human
ggacuggguuuggacccc

SEQ ID NO: 2623982 - RNA, 13 nt, Human
ggacuggguuugg

SEQ ID NO: 2623983 - RNA, 15 nt, Human
ggacugggggccaga

SEQ ID NO: 2623984 - RNA, 11 nt, Human
ggacuggguuu

SEQ ID NO: 2623985 - RNA, 17 nt, Human
ggagagggaggucacug

SEQ ID NO: 2623986 - RNA, 14 nt, Human
ggagagggaugagg

SEQ ID NO: 2623987 - RNA, 21 nt, Human
ggagagggaugaggugcuggg

SEQ ID NO: 2623988 - RNA, 13 nt, Human
ggagagggagguc

SEQ ID NO: 2623989 - RNA, 15 nt, Human
ggagagcuggugccc

SEQ ID NO: 2623990 - RNA, 17 nt, Human
ggagagcuggugcccgg

SEQ ID NO: 2623991 - RNA, 18 nt, Human
ggagagcuggugcccgga

SEQ ID NO: 2623992 - RNA, 22 nt, Human
ggagagcuggagccuggugccc

SEQ ID NO: 2623993 - RNA, 18 nt, Human
ggagagcuggagccuggu

SEQ ID NO: 2623994 - RNA, 17 nt, Human
ggagagcuggagccugg

SEQ ID NO: 2623995 - RNA, 13 nt, Human
ggagagcuggagc

SEQ ID NO: 2623996 - RNA, 17 nt, Human
ggagacuaucagcccaa

SEQ ID NO: 2623997 - RNA, 16 nt, Human
ggagacuaagcccugu

SEQ ID NO: 2623998 - RNA, 22 nt, Human
ggagacuagauuuaugaauaca

SEQ ID NO: 2623999 - RNA, 14 nt, Human
ggagacuagauugc

SEQ ID NO: 2624000 - RNA, 19 nt, Human
ggagacuagauugccuuug

SEQ ID NO: 2624001 - RNA, 17 nt, Human
ggagagcuagcagcagg

SEQ ID NO: 2624002 - RNA, 21 nt, Human
ggagagcuagcagcagggagg

SEQ ID NO: 2624003 - RNA, 20 nt, Human
ggagaccgggguauccuggg

SEQ ID NO: 2624004 - RNA, 22 nt, Human
ggagacguacguaucagcggcc

SEQ ID NO: 2624005 - RNA, 10 nt, Human
ggagacuaga

SEQ ID NO: 2624006 - RNA, 14 nt, Human
uagugcaaaucaua

SEQ ID NO: 2624007 - RNA, 16 nt, Human
uagucacacguggucu

SEQ ID NO: 2624008 - RNA, 14 nt, Human
uagugcuaagugug

SEQ ID NO: 2624009 - RNA, 19 nt, Human
uagugcuaagugugaacug

SEQ ID NO: 2624010 - RNA, 18 nt, Human
uagugcuaagugugaacu

SEQ ID NO: 2624011 - RNA, 17 nt, Human
uagugcuaagugugaac

SEQ ID NO: 2624012 - RNA, 15 nt, Human
uagugcuaaguguga

SEQ ID NO: 2624013 - RNA, 18 nt, Human
uagugaugguuccccugu

SEQ ID NO: 2624014 - RNA, 14 nt, Human
uagugaugguuccc

SEQ ID NO: 2624015 - RNA, 23 nt, Human
uagugcuuuccuuuuuuaaaaau

SEQ ID NO: 2624016 - RNA, 13 nt, Human
uagugcugugaaa

SEQ ID NO: 2624017 - RNA, 16 nt, Human
uagugcugugaaaaaa

SEQ ID NO: 2624018 - RNA, 17 nt, Human
uagugcugugaaaaaaa

SEQ ID NO: 2624019 - RNA, 21 nt, Human
uagugcuuaaaaaucauugau

SEQ ID NO: 2624020 - RNA, 12 nt, Human
uagugcugugaa

SEQ ID NO: 2624021 - RNA, 22 nt, Human
uagugcugcugaagaugaauca

SEQ ID NO: 2624022 - RNA, 13 nt, Human
uagugcugcugaa

SEQ ID NO: 2624023 - RNA, 19 nt, Human
uagugcucgcuuucuaugu

SEQ ID NO: 2624024 - RNA, 18 nt, Human
uagucaaauugugugaaa

SEQ ID NO: 2624025 - RNA, 23 nt, Human
uagucaagaaaaauuauuguaua

SEQ ID NO: 2624026 - RNA, 15 nt, Human
uagucaagauugugu

SEQ ID NO: 2624027 - RNA, 13 nt, Human
uagucaagcuccu

SEQ ID NO: 2624028 - RNA, 14 nt, Human
uagucaagcuccuc

SEQ ID NO: 2624029 - RNA, 15 nt, Human
uagucaagcuccucc

SEQ ID NO: 2624030 - RNA, 21 nt, Human
uagucacauggccuaugcaca

SEQ ID NO: 2624031 - RNA, 13 nt, Human
uagugaugguucc

SEQ ID NO: 2624032 - RNA, 20 nt, Human
uaggcuacaauuuucuccca

SEQ ID NO: 2624033 - RNA, 15 nt, Human
uaggcuacaauuuuc

SEQ ID NO: 2624034 - RNA, 18 nt, Human
uaggcgagugccaggacu

SEQ ID NO: 2624035 - RNA, 14 nt, Human
uaggcgagugccag

SEQ ID NO: 2624036 - RNA, 13 nt, Human
uaggcgaucacaa

SEQ ID NO: 2624037 - RNA, 23 nt, Human
uaggcgaucacaacgugcauugu

SEQ ID NO: 2624038 - RNA, 16 nt, Human
uaggcgggaaggaggg

SEQ ID NO: 2624039 - RNA, 21 nt, Human
uaggcgggcggucagggguuc

SEQ ID NO: 2624040 - RNA, 22 nt, Human
uaguguaaaauaagaaugauuu

SEQ ID NO: 2624041 - RNA, 19 nt, Human
uaguguaaaauaagaauga

SEQ ID NO: 2624042 - RNA, 13 nt, Human
uaguguaaaauaa

SEQ ID NO: 2624043 - RNA, 23 nt, Human
uaguggucuuuguaagaguguag

SEQ ID NO: 2624044 - RNA, 20 nt, Human
uaguguaggucagcgugcuu

SEQ ID NO: 2624045 - RNA, 13 nt, Human
uaguugcuugccu

SEQ ID NO: 2624046 - RNA, 15 nt, Human
uaguugguguucaaa

SEQ ID NO: 2624047 - RNA, 16 nt, Human
uaguugcuccgccucu

SEQ ID NO: 2624048 - RNA, 15 nt, Human
uaguugcuccgccuc

SEQ ID NO: 2624049 - RNA, 17 nt, Human
uaguggauuacugccau

SEQ ID NO: 2624050 - RNA, 18 nt, Human
uaguggucuuuguaagag

SEQ ID NO: 2624051 - RNA, 18 nt, Human
uaguggauggaaggggcu

SEQ ID NO: 2624052 - RNA, 21 nt, Human
uaguggucuuuguaagagugu

SEQ ID NO: 2624053 - RNA, 19 nt, Human
uaguggucuuuguaagagu

SEQ ID NO: 2624054 - RNA, 11 nt, Human
uaguguaaaau

SEQ ID NO: 2624055 - RNA, 15 nt, Human
uaguggauggaaggg

SEQ ID NO: 2624056 - RNA, 15 nt, Human
uaguggauguucuga

SEQ ID NO: 2624057 - RNA, 13 nt, Human
uaguuucuccaag

SEQ ID NO: 2624058 - RNA, 17 nt, Human
uaguuucuguucugugg

SEQ ID NO: 2624059 - RNA, 16 nt, Human
uaguuucuguucugug

SEQ ID NO: 2624060 - RNA, 15 nt, Human
uaguuucuguucugu

SEQ ID NO: 2624061 - RNA, 14 nt, Human
uaguuucuguucug

SEQ ID NO: 2624062 - RNA, 23 nt, Human
uaguuugauuaaauucuugcaaa

SEQ ID NO: 2624063 - RNA, 12 nt, Human
uaguuugcaguu

SEQ ID NO: 2624064 - RNA, 17 nt, Human
uaguugucuuuccuggc

SEQ ID NO: 2624065 - RNA, 22 nt, Human
uaguugugaccuuaguguuucu

SEQ ID NO: 2624066 - RNA, 18 nt, Human
uaguugugaccuuagugu

SEQ ID NO: 2624067 - RNA, 17 nt, Human
uaguugugggugggaga

SEQ ID NO: 2624068 - RNA, 21 nt, Human
uaguuguaccgcaaugugacu

SEQ ID NO: 2624069 - RNA, 18 nt, Human
uaguuucagauauauauc

SEQ ID NO: 2624070 - RNA, 22 nt, Human
uaguuuaccugaauaaauggua

SEQ ID NO: 2624071 - RNA, 15 nt, Human
uaguuuacuauuuua

SEQ ID NO: 2624072 - RNA, 14 nt, Human
uauaccugugccuc

SEQ ID NO: 2624073 - RNA, 20 nt, Human
uauaccugauuuuuuuuccu

SEQ ID NO: 2624074 - RNA, 13 nt, Human
uauaccugugccu

SEQ ID NO: 2624075 - RNA, 22 nt, Human
uauaccugggcauacuaauaaa

SEQ ID NO: 2624076 - RNA, 17 nt, Human
uauacucacuuucuaga

SEQ ID NO: 2624077 - RNA, 16 nt, Human
uauacuauauuuaugg

SEQ ID NO: 2624078 - RNA, 16 nt, Human
uauacucuuucuguau

SEQ ID NO: 2624079 - RNA, 17 nt, Human
uauacucuuucuguaua

SEQ ID NO: 2624080 - RNA, 19 nt, Human
uauacucuuucuguauaua

SEQ ID NO: 2624081 - RNA, 22 nt, Human
uauacucuuucuguauauacuu

SEQ ID NO: 2624082 - RNA, 18 nt, Human
uauacucuagaugaaguu

SEQ ID NO: 2624083 - RNA, 20 nt, Human
uauacucuuauagacaacau

SEQ ID NO: 2624084 - RNA, 12 nt, Human
uauaauucugua

SEQ ID NO: 2624085 - RNA, 13 nt, Human
uauaauucuguaa

SEQ ID NO: 2624086 - RNA, 13 nt, Human
uauaauucccuau

SEQ ID NO: 2624087 - RNA, 12 nt, Human
uauaccugauuu

SEQ ID NO: 2624088 - RNA, 23 nt, Human
uauacccaugaacuuaaaaugaa

SEQ ID NO: 2624089 - RNA, 17 nt, Human
uauacccccugcaaagc

SEQ ID NO: 2624090 - RNA, 19 nt, Human
uauacccguacaacguguc

SEQ ID NO: 2624091 - RNA, 18 nt, Human
uauaaugaaugagagaau

SEQ ID NO: 2624092 - RNA, 15 nt, Human
uauaaugguugacug

SEQ ID NO: 2624093 - RNA, 16 nt, Human
uauaauggaguuaacg

SEQ ID NO: 2624094 - RNA, 14 nt, Human
uauaauguaagcuc

SEQ ID NO: 2624095 - RNA, 19 nt, Human
uauaauguaagcucuacug

SEQ ID NO: 2624096 - RNA, 20 nt, Human
uauaauguaagcucuacuga

SEQ ID NO: 2624097 - RNA, 20 nt, Human
uauaauucacauuguauuca

SEQ ID NO: 2624098 - RNA, 19 nt, Human
uauaaugguuucaaagauu

SEQ ID NO: 2624099 - RNA, 18 nt, Human
uauaaugguuucaaagau

SEQ ID NO: 2624100 - RNA, 17 nt, Human
uauaaugguuucaaaga

SEQ ID NO: 2624101 - RNA, 16 nt, Human
uauaaugguuucaaag

SEQ ID NO: 2624102 - RNA, 23 nt, Human
uauaaugguuucaaagauucaaa

SEQ ID NO: 2624103 - RNA, 17 nt, Human
uauaauucuacuuugag

SEQ ID NO: 2624104 - RNA, 18 nt, Human
uaguuucuguucugugga

SEQ ID NO: 2624105 - RNA, 17 nt, Human
uaguuugcauuccugau

SEQ ID NO: 2624106 - RNA, 11 nt, Human
uaguuugcauu

SEQ ID NO: 2624107 - RNA, 21 nt, Human
uaguuugauuauucaguguca

SEQ ID NO: 2624108 - RNA, 11 nt, Human
uaguuuggauu

SEQ ID NO: 2624109 - RNA, 18 nt, Human
uaguuugcauuccugaua

SEQ ID NO: 2624110 - RNA, 18 nt, Human
uaguuuguauaacuucuu

SEQ ID NO: 2624111 - RNA, 17 nt, Human
uaguuuguauaacuucu

SEQ ID NO: 2624112 - RNA, 14 nt, Human
uaguuuguauaacu

SEQ ID NO: 2624113 - RNA, 17 nt, Human
uaguuuguacaugcauu

SEQ ID NO: 2624114 - RNA, 13 nt, Human
uaguuugguucac

SEQ ID NO: 2624115 - RNA, 23 nt, Human
uaguuuuaaaaaaauaaaacauu

SEQ ID NO: 2624116 - RNA, 19 nt, Human
uaguuuguguguugucucu

SEQ ID NO: 2624117 - RNA, 14 nt, Human
uaguuuuacuuuua

SEQ ID NO: 2624118 - RNA, 23 nt, Human
uauaaauauauauaaauauauau

SEQ ID NO: 2624119 - RNA, 22 nt, Human
uauaaauauauauaaauauaua

SEQ ID NO: 2624120 - RNA, 21 nt, Human
uauaaauauauauaaauauau

SEQ ID NO: 2624121 - RNA, 19 nt, Human
uauaaauauauauaaauau

SEQ ID NO: 2624122 - RNA, 17 nt, Human
uauaaauauauauaaau

SEQ ID NO: 2624123 - RNA, 13 nt, Human
uauaaauauauau

SEQ ID NO: 2624124 - RNA, 14 nt, Human
uauaaauauauaua

SEQ ID NO: 2624125 - RNA, 15 nt, Human
uauaaauauauuuaa

SEQ ID NO: 2624126 - RNA, 10 nt, Human
uauaaauaug

SEQ ID NO: 2624127 - RNA, 15 nt, Human
uauaaaucaauguca

SEQ ID NO: 2624128 - RNA, 12 nt, Human
uauaaauauaua

SEQ ID NO: 2624129 - RNA, 10 nt, Human
uauaaauaua

SEQ ID NO: 2624130 - RNA, 19 nt, Human
uauaaauaggagaggauga

SEQ ID NO: 2624131 - RNA, 15 nt, Human
uaguuuuauaugcuu

SEQ ID NO: 2624132 - RNA, 20 nt, Human
uaguuuuacuuuuaaacugu

SEQ ID NO: 2624133 - RNA, 22 nt, Human
uaguuuuacuuuuaaacugugu

SEQ ID NO: 2624134 - RNA, 14 nt, Human
uaguuuuaguugca

SEQ ID NO: 2624135 - RNA, 16 nt, Human
uaguuuuaguugcaga

SEQ ID NO: 2624136 - RNA, 17 nt, Human
uaguuuuaguugcagaa

SEQ ID NO: 2624137 - RNA, 14 nt, Human
uauaaugaggauga

SEQ ID NO: 2624138 - RNA, 14 nt, Human
uauaaugaagcuuu

SEQ ID NO: 2624139 - RNA, 23 nt, Human
uauaaugaagcuuuauacgugua

SEQ ID NO: 2624140 - RNA, 20 nt, Human
uauaaugaaugaaacauuuu

SEQ ID NO: 2624141 - RNA, 22 nt, Human
uauaaauuuauuuacugcuagu

SEQ ID NO: 2624142 - RNA, 18 nt, Human
uauaaugaaugaaacauu

SEQ ID NO: 2624143 - RNA, 21 nt, Human
uauaaauuccucuuugcuuug

SEQ ID NO: 2624144 - RNA, 20 nt, Human
uauaaauuccucuuugcuuu

SEQ ID NO: 2624145 - RNA, 14 nt, Human
uauaaauuuauuua

SEQ ID NO: 2624146 - RNA, 18 nt, Human
uauaaaucgcuuuugaua

SEQ ID NO: 2624147 - RNA, 19 nt, Human
uauaaaucgcuuuugauaa

SEQ ID NO: 2624148 - RNA, 20 nt, Human
uauaaaucaaugucacuuaa

SEQ ID NO: 2624149 - RNA, 16 nt, Human
uauaaaucaaugucac

SEQ ID NO: 2624150 - RNA, 21 nt, Human
uauaaauuuuuuuuguuucau

SEQ ID NO: 2624151 - RNA, 15 nt, Human
uauaaauuuauuuac

SEQ ID NO: 2624152 - RNA, 16 nt, Human
uauaaauuuauuuacu

SEQ ID NO: 2624153 - RNA, 17 nt, Human
uauaaauuuuuuuuguu

SEQ ID NO: 2624154 - RNA, 19 nt, Human
uaucgaaauaacaauguua

SEQ ID NO: 2624155 - RNA, 18 nt, Human
uaucgaaauaacaauguu

SEQ ID NO: 2624156 - RNA, 16 nt, Human
uaucgaaauaacaaug

SEQ ID NO: 2624157 - RNA, 15 nt, Human
uaucgaaauaacaau

SEQ ID NO: 2624158 - RNA, 21 nt, Human
uaucgaaauaacaauguuaag

SEQ ID NO: 2624159 - RNA, 20 nt, Human
uaucgaaauaacaauguuaa

SEQ ID NO: 2624160 - RNA, 23 nt, Human
uaucgacuuguuuuugcacaugu

SEQ ID NO: 2624161 - RNA, 20 nt, Human
uaucgcaccacuguguauuu

SEQ ID NO: 2624162 - RNA, 19 nt, Human
uaucgauguuauguaaaag

SEQ ID NO: 2624163 - RNA, 16 nt, Human
uaucgaucucuuauuu

SEQ ID NO: 2624164 - RNA, 19 nt, Human
uaucgucacugcuuaacuu

SEQ ID NO: 2624165 - RNA, 16 nt, Human
uaucggagacagugau

SEQ ID NO: 2624166 - RNA, 18 nt, Human
uaucgcuucauguaacua

SEQ ID NO: 2624167 - RNA, 14 nt, Human
uaucggaagcagug

SEQ ID NO: 2624168 - RNA, 15 nt, Human
uaucggaagcagugc

SEQ ID NO: 2624169 - RNA, 15 nt, Human
uaucuaaauguugaa

SEQ ID NO: 2624170 - RNA, 14 nt, Human
uaucuaaaagaaau

SEQ ID NO: 2624171 - RNA, 14 nt, Human
uaucgggaacagug

SEQ ID NO: 2624172 - RNA, 23 nt, Human
uaucuaaacuggauucacagcuc

SEQ ID NO: 2624173 - RNA, 12 nt, Human
uaucucuguguu

SEQ ID NO: 2624174 - RNA, 22 nt, Human
uaucucuuuugaauccaugcuu

SEQ ID NO: 2624175 - RNA, 22 nt, Human
uaucaugugaaaucauucauuu

SEQ ID NO: 2624176 - RNA, 17 nt, Human
uaucaugugaaaucauu

SEQ ID NO: 2624177 - RNA, 14 nt, Human
uaucauguguaauc

SEQ ID NO: 2624178 - RNA, 13 nt, Human
uaucauguguaau

SEQ ID NO: 2624179 - RNA, 11 nt, Human
uaucaugugua

SEQ ID NO: 2624180 - RNA, 16 nt, Human
uaucaucaguauugaa

SEQ ID NO: 2624181 - RNA, 21 nt, Human
uaucaugucaaacgugaaaau

SEQ ID NO: 2624182 - RNA, 19 nt, Human
uaucauguguaaucaauaa

SEQ ID NO: 2624183 - RNA, 17 nt, Human
uaucauguguaaucaau

SEQ ID NO: 2624184 - RNA, 18 nt, Human
uauccugccaaaaucauu

SEQ ID NO: 2624185 - RNA, 15 nt, Human
uauccugccucagcc

SEQ ID NO: 2624186 - RNA, 12 nt, Human
uauccugccuca

SEQ ID NO: 2624187 - RNA, 11 nt, Human
uauccugccuc

SEQ ID NO: 2624188 - RNA, 22 nt, Human
uauccuggggcucccuucaucu

SEQ ID NO: 2624189 - RNA, 14 nt, Human
uaucgaaauaacaa

SEQ ID NO: 2624190 - RNA, 19 nt, Human
uauccugugacauguaaca

SEQ ID NO: 2624191 - RNA, 22 nt, Human
uauccugggggacccaauguag

SEQ ID NO: 2624192 - RNA, 10 nt, Human
uauccugggg

SEQ ID NO: 2624193 - RNA, 20 nt, Human
uauccugccucagcccgcca

SEQ ID NO: 2624194 - RNA, 16 nt, Human
uauccugccucagccc

SEQ ID NO: 2624195 - RNA, 22 nt, Human
uauccugcuucugauaugcagu

SEQ ID NO: 2624196 - RNA, 22 nt, Human
uaucauccacauuguuuuaaaa

SEQ ID NO: 2624197 - RNA, 17 nt, Human
uaucauccacauuguuu

SEQ ID NO: 2624198 - RNA, 16 nt, Human
uaucauccacauuguu

SEQ ID NO: 2624199 - RNA, 19 nt, Human
uaucaucuggauaggagcc

SEQ ID NO: 2624200 - RNA, 11 nt, Human
uaucaugaagc

SEQ ID NO: 2624201 - RNA, 16 nt, Human
uaucaugacaaagacu

SEQ ID NO: 2624202 - RNA, 16 nt, Human
uaucaugucaaacgug

SEQ ID NO: 2624203 - RNA, 15 nt, Human
uaucagugugccccc

SEQ ID NO: 2624204 - RNA, 13 nt, Human
uaucagugugccc

SEQ ID NO: 2624205 - RNA, 17 nt, Human
uaucaguguaagcccug

SEQ ID NO: 2624206 - RNA, 15 nt, Human
uaucaguuacucagc

SEQ ID NO: 2624207 - RNA, 23 nt, Human
uaucagugcucgagacacaguga

SEQ ID NO: 2624208 - RNA, 20 nt, Human
uaucagugacagaguucacu

SEQ ID NO: 2624209 - RNA, 22 nt, Human
uaucagugacagaguucacuau

SEQ ID NO: 2624210 - RNA, 15 nt, Human
uaucagugacagagu

SEQ ID NO: 2624211 - RNA, 16 nt, Human
uaucagugacagaguu

SEQ ID NO: 2624212 - RNA, 17 nt, Human
uaucagugacagaguuc

SEQ ID NO: 2624213 - RNA, 15 nt, Human
uaucaguugcaauaa

SEQ ID NO: 2624214 - RNA, 22 nt, Human
uaucaucaguauugaagcauuu

SEQ ID NO: 2624215 - RNA, 21 nt, Human
uaucaguugcaauaauacuuc

SEQ ID NO: 2624216 - RNA, 14 nt, Human
uaucaguugcaaua

SEQ ID NO: 2624217 - RNA, 21 nt, Human
uaucaguuacucagcccuggg

SEQ ID NO: 2624218 - RNA, 17 nt, Human
uaucagugugcccccca

SEQ ID NO: 2624219 - RNA, 16 nt, Human
uaucaguuacucagcc

SEQ ID NO: 2624220 - RNA, 17 nt, Human
uaucaguuacucagccc

SEQ ID NO: 2624221 - RNA, 18 nt, Human
uaucaguuacucagcccu

SEQ ID NO: 2624222 - RNA, 19 nt, Human
uaucaguuacucagcccug

SEQ ID NO: 2624223 - RNA, 20 nt, Human
uaucaguuacucagcccugg

SEQ ID NO: 2624224 - RNA, 21 nt, Human
uaucaguugagcuucauauac

SEQ ID NO: 2624225 - RNA, 20 nt, Human
uaucagcggccccuugacuc

SEQ ID NO: 2624226 - RNA, 20 nt, Human
uaucaggacccagaggaagg

SEQ ID NO: 2624227 - RNA, 21 nt, Human
uaucaggacccagaggaaggg

SEQ ID NO: 2624228 - RNA, 14 nt, Human
uaucagcuucagaa

SEQ ID NO: 2624229 - RNA, 19 nt, Human
uaucagcggccccuugacu

SEQ ID NO: 2624230 - RNA, 22 nt, Human
uaucagccugucucuuccauau

SEQ ID NO: 2624231 - RNA, 19 nt, Human
uaucagccugucucuucca

SEQ ID NO: 2624232 - RNA, 13 nt, Human
uaucagccugucu

SEQ ID NO: 2624233 - RNA, 11 nt, Human
uaucagccugu

SEQ ID NO: 2624234 - RNA, 19 nt, Human
uaucagccugagucuccug

SEQ ID NO: 2624235 - RNA, 13 nt, Human
uaucagccugagu

SEQ ID NO: 2624236 - RNA, 14 nt, Human
uaucagucucugag

SEQ ID NO: 2624237 - RNA, 22 nt, Human
uaucagucauaacuaaauaaag

SEQ ID NO: 2624238 - RNA, 23 nt, Human
uaucaggugcccaucccuggaag

SEQ ID NO: 2624239 - RNA, 16 nt, Human
uaucaggugcccaucc

SEQ ID NO: 2624240 - RNA, 23 nt, Human
uaucaggucucccacgugggaga

SEQ ID NO: 2624241 - RNA, 15 nt, Human
uaucaggucucccac

SEQ ID NO: 2624242 - RNA, 17 nt, Human
uaucaggugcugccauc

SEQ ID NO: 2624243 - RNA, 19 nt, Human
uauauuuuuuguuaaauga

SEQ ID NO: 2624244 - RNA, 12 nt, Human
uauauuuuuguc

SEQ ID NO: 2624245 - RNA, 15 nt, Human
uaucagcacgugugg

SEQ ID NO: 2624246 - RNA, 19 nt, Human
uauauuuuugguugucaau

SEQ ID NO: 2624247 - RNA, 18 nt, Human
uauauuuuugguugucaa

SEQ ID NO: 2624248 - RNA, 18 nt, Human
uauauuuuuauauuuagu

SEQ ID NO: 2624249 - RNA, 15 nt, Human
uauauuuuucacagu

SEQ ID NO: 2624250 - RNA, 20 nt, Human
uauauuuuuauauuuaguua

SEQ ID NO: 2624251 - RNA, 21 nt, Human
uauauuuuauacauuaacuuc

SEQ ID NO: 2624252 - RNA, 19 nt, Human
uauauacaaccugcuuggg

SEQ ID NO: 2624253 - RNA, 16 nt, Human
uauauacaauaacaua

SEQ ID NO: 2624254 - RNA, 17 nt, Human
uauauacaauaacauaa

SEQ ID NO: 2624255 - RNA, 19 nt, Human
uauauaaugguuucaaaga

SEQ ID NO: 2624256 - RNA, 17 nt, Human
uauauaauucuguacau

SEQ ID NO: 2624257 - RNA, 16 nt, Human
uauauaauucuguaca

SEQ ID NO: 2624258 - RNA, 14 nt, Human
uauauaauucugua

SEQ ID NO: 2624259 - RNA, 22 nt, Human
uauauaauuacauauuugcaua

SEQ ID NO: 2624260 - RNA, 19 nt, Human
uauauaaguguacauaugu

SEQ ID NO: 2624261 - RNA, 23 nt, Human
uauacuuguggacuaaaagauau

SEQ ID NO: 2624262 - RNA, 22 nt, Human
uauacuuguggacuaaaagaua

SEQ ID NO: 2624263 - RNA, 15 nt, Human
uauauaaugguuuca

SEQ ID NO: 2624264 - RNA, 23 nt, Human
uauauaaguguacauaugugcug

SEQ ID NO: 2624265 - RNA, 23 nt, Human
uauauaauacugacugagaauau

SEQ ID NO: 2624266 - RNA, 22 nt, Human
uauacuguaauuuaguuauuga

SEQ ID NO: 2624267 - RNA, 23 nt, Human
uauacuguaaagaaagagagaaa

SEQ ID NO: 2624268 - RNA, 17 nt, Human
uauacucuuuuuucaug

SEQ ID NO: 2624269 - RNA, 17 nt, Human
uauacuguauuaagagu

SEQ ID NO: 2624270 - RNA, 13 nt, Human
uauacuguauuaa

SEQ ID NO: 2624271 - RNA, 14 nt, Human
uauacuguaauuua

SEQ ID NO: 2624272 - RNA, 22 nt, Human
uauacuguaaagaaagagagaa

SEQ ID NO: 2624273 - RNA, 15 nt, Human
uauacuguaauuuag

SEQ ID NO: 2624274 - RNA, 16 nt, Human
uauacuguacuuaaua

SEQ ID NO: 2624275 - RNA, 21 nt, Human
uauacuuguggacuaaaagau

SEQ ID NO: 2624276 - RNA, 17 nt, Human
uauacuuguggacuaaa

SEQ ID NO: 2624277 - RNA, 22 nt, Human
uauacuuaaauggaaaaaauga

SEQ ID NO: 2624278 - RNA, 23 nt, Human
uauauacaguaacuuuaugugua

SEQ ID NO: 2624279 - RNA, 21 nt, Human
uauauacauuuaugaauuaaa

SEQ ID NO: 2624280 - RNA, 20 nt, Human
uauauacccguacaacgugu

SEQ ID NO: 2624281 - RNA, 18 nt, Human
uauauacgcaucuauaaa

SEQ ID NO: 2624282 - RNA, 22 nt, Human
uauauacaauaacauaauuugu

SEQ ID NO: 2624283 - RNA, 22 nt, Human
uauauacaguaacuuuaugugu

SEQ ID NO: 2624284 - RNA, 17 nt, Human
uauauacaguaacuuua

SEQ ID NO: 2624285 - RNA, 14 nt, Human
uauauacaguaacu

SEQ ID NO: 2624286 - RNA, 20 nt, Human
uauauacaaccugcuugggu

SEQ ID NO: 2624287 - RNA, 15 nt, Human
uauauacauauauau

SEQ ID NO: 2624288 - RNA, 22 nt, Human
uauaugaauuuaaauauaauuc

SEQ ID NO: 2624289 - RNA, 19 nt, Human
uauauagagauguuuuuaa

SEQ ID NO: 2624290 - RNA, 16 nt, Human
uauauagagauguuuu

SEQ ID NO: 2624291 - RNA, 14 nt, Human
uauauagagauguu

SEQ ID NO: 2624292 - RNA, 13 nt, Human
uauauagagaugu

SEQ ID NO: 2624293 - RNA, 21 nt, Human
uauaugauuuauaguuuguac

SEQ ID NO: 2624294 - RNA, 16 nt, Human
uauaugauuuauaguu

SEQ ID NO: 2624295 - RNA, 15 nt, Human
uauaugauuuauagu

SEQ ID NO: 2624296 - RNA, 13 nt, Human
uauaugauggggg

SEQ ID NO: 2624297 - RNA, 19 nt, Human
uauaugaggacuugugucu

SEQ ID NO: 2624298 - RNA, 22 nt, Human
uauauggaugauucagaaauug

SEQ ID NO: 2624299 - RNA, 21 nt, Human
uauaugcacuuauaauuuucc

SEQ ID NO: 2624300 - RNA, 19 nt, Human
uauauguacuugucaaaga

SEQ ID NO: 2624301 - RNA, 13 nt, Human
uauauguacuugu

SEQ ID NO: 2624302 - RNA, 12 nt, Human
uauauguacaug

SEQ ID NO: 2624303 - RNA, 23 nt, Human
uauauggcagaguuguaaauaua

SEQ ID NO: 2624304 - RNA, 17 nt, Human
uauauggccucaagauc

SEQ ID NO: 2624305 - RNA, 22 nt, Human
uauauggcagaguuguaaauau

SEQ ID NO: 2624306 - RNA, 20 nt, Human
uauauggcagaguuguaaau

SEQ ID NO: 2624307 - RNA, 19 nt, Human
uauauggcagaguuguaaa

SEQ ID NO: 2624308 - RNA, 18 nt, Human
uauauggcagaguuguaa

SEQ ID NO: 2624309 - RNA, 16 nt, Human
uauaugccaugaugga

SEQ ID NO: 2624310 - RNA, 16 nt, Human
uauauggcaagaaagc

SEQ ID NO: 2624311 - RNA, 23 nt, Human
uauauuuauuacuguaagaaaau

SEQ ID NO: 2624312 - RNA, 20 nt, Human
uauauuuauuacuguaagaa

SEQ ID NO: 2624313 - RNA, 12 nt, Human
uauauguaugug

SEQ ID NO: 2624314 - RNA, 21 nt, Human
uauauuucccugaaggaacca

SEQ ID NO: 2624315 - RNA, 16 nt, Human
uauauuucacuauuuu

SEQ ID NO: 2624316 - RNA, 14 nt, Human
uauauuugaaauau

SEQ ID NO: 2624317 - RNA, 22 nt, Human
uauauuugugauagcacuuucu

SEQ ID NO: 2624318 - RNA, 23 nt, Human
uauauuugugauagcacuuucua

SEQ ID NO: 2624319 - RNA, 13 nt, Human
uauauuugaaaua

SEQ ID NO: 2624320 - RNA, 14 nt, Human
uauauuuuaagacg

SEQ ID NO: 2624321 - RNA, 16 nt, Human
uauauuuuacaauuuu

SEQ ID NO: 2624322 - RNA, 14 nt, Human
uauauuuuaauuug

SEQ ID NO: 2624323 - RNA, 13 nt, Human
uauauuuuaagac

SEQ ID NO: 2624324 - RNA, 13 nt, Human
uauauuuuaagaa

SEQ ID NO: 2624325 - RNA, 20 nt, Human
uauauuuguguauuuaacag

SEQ ID NO: 2624326 - RNA, 14 nt, Human
uauauuucuuuguu

SEQ ID NO: 2624327 - RNA, 16 nt, Human
uauauuuguguauuua

SEQ ID NO: 2624328 - RNA, 15 nt, Human
uagacuugaaauacu

SEQ ID NO: 2624329 - RNA, 18 nt, Human
uagacuugugcugaucgu

SEQ ID NO: 2624330 - RNA, 19 nt, Human
uagagaacgcagcccuaga

SEQ ID NO: 2624331 - RNA, 17 nt, Human
uagagaacgcagcccua

SEQ ID NO: 2624332 - RNA, 16 nt, Human
uagagaacgcagcccu

SEQ ID NO: 2624333 - RNA, 12 nt, Human
uagacuuucugu

SEQ ID NO: 2624334 - RNA, 11 nt, Human
uagacuuucug

SEQ ID NO: 2624335 - RNA, 21 nt, Human
uagaccucagccugugcugcc

SEQ ID NO: 2624336 - RNA, 22 nt, Human
uagaccucagccugugcugccc

SEQ ID NO: 2624337 - RNA, 20 nt, Human
uagacucuuacuuuuuaaaa

SEQ ID NO: 2624338 - RNA, 14 nt, Human
uagaccucagccug

SEQ ID NO: 2624339 - RNA, 15 nt, Human
uagaccucagccugu

SEQ ID NO: 2624340 - RNA, 16 nt, Human
uagaccucagccugug

SEQ ID NO: 2624341 - RNA, 20 nt, Human
uagaccucagccugugcugc

SEQ ID NO: 2624342 - RNA, 20 nt, Human
uagacccugggugggcucug

SEQ ID NO: 2624343 - RNA, 16 nt, Human
uagacccugggugggc

SEQ ID NO: 2624344 - RNA, 12 nt, Human
uagacccugggu

SEQ ID NO: 2624345 - RNA, 19 nt, Human
uagaccuagggaggaccuu

SEQ ID NO: 2624346 - RNA, 22 nt, Human
uagaccuagggaggaccuuauc

SEQ ID NO: 2624347 - RNA, 11 nt, Human
uagaccucagc

SEQ ID NO: 2624348 - RNA, 12 nt, Human
uagaccucagcc

SEQ ID NO: 2624349 - RNA, 13 nt, Human
uagaccucagccu

SEQ ID NO: 2624350 - RNA, 14 nt, Human
uagacccucucaag

SEQ ID NO: 2624351 - RNA, 23 nt, Human
uagaaccuagagaagcuaaaacc

SEQ ID NO: 2624352 - RNA, 23 nt, Human
uagaaccuagaagggcuagaacc

SEQ ID NO: 2624353 - RNA, 17 nt, Human
uagaaccuagaagggcu

SEQ ID NO: 2624354 - RNA, 16 nt, Human
uagaaccuagaagggc

SEQ ID NO: 2624355 - RNA, 14 nt, Human
uagaaccuagaagg

SEQ ID NO: 2624356 - RNA, 13 nt, Human
uagaaccuagaag

SEQ ID NO: 2624357 - RNA, 23 nt, Human
uagaaccaggcaacuugggaacu

SEQ ID NO: 2624358 - RNA, 22 nt, Human
uagaacccggcaggcuagaacc

SEQ ID NO: 2624359 - RNA, 16 nt, Human
uagaaccacuaugaag

SEQ ID NO: 2624360 - RNA, 12 nt, Human
uagaaccaggca

SEQ ID NO: 2624361 - RNA, 22 nt, Human
uagaaccaccaacaagcaagcu

SEQ ID NO: 2624362 - RNA, 20 nt, Human
uagaaccaccaacaagcaag

SEQ ID NO: 2624363 - RNA, 15 nt, Human
uagaaccacuaugaa

SEQ ID NO: 2624364 - RNA, 16 nt, Human
uagagagagaccacuu

SEQ ID NO: 2624365 - RNA, 19 nt, Human
uagagacgggguuucacca

SEQ ID NO: 2624366 - RNA, 16 nt, Human
uagagaacuguggccg

SEQ ID NO: 2624367 - RNA, 13 nt, Human
uagagagcuauuu

SEQ ID NO: 2624368 - RNA, 13 nt, Human
uagagaggaaaag

SEQ ID NO: 2624369 - RNA, 16 nt, Human
uagagagggagaagaa

SEQ ID NO: 2624370 - RNA, 19 nt, Human
uagagagggagaagaaguc

SEQ ID NO: 2624371 - RNA, 19 nt, Human
uagagguucaaagauauuu

SEQ ID NO: 2624372 - RNA, 16 nt, Human
uagagguucaaagaua

SEQ ID NO: 2624373 - RNA, 21 nt, Human
uagagguucaaagauauuuug

SEQ ID NO: 2624374 - RNA, 19 nt, Human
uagagguuuuguuguuuua

SEQ ID NO: 2624375 - RNA, 19 nt, Human
uagagguuuuaaagugauu

SEQ ID NO: 2624376 - RNA, 15 nt, Human
uagagguuuuaaagu

SEQ ID NO: 2624377 - RNA, 16 nt, Human
uagagguuuuguuguu

SEQ ID NO: 2624378 - RNA, 19 nt, Human
uagaguagaagauuugaug

SEQ ID NO: 2624379 - RNA, 14 nt, Human
uagaguauaugcac

SEQ ID NO: 2624380 - RNA, 13 nt, Human
uagagucagccuu

SEQ ID NO: 2624381 - RNA, 14 nt, Human
uagagucagccuuc

SEQ ID NO: 2624382 - RNA, 21 nt, Human
uagaguagaagauuugaugcu

SEQ ID NO: 2624383 - RNA, 21 nt, Human
uagagucaucuccaucagcug

SEQ ID NO: 2624384 - RNA, 22 nt, Human
uagagucaucuccaucagcugu

SEQ ID NO: 2624385 - RNA, 23 nt, Human
uagagucaucuccaucagcugua

SEQ ID NO: 2624386 - RNA, 22 nt, Human
uagaguccaacguggggcagca

SEQ ID NO: 2624387 - RNA, 19 nt, Human
uagaguccaacguggggca

SEQ ID NO: 2624388 - RNA, 18 nt, Human
uagaguuuagcuggaaaa

SEQ ID NO: 2624389 - RNA, 17 nt, Human
uagaguuuagcuggaaa

SEQ ID NO: 2624390 - RNA, 17 nt, Human
uagaguuugcuauuaga

SEQ ID NO: 2624391 - RNA, 12 nt, Human
uagauaaacuca

SEQ ID NO: 2624392 - RNA, 12 nt, Human
uagaguuuaaca

SEQ ID NO: 2624393 - RNA, 13 nt, Human
uagaguuuaacac

SEQ ID NO: 2624394 - RNA, 22 nt, Human
uagaugggaaugaagcuugugu

SEQ ID NO: 2624395 - RNA, 19 nt, Human
uagaugggaaugaagcuug

SEQ ID NO: 2624396 - RNA, 18 nt, Human
uagaugggaaugaagcuu

SEQ ID NO: 2624397 - RNA, 17 nt, Human
uagaugggaaugaagcu

SEQ ID NO: 2624398 - RNA, 18 nt, Human
uagauacaugcuuuuuaa

SEQ ID NO: 2624399 - RNA, 15 nt, Human
uagaugggaaugaag

SEQ ID NO: 2624400 - RNA, 18 nt, Human
uagauaauacaccacuac

SEQ ID NO: 2624401 - RNA, 23 nt, Human
uagauaacaagaccucagugccu

SEQ ID NO: 2624402 - RNA, 18 nt, Human
uagauaaauaaauauaug

SEQ ID NO: 2624403 - RNA, 15 nt, Human
uagauaaacucagaa

SEQ ID NO: 2624404 - RNA, 12 nt, Human
uagauguauaua

SEQ ID NO: 2624405 - RNA, 16 nt, Human
uagauggugcugagaa

SEQ ID NO: 2624406 - RNA, 19 nt, Human
uagauggugcugagaagcu

SEQ ID NO: 2624407 - RNA, 20 nt, Human
uagauguagauaaacucaga

SEQ ID NO: 2624408 - RNA, 22 nt, Human
uagaugggucuggcugagcuga

SEQ ID NO: 2624409 - RNA, 20 nt, Human
uagaugggucuggcugagcu

SEQ ID NO: 2624410 - RNA, 16 nt, Human
uagaugggucuggcug

SEQ ID NO: 2624411 - RNA, 20 nt, Human
uagaugggcauggggugggc

SEQ ID NO: 2624412 - RNA, 23 nt, Human
uagaugggaaugaagcuugugua

SEQ ID NO: 2624413 - RNA, 21 nt, Human
uagaugggagggaggcucagg

SEQ ID NO: 2624414 - RNA, 15 nt, Human
uagauggugaaauuu

SEQ ID NO: 2624415 - RNA, 14 nt, Human
uagauggugaaauu

SEQ ID NO: 2624416 - RNA, 14 nt, Human
uagauggugcugag

SEQ ID NO: 2624417 - RNA, 15 nt, Human
uagauggugcugaga

SEQ ID NO: 2624418 - RNA, 19 nt, Human
uagaugguuugagccugag

SEQ ID NO: 2624419 - RNA, 22 nt, Human
uagauguucucuaucauuuaau

SEQ ID NO: 2624420 - RNA, 21 nt, Human
uagauguucucuaucauuuaa

SEQ ID NO: 2624421 - RNA, 19 nt, Human
uagauguucucuaucauuu

SEQ ID NO: 2624422 - RNA, 18 nt, Human
uagauguucucuaucauu

SEQ ID NO: 2624423 - RNA, 14 nt, Human
uagauguucucuau

SEQ ID NO: 2624424 - RNA, 21 nt, Human
uagauguucuaagucuuucca

SEQ ID NO: 2624425 - RNA, 22 nt, Human
uagauguucagauugcuuugau

SEQ ID NO: 2624426 - RNA, 17 nt, Human
uagauguucagauugcu

SEQ ID NO: 2624427 - RNA, 18 nt, Human
uagauguuccaguaaucu

SEQ ID NO: 2624428 - RNA, 19 nt, Human
uagaugugauuuaauagug

SEQ ID NO: 2624429 - RNA, 15 nt, Human
uagaugugauuuaau

SEQ ID NO: 2624430 - RNA, 13 nt, Human
uagaugugauuua

SEQ ID NO: 2624431 - RNA, 21 nt, Human
uagaugucuuuaggcagcagc

SEQ ID NO: 2624432 - RNA, 11 nt, Human
uagaugugugg

SEQ ID NO: 2624433 - RNA, 23 nt, Human
uagaugugauuuaauaguguuaa

SEQ ID NO: 2624434 - RNA, 21 nt, Human
uagaugugauuuaauaguguu

SEQ ID NO: 2624435 - RNA, 22 nt, Human
uagaugugcauuuuugugaaau

SEQ ID NO: 2624436 - RNA, 16 nt, Human
uagauguauguacuuc

SEQ ID NO: 2624437 - RNA, 23 nt, Human
uagauguagauaaacucagaaau

SEQ ID NO: 2624438 - RNA, 20 nt, Human
uagauguauguacuucaugc

SEQ ID NO: 2624439 - RNA, 18 nt, Human
uagaugucccuuucuugg

SEQ ID NO: 2624440 - RNA, 21 nt, Human
uagaugucccuuucuuggcca

SEQ ID NO: 2624441 - RNA, 22 nt, Human
uagaugucccuuucuuggccag

SEQ ID NO: 2624442 - RNA, 21 nt, Human
uagaugucuagguacuucagg

SEQ ID NO: 2624443 - RNA, 23 nt, Human
uagaugucccuuucuuggccagu

SEQ ID NO: 2624444 - RNA, 23 nt, Human
uagcagagaaugaaagggcccag

SEQ ID NO: 2624445 - RNA, 19 nt, Human
uagcagagaaugaaagggc

SEQ ID NO: 2624446 - RNA, 18 nt, Human
uagcagagagacuuucag

SEQ ID NO: 2624447 - RNA, 15 nt, Human
uagcagacaguguuu

SEQ ID NO: 2624448 - RNA, 13 nt, Human
uagcagacaggcc

SEQ ID NO: 2624449 - RNA, 19 nt, Human
uagcagacaggccccguga

SEQ ID NO: 2624450 - RNA, 20 nt, Human
uagcagauuuuaauuuugaa

SEQ ID NO: 2624451 - RNA, 14 nt, Human
uagcagauuuuaau

SEQ ID NO: 2624452 - RNA, 20 nt, Human
uagcagcagccuuuaaugca

SEQ ID NO: 2624453 - RNA, 20 nt, Human
uagcagcaccguucugugca

SEQ ID NO: 2624454 - RNA, 19 nt, Human
uagcagcaccguucugugc

SEQ ID NO: 2624455 - RNA, 18 nt, Human
uagcagauuuuaauuuug

SEQ ID NO: 2624456 - RNA, 20 nt, Human
uagcagggcauggcugggaa

SEQ ID NO: 2624457 - RNA, 23 nt, Human
uagcaggugguccugagaccuga

SEQ ID NO: 2624458 - RNA, 21 nt, Human
uagcagggaaaauauauaucu

SEQ ID NO: 2624459 - RNA, 14 nt, Human
uagcagggaaaaua

SEQ ID NO: 2624460 - RNA, 15 nt, Human
uagcaggugguccug

SEQ ID NO: 2624461 - RNA, 17 nt, Human
uagcagguaccacugau

SEQ ID NO: 2624462 - RNA, 23 nt, Human
uagcagaagguugcaccuccccc

SEQ ID NO: 2624463 - RNA, 11 nt, Human
uagcagacagg

SEQ ID NO: 2624464 - RNA, 16 nt, Human
uagcacuuugggaggc

SEQ ID NO: 2624465 - RNA, 23 nt, Human
uagauugaaaacuuuucucagau

SEQ ID NO: 2624466 - RNA, 21 nt, Human
uagauugagaaguuuuguaca

SEQ ID NO: 2624467 - RNA, 21 nt, Human
uagauugaaaacuuuucucag

SEQ ID NO: 2624468 - RNA, 20 nt, Human
uagauugaaaacuuuucuca

SEQ ID NO: 2624469 - RNA, 18 nt, Human
uagauugaaaacuuuucu

SEQ ID NO: 2624470 - RNA, 16 nt, Human
uagauuguuaaaauaa

SEQ ID NO: 2624471 - RNA, 18 nt, Human
uagauuaagagauggguu

SEQ ID NO: 2624472 - RNA, 20 nt, Human
uagauucuacauauucuuua

SEQ ID NO: 2624473 - RNA, 23 nt, Human
uagauguucucuaucauuuaaua

SEQ ID NO: 2624474 - RNA, 18 nt, Human
uagcugggggugggccag

SEQ ID NO: 2624475 - RNA, 16 nt, Human
uaggaaaugaaugugu

SEQ ID NO: 2624476 - RNA, 15 nt, Human
uagcugggauuacag

SEQ ID NO: 2624477 - RNA, 18 nt, Human
uaggaaaugaaugugugu

SEQ ID NO: 2624478 - RNA, 22 nt, Human
uaggaaauggcuuugugauuca

SEQ ID NO: 2624479 - RNA, 23 nt, Human
uaggaaauggcuuugugauucaa

SEQ ID NO: 2624480 - RNA, 14 nt, Human
uaggaacacuccuu

SEQ ID NO: 2624481 - RNA, 13 nt, Human
uaggaacacuccu

SEQ ID NO: 2624482 - RNA, 15 nt, Human
uaggaacugcugggc

SEQ ID NO: 2624483 - RNA, 18 nt, Human
uaggaacugcugggcuug

SEQ ID NO: 2624484 - RNA, 21 nt, Human
uaggaacuuaaauaaugugaa

SEQ ID NO: 2624485 - RNA, 17 nt, Human
uaggaacacuccuucac

SEQ ID NO: 2624486 - RNA, 19 nt, Human
uaggaaaugaaugugugug

SEQ ID NO: 2624487 - RNA, 20 nt, Human
uaggaacgguaaauuucugu

SEQ ID NO: 2624488 - RNA, 16 nt, Human
uaggaacauaugaaaa

SEQ ID NO: 2624489 - RNA, 17 nt, Human
uaggaagacuuuggaaa

SEQ ID NO: 2624490 - RNA, 16 nt, Human
uaggaagacuuuggaa

SEQ ID NO: 2624491 - RNA, 22 nt, Human
uaggaagaguagcauuucauuc

SEQ ID NO: 2624492 - RNA, 22 nt, Human
uaggaagaauuuuaaaaaugaa

SEQ ID NO: 2624493 - RNA, 19 nt, Human
uaggaagagaaaccaggga

SEQ ID NO: 2624494 - RNA, 15 nt, Human
uaggaagagaaacca

SEQ ID NO: 2624495 - RNA, 21 nt, Human
uaggaagaauuuuaaaaauga

SEQ ID NO: 2624496 - RNA, 18 nt, Human
uaggaagaauuuuaaaaa

SEQ ID NO: 2624497 - RNA, 14 nt, Human
uaggaagagaaacc

SEQ ID NO: 2624498 - RNA, 15 nt, Human
uaggaagacuuugga

SEQ ID NO: 2624499 - RNA, 14 nt, Human
uaggaagacuuugg

SEQ ID NO: 2624500 - RNA, 13 nt, Human
uaggaagacuuug

SEQ ID NO: 2624501 - RNA, 17 nt, Human
uaggaagaauuuuaaaa

SEQ ID NO: 2624502 - RNA, 15 nt, Human
uaggaagaauuuuaa

SEQ ID NO: 2624503 - RNA, 13 nt, Human
uaggaagaauuuu

SEQ ID NO: 2624504 - RNA, 23 nt, Human
uaggaauugacccacaagaaaug

SEQ ID NO: 2624505 - RNA, 20 nt, Human
uaggaauugacccacaagaa

SEQ ID NO: 2624506 - RNA, 14 nt, Human
uaggaauuguguuu

SEQ ID NO: 2624507 - RNA, 22 nt, Human
uaggaaguguaacagcugaggu

SEQ ID NO: 2624508 - RNA, 18 nt, Human
uaggaaguguaacagcug

SEQ ID NO: 2624509 - RNA, 19 nt, Human
uaggaaguguaacagcuga

SEQ ID NO: 2624510 - RNA, 20 nt, Human
uaggaaguguaacagcugag

SEQ ID NO: 2624511 - RNA, 21 nt, Human
uaggaaguguaacagcugagg

SEQ ID NO: 2624512 - RNA, 16 nt, Human
uaggaaguaaauuaua

SEQ ID NO: 2624513 - RNA, 17 nt, Human
uaggaaguguaacagcu

SEQ ID NO: 2624514 - RNA, 18 nt, Human
uaggaagggaccaaggca

SEQ ID NO: 2624515 - RNA, 15 nt, Human
uaggaagggaccaag

SEQ ID NO: 2624516 - RNA, 15 nt, Human
uaggaagguuaaugu

SEQ ID NO: 2624517 - RNA, 13 nt, Human
uaggccaugggac

SEQ ID NO: 2624518 - RNA, 17 nt, Human
uaggccguuccuucaaa

SEQ ID NO: 2624519 - RNA, 13 nt, Human
uaggccacuccuc

SEQ ID NO: 2624520 - RNA, 14 nt, Human
uaggccacuccucc

SEQ ID NO: 2624521 - RNA, 15 nt, Human
uaggccacuccucca

SEQ ID NO: 2624522 - RNA, 19 nt, Human
uaggccaaauuuguagugc

SEQ ID NO: 2624523 - RNA, 12 nt, Human
uaggaauaaaua

SEQ ID NO: 2624524 - RNA, 17 nt, Human
uaggccuggcacagugu

SEQ ID NO: 2624525 - RNA, 14 nt, Human
uaggccuggcacag

SEQ ID NO: 2624526 - RNA, 22 nt, Human
uaggccucagccagagaagcua

SEQ ID NO: 2624527 - RNA, 16 nt, Human
uaggccucagccagag

SEQ ID NO: 2624528 - RNA, 18 nt, Human
uaggccucagccagagaa

SEQ ID NO: 2624529 - RNA, 14 nt, Human
uaggccuggccaga

SEQ ID NO: 2624530 - RNA, 13 nt, Human
uaggccuggccag

SEQ ID NO: 2624531 - RNA, 20 nt, Human
uaggccaugaaaaaaaugau

SEQ ID NO: 2624532 - RNA, 14 nt, Human
uaggccucagccag

SEQ ID NO: 2624533 - RNA, 14 nt, Human
uaggccaugaaaaa

SEQ ID NO: 2624534 - RNA, 22 nt, Human
uagcucauucuccuuguguuac

SEQ ID NO: 2624535 - RNA, 17 nt, Human
uagccugccucuucucu

SEQ ID NO: 2624536 - RNA, 20 nt, Human
uagcuccccuccucuccccu

SEQ ID NO: 2624537 - RNA, 15 nt, Human
uagcuccccuccucu

SEQ ID NO: 2624538 - RNA, 14 nt, Human
uagcuccccuccuc

SEQ ID NO: 2624539 - RNA, 13 nt, Human
uagcuccccuccu

SEQ ID NO: 2624540 - RNA, 14 nt, Human
uagcucccuguucu

SEQ ID NO: 2624541 - RNA, 14 nt, Human
uagcuccccuccaa

SEQ ID NO: 2624542 - RNA, 21 nt, Human
uagcuccccgcuucugccugc

SEQ ID NO: 2624543 - RNA, 20 nt, Human
uagccucgccgucugugaau

SEQ ID NO: 2624544 - RNA, 19 nt, Human
uagccuccuucgcaggcau

SEQ ID NO: 2624545 - RNA, 20 nt, Human
uagcuccacacccucuccca

SEQ ID NO: 2624546 - RNA, 16 nt, Human
uagcuccuguggcccc

SEQ ID NO: 2624547 - RNA, 14 nt, Human
uagcuccuguggcc

SEQ ID NO: 2624548 - RNA, 13 nt, Human
uagcuccuguggc

SEQ ID NO: 2624549 - RNA, 12 nt, Human
uagcuccugugg

SEQ ID NO: 2624550 - RNA, 22 nt, Human
uagcuccuguggccccacccug

SEQ ID NO: 2624551 - RNA, 20 nt, Human
uagcuccuguggccccaccc

SEQ ID NO: 2624552 - RNA, 17 nt, Human
uagcucugagccaguuc

SEQ ID NO: 2624553 - RNA, 17 nt, Human
uagcucuauguuuacaa

SEQ ID NO: 2624554 - RNA, 21 nt, Human
uagcucuaggagggcuggcaa

SEQ ID NO: 2624555 - RNA, 20 nt, Human
uagcugggacuacaggcacc

SEQ ID NO: 2624556 - RNA, 22 nt, Human
uagcugggagaaagagagagcu

SEQ ID NO: 2624557 - RNA, 18 nt, Human
uagcugggacuacaggug

SEQ ID NO: 2624558 - RNA, 13 nt, Human
uagcugcuacaaa

SEQ ID NO: 2624559 - RNA, 12 nt, Human
uagcugcuacaa

SEQ ID NO: 2624560 - RNA, 20 nt, Human
uagcucuuaauuguucauuu

SEQ ID NO: 2624561 - RNA, 19 nt, Human
uagcuggaacuacaggcuc

SEQ ID NO: 2624562 - RNA, 21 nt, Human
uagcugcuacaaagaagacau

SEQ ID NO: 2624563 - RNA, 23 nt, Human
uagcugcuacaaagaagacaugu

SEQ ID NO: 2624564 - RNA, 20 nt, Human
uagcugcuacaaagaagaca

SEQ ID NO: 2624565 - RNA, 19 nt, Human
uagcugcuacaaagaagac

SEQ ID NO: 2624566 - RNA, 16 nt, Human
uagcugcuacaaagaa

SEQ ID NO: 2624567 - RNA, 15 nt, Human
uagcugcuacaaaga

SEQ ID NO: 2624568 - RNA, 11 nt, Human
uagcugggacu

SEQ ID NO: 2624569 - RNA, 20 nt, Human
uagcccgccugccaguccua

SEQ ID NO: 2624570 - RNA, 18 nt, Human
uagcccucacccuggggc

SEQ ID NO: 2624571 - RNA, 16 nt, Human
uagcccuggccagagg

SEQ ID NO: 2624572 - RNA, 18 nt, Human
uagcccuggccagaggcu

SEQ ID NO: 2624573 - RNA, 19 nt, Human
uagcccgccugccaguccu

SEQ ID NO: 2624574 - RNA, 16 nt, Human
uagcccgccugccagu

SEQ ID NO: 2624575 - RNA, 15 nt, Human
uagcccgccugccag

SEQ ID NO: 2624576 - RNA, 14 nt, Human
uagcccgccugcca

SEQ ID NO: 2624577 - RNA, 16 nt, Human
uagccccacaggaggu

SEQ ID NO: 2624578 - RNA, 22 nt, Human
uagcccauggacuucacauaag

SEQ ID NO: 2624579 - RNA, 12 nt, Human
uagccucccuga

SEQ ID NO: 2624580 - RNA, 15 nt, Human
uagccugaguagaaa

SEQ ID NO: 2624581 - RNA, 17 nt, Human
uagccuccugaccugag

SEQ ID NO: 2624582 - RNA, 13 nt, Human
uagccucccugaa

SEQ ID NO: 2624583 - RNA, 14 nt, Human
uagcccuuucugug

SEQ ID NO: 2624584 - RNA, 13 nt, Human
uagcccuuucugu

SEQ ID NO: 2624585 - RNA, 17 nt, Human
uagcccuuucugugugc

SEQ ID NO: 2624586 - RNA, 15 nt, Human
uagcccuuucugugu

SEQ ID NO: 2624587 - RNA, 13 nt, Human
uagccgaccucag

SEQ ID NO: 2624588 - RNA, 15 nt, Human
uagccgaccucagcc

SEQ ID NO: 2624589 - RNA, 16 nt, Human
uagccuaggugacaga

SEQ ID NO: 2624590 - RNA, 14 nt, Human
uagccgaccucagc

SEQ ID NO: 2624591 - RNA, 17 nt, Human
uagccuauauuuacagu

SEQ ID NO: 2624592 - RNA, 13 nt, Human
uagccaugaccuu

SEQ ID NO: 2624593 - RNA, 15 nt, Human
uagcauacauuuaua

SEQ ID NO: 2624594 - RNA, 22 nt, Human
uagcaggugguccugagaccug

SEQ ID NO: 2624595 - RNA, 14 nt, Human
uagcccaaaaccaa

SEQ ID NO: 2624596 - RNA, 14 nt, Human
uagccaugggacca

SEQ ID NO: 2624597 - RNA, 13 nt, Human
uagccaugggacc

SEQ ID NO: 2624598 - RNA, 21 nt, Human
uagcauacauuuauaauguuu

SEQ ID NO: 2624599 - RNA, 19 nt, Human
uagccauuccugguaccca

SEQ ID NO: 2624600 - RNA, 18 nt, Human
uagccauuccugguaccc

SEQ ID NO: 2624601 - RNA, 22 nt, Human
uagccauuccugguacccagcc

SEQ ID NO: 2624602 - RNA, 21 nt, Human
uagcccaucccugccugguca

SEQ ID NO: 2624603 - RNA, 20 nt, Human
uagcccaucccugccugguc

SEQ ID NO: 2624604 - RNA, 18 nt, Human
uagcccaucccugccugg

SEQ ID NO: 2624605 - RNA, 17 nt, Human
uagcccaucccugccug

SEQ ID NO: 2624606 - RNA, 16 nt, Human
uagcccaucccugccu

SEQ ID NO: 2624607 - RNA, 15 nt, Human
uagcccaucccugcc

SEQ ID NO: 2624608 - RNA, 14 nt, Human
uagcccaucccugc

SEQ ID NO: 2624609 - RNA, 12 nt, Human
uagcccaucccu

SEQ ID NO: 2624610 - RNA, 18 nt, Human
uagcccaggagagagaaa

SEQ ID NO: 2624611 - RNA, 17 nt, Human
uagcccaggagagagaa

SEQ ID NO: 2624612 - RNA, 22 nt, Human
uagcccaggagagagaaagcca

SEQ ID NO: 2624613 - RNA, 19 nt, Human
uagcccagguccucugaua

SEQ ID NO: 2624614 - RNA, 18 nt, Human
uagcccaaugaaaugaau

SEQ ID NO: 2624615 - RNA, 23 nt, Human
uagcccacacuugagaggaugaa

SEQ ID NO: 2624616 - RNA, 15 nt, Human
uagcccacucugcuc

SEQ ID NO: 2624617 - RNA, 16 nt, Human
uagcccaggagagaga

SEQ ID NO: 2624618 - RNA, 15 nt, Human
uagcccaggagagag

SEQ ID NO: 2624619 - RNA, 14 nt, Human
uagcccaggagaga

SEQ ID NO: 2624620 - RNA, 13 nt, Human
uagcccaggagag

SEQ ID NO: 2624621 - RNA, 12 nt, Human
uagcccaggaga

SEQ ID NO: 2624622 - RNA, 17 nt, Human
uacacuguuucaaacuu

SEQ ID NO: 2624623 - RNA, 18 nt, Human
uacacuguuucaaacuuu

SEQ ID NO: 2624624 - RNA, 19 nt, Human
uacacuguuucaaacuuua

SEQ ID NO: 2624625 - RNA, 23 nt, Human
uacacuuuaugccggaugugcuu

SEQ ID NO: 2624626 - RNA, 22 nt, Human
uacacuuuaugccggaugugcu

SEQ ID NO: 2624627 - RNA, 21 nt, Human
uacacuuuaugccggaugugc

SEQ ID NO: 2624628 - RNA, 22 nt, Human
uacacugggagaggugccagca

SEQ ID NO: 2624629 - RNA, 13 nt, Human
uacacuuuaugca

SEQ ID NO: 2624630 - RNA, 18 nt, Human
uacacuuuuuuggggaua

SEQ ID NO: 2624631 - RNA, 13 nt, Human
uacagaaagcugc

SEQ ID NO: 2624632 - RNA, 21 nt, Human
uacagaaagauggaugugcuu

SEQ ID NO: 2624633 - RNA, 21 nt, Human
uacagaauugugucugcagga

SEQ ID NO: 2624634 - RNA, 19 nt, Human
uacagaauugugucugcag

SEQ ID NO: 2624635 - RNA, 18 nt, Human
uacagaauugugucugca

SEQ ID NO: 2624636 - RNA, 15 nt, Human
uacagcacuacucug

SEQ ID NO: 2624637 - RNA, 20 nt, Human
uacagaauugugucugcagg

SEQ ID NO: 2624638 - RNA, 14 nt, Human
uacagcacuacucu

SEQ ID NO: 2624639 - RNA, 24 nt, Human
uacagcaaggagauuuacaacugg

SEQ ID NO: 2624640 - RNA, 13 nt, Human
uacagaauuuuau

SEQ ID NO: 2624641 - RNA, 21 nt, Human
uacagaauucugcuaccucac

SEQ ID NO: 2624642 - RNA, 18 nt, Human
uacagaauucugcuaccu

SEQ ID NO: 2624643 - RNA, 16 nt, Human
uacagaacucuuucaa

SEQ ID NO: 2624644 - RNA, 17 nt, Human
uacagaacucuuucaaa

SEQ ID NO: 2624645 - RNA, 19 nt, Human
uacagaacucuuucaaaac

SEQ ID NO: 2624646 - RNA, 23 nt, Human
uacagaacccauuccauuuaucu

SEQ ID NO: 2624647 - RNA, 20 nt, Human
uacagaaaguggugcucagu

SEQ ID NO: 2624648 - RNA, 10 nt, Human
uacagaaagu

SEQ ID NO: 2624649 - RNA, 14 nt, Human
uacagaaagcugcc

SEQ ID NO: 2624650 - RNA, 17 nt, Human
uacagaaauuagccggg

SEQ ID NO: 2624651 - RNA, 19 nt, Human
uacagaacacgcuuucaca

SEQ ID NO: 2624652 - RNA, 22 nt, Human
uacagaaaguggugcucaguug

SEQ ID NO: 2624653 - RNA, 24 nt, Human
uacagaaaguggugcucaguugua

SEQ ID NO: 2624654 - RNA, 18 nt, Human
uacagaaauuagccgggc

SEQ ID NO: 2624655 - RNA, 18 nt, Human
uacaggaaaagcugcuga

SEQ ID NO: 2624656 - RNA, 17 nt, Human
uacaggaaaagcugcug

SEQ ID NO: 2624657 - RNA, 23 nt, Human
uacagcuugaccgugaggccaga

SEQ ID NO: 2624658 - RNA, 14 nt, Human
uacagcgagaggca

SEQ ID NO: 2624659 - RNA, 19 nt, Human
uacagccccuuuuucauau

SEQ ID NO: 2624660 - RNA, 18 nt, Human
uacagcuuucaugauuag

SEQ ID NO: 2624661 - RNA, 21 nt, Human
uacagcuugaccgugaggcca

SEQ ID NO: 2624662 - RNA, 17 nt, Human
uacagcccaccuggcuu

SEQ ID NO: 2624663 - RNA, 22 nt, Human
uacagcuugaccgugaggccag

SEQ ID NO: 2624664 - RNA, 19 nt, Human
uacagcacuacucugugcc

SEQ ID NO: 2624665 - RNA, 22 nt, Human
uacagcauuacaaauugcuuac

SEQ ID NO: 2624666 - RNA, 21 nt, Human
uacagcauuacaaauugcuua

SEQ ID NO: 2624667 - RNA, 16 nt, Human
uacagcauuacaaauu

SEQ ID NO: 2624668 - RNA, 17 nt, Human
uacagcacuacucugug

SEQ ID NO: 2624669 - RNA, 22 nt, Human
uacagccaaagauaaucucuca

SEQ ID NO: 2624670 - RNA, 18 nt, Human
uacagccaaagauaaucu

SEQ ID NO: 2624671 - RNA, 14 nt, Human
uacaggauuugaaa

SEQ ID NO: 2624672 - RNA, 16 nt, Human
uacaggcacccaccau

SEQ ID NO: 2624673 - RNA, 19 nt, Human
uacaggaaaagcugcugac

SEQ ID NO: 2624674 - RNA, 22 nt, Human
uacagcuuugugacuguauaua

SEQ ID NO: 2624675 - RNA, 20 nt, Human
uacagcuuugugacuguaua

SEQ ID NO: 2624676 - RNA, 19 nt, Human
uacagcuuugaucccugac

SEQ ID NO: 2624677 - RNA, 21 nt, Human
uacaggaagcaccccaugcca

SEQ ID NO: 2624678 - RNA, 16 nt, Human
uacaguguacagucuu

SEQ ID NO: 2624679 - RNA, 15 nt, Human
uacaguguacagucu

SEQ ID NO: 2624680 - RNA, 22 nt, Human
uacagugguuuuauacugaagg

SEQ ID NO: 2624681 - RNA, 20 nt, Human
uacaggcaccgagaauguug

SEQ ID NO: 2624682 - RNA, 22 nt, Human
uacaguguacagucuuguauua

SEQ ID NO: 2624683 - RNA, 14 nt, Human
uacaggcacaaaau

SEQ ID NO: 2624684 - RNA, 20 nt, Human
uacaggauuugaacucagau

SEQ ID NO: 2624685 - RNA, 23 nt, Human
uacaggauuugaacucagaucug

SEQ ID NO: 2624686 - RNA, 14 nt, Human
uacaggcaccgaga

SEQ ID NO: 2624687 - RNA, 19 nt, Human
uacaggcaccgagaauguu

SEQ ID NO: 2624688 - RNA, 15 nt, Human
uacaggcagcacaga

SEQ ID NO: 2624689 - RNA, 21 nt, Human
uacagugguuuuauacugaag

SEQ ID NO: 2624690 - RNA, 13 nt, Human
uacaguguacagu

SEQ ID NO: 2624691 - RNA, 21 nt, Human
uacaagauuagaagcugaaaa

SEQ ID NO: 2624692 - RNA, 17 nt, Human
uacaauuuuuuaucaug

SEQ ID NO: 2624693 - RNA, 20 nt, Human
uacaauuuuuuuaauuuugu

SEQ ID NO: 2624694 - RNA, 13 nt, Human
uacaagauuagaa

SEQ ID NO: 2624695 - RNA, 23 nt, Human
uacaauuuuuuaucaugcauguc

SEQ ID NO: 2624696 - RNA, 22 nt, Human
uacaauuuuuuuaauuuuguau

SEQ ID NO: 2624697 - RNA, 21 nt, Human
uacaauuuuuuuaauuuugua

SEQ ID NO: 2624698 - RNA, 23 nt, Human
uacacaaaacaaaugccacacau

SEQ ID NO: 2624699 - RNA, 14 nt, Human
uacacaaguaaaca

SEQ ID NO: 2624700 - RNA, 15 nt, Human
uacaagacacaguga

SEQ ID NO: 2624701 - RNA, 16 nt, Human
uacaagagcagccugu

SEQ ID NO: 2624702 - RNA, 19 nt, Human
uacaagagcagccuguggc

SEQ ID NO: 2624703 - RNA, 19 nt, Human
uacaagagcuuaacagugu

SEQ ID NO: 2624704 - RNA, 20 nt, Human
uacaagagcagccuguggca

SEQ ID NO: 2624705 - RNA, 23 nt, Human
uacaagagcagccuguggcaucu

SEQ ID NO: 2624706 - RNA, 24 nt, Human
uacaagaugaaggagaggcaacau

SEQ ID NO: 2624707 - RNA, 22 nt, Human
uaauuuugguuguauucuuuga

SEQ ID NO: 2624708 - RNA, 21 nt, Human
uaauuuugguuguauucuuug

SEQ ID NO: 2624709 - RNA, 18 nt, Human
uaauuuugguuguauucu

SEQ ID NO: 2624710 - RNA, 17 nt, Human
uaauuuugguuguauuc

SEQ ID NO: 2624711 - RNA, 14 nt, Human
uaauuuugguugua

SEQ ID NO: 2624712 - RNA, 18 nt, Human
uaauuuuguauuuuccaa

SEQ ID NO: 2624713 - RNA, 15 nt, Human
uaauuuuguauuuuc

SEQ ID NO: 2624714 - RNA, 21 nt, Human
uaauuuuguauuuuccaagug

SEQ ID NO: 2624715 - RNA, 13 nt, Human
uaauuuuguauuu

SEQ ID NO: 2624716 - RNA, 14 nt, Human
uaauuuuguauuuu

SEQ ID NO: 2624717 - RNA, 17 nt, Human
uaauuuugaaaaacugc

SEQ ID NO: 2624718 - RNA, 13 nt, Human
uaauuuugaaaaa

SEQ ID NO: 2624719 - RNA, 21 nt, Human
uaauuuugacacuauaucugu

SEQ ID NO: 2624720 - RNA, 12 nt, Human
uaauuuugacac

SEQ ID NO: 2624721 - RNA, 15 nt, Human
uaauuuugaauaaau

SEQ ID NO: 2624722 - RNA, 12 nt, Human
uaauuuucuacc

SEQ ID NO: 2624723 - RNA, 14 nt, Human
uaauuuucuucaug

SEQ ID NO: 2624724 - RNA, 23 nt, Human
uaauuuucuucaugcaaugacau

SEQ ID NO: 2624725 - RNA, 18 nt, Human
uacacagagcaggacugc

SEQ ID NO: 2624726 - RNA, 18 nt, Human
uacacagaaauacaguua

SEQ ID NO: 2624727 - RNA, 22 nt, Human
uacacagaucacagcuucagcc

SEQ ID NO: 2624728 - RNA, 22 nt, Human
uacacacugcauguuugugauu

SEQ ID NO: 2624729 - RNA, 16 nt, Human
uacacugugcugaguc

SEQ ID NO: 2624730 - RNA, 14 nt, Human
uacacuguuucaaa

SEQ ID NO: 2624731 - RNA, 21 nt, Human
uacacuggaggagagaagaau

SEQ ID NO: 2624732 - RNA, 19 nt, Human
uacacuggaggagagaaga

SEQ ID NO: 2624733 - RNA, 22 nt, Human
uacacuggaggagagaagaaug

SEQ ID NO: 2624734 - RNA, 21 nt, Human
uacacugguuugagcuuagug

SEQ ID NO: 2624735 - RNA, 16 nt, Human
uacacuguauuuguau

SEQ ID NO: 2624736 - RNA, 12 nt, Human
uacacugugaac

SEQ ID NO: 2624737 - RNA, 23 nt, Human
uacacaaugguuuucuugugugu

SEQ ID NO: 2624738 - RNA, 21 nt, Human
uacacaaugguuuucuugugu

SEQ ID NO: 2624739 - RNA, 16 nt, Human
uacacaaguaaacauu

SEQ ID NO: 2624740 - RNA, 15 nt, Human
uacacaaguaaacau

SEQ ID NO: 2624741 - RNA, 17 nt, Human
uacacaaugguuuucuu

SEQ ID NO: 2624742 - RNA, 15 nt, Human
uacacacacauacac

SEQ ID NO: 2624743 - RNA, 21 nt, Human
uacacacacacgcgugcacac

SEQ ID NO: 2624744 - RNA, 22 nt, Human
uacacacacacacacagccaca

SEQ ID NO: 2624745 - RNA, 23 nt, Human
uacacacacacacacagccacac

SEQ ID NO: 2624746 - RNA, 22 nt, Human
uacacaccuaagggacauguuu

SEQ ID NO: 2624747 - RNA, 17 nt, Human
uacacaccuaagggaca

SEQ ID NO: 2624748 - RNA, 17 nt, Human
uacacacugcauguuug

SEQ ID NO: 2624749 - RNA, 18 nt, Human
uacacaccuuauauuuac

SEQ ID NO: 2624750 - RNA, 22 nt, Human
uacauccucaugcagccgugau

SEQ ID NO: 2624751 - RNA, 22 nt, Human
uacauaagcggcguaaguuuaa

SEQ ID NO: 2624752 - RNA, 22 nt, Human
uacaguucaguuccucuuugca

SEQ ID NO: 2624753 - RNA, 15 nt, Human
uacauaaguaauuca

SEQ ID NO: 2624754 - RNA, 22 nt, Human
uacauaagauaaaugugcugaa

SEQ ID NO: 2624755 - RNA, 20 nt, Human
uacaucuauuuuggauugua

SEQ ID NO: 2624756 - RNA, 22 nt, Human
uacaucuauuuuggauuguaua

SEQ ID NO: 2624757 - RNA, 23 nt, Human
uacaucuauuuuggauuguauau

SEQ ID NO: 2624758 - RNA, 18 nt, Human
uacaucuauuuuggauug

SEQ ID NO: 2624759 - RNA, 19 nt, Human
uacaucuauuuuggauugu

SEQ ID NO: 2624760 - RNA, 14 nt, Human
uacaucgcccucca

SEQ ID NO: 2624761 - RNA, 15 nt, Human
uacauccucaugcag

SEQ ID NO: 2624762 - RNA, 15 nt, Human
uacaucgcccuccac

SEQ ID NO: 2624763 - RNA, 18 nt, Human
uacaugagaacaaacaga

SEQ ID NO: 2624764 - RNA, 16 nt, Human
uacaugagaaggaacu

SEQ ID NO: 2624765 - RNA, 16 nt, Human
uacaugacauuuauuu

SEQ ID NO: 2624766 - RNA, 21 nt, Human
uacaugacauuuauuuuucau

SEQ ID NO: 2624767 - RNA, 17 nt, Human
uacaugagaacaaacag

SEQ ID NO: 2624768 - RNA, 19 nt, Human
uacaugacucagcauaccu

SEQ ID NO: 2624769 - RNA, 17 nt, Human
uacaucuucugccuuag

SEQ ID NO: 2624770 - RNA, 14 nt, Human
uacaucuucugccu

SEQ ID NO: 2624771 - RNA, 14 nt, Human
uacaucuuucacau

SEQ ID NO: 2624772 - RNA, 18 nt, Human
uacaugaauugcauuuua

SEQ ID NO: 2624773 - RNA, 23 nt, Human
uacaguuacucagaauucucuag

SEQ ID NO: 2624774 - RNA, 13 nt, Human
uacaguuaaguuu

SEQ ID NO: 2624775 - RNA, 19 nt, Human
uacaguuacucagaauucu

SEQ ID NO: 2624776 - RNA, 16 nt, Human
uacaguguuauuuucu

SEQ ID NO: 2624777 - RNA, 15 nt, Human
uacaguguucuguuu

SEQ ID NO: 2624778 - RNA, 14 nt, Human
uacaguguucuguu

SEQ ID NO: 2624779 - RNA, 19 nt, Human
uacaguguuauuuucuuug

SEQ ID NO: 2624780 - RNA, 12 nt, Human
uacaguucaguu

SEQ ID NO: 2624781 - RNA, 18 nt, Human
uacauaagauaaaugugc

SEQ ID NO: 2624782 - RNA, 19 nt, Human
uacauaagauaaaugugcu

SEQ ID NO: 2624783 - RNA, 20 nt, Human
uacaugcaauuuauuaaaau

SEQ ID NO: 2624784 - RNA, 23 nt, Human
uacauuuggagacacaacuauuu

SEQ ID NO: 2624785 - RNA, 16 nt, Human
uacauuuguauaaaau

SEQ ID NO: 2624786 - RNA, 11 nt, Human
uacauuugugu

SEQ ID NO: 2624787 - RNA, 17 nt, Human
uacauuuguauaaaaua

SEQ ID NO: 2624788 - RNA, 21 nt, Human
uacaugagguacugagaguga

SEQ ID NO: 2624789 - RNA, 22 nt, Human
uacaugagguacugagagugaa

SEQ ID NO: 2624790 - RNA, 15 nt, Human
uacaugauucauuuu

SEQ ID NO: 2624791 - RNA, 19 nt, Human
uacaugcaauuuauuaaaa

SEQ ID NO: 2624792 - RNA, 16 nt, Human
uacaugcaauuuauua

SEQ ID NO: 2624793 - RNA, 14 nt, Human
uacaugauucauuu

SEQ ID NO: 2624794 - RNA, 14 nt, Human
uacauuuuauauua

SEQ ID NO: 2624795 - RNA, 18 nt, Human
uaccaaaauuauuucaga

SEQ ID NO: 2624796 - RNA, 17 nt, Human
uaccaaaauuauuucag

SEQ ID NO: 2624797 - RNA, 16 nt, Human
uaccaacacgagcagg

SEQ ID NO: 2624798 - RNA, 23 nt, Human
uaccaaaauuauuucagaaaugu

SEQ ID NO: 2624799 - RNA, 13 nt, Human
uaccaacuuucug

SEQ ID NO: 2624800 - RNA, 20 nt, Human
uaccaacuguuuagggcccu

SEQ ID NO: 2624801 - RNA, 20 nt, Human
uaccaaaugcuuuaaaaacu

SEQ ID NO: 2624802 - RNA, 12 nt, Human
uaccaaccuguu

SEQ ID NO: 2624803 - RNA, 18 nt, Human
uaccaaaccgccagcgaa

SEQ ID NO: 2624804 - RNA, 17 nt, Human
uaccaaaugcuuuaaaa

SEQ ID NO: 2624805 - RNA, 19 nt, Human
uacccacccccacccaagg

SEQ ID NO: 2624806 - RNA, 17 nt, Human
uacccacccccacccaa

SEQ ID NO: 2624807 - RNA, 19 nt, Human
uacccacaccucugccaga

SEQ ID NO: 2624808 - RNA, 17 nt, Human
uacccacaccucugcca

SEQ ID NO: 2624809 - RNA, 18 nt, Human
uacccacaccucugccag

SEQ ID NO: 2624810 - RNA, 23 nt, Human
uacccacccccacccaagggccu

SEQ ID NO: 2624811 - RNA, 21 nt, Human
uaccauuuuuuaaggaaacaa

SEQ ID NO: 2624812 - RNA, 22 nt, Human
uacccaaaggauacuguaacac

SEQ ID NO: 2624813 - RNA, 11 nt, Human
uacccaaagga

SEQ ID NO: 2624814 - RNA, 12 nt, Human
uacccaagcaaa

SEQ ID NO: 2624815 - RNA, 21 nt, Human
uacccaaccacucaaauuaau

SEQ ID NO: 2624816 - RNA, 13 nt, Human
uacccaaccacuc

SEQ ID NO: 2624817 - RNA, 17 nt, Human
uacccaaauccucucca

SEQ ID NO: 2624818 - RNA, 15 nt, Human
uacccacccccaccc

SEQ ID NO: 2624819 - RNA, 12 nt, Human
uacccaccccca

SEQ ID NO: 2624820 - RNA, 22 nt, Human
uacccaggugcuaggaacacuc

SEQ ID NO: 2624821 - RNA, 18 nt, Human
uacccagcgagcccuggu

SEQ ID NO: 2624822 - RNA, 16 nt, Human
uacccagcgagcccug

SEQ ID NO: 2624823 - RNA, 14 nt, Human
uacccacugcucug

SEQ ID NO: 2624824 - RNA, 13 nt, Human
uacccacugcucu

SEQ ID NO: 2624825 - RNA, 12 nt, Human
uacccacugcuc

SEQ ID NO: 2624826 - RNA, 11 nt, Human
uacccacugcu

SEQ ID NO: 2624827 - RNA, 20 nt, Human
uacccacguucucacaccca

SEQ ID NO: 2624828 - RNA, 13 nt, Human
uaccacagugucu

SEQ ID NO: 2624829 - RNA, 23 nt, Human
uaccauucagugauuacugucaa

SEQ ID NO: 2624830 - RNA, 23 nt, Human
uaccacaggaaccacaagacugc

SEQ ID NO: 2624831 - RNA, 15 nt, Human
uaccaccacgcccgg

SEQ ID NO: 2624832 - RNA, 12 nt, Human
uaccacagcagc

SEQ ID NO: 2624833 - RNA, 19 nt, Human
uaccaaugcuuuuaucaaa

SEQ ID NO: 2624834 - RNA, 14 nt, Human
uaccacagugucug

SEQ ID NO: 2624835 - RNA, 12 nt, Human
uaccauuucaga

SEQ ID NO: 2624836 - RNA, 15 nt, Human
uaccauuucagagag

SEQ ID NO: 2624837 - RNA, 14 nt, Human
uaccauuuauacaa

SEQ ID NO: 2624838 - RNA, 15 nt, Human
uaccauuuauacaaa

SEQ ID NO: 2624839 - RNA, 17 nt, Human
uaccauuuauacaaauu

SEQ ID NO: 2624840 - RNA, 18 nt, Human
uaccauuuauacaaauua

SEQ ID NO: 2624841 - RNA, 15 nt, Human
uaccauuugccuccc

SEQ ID NO: 2624842 - RNA, 16 nt, Human
uaccauuucagagagg

SEQ ID NO: 2624843 - RNA, 21 nt, Human
uaccauuuauacaaauuagaa

SEQ ID NO: 2624844 - RNA, 20 nt, Human
uaccauuuuuuaaggaaaca

SEQ ID NO: 2624845 - RNA, 23 nt, Human
uaccauuuugggguacccacugc

SEQ ID NO: 2624846 - RNA, 22 nt, Human
uaccaauagauuccccauugcc

SEQ ID NO: 2624847 - RNA, 19 nt, Human
uaccaacuuucuguaaacu

SEQ ID NO: 2624848 - RNA, 17 nt, Human
uaccaacuuucuguaaa

SEQ ID NO: 2624849 - RNA, 15 nt, Human
uaccaacuuucugua

SEQ ID NO: 2624850 - RNA, 14 nt, Human
uaccaacuuucugu

SEQ ID NO: 2624851 - RNA, 21 nt, Human
uaccaaguuucagguauuaag

SEQ ID NO: 2624852 - RNA, 16 nt, Human
uaccaaguuucaggua

SEQ ID NO: 2624853 - RNA, 13 nt, Human
uaccacagacaua

SEQ ID NO: 2624854 - RNA, 14 nt, Human
uaccaaugcaugca

SEQ ID NO: 2624855 - RNA, 12 nt, Human
uaccaaugcaug

SEQ ID NO: 2624856 - RNA, 11 nt, Human
uaccaaugcau

SEQ ID NO: 2624857 - RNA, 13 nt, Human
uaccaaugcugca

SEQ ID NO: 2624858 - RNA, 13 nt, Human
uaccaaugcaugc

SEQ ID NO: 2624859 - RNA, 15 nt, Human
uaccaaugaaaaaau

SEQ ID NO: 2624860 - RNA, 17 nt, Human
uaccaaugaaaaaaugu

SEQ ID NO: 2624861 - RNA, 13 nt, Human
uaccaaugaaaaa

SEQ ID NO: 2624862 - RNA, 22 nt, Human
uaccaaucauuuuaauuauuau

SEQ ID NO: 2624863 - RNA, 20 nt, Human
uaccaaucauuuuaauuauu

SEQ ID NO: 2624864 - RNA, 19 nt, Human
uaccaaucauuuuaauuau

SEQ ID NO: 2624865 - RNA, 15 nt, Human
uaccaaucauuuuaa

SEQ ID NO: 2624866 - RNA, 22 nt, Human
uacccaucccauaugccugggc

SEQ ID NO: 2624867 - RNA, 12 nt, Human
uacccauauccc

SEQ ID NO: 2624868 - RNA, 15 nt, Human
uacccauauccccuc

SEQ ID NO: 2624869 - RNA, 17 nt, Human
uacccauccccgcagug

SEQ ID NO: 2624870 - RNA, 19 nt, Human
uacccaguaacucaucugu

SEQ ID NO: 2624871 - RNA, 22 nt, Human
uacccaguaacucaucugucac

SEQ ID NO: 2624872 - RNA, 16 nt, Human
uacccagggccugcag

SEQ ID NO: 2624873 - RNA, 21 nt, Human
uacccacguucucacacccac

SEQ ID NO: 2624874 - RNA, 14 nt, Human
uacccaccucagcc

SEQ ID NO: 2624875 - RNA, 15 nt, Human
uacccaccucagccu

SEQ ID NO: 2624876 - RNA, 22 nt, Human
uaccuucucccucauuucagga

SEQ ID NO: 2624877 - RNA, 15 nt, Human
uaccuugaggucuuu

SEQ ID NO: 2624878 - RNA, 14 nt, Human
uaccuucuguaguu

SEQ ID NO: 2624879 - RNA, 14 nt, Human
uaccuucucccuca

SEQ ID NO: 2624880 - RNA, 22 nt, Human
uaccuugaaaauaagaauagaa

SEQ ID NO: 2624881 - RNA, 18 nt, Human
uaccuugaacacuggggg

SEQ ID NO: 2624882 - RNA, 16 nt, Human
uaccuuccuucccugg

SEQ ID NO: 2624883 - RNA, 15 nt, Human
uaccuuccuucccug

SEQ ID NO: 2624884 - RNA, 14 nt, Human
uaccuuccuucccu

SEQ ID NO: 2624885 - RNA, 18 nt, Human
uacccaugacuuuauaug

SEQ ID NO: 2624886 - RNA, 22 nt, Human
uacccauccccgcagugugcac

SEQ ID NO: 2624887 - RNA, 21 nt, Human
uacccauucguggugaucaau

SEQ ID NO: 2624888 - RNA, 20 nt, Human
uaccuuuguauucucuccug

SEQ ID NO: 2624889 - RNA, 19 nt, Human
uaccuuugacaaagguaaa

SEQ ID NO: 2624890 - RNA, 13 nt, Human
uaccuugguuccc

SEQ ID NO: 2624891 - RNA, 22 nt, Human
uaccuugguucccccacugauc

SEQ ID NO: 2624892 - RNA, 16 nt, Human
uaccuuguauacugua

SEQ ID NO: 2624893 - RNA, 14 nt, Human
uaccuuguauacug

SEQ ID NO: 2624894 - RNA, 20 nt, Human
uaccuuguauacuguaggca

SEQ ID NO: 2624895 - RNA, 18 nt, Human
uaccuugugacccagcac

SEQ ID NO: 2624896 - RNA, 19 nt, Human
uaccuuuuuuauacauaaa

SEQ ID NO: 2624897 - RNA, 20 nt, Human
uaccuuuuuuauacauaaac

SEQ ID NO: 2624898 - RNA, 18 nt, Human
uaccuuuuuuauacauaa

SEQ ID NO: 2624899 - RNA, 12 nt, Human
uaccuuugucac

SEQ ID NO: 2624900 - RNA, 14 nt, Human
uaccuuuaugguuu

SEQ ID NO: 2624901 - RNA, 16 nt, Human
uaccuuuaugguuucu

SEQ ID NO: 2624902 - RNA, 15 nt, Human
uacuaauagacaauu

SEQ ID NO: 2624903 - RNA, 17 nt, Human
uacuaauagacaauuua

SEQ ID NO: 2624904 - RNA, 22 nt, Human
uacuaauaaaauuuaaaagucu

SEQ ID NO: 2624905 - RNA, 17 nt, Human
uacuacaguccucccau

SEQ ID NO: 2624906 - RNA, 12 nt, Human
uacuacaguccu

SEQ ID NO: 2624907 - RNA, 13 nt, Human
uacuacaaaauuu

SEQ ID NO: 2624908 - RNA, 18 nt, Human
uacuacaaaauuugaaau

SEQ ID NO: 2624909 - RNA, 18 nt, Human
uacuacacauucaauaag

SEQ ID NO: 2624910 - RNA, 16 nt, Human
uacuacaaaaaaguug

SEQ ID NO: 2624911 - RNA, 17 nt, Human
uacuaaccagcagaaau

SEQ ID NO: 2624912 - RNA, 18 nt, Human
uacuaaccagcagaaaug

SEQ ID NO: 2624913 - RNA, 19 nt, Human
uacuaaccagcagaaaugc

SEQ ID NO: 2624914 - RNA, 15 nt, Human
uacuaacuaaacucu

SEQ ID NO: 2624915 - RNA, 14 nt, Human
uacgacuuuauuuu

SEQ ID NO: 2624916 - RNA, 15 nt, Human
uacgacuuuauuuuc

SEQ ID NO: 2624917 - RNA, 14 nt, Human
uacuaacuaaacuc

SEQ ID NO: 2624918 - RNA, 17 nt, Human
uacgacuuuauuuucug

SEQ ID NO: 2624919 - RNA, 23 nt, Human
uaccuuuguucccaaauuucaua

SEQ ID NO: 2624920 - RNA, 22 nt, Human
uaccuuuuuuauacauaaacaa

SEQ ID NO: 2624921 - RNA, 14 nt, Human
uacgaauacuuuug

SEQ ID NO: 2624922 - RNA, 22 nt, Human
uacucagaauucucuaguuuga

SEQ ID NO: 2624923 - RNA, 14 nt, Human
uacucagcagcccu

SEQ ID NO: 2624924 - RNA, 15 nt, Human
uacucagcagcccuc

SEQ ID NO: 2624925 - RNA, 16 nt, Human
uacucagcagcccucc

SEQ ID NO: 2624926 - RNA, 17 nt, Human
uacucagcagcccuccu

SEQ ID NO: 2624927 - RNA, 18 nt, Human
uacucagcagcccuccuc

SEQ ID NO: 2624928 - RNA, 16 nt, Human
uacucagaauucucua

SEQ ID NO: 2624929 - RNA, 14 nt, Human
uacucagaauuaag

SEQ ID NO: 2624930 - RNA, 19 nt, Human
uacucagaagccugaggcu

SEQ ID NO: 2624931 - RNA, 16 nt, Human
uacucagaagccugag

SEQ ID NO: 2624932 - RNA, 17 nt, Human
uacucagaagccugagg

SEQ ID NO: 2624933 - RNA, 19 nt, Human
uacucauaaugugaagugu

SEQ ID NO: 2624934 - RNA, 15 nt, Human
uacucauaaugugaa

SEQ ID NO: 2624935 - RNA, 14 nt, Human
uacucauaauguga

SEQ ID NO: 2624936 - RNA, 15 nt, Human
uacucaggaggcuga

SEQ ID NO: 2624937 - RNA, 21 nt, Human
uacucauaaugugaaguguua

SEQ ID NO: 2624938 - RNA, 20 nt, Human
uacucauaaugugaaguguu

SEQ ID NO: 2624939 - RNA, 19 nt, Human
uacucauauauaucuaucu

SEQ ID NO: 2624940 - RNA, 21 nt, Human
uacucauauauaucuaucuua

SEQ ID NO: 2624941 - RNA, 17 nt, Human
uacucauccuuguauaa

SEQ ID NO: 2624942 - RNA, 23 nt, Human
uacucauauauaucuaucuuaua

SEQ ID NO: 2624943 - RNA, 16 nt, Human
uacucaugaucuugug

SEQ ID NO: 2624944 - RNA, 17 nt, Human
uacucaugaucuuguga

SEQ ID NO: 2624945 - RNA, 14 nt, Human
uacucaggaagaac

SEQ ID NO: 2624946 - RNA, 12 nt, Human
uacucaggaggc

SEQ ID NO: 2624947 - RNA, 22 nt, Human
uacucaggaggcugaggcagaa

SEQ ID NO: 2624948 - RNA, 13 nt, Human
uacucaggaagaa

SEQ ID NO: 2624949 - RNA, 22 nt, Human
uacucagcccugggccccacca

SEQ ID NO: 2624950 - RNA, 23 nt, Human
uacucagcccugggccccaccac

SEQ ID NO: 2624951 - RNA, 19 nt, Human
uacucagcagcccuccuca

SEQ ID NO: 2624952 - RNA, 20 nt, Human
uacucagcagcccuccucac

SEQ ID NO: 2624953 - RNA, 23 nt, Human
uacucagcagcccuccucacccc

SEQ ID NO: 2624954 - RNA, 12 nt, Human
uacucagcccug

SEQ ID NO: 2624955 - RNA, 13 nt, Human
uacucagcccugg

SEQ ID NO: 2624956 - RNA, 14 nt, Human
uacucagcccuggg

SEQ ID NO: 2624957 - RNA, 15 nt, Human
uacucagcccugggc

SEQ ID NO: 2624958 - RNA, 16 nt, Human
uacucagcccugggcc

SEQ ID NO: 2624959 - RNA, 14 nt, Human
uacucaccucaccc

SEQ ID NO: 2624960 - RNA, 20 nt, Human
uacucacuuucuagauuaag

SEQ ID NO: 2624961 - RNA, 21 nt, Human
uacucacagucucuuuaaucu

SEQ ID NO: 2624962 - RNA, 17 nt, Human
uacuacuagaugucuuu

SEQ ID NO: 2624963 - RNA, 18 nt, Human
uacuacuagaugucuuua

SEQ ID NO: 2624964 - RNA, 12 nt, Human
uacucaccucac

SEQ ID NO: 2624965 - RNA, 16 nt, Human
uacuaccuugaaaaua

SEQ ID NO: 2624966 - RNA, 20 nt, Human
uacuaccuugaaaauaagaa

SEQ ID NO: 2624967 - RNA, 15 nt, Human
uacucacagucucuu

SEQ ID NO: 2624968 - RNA, 20 nt, Human
uacuacaguuuguuaguaug

SEQ ID NO: 2624969 - RNA, 20 nt, Human
uacuacaguccucccaucuc

SEQ ID NO: 2624970 - RNA, 13 nt, Human
uacuaccuugaaa

SEQ ID NO: 2624971 - RNA, 14 nt, Human
uacuaccuugaaaa

SEQ ID NO: 2624972 - RNA, 13 nt, Human
uacuacaugcacu

SEQ ID NO: 2624973 - RNA, 17 nt, Human
uacuacaucgcccucca

SEQ ID NO: 2624974 - RNA, 18 nt, Human
uacuacaugugggagcuu

SEQ ID NO: 2624975 - RNA, 17 nt, Human
uacucccaucugugaaa

SEQ ID NO: 2624976 - RNA, 16 nt, Human
uacucccaucugugaa

SEQ ID NO: 2624977 - RNA, 14 nt, Human
uacucccaucugug

SEQ ID NO: 2624978 - RNA, 12 nt, Human
uacucccaucug

SEQ ID NO: 2624979 - RNA, 12 nt, Human
uacuccugcaaa

SEQ ID NO: 2624980 - RNA, 14 nt, Human
uacuccugcaaaau

SEQ ID NO: 2624981 - RNA, 16 nt, Human
uacuccugcaaaauuu

SEQ ID NO: 2624982 - RNA, 17 nt, Human
uacuccugcaaaauuuu

SEQ ID NO: 2624983 - RNA, 22 nt, Human
uacuccuguaauuccuaccucc

SEQ ID NO: 2624984 - RNA, 19 nt, Human
uacuccuguaauuccuacc

SEQ ID NO: 2624985 - RNA, 17 nt, Human
uacuccuguaauuccua

SEQ ID NO: 2624986 - RNA, 22 nt, Human
uacuccugcaaaauuuuauagc

SEQ ID NO: 2624987 - RNA, 13 nt, Human
uacuccucugcag

SEQ ID NO: 2624988 - RNA, 12 nt, Human
uacuccucugca

SEQ ID NO: 2624989 - RNA, 11 nt, Human
uacucaugugu

SEQ ID NO: 2624990 - RNA, 22 nt, Human
uacuccucugcagugccuuggg

SEQ ID NO: 2624991 - RNA, 21 nt, Human
uacuccucugcagugccuugg

SEQ ID NO: 2624992 - RNA, 16 nt, Human
uacuccucugcagugc

SEQ ID NO: 2624993 - RNA, 14 nt, Human
uacuccucugcagu

SEQ ID NO: 2624994 - RNA, 17 nt, Human
uacuccucuuuacacug

SEQ ID NO: 2624995 - RNA, 18 nt, Human
uacugagccuuguaauuc

SEQ ID NO: 2624996 - RNA, 15 nt, Human
uacugagccuuguaa

SEQ ID NO: 2624997 - RNA, 15 nt, Human
uacugaggugcuaug

SEQ ID NO: 2624998 - RNA, 23 nt, Human
uacugagccuuguaauucuaaau

SEQ ID NO: 2624999 - RNA, 19 nt, Human
uacugagccuuguaauucu

SEQ ID NO: 2625000 - RNA, 17 nt, Human
uacugagcuucucugug

SEQ ID NO: 2625001 - RNA, 14 nt, Human
uacugagcuucucu

SEQ ID NO: 2625002 - RNA, 18 nt, Human
uacugagcuucucuguga

SEQ ID NO: 2625003 - RNA, 23 nt, Human
uacugagggaccaacugggccca

SEQ ID NO: 2625004 - RNA, 22 nt, Human
uacugaggccuaaaaguaaaca

SEQ ID NO: 2625005 - RNA, 16 nt, Human
uacugauaaagaaaga

SEQ ID NO: 2625006 - RNA, 16 nt, Human
uacugaguuacauugu

SEQ ID NO: 2625007 - RNA, 14 nt, Human
uacugauauauuuu

SEQ ID NO: 2625008 - RNA, 16 nt, Human
uacugauauauuuuac

SEQ ID NO: 2625009 - RNA, 16 nt, Human
uacugaucaugcauug

SEQ ID NO: 2625010 - RNA, 17 nt, Human
uacugaucaugcauugu

SEQ ID NO: 2625011 - RNA, 23 nt, Human
uacugauguuccuagugaaagag

SEQ ID NO: 2625012 - RNA, 18 nt, Human
uacugauucacugcaugg

SEQ ID NO: 2625013 - RNA, 18 nt, Human
uacugaucaugcauuguu

SEQ ID NO: 2625014 - RNA, 20 nt, Human
uacuuucauccugacucugc

SEQ ID NO: 2625015 - RNA, 20 nt, Human
uacuuuauuuauacacuguc

SEQ ID NO: 2625016 - RNA, 20 nt, Human
uacuuuauguuacuacaugc

SEQ ID NO: 2625017 - RNA, 17 nt, Human
uacuuuauguuacuaca

SEQ ID NO: 2625018 - RNA, 16 nt, Human
uacuuuacucauuuuu

SEQ ID NO: 2625019 - RNA, 19 nt, Human
uacuuuaccacccccacac

SEQ ID NO: 2625020 - RNA, 15 nt, Human
uacuuuaccaccccc

SEQ ID NO: 2625021 - RNA, 22 nt, Human
uagaaagcaggggcuacaagag

SEQ ID NO: 2625022 - RNA, 14 nt, Human
uagaaagcaggggc

SEQ ID NO: 2625023 - RNA, 14 nt, Human
uagaaagcauuuga

SEQ ID NO: 2625024 - RNA, 13 nt, Human
uagaaagcauuug

SEQ ID NO: 2625025 - RNA, 15 nt, Human
uagaaacuuccaaau

SEQ ID NO: 2625026 - RNA, 14 nt, Human
uagaaagaagccca

SEQ ID NO: 2625027 - RNA, 15 nt, Human
uagaaagaagaugaa

SEQ ID NO: 2625028 - RNA, 23 nt, Human
uagaaagaagcccaauauuauaa

SEQ ID NO: 2625029 - RNA, 21 nt, Human
uagaaagaagcccaauauuau

SEQ ID NO: 2625030 - RNA, 17 nt, Human
uagaaagacagagcugg

SEQ ID NO: 2625031 - RNA, 22 nt, Human
uagaaagcauuugaaugcauuu

SEQ ID NO: 2625032 - RNA, 21 nt, Human
uagaaagcauuugaaugcauu

SEQ ID NO: 2625033 - RNA, 20 nt, Human
uagaaagcauuugaaugcau

SEQ ID NO: 2625034 - RNA, 19 nt, Human
uagaaagcauuugaaugca

SEQ ID NO: 2625035 - RNA, 18 nt, Human
uagaaagcauuugaaugc

SEQ ID NO: 2625036 - RNA, 17 nt, Human
uagaaagcauuugaaug

SEQ ID NO: 2625037 - RNA, 16 nt, Human
uagaaagcauuugaau

SEQ ID NO: 2625038 - RNA, 15 nt, Human
uagaaagcauuugaa

SEQ ID NO: 2625039 - RNA, 16 nt, Human
uagaaaggccuuuaaa

SEQ ID NO: 2625040 - RNA, 15 nt, Human
uagaaaggccuuuaa

SEQ ID NO: 2625041 - RNA, 14 nt, Human
uagaaaggccuuua

SEQ ID NO: 2625042 - RNA, 13 nt, Human
uagaaaggccuuu

SEQ ID NO: 2625043 - RNA, 23 nt, Human
uagaaagccuguuccccucacug

SEQ ID NO: 2625044 - RNA, 15 nt, Human
uagaaagcaggggcu

SEQ ID NO: 2625045 - RNA, 22 nt, Human
uagaaagccaaaucaaaauaug

SEQ ID NO: 2625046 - RNA, 20 nt, Human
uagaaauaaaggaugugauu

SEQ ID NO: 2625047 - RNA, 19 nt, Human
uagaaauaaauagcuauau

SEQ ID NO: 2625048 - RNA, 12 nt, Human
uagaaauaagug

SEQ ID NO: 2625049 - RNA, 11 nt, Human
uagaaauaagu

SEQ ID NO: 2625050 - RNA, 16 nt, Human
uagaaauaaauagcua

SEQ ID NO: 2625051 - RNA, 21 nt, Human
uagaaauagcuccguggagca

SEQ ID NO: 2625052 - RNA, 23 nt, Human
uagaaauaagugguuauuucuca

SEQ ID NO: 2625053 - RNA, 16 nt, Human
uagaaauaauaugcau

SEQ ID NO: 2625054 - RNA, 22 nt, Human
uagaaauaagugguuauuucuc

SEQ ID NO: 2625055 - RNA, 16 nt, Human
uagaaauaagugguua

SEQ ID NO: 2625056 - RNA, 15 nt, Human
uagaaauaauaugca

SEQ ID NO: 2625057 - RNA, 20 nt, Human
uagaaaguucaaaaagucua

SEQ ID NO: 2625058 - RNA, 19 nt, Human
uagaaauaaaggaugugau

SEQ ID NO: 2625059 - RNA, 15 nt, Human
uagaaaggggcccag

SEQ ID NO: 2625060 - RNA, 15 nt, Human
uagaaauauaauuga

SEQ ID NO: 2625061 - RNA, 20 nt, Human
uagaaauaucugaaaaugua

SEQ ID NO: 2625062 - RNA, 21 nt, Human
uagaaauaucugaaaauguau

SEQ ID NO: 2625063 - RNA, 23 nt, Human
uagaaauaucugaaaauguaugu

SEQ ID NO: 2625064 - RNA, 19 nt, Human
uagaaauguaacuuuugua

SEQ ID NO: 2625065 - RNA, 23 nt, Human
uagaaaugguuguauuagauguu

SEQ ID NO: 2625066 - RNA, 20 nt, Human
uagaaaugguuguauuagau

SEQ ID NO: 2625067 - RNA, 19 nt, Human
uagaaaugguuguauuaga

SEQ ID NO: 2625068 - RNA, 17 nt, Human
uagaaaugguuguauua

SEQ ID NO: 2625069 - RNA, 16 nt, Human
uagaaaugguuguauu

SEQ ID NO: 2625070 - RNA, 14 nt, Human
uagaaauaugauuu

SEQ ID NO: 2625071 - RNA, 22 nt, Human
uagaaauagcuccguggagcag

SEQ ID NO: 2625072 - RNA, 12 nt, Human
uagaaaucauuu

SEQ ID NO: 2625073 - RNA, 15 nt, Human
uagaaaugguuguau

SEQ ID NO: 2625074 - RNA, 19 nt, Human
uagaaaugaugauguggaa

SEQ ID NO: 2625075 - RNA, 18 nt, Human
uagaaaugaccaauauua

SEQ ID NO: 2625076 - RNA, 15 nt, Human
uagaacacagaaagc

SEQ ID NO: 2625077 - RNA, 15 nt, Human
uagaacacaggcaaa

SEQ ID NO: 2625078 - RNA, 14 nt, Human
uagaacacagaaag

SEQ ID NO: 2625079 - RNA, 20 nt, Human
uagaacaaaggacagaguau

SEQ ID NO: 2625080 - RNA, 16 nt, Human
uagaacaaaggacaga

SEQ ID NO: 2625081 - RNA, 16 nt, Human
uagaaauuuccagaga

SEQ ID NO: 2625082 - RNA, 15 nt, Human
uagaaauuuccagag

SEQ ID NO: 2625083 - RNA, 19 nt, Human
uagaaauuuuucagaugcu

SEQ ID NO: 2625084 - RNA, 22 nt, Human
uagaaauuuuucagaugcuucu

SEQ ID NO: 2625085 - RNA, 22 nt, Human
uagaaauuaccagaguuguucu

SEQ ID NO: 2625086 - RNA, 19 nt, Human
uagaaauuacacccaaaga

SEQ ID NO: 2625087 - RNA, 23 nt, Human
uagaaauuuauuuccuaguucug

SEQ ID NO: 2625088 - RNA, 14 nt, Human
uagaaauuuccaga

SEQ ID NO: 2625089 - RNA, 18 nt, Human
uagaaauuagcuguguga

SEQ ID NO: 2625090 - RNA, 17 nt, Human
uagaacagauaaucagu

SEQ ID NO: 2625091 - RNA, 23 nt, Human
uagaacagagaaagaggaagcuu

SEQ ID NO: 2625092 - RNA, 23 nt, Human
uagaaccaagaagggcuagaacc

SEQ ID NO: 2625093 - RNA, 17 nt, Human
uagaaccaagaagggcu

SEQ ID NO: 2625094 - RNA, 16 nt, Human
uagaaccaagaagggc

SEQ ID NO: 2625095 - RNA, 22 nt, Human
uagaacauggagagcuagaacc

SEQ ID NO: 2625096 - RNA, 18 nt, Human
uagaacaucccugccagc

SEQ ID NO: 2625097 - RNA, 14 nt, Human
uagaacaucccugc

SEQ ID NO: 2625098 - RNA, 17 nt, Human
uacugcauacuuuuuaa

SEQ ID NO: 2625099 - RNA, 18 nt, Human
uacugcauacuuuuuaaa

SEQ ID NO: 2625100 - RNA, 21 nt, Human
uacugcauacuuuuuaaaugu

SEQ ID NO: 2625101 - RNA, 22 nt, Human
uacugcauacuuuuuaaaugua

SEQ ID NO: 2625102 - RNA, 17 nt, Human
uacugcauaugaaagga

SEQ ID NO: 2625103 - RNA, 19 nt, Human
uacugcagggccaggacug

SEQ ID NO: 2625104 - RNA, 18 nt, Human
uacugcagggccaggacu

SEQ ID NO: 2625105 - RNA, 16 nt, Human
uacugcagggccagga

SEQ ID NO: 2625106 - RNA, 13 nt, Human
uacugcauacuuu

SEQ ID NO: 2625107 - RNA, 15 nt, Human
uacugcauacuuuuu

SEQ ID NO: 2625108 - RNA, 14 nt, Human
uacugcagggccag

SEQ ID NO: 2625109 - RNA, 12 nt, Human
uacugcagggcc

SEQ ID NO: 2625110 - RNA, 10 nt, Human
uacugcaggg

SEQ ID NO: 2625111 - RNA, 23 nt, Human
uacugcagcuuuacaugcaauuu

SEQ ID NO: 2625112 - RNA, 22 nt, Human
uacugcagcuuuacaugcaauu

SEQ ID NO: 2625113 - RNA, 19 nt, Human
uacugcagcuuuacaugca

SEQ ID NO: 2625114 - RNA, 14 nt, Human
uacugauuguuuca

SEQ ID NO: 2625115 - RNA, 15 nt, Human
uacugcagcuuuaca

SEQ ID NO: 2625116 - RNA, 21 nt, Human
uacuguaucaugacaaagacu

SEQ ID NO: 2625117 - RNA, 19 nt, Human
uacugucaaaauaauuuua

SEQ ID NO: 2625118 - RNA, 18 nt, Human
uacugucaaaauaauuuu

SEQ ID NO: 2625119 - RNA, 22 nt, Human
uacuguauuuuuaccuuuuucc

SEQ ID NO: 2625120 - RNA, 17 nt, Human
uacuguauuuuguauug

SEQ ID NO: 2625121 - RNA, 23 nt, Human
uacuguauuuuguauuguuucaa

SEQ ID NO: 2625122 - RNA, 12 nt, Human
uacuguauuuga

SEQ ID NO: 2625123 - RNA, 17 nt, Human
uacuguucugugucuuu

SEQ ID NO: 2625124 - RNA, 14 nt, Human
uacuguucuguguc

SEQ ID NO: 2625125 - RNA, 12 nt, Human
uacuguucucuu

SEQ ID NO: 2625126 - RNA, 18 nt, Human
uacuguucucuucuugaa

SEQ ID NO: 2625127 - RNA, 16 nt, Human
uacuguucugugucuu

SEQ ID NO: 2625128 - RNA, 14 nt, Human
uacuguugugaccu

SEQ ID NO: 2625129 - RNA, 17 nt, Human
uacuguuguccuauggg

SEQ ID NO: 2625130 - RNA, 14 nt, Human
uacuuaauaaauuc

SEQ ID NO: 2625131 - RNA, 17 nt, Human
uacuuaauaaauucaga

SEQ ID NO: 2625132 - RNA, 19 nt, Human
uacuuaauaaauucagaua

SEQ ID NO: 2625133 - RNA, 22 nt, Human
uacuguguacagaauucugcua

SEQ ID NO: 2625134 - RNA, 23 nt, Human
uacuguguacagaauucugcuac

SEQ ID NO: 2625135 - RNA, 15 nt, Human
uacuguggcuucuua

SEQ ID NO: 2625136 - RNA, 19 nt, Human
uacugugugugugaaugaa

SEQ ID NO: 2625137 - RNA, 17 nt, Human
uacugugugugugaaug

SEQ ID NO: 2625138 - RNA, 18 nt, Human
uacugugugugugaauga

SEQ ID NO: 2625139 - RNA, 14 nt, Human
uacuguguguguga

SEQ ID NO: 2625140 - RNA, 21 nt, Human
uacuugaagggccagagccag

SEQ ID NO: 2625141 - RNA, 22 nt, Human
uacuugaagggccagagccagg

SEQ ID NO: 2625142 - RNA, 20 nt, Human
uacuugaagggccagagcca

SEQ ID NO: 2625143 - RNA, 18 nt, Human
uacuuagcaaaguuuuac

SEQ ID NO: 2625144 - RNA, 13 nt, Human
uacuuaauaaauu

SEQ ID NO: 2625145 - RNA, 15 nt, Human
uacuuagcagcuauc

SEQ ID NO: 2625146 - RNA, 13 nt, Human
uacuuaauuucuu

SEQ ID NO: 2625147 - RNA, 18 nt, Human
uacuuaauuccuuucuca

SEQ ID NO: 2625148 - RNA, 15 nt, Human
uacuuaauccaaugg

SEQ ID NO: 2625149 - RNA, 23 nt, Human
uacuuacaugcauuacugcaugc

SEQ ID NO: 2625150 - RNA, 16 nt, Human
uacuuagaggaaauaa

SEQ ID NO: 2625151 - RNA, 22 nt, Human
uacuuaccuaaacagauauaaa

SEQ ID NO: 2625152 - RNA, 19 nt, Human
uacuuacaugcauuacugc

SEQ ID NO: 2625153 - RNA, 16 nt, Human
uacuuaccuaaacaga

SEQ ID NO: 2625154 - RNA, 17 nt, Human
uacuuaccauaugugcu

SEQ ID NO: 2625155 - RNA, 14 nt, Human
uacuugaccuccua

SEQ ID NO: 2625156 - RNA, 21 nt, Human
uacuugcucuugaugccuggc

SEQ ID NO: 2625157 - RNA, 23 nt, Human
uacuugccuuauuagagugucuu

SEQ ID NO: 2625158 - RNA, 18 nt, Human
uacuuguggacacagcuc

SEQ ID NO: 2625159 - RNA, 15 nt, Human
uacuuguggacacag

SEQ ID NO: 2625160 - RNA, 19 nt, Human
uacuuguggacacagcucu

SEQ ID NO: 2625161 - RNA, 22 nt, Human
uacuuuaagcacuacauaaacu

SEQ ID NO: 2625162 - RNA, 19 nt, Human
uacuugggccauagcuccu

SEQ ID NO: 2625163 - RNA, 23 nt, Human
uacuugggagaccuguaaucaua

SEQ ID NO: 2625164 - RNA, 12 nt, Human
uacuugggaggc

SEQ ID NO: 2625165 - RNA, 20 nt, Human
uacuugcucuugaugccugg

SEQ ID NO: 2625166 - RNA, 18 nt, Human
uacuugcuggcucucaga

SEQ ID NO: 2625167 - RNA, 17 nt, Human
uacuugggaagcugagg

SEQ ID NO: 2625168 - RNA, 21 nt, Human
uacuugggagaccuguaauca

SEQ ID NO: 2625169 - RNA, 19 nt, Human
uacuugggaagcugaggcg

SEQ ID NO: 2625170 - RNA, 15 nt, Human
uaauaagguugaaca

SEQ ID NO: 2625171 - RNA, 15 nt, Human
uaauaacugugaagu

SEQ ID NO: 2625172 - RNA, 21 nt, Human
uaauaacauuaccuuacugug

SEQ ID NO: 2625173 - RNA, 17 nt, Human
uaauaacagugcauauu

SEQ ID NO: 2625174 - RNA, 13 nt, Human
uaauaaauucaga

SEQ ID NO: 2625175 - RNA, 20 nt, Human
uaauaacauuaccuuacugu

SEQ ID NO: 2625176 - RNA, 15 nt, Human
uaauaacauuaccuu

SEQ ID NO: 2625177 - RNA, 12 nt, Human
uaauaacauuac

SEQ ID NO: 2625178 - RNA, 17 nt, Human
uaauaaagaugcucuuu

SEQ ID NO: 2625179 - RNA, 16 nt, Human
uaauaaagcuacugau

SEQ ID NO: 2625180 - RNA, 15 nt, Human
uaauaaagcuacuga

SEQ ID NO: 2625181 - RNA, 15 nt, Human
uaauaaaucugguag

SEQ ID NO: 2625182 - RNA, 19 nt, Human
uaauaaauguacauuaauu

SEQ ID NO: 2625183 - RNA, 17 nt, Human
uaauaaauguacauuaa

SEQ ID NO: 2625184 - RNA, 16 nt, Human
uaauaaauuauuuauu

SEQ ID NO: 2625185 - RNA, 15 nt, Human
uaauaaauucagaua

SEQ ID NO: 2625186 - RNA, 16 nt, Human
uaauaaagaucaugua

SEQ ID NO: 2625187 - RNA, 17 nt, Human
uaauaaagaucauguaa

SEQ ID NO: 2625188 - RNA, 14 nt, Human
uaauaaagaugcuc

SEQ ID NO: 2625189 - RNA, 16 nt, Human
uaauaaagaugcucuu

SEQ ID NO: 2625190 - RNA, 22 nt, Human
uaagugcuguauaaaaucagcc

SEQ ID NO: 2625191 - RNA, 20 nt, Human
uaagugcuguauaaaaucag

SEQ ID NO: 2625192 - RNA, 19 nt, Human
uaagugcuguauaaaauca

SEQ ID NO: 2625193 - RNA, 18 nt, Human
uaagugcuguauaaaauc

SEQ ID NO: 2625194 - RNA, 14 nt, Human
uaagugcuguauaa

SEQ ID NO: 2625195 - RNA, 20 nt, Human
uaaggcguggagcugccuga

SEQ ID NO: 2625196 - RNA, 17 nt, Human
uaagugcuguauaaaau

SEQ ID NO: 2625197 - RNA, 15 nt, Human
uaagugcuguauaaa

SEQ ID NO: 2625198 - RNA, 17 nt, Human
uaaggcguggagcugcc

SEQ ID NO: 2625199 - RNA, 16 nt, Human
uaaggcguggagcugc

SEQ ID NO: 2625200 - RNA, 19 nt, Human
uaaggccauuauuguacuu

SEQ ID NO: 2625201 - RNA, 15 nt, Human
uaaggcaugaaggau

SEQ ID NO: 2625202 - RNA, 16 nt, Human
uaaggccgaagaaggg

SEQ ID NO: 2625203 - RNA, 20 nt, Human
uaaggccgaagaaggguccu

SEQ ID NO: 2625204 - RNA, 20 nt, Human
uaagugguacuaacuuuccu

SEQ ID NO: 2625205 - RNA, 15 nt, Human
uaaguggaggcacuu

SEQ ID NO: 2625206 - RNA, 16 nt, Human
uaaguggaggcacuuu

SEQ ID NO: 2625207 - RNA, 17 nt, Human
uaaguggaggcacuuua

SEQ ID NO: 2625208 - RNA, 19 nt, Human
uaaguggaggcacuuuagg

SEQ ID NO: 2625209 - RNA, 23 nt, Human
uaagugcuguauaaaaucagcca

SEQ ID NO: 2625210 - RNA, 13 nt, Human
uaagugcuuugua

SEQ ID NO: 2625211 - RNA, 15 nt, Human
uaagugcuuuguaau

SEQ ID NO: 2625212 - RNA, 23 nt, Human
uaauaaacuuagaauaaaauugu

SEQ ID NO: 2625213 - RNA, 18 nt, Human
uaauaaacuuagaauaaa

SEQ ID NO: 2625214 - RNA, 17 nt, Human
uaauaaacuuuaauaua

SEQ ID NO: 2625215 - RNA, 21 nt, Human
uaagugggguugcaaccacug

SEQ ID NO: 2625216 - RNA, 20 nt, Human
uaagugggguugcaaccacu

SEQ ID NO: 2625217 - RNA, 13 nt, Human
uaaguggcugcug

SEQ ID NO: 2625218 - RNA, 21 nt, Human
uaauaaacuuuuuuuugagaa

SEQ ID NO: 2625219 - RNA, 19 nt, Human
uaauaaacuuuuuuuugag

SEQ ID NO: 2625220 - RNA, 13 nt, Human
uaauaaagacagg

SEQ ID NO: 2625221 - RNA, 17 nt, Human
uaauaauuauuauuaaa

SEQ ID NO: 2625222 - RNA, 21 nt, Human
uaauaauauacuuguggacua

SEQ ID NO: 2625223 - RNA, 15 nt, Human
uaauaauguuucaaa

SEQ ID NO: 2625224 - RNA, 19 nt, Human
uaauaauauacuuguggac

SEQ ID NO: 2625225 - RNA, 16 nt, Human
uaauaauauacuugug

SEQ ID NO: 2625226 - RNA, 14 nt, Human
uaauaauaauguuu

SEQ ID NO: 2625227 - RNA, 14 nt, Human
uaauaauauacuug

SEQ ID NO: 2625228 - RNA, 13 nt, Human
uaauaauauacuu

SEQ ID NO: 2625229 - RNA, 22 nt, Human
uaauauaagaagcuuucaguau

SEQ ID NO: 2625230 - RNA, 18 nt, Human
uaauauaagaagcuuuca

SEQ ID NO: 2625231 - RNA, 23 nt, Human
uaauauaacugccuuaaaacuuu

SEQ ID NO: 2625232 - RNA, 22 nt, Human
uaauauaacugccuuaaaacuu

SEQ ID NO: 2625233 - RNA, 21 nt, Human
uaauauaacugccuuaaaacu

SEQ ID NO: 2625234 - RNA, 16 nt, Human
uaauauaacugccuua

SEQ ID NO: 2625235 - RNA, 21 nt, Human
uaauauaaaaagcuuccauga

SEQ ID NO: 2625236 - RNA, 21 nt, Human
uaauauaaaguaguccuguga

SEQ ID NO: 2625237 - RNA, 19 nt, Human
uaauauaaaguuggaugcg

SEQ ID NO: 2625238 - RNA, 14 nt, Human
uaauauaaaguugg

SEQ ID NO: 2625239 - RNA, 19 nt, Human
uaauaguuuacauguagua

SEQ ID NO: 2625240 - RNA, 21 nt, Human
uaauaguucagguaacaggca

SEQ ID NO: 2625241 - RNA, 22 nt, Human
uaauacaacauguagcugaguu

SEQ ID NO: 2625242 - RNA, 15 nt, Human
uaauacacacaguua

SEQ ID NO: 2625243 - RNA, 11 nt, Human
uaaucuaaaug

SEQ ID NO: 2625244 - RNA, 18 nt, Human
uaaucuauuggguucauu

SEQ ID NO: 2625245 - RNA, 17 nt, Human
uaaucguuaugugugua

SEQ ID NO: 2625246 - RNA, 18 nt, Human
uaaucguuauguguguau

SEQ ID NO: 2625247 - RNA, 19 nt, Human
uaaucguuauguguguaua

SEQ ID NO: 2625248 - RNA, 19 nt, Human
uaaucuauuggguucauua

SEQ ID NO: 2625249 - RNA, 19 nt, Human
uaaucucguuucaaaaaca

SEQ ID NO: 2625250 - RNA, 19 nt, Human
uaaucuauuucuaugagaa

SEQ ID NO: 2625251 - RNA, 17 nt, Human
uaaucuauuucuaugag

SEQ ID NO: 2625252 - RNA, 20 nt, Human
uaaucuauuggguucauuau

SEQ ID NO: 2625253 - RNA, 22 nt, Human
uaaucuauuggguucauuauug

SEQ ID NO: 2625254 - RNA, 13 nt, Human
uaaucuccacagu

SEQ ID NO: 2625255 - RNA, 15 nt, Human
uaaucucguuucaaa

SEQ ID NO: 2625256 - RNA, 18 nt, Human
uaaucuccucuuuuaucu

SEQ ID NO: 2625257 - RNA, 19 nt, Human
uaaucuguguacaaagaaa

SEQ ID NO: 2625258 - RNA, 14 nt, Human
uaaucuguguacaa

SEQ ID NO: 2625259 - RNA, 19 nt, Human
uaaucuuaggggagagcuu

SEQ ID NO: 2625260 - RNA, 20 nt, Human
uaaucuuaggggagagcuuu

SEQ ID NO: 2625261 - RNA, 17 nt, Human
uaaucucguuucaaaaa

SEQ ID NO: 2625262 - RNA, 16 nt, Human
uaaucucguuucaaaa

SEQ ID NO: 2625263 - RNA, 13 nt, Human
uaaucuguguaca

SEQ ID NO: 2625264 - RNA, 20 nt, Human
uaaucugauggcuucuccag

SEQ ID NO: 2625265 - RNA, 14 nt, Human
uaaugcacuuucua

SEQ ID NO: 2625266 - RNA, 13 nt, Human
uaaugcacuuucu

SEQ ID NO: 2625267 - RNA, 12 nt, Human
uaaugcacuuuc

SEQ ID NO: 2625268 - RNA, 11 nt, Human
uaaugauguuu

SEQ ID NO: 2625269 - RNA, 23 nt, Human
uaaugaugucguuugaaucacag

SEQ ID NO: 2625270 - RNA, 17 nt, Human
uaaugaugucguuugaa

SEQ ID NO: 2625271 - RNA, 19 nt, Human
uaaugccacuaaauugaca

SEQ ID NO: 2625272 - RNA, 22 nt, Human
uaaugcaucuagauuauggagc

SEQ ID NO: 2625273 - RNA, 16 nt, Human
uaaugcauguuaggaa

SEQ ID NO: 2625274 - RNA, 17 nt, Human
uaaugcauguuaggaaa

SEQ ID NO: 2625275 - RNA, 13 nt, Human
uaaucuucaguuu

SEQ ID NO: 2625276 - RNA, 16 nt, Human
uaaucuucaguuuuau

SEQ ID NO: 2625277 - RNA, 13 nt, Human
uaaucuuauuagg

SEQ ID NO: 2625278 - RNA, 21 nt, Human
uaaucuuauuagggagaaaau

SEQ ID NO: 2625279 - RNA, 19 nt, Human
uaaugauaaguaaaugcua

SEQ ID NO: 2625280 - RNA, 20 nt, Human
uaaucuucaguuuuaucuuu

SEQ ID NO: 2625281 - RNA, 22 nt, Human
uaaugaugaugggaauugugug

SEQ ID NO: 2625282 - RNA, 22 nt, Human
uaauauuaaaaauauggaacuu

SEQ ID NO: 2625283 - RNA, 23 nt, Human
uaauccucucaaccaccuuucag

SEQ ID NO: 2625284 - RNA, 21 nt, Human
uaauccuucuaguuucccaca

SEQ ID NO: 2625285 - RNA, 19 nt, Human
uaauccuucuaguuuccca

SEQ ID NO: 2625286 - RNA, 18 nt, Human
uaauauuaaaaauaugga

SEQ ID NO: 2625287 - RNA, 14 nt, Human
uaauauuaaaaaua

SEQ ID NO: 2625288 - RNA, 23 nt, Human
uaauauguuaaccucagugucau

SEQ ID NO: 2625289 - RNA, 20 nt, Human
uaauccuucuaguuucccac

SEQ ID NO: 2625290 - RNA, 13 nt, Human
uaaucgaccugcc

SEQ ID NO: 2625291 - RNA, 14 nt, Human
uaaucgaccugccu

SEQ ID NO: 2625292 - RNA, 16 nt, Human
uaaucguguccccuau

SEQ ID NO: 2625293 - RNA, 22 nt, Human
uaaucggcccacagcucccacc

SEQ ID NO: 2625294 - RNA, 15 nt, Human
uaaucguuaugugug

SEQ ID NO: 2625295 - RNA, 16 nt, Human
uaaucguuaugugugu

SEQ ID NO: 2625296 - RNA, 16 nt, Human
uaaucgaccugccucg

SEQ ID NO: 2625297 - RNA, 18 nt, Human
uaaucgcuuaaagauguu

SEQ ID NO: 2625298 - RNA, 15 nt, Human
uaaucggcccacagc

SEQ ID NO: 2625299 - RNA, 16 nt, Human
uaaucggcccacagcu

SEQ ID NO: 2625300 - RNA, 21 nt, Human
uaauauacuuguggacuaaaa

SEQ ID NO: 2625301 - RNA, 17 nt, Human
uaauauacuuguggacu

SEQ ID NO: 2625302 - RNA, 15 nt, Human
uaauauacuugugga

SEQ ID NO: 2625303 - RNA, 13 nt, Human
uaauauacuugug

SEQ ID NO: 2625304 - RNA, 16 nt, Human
uaauauacuauauuua

SEQ ID NO: 2625305 - RNA, 22 nt, Human
uaauauaaguuucuuugcuuca

SEQ ID NO: 2625306 - RNA, 17 nt, Human
uaauauauaucugcugu

SEQ ID NO: 2625307 - RNA, 13 nt, Human
uaauauauguuua

SEQ ID NO: 2625308 - RNA, 17 nt, Human
uaauauaucccagaaau

SEQ ID NO: 2625309 - RNA, 12 nt, Human
uaauauauugcu

SEQ ID NO: 2625310 - RNA, 14 nt, Human
uaauauauguuuac

SEQ ID NO: 2625311 - RNA, 21 nt, Human
uaauauauuuucuguuuucuu

SEQ ID NO: 2625312 - RNA, 17 nt, Human
uaauauauuuucuguuu

SEQ ID NO: 2625313 - RNA, 20 nt, Human
uaauaugggcauuguaguua

SEQ ID NO: 2625314 - RNA, 19 nt, Human
uaauaugggcauuguaguu

SEQ ID NO: 2625315 - RNA, 22 nt, Human
uaauauauuuuuauauuuaguu

SEQ ID NO: 2625316 - RNA, 18 nt, Human
uaauaugggcauuguagu

SEQ ID NO: 2625317 - RNA, 17 nt, Human
uaauauggguucuuuuu

SEQ ID NO: 2625318 - RNA, 21 nt, Human
uaauauguuaaccucaguguc

SEQ ID NO: 2625319 - RNA, 20 nt, Human
uaauauguuaaccucagugu

SEQ ID NO: 2625320 - RNA, 16 nt, Human
uaauauggggaugcag

SEQ ID NO: 2625321 - RNA, 14 nt, Human
uaauauauugcugc

SEQ ID NO: 2625322 - RNA, 19 nt, Human
uaauauauuuguguauuua

SEQ ID NO: 2625323 - RNA, 13 nt, Human
uaauauauuuucu

SEQ ID NO: 2625324 - RNA, 20 nt, Human
uaauauauuuguguauuuaa

SEQ ID NO: 2625325 - RNA, 20 nt, Human
uaauuaaugaaauaucugua

SEQ ID NO: 2625326 - RNA, 19 nt, Human
uaauuaaugaaauaucugu

SEQ ID NO: 2625327 - RNA, 21 nt, Human
uaauuaaugaaauaucuguau

SEQ ID NO: 2625328 - RNA, 17 nt, Human
uaauuaccaaccuguua

SEQ ID NO: 2625329 - RNA, 21 nt, Human
uaauuaccaaccuguuaccua

SEQ ID NO: 2625330 - RNA, 16 nt, Human
uaauuaccaaccuguu

SEQ ID NO: 2625331 - RNA, 17 nt, Human
uaauuacauauuugcau

SEQ ID NO: 2625332 - RNA, 12 nt, Human
uaauucucuuga

SEQ ID NO: 2625333 - RNA, 12 nt, Human
uaauuagagcag

SEQ ID NO: 2625334 - RNA, 18 nt, Human
uaauucuuagcucauucu

SEQ ID NO: 2625335 - RNA, 15 nt, Human
uaauucuguacugau

SEQ ID NO: 2625336 - RNA, 14 nt, Human
uaauucuguacuga

SEQ ID NO: 2625337 - RNA, 21 nt, Human
uaauucuguacauagccuaua

SEQ ID NO: 2625338 - RNA, 14 nt, Human
uaauucuguacaua

SEQ ID NO: 2625339 - RNA, 23 nt, Human
uaauucuguacugauuuuuguaa

SEQ ID NO: 2625340 - RNA, 17 nt, Human
uaauucuguacugauuu

SEQ ID NO: 2625341 - RNA, 13 nt, Human
uaauucucuugaa

SEQ ID NO: 2625342 - RNA, 16 nt, Human
uaauucucuuucaaag

SEQ ID NO: 2625343 - RNA, 12 nt, Human
uaauucuguaca

SEQ ID NO: 2625344 - RNA, 15 nt, Human
uaauucuguaaaugu

SEQ ID NO: 2625345 - RNA, 13 nt, Human
uaauucuguaaau

SEQ ID NO: 2625346 - RNA, 12 nt, Human
uaauucuguaaa

SEQ ID NO: 2625347 - RNA, 10 nt, Human
uaauucugua

SEQ ID NO: 2625348 - RNA, 18 nt, Human
uaauugaucaaauucauu

SEQ ID NO: 2625349 - RNA, 22 nt, Human
uaauugacaggauuauuggaaa

SEQ ID NO: 2625350 - RNA, 20 nt, Human
uaauugacaggauuauugga

SEQ ID NO: 2625351 - RNA, 19 nt, Human
uaauucuuugaccuguugg

SEQ ID NO: 2625352 - RNA, 15 nt, Human
uaauucuuguauauu

SEQ ID NO: 2625353 - RNA, 16 nt, Human
uaauucuuguauauua

SEQ ID NO: 2625354 - RNA, 20 nt, Human
uaauucuucaccuuaggaau

SEQ ID NO: 2625355 - RNA, 14 nt, Human
uaauguuucaaaca

SEQ ID NO: 2625356 - RNA, 23 nt, Human
uaaugcgcaggcuggcccugccc

SEQ ID NO: 2625357 - RNA, 15 nt, Human
uaauguuucaaacau

SEQ ID NO: 2625358 - RNA, 15 nt, Human
uaauguuuaugagcc

SEQ ID NO: 2625359 - RNA, 16 nt, Human
uaauguuuaugagcca

SEQ ID NO: 2625360 - RNA, 17 nt, Human
uaauguuuaugagccag

SEQ ID NO: 2625361 - RNA, 22 nt, Human
uaauguuuaugagccagacaaa

SEQ ID NO: 2625362 - RNA, 14 nt, Human
uaaugcgugcauac

SEQ ID NO: 2625363 - RNA, 19 nt, Human
uaaugcgcaggcuggcccu

SEQ ID NO: 2625364 - RNA, 22 nt, Human
uaaugcgcaggcuggcccugcc

SEQ ID NO: 2625365 - RNA, 15 nt, Human
uaaugccuuacucuu

SEQ ID NO: 2625366 - RNA, 22 nt, Human
uaaugccuuuaaaguaugaauc

SEQ ID NO: 2625367 - RNA, 21 nt, Human
uaaugccuuacucuucuugaa

SEQ ID NO: 2625368 - RNA, 22 nt, Human
uaaugccggugagaauaagaga

SEQ ID NO: 2625369 - RNA, 21 nt, Human
uaaugcauguuaggaaaauuu

SEQ ID NO: 2625370 - RNA, 17 nt, Human
uaauuaaugaaauaucu

SEQ ID NO: 2625371 - RNA, 21 nt, Human
uaauuaaucaugaauguguaa

SEQ ID NO: 2625372 - RNA, 15 nt, Human
uaauuaaucaugaau

SEQ ID NO: 2625373 - RNA, 20 nt, Human
uaauuaaaagaauauuuuaa

SEQ ID NO: 2625374 - RNA, 17 nt, Human
uaauuaaaacacaacau

SEQ ID NO: 2625375 - RNA, 23 nt, Human
uaauuaaauuuugaguucuacau

SEQ ID NO: 2625376 - RNA, 22 nt, Human
uaauuaaauaaaucauuaauac

SEQ ID NO: 2625377 - RNA, 13 nt, Human
uaauuaaaugcuc

SEQ ID NO: 2625378 - RNA, 18 nt, Human
uaauguuuaugagccaga

SEQ ID NO: 2625379 - RNA, 16 nt, Human
uaauuaaaguguccau

SEQ ID NO: 2625380 - RNA, 12 nt, Human
uaauuaaagugu

SEQ ID NO: 2625381 - RNA, 21 nt, Human
uaauuaaauaaaaaucugugg

SEQ ID NO: 2625382 - RNA, 21 nt, Human
uaauugugaaaaaguuaaaca

SEQ ID NO: 2625383 - RNA, 23 nt, Human
uaauuguaucguauagcuguauu

SEQ ID NO: 2625384 - RNA, 21 nt, Human
uaauuguaucguauagcugua

SEQ ID NO: 2625385 - RNA, 20 nt, Human
uaauuguaucguauagcugu

SEQ ID NO: 2625386 - RNA, 19 nt, Human
uaauuguaucguauagcug

SEQ ID NO: 2625387 - RNA, 15 nt, Human
uaauuguaucguaua

SEQ ID NO: 2625388 - RNA, 13 nt, Human
uaauuguaucgua

SEQ ID NO: 2625389 - RNA, 18 nt, Human
uaauuguauaacagguua

SEQ ID NO: 2625390 - RNA, 17 nt, Human
uaauuguauaacagguu

SEQ ID NO: 2625391 - RNA, 16 nt, Human
uaauuguauaacaggu

SEQ ID NO: 2625392 - RNA, 16 nt, Human
uaauuguugcuaaucu

SEQ ID NO: 2625393 - RNA, 22 nt, Human
uaauuguucauuuugagcugaa

SEQ ID NO: 2625394 - RNA, 20 nt, Human
uaauuguuaagauaugaugu

SEQ ID NO: 2625395 - RNA, 22 nt, Human
uaauuggaaaggcagcucuaaa

SEQ ID NO: 2625396 - RNA, 21 nt, Human
uaauuggaagaaauuccugua

SEQ ID NO: 2625397 - RNA, 20 nt, Human
uaauuggaagaaauuccugu

SEQ ID NO: 2625398 - RNA, 12 nt, Human
uaauugcuuuga

SEQ ID NO: 2625399 - RNA, 18 nt, Human
uaauugguccgaucuuug

SEQ ID NO: 2625400 - RNA, 14 nt, Human
uaauuggcagcaga

SEQ ID NO: 2625401 - RNA, 12 nt, Human
uaauuggcagca

SEQ ID NO: 2625402 - RNA, 15 nt, Human
uaauuggcagcagau

SEQ ID NO: 2625403 - RNA, 23 nt, Human
uaauugcuuacauuuuuacaaua

SEQ ID NO: 2625404 - RNA, 21 nt, Human
uaauugcuuacauuuuuacaa

SEQ ID NO: 2625405 - RNA, 16 nt, Human
uaauugcuuacauuuu

SEQ ID NO: 2625406 - RNA, 15 nt, Human
uaauugcuuacauuu

SEQ ID NO: 2625407 - RNA, 22 nt, Human
uaauugcauucaucuuguguuu

SEQ ID NO: 2625408 - RNA, 13 nt, Human
uaauugcauucau

SEQ ID NO: 2625409 - RNA, 12 nt, Human
uaauugcauuca

SEQ ID NO: 2625410 - RNA, 19 nt, Human
uaauugaucaaauucauuu

SEQ ID NO: 2625411 - RNA, 14 nt, Human
uaauugauuucaag

SEQ ID NO: 2625412 - RNA, 11 nt, Human
uaauugcacuc

SEQ ID NO: 2625413 - RNA, 19 nt, Human
uaauugauuucaagaccuu

SEQ ID NO: 2625414 - RNA, 21 nt, Human
uaauuuucuagauuuucuacu

SEQ ID NO: 2625415 - RNA, 17 nt, Human
uaauuuuccuaauaaag

SEQ ID NO: 2625416 - RNA, 18 nt, Human
uaauuuuaugaaugucuu

SEQ ID NO: 2625417 - RNA, 13 nt, Human
uaauuuuaagaaa

SEQ ID NO: 2625418 - RNA, 22 nt, Human
uaauuuuaaccaaaacaugucu

SEQ ID NO: 2625419 - RNA, 13 nt, Human
uaauuuuaaauaa

SEQ ID NO: 2625420 - RNA, 12 nt, Human
uaauuuuaauau

SEQ ID NO: 2625421 - RNA, 23 nt, Human
uaauuuuaaccaaaacaugucuc

SEQ ID NO: 2625422 - RNA, 19 nt, Human
uaauuuuagugacagcucu

SEQ ID NO: 2625423 - RNA, 19 nt, Human
uaauuugugauacaaugcu

SEQ ID NO: 2625424 - RNA, 22 nt, Human
uaauuugugauacaaugcugug

SEQ ID NO: 2625425 - RNA, 14 nt, Human
uaauuuuaaacaaa

SEQ ID NO: 2625426 - RNA, 14 nt, Human
uaauuuuaaccaaa

SEQ ID NO: 2625427 - RNA, 13 nt, Human
uaauuuguaucug

SEQ ID NO: 2625428 - RNA, 21 nt, Human
uaauuuguacauauguaaaau

SEQ ID NO: 2625429 - RNA, 23 nt, Human
uaauuuguaguguuggagaagaa

SEQ ID NO: 2625430 - RNA, 14 nt, Human
uaauuugugauaca

SEQ ID NO: 2625431 - RNA, 15 nt, Human
uaauuugugauacaa

SEQ ID NO: 2625432 - RNA, 18 nt, Human
uaauuugugauacaaugc

SEQ ID NO: 2625433 - RNA, 14 nt, Human
uaauuguuguuucu

SEQ ID NO: 2625434 - RNA, 20 nt, Human
uaauuuguaguguuggagaa

SEQ ID NO: 2625435 - RNA, 19 nt, Human
uaagaucucagugguuaag

SEQ ID NO: 2625436 - RNA, 13 nt, Human
uaagaucucagug

SEQ ID NO: 2625437 - RNA, 15 nt, Human
uaagcaucaaacucu

SEQ ID NO: 2625438 - RNA, 16 nt, Human
uaagcaucaaacucuu

SEQ ID NO: 2625439 - RNA, 15 nt, Human
uaagcaugcacaaau

SEQ ID NO: 2625440 - RNA, 18 nt, Human
uaagcauuaccacucagg

SEQ ID NO: 2625441 - RNA, 21 nt, Human
uaagcauuaccacucaggcau

SEQ ID NO: 2625442 - RNA, 19 nt, Human
uaagcauuaccacucaggc

SEQ ID NO: 2625443 - RNA, 22 nt, Human
uaagccacaagaaauuugauuu

SEQ ID NO: 2625444 - RNA, 19 nt, Human
uaagccaauuuuucugcac

SEQ ID NO: 2625445 - RNA, 18 nt, Human
uaagccaauuuuucugca

SEQ ID NO: 2625446 - RNA, 17 nt, Human
uaagccacuuaaaaugu

SEQ ID NO: 2625447 - RNA, 19 nt, Human
uaagccacuuaaaauguuc

SEQ ID NO: 2625448 - RNA, 13 nt, Human
uaagccagacauc

SEQ ID NO: 2625449 - RNA, 10 nt, Human
uaagccaagg

SEQ ID NO: 2625450 - RNA, 15 nt, Human
uaagccaauuuuucu

SEQ ID NO: 2625451 - RNA, 14 nt, Human
uaagccaagggccu

SEQ ID NO: 2625452 - RNA, 23 nt, Human
uaagcauuguuugcuuauuguuc

SEQ ID NO: 2625453 - RNA, 18 nt, Human
uaagcauuguuugcuuau

SEQ ID NO: 2625454 - RNA, 19 nt, Human
uaagcauuguuugcuuauu

SEQ ID NO: 2625455 - RNA, 20 nt, Human
uaagcauuguuugcuuauug

SEQ ID NO: 2625456 - RNA, 21 nt, Human
uaagcauuguuugcuuauugu

SEQ ID NO: 2625457 - RNA, 18 nt, Human
uaagcauuccaacuaucu

SEQ ID NO: 2625458 - RNA, 16 nt, Human
uaagcauuccaacuau

SEQ ID NO: 2625459 - RNA, 20 nt, Human
uaagcauuccaacuaucuca

SEQ ID NO: 2625460 - RNA, 18 nt, Human
uaagcauuggguggguaa

SEQ ID NO: 2625461 - RNA, 12 nt, Human
uaagcauuguuu

SEQ ID NO: 2625462 - RNA, 15 nt, Human
uaagcauuguuugcu

SEQ ID NO: 2625463 - RNA, 17 nt, Human
uaagcauuguuugcuua

SEQ ID NO: 2625464 - RNA, 20 nt, Human
uaagccagacaucaacagau

SEQ ID NO: 2625465 - RNA, 21 nt, Human
uaagccagacaucaacagaua

SEQ ID NO: 2625466 - RNA, 16 nt, Human
uaagccacaagaaauu

SEQ ID NO: 2625467 - RNA, 20 nt, Human
uaagccacuuaaaauguuca

SEQ ID NO: 2625468 - RNA, 17 nt, Human
uaagccaucuugguaaa

SEQ ID NO: 2625469 - RNA, 20 nt, Human
uaagccucauauuuaaagac

SEQ ID NO: 2625470 - RNA, 14 nt, Human
uaagccuccauuua

SEQ ID NO: 2625471 - RNA, 14 nt, Human
uaagccuuuggaaa

SEQ ID NO: 2625472 - RNA, 17 nt, Human
uaagccuuuggaaacag

SEQ ID NO: 2625473 - RNA, 17 nt, Human
uaagccuccauuuaguu

SEQ ID NO: 2625474 - RNA, 19 nt, Human
uaagccuccauuuaguucu

SEQ ID NO: 2625475 - RNA, 20 nt, Human
uaagccuccauuuaguucuu

SEQ ID NO: 2625476 - RNA, 21 nt, Human
uaagccuccauuuaguucuuu

SEQ ID NO: 2625477 - RNA, 19 nt, Human
uaaggaugcuuguacauaa

SEQ ID NO: 2625478 - RNA, 21 nt, Human
uaagccuuuggaaacagcucg

SEQ ID NO: 2625479 - RNA, 16 nt, Human
uaagccuuuccauaag

SEQ ID NO: 2625480 - RNA, 12 nt, Human
uaagccuugucg

SEQ ID NO: 2625481 - RNA, 15 nt, Human
uaagccuuuccauaa

SEQ ID NO: 2625482 - RNA, 20 nt, Human
uaaggaugcuuguacauaau

SEQ ID NO: 2625483 - RNA, 21 nt, Human
uaaggaugcuuguacauaaug

SEQ ID NO: 2625484 - RNA, 22 nt, Human
uaaggaugcuuguacauaaugc

SEQ ID NO: 2625485 - RNA, 23 nt, Human
uaaggaugcuuguacauaaugcg

SEQ ID NO: 2625486 - RNA, 15 nt, Human
uaaggcaaucauggu

SEQ ID NO: 2625487 - RNA, 20 nt, Human
uaaggaugucacagggccaa

SEQ ID NO: 2625488 - RNA, 13 nt, Human
uaaggcaugaagg

SEQ ID NO: 2625489 - RNA, 23 nt, Human
uaagcgaauguguacaaagugua

SEQ ID NO: 2625490 - RNA, 19 nt, Human
uaaggauggagccagcucu

SEQ ID NO: 2625491 - RNA, 20 nt, Human
uaaggauggagccagcucug

SEQ ID NO: 2625492 - RNA, 18 nt, Human
uaaggaugcuuguacaua

SEQ ID NO: 2625493 - RNA, 18 nt, Human
uaaggaugggaaggaggg

SEQ ID NO: 2625494 - RNA, 19 nt, Human
uaaggaugucacagggcca

SEQ ID NO: 2625495 - RNA, 17 nt, Human
uaaggaugucacagggc

SEQ ID NO: 2625496 - RNA, 12 nt, Human
uaaggaugggaa

SEQ ID NO: 2625497 - RNA, 16 nt, Human
uaaggaugggaaggag

SEQ ID NO: 2625498 - RNA, 22 nt, Human
uaagaggcagggucucacucug

SEQ ID NO: 2625499 - RNA, 14 nt, Human
uaagagcugguguc

SEQ ID NO: 2625500 - RNA, 15 nt, Human
uaagaggcugauaau

SEQ ID NO: 2625501 - RNA, 14 nt, Human
uaagaggcugauaa

SEQ ID NO: 2625502 - RNA, 15 nt, Human
uaagagcaccuuccu

SEQ ID NO: 2625503 - RNA, 22 nt, Human
uaagagcaccuuccucacuucc

SEQ ID NO: 2625504 - RNA, 20 nt, Human
uaagagcaccuuccucacuu

SEQ ID NO: 2625505 - RNA, 19 nt, Human
uaagagcaccuuccucacu

SEQ ID NO: 2625506 - RNA, 18 nt, Human
uaagagcuagcgcugccg

SEQ ID NO: 2625507 - RNA, 20 nt, Human
uaagagcuagcgcugccgca

SEQ ID NO: 2625508 - RNA, 22 nt, Human
uaagagccauuuaggggccacu

SEQ ID NO: 2625509 - RNA, 22 nt, Human
uaagagccauauaaguuugaag

SEQ ID NO: 2625510 - RNA, 16 nt, Human
uaagagcuagcgcugc

SEQ ID NO: 2625511 - RNA, 21 nt, Human
uaagaacuacaaacaaaauuu

SEQ ID NO: 2625512 - RNA, 19 nt, Human
uaagaacugcuuucuuucg

SEQ ID NO: 2625513 - RNA, 21 nt, Human
uaagaagaaaauugcugugcc

SEQ ID NO: 2625514 - RNA, 22 nt, Human
uaagaacugcuuucuuucguuu

SEQ ID NO: 2625515 - RNA, 22 nt, Human
uaagaagaaaauugcugugccu

SEQ ID NO: 2625516 - RNA, 13 nt, Human
uaagaagaaacua

SEQ ID NO: 2625517 - RNA, 14 nt, Human
uaagaagagacugg

SEQ ID NO: 2625518 - RNA, 19 nt, Human
uaagaagagacugggaaga

SEQ ID NO: 2625519 - RNA, 15 nt, Human
uaagagagagagaca

SEQ ID NO: 2625520 - RNA, 13 nt, Human
uaagaagcuguug

SEQ ID NO: 2625521 - RNA, 14 nt, Human
uaagaagacaugaa

SEQ ID NO: 2625522 - RNA, 15 nt, Human
uaagaagacaugaac

SEQ ID NO: 2625523 - RNA, 12 nt, Human
uaagaagagacu

SEQ ID NO: 2625524 - RNA, 22 nt, Human
uaagaaccuuuugagugccuua

SEQ ID NO: 2625525 - RNA, 18 nt, Human
uaagaaauacuguacaau

SEQ ID NO: 2625526 - RNA, 22 nt, Human
uaagaaauaaaacuguuaaagu

SEQ ID NO: 2625527 - RNA, 19 nt, Human
uaagaaauaaaacuguuaa

SEQ ID NO: 2625528 - RNA, 16 nt, Human
uaagaaauaaaacugu

SEQ ID NO: 2625529 - RNA, 16 nt, Human
uaagaaauacuguaca

SEQ ID NO: 2625530 - RNA, 15 nt, Human
uaagaaagugaagca

SEQ ID NO: 2625531 - RNA, 18 nt, Human
uaagaaagugaagcaaau

SEQ ID NO: 2625532 - RNA, 22 nt, Human
uaagaaagugaagcaaaucaga

SEQ ID NO: 2625533 - RNA, 21 nt, Human
uaacuuuuauaaacuuuaccu

SEQ ID NO: 2625534 - RNA, 22 nt, Human
uaacuuuuauaaacuuuaccuu

SEQ ID NO: 2625535 - RNA, 13 nt, Human
uaacugugaaguu

SEQ ID NO: 2625536 - RNA, 19 nt, Human
uaacuuuuauaaacuuuac

SEQ ID NO: 2625537 - RNA, 24 nt, Human
uaagaaagacuaucuaaauguuga

SEQ ID NO: 2625538 - RNA, 23 nt, Human
uaagagggauuagggagagaaga

SEQ ID NO: 2625539 - RNA, 23 nt, Human
uaagagggagggagggcuccaga

SEQ ID NO: 2625540 - RNA, 22 nt, Human
uaagagggagggagggcuccag

SEQ ID NO: 2625541 - RNA, 12 nt, Human
uaagagggaggg

SEQ ID NO: 2625542 - RNA, 18 nt, Human
uaagagggcacacacugu

SEQ ID NO: 2625543 - RNA, 17 nt, Human
uaagagggcacacacug

SEQ ID NO: 2625544 - RNA, 14 nt, Human
uaagagugcugggc

SEQ ID NO: 2625545 - RNA, 18 nt, Human
uaagagugaaaauugucu

SEQ ID NO: 2625546 - RNA, 20 nt, Human
uaagagggcacacacugugu

SEQ ID NO: 2625547 - RNA, 21 nt, Human
uaagaguagaaacugcaggga

SEQ ID NO: 2625548 - RNA, 23 nt, Human
uaagaguguagaagcauuccuuc

SEQ ID NO: 2625549 - RNA, 22 nt, Human
uaagaguguagaagcauuccuu

SEQ ID NO: 2625550 - RNA, 19 nt, Human
uaagaguguagaagcauuc

SEQ ID NO: 2625551 - RNA, 18 nt, Human
uaagaguguagaagcauu

SEQ ID NO: 2625552 - RNA, 16 nt, Human
uaagaguguagaagca

SEQ ID NO: 2625553 - RNA, 13 nt, Human
uaagaguguagaa

SEQ ID NO: 2625554 - RNA, 12 nt, Human
uaagaguguaga

SEQ ID NO: 2625555 - RNA, 19 nt, Human
uaagagugggggagagcag

SEQ ID NO: 2625556 - RNA, 14 nt, Human
uaagauaaaugugc

SEQ ID NO: 2625557 - RNA, 16 nt, Human
uaagauaaaugugcug

SEQ ID NO: 2625558 - RNA, 17 nt, Human
uaagauaaaugugcuga

SEQ ID NO: 2625559 - RNA, 13 nt, Human
uaagauaauuaua

SEQ ID NO: 2625560 - RNA, 23 nt, Human
uaagauaauaguuuacauguagu

SEQ ID NO: 2625561 - RNA, 18 nt, Human
uaagauaauaguuuacau

SEQ ID NO: 2625562 - RNA, 12 nt, Human
uaagauaauuau

SEQ ID NO: 2625563 - RNA, 22 nt, Human
uaagauaauaauauauguuuac

SEQ ID NO: 2625564 - RNA, 15 nt, Human
uaagauaauaauaua

SEQ ID NO: 2625565 - RNA, 14 nt, Human
uaagauaauaauau

SEQ ID NO: 2625566 - RNA, 12 nt, Human
uaagauaauaau

SEQ ID NO: 2625567 - RNA, 21 nt, Human
uaagaguuaguuucuuuggga

SEQ ID NO: 2625568 - RNA, 13 nt, Human
uaagaguguuuaa

SEQ ID NO: 2625569 - RNA, 18 nt, Human
uaagauauuuuucaugau

SEQ ID NO: 2625570 - RNA, 17 nt, Human
uaagauauuuuucauga

SEQ ID NO: 2625571 - RNA, 15 nt, Human
uaagauauuuuucau

SEQ ID NO: 2625572 - RNA, 14 nt, Human
uaagauauuuuuca

SEQ ID NO: 2625573 - RNA, 21 nt, Human
uaagauaugggacauuuuuga

SEQ ID NO: 2625574 - RNA, 19 nt, Human
uaagauaugggacauuuuu

SEQ ID NO: 2625575 - RNA, 19 nt, Human
uaagauauuuuucaugauu

SEQ ID NO: 2625576 - RNA, 18 nt, Human
uaagaucguucucugccu

SEQ ID NO: 2625577 - RNA, 13 nt, Human
uaacagaaaugua

SEQ ID NO: 2625578 - RNA, 20 nt, Human
uaacacagugccuucaauaa

SEQ ID NO: 2625579 - RNA, 19 nt, Human
uaacacagugccuucaaua

SEQ ID NO: 2625580 - RNA, 17 nt, Human
uaacacagcauguguau

SEQ ID NO: 2625581 - RNA, 23 nt, Human
uaacacaaguccugugaauuucu

SEQ ID NO: 2625582 - RNA, 17 nt, Human
uaacacaaguccuguga

SEQ ID NO: 2625583 - RNA, 17 nt, Human
uaacacaagccacagaa

SEQ ID NO: 2625584 - RNA, 16 nt, Human
uaacacaagccacaga

SEQ ID NO: 2625585 - RNA, 18 nt, Human
uaacaauuuuaaugcuau

SEQ ID NO: 2625586 - RNA, 22 nt, Human
uaacaauuucuguccuucagau

SEQ ID NO: 2625587 - RNA, 16 nt, Human
uaacaauuucuguccu

SEQ ID NO: 2625588 - RNA, 14 nt, Human
uaacacacagcucc

SEQ ID NO: 2625589 - RNA, 13 nt, Human
uaacacacagcua

SEQ ID NO: 2625590 - RNA, 12 nt, Human
uaacacacagcu

SEQ ID NO: 2625591 - RNA, 18 nt, Human
uaacacaaguccugugaa

SEQ ID NO: 2625592 - RNA, 17 nt, Human
uaacacacagcucccau

SEQ ID NO: 2625593 - RNA, 15 nt, Human
uaacacacagcuccc

SEQ ID NO: 2625594 - RNA, 14 nt, Human
uaacagaaauguac

SEQ ID NO: 2625595 - RNA, 15 nt, Human
uaacagaaauguaca

SEQ ID NO: 2625596 - RNA, 17 nt, Human
uaacagaacagcuucag

SEQ ID NO: 2625597 - RNA, 16 nt, Human
uaacagaacagcuuca

SEQ ID NO: 2625598 - RNA, 14 nt, Human
uaacagaacagcuu

SEQ ID NO: 2625599 - RNA, 12 nt, Human
uaacagaacagc

SEQ ID NO: 2625600 - RNA, 12 nt, Human
uaacagaaaugu

SEQ ID NO: 2625601 - RNA, 14 nt, Human
uaacacauguccuu

SEQ ID NO: 2625602 - RNA, 21 nt, Human
uaacacagugccuucaauaaa

SEQ ID NO: 2625603 - RNA, 11 nt, Human
uaacacauuau

SEQ ID NO: 2625604 - RNA, 22 nt, Human
uaacagauuuugggguuguguu

SEQ ID NO: 2625605 - RNA, 21 nt, Human
uaacagaugcaaugugcuacu

SEQ ID NO: 2625606 - RNA, 19 nt, Human
uaacagccaggaguguuaa

SEQ ID NO: 2625607 - RNA, 22 nt, Human
uaacagaacagcuucagguuau

SEQ ID NO: 2625608 - RNA, 21 nt, Human
uaacagaacagcuucagguua

SEQ ID NO: 2625609 - RNA, 20 nt, Human
uaacagaacagcuucagguu

SEQ ID NO: 2625610 - RNA, 19 nt, Human
uaacagaacagcuucaggu

SEQ ID NO: 2625611 - RNA, 18 nt, Human
uaacagaacagcuucagg

SEQ ID NO: 2625612 - RNA, 18 nt, Human
uaacagacauuguuuugc

SEQ ID NO: 2625613 - RNA, 14 nt, Human
uaacagacauuguu

SEQ ID NO: 2625614 - RNA, 11 nt, Human
uaacagacauu

SEQ ID NO: 2625615 - RNA, 18 nt, Human
uaacagauaagcaagaga

SEQ ID NO: 2625616 - RNA, 12 nt, Human
uaacagaugcaa

SEQ ID NO: 2625617 - RNA, 15 nt, Human
uaacagaugcaaugu

SEQ ID NO: 2625618 - RNA, 22 nt, Human
uaacagcuccuugggaggaagc

SEQ ID NO: 2625619 - RNA, 20 nt, Human
uaacagcuccuugggaggaa

SEQ ID NO: 2625620 - RNA, 17 nt, Human
uaacagcuccuugggag

SEQ ID NO: 2625621 - RNA, 16 nt, Human
uaacagcuccuuggga

SEQ ID NO: 2625622 - RNA, 15 nt, Human
uaacagcuccuuggg

SEQ ID NO: 2625623 - RNA, 11 nt, Human
uaacagcuccu

SEQ ID NO: 2625624 - RNA, 13 nt, Human
uaacagcucagga

SEQ ID NO: 2625625 - RNA, 14 nt, Human
uaacagcucaggau

SEQ ID NO: 2625626 - RNA, 23 nt, Human
uaacagcuccuugggaggaagca

SEQ ID NO: 2625627 - RNA, 12 nt, Human
uaacagcugaau

SEQ ID NO: 2625628 - RNA, 15 nt, Human
uaacagcugaauuau

SEQ ID NO: 2625629 - RNA, 19 nt, Human
uaacagcugaauuaucuau

SEQ ID NO: 2625630 - RNA, 15 nt, Human
uaacagcugaggucu

SEQ ID NO: 2625631 - RNA, 12 nt, Human
uaacagcugagg

SEQ ID NO: 2625632 - RNA, 12 nt, Human
uaacagcugugg

SEQ ID NO: 2625633 - RNA, 21 nt, Human
uaacaggaagaucuuaaauuu

SEQ ID NO: 2625634 - RNA, 16 nt, Human
uaacaggauuagacag

SEQ ID NO: 2625635 - RNA, 16 nt, Human
uaaauugauguugcug

SEQ ID NO: 2625636 - RNA, 15 nt, Human
uaaauugcuguguau

SEQ ID NO: 2625637 - RNA, 15 nt, Human
uaaauugcuccuuga

SEQ ID NO: 2625638 - RNA, 12 nt, Human
uaaauuguuuga

SEQ ID NO: 2625639 - RNA, 17 nt, Human
uaaauuguauauucacu

SEQ ID NO: 2625640 - RNA, 14 nt, Human
uaaauuguauauuc

SEQ ID NO: 2625641 - RNA, 13 nt, Human
uaaauuguauauu

SEQ ID NO: 2625642 - RNA, 19 nt, Human
uaaauuguauauucacuuu

SEQ ID NO: 2625643 - RNA, 18 nt, Human
uaaauuguauauucacuu

SEQ ID NO: 2625644 - RNA, 23 nt, Human
uaaauuguccguguucauacauu

SEQ ID NO: 2625645 - RNA, 14 nt, Human
uaacaauuucuguc

SEQ ID NO: 2625646 - RNA, 21 nt, Human
uaacaauuuccuuuauauuua

SEQ ID NO: 2625647 - RNA, 15 nt, Human
uaacaauuuccuuua

SEQ ID NO: 2625648 - RNA, 13 nt, Human
uaacaauuuccuu

SEQ ID NO: 2625649 - RNA, 13 nt, Human
uaacaauuccucu

SEQ ID NO: 2625650 - RNA, 15 nt, Human
uaacaauugugaagu

SEQ ID NO: 2625651 - RNA, 14 nt, Human
uaacaauuccucua

SEQ ID NO: 2625652 - RNA, 23 nt, Human
uaacaauguuaaggaaacucuua

SEQ ID NO: 2625653 - RNA, 22 nt, Human
uaacaauguuaaggaaacucuu

SEQ ID NO: 2625654 - RNA, 21 nt, Human
uaacaauguuaaggaaacucu

SEQ ID NO: 2625655 - RNA, 19 nt, Human
uaacaauguuaaggaaacu

SEQ ID NO: 2625656 - RNA, 16 nt, Human
uaacaauguuaaggaa

SEQ ID NO: 2625657 - RNA, 15 nt, Human
uaacaauguuaagga

SEQ ID NO: 2625658 - RNA, 14 nt, Human
uaacaauguuaagg

SEQ ID NO: 2625659 - RNA, 12 nt, Human
uaacaauguuaa

SEQ ID NO: 2625660 - RNA, 13 nt, Human
uaacaauguuaag

SEQ ID NO: 2625661 - RNA, 15 nt, Human
uaacucaucugucac

SEQ ID NO: 2625662 - RNA, 23 nt, Human
uaacucauacugugcuggagcca

SEQ ID NO: 2625663 - RNA, 16 nt, Human
uaacugagugccuuuu

SEQ ID NO: 2625664 - RNA, 11 nt, Human
uaacuccacca

SEQ ID NO: 2625665 - RNA, 16 nt, Human
uaacuccaccaaccca

SEQ ID NO: 2625666 - RNA, 22 nt, Human
uaacuccaccaacccaucagaa

SEQ ID NO: 2625667 - RNA, 14 nt, Human
uaacucaucuguca

SEQ ID NO: 2625668 - RNA, 17 nt, Human
uaacucaucauaaaaua

SEQ ID NO: 2625669 - RNA, 15 nt, Human
uaacucaucauaaaa

SEQ ID NO: 2625670 - RNA, 16 nt, Human
uaacucaucauaaaau

SEQ ID NO: 2625671 - RNA, 19 nt, Human
uaacucauaccuuuaaagg

SEQ ID NO: 2625672 - RNA, 23 nt, Human
uaacucagaucacuacugcaguc

SEQ ID NO: 2625673 - RNA, 21 nt, Human
uaacucagaucacuacugcag

SEQ ID NO: 2625674 - RNA, 14 nt, Human
uaacucaucauaaa

SEQ ID NO: 2625675 - RNA, 20 nt, Human
uaaccguccucgagcaacug

SEQ ID NO: 2625676 - RNA, 14 nt, Human
uaaccucagcucug

SEQ ID NO: 2625677 - RNA, 13 nt, Human
uaaccucagcucu

SEQ ID NO: 2625678 - RNA, 22 nt, Human
uaaccuauuuugaaaaauuccu

SEQ ID NO: 2625679 - RNA, 22 nt, Human
uaaccuauaugauuuauaguuu

SEQ ID NO: 2625680 - RNA, 20 nt, Human
uaaccuauaugauuuauagu

SEQ ID NO: 2625681 - RNA, 20 nt, Human
uaaccuaugauauuuucugu

SEQ ID NO: 2625682 - RNA, 22 nt, Human
uaacucagaaacaucaguuacu

SEQ ID NO: 2625683 - RNA, 20 nt, Human
uaacucagaucacuacugca

SEQ ID NO: 2625684 - RNA, 14 nt, Human
uaacucagaucacu

SEQ ID NO: 2625685 - RNA, 13 nt, Human
uaacucagaucac

SEQ ID NO: 2625686 - RNA, 19 nt, Human
uaaccucagcucugggaga

SEQ ID NO: 2625687 - RNA, 17 nt, Human
uaaccucagcucuggga

SEQ ID NO: 2625688 - RNA, 16 nt, Human
uaaccucagcucuggg

SEQ ID NO: 2625689 - RNA, 15 nt, Human
uaaccucagcucugg

SEQ ID NO: 2625690 - RNA, 14 nt, Human
uaaccucaucuucu

SEQ ID NO: 2625691 - RNA, 19 nt, Human
uaaccucagugucauuuau

SEQ ID NO: 2625692 - RNA, 20 nt, Human
uaaccucagugucauuuaug

SEQ ID NO: 2625693 - RNA, 20 nt, Human
uaacuuuuauaaacuuuacc

SEQ ID NO: 2625694 - RNA, 13 nt, Human
uaacugguauaga

SEQ ID NO: 2625695 - RNA, 24 nt, Human
uaacuggcaguuuuccauugguuu

SEQ ID NO: 2625696 - RNA, 23 nt, Human
uaacuggcaguuuuccauugguu

SEQ ID NO: 2625697 - RNA, 18 nt, Human
uaacugccuuaaaacuuu

SEQ ID NO: 2625698 - RNA, 23 nt, Human
uaacugccaucaagaugagagaa

SEQ ID NO: 2625699 - RNA, 17 nt, Human
uaacugagugccuuuug

SEQ ID NO: 2625700 - RNA, 14 nt, Human
uaacuccagugaag

SEQ ID NO: 2625701 - RNA, 17 nt, Human
uaacugcauugagaacu

SEQ ID NO: 2625702 - RNA, 16 nt, Human
uaacugcauuuuuaga

SEQ ID NO: 2625703 - RNA, 20 nt, Human
uaacugcaauuuuaauugau

SEQ ID NO: 2625704 - RNA, 12 nt, Human
uaacugcaauuu

SEQ ID NO: 2625705 - RNA, 14 nt, Human
uaacaggcuucugg

SEQ ID NO: 2625706 - RNA, 19 nt, Human
uaacaggcagauacaggaa

SEQ ID NO: 2625707 - RNA, 22 nt, Human
uaacaggcucaauauuccugaa

SEQ ID NO: 2625708 - RNA, 23 nt, Human
uaacaggcucaauauuccugaau

SEQ ID NO: 2625709 - RNA, 19 nt, Human
uaacauuaccuuacugugg

SEQ ID NO: 2625710 - RNA, 17 nt, Human
uaacauuaccuuacugu

SEQ ID NO: 2625711 - RNA, 13 nt, Human
uaacauuaccuua

SEQ ID NO: 2625712 - RNA, 12 nt, Human
uaacauuaccuu

SEQ ID NO: 2625713 - RNA, 12 nt, Human
uaacauuauuua

SEQ ID NO: 2625714 - RNA, 18 nt, Human
uaaccaaaggugaaggaa

SEQ ID NO: 2625715 - RNA, 17 nt, Human
uaaccaaaggugaagga

SEQ ID NO: 2625716 - RNA, 11 nt, Human
uaaccaaaggu

SEQ ID NO: 2625717 - RNA, 21 nt, Human
uaaccaaaggugaaggaauau

SEQ ID NO: 2625718 - RNA, 16 nt, Human
uaaccagcagaaaugc

SEQ ID NO: 2625719 - RNA, 19 nt, Human
uaaccagcagaaaugccuu

SEQ ID NO: 2625720 - RNA, 20 nt, Human
uaacccuuugguuuuuuucu

SEQ ID NO: 2625721 - RNA, 20 nt, Human
uaaccagccagauccucuug

SEQ ID NO: 2625722 - RNA, 15 nt, Human
uaaccagcuguaaca

SEQ ID NO: 2625723 - RNA, 13 nt, Human
uaaccacggaaaa

SEQ ID NO: 2625724 - RNA, 14 nt, Human
uaaccagcagaaau

SEQ ID NO: 2625725 - RNA, 24 nt, Human
uaaccacaucaauauugucauucc

SEQ ID NO: 2625726 - RNA, 22 nt, Human
uaaccacaucaauauugucauu

SEQ ID NO: 2625727 - RNA, 21 nt, Human
uaaccaccuaccuuacaguga

SEQ ID NO: 2625728 - RNA, 18 nt, Human
uaaccacaucaauauugu

SEQ ID NO: 2625729 - RNA, 23 nt, Human
uaaccacaaagcacaguuugaac

SEQ ID NO: 2625730 - RNA, 19 nt, Human
uaaccacaaagcacaguuu

SEQ ID NO: 2625731 - RNA, 20 nt, Human
uaaacuuuuuucuuacuguc

SEQ ID NO: 2625732 - RNA, 16 nt, Human
uaaagcauuccaacaa

SEQ ID NO: 2625733 - RNA, 15 nt, Human
uaaagcauuccaaca

SEQ ID NO: 2625734 - RNA, 13 nt, Human
uaaagcauuccaa

SEQ ID NO: 2625735 - RNA, 12 nt, Human
uaaagcauucca

SEQ ID NO: 2625736 - RNA, 23 nt, Human
uaaagcauucaauuuauucaaga

SEQ ID NO: 2625737 - RNA, 22 nt, Human
uaaagcaugaaugguauggaac

SEQ ID NO: 2625738 - RNA, 19 nt, Human
uaaagcaguggacaccagg

SEQ ID NO: 2625739 - RNA, 13 nt, Human
uaaagcaguggac

SEQ ID NO: 2625740 - RNA, 12 nt, Human
uaaagcauuuau

SEQ ID NO: 2625741 - RNA, 20 nt, Human
uaaagccuguauucucaaac

SEQ ID NO: 2625742 - RNA, 21 nt, Human
uaaagccugcuuuuuaagugu

SEQ ID NO: 2625743 - RNA, 16 nt, Human
uaaagccugcuuuuua

SEQ ID NO: 2625744 - RNA, 15 nt, Human
uaaagcuaaaauaac

SEQ ID NO: 2625745 - RNA, 15 nt, Human
uaaagcuagaaauga

SEQ ID NO: 2625746 - RNA, 18 nt, Human
uaaagcucgaaaacaauu

SEQ ID NO: 2625747 - RNA, 17 nt, Human
uaaaggagaaggcauga

SEQ ID NO: 2625748 - RNA, 20 nt, Human
uaaaggaguuaagaguagca

SEQ ID NO: 2625749 - RNA, 22 nt, Human
uaaaggagaaggcaugaaauug

SEQ ID NO: 2625750 - RNA, 16 nt, Human
uaaaggaguuaagagu

SEQ ID NO: 2625751 - RNA, 14 nt, Human
uaaaggaauuuaaa

SEQ ID NO: 2625752 - RNA, 17 nt, Human
uaaagcucgaaaacaau

SEQ ID NO: 2625753 - RNA, 19 nt, Human
uaaagcuacugauuuccuu

SEQ ID NO: 2625754 - RNA, 23 nt, Human
uaaagcuaaaaugauuuuaucug

SEQ ID NO: 2625755 - RNA, 20 nt, Human
uaaagcuaaaaugauuuuau

SEQ ID NO: 2625756 - RNA, 14 nt, Human
uaaagcuagaaaug

SEQ ID NO: 2625757 - RNA, 22 nt, Human
uaaaguguauuuuuuuacuaau

SEQ ID NO: 2625758 - RNA, 23 nt, Human
uaaaguguauuuuuuuacuaaua

SEQ ID NO: 2625759 - RNA, 17 nt, Human
uaaaggauguugguguu

SEQ ID NO: 2625760 - RNA, 19 nt, Human
uaaaggcaccaucuaauag

SEQ ID NO: 2625761 - RNA, 16 nt, Human
uaaaggaugugauugu

SEQ ID NO: 2625762 - RNA, 22 nt, Human
uaaaggaugugauuguggaaug

SEQ ID NO: 2625763 - RNA, 21 nt, Human
uaaaguguauuuuuuuacuaa

SEQ ID NO: 2625764 - RNA, 20 nt, Human
uaaaguguauuuuuuuacua

SEQ ID NO: 2625765 - RNA, 14 nt, Human
uaaaguuugcuuag

SEQ ID NO: 2625766 - RNA, 17 nt, Human
uaaaguuugcuuagaaa

SEQ ID NO: 2625767 - RNA, 14 nt, Human
uaaaguuuguugaa

SEQ ID NO: 2625768 - RNA, 14 nt, Human
uaaaguuucucaga

SEQ ID NO: 2625769 - RNA, 13 nt, Human
uaaaguuucucag

SEQ ID NO: 2625770 - RNA, 17 nt, Human
uaaaguguccauugaca

SEQ ID NO: 2625771 - RNA, 20 nt, Human
uaaaguugaagcuaagauuu

SEQ ID NO: 2625772 - RNA, 13 nt, Human
uaaaguuucuguu

SEQ ID NO: 2625773 - RNA, 17 nt, Human
uaaauaaaaauaauccu

SEQ ID NO: 2625774 - RNA, 14 nt, Human
uaaauaaaaaugga

SEQ ID NO: 2625775 - RNA, 13 nt, Human
uaaauaaaagaaa

SEQ ID NO: 2625776 - RNA, 14 nt, Human
uaaauaaaacccuu

SEQ ID NO: 2625777 - RNA, 21 nt, Human
uaaauaaaacauuuucacaca

SEQ ID NO: 2625778 - RNA, 22 nt, Human
uaaauaaaacauuuucacacaa

SEQ ID NO: 2625779 - RNA, 18 nt, Human
uaaauauauauaaauaua

SEQ ID NO: 2625780 - RNA, 17 nt, Human
uaaauauauauaaauau

SEQ ID NO: 2625781 - RNA, 19 nt, Human
uaaauauauauaaaccuaa

SEQ ID NO: 2625782 - RNA, 18 nt, Human
uaaauauauauaaaccua

SEQ ID NO: 2625783 - RNA, 17 nt, Human
uaaauauauauaaaccu

SEQ ID NO: 2625784 - RNA, 15 nt, Human
uaaauauauauaaac

SEQ ID NO: 2625785 - RNA, 14 nt, Human
uaaauauauauaaa

SEQ ID NO: 2625786 - RNA, 21 nt, Human
uaaauauauauaaauauauau

SEQ ID NO: 2625787 - RNA, 19 nt, Human
uaaauauauauaaauauau

SEQ ID NO: 2625788 - RNA, 13 nt, Human
uaaauauauauaa

SEQ ID NO: 2625789 - RNA, 11 nt, Human
uaaauauauau

SEQ ID NO: 2625790 - RNA, 17 nt, Human
uaaauauauaaauauau

SEQ ID NO: 2625791 - RNA, 16 nt, Human
uaaauauauaaauaua

SEQ ID NO: 2625792 - RNA, 15 nt, Human
uaaauauauaaauau

SEQ ID NO: 2625793 - RNA, 13 nt, Human
uaaauauauaaau

SEQ ID NO: 2625794 - RNA, 14 nt, Human
uaaauauauaaaaa

SEQ ID NO: 2625795 - RNA, 12 nt, Human
uaaauauauaaa

SEQ ID NO: 2625796 - RNA, 20 nt, Human
uaaauaaaauuuguugcaua

SEQ ID NO: 2625797 - RNA, 14 nt, Human
uaaauaaaauuugu

SEQ ID NO: 2625798 - RNA, 13 nt, Human
uaaauaaaauuug

SEQ ID NO: 2625799 - RNA, 22 nt, Human
uaaauaaaccucaaaaugucua

SEQ ID NO: 2625800 - RNA, 13 nt, Human
uaaauaaacccuu

SEQ ID NO: 2625801 - RNA, 15 nt, Human
uaaauaaaaugacca

SEQ ID NO: 2625802 - RNA, 13 nt, Human
uaaauaaaaugac

SEQ ID NO: 2625803 - RNA, 17 nt, Human
uaaauaaaagugaucaa

SEQ ID NO: 2625804 - RNA, 14 nt, Human
uaaauaaaagcagc

SEQ ID NO: 2625805 - RNA, 21 nt, Human
uaaauaaaagaaaaaauaucu

SEQ ID NO: 2625806 - RNA, 15 nt, Human
uaaauaaaagcagca

SEQ ID NO: 2625807 - RNA, 19 nt, Human
uaaauaaaagcagcaucug

SEQ ID NO: 2625808 - RNA, 20 nt, Human
uaaauaaaagcagcaucugc

SEQ ID NO: 2625809 - RNA, 19 nt, Human
uaaauaaaagugaucaaua

SEQ ID NO: 2625810 - RNA, 18 nt, Human
uaaauauaugcuaagucu

SEQ ID NO: 2625811 - RNA, 22 nt, Human
uaaauauauuuaagauaauuau

SEQ ID NO: 2625812 - RNA, 17 nt, Human
uaaauauauuuaagaua

SEQ ID NO: 2625813 - RNA, 21 nt, Human
uaaauauaucuauauuauugu

SEQ ID NO: 2625814 - RNA, 21 nt, Human
uaaauauauauauauauaaaa

SEQ ID NO: 2625815 - RNA, 22 nt, Human
uaaauauauuuuaagacgaaac

SEQ ID NO: 2625816 - RNA, 16 nt, Human
uaaauauauuuuaaga

SEQ ID NO: 2625817 - RNA, 17 nt, Human
uaaauaucuucugauuu

SEQ ID NO: 2625818 - RNA, 18 nt, Human
uaaauaucuucugauuug

SEQ ID NO: 2625819 - RNA, 19 nt, Human
uaaauaugaagcucaccug

SEQ ID NO: 2625820 - RNA, 13 nt, Human
uaaauaugcagug

SEQ ID NO: 2625821 - RNA, 22 nt, Human
uaaauaucuguacuucuucgau

SEQ ID NO: 2625822 - RNA, 11 nt, Human
uaaaucagugg

SEQ ID NO: 2625823 - RNA, 14 nt, Human
uaaaucauuaauac

SEQ ID NO: 2625824 - RNA, 22 nt, Human
uaaauauuuuuucuuuucuauu

SEQ ID NO: 2625825 - RNA, 19 nt, Human
uaaaucaaguuggcuucua

SEQ ID NO: 2625826 - RNA, 23 nt, Human
uaaaucaaugucacuuaaaggcu

SEQ ID NO: 2625827 - RNA, 13 nt, Human
uaaaucaauaaag

SEQ ID NO: 2625828 - RNA, 14 nt, Human
uaaaucaaugucac

SEQ ID NO: 2625829 - RNA, 20 nt, Human
uaaaucagacuaugaaguuu

SEQ ID NO: 2625830 - RNA, 19 nt, Human
uaaaucagccguguaacca

SEQ ID NO: 2625831 - RNA, 19 nt, Human
uaaauauucuauaugaauu

SEQ ID NO: 2625832 - RNA, 15 nt, Human
uaaauauucuauaug

SEQ ID NO: 2625833 - RNA, 19 nt, Human
uaaauauucuauuuucauu

SEQ ID NO: 2625834 - RNA, 18 nt, Human
uaaauauguuuuuuagau

SEQ ID NO: 2625835 - RNA, 13 nt, Human
uaaauauucuaua

SEQ ID NO: 2625836 - RNA, 19 nt, Human
uaaauaugccucuccuuug

SEQ ID NO: 2625837 - RNA, 17 nt, Human
uaaauaugcagugauau

SEQ ID NO: 2625838 - RNA, 16 nt, Human
uaaauaugcagugaua

SEQ ID NO: 2625839 - RNA, 14 nt, Human
uaaauaugcaguga

SEQ ID NO: 2625840 - RNA, 23 nt, Human
uaaauaugccucuccuuuguaua

SEQ ID NO: 2625841 - RNA, 21 nt, Human
uaaauaugccucuccuuugua

SEQ ID NO: 2625842 - RNA, 21 nt, Human
uaaauauguuagcaaagaguu

SEQ ID NO: 2625843 - RNA, 18 nt, Human
uaaauauguuagcaaaga

SEQ ID NO: 2625844 - RNA, 13 nt, Human
uaaauauuucaag

SEQ ID NO: 2625845 - RNA, 12 nt, Human
uaaauauuucaa

SEQ ID NO: 2625846 - RNA, 14 nt, Human
uaaauauuucaaga

SEQ ID NO: 2625847 - RNA, 12 nt, Human
uaaauauuuccu

SEQ ID NO: 2625848 - RNA, 13 nt, Human
uaaauauuuccuu

SEQ ID NO: 2625849 - RNA, 14 nt, Human
uaaauauuuccuua

SEQ ID NO: 2625850 - RNA, 15 nt, Human
uaaauauuuccuuaa

SEQ ID NO: 2625851 - RNA, 11 nt, Human
uaaauauuuac

SEQ ID NO: 2625852 - RNA, 17 nt, Human
uaaauauuuacauauga

SEQ ID NO: 2625853 - RNA, 18 nt, Human
uaaauauuuacauaugaa

SEQ ID NO: 2625854 - RNA, 19 nt, Human
uaaauauuuacauaugaaa

SEQ ID NO: 2625855 - RNA, 21 nt, Human
uaaauauuuacauaugaaauu

SEQ ID NO: 2625856 - RNA, 16 nt, Human
uaaauauuuauguaga

SEQ ID NO: 2625857 - RNA, 17 nt, Human
uaaauauuuauguagau

SEQ ID NO: 2625858 - RNA, 10 nt, Human
uaaauauuua

SEQ ID NO: 2625859 - RNA, 14 nt, Human
uaaacuuaaucuaa

SEQ ID NO: 2625860 - RNA, 13 nt, Human
uaaacuuaaucua

SEQ ID NO: 2625861 - RNA, 18 nt, Human
uaaacuuaaucuaaaugg

SEQ ID NO: 2625862 - RNA, 19 nt, Human
uaaacuuaaucuaaaugga

SEQ ID NO: 2625863 - RNA, 16 nt, Human
uaaacuuuaccuuuuu

SEQ ID NO: 2625864 - RNA, 20 nt, Human
uaaacuuuacccaaaaacua

SEQ ID NO: 2625865 - RNA, 22 nt, Human
uaaacuuuaccuuuuuuauaca

SEQ ID NO: 2625866 - RNA, 12 nt, Human
uaaacuuucaca

SEQ ID NO: 2625867 - RNA, 13 nt, Human
uaaacuuucacac

SEQ ID NO: 2625868 - RNA, 15 nt, Human
uaaacuuagaauaaa

SEQ ID NO: 2625869 - RNA, 18 nt, Human
uaaacuuuagaguagcau

SEQ ID NO: 2625870 - RNA, 20 nt, Human
uaaacugcccccucugcccu

SEQ ID NO: 2625871 - RNA, 21 nt, Human
uaaacugcccccucugcccug

SEQ ID NO: 2625872 - RNA, 17 nt, Human
uaaacauaaauaaauau

SEQ ID NO: 2625873 - RNA, 20 nt, Human
uaaacauaauucuuguauau

SEQ ID NO: 2625874 - RNA, 15 nt, Human
uaaacauaauucuug

SEQ ID NO: 2625875 - RNA, 22 nt, Human
uaaacugcccccucugcccugc

SEQ ID NO: 2625876 - RNA, 23 nt, Human
uaaacugcccccucugcccugcg

SEQ ID NO: 2625877 - RNA, 20 nt, Human
uaaacugguauuuuaucuuu

SEQ ID NO: 2625878 - RNA, 22 nt, Human
uaaacagcaguguuccccaucu

SEQ ID NO: 2625879 - RNA, 17 nt, Human
uaaacagcaguguuccc

SEQ ID NO: 2625880 - RNA, 13 nt, Human
uaaacagcagugu

SEQ ID NO: 2625881 - RNA, 20 nt, Human
uaaacagauuuuuacaaaug

SEQ ID NO: 2625882 - RNA, 19 nt, Human
uaaacagauuuuuacaaau

SEQ ID NO: 2625883 - RNA, 18 nt, Human
uaaacagauuuuuacaaa

SEQ ID NO: 2625884 - RNA, 15 nt, Human
uaaacagauuuuuac

SEQ ID NO: 2625885 - RNA, 19 nt, Human
uaaacagggcaucuccagg

SEQ ID NO: 2625886 - RNA, 23 nt, Human
uaaacaggcccagcauugcuggu

SEQ ID NO: 2625887 - RNA, 15 nt, Human
uaaacaggcccagca

SEQ ID NO: 2625888 - RNA, 14 nt, Human
uaaacaggcccagc

SEQ ID NO: 2625889 - RNA, 13 nt, Human
uaaacaggcccag

SEQ ID NO: 2625890 - RNA, 12 nt, Human
uaaacaggccca

SEQ ID NO: 2625891 - RNA, 18 nt, Human
uaaacaggagacaggaag

SEQ ID NO: 2625892 - RNA, 13 nt, Human
uaaacagugccug

SEQ ID NO: 2625893 - RNA, 17 nt, Human
uaaacagugccugcuga

SEQ ID NO: 2625894 - RNA, 13 nt, Human
uaaacaguucuug

SEQ ID NO: 2625895 - RNA, 18 nt, Human
uaaacagugccugcugaa

SEQ ID NO: 2625896 - RNA, 20 nt, Human
uaaacagggcaucuccagga

SEQ ID NO: 2625897 - RNA, 20 nt, Human
uaaacagugagccugaauuu

SEQ ID NO: 2625898 - RNA, 23 nt, Human
uaaacagugagccugaauuuugu

SEQ ID NO: 2625899 - RNA, 12 nt, Human
uaaacagugccu

SEQ ID NO: 2625900 - RNA, 16 nt, Human
uaaacagauauaaaug

SEQ ID NO: 2625901 - RNA, 21 nt, Human
uaaacagauauaaauggcugg

SEQ ID NO: 2625902 - RNA, 23 nt, Human
uaaacagacuauuuaacuugagg

SEQ ID NO: 2625903 - RNA, 11 nt, Human
uaaacacugug

SEQ ID NO: 2625904 - RNA, 21 nt, Human
uaaacacucuugaaaaaugca

SEQ ID NO: 2625905 - RNA, 23 nt, Human
uaaacaagaccacguuucuaaag

SEQ ID NO: 2625906 - RNA, 15 nt, Human
uaaacaagauuuuaa

SEQ ID NO: 2625907 - RNA, 20 nt, Human
uaaacaagaaucagucuauc

SEQ ID NO: 2625908 - RNA, 21 nt, Human
uaaacaagauuuuaaagacau

SEQ ID NO: 2625909 - RNA, 20 nt, Human
uaaacaagauuuuaaagaca

SEQ ID NO: 2625910 - RNA, 21 nt, Human
uaaacaaugcugauuugguga

SEQ ID NO: 2625911 - RNA, 18 nt, Human
uaaacaauaucagacuuu

SEQ ID NO: 2625912 - RNA, 14 nt, Human
uaaaaugauuuuau

SEQ ID NO: 2625913 - RNA, 22 nt, Human
uaaaaugauuguaaaauagcuu

SEQ ID NO: 2625914 - RNA, 17 nt, Human
uaaaaugauuuuaucug

SEQ ID NO: 2625915 - RNA, 15 nt, Human
uaaaaugauuuuauc

SEQ ID NO: 2625916 - RNA, 18 nt, Human
uaaaaugauuuuaucugu

SEQ ID NO: 2625917 - RNA, 20 nt, Human
uaaaaugcaacauguguacu

SEQ ID NO: 2625918 - RNA, 17 nt, Human
uaaaaugcaacaugugu

SEQ ID NO: 2625919 - RNA, 20 nt, Human
uaaaaugccucaguguauuu

SEQ ID NO: 2625920 - RNA, 17 nt, Human
uaaaaugccucagugua

SEQ ID NO: 2625921 - RNA, 21 nt, Human
uaaaaugccucaguguauuug

SEQ ID NO: 2625922 - RNA, 16 nt, Human
uaaaaugcaugauuuu

SEQ ID NO: 2625923 - RNA, 19 nt, Human
uaaaaugcaugauuuugua

SEQ ID NO: 2625924 - RNA, 18 nt, Human
uaaaaugcaacaugugua

SEQ ID NO: 2625925 - RNA, 12 nt, Human
uaaacaaaugua

SEQ ID NO: 2625926 - RNA, 18 nt, Human
uaaacaagaccacguuuc

SEQ ID NO: 2625927 - RNA, 22 nt, Human
uaaacaaauucauauucugucu

SEQ ID NO: 2625928 - RNA, 21 nt, Human
uaaacaaauucauauucuguc

SEQ ID NO: 2625929 - RNA, 19 nt, Human
uaaacaaauucauauucug

SEQ ID NO: 2625930 - RNA, 17 nt, Human
uaaacaaauucauauuc

SEQ ID NO: 2625931 - RNA, 19 nt, Human
uaaacaaauguaugauuac

SEQ ID NO: 2625932 - RNA, 19 nt, Human
uaaaaaugcaaauccuaug

SEQ ID NO: 2625933 - RNA, 20 nt, Human
uaaaaaugcaaauccuaugu

SEQ ID NO: 2625934 - RNA, 16 nt, Human
uaaaaaugcaaauccu

SEQ ID NO: 2625935 - RNA, 23 nt, Human
uaaaaaugggacuucuuuucaca

SEQ ID NO: 2625936 - RNA, 20 nt, Human
uaaaaaugggacuucuuuuc

SEQ ID NO: 2625937 - RNA, 19 nt, Human
uaaaaaugggacuucuuuu

SEQ ID NO: 2625938 - RNA, 18 nt, Human
uaaaaaugggacuucuuu

SEQ ID NO: 2625939 - RNA, 17 nt, Human
uaaaaaugggacuucuu

SEQ ID NO: 2625940 - RNA, 19 nt, Human
uaaaaauggcucagaugcc

SEQ ID NO: 2625941 - RNA, 15 nt, Human
uaaaaaugguuuaaa

SEQ ID NO: 2625942 - RNA, 21 nt, Human
uaaaagauauaagugcuguau

SEQ ID NO: 2625943 - RNA, 22 nt, Human
uaaaagauauaagugcuguaua

SEQ ID NO: 2625944 - RNA, 13 nt, Human
uaaaagaucgcag

SEQ ID NO: 2625945 - RNA, 14 nt, Human
uaaaagaugaaaau

SEQ ID NO: 2625946 - RNA, 14 nt, Human
uaaaagauccuuuu

SEQ ID NO: 2625947 - RNA, 16 nt, Human
uaaaagaugcaaugua

SEQ ID NO: 2625948 - RNA, 19 nt, Human
uaaaagauggggucuguaa

SEQ ID NO: 2625949 - RNA, 18 nt, Human
uaaaagauggggucugua

SEQ ID NO: 2625950 - RNA, 21 nt, Human
uaaaagauggggucuguaaaa

SEQ ID NO: 2625951 - RNA, 20 nt, Human
uaaaagauggggucuguaaa

SEQ ID NO: 2625952 - RNA, 22 nt, Human
uaaaagauggggucuguaaaau

SEQ ID NO: 2625953 - RNA, 21 nt, Human
uaaaagcagcaucugcuaaua

SEQ ID NO: 2625954 - RNA, 15 nt, Human
uaaaagcauaaaugc

SEQ ID NO: 2625955 - RNA, 21 nt, Human
uaaaagggacugagaaauuua

SEQ ID NO: 2625956 - RNA, 20 nt, Human
uaaaagggacugagaaauuu

SEQ ID NO: 2625957 - RNA, 19 nt, Human
uaaaagggacugagaaauu

SEQ ID NO: 2625958 - RNA, 17 nt, Human
uaaaagggacugagaaa

SEQ ID NO: 2625959 - RNA, 16 nt, Human
uaaaaggaaaagcaaa

SEQ ID NO: 2625960 - RNA, 14 nt, Human
uaaaaggaaaagca

SEQ ID NO: 2625961 - RNA, 17 nt, Human
uaaaagcauaaaugcaa

SEQ ID NO: 2625962 - RNA, 18 nt, Human
uaaaagcauaaaugcaaa

SEQ ID NO: 2625963 - RNA, 13 nt, Human
uaaaauauuuuca

SEQ ID NO: 2625964 - RNA, 16 nt, Human
uaaaauauuuugaauc

SEQ ID NO: 2625965 - RNA, 14 nt, Human
uaaaauauuuugaa

SEQ ID NO: 2625966 - RNA, 13 nt, Human
uaaaauauuuauu

SEQ ID NO: 2625967 - RNA, 20 nt, Human
uaaaaggccaaaccucuguu

SEQ ID NO: 2625968 - RNA, 17 nt, Human
uaaaaucagccaauuau

SEQ ID NO: 2625969 - RNA, 15 nt, Human
uaaaaucagccaauu

SEQ ID NO: 2625970 - RNA, 14 nt, Human
uaaaaucagccaau

SEQ ID NO: 2625971 - RNA, 13 nt, Human
uaaaaucagccaa

SEQ ID NO: 2625972 - RNA, 17 nt, Human
uaaaauauuuuugaaag

SEQ ID NO: 2625973 - RNA, 20 nt, Human
uaaaauauuuugaaucaaua

SEQ ID NO: 2625974 - RNA, 18 nt, Human
uaaaauccauacauuugu

SEQ ID NO: 2625975 - RNA, 19 nt, Human
uaaaauccauacauuugug

SEQ ID NO: 2625976 - RNA, 22 nt, Human
uaaaaucagccaauuauguuaa

SEQ ID NO: 2625977 - RNA, 21 nt, Human
uaaaaucagccaauuauguua

SEQ ID NO: 2625978 - RNA, 15 nt, Human
uaaaauccucaaucc

SEQ ID NO: 2625979 - RNA, 16 nt, Human
uaaaaugagaaaucua

SEQ ID NO: 2625980 - RNA, 15 nt, Human
uaaaaugagaaaucu

SEQ ID NO: 2625981 - RNA, 17 nt, Human
uaaaaugaggacauguu

SEQ ID NO: 2625982 - RNA, 21 nt, Human
uaaaaugaccaguaauuguga

SEQ ID NO: 2625983 - RNA, 20 nt, Human
uaaaaugauuguaaaauagc

SEQ ID NO: 2625984 - RNA, 18 nt, Human
uaaaaugauuguaaaaua

SEQ ID NO: 2625985 - RNA, 17 nt, Human
uaaaaugauuguaaaau

SEQ ID NO: 2625986 - RNA, 16 nt, Human
uaaaaugauuguaaaa

SEQ ID NO: 2625987 - RNA, 15 nt, Human
uaaaaugauuguaaa

SEQ ID NO: 2625988 - RNA, 14 nt, Human
uaaaaugauuguaa

SEQ ID NO: 2625989 - RNA, 20 nt, Human
uaaaaugagguucaacuguu

SEQ ID NO: 2625990 - RNA, 13 nt, Human
uaaaaugagaaau

SEQ ID NO: 2625991 - RNA, 15 nt, Human
uaaaaucuuuucuau

SEQ ID NO: 2625992 - RNA, 14 nt, Human
uaaaaugaaauuac

SEQ ID NO: 2625993 - RNA, 22 nt, Human
uaaaaucuuucuuucuuagaaa

SEQ ID NO: 2625994 - RNA, 21 nt, Human
uaaaaucuuucuuucuuagaa

SEQ ID NO: 2625995 - RNA, 20 nt, Human
uaaaaucuuucuuucuuaga

SEQ ID NO: 2625996 - RNA, 19 nt, Human
uaaaaucuuucuuucuuag

SEQ ID NO: 2625997 - RNA, 18 nt, Human
uaaaaucuuucuuucuua

SEQ ID NO: 2625998 - RNA, 12 nt, Human
guuuuucaauua

SEQ ID NO: 2625999 - RNA, 14 nt, Human
guuuuuauuaguac

SEQ ID NO: 2626000 - RNA, 16 nt, Human
guuuuuauuccuugug

SEQ ID NO: 2626001 - RNA, 23 nt, Human
guuuuuauaaaaaauggugccug

SEQ ID NO: 2626002 - RNA, 21 nt, Human
guuuuuaugaagaaaaaauac

SEQ ID NO: 2626003 - RNA, 16 nt, Human
guuuuuauggggcuga

SEQ ID NO: 2626004 - RNA, 18 nt, Human
guuuuuauggggcugaac

SEQ ID NO: 2626005 - RNA, 21 nt, Human
guuuuucaauuaaacggauua

SEQ ID NO: 2626006 - RNA, 19 nt, Human
guuuuucaauuaaacggau

SEQ ID NO: 2626007 - RNA, 18 nt, Human
guuuuucaauuaaacgga

SEQ ID NO: 2626008 - RNA, 17 nt, Human
guuuuucaauuaaacgg

SEQ ID NO: 2626009 - RNA, 16 nt, Human
guuuuucaauuaaacg

SEQ ID NO: 2626010 - RNA, 15 nt, Human
guuuuucaauuaaac

SEQ ID NO: 2626011 - RNA, 14 nt, Human
guuuuucaauuaaa

SEQ ID NO: 2626012 - RNA, 13 nt, Human
guuuuucaauuaa

SEQ ID NO: 2626013 - RNA, 12 nt, Human
guuuuucacauu

SEQ ID NO: 2626014 - RNA, 14 nt, Human
guuuuucacauuuu

SEQ ID NO: 2626015 - RNA, 16 nt, Human
guuuuucacauuuucc

SEQ ID NO: 2626016 - RNA, 16 nt, Human
uaaaaaaaaaugccuu

SEQ ID NO: 2626017 - RNA, 15 nt, Human
uaaaaaaaaaugccu

SEQ ID NO: 2626018 - RNA, 22 nt, Human
uaaaaaaaaaggcauauugcuu

SEQ ID NO: 2626019 - RNA, 16 nt, Human
uaaaaaaaaaggcaua

SEQ ID NO: 2626020 - RNA, 14 nt, Human
uaaaaaaaaaggca

SEQ ID NO: 2626021 - RNA, 19 nt, Human
uaaaaaaaaagaucuguuu

SEQ ID NO: 2626022 - RNA, 23 nt, Human
guuuuucaauuaaacggauuauu

SEQ ID NO: 2626023 - RNA, 12 nt, Human
guuuuucaguuu

SEQ ID NO: 2626024 - RNA, 23 nt, Human
uaaaaaaaauaguugagccagca

SEQ ID NO: 2626025 - RNA, 16 nt, Human
uaaaaaaaauaguuga

SEQ ID NO: 2626026 - RNA, 14 nt, Human
uaaaaaaaauaguu

SEQ ID NO: 2626027 - RNA, 21 nt, Human
uaaaaaaacaaucauuugcuu

SEQ ID NO: 2626028 - RNA, 15 nt, Human
uaaaaaaaagaaaaa

SEQ ID NO: 2626029 - RNA, 16 nt, Human
uaaaaaaaagaaaaaa

SEQ ID NO: 2626030 - RNA, 17 nt, Human
uaaaaaaaagaaaaaag

SEQ ID NO: 2626031 - RNA, 21 nt, Human
uaaaaaaaacaaaaagaacaa

SEQ ID NO: 2626032 - RNA, 19 nt, Human
uaaaaaaaacaaaaagaac

SEQ ID NO: 2626033 - RNA, 18 nt, Human
uaaaaaaaacaaaaagaa

SEQ ID NO: 2626034 - RNA, 17 nt, Human
uaaaaaaaacaaaaaga

SEQ ID NO: 2626035 - RNA, 13 nt, Human
uaaaaaaaacaaa

SEQ ID NO: 2626036 - RNA, 17 nt, Human
uaaaaaaaaaugccuuu

SEQ ID NO: 2626037 - RNA, 18 nt, Human
uaaaaaaaaaugccuuug

SEQ ID NO: 2626038 - RNA, 22 nt, Human
uaaaaaaaacaaaaagaacaaa

SEQ ID NO: 2626039 - RNA, 11 nt, Human
uaaaaaaaaga

SEQ ID NO: 2626040 - RNA, 14 nt, Human
uaaaaaaaagaaaa

SEQ ID NO: 2626041 - RNA, 12 nt, Human
uaaaaaaaagaa

SEQ ID NO: 2626042 - RNA, 11 nt, Human
uaaaaaacacu

SEQ ID NO: 2626043 - RNA, 16 nt, Human
uaaaaaaauuuaagug

SEQ ID NO: 2626044 - RNA, 15 nt, Human
uaaaaaaauuuaagu

SEQ ID NO: 2626045 - RNA, 12 nt, Human
uaaaaaaauuua

SEQ ID NO: 2626046 - RNA, 13 nt, Human
uaaaaaaauuggu

SEQ ID NO: 2626047 - RNA, 20 nt, Human
uaaaaaaauaauaauaaugu

SEQ ID NO: 2626048 - RNA, 13 nt, Human
uaaaaaaaugaca

SEQ ID NO: 2626049 - RNA, 19 nt, Human
uaaaaaaauaaaacauuuu

SEQ ID NO: 2626050 - RNA, 18 nt, Human
uaaaaaaauaaaacauuu

SEQ ID NO: 2626051 - RNA, 18 nt, Human
uaaaaaaaggcauuguuu

SEQ ID NO: 2626052 - RNA, 17 nt, Human
uaaaaaaauaaaacauu

SEQ ID NO: 2626053 - RNA, 17 nt, Human
uaaaaaauggugccuga

SEQ ID NO: 2626054 - RNA, 15 nt, Human
uaaaaaauggugccu

SEQ ID NO: 2626055 - RNA, 15 nt, Human
uaaaaaauggaaaga

SEQ ID NO: 2626056 - RNA, 17 nt, Human
uaaaaaauaaucuauuu

SEQ ID NO: 2626057 - RNA, 10 nt, Human
uaaaaacaaa

SEQ ID NO: 2626058 - RNA, 13 nt, Human
uaaaaaaugucca

SEQ ID NO: 2626059 - RNA, 18 nt, Human
uaaaaacagcauugcuuu

SEQ ID NO: 2626060 - RNA, 19 nt, Human
uaaaaacagcauugcuuuc

SEQ ID NO: 2626061 - RNA, 17 nt, Human
uaaaaacagcauugcuu

SEQ ID NO: 2626062 - RNA, 23 nt, Human
uaaaaagaaaagauaaagaugau

SEQ ID NO: 2626063 - RNA, 17 nt, Human
uaaaaagaaaagauaaa

SEQ ID NO: 2626064 - RNA, 11 nt, Human
uaaaaaugcaa

SEQ ID NO: 2626065 - RNA, 14 nt, Human
uaaaaacuuugcua

SEQ ID NO: 2626066 - RNA, 16 nt, Human
uaaaaacugacuccuu

SEQ ID NO: 2626067 - RNA, 17 nt, Human
uaaaaacugacuccuua

SEQ ID NO: 2626068 - RNA, 17 nt, Human
uaaaaacuauuuaacuu

SEQ ID NO: 2626069 - RNA, 14 nt, Human
uaaaaaccaagaag

SEQ ID NO: 2626070 - RNA, 20 nt, Human
uaaaaacagcauugcuuucu

SEQ ID NO: 2626071 - RNA, 22 nt, Human
uaaaaacagcauugcuuucuga

SEQ ID NO: 2626072 - RNA, 16 nt, Human
uaaaaaagaaacauuu

SEQ ID NO: 2626073 - RNA, 21 nt, Human
uaaaaaacuaucuuuuugcuu

SEQ ID NO: 2626074 - RNA, 15 nt, Human
uaaaaaacuuguaaa

SEQ ID NO: 2626075 - RNA, 19 nt, Human
uaaaaaagauauauuaaaa

SEQ ID NO: 2626076 - RNA, 15 nt, Human
uaaaaaagcugugug

SEQ ID NO: 2626077 - RNA, 20 nt, Human
uaaaaaacugcugacuguuu

SEQ ID NO: 2626078 - RNA, 23 nt, Human
uaaaaaacugcugacuguuuucu

SEQ ID NO: 2626079 - RNA, 12 nt, Human
uaaaaaacacug

SEQ ID NO: 2626080 - RNA, 14 nt, Human
uaaaaaacaaagaa

SEQ ID NO: 2626081 - RNA, 19 nt, Human
uaaaaaacaaagaagacaa

SEQ ID NO: 2626082 - RNA, 11 nt, Human
uaaaaaacaac

SEQ ID NO: 2626083 - RNA, 17 nt, Human
uaaaaaaauuuaagugc

SEQ ID NO: 2626084 - RNA, 10 nt, Human
guuuguuuca

SEQ ID NO: 2626085 - RNA, 18 nt, Human
guuuguuucucccccugg

SEQ ID NO: 2626086 - RNA, 24 nt, Human
guuuucaggaguggguugauuuca

SEQ ID NO: 2626087 - RNA, 21 nt, Human
guuuguuucucccccugggcu

SEQ ID NO: 2626088 - RNA, 19 nt, Human
guuuguuucucccccuggg

SEQ ID NO: 2626089 - RNA, 20 nt, Human
guuuguuucucccccugggc

SEQ ID NO: 2626090 - RNA, 16 nt, Human
guuuguugugaggauu

SEQ ID NO: 2626091 - RNA, 19 nt, Human
guuuguuggaucuucaaug

SEQ ID NO: 2626092 - RNA, 16 nt, Human
guuuucaguuuguaua

SEQ ID NO: 2626093 - RNA, 14 nt, Human
guuuucauaauaaa

SEQ ID NO: 2626094 - RNA, 14 nt, Human
guuuucaucaagac

SEQ ID NO: 2626095 - RNA, 22 nt, Human
guuuucauaauaaaacuuuaaa

SEQ ID NO: 2626096 - RNA, 17 nt, Human
guuuucaguguacaugg

SEQ ID NO: 2626097 - RNA, 18 nt, Human
guuuucaggcuagaugua

SEQ ID NO: 2626098 - RNA, 16 nt, Human
guuuucaguguacaug

SEQ ID NO: 2626099 - RNA, 16 nt, Human
guuuucauuaucucaa

SEQ ID NO: 2626100 - RNA, 10 nt, Human
guuuucaugg

SEQ ID NO: 2626101 - RNA, 22 nt, Human
guuuucauggugaaaauguacu

SEQ ID NO: 2626102 - RNA, 21 nt, Human
guuuucauggugaaaauguac

SEQ ID NO: 2626103 - RNA, 23 nt, Human
guuuucauggugaaaauguacug

SEQ ID NO: 2626104 - RNA, 17 nt, Human
guuuucauuugguucau

SEQ ID NO: 2626105 - RNA, 16 nt, Human
guuuucauuugguuca

SEQ ID NO: 2626106 - RNA, 14 nt, Human
guuuuccacccugg

SEQ ID NO: 2626107 - RNA, 16 nt, Human
guuuuccacccuggaa

SEQ ID NO: 2626108 - RNA, 16 nt, Human
guuuuccuuucucacc

SEQ ID NO: 2626109 - RNA, 13 nt, Human
guuuucuccuccc

SEQ ID NO: 2626110 - RNA, 16 nt, Human
guuuucuccucccagg

SEQ ID NO: 2626111 - RNA, 18 nt, Human
guuuucuccucccaggaa

SEQ ID NO: 2626112 - RNA, 21 nt, Human
guuuucuccucccaggaacug

SEQ ID NO: 2626113 - RNA, 17 nt, Human
guuuucucucggcuccc

SEQ ID NO: 2626114 - RNA, 23 nt, Human
guuuucgcaccuaccaucaggga

SEQ ID NO: 2626115 - RNA, 20 nt, Human
guuuucgaagcucagcccac

SEQ ID NO: 2626116 - RNA, 23 nt, Human
guuuucgaagcucagcccacccc

SEQ ID NO: 2626117 - RNA, 17 nt, Human
guuuucgaagcucagcc

SEQ ID NO: 2626118 - RNA, 18 nt, Human
guuuucgaagcucagccc

SEQ ID NO: 2626119 - RNA, 19 nt, Human
guuuucgaagcucagccca

SEQ ID NO: 2626120 - RNA, 19 nt, Human
guuuuccuuugucaucauu

SEQ ID NO: 2626121 - RNA, 17 nt, Human
guuuuccuuucucaccg

SEQ ID NO: 2626122 - RNA, 22 nt, Human
guuuuuauggcuuuugugcauu

SEQ ID NO: 2626123 - RNA, 23 nt, Human
guuuuuauggcuuuugugcauua

SEQ ID NO: 2626124 - RNA, 19 nt, Human
guuuuuauggcuuuugugc

SEQ ID NO: 2626125 - RNA, 14 nt, Human
guuuuuacuccagu

SEQ ID NO: 2626126 - RNA, 17 nt, Human
guuuuuacuuucuguug

SEQ ID NO: 2626127 - RNA, 18 nt, Human
guuuuuauaaaaaauggu

SEQ ID NO: 2626128 - RNA, 17 nt, Human
guuuuuaaaauaucuuu

SEQ ID NO: 2626129 - RNA, 18 nt, Human
guuuuuaaaaguuucaau

SEQ ID NO: 2626130 - RNA, 16 nt, Human
guuuuuaaaaguuuca

SEQ ID NO: 2626131 - RNA, 15 nt, Human
guuuuuaaaaguuuc

SEQ ID NO: 2626132 - RNA, 13 nt, Human
guuuuuaaaaguu

SEQ ID NO: 2626133 - RNA, 17 nt, Human
guuuuuaccucugucuu

SEQ ID NO: 2626134 - RNA, 22 nt, Human
guuuuuaccuaccacagugucu

SEQ ID NO: 2626135 - RNA, 16 nt, Human
guuuuuacuacaguug

SEQ ID NO: 2626136 - RNA, 23 nt, Human
guuuuuaaauagaguuugcuauu

SEQ ID NO: 2626137 - RNA, 21 nt, Human
guuuuuaccuaccacaguguc

SEQ ID NO: 2626138 - RNA, 19 nt, Human
guuuuuaacucaauauuuu

SEQ ID NO: 2626139 - RNA, 18 nt, Human
guuuuuaaauagaguuug

SEQ ID NO: 2626140 - RNA, 15 nt, Human
guuuuuaacucaaua

SEQ ID NO: 2626141 - RNA, 17 nt, Human
guuuucugaaaauauaa

SEQ ID NO: 2626142 - RNA, 19 nt, Human
guuuucucucggcucccca

SEQ ID NO: 2626143 - RNA, 12 nt, Human
guuuuguauucu

SEQ ID NO: 2626144 - RNA, 15 nt, Human
guuuuguauucucug

SEQ ID NO: 2626145 - RNA, 12 nt, Human
guuuucucuuga

SEQ ID NO: 2626146 - RNA, 19 nt, Human
guuuucucuugagagggug

SEQ ID NO: 2626147 - RNA, 24 nt, Human
guuuugugacuauauagagauguu

SEQ ID NO: 2626148 - RNA, 17 nt, Human
guuuuguuuuaaaauua

SEQ ID NO: 2626149 - RNA, 14 nt, Human
guuuugucuugaau

SEQ ID NO: 2626150 - RNA, 17 nt, Human
guuuugucaaacuguag

SEQ ID NO: 2626151 - RNA, 24 nt, Human
guuuugucaaacuguagaaaugau

SEQ ID NO: 2626152 - RNA, 18 nt, Human
guuuugugauguuugucc

SEQ ID NO: 2626153 - RNA, 19 nt, Human
guuuuguggaggagcucag

SEQ ID NO: 2626154 - RNA, 20 nt, Human
guuuccuggcacugcuucca

SEQ ID NO: 2626155 - RNA, 16 nt, Human
guuuccuggcacugcu

SEQ ID NO: 2626156 - RNA, 13 nt, Human
guuuccugcccug

SEQ ID NO: 2626157 - RNA, 17 nt, Human
guuuccugcccugggag

SEQ ID NO: 2626158 - RNA, 22 nt, Human
guuuccugaaacaacuuggaaa

SEQ ID NO: 2626159 - RNA, 14 nt, Human
guuuccugcaggcc

SEQ ID NO: 2626160 - RNA, 22 nt, Human
guuuccuggcacugcuuccagu

SEQ ID NO: 2626161 - RNA, 21 nt, Human
guuuccuggcacugcuuccag

SEQ ID NO: 2626162 - RNA, 16 nt, Human
guuuccuuauauuaug

SEQ ID NO: 2626163 - RNA, 22 nt, Human
guuuccugcccugggaggcagu

SEQ ID NO: 2626164 - RNA, 16 nt, Human
guuuccugcaggccag

SEQ ID NO: 2626165 - RNA, 14 nt, Human
guuucagaaaugug

SEQ ID NO: 2626166 - RNA, 18 nt, Human
guuucagaaauguguuau

SEQ ID NO: 2626167 - RNA, 21 nt, Human
guuucagauauauaucauauu

SEQ ID NO: 2626168 - RNA, 17 nt, Human
guuucagauauauauca

SEQ ID NO: 2626169 - RNA, 16 nt, Human
guuucagauauauauc

SEQ ID NO: 2626170 - RNA, 18 nt, Human
guuuaguaaggcugugua

SEQ ID NO: 2626171 - RNA, 18 nt, Human
guuucagcgacuccguug

SEQ ID NO: 2626172 - RNA, 22 nt, Human
guuucaggagagaguugaaccu

SEQ ID NO: 2626173 - RNA, 23 nt, Human
guuucaggagagaguugaaccua

SEQ ID NO: 2626174 - RNA, 19 nt, Human
guuucaggauacaugugcc

SEQ ID NO: 2626175 - RNA, 10 nt, Human
guuucaggug

SEQ ID NO: 2626176 - RNA, 11 nt, Human
guuucauugac

SEQ ID NO: 2626177 - RNA, 19 nt, Human
guuucauuuagucauguga

SEQ ID NO: 2626178 - RNA, 19 nt, Human
guuucauucuccugccugu

SEQ ID NO: 2626179 - RNA, 20 nt, Human
guuucauugcgaaucuuuuu

SEQ ID NO: 2626180 - RNA, 21 nt, Human
guuucauuuagucaugugacc

SEQ ID NO: 2626181 - RNA, 20 nt, Human
guuucauuuagucaugugac

SEQ ID NO: 2626182 - RNA, 23 nt, Human
guuuccaauguuuagcaaauaca

SEQ ID NO: 2626183 - RNA, 16 nt, Human
guuuccacagccugca

SEQ ID NO: 2626184 - RNA, 16 nt, Human
guuuccaaccuggagu

SEQ ID NO: 2626185 - RNA, 19 nt, Human
guuuccagacuuccuugag

SEQ ID NO: 2626186 - RNA, 19 nt, Human
guuucauuucuacugugac

SEQ ID NO: 2626187 - RNA, 22 nt, Human
guuuccacgaugaaaaacuucc

SEQ ID NO: 2626188 - RNA, 20 nt, Human
guuuccagacuuccuugaga

SEQ ID NO: 2626189 - RNA, 17 nt, Human
gguuggcgcacccuccc

SEQ ID NO: 2626190 - RNA, 15 nt, Human
gguuggcgcacccuc

SEQ ID NO: 2626191 - RNA, 14 nt, Human
gguuggcaguaagg

SEQ ID NO: 2626192 - RNA, 14 nt, Human
gguugcaaccacug

SEQ ID NO: 2626193 - RNA, 20 nt, Human
gguuggcgcacccuccccuc

SEQ ID NO: 2626194 - RNA, 18 nt, Human
gguuggcgcacccucccc

SEQ ID NO: 2626195 - RNA, 19 nt, Human
gguuggcugggcccagaag

SEQ ID NO: 2626196 - RNA, 11 nt, Human
gguuggcuggc

SEQ ID NO: 2626197 - RNA, 15 nt, Human
gguuggcugggccca

SEQ ID NO: 2626198 - RNA, 21 nt, Human
gguuggccccugcccggcugc

SEQ ID NO: 2626199 - RNA, 13 nt, Human
gguugcagggagc

SEQ ID NO: 2626200 - RNA, 16 nt, Human
gguugcaaggccgcug

SEQ ID NO: 2626201 - RNA, 13 nt, Human
guuuagaaagcuu

SEQ ID NO: 2626202 - RNA, 17 nt, Human
guuuagaaagcuugccc

SEQ ID NO: 2626203 - RNA, 19 nt, Human
gguugggagaaugucagua

SEQ ID NO: 2626204 - RNA, 14 nt, Human
guuuacuuaaagau

SEQ ID NO: 2626205 - RNA, 18 nt, Human
guuuacuuaucuuaugcc

SEQ ID NO: 2626206 - RNA, 22 nt, Human
guuuacuuaaagauuuaucaaa

SEQ ID NO: 2626207 - RNA, 16 nt, Human
guuuacuuaaagauuu

SEQ ID NO: 2626208 - RNA, 18 nt, Human
guuuaggcugguggccca

SEQ ID NO: 2626209 - RNA, 16 nt, Human
guuuaguaaggcugug

SEQ ID NO: 2626210 - RNA, 21 nt, Human
guuuaggcugguggcccagga

SEQ ID NO: 2626211 - RNA, 16 nt, Human
guuuaguaaucauauu

SEQ ID NO: 2626212 - RNA, 12 nt, Human
guuuagcaaaua

SEQ ID NO: 2626213 - RNA, 17 nt, Human
guuuagcagcagccuuu

SEQ ID NO: 2626214 - RNA, 19 nt, Human
guuuacuuuucagggcauc

SEQ ID NO: 2626215 - RNA, 17 nt, Human
guuuacuuuucagggca

SEQ ID NO: 2626216 - RNA, 20 nt, Human
guuuaggauguugaaaaagu

SEQ ID NO: 2626217 - RNA, 23 nt, Human
guuuagcagcagccuuuaaugca

SEQ ID NO: 2626218 - RNA, 19 nt, Human
guuuguaaauuaacuuuua

SEQ ID NO: 2626219 - RNA, 13 nt, Human
guuuguaaaacua

SEQ ID NO: 2626220 - RNA, 17 nt, Human
guuuguaaauuaacuuu

SEQ ID NO: 2626221 - RNA, 19 nt, Human
guuuguggaaaaugaaaau

SEQ ID NO: 2626222 - RNA, 13 nt, Human
guuugugcuucua

SEQ ID NO: 2626223 - RNA, 12 nt, Human
guuuguggccuc

SEQ ID NO: 2626224 - RNA, 18 nt, Human
guuuguuccccaagacau

SEQ ID NO: 2626225 - RNA, 13 nt, Human
guuuguggccuca

SEQ ID NO: 2626226 - RNA, 14 nt, Human
guuuguggccucag

SEQ ID NO: 2626227 - RNA, 17 nt, Human
guuugucuucuccccag

SEQ ID NO: 2626228 - RNA, 16 nt, Human
guuugucuucucccca

SEQ ID NO: 2626229 - RNA, 15 nt, Human
guuugucuucucccc

SEQ ID NO: 2626230 - RNA, 15 nt, Human
guuugucugucuuca

SEQ ID NO: 2626231 - RNA, 18 nt, Human
guuugucugucuucauag

SEQ ID NO: 2626232 - RNA, 17 nt, Human
guuugauuaaauucuug

SEQ ID NO: 2626233 - RNA, 19 nt, Human
guuugauuaaauucuugca

SEQ ID NO: 2626234 - RNA, 22 nt, Human
guuugauuaaauucuugcaaag

SEQ ID NO: 2626235 - RNA, 20 nt, Human
guuugaugcauuaaaagaaa

SEQ ID NO: 2626236 - RNA, 22 nt, Human
guuugguucacuuacagauagu

SEQ ID NO: 2626237 - RNA, 14 nt, Human
guuugguucugggg

SEQ ID NO: 2626238 - RNA, 19 nt, Human
guuugagguuuuuaagccu

SEQ ID NO: 2626239 - RNA, 16 nt, Human
guuugagguuuuuaag

SEQ ID NO: 2626240 - RNA, 16 nt, Human
guuugaggcugcagcg

SEQ ID NO: 2626241 - RNA, 15 nt, Human
guuugagcugccuuc

SEQ ID NO: 2626242 - RNA, 14 nt, Human
guuugagcugccuu

SEQ ID NO: 2626243 - RNA, 13 nt, Human
guuugagcugccu

SEQ ID NO: 2626244 - RNA, 23 nt, Human
guuugagcucugcagcccaggga

SEQ ID NO: 2626245 - RNA, 18 nt, Human
guuugagcugccuucccu

SEQ ID NO: 2626246 - RNA, 23 nt, Human
guuugaggauauauuuucacuuu

SEQ ID NO: 2626247 - RNA, 13 nt, Human
guuugagcucaga

SEQ ID NO: 2626248 - RNA, 15 nt, Human
guuugagcucagacc

SEQ ID NO: 2626249 - RNA, 20 nt, Human
guuugagcucugcagcccag

SEQ ID NO: 2626250 - RNA, 16 nt, Human
guuugagcucagaccc

SEQ ID NO: 2626251 - RNA, 17 nt, Human
guuugagauggacacac

SEQ ID NO: 2626252 - RNA, 14 nt, Human
guuucuuuguaaug

SEQ ID NO: 2626253 - RNA, 23 nt, Human
guuucuuucuaguggucuuugua

SEQ ID NO: 2626254 - RNA, 17 nt, Human
guuucuuuguaaugaaa

SEQ ID NO: 2626255 - RNA, 16 nt, Human
guuugaaccaagaacu

SEQ ID NO: 2626256 - RNA, 16 nt, Human
guuugaaggaaacagu

SEQ ID NO: 2626257 - RNA, 15 nt, Human
guuugaaggaaacag

SEQ ID NO: 2626258 - RNA, 14 nt, Human
guuugaagccugga

SEQ ID NO: 2626259 - RNA, 21 nt, Human
guuugaagccugcccuugucu

SEQ ID NO: 2626260 - RNA, 15 nt, Human
guuugaagccugccc

SEQ ID NO: 2626261 - RNA, 12 nt, Human
guuugaacuuca

SEQ ID NO: 2626262 - RNA, 14 nt, Human
guuugaauguuaaa

SEQ ID NO: 2626263 - RNA, 17 nt, Human
guuugaauauaaacacu

SEQ ID NO: 2626264 - RNA, 19 nt, Human
guuugaauauaaacacuau

SEQ ID NO: 2626265 - RNA, 17 nt, Human
guuugaaggaggugagg

SEQ ID NO: 2626266 - RNA, 17 nt, Human
guuugaaggaaacaguu

SEQ ID NO: 2626267 - RNA, 13 nt, Human
guuugaauauaaa

SEQ ID NO: 2626268 - RNA, 15 nt, Human
guuucuaaagcugcc

SEQ ID NO: 2626269 - RNA, 14 nt, Human
guuucuaaagcugc

SEQ ID NO: 2626270 - RNA, 16 nt, Human
guuucuaaagcugcca

SEQ ID NO: 2626271 - RNA, 18 nt, Human
guuucuuucuaguggucu

SEQ ID NO: 2626272 - RNA, 21 nt, Human
guuucuuuccugccuucuucu

SEQ ID NO: 2626273 - RNA, 19 nt, Human
guuucuuuccugccuucuu

SEQ ID NO: 2626274 - RNA, 20 nt, Human
guuucuaaagcugccagccg

SEQ ID NO: 2626275 - RNA, 16 nt, Human
guuucguuucuguaua

SEQ ID NO: 2626276 - RNA, 15 nt, Human
guuucguuucuguau

SEQ ID NO: 2626277 - RNA, 14 nt, Human
guuucguuucugua

SEQ ID NO: 2626278 - RNA, 17 nt, Human
guuucgagaagcugcuc

SEQ ID NO: 2626279 - RNA, 23 nt, Human
guuucguggggaggucuaaucua

SEQ ID NO: 2626280 - RNA, 21 nt, Human
guuucgagaagcugcucugga

SEQ ID NO: 2626281 - RNA, 13 nt, Human
guuucgagaagcu

SEQ ID NO: 2626282 - RNA, 18 nt, Human
guuucgaaguugaugcaa

SEQ ID NO: 2626283 - RNA, 15 nt, Human
guuucguggggaggu

SEQ ID NO: 2626284 - RNA, 20 nt, Human
guuucgugaaguauacugua

SEQ ID NO: 2626285 - RNA, 20 nt, Human
guuuccuuucauuuacugug

SEQ ID NO: 2626286 - RNA, 17 nt, Human
guuuccuuucauuuacu

SEQ ID NO: 2626287 - RNA, 23 nt, Human
guuuccuuucauuuacuguggcu

SEQ ID NO: 2626288 - RNA, 14 nt, Human
guuuccuucagugc

SEQ ID NO: 2626289 - RNA, 13 nt, Human
uauuuuuuucuga

SEQ ID NO: 2626290 - RNA, 13 nt, Human
ucaaaaaaugagc

SEQ ID NO: 2626291 - RNA, 15 nt, Human
uauuuuuuuacuaau

SEQ ID NO: 2626292 - RNA, 13 nt, Human
uauuuuuucagac

SEQ ID NO: 2626293 - RNA, 14 nt, Human
uauuuuuuucuacc

SEQ ID NO: 2626294 - RNA, 15 nt, Human
uauuuuuuucuaccu

SEQ ID NO: 2626295 - RNA, 13 nt, Human
ucaaaaauauaac

SEQ ID NO: 2626296 - RNA, 19 nt, Human
ucaaaaaguguuuauuuuu

SEQ ID NO: 2626297 - RNA, 23 nt, Human
ucaaaaaguguuuauuuuucaua

SEQ ID NO: 2626298 - RNA, 19 nt, Human
ucaaaacccaucugggcuc

SEQ ID NO: 2626299 - RNA, 15 nt, Human
ucaaaaaguguuuau

SEQ ID NO: 2626300 - RNA, 14 nt, Human
ucaaaaaguguuua

SEQ ID NO: 2626301 - RNA, 12 nt, Human
ucaaaaaguguu

SEQ ID NO: 2626302 - RNA, 23 nt, Human
ucaaaaagucuacgcucuccuuu

SEQ ID NO: 2626303 - RNA, 22 nt, Human
ucaaaaacuuuggaguccccuc

SEQ ID NO: 2626304 - RNA, 17 nt, Human
ucaaaaacuuuggaguc

SEQ ID NO: 2626305 - RNA, 23 nt, Human
uauuuuuuucuaccuugaggucu

SEQ ID NO: 2626306 - RNA, 13 nt, Human
ucaaaaacuguau

SEQ ID NO: 2626307 - RNA, 23 nt, Human
ucaaaaacacaguguuuuuguaa

SEQ ID NO: 2626308 - RNA, 15 nt, Human
ucaaaaacauucuua

SEQ ID NO: 2626309 - RNA, 13 nt, Human
ucaaaacugcacu

SEQ ID NO: 2626310 - RNA, 23 nt, Human
ucaaacggccucacuaggcuucu

SEQ ID NO: 2626311 - RNA, 17 nt, Human
ucaaaccuguuuaaaua

SEQ ID NO: 2626312 - RNA, 15 nt, Human
ucaaaacucaaaugc

SEQ ID NO: 2626313 - RNA, 18 nt, Human
ucaaaacucauuuccuau

SEQ ID NO: 2626314 - RNA, 22 nt, Human
ucaaaacgguuuuacugcagcu

SEQ ID NO: 2626315 - RNA, 14 nt, Human
ucaaaacucaaaug

SEQ ID NO: 2626316 - RNA, 20 nt, Human
ucaaaaccuuucaaauauca

SEQ ID NO: 2626317 - RNA, 16 nt, Human
ucaaaacuacaaauca

SEQ ID NO: 2626318 - RNA, 15 nt, Human
ucaaaaccuuuugaa

SEQ ID NO: 2626319 - RNA, 18 nt, Human
ucaaaacggggcagccaa

SEQ ID NO: 2626320 - RNA, 19 nt, Human
ucaaaccuguuuaaauauu

SEQ ID NO: 2626321 - RNA, 18 nt, Human
ucaaaccuguuuaaauau

SEQ ID NO: 2626322 - RNA, 16 nt, Human
ucaaacgugaaaaugc

SEQ ID NO: 2626323 - RNA, 15 nt, Human
ucaaacgugaaaaug

SEQ ID NO: 2626324 - RNA, 14 nt, Human
ucaaacucuuaaaa

SEQ ID NO: 2626325 - RNA, 22 nt, Human
ucaaaccuguuuaaauauuuca

SEQ ID NO: 2626326 - RNA, 21 nt, Human
uauuuucaacgcagcccugcu

SEQ ID NO: 2626327 - RNA, 19 nt, Human
uauuuucaacgcagcccug

SEQ ID NO: 2626328 - RNA, 13 nt, Human
uauuuucaagaaa

SEQ ID NO: 2626329 - RNA, 16 nt, Human
uauuuucaagaaacug

SEQ ID NO: 2626330 - RNA, 18 nt, Human
uauuuucauacagcauua

SEQ ID NO: 2626331 - RNA, 17 nt, Human
uauuuucaguauuuugg

SEQ ID NO: 2626332 - RNA, 21 nt, Human
uauuuucaaggcccucagcau

SEQ ID NO: 2626333 - RNA, 13 nt, Human
uauuuucaccauu

SEQ ID NO: 2626334 - RNA, 14 nt, Human
uauuuucaccauuu

SEQ ID NO: 2626335 - RNA, 16 nt, Human
uauuuuauguugcaua

SEQ ID NO: 2626336 - RNA, 15 nt, Human
uauuuuauguugcau

SEQ ID NO: 2626337 - RNA, 14 nt, Human
uauuuuaugcaaau

SEQ ID NO: 2626338 - RNA, 15 nt, Human
uauuuuauccucugg

SEQ ID NO: 2626339 - RNA, 23 nt, Human
uauuuuaucuuugauucuccuuc

SEQ ID NO: 2626340 - RNA, 16 nt, Human
uauuuuauacauuaac

SEQ ID NO: 2626341 - RNA, 15 nt, Human
uauuuugaaucaaua

SEQ ID NO: 2626342 - RNA, 13 nt, Human
uauuuugaaucaa

SEQ ID NO: 2626343 - RNA, 12 nt, Human
uauuuugaauca

SEQ ID NO: 2626344 - RNA, 22 nt, Human
uauuuugaaucaauaauauauu

SEQ ID NO: 2626345 - RNA, 16 nt, Human
uauuuugaaucaauaa

SEQ ID NO: 2626346 - RNA, 23 nt, Human
uauuuugaaucaauaauauauuu

SEQ ID NO: 2626347 - RNA, 16 nt, Human
uauuuugaaugugaag

SEQ ID NO: 2626348 - RNA, 16 nt, Human
uauuuucuuuuguaaa

SEQ ID NO: 2626349 - RNA, 14 nt, Human
uauuuucuguucua

SEQ ID NO: 2626350 - RNA, 21 nt, Human
uauuuucaugacuuuuccaug

SEQ ID NO: 2626351 - RNA, 14 nt, Human
uauuuucuuuaaug

SEQ ID NO: 2626352 - RNA, 14 nt, Human
uauuuucuuugaaa

SEQ ID NO: 2626353 - RNA, 12 nt, Human
uauuuuuuaauu

SEQ ID NO: 2626354 - RNA, 15 nt, Human
uauuuuuuaauuauu

SEQ ID NO: 2626355 - RNA, 15 nt, Human
uauuuuuuaaguauu

SEQ ID NO: 2626356 - RNA, 21 nt, Human
uauuuuuuaaguauuuauaua

SEQ ID NO: 2626357 - RNA, 16 nt, Human
uauuuuuuauauauac

SEQ ID NO: 2626358 - RNA, 12 nt, Human
uauuuuuucaga

SEQ ID NO: 2626359 - RNA, 17 nt, Human
uauuuuuuauuguuuuc

SEQ ID NO: 2626360 - RNA, 13 nt, Human
uauuuuuuauugu

SEQ ID NO: 2626361 - RNA, 13 nt, Human
uauuuuuuaagua

SEQ ID NO: 2626362 - RNA, 20 nt, Human
uauuuuuguuucuuccaaag

SEQ ID NO: 2626363 - RNA, 15 nt, Human
uauuugggaagugaa

SEQ ID NO: 2626364 - RNA, 14 nt, Human
uauuugggaaguga

SEQ ID NO: 2626365 - RNA, 21 nt, Human
uauuuggaauuuauauacaac

SEQ ID NO: 2626366 - RNA, 20 nt, Human
uauuuggaauuuauauacaa

SEQ ID NO: 2626367 - RNA, 11 nt, Human
uauuugcuuuu

SEQ ID NO: 2626368 - RNA, 11 nt, Human
uauuuggaauu

SEQ ID NO: 2626369 - RNA, 15 nt, Human
uauuugcuuuuugcu

SEQ ID NO: 2626370 - RNA, 14 nt, Human
uauuuggaauuuau

SEQ ID NO: 2626371 - RNA, 21 nt, Human
uauuuuaguuucuguucugug

SEQ ID NO: 2626372 - RNA, 20 nt, Human
uauuuuaguuucuguucugu

SEQ ID NO: 2626373 - RNA, 18 nt, Human
uauuuuaguuucuguucu

SEQ ID NO: 2626374 - RNA, 16 nt, Human
uauuuuaguuucuguu

SEQ ID NO: 2626375 - RNA, 14 nt, Human
uauuuuaguuucug

SEQ ID NO: 2626376 - RNA, 22 nt, Human
uauuuuaggcagggauuugagg

SEQ ID NO: 2626377 - RNA, 21 nt, Human
uauuuuaggcagggauuugag

SEQ ID NO: 2626378 - RNA, 14 nt, Human
uauuuuacuuuuau

SEQ ID NO: 2626379 - RNA, 13 nt, Human
uauuuuacuuuua

SEQ ID NO: 2626380 - RNA, 18 nt, Human
uauuuuaggcagggauuu

SEQ ID NO: 2626381 - RNA, 19 nt, Human
uauuugagaguucuaaauu

SEQ ID NO: 2626382 - RNA, 18 nt, Human
uauuugagaguucuaaau

SEQ ID NO: 2626383 - RNA, 19 nt, Human
uauuucuuauauaugugaa

SEQ ID NO: 2626384 - RNA, 16 nt, Human
uauuugagacuaguuu

SEQ ID NO: 2626385 - RNA, 16 nt, Human
uauuugagaguucuaa

SEQ ID NO: 2626386 - RNA, 15 nt, Human
uauuugagaguucua

SEQ ID NO: 2626387 - RNA, 21 nt, Human
uauuucugcugaauuuucaca

SEQ ID NO: 2626388 - RNA, 19 nt, Human
uauuucuuaaaucuaguaa

SEQ ID NO: 2626389 - RNA, 16 nt, Human
uauuucuuauauaugu

SEQ ID NO: 2626390 - RNA, 23 nt, Human
uauuucuuacaggcacaaaauga

SEQ ID NO: 2626391 - RNA, 14 nt, Human
uauuugagaauaua

SEQ ID NO: 2626392 - RNA, 16 nt, Human
uauuucugcugaauuu

SEQ ID NO: 2626393 - RNA, 13 nt, Human
uauuucugcugaa

SEQ ID NO: 2626394 - RNA, 17 nt, Human
uauuucugcauauguug

SEQ ID NO: 2626395 - RNA, 22 nt, Human
uauuucugcugaauuuucacau

SEQ ID NO: 2626396 - RNA, 20 nt, Human
uauuucuuaaacaaauguau

SEQ ID NO: 2626397 - RNA, 19 nt, Human
uauuucucaacaaagcaca

SEQ ID NO: 2626398 - RNA, 18 nt, Human
uauuucuauuuccuggaa

SEQ ID NO: 2626399 - RNA, 21 nt, Human
uauuucucaacaaagcacagu

SEQ ID NO: 2626400 - RNA, 22 nt, Human
uauuucucagacuuuggaaaau

SEQ ID NO: 2626401 - RNA, 16 nt, Human
uauuucugagaagguc

SEQ ID NO: 2626402 - RNA, 21 nt, Human
uauuucugagaagguccuuaa

SEQ ID NO: 2626403 - RNA, 11 nt, Human
uauuucugaga

SEQ ID NO: 2626404 - RNA, 19 nt, Human
uauuucucugauuugcaaa

SEQ ID NO: 2626405 - RNA, 21 nt, Human
uauuucuaugaaauauuaugu

SEQ ID NO: 2626406 - RNA, 14 nt, Human
uauuuauugcuuua

SEQ ID NO: 2626407 - RNA, 13 nt, Human
uauuuauugcuuu

SEQ ID NO: 2626408 - RNA, 16 nt, Human
uauuuauuguuuauuu

SEQ ID NO: 2626409 - RNA, 22 nt, Human
uauuucuaugaaauauuauguu

SEQ ID NO: 2626410 - RNA, 16 nt, Human
uauuucuaugagaaaa

SEQ ID NO: 2626411 - RNA, 16 nt, Human
uauuuauuuaaaagau

SEQ ID NO: 2626412 - RNA, 15 nt, Human
uauuuauuuaaaaga

SEQ ID NO: 2626413 - RNA, 11 nt, Human
uauuuauuuaa

SEQ ID NO: 2626414 - RNA, 13 nt, Human
uauuuauuuaaaa

SEQ ID NO: 2626415 - RNA, 22 nt, Human
uauuuauuguuuauuuaucagu

SEQ ID NO: 2626416 - RNA, 14 nt, Human
uauuuauuacuaug

SEQ ID NO: 2626417 - RNA, 20 nt, Human
uauuuauuccauauucaugu

SEQ ID NO: 2626418 - RNA, 24 nt, Human
uauuuauucagcuucauuuguguc

SEQ ID NO: 2626419 - RNA, 13 nt, Human
uauuuauuaagau

SEQ ID NO: 2626420 - RNA, 13 nt, Human
uauuuauuaccuc

SEQ ID NO: 2626421 - RNA, 21 nt, Human
uauuuauucagcuucauuugu

SEQ ID NO: 2626422 - RNA, 16 nt, Human
uauuuauuaccucuga

SEQ ID NO: 2626423 - RNA, 15 nt, Human
uauuuauuaccucug

SEQ ID NO: 2626424 - RNA, 14 nt, Human
uaucugaaaaugua

SEQ ID NO: 2626425 - RNA, 15 nt, Human
uaucugaaaauguau

SEQ ID NO: 2626426 - RNA, 21 nt, Human
uaucugaaggagauuuuccuu

SEQ ID NO: 2626427 - RNA, 23 nt, Human
uaucucuuuugaauccaugcuug

SEQ ID NO: 2626428 - RNA, 20 nt, Human
uaucugaaaauguaugugua

SEQ ID NO: 2626429 - RNA, 18 nt, Human
uaucugacaucucugcaa

SEQ ID NO: 2626430 - RNA, 23 nt, Human
uauuuauuaaaugcccagccccu

SEQ ID NO: 2626431 - RNA, 14 nt, Human
ucaauaggaaaaac

SEQ ID NO: 2626432 - RNA, 12 nt, Human
ucaaugaucuag

SEQ ID NO: 2626433 - RNA, 22 nt, Human
ucaaugaucuagguuuaacuca

SEQ ID NO: 2626434 - RNA, 21 nt, Human
ucaaugaucuagguuuaacuc

SEQ ID NO: 2626435 - RNA, 19 nt, Human
ucaaugaucuagguuuaac

SEQ ID NO: 2626436 - RNA, 17 nt, Human
ucaaugaucuagguuua

SEQ ID NO: 2626437 - RNA, 15 nt, Human
ucaaugaucuagguu

SEQ ID NO: 2626438 - RNA, 13 nt, Human
ucaaugaucuagg

SEQ ID NO: 2626439 - RNA, 14 nt, Human
ucaaugcacugaca

SEQ ID NO: 2626440 - RNA, 12 nt, Human
ucaagugccuua

SEQ ID NO: 2626441 - RNA, 23 nt, Human
ucaagugcccucuccgagcuggu

SEQ ID NO: 2626442 - RNA, 18 nt, Human
ucaaguggggcucgccau

SEQ ID NO: 2626443 - RNA, 16 nt, Human
ucaaguggggcucgcc

SEQ ID NO: 2626444 - RNA, 18 nt, Human
ucaagugggaucugucac

SEQ ID NO: 2626445 - RNA, 15 nt, Human
ucaaguuagcucagg

SEQ ID NO: 2626446 - RNA, 15 nt, Human
ucaagugucauaugu

SEQ ID NO: 2626447 - RNA, 16 nt, Human
ucaagugucucagucc

SEQ ID NO: 2626448 - RNA, 21 nt, Human
ucaagugucucaguccaccug

SEQ ID NO: 2626449 - RNA, 14 nt, Human
ucaaguuaaaguga

SEQ ID NO: 2626450 - RNA, 13 nt, Human
ucaauaggaaaaa

SEQ ID NO: 2626451 - RNA, 17 nt, Human
ucaauacaguacaggca

SEQ ID NO: 2626452 - RNA, 18 nt, Human
ucaauacaguacaggcag

SEQ ID NO: 2626453 - RNA, 19 nt, Human
ucaauacaguacaggcagc

SEQ ID NO: 2626454 - RNA, 20 nt, Human
ucaauacaguacaggcagca

SEQ ID NO: 2626455 - RNA, 19 nt, Human
ucaaugcagccagaccuau

SEQ ID NO: 2626456 - RNA, 15 nt, Human
ucaaugcagccagac

SEQ ID NO: 2626457 - RNA, 13 nt, Human
ucaaugcagccag

SEQ ID NO: 2626458 - RNA, 13 nt, Human
ucaaugcucauaa

SEQ ID NO: 2626459 - RNA, 12 nt, Human
ucaaugcucaua

SEQ ID NO: 2626460 - RNA, 20 nt, Human
ucaauggauuugaugcuguu

SEQ ID NO: 2626461 - RNA, 14 nt, Human
ucaaugcucauaac

SEQ ID NO: 2626462 - RNA, 17 nt, Human
ucaaugcuauaacuaug

SEQ ID NO: 2626463 - RNA, 18 nt, Human
ucaaugcacugacauugu

SEQ ID NO: 2626464 - RNA, 18 nt, Human
ucaauuacaggaaguacu

SEQ ID NO: 2626465 - RNA, 13 nt, Human
ucaauuacaggaa

SEQ ID NO: 2626466 - RNA, 17 nt, Human
ucaaugggcaaugacag

SEQ ID NO: 2626467 - RNA, 22 nt, Human
ucaaugggaaauacuacuccug

SEQ ID NO: 2626468 - RNA, 14 nt, Human
ucaaugggaaauac

SEQ ID NO: 2626469 - RNA, 12 nt, Human
ucaauggcuuuu

SEQ ID NO: 2626470 - RNA, 22 nt, Human
ucaauggcugcugaagcugccu

SEQ ID NO: 2626471 - RNA, 18 nt, Human
ucaauggcgcagugccuc

SEQ ID NO: 2626472 - RNA, 14 nt, Human
ucaaugggcaauga

SEQ ID NO: 2626473 - RNA, 16 nt, Human
ucaauuaaauguaggu

SEQ ID NO: 2626474 - RNA, 11 nt, Human
ucaauuaauaa

SEQ ID NO: 2626475 - RNA, 19 nt, Human
ucaaugguuuaacauauaa

SEQ ID NO: 2626476 - RNA, 22 nt, Human
ucacaaugaaaugcucuccuuu

SEQ ID NO: 2626477 - RNA, 14 nt, Human
ucacaauagaaacu

SEQ ID NO: 2626478 - RNA, 16 nt, Human
ucacaauaauuuucua

SEQ ID NO: 2626479 - RNA, 15 nt, Human
ucacaauaauuuucu

SEQ ID NO: 2626480 - RNA, 13 nt, Human
ucacaauacuguu

SEQ ID NO: 2626481 - RNA, 19 nt, Human
ucaauuacaggaaguacug

SEQ ID NO: 2626482 - RNA, 20 nt, Human
ucacaaguuguguuugauau

SEQ ID NO: 2626483 - RNA, 20 nt, Human
ucacaauaaaaauggcucag

SEQ ID NO: 2626484 - RNA, 13 nt, Human
ucacacagugagu

SEQ ID NO: 2626485 - RNA, 22 nt, Human
ucacacaguauuacuucugcua

SEQ ID NO: 2626486 - RNA, 21 nt, Human
ucacacaguauuacuucugcu

SEQ ID NO: 2626487 - RNA, 16 nt, Human
ucacaauagaaacuca

SEQ ID NO: 2626488 - RNA, 23 nt, Human
ucacaaugaaaugcucuccuuuc

SEQ ID NO: 2626489 - RNA, 10 nt, Human
ucacacacac

SEQ ID NO: 2626490 - RNA, 19 nt, Human
ucacacaauacaauaaguu

SEQ ID NO: 2626491 - RNA, 14 nt, Human
ucacaggaaguaga

SEQ ID NO: 2626492 - RNA, 19 nt, Human
ucacaggaaguagaggagg

SEQ ID NO: 2626493 - RNA, 23 nt, Human
ucacaggacagcccuucuuucca

SEQ ID NO: 2626494 - RNA, 11 nt, Human
ucacaggcagg

SEQ ID NO: 2626495 - RNA, 23 nt, Human
ucacacagugagucgaggacagg

SEQ ID NO: 2626496 - RNA, 22 nt, Human
ucacacagugagucgaggacag

SEQ ID NO: 2626497 - RNA, 21 nt, Human
ucacacaugagcaucaggcca

SEQ ID NO: 2626498 - RNA, 23 nt, Human
ucacacagugggugguggaucug

SEQ ID NO: 2626499 - RNA, 15 nt, Human
ucaaacuuuacuaug

SEQ ID NO: 2626500 - RNA, 13 nt, Human
ucaaacuuuacua

SEQ ID NO: 2626501 - RNA, 16 nt, Human
ucaaacugaagccaga

SEQ ID NO: 2626502 - RNA, 22 nt, Human
ucaaacucuugaccucagguga

SEQ ID NO: 2626503 - RNA, 23 nt, Human
ucaaacugaaugaaacccccaca

SEQ ID NO: 2626504 - RNA, 15 nt, Human
ucaaacugaggaauu

SEQ ID NO: 2626505 - RNA, 16 nt, Human
ucaaacuuuacuaugg

SEQ ID NO: 2626506 - RNA, 23 nt, Human
ucaaccuaccaccccuuccuguc

SEQ ID NO: 2626507 - RNA, 22 nt, Human
ucaaccuaccaccccuuccugu

SEQ ID NO: 2626508 - RNA, 21 nt, Human
ucaaccuaccaccccuuccug

SEQ ID NO: 2626509 - RNA, 20 nt, Human
ucaaccuaccaccccuuccu

SEQ ID NO: 2626510 - RNA, 18 nt, Human
ucaaccuaccaccccuuc

SEQ ID NO: 2626511 - RNA, 15 nt, Human
ucaaccuaccacccc

SEQ ID NO: 2626512 - RNA, 13 nt, Human
ucaaccuaaccac

SEQ ID NO: 2626513 - RNA, 21 nt, Human
ucaacccuuuugucugccucu

SEQ ID NO: 2626514 - RNA, 20 nt, Human
ucaacccuuuugucugccuc

SEQ ID NO: 2626515 - RNA, 18 nt, Human
ucaacccuuuugucugcc

SEQ ID NO: 2626516 - RNA, 19 nt, Human
ucaacuccaaacugacucu

SEQ ID NO: 2626517 - RNA, 16 nt, Human
ucaacucaccuaaugu

SEQ ID NO: 2626518 - RNA, 18 nt, Human
ucaagcagucgugccugu

SEQ ID NO: 2626519 - RNA, 17 nt, Human
ucaagcagucgugccug

SEQ ID NO: 2626520 - RNA, 16 nt, Human
ucaagcagucgugccu

SEQ ID NO: 2626521 - RNA, 15 nt, Human
ucaacucauggagau

SEQ ID NO: 2626522 - RNA, 23 nt, Human
ucaagcagcgaccgcccccuccu

SEQ ID NO: 2626523 - RNA, 19 nt, Human
ucaacucauaagacuuugg

SEQ ID NO: 2626524 - RNA, 20 nt, Human
ucaacucagacuaguuuagu

SEQ ID NO: 2626525 - RNA, 16 nt, Human
ucaacucagacuaguu

SEQ ID NO: 2626526 - RNA, 19 nt, Human
ucaacucaccuaauguuua

SEQ ID NO: 2626527 - RNA, 14 nt, Human
ucaaccuccugggc

SEQ ID NO: 2626528 - RNA, 13 nt, Human
ucaaccuccuggg

SEQ ID NO: 2626529 - RNA, 13 nt, Human
ucaaccuccugga

SEQ ID NO: 2626530 - RNA, 20 nt, Human
ucaaccuacuuucauacuga

SEQ ID NO: 2626531 - RNA, 23 nt, Human
ucaacgcuuaaaggugucuuccu

SEQ ID NO: 2626532 - RNA, 12 nt, Human
ucaaccuccugg

SEQ ID NO: 2626533 - RNA, 19 nt, Human
ucaacuaaaaaaaaaaaag

SEQ ID NO: 2626534 - RNA, 20 nt, Human
ucaacuaaaaaaaaaaaagu

SEQ ID NO: 2626535 - RNA, 15 nt, Human
ucaacguauuguuuc

SEQ ID NO: 2626536 - RNA, 15 nt, Human
ucaagcuccuccucc

SEQ ID NO: 2626537 - RNA, 16 nt, Human
ucaagcuccuccuccc

SEQ ID NO: 2626538 - RNA, 18 nt, Human
ucaagcuccuccucccug

SEQ ID NO: 2626539 - RNA, 20 nt, Human
ucaagcuccuccucccugca

SEQ ID NO: 2626540 - RNA, 13 nt, Human
ucaagcuccuccu

SEQ ID NO: 2626541 - RNA, 14 nt, Human
ucaagcuccuccuc

SEQ ID NO: 2626542 - RNA, 20 nt, Human
ucaagcuagaaggccacaug

SEQ ID NO: 2626543 - RNA, 19 nt, Human
ucaaggauccugagccaga

SEQ ID NO: 2626544 - RNA, 18 nt, Human
ucaaggauccugagccag

SEQ ID NO: 2626545 - RNA, 22 nt, Human
ucaagugauucuccugccucag

SEQ ID NO: 2626546 - RNA, 19 nt, Human
ucaagugcaugcucucugc

SEQ ID NO: 2626547 - RNA, 20 nt, Human
ucaagugcaugcucucugca

SEQ ID NO: 2626548 - RNA, 21 nt, Human
ucaagugcaugcucucugcag

SEQ ID NO: 2626549 - RNA, 22 nt, Human
ucaagugcaugcucucugcagc

SEQ ID NO: 2626550 - RNA, 20 nt, Human
ucaaggauccugagccagau

SEQ ID NO: 2626551 - RNA, 21 nt, Human
ucaagcugugagacaguggga

SEQ ID NO: 2626552 - RNA, 19 nt, Human
ucaagcuagaaggccacau

SEQ ID NO: 2626553 - RNA, 18 nt, Human
ucaagcuagaaggccaca

SEQ ID NO: 2626554 - RNA, 16 nt, Human
ucaagcuagaaggcca

SEQ ID NO: 2626555 - RNA, 16 nt, Human
ucaagcgauucuucug

SEQ ID NO: 2626556 - RNA, 15 nt, Human
ucaagcgauucuccu

SEQ ID NO: 2626557 - RNA, 15 nt, Human
ucaagcgauucuucu

SEQ ID NO: 2626558 - RNA, 14 nt, Human
ucaagccugccuag

SEQ ID NO: 2626559 - RNA, 22 nt, Human
ucaagcagucgugccugugucc

SEQ ID NO: 2626560 - RNA, 21 nt, Human
ucaagcagucgugccuguguc

SEQ ID NO: 2626561 - RNA, 20 nt, Human
ucaagcagucgugccugugu

SEQ ID NO: 2626562 - RNA, 19 nt, Human
ucaagcagucgugccugug

SEQ ID NO: 2626563 - RNA, 23 nt, Human
ucaagcagucgugccugugucca

SEQ ID NO: 2626564 - RNA, 19 nt, Human
ucaagcagucuacccaccu

SEQ ID NO: 2626565 - RNA, 20 nt, Human
ucaagcagucuacccaccuc

SEQ ID NO: 2626566 - RNA, 14 nt, Human
ucaagccaagcagc

SEQ ID NO: 2626567 - RNA, 17 nt, Human
ucaagccaagcagccaa

SEQ ID NO: 2626568 - RNA, 12 nt, Human
ucaagcccugca

SEQ ID NO: 2626569 - RNA, 14 nt, Human
ucaagccucugguc

SEQ ID NO: 2626570 - RNA, 13 nt, Human
ucaagcccugcag

SEQ ID NO: 2626571 - RNA, 15 nt, Human
ucaagccaagcagcc

SEQ ID NO: 2626572 - RNA, 16 nt, Human
ucaagccaagcagcca

SEQ ID NO: 2626573 - RNA, 19 nt, Human
ucaagcccaggaggacugc

SEQ ID NO: 2626574 - RNA, 16 nt, Human
ucaagcccgcggggac

SEQ ID NO: 2626575 - RNA, 18 nt, Human
ucaccuuuguccccaccg

SEQ ID NO: 2626576 - RNA, 17 nt, Human
ucaccuuuguccccacc

SEQ ID NO: 2626577 - RNA, 15 nt, Human
ucaccuuugucccca

SEQ ID NO: 2626578 - RNA, 14 nt, Human
ucaccuuugucccc

SEQ ID NO: 2626579 - RNA, 22 nt, Human
ucacgaaguguugcauggaugu

SEQ ID NO: 2626580 - RNA, 16 nt, Human
ucacgaaguguugcau

SEQ ID NO: 2626581 - RNA, 20 nt, Human
ucacgaauauuaugcccagu

SEQ ID NO: 2626582 - RNA, 21 nt, Human
ucacgauugucaucaggagaa

SEQ ID NO: 2626583 - RNA, 18 nt, Human
ucacgauugucaucagga

SEQ ID NO: 2626584 - RNA, 19 nt, Human
ucacgaauauuaugcccag

SEQ ID NO: 2626585 - RNA, 14 nt, Human
ucacgcaccugggu

SEQ ID NO: 2626586 - RNA, 15 nt, Human
ucacgcaccucccau

SEQ ID NO: 2626587 - RNA, 16 nt, Human
ucacgcaccucccauc

SEQ ID NO: 2626588 - RNA, 22 nt, Human
ucaccuuuguccccaccgcaga

SEQ ID NO: 2626589 - RNA, 14 nt, Human
ucacgccacugcac

SEQ ID NO: 2626590 - RNA, 13 nt, Human
ucacgccacugca

SEQ ID NO: 2626591 - RNA, 16 nt, Human
ucacgccacugcacua

SEQ ID NO: 2626592 - RNA, 17 nt, Human
ucacgcaccucccaucc

SEQ ID NO: 2626593 - RNA, 22 nt, Human
ucacgccacugcacuccagccu

SEQ ID NO: 2626594 - RNA, 19 nt, Human
ucacgccuguaauccuagc

SEQ ID NO: 2626595 - RNA, 19 nt, Human
ucacgccuguaaucccagc

SEQ ID NO: 2626596 - RNA, 21 nt, Human
ucacgccuguaaucccagcac

SEQ ID NO: 2626597 - RNA, 20 nt, Human
ucacgccuguaaucccagca

SEQ ID NO: 2626598 - RNA, 19 nt, Human
ucacgccuaugaucccagc

SEQ ID NO: 2626599 - RNA, 21 nt, Human
ucacgccuaugaucccagcac

SEQ ID NO: 2626600 - RNA, 21 nt, Human
ucacgcuccccgccuguuccc

SEQ ID NO: 2626601 - RNA, 16 nt, Human
ucacgcuccccgccug

SEQ ID NO: 2626602 - RNA, 12 nt, Human
ucacgcuccccg

SEQ ID NO: 2626603 - RNA, 23 nt, Human
ucacgccuguaaucccagcacuu

SEQ ID NO: 2626604 - RNA, 21 nt, Human
ucacgccuguaaucccagcag

SEQ ID NO: 2626605 - RNA, 13 nt, Human
ucacgccugugca

SEQ ID NO: 2626606 - RNA, 16 nt, Human
ucacgccugugcagug

SEQ ID NO: 2626607 - RNA, 20 nt, Human
ucacgccuguaauccuagca

SEQ ID NO: 2626608 - RNA, 23 nt, Human
ucaccuuggcaccagacacccag

SEQ ID NO: 2626609 - RNA, 13 nt, Human
ucaccuuuauucu

SEQ ID NO: 2626610 - RNA, 18 nt, Human
ucaccuuggcaccagaca

SEQ ID NO: 2626611 - RNA, 19 nt, Human
ucaccuuggcaccagacac

SEQ ID NO: 2626612 - RNA, 18 nt, Human
ucaccuugcaacacacag

SEQ ID NO: 2626613 - RNA, 19 nt, Human
ucaccuugcaacacacaga

SEQ ID NO: 2626614 - RNA, 21 nt, Human
ucaccuugcaacacacagaca

SEQ ID NO: 2626615 - RNA, 12 nt, Human
ucaccuuugucc

SEQ ID NO: 2626616 - RNA, 14 nt, Human
ucaccuuucccauc

SEQ ID NO: 2626617 - RNA, 20 nt, Human
ucaccuauuuccauucaaca

SEQ ID NO: 2626618 - RNA, 13 nt, Human
ucaccucaugccc

SEQ ID NO: 2626619 - RNA, 22 nt, Human
ucaccuucguuuacuaugccug

SEQ ID NO: 2626620 - RNA, 18 nt, Human
ucaccucaggccaggugc

SEQ ID NO: 2626621 - RNA, 19 nt, Human
ucacaggcagguccagggu

SEQ ID NO: 2626622 - RNA, 18 nt, Human
ucacaggcgaggccugga

SEQ ID NO: 2626623 - RNA, 19 nt, Human
ucacaggccccaggaaagg

SEQ ID NO: 2626624 - RNA, 15 nt, Human
ucacaggcaggucca

SEQ ID NO: 2626625 - RNA, 12 nt, Human
ucacaggcaggu

SEQ ID NO: 2626626 - RNA, 15 nt, Human
ucaccuagaaauuga

SEQ ID NO: 2626627 - RNA, 12 nt, Human
ucacagggccaa

SEQ ID NO: 2626628 - RNA, 20 nt, Human
ucacagggcaugccccggcc

SEQ ID NO: 2626629 - RNA, 22 nt, Human
ucacagggccaacuugagggcc

SEQ ID NO: 2626630 - RNA, 14 nt, Human
ucacagggccaacu

SEQ ID NO: 2626631 - RNA, 16 nt, Human
ucacagggccccagaa

SEQ ID NO: 2626632 - RNA, 18 nt, Human
ucacagggcagagccggg

SEQ ID NO: 2626633 - RNA, 19 nt, Human
ucacagggcagagccggga

SEQ ID NO: 2626634 - RNA, 20 nt, Human
ucacaggcgaggccuggagu

SEQ ID NO: 2626635 - RNA, 15 nt, Human
ucacagggcagagcc

SEQ ID NO: 2626636 - RNA, 23 nt, Human
ucacagggacugaaaaccucucc

SEQ ID NO: 2626637 - RNA, 22 nt, Human
ucacucuggcagcucagagagg

SEQ ID NO: 2626638 - RNA, 20 nt, Human
ucacucuggcagcucagaga

SEQ ID NO: 2626639 - RNA, 19 nt, Human
ucacucuggcagcucagag

SEQ ID NO: 2626640 - RNA, 18 nt, Human
ucacucuggcagcucaga

SEQ ID NO: 2626641 - RNA, 17 nt, Human
ucacucuggcagcucag

SEQ ID NO: 2626642 - RNA, 16 nt, Human
ucacucuggcagcuca

SEQ ID NO: 2626643 - RNA, 15 nt, Human
ucacucuggcagcuc

SEQ ID NO: 2626644 - RNA, 14 nt, Human
ucacucuggcagcu

SEQ ID NO: 2626645 - RNA, 13 nt, Human
ucacucuggcagc

SEQ ID NO: 2626646 - RNA, 12 nt, Human
ucacucuggcag

SEQ ID NO: 2626647 - RNA, 23 nt, Human
ucacucuccuuggugucgggcau

SEQ ID NO: 2626648 - RNA, 15 nt, Human
ucacucucugaagau

SEQ ID NO: 2626649 - RNA, 14 nt, Human
ucacucuccuuggu

SEQ ID NO: 2626650 - RNA, 12 nt, Human
ucacucuccuug

SEQ ID NO: 2626651 - RNA, 20 nt, Human
ucacucuacuuagcaugucc

SEQ ID NO: 2626652 - RNA, 19 nt, Human
ucacucuacuuagcauguc

SEQ ID NO: 2626653 - RNA, 20 nt, Human
ucacggcucacugcagccuc

SEQ ID NO: 2626654 - RNA, 15 nt, Human
ucacggcucacugca

SEQ ID NO: 2626655 - RNA, 13 nt, Human
ucacggcucacug

SEQ ID NO: 2626656 - RNA, 17 nt, Human
ucacgcuuuccugaauc

SEQ ID NO: 2626657 - RNA, 22 nt, Human
ucacgcuuuccugaauccaaac

SEQ ID NO: 2626658 - RNA, 15 nt, Human
ucacggaaguuuuca

SEQ ID NO: 2626659 - RNA, 16 nt, Human
ucacggaaguuuucaa

SEQ ID NO: 2626660 - RNA, 22 nt, Human
ucacggcaggacaacgaggaag

SEQ ID NO: 2626661 - RNA, 14 nt, Human
ucacgcuucuucuu

SEQ ID NO: 2626662 - RNA, 14 nt, Human
ucacgcuuuccuga

SEQ ID NO: 2626663 - RNA, 15 nt, Human
ucacgcuuuccugaa

SEQ ID NO: 2626664 - RNA, 16 nt, Human
ucacgcuuuccugaau

SEQ ID NO: 2626665 - RNA, 14 nt, Human
ucacggaagagccu

SEQ ID NO: 2626666 - RNA, 16 nt, Human
ucacggaagagccuug

SEQ ID NO: 2626667 - RNA, 17 nt, Human
ucacggaagagccuugc

SEQ ID NO: 2626668 - RNA, 17 nt, Human
ucacucggcacccugca

SEQ ID NO: 2626669 - RNA, 14 nt, Human
ucacucggcacccu

SEQ ID NO: 2626670 - RNA, 15 nt, Human
ucacucgcccccggg

SEQ ID NO: 2626671 - RNA, 13 nt, Human
ucacuccuugaaa

SEQ ID NO: 2626672 - RNA, 20 nt, Human
ucacuccuguuacuuaccua

SEQ ID NO: 2626673 - RNA, 10 nt, Human
ucacuccugu

SEQ ID NO: 2626674 - RNA, 20 nt, Human
ucacuccuggggccucuugg

SEQ ID NO: 2626675 - RNA, 18 nt, Human
ucacuccuaccugguaau

SEQ ID NO: 2626676 - RNA, 22 nt, Human
ucacgggagauuucuuguugcu

SEQ ID NO: 2626677 - RNA, 19 nt, Human
ucacgggcaugggcacucc

SEQ ID NO: 2626678 - RNA, 18 nt, Human
ucacgggcaguagcugug

SEQ ID NO: 2626679 - RNA, 17 nt, Human
ucacgggacuauuucca

SEQ ID NO: 2626680 - RNA, 23 nt, Human
ucacggcaggacaacgaggaagc

SEQ ID NO: 2626681 - RNA, 12 nt, Human
ucacuccugggg

SEQ ID NO: 2626682 - RNA, 13 nt, Human
ucacuccuggggc

SEQ ID NO: 2626683 - RNA, 11 nt, Human
ucacuccuggg

SEQ ID NO: 2626684 - RNA, 20 nt, Human
ucacgggcaugggcacuccc

SEQ ID NO: 2626685 - RNA, 20 nt, Human
ucacuccugagaccccuggc

SEQ ID NO: 2626686 - RNA, 19 nt, Human
ucacuccugagaccccugg

SEQ ID NO: 2626687 - RNA, 22 nt, Human
ucacuccugagaccccuggccu

SEQ ID NO: 2626688 - RNA, 21 nt, Human
ucacuccugagaccccuggcc

SEQ ID NO: 2626689 - RNA, 23 nt, Human
ucacuccugagaccccuggccuc

SEQ ID NO: 2626690 - RNA, 16 nt, Human
ucacuuuucagugaug

SEQ ID NO: 2626691 - RNA, 14 nt, Human
ucacuuuucaguga

SEQ ID NO: 2626692 - RNA, 13 nt, Human
ucacuuuucagug

SEQ ID NO: 2626693 - RNA, 22 nt, Human
ucacuuuuagggagagucauau

SEQ ID NO: 2626694 - RNA, 12 nt, Human
ucacuuuuccuc

SEQ ID NO: 2626695 - RNA, 12 nt, Human
ucacuuuuauuu

SEQ ID NO: 2626696 - RNA, 22 nt, Human
ucacuuuuauuuagcaccaggg

SEQ ID NO: 2626697 - RNA, 16 nt, Human
ucacuuugcucugggu

SEQ ID NO: 2626698 - RNA, 13 nt, Human
ucacuuuuaggga

SEQ ID NO: 2626699 - RNA, 17 nt, Human
ucacuuugcucugggug

SEQ ID NO: 2626700 - RNA, 15 nt, Human
ucacuuugcucuggg

SEQ ID NO: 2626701 - RNA, 14 nt, Human
ucacuuucuagauu

SEQ ID NO: 2626702 - RNA, 19 nt, Human
ucacuuucacauagauguc

SEQ ID NO: 2626703 - RNA, 14 nt, Human
ucacuuucucaguu

SEQ ID NO: 2626704 - RNA, 14 nt, Human
ucacuuugcucugg

SEQ ID NO: 2626705 - RNA, 13 nt, Human
ucacuuuuuucca

SEQ ID NO: 2626706 - RNA, 15 nt, Human
ucacuuuuuuccaca

SEQ ID NO: 2626707 - RNA, 15 nt, Human
ucacuuuuuuuuucc

SEQ ID NO: 2626708 - RNA, 16 nt, Human
ucacuuuuuuccacau

SEQ ID NO: 2626709 - RNA, 13 nt, Human
ucacuuuuccucc

SEQ ID NO: 2626710 - RNA, 18 nt, Human
ucacuuuuccucccucag

SEQ ID NO: 2626711 - RNA, 18 nt, Human
ucacuuuugacaaaggca

SEQ ID NO: 2626712 - RNA, 17 nt, Human
ucagaaaauauuaugug

SEQ ID NO: 2626713 - RNA, 21 nt, Human
ucacuuuuuuuuuccaaaaaa

SEQ ID NO: 2626714 - RNA, 19 nt, Human
ucacuuuuuuuuuccaaaa

SEQ ID NO: 2626715 - RNA, 17 nt, Human
ucacuuuuuuuuuccaa

SEQ ID NO: 2626716 - RNA, 17 nt, Human
ucagaaaaaaauaaaug

SEQ ID NO: 2626717 - RNA, 20 nt, Human
ucagaaaauauuauguguuu

SEQ ID NO: 2626718 - RNA, 19 nt, Human
ucagaaaauauuauguguu

SEQ ID NO: 2626719 - RNA, 14 nt, Human
ucagaaaagggaag

SEQ ID NO: 2626720 - RNA, 14 nt, Human
ucagaaagagcaag

SEQ ID NO: 2626721 - RNA, 12 nt, Human
ucagaaaggaau

SEQ ID NO: 2626722 - RNA, 17 nt, Human
ucagaaagcauuacauu

SEQ ID NO: 2626723 - RNA, 23 nt, Human
ucagaaagagcaagucuggaucu

SEQ ID NO: 2626724 - RNA, 20 nt, Human
ucagaaauacagauuuugau

SEQ ID NO: 2626725 - RNA, 16 nt, Human
ucagaaauacagauuu

SEQ ID NO: 2626726 - RNA, 13 nt, Human
ucagaaauacaga

SEQ ID NO: 2626727 - RNA, 23 nt, Human
ucagaaagugugcuuuaugcuga

SEQ ID NO: 2626728 - RNA, 20 nt, Human
ucacuggcucuccaagugcc

SEQ ID NO: 2626729 - RNA, 19 nt, Human
ucacuggcucuccaagugc

SEQ ID NO: 2626730 - RNA, 22 nt, Human
ucacuggcucuccaagugccag

SEQ ID NO: 2626731 - RNA, 17 nt, Human
ucacuggcucuccaagu

SEQ ID NO: 2626732 - RNA, 16 nt, Human
ucacuggcucuccaag

SEQ ID NO: 2626733 - RNA, 15 nt, Human
ucacuggcucuccaa

SEQ ID NO: 2626734 - RNA, 11 nt, Human
ucacuggcucu

SEQ ID NO: 2626735 - RNA, 15 nt, Human
ucacuggccaucccu

SEQ ID NO: 2626736 - RNA, 14 nt, Human
ucacuggcucucca

SEQ ID NO: 2626737 - RNA, 20 nt, Human
ucacuggcgacacguagcag

SEQ ID NO: 2626738 - RNA, 22 nt, Human
ucacuggcgacacguagcagcu

SEQ ID NO: 2626739 - RNA, 13 nt, Human
ucacuggaugaaa

SEQ ID NO: 2626740 - RNA, 22 nt, Human
ucacuggaguuacauuaauguu

SEQ ID NO: 2626741 - RNA, 21 nt, Human
ucacuggaguuacauuaaugu

SEQ ID NO: 2626742 - RNA, 19 nt, Human
ucacuggaguuacauuaau

SEQ ID NO: 2626743 - RNA, 17 nt, Human
ucacuggagcccaggag

SEQ ID NO: 2626744 - RNA, 14 nt, Human
ucacucuggccuca

SEQ ID NO: 2626745 - RNA, 21 nt, Human
ucacuggccacaguuguuuga

SEQ ID NO: 2626746 - RNA, 16 nt, Human
ucacuggcaaugaaaa

SEQ ID NO: 2626747 - RNA, 19 nt, Human
ucacuggaugaagauucuc

SEQ ID NO: 2626748 - RNA, 14 nt, Human
ucacuggaugaaga

SEQ ID NO: 2626749 - RNA, 20 nt, Human
ucacuuggugauauguccua

SEQ ID NO: 2626750 - RNA, 16 nt, Human
ucacuuguacaaaaua

SEQ ID NO: 2626751 - RNA, 17 nt, Human
ucacuuguacaaaauaa

SEQ ID NO: 2626752 - RNA, 17 nt, Human
ucacuugucaauaaaau

SEQ ID NO: 2626753 - RNA, 20 nt, Human
ucacuugaugugccauuuua

SEQ ID NO: 2626754 - RNA, 20 nt, Human
ucacuggcugccuccacucc

SEQ ID NO: 2626755 - RNA, 18 nt, Human
ucacuggcugccuccacu

SEQ ID NO: 2626756 - RNA, 17 nt, Human
ucacuggcugccuccac

SEQ ID NO: 2626757 - RNA, 15 nt, Human
ucacuggcugccucc

SEQ ID NO: 2626758 - RNA, 14 nt, Human
ucacuggcugccuc

SEQ ID NO: 2626759 - RNA, 14 nt, Human
ucacuuguacaaaa

SEQ ID NO: 2626760 - RNA, 15 nt, Human
ucacuuguacaaaau

SEQ ID NO: 2626761 - RNA, 13 nt, Human
ucacuuguacaaa

SEQ ID NO: 2626762 - RNA, 15 nt, Human
ucacugcuuaacuuc

SEQ ID NO: 2626763 - RNA, 17 nt, Human
ucacugcuuaacuucac

SEQ ID NO: 2626764 - RNA, 18 nt, Human
ucacugcuuaacuucaca

SEQ ID NO: 2626765 - RNA, 20 nt, Human
ucacugcuuaacuucacaua

SEQ ID NO: 2626766 - RNA, 16 nt, Human
ucacucugucgcccag

SEQ ID NO: 2626767 - RNA, 12 nt, Human
ucacucugucgc

SEQ ID NO: 2626768 - RNA, 19 nt, Human
ucacucugucgcccagucu

SEQ ID NO: 2626769 - RNA, 13 nt, Human
ucacucuggccuc

SEQ ID NO: 2626770 - RNA, 14 nt, Human
ucacucugcugcuu

SEQ ID NO: 2626771 - RNA, 13 nt, Human
ucacucugcugcu

SEQ ID NO: 2626772 - RNA, 22 nt, Human
ucacucugucgcccagucugga

SEQ ID NO: 2626773 - RNA, 18 nt, Human
ucagacagcugccuggga

SEQ ID NO: 2626774 - RNA, 17 nt, Human
ucagacagcugccuggg

SEQ ID NO: 2626775 - RNA, 16 nt, Human
ucagacagcugccugg

SEQ ID NO: 2626776 - RNA, 15 nt, Human
ucagacagcugccug

SEQ ID NO: 2626777 - RNA, 20 nt, Human
ucagacagcugccugggauc

SEQ ID NO: 2626778 - RNA, 19 nt, Human
ucagacagcugccugggau

SEQ ID NO: 2626779 - RNA, 19 nt, Human
ucagacauagaauuaacac

SEQ ID NO: 2626780 - RNA, 15 nt, Human
ucagaaaugcugccu

SEQ ID NO: 2626781 - RNA, 12 nt, Human
ucagaaauaugu

SEQ ID NO: 2626782 - RNA, 14 nt, Human
ucagacugaacaug

SEQ ID NO: 2626783 - RNA, 14 nt, Human
ucagacugcaugua

SEQ ID NO: 2626784 - RNA, 19 nt, Human
ucagacugaacauguacac

SEQ ID NO: 2626785 - RNA, 13 nt, Human
ucagacugcuggg

SEQ ID NO: 2626786 - RNA, 14 nt, Human
ucagacugcuggga

SEQ ID NO: 2626787 - RNA, 15 nt, Human
ucagacugcugggac

SEQ ID NO: 2626788 - RNA, 16 nt, Human
ucagacugcugggacu

SEQ ID NO: 2626789 - RNA, 17 nt, Human
ucagacugcugggacug

SEQ ID NO: 2626790 - RNA, 21 nt, Human
ucagacugcugggacuggcca

SEQ ID NO: 2626791 - RNA, 21 nt, Human
ucagacauccauguuuguaaa

SEQ ID NO: 2626792 - RNA, 14 nt, Human
ucagaaaugcugcc

SEQ ID NO: 2626793 - RNA, 22 nt, Human
ucagacauccauguuuguaaaa

SEQ ID NO: 2626794 - RNA, 14 nt, Human
ucagacauguuuuc

SEQ ID NO: 2626795 - RNA, 15 nt, Human
ucagacauguuuucc

SEQ ID NO: 2626796 - RNA, 22 nt, Human
ucagacauagaauuaacacaug

SEQ ID NO: 2626797 - RNA, 21 nt, Human
ucagacucccauuccugaaga

SEQ ID NO: 2626798 - RNA, 22 nt, Human
ucagacucccauuccugaagaa

SEQ ID NO: 2626799 - RNA, 19 nt, Human
ucagacucccauuccugaa

SEQ ID NO: 2626800 - RNA, 14 nt, Human
ucagacuagugaca

SEQ ID NO: 2626801 - RNA, 20 nt, Human
ucagacauguuuuccgugaa

SEQ ID NO: 2626802 - RNA, 14 nt, Human
ucagaccacggcuc

SEQ ID NO: 2626803 - RNA, 14 nt, Human
ucagaccagcucuu

SEQ ID NO: 2626804 - RNA, 17 nt, Human
ucagcacugauuucaca

SEQ ID NO: 2626805 - RNA, 13 nt, Human
ucagcacaaggcc

SEQ ID NO: 2626806 - RNA, 19 nt, Human
ucagcacgauuucuguuua

SEQ ID NO: 2626807 - RNA, 13 nt, Human
ucagcacuguccc

SEQ ID NO: 2626808 - RNA, 12 nt, Human
ucagcacugucc

SEQ ID NO: 2626809 - RNA, 20 nt, Human
ucagcacugauuucacaaca

SEQ ID NO: 2626810 - RNA, 21 nt, Human
ucagcacugucccuugccuca

SEQ ID NO: 2626811 - RNA, 14 nt, Human
ucagcacugucccu

SEQ ID NO: 2626812 - RNA, 23 nt, Human
ucagcacuugggggaucuguugu

SEQ ID NO: 2626813 - RNA, 16 nt, Human
ucagcaacucgcuuua

SEQ ID NO: 2626814 - RNA, 21 nt, Human
ucagcaaauuaauuggcagca

SEQ ID NO: 2626815 - RNA, 23 nt, Human
ucagcaaauuaauuggcagcaga

SEQ ID NO: 2626816 - RNA, 18 nt, Human
ucagcacgauuucuguuu

SEQ ID NO: 2626817 - RNA, 18 nt, Human
ucagaggcccucgcugcc

SEQ ID NO: 2626818 - RNA, 21 nt, Human
ucagaggcccucgcugccagc

SEQ ID NO: 2626819 - RNA, 20 nt, Human
ucagaggccuauaaugaagc

SEQ ID NO: 2626820 - RNA, 15 nt, Human
ucagaggccuauaau

SEQ ID NO: 2626821 - RNA, 22 nt, Human
ucagaggcccucgcugccagcu

SEQ ID NO: 2626822 - RNA, 20 nt, Human
ucagaggauggccagugucu

SEQ ID NO: 2626823 - RNA, 18 nt, Human
ucagaggcacaaaagggu

SEQ ID NO: 2626824 - RNA, 19 nt, Human
ucagaggauggccaguguc

SEQ ID NO: 2626825 - RNA, 18 nt, Human
ucagaggauggccagugu

SEQ ID NO: 2626826 - RNA, 14 nt, Human
ucagaggauggcca

SEQ ID NO: 2626827 - RNA, 15 nt, Human
ucagagcugggaggg

SEQ ID NO: 2626828 - RNA, 13 nt, Human
ucagaguccaggc

SEQ ID NO: 2626829 - RNA, 16 nt, Human
ucagaggcgcacugug

SEQ ID NO: 2626830 - RNA, 21 nt, Human
ucagagggaaaguaaauauuu

SEQ ID NO: 2626831 - RNA, 17 nt, Human
ucagaguccaggcccca

SEQ ID NO: 2626832 - RNA, 14 nt, Human
ucagagggaggaau

SEQ ID NO: 2626833 - RNA, 14 nt, Human
ucagaguccaggcc

SEQ ID NO: 2626834 - RNA, 16 nt, Human
ucagaguccaggcccc

SEQ ID NO: 2626835 - RNA, 15 nt, Human
ucagauaacuguuau

SEQ ID NO: 2626836 - RNA, 21 nt, Human
ucagaguugcugcaaaccuga

SEQ ID NO: 2626837 - RNA, 13 nt, Human
ucagauaacuguu

SEQ ID NO: 2626838 - RNA, 15 nt, Human
ucagcaaacucuuuu

SEQ ID NO: 2626839 - RNA, 22 nt, Human
ucagaguugaugguuguacaua

SEQ ID NO: 2626840 - RNA, 17 nt, Human
ucagaguggaaugcuuc

SEQ ID NO: 2626841 - RNA, 23 nt, Human
ucagagugcaagccccugcucca

SEQ ID NO: 2626842 - RNA, 23 nt, Human
ucccccuggccaccaccccccac

SEQ ID NO: 2626843 - RNA, 21 nt, Human
ucccccuggccaccacccccc

SEQ ID NO: 2626844 - RNA, 17 nt, Human
ucccccugcuuccaccu

SEQ ID NO: 2626845 - RNA, 23 nt, Human
ucccccugcccucguggccagcc

SEQ ID NO: 2626846 - RNA, 19 nt, Human
ucccccugcuuccaccuca

SEQ ID NO: 2626847 - RNA, 21 nt, Human
ucccccuuccauggacuuugu

SEQ ID NO: 2626848 - RNA, 16 nt, Human
ucccccuugccacccc

SEQ ID NO: 2626849 - RNA, 14 nt, Human
ucccccuugccacc

SEQ ID NO: 2626850 - RNA, 13 nt, Human
ucccccuugccac

SEQ ID NO: 2626851 - RNA, 12 nt, Human
ucccccuugcca

SEQ ID NO: 2626852 - RNA, 15 nt, Human
ucccccuucucccac

SEQ ID NO: 2626853 - RNA, 13 nt, Human
ucccccuucuccc

SEQ ID NO: 2626854 - RNA, 12 nt, Human
ucccccuucucc

SEQ ID NO: 2626855 - RNA, 10 nt, Human
ucccccuucu

SEQ ID NO: 2626856 - RNA, 23 nt, Human
ucccccuugccaccccacccucc

SEQ ID NO: 2626857 - RNA, 17 nt, Human
ucccccuugccacccca

SEQ ID NO: 2626858 - RNA, 19 nt, Human
ucccccuuuucugcauuuu

SEQ ID NO: 2626859 - RNA, 15 nt, Human
uccccgcccuuuuuu

SEQ ID NO: 2626860 - RNA, 13 nt, Human
uccccgcccuuuu

SEQ ID NO: 2626861 - RNA, 21 nt, Human
uccccgcagugugcacuaagg

SEQ ID NO: 2626862 - RNA, 22 nt, Human
uccccgcagugugcacuaaggg

SEQ ID NO: 2626863 - RNA, 14 nt, Human
uccccgcacccccc

SEQ ID NO: 2626864 - RNA, 21 nt, Human
uccccgcaccccccaagcugu

SEQ ID NO: 2626865 - RNA, 19 nt, Human
uccccgcagugugcacuaa

SEQ ID NO: 2626866 - RNA, 20 nt, Human
uccccgcagugugcacuaag

SEQ ID NO: 2626867 - RNA, 18 nt, Human
uccccgaguuuccccaga

SEQ ID NO: 2626868 - RNA, 22 nt, Human
uccccgagggaugaugccacac

SEQ ID NO: 2626869 - RNA, 21 nt, Human
uccccgagggaugaugccaca

SEQ ID NO: 2626870 - RNA, 19 nt, Human
uccccgaaggugcuggagg

SEQ ID NO: 2626871 - RNA, 24 nt, Human
uccccgaaacaggcuacucuccuc

SEQ ID NO: 2626872 - RNA, 20 nt, Human
uccccgagggaugaugccac

SEQ ID NO: 2626873 - RNA, 20 nt, Human
uccccgcacugggcuugggg

SEQ ID NO: 2626874 - RNA, 19 nt, Human
uccccugcccccaggacug

SEQ ID NO: 2626875 - RNA, 18 nt, Human
uccccugcccccaggacu

SEQ ID NO: 2626876 - RNA, 17 nt, Human
uccccugcccccaggac

SEQ ID NO: 2626877 - RNA, 16 nt, Human
uccccugcccccagga

SEQ ID NO: 2626878 - RNA, 22 nt, Human
uccccugcccccaggacugggc

SEQ ID NO: 2626879 - RNA, 20 nt, Human
uccccugcccccaggacugg

SEQ ID NO: 2626880 - RNA, 14 nt, Human
uccccugcccccag

SEQ ID NO: 2626881 - RNA, 13 nt, Human
uccccugccccca

SEQ ID NO: 2626882 - RNA, 15 nt, Human
uccccugcccccagg

SEQ ID NO: 2626883 - RNA, 23 nt, Human
uccccugcccccagaccuuuuau

SEQ ID NO: 2626884 - RNA, 20 nt, Human
uccccugccagggcagggcc

SEQ ID NO: 2626885 - RNA, 13 nt, Human
uccccugccauuu

SEQ ID NO: 2626886 - RNA, 17 nt, Human
uccccugccaccaggcc

SEQ ID NO: 2626887 - RNA, 16 nt, Human
uccccugccaccaggc

SEQ ID NO: 2626888 - RNA, 14 nt, Human
uccccugccaccag

SEQ ID NO: 2626889 - RNA, 13 nt, Human
uccccugccacca

SEQ ID NO: 2626890 - RNA, 19 nt, Human
uccccugccaccaggccac

SEQ ID NO: 2626891 - RNA, 12 nt, Human
uccccugccagg

SEQ ID NO: 2626892 - RNA, 14 nt, Human
uccccugccagggc

SEQ ID NO: 2626893 - RNA, 15 nt, Human
uccccugccagggca

SEQ ID NO: 2626894 - RNA, 14 nt, Human
uccccgccuguucc

SEQ ID NO: 2626895 - RNA, 13 nt, Human
uccccgccuguuc

SEQ ID NO: 2626896 - RNA, 12 nt, Human
ucccccauagcc

SEQ ID NO: 2626897 - RNA, 18 nt, Human
ucccccagcucuggugag

SEQ ID NO: 2626898 - RNA, 12 nt, Human
ucccccagccuc

SEQ ID NO: 2626899 - RNA, 16 nt, Human
ucccccagcccugugg

SEQ ID NO: 2626900 - RNA, 17 nt, Human
ucccccagcccugugga

SEQ ID NO: 2626901 - RNA, 14 nt, Human
ucccccauagccac

SEQ ID NO: 2626902 - RNA, 15 nt, Human
ucccccauagccacc

SEQ ID NO: 2626903 - RNA, 17 nt, Human
ucccccauccuccccuu

SEQ ID NO: 2626904 - RNA, 18 nt, Human
ucccccauccuccccuuc

SEQ ID NO: 2626905 - RNA, 21 nt, Human
ucccccauccuccccuucccu

SEQ ID NO: 2626906 - RNA, 13 nt, Human
uccccaggaggcc

SEQ ID NO: 2626907 - RNA, 12 nt, Human
ucccccagcccu

SEQ ID NO: 2626908 - RNA, 13 nt, Human
ucccccagcccug

SEQ ID NO: 2626909 - RNA, 14 nt, Human
ucccccagcccugu

SEQ ID NO: 2626910 - RNA, 15 nt, Human
ucccccagcccugug

SEQ ID NO: 2626911 - RNA, 15 nt, Human
uccccagcuguuuau

SEQ ID NO: 2626912 - RNA, 22 nt, Human
uccccagcgucccagucucugg

SEQ ID NO: 2626913 - RNA, 17 nt, Human
uccccagcucaccccug

SEQ ID NO: 2626914 - RNA, 23 nt, Human
uccccagccuuugaucagguggg

SEQ ID NO: 2626915 - RNA, 22 nt, Human
uccccagcucaccccuggagga

SEQ ID NO: 2626916 - RNA, 14 nt, Human
uccccagcuguuua

SEQ ID NO: 2626917 - RNA, 12 nt, Human
uccccagccucu

SEQ ID NO: 2626918 - RNA, 10 nt, Human
uccccagaga

SEQ ID NO: 2626919 - RNA, 11 nt, Human
uccccagagaa

SEQ ID NO: 2626920 - RNA, 17 nt, Human
ucccccaucucuucugg

SEQ ID NO: 2626921 - RNA, 12 nt, Human
uccccccucacc

SEQ ID NO: 2626922 - RNA, 19 nt, Human
ucccccauccuccccuucc

SEQ ID NO: 2626923 - RNA, 14 nt, Human
ucccccgccacucc

SEQ ID NO: 2626924 - RNA, 14 nt, Human
uccccccucaccag

SEQ ID NO: 2626925 - RNA, 21 nt, Human
ucccccgcaaugugcccccag

SEQ ID NO: 2626926 - RNA, 20 nt, Human
ucccccgcaaugugccccca

SEQ ID NO: 2626927 - RNA, 18 nt, Human
ucccccucccagggccag

SEQ ID NO: 2626928 - RNA, 19 nt, Human
ucccccucccagggccagg

SEQ ID NO: 2626929 - RNA, 17 nt, Human
ucccccucccagggcca

SEQ ID NO: 2626930 - RNA, 16 nt, Human
ucccccuccaccugcu

SEQ ID NO: 2626931 - RNA, 22 nt, Human
ucccccgggaggggcccgcuug

SEQ ID NO: 2626932 - RNA, 19 nt, Human
ucccccgccgcuuuucucc

SEQ ID NO: 2626933 - RNA, 22 nt, Human
ucccccugcccucguggccagc

SEQ ID NO: 2626934 - RNA, 20 nt, Human
ucccccugcccucguggcca

SEQ ID NO: 2626935 - RNA, 15 nt, Human
ucccccugcccucgu

SEQ ID NO: 2626936 - RNA, 12 nt, Human
ucccccugcccu

SEQ ID NO: 2626937 - RNA, 13 nt, Human
ucccccugcccca

SEQ ID NO: 2626938 - RNA, 15 nt, Human
ucccccucuguccag

SEQ ID NO: 2626939 - RNA, 16 nt, Human
ucccccugccagugcc

SEQ ID NO: 2626940 - RNA, 17 nt, Human
ucccccugccagugccu

SEQ ID NO: 2626941 - RNA, 18 nt, Human
ucccccugccagugccuu

SEQ ID NO: 2626942 - RNA, 20 nt, Human
ucccccucccccuucuccca

SEQ ID NO: 2626943 - RNA, 18 nt, Human
ucccccucccccuucucc

SEQ ID NO: 2626944 - RNA, 12 nt, Human
ucccccucuguc

SEQ ID NO: 2626945 - RNA, 13 nt, Human
ucccccucuggcu

SEQ ID NO: 2626946 - RNA, 20 nt, Human
ucccccucccccacugccau

SEQ ID NO: 2626947 - RNA, 13 nt, Human
ucccuaauaaagc

SEQ ID NO: 2626948 - RNA, 13 nt, Human
ucccuaccucagg

SEQ ID NO: 2626949 - RNA, 15 nt, Human
ucccuacuguaauuu

SEQ ID NO: 2626950 - RNA, 15 nt, Human
ucccuaccucaggca

SEQ ID NO: 2626951 - RNA, 17 nt, Human
ucccuaccucaggcagg

SEQ ID NO: 2626952 - RNA, 17 nt, Human
ucccucccucuuucccu

SEQ ID NO: 2626953 - RNA, 16 nt, Human
ucccuacuuccuguga

SEQ ID NO: 2626954 - RNA, 15 nt, Human
ucccuacuuccugug

SEQ ID NO: 2626955 - RNA, 15 nt, Human
ucccucccucuuucc

SEQ ID NO: 2626956 - RNA, 12 nt, Human
ucccuaauaaag

SEQ ID NO: 2626957 - RNA, 11 nt, Human
ucccuaauaaa

SEQ ID NO: 2626958 - RNA, 13 nt, Human
ucccuaaacugua

SEQ ID NO: 2626959 - RNA, 19 nt, Human
uccccuucucaucacuccc

SEQ ID NO: 2626960 - RNA, 16 nt, Human
uccccuuccucacugc

SEQ ID NO: 2626961 - RNA, 15 nt, Human
uccccuucucaucac

SEQ ID NO: 2626962 - RNA, 18 nt, Human
ucccuaaagaaaaaaaau

SEQ ID NO: 2626963 - RNA, 15 nt, Human
ucccuaagccaaggg

SEQ ID NO: 2626964 - RNA, 20 nt, Human
ucccuaagccaagggccucu

SEQ ID NO: 2626965 - RNA, 21 nt, Human
uccccuuccuaauuccacagc

SEQ ID NO: 2626966 - RNA, 22 nt, Human
uccccuuccuaauuccacagcu

SEQ ID NO: 2626967 - RNA, 15 nt, Human
uccccuucccugcaa

SEQ ID NO: 2626968 - RNA, 13 nt, Human
uccccuucccugc

SEQ ID NO: 2626969 - RNA, 13 nt, Human
uccccuuccacug

SEQ ID NO: 2626970 - RNA, 17 nt, Human
uccccuuccacugaggg

SEQ ID NO: 2626971 - RNA, 18 nt, Human
uccccuuccacugagggc

SEQ ID NO: 2626972 - RNA, 19 nt, Human
uccccuuccaucccagagg

SEQ ID NO: 2626973 - RNA, 13 nt, Human
uccccuucacucc

SEQ ID NO: 2626974 - RNA, 24 nt, Human
uccccugcuggguguggcgcagca

SEQ ID NO: 2626975 - RNA, 20 nt, Human
uccccuggaacugucucuca

SEQ ID NO: 2626976 - RNA, 18 nt, Human
uccccuggaacugucucu

SEQ ID NO: 2626977 - RNA, 16 nt, Human
uccccuggacugggag

SEQ ID NO: 2626978 - RNA, 15 nt, Human
uccccuggacuggga

SEQ ID NO: 2626979 - RNA, 19 nt, Human
uccccuguagagugggagc

SEQ ID NO: 2626980 - RNA, 19 nt, Human
uccccuggggacagcaagg

SEQ ID NO: 2626981 - RNA, 15 nt, Human
uccccugggcccuga

SEQ ID NO: 2626982 - RNA, 17 nt, Human
uccccuggacugggagg

SEQ ID NO: 2626983 - RNA, 14 nt, Human
uccccugugcaguc

SEQ ID NO: 2626984 - RNA, 20 nt, Human
uccccuguggggaucucagg

SEQ ID NO: 2626985 - RNA, 12 nt, Human
uccccugugggg

SEQ ID NO: 2626986 - RNA, 15 nt, Human
uccccuguucacucu

SEQ ID NO: 2626987 - RNA, 23 nt, Human
uccccuguccccgcacugggcuu

SEQ ID NO: 2626988 - RNA, 22 nt, Human
uccccuguagagugggagcuga

SEQ ID NO: 2626989 - RNA, 21 nt, Human
uccccugcuggguguggcgca

SEQ ID NO: 2626990 - RNA, 20 nt, Human
uccccugcuggguguggcgc

SEQ ID NO: 2626991 - RNA, 15 nt, Human
uccccugcugggugu

SEQ ID NO: 2626992 - RNA, 14 nt, Human
uccccugcugggug

SEQ ID NO: 2626993 - RNA, 16 nt, Human
uccccugcccugcugc

SEQ ID NO: 2626994 - RNA, 23 nt, Human
uccccugcccugcugccgccucc

SEQ ID NO: 2626995 - RNA, 13 nt, Human
uccccugcccugg

SEQ ID NO: 2626996 - RNA, 15 nt, Human
uccccugcccugguc

SEQ ID NO: 2626997 - RNA, 12 nt, Human
uccccugcccug

SEQ ID NO: 2626998 - RNA, 15 nt, Human
uccccugcccugcug

SEQ ID NO: 2626999 - RNA, 22 nt, Human
uccccugccccuuuacggacac

SEQ ID NO: 2627000 - RNA, 23 nt, Human
uccccugcugcaggggcucugga

SEQ ID NO: 2627001 - RNA, 21 nt, Human
uccccugcugcaggggcucug

SEQ ID NO: 2627002 - RNA, 18 nt, Human
uccccugcugcaggggcu

SEQ ID NO: 2627003 - RNA, 17 nt, Human
uccccugcugcaggggc

SEQ ID NO: 2627004 - RNA, 15 nt, Human
uccccugcugcaggg

SEQ ID NO: 2627005 - RNA, 17 nt, Human
uccccugcccuggucca

SEQ ID NO: 2627006 - RNA, 24 nt, Human
uccccugcccugguccagggaagc

SEQ ID NO: 2627007 - RNA, 15 nt, Human
uccaucaugucccca

SEQ ID NO: 2627008 - RNA, 23 nt, Human
uccagcuccucauccagggcucu

SEQ ID NO: 2627009 - RNA, 14 nt, Human
uccaucaugucccc

SEQ ID NO: 2627010 - RNA, 13 nt, Human
uccauccaaggcc

SEQ ID NO: 2627011 - RNA, 21 nt, Human
uccauccaaggccagguucuc

SEQ ID NO: 2627012 - RNA, 15 nt, Human
uccauccacauggga

SEQ ID NO: 2627013 - RNA, 16 nt, Human
uccaucauguccccaa

SEQ ID NO: 2627014 - RNA, 16 nt, Human
uccauccaggccauuc

SEQ ID NO: 2627015 - RNA, 13 nt, Human
uccaucccagagg

SEQ ID NO: 2627016 - RNA, 12 nt, Human
uccaucccagag

SEQ ID NO: 2627017 - RNA, 22 nt, Human
uccaucccaggacaccacaccc

SEQ ID NO: 2627018 - RNA, 21 nt, Human
uccaucccaggacaccacacc

SEQ ID NO: 2627019 - RNA, 15 nt, Human
uccaucccaggacac

SEQ ID NO: 2627020 - RNA, 20 nt, Human
uccaucccgaaaaucucucg

SEQ ID NO: 2627021 - RNA, 14 nt, Human
uccaucccaucauc

SEQ ID NO: 2627022 - RNA, 14 nt, Human
uccaucccuacccc

SEQ ID NO: 2627023 - RNA, 21 nt, Human
uccagcucaccccccacacuc

SEQ ID NO: 2627024 - RNA, 20 nt, Human
uccagcucaccccccacacu

SEQ ID NO: 2627025 - RNA, 23 nt, Human
uccagcucaccagccccagugcc

SEQ ID NO: 2627026 - RNA, 18 nt, Human
uccagcuccucauccagg

SEQ ID NO: 2627027 - RNA, 22 nt, Human
uccagcuccaagaccuguuggu

SEQ ID NO: 2627028 - RNA, 19 nt, Human
uccagcuccaaccugcaaa

SEQ ID NO: 2627029 - RNA, 16 nt, Human
uccagcuccaaccugc

SEQ ID NO: 2627030 - RNA, 18 nt, Human
uccagcuccaaccugcaa

SEQ ID NO: 2627031 - RNA, 12 nt, Human
uccagcuccaac

SEQ ID NO: 2627032 - RNA, 13 nt, Human
uccauguacugua

SEQ ID NO: 2627033 - RNA, 15 nt, Human
uccaugggguaggag

SEQ ID NO: 2627034 - RNA, 16 nt, Human
uccauggggaagggau

SEQ ID NO: 2627035 - RNA, 15 nt, Human
uccaugggggcaggg

SEQ ID NO: 2627036 - RNA, 17 nt, Human
uccaugggggcagggca

SEQ ID NO: 2627037 - RNA, 14 nt, Human
uccauguacuguag

SEQ ID NO: 2627038 - RNA, 16 nt, Human
uccauguacuguaguu

SEQ ID NO: 2627039 - RNA, 20 nt, Human
uccauguacuguaguuuuuc

SEQ ID NO: 2627040 - RNA, 21 nt, Human
uccauguacuguaguuuuucu

SEQ ID NO: 2627041 - RNA, 14 nt, Human
uccauguagcagga

SEQ ID NO: 2627042 - RNA, 15 nt, Human
uccauguagcaggac

SEQ ID NO: 2627043 - RNA, 21 nt, Human
ucccaaagugcugggauuaca

SEQ ID NO: 2627044 - RNA, 15 nt, Human
uccauggacuuuguu

SEQ ID NO: 2627045 - RNA, 14 nt, Human
uccauggacuuugu

SEQ ID NO: 2627046 - RNA, 13 nt, Human
uccauggacuuug

SEQ ID NO: 2627047 - RNA, 14 nt, Human
uccauggauuuugg

SEQ ID NO: 2627048 - RNA, 20 nt, Human
uccauggcccugcaaaagga

SEQ ID NO: 2627049 - RNA, 15 nt, Human
ucccaagcucugcuc

SEQ ID NO: 2627050 - RNA, 14 nt, Human
ucccaagcucugcu

SEQ ID NO: 2627051 - RNA, 13 nt, Human
ucccaagcucugc

SEQ ID NO: 2627052 - RNA, 12 nt, Human
ucccaagcucug

SEQ ID NO: 2627053 - RNA, 18 nt, Human
ucccaaggcucugagcaa

SEQ ID NO: 2627054 - RNA, 22 nt, Human
ucccaaggaaagccccagcacu

SEQ ID NO: 2627055 - RNA, 21 nt, Human
ucccaagcugggccccagccc

SEQ ID NO: 2627056 - RNA, 19 nt, Human
ucccaagcugggccccagc

SEQ ID NO: 2627057 - RNA, 18 nt, Human
ucccaagcugggccccag

SEQ ID NO: 2627058 - RNA, 17 nt, Human
ucccaagcugggcccca

SEQ ID NO: 2627059 - RNA, 12 nt, Human
ucccaaggaaag

SEQ ID NO: 2627060 - RNA, 13 nt, Human
ucccaaggaaagc

SEQ ID NO: 2627061 - RNA, 17 nt, Human
ucccaagcucugcuccu

SEQ ID NO: 2627062 - RNA, 16 nt, Human
ucccaagcugggcccc

SEQ ID NO: 2627063 - RNA, 15 nt, Human
ucccaagcugggccc

SEQ ID NO: 2627064 - RNA, 14 nt, Human
ucccaagcugggcc

SEQ ID NO: 2627065 - RNA, 13 nt, Human
ucccaagcugggc

SEQ ID NO: 2627066 - RNA, 12 nt, Human
ucccaagcuggg

SEQ ID NO: 2627067 - RNA, 17 nt, Human
ucccaaauuugauugau

SEQ ID NO: 2627068 - RNA, 19 nt, Human
ucccaaauuugauugauuu

SEQ ID NO: 2627069 - RNA, 14 nt, Human
ucccaaaugagcca

SEQ ID NO: 2627070 - RNA, 13 nt, Human
ucccaacucaccc

SEQ ID NO: 2627071 - RNA, 16 nt, Human
ucccaaauuucauacc

SEQ ID NO: 2627072 - RNA, 17 nt, Human
uccauguagcaggacug

SEQ ID NO: 2627073 - RNA, 15 nt, Human
ucccaacucacccca

SEQ ID NO: 2627074 - RNA, 14 nt, Human
ucccaacucacccc

SEQ ID NO: 2627075 - RNA, 16 nt, Human
ucccaacucaccccag

SEQ ID NO: 2627076 - RNA, 20 nt, Human
ucccaaauuugauugauuug

SEQ ID NO: 2627077 - RNA, 22 nt, Human
ucccaaauuugauugauuugaa

SEQ ID NO: 2627078 - RNA, 16 nt, Human
ucccaagcucagaggc

SEQ ID NO: 2627079 - RNA, 15 nt, Human
ucccaccucagccuc

SEQ ID NO: 2627080 - RNA, 14 nt, Human
ucccaccucagccu

SEQ ID NO: 2627081 - RNA, 15 nt, Human
ucccaggagacaguu

SEQ ID NO: 2627082 - RNA, 19 nt, Human
ucccaggacccugaagggg

SEQ ID NO: 2627083 - RNA, 14 nt, Human
ucccaggacccuga

SEQ ID NO: 2627084 - RNA, 16 nt, Human
ucccaggacccugaag

SEQ ID NO: 2627085 - RNA, 16 nt, Human
ucccaccuagcagcac

SEQ ID NO: 2627086 - RNA, 17 nt, Human
ucccaccuagcagcacc

SEQ ID NO: 2627087 - RNA, 13 nt, Human
ucccaggacccug

SEQ ID NO: 2627088 - RNA, 21 nt, Human
ucccaagggauggugcccugu

SEQ ID NO: 2627089 - RNA, 18 nt, Human
ucccaagggauggugccc

SEQ ID NO: 2627090 - RNA, 22 nt, Human
ucccaaggcucugagcaaaugu

SEQ ID NO: 2627091 - RNA, 20 nt, Human
ucccaaggcugcgucuggag

SEQ ID NO: 2627092 - RNA, 22 nt, Human
ucccaagcugggccccagccca

SEQ ID NO: 2627093 - RNA, 18 nt, Human
ucccaaggaaagccccag

SEQ ID NO: 2627094 - RNA, 13 nt, Human
ucccaccucagcc

SEQ ID NO: 2627095 - RNA, 24 nt, Human
ucccaggaugagcaucccaggauc

SEQ ID NO: 2627096 - RNA, 22 nt, Human
ucccaggcauuccccaggaggc

SEQ ID NO: 2627097 - RNA, 15 nt, Human
ucccaggcugagccu

SEQ ID NO: 2627098 - RNA, 21 nt, Human
ucccaggcgccccuucccccu

SEQ ID NO: 2627099 - RNA, 18 nt, Human
ucccaggcgccccuuccc

SEQ ID NO: 2627100 - RNA, 20 nt, Human
ucccaggcgccccuuccccc

SEQ ID NO: 2627101 - RNA, 21 nt, Human
ucccaggcauuccccaggagg

SEQ ID NO: 2627102 - RNA, 20 nt, Human
ucccaggcauuccccaggag

SEQ ID NO: 2627103 - RNA, 16 nt, Human
ucccaggagacaguuc

SEQ ID NO: 2627104 - RNA, 22 nt, Human
ucccaggagacaguucaagaaa

SEQ ID NO: 2627105 - RNA, 22 nt, Human
ucccaggaguggaggaggccug

SEQ ID NO: 2627106 - RNA, 23 nt, Human
ucccaggagcugcccagaguugc

SEQ ID NO: 2627107 - RNA, 18 nt, Human
ucccaggagcugcccaga

SEQ ID NO: 2627108 - RNA, 17 nt, Human
ucccaggagcugcccag

SEQ ID NO: 2627109 - RNA, 16 nt, Human
ucccaggaugagcauc

SEQ ID NO: 2627110 - RNA, 19 nt, Human
ucccauggagccccagccc

SEQ ID NO: 2627111 - RNA, 18 nt, Human
ucccauggagccccagcc

SEQ ID NO: 2627112 - RNA, 17 nt, Human
ucccauggagccccagc

SEQ ID NO: 2627113 - RNA, 16 nt, Human
ucccauggagccccag

SEQ ID NO: 2627114 - RNA, 15 nt, Human
ucccauggagcccca

SEQ ID NO: 2627115 - RNA, 13 nt, Human
ucccauggagccc

SEQ ID NO: 2627116 - RNA, 22 nt, Human
ucccauggacacuccagugcca

SEQ ID NO: 2627117 - RNA, 21 nt, Human
ucccauggacacuccagugcc

SEQ ID NO: 2627118 - RNA, 18 nt, Human
ucccauggcuuaaugcuu

SEQ ID NO: 2627119 - RNA, 21 nt, Human
ucccauggagccccagccccc

SEQ ID NO: 2627120 - RNA, 14 nt, Human
ucccauggggaggg

SEQ ID NO: 2627121 - RNA, 16 nt, Human
ucccauguaacagaaa

SEQ ID NO: 2627122 - RNA, 15 nt, Human
ucccauguaacagaa

SEQ ID NO: 2627123 - RNA, 17 nt, Human
ucccaucugggaguccc

SEQ ID NO: 2627124 - RNA, 14 nt, Human
ucccaucugggagu

SEQ ID NO: 2627125 - RNA, 13 nt, Human
ucccaucugggag

SEQ ID NO: 2627126 - RNA, 23 nt, Human
ucccaucugggaguccccuuuuc

SEQ ID NO: 2627127 - RNA, 19 nt, Human
ucccaucugggaguccccu

SEQ ID NO: 2627128 - RNA, 20 nt, Human
ucccauggacacuccagugc

SEQ ID NO: 2627129 - RNA, 15 nt, Human
ucccauggacacucc

SEQ ID NO: 2627130 - RNA, 14 nt, Human
ucccauggacacuc

SEQ ID NO: 2627131 - RNA, 12 nt, Human
ucccaugcccug

SEQ ID NO: 2627132 - RNA, 20 nt, Human
ucccaucucacacaugagca

SEQ ID NO: 2627133 - RNA, 16 nt, Human
ucccaggcugagccuc

SEQ ID NO: 2627134 - RNA, 23 nt, Human
ucccaucucacacaugagcauca

SEQ ID NO: 2627135 - RNA, 19 nt, Human
ucccaucugcaccccuucu

SEQ ID NO: 2627136 - RNA, 14 nt, Human
ucccaucucuuccu

SEQ ID NO: 2627137 - RNA, 13 nt, Human
ucccaucugcacc

SEQ ID NO: 2627138 - RNA, 16 nt, Human
ucccaucuccacuguu

SEQ ID NO: 2627139 - RNA, 22 nt, Human
ucccaggaugagcaucccagga

SEQ ID NO: 2627140 - RNA, 21 nt, Human
ucccaggcucucaacagggga

SEQ ID NO: 2627141 - RNA, 19 nt, Human
uccccacuuguccgcuggg

SEQ ID NO: 2627142 - RNA, 22 nt, Human
uccccacuugagaauuacccuu

SEQ ID NO: 2627143 - RNA, 13 nt, Human
ucccauugucccu

SEQ ID NO: 2627144 - RNA, 16 nt, Human
ucccauugucccucug

SEQ ID NO: 2627145 - RNA, 14 nt, Human
ucccauugcccugg

SEQ ID NO: 2627146 - RNA, 15 nt, Human
ucccauugcccuggu

SEQ ID NO: 2627147 - RNA, 13 nt, Human
ucccauugcccug

SEQ ID NO: 2627148 - RNA, 13 nt, Human
uccccagaccuga

SEQ ID NO: 2627149 - RNA, 21 nt, Human
uccccacuuguccgcugggug

SEQ ID NO: 2627150 - RNA, 17 nt, Human
uccccagaaaggagacu

SEQ ID NO: 2627151 - RNA, 22 nt, Human
uccccagacuccaccaagccug

SEQ ID NO: 2627152 - RNA, 16 nt, Human
uccccagaccugagcu

SEQ ID NO: 2627153 - RNA, 19 nt, Human
ucccauucacucuuccaga

SEQ ID NO: 2627154 - RNA, 19 nt, Human
ucccauguaacagaaaggg

SEQ ID NO: 2627155 - RNA, 17 nt, Human
ucccauucacucuucca

SEQ ID NO: 2627156 - RNA, 18 nt, Human
ucccauguaacagaaagg

SEQ ID NO: 2627157 - RNA, 17 nt, Human
ucccauguaacagaaag

SEQ ID NO: 2627158 - RNA, 13 nt, Human
ucccauguagccc

SEQ ID NO: 2627159 - RNA, 15 nt, Human
ucccauguagccccc

SEQ ID NO: 2627160 - RNA, 21 nt, Human
ucccauguagcccccuggccu

SEQ ID NO: 2627161 - RNA, 13 nt, Human
ucccauuccugaa

SEQ ID NO: 2627162 - RNA, 14 nt, Human
ucccauuccugaag

SEQ ID NO: 2627163 - RNA, 17 nt, Human
ucccauuccugaagaac

SEQ ID NO: 2627164 - RNA, 15 nt, Human
ucccauuccugaaga

SEQ ID NO: 2627165 - RNA, 16 nt, Human
ucauuucugcaucagc

SEQ ID NO: 2627166 - RNA, 22 nt, Human
ucauuucugcaucagcugcuga

SEQ ID NO: 2627167 - RNA, 14 nt, Human
ucauuucuuugagu

SEQ ID NO: 2627168 - RNA, 13 nt, Human
ucauuucuugggc

SEQ ID NO: 2627169 - RNA, 16 nt, Human
uccaaaagauugcuga

SEQ ID NO: 2627170 - RNA, 16 nt, Human
ucauucauuuauucau

SEQ ID NO: 2627171 - RNA, 15 nt, Human
ucauucauucuuagc

SEQ ID NO: 2627172 - RNA, 15 nt, Human
ucauucaugcuacug

SEQ ID NO: 2627173 - RNA, 13 nt, Human
ucauucagaaaaa

SEQ ID NO: 2627174 - RNA, 12 nt, Human
ucauucaggaaa

SEQ ID NO: 2627175 - RNA, 13 nt, Human
ucauucaggaaaa

SEQ ID NO: 2627176 - RNA, 23 nt, Human
ucauguaaauuuuguaugaaaaa

SEQ ID NO: 2627177 - RNA, 14 nt, Human
ucauucagaaaaaa

SEQ ID NO: 2627178 - RNA, 19 nt, Human
uccaaaagauugcugaaau

SEQ ID NO: 2627179 - RNA, 20 nt, Human
uccaaaagauugcugaaauu

SEQ ID NO: 2627180 - RNA, 22 nt, Human
uccaaaagauugcugaaauuuu

SEQ ID NO: 2627181 - RNA, 13 nt, Human
uccaaaagcuuuu

SEQ ID NO: 2627182 - RNA, 16 nt, Human
uccaaaauaaaacuuu

SEQ ID NO: 2627183 - RNA, 17 nt, Human
uccaaaauaaaacuuuu

SEQ ID NO: 2627184 - RNA, 16 nt, Human
uccaaaagcuuuuuau

SEQ ID NO: 2627185 - RNA, 19 nt, Human
uccaaaaguggccucuuug

SEQ ID NO: 2627186 - RNA, 19 nt, Human
uccaaacuaccuuccaguu

SEQ ID NO: 2627187 - RNA, 23 nt, Human
uccaaacugacucuuaagaagac

SEQ ID NO: 2627188 - RNA, 19 nt, Human
uccaaacugaagcagccuc

SEQ ID NO: 2627189 - RNA, 23 nt, Human
uccaaaaguggccucuuugucua

SEQ ID NO: 2627190 - RNA, 20 nt, Human
uccaaacugccuaagcccuc

SEQ ID NO: 2627191 - RNA, 12 nt, Human
uccaaagaaaug

SEQ ID NO: 2627192 - RNA, 22 nt, Human
uccaaagaguagaauugcauug

SEQ ID NO: 2627193 - RNA, 22 nt, Human
uccaaacuuggauuuuugacuc

SEQ ID NO: 2627194 - RNA, 23 nt, Human
uccaaagaguagaauugcauuga

SEQ ID NO: 2627195 - RNA, 19 nt, Human
uccaaagcacauugaaaga

SEQ ID NO: 2627196 - RNA, 23 nt, Human
uccaagcauaccaacacgagcag

SEQ ID NO: 2627197 - RNA, 17 nt, Human
uccaagcauuuagaugu

SEQ ID NO: 2627198 - RNA, 13 nt, Human
uccaagcaaaugu

SEQ ID NO: 2627199 - RNA, 18 nt, Human
uccaagauaccuaaaaga

SEQ ID NO: 2627200 - RNA, 17 nt, Human
uccaagagucugaugau

SEQ ID NO: 2627201 - RNA, 16 nt, Human
uccaagagucugauga

SEQ ID NO: 2627202 - RNA, 18 nt, Human
uccaagauauuuuaaaau

SEQ ID NO: 2627203 - RNA, 22 nt, Human
uccaagauauuuuaaaaucugu

SEQ ID NO: 2627204 - RNA, 19 nt, Human
uccaagaccuucuccuuca

SEQ ID NO: 2627205 - RNA, 19 nt, Human
uccaagaccuguugguucc

SEQ ID NO: 2627206 - RNA, 16 nt, Human
uccaagacauugucaa

SEQ ID NO: 2627207 - RNA, 20 nt, Human
uccaagacaugucuguucua

SEQ ID NO: 2627208 - RNA, 22 nt, Human
uccaagacaugucuguucuaca

SEQ ID NO: 2627209 - RNA, 11 nt, Human
uccaagacauu

SEQ ID NO: 2627210 - RNA, 15 nt, Human
uccaagacauuguca

SEQ ID NO: 2627211 - RNA, 17 nt, Human
uccaagacauugucaau

SEQ ID NO: 2627212 - RNA, 15 nt, Human
uccaagacacugugg

SEQ ID NO: 2627213 - RNA, 17 nt, Human
uccaagaaugcugaaac

SEQ ID NO: 2627214 - RNA, 16 nt, Human
uccaagaaugcugaaa

SEQ ID NO: 2627215 - RNA, 15 nt, Human
uccaagaaugcugaa

SEQ ID NO: 2627216 - RNA, 17 nt, Human
uccaagacaugucuguu

SEQ ID NO: 2627217 - RNA, 18 nt, Human
uccaagacaguauacagu

SEQ ID NO: 2627218 - RNA, 18 nt, Human
uccaagacagaauaauga

SEQ ID NO: 2627219 - RNA, 18 nt, Human
uccaagaaucuaucugcu

SEQ ID NO: 2627220 - RNA, 12 nt, Human
uccaagaaucua

SEQ ID NO: 2627221 - RNA, 14 nt, Human
uccaagaaugcuga

SEQ ID NO: 2627222 - RNA, 13 nt, Human
uccaagaaugcug

SEQ ID NO: 2627223 - RNA, 12 nt, Human
uccaagaaugcu

SEQ ID NO: 2627224 - RNA, 19 nt, Human
uccaagaaucuaucugcuu

SEQ ID NO: 2627225 - RNA, 22 nt, Human
uccaagaagcccaggaaaggcu

SEQ ID NO: 2627226 - RNA, 21 nt, Human
uccaaaggccauggagagcug

SEQ ID NO: 2627227 - RNA, 21 nt, Human
uccaaaggcauuuuauugcuu

SEQ ID NO: 2627228 - RNA, 23 nt, Human
uccaaaggaaucuccaguuuuca

SEQ ID NO: 2627229 - RNA, 20 nt, Human
uccaagaagcccaggaaagg

SEQ ID NO: 2627230 - RNA, 13 nt, Human
uccaaaggaggcu

SEQ ID NO: 2627231 - RNA, 15 nt, Human
uccaaaggaggcugg

SEQ ID NO: 2627232 - RNA, 19 nt, Human
uccaaaggaggcuggcagg

SEQ ID NO: 2627233 - RNA, 14 nt, Human
uccaaagcagacag

SEQ ID NO: 2627234 - RNA, 15 nt, Human
uccaaagcagacagc

SEQ ID NO: 2627235 - RNA, 18 nt, Human
uccaaacuuggauuuuug

SEQ ID NO: 2627236 - RNA, 13 nt, Human
uccaaagcagggu

SEQ ID NO: 2627237 - RNA, 17 nt, Human
uccaaagccaaugugaa

SEQ ID NO: 2627238 - RNA, 23 nt, Human
uccaaaggaagucuaggagcugg

SEQ ID NO: 2627239 - RNA, 22 nt, Human
uccaauuuucuggaauacauga

SEQ ID NO: 2627240 - RNA, 12 nt, Human
uccacaaaauaa

SEQ ID NO: 2627241 - RNA, 20 nt, Human
uccacaaaauaaccaauccu

SEQ ID NO: 2627242 - RNA, 20 nt, Human
uccacaaauuauuaaugaaa

SEQ ID NO: 2627243 - RNA, 14 nt, Human
uccacaaauuauua

SEQ ID NO: 2627244 - RNA, 14 nt, Human
uccacaacacacag

SEQ ID NO: 2627245 - RNA, 20 nt, Human
uccaagcauuuagauguaua

SEQ ID NO: 2627246 - RNA, 11 nt, Human
uccaagcaaag

SEQ ID NO: 2627247 - RNA, 18 nt, Human
uccaauuuucuggaauac

SEQ ID NO: 2627248 - RNA, 21 nt, Human
uccacaaauuauuaaugaaaa

SEQ ID NO: 2627249 - RNA, 21 nt, Human
uccacaagacagaagcugaag

SEQ ID NO: 2627250 - RNA, 16 nt, Human
uccacccuguccccca

SEQ ID NO: 2627251 - RNA, 14 nt, Human
uccacaagagccca

SEQ ID NO: 2627252 - RNA, 21 nt, Human
uccacccugucccccagcucu

SEQ ID NO: 2627253 - RNA, 20 nt, Human
uccacccugucccccagcuc

SEQ ID NO: 2627254 - RNA, 18 nt, Human
uccacccugucccccagc

SEQ ID NO: 2627255 - RNA, 17 nt, Human
uccacccugucccccag

SEQ ID NO: 2627256 - RNA, 13 nt, Human
uccacccuuggcc

SEQ ID NO: 2627257 - RNA, 14 nt, Human
uccacccuuggccu

SEQ ID NO: 2627258 - RNA, 15 nt, Human
uccacccuuggccug

SEQ ID NO: 2627259 - RNA, 16 nt, Human
uccacccuuggccugu

SEQ ID NO: 2627260 - RNA, 17 nt, Human
uccacccuuggccuguc

SEQ ID NO: 2627261 - RNA, 19 nt, Human
uccacccuuggccugucuc

SEQ ID NO: 2627262 - RNA, 14 nt, Human
uccaccuacaugag

SEQ ID NO: 2627263 - RNA, 20 nt, Human
uccaccuaguggcuguccag

SEQ ID NO: 2627264 - RNA, 17 nt, Human
uccaccuaguggcuguc

SEQ ID NO: 2627265 - RNA, 12 nt, Human
uccaccucaccc

SEQ ID NO: 2627266 - RNA, 15 nt, Human
uccaccgcugccuaa

SEQ ID NO: 2627267 - RNA, 13 nt, Human
uccaccgcugccu

SEQ ID NO: 2627268 - RNA, 22 nt, Human
uccacccugucccccagcucug

SEQ ID NO: 2627269 - RNA, 14 nt, Human
uccaccgcugccua

SEQ ID NO: 2627270 - RNA, 19 nt, Human
uccaccgcugccuaagugg

SEQ ID NO: 2627271 - RNA, 20 nt, Human
uccacccuuggccugucuca

SEQ ID NO: 2627272 - RNA, 13 nt, Human
uccaccucccucc

SEQ ID NO: 2627273 - RNA, 14 nt, Human
uccaccuccaucuu

SEQ ID NO: 2627274 - RNA, 13 nt, Human
uccaccuccaucu

SEQ ID NO: 2627275 - RNA, 17 nt, Human
uccaccucagccuugga

SEQ ID NO: 2627276 - RNA, 14 nt, Human
uccaccucacccca

SEQ ID NO: 2627277 - RNA, 21 nt, Human
uccaccuaguggcuguccagu

SEQ ID NO: 2627278 - RNA, 16 nt, Human
uccaccucaccccacu

SEQ ID NO: 2627279 - RNA, 11 nt, Human
uccaccucagc

SEQ ID NO: 2627280 - RNA, 12 nt, Human
uccaccucagcc

SEQ ID NO: 2627281 - RNA, 13 nt, Human
uccaccucagccu

SEQ ID NO: 2627282 - RNA, 14 nt, Human
uccaccucagccuu

SEQ ID NO: 2627283 - RNA, 16 nt, Human
uccaccucagccuugg

SEQ ID NO: 2627284 - RNA, 12 nt, Human
uccaccugccag

SEQ ID NO: 2627285 - RNA, 13 nt, Human
uccaccuccuucu

SEQ ID NO: 2627286 - RNA, 12 nt, Human
uccaccuccuuc

SEQ ID NO: 2627287 - RNA, 18 nt, Human
uccaccucgacguuuaca

SEQ ID NO: 2627288 - RNA, 17 nt, Human
uccagauccuggaaauc

SEQ ID NO: 2627289 - RNA, 16 nt, Human
uccagauccuggaaau

SEQ ID NO: 2627290 - RNA, 14 nt, Human
uccagauccuggaa

SEQ ID NO: 2627291 - RNA, 17 nt, Human
uccagaagccucuggcu

SEQ ID NO: 2627292 - RNA, 18 nt, Human
uccagaagccucuggcua

SEQ ID NO: 2627293 - RNA, 19 nt, Human
uccagaagccucuggcuag

SEQ ID NO: 2627294 - RNA, 12 nt, Human
uccagcagggaa

SEQ ID NO: 2627295 - RNA, 14 nt, Human
uccagcaguuuuca

SEQ ID NO: 2627296 - RNA, 23 nt, Human
uccagccaaagccuccuccagcc

SEQ ID NO: 2627297 - RNA, 22 nt, Human
uccagaagaauauucaggacuu

SEQ ID NO: 2627298 - RNA, 18 nt, Human
uccagaucugcagucacu

SEQ ID NO: 2627299 - RNA, 21 nt, Human
uccagaagggguuuggucugg

SEQ ID NO: 2627300 - RNA, 12 nt, Human
uccacuuggucu

SEQ ID NO: 2627301 - RNA, 13 nt, Human
uccacuuggucug

SEQ ID NO: 2627302 - RNA, 13 nt, Human
uccaccugccagg

SEQ ID NO: 2627303 - RNA, 16 nt, Human
uccaccuccuucucug

SEQ ID NO: 2627304 - RNA, 18 nt, Human
uccaccucuucacccccc

SEQ ID NO: 2627305 - RNA, 14 nt, Human
uccaccugagcugc

SEQ ID NO: 2627306 - RNA, 22 nt, Human
uccagaacucacuggggccuac

SEQ ID NO: 2627307 - RNA, 19 nt, Human
uccagaagaauauucagga

SEQ ID NO: 2627308 - RNA, 18 nt, Human
uccagaagaauauucagg

SEQ ID NO: 2627309 - RNA, 17 nt, Human
uccagaagaauauucag

SEQ ID NO: 2627310 - RNA, 16 nt, Human
uccagaagaauauuca

SEQ ID NO: 2627311 - RNA, 21 nt, Human
uccagaagaauauucaggacu

SEQ ID NO: 2627312 - RNA, 20 nt, Human
uccagaagaauauucaggac

SEQ ID NO: 2627313 - RNA, 16 nt, Human
uccagaagccucuggc

SEQ ID NO: 2627314 - RNA, 23 nt, Human
uccagaaaugucuaaaugcugaa

SEQ ID NO: 2627315 - RNA, 17 nt, Human
uccaccugagcugccau

SEQ ID NO: 2627316 - RNA, 15 nt, Human
ucauguaauccucaa

SEQ ID NO: 2627317 - RNA, 18 nt, Human
ucauuaggugugacugaa

SEQ ID NO: 2627318 - RNA, 21 nt, Human
ucauuaggugugacugaauuu

SEQ ID NO: 2627319 - RNA, 22 nt, Human
ucauuaggugugacugaauuuc

SEQ ID NO: 2627320 - RNA, 19 nt, Human
ucauguaagcugaaaauau

SEQ ID NO: 2627321 - RNA, 18 nt, Human
ucauguaagcugaaaaua

SEQ ID NO: 2627322 - RNA, 16 nt, Human
ucauuauuugcagaga

SEQ ID NO: 2627323 - RNA, 16 nt, Human
ucauuaggugugacug

SEQ ID NO: 2627324 - RNA, 17 nt, Human
ucauguaaauuuuguau

SEQ ID NO: 2627325 - RNA, 16 nt, Human
ucauguaaauuuugua

SEQ ID NO: 2627326 - RNA, 22 nt, Human
ucaugguguaauaagacauaac

SEQ ID NO: 2627327 - RNA, 13 nt, Human
ucauguaaacugu

SEQ ID NO: 2627328 - RNA, 14 nt, Human
ucauguaaacugug

SEQ ID NO: 2627329 - RNA, 17 nt, Human
ucauguaaacugugcac

SEQ ID NO: 2627330 - RNA, 16 nt, Human
ucauguaaacugugca

SEQ ID NO: 2627331 - RNA, 21 nt, Human
ucaugcccccuuucagauguc

SEQ ID NO: 2627332 - RNA, 18 nt, Human
ucaugcccccuuucagau

SEQ ID NO: 2627333 - RNA, 15 nt, Human
ucaugcccccuuuca

SEQ ID NO: 2627334 - RNA, 22 nt, Human
ucaugccccccucaaaccuccu

SEQ ID NO: 2627335 - RNA, 16 nt, Human
ucaugccccuggcugg

SEQ ID NO: 2627336 - RNA, 13 nt, Human
ucaugcccuccuc

SEQ ID NO: 2627337 - RNA, 14 nt, Human
ucaugcccuccucu

SEQ ID NO: 2627338 - RNA, 15 nt, Human
ucaugcccugugcaa

SEQ ID NO: 2627339 - RNA, 15 nt, Human
ucaugcccuccucuc

SEQ ID NO: 2627340 - RNA, 15 nt, Human
ucaugcuaucucugu

SEQ ID NO: 2627341 - RNA, 22 nt, Human
ucaugcuaauuauauaauauuu

SEQ ID NO: 2627342 - RNA, 21 nt, Human
ucaugguguaauaagacauaa

SEQ ID NO: 2627343 - RNA, 15 nt, Human
ucaugccuguaaucc

SEQ ID NO: 2627344 - RNA, 20 nt, Human
ucaugguguaauaagacaua

SEQ ID NO: 2627345 - RNA, 17 nt, Human
ucaugccuggcuucgca

SEQ ID NO: 2627346 - RNA, 15 nt, Human
ucaugccuggcuucg

SEQ ID NO: 2627347 - RNA, 13 nt, Human
ucaugccuggcuu

SEQ ID NO: 2627348 - RNA, 14 nt, Human
ucaugccuguaauc

SEQ ID NO: 2627349 - RNA, 18 nt, Human
ucaugccuggcuucgcaa

SEQ ID NO: 2627350 - RNA, 15 nt, Human
ucauacccaccccca

SEQ ID NO: 2627351 - RNA, 14 nt, Human
ucauacccaccccc

SEQ ID NO: 2627352 - RNA, 20 nt, Human
ucauacccacccccacccaa

SEQ ID NO: 2627353 - RNA, 19 nt, Human
ucauagggaagaccugcug

SEQ ID NO: 2627354 - RNA, 15 nt, Human
ucauaccaaugaaaa

SEQ ID NO: 2627355 - RNA, 14 nt, Human
ucauaguaacuucu

SEQ ID NO: 2627356 - RNA, 15 nt, Human
ucauaguaacuucuu

SEQ ID NO: 2627357 - RNA, 16 nt, Human
ucauaguaacuucuua

SEQ ID NO: 2627358 - RNA, 18 nt, Human
ucauaguaacuucuuaug

SEQ ID NO: 2627359 - RNA, 21 nt, Human
ucaucuccugccuuccuccug

SEQ ID NO: 2627360 - RNA, 22 nt, Human
ucaucuccugccuuccuccugg

SEQ ID NO: 2627361 - RNA, 21 nt, Human
ucauaguaacuucuuauggaa

SEQ ID NO: 2627362 - RNA, 20 nt, Human
ucauaguacucuuuguagca

SEQ ID NO: 2627363 - RNA, 20 nt, Human
ucauagguugccaauaauac

SEQ ID NO: 2627364 - RNA, 16 nt, Human
ucauagguugccaaua

SEQ ID NO: 2627365 - RNA, 22 nt, Human
ucauaccaggccgccccagccu

SEQ ID NO: 2627366 - RNA, 17 nt, Human
ucauagggucucuucag

SEQ ID NO: 2627367 - RNA, 18 nt, Human
ucauagggucucuucagg

SEQ ID NO: 2627368 - RNA, 20 nt, Human
ucauagggucucuucagguu

SEQ ID NO: 2627369 - RNA, 23 nt, Human
ucauaggucacuggcucuccaag

SEQ ID NO: 2627370 - RNA, 18 nt, Human
ucauaggucacuggcucu

SEQ ID NO: 2627371 - RNA, 16 nt, Human
ucauagguauuucaaa

SEQ ID NO: 2627372 - RNA, 21 nt, Human
ucauagggucucuucagguuc

SEQ ID NO: 2627373 - RNA, 19 nt, Human
ucaucugugugaaaauggg

SEQ ID NO: 2627374 - RNA, 13 nt, Human
ucaugccccccuc

SEQ ID NO: 2627375 - RNA, 23 nt, Human
ucaugcccacccccugcccugca

SEQ ID NO: 2627376 - RNA, 17 nt, Human
ucaucuguuuuucuuuu

SEQ ID NO: 2627377 - RNA, 18 nt, Human
ucaucugucccuccggga

SEQ ID NO: 2627378 - RNA, 12 nt, Human
ucaucugugcac

SEQ ID NO: 2627379 - RNA, 17 nt, Human
ucaucugugugaaaaug

SEQ ID NO: 2627380 - RNA, 14 nt, Human
ucaucugugugaaa

SEQ ID NO: 2627381 - RNA, 12 nt, Human
ucaucuguguga

SEQ ID NO: 2627382 - RNA, 20 nt, Human
ucaucugggggaguggaaua

SEQ ID NO: 2627383 - RNA, 19 nt, Human
ucaucugggggaguggaau

SEQ ID NO: 2627384 - RNA, 13 nt, Human
ucaucuguaacuc

SEQ ID NO: 2627385 - RNA, 18 nt, Human
ucaucugggggaguggaa

SEQ ID NO: 2627386 - RNA, 16 nt, Human
ucaucugggggagugg

SEQ ID NO: 2627387 - RNA, 12 nt, Human
ucaucugucccu

SEQ ID NO: 2627388 - RNA, 17 nt, Human
ucaucugucccuccggg

SEQ ID NO: 2627389 - RNA, 15 nt, Human
ucaucugucaagugg

SEQ ID NO: 2627390 - RNA, 21 nt, Human
ucaucucuuagcuccccucca

SEQ ID NO: 2627391 - RNA, 20 nt, Human
ucaucucuuagcuccccucc

SEQ ID NO: 2627392 - RNA, 19 nt, Human
ucaucucuuagcuccccuc

SEQ ID NO: 2627393 - RNA, 14 nt, Human
ucaucucuuagcuc

SEQ ID NO: 2627394 - RNA, 14 nt, Human
ucaucucuucuuuu

SEQ ID NO: 2627395 - RNA, 14 nt, Human
ucaucucuguccca

SEQ ID NO: 2627396 - RNA, 18 nt, Human
ucaucugggaaagacauc

SEQ ID NO: 2627397 - RNA, 23 nt, Human
ucaucucuccuccaagacacugu

SEQ ID NO: 2627398 - RNA, 15 nt, Human
ucaucucuccuccaa

SEQ ID NO: 2627399 - RNA, 11 nt, Human
ucaucucuccu

SEQ ID NO: 2627400 - RNA, 23 nt, Human
ucaucuccugccuuccuccuggg

SEQ ID NO: 2627401 - RNA, 18 nt, Human
ucaucuccugccuuccuc

SEQ ID NO: 2627402 - RNA, 14 nt, Human
ucaucucucugccc

SEQ ID NO: 2627403 - RNA, 16 nt, Human
ucaucucucugcccaa

SEQ ID NO: 2627404 - RNA, 13 nt, Human
ucaucucuuagcu

SEQ ID NO: 2627405 - RNA, 16 nt, Human
ucaucucucuuuaaua

SEQ ID NO: 2627406 - RNA, 12 nt, Human
ucauaauucuaa

SEQ ID NO: 2627407 - RNA, 19 nt, Human
ucauaaugugaaguguuaa

SEQ ID NO: 2627408 - RNA, 18 nt, Human
ucauaaugugaaguguua

SEQ ID NO: 2627409 - RNA, 17 nt, Human
ucauaaugugaaguguu

SEQ ID NO: 2627410 - RNA, 15 nt, Human
ucauaaugugaagug

SEQ ID NO: 2627411 - RNA, 14 nt, Human
ucauaaugugaagu

SEQ ID NO: 2627412 - RNA, 13 nt, Human
ucauaaugugaag

SEQ ID NO: 2627413 - RNA, 22 nt, Human
ucauacaaggcccaggaggcuu

SEQ ID NO: 2627414 - RNA, 12 nt, Human
ucauaaugugaa

SEQ ID NO: 2627415 - RNA, 17 nt, Human
ucaguuguuaguguguc

SEQ ID NO: 2627416 - RNA, 15 nt, Human
ucauaauuauuauuu

SEQ ID NO: 2627417 - RNA, 13 nt, Human
ucauacccacccc

SEQ ID NO: 2627418 - RNA, 14 nt, Human
ucauacacuuccuu

SEQ ID NO: 2627419 - RNA, 20 nt, Human
ucaguucagaaucacuucug

SEQ ID NO: 2627420 - RNA, 18 nt, Human
ucaguucccagaaucaaa

SEQ ID NO: 2627421 - RNA, 17 nt, Human
ucaguucccagaaucaa

SEQ ID NO: 2627422 - RNA, 16 nt, Human
ucaguucccagaauca

SEQ ID NO: 2627423 - RNA, 14 nt, Human
ucaguucccagaau

SEQ ID NO: 2627424 - RNA, 19 nt, Human
ucaguucucuugauuuuca

SEQ ID NO: 2627425 - RNA, 23 nt, Human
ucaguugagcuucauauaccagc

SEQ ID NO: 2627426 - RNA, 22 nt, Human
ucaguuagagcugacacaaacc

SEQ ID NO: 2627427 - RNA, 18 nt, Human
ucaguuagagcugacaca

SEQ ID NO: 2627428 - RNA, 19 nt, Human
ucaguuacucagcccuggg

SEQ ID NO: 2627429 - RNA, 15 nt, Human
ucaguuacucuucag

SEQ ID NO: 2627430 - RNA, 16 nt, Human
ucaguuacucugaagg

SEQ ID NO: 2627431 - RNA, 17 nt, Human
ucaguuacucugaaggg

SEQ ID NO: 2627432 - RNA, 13 nt, Human
ucauaaugacuua

SEQ ID NO: 2627433 - RNA, 21 nt, Human
ucaguuguagaauguauugua

SEQ ID NO: 2627434 - RNA, 18 nt, Human
ucaguuguagaauguauu

SEQ ID NO: 2627435 - RNA, 17 nt, Human
ucaguugcaauaauacu

SEQ ID NO: 2627436 - RNA, 14 nt, Human
ucaguuggcugacu

SEQ ID NO: 2627437 - RNA, 16 nt, Human
ucaguugcaauaauac

SEQ ID NO: 2627438 - RNA, 23 nt, Human
ucagugguuggcaauuguuucaa

SEQ ID NO: 2627439 - RNA, 15 nt, Human
ucaguguaauuucuu

SEQ ID NO: 2627440 - RNA, 14 nt, Human
ucaguguaauuucu

SEQ ID NO: 2627441 - RNA, 16 nt, Human
ucaguguaagcccugc

SEQ ID NO: 2627442 - RNA, 23 nt, Human
ucaguguaaauaguuacuccagu

SEQ ID NO: 2627443 - RNA, 21 nt, Human
ucagugguccacaucccggga

SEQ ID NO: 2627444 - RNA, 20 nt, Human
ucagugguuauuuagggaac

SEQ ID NO: 2627445 - RNA, 17 nt, Human
ucagugucaaauaaaca

SEQ ID NO: 2627446 - RNA, 15 nt, Human
ucagugucaaauaaa

SEQ ID NO: 2627447 - RNA, 14 nt, Human
ucagugucaaauaa

SEQ ID NO: 2627448 - RNA, 16 nt, Human
ucaguguauuuguauu

SEQ ID NO: 2627449 - RNA, 19 nt, Human
ucaguguaauuucuuugcc

SEQ ID NO: 2627450 - RNA, 18 nt, Human
ucaguguaauuucuuugc

SEQ ID NO: 2627451 - RNA, 15 nt, Human
ucaguguauuuguau

SEQ ID NO: 2627452 - RNA, 11 nt, Human
ucaguguacau

SEQ ID NO: 2627453 - RNA, 13 nt, Human
ucagugugacuga

SEQ ID NO: 2627454 - RNA, 19 nt, Human
ucaguguccucuugcucaa

SEQ ID NO: 2627455 - RNA, 17 nt, Human
ucagugucccgggcccg

SEQ ID NO: 2627456 - RNA, 13 nt, Human
ucagugucccggg

SEQ ID NO: 2627457 - RNA, 16 nt, Human
ucaguguccaaagcag

SEQ ID NO: 2627458 - RNA, 21 nt, Human
ucagugucaaauaaacacugu

SEQ ID NO: 2627459 - RNA, 19 nt, Human
ucagugucaaauaaacacu

SEQ ID NO: 2627460 - RNA, 22 nt, Human
ucagugucaaauaaacacugug

SEQ ID NO: 2627461 - RNA, 20 nt, Human
ucagugucauuuaugaaaag

SEQ ID NO: 2627462 - RNA, 17 nt, Human
ucagugugacugaucuc

SEQ ID NO: 2627463 - RNA, 21 nt, Human
ucagugucucacacuggcgua

SEQ ID NO: 2627464 - RNA, 15 nt, Human
ucagugucucacacu

SEQ ID NO: 2627465 - RNA, 14 nt, Human
ucagugucucacac

SEQ ID NO: 2627466 - RNA, 13 nt, Human
ucagugucucaca

SEQ ID NO: 2627467 - RNA, 15 nt, Human
ucaguuacucagccc

SEQ ID NO: 2627468 - RNA, 16 nt, Human
ucaguuacucagcccu

SEQ ID NO: 2627469 - RNA, 17 nt, Human
ucaguuacucagcccug

SEQ ID NO: 2627470 - RNA, 18 nt, Human
ucaguuacucagcccugg

SEQ ID NO: 2627471 - RNA, 15 nt, Human
ucagucuggcccuuc

SEQ ID NO: 2627472 - RNA, 23 nt, Human
ucagcagcgaccaccccugccuc

SEQ ID NO: 2627473 - RNA, 14 nt, Human
ucagcaggaagcaa

SEQ ID NO: 2627474 - RNA, 19 nt, Human
ucagucuggugggaggacg

SEQ ID NO: 2627475 - RNA, 20 nt, Human
ucaguggggcccauggaugu

SEQ ID NO: 2627476 - RNA, 17 nt, Human
ucagucuggugggagga

SEQ ID NO: 2627477 - RNA, 16 nt, Human
ucagucuggugggagg

SEQ ID NO: 2627478 - RNA, 13 nt, Human
ucagucugguggg

SEQ ID NO: 2627479 - RNA, 24 nt, Human
ucagucugauucccaagcucugcu

SEQ ID NO: 2627480 - RNA, 22 nt, Human
ucagcagcgaccaccccugccu

SEQ ID NO: 2627481 - RNA, 20 nt, Human
ucagcagcgaccaccccugc

SEQ ID NO: 2627482 - RNA, 17 nt, Human
ucagcagccucccugaa

SEQ ID NO: 2627483 - RNA, 16 nt, Human
ucagcagcccuccuca

SEQ ID NO: 2627484 - RNA, 17 nt, Human
ucagcagcccuccucac

SEQ ID NO: 2627485 - RNA, 18 nt, Human
ucagcagcccuccucacc

SEQ ID NO: 2627486 - RNA, 12 nt, Human
ucagcagcccuc

SEQ ID NO: 2627487 - RNA, 14 nt, Human
ucagcagcccuccu

SEQ ID NO: 2627488 - RNA, 15 nt, Human
ucagcagcccuccuc

SEQ ID NO: 2627489 - RNA, 18 nt, Human
ucucuuuuugcuuucgaa

SEQ ID NO: 2627490 - RNA, 13 nt, Human
ucucuuuuuggag

SEQ ID NO: 2627491 - RNA, 21 nt, Human
ucucuuuuugacucuugcaau

SEQ ID NO: 2627492 - RNA, 14 nt, Human
ucucuuuuugacuc

SEQ ID NO: 2627493 - RNA, 13 nt, Human
ucucuuuuucagu

SEQ ID NO: 2627494 - RNA, 16 nt, Human
ucugaaaauguaugug

SEQ ID NO: 2627495 - RNA, 12 nt, Human
ucucuuuucucu

SEQ ID NO: 2627496 - RNA, 13 nt, Human
ucucuuuucuuua

SEQ ID NO: 2627497 - RNA, 16 nt, Human
ucucuuuucucuuucu

SEQ ID NO: 2627498 - RNA, 17 nt, Human
ucucuuuugaaacaaua

SEQ ID NO: 2627499 - RNA, 20 nt, Human
ucucuuuucuuuagagcauu

SEQ ID NO: 2627500 - RNA, 19 nt, Human
ucucuuuucuuuagagcau

SEQ ID NO: 2627501 - RNA, 18 nt, Human
ucucuuuucuuuagagca

SEQ ID NO: 2627502 - RNA, 20 nt, Human
ucucuuuugaaacaauacuc

SEQ ID NO: 2627503 - RNA, 20 nt, Human
ucucuuuugaauccaugcuu

SEQ ID NO: 2627504 - RNA, 22 nt, Human
ucucuuuugaauccaugcuugg

SEQ ID NO: 2627505 - RNA, 23 nt, Human
ucucuuuugaauccaugcuuggg

SEQ ID NO: 2627506 - RNA, 19 nt, Human
ucucuuuguucucagcucc

SEQ ID NO: 2627507 - RNA, 17 nt, Human
ucucuuuguucucagcu

SEQ ID NO: 2627508 - RNA, 14 nt, Human
ucucuuuguucuca

SEQ ID NO: 2627509 - RNA, 13 nt, Human
ucucuuuguucuc

SEQ ID NO: 2627510 - RNA, 23 nt, Human
ucucuuuguucucagcucccccu

SEQ ID NO: 2627511 - RNA, 21 nt, Human
ucucuuuguucucagcucccc

SEQ ID NO: 2627512 - RNA, 16 nt, Human
ucucuuuucaaaacau

SEQ ID NO: 2627513 - RNA, 15 nt, Human
ucucuuuucaaaaca

SEQ ID NO: 2627514 - RNA, 16 nt, Human
ucucuuugggaauguu

SEQ ID NO: 2627515 - RNA, 17 nt, Human
ucucuuuguucuaaaga

SEQ ID NO: 2627516 - RNA, 14 nt, Human
ucugaaaugugaua

SEQ ID NO: 2627517 - RNA, 15 nt, Human
ucugaaaucugaaga

SEQ ID NO: 2627518 - RNA, 13 nt, Human
ucugaaaugaaga

SEQ ID NO: 2627519 - RNA, 16 nt, Human
ucugaaaucugaagac

SEQ ID NO: 2627520 - RNA, 12 nt, Human
ucugaaaucuga

SEQ ID NO: 2627521 - RNA, 12 nt, Human
ucugaacucaaa

SEQ ID NO: 2627522 - RNA, 14 nt, Human
ucugaacucaaacu

SEQ ID NO: 2627523 - RNA, 16 nt, Human
ucugaacucaaacuga

SEQ ID NO: 2627524 - RNA, 17 nt, Human
ucugaacucaaacugag

SEQ ID NO: 2627525 - RNA, 21 nt, Human
ucugaacucaaacugaggaau

SEQ ID NO: 2627526 - RNA, 21 nt, Human
ucugaaaugugauaaguucuu

SEQ ID NO: 2627527 - RNA, 13 nt, Human
ucugaaagggacg

SEQ ID NO: 2627528 - RNA, 14 nt, Human
ucugaaagccacgu

SEQ ID NO: 2627529 - RNA, 12 nt, Human
ucugaaagccac

SEQ ID NO: 2627530 - RNA, 19 nt, Human
ucugaaaauuaacacugcu

SEQ ID NO: 2627531 - RNA, 18 nt, Human
ucugaaaauuaacacugc

SEQ ID NO: 2627532 - RNA, 23 nt, Human
ucugaaaauguauguguaaguau

SEQ ID NO: 2627533 - RNA, 14 nt, Human
ucugaaaauguaug

SEQ ID NO: 2627534 - RNA, 13 nt, Human
ucugaaaauguga

SEQ ID NO: 2627535 - RNA, 17 nt, Human
ucugaaaauuaacacug

SEQ ID NO: 2627536 - RNA, 17 nt, Human
ucucuuccccucucaga

SEQ ID NO: 2627537 - RNA, 15 nt, Human
ucucuuccccucuca

SEQ ID NO: 2627538 - RNA, 14 nt, Human
ucucuuccccucuc

SEQ ID NO: 2627539 - RNA, 13 nt, Human
ucucuuccccucu

SEQ ID NO: 2627540 - RNA, 21 nt, Human
ucucuuccauaugaccucaug

SEQ ID NO: 2627541 - RNA, 17 nt, Human
ucucuuccauaugaccu

SEQ ID NO: 2627542 - RNA, 14 nt, Human
ucucuucauacuuu

SEQ ID NO: 2627543 - RNA, 23 nt, Human
ucucuucagguucuuagugucac

SEQ ID NO: 2627544 - RNA, 18 nt, Human
ucucuucacagucacauu

SEQ ID NO: 2627545 - RNA, 15 nt, Human
ucucuucagguucuu

SEQ ID NO: 2627546 - RNA, 16 nt, Human
ucucuucagguucuua

SEQ ID NO: 2627547 - RNA, 13 nt, Human
ucucuucagguuc

SEQ ID NO: 2627548 - RNA, 14 nt, Human
ucucuucagguucu

SEQ ID NO: 2627549 - RNA, 11 nt, Human
ucucugcaggu

SEQ ID NO: 2627550 - RNA, 20 nt, Human
ucucugcagccagcccagcc

SEQ ID NO: 2627551 - RNA, 11 nt, Human
ucucugcagcc

SEQ ID NO: 2627552 - RNA, 15 nt, Human
ucucugcagccagcc

SEQ ID NO: 2627553 - RNA, 16 nt, Human
ucucugcagccagccc

SEQ ID NO: 2627554 - RNA, 17 nt, Human
ucucugcagccagccca

SEQ ID NO: 2627555 - RNA, 18 nt, Human
ucucugcagccagcccag

SEQ ID NO: 2627556 - RNA, 19 nt, Human
ucucugcagccagcccagc

SEQ ID NO: 2627557 - RNA, 19 nt, Human
ucucugcaaucuucucaga

SEQ ID NO: 2627558 - RNA, 11 nt, Human
ucucugcaccc

SEQ ID NO: 2627559 - RNA, 18 nt, Human
ucucugcaccguacugug

SEQ ID NO: 2627560 - RNA, 20 nt, Human
ucucuuccuuuuaucaguag

SEQ ID NO: 2627561 - RNA, 11 nt, Human
ucucuucucca

SEQ ID NO: 2627562 - RNA, 11 nt, Human
ucucuuccugu

SEQ ID NO: 2627563 - RNA, 11 nt, Human
ucucuuccuac

SEQ ID NO: 2627564 - RNA, 19 nt, Human
ucucuuccuccgaggccag

SEQ ID NO: 2627565 - RNA, 16 nt, Human
ucucuucuccacugga

SEQ ID NO: 2627566 - RNA, 15 nt, Human
ucucuucuccacugg

SEQ ID NO: 2627567 - RNA, 14 nt, Human
ucucuucuccacug

SEQ ID NO: 2627568 - RNA, 13 nt, Human
ucucuucuccacu

SEQ ID NO: 2627569 - RNA, 12 nt, Human
ucucuuccugua

SEQ ID NO: 2627570 - RNA, 20 nt, Human
ucucuuugaauuuucugugu

SEQ ID NO: 2627571 - RNA, 13 nt, Human
ucucuucucuguu

SEQ ID NO: 2627572 - RNA, 18 nt, Human
ucugacccaugcugcccu

SEQ ID NO: 2627573 - RNA, 17 nt, Human
ucugacccaugcugccc

SEQ ID NO: 2627574 - RNA, 16 nt, Human
ucugacccaugcugcc

SEQ ID NO: 2627575 - RNA, 15 nt, Human
ucugacccaugcugc

SEQ ID NO: 2627576 - RNA, 20 nt, Human
ucugagcauuagauuucuca

SEQ ID NO: 2627577 - RNA, 15 nt, Human
ucugagcacacuuua

SEQ ID NO: 2627578 - RNA, 16 nt, Human
ucugagcaagagcugg

SEQ ID NO: 2627579 - RNA, 15 nt, Human
ucugagcaagagcug

SEQ ID NO: 2627580 - RNA, 17 nt, Human
ucugagcaagagcuggc

SEQ ID NO: 2627581 - RNA, 19 nt, Human
ucugacccagugcccccac

SEQ ID NO: 2627582 - RNA, 22 nt, Human
ucugacccagugcccccacuga

SEQ ID NO: 2627583 - RNA, 21 nt, Human
ucugacccagugagauuacag

SEQ ID NO: 2627584 - RNA, 23 nt, Human
ucugacccagugcccccacugac

SEQ ID NO: 2627585 - RNA, 20 nt, Human
ucugagauuauuuuaaucua

SEQ ID NO: 2627586 - RNA, 15 nt, Human
ucugacccagugaga

SEQ ID NO: 2627587 - RNA, 14 nt, Human
ucugacccagugag

SEQ ID NO: 2627588 - RNA, 13 nt, Human
ucugacccagugc

SEQ ID NO: 2627589 - RNA, 14 nt, Human
ucugacccagugcc

SEQ ID NO: 2627590 - RNA, 15 nt, Human
ucugacccagugccc

SEQ ID NO: 2627591 - RNA, 14 nt, Human
ucugacccaugcug

SEQ ID NO: 2627592 - RNA, 16 nt, Human
ucugaccagcagcgcc

SEQ ID NO: 2627593 - RNA, 11 nt, Human
ucugacccagu

SEQ ID NO: 2627594 - RNA, 13 nt, Human
ucugaccagcagc

SEQ ID NO: 2627595 - RNA, 22 nt, Human
ucugaccacacuuccuguccag

SEQ ID NO: 2627596 - RNA, 22 nt, Human
ucugacauucucaggaagcccc

SEQ ID NO: 2627597 - RNA, 21 nt, Human
ucugacauucucaggaagccc

SEQ ID NO: 2627598 - RNA, 12 nt, Human
ucugaccacacu

SEQ ID NO: 2627599 - RNA, 13 nt, Human
ucugaccacgugc

SEQ ID NO: 2627600 - RNA, 13 nt, Human
ucugaccacacuu

SEQ ID NO: 2627601 - RNA, 18 nt, Human
ucugaccacacuuccugu

SEQ ID NO: 2627602 - RNA, 16 nt, Human
ucugacaucucugcaa

SEQ ID NO: 2627603 - RNA, 18 nt, Human
ucugacaugauuccuucc

SEQ ID NO: 2627604 - RNA, 19 nt, Human
ucugacaugauuccuuccu

SEQ ID NO: 2627605 - RNA, 22 nt, Human
ucugacaugauuccuuccuguu

SEQ ID NO: 2627606 - RNA, 15 nt, Human
ucugacauuaacagu

SEQ ID NO: 2627607 - RNA, 16 nt, Human
ucugacauuaacaguu

SEQ ID NO: 2627608 - RNA, 13 nt, Human
ucugacauucuca

SEQ ID NO: 2627609 - RNA, 23 nt, Human
ucugacauuaacaguuuuccaug

SEQ ID NO: 2627610 - RNA, 18 nt, Human
ucugacauuaacaguuuu

SEQ ID NO: 2627611 - RNA, 19 nt, Human
ucugacauuaacaguuuuc

SEQ ID NO: 2627612 - RNA, 21 nt, Human
ucugacauuaacaguuuucca

SEQ ID NO: 2627613 - RNA, 22 nt, Human
ucugacauuaacaguuuuccau

SEQ ID NO: 2627614 - RNA, 20 nt, Human
ucugaacuuggcgcugcccc

SEQ ID NO: 2627615 - RNA, 21 nt, Human
ucugaacuuggcgcugccccu

SEQ ID NO: 2627616 - RNA, 22 nt, Human
ucugcaauuccccucugcugcu

SEQ ID NO: 2627617 - RNA, 21 nt, Human
ucugcaauuccccucugcugc

SEQ ID NO: 2627618 - RNA, 20 nt, Human
ucugcacaugucuuguacau

SEQ ID NO: 2627619 - RNA, 19 nt, Human
ucugcacaagcugcacccu

SEQ ID NO: 2627620 - RNA, 20 nt, Human
ucugcaauuccccucugcug

SEQ ID NO: 2627621 - RNA, 18 nt, Human
ucugcaauuccccucugc

SEQ ID NO: 2627622 - RNA, 16 nt, Human
ucugcaauuccccucu

SEQ ID NO: 2627623 - RNA, 14 nt, Human
ucugcacaagcugc

SEQ ID NO: 2627624 - RNA, 23 nt, Human
ucugauuguaacguugcuguggg

SEQ ID NO: 2627625 - RNA, 22 nt, Human
ucugauuguaacguugcugugg

SEQ ID NO: 2627626 - RNA, 21 nt, Human
ucugauuguaacguugcugug

SEQ ID NO: 2627627 - RNA, 20 nt, Human
ucugauuguaacguugcugu

SEQ ID NO: 2627628 - RNA, 18 nt, Human
ucugauuggcucacccaa

SEQ ID NO: 2627629 - RNA, 17 nt, Human
ucugauuggcucaccca

SEQ ID NO: 2627630 - RNA, 13 nt, Human
ucugauuggcuca

SEQ ID NO: 2627631 - RNA, 23 nt, Human
ucugauuggacauuuucuucaga

SEQ ID NO: 2627632 - RNA, 21 nt, Human
ucugauuggacauuuucuuca

SEQ ID NO: 2627633 - RNA, 20 nt, Human
ucugauuggacauuuucuuc

SEQ ID NO: 2627634 - RNA, 19 nt, Human
ucugauuggacauuuucuu

SEQ ID NO: 2627635 - RNA, 16 nt, Human
ucugauuggacauuuu

SEQ ID NO: 2627636 - RNA, 15 nt, Human
ucugauuggacauuu

SEQ ID NO: 2627637 - RNA, 15 nt, Human
ucugacaucucugca

SEQ ID NO: 2627638 - RNA, 23 nt, Human
ucugauucccaagcucugcuccu

SEQ ID NO: 2627639 - RNA, 23 nt, Human
ucugaggacacuaaccacgcugg

SEQ ID NO: 2627640 - RNA, 20 nt, Human
ucugaggacacuaaccacgc

SEQ ID NO: 2627641 - RNA, 17 nt, Human
ucugaggaauccagacc

SEQ ID NO: 2627642 - RNA, 16 nt, Human
ucugaggaauccagac

SEQ ID NO: 2627643 - RNA, 22 nt, Human
ucugagcauuagauuucucauu

SEQ ID NO: 2627644 - RNA, 19 nt, Human
ucugagcagugaaugauuc

SEQ ID NO: 2627645 - RNA, 17 nt, Human
ucugagcugcucugaau

SEQ ID NO: 2627646 - RNA, 15 nt, Human
ucugagcugcucuga

SEQ ID NO: 2627647 - RNA, 18 nt, Human
ucugagcucugcauuugu

SEQ ID NO: 2627648 - RNA, 19 nt, Human
ucucuaggaaauauuuauu

SEQ ID NO: 2627649 - RNA, 13 nt, Human
ucucuaggaaaua

SEQ ID NO: 2627650 - RNA, 18 nt, Human
ucucuaguuugauuaaau

SEQ ID NO: 2627651 - RNA, 19 nt, Human
ucucuaguuugauuaaauu

SEQ ID NO: 2627652 - RNA, 17 nt, Human
ucucuaucauuuaauaa

SEQ ID NO: 2627653 - RNA, 16 nt, Human
ucucuaucauuuaaua

SEQ ID NO: 2627654 - RNA, 15 nt, Human
ucucuaucauuuaau

SEQ ID NO: 2627655 - RNA, 14 nt, Human
ucucuaucauuuaa

SEQ ID NO: 2627656 - RNA, 17 nt, Human
ucucuaucauuaaaguu

SEQ ID NO: 2627657 - RNA, 16 nt, Human
ucucuaucauuaaagu

SEQ ID NO: 2627658 - RNA, 15 nt, Human
ucucuaucauuaaag

SEQ ID NO: 2627659 - RNA, 14 nt, Human
ucucuaucauuaaa

SEQ ID NO: 2627660 - RNA, 13 nt, Human
ucucuaucauuua

SEQ ID NO: 2627661 - RNA, 12 nt, Human
ucucuaucauuu

SEQ ID NO: 2627662 - RNA, 13 nt, Human
ucucuaucauuaa

SEQ ID NO: 2627663 - RNA, 22 nt, Human
ucucuauagcaccagggcucac

SEQ ID NO: 2627664 - RNA, 16 nt, Human
ucucuauagcaccagg

SEQ ID NO: 2627665 - RNA, 24 nt, Human
ucucuagcuggugguuucacggug

SEQ ID NO: 2627666 - RNA, 23 nt, Human
ucucuagcuggugguuucacggu

SEQ ID NO: 2627667 - RNA, 12 nt, Human
ucucuagccacu

SEQ ID NO: 2627668 - RNA, 22 nt, Human
ucucuagaauuuuaagugcuuu

SEQ ID NO: 2627669 - RNA, 13 nt, Human
ucuccuguaccuc

SEQ ID NO: 2627670 - RNA, 20 nt, Human
ucucuacagacuucuccaga

SEQ ID NO: 2627671 - RNA, 15 nt, Human
ucucuacaaaaagca

SEQ ID NO: 2627672 - RNA, 19 nt, Human
ucucuacuccuaccucagc

SEQ ID NO: 2627673 - RNA, 20 nt, Human
ucucuacuccuaccucagcc

SEQ ID NO: 2627674 - RNA, 21 nt, Human
ucucuacuccuaccucagccu

SEQ ID NO: 2627675 - RNA, 13 nt, Human
ucucuagaauuuu

SEQ ID NO: 2627676 - RNA, 17 nt, Human
ucucuagaauuuuaagu

SEQ ID NO: 2627677 - RNA, 17 nt, Human
ucucuauuuaauauuua

SEQ ID NO: 2627678 - RNA, 14 nt, Human
ucucuccuuugcug

SEQ ID NO: 2627679 - RNA, 20 nt, Human
ucucucggcuccccaugugu

SEQ ID NO: 2627680 - RNA, 15 nt, Human
ucucucggcucccca

SEQ ID NO: 2627681 - RNA, 23 nt, Human
ucucucggcuccccauguguccu

SEQ ID NO: 2627682 - RNA, 15 nt, Human
ucucucgguuccacg

SEQ ID NO: 2627683 - RNA, 23 nt, Human
ucucucggaguaucugggaacug

SEQ ID NO: 2627684 - RNA, 18 nt, Human
ucucuaucauuaaaguuc

SEQ ID NO: 2627685 - RNA, 22 nt, Human
ucucuaucauuuaauaauauac

SEQ ID NO: 2627686 - RNA, 20 nt, Human
ucucuaucauuuaauaauau

SEQ ID NO: 2627687 - RNA, 15 nt, Human
ucucuauuuaauauu

SEQ ID NO: 2627688 - RNA, 14 nt, Human
ucucuauuuaauau

SEQ ID NO: 2627689 - RNA, 17 nt, Human
ucucucucaauuuuugg

SEQ ID NO: 2627690 - RNA, 11 nt, Human
ucucucucacc

SEQ ID NO: 2627691 - RNA, 22 nt, Human
ucucucuacuccuaccucagcc

SEQ ID NO: 2627692 - RNA, 21 nt, Human
ucucucugugcuguggaagca

SEQ ID NO: 2627693 - RNA, 17 nt, Human
ucucucugugcugugga

SEQ ID NO: 2627694 - RNA, 20 nt, Human
ucucucuggggccacacaga

SEQ ID NO: 2627695 - RNA, 11 nt, Human
ucucucugugg

SEQ ID NO: 2627696 - RNA, 15 nt, Human
ucucucgugaguaua

SEQ ID NO: 2627697 - RNA, 23 nt, Human
ucucucgguuccacgucccccug

SEQ ID NO: 2627698 - RNA, 18 nt, Human
ucucucgguuccacgucc

SEQ ID NO: 2627699 - RNA, 20 nt, Human
ucucucguaacugguuucau

SEQ ID NO: 2627700 - RNA, 19 nt, Human
ucucucuacuccuaccuca

SEQ ID NO: 2627701 - RNA, 20 nt, Human
ucucucuacuccuaccucag

SEQ ID NO: 2627702 - RNA, 11 nt, Human
ucucucuuucc

SEQ ID NO: 2627703 - RNA, 14 nt, Human
ucucucuucugccu

SEQ ID NO: 2627704 - RNA, 16 nt, Human
ucucugacuucugccu

SEQ ID NO: 2627705 - RNA, 14 nt, Human
ucucugacuucugc

SEQ ID NO: 2627706 - RNA, 13 nt, Human
ucucugacuucug

SEQ ID NO: 2627707 - RNA, 11 nt, Human
ucucucuucug

SEQ ID NO: 2627708 - RNA, 14 nt, Human
ucucucuucugcuc

SEQ ID NO: 2627709 - RNA, 16 nt, Human
ucucucuucugcucca

SEQ ID NO: 2627710 - RNA, 17 nt, Human
ucucucuucugcuccac

SEQ ID NO: 2627711 - RNA, 19 nt, Human
ucucucuucugcuccaccc

SEQ ID NO: 2627712 - RNA, 20 nt, Human
ucucucuucugcuccacccu

SEQ ID NO: 2627713 - RNA, 19 nt, Human
ucucugauuuucaaagcuu

SEQ ID NO: 2627714 - RNA, 20 nt, Human
ucucugauuuucaaagcuuu

SEQ ID NO: 2627715 - RNA, 13 nt, Human
ucucugaggacac

SEQ ID NO: 2627716 - RNA, 18 nt, Human
ucucugacuucugccugg

SEQ ID NO: 2627717 - RNA, 17 nt, Human
ucucugacuucugccug

SEQ ID NO: 2627718 - RNA, 19 nt, Human
ucucugacuucugccugga

SEQ ID NO: 2627719 - RNA, 14 nt, Human
ucucugagcaguga

SEQ ID NO: 2627720 - RNA, 15 nt, Human
ucucugagcugugca

SEQ ID NO: 2627721 - RNA, 16 nt, Human
ucucugagcucugcau

SEQ ID NO: 2627722 - RNA, 16 nt, Human
ucucugagcugugcag

SEQ ID NO: 2627723 - RNA, 20 nt, Human
ucucccccagccccauccuc

SEQ ID NO: 2627724 - RNA, 18 nt, Human
ucucccccagccccaucc

SEQ ID NO: 2627725 - RNA, 13 nt, Human
ucucccccagccc

SEQ ID NO: 2627726 - RNA, 13 nt, Human
ucucccccccggg

SEQ ID NO: 2627727 - RNA, 16 nt, Human
ucuccccccccccucc

SEQ ID NO: 2627728 - RNA, 22 nt, Human
ucucccccagccccauccucug

SEQ ID NO: 2627729 - RNA, 16 nt, Human
ucucccgcugcugcug

SEQ ID NO: 2627730 - RNA, 15 nt, Human
ucucccgcugcugcu

SEQ ID NO: 2627731 - RNA, 20 nt, Human
ucucccggagguuggguggg

SEQ ID NO: 2627732 - RNA, 14 nt, Human
ucucccgcugcugc

SEQ ID NO: 2627733 - RNA, 13 nt, Human
ucucccgcugcug

SEQ ID NO: 2627734 - RNA, 16 nt, Human
ucuccccugcccccag

SEQ ID NO: 2627735 - RNA, 14 nt, Human
ucuccccugcccug

SEQ ID NO: 2627736 - RNA, 15 nt, Human
ucuccccugcccugc

SEQ ID NO: 2627737 - RNA, 17 nt, Human
ucuccccugcccugcug

SEQ ID NO: 2627738 - RNA, 23 nt, Human
ucuccccugcccccaggacuggg

SEQ ID NO: 2627739 - RNA, 22 nt, Human
ucuccccugcccccaggacugg

SEQ ID NO: 2627740 - RNA, 21 nt, Human
ucuccccugcccccaggacug

SEQ ID NO: 2627741 - RNA, 20 nt, Human
ucuccccugcccccaggacu

SEQ ID NO: 2627742 - RNA, 21 nt, Human
ucucccccccggggcuggguu

SEQ ID NO: 2627743 - RNA, 20 nt, Human
ucucccccccggggcugggu

SEQ ID NO: 2627744 - RNA, 12 nt, Human
ucucccccuggg

SEQ ID NO: 2627745 - RNA, 13 nt, Human
ucucccccugggc

SEQ ID NO: 2627746 - RNA, 14 nt, Human
ucucccccugggcu

SEQ ID NO: 2627747 - RNA, 17 nt, Human
ucucccccagccccauc

SEQ ID NO: 2627748 - RNA, 15 nt, Human
ucucccccagcccca

SEQ ID NO: 2627749 - RNA, 21 nt, Human
ucucaguuccgauuucccagg

SEQ ID NO: 2627750 - RNA, 20 nt, Human
ucucaguggcuucaucuguc

SEQ ID NO: 2627751 - RNA, 22 nt, Human
ucucaguguugagccuuuuccc

SEQ ID NO: 2627752 - RNA, 18 nt, Human
ucucaguguugagccuuu

SEQ ID NO: 2627753 - RNA, 14 nt, Human
ucucccccagcccc

SEQ ID NO: 2627754 - RNA, 21 nt, Human
ucucagugucaaugcagcccc

SEQ ID NO: 2627755 - RNA, 22 nt, Human
ucucagugguuaagauuccuaa

SEQ ID NO: 2627756 - RNA, 17 nt, Human
ucucaguacuuuggagg

SEQ ID NO: 2627757 - RNA, 16 nt, Human
ucucagucaugcauaa

SEQ ID NO: 2627758 - RNA, 14 nt, Human
ucucagucaugcau

SEQ ID NO: 2627759 - RNA, 15 nt, Human
ucucagucaguaauu

SEQ ID NO: 2627760 - RNA, 15 nt, Human
ucucaggucccugca

SEQ ID NO: 2627761 - RNA, 19 nt, Human
ucucagggucucugcugcc

SEQ ID NO: 2627762 - RNA, 12 nt, Human
ucucagguucuc

SEQ ID NO: 2627763 - RNA, 22 nt, Human
ucuccugccucagccucccaaa

SEQ ID NO: 2627764 - RNA, 17 nt, Human
ucuccugacccaguccc

SEQ ID NO: 2627765 - RNA, 11 nt, Human
ucuccugccua

SEQ ID NO: 2627766 - RNA, 12 nt, Human
ucuccugccuac

SEQ ID NO: 2627767 - RNA, 14 nt, Human
ucuccugccuacuc

SEQ ID NO: 2627768 - RNA, 15 nt, Human
ucuccugccuacuca

SEQ ID NO: 2627769 - RNA, 16 nt, Human
ucuccugccuuccucc

SEQ ID NO: 2627770 - RNA, 17 nt, Human
ucuccugccuuccuccu

SEQ ID NO: 2627771 - RNA, 18 nt, Human
ucuccugccuuccuccug

SEQ ID NO: 2627772 - RNA, 20 nt, Human
ucuccugccuuccuccuggg

SEQ ID NO: 2627773 - RNA, 19 nt, Human
ucuccugccucagccuccc

SEQ ID NO: 2627774 - RNA, 22 nt, Human
ucuccugccuguagcagugaga

SEQ ID NO: 2627775 - RNA, 20 nt, Human
ucuccugccuguagcaguga

SEQ ID NO: 2627776 - RNA, 13 nt, Human
ucuccugccugua

SEQ ID NO: 2627777 - RNA, 17 nt, Human
ucuccugccuacucacg

SEQ ID NO: 2627778 - RNA, 22 nt, Human
ucucccgucagggcccaagucc

SEQ ID NO: 2627779 - RNA, 20 nt, Human
ucucccgucagggcccaagu

SEQ ID NO: 2627780 - RNA, 13 nt, Human
ucucccgucaggg

SEQ ID NO: 2627781 - RNA, 16 nt, Human
ucucccgguucuucca

SEQ ID NO: 2627782 - RNA, 15 nt, Human
ucucccgguucuucc

SEQ ID NO: 2627783 - RNA, 17 nt, Human
ucucccucucacugucu

SEQ ID NO: 2627784 - RNA, 12 nt, Human
ucucccucucac

SEQ ID NO: 2627785 - RNA, 23 nt, Human
ucucccucucacugucugagagu

SEQ ID NO: 2627786 - RNA, 14 nt, Human
ucucccucuccugc

SEQ ID NO: 2627787 - RNA, 15 nt, Human
ucucccucuccugcc

SEQ ID NO: 2627788 - RNA, 16 nt, Human
ucucccucuccugccu

SEQ ID NO: 2627789 - RNA, 17 nt, Human
ucucccucuccugccua

SEQ ID NO: 2627790 - RNA, 18 nt, Human
ucucccucuccugccuac

SEQ ID NO: 2627791 - RNA, 16 nt, Human
ucucccucuggaucaa

SEQ ID NO: 2627792 - RNA, 21 nt, Human
ucucccucuccugccuacuca

SEQ ID NO: 2627793 - RNA, 12 nt, Human
ucucccucuggc

SEQ ID NO: 2627794 - RNA, 14 nt, Human
ucucccucuggccc

SEQ ID NO: 2627795 - RNA, 15 nt, Human
ucucccucuggcccu

SEQ ID NO: 2627796 - RNA, 16 nt, Human
ucucccucuggcccug

SEQ ID NO: 2627797 - RNA, 17 nt, Human
ucucccucuggcccugc

SEQ ID NO: 2627798 - RNA, 18 nt, Human
ucucccucuggcccugcc

SEQ ID NO: 2627799 - RNA, 20 nt, Human
ucucccucuggcccugccuu

SEQ ID NO: 2627800 - RNA, 16 nt, Human
ucuccucuuuuaucuu

SEQ ID NO: 2627801 - RNA, 21 nt, Human
ucuccucuuguaaauaaagcc

SEQ ID NO: 2627802 - RNA, 23 nt, Human
ucuccucuuguaaauaaagcccu

SEQ ID NO: 2627803 - RNA, 16 nt, Human
ucuccugacccagucc

SEQ ID NO: 2627804 - RNA, 22 nt, Human
ucucccucuucucaagugccuu

SEQ ID NO: 2627805 - RNA, 21 nt, Human
ucucccucuucucaagugccu

SEQ ID NO: 2627806 - RNA, 15 nt, Human
ucucccucuucucaa

SEQ ID NO: 2627807 - RNA, 19 nt, Human
ucucccucuggcccugccu

SEQ ID NO: 2627808 - RNA, 15 nt, Human
ucucccugacccugu

SEQ ID NO: 2627809 - RNA, 22 nt, Human
ucuccucuugccacugccucuu

SEQ ID NO: 2627810 - RNA, 13 nt, Human
ucuccucuuguaa

SEQ ID NO: 2627811 - RNA, 15 nt, Human
ucuccucuuguaaau

SEQ ID NO: 2627812 - RNA, 14 nt, Human
ucuccucuuguaaa

SEQ ID NO: 2627813 - RNA, 22 nt, Human
ucuaaaucuccaaaauaaaacu

SEQ ID NO: 2627814 - RNA, 13 nt, Human
ucuaaaugaagug

SEQ ID NO: 2627815 - RNA, 17 nt, Human
ucuaaauuugaauguua

SEQ ID NO: 2627816 - RNA, 13 nt, Human
ucuaaauuugaau

SEQ ID NO: 2627817 - RNA, 13 nt, Human
ucuaaauugaaua

SEQ ID NO: 2627818 - RNA, 23 nt, Human
ucuaaaugggaaaguauucugua

SEQ ID NO: 2627819 - RNA, 14 nt, Human
ucuaaaugcauauc

SEQ ID NO: 2627820 - RNA, 23 nt, Human
ucuaaaugcauauccugagccau

SEQ ID NO: 2627821 - RNA, 23 nt, Human
ucuaaauuugaauguuaagcaga

SEQ ID NO: 2627822 - RNA, 22 nt, Human
ucuaaauuugaauguuaagcag

SEQ ID NO: 2627823 - RNA, 21 nt, Human
ucuaacccucccauggcaccu

SEQ ID NO: 2627824 - RNA, 20 nt, Human
ucuaacccucccauggcacc

SEQ ID NO: 2627825 - RNA, 15 nt, Human
ucuaacccucccaug

SEQ ID NO: 2627826 - RNA, 14 nt, Human
ucuaacccucccau

SEQ ID NO: 2627827 - RNA, 17 nt, Human
ucuaaccccaggccccg

SEQ ID NO: 2627828 - RNA, 17 nt, Human
ucuaaauugaauaaugg

SEQ ID NO: 2627829 - RNA, 23 nt, Human
ucuaacccuaggcaucacaugcu

SEQ ID NO: 2627830 - RNA, 19 nt, Human
ucuaacaaaaaaauauauu

SEQ ID NO: 2627831 - RNA, 15 nt, Human
ucuaaauugaauaau

SEQ ID NO: 2627832 - RNA, 14 nt, Human
ucuaaauugaauaa

SEQ ID NO: 2627833 - RNA, 16 nt, Human
ucuaaccccaggcccc

SEQ ID NO: 2627834 - RNA, 21 nt, Human
ucuacacuaagagagaaugag

SEQ ID NO: 2627835 - RNA, 22 nt, Human
ucuaacuucaccauauuaccac

SEQ ID NO: 2627836 - RNA, 15 nt, Human
ucuaacuucaccaua

SEQ ID NO: 2627837 - RNA, 16 nt, Human
ucuaacuucaccauau

SEQ ID NO: 2627838 - RNA, 15 nt, Human
ucuaaccugauggca

SEQ ID NO: 2627839 - RNA, 14 nt, Human
ucuaaccugugacc

SEQ ID NO: 2627840 - RNA, 13 nt, Human
ucuaaccucaucu

SEQ ID NO: 2627841 - RNA, 18 nt, Human
ucuaaccucaucuucuuc

SEQ ID NO: 2627842 - RNA, 20 nt, Human
ucuaaccucaucuucuucac

SEQ ID NO: 2627843 - RNA, 13 nt, Human
ucuaacucagcaa

SEQ ID NO: 2627844 - RNA, 19 nt, Human
ucuaacuagaaaucugcca

SEQ ID NO: 2627845 - RNA, 15 nt, Human
ucuaacucagaaaca

SEQ ID NO: 2627846 - RNA, 17 nt, Human
ucuagaacacaggcaaa

SEQ ID NO: 2627847 - RNA, 15 nt, Human
ucuacucuuuuuguu

SEQ ID NO: 2627848 - RNA, 22 nt, Human
ucuacucuuaaguuucucagcu

SEQ ID NO: 2627849 - RNA, 21 nt, Human
ucuacucuuaaguuucucagc

SEQ ID NO: 2627850 - RNA, 13 nt, Human
ucuacacugugaa

SEQ ID NO: 2627851 - RNA, 14 nt, Human
ucuacacugugaac

SEQ ID NO: 2627852 - RNA, 22 nt, Human
ucuacugaggugcuauguucuu

SEQ ID NO: 2627853 - RNA, 19 nt, Human
ucuagaacaucccugccag

SEQ ID NO: 2627854 - RNA, 20 nt, Human
ucuagaacaucccugccagc

SEQ ID NO: 2627855 - RNA, 18 nt, Human
ucuagaacuugacccccu

SEQ ID NO: 2627856 - RNA, 20 nt, Human
ucuagaagacugucagcuuc

SEQ ID NO: 2627857 - RNA, 21 nt, Human
ucuagaagacugucagcuucc

SEQ ID NO: 2627858 - RNA, 21 nt, Human
ucuagaagccaagggaaaggg

SEQ ID NO: 2627859 - RNA, 20 nt, Human
ucuagaagccaagggaaagg

SEQ ID NO: 2627860 - RNA, 17 nt, Human
ucuagaagccaagggaa

SEQ ID NO: 2627861 - RNA, 21 nt, Human
ucuagaacaucccugccagcu

SEQ ID NO: 2627862 - RNA, 16 nt, Human
ucuagggaccccuccu

SEQ ID NO: 2627863 - RNA, 15 nt, Human
ucuagggaccccucc

SEQ ID NO: 2627864 - RNA, 17 nt, Human
ucuagggaaaugaaaga

SEQ ID NO: 2627865 - RNA, 19 nt, Human
ucuagggaaaaaccagcgu

SEQ ID NO: 2627866 - RNA, 19 nt, Human
ucuagaauuuaucacacuu

SEQ ID NO: 2627867 - RNA, 13 nt, Human
ucuagggaaauga

SEQ ID NO: 2627868 - RNA, 20 nt, Human
ucuagaaguuguuugucauc

SEQ ID NO: 2627869 - RNA, 16 nt, Human
ucuagaaguuguuugu

SEQ ID NO: 2627870 - RNA, 23 nt, Human
ucuagaagccaagggaaaggggu

SEQ ID NO: 2627871 - RNA, 20 nt, Human
ucuagaauguguuuucugaa

SEQ ID NO: 2627872 - RNA, 22 nt, Human
ucuagggaaaaaccagcgugug

SEQ ID NO: 2627873 - RNA, 15 nt, Human
ucuacacugugcuga

SEQ ID NO: 2627874 - RNA, 21 nt, Human
ucuacacugugcugagucuga

SEQ ID NO: 2627875 - RNA, 18 nt, Human
ucuacugaggugcuaugu

SEQ ID NO: 2627876 - RNA, 19 nt, Human
ucuacugaggugcuauguu

SEQ ID NO: 2627877 - RNA, 14 nt, Human
ucuacacugugcug

SEQ ID NO: 2627878 - RNA, 12 nt, Human
ucuacacugugc

SEQ ID NO: 2627879 - RNA, 17 nt, Human
ucuacacuccagugaga

SEQ ID NO: 2627880 - RNA, 15 nt, Human
ucuacacucaucuua

SEQ ID NO: 2627881 - RNA, 17 nt, Human
ucucacucugucgccca

SEQ ID NO: 2627882 - RNA, 16 nt, Human
ucucacucugucgccc

SEQ ID NO: 2627883 - RNA, 22 nt, Human
ucucacucugucgcccagucug

SEQ ID NO: 2627884 - RNA, 18 nt, Human
ucucacucugucgcccag

SEQ ID NO: 2627885 - RNA, 21 nt, Human
ucucacuguugcccaggcugg

SEQ ID NO: 2627886 - RNA, 20 nt, Human
ucucacuguugcccaggcug

SEQ ID NO: 2627887 - RNA, 19 nt, Human
ucucacuguugcccaggcu

SEQ ID NO: 2627888 - RNA, 18 nt, Human
ucucacuguugcccaggc

SEQ ID NO: 2627889 - RNA, 20 nt, Human
ucucagggucucugcugccg

SEQ ID NO: 2627890 - RNA, 18 nt, Human
ucucagggucucugcugc

SEQ ID NO: 2627891 - RNA, 17 nt, Human
ucucagggucucugcug

SEQ ID NO: 2627892 - RNA, 16 nt, Human
ucucagggucucugcu

SEQ ID NO: 2627893 - RNA, 15 nt, Human
ucucagggucucugc

SEQ ID NO: 2627894 - RNA, 17 nt, Human
ucucaggggcuguuuga

SEQ ID NO: 2627895 - RNA, 16 nt, Human
ucucaggggcuguuug

SEQ ID NO: 2627896 - RNA, 20 nt, Human
ucucaggggccagaggaacu

SEQ ID NO: 2627897 - RNA, 17 nt, Human
ucucaggggccagagga

SEQ ID NO: 2627898 - RNA, 23 nt, Human
ucucagggcuccugccuucuguc

SEQ ID NO: 2627899 - RNA, 17 nt, Human
ucucagggcuccugccu

SEQ ID NO: 2627900 - RNA, 20 nt, Human
ucucagaaucuacccaaagg

SEQ ID NO: 2627901 - RNA, 19 nt, Human
ucucagaaucuacccaaag

SEQ ID NO: 2627902 - RNA, 16 nt, Human
ucucagggcuccugcc

SEQ ID NO: 2627903 - RNA, 13 nt, Human
ucucagggcuccu

SEQ ID NO: 2627904 - RNA, 17 nt, Human
ucucagaaucucaaaua

SEQ ID NO: 2627905 - RNA, 21 nt, Human
ucucagaaucucaaauaacua

SEQ ID NO: 2627906 - RNA, 19 nt, Human
ucucagaaggcaaaugacu

SEQ ID NO: 2627907 - RNA, 20 nt, Human
ucucagaaggcaaaugacuu

SEQ ID NO: 2627908 - RNA, 21 nt, Human
ucucagaaggcaaaugacuuu

SEQ ID NO: 2627909 - RNA, 22 nt, Human
ucucagaaggcaaaugacuuug

SEQ ID NO: 2627910 - RNA, 18 nt, Human
ucucagaagggaggcugg

SEQ ID NO: 2627911 - RNA, 15 nt, Human
ucucagaagggaggc

SEQ ID NO: 2627912 - RNA, 14 nt, Human
ucucagaagggagg

SEQ ID NO: 2627913 - RNA, 13 nt, Human
ucucagaagggag

SEQ ID NO: 2627914 - RNA, 12 nt, Human
ucucagaaucua

SEQ ID NO: 2627915 - RNA, 19 nt, Human
ucucagaagguauuccuuu

SEQ ID NO: 2627916 - RNA, 20 nt, Human
ucucacuuuucuccaugagu

SEQ ID NO: 2627917 - RNA, 15 nt, Human
ucucacuuuucucca

SEQ ID NO: 2627918 - RNA, 17 nt, Human
ucucacuuuucuccaug

SEQ ID NO: 2627919 - RNA, 13 nt, Human
ucucacuuguuuc

SEQ ID NO: 2627920 - RNA, 13 nt, Human
ucucacuugugcc

SEQ ID NO: 2627921 - RNA, 23 nt, Human
ucucaaccuaccaccccuuccug

SEQ ID NO: 2627922 - RNA, 17 nt, Human
ucucacuguugcccagg

SEQ ID NO: 2627923 - RNA, 21 nt, Human
ucucaaauuuggauugcuaau

SEQ ID NO: 2627924 - RNA, 14 nt, Human
ucucaaacuggggc

SEQ ID NO: 2627925 - RNA, 19 nt, Human
ucucaacaaagcacagugu

SEQ ID NO: 2627926 - RNA, 21 nt, Human
ucucaacaaagcacaguguua

SEQ ID NO: 2627927 - RNA, 22 nt, Human
ucucaaccuaccaccccuuccu

SEQ ID NO: 2627928 - RNA, 21 nt, Human
ucucaaccuaccaccccuucc

SEQ ID NO: 2627929 - RNA, 23 nt, Human
ucucaacccuuuugucugccucu

SEQ ID NO: 2627930 - RNA, 21 nt, Human
ucucaacccuuuugucugccu

SEQ ID NO: 2627931 - RNA, 17 nt, Human
ucucaaccaccuuucag

SEQ ID NO: 2627932 - RNA, 17 nt, Human
ucucaacccaggagcau

SEQ ID NO: 2627933 - RNA, 13 nt, Human
ucucaaccauccc

SEQ ID NO: 2627934 - RNA, 21 nt, Human
ucucaaacucuugaccucagg

SEQ ID NO: 2627935 - RNA, 13 nt, Human
ucucaaacucuug

SEQ ID NO: 2627936 - RNA, 22 nt, Human
ucucaaacucuugaccucaggu

SEQ ID NO: 2627937 - RNA, 22 nt, Human
ucuaguacuugggagaccugua

SEQ ID NO: 2627938 - RNA, 18 nt, Human
ucuaggguuauugcauuu

SEQ ID NO: 2627939 - RNA, 19 nt, Human
ucuaggggucaggcuccau

SEQ ID NO: 2627940 - RNA, 18 nt, Human
ucuagggaccccuccucc

SEQ ID NO: 2627941 - RNA, 17 nt, Human
ucuagggaccccuccuc

SEQ ID NO: 2627942 - RNA, 20 nt, Human
ucuagggaccccuccucccu

SEQ ID NO: 2627943 - RNA, 17 nt, Human
ucuagggagagacccuu

SEQ ID NO: 2627944 - RNA, 22 nt, Human
ucucaaacacaguuacacuugu

SEQ ID NO: 2627945 - RNA, 19 nt, Human
ucucaaacacaguuacacu

SEQ ID NO: 2627946 - RNA, 13 nt, Human
ucucaaacacagu

SEQ ID NO: 2627947 - RNA, 19 nt, Human
ucuaguccuauucuauugc

SEQ ID NO: 2627948 - RNA, 16 nt, Human
ucuaguccuauucuau

SEQ ID NO: 2627949 - RNA, 24 nt, Human
ucuaguauuccagaccugaagaau

SEQ ID NO: 2627950 - RNA, 20 nt, Human
ucucaaaccaagcaaaggaa

SEQ ID NO: 2627951 - RNA, 23 nt, Human
ucucaaacacaguuacacuugug

SEQ ID NO: 2627952 - RNA, 19 nt, Human
ucucaaaccuguuuaaaua

SEQ ID NO: 2627953 - RNA, 23 nt, Human
ucucaaaccuugaugugccugug

SEQ ID NO: 2627954 - RNA, 23 nt, Human
ucucaaaccuguuuaaauauuuc

SEQ ID NO: 2627955 - RNA, 14 nt, Human
ucucaaacuccuga

SEQ ID NO: 2627956 - RNA, 19 nt, Human
uccugguggguccaggggc

SEQ ID NO: 2627957 - RNA, 17 nt, Human
uccugguggguccaggg

SEQ ID NO: 2627958 - RNA, 22 nt, Human
uccugguggguccaggggcccc

SEQ ID NO: 2627959 - RNA, 16 nt, Human
uccugguggguccagg

SEQ ID NO: 2627960 - RNA, 20 nt, Human
uccuggugcucucugccacu

SEQ ID NO: 2627961 - RNA, 19 nt, Human
uccuggugcucucugccac

SEQ ID NO: 2627962 - RNA, 18 nt, Human
uccuggugcucucugcca

SEQ ID NO: 2627963 - RNA, 16 nt, Human
uccuggugcucucugc

SEQ ID NO: 2627964 - RNA, 21 nt, Human
uccuggugucacuuacuguuu

SEQ ID NO: 2627965 - RNA, 14 nt, Human
uccuggugucacuu

SEQ ID NO: 2627966 - RNA, 15 nt, Human
uccugguguggaaga

SEQ ID NO: 2627967 - RNA, 15 nt, Human
uccuguauucacccg

SEQ ID NO: 2627968 - RNA, 13 nt, Human
uccuguauguugu

SEQ ID NO: 2627969 - RNA, 23 nt, Human
uccuguaguugcguggacucugc

SEQ ID NO: 2627970 - RNA, 22 nt, Human
uccuguaguugcguggacucug

SEQ ID NO: 2627971 - RNA, 21 nt, Human
uccuguaguugcguggacucu

SEQ ID NO: 2627972 - RNA, 14 nt, Human
uccuggugugaagg

SEQ ID NO: 2627973 - RNA, 23 nt, Human
uccugguucccguuucuccaccu

SEQ ID NO: 2627974 - RNA, 21 nt, Human
uccugguucccguuucuccac

SEQ ID NO: 2627975 - RNA, 15 nt, Human
uccugguucccguuu

SEQ ID NO: 2627976 - RNA, 22 nt, Human
uccuguaaaaaaaaaaaaguua

SEQ ID NO: 2627977 - RNA, 19 nt, Human
uccuguaaagguuacaagc

SEQ ID NO: 2627978 - RNA, 22 nt, Human
uccuggcaugggaaugaauguc

SEQ ID NO: 2627979 - RNA, 10 nt, Human
ucccucccuu

SEQ ID NO: 2627980 - RNA, 17 nt, Human
uccuggcaguuuaaaaa

SEQ ID NO: 2627981 - RNA, 20 nt, Human
uccuggcaguuuaaaaaaau

SEQ ID NO: 2627982 - RNA, 11 nt, Human
uccuggccauc

SEQ ID NO: 2627983 - RNA, 14 nt, Human
uccuggccauccca

SEQ ID NO: 2627984 - RNA, 17 nt, Human
uccuggcccacugcauc

SEQ ID NO: 2627985 - RNA, 20 nt, Human
uccuggccaucccacaagug

SEQ ID NO: 2627986 - RNA, 15 nt, Human
uccuggccaucccac

SEQ ID NO: 2627987 - RNA, 16 nt, Human
uccuggccaucccaca

SEQ ID NO: 2627988 - RNA, 20 nt, Human
uccuggugccaauuucaagu

SEQ ID NO: 2627989 - RNA, 17 nt, Human
uccuggucuugagaugu

SEQ ID NO: 2627990 - RNA, 14 nt, Human
uccuggugcucucu

SEQ ID NO: 2627991 - RNA, 15 nt, Human
uccuggugcucucug

SEQ ID NO: 2627992 - RNA, 21 nt, Human
uccuggugccaauuucaaguu

SEQ ID NO: 2627993 - RNA, 20 nt, Human
uccuggucuugagaugucuu

SEQ ID NO: 2627994 - RNA, 16 nt, Human
uccuucuuguaguagu

SEQ ID NO: 2627995 - RNA, 17 nt, Human
uccuucuugccuucaga

SEQ ID NO: 2627996 - RNA, 12 nt, Human
uccuucugccuu

SEQ ID NO: 2627997 - RNA, 16 nt, Human
uccuugaucuguauau

SEQ ID NO: 2627998 - RNA, 22 nt, Human
uccuugaucuguauauacaaua

SEQ ID NO: 2627999 - RNA, 23 nt, Human
uccuugauuuuagccuucucugu

SEQ ID NO: 2628000 - RNA, 21 nt, Human
uccuugcacacuccccugcac

SEQ ID NO: 2628001 - RNA, 22 nt, Human
uccuugauuuuagccuucucug

SEQ ID NO: 2628002 - RNA, 15 nt, Human
uccuugcaucaauuu

SEQ ID NO: 2628003 - RNA, 20 nt, Human
uccuugcaccccucacucug

SEQ ID NO: 2628004 - RNA, 15 nt, Human
uccuugcaccccuca

SEQ ID NO: 2628005 - RNA, 14 nt, Human
uccuugcaccccuc

SEQ ID NO: 2628006 - RNA, 22 nt, Human
uccuugcacacuccccugcacu

SEQ ID NO: 2628007 - RNA, 22 nt, Human
uccuugcaccccucacucuggc

SEQ ID NO: 2628008 - RNA, 21 nt, Human
uccuugcaccccucacucugg

SEQ ID NO: 2628009 - RNA, 24 nt, Human
uccuugcaccccucacucuggccu

SEQ ID NO: 2628010 - RNA, 14 nt, Human
uccuugcaccugca

SEQ ID NO: 2628011 - RNA, 15 nt, Human
uccuucugccuuuuu

SEQ ID NO: 2628012 - RNA, 20 nt, Human
uccuucaagaucauguaccc

SEQ ID NO: 2628013 - RNA, 18 nt, Human
uccuucugccugagcuuc

SEQ ID NO: 2628014 - RNA, 20 nt, Human
uccuucugugaaaguacauu

SEQ ID NO: 2628015 - RNA, 19 nt, Human
uccuucuguccuacucugu

SEQ ID NO: 2628016 - RNA, 12 nt, Human
uccuucuguccu

SEQ ID NO: 2628017 - RNA, 18 nt, Human
uccuucaaguuagcucag

SEQ ID NO: 2628018 - RNA, 19 nt, Human
uccuucaaguuagcucagg

SEQ ID NO: 2628019 - RNA, 20 nt, Human
uccuucaaguuagcucagga

SEQ ID NO: 2628020 - RNA, 23 nt, Human
uccuucaaguuagcucaggaggc

SEQ ID NO: 2628021 - RNA, 19 nt, Human
uccuucaagaacucugggc

SEQ ID NO: 2628022 - RNA, 20 nt, Human
uccuucaagaacucugggcu

SEQ ID NO: 2628023 - RNA, 21 nt, Human
uccuucaagaacucugggcug

SEQ ID NO: 2628024 - RNA, 23 nt, Human
uccuucaagaacucugggcugcu

SEQ ID NO: 2628025 - RNA, 21 nt, Human
uccuuacaaguuagaaaacau

SEQ ID NO: 2628026 - RNA, 22 nt, Human
uccuuacaaguuagaaaacaua

SEQ ID NO: 2628027 - RNA, 14 nt, Human
uccuuaccagcaga

SEQ ID NO: 2628028 - RNA, 16 nt, Human
uccuucaaagcaaaug

SEQ ID NO: 2628029 - RNA, 22 nt, Human
uccuuauguauauuuaaaagaa

SEQ ID NO: 2628030 - RNA, 12 nt, Human
uccugucagugc

SEQ ID NO: 2628031 - RNA, 14 nt, Human
uccugucagugccg

SEQ ID NO: 2628032 - RNA, 13 nt, Human
uccugucagugcc

SEQ ID NO: 2628033 - RNA, 17 nt, Human
uccuuaauccagcugau

SEQ ID NO: 2628034 - RNA, 19 nt, Human
uccuuaauucacucccaca

SEQ ID NO: 2628035 - RNA, 18 nt, Human
uccuuaauucacucccac

SEQ ID NO: 2628036 - RNA, 17 nt, Human
uccuuaauucacuccca

SEQ ID NO: 2628037 - RNA, 14 nt, Human
uccuuaaugauccg

SEQ ID NO: 2628038 - RNA, 13 nt, Human
ucgccaugccggg

SEQ ID NO: 2628039 - RNA, 21 nt, Human
ucgcagagaggccaggugcag

SEQ ID NO: 2628040 - RNA, 19 nt, Human
ucgcagagaggccaggugc

SEQ ID NO: 2628041 - RNA, 14 nt, Human
ucgcagagaggcca

SEQ ID NO: 2628042 - RNA, 12 nt, Human
ucgcagagaggc

SEQ ID NO: 2628043 - RNA, 17 nt, Human
ucgcaccauucugacuc

SEQ ID NO: 2628044 - RNA, 12 nt, Human
ucgcaccuacca

SEQ ID NO: 2628045 - RNA, 18 nt, Human
ucgcaccuaccaucaggg

SEQ ID NO: 2628046 - RNA, 17 nt, Human
ucgauuuuguaucugca

SEQ ID NO: 2628047 - RNA, 13 nt, Human
ucgauuuuguauc

SEQ ID NO: 2628048 - RNA, 15 nt, Human
ucgauuucuccagga

SEQ ID NO: 2628049 - RNA, 17 nt, Human
ucgcaauguaagacucg

SEQ ID NO: 2628050 - RNA, 16 nt, Human
ucgcaccauucugacu

SEQ ID NO: 2628051 - RNA, 16 nt, Human
ucgcacagucucucuc

SEQ ID NO: 2628052 - RNA, 21 nt, Human
ucgcaccacuguguauuuaac

SEQ ID NO: 2628053 - RNA, 14 nt, Human
ucgcacagucucuc

SEQ ID NO: 2628054 - RNA, 13 nt, Human
ucgcacagucucu

SEQ ID NO: 2628055 - RNA, 13 nt, Human
ucgcaagcugggu

SEQ ID NO: 2628056 - RNA, 12 nt, Human
ucgcccaggcug

SEQ ID NO: 2628057 - RNA, 14 nt, Human
ucgcccaggcugga

SEQ ID NO: 2628058 - RNA, 21 nt, Human
ucgcccaccgcaugcccccuc

SEQ ID NO: 2628059 - RNA, 16 nt, Human
ucgcccaccgcaugcc

SEQ ID NO: 2628060 - RNA, 11 nt, Human
ucgcccaggag

SEQ ID NO: 2628061 - RNA, 14 nt, Human
ucgccaugccgggg

SEQ ID NO: 2628062 - RNA, 17 nt, Human
ucgcccaaagccagaca

SEQ ID NO: 2628063 - RNA, 14 nt, Human
ucgcccaccgcaug

SEQ ID NO: 2628064 - RNA, 18 nt, Human
ucgcccaaagccagacag

SEQ ID NO: 2628065 - RNA, 19 nt, Human
ucgcccaggcuggagugca

SEQ ID NO: 2628066 - RNA, 22 nt, Human
ucgcccaccgcaugcccccucg

SEQ ID NO: 2628067 - RNA, 12 nt, Human
ucgcccaggaga

SEQ ID NO: 2628068 - RNA, 17 nt, Human
ucgcuucuugccucugu

SEQ ID NO: 2628069 - RNA, 20 nt, Human
ucggaacccaagcuuagaac

SEQ ID NO: 2628070 - RNA, 19 nt, Human
ucggaacccaagcuuagaa

SEQ ID NO: 2628071 - RNA, 18 nt, Human
ucggaacugcaugcugcu

SEQ ID NO: 2628072 - RNA, 22 nt, Human
ucggaacugcaugcugcuggac

SEQ ID NO: 2628073 - RNA, 13 nt, Human
ucggaagcagugc

SEQ ID NO: 2628074 - RNA, 23 nt, Human
ucggacuaagccuaccugcucuc

SEQ ID NO: 2628075 - RNA, 22 nt, Human
ucggacuaagccuaccugcucu

SEQ ID NO: 2628076 - RNA, 19 nt, Human
ucggacuaagccuaccugc

SEQ ID NO: 2628077 - RNA, 17 nt, Human
ucggaccuuucagcugu

SEQ ID NO: 2628078 - RNA, 10 nt, Human
ucggaccagc

SEQ ID NO: 2628079 - RNA, 19 nt, Human
ucggaaggcuggcugggca

SEQ ID NO: 2628080 - RNA, 15 nt, Human
ucggaagcagugccu

SEQ ID NO: 2628081 - RNA, 16 nt, Human
ucggaagcagugccuu

SEQ ID NO: 2628082 - RNA, 22 nt, Human
ucggaagcagugccuuccauaa

SEQ ID NO: 2628083 - RNA, 23 nt, Human
ucggaagcagugccuuccauaau

SEQ ID NO: 2628084 - RNA, 16 nt, Human
ucgcuucuugccucug

SEQ ID NO: 2628085 - RNA, 15 nt, Human
ucgcuucuugccucu

SEQ ID NO: 2628086 - RNA, 14 nt, Human
ucgcuucuugccuc

SEQ ID NO: 2628087 - RNA, 15 nt, Human
ucgcuuccgcauccu

SEQ ID NO: 2628088 - RNA, 15 nt, Human
ucgcuucccccauag

SEQ ID NO: 2628089 - RNA, 16 nt, Human
ucgcuucccccauagc

SEQ ID NO: 2628090 - RNA, 17 nt, Human
ucgcuucccccauagcc

SEQ ID NO: 2628091 - RNA, 19 nt, Human
ucgcuucccccauagccac

SEQ ID NO: 2628092 - RNA, 21 nt, Human
ucgcuguguguuaguucccaa

SEQ ID NO: 2628093 - RNA, 13 nt, Human
ucgcuguguguua

SEQ ID NO: 2628094 - RNA, 14 nt, Human
ucgcuguugcugaa

SEQ ID NO: 2628095 - RNA, 12 nt, Human
ucgcuguugcug

SEQ ID NO: 2628096 - RNA, 17 nt, Human
ucgcuguugcugaauag

SEQ ID NO: 2628097 - RNA, 15 nt, Human
ucgcuguugcugaau

SEQ ID NO: 2628098 - RNA, 16 nt, Human
ucgcuucauguaacua

SEQ ID NO: 2628099 - RNA, 14 nt, Human
ucgcuucccccaua

SEQ ID NO: 2628100 - RNA, 20 nt, Human
uccuuuuuaaauucaguccu

SEQ ID NO: 2628101 - RNA, 18 nt, Human
uccuuuuguguacagugu

SEQ ID NO: 2628102 - RNA, 13 nt, Human
uccuuuugcuuga

SEQ ID NO: 2628103 - RNA, 17 nt, Human
uccuuuuguguacagug

SEQ ID NO: 2628104 - RNA, 23 nt, Human
uccuuuuggagucagacagaugu

SEQ ID NO: 2628105 - RNA, 14 nt, Human
uccuuuuggaguca

SEQ ID NO: 2628106 - RNA, 14 nt, Human
uccuuggggcaggc

SEQ ID NO: 2628107 - RNA, 15 nt, Human
uccuuggggcaggca

SEQ ID NO: 2628108 - RNA, 17 nt, Human
uccuugggcacuuuuua

SEQ ID NO: 2628109 - RNA, 13 nt, Human
uccuugggcacuu

SEQ ID NO: 2628110 - RNA, 13 nt, Human
uccuugggcccuu

SEQ ID NO: 2628111 - RNA, 14 nt, Human
uccuugggcccuuu

SEQ ID NO: 2628112 - RNA, 16 nt, Human
uccuugggcccuuuga

SEQ ID NO: 2628113 - RNA, 22 nt, Human
uccuugggaggaagcagaauaa

SEQ ID NO: 2628114 - RNA, 21 nt, Human
uccuugggaggaagcagaaua

SEQ ID NO: 2628115 - RNA, 20 nt, Human
uccuugggaggaagcagaau

SEQ ID NO: 2628116 - RNA, 19 nt, Human
uccuugggaggaagcagaa

SEQ ID NO: 2628117 - RNA, 23 nt, Human
uccuugggaggaagcagaauaaa

SEQ ID NO: 2628118 - RNA, 20 nt, Human
uccuugggaggccccacugg

SEQ ID NO: 2628119 - RNA, 21 nt, Human
uccuugggaggccccacuggg

SEQ ID NO: 2628120 - RNA, 22 nt, Human
uccuugggaggccccacugggg

SEQ ID NO: 2628121 - RNA, 18 nt, Human
uccuugggaggaagcaga

SEQ ID NO: 2628122 - RNA, 17 nt, Human
uccuugggaggaagcag

SEQ ID NO: 2628123 - RNA, 16 nt, Human
uccuugggaggaagca

SEQ ID NO: 2628124 - RNA, 15 nt, Human
uccuugggaggaagc

SEQ ID NO: 2628125 - RNA, 15 nt, Human
uccuuggcuggugca

SEQ ID NO: 2628126 - RNA, 14 nt, Human
uccuugggaggaag

SEQ ID NO: 2628127 - RNA, 20 nt, Human
uccuuggcucccauucacuc

SEQ ID NO: 2628128 - RNA, 17 nt, Human
uccuugcaccugcaucc

SEQ ID NO: 2628129 - RNA, 17 nt, Human
ucgaguuacagacaaag

SEQ ID NO: 2628130 - RNA, 17 nt, Human
ucgauucauauugaaua

SEQ ID NO: 2628131 - RNA, 14 nt, Human
ucgauacugcgacu

SEQ ID NO: 2628132 - RNA, 15 nt, Human
ucgaguuacagacaa

SEQ ID NO: 2628133 - RNA, 14 nt, Human
uccuuuuucucccu

SEQ ID NO: 2628134 - RNA, 13 nt, Human
uccuuuuuguuau

SEQ ID NO: 2628135 - RNA, 19 nt, Human
uccuuuuucuuuauaaacu

SEQ ID NO: 2628136 - RNA, 20 nt, Human
uccuuuuucucccucuggau

SEQ ID NO: 2628137 - RNA, 14 nt, Human
uccuuuuucuuuau

SEQ ID NO: 2628138 - RNA, 21 nt, Human
uccuuuuuuuccaucuuuaca

SEQ ID NO: 2628139 - RNA, 18 nt, Human
uccuuuuuuauacacaua

SEQ ID NO: 2628140 - RNA, 14 nt, Human
uccuuuuuguuauu

SEQ ID NO: 2628141 - RNA, 16 nt, Human
uccuuuuuuauacaca

SEQ ID NO: 2628142 - RNA, 14 nt, Human
ugaacauuccagag

SEQ ID NO: 2628143 - RNA, 20 nt, Human
ugaacauccuuccuucccac

SEQ ID NO: 2628144 - RNA, 18 nt, Human
ugaacauccuuccuuccc

SEQ ID NO: 2628145 - RNA, 14 nt, Human
ugaacauggacucu

SEQ ID NO: 2628146 - RNA, 17 nt, Human
ugaacauccuuccuucc

SEQ ID NO: 2628147 - RNA, 17 nt, Human
ugaacauauuguugaaa

SEQ ID NO: 2628148 - RNA, 13 nt, Human
ugaacauguacug

SEQ ID NO: 2628149 - RNA, 13 nt, Human
ugaacauuccaga

SEQ ID NO: 2628150 - RNA, 18 nt, Human
ugaacacucaugcugaaa

SEQ ID NO: 2628151 - RNA, 17 nt, Human
ugaacacucaugcugaa

SEQ ID NO: 2628152 - RNA, 18 nt, Human
ugaacacuccaauuaagg

SEQ ID NO: 2628153 - RNA, 19 nt, Human
ugaacacuccaauuaagga

SEQ ID NO: 2628154 - RNA, 22 nt, Human
ugaacacuccaauuaaggauuu

SEQ ID NO: 2628155 - RNA, 23 nt, Human
ugaacacuccaauuaaggauuuu

SEQ ID NO: 2628156 - RNA, 14 nt, Human
ugaacacuggggga

SEQ ID NO: 2628157 - RNA, 16 nt, Human
ugaacacugggggagg

SEQ ID NO: 2628158 - RNA, 17 nt, Human
ugaacacugggggaggg

SEQ ID NO: 2628159 - RNA, 22 nt, Human
ugaacacugggggaggggacau

SEQ ID NO: 2628160 - RNA, 20 nt, Human
ugaacagaaaacauucugau

SEQ ID NO: 2628161 - RNA, 18 nt, Human
ugaacacuggcaacaaca

SEQ ID NO: 2628162 - RNA, 19 nt, Human
ugaacauacuggcugguga

SEQ ID NO: 2628163 - RNA, 17 nt, Human
ugaaaugcucuccuuuc

SEQ ID NO: 2628164 - RNA, 16 nt, Human
ugaaaugcucuccuuu

SEQ ID NO: 2628165 - RNA, 18 nt, Human
ugaaaugcaucauucuug

SEQ ID NO: 2628166 - RNA, 19 nt, Human
ugaaauggacuuuuguaca

SEQ ID NO: 2628167 - RNA, 13 nt, Human
ugaaaugcugcau

SEQ ID NO: 2628168 - RNA, 17 nt, Human
ugaaaugcugcauuuua

SEQ ID NO: 2628169 - RNA, 15 nt, Human
ugaaaugcugcauuu

SEQ ID NO: 2628170 - RNA, 16 nt, Human
ugaaaugcuggcauuu

SEQ ID NO: 2628171 - RNA, 19 nt, Human
ugaacacaaacuguaaaua

SEQ ID NO: 2628172 - RNA, 18 nt, Human
ugaacacacuguguccug

SEQ ID NO: 2628173 - RNA, 15 nt, Human
ugaacacacuguguc

SEQ ID NO: 2628174 - RNA, 14 nt, Human
ugaacacacugugu

SEQ ID NO: 2628175 - RNA, 14 nt, Human
ugaacacaucagcu

SEQ ID NO: 2628176 - RNA, 23 nt, Human
ugaacacacuguguccuggugcu

SEQ ID NO: 2628177 - RNA, 16 nt, Human
ugaacacucaugcuga

SEQ ID NO: 2628178 - RNA, 14 nt, Human
ugaacacucaugcu

SEQ ID NO: 2628179 - RNA, 19 nt, Human
ugaacugauaguuacuguu

SEQ ID NO: 2628180 - RNA, 18 nt, Human
ugaacugauaguuacugu

SEQ ID NO: 2628181 - RNA, 23 nt, Human
ugaacugacaggcagccuggaca

SEQ ID NO: 2628182 - RNA, 21 nt, Human
ugaacugacaggcagccugga

SEQ ID NO: 2628183 - RNA, 16 nt, Human
ugaacugagcuuggaa

SEQ ID NO: 2628184 - RNA, 15 nt, Human
ugaacugauaaagau

SEQ ID NO: 2628185 - RNA, 20 nt, Human
ugaacuggacccuguugcua

SEQ ID NO: 2628186 - RNA, 19 nt, Human
ugaacuggacccuguugcu

SEQ ID NO: 2628187 - RNA, 18 nt, Human
ugaacuggacccuguugc

SEQ ID NO: 2628188 - RNA, 17 nt, Human
ugaacuggacccuguug

SEQ ID NO: 2628189 - RNA, 23 nt, Human
ugaacugauaguuacuguuguga

SEQ ID NO: 2628190 - RNA, 21 nt, Human
ugaacugauaguuacuguugu

SEQ ID NO: 2628191 - RNA, 12 nt, Human
ugaacugagcuu

SEQ ID NO: 2628192 - RNA, 15 nt, Human
ugaacugagcuugga

SEQ ID NO: 2628193 - RNA, 13 nt, Human
ugaacugauaaag

SEQ ID NO: 2628194 - RNA, 17 nt, Human
ugaacugaacucugaca

SEQ ID NO: 2628195 - RNA, 19 nt, Human
ugaacugaacucugacaac

SEQ ID NO: 2628196 - RNA, 13 nt, Human
ugaacugacaggc

SEQ ID NO: 2628197 - RNA, 17 nt, Human
ugaacugaaguuucaca

SEQ ID NO: 2628198 - RNA, 15 nt, Human
ugaacugaaguuuca

SEQ ID NO: 2628199 - RNA, 13 nt, Human
ugaacugaaguuu

SEQ ID NO: 2628200 - RNA, 12 nt, Human
ugaacugaaguu

SEQ ID NO: 2628201 - RNA, 22 nt, Human
ugaaccacaucuugcucugcug

SEQ ID NO: 2628202 - RNA, 15 nt, Human
ugaacucuucaaucu

SEQ ID NO: 2628203 - RNA, 21 nt, Human
ugaaccacaucuugcucugcu

SEQ ID NO: 2628204 - RNA, 20 nt, Human
ugaaccacaucuugcucugc

SEQ ID NO: 2628205 - RNA, 19 nt, Human
ugaacucuuagaaaugaag

SEQ ID NO: 2628206 - RNA, 12 nt, Human
ugaacucuuaga

SEQ ID NO: 2628207 - RNA, 21 nt, Human
ugaacucuuaaucaaauagca

SEQ ID NO: 2628208 - RNA, 18 nt, Human
ugaacucuucaaucucuu

SEQ ID NO: 2628209 - RNA, 20 nt, Human
ugaacucuuugaaugacaaa

SEQ ID NO: 2628210 - RNA, 19 nt, Human
ugaacucuuugaaugacaa

SEQ ID NO: 2628211 - RNA, 17 nt, Human
ugaacucuuugaaugac

SEQ ID NO: 2628212 - RNA, 14 nt, Human
ugaacugaacucug

SEQ ID NO: 2628213 - RNA, 16 nt, Human
ugaagacagagcuaca

SEQ ID NO: 2628214 - RNA, 14 nt, Human
ugaagacagagcua

SEQ ID NO: 2628215 - RNA, 22 nt, Human
ugaacuuguaaaggaauuuaaa

SEQ ID NO: 2628216 - RNA, 12 nt, Human
ugaacuugguuc

SEQ ID NO: 2628217 - RNA, 14 nt, Human
ugaacuuggcgcug

SEQ ID NO: 2628218 - RNA, 19 nt, Human
ugaacuggguacuugugga

SEQ ID NO: 2628219 - RNA, 22 nt, Human
ugaacuggacccuguugcuaag

SEQ ID NO: 2628220 - RNA, 21 nt, Human
ugaacuggacccuguugcuaa

SEQ ID NO: 2628221 - RNA, 23 nt, Human
ugaacuggacccuguugcuaagc

SEQ ID NO: 2628222 - RNA, 14 nt, Human
ugaacugggaccuu

SEQ ID NO: 2628223 - RNA, 18 nt, Human
ugaagacuggaagcuaau

SEQ ID NO: 2628224 - RNA, 17 nt, Human
ugaagacuggaagcuaa

SEQ ID NO: 2628225 - RNA, 14 nt, Human
ugaagacuuuucuu

SEQ ID NO: 2628226 - RNA, 12 nt, Human
ugaagacauaaa

SEQ ID NO: 2628227 - RNA, 20 nt, Human
ugaagaccacauccacacac

SEQ ID NO: 2628228 - RNA, 14 nt, Human
ugaagacaggaugg

SEQ ID NO: 2628229 - RNA, 14 nt, Human
ugaagacaggacag

SEQ ID NO: 2628230 - RNA, 14 nt, Human
ugaagacagaggga

SEQ ID NO: 2628231 - RNA, 22 nt, Human
ugaagacuuuucuuucagccaa

SEQ ID NO: 2628232 - RNA, 17 nt, Human
ugaagacuuuucuuuca

SEQ ID NO: 2628233 - RNA, 23 nt, Human
ugaagagaaccgagcaaagauca

SEQ ID NO: 2628234 - RNA, 20 nt, Human
ugaagaggaaaaugaauaau

SEQ ID NO: 2628235 - RNA, 19 nt, Human
ugaagaggaaaaugaauaa

SEQ ID NO: 2628236 - RNA, 13 nt, Human
ugaagaggaaggg

SEQ ID NO: 2628237 - RNA, 22 nt, Human
ugaagaggaaaaugaauaauac

SEQ ID NO: 2628238 - RNA, 18 nt, Human
ugaagaggaucggaggcu

SEQ ID NO: 2628239 - RNA, 17 nt, Human
ugaagaggcgggccagc

SEQ ID NO: 2628240 - RNA, 16 nt, Human
ugaagaggcgggccag

SEQ ID NO: 2628241 - RNA, 15 nt, Human
ugaagaggcgggcca

SEQ ID NO: 2628242 - RNA, 22 nt, Human
ugaaggagccccauuccuggga

SEQ ID NO: 2628243 - RNA, 23 nt, Human
ugaaggagccccauuccugggaa

SEQ ID NO: 2628244 - RNA, 11 nt, Human
ugaaggagccc

SEQ ID NO: 2628245 - RNA, 22 nt, Human
ugaaggagaggcaacauccaaa

SEQ ID NO: 2628246 - RNA, 22 nt, Human
ugaagauggcauccugugaagu

SEQ ID NO: 2628247 - RNA, 20 nt, Human
ugaaggagagcccuucauuu

SEQ ID NO: 2628248 - RNA, 15 nt, Human
ugaagaugcagcuca

SEQ ID NO: 2628249 - RNA, 13 nt, Human
ugaagaugaucau

SEQ ID NO: 2628250 - RNA, 12 nt, Human
ugaagaugaaca

SEQ ID NO: 2628251 - RNA, 18 nt, Human
ugaagauggcauccugug

SEQ ID NO: 2628252 - RNA, 17 nt, Human
ugaagauggcauccugu

SEQ ID NO: 2628253 - RNA, 21 nt, Human
ugaagaugcagcaaaauguga

SEQ ID NO: 2628254 - RNA, 21 nt, Human
ugaagaugcugaaacaggaga

SEQ ID NO: 2628255 - RNA, 21 nt, Human
ugaagauggcauccugugaag

SEQ ID NO: 2628256 - RNA, 19 nt, Human
ugaagauggcauccuguga

SEQ ID NO: 2628257 - RNA, 16 nt, Human
ugaagaugggaacgca

SEQ ID NO: 2628258 - RNA, 15 nt, Human
ugaagaggugagcac

SEQ ID NO: 2628259 - RNA, 16 nt, Human
ugaagaggugagagua

SEQ ID NO: 2628260 - RNA, 20 nt, Human
ugaagaggggcagcccuugc

SEQ ID NO: 2628261 - RNA, 19 nt, Human
ugaagaggggcagcccuug

SEQ ID NO: 2628262 - RNA, 23 nt, Human
ugaagauauaacuauugcccagg

SEQ ID NO: 2628263 - RNA, 15 nt, Human
ugaagauauuuuucc

SEQ ID NO: 2628264 - RNA, 16 nt, Human
ugaagauaucuugaaa

SEQ ID NO: 2628265 - RNA, 21 nt, Human
ugaagauaucuugaaaugaaa

SEQ ID NO: 2628266 - RNA, 22 nt, Human
ugaagaucauauacgugaaaau

SEQ ID NO: 2628267 - RNA, 22 nt, Human
ugaagauaucuugaaaugaaag

SEQ ID NO: 2628268 - RNA, 19 nt, Human
ugaagaucguuaguaucua

SEQ ID NO: 2628269 - RNA, 21 nt, Human
ugaagaggcgggccagccagg

SEQ ID NO: 2628270 - RNA, 20 nt, Human
ugaagaggcgggccagccag

SEQ ID NO: 2628271 - RNA, 19 nt, Human
ugaagaggcgggccagcca

SEQ ID NO: 2628272 - RNA, 18 nt, Human
ugaagaggcgggccagcc

SEQ ID NO: 2628273 - RNA, 23 nt, Human
ugaagaggcgggccagccaggcg

SEQ ID NO: 2628274 - RNA, 18 nt, Human
ugaagagggagaagcaug

SEQ ID NO: 2628275 - RNA, 17 nt, Human
ugaagagggagaaggga

SEQ ID NO: 2628276 - RNA, 18 nt, Human
ugaagaggggcagcccuu

SEQ ID NO: 2628277 - RNA, 17 nt, Human
ugaagaggggcagcccu

SEQ ID NO: 2628278 - RNA, 16 nt, Human
ugaagaggggcagccc

SEQ ID NO: 2628279 - RNA, 15 nt, Human
ugaagaggggcagcc

SEQ ID NO: 2628280 - RNA, 14 nt, Human
ugaagaggggcagc

SEQ ID NO: 2628281 - RNA, 13 nt, Human
ugaagaggggcag

SEQ ID NO: 2628282 - RNA, 12 nt, Human
ugaagaggggca

SEQ ID NO: 2628283 - RNA, 21 nt, Human
ugaagagggagaagcaugaaa

SEQ ID NO: 2628284 - RNA, 14 nt, Human
ugaaggcaaaauug

SEQ ID NO: 2628285 - RNA, 15 nt, Human
ugaaggaugccaaga

SEQ ID NO: 2628286 - RNA, 13 nt, Human
ugaaggaggugag

SEQ ID NO: 2628287 - RNA, 20 nt, Human
ugaaggagauuuuccuuccu

SEQ ID NO: 2628288 - RNA, 17 nt, Human
ugaaggaggugagggau

SEQ ID NO: 2628289 - RNA, 18 nt, Human
ugaaggccuggcccacag

SEQ ID NO: 2628290 - RNA, 16 nt, Human
ugaaggcaaaauugca

SEQ ID NO: 2628291 - RNA, 17 nt, Human
ugaaggcaaaauugcaa

SEQ ID NO: 2628292 - RNA, 20 nt, Human
ugaaggcucgagcaugccug

SEQ ID NO: 2628293 - RNA, 22 nt, Human
ugaaguccaagcauuuagaugu

SEQ ID NO: 2628294 - RNA, 21 nt, Human
ugaaguccaagcauuuagaug

SEQ ID NO: 2628295 - RNA, 21 nt, Human
ugaaggcucgagcaugccugg

SEQ ID NO: 2628296 - RNA, 17 nt, Human
ucuuuugccguuauuaa

SEQ ID NO: 2628297 - RNA, 19 nt, Human
ucuuuugccguuauuaaaa

SEQ ID NO: 2628298 - RNA, 15 nt, Human
ucuuuugaaacaaua

SEQ ID NO: 2628299 - RNA, 14 nt, Human
ucuuuugaaacaau

SEQ ID NO: 2628300 - RNA, 23 nt, Human
ucuuuugaauauucccaagccca

SEQ ID NO: 2628301 - RNA, 19 nt, Human
ucuuuugaauccaugcuug

SEQ ID NO: 2628302 - RNA, 20 nt, Human
ucuuuugaauccaugcuugg

SEQ ID NO: 2628303 - RNA, 13 nt, Human
ucuuuugacaugu

SEQ ID NO: 2628304 - RNA, 14 nt, Human
ucuuuugacaugug

SEQ ID NO: 2628305 - RNA, 15 nt, Human
ucuuuugacaugugg

SEQ ID NO: 2628306 - RNA, 17 nt, Human
ucuuuugacauguggaa

SEQ ID NO: 2628307 - RNA, 13 nt, Human
ucuuuuggcuucc

SEQ ID NO: 2628308 - RNA, 18 nt, Human
ucuuuugcuuuuggcaaa

SEQ ID NO: 2628309 - RNA, 17 nt, Human
ucuuuugcaugaugauc

SEQ ID NO: 2628310 - RNA, 13 nt, Human
ucuuuugcuuuug

SEQ ID NO: 2628311 - RNA, 16 nt, Human
ucuuuugauuauguuu

SEQ ID NO: 2628312 - RNA, 11 nt, Human
ucuuuugaccu

SEQ ID NO: 2628313 - RNA, 20 nt, Human
ucuuuugacauguggaaagu

SEQ ID NO: 2628314 - RNA, 21 nt, Human
ucuuuugcccuucacaguguu

SEQ ID NO: 2628315 - RNA, 20 nt, Human
ucuuuuggggaagugaggaa

SEQ ID NO: 2628316 - RNA, 16 nt, Human
ucuuuuggggaaguga

SEQ ID NO: 2628317 - RNA, 22 nt, Human
ucuuuugguaaagacuggcuuu

SEQ ID NO: 2628318 - RNA, 16 nt, Human
ucuuuuuauacuauua

SEQ ID NO: 2628319 - RNA, 19 nt, Human
ucuuuucuggaauguaauc

SEQ ID NO: 2628320 - RNA, 13 nt, Human
ucuuuucucugug

SEQ ID NO: 2628321 - RNA, 17 nt, Human
ucuuuucucugugcuuc

SEQ ID NO: 2628322 - RNA, 23 nt, Human
ucuuucacacuuccaccagccug

SEQ ID NO: 2628323 - RNA, 16 nt, Human
ucuuuucuuuagagca

SEQ ID NO: 2628324 - RNA, 23 nt, Human
ucuuuucuuuagagcauugccau

SEQ ID NO: 2628325 - RNA, 20 nt, Human
ucuuuucuugccucuguccc

SEQ ID NO: 2628326 - RNA, 16 nt, Human
ucuuuucuugccucug

SEQ ID NO: 2628327 - RNA, 19 nt, Human
ucuuucacagcuccuccca

SEQ ID NO: 2628328 - RNA, 18 nt, Human
ucuuucacagcuccuccc

SEQ ID NO: 2628329 - RNA, 20 nt, Human
ucuuucacagcuccucccac

SEQ ID NO: 2628330 - RNA, 10 nt, Human
ucuuucacau

SEQ ID NO: 2628331 - RNA, 18 nt, Human
ucuuuucuauuuucccuc

SEQ ID NO: 2628332 - RNA, 21 nt, Human
ucuuucaagugaaucuaaaag

SEQ ID NO: 2628333 - RNA, 15 nt, Human
ucuuucacagcuccu

SEQ ID NO: 2628334 - RNA, 14 nt, Human
ucuuucacagcucc

SEQ ID NO: 2628335 - RNA, 20 nt, Human
ucuuucacacuuccaccagc

SEQ ID NO: 2628336 - RNA, 21 nt, Human
ucuuucacacuuccaccagcc

SEQ ID NO: 2628337 - RNA, 15 nt, Human
ugaaaagacuccaaa

SEQ ID NO: 2628338 - RNA, 16 nt, Human
ugaaaagacuccaaag

SEQ ID NO: 2628339 - RNA, 17 nt, Human
ugaaaagacuccaaaga

SEQ ID NO: 2628340 - RNA, 19 nt, Human
ugaaaagacuccaaagaaa

SEQ ID NO: 2628341 - RNA, 17 nt, Human
ugaaaagacaucaagca

SEQ ID NO: 2628342 - RNA, 18 nt, Human
ugaaaagacaucaagcac

SEQ ID NO: 2628343 - RNA, 17 nt, Human
ugaaaacuuuucucaga

SEQ ID NO: 2628344 - RNA, 19 nt, Human
ugaaaacuuuaugcuaagu

SEQ ID NO: 2628345 - RNA, 19 nt, Human
ugaaaacucauuacuuuuc

SEQ ID NO: 2628346 - RNA, 19 nt, Human
ugaaaacguuuuauugugu

SEQ ID NO: 2628347 - RNA, 13 nt, Human
ucuuuuuucaaaa

SEQ ID NO: 2628348 - RNA, 20 nt, Human
ucuuuuuuagcauaaaauuu

SEQ ID NO: 2628349 - RNA, 13 nt, Human
ucuuuuuuaugug

SEQ ID NO: 2628350 - RNA, 15 nt, Human
ucuuuuuuagcauaa

SEQ ID NO: 2628351 - RNA, 16 nt, Human
ucuuuuuuagcauaaa

SEQ ID NO: 2628352 - RNA, 13 nt, Human
ucuuuuugcuguu

SEQ ID NO: 2628353 - RNA, 19 nt, Human
ucuuuuugacucuugcaau

SEQ ID NO: 2628354 - RNA, 19 nt, Human
ucuuuuuuaaaugaagaaa

SEQ ID NO: 2628355 - RNA, 16 nt, Human
ucuuuuugcuuugcuu

SEQ ID NO: 2628356 - RNA, 17 nt, Human
ucuuuuucuucuucccu

SEQ ID NO: 2628357 - RNA, 15 nt, Human
ucuuuuucuucuucc

SEQ ID NO: 2628358 - RNA, 12 nt, Human
ucuuuuucuucu

SEQ ID NO: 2628359 - RNA, 14 nt, Human
ucuuuuucuggacu

SEQ ID NO: 2628360 - RNA, 12 nt, Human
ucuuuuucaguu

SEQ ID NO: 2628361 - RNA, 15 nt, Human
ucuuuuuauugaauc

SEQ ID NO: 2628362 - RNA, 14 nt, Human
ucuuuuuauugaau

SEQ ID NO: 2628363 - RNA, 13 nt, Human
ucuuuuuauugaa

SEQ ID NO: 2628364 - RNA, 14 nt, Human
ucuuuuuaugcauu

SEQ ID NO: 2628365 - RNA, 15 nt, Human
ucuuuuguaauuuaa

SEQ ID NO: 2628366 - RNA, 21 nt, Human
ugaaagauucagguauguugc

SEQ ID NO: 2628367 - RNA, 18 nt, Human
ugaaagcagggacuugaa

SEQ ID NO: 2628368 - RNA, 19 nt, Human
ugaaagcagggacuugaac

SEQ ID NO: 2628369 - RNA, 23 nt, Human
ugaaagcagggacuugaacccau

SEQ ID NO: 2628370 - RNA, 17 nt, Human
ugaaaggaaagaggcuc

SEQ ID NO: 2628371 - RNA, 18 nt, Human
ugaaaggaagcuccacug

SEQ ID NO: 2628372 - RNA, 12 nt, Human
ugaaaggaaaga

SEQ ID NO: 2628373 - RNA, 11 nt, Human
ugaaagcugug

SEQ ID NO: 2628374 - RNA, 20 nt, Human
ugaaaccuuuuuuaagauuu

SEQ ID NO: 2628375 - RNA, 19 nt, Human
ugaaaccuuuuuuaagauu

SEQ ID NO: 2628376 - RNA, 18 nt, Human
ugaaaccuuuuuuaagau

SEQ ID NO: 2628377 - RNA, 17 nt, Human
ugaaaccuuuuuuaaga

SEQ ID NO: 2628378 - RNA, 16 nt, Human
ugaaaccuuuuuuaag

SEQ ID NO: 2628379 - RNA, 22 nt, Human
ugaaaccuuuagggcagcuugc

SEQ ID NO: 2628380 - RNA, 21 nt, Human
ugaaaccuuuagggcagcuug

SEQ ID NO: 2628381 - RNA, 20 nt, Human
ugaaaccuuuagggcagcuu

SEQ ID NO: 2628382 - RNA, 18 nt, Human
ugaaaccuuuagggcagc

SEQ ID NO: 2628383 - RNA, 20 nt, Human
ugaaaccuuauuuuuuccca

SEQ ID NO: 2628384 - RNA, 18 nt, Human
ugaaaccuuauuuuuucc

SEQ ID NO: 2628385 - RNA, 17 nt, Human
ugaaaccuuauuuuuuc

SEQ ID NO: 2628386 - RNA, 23 nt, Human
ugaaaccuuuuuuaagauuuuuc

SEQ ID NO: 2628387 - RNA, 21 nt, Human
ugaaaccuuuuuuaagauuuu

SEQ ID NO: 2628388 - RNA, 21 nt, Human
ugaaagauggcugugccucug

SEQ ID NO: 2628389 - RNA, 23 nt, Human
ugaaagauggcugugccucugcc

SEQ ID NO: 2628390 - RNA, 22 nt, Human
ugaaagauggcugugccucugc

SEQ ID NO: 2628391 - RNA, 23 nt, Human
ugaaacccugucucuacuaaaaa

SEQ ID NO: 2628392 - RNA, 16 nt, Human
ugaaaagauaaauuau

SEQ ID NO: 2628393 - RNA, 22 nt, Human
ugaaaagaggugugcaagagag

SEQ ID NO: 2628394 - RNA, 18 nt, Human
ugaaacccugucucuacu

SEQ ID NO: 2628395 - RNA, 22 nt, Human
ugaaaagacuccaaagaaaugu

SEQ ID NO: 2628396 - RNA, 13 nt, Human
ugaaaagaggugu

SEQ ID NO: 2628397 - RNA, 23 nt, Human
ugaaaagaggggaccagaagcca

SEQ ID NO: 2628398 - RNA, 18 nt, Human
ugaaagggcccagagagg

SEQ ID NO: 2628399 - RNA, 17 nt, Human
ugaaagggcccagagag

SEQ ID NO: 2628400 - RNA, 16 nt, Human
ugaaagggcccagaga

SEQ ID NO: 2628401 - RNA, 15 nt, Human
ugaaagggcccagag

SEQ ID NO: 2628402 - RNA, 14 nt, Human
ugaaaggagcccuu

SEQ ID NO: 2628403 - RNA, 15 nt, Human
ugaaaucauucauuu

SEQ ID NO: 2628404 - RNA, 14 nt, Human
ugaaauccugcuuc

SEQ ID NO: 2628405 - RNA, 22 nt, Human
ugaaauccuggguuuucuuaac

SEQ ID NO: 2628406 - RNA, 17 nt, Human
ugaaaucuuuuugcuuu

SEQ ID NO: 2628407 - RNA, 19 nt, Human
ugaaaucucagaauuccuu

SEQ ID NO: 2628408 - RNA, 19 nt, Human
ugaaaucuuacagcugggu

SEQ ID NO: 2628409 - RNA, 16 nt, Human
ugaaaucucagaauuc

SEQ ID NO: 2628410 - RNA, 16 nt, Human
ugaaaugaauauuuaa

SEQ ID NO: 2628411 - RNA, 19 nt, Human
ugaaaugaccucaagaugu

SEQ ID NO: 2628412 - RNA, 13 nt, Human
ugaaaugaaaaca

SEQ ID NO: 2628413 - RNA, 14 nt, Human
ugaaaugaaaacau

SEQ ID NO: 2628414 - RNA, 19 nt, Human
ugaaaugaaaacauguaau

SEQ ID NO: 2628415 - RNA, 20 nt, Human
ugaaaugaaaacauguaaua

SEQ ID NO: 2628416 - RNA, 20 nt, Human
ugaaaugaggucagagccug

SEQ ID NO: 2628417 - RNA, 19 nt, Human
ugaaaugaggucagagccu

SEQ ID NO: 2628418 - RNA, 22 nt, Human
ugaaaugaggucagagccugca

SEQ ID NO: 2628419 - RNA, 21 nt, Human
ugaaaugaggucagagccugc

SEQ ID NO: 2628420 - RNA, 23 nt, Human
ugaaaugaggucagagccugcag

SEQ ID NO: 2628421 - RNA, 19 nt, Human
ugaaaugcagagucaauga

SEQ ID NO: 2628422 - RNA, 14 nt, Human
ucuuagugugugca

SEQ ID NO: 2628423 - RNA, 16 nt, Human
ucuuaguggauguucu

SEQ ID NO: 2628424 - RNA, 21 nt, Human
ucuuaaaauaacuuauaucau

SEQ ID NO: 2628425 - RNA, 15 nt, Human
ucuuaaaauaacuua

SEQ ID NO: 2628426 - RNA, 14 nt, Human
ucuuaaaauaacuu

SEQ ID NO: 2628427 - RNA, 23 nt, Human
ucuuaaaaguugugauuccagau

SEQ ID NO: 2628428 - RNA, 13 nt, Human
ucuuaaaaagugg

SEQ ID NO: 2628429 - RNA, 20 nt, Human
ucuuaaaacauuaugaguuu

SEQ ID NO: 2628430 - RNA, 12 nt, Human
ucuuauaaauau

SEQ ID NO: 2628431 - RNA, 11 nt, Human
ucuuauaaaua

SEQ ID NO: 2628432 - RNA, 23 nt, Human
ucuuaguuuggauucuuauguag

SEQ ID NO: 2628433 - RNA, 21 nt, Human
ucuuaguuuggauucuuaugu

SEQ ID NO: 2628434 - RNA, 16 nt, Human
ucuuaguuuggauucu

SEQ ID NO: 2628435 - RNA, 16 nt, Human
ucuuaguucucacugu

SEQ ID NO: 2628436 - RNA, 15 nt, Human
ucuuaguucucacug

SEQ ID NO: 2628437 - RNA, 19 nt, Human
ucuuaaaauauauuucaga

SEQ ID NO: 2628438 - RNA, 20 nt, Human
ucuuaaaauauauuucagau

SEQ ID NO: 2628439 - RNA, 15 nt, Human
ucuuauacauuugau

SEQ ID NO: 2628440 - RNA, 14 nt, Human
ucuuauacauuuga

SEQ ID NO: 2628441 - RNA, 14 nt, Human
ucuuauggaauuga

SEQ ID NO: 2628442 - RNA, 15 nt, Human
ucuuauggaauugau

SEQ ID NO: 2628443 - RNA, 17 nt, Human
ucuuauggaauugauuu

SEQ ID NO: 2628444 - RNA, 18 nt, Human
ucuuauggaauugauuug

SEQ ID NO: 2628445 - RNA, 21 nt, Human
ucuuauggaauugauuugcau

SEQ ID NO: 2628446 - RNA, 22 nt, Human
ucuuauggaauugauuugcauu

SEQ ID NO: 2628447 - RNA, 13 nt, Human
ucuuaugggcugg

SEQ ID NO: 2628448 - RNA, 13 nt, Human
ucuucagggcacu

SEQ ID NO: 2628449 - RNA, 15 nt, Human
ucuucagggcacugc

SEQ ID NO: 2628450 - RNA, 15 nt, Human
ucuucaguaagccgu

SEQ ID NO: 2628451 - RNA, 17 nt, Human
ucuuaugcuuauaauau

SEQ ID NO: 2628452 - RNA, 14 nt, Human
ucuuaugcaauuuc

SEQ ID NO: 2628453 - RNA, 20 nt, Human
ucuuauauauauuucuuugu

SEQ ID NO: 2628454 - RNA, 22 nt, Human
ucuuauagucaauguuucuuuu

SEQ ID NO: 2628455 - RNA, 21 nt, Human
ucuuauaaauaugaagcucac

SEQ ID NO: 2628456 - RNA, 14 nt, Human
ucuuauaaauauga

SEQ ID NO: 2628457 - RNA, 13 nt, Human
ucuuauaaauaug

SEQ ID NO: 2628458 - RNA, 20 nt, Human
ucuuauagaauauuuauuac

SEQ ID NO: 2628459 - RNA, 19 nt, Human
ucuuauagaauauuuauua

SEQ ID NO: 2628460 - RNA, 13 nt, Human
ucuuauagaaagu

SEQ ID NO: 2628461 - RNA, 17 nt, Human
ucuucuagguucuaaaa

SEQ ID NO: 2628462 - RNA, 17 nt, Human
ucuucucaagugccuua

SEQ ID NO: 2628463 - RNA, 16 nt, Human
ucuucucaagugccuu

SEQ ID NO: 2628464 - RNA, 15 nt, Human
ucuucucaagugccu

SEQ ID NO: 2628465 - RNA, 13 nt, Human
ucuucucaagugc

SEQ ID NO: 2628466 - RNA, 13 nt, Human
ucuucuauuuugu

SEQ ID NO: 2628467 - RNA, 15 nt, Human
ucuucuauuuuauuc

SEQ ID NO: 2628468 - RNA, 16 nt, Human
ucuucuauuuuauucc

SEQ ID NO: 2628469 - RNA, 21 nt, Human
ucuucuccacuuucuagccag

SEQ ID NO: 2628470 - RNA, 19 nt, Human
ucuucuccacuuucuagcc

SEQ ID NO: 2628471 - RNA, 23 nt, Human
ucuucucagaaggcaaaugacuu

SEQ ID NO: 2628472 - RNA, 13 nt, Human
ucuucuccacugg

SEQ ID NO: 2628473 - RNA, 14 nt, Human
ucuuccaggcuggg

SEQ ID NO: 2628474 - RNA, 13 nt, Human
ucuuccagaaucc

SEQ ID NO: 2628475 - RNA, 20 nt, Human
ucuuccagaagugugauugg

SEQ ID NO: 2628476 - RNA, 19 nt, Human
ucuuccagaagugugauug

SEQ ID NO: 2628477 - RNA, 18 nt, Human
ucuuccagaagugugauu

SEQ ID NO: 2628478 - RNA, 17 nt, Human
ucuuccagaagugugau

SEQ ID NO: 2628479 - RNA, 16 nt, Human
ucuuccagaaguguga

SEQ ID NO: 2628480 - RNA, 11 nt, Human
ucuuccagaag

SEQ ID NO: 2628481 - RNA, 13 nt, Human
ucuucuaaacuuc

SEQ ID NO: 2628482 - RNA, 22 nt, Human
ucuucuaaacuuccccaucuuc

SEQ ID NO: 2628483 - RNA, 20 nt, Human
ucuucuaauuucaaaaauau

SEQ ID NO: 2628484 - RNA, 15 nt, Human
ucuucuaauuucaaa

SEQ ID NO: 2628485 - RNA, 12 nt, Human
ucuucuaaaugg

SEQ ID NO: 2628486 - RNA, 23 nt, Human
ucuucuagagccgugaugccucc

SEQ ID NO: 2628487 - RNA, 21 nt, Human
ucuuccacaagagcccaggcc

SEQ ID NO: 2628488 - RNA, 18 nt, Human
ucuuccaagcaaagguga

SEQ ID NO: 2628489 - RNA, 24 nt, Human
ucuuccaagcaaaggugaagagac

SEQ ID NO: 2628490 - RNA, 16 nt, Human
ucuucaguaagccgug

SEQ ID NO: 2628491 - RNA, 23 nt, Human
ucuucagguggaaaaacaucuga

SEQ ID NO: 2628492 - RNA, 14 nt, Human
ucuucagguucuua

SEQ ID NO: 2628493 - RNA, 19 nt, Human
ucuucagugggagaaaaca

SEQ ID NO: 2628494 - RNA, 21 nt, Human
ucuucaggguccugagauuua

SEQ ID NO: 2628495 - RNA, 16 nt, Human
ucuucagguggaaaaa

SEQ ID NO: 2628496 - RNA, 15 nt, Human
ucuucagggggccag

SEQ ID NO: 2628497 - RNA, 15 nt, Human
ucuugugaaggcagg

SEQ ID NO: 2628498 - RNA, 21 nt, Human
ucuugugacauauuaugucuu

SEQ ID NO: 2628499 - RNA, 15 nt, Human
ucuugucucugggcu

SEQ ID NO: 2628500 - RNA, 14 nt, Human
ucuugucucugggc

SEQ ID NO: 2628501 - RNA, 13 nt, Human
ucuugucucuggg

SEQ ID NO: 2628502 - RNA, 12 nt, Human
ucuugucucugg

SEQ ID NO: 2628503 - RNA, 22 nt, Human
ucuuguuuuuccacuacugcua

SEQ ID NO: 2628504 - RNA, 20 nt, Human
ucuuucaagugaaucuaaaa

SEQ ID NO: 2628505 - RNA, 21 nt, Human
ucuuguuuuuuuuuuccacuu

SEQ ID NO: 2628506 - RNA, 18 nt, Human
ucuuguuuuuuuuuucca

SEQ ID NO: 2628507 - RNA, 11 nt, Human
ucuugcucugc

SEQ ID NO: 2628508 - RNA, 18 nt, Human
ucuugcucaaaaaucugu

SEQ ID NO: 2628509 - RNA, 13 nt, Human
ucuugcucugcug

SEQ ID NO: 2628510 - RNA, 12 nt, Human
ucuugcucugcu

SEQ ID NO: 2628511 - RNA, 22 nt, Human
ucuuguauuaagaaugaaauac

SEQ ID NO: 2628512 - RNA, 23 nt, Human
ucuuguccaugugguucuucaaa

SEQ ID NO: 2628513 - RNA, 22 nt, Human
ucuuguccaugugguucuucaa

SEQ ID NO: 2628514 - RNA, 22 nt, Human
ucuuguauuaaguuguuaauaa

SEQ ID NO: 2628515 - RNA, 18 nt, Human
ucuuguauuaaguuguua

SEQ ID NO: 2628516 - RNA, 12 nt, Human
ucuugccuucag

SEQ ID NO: 2628517 - RNA, 16 nt, Human
ucuuguauuaaguugu

SEQ ID NO: 2628518 - RNA, 21 nt, Human
ucuucucagaaggcaaaugac

SEQ ID NO: 2628519 - RNA, 16 nt, Human
ucuucuccacuggaug

SEQ ID NO: 2628520 - RNA, 12 nt, Human
ucuucuccaggc

SEQ ID NO: 2628521 - RNA, 14 nt, Human
ucuucuccaggcug

SEQ ID NO: 2628522 - RNA, 13 nt, Human
ucuucuccaggcu

SEQ ID NO: 2628523 - RNA, 18 nt, Human
ucuugaacuccuggccuc

SEQ ID NO: 2628524 - RNA, 17 nt, Human
ucuugaacuccuggccu

SEQ ID NO: 2628525 - RNA, 16 nt, Human
ucuugaacuccuggcc

SEQ ID NO: 2628526 - RNA, 15 nt, Human
ucuucuccaggcugu

SEQ ID NO: 2628527 - RNA, 15 nt, Human
ucuugaacugagcuu

SEQ ID NO: 2628528 - RNA, 13 nt, Human
ucuugaauuuaau

SEQ ID NO: 2628529 - RNA, 14 nt, Human
ucuucuccaggaug

SEQ ID NO: 2628530 - RNA, 21 nt, Human
ucuugaauuguaaggaaugau

SEQ ID NO: 2628531 - RNA, 22 nt, Human
ucuugacaccagcuguucuguc

SEQ ID NO: 2628532 - RNA, 19 nt, Human
ucuugacauucaaggcauu

SEQ ID NO: 2628533 - RNA, 19 nt, Human
ucuugaccaagcaggaagc

SEQ ID NO: 2628534 - RNA, 21 nt, Human
ucuugaauuuaauaaucugua

SEQ ID NO: 2628535 - RNA, 23 nt, Human
ucuugaauuuaauaaucuguagg

SEQ ID NO: 2628536 - RNA, 21 nt, Human
ucuugacaccagcuguucugu

SEQ ID NO: 2628537 - RNA, 20 nt, Human
ucuugacaccagcuguucug

SEQ ID NO: 2628538 - RNA, 18 nt, Human
ucuugaauuucuaaaaaa

SEQ ID NO: 2628539 - RNA, 19 nt, Human
ucuugccucugugcugugu

SEQ ID NO: 2628540 - RNA, 16 nt, Human
ucuugccucugugcug

SEQ ID NO: 2628541 - RNA, 15 nt, Human
ucuugccucugugcu

SEQ ID NO: 2628542 - RNA, 14 nt, Human
ucuugccucugugc

SEQ ID NO: 2628543 - RNA, 21 nt, Human
ucuugccucuguccccuucuc

SEQ ID NO: 2628544 - RNA, 16 nt, Human
ucuugccucugucccc

SEQ ID NO: 2628545 - RNA, 13 nt, Human
ucuugccucugug

SEQ ID NO: 2628546 - RNA, 22 nt, Human
ucuugccucuguccccuucucu

SEQ ID NO: 2628547 - RNA, 12 nt, Human
ucuugccucugu

SEQ ID NO: 2628548 - RNA, 11 nt, Human
ucuugacccua

SEQ ID NO: 2628549 - RNA, 21 nt, Human
ucuugaccaagcaggaagcuc

SEQ ID NO: 2628550 - RNA, 20 nt, Human
ucuugacgagugugaagcuu

SEQ ID NO: 2628551 - RNA, 24 nt, Human
ucuggagacagccccagagcaggg

SEQ ID NO: 2628552 - RNA, 22 nt, Human
ucuggagacagccccagagcag

SEQ ID NO: 2628553 - RNA, 20 nt, Human
ucuggagacagccccagagc

SEQ ID NO: 2628554 - RNA, 18 nt, Human
ucuggagacagccccaga

SEQ ID NO: 2628555 - RNA, 17 nt, Human
ucuggagacagccccag

SEQ ID NO: 2628556 - RNA, 16 nt, Human
ucuggagacagcccca

SEQ ID NO: 2628557 - RNA, 15 nt, Human
ucuggagacagcccc

SEQ ID NO: 2628558 - RNA, 23 nt, Human
ucuggagaagcucccaggaacaa

SEQ ID NO: 2628559 - RNA, 15 nt, Human
ucuggagaccaggga

SEQ ID NO: 2628560 - RNA, 19 nt, Human
ucuggagaccagggagccu

SEQ ID NO: 2628561 - RNA, 20 nt, Human
ucuggagaccagggagccuu

SEQ ID NO: 2628562 - RNA, 15 nt, Human
ucuggagagaaacaa

SEQ ID NO: 2628563 - RNA, 12 nt, Human
ucuggagagaaa

SEQ ID NO: 2628564 - RNA, 21 nt, Human
ucuggagaccagggagccuuu

SEQ ID NO: 2628565 - RNA, 14 nt, Human
ucuggagagcuaga

SEQ ID NO: 2628566 - RNA, 13 nt, Human
ucuggagagcuag

SEQ ID NO: 2628567 - RNA, 23 nt, Human
ucuggagcccacuguacuugcuc

SEQ ID NO: 2628568 - RNA, 22 nt, Human
ucugcacaugucuuguacaugu

SEQ ID NO: 2628569 - RNA, 21 nt, Human
ucugcacaugucuuguacaug

SEQ ID NO: 2628570 - RNA, 13 nt, Human
ucugcacccaggg

SEQ ID NO: 2628571 - RNA, 15 nt, Human
ucugcacccaggggu

SEQ ID NO: 2628572 - RNA, 15 nt, Human
ucugcaccccccugg

SEQ ID NO: 2628573 - RNA, 20 nt, Human
ucugcaccccuucucuccuc

SEQ ID NO: 2628574 - RNA, 19 nt, Human
ucugcaccccuucucuccu

SEQ ID NO: 2628575 - RNA, 18 nt, Human
ucugcaccccuucucucc

SEQ ID NO: 2628576 - RNA, 15 nt, Human
ucugcaccccuucuc

SEQ ID NO: 2628577 - RNA, 16 nt, Human
ucugcaccccccuggg

SEQ ID NO: 2628578 - RNA, 17 nt, Human
ucugcaccccccugggc

SEQ ID NO: 2628579 - RNA, 18 nt, Human
ucugcaccccccugggcu

SEQ ID NO: 2628580 - RNA, 17 nt, Human
ucugcacccuccacccu

SEQ ID NO: 2628581 - RNA, 16 nt, Human
ucugcacccuccaccc

SEQ ID NO: 2628582 - RNA, 15 nt, Human
ucugcacccuccacc

SEQ ID NO: 2628583 - RNA, 14 nt, Human
ucugcacccuccac

SEQ ID NO: 2628584 - RNA, 13 nt, Human
ucugcacccucca

SEQ ID NO: 2628585 - RNA, 12 nt, Human
ucugcacccucc

SEQ ID NO: 2628586 - RNA, 22 nt, Human
ucugcaccccuucucuccuccc

SEQ ID NO: 2628587 - RNA, 21 nt, Human
ucugcaccccuucucuccucc

SEQ ID NO: 2628588 - RNA, 19 nt, Human
ucuggagaagcucccagga

SEQ ID NO: 2628589 - RNA, 21 nt, Human
ucugcacccuccacccugucc

SEQ ID NO: 2628590 - RNA, 19 nt, Human
ucugcacccuccacccugu

SEQ ID NO: 2628591 - RNA, 18 nt, Human
ucugcacccuccacccug

SEQ ID NO: 2628592 - RNA, 22 nt, Human
ucuggagaagcucccaggaaca

SEQ ID NO: 2628593 - RNA, 20 nt, Human
ucuggagaagcucccaggaa

SEQ ID NO: 2628594 - RNA, 12 nt, Human
ucuggagacagc

SEQ ID NO: 2628595 - RNA, 16 nt, Human
ucuggagcccuugggu

SEQ ID NO: 2628596 - RNA, 12 nt, Human
ucuggagcccuu

SEQ ID NO: 2628597 - RNA, 13 nt, Human
ucuggagcccuug

SEQ ID NO: 2628598 - RNA, 21 nt, Human
ucuggaggggagggggauccg

SEQ ID NO: 2628599 - RNA, 14 nt, Human
ucuggaggggaggg

SEQ ID NO: 2628600 - RNA, 23 nt, Human
ucuggaggggccccugcuucucc

SEQ ID NO: 2628601 - RNA, 17 nt, Human
ucuggaggggccccugc

SEQ ID NO: 2628602 - RNA, 15 nt, Human
ucuggaggggccccu

SEQ ID NO: 2628603 - RNA, 23 nt, Human
ucuggccuucggccuccauccug

SEQ ID NO: 2628604 - RNA, 13 nt, Human
ucuggcucugucu

SEQ ID NO: 2628605 - RNA, 22 nt, Human
ucuggcuagaggccagccccac

SEQ ID NO: 2628606 - RNA, 17 nt, Human
ucuggcuaugcauuuga

SEQ ID NO: 2628607 - RNA, 17 nt, Human
ucuggcuagaggccagc

SEQ ID NO: 2628608 - RNA, 21 nt, Human
ucuggcuagaggccagcccca

SEQ ID NO: 2628609 - RNA, 14 nt, Human
ucuggcuaugcauu

SEQ ID NO: 2628610 - RNA, 14 nt, Human
ucuggccuuuuccu

SEQ ID NO: 2628611 - RNA, 18 nt, Human
ucuggcgacaguuuuccu

SEQ ID NO: 2628612 - RNA, 22 nt, Human
ucuggcgacaguuuuccuucuc

SEQ ID NO: 2628613 - RNA, 16 nt, Human
ucuggcuagaggccag

SEQ ID NO: 2628614 - RNA, 15 nt, Human
ucugguuuugcuauu

SEQ ID NO: 2628615 - RNA, 15 nt, Human
ucugguuuuaacaau

SEQ ID NO: 2628616 - RNA, 13 nt, Human
ucugguuuuaaca

SEQ ID NO: 2628617 - RNA, 23 nt, Human
ucugguuuggggcgaggcagagg

SEQ ID NO: 2628618 - RNA, 13 nt, Human
ucugguuuggggc

SEQ ID NO: 2628619 - RNA, 22 nt, Human
ucugguuugacuccgcuggagg

SEQ ID NO: 2628620 - RNA, 18 nt, Human
ucugguuugacuccgcug

SEQ ID NO: 2628621 - RNA, 15 nt, Human
ucugguuucaccgag

SEQ ID NO: 2628622 - RNA, 12 nt, Human
ucuguaaaaucu

SEQ ID NO: 2628623 - RNA, 11 nt, Human
ucuguaaaauc

SEQ ID NO: 2628624 - RNA, 17 nt, Human
ucuguaaaaucuuucuu

SEQ ID NO: 2628625 - RNA, 14 nt, Human
ucuguaaaaucuuu

SEQ ID NO: 2628626 - RNA, 13 nt, Human
ucuguaaaaucuu

SEQ ID NO: 2628627 - RNA, 14 nt, Human
ucugguuuugcuau

SEQ ID NO: 2628628 - RNA, 15 nt, Human
ucuguaagcugaagu

SEQ ID NO: 2628629 - RNA, 23 nt, Human
ucuguacagagcccacgccccca

SEQ ID NO: 2628630 - RNA, 20 nt, Human
ucuguaaucucguuucaaaa

SEQ ID NO: 2628631 - RNA, 15 nt, Human
ucuguaaucucguuu

SEQ ID NO: 2628632 - RNA, 12 nt, Human
ucugggacacag

SEQ ID NO: 2628633 - RNA, 14 nt, Human
ucugggaagggaag

SEQ ID NO: 2628634 - RNA, 18 nt, Human
ucugggaacugugccuuu

SEQ ID NO: 2628635 - RNA, 22 nt, Human
ucugggaaauggcuugaagcca

SEQ ID NO: 2628636 - RNA, 22 nt, Human
ucugggaaaugagaaggcagcc

SEQ ID NO: 2628637 - RNA, 13 nt, Human
ucugggacacagu

SEQ ID NO: 2628638 - RNA, 16 nt, Human
ucuggcucuuccaggc

SEQ ID NO: 2628639 - RNA, 15 nt, Human
ucuggcucuuccagg

SEQ ID NO: 2628640 - RNA, 17 nt, Human
ucuggcucuuccaggcu

SEQ ID NO: 2628641 - RNA, 23 nt, Human
ucuggcuuucuccgacugcuagg

SEQ ID NO: 2628642 - RNA, 17 nt, Human
ucugggaaaauacccca

SEQ ID NO: 2628643 - RNA, 18 nt, Human
ucugggaaauaagagaga

SEQ ID NO: 2628644 - RNA, 17 nt, Human
ucuguuaugcugugaca

SEQ ID NO: 2628645 - RNA, 18 nt, Human
ucuguuauuuagacucau

SEQ ID NO: 2628646 - RNA, 15 nt, Human
ucuguuauuaacaaa

SEQ ID NO: 2628647 - RNA, 15 nt, Human
ucuguuauauaaaug

SEQ ID NO: 2628648 - RNA, 18 nt, Human
ucuguuauauaaaugguu

SEQ ID NO: 2628649 - RNA, 21 nt, Human
ucuguucacuuuuccucccuc

SEQ ID NO: 2628650 - RNA, 22 nt, Human
ucuguucacuuuuccucccuca

SEQ ID NO: 2628651 - RNA, 19 nt, Human
ucuguucacuuuuccuccc

SEQ ID NO: 2628652 - RNA, 13 nt, Human
ucuguucaccuuc

SEQ ID NO: 2628653 - RNA, 20 nt, Human
ucuguuuuauaauuuuguga

SEQ ID NO: 2628654 - RNA, 22 nt, Human
ucuguuuuauaauuuugugaag

SEQ ID NO: 2628655 - RNA, 15 nt, Human
ucuguuuuaugacuu

SEQ ID NO: 2628656 - RNA, 16 nt, Human
ucuguuuuaugacuuc

SEQ ID NO: 2628657 - RNA, 13 nt, Human
ucuguuuuaugac

SEQ ID NO: 2628658 - RNA, 17 nt, Human
ucuguuuuaugacuuca

SEQ ID NO: 2628659 - RNA, 12 nt, Human
ucuguucagugu

SEQ ID NO: 2628660 - RNA, 17 nt, Human
ucuguuuuccuuucuca

SEQ ID NO: 2628661 - RNA, 16 nt, Human
ucuguuuuccuuucuc

SEQ ID NO: 2628662 - RNA, 13 nt, Human
ucuguuuuccuuu

SEQ ID NO: 2628663 - RNA, 18 nt, Human
ucuuaaaaaguggaaaaa

SEQ ID NO: 2628664 - RNA, 15 nt, Human
ucuguguguuuaugu

SEQ ID NO: 2628665 - RNA, 16 nt, Human
ucuguguguuuaugug

SEQ ID NO: 2628666 - RNA, 11 nt, Human
ucugugucuuu

SEQ ID NO: 2628667 - RNA, 22 nt, Human
ucuguguguguguauguggggg

SEQ ID NO: 2628668 - RNA, 23 nt, Human
ucuguguuggcccaagcucuugu

SEQ ID NO: 2628669 - RNA, 21 nt, Human
ucuguguuggcccaagcucuu

SEQ ID NO: 2628670 - RNA, 16 nt, Human
ucuguguugccaagcu

SEQ ID NO: 2628671 - RNA, 14 nt, Human
ucuguguugccaag

SEQ ID NO: 2628672 - RNA, 19 nt, Human
ucuguguguuuaugugugu

SEQ ID NO: 2628673 - RNA, 20 nt, Human
ucuguguguuuaugugugug

SEQ ID NO: 2628674 - RNA, 21 nt, Human
ucuguuaccaugucacugugg

SEQ ID NO: 2628675 - RNA, 19 nt, Human
ucuguuaccaugucacugu

SEQ ID NO: 2628676 - RNA, 16 nt, Human
ucuguguuuuugaaau

SEQ ID NO: 2628677 - RNA, 13 nt, Human
ucuguguuuuaau

SEQ ID NO: 2628678 - RNA, 14 nt, Human
ucuguguuuugaau

SEQ ID NO: 2628679 - RNA, 15 nt, Human
ucuguguuuuugaaa

SEQ ID NO: 2628680 - RNA, 22 nt, Human
ucuguggguuucuaaagcugcc

SEQ ID NO: 2628681 - RNA, 15 nt, Human
ucugucccuuggagc

SEQ ID NO: 2628682 - RNA, 20 nt, Human
ucuguccguuuacuccaagg

SEQ ID NO: 2628683 - RNA, 22 nt, Human
ucugucccuucugucccucaca

SEQ ID NO: 2628684 - RNA, 23 nt, Human
ucugucccuucugucccucacag

SEQ ID NO: 2628685 - RNA, 19 nt, Human
ucuguccgagcuuugaaaa

SEQ ID NO: 2628686 - RNA, 14 nt, Human
ucuguacauagccu

SEQ ID NO: 2628687 - RNA, 18 nt, Human
ucuguacauagccuauau

SEQ ID NO: 2628688 - RNA, 17 nt, Human
ucuguacgucugacagg

SEQ ID NO: 2628689 - RNA, 14 nt, Human
ucugucccucacag

SEQ ID NO: 2628690 - RNA, 15 nt, Human
ucugucccucacagc

SEQ ID NO: 2628691 - RNA, 19 nt, Human
ucugucccuucugucccuc

SEQ ID NO: 2628692 - RNA, 20 nt, Human
ucugucccuucugucccuca

SEQ ID NO: 2628693 - RNA, 23 nt, Human
ucuguggguuucuaaagcugcca

SEQ ID NO: 2628694 - RNA, 19 nt, Human
ucugugguuuuccccuccc

SEQ ID NO: 2628695 - RNA, 17 nt, Human
ucuguguccuucccugc

SEQ ID NO: 2628696 - RNA, 15 nt, Human
ucuguguccuucccu

SEQ ID NO: 2628697 - RNA, 11 nt, Human
ucuguguccuu

SEQ ID NO: 2628698 - RNA, 14 nt, Human
ucuguguacaaaga

SEQ ID NO: 2628699 - RNA, 18 nt, Human
ucuguguccuucccugca

SEQ ID NO: 2628700 - RNA, 23 nt, Human
ucugugguuuuccccucccuggg

SEQ ID NO: 2628701 - RNA, 22 nt, Human
ucugugguuuuccccucccugg

SEQ ID NO: 2628702 - RNA, 21 nt, Human
ucugugguuuuccccucccug

SEQ ID NO: 2628703 - RNA, 20 nt, Human
ucugugguuuuccccucccu

SEQ ID NO: 2628704 - RNA, 22 nt, Human
ucugugucagguggggcagcuu

SEQ ID NO: 2628705 - RNA, 15 nt, Human
ucuguguguguguau

SEQ ID NO: 2628706 - RNA, 18 nt, Human
ucuguguguguguaugug

SEQ ID NO: 2628707 - RNA, 19 nt, Human
ucuguguguguguaugugg

SEQ ID NO: 2628708 - RNA, 21 nt, Human
ucuguguguguguaugugggg

SEQ ID NO: 2628709 - RNA, 21 nt, Human
ucugugucuuucacagcuccu

SEQ ID NO: 2628710 - RNA, 12 nt, Human
ucugugucuugu

SEQ ID NO: 2628711 - RNA, 13 nt, Human
ucugugucugugu

SEQ ID NO: 2628712 - RNA, 15 nt, Human
ucugugucuguguuu

SEQ ID NO: 2628713 - RNA, 11 nt, Human
ucugugucucu

SEQ ID NO: 2628714 - RNA, 12 nt, Human
ucugugucucuu

SEQ ID NO: 2628715 - RNA, 12 nt, Human
ucugugucugug

SEQ ID NO: 2628716 - RNA, 18 nt, Human
uggccacuccgagaggug

SEQ ID NO: 2628717 - RNA, 14 nt, Human
uggccacuccgaga

SEQ ID NO: 2628718 - RNA, 22 nt, Human
uggccacuccagaccccuggcu

SEQ ID NO: 2628719 - RNA, 20 nt, Human
uggccacuccagaccccugg

SEQ ID NO: 2628720 - RNA, 12 nt, Human
uggcagugguuu

SEQ ID NO: 2628721 - RNA, 20 nt, Human
uggcagugggagcugccugu

SEQ ID NO: 2628722 - RNA, 16 nt, Human
uggccagaagucaagc

SEQ ID NO: 2628723 - RNA, 20 nt, Human
uggccacugcacagagcucu

SEQ ID NO: 2628724 - RNA, 21 nt, Human
uggccacuugggucuucccug

SEQ ID NO: 2628725 - RNA, 23 nt, Human
uggccacuccgagaggugggcca

SEQ ID NO: 2628726 - RNA, 20 nt, Human
uggccacuccgagagguggg

SEQ ID NO: 2628727 - RNA, 18 nt, Human
uggccacugcacagagcu

SEQ ID NO: 2628728 - RNA, 17 nt, Human
uggccacugcacagagc

SEQ ID NO: 2628729 - RNA, 14 nt, Human
uggccacugcacag

SEQ ID NO: 2628730 - RNA, 13 nt, Human
uggccagacacag

SEQ ID NO: 2628731 - RNA, 18 nt, Human
uggccagacacaggcccu

SEQ ID NO: 2628732 - RNA, 12 nt, Human
uggccagacaca

SEQ ID NO: 2628733 - RNA, 19 nt, Human
uggccacugcacagagcuc

SEQ ID NO: 2628734 - RNA, 20 nt, Human
uggccagaagggggccauga

SEQ ID NO: 2628735 - RNA, 13 nt, Human
uggccagagagcc

SEQ ID NO: 2628736 - RNA, 23 nt, Human
uggccagagagccuggugcugcu

SEQ ID NO: 2628737 - RNA, 18 nt, Human
uggcaggcuggccagucc

SEQ ID NO: 2628738 - RNA, 15 nt, Human
uggcaggcuggccag

SEQ ID NO: 2628739 - RNA, 19 nt, Human
uggcaggcagcgccaagca

SEQ ID NO: 2628740 - RNA, 15 nt, Human
uggcaggcagcgcca

SEQ ID NO: 2628741 - RNA, 23 nt, Human
uggcaggcagcgccaagcaaccu

SEQ ID NO: 2628742 - RNA, 14 nt, Human
uggcaggcuggcca

SEQ ID NO: 2628743 - RNA, 13 nt, Human
uggcaggcuggcc

SEQ ID NO: 2628744 - RNA, 12 nt, Human
uggcaggcuggc

SEQ ID NO: 2628745 - RNA, 19 nt, Human
uggcagugggagcugccug

SEQ ID NO: 2628746 - RNA, 16 nt, Human
uggcagugggagcugc

SEQ ID NO: 2628747 - RNA, 15 nt, Human
uggcagugggagcug

SEQ ID NO: 2628748 - RNA, 14 nt, Human
uggcagugggagcu

SEQ ID NO: 2628749 - RNA, 13 nt, Human
uggaugccugauu

SEQ ID NO: 2628750 - RNA, 16 nt, Human
uggcacugagcccccc

SEQ ID NO: 2628751 - RNA, 14 nt, Human
uggaugccuggugg

SEQ ID NO: 2628752 - RNA, 21 nt, Human
uggaugccaauauuaaaucug

SEQ ID NO: 2628753 - RNA, 15 nt, Human
uggaugcauuucucu

SEQ ID NO: 2628754 - RNA, 22 nt, Human
uggaugcauguuuuccagcucc

SEQ ID NO: 2628755 - RNA, 20 nt, Human
uggaugcauguuuuccagcu

SEQ ID NO: 2628756 - RNA, 20 nt, Human
uggaugccaauauuaaaucu

SEQ ID NO: 2628757 - RNA, 23 nt, Human
uggaugcagugcucgcuguugcu

SEQ ID NO: 2628758 - RNA, 15 nt, Human
uggaugcagugcucg

SEQ ID NO: 2628759 - RNA, 16 nt, Human
uggcacugcuuccagu

SEQ ID NO: 2628760 - RNA, 14 nt, Human
uggcacugcuucca

SEQ ID NO: 2628761 - RNA, 18 nt, Human
uggcacugcuuccaguga

SEQ ID NO: 2628762 - RNA, 21 nt, Human
uggcacuuagcuaucagaaga

SEQ ID NO: 2628763 - RNA, 12 nt, Human
uggcacugcugu

SEQ ID NO: 2628764 - RNA, 13 nt, Human
uggcacugccaug

SEQ ID NO: 2628765 - RNA, 18 nt, Human
uggcacugagccccccca

SEQ ID NO: 2628766 - RNA, 17 nt, Human
uggcacugagccccccc

SEQ ID NO: 2628767 - RNA, 19 nt, Human
uggcacugcauacaaucug

SEQ ID NO: 2628768 - RNA, 22 nt, Human
uggcagcugcgguccacccagg

SEQ ID NO: 2628769 - RNA, 21 nt, Human
uggcagcugcgguccacccag

SEQ ID NO: 2628770 - RNA, 20 nt, Human
uggcaggauggccuggccag

SEQ ID NO: 2628771 - RNA, 21 nt, Human
uggcagaagacaccagagcag

SEQ ID NO: 2628772 - RNA, 23 nt, Human
uggcagcugcgguccacccagga

SEQ ID NO: 2628773 - RNA, 17 nt, Human
uggcacuugcaucugug

SEQ ID NO: 2628774 - RNA, 16 nt, Human
uggcacuugcaucugu

SEQ ID NO: 2628775 - RNA, 14 nt, Human
uggcacuugcaucu

SEQ ID NO: 2628776 - RNA, 21 nt, Human
uggcacuuuuucauuugccua

SEQ ID NO: 2628777 - RNA, 16 nt, Human
uggcacuuuuucauuu

SEQ ID NO: 2628778 - RNA, 16 nt, Human
uggcacuuugaagggg

SEQ ID NO: 2628779 - RNA, 11 nt, Human
uggcacuuuga

SEQ ID NO: 2628780 - RNA, 20 nt, Human
uggcagaagacaccagagca

SEQ ID NO: 2628781 - RNA, 18 nt, Human
uggcagaagacaccagag

SEQ ID NO: 2628782 - RNA, 14 nt, Human
uggcagaagacacc

SEQ ID NO: 2628783 - RNA, 13 nt, Human
uggcagaagacac

SEQ ID NO: 2628784 - RNA, 14 nt, Human
uggcagaacugagc

SEQ ID NO: 2628785 - RNA, 23 nt, Human
uggcagaaagcaaaugugaccug

SEQ ID NO: 2628786 - RNA, 16 nt, Human
uggcagaacugagcuc

SEQ ID NO: 2628787 - RNA, 20 nt, Human
uggcagaacugagcuccucu

SEQ ID NO: 2628788 - RNA, 21 nt, Human
uggcagaacugagcuccucug

SEQ ID NO: 2628789 - RNA, 16 nt, Human
uggagacuuagggcac

SEQ ID NO: 2628790 - RNA, 17 nt, Human
uggagacugucucaaga

SEQ ID NO: 2628791 - RNA, 21 nt, Human
uggagacuuagggcaccaggg

SEQ ID NO: 2628792 - RNA, 12 nt, Human
uggagagaaaac

SEQ ID NO: 2628793 - RNA, 22 nt, Human
uggagagaaacaauaaagagau

SEQ ID NO: 2628794 - RNA, 21 nt, Human
uggagagaaacaauaaagaga

SEQ ID NO: 2628795 - RNA, 12 nt, Human
uggagagaaggc

SEQ ID NO: 2628796 - RNA, 13 nt, Human
uggagagaaguuu

SEQ ID NO: 2628797 - RNA, 11 nt, Human
uggagagaagu

SEQ ID NO: 2628798 - RNA, 21 nt, Human
uggagagaaggccucccuagc

SEQ ID NO: 2628799 - RNA, 15 nt, Human
uggagagaaggccuc

SEQ ID NO: 2628800 - RNA, 23 nt, Human
uggagagaaguuucuggcccugg

SEQ ID NO: 2628801 - RNA, 12 nt, Human
uggagagagggg

SEQ ID NO: 2628802 - RNA, 13 nt, Human
uggagagagggga

SEQ ID NO: 2628803 - RNA, 17 nt, Human
uggaauuauuuuaaaag
